United States Patent Application Publication US 2008/0318210 A1 - sequence listing, part 2

SEQ ID NO: 39418 - RNA, 22 nt, Homo sapiens
cuuuuguggaucuucuguugcu

SEQ ID NO: 39419 - RNA, 22 nt, Homo sapiens
cuuggcauugccccuggaauuu

SEQ ID NO: 39420 - RNA, 22 nt, Homo sapiens
cuuggcacugcucacccuccuu

SEQ ID NO: 39421 - RNA, 22 nt, Homo sapiens
cuuggcaugaagaauaauuuuu

SEQ ID NO: 39422 - RNA, 19 nt, Homo sapiens
cuugccccauucauccucu

SEQ ID NO: 39423 - RNA, 22 nt, Homo sapiens
auuggaguuguacgcacgcuca

SEQ ID NO: 39424 - RNA, 22 nt, Homo sapiens
auuggcaauggcaaagcagagu

SEQ ID NO: 39425 - RNA, 22 nt, Homo sapiens
auuggcaauagcuuucuuacua

SEQ ID NO: 39426 - RNA, 22 nt, Homo sapiens
auugcuucugauuuuaaaugag

SEQ ID NO: 39427 - RNA, 22 nt, Homo sapiens
auuggcaagauagcauaugagg

SEQ ID NO: 39428 - RNA, 20 nt, Homo sapiens
auuuggcauaguuuaagcaa

SEQ ID NO: 39429 - RNA, 22 nt, Homo sapiens
auuuggcaacguagggaggcau

SEQ ID NO: 39430 - RNA, 22 nt, Homo sapiens
auuuggguuuuacaucaggcua

SEQ ID NO: 39431 - RNA, 22 nt, Homo sapiens
auuguacauacaccggugugua

SEQ ID NO: 39432 - RNA, 22 nt, Homo sapiens
auugcaaagcguagacucuaaa

SEQ ID NO: 39433 - RNA, 22 nt, Homo sapiens
auugcccauaaggauauuguca

SEQ ID NO: 39434 - RNA, 22 nt, Homo sapiens
auugcccaggcuggagugcagu

SEQ ID NO: 39435 - RNA, 20 nt, Homo sapiens
augugcaguguggcaaccaa

SEQ ID NO: 39436 - RNA, 22 nt, Homo sapiens
augugacagugguuuuaagcgu

SEQ ID NO: 39437 - RNA, 22 nt, Homo sapiens
augugacuuuuuccugugccuu

SEQ ID NO: 39438 - RNA, 22 nt, Homo sapiens
augugaugguuaauuuuaugug

SEQ ID NO: 39439 - RNA, 22 nt, Homo sapiens
augugacuggaucauggggacg

SEQ ID NO: 39440 - RNA, 22 nt, Homo sapiens
auugaggcauguaccaaugguc

SEQ ID NO: 39441 - RNA, 22 nt, Homo sapiens
cacaaugucuaagauguuucua

SEQ ID NO: 39442 - RNA, 22 nt, Homo sapiens
caaugugcuuggggcacaugag

SEQ ID NO: 39443 - RNA, 22 nt, Homo sapiens
caaugcauuauucucccacuuc

SEQ ID NO: 39444 - RNA, 21 nt, Homo sapiens
caauggcacaaucucugcuca

SEQ ID NO: 39445 - RNA, 22 nt, Homo sapiens
caagugcucuaggauccugagu

SEQ ID NO: 39446 - RNA, 22 nt, Homo sapiens
caccgagguuggagugcagugg

SEQ ID NO: 39447 - RNA, 19 nt, Homo sapiens
caccgccugcccccugcug

SEQ ID NO: 39448 - RNA, 22 nt, Homo sapiens
caagagagcugaugguuuuaaa

SEQ ID NO: 39449 - RNA, 22 nt, Homo sapiens
cagaugcaugaccugggcuugg

SEQ ID NO: 39450 - RNA, 22 nt, Homo sapiens
cagauaguuguagguguguggc

SEQ ID NO: 39451 - RNA, 20 nt, Homo sapiens
cagagcaaagcaguccuggc

SEQ ID NO: 39452 - RNA, 18 nt, Homo sapiens
cacuuggcuuugccccuc

SEQ ID NO: 39453 - RNA, 21 nt, Homo sapiens
cacugguguugcuauaucaaa

SEQ ID NO: 39454 - RNA, 22 nt, Homo sapiens
cacugcauccuugaccuucugg

SEQ ID NO: 39455 - RNA, 22 nt, Homo sapiens
cacugcauccuccaccuccugg

SEQ ID NO: 39456 - RNA, 22 nt, Homo sapiens
cacugcaguggaagauuaagaa

SEQ ID NO: 39457 - RNA, 22 nt, Homo sapiens
cacuaggcuggagugcaguggc

SEQ ID NO: 39458 - RNA, 22 nt, Homo sapiens
cuauggauuuacuguauagggu

SEQ ID NO: 39459 - RNA, 22 nt, Homo sapiens
cuauggcagccacggccuggag

SEQ ID NO: 39460 - RNA, 22 nt, Homo sapiens
cucaguggauuagauaaugcac

SEQ ID NO: 39461 - RNA, 22 nt, Homo sapiens
cucauggauggucuggcagcca

SEQ ID NO: 39462 - RNA, 22 nt, Homo sapiens
cuccagugcaaagucaugauca

SEQ ID NO: 39463 - RNA, 22 nt, Homo sapiens
cuccaggugagguuaagggacu

SEQ ID NO: 39464 - RNA, 22 nt, Homo sapiens
cuccaguuucagaaucccaugu

SEQ ID NO: 39465 - RNA, 22 nt, Homo sapiens
cuccacgugaaugccaaguauu

SEQ ID NO: 39466 - RNA, 22 nt, Homo sapiens
cucgagagaaaaugcuucacug

SEQ ID NO: 39467 - RNA, 22 nt, Homo sapiens
cuagcugcacuuccugcuacug

SEQ ID NO: 39468 - RNA, 23 nt, Homo sapiens
ccuguagaaugucugugauacuu

SEQ ID NO: 39469 - RNA, 22 nt, Homo sapiens
ccuucauccuccagcaggcuag

SEQ ID NO: 39470 - RNA, 22 nt, Homo sapiens
ccugugguuaaccagcuagaug

SEQ ID NO: 39471 - RNA, 22 nt, Homo sapiens
ccuuggcacuacugacauugua

SEQ ID NO: 39472 - RNA, 22 nt, Homo sapiens
ccugagaucauacuguuaguaa

SEQ ID NO: 39473 - RNA, 22 nt, Homo sapiens
ccugagacugauugacucacaa

SEQ ID NO: 39474 - RNA, 22 nt, Homo sapiens
ccucauggagaacuucugcuag

SEQ ID NO: 39475 - RNA, 22 nt, Homo sapiens
ccucauggagaacaucugcuag

SEQ ID NO: 39476 - RNA, 22 nt, Homo sapiens
ccucauggagaaccucugcuag

SEQ ID NO: 39477 - RNA, 22 nt, Homo sapiens
ccccagguuucaauaaagccca

SEQ ID NO: 39478 - RNA, 22 nt, Homo sapiens
ccccaguguguaaaggccuugc

SEQ ID NO: 39479 - RNA, 22 nt, Homo sapiens
cccaguuuugccacuuacuagc

SEQ ID NO: 39480 - RNA, 22 nt, Homo sapiens
ccaguuuucccagcaccauuaa

SEQ ID NO: 39481 - RNA, 17 nt, Homo sapiens
ccaguuuucccucagug

SEQ ID NO: 39482 - RNA, 21 nt, Homo sapiens
ccagugguuggaaacuauggg

SEQ ID NO: 39483 - RNA, 22 nt, Homo sapiens
ccagugguugggccggagacgg

SEQ ID NO: 39484 - RNA, 22 nt, Homo sapiens
ccagugcugugcaguguaugag

SEQ ID NO: 39485 - RNA, 22 nt, Homo sapiens
ccaucacgugcaguggccccac

SEQ ID NO: 39486 - RNA, 22 nt, Homo sapiens
ccaucacaggccucagugggaa

SEQ ID NO: 39487 - RNA, 19 nt, Homo sapiens
ccauggcaaugaucugaug

SEQ ID NO: 39488 - RNA, 22 nt, Homo sapiens
ccaugaacuagaauagaacaug

SEQ ID NO: 39489 - RNA, 22 nt, Homo sapiens
ccaggguugcuuuagauucuga

SEQ ID NO: 39490 - RNA, 22 nt, Homo sapiens
ccagugcauggaucccaggggg

SEQ ID NO: 39491 - RNA, 22 nt, Homo sapiens
ccagccgggugcaguggcucac

SEQ ID NO: 39492 - RNA, 22 nt, Homo sapiens
cauugucccucaaugucuauga

SEQ ID NO: 39493 - RNA, 22 nt, Homo sapiens
cauugcacuccagcucugggcg

SEQ ID NO: 39494 - RNA, 22 nt, Homo sapiens
cauugcucuuacagagugagua

SEQ ID NO: 39495 - RNA, 22 nt, Homo sapiens
caugguguuaggcacugggaau

SEQ ID NO: 39496 - RNA, 22 nt, Homo sapiens
caugucuuuuauucugugugau

SEQ ID NO: 39497 - RNA, 22 nt, Homo sapiens
caugucuuuuaaacauucaacu

SEQ ID NO: 39498 - RNA, 22 nt, Homo sapiens
cagccgggugagguggcuuguu

SEQ ID NO: 39499 - RNA, 22 nt, Homo sapiens
cagccggguggcuccuagggua

SEQ ID NO: 39500 - RNA, 22 nt, Homo sapiens
cagcagguuuuuaucaguuaag

SEQ ID NO: 39501 - RNA, 22 nt, Homo sapiens
cagcaucauucaucugggguaa

SEQ ID NO: 39502 - RNA, 22 nt, Homo sapiens
cauggcccugggcugggcgaac

SEQ ID NO: 39503 - RNA, 22 nt, Homo sapiens
cauggcccuggguccauaggaa

SEQ ID NO: 39504 - RNA, 22 nt, Homo sapiens
cauggcuacugcagauguaggg

SEQ ID NO: 39505 - RNA, 20 nt, Homo sapiens
cagcuagugguaggagucgg

SEQ ID NO: 39506 - RNA, 22 nt, Homo sapiens
cagcuagcaugcguaacuuucu

SEQ ID NO: 39507 - RNA, 22 nt, Homo sapiens
cagcccguaaucccagcacuuu

SEQ ID NO: 39508 - RNA, 20 nt, Homo sapiens
uauugccuaaauaccagaau

SEQ ID NO: 39509 - RNA, 22 nt, Homo sapiens
uauucacaggugugggacaaag

SEQ ID NO: 39510 - RNA, 22 nt, Homo sapiens
uauuauuguccuucuauaccca

SEQ ID NO: 39511 - RNA, 22 nt, Homo sapiens
uauugcuggcacauaguagguc

SEQ ID NO: 39512 - RNA, 22 nt, Homo sapiens
uauugcuggcucugucuucauu

SEQ ID NO: 39513 - RNA, 22 nt, Homo sapiens
ucaaagugcuauggcucagguu

SEQ ID NO: 39514 - RNA, 21 nt, Homo sapiens
ucaaaguguucuuuuguugaa

SEQ ID NO: 39515 - RNA, 22 nt, Homo sapiens
ucaaaugcacguagagaaaaua

SEQ ID NO: 39516 - RNA, 22 nt, Homo sapiens
ucaaaugcucuuugcagagagg

SEQ ID NO: 39517 - RNA, 19 nt, Homo sapiens
uauguaguuuucucaauau

SEQ ID NO: 39518 - RNA, 22 nt, Homo sapiens
uaugucacagguuuuggugaaa

SEQ ID NO: 39519 - RNA, 22 nt, Homo sapiens
uagcagaauauaccucuuacuu

SEQ ID NO: 39520 - RNA, 22 nt, Homo sapiens
uagcagcaccccacucuacugg

SEQ ID NO: 39521 - RNA, 20 nt, Homo sapiens
uagcagcagacagagggagg

SEQ ID NO: 39522 - RNA, 22 nt, Homo sapiens
uagcagcauuuuuguagaguau

SEQ ID NO: 39523 - RNA, 22 nt, Homo sapiens
uagcagccaggaagggcuggcu

SEQ ID NO: 39524 - RNA, 22 nt, Homo sapiens
uagcaguauaugagagcuauug

SEQ ID NO: 39525 - RNA, 18 nt, Homo sapiens
uaguacuguucucaugau

SEQ ID NO: 39526 - RNA, 20 nt, Homo sapiens
uagucaugagauucuccaag

SEQ ID NO: 39527 - RNA, 21 nt, Homo sapiens
uagugcagugggguaugacuu

SEQ ID NO: 39528 - RNA, 22 nt, Homo sapiens
uauaucacaugcacucauuuuc

SEQ ID NO: 39529 - RNA, 22 nt, Homo sapiens
uauagcuaugggauguauuugc

SEQ ID NO: 39530 - RNA, 22 nt, Homo sapiens
uagugcugugauaaacauauau

SEQ ID NO: 39531 - RNA, 22 nt, Homo sapiens
uaucauggaaagauguugaaau

SEQ ID NO: 39532 - RNA, 21 nt, Homo sapiens
uaucccagucacaucuaccca

SEQ ID NO: 39533 - RNA, 22 nt, Homo sapiens
uaucaugggggguguacacucc

SEQ ID NO: 39534 - RNA, 22 nt, Homo sapiens
uaucaucauuggcaggugagaa

SEQ ID NO: 39535 - RNA, 22 nt, Homo sapiens
uaucagugaaucuuauuuugcc

SEQ ID NO: 39536 - RNA, 22 nt, Homo sapiens
uaucacugucaggcccucauau

SEQ ID NO: 39537 - RNA, 22 nt, Homo sapiens
uaucacccuuucauuguucuuc

SEQ ID NO: 39538 - RNA, 22 nt, Homo sapiens
uaaggcacccuucugaguagag

SEQ ID NO: 39539 - RNA, 18 nt, Homo sapiens
uaaggcacuauaggcauu

SEQ ID NO: 39540 - RNA, 20 nt, Homo sapiens
uaaggcacugugcuuuuagg

SEQ ID NO: 39541 - RNA, 22 nt, Homo sapiens
guugcaugucugggaggccagc

SEQ ID NO: 39542 - RNA, 22 nt, Homo sapiens
guugcaaaguaauugugguuuu

SEQ ID NO: 39543 - RNA, 22 nt, Homo sapiens
guugcccuuagcacuucagccu

SEQ ID NO: 39544 - RNA, 17 nt, Homo sapiens
guugaguuugagucaag

SEQ ID NO: 39545 - RNA, 23 nt, Homo sapiens
guucaucagggauauuggccuga

SEQ ID NO: 39546 - RNA, 22 nt, Homo sapiens
guucaucagggauauuggcuua

SEQ ID NO: 39547 - RNA, 23 nt, Homo sapiens
uaacauguuuuuaagggaagcuu

SEQ ID NO: 39548 - RNA, 23 nt, Homo sapiens
uacagcugcagaaucaggcuaag

SEQ ID NO: 39549 - RNA, 22 nt, Homo sapiens
uacuacagccugagcgacugag

SEQ ID NO: 39550 - RNA, 22 nt, Homo sapiens
uacuccccuuguucugugagcu

SEQ ID NO: 39551 - RNA, 22 nt, Homo sapiens
uacugcacuccagccugccaac

SEQ ID NO: 39552 - RNA, 21 nt, Homo sapiens
uagcaaauugcuauuaaggca

SEQ ID NO: 39553 - RNA, 21 nt, Homo sapiens
uagaugguguucuagagagaa

SEQ ID NO: 39554 - RNA, 22 nt, Homo sapiens
uagaucaauuaauuguuacuug

SEQ ID NO: 39555 - RNA, 21 nt, Homo sapiens
uagagcuuggcacagaguaga

SEQ ID NO: 39556 - RNA, 22 nt, Homo sapiens
uagagagcuguuugaaagcagg

SEQ ID NO: 39557 - RNA, 22 nt, Homo sapiens
uagagaucuuauauuuuaugac

SEQ ID NO: 39558 - RNA, 22 nt, Homo sapiens
uagacuguaagauccaggagag

SEQ ID NO: 39559 - RNA, 22 nt, Homo sapiens
uagacugguuuagcacugaaua

SEQ ID NO: 39560 - RNA, 22 nt, Homo sapiens
gucacggagauauggauucgga

SEQ ID NO: 39561 - RNA, 22 nt, Homo sapiens
gucaagauuuguaggacagaga

SEQ ID NO: 39562 - RNA, 22 nt, Homo sapiens
gucaauguaucuagcuguauua

SEQ ID NO: 39563 - RNA, 22 nt, Homo sapiens
gucacagaaaaagauaugccaa

SEQ ID NO: 39564 - RNA, 21 nt, Homo sapiens
gucacuggggcuggauaauuc

SEQ ID NO: 39565 - RNA, 22 nt, Homo sapiens
guccaagacuaggaguuggcag

SEQ ID NO: 39566 - RNA, 22 nt, Homo sapiens
gucaggcaccgauacaguuuuu

SEQ ID NO: 39567 - RNA, 22 nt, Homo sapiens
gucagcaucaccaugucuauga

SEQ ID NO: 39568 - RNA, 22 nt, Homo sapiens
gucucauugcaguuagaccugu

SEQ ID NO: 39569 - RNA, 22 nt, Homo sapiens
gucucccaaccccugugcccag

SEQ ID NO: 39570 - RNA, 22 nt, Homo sapiens
gucguggagcucacagugugcc

SEQ ID NO: 39571 - RNA, 22 nt, Homo sapiens
gucguggagucucuggcuugua

SEQ ID NO: 39572 - RNA, 22 nt, Homo sapiens
gucuaguuuuaauacauuaaga

SEQ ID NO: 39573 - RNA, 22 nt, Homo sapiens
guccuguuuuuaagguucauag

SEQ ID NO: 39574 - RNA, 22 nt, Homo sapiens
gucccaguggaaccuccaagcu

SEQ ID NO: 39575 - RNA, 22 nt, Homo sapiens
guccagagaagucauuacuuca

SEQ ID NO: 39576 - RNA, 20 nt, Homo sapiens
guggaagauaaguagccuga

SEQ ID NO: 39577 - RNA, 22 nt, Homo sapiens
gugauugucuaaucaagauaca

SEQ ID NO: 39578 - RNA, 22 nt, Homo sapiens
gugauuauuaugcacugcaugc

SEQ ID NO: 39579 - RNA, 22 nt, Homo sapiens
gugaugguccagggaaucucuu

SEQ ID NO: 39580 - RNA, 22 nt, Homo sapiens
gugaugacauucagagaugaag

SEQ ID NO: 39581 - RNA, 22 nt, Homo sapiens
gugauagguugucacugucacu

SEQ ID NO: 39582 - RNA, 22 nt, Homo sapiens
guccuggagaagcguggaccgg

SEQ ID NO: 39583 - RNA, 22 nt, Homo sapiens
gugagcuccucuucugcugcag

SEQ ID NO: 39584 - RNA, 22 nt, Homo sapiens
gugagcauucaaggaaggagcu

SEQ ID NO: 39585 - RNA, 22 nt, Homo sapiens
gugagucagucuguguagggcu

SEQ ID NO: 39586 - RNA, 22 nt, Homo sapiens
gugagguguuaaccaaccugug

SEQ ID NO: 39587 - RNA, 17 nt, Homo sapiens
gugagguggguaguauc

SEQ ID NO: 39588 - RNA, 22 nt, Homo sapiens
gugaggucagggcuguggacag

SEQ ID NO: 39589 - RNA, 22 nt, Homo sapiens
gugagguauacugggaucacua

SEQ ID NO: 39590 - RNA, 22 nt, Homo sapiens
guggacugggagagauaguucc

SEQ ID NO: 39591 - RNA, 17 nt, Homo sapiens
guggaaugucaugucaa

SEQ ID NO: 39592 - RNA, 22 nt, Homo sapiens
guggacguguguccccauggcu

SEQ ID NO: 39593 - RNA, 18 nt, Homo sapiens
guggagugucuuccugga

SEQ ID NO: 39594 - RNA, 22 nt, Homo sapiens
guggaaucuagagaggcaguag

SEQ ID NO: 39595 - RNA, 22 nt, Homo sapiens
guggaucacuugaggucaagag

SEQ ID NO: 39596 - RNA, 22 nt, Homo sapiens
guggcagcacauauagguuguu

SEQ ID NO: 39597 - RNA, 22 nt, Homo sapiens
guggaucacuugagguuagaag

SEQ ID NO: 39598 - RNA, 22 nt, Homo sapiens
guggcagaacagguaggguucu

SEQ ID NO: 39599 - RNA, 21 nt, Homo sapiens
gugucacagacaugacagaug

SEQ ID NO: 39600 - RNA, 21 nt, Homo sapiens
gugucaugguugacuuuggca

SEQ ID NO: 39601 - RNA, 22 nt, Homo sapiens
gugucccagugugcauacaggu

SEQ ID NO: 39602 - RNA, 22 nt, Homo sapiens
gugucaguggggagugaucuuc

SEQ ID NO: 39603 - RNA, 19 nt, Homo sapiens
gugugcauaucacagagca

SEQ ID NO: 39604 - RNA, 22 nt, Homo sapiens
gugugauguaaagaacugggga

SEQ ID NO: 39605 - RNA, 18 nt, Homo sapiens
gugucugguuaugggagu

SEQ ID NO: 39606 - RNA, 22 nt, Homo sapiens
guucaucagggauauuggccug

SEQ ID NO: 39607 - RNA, 22 nt, Homo sapiens
guucaucagggauacuggccuu

SEQ ID NO: 39608 - RNA, 22 nt, Homo sapiens
guucaucaggcuuucucuagag

SEQ ID NO: 39609 - RNA, 22 nt, Homo sapiens
guguuugguugauagagccacu

SEQ ID NO: 39610 - RNA, 22 nt, Homo sapiens
guguuugauugcaaauaaucua

SEQ ID NO: 39611 - RNA, 21 nt, Homo sapiens
gugugcuugaauucagcuguc

SEQ ID NO: 39612 - RNA, 22 nt, Homo sapiens
guguggcaggugggggcucaga

SEQ ID NO: 39613 - RNA, 22 nt, Homo sapiens
guguguaaauggcagugagcuc

SEQ ID NO: 39614 - RNA, 22 nt, Homo sapiens
ggaauguauuaaggcauugggc

SEQ ID NO: 39615 - RNA, 22 nt, Homo sapiens
ggacauguauauauaugugugu

SEQ ID NO: 39616 - RNA, 22 nt, Homo sapiens
ggacaagagacugggacacuga

SEQ ID NO: 39617 - RNA, 22 nt, Homo sapiens
ggacaaaguauuuucaaaugua

SEQ ID NO: 39618 - RNA, 22 nt, Homo sapiens
ggagugugauuguucucuguua

SEQ ID NO: 39619 - RNA, 22 nt, Homo sapiens
gccugagaggauaugauccccu

SEQ ID NO: 39620 - RNA, 22 nt, Homo sapiens
gccuuuggugacaggcaugugu

SEQ ID NO: 39621 - RNA, 22 nt, Homo sapiens
ggaagguaauugucagcucaua

SEQ ID NO: 39622 - RNA, 22 nt, Homo sapiens
ggcauugaguggguaggaguca

SEQ ID NO: 39623 - RNA, 22 nt, Homo sapiens
ggcauugugaacauuucccugc

SEQ ID NO: 39624 - RNA, 23 nt, Homo sapiens
ggcauuguggcucacaucuguaa

SEQ ID NO: 39625 - RNA, 22 nt, Homo sapiens
ggcuagagacaaguugcugaga

SEQ ID NO: 39626 - RNA, 22 nt, Homo sapiens
gggcaugauggugcacacaugu

SEQ ID NO: 39627 - RNA, 22 nt, Homo sapiens
ggcaacauggugaaacucuguc

SEQ ID NO: 39628 - RNA, 22 nt, Homo sapiens
ggcaaaugaagauggagaggcu

SEQ ID NO: 39629 - RNA, 22 nt, Homo sapiens
ggcagcucaggccccgcgcuga

SEQ ID NO: 39630 - RNA, 23 nt, Homo sapiens
ggcagguuggucuaggucuauuc

SEQ ID NO: 39631 - RNA, 22 nt, Homo sapiens
ggcaaagagacaugcaucgggg

SEQ ID NO: 39632 - RNA, 22 nt, Homo sapiens
guauccugaaguucucagcacu

SEQ ID NO: 39633 - RNA, 22 nt, Homo sapiens
guaaauguccccugugauauug

SEQ ID NO: 39634 - RNA, 22 nt, Homo sapiens
guaaauguccugcuacagagug

SEQ ID NO: 39635 - RNA, 22 nt, Homo sapiens
guaagagcauguaguggcucua

SEQ ID NO: 39636 - RNA, 22 nt, Homo sapiens
guagaucucaacacuggaagua

SEQ ID NO: 39637 - RNA, 22 nt, Homo sapiens
guagaggaauggcuccaccaua

SEQ ID NO: 39638 - RNA, 22 nt, Homo sapiens
guaagugguagagcugggcuau

SEQ ID NO: 39639 - RNA, 22 nt, Homo sapiens
ggucaacaucaucaugguaagu

SEQ ID NO: 39640 - RNA, 22 nt, Homo sapiens
ggucaagcuagauuuuaaugau

SEQ ID NO: 39641 - RNA, 22 nt, Homo sapiens
ggucagauggcagcugggccug

SEQ ID NO: 39642 - RNA, 22 nt, Homo sapiens
gguguuccccuuaccucuuggc

SEQ ID NO: 39643 - RNA, 22 nt, Homo sapiens
gguagacucuguaagugaucau

SEQ ID NO: 39644 - RNA, 22 nt, Homo sapiens
ugauguguuuuguaguucaacu

SEQ ID NO: 39645 - RNA, 22 nt, Homo sapiens
ugcaccacacuccauccugggc

SEQ ID NO: 39646 - RNA, 23 nt, Homo sapiens
ugcaccacuacacacucuugggu

SEQ ID NO: 39647 - RNA, 22 nt, Homo sapiens
ugcaccacugcacuccaggcug

SEQ ID NO: 39648 - RNA, 22 nt, Homo sapiens
ugcaccacugcacugccugggu

SEQ ID NO: 39649 - RNA, 22 nt, Homo sapiens
ugcaccaucuugcuucuguggu

SEQ ID NO: 39650 - RNA, 22 nt, Homo sapiens
ugcaccauugcacuccagccug

SEQ ID NO: 39651 - RNA, 16 nt, Homo sapiens
ugcagaguaggugaau

SEQ ID NO: 39652 - RNA, 22 nt, Homo sapiens
ugcagcacaguagguuugcaau

SEQ ID NO: 39653 - RNA, 23 nt, Homo sapiens
ugauguccacuuagggucuaggu

SEQ ID NO: 39654 - RNA, 22 nt, Homo sapiens
ugaugucuugagauggagcuua

SEQ ID NO: 39655 - RNA, 20 nt, Homo sapiens
ugauguccaggcagagguuu

SEQ ID NO: 39656 - RNA, 22 nt, Homo sapiens
ugaugcugaguggcuauuugaa

SEQ ID NO: 39657 - RNA, 21 nt, Homo sapiens
ugaugcuuuucuuaaccuugc

SEQ ID NO: 39658 - RNA, 22 nt, Homo sapiens
ugaugguaguucagucaaugua

SEQ ID NO: 39659 - RNA, 22 nt, Homo sapiens
ugaugguguuaccaucuuuacu

SEQ ID NO: 39660 - RNA, 22 nt, Homo sapiens
ugaucuguguaacauaggaguc

SEQ ID NO: 39661 - RNA, 22 nt, Homo sapiens
ugcauaugucuuuauaguagca

SEQ ID NO: 39662 - RNA, 22 nt, Homo sapiens
ugcaucacaguacuccagccug

SEQ ID NO: 39663 - RNA, 22 nt, Homo sapiens
ugcauauucaaggcaggccauu

SEQ ID NO: 39664 - RNA, 22 nt, Homo sapiens
ugcauaugcagcauuuaugauu

SEQ ID NO: 39665 - RNA, 17 nt, Homo sapiens
ugcaccauuugauuuuu

SEQ ID NO: 39666 - RNA, 22 nt, Homo sapiens
ugcaggguccauugucccaagu

SEQ ID NO: 39667 - RNA, 21 nt, Homo sapiens
ugcagccauucagcccuaugc

SEQ ID NO: 39668 - RNA, 22 nt, Homo sapiens
ugcagugugauuuucuggcuga

SEQ ID NO: 39669 - RNA, 20 nt, Homo sapiens
ugcaguguccucacuuguca

SEQ ID NO: 39670 - RNA, 22 nt, Homo sapiens
ugauagucuuugcuggugaccu

SEQ ID NO: 39671 - RNA, 22 nt, Homo sapiens
ugagcucaguauuucauaaaca

SEQ ID NO: 39672 - RNA, 22 nt, Homo sapiens
ugaggcaagauacugauuucau

SEQ ID NO: 39673 - RNA, 22 nt, Homo sapiens
ugagguaacagaagcgagcauu

SEQ ID NO: 39674 - RNA, 22 nt, Homo sapiens
ugagguaaugcuguagcuguga

SEQ ID NO: 39675 - RNA, 22 nt, Homo sapiens
ugagcagagggagaaguaaauu

SEQ ID NO: 39676 - RNA, 22 nt, Homo sapiens
ugagcagagaucacggcauugu

SEQ ID NO: 39677 - RNA, 22 nt, Homo sapiens
ugagcagaguuguuucuccuga

SEQ ID NO: 39678 - RNA, 22 nt, Homo sapiens
ugagcccauuguccugguuuau

SEQ ID NO: 39679 - RNA, 22 nt, Homo sapiens
ugagcaaaauuuuggacauaga

SEQ ID NO: 39680 - RNA, 22 nt, Homo sapiens
ugagcagaaguuuugauuggcg

SEQ ID NO: 39681 - RNA, 22 nt, Homo sapiens
ugagcagaaagcugcaaggucg

SEQ ID NO: 39682 - RNA, 22 nt, Homo sapiens
ugagacacugaauccggccuga

SEQ ID NO: 39683 - RNA, 22 nt, Homo sapiens
ugagaccaacagauuccaguuc

SEQ ID NO: 39684 - RNA, 22 nt, Homo sapiens
ugagaaugacugggcaugcugc

SEQ ID NO: 39685 - RNA, 22 nt, Homo sapiens
ugagaaugaugauugguaaacc

SEQ ID NO: 39686 - RNA, 22 nt, Homo sapiens
ugagaauguagggcucucccag

SEQ ID NO: 39687 - RNA, 22 nt, Homo sapiens
ugagaagugauauagaaguuaa

SEQ ID NO: 39688 - RNA, 22 nt, Homo sapiens
ugagaagaugaacuccuugguc

SEQ ID NO: 39689 - RNA, 22 nt, Homo sapiens
ugagaagacaucagcuuucgga

SEQ ID NO: 39690 - RNA, 22 nt, Homo sapiens
uggaaaguacugagguccaccu

SEQ ID NO: 39691 - RNA, 22 nt, Homo sapiens
uggaacacaucuaaggaagcag

SEQ ID NO: 39692 - RNA, 22 nt, Homo sapiens
uggaaaucuaaguuuggauuga

SEQ ID NO: 39693 - RNA, 22 nt, Homo sapiens
ugccugauacccucugucucuc

SEQ ID NO: 39694 - RNA, 20 nt, Homo sapiens
ugccugacacucuuugcuuc

SEQ ID NO: 39695 - RNA, 22 nt, Homo sapiens
uggaagacauuuuggaccuugg

SEQ ID NO: 39696 - RNA, 22 nt, Homo sapiens
uggaagacucaagguggugaau

SEQ ID NO: 39697 - RNA, 22 nt, Homo sapiens
uggaacugauauugauggaaaa

SEQ ID NO: 39698 - RNA, 22 nt, Homo sapiens
ugccuaggcuggaaugcaaugg

SEQ ID NO: 39699 - RNA, 22 nt, Homo sapiens
ugccuaggcuggaaugcagugg

SEQ ID NO: 39700 - RNA, 22 nt, Homo sapiens
ugccauugcacuccagccuggg

SEQ ID NO: 39701 - RNA, 22 nt, Homo sapiens
ugccagaugugcccucuccacc

SEQ ID NO: 39702 - RNA, 22 nt, Homo sapiens
uggacaugaagggcacaggagg

SEQ ID NO: 39703 - RNA, 22 nt, Homo sapiens
uggacaagauagguucuauauu

SEQ ID NO: 39704 - RNA, 22 nt, Homo sapiens
uggacaagugcccuccaccuca

SEQ ID NO: 39705 - RNA, 22 nt, Homo sapiens
uggaagcaugcaaucugugggg

SEQ ID NO: 39706 - RNA, 22 nt, Homo sapiens
uggagaacugaugucuccaaga

SEQ ID NO: 39707 - RNA, 22 nt, Homo sapiens
uggagagugagggccuccuuaa

SEQ ID NO: 39708 - RNA, 22 nt, Homo sapiens
uggagacaaagauagaaaagca

SEQ ID NO: 39709 - RNA, 22 nt, Homo sapiens
uggcaaaaaaacgcaauuacgu

SEQ ID NO: 39710 - RNA, 22 nt, Homo sapiens
uggcaaaaaaccgcaguugccu

SEQ ID NO: 39711 - RNA, 19 nt, Homo sapiens
uggagucaucaugcugcua

SEQ ID NO: 39712 - RNA, 22 nt, Homo sapiens
uggauugagaagcuguggcuca

SEQ ID NO: 39713 - RNA, 22 nt, Homo sapiens
ugguaccuuuuaaugacuaauu

SEQ ID NO: 39714 - RNA, 22 nt, Homo sapiens
ugggugaguaucuauuauucag

SEQ ID NO: 39715 - RNA, 23 nt, Homo sapiens
ugguaacauguuguggcagggga

SEQ ID NO: 39716 - RNA, 22 nt, Homo sapiens
uggucaugaggugaggcuucuc

SEQ ID NO: 39717 - RNA, 22 nt, Homo sapiens
uggguagagcacugggggcgag

SEQ ID NO: 39718 - RNA, 19 nt, Homo sapiens
uggguaguuuucuggcugg

SEQ ID NO: 39719 - RNA, 22 nt, Homo sapiens
uggguaggaccagaaaugcacu

SEQ ID NO: 39720 - RNA, 22 nt, Homo sapiens
uggguaguuuuucagcucuugc

SEQ ID NO: 39721 - RNA, 23 nt, Homo sapiens
uggguucauucuugaagucagug

SEQ ID NO: 39722 - RNA, 22 nt, Homo sapiens
uggggcuuuuucuuguauucuc

SEQ ID NO: 39723 - RNA, 22 nt, Homo sapiens
ugggaucuuuccuauuagcgag

SEQ ID NO: 39724 - RNA, 22 nt, Homo sapiens
uggcaagaccccaucucuacaa

SEQ ID NO: 39725 - RNA, 22 nt, Homo sapiens
uggcaguuuuaugugguucaac

SEQ ID NO: 39726 - RNA, 22 nt, Homo sapiens
uggcaucuguucuacacauaaa

SEQ ID NO: 39727 - RNA, 22 nt, Homo sapiens
uggcaagaagagcaugagacca

SEQ ID NO: 39728 - RNA, 22 nt, Homo sapiens
uggcaacaucuggggacauguu

SEQ ID NO: 39729 - RNA, 23 nt, Homo sapiens
uggcaagaauucuuaccgugugg

SEQ ID NO: 39730 - RNA, 22 nt, Homo sapiens
uggcauggaguggauggcccca

SEQ ID NO: 39731 - RNA, 22 nt, Homo sapiens
uggcaugucagguuucuggguu

SEQ ID NO: 39732 - RNA, 23 nt, Homo sapiens
uggcauuuuaguuagcuucagug

SEQ ID NO: 39733 - RNA, 22 nt, Homo sapiens
uggccagagggcaauuagcugu

SEQ ID NO: 39734 - RNA, 22 nt, Homo sapiens
ugggagugugcacaauuucagc

SEQ ID NO: 39735 - RNA, 22 nt, Homo sapiens
ucugugguucaggcuggagugc

SEQ ID NO: 39736 - RNA, 22 nt, Homo sapiens
ucuaugguuuauuuccaagugu

SEQ ID NO: 39737 - RNA, 22 nt, Homo sapiens
ucuuagguaagaaauuuuaaca

SEQ ID NO: 39738 - RNA, 22 nt, Homo sapiens
ucucaauggguuguagacaaag

SEQ ID NO: 39739 - RNA, 22 nt, Homo sapiens
ucuauggauaaaaugcccucau

SEQ ID NO: 39740 - RNA, 22 nt, Homo sapiens
ucguggccugugaguccucccc

SEQ ID NO: 39741 - RNA, 22 nt, Homo sapiens
ucuacccugugagggacacagu

SEQ ID NO: 39742 - RNA, 20 nt, Homo sapiens
ucuaccuguagguaauuggu

SEQ ID NO: 39743 - RNA, 22 nt, Homo sapiens
ucuaaggcaccuagagucauca

SEQ ID NO: 39744 - RNA, 22 nt, Homo sapiens
ucuagccuaugaagcuugucca

SEQ ID NO: 39745 - RNA, 22 nt, Homo sapiens
ucuuugccuaacccaaggucau

SEQ ID NO: 39746 - RNA, 18 nt, Homo sapiens
ucuuuggcugaacuguag

SEQ ID NO: 39747 - RNA, 19 nt, Homo sapiens
ucuuugcuuuucuaagagg

SEQ ID NO: 39748 - RNA, 22 nt, Homo sapiens
ucuuugaguggagcgaggcaga

SEQ ID NO: 39749 - RNA, 22 nt, Homo sapiens
ucuuugaguguauacuuagauu

SEQ ID NO: 39750 - RNA, 22 nt, Homo sapiens
ucuugaacuucugcacacucag

SEQ ID NO: 39751 - RNA, 22 nt, Homo sapiens
ucuuugguuguuuagggugcau

SEQ ID NO: 39752 - RNA, 22 nt, Homo sapiens
ucuuugucuacauccuguuaaa

SEQ ID NO: 39753 - RNA, 22 nt, Homo sapiens
ucuuugguucugugcagccuau

SEQ ID NO: 39754 - RNA, 22 nt, Homo sapiens
ucuuuuggguauggagccauca

SEQ ID NO: 39755 - RNA, 22 nt, Homo sapiens
ucuuuugguuucuagaggccgc

SEQ ID NO: 39756 - RNA, 17 nt, Homo sapiens
ugaccacugauucuacu

SEQ ID NO: 39757 - RNA, 22 nt, Homo sapiens
ugacauugggagugaagugaag

SEQ ID NO: 39758 - RNA, 22 nt, Homo sapiens
ugacggaggacaccugcggaau

SEQ ID NO: 39759 - RNA, 22 nt, Homo sapiens
ugacggaggcauuggaagcuug

SEQ ID NO: 39760 - RNA, 22 nt, Homo sapiens
ugacuacagauuugcugccaga

SEQ ID NO: 39761 - RNA, 22 nt, Homo sapiens
ugacuaggaggcuggaggauga

SEQ ID NO: 39762 - RNA, 22 nt, Homo sapiens
ugacucaguuguuagucuucau

SEQ ID NO: 39763 - RNA, 22 nt, Homo sapiens
ugacucaguuucucagguagua

SEQ ID NO: 39764 - RNA, 22 nt, Homo sapiens
ugacuggaacuuuagugagucu

SEQ ID NO: 39765 - RNA, 22 nt, Homo sapiens
ugacuauugauuuagacgugcu

SEQ ID NO: 39766 - RNA, 22 nt, Homo sapiens
ugacugguguuuaaugagucaa

SEQ ID NO: 39767 - RNA, 19 nt, Homo sapiens
ugagaaccucuacagaguc

SEQ ID NO: 39768 - RNA, 22 nt, Homo sapiens
ugagaaccucugugugcccacu

SEQ ID NO: 39769 - RNA, 16 nt, Homo sapiens
ugagaacaugugacau

SEQ ID NO: 39770 - RNA, 16 nt, Homo sapiens
ugagaacaugugauau

SEQ ID NO: 39771 - RNA, 20 nt, Homo sapiens
ugacuuguccgagguccccc

SEQ ID NO: 39772 - RNA, 21 nt, Homo sapiens
ugacauguuggugugcugcac

SEQ ID NO: 39773 - RNA, 21 nt, Homo sapiens
ugacauguugguuugcugcac

SEQ ID NO: 39774 - RNA, 22 nt, Homo sapiens
ugacauguauuagcucagugcu

SEQ ID NO: 39775 - RNA, 22 nt, Homo sapiens
ugacauguccaggugguccugu

SEQ ID NO: 39776 - RNA, 22 nt, Homo sapiens
ugacauagcuauuaagugaugc

SEQ ID NO: 39777 - RNA, 22 nt, Homo sapiens
ugacaucugcuugugcccagga

SEQ ID NO: 39778 - RNA, 18 nt, Homo sapiens
ugacaguuucuuuauauu

SEQ ID NO: 39779 - RNA, 22 nt, Homo sapiens
ugaagaucauacugguggaggg

SEQ ID NO: 39780 - RNA, 22 nt, Homo sapiens
ugaacagcaccuccuagaguug

SEQ ID NO: 39781 - RNA, 22 nt, Homo sapiens
ugaaggaguauggauaagucgu

SEQ ID NO: 39782 - RNA, 22 nt, Homo sapiens
ugaaggcaggagggagaaaagu

SEQ ID NO: 39783 - RNA, 22 nt, Homo sapiens
ugacaguguccuccuccugaga

SEQ ID NO: 39784 - RNA, 19 nt, Homo sapiens
ucacgugcagcagccacac

SEQ ID NO: 39785 - RNA, 22 nt, Homo sapiens
ucacgguggaaucccagauccc

SEQ ID NO: 39786 - RNA, 18 nt, Homo sapiens
ucacggggagcagcagcc

SEQ ID NO: 39787 - RNA, 22 nt, Homo sapiens
ucacgcugcugcaaccagccug

SEQ ID NO: 39788 - RNA, 22 nt, Homo sapiens
ucacccacacaggagacaggga

SEQ ID NO: 39789 - RNA, 20 nt, Homo sapiens
ucacccugacaucugcccag

SEQ ID NO: 39790 - RNA, 22 nt, Homo sapiens
ucacccuguguuuugcguuugc

SEQ ID NO: 39791 - RNA, 22 nt, Homo sapiens
ucaagcaauucuccucucagcc

SEQ ID NO: 39792 - RNA, 22 nt, Homo sapiens
ucaagaccucacauagaggaga

SEQ ID NO: 39793 - RNA, 22 nt, Homo sapiens
ucaaggcacuagcugagcugca

SEQ ID NO: 39794 - RNA, 22 nt, Homo sapiens
ucaaggcacauuugacauuuuc

SEQ ID NO: 39795 - RNA, 18 nt, Homo sapiens
ucaauguggauguucuuu

SEQ ID NO: 39796 - RNA, 22 nt, Homo sapiens
ucaaggcaguggccuuccuucu

SEQ ID NO: 39797 - RNA, 22 nt, Homo sapiens
ucagcaucacaggcagugagug

SEQ ID NO: 39798 - RNA, 21 nt, Homo sapiens
ucagugcaauucuauggggaa

SEQ ID NO: 39799 - RNA, 22 nt, Homo sapiens
ucagugacugcugcuuguauac

SEQ ID NO: 39800 - RNA, 22 nt, Homo sapiens
ucagugauugguuauuuuaggc

SEQ ID NO: 39801 - RNA, 22 nt, Homo sapiens
ucagugaauauauaacagcgau

SEQ ID NO: 39802 - RNA, 22 nt, Homo sapiens
ucagugccucaguuuuuaaaga

SEQ ID NO: 39803 - RNA, 17 nt, Homo sapiens
ucagugcauuuaagaga

SEQ ID NO: 39804 - RNA, 22 nt, Homo sapiens
ucagugccauugccauaugagu

SEQ ID NO: 39805 - RNA, 22 nt, Homo sapiens
ucacgugguucauaaggcagaa

SEQ ID NO: 39806 - RNA, 22 nt, Homo sapiens
ucagaguaguuccuggcagaaa

SEQ ID NO: 39807 - RNA, 22 nt, Homo sapiens
uccaauguaaucaucauugaau

SEQ ID NO: 39808 - RNA, 22 nt, Homo sapiens
ucauuggcuaagcuuguuacac

SEQ ID NO: 39809 - RNA, 23 nt, Homo sapiens
ucagugucuggauccugcucagu

SEQ ID NO: 39810 - RNA, 22 nt, Homo sapiens
ucagugcuuuuuguugucauca

SEQ ID NO: 39811 - RNA, 22 nt, Homo sapiens
ucaguggauuuaaccugaauca

SEQ ID NO: 39812 - RNA, 22 nt, Homo sapiens
ucaguggagcuacaauucuggg

SEQ ID NO: 39813 - RNA, 22 nt, Homo sapiens
ucccauguagcuaggauuacag

SEQ ID NO: 39814 - RNA, 17 nt, Homo sapiens
ucccauguuucuucuac

SEQ ID NO: 39815 - RNA, 23 nt, Homo sapiens
uccccgggagcaccagcuuguug

SEQ ID NO: 39816 - RNA, 22 nt, Homo sapiens
ucccauugucucugaccuugcc

SEQ ID NO: 39817 - RNA, 17 nt, Homo sapiens
uccagauuucaauugaa

SEQ ID NO: 39818 - RNA, 22 nt, Homo sapiens
uccccaguaggcaauuaacacc

SEQ ID NO: 39819 - RNA, 19 nt, Homo sapiens
ucccuguagaccacagugc

SEQ ID NO: 39820 - RNA, 22 nt, Homo sapiens
ucccugacagucacagagcuac

SEQ ID NO: 39821 - RNA, 22 nt, Homo sapiens
ucgcaguuaauaaugaugugcg

SEQ ID NO: 39822 - RNA, 22 nt, Homo sapiens
ucgcaccauugcacuccagcca

SEQ ID NO: 39823 - RNA, 22 nt, Homo sapiens
ucgcagcucacuggagccucga

SEQ ID NO: 39824 - RNA, 22 nt, Homo sapiens
uccuugagaggacagagccaua

SEQ ID NO: 39825 - RNA, 22 nt, Homo sapiens
uccuugagccucccagacucag

SEQ ID NO: 39826 - RNA, 22 nt, Homo sapiens
uccuugagucuuugcucagaug

SEQ ID NO: 39827 - RNA, 23 nt, Homo sapiens
uccuugguuggcgcccuaugugu

SEQ ID NO: 39828 - RNA, 22 nt, Homo sapiens
uccugcauucugacuugcuuuc

SEQ ID NO: 39829 - RNA, 21 nt, Homo sapiens
uccugagagaggaguaacucu

SEQ ID NO: 39830 - RNA, 16 nt, Homo sapiens
ucccugugacaugugc

SEQ ID NO: 39831 - RNA, 19 nt, Homo sapiens
ucccuuuguauggacauac

SEQ ID NO: 39832 - RNA, 22 nt, Homo sapiens
uccuacaugcaguacauucaaa

SEQ ID NO: 39833 - RNA, 18 nt, Homo sapiens
aaacugcuuccuuggccu

SEQ ID NO: 39834 - RNA, 22 nt, Homo sapiens
aaucaccaugcacuacagccuu

SEQ ID NO: 39835 - RNA, 22 nt, Homo sapiens
aaucagagcccucugagcuuca

SEQ ID NO: 39836 - RNA, 22 nt, Homo sapiens
aaucacaguuaguaagggagaa

SEQ ID NO: 39837 - RNA, 22 nt, Homo sapiens
aauacugugauaucgagcgauu

SEQ ID NO: 39838 - RNA, 22 nt, Homo sapiens
aauagcauugaaucuaccaauu

SEQ ID NO: 39839 - RNA, 22 nt, Homo sapiens
aauagugcugugcagugagugg

SEQ ID NO: 39840 - RNA, 22 nt, Homo sapiens
aaucauauugucugccaagagg

SEQ ID NO: 39841 - RNA, 22 nt, Homo sapiens
aaucucagcauuuugggcugag

SEQ ID NO: 39842 - RNA, 22 nt, Homo sapiens
aaugcuaucuggaacauuguug

SEQ ID NO: 39843 - RNA, 22 nt, Homo sapiens
aagcuggauuuaguguggagca

SEQ ID NO: 39844 - RNA, 22 nt, Homo sapiens
aagcuggagugcaguggugcaa

SEQ ID NO: 39845 - RNA, 22 nt, Homo sapiens
aagcuggagugcaguggugcga

SEQ ID NO: 39846 - RNA, 22 nt, Homo sapiens
aagcugcauuuucuagaugcuu

SEQ ID NO: 39847 - RNA, 22 nt, Homo sapiens
aagcugccaggcaugguggcug

SEQ ID NO: 39848 - RNA, 22 nt, Homo sapiens
aagcuccauuucugccaugaga

SEQ ID NO: 39849 - RNA, 22 nt, Homo sapiens
aaguccccugacagaggggagg

SEQ ID NO: 39850 - RNA, 20 nt, Homo sapiens
aauaacagccccagggaggu

SEQ ID NO: 39851 - RNA, 22 nt, Homo sapiens
aaacugucuggaugcuugugga

SEQ ID NO: 39852 - RNA, 22 nt, Homo sapiens
aaagcuagagaagcugcuguca

SEQ ID NO: 39853 - RNA, 22 nt, Homo sapiens
aaaggcacugaucuuauccagu

SEQ ID NO: 39854 - RNA, 19 nt, Homo sapiens
aaaguacucugaugccucu

SEQ ID NO: 39855 - RNA, 22 nt, Homo sapiens
aaaugcagauucugcuuagguu

SEQ ID NO: 39856 - RNA, 22 nt, Homo sapiens
aaaugcagucuuuguucugggc

SEQ ID NO: 39857 - RNA, 20 nt, Homo sapiens
aaaugcuguaauguuuggga

SEQ ID NO: 39858 - RNA, 22 nt, Homo sapiens
aaauugcaaugcgaggcagagg

SEQ ID NO: 39859 - RNA, 19 nt, Homo sapiens
aaaugugcacuguuuucca

SEQ ID NO: 39860 - RNA, 22 nt, Homo sapiens
aacacggcccgcagagcaagcu

SEQ ID NO: 39861 - RNA, 22 nt, Homo sapiens
aacaccauuuuucugcagccuu

SEQ ID NO: 39862 - RNA, 19 nt, Homo sapiens
aacuggugugagaugauau

SEQ ID NO: 39863 - RNA, 22 nt, Homo sapiens
aacuggcauaugaacuuguucu

SEQ ID NO: 39864 - RNA, 22 nt, Homo sapiens
aagagcauuggauggggagauu

SEQ ID NO: 39865 - RNA, 22 nt, Homo sapiens
aagagagcuaugugcauaauua

SEQ ID NO: 39866 - RNA, 22 nt, Homo sapiens
aagcccauuguaaguugaggag

SEQ ID NO: 39867 - RNA, 22 nt, Homo sapiens
aagaggcuguaggauaaugccu

SEQ ID NO: 39868 - RNA, 22 nt, Homo sapiens
augacugucagggcagucauug

SEQ ID NO: 39869 - RNA, 22 nt, Homo sapiens
augagagcugacuuuaaggcaa

SEQ ID NO: 39870 - RNA, 22 nt, Homo sapiens
augaccuuguccucagugucau

SEQ ID NO: 39871 - RNA, 22 nt, Homo sapiens
augacauguauuuccaggauuu

SEQ ID NO: 39872 - RNA, 22 nt, Homo sapiens
augaagaucaugaagacggcuu

SEQ ID NO: 39873 - RNA, 23 nt, Homo sapiens
augaacucaucauuuuuuauggc

SEQ ID NO: 39874 - RNA, 22 nt, Homo sapiens
auccagaugggcuuaauguaau

SEQ ID NO: 39875 - RNA, 23 nt, Homo sapiens
auccacauucuaguccuuuaugc

SEQ ID NO: 39876 - RNA, 22 nt, Homo sapiens
aucauccugucaggagcuguga

SEQ ID NO: 39877 - RNA, 22 nt, Homo sapiens
aucuuuggugcaugauacuuug

SEQ ID NO: 39878 - RNA, 22 nt, Homo sapiens
aucuuuggcgggaauaucacag

SEQ ID NO: 39879 - RNA, 17 nt, Homo sapiens
augaacucaucauuuuu

SEQ ID NO: 39880 - RNA, 22 nt, Homo sapiens
augaacucaucauuuuuauggc

SEQ ID NO: 39881 - RNA, 22 nt, Homo sapiens
auagcagugugaaaauugacug

SEQ ID NO: 39882 - RNA, 22 nt, Homo sapiens
auaguagagagggcaaaaugcu

SEQ ID NO: 39883 - RNA, 22 nt, Homo sapiens
auagcagugugaaaauggacua

SEQ ID NO: 39884 - RNA, 22 nt, Homo sapiens
auaacauggaguuugucauuua

SEQ ID NO: 39885 - RNA, 22 nt, Homo sapiens
auaagaagugaaccagacgucu

SEQ ID NO: 39886 - RNA, 22 nt, Homo sapiens
auaagguuagcucugagaaagu

SEQ ID NO: 39887 - RNA, 18 nt, Homo sapiens
auaaccuggugcuuucaa

SEQ ID NO: 39888 - RNA, 22 nt, Homo sapiens
aucacagguacuauggcugaca

SEQ ID NO: 39889 - RNA, 22 nt, Homo sapiens
aucacaguggcucacaagagcc

SEQ ID NO: 39890 - RNA, 22 nt, Homo sapiens
aucaccgugggagauccugccu

SEQ ID NO: 39891 - RNA, 22 nt, Homo sapiens
aucaccuggaggugaucacuug

SEQ ID NO: 39892 - RNA, 19 nt, Homo sapiens
aucaccauuauuuggaaca

SEQ ID NO: 39893 - RNA, 21 nt, Homo sapiens
aucaccgugcaguucuccagg

SEQ ID NO: 39894 - RNA, 22 nt, Homo sapiens
auguuguaguaugagucaaaau

SEQ ID NO: 39895 - RNA, 22 nt, Homo sapiens
auucaccauggcuaccaagggu

SEQ ID NO: 39896 - RNA, 22 nt, Homo sapiens
auucaagugaugcagcuguuuu

SEQ ID NO: 39897 - RNA, 22 nt, Homo sapiens
auguaacuaucugagccauggg

SEQ ID NO: 39898 - RNA, 22 nt, Homo sapiens
auguaaacauuuggucuaaauu

SEQ ID NO: 39899 - RNA, 22 nt, Homo sapiens
auguuaagauggaacaugggaa

SEQ ID NO: 39900 - RNA, 23 nt, Homo sapiens
augugugcuuggagagcaggaug

SEQ ID NO: 39901 - RNA, 22 nt, Homo sapiens
auucccuuagcugccucagccu

SEQ ID NO: 39902 - RNA, 22 nt, Homo sapiens
auucccuuggucaacggaugca

SEQ ID NO: 39903 - RNA, 22 nt, Homo sapiens
auugagguauaauugcuaugca

SEQ ID NO: 39904 - RNA, 22 nt, Homo sapiens
augaugcugcaguuguugccaa

SEQ ID NO: 39905 - RNA, 22 nt, Homo sapiens
auggcagagucagaaagucagg

SEQ ID NO: 39906 - RNA, 22 nt, Homo sapiens
auggcaccauguuaugauaaua

SEQ ID NO: 39907 - RNA, 22 nt, Homo sapiens
augauguguguuuaagaugucu

SEQ ID NO: 39908 - RNA, 22 nt, Homo sapiens
augauguaggccauggguuucu

SEQ ID NO: 39909 - RNA, 22 nt, Homo sapiens
augagaugcaagauuagauggg

SEQ ID NO: 39910 - RNA, 22 nt, Homo sapiens
augagaugaggaauggcccucc

SEQ ID NO: 39911 - RNA, 21 nt, Homo sapiens
augagauguuagacuuuagac

SEQ ID NO: 39912 - RNA, 22 nt, Homo sapiens
auggcccugggaaaggaggcau

SEQ ID NO: 39913 - RNA, 22 nt, Homo sapiens
auggccuaugacagguauguug

SEQ ID NO: 39914 - RNA, 22 nt, Homo sapiens
auggcucaguguguaucuauca

SEQ ID NO: 39915 - RNA, 22 nt, Homo sapiens
auggccuuguauaccuggcaaa

SEQ ID NO: 39916 - RNA, 22 nt, Homo sapiens
auggcauugaagaguugucccu

SEQ ID NO: 39917 - RNA, 22 nt, Homo sapiens
auggcauuuuuagggcugggug

SEQ ID NO: 39918 - RNA, 22 nt, Homo sapiens
auggccauuacuaagaauguuu

SEQ ID NO: 39919 - RNA, 20 nt, Homo sapiens
auggcccugcugggaguguc

SEQ ID NO: 39920 - RNA, 22 nt, Homo sapiens
auggcaguuucagcuauaguuu

SEQ ID NO: 39921 - RNA, 22 nt, Homo sapiens
auggcaaaaaaugcaauuacuu

SEQ ID NO: 39922 - RNA, 22 nt, Homo sapiens
auggcaguguaugauuauauua

SEQ ID NO: 39923 - RNA, 22 nt, Homo sapiens
auggcacuguguccugggguca

SEQ ID NO: 39924 - RNA, 22 nt, Homo sapiens
auggcuguuucugcaaugucua

SEQ ID NO: 39925 - RNA, 22 nt, Homo sapiens
auggcucuggauagaaugcagg

SEQ ID NO: 39926 - RNA, 22 nt, Homo sapiens
auggucuuuguuucuaauucug

SEQ ID NO: 39927 - RNA, 21 nt, Homo sapiens
auggugagaaaguagugucaa

SEQ ID NO: 39928 - RNA, 22 nt, Homo sapiens
auggugugugaauuaaauguua

SEQ ID NO: 39929 - RNA, 22 nt, Homo sapiens
augguugguuaaaucuguguau

SEQ ID NO: 39930 - RNA, 22 nt, Homo sapiens
aggcagucucugccggcugagg

SEQ ID NO: 39931 - RNA, 22 nt, Homo sapiens
aggcaguuucagugagagguga

SEQ ID NO: 39932 - RNA, 22 nt, Homo sapiens
aggcaugguggcacauacaugu

SEQ ID NO: 39933 - RNA, 22 nt, Homo sapiens
aggcaacaugguaaaacccugu

SEQ ID NO: 39934 - RNA, 22 nt, Homo sapiens
aggcaacgcuucuuucucaggu

SEQ ID NO: 39935 - RNA, 22 nt, Homo sapiens
aggcaagaaugcuuguuucacc

SEQ ID NO: 39936 - RNA, 21 nt, Homo sapiens
aggcaagguguuauuauugaa

SEQ ID NO: 39937 - RNA, 22 nt, Homo sapiens
aggcaagugauagcugcguaau

SEQ ID NO: 39938 - RNA, 21 nt, Homo sapiens
agcuuguguguaucacagugu

SEQ ID NO: 39939 - RNA, 22 nt, Homo sapiens
agcuuguguuugucugccuggg

SEQ ID NO: 39940 - RNA, 20 nt, Homo sapiens
aggagcauuuacauuggcuc

SEQ ID NO: 39941 - RNA, 22 nt, Homo sapiens
aggaggauugcuuucaucuuuu

SEQ ID NO: 39942 - RNA, 19 nt, Homo sapiens
agcuagugcucagcuguca

SEQ ID NO: 39943 - RNA, 22 nt, Homo sapiens
agcggcuguuccccuggucuau

SEQ ID NO: 39944 - RNA, 22 nt, Homo sapiens
agcgccacugcacuccagccug

SEQ ID NO: 39945 - RNA, 22 nt, Homo sapiens
agccgguguccacgaagaagag

SEQ ID NO: 39946 - RNA, 21 nt, Homo sapiens
agccugugggucauaguugcc

SEQ ID NO: 39947 - RNA, 22 nt, Homo sapiens
agccuucauucugacaguagga

SEQ ID NO: 39948 - RNA, 19 nt, Homo sapiens
agcuguguugccugugaga

SEQ ID NO: 39949 - RNA, 22 nt, Homo sapiens
agcaccacauacuacagagaua

SEQ ID NO: 39950 - RNA, 23 nt, Homo sapiens
agcaccaccccaggucacaagug

SEQ ID NO: 39951 - RNA, 22 nt, Homo sapiens
agcaccauuagcguugggccgg

SEQ ID NO: 39952 - RNA, 20 nt, Homo sapiens
agccccauguaaaccacaug

SEQ ID NO: 39953 - RNA, 22 nt, Homo sapiens
agugucaggagacagguagcug

SEQ ID NO: 39954 - RNA, 23 nt, Homo sapiens
auaaacugucaaaagccagcccu

SEQ ID NO: 39955 - RNA, 22 nt, Homo sapiens
auaaagguaagcacuauccuga

SEQ ID NO: 39956 - RNA, 22 nt, Homo sapiens
aguuuugguugaguuacuagca

SEQ ID NO: 39957 - RNA, 22 nt, Homo sapiens
agucauggaucacaguagccuc

SEQ ID NO: 39958 - RNA, 20 nt, Homo sapiens
agguacacugacaugccuuc

SEQ ID NO: 39959 - RNA, 22 nt, Homo sapiens
agggcuuaucuguguagaguuc

SEQ ID NO: 39960 - RNA, 22 nt, Homo sapiens
agggccuuuguagauguacuca

SEQ ID NO: 39961 - RNA, 22 nt, Homo sapiens
agugcaguugucacgugccuuc

SEQ ID NO: 39962 - RNA, 22 nt, Homo sapiens
agugcauuugcaucucaauaua

SEQ ID NO: 39963 - RNA, 22 nt, Homo sapiens
agugauguggaguuuggaugga

SEQ ID NO: 39964 - RNA, 21 nt, Homo sapiens
aaugguguugccaacaaggug

SEQ ID NO: 39965 - RNA, 22 nt, Homo sapiens
aaugugcuucuggcugugguca

SEQ ID NO: 39966 - RNA, 22 nt, Homo sapiens
acauguagacaacggacaaagu

SEQ ID NO: 39967 - RNA, 22 nt, Homo sapiens
acaugccucccugguccgcugu

SEQ ID NO: 39968 - RNA, 22 nt, Homo sapiens
acaugcauccaugugaagagac

SEQ ID NO: 39969 - RNA, 22 nt, Homo sapiens
acccugguagcuaugaagucuu

SEQ ID NO: 39970 - RNA, 22 nt, Homo sapiens
acccuggauucguggccuugaa

SEQ ID NO: 39971 - RNA, 22 nt, Homo sapiens
acccuggaggucuacagugcag

SEQ ID NO: 39972 - RNA, 22 nt, Homo sapiens
acccuguugguggaucagauug

SEQ ID NO: 39973 - RNA, 22 nt, Homo sapiens
accccugugacggguauuugag

SEQ ID NO: 39974 - RNA, 22 nt, Homo sapiens
acccgugcucacugccucugcc

SEQ ID NO: 39975 - RNA, 22 nt, Homo sapiens
acccggcaguaauccugcgcgc

SEQ ID NO: 39976 - RNA, 22 nt, Homo sapiens
acccugacacgauucuucacuu

SEQ ID NO: 39977 - RNA, 22 nt, Homo sapiens
accagucucagguaugucuuua

SEQ ID NO: 39978 - RNA, 22 nt, Homo sapiens
accaucuagauuuguguaggua

SEQ ID NO: 39979 - RNA, 22 nt, Homo sapiens
accaugcaguccaauaugcaca

SEQ ID NO: 39980 - RNA, 22 nt, Homo sapiens
accauugcacuccuuucugggc

SEQ ID NO: 39981 - RNA, 22 nt, Homo sapiens
acccaguguucagacuaccugu

SEQ ID NO: 39982 - RNA, 22 nt, Homo sapiens
accacagugcuuccugcucacg

SEQ ID NO: 39983 - RNA, 22 nt, Homo sapiens
accaguguuuaccaaguagcau

SEQ ID NO: 39984 - RNA, 22 nt, Homo sapiens
accaguuuuuuauacaucuucu

SEQ ID NO: 39985 - RNA, 22 nt, Homo sapiens
accaccauugcacugaacuuuc

SEQ ID NO: 39986 - RNA, 23 nt, Homo sapiens
agaugcauucuuguaggauauau

SEQ ID NO: 39987 - RNA, 18 nt, Homo sapiens
agaugcaugcucacuaca

SEQ ID NO: 39988 - RNA, 22 nt, Homo sapiens
agagugcaaagguuggggcugg

SEQ ID NO: 39989 - RNA, 22 nt, Homo sapiens
agauggugauaaaugugguacc

SEQ ID NO: 39990 - RNA, 22 nt, Homo sapiens
agauucauccaaguuguugcau

SEQ ID NO: 39991 - RNA, 22 nt, Homo sapiens
agcaaccagaggagaugaggcu

SEQ ID NO: 39992 - RNA, 22 nt, Homo sapiens
agagugcaauggcaccaucucg

SEQ ID NO: 39993 - RNA, 21 nt, Homo sapiens
agagucaucucuaucuguacc

SEQ ID NO: 39994 - RNA, 22 nt, Homo sapiens
agagcacuguggguccaaauau

SEQ ID NO: 39995 - RNA, 22 nt, Homo sapiens
agagguuuaauugauucacagu

SEQ ID NO: 39996 - RNA, 22 nt, Homo sapiens
agaggucuuaucaaacaugcuu

SEQ ID NO: 39997 - RNA, 18 nt, Homo sapiens
agagcuaugaacauaugc

SEQ ID NO: 39998 - RNA, 22 nt, Homo sapiens
agagguagaagauaggcuacag

SEQ ID NO: 39999 - RNA, 22 nt, Homo sapiens
agagaucauuuuguuucaaauc

SEQ ID NO: 40000 - RNA, 21 nt, Homo sapiens
agaaaaucuuaugggaaacau

SEQ ID NO: 40001 - RNA, 22 nt, Homo sapiens
agaaacauucucuugccuccuu

SEQ ID NO: 40002 - RNA, 22 nt, Homo sapiens
gugaugguaguuuguauuucug

SEQ ID NO: 40003 - RNA, 22 nt, Homo sapiens
gugauaguucuuacuccaaagu

SEQ ID NO: 40004 - RNA, 22 nt, Homo sapiens
gugagucaugucccaucugauu

SEQ ID NO: 40005 - RNA, 22 nt, Homo sapiens
guggaauggaaugauuguguau

SEQ ID NO: 40006 - RNA, 22 nt, Homo sapiens
guggacaugaauuuuggaggca

SEQ ID NO: 40007 - RNA, 22 nt, Homo sapiens
guggaggagaaagaagcauuuc

SEQ ID NO: 40008 - RNA, 22 nt, Homo sapiens
guggacggagguugcagugagc

SEQ ID NO: 40009 - RNA, 22 nt, Homo sapiens
guggaaugauaucucauugugg

SEQ ID NO: 40010 - RNA, 22 nt, Homo sapiens
guggaaguuaagugacuuucug

SEQ ID NO: 40011 - RNA, 22 nt, Homo sapiens
guggaaaacauaugcuuguuga

SEQ ID NO: 40012 - RNA, 22 nt, Homo sapiens
guggaaaucucugugugacuua

SEQ ID NO: 40013 - RNA, 22 nt, Homo sapiens
guggaaggucaugaauguucuu

SEQ ID NO: 40014 - RNA, 22 nt, Homo sapiens
guggaagguaaugcagcuuacu

SEQ ID NO: 40015 - RNA, 22 nt, Homo sapiens
guggaaaauuauugcuguuuuu

SEQ ID NO: 40016 - RNA, 22 nt, Homo sapiens
guggugucuuuuuugauuagga

SEQ ID NO: 40017 - RNA, 22 nt, Homo sapiens
gugguguuugagcugccaggga

SEQ ID NO: 40018 - RNA, 22 nt, Homo sapiens
gugguguccugcaccuauaguc

SEQ ID NO: 40019 - RNA, 22 nt, Homo sapiens
gugugucuugaccaggaucgga

SEQ ID NO: 40020 - RNA, 22 nt, Homo sapiens
guguaaaucugcugugaacauu

SEQ ID NO: 40021 - RNA, 22 nt, Homo sapiens
guguaaaugagugcugaaggag

SEQ ID NO: 40022 - RNA, 22 nt, Homo sapiens
gugugcaauuuugugggaggca

SEQ ID NO: 40023 - RNA, 22 nt, Homo sapiens
gugugcacaaucuggcaugugc

SEQ ID NO: 40024 - RNA, 22 nt, Homo sapiens
gugugauggcgcacacagggug

SEQ ID NO: 40025 - RNA, 22 nt, Homo sapiens
uaacccagugucugugaugggu

SEQ ID NO: 40026 - RNA, 22 nt, Homo sapiens
uaacaacauucuaacugacggc

SEQ ID NO: 40027 - RNA, 22 nt, Homo sapiens
uaacaagagagucagucagucc

SEQ ID NO: 40028 - RNA, 22 nt, Homo sapiens
guugccuaggcuggagugcagu

SEQ ID NO: 40029 - RNA, 22 nt, Homo sapiens
guuugugcuccuaugagaaccu

SEQ ID NO: 40030 - RNA, 22 nt, Homo sapiens
guuugugcuccuaugagaaucu

SEQ ID NO: 40031 - RNA, 22 nt, Homo sapiens
uaaaccuagcauuuugcauaug

SEQ ID NO: 40032 - RNA, 22 nt, Homo sapiens
guucaucagggauacuggcuua

SEQ ID NO: 40033 - RNA, 22 nt, Homo sapiens
guucaucagggacacugguuug

SEQ ID NO: 40034 - RNA, 22 nt, Homo sapiens
guguugcacauucuguggaugu

SEQ ID NO: 40035 - RNA, 22 nt, Homo sapiens
guucaucagggauacuggccug

SEQ ID NO: 40036 - RNA, 20 nt, Homo sapiens
guugaugcugaaguugcuua

SEQ ID NO: 40037 - RNA, 22 nt, Homo sapiens
guauagcaaugccccacaccug

SEQ ID NO: 40038 - RNA, 22 nt, Homo sapiens
guagcagucacauagcagauug

SEQ ID NO: 40039 - RNA, 22 nt, Homo sapiens
guagugcaguuugagaaucagu

SEQ ID NO: 40040 - RNA, 22 nt, Homo sapiens
ggcaccauggaaggacgggagc

SEQ ID NO: 40041 - RNA, 22 nt, Homo sapiens
ggcaagaaagaaaucaucuguc

SEQ ID NO: 40042 - RNA, 22 nt, Homo sapiens
ggcaagaaccagggauuugcgu

SEQ ID NO: 40043 - RNA, 20 nt, Homo sapiens
ggcaagacccaaagugugug

SEQ ID NO: 40044 - RNA, 17 nt, Homo sapiens
ggcaagaaguggaacuc

SEQ ID NO: 40045 - RNA, 19 nt, Homo sapiens
ggcaagaguuguucugugu

SEQ ID NO: 40046 - RNA, 21 nt, Homo sapiens
ggcaagagaauacaacauaaa

SEQ ID NO: 40047 - RNA, 22 nt, Homo sapiens
ggcaagaggagauucugcuccc

SEQ ID NO: 40048 - RNA, 22 nt, Homo sapiens
ggcaugauguauuugagguuug

SEQ ID NO: 40049 - RNA, 22 nt, Homo sapiens
ggcacgguggcucacaccugua

SEQ ID NO: 40050 - RNA, 22 nt, Homo sapiens
guaugaccucgcuuuauugcag

SEQ ID NO: 40051 - RNA, 22 nt, Homo sapiens
gucagauaauuugcauccaucu

SEQ ID NO: 40052 - RNA, 22 nt, Homo sapiens
gucagcaaagaggaauaguuug

SEQ ID NO: 40053 - RNA, 22 nt, Homo sapiens
gucacugagcaauagaaaguuu

SEQ ID NO: 40054 - RNA, 22 nt, Homo sapiens
gucacugggugcugcgccuguc

SEQ ID NO: 40055 - RNA, 22 nt, Homo sapiens
gucacugucuacuguaauagcc

SEQ ID NO: 40056 - RNA, 22 nt, Homo sapiens
gucucccagccuacaucuuucu

SEQ ID NO: 40057 - RNA, 22 nt, Homo sapiens
gucagucugucccugccuggcg

SEQ ID NO: 40058 - RNA, 22 nt, Homo sapiens
gucagugcauguaaacauaaaa

SEQ ID NO: 40059 - RNA, 22 nt, Homo sapiens
gucagugccugucccaggcuuu

SEQ ID NO: 40060 - RNA, 22 nt, Homo sapiens
gucagcuuuuccuuacuuuagg

SEQ ID NO: 40061 - RNA, 22 nt, Homo sapiens
gucugugcauuaauacgugcug

SEQ ID NO: 40062 - RNA, 22 nt, Homo sapiens
gucugcaugucauaugauagua

SEQ ID NO: 40063 - RNA, 22 nt, Homo sapiens
gucuuccagccuccaucuuucu

SEQ ID NO: 40064 - RNA, 22 nt, Homo sapiens
gucuuuggaaaaaaugucuguu

SEQ ID NO: 40065 - RNA, 22 nt, Homo sapiens
gucuuugcuuuuaaccagaggu

SEQ ID NO: 40066 - RNA, 22 nt, Homo sapiens
gucuuugcauguauguucauga

SEQ ID NO: 40067 - RNA, 22 nt, Homo sapiens
gugaacaagcaaaggcaggagg

SEQ ID NO: 40068 - RNA, 22 nt, Homo sapiens
gugacacuggagcuggcacaau

SEQ ID NO: 40069 - RNA, 22 nt, Homo sapiens
gugacaguggagacuuacuuca

SEQ ID NO: 40070 - RNA, 22 nt, Homo sapiens
gugaauguaaagucaugugacu

SEQ ID NO: 40071 - RNA, 22 nt, Homo sapiens
gugaccaaagauagcucaaguu

SEQ ID NO: 40072 - RNA, 22 nt, Homo sapiens
gugacugggaguggugaagaua

SEQ ID NO: 40073 - RNA, 22 nt, Homo sapiens
gugacuacaggccacaguuugg

SEQ ID NO: 40074 - RNA, 20 nt, Homo sapiens
gugacugagcacgggcacag

SEQ ID NO: 40075 - RNA, 20 nt, Homo sapiens
ucaaggcacgaauaaaaguu

SEQ ID NO: 40076 - RNA, 20 nt, Homo sapiens
ucaaggcaggaacuguacau

SEQ ID NO: 40077 - RNA, 21 nt, Homo sapiens
ucaaauugaaauuaggucauu

SEQ ID NO: 40078 - RNA, 22 nt, Homo sapiens
ucaagugauucuugugccuuag

SEQ ID NO: 40079 - RNA, 22 nt, Homo sapiens
ucacaauucucaauuugugaaa

SEQ ID NO: 40080 - RNA, 21 nt, Homo sapiens
ucacaaugaacagcagcagaa

SEQ ID NO: 40081 - RNA, 22 nt, Homo sapiens
ucacacgugaacucaucacaga

SEQ ID NO: 40082 - RNA, 22 nt, Homo sapiens
ucacagccuaguuuuauacauu

SEQ ID NO: 40083 - RNA, 22 nt, Homo sapiens
ucaccguguaucauuucauccg

SEQ ID NO: 40084 - RNA, 22 nt, Homo sapiens
ucaccucgugaucugcccacuu

SEQ ID NO: 40085 - RNA, 22 nt, Homo sapiens
ucaccuggagaagauggaucau

SEQ ID NO: 40086 - RNA, 22 nt, Homo sapiens
ucacccugacaugcggccgaac

SEQ ID NO: 40087 - RNA, 22 nt, Homo sapiens
ucaccaccuuccaggaccacug

SEQ ID NO: 40088 - RNA, 23 nt, Homo sapiens
ucacuagaguccuggaguuugag

SEQ ID NO: 40089 - RNA, 21 nt, Homo sapiens
ucaccuguugcgaugaagcug

SEQ ID NO: 40090 - RNA, 17 nt, Homo sapiens
ucacaguguuaggauga

SEQ ID NO: 40091 - RNA, 22 nt, Homo sapiens
ucacauuaagcuguuauuucuu

SEQ ID NO: 40092 - RNA, 22 nt, Homo sapiens
uaucaugucuguguguaccuag

SEQ ID NO: 40093 - RNA, 22 nt, Homo sapiens
uaucauggaaugagguuggaca

SEQ ID NO: 40094 - RNA, 22 nt, Homo sapiens
uaucauggggacugcagccuag

SEQ ID NO: 40095 - RNA, 22 nt, Homo sapiens
uaugucuucuuuagagaaaugu

SEQ ID NO: 40096 - RNA, 22 nt, Homo sapiens
uauggucuuugagaggugacug

SEQ ID NO: 40097 - RNA, 22 nt, Homo sapiens
uaugucacuugguuuggugcua

SEQ ID NO: 40098 - RNA, 22 nt, Homo sapiens
uaucuuggaguuugacaaccaa

SEQ ID NO: 40099 - RNA, 22 nt, Homo sapiens
uauggguaguacaaaguguaua

SEQ ID NO: 40100 - RNA, 22 nt, Homo sapiens
uauggguauuuuauacauaacc

SEQ ID NO: 40101 - RNA, 22 nt, Homo sapiens
ucaaauguuuguuuaaggcuua

SEQ ID NO: 40102 - RNA, 22 nt, Homo sapiens
ucaaagugacaaaguugcagca

SEQ ID NO: 40103 - RNA, 22 nt, Homo sapiens
uauugcuggauguauuacaugu

SEQ ID NO: 40104 - RNA, 22 nt, Homo sapiens
ucaaacugucagguugaccaga

SEQ ID NO: 40105 - RNA, 22 nt, Homo sapiens
uauugcccugcuuuguucuaaa

SEQ ID NO: 40106 - RNA, 22 nt, Homo sapiens
uauugcauauuauucuaguggc

SEQ ID NO: 40107 - RNA, 22 nt, Homo sapiens
uauguuaucaaaaagcuaagga

SEQ ID NO: 40108 - RNA, 18 nt, Homo sapiens
uaggaacauugauuggag

SEQ ID NO: 40109 - RNA, 22 nt, Homo sapiens
uaggacaaugguacagcagaaa

SEQ ID NO: 40110 - RNA, 22 nt, Homo sapiens
uaggacacagauggagaaaagc

SEQ ID NO: 40111 - RNA, 22 nt, Homo sapiens
uaggacacaggacauauguaga

SEQ ID NO: 40112 - RNA, 22 nt, Homo sapiens
uagcugcauccugugcacucaa

SEQ ID NO: 40113 - RNA, 22 nt, Homo sapiens
uaggcauuuuucugauaaacua

SEQ ID NO: 40114 - RNA, 22 nt, Homo sapiens
uaggcaguguucucacuuguaa

SEQ ID NO: 40115 - RNA, 22 nt, Homo sapiens
uaggacacucucuccaccagua

SEQ ID NO: 40116 - RNA, 22 nt, Homo sapiens
uaggcaauguacauaucggccc

SEQ ID NO: 40117 - RNA, 22 nt, Homo sapiens
uagcaguuguuguuacuuguau

SEQ ID NO: 40118 - RNA, 22 nt, Homo sapiens
uagcacaucuucuuggccugca

SEQ ID NO: 40119 - RNA, 22 nt, Homo sapiens
uagccgggugugguggaacucc

SEQ ID NO: 40120 - RNA, 22 nt, Homo sapiens
uaucaacaggguggccagugua

SEQ ID NO: 40121 - RNA, 22 nt, Homo sapiens
uaguauguuuauagcauugagu

SEQ ID NO: 40122 - RNA, 22 nt, Homo sapiens
uagucaaaucugaaggaaauuu

SEQ ID NO: 40123 - RNA, 22 nt, Homo sapiens
uagggcuuuaguuugcuugugu

SEQ ID NO: 40124 - RNA, 22 nt, Homo sapiens
uagguacuuuacauguuaucuc

SEQ ID NO: 40125 - RNA, 22 nt, Homo sapiens
uagguagaaucuugaagccauu

SEQ ID NO: 40126 - RNA, 22 nt, Homo sapiens
uagugcuguaauucuaaugaaa

SEQ ID NO: 40127 - RNA, 18 nt, Homo sapiens
uagugcuguucucaugau

SEQ ID NO: 40128 - RNA, 22 nt, Homo sapiens
uagugcugagauugagaagccc

SEQ ID NO: 40129 - RNA, 21 nt, Homo sapiens
uagugcugaggcaguauggga

SEQ ID NO: 40130 - RNA, 22 nt, Homo sapiens
uagugcaguggcuccaucucag

SEQ ID NO: 40131 - RNA, 22 nt, Homo sapiens
uagugacauugcugggaaugcu

SEQ ID NO: 40132 - RNA, 22 nt, Homo sapiens
uagugcacuacuugugggaaug

SEQ ID NO: 40133 - RNA, 22 nt, Homo sapiens
uaccacaggcuggguaaucuau

SEQ ID NO: 40134 - RNA, 22 nt, Homo sapiens
uaccacagucauuacacuugua

SEQ ID NO: 40135 - RNA, 23 nt, Homo sapiens
uaccacauuccuucuuuccuguu

SEQ ID NO: 40136 - RNA, 22 nt, Homo sapiens
uacauguauguguuuauggcug

SEQ ID NO: 40137 - RNA, 22 nt, Homo sapiens
uaaggcacauaggccuggaaac

SEQ ID NO: 40138 - RNA, 22 nt, Homo sapiens
uaaggcacuacuuuaggcuuuc

SEQ ID NO: 40139 - RNA, 22 nt, Homo sapiens
uaaggcacucuucugugugccu

SEQ ID NO: 40140 - RNA, 22 nt, Homo sapiens
uaccagugaauuccaggggcua

SEQ ID NO: 40141 - RNA, 22 nt, Homo sapiens
uacccucuggauacccuuguuc

SEQ ID NO: 40142 - RNA, 19 nt, Homo sapiens
uaccagcacaguguuugag

SEQ ID NO: 40143 - RNA, 22 nt, Homo sapiens
uaacugucucccuugguccuga

SEQ ID NO: 40144 - RNA, 22 nt, Homo sapiens
uaacuucaucauaagucaagaa

SEQ ID NO: 40145 - RNA, 22 nt, Homo sapiens
uaagacucuggacucuaauguu

SEQ ID NO: 40146 - RNA, 21 nt, Homo sapiens
uaagacugccaguagggcugu

SEQ ID NO: 40147 - RNA, 22 nt, Homo sapiens
uaacugcaaccuccgccucccg

SEQ ID NO: 40148 - RNA, 22 nt, Homo sapiens
uaagccaccgugccuggccuaa

SEQ ID NO: 40149 - RNA, 22 nt, Homo sapiens
uaagcuaauguguuuucucuua

SEQ ID NO: 40150 - RNA, 20 nt, Homo sapiens
uaagcauaguugucaggguc

SEQ ID NO: 40151 - RNA, 19 nt, Homo sapiens
uaagaugaagcugucuggg

SEQ ID NO: 40152 - RNA, 19 nt, Homo sapiens
uagaugucuuugcauagau

SEQ ID NO: 40153 - RNA, 22 nt, Homo sapiens
uagcacagugucauucuaggua

SEQ ID NO: 40154 - RNA, 22 nt, Homo sapiens
uagcaaaucaauggaauugaag

SEQ ID NO: 40155 - RNA, 22 nt, Homo sapiens
uacugcauuccaaucugggcga

SEQ ID NO: 40156 - RNA, 22 nt, Homo sapiens
uaccugagucuagagucuagaa

SEQ ID NO: 40157 - RNA, 22 nt, Homo sapiens
uagaagcacuaucccuccuagu

SEQ ID NO: 40158 - RNA, 22 nt, Homo sapiens
uacuguacugcaguucugcaaa

SEQ ID NO: 40159 - RNA, 22 nt, Homo sapiens
uacuguguaguuagaccucaga

SEQ ID NO: 40160 - RNA, 21 nt, Homo sapiens
uacuggagauacagucugcaa

SEQ ID NO: 40161 - RNA, 22 nt, Homo sapiens
gaugguuuucaccugcaugcuu

SEQ ID NO: 40162 - RNA, 22 nt, Homo sapiens
gauggcucugcaggugagggua

SEQ ID NO: 40163 - RNA, 22 nt, Homo sapiens
gauggcauuucuggaucugaca

SEQ ID NO: 40164 - RNA, 22 nt, Homo sapiens
gauguagaaagagugggcugga

SEQ ID NO: 40165 - RNA, 22 nt, Homo sapiens
gauggcacuaagccauguagga

SEQ ID NO: 40166 - RNA, 22 nt, Homo sapiens
gauggcacuguagcaacacaaa

SEQ ID NO: 40167 - RNA, 22 nt, Homo sapiens
gauggcacuuaagagcaagagc

SEQ ID NO: 40168 - RNA, 22 nt, Homo sapiens
gagugcaauggugccaucucgg

SEQ ID NO: 40169 - RNA, 22 nt, Homo sapiens
gaguggugguucugaaacuuuu

SEQ ID NO: 40170 - RNA, 22 nt, Homo sapiens
gagugcuguuagcccuggguuu

SEQ ID NO: 40171 - RNA, 22 nt, Homo sapiens
gccauagucauagauggcaggg

SEQ ID NO: 40172 - RNA, 22 nt, Homo sapiens
gcuauggccugaauguuugugu

SEQ ID NO: 40173 - RNA, 22 nt, Homo sapiens
gcaugcacaugugaaaaaauga

SEQ ID NO: 40174 - RNA, 22 nt, Homo sapiens
gcacccugucaaaauggaccaa

SEQ ID NO: 40175 - RNA, 22 nt, Homo sapiens
gcaccacugcacucucagcuug

SEQ ID NO: 40176 - RNA, 22 nt, Homo sapiens
gcaccccuuaccgggcuggguu

SEQ ID NO: 40177 - RNA, 22 nt, Homo sapiens
gcuuggugugcaagugguacua

SEQ ID NO: 40178 - RNA, 19 nt, Homo sapiens
gcuuguccacgugagauaa

SEQ ID NO: 40179 - RNA, 22 nt, Homo sapiens
gcuugguccccacccaaaucgc

SEQ ID NO: 40180 - RNA, 22 nt, Homo sapiens
gcuuguguuugcuccccagaau

SEQ ID NO: 40181 - RNA, 22 nt, Homo sapiens
gcucguccccuccugacucugc

SEQ ID NO: 40182 - RNA, 22 nt, Homo sapiens
gcuguugguaaaaaggacauga

SEQ ID NO: 40183 - RNA, 22 nt, Homo sapiens
ggagugucugugcuggucaaag

SEQ ID NO: 40184 - RNA, 22 nt, Homo sapiens
ggaguguuccauuugucacauu

SEQ ID NO: 40185 - RNA, 22 nt, Homo sapiens
ggaucacagccagcucccagaa

SEQ ID NO: 40186 - RNA, 22 nt, Homo sapiens
ggagucugauuuuuauguugcu

SEQ ID NO: 40187 - RNA, 22 nt, Homo sapiens
ggagugucccaaucucagcuca

SEQ ID NO: 40188 - RNA, 22 nt, Homo sapiens
ggagugucagaaacaguguccu

SEQ ID NO: 40189 - RNA, 23 nt, Homo sapiens
ggauucaucuguuuguucgcugu

SEQ ID NO: 40190 - RNA, 22 nt, Homo sapiens
ggagucugauguucuaaggcag

SEQ ID NO: 40191 - RNA, 22 nt, Homo sapiens
ggagucugaacuggacaaugac

SEQ ID NO: 40192 - RNA, 20 nt, Homo sapiens
ggagguuguauaaguacauc

SEQ ID NO: 40193 - RNA, 22 nt, Homo sapiens
ggacuagaucucccggcuucua

SEQ ID NO: 40194 - RNA, 22 nt, Homo sapiens
ggagaugaaaugagcuacuuaa

SEQ ID NO: 40195 - RNA, 22 nt, Homo sapiens
cugucacugggaggggcagcag

SEQ ID NO: 40196 - RNA, 22 nt, Homo sapiens
cuguccugcagagucagaauga

SEQ ID NO: 40197 - RNA, 22 nt, Homo sapiens
cuguagcuuuuauaugcuuagc

SEQ ID NO: 40198 - RNA, 22 nt, Homo sapiens
cugugcuaggcaaugugguaga

SEQ ID NO: 40199 - RNA, 23 nt, Homo sapiens
cuguggugaggcccuagaaucug

SEQ ID NO: 40200 - RNA, 22 nt, Homo sapiens
cugugguugagcuuugccauga

SEQ ID NO: 40201 - RNA, 22 nt, Homo sapiens
cugugguguaacucuuggggcg

SEQ ID NO: 40202 - RNA, 22 nt, Homo sapiens
cuuuguccuucaagguguguca

SEQ ID NO: 40203 - RNA, 22 nt, Homo sapiens
cuuugguuuacuuggugcuagu

SEQ ID NO: 40204 - RNA, 22 nt, Homo sapiens
gacaguuucucaggcuuccuua

SEQ ID NO: 40205 - RNA, 20 nt, Homo sapiens
gacauaggcugguaucuggc

SEQ ID NO: 40206 - RNA, 22 nt, Homo sapiens
gaaauguuuuucaugugggcaa

SEQ ID NO: 40207 - RNA, 22 nt, Homo sapiens
cuuuuggcuuagaauugucuug

SEQ ID NO: 40208 - RNA, 21 nt, Homo sapiens
cuuuuuacucguucauaugca

SEQ ID NO: 40209 - RNA, 22 nt, Homo sapiens
cuuuguguaggugccucuggcu

SEQ ID NO: 40210 - RNA, 22 nt, Homo sapiens
cuuuguggggucuuuccucaaa

SEQ ID NO: 40211 - RNA, 22 nt, Homo sapiens
gacauguuuucaagauuuauaa

SEQ ID NO: 40212 - RNA, 21 nt, Homo sapiens
gaccacagcagggaaugucag

SEQ ID NO: 40213 - RNA, 22 nt, Homo sapiens
gaccacagacuggaaagagggc

SEQ ID NO: 40214 - RNA, 21 nt, Homo sapiens
gacuacaccaggaugcuaguu

SEQ ID NO: 40215 - RNA, 22 nt, Homo sapiens
gaccuuguagaaucucaugauu

SEQ ID NO: 40216 - RNA, 22 nt, Homo sapiens
gagaacauuaauaguuaauuuu

SEQ ID NO: 40217 - RNA, 22 nt, Homo sapiens
gagaacauuuaagccacucagg

SEQ ID NO: 40218 - RNA, 22 nt, Homo sapiens
gagaugugguucaaggguguuu

SEQ ID NO: 40219 - RNA, 22 nt, Homo sapiens
gacucuguagacaaucacaucu

SEQ ID NO: 40220 - RNA, 22 nt, Homo sapiens
gacugcauuugccccaucgaau

SEQ ID NO: 40221 - RNA, 22 nt, Homo sapiens
gagugcaaagguccugaggugg

SEQ ID NO: 40222 - RNA, 22 nt, Homo sapiens
gaggcagucugacccuuagcag

SEQ ID NO: 40223 - RNA, 22 nt, Homo sapiens
gagcuuggguuaaaguugccuu

SEQ ID NO: 40224 - RNA, 22 nt, Homo sapiens
gagcucguuuuugcugacucuu

SEQ ID NO: 40225 - RNA, 22 nt, Homo sapiens
gagcucauuaaaaauguagaau

SEQ ID NO: 40226 - RNA, 22 nt, Homo sapiens
gagcucauuaaaguaggaccua

SEQ ID NO: 40227 - RNA, 22 nt, Homo sapiens
gagcugaucuuuucugauucca

SEQ ID NO: 40228 - RNA, 22 nt, Homo sapiens
gagauucaucuagguccagaga

SEQ ID NO: 40229 - RNA, 22 nt, Homo sapiens
gagcaccagucccugucagugc

SEQ ID NO: 40230 - RNA, 22 nt, Homo sapiens
gagccuguaggaggagaggugg

SEQ ID NO: 40231 - RNA, 22 nt, Homo sapiens
cagguaguauuugguuacauaa

SEQ ID NO: 40232 - RNA, 22 nt, Homo sapiens
cagguauagucacuugcccaag

SEQ ID NO: 40233 - RNA, 22 nt, Homo sapiens
caggcagugggagacaaaacug

SEQ ID NO: 40234 - RNA, 22 nt, Homo sapiens
caggaccucuugccuggaagcc

SEQ ID NO: 40235 - RNA, 22 nt, Homo sapiens
cagauggucuuaaggcagccuu

SEQ ID NO: 40236 - RNA, 22 nt, Homo sapiens
caucauugcacccuauagagaa

SEQ ID NO: 40237 - RNA, 21 nt, Homo sapiens
cauccccugccauuguggucu

SEQ ID NO: 40238 - RNA, 22 nt, Homo sapiens
caucucauugaauugcugagca

SEQ ID NO: 40239 - RNA, 22 nt, Homo sapiens
caugcacugagagggucucggc

SEQ ID NO: 40240 - RNA, 19 nt, Homo sapiens
caugccacugcacuugagu

SEQ ID NO: 40241 - RNA, 20 nt, Homo sapiens
cauuccacuuuccugucagu

SEQ ID NO: 40242 - RNA, 22 nt, Homo sapiens
cauugcacuccauccuuggcaa

SEQ ID NO: 40243 - RNA, 22 nt, Homo sapiens
cauugcacuccagccuuggcaa

SEQ ID NO: 40244 - RNA, 22 nt, Homo sapiens
cauugcacuccagccuugguga

SEQ ID NO: 40245 - RNA, 22 nt, Homo sapiens
cauggcacugagcagguaugca

SEQ ID NO: 40246 - RNA, 23 nt, Homo sapiens
cauggcuguuaacacuguuugag

SEQ ID NO: 40247 - RNA, 22 nt, Homo sapiens
cauggucaccuuccaaguuauu

SEQ ID NO: 40248 - RNA, 22 nt, Homo sapiens
caugucacuuccucucugaugg

SEQ ID NO: 40249 - RNA, 22 nt, Homo sapiens
cacugugcaaccuccaccuccc

SEQ ID NO: 40250 - RNA, 22 nt, Homo sapiens
cagagcaaugcuuuugcuuuga

SEQ ID NO: 40251 - RNA, 22 nt, Homo sapiens
cagaucaucuugagcuuaggaa

SEQ ID NO: 40252 - RNA, 22 nt, Homo sapiens
cagagucaagcucuuguuccau

SEQ ID NO: 40253 - RNA, 21 nt, Homo sapiens
cacugcaucacaggacagcau

SEQ ID NO: 40254 - RNA, 22 nt, Homo sapiens
cacugcauccuccaccugccag

SEQ ID NO: 40255 - RNA, 22 nt, Homo sapiens
cacugcauuacucaugagcaug

SEQ ID NO: 40256 - RNA, 22 nt, Homo sapiens
cacuggacauguugaagcuuuu

SEQ ID NO: 40257 - RNA, 23 nt, Homo sapiens
cacugggcagcagguguucccag

SEQ ID NO: 40258 - RNA, 22 nt, Homo sapiens
cacugcauccucugccuggcgg

SEQ ID NO: 40259 - RNA, 21 nt, Homo sapiens
cacugcacuugccuucugggu

SEQ ID NO: 40260 - RNA, 22 nt, Homo sapiens
caauggcaaugaaauagugaga

SEQ ID NO: 40261 - RNA, 22 nt, Homo sapiens
cacaaugucugguaggccacuu

SEQ ID NO: 40262 - RNA, 22 nt, Homo sapiens
cacacugucuucauuacuguag

SEQ ID NO: 40263 - RNA, 22 nt, Homo sapiens
cacaggccugucucuuucuaac

SEQ ID NO: 40264 - RNA, 22 nt, Homo sapiens
auugcagaaaugacagagcgcc

SEQ ID NO: 40265 - RNA, 22 nt, Homo sapiens
caaggcacagccccuacuuccu

SEQ ID NO: 40266 - RNA, 22 nt, Homo sapiens
ccaguuuucucacuguugcagu

SEQ ID NO: 40267 - RNA, 22 nt, Homo sapiens
cgccugagcugaggaagcugca

SEQ ID NO: 40268 - RNA, 22 nt, Homo sapiens
cggugcaauucuccugucucag

SEQ ID NO: 40269 - RNA, 22 nt, Homo sapiens
cgugaggaaaacagaggguguu

SEQ ID NO: 40270 - RNA, 22 nt, Homo sapiens
ccaguguucuggaaggcugagu

SEQ ID NO: 40271 - RNA, 22 nt, Homo sapiens
ccagugucugacagacacggcg

SEQ ID NO: 40272 - RNA, 19 nt, Homo sapiens
ccaguguugccagagcuga

SEQ ID NO: 40273 - RNA, 17 nt, Homo sapiens
ccagugaucccuuuugu

SEQ ID NO: 40274 - RNA, 22 nt, Homo sapiens
ccaggguuccacgccuggcugu

SEQ ID NO: 40275 - RNA, 22 nt, Homo sapiens
ccaggguugagacccacugacu

SEQ ID NO: 40276 - RNA, 22 nt, Homo sapiens
cauugucccucaaugacuauga

SEQ ID NO: 40277 - RNA, 22 nt, Homo sapiens
cauugggugagaacaugcuccu

SEQ ID NO: 40278 - RNA, 22 nt, Homo sapiens
cuccauguggcuaacuuuuaaa

SEQ ID NO: 40279 - RNA, 22 nt, Homo sapiens
cuccaggugucauccaccuccu

SEQ ID NO: 40280 - RNA, 22 nt, Homo sapiens
cuagcagcauaagaaucaccaa

SEQ ID NO: 40281 - RNA, 22 nt, Homo sapiens
cuagcagacacuuccagagagu

SEQ ID NO: 40282 - RNA, 22 nt, Homo sapiens
cuacugauuaaaagaacagguc

SEQ ID NO: 40283 - RNA, 22 nt, Homo sapiens
cuagaggcacagccuaggcacu

SEQ ID NO: 40284 - RNA, 22 nt, Homo sapiens
cuacaguucuuaauuaaguagu

SEQ ID NO: 40285 - RNA, 22 nt, Homo sapiens
cucccagugacccaggaacagg

SEQ ID NO: 40286 - RNA, 22 nt, Homo sapiens
cuccuggugauuggagugugaa

SEQ ID NO: 40287 - RNA, 22 nt, Homo sapiens
cugagacacucuuaucugcaua

SEQ ID NO: 40288 - RNA, 17 nt, Homo sapiens
cugaccucauuguguac

SEQ ID NO: 40289 - RNA, 22 nt, Homo sapiens
cugacagaugacugccacugua

SEQ ID NO: 40290 - RNA, 22 nt, Homo sapiens
cugagaucguggggcugcuguc

SEQ ID NO: 40291 - RNA, 22 nt, Homo sapiens
cugagauggagucucgcauugu

SEQ ID NO: 40292 - RNA, 22 nt, Homo sapiens
cugagauuaagauauugggagu

SEQ ID NO: 40293 - RNA, 22 nt, Homo sapiens
cugagcuagaccacuuggcucc

SEQ ID NO: 40294 - RNA, 22 nt, Homo sapiens
cugagcuaguagcauuguguca

SEQ ID NO: 40295 - RNA, 18 nt, Homo sapiens
cugccagugugcucuccg

SEQ ID NO: 40296 - RNA, 22 nt, Homo sapiens
cugcccguaauccucuccccag

SEQ ID NO: 40297 - RNA, 22 nt, Homo sapiens
cugccaguuugauucgggccac

SEQ ID NO: 40298 - RNA, 21 nt, Homo sapiens
cugcauccauuucugagugau

SEQ ID NO: 40299 - RNA, 22 nt, Homo sapiens
cuggcacccuugcuuaggaaga

SEQ ID NO: 40300 - RNA, 22 nt, Homo sapiens
cuggcagugcuuguuauccugg

SEQ ID NO: 40301 - RNA, 22 nt, Homo sapiens
cuggccagagacauucauuaaa

SEQ ID NO: 40302 - RNA, 22 nt, Homo sapiens
cuggucaugggggcacccucug

SEQ ID NO: 40303 - RNA, 22 nt, Homo sapiens
cugguuguuacaugcuugccag

SEQ ID NO: 40304 - RNA, 22 nt, Homo sapiens
cuggaaacaucuuaggaaugca

SEQ ID NO: 40305 - RNA, 22 nt, Homo sapiens
cuggaaagaaucaggcuaaacu

SEQ ID NO: 40306 - RNA, 22 nt, Homo sapiens
cugccugagaaaauggagggca

SEQ ID NO: 40307 - RNA, 22 nt, Homo sapiens
cuggagaucuugacauugaagu

SEQ ID NO: 40308 - RNA, 22 nt, Homo sapiens
cuggagcauugguggauuuguu

SEQ ID NO: 40309 - RNA, 22 nt, Homo sapiens
cuggagauuaaccaauugccau

SEQ ID NO: 40310 - RNA, 22 nt, Homo sapiens
cuggcaaauguuuucuguaaag

SEQ ID NO: 40311 - RNA, 22 nt, Homo sapiens
cuggauagagauugaugaugcu

SEQ ID NO: 40312 - RNA, 22 nt, Homo sapiens
uucagcacaguguggaucauuc

SEQ ID NO: 40313 - RNA, 22 nt, Homo sapiens
uuccagagucaccuuucugucg

SEQ ID NO: 40314 - RNA, 22 nt, Homo sapiens
uuccagaugggaguucuauucu

SEQ ID NO: 40315 - RNA, 22 nt, Homo sapiens
uuccaggugggcgugggccugg

SEQ ID NO: 40316 - RNA, 22 nt, Homo sapiens
uucaccuguagcaugcccuugg

SEQ ID NO: 40317 - RNA, 22 nt, Homo sapiens
uucagauugcauaccgaaagua

SEQ ID NO: 40318 - RNA, 22 nt, Homo sapiens
uucagcacugaaaauaugucau

SEQ ID NO: 40319 - RNA, 22 nt, Homo sapiens
uucagagagggagggauaccua

SEQ ID NO: 40320 - RNA, 22 nt, Homo sapiens
uugaagacuaaguuaucaggau

SEQ ID NO: 40321 - RNA, 22 nt, Homo sapiens
uugaaauguguaagcuccgaaa

SEQ ID NO: 40322 - RNA, 22 nt, Homo sapiens
uucuuugcuuggaagcggggga

SEQ ID NO: 40323 - RNA, 22 nt, Homo sapiens
uuccugugacuguguggcaccc

SEQ ID NO: 40324 - RNA, 22 nt, Homo sapiens
uuccuugagaaaggcacaaguu

SEQ ID NO: 40325 - RNA, 22 nt, Homo sapiens
uuccuugagaaaguacaaggcu

SEQ ID NO: 40326 - RNA, 22 nt, Homo sapiens
uucgcagcucaguucaacuagg

SEQ ID NO: 40327 - RNA, 20 nt, Homo sapiens
uucuauggugaugaguccug

SEQ ID NO: 40328 - RNA, 22 nt, Homo sapiens
uucuagagagaagacuuaagcu

SEQ ID NO: 40329 - RNA, 22 nt, Homo sapiens
uugagagcugaugaaagauaaa

SEQ ID NO: 40330 - RNA, 22 nt, Homo sapiens
uugagauggagucucacucuug

SEQ ID NO: 40331 - RNA, 22 nt, Homo sapiens
uugagauggagucucacucugu

SEQ ID NO: 40332 - RNA, 22 nt, Homo sapiens
uugagauggagccucacucugc

SEQ ID NO: 40333 - RNA, 22 nt, Homo sapiens
uugagauggagcuucacucuug

SEQ ID NO: 40334 - RNA, 23 nt, Homo sapiens
uugacuguggguacaaugugaua

SEQ ID NO: 40335 - RNA, 22 nt, Homo sapiens
uugagauggaguuucaauauug

SEQ ID NO: 40336 - RNA, 22 nt, Homo sapiens
uugagauggaguuucacucucg

SEQ ID NO: 40337 - RNA, 22 nt, Homo sapiens
uugaggaggcagucuguccguu

SEQ ID NO: 40338 - RNA, 22 nt, Homo sapiens
uugaggaggcagucuucccauu

SEQ ID NO: 40339 - RNA, 22 nt, Homo sapiens
uugaggaguacugauuagguau

SEQ ID NO: 40340 - RNA, 22 nt, Homo sapiens
uugaggcaaugaggagaagcug

SEQ ID NO: 40341 - RNA, 16 nt, Homo sapiens
uugaggcaugucucag

SEQ ID NO: 40342 - RNA, 22 nt, Homo sapiens
uugagggaaacauucacaucau

SEQ ID NO: 40343 - RNA, 22 nt, Homo sapiens
uugaggacugagacagaccaag

SEQ ID NO: 40344 - RNA, 22 nt, Homo sapiens
uugaguagugugaugcaugucu

SEQ ID NO: 40345 - RNA, 22 nt, Homo sapiens
uugaguauuggacugguaucuu

SEQ ID NO: 40346 - RNA, 22 nt, Homo sapiens
uuagugaaugggugugauuugu

SEQ ID NO: 40347 - RNA, 22 nt, Homo sapiens
uuagucaaguguacugugaaug

SEQ ID NO: 40348 - RNA, 22 nt, Homo sapiens
uuagugcugaguggaauguucu

SEQ ID NO: 40349 - RNA, 21 nt, Homo sapiens
uuagugcucaguuugacaaaa

SEQ ID NO: 40350 - RNA, 22 nt, Homo sapiens
uuaugucuuuuguguucagcua

SEQ ID NO: 40351 - RNA, 20 nt, Homo sapiens
uuagucuccucugcccuguc

SEQ ID NO: 40352 - RNA, 22 nt, Homo sapiens
uuauugcuuuugugcaggugag

SEQ ID NO: 40353 - RNA, 22 nt, Homo sapiens
uuauuagguugguggaaaagua

SEQ ID NO: 40354 - RNA, 22 nt, Homo sapiens
uuagcagcucuaauaacugcua

SEQ ID NO: 40355 - RNA, 22 nt, Homo sapiens
uuacugcuagcugugugcucuu

SEQ ID NO: 40356 - RNA, 22 nt, Homo sapiens
uuagauguuuagaagugggcca

SEQ ID NO: 40357 - RNA, 22 nt, Homo sapiens
uuagauguuugacugggccuua

SEQ ID NO: 40358 - RNA, 22 nt, Homo sapiens
uuagauuauugagcauccacug

SEQ ID NO: 40359 - RNA, 22 nt, Homo sapiens
uuagagguaggauuucaccaug

SEQ ID NO: 40360 - RNA, 22 nt, Homo sapiens
ugugacagcacgguucaacugc

SEQ ID NO: 40361 - RNA, 22 nt, Homo sapiens
ugugacagguauccuguguucu

SEQ ID NO: 40362 - RNA, 21 nt, Homo sapiens
ugugaccucugucucugaguc

SEQ ID NO: 40363 - RNA, 18 nt, Homo sapiens
ugugacauugagcauguc

SEQ ID NO: 40364 - RNA, 22 nt, Homo sapiens
ugugacacugaauggcagaacu

SEQ ID NO: 40365 - RNA, 20 nt, Homo sapiens
ugugaacuguagauagucuu

SEQ ID NO: 40366 - RNA, 21 nt, Homo sapiens
ugugaacauguuggguggcau

SEQ ID NO: 40367 - RNA, 22 nt, Homo sapiens
ugugaauggugcugcaaugaac

SEQ ID NO: 40368 - RNA, 22 nt, Homo sapiens
uuaaguguaaguggugugggac

SEQ ID NO: 40369 - RNA, 22 nt, Homo sapiens
uguugguuaaaucagguuuuaa

SEQ ID NO: 40370 - RNA, 18 nt, Homo sapiens
uguugguguucacucacu

SEQ ID NO: 40371 - RNA, 22 nt, Homo sapiens
uguugcacuccagccuagguga

SEQ ID NO: 40372 - RNA, 22 nt, Homo sapiens
uguugcacugguaauguacuga

SEQ ID NO: 40373 - RNA, 22 nt, Homo sapiens
uguugcacucuagccugggcaa

SEQ ID NO: 40374 - RNA, 22 nt, Homo sapiens
uguugcauuugucaaggucaag

SEQ ID NO: 40375 - RNA, 19 nt, Homo sapiens
uuacacaaccuaguggggc

SEQ ID NO: 40376 - RNA, 23 nt, Homo sapiens
uuaagugcuuuucugaaacucuu

SEQ ID NO: 40377 - RNA, 22 nt, Homo sapiens
uuaagugguagguggugcccaa

SEQ ID NO: 40378 - RNA, 22 nt, Homo sapiens
uugaucaucagcuuugucaucu

SEQ ID NO: 40379 - RNA, 22 nt, Homo sapiens
uuggaaugcaacagaaggauaa

SEQ ID NO: 40380 - RNA, 22 nt, Homo sapiens
uuggagugugcucauaacugcu

SEQ ID NO: 40381 - RNA, 22 nt, Homo sapiens
uuggagugugagagcagccugg

SEQ ID NO: 40382 - RNA, 22 nt, Homo sapiens
uuggauuguuucuagauugggg

SEQ ID NO: 40383 - RNA, 22 nt, Homo sapiens
uuggccuuuucaaugccucuuu

SEQ ID NO: 40384 - RNA, 22 nt, Homo sapiens
uugggcauugggcuaaacuccc

SEQ ID NO: 40385 - RNA, 22 nt, Homo sapiens
uuggcuuguaaaaugaaaagcu

SEQ ID NO: 40386 - RNA, 23 nt, Homo sapiens
uuguacacuaagaaucgcagaug

SEQ ID NO: 40387 - RNA, 22 nt, Homo sapiens
uuguacucucaccguaucccag

SEQ ID NO: 40388 - RNA, 23 nt, Homo sapiens
uuguaacuggagaguaacauucc

SEQ ID NO: 40389 - RNA, 22 nt, Homo sapiens
uugugcuugauuugccuagcug

SEQ ID NO: 40390 - RNA, 20 nt, Homo sapiens
uugugcauugggccauuggg

SEQ ID NO: 40391 - RNA, 22 nt, Homo sapiens
uugugccugguacauggagaaa

SEQ ID NO: 40392 - RNA, 22 nt, Homo sapiens
uuguccacugcuagccucugca

SEQ ID NO: 40393 - RNA, 22 nt, Homo sapiens
uuguccccuuccaaaucucaug

SEQ ID NO: 40394 - RNA, 22 nt, Homo sapiens
uuguccccacccaaaugucauc

SEQ ID NO: 40395 - RNA, 22 nt, Homo sapiens
uuguccuggagguucuugcaag

SEQ ID NO: 40396 - RNA, 22 nt, Homo sapiens
uugucuugcagcuuaggcauca

SEQ ID NO: 40397 - RNA, 22 nt, Homo sapiens
uugugaaugaugucgcaauaaa

SEQ ID NO: 40398 - RNA, 22 nt, Homo sapiens
uugugaauggugccgcaauaaa

SEQ ID NO: 40399 - RNA, 23 nt, Homo sapiens
uugugucccuacccaaaucucau

SEQ ID NO: 40400 - RNA, 22 nt, Homo sapiens
uuguguuugaugcugacacgca

SEQ ID NO: 40401 - RNA, 23 nt, Homo sapiens
uuguucccuuccacucagucucc

SEQ ID NO: 40402 - RNA, 23 nt, Homo sapiens
uuucaguaguuguauccuguugc

SEQ ID NO: 40403 - RNA, 22 nt, Homo sapiens
uuuagcagcaaagagcuguguu

SEQ ID NO: 40404 - RNA, 22 nt, Homo sapiens
uuuaauguuacaguauugguau

SEQ ID NO: 40405 - RNA, 21 nt, Homo sapiens
uuuuugggcuuucauaguguu

SEQ ID NO: 40406 - RNA, 22 nt, Homo sapiens
uuuugugcauggcccaguggua

SEQ ID NO: 40407 - RNA, 22 nt, Homo sapiens
aagagaugaagguccugacugu

SEQ ID NO: 40408 - RNA, 21 nt, Homo sapiens
aagaaagcuggacuugccgcu

SEQ ID NO: 40409 - RNA, 22 nt, Homo sapiens
aagagcauuauuuaguaauuuc

SEQ ID NO: 40410 - RNA, 22 nt, Homo sapiens
aacuugcacuugauugagagcu

SEQ ID NO: 40411 - RNA, 21 nt, Homo sapiens
aacuggugugagaugguaugu

SEQ ID NO: 40412 - RNA, 22 nt, Homo sapiens
aacuggugauccacccgccuca

SEQ ID NO: 40413 - RNA, 19 nt, Homo sapiens
aacuggugugagaugguau

SEQ ID NO: 40414 - RNA, 22 nt, Homo sapiens
aacuggcauauucugguugcgg

SEQ ID NO: 40415 - RNA, 22 nt, Homo sapiens
aacucacauucuuucuugguac

SEQ ID NO: 40416 - RNA, 22 nt, Homo sapiens
aaccacauggcucaguggacau

SEQ ID NO: 40417 - RNA, 22 nt, Homo sapiens
aaccuguaaccauaugaucagu

SEQ ID NO: 40418 - RNA, 22 nt, Homo sapiens
aaccuguggauuuugguaucug

SEQ ID NO: 40419 - RNA, 22 nt, Homo sapiens
aaccuucauuccuuucccugcc

SEQ ID NO: 40420 - RNA, 22 nt, Homo sapiens
aagagcucucuguagcauguga

SEQ ID NO: 40421 - RNA, 22 nt, Homo sapiens
aagagguagcagucacaaaaga

SEQ ID NO: 40422 - RNA, 22 nt, Homo sapiens
aagaggccuaggaaucuguauu

SEQ ID NO: 40423 - RNA, 22 nt, Homo sapiens
aagaugcagucauacuggagua

SEQ ID NO: 40424 - RNA, 22 nt, Homo sapiens
aagaugcagaagcccagauguu

SEQ ID NO: 40425 - RNA, 22 nt, Homo sapiens
aagagugucuuugugcuggccc

SEQ ID NO: 40426 - RNA, 21 nt, Homo sapiens
aagcaugguguaucuuuccau

SEQ ID NO: 40427 - RNA, 22 nt, Homo sapiens
aagccagugugacaggaaacuu

SEQ ID NO: 40428 - RNA, 22 nt, Homo sapiens
aagcucauugagaucuauggcu

SEQ ID NO: 40429 - RNA, 22 nt, Homo sapiens
aagcagauguguugaaaguacu

SEQ ID NO: 40430 - RNA, 22 nt, Homo sapiens
aagcaucacuggaggcagccau

SEQ ID NO: 40431 - RNA, 22 nt, Homo sapiens
aagcaguguggacuaaugggaa

SEQ ID NO: 40432 - RNA, 22 nt, Homo sapiens
uuuggcaauaaacuccccuaac

SEQ ID NO: 40433 - RNA, 22 nt, Homo sapiens
uuuggcauauuuuaagcugguu

SEQ ID NO: 40434 - RNA, 22 nt, Homo sapiens
uuuggcauuagauaauugugua

SEQ ID NO: 40435 - RNA, 22 nt, Homo sapiens
uuuggcauuuaaauaugcaugg

SEQ ID NO: 40436 - RNA, 20 nt, Homo sapiens
uuuggcaauaggguuuuugu

SEQ ID NO: 40437 - RNA, 22 nt, Homo sapiens
uuucccuuugcuuugucagcca

SEQ ID NO: 40438 - RNA, 22 nt, Homo sapiens
uuucccuuacuuaaacuuacuc

SEQ ID NO: 40439 - RNA, 22 nt, Homo sapiens
uuucccuuuagcuuagugauuu

SEQ ID NO: 40440 - RNA, 22 nt, Homo sapiens
uuucauguuuuucugugaggca

SEQ ID NO: 40441 - RNA, 22 nt, Homo sapiens
uuuguacacgugggugaauugu

SEQ ID NO: 40442 - RNA, 22 nt, Homo sapiens
uuuugccggcauguugggcuuc

SEQ ID NO: 40443 - RNA, 22 nt, Homo sapiens
ugagucuguucucacauugcua

SEQ ID NO: 40444 - RNA, 22 nt, Homo sapiens
ugaggucacuuguuuuaugcuu

SEQ ID NO: 40445 - RNA, 19 nt, Homo sapiens
ugcaaagucuuuuccuauu

SEQ ID NO: 40446 - RNA, 22 nt, Homo sapiens
ugcaaaucuuguguaguuguga

SEQ ID NO: 40447 - RNA, 22 nt, Homo sapiens
ugcaagaaucagccuaucauua

SEQ ID NO: 40448 - RNA, 20 nt, Homo sapiens
ugcagcacugggaaugcagu

SEQ ID NO: 40449 - RNA, 22 nt, Homo sapiens
ugcaguagugugaucuuggcuc

SEQ ID NO: 40450 - RNA, 22 nt, Homo sapiens
ugcagugcaugacuguguuaug

SEQ ID NO: 40451 - RNA, 20 nt, Homo sapiens
ugcagauucaaccaacugug

SEQ ID NO: 40452 - RNA, 22 nt, Homo sapiens
ugcagagucuguccugccugcc

SEQ ID NO: 40453 - RNA, 22 nt, Homo sapiens
ugcaccauugucaccuggguga

SEQ ID NO: 40454 - RNA, 22 nt, Homo sapiens
ugcaagacaucguauuuugguc

SEQ ID NO: 40455 - RNA, 22 nt, Homo sapiens
ugcugcaaacaggcaucugugg

SEQ ID NO: 40456 - RNA, 21 nt, Homo sapiens
ugcuccauuuucuagccugaa

SEQ ID NO: 40457 - RNA, 22 nt, Homo sapiens
ugcuggugauucagauucaaau

SEQ ID NO: 40458 - RNA, 22 nt, Homo sapiens
ugcgguagugcaaucauggcuc

SEQ ID NO: 40459 - RNA, 22 nt, Homo sapiens
ugccaguguugccuuucacuag

SEQ ID NO: 40460 - RNA, 22 nt, Homo sapiens
ugccaaggagucagucccuaga

SEQ ID NO: 40461 - RNA, 22 nt, Homo sapiens
ugcgccauugcacuccagccug

SEQ ID NO: 40462 - RNA, 22 nt, Homo sapiens
ugcauugcacuugcaugagaua

SEQ ID NO: 40463 - RNA, 22 nt, Homo sapiens
ugccaguauuuuauugagcauu

SEQ ID NO: 40464 - RNA, 22 nt, Homo sapiens
ugccaagauuucaggaauuaag

SEQ ID NO: 40465 - RNA, 22 nt, Homo sapiens
ugccaggaugaggucaauguuu

SEQ ID NO: 40466 - RNA, 22 nt, Homo sapiens
uggagugauaugguuauauggg

SEQ ID NO: 40467 - RNA, 22 nt, Homo sapiens
uggaaugugaauaacuuccuuc

SEQ ID NO: 40468 - RNA, 18 nt, Homo sapiens
ugcuuagucauuuucaau

SEQ ID NO: 40469 - RNA, 22 nt, Homo sapiens
ugcuuagucuugcuuuagcuau

SEQ ID NO: 40470 - RNA, 22 nt, Homo sapiens
ugcugguggucccauaugauua

SEQ ID NO: 40471 - RNA, 22 nt, Homo sapiens
ugcuuguguucagguaaccuuu

SEQ ID NO: 40472 - RNA, 22 nt, Homo sapiens
ugucaucauuggaaucugccuc

SEQ ID NO: 40473 - RNA, 22 nt, Homo sapiens
ugucauagauugcuuggaaaaa

SEQ ID NO: 40474 - RNA, 22 nt, Homo sapiens
ugucacagagauuuugguaugu

SEQ ID NO: 40475 - RNA, 22 nt, Homo sapiens
ugucacguugcuuuucuguugu

SEQ ID NO: 40476 - RNA, 18 nt, Homo sapiens
ugucacuggauaaugguc

SEQ ID NO: 40477 - RNA, 22 nt, Homo sapiens
ugucacugugcagucaugcauu

SEQ ID NO: 40478 - RNA, 22 nt, Homo sapiens
ugucaguggacugugaaaggca

SEQ ID NO: 40479 - RNA, 22 nt, Homo sapiens
ugucaauauguaauaacugaau

SEQ ID NO: 40480 - RNA, 22 nt, Homo sapiens
ugucaaacauuaugaugcucua

SEQ ID NO: 40481 - RNA, 22 nt, Homo sapiens
ugucaacauuuaucaaguuauu

SEQ ID NO: 40482 - RNA, 22 nt, Homo sapiens
ugucuaguuuugaaguauagca

SEQ ID NO: 40483 - RNA, 22 nt, Homo sapiens
uguccuguaggaggcagaacaa

SEQ ID NO: 40484 - RNA, 21 nt, Homo sapiens
ugucugagagaggagaucuac

SEQ ID NO: 40485 - RNA, 22 nt, Homo sapiens
uguccugcagagguguuugccu

SEQ ID NO: 40486 - RNA, 22 nt, Homo sapiens
ugucucaguuacggcaauucca

SEQ ID NO: 40487 - RNA, 22 nt, Homo sapiens
ugugaaauguuaucccgucgug

SEQ ID NO: 40488 - RNA, 22 nt, Homo sapiens
ugugaacaaaauuuguugcaua

SEQ ID NO: 40489 - RNA, 21 nt, Homo sapiens
ugugaaaucuaggcagagguu

SEQ ID NO: 40490 - RNA, 22 nt, Homo sapiens
ugucuuggagaauccuggguuu

SEQ ID NO: 40491 - RNA, 23 nt, Homo sapiens
ugucaucaagaugaggucacacu

SEQ ID NO: 40492 - RNA, 22 nt, Homo sapiens
ugucauggauucugagucuggg

SEQ ID NO: 40493 - RNA, 22 nt, Homo sapiens
ugucauggcauuuguaaacugc

SEQ ID NO: 40494 - RNA, 22 nt, Homo sapiens
ugucauucaggaaauucuaagu

SEQ ID NO: 40495 - RNA, 22 nt, Homo sapiens
ugucauuggacuucuuucaugg

SEQ ID NO: 40496 - RNA, 22 nt, Homo sapiens
uguccuagagggaugucacccc

SEQ ID NO: 40497 - RNA, 22 nt, Homo sapiens
ugucccguuuucgaggcugcag

SEQ ID NO: 40498 - RNA, 18 nt, Homo sapiens
uggccaauggcaaacaga

SEQ ID NO: 40499 - RNA, 22 nt, Homo sapiens
uggccaagagcacagauauugg

SEQ ID NO: 40500 - RNA, 22 nt, Homo sapiens
uggccagugucggaggccagga

SEQ ID NO: 40501 - RNA, 22 nt, Homo sapiens
uggcggagacauggacuucaga

SEQ ID NO: 40502 - RNA, 20 nt, Homo sapiens
uggcuaaaugaaugauagca

SEQ ID NO: 40503 - RNA, 22 nt, Homo sapiens
uggaucaugcgaggccuccccu

SEQ ID NO: 40504 - RNA, 20 nt, Homo sapiens
uggaguuguggcaguuugga

SEQ ID NO: 40505 - RNA, 22 nt, Homo sapiens
uggaugccuaauaaaugcagac

SEQ ID NO: 40506 - RNA, 17 nt, Homo sapiens
uggcaugaggguguggg

SEQ ID NO: 40507 - RNA, 22 nt, Homo sapiens
uguagucauuccuuuuugcuuu

SEQ ID NO: 40508 - RNA, 22 nt, Homo sapiens
uguagucauuuggaguccagcu

SEQ ID NO: 40509 - RNA, 22 nt, Homo sapiens
uguagucauuugaaggaugucc

SEQ ID NO: 40510 - RNA, 22 nt, Homo sapiens
uguauacauguguguucacgca

SEQ ID NO: 40511 - RNA, 21 nt, Homo sapiens
ugguugauccuccuagugccu

SEQ ID NO: 40512 - RNA, 22 nt, Homo sapiens
uggggugugagggagaaagaaa

SEQ ID NO: 40513 - RNA, 22 nt, Homo sapiens
uggguagagaaucaggaucuua

SEQ ID NO: 40514 - RNA, 22 nt, Homo sapiens
ugguguccugucucugcgcuug

SEQ ID NO: 40515 - RNA, 20 nt, Homo sapiens
uggugucuuggaaagagcuc

SEQ ID NO: 40516 - RNA, 22 nt, Homo sapiens
ugggaucgucaagugaggcucg

SEQ ID NO: 40517 - RNA, 21 nt, Homo sapiens
ugggccccuuccuuacaucau

SEQ ID NO: 40518 - RNA, 22 nt, Homo sapiens
ugggcggagacgugcagccgcc

SEQ ID NO: 40519 - RNA, 22 nt, Homo sapiens
ugggccgcugcaggaugguccc

SEQ ID NO: 40520 - RNA, 22 nt, Homo sapiens
ucacugugcaugaaggaugcug

SEQ ID NO: 40521 - RNA, 22 nt, Homo sapiens
ucagagcaaagacacuuuauca

SEQ ID NO: 40522 - RNA, 21 nt, Homo sapiens
ucagaagcucccagggaggac

SEQ ID NO: 40523 - RNA, 22 nt, Homo sapiens
ucacugcacuccagccuuuaug

SEQ ID NO: 40524 - RNA, 22 nt, Homo sapiens
ucacugcgaccuccaccuccug

SEQ ID NO: 40525 - RNA, 22 nt, Homo sapiens
ucacuggacucuagccugggug

SEQ ID NO: 40526 - RNA, 22 nt, Homo sapiens
ucacuggagguuccugaaguuc

SEQ ID NO: 40527 - RNA, 20 nt, Homo sapiens
ucacuauggagcucuuucuu

SEQ ID NO: 40528 - RNA, 22 nt, Homo sapiens
ucccugacagggucugagcuuu

SEQ ID NO: 40529 - RNA, 18 nt, Homo sapiens
ucccucagaauuauagaa

SEQ ID NO: 40530 - RNA, 22 nt, Homo sapiens
ucccuggacagccuugccuggg

SEQ ID NO: 40531 - RNA, 22 nt, Homo sapiens
ucccuguguuccuuuugaauug

SEQ ID NO: 40532 - RNA, 22 nt, Homo sapiens
uccccugagaacuugcuagaaa

SEQ ID NO: 40533 - RNA, 22 nt, Homo sapiens
ucccgaggacaucugggggcaa

SEQ ID NO: 40534 - RNA, 22 nt, Homo sapiens
ucagaguguuuuccaacuuggu

SEQ ID NO: 40535 - RNA, 22 nt, Homo sapiens
ucagagucuagaucacucacug

SEQ ID NO: 40536 - RNA, 22 nt, Homo sapiens
ucagaucauauucuucgcugcu

SEQ ID NO: 40537 - RNA, 22 nt, Homo sapiens
ucgcugggaagacugaaguguc

SEQ ID NO: 40538 - RNA, 19 nt, Homo sapiens
ucgcgccauucuccugccu

SEQ ID NO: 40539 - RNA, 22 nt, Homo sapiens
uccugagaauagaguugcaugu

SEQ ID NO: 40540 - RNA, 22 nt, Homo sapiens
uccucugaacuccagacccaua

SEQ ID NO: 40541 - RNA, 22 nt, Homo sapiens
ucccuuagccaaauccccagcc

SEQ ID NO: 40542 - RNA, 22 nt, Homo sapiens
ucucuggauaucuacuuauguu

SEQ ID NO: 40543 - RNA, 22 nt, Homo sapiens
ucuauuugggguaccuguggua

SEQ ID NO: 40544 - RNA, 22 nt, Homo sapiens
ucucccuaccugagccgagcca

SEQ ID NO: 40545 - RNA, 22 nt, Homo sapiens
ucucugagaccacuccaaacuc

SEQ ID NO: 40546 - RNA, 22 nt, Homo sapiens
ucucugagaaaaguuucuccca

SEQ ID NO: 40547 - RNA, 22 nt, Homo sapiens
ucugugguucaaaccagcaacu

SEQ ID NO: 40548 - RNA, 22 nt, Homo sapiens
ucuggcuuuagcaugugggaag

SEQ ID NO: 40549 - RNA, 22 nt, Homo sapiens
ucuggcuuuuaacaucuauaaa

SEQ ID NO: 40550 - RNA, 22 nt, Homo sapiens
ucugugcugagaguugaaaguu

SEQ ID NO: 40551 - RNA, 21 nt, Homo sapiens
ucuggcccccucaaaucucau

SEQ ID NO: 40552 - RNA, 22 nt, Homo sapiens
ucuggcaagauauccauugcuu

SEQ ID NO: 40553 - RNA, 20 nt, Homo sapiens
ucuggccccucuaaaucuca

SEQ ID NO: 40554 - RNA, 22 nt, Homo sapiens
ucuggccuccuaugagaaucga

SEQ ID NO: 40555 - RNA, 19 nt, Homo sapiens
ucugacagccccagucaac

SEQ ID NO: 40556 - RNA, 22 nt, Homo sapiens
ucuguugguucuuugaggagga

SEQ ID NO: 40557 - RNA, 22 nt, Homo sapiens
ucuguuguuguuuuaagagaca

SEQ ID NO: 40558 - RNA, 22 nt, Homo sapiens
ucuuggccaugaauggcaaggc

SEQ ID NO: 40559 - RNA, 22 nt, Homo sapiens
ucuugucacugcauccccagcu

SEQ ID NO: 40560 - RNA, 22 nt, Homo sapiens
ucuuugguaugugcaugugcuu

SEQ ID NO: 40561 - RNA, 22 nt, Homo sapiens
ucuuugguauugugaauagugu

SEQ ID NO: 40562 - RNA, 22 nt, Homo sapiens
ucuuugguuucugucucuguaa

SEQ ID NO: 40563 - RNA, 22 nt, Homo sapiens
ucuuuguguaggucaaucuggc

SEQ ID NO: 40564 - RNA, 22 nt, Homo sapiens
ugacugaguaguauuccacuau

SEQ ID NO: 40565 - RNA, 18 nt, Homo sapiens
ugacuguccagguggacc

SEQ ID NO: 40566 - RNA, 21 nt, Homo sapiens
ugagaacaacaggucaagcag

SEQ ID NO: 40567 - RNA, 17 nt, Homo sapiens
ugagaacaugugguauu

SEQ ID NO: 40568 - RNA, 18 nt, Homo sapiens
ugagaacauguguacaca

SEQ ID NO: 40569 - RNA, 20 nt, Homo sapiens
ugacaguuaagggauagaag

SEQ ID NO: 40570 - RNA, 22 nt, Homo sapiens
ugacaguuuccagggcugucuc

SEQ ID NO: 40571 - RNA, 22 nt, Homo sapiens
ucuuuuguaaaaugaggaggug

SEQ ID NO: 40572 - RNA, 22 nt, Homo sapiens
ugacaagggaaaugcaaaaugu

SEQ ID NO: 40573 - RNA, 22 nt, Homo sapiens
ugacaagcucccucugcaccuu

SEQ ID NO: 40574 - RNA, 19 nt, Homo sapiens
ugacacuguuggugggagg

SEQ ID NO: 40575 - RNA, 22 nt, Homo sapiens
ugagaagacaucuuugcuuugu

SEQ ID NO: 40576 - RNA, 22 nt, Homo sapiens
ugagacacuucccagaucccuu

SEQ ID NO: 40577 - RNA, 22 nt, Homo sapiens
ugagaauauuugaagauguuag

SEQ ID NO: 40578 - RNA, 22 nt, Homo sapiens
ugagaccuuucauuucucagug

SEQ ID NO: 40579 - RNA, 22 nt, Homo sapiens
ugagacaugugaacuguaguuc

SEQ ID NO: 40580 - RNA, 22 nt, Homo sapiens
ugagagacagacauuaucuuau

SEQ ID NO: 40581 - RNA, 22 nt, Homo sapiens
ugagacugaguuucucucuugu

SEQ ID NO: 40582 - RNA, 22 nt, Homo sapiens
ugagacugaguuuugccuuugu

SEQ ID NO: 40583 - RNA, 22 nt, Homo sapiens
ugagacugagucucgcucuauu

SEQ ID NO: 40584 - RNA, 22 nt, Homo sapiens
ugagaggugaauggcaggcuca

SEQ ID NO: 40585 - RNA, 22 nt, Homo sapiens
ugagagaugauaaaauguuugu

SEQ ID NO: 40586 - RNA, 22 nt, Homo sapiens
ugagaugaaagcagaaagacuu

SEQ ID NO: 40587 - RNA, 22 nt, Homo sapiens
ugagaugagggaagccuaggca

SEQ ID NO: 40588 - RNA, 17 nt, Homo sapiens
ugagggaugccugguuc

SEQ ID NO: 40589 - RNA, 22 nt, Homo sapiens
ugaggcacucccuagcggggug

SEQ ID NO: 40590 - RNA, 22 nt, Homo sapiens
ugaggcacucuagacuuauuca

SEQ ID NO: 40591 - RNA, 22 nt, Homo sapiens
ugagauggaguuucgcucuugu

SEQ ID NO: 40592 - RNA, 22 nt, Homo sapiens
ugaggcuaggauaggcugauuc

SEQ ID NO: 40593 - RNA, 22 nt, Homo sapiens
ugaggcuagucagaucagauga

SEQ ID NO: 40594 - RNA, 22 nt, Homo sapiens
ugagggcguauccuucauuaag

SEQ ID NO: 40595 - RNA, 22 nt, Homo sapiens
ugagaugaugggauaagagggc

SEQ ID NO: 40596 - RNA, 21 nt, Homo sapiens
ugagaugcaaucaccagggag

SEQ ID NO: 40597 - RNA, 22 nt, Homo sapiens
ugagaugcauauucuggcuccu

SEQ ID NO: 40598 - RNA, 22 nt, Homo sapiens
ugagaugcucgccggccagcau

SEQ ID NO: 40599 - RNA, 17 nt, Homo sapiens
ugaggcacuaguaucac

SEQ ID NO: 40600 - RNA, 22 nt, Homo sapiens
ugagauggaguuucacuuuugu

SEQ ID NO: 40601 - RNA, 22 nt, Homo sapiens
ugagauggaguuucgcccuugu

SEQ ID NO: 40602 - RNA, 22 nt, Human herpesvirus 4 (Epstein-Barr virus)
aaggagcgauuuggagaaaaua

SEQ ID NO: 40603 - RNA, 23 nt, Human herpesvirus 4 (Epstein-Barr virus)
gggccuccaucucugccgccauc

SEQ ID NO: 40604 - RNA, 22 nt, Human herpesvirus 4 (Epstein-Barr virus)
augaguccggugaaggugacgu

SEQ ID NO: 40605 - RNA, 22 nt, Human herpesvirus 4 (Epstein-Barr virus)
uggaggggccguugguaccaga

SEQ ID NO: 40606 - RNA, 22 nt, Human herpesvirus 4 (Epstein-Barr virus)
ugaccgcguugaacaugcugua

SEQ ID NO: 40607 - RNA, 22 nt, Human herpesvirus 4 (Epstein-Barr virus)
ggagggaaacaugaccaccuga

SEQ ID NO: 40608 - RNA, 22 nt, Human herpesvirus 4 (Epstein-Barr virus)
gcuguugacaugagcauggaag

SEQ ID NO: 40609 - RNA, 22 nt, Human herpesvirus 4 (Epstein-Barr virus)
gcguccacccuggccucccggc

SEQ ID NO: 40610 - RNA, 22 nt, Human herpesvirus 4 (Epstein-Barr virus)
gggauccgccagggucugcagg

SEQ ID NO: 40611 - RNA, 23 nt, Human herpesvirus 4 (Epstein-Barr virus)
gggccuccaucucugccgccauc

SEQ ID NO: 40612 - RNA, 17 nt, Human herpesvirus 4 (Epstein-Barr virus)
ggccacaggggaggugg

SEQ ID NO: 40613 - RNA, 22 nt, Human herpesvirus 4 (Epstein-Barr virus)
gguggagugggacacaguuaga

SEQ ID NO: 40614 - RNA, 22 nt, Human herpesvirus 4 (Epstein-Barr virus)
ggugccccaggaggccuuugug

SEQ ID NO: 40615 - RNA, 22 nt, Human herpesvirus 4 (Epstein-Barr virus)
gugacccggggcuccgggguga

SEQ ID NO: 40616 - RNA, 22 nt, Human herpesvirus 4 (Epstein-Barr virus)
ucuggagaacguagcgagcgua

SEQ ID NO: 40617 - RNA, 22 nt, Human herpesvirus 4 (Epstein-Barr virus)
aucuuuugcggcagaaauugaa

SEQ ID NO: 40618 - RNA, 22 nt, Human herpesvirus 4 (Epstein-Barr virus)
augcgcaagggucacauugggg

SEQ ID NO: 40619 - RNA, 22 nt, Human herpesvirus 4 (Epstein-Barr virus)
caaggccaucccucgcagcacc

SEQ ID NO: 40620 - RNA, 22 nt, Human herpesvirus 4 (Epstein-Barr virus)
agcugcugcuugucgaggaugg

SEQ ID NO: 40621 - RNA, 22 nt, Human herpesvirus 4 (Epstein-Barr virus)
cgcaccacuagucaccaggugu

SEQ ID NO: 40622 - RNA, 21 nt, Human herpesvirus 4 (Epstein-Barr virus)
ccucgcaggccgccagcagcu

SEQ ID NO: 40623 - RNA, 22 nt, Human herpesvirus 4 (Epstein-Barr virus)
ccugccgcggggccuccugccg

SEQ ID NO: 40624 - RNA, 22 nt, Human herpesvirus 4 (Epstein-Barr virus)
ccuggguagucacguucagccg

SEQ ID NO: 40625 - RNA, 22 nt, Human herpesvirus 4 (Epstein-Barr virus)
cgagacaguaaugucaaauguc

SEQ ID NO: 40626 - RNA, 22 nt, Human herpesvirus 4 (Epstein-Barr virus)
cguagcaccacguggcugccga

SEQ ID NO: 40627 - RNA, 22 nt, Human herpesvirus 4 (Epstein-Barr virus)
uucacgguggcaugcucucguc

SEQ ID NO: 40628 - RNA, 22 nt, Human herpesvirus 4 (Epstein-Barr virus)
ugggggugcgccgugaaggcgg

SEQ ID NO: 40629 - RNA, 22 nt, Human herpesvirus 4 (Epstein-Barr virus)
gcauggccuccguguuugccug

SEQ ID NO: 40630 - RNA, 22 nt, Human herpesvirus 4 (Epstein-Barr virus)
gccgccuccagauggccgaggc

SEQ ID NO: 40631 - RNA, 22 nt, Human herpesvirus 4 (Epstein-Barr virus)
gaggcccacgguggcggcagac

SEQ ID NO: 40632 - RNA, 22 nt, Human herpesvirus 4 (Epstein-Barr virus)
gaguagagcuggguagaccugu

SEQ ID NO: 40633 - RNA, 22 nt, Human herpesvirus 4 (Epstein-Barr virus)
gauggaggccaucucgugaugc

SEQ ID NO: 40634 - RNA, 22 nt, Human herpesvirus 4 (Epstein-Barr virus)
uccagcggggccgcaguuugcu

SEQ ID NO: 40635 - RNA, 22 nt, Human herpesvirus 4 (Epstein-Barr virus)
ucagugguuuuguuuccuugau

SEQ ID NO: 40636 - RNA, 22 nt, Human herpesvirus 4 (Epstein-Barr virus)
uccaggggcgcgacugaccugg

SEQ ID NO: 40637 - RNA, 22 nt, Human herpesvirus 4 (Epstein-Barr virus)
gcggcuggagagaaggaugccc

SEQ ID NO: 40638 - RNA, 22 nt, Human herpesvirus 4 (Epstein-Barr virus)
cccuggagcugaaguugaugga

SEQ ID NO: 40639 - RNA, 22 nt, Human herpesvirus 4 (Epstein-Barr virus)
ccgcacggacccggcuggcucu

SEQ ID NO: 40640 - RNA, 22 nt, Human herpesvirus 4 (Epstein-Barr virus)
cuggccuugagggcgcugagga

SEQ ID NO: 40641 - RNA, 22 nt, Human herpesvirus 4 (Epstein-Barr virus)
cuggcguggaaguuaaugucca

SEQ ID NO: 40642 - RNA, 22 nt, Human herpesvirus 4 (Epstein-Barr virus)
cuguacauccagcugcuguaug

SEQ ID NO: 40643 - RNA, 22 nt, Human herpesvirus 4 (Epstein-Barr virus)
agauuauccucgcuagucugug

SEQ ID NO: 40644 - RNA, 22 nt, Human herpesvirus 4 (Epstein-Barr virus)
agcacaucacguaggcaccagg

SEQ ID NO: 40645 - RNA, 22 nt, Human herpesvirus 4 (Epstein-Barr virus)
cauagcaccgcuauccacuaug

SEQ ID NO: 40646 - RNA, 22 nt, Human herpesvirus 4 (Epstein-Barr virus)
caucagcucucuuuuccccggg

SEQ ID NO: 40647 - RNA, 22 nt, Human herpesvirus 4 (Epstein-Barr virus)
cauccccugcuugggacccgac

SEQ ID NO: 40648 - RNA, 22 nt, Human herpesvirus 4 (Epstein-Barr virus)
cauccggcggccaggguuugca

SEQ ID NO: 40649 - RNA, 22 nt, Human herpesvirus 4 (Epstein-Barr virus)
cagccucccuucaucuccagca

SEQ ID NO: 40650 - RNA, 22 nt, Human herpesvirus 4 (Epstein-Barr virus)
ccagcaagcuccgcuuccuaga

SEQ ID NO: 40651 - RNA, 22 nt, Human herpesvirus 4 (Epstein-Barr virus)
ccaccuguugaggugaccgugg

SEQ ID NO: 40652 - RNA, 22 nt, Human herpesvirus 4 (Epstein-Barr virus)
aacaggaggcgcagccugucau

SEQ ID NO: 40653 - RNA, 22 nt, Human herpesvirus 4 (Epstein-Barr virus)
accguuccucauuuugugugcc

SEQ ID NO: 40654 - RNA, 22 nt, Human herpesvirus 4 (Epstein-Barr virus)
acgaagcuguccgccucgagcg

SEQ ID NO: 40655 - RNA, 23 nt, Human herpesvirus 4 (Epstein-Barr virus)
aaugauggugggggaaccaccgg

SEQ ID NO: 40656 - RNA, 22 nt, Human herpesvirus 4 (Epstein-Barr virus)
acacgccgcucguggaccacgc

SEQ ID NO: 40657 - RNA, 22 nt, Homo sapiens
aagacuguaauccaucuugagu

SEQ ID NO: 40658 - RNA, 22 nt, Homo sapiens
uucuuugcaugaucucaaaguc

SEQ ID NO: 40659 - RNA, 22 nt, Homo sapiens
ugaaaucuaaaauguuccaaga

SEQ ID NO: 40660 - RNA, 21 nt, Homo sapiens
cuuugguagaguuuuuagggu

SEQ ID NO: 40661 - RNA, 22 nt, Homo sapiens
ggggaauguuaaagaauuugca

SEQ ID NO: 40662 - RNA, 21 nt, Homo sapiens
gugcaaacaucauagaaugua

SEQ ID NO: 40663 - RNA, 19 nt, Homo sapiens
cauggcuuauaauuuuaau

SEQ ID NO: 40664 - RNA, 22 nt, Homo sapiens
uuauagcuaacaucugugaaaa

SEQ ID NO: 40665 - RNA, 20 nt, Homo sapiens
uggagugaagguucuggacc

SEQ ID NO: 40666 - RNA, 22 nt, Homo sapiens
aacacuguuuccagucaugauc

SEQ ID NO: 40667 - RNA, 22 nt, Homo sapiens
ugcuuaguguugacccucugcc

SEQ ID NO: 40668 - RNA, 22 nt, Homo sapiens
cuggcagugcuuguuauccugg

SEQ ID NO: 40669 - RNA, 22 nt, Homo sapiens
uggugagaaaagaugucuuugu

SEQ ID NO: 40670 - RNA, 22 nt, Homo sapiens
cuggcacagugucagaaacaca

SEQ ID NO: 40671 - RNA, 19 nt, Homo sapiens
ucuuuagucacauuuuuau

SEQ ID NO: 40672 - RNA, 22 nt, Homo sapiens
uucuacagugacugcagccaua

SEQ ID NO: 40673 - RNA, 20 nt, Homo sapiens
uucuauggugaugaguccug

SEQ ID NO: 40674 - RNA, 22 nt, Homo sapiens
ugagaugacgacacaccucagu

SEQ ID NO: 40675 - RNA, 22 nt, Homo sapiens
uugagauggagucucacugugu

SEQ ID NO: 40676 - RNA, 19 nt, Homo sapiens
gugguauuaccuuuugauu

SEQ ID NO: 40677 - RNA, 22 nt, Homo sapiens
gagacauugacuuuguuccaga

SEQ ID NO: 40678 - RNA, 22 nt, Homo sapiens
uaccagcauuucucuuuaagua

SEQ ID NO: 40679 - RNA, 22 nt, Homo sapiens
cauugcaauccagccugggcaa

SEQ ID NO: 40680 - RNA, 22 nt, Homo sapiens
uaucucuguggguagugcugaa

SEQ ID NO: 40681 - RNA, 22 nt, Homo sapiens
agaugauguuuacugagcauca

SEQ ID NO: 40682 - RNA, 22 nt, Homo sapiens
uguagcaaaucgauacuauugg

SEQ ID NO: 40683 - RNA, 22 nt, Homo sapiens
cauugcacuccagcuugggcaa

SEQ ID NO: 40684 - RNA, 22 nt, Homo sapiens
uagaccaauuggcauauaguaa

SEQ ID NO: 40685 - RNA, 22 nt, Homo sapiens
uacauagucuucuuuugguuau

SEQ ID NO: 40686 - RNA, 22 nt, Homo sapiens
uugaggucagagguucgagacc

SEQ ID NO: 40687 - RNA, 22 nt, Homo sapiens
ucauugcacuccagccugggug

SEQ ID NO: 40688 - RNA, 22 nt, Homo sapiens
uuggaagauuacuuaguuuucu

SEQ ID NO: 40689 - RNA, 22 nt, Homo sapiens
aaguauguaucaagucauacuu

SEQ ID NO: 40690 - RNA, 22 nt, Homo sapiens
uugacuuuuauucacucugcua

SEQ ID NO: 40691 - RNA, 22 nt, Homo sapiens
augucuuucauagagacccaga

SEQ ID NO: 40692 - RNA, 22 nt, Homo sapiens
aaugcuguguuauuucaugacc

SEQ ID NO: 40693 - RNA, 22 nt, Homo sapiens
guggacaugaauuuuggaggca

SEQ ID NO: 40694 - RNA, 22 nt, Homo sapiens
ugcagaaucccuucagauccga

SEQ ID NO: 40695 - RNA, 22 nt, Homo sapiens
ggcaacaugccgaaaccacguc

SEQ ID NO: 40696 - RNA, 22 nt, Homo sapiens
auccugaagcuuuacugaauuc

SEQ ID NO: 40697 - RNA, 22 nt, Homo sapiens
cauuuuacuuuccagacgugga

SEQ ID NO: 40698 - RNA, 22 nt, Homo sapiens
uuauucagcaccugcuguguuc

SEQ ID NO: 40699 - RNA, 22 nt, Homo sapiens
gagagcauuaagccaucaucau

SEQ ID NO: 40700 - RNA, 20 nt, Homo sapiens
cauugcacuccagcuugggc

SEQ ID NO: 40701 - RNA, 22 nt, Homo sapiens
uucuacaggcuguucaagaagc

SEQ ID NO: 40702 - RNA, 22 nt, Homo sapiens
auagcagaauuuggucaagucu

SEQ ID NO: 40703 - RNA, 22 nt, Homo sapiens
aggcaagagugacuacgugaaa

SEQ ID NO: 40704 - RNA, 22 nt, Homo sapiens
uaaggcucuuguuauuuugagg

SEQ ID NO: 40705 - RNA, 22 nt, Homo sapiens
cauugcacuccagccugaggga

SEQ ID NO: 40706 - RNA, 22 nt, Homo sapiens
ucccugaaaauuagcauuuuaa

SEQ ID NO: 40707 - RNA, 20 nt, Homo sapiens
agcugguuuuaugaaucuuu

SEQ ID NO: 40708 - RNA, 22 nt, Homo sapiens
uugggagugucucuggacugca

SEQ ID NO: 40709 - RNA, 22 nt, Homo sapiens
auuccacuuccacuaguuucuc

SEQ ID NO: 40710 - RNA, 22 nt, Homo sapiens
cucauggagaacaucugcuagg

SEQ ID NO: 40711 - RNA, 22 nt, Homo sapiens
ugccaacugguuucuuuuaguu

SEQ ID NO: 40712 - RNA, 22 nt, Homo sapiens
uuugugauugcacacucaagau

SEQ ID NO: 40713 - RNA, 22 nt, Homo sapiens
cugacuaguuuuaaugcagauu

SEQ ID NO: 40714 - RNA, 22 nt, Homo sapiens
auggaaaugaagggcuggcccu

SEQ ID NO: 40715 - RNA, 22 nt, Homo sapiens
ugagaugaguucucgcucuguc

SEQ ID NO: 40716 - RNA, 19 nt, Homo sapiens
agaguauuguuacuucucu

SEQ ID NO: 40717 - RNA, 22 nt, Homo sapiens
ggcagaauugcugaggaugcua

SEQ ID NO: 40718 - RNA, 22 nt, Homo sapiens
cuggaauguuccuaaagauuca

SEQ ID NO: 40719 - RNA, 22 nt, Homo sapiens
aaguugguguaugagacagaag

SEQ ID NO: 40720 - RNA, 22 nt, Homo sapiens
uugacaaggagccauugcaucu

SEQ ID NO: 40721 - RNA, 22 nt, Homo sapiens
cacagugaacugguggguuuuu

SEQ ID NO: 40722 - RNA, 22 nt, Homo sapiens
cauugcacuuagacaacuuuug

SEQ ID NO: 40723 - RNA, 22 nt, Homo sapiens
ugagaucuuggaggcuuuguga

SEQ ID NO: 40724 - RNA, 22 nt, Homo sapiens
ugagaugauaucuuauuguaau

SEQ ID NO: 40725 - RNA, 19 nt, Homo sapiens
ugcaaagucuuuuccuauu

SEQ ID NO: 40726 - RNA, 22 nt, Homo sapiens
uggagcccuaguuccucauaac

SEQ ID NO: 40727 - RNA, 22 nt, Homo sapiens
aucuacagccagucugguuugu

SEQ ID NO: 40728 - RNA, 22 nt, Homo sapiens
cauugcacuccagccugcugac

SEQ ID NO: 40729 - RNA, 22 nt, Homo sapiens
uggcuuuguaagguuucauuuu

SEQ ID NO: 40730 - RNA, 22 nt, Homo sapiens
uaaguacuuuacagacauuauc

SEQ ID NO: 40731 - RNA, 23 nt, Homo sapiens
ucacacuuaagagaaaugcagcu

SEQ ID NO: 40732 - RNA, 22 nt, Homo sapiens
aaggcaauuuguugugaggauu

SEQ ID NO: 40733 - RNA, 20 nt, Homo sapiens
aucucugggcaaaggaaaau

SEQ ID NO: 40734 - RNA, 22 nt, Homo sapiens
uuggaaauauguuaagugucau

SEQ ID NO: 40735 - RNA, 22 nt, Homo sapiens
uacccucuggauacccuuguuc

SEQ ID NO: 40736 - RNA, 22 nt, Homo sapiens
ugagaacugguagcacuuguga

SEQ ID NO: 40737 - RNA, 23 nt, Homo sapiens
uuuugcaauaagucacuggaaua

SEQ ID NO: 40738 - RNA, 22 nt, Homo sapiens
ucuuucacuuagcaugauguuu

SEQ ID NO: 40739 - RNA, 22 nt, Homo sapiens
ugauauuuuugauccuuaaguu

SEQ ID NO: 40740 - RNA, 17 nt, Homo sapiens
gucuuugguugaguuua

SEQ ID NO: 40741 - RNA, 22 nt, Homo sapiens
auugcacugcagccugggcaac

SEQ ID NO: 40742 - RNA, 22 nt, Homo sapiens
ucucuugguugaacaguuugga

SEQ ID NO: 40743 - RNA, 22 nt, Homo sapiens
uauacaugugccauguuggugu

SEQ ID NO: 40744 - RNA, 22 nt, Homo sapiens
ucauauugcgguucauugacuu

SEQ ID NO: 40745 - RNA, 22 nt, Homo sapiens
uuggcaguaucuacuacagcua

SEQ ID NO: 40746 - RNA, 22 nt, Homo sapiens
cucuuuggaugccuuaggguua

SEQ ID NO: 40747 - RNA, 20 nt, Homo sapiens
agguagauagaugauagaua

SEQ ID NO: 40748 - RNA, 22 nt, Homo sapiens
uucuaugguuuuuaugguguua

SEQ ID NO: 40749 - RNA, 20 nt, Homo sapiens
ucaaagacauggcugucaga

SEQ ID NO: 40750 - RNA, 22 nt, Homo sapiens
auaaccuauggaucuacucggg

SEQ ID NO: 40751 - RNA, 22 nt, Homo sapiens
auggacuuuuuguucagugucu

SEQ ID NO: 40752 - RNA, 22 nt, Homo sapiens
acuuuuguuauacagugugaua

SEQ ID NO: 40753 - RNA, 22 nt, Homo sapiens
uuugccaauauuuuauugagga

SEQ ID NO: 40754 - RNA, 22 nt, Homo sapiens
aggugguuuugaugagcaggua

SEQ ID NO: 40755 - RNA, 22 nt, Homo sapiens
auacaugugccauguugguaug

SEQ ID NO: 40756 - RNA, 22 nt, Homo sapiens
uuacacaguaggucccuaguaa

SEQ ID NO: 40757 - RNA, 22 nt, Homo sapiens
uggcucauuucuaaacccagcu

SEQ ID NO: 40758 - RNA, 20 nt, Homo sapiens
agcuggguguguuggugcau

SEQ ID NO: 40759 - RNA, 22 nt, Homo sapiens
cugugcauguuguccaauucuu

SEQ ID NO: 40760 - RNA, 22 nt, Homo sapiens
uauggcuuuuauuauguuguag

SEQ ID NO: 40761 - RNA, 22 nt, Homo sapiens
gaggcaagaguaguuaaguuag

SEQ ID NO: 40762 - RNA, 22 nt, Homo sapiens
ugagaugaguugcuggcucuga

SEQ ID NO: 40763 - RNA, 22 nt, Homo sapiens
cuacagcacugagcugugugca

SEQ ID NO: 40764 - RNA, 22 nt, Homo sapiens
uggcuuuuauuauguugaggua

SEQ ID NO: 40765 - RNA, 21 nt, Homo sapiens
uuuccuggagcguauggcuuc

SEQ ID NO: 40766 - RNA, 22 nt, Homo sapiens
gaaaacugcuucucuggguuuc

SEQ ID NO: 40767 - RNA, 22 nt, Homo sapiens
uacaaguauuuuuauuagugcc

SEQ ID NO: 40768 - RNA, 22 nt, Homo sapiens
uuguuuuggagaugagcuaaaa

SEQ ID NO: 40769 - RNA, 22 nt, Homo sapiens
uuuccaagaugcuuacuuucuc

SEQ ID NO: 40770 - RNA, 20 nt, Homo sapiens
uucuacagucacaggaagau

SEQ ID NO: 40771 - RNA, 22 nt, Homo sapiens
ugugcaaggcucucaaccugug

SEQ ID NO: 40772 - RNA, 22 nt, Homo sapiens
auugcacuccagccugggcaac

SEQ ID NO: 40773 - RNA, 22 nt, Homo sapiens
ucaagugcauugauucaguauu

SEQ ID NO: 40774 - RNA, 22 nt, Homo sapiens
cauugcacugcauucugggcaa

SEQ ID NO: 40775 - RNA, 22 nt, Homo sapiens
uauuugguagcuauuuugcagu

SEQ ID NO: 40776 - RNA, 22 nt, Homo sapiens
gagaucauguacuagaacaccu

SEQ ID NO: 40777 - RNA, 22 nt, Homo sapiens
auggcacuccagccugggcaac

SEQ ID NO: 40778 - RNA, 23 nt, Homo sapiens
agccugguuucccugcuucuccc

SEQ ID NO: 40779 - RNA, 22 nt, Homo sapiens
ugagaugaagucucacucuguc

SEQ ID NO: 40780 - RNA, 22 nt, Homo sapiens
uccagaguggugaugcuggggc

SEQ ID NO: 40781 - RNA, 22 nt, Homo sapiens
uacaagcaggaaaugguauaug

SEQ ID NO: 40782 - RNA, 22 nt, Homo sapiens
cucuuugaguuccuccuggugu

SEQ ID NO: 40783 - RNA, 19 nt, Homo sapiens
ugcagcaauguaaaagaca

SEQ ID NO: 40784 - RNA, 22 nt, Homo sapiens
aucuuuggcgggaauaucacag

SEQ ID NO: 40785 - RNA, 22 nt, Homo sapiens
ugagaugauuuaauggagccca

SEQ ID NO: 40786 - RNA, 22 nt, Homo sapiens
ucucuggauaucuacuuauguu

SEQ ID NO: 40787 - RNA, 22 nt, Homo sapiens
cauugcacuccagccuaggcaa

SEQ ID NO: 40788 - RNA, 22 nt, Homo sapiens
ugugccacugcacuccugccug

SEQ ID NO: 40789 - RNA, 19 nt, Homo sapiens
aauggcuuuuccuguuccc

SEQ ID NO: 40790 - RNA, 23 nt, Homo sapiens
ucaguacuccacuuucaauagug

SEQ ID NO: 40791 - RNA, 22 nt, Homo sapiens
cauugcacuccaucuugggcaa

SEQ ID NO: 40792 - RNA, 22 nt, Homo sapiens
uugagauggaguuucgcucuug

SEQ ID NO: 40793 - RNA, 22 nt, Homo sapiens
uugcuccucugccaggaccugu

SEQ ID NO: 40794 - RNA, 22 nt, Homo sapiens
ugugaaacauggauagaacugg

SEQ ID NO: 40795 - RNA, 22 nt, Homo sapiens
cuuugguucuguuuauaugcug

SEQ ID NO: 40796 - RNA, 22 nt, Homo sapiens
uagugaauguuggcuauuaaua

SEQ ID NO: 40797 - RNA, 22 nt, Homo sapiens
guggaaugcaguguugauucaa

SEQ ID NO: 40798 - RNA, 22 nt, Homo sapiens
uuccagcugggggcaacucugc

SEQ ID NO: 40799 - RNA, 22 nt, Homo sapiens
ugagaugaucaaaguauaggcu

SEQ ID NO: 40800 - RNA, 22 nt, Homo sapiens
uuauguaaaucaaucuggaauc

SEQ ID NO: 40801 - RNA, 22 nt, Homo sapiens
aauaucacaguggguguacacc

SEQ ID NO: 40802 - RNA, 22 nt, Homo sapiens
auggcuguuccugggaguucua

SEQ ID NO: 40803 - RNA, 22 nt, Homo sapiens
uucuacuucauuaggaggauug

SEQ ID NO: 40804 - RNA, 22 nt, Homo sapiens
uuugugcaaacuaggauugcga

SEQ ID NO: 40805 - RNA, 23 nt, Homo sapiens
augugugcuuggagagcaggaug

SEQ ID NO: 40806 - RNA, 22 nt, Homo sapiens
ccauugaacaugaaggaaugug

SEQ ID NO: 40807 - RNA, 22 nt, Homo sapiens
ucaguagcaugaaaacagacua

SEQ ID NO: 40808 - RNA, 22 nt, Homo sapiens
guguuauuuugcugggaaugau

SEQ ID NO: 40809 - RNA, 22 nt, Homo sapiens
aucuuuggauacuugauauagu

SEQ ID NO: 40810 - RNA, 22 nt, Homo sapiens
uucagcuacuugggaggcugaa

SEQ ID NO: 40811 - RNA, 22 nt, Homo sapiens
uauggcuuucuacuugaguucu

SEQ ID NO: 40812 - RNA, 22 nt, Homo sapiens
ugagaucuuuuguggcugagaa

SEQ ID NO: 40813 - RNA, 19 nt, Homo sapiens
uucauacagugagagcagc

SEQ ID NO: 40814 - RNA, 18 nt, Homo sapiens
acauucagcuugaagaua

SEQ ID NO: 40815 - RNA, 22 nt, Homo sapiens
auaaagacacuuggcaugauuu

SEQ ID NO: 40816 - RNA, 22 nt, Homo sapiens
auaaauaguaguugugguggcc

SEQ ID NO: 40817 - RNA, 18 nt, Homo sapiens
auugcacuccugccuggg

SEQ ID NO: 40818 - RNA, 22 nt, Homo sapiens
uugaggcaaugaggagaagcug

SEQ ID NO: 40819 - RNA, 22 nt, Homo sapiens
uucaaaaccucugcuuaagccc

SEQ ID NO: 40820 - RNA, 22 nt, Homo sapiens
ucuggaauguaaaguuuauggg

SEQ ID NO: 40821 - RNA, 22 nt, Homo sapiens
auugaacuguuggagagguuuu

SEQ ID NO: 40822 - RNA, 22 nt, Homo sapiens
aaguggcauugaggaaaaaaau

SEQ ID NO: 40823 - RNA, 22 nt, Homo sapiens
ugagaugaaagcagaaagacuu

SEQ ID NO: 40824 - RNA, 17 nt, Homo sapiens
ucuaauaauaugcauuu

SEQ ID NO: 40825 - RNA, 22 nt, Homo sapiens
acuuuuugauggggagaacauu

SEQ ID NO: 40826 - RNA, 22 nt, Homo sapiens
aggaagugugcaauuaauuucu

SEQ ID NO: 40827 - RNA, 22 nt, Homo sapiens
augacugucagggcagucauug

SEQ ID NO: 40828 - RNA, 22 nt, Homo sapiens
cauugcacugcagcccgggcaa

SEQ ID NO: 40829 - RNA, 18 nt, Homo sapiens
aaacagugucucuuucug

SEQ ID NO: 40830 - RNA, 22 nt, Homo sapiens
ugucaauauguaauaacugaau

SEQ ID NO: 40831 - RNA, 22 nt, Homo sapiens
ggagaauugcuuggacccggga

SEQ ID NO: 40832 - RNA, 22 nt, Homo sapiens
aagugguuuuuacaaagacaga

SEQ ID NO: 40833 - RNA, 22 nt, Homo sapiens
ccagucuuggugucuguagcac

SEQ ID NO: 40834 - RNA, 22 nt, Homo sapiens
auugcacuccagccuaggcaac

SEQ ID NO: 40835 - RNA, 22 nt, Homo sapiens
caucacuuugccuccgucucua

SEQ ID NO: 40836 - RNA, 22 nt, Homo sapiens
ugugucacugcacuccagccug

SEQ ID NO: 40837 - RNA, 22 nt, Homo sapiens
uucucugggacauaggucgggu

SEQ ID NO: 40838 - RNA, 22 nt, Homo sapiens
uaaagcauguaauuagguuaga

SEQ ID NO: 40839 - RNA, 22 nt, Homo sapiens
agauguuguucaucugauuguu

SEQ ID NO: 40840 - RNA, 22 nt, Homo sapiens
uucagacugggugaagagggua

SEQ ID NO: 40841 - RNA, 22 nt, Homo sapiens
guucucacuggacugugaaaau

SEQ ID NO: 40842 - RNA, 22 nt, Homo sapiens
uacuguacugcaguucugcaaa

SEQ ID NO: 40843 - RNA, 22 nt, Homo sapiens
ugagcaagaucuuuauaauuag

SEQ ID NO: 40844 - RNA, 22 nt, Homo sapiens
auauggcuaugugagcauacca

SEQ ID NO: 40845 - RNA, 22 nt, Homo sapiens
cugaaagagcauguaacacagu

SEQ ID NO: 40846 - RNA, 22 nt, Homo sapiens
cuagaagcauauucagaacaga

SEQ ID NO: 40847 - RNA, 22 nt, Homo sapiens
gugcuuuguuguggcaguggca

SEQ ID NO: 40848 - RNA, 22 nt, Homo sapiens
ugagaugagggcugcacucaaa

SEQ ID NO: 40849 - RNA, 22 nt, Homo sapiens
aagugucagaguugcuaaugac

SEQ ID NO: 40850 - RNA, 22 nt, Homo sapiens
cauggcuuuauuuucagcuucu

SEQ ID NO: 40851 - RNA, 22 nt, Homo sapiens
auguaacugggacacaagccuc

SEQ ID NO: 40852 - RNA, 22 nt, Homo sapiens
uugagcaaaacauuaauauuag

SEQ ID NO: 40853 - RNA, 23 nt, Homo sapiens
aaagacuagucaggugcaguggu

SEQ ID NO: 40854 - RNA, 22 nt, Homo sapiens
agcuggcuguagcugcaagucu

SEQ ID NO: 40855 - RNA, 22 nt, Homo sapiens
ggcaaugucagcuaaugaugga

SEQ ID NO: 40856 - RNA, 22 nt, Homo sapiens
caaugguuuuuuaguauaagua

SEQ ID NO: 40857 - RNA, 22 nt, Homo sapiens
guggaaaucucugugugacuua

SEQ ID NO: 40858 - RNA, 22 nt, Homo sapiens
ggagaugauuaugaaucacuua

SEQ ID NO: 40859 - RNA, 22 nt, Homo sapiens
cacaguugccuaucuccugaag

SEQ ID NO: 40860 - RNA, 22 nt, Homo sapiens
uuauacuacuauaaagagguag

SEQ ID NO: 40861 - RNA, 22 nt, Homo sapiens
cauugcacucuagccucggcaa

SEQ ID NO: 40862 - RNA, 19 nt, Homo sapiens
uagguacauucaagucucc

SEQ ID NO: 40863 - RNA, 22 nt, Homo sapiens
gucuguuuggggaccuguggcc

SEQ ID NO: 40864 - RNA, 20 nt, Homo sapiens
cguugcacuccagccugggc

SEQ ID NO: 40865 - RNA, 22 nt, Homo sapiens
uuauagacacguuguaacaaac

SEQ ID NO: 40866 - RNA, 22 nt, Homo sapiens
gucagugucuuugcagcucaga

SEQ ID NO: 40867 - RNA, 22 nt, Homo sapiens
ugagguagaggugaacuugacc

SEQ ID NO: 40868 - RNA, 21 nt, Homo sapiens
uggagugaagaguuuauugac

SEQ ID NO: 40869 - RNA, 21 nt, Homo sapiens
uucuaaguaaauguuggacau

SEQ ID NO: 40870 - RNA, 18 nt, Homo sapiens
auucuacaggccuuuuga

SEQ ID NO: 40871 - RNA, 22 nt, Homo sapiens
acuguauagauggaguugauuu

SEQ ID NO: 40872 - RNA, 18 nt, Homo sapiens
cuaagacacuuggcagag

SEQ ID NO: 40873 - RNA, 22 nt, Homo sapiens
ugagcugagauuaagcugcugc

SEQ ID NO: 40874 - RNA, 22 nt, Homo sapiens
ucuauguuuuugcuaguagugu

SEQ ID NO: 40875 - RNA, 18 nt, Homo sapiens
ugaaacacauuuuuuccu

SEQ ID NO: 40876 - RNA, 22 nt, Homo sapiens
gugaggcacugcugcuuuccag

SEQ ID NO: 40877 - RNA, 22 nt, Homo sapiens
ugagcacuguacuuuaucaggu

SEQ ID NO: 40878 - RNA, 22 nt, Homo sapiens
uaaucucagcuacucaggaggc

SEQ ID NO: 40879 - RNA, 22 nt, Homo sapiens
auugcacaccagucugggcaaa

SEQ ID NO: 40880 - RNA, 22 nt, Homo sapiens
gagcucaccuuaccucuggagc

SEQ ID NO: 40881 - RNA, 22 nt, Homo sapiens
guccaagacuaggaguuggcag

SEQ ID NO: 40882 - RNA, 22 nt, Homo sapiens
cauugcacuccagccuggcaac

SEQ ID NO: 40883 - RNA, 22 nt, Homo sapiens
gcugaaauguuuaauuugggag

SEQ ID NO: 40884 - RNA, 22 nt, Homo sapiens
cuuuacaguuggacucacgagg

SEQ ID NO: 40885 - RNA, 21 nt, Homo sapiens
uauggcuuagucaguguuucc

SEQ ID NO: 40886 - RNA, 22 nt, Homo sapiens
uugagauggagucuugcucuug

SEQ ID NO: 40887 - RNA, 22 nt, Homo sapiens
uaucacuuuuccagcccagcuu

SEQ ID NO: 40888 - RNA, 22 nt, Homo sapiens
gucuuuaguugaaacauguggu

SEQ ID NO: 40889 - RNA, 21 nt, Homo sapiens
uuaaguaauuacccaacucuc

SEQ ID NO: 40890 - RNA, 22 nt, Homo sapiens
guggcagugugaggauccugcu

SEQ ID NO: 40891 - RNA, 22 nt, Homo sapiens
gucagugugauaucugcagggg

SEQ ID NO: 40892 - RNA, 22 nt, Homo sapiens
acacuuucuagacaagggaaua

SEQ ID NO: 40893 - RNA, 22 nt, Homo sapiens
cacuagagaauagguaguucug

SEQ ID NO: 40894 - RNA, 22 nt, Homo sapiens
cauuaguugaagugcagggaga

SEQ ID NO: 40895 - RNA, 22 nt, Homo sapiens
agaaugugaccuuauuuggaga

SEQ ID NO: 40896 - RNA, 22 nt, Homo sapiens
agagaugaagauggggcucccg

SEQ ID NO: 40897 - RNA, 22 nt, Homo sapiens
augagacuagaagagaauaaua

SEQ ID NO: 40898 - RNA, 23 nt, Homo sapiens
uguauacacccugugcaucuggg

SEQ ID NO: 40899 - RNA, 20 nt, Homo sapiens
ucugauugcaacugcaugag

SEQ ID NO: 40900 - RNA, 22 nt, Homo sapiens
agaacuguccauucagcaugaa

SEQ ID NO: 40901 - RNA, 22 nt, Homo sapiens
uguagcuuuugagauuuauauu

SEQ ID NO: 40902 - RNA, 22 nt, Homo sapiens
aaucacuuuggcaccaaccuaa

SEQ ID NO: 40903 - RNA, 22 nt, Homo sapiens
uuucuacagggcuugccaggua

SEQ ID NO: 40904 - RNA, 22 nt, Homo sapiens
gggaauguagcaaaucugcaau

SEQ ID NO: 40905 - RNA, 22 nt, Homo sapiens
aaacugcuuuccaugguggcug

SEQ ID NO: 40906 - RNA, 22 nt, Homo sapiens
ccuucuuuuguaaggcugaaua

SEQ ID NO: 40907 - RNA, 22 nt, Homo sapiens
gucucccagccuacaucuuucu

SEQ ID NO: 40908 - RNA, 22 nt, Homo sapiens
aaugcuguucuuugcuuaaguu

SEQ ID NO: 40909 - RNA, 22 nt, Homo sapiens
ugagaugaggucucacucuguu

SEQ ID NO: 40910 - RNA, 17 nt, Homo sapiens
acagugucuaugaaaug

SEQ ID NO: 40911 - RNA, 22 nt, Homo sapiens
uugaguccauucgaugcugauu

SEQ ID NO: 40912 - RNA, 22 nt, Homo sapiens
aauaucacaggguguacacuca

SEQ ID NO: 40913 - RNA, 22 nt, Homo sapiens
ugacaagauauggucuuaucaa

SEQ ID NO: 40914 - RNA, 22 nt, Homo sapiens
uugcacuauuaguauagauguc

SEQ ID NO: 40915 - RNA, 22 nt, Homo sapiens
uuugcuuguguaaaaaucugga

SEQ ID NO: 40916 - RNA, 22 nt, Homo sapiens
ucuaaaacuagauugugaugau

SEQ ID NO: 40917 - RNA, 22 nt, Homo sapiens
uaagacuguguaauuuaugaag

SEQ ID NO: 40918 - RNA, 22 nt, Homo sapiens
uugcugagucuuucuagguugc

SEQ ID NO: 40919 - RNA, 21 nt, Homo sapiens
uaaaacuguaacuuuguccug

SEQ ID NO: 40920 - RNA, 22 nt, Homo sapiens
auggcaguuuggucucugugcu

SEQ ID NO: 40921 - RNA, 22 nt, Homo sapiens
uucagguaguuuaacuguucca

SEQ ID NO: 40922 - RNA, 22 nt, Homo sapiens
ugucagaaucuagaggcugcua

SEQ ID NO: 40923 - RNA, 22 nt, Homo sapiens
uugacauaguuucugaaauaga

SEQ ID NO: 40924 - RNA, 21 nt, Homo sapiens
ugcaagaaucaggaagcugcc

SEQ ID NO: 40925 - RNA, 22 nt, Homo sapiens
auggcucuuauuauuuugaggu

SEQ ID NO: 40926 - RNA, 22 nt, Homo sapiens
uggucaguugaguccuugccaa

SEQ ID NO: 40927 - RNA, 22 nt, Homo sapiens
uuaauagugacucauuuuccac

SEQ ID NO: 40928 - RNA, 22 nt, Homo sapiens
ugcucaguuuaaaacuuuugag

SEQ ID NO: 40929 - RNA, 22 nt, Homo sapiens
uugagaagugucuguucauguc

SEQ ID NO: 40930 - RNA, 18 nt, Homo sapiens
uguggcuguuuuccaaua

SEQ ID NO: 40931 - RNA, 22 nt, Homo sapiens
acugagaucuuuaaauaaauaa

SEQ ID NO: 40932 - RNA, 22 nt, Homo sapiens
auaaagccaugagcuugagaug

SEQ ID NO: 40933 - RNA, 22 nt, Homo sapiens
uguuacagugacuaauguuuua

SEQ ID NO: 40934 - RNA, 22 nt, Homo sapiens
cucaguguuaaggccaccucug

SEQ ID NO: 40935 - RNA, 22 nt, Homo sapiens
gucucugguugcuuuuguacca

SEQ ID NO: 40936 - RNA, 22 nt, Homo sapiens
aaaugcuuucuuggaccauuug

SEQ ID NO: 40937 - RNA, 22 nt, Homo sapiens
cguugcacuccagccugggcaa

SEQ ID NO: 40938 - RNA, 22 nt, Homo sapiens
auugcacuccagccugggcuag

SEQ ID NO: 40939 - RNA, 22 nt, Homo sapiens
auggcucuuauuauuugaggua

SEQ ID NO: 40940 - RNA, 22 nt, Homo sapiens
gaaagauuuccugagcuagaaa

SEQ ID NO: 40941 - RNA, 22 nt, Homo sapiens
aucccaguucagccucugacac

SEQ ID NO: 40942 - RNA, 22 nt, Homo sapiens
caguuacuugacacaaccaauu

SEQ ID NO: 40943 - RNA, 22 nt, Homo sapiens
aggugguuuuaggcagagacau

SEQ ID NO: 40944 - RNA, 22 nt, Homo sapiens
cuuugguuuacuuggugcuagu

SEQ ID NO: 40945 - RNA, 22 nt, Homo sapiens
cuuccaaguggggcacgugcca

SEQ ID NO: 40946 - RNA, 22 nt, Homo sapiens
gucucccagccuacauauuucu

SEQ ID NO: 40947 - RNA, 22 nt, Homo sapiens
uuaaaaguauaggccuggcaua

SEQ ID NO: 40948 - RNA, 22 nt, Homo sapiens
auugaguaaaaaauagugaugu

SEQ ID NO: 40949 - RNA, 22 nt, Homo sapiens
gcauaaagcuaauaagacgaag

SEQ ID NO: 40950 - RNA, 22 nt, Homo sapiens
gucagugucuuaacagagauua

SEQ ID NO: 40951 - RNA, 22 nt, Homo sapiens
ugagaugaagugauguaaaaca

SEQ ID NO: 40952 - RNA, 22 nt, Homo sapiens
ugacaagaaagcgucuucuuuu

SEQ ID NO: 40953 - RNA, 22 nt, Homo sapiens
uugcuuagucaugaaucacuga

SEQ ID NO: 40954 - RNA, 22 nt, Homo sapiens
uugagggaggcagggcuugucu

SEQ ID NO: 40955 - RNA, 22 nt, Homo sapiens
auagaagcugccaacguuucag

SEQ ID NO: 40956 - RNA, 23 nt, Homo sapiens
auugcagaaucacagagguagug

SEQ ID NO: 40957 - RNA, 22 nt, Homo sapiens
uugcauauucucugaggcagga

SEQ ID NO: 40958 - RNA, 22 nt, Homo sapiens
acauaaagaagcaggacauugu

SEQ ID NO: 40959 - RNA, 22 nt, Homo sapiens
ucuaaguaguagcuggucagaa

SEQ ID NO: 40960 - RNA, 22 nt, Homo sapiens
gcugcuuuugaugacaaaaaca

SEQ ID NO: 40961 - RNA, 22 nt, Homo sapiens
guccaguacucuuuccugaaaa

SEQ ID NO: 40962 - RNA, 22 nt, Homo sapiens
ucugucuuugccuaaguuuguc

SEQ ID NO: 40963 - RNA, 22 nt, Homo sapiens
uaagagagcuccaucuuuuccu

SEQ ID NO: 40964 - RNA, 22 nt, Homo sapiens
uuugaaaguaauuugguuggug

SEQ ID NO: 40965 - RNA, 22 nt, Homo sapiens
caugcacugaguccaccucugg

SEQ ID NO: 40966 - RNA, 22 nt, Homo sapiens
ugagaucaugucauuugcacuc

SEQ ID NO: 40967 - RNA, 21 nt, Homo sapiens
ugaaugcuuuaaauauuagaa

SEQ ID NO: 40968 - RNA, 22 nt, Homo sapiens
ucauaucauuagaucuacugua

SEQ ID NO: 40969 - RNA, 22 nt, Homo sapiens
caugaaagugagaaacuccugg

SEQ ID NO: 40970 - RNA, 18 nt, Homo sapiens
gacuuggaguuuacagug

SEQ ID NO: 40971 - RNA, 22 nt, Homo sapiens
auucuauaguccuaggauuggg

SEQ ID NO: 40972 - RNA, 22 nt, Homo sapiens
aggcaugaaauacaugcauuga

SEQ ID NO: 40973 - RNA, 22 nt, Homo sapiens
gugugacuagucaugccugaau

SEQ ID NO: 40974 - RNA, 22 nt, Homo sapiens
aauauagcuauguacaugucca

SEQ ID NO: 40975 - RNA, 22 nt, Homo sapiens
auacaagcaguccaacuccaua

SEQ ID NO: 40976 - RNA, 22 nt, Homo sapiens
cuuuguaugucaugacaacugu

SEQ ID NO: 40977 - RNA, 22 nt, Homo sapiens
ucacugugcaugaaggaugcug

SEQ ID NO: 40978 - RNA, 22 nt, Homo sapiens
uuagcacauuuccagcacaugg

SEQ ID NO: 40979 - RNA, 22 nt, Homo sapiens
uugagcaccaugccuggccaug

SEQ ID NO: 40980 - RNA, 22 nt, Homo sapiens
auggcuuugggcugcucugccc

SEQ ID NO: 40981 - RNA, 22 nt, Homo sapiens
auugcacuccagccuugggcaa

SEQ ID NO: 40982 - RNA, 22 nt, Homo sapiens
ggcacgguggcucacgccugua

SEQ ID NO: 40983 - RNA, 22 nt, Homo sapiens
augucaacauagacaguagagu

SEQ ID NO: 40984 - RNA, 22 nt, Homo sapiens
cugggaugugacuguugccccc

SEQ ID NO: 40985 - RNA, 22 nt, Homo sapiens
guagcagaauaucagauaauuu

SEQ ID NO: 40986 - RNA, 22 nt, Homo sapiens
ucacaaguguauagacaugucc

SEQ ID NO: 40987 - RNA, 22 nt, Homo sapiens
cauggcuuuaagcaacaccaag

SEQ ID NO: 40988 - RNA, 22 nt, Homo sapiens
auacauguuucauguuggugug

SEQ ID NO: 40989 - RNA, 22 nt, Homo sapiens
ugugccuacugauagagccaag

SEQ ID NO: 40990 - RNA, 22 nt, Homo sapiens
uucaguagucuccauagaaccg

SEQ ID NO: 40991 - RNA, 18 nt, Homo sapiens
ggaaaacuuuucuaagua

SEQ ID NO: 40992 - RNA, 22 nt, Homo sapiens
cuauaacagugugguuuggaga

SEQ ID NO: 40993 - RNA, 22 nt, Homo sapiens
uaaguauagguaacagaagcaa

SEQ ID NO: 40994 - RNA, 22 nt, Homo sapiens
aaauaguagcugaaugagggaa

SEQ ID NO: 40995 - RNA, 22 nt, Homo sapiens
uuugacaaugugugcuuguauu

SEQ ID NO: 40996 - RNA, 22 nt, Homo sapiens
gagaucacuguuuauauucucu

SEQ ID NO: 40997 - RNA, 22 nt, Homo sapiens
uucuuagucauguaauagucca

SEQ ID NO: 40998 - RNA, 22 nt, Homo sapiens
uauggcuuuguuaacauuuucu

SEQ ID NO: 40999 - RNA, 19 nt, Homo sapiens
ugugacugguugucucgcu

SEQ ID NO: 41000 - RNA, 22 nt, Homo sapiens
auagcauaucccacaugucaga

SEQ ID NO: 41001 - RNA, 22 nt, Homo sapiens
aucauauccuagauauaacuuc

SEQ ID NO: 41002 - RNA, 22 nt, Homo sapiens
ugagcccauuguccugguuuau

SEQ ID NO: 41003 - RNA, 22 nt, Homo sapiens
uugcacucuccagccucggcaa

SEQ ID NO: 41004 - RNA, 22 nt, Homo sapiens
ugagaccuuucauuucucagug

SEQ ID NO: 41005 - RNA, 22 nt, Homo sapiens
aucccuguaguaauauucuagc

SEQ ID NO: 41006 - RNA, 22 nt, Homo sapiens
ggcaacauggugaaacucuguc

SEQ ID NO: 41007 - RNA, 22 nt, Homo sapiens
ugagccaaugauuugaauagag

SEQ ID NO: 41008 - RNA, 22 nt, Homo sapiens
auuccacuuauaugagguaucu

SEQ ID NO: 41009 - RNA, 22 nt, Homo sapiens
uggaacacauaaauagcauagu

SEQ ID NO: 41010 - RNA, 22 nt, Homo sapiens
uuaguucccucauucuugacuu

SEQ ID NO: 41011 - RNA, 22 nt, Homo sapiens
ugugggaggugcuaauguaaau

SEQ ID NO: 41012 - RNA, 22 nt, Homo sapiens
uagcaggaaaggggucagaucu

SEQ ID NO: 41013 - RNA, 22 nt, Homo sapiens
auaugcaaauccauagagacag

SEQ ID NO: 41014 - RNA, 19 nt, Homo sapiens
ugagaugaagacagggguu

SEQ ID NO: 41015 - RNA, 22 nt, Homo sapiens
guaacacucuaaagggaugcac

SEQ ID NO: 41016 - RNA, 22 nt, Homo sapiens
auuguacuccagccugggcaag

SEQ ID NO: 41017 - RNA, 22 nt, Homo sapiens
acacauuagcaagugcuguuau

SEQ ID NO: 41018 - RNA, 22 nt, Homo sapiens
uugagauggagucucgcucuuu

SEQ ID NO: 41019 - RNA, 22 nt, Homo sapiens
uuucuacagugaacgauuucua

SEQ ID NO: 41020 - RNA, 22 nt, Homo sapiens
auggauauuuuuugaacauaga

SEQ ID NO: 41021 - RNA, 22 nt, Homo sapiens
uuggcagugguucugacggacc

SEQ ID NO: 41022 - RNA, 22 nt, Homo sapiens
gucuuggagacauugccauuga

SEQ ID NO: 41023 - RNA, 22 nt, Homo sapiens
ugagaucagaaggauuucucug

SEQ ID NO: 41024 - RNA, 22 nt, Homo sapiens
guggaagaccagacuuuccaac

SEQ ID NO: 41025 - RNA, 22 nt, Homo sapiens
auugcacuccagccugagcaaa

SEQ ID NO: 41026 - RNA, 22 nt, Homo sapiens
uuucuauguugaccagucuaga

SEQ ID NO: 41027 - RNA, 22 nt, Homo sapiens
auuccacuuagugacucauuug

SEQ ID NO: 41028 - RNA, 21 nt, Homo sapiens
ugaacacuggacugagugucc

SEQ ID NO: 41029 - RNA, 22 nt, Homo sapiens
ucugucuuugucaggaccagag

SEQ ID NO: 41030 - RNA, 22 nt, Homo sapiens
uugaguccccacacuggguccc

SEQ ID NO: 41031 - RNA, 20 nt, Homo sapiens
uggaaucugaagaucucagu

SEQ ID NO: 41032 - RNA, 22 nt, Homo sapiens
uuaauacugcuuaacuuuagga

SEQ ID NO: 41033 - RNA, 22 nt, Homo sapiens
uuggacuucuaacugacaugga

SEQ ID NO: 41034 - RNA, 22 nt, Homo sapiens
ugugccuaguaauguguccaga

SEQ ID NO: 41035 - RNA, 22 nt, Homo sapiens
ugagcugagaaaugcagcagcu

SEQ ID NO: 41036 - RNA, 22 nt, Homo sapiens
uugagauggaguuuugcucuug

SEQ ID NO: 41037 - RNA, 22 nt, Homo sapiens
aagugccauguggaugggcccu

SEQ ID NO: 41038 - RNA, 22 nt, Homo sapiens
uugguucucuuagccaucuuaa

SEQ ID NO: 41039 - RNA, 22 nt, Homo sapiens
uucccagugccaggcacuggga

SEQ ID NO: 41040 - RNA, 22 nt, Homo sapiens
ugagaugauagauauguuaauu

SEQ ID NO: 41041 - RNA, 22 nt, Homo sapiens
auccauugucuaaugcuaagau

SEQ ID NO: 41042 - RNA, 22 nt, Homo sapiens
uuugugaggugauggauauguc

SEQ ID NO: 41043 - RNA, 22 nt, Homo sapiens
agaauguuuuagaccaauacaa

SEQ ID NO: 41044 - RNA, 22 nt, Homo sapiens
aucccuagaaaaaucagcacau

SEQ ID NO: 41045 - RNA, 22 nt, Homo sapiens
uuucauggaggcauuuuagauu

SEQ ID NO: 41046 - RNA, 22 nt, Homo sapiens
auggcagugagucucuaguauu

SEQ ID NO: 41047 - RNA, 22 nt, Homo sapiens
uuguaaucaacacaucauuggg

SEQ ID NO: 41048 - RNA, 22 nt, Homo sapiens
cugagcuagaccacuuggcucc

SEQ ID NO: 41049 - RNA, 22 nt, Homo sapiens
uauggcuucuauaaggaagcuu

SEQ ID NO: 41050 - RNA, 20 nt, Homo sapiens
aaacucugucuucuuuauca

SEQ ID NO: 41051 - RNA, 22 nt, Homo sapiens
cauugcacuccagcuugggcga

SEQ ID NO: 41052 - RNA, 19 nt, Homo sapiens
uaucacuucccuggaaaca

SEQ ID NO: 41053 - RNA, 22 nt, Homo sapiens
auauucacagguaucagagauu

SEQ ID NO: 41054 - RNA, 22 nt, Homo sapiens
auguccauggaaucuguagcaa

SEQ ID NO: 41055 - RNA, 22 nt, Homo sapiens
gaaacugcauuucuaacaagcu

SEQ ID NO: 41056 - RNA, 22 nt, Homo sapiens
uuaccugagaaggugacauuug

SEQ ID NO: 41057 - RNA, 21 nt, Homo sapiens
uauggauuugccuauucugga

SEQ ID NO: 41058 - RNA, 22 nt, Homo sapiens
uuggucaucucccuccuuuuag

SEQ ID NO: 41059 - RNA, 22 nt, Homo sapiens
caggaaugugaggguucccugc

SEQ ID NO: 41060 - RNA, 22 nt, Homo sapiens
caguuacuuuugcaccaaccua

SEQ ID NO: 41061 - RNA, 22 nt, Homo sapiens
cauugcacuccagccucggcaa

SEQ ID NO: 41062 - RNA, 21 nt, Homo sapiens
uuuagguagcuuuucugggag

SEQ ID NO: 41063 - RNA, 22 nt, Homo sapiens
uuugccaaucagaggcaucuug

SEQ ID NO: 41064 - RNA, 22 nt, Homo sapiens
uuuguucaccucaaggauggga

SEQ ID NO: 41065 - RNA, 22 nt, Homo sapiens
cauaaagauggaggaggccagg

SEQ ID NO: 41066 - RNA, 23 nt, Homo sapiens
uuaguaaacucaaugacaccaca

SEQ ID NO: 41067 - RNA, 23 nt, Homo sapiens
aucagguuguagaauguguuugc

SEQ ID NO: 41068 - RNA, 22 nt, Homo sapiens
cuguucaggaggcauuuggugg

SEQ ID NO: 41069 - RNA, 20 nt, Homo sapiens
ugagcucaugacauuuuucu

SEQ ID NO: 41070 - RNA, 22 nt, Homo sapiens
uuaugacauugacaguuuuuag

SEQ ID NO: 41071 - RNA, 22 nt, Homo sapiens
gagcuguuuuucacuagaccaa

SEQ ID NO: 41072 - RNA, 22 nt, Homo sapiens
ugucagaaucugagacgacaac

SEQ ID NO: 41073 - RNA, 22 nt, Homo sapiens
aucccugugauccaaucacuuc

SEQ ID NO: 41074 - RNA, 22 nt, Homo sapiens
uuugugcaugaagagggggugc

SEQ ID NO: 41075 - RNA, 22 nt, Homo sapiens
agugaaaugucaccuuuuagga

SEQ ID NO: 41076 - RNA, 22 nt, Homo sapiens
uggaagacaaguguuagcaugg

SEQ ID NO: 41077 - RNA, 22 nt, Homo sapiens
uggagugagaacuucaaugaug

SEQ ID NO: 41078 - RNA, 22 nt, Homo sapiens
aguaaauuucugugcuuucaua

SEQ ID NO: 41079 - RNA, 22 nt, Homo sapiens
caucgcacuccagccugggcaa

SEQ ID NO: 41080 - RNA, 22 nt, Homo sapiens
ucuugcuuguuguucccuucau

SEQ ID NO: 41081 - RNA, 22 nt, Homo sapiens
augugacuuuuuccugugccuu

SEQ ID NO: 41082 - RNA, 22 nt, Homo sapiens
uugagauggaguguugcucugu

SEQ ID NO: 41083 - RNA, 22 nt, Homo sapiens
uugagauggagucuugcucucu

SEQ ID NO: 41084 - RNA, 22 nt, Homo sapiens
ucuacagccaguucaggaagaa

SEQ ID NO: 41085 - RNA, 22 nt, Homo sapiens
uccuguaaucccagcuaccaga

SEQ ID NO: 41086 - RNA, 22 nt, Homo sapiens
auagcagacauuucaaggcagg

SEQ ID NO: 41087 - RNA, 22 nt, Homo sapiens
ugagaugagggaagccuaggca

SEQ ID NO: 41088 - RNA, 21 nt, Homo sapiens
uuaucccagugucucugcagg

SEQ ID NO: 41089 - RNA, 22 nt, Homo sapiens
uugcuuaggcuggagugcagug

SEQ ID NO: 41090 - RNA, 22 nt, Homo sapiens
uacagucacauuccugaccaua

SEQ ID NO: 41091 - RNA, 22 nt, Homo sapiens
uuugugagguggauagauugca

SEQ ID NO: 41092 - RNA, 22 nt, Homo sapiens
guacacauacauauaugugugu

SEQ ID NO: 41093 - RNA, 22 nt, Homo sapiens
auagcagaacagugucucacug

SEQ ID NO: 41094 - RNA, 22 nt, Homo sapiens
ucugucuuguccucacccuaga

SEQ ID NO: 41095 - RNA, 22 nt, Homo sapiens
agugcacuccagccugggcaac

SEQ ID NO: 41096 - RNA, 19 nt, Homo sapiens
ugagauuguaugaggagau

SEQ ID NO: 41097 - RNA, 22 nt, Homo sapiens
gcuguguugugcccagcaucau

SEQ ID NO: 41098 - RNA, 22 nt, Homo sapiens
uauggccccuacaugugcaaaa

SEQ ID NO: 41099 - RNA, 22 nt, Homo sapiens
auggcuuuaagagugucugaau

SEQ ID NO: 41100 - RNA, 22 nt, Homo sapiens
uuugaguaggcuuauauuuugg

SEQ ID NO: 41101 - RNA, 17 nt, Homo sapiens
aaguggcuuguucacca

SEQ ID NO: 41102 - RNA, 22 nt, Homo sapiens
gagaugaugagauguucacagu

SEQ ID NO: 41103 - RNA, 22 nt, Homo sapiens
cuggcagucugccucuucacug

SEQ ID NO: 41104 - RNA, 22 nt, Homo sapiens
uggaaguuaaaugacucuuucu

SEQ ID NO: 41105 - RNA, 22 nt, Homo sapiens
ugagaugaacuugauuguuuua

SEQ ID NO: 41106 - RNA, 22 nt, Homo sapiens
ugcaaugugaaauaagcacauc

SEQ ID NO: 41107 - RNA, 22 nt, Homo sapiens
cugucucagugaauugguuuua

SEQ ID NO: 41108 - RNA, 23 nt, Homo sapiens
aauaucacaguggguguacaccc

SEQ ID NO: 41109 - RNA, 22 nt, Homo sapiens
ugugacucuggcacauggugag

SEQ ID NO: 41110 - RNA, 22 nt, Homo sapiens
ugucucccuucccauuaggaag

SEQ ID NO: 41111 - RNA, 22 nt, Homo sapiens
uuuagcaaagcaauuuacacca

SEQ ID NO: 41112 - RNA, 22 nt, Homo sapiens
gaaaugcucauuuuggauccuu

SEQ ID NO: 41113 - RNA, 22 nt, Homo sapiens
guugguuuccuguaacuggaca

SEQ ID NO: 41114 - RNA, 22 nt, Homo sapiens
acugaucaauguuaaggcuuau

SEQ ID NO: 41115 - RNA, 22 nt, Homo sapiens
uuaagggaggagcuucaagaug

SEQ ID NO: 41116 - RNA, 22 nt, Homo sapiens
cauugcacuccauccuuggcaa

SEQ ID NO: 41117 - RNA, 22 nt, Homo sapiens
auacaaguuauuugaacugcgg

SEQ ID NO: 41118 - RNA, 22 nt, Homo sapiens
cuuuugugauucuucaguugcu

SEQ ID NO: 41119 - RNA, 17 nt, Homo sapiens
ugagcuaagauuacccc

SEQ ID NO: 41120 - RNA, 22 nt, Homo sapiens
gggcaacauugaguacccugaa

SEQ ID NO: 41121 - RNA, 23 nt, Homo sapiens
uugaggcauguaccaucaauauc

SEQ ID NO: 41122 - RNA, 22 nt, Homo sapiens
gguaaaucuucacuaagacuga

SEQ ID NO: 41123 - RNA, 17 nt, Homo sapiens
cucucugguuuaaagca

SEQ ID NO: 41124 - RNA, 22 nt, Homo sapiens
agcuggcuguggagaaaccccu

SEQ ID NO: 41125 - RNA, 22 nt, Homo sapiens
ugagcugagaucgugccauugu

SEQ ID NO: 41126 - RNA, 22 nt, Homo sapiens
ccuucauucauuaauuuagccc

SEQ ID NO: 41127 - RNA, 22 nt, Homo sapiens
ugagaugaguugcgcucugucg

SEQ ID NO: 41128 - RNA, 19 nt, Homo sapiens
aguggguguuuucuguuug

SEQ ID NO: 41129 - RNA, 22 nt, Homo sapiens
ugagaucaagguuaauauaauc

SEQ ID NO: 41130 - RNA, 22 nt, Homo sapiens
cucagugucuggcacacagaaa

SEQ ID NO: 41131 - RNA, 22 nt, Homo sapiens
ugagaugaggucucgcucuguc

SEQ ID NO: 41132 - RNA, 22 nt, Homo sapiens
ccugucuugauuaaauuacuua

SEQ ID NO: 41133 - RNA, 20 nt, Homo sapiens
ugagaacaugugguauuugg

SEQ ID NO: 41134 - RNA, 22 nt, Homo sapiens
ugagauucuuacuccugaguuc

SEQ ID NO: 41135 - RNA, 22 nt, Homo sapiens
gacuugaagaaucuaagggagg

SEQ ID NO: 41136 - RNA, 22 nt, Homo sapiens
cauacaagcuacaaucacaaag

SEQ ID NO: 41137 - RNA, 22 nt, Homo sapiens
auugcacuccacccugggcaac

SEQ ID NO: 41138 - RNA, 22 nt, Homo sapiens
uuacagcagugccccacuccca

SEQ ID NO: 41139 - RNA, 22 nt, Homo sapiens
cauugcacuccagcucugggcg

SEQ ID NO: 41140 - RNA, 22 nt, Homo sapiens
acaauguauauuuuacuguagg

SEQ ID NO: 41141 - RNA, 22 nt, Homo sapiens
uuugguuuuuguuaucacucau

SEQ ID NO: 41142 - RNA, 22 nt, Homo sapiens
augacagagauaugugaauuuu

SEQ ID NO: 41143 - RNA, 19 nt, Homo sapiens
uuuuggaaaugugaacagc

SEQ ID NO: 41144 - RNA, 20 nt, Homo sapiens
auuccacuuauaugaggucc

SEQ ID NO: 41145 - RNA, 22 nt, Homo sapiens
uggcagaugcucuuggugccca

SEQ ID NO: 41146 - RNA, 21 nt, Homo sapiens
auagcacuucacuugguuaga

SEQ ID NO: 41147 - RNA, 22 nt, Homo sapiens
acacaguguuuauugugguuag

SEQ ID NO: 41148 - RNA, 22 nt, Homo sapiens
acccuguaggacuauucuaauc

SEQ ID NO: 41149 - RNA, 22 nt, Homo sapiens
aucauccagccccagaagggag

SEQ ID NO: 41150 - RNA, 22 nt, Homo sapiens
aagcacccagccucacgccugc

SEQ ID NO: 41151 - RNA, 22 nt, Homo sapiens
uaugacauaguccuuaacccuc

SEQ ID NO: 41152 - RNA, 22 nt, Homo sapiens
gcugagaucucuugccugaacu

SEQ ID NO: 41153 - RNA, 22 nt, Homo sapiens
acacuguagcugagggcaugcg

SEQ ID NO: 41154 - RNA, 22 nt, Homo sapiens
guaaagacacaugcacacguau

SEQ ID NO: 41155 - RNA, 22 nt, Homo sapiens
uuggaaacauuuaugguaacag

SEQ ID NO: 41156 - RNA, 22 nt, Homo sapiens
ugaaggcaggagggagaaaagu

SEQ ID NO: 41157 - RNA, 22 nt, Homo sapiens
uauggccuuuuuaaugauauug

SEQ ID NO: 41158 - RNA, 22 nt, Homo sapiens
acacuuucuggagcugcacaua

SEQ ID NO: 41159 - RNA, 22 nt, Homo sapiens
uuaaggaaggagucuuaaaugg

SEQ ID NO: 41160 - RNA, 19 nt, Homo sapiens
ugugaacaucacagagugu

SEQ ID NO: 41161 - RNA, 22 nt, Homo sapiens
aaaagcauucagagugcugggc

SEQ ID NO: 41162 - RNA, 22 nt, Homo sapiens
cauugcacuccagucugggcaa

SEQ ID NO: 41163 - RNA, 22 nt, Homo sapiens
gacaagagaacacugcuauauu

SEQ ID NO: 41164 - RNA, 22 nt, Homo sapiens
gauacaccauuuucuagcuauu

SEQ ID NO: 41165 - RNA, 22 nt, Homo sapiens
auagcagaagaagggacaauuc

SEQ ID NO: 41166 - RNA, 22 nt, Homo sapiens
augugcaagaucauuaaagcuc

SEQ ID NO: 41167 - RNA, 22 nt, Homo sapiens
cacaguguuacugguaugaagu

SEQ ID NO: 41168 - RNA, 22 nt, Homo sapiens
uuaacacugccauugauacugu

SEQ ID NO: 41169 - RNA, 22 nt, Homo sapiens
ugcacuguggucugagagacag

SEQ ID NO: 41170 - RNA, 22 nt, Homo sapiens
ucuugguugaaaauucauaaua

SEQ ID NO: 41171 - RNA, 22 nt, Homo sapiens
ugagaucaguuguuauaauucu

SEQ ID NO: 41172 - RNA, 22 nt, Homo sapiens
ugcaaauguuaggugucauuau

SEQ ID NO: 41173 - RNA, 22 nt, Homo sapiens
acuuuguguuacccagcaagga

SEQ ID NO: 41174 - RNA, 18 nt, Homo sapiens
uugcacuccugccugggu

SEQ ID NO: 41175 - RNA, 22 nt, Homo sapiens
uauggcuucuuuaaauugaggu

SEQ ID NO: 41176 - RNA, 22 nt, Homo sapiens
gggaaauguaaagucauaagau

SEQ ID NO: 41177 - RNA, 22 nt, Homo sapiens
uuaguucauugugacuggacuc

SEQ ID NO: 41178 - RNA, 22 nt, Homo sapiens
uucagugucauuaacacaguag

SEQ ID NO: 41179 - RNA, 22 nt, Homo sapiens
ugagccaugggguaaaugugau

SEQ ID NO: 41180 - RNA, 22 nt, Homo sapiens
auugcauaaacacauuucuuau

SEQ ID NO: 41181 - RNA, 22 nt, Homo sapiens
ucucugagaaaaguuucuccca

SEQ ID NO: 41182 - RNA, 22 nt, Homo sapiens
auccaagagacugaugacuucc

SEQ ID NO: 41183 - RNA, 22 nt, Homo sapiens
ggaaagaucagcuaaauguaag

SEQ ID NO: 41184 - RNA, 22 nt, Homo sapiens
uucuuuggauaaaguuuuaugc

SEQ ID NO: 41185 - RNA, 22 nt, Homo sapiens
cuggcaguguuucuugugggcu

SEQ ID NO: 41186 - RNA, 21 nt, Homo sapiens
ugagaugauccugcaugcaug

SEQ ID NO: 41187 - RNA, 22 nt, Homo sapiens
ugagcugagaucaugcuauugu

SEQ ID NO: 41188 - RNA, 20 nt, Homo sapiens
auuccacuuguuugagguac

SEQ ID NO: 41189 - RNA, 22 nt, Homo sapiens
uaaagugcugagaugaggcugg

SEQ ID NO: 41190 - RNA, 22 nt, Homo sapiens
gagcucauuaaaaauguagaau

SEQ ID NO: 41191 - RNA, 20 nt, Homo sapiens
uggaaauuaaccuuucaggu

SEQ ID NO: 41192 - RNA, 22 nt, Homo sapiens
agcaagaugaaguugagcuagg

SEQ ID NO: 41193 - RNA, 22 nt, Homo sapiens
cuagaguacuuaccacagcaug

SEQ ID NO: 41194 - RNA, 22 nt, Homo sapiens
uuugcauaauaagauuagggug

SEQ ID NO: 41195 - RNA, 22 nt, Homo sapiens
cauugcaugccagccugggcaa

SEQ ID NO: 41196 - RNA, 22 nt, Homo sapiens
ugccaaaaugggcuuuauaccg

SEQ ID NO: 41197 - RNA, 22 nt, Homo sapiens
uuugaguuugaggugcugauga

SEQ ID NO: 41198 - RNA, 22 nt, Homo sapiens
ucuaugguuuauuuccaagugu

SEQ ID NO: 41199 - RNA, 22 nt, Homo sapiens
ugacuaaaacugaguuucauua

SEQ ID NO: 41200 - RNA, 22 nt, Homo sapiens
uuuuauguuuguucccugccaa

SEQ ID NO: 41201 - RNA, 20 nt, Homo sapiens
uagcacacauguagaauagu

SEQ ID NO: 41202 - RNA, 20 nt, Homo sapiens
ugagaacauguggcauuugg

SEQ ID NO: 41203 - RNA, 22 nt, Homo sapiens
augacaagaguguucagggaga

SEQ ID NO: 41204 - RNA, 22 nt, Homo sapiens
caacacagugaaacccgucucu

SEQ ID NO: 41205 - RNA, 19 nt, Homo sapiens
uucucugguuguacuaccc

SEQ ID NO: 41206 - RNA, 22 nt, Homo sapiens
acaguguagugacugccaacuu

SEQ ID NO: 41207 - RNA, 22 nt, Homo sapiens
uggucuccuuuguacccugggc

SEQ ID NO: 41208 - RNA, 22 nt, Homo sapiens
guacaguuuucaguguucacug

SEQ ID NO: 41209 - RNA, 22 nt, Homo sapiens
aucacuuucuauuucugugcca

SEQ ID NO: 41210 - RNA, 22 nt, Homo sapiens
auugcacuccagucugggcaac

SEQ ID NO: 41211 - RNA, 22 nt, Homo sapiens
ggucagaaagacaggcauucag

SEQ ID NO: 41212 - RNA, 22 nt, Homo sapiens
uaguucauuuuucuugcuuaga

SEQ ID NO: 41213 - RNA, 22 nt, Homo sapiens
aaccuguaaccauaugaucagu

SEQ ID NO: 41214 - RNA, 22 nt, Homo sapiens
uugcauaagugcauucugugau

SEQ ID NO: 41215 - RNA, 22 nt, Homo sapiens
auggcucuggauagaaugcagg

SEQ ID NO: 41216 - RNA, 22 nt, Homo sapiens
uuccugagagggcugggugcag

SEQ ID NO: 41217 - RNA, 21 nt, Homo sapiens
acaucagaguugugaagguag

SEQ ID NO: 41218 - RNA, 22 nt, Homo sapiens
cagagagcuugcccuuguauau

SEQ ID NO: 41219 - RNA, 22 nt, Homo sapiens
agaagaacauagggugacugaa

SEQ ID NO: 41220 - RNA, 22 nt, Homo sapiens
ugagcugagacaauaaguuuuu

SEQ ID NO: 41221 - RNA, 22 nt, Homo sapiens
gagcugaucuuuucugauucca

SEQ ID NO: 41222 - RNA, 22 nt, Homo sapiens
ugagaugagagaaugcuugccu

SEQ ID NO: 41223 - RNA, 22 nt, Homo sapiens
aagugucuuaccgggagggagu

SEQ ID NO: 41224 - RNA, 20 nt, Homo sapiens
uaugacacugucauaaaaau

SEQ ID NO: 41225 - RNA, 22 nt, Homo sapiens
uugcauauguugaaccaagcgu

SEQ ID NO: 41226 - RNA, 22 nt, Homo sapiens
uuguguuuuuaguagggaaggg

SEQ ID NO: 41227 - RNA, 22 nt, Homo sapiens
uuggagugugcucauaacugcu

SEQ ID NO: 41228 - RNA, 21 nt, Homo sapiens
ucagaagcucccagggaggac

SEQ ID NO: 41229 - RNA, 22 nt, Homo sapiens
uaucacuuugauaguuuaaaug

SEQ ID NO: 41230 - RNA, 19 nt, Homo sapiens
cauugcacuccacccuggg

SEQ ID NO: 41231 - RNA, 22 nt, Homo sapiens
gaaugcagcagugacagggcug

SEQ ID NO: 41232 - RNA, 22 nt, Homo sapiens
uggaagauucuagaagauucca

SEQ ID NO: 41233 - RNA, 22 nt, Homo sapiens
agcugguuuaauaugcugucug

SEQ ID NO: 41234 - RNA, 22 nt, Homo sapiens
augaucacuguggaaauucagc

SEQ ID NO: 41235 - RNA, 22 nt, Homo sapiens
auggcaguguaugauuauauua

SEQ ID NO: 41236 - RNA, 22 nt, Homo sapiens
uuuugcaguuacagagagugag

SEQ ID NO: 41237 - RNA, 22 nt, Homo sapiens
auggaacauuauagauguaaaa

SEQ ID NO: 41238 - RNA, 22 nt, Homo sapiens
aagugaguaauacgucaguugu

SEQ ID NO: 41239 - RNA, 22 nt, Homo sapiens
uuugcuugaggucuagcuaccc

SEQ ID NO: 41240 - RNA, 22 nt, Homo sapiens
uccauuugucuauguuucuguu

SEQ ID NO: 41241 - RNA, 22 nt, Homo sapiens
aucugugaaugaaguuauuuug

SEQ ID NO: 41242 - RNA, 22 nt, Homo sapiens
uuggaaacaccuggugagguua

SEQ ID NO: 41243 - RNA, 22 nt, Homo sapiens
ggaucacuugagaccaggaguu

SEQ ID NO: 41244 - RNA, 22 nt, Homo sapiens
aucgcacuccauccugggcaac

SEQ ID NO: 41245 - RNA, 22 nt, Homo sapiens
ccugucuugaagagauccuccu

SEQ ID NO: 41246 - RNA, 22 nt, Homo sapiens
augcaacugcacuccagccugg

SEQ ID NO: 41247 - RNA, 22 nt, Homo sapiens
cucaguguucccauucuaccuu

SEQ ID NO: 41248 - RNA, 22 nt, Homo sapiens
uucagauugcauaccgaaagua

SEQ ID NO: 41249 - RNA, 22 nt, Homo sapiens
ucacaguccuguuuaggagagg

SEQ ID NO: 41250 - RNA, 22 nt, Homo sapiens
uauugcaauuggcagagugcua

SEQ ID NO: 41251 - RNA, 22 nt, Homo sapiens
auugcacuccagccuggcaaua

SEQ ID NO: 41252 - RNA, 22 nt, Homo sapiens
cuauggcucugucuuuuaaguu

SEQ ID NO: 41253 - RNA, 22 nt, Homo sapiens
ucagugccucaguuuuuaaaga

SEQ ID NO: 41254 - RNA, 22 nt, Homo sapiens
augaagcuagcugauugcugau

SEQ ID NO: 41255 - RNA, 22 nt, Homo sapiens
ugucucaguucccuucucugga

SEQ ID NO: 41256 - RNA, 22 nt, Homo sapiens
cuuugguuaucuagcuguauga

SEQ ID NO: 41257 - RNA, 22 nt, Homo sapiens
auugcacuccagccugggcgac

SEQ ID NO: 41258 - RNA, 21 nt, Homo sapiens
agcugguuuccacagugugcu

SEQ ID NO: 41259 - RNA, 22 nt, Homo sapiens
augaggcaggaaaggcguaucu

SEQ ID NO: 41260 - RNA, 22 nt, Homo sapiens
ucuuuggugaauggucauccag

SEQ ID NO: 41261 - RNA, 22 nt, Homo sapiens
cauugcacuccagccuagccaa

SEQ ID NO: 41262 - RNA, 22 nt, Homo sapiens
ugagaugagaaucaguucuaau

SEQ ID NO: 41263 - RNA, 22 nt, Homo sapiens
ugugagacugguucugaaccca

SEQ ID NO: 41264 - RNA, 19 nt, Homo sapiens
uggaacugauucaguucug

SEQ ID NO: 41265 - RNA, 22 nt, Homo sapiens
auacaucugccauguuggugug

SEQ ID NO: 41266 - RNA, 22 nt, Homo sapiens
guauacaugucaaaacucacau

SEQ ID NO: 41267 - RNA, 22 nt, Homo sapiens
cugagcucauuucuuuugcuac

SEQ ID NO: 41268 - RNA, 22 nt, Homo sapiens
ucacuagaucaagggagagaaa

SEQ ID NO: 41269 - RNA, 22 nt, Homo sapiens
uuagguaauauauugcugcuuu

SEQ ID NO: 41270 - RNA, 22 nt, Homo sapiens
gagcugaucuuuauguaaauuc

SEQ ID NO: 41271 - RNA, 22 nt, Homo sapiens
ugagaucacuaagagguaaugg

SEQ ID NO: 41272 - RNA, 22 nt, Homo sapiens
uguauguuguaagacuuagacc

SEQ ID NO: 41273 - RNA, 22 nt, Homo sapiens
uacacagucaaaaauuuccagg

SEQ ID NO: 41274 - RNA, 22 nt, Homo sapiens
augaugcugagguuugggguau

SEQ ID NO: 41275 - RNA, 22 nt, Homo sapiens
cauugcacuccagccugccugg

SEQ ID NO: 41276 - RNA, 22 nt, Homo sapiens
aggcaaugugagaguuuauuca

SEQ ID NO: 41277 - RNA, 22 nt, Homo sapiens
ggacaagagacugggacacuga

SEQ ID NO: 41278 - RNA, 22 nt, Homo sapiens
ugaaacacacauugcccuuuau

SEQ ID NO: 41279 - RNA, 16 nt, Homo sapiens
uugaggcaugucucag

SEQ ID NO: 41280 - RNA, 22 nt, Homo sapiens
acacuauugagguuuguuugca

SEQ ID NO: 41281 - RNA, 22 nt, Homo sapiens
ucuuuguuggaguccaaggaua

SEQ ID NO: 41282 - RNA, 22 nt, Homo sapiens
uuauggauuuauauucuguagu

SEQ ID NO: 41283 - RNA, 22 nt, Homo sapiens
gucuuuggaaaaaaugucuguu

SEQ ID NO: 41284 - RNA, 22 nt, Homo sapiens
ugagcuguuugaagaagcauuu

SEQ ID NO: 41285 - RNA, 22 nt, Homo sapiens
gaugauguugaauguucucacc

SEQ ID NO: 41286 - RNA, 22 nt, Homo sapiens
uucucuggucagaggggagguu

SEQ ID NO: 41287 - RNA, 21 nt, Homo sapiens
auuccacuuuuccuucaggga

SEQ ID NO: 41288 - RNA, 22 nt, Homo sapiens
aacagacugucacauaaaauug

SEQ ID NO: 41289 - RNA, 22 nt, Homo sapiens
augaacagagccuugagaaccu

SEQ ID NO: 41290 - RNA, 21 nt, Homo sapiens
uucaucuggccguauuccagg

SEQ ID NO: 41291 - RNA, 22 nt, Homo sapiens
cuacagcagcccaguccccgaa

SEQ ID NO: 41292 - RNA, 22 nt, Homo sapiens
auguccaugagcacauguauca

SEQ ID NO: 41293 - RNA, 20 nt, Homo sapiens
uaugacaaagccuagugagu

SEQ ID NO: 41294 - RNA, 22 nt, Homo sapiens
uugaagacuauaugauucuuca

SEQ ID NO: 41295 - RNA, 22 nt, Homo sapiens
cauggcuuucacaguaaagccu

SEQ ID NO: 41296 - RNA, 22 nt, Homo sapiens
aagagaugaagguccugacugu

SEQ ID NO: 41297 - RNA, 22 nt, Homo sapiens
aauggcuuuuaauauccauaau

SEQ ID NO: 41298 - RNA, 22 nt, Homo sapiens
cugucuagagggcacaugaugc

SEQ ID NO: 41299 - RNA, 22 nt, Homo sapiens
uaucagcagagucauacuucaa

SEQ ID NO: 41300 - RNA, 22 nt, Homo sapiens
uucaagaauuaaaguggcuuuu

SEQ ID NO: 41301 - RNA, 22 nt, Homo sapiens
ugacaagaacuuuccauaguaa

SEQ ID NO: 41302 - RNA, 22 nt, Homo sapiens
acaaagugccuccuuuuagagu

SEQ ID NO: 41303 - RNA, 22 nt, Homo sapiens
ugcaauuuaaugugucccaauu

SEQ ID NO: 41304 - RNA, 22 nt, Homo sapiens
uuuggucacugccgccgccagc

SEQ ID NO: 41305 - RNA, 18 nt, Homo sapiens
guaaauguaucuauugcc

SEQ ID NO: 41306 - RNA, 22 nt, Homo sapiens
uauggcuuuucacuuaaguccu

SEQ ID NO: 41307 - RNA, 22 nt, Homo sapiens
ugagcucagcuaguugaggugu

SEQ ID NO: 41308 - RNA, 22 nt, Homo sapiens
uaugagacugguuaauuuuugu

SEQ ID NO: 41309 - RNA, 22 nt, Homo sapiens
auggccugaugcaccuguccca

SEQ ID NO: 41310 - RNA, 22 nt, Homo sapiens
uggaagaugggaccucaguuuu

SEQ ID NO: 41311 - RNA, 22 nt, Homo sapiens
uauuugguuggugcaaaaguaa

SEQ ID NO: 41312 - RNA, 22 nt, Homo sapiens
aaguuaauguuuaagacuccua

SEQ ID NO: 41313 - RNA, 22 nt, Homo sapiens
uaagacugccccagacagcaag

SEQ ID NO: 41314 - RNA, 23 nt, Homo sapiens
ggaaacauccagucuuucaccau

SEQ ID NO: 41315 - RNA, 22 nt, Homo sapiens
uucaauaugucauuggcaggca

SEQ ID NO: 41316 - RNA, 22 nt, Homo sapiens
agagaccuguaaaguucaggca

SEQ ID NO: 41317 - RNA, 22 nt, Homo sapiens
uuggcagugcccgaugcugggg

SEQ ID NO: 41318 - RNA, 23 nt, Homo sapiens
uuuggcauuccagaaauuuucau

SEQ ID NO: 41319 - RNA, 22 nt, Homo sapiens
cuucaucugguuugugaacuuu

SEQ ID NO: 41320 - RNA, 22 nt, Homo sapiens
aucacuuugcucuccagugugg

SEQ ID NO: 41321 - RNA, 22 nt, Homo sapiens
ucugucuugugguuugagugcc

SEQ ID NO: 41322 - RNA, 21 nt, Homo sapiens
guggaaauggaauuuacuaau

SEQ ID NO: 41323 - RNA, 22 nt, Homo sapiens
auggcucuguuccaugugucuu

SEQ ID NO: 41324 - RNA, 22 nt, Homo sapiens
auacaagugccauguuggugug

SEQ ID NO: 41325 - RNA, 22 nt, Homo sapiens
ugagaucugauaggccuggguu

SEQ ID NO: 41326 - RNA, 22 nt, Homo sapiens
ccuuggcacuuugccacagugc

SEQ ID NO: 41327 - RNA, 22 nt, Homo sapiens
auggcagugucuagggguguuu

SEQ ID NO: 41328 - RNA, 22 nt, Homo sapiens
auugcucuuagaaauauuucuu

SEQ ID NO: 41329 - RNA, 22 nt, Homo sapiens
guucaagugauucuacugccuc

SEQ ID NO: 41330 - RNA, 22 nt, Homo sapiens
gucuuuggaaagacaaaguuca

SEQ ID NO: 41331 - RNA, 22 nt, Homo sapiens
ucauacaguaguccucacuugu

SEQ ID NO: 41332 - RNA, 22 nt, Homo sapiens
auuguacuccagccugggcaaa

SEQ ID NO: 41333 - RNA, 22 nt, Homo sapiens
augcaacuugaaauuuuccgga

SEQ ID NO: 41334 - RNA, 22 nt, Homo sapiens
uucuuugguacaagggccgacc

SEQ ID NO: 41335 - RNA, 22 nt, Homo sapiens
gucauugcacuccagccuggac

SEQ ID NO: 41336 - RNA, 22 nt, Homo sapiens
ugaggugaggguaucaaaugcu

SEQ ID NO: 41337 - RNA, 22 nt, Homo sapiens
ggaauggaacaaagucuugaaa

SEQ ID NO: 41338 - RNA, 22 nt, Homo sapiens
gcuuuguuaaaacacagccaca

SEQ ID NO: 41339 - RNA, 22 nt, Homo sapiens
acauucagcuguuguuucaaug

SEQ ID NO: 41340 - RNA, 22 nt, Homo sapiens
cacuguggauggaacuauguga

SEQ ID NO: 41341 - RNA, 22 nt, Homo sapiens
acacagugucuguguauuuaaa

SEQ ID NO: 41342 - RNA, 22 nt, Homo sapiens
auugcacuccauccugggcaau

SEQ ID NO: 41343 - RNA, 22 nt, Homo sapiens
caccugagcgggaugcucgccu

SEQ ID NO: 41344 - RNA, 22 nt, Homo sapiens
uaaguucauucaugaaacuuag

SEQ ID NO: 41345 - RNA, 22 nt, Homo sapiens
augugcaaagcacuguucagca

SEQ ID NO: 41346 - RNA, 22 nt, Homo sapiens
augaggcacugcgcccuacuga

SEQ ID NO: 41347 - RNA, 22 nt, Homo sapiens
agaaugugaacaucuugaaagu

SEQ ID NO: 41348 - RNA, 22 nt, Homo sapiens
caucacuuuuccuuuuacagau

SEQ ID NO: 41349 - RNA, 22 nt, Homo sapiens
uauggcuuuuaacugucguaug

SEQ ID NO: 41350 - RNA, 20 nt, Homo sapiens
cauugcccuccagccugggc

SEQ ID NO: 41351 - RNA, 22 nt, Homo sapiens
cuaauacaguuguccaagcugg

SEQ ID NO: 41352 - RNA, 22 nt, Homo sapiens
uugcacagugguuuagagccug

SEQ ID NO: 41353 - RNA, 19 nt, Homo sapiens
cucuuuggugucucuucuu

SEQ ID NO: 41354 - RNA, 22 nt, Homo sapiens
uaagacuguuggcaauuuuugc

SEQ ID NO: 41355 - RNA, 19 nt, Homo sapiens
auugcacuccaaccugggu

SEQ ID NO: 41356 - RNA, 22 nt, Homo sapiens
guggaaugaaaacucucucaca

SEQ ID NO: 41357 - RNA, 22 nt, Homo sapiens
uuugaaccauuugaagaaugau

SEQ ID NO: 41358 - RNA, 22 nt, Homo sapiens
uuuuaacagccaggggacggcc

SEQ ID NO: 41359 - RNA, 18 nt, Homo sapiens
aaacugcuuccuuggccu

SEQ ID NO: 41360 - RNA, 20 nt, Homo sapiens
uugaggucaggaguuuggga

SEQ ID NO: 41361 - RNA, 22 nt, Homo sapiens
guguuauugagaaauagggugu

SEQ ID NO: 41362 - RNA, 22 nt, Homo sapiens
uagcauaauuuguagaaaauca

SEQ ID NO: 41363 - RNA, 22 nt, Homo sapiens
uuggacuucucaaggcaauaaa

SEQ ID NO: 41364 - RNA, 22 nt, Homo sapiens
uguaacaggaggaaaaugugaa

SEQ ID NO: 41365 - RNA, 22 nt, Homo sapiens
uugacauguaaguacucuauag

SEQ ID NO: 41366 - RNA, 22 nt, Homo sapiens
uuggaaauguguuugcauucag

SEQ ID NO: 41367 - RNA, 22 nt, Homo sapiens
uagacaacugaaacacugugca

SEQ ID NO: 41368 - RNA, 22 nt, Homo sapiens
uggaaaacaugcacauuggauu

SEQ ID NO: 41369 - RNA, 22 nt, Homo sapiens
ugacaagagaccccuccgcagg

SEQ ID NO: 41370 - RNA, 22 nt, Homo sapiens
uucuacaugggucgucggugag

SEQ ID NO: 41371 - RNA, 22 nt, Homo sapiens
guggcaguuuuaaauaugaaaa

SEQ ID NO: 41372 - RNA, 22 nt, Homo sapiens
augacuuuucugaaaaccacca

SEQ ID NO: 41373 - RNA, 22 nt, Homo sapiens
uucccuguaucuucugccaugu

SEQ ID NO: 41374 - RNA, 22 nt, Homo sapiens
uugagaugaagucuugcucucu

SEQ ID NO: 41375 - RNA, 22 nt, Homo sapiens
uugagaugaaguuuugcucuuu

SEQ ID NO: 41376 - RNA, 22 nt, Homo sapiens
uauacagcaaguuacugugcug

SEQ ID NO: 41377 - RNA, 17 nt, Homo sapiens
auguaauccucaucucu

SEQ ID NO: 41378 - RNA, 22 nt, Homo sapiens
auaugcuuauuagcaagaaaua

SEQ ID NO: 41379 - RNA, 22 nt, Homo sapiens
uguggccuuuguuucaguuggg

SEQ ID NO: 41380 - RNA, 22 nt, Homo sapiens
cugagugcaagugauccuccca

SEQ ID NO: 41381 - RNA, 22 nt, Homo sapiens
uagcuguuggugggaagucaga

SEQ ID NO: 41382 - RNA, 22 nt, Homo sapiens
uuggaaaugguaaaggguuaau

SEQ ID NO: 41383 - RNA, 22 nt, Homo sapiens
cauugcacuccagccuuggcaa

SEQ ID NO: 41384 - RNA, 22 nt, Homo sapiens
ugcauggauguuugaacacacu

SEQ ID NO: 41385 - RNA, 21 nt, Homo sapiens
uggucaguuuucucacuagga

SEQ ID NO: 41386 - RNA, 22 nt, Homo sapiens
auggcaguuuauucuaaaucaa

SEQ ID NO: 41387 - RNA, 22 nt, Homo sapiens
aaggagcuaagagaucauacau

SEQ ID NO: 41388 - RNA, 22 nt, Homo sapiens
uggaagauggaguuuuaucauu

SEQ ID NO: 41389 - RNA, 22 nt, Homo sapiens
ugagaugaugggauaagagggc

SEQ ID NO: 41390 - RNA, 22 nt, Homo sapiens
auuggcuuuugaaagucugcga

SEQ ID NO: 41391 - RNA, 22 nt, Homo sapiens
uuggucaggcuaaucucgaacg

SEQ ID NO: 41392 - RNA, 22 nt, Homo sapiens
auuccacuuacaugaaguaccu

SEQ ID NO: 41393 - RNA, 22 nt, Homo sapiens
uauuguacauauccucccuuca

SEQ ID NO: 41394 - RNA, 18 nt, Homo sapiens
auugcacaccagccuggg

SEQ ID NO: 41395 - RNA, 22 nt, Homo sapiens
uuggaacacauguuuuucuacc

SEQ ID NO: 41396 - RNA, 22 nt, Homo sapiens
ucaaauguuuguuuaaggcuua

SEQ ID NO: 41397 - RNA, 22 nt, Homo sapiens
uuugguugcauucacauauuuc

SEQ ID NO: 41398 - RNA, 22 nt, Homo sapiens
aucuuuggucaucacagcuaga

SEQ ID NO: 41399 - RNA, 22 nt, Homo sapiens
gauaaagauagcaauagggaca

SEQ ID NO: 41400 - RNA, 22 nt, Homo sapiens
uuugugugugauuauaaaaggu

SEQ ID NO: 41401 - RNA, 22 nt, Homo sapiens
ugccauugcacuccagccuggg

SEQ ID NO: 41402 - RNA, 22 nt, Homo sapiens
uuggaagacaaugcugauucuc

SEQ ID NO: 41403 - RNA, 22 nt, Homo sapiens
uuggaaaccucugcagguguuu

SEQ ID NO: 41404 - RNA, 22 nt, Homo sapiens
ugugucuccugaaaauucacau

SEQ ID NO: 41405 - RNA, 22 nt, Homo sapiens
cuucuguuaguucugauaacuu

SEQ ID NO: 41406 - RNA, 22 nt, Homo sapiens
cuugguacucugugucccagcu

SEQ ID NO: 41407 - RNA, 22 nt, Homo sapiens
uuggcagucugaggcacagacu

SEQ ID NO: 41408 - RNA, 22 nt, Homo sapiens
uucauacaguggcugcacucca

SEQ ID NO: 41409 - RNA, 22 nt, Homo sapiens
ugaaauuuuuuauucguuggcu

SEQ ID NO: 41410 - RNA, 22 nt, Homo sapiens
auugcacuccagccugggcagc

SEQ ID NO: 41411 - RNA, 22 nt, Homo sapiens
uuuuaugggcuauuugcauuag

SEQ ID NO: 41412 - RNA, 22 nt, Homo sapiens
cauugcccuccagccugggcaa

SEQ ID NO: 41413 - RNA, 22 nt, Homo sapiens
augacauugaugcucuggcugg

SEQ ID NO: 41414 - RNA, 22 nt, Homo sapiens
ugacaaguaaacagucagcacc

SEQ ID NO: 41415 - RNA, 22 nt, Homo sapiens
ugagaugaagcuagaagaaugg

SEQ ID NO: 41416 - RNA, 23 nt, Homo sapiens
ggaaugaaaccugguuaugauau

SEQ ID NO: 41417 - RNA, 22 nt, Homo sapiens
gagaaccuccagcaagguagua

SEQ ID NO: 41418 - RNA, 22 nt, Homo sapiens
auaucaaggccauuuucuaaau

SEQ ID NO: 41419 - RNA, 22 nt, Homo sapiens
agacaagauggcuugagguuca

SEQ ID NO: 41420 - RNA, 22 nt, Homo sapiens
cccagaguucuuaaauacugag

SEQ ID NO: 41421 - RNA, 22 nt, Homo sapiens
ggaaugugugucaugcuuuugc

SEQ ID NO: 41422 - RNA, 22 nt, Homo sapiens
uugacuagaccaucuuucuaga

SEQ ID NO: 41423 - RNA, 22 nt, Homo sapiens
ucacuuugacggccaacuucua

SEQ ID NO: 41424 - RNA, 22 nt, Homo sapiens
uuuugcaaauuccaguggccau

SEQ ID NO: 41425 - RNA, 22 nt, Homo sapiens
aauuaguuggcugggugcggug

SEQ ID NO: 41426 - RNA, 22 nt, Homo sapiens
acacacgugcauguaugcguau

SEQ ID NO: 41427 - RNA, 22 nt, Homo sapiens
aauggcuucuuauugugguuca

SEQ ID NO: 41428 - RNA, 22 nt, Homo sapiens
auuucuacuccuguguccagaa

SEQ ID NO: 41429 - RNA, 22 nt, Homo sapiens
augagcugauuuccuuaccaua

SEQ ID NO: 41430 - RNA, 22 nt, Homo sapiens
gccaacauggcgcuccauucuu

SEQ ID NO: 41431 - RNA, 22 nt, Homo sapiens
guaaucucagcuacucaggagg

SEQ ID NO: 41432 - RNA, 22 nt, Homo sapiens
uugagccaaggauugucuuucc

SEQ ID NO: 41433 - RNA, 22 nt, Homo sapiens
aaagagaucuaugggcacuaug

SEQ ID NO: 41434 - RNA, 22 nt, Homo sapiens
uucauaguguuuccuuccagug

SEQ ID NO: 41435 - RNA, 22 nt, Homo sapiens
auggcaguuucacucugggauu

SEQ ID NO: 41436 - RNA, 22 nt, Homo sapiens
aucuuuggugcaugauacuuug

SEQ ID NO: 41437 - RNA, 22 nt, Homo sapiens
uugcacauguugaaccagcaaa

SEQ ID NO: 41438 - RNA, 22 nt, Homo sapiens
agugcaauggugccaucauagc

SEQ ID NO: 41439 - RNA, 22 nt, Homo sapiens
gaucacuuugaugccaggaacu

SEQ ID NO: 41440 - RNA, 22 nt, Homo sapiens
uacaccauuugauucuuuaagc

SEQ ID NO: 41441 - RNA, 22 nt, Homo sapiens
cuggcucauuucauuuagcaua

SEQ ID NO: 41442 - RNA, 19 nt, Homo sapiens
uuccugagaacaagggcuu

SEQ ID NO: 41443 - RNA, 22 nt, Homo sapiens
uuauugcacuccagccugggua

SEQ ID NO: 41444 - RNA, 22 nt, Homo sapiens
gagcucauuguugcuaaagaga

SEQ ID NO: 41445 - RNA, 22 nt, Homo sapiens
acaguaugcuuuaaacuuuguu

SEQ ID NO: 41446 - RNA, 22 nt, Homo sapiens
aaccuacauucuuaacuguugc

SEQ ID NO: 41447 - RNA, 22 nt, Homo sapiens
cauggcuuguauaagauucuca

SEQ ID NO: 41448 - RNA, 22 nt, Homo sapiens
auugcacaucugcacuacagcc

SEQ ID NO: 41449 - RNA, 22 nt, Homo sapiens
uugagauggaaucucgcuuugu

SEQ ID NO: 41450 - RNA, 22 nt, Homo sapiens
uauuguccacuuugcacugugu

SEQ ID NO: 41451 - RNA, 22 nt, Homo sapiens
cucaguagaaaauacauggacu

SEQ ID NO: 41452 - RNA, 22 nt, Homo sapiens
agagaugauuaacauuuuggua

SEQ ID NO: 41453 - RNA, 22 nt, Homo sapiens
auggcaguuucagcuauaguuu

SEQ ID NO: 41454 - RNA, 22 nt, Homo sapiens
ugagaccugaucuugguacugc

SEQ ID NO: 41455 - RNA, 22 nt, Homo sapiens
uacaaaucuagguuuguuacug

SEQ ID NO: 41456 - RNA, 22 nt, Homo sapiens
aaguaaacauuuuguacaauaa

SEQ ID NO: 41457 - RNA, 22 nt, Homo sapiens
cuuugguuaauaggauauggca

SEQ ID NO: 41458 - RNA, 20 nt, Homo sapiens
uuggaaaugugaauugggag

SEQ ID NO: 41459 - RNA, 22 nt, Homo sapiens
ggacaagaucuuccaccauuca

SEQ ID NO: 41460 - RNA, 22 nt, Homo sapiens
uugacagaccuuggucauaucc

SEQ ID NO: 41461 - RNA, 22 nt, Homo sapiens
cugaggcacggcgaccuuaagu

SEQ ID NO: 41462 - RNA, 22 nt, Homo sapiens
gucuguuugauccagaucaaaa

SEQ ID NO: 41463 - RNA, 22 nt, Homo sapiens
uacaguguuuugguauuccaca

SEQ ID NO: 41464 - RNA, 22 nt, Homo sapiens
uguggaguguaugugacagaga

SEQ ID NO: 41465 - RNA, 22 nt, Homo sapiens
auuacuuugcaccaaccuaaua

SEQ ID NO: 41466 - RNA, 22 nt, Homo sapiens
uugagauggagucucacuccuu

SEQ ID NO: 41467 - RNA, 22 nt, Homo sapiens
cucauggagaaccucugcuagg

SEQ ID NO: 41468 - RNA, 22 nt, Homo sapiens
uauggaaaucuuaccuuauggu

SEQ ID NO: 41469 - RNA, 22 nt, Homo sapiens
uagucacacacucaacuuuuca

SEQ ID NO: 41470 - RNA, 22 nt, Homo sapiens
uuauggccauucuuguaggagu

SEQ ID NO: 41471 - RNA, 22 nt, Homo sapiens
ugauuggagaacaaacugcaua

SEQ ID NO: 41472 - RNA, 22 nt, Homo sapiens
cuggaauauuagcuggucuuaa

SEQ ID NO: 41473 - RNA, 22 nt, Homo sapiens
aucuuuggugaguucuuugguc

SEQ ID NO: 41474 - RNA, 22 nt, Homo sapiens
uugcacuccggccuggguaaca

SEQ ID NO: 41475 - RNA, 22 nt, Homo sapiens
uaagacacuuaaaauguuacau

SEQ ID NO: 41476 - RNA, 22 nt, Homo sapiens
ugagaugagucucgcucuguca

SEQ ID NO: 41477 - RNA, 22 nt, Homo sapiens
ucacaauucucaauuugugaaa

SEQ ID NO: 41478 - RNA, 22 nt, Homo sapiens
uauggcuuuguucaacagccuc

SEQ ID NO: 41479 - RNA, 22 nt, Homo sapiens
uuccugagccuuguaucuagua

SEQ ID NO: 41480 - RNA, 22 nt, Homo sapiens
ugaauagacacuaaagacugua

SEQ ID NO: 41481 - RNA, 22 nt, Homo sapiens
augugcuuauagguguauguuu

SEQ ID NO: 41482 - RNA, 22 nt, Homo sapiens
ggagaugaaaugagcuacuuaa

SEQ ID NO: 41483 - RNA, 22 nt, Homo sapiens
agcugauggucuuguaugaugu

SEQ ID NO: 41484 - RNA, 20 nt, Homo sapiens
cauugcacuccagccugcug

SEQ ID NO: 41485 - RNA, 22 nt, Homo sapiens
uugagauggagucuugcucugu

SEQ ID NO: 41486 - RNA, 19 nt, Homo sapiens
uaugcaacuuauagugcug

SEQ ID NO: 41487 - RNA, 22 nt, Homo sapiens
acuggcuuauuucacuuagcau

SEQ ID NO: 41488 - RNA, 22 nt, Homo sapiens
auggagacaaauaaaggagagu

SEQ ID NO: 41489 - RNA, 22 nt, Homo sapiens
cugagacacucuuaucugcaua

SEQ ID NO: 41490 - RNA, 22 nt, Homo sapiens
gacacagugaagucucuacuug

SEQ ID NO: 41491 - RNA, 22 nt, Homo sapiens
uaucaguauggauucauggauu

SEQ ID NO: 41492 - RNA, 20 nt, Homo sapiens
uaagccacacagucuaaggu

SEQ ID NO: 41493 - RNA, 22 nt, Homo sapiens
uacagucauaaugccuagugac

SEQ ID NO: 41494 - RNA, 22 nt, Homo sapiens
auggaaacauaagaguauagau

SEQ ID NO: 41495 - RNA, 22 nt, Homo sapiens
cucagugucuggggccccaggg

SEQ ID NO: 41496 - RNA, 22 nt, Homo sapiens
aagucaaggagagaagcuucag

SEQ ID NO: 41497 - RNA, 22 nt, Homo sapiens
aaucacuuugcuacaaggcagu

SEQ ID NO: 41498 - RNA, 22 nt, Homo sapiens
auuguacuccagccugggcagc

SEQ ID NO: 41499 - RNA, 22 nt, Homo sapiens
ggcaagaacuucacucacuuuu

SEQ ID NO: 41500 - RNA, 22 nt, Homo sapiens
uggagugaaaacacacuaaucu

SEQ ID NO: 41501 - RNA, 22 nt, Homo sapiens
uagauuguaauaugcagaaugg

SEQ ID NO: 41502 - RNA, 22 nt, Homo sapiens
auugcacuccagccuggggaac

SEQ ID NO: 41503 - RNA, 22 nt, Homo sapiens
ugauuugucucucagcccuacu

SEQ ID NO: 41504 - RNA, 22 nt, Homo sapiens
cauggcuuuuauaacaagaaau

SEQ ID NO: 41505 - RNA, 22 nt, Homo sapiens
uugagauguaguuucacuccug

SEQ ID NO: 41506 - RNA, 22 nt, Homo sapiens
accugagacuaggcauuuuaua

SEQ ID NO: 41507 - RNA, 22 nt, Homo sapiens
cucaguguuucagcugcucaga

SEQ ID NO: 41508 - RNA, 22 nt, Homo sapiens
agcugguuuauuucuauauccu

SEQ ID NO: 41509 - RNA, 22 nt, Homo sapiens
uugagauggaguuucgcucuuu

SEQ ID NO: 41510 - RNA, 22 nt, Homo sapiens
uauggcuucuuauucuuucccg

SEQ ID NO: 41511 - RNA, 22 nt, Homo sapiens
gugagccaugauuuuaccacug

SEQ ID NO: 41512 - RNA, 22 nt, Homo sapiens
ucagagucuagaucacucacug

SEQ ID NO: 41513 - RNA, 22 nt, Homo sapiens
cauugcacuccagccuggccaa

SEQ ID NO: 41514 - RNA, 22 nt, Homo sapiens
cuggcucugggcuaaagaaaua

SEQ ID NO: 41515 - RNA, 22 nt, Homo sapiens
gaugagaugagcauuugaauug

SEQ ID NO: 41516 - RNA, 22 nt, Homo sapiens
acucagagauuagcacauguuu

SEQ ID NO: 41517 - RNA, 21 nt, Homo sapiens
auugcacuccagccugggcga

SEQ ID NO: 41518 - RNA, 22 nt, Homo sapiens
ugguucaguugcacaggcuguu

SEQ ID NO: 41519 - RNA, 18 nt, Homo sapiens
uuggacggagagucaaau

SEQ ID NO: 41520 - RNA, 22 nt, Homo sapiens
ugauuuguuuagugccaaguuu

SEQ ID NO: 41521 - RNA, 22 nt, Homo sapiens
uguuucuacugucucuguagua

SEQ ID NO: 41522 - RNA, 22 nt, Homo sapiens
auugcacuccagccuggccaac

SEQ ID NO: 41523 - RNA, 23 nt, Homo sapiens
gaaguaauaaauggauucuuaac

SEQ ID NO: 41524 - RNA, 22 nt, Homo sapiens
uuggaaacgucaccuuuuccuu

SEQ ID NO: 41525 - RNA, 22 nt, Homo sapiens
uggccuguaacgcugucucagc

SEQ ID NO: 41526 - RNA, 22 nt, Homo sapiens
aauggcuuucagcuuuucccca

SEQ ID NO: 41527 - RNA, 22 nt, Homo sapiens
uugagauggagucucgcucugu

SEQ ID NO: 41528 - RNA, 23 nt, Homo sapiens
caugaacuaguuugcagccauga

SEQ ID NO: 41529 - RNA, 22 nt, Homo sapiens
gaauaaacuagagaggacugag

SEQ ID NO: 41530 - RNA, 22 nt, Homo sapiens
cuacucugugguguauuugcau

SEQ ID NO: 41531 - RNA, 22 nt, Homo sapiens
cuggaaacaucuuaggaaugca

SEQ ID NO: 41532 - RNA, 22 nt, Homo sapiens
uucuuuggaaacaguacuaauu

SEQ ID NO: 41533 - RNA, 22 nt, Homo sapiens
ugagaugaagucuugcucuguu

SEQ ID NO: 41534 - RNA, 22 nt, Homo sapiens
uaccacugccgagaaaacagau

SEQ ID NO: 41535 - RNA, 22 nt, Homo sapiens
guggaauggaaugauuguguau

SEQ ID NO: 41536 - RNA, 22 nt, Homo sapiens
uuaaguaaucagagaagagaac

SEQ ID NO: 41537 - RNA, 22 nt, Homo sapiens
uaagugcaugauuacaugcaua

SEQ ID NO: 41538 - RNA, 19 nt, Homo sapiens
ucccugagucuuagcuuga

SEQ ID NO: 41539 - RNA, 22 nt, Homo sapiens
aaaguucugcguuagggcuaaa

SEQ ID NO: 41540 - RNA, 22 nt, Homo sapiens
caugccacuguggacaaagaca

SEQ ID NO: 41541 - RNA, 22 nt, Homo sapiens
uucuguguuuaggucacggcua

SEQ ID NO: 41542 - RNA, 22 nt, Homo sapiens
uuuuggcucuugguaggucaga

SEQ ID NO: 41543 - RNA, 22 nt, Homo sapiens
uuuugugcauggcccaguggua

SEQ ID NO: 41544 - RNA, 22 nt, Homo sapiens
uuuuguacgccuguguccauca

SEQ ID NO: 41545 - RNA, 19 nt, Homo sapiens
uuuuguacucugugacuug

SEQ ID NO: 41546 - RNA, 22 nt, Homo sapiens
uuuugguuguuggguaagagua

SEQ ID NO: 41547 - RNA, 22 nt, Homo sapiens
uuuuggcuuuuccucagcaagc

SEQ ID NO: 41548 - RNA, 22 nt, Homo sapiens
uuuuguacaacagcucugggga

SEQ ID NO: 41549 - RNA, 21 nt, Homo sapiens
uuuuugguggucauggauaga

SEQ ID NO: 41550 - RNA, 22 nt, Homo sapiens
uuuuuggaggagguuagaucau

SEQ ID NO: 41551 - RNA, 22 nt, Homo sapiens
uuugccuguagacacuuacccu

SEQ ID NO: 41552 - RNA, 22 nt, Homo sapiens
uuugcgacuucugaguuaaugu

SEQ ID NO: 41553 - RNA, 22 nt, Homo sapiens
uuugcuugaggucuagcuaccc

SEQ ID NO: 41554 - RNA, 19 nt, Homo sapiens
uuuuggaaaugugaacagc

SEQ ID NO: 41555 - RNA, 22 nt, Homo sapiens
uuuugcuccuggcaaacucaua

SEQ ID NO: 41556 - RNA, 22 nt, Homo sapiens
uuuugcucuugguaaugaaaga

SEQ ID NO: 41557 - RNA, 22 nt, Homo sapiens
uuugaagacuacugggagugaa

SEQ ID NO: 41558 - RNA, 22 nt, Homo sapiens
uuugaagugugaugccuugaug

SEQ ID NO: 41559 - RNA, 22 nt, Homo sapiens
uuugcagugucagcuucugugu

SEQ ID NO: 41560 - RNA, 22 nt, Homo sapiens
uuugcagagucuuucgcugggc

SEQ ID NO: 41561 - RNA, 22 nt, Homo sapiens
uuagagguaggauuucaccaug

SEQ ID NO: 41562 - RNA, 22 nt, Homo sapiens
uuagacucauuuuggucaagga

SEQ ID NO: 41563 - RNA, 22 nt, Homo sapiens
uuacauguuuauggggguacau

SEQ ID NO: 41564 - RNA, 22 nt, Homo sapiens
uuaaguguaaguggugugggac

SEQ ID NO: 41565 - RNA, 22 nt, Homo sapiens
uuaaucacagcugaacucaaac

SEQ ID NO: 41566 - RNA, 22 nt, Homo sapiens
uguguaaauauauacacacgug

SEQ ID NO: 41567 - RNA, 22 nt, Homo sapiens
uguguaauaccuuugacuauau

SEQ ID NO: 41568 - RNA, 22 nt, Homo sapiens
ugugguuuuaguaaaacuaugu

SEQ ID NO: 41569 - RNA, 22 nt, Homo sapiens
ugugucacugcacuccagcgug

SEQ ID NO: 41570 - RNA, 22 nt, Homo sapiens
ugugucacugcacuccagccug

SEQ ID NO: 41571 - RNA, 22 nt, Homo sapiens
ugugcaaggcucucaaccugug

SEQ ID NO: 41572 - RNA, 17 nt, Homo sapiens
ugugauugaagucaucc

SEQ ID NO: 41573 - RNA, 22 nt, Homo sapiens
ugugauuggccuggcguggguc

SEQ ID NO: 41574 - RNA, 22 nt, Homo sapiens
ugugguagugcuuaccugcagu

SEQ ID NO: 41575 - RNA, 22 nt, Homo sapiens
ugugcauaugucuuuauaguag

SEQ ID NO: 41576 - RNA, 22 nt, Homo sapiens
ugugcaugacagcauacaaacg

SEQ ID NO: 41577 - RNA, 22 nt, Homo sapiens
uuauucagcaccugcuguguuc

SEQ ID NO: 41578 - RNA, 22 nt, Homo sapiens
uuauuagguuaaccuauagcua

SEQ ID NO: 41579 - RNA, 22 nt, Homo sapiens
uuaugucuuugagcaaugcugu

SEQ ID NO: 41580 - RNA, 22 nt, Homo sapiens
uuauggauuuauauucuguagu

SEQ ID NO: 41581 - RNA, 22 nt, Homo sapiens
uucacuguaaaaugaagagggu

SEQ ID NO: 41582 - RNA, 22 nt, Homo sapiens
uucacugcacuccagccugagc

SEQ ID NO: 41583 - RNA, 22 nt, Homo sapiens
uucacgguguucacgggggucc

SEQ ID NO: 41584 - RNA, 22 nt, Homo sapiens
uucacugagccagacuaagaca

SEQ ID NO: 41585 - RNA, 17 nt, Homo sapiens
uuauugcuauaagcuga

SEQ ID NO: 41586 - RNA, 21 nt, Homo sapiens
uucaccauggcuccacacucu

SEQ ID NO: 41587 - RNA, 22 nt, Homo sapiens
uuagcccagugggugcuucucu

SEQ ID NO: 41588 - RNA, 18 nt, Homo sapiens
uuagagugcauuacuuug

SEQ ID NO: 41589 - RNA, 22 nt, Homo sapiens
uuagauaguacugaaugguucu

SEQ ID NO: 41590 - RNA, 22 nt, Homo sapiens
uuagcaauagccugcaucugca

SEQ ID NO: 41591 - RNA, 22 nt, Homo sapiens
uuagcagcacaaaagcagacua

SEQ ID NO: 41592 - RNA, 22 nt, Homo sapiens
uuaucacauugacugauuugca

SEQ ID NO: 41593 - RNA, 22 nt, Homo sapiens
uuaucucagugaacugagugga

SEQ ID NO: 41594 - RNA, 22 nt, Homo sapiens
uuauagacacguuguaacaaac

SEQ ID NO: 41595 - RNA, 22 nt, Homo sapiens
uuauauguuagacauggugggu

SEQ ID NO: 41596 - RNA, 22 nt, Homo sapiens
uggcuagaugagauguacugca

SEQ ID NO: 41597 - RNA, 20 nt, Homo sapiens
uggcucuuugcugcuaaagu

SEQ ID NO: 41598 - RNA, 22 nt, Homo sapiens
uggcuagaccugcauaacagcu

SEQ ID NO: 41599 - RNA, 22 nt, Homo sapiens
uggcuguuuauuucacaugggu

SEQ ID NO: 41600 - RNA, 22 nt, Homo sapiens
ugguggcuuuucguagguucac

SEQ ID NO: 41601 - RNA, 20 nt, Homo sapiens
ugguguuugaacagugaaug

SEQ ID NO: 41602 - RNA, 22 nt, Homo sapiens
ugguuagucuguguguauauau

SEQ ID NO: 41603 - RNA, 23 nt, Homo sapiens
ugguuuguaagagauggacugga

SEQ ID NO: 41604 - RNA, 22 nt, Homo sapiens
ugguuaucauagcuaugcuacu

SEQ ID NO: 41605 - RNA, 22 nt, Homo sapiens
uguaacaggaggaaaaugugaa

SEQ ID NO: 41606 - RNA, 22 nt, Homo sapiens
uguaacaguaguuacuauucuu

SEQ ID NO: 41607 - RNA, 22 nt, Homo sapiens
uguaaaccauauauguauguag

SEQ ID NO: 41608 - RNA, 22 nt, Homo sapiens
uguauagaucugauucaucucc

SEQ ID NO: 41609 - RNA, 22 nt, Homo sapiens
uguauacugucuaauauguugu

SEQ ID NO: 41610 - RNA, 21 nt, Homo sapiens
uguauacauauguuaggugca

SEQ ID NO: 41611 - RNA, 21 nt, Homo sapiens
uguauacauggaagaaugguc

SEQ ID NO: 41612 - RNA, 21 nt, Homo sapiens
uguauauguuuauacacacac

SEQ ID NO: 41613 - RNA, 22 nt, Homo sapiens
uguauaguugagucaaguuuca

SEQ ID NO: 41614 - RNA, 22 nt, Homo sapiens
uguaugagagugaaagcauuuc

SEQ ID NO: 41615 - RNA, 20 nt, Homo sapiens
uguagguguacaguaaggag

SEQ ID NO: 41616 - RNA, 22 nt, Homo sapiens
uguagucauuuggaguccagcu

SEQ ID NO: 41617 - RNA, 22 nt, Homo sapiens
uguauaacucacauugaaguuu

SEQ ID NO: 41618 - RNA, 22 nt, Homo sapiens
uguagcagccauaaacacagug

SEQ ID NO: 41619 - RNA, 21 nt, Homo sapiens
ugucaagaugacugcugcggc

SEQ ID NO: 41620 - RNA, 22 nt, Homo sapiens
ugucaacauuuaucaaguuauu

SEQ ID NO: 41621 - RNA, 22 nt, Homo sapiens
uguauguagugaccagggccag

SEQ ID NO: 41622 - RNA, 22 nt, Homo sapiens
uguauguugggucaaaguacau

SEQ ID NO: 41623 - RNA, 22 nt, Homo sapiens
ugucaaagagacaucugcacuc

SEQ ID NO: 41624 - RNA, 22 nt, Homo sapiens
ugucccaguuggguauugaauu

SEQ ID NO: 41625 - RNA, 22 nt, Homo sapiens
ugucccguuuucgaggcugcag

SEQ ID NO: 41626 - RNA, 22 nt, Homo sapiens
ugucaguguacuguaagaauua

SEQ ID NO: 41627 - RNA, 22 nt, Homo sapiens
ugucacugugcagucaugcauu

SEQ ID NO: 41628 - RNA, 22 nt, Homo sapiens
ugucacguugcuuuucuguugu

SEQ ID NO: 41629 - RNA, 22 nt, Homo sapiens
ugucacugugaguuugacugcu

SEQ ID NO: 41630 - RNA, 22 nt, Homo sapiens
ugucaaugggaauuuguuuuag

SEQ ID NO: 41631 - RNA, 22 nt, Homo sapiens
ugugaugugaugagaaguuccu

SEQ ID NO: 41632 - RNA, 20 nt, Homo sapiens
ugugauuauuuaguugcaug

SEQ ID NO: 41633 - RNA, 22 nt, Homo sapiens
ugugauggaguuucauggacug

SEQ ID NO: 41634 - RNA, 18 nt, Homo sapiens
ugugauggauauguuaau

SEQ ID NO: 41635 - RNA, 22 nt, Homo sapiens
ugugaugguuuggaagcuucuu

SEQ ID NO: 41636 - RNA, 22 nt, Homo sapiens
ugugaugaagaguccaagaaca

SEQ ID NO: 41637 - RNA, 22 nt, Homo sapiens
ugugaucaauuagugaugucug

SEQ ID NO: 41638 - RNA, 22 nt, Homo sapiens
ugugaucaugcuccaggcgaga

SEQ ID NO: 41639 - RNA, 19 nt, Homo sapiens
ugugauaguugaaccugcc

SEQ ID NO: 41640 - RNA, 22 nt, Homo sapiens
ugugaguguguacuaguuauca

SEQ ID NO: 41641 - RNA, 22 nt, Homo sapiens
ugugagcuauggaguuguagag

SEQ ID NO: 41642 - RNA, 22 nt, Homo sapiens
ugugacucuggcacauggugag

SEQ ID NO: 41643 - RNA, 19 nt, Homo sapiens
ugugacugguugucucgcu

SEQ ID NO: 41644 - RNA, 22 nt, Homo sapiens
ugucucaguuucuguggguuag

SEQ ID NO: 41645 - RNA, 22 nt, Homo sapiens
ugucucaguuacggcaauucca

SEQ ID NO: 41646 - RNA, 21 nt, Homo sapiens
ugucgugcaggaucuguggga

SEQ ID NO: 41647 - RNA, 22 nt, Homo sapiens
uguccguuuuguuucaggcuca

SEQ ID NO: 41648 - RNA, 22 nt, Homo sapiens
ugucuugagagaggacaugacu

SEQ ID NO: 41649 - RNA, 22 nt, Homo sapiens
uugcacauugauuuuguauccu

SEQ ID NO: 41650 - RNA, 22 nt, Homo sapiens
uugcacaauccugugagugagu

SEQ ID NO: 41651 - RNA, 22 nt, Homo sapiens
uugcaacauguauucuggugau

SEQ ID NO: 41652 - RNA, 22 nt, Homo sapiens
uugaggaggcagucucuccauu

SEQ ID NO: 41653 - RNA, 22 nt, Homo sapiens
uugagguaguacuuauuauugg

SEQ ID NO: 41654 - RNA, 22 nt, Homo sapiens
uugagcaaugaacgauucaggg

SEQ ID NO: 41655 - RNA, 19 nt, Homo sapiens
uugagcacugccggaguua

SEQ ID NO: 41656 - RNA, 22 nt, Homo sapiens
uugagcaaugucacugaggcuu

SEQ ID NO: 41657 - RNA, 22 nt, Homo sapiens
uugagcccuggagguggaggcu

SEQ ID NO: 41658 - RNA, 22 nt, Homo sapiens
uugagcucaucuucagggguga

SEQ ID NO: 41659 - RNA, 22 nt, Homo sapiens
uugagauggagucuugcgcugu

SEQ ID NO: 41660 - RNA, 22 nt, Homo sapiens
uugagaguggcagagguggaac

SEQ ID NO: 41661 - RNA, 21 nt, Homo sapiens
uugagacggagucucacucug

SEQ ID NO: 41662 - RNA, 22 nt, Homo sapiens
uugacuucagagcugauucaag

SEQ ID NO: 41663 - RNA, 22 nt, Homo sapiens
uugacugggccagacagagauc

SEQ ID NO: 41664 - RNA, 22 nt, Homo sapiens
uugacguaggaggauguugaga

SEQ ID NO: 41665 - RNA, 22 nt, Homo sapiens
uugacauugcuguaguguccag

SEQ ID NO: 41666 - RNA, 22 nt, Homo sapiens
uugaaugucuauuaaguuguuu

SEQ ID NO: 41667 - RNA, 22 nt, Homo sapiens
uucuuuggauaaaguuuuaugc

SEQ ID NO: 41668 - RNA, 22 nt, Homo sapiens
uucuuugcuuggaagcggggga

SEQ ID NO: 41669 - RNA, 22 nt, Homo sapiens
uucauccccuccaaaucucaug

SEQ ID NO: 41670 - RNA, 22 nt, Homo sapiens
uugggccacuuuaguuuccuua

SEQ ID NO: 41671 - RNA, 21 nt, Homo sapiens
uuggggaauggagagguuuuc

SEQ ID NO: 41672 - RNA, 22 nt, Homo sapiens
uugguaggcuggccucucucag

SEQ ID NO: 41673 - RNA, 22 nt, Homo sapiens
uuggaagacaaugcugauucuc

SEQ ID NO: 41674 - RNA, 22 nt, Homo sapiens
uuggaaacaccuggugagguua

SEQ ID NO: 41675 - RNA, 22 nt, Homo sapiens
uuggaaacgucaccuuuuccuu

SEQ ID NO: 41676 - RNA, 22 nt, Homo sapiens
uuggaauacuuguuaaagucca

SEQ ID NO: 41677 - RNA, 19 nt, Homo sapiens
uugcaguauccuauauguu

SEQ ID NO: 41678 - RNA, 22 nt, Homo sapiens
uugcaggugguuuaugcaagac

SEQ ID NO: 41679 - RNA, 22 nt, Homo sapiens
uugcggcaguacagcccaggua

SEQ ID NO: 41680 - RNA, 22 nt, Homo sapiens
uugcuagucucuguuucaggau

SEQ ID NO: 41681 - RNA, 23 nt, Homo sapiens
uugcauagacauccucauagauu

SEQ ID NO: 41682 - RNA, 22 nt, Homo sapiens
uugcugagucuuucuagguugc

SEQ ID NO: 41683 - RNA, 22 nt, Homo sapiens
uugcuacauugauugccucuuu

SEQ ID NO: 41684 - RNA, 22 nt, Homo sapiens
uugcuucauucaacauugaggg

SEQ ID NO: 41685 - RNA, 22 nt, Homo sapiens
uuggaaaccucugcagguguuu

SEQ ID NO: 41686 - RNA, 22 nt, Homo sapiens
uugguccucccaugcucaagag

SEQ ID NO: 41687 - RNA, 22 nt, Homo sapiens
uugguccauuacauugaugaca

SEQ ID NO: 41688 - RNA, 22 nt, Homo sapiens
uugguauguaauuuauauugua

SEQ ID NO: 41689 - RNA, 22 nt, Homo sapiens
uuguaauggagcaaacagguug

SEQ ID NO: 41690 - RNA, 22 nt, Homo sapiens
uuuaucuguuuaaaacuguuca

SEQ ID NO: 41691 - RNA, 22 nt, Homo sapiens
uuuauguggagcacuugacaca

SEQ ID NO: 41692 - RNA, 22 nt, Homo sapiens
uuuaugcuacauguguuggaaa

SEQ ID NO: 41693 - RNA, 22 nt, Homo sapiens
uuuagguagucaaagguuaguc

SEQ ID NO: 41694 - RNA, 22 nt, Homo sapiens
uuuagugcaucagacacccucu

SEQ ID NO: 41695 - RNA, 22 nt, Homo sapiens
uuucugcuugagagaauugcug

SEQ ID NO: 41696 - RNA, 20 nt, Homo sapiens
uuucuccccuauaaaucuca

SEQ ID NO: 41697 - RNA, 21 nt, Homo sapiens
uuucugggggagcauggcagg

SEQ ID NO: 41698 - RNA, 22 nt, Homo sapiens
uuucugguuaauuucuaagagc

SEQ ID NO: 41699 - RNA, 23 nt, Homo sapiens
uuucuugggcaugcuaugucagu

SEQ ID NO: 41700 - RNA, 22 nt, Homo sapiens
uuucaccguguuggccaggcug

SEQ ID NO: 41701 - RNA, 22 nt, Homo sapiens
uugugucaaauggcaauuagca

SEQ ID NO: 41702 - RNA, 21 nt, Homo sapiens
uuuacuguggacccauugcuu

SEQ ID NO: 41703 - RNA, 22 nt, Homo sapiens
uuuacugucuucagucccucug

SEQ ID NO: 41704 - RNA, 22 nt, Homo sapiens
uugugguagugaaugagucuca

SEQ ID NO: 41705 - RNA, 22 nt, Homo sapiens
uugugguugacuaaauuuguaa

SEQ ID NO: 41706 - RNA, 22 nt, Homo sapiens
uugugaaaucuaggcagagguu

SEQ ID NO: 41707 - RNA, 22 nt, Homo sapiens
uugugcuugcuguguucuaugc

SEQ ID NO: 41708 - RNA, 22 nt, Homo sapiens
uugugaaaaaccucucguggaa

SEQ ID NO: 41709 - RNA, 22 nt, Homo sapiens
aagguucuugcuugcaugacug

SEQ ID NO: 41710 - RNA, 22 nt, Homo sapiens
aagguuguauuuaauauacugu

SEQ ID NO: 41711 - RNA, 22 nt, Homo sapiens
aagugcuguaugggagccuagg

SEQ ID NO: 41712 - RNA, 22 nt, Homo sapiens
aagugacuagacuaugaaaccu

SEQ ID NO: 41713 - RNA, 22 nt, Homo sapiens
aagugauguuauugggugacuc

SEQ ID NO: 41714 - RNA, 22 nt, Homo sapiens
aagugcacuguaagugcaggau

SEQ ID NO: 41715 - RNA, 22 nt, Homo sapiens
aaguaucaggaauaguuauugg

SEQ ID NO: 41716 - RNA, 22 nt, Homo sapiens
aaguccaugaagucuugugggu

SEQ ID NO: 41717 - RNA, 22 nt, Homo sapiens
aagugacauugugcccauuuga

SEQ ID NO: 41718 - RNA, 22 nt, Homo sapiens
aauaaguugagaugaggucaua

SEQ ID NO: 41719 - RNA, 22 nt, Homo sapiens
aauagcacugcuaugguuugaa

SEQ ID NO: 41720 - RNA, 22 nt, Homo sapiens
aauaaaguaggaggugaggaaa

SEQ ID NO: 41721 - RNA, 22 nt, Homo sapiens
aaguguaugaaacaguccaugg

SEQ ID NO: 41722 - RNA, 22 nt, Homo sapiens
aagugguuuuaaucuggugagu

SEQ ID NO: 41723 - RNA, 22 nt, Homo sapiens
acagucacaauuuguaccuuuu

SEQ ID NO: 41724 - RNA, 18 nt, Homo sapiens
acagugcugucacugcuu

SEQ ID NO: 41725 - RNA, 22 nt, Homo sapiens
acaguauaaugcuguagggaga

SEQ ID NO: 41726 - RNA, 19 nt, Homo sapiens
acaguauugugcacagguu

SEQ ID NO: 41727 - RNA, 22 nt, Homo sapiens
acaguagcgcaaucucggcuca

SEQ ID NO: 41728 - RNA, 22 nt, Homo sapiens
acacguguugaaauuuaauugc

SEQ ID NO: 41729 - RNA, 22 nt, Homo sapiens
acacgggugccggcaucagcac

SEQ ID NO: 41730 - RNA, 22 nt, Homo sapiens
acaccaucuccuuauuucucuu

SEQ ID NO: 41731 - RNA, 22 nt, Homo sapiens
acacaugcuccacuguggccuc

SEQ ID NO: 41732 - RNA, 22 nt, Homo sapiens
acacaguaaauauugucuccuc

SEQ ID NO: 41733 - RNA, 22 nt, Homo sapiens
acacacgugcauguaugcguau

SEQ ID NO: 41734 - RNA, 23 nt, Homo sapiens
acacaguaaacuaaaagcuagcu

SEQ ID NO: 41735 - RNA, 22 nt, Homo sapiens
aaugugcuguucagaggagucc

SEQ ID NO: 41736 - RNA, 21 nt, Homo sapiens
aaugguguugccaacaaggug

SEQ ID NO: 41737 - RNA, 22 nt, Homo sapiens
aaugugcuuugaaaagagcuga

SEQ ID NO: 41738 - RNA, 22 nt, Homo sapiens
aaugugcuucuggcugugguca

SEQ ID NO: 41739 - RNA, 22 nt, Homo sapiens
aauccaugugcuuuaccauuuu

SEQ ID NO: 41740 - RNA, 22 nt, Homo sapiens
aaucauauugucugccaagagg

SEQ ID NO: 41741 - RNA, 22 nt, Homo sapiens
aaucagcacacugugcuuucca

SEQ ID NO: 41742 - RNA, 22 nt, Homo sapiens
aaucaccaugcacuacagccuu

SEQ ID NO: 41743 - RNA, 22 nt, Homo sapiens
aauacugugauaucgagcgauu

SEQ ID NO: 41744 - RNA, 22 nt, Homo sapiens
aauagcauugaaucuaccaauu

SEQ ID NO: 41745 - RNA, 23 nt, Homo sapiens
aauaucacaguggguguacaccc

SEQ ID NO: 41746 - RNA, 23 nt, Homo sapiens
agaaaugucuauucagggucccu

SEQ ID NO: 41747 - RNA, 22 nt, Homo sapiens
agaaacacagguggaauugcuu

SEQ ID NO: 41748 - RNA, 22 nt, Homo sapiens
acuagguaguaaucugcagaga

SEQ ID NO: 41749 - RNA, 17 nt, Homo sapiens
acccagucuuuuugcac

SEQ ID NO: 41750 - RNA, 22 nt, Homo sapiens
acucacagcaaccuccgccucc

SEQ ID NO: 41751 - RNA, 22 nt, Homo sapiens
accccguagagucugcagcuac

SEQ ID NO: 41752 - RNA, 22 nt, Homo sapiens
accaccacucccgcauucuaaa

SEQ ID NO: 41753 - RNA, 22 nt, Homo sapiens
accacaggguaaaguuagauau

SEQ ID NO: 41754 - RNA, 22 nt, Homo sapiens
acauugcauauggcacccucuu

SEQ ID NO: 41755 - RNA, 22 nt, Homo sapiens
acaguguagugacugccaacuu

SEQ ID NO: 41756 - RNA, 22 nt, Homo sapiens
acccagaagucauucaggaaca

SEQ ID NO: 41757 - RNA, 22 nt, Homo sapiens
accaccauugcacugaacuuuc

SEQ ID NO: 41758 - RNA, 18 nt, Homo sapiens
agaugguguugcuucugu

SEQ ID NO: 41759 - RNA, 22 nt, Homo sapiens
agaugguguuggcugaguguau

SEQ ID NO: 41760 - RNA, 22 nt, Homo sapiens
agaugcuguuaucaacuguagc

SEQ ID NO: 41761 - RNA, 22 nt, Homo sapiens
agaugguauuauagguuucugu

SEQ ID NO: 41762 - RNA, 22 nt, Homo sapiens
agauggguuuucacauguuggc

SEQ ID NO: 41763 - RNA, 22 nt, Homo sapiens
agcaagaugaaguugagcuagg

SEQ ID NO: 41764 - RNA, 22 nt, Homo sapiens
agcaagaaugaacucucccaga

SEQ ID NO: 41765 - RNA, 22 nt, Homo sapiens
agcaauaugacauugcuacauc

SEQ ID NO: 41766 - RNA, 22 nt, Homo sapiens
agcaacauuguucauaauagcu

SEQ ID NO: 41767 - RNA, 22 nt, Homo sapiens
agcaacauagugagacccccau

SEQ ID NO: 41768 - RNA, 22 nt, Homo sapiens
agcaacaucagcagcaggaaaa

SEQ ID NO: 41769 - RNA, 22 nt, Homo sapiens
agauucauccaaguuguugcau

SEQ ID NO: 41770 - RNA, 22 nt, Homo sapiens
agcaguagaauuccugcaucac

SEQ ID NO: 41771 - RNA, 22 nt, Homo sapiens
agcaucacacacuacagggaaa

SEQ ID NO: 41772 - RNA, 21 nt, Homo sapiens
agcagcuuugguugaagcaga

SEQ ID NO: 41773 - RNA, 22 nt, Homo sapiens
agcaggacaauaugggaucagg

SEQ ID NO: 41774 - RNA, 22 nt, Homo sapiens
agcaccacaauuuccugccuaa

SEQ ID NO: 41775 - RNA, 20 nt, Homo sapiens
agaugcaugcacauaaacac

SEQ ID NO: 41776 - RNA, 22 nt, Homo sapiens
agacagcugggaaauggagugu

SEQ ID NO: 41777 - RNA, 22 nt, Homo sapiens
agacaguguguguauauauggu

SEQ ID NO: 41778 - RNA, 22 nt, Homo sapiens
agacccuguauguguuuaguuu

SEQ ID NO: 41779 - RNA, 23 nt, Homo sapiens
agacugaaguaucugagacucag

SEQ ID NO: 41780 - RNA, 22 nt, Homo sapiens
agaacuguccauucagcaugaa

SEQ ID NO: 41781 - RNA, 22 nt, Homo sapiens
agaaugucagcuggauucagcu

SEQ ID NO: 41782 - RNA, 22 nt, Homo sapiens
agaauguauauucuguaguugu

SEQ ID NO: 41783 - RNA, 22 nt, Homo sapiens
auaucacaggaaaggaagauac

SEQ ID NO: 41784 - RNA, 22 nt, Homo sapiens
auaggacuauugugaggauuaa

SEQ ID NO: 41785 - RNA, 22 nt, Homo sapiens
auaucccagugaugauugauag

SEQ ID NO: 41786 - RNA, 20 nt, Homo sapiens
auaugcauguguuuucacuu

SEQ ID NO: 41787 - RNA, 22 nt, Homo sapiens
auaugccacugaacuguaccca

SEQ ID NO: 41788 - RNA, 22 nt, Homo sapiens
auagcagcuugucagggcagac

SEQ ID NO: 41789 - RNA, 22 nt, Homo sapiens
auagcagcagcuaguagugaua

SEQ ID NO: 41790 - RNA, 22 nt, Homo sapiens
auacuguuuuacaucauugccu

SEQ ID NO: 41791 - RNA, 22 nt, Homo sapiens
auacugucucuugcuccugccc

SEQ ID NO: 41792 - RNA, 22 nt, Homo sapiens
auagaagcuauguauaggggcc

SEQ ID NO: 41793 - RNA, 20 nt, Homo sapiens
auagaagacuagugcagcag

SEQ ID NO: 41794 - RNA, 22 nt, Homo sapiens
auagcagugugaaaauugacug

SEQ ID NO: 41795 - RNA, 22 nt, Homo sapiens
auaaaguguuuaguauaggcaa

SEQ ID NO: 41796 - RNA, 20 nt, Homo sapiens
auaaauguauagguguacau

SEQ ID NO: 41797 - RNA, 22 nt, Homo sapiens
auaaccuauggaucuacucggg

SEQ ID NO: 41798 - RNA, 22 nt, Homo sapiens
aguggugucugaguggccaggg

SEQ ID NO: 41799 - RNA, 22 nt, Homo sapiens
agugguuuuaaguagagcauac

SEQ ID NO: 41800 - RNA, 22 nt, Homo sapiens
auaaaguagaggugaggugcau

SEQ ID NO: 41801 - RNA, 22 nt, Homo sapiens
auaaagguaauaauaguugcau

SEQ ID NO: 41802 - RNA, 22 nt, Homo sapiens
auaaagacacuuggcaugauuu

SEQ ID NO: 41803 - RNA, 22 nt, Homo sapiens
auacaugugccauguucgugug

SEQ ID NO: 41804 - RNA, 22 nt, Homo sapiens
auacaugugccauggugguuug

SEQ ID NO: 41805 - RNA, 22 nt, Homo sapiens
auacuaugagauaauaaagacu

SEQ ID NO: 41806 - RNA, 19 nt, Homo sapiens
auaccucugugaaccccug

SEQ ID NO: 41807 - RNA, 19 nt, Homo sapiens
agugggcuagaaaucaggg

SEQ ID NO: 41808 - RNA, 22 nt, Homo sapiens
auacaguguauguauaguacau

SEQ ID NO: 41809 - RNA, 22 nt, Homo sapiens
auacaguguucugggaagaagu

SEQ ID NO: 41810 - RNA, 22 nt, Homo sapiens
auacaugugcaggucagguuac

SEQ ID NO: 41811 - RNA, 22 nt, Homo sapiens
aguaccauuugacaugggaccc

SEQ ID NO: 41812 - RNA, 22 nt, Homo sapiens
agucaagauggcaagguaaggc

SEQ ID NO: 41813 - RNA, 22 nt, Homo sapiens
agcaugauugggguugggcaca

SEQ ID NO: 41814 - RNA, 22 nt, Homo sapiens
agcugguucuuugccuuguaga

SEQ ID NO: 41815 - RNA, 20 nt, Homo sapiens
agcaucacagagccgggugu

SEQ ID NO: 41816 - RNA, 22 nt, Homo sapiens
agcaucacaugggcugcuuggg

SEQ ID NO: 41817 - RNA, 20 nt, Homo sapiens
agcuguuguuaugagguuua

SEQ ID NO: 41818 - RNA, 22 nt, Homo sapiens
agcuguuguuaauuaacucauu

SEQ ID NO: 41819 - RNA, 22 nt, Homo sapiens
agcuguaguuugguggauguaa

SEQ ID NO: 41820 - RNA, 22 nt, Homo sapiens
agcugugucuucuuaaagauuu

SEQ ID NO: 41821 - RNA, 22 nt, Homo sapiens
aguggcacuauucucagaguca

SEQ ID NO: 41822 - RNA, 22 nt, Homo sapiens
aguggcuuuuuaguggcagaug

SEQ ID NO: 41823 - RNA, 22 nt, Homo sapiens
agugggccccuagaggugaggu

SEQ ID NO: 41824 - RNA, 22 nt, Homo sapiens
agugguaguacaggagauaccg

SEQ ID NO: 41825 - RNA, 22 nt, Homo sapiens
agugcuuaauagauguccagca

SEQ ID NO: 41826 - RNA, 22 nt, Homo sapiens
agugcaguggcacaaucuuggc

SEQ ID NO: 41827 - RNA, 22 nt, Homo sapiens
agugcauuugcaucucaauaua

SEQ ID NO: 41828 - RNA, 22 nt, Homo sapiens
agugauauguuugccuugaggg

SEQ ID NO: 41829 - RNA, 22 nt, Homo sapiens
agugauguggaguuuggaugga

SEQ ID NO: 41830 - RNA, 22 nt, Homo sapiens
agugcaaggacauuuagguugu

SEQ ID NO: 41831 - RNA, 22 nt, Homo sapiens
agucugguguucucacacuagu

SEQ ID NO: 41832 - RNA, 22 nt, Homo sapiens
aguccagguuuuguaauggcaa

SEQ ID NO: 41833 - RNA, 22 nt, Homo sapiens
auggcagugucuagggguguuu

SEQ ID NO: 41834 - RNA, 22 nt, Homo sapiens
auggcaguuucagcuauaguuu

SEQ ID NO: 41835 - RNA, 22 nt, Homo sapiens
auggaagaaaguuggguucuug

SEQ ID NO: 41836 - RNA, 22 nt, Homo sapiens
augcuguuuugaauucucuaga

SEQ ID NO: 41837 - RNA, 22 nt, Homo sapiens
augcccauuuguuuucugaaag

SEQ ID NO: 41838 - RNA, 19 nt, Homo sapiens
augccucaguuuuguacuu

SEQ ID NO: 41839 - RNA, 22 nt, Homo sapiens
augcaacugcacuccagccugg

SEQ ID NO: 41840 - RNA, 22 nt, Homo sapiens
augacuaaaggguuuauguuga

SEQ ID NO: 41841 - RNA, 22 nt, Homo sapiens
augacuggauaauggacacaca

SEQ ID NO: 41842 - RNA, 22 nt, Homo sapiens
augacuagaggagggauggcca

SEQ ID NO: 41843 - RNA, 22 nt, Homo sapiens
augacucagaucuguuccuggu

SEQ ID NO: 41844 - RNA, 22 nt, Homo sapiens
augauguguucuguguucccau

SEQ ID NO: 41845 - RNA, 22 nt, Homo sapiens
augauguguguuuaagaugucu

SEQ ID NO: 41846 - RNA, 22 nt, Homo sapiens
augaaagguauguuuucuguga

SEQ ID NO: 41847 - RNA, 21 nt, Homo sapiens
augacccuggguguccuuucc

SEQ ID NO: 41848 - RNA, 19 nt, Homo sapiens
augaccauuuccauaguau

SEQ ID NO: 41849 - RNA, 22 nt, Homo sapiens
augaccagagagugcgcagggu

SEQ ID NO: 41850 - RNA, 22 nt, Homo sapiens
augacagagauaugugaauuuu

SEQ ID NO: 41851 - RNA, 22 nt, Homo sapiens
aucuccaggugccagcugcgcc

SEQ ID NO: 41852 - RNA, 22 nt, Homo sapiens
aucgcauaaucucuaaaaagca

SEQ ID NO: 41853 - RNA, 21 nt, Homo sapiens
aucgcacaauauaccccugua

SEQ ID NO: 41854 - RNA, 22 nt, Homo sapiens
aucccagaaacucggguuucuc

SEQ ID NO: 41855 - RNA, 22 nt, Homo sapiens
aucuuuggauacuugauauagu

SEQ ID NO: 41856 - RNA, 22 nt, Homo sapiens
aucugguguggcugugauccuc

SEQ ID NO: 41857 - RNA, 22 nt, Homo sapiens
aucuuggauuaccugggugggu

SEQ ID NO: 41858 - RNA, 22 nt, Homo sapiens
aucuguguuuaaggucccagaa

SEQ ID NO: 41859 - RNA, 22 nt, Homo sapiens
aucugguguccucgugggaguc

SEQ ID NO: 41860 - RNA, 22 nt, Homo sapiens
aucugguguauuggugcugggu

SEQ ID NO: 41861 - RNA, 22 nt, Homo sapiens
aucugcauuagggugaagaccu

SEQ ID NO: 41862 - RNA, 22 nt, Homo sapiens
aucugcaaauaaugaagauugg

SEQ ID NO: 41863 - RNA, 22 nt, Homo sapiens
aucucuugccagucagaauggu

SEQ ID NO: 41864 - RNA, 22 nt, Homo sapiens
aucaccuggaggugaucacuug

SEQ ID NO: 41865 - RNA, 19 nt, Homo sapiens
auaugggguuugaacugug

SEQ ID NO: 41866 - RNA, 22 nt, Homo sapiens
auaugguuuuuggaagcauauc

SEQ ID NO: 41867 - RNA, 22 nt, Homo sapiens
auaugguguuugcuauucagcu

SEQ ID NO: 41868 - RNA, 22 nt, Homo sapiens
aucaccuggaguagcccguccc

SEQ ID NO: 41869 - RNA, 22 nt, Homo sapiens
aucaccugagcaguauacacug

SEQ ID NO: 41870 - RNA, 21 nt, Homo sapiens
aucaccgugcaguucuccagg

SEQ ID NO: 41871 - RNA, 22 nt, Homo sapiens
auauguauuuuaacguguaagg

SEQ ID NO: 41872 - RNA, 22 nt, Homo sapiens
aucccgagacuuugcugaaguu

SEQ ID NO: 41873 - RNA, 22 nt, Homo sapiens
auccaguguuuucuuuugucac

SEQ ID NO: 41874 - RNA, 22 nt, Homo sapiens
auccauguggauaaauguguau

SEQ ID NO: 41875 - RNA, 22 nt, Homo sapiens
aucagagugaauaaugacaaaa

SEQ ID NO: 41876 - RNA, 19 nt, Homo sapiens
aucagcacaagugugcuuu

SEQ ID NO: 41877 - RNA, 22 nt, Homo sapiens
aucauugugugaguugauggga

SEQ ID NO: 41878 - RNA, 22 nt, Homo sapiens
cuggauauguugcaacauuucc

SEQ ID NO: 41879 - RNA, 20 nt, Homo sapiens
cuggaucaucaguaaaguua

SEQ ID NO: 41880 - RNA, 22 nt, Homo sapiens
cuggaguaugauguuagcguug

SEQ ID NO: 41881 - RNA, 23 nt, Homo sapiens
cuguacacauauacaucuaagua

SEQ ID NO: 41882 - RNA, 22 nt, Homo sapiens
cugucucagccucuccaguagc

SEQ ID NO: 41883 - RNA, 22 nt, Homo sapiens
cugucacugggaggggcagcag

SEQ ID NO: 41884 - RNA, 22 nt, Homo sapiens
cugucacaguuuuggaggccag

SEQ ID NO: 41885 - RNA, 22 nt, Homo sapiens
cugucuaugagccaggaagcca

SEQ ID NO: 41886 - RNA, 22 nt, Homo sapiens
cuguaugugagaaauaauaagu

SEQ ID NO: 41887 - RNA, 22 nt, Homo sapiens
cuguaguuagcagaugaugaau

SEQ ID NO: 41888 - RNA, 22 nt, Homo sapiens
cuguauguuucuaugaauguga

SEQ ID NO: 41889 - RNA, 22 nt, Homo sapiens
cuuggcuucuuuauguggcuau

SEQ ID NO: 41890 - RNA, 20 nt, Homo sapiens
cuuggcuuucuugguguuaa

SEQ ID NO: 41891 - RNA, 22 nt, Homo sapiens
cuuggcuugguaucaaauaacc

SEQ ID NO: 41892 - RNA, 22 nt, Homo sapiens
cuugugauugcacggcugccug

SEQ ID NO: 41893 - RNA, 22 nt, Homo sapiens
cuuugcaaauggccuuuccaag

SEQ ID NO: 41894 - RNA, 22 nt, Homo sapiens
cuuucucagugagacccgagau

SEQ ID NO: 41895 - RNA, 22 nt, Homo sapiens
cuuugcuaauccaacccucauc

SEQ ID NO: 41896 - RNA, 22 nt, Homo sapiens
cuuugcacaucucugcuuuccc

SEQ ID NO: 41897 - RNA, 22 nt, Homo sapiens
cuaaugcagucaggagaaggaa

SEQ ID NO: 41898 - RNA, 22 nt, Homo sapiens
cuacagguaugaaagggaguau

SEQ ID NO: 41899 - RNA, 23 nt, Homo sapiens
cuacuagucaagucuuuuccagu

SEQ ID NO: 41900 - RNA, 22 nt, Homo sapiens
cuagaguagaguuuccuuagga

SEQ ID NO: 41901 - RNA, 22 nt, Homo sapiens
cuagacacugacguuccuccga

SEQ ID NO: 41902 - RNA, 22 nt, Homo sapiens
cuagaguacuuaccacagcaug

SEQ ID NO: 41903 - RNA, 22 nt, Homo sapiens
cuauuagguuggugcaaaagua

SEQ ID NO: 41904 - RNA, 22 nt, Homo sapiens
cuauuagguuggugcaaaaguc

SEQ ID NO: 41905 - RNA, 22 nt, Homo sapiens
cucagauacuugggagguugag

SEQ ID NO: 41906 - RNA, 22 nt, Homo sapiens
cugagaucaagucuugcucugu

SEQ ID NO: 41907 - RNA, 17 nt, Homo sapiens
cucacugagaacagcua

SEQ ID NO: 41908 - RNA, 18 nt, Homo sapiens
cucacacccuaaucagga

SEQ ID NO: 41909 - RNA, 22 nt, Homo sapiens
cucaaagugcugggauuggcca

SEQ ID NO: 41910 - RNA, 22 nt, Homo sapiens
cucaaaguguggucuguggguu

SEQ ID NO: 41911 - RNA, 22 nt, Homo sapiens
cugagaucguggggcugcuguc

SEQ ID NO: 41912 - RNA, 22 nt, Homo sapiens
cugagguuaggaguuugagacc

SEQ ID NO: 41913 - RNA, 22 nt, Homo sapiens
cuggaagaaaaucacgccaucu

SEQ ID NO: 41914 - RNA, 21 nt, Homo sapiens
cugcauccauuucugagugau

SEQ ID NO: 41915 - RNA, 19 nt, Homo sapiens
cugcaugagacaguugguu

SEQ ID NO: 41916 - RNA, 18 nt, Homo sapiens
cugccagugugcucuccg

SEQ ID NO: 41917 - RNA, 22 nt, Homo sapiens
cugcagaucuuggggcuugcca

SEQ ID NO: 41918 - RNA, 22 nt, Homo sapiens
gaguagaacugguuaucuaaua

SEQ ID NO: 41919 - RNA, 22 nt, Homo sapiens
gagugcugagcccacuuccuug

SEQ ID NO: 41920 - RNA, 22 nt, Homo sapiens
gauauguugaguagaguuuuug

SEQ ID NO: 41921 - RNA, 21 nt, Homo sapiens
gagugcaaauaaagagagggc

SEQ ID NO: 41922 - RNA, 22 nt, Homo sapiens
gaguaaaugucaaguacuuagg

SEQ ID NO: 41923 - RNA, 22 nt, Homo sapiens
gaguaacagcauaaauuuguga

SEQ ID NO: 41924 - RNA, 22 nt, Homo sapiens
gagguugggaugagggauacag

SEQ ID NO: 41925 - RNA, 22 nt, Homo sapiens
gagauguuuguuucacugucac

SEQ ID NO: 41926 - RNA, 22 nt, Homo sapiens
gagauguagucuugcccuguca

SEQ ID NO: 41927 - RNA, 22 nt, Homo sapiens
gagauguuuuguuaucaaagga

SEQ ID NO: 41928 - RNA, 22 nt, Homo sapiens
gagauggaguuucacuucgcuc

SEQ ID NO: 41929 - RNA, 22 nt, Homo sapiens
gagauguaagaauuuauuuguu

SEQ ID NO: 41930 - RNA, 22 nt, Homo sapiens
gaggucaugucgggccccagga

SEQ ID NO: 41931 - RNA, 18 nt, Homo sapiens
gauguaguauggugugga

SEQ ID NO: 41932 - RNA, 22 nt, Homo sapiens
gaugugaaaucauaguuucuag

SEQ ID NO: 41933 - RNA, 20 nt, Homo sapiens
gauuagagagaggcugugca

SEQ ID NO: 41934 - RNA, 22 nt, Homo sapiens
gauguguuuccaggauuuguuu

SEQ ID NO: 41935 - RNA, 22 nt, Homo sapiens
gauguuguuuagccuuugaugu

SEQ ID NO: 41936 - RNA, 20 nt, Homo sapiens
gcaagcaugaagaguagaga

SEQ ID NO: 41937 - RNA, 22 nt, Homo sapiens
gcaagauuguguggcugaagua

SEQ ID NO: 41938 - RNA, 22 nt, Homo sapiens
gauuagugacguugagcacugu

SEQ ID NO: 41939 - RNA, 22 nt, Homo sapiens
gaucugucuuuccuuauagucu

SEQ ID NO: 41940 - RNA, 22 nt, Homo sapiens
gaugguguuuugauaggaauug

SEQ ID NO: 41941 - RNA, 22 nt, Homo sapiens
gauauguuguuggauucgguua

SEQ ID NO: 41942 - RNA, 22 nt, Homo sapiens
gaucacaguuccucacgggcau

SEQ ID NO: 41943 - RNA, 22 nt, Homo sapiens
gagacugagucuugcucugucg

SEQ ID NO: 41944 - RNA, 22 nt, Homo sapiens
gagacugagucucacucuguca

SEQ ID NO: 41945 - RNA, 22 nt, Homo sapiens
gagacauguuugcuuaucugag

SEQ ID NO: 41946 - RNA, 22 nt, Homo sapiens
gagaugaagugucaauaaggau

SEQ ID NO: 41947 - RNA, 22 nt, Homo sapiens
gagagucacagugaauguggca

SEQ ID NO: 41948 - RNA, 22 nt, Homo sapiens
gagaucacuucuguauucuaca

SEQ ID NO: 41949 - RNA, 22 nt, Homo sapiens
gagaucuauuccucacccuucu

SEQ ID NO: 41950 - RNA, 22 nt, Homo sapiens
gagagguaguuuuuuggucguc

SEQ ID NO: 41951 - RNA, 20 nt, Homo sapiens
gaaugguuucgggguucuug

SEQ ID NO: 41952 - RNA, 22 nt, Homo sapiens
gaauguuuacuuuguuuaauac

SEQ ID NO: 41953 - RNA, 22 nt, Homo sapiens
gacaccauuucaguacuagguu

SEQ ID NO: 41954 - RNA, 22 nt, Homo sapiens
gacaagagaacacugcuauauu

SEQ ID NO: 41955 - RNA, 22 nt, Homo sapiens
cuuuggugauagauaccccaua

SEQ ID NO: 41956 - RNA, 22 nt, Homo sapiens
cuuuggugagggauaaauuuca

SEQ ID NO: 41957 - RNA, 22 nt, Homo sapiens
cuuugguguauuuucagagacc

SEQ ID NO: 41958 - RNA, 20 nt, Homo sapiens
gacaugacuaggagauagcc

SEQ ID NO: 41959 - RNA, 22 nt, Homo sapiens
gacaccugguguggaacuggag

SEQ ID NO: 41960 - RNA, 22 nt, Homo sapiens
gacagugagaugucaugugaaa

SEQ ID NO: 41961 - RNA, 22 nt, Homo sapiens
gacauguuuacaguguugagag

SEQ ID NO: 41962 - RNA, 22 nt, Homo sapiens
gacugaggaagcgcucucuccu

SEQ ID NO: 41963 - RNA, 22 nt, Homo sapiens
auuccacagccgauaccaugac

SEQ ID NO: 41964 - RNA, 22 nt, Homo sapiens
auuagguacugugguuuccaga

SEQ ID NO: 41965 - RNA, 22 nt, Homo sapiens
auuccuuaggcccuuugguuag

SEQ ID NO: 41966 - RNA, 22 nt, Homo sapiens
auguggugguagccaggacagg

SEQ ID NO: 41967 - RNA, 23 nt, Homo sapiens
augugguuuuagguguugaacug

SEQ ID NO: 41968 - RNA, 22 nt, Homo sapiens
auguuacggaguuuuuauccag

SEQ ID NO: 41969 - RNA, 22 nt, Homo sapiens
auggcucuguuuuuuaugcucu

SEQ ID NO: 41970 - RNA, 22 nt, Homo sapiens
auggcucuguuccaugugucuu

SEQ ID NO: 41971 - RNA, 22 nt, Homo sapiens
auggccuuuuuaucucaccaag

SEQ ID NO: 41972 - RNA, 22 nt, Homo sapiens
auggccuuuacaauuugguaug

SEQ ID NO: 41973 - RNA, 22 nt, Homo sapiens
auggcguggagauauggucagc

SEQ ID NO: 41974 - RNA, 22 nt, Homo sapiens
auguggcuuuucaacuguguga

SEQ ID NO: 41975 - RNA, 22 nt, Homo sapiens
augugguaggcccaugagucau

SEQ ID NO: 41976 - RNA, 22 nt, Homo sapiens
auguggauaucuauaucuggau

SEQ ID NO: 41977 - RNA, 22 nt, Homo sapiens
auguggaaauguauaugugucu

SEQ ID NO: 41978 - RNA, 22 nt, Homo sapiens
auguggcuuuccuagaucuuag

SEQ ID NO: 41979 - RNA, 22 nt, Homo sapiens
augugccauucucauggcgcuu

SEQ ID NO: 41980 - RNA, 22 nt, Homo sapiens
auggcuguuucugcaaugucua

SEQ ID NO: 41981 - RNA, 22 nt, Homo sapiens
auggcuucuuacucuucugcau

SEQ ID NO: 41982 - RNA, 20 nt, Homo sapiens
auugaacucaguauucugaa

SEQ ID NO: 41983 - RNA, 22 nt, Homo sapiens
auuguguagucuuacugcuugc

SEQ ID NO: 41984 - RNA, 22 nt, Homo sapiens
auuguaguacauuuggugguca

SEQ ID NO: 41985 - RNA, 22 nt, Homo sapiens
auuguacuuauugccagaauuu

SEQ ID NO: 41986 - RNA, 22 nt, Homo sapiens
auugucacuuaaaagugcaugu

SEQ ID NO: 41987 - RNA, 22 nt, Homo sapiens
auugcaguuagaacagaagucu

SEQ ID NO: 41988 - RNA, 22 nt, Homo sapiens
auugcaugucauguuuagugua

SEQ ID NO: 41989 - RNA, 22 nt, Homo sapiens
auuguacuccagccugggcugc

SEQ ID NO: 41990 - RNA, 22 nt, Homo sapiens
auuguacuccagccugggcaaa

SEQ ID NO: 41991 - RNA, 22 nt, Homo sapiens
caaauugcuuguggaggauaau

SEQ ID NO: 41992 - RNA, 22 nt, Homo sapiens
caacccgugcagagcgcuuagu

SEQ ID NO: 41993 - RNA, 22 nt, Homo sapiens
cacagagugagacccugucucu

SEQ ID NO: 41994 - RNA, 22 nt, Homo sapiens
cacauguuugcuacauuuuucu

SEQ ID NO: 41995 - RNA, 22 nt, Homo sapiens
cacauugcaggaaaguucauua

SEQ ID NO: 41996 - RNA, 22 nt, Homo sapiens
cacauguucaggagcacuuaga

SEQ ID NO: 41997 - RNA, 22 nt, Homo sapiens
cacaguagaauagagcacuagg

SEQ ID NO: 41998 - RNA, 22 nt, Homo sapiens
cacagucuugcaauauugagau

SEQ ID NO: 41999 - RNA, 22 nt, Homo sapiens
cacagugaacugguggguuuuu

SEQ ID NO: 42000 - RNA, 22 nt, Homo sapiens
auuguucuuguguccuuuuccu

SEQ ID NO: 42001 - RNA, 22 nt, Homo sapiens
auuguucuuacaugcugucauc

SEQ ID NO: 42002 - RNA, 22 nt, Homo sapiens
auuuuugguuucaccugcacgc

SEQ ID NO: 42003 - RNA, 22 nt, Homo sapiens
caaagugguuuauacaugauug

SEQ ID NO: 42004 - RNA, 22 nt, Homo sapiens
caaagucuucaguugauucuga

SEQ ID NO: 42005 - RNA, 22 nt, Homo sapiens
cauauaguaggugcucuguguu

SEQ ID NO: 42006 - RNA, 22 nt, Homo sapiens
cauacaguaggcacuauuugua

SEQ ID NO: 42007 - RNA, 18 nt, Homo sapiens
cauagcacuucagcacau

SEQ ID NO: 42008 - RNA, 22 nt, Homo sapiens
caucgcacuccagccuggguaa

SEQ ID NO: 42009 - RNA, 22 nt, Homo sapiens
caucccugucgucaagucucug

SEQ ID NO: 42010 - RNA, 22 nt, Homo sapiens
caucgcacuccagccugggcaa

SEQ ID NO: 42011 - RNA, 20 nt, Homo sapiens
cagugcacuuucccacuggu

SEQ ID NO: 42012 - RNA, 22 nt, Homo sapiens
caguggaugaacaagaagugau

SEQ ID NO: 42013 - RNA, 22 nt, Homo sapiens
cagcugcuuuggaaaauauuuu

SEQ ID NO: 42014 - RNA, 22 nt, Homo sapiens
caccagcuggcauugaauaccu

SEQ ID NO: 42015 - RNA, 23 nt, Homo sapiens
cagcucauuuggguccccuuguc

SEQ ID NO: 42016 - RNA, 23 nt, Homo sapiens
caccaguagaaugugugggaggg

SEQ ID NO: 42017 - RNA, 22 nt, Homo sapiens
caccacagccauuauugucccc

SEQ ID NO: 42018 - RNA, 22 nt, Homo sapiens
cagcuguguuauaaacuaccau

SEQ ID NO: 42019 - RNA, 23 nt, Homo sapiens
cagcuggugauuuuaaguugaag

SEQ ID NO: 42020 - RNA, 22 nt, Homo sapiens
cagcuguuguugggguauagga

SEQ ID NO: 42021 - RNA, 22 nt, Homo sapiens
caggaccucuugccuggaagcc

SEQ ID NO: 42022 - RNA, 22 nt, Homo sapiens
cagcuguuguuaugucugcagg

SEQ ID NO: 42023 - RNA, 22 nt, Homo sapiens
caggugguauuugguuuucugu

SEQ ID NO: 42024 - RNA, 19 nt, Homo sapiens
cagguagugugcugacaug

SEQ ID NO: 42025 - RNA, 22 nt, Homo sapiens
cagguacuucugggcugagcag

SEQ ID NO: 42026 - RNA, 22 nt, Homo sapiens
caguacaauguugauuagaagu

SEQ ID NO: 42027 - RNA, 22 nt, Homo sapiens
cagugaauuucaggucaagagu

SEQ ID NO: 42028 - RNA, 22 nt, Homo sapiens
caguagcaugccucagaaugag

SEQ ID NO: 42029 - RNA, 19 nt, Homo sapiens
cccuggcacauggaaaaug

SEQ ID NO: 42030 - RNA, 22 nt, Homo sapiens
cccuugcacuucagagcugcau

SEQ ID NO: 42031 - RNA, 22 nt, Homo sapiens
cgaguagcacaaugugugugau

SEQ ID NO: 42032 - RNA, 23 nt, Homo sapiens
ccgugagagaguucauagaaagc

SEQ ID NO: 42033 - RNA, 22 nt, Homo sapiens
cgcaguguuugugucccugggu

SEQ ID NO: 42034 - RNA, 22 nt, Homo sapiens
cgcccuguagcuagcuagaggu

SEQ ID NO: 42035 - RNA, 22 nt, Homo sapiens
cgugaggaaaacagaggguguu

SEQ ID NO: 42036 - RNA, 22 nt, Homo sapiens
cguugcacuccagccugggcaa

SEQ ID NO: 42037 - RNA, 22 nt, Homo sapiens
cggcaguggguaagccaagcuu

SEQ ID NO: 42038 - RNA, 22 nt, Homo sapiens
cgcuggugucuaagcgacagcu

SEQ ID NO: 42039 - RNA, 22 nt, Homo sapiens
cuaaggcaguagccugaauaau

SEQ ID NO: 42040 - RNA, 22 nt, Homo sapiens
caugccacugcacgccauccug

SEQ ID NO: 42041 - RNA, 22 nt, Homo sapiens
caugcagcacacaugucugugc

SEQ ID NO: 42042 - RNA, 22 nt, Homo sapiens
ccaaguguucucauuguucaau

SEQ ID NO: 42043 - RNA, 22 nt, Homo sapiens
cauugucccucaaugucuauga

SEQ ID NO: 42044 - RNA, 22 nt, Homo sapiens
ccaaaguauuuucacugauauc

SEQ ID NO: 42045 - RNA, 22 nt, Homo sapiens
ccacccuuccacacccugggua

SEQ ID NO: 42046 - RNA, 22 nt, Homo sapiens
ccagaguugccucagguuucug

SEQ ID NO: 42047 - RNA, 22 nt, Homo sapiens
cccgugucuuggucuagggccu

SEQ ID NO: 42048 - RNA, 18 nt, Homo sapiens
cccgggugggcuguuccc

SEQ ID NO: 42049 - RNA, 22 nt, Homo sapiens
ccccguuacagccucagugccu

SEQ ID NO: 42050 - RNA, 22 nt, Homo sapiens
ccccggguggauguacauguga

SEQ ID NO: 42051 - RNA, 22 nt, Homo sapiens
ugaaacacaccuccucuccauc

SEQ ID NO: 42052 - RNA, 22 nt, Homo sapiens
ugaaagacacagaaguugccca

SEQ ID NO: 42053 - RNA, 20 nt, Homo sapiens
ugaaacacauggacuggggu

SEQ ID NO: 42054 - RNA, 18 nt, Homo sapiens
ugaaacacauuuuuuccu

SEQ ID NO: 42055 - RNA, 22 nt, Homo sapiens
ucuugucacugcauccccagcu

SEQ ID NO: 42056 - RNA, 22 nt, Homo sapiens
ucugugcauuguaacaacuaaa

SEQ ID NO: 42057 - RNA, 22 nt, Homo sapiens
ucugugcugagaguugaaaguu

SEQ ID NO: 42058 - RNA, 22 nt, Homo sapiens
ucuugccacuucauccccuuuc

SEQ ID NO: 42059 - RNA, 22 nt, Homo sapiens
ucugugguucaaaccagcaacu

SEQ ID NO: 42060 - RNA, 22 nt, Homo sapiens
ugaaauggaaagaguguagacu

SEQ ID NO: 42061 - RNA, 22 nt, Homo sapiens
ugaauauagacagggguagaga

SEQ ID NO: 42062 - RNA, 22 nt, Homo sapiens
ugaacacaucuccugguaccug

SEQ ID NO: 42063 - RNA, 22 nt, Homo sapiens
ugaauagaaguggcaggaguag

SEQ ID NO: 42064 - RNA, 22 nt, Homo sapiens
ugaacacagccugccucugcca

SEQ ID NO: 42065 - RNA, 16 nt, Homo sapiens
ugaauguuuguggcug

SEQ ID NO: 42066 - RNA, 22 nt, Homo sapiens
ugaauguauuuauuaccauuca

SEQ ID NO: 42067 - RNA, 22 nt, Homo sapiens
ugaauguaacuaaaggacuuuu

SEQ ID NO: 42068 - RNA, 22 nt, Homo sapiens
ugaauguaagaugucugcuggu

SEQ ID NO: 42069 - RNA, 22 nt, Homo sapiens
ucuggcuccaaagucuauuuuu

SEQ ID NO: 42070 - RNA, 22 nt, Homo sapiens
ucuggcuucugacuuaggggac

SEQ ID NO: 42071 - RNA, 18 nt, Homo sapiens
ucuggcuucuuuguucca

SEQ ID NO: 42072 - RNA, 17 nt, Homo sapiens
ucuggcuuucacaccug

SEQ ID NO: 42073 - RNA, 22 nt, Homo sapiens
ucuggcuuucuuuacuuaaugu

SEQ ID NO: 42074 - RNA, 21 nt, Homo sapiens
ucuggcuuucauuccccuucu

SEQ ID NO: 42075 - RNA, 22 nt, Homo sapiens
ucuggcuuauuucacuuagcau

SEQ ID NO: 42076 - RNA, 22 nt, Homo sapiens
ucugccacugucauugugugau

SEQ ID NO: 42077 - RNA, 23 nt, Homo sapiens
ucugcggguguggacccuagugc

SEQ ID NO: 42078 - RNA, 19 nt, Homo sapiens
ucuguaguuagggcuacag

SEQ ID NO: 42079 - RNA, 22 nt, Homo sapiens
ucugucaaaucuuauguuguag

SEQ ID NO: 42080 - RNA, 23 nt, Homo sapiens
ucugguguugucaaaugcugguu

SEQ ID NO: 42081 - RNA, 21 nt, Homo sapiens
ucucauagaguuucacuuucu

SEQ ID NO: 42082 - RNA, 21 nt, Homo sapiens
ucucauugugguuuuaauugg

SEQ ID NO: 42083 - RNA, 22 nt, Homo sapiens
ucuccaguuuccuucgucuauc

SEQ ID NO: 42084 - RNA, 22 nt, Homo sapiens
ucucccauccguacacggauug

SEQ ID NO: 42085 - RNA, 22 nt, Homo sapiens
ucucagugaauugguuuugucu

SEQ ID NO: 42086 - RNA, 22 nt, Homo sapiens
ucccaguauucauuuacagaag

SEQ ID NO: 42087 - RNA, 22 nt, Homo sapiens
ucucuggauaucuacuuauguu

SEQ ID NO: 42088 - RNA, 22 nt, Homo sapiens
ucucuuggcggaaguugcagug

SEQ ID NO: 42089 - RNA, 22 nt, Homo sapiens
ucugacagugagagaaaucuga

SEQ ID NO: 42090 - RNA, 22 nt, Homo sapiens
ucugacucuggagucucagguu

SEQ ID NO: 42091 - RNA, 22 nt, Homo sapiens
ucugagacuguuucuaacaagc

SEQ ID NO: 42092 - RNA, 22 nt, Homo sapiens
ucagugucugugauggagaggu

SEQ ID NO: 42093 - RNA, 21 nt, Homo sapiens
ucauaagcucaacaucuguag

SEQ ID NO: 42094 - RNA, 22 nt, Homo sapiens
ucauacuguuaaaugguuuagu

SEQ ID NO: 42095 - RNA, 22 nt, Homo sapiens
ucauaggucugagaagaaaaua

SEQ ID NO: 42096 - RNA, 22 nt, Homo sapiens
ucauauugguuaaaauaguggg

SEQ ID NO: 42097 - RNA, 22 nt, Homo sapiens
ucaggugcaguggcucaugcuu

SEQ ID NO: 42098 - RNA, 22 nt, Homo sapiens
ucagguagugccaugauugauu

SEQ ID NO: 42099 - RNA, 23 nt, Homo sapiens
ucagguaguuucagaggaccuug

SEQ ID NO: 42100 - RNA, 22 nt, Homo sapiens
ucagguaguuugugggagauga

SEQ ID NO: 42101 - RNA, 22 nt, Homo sapiens
ucagacacugagcaaacgacua

SEQ ID NO: 42102 - RNA, 21 nt, Homo sapiens
ucagggaccugcuguacugau

SEQ ID NO: 42103 - RNA, 22 nt, Homo sapiens
ucagggacuuacaaaccagaag

SEQ ID NO: 42104 - RNA, 22 nt, Homo sapiens
ucagggacgcuugacacaagcc

SEQ ID NO: 42105 - RNA, 22 nt, Homo sapiens
ucauucacucccuugaaguuag

SEQ ID NO: 42106 - RNA, 22 nt, Homo sapiens
ucauguguugcacugaggaccu

SEQ ID NO: 42107 - RNA, 22 nt, Homo sapiens
uccaguguuauaauaugcgucu

SEQ ID NO: 42108 - RNA, 22 nt, Homo sapiens
uccagguacucagggggcugag

SEQ ID NO: 42109 - RNA, 22 nt, Homo sapiens
ucauguauuaucauuagugggu

SEQ ID NO: 42110 - RNA, 19 nt, Homo sapiens
ucaugugcauacauuuggg

SEQ ID NO: 42111 - RNA, 22 nt, Homo sapiens
ucauguaauuuugugucuauga

SEQ ID NO: 42112 - RNA, 22 nt, Homo sapiens
ucaugguuuuauaacccucuug

SEQ ID NO: 42113 - RNA, 22 nt, Homo sapiens
ucauggguuuugguccaagcaa

SEQ ID NO: 42114 - RNA, 22 nt, Homo sapiens
ucauauugcgguucauugacuu

SEQ ID NO: 42115 - RNA, 22 nt, Homo sapiens
ucaucagguaugucagcggagu

SEQ ID NO: 42116 - RNA, 21 nt, Homo sapiens
ucaucaagcuguagacaugau

SEQ ID NO: 42117 - RNA, 22 nt, Homo sapiens
ucaccaccugcugauuguagag

SEQ ID NO: 42118 - RNA, 22 nt, Homo sapiens
ucaccaccuuccaggaccacug

SEQ ID NO: 42119 - RNA, 22 nt, Homo sapiens
ucacugaaaccuccaccucucg

SEQ ID NO: 42120 - RNA, 22 nt, Homo sapiens
ucacaugugcguuuuggcaugu

SEQ ID NO: 42121 - RNA, 22 nt, Homo sapiens
ucacaugugaagauugggagua

SEQ ID NO: 42122 - RNA, 22 nt, Homo sapiens
ucacauguguaaauugguguaa

SEQ ID NO: 42123 - RNA, 21 nt, Homo sapiens
ucacaucguuuagcugugccu

SEQ ID NO: 42124 - RNA, 22 nt, Homo sapiens
ucacaucucagguuucuugaca

SEQ ID NO: 42125 - RNA, 22 nt, Homo sapiens
ucacagucggugacuucuugcu

SEQ ID NO: 42126 - RNA, 22 nt, Homo sapiens
ucacacucucaccaacauuugg

SEQ ID NO: 42127 - RNA, 22 nt, Homo sapiens
ucacacgugaacucaucacaga

SEQ ID NO: 42128 - RNA, 22 nt, Homo sapiens
ucacagucaaaguaaucauaga

SEQ ID NO: 42129 - RNA, 22 nt, Homo sapiens
uauugcaaauggugaucccagg

SEQ ID NO: 42130 - RNA, 22 nt, Homo sapiens
uauugcacuccucaugcauuug

SEQ ID NO: 42131 - RNA, 22 nt, Homo sapiens
uauuguuaaagauguuaaugau

SEQ ID NO: 42132 - RNA, 18 nt, Homo sapiens
uggauaguuguuggcaga

SEQ ID NO: 42133 - RNA, 22 nt, Homo sapiens
uggcaagagcaaaauguacagu

SEQ ID NO: 42134 - RNA, 22 nt, Homo sapiens
uggauguauacaugcaggucac

SEQ ID NO: 42135 - RNA, 22 nt, Homo sapiens
uggcagcgcaguugaaaaagaa

SEQ ID NO: 42136 - RNA, 19 nt, Homo sapiens
uggcacauguauacauaug

SEQ ID NO: 42137 - RNA, 22 nt, Homo sapiens
uggcaauguggaaugguccagg

SEQ ID NO: 42138 - RNA, 22 nt, Homo sapiens
uggcaauaaaaugcaguuacuu

SEQ ID NO: 42139 - RNA, 22 nt, Homo sapiens
uggcagauagaaaugugguuaa

SEQ ID NO: 42140 - RNA, 22 nt, Homo sapiens
ugcugguggucccauaugauua

SEQ ID NO: 42141 - RNA, 22 nt, Homo sapiens
ugcugguguuuaggaauaagaa

SEQ ID NO: 42142 - RNA, 22 nt, Homo sapiens
ugcugguuuaaaaugcaaauuc

SEQ ID NO: 42143 - RNA, 22 nt, Homo sapiens
ugcuuuguuauauggggauucu

SEQ ID NO: 42144 - RNA, 22 nt, Homo sapiens
uggaaggucauuguucauuuga

SEQ ID NO: 42145 - RNA, 22 nt, Homo sapiens
ugcuguuguuugaugaaguaau

SEQ ID NO: 42146 - RNA, 21 nt, Homo sapiens
ugcuuacugaauguuaauuuc

SEQ ID NO: 42147 - RNA, 22 nt, Homo sapiens
ugcuuguguucagguaaccuuu

SEQ ID NO: 42148 - RNA, 21 nt, Homo sapiens
uggaaguguacaauuauaccc

SEQ ID NO: 42149 - RNA, 22 nt, Homo sapiens
uggaagugucugugcccagcuc

SEQ ID NO: 42150 - RNA, 20 nt, Homo sapiens
uggaaguaagaauauaggug

SEQ ID NO: 42151 - RNA, 22 nt, Homo sapiens
ugcugcuguuaucauuuuacca

SEQ ID NO: 42152 - RNA, 20 nt, Homo sapiens
ugcugcacuuaagcaugggc

SEQ ID NO: 42153 - RNA, 22 nt, Homo sapiens
ugcugcacuuauggcucugagg

SEQ ID NO: 42154 - RNA, 22 nt, Homo sapiens
ugcgccauugcacucuagccug

SEQ ID NO: 42155 - RNA, 22 nt, Homo sapiens
ugcuacccuucgucucucuggu

SEQ ID NO: 42156 - RNA, 22 nt, Homo sapiens
ugcuaucauugauuagugaugu

SEQ ID NO: 42157 - RNA, 22 nt, Homo sapiens
ugcuagaugaaguuugaguuuu

SEQ ID NO: 42158 - RNA, 22 nt, Homo sapiens
ugcuaugucuucucucacagag

SEQ ID NO: 42159 - RNA, 22 nt, Homo sapiens
ugcauuguaggauguuuagcag

SEQ ID NO: 42160 - RNA, 22 nt, Homo sapiens
ugcauuguauuguugacucgcc

SEQ ID NO: 42161 - RNA, 22 nt, Homo sapiens
ugcauugccgugauuacugucu

SEQ ID NO: 42162 - RNA, 22 nt, Homo sapiens
ugcauugcacuugcaugagaua

SEQ ID NO: 42163 - RNA, 22 nt, Homo sapiens
ugccaaaaugggcuuuauaccg

SEQ ID NO: 42164 - RNA, 22 nt, Homo sapiens
ugccaacaugccuggcuguuuu

SEQ ID NO: 42165 - RNA, 22 nt, Homo sapiens
ugcauuguggaucuaaaugcau

SEQ ID NO: 42166 - RNA, 22 nt, Homo sapiens
ugccuucuguuaaacgaggaug

SEQ ID NO: 42167 - RNA, 21 nt, Homo sapiens
ugcaagaaucaggaagcugcc

SEQ ID NO: 42168 - RNA, 22 nt, Homo sapiens
ugcaagauaggcaguuugcacu

SEQ ID NO: 42169 - RNA, 22 nt, Homo sapiens
ugcaauauccucuacuauaggu

SEQ ID NO: 42170 - RNA, 22 nt, Homo sapiens
ugcaaguaauuccagcuacuga

SEQ ID NO: 42171 - RNA, 22 nt, Homo sapiens
ugcauguucuuacucauacaug

SEQ ID NO: 42172 - RNA, 22 nt, Homo sapiens
ugcaauuuaaugugucccaauu

SEQ ID NO: 42173 - RNA, 22 nt, Homo sapiens
ugcacaaccucacccccgcucu

SEQ ID NO: 42174 - RNA, 22 nt, Homo sapiens
ugaguggagaucgcaccauugc

SEQ ID NO: 42175 - RNA, 22 nt, Homo sapiens
ugauguugacuguaggcagaga

SEQ ID NO: 42176 - RNA, 22 nt, Homo sapiens
ugauuagagcccaagcuuugaa

SEQ ID NO: 42177 - RNA, 17 nt, Homo sapiens
ugauauuuucccagaua

SEQ ID NO: 42178 - RNA, 22 nt, Homo sapiens
ugauauguuagaaucuugcaag

SEQ ID NO: 42179 - RNA, 22 nt, Homo sapiens
ugagguugucagugucauucuu

SEQ ID NO: 42180 - RNA, 22 nt, Homo sapiens
ugagguguuugugcaccaucug

SEQ ID NO: 42181 - RNA, 22 nt, Homo sapiens
ugagguuggggucagggcuagc

SEQ ID NO: 42182 - RNA, 22 nt, Homo sapiens
ugaguagcuaauguuuacugag

SEQ ID NO: 42183 - RNA, 22 nt, Homo sapiens
ugaguauagaucaguucaagug

SEQ ID NO: 42184 - RNA, 19 nt, Homo sapiens
ugaguauauuguauucauu

SEQ ID NO: 42185 - RNA, 22 nt, Homo sapiens
ugagauggguaauuaaauggug

SEQ ID NO: 42186 - RNA, 22 nt, Homo sapiens
ugagaugugugcauucaacuca

SEQ ID NO: 42187 - RNA, 22 nt, Homo sapiens
ugagauguuuagauuguugucu

SEQ ID NO: 42188 - RNA, 22 nt, Homo sapiens
ugagauguuccaaugacuauua

SEQ ID NO: 42189 - RNA, 21 nt, Homo sapiens
ugagauuaaguuguuuagaag

SEQ ID NO: 42190 - RNA, 22 nt, Homo sapiens
ugagauguuuguuucagugccu

SEQ ID NO: 42191 - RNA, 23 nt, Homo sapiens
ugacagugcuugaaauugcucuu

SEQ ID NO: 42192 - RNA, 22 nt, Homo sapiens
ugacaggucuaauuuacugaca

SEQ ID NO: 42193 - RNA, 22 nt, Homo sapiens
ugacacagcaagauggaaccau

SEQ ID NO: 42194 - RNA, 22 nt, Homo sapiens
ugacagguuggaauuaugggag

SEQ ID NO: 42195 - RNA, 22 nt, Homo sapiens
ugagacggaguuuugcucuugu

SEQ ID NO: 42196 - RNA, 22 nt, Homo sapiens
ugagacugagucucccucuguc

SEQ ID NO: 42197 - RNA, 22 nt, Homo sapiens
ugagacugagucucgcucuauu

SEQ ID NO: 42198 - RNA, 22 nt, Homo sapiens
ugagacggagucuugcucuguc

SEQ ID NO: 42199 - RNA, 22 nt, Homo sapiens
ugagacggagucuugcuaaguu

SEQ ID NO: 42200 - RNA, 23 nt, Homo sapiens
ugacagaccuucuggaagaaguc

SEQ ID NO: 42201 - RNA, 20 nt, Homo sapiens
ugacaagugagaauuauggg

SEQ ID NO: 42202 - RNA, 22 nt, Homo sapiens
ugacaagugauuaaggcauauu

SEQ ID NO: 42203 - RNA, 22 nt, Homo sapiens
ugagacugagucucgcucuugu

SEQ ID NO: 42204 - RNA, 22 nt, Homo sapiens
ugagagucauacaaauaaaaau

SEQ ID NO: 42205 - RNA, 22 nt, Homo sapiens
ugagaugaguugcuggcucuga

SEQ ID NO: 42206 - RNA, 22 nt, Homo sapiens
ugagaugcucgccggccagcau

SEQ ID NO: 42207 - RNA, 22 nt, Homo sapiens
ugagaugcauauucuggcuccu

SEQ ID NO: 42208 - RNA, 21 nt, Homo sapiens
ugagaugauccugcaugcaug

SEQ ID NO: 42209 - RNA, 22 nt, Homo sapiens
ugagauggaguuucacuuuugu

SEQ ID NO: 42210 - RNA, 22 nt, Homo sapiens
ugagauggaguuucgcucuugu

SEQ ID NO: 42211 - RNA, 22 nt, Homo sapiens
ugagauguagauauggauuaga

SEQ ID NO: 42212 - RNA, 22 nt, Homo sapiens
ugagauagaaaacauaggagaa

SEQ ID NO: 42213 - RNA, 22 nt, Homo sapiens
ugagauagggucucacucuguc

SEQ ID NO: 42214 - RNA, 22 nt, Homo sapiens
ugagauaggaucuugcucuguu

SEQ ID NO: 42215 - RNA, 20 nt, Homo sapiens
ugagauccacgugaaguaug

SEQ ID NO: 42216 - RNA, 22 nt, Homo sapiens
ugagaucuuaucagaaauggug

SEQ ID NO: 42217 - RNA, 22 nt, Homo sapiens
ugagaucuuggaggcuuuguga

SEQ ID NO: 42218 - RNA, 22 nt, Homo sapiens
ugagaugaaagcagaaagacuu

SEQ ID NO: 42219 - RNA, 22 nt, Homo sapiens
ugagaucuuuuguggcugagaa

SEQ ID NO: 42220 - RNA, 22 nt, Homo sapiens
ugagaucgaguuucgcucuugu

SEQ ID NO: 42221 - RNA, 22 nt, Homo sapiens
ugagaucgaguaucgcugucac

SEQ ID NO: 42222 - RNA, 22 nt, Homo sapiens
uaggggcacacuucgguuagca

SEQ ID NO: 42223 - RNA, 21 nt, Homo sapiens
uaggccgggugcaggaugcuu

SEQ ID NO: 42224 - RNA, 22 nt, Homo sapiens
uaggugauccauuuguauuuua

SEQ ID NO: 42225 - RNA, 22 nt, Homo sapiens
uaggucacugcucugugucuaa

SEQ ID NO: 42226 - RNA, 22 nt, Homo sapiens
uagguagaaucuugaagccauu

SEQ ID NO: 42227 - RNA, 22 nt, Homo sapiens
uaguucauuauguguugcucag

SEQ ID NO: 42228 - RNA, 22 nt, Homo sapiens
uaguguuuuucauuggcagagg

SEQ ID NO: 42229 - RNA, 22 nt, Homo sapiens
uagguucucaggaaugagcuuc

SEQ ID NO: 42230 - RNA, 20 nt, Homo sapiens
uagguuuucacagaauugcc

SEQ ID NO: 42231 - RNA, 22 nt, Homo sapiens
uagcagucucagaaugcauggu

SEQ ID NO: 42232 - RNA, 22 nt, Homo sapiens
uagaaguaggcuacgugucugg

SEQ ID NO: 42233 - RNA, 22 nt, Homo sapiens
uagcugguauuaggaguugugu

SEQ ID NO: 42234 - RNA, 22 nt, Homo sapiens
uaggcacacaucuacuacaaau

SEQ ID NO: 42235 - RNA, 22 nt, Homo sapiens
uaggcaauguggcgaaacucug

SEQ ID NO: 42236 - RNA, 22 nt, Homo sapiens
uaggacacagauggagaaaagc

SEQ ID NO: 42237 - RNA, 22 nt, Homo sapiens
uaggagcacagcagcauguggg

SEQ ID NO: 42238 - RNA, 22 nt, Homo sapiens
uaucaaggccacucauuuuaug

SEQ ID NO: 42239 - RNA, 22 nt, Homo sapiens
uaucacaaacuuagcaguuuaa

SEQ ID NO: 42240 - RNA, 22 nt, Homo sapiens
uauauguucuugcacuggaaag

SEQ ID NO: 42241 - RNA, 23 nt, Homo sapiens
uauaugugucuaggagcuauggu

SEQ ID NO: 42242 - RNA, 22 nt, Homo sapiens
uaucucagagaaucagauuuac

SEQ ID NO: 42243 - RNA, 22 nt, Homo sapiens
uaucacagcauugucuauaaua

SEQ ID NO: 42244 - RNA, 22 nt, Homo sapiens
uaucacaguagaacucuuucca

SEQ ID NO: 42245 - RNA, 22 nt, Homo sapiens
uaucacaguaucuagcacagug

SEQ ID NO: 42246 - RNA, 22 nt, Homo sapiens
uaucugguuauugcugcugauu

SEQ ID NO: 42247 - RNA, 20 nt, Homo sapiens
uaugaaacaguguagagcaa

SEQ ID NO: 42248 - RNA, 22 nt, Homo sapiens
uaugagacugugagugagaaau

SEQ ID NO: 42249 - RNA, 20 nt, Homo sapiens
uaugagacugggagaaguuc

SEQ ID NO: 42250 - RNA, 22 nt, Homo sapiens
uauggccacugucuuugaguca

SEQ ID NO: 42251 - RNA, 22 nt, Homo sapiens
uauggcugugacuuaucuuguu

SEQ ID NO: 42252 - RNA, 22 nt, Homo sapiens
uauggcuuucuacuugaguucu

SEQ ID NO: 42253 - RNA, 22 nt, Homo sapiens
uauggcuucuauaaggaagcuu

SEQ ID NO: 42254 - RNA, 22 nt, Homo sapiens
uauuccacucuguuggagguaa

SEQ ID NO: 42255 - RNA, 22 nt, Homo sapiens
uauugauuaauugugauuaggc

SEQ ID NO: 42256 - RNA, 22 nt, Homo sapiens
uauugaacgugggauauugaag

SEQ ID NO: 42257 - RNA, 22 nt, Homo sapiens
uauuccuuuugcauuuccacau

SEQ ID NO: 42258 - RNA, 22 nt, Homo sapiens
uauuccauuugggucaggauga

SEQ ID NO: 42259 - RNA, 22 nt, Homo sapiens
uacaggauagacaauuuauuaa

SEQ ID NO: 42260 - RNA, 19 nt, Homo sapiens
uacaguacacaacaccuuu

SEQ ID NO: 42261 - RNA, 22 nt, Homo sapiens
uacaggugcucuacagacagga

SEQ ID NO: 42262 - RNA, 22 nt, Homo sapiens
uaauagcaguguuacuaggacu

SEQ ID NO: 42263 - RNA, 22 nt, Homo sapiens
uaauaguuggcacuggagaaag

SEQ ID NO: 42264 - RNA, 22 nt, Homo sapiens
uaauacuguaauggugguuccg

SEQ ID NO: 42265 - RNA, 22 nt, Homo sapiens
uaauagagucauuauuauuguu

SEQ ID NO: 42266 - RNA, 22 nt, Homo sapiens
uacaucagccugaaagagcucg

SEQ ID NO: 42267 - RNA, 22 nt, Homo sapiens
uacauaguagauauaggguuua

SEQ ID NO: 42268 - RNA, 22 nt, Homo sapiens
uacaguauuaugagugauugaa

SEQ ID NO: 42269 - RNA, 22 nt, Homo sapiens
uaagugacuuugagauuccuca

SEQ ID NO: 42270 - RNA, 22 nt, Homo sapiens
uaauacucuucucauuuuacag

SEQ ID NO: 42271 - RNA, 22 nt, Homo sapiens
uaaguuguugacauuaggggaa

SEQ ID NO: 42272 - RNA, 20 nt, Homo sapiens
uaagugcauaggauauuucu

SEQ ID NO: 42273 - RNA, 22 nt, Homo sapiens
uaagugcaugauuacaugcaua

SEQ ID NO: 42274 - RNA, 22 nt, Homo sapiens
uaagaugcagauuugggcgggg

SEQ ID NO: 42275 - RNA, 22 nt, Homo sapiens
uaagccaccgugccuggccuaa

SEQ ID NO: 42276 - RNA, 22 nt, Homo sapiens
uacuuaguagcuuauccugugg

SEQ ID NO: 42277 - RNA, 21 nt, Homo sapiens
uacuugagacagggucuugcu

SEQ ID NO: 42278 - RNA, 22 nt, Homo sapiens
uacugcuuaagggcaugggccc

SEQ ID NO: 42279 - RNA, 22 nt, Homo sapiens
uacugguuuuauauauuucucc

SEQ ID NO: 42280 - RNA, 22 nt, Homo sapiens
uaccucagccaaugcccagaag

SEQ ID NO: 42281 - RNA, 22 nt, Homo sapiens
uaccauguauguuucuccauug

SEQ ID NO: 42282 - RNA, 22 nt, Homo sapiens
uacccgucuacuuugaacaaaa

SEQ ID NO: 42283 - RNA, 22 nt, Homo sapiens
uaccagcauuucucuuuaagua

SEQ ID NO: 42284 - RNA, 19 nt, Homo sapiens
uacaugcagcaggcacgca

SEQ ID NO: 42285 - RNA, 22 nt, Homo sapiens
uacauccauccugcugggcagu

SEQ ID NO: 42286 - RNA, 22 nt, Homo sapiens
uacaugcaugggcaugugugca

SEQ ID NO: 42287 - RNA, 22 nt, Homo sapiens
uacauguauguguuuauggcug

SEQ ID NO: 42288 - RNA, 22 nt, Homo sapiens
uaccacagucauuacacuugua

SEQ ID NO: 42289 - RNA, 22 nt, Homo sapiens
uacaugugcacaacgugcaggu

SEQ ID NO: 42290 - RNA, 22 nt, Homo sapiens
guugcucaggccggagugcagu

SEQ ID NO: 42291 - RNA, 22 nt, Homo sapiens
guugccuaggcuggucuugaac

SEQ ID NO: 42292 - RNA, 22 nt, Homo sapiens
guuggcuuuuuaaggaaauugc

SEQ ID NO: 42293 - RNA, 22 nt, Homo sapiens
guuugccuuuuagauaggaaug

SEQ ID NO: 42294 - RNA, 22 nt, Homo sapiens
guugguauuacagaaauuaguu

SEQ ID NO: 42295 - RNA, 22 nt, Homo sapiens
guuguacuaccucucguauuag

SEQ ID NO: 42296 - RNA, 22 nt, Homo sapiens
guuggucucguauaaaucaagg

SEQ ID NO: 42297 - RNA, 22 nt, Homo sapiens
guuggugaccugaagagaguaa

SEQ ID NO: 42298 - RNA, 22 nt, Homo sapiens
guugugcuuaagccuauugauu

SEQ ID NO: 42299 - RNA, 22 nt, Homo sapiens
gugguaguagaauuucggaaau

SEQ ID NO: 42300 - RNA, 22 nt, Homo sapiens
gugguaucauuuaaccauuaga

SEQ ID NO: 42301 - RNA, 22 nt, Homo sapiens
gugguuguuggaguggcaauuu

SEQ ID NO: 42302 - RNA, 22 nt, Homo sapiens
gugguuuuaauauucagucuag

SEQ ID NO: 42303 - RNA, 22 nt, Homo sapiens
gugguucuagagggacagaaug

SEQ ID NO: 42304 - RNA, 22 nt, Homo sapiens
gugguuuucaacuccaccugca

SEQ ID NO: 42305 - RNA, 22 nt, Homo sapiens
gugguuuuuuucugccuuauag

SEQ ID NO: 42306 - RNA, 22 nt, Homo sapiens
uaagacuguguaauuuaugaag

SEQ ID NO: 42307 - RNA, 22 nt, Homo sapiens
uaagacugccccagacagcaag

SEQ ID NO: 42308 - RNA, 22 nt, Homo sapiens
uaagacacuuaaaauguuacau

SEQ ID NO: 42309 - RNA, 21 nt, Homo sapiens
uaacccugaaggagcucugga

SEQ ID NO: 42310 - RNA, 22 nt, Homo sapiens
guuuuuggggucacuauuaccg

SEQ ID NO: 42311 - RNA, 22 nt, Homo sapiens
uaaagcacuuuuuucugcaugg

SEQ ID NO: 42312 - RNA, 22 nt, Homo sapiens
gcugagguucaagaagguuaaa

SEQ ID NO: 42313 - RNA, 22 nt, Homo sapiens
gcugaguaguauuucauuguau

SEQ ID NO: 42314 - RNA, 22 nt, Homo sapiens
gcugauggugcaguucuagccu

SEQ ID NO: 42315 - RNA, 22 nt, Homo sapiens
gcugcuguaccagaugugguua

SEQ ID NO: 42316 - RNA, 17 nt, Homo sapiens
gcugauguuugcauuuu

SEQ ID NO: 42317 - RNA, 22 nt, Homo sapiens
gcaaggacucccugggucauuc

SEQ ID NO: 42318 - RNA, 22 nt, Homo sapiens
gcacauauguaaauagcugccu

SEQ ID NO: 42319 - RNA, 22 nt, Homo sapiens
gcaccacugcacucucagcuug

SEQ ID NO: 42320 - RNA, 22 nt, Homo sapiens
gcaccguggaguauggggagga

SEQ ID NO: 42321 - RNA, 22 nt, Homo sapiens
gcacauuacaaguauuagcuca

SEQ ID NO: 42322 - RNA, 22 nt, Homo sapiens
gcacgcauuguccuucuaguca

SEQ ID NO: 42323 - RNA, 22 nt, Homo sapiens
gcgugguguuagaaugagaagu

SEQ ID NO: 42324 - RNA, 22 nt, Homo sapiens
ggacugagaggacuacagugua

SEQ ID NO: 42325 - RNA, 22 nt, Homo sapiens
ggaaauguuggugucaugaguu

SEQ ID NO: 42326 - RNA, 22 nt, Homo sapiens
gcuuuguugauggugagucugu

SEQ ID NO: 42327 - RNA, 22 nt, Homo sapiens
gcuuugguucaaccaggcaauu

SEQ ID NO: 42328 - RNA, 21 nt, Homo sapiens
gcuuuuucggaagucuuuggc

SEQ ID NO: 42329 - RNA, 18 nt, Homo sapiens
gcuguugucagagcacau

SEQ ID NO: 42330 - RNA, 22 nt, Homo sapiens
gcuguguguuaucagaaauugc

SEQ ID NO: 42331 - RNA, 22 nt, Homo sapiens
gcugucuggagucuguucaaug

SEQ ID NO: 42332 - RNA, 22 nt, Homo sapiens
gcugcuguuauucaucagaacu

SEQ ID NO: 42333 - RNA, 22 nt, Homo sapiens
gcugcuguuuaguuucuccugg

SEQ ID NO: 42334 - RNA, 22 nt, Homo sapiens
ggacugucagggcuauuaguca

SEQ ID NO: 42335 - RNA, 22 nt, Homo sapiens
ggagaugauuaugaaucacuua

SEQ ID NO: 42336 - RNA, 22 nt, Homo sapiens
ggagcugugauuugaguccaga

SEQ ID NO: 42337 - RNA, 22 nt, Homo sapiens
ggagauguuuaaccuuuuaucu

SEQ ID NO: 42338 - RNA, 21 nt, Homo sapiens
ggaguauaaggcaaaggagug

SEQ ID NO: 42339 - RNA, 22 nt, Homo sapiens
ggagucugaacuggacaaugac

SEQ ID NO: 42340 - RNA, 20 nt, Homo sapiens
ggagguguugauuuuucuuu

SEQ ID NO: 42341 - RNA, 22 nt, Homo sapiens
ggagcuuugaaaguuuccgguu

SEQ ID NO: 42342 - RNA, 22 nt, Homo sapiens
ggcacgguggcucacaccugua

SEQ ID NO: 42343 - RNA, 22 nt, Homo sapiens
ggcaccacagacgccaggcgug

SEQ ID NO: 42344 - RNA, 22 nt, Homo sapiens
ggcagaucauuggccucaguuu

SEQ ID NO: 42345 - RNA, 22 nt, Homo sapiens
ggcagcauugccuuugcaguga

SEQ ID NO: 42346 - RNA, 22 nt, Homo sapiens
ggcagcaugggugccuuuguga

SEQ ID NO: 42347 - RNA, 23 nt, Homo sapiens
ggcaagaucucagcucacugcaa

SEQ ID NO: 42348 - RNA, 22 nt, Homo sapiens
ggcaagugucagcagcaacacc

SEQ ID NO: 42349 - RNA, 22 nt, Homo sapiens
ggcaauauauucugaauucagu

SEQ ID NO: 42350 - RNA, 22 nt, Homo sapiens
ggugcuugaggaacggaggcug

SEQ ID NO: 42351 - RNA, 22 nt, Homo sapiens
ggugcagcacaccaacauggca

SEQ ID NO: 42352 - RNA, 22 nt, Homo sapiens
ggugagguaguaagguacaaua

SEQ ID NO: 42353 - RNA, 23 nt, Homo sapiens
ggugaggaguacagagucuucau

SEQ ID NO: 42354 - RNA, 22 nt, Homo sapiens
ggucaguguuaucaccgaagga

SEQ ID NO: 42355 - RNA, 19 nt, Homo sapiens
ggugagaaauuaugggucu

SEQ ID NO: 42356 - RNA, 22 nt, Homo sapiens
ggugagauaucugcugauguuu

SEQ ID NO: 42357 - RNA, 22 nt, Homo sapiens
ggugaauuguaccccauaggau

SEQ ID NO: 42358 - RNA, 20 nt, Homo sapiens
gggaaugcaaauucucaucc

SEQ ID NO: 42359 - RNA, 22 nt, Homo sapiens
gggaauguagcaaaucugcaau

SEQ ID NO: 42360 - RNA, 22 nt, Homo sapiens
gggaagugugcagaguucucuu

SEQ ID NO: 42361 - RNA, 22 nt, Homo sapiens
ggcucguguuuucuguccaguu

SEQ ID NO: 42362 - RNA, 22 nt, Homo sapiens
gggcaacauugaguacccugaa

SEQ ID NO: 42363 - RNA, 22 nt, Homo sapiens
gggcagaugucuggacaccuca

SEQ ID NO: 42364 - RNA, 22 nt, Homo sapiens
gugaacaagcaaaggcaggagg

SEQ ID NO: 42365 - RNA, 22 nt, Homo sapiens
gugaagaucccuguccuguucc

SEQ ID NO: 42366 - RNA, 22 nt, Homo sapiens
gugaaguuuuugugaggccuaa

SEQ ID NO: 42367 - RNA, 22 nt, Homo sapiens
gugaaaugaaucuggaaauauu

SEQ ID NO: 42368 - RNA, 22 nt, Homo sapiens
gucuuuguuuggucuguaucag

SEQ ID NO: 42369 - RNA, 22 nt, Homo sapiens
gucuguuuggggaccuguggcc

SEQ ID NO: 42370 - RNA, 22 nt, Homo sapiens
gucugucuuuugucuuugaaau

SEQ ID NO: 42371 - RNA, 20 nt, Homo sapiens
gucugucuccgaguagaauu

SEQ ID NO: 42372 - RNA, 22 nt, Homo sapiens
gucugagcauggggccggcagg

SEQ ID NO: 42373 - RNA, 21 nt, Homo sapiens
gucugguguuuuaaugaggac

SEQ ID NO: 42374 - RNA, 22 nt, Homo sapiens
gucuggcuccuucuacuacaug

SEQ ID NO: 42375 - RNA, 22 nt, Homo sapiens
gucugcaugucauaugauagua

SEQ ID NO: 42376 - RNA, 22 nt, Homo sapiens
gucaugucuugaaauucaguuu

SEQ ID NO: 42377 - RNA, 22 nt, Homo sapiens
gucauugagucagggaguaucu

SEQ ID NO: 42378 - RNA, 22 nt, Homo sapiens
gucauggacaaggugugagcca

SEQ ID NO: 42379 - RNA, 22 nt, Homo sapiens
gucaugggguacuacacauggg

SEQ ID NO: 42380 - RNA, 22 nt, Homo sapiens
gucaggugcuuacgcggagauc

SEQ ID NO: 42381 - RNA, 22 nt, Homo sapiens
gucagguauguuccaaaggcgg

SEQ ID NO: 42382 - RNA, 22 nt, Homo sapiens
guagagagaaauacaaagcugu

SEQ ID NO: 42383 - RNA, 22 nt, Homo sapiens
guacacauacauauaugugugu

SEQ ID NO: 42384 - RNA, 22 nt, Homo sapiens
guacacguggcuguguaggagu

SEQ ID NO: 42385 - RNA, 22 nt, Homo sapiens
gguggugguauuucagaaaaug

SEQ ID NO: 42386 - RNA, 17 nt, Homo sapiens
guacucagugaccaugg

SEQ ID NO: 42387 - RNA, 22 nt, Homo sapiens
guacccuauggauauagaugaa

SEQ ID NO: 42388 - RNA, 22 nt, Homo sapiens
guaccugauacaggcgcacggu

SEQ ID NO: 42389 - RNA, 22 nt, Homo sapiens
guaccugggugacaggauuauu

SEQ ID NO: 42390 - RNA, 21 nt, Homo sapiens
gugcagacacacauauaggcu

SEQ ID NO: 42391 - RNA, 21 nt, Homo sapiens
gugcagaugccacagucacuc

SEQ ID NO: 42392 - RNA, 22 nt, Homo sapiens
gugcacaugcgugcgcacauau

SEQ ID NO: 42393 - RNA, 22 nt, Homo sapiens
gugagaugauggguauguuaau

SEQ ID NO: 42394 - RNA, 22 nt, Homo sapiens
gugauuguuaaacugccucucu

SEQ ID NO: 42395 - RNA, 22 nt, Homo sapiens
gugauuuaguagaugcuaguua

SEQ ID NO: 42396 - RNA, 22 nt, Homo sapiens
gugaaucuguuuucuucuguuc

SEQ ID NO: 42397 - RNA, 22 nt, Homo sapiens
gugaauguaaagucaugugacu

SEQ ID NO: 42398 - RNA, 22 nt, Homo sapiens
gugacacagcaagacuccgucu

SEQ ID NO: 42399 - RNA, 22 nt, Homo sapiens
gugacagaguaagacccuguau

SEQ ID NO: 42400 - RNA, 22 nt, Homo sapiens
gugacgucauuguuccuggcuc

SEQ ID NO: 42401 - RNA, 22 nt, Homo sapiens
gugaccagaugggcaggggugu

SEQ ID NO: 42402 - RNA, 22 nt, Homo sapiens
gugagaacugugucuuauaaac

SEQ ID NO: 42403 - RNA, 22 nt, Homo sapiens
gugacugggaguggugaagaua

SEQ ID NO: 42404 - RNA, 20 nt, Homo sapiens
gugacugagcacgggcacag

SEQ ID NO: 42405 - RNA, 22 nt, Homo sapiens
guggcuauuguucccugguugc

SEQ ID NO: 42406 - RNA, 22 nt, Homo sapiens
guggcgagaucauagcucauug

SEQ ID NO: 42407 - RNA, 22 nt, Homo sapiens
guggcuaaagauuuggaaucug

SEQ ID NO: 42408 - RNA, 21 nt, Homo sapiens
guggccuuuggagcaugucag

SEQ ID NO: 42409 - RNA, 22 nt, Homo sapiens
guggcaugaaagcaucugugau

SEQ ID NO: 42410 - RNA, 22 nt, Homo sapiens
guggguaaaucucuguuugagg

SEQ ID NO: 42411 - RNA, 22 nt, Homo sapiens
gugggcaaagcuaguguguaga

SEQ ID NO: 42412 - RNA, 22 nt, Homo sapiens
gugggauggaaaugggcuucag

SEQ ID NO: 42413 - RNA, 22 nt, Homo sapiens
gugcaugucuaugcgagucuaa

SEQ ID NO: 42414 - RNA, 22 nt, Homo sapiens
gugcauacgucuuuauaguagc

SEQ ID NO: 42415 - RNA, 22 nt, Homo sapiens
gugccacugcacuccggccugg

SEQ ID NO: 42416 - RNA, 22 nt, Homo sapiens
gugcucauuuagagagaagcac

SEQ ID NO: 42417 - RNA, 22 nt, Homo sapiens
aaaagagcugagagguauucuu

SEQ ID NO: 42418 - RNA, 22 nt, Homo sapiens
aaaagucuguagugaaagguga

SEQ ID NO: 42419 - RNA, 22 nt, Homo sapiens
aaaagcuuagaugggcuuguau

SEQ ID NO: 42420 - RNA, 22 nt, Homo sapiens
aaaaguucuuugagccuugaca

SEQ ID NO: 42421 - RNA, 22 nt, Homo sapiens
aaacauugaccucauccuggca

SEQ ID NO: 42422 - RNA, 18 nt, Homo sapiens
aaacagugucucuuucug

SEQ ID NO: 42423 - RNA, 22 nt, Homo sapiens
aaagucacuggagaaggaauau

SEQ ID NO: 42424 - RNA, 22 nt, Homo sapiens
aaagugcaguacuucguauauu

SEQ ID NO: 42425 - RNA, 22 nt, Homo sapiens
aaagugacuuagugccccauuu

SEQ ID NO: 42426 - RNA, 22 nt, Homo sapiens
aaagugcugagauuguaggcau

SEQ ID NO: 42427 - RNA, 22 nt, Homo sapiens
aaagugucuguuccuagcauga

SEQ ID NO: 42428 - RNA, 22 nt, Homo sapiens
aaagcugucaaggcaggaggcu

SEQ ID NO: 42429 - RNA, 22 nt, Homo sapiens
aaagugccugacucauaguuag

SEQ ID NO: 42430 - RNA, 20 nt, Homo sapiens
aaaggcugugagaacgagau

SEQ ID NO: 42431 - RNA, 22 nt, Homo sapiens
aaagucuguuuugucagagacu

SEQ ID NO: 42432 - RNA, 21 nt, Homo sapiens
aacagugcugaacagacaccu

SEQ ID NO: 42433 - RNA, 22 nt, Homo sapiens
aacagugcuguuauaaauguac

SEQ ID NO: 42434 - RNA, 22 nt, Homo sapiens
aacagugcuucauucacacauu

SEQ ID NO: 42435 - RNA, 22 nt, Homo sapiens
aaccuacauucuuaacuguugc

SEQ ID NO: 42436 - RNA, 22 nt, Homo sapiens
aaccacauggcucaguggacau

SEQ ID NO: 42437 - RNA, 22 nt, Homo sapiens
aacagaccuagauaguauaguc

SEQ ID NO: 42438 - RNA, 22 nt, Homo sapiens
aacagcacacccgcugcuucca

SEQ ID NO: 42439 - RNA, 22 nt, Homo sapiens
aaaugcaugaauaagcucgugu

SEQ ID NO: 42440 - RNA, 22 nt, Homo sapiens
aagaugguauuucauuaguuuu

SEQ ID NO: 42441 - RNA, 21 nt, Homo sapiens
aagcacauugaguguguguga

SEQ ID NO: 42442 - RNA, 22 nt, Homo sapiens
aagcaggugugggaggaaaugg

SEQ ID NO: 42443 - RNA, 22 nt, Homo sapiens
aagcaggugaugagugggugug

SEQ ID NO: 42444 - RNA, 23 nt, Homo sapiens
aagcaugcacagcuguuuguggu

SEQ ID NO: 42445 - RNA, 22 nt, Homo sapiens
aaggcaguggcagaagauguca

SEQ ID NO: 42446 - RNA, 22 nt, Homo sapiens
aaggagugugauucuucaguuu

SEQ ID NO: 42447 - RNA, 22 nt, Homo sapiens
aaggcauggugacuauuuaggc

SEQ ID NO: 42448 - RNA, 22 nt, Homo sapiens
aaggcuguucauuuagcacagu

SEQ ID NO: 42449 - RNA, 22 nt, Homo sapiens
aagugcuggccuacucaaucga

SEQ ID NO: 42450 - RNA, 22 nt, Homo sapiens
aagguggaguugacaauuuuca

SEQ ID NO: 42451 - RNA, 16 nt, Homo sapiens
agcuggaauuacaggc

SEQ ID NO: 42452 - RNA, 17 nt, Homo sapiens
agcuggaauuacgggag

SEQ ID NO: 42453 - RNA, 22 nt, Homo sapiens
agcuggacuugauaaaugaaua

SEQ ID NO: 42454 - RNA, 23 nt, Homo sapiens
agcugguacuagaggcuugcgcc

SEQ ID NO: 42455 - RNA, 22 nt, Homo sapiens
agcuggucuacguguguaugag

SEQ ID NO: 42456 - RNA, 22 nt, Homo sapiens
agcuuuuugggcagcuauugac

SEQ ID NO: 42457 - RNA, 22 nt, Homo sapiens
aaaugcucuuuaugaaguugga

SEQ ID NO: 42458 - RNA, 22 nt, Homo sapiens
aggaagugugcaauuaauuucu

SEQ ID NO: 42459 - RNA, 22 nt, Homo sapiens
aggaagugucuucuuuuaggca

SEQ ID NO: 42460 - RNA, 22 nt, Homo sapiens
aggaagguaaacuaacuugccu

SEQ ID NO: 42461 - RNA, 22 nt, Homo sapiens
aggaagacauauagaacuaaaa

SEQ ID NO: 42462 - RNA, 22 nt, Homo sapiens
aaaugcuguuccaggaccuauc

SEQ ID NO: 42463 - RNA, 22 nt, Homo sapiens
aggugcaugcuucacuggauau

SEQ ID NO: 42464 - RNA, 22 nt, Homo sapiens
aggugcugagcagagaauccug

SEQ ID NO: 42465 - RNA, 22 nt, Homo sapiens
aggugguuuuucaacacacacu

SEQ ID NO: 42466 - RNA, 22 nt, Homo sapiens
aggugguuuuaggcagagacau

SEQ ID NO: 42467 - RNA, 21 nt, Homo sapiens
agguuguguuuccucuuacuu

SEQ ID NO: 42468 - RNA, 22 nt, Homo sapiens
aguacaucuggcuggauagaua

SEQ ID NO: 42469 - RNA, 22 nt, Homo sapiens
aguaagucucaagguaggguag

SEQ ID NO: 42470 - RNA, 22 nt, Homo sapiens
aguaccauuacucacuuauuuu

SEQ ID NO: 42471 - RNA, 22 nt, Homo sapiens
aguaacacaccugcauggugug

SEQ ID NO: 42472 - RNA, 22 nt, Homo sapiens
acuggauguuagggauuuuauu

SEQ ID NO: 42473 - RNA, 22 nt, Homo sapiens
acuguguguuugucuagcacag

SEQ ID NO: 42474 - RNA, 22 nt, Homo sapiens
agcacgauggggucacgaugag

SEQ ID NO: 42475 - RNA, 22 nt, Homo sapiens
agcagagcauauucauucgggg

SEQ ID NO: 42476 - RNA, 22 nt, Homo sapiens
agcaccauuuauugaaaagaca

SEQ ID NO: 42477 - RNA, 22 nt, Homo sapiens
agcaccguucaaacccagguua

SEQ ID NO: 42478 - RNA, 22 nt, Homo sapiens
agagaucaacugaauuacugga

SEQ ID NO: 42479 - RNA, 22 nt, Homo sapiens
agagaccuguaaaguucaggca

SEQ ID NO: 42480 - RNA, 22 nt, Homo sapiens
agacuagacagaugaacagcac

SEQ ID NO: 42481 - RNA, 22 nt, Homo sapiens
agacuguaaugcauaauuuacu

SEQ ID NO: 42482 - RNA, 22 nt, Homo sapiens
agacacugaaauguauugaaga

SEQ ID NO: 42483 - RNA, 22 nt, Homo sapiens
agacagcuggaguaucauagcu

SEQ ID NO: 42484 - RNA, 22 nt, Homo sapiens
agcaugacauauuguagagaaa

SEQ ID NO: 42485 - RNA, 22 nt, Homo sapiens
agccaguauuuccacagagugg

SEQ ID NO: 42486 - RNA, 22 nt, Homo sapiens
agcagguauuuaagaaacucag

SEQ ID NO: 42487 - RNA, 22 nt, Homo sapiens
agcaucacguagacuuuaccau

SEQ ID NO: 42488 - RNA, 18 nt, Homo sapiens
agcaucacugaucauccu

SEQ ID NO: 42489 - RNA, 22 nt, Homo sapiens
agcaucauaccaaucugguccu

SEQ ID NO: 42490 - RNA, 22 nt, Homo sapiens
agcagcuuugaucugaaugauu

SEQ ID NO: 42491 - RNA, 22 nt, Homo sapiens
agcagguauucgggucaugggg

SEQ ID NO: 42492 - RNA, 22 nt, Homo sapiens
agcagguguggcuuauccugaa

SEQ ID NO: 42493 - RNA, 22 nt, Homo sapiens
agcagguguccacaauguuugc

SEQ ID NO: 42494 - RNA, 22 nt, Homo sapiens
agcaggucuuaacuugugaggu

SEQ ID NO: 42495 - RNA, 22 nt, Homo sapiens
agcagcaugcaaauggacuaau

SEQ ID NO: 42496 - RNA, 22 nt, Homo sapiens
agcagcgacacccuguggugag

SEQ ID NO: 42497 - RNA, 20 nt, Homo sapiens
agcagccacagauuccucag

SEQ ID NO: 42498 - RNA, 17 nt, Homo sapiens
agcagcccauaucccca

SEQ ID NO: 42499 - RNA, 22 nt, Homo sapiens
agcagauguuuagugagcgccu

SEQ ID NO: 42500 - RNA, 22 nt, Homo sapiens
agcagcaauuuuguaugguuua

SEQ ID NO: 42501 - RNA, 22 nt, Homo sapiens
agcagcacaucccuuucuggcc

SEQ ID NO: 42502 - RNA, 21 nt, Homo sapiens
agcagaguggcagcucuuuug

SEQ ID NO: 42503 - RNA, 22 nt, Homo sapiens
agcagcaccaaacagacuaaga

SEQ ID NO: 42504 - RNA, 22 nt, Homo sapiens
agcagcauauuuuuauaaugua

SEQ ID NO: 42505 - RNA, 22 nt, Homo sapiens
acagguacacagaauauccaga

SEQ ID NO: 42506 - RNA, 22 nt, Homo sapiens
acaggagugggauuugaguccu

SEQ ID NO: 42507 - RNA, 22 nt, Homo sapiens
acagcagugccccacucuacug

SEQ ID NO: 42508 - RNA, 21 nt, Homo sapiens
acaguaguaauaguguagcca

SEQ ID NO: 42509 - RNA, 22 nt, Homo sapiens
acaguagaaaacaauggauuug

SEQ ID NO: 42510 - RNA, 22 nt, Homo sapiens
acacuggguaacauaucuguua

SEQ ID NO: 42511 - RNA, 22 nt, Homo sapiens
acacgugcguauauguacguau

SEQ ID NO: 42512 - RNA, 22 nt, Homo sapiens
acacugucucuugcugaccaug

SEQ ID NO: 42513 - RNA, 22 nt, Homo sapiens
acacauacacauaugguguaua

SEQ ID NO: 42514 - RNA, 22 nt, Homo sapiens
acacaugugcguagacucuuua

SEQ ID NO: 42515 - RNA, 22 nt, Homo sapiens
acacaugugaaaaaaauguuac

SEQ ID NO: 42516 - RNA, 21 nt, Homo sapiens
acaaagcuggagggagacugc

SEQ ID NO: 42517 - RNA, 16 nt, Homo sapiens
acaaagcuggcuaucu

SEQ ID NO: 42518 - RNA, 22 nt, Homo sapiens
aauugcauaugcaguagaucua

SEQ ID NO: 42519 - RNA, 17 nt, Homo sapiens
aaguggcuuguucacca

SEQ ID NO: 42520 - RNA, 22 nt, Homo sapiens
acacaguaaauauguauugaau

SEQ ID NO: 42521 - RNA, 22 nt, Homo sapiens
aauucacuuguggcagauccuu

SEQ ID NO: 42522 - RNA, 22 nt, Homo sapiens
aauaaagucugaagugugcuua

SEQ ID NO: 42523 - RNA, 18 nt, Homo sapiens
acuggaauuaaacuuuuu

SEQ ID NO: 42524 - RNA, 22 nt, Homo sapiens
accugagauuacaggugcuggc

SEQ ID NO: 42525 - RNA, 20 nt, Homo sapiens
accgggugaaacccuaucuc

SEQ ID NO: 42526 - RNA, 22 nt, Homo sapiens
accugagacuaggcauuuuaua

SEQ ID NO: 42527 - RNA, 22 nt, Homo sapiens
accuguagcagacuuaauauuu

SEQ ID NO: 42528 - RNA, 22 nt, Homo sapiens
acagugacagaaagcugauuau

SEQ ID NO: 42529 - RNA, 22 nt, Homo sapiens
acggcaguguggugcggucagg

SEQ ID NO: 42530 - RNA, 22 nt, Homo sapiens
acuacauaugacaucuucuuua

SEQ ID NO: 42531 - RNA, 22 nt, Homo sapiens
acggaacugcuccauucuuugc

SEQ ID NO: 42532 - RNA, 22 nt, Homo sapiens
acgcagcacauucacagcuaug

SEQ ID NO: 42533 - RNA, 22 nt, Homo sapiens
aucaaacugcaaggcagcagca

SEQ ID NO: 42534 - RNA, 22 nt, Homo sapiens
aucaaagcagcauggcccaguc

SEQ ID NO: 42535 - RNA, 22 nt, Homo sapiens
aucacagaacuuugagcagaga

SEQ ID NO: 42536 - RNA, 20 nt, Homo sapiens
auaugcagacacauacauac

SEQ ID NO: 42537 - RNA, 22 nt, Homo sapiens
auaucacaaacaagucuguacu

SEQ ID NO: 42538 - RNA, 22 nt, Homo sapiens
auauaugcuaagugcuaauaaa

SEQ ID NO: 42539 - RNA, 22 nt, Homo sapiens
auaucaacaucgugucauuagu

SEQ ID NO: 42540 - RNA, 22 nt, Homo sapiens
aucauagcucacugcagccucg

SEQ ID NO: 42541 - RNA, 22 nt, Homo sapiens
aucccugugacgagcaucccua

SEQ ID NO: 42542 - RNA, 22 nt, Homo sapiens
aucccuguaacuagcagccccu

SEQ ID NO: 42543 - RNA, 22 nt, Homo sapiens
aucccaguaaaaauggcuucua

SEQ ID NO: 42544 - RNA, 22 nt, Homo sapiens
aucagcagcaugaaaacaggcu

SEQ ID NO: 42545 - RNA, 21 nt, Homo sapiens
aucagagacccaggcuuccuc

SEQ ID NO: 42546 - RNA, 22 nt, Homo sapiens
aucccuguguccagcaccugug

SEQ ID NO: 42547 - RNA, 22 nt, Homo sapiens
aucgcaccauugcacuccagca

SEQ ID NO: 42548 - RNA, 20 nt, Homo sapiens
aucguggccugaggagauac

SEQ ID NO: 42549 - RNA, 22 nt, Homo sapiens
aucugcaaagcugggcugagac

SEQ ID NO: 42550 - RNA, 20 nt, Homo sapiens
auagcagcaugauuuauaau

SEQ ID NO: 42551 - RNA, 20 nt, Homo sapiens
auagcagcaugauuuauagu

SEQ ID NO: 42552 - RNA, 22 nt, Homo sapiens
auagcagcucacuuauuuaugg

SEQ ID NO: 42553 - RNA, 22 nt, Homo sapiens
auagcagaauuuggucaagucu

SEQ ID NO: 42554 - RNA, 22 nt, Homo sapiens
auagcagaagaagggacaauuc

SEQ ID NO: 42555 - RNA, 22 nt, Homo sapiens
auagcacaguguguguacacca

SEQ ID NO: 42556 - RNA, 22 nt, Homo sapiens
auacccaguaguggaauugcua

SEQ ID NO: 42557 - RNA, 22 nt, Homo sapiens
auacuagucaagaauguaugag

SEQ ID NO: 42558 - RNA, 22 nt, Homo sapiens
auacugguuuuugucaugugga

SEQ ID NO: 42559 - RNA, 22 nt, Homo sapiens
auagaguccugcucgaguugcu

SEQ ID NO: 42560 - RNA, 20 nt, Homo sapiens
auagaccauugguagguagg

SEQ ID NO: 42561 - RNA, 22 nt, Homo sapiens
auagagguagacagaggggaaa

SEQ ID NO: 42562 - RNA, 22 nt, Homo sapiens
agucaacaucaugaaguggaaa

SEQ ID NO: 42563 - RNA, 20 nt, Homo sapiens
aguauucacuuuuuucaugg

SEQ ID NO: 42564 - RNA, 22 nt, Homo sapiens
aguaccauuagauuaggaugac

SEQ ID NO: 42565 - RNA, 22 nt, Homo sapiens
aguaucacaagguguacaccca

SEQ ID NO: 42566 - RNA, 22 nt, Homo sapiens
agucacaugcauuuucuucaau

SEQ ID NO: 42567 - RNA, 22 nt, Homo sapiens
auacaaggaaugaagagauuug

SEQ ID NO: 42568 - RNA, 22 nt, Homo sapiens
auacaagugccauguuggugug

SEQ ID NO: 42569 - RNA, 22 nt, Homo sapiens
auacacgugccauguugguaug

SEQ ID NO: 42570 - RNA, 19 nt, Homo sapiens
auacacguguauacauaca

SEQ ID NO: 42571 - RNA, 22 nt, Homo sapiens
auacacauuccugggccucacc

SEQ ID NO: 42572 - RNA, 22 nt, Homo sapiens
auacacgugcagaacaugcagg

SEQ ID NO: 42573 - RNA, 22 nt, Homo sapiens
auacauguuucauguuggugug

SEQ ID NO: 42574 - RNA, 22 nt, Homo sapiens
auacaugugucauguugguuug

SEQ ID NO: 42575 - RNA, 22 nt, Homo sapiens
auacaugugccauguugguuug

SEQ ID NO: 42576 - RNA, 22 nt, Homo sapiens
auacaugugccauguugguaug

SEQ ID NO: 42577 - RNA, 22 nt, Homo sapiens
augcuacauucuacaauuaggc

SEQ ID NO: 42578 - RNA, 22 nt, Homo sapiens
augccaguguccagaguggguu

SEQ ID NO: 42579 - RNA, 22 nt, Homo sapiens
augccuaagacccuguggggga

SEQ ID NO: 42580 - RNA, 19 nt, Homo sapiens
augcugguguugcucaaac

SEQ ID NO: 42581 - RNA, 22 nt, Homo sapiens
augcuguuuuguagcucccucu

SEQ ID NO: 42582 - RNA, 22 nt, Homo sapiens
augccaagaugagcacgcgucu

SEQ ID NO: 42583 - RNA, 22 nt, Homo sapiens
augcacaguccagcccaugugg

SEQ ID NO: 42584 - RNA, 22 nt, Homo sapiens
augcacauggcuaacuuuuuuc

SEQ ID NO: 42585 - RNA, 22 nt, Homo sapiens
aucugcauucccauguuuauug

SEQ ID NO: 42586 - RNA, 22 nt, Homo sapiens
augagguaauaaguccuuggaa

SEQ ID NO: 42587 - RNA, 22 nt, Homo sapiens
augagggaagcucacgugucca

SEQ ID NO: 42588 - RNA, 21 nt, Homo sapiens
augagguguacuguggugaaa

SEQ ID NO: 42589 - RNA, 22 nt, Homo sapiens
augaggugcagaggaaaugagu

SEQ ID NO: 42590 - RNA, 22 nt, Homo sapiens
augauuuuuguaucgccugaug

SEQ ID NO: 42591 - RNA, 22 nt, Homo sapiens
augugacugauggagaauaugu

SEQ ID NO: 42592 - RNA, 18 nt, Homo sapiens
auguggcuuuugaaggcu

SEQ ID NO: 42593 - RNA, 22 nt, Homo sapiens
augugggaggaauguguuucca

SEQ ID NO: 42594 - RNA, 22 nt, Homo sapiens
auguggcauuucucauucauuu

SEQ ID NO: 42595 - RNA, 22 nt, Homo sapiens
augugaccaucucuccacuaau

SEQ ID NO: 42596 - RNA, 22 nt, Homo sapiens
auguccaugagcacauguauca

SEQ ID NO: 42597 - RNA, 22 nt, Homo sapiens
auguauggagauauuuuugguu

SEQ ID NO: 42598 - RNA, 22 nt, Homo sapiens
auguaugagaguuccagcugau

SEQ ID NO: 42599 - RNA, 22 nt, Homo sapiens
auguagauaucaagaggcauau

SEQ ID NO: 42600 - RNA, 22 nt, Homo sapiens
augggugaguaugaguugacuu

SEQ ID NO: 42601 - RNA, 18 nt, Homo sapiens
auggguguuggaaaauga

SEQ ID NO: 42602 - RNA, 22 nt, Homo sapiens
auggcuuuguguucagagcuga

SEQ ID NO: 42603 - RNA, 22 nt, Homo sapiens
auggagugagaauggagguucc

SEQ ID NO: 42604 - RNA, 19 nt, Homo sapiens
auggauacauuuucugcua

SEQ ID NO: 42605 - RNA, 22 nt, Homo sapiens
auggacguagauucucaaggau

SEQ ID NO: 42606 - RNA, 22 nt, Homo sapiens
ugugucuccugaaaauucacau

SEQ ID NO: 42607 - RNA, 22 nt, Homo sapiens
uguguuugauaaguccauaguu

SEQ ID NO: 42608 - RNA, 22 nt, Homo sapiens
uguguaaauaugauagaggaau

SEQ ID NO: 42609 - RNA, 22 nt, Homo sapiens
uguguaauacucuaaugaugca

SEQ ID NO: 42610 - RNA, 22 nt, Homo sapiens
uguguacugcagaguauucugu

SEQ ID NO: 42611 - RNA, 22 nt, Homo sapiens
ugugucuugaauuuuguaugua

SEQ ID NO: 42612 - RNA, 22 nt, Homo sapiens
uguguacaucucuacacacaug

SEQ ID NO: 42613 - RNA, 22 nt, Homo sapiens
ugugguauuagguguaguaucu

SEQ ID NO: 42614 - RNA, 22 nt, Homo sapiens
uguuauguuguuugagaaaguc

SEQ ID NO: 42615 - RNA, 22 nt, Homo sapiens
uuaaagugaucauaaggauagu

SEQ ID NO: 42616 - RNA, 22 nt, Homo sapiens
uuaaaguguuugcagacaggug

SEQ ID NO: 42617 - RNA, 22 nt, Homo sapiens
uuaaacucaucacccagguagu

SEQ ID NO: 42618 - RNA, 22 nt, Homo sapiens
uguuuguuugugauacgguaca

SEQ ID NO: 42619 - RNA, 21 nt, Homo sapiens
uguuuuugcuguguaucucuc

SEQ ID NO: 42620 - RNA, 22 nt, Homo sapiens
uuaagcaaagguaacaugagaa

SEQ ID NO: 42621 - RNA, 21 nt, Homo sapiens
uguagcagcaugauucauagu

SEQ ID NO: 42622 - RNA, 22 nt, Homo sapiens
uguagcaaauaaaagucuggau

SEQ ID NO: 42623 - RNA, 22 nt, Homo sapiens
uguacacauaugugggguacau

SEQ ID NO: 42624 - RNA, 22 nt, Homo sapiens
uguaauguuucaucauuauuaa

SEQ ID NO: 42625 - RNA, 22 nt, Homo sapiens
uguagauaucauuagugcugug

SEQ ID NO: 42626 - RNA, 22 nt, Homo sapiens
uguagacaccaaagacagcaua

SEQ ID NO: 42627 - RNA, 19 nt, Homo sapiens
uguaccagcaagucuuuuc

SEQ ID NO: 42628 - RNA, 22 nt, Homo sapiens
uguacuagaaauuaaggcaggg

SEQ ID NO: 42629 - RNA, 19 nt, Homo sapiens
uggugccuuguucuuggau

SEQ ID NO: 42630 - RNA, 22 nt, Homo sapiens
uggugccgugguccuggggcca

SEQ ID NO: 42631 - RNA, 22 nt, Homo sapiens
uggugagaaaagaugucuuugu

SEQ ID NO: 42632 - RNA, 22 nt, Homo sapiens
uguaaccauccagagucccagg

SEQ ID NO: 42633 - RNA, 20 nt, Homo sapiens
uggugguuuuaugugguuua

SEQ ID NO: 42634 - RNA, 22 nt, Homo sapiens
uguggcauuuucagaaaggaug

SEQ ID NO: 42635 - RNA, 17 nt, Homo sapiens
uguggcucuuaugcuga

SEQ ID NO: 42636 - RNA, 22 nt, Homo sapiens
uguggcugguggcaccuuuucc

SEQ ID NO: 42637 - RNA, 22 nt, Homo sapiens
uguggcuuuuucuuggcugagg

SEQ ID NO: 42638 - RNA, 22 nt, Homo sapiens
uguguaaauacaagugcuugaa

SEQ ID NO: 42639 - RNA, 22 nt, Homo sapiens
ugugguuuuucacauuuagaga

SEQ ID NO: 42640 - RNA, 22 nt, Homo sapiens
ugugguuuuuuucuccaauagg

SEQ ID NO: 42641 - RNA, 22 nt, Homo sapiens
ugugguuuuauaaacgugaccu

SEQ ID NO: 42642 - RNA, 22 nt, Homo sapiens
ugugccuucuaagaaggagucu

SEQ ID NO: 42643 - RNA, 22 nt, Homo sapiens
ugugcucaucucagucaacugu

SEQ ID NO: 42644 - RNA, 22 nt, Homo sapiens
ugugcugaucgggcacgguguc

SEQ ID NO: 42645 - RNA, 22 nt, Homo sapiens
ugugcuugaauuuaguagcuua

SEQ ID NO: 42646 - RNA, 22 nt, Homo sapiens
ugugauugauauauuuacagaa

SEQ ID NO: 42647 - RNA, 22 nt, Homo sapiens
ugugcauauaaguguguauaua

SEQ ID NO: 42648 - RNA, 22 nt, Homo sapiens
uucccugaguaucuuaccaugg

SEQ ID NO: 42649 - RNA, 22 nt, Homo sapiens
uucccugaaauauucacuuuca

SEQ ID NO: 42650 - RNA, 22 nt, Homo sapiens
uucccagagaaaaggguuucuu

SEQ ID NO: 42651 - RNA, 22 nt, Homo sapiens
uucccgggguggaaugcaguga

SEQ ID NO: 42652 - RNA, 22 nt, Homo sapiens
uucaugucuuggcuguuagagu

SEQ ID NO: 42653 - RNA, 22 nt, Homo sapiens
uucaugugagucuguauuaacu

SEQ ID NO: 42654 - RNA, 22 nt, Homo sapiens
uucauguaauauauuucaggcc

SEQ ID NO: 42655 - RNA, 22 nt, Homo sapiens
uucauguaauauuucacagcuu

SEQ ID NO: 42656 - RNA, 22 nt, Homo sapiens
uucaucaguugagcugguugcu

SEQ ID NO: 42657 - RNA, 22 nt, Homo sapiens
uucauaguuuauacugauauuu

SEQ ID NO: 42658 - RNA, 22 nt, Homo sapiens
uucauagucuaauuuuuuccac

SEQ ID NO: 42659 - RNA, 22 nt, Homo sapiens
uucaucagcuguagaugucaug

SEQ ID NO: 42660 - RNA, 22 nt, Homo sapiens
uucaucacagucuccgaugccc

SEQ ID NO: 42661 - RNA, 18 nt, Homo sapiens
uucauaguagcaugauuu

SEQ ID NO: 42662 - RNA, 22 nt, Homo sapiens
uucuuaguggcaccacuuuuuu

SEQ ID NO: 42663 - RNA, 22 nt, Homo sapiens
uucuggcuaugggauacuaaau

SEQ ID NO: 42664 - RNA, 22 nt, Homo sapiens
uucugcuagucugucagaucuu

SEQ ID NO: 42665 - RNA, 19 nt, Homo sapiens
uucugguguuuuaagccaa

SEQ ID NO: 42666 - RNA, 22 nt, Homo sapiens
uucucauggaacaucuguacug

SEQ ID NO: 42667 - RNA, 22 nt, Homo sapiens
uucucgcuuuuuccaccuguau

SEQ ID NO: 42668 - RNA, 22 nt, Homo sapiens
uucucagcccccugacagucag

SEQ ID NO: 42669 - RNA, 22 nt, Homo sapiens
uuacauguggugugaagaagag

SEQ ID NO: 42670 - RNA, 22 nt, Homo sapiens
uuacaucaucacauuaguuugc

SEQ ID NO: 42671 - RNA, 22 nt, Homo sapiens
uuacagucaccugggggacaua

SEQ ID NO: 42672 - RNA, 22 nt, Homo sapiens
uuacagauggcacacucaaggg

SEQ ID NO: 42673 - RNA, 22 nt, Homo sapiens
uuacaguaugaguaagaguucu

SEQ ID NO: 42674 - RNA, 22 nt, Homo sapiens
uuacagcugggugugucuggua

SEQ ID NO: 42675 - RNA, 17 nt, Homo sapiens
uuacaggugcugagagu

SEQ ID NO: 42676 - RNA, 18 nt, Homo sapiens
uuauaugcauguguagga

SEQ ID NO: 42677 - RNA, 22 nt, Homo sapiens
uuauaggcaggugguguagaug

SEQ ID NO: 42678 - RNA, 20 nt, Homo sapiens
uuauagcuacaucuugacug

SEQ ID NO: 42679 - RNA, 22 nt, Homo sapiens
uuauagcuaacaucugugaaaa

SEQ ID NO: 42680 - RNA, 21 nt, Homo sapiens
uuauaguggcaugauuuauaa

SEQ ID NO: 42681 - RNA, 22 nt, Homo sapiens
uuaucauagugcaguuuucuga

SEQ ID NO: 42682 - RNA, 22 nt, Homo sapiens
uuaugcaucuuccacacucauu

SEQ ID NO: 42683 - RNA, 22 nt, Homo sapiens
uuaugccagugauuauaagggc

SEQ ID NO: 42684 - RNA, 22 nt, Homo sapiens
uucaaaguuggaggacaaacug

SEQ ID NO: 42685 - RNA, 23 nt, Homo sapiens
uucaacagguagacccucccugc

SEQ ID NO: 42686 - RNA, 22 nt, Homo sapiens
uucaaguaagaaagacaucagg

SEQ ID NO: 42687 - RNA, 19 nt, Homo sapiens
uuacauccauugcauuuca

SEQ ID NO: 42688 - RNA, 21 nt, Homo sapiens
uucauaaggcuucucuccugu

SEQ ID NO: 42689 - RNA, 22 nt, Homo sapiens
uucagguaauuaugguuugucu

SEQ ID NO: 42690 - RNA, 22 nt, Homo sapiens
uucagcaguggccaguggaaau

SEQ ID NO: 42691 - RNA, 18 nt, Homo sapiens
uuuggcuguucaugacuc

SEQ ID NO: 42692 - RNA, 22 nt, Homo sapiens
uuuggcuuaagauugacugcaa

SEQ ID NO: 42693 - RNA, 22 nt, Homo sapiens
uuuggcuuugagaagcagugga

SEQ ID NO: 42694 - RNA, 22 nt, Homo sapiens
uuugggcuuuuaaucuagagca

SEQ ID NO: 42695 - RNA, 18 nt, Homo sapiens
uuugugcuccacaaagga

SEQ ID NO: 42696 - RNA, 22 nt, Homo sapiens
uuugugcaaacuaggauugcga

SEQ ID NO: 42697 - RNA, 19 nt, Homo sapiens
uuuguccugcccuuucuca

SEQ ID NO: 42698 - RNA, 22 nt, Homo sapiens
uuugguguauaaaaaugcuagu

SEQ ID NO: 42699 - RNA, 22 nt, Homo sapiens
uuugguguauauguaaacuaug

SEQ ID NO: 42700 - RNA, 20 nt, Homo sapiens
uuugcagaaucuaagaagag

SEQ ID NO: 42701 - RNA, 22 nt, Homo sapiens
uuugcacuuuaauauaauguga

SEQ ID NO: 42702 - RNA, 22 nt, Homo sapiens
uuugcacuucugagugugacau

SEQ ID NO: 42703 - RNA, 22 nt, Homo sapiens
uuugauuguacuaaaauuguac

SEQ ID NO: 42704 - RNA, 22 nt, Homo sapiens
uuugauguugauacuaccuuca

SEQ ID NO: 42705 - RNA, 18 nt, Homo sapiens
uuugacugguguccuuau

SEQ ID NO: 42706 - RNA, 22 nt, Homo sapiens
uuugagcauuagggcaaaggca

SEQ ID NO: 42707 - RNA, 22 nt, Homo sapiens
uuugagcaggcuaaucaauaua

SEQ ID NO: 42708 - RNA, 22 nt, Homo sapiens
uugucacauggggcggcugccc

SEQ ID NO: 42709 - RNA, 22 nt, Homo sapiens
uugugcuuuugagcugagauga

SEQ ID NO: 42710 - RNA, 22 nt, Homo sapiens
uugucaguguucacucaaagcu

SEQ ID NO: 42711 - RNA, 16 nt, Homo sapiens
uuguggcuuuugcaca

SEQ ID NO: 42712 - RNA, 22 nt, Homo sapiens
uugguucaguuuaacgaguaau

SEQ ID NO: 42713 - RNA, 20 nt, Homo sapiens
uuggugaccuguuugguauu

SEQ ID NO: 42714 - RNA, 22 nt, Homo sapiens
uuguaguagcauuauuuauaau

SEQ ID NO: 42715 - RNA, 22 nt, Homo sapiens
uuguauguaaccauuuggcaaa

SEQ ID NO: 42716 - RNA, 22 nt, Homo sapiens
uuguauaguucuauguguuuug

SEQ ID NO: 42717 - RNA, 22 nt, Homo sapiens
uuguauaggcucaguaagaauc

SEQ ID NO: 42718 - RNA, 22 nt, Homo sapiens
uuguauguuucugugcacauga

SEQ ID NO: 42719 - RNA, 22 nt, Homo sapiens
uuucaagugcugucuuagcugu

SEQ ID NO: 42720 - RNA, 22 nt, Homo sapiens
uuucagcguggggugcugaaga

SEQ ID NO: 42721 - RNA, 23 nt, Homo sapiens
uuucaggcaggugaaagaccagc

SEQ ID NO: 42722 - RNA, 22 nt, Homo sapiens
uuucgugucuggucugugaugg

SEQ ID NO: 42723 - RNA, 22 nt, Homo sapiens
uuucuauguugaccagucuaga

SEQ ID NO: 42724 - RNA, 22 nt, Homo sapiens
uuguguaguaccucucacauug

SEQ ID NO: 42725 - RNA, 22 nt, Homo sapiens
uuuagguaauauuaaguagcug

SEQ ID NO: 42726 - RNA, 22 nt, Homo sapiens
uuuauagucaggaacuugagga

SEQ ID NO: 42727 - RNA, 22 nt, Homo sapiens
uuuauggcaugcucccucucaa

SEQ ID NO: 42728 - RNA, 20 nt, Homo sapiens
uuggcagagucuuuagggua

SEQ ID NO: 42729 - RNA, 22 nt, Homo sapiens
uuggucaggagccucccucuuu

SEQ ID NO: 42730 - RNA, 22 nt, Homo sapiens
uuggccaauggugauucccggc

SEQ ID NO: 42731 - RNA, 22 nt, Homo sapiens
uuggccagugucuuuuuuuccu

SEQ ID NO: 42732 - RNA, 22 nt, Homo sapiens
uugguaccccugguguacuaau

SEQ ID NO: 42733 - RNA, 22 nt, Homo sapiens
uugguaguaaucccucacaaaa

SEQ ID NO: 42734 - RNA, 22 nt, Homo sapiens
uugcuauguugcccagucugga

SEQ ID NO: 42735 - RNA, 22 nt, Homo sapiens
uuggaagacauucugucugcua

SEQ ID NO: 42736 - RNA, 22 nt, Homo sapiens
uuggaaaaauccaccuugaucu

SEQ ID NO: 42737 - RNA, 22 nt, Homo sapiens
uuggaaacauuuaugguaacag

SEQ ID NO: 42738 - RNA, 22 nt, Homo sapiens
uugcauugacacaugaagcuca

SEQ ID NO: 42739 - RNA, 20 nt, Homo sapiens
uugccgagagaaagguguua

SEQ ID NO: 42740 - RNA, 22 nt, Homo sapiens
uugcacauuuuuucuggcagaa

SEQ ID NO: 42741 - RNA, 22 nt, Homo sapiens
uugcacauugcaccuuuuguau

SEQ ID NO: 42742 - RNA, 22 nt, Homo sapiens
uugcacuauaggaaaauguguc

SEQ ID NO: 42743 - RNA, 22 nt, Homo sapiens
uugcacuauuaguauagauguc

SEQ ID NO: 42744 - RNA, 22 nt, Homo sapiens
uugcacauggcaggugcucaau

SEQ ID NO: 42745 - RNA, 22 nt, Homo sapiens
uugcacauggcuggggaggccu

SEQ ID NO: 42746 - RNA, 22 nt, Homo sapiens
uugcacauugauuuuguaucuu

SEQ ID NO: 42747 - RNA, 22 nt, Homo sapiens
uugcaaggugcucgaagggcuc

SEQ ID NO: 42748 - RNA, 22 nt, Homo sapiens
uugcauauguugaaccaagcgu

SEQ ID NO: 42749 - RNA, 22 nt, Homo sapiens
uugcauauguugaaccagccuu

SEQ ID NO: 42750 - RNA, 22 nt, Homo sapiens
uugcagcaaauaggaaugagga

SEQ ID NO: 42751 - RNA, 22 nt, Homo sapiens
uugcagcaaagagggaggggca

SEQ ID NO: 42752 - RNA, 22 nt, Homo sapiens
uugcagcaacauggaugaaacu

SEQ ID NO: 42753 - RNA, 22 nt, Homo sapiens
uugcagcauucugguuccuggu

SEQ ID NO: 42754 - RNA, 22 nt, Homo sapiens
uucuugcuguauccucacaugg

SEQ ID NO: 42755 - RNA, 22 nt, Homo sapiens
uucuugcugaauugugcccuuc

SEQ ID NO: 42756 - RNA, 22 nt, Homo sapiens
uucuugguugcucacacccauc

SEQ ID NO: 42757 - RNA, 22 nt, Homo sapiens
uugaagagaaccgcggcuuauu

SEQ ID NO: 42758 - RNA, 22 nt, Homo sapiens
uugaagugaagaacaauaucac

SEQ ID NO: 42759 - RNA, 22 nt, Homo sapiens
uugcaacauuguaaguuuauau

SEQ ID NO: 42760 - RNA, 22 nt, Homo sapiens
uugauguugaggacauaaaccu

SEQ ID NO: 42761 - RNA, 22 nt, Homo sapiens
uugauguguuuccaggauuugu

SEQ ID NO: 42762 - RNA, 22 nt, Homo sapiens
ugaaguagguucucguaucgcc

SEQ ID NO: 42763 - RNA, 22 nt, Homo sapiens
ugaaggacauaaggcagaguga

SEQ ID NO: 42764 - RNA, 22 nt, Homo sapiens
ugaauagagcugcaguggacau

SEQ ID NO: 42765 - RNA, 22 nt, Homo sapiens
ugaauagacacuaaagacugua

SEQ ID NO: 42766 - RNA, 22 nt, Homo sapiens
ugaagugaagacucacagaagg

SEQ ID NO: 42767 - RNA, 22 nt, Homo sapiens
ugaagugaagcaguaguguggg

SEQ ID NO: 42768 - RNA, 22 nt, Homo sapiens
ugaauacuucaaaaaaauagcu

SEQ ID NO: 42769 - RNA, 22 nt, Homo sapiens
ugaacagcuaucuugucagugu

SEQ ID NO: 42770 - RNA, 20 nt, Homo sapiens
ugaacugguuacuuucuguc

SEQ ID NO: 42771 - RNA, 21 nt, Homo sapiens
ugaaccccugcucucaagaaa

SEQ ID NO: 42772 - RNA, 19 nt, Homo sapiens
ucuuugguacgugcuuuga

SEQ ID NO: 42773 - RNA, 22 nt, Homo sapiens
ugacauggagggugcggcugca

SEQ ID NO: 42774 - RNA, 22 nt, Homo sapiens
ugacaacugauuaacuccuuua

SEQ ID NO: 42775 - RNA, 21 nt, Homo sapiens
ugacauguugguuugcugcac

SEQ ID NO: 42776 - RNA, 22 nt, Homo sapiens
ugaaugugauggguuucaugug

SEQ ID NO: 42777 - RNA, 23 nt, Homo sapiens
ugaauguaucgaaugugggaaag

SEQ ID NO: 42778 - RNA, 22 nt, Homo sapiens
ugaauguuugcuuacuuccaua

SEQ ID NO: 42779 - RNA, 22 nt, Homo sapiens
ugaauauguuaauuagcaucau

SEQ ID NO: 42780 - RNA, 20 nt, Homo sapiens
ucucauggagguagagaaua

SEQ ID NO: 42781 - RNA, 22 nt, Homo sapiens
ucucauggcucacccugcauag

SEQ ID NO: 42782 - RNA, 22 nt, Homo sapiens
ucucagcggacaggccggccag

SEQ ID NO: 42783 - RNA, 22 nt, Homo sapiens
uccuuugguucuugucacccca

SEQ ID NO: 42784 - RNA, 22 nt, Homo sapiens
ucgcaccauugcacuccagcca

SEQ ID NO: 42785 - RNA, 22 nt, Homo sapiens
ucuggugugcucuggacuugca

SEQ ID NO: 42786 - RNA, 22 nt, Homo sapiens
ucugguguuauucauguaguuu

SEQ ID NO: 42787 - RNA, 22 nt, Homo sapiens
ucuggguuuuuccauugccggu

SEQ ID NO: 42788 - RNA, 22 nt, Homo sapiens
ucuguaguuaacagcuucagcu

SEQ ID NO: 42789 - RNA, 22 nt, Homo sapiens
ucuguacuccuugaguagugcu

SEQ ID NO: 42790 - RNA, 22 nt, Homo sapiens
ucuguaacauccaccuucuggg

SEQ ID NO: 42791 - RNA, 17 nt, Homo sapiens
ucucccaucccuuucuc

SEQ ID NO: 42792 - RNA, 22 nt, Homo sapiens
ucuccauuguccagaugaggaa

SEQ ID NO: 42793 - RNA, 22 nt, Homo sapiens
ucuccauugaaauggacauaau

SEQ ID NO: 42794 - RNA, 22 nt, Homo sapiens
ucucauggagucaggagcagaa

SEQ ID NO: 42795 - RNA, 21 nt, Homo sapiens
ucucauuacugaugagccaga

SEQ ID NO: 42796 - RNA, 22 nt, Homo sapiens
ucugucuuguccucacccuaga

SEQ ID NO: 42797 - RNA, 22 nt, Homo sapiens
ucugucuugugguuugagugcc

SEQ ID NO: 42798 - RNA, 22 nt, Homo sapiens
ucugucuuugucaggaccagag

SEQ ID NO: 42799 - RNA, 22 nt, Homo sapiens
ucugucuuugccuaaguuuguc

SEQ ID NO: 42800 - RNA, 22 nt, Homo sapiens
aacaggcuccuaggggugcacc

SEQ ID NO: 42801 - RNA, 22 nt, Homo sapiens
aacacggcccgcagagcaagcu

SEQ ID NO: 42802 - RNA, 22 nt, Homo sapiens
ucuuugaguggagcgaggcaga

SEQ ID NO: 42803 - RNA, 21 nt, Homo sapiens
aacagugcuuaguagauguuc

SEQ ID NO: 42804 - RNA, 22 nt, Homo sapiens
aacaguguuuuggguuuucugg

SEQ ID NO: 42805 - RNA, 22 nt, Homo sapiens
aacagugcauucagggauauau

SEQ ID NO: 42806 - RNA, 22 nt, Homo sapiens
uccagaguggugaugcuggggc

SEQ ID NO: 42807 - RNA, 22 nt, Homo sapiens
uccagguuucaugcucuuuauu

SEQ ID NO: 42808 - RNA, 22 nt, Homo sapiens
uccacguggucuaucuguccuu

SEQ ID NO: 42809 - RNA, 18 nt, Homo sapiens
uccacgugcuuuccagau

SEQ ID NO: 42810 - RNA, 22 nt, Homo sapiens
uccaccgugggcugcggggcuc

SEQ ID NO: 42811 - RNA, 19 nt, Homo sapiens
uccaccgcgugcaccucua

SEQ ID NO: 42812 - RNA, 22 nt, Homo sapiens
ucauugguugcguaauuugauu

SEQ ID NO: 42813 - RNA, 22 nt, Homo sapiens
uccacaguggugaggugcagca

SEQ ID NO: 42814 - RNA, 22 nt, Homo sapiens
ucauugcauguuaauuaaacag

SEQ ID NO: 42815 - RNA, 23 nt, Homo sapiens
ucauguauucccuguaaugggua

SEQ ID NO: 42816 - RNA, 21 nt, Homo sapiens
ucaugccacugcacuuuagcc

SEQ ID NO: 42817 - RNA, 20 nt, Homo sapiens
ucaugccacugcgcuccagc

SEQ ID NO: 42818 - RNA, 22 nt, Homo sapiens
uccuguaaucccagcuaccaga

SEQ ID NO: 42819 - RNA, 22 nt, Homo sapiens
ucccagugcuaugcaaaagccu

SEQ ID NO: 42820 - RNA, 22 nt, Homo sapiens
ucccagucuagagccggauugg

SEQ ID NO: 42821 - RNA, 22 nt, Homo sapiens
uccaguguuccucagucacccc

SEQ ID NO: 42822 - RNA, 22 nt, Homo sapiens
uccaugugaaaaggucgugaua

SEQ ID NO: 42823 - RNA, 22 nt, Homo sapiens
uccauaguugcacucuggagcc

SEQ ID NO: 42824 - RNA, 22 nt, Homo sapiens
uccaguuuucuuuccuagggcu

SEQ ID NO: 42825 - RNA, 22 nt, Homo sapiens
ucagugcuuggcacagagagcu

SEQ ID NO: 42826 - RNA, 20 nt, Homo sapiens
ucauacuguggaguaccagg

SEQ ID NO: 42827 - RNA, 22 nt, Homo sapiens
ucaguucauggaggugucugcu

SEQ ID NO: 42828 - RNA, 22 nt, Homo sapiens
ucauacaguaguccucacuugu

SEQ ID NO: 42829 - RNA, 23 nt, Homo sapiens
ucagugucuggauccugcucagu

SEQ ID NO: 42830 - RNA, 22 nt, Homo sapiens
ucagugucugcauucuuauugu

SEQ ID NO: 42831 - RNA, 22 nt, Homo sapiens
ucaguguuuuauccuccagagc

SEQ ID NO: 42832 - RNA, 22 nt, Homo sapiens
ucauaugucauaguaugaucuu

SEQ ID NO: 42833 - RNA, 22 nt, Homo sapiens
ucagcaucacgugggcucccgu

SEQ ID NO: 42834 - RNA, 22 nt, Homo sapiens
ucagcaucacaggcagugagug

SEQ ID NO: 42835 - RNA, 22 nt, Homo sapiens
ucagcaccauguaacaauugau

SEQ ID NO: 42836 - RNA, 22 nt, Homo sapiens
ucagauguuugagaaguauacu

SEQ ID NO: 42837 - RNA, 22 nt, Homo sapiens
ucagaugauuccguugacgaga

SEQ ID NO: 42838 - RNA, 22 nt, Homo sapiens
ucagaugauucuguuguugugu

SEQ ID NO: 42839 - RNA, 22 nt, Homo sapiens
uauuuguccccuccaaaaguca

SEQ ID NO: 42840 - RNA, 22 nt, Homo sapiens
ucaaacacuccauaucgcgauu

SEQ ID NO: 42841 - RNA, 22 nt, Homo sapiens
ucaguagcaugaaaacagacua

SEQ ID NO: 42842 - RNA, 18 nt, Homo sapiens
ucagucacugccuggcuu

SEQ ID NO: 42843 - RNA, 22 nt, Homo sapiens
ucaguagcauugcuuauacagu

SEQ ID NO: 42844 - RNA, 22 nt, Homo sapiens
ucaguaccugagagugggcaga

SEQ ID NO: 42845 - RNA, 20 nt, Homo sapiens
ucagguagaucuuugagguc

SEQ ID NO: 42846 - RNA, 22 nt, Homo sapiens
ucagguagcauuuuggaaacag

SEQ ID NO: 42847 - RNA, 22 nt, Homo sapiens
ucagguagcuagauuaugugag

SEQ ID NO: 42848 - RNA, 23 nt, Homo sapiens
ucagguaggccuagaguauucuu

SEQ ID NO: 42849 - RNA, 20 nt, Homo sapiens
ucagguagggcuucaacauu

SEQ ID NO: 42850 - RNA, 22 nt, Homo sapiens
uggcuguuguuacuaacaguuc

SEQ ID NO: 42851 - RNA, 22 nt, Homo sapiens
uggcuguuuauuucaccugggu

SEQ ID NO: 42852 - RNA, 21 nt, Homo sapiens
uggcuguuuucaugcuagaac

SEQ ID NO: 42853 - RNA, 22 nt, Homo sapiens
uggcuguuuauuucaccugggc

SEQ ID NO: 42854 - RNA, 22 nt, Homo sapiens
uggcuguuuauuucaccuggau

SEQ ID NO: 42855 - RNA, 22 nt, Homo sapiens
uggguaguguaaagcacuccag

SEQ ID NO: 42856 - RNA, 22 nt, Homo sapiens
uggcuuuuccuugaaucugccu

SEQ ID NO: 42857 - RNA, 22 nt, Homo sapiens
ugguaagaucugugagccaggc

SEQ ID NO: 42858 - RNA, 22 nt, Homo sapiens
ugguaucuaagaugcacguugu

SEQ ID NO: 42859 - RNA, 22 nt, Homo sapiens
uggcucauuucuaaacccagcu

SEQ ID NO: 42860 - RNA, 22 nt, Homo sapiens
ugguaaguuuaacaugcauccc

SEQ ID NO: 42861 - RNA, 20 nt, Homo sapiens
ugguaauguaagagaggaga

SEQ ID NO: 42862 - RNA, 22 nt, Homo sapiens
uggucaccuucuugcucugucu

SEQ ID NO: 42863 - RNA, 17 nt, Homo sapiens
ugguagguuuuucuggc

SEQ ID NO: 42864 - RNA, 21 nt, Homo sapiens
uggcuauuucuguggcauaca

SEQ ID NO: 42865 - RNA, 22 nt, Homo sapiens
uggcagcgugaauguggcugaa

SEQ ID NO: 42866 - RNA, 22 nt, Homo sapiens
uggcagcugcuucaugggaugc

SEQ ID NO: 42867 - RNA, 22 nt, Homo sapiens
uggcagcgugaaagacuuuuuc

SEQ ID NO: 42868 - RNA, 22 nt, Homo sapiens
uggcagacaaauuugagcauau

SEQ ID NO: 42869 - RNA, 22 nt, Homo sapiens
uggcacuaugugacaagguuuu

SEQ ID NO: 42870 - RNA, 22 nt, Homo sapiens
uggcaagagcugcauucaucug

SEQ ID NO: 42871 - RNA, 22 nt, Homo sapiens
uggcaagagggaugcaagguuu

SEQ ID NO: 42872 - RNA, 20 nt, Homo sapiens
uggcaagauggcagaauaga

SEQ ID NO: 42873 - RNA, 22 nt, Homo sapiens
uggcaauauccacaauuacuuu

SEQ ID NO: 42874 - RNA, 18 nt, Homo sapiens
uggcaauaugguucuacc

SEQ ID NO: 42875 - RNA, 19 nt, Homo sapiens
uggcaaugucagcagagau

SEQ ID NO: 42876 - RNA, 22 nt, Homo sapiens
uggcaacaucuggggacauguu

SEQ ID NO: 42877 - RNA, 22 nt, Homo sapiens
uggaagguaaguuuugagcauu

SEQ ID NO: 42878 - RNA, 20 nt, Homo sapiens
uggaggucaucugucacuac

SEQ ID NO: 42879 - RNA, 22 nt, Homo sapiens
uggauugaaagcuuuaauauug

SEQ ID NO: 42880 - RNA, 22 nt, Homo sapiens
uggauguacagucaguauuugu

SEQ ID NO: 42881 - RNA, 22 nt, Homo sapiens
uggcaaaaaaccgcaguugccu

SEQ ID NO: 42882 - RNA, 22 nt, Homo sapiens
uggagagugagggccuccuuaa

SEQ ID NO: 42883 - RNA, 18 nt, Homo sapiens
uggagauaagaagaacuu

SEQ ID NO: 42884 - RNA, 22 nt, Homo sapiens
uggagacugaucccucuuuccu

SEQ ID NO: 42885 - RNA, 22 nt, Homo sapiens
uggagagcaaaaucaauccaaa

SEQ ID NO: 42886 - RNA, 22 nt, Homo sapiens
ugcaugaugcugagauuuggga

SEQ ID NO: 42887 - RNA, 22 nt, Homo sapiens
ugccauagcaaugguaagcuga

SEQ ID NO: 42888 - RNA, 22 nt, Homo sapiens
ugcccguaauuccagcacuuug

SEQ ID NO: 42889 - RNA, 22 nt, Homo sapiens
ugccuagaaacacuauuucucc

SEQ ID NO: 42890 - RNA, 21 nt, Homo sapiens
uggaaacuucuagcuuacgua

SEQ ID NO: 42891 - RNA, 22 nt, Homo sapiens
uggaaacuuauguucuucugug

SEQ ID NO: 42892 - RNA, 21 nt, Homo sapiens
uggaacgcaaaugagaugaau

SEQ ID NO: 42893 - RNA, 22 nt, Homo sapiens
ugaucacagcuugacuaaagga

SEQ ID NO: 42894 - RNA, 20 nt, Homo sapiens
ugauauuuucugagcaggaa

SEQ ID NO: 42895 - RNA, 22 nt, Homo sapiens
ugauauguguaaacaauguaua

SEQ ID NO: 42896 - RNA, 22 nt, Homo sapiens
ugauguugaauuguucagcguc

SEQ ID NO: 42897 - RNA, 22 nt, Homo sapiens
ugaugugucaucugagagagug

SEQ ID NO: 42898 - RNA, 21 nt, Homo sapiens
ugauguugaccuaaguaguga

SEQ ID NO: 42899 - RNA, 20 nt, Homo sapiens
ugauugaccagagcaguuuu

SEQ ID NO: 42900 - RNA, 22 nt, Homo sapiens
ugauugacauucuuuggaguau

SEQ ID NO: 42901 - RNA, 22 nt, Homo sapiens
ugaugguuuuauuaauaggacc

SEQ ID NO: 42902 - RNA, 22 nt, Homo sapiens
ugauguaggcauuuaagguuau

SEQ ID NO: 42903 - RNA, 22 nt, Homo sapiens
ugaugacacugauuucuucaau

SEQ ID NO: 42904 - RNA, 22 nt, Homo sapiens
ugaugcugaguggcuauuugaa

SEQ ID NO: 42905 - RNA, 22 nt, Homo sapiens
ugcaccacuacacuccaggcug

SEQ ID NO: 42906 - RNA, 23 nt, Homo sapiens
ugcaccacuacacacucuugggu

SEQ ID NO: 42907 - RNA, 22 nt, Homo sapiens
ugcaccaauucuaaacaguucu

SEQ ID NO: 42908 - RNA, 22 nt, Homo sapiens
ugcaccacacuccauccugggc

SEQ ID NO: 42909 - RNA, 18 nt, Homo sapiens
ugcaauggagaugcagcc

SEQ ID NO: 42910 - RNA, 19 nt, Homo sapiens
ugauuguaagcuuggugag

SEQ ID NO: 42911 - RNA, 22 nt, Homo sapiens
ugauugucucuccugccccauc

SEQ ID NO: 42912 - RNA, 22 nt, Homo sapiens
ugaugguaguucagucaaugua

SEQ ID NO: 42913 - RNA, 18 nt, Homo sapiens
ugcaccaguuuacacuuc

SEQ ID NO: 42914 - RNA, 22 nt, Homo sapiens
ugcaccacugcacugccugggu

SEQ ID NO: 42915 - RNA, 22 nt, Homo sapiens
ugcaguguucuuuagaggaaau

SEQ ID NO: 42916 - RNA, 22 nt, Homo sapiens
ugcaccacugcacuccagcuug

SEQ ID NO: 42917 - RNA, 22 nt, Homo sapiens
ugcaccacugcacuccaggcug

SEQ ID NO: 42918 - RNA, 21 nt, Homo sapiens
ugcauacuucucagaugauua

SEQ ID NO: 42919 - RNA, 22 nt, Homo sapiens
ugcauaggagcagggucuaugu

SEQ ID NO: 42920 - RNA, 19 nt, Homo sapiens
ugcauaggguuacauacuc

SEQ ID NO: 42921 - RNA, 22 nt, Homo sapiens
ugcauaugcagcauuuaugauu

SEQ ID NO: 42922 - RNA, 22 nt, Homo sapiens
ugcauauguauacaugugccau

SEQ ID NO: 42923 - RNA, 22 nt, Homo sapiens
ugcauaugucuuuauaguagca

SEQ ID NO: 42924 - RNA, 22 nt, Homo sapiens
ugaggagugagaaauugguuuc

SEQ ID NO: 42925 - RNA, 22 nt, Homo sapiens
ugagcugagauuaagcugcugc

SEQ ID NO: 42926 - RNA, 22 nt, Homo sapiens
ugaguagaacuccuggagaugu

SEQ ID NO: 42927 - RNA, 22 nt, Homo sapiens
ugaguagaaauaaacgcaaacu

SEQ ID NO: 42928 - RNA, 22 nt, Homo sapiens
ugaguagaacuagucuagagcu

SEQ ID NO: 42929 - RNA, 22 nt, Homo sapiens
ugaguagcuaagacgauaggca

SEQ ID NO: 42930 - RNA, 21 nt, Homo sapiens
ugaguagcuagaacuaggggc

SEQ ID NO: 42931 - RNA, 22 nt, Homo sapiens
ugaguagaagugaagauagugg

SEQ ID NO: 42932 - RNA, 22 nt, Homo sapiens
ugauaugaaucaaucacucuuc

SEQ ID NO: 42933 - RNA, 22 nt, Homo sapiens
ugauaucugaauagauacacaa

SEQ ID NO: 42934 - RNA, 22 nt, Homo sapiens
ugauaguugucagugggggacc

SEQ ID NO: 42935 - RNA, 18 nt, Homo sapiens
ugauaucaucacaauuga

SEQ ID NO: 42936 - RNA, 22 nt, Homo sapiens
ugauaggucacucaacagugag

SEQ ID NO: 42937 - RNA, 22 nt, Homo sapiens
ugauagugccuuuuauaucucu

SEQ ID NO: 42938 - RNA, 19 nt, Homo sapiens
ugaguaucuuuacacaucu

SEQ ID NO: 42939 - RNA, 22 nt, Homo sapiens
ugaguagucuagaguggaaugu

SEQ ID NO: 42940 - RNA, 22 nt, Homo sapiens
ugaguagucagugggcaggaag

SEQ ID NO: 42941 - RNA, 17 nt, Homo sapiens
ugaccacugauucuacu

SEQ ID NO: 42942 - RNA, 22 nt, Homo sapiens
ugacggaggacaccugcggaau

SEQ ID NO: 42943 - RNA, 22 nt, Homo sapiens
ugagaugguaaauuuuuguugu

SEQ ID NO: 42944 - RNA, 22 nt, Homo sapiens
ugagauguaaucucgcucuguc

SEQ ID NO: 42945 - RNA, 23 nt, Homo sapiens
ugagaugucugauugcgaggguc

SEQ ID NO: 42946 - RNA, 22 nt, Homo sapiens
ugagauggaguuucgcuuuugu

SEQ ID NO: 42947 - RNA, 22 nt, Homo sapiens
ugagauggaucuuggauuugaa

SEQ ID NO: 42948 - RNA, 22 nt, Homo sapiens
ugagauggcugaauucagaaua

SEQ ID NO: 42949 - RNA, 22 nt, Homo sapiens
ugagauggguucugguccccug

SEQ ID NO: 42950 - RNA, 22 nt, Homo sapiens
ugagauggcuuuauugcugaau

SEQ ID NO: 42951 - RNA, 21 nt, Homo sapiens
ugagaugugaccagggcauca

SEQ ID NO: 42952 - RNA, 22 nt, Homo sapiens
ugagauguggcuagagagguug

SEQ ID NO: 42953 - RNA, 22 nt, Homo sapiens
ugagaugugaucaccugaaggg

SEQ ID NO: 42954 - RNA, 22 nt, Homo sapiens
ugagauguguccagaucuaguu

SEQ ID NO: 42955 - RNA, 22 nt, Homo sapiens
ugagauguugcucugaaacaag

SEQ ID NO: 42956 - RNA, 22 nt, Homo sapiens
ugagcagugaguguggugcagg

SEQ ID NO: 42957 - RNA, 22 nt, Homo sapiens
ugagccaugggguaaaugugau

SEQ ID NO: 42958 - RNA, 22 nt, Homo sapiens
ugagcugagaucacacuacugu

SEQ ID NO: 42959 - RNA, 22 nt, Homo sapiens
ugagcagagaagugcccugcgc

SEQ ID NO: 42960 - RNA, 22 nt, Homo sapiens
ugagcagaaguuuugauuggcg

SEQ ID NO: 42961 - RNA, 22 nt, Homo sapiens
ugagcagaaagcugcaaggucg

SEQ ID NO: 42962 - RNA, 22 nt, Homo sapiens
ugagcaaaauuuuggacauaga

SEQ ID NO: 42963 - RNA, 22 nt, Homo sapiens
cacuaggcuggagugcaguggc

SEQ ID NO: 42964 - RNA, 22 nt, Homo sapiens
caccuagacuggagugcagugg

SEQ ID NO: 42965 - RNA, 22 nt, Homo sapiens
cagcacauuacaaguacuuggu

SEQ ID NO: 42966 - RNA, 22 nt, Homo sapiens
cacccgugacgcugucugaaau

SEQ ID NO: 42967 - RNA, 22 nt, Homo sapiens
cacccgugcucccuccagcugc

SEQ ID NO: 42968 - RNA, 22 nt, Homo sapiens
caccaaccucaguagcaucugu

SEQ ID NO: 42969 - RNA, 22 nt, Homo sapiens
caccacauuccauugaucaggc

SEQ ID NO: 42970 - RNA, 22 nt, Homo sapiens
caccaggugcccagcacggcca

SEQ ID NO: 42971 - RNA, 22 nt, Homo sapiens
caccagguuggagugcaguggu

SEQ ID NO: 42972 - RNA, 22 nt, Homo sapiens
caacauccaccuccuggguuca

SEQ ID NO: 42973 - RNA, 22 nt, Homo sapiens
cacauugaauuucugaugacaa

SEQ ID NO: 42974 - RNA, 16 nt, Homo sapiens
cacauugcugcauggc

SEQ ID NO: 42975 - RNA, 22 nt, Homo sapiens
caacacagugaaacccgucucu

SEQ ID NO: 42976 - RNA, 22 nt, Homo sapiens
caaauugcuugucuguagugga

SEQ ID NO: 42977 - RNA, 22 nt, Homo sapiens
caaagugcugaaagaggccagg

SEQ ID NO: 42978 - RNA, 22 nt, Homo sapiens
caaagucuucucauuaugucuu

SEQ ID NO: 42979 - RNA, 22 nt, Homo sapiens
cagcugaugucgaaugcacucu

SEQ ID NO: 42980 - RNA, 22 nt, Homo sapiens
cagcuggugcugcaccaguggg

SEQ ID NO: 42981 - RNA, 22 nt, Homo sapiens
cagcuggugggagcuggguucc

SEQ ID NO: 42982 - RNA, 22 nt, Homo sapiens
cagcgaggucugcgucacauug

SEQ ID NO: 42983 - RNA, 22 nt, Homo sapiens
cagcaucauucaucugggguaa

SEQ ID NO: 42984 - RNA, 22 nt, Homo sapiens
cagcccguaaucccagcacuuu

SEQ ID NO: 42985 - RNA, 22 nt, Homo sapiens
cagcaguuguuucggauuggga

SEQ ID NO: 42986 - RNA, 22 nt, Homo sapiens
cagcagguuuuuaucaguuaag

SEQ ID NO: 42987 - RNA, 20 nt, Homo sapiens
cagucaugaagaacugugag

SEQ ID NO: 42988 - RNA, 22 nt, Homo sapiens
cagucacagugacaggaugugg

SEQ ID NO: 42989 - RNA, 22 nt, Homo sapiens
cauacagcuaguaaguguaaga

SEQ ID NO: 42990 - RNA, 22 nt, Homo sapiens
cauaaagauggaggaggccagg

SEQ ID NO: 42991 - RNA, 22 nt, Homo sapiens
caguguuuuuaacaggugcccg

SEQ ID NO: 42992 - RNA, 22 nt, Homo sapiens
auuguacuccagccuaggcaac

SEQ ID NO: 42993 - RNA, 22 nt, Homo sapiens
auuguacuccagccugggcaag

SEQ ID NO: 42994 - RNA, 22 nt, Homo sapiens
auuguacuccagccugggcagc

SEQ ID NO: 42995 - RNA, 22 nt, Homo sapiens
auuguacuccagccugggugac

SEQ ID NO: 42996 - RNA, 22 nt, Homo sapiens
auuggcuuuugaaagucugcga

SEQ ID NO: 42997 - RNA, 22 nt, Homo sapiens
auuguacuuaagccugggugaa

SEQ ID NO: 42998 - RNA, 20 nt, Homo sapiens
auuguccuugauuacacaga

SEQ ID NO: 42999 - RNA, 22 nt, Homo sapiens
auugugucuuguagagagauau

SEQ ID NO: 43000 - RNA, 22 nt, Homo sapiens
auuguuccccggucauuuuugu

SEQ ID NO: 43001 - RNA, 22 nt, Homo sapiens
auuguacuccagccugggcuaa

SEQ ID NO: 43002 - RNA, 22 nt, Homo sapiens
auugcugagacauugcuaaucu

SEQ ID NO: 43003 - RNA, 22 nt, Homo sapiens
auugcuuaagucccuguauuag

SEQ ID NO: 43004 - RNA, 22 nt, Homo sapiens
auuggcagaaaucuuuauagua

SEQ ID NO: 43005 - RNA, 22 nt, Homo sapiens
auuagguuagugcaaaaguaau

SEQ ID NO: 43006 - RNA, 22 nt, Homo sapiens
auuauaugucaucacagacacc

SEQ ID NO: 43007 - RNA, 22 nt, Homo sapiens
auuagguuguugcaaaaguaau

SEQ ID NO: 43008 - RNA, 22 nt, Homo sapiens
cucuuugaggugagcugcccau

SEQ ID NO: 43009 - RNA, 22 nt, Homo sapiens
cugaauguuuucuucuauucug

SEQ ID NO: 43010 - RNA, 22 nt, Homo sapiens
cugaaauguccaucgacugaug

SEQ ID NO: 43011 - RNA, 22 nt, Homo sapiens
cucugguggaagcagggggcaa

SEQ ID NO: 43012 - RNA, 22 nt, Homo sapiens
cucagguaguuccuuauagcaa

SEQ ID NO: 43013 - RNA, 22 nt, Homo sapiens
cucagugguugauuuauuuauc

SEQ ID NO: 43014 - RNA, 22 nt, Homo sapiens
cucaguuuugccuuguuuaagg

SEQ ID NO: 43015 - RNA, 22 nt, Homo sapiens
cucaguguuaaggccaccucug

SEQ ID NO: 43016 - RNA, 22 nt, Homo sapiens
cucacggugcaggcuucuggga

SEQ ID NO: 43017 - RNA, 22 nt, Homo sapiens
cucacggcccugcgcacuggca

SEQ ID NO: 43018 - RNA, 22 nt, Homo sapiens
cucaccuugugauccaccggcc

SEQ ID NO: 43019 - RNA, 22 nt, Homo sapiens
ccugagguagaguuuauauuga

SEQ ID NO: 43020 - RNA, 22 nt, Homo sapiens
ccugagacgaauggagugaaca

SEQ ID NO: 43021 - RNA, 22 nt, Homo sapiens
ccuggaucauugucauucccaa

SEQ ID NO: 43022 - RNA, 22 nt, Homo sapiens
ccugucuugauuaaauuacuua

SEQ ID NO: 43023 - RNA, 22 nt, Homo sapiens
ccuucuuuuguaaggcugaaua

SEQ ID NO: 43024 - RNA, 22 nt, Homo sapiens
ccuuggcacuacugacauugua

SEQ ID NO: 43025 - RNA, 22 nt, Homo sapiens
cucaaagugcugggacuggcug

SEQ ID NO: 43026 - RNA, 22 nt, Homo sapiens
cuauggcuguaaggauaguaac

SEQ ID NO: 43027 - RNA, 22 nt, Homo sapiens
cuaguaaugucugucuuaugga

SEQ ID NO: 43028 - RNA, 18 nt, Homo sapiens
cuaguguuucuugaauca

SEQ ID NO: 43029 - RNA, 22 nt, Homo sapiens
cuagguagcuuuucugucaugu

SEQ ID NO: 43030 - RNA, 22 nt, Homo sapiens
cuaucucaggcccaggcccuug

SEQ ID NO: 43031 - RNA, 22 nt, Homo sapiens
cuauaugucuguuuugguacca

SEQ ID NO: 43032 - RNA, 22 nt, Homo sapiens
cuauggcucugguuauggcugu

SEQ ID NO: 43033 - RNA, 22 nt, Homo sapiens
ccaccuguacuuaagucacuuu

SEQ ID NO: 43034 - RNA, 22 nt, Homo sapiens
ccacccuggagaauuugagguc

SEQ ID NO: 43035 - RNA, 22 nt, Homo sapiens
ccacccuuccauucuuccucuu

SEQ ID NO: 43036 - RNA, 22 nt, Homo sapiens
ccacugggcaguuuauuaucag

SEQ ID NO: 43037 - RNA, 22 nt, Homo sapiens
ccacaguggauuaaaguuacug

SEQ ID NO: 43038 - RNA, 22 nt, Homo sapiens
cauuuugguuaaauagguagcu

SEQ ID NO: 43039 - RNA, 22 nt, Homo sapiens
ccacaaccucaacagcaucuau

SEQ ID NO: 43040 - RNA, 23 nt, Homo sapiens
caucacagagccuuccuugacuc

SEQ ID NO: 43041 - RNA, 22 nt, Homo sapiens
caucacuguugguacaaguaau

SEQ ID NO: 43042 - RNA, 22 nt, Homo sapiens
caucagcaauguaugaggguuc

SEQ ID NO: 43043 - RNA, 22 nt, Homo sapiens
cccaguuuugcuucucaugagg

SEQ ID NO: 43044 - RNA, 22 nt, Homo sapiens
ccccauuguugugguuuuaucu

SEQ ID NO: 43045 - RNA, 22 nt, Homo sapiens
cccagugugcugggugacagcu

SEQ ID NO: 43046 - RNA, 21 nt, Homo sapiens
cccagguucucugaggguaga

SEQ ID NO: 43047 - RNA, 22 nt, Homo sapiens
cccagugaagagaaccuuacga

SEQ ID NO: 43048 - RNA, 22 nt, Homo sapiens
ccauugcacuccagccucggca

SEQ ID NO: 43049 - RNA, 23 nt, Homo sapiens
ccauugcacuccagccucaguga

SEQ ID NO: 43050 - RNA, 22 nt, Homo sapiens
ccauggcaauggucagucuauu

SEQ ID NO: 43051 - RNA, 22 nt, Homo sapiens
ccauggcuucugcauucuguca

SEQ ID NO: 43052 - RNA, 19 nt, Homo sapiens
ccccuguggauaccgaggg

SEQ ID NO: 43053 - RNA, 20 nt, Homo sapiens
ccccguguuuagcauaucau

SEQ ID NO: 43054 - RNA, 22 nt, Homo sapiens
ccggcugugugacugugggcag

SEQ ID NO: 43055 - RNA, 21 nt, Homo sapiens
ccuccauuuguauucuugccc

SEQ ID NO: 43056 - RNA, 22 nt, Homo sapiens
ccucauggagaacaucugcuag

SEQ ID NO: 43057 - RNA, 22 nt, Homo sapiens
cccugacauucggagauguagu

SEQ ID NO: 43058 - RNA, 22 nt, Homo sapiens
cccuguguuguucaaggaucug

SEQ ID NO: 43059 - RNA, 22 nt, Homo sapiens
gcagucaucugaaggcuuaacu

SEQ ID NO: 43060 - RNA, 22 nt, Homo sapiens
gcagucacagggagauggugac

SEQ ID NO: 43061 - RNA, 17 nt, Homo sapiens
gcaguacuuaguaagga

SEQ ID NO: 43062 - RNA, 22 nt, Homo sapiens
gcagguaguuucugacuuuuac

SEQ ID NO: 43063 - RNA, 22 nt, Homo sapiens
gcagaguauagagggcugggcc

SEQ ID NO: 43064 - RNA, 22 nt, Homo sapiens
gauuucacuuucuggaugugca

SEQ ID NO: 43065 - RNA, 22 nt, Homo sapiens
gcagcagugugggcugaaccua

SEQ ID NO: 43066 - RNA, 20 nt, Homo sapiens
gcagcaccauauuucuaaga

SEQ ID NO: 43067 - RNA, 22 nt, Homo sapiens
gauuccacuuucugucucuaug

SEQ ID NO: 43068 - RNA, 22 nt, Homo sapiens
gauuguguucauaggcauguua

SEQ ID NO: 43069 - RNA, 20 nt, Homo sapiens
gcaacauggccagagugaau

SEQ ID NO: 43070 - RNA, 22 nt, Homo sapiens
gauuuguuggccugugagcuag

SEQ ID NO: 43071 - RNA, 22 nt, Homo sapiens
gcccagcguucagggaggggcu

SEQ ID NO: 43072 - RNA, 22 nt, Homo sapiens
gcagugugugaggaauuugggu

SEQ ID NO: 43073 - RNA, 22 nt, Homo sapiens
gccauugcacuccagccucggc

SEQ ID NO: 43074 - RNA, 22 nt, Homo sapiens
gccuaaaguagugguuuaggcu

SEQ ID NO: 43075 - RNA, 22 nt, Homo sapiens
gcccgugagacuggaagcaaga

SEQ ID NO: 43076 - RNA, 22 nt, Homo sapiens
gcccugagauucuuggauucug

SEQ ID NO: 43077 - RNA, 22 nt, Homo sapiens
gcgguuuuaagugaguuucuua

SEQ ID NO: 43078 - RNA, 22 nt, Homo sapiens
gcuacugucuaucugugcuucu

SEQ ID NO: 43079 - RNA, 22 nt, Homo sapiens
gcugcuguggcagauuggauuc

SEQ ID NO: 43080 - RNA, 22 nt, Homo sapiens
gcuggcaaaugguuauaaggcc

SEQ ID NO: 43081 - RNA, 22 nt, Homo sapiens
gcugguguugugaaucaggccg

SEQ ID NO: 43082 - RNA, 22 nt, Homo sapiens
gcuguaguugaggauuuuaaga

SEQ ID NO: 43083 - RNA, 22 nt, Homo sapiens
gcuguauuguugaaggaaaugu

SEQ ID NO: 43084 - RNA, 22 nt, Homo sapiens
gcuguauugacuuuguaucaua

SEQ ID NO: 43085 - RNA, 17 nt, Homo sapiens
gaucacagucgucuccu

SEQ ID NO: 43086 - RNA, 22 nt, Homo sapiens
gaucacauuguuucauacauau

SEQ ID NO: 43087 - RNA, 22 nt, Homo sapiens
gauauguaguaguugaaaaaga

SEQ ID NO: 43088 - RNA, 22 nt, Homo sapiens
gaguaucuuuaaggugguuugg

SEQ ID NO: 43089 - RNA, 22 nt, Homo sapiens
gauaguugugagaacucuuacu

SEQ ID NO: 43090 - RNA, 22 nt, Homo sapiens
gaugagauguucucauggauug

SEQ ID NO: 43091 - RNA, 22 nt, Homo sapiens
gaugagguaguguaccuagucu

SEQ ID NO: 43092 - RNA, 22 nt, Homo sapiens
gaugaugcuagguguuagggcu

SEQ ID NO: 43093 - RNA, 22 nt, Homo sapiens
gaugauguugaauguucucacc

SEQ ID NO: 43094 - RNA, 22 nt, Homo sapiens
gaucuguguuuguaugcauaag

SEQ ID NO: 43095 - RNA, 22 nt, Homo sapiens
gaucugugugauuggaugcauu

SEQ ID NO: 43096 - RNA, 22 nt, Homo sapiens
gagagugcuuggcaucugcuga

SEQ ID NO: 43097 - RNA, 22 nt, Homo sapiens
gagauaaauaggucacaguucu

SEQ ID NO: 43098 - RNA, 22 nt, Homo sapiens
gagaucaaugccuauggcuuuc

SEQ ID NO: 43099 - RNA, 22 nt, Homo sapiens
gagacugagucuugcucuguca

SEQ ID NO: 43100 - RNA, 22 nt, Homo sapiens
gagauggagacuuggccuuaaa

SEQ ID NO: 43101 - RNA, 22 nt, Homo sapiens
gagaugaaaucuugcucuguca

SEQ ID NO: 43102 - RNA, 22 nt, Homo sapiens
gagaugaaguuaaggaucuuua

SEQ ID NO: 43103 - RNA, 22 nt, Homo sapiens
gagguaggaauaaacauuugaa

SEQ ID NO: 43104 - RNA, 22 nt, Homo sapiens
gagguaaguggauuaugagguc

SEQ ID NO: 43105 - RNA, 22 nt, Homo sapiens
gagguacgaaauacacuguacu

SEQ ID NO: 43106 - RNA, 22 nt, Homo sapiens
gagguaggggccuuaaagaugc

SEQ ID NO: 43107 - RNA, 22 nt, Homo sapiens
gagguagguacaauugccacca

SEQ ID NO: 43108 - RNA, 22 nt, Homo sapiens
gagguagugagcagcugaacua

SEQ ID NO: 43109 - RNA, 22 nt, Homo sapiens
gagguaagaaagucaguccuuc

SEQ ID NO: 43110 - RNA, 22 nt, Homo sapiens
gagguggauacauuaaauaaug

SEQ ID NO: 43111 - RNA, 22 nt, Homo sapiens
gaggugauaucucauugugguu

SEQ ID NO: 43112 - RNA, 22 nt, Homo sapiens
gaguaaaugucacuguugcugu

SEQ ID NO: 43113 - RNA, 22 nt, Homo sapiens
gaguagugcugcaguaaacaca

SEQ ID NO: 43114 - RNA, 22 nt, Homo sapiens
gaguagugcugcaguaaacaua

SEQ ID NO: 43115 - RNA, 22 nt, Homo sapiens
gaguaaauguccuagcuucuug

SEQ ID NO: 43116 - RNA, 22 nt, Homo sapiens
gagacggagucucgcucuguca

SEQ ID NO: 43117 - RNA, 22 nt, Homo sapiens
gagacggagucucgcucugucg

SEQ ID NO: 43118 - RNA, 22 nt, Homo sapiens
gagacggagucacgcccuguca

SEQ ID NO: 43119 - RNA, 23 nt, Homo sapiens
gagaccagcuucagaaagcacga

SEQ ID NO: 43120 - RNA, 22 nt, Homo sapiens
gagacugagucuugcuuuguca

SEQ ID NO: 43121 - RNA, 22 nt, Homo sapiens
gagacggagucuugcucuguug

SEQ ID NO: 43122 - RNA, 21 nt, Homo sapiens
gagaaucuuuucagggcaaac

SEQ ID NO: 43123 - RNA, 22 nt, Homo sapiens
gagaagugcgucguuugaugau

SEQ ID NO: 43124 - RNA, 22 nt, Homo sapiens
gacagguuuucuguuucugaaa

SEQ ID NO: 43125 - RNA, 22 nt, Homo sapiens
gacagacacaauugauccauga

SEQ ID NO: 43126 - RNA, 22 nt, Homo sapiens
gaaugguuuacaaguguaaucu

SEQ ID NO: 43127 - RNA, 22 nt, Homo sapiens
gaauagugcugcaagaaacaua

SEQ ID NO: 43128 - RNA, 22 nt, Homo sapiens
gaauacuguccaagagugaugg

SEQ ID NO: 43129 - RNA, 22 nt, Homo sapiens
gaaucaauugaucuaugugucu

SEQ ID NO: 43130 - RNA, 22 nt, Homo sapiens
gaaugcaugaggggaucagaug

SEQ ID NO: 43131 - RNA, 22 nt, Homo sapiens
cuuugguggagucuuuagguuc

SEQ ID NO: 43132 - RNA, 23 nt, Homo sapiens
cuuugguaggaaauuugaauuau

SEQ ID NO: 43133 - RNA, 22 nt, Homo sapiens
cuuguucuccuaagaugaaugc

SEQ ID NO: 43134 - RNA, 22 nt, Homo sapiens
cuuugauuauaaaaggguguuu

SEQ ID NO: 43135 - RNA, 18 nt, Homo sapiens
gaagaaguaggcauggca

SEQ ID NO: 43136 - RNA, 22 nt, Homo sapiens
gaagcagcauucugguuuuugg

SEQ ID NO: 43137 - RNA, 22 nt, Homo sapiens
gaaggagcuuaucugccauuuc

SEQ ID NO: 43138 - RNA, 22 nt, Homo sapiens
gaagguaguuuauagauguggu

SEQ ID NO: 43139 - RNA, 23 nt, Homo sapiens
gaaguaauaaauggauucuuaac

SEQ ID NO: 43140 - RNA, 22 nt, Homo sapiens
gaauaaacuagagaggacugag

SEQ ID NO: 43141 - RNA, 22 nt, Homo sapiens
gaauacugacuauuucaucugg

SEQ ID NO: 43142 - RNA, 22 nt, Homo sapiens
cuucaccaguuuggcagucuca

SEQ ID NO: 43143 - RNA, 19 nt, Homo sapiens
cuuaggugaccaguuccca

SEQ ID NO: 43144 - RNA, 22 nt, Homo sapiens
cuuaagcauugacuuuggacag

SEQ ID NO: 43145 - RNA, 20 nt, Homo sapiens
cuuaaugcagcauuucucag

SEQ ID NO: 43146 - RNA, 19 nt, Homo sapiens
cuguuguacuccaggcauu

SEQ ID NO: 43147 - RNA, 22 nt, Homo sapiens
cuguuugaggguuugcuuucag

SEQ ID NO: 43148 - RNA, 22 nt, Homo sapiens
cugauguagguggucugugauc

SEQ ID NO: 43149 - RNA, 22 nt, Homo sapiens
cugauauuuuucuggcuugugu

SEQ ID NO: 43150 - RNA, 21 nt, Homo sapiens
cugaucacaggugagcugccu

SEQ ID NO: 43151 - RNA, 18 nt, Homo sapiens
cugagucauuccuggguc

SEQ ID NO: 43152 - RNA, 20 nt, Homo sapiens
cugagguugggguccuuccc

SEQ ID NO: 43153 - RNA, 22 nt, Homo sapiens
cuugagcauauucuauauuaaa

SEQ ID NO: 43154 - RNA, 22 nt, Homo sapiens
cuugacaucugucaguuccuca

SEQ ID NO: 43155 - RNA, 22 nt, Homo sapiens
cuugcacuagugcagaggcgcu

SEQ ID NO: 43156 - RNA, 22 nt, Homo sapiens
cuugcagaggcccuggggagag

SEQ ID NO: 43157 - RNA, 22 nt, Homo sapiens
cuugcauuuuggagaaugcuga

SEQ ID NO: 43158 - RNA, 22 nt, Homo sapiens
cuuguacuacuuaggaucugga

SEQ ID NO: 43159 - RNA, 22 nt, Homo sapiens
cuugucacuguuggcuuuagaa

SEQ ID NO: 43160 - RNA, 22 nt, Homo sapiens
cuuggcuuguuguccccugcuc

SEQ ID NO: 43161 - RNA, 22 nt, Homo sapiens
gguggucuuccccuggaguucg

SEQ ID NO: 43162 - RNA, 22 nt, Homo sapiens
ggugagguaggaaaaguuagga

SEQ ID NO: 43163 - RNA, 22 nt, Homo sapiens
ggugauguuugaguugagacag

SEQ ID NO: 43164 - RNA, 22 nt, Homo sapiens
ggugaggaaaguugaguuucua

SEQ ID NO: 43165 - RNA, 22 nt, Homo sapiens
ggugagaaagggauuccuguuc

SEQ ID NO: 43166 - RNA, 22 nt, Homo sapiens
ggucaacaucaucaugguaagu

SEQ ID NO: 43167 - RNA, 22 nt, Homo sapiens
ggucagugcauucuaaaggcaa

SEQ ID NO: 43168 - RNA, 22 nt, Homo sapiens
ggucauguguccaggagguagc

SEQ ID NO: 43169 - RNA, 22 nt, Homo sapiens
ggugagaaaaacauagucucag

SEQ ID NO: 43170 - RNA, 21 nt, Homo sapiens
ggugagaaaggagacauagac

SEQ ID NO: 43171 - RNA, 22 nt, Homo sapiens
ggucugguguugaaauucuuca

SEQ ID NO: 43172 - RNA, 22 nt, Homo sapiens
guacaggugcaggaugggcagg

SEQ ID NO: 43173 - RNA, 22 nt, Homo sapiens
guacaguggguguagggaccag

SEQ ID NO: 43174 - RNA, 22 nt, Homo sapiens
ggugucuuguuuaauacucauu

SEQ ID NO: 43175 - RNA, 22 nt, Homo sapiens
gguguguaaauuacuuaucucu

SEQ ID NO: 43176 - RNA, 22 nt, Homo sapiens
guacauguaugcaugcaugcau

SEQ ID NO: 43177 - RNA, 22 nt, Homo sapiens
guacccaguagauaguuuuuca

SEQ ID NO: 43178 - RNA, 22 nt, Homo sapiens
guacaugugcacagugugcagg

SEQ ID NO: 43179 - RNA, 22 nt, Homo sapiens
guacaugcauacaugcacaucu

SEQ ID NO: 43180 - RNA, 22 nt, Homo sapiens
guacaguuuucaguguucacug

SEQ ID NO: 43181 - RNA, 22 nt, Homo sapiens
guauggcacuauccucucugau

SEQ ID NO: 43182 - RNA, 22 nt, Homo sapiens
guaugauacuguaacagugggu

SEQ ID NO: 43183 - RNA, 22 nt, Homo sapiens
guacugagagacaguuacuguu

SEQ ID NO: 43184 - RNA, 22 nt, Homo sapiens
guagaauguauguauaacgcaa

SEQ ID NO: 43185 - RNA, 22 nt, Homo sapiens
guagagguagauucuguuuuga

SEQ ID NO: 43186 - RNA, 22 nt, Homo sapiens
gucaucaucaguccucugugca

SEQ ID NO: 43187 - RNA, 22 nt, Homo sapiens
gucaucaggacgggucaucugc

SEQ ID NO: 43188 - RNA, 22 nt, Homo sapiens
gucagugucuuugcagcucaga

SEQ ID NO: 43189 - RNA, 21 nt, Homo sapiens
gucauaugucucugauuagug

SEQ ID NO: 43190 - RNA, 22 nt, Homo sapiens
gucauauaggguuuaccuguau

SEQ ID NO: 43191 - RNA, 22 nt, Homo sapiens
gucaguggagaaaaggacaugu

SEQ ID NO: 43192 - RNA, 22 nt, Homo sapiens
gucaguucuugugguugcauuc

SEQ ID NO: 43193 - RNA, 18 nt, Homo sapiens
guauuccagccugaguga

SEQ ID NO: 43194 - RNA, 22 nt, Homo sapiens
gucaacauauuaauuauguucu

SEQ ID NO: 43195 - RNA, 22 nt, Homo sapiens
ggacacaucaugugaccaaggu

SEQ ID NO: 43196 - RNA, 22 nt, Homo sapiens
gccucaguuguggccagggauu

SEQ ID NO: 43197 - RNA, 22 nt, Homo sapiens
gcugugauucuguguagauagu

SEQ ID NO: 43198 - RNA, 19 nt, Homo sapiens
ggaaugcuauucaaccuuu

SEQ ID NO: 43199 - RNA, 22 nt, Homo sapiens
ggaauauaaaaagccccagaau

SEQ ID NO: 43200 - RNA, 22 nt, Homo sapiens
ggaagguaauuggguaaugaga

SEQ ID NO: 43201 - RNA, 22 nt, Homo sapiens
ggaagguaauugucagcucaua

SEQ ID NO: 43202 - RNA, 22 nt, Homo sapiens
ggaaguauaaacuuaguggagu

SEQ ID NO: 43203 - RNA, 22 nt, Homo sapiens
gguauguuuagaccauuuacau

SEQ ID NO: 43204 - RNA, 19 nt, Homo sapiens
ggucagcaaagucuagcug

SEQ ID NO: 43205 - RNA, 22 nt, Homo sapiens
gguauuuaaaguaccugucugc

SEQ ID NO: 43206 - RNA, 22 nt, Homo sapiens
gguaaacauaagagagcugacu

SEQ ID NO: 43207 - RNA, 17 nt, Homo sapiens
gggucaccuugcaggua

SEQ ID NO: 43208 - RNA, 22 nt, Homo sapiens
gggagcacaagaaauguuucau

SEQ ID NO: 43209 - RNA, 22 nt, Homo sapiens
gggauguaugauauauguuggu

SEQ ID NO: 43210 - RNA, 22 nt, Homo sapiens
gggaagugugguuucuuuacag

SEQ ID NO: 43211 - RNA, 22 nt, Homo sapiens
gggaagguaaucauuacuugau

SEQ ID NO: 43212 - RNA, 22 nt, Homo sapiens
ggcugguuuucaguuacugagu

SEQ ID NO: 43213 - RNA, 22 nt, Homo sapiens
ggcuguguguuaaaauaggcuu

SEQ ID NO: 43214 - RNA, 22 nt, Homo sapiens
gugucacugugaggauauugua

SEQ ID NO: 43215 - RNA, 22 nt, Homo sapiens
guguccucgaguacacaucagg

SEQ ID NO: 43216 - RNA, 22 nt, Homo sapiens
gugucuccugccuucaugcagc

SEQ ID NO: 43217 - RNA, 22 nt, Homo sapiens
gugucaugagggggacaggaag

SEQ ID NO: 43218 - RNA, 22 nt, Homo sapiens
guguauguuguccauggaugcg

SEQ ID NO: 43219 - RNA, 22 nt, Homo sapiens
guuaagaaguguaacuuaaguu

SEQ ID NO: 43220 - RNA, 22 nt, Homo sapiens
guugcucaggcuggagugcagu

SEQ ID NO: 43221 - RNA, 22 nt, Homo sapiens
guugccuaggcuggcgugcagu

SEQ ID NO: 43222 - RNA, 22 nt, Homo sapiens
guuagguagaaguuuacuuuga

SEQ ID NO: 43223 - RNA, 16 nt, Homo sapiens
gugcuguguuguuagg

SEQ ID NO: 43224 - RNA, 22 nt, Homo sapiens
guggcagcacauauagguuguu

SEQ ID NO: 43225 - RNA, 22 nt, Homo sapiens
gugcaugucugugacgacccug

SEQ ID NO: 43226 - RNA, 22 nt, Homo sapiens
gugcgguauuagcaagccaaca

SEQ ID NO: 43227 - RNA, 22 nt, Homo sapiens
gugcauguccacuaguccauau

SEQ ID NO: 43228 - RNA, 22 nt, Homo sapiens
gugcaugcaucuuuauaguagc

SEQ ID NO: 43229 - RNA, 23 nt, Homo sapiens
gugcaugagucuuuauaguagca

SEQ ID NO: 43230 - RNA, 22 nt, Homo sapiens
guggggucaucucauuugugga

SEQ ID NO: 43231 - RNA, 22 nt, Homo sapiens
guguauauccuauuaguucugu

SEQ ID NO: 43232 - RNA, 22 nt, Homo sapiens
guggguaaaucucuguucgagg

SEQ ID NO: 43233 - RNA, 22 nt, Homo sapiens
guguagagaaaaguaccauuuu

SEQ ID NO: 43234 - RNA, 22 nt, Homo sapiens
gugguacuaucuuugguuucag

SEQ ID NO: 43235 - RNA, 22 nt, Homo sapiens
guguaaguccugaguuuggaua

SEQ ID NO: 43236 - RNA, 22 nt, Homo sapiens
guggcuuuaaguacgauugagg

SEQ ID NO: 43237 - RNA, 22 nt, Homo sapiens
gugggauggagagaagguauga

SEQ ID NO: 43238 - RNA, 22 nt, Homo sapiens
gugggauaauuuuuggugcugu

SEQ ID NO: 43239 - RNA, 20 nt, Homo sapiens
gugagguagaggguuaccug

SEQ ID NO: 43240 - RNA, 22 nt, Homo sapiens
gugagguaagaguugcuuugcu

SEQ ID NO: 43241 - RNA, 22 nt, Homo sapiens
gugaggaaggaaaccugcuagc

SEQ ID NO: 43242 - RNA, 22 nt, Homo sapiens
gugagccaugauuuuaccacug

SEQ ID NO: 43243 - RNA, 22 nt, Homo sapiens
gugagcuaguuucuuugcugug

SEQ ID NO: 43244 - RNA, 22 nt, Homo sapiens
gugcaaguguaauacagcuagg

SEQ ID NO: 43245 - RNA, 22 nt, Homo sapiens
gugaggucagggcuguggacag

SEQ ID NO: 43246 - RNA, 22 nt, Homo sapiens
gugagggaugugaaaaagguca

SEQ ID NO: 43247 - RNA, 22 nt, Homo sapiens
gugcacgucuuaggaggucacg

SEQ ID NO: 43248 - RNA, 22 nt, Homo sapiens
gugcagaugucuuuauaguagc

SEQ ID NO: 43249 - RNA, 22 nt, Homo sapiens
gugcacauauggugcauaagug

SEQ ID NO: 43250 - RNA, 22 nt, Homo sapiens
gugcaauucacuguuaugucug

SEQ ID NO: 43251 - RNA, 22 nt, Homo sapiens
gugagaggaggcagcuuuuaca

SEQ ID NO: 43252 - RNA, 22 nt, Homo sapiens
gucccagagauauugugucuuu

SEQ ID NO: 43253 - RNA, 22 nt, Homo sapiens
gucccugugucuuuauguggcc

SEQ ID NO: 43254 - RNA, 22 nt, Homo sapiens
gucguggagucucuggcuugua

SEQ ID NO: 43255 - RNA, 22 nt, Homo sapiens
gucguggagcucacagugugcc

SEQ ID NO: 43256 - RNA, 22 nt, Homo sapiens
gucauuguguggacauggagaa

SEQ ID NO: 43257 - RNA, 22 nt, Homo sapiens
gucauugucaauugacaauugu

SEQ ID NO: 43258 - RNA, 21 nt, Homo sapiens
guccaaaacaguguccaaugc

SEQ ID NO: 43259 - RNA, 22 nt, Homo sapiens
guccaaagugggagaggugggg

SEQ ID NO: 43260 - RNA, 22 nt, Homo sapiens
gucauggguuaaagguggauac

SEQ ID NO: 43261 - RNA, 22 nt, Homo sapiens
guccaguguuggagguuuuacc

SEQ ID NO: 43262 - RNA, 20 nt, Homo sapiens
guccauuugcugccauugcu

SEQ ID NO: 43263 - RNA, 22 nt, Homo sapiens
gucaugucugcacauaguaaaa

SEQ ID NO: 43264 - RNA, 22 nt, Homo sapiens
gucauugguucuguuuauguga

SEQ ID NO: 43265 - RNA, 22 nt, Homo sapiens
gucauugaaguggaaucaucca

SEQ ID NO: 43266 - RNA, 22 nt, Homo sapiens
gucaugaaguuuugaaugaaau

SEQ ID NO: 43267 - RNA, 22 nt, Homo sapiens
uaaguacugucagaauuggacu

SEQ ID NO: 43268 - RNA, 22 nt, Homo sapiens
uaaguagcugggaguacaggca

SEQ ID NO: 43269 - RNA, 22 nt, Homo sapiens
uaaguacuuuacagacauuauc

SEQ ID NO: 43270 - RNA, 22 nt, Homo sapiens
uaaguaguuucuggauauucuc

SEQ ID NO: 43271 - RNA, 22 nt, Homo sapiens
uaaguauagguaacagaagcaa

SEQ ID NO: 43272 - RNA, 22 nt, Homo sapiens
guugggcccauagacugccagu

SEQ ID NO: 43273 - RNA, 22 nt, Homo sapiens
uaaggcuugaucuuggugagau

SEQ ID NO: 43274 - RNA, 22 nt, Homo sapiens
guuuaggaaugagaauauuuag

SEQ ID NO: 43275 - RNA, 22 nt, Homo sapiens
uacaaagcuacucgagggcagg

SEQ ID NO: 43276 - RNA, 16 nt, Homo sapiens
uacaacagugaguaug

SEQ ID NO: 43277 - RNA, 22 nt, Homo sapiens
uacaaagcuuugaugugucuuu

SEQ ID NO: 43278 - RNA, 22 nt, Homo sapiens
uaauacugcugugcuugaguug

SEQ ID NO: 43279 - RNA, 18 nt, Homo sapiens
uagagcacaagcuuuggc

SEQ ID NO: 43280 - RNA, 22 nt, Homo sapiens
uagaggaaugaauuuggccaga

SEQ ID NO: 43281 - RNA, 22 nt, Homo sapiens
uagagguagccuacuacacacc

SEQ ID NO: 43282 - RNA, 22 nt, Homo sapiens
uagagguagguguaugaacuag

SEQ ID NO: 43283 - RNA, 21 nt, Homo sapiens
uagauaguugguucugaaucu

SEQ ID NO: 43284 - RNA, 22 nt, Homo sapiens
uagagguauuaacaguagaaga

SEQ ID NO: 43285 - RNA, 22 nt, Homo sapiens
uagaguaguggcgugaucucgg

SEQ ID NO: 43286 - RNA, 22 nt, Homo sapiens
uacuagaggaaaacuugaagac

SEQ ID NO: 43287 - RNA, 23 nt, Homo sapiens
uacuaguaagcguguucuuugca

SEQ ID NO: 43288 - RNA, 18 nt, Homo sapiens
uacuaguaaggcuucuga

SEQ ID NO: 43289 - RNA, 22 nt, Homo sapiens
uacguuaucagguaugcaagag

SEQ ID NO: 43290 - RNA, 22 nt, Homo sapiens
uacgccuguaauaucagcauuu

SEQ ID NO: 43291 - RNA, 18 nt, Homo sapiens
uacagaacuggaguagaa

SEQ ID NO: 43292 - RNA, 22 nt, Homo sapiens
uacacacguguguauauauaca

SEQ ID NO: 43293 - RNA, 22 nt, Homo sapiens
uacaagguaucagugaccguaa

SEQ ID NO: 43294 - RNA, 22 nt, Homo sapiens
uacaaguaauaagggaagaauu

SEQ ID NO: 43295 - RNA, 22 nt, Homo sapiens
uacagucuggaggccuguguug

SEQ ID NO: 43296 - RNA, 22 nt, Homo sapiens
uacauaguaagcaucuccugug

SEQ ID NO: 43297 - RNA, 22 nt, Homo sapiens
uacauagucuucuuuugguuau

SEQ ID NO: 43298 - RNA, 22 nt, Homo sapiens
uacauaguuacuuccauuucca

SEQ ID NO: 43299 - RNA, 22 nt, Homo sapiens
uacaguacagugacaccauuau

SEQ ID NO: 43300 - RNA, 22 nt, Homo sapiens
uagcagcauaaauggacuaaga

SEQ ID NO: 43301 - RNA, 22 nt, Homo sapiens
uagcagaauauaccucuuacuu

SEQ ID NO: 43302 - RNA, 22 nt, Homo sapiens
uagcacuauuuuucacuauccu

SEQ ID NO: 43303 - RNA, 22 nt, Homo sapiens
uagacugguuuagcacugaaua

SEQ ID NO: 43304 - RNA, 22 nt, Homo sapiens
uagcaguaccccaguauccugg

SEQ ID NO: 43305 - RNA, 22 nt, Homo sapiens
uagcagguguuccacaaauauu

SEQ ID NO: 43306 - RNA, 22 nt, Homo sapiens
uagcagccaggaagggcuggcu

SEQ ID NO: 43307 - RNA, 20 nt, Homo sapiens
uagcaggugucaggugauau

SEQ ID NO: 43308 - RNA, 22 nt, Homo sapiens
uagcagcauuuuuguagaguau

SEQ ID NO: 43309 - RNA, 22 nt, Homo sapiens
uagguugucuucccagaguuuu

SEQ ID NO: 43310 - RNA, 22 nt, Homo sapiens
uaguaccauucccaaaccaacu

SEQ ID NO: 43311 - RNA, 22 nt, Homo sapiens
uauacagcaaguuacugugcug

SEQ ID NO: 43312 - RNA, 22 nt, Homo sapiens
uauaccacugauuuuauucuga

SEQ ID NO: 43313 - RNA, 22 nt, Homo sapiens
uauacacgugugcauauauaca

SEQ ID NO: 43314 - RNA, 22 nt, Homo sapiens
uauaaaguaauuucuaggggcu

SEQ ID NO: 43315 - RNA, 22 nt, Homo sapiens
uaucagcacaguggguucaugg

SEQ ID NO: 43316 - RNA, 21 nt, Homo sapiens
uaucagagacauugagaggca

SEQ ID NO: 43317 - RNA, 22 nt, Homo sapiens
uaucacaguugcauauuuaagg

SEQ ID NO: 43318 - RNA, 22 nt, Homo sapiens
uauagcaguguaagaaucgagu

SEQ ID NO: 43319 - RNA, 22 nt, Homo sapiens
uaucacagcgggguguacaccc

SEQ ID NO: 43320 - RNA, 22 nt, Homo sapiens
uauuguccaauaggauguuccu

SEQ ID NO: 43321 - RNA, 22 nt, Homo sapiens
uauuugauuaacaagagccuaa

SEQ ID NO: 43322 - RNA, 22 nt, Homo sapiens
uauuucacaucuaugaagugag

SEQ ID NO: 43323 - RNA, 22 nt, Homo sapiens
uauuguuuuucccaggagucua

SEQ ID NO: 43324 - RNA, 22 nt, Homo sapiens
uauuguacauguuauagauuuu

SEQ ID NO: 43325 - RNA, 22 nt, Homo sapiens
uauggcuuuuaacugucguaug

SEQ ID NO: 43326 - RNA, 22 nt, Homo sapiens
uauggcuucuuuaaauugaggu

SEQ ID NO: 43327 - RNA, 22 nt, Homo sapiens
uauggcuuuuauuauguuguag

SEQ ID NO: 43328 - RNA, 22 nt, Homo sapiens
uauggauuuuuuugacaagagc

SEQ ID NO: 43329 - RNA, 22 nt, Homo sapiens
uauucacaggugugggacaaag

SEQ ID NO: 43330 - RNA, 17 nt, Homo sapiens
uauugaccuuuguaugu

SEQ ID NO: 43331 - RNA, 22 nt, Homo sapiens
uauggcacacguuuaccuaugu

SEQ ID NO: 43332 - RNA, 22 nt, Homo sapiens
uauggauuuucagauucuuauc

SEQ ID NO: 43333 - RNA, 22 nt, Homo sapiens
uauggauuuuggaauauguggg

SEQ ID NO: 43334 - RNA, 19 nt, Homo sapiens
uaugagcuaugacaugcau

SEQ ID NO: 43335 - RNA, 22 nt, Homo sapiens
uaugagguagguaugacuauca

SEQ ID NO: 43336 - RNA, 22 nt, Homo sapiens
uaugacuuuggaaaaauuacuu

SEQ ID NO: 43337 - RNA, 22 nt, Homo sapiens
uaugacguuuuauuggcgcagu

SEQ ID NO: 43338 - RNA, 20 nt, Homo sapiens
uuuugaacuuggcaaccugu

SEQ ID NO: 43339 - RNA, 22 nt, Homo sapiens
uuuugcaaauuccaguggccau

SEQ ID NO: 43340 - RNA, 22 nt, Homo sapiens
uuuuauguuuguucccugccaa

SEQ ID NO: 43341 - RNA, 19 nt, Homo sapiens
uuuuccccuuucuuaagac

SEQ ID NO: 43342 - RNA, 22 nt, Homo sapiens
uuugguaguuuguugggaccca

SEQ ID NO: 43343 - RNA, 22 nt, Homo sapiens
uuuguacuaugguuuuucacua

SEQ ID NO: 43344 - RNA, 22 nt, Homo sapiens
uuuguaauccuauuccaaagga

SEQ ID NO: 43345 - RNA, 22 nt, Homo sapiens
uuuguacuugaagaaucuuuau

SEQ ID NO: 43346 - RNA, 22 nt, Homo sapiens
uuuguacuugguguucuggaaa

SEQ ID NO: 43347 - RNA, 22 nt, Homo sapiens
uuuguacuucauacaauaacuc

SEQ ID NO: 43348 - RNA, 22 nt, Homo sapiens
uuuggcuguuucuggacuaaga

SEQ ID NO: 43349 - RNA, 22 nt, Homo sapiens
uuuggcuuuugugauacguaau

SEQ ID NO: 43350 - RNA, 22 nt, Homo sapiens
uuuggcuuuuguaauaacugcc

SEQ ID NO: 43351 - RNA, 21 nt, Homo sapiens
uuuggcuucucugcugcagcc

SEQ ID NO: 43352 - RNA, 22 nt, Homo sapiens
uuuguucaccucaaggauggga

SEQ ID NO: 43353 - RNA, 22 nt, Homo sapiens
uuuguucuucguuccugagcca

SEQ ID NO: 43354 - RNA, 22 nt, Homo sapiens
uuuuaguggacaaagguauuua

SEQ ID NO: 43355 - RNA, 22 nt, Homo sapiens
uuuuacagaggagguugcugau

SEQ ID NO: 43356 - RNA, 22 nt, Homo sapiens
uuugugcuccucucaguaugug

SEQ ID NO: 43357 - RNA, 22 nt, Homo sapiens
uuugugauugcacacucaagau

SEQ ID NO: 43358 - RNA, 22 nt, Homo sapiens
uuugugcuaacuuuaacucuua

SEQ ID NO: 43359 - RNA, 22 nt, Homo sapiens
uuuguauguuggagauuggaga

SEQ ID NO: 43360 - RNA, 21 nt, Homo sapiens
uuuguccaccuguguucacca

SEQ ID NO: 43361 - RNA, 22 nt, Homo sapiens
uuuccacauggacuuaccuucg

SEQ ID NO: 43362 - RNA, 22 nt, Homo sapiens
uuucccuuugcuuugucagcca

SEQ ID NO: 43363 - RNA, 20 nt, Homo sapiens
uuugaauguaaagcauguca

SEQ ID NO: 43364 - RNA, 22 nt, Homo sapiens
uuugacuguggagucgaugcuu

SEQ ID NO: 43365 - RNA, 22 nt, Homo sapiens
uuugagaaugcuaccagagaag

SEQ ID NO: 43366 - RNA, 22 nt, Homo sapiens
uuuggacuucuagccuccagag

SEQ ID NO: 43367 - RNA, 22 nt, Homo sapiens
uuugagguguauggcaaguuga

SEQ ID NO: 43368 - RNA, 22 nt, Homo sapiens
uuugagugugauaucgauugga

SEQ ID NO: 43369 - RNA, 22 nt, Homo sapiens
uuugauguugagacuauaaagc

SEQ ID NO: 43370 - RNA, 22 nt, Homo sapiens
uuugauugguguaccugaaagu

SEQ ID NO: 43371 - RNA, 22 nt, Homo sapiens
uuguuauguuggucaguaaugu

SEQ ID NO: 43372 - RNA, 22 nt, Homo sapiens
uuucauccggcuguguauuaug

SEQ ID NO: 43373 - RNA, 16 nt, Homo sapiens
uuucaucaguuuuaau

SEQ ID NO: 43374 - RNA, 22 nt, Homo sapiens
uugugcuccagagacgggcucg

SEQ ID NO: 43375 - RNA, 22 nt, Homo sapiens
uugugauggugcauacugagcu

SEQ ID NO: 43376 - RNA, 22 nt, Homo sapiens
uugugauugagugauccuuguu

SEQ ID NO: 43377 - RNA, 22 nt, Homo sapiens
uugugcuucaucaccuagcaga

SEQ ID NO: 43378 - RNA, 22 nt, Homo sapiens
uugugccauucuucugccucag

SEQ ID NO: 43379 - RNA, 22 nt, Homo sapiens
uuguguuugaugcugacacgca

SEQ ID NO: 43380 - RNA, 22 nt, Homo sapiens
uuggcagaguuaauuuguugag

SEQ ID NO: 43381 - RNA, 22 nt, Homo sapiens
uuggcagucugaggcacagacu

SEQ ID NO: 43382 - RNA, 22 nt, Homo sapiens
uuggcagcacgcaguccagagg

SEQ ID NO: 43383 - RNA, 22 nt, Homo sapiens
uuggcagcuguggaaucugggc

SEQ ID NO: 43384 - RNA, 22 nt, Homo sapiens
uuggagucaucucuguacugua

SEQ ID NO: 43385 - RNA, 22 nt, Homo sapiens
uuggagcacuggggcacugaca

SEQ ID NO: 43386 - RNA, 22 nt, Homo sapiens
uuggacuucucaaggcaauaaa

SEQ ID NO: 43387 - RNA, 22 nt, Homo sapiens
uuggcaaauagguuuuauugca

SEQ ID NO: 43388 - RNA, 22 nt, Homo sapiens
uuggcucugcgucucgcggacg

SEQ ID NO: 43389 - RNA, 22 nt, Homo sapiens
uuggcgugaaacagccuuacau

SEQ ID NO: 43390 - RNA, 23 nt, Homo sapiens
uuggccuccuugugucuagggcu

SEQ ID NO: 43391 - RNA, 22 nt, Homo sapiens
uuggcuaugaguccuaugugca

SEQ ID NO: 43392 - RNA, 22 nt, Homo sapiens
uuguacuuuuaguagagacggg

SEQ ID NO: 43393 - RNA, 22 nt, Homo sapiens
uuguacuauuuuuaucagugau

SEQ ID NO: 43394 - RNA, 22 nt, Homo sapiens
uuggcuguguuccucaaggagu

SEQ ID NO: 43395 - RNA, 22 nt, Homo sapiens
uuguauacucuauuuuagcagu

SEQ ID NO: 43396 - RNA, 22 nt, Homo sapiens
uuguauguugaaugaugguaua

SEQ ID NO: 43397 - RNA, 22 nt, Homo sapiens
uuguauguuguuugucagagaa

SEQ ID NO: 43398 - RNA, 22 nt, Homo sapiens
uugcaugcacaguucucaauag

SEQ ID NO: 43399 - RNA, 22 nt, Homo sapiens
uugcaugucauaacugauggaa

SEQ ID NO: 43400 - RNA, 22 nt, Homo sapiens
uugaucuaugugucuguuuuua

SEQ ID NO: 43401 - RNA, 22 nt, Homo sapiens
uugaugauguuucugccuugcc

SEQ ID NO: 43402 - RNA, 22 nt, Homo sapiens
uugaucacuguacuaugacuau

SEQ ID NO: 43403 - RNA, 22 nt, Homo sapiens
uugcccuuuagguaacuauaua

SEQ ID NO: 43404 - RNA, 22 nt, Homo sapiens
uugccaucaucucuuacucagu

SEQ ID NO: 43405 - RNA, 23 nt, Homo sapiens
uugcauugcccuccauaguacuc

SEQ ID NO: 43406 - RNA, 22 nt, Homo sapiens
uuggacuacagauuacuucauc

SEQ ID NO: 43407 - RNA, 22 nt, Homo sapiens
uucuuagucaaguuguauuuca

SEQ ID NO: 43408 - RNA, 22 nt, Homo sapiens
uucuguguuuaggucacggcua

SEQ ID NO: 43409 - RNA, 22 nt, Homo sapiens
uugaggugggaggaucacuuga

SEQ ID NO: 43410 - RNA, 22 nt, Homo sapiens
uugagguguauuguacagcaca

SEQ ID NO: 43411 - RNA, 22 nt, Homo sapiens
uugaguaguaagugguucaccg

SEQ ID NO: 43412 - RNA, 22 nt, Homo sapiens
uugauagacaucugaguuguug

SEQ ID NO: 43413 - RNA, 22 nt, Homo sapiens
uugauauguguauagcaugugg

SEQ ID NO: 43414 - RNA, 22 nt, Homo sapiens
uugauaugaauggcuguuugug

SEQ ID NO: 43415 - RNA, 18 nt, Homo sapiens
uguggcuguuuuccaaua

SEQ ID NO: 43416 - RNA, 21 nt, Homo sapiens
uguggcaauggccucacagau

SEQ ID NO: 43417 - RNA, 22 nt, Homo sapiens
ugugucuuuuaucacacaaugu

SEQ ID NO: 43418 - RNA, 22 nt, Homo sapiens
uguguuuuuauguaaaauggaa

SEQ ID NO: 43419 - RNA, 21 nt, Homo sapiens
uguuaacaugcagauuacugg

SEQ ID NO: 43420 - RNA, 22 nt, Homo sapiens
ugugcgcaucggggccugcuuc

SEQ ID NO: 43421 - RNA, 22 nt, Homo sapiens
ugugcuauguuauucacauggg

SEQ ID NO: 43422 - RNA, 22 nt, Homo sapiens
ugugaaugauggagugucgaau

SEQ ID NO: 43423 - RNA, 18 nt, Homo sapiens
ugugacauugagcauguc

SEQ ID NO: 43424 - RNA, 22 nt, Homo sapiens
ugucaugaaauauguuuuucua

SEQ ID NO: 43425 - RNA, 22 nt, Homo sapiens
ugucauauagaauguucuauga

SEQ ID NO: 43426 - RNA, 22 nt, Homo sapiens
ugucaucauuugagagaagaaa

SEQ ID NO: 43427 - RNA, 21 nt, Homo sapiens
ugugaaaucuaggcagagguu

SEQ ID NO: 43428 - RNA, 20 nt, Homo sapiens
ugugaacuguagauagucuu

SEQ ID NO: 43429 - RNA, 22 nt, Homo sapiens
uguccaaaucagagguaccaaa

SEQ ID NO: 43430 - RNA, 22 nt, Homo sapiens
ugucauucaggaaauucuaagu

SEQ ID NO: 43431 - RNA, 22 nt, Homo sapiens
ugucauuggacuucuuucaugg

SEQ ID NO: 43432 - RNA, 22 nt, Homo sapiens
ugucauguuucuacugaccaaa

SEQ ID NO: 43433 - RNA, 22 nt, Homo sapiens
ugucauguugguguacugcacc

SEQ ID NO: 43434 - RNA, 22 nt, Homo sapiens
uuacagauggauggcagcuggc

SEQ ID NO: 43435 - RNA, 22 nt, Homo sapiens
uuacacaguaggucccuaguaa

SEQ ID NO: 43436 - RNA, 22 nt, Homo sapiens
uuaacagugucaaucuguagua

SEQ ID NO: 43437 - RNA, 22 nt, Homo sapiens
uuaagagugggaguuggccaca

SEQ ID NO: 43438 - RNA, 22 nt, Homo sapiens
uguuauugagguuacuuauaag

SEQ ID NO: 43439 - RNA, 22 nt, Homo sapiens
uguucauggauccaguggcuuc

SEQ ID NO: 43440 - RNA, 22 nt, Homo sapiens
uguuaguuguucauguuaagag

SEQ ID NO: 43441 - RNA, 22 nt, Homo sapiens
uguuaucauuacguucuuaguu

SEQ ID NO: 43442 - RNA, 22 nt, Homo sapiens
uuacaggacuaagcagcuuugc

SEQ ID NO: 43443 - RNA, 22 nt, Homo sapiens
uuacagguggagaaguaaggcu

SEQ ID NO: 43444 - RNA, 22 nt, Homo sapiens
uuacaguagaugaggguauaau

SEQ ID NO: 43445 - RNA, 22 nt, Homo sapiens
uuagguuguuucuggucuuagg

SEQ ID NO: 43446 - RNA, 22 nt, Homo sapiens
uuaguaguaguuugcauuuacc

SEQ ID NO: 43447 - RNA, 22 nt, Homo sapiens
uuaguaguagcugcaugucagu

SEQ ID NO: 43448 - RNA, 22 nt, Homo sapiens
uuagguuguugccauugaaagu

SEQ ID NO: 43449 - RNA, 18 nt, Homo sapiens
uuagguaggucuuugugu

SEQ ID NO: 43450 - RNA, 22 nt, Homo sapiens
uuacauguuguggguuguggcc

SEQ ID NO: 43451 - RNA, 22 nt, Homo sapiens
uuauacucgucugaaugauucu

SEQ ID NO: 43452 - RNA, 22 nt, Homo sapiens
uuaguuuaucagugguuucuga

SEQ ID NO: 43453 - RNA, 22 nt, Homo sapiens
uuaguaguuugauaggaauagc

SEQ ID NO: 43454 - RNA, 22 nt, Homo sapiens
uuaguaguagugcuguaauuuu

SEQ ID NO: 43455 - RNA, 21 nt, Homo sapiens
uuagugcucaguuugacaaaa

SEQ ID NO: 43456 - RNA, 22 nt, Homo sapiens
uucaguauugcaccuggagucc

SEQ ID NO: 43457 - RNA, 22 nt, Homo sapiens
uucauguaaucaaggcagcuaa

SEQ ID NO: 43458 - RNA, 22 nt, Homo sapiens
uucagugagacgaaaacaacaa

SEQ ID NO: 43459 - RNA, 22 nt, Homo sapiens
uucaguagucaaaagauaaggg

SEQ ID NO: 43460 - RNA, 22 nt, Homo sapiens
uucaguagucuccauagaaccg

SEQ ID NO: 43461 - RNA, 22 nt, Homo sapiens
uucagcaggccaggcccugacu

SEQ ID NO: 43462 - RNA, 22 nt, Homo sapiens
uucagguacuauaggcuguugg

SEQ ID NO: 43463 - RNA, 22 nt, Homo sapiens
uucaagaauuaaaguggcuuuu

SEQ ID NO: 43464 - RNA, 19 nt, Homo sapiens
uucagcagugucugcucuu

SEQ ID NO: 43465 - RNA, 22 nt, Homo sapiens
uucacaauuaaaugugguuauu

SEQ ID NO: 43466 - RNA, 22 nt, Homo sapiens
uucuagcacuuugggagacuga

SEQ ID NO: 43467 - RNA, 22 nt, Homo sapiens
uucuagcaauggcagagugucu

SEQ ID NO: 43468 - RNA, 22 nt, Homo sapiens
uuccuugagagcuugauaucac

SEQ ID NO: 43469 - RNA, 22 nt, Homo sapiens
uucuggccuccauuuuucuccu

SEQ ID NO: 43470 - RNA, 22 nt, Homo sapiens
uucuggcucaggucaacacuuc

SEQ ID NO: 43471 - RNA, 22 nt, Homo sapiens
uucccugaaguguuacucuaga

SEQ ID NO: 43472 - RNA, 22 nt, Homo sapiens
uucccuguaucuucugccaugu

SEQ ID NO: 43473 - RNA, 22 nt, Homo sapiens
uucccguugcugugcuccugcc

SEQ ID NO: 43474 - RNA, 22 nt, Homo sapiens
uuccccgugaaacuuucucauu

SEQ ID NO: 43475 - RNA, 22 nt, Homo sapiens
uucccagagccugggagugagg

SEQ ID NO: 43476 - RNA, 22 nt, Homo sapiens
uuccauguugauacgugaaguu

SEQ ID NO: 43477 - RNA, 22 nt, Homo sapiens
uuccaugugggcuugucaagua

SEQ ID NO: 43478 - RNA, 22 nt, Homo sapiens
uuccgcuguaguuguugguacc

SEQ ID NO: 43479 - RNA, 22 nt, Homo sapiens
uuccauguaguugaacgguuuu

SEQ ID NO: 43480 - RNA, 22 nt, Homo sapiens
uuccauguaguugagcaguuuu

SEQ ID NO: 43481 - RNA, 22 nt, Homo sapiens
uuccacgugaaguauucuaaag

SEQ ID NO: 43482 - RNA, 22 nt, Homo sapiens
uccucaguggauuggauggugc

SEQ ID NO: 43483 - RNA, 22 nt, Homo sapiens
ucccuguagugccuagaucaga

SEQ ID NO: 43484 - RNA, 22 nt, Homo sapiens
uccuggcuccacuguuuauucc

SEQ ID NO: 43485 - RNA, 22 nt, Homo sapiens
uccuugguugauccugugcaga

SEQ ID NO: 43486 - RNA, 22 nt, Homo sapiens
uccuuugguuauaggcaccucu

SEQ ID NO: 43487 - RNA, 22 nt, Homo sapiens
ucgcagcucacuggagccucga

SEQ ID NO: 43488 - RNA, 22 nt, Homo sapiens
ucgcagcacgagcaugcaaggu

SEQ ID NO: 43489 - RNA, 23 nt, Homo sapiens
ucgcagcauucaauaccaggcag

SEQ ID NO: 43490 - RNA, 19 nt, Homo sapiens
ucgcgccauucuccugccu

SEQ ID NO: 43491 - RNA, 22 nt, Homo sapiens
ucgcgccauucuccugccucag

SEQ ID NO: 43492 - RNA, 22 nt, Homo sapiens
ucgcugcgaccuccaccucccg

SEQ ID NO: 43493 - RNA, 22 nt, Homo sapiens
ucgguacuugagagagacacag

SEQ ID NO: 43494 - RNA, 22 nt, Homo sapiens
ucgugccacugcacuccagccu

SEQ ID NO: 43495 - RNA, 22 nt, Homo sapiens
uccccgucacacgcaggcuuac

SEQ ID NO: 43496 - RNA, 22 nt, Homo sapiens
uccccaguaggcaauuaacacc

SEQ ID NO: 43497 - RNA, 21 nt, Homo sapiens
uccagcuuugagaguuguggu

SEQ ID NO: 43498 - RNA, 22 nt, Homo sapiens
ucagugguuaaaagauucuaga

SEQ ID NO: 43499 - RNA, 22 nt, Homo sapiens
uccaauguaaucaucauugaau

SEQ ID NO: 43500 - RNA, 22 nt, Homo sapiens
ucauuguccaacuucuuucagu

SEQ ID NO: 43501 - RNA, 22 nt, Homo sapiens
uccacaguaaggacccugccuu

SEQ ID NO: 43502 - RNA, 22 nt, Homo sapiens
ucagagucuagaucacucacug

SEQ ID NO: 43503 - RNA, 22 nt, Homo sapiens
ucagaguggagucugcagccuu

SEQ ID NO: 43504 - RNA, 22 nt, Homo sapiens
ucagaucacuggcgcuggcgga

SEQ ID NO: 43505 - RNA, 22 nt, Homo sapiens
ucacgugguucauaaggcagaa

SEQ ID NO: 43506 - RNA, 23 nt, Homo sapiens
ucacggagaccugcaagaccaau

SEQ ID NO: 43507 - RNA, 22 nt, Homo sapiens
ucacuagggagaaacugaggcu

SEQ ID NO: 43508 - RNA, 22 nt, Homo sapiens
ucacuaggcuggagugcagugg

SEQ ID NO: 43509 - RNA, 19 nt, Homo sapiens
ucagcaguaaucaacuuca

SEQ ID NO: 43510 - RNA, 22 nt, Homo sapiens
ucagauguuucuuuaacgcaug

SEQ ID NO: 43511 - RNA, 22 nt, Homo sapiens
ucagaugcauccauaccccacu

SEQ ID NO: 43512 - RNA, 22 nt, Homo sapiens
ucagugauugguuauuuuaggc

SEQ ID NO: 43513 - RNA, 20 nt, Homo sapiens
ucagugauugguuuaguuau

SEQ ID NO: 43514 - RNA, 22 nt, Homo sapiens
ucaguauaugaaucuggggcag

SEQ ID NO: 43515 - RNA, 22 nt, Homo sapiens
ucagcguguggacggccaucuu

SEQ ID NO: 43516 - RNA, 22 nt, Homo sapiens
ucagcagucacuccuaugacaa

SEQ ID NO: 43517 - RNA, 22 nt, Homo sapiens
ucagcgcauggucgugcggcau

SEQ ID NO: 43518 - RNA, 22 nt, Homo sapiens
ucagcagugugaaaauggacua

SEQ ID NO: 43519 - RNA, 22 nt, Homo sapiens
ucaagugauucuugugccuuag

SEQ ID NO: 43520 - RNA, 18 nt, Homo sapiens
ucaauguggauguucuuu

SEQ ID NO: 43521 - RNA, 22 nt, Homo sapiens
ucaccggcagacguggccugau

SEQ ID NO: 43522 - RNA, 22 nt, Homo sapiens
ucacccacacaggagacaggga

SEQ ID NO: 43523 - RNA, 22 nt, Homo sapiens
ucaccaguacuccaaauugagg

SEQ ID NO: 43524 - RNA, 22 nt, Homo sapiens
ucacaagcuccugccuuugcuu

SEQ ID NO: 43525 - RNA, 22 nt, Homo sapiens
ucacgcugcugcaaccagccug

SEQ ID NO: 43526 - RNA, 18 nt, Homo sapiens
ucacggggagcagcagcc

SEQ ID NO: 43527 - RNA, 22 nt, Homo sapiens
ucacgguggaaucccagauccc

SEQ ID NO: 43528 - RNA, 19 nt, Homo sapiens
ucacgugcagcagccacac

SEQ ID NO: 43529 - RNA, 22 nt, Homo sapiens
ucacgugcucuuguguguucug

SEQ ID NO: 43530 - RNA, 22 nt, Homo sapiens
ucaccuggagaagauggaucau

SEQ ID NO: 43531 - RNA, 22 nt, Homo sapiens
ucaccuggagccuucacauucu

SEQ ID NO: 43532 - RNA, 22 nt, Homo sapiens
ucaccuggggaucuuguuuaca

SEQ ID NO: 43533 - RNA, 22 nt, Homo sapiens
ucaccuggagacaugaagacug

SEQ ID NO: 43534 - RNA, 22 nt, Homo sapiens
ucaccuggagagcuugcuaaua

SEQ ID NO: 43535 - RNA, 22 nt, Homo sapiens
ucaccguguaucauuucauccg

SEQ ID NO: 43536 - RNA, 22 nt, Homo sapiens
ugaagugaaugguaaguaugcc

SEQ ID NO: 43537 - RNA, 21 nt, Homo sapiens
ugaaguagcauaggaugucaa

SEQ ID NO: 43538 - RNA, 22 nt, Homo sapiens
ugaacagcaccuccuagaguug

SEQ ID NO: 43539 - RNA, 22 nt, Homo sapiens
ugaacuguugggggaaauucag

SEQ ID NO: 43540 - RNA, 22 nt, Homo sapiens
ugacaugagauuugggaggggc

SEQ ID NO: 43541 - RNA, 22 nt, Homo sapiens
ugacaucguugccauguuaugc

SEQ ID NO: 43542 - RNA, 22 nt, Homo sapiens
ugacauguagagaacuucucau

SEQ ID NO: 43543 - RNA, 22 nt, Homo sapiens
ugacauggaaguagguauacau

SEQ ID NO: 43544 - RNA, 21 nt, Homo sapiens
ugacauguugguguucugcac

SEQ ID NO: 43545 - RNA, 20 nt, Homo sapiens
ugacuuguccgagguccccc

SEQ ID NO: 43546 - RNA, 22 nt, Homo sapiens
ugagaaccucugugugcccacu

SEQ ID NO: 43547 - RNA, 18 nt, Homo sapiens
ugagaacauguguacaca

SEQ ID NO: 43548 - RNA, 22 nt, Homo sapiens
ugacuggagaccucaguagggu

SEQ ID NO: 43549 - RNA, 23 nt, Homo sapiens
ugacuggagacuguugauccuuu

SEQ ID NO: 43550 - RNA, 22 nt, Homo sapiens
ugacuaggggcccuggcuucuu

SEQ ID NO: 43551 - RNA, 22 nt, Homo sapiens
ugacugaguaguauuccacuau

SEQ ID NO: 43552 - RNA, 22 nt, Homo sapiens
ugacuggaaacaguguuauuug

SEQ ID NO: 43553 - RNA, 22 nt, Homo sapiens
ugacucaguuguuagucuucau

SEQ ID NO: 43554 - RNA, 22 nt, Homo sapiens
ugacuaguuggauaaccuagga

SEQ ID NO: 43555 - RNA, 19 nt, Homo sapiens
ugacuauagccugaucagu

SEQ ID NO: 43556 - RNA, 22 nt, Homo sapiens
ugacuauaguaaucacuucaca

SEQ ID NO: 43557 - RNA, 21 nt, Homo sapiens
ugacuagauuccagauuggcc

SEQ ID NO: 43558 - RNA, 19 nt, Homo sapiens
ugaccagggacagaaacca

SEQ ID NO: 43559 - RNA, 18 nt, Homo sapiens
ugacauugagcugagaaa

SEQ ID NO: 43560 - RNA, 22 nt, Homo sapiens
ugacauugggagugaagugaag

SEQ ID NO: 43561 - RNA, 22 nt, Homo sapiens
ugaccacagaaagugagggagc

SEQ ID NO: 43562 - RNA, 22 nt, Homo sapiens
ucuuugguucugugcagccuau

SEQ ID NO: 43563 - RNA, 22 nt, Homo sapiens
ugaaacacacagagaagggaga

SEQ ID NO: 43564 - RNA, 22 nt, Homo sapiens
ugaacacuggauaaggagucag

SEQ ID NO: 43565 - RNA, 22 nt, Homo sapiens
ucuuugucuacauccuguuaaa

SEQ ID NO: 43566 - RNA, 22 nt, Homo sapiens
ucuuuguguucaggagccacgu

SEQ ID NO: 43567 - RNA, 19 nt, Homo sapiens
ucuugcacaugugaacuca

SEQ ID NO: 43568 - RNA, 22 nt, Homo sapiens
ucuuugaguuauugugcagacu

SEQ ID NO: 43569 - RNA, 22 nt, Homo sapiens
ucuugcaccuacaugcuuuguc

SEQ ID NO: 43570 - RNA, 22 nt, Homo sapiens
ucuuugauguucugaaagaugg

SEQ ID NO: 43571 - RNA, 22 nt, Homo sapiens
ucuuugguaauggaugucugau

SEQ ID NO: 43572 - RNA, 21 nt, Homo sapiens
ucuuuggucaccaguuuucau

SEQ ID NO: 43573 - RNA, 22 nt, Homo sapiens
ucuuugguauugugaauagugu

SEQ ID NO: 43574 - RNA, 22 nt, Homo sapiens
ucuuugguaugugcaugugcuu

SEQ ID NO: 43575 - RNA, 22 nt, Homo sapiens
ucuaguaaugagaggcaggaga

SEQ ID NO: 43576 - RNA, 18 nt, Homo sapiens
ucuagacacugugucuau

SEQ ID NO: 43577 - RNA, 22 nt, Homo sapiens
ucuacagccaguucaggaagaa

SEQ ID NO: 43578 - RNA, 22 nt, Homo sapiens
ucguggccugugaguccucccc

SEQ ID NO: 43579 - RNA, 19 nt, Homo sapiens
ucucacagcucuacuaugu

SEQ ID NO: 43580 - RNA, 22 nt, Homo sapiens
ucuguuguuguuuuaagagaca

SEQ ID NO: 43581 - RNA, 22 nt, Homo sapiens
ucuguuguuaucauaauauuga

SEQ ID NO: 43582 - RNA, 22 nt, Homo sapiens
ucugugguucuagcuacuuugg

SEQ ID NO: 43583 - RNA, 22 nt, Homo sapiens
ucuguguugaugcucauuaauu

SEQ ID NO: 43584 - RNA, 22 nt, Homo sapiens
ugggaauaugauacaggucuuu

SEQ ID NO: 43585 - RNA, 23 nt, Homo sapiens
uggccagaaacuucuuuucaucc

SEQ ID NO: 43586 - RNA, 21 nt, Homo sapiens
uggcuuauuugaaucuggcuu

SEQ ID NO: 43587 - RNA, 20 nt, Homo sapiens
uggcauguugguaugcaccc

SEQ ID NO: 43588 - RNA, 22 nt, Homo sapiens
uggcaugggguaguagcgcugg

SEQ ID NO: 43589 - RNA, 22 nt, Homo sapiens
uggcauguauuuuguguauuaa

SEQ ID NO: 43590 - RNA, 23 nt, Homo sapiens
uggcaagaauucuuaccgugugg

SEQ ID NO: 43591 - RNA, 22 nt, Homo sapiens
uggcaagagaacaacaucucuc

SEQ ID NO: 43592 - RNA, 22 nt, Homo sapiens
uggcaagaagagcaugagacca

SEQ ID NO: 43593 - RNA, 22 nt, Homo sapiens
uggcaguuuuugccuucaauac

SEQ ID NO: 43594 - RNA, 22 nt, Homo sapiens
ugggauguagccuucuauuuuc

SEQ ID NO: 43595 - RNA, 22 nt, Homo sapiens
uggggcuuuuucuuguauucuc

SEQ ID NO: 43596 - RNA, 22 nt, Homo sapiens
ugggccgcugcaggaugguccc

SEQ ID NO: 43597 - RNA, 22 nt, Homo sapiens
uggguagugucagcugauccau

SEQ ID NO: 43598 - RNA, 19 nt, Homo sapiens
uggguagugaugagacaua

SEQ ID NO: 43599 - RNA, 19 nt, Homo sapiens
uggguaguuuucuggcugg

SEQ ID NO: 43600 - RNA, 22 nt, Homo sapiens
ugguauguugucucuuuguucu

SEQ ID NO: 43601 - RNA, 22 nt, Homo sapiens
uggucaguugugccucaauucc

SEQ ID NO: 43602 - RNA, 22 nt, Homo sapiens
uggucaccugaauuaugcaugu

SEQ ID NO: 43603 - RNA, 20 nt, Homo sapiens
uggucaccuucaggagguuc

SEQ ID NO: 43604 - RNA, 22 nt, Homo sapiens
uggucaaaugccaaucuguagu

SEQ ID NO: 43605 - RNA, 22 nt, Homo sapiens
ugguaugucuuucuuccuguag

SEQ ID NO: 43606 - RNA, 22 nt, Homo sapiens
ugguaagaaaaccauuauuagc

SEQ ID NO: 43607 - RNA, 22 nt, Homo sapiens
ugguagguuuauaaagaauuua

SEQ ID NO: 43608 - RNA, 22 nt, Homo sapiens
ugguacuguccuucuagauucc

SEQ ID NO: 43609 - RNA, 22 nt, Homo sapiens
ugguagugugagucuaaauugg

SEQ ID NO: 43610 - RNA, 22 nt, Homo sapiens
uggaggacugcagaacugaggc

SEQ ID NO: 43611 - RNA, 22 nt, Homo sapiens
uggcaaaaaucacaaguaccuu

SEQ ID NO: 43612 - RNA, 22 nt, Homo sapiens
uggcaaaaaaacgcaauuacgu

SEQ ID NO: 43613 - RNA, 21 nt, Homo sapiens
uggcaacgaggugugcauuau

SEQ ID NO: 43614 - RNA, 22 nt, Homo sapiens
uggagacaaagauagaaaagca

SEQ ID NO: 43615 - RNA, 22 nt, Homo sapiens
uggagagcaaagaauuuguuag

SEQ ID NO: 43616 - RNA, 22 nt, Homo sapiens
uggagauguuuaaaauccacug

SEQ ID NO: 43617 - RNA, 22 nt, Homo sapiens
uggagaacugaugucuccaaga

SEQ ID NO: 43618 - RNA, 22 nt, Homo sapiens
uggaagcaugcaaucugugggg

SEQ ID NO: 43619 - RNA, 20 nt, Homo sapiens
uggaaggcaucugcauuauu

SEQ ID NO: 43620 - RNA, 22 nt, Homo sapiens
ugccaguauuuuauugaagauu

SEQ ID NO: 43621 - RNA, 22 nt, Homo sapiens
ugccaguauuuuauugaggauu

SEQ ID NO: 43622 - RNA, 22 nt, Homo sapiens
ugcaugcaucuuuuauaguagc

SEQ ID NO: 43623 - RNA, 21 nt, Homo sapiens
ugcauggagaacacugagggu

SEQ ID NO: 43624 - RNA, 22 nt, Homo sapiens
ugccauagagauuuguggaacu

SEQ ID NO: 43625 - RNA, 22 nt, Homo sapiens
uggaagacaaguguuagcaugg

SEQ ID NO: 43626 - RNA, 22 nt, Homo sapiens
uggaagacauuuuggaccuugg

SEQ ID NO: 43627 - RNA, 22 nt, Homo sapiens
uggaagauggaguuuuaucauu

SEQ ID NO: 43628 - RNA, 22 nt, Homo sapiens
uggaagaugggaccucaguuuu

SEQ ID NO: 43629 - RNA, 20 nt, Homo sapiens
uggaaaguaagucaugauau

SEQ ID NO: 43630 - RNA, 22 nt, Homo sapiens
uggaaaguacugagguccaccu

SEQ ID NO: 43631 - RNA, 22 nt, Homo sapiens
ugagacgaagucucguucugua

SEQ ID NO: 43632 - RNA, 22 nt, Homo sapiens
ugagacggagucuggcacuguc

SEQ ID NO: 43633 - RNA, 22 nt, Homo sapiens
ugagacggagucucgcucuguu

SEQ ID NO: 43634 - RNA, 22 nt, Homo sapiens
ugagacacugaauccggccuga

SEQ ID NO: 43635 - RNA, 22 nt, Homo sapiens
ugagacacuucccagaucccuu

SEQ ID NO: 43636 - RNA, 22 nt, Homo sapiens
ugagcacauuuacaucaguucc

SEQ ID NO: 43637 - RNA, 22 nt, Homo sapiens
ugagacggagucucacucuguu

SEQ ID NO: 43638 - RNA, 22 nt, Homo sapiens
ugagcaagaucuuuauaauuag

SEQ ID NO: 43639 - RNA, 22 nt, Homo sapiens
ugagcaagaaauagaaacagau

SEQ ID NO: 43640 - RNA, 22 nt, Homo sapiens
ugagcccauuguccugguuuau

SEQ ID NO: 43641 - RNA, 22 nt, Homo sapiens
ugagcuacuacacccagcuugg

SEQ ID NO: 43642 - RNA, 22 nt, Homo sapiens
ugagguaaugcuguagcuguga

SEQ ID NO: 43643 - RNA, 22 nt, Homo sapiens
ugagguaacaaacuaugaguua

SEQ ID NO: 43644 - RNA, 22 nt, Homo sapiens
ugagguaugacuuauuauucuu

SEQ ID NO: 43645 - RNA, 22 nt, Homo sapiens
ugagggaugccugguuuguuuu

SEQ ID NO: 43646 - RNA, 22 nt, Homo sapiens
ugaggcacucccuagcggggug

SEQ ID NO: 43647 - RNA, 22 nt, Homo sapiens
ugaggcacucuagacuuauuca

SEQ ID NO: 43648 - RNA, 22 nt, Homo sapiens
ugaggaucucuaggaauuuauc

SEQ ID NO: 43649 - RNA, 22 nt, Homo sapiens
ugaggcaggagaacggcuugaa

SEQ ID NO: 43650 - RNA, 17 nt, Homo sapiens
ugaggcacuaguaucac

SEQ ID NO: 43651 - RNA, 20 nt, Homo sapiens
ugagcuuguaaacacuguuu

SEQ ID NO: 43652 - RNA, 22 nt, Homo sapiens
ugagcugagaucgugccauugu

SEQ ID NO: 43653 - RNA, 22 nt, Homo sapiens
ugagcugagaaaugcagcagcu

SEQ ID NO: 43654 - RNA, 22 nt, Homo sapiens
ugauagucuuugcuggugaccu

SEQ ID NO: 43655 - RNA, 22 nt, Homo sapiens
ugauaagugaaagugcucuauc

SEQ ID NO: 43656 - RNA, 22 nt, Homo sapiens
ugauaagugagauagcaaguga

SEQ ID NO: 43657 - RNA, 17 nt, Homo sapiens
ugauaagugugagguga

SEQ ID NO: 43658 - RNA, 20 nt, Homo sapiens
ugauaaguugcacuuuccuu

SEQ ID NO: 43659 - RNA, 20 nt, Homo sapiens
ugcaguguccucacuuguca

SEQ ID NO: 43660 - RNA, 22 nt, Homo sapiens
ugcaguaggcccagcgggaggc

SEQ ID NO: 43661 - RNA, 22 nt, Homo sapiens
ugcaguacuuugaaauauacug

SEQ ID NO: 43662 - RNA, 22 nt, Homo sapiens
ugcaguacugucagacuucuua

SEQ ID NO: 43663 - RNA, 22 nt, Homo sapiens
ugcaguguggcucacgccugua

SEQ ID NO: 43664 - RNA, 21 nt, Homo sapiens
ugcagugugguugcccugcug

SEQ ID NO: 43665 - RNA, 22 nt, Homo sapiens
ugcagcauguaggcacguuauu

SEQ ID NO: 43666 - RNA, 20 nt, Homo sapiens
ugcagcacgggcccuuucca

SEQ ID NO: 43667 - RNA, 22 nt, Homo sapiens
ugcaggguccauugucccaagu

SEQ ID NO: 43668 - RNA, 23 nt, Homo sapiens
ugcagcuacauguggccaugugc

SEQ ID NO: 43669 - RNA, 21 nt, Homo sapiens
ugcauaucucuaaugaccagu

SEQ ID NO: 43670 - RNA, 22 nt, Homo sapiens
ugcaucacaguacuccagccug

SEQ ID NO: 43671 - RNA, 22 nt, Homo sapiens
ugcauccauucuagacucaucu

SEQ ID NO: 43672 - RNA, 22 nt, Homo sapiens
ugauaucugaucauccuugaua

SEQ ID NO: 43673 - RNA, 22 nt, Homo sapiens
ugauaugaaguuagcuggcugu

SEQ ID NO: 43674 - RNA, 22 nt, Homo sapiens
ugaugaugaaugaucuuuuaca

SEQ ID NO: 43675 - RNA, 22 nt, Homo sapiens
ugaugaaguauaggaagggcuu

SEQ ID NO: 43676 - RNA, 22 nt, Homo sapiens
ugaugguguuaccaucuuuacu

SEQ ID NO: 43677 - RNA, 22 nt, Homo sapiens
ugaugguuuuaaaaagaggagu

SEQ ID NO: 43678 - RNA, 22 nt, Homo sapiens
ugaugcugaugccugccagaag

SEQ ID NO: 43679 - RNA, 20 nt, Homo sapiens
ugauguccaggcagagguuu

SEQ ID NO: 43680 - RNA, 22 nt, Homo sapiens
ugaugucuugagauggagcuua

SEQ ID NO: 43681 - RNA, 23 nt, Homo sapiens
ugcagcacacugaugggucuuga

SEQ ID NO: 43682 - RNA, 19 nt, Homo sapiens
ugcagcaauguaaaagaca

SEQ ID NO: 43683 - RNA, 17 nt, Homo sapiens
ugcagcacacugauggg

SEQ ID NO: 43684 - RNA, 22 nt, Homo sapiens
ugcaccauugcacuccagccug

SEQ ID NO: 43685 - RNA, 22 nt, Homo sapiens
ugcaccacuguacuccagucug

SEQ ID NO: 43686 - RNA, 22 nt, Homo sapiens
ugcaccacugcuagccugggua

SEQ ID NO: 43687 - RNA, 22 nt, Homo sapiens
ugcaccacugcacuucagccug

SEQ ID NO: 43688 - RNA, 22 nt, Homo sapiens
ugauguaggacauuauuauuuc

SEQ ID NO: 43689 - RNA, 22 nt, Homo sapiens
ugcaccacugcaccccagucug

SEQ ID NO: 43690 - RNA, 22 nt, Homo sapiens
ugcaccacugcacuccacccug

SEQ ID NO: 43691 - RNA, 22 nt, Homo sapiens
ugauguguuuuguaguucaacu

SEQ ID NO: 43692 - RNA, 22 nt, Homo sapiens
gguauguagcaaaagaggugcu

SEQ ID NO: 43693 - RNA, 22 nt, Homo sapiens
gggguaguuacuguuguucuuu

SEQ ID NO: 43694 - RNA, 22 nt, Homo sapiens
gggggagugugguacccagcau

SEQ ID NO: 43695 - RNA, 22 nt, Homo sapiens
ggguaggcaagcggaugucaga

SEQ ID NO: 43696 - RNA, 22 nt, Homo sapiens
gggugguuuuaucucuucccuu

SEQ ID NO: 43697 - RNA, 22 nt, Homo sapiens
gggugguuuuauuaucagugac

SEQ ID NO: 43698 - RNA, 22 nt, Homo sapiens
ggucacccugaugcuggugguc

SEQ ID NO: 43699 - RNA, 22 nt, Homo sapiens
gguauugguugagauuaacuuu

SEQ ID NO: 43700 - RNA, 22 nt, Homo sapiens
guagagguagacuuccuugucu

SEQ ID NO: 43701 - RNA, 22 nt, Homo sapiens
guaacuggccuucaauuucuuc

SEQ ID NO: 43702 - RNA, 22 nt, Homo sapiens
guaacacaugcugcucucuggu

SEQ ID NO: 43703 - RNA, 22 nt, Homo sapiens
ggugucaguuggccccuacugg

SEQ ID NO: 43704 - RNA, 22 nt, Homo sapiens
guaucacguuguuuuggugaaa

SEQ ID NO: 43705 - RNA, 22 nt, Homo sapiens
guaucaugaaguuucuucauuu

SEQ ID NO: 43706 - RNA, 22 nt, Homo sapiens
guaucacacuuauugaccugca

SEQ ID NO: 43707 - RNA, 22 nt, Homo sapiens
guaguggcaugaucuuggcuca

SEQ ID NO: 43708 - RNA, 22 nt, Homo sapiens
guagcaugcaauauuauagaga

SEQ ID NO: 43709 - RNA, 22 nt, Homo sapiens
guagcagaacauguuccuugua

SEQ ID NO: 43710 - RNA, 22 nt, Homo sapiens
guagcagaauaucagauaauuu

SEQ ID NO: 43711 - RNA, 22 nt, Homo sapiens
guaugucuugucuauggcugcu

SEQ ID NO: 43712 - RNA, 22 nt, Homo sapiens
guaugugacuggaacaguagga

SEQ ID NO: 43713 - RNA, 22 nt, Homo sapiens
guauuagguuggggcaaaagua

SEQ ID NO: 43714 - RNA, 22 nt, Homo sapiens
guaugguacuuuaugguuagug

SEQ ID NO: 43715 - RNA, 22 nt, Homo sapiens
guauugaguaaauguuuauugg

SEQ ID NO: 43716 - RNA, 22 nt, Homo sapiens
guauuaguuaucuacugcugug

SEQ ID NO: 43717 - RNA, 22 nt, Homo sapiens
guauuuuguuagggugugguau

SEQ ID NO: 43718 - RNA, 22 nt, Homo sapiens
ggauuuguuggcauuagugaug

SEQ ID NO: 43719 - RNA, 22 nt, Homo sapiens
ggauaacagccaggucaaacaa

SEQ ID NO: 43720 - RNA, 22 nt, Homo sapiens
ggauacaucuggacagccgaau

SEQ ID NO: 43721 - RNA, 22 nt, Homo sapiens
ggaucgauuccaaauguagauc

SEQ ID NO: 43722 - RNA, 22 nt, Homo sapiens
ggcaguggaagugccaguuucu

SEQ ID NO: 43723 - RNA, 22 nt, Homo sapiens
ggcaguguauuacuuaggguuc

SEQ ID NO: 43724 - RNA, 22 nt, Homo sapiens
ggcagcucaggccccgcgcuga

SEQ ID NO: 43725 - RNA, 22 nt, Homo sapiens
ggcagcgugguggauugaaaau

SEQ ID NO: 43726 - RNA, 22 nt, Homo sapiens
ggcagcgugcacuuucgccacu

SEQ ID NO: 43727 - RNA, 22 nt, Homo sapiens
ggcaacaugccgaaaccacguc

SEQ ID NO: 43728 - RNA, 22 nt, Homo sapiens
gggccagaugcauuuguuauuu

SEQ ID NO: 43729 - RNA, 22 nt, Homo sapiens
gggcgagaaucggcugcucagc

SEQ ID NO: 43730 - RNA, 22 nt, Homo sapiens
ggcgguguccuccaagugcuuc

SEQ ID NO: 43731 - RNA, 22 nt, Homo sapiens
ggccggguggccauggcugccc

SEQ ID NO: 43732 - RNA, 22 nt, Homo sapiens
ggcauugugauccaccagccuu

SEQ ID NO: 43733 - RNA, 22 nt, Homo sapiens
ggcauguuuaguagaauguggu

SEQ ID NO: 43734 - RNA, 22 nt, Homo sapiens
ggccagaugcgguggcucacac

SEQ ID NO: 43735 - RNA, 22 nt, Homo sapiens
ggcaugaaguagcccacaggca

SEQ ID NO: 43736 - RNA, 22 nt, Homo sapiens
ggaagguaauuggcuaaugaga

SEQ ID NO: 43737 - RNA, 22 nt, Homo sapiens
ggaagacaguguggugauuccu

SEQ ID NO: 43738 - RNA, 22 nt, Homo sapiens
ggaagacuggcuuguuuaccca

SEQ ID NO: 43739 - RNA, 22 nt, Homo sapiens
gccccaguacaggcuccuuaga

SEQ ID NO: 43740 - RNA, 22 nt, Homo sapiens
gcgcagugggcugugccaucca

SEQ ID NO: 43741 - RNA, 22 nt, Homo sapiens
gcgguagcauagacugcaggac

SEQ ID NO: 43742 - RNA, 22 nt, Homo sapiens
gcccugauacauucuucugccu

SEQ ID NO: 43743 - RNA, 22 nt, Homo sapiens
gccccgggugaugcagccguca

SEQ ID NO: 43744 - RNA, 22 nt, Homo sapiens
gccccugagacuugccucgggc

SEQ ID NO: 43745 - RNA, 22 nt, Homo sapiens
gccauugcacucuagccugagc

SEQ ID NO: 43746 - RNA, 22 nt, Homo sapiens
gcccacuguuaaauuuguuuua

SEQ ID NO: 43747 - RNA, 22 nt, Homo sapiens
ggacuagagaugagauuuuuca

SEQ ID NO: 43748 - RNA, 22 nt, Homo sapiens
ggacagaugggcucccgggucu

SEQ ID NO: 43749 - RNA, 22 nt, Homo sapiens
ggaauguuaaagacuacacuga

SEQ ID NO: 43750 - RNA, 22 nt, Homo sapiens
ggaauauaaaacuuuugacagg

SEQ ID NO: 43751 - RNA, 20 nt, Homo sapiens
ggaauguuaaucuccaugau

SEQ ID NO: 43752 - RNA, 22 nt, Homo sapiens
guguguaaauggcagugagcuc

SEQ ID NO: 43753 - RNA, 23 nt, Homo sapiens
gugugguaggcuauaccaucuag

SEQ ID NO: 43754 - RNA, 22 nt, Homo sapiens
guguggaacucaauacaacgca

SEQ ID NO: 43755 - RNA, 22 nt, Homo sapiens
guguuauugagaaauagggugu

SEQ ID NO: 43756 - RNA, 22 nt, Homo sapiens
guuacagucuuguguaagguua

SEQ ID NO: 43757 - RNA, 22 nt, Homo sapiens
guucaucaggcuuucucuagag

SEQ ID NO: 43758 - RNA, 22 nt, Homo sapiens
guucaguaguucauucauuuau

SEQ ID NO: 43759 - RNA, 22 nt, Homo sapiens
guucaucagggauacuggccuu

SEQ ID NO: 43760 - RNA, 22 nt, Homo sapiens
guucaucagggacacugguuug

SEQ ID NO: 43761 - RNA, 22 nt, Homo sapiens
guucaucagggauacuggccug

SEQ ID NO: 43762 - RNA, 22 nt, Homo sapiens
guucagguauucuggaacagag

SEQ ID NO: 43763 - RNA, 22 nt, Homo sapiens
guuauguaucuugauugggugg

SEQ ID NO: 43764 - RNA, 22 nt, Homo sapiens
guuauguuauguuauguuaugu

SEQ ID NO: 43765 - RNA, 22 nt, Homo sapiens
gugucuccuguggagcuaugua

SEQ ID NO: 43766 - RNA, 22 nt, Homo sapiens
guguccuaugaaacaggaucca

SEQ ID NO: 43767 - RNA, 22 nt, Homo sapiens
gugugauguaaagaacugggga

SEQ ID NO: 43768 - RNA, 22 nt, Homo sapiens
gugugauggcgcacacagggug

SEQ ID NO: 43769 - RNA, 22 nt, Homo sapiens
gugugaacaucauagaguguau

SEQ ID NO: 43770 - RNA, 22 nt, Homo sapiens
gugugacugcucuauuagggcg

SEQ ID NO: 43771 - RNA, 22 nt, Homo sapiens
gugucaugaagguuuuaugcag

SEQ ID NO: 43772 - RNA, 22 nt, Homo sapiens
gugucccagugugcauacaggu

SEQ ID NO: 43773 - RNA, 22 nt, Homo sapiens
guguauguuucucccugucccu

SEQ ID NO: 43774 - RNA, 22 nt, Homo sapiens
guggcacgaugaucugggcuca

SEQ ID NO: 43775 - RNA, 22 nt, Homo sapiens
guggcacaauuaaguagcuauu

SEQ ID NO: 43776 - RNA, 22 nt, Homo sapiens
guguauacauagaauuguguau

SEQ ID NO: 43777 - RNA, 22 nt, Homo sapiens
guggaaucuagagaggcaguag

SEQ ID NO: 43778 - RNA, 22 nt, Homo sapiens
guggaaguuaagugacuuucug

SEQ ID NO: 43779 - RNA, 18 nt, Homo sapiens
guggagugucuuccugga

SEQ ID NO: 43780 - RNA, 22 nt, Homo sapiens
guggacugggagagauaguucc

SEQ ID NO: 43781 - RNA, 22 nt, Homo sapiens
gugagguacgugucaagaacca

SEQ ID NO: 43782 - RNA, 17 nt, Homo sapiens
gugagguauccucaaaa

SEQ ID NO: 43783 - RNA, 22 nt, Homo sapiens
gugaggcacugcugcuuuccag

SEQ ID NO: 43784 - RNA, 22 nt, Homo sapiens
gugagggagcuggaauauuuau

SEQ ID NO: 43785 - RNA, 17 nt, Homo sapiens
gugagguggguaguauc

SEQ ID NO: 43786 - RNA, 22 nt, Homo sapiens
gugagguguuaaccaaccugug

SEQ ID NO: 43787 - RNA, 22 nt, Homo sapiens
gugaggugguacaauauuaacu

SEQ ID NO: 43788 - RNA, 22 nt, Homo sapiens
gugagcgaggaaacgacggcgc

SEQ ID NO: 43789 - RNA, 22 nt, Homo sapiens
gugagcuauguccugguuuggg

SEQ ID NO: 43790 - RNA, 22 nt, Homo sapiens
gugagaugguaucucauugugg

SEQ ID NO: 43791 - RNA, 22 nt, Homo sapiens
gugagcacugaaagaaggcaag

SEQ ID NO: 43792 - RNA, 22 nt, Homo sapiens
gugagcauaggaggcuucuguu

SEQ ID NO: 43793 - RNA, 22 nt, Homo sapiens
gugaguggacgugaccaauaaa

SEQ ID NO: 43794 - RNA, 22 nt, Homo sapiens
gugagucaugucccaucugauu

SEQ ID NO: 43795 - RNA, 22 nt, Homo sapiens
gugaucuuucaggcuugaccau

SEQ ID NO: 43796 - RNA, 22 nt, Homo sapiens
gugaugacauucagagaugaag

SEQ ID NO: 43797 - RNA, 22 nt, Homo sapiens
gugaugguaguuuguauuucug

SEQ ID NO: 43798 - RNA, 22 nt, Homo sapiens
guggaagcacaggccuccugga

SEQ ID NO: 43799 - RNA, 22 nt, Homo sapiens
gucccaguggaaccuccaagcu

SEQ ID NO: 43800 - RNA, 22 nt, Homo sapiens
gucgguguuuccugagaacgaa

SEQ ID NO: 43801 - RNA, 22 nt, Homo sapiens
guccuugaggcuuugacugugg

SEQ ID NO: 43802 - RNA, 22 nt, Homo sapiens
gucgugcagaccucacagcauu

SEQ ID NO: 43803 - RNA, 22 nt, Homo sapiens
gucucccaaccccugugcccag

SEQ ID NO: 43804 - RNA, 22 nt, Homo sapiens
gucucauugcaguuagaccugu

SEQ ID NO: 43805 - RNA, 22 nt, Homo sapiens
gucucacaggcaugaugccagc

SEQ ID NO: 43806 - RNA, 18 nt, Homo sapiens
gucucacaugguggaagc

SEQ ID NO: 43807 - RNA, 22 nt, Homo sapiens
gucagcaucaccaugucuauga

SEQ ID NO: 43808 - RNA, 22 nt, Homo sapiens
gucagcaaagaggaauaguuug

SEQ ID NO: 43809 - RNA, 22 nt, Homo sapiens
guccaagacuaggaguuggcag

SEQ ID NO: 43810 - RNA, 22 nt, Homo sapiens
gucacugugaggaggggccagg

SEQ ID NO: 43811 - RNA, 22 nt, Homo sapiens
gucagagcacugaguugugggc

SEQ ID NO: 43812 - RNA, 22 nt, Homo sapiens
gucagaaucucagaugacaacg

SEQ ID NO: 43813 - RNA, 22 nt, Homo sapiens
gucaauguaucuagcuguauua

SEQ ID NO: 43814 - RNA, 22 nt, Homo sapiens
gucacaggaaacuaauaugcgc

SEQ ID NO: 43815 - RNA, 22 nt, Homo sapiens
gucaagagaacuuucuaucacu

SEQ ID NO: 43816 - RNA, 22 nt, Homo sapiens
gucacaguguuuguucauccca

SEQ ID NO: 43817 - RNA, 22 nt, Homo sapiens
gucacugagaagguuaguuugu

SEQ ID NO: 43818 - RNA, 22 nt, Homo sapiens
uagacccauuguucagagagug

SEQ ID NO: 43819 - RNA, 22 nt, Homo sapiens
uagagauaucaauuucauggug

SEQ ID NO: 43820 - RNA, 21 nt, Homo sapiens
uagagagcaauaccuccagag

SEQ ID NO: 43821 - RNA, 22 nt, Homo sapiens
uagagcacaagguagauuucua

SEQ ID NO: 43822 - RNA, 22 nt, Homo sapiens
uagauaguaaagccauuagcuu

SEQ ID NO: 43823 - RNA, 22 nt, Homo sapiens
uagagguaggucuucgagucuc

SEQ ID NO: 43824 - RNA, 22 nt, Homo sapiens
uagaucaacuuugguaagagaa

SEQ ID NO: 43825 - RNA, 19 nt, Homo sapiens
uagaugucuuugcauagau

SEQ ID NO: 43826 - RNA, 22 nt, Homo sapiens
uagagcacagugauuagaccua

SEQ ID NO: 43827 - RNA, 20 nt, Homo sapiens
uagcacaucuggcuguagag

SEQ ID NO: 43828 - RNA, 22 nt, Homo sapiens
uagcacaucuucuuggccugca

SEQ ID NO: 43829 - RNA, 22 nt, Homo sapiens
uacucagugacugguggaucaa

SEQ ID NO: 43830 - RNA, 22 nt, Homo sapiens
uacucaguagacacucauaugu

SEQ ID NO: 43831 - RNA, 22 nt, Homo sapiens
uacguuguuugagggcaggagu

SEQ ID NO: 43832 - RNA, 22 nt, Homo sapiens
uacguguauuguuuucacaaga

SEQ ID NO: 43833 - RNA, 22 nt, Homo sapiens
uacuaguaagggugguuuggcu

SEQ ID NO: 43834 - RNA, 22 nt, Homo sapiens
uacagcacaggugcagguguug

SEQ ID NO: 43835 - RNA, 22 nt, Homo sapiens
uacagcacugugcauagugguu

SEQ ID NO: 43836 - RNA, 22 nt, Homo sapiens
uacacaugugaguucuuuucua

SEQ ID NO: 43837 - RNA, 22 nt, Homo sapiens
uacaagcuaaaauggaagauca

SEQ ID NO: 43838 - RNA, 16 nt, Homo sapiens
uaacacaguucccacc

SEQ ID NO: 43839 - RNA, 22 nt, Homo sapiens
uaacaguguauuuacuacuucc

SEQ ID NO: 43840 - RNA, 22 nt, Homo sapiens
uaacaguggucugugguaucug

SEQ ID NO: 43841 - RNA, 22 nt, Homo sapiens
uaacagcauuugugucuaguag

SEQ ID NO: 43842 - RNA, 22 nt, Homo sapiens
uaacaggcuacucuugcauugc

SEQ ID NO: 43843 - RNA, 22 nt, Homo sapiens
uaaaugacugucaguagaugaa

SEQ ID NO: 43844 - RNA, 22 nt, Homo sapiens
uaacacagagcuccuaaucccu

SEQ ID NO: 43845 - RNA, 19 nt, Homo sapiens
uaacacaguuguguuugag

SEQ ID NO: 43846 - RNA, 20 nt, Homo sapiens
guucccuguaggugugcgga

SEQ ID NO: 43847 - RNA, 22 nt, Homo sapiens
guuccuuguagaugcuggauau

SEQ ID NO: 43848 - RNA, 22 nt, Homo sapiens
guugagcaaacagcuuaacagu

SEQ ID NO: 43849 - RNA, 22 nt, Homo sapiens
guugcaugucugggaggccagc

SEQ ID NO: 43850 - RNA, 22 nt, Homo sapiens
guugaucuauguugcuggcagu

SEQ ID NO: 43851 - RNA, 22 nt, Homo sapiens
guugauguugcagucuugagga

SEQ ID NO: 43852 - RNA, 22 nt, Homo sapiens
uaaggcuuuuguucagcguggg

SEQ ID NO: 43853 - RNA, 22 nt, Homo sapiens
uaagucuuuuuggaguuuauaa

SEQ ID NO: 43854 - RNA, 22 nt, Homo sapiens
uaaugcaucaugguuggcaaac

SEQ ID NO: 43855 - RNA, 22 nt, Homo sapiens
uaaugcaucagugguaguucuu

SEQ ID NO: 43856 - RNA, 22 nt, Homo sapiens
uaaugcauacagaagguguuuu

SEQ ID NO: 43857 - RNA, 22 nt, Homo sapiens
uaaugcacucgaaucauggaau

SEQ ID NO: 43858 - RNA, 22 nt, Homo sapiens
uacaacacugguucgacaugug

SEQ ID NO: 43859 - RNA, 22 nt, Homo sapiens
uaaugcauguaaugggcugaua

SEQ ID NO: 43860 - RNA, 22 nt, Homo sapiens
uaaugugaauagugcuguaaug

SEQ ID NO: 43861 - RNA, 22 nt, Homo sapiens
uaucacggaguacauguucugu

SEQ ID NO: 43862 - RNA, 22 nt, Homo sapiens
uaucaccuugcaguggaugcua

SEQ ID NO: 43863 - RNA, 22 nt, Homo sapiens
uaucacuguuguuuguuuaagg

SEQ ID NO: 43864 - RNA, 19 nt, Homo sapiens
uaucacuucccuggaaaca

SEQ ID NO: 43865 - RNA, 22 nt, Homo sapiens
uaucagaguuacacugaagacu

SEQ ID NO: 43866 - RNA, 22 nt, Homo sapiens
uaucagcagagucauacuucaa

SEQ ID NO: 43867 - RNA, 22 nt, Homo sapiens
uaucauagucacuuccaguuug

SEQ ID NO: 43868 - RNA, 22 nt, Homo sapiens
uaucaucauguuuuugcugugu

SEQ ID NO: 43869 - RNA, 18 nt, Homo sapiens
uaucauguagggaaguug

SEQ ID NO: 43870 - RNA, 21 nt, Homo sapiens
uaucccagucacaucuaccca

SEQ ID NO: 43871 - RNA, 22 nt, Homo sapiens
uaucccaguggauguaccccau

SEQ ID NO: 43872 - RNA, 22 nt, Homo sapiens
uaucccuguggacuucccaaca

SEQ ID NO: 43873 - RNA, 22 nt, Homo sapiens
uauccacgugaaaaagauugaa

SEQ ID NO: 43874 - RNA, 22 nt, Homo sapiens
uaucauggaaagauguugaaau

SEQ ID NO: 43875 - RNA, 21 nt, Homo sapiens
uaucauggccauccucuucuc

SEQ ID NO: 43876 - RNA, 22 nt, Homo sapiens
uaucauugccucaaucuguauu

SEQ ID NO: 43877 - RNA, 22 nt, Homo sapiens
uauagcacugaaagaggugauu

SEQ ID NO: 43878 - RNA, 22 nt, Homo sapiens
uauagcauuuugauccuguaga

SEQ ID NO: 43879 - RNA, 22 nt, Homo sapiens
uauauagcuaugucuguccauu

SEQ ID NO: 43880 - RNA, 22 nt, Homo sapiens
uauaguguuuucaaaaguaugu

SEQ ID NO: 43881 - RNA, 22 nt, Homo sapiens
uauagcuuuuuagggaauuugg

SEQ ID NO: 43882 - RNA, 22 nt, Homo sapiens
uaguccauuuucaugcugcuau

SEQ ID NO: 43883 - RNA, 22 nt, Homo sapiens
uagucacacacucaacuuuuca

SEQ ID NO: 43884 - RNA, 22 nt, Homo sapiens
uaguagcaccucucaugagcuu

SEQ ID NO: 43885 - RNA, 22 nt, Homo sapiens
uaguagagauggggcacaugcc

SEQ ID NO: 43886 - RNA, 22 nt, Homo sapiens
uaguacuggcauguauuuccca

SEQ ID NO: 43887 - RNA, 22 nt, Homo sapiens
uagcaguauaugagagcuauug

SEQ ID NO: 43888 - RNA, 22 nt, Homo sapiens
uagcagguggugaccacauuuu

SEQ ID NO: 43889 - RNA, 22 nt, Homo sapiens
uagcaguaagaaacugacauug

SEQ ID NO: 43890 - RNA, 21 nt, Homo sapiens
uagcagcguuguugcaaaugu

SEQ ID NO: 43891 - RNA, 19 nt, Homo sapiens
uagcagcaugauuuauaau

SEQ ID NO: 43892 - RNA, 22 nt, Homo sapiens
uagcagcuuuauugagguaaau

SEQ ID NO: 43893 - RNA, 22 nt, Homo sapiens
uagcagcaucucuggcuucuac

SEQ ID NO: 43894 - RNA, 22 nt, Homo sapiens
uagcagcaccccacucuacugg

SEQ ID NO: 43895 - RNA, 22 nt, Homo sapiens
uagcacccucuccuaguccugc

SEQ ID NO: 43896 - RNA, 18 nt, Homo sapiens
uagcagacaucauugggg

SEQ ID NO: 43897 - RNA, 22 nt, Homo sapiens
uagcagaauaacuugccagccu

SEQ ID NO: 43898 - RNA, 22 nt, Homo sapiens
uaugucacuggacauaaguucu

SEQ ID NO: 43899 - RNA, 19 nt, Homo sapiens
uauguaguuuucucaauau

SEQ ID NO: 43900 - RNA, 22 nt, Homo sapiens
uaugucaugggguuuuugagau

SEQ ID NO: 43901 - RNA, 22 nt, Homo sapiens
uauguuaucaaaaagcuaagga

SEQ ID NO: 43902 - RNA, 22 nt, Homo sapiens
uauggacuuuaggauagcuuuu

SEQ ID NO: 43903 - RNA, 22 nt, Homo sapiens
uauggauauuacuccacaaaga

SEQ ID NO: 43904 - RNA, 22 nt, Homo sapiens
uaugaucauuauguuauugcag

SEQ ID NO: 43905 - RNA, 22 nt, Homo sapiens
uaugagcacauauguaucuaug

SEQ ID NO: 43906 - RNA, 22 nt, Homo sapiens
uaugagcaaaaugaggguuagu

SEQ ID NO: 43907 - RNA, 22 nt, Homo sapiens
ucaaaguagaaaaggggcaauu

SEQ ID NO: 43908 - RNA, 22 nt, Homo sapiens
ucaaaguauucuucugagaacc

SEQ ID NO: 43909 - RNA, 22 nt, Homo sapiens
ucaaaguaaagccucaggaugg

SEQ ID NO: 43910 - RNA, 22 nt, Homo sapiens
uauugcuggcucugucuucauu

SEQ ID NO: 43911 - RNA, 22 nt, Homo sapiens
uauugcuuaugaugcugaauua

SEQ ID NO: 43912 - RNA, 22 nt, Homo sapiens
uauugcuggauguauuacaugu

SEQ ID NO: 43913 - RNA, 22 nt, Homo sapiens
uauugcuuuacucucuuauccu

SEQ ID NO: 43914 - RNA, 22 nt, Homo sapiens
uauuggcucuguuucucugaag

SEQ ID NO: 43915 - RNA, 22 nt, Homo sapiens
uauuauuguccuucuauaccca

SEQ ID NO: 43916 - RNA, 22 nt, Homo sapiens
cagccgggugagguggcuuguu

SEQ ID NO: 43917 - RNA, 20 nt, Homo sapiens
cagcacgcacaugagacugu

SEQ ID NO: 43918 - RNA, 22 nt, Homo sapiens
cagcacauagcaguugcucagu

SEQ ID NO: 43919 - RNA, 20 nt, Homo sapiens
cagcaaccugcucucuuccu

SEQ ID NO: 43920 - RNA, 22 nt, Homo sapiens
caugucuuuuauucugugugau

SEQ ID NO: 43921 - RNA, 22 nt, Homo sapiens
caugucacuuccucucugaugg

SEQ ID NO: 43922 - RNA, 22 nt, Homo sapiens
cauuacacuuguaagguuuuuc

SEQ ID NO: 43923 - RNA, 22 nt, Homo sapiens
cauuacacuccagccuggguga

SEQ ID NO: 43924 - RNA, 22 nt, Homo sapiens
cauugcaaugaggucuugcagu

SEQ ID NO: 43925 - RNA, 22 nt, Homo sapiens
cauugcacuccagccugcacga

SEQ ID NO: 43926 - RNA, 22 nt, Homo sapiens
cauugcacuccagccugccugg

SEQ ID NO: 43927 - RNA, 22 nt, Homo sapiens
cauugcacuccagccugcugac

SEQ ID NO: 43928 - RNA, 22 nt, Homo sapiens
cauugcacuccagccuugguga

SEQ ID NO: 43929 - RNA, 22 nt, Homo sapiens
cauugcacuccagccuggccaa

SEQ ID NO: 43930 - RNA, 19 nt, Homo sapiens
cauugcacuccacccuggg

SEQ ID NO: 43931 - RNA, 22 nt, Homo sapiens
cauugcacuccagccuagccaa

SEQ ID NO: 43932 - RNA, 22 nt, Homo sapiens
cauugcuuuuggugguuuagac

SEQ ID NO: 43933 - RNA, 22 nt, Homo sapiens
cauugcagauccuucaaaugac

SEQ ID NO: 43934 - RNA, 22 nt, Homo sapiens
cauugcacucuagccucggcaa

SEQ ID NO: 43935 - RNA, 22 nt, Homo sapiens
cauugcacuccaucuugggcaa

SEQ ID NO: 43936 - RNA, 22 nt, Homo sapiens
ccagcaccauuuguugaauagg

SEQ ID NO: 43937 - RNA, 22 nt, Homo sapiens
ccagugcauggaucccaggggg

SEQ ID NO: 43938 - RNA, 22 nt, Homo sapiens
ccagugauuguauggugaaggu

SEQ ID NO: 43939 - RNA, 22 nt, Homo sapiens
ccagguuucuagaauaauuccu

SEQ ID NO: 43940 - RNA, 21 nt, Homo sapiens
ccauggcaaugguaaacugac

SEQ ID NO: 43941 - RNA, 22 nt, Homo sapiens
cccagaguucuuaaauacugag

SEQ ID NO: 43942 - RNA, 22 nt, Homo sapiens
ccaguuuuuggcaaugaugaau

SEQ ID NO: 43943 - RNA, 22 nt, Homo sapiens
ccagugguugggccggagacgg

SEQ ID NO: 43944 - RNA, 22 nt, Homo sapiens
ccaguguuuggauuagggaugc

SEQ ID NO: 43945 - RNA, 22 nt, Homo sapiens
cccaguuuugccacuuacuagc

SEQ ID NO: 43946 - RNA, 22 nt, Homo sapiens
cccaguguuacgugacagccug

SEQ ID NO: 43947 - RNA, 22 nt, Homo sapiens
ccucauggagaaccucugcuag

SEQ ID NO: 43948 - RNA, 22 nt, Homo sapiens
ccugaugacacgggagauguac

SEQ ID NO: 43949 - RNA, 19 nt, Homo sapiens
ccugcuguucuuuugcacc

SEQ ID NO: 43950 - RNA, 21 nt, Homo sapiens
ccugaugaccucugagaguua

SEQ ID NO: 43951 - RNA, 22 nt, Homo sapiens
ccuugguggccacaagacauug

SEQ ID NO: 43952 - RNA, 22 nt, Homo sapiens
cuagcagacacuuccagagagu

SEQ ID NO: 43953 - RNA, 22 nt, Homo sapiens
cuagcagcauaagaaucaccaa

SEQ ID NO: 43954 - RNA, 22 nt, Homo sapiens
cuagccuggagugcaguggugc

SEQ ID NO: 43955 - RNA, 22 nt, Homo sapiens
cucgcuccauuucggugaucaa

SEQ ID NO: 43956 - RNA, 22 nt, Homo sapiens
cuccauguggcuaacuuuuaaa

SEQ ID NO: 43957 - RNA, 22 nt, Homo sapiens
cucccugagccagggcuuugac

SEQ ID NO: 43958 - RNA, 22 nt, Homo sapiens
cuccaguuucagaaucccaugu

SEQ ID NO: 43959 - RNA, 22 nt, Homo sapiens
cuccaggugucauccaccuccu

SEQ ID NO: 43960 - RNA, 22 nt, Homo sapiens
cuccaugagauuguugaaguag

SEQ ID NO: 43961 - RNA, 22 nt, Homo sapiens
cucauggauggucuggcagcca

SEQ ID NO: 43962 - RNA, 22 nt, Homo sapiens
cucaguagaaaauacauggacu

SEQ ID NO: 43963 - RNA, 22 nt, Homo sapiens
cuauggcuguaugacgugcaug

SEQ ID NO: 43964 - RNA, 22 nt, Homo sapiens
cucagcaguggauuuaccacca

SEQ ID NO: 43965 - RNA, 22 nt, Homo sapiens
cuagguuauacucugaaauggu

SEQ ID NO: 43966 - RNA, 22 nt, Homo sapiens
cacucaguuugugguacuuugu

SEQ ID NO: 43967 - RNA, 22 nt, Homo sapiens
cacugcacuccagccuaagagg

SEQ ID NO: 43968 - RNA, 22 nt, Homo sapiens
cacugcacuccagucuggcgac

SEQ ID NO: 43969 - RNA, 22 nt, Homo sapiens
cacugcacuccagucugacgac

SEQ ID NO: 43970 - RNA, 22 nt, Homo sapiens
cacugcacuccagcuuugguga

SEQ ID NO: 43971 - RNA, 22 nt, Homo sapiens
cacugcaguaaauugcgucggu

SEQ ID NO: 43972 - RNA, 22 nt, Homo sapiens
cacugcauggccacccauguua

SEQ ID NO: 43973 - RNA, 22 nt, Homo sapiens
cacugcauuacucaugagcaug

SEQ ID NO: 43974 - RNA, 22 nt, Homo sapiens
cagacaugucuuguggccgugg

SEQ ID NO: 43975 - RNA, 22 nt, Homo sapiens
cagagagcuugcccuuguauau

SEQ ID NO: 43976 - RNA, 22 nt, Homo sapiens
caagggguggaaaugguagugu

SEQ ID NO: 43977 - RNA, 22 nt, Homo sapiens
caccgagugugccaucuucuca

SEQ ID NO: 43978 - RNA, 22 nt, Homo sapiens
cacacugucuucauuacuguag

SEQ ID NO: 43979 - RNA, 22 nt, Homo sapiens
caauacuguuaccugaaauagg

SEQ ID NO: 43980 - RNA, 21 nt, Homo sapiens
caaugacacuguagcugugcu

SEQ ID NO: 43981 - RNA, 22 nt, Homo sapiens
caaugcauuauucucccacuuc

SEQ ID NO: 43982 - RNA, 22 nt, Homo sapiens
auugaguaaaaaauagugaugu

SEQ ID NO: 43983 - RNA, 22 nt, Homo sapiens
auucagaggggcagcugucuug

SEQ ID NO: 43984 - RNA, 22 nt, Homo sapiens
auugaaucuaaaaugagucucu

SEQ ID NO: 43985 - RNA, 22 nt, Homo sapiens
augugacuugugaaaaguucag

SEQ ID NO: 43986 - RNA, 22 nt, Homo sapiens
augugacugauguaaucagaca

SEQ ID NO: 43987 - RNA, 22 nt, Homo sapiens
augugaugguuaauuuuaugug

SEQ ID NO: 43988 - RNA, 20 nt, Homo sapiens
augugcaguguggcaaccaa

SEQ ID NO: 43989 - RNA, 18 nt, Homo sapiens
augugcaauuuuguauuu

SEQ ID NO: 43990 - RNA, 22 nt, Homo sapiens
auuauguuguauuuccuugcag

SEQ ID NO: 43991 - RNA, 22 nt, Homo sapiens
auuagguuggugcaaaaguaau

SEQ ID NO: 43992 - RNA, 22 nt, Homo sapiens
auugcucacacaaagccuguuu

SEQ ID NO: 43993 - RNA, 22 nt, Homo sapiens
auugcacacagaaucaggguaa

SEQ ID NO: 43994 - RNA, 22 nt, Homo sapiens
auuucuacuccuguguccagaa

SEQ ID NO: 43995 - RNA, 18 nt, Homo sapiens
auuguaagauguauggga

SEQ ID NO: 43996 - RNA, 22 nt, Homo sapiens
auuggugaccugcggcaguaug

SEQ ID NO: 43997 - RNA, 22 nt, Homo sapiens
auuggauagucuuuaucuguug

SEQ ID NO: 43998 - RNA, 22 nt, Homo sapiens
auugcuuacccuguauuagauc

SEQ ID NO: 43999 - RNA, 22 nt, Homo sapiens
auuggaguuguacgcacgcuca

SEQ ID NO: 44000 - RNA, 16 nt, Homo sapiens
auuggcaagaugccuu

SEQ ID NO: 44001 - RNA, 22 nt, Homo sapiens
auuggcuuuauacauaagaaua

SEQ ID NO: 44002 - RNA, 22 nt, Homo sapiens
cuuuugugauucuucaguuacu

SEQ ID NO: 44003 - RNA, 20 nt, Homo sapiens
cuuuuagcagcagcaagaga

SEQ ID NO: 44004 - RNA, 23 nt, Homo sapiens
cuuuugcaaugugaucuugccac

SEQ ID NO: 44005 - RNA, 22 nt, Homo sapiens
gaaauguauuaaugaguugaaa

SEQ ID NO: 44006 - RNA, 22 nt, Homo sapiens
gaacugggguuggguugcgaua

SEQ ID NO: 44007 - RNA, 21 nt, Homo sapiens
gaaauacugccuuaggagcug

SEQ ID NO: 44008 - RNA, 22 nt, Homo sapiens
gaaaauccauccccagggagua

SEQ ID NO: 44009 - RNA, 22 nt, Homo sapiens
gaaucacugugguaucccaugc

SEQ ID NO: 44010 - RNA, 22 nt, Homo sapiens
gacauguuucucucuguuuacu

SEQ ID NO: 44011 - RNA, 22 nt, Homo sapiens
gacauguuuucauguauuugga

SEQ ID NO: 44012 - RNA, 21 nt, Homo sapiens
gaccacagcagggaaugucag

SEQ ID NO: 44013 - RNA, 22 nt, Homo sapiens
gacauguuuuuuaagguuuaug

SEQ ID NO: 44014 - RNA, 20 nt, Homo sapiens
gacauguuuuguggccuaac

SEQ ID NO: 44015 - RNA, 22 nt, Homo sapiens
gaccuuguagaaucucaugauu

SEQ ID NO: 44016 - RNA, 22 nt, Homo sapiens
gacgauaucaaggaaaugaagu

SEQ ID NO: 44017 - RNA, 17 nt, Homo sapiens
gaaguguuucuucauga

SEQ ID NO: 44018 - RNA, 23 nt, Homo sapiens
gaaguauagcaugcacauggaaa

SEQ ID NO: 44019 - RNA, 22 nt, Homo sapiens
gaagugcaguggcacagucaug

SEQ ID NO: 44020 - RNA, 22 nt, Homo sapiens
gaaguaauaaauggauucuuaa

SEQ ID NO: 44021 - RNA, 22 nt, Homo sapiens
gaaggugcuuggugaaugcauu

SEQ ID NO: 44022 - RNA, 22 nt, Homo sapiens
gaagagacagguucccacaaaa

SEQ ID NO: 44023 - RNA, 22 nt, Homo sapiens
gaagacauuugcugcacguccu

SEQ ID NO: 44024 - RNA, 22 nt, Homo sapiens
gaagauguugcuuaccuuggag

SEQ ID NO: 44025 - RNA, 22 nt, Homo sapiens
cugaaaagcaucugcauagcug

SEQ ID NO: 44026 - RNA, 22 nt, Homo sapiens
cugacaagugaucacagcagca

SEQ ID NO: 44027 - RNA, 22 nt, Homo sapiens
cugacaugcagccacugcaccu

SEQ ID NO: 44028 - RNA, 22 nt, Homo sapiens
cugacguguuuuccagaccuuu

SEQ ID NO: 44029 - RNA, 22 nt, Homo sapiens
cuggcaccauuuugaucaaagg

SEQ ID NO: 44030 - RNA, 22 nt, Homo sapiens
cuggcaguguuucuugugggcu

SEQ ID NO: 44031 - RNA, 22 nt, Homo sapiens
cuguuaacauguuguggauaau

SEQ ID NO: 44032 - RNA, 23 nt, Homo sapiens
cuguggugaggcccuagaaucug

SEQ ID NO: 44033 - RNA, 22 nt, Homo sapiens
cuugacaaugcuucaggcugaa

SEQ ID NO: 44034 - RNA, 22 nt, Homo sapiens
cuugaccaauauggugaaaccc

SEQ ID NO: 44035 - RNA, 22 nt, Homo sapiens
cuugaucaaugugguacuugau

SEQ ID NO: 44036 - RNA, 22 nt, Homo sapiens
cuucuguuaguucugauaacuu

SEQ ID NO: 44037 - RNA, 22 nt, Homo sapiens
cugguuguuacaaagagccugg

SEQ ID NO: 44038 - RNA, 21 nt, Homo sapiens
cugguguuagcacuucuuccc

SEQ ID NO: 44039 - RNA, 20 nt, Homo sapiens
cugugguagggaccaggaau

SEQ ID NO: 44040 - RNA, 22 nt, Homo sapiens
cugugaucuuuuuucauguggu

SEQ ID NO: 44041 - RNA, 22 nt, Homo sapiens
gcaugacaaugauugcucuuca

SEQ ID NO: 44042 - RNA, 22 nt, Homo sapiens
gcauggaaggcgcuuugugacu

SEQ ID NO: 44043 - RNA, 22 nt, Homo sapiens
gcauggagaaggggacugauuc

SEQ ID NO: 44044 - RNA, 22 nt, Homo sapiens
gcauggagcauacauuucuguu

SEQ ID NO: 44045 - RNA, 22 nt, Homo sapiens
gccaagaugcugcccacagaca

SEQ ID NO: 44046 - RNA, 19 nt, Homo sapiens
gccaccuggugcguguucu

SEQ ID NO: 44047 - RNA, 22 nt, Homo sapiens
gccaguauuuuauugagaauuu

SEQ ID NO: 44048 - RNA, 22 nt, Homo sapiens
gccauggugucuuauuuuugug

SEQ ID NO: 44049 - RNA, 22 nt, Homo sapiens
gccauugcacuccagccugagc

SEQ ID NO: 44050 - RNA, 22 nt, Homo sapiens
gccauugcacuccagccucggg

SEQ ID NO: 44051 - RNA, 22 nt, Homo sapiens
gcagugugauguuuuaaucuau

SEQ ID NO: 44052 - RNA, 22 nt, Homo sapiens
gcagugacaugugccaguuuau

SEQ ID NO: 44053 - RNA, 22 nt, Homo sapiens
gcauaaagcuaauaagacgaag

SEQ ID NO: 44054 - RNA, 22 nt, Homo sapiens
gcaguguggguagagggcaaga

SEQ ID NO: 44055 - RNA, 22 nt, Homo sapiens
gcaucacagcuccugugcuggc

SEQ ID NO: 44056 - RNA, 22 nt, Homo sapiens
gcagcaucaaaucacacaagau

SEQ ID NO: 44057 - RNA, 19 nt, Homo sapiens
gcagagaugugguagcuug

SEQ ID NO: 44058 - RNA, 17 nt, Homo sapiens
gcacuggcguaucccac

SEQ ID NO: 44059 - RNA, 22 nt, Homo sapiens
gcaaaguaauuguuguuuuugc

SEQ ID NO: 44060 - RNA, 22 nt, Homo sapiens
gcaaaaaguagugcugguuagg

SEQ ID NO: 44061 - RNA, 20 nt, Homo sapiens
gcaaaguuuagcucccacua

SEQ ID NO: 44062 - RNA, 22 nt, Homo sapiens
gaugcaguaagaaugcauagcg

SEQ ID NO: 44063 - RNA, 22 nt, Homo sapiens
gaugauguuggaaacuuggugc

SEQ ID NO: 44064 - RNA, 22 nt, Homo sapiens
gagcucguuuuugcugacucuu

SEQ ID NO: 44065 - RNA, 22 nt, Homo sapiens
gagcucauuaaaaauguagaau

SEQ ID NO: 44066 - RNA, 22 nt, Homo sapiens
gagcuuguagugugaaugguau

SEQ ID NO: 44067 - RNA, 22 nt, Homo sapiens
gagcuggacuucuuaccuuuuc

SEQ ID NO: 44068 - RNA, 22 nt, Homo sapiens
gaggcaaguggccaccgagucu

SEQ ID NO: 44069 - RNA, 22 nt, Homo sapiens
gagcccauuucacuuguccagc

SEQ ID NO: 44070 - RNA, 22 nt, Homo sapiens
gagcaguugagagugcuggcca

SEQ ID NO: 44071 - RNA, 22 nt, Homo sapiens
gagccuguaggaggagaggugg

SEQ ID NO: 44072 - RNA, 22 nt, Homo sapiens
gagcuacauggauagucugcau

SEQ ID NO: 44073 - RNA, 21 nt, Homo sapiens
gagcuaggugaggcuguaaug

SEQ ID NO: 44074 - RNA, 22 nt, Homo sapiens
gacuaggagagcagcugcccau

SEQ ID NO: 44075 - RNA, 22 nt, Homo sapiens
gaccugagagguacauguauuu

SEQ ID NO: 44076 - RNA, 21 nt, Homo sapiens
gacuacaccaggaugcuaguu

SEQ ID NO: 44077 - RNA, 22 nt, Homo sapiens
gacucagucuuggauuuuuaau

SEQ ID NO: 44078 - RNA, 18 nt, Homo sapiens
gacucaguuucuaaggca

SEQ ID NO: 44079 - RNA, 21 nt, Homo sapiens
gagcacauuguccucuaacgc

SEQ ID NO: 44080 - RNA, 21 nt, Homo sapiens
gagguagggauuaaagaccuc

SEQ ID NO: 44081 - RNA, 22 nt, Homo sapiens
gagguagggucccacuauguug

SEQ ID NO: 44082 - RNA, 22 nt, Homo sapiens
gagguaguuuaguuuuggggaa

SEQ ID NO: 44083 - RNA, 22 nt, Homo sapiens
gauacuguauccuaaaagcuuu

SEQ ID NO: 44084 - RNA, 19 nt, Homo sapiens
gauagacaucacagugcca

SEQ ID NO: 44085 - RNA, 21 nt, Homo sapiens
gauaaguuggcagccagcacc

SEQ ID NO: 44086 - RNA, 22 nt, Homo sapiens
gaugauguuacucuuuuuccuu

SEQ ID NO: 44087 - RNA, 22 nt, Homo sapiens
gaugaggcuagagacaugugua

SEQ ID NO: 44088 - RNA, 22 nt, Homo sapiens
gaugagguaggccugcuuugaa

SEQ ID NO: 44089 - RNA, 22 nt, Homo sapiens
gauagcauucaauuaucuguug

SEQ ID NO: 44090 - RNA, 22 nt, Homo sapiens
agcuggaauuuaagguagauag

SEQ ID NO: 44091 - RNA, 22 nt, Homo sapiens
agcugccagucuuguaaggccu

SEQ ID NO: 44092 - RNA, 22 nt, Homo sapiens
agcuagcauucauaguuugagg

SEQ ID NO: 44093 - RNA, 22 nt, Homo sapiens
agcgguguuaggaaggugaggg

SEQ ID NO: 44094 - RNA, 22 nt, Homo sapiens
agcuuguguuuuucuaaguauc

SEQ ID NO: 44095 - RNA, 22 nt, Homo sapiens
agcuggcuguagcugcaagucu

SEQ ID NO: 44096 - RNA, 20 nt, Homo sapiens
agcuggguguguuggugcau

SEQ ID NO: 44097 - RNA, 22 nt, Homo sapiens
agcugguccugugacuugcuuc

SEQ ID NO: 44098 - RNA, 22 nt, Homo sapiens
agcuggucucaggugcccugcu

SEQ ID NO: 44099 - RNA, 22 nt, Homo sapiens
aggcagcuguuauauacugagu

SEQ ID NO: 44100 - RNA, 22 nt, Homo sapiens
aggcagucucugccggcugagg

SEQ ID NO: 44101 - RNA, 22 nt, Homo sapiens
aggcaagaaugcuuguuucacc

SEQ ID NO: 44102 - RNA, 22 nt, Homo sapiens
aggcacggugucucaugccugu

SEQ ID NO: 44103 - RNA, 22 nt, Homo sapiens
aggcaacgcuucuuucucaggu

SEQ ID NO: 44104 - RNA, 22 nt, Homo sapiens
aggauaguaaugauagagaggc

SEQ ID NO: 44105 - RNA, 22 nt, Homo sapiens
aggagguagucugucccuuagc

SEQ ID NO: 44106 - RNA, 22 nt, Homo sapiens
aggauacugguaugggcugaau

SEQ ID NO: 44107 - RNA, 21 nt, Homo sapiens
aggagcauucaugacgagguu

SEQ ID NO: 44108 - RNA, 22 nt, Homo sapiens
aggagcacaauggucaugugga

SEQ ID NO: 44109 - RNA, 22 nt, Homo sapiens
aggagaauugguucuucuugau

SEQ ID NO: 44110 - RNA, 22 nt, Homo sapiens
aggagaucagccucccugcaac

SEQ ID NO: 44111 - RNA, 22 nt, Homo sapiens
aggcuuuauuacagggucucag

SEQ ID NO: 44112 - RNA, 22 nt, Homo sapiens
aggcaugugugcagacugucug

SEQ ID NO: 44113 - RNA, 22 nt, Homo sapiens
aggcaugaguucagaggguaug

SEQ ID NO: 44114 - RNA, 22 nt, Homo sapiens
acuggcuuaaggaugggccacu

SEQ ID NO: 44115 - RNA, 22 nt, Homo sapiens
acuggacuuaaugaugaauugu

SEQ ID NO: 44116 - RNA, 22 nt, Homo sapiens
acuggaguuuguucaagaaaua

SEQ ID NO: 44117 - RNA, 22 nt, Homo sapiens
acuuggcaaaguuuuaaacagc

SEQ ID NO: 44118 - RNA, 22 nt, Homo sapiens
acugguguaugggaggucccaa

SEQ ID NO: 44119 - RNA, 22 nt, Homo sapiens
acuggguuaauuugaagguuga

SEQ ID NO: 44120 - RNA, 22 nt, Homo sapiens
agagguuuugcacugguucuuu

SEQ ID NO: 44121 - RNA, 18 nt, Homo sapiens
agagcuaugaacauaugc

SEQ ID NO: 44122 - RNA, 22 nt, Homo sapiens
agagccacauuaaauaugggaa

SEQ ID NO: 44123 - RNA, 22 nt, Homo sapiens
agcgccacugcacuccagccug

SEQ ID NO: 44124 - RNA, 22 nt, Homo sapiens
agccuguguugaauuauagaaa

SEQ ID NO: 44125 - RNA, 22 nt, Homo sapiens
agcauuaguugugaagccuuua

SEQ ID NO: 44126 - RNA, 22 nt, Homo sapiens
agcagcaucgggaaguuggcca

SEQ ID NO: 44127 - RNA, 22 nt, Homo sapiens
agcaccauuagcguugggccgg

SEQ ID NO: 44128 - RNA, 23 nt, Homo sapiens
agcaccaccccaggucacaagug

SEQ ID NO: 44129 - RNA, 22 nt, Homo sapiens
agcaccauuucucuaaagcacu

SEQ ID NO: 44130 - RNA, 22 nt, Homo sapiens
agaguauagcaacuuaguaaaa

SEQ ID NO: 44131 - RNA, 22 nt, Homo sapiens
agaguauacaugugagugagau

SEQ ID NO: 44132 - RNA, 23 nt, Homo sapiens
agcaccuuuccuccacuaucugc

SEQ ID NO: 44133 - RNA, 19 nt, Homo sapiens
agcagaacaaauguguggg

SEQ ID NO: 44134 - RNA, 22 nt, Homo sapiens
aaggaguguggugaucuugggc

SEQ ID NO: 44135 - RNA, 22 nt, Homo sapiens
aaggcaugcugaguccuaaaag

SEQ ID NO: 44136 - RNA, 22 nt, Homo sapiens
aaggcgguguggauccuacagc

SEQ ID NO: 44137 - RNA, 22 nt, Homo sapiens
aaucuguagaaggugcacauuc

SEQ ID NO: 44138 - RNA, 22 nt, Homo sapiens
aauugcacuggaaguaacugag

SEQ ID NO: 44139 - RNA, 22 nt, Homo sapiens
acaaaguauggaauguuggugu

SEQ ID NO: 44140 - RNA, 22 nt, Homo sapiens
acaaaguguuuucugaaggccu

SEQ ID NO: 44141 - RNA, 22 nt, Homo sapiens
acaaccauuguaagggcuuugg

SEQ ID NO: 44142 - RNA, 19 nt, Homo sapiens
acagcugguuuugguuucu

SEQ ID NO: 44143 - RNA, 22 nt, Homo sapiens
acagauagcacuaagggaucug

SEQ ID NO: 44144 - RNA, 23 nt, Homo sapiens
acacuugcugaguaaaucaaaua

SEQ ID NO: 44145 - RNA, 22 nt, Homo sapiens
acagaaccauucacuccccugg

SEQ ID NO: 44146 - RNA, 22 nt, Homo sapiens
acagauagacauauauagcuca

SEQ ID NO: 44147 - RNA, 22 nt, Homo sapiens
acacuguuggugggaguguaaa

SEQ ID NO: 44148 - RNA, 22 nt, Homo sapiens
acacuguuuuaguuauuauagc

SEQ ID NO: 44149 - RNA, 22 nt, Homo sapiens
acacuugcuugcaauagccucc

SEQ ID NO: 44150 - RNA, 23 nt, Homo sapiens
accugugguuauuuuacucuucc

SEQ ID NO: 44151 - RNA, 22 nt, Homo sapiens
accugguuuuaacauuguauua

SEQ ID NO: 44152 - RNA, 22 nt, Homo sapiens
accgaguguucucccgcagcgg

SEQ ID NO: 44153 - RNA, 22 nt, Homo sapiens
acuagagaugcauuuguaguuu

SEQ ID NO: 44154 - RNA, 22 nt, Homo sapiens
acauguaauugauuuuguguua

SEQ ID NO: 44155 - RNA, 22 nt, Homo sapiens
acauaugaguacaugugccaug

SEQ ID NO: 44156 - RNA, 19 nt, Homo sapiens
acaguaccuggcaugaggu

SEQ ID NO: 44157 - RNA, 22 nt, Homo sapiens
acccggagagcaggcgagaagg

SEQ ID NO: 44158 - RNA, 22 nt, Homo sapiens
accccuuacaucagcucuggua

SEQ ID NO: 44159 - RNA, 22 nt, Homo sapiens
acccgugcucacugccucugcc

SEQ ID NO: 44160 - RNA, 21 nt, Homo sapiens
acauguacacauguaugcaca

SEQ ID NO: 44161 - RNA, 22 nt, Homo sapiens
accccugugacggguauuugag

SEQ ID NO: 44162 - RNA, 17 nt, Homo sapiens
auaaacucaucauuuuu

SEQ ID NO: 44163 - RNA, 22 nt, Homo sapiens
auagcaagaugauugauccauu

SEQ ID NO: 44164 - RNA, 22 nt, Homo sapiens
auagagugcuucaucaguagua

SEQ ID NO: 44165 - RNA, 22 nt, Homo sapiens
auagaucuauuuauguaucccu

SEQ ID NO: 44166 - RNA, 20 nt, Homo sapiens
auagcaccagacagcccuag

SEQ ID NO: 44167 - RNA, 22 nt, Homo sapiens
auagcaaugccccauucccagu

SEQ ID NO: 44168 - RNA, 22 nt, Homo sapiens
auacacgguaggcacauauuua

SEQ ID NO: 44169 - RNA, 22 nt, Homo sapiens
auagacacugaaaucccugcca

SEQ ID NO: 44170 - RNA, 22 nt, Homo sapiens
auacagguauacaaugcauaau

SEQ ID NO: 44171 - RNA, 22 nt, Homo sapiens
auagaaucaucugugcacuagu

SEQ ID NO: 44172 - RNA, 22 nt, Homo sapiens
aguaacauuucuaguagagagu

SEQ ID NO: 44173 - RNA, 22 nt, Homo sapiens
aguaaucaucugagggcagaaa

SEQ ID NO: 44174 - RNA, 22 nt, Homo sapiens
aguguuuuuacaagcacucugg

SEQ ID NO: 44175 - RNA, 22 nt, Homo sapiens
aguguuuuuaacaagaaagggu

SEQ ID NO: 44176 - RNA, 19 nt, Homo sapiens
agugucauggucauuauuu

SEQ ID NO: 44177 - RNA, 22 nt, Homo sapiens
agugucaggagacagguagcug

SEQ ID NO: 44178 - RNA, 22 nt, Homo sapiens
aguaccauuccguuggagcugg

SEQ ID NO: 44179 - RNA, 22 nt, Homo sapiens
aguuaguguugugauaaaucca

SEQ ID NO: 44180 - RNA, 22 nt, Homo sapiens
aguguuuuucaugggauacuuu

SEQ ID NO: 44181 - RNA, 22 nt, Homo sapiens
aguuggugauugauugggucug

SEQ ID NO: 44182 - RNA, 22 nt, Homo sapiens
aggugcacucagaaaacagaua

SEQ ID NO: 44183 - RNA, 21 nt, Homo sapiens
aggucaugaagauguucuaau

SEQ ID NO: 44184 - RNA, 22 nt, Homo sapiens
aggugcucuuccuguaggucac

SEQ ID NO: 44185 - RNA, 22 nt, Homo sapiens
aggugcugacaggauagguuuc

SEQ ID NO: 44186 - RNA, 22 nt, Homo sapiens
agguaguguuauuugcagcuga

SEQ ID NO: 44187 - RNA, 22 nt, Homo sapiens
aggugguauuuaaaauuauuug

SEQ ID NO: 44188 - RNA, 22 nt, Homo sapiens
aggugguauuucaaaguggcag

SEQ ID NO: 44189 - RNA, 22 nt, Homo sapiens
aggugguuuugaugagcaggua

SEQ ID NO: 44190 - RNA, 22 nt, Homo sapiens
agguucccuuuuggccugggau

SEQ ID NO: 44191 - RNA, 22 nt, Homo sapiens
agguuguugcaugcuccuuagg

SEQ ID NO: 44192 - RNA, 21 nt, Homo sapiens
auagugcuagagaguagcagg

SEQ ID NO: 44193 - RNA, 22 nt, Homo sapiens
auaguagcaugaaacagccauu

SEQ ID NO: 44194 - RNA, 22 nt, Homo sapiens
auagugcuggaauaaauauacg

SEQ ID NO: 44195 - RNA, 22 nt, Homo sapiens
auagugcugcaauaaccauggg

SEQ ID NO: 44196 - RNA, 21 nt, Homo sapiens
auaugugcuguggaagucagc

SEQ ID NO: 44197 - RNA, 22 nt, Homo sapiens
auauguucucauucauaugugg

SEQ ID NO: 44198 - RNA, 22 nt, Homo sapiens
auaugucuauuauuagggcagg

SEQ ID NO: 44199 - RNA, 23 nt, Homo sapiens
auauaguagaugugcaguaacau

SEQ ID NO: 44200 - RNA, 22 nt, Homo sapiens
auauuguacugcuacugguucu

SEQ ID NO: 44201 - RNA, 22 nt, Homo sapiens
auauuguuggcugcuggcugau

SEQ ID NO: 44202 - RNA, 22 nt, Homo sapiens
auauuagcacuaaugucacgau

SEQ ID NO: 44203 - RNA, 22 nt, Homo sapiens
aucacaggucaaaucauuauuu

SEQ ID NO: 44204 - RNA, 22 nt, Homo sapiens
aucaaagccaugcucaguuuuc

SEQ ID NO: 44205 - RNA, 22 nt, Homo sapiens
aucagugagugguuagugaaug

SEQ ID NO: 44206 - RNA, 22 nt, Homo sapiens
aucagcaugcagaagucggggg

SEQ ID NO: 44207 - RNA, 22 nt, Homo sapiens
aucagcauucccaaaugaugug

SEQ ID NO: 44208 - RNA, 22 nt, Homo sapiens
aucaccagaugcuucaagcaga

SEQ ID NO: 44209 - RNA, 22 nt, Homo sapiens
aucacauggccagguaguaauc

SEQ ID NO: 44210 - RNA, 20 nt, Homo sapiens
aucaccacagcucguucaug

SEQ ID NO: 44211 - RNA, 22 nt, Homo sapiens
augguguauugauuauugcugu

SEQ ID NO: 44212 - RNA, 22 nt, Homo sapiens
augguuagauguauccuuucca

SEQ ID NO: 44213 - RNA, 22 nt, Homo sapiens
augguaguagaugugugguuuu

SEQ ID NO: 44214 - RNA, 22 nt, Homo sapiens
augggacugggugccguggagc

SEQ ID NO: 44215 - RNA, 17 nt, Homo sapiens
auguauacauccaugua

SEQ ID NO: 44216 - RNA, 22 nt, Homo sapiens
auguaguugcucugccuguuuu

SEQ ID NO: 44217 - RNA, 22 nt, Homo sapiens
auguaauguuaaauugcuaauu

SEQ ID NO: 44218 - RNA, 22 nt, Homo sapiens
auguaguaugaagaagaugcuu

SEQ ID NO: 44219 - RNA, 22 nt, Homo sapiens
auguagugugauuuucacuaga

SEQ ID NO: 44220 - RNA, 22 nt, Homo sapiens
auggauaugcuuccaacugccu

SEQ ID NO: 44221 - RNA, 22 nt, Homo sapiens
auggagaugaauaucaucuguu

SEQ ID NO: 44222 - RNA, 22 nt, Homo sapiens
augcauggagucuuucacaagu

SEQ ID NO: 44223 - RNA, 22 nt, Homo sapiens
augcaugucaaauuuguagguu

SEQ ID NO: 44224 - RNA, 22 nt, Homo sapiens
augcagguguuuugcacugagu

SEQ ID NO: 44225 - RNA, 22 nt, Homo sapiens
augagaucugugaacaccuguc

SEQ ID NO: 44226 - RNA, 22 nt, Homo sapiens
augagaaucauuucagcuugua

SEQ ID NO: 44227 - RNA, 22 nt, Homo sapiens
augagaaugaagccuggcgugu

SEQ ID NO: 44228 - RNA, 21 nt, Homo sapiens
augaauguaaagaauguggga

SEQ ID NO: 44229 - RNA, 22 nt, Homo sapiens
augaaugcagcacuguuuuucu

SEQ ID NO: 44230 - RNA, 22 nt, Homo sapiens
augaauacugcugcaaugaaca

SEQ ID NO: 44231 - RNA, 22 nt, Homo sapiens
augaacacuccaauuguacucc

SEQ ID NO: 44232 - RNA, 22 nt, Homo sapiens
augaaaucacugugaugcccua

SEQ ID NO: 44233 - RNA, 22 nt, Homo sapiens
augaggugauaucuggaaauua

SEQ ID NO: 44234 - RNA, 22 nt, Homo sapiens
augaggugaggucaguaaggua

SEQ ID NO: 44235 - RNA, 22 nt, Homo sapiens
augagggcggacgcccuggaga

SEQ ID NO: 44236 - RNA, 22 nt, Homo sapiens
augaggacaucuuccuuaugga

SEQ ID NO: 44237 - RNA, 22 nt, Homo sapiens
augagcaaagagaugagacccu

SEQ ID NO: 44238 - RNA, 22 nt, Homo sapiens
augagcugauuuccuuaccaua

SEQ ID NO: 44239 - RNA, 22 nt, Homo sapiens
augcagacacaaguuauaguaa

SEQ ID NO: 44240 - RNA, 22 nt, Homo sapiens
augauagucuugagaagcauuu

SEQ ID NO: 44241 - RNA, 22 nt, Homo sapiens
augauaacagccaggcacggug

SEQ ID NO: 44242 - RNA, 22 nt, Homo sapiens
augauagguuuagguuuagaca

SEQ ID NO: 44243 - RNA, 22 nt, Homo sapiens
augaguaugagaauacauuaag

SEQ ID NO: 44244 - RNA, 22 nt, Homo sapiens
aaaccacagugugcugcugggg

SEQ ID NO: 44245 - RNA, 22 nt, Homo sapiens
aaacugucuggaugcuugugga

SEQ ID NO: 44246 - RNA, 22 nt, Homo sapiens
aaacugucuucugacaguuucc

SEQ ID NO: 44247 - RNA, 22 nt, Homo sapiens
aaagcagcaggugguuuucaau

SEQ ID NO: 44248 - RNA, 18 nt, Homo sapiens
aaaaagugcucaggccua

SEQ ID NO: 44249 - RNA, 22 nt, Homo sapiens
aaaacgcauccucacaggucug

SEQ ID NO: 44250 - RNA, 22 nt, Homo sapiens
aagagccgcaagggugaagggu

SEQ ID NO: 44251 - RNA, 22 nt, Homo sapiens
aagcccauuguaaguugaggag

SEQ ID NO: 44252 - RNA, 22 nt, Homo sapiens
aagagguagcagucacaaaaga

SEQ ID NO: 44253 - RNA, 22 nt, Homo sapiens
aagagaugaagguccugacugu

SEQ ID NO: 44254 - RNA, 18 nt, Homo sapiens
aagagcucagcacagguu

SEQ ID NO: 44255 - RNA, 19 nt, Homo sapiens
aacuggugugagaugguau

SEQ ID NO: 44256 - RNA, 21 nt, Homo sapiens
aacuggugugagaugguaugu

SEQ ID NO: 44257 - RNA, 22 nt, Homo sapiens
aagacuguaauccaucuugagu

SEQ ID NO: 44258 - RNA, 22 nt, Homo sapiens
aacugcacuaggacagguuuuu

SEQ ID NO: 44259 - RNA, 22 nt, Homo sapiens
aacaccaucccuuugaugcuuu

SEQ ID NO: 44260 - RNA, 22 nt, Homo sapiens
aacaccguagaaacacaaggga

SEQ ID NO: 44261 - RNA, 21 nt, Homo sapiens
aacacggugaaaucccgucuc

SEQ ID NO: 44262 - RNA, 21 nt, Homo sapiens
aaaugugcuuuaguacccuca

SEQ ID NO: 44263 - RNA, 22 nt, Homo sapiens
aaauuguccuauugguuuaagc

SEQ ID NO: 44264 - RNA, 19 nt, Homo sapiens
aaaguucuucccuuuggag

SEQ ID NO: 44265 - RNA, 22 nt, Homo sapiens
aaaugcaugaggugggaagaaa

SEQ ID NO: 44266 - RNA, 22 nt, Homo sapiens
aaaugcaucauuaggugauuuu

SEQ ID NO: 44267 - RNA, 22 nt, Homo sapiens
aaaugcauugagggaaaaggca

SEQ ID NO: 44268 - RNA, 22 nt, Homo sapiens
aaaugcauaucaagauugcccu

SEQ ID NO: 44269 - RNA, 22 nt, Homo sapiens
aaaugcauggacagcuggucuu

SEQ ID NO: 44270 - RNA, 22 nt, Homo sapiens
aaagguaguacuucuagaaggg

SEQ ID NO: 44271 - RNA, 22 nt, Homo sapiens
aaagcuaccagauucuguugga

SEQ ID NO: 44272 - RNA, 22 nt, Homo sapiens
aaagcgcuguuaagaagacuga

SEQ ID NO: 44273 - RNA, 22 nt, Homo sapiens
aaagcaucacuuuuccuacuuu

SEQ ID NO: 44274 - RNA, 22 nt, Homo sapiens
aagugcaaauucccaggcucug

SEQ ID NO: 44275 - RNA, 22 nt, Homo sapiens
aaguauagcuaugauaaacauu

SEQ ID NO: 44276 - RNA, 22 nt, Homo sapiens
aagcuagugagacagugguacu

SEQ ID NO: 44277 - RNA, 22 nt, Homo sapiens
aagcuggauuucgcauccuguu

SEQ ID NO: 44278 - RNA, 22 nt, Homo sapiens
aagcuggcauucauucguucuu

SEQ ID NO: 44279 - RNA, 22 nt, Homo sapiens
aagcuguauuguguugcuauaa

SEQ ID NO: 44280 - RNA, 22 nt, Homo sapiens
aaugcauaauuuguaugaggua

SEQ ID NO: 44281 - RNA, 22 nt, Homo sapiens
aaugacacugagcaucuuucau

SEQ ID NO: 44282 - RNA, 22 nt, Homo sapiens
aaucccugagcuagacacaaag

SEQ ID NO: 44283 - RNA, 22 nt, Homo sapiens
aauauagcuauguacaugucca

SEQ ID NO: 44284 - RNA, 22 nt, Homo sapiens
aauaucacaggguguacacuca

SEQ ID NO: 44285 - RNA, 22 nt, Homo sapiens
aauaauggcaccaaagcacaag

SEQ ID NO: 44286 - RNA, 21 nt, Homo sapiens
agaaaaucuuaugggaaacau

SEQ ID NO: 44287 - RNA, 22 nt, Homo sapiens
acuuugcuuaucccaggcacug

SEQ ID NO: 44288 - RNA, 22 nt, Homo sapiens
acuuuuguuauacagugugaua

SEQ ID NO: 44289 - RNA, 22 nt, Homo sapiens
agagaugaagauggggcucccg

SEQ ID NO: 44290 - RNA, 22 nt, Homo sapiens
agaaaugcagcaugaggcggca

SEQ ID NO: 44291 - RNA, 22 nt, Homo sapiens
agagguagaagauaggcuacag

SEQ ID NO: 44292 - RNA, 22 nt, Homo sapiens
agagguuuaauugauucacagu

SEQ ID NO: 44293 - RNA, 22 nt, Homo sapiens
agagcuaguauuuacggagcau

SEQ ID NO: 44294 - RNA, 22 nt, Homo sapiens
agagccacacucuccuaacuca

SEQ ID NO: 44295 - RNA, 22 nt, Homo sapiens
agagcaaugggugaauauuaaa

SEQ ID NO: 44296 - RNA, 19 nt, Homo sapiens
agaguauuguuacuucucu

SEQ ID NO: 44297 - RNA, 22 nt, Homo sapiens
agaguaguaggaugaauggacu

SEQ ID NO: 44298 - RNA, 22 nt, Homo sapiens
agauggugauaaaugugguacc

SEQ ID NO: 44299 - RNA, 22 nt, Homo sapiens
agaugguguuuucucaccagau

SEQ ID NO: 44300 - RNA, 22 nt, Homo sapiens
agauguuguucaucugauuguu

SEQ ID NO: 44301 - RNA, 22 nt, Homo sapiens
agaucauaugcaguaaugaacu

SEQ ID NO: 44302 - RNA, 22 nt, Homo sapiens
accacguagaugagagaguuaa

SEQ ID NO: 44303 - RNA, 22 nt, Homo sapiens
accaguuuuuuauacaucuucu

SEQ ID NO: 44304 - RNA, 22 nt, Homo sapiens
accacagugcuuccugcucacg

SEQ ID NO: 44305 - RNA, 22 nt, Homo sapiens
acauugcucuuaccaaguuugu

SEQ ID NO: 44306 - RNA, 22 nt, Homo sapiens
acccaguaacauaugggaggga

SEQ ID NO: 44307 - RNA, 22 nt, Homo sapiens
accauugcacuccagcccaggc

SEQ ID NO: 44308 - RNA, 22 nt, Homo sapiens
accaugcaguccaauaugcaca

SEQ ID NO: 44309 - RNA, 22 nt, Homo sapiens
acccugacacgauucuucacuu

SEQ ID NO: 44310 - RNA, 22 nt, Homo sapiens
acccggcaguaauccugcgcgc

SEQ ID NO: 44311 - RNA, 22 nt, Homo sapiens
acccgugcugaauauguaggug

SEQ ID NO: 44312 - RNA, 22 nt, Homo sapiens
accccugagaucgaaucaugcu

SEQ ID NO: 44313 - RNA, 19 nt, Homo sapiens
acccuguccccaccuuuac

SEQ ID NO: 44314 - RNA, 22 nt, Homo sapiens
acauugcagauguguuuaaugu

SEQ ID NO: 44315 - RNA, 22 nt, Homo sapiens
acaucauugggggcuacaggug

SEQ ID NO: 44316 - RNA, 22 nt, Homo sapiens
acauccauuugcuuuauuugcu

SEQ ID NO: 44317 - RNA, 22 nt, Homo sapiens
aaugugcuuucuuucacacagu

SEQ ID NO: 44318 - RNA, 22 nt, Homo sapiens
aaugcuguucuuugcuuaaguu

SEQ ID NO: 44319 - RNA, 22 nt, Homo sapiens
agugcaauggcgugaucuuggc

SEQ ID NO: 44320 - RNA, 22 nt, Homo sapiens
agugauggagccaggauuuaau

SEQ ID NO: 44321 - RNA, 22 nt, Homo sapiens
agucauuguugagaugguguca

SEQ ID NO: 44322 - RNA, 23 nt, Homo sapiens
agucuguguuuacaggcucucug

SEQ ID NO: 44323 - RNA, 22 nt, Homo sapiens
agugaaaucugaagaaggucau

SEQ ID NO: 44324 - RNA, 22 nt, Homo sapiens
agugaaaugucaccuuuuagga

SEQ ID NO: 44325 - RNA, 19 nt, Homo sapiens
agugagccaagauccuacc

SEQ ID NO: 44326 - RNA, 22 nt, Homo sapiens
agugagcugcagucuggggucc

SEQ ID NO: 44327 - RNA, 22 nt, Homo sapiens
agugagcuggagaaaagaaacu

SEQ ID NO: 44328 - RNA, 21 nt, Homo sapiens
aggcuguuguuuugggaugga

SEQ ID NO: 44329 - RNA, 22 nt, Homo sapiens
aggcauugugcaucgaugauuu

SEQ ID NO: 44330 - RNA, 22 nt, Homo sapiens
agucacggugguuugcacuugu

SEQ ID NO: 44331 - RNA, 23 nt, Homo sapiens
agucaguaugcuccuuggauccc

SEQ ID NO: 44332 - RNA, 22 nt, Homo sapiens
agguagguugagaugggcauca

SEQ ID NO: 44333 - RNA, 22 nt, Homo sapiens
agguagugugaugcuccuguuu

SEQ ID NO: 44334 - RNA, 18 nt, Homo sapiens
aguuguuuuauccugccc

SEQ ID NO: 44335 - RNA, 22 nt, Homo sapiens
auaaagguaagcacuauccuga

SEQ ID NO: 44336 - RNA, 22 nt, Homo sapiens
agugguuugaucacagcucacu

SEQ ID NO: 44337 - RNA, 20 nt, Homo sapiens
agugguuuucaaauaugucu

SEQ ID NO: 44338 - RNA, 22 nt, Homo sapiens
agugguuuuggaauggaauuca

SEQ ID NO: 44339 - RNA, 22 nt, Homo sapiens
aguguuuuuaucaugaaagggu

SEQ ID NO: 44340 - RNA, 22 nt, Homo sapiens
aguggcaaugugauguccugaa

SEQ ID NO: 44341 - RNA, 22 nt, Homo sapiens
agugguguugccuguugaccua

SEQ ID NO: 44342 - RNA, 17 nt, Homo sapiens
agccccauuagcuaguu

SEQ ID NO: 44343 - RNA, 22 nt, Homo sapiens
agccgauguugacaccagggga

SEQ ID NO: 44344 - RNA, 22 nt, Homo sapiens
agcaccaccguugcucuauccc

SEQ ID NO: 44345 - RNA, 22 nt, Homo sapiens
agcaccagaaucugaguuauuc

SEQ ID NO: 44346 - RNA, 22 nt, Homo sapiens
agcaccacauacuacagagaua

SEQ ID NO: 44347 - RNA, 19 nt, Homo sapiens
agcuguguugccugugaga

SEQ ID NO: 44348 - RNA, 20 nt, Homo sapiens
agcuguuguuaaaaaggagg

SEQ ID NO: 44349 - RNA, 22 nt, Homo sapiens
agcuguguugucugaagucaga

SEQ ID NO: 44350 - RNA, 22 nt, Homo sapiens
agcuguuguacacuuuaccuuu

SEQ ID NO: 44351 - RNA, 20 nt, Homo sapiens
agcugguuuuaugaaucuuu

SEQ ID NO: 44352 - RNA, 22 nt, Homo sapiens
agcgacauugguugcuuugguu

SEQ ID NO: 44353 - RNA, 21 nt, Homo sapiens
agccugugggucauaguugcc

SEQ ID NO: 44354 - RNA, 23 nt, Homo sapiens
agccuguugccuaggcagcucau

SEQ ID NO: 44355 - RNA, 22 nt, Homo sapiens
agccgguguccacgaagaagag

SEQ ID NO: 44356 - RNA, 22 nt, Homo sapiens
agcgccauugcacuccagccuu

SEQ ID NO: 44357 - RNA, 22 nt, Homo sapiens
agcggcuguuccccuggucuau

SEQ ID NO: 44358 - RNA, 22 nt, Homo sapiens
agcuacaucuugcucugggaug

SEQ ID NO: 44359 - RNA, 23 nt, Homo sapiens
agcuagagaggcuggggauacag

SEQ ID NO: 44360 - RNA, 22 nt, Homo sapiens
agcuugucuuauacuacuucau

SEQ ID NO: 44361 - RNA, 22 nt, Homo sapiens
agcuuguguuugucugccuggg

SEQ ID NO: 44362 - RNA, 21 nt, Homo sapiens
agcuuguguguaucacagugu

SEQ ID NO: 44363 - RNA, 22 nt, Homo sapiens
agcuuguggugaauacugcuag

SEQ ID NO: 44364 - RNA, 20 nt, Homo sapiens
agcuugguuuggaugaucac

SEQ ID NO: 44365 - RNA, 22 nt, Homo sapiens
agcuccaugauaguaugucugu

SEQ ID NO: 44366 - RNA, 22 nt, Homo sapiens
agcuguuguucucagaggcuuu

SEQ ID NO: 44367 - RNA, 22 nt, Homo sapiens
agcuguuguuuuaagauacuaa

SEQ ID NO: 44368 - RNA, 22 nt, Homo sapiens
aggcaagagugacuacgugaaa

SEQ ID NO: 44369 - RNA, 21 nt, Homo sapiens
aggcaagauuacuuacgagca

SEQ ID NO: 44370 - RNA, 22 nt, Homo sapiens
aggcaacgugcauuucuggugu

SEQ ID NO: 44371 - RNA, 22 nt, Homo sapiens
aggcagaugagguccucagcug

SEQ ID NO: 44372 - RNA, 22 nt, Homo sapiens
aacaccauuuuucugcagccuu

SEQ ID NO: 44373 - RNA, 22 nt, Homo sapiens
aggcaggugaaagauaguuuua

SEQ ID NO: 44374 - RNA, 22 nt, Homo sapiens
augguguccuguuuccccagga

SEQ ID NO: 44375 - RNA, 22 nt, Homo sapiens
auggucuuuuuguuaugagaga

SEQ ID NO: 44376 - RNA, 22 nt, Homo sapiens
auggucuuuucccuggauuaua

SEQ ID NO: 44377 - RNA, 22 nt, Homo sapiens
auggcucuuauuauuuugaggu

SEQ ID NO: 44378 - RNA, 22 nt, Homo sapiens
auggcagcccucuuuauccaug

SEQ ID NO: 44379 - RNA, 22 nt, Homo sapiens
auggccauuacuaagaauguuu

SEQ ID NO: 44380 - RNA, 22 nt, Homo sapiens
auggccuuguauaccuggcaaa

SEQ ID NO: 44381 - RNA, 22 nt, Homo sapiens
auggccuuucuggcacauuucc

SEQ ID NO: 44382 - RNA, 22 nt, Homo sapiens
auggccgggugcgguggcucac

SEQ ID NO: 44383 - RNA, 22 nt, Homo sapiens
auggcuauucuucuuuugucag

SEQ ID NO: 44384 - RNA, 22 nt, Homo sapiens
auggcguguggcuuggaggcug

SEQ ID NO: 44385 - RNA, 22 nt, Homo sapiens
auggcggugugggcggugcagc

SEQ ID NO: 44386 - RNA, 21 nt, Homo sapiens
augagauguuagacuuuagac

SEQ ID NO: 44387 - RNA, 19 nt, Homo sapiens
augagcaauaguuuuaauc

SEQ ID NO: 44388 - RNA, 22 nt, Homo sapiens
augauggaggccgugauggacg

SEQ ID NO: 44389 - RNA, 22 nt, Homo sapiens
augaucacaccacugcacucca

SEQ ID NO: 44390 - RNA, 22 nt, Homo sapiens
augaucacugugccuccuguga

SEQ ID NO: 44391 - RNA, 22 nt, Homo sapiens
augaugucauuuuaauuucuaa

SEQ ID NO: 44392 - RNA, 22 nt, Homo sapiens
augauguccacagggguguuca

SEQ ID NO: 44393 - RNA, 22 nt, Homo sapiens
auggauuuguaguacaugguug

SEQ ID NO: 44394 - RNA, 22 nt, Homo sapiens
auggcacagacucuuggucaag

SEQ ID NO: 44395 - RNA, 22 nt, Homo sapiens
auggcacagaguagaugcucaa

SEQ ID NO: 44396 - RNA, 22 nt, Homo sapiens
auugagcacugacucugugcca

SEQ ID NO: 44397 - RNA, 21 nt, Homo sapiens
auugagcacaugaaacauggc

SEQ ID NO: 44398 - RNA, 22 nt, Homo sapiens
auugaguaacaauuuuguucaa

SEQ ID NO: 44399 - RNA, 19 nt, Homo sapiens
auugauuaaguuugcuguc

SEQ ID NO: 44400 - RNA, 22 nt, Homo sapiens
auucccuguagaauaaggaugg

SEQ ID NO: 44401 - RNA, 22 nt, Homo sapiens
auuccauagugucuguggcaga

SEQ ID NO: 44402 - RNA, 22 nt, Homo sapiens
auuccaguggguuuacauccca

SEQ ID NO: 44403 - RNA, 22 nt, Homo sapiens
auuccacuuccacuaguuucuc

SEQ ID NO: 44404 - RNA, 23 nt, Homo sapiens
auugaacacuuucauaugugagg

SEQ ID NO: 44405 - RNA, 22 nt, Homo sapiens
auugaacuguuggagagguuuu

SEQ ID NO: 44406 - RNA, 22 nt, Homo sapiens
auugacaguuggccaguaagug

SEQ ID NO: 44407 - RNA, 22 nt, Homo sapiens
auugacacugauuuuucuuuaa

SEQ ID NO: 44408 - RNA, 22 nt, Homo sapiens
auugaacuuaaaagacuugcca

SEQ ID NO: 44409 - RNA, 22 nt, Homo sapiens
auugaacuuacuaucuaaacua

SEQ ID NO: 44410 - RNA, 22 nt, Homo sapiens
auugaacuuuugucacugacau

SEQ ID NO: 44411 - RNA, 22 nt, Homo sapiens
auguguauuaccucgauuguga

SEQ ID NO: 44412 - RNA, 22 nt, Homo sapiens
augugucaaaucuaggccaaag

SEQ ID NO: 44413 - RNA, 22 nt, Homo sapiens
augugugaaucccagaaccugu

SEQ ID NO: 44414 - RNA, 19 nt, Homo sapiens
augugguuagcaugacugc

SEQ ID NO: 44415 - RNA, 22 nt, Homo sapiens
auguguaaagcuuuucuuuguu

SEQ ID NO: 44416 - RNA, 22 nt, Homo sapiens
auguaagugugcucaaauguua

SEQ ID NO: 44417 - RNA, 21 nt, Homo sapiens
auguaaugaagaagccacugg

SEQ ID NO: 44418 - RNA, 20 nt, Homo sapiens
auguaauguaugauauguac

SEQ ID NO: 44419 - RNA, 22 nt, Homo sapiens
auucacagggggagaaggguau

SEQ ID NO: 44420 - RNA, 22 nt, Homo sapiens
auuccacuuacaugaaguaccu

SEQ ID NO: 44421 - RNA, 22 nt, Homo sapiens
auuccacuuagugacucauuug

SEQ ID NO: 44422 - RNA, 22 nt, Homo sapiens
auguuguaguaugagucaaaau

SEQ ID NO: 44423 - RNA, 22 nt, Homo sapiens
auucaaggacuggauugcggga

SEQ ID NO: 44424 - RNA, 22 nt, Homo sapiens
auucaagggauuucaggaggcu

SEQ ID NO: 44425 - RNA, 22 nt, Homo sapiens
auguuaacaucuuaguuuucau

SEQ ID NO: 44426 - RNA, 22 nt, Homo sapiens
aucacugggcaagauaucauga

SEQ ID NO: 44427 - RNA, 22 nt, Homo sapiens
aucaccgugggagauccugccu

SEQ ID NO: 44428 - RNA, 22 nt, Homo sapiens
aucacaguggcucacaagagcc

SEQ ID NO: 44429 - RNA, 22 nt, Homo sapiens
aucacagugagcauaugucuau

SEQ ID NO: 44430 - RNA, 22 nt, Homo sapiens
aucacaguuauaacauccuuuu

SEQ ID NO: 44431 - RNA, 22 nt, Homo sapiens
auauguaguuucagaaguggaa

SEQ ID NO: 44432 - RNA, 22 nt, Homo sapiens
auauggcuaugugagcauacca

SEQ ID NO: 44433 - RNA, 22 nt, Homo sapiens
auaugcauacauguaugcagga

SEQ ID NO: 44434 - RNA, 22 nt, Homo sapiens
auaagaguaguacauaugagac

SEQ ID NO: 44435 - RNA, 22 nt, Homo sapiens
auaaguauuuggacuuuacugu

SEQ ID NO: 44436 - RNA, 22 nt, Homo sapiens
auaacauccuuucuuaucguug

SEQ ID NO: 44437 - RNA, 22 nt, Homo sapiens
auaacauggaguuugucauuua

SEQ ID NO: 44438 - RNA, 22 nt, Homo sapiens
auaacagcauuauugcauacgu

SEQ ID NO: 44439 - RNA, 23 nt, Homo sapiens
auaagccuuuucuuucugcccca

SEQ ID NO: 44440 - RNA, 22 nt, Homo sapiens
auagugcugcaacaaauauacg

SEQ ID NO: 44441 - RNA, 22 nt, Homo sapiens
auaguacuauugcaguguuaua

SEQ ID NO: 44442 - RNA, 22 nt, Homo sapiens
auagggcacgagaugugagccu

SEQ ID NO: 44443 - RNA, 22 nt, Homo sapiens
auagguagcauagcaggaauau

SEQ ID NO: 44444 - RNA, 22 nt, Homo sapiens
auagcagugugaaaauguacua

SEQ ID NO: 44445 - RNA, 22 nt, Homo sapiens
auaauaguguuuagauuuggga

SEQ ID NO: 44446 - RNA, 20 nt, Homo sapiens
auagcauugauggacucaaa

SEQ ID NO: 44447 - RNA, 22 nt, Homo sapiens
auagcuguccuuacuagcuagg

SEQ ID NO: 44448 - RNA, 22 nt, Homo sapiens
augaaagugauaaaugucucua

SEQ ID NO: 44449 - RNA, 22 nt, Homo sapiens
augaaaucuuuggcagaucuua

SEQ ID NO: 44450 - RNA, 22 nt, Homo sapiens
augaaaagcauaaacgcugaag

SEQ ID NO: 44451 - RNA, 22 nt, Homo sapiens
aucaugcacaugcauagguaug

SEQ ID NO: 44452 - RNA, 22 nt, Homo sapiens
aucauguaguaagacacauuua

SEQ ID NO: 44453 - RNA, 22 nt, Homo sapiens
aucaucaugcacuacagccugg

SEQ ID NO: 44454 - RNA, 22 nt, Homo sapiens
aucacuggccuuuuuaaaugcu

SEQ ID NO: 44455 - RNA, 18 nt, Homo sapiens
aucauugcacugucuugc

SEQ ID NO: 44456 - RNA, 22 nt, Homo sapiens
auccacagugucaauguuguga

SEQ ID NO: 44457 - RNA, 22 nt, Homo sapiens
aucaugucuucccagugauucu

SEQ ID NO: 44458 - RNA, 22 nt, Homo sapiens
augaagaucaugaagacggcuu

SEQ ID NO: 44459 - RNA, 20 nt, Homo sapiens
augaaggcaggugugaguuu

SEQ ID NO: 44460 - RNA, 22 nt, Homo sapiens
augaagaucucugccuuguguc

SEQ ID NO: 44461 - RNA, 22 nt, Homo sapiens
augaauacagcuaugcgugcau

SEQ ID NO: 44462 - RNA, 22 nt, Homo sapiens
augacauugaugcucuggcugg

SEQ ID NO: 44463 - RNA, 22 nt, Homo sapiens
augaauguaaagaaugugggaa

SEQ ID NO: 44464 - RNA, 22 nt, Homo sapiens
augaccaugauccuugccgacc

SEQ ID NO: 44465 - RNA, 22 nt, Homo sapiens
augaccauuucaauugauaugg

SEQ ID NO: 44466 - RNA, 22 nt, Homo sapiens
augacguugugggcucucaagc

SEQ ID NO: 44467 - RNA, 22 nt, Homo sapiens
augacugagacuaacuuacuuu

SEQ ID NO: 44468 - RNA, 22 nt, Homo sapiens
augagacaguucccuuuaucuu

SEQ ID NO: 44469 - RNA, 22 nt, Homo sapiens
augagaacugucaaugagagcu

SEQ ID NO: 44470 - RNA, 22 nt, Homo sapiens
augagaauguaaguuaaugaaa

SEQ ID NO: 44471 - RNA, 22 nt, Homo sapiens
ugagauggaguuucgcccuugu

SEQ ID NO: 44472 - RNA, 22 nt, Homo sapiens
ugagauggagucuugucgccua

SEQ ID NO: 44473 - RNA, 22 nt, Homo sapiens
ugagaugauuuaauggagccca

SEQ ID NO: 44474 - RNA, 22 nt, Homo sapiens
ugagguagaggugaacuugacc

SEQ ID NO: 44475 - RNA, 22 nt, Homo sapiens
ugagaugagggcugcacucaaa

SEQ ID NO: 44476 - RNA, 22 nt, Homo sapiens
ugagaugaggucucacucuguu

SEQ ID NO: 44477 - RNA, 22 nt, Homo sapiens
ugagaugaagucucacucuguc

SEQ ID NO: 44478 - RNA, 22 nt, Homo sapiens
ugagaugagaaucaguucuaau

SEQ ID NO: 44479 - RNA, 22 nt, Homo sapiens
ugagaugaagcuagaagaaugg

SEQ ID NO: 44480 - RNA, 22 nt, Homo sapiens
ugagaucgagucucgcucuguc

SEQ ID NO: 44481 - RNA, 19 nt, Homo sapiens
ugagaucuuuacuggguuu

SEQ ID NO: 44482 - RNA, 22 nt, Homo sapiens
ugagaucuguaaagucugacau

SEQ ID NO: 44483 - RNA, 22 nt, Homo sapiens
ugagauagcauaagggacagaa

SEQ ID NO: 44484 - RNA, 18 nt, Homo sapiens
ugagauacuagaauaggu

SEQ ID NO: 44485 - RNA, 22 nt, Homo sapiens
ugagauccugugacuacacuga

SEQ ID NO: 44486 - RNA, 22 nt, Homo sapiens
ugagagacaguuucgucggagg

SEQ ID NO: 44487 - RNA, 19 nt, Homo sapiens
ugagagcacaacugaacaa

SEQ ID NO: 44488 - RNA, 22 nt, Homo sapiens
ugagaggugaauggcaggcuca

SEQ ID NO: 44489 - RNA, 22 nt, Homo sapiens
ugagaguauaaauugaugcagc

SEQ ID NO: 44490 - RNA, 22 nt, Homo sapiens
ugagacgucuucucuucuucaa

SEQ ID NO: 44491 - RNA, 22 nt, Homo sapiens
ugagacugaguuucacuuuugu

SEQ ID NO: 44492 - RNA, 22 nt, Homo sapiens
ugagacugaguuucgcucuugu

SEQ ID NO: 44493 - RNA, 22 nt, Homo sapiens
ugagacugaguuucucucuugu

SEQ ID NO: 44494 - RNA, 22 nt, Homo sapiens
ugagacugaguuuugcucguug

SEQ ID NO: 44495 - RNA, 22 nt, Homo sapiens
ugagacggagucucgcucuguc

SEQ ID NO: 44496 - RNA, 22 nt, Homo sapiens
ugagacggagucucgcuguguc

SEQ ID NO: 44497 - RNA, 22 nt, Homo sapiens
ugagacggagucuugcccuguc

SEQ ID NO: 44498 - RNA, 22 nt, Homo sapiens
ugagacggaguuauuuauaaua

SEQ ID NO: 44499 - RNA, 22 nt, Homo sapiens
ugagacggaguuucacucuugu

SEQ ID NO: 44500 - RNA, 22 nt, Homo sapiens
ugagacggaguuucgcucuugu

SEQ ID NO: 44501 - RNA, 22 nt, Homo sapiens
ugagaagcauaccagugucugu

SEQ ID NO: 44502 - RNA, 22 nt, Homo sapiens
ugagaagugauauagaaguuaa

SEQ ID NO: 44503 - RNA, 22 nt, Homo sapiens
ugagaagacaucagcuuucgga

SEQ ID NO: 44504 - RNA, 22 nt, Homo sapiens
ugagaacggauacuaagggcug

SEQ ID NO: 44505 - RNA, 22 nt, Homo sapiens
ugacacauguagacaucuggug

SEQ ID NO: 44506 - RNA, 17 nt, Homo sapiens
ugacagaaacuuguugu

SEQ ID NO: 44507 - RNA, 21 nt, Homo sapiens
ugacagaaaauugaguuugcu

SEQ ID NO: 44508 - RNA, 22 nt, Homo sapiens
ugacaaguaaacagucagcacc

SEQ ID NO: 44509 - RNA, 22 nt, Homo sapiens
ugaaaugcuaauucguagcuaa

SEQ ID NO: 44510 - RNA, 22 nt, Homo sapiens
ugaaauggaagaagucccuuuu

SEQ ID NO: 44511 - RNA, 22 nt, Homo sapiens
ugaaaugguuaugugaggagau

SEQ ID NO: 44512 - RNA, 22 nt, Homo sapiens
ugaaaugccuuuaaugaauuua

SEQ ID NO: 44513 - RNA, 22 nt, Homo sapiens
ugaaaugcugucuaggggaaau

SEQ ID NO: 44514 - RNA, 22 nt, Homo sapiens
ugaaacacacauugcccuuuau

SEQ ID NO: 44515 - RNA, 22 nt, Homo sapiens
ugaaacauacacucugaugggg

SEQ ID NO: 44516 - RNA, 22 nt, Homo sapiens
ucuuuguuagaacccucuccuu

SEQ ID NO: 44517 - RNA, 22 nt, Homo sapiens
ucuuuguucaggagccaacucc

SEQ ID NO: 44518 - RNA, 20 nt, Homo sapiens
ugaaaucuucacuaagucuc

SEQ ID NO: 44519 - RNA, 22 nt, Homo sapiens
ugaaacugcagugggcuuggca

SEQ ID NO: 44520 - RNA, 22 nt, Homo sapiens
ugaaagguuuaauucugugaga

SEQ ID NO: 44521 - RNA, 22 nt, Homo sapiens
ugacaguuuccagggcugucuc

SEQ ID NO: 44522 - RNA, 20 nt, Homo sapiens
ugacaguuaagggauagaag

SEQ ID NO: 44523 - RNA, 22 nt, Homo sapiens
ugacaguguccucauucccaac

SEQ ID NO: 44524 - RNA, 23 nt, Homo sapiens
ugacagucucccgauggcuaggc

SEQ ID NO: 44525 - RNA, 22 nt, Homo sapiens
ugacaguaaacagucuugauua

SEQ ID NO: 44526 - RNA, 22 nt, Homo sapiens
ugacuauugauuuagacgugcu

SEQ ID NO: 44527 - RNA, 22 nt, Homo sapiens
ugacuagggacauucuuccacg

SEQ ID NO: 44528 - RNA, 17 nt, Homo sapiens
ugagaacaugugguauu

SEQ ID NO: 44529 - RNA, 19 nt, Homo sapiens
ugagaacaugugguauuug

SEQ ID NO: 44530 - RNA, 22 nt, Homo sapiens
ugagaacagcagcuugggacac

SEQ ID NO: 44531 - RNA, 23 nt, Homo sapiens
ugacugaguauauguuuggugcu

SEQ ID NO: 44532 - RNA, 22 nt, Homo sapiens
ugacuggaacuuuagugagucu

SEQ ID NO: 44533 - RNA, 22 nt, Homo sapiens
ucuuuguguaggucaaucuggc

SEQ ID NO: 44534 - RNA, 22 nt, Homo sapiens
ucuuuggucagaaagauuacac

SEQ ID NO: 44535 - RNA, 22 nt, Homo sapiens
ucuuuaguaauuucuguaaggc

SEQ ID NO: 44536 - RNA, 22 nt, Homo sapiens
ucuugcuuguuguucccuucau

SEQ ID NO: 44537 - RNA, 22 nt, Homo sapiens
ucuuauggagaaaggugguugg

SEQ ID NO: 44538 - RNA, 22 nt, Homo sapiens
ucugacagugugaauauugacu

SEQ ID NO: 44539 - RNA, 23 nt, Homo sapiens
ucugauguuauaaaauucuuugg

SEQ ID NO: 44540 - RNA, 23 nt, Homo sapiens
ucuggaucauucguagugccagc

SEQ ID NO: 44541 - RNA, 22 nt, Homo sapiens
ucugcauaucaugcagaacuau

SEQ ID NO: 44542 - RNA, 22 nt, Homo sapiens
ucugcaagucuaaacuagccau

SEQ ID NO: 44543 - RNA, 22 nt, Homo sapiens
ucuggcuuuuaacaucuauaaa

SEQ ID NO: 44544 - RNA, 22 nt, Homo sapiens
aacauugaacuuggcacaccca

SEQ ID NO: 44545 - RNA, 22 nt, Homo sapiens
aacauguuuagcagauaccugu

SEQ ID NO: 44546 - RNA, 19 nt, Homo sapiens
ucugugcuugucccccugu

SEQ ID NO: 44547 - RNA, 22 nt, Homo sapiens
ucugugguaagaaacgcauguc

SEQ ID NO: 44548 - RNA, 22 nt, Homo sapiens
ucugugcuugucauaugcuuug

SEQ ID NO: 44549 - RNA, 22 nt, Homo sapiens
ucucugagaaaaguuucuccca

SEQ ID NO: 44550 - RNA, 22 nt, Homo sapiens
ucuccggguggcggcgaaggga

SEQ ID NO: 44551 - RNA, 22 nt, Homo sapiens
ucucugguuaugucauuaagca

SEQ ID NO: 44552 - RNA, 22 nt, Homo sapiens
ucugacaaugaacaaucuauag

SEQ ID NO: 44553 - RNA, 18 nt, Homo sapiens
ucccuuuguagaugaccc

SEQ ID NO: 44554 - RNA, 22 nt, Homo sapiens
uccucauggagaaccucugcua

SEQ ID NO: 44555 - RNA, 22 nt, Homo sapiens
uccugagaauagaguugcaugu

SEQ ID NO: 44556 - RNA, 22 nt, Homo sapiens
ucgcagugcacucuuuuagcuu

SEQ ID NO: 44557 - RNA, 22 nt, Homo sapiens
ucgugcugugucaucuuguggc

SEQ ID NO: 44558 - RNA, 20 nt, Homo sapiens
ucguugguagagagcagggc

SEQ ID NO: 44559 - RNA, 17 nt, Homo sapiens
ucuaauaauaugcauuu

SEQ ID NO: 44560 - RNA, 22 nt, Homo sapiens
ucacuauagaaaacagugugga

SEQ ID NO: 44561 - RNA, 22 nt, Homo sapiens
ucacuauugacaacagugugga

SEQ ID NO: 44562 - RNA, 22 nt, Homo sapiens
ucacugaaaccacugccuccug

SEQ ID NO: 44563 - RNA, 22 nt, Homo sapiens
ucacugaaaccuccgccuucug

SEQ ID NO: 44564 - RNA, 22 nt, Homo sapiens
ucagaaccuccuagcaguguuc

SEQ ID NO: 44565 - RNA, 22 nt, Homo sapiens
ugggcggagacgugcagccgcc

SEQ ID NO: 44566 - RNA, 22 nt, Homo sapiens
ugggaugugagucuucgcuuuc

SEQ ID NO: 44567 - RNA, 22 nt, Homo sapiens
ugguuaucacuuuccuuccauc

SEQ ID NO: 44568 - RNA, 22 nt, Homo sapiens
ugguguuugagaagcugauguc

SEQ ID NO: 44569 - RNA, 22 nt, Homo sapiens
ugguguccugucucugcgcuug

SEQ ID NO: 44570 - RNA, 21 nt, Homo sapiens
ugguugauccuccuagugccu

SEQ ID NO: 44571 - RNA, 22 nt, Homo sapiens
uguaaaaagcccagccgcugag

SEQ ID NO: 44572 - RNA, 22 nt, Homo sapiens
ugguuguuuuaaaugucgucug

SEQ ID NO: 44573 - RNA, 22 nt, Homo sapiens
uguauauguuuguacauauguc

SEQ ID NO: 44574 - RNA, 22 nt, Homo sapiens
uguagguguacauacaugguua

SEQ ID NO: 44575 - RNA, 22 nt, Homo sapiens
uggcauguuggguguugacucc

SEQ ID NO: 44576 - RNA, 22 nt, Homo sapiens
uggauagugauaagguagauga

SEQ ID NO: 44577 - RNA, 22 nt, Homo sapiens
uggcggagacauggacuucaga

SEQ ID NO: 44578 - RNA, 22 nt, Homo sapiens
uggcuaaguuaaucaaggagau

SEQ ID NO: 44579 - RNA, 22 nt, Homo sapiens
ugggaucauuaugcauagugua

SEQ ID NO: 44580 - RNA, 22 nt, Homo sapiens
uggccagagggcaauuagcugu

SEQ ID NO: 44581 - RNA, 22 nt, Homo sapiens
uguccguuuuggcuuucucccu

SEQ ID NO: 44582 - RNA, 19 nt, Homo sapiens
ugucccagccauagaggca

SEQ ID NO: 44583 - RNA, 20 nt, Homo sapiens
ugucauuaagcacugugcca

SEQ ID NO: 44584 - RNA, 22 nt, Homo sapiens
ugucauggucacaggcauuuca

SEQ ID NO: 44585 - RNA, 22 nt, Homo sapiens
ugucauggauucugagucuggg

SEQ ID NO: 44586 - RNA, 22 nt, Homo sapiens
ugucaugaacucacauucuggg

SEQ ID NO: 44587 - RNA, 22 nt, Homo sapiens
ugucauguaaagaguaaauggu

SEQ ID NO: 44588 - RNA, 22 nt, Homo sapiens
ugucaugagucuccuccaucuu

SEQ ID NO: 44589 - RNA, 22 nt, Homo sapiens
ugucuaguuuugaaguauagca

SEQ ID NO: 44590 - RNA, 22 nt, Homo sapiens
ugucaagaugguuugauguugu

SEQ ID NO: 44591 - RNA, 22 nt, Homo sapiens
uguauguugauguuauauucug

SEQ ID NO: 44592 - RNA, 22 nt, Homo sapiens
uguaugagagacauggcugcuu

SEQ ID NO: 44593 - RNA, 22 nt, Homo sapiens
uguauugcuugaagagugaauu

SEQ ID NO: 44594 - RNA, 22 nt, Homo sapiens
uguauuuguuguuaaauggaga

SEQ ID NO: 44595 - RNA, 22 nt, Homo sapiens
ugucagcacaacucagguuccu

SEQ ID NO: 44596 - RNA, 22 nt, Homo sapiens
ugucaccuugcucauccucgga

SEQ ID NO: 44597 - RNA, 22 nt, Homo sapiens
ugucacccuuuauccauuuccu

SEQ ID NO: 44598 - RNA, 21 nt, Homo sapiens
ugucaguuuccagaguucaac

SEQ ID NO: 44599 - RNA, 22 nt, Homo sapiens
ugucaguuucuugagauggaac

SEQ ID NO: 44600 - RNA, 22 nt, Homo sapiens
ugucaucauuggaaucugccuc

SEQ ID NO: 44601 - RNA, 19 nt, Homo sapiens
ugucaucaucuuuucuugc

SEQ ID NO: 44602 - RNA, 22 nt, Homo sapiens
ugcuugagacacauaugaauuu

SEQ ID NO: 44603 - RNA, 22 nt, Homo sapiens
ugcuuugguagaaaucuuuggu

SEQ ID NO: 44604 - RNA, 22 nt, Homo sapiens
ugcuuuguugaaaaucauuugg

SEQ ID NO: 44605 - RNA, 22 nt, Homo sapiens
ugcuguguugcuggcuuaaaga

SEQ ID NO: 44606 - RNA, 22 nt, Homo sapiens
uggaagugaacaaccaaggcag

SEQ ID NO: 44607 - RNA, 22 nt, Homo sapiens
uggaaguaaccaugaauggaau

SEQ ID NO: 44608 - RNA, 22 nt, Homo sapiens
uggaguguagcggcaccuauua

SEQ ID NO: 44609 - RNA, 22 nt, Homo sapiens
ugccaguauuuuacugaggauu

SEQ ID NO: 44610 - RNA, 22 nt, Homo sapiens
ugccaguauuuuauuaagaauu

SEQ ID NO: 44611 - RNA, 22 nt, Homo sapiens
ugccagaugugcccucuccacc

SEQ ID NO: 44612 - RNA, 22 nt, Homo sapiens
ugccaguauuuuauugagcauu

SEQ ID NO: 44613 - RNA, 22 nt, Homo sapiens
ugccaguauuuuguugaggauu

SEQ ID NO: 44614 - RNA, 22 nt, Homo sapiens
ugccaguauuuuguugaagauu

SEQ ID NO: 44615 - RNA, 22 nt, Homo sapiens
ugccagaugcaguguucaacaa

SEQ ID NO: 44616 - RNA, 22 nt, Homo sapiens
ugccagaugcuggugugagggg

SEQ ID NO: 44617 - RNA, 19 nt, Homo sapiens
ugccaagaaagucagcuua

SEQ ID NO: 44618 - RNA, 22 nt, Homo sapiens
ugcgccauugaacuccaggcug

SEQ ID NO: 44619 - RNA, 22 nt, Homo sapiens
ugcgguagugcaaucauggcuc

SEQ ID NO: 44620 - RNA, 22 nt, Homo sapiens
ugcuggugucaucaaggcuuug

SEQ ID NO: 44621 - RNA, 22 nt, Homo sapiens
ugcuggugauuaaauccugaag

SEQ ID NO: 44622 - RNA, 22 nt, Homo sapiens
ugcugguaguuuaugacuaauu

SEQ ID NO: 44623 - RNA, 22 nt, Homo sapiens
ugcugcuguuguuguuacuagc

SEQ ID NO: 44624 - RNA, 23 nt, Homo sapiens
ugcucgguguugacagucacauc

SEQ ID NO: 44625 - RNA, 22 nt, Homo sapiens
ugcugcauuggggauuaaguuu

SEQ ID NO: 44626 - RNA, 21 nt, Homo sapiens
ugcugcacuucuuuugcugug

SEQ ID NO: 44627 - RNA, 22 nt, Homo sapiens
ugcaagacacuguccugggcau

SEQ ID NO: 44628 - RNA, 22 nt, Homo sapiens
ugcaagaggagacuguacucag

SEQ ID NO: 44629 - RNA, 22 nt, Homo sapiens
ugcaaguaauuggcgaggaguu

SEQ ID NO: 44630 - RNA, 22 nt, Homo sapiens
ugcaagacuaaaccuuccccuc

SEQ ID NO: 44631 - RNA, 22 nt, Homo sapiens
ugcaauagcuucaggagaaggg

SEQ ID NO: 44632 - RNA, 20 nt, Homo sapiens
ugcagauucaaccaacugug

SEQ ID NO: 44633 - RNA, 22 nt, Homo sapiens
ugcagcacaguagguuugcaau

SEQ ID NO: 44634 - RNA, 22 nt, Homo sapiens
ugcagguacuugacaacuuggg

SEQ ID NO: 44635 - RNA, 20 nt, Homo sapiens
ugcagcacugggaaugcagu

SEQ ID NO: 44636 - RNA, 22 nt, Homo sapiens
ugcagcauugcacuccagccug

SEQ ID NO: 44637 - RNA, 22 nt, Homo sapiens
ugcagcacuguucacaauagcc

SEQ ID NO: 44638 - RNA, 22 nt, Homo sapiens
ugcaggauguucaguaauuucc

SEQ ID NO: 44639 - RNA, 21 nt, Homo sapiens
ugcagccauucagcccuaugc

SEQ ID NO: 44640 - RNA, 22 nt, Homo sapiens
ugcagcucagcugcggaguuuu

SEQ ID NO: 44641 - RNA, 18 nt, Homo sapiens
ugcagcaucaguacccag

SEQ ID NO: 44642 - RNA, 18 nt, Homo sapiens
ugcagcuuugugauuggc

SEQ ID NO: 44643 - RNA, 22 nt, Homo sapiens
ugcauggucauacauggcaccc

SEQ ID NO: 44644 - RNA, 22 nt, Homo sapiens
ugcagguaggcaguaucauuua

SEQ ID NO: 44645 - RNA, 22 nt, Homo sapiens
ugcaguacauucagcauccucu

SEQ ID NO: 44646 - RNA, 22 nt, Homo sapiens
ugcauggauguuugaacacacu

SEQ ID NO: 44647 - RNA, 22 nt, Homo sapiens
ugcaacacauugccccugcucu

SEQ ID NO: 44648 - RNA, 22 nt, Homo sapiens
ugaguucuuuguagauucugug

SEQ ID NO: 44649 - RNA, 22 nt, Homo sapiens
ugaguucuuccuaucucugccu

SEQ ID NO: 44650 - RNA, 22 nt, Homo sapiens
ugauaacauugggggaagcuga

SEQ ID NO: 44651 - RNA, 23 nt, Homo sapiens
ugauaacagcauaugaagauucu

SEQ ID NO: 44652 - RNA, 22 nt, Homo sapiens
ugaggugaaguaauauucuaag

SEQ ID NO: 44653 - RNA, 22 nt, Homo sapiens
ugaggugagggguuaggugcua

SEQ ID NO: 44654 - RNA, 23 nt, Homo sapiens
ugagguguuaagcagacuugucu

SEQ ID NO: 44655 - RNA, 22 nt, Homo sapiens
ugagguguuaacuuuacuuuua

SEQ ID NO: 44656 - RNA, 22 nt, Homo sapiens
ugagugaggcugggcagucccu

SEQ ID NO: 44657 - RNA, 22 nt, Homo sapiens
ugaguguccaccccuuucacag

SEQ ID NO: 44658 - RNA, 22 nt, Homo sapiens
ugagugugacuuagcagaagga

SEQ ID NO: 44659 - RNA, 22 nt, Homo sapiens
uuugucacucuuggagguuguu

SEQ ID NO: 44660 - RNA, 19 nt, Homo sapiens
uuuguauguuuccaguaau

SEQ ID NO: 44661 - RNA, 20 nt, Homo sapiens
uuuguaucucuggguacugg

SEQ ID NO: 44662 - RNA, 22 nt, Homo sapiens
uuuguacacuguuggugguuau

SEQ ID NO: 44663 - RNA, 23 nt, Homo sapiens
uuuguacuaugucaguuuagaua

SEQ ID NO: 44664 - RNA, 22 nt, Homo sapiens
uuuguacucccuuuagauaaaa

SEQ ID NO: 44665 - RNA, 22 nt, Homo sapiens
uuuguacuccuuggccagcuuc

SEQ ID NO: 44666 - RNA, 22 nt, Homo sapiens
uuuuggugguuaugugucaaug

SEQ ID NO: 44667 - RNA, 22 nt, Homo sapiens
uuuugcucuucauagguccugu

SEQ ID NO: 44668 - RNA, 19 nt, Homo sapiens
uuuugcucuuuauaccuau

SEQ ID NO: 44669 - RNA, 22 nt, Homo sapiens
uuuuggcuagaaauauaccucc

SEQ ID NO: 44670 - RNA, 22 nt, Homo sapiens
uuuuggcucugucuguaucuuu

SEQ ID NO: 44671 - RNA, 18 nt, Homo sapiens
uuucauugagugugauau

SEQ ID NO: 44672 - RNA, 22 nt, Homo sapiens
uuucauggaggauuugcuucuu

SEQ ID NO: 44673 - RNA, 22 nt, Homo sapiens
uuucauagccuucuaaugaguu

SEQ ID NO: 44674 - RNA, 22 nt, Homo sapiens
uuucccagugguacaguuuaua

SEQ ID NO: 44675 - RNA, 22 nt, Homo sapiens
uuucccauuguucugcucugug

SEQ ID NO: 44676 - RNA, 22 nt, Homo sapiens
uuuguaagaugcauagauugca

SEQ ID NO: 44677 - RNA, 22 nt, Homo sapiens
aagaugcagucauacuggagga

SEQ ID NO: 44678 - RNA, 22 nt, Homo sapiens
aagcaggugucugugucuguaa

SEQ ID NO: 44679 - RNA, 22 nt, Homo sapiens
aagcacccagccucacgccugc

SEQ ID NO: 44680 - RNA, 22 nt, Homo sapiens
aagcacccuuugucuggacaug

SEQ ID NO: 44681 - RNA, 20 nt, Homo sapiens
aagcaagcauuugcaaucau

SEQ ID NO: 44682 - RNA, 22 nt, Homo sapiens
aagagugucuuugugcuggccc

SEQ ID NO: 44683 - RNA, 22 nt, Homo sapiens
aagaucaucauagagggcauga

SEQ ID NO: 44684 - RNA, 22 nt, Homo sapiens
aagaugcagaagcccagauguu

SEQ ID NO: 44685 - RNA, 22 nt, Homo sapiens
aagaugcagucauacuggagua

SEQ ID NO: 44686 - RNA, 22 nt, Homo sapiens
aagcaacacaucugccccgguu

SEQ ID NO: 44687 - RNA, 22 nt, Homo sapiens
aagagcucauccauaguuguca

SEQ ID NO: 44688 - RNA, 22 nt, Homo sapiens
aagagcucucuguagcauguga

SEQ ID NO: 44689 - RNA, 22 nt, Homo sapiens
uuuuuugguaauugaacaauga

SEQ ID NO: 44690 - RNA, 22 nt, Homo sapiens
aaccuguaaccauaugaucagu

SEQ ID NO: 44691 - RNA, 22 nt, Homo sapiens
aacuggccuggcgugcagaggg

SEQ ID NO: 44692 - RNA, 22 nt, Homo sapiens
aacuggucuuuggaggaggagg

SEQ ID NO: 44693 - RNA, 21 nt, Homo sapiens
aagaaagcuggacuugccgcu

SEQ ID NO: 44694 - RNA, 22 nt, Homo sapiens
uuuuuauggccaauccucagaa

SEQ ID NO: 44695 - RNA, 22 nt, Homo sapiens
uuuuuggauaaugguacaugua

SEQ ID NO: 44696 - RNA, 18 nt, Homo sapiens
uuuacaguagaaggacuu

SEQ ID NO: 44697 - RNA, 22 nt, Homo sapiens
uuuagcaauucauuuugugucu

SEQ ID NO: 44698 - RNA, 22 nt, Homo sapiens
uuuaauacugcaucuuuacucu

SEQ ID NO: 44699 - RNA, 22 nt, Homo sapiens
uuguuauguuaaacuacugaaa

SEQ ID NO: 44700 - RNA, 22 nt, Homo sapiens
uuguuguggauuaaauuugcau

SEQ ID NO: 44701 - RNA, 22 nt, Homo sapiens
uuguuuuggagaugagcuaaaa

SEQ ID NO: 44702 - RNA, 22 nt, Homo sapiens
uuguuauguaucucaagauaaa

SEQ ID NO: 44703 - RNA, 19 nt, Homo sapiens
uugucuuagaguugucauu

SEQ ID NO: 44704 - RNA, 22 nt, Homo sapiens
uugucuccuagacgaccaggcg

SEQ ID NO: 44705 - RNA, 22 nt, Homo sapiens
uugucucacuggaguuuaguaa

SEQ ID NO: 44706 - RNA, 22 nt, Homo sapiens
uuguccucuccaaaucucaugu

SEQ ID NO: 44707 - RNA, 22 nt, Homo sapiens
uuguccuccacauuugaucagu

SEQ ID NO: 44708 - RNA, 22 nt, Homo sapiens
uugucauuuucagaguguuacg

SEQ ID NO: 44709 - RNA, 22 nt, Homo sapiens
uugugaucuucagaaaguggcu

SEQ ID NO: 44710 - RNA, 21 nt, Homo sapiens
uugugccaaacccuggaggga

SEQ ID NO: 44711 - RNA, 22 nt, Homo sapiens
uugugcuugauuugccuagcug

SEQ ID NO: 44712 - RNA, 22 nt, Homo sapiens
uugugcuuguaacuacauucag

SEQ ID NO: 44713 - RNA, 22 nt, Homo sapiens
uugugcaugaugcauacauggu

SEQ ID NO: 44714 - RNA, 22 nt, Homo sapiens
uugugaucauugucaaauagug

SEQ ID NO: 44715 - RNA, 22 nt, Homo sapiens
uugugcaaaguugugguuucug

SEQ ID NO: 44716 - RNA, 22 nt, Homo sapiens
uuguaacaugcuuucacuucag

SEQ ID NO: 44717 - RNA, 22 nt, Homo sapiens
uuguaacaguuuauugacucga

SEQ ID NO: 44718 - RNA, 22 nt, Homo sapiens
uuguaacaguucugcgagcagc

SEQ ID NO: 44719 - RNA, 20 nt, Homo sapiens
uuguacuccugggcucaagc

SEQ ID NO: 44720 - RNA, 22 nt, Homo sapiens
uuguagcaaauauauuuuggaa

SEQ ID NO: 44721 - RNA, 22 nt, Homo sapiens
uuguagaucuucaguugcuaca

SEQ ID NO: 44722 - RNA, 22 nt, Homo sapiens
uuguacuagucauauuuugaaa

SEQ ID NO: 44723 - RNA, 22 nt, Homo sapiens
uuguacaggaguguaagcuuca

SEQ ID NO: 44724 - RNA, 22 nt, Homo sapiens
uuguaccacagggcaugaagug

SEQ ID NO: 44725 - RNA, 22 nt, Homo sapiens
uugggagugucucuggacugca

SEQ ID NO: 44726 - RNA, 22 nt, Homo sapiens
uuggcuuggagaguugaaaugu

SEQ ID NO: 44727 - RNA, 22 nt, Homo sapiens
uuggccuuuucaaugccucuuu

SEQ ID NO: 44728 - RNA, 22 nt, Homo sapiens
uuggcucuggcugggcuccagc

SEQ ID NO: 44729 - RNA, 22 nt, Homo sapiens
uuggcgacugcugcuaaucagg

SEQ ID NO: 44730 - RNA, 22 nt, Homo sapiens
uuggccuuucucuaaauacuuu

SEQ ID NO: 44731 - RNA, 22 nt, Homo sapiens
uuggcuguguuuauaugcugga

SEQ ID NO: 44732 - RNA, 22 nt, Homo sapiens
uuggaauauaaccuguuucuaa

SEQ ID NO: 44733 - RNA, 22 nt, Homo sapiens
uugauagacacauauccaugug

SEQ ID NO: 44734 - RNA, 22 nt, Homo sapiens
uugauaacauucugcauccuau

SEQ ID NO: 44735 - RNA, 22 nt, Homo sapiens
uugauaguccuguaucuauuuu

SEQ ID NO: 44736 - RNA, 19 nt, Homo sapiens
uuaagugugauaucucagu

SEQ ID NO: 44737 - RNA, 22 nt, Homo sapiens
uguuugcuguuuucuccaauga

SEQ ID NO: 44738 - RNA, 22 nt, Homo sapiens
uuaauguaucuaucacaucaca

SEQ ID NO: 44739 - RNA, 22 nt, Homo sapiens
uuacacaguugguaggggcaga

SEQ ID NO: 44740 - RNA, 22 nt, Homo sapiens
uguugcauuugucaaggucaag

SEQ ID NO: 44741 - RNA, 18 nt, Homo sapiens
uguugguguucacucacu

SEQ ID NO: 44742 - RNA, 18 nt, Homo sapiens
uguuugguucugcgccuc

SEQ ID NO: 44743 - RNA, 22 nt, Homo sapiens
ugugaaugaagaaugcuaaccu

SEQ ID NO: 44744 - RNA, 22 nt, Homo sapiens
ugugacagcacagcaucucuuu

SEQ ID NO: 44745 - RNA, 22 nt, Homo sapiens
ugugacagguauccuguguucu

SEQ ID NO: 44746 - RNA, 22 nt, Homo sapiens
ugugacagcacgguucaacugc

SEQ ID NO: 44747 - RNA, 22 nt, Homo sapiens
ugugauagagaaugguggagaa

SEQ ID NO: 44748 - RNA, 22 nt, Homo sapiens
ugugaugauuugauaaacguau

SEQ ID NO: 44749 - RNA, 22 nt, Homo sapiens
ugugaugaaggcauagggaugu

SEQ ID NO: 44750 - RNA, 22 nt, Homo sapiens
ugugaugcagggccugggccuc

SEQ ID NO: 44751 - RNA, 22 nt, Homo sapiens
ugugauaguugcuguucugggc

SEQ ID NO: 44752 - RNA, 22 nt, Homo sapiens
ugugagacugguucugaaccca

SEQ ID NO: 44753 - RNA, 22 nt, Homo sapiens
ugugagaaaugcagaaucucag

SEQ ID NO: 44754 - RNA, 17 nt, Homo sapiens
uuagagguagacucauu

SEQ ID NO: 44755 - RNA, 20 nt, Homo sapiens
uuagaguaguaugauuuaua

SEQ ID NO: 44756 - RNA, 22 nt, Homo sapiens
uuacugcucuuuugucaugagu

SEQ ID NO: 44757 - RNA, 22 nt, Homo sapiens
uuaccuuuuuaagacagguuag

SEQ ID NO: 44758 - RNA, 22 nt, Homo sapiens
uuagaacagugcucaccacaaa

SEQ ID NO: 44759 - RNA, 22 nt, Homo sapiens
uuagacacacauacauuuaucu

SEQ ID NO: 44760 - RNA, 22 nt, Homo sapiens
uuagcagcucuaauaacugcua

SEQ ID NO: 44761 - RNA, 22 nt, Homo sapiens
uuagcagugugagcacagacua

SEQ ID NO: 44762 - RNA, 22 nt, Homo sapiens
uuagccggguguguuggcgggc

SEQ ID NO: 44763 - RNA, 22 nt, Homo sapiens
uuauguaggcuauagcucugca

SEQ ID NO: 44764 - RNA, 22 nt, Homo sapiens
uuaugguuuucucucacgcagg

SEQ ID NO: 44765 - RNA, 22 nt, Homo sapiens
uuaugguuuuuagcagaguaau

SEQ ID NO: 44766 - RNA, 22 nt, Homo sapiens
uuagugcuuacgaugagcuaag

SEQ ID NO: 44767 - RNA, 22 nt, Homo sapiens
uuaguugcauucaugugagagu

SEQ ID NO: 44768 - RNA, 22 nt, Homo sapiens
uuauagcagugcaggaacagac

SEQ ID NO: 44769 - RNA, 22 nt, Homo sapiens
uuaguaucauccuucugcauuc

SEQ ID NO: 44770 - RNA, 23 nt, Homo sapiens
uuaguaaacucaaugacaccaca

SEQ ID NO: 44771 - RNA, 22 nt, Homo sapiens
uugagugaaggcuguguucuug

SEQ ID NO: 44772 - RNA, 22 nt, Homo sapiens
uugaguagaaguaugucaguau

SEQ ID NO: 44773 - RNA, 20 nt, Homo sapiens
uugaggugugaggggcagag

SEQ ID NO: 44774 - RNA, 22 nt, Homo sapiens
uugaggugaauuugcaggaugc

SEQ ID NO: 44775 - RNA, 22 nt, Homo sapiens
uugagguggugucuugcucugu

SEQ ID NO: 44776 - RNA, 22 nt, Homo sapiens
uugaggaggcagucugcccauu

SEQ ID NO: 44777 - RNA, 22 nt, Homo sapiens
uugagcaauccuccugccaugu

SEQ ID NO: 44778 - RNA, 22 nt, Homo sapiens
uugagcaccaugccuggccaug

SEQ ID NO: 44779 - RNA, 22 nt, Homo sapiens
uugagcacugucugugugcagu

SEQ ID NO: 44780 - RNA, 22 nt, Homo sapiens
uugagcaucauguuagcacuca

SEQ ID NO: 44781 - RNA, 22 nt, Homo sapiens
uugacugugguaauggaagcug

SEQ ID NO: 44782 - RNA, 22 nt, Homo sapiens
uugaccacugggcacaguaagu

SEQ ID NO: 44783 - RNA, 22 nt, Homo sapiens
uugacauguaaguacucuauag

SEQ ID NO: 44784 - RNA, 22 nt, Homo sapiens
uugacuacaccaugccaggaac

SEQ ID NO: 44785 - RNA, 22 nt, Homo sapiens
uugagauggagucucacugugu

SEQ ID NO: 44786 - RNA, 22 nt, Homo sapiens
uugagauggagucucgcugugu

SEQ ID NO: 44787 - RNA, 22 nt, Homo sapiens
uugagagcugaugaaagauaaa

SEQ ID NO: 44788 - RNA, 22 nt, Homo sapiens
uugagagaaaaaauuuauuggu

SEQ ID NO: 44789 - RNA, 22 nt, Homo sapiens
uugagaguggaggcuauaucuu

SEQ ID NO: 44790 - RNA, 22 nt, Homo sapiens
uugagaucuacuacuguaggag

SEQ ID NO: 44791 - RNA, 22 nt, Homo sapiens
uucgcagcucaguucaacuagg

SEQ ID NO: 44792 - RNA, 21 nt, Homo sapiens
uucuuugcucaguguuagagu

SEQ ID NO: 44793 - RNA, 22 nt, Homo sapiens
uucuaaguaagucuguggggaa

SEQ ID NO: 44794 - RNA, 22 nt, Homo sapiens
uugaaaguguucacaaugguau

SEQ ID NO: 44795 - RNA, 22 nt, Homo sapiens
uugaaauguuuagaaguuugga

SEQ ID NO: 44796 - RNA, 22 nt, Homo sapiens
uugaagacuaauuuagauaaug

SEQ ID NO: 44797 - RNA, 22 nt, Homo sapiens
uugaagacuaccuaccauacuu

SEQ ID NO: 44798 - RNA, 22 nt, Homo sapiens
uucagaugcacacuguagucua

SEQ ID NO: 44799 - RNA, 22 nt, Homo sapiens
uucaccuggguuggccaucauu

SEQ ID NO: 44800 - RNA, 22 nt, Homo sapiens
uuauugcuuaugauuagguguu

SEQ ID NO: 44801 - RNA, 22 nt, Homo sapiens
uucacugcacuccagccugggu

SEQ ID NO: 44802 - RNA, 22 nt, Homo sapiens
uucacugcauuucagccugggc

SEQ ID NO: 44803 - RNA, 22 nt, Homo sapiens
uuccagcugggggcaacucugc

SEQ ID NO: 44804 - RNA, 22 nt, Homo sapiens
uuccaagugggaaacaaaaaug

SEQ ID NO: 44805 - RNA, 23 nt, Homo sapiens
uuccaccauugacuaguuacaua

SEQ ID NO: 44806 - RNA, 22 nt, Homo sapiens
cuggcaaauaguagagccagga

SEQ ID NO: 44807 - RNA, 22 nt, Homo sapiens
cuggaguaugaaccauguauca

SEQ ID NO: 44808 - RNA, 22 nt, Homo sapiens
cuggagaucuugacauugaagu

SEQ ID NO: 44809 - RNA, 22 nt, Homo sapiens
cuggaauauuagcuggucuuaa

SEQ ID NO: 44810 - RNA, 22 nt, Homo sapiens
cugcuggucuuuaaggucuagg

SEQ ID NO: 44811 - RNA, 22 nt, Homo sapiens
cugcuguuguuaacuuuuggag

SEQ ID NO: 44812 - RNA, 22 nt, Homo sapiens
cugguuguuacaugcuugccag

SEQ ID NO: 44813 - RNA, 22 nt, Homo sapiens
cuguaagcauuauaaagagaua

SEQ ID NO: 44814 - RNA, 22 nt, Homo sapiens
cuggugugugacuuuucauuau

SEQ ID NO: 44815 - RNA, 22 nt, Homo sapiens
cuggcugagugguaaguagagg

SEQ ID NO: 44816 - RNA, 22 nt, Homo sapiens
cugggcaaugcggcuggauaga

SEQ ID NO: 44817 - RNA, 22 nt, Homo sapiens
cugguaagaaggucuaagucaa

SEQ ID NO: 44818 - RNA, 22 nt, Homo sapiens
cugguaguguuuauaaggguau

SEQ ID NO: 44819 - RNA, 22 nt, Homo sapiens
cuggcgagacagcuccaucacu

SEQ ID NO: 44820 - RNA, 22 nt, Homo sapiens
cuggcuaagugcuugagugugc

SEQ ID NO: 44821 - RNA, 22 nt, Homo sapiens
cuggcaccauacacuguuguug

SEQ ID NO: 44822 - RNA, 22 nt, Homo sapiens
cugccaguuugauucgggccac

SEQ ID NO: 44823 - RNA, 22 nt, Homo sapiens
cugagaucaugggucagguggu

SEQ ID NO: 44824 - RNA, 22 nt, Homo sapiens
cugagaagaaacagguaaggac

SEQ ID NO: 44825 - RNA, 22 nt, Homo sapiens
cugacagaugacugccacugua

SEQ ID NO: 44826 - RNA, 22 nt, Homo sapiens
cugagacacucuuaucugcaua

SEQ ID NO: 44827 - RNA, 22 nt, Homo sapiens
cuccaggugagguuaagggacu

SEQ ID NO: 44828 - RNA, 23 nt, Homo sapiens
cucccugaacaugacacaccaga

SEQ ID NO: 44829 - RNA, 22 nt, Homo sapiens
cucucuguuugucuguuauugg

SEQ ID NO: 44830 - RNA, 22 nt, Homo sapiens
cuacaguagagaggauguagaa

SEQ ID NO: 44831 - RNA, 22 nt, Homo sapiens
cuacagcagcccaguccccgaa

SEQ ID NO: 44832 - RNA, 22 nt, Homo sapiens
cuaagugaguauaauuuuaaga

SEQ ID NO: 44833 - RNA, 22 nt, Homo sapiens
cuagcagacaggcugggagcag

SEQ ID NO: 44834 - RNA, 22 nt, Homo sapiens
cuagcagacaugggcugaacca

SEQ ID NO: 44835 - RNA, 22 nt, Homo sapiens
cuagcaggcaagauaagauuca

SEQ ID NO: 44836 - RNA, 22 nt, Homo sapiens
cucccagagccaguuauaggcu

SEQ ID NO: 44837 - RNA, 22 nt, Homo sapiens
cuccauuuggaacagauguccu

SEQ ID NO: 44838 - RNA, 22 nt, Homo sapiens
cuagcuuuugauguaaagugag

SEQ ID NO: 44839 - RNA, 22 nt, Homo sapiens
cuccacgugaaugccaaguauu

SEQ ID NO: 44840 - RNA, 22 nt, Homo sapiens
cauuggugauuagugaaugaac

SEQ ID NO: 44841 - RNA, 20 nt, Homo sapiens
ccagcaucauuagauucugg

SEQ ID NO: 44842 - RNA, 22 nt, Homo sapiens
cauuugcacugagacucagcuu

SEQ ID NO: 44843 - RNA, 22 nt, Homo sapiens
cauuguacauaaguauggagua

SEQ ID NO: 44844 - RNA, 22 nt, Homo sapiens
ccaggguugcuuuagauucuga

SEQ ID NO: 44845 - RNA, 22 nt, Homo sapiens
ccaguguauuuuugggaccugc

SEQ ID NO: 44846 - RNA, 22 nt, Homo sapiens
ccagugucugacagacacggcg

SEQ ID NO: 44847 - RNA, 20 nt, Homo sapiens
ccaguguuauuuauguucua

SEQ ID NO: 44848 - RNA, 22 nt, Homo sapiens
cgugaggaguauuuuuaggugc

SEQ ID NO: 44849 - RNA, 22 nt, Homo sapiens
ccaguuuucccagcaccauuaa

SEQ ID NO: 44850 - RNA, 22 nt, Homo sapiens
cgccgggggaugggcaccagcg

SEQ ID NO: 44851 - RNA, 22 nt, Homo sapiens
cgaggaguaucuuugugguguu

SEQ ID NO: 44852 - RNA, 22 nt, Homo sapiens
cgacuggccuagacuaguguuu

SEQ ID NO: 44853 - RNA, 22 nt, Homo sapiens
caagagagcugaugguuuuaaa

SEQ ID NO: 44854 - RNA, 22 nt, Homo sapiens
caagagaccugagugucauucu

SEQ ID NO: 44855 - RNA, 22 nt, Homo sapiens
auugcagauucgcuuuguguug

SEQ ID NO: 44856 - RNA, 22 nt, Homo sapiens
auugcacucugaucugcacucc

SEQ ID NO: 44857 - RNA, 22 nt, Homo sapiens
caaguacugggcuauggauauu

SEQ ID NO: 44858 - RNA, 22 nt, Homo sapiens
caagugacugagccgccucggc

SEQ ID NO: 44859 - RNA, 23 nt, Homo sapiens
caauacugaccucacguuaauag

SEQ ID NO: 44860 - RNA, 22 nt, Homo sapiens
cacaggccugucucuuucuaac

SEQ ID NO: 44861 - RNA, 22 nt, Homo sapiens
cacagcgacuuccgccuaccgg

SEQ ID NO: 44862 - RNA, 22 nt, Homo sapiens
cacagugaaugucaucauugcc

SEQ ID NO: 44863 - RNA, 22 nt, Homo sapiens
cacaguguuacugguaugaagu

SEQ ID NO: 44864 - RNA, 22 nt, Homo sapiens
cacaccuaccucauuauggaca

SEQ ID NO: 44865 - RNA, 22 nt, Homo sapiens
cacaaugucuaagauguuucua

SEQ ID NO: 44866 - RNA, 22 nt, Homo sapiens
caaugguuuuuuaguauaagua

SEQ ID NO: 44867 - RNA, 22 nt, Homo sapiens
cacauguuuuagcauggcuguu

SEQ ID NO: 44868 - RNA, 22 nt, Homo sapiens
cacaguguucauagccaucagg

SEQ ID NO: 44869 - RNA, 22 nt, Homo sapiens
cacauagucccugcuaaucuuc

SEQ ID NO: 44870 - RNA, 22 nt, Homo sapiens
cacaguguuccagcuauuugaa

SEQ ID NO: 44871 - RNA, 22 nt, Homo sapiens
cacugcauccucugccuggcgg

SEQ ID NO: 44872 - RNA, 22 nt, Homo sapiens
cacugcauccuugaccuucugg

SEQ ID NO: 44873 - RNA, 22 nt, Homo sapiens
cacauagcuagucaguagugaa

SEQ ID NO: 44874 - RNA, 22 nt, Homo sapiens
cacugcauccuccauauccugg

SEQ ID NO: 44875 - RNA, 22 nt, Homo sapiens
cacugcacucuucuucugggca

SEQ ID NO: 44876 - RNA, 22 nt, Homo sapiens
cagauacuggaguccugaaguu

SEQ ID NO: 44877 - RNA, 22 nt, Homo sapiens
cagaucaucuugagcuuaggaa

SEQ ID NO: 44878 - RNA, 22 nt, Homo sapiens
cagagcacugauacuggguucu

SEQ ID NO: 44879 - RNA, 21 nt, Homo sapiens
cacugguguugcuauaucaaa

SEQ ID NO: 44880 - RNA, 17 nt, Homo sapiens
cacugggugcaagagga

SEQ ID NO: 44881 - RNA, 22 nt, Homo sapiens
cagagaacauucagagcuguag

SEQ ID NO: 44882 - RNA, 20 nt, Homo sapiens
cagagcaaagcaguccuggc

SEQ ID NO: 44883 - RNA, 22 nt, Homo sapiens
cauggcuuuaagcaacaccaag

SEQ ID NO: 44884 - RNA, 21 nt, Homo sapiens
caugucacugcacucuagccu

SEQ ID NO: 44885 - RNA, 22 nt, Homo sapiens
caugucuuuuaaacauucaacu

SEQ ID NO: 44886 - RNA, 19 nt, Homo sapiens
caugugcacuacuggcuuc

SEQ ID NO: 44887 - RNA, 22 nt, Homo sapiens
cauguaacaucccgcuguagga

SEQ ID NO: 44888 - RNA, 22 nt, Homo sapiens
cauggcuuucacaguaaagccu

SEQ ID NO: 44889 - RNA, 22 nt, Homo sapiens
cauggcacauauauaucuaggu

SEQ ID NO: 44890 - RNA, 22 nt, Homo sapiens
cauggcacaucuuuucugacua

SEQ ID NO: 44891 - RNA, 22 nt, Homo sapiens
cauugcacuccagcuugggcaa

SEQ ID NO: 44892 - RNA, 22 nt, Homo sapiens
cauugcacuccagccuggcaac

SEQ ID NO: 44893 - RNA, 22 nt, Homo sapiens
cauugcacuccagcuugggcga

SEQ ID NO: 44894 - RNA, 22 nt, Homo sapiens
cauugcacuuagacaacuuuug

SEQ ID NO: 44895 - RNA, 22 nt, Homo sapiens
cauugcuaaaagucauauauaa

SEQ ID NO: 44896 - RNA, 22 nt, Homo sapiens
cauugcacuccagccucggcaa

SEQ ID NO: 44897 - RNA, 22 nt, Homo sapiens
cauugcacacauuuaccuaugu

SEQ ID NO: 44898 - RNA, 20 nt, Homo sapiens
cauugcacuccagccugcug

SEQ ID NO: 44899 - RNA, 20 nt, Homo sapiens
cauuacacuccaaccugggu

SEQ ID NO: 44900 - RNA, 22 nt, Homo sapiens
cauugcacuccagccugaccaa

SEQ ID NO: 44901 - RNA, 22 nt, Homo sapiens
caugacacuggcauguuucuuu

SEQ ID NO: 44902 - RNA, 22 nt, Homo sapiens
caugacacauguuuaccuaugu

SEQ ID NO: 44903 - RNA, 22 nt, Homo sapiens
caugaaagacugaggaauugga

SEQ ID NO: 44904 - RNA, 22 nt, Homo sapiens
caucgcacuccagcuugggcaa

SEQ ID NO: 44905 - RNA, 19 nt, Homo sapiens
caucccugagcugaagugg

SEQ ID NO: 44906 - RNA, 22 nt, Homo sapiens
caucccugaaccccagaaaucu

SEQ ID NO: 44907 - RNA, 22 nt, Homo sapiens
caguaguagccccuuagaugga

SEQ ID NO: 44908 - RNA, 22 nt, Homo sapiens
cagauguaguauuuuagugaaa

SEQ ID NO: 44909 - RNA, 22 nt, Homo sapiens
cagcuguuguuccagucuuuua

SEQ ID NO: 44910 - RNA, 22 nt, Homo sapiens
cagcuugugguauugcugguug

SEQ ID NO: 44911 - RNA, 22 nt, Homo sapiens
cagguauagucacuugcccaag

SEQ ID NO: 44912 - RNA, 22 nt, Homo sapiens
cagguaguguguagcacagcag

SEQ ID NO: 44913 - RNA, 23 nt, Homo sapiens
cagguaguucuuuauaguagugu

SEQ ID NO: 44914 - RNA, 22 nt, Homo sapiens
caguacaauguggaaaaggagu

SEQ ID NO: 44915 - RNA, 21 nt, Homo sapiens
cagguagugucugaagccaga

SEQ ID NO: 44916 - RNA, 22 nt, Homo sapiens
gagcagacaugaggaccgcugg

SEQ ID NO: 44917 - RNA, 20 nt, Homo sapiens
gagcaucacaggccucugcu

SEQ ID NO: 44918 - RNA, 22 nt, Homo sapiens
gagcaccagucccugucagugc

SEQ ID NO: 44919 - RNA, 22 nt, Homo sapiens
gagcacauguggagagucuggg

SEQ ID NO: 44920 - RNA, 18 nt, Homo sapiens
gagcaccuuuuuugcaga

SEQ ID NO: 44921 - RNA, 22 nt, Homo sapiens
gagcacauaugacauuuucuuc

SEQ ID NO: 44922 - RNA, 22 nt, Homo sapiens
gagcaacaguggcagugguggg

SEQ ID NO: 44923 - RNA, 22 nt, Homo sapiens
gagcuuggguuaaaguugccuu

SEQ ID NO: 44924 - RNA, 22 nt, Homo sapiens
gaggagauauucugcuggaugg

SEQ ID NO: 44925 - RNA, 22 nt, Homo sapiens
gaggaguagggcacaaagccuu

SEQ ID NO: 44926 - RNA, 22 nt, Homo sapiens
gaggagucagacugugcaaggu

SEQ ID NO: 44927 - RNA, 22 nt, Homo sapiens
gacugcauuugccccaucgaau

SEQ ID NO: 44928 - RNA, 22 nt, Homo sapiens
gacucgugagguccccaggagg

SEQ ID NO: 44929 - RNA, 18 nt, Homo sapiens
gacuccauuucagccaga

SEQ ID NO: 44930 - RNA, 22 nt, Homo sapiens
gagaugucuauuucagagaugu

SEQ ID NO: 44931 - RNA, 22 nt, Homo sapiens
gacguagagaaaugugaaaugg

SEQ ID NO: 44932 - RNA, 22 nt, Homo sapiens
gacauguuuucaagauuuauaa

SEQ ID NO: 44933 - RNA, 20 nt, Homo sapiens
gacauguugguuugcugcac

SEQ ID NO: 44934 - RNA, 22 nt, Homo sapiens
gacauguaaggcucucucuguu

SEQ ID NO: 44935 - RNA, 22 nt, Homo sapiens
cuuuugugauuccucaguuacu

SEQ ID NO: 44936 - RNA, 22 nt, Homo sapiens
cuuuuugcaaauacaacucuga

SEQ ID NO: 44937 - RNA, 22 nt, Homo sapiens
gacagugugauacuuagucuca

SEQ ID NO: 44938 - RNA, 18 nt, Homo sapiens
gacaguguggugauuccu

SEQ ID NO: 44939 - RNA, 20 nt, Homo sapiens
gacauaggcugguaucuggc

SEQ ID NO: 44940 - RNA, 22 nt, Homo sapiens
gacaguuucucaggcuuccuua

SEQ ID NO: 44941 - RNA, 22 nt, Homo sapiens
gaaagauuuuaacugggagacu

SEQ ID NO: 44942 - RNA, 19 nt, Homo sapiens
cuuugguugagcguguugg

SEQ ID NO: 44943 - RNA, 23 nt, Homo sapiens
cuguggauaugaguuguaaaugg

SEQ ID NO: 44944 - RNA, 22 nt, Homo sapiens
cuuuguaugucaugacaacugu

SEQ ID NO: 44945 - RNA, 23 nt, Homo sapiens
cuuuguacagcuugacuacuggg

SEQ ID NO: 44946 - RNA, 22 nt, Homo sapiens
cugugguguaacucuuggggcg

SEQ ID NO: 44947 - RNA, 22 nt, Homo sapiens
cugugguuacguucuuugugcu

SEQ ID NO: 44948 - RNA, 22 nt, Homo sapiens
cugugguugagcuuugccauga

SEQ ID NO: 44949 - RNA, 19 nt, Homo sapiens
cuguggucauuauuuugcu

SEQ ID NO: 44950 - RNA, 22 nt, Homo sapiens
cugugcuaggcaaugugguaga

SEQ ID NO: 44951 - RNA, 22 nt, Homo sapiens
cugugcauuggaugucucccug

SEQ ID NO: 44952 - RNA, 17 nt, Homo sapiens
cugugaugaucuugucu

SEQ ID NO: 44953 - RNA, 22 nt, Homo sapiens
cugucuggaguccuucgugugc

SEQ ID NO: 44954 - RNA, 22 nt, Homo sapiens
cugugauagguuagucaugaau

SEQ ID NO: 44955 - RNA, 22 nt, Homo sapiens
cugucuguuucaaaagugguua

SEQ ID NO: 44956 - RNA, 19 nt, Homo sapiens
cugucacugaggaagacug

SEQ ID NO: 44957 - RNA, 22 nt, Homo sapiens
ggagaugugccugcucugcucu

SEQ ID NO: 44958 - RNA, 22 nt, Homo sapiens
ggagaucauuuccuauuugaag

SEQ ID NO: 44959 - RNA, 19 nt, Homo sapiens
ggacugucauggaguaguu

SEQ ID NO: 44960 - RNA, 22 nt, Homo sapiens
ggagaucacucuuuguagcgug

SEQ ID NO: 44961 - RNA, 22 nt, Homo sapiens
ggagguagucuuucccuuauca

SEQ ID NO: 44962 - RNA, 22 nt, Homo sapiens
ggaguaggaaggaaauguuaaa

SEQ ID NO: 44963 - RNA, 22 nt, Homo sapiens
ggaguaggcuguccggcaccca

SEQ ID NO: 44964 - RNA, 22 nt, Homo sapiens
ggagauuauugaaucaugaggg

SEQ ID NO: 44965 - RNA, 22 nt, Homo sapiens
ggaugugugcacgcgcacaugc

SEQ ID NO: 44966 - RNA, 22 nt, Homo sapiens
ggaugcauucaacuuccaguuc

SEQ ID NO: 44967 - RNA, 23 nt, Homo sapiens
ggauggaaaguuuugagggccac

SEQ ID NO: 44968 - RNA, 22 nt, Homo sapiens
ggcaacaaagacauuucaacau

SEQ ID NO: 44969 - RNA, 22 nt, Homo sapiens
ggagugucagaaacaguguccu

SEQ ID NO: 44970 - RNA, 22 nt, Homo sapiens
ggagugcuguuguuacacaagg

SEQ ID NO: 44971 - RNA, 22 nt, Homo sapiens
ggaucacagccagcucccagaa

SEQ ID NO: 44972 - RNA, 16 nt, Homo sapiens
gcuguuguuuuguccu

SEQ ID NO: 44973 - RNA, 22 nt, Homo sapiens
gcuguugugaacuauacaucua

SEQ ID NO: 44974 - RNA, 19 nt, Homo sapiens
gcugauguuacauucuugc

SEQ ID NO: 44975 - RNA, 22 nt, Homo sapiens
gcugauguuuucagguaauucu

SEQ ID NO: 44976 - RNA, 22 nt, Homo sapiens
gcucguccccuccugacucugc

SEQ ID NO: 44977 - RNA, 22 nt, Homo sapiens
gcugagaucucuugccugaacu

SEQ ID NO: 44978 - RNA, 22 nt, Homo sapiens
gcuuugcaauggcauugaccau

SEQ ID NO: 44979 - RNA, 22 nt, Homo sapiens
ggacagugaaugccacuccucc

SEQ ID NO: 44980 - RNA, 22 nt, Homo sapiens
ggacauguauauauaugugugu

SEQ ID NO: 44981 - RNA, 22 nt, Homo sapiens
gcuuggugugcaagugguacua

SEQ ID NO: 44982 - RNA, 22 nt, Homo sapiens
gcuuuggauaaaugucaguuua

SEQ ID NO: 44983 - RNA, 22 nt, Homo sapiens
gcuuguguuuacuguaguuacu

SEQ ID NO: 44984 - RNA, 22 nt, Homo sapiens
gcacgugcacccacaugcacgu

SEQ ID NO: 44985 - RNA, 22 nt, Homo sapiens
gcacuacugcacuccagucuag

SEQ ID NO: 44986 - RNA, 22 nt, Homo sapiens
gcacugagagaagccccaagua

SEQ ID NO: 44987 - RNA, 22 nt, Homo sapiens
gcagaauugacucuguuuuuuc

SEQ ID NO: 44988 - RNA, 22 nt, Homo sapiens
gcaugaugaauaauaucacaag

SEQ ID NO: 44989 - RNA, 22 nt, Homo sapiens
gcauauguuuggguguguauau

SEQ ID NO: 44990 - RNA, 22 nt, Homo sapiens
gcacauggccccaucgugccga

SEQ ID NO: 44991 - RNA, 22 nt, Homo sapiens
gcacaguguuacuugauauauu

SEQ ID NO: 44992 - RNA, 22 nt, Homo sapiens
gcaugcauuuuccuaacuagaa

SEQ ID NO: 44993 - RNA, 22 nt, Homo sapiens
gcauggaguggaaauucuuggg

SEQ ID NO: 44994 - RNA, 22 nt, Homo sapiens
gcauggccuuuaaaugucacag

SEQ ID NO: 44995 - RNA, 22 nt, Homo sapiens
gcauugcacuuggcauagacug

SEQ ID NO: 44996 - RNA, 22 nt, Homo sapiens
gccaagaagugucuaagcagga

SEQ ID NO: 44997 - RNA, 22 nt, Homo sapiens
gcucaugagacaagcaggagua

SEQ ID NO: 44998 - RNA, 20 nt, Homo sapiens
gccacaguuaagcuucugcc

SEQ ID NO: 44999 - RNA, 22 nt, Homo sapiens
gccaagauugguuuaauauucc

SEQ ID NO: 45000 - RNA, 22 nt, Homo sapiens
gcaugguacuggaugguaguau

SEQ ID NO: 45001 - RNA, 22 nt, Homo sapiens
gccaguguguguuguucuccgc

SEQ ID NO: 45002 - RNA, 22 nt, Homo sapiens
gccaguauuuuguugagaauuu

SEQ ID NO: 45003 - RNA, 22 nt, Homo sapiens
gagugguucuauauguaauugg

SEQ ID NO: 45004 - RNA, 22 nt, Homo sapiens
gagugcaauggcagaucuccgc

SEQ ID NO: 45005 - RNA, 22 nt, Homo sapiens
gaguugagagaguuguuauuuc

SEQ ID NO: 45006 - RNA, 22 nt, Homo sapiens
gaguuuguaaacuauucacuaa

SEQ ID NO: 45007 - RNA, 22 nt, Homo sapiens
gagugguuuugauuuauagcug

SEQ ID NO: 45008 - RNA, 21 nt, Homo sapiens
gaguggcuuuuguuucaccag

SEQ ID NO: 45009 - RNA, 22 nt, Homo sapiens
gauggcaucugagaguguuaga

SEQ ID NO: 45010 - RNA, 22 nt, Homo sapiens
gauggaguugacuaagacaaca

SEQ ID NO: 45011 - RNA, 18 nt, Homo sapiens
gauaacaguggacuaugc

SEQ ID NO: 45012 - RNA, 22 nt, Homo sapiens
gauaaaguauuggguacuaugc

SEQ ID NO: 45013 - RNA, 22 nt, Homo sapiens
gauacaccauuuucuagcuauu

SEQ ID NO: 45014 - RNA, 22 nt, Homo sapiens
gauaaauccagauucugaugua

SEQ ID NO: 45015 - RNA, 22 nt, Homo sapiens
gauguagaaagagugggcugga

SEQ ID NO: 45016 - RNA, 22 nt, Homo sapiens
gauggugucccaggcucaggcu

SEQ ID NO: 45017 - RNA, 22 nt, Homo sapiens
gauguaggugcauuugcacgug

SEQ ID NO: 45018 - RNA, 22 nt, Homo sapiens
gaugguuuucaccugcaugcuu

SEQ ID NO: 45019 - RNA, 22 nt, Homo sapiens
gauguguugggaagauuucaag

SEQ ID NO: 45020 - RNA, 22 nt, Homo sapiens
gauguguuuuaggaucucagca

SEQ ID NO: 45021 - RNA, 22 nt, Homo sapiens
gauuagcacuucaguuacagua

SEQ ID NO: 45022 - RNA, 22 nt, Homo sapiens
gcaagaugagagcccgggcagu

SEQ ID NO: 45023 - RNA, 18 nt, Homo sapiens
uagaauauaggucauucu

SEQ ID NO: 45024 - RNA, 22 nt, Homo sapiens
uacugcaucgaaaugcuuuuau

SEQ ID NO: 45025 - RNA, 22 nt, Homo sapiens
uacugcauuucacuguuaaaga

SEQ ID NO: 45026 - RNA, 22 nt, Homo sapiens
uacugcuaccuccagcuucugg

SEQ ID NO: 45027 - RNA, 22 nt, Homo sapiens
uacugcugucagugccaaguag

SEQ ID NO: 45028 - RNA, 22 nt, Homo sapiens
uagauuaucuguaugugcucuu

SEQ ID NO: 45029 - RNA, 17 nt, Homo sapiens
uagcacagugccuggua

SEQ ID NO: 45030 - RNA, 22 nt, Homo sapiens
uagcacaucccuaaaaugcugu

SEQ ID NO: 45031 - RNA, 22 nt, Homo sapiens
uagcacagggaauugguucucu

SEQ ID NO: 45032 - RNA, 22 nt, Homo sapiens
uagcaagaugaauuugugcaaa

SEQ ID NO: 45033 - RNA, 22 nt, Homo sapiens
uagauuaucuaugaggcuucca

SEQ ID NO: 45034 - RNA, 21 nt, Homo sapiens
uagaugguguucuagagagaa

SEQ ID NO: 45035 - RNA, 22 nt, Homo sapiens
uagaugauucacuuuacuucca

SEQ ID NO: 45036 - RNA, 22 nt, Homo sapiens
uagaauguauaauauuuuacuu

SEQ ID NO: 45037 - RNA, 23 nt, Homo sapiens
uagaauguuuuuccauguuucuu

SEQ ID NO: 45038 - RNA, 19 nt, Homo sapiens
uaagaugaagcugucuggg

SEQ ID NO: 45039 - RNA, 22 nt, Homo sapiens
uaagagagcuccaucuuuuccu

SEQ ID NO: 45040 - RNA, 22 nt, Homo sapiens
uaagaugaaggcucaccuagaa

SEQ ID NO: 45041 - RNA, 18 nt, Homo sapiens
uaagaugcagccuauucc

SEQ ID NO: 45042 - RNA, 22 nt, Homo sapiens
uaagcucauuccagccaugucc

SEQ ID NO: 45043 - RNA, 20 nt, Homo sapiens
uaacuguggcuucuuuuggc

SEQ ID NO: 45044 - RNA, 22 nt, Homo sapiens
uaccacccuuuuuccagaagcc

SEQ ID NO: 45045 - RNA, 22 nt, Homo sapiens
uaccagugaauuccaggggcua

SEQ ID NO: 45046 - RNA, 22 nt, Homo sapiens
uaccaucauuauacguagaaau

SEQ ID NO: 45047 - RNA, 22 nt, Homo sapiens
uaccauguaucugggaugcuuu

SEQ ID NO: 45048 - RNA, 22 nt, Homo sapiens
uaccacaggcuggguaaucuau

SEQ ID NO: 45049 - RNA, 22 nt, Homo sapiens
uagugaauguuggcuauuaaua

SEQ ID NO: 45050 - RNA, 20 nt, Homo sapiens
uaguggaaaucagguccucu

SEQ ID NO: 45051 - RNA, 22 nt, Homo sapiens
uaguagugucccugacuaucac

SEQ ID NO: 45052 - RNA, 22 nt, Homo sapiens
uagguaaguaugugugaugggg

SEQ ID NO: 45053 - RNA, 22 nt, Homo sapiens
uaguaucacaagguguacaccc

SEQ ID NO: 45054 - RNA, 22 nt, Homo sapiens
uauaugauugguagacccugca

SEQ ID NO: 45055 - RNA, 22 nt, Homo sapiens
uagcccagugagguugauuugg

SEQ ID NO: 45056 - RNA, 22 nt, Homo sapiens
uagcccauuuguuuagggaaag

SEQ ID NO: 45057 - RNA, 21 nt, Homo sapiens
uagcuacacugugauucaugg

SEQ ID NO: 45058 - RNA, 22 nt, Homo sapiens
uagcacaugucagguaauuugc

SEQ ID NO: 45059 - RNA, 22 nt, Homo sapiens
uagcaccacaaucaagauacag

SEQ ID NO: 45060 - RNA, 22 nt, Homo sapiens
uagcaguucauuguugugugaa

SEQ ID NO: 45061 - RNA, 22 nt, Homo sapiens
uagcagugugaaaacagacuaa

SEQ ID NO: 45062 - RNA, 22 nt, Homo sapiens
uaggauaguccuccugagaccu

SEQ ID NO: 45063 - RNA, 22 nt, Homo sapiens
uagggcuugugaucagguguag

SEQ ID NO: 45064 - RNA, 22 nt, Homo sapiens
uaggcuguguggccguggggcu

SEQ ID NO: 45065 - RNA, 22 nt, Homo sapiens
uaggcagccagcuguggauuga

SEQ ID NO: 45066 - RNA, 21 nt, Homo sapiens
uagcugcacccaggccuccuu

SEQ ID NO: 45067 - RNA, 22 nt, Homo sapiens
uaggacacaggacauauguaga

SEQ ID NO: 45068 - RNA, 22 nt, Homo sapiens
uagcuguuggugggaagucaga

SEQ ID NO: 45069 - RNA, 22 nt, Homo sapiens
uagcuggaguuuuuguuauagg

SEQ ID NO: 45070 - RNA, 22 nt, Homo sapiens
uauuaagcuaguugucagugcu

SEQ ID NO: 45071 - RNA, 22 nt, Homo sapiens
uauugcacuccagccuuggcaa

SEQ ID NO: 45072 - RNA, 22 nt, Homo sapiens
uauugcaauuggcagagugcua

SEQ ID NO: 45073 - RNA, 22 nt, Homo sapiens
uauugcauauuauucuaguggc

SEQ ID NO: 45074 - RNA, 22 nt, Homo sapiens
uauugcacaugaggagacauug

SEQ ID NO: 45075 - RNA, 22 nt, Homo sapiens
uauugcauguugagcaguaccu

SEQ ID NO: 45076 - RNA, 20 nt, Homo sapiens
ucaaaguaugcucugcacua

SEQ ID NO: 45077 - RNA, 22 nt, Homo sapiens
ucaaagugacaaaguugcagca

SEQ ID NO: 45078 - RNA, 22 nt, Homo sapiens
ucaaagugcuauggcucagguu

SEQ ID NO: 45079 - RNA, 22 nt, Homo sapiens
uauggguguuauugcaugggag

SEQ ID NO: 45080 - RNA, 22 nt, Homo sapiens
uaucucuuuucauguguaaaug

SEQ ID NO: 45081 - RNA, 22 nt, Homo sapiens
uaugugguuaauaggaauuugu

SEQ ID NO: 45082 - RNA, 22 nt, Homo sapiens
uaucaugggggguguacacucc

SEQ ID NO: 45083 - RNA, 22 nt, Homo sapiens
uaucaucauuggcaggugagaa

SEQ ID NO: 45084 - RNA, 21 nt, Homo sapiens
uaucauggugaaacccugucu

SEQ ID NO: 45085 - RNA, 22 nt, Homo sapiens
uaucaugucuguguguaccuag

SEQ ID NO: 45086 - RNA, 22 nt, Homo sapiens
uaucacacuguuggauuugauu

SEQ ID NO: 45087 - RNA, 22 nt, Homo sapiens
uaucauuguguuauuucuucca

SEQ ID NO: 45088 - RNA, 22 nt, Homo sapiens
uaucccaauguaauaucacaaa

SEQ ID NO: 45089 - RNA, 22 nt, Homo sapiens
uaucucagaugagacuuguaac

SEQ ID NO: 45090 - RNA, 22 nt, Homo sapiens
uaucucaguguacaggaugaua

SEQ ID NO: 45091 - RNA, 22 nt, Homo sapiens
ucaccaccugcugaucauagag

SEQ ID NO: 45092 - RNA, 22 nt, Homo sapiens
ucacaugucagccguggggaag

SEQ ID NO: 45093 - RNA, 22 nt, Homo sapiens
ucacauguguaugagcuuugau

SEQ ID NO: 45094 - RNA, 22 nt, Homo sapiens
ucacaugugacauauauauuug

SEQ ID NO: 45095 - RNA, 22 nt, Homo sapiens
ucacauagcugaguaaaaugga

SEQ ID NO: 45096 - RNA, 22 nt, Homo sapiens
ucacaugaagauuuuaguauac

SEQ ID NO: 45097 - RNA, 21 nt, Homo sapiens
ucaccuguugcgaugaagcug

SEQ ID NO: 45098 - RNA, 22 nt, Homo sapiens
ucaccuggggcacagcugaaga

SEQ ID NO: 45099 - RNA, 18 nt, Homo sapiens
ucaccuugugagagagag

SEQ ID NO: 45100 - RNA, 22 nt, Homo sapiens
ucaccaguggcacuccagccug

SEQ ID NO: 45101 - RNA, 22 nt, Homo sapiens
ucacagcggucgaacuaauuug

SEQ ID NO: 45102 - RNA, 21 nt, Homo sapiens
ucacagccuaggaccugaaga

SEQ ID NO: 45103 - RNA, 20 nt, Homo sapiens
ucacagucacacauaauccu

SEQ ID NO: 45104 - RNA, 22 nt, Homo sapiens
ucacagugcaggaucaguuaau

SEQ ID NO: 45105 - RNA, 22 nt, Homo sapiens
ucacaccauucuucuacuucag

SEQ ID NO: 45106 - RNA, 22 nt, Homo sapiens
ucacacggugaugauuccuaga

SEQ ID NO: 45107 - RNA, 22 nt, Homo sapiens
ucacaauguaaaugaggguugg

SEQ ID NO: 45108 - RNA, 22 nt, Homo sapiens
ucacaaagcuuggccugcuucu

SEQ ID NO: 45109 - RNA, 22 nt, Homo sapiens
ucaacaggucaauugcauagaa

SEQ ID NO: 45110 - RNA, 22 nt, Homo sapiens
gugacugcauauaaguguaugu

SEQ ID NO: 45111 - RNA, 22 nt, Homo sapiens
gugaccauuugacauauccuug

SEQ ID NO: 45112 - RNA, 22 nt, Homo sapiens
gugaagugugaccucagcaucu

SEQ ID NO: 45113 - RNA, 22 nt, Homo sapiens
gugaauguuuucuuacauggua

SEQ ID NO: 45114 - RNA, 22 nt, Homo sapiens
gugacaguggagacuuacuuca

SEQ ID NO: 45115 - RNA, 20 nt, Homo sapiens
gugacacucguuaaccucug

SEQ ID NO: 45116 - RNA, 22 nt, Homo sapiens
gugaacagaaccugggaucgaa

SEQ ID NO: 45117 - RNA, 22 nt, Homo sapiens
gugaaguuuuuugcugagaguc

SEQ ID NO: 45118 - RNA, 22 nt, Homo sapiens
gugaacagcagaugagugagug

SEQ ID NO: 45119 - RNA, 22 nt, Homo sapiens
gucuuugaugucuaugugcuuc

SEQ ID NO: 45120 - RNA, 20 nt, Homo sapiens
gucuugcuccguugcccagg

SEQ ID NO: 45121 - RNA, 22 nt, Homo sapiens
gucuuggagaacucagcuuggc

SEQ ID NO: 45122 - RNA, 22 nt, Homo sapiens
gucuuuguuuugauuuaccaga

SEQ ID NO: 45123 - RNA, 22 nt, Homo sapiens
gucuuggcaugugcagcuggga

SEQ ID NO: 45124 - RNA, 22 nt, Homo sapiens
gucuggcuccugucuaaucacu

SEQ ID NO: 45125 - RNA, 22 nt, Homo sapiens
gucuguuugauccagaucaaaa

SEQ ID NO: 45126 - RNA, 22 nt, Homo sapiens
gucagcaaaguucuccugcaga

SEQ ID NO: 45127 - RNA, 22 nt, Homo sapiens
gucagugccugucccaggcuuu

SEQ ID NO: 45128 - RNA, 22 nt, Homo sapiens
gucuccgagccguguggagccg

SEQ ID NO: 45129 - RNA, 22 nt, Homo sapiens
gucacggaauguaaguggaagu

SEQ ID NO: 45130 - RNA, 22 nt, Homo sapiens
gucacuguuuccuauuauauuu

SEQ ID NO: 45131 - RNA, 22 nt, Homo sapiens
guaucauugccuaaugcucuca

SEQ ID NO: 45132 - RNA, 22 nt, Homo sapiens
gucaagauuuguaggacagaga

SEQ ID NO: 45133 - RNA, 22 nt, Homo sapiens
gucacagaaaaagauaugccaa

SEQ ID NO: 45134 - RNA, 22 nt, Homo sapiens
gucacagaggcuaagaccccac

SEQ ID NO: 45135 - RNA, 22 nt, Homo sapiens
ggcagcacaauuuucugaugga

SEQ ID NO: 45136 - RNA, 22 nt, Homo sapiens
ggcagagucuugcaucuuuaga

SEQ ID NO: 45137 - RNA, 22 nt, Homo sapiens
ggcacuguggcucaagccugua

SEQ ID NO: 45138 - RNA, 22 nt, Homo sapiens
ggcagcuguguccuucguaagg

SEQ ID NO: 45139 - RNA, 23 nt, Homo sapiens
ggcagguuggucuaggucuauuc

SEQ ID NO: 45140 - RNA, 22 nt, Homo sapiens
ggcaugaggccauaaaaguaag

SEQ ID NO: 45141 - RNA, 22 nt, Homo sapiens
ggcaguuuguucuugcuccuuu

SEQ ID NO: 45142 - RNA, 21 nt, Homo sapiens
ggcaugaauggaaaagugaga

SEQ ID NO: 45143 - RNA, 22 nt, Homo sapiens
ggcagguaaggagugggagccu

SEQ ID NO: 45144 - RNA, 22 nt, Homo sapiens
ggcaguguggcugcauauagca

SEQ ID NO: 45145 - RNA, 23 nt, Homo sapiens
ggcacggaauucaaagaggcauu

SEQ ID NO: 45146 - RNA, 22 nt, Homo sapiens
ggcacgguggcucacgccugua

SEQ ID NO: 45147 - RNA, 22 nt, Homo sapiens
ggcaagauagauaucaguguca

SEQ ID NO: 45148 - RNA, 22 nt, Homo sapiens
ggcaaugucagcuaaugaugga

SEQ ID NO: 45149 - RNA, 22 nt, Homo sapiens
ggcaaguauguuuuaggaugcu

SEQ ID NO: 45150 - RNA, 22 nt, Homo sapiens
guagugcaguuugagaaucagu

SEQ ID NO: 45151 - RNA, 22 nt, Homo sapiens
guagcagcuacuaaguugcugu

SEQ ID NO: 45152 - RNA, 22 nt, Homo sapiens
guauaugccucaguuauagcac

SEQ ID NO: 45153 - RNA, 22 nt, Homo sapiens
guauaaguugacucaaucuuug

SEQ ID NO: 45154 - RNA, 22 nt, Homo sapiens
guauacuucugaaaauagcuau

SEQ ID NO: 45155 - RNA, 22 nt, Homo sapiens
guaauacuggacaggguaucag

SEQ ID NO: 45156 - RNA, 22 nt, Homo sapiens
guaagugauagaauuaggauuc

SEQ ID NO: 45157 - RNA, 22 nt, Homo sapiens
guaacaccaguuauaucaguuc

SEQ ID NO: 45158 - RNA, 22 nt, Homo sapiens
ggcauguguggguuauuaaaga

SEQ ID NO: 45159 - RNA, 22 nt, Homo sapiens
guaaggcuguuaucuucacguc

SEQ ID NO: 45160 - RNA, 22 nt, Homo sapiens
guaacagucucaacaguggucu

SEQ ID NO: 45161 - RNA, 20 nt, Homo sapiens
guugaugcugaaguugcuua

SEQ ID NO: 45162 - RNA, 22 nt, Homo sapiens
guugagcaagcuuuggagccua

SEQ ID NO: 45163 - RNA, 22 nt, Homo sapiens
guucccaguugaaaugauuagu

SEQ ID NO: 45164 - RNA, 22 nt, Homo sapiens
guguucauggaauuugcaauug

SEQ ID NO: 45165 - RNA, 22 nt, Homo sapiens
guucaucagggauacuggcuua

SEQ ID NO: 45166 - RNA, 22 nt, Homo sapiens
uaaacugucuuuggagcuuugc

SEQ ID NO: 45167 - RNA, 22 nt, Homo sapiens
uaaacugucuugcaguuacaug

SEQ ID NO: 45168 - RNA, 22 nt, Homo sapiens
uaaaagucaucacaacuggagu

SEQ ID NO: 45169 - RNA, 22 nt, Homo sapiens
uaaaccacguuuacauuugaga

SEQ ID NO: 45170 - RNA, 22 nt, Homo sapiens
guuugugcuccuaugagaaucu

SEQ ID NO: 45171 - RNA, 22 nt, Homo sapiens
guuugugcuccuaugagaaccu

SEQ ID NO: 45172 - RNA, 22 nt, Homo sapiens
guuuggcuuucucucuauccug

SEQ ID NO: 45173 - RNA, 22 nt, Homo sapiens
guugcagcacacaggcugucag

SEQ ID NO: 45174 - RNA, 22 nt, Homo sapiens
guugcacagucuuuccuggacu

SEQ ID NO: 45175 - RNA, 22 nt, Homo sapiens
uaacaagagagucagucagucc

SEQ ID NO: 45176 - RNA, 22 nt, Homo sapiens
uaacaacauucuaacugacggc

SEQ ID NO: 45177 - RNA, 22 nt, Homo sapiens
uaacaaugucuuaugggcuuaa

SEQ ID NO: 45178 - RNA, 22 nt, Homo sapiens
uaacccacgcagaauggacaag

SEQ ID NO: 45179 - RNA, 23 nt, Homo sapiens
uaacauugcaugauuaccugcau

SEQ ID NO: 45180 - RNA, 22 nt, Homo sapiens
uaacaguguauuccuuuggaca

SEQ ID NO: 45181 - RNA, 22 nt, Homo sapiens
uaacaguguagaggccuauugg

SEQ ID NO: 45182 - RNA, 18 nt, Homo sapiens
uaaaggcacuguguuguu

SEQ ID NO: 45183 - RNA, 22 nt, Homo sapiens
uaaagagcuuuugaggugucau

SEQ ID NO: 45184 - RNA, 22 nt, Homo sapiens
uaaauugcauaaguacaaauga

SEQ ID NO: 45185 - RNA, 22 nt, Homo sapiens
guguaaaucugcugugaacauu

SEQ ID NO: 45186 - RNA, 22 nt, Homo sapiens
guguaaaacaauuagaggauuu

SEQ ID NO: 45187 - RNA, 22 nt, Homo sapiens
guguaacaacagcacuccacug

SEQ ID NO: 45188 - RNA, 22 nt, Homo sapiens
gugugacagcuauagacaugau

SEQ ID NO: 45189 - RNA, 22 nt, Homo sapiens
gugugucuugaccaggaucgga

SEQ ID NO: 45190 - RNA, 22 nt, Homo sapiens
gugugguauuauaacuagguau

SEQ ID NO: 45191 - RNA, 22 nt, Homo sapiens
gugugguaggauugguuacuca

SEQ ID NO: 45192 - RNA, 22 nt, Homo sapiens
gugugcauaugucuuuauagua

SEQ ID NO: 45193 - RNA, 22 nt, Homo sapiens
gugugcaugucuuuuuaguagg

SEQ ID NO: 45194 - RNA, 22 nt, Homo sapiens
gugugcucaucacaugcaauag

SEQ ID NO: 45195 - RNA, 22 nt, Homo sapiens
gugguaggaaagugcaaaugua

SEQ ID NO: 45196 - RNA, 22 nt, Homo sapiens
gugguguuugagcugccaggga

SEQ ID NO: 45197 - RNA, 22 nt, Homo sapiens
gugguagaaauguagaugcuag

SEQ ID NO: 45198 - RNA, 17 nt, Homo sapiens
guggauagaacaaugaa

SEQ ID NO: 45199 - RNA, 22 nt, Homo sapiens
guggugucuuuuuugauuagga

SEQ ID NO: 45200 - RNA, 22 nt, Homo sapiens
gugguucuagaauugaguaucc

SEQ ID NO: 45201 - RNA, 22 nt, Homo sapiens
gugguuuuaucccagaaauuaa

SEQ ID NO: 45202 - RNA, 22 nt, Homo sapiens
gugguuuuacaaagagaaagau

SEQ ID NO: 45203 - RNA, 22 nt, Homo sapiens
gugguuuuuaaaguaccugugg

SEQ ID NO: 45204 - RNA, 20 nt, Homo sapiens
guggaagauaaguagccuga

SEQ ID NO: 45205 - RNA, 20 nt, Homo sapiens
gugauuggucacugguuguu

SEQ ID NO: 45206 - RNA, 22 nt, Homo sapiens
gugauugucuaaucaagauaca

SEQ ID NO: 45207 - RNA, 22 nt, Homo sapiens
guggaauauaaagcaucgugua

SEQ ID NO: 45208 - RNA, 22 nt, Homo sapiens
guggaauacuaugaugguggau

SEQ ID NO: 45209 - RNA, 22 nt, Homo sapiens
guggacggagguugcagugagc

SEQ ID NO: 45210 - RNA, 22 nt, Homo sapiens
guggagcuguguggccuugggc

SEQ ID NO: 45211 - RNA, 22 nt, Homo sapiens
gugauagaucugggauucagaa

SEQ ID NO: 45212 - RNA, 22 nt, Homo sapiens
gugauagguugucacugucacu

SEQ ID NO: 45213 - RNA, 20 nt, Homo sapiens
gugagaacaugugguauuug

SEQ ID NO: 45214 - RNA, 22 nt, Homo sapiens
gugacuggacucugaagaaaau

SEQ ID NO: 45215 - RNA, 22 nt, Homo sapiens
gugauguguuucaacagcuccu

SEQ ID NO: 45216 - RNA, 22 nt, Homo sapiens
gugaucuguccuucauagccug

SEQ ID NO: 45217 - RNA, 22 nt, Homo sapiens
gugauaucugagccugccccag

SEQ ID NO: 45218 - RNA, 22 nt, Human herpesvirus 5
aaagcaaggcacguucauaaug

SEQ ID NO: 45219 - RNA, 22 nt, Human herpesvirus 5
caaaacugucagcggcgcucag

SEQ ID NO: 45220 - RNA, 22 nt, Human herpesvirus 5
uuucucaucaaccugucgaugg

SEQ ID NO: 45221 - RNA, 22 nt, Human herpesvirus 5
ugguuugggguggcauccaaac

SEQ ID NO: 45222 - RNA, 22 nt, Human herpesvirus 5
acuucuuucgcucccucgaccc

SEQ ID NO: 45223 - RNA, 22 nt, Human herpesvirus 5
cuucagaucguggacguguuug

SEQ ID NO: 45224 - RNA, 22 nt, Human herpesvirus 5
ugacaagccugacgagagcguu

SEQ ID NO: 45225 - RNA, 22 nt, Human herpesvirus 5
ucuuuccaggugucuucaacga

SEQ ID NO: 45226 - RNA, 22 nt, Human herpesvirus 5
ucuuuccagguguuuucaacgu

SEQ ID NO: 45227 - RNA, 22 nt, Human herpesvirus 5
ugcgcuguuacacggaauccag

SEQ ID NO: 45228 - RNA, 22 nt, Human herpesvirus 5
ugcucacggccacgggcugcug

SEQ ID NO: 45229 - RNA, 22 nt, Human herpesvirus 5
ugcugauaacuguuguacugua

SEQ ID NO: 45230 - RNA, 22 nt, Human herpesvirus 5
ugcccgucuacgcgguccacgg

SEQ ID NO: 45231 - RNA, 20 nt, Human herpesvirus 5
ugcgccagguaguaaagcac

SEQ ID NO: 45232 - RNA, 22 nt, Human herpesvirus 5
cggcgguuucgccaccgcugac

SEQ ID NO: 45233 - RNA, 22 nt, Human herpesvirus 5
cgggaagaggagggugguucau

SEQ ID NO: 45234 - RNA, 22 nt, Human herpesvirus 5
cgcgcccacgguccgggcacaa

SEQ ID NO: 45235 - RNA, 22 nt, Human herpesvirus 5
cgcguaaccguuguccguuaua

SEQ ID NO: 45236 - RNA, 22 nt, Human herpesvirus 5
cgcguugcgaacggugucguua

SEQ ID NO: 45237 - RNA, 22 nt, Human herpesvirus 5
cggacgugucaucucgcccgga

SEQ ID NO: 45238 - RNA, 22 nt, Human herpesvirus 5
cggagaauggccggcgcugcgc

SEQ ID NO: 45239 - RNA, 22 nt, Human herpesvirus 5
cgagcugcugaugugccgucgc

SEQ ID NO: 45240 - RNA, 22 nt, Human herpesvirus 5
cgagcugucggaauccucgucg

SEQ ID NO: 45241 - RNA, 22 nt, Human herpesvirus 5
cgaggccgacagccuggagaug

SEQ ID NO: 45242 - RNA, 22 nt, Human herpesvirus 5
cgacgaagaugcgucgaaucgc

SEQ ID NO: 45243 - RNA, 22 nt, Human herpesvirus 5
cgcacgauggccaugcgcguca

SEQ ID NO: 45244 - RNA, 23 nt, Human herpesvirus 5
cgccucgucugagccggggugcc

SEQ ID NO: 45245 - RNA, 19 nt, Human herpesvirus 5
cgcgagcggcggacuuggc

SEQ ID NO: 45246 - RNA, 22 nt, Human herpesvirus 5
aggcgaguccgcggucgccgcc

SEQ ID NO: 45247 - RNA, 22 nt, Human herpesvirus 5
aggcggacgagguagagguuug

SEQ ID NO: 45248 - RNA, 22 nt, Human herpesvirus 5
aguggcaggcccggguucgcga

SEQ ID NO: 45249 - RNA, 22 nt, Human herpesvirus 5
aggccagaggcuaagccgaaac

SEQ ID NO: 45250 - RNA, 22 nt, Human herpesvirus 5
aguauacuaauaugaagcgucg

SEQ ID NO: 45251 - RNA, 22 nt, Human herpesvirus 5
agcggucguuuuaaccgcaggu

SEQ ID NO: 45252 - RNA, 22 nt, Human herpesvirus 5
agcggcgugaugauacggagcg

SEQ ID NO: 45253 - RNA, 22 nt, Human herpesvirus 5
aaagcaaggcacguucauaaug

SEQ ID NO: 45254 - RNA, 22 nt, Human herpesvirus 5
agcgcgaggcgucggagcucgg

SEQ ID NO: 45255 - RNA, 22 nt, Human herpesvirus 5
caacaccguaaagccguugcgc

SEQ ID NO: 45256 - RNA, 22 nt, Human herpesvirus 5
caccaccgcagucggaggagga

SEQ ID NO: 45257 - RNA, 22 nt, Human herpesvirus 5
cacgccguccuugacgacgcag

SEQ ID NO: 45258 - RNA, 22 nt, Human herpesvirus 5
cacggccagcgccuugucgcgg

SEQ ID NO: 45259 - RNA, 22 nt, Human herpesvirus 5
caccgcccauggguuccugcug

SEQ ID NO: 45260 - RNA, 22 nt, Human herpesvirus 5
cacgaacguguccucggugaag

SEQ ID NO: 45261 - RNA, 22 nt, Human herpesvirus 5
aucuugagcggcagcgcguaca

SEQ ID NO: 45262 - RNA, 22 nt, Human herpesvirus 5
agugacggugagauccaggcug

SEQ ID NO: 45263 - RNA, 22 nt, Human herpesvirus 5
aucggcuuccaagacgaccuag

SEQ ID NO: 45264 - RNA, 22 nt, Human herpesvirus 5
aucaccaugguaauagcgauga

SEQ ID NO: 45265 - RNA, 23 nt, Human herpesvirus 5
ucugcggaggaacagcaacggcg

SEQ ID NO: 45266 - RNA, 22 nt, Human herpesvirus 5
ucuaacuagccuucccgugaga

SEQ ID NO: 45267 - RNA, 22 nt, Human herpesvirus 5
ucucaccagaaugcuaguuugu

SEQ ID NO: 45268 - RNA, 22 nt, Human herpesvirus 5
gugacguagcaauuaucguauu

SEQ ID NO: 45269 - RNA, 22 nt, Human herpesvirus 5
ucgcggcggcucccucucggcg

SEQ ID NO: 45270 - RNA, 22 nt, Human herpesvirus 5
ucggcgucagguaggcgcgcag

SEQ ID NO: 45271 - RNA, 22 nt, Human herpesvirus 5
gugaucuacgaacugguguagg

SEQ ID NO: 45272 - RNA, 22 nt, Human herpesvirus 5
ucgccgcgauaacgacagguca

SEQ ID NO: 45273 - RNA, 22 nt, Human herpesvirus 5
ucgccgucgaguacgugcugau

SEQ ID NO: 45274 - RNA, 22 nt, Human herpesvirus 5
ucgcgcguacggacgaguggaa

SEQ ID NO: 45275 - RNA, 22 nt, Human herpesvirus 5
gucaacgguggcgacaccguac

SEQ ID NO: 45276 - RNA, 22 nt, Human herpesvirus 5
gucacagagcgugcugacgugg

SEQ ID NO: 45277 - RNA, 22 nt, Human herpesvirus 5
ggucugcgcgacauuuuggguc

SEQ ID NO: 45278 - RNA, 22 nt, Human herpesvirus 5
ggugcacguugaugcuggggau

SEQ ID NO: 45279 - RNA, 22 nt, Human herpesvirus 5
gguuugcuuccuauauagugga

SEQ ID NO: 45280 - RNA, 22 nt, Human herpesvirus 5
gggucccggcacgggccgagga

SEQ ID NO: 45281 - RNA, 22 nt, Human herpesvirus 5
ggcgugcgcgaccccuagucgg

SEQ ID NO: 45282 - RNA, 22 nt, Human herpesvirus 5
ggcgcgcacagccuccugucga

SEQ ID NO: 45283 - RNA, 22 nt, Human herpesvirus 5
gggcgagucgcgggcaccgccu

SEQ ID NO: 45284 - RNA, 23 nt, Human herpesvirus 5
gcgguucgccgucaucguugucg

SEQ ID NO: 45285 - RNA, 22 nt, Human herpesvirus 5
ggagaacuauuuucuuugucaa

SEQ ID NO: 45286 - RNA, 22 nt, Human herpesvirus 5
ggagcggggcguccgaaggcga

SEQ ID NO: 45287 - RNA, 22 nt, Human herpesvirus 5
ggaggcuuucgccacaccuauc

SEQ ID NO: 45288 - RNA, 22 nt, Human herpesvirus 5
ggcacggaccgcaacgugcugc

SEQ ID NO: 45289 - RNA, 22 nt, Human herpesvirus 5
uuuuuccacugggcggccgcac

SEQ ID NO: 45290 - RNA, 17 nt, Human herpesvirus 5
uuuggcuacgguggugu

SEQ ID NO: 45291 - RNA, 22 nt, Human herpesvirus 5
uuccaccgugguguaaccgcga

SEQ ID NO: 45292 - RNA, 22 nt, Human herpesvirus 5
uuccuuuccuguuuuguacucg

SEQ ID NO: 45293 - RNA, 22 nt, Human herpesvirus 5
uugaccagcagcuugcagcgcu

SEQ ID NO: 45294 - RNA, 22 nt, Human herpesvirus 5
uucuggucguuuugcugcucau

SEQ ID NO: 45295 - RNA, 22 nt, Human herpesvirus 5
uugcgcguuaaguugcaauuuu

SEQ ID NO: 45296 - RNA, 18 nt, Human herpesvirus 5
ucgacucguccgagaccc

SEQ ID NO: 45297 - RNA, 22 nt, Human herpesvirus 5
ugucggagcugucggcgcuggg

SEQ ID NO: 45298 - RNA, 22 nt, Human herpesvirus 5
uguacucaagagagcgauuggu

SEQ ID NO: 45299 - RNA, 22 nt, Human herpesvirus 5
ugugcucggaccgugacggugg

SEQ ID NO: 45300 - RNA, 22 nt, Human herpesvirus 5
gugcaacagcccgugucgcgca

SEQ ID NO: 45301 - RNA, 22 nt, Human herpesvirus 5
gugcucuuugucgacgacgugg

SEQ ID NO: 45302 - RNA, 22 nt, Human herpesvirus 5
guggccgcuaaauauggcgacg

SEQ ID NO: 45303 - RNA, 22 nt, Human herpesvirus 5
guucccaggccgagaacgcgca

SEQ ID NO: 45304 - RNA, 22 nt, Human herpesvirus 5
guuuuccgacuuagccuuuggu

SEQ ID NO: 45305 - RNA, 22 nt, Human herpesvirus 5
uaccgccgcgucgucucguauu

SEQ ID NO: 45306 - RNA, 22 nt, Human herpesvirus 5
uacgucggccaacaaccacggc

SEQ ID NO: 45307 - RNA, 22 nt, Human herpesvirus 5
uacguggcuauguuugccaguu

SEQ ID NO: 45308 - RNA, 22 nt, Human herpesvirus 5
uacuaguggaauaguuaacggu

SEQ ID NO: 45309 - RNA, 22 nt, Human herpesvirus 5
uccgccguguuucucggcguac

SEQ ID NO: 45310 - RNA, 22 nt, Human herpesvirus 5
uccgcguguaaugcacgcggug

SEQ ID NO: 45311 - RNA, 22 nt, Human herpesvirus 5
uagcuccggcauggugcugccg

SEQ ID NO: 45312 - RNA, 22 nt, Human herpesvirus 5
uccaaggaucggaaaguagcgu

SEQ ID NO: 45313 - RNA, 22 nt, Human herpesvirus 5
gauaggugugacgaugucuuua

SEQ ID NO: 45314 - RNA, 22 nt, Human herpesvirus 5
gcagcgagccgcguaacgucug

SEQ ID NO: 45315 - RNA, 22 nt, Human herpesvirus 5
gaugagcagcuccaacagcgug

SEQ ID NO: 45316 - RNA, 22 nt, Human herpesvirus 5
gacggcgucuucggucucgagc

SEQ ID NO: 45317 - RNA, 22 nt, Human herpesvirus 5
gaggcgcggaccgugaguuaua

SEQ ID NO: 45318 - RNA, 22 nt, Human herpesvirus 5
gagcagccggagcccgcacacu

SEQ ID NO: 45319 - RNA, 22 nt, Human herpesvirus 5
gagccgcagauccgagagccuc

SEQ ID NO: 45320 - RNA, 22 nt, Human herpesvirus 5
gacguugaccguuguggggauu

SEQ ID NO: 45321 - RNA, 22 nt, Human herpesvirus 5
gacguuugugcugcuggucaua

SEQ ID NO: 45322 - RNA, 22 nt, Human herpesvirus 5
gagacgcacgacaguauacgug

SEQ ID NO: 45323 - RNA, 23 nt, Human herpesvirus 5
gccggcaaaauguagguggcguu

SEQ ID NO: 45324 - RNA, 22 nt, Human herpesvirus 5
gccgucugcguguccucgcugg

SEQ ID NO: 45325 - RNA, 22 nt, Human herpesvirus 5
gccgaggacgccgugggcggcg

SEQ ID NO: 45326 - RNA, 22 nt, Human herpesvirus 5
gcgacggucuuuuuugccuggg

SEQ ID NO: 45327 - RNA, 22 nt, Human herpesvirus 5
gcgccggcacgaugcagcuggc

SEQ ID NO: 45328 - RNA, 22 nt, Human herpesvirus 5
gcgccuggacguugcacgcggc

SEQ ID NO: 45329 - RNA, 22 nt, Human herpesvirus 5
acaccuccguuuugagcguguu

SEQ ID NO: 45330 - RNA, 21 nt, Human herpesvirus 5
acgcacgucgccguccauguc

SEQ ID NO: 45331 - RNA, 22 nt, Human herpesvirus 5
accucgucaaucuugacgcgac

SEQ ID NO: 45332 - RNA, 22 nt, Human herpesvirus 5
accgcuauccacgcccauugau

SEQ ID NO: 45333 - RNA, 22 nt, Human herpesvirus 5
aacgacguggacuuuugguuac

SEQ ID NO: 45334 - RNA, 22 nt, Human herpesvirus 5
aaauaacgguacagagcgcgaa

SEQ ID NO: 45335 - RNA, 22 nt, Human herpesvirus 5
aacgcuuucgucguguuuuuca

SEQ ID NO: 45336 - RNA, 22 nt, Human herpesvirus 5
ccacggaaaacgguaguuuugu

SEQ ID NO: 45337 - RNA, 22 nt, Human herpesvirus 5
ccaccgauccgcacgaccgcga

SEQ ID NO: 45338 - RNA, 22 nt, Human herpesvirus 5
ccccucuuucugcgucguggcu

SEQ ID NO: 45339 - RNA, 22 nt, Human herpesvirus 5
cauacguuuuugggaaaguugg

SEQ ID NO: 45340 - RNA, 22 nt, Human herpesvirus 5
ccaacgcaacagaccuaggcac

SEQ ID NO: 45341 - RNA, 22 nt, Human herpesvirus 5
ccaagucagagcagcgucgguc

SEQ ID NO: 45342 - RNA, 22 nt, Human herpesvirus 5
cagggcgcuuuggcaaaaggcg

SEQ ID NO: 45343 - RNA, 22 nt, Human herpesvirus 5
cacguuaaugcgcgagacggcg

SEQ ID NO: 45344 - RNA, 22 nt, Human herpesvirus 5
cagccgccgucgcuggugggca

SEQ ID NO: 45345 - RNA, 22 nt, Human herpesvirus 5
agcagcgugugcaguucggcgu

SEQ ID NO: 45346 - RNA, 22 nt, Human herpesvirus 5
agacgcagugguccgucggugu

SEQ ID NO: 45347 - RNA, 22 nt, Human herpesvirus 5
agccgcgcaugacgcaggugag

SEQ ID NO: 45348 - RNA, 22 nt, Human herpesvirus 5
acgcuguuuccgaauaccggga

SEQ ID NO: 45349 - RNA, 22 nt, Human herpesvirus 5
acggcgugauugagcaccugcg

SEQ ID NO: 45350 - RNA, 22 nt, Human herpesvirus 5
accagccguagccaaucccgau

SEQ ID NO: 45351 - RNA, 22 nt, Human herpesvirus 5
acgucgcgagaccugguguuug

SEQ ID NO: 45352 - RNA, 22 nt, Human herpesvirus 5
acgucugagcgccgcugacagu

SEQ ID NO: 45353 - RNA, 22 nt, Human herpesvirus 5
acgugguuuuugcuuccgagcu

SEQ ID NO: 45354 - RNA, 22 nt, Human herpesvirus 5
acuuccccgucguacuggcggc

SEQ ID NO: 45355 - RNA, 22 nt, Human herpesvirus 5
acuucuuucgcucccucgaccc

SEQ ID NO: 45356 - RNA, 22 nt, Human herpesvirus 5
acuuggaacgccgcggcgcaca

SEQ ID NO: 45357 - RNA, 22 nt, Human herpesvirus 5
cuucagaucguggacguguuug

SEQ ID NO: 45358 - RNA, 22 nt, Human herpesvirus 5
cuguggcgggucgcgacgacga

SEQ ID NO: 45359 - RNA, 22 nt, Human herpesvirus 5
gacaacgugguccaguacgucc

SEQ ID NO: 45360 - RNA, 22 nt, Human herpesvirus 5
cuggagaacgccggggcagcag

SEQ ID NO: 45361 - RNA, 22 nt, Human herpesvirus 5
cugcugugaaaacgggcacggu

SEQ ID NO: 45362 - RNA, 22 nt, Human herpesvirus 5
cuggacacguuguuaagcggcg

SEQ ID NO: 45363 - RNA, 22 nt, Human herpesvirus 5
cugcaggaaccaguugugcgga

SEQ ID NO: 45364 - RNA, 23 nt, Human herpesvirus 5
cucgggcgccugugacaugaggc

SEQ ID NO: 45365 - RNA, 22 nt, Human herpesvirus 5
ccgacugugggaagcuguccac

SEQ ID NO: 45366 - RNA, 22 nt, Human herpesvirus 5
ccggcgagcugacgaguggcgg

SEQ ID NO: 45367 - RNA, 22 nt, Human herpesvirus 5
ccgcgugucuaaaccgcgugcu

SEQ ID NO: 45368 - RNA, 22 nt, Homo sapiens
auggcacuccagccugggcaac

SEQ ID NO: 45369 - RNA, 22 nt, Homo sapiens
ggcaacauggugaaacucuguc

SEQ ID NO: 45370 - RNA, 22 nt, Homo sapiens
acaguaugcuuuaaacuuuguu

SEQ ID NO: 45371 - RNA, 22 nt, Homo sapiens
uugagauggaaucucgcuuugu

SEQ ID NO: 45372 - RNA, 22 nt, Homo sapiens
aagcacccagccucacgccugc

SEQ ID NO: 45373 - RNA, 22 nt, Homo sapiens
uggcagaugcucuuggugccca

SEQ ID NO: 45374 - RNA, 22 nt, Homo sapiens
auggauauuuuuugaacauaga

SEQ ID NO: 45375 - RNA, 22 nt, Homo sapiens
uuugccaauauuuuauugagga

SEQ ID NO: 45376 - RNA, 22 nt, Homo sapiens
ugagccaaugauuugaauagag

SEQ ID NO: 45377 - RNA, 22 nt, Homo sapiens
auaaccuauggaucuacucggg

SEQ ID NO: 45378 - RNA, 22 nt, Homo sapiens
cugagcuagaccacuuggcucc

SEQ ID NO: 45379 - RNA, 22 nt, Homo sapiens
auuguacuccagccugggcaag

SEQ ID NO: 45380 - RNA, 22 nt, Homo sapiens
ucuugguugaaaauucauaaua

SEQ ID NO: 45381 - RNA, 20 nt, Homo sapiens
agcuggguguguuggugcau

SEQ ID NO: 45382 - RNA, 22 nt, Homo sapiens
ugcaaauguuaggugucauuau

SEQ ID NO: 45383 - RNA, 22 nt, Homo sapiens
uggcucauuucuaaacccagcu

SEQ ID NO: 45384 - RNA, 22 nt, Homo sapiens
uuuugcaaauuccaguggccau

SEQ ID NO: 45385 - RNA, 22 nt, Homo sapiens
guaacacucuaaagggaugcac

SEQ ID NO: 45386 - RNA, 22 nt, Homo sapiens
auggcagugagucucuaguauu

SEQ ID NO: 45387 - RNA, 22 nt, Homo sapiens
aucauccagccccagaagggag

SEQ ID NO: 45388 - RNA, 22 nt, Homo sapiens
uugagauggaguuuugcucuug

SEQ ID NO: 45389 - RNA, 22 nt, Homo sapiens
ugagaugaguugcuggcucuga

SEQ ID NO: 45390 - RNA, 22 nt, Homo sapiens
cauggcuuguauaagauucuca

SEQ ID NO: 45391 - RNA, 22 nt, Homo sapiens
guaaagacacaugcacacguau

SEQ ID NO: 45392 - RNA, 22 nt, Homo sapiens
auugcacuccagccugggcagc

SEQ ID NO: 45393 - RNA, 22 nt, Homo sapiens
uauugcaauuggcagagugcua

SEQ ID NO: 45394 - RNA, 22 nt, Homo sapiens
auacaagcaguccaacuccaua

SEQ ID NO: 45395 - RNA, 22 nt, Homo sapiens
aucuuuggcgggaauaucacag

SEQ ID NO: 45396 - RNA, 22 nt, Homo sapiens
gucuuuaguugaaacauguggu

SEQ ID NO: 45397 - RNA, 22 nt, Homo sapiens
ucaguagcaugaaaacagacua

SEQ ID NO: 45398 - RNA, 19 nt, Homo sapiens
aauggcuuuuccuguuccc

SEQ ID NO: 45399 - RNA, 22 nt, Homo sapiens
uuggcaguaucuacuacagcua

SEQ ID NO: 45400 - RNA, 22 nt, Homo sapiens
uuugcauaauaagauuagggug

SEQ ID NO: 45401 - RNA, 22 nt, Homo sapiens
ucuuuggugaauggucauccag

SEQ ID NO: 45402 - RNA, 22 nt, Homo sapiens
cuuuguaugucaugacaacugu

SEQ ID NO: 45403 - RNA, 22 nt, Homo sapiens
aauauagcuauguacaugucca

SEQ ID NO: 45404 - RNA, 22 nt, Homo sapiens
uuggucaggcuaaucucgaacg

SEQ ID NO: 45405 - RNA, 20 nt, Homo sapiens
ucaaagacauggcugucaga

SEQ ID NO: 45406 - RNA, 22 nt, Homo sapiens
uuucauggaggcauuuuagauu

SEQ ID NO: 45407 - RNA, 22 nt, Homo sapiens
auuccacuuauaugagguaucu

SEQ ID NO: 45408 - RNA, 22 nt, Homo sapiens
auaugcuuauuagcaagaaaua

SEQ ID NO: 45409 - RNA, 22 nt, Homo sapiens
uuaguucauugugacuggacuc

SEQ ID NO: 45410 - RNA, 22 nt, Homo sapiens
uuggaaaugguaaaggguuaau

SEQ ID NO: 45411 - RNA, 22 nt, Homo sapiens
uagcuguuggugggaagucaga

SEQ ID NO: 45412 - RNA, 22 nt, Homo sapiens
uuaacacugccauugauacugu

SEQ ID NO: 45413 - RNA, 22 nt, Homo sapiens
ccugucuugaagagauccuccu

SEQ ID NO: 45414 - RNA, 22 nt, Homo sapiens
uacaaguauuuuuauuagugcc

SEQ ID NO: 45415 - RNA, 22 nt, Homo sapiens
gaugauguugaauguucucacc

SEQ ID NO: 45416 - RNA, 22 nt, Homo sapiens
ugucaauauguaauaacugaau

SEQ ID NO: 45417 - RNA, 22 nt, Homo sapiens
aaauaguagcugaaugagggaa

SEQ ID NO: 45418 - RNA, 22 nt, Homo sapiens
aucauauccuagauauaacuuc

SEQ ID NO: 45419 - RNA, 22 nt, Homo sapiens
uagacaacugaaacacugugca

SEQ ID NO: 45420 - RNA, 22 nt, Homo sapiens
guggcaguuuuaaauaugaaaa

SEQ ID NO: 45421 - RNA, 20 nt, Homo sapiens
uaagccacacagucuaaggu

SEQ ID NO: 45422 - RNA, 22 nt, Homo sapiens
uuuccaagaugcuuacuuucuc

SEQ ID NO: 45423 - RNA, 22 nt, Homo sapiens
gucuuuggaaaaaaugucuguu

SEQ ID NO: 45424 - RNA, 22 nt, Homo sapiens
acucagagauuagcacauguuu

SEQ ID NO: 45425 - RNA, 22 nt, Homo sapiens
auugcacuccagccugggcaac

SEQ ID NO: 45426 - RNA, 22 nt, Homo sapiens
ccagucuuggugucuguagcac

SEQ ID NO: 45427 - RNA, 22 nt, Homo sapiens
auugcacuccagccuugggcaa

SEQ ID NO: 45428 - RNA, 18 nt, Homo sapiens
ggaaaacuuuucuaagua

SEQ ID NO: 45429 - RNA, 22 nt, Homo sapiens
cuagaagcauauucagaacaga

SEQ ID NO: 45430 - RNA, 22 nt, Homo sapiens
uugagauggagucucgcucugu

SEQ ID NO: 45431 - RNA, 22 nt, Homo sapiens
cauugcaugccagccugggcaa

SEQ ID NO: 45432 - RNA, 22 nt, Homo sapiens
cacuagagaauagguaguucug

SEQ ID NO: 45433 - RNA, 22 nt, Homo sapiens
cugggaugugacuguugccccc

SEQ ID NO: 45434 - RNA, 21 nt, Homo sapiens
uuaaguaauuacccaacucuc

SEQ ID NO: 45435 - RNA, 22 nt, Homo sapiens
auggaaacauaagaguauagau

SEQ ID NO: 45436 - RNA, 22 nt, Homo sapiens
gaaaugcucauuuuggauccuu

SEQ ID NO: 45437 - RNA, 22 nt, Homo sapiens
uauggcuucuuauucuuucccg

SEQ ID NO: 45438 - RNA, 22 nt, Homo sapiens
uuggagugugcucauaacugcu

SEQ ID NO: 45439 - RNA, 22 nt, Homo sapiens
ugagaugagagaaugcuugccu

SEQ ID NO: 45440 - RNA, 22 nt, Homo sapiens
gggaauguagcaaaucugcaau

SEQ ID NO: 45441 - RNA, 22 nt, Homo sapiens
uuauggccauucuuguaggagu

SEQ ID NO: 45442 - RNA, 19 nt, Homo sapiens
auugcacuccaaccugggu

SEQ ID NO: 45443 - RNA, 22 nt, Homo sapiens
ugacuaaaacugaguuucauua

SEQ ID NO: 45444 - RNA, 22 nt, Homo sapiens
augugcaaagcacuguucagca

SEQ ID NO: 45445 - RNA, 22 nt, Homo sapiens
uguagcuuuugagauuuauauu

SEQ ID NO: 45446 - RNA, 22 nt, Homo sapiens
augagacuagaagagaauaaua

SEQ ID NO: 45447 - RNA, 22 nt, Homo sapiens
acauaaagaagcaggacauugu

SEQ ID NO: 45448 - RNA, 22 nt, Homo sapiens
uuauucagcaccugcuguguuc

SEQ ID NO: 45449 - RNA, 22 nt, Homo sapiens
aucccuguaguaauauucuagc

SEQ ID NO: 45450 - RNA, 22 nt, Homo sapiens
acccuguaggacuauucuaauc

SEQ ID NO: 45451 - RNA, 22 nt, Homo sapiens
aggugguuuugaugagcaggua

SEQ ID NO: 45452 - RNA, 20 nt, Homo sapiens
auuccacuuauaugaggucc

SEQ ID NO: 45453 - RNA, 22 nt, Homo sapiens
auagcauaucccacaugucaga

SEQ ID NO: 45454 - RNA, 22 nt, Homo sapiens
gagaucauguacuagaacaccu

SEQ ID NO: 45455 - RNA, 22 nt, Homo sapiens
uaugacauaguccuuaacccuc

SEQ ID NO: 45456 - RNA, 22 nt, Homo sapiens
gucuuggagacauugccauuga

SEQ ID NO: 45457 - RNA, 22 nt, Homo sapiens
aaccuacauucuuaacuguugc

SEQ ID NO: 45458 - RNA, 22 nt, Homo sapiens
acuuuguguuacccagcaagga

SEQ ID NO: 45459 - RNA, 22 nt, Homo sapiens
aaaguucugcguuagggcuaaa

SEQ ID NO: 45460 - RNA, 22 nt, Homo sapiens
agcugguuuaauaugcugucug

SEQ ID NO: 45461 - RNA, 22 nt, Homo sapiens
ugagaccuuucauuucucagug

SEQ ID NO: 45462 - RNA, 22 nt, Homo sapiens
ucugucuuguccucacccuaga

SEQ ID NO: 45463 - RNA, 22 nt, Homo sapiens
ugugggaggugcuaauguaaau

SEQ ID NO: 45464 - RNA, 22 nt, Homo sapiens
auggcaguuucagcuauaguuu

SEQ ID NO: 45465 - RNA, 22 nt, Homo sapiens
uugcacucuccagccucggcaa

SEQ ID NO: 45466 - RNA, 22 nt, Homo sapiens
ucaagugcauugauucaguauu

SEQ ID NO: 45467 - RNA, 22 nt, Homo sapiens
aagugaguaauacgucaguugu

SEQ ID NO: 45468 - RNA, 22 nt, Homo sapiens
augacagagauaugugaauuuu

SEQ ID NO: 45469 - RNA, 23 nt, Homo sapiens
uuuugcaauaagucacuggaaua

SEQ ID NO: 45470 - RNA, 22 nt, Homo sapiens
guugguuuccuguaacuggaca

SEQ ID NO: 45471 - RNA, 22 nt, Homo sapiens
uauacaugugccauguuggugu

SEQ ID NO: 45472 - RNA, 22 nt, Homo sapiens
uaucacuuugauaguuuaaaug

SEQ ID NO: 45473 - RNA, 22 nt, Homo sapiens
gaaugcagcagugacagggcug

SEQ ID NO: 45474 - RNA, 22 nt, Homo sapiens
uggcuuuguaagguuucauuuu

SEQ ID NO: 45475 - RNA, 22 nt, Homo sapiens
auacaaguuauuugaacugcgg

SEQ ID NO: 45476 - RNA, 22 nt, Homo sapiens
aaggcaauuuguugugaggauu

SEQ ID NO: 45477 - RNA, 22 nt, Homo sapiens
uggaagauucuagaagauucca

SEQ ID NO: 45478 - RNA, 22 nt, Homo sapiens
gggcaacauugaguacccugaa

SEQ ID NO: 45479 - RNA, 22 nt, Homo sapiens
ugagaugaaagcagaaagacuu

SEQ ID NO: 45480 - RNA, 19 nt, Homo sapiens
cauugcacuccacccuggg

SEQ ID NO: 45481 - RNA, 22 nt, Homo sapiens
guggaaugcaguguugauucaa

SEQ ID NO: 45482 - RNA, 22 nt, Homo sapiens
agcuggcuguggagaaaccccu

SEQ ID NO: 45483 - RNA, 22 nt, Homo sapiens
aaguugguguaugagacagaag

SEQ ID NO: 45484 - RNA, 22 nt, Homo sapiens
uugagaagugucuguucauguc

SEQ ID NO: 45485 - RNA, 22 nt, Homo sapiens
gcugcuuuugaugacaaaaaca

SEQ ID NO: 45486 - RNA, 22 nt, Homo sapiens
aaguggcauugaggaaaaaaau

SEQ ID NO: 45487 - RNA, 22 nt, Homo sapiens
aagacuguaauccaucuugagu

SEQ ID NO: 45488 - RNA, 22 nt, Homo sapiens
gucucugguugcuuuuguacca

SEQ ID NO: 45489 - RNA, 22 nt, Homo sapiens
uacccucuggauacccuuguuc

SEQ ID NO: 45490 - RNA, 22 nt, Homo sapiens
cauugcacugcauucugggcaa

SEQ ID NO: 45491 - RNA, 22 nt, Homo sapiens
uaaguauagguaacagaagcaa

SEQ ID NO: 45492 - RNA, 21 nt, Homo sapiens
agcugguuuccacagugugcu

SEQ ID NO: 45493 - RNA, 22 nt, Homo sapiens
gugcuuuguuguggcaguggca

SEQ ID NO: 45494 - RNA, 19 nt, Homo sapiens
ugcagcaauguaaaagaca

SEQ ID NO: 45495 - RNA, 22 nt, Homo sapiens
uucucugggacauaggucgggu

SEQ ID NO: 45496 - RNA, 22 nt, Homo sapiens
ggagaauugcuuggacccggga

SEQ ID NO: 45497 - RNA, 22 nt, Homo sapiens
ugagcccauuguccugguuuau

SEQ ID NO: 45498 - RNA, 19 nt, Homo sapiens
ugugacugguugucucgcu

SEQ ID NO: 45499 - RNA, 21 nt, Homo sapiens
uuaucccagugucucugcagg

SEQ ID NO: 45500 - RNA, 19 nt, Homo sapiens
agaguauuguuacuucucu

SEQ ID NO: 45501 - RNA, 22 nt, Homo sapiens
uugacauguaaguacucuauag

SEQ ID NO: 45502 - RNA, 22 nt, Homo sapiens
auggaaaugaagggcuggcccu

SEQ ID NO: 45503 - RNA, 22 nt, Homo sapiens
cuggaauguuccuaaagauuca

SEQ ID NO: 45504 - RNA, 22 nt, Homo sapiens
auaaagacacuuggcaugauuu

SEQ ID NO: 45505 - RNA, 22 nt, Homo sapiens
ugagcugagacaauaaguuuuu

SEQ ID NO: 45506 - RNA, 22 nt, Homo sapiens
ugacaagagaccccuccgcagg

SEQ ID NO: 45507 - RNA, 22 nt, Homo sapiens
uguagcaaaucgauacuauugg

SEQ ID NO: 45508 - RNA, 23 nt, Homo sapiens
ggaaacauccagucuuucaccau

SEQ ID NO: 45509 - RNA, 22 nt, Homo sapiens
uauggcuuucuacuugaguucu

SEQ ID NO: 45510 - RNA, 22 nt, Homo sapiens
ugagaucuuuuguggcugagaa

SEQ ID NO: 45511 - RNA, 22 nt, Homo sapiens
ugagaugaucaaaguauaggcu

SEQ ID NO: 45512 - RNA, 17 nt, Homo sapiens
gucuuugguugaguuua

SEQ ID NO: 45513 - RNA, 22 nt, Homo sapiens
uaaguucauucaugaaacuuag

SEQ ID NO: 45514 - RNA, 22 nt, Homo sapiens
uagugaauguuggcuauuaaua

SEQ ID NO: 45515 - RNA, 22 nt, Homo sapiens
uucuacuucauuaggaggauug

SEQ ID NO: 45516 - RNA, 22 nt, Homo sapiens
uuguguuuuuaguagggaaggg

SEQ ID NO: 45517 - RNA, 20 nt, Homo sapiens
uaugacacugucauaaaaau

SEQ ID NO: 45518 - RNA, 22 nt, Homo sapiens
uugcauauguugaaccaagcgu

SEQ ID NO: 45519 - RNA, 22 nt, Homo sapiens
uauggcuuuuaacugucguaug

SEQ ID NO: 45520 - RNA, 22 nt, Homo sapiens
aagugucuuaccgggagggagu

SEQ ID NO: 45521 - RNA, 22 nt, Homo sapiens
uuugugcaaacuaggauugcga

SEQ ID NO: 45522 - RNA, 19 nt, Homo sapiens
cucuuuggugucucuucuu

SEQ ID NO: 45523 - RNA, 18 nt, Homo sapiens
acauucagcuugaagaua

SEQ ID NO: 45524 - RNA, 22 nt, Homo sapiens
auggcucuguuccaugugucuu

SEQ ID NO: 45525 - RNA, 22 nt, Homo sapiens
auugcacugcagccugggcaac

SEQ ID NO: 45526 - RNA, 22 nt, Homo sapiens
uuccagcugggggcaacucugc

SEQ ID NO: 45527 - RNA, 22 nt, Homo sapiens
gacaagagaacacugcuauauu

SEQ ID NO: 45528 - RNA, 22 nt, Homo sapiens
acacuuucuggagcugcacaua

SEQ ID NO: 45529 - RNA, 22 nt, Homo sapiens
auagcagaagaagggacaauuc

SEQ ID NO: 45530 - RNA, 22 nt, Homo sapiens
guggaagaccagacuuuccaac

SEQ ID NO: 45531 - RNA, 22 nt, Homo sapiens
cuugguacucugugucccagcu

SEQ ID NO: 45532 - RNA, 17 nt, Homo sapiens
ugagcuaagauuacccc

SEQ ID NO: 45533 - RNA, 22 nt, Homo sapiens
uauuguacauauccucccuuca

SEQ ID NO: 45534 - RNA, 22 nt, Homo sapiens
uaagacuguguaauuuaugaag

SEQ ID NO: 45535 - RNA, 22 nt, Homo sapiens
cauugcccuccagccugggcaa

SEQ ID NO: 45536 - RNA, 20 nt, Homo sapiens
aaacucugucuucuuuauca

SEQ ID NO: 45537 - RNA, 19 nt, Homo sapiens
ugcaaagucuuuuccuauu

SEQ ID NO: 45538 - RNA, 22 nt, Homo sapiens
uaagagagcuccaucuuuuccu

SEQ ID NO: 45539 - RNA, 22 nt, Homo sapiens
agagaccuguaaaguucaggca

SEQ ID NO: 45540 - RNA, 22 nt, Homo sapiens
cuacagcagcccaguccccgaa

SEQ ID NO: 45541 - RNA, 23 nt, Homo sapiens
uuaguaaacucaaugacaccaca

SEQ ID NO: 45542 - RNA, 22 nt, Homo sapiens
ugagcuguuugaagaagcauuu

SEQ ID NO: 45543 - RNA, 22 nt, Homo sapiens
augaacagagccuugagaaccu

SEQ ID NO: 45544 - RNA, 22 nt, Homo sapiens
uucucuggucagaggggagguu

SEQ ID NO: 45545 - RNA, 20 nt, Homo sapiens
ugagcucaugacauuuuucu

SEQ ID NO: 45546 - RNA, 22 nt, Homo sapiens
uaucucuguggguagugcugaa

SEQ ID NO: 45547 - RNA, 22 nt, Homo sapiens
uucccuguaucuucugccaugu

SEQ ID NO: 45548 - RNA, 22 nt, Homo sapiens
aucuacagccagucugguuugu

SEQ ID NO: 45549 - RNA, 22 nt, Homo sapiens
uuggaaauauguuaagugucau

SEQ ID NO: 45550 - RNA, 22 nt, Homo sapiens
uugacuagaccaucuuucuaga

SEQ ID NO: 45551 - RNA, 22 nt, Homo sapiens
auaucaaggccauuuucuaaau

SEQ ID NO: 45552 - RNA, 22 nt, Homo sapiens
uuugcuugaggucuagcuaccc

SEQ ID NO: 45553 - RNA, 22 nt, Homo sapiens
cauugcacuccagcuugggcga

SEQ ID NO: 45554 - RNA, 22 nt, Homo sapiens
ucugucuuugccuaaguuuguc

SEQ ID NO: 45555 - RNA, 22 nt, Homo sapiens
augacugucagggcagucauug

SEQ ID NO: 45556 - RNA, 22 nt, Homo sapiens
uuggaaaccucugcagguguuu

SEQ ID NO: 45557 - RNA, 22 nt, Homo sapiens
cauugcacugcagcccgggcaa

SEQ ID NO: 45558 - RNA, 22 nt, Homo sapiens
augacuuuucugaaaaccacca

SEQ ID NO: 45559 - RNA, 22 nt, Homo sapiens
uugagaugaagucuugcucucu

SEQ ID NO: 45560 - RNA, 22 nt, Homo sapiens
uugagaugaaguuuugcucuuu

SEQ ID NO: 45561 - RNA, 19 nt, Homo sapiens
uaucacuucccuggaaaca

SEQ ID NO: 45562 - RNA, 18 nt, Homo sapiens
uguggcuguuuuccaaua

SEQ ID NO: 45563 - RNA, 22 nt, Homo sapiens
aagagaugaagguccugacugu

SEQ ID NO: 45564 - RNA, 22 nt, Homo sapiens
uucaagaauuaaaguggcuuuu

SEQ ID NO: 45565 - RNA, 22 nt, Homo sapiens
ucuugcuuguuguucccuucau

SEQ ID NO: 45566 - RNA, 22 nt, Homo sapiens
agcuggcuguagcugcaagucu

SEQ ID NO: 45567 - RNA, 22 nt, Homo sapiens
uaucagcagagucauacuucaa

SEQ ID NO: 45568 - RNA, 22 nt, Homo sapiens
cuucaucugguuugugaacuuu

SEQ ID NO: 45569 - RNA, 22 nt, Homo sapiens
uccuguaaucccagcuaccaga

SEQ ID NO: 45570 - RNA, 20 nt, Homo sapiens
cguugcacuccagccugggc

SEQ ID NO: 45571 - RNA, 21 nt, Homo sapiens
gugcaaacaucauagaaugua

SEQ ID NO: 45572 - RNA, 22 nt, Homo sapiens
uuauagacacguuguaacaaac

SEQ ID NO: 45573 - RNA, 22 nt, Homo sapiens
cguugcacuccagccugggcaa

SEQ ID NO: 45574 - RNA, 22 nt, Homo sapiens
uuauacuacuauaaagagguag

SEQ ID NO: 45575 - RNA, 22 nt, Homo sapiens
uugagauggagucucacugugu

SEQ ID NO: 45576 - RNA, 22 nt, Homo sapiens
gucagugucuuaacagagauua

SEQ ID NO: 45577 - RNA, 22 nt, Homo sapiens
aaaugcuuucuuggaccauuug

SEQ ID NO: 45578 - RNA, 22 nt, Homo sapiens
agugaaaugucaccuuuuagga

SEQ ID NO: 45579 - RNA, 22 nt, Homo sapiens
auggccugaugcaccuguccca

SEQ ID NO: 45580 - RNA, 22 nt, Homo sapiens
cuuugguuuacuuggugcuagu

SEQ ID NO: 45581 - RNA, 22 nt, Homo sapiens
aucccaguucagccucugacac

SEQ ID NO: 45582 - RNA, 22 nt, Homo sapiens
ggacaagagacugggacacuga

SEQ ID NO: 45583 - RNA, 22 nt, Homo sapiens
cauugcacuccagccuaggcaa

SEQ ID NO: 45584 - RNA, 22 nt, Homo sapiens
uucagauugcauaccgaaagua

SEQ ID NO: 45585 - RNA, 23 nt, Homo sapiens
agccugguuucccugcuucuccc

SEQ ID NO: 45586 - RNA, 22 nt, Homo sapiens
uauggcuuuucacuuaaguccu

SEQ ID NO: 45587 - RNA, 22 nt, Homo sapiens
augaggcaggaaaggcguaucu

SEQ ID NO: 45588 - RNA, 22 nt, Homo sapiens
uacaccauuugauucuuuaagc

SEQ ID NO: 45589 - RNA, 22 nt, Homo sapiens
aagugucagaguugcuaaugac

SEQ ID NO: 45590 - RNA, 19 nt, Homo sapiens
uuccugagaacaagggcuu

SEQ ID NO: 45591 - RNA, 22 nt, Homo sapiens
ugagaugacgacacaccucagu

SEQ ID NO: 45592 - RNA, 22 nt, Homo sapiens
agauguuguucaucugauuguu

SEQ ID NO: 45593 - RNA, 22 nt, Homo sapiens
ugagaucacuaagagguaaugg

SEQ ID NO: 45594 - RNA, 22 nt, Homo sapiens
cuauggcucugucuuuuaaguu

SEQ ID NO: 45595 - RNA, 22 nt, Homo sapiens
ucagugccucaguuuuuaaaga

SEQ ID NO: 45596 - RNA, 22 nt, Homo sapiens
uaaagcauguaauuagguuaga

SEQ ID NO: 45597 - RNA, 22 nt, Homo sapiens
auggcaguuucacucugggauu

SEQ ID NO: 45598 - RNA, 22 nt, Homo sapiens
ucacaguccuguuuaggagagg

SEQ ID NO: 45599 - RNA, 22 nt, Homo sapiens
cauugcacuccagccugccugg

SEQ ID NO: 45600 - RNA, 22 nt, Homo sapiens
auauggcuaugugagcauacca

SEQ ID NO: 45601 - RNA, 22 nt, Homo sapiens
uuauugcacuccagccugggua

SEQ ID NO: 45602 - RNA, 22 nt, Homo sapiens
ugauuuguuuagugccaaguuu

SEQ ID NO: 45603 - RNA, 22 nt, Homo sapiens
uucaguagucuccauagaaccg

SEQ ID NO: 45604 - RNA, 21 nt, Homo sapiens
auugcacuccagccugggcga

SEQ ID NO: 45605 - RNA, 22 nt, Homo sapiens
uugagccaaggauugucuuucc

SEQ ID NO: 45606 - RNA, 22 nt, Homo sapiens
acuguauagauggaguugauuu

SEQ ID NO: 45607 - RNA, 22 nt, Homo sapiens
uggccuguaacgcugucucagc

SEQ ID NO: 45608 - RNA, 22 nt, Homo sapiens
uucuguguuuaggucacggcua

SEQ ID NO: 45609 - RNA, 22 nt, Homo sapiens
cuggaaacaucuuaggaaugca

SEQ ID NO: 45610 - RNA, 22 nt, Homo sapiens
agaaugugaccuuauuuggaga

SEQ ID NO: 45611 - RNA, 22 nt, Homo sapiens
uaucacuuuuccagcccagcuu

SEQ ID NO: 45612 - RNA, 22 nt, Homo sapiens
guccaagacuaggaguuggcag

SEQ ID NO: 45613 - RNA, 20 nt, Homo sapiens
uggaaauuaaccuuucaggu

SEQ ID NO: 45614 - RNA, 22 nt, Homo sapiens
cuggcucauuucauuuagcaua

SEQ ID NO: 45615 - RNA, 22 nt, Homo sapiens
auugcacuccagccuggccaac

SEQ ID NO: 45616 - RNA, 22 nt, Homo sapiens
gaaaacugcuucucuggguuuc

SEQ ID NO: 45617 - RNA, 22 nt, Homo sapiens
cuggcucugggcuaaagaaaua

SEQ ID NO: 45618 - RNA, 22 nt, Homo sapiens
uggcuuuuauuauguugaggua

SEQ ID NO: 45619 - RNA, 22 nt, Homo sapiens
uuggaaacgucaccuuuuccuu

SEQ ID NO: 45620 - RNA, 22 nt, Homo sapiens
cuauaacagugugguuuggaga

SEQ ID NO: 45621 - RNA, 22 nt, Homo sapiens
ugguucaguugcacaggcuguu

SEQ ID NO: 45622 - RNA, 22 nt, Homo sapiens
ccugucuugauuaaauuacuua

SEQ ID NO: 45623 - RNA, 22 nt, Homo sapiens
uugacagaccuuggucauaucc

SEQ ID NO: 45624 - RNA, 21 nt, Homo sapiens
uucuaaguaaauguuggacau

SEQ ID NO: 45625 - RNA, 18 nt, Homo sapiens
auucuacaggccuuuuga

SEQ ID NO: 45626 - RNA, 22 nt, Homo sapiens
cuacucugugguguauuugcau

SEQ ID NO: 45627 - RNA, 22 nt, Homo sapiens
uacaagcaggaaaugguauaug

SEQ ID NO: 45628 - RNA, 22 nt, Homo sapiens
aguaaauuucugugcuuucaua

SEQ ID NO: 45629 - RNA, 20 nt, Homo sapiens
uaugacaaagccuagugagu

SEQ ID NO: 45630 - RNA, 22 nt, Homo sapiens
auguccaugagcacauguauca

SEQ ID NO: 45631 - RNA, 22 nt, Homo sapiens
auggcucuuauuauuugaggua

SEQ ID NO: 45632 - RNA, 22 nt, Homo sapiens
ugagcucagcuaguugaggugu

SEQ ID NO: 45633 - RNA, 22 nt, Homo sapiens
cuuccaaguggggcacgugcca

SEQ ID NO: 45634 - RNA, 22 nt, Homo sapiens
aggugguuuuaggcagagacau

SEQ ID NO: 45635 - RNA, 22 nt, Homo sapiens
uagaccaauuggcauauaguaa

SEQ ID NO: 45636 - RNA, 22 nt, Homo sapiens
gugugacuagucaugccugaau

SEQ ID NO: 45637 - RNA, 22 nt, Homo sapiens
gcugaaauguuuaauuugggag

SEQ ID NO: 45638 - RNA, 22 nt, Homo sapiens
uugagauggaguuucgcucuug

SEQ ID NO: 45639 - RNA, 22 nt, Homo sapiens
auugcacaccagucugggcaaa

SEQ ID NO: 45640 - RNA, 20 nt, Homo sapiens
cauugcacuccagccugcug

SEQ ID NO: 45641 - RNA, 22 nt, Homo sapiens
ugugccacugcacuccugccug

SEQ ID NO: 45642 - RNA, 22 nt, Homo sapiens
aggcaugaaauacaugcauuga

SEQ ID NO: 45643 - RNA, 22 nt, Homo sapiens
auggcuuugggcugcucugccc

SEQ ID NO: 45644 - RNA, 22 nt, Homo sapiens
augugcuuauagguguauguuu

SEQ ID NO: 45645 - RNA, 22 nt, Homo sapiens
uggaagacaaguguuagcaugg

SEQ ID NO: 45646 - RNA, 21 nt, Homo sapiens
cuuugguagaguuuuuagggu

SEQ ID NO: 45647 - RNA, 22 nt, Homo sapiens
cugucuagagggcacaugaugc

SEQ ID NO: 45648 - RNA, 22 nt, Homo sapiens
ucuacagccaguucaggaagaa

SEQ ID NO: 45649 - RNA, 22 nt, Homo sapiens
uugaagacuauaugauucuuca

SEQ ID NO: 45650 - RNA, 22 nt, Homo sapiens
uugagauggaguguugcucugu

SEQ ID NO: 45651 - RNA, 22 nt, Homo sapiens
uugagauggagucuugcucucu

SEQ ID NO: 45652 - RNA, 22 nt, Homo sapiens
uacauagucuucuuuugguuau

SEQ ID NO: 45653 - RNA, 22 nt, Homo sapiens
cauugcacucuagccucggcaa

SEQ ID NO: 45654 - RNA, 22 nt, Homo sapiens
uaccagcauuucucuuuaagua

SEQ ID NO: 45655 - RNA, 20 nt, Homo sapiens
uucuauggugaugaguccug

SEQ ID NO: 45656 - RNA, 22 nt, Homo sapiens
uguuacagugacuaauguuuua

SEQ ID NO: 45657 - RNA, 22 nt, Homo sapiens
aucccugugauccaaucacuuc

SEQ ID NO: 45658 - RNA, 22 nt, Homo sapiens
ugucagaaucugagacgacaac

SEQ ID NO: 45659 - RNA, 22 nt, Homo sapiens
ugagauucuuacuccugaguuc

SEQ ID NO: 45660 - RNA, 22 nt, Homo sapiens
uuauagcuaacaucugugaaaa

SEQ ID NO: 45661 - RNA, 22 nt, Homo sapiens
gacuugaagaaucuaagggagg

SEQ ID NO: 45662 - RNA, 22 nt, Homo sapiens
ugcuuaguguugacccucugcc

SEQ ID NO: 45663 - RNA, 22 nt, Homo sapiens
cuggcagugcuuguuauccugg

SEQ ID NO: 45664 - RNA, 22 nt, Homo sapiens
aacagacugucacauaaaauug

SEQ ID NO: 45665 - RNA, 22 nt, Homo sapiens
uauggccccuacaugugcaaaa

SEQ ID NO: 45666 - RNA, 22 nt, Homo sapiens
uugacaaggagccauugcaucu

SEQ ID NO: 45667 - RNA, 22 nt, Homo sapiens
gagaaccuccagcaagguagua

SEQ ID NO: 45668 - RNA, 22 nt, Homo sapiens
ugagaugaagcuagaagaaugg

SEQ ID NO: 45669 - RNA, 22 nt, Homo sapiens
agacaagauggcuugagguuca

SEQ ID NO: 45670 - RNA, 22 nt, Homo sapiens
auggcucuuauuauuuugaggu

SEQ ID NO: 45671 - RNA, 22 nt, Homo sapiens
auaaagccaugagcuugagaug

SEQ ID NO: 45672 - RNA, 21 nt, Homo sapiens
uuuagguagcuuuucugggag

SEQ ID NO: 45673 - RNA, 22 nt, Homo sapiens
uccauuugucuauguuucuguu

SEQ ID NO: 45674 - RNA, 22 nt, Homo sapiens
uauacagcaaguuacugugcug

SEQ ID NO: 45675 - RNA, 20 nt, Homo sapiens
aucucugggcaaaggaaaau

SEQ ID NO: 45676 - RNA, 22 nt, Homo sapiens
uacagucacauuccugaccaua

SEQ ID NO: 45677 - RNA, 22 nt, Homo sapiens
ugucagaaucuagaggcugcua

SEQ ID NO: 45678 - RNA, 17 nt, Homo sapiens
cucucugguuuaaagca

SEQ ID NO: 45679 - RNA, 21 nt, Homo sapiens
ucagaagcucccagggaggac

SEQ ID NO: 45680 - RNA, 22 nt, Homo sapiens
ugaaauuuuuuauucguuggcu

SEQ ID NO: 45681 - RNA, 22 nt, Homo sapiens
gguaaaucuucacuaagacuga

SEQ ID NO: 45682 - RNA, 23 nt, Homo sapiens
uugaggcauguaccaucaauauc

SEQ ID NO: 45683 - RNA, 22 nt, Homo sapiens
uguggccuuuguuucaguuggg

SEQ ID NO: 45684 - RNA, 22 nt, Homo sapiens
cauugcacuccagucugggcaa

SEQ ID NO: 45685 - RNA, 19 nt, Homo sapiens
ugugaacaucacagagugu

SEQ ID NO: 45686 - RNA, 22 nt, Homo sapiens
uauggccuuuuuaaugauauug

SEQ ID NO: 45687 - RNA, 22 nt, Homo sapiens
uuaaggaaggagucuuaaaugg

SEQ ID NO: 45688 - RNA, 22 nt, Homo sapiens
auuccacuuagugacucauuug

SEQ ID NO: 45689 - RNA, 22 nt, Homo sapiens
ugugucuccugaaaauucacau

SEQ ID NO: 45690 - RNA, 21 nt, Homo sapiens
ugaacacuggacugagugucc

SEQ ID NO: 45691 - RNA, 21 nt, Homo sapiens
guggaaauggaauuuacuaau

SEQ ID NO: 45692 - RNA, 22 nt, Homo sapiens
augugcaagaucauuaaagcuc

SEQ ID NO: 45693 - RNA, 23 nt, Homo sapiens
auugcagaaucacagagguagug

SEQ ID NO: 45694 - RNA, 22 nt, Homo sapiens
auugcacuccauccugggcaau

SEQ ID NO: 45695 - RNA, 22 nt, Homo sapiens
ucuaugguuuauuuccaagugu

SEQ ID NO: 45696 - RNA, 22 nt, Homo sapiens
uugcacuccggccuggguaaca

SEQ ID NO: 45697 - RNA, 22 nt, Homo sapiens
uugcuuaggcuggagugcagug

SEQ ID NO: 45698 - RNA, 22 nt, Homo sapiens
aaccuguaaccauaugaucagu

SEQ ID NO: 45699 - RNA, 19 nt, Homo sapiens
uaugcaacuuauagugcug

SEQ ID NO: 45700 - RNA, 22 nt, Homo sapiens
uaguucauuuuucuugcuuaga

SEQ ID NO: 45701 - RNA, 22 nt, Homo sapiens
gagcugaucuuuucugauucca

SEQ ID NO: 45702 - RNA, 22 nt, Homo sapiens
ggaaagaucagcuaaauguaag

SEQ ID NO: 45703 - RNA, 20 nt, Homo sapiens
agcugguuuuaugaaucuuu

SEQ ID NO: 45704 - RNA, 22 nt, Homo sapiens
gucucccagccuacaucuuucu

SEQ ID NO: 45705 - RNA, 22 nt, Homo sapiens
ugugacucuggcacauggugag

SEQ ID NO: 45706 - RNA, 22 nt, Homo sapiens
cugaggcacggcgaccuuaagu

SEQ ID NO: 45707 - RNA, 22 nt, Homo sapiens
ugugccuacugauagagccaag

SEQ ID NO: 45708 - RNA, 22 nt, Homo sapiens
acacuauugagguuuguuugca

SEQ ID NO: 45709 - RNA, 22 nt, Homo sapiens
ugagcacuguacuuuaucaggu

SEQ ID NO: 45710 - RNA, 22 nt, Homo sapiens
gugaggcacugcugcuuuccag

SEQ ID NO: 45711 - RNA, 22 nt, Homo sapiens
cauugcacuccagccuggccaa

SEQ ID NO: 45712 - RNA, 22 nt, Homo sapiens
guacaguuuucaguguucacug

SEQ ID NO: 45713 - RNA, 18 nt, Homo sapiens
gacuuggaguuuacagug

SEQ ID NO: 45714 - RNA, 22 nt, Homo sapiens
agcugguuuauuucuauauccu

SEQ ID NO: 45715 - RNA, 22 nt, Homo sapiens
augaggcacugcgcccuacuga

SEQ ID NO: 45716 - RNA, 22 nt, Homo sapiens
uuccugagagggcugggugcag

SEQ ID NO: 45717 - RNA, 22 nt, Homo sapiens
augaugcugagguuugggguau

SEQ ID NO: 45718 - RNA, 22 nt, Homo sapiens
uugcuccucugccaggaccugu

SEQ ID NO: 45719 - RNA, 22 nt, Homo sapiens
cucaguguucccauucuaccuu

SEQ ID NO: 45720 - RNA, 20 nt, Homo sapiens
auuccacuuguuugagguac

SEQ ID NO: 45721 - RNA, 22 nt, Homo sapiens
augaagcuagcugauugcugau

SEQ ID NO: 45722 - RNA, 22 nt, Homo sapiens
gucagugugauaucugcagggg

SEQ ID NO: 45723 - RNA, 22 nt, Homo sapiens
uuugaguuugaggugcugauga

SEQ ID NO: 45724 - RNA, 22 nt, Homo sapiens
ugagaugagggcugcacucaaa

SEQ ID NO: 45725 - RNA, 22 nt, Homo sapiens
ugugagacugguucugaaccca

SEQ ID NO: 45726 - RNA, 22 nt, Homo sapiens
uuugugaggugauggauauguc

SEQ ID NO: 45727 - RNA, 22 nt, Homo sapiens
auggacuuuuuguucagugucu

SEQ ID NO: 45728 - RNA, 22 nt, Homo sapiens
ugagaugaugggauaagagggc

SEQ ID NO: 45729 - RNA, 22 nt, Homo sapiens
uggaagauggaguuuuaucauu

SEQ ID NO: 45730 - RNA, 22 nt, Homo sapiens
uuggcagugguucugacggacc

SEQ ID NO: 45731 - RNA, 21 nt, Homo sapiens
auagcacuucacuugguuaga

SEQ ID NO: 45732 - RNA, 22 nt, Homo sapiens
auuggcuuuugaaagucugcga

SEQ ID NO: 45733 - RNA, 22 nt, Homo sapiens
gggaaauguaaagucauaagau

SEQ ID NO: 45734 - RNA, 22 nt, Homo sapiens
acacaguguuuauugugguuag

SEQ ID NO: 45735 - RNA, 22 nt, Homo sapiens
auacaugugccauguugguaug

SEQ ID NO: 45736 - RNA, 22 nt, Homo sapiens
ugagaugaggucucgcucuguc

SEQ ID NO: 45737 - RNA, 16 nt, Homo sapiens
uugaggcaugucucag

SEQ ID NO: 45738 - RNA, 22 nt, Homo sapiens
ugugcaaggcucucaaccugug

SEQ ID NO: 45739 - RNA, 22 nt, Homo sapiens
uacaaaucuagguuuguuacug

SEQ ID NO: 45740 - RNA, 23 nt, Homo sapiens
ucaguacuccacuuucaauagug

SEQ ID NO: 45741 - RNA, 22 nt, Homo sapiens
uuagcacauuuccagcacaugg

SEQ ID NO: 45742 - RNA, 22 nt, Homo sapiens
uacuguacugcaguucugcaaa

SEQ ID NO: 45743 - RNA, 22 nt, Homo sapiens
uucuuuggauaaaguuuuaugc

SEQ ID NO: 45744 - RNA, 22 nt, Homo sapiens
uuaaguaaucagagaagagaac

SEQ ID NO: 45745 - RNA, 22 nt, Homo sapiens
auugcauaaacacauuucuuau

SEQ ID NO: 45746 - RNA, 22 nt, Homo sapiens
ugagccaugggguaaaugugau

SEQ ID NO: 45747 - RNA, 22 nt, Homo sapiens
uaagugcaugauuacaugcaua

SEQ ID NO: 45748 - RNA, 22 nt, Homo sapiens
guggaauggaaugauuguguau

SEQ ID NO: 45749 - RNA, 22 nt, Homo sapiens
guaaucucagcuacucaggagg

SEQ ID NO: 45750 - RNA, 22 nt, Homo sapiens
augagcugauuuccuuaccaua

SEQ ID NO: 45751 - RNA, 18 nt, Homo sapiens
cuaagacacuuggcagag

SEQ ID NO: 45752 - RNA, 22 nt, Homo sapiens
gaugagaugagcauuugaauug

SEQ ID NO: 45753 - RNA, 22 nt, Homo sapiens
auccaagagacugaugacuucc

SEQ ID NO: 45754 - RNA, 22 nt, Homo sapiens
cauggcuuuaagcaacaccaag

SEQ ID NO: 45755 - RNA, 22 nt, Homo sapiens
ucacugugcaugaaggaugcug

SEQ ID NO: 45756 - RNA, 22 nt, Homo sapiens
ugaauagacacuaaagacugua

SEQ ID NO: 45757 - RNA, 23 nt, Homo sapiens
caugaacuaguuugcagccauga

SEQ ID NO: 45758 - RNA, 23 nt, Homo sapiens
aauaucacaguggguguacaccc

SEQ ID NO: 45759 - RNA, 22 nt, Homo sapiens
aaugcuguucuuugcuuaaguu

SEQ ID NO: 45760 - RNA, 22 nt, Homo sapiens
uugagauggaguuucgcucuuu

SEQ ID NO: 45761 - RNA, 22 nt, Homo sapiens
ugucucccuucccauuaggaag

SEQ ID NO: 45762 - RNA, 22 nt, Homo sapiens
uggucuccuuuguacccugggc

SEQ ID NO: 45763 - RNA, 22 nt, Homo sapiens
aaucacuuuggcaccaaccuaa

SEQ ID NO: 45764 - RNA, 22 nt, Homo sapiens
uacaguguuuugguauuccaca

SEQ ID NO: 45765 - RNA, 22 nt, Homo sapiens
agagaugaagauggggcucccg

SEQ ID NO: 45766 - RNA, 22 nt, Homo sapiens
aggcaagagugacuacgugaaa

SEQ ID NO: 45767 - RNA, 22 nt, Homo sapiens
agaacuguccauucagcaugaa

SEQ ID NO: 45768 - RNA, 22 nt, Homo sapiens
uaagacuguuggcaauuuuugc

SEQ ID NO: 45769 - RNA, 22 nt, Homo sapiens
guggaaugaaaacucucucaca

SEQ ID NO: 45770 - RNA, 20 nt, Homo sapiens
ucugauugcaacugcaugag

SEQ ID NO: 45771 - RNA, 22 nt, Homo sapiens
auccugaagcuuuacugaauuc

SEQ ID NO: 45772 - RNA, 22 nt, Homo sapiens
cauuuuacuuuccagacgugga

SEQ ID NO: 45773 - RNA, 22 nt, Homo sapiens
uuuuauguuuguucccugccaa

SEQ ID NO: 45774 - RNA, 22 nt, Homo sapiens
cauugcacuccaucuugggcaa

SEQ ID NO: 45775 - RNA, 22 nt, Homo sapiens
uucuacaggcuguucaagaagc

SEQ ID NO: 45776 - RNA, 22 nt, Homo sapiens
cauugcacuccagccuggcaac

SEQ ID NO: 45777 - RNA, 22 nt, Homo sapiens
uauggaaaucuuaccuuauggu

SEQ ID NO: 45778 - RNA, 22 nt, Homo sapiens
auggcaguuuggucucugugcu

SEQ ID NO: 45779 - RNA, 22 nt, Homo sapiens
uugcugagucuuucuagguugc

SEQ ID NO: 45780 - RNA, 22 nt, Homo sapiens
cauugcacuccagccucggcaa

SEQ ID NO: 45781 - RNA, 22 nt, Homo sapiens
uuggcagugcccgaugcugggg

SEQ ID NO: 45782 - RNA, 22 nt, Homo sapiens
gauaaagauagcaauagggaca

SEQ ID NO: 45783 - RNA, 22 nt, Homo sapiens
uagcaggaaaggggucagaucu

SEQ ID NO: 45784 - RNA, 22 nt, Homo sapiens
aagugccauguggaugggcccu

SEQ ID NO: 45785 - RNA, 22 nt, Homo sapiens
uuugugugugauuauaaaaggu

SEQ ID NO: 45786 - RNA, 22 nt, Homo sapiens
aucuuuggucaucacagcuaga

SEQ ID NO: 45787 - RNA, 22 nt, Homo sapiens
ugagcugagaucgugccauugu

SEQ ID NO: 45788 - RNA, 22 nt, Homo sapiens
uuggacuucuaacugacaugga

SEQ ID NO: 45789 - RNA, 22 nt, Homo sapiens
ugagcugagaaaugcagcagcu

SEQ ID NO: 45790 - RNA, 22 nt, Homo sapiens
ucugucuugugguuugagugcc

SEQ ID NO: 45791 - RNA, 22 nt, Homo sapiens
ugugccuaguaauguguccaga

SEQ ID NO: 45792 - RNA, 23 nt, Homo sapiens
uuuggcauuccagaaauuuucau

SEQ ID NO: 45793 - RNA, 22 nt, Homo sapiens
ugagaugaagugauguaaaaca

SEQ ID NO: 45794 - RNA, 22 nt, Homo sapiens
uugacuuuuauucacucugcua

SEQ ID NO: 45795 - RNA, 22 nt, Homo sapiens
ugagaugauagauauguuaauu

SEQ ID NO: 45796 - RNA, 22 nt, Homo sapiens
ucaaauguuuguuuaaggcuua

SEQ ID NO: 45797 - RNA, 22 nt, Homo sapiens
uuggaagacaaugcugauucuc

SEQ ID NO: 45798 - RNA, 22 nt, Homo sapiens
agagaugauuaacauuuuggua

SEQ ID NO: 45799 - RNA, 22 nt, Homo sapiens
ggaaugugugucaugcuuuugc

SEQ ID NO: 45800 - RNA, 22 nt, Homo sapiens
ugagaugauaucuuauuguaau

SEQ ID NO: 45801 - RNA, 22 nt, Homo sapiens
ugagaucuuggaggcuuuguga

SEQ ID NO: 45802 - RNA, 22 nt, Homo sapiens
cacagugaacugguggguuuuu

SEQ ID NO: 45803 - RNA, 23 nt, Homo sapiens
aucagguuguagaauguguuugc

SEQ ID NO: 45804 - RNA, 22 nt, Homo sapiens
caguuacuuuugcaccaaccua

SEQ ID NO: 45805 - RNA, 22 nt, Homo sapiens
uuacagcagugccccacuccca

SEQ ID NO: 45806 - RNA, 22 nt, Homo sapiens
ugagaucagaaggauuucucug

SEQ ID NO: 45807 - RNA, 22 nt, Homo sapiens
uauuguccacuuugcacugugu

SEQ ID NO: 45808 - RNA, 22 nt, Homo sapiens
acaauguauauuuuacuguagg

SEQ ID NO: 45809 - RNA, 22 nt, Homo sapiens
uggaacacauaaauagcauagu

SEQ ID NO: 45810 - RNA, 22 nt, Homo sapiens
uuaguucccucauucuugacuu

SEQ ID NO: 45811 - RNA, 21 nt, Homo sapiens
uggucaguuuucucacuagga

SEQ ID NO: 45812 - RNA, 22 nt, Homo sapiens
ucuauguuuuugcuaguagugu

SEQ ID NO: 45813 - RNA, 22 nt, Homo sapiens
auugcacuccacccugggcaac

SEQ ID NO: 45814 - RNA, 22 nt, Homo sapiens
uuugguuuuuguuaucacucau

SEQ ID NO: 45815 - RNA, 22 nt, Homo sapiens
auugcacaucugcacuacagcc

SEQ ID NO: 45816 - RNA, 22 nt, Homo sapiens
uauuugguagcuauuuugcagu

SEQ ID NO: 45817 - RNA, 22 nt, Homo sapiens
uugagauggagucucgcucuuu

SEQ ID NO: 45818 - RNA, 19 nt, Homo sapiens
uuuuggaaaugugaacagc

SEQ ID NO: 45819 - RNA, 22 nt, Homo sapiens
uuucuacagugaacgauuucua

SEQ ID NO: 45820 - RNA, 20 nt, Homo sapiens
agguagauagaugauagaua

SEQ ID NO: 45821 - RNA, 22 nt, Homo sapiens
ugcacuguggucugagagacag

SEQ ID NO: 45822 - RNA, 22 nt, Homo sapiens
aucccuagaaaaaucagcacau

SEQ ID NO: 45823 - RNA, 22 nt, Homo sapiens
auuccacuuacaugaaguaccu

SEQ ID NO: 45824 - RNA, 22 nt, Homo sapiens
cuacagcacugagcugugugca

SEQ ID NO: 45825 - RNA, 22 nt, Homo sapiens
augcaacugcacuccagccugg

SEQ ID NO: 45826 - RNA, 18 nt, Homo sapiens
uugcacuccugccugggu

SEQ ID NO: 45827 - RNA, 19 nt, Homo sapiens
ugagaugaagacagggguu

SEQ ID NO: 45828 - RNA, 22 nt, Homo sapiens
ugcauggauguuugaacacacu

SEQ ID NO: 45829 - RNA, 22 nt, Homo sapiens
uucauaguguuuccuuccagug

SEQ ID NO: 45830 - RNA, 22 nt, Homo sapiens
ucacuuugacggccaacuucua

SEQ ID NO: 45831 - RNA, 22 nt, Homo sapiens
guagcagaauaucagauaauuu

SEQ ID NO: 45832 - RNA, 22 nt, Homo sapiens
uugcacauguugaaccagcaaa

SEQ ID NO: 45833 - RNA, 22 nt, Homo sapiens
cauuaguugaagugcagggaga

SEQ ID NO: 45834 - RNA, 22 nt, Homo sapiens
gaauaaacuagagaggacugag

SEQ ID NO: 45835 - RNA, 22 nt, Homo sapiens
uucuuuggaaacaguacuaauu

SEQ ID NO: 45836 - RNA, 22 nt, Homo sapiens
auuucuacuccuguguccagaa

SEQ ID NO: 45837 - RNA, 22 nt, Homo sapiens
cuggcaguguuucuugugggcu

SEQ ID NO: 45838 - RNA, 22 nt, Homo sapiens
cugagugcaagugauccuccca

SEQ ID NO: 45839 - RNA, 22 nt, Homo sapiens
uucuaugguuuuuaugguguua

SEQ ID NO: 45840 - RNA, 22 nt, Homo sapiens
uaccacugccgagaaaacagau

SEQ ID NO: 45841 - RNA, 22 nt, Homo sapiens
gagcucauuaaaaauguagaau

SEQ ID NO: 45842 - RNA, 22 nt, Homo sapiens
ucucugagaaaaguuucuccca

SEQ ID NO: 45843 - RNA, 22 nt, Homo sapiens
aauuaguuggcugggugcggug

SEQ ID NO: 45844 - RNA, 22 nt, Homo sapiens
auugcacuccagccugggcgac

SEQ ID NO: 45845 - RNA, 22 nt, Homo sapiens
uccagaguggugaugcuggggc

SEQ ID NO: 45846 - RNA, 22 nt, Homo sapiens
agcaagaugaaguugagcuagg

SEQ ID NO: 45847 - RNA, 22 nt, Homo sapiens
ggcacgguggcucacgccugua

SEQ ID NO: 45848 - RNA, 22 nt, Homo sapiens
uugagauguaguuucacuccug

SEQ ID NO: 45849 - RNA, 22 nt, Homo sapiens
uggaaguuaaaugacucuuucu

SEQ ID NO: 45850 - RNA, 21 nt, Homo sapiens
acaucagaguugugaagguag

SEQ ID NO: 45851 - RNA, 20 nt, Homo sapiens
cauugcccuccagccugggc

SEQ ID NO: 45852 - RNA, 22 nt, Homo sapiens
aauaucacaguggguguacacc

SEQ ID NO: 45853 - RNA, 22 nt, Homo sapiens
cugucucagugaauugguuuua

SEQ ID NO: 45854 - RNA, 22 nt, Homo sapiens
auggagacaaauaaaggagagu

SEQ ID NO: 45855 - RNA, 22 nt, Homo sapiens
aucacuuucuauuucugugcca

SEQ ID NO: 45856 - RNA, 18 nt, Homo sapiens
aaacagugucucuuucug

SEQ ID NO: 45857 - RNA, 23 nt, Homo sapiens
gaaguaauaaauggauucuuaac

SEQ ID NO: 45858 - RNA, 22 nt, Homo sapiens
uguuucuacugucucuguagua

SEQ ID NO: 45859 - RNA, 22 nt, Homo sapiens
ugauuugucucucagcccuacu

SEQ ID NO: 45860 - RNA, 22 nt, Homo sapiens
gagaugaugagauguucacagu

SEQ ID NO: 45861 - RNA, 22 nt, Homo sapiens
cacaguugccuaucuccugaag

SEQ ID NO: 45862 - RNA, 22 nt, Homo sapiens
caucacuuugccuccgucucua

SEQ ID NO: 45863 - RNA, 22 nt, Homo sapiens
ugagaccugaucuugguacugc

SEQ ID NO: 45864 - RNA, 22 nt, Homo sapiens
cauacaagcuacaaucacaaag

SEQ ID NO: 45865 - RNA, 22 nt, Homo sapiens
cauugcacuccagcucugggcg

SEQ ID NO: 45866 - RNA, 22 nt, Homo sapiens
uucaaaaccucugcuuaagccc

SEQ ID NO: 45867 - RNA, 21 nt, Homo sapiens
ugcaagaaucaggaagcugcc

SEQ ID NO: 45868 - RNA, 22 nt, Homo sapiens
uugagcaaaacauuaauauuag

SEQ ID NO: 45869 - RNA, 22 nt, Homo sapiens
ucuggaauguaaaguuuauggg

SEQ ID NO: 45870 - RNA, 22 nt, Homo sapiens
uuggaaacaccuggugagguua

SEQ ID NO: 45871 - RNA, 22 nt, Homo sapiens
cucaguguuaaggccaccucug

SEQ ID NO: 45872 - RNA, 22 nt, Homo sapiens
ucauauugcgguucauugacuu

SEQ ID NO: 45873 - RNA, 22 nt, Homo sapiens
ugacaagauauggucuuaucaa

SEQ ID NO: 45874 - RNA, 22 nt, Homo sapiens
cauugcacuccagccugcugac

SEQ ID NO: 45875 - RNA, 22 nt, Homo sapiens
aaugcuguguuauuucaugacc

SEQ ID NO: 45876 - RNA, 22 nt, Homo sapiens
gaggcaagaguaguuaaguuag

SEQ ID NO: 45877 - RNA, 21 nt, Homo sapiens
uaaaacuguaacuuuguccug

SEQ ID NO: 45878 - RNA, 22 nt, Homo sapiens
acuuuuugauggggagaacauu

SEQ ID NO: 45879 - RNA, 22 nt, Homo sapiens
aucgcacuccauccugggcaac

SEQ ID NO: 45880 - RNA, 19 nt, Homo sapiens
ugagauuguaugaggagau

SEQ ID NO: 45881 - RNA, 19 nt, Homo sapiens
uucucugguuguacuaccc

SEQ ID NO: 45882 - RNA, 22 nt, Homo sapiens
aucuuuggauacuugauauagu

SEQ ID NO: 45883 - RNA, 20 nt, Homo sapiens
uagcacacauguagaauagu

SEQ ID NO: 45884 - RNA, 22 nt, Homo sapiens
gcuuuguuaaaacacagccaca

SEQ ID NO: 45885 - RNA, 22 nt, Homo sapiens
uucagcuacuugggaggcugaa

SEQ ID NO: 45886 - RNA, 22 nt, Homo sapiens
aauaucacaggguguacacuca

SEQ ID NO: 45887 - RNA, 23 nt, Homo sapiens
ucacacuuaagagaaaugcagcu

SEQ ID NO: 45888 - RNA, 22 nt, Homo sapiens
agaugauguuuacugagcauca

SEQ ID NO: 45889 - RNA, 22 nt, Homo sapiens
aaaagcauucagagugcugggc

SEQ ID NO: 45890 - RNA, 22 nt, Homo sapiens
uugaguccauucgaugcugauu

SEQ ID NO: 45891 - RNA, 22 nt, Homo sapiens
uugcacuauuaguauagauguc

SEQ ID NO: 45892 - RNA, 17 nt, Homo sapiens
acagugucuaugaaaug

SEQ ID NO: 45893 - RNA, 22 nt, Homo sapiens
gauacaccauuuucuagcuauu

SEQ ID NO: 45894 - RNA, 22 nt, Homo sapiens
aucacuuugcucuccagugugg

SEQ ID NO: 45895 - RNA, 22 nt, Homo sapiens
gcauaaagcuaauaagacgaag

SEQ ID NO: 45896 - RNA, 22 nt, Homo sapiens
uuaaaaguauaggccuggcaua

SEQ ID NO: 45897 - RNA, 22 nt, Homo sapiens
ucuuucacuuagcaugauguuu

SEQ ID NO: 45898 - RNA, 22 nt, Homo sapiens
ugacaagaaagcgucuucuuuu

SEQ ID NO: 45899 - RNA, 22 nt, Homo sapiens
uucagugucauuaacacaguag

SEQ ID NO: 45900 - RNA, 20 nt, Homo sapiens
uucuacagucacaggaagau

SEQ ID NO: 45901 - RNA, 22 nt, Homo sapiens
auugcacuccagccuaggcaac

SEQ ID NO: 45902 - RNA, 22 nt, Homo sapiens
aaguaaacauuuuguacaauaa

SEQ ID NO: 45903 - RNA, 22 nt, Homo sapiens
uuagguaauauauugcugcuuu

SEQ ID NO: 45904 - RNA, 22 nt, Homo sapiens
caaugguuuuuuaguauaagua

SEQ ID NO: 45905 - RNA, 22 nt, Homo sapiens
ggagaugauuaugaaucacuua

SEQ ID NO: 45906 - RNA, 22 nt, Homo sapiens
cuuugguuaauaggauauggca

SEQ ID NO: 45907 - RNA, 22 nt, Homo sapiens
uauggcuuuguuaacauuuucu

SEQ ID NO: 45908 - RNA, 22 nt, Homo sapiens
aagugguuuuuacaaagacaga

SEQ ID NO: 45909 - RNA, 22 nt, Homo sapiens
uucuuagucauguaauagucca

SEQ ID NO: 45910 - RNA, 22 nt, Homo sapiens
ugugucacugcacuccagccug

SEQ ID NO: 45911 - RNA, 22 nt, Homo sapiens
uacacagucaaaaauuuccagg

SEQ ID NO: 45912 - RNA, 22 nt, Homo sapiens
ugaaacacacauugcccuuuau

SEQ ID NO: 45913 - RNA, 22 nt, Homo sapiens
gucuguuugauccagaucaaaa

SEQ ID NO: 45914 - RNA, 22 nt, Homo sapiens
gagcugaucuuuauguaaauuc

SEQ ID NO: 45915 - RNA, 22 nt, Homo sapiens
gagaucacuguuuauauucucu

SEQ ID NO: 45916 - RNA, 22 nt, Homo sapiens
ugagcaagaucuuuauaauuag

SEQ ID NO: 45917 - RNA, 22 nt, Homo sapiens
uguauguuguaagacuuagacc

SEQ ID NO: 45918 - RNA, 22 nt, Homo sapiens
ucuuuguuggaguccaaggaua

SEQ ID NO: 45919 - RNA, 22 nt, Homo sapiens
aggcaaugugagaguuuauuca

SEQ ID NO: 45920 - RNA, 22 nt, Homo sapiens
gccaacauggcgcuccauucuu

SEQ ID NO: 45921 - RNA, 22 nt, Homo sapiens
ugagaugaagucucacucuguc

SEQ ID NO: 45922 - RNA, 22 nt, Homo sapiens
uaaggcucuuguuauuuugagg

SEQ ID NO: 45923 - RNA, 22 nt, Homo sapiens
uucagacugggugaagagggua

SEQ ID NO: 45924 - RNA, 22 nt, Homo sapiens
uugagggaggcagggcuugucu

SEQ ID NO: 45925 - RNA, 20 nt, Homo sapiens
cauugcacuccagcuugggc

SEQ ID NO: 45926 - RNA, 22 nt, Homo sapiens
ugagaacugguagcacuuguga

SEQ ID NO: 45927 - RNA, 22 nt, Homo sapiens
cuuugguucuguuuauaugcug

SEQ ID NO: 45928 - RNA, 22 nt, Homo sapiens
uugcacagugguuuagagccug

SEQ ID NO: 45929 - RNA, 22 nt, Homo sapiens
auggcuguuccugggaguucua

SEQ ID NO: 45930 - RNA, 22 nt, Homo sapiens
ucauaucauuagaucuacugua

SEQ ID NO: 45931 - RNA, 22 nt, Homo sapiens
uugaggcaaugaggagaagcug

SEQ ID NO: 45932 - RNA, 20 nt, Homo sapiens
uugaggucaggaguuuggga

SEQ ID NO: 45933 - RNA, 22 nt, Homo sapiens
acacagugucuguguauuuaaa

SEQ ID NO: 45934 - RNA, 22 nt, Homo sapiens
caugcacugaguccaccucugg

SEQ ID NO: 45935 - RNA, 22 nt, Homo sapiens
ugagaugagggaagccuaggca

SEQ ID NO: 45936 - RNA, 22 nt, Homo sapiens
auaaauaguaguugugguggcc

SEQ ID NO: 45937 - RNA, 18 nt, Homo sapiens
auugcacuccugccuggg

SEQ ID NO: 45938 - RNA, 22 nt, Homo sapiens
ccauugaacaugaaggaaugug

SEQ ID NO: 45939 - RNA, 22 nt, Homo sapiens
ugcaaugugaaauaagcacauc

SEQ ID NO: 45940 - RNA, 22 nt, Homo sapiens
uugcauaagugcauucugugau

SEQ ID NO: 45941 - RNA, 22 nt, Homo sapiens
cauugcacuccagccugaggga

SEQ ID NO: 45942 - RNA, 22 nt, Homo sapiens
cagagagcuugcccuuguauau

SEQ ID NO: 45943 - RNA, 22 nt, Homo sapiens
auugaguaaaaaauagugaugu

SEQ ID NO: 45944 - RNA, 22 nt, Homo sapiens
auugcacuccagucugggcaac

SEQ ID NO: 45945 - RNA, 22 nt, Homo sapiens
ucacuagaucaagggagagaaa

SEQ ID NO: 45946 - RNA, 22 nt, Homo sapiens
ggagaugaaaugagcuacuuaa

SEQ ID NO: 45947 - RNA, 22 nt, Homo sapiens
cucagugucuggggccccaggg

SEQ ID NO: 45948 - RNA, 22 nt, Homo sapiens
uucccagugccaggcacuggga

SEQ ID NO: 45949 - RNA, 22 nt, Homo sapiens
auacaucugccauguuggugug

SEQ ID NO: 45950 - RNA, 22 nt, Homo sapiens
auugcacuccagccugagcaaa

SEQ ID NO: 45951 - RNA, 22 nt, Homo sapiens
ugccauugcacuccagccuggg

SEQ ID NO: 45952 - RNA, 22 nt, Homo sapiens
aaguauguaucaagucauacuu

SEQ ID NO: 45953 - RNA, 22 nt, Homo sapiens
ccuuggcacuuugccacagugc

SEQ ID NO: 45954 - RNA, 22 nt, Homo sapiens
uuauguaaaucaaucuggaauc

SEQ ID NO: 45955 - RNA, 23 nt, Homo sapiens
uguauacacccugugcaucuggg

SEQ ID NO: 45956 - RNA, 22 nt, Homo sapiens
caccugagcgggaugcucgccu

SEQ ID NO: 45957 - RNA, 22 nt, Homo sapiens
guauacaugucaaaacucacau

SEQ ID NO: 45958 - RNA, 22 nt, Homo sapiens
cugagcucauuucuuuugcuac

SEQ ID NO: 45959 - RNA, 22 nt, Homo sapiens
ggucagaaagacaggcauucag

SEQ ID NO: 45960 - RNA, 22 nt, Homo sapiens
ugagaugaguucucgcucuguc

SEQ ID NO: 45961 - RNA, 22 nt, Homo sapiens
caacacagugaaacccgucucu

SEQ ID NO: 45962 - RNA, 22 nt, Homo sapiens
auacaagugccauguuggugug

SEQ ID NO: 45963 - RNA, 22 nt, Homo sapiens
uaagacacuuaaaauguuacau

SEQ ID NO: 45964 - RNA, 23 nt, Homo sapiens
augugugcuuggagagcaggaug

SEQ ID NO: 45965 - RNA, 20 nt, Homo sapiens
uggaaucugaagaucucagu

SEQ ID NO: 45966 - RNA, 22 nt, Homo sapiens
ggaauggaacaaagucuugaaa

SEQ ID NO: 45967 - RNA, 22 nt, Homo sapiens
guucaagugauucuacugccuc

SEQ ID NO: 45968 - RNA, 22 nt, Homo sapiens
augucuuucauagagacccaga

SEQ ID NO: 45969 - RNA, 22 nt, Homo sapiens
uuugguugcauucacauauuuc

SEQ ID NO: 45970 - RNA, 22 nt, Homo sapiens
uaagacugccccagacagcaag

SEQ ID NO: 45971 - RNA, 22 nt, Homo sapiens
uuaauagugacucauuuuccac

SEQ ID NO: 45972 - RNA, 22 nt, Homo sapiens
uggucaguugaguccuugccaa

SEQ ID NO: 45973 - RNA, 23 nt, Homo sapiens
ggaaugaaaccugguuaugauau

SEQ ID NO: 45974 - RNA, 22 nt, Homo sapiens
auggaacauuauagauguaaaa

SEQ ID NO: 45975 - RNA, 22 nt, Homo sapiens
auggcaguguaugauuauauua

SEQ ID NO: 45976 - RNA, 22 nt, Homo sapiens
ugcucaguuuaaaacuuuugag

SEQ ID NO: 45977 - RNA, 22 nt, Homo sapiens
cugacuaguuuuaaugcagauu

SEQ ID NO: 45978 - RNA, 22 nt, Homo sapiens
uucauacaguggcugcacucca

SEQ ID NO: 45979 - RNA, 22 nt, Homo sapiens
uuuugcaguuacagagagugag

SEQ ID NO: 45980 - RNA, 22 nt, Homo sapiens
gucauugcacuccagccuggac

SEQ ID NO: 45981 - RNA, 22 nt, Homo sapiens
cauggcuuucacaguaaagccu

SEQ ID NO: 45982 - RNA, 22 nt, Homo sapiens
uugaggucagagguucgagacc

SEQ ID NO: 45983 - RNA, 22 nt, Homo sapiens
ucauugcacuccagccugggug

SEQ ID NO: 45984 - RNA, 22 nt, Homo sapiens
ugacaagaacuuuccauaguaa

SEQ ID NO: 45985 - RNA, 22 nt, Homo sapiens
cuuugguuaucuagcuguauga

SEQ ID NO: 45986 - RNA, 22 nt, Homo sapiens
uugagcaccaugccuggccaug

SEQ ID NO: 45987 - RNA, 22 nt, Homo sapiens
guguuauuuugcugggaaugau

SEQ ID NO: 45988 - RNA, 22 nt, Homo sapiens
uaaagugcugagaugaggcugg

SEQ ID NO: 45989 - RNA, 22 nt, Homo sapiens
ugagaugagaaucaguucuaau

SEQ ID NO: 45990 - RNA, 22 nt, Homo sapiens
ugucucaguucccuucucugga

SEQ ID NO: 45991 - RNA, 22 nt, Homo sapiens
auucuauaguccuaggauuggg

SEQ ID NO: 45992 - RNA, 22 nt, Homo sapiens
uucuacagugacugcagccaua

SEQ ID NO: 45993 - RNA, 22 nt, Homo sapiens
aacacuguuuccagucaugauc

SEQ ID NO: 45994 - RNA, 22 nt, Homo sapiens
gucagugucuuugcagcucaga

SEQ ID NO: 45995 - RNA, 22 nt, Homo sapiens
uggugagaaaagaugucuuugu

SEQ ID NO: 45996 - RNA, 22 nt, Homo sapiens
auagcagacauuucaaggcagg

SEQ ID NO: 45997 - RNA, 22 nt, Homo sapiens
gagacauugacuuuguuccaga

SEQ ID NO: 45998 - RNA, 19 nt, Homo sapiens
cauggcuuauaauuuuaau

SEQ ID NO: 45999 - RNA, 22 nt, Homo sapiens
ugagguagaggugaacuugacc

SEQ ID NO: 46000 - RNA, 22 nt, Homo sapiens
auugcacuccagccugggcuag

SEQ ID NO: 46001 - RNA, 22 nt, Homo sapiens
gaaagauuuccugagcuagaaa

SEQ ID NO: 46002 - RNA, 22 nt, Homo sapiens
uauuugguuggugcaaaaguaa

SEQ ID NO: 46003 - RNA, 22 nt, Homo sapiens
ggggaauguuaaagaauuugca

SEQ ID NO: 46004 - RNA, 22 nt, Homo sapiens
gucuguuuggggaccuguggcc

SEQ ID NO: 46005 - RNA, 22 nt, Homo sapiens
auguaacugggacacaagccuc

SEQ ID NO: 46006 - RNA, 22 nt, Homo sapiens
ggcaaugucagcuaaugaugga

SEQ ID NO: 46007 - RNA, 22 nt, Homo sapiens
uuuguucaccucaaggauggga

SEQ ID NO: 46008 - RNA, 22 nt, Homo sapiens
guggaaaucucugugugacuua

SEQ ID NO: 46009 - RNA, 22 nt, Homo sapiens
ugauauuuuugauccuuaaguu

SEQ ID NO: 46010 - RNA, 22 nt, Homo sapiens
aggaagugugcaauuaauuucu

SEQ ID NO: 46011 - RNA, 22 nt, Homo sapiens
auagcagaacagugucucacug

SEQ ID NO: 46012 - RNA, 22 nt, Homo sapiens
augacauugaugcucuggcugg

SEQ ID NO: 46013 - RNA, 22 nt, Homo sapiens
uucagguaguuuaacuguucca

SEQ ID NO: 46014 - RNA, 17 nt, Homo sapiens
auguaauccucaucucu

SEQ ID NO: 46015 - RNA, 22 nt, Homo sapiens
guggacaugaauuuuggaggca

SEQ ID NO: 46016 - RNA, 22 nt, Homo sapiens
gucuuuggaaagacaaaguuca

SEQ ID NO: 46017 - RNA, 22 nt, Homo sapiens
uuuuaugggcuauuugcauuag

SEQ ID NO: 46018 - RNA, 22 nt, Homo sapiens
cucauggagaacaucugcuagg

SEQ ID NO: 46019 - RNA, 22 nt, Homo sapiens
ugagaugaggucucacucuguu

SEQ ID NO: 46020 - RNA, 22 nt, Homo sapiens
ugccaacugguuucuuuuaguu

SEQ ID NO: 46021 - RNA, 22 nt, Homo sapiens
auauucacagguaucagagauu

SEQ ID NO: 46022 - RNA, 22 nt, Homo sapiens
gcuguguugugcccagcaucau

SEQ ID NO: 46023 - RNA, 22 nt, Homo sapiens
guccaguacucuuuccugaaaa

SEQ ID NO: 46024 - RNA, 22 nt, Homo sapiens
agugcacuccagccugggcaac

SEQ ID NO: 46025 - RNA, 21 nt, Homo sapiens
uauggauuugccuauucugga

SEQ ID NO: 46026 - RNA, 22 nt, Homo sapiens
uuugccaaucagaggcaucuug

SEQ ID NO: 46027 - RNA, 22 nt, Homo sapiens
acugagaucuuuaaauaaauaa

SEQ ID NO: 46028 - RNA, 22 nt, Homo sapiens
uuggcagucugaggcacagacu

SEQ ID NO: 46029 - RNA, 22 nt, Homo sapiens
ugacaaguaaacagucagcacc

SEQ ID NO: 46030 - RNA, 22 nt, Homo sapiens
uugaguccccacacuggguccc

SEQ ID NO: 46031 - RNA, 22 nt, Homo sapiens
gugagccaugauuuuaccacug

SEQ ID NO: 46032 - RNA, 22 nt, Homo sapiens
ucagagucuagaucacucacug

SEQ ID NO: 46033 - RNA, 22 nt, Homo sapiens
cucaguguuucagcugcucaga

SEQ ID NO: 46034 - RNA, 19 nt, Homo sapiens
ucccugagucuuagcuuga

SEQ ID NO: 46035 - RNA, 22 nt, Homo sapiens
auuacuuugcaccaaccuaaua

SEQ ID NO: 46036 - RNA, 22 nt, Homo sapiens
uagucacacacucaacuuuuca

SEQ ID NO: 46037 - RNA, 22 nt, Homo sapiens
auuguacuccagccugggcagc

SEQ ID NO: 46038 - RNA, 22 nt, Homo sapiens
aaucacuuugcuacaaggcagu

SEQ ID NO: 46039 - RNA, 18 nt, Homo sapiens
uuggacggagagucaaau

SEQ ID NO: 46040 - RNA, 22 nt, Homo sapiens
acuggcuuauuucacuuagcau

SEQ ID NO: 46041 - RNA, 22 nt, Homo sapiens
uuugaaaguaauuugguuggug

SEQ ID NO: 46042 - RNA, 22 nt, Homo sapiens
accugagacuaggcauuuuaua

SEQ ID NO: 46043 - RNA, 22 nt, Homo sapiens
uagauuguaauaugcagaaugg

SEQ ID NO: 46044 - RNA, 22 nt, Homo sapiens
auggcuuuaagagugucugaau

SEQ ID NO: 46045 - RNA, 22 nt, Homo sapiens
uuggucaucucccuccuuuuag

SEQ ID NO: 46046 - RNA, 22 nt, Homo sapiens
cugagacacucuuaucugcaua

SEQ ID NO: 46047 - RNA, 22 nt, Homo sapiens
uuggacuucucaaggcaauaaa

SEQ ID NO: 46048 - RNA, 22 nt, Homo sapiens
uuucuacagggcuugccaggua

SEQ ID NO: 46049 - RNA, 22 nt, Homo sapiens
caggaaugugaggguucccugc

SEQ ID NO: 46050 - RNA, 22 nt, Homo sapiens
cauggcuuuuauaacaagaaau

SEQ ID NO: 46051 - RNA, 22 nt, Homo sapiens
aagucaaggagagaagcuucag

SEQ ID NO: 46052 - RNA, 22 nt, Homo sapiens
auacauguuucauguuggugug

SEQ ID NO: 46053 - RNA, 20 nt, Homo sapiens
ugagaacaugugguauuugg

SEQ ID NO: 46054 - RNA, 22 nt, Homo sapiens
aauggcuuucagcuuuucccca

SEQ ID NO: 46055 - RNA, 22 nt, Homo sapiens
ugagcugagauuaagcugcugc

SEQ ID NO: 46056 - RNA, 22 nt, Homo sapiens
agcugauggucuuguaugaugu

SEQ ID NO: 46057 - RNA, 22 nt, Homo sapiens
uuucuauguugaccagucuaga

SEQ ID NO: 46058 - RNA, 22 nt, Homo sapiens
cauugcacuccagcuugggcaa

SEQ ID NO: 46059 - RNA, 22 nt, Homo sapiens
ugagaucugauaggccuggguu

SEQ ID NO: 46060 - RNA, 22 nt, Homo sapiens
ugagaugagucucgcucuguca

SEQ ID NO: 46061 - RNA, 22 nt, Homo sapiens
uugagauggagucuugcucugu

SEQ ID NO: 46062 - RNA, 22 nt, Homo sapiens
uguggaguguaugugacagaga

SEQ ID NO: 46063 - RNA, 22 nt, Homo sapiens
cuaauacaguuguccaagcugg

SEQ ID NO: 46064 - RNA, 22 nt, Homo sapiens
caugaaagugagaaacuccugg

SEQ ID NO: 46065 - RNA, 22 nt, Homo sapiens
uuaauacugcuuaacuuuagga

SEQ ID NO: 46066 - RNA, 22 nt, Homo sapiens
ucugucuuugucaggaccagag

SEQ ID NO: 46067 - RNA, 22 nt, Homo sapiens
auguccauggaaucuguagcaa

SEQ ID NO: 46068 - RNA, 22 nt, Homo sapiens
uuaagggaggagcuucaagaug

SEQ ID NO: 46069 - RNA, 22 nt, Homo sapiens
uuaccugagaaggugacauuug

SEQ ID NO: 46070 - RNA, 22 nt, Homo sapiens
auugcucuuagaaauauuucuu

SEQ ID NO: 46071 - RNA, 22 nt, Homo sapiens
ggcaagaacuucacucacuuuu

SEQ ID NO: 46072 - RNA, 22 nt, Homo sapiens
acaguguagugacugccaacuu

SEQ ID NO: 46073 - RNA, 22 nt, Homo sapiens
cacuguggauggaacuauguga

SEQ ID NO: 46074 - RNA, 22 nt, Homo sapiens
acauucagcuguuguuucaaug

SEQ ID NO: 46075 - RNA, 22 nt, Homo sapiens
aucuuuggugaguucuuugguc

SEQ ID NO: 46076 - RNA, 20 nt, Homo sapiens
ugagaacauguggcauuugg

SEQ ID NO: 46077 - RNA, 22 nt, Homo sapiens
augacaagaguguucagggaga

SEQ ID NO: 46078 - RNA, 22 nt, Homo sapiens
cucauggagaaccucugcuagg

SEQ ID NO: 46079 - RNA, 22 nt, Homo sapiens
aaagagaucuaugggcacuaug

SEQ ID NO: 46080 - RNA, 22 nt, Homo sapiens
cccagaguucuuaaauacugag

SEQ ID NO: 46081 - RNA, 22 nt, Homo sapiens
uuugugauugcacacucaagau

SEQ ID NO: 46082 - RNA, 22 nt, Homo sapiens
uuugugagguggauagauugca

SEQ ID NO: 46083 - RNA, 22 nt, Homo sapiens
cauugcacuuagacaacuuuug

SEQ ID NO: 46084 - RNA, 20 nt, Homo sapiens
uggagugaagguucuggacc

SEQ ID NO: 46085 - RNA, 22 nt, Homo sapiens
aucugugaaugaaguuauuuug

SEQ ID NO: 46086 - RNA, 22 nt, Homo sapiens
guacacauacauauaugugugu

SEQ ID NO: 46087 - RNA, 22 nt, Homo sapiens
uggagcccuaguuccucauaac

SEQ ID NO: 46088 - RNA, 22 nt, Homo sapiens
auugaacuguuggagagguuuu

SEQ ID NO: 46089 - RNA, 22 nt, Homo sapiens
gaaacugcauuucuaacaagcu

SEQ ID NO: 46090 - RNA, 22 nt, Homo sapiens
aauggcuuuuaauauccauaau

SEQ ID NO: 46091 - RNA, 21 nt, Homo sapiens
auuccacuuuuccuucaggga

SEQ ID NO: 46092 - RNA, 21 nt, Homo sapiens
uucaucuggccguauuccagg

SEQ ID NO: 46093 - RNA, 22 nt, Homo sapiens
ugaaaucuaaaauguuccaaga

SEQ ID NO: 46094 - RNA, 23 nt, Homo sapiens
aaagacuagucaggugcaguggu

SEQ ID NO: 46095 - RNA, 22 nt, Homo sapiens
uucuuugcaugaucucaaaguc

SEQ ID NO: 46096 - RNA, 22 nt, Homo sapiens
caucgcacuccagccugggcaa

SEQ ID NO: 46097 - RNA, 22 nt, Homo sapiens
uuaugacauugacaguuuuuag

SEQ ID NO: 46098 - RNA, 22 nt, Homo sapiens
gagcuguuuuucacuagaccaa

SEQ ID NO: 46099 - RNA, 19 nt, Homo sapiens
uagguacauucaagucucc

SEQ ID NO: 46100 - RNA, 22 nt, Homo sapiens
cauaaagauggaggaggccagg

SEQ ID NO: 46101 - RNA, 22 nt, Homo sapiens
cuguucaggaggcauuuggugg

SEQ ID NO: 46102 - RNA, 22 nt, Homo sapiens
cuggcacagugucagaaacaca

SEQ ID NO: 46103 - RNA, 22 nt, Homo sapiens
ucuaaguaguagcuggucagaa

SEQ ID NO: 46104 - RNA, 22 nt, Homo sapiens
uuggaacacauguuuuucuacc

SEQ ID NO: 46105 - RNA, 22 nt, Homo sapiens
ugagaugaguugcgcucugucg

SEQ ID NO: 46106 - RNA, 22 nt, Homo sapiens
cucagugucuggcacacagaaa

SEQ ID NO: 46107 - RNA, 22 nt, Homo sapiens
ugagaucaagguuaauauaauc

SEQ ID NO: 46108 - RNA, 18 nt, Homo sapiens
auugcacaccagccuggg

SEQ ID NO: 46109 - RNA, 22 nt, Homo sapiens
ucucuugguugaacaguuugga

SEQ ID NO: 46110 - RNA, 22 nt, Homo sapiens
uuugcuuguguaaaaaucugga

SEQ ID NO: 46111 - RNA, 22 nt, Homo sapiens
auggcagugucuagggguguuu

SEQ ID NO: 46112 - RNA, 22 nt, Homo sapiens
uugggagugucucuggacugca

SEQ ID NO: 46113 - RNA, 22 nt, Homo sapiens
auuccacuuccacuaguuucuc

SEQ ID NO: 46114 - RNA, 22 nt, Homo sapiens
uugacauaguuucugaaauaga

SEQ ID NO: 46115 - RNA, 22 nt, Homo sapiens
augaucacuguggaaauucagc

SEQ ID NO: 46116 - RNA, 22 nt, Homo sapiens
uucaauaugucauuggcaggca

SEQ ID NO: 46117 - RNA, 22 nt, Homo sapiens
cuucuguuaguucugauaacuu

SEQ ID NO: 46118 - RNA, 22 nt, Homo sapiens
uaaguacuuuacagacauuauc

SEQ ID NO: 46119 - RNA, 19 nt, Homo sapiens
aguggguguuuucuguuug

SEQ ID NO: 46120 - RNA, 22 nt, Homo sapiens
ccuucauucauuaauuuagccc

SEQ ID NO: 46121 - RNA, 22 nt, Homo sapiens
ucuaaaacuagauugugaugau

SEQ ID NO: 46122 - RNA, 22 nt, Homo sapiens
acugaucaauguuaaggcuuau

SEQ ID NO: 46123 - RNA, 18 nt, Homo sapiens
ugaaacacauuuuuuccu

SEQ ID NO: 46124 - RNA, 22 nt, Homo sapiens
cucuuugaguuccuccuggugu

SEQ ID NO: 46125 - RNA, 22 nt, Homo sapiens
caugccacuguggacaaagaca

SEQ ID NO: 46126 - RNA, 22 nt, Homo sapiens
ugagaugauuuaauggagccca

SEQ ID NO: 46127 - RNA, 22 nt, Homo sapiens
gaucacuuugaugccaggaacu

SEQ ID NO: 46128 - RNA, 22 nt, Homo sapiens
acacacgugcauguaugcguau

SEQ ID NO: 46129 - RNA, 22 nt, Homo sapiens
cuagaguacuuaccacagcaug

SEQ ID NO: 46130 - RNA, 22 nt, Homo sapiens
guggcagugugaggauccugcu

SEQ ID NO: 46131 - RNA, 22 nt, Homo sapiens
auuguacuccagccugggcaaa

SEQ ID NO: 46132 - RNA, 22 nt, Homo sapiens
ugugaaacauggauagaacugg

SEQ ID NO: 46133 - RNA, 22 nt, Homo sapiens
uaaucucagcuacucaggaggc

SEQ ID NO: 46134 - RNA, 22 nt, Homo sapiens
uugagauggagucuugcucuug

SEQ ID NO: 46135 - RNA, 21 nt, Homo sapiens
uauggcuuagucaguguuucc

SEQ ID NO: 46136 - RNA, 22 nt, Homo sapiens
augucaacauagacaguagagu

SEQ ID NO: 46137 - RNA, 21 nt, Homo sapiens
ugagaugauccugcaugcaug

SEQ ID NO: 46138 - RNA, 22 nt, Homo sapiens
uuuggucacugccgccgccagc

SEQ ID NO: 46139 - RNA, 22 nt, Homo sapiens
uaugagacugguuaauuuuugu

SEQ ID NO: 46140 - RNA, 19 nt, Homo sapiens
gugguauuaccuuuugauu

SEQ ID NO: 46141 - RNA, 22 nt, Homo sapiens
cauugcaauccagccugggcaa

SEQ ID NO: 46142 - RNA, 22 nt, Homo sapiens
acaaagugccuccuuuuagagu

SEQ ID NO: 46143 - RNA, 22 nt, Homo sapiens
uggagugagaacuucaaugaug

SEQ ID NO: 46144 - RNA, 22 nt, Homo sapiens
cauugcacuccauccuuggcaa

SEQ ID NO: 46145 - RNA, 19 nt, Homo sapiens
ucuuuagucacauuuuuau

SEQ ID NO: 46146 - RNA, 22 nt, Homo sapiens
ugcaauuuaaugugucccaauu

SEQ ID NO: 46147 - RNA, 22 nt, Homo sapiens
uggaagaugggaccucaguuuu

SEQ ID NO: 46148 - RNA, 18 nt, Homo sapiens
guaaauguaucuauugcc

SEQ ID NO: 46149 - RNA, 22 nt, Homo sapiens
augugacuuuuuccugugccuu

SEQ ID NO: 46150 - RNA, 22 nt, Homo sapiens
uuggaagauuacuuaguuuucu

SEQ ID NO: 46151 - RNA, 22 nt, Homo sapiens
ucauacaguaguccucacuugu

SEQ ID NO: 46152 - RNA, 22 nt, Homo sapiens
ugaggugaggguaucaaaugcu

SEQ ID NO: 46153 - RNA, 22 nt, Homo sapiens
uuugugcaugaagagggggugc

SEQ ID NO: 46154 - RNA, 22 nt, Homo sapiens
aaguuaauguuuaagacuccua

SEQ ID NO: 46155 - RNA, 22 nt, Homo sapiens
ugcagaaucccuucagauccga

SEQ ID NO: 46156 - RNA, 22 nt, Homo sapiens
uucuuugguacaagggccgacc

SEQ ID NO: 46157 - RNA, 22 nt, Homo sapiens
gucucccagccuacauauuucu

SEQ ID NO: 46158 - RNA, 22 nt, Homo sapiens
cuuuugugauucuucaguugcu

SEQ ID NO: 46159 - RNA, 22 nt, Homo sapiens
caguuacuugacacaaccaauu

SEQ ID NO: 46160 - RNA, 22 nt, Homo sapiens
augcaacuugaaauuuuccgga

SEQ ID NO: 46161 - RNA, 22 nt, Homo sapiens
uauggcuuuguucaacagccuc

SEQ ID NO: 46162 - RNA, 22 nt, Homo sapiens
guucucacuggacugugaaaau

SEQ ID NO: 46163 - RNA, 22 nt, Homo sapiens
uuugacaaugugugcuuguauu

SEQ ID NO: 46164 - RNA, 22 nt, Homo sapiens
uuguuuuggagaugagcuaaaa

SEQ ID NO: 46165 - RNA, 22 nt, Homo sapiens
ucacaaguguauagacaugucc

SEQ ID NO: 46166 - RNA, 21 nt, Homo sapiens
uggagugaagaguuuauugac

SEQ ID NO: 46167 - RNA, 22 nt, Homo sapiens
ggacaagaucuuccaccauuca

SEQ ID NO: 46168 - RNA, 20 nt, Homo sapiens
uuggaaaugugaauugggag

SEQ ID NO: 46169 - RNA, 22 nt, Homo sapiens
uuauggauuuauauucuguagu

SEQ ID NO: 46170 - RNA, 22 nt, Homo sapiens
ugagaugaacuugauuguuuua

SEQ ID NO: 46171 - RNA, 22 nt, Homo sapiens
uagcauaauuuguagaaaauca

SEQ ID NO: 46172 - RNA, 22 nt, Homo sapiens
gacacagugaagucucuacuug

SEQ ID NO: 46173 - RNA, 18 nt, Homo sapiens
aaacugcuuccuuggccu

SEQ ID NO: 46174 - RNA, 22 nt, Homo sapiens
auugcacuccagccuggggaac

SEQ ID NO: 46175 - RNA, 22 nt, Homo sapiens
uacagucauaaugccuagugac

SEQ ID NO: 46176 - RNA, 22 nt, Homo sapiens
uuuuaacagccaggggacggcc

SEQ ID NO: 46177 - RNA, 22 nt, Homo sapiens
uggaaaacaugcacauuggauu

SEQ ID NO: 46178 - RNA, 22 nt, Homo sapiens
ugagaucaugucauuugcacuc

SEQ ID NO: 46179 - RNA, 22 nt, Homo sapiens
ggaucacuugagaccaggaguu

SEQ ID NO: 46180 - RNA, 19 nt, Homo sapiens
uucauacagugagagcagc

SEQ ID NO: 46181 - RNA, 21 nt, Homo sapiens
ugaaugcuuuaaauauuagaa

SEQ ID NO: 46182 - RNA, 22 nt, Homo sapiens
uggagugaaaacacacuaaucu

SEQ ID NO: 46183 - RNA, 22 nt, Homo sapiens
ucccugaaaauuagcauuuuaa

SEQ ID NO: 46184 - RNA, 22 nt, Homo sapiens
uuugaguaggcuuauauuuugg

SEQ ID NO: 46185 - RNA, 22 nt, Homo sapiens
cuggcagucugccucuucacug

SEQ ID NO: 46186 - RNA, 22 nt, Homo sapiens
uuggaaauguguuugcauucag

SEQ ID NO: 46187 - RNA, 22 nt, Homo sapiens
uuuagcaaagcaauuuacacca

SEQ ID NO: 46188 - RNA, 22 nt, Homo sapiens
guguuauugagaaauagggugu

SEQ ID NO: 46189 - RNA, 22 nt, Homo sapiens
agaagaacauagggugacugaa

SEQ ID NO: 46190 - RNA, 22 nt, Homo sapiens
uguaacaggaggaaaaugugaa

SEQ ID NO: 46191 - RNA, 22 nt, Homo sapiens
uucuacaugggucgucggugag

SEQ ID NO: 46192 - RNA, 22 nt, Homo sapiens
uaucaguauggauucauggauu

SEQ ID NO: 46193 - RNA, 22 nt, Homo sapiens
ggcagaauugcugaggaugcua

SEQ ID NO: 46194 - RNA, 17 nt, Homo sapiens
aaguggcuuguucacca

SEQ ID NO: 46195 - RNA, 21 nt, Homo sapiens
uuuccuggagcguauggcuuc

SEQ ID NO: 46196 - RNA, 22 nt, Homo sapiens
uuugaaccauuugaagaaugau

SEQ ID NO: 46197 - RNA, 22 nt, Homo sapiens
uugagauggagucucacuccuu

SEQ ID NO: 46198 - RNA, 22 nt, Homo sapiens
gagagcauuaagccaucaucau

SEQ ID NO: 46199 - RNA, 22 nt, Homo sapiens
ggcaacaugccgaaaccacguc

SEQ ID NO: 46200 - RNA, 22 nt, Homo sapiens
agaaugugaacaucuugaaagu

SEQ ID NO: 46201 - RNA, 22 nt, Homo sapiens
uugcauauucucugaggcagga

SEQ ID NO: 46202 - RNA, 22 nt, Homo sapiens
uugcuuagucaugaaucacuga

SEQ ID NO: 46203 - RNA, 22 nt, Homo sapiens
auggcucuggauagaaugcagg

SEQ ID NO: 46204 - RNA, 22 nt, Homo sapiens
caucacuuuuccuuuuacagau

SEQ ID NO: 46205 - RNA, 22 nt, Homo sapiens
aaacugcuuuccaugguggcug

SEQ ID NO: 46206 - RNA, 22 nt, Homo sapiens
ccuucuuuuguaaggcugaaua

SEQ ID NO: 46207 - RNA, 22 nt, Homo sapiens
uugguucucuuagccaucuuaa

SEQ ID NO: 46208 - RNA, 22 nt, Homo sapiens
auagaagcugccaacguuucag

SEQ ID NO: 46209 - RNA, 22 nt, Homo sapiens
cuggaauauuagcuggucuuaa

SEQ ID NO: 46210 - RNA, 22 nt, Homo sapiens
ucacaauucucaauuugugaaa

SEQ ID NO: 46211 - RNA, 22 nt, Homo sapiens
ugauuggagaacaaacugcaua

SEQ ID NO: 46212 - RNA, 22 nt, Homo sapiens
auagcagaauuuggucaagucu

SEQ ID NO: 46213 - RNA, 19 nt, Homo sapiens
uggaacugauucaguucug

SEQ ID NO: 46214 - RNA, 22 nt, Homo sapiens
ugaaggcaggagggagaaaagu

SEQ ID NO: 46215 - RNA, 22 nt, Homo sapiens
auccauugucuaaugcuaagau

SEQ ID NO: 46216 - RNA, 22 nt, Homo sapiens
uuggaaacauuuaugguaacag

SEQ ID NO: 46217 - RNA, 22 nt, Homo sapiens
acuuuuguuauacagugugaua

SEQ ID NO: 46218 - RNA, 22 nt, Homo sapiens
cacaguguuacugguaugaagu

SEQ ID NO: 46219 - RNA, 22 nt, Homo sapiens
cucuuuggaugccuuaggguua

SEQ ID NO: 46220 - RNA, 22 nt, Homo sapiens
agaauguuuuagaccaauacaa

SEQ ID NO: 46221 - RNA, 22 nt, Homo sapiens
ugccaaaaugggcuuuauaccg

SEQ ID NO: 46222 - RNA, 22 nt, Homo sapiens
uuccugagccuuguaucuagua

SEQ ID NO: 46223 - RNA, 22 nt, Homo sapiens
ugagaugaagucuugcucuguu

SEQ ID NO: 46224 - RNA, 22 nt, Homo sapiens
cauugcacuccagccuagccaa

SEQ ID NO: 46225 - RNA, 22 nt, Homo sapiens
agugcaauggugccaucauagc

SEQ ID NO: 46226 - RNA, 22 nt, Homo sapiens
aauggcuucuuauugugguuca

SEQ ID NO: 46227 - RNA, 22 nt, Homo sapiens
ucucuggauaucuacuuauguu

SEQ ID NO: 46228 - RNA, 22 nt, Homo sapiens
auugcacuccagccuggcaaua

SEQ ID NO: 46229 - RNA, 22 nt, Homo sapiens
cuuuacaguuggacucacgagg

SEQ ID NO: 46230 - RNA, 22 nt, Homo sapiens
gagcucaccuuaccucuggagc

SEQ ID NO: 46231 - RNA, 22 nt, Homo sapiens
aucuuuggugcaugauacuuug

SEQ ID NO: 46232 - RNA, 22 nt, Homo sapiens
ugagcugagaucaugcuauugu

SEQ ID NO: 46233 - RNA, 22 nt, Homo sapiens
acacuuucuagacaagggaaua

SEQ ID NO: 46234 - RNA, 22 nt, Homo sapiens
cugaaagagcauguaacacagu

SEQ ID NO: 46235 - RNA, 22 nt, Homo sapiens
uauggcuuuuauuauguuguag

SEQ ID NO: 46236 - RNA, 22 nt, Homo sapiens
cugugcauguuguccaauucuu

SEQ ID NO: 46237 - RNA, 22 nt, Homo sapiens
acacauuagcaagugcuguuau

SEQ ID NO: 46238 - RNA, 22 nt, Homo sapiens
uauggcuucuuuaaauugaggu

SEQ ID NO: 46239 - RNA, 22 nt, Homo sapiens
aaggagcuaagagaucauacau

SEQ ID NO: 46240 - RNA, 22 nt, Homo sapiens
cauugcacuccagccuuggcaa

SEQ ID NO: 46241 - RNA, 22 nt, Homo sapiens
gcugagaucucuugccugaacu

SEQ ID NO: 46242 - RNA, 22 nt, Homo sapiens
uauggcuucuauaaggaagcuu

SEQ ID NO: 46243 - RNA, 22 nt, Homo sapiens
auaugcaaauccauagagacag

SEQ ID NO: 46244 - RNA, 22 nt, Homo sapiens
acacuguagcugagggcaugcg

SEQ ID NO: 46245 - RNA, 22 nt, Homo sapiens
gagcucauuguugcuaaagaga

SEQ ID NO: 46246 - RNA, 22 nt, Homo sapiens
cucaguagaaaauacauggacu

SEQ ID NO: 46247 - RNA, 22 nt, Homo sapiens
uuacacaguaggucccuaguaa

SEQ ID NO: 46248 - RNA, 17 nt, Homo sapiens
ucuaauaauaugcauuu

SEQ ID NO: 46249 - RNA, 22 nt, Homo sapiens
ugagaucaguuguuauaauucu

SEQ ID NO: 46250 - RNA, 22 nt, Homo sapiens
uuguaaucaacacaucauuggg

SEQ ID NO: 46251 - RNA, 22 nt, Homo sapiens
auggcaguuuauucuaaaucaa

SEQ ID NO: 46252 - RNA, 22 nt, Homo sapiens
cauggcuuuauuuucagcuucu

SEQ ID NO: 46253 - RNA, 23 nt, Homo sapiens
uuugcacuugcuccuucuauggc

SEQ ID NO: 46254 - RNA, 22 nt, Homo sapiens
uuugcacuuuaauauaauguga

SEQ ID NO: 46255 - RNA, 22 nt, Homo sapiens
uuugcagagacuuguuaggaau

SEQ ID NO: 46256 - RNA, 20 nt, Homo sapiens
uuugcagaaucuaagaagag

SEQ ID NO: 46257 - RNA, 22 nt, Homo sapiens
uuugaaugcaacaaaugcggga

SEQ ID NO: 46258 - RNA, 22 nt, Homo sapiens
uuugaagcaauugugaauggga

SEQ ID NO: 46259 - RNA, 22 nt, Homo sapiens
uuucuugguuguauuuagacuu

SEQ ID NO: 46260 - RNA, 22 nt, Homo sapiens
uuuugcaguuacagagagugag

SEQ ID NO: 46261 - RNA, 19 nt, Homo sapiens
uuuuggaaaugugaacagc

SEQ ID NO: 46262 - RNA, 22 nt, Homo sapiens
uuuuggacuucaauuugacacu

SEQ ID NO: 46263 - RNA, 22 nt, Homo sapiens
uuugcugagucauuccaugcug

SEQ ID NO: 46264 - RNA, 22 nt, Homo sapiens
uuugcugagucugacuucaugg

SEQ ID NO: 46265 - RNA, 22 nt, Homo sapiens
uuugcaucuuuugcuuccugga

SEQ ID NO: 46266 - RNA, 22 nt, Homo sapiens
uuugccaaugggaauuuuccua

SEQ ID NO: 46267 - RNA, 22 nt, Homo sapiens
uuuuuggaggagguuagaucau

SEQ ID NO: 46268 - RNA, 21 nt, Homo sapiens
uuuuugguggucauggauaga

SEQ ID NO: 46269 - RNA, 16 nt, Homo sapiens
uuuuugcagaaaugac

SEQ ID NO: 46270 - RNA, 22 nt, Homo sapiens
uuuuugaguaaauauaaauugu

SEQ ID NO: 46271 - RNA, 22 nt, Homo sapiens
uuuuggugguuaugugucaaug

SEQ ID NO: 46272 - RNA, 22 nt, Homo sapiens
uuuugguuguuggguaagagua

SEQ ID NO: 46273 - RNA, 22 nt, Homo sapiens
uuuuguacgccuguguccauca

SEQ ID NO: 46274 - RNA, 22 nt, Homo sapiens
uuuugguguacaauucuaugga

SEQ ID NO: 46275 - RNA, 22 nt, Homo sapiens
uugugaaaaaccucucguggaa

SEQ ID NO: 46276 - RNA, 19 nt, Homo sapiens
uugucuuagaguugucauu

SEQ ID NO: 46277 - RNA, 22 nt, Homo sapiens
uugugguuuucagcuuauauau

SEQ ID NO: 46278 - RNA, 22 nt, Homo sapiens
uuuacugucuucagucccucug

SEQ ID NO: 46279 - RNA, 22 nt, Homo sapiens
uuuacugugggguuucuuagag

SEQ ID NO: 46280 - RNA, 19 nt, Homo sapiens
uuuagaucuuuuaugcagc

SEQ ID NO: 46281 - RNA, 22 nt, Homo sapiens
uuuagcaauucauuuugugucu

SEQ ID NO: 46282 - RNA, 22 nt, Homo sapiens
uugugucaaauggcaauuagca

SEQ ID NO: 46283 - RNA, 22 nt, Homo sapiens
uuuaaagcuccaagcaugucug

SEQ ID NO: 46284 - RNA, 22 nt, Homo sapiens
uuuaacauuggaugagaucguc

SEQ ID NO: 46285 - RNA, 22 nt, Homo sapiens
uuucacagagggcuucuuucua

SEQ ID NO: 46286 - RNA, 22 nt, Homo sapiens
uuucaagugcugucuuagcugu

SEQ ID NO: 46287 - RNA, 21 nt, Homo sapiens
uuucacugugaguuuuucugu

SEQ ID NO: 46288 - RNA, 22 nt, Homo sapiens
uuuccuguagggggcaaggccu

SEQ ID NO: 46289 - RNA, 22 nt, Homo sapiens
uuucagcguggggugcugaaga

SEQ ID NO: 46290 - RNA, 23 nt, Homo sapiens
uuucuugggcaugcuaugucagu

SEQ ID NO: 46291 - RNA, 22 nt, Homo sapiens
uuucugguuaauuucuaagagc

SEQ ID NO: 46292 - RNA, 22 nt, Homo sapiens
uuucugcuugagagaauugcug

SEQ ID NO: 46293 - RNA, 22 nt, Homo sapiens
uuucucaguguuucaggguagg

SEQ ID NO: 46294 - RNA, 22 nt, Homo sapiens
uuuagguauuugguauagcagu

SEQ ID NO: 46295 - RNA, 22 nt, Homo sapiens
uuuagguagucaaagguuaguc

SEQ ID NO: 46296 - RNA, 22 nt, Homo sapiens
uuuagcacugugauugacaaaa

SEQ ID NO: 46297 - RNA, 22 nt, Homo sapiens
uuuaugcgucuguaauuucuuu

SEQ ID NO: 46298 - RNA, 22 nt, Homo sapiens
uuuauggcaugcucccucucaa

SEQ ID NO: 46299 - RNA, 22 nt, Homo sapiens
uuuauguggagcacuugacaca

SEQ ID NO: 46300 - RNA, 22 nt, Homo sapiens
uuuaucuguuuaaaacuguuca

SEQ ID NO: 46301 - RNA, 22 nt, Homo sapiens
uuuaucaggccuuuggaaaaau

SEQ ID NO: 46302 - RNA, 22 nt, Homo sapiens
uuguaauguuaccaaauggugu

SEQ ID NO: 46303 - RNA, 22 nt, Homo sapiens
uuguaaaguucuuaggaagcuc

SEQ ID NO: 46304 - RNA, 22 nt, Homo sapiens
uuguacaggaguguaagcuuca

SEQ ID NO: 46305 - RNA, 22 nt, Homo sapiens
uugucacucuuccuaggguagg

SEQ ID NO: 46306 - RNA, 22 nt, Homo sapiens
uuguccccuuccaaaucucaug

SEQ ID NO: 46307 - RNA, 22 nt, Homo sapiens
uuguccccacccaaaugucauc

SEQ ID NO: 46308 - RNA, 22 nt, Homo sapiens
uugucacuauaaauaagcauuu

SEQ ID NO: 46309 - RNA, 22 nt, Homo sapiens
uugucccauggggucuuccuuu

SEQ ID NO: 46310 - RNA, 22 nt, Homo sapiens
uuguccacugcuagccucugca

SEQ ID NO: 46311 - RNA, 22 nt, Homo sapiens
uugguauguaauuuauauugua

SEQ ID NO: 46312 - RNA, 22 nt, Homo sapiens
uugguauguguuucauacucaa

SEQ ID NO: 46313 - RNA, 22 nt, Homo sapiens
uuggucugcucugauguuuucu

SEQ ID NO: 46314 - RNA, 22 nt, Homo sapiens
uuguaaacaucuguacauugcu

SEQ ID NO: 46315 - RNA, 22 nt, Homo sapiens
uugcuacauugauugccucuuu

SEQ ID NO: 46316 - RNA, 22 nt, Homo sapiens
uugcugguuuucauaugagcag

SEQ ID NO: 46317 - RNA, 22 nt, Homo sapiens
uugcauagaggugaguauagua

SEQ ID NO: 46318 - RNA, 22 nt, Homo sapiens
uugcaguagucugaaagcaaua

SEQ ID NO: 46319 - RNA, 22 nt, Homo sapiens
uugcaguacuucuggcuuuaca

SEQ ID NO: 46320 - RNA, 19 nt, Homo sapiens
uugcaguauccuauauguu

SEQ ID NO: 46321 - RNA, 22 nt, Homo sapiens
uugcauaagugcauucugugau

SEQ ID NO: 46322 - RNA, 22 nt, Homo sapiens
uuggaauauaaccuguuucuaa

SEQ ID NO: 46323 - RNA, 22 nt, Homo sapiens
uuggaaauauguuaagugucau

SEQ ID NO: 46324 - RNA, 22 nt, Homo sapiens
uugguaaugggcugguauaacc

SEQ ID NO: 46325 - RNA, 22 nt, Homo sapiens
uugguaaucccuagugucuaga

SEQ ID NO: 46326 - RNA, 22 nt, Homo sapiens
uucaucaguugagcugguugcu

SEQ ID NO: 46327 - RNA, 21 nt, Homo sapiens
uucaucuggccguauuccagg

SEQ ID NO: 46328 - RNA, 22 nt, Homo sapiens
uucauaguucuuuuagucauua

SEQ ID NO: 46329 - RNA, 22 nt, Homo sapiens
uucaucagcuguagaugucaug

SEQ ID NO: 46330 - RNA, 22 nt, Homo sapiens
uucauagucacauucgaugucu

SEQ ID NO: 46331 - RNA, 22 nt, Homo sapiens
uucauaguauuuuucuccaaau

SEQ ID NO: 46332 - RNA, 22 nt, Homo sapiens
uucauaguguuuccuuccagug

SEQ ID NO: 46333 - RNA, 22 nt, Homo sapiens
uucauagucuaauuuuuuccac

SEQ ID NO: 46334 - RNA, 22 nt, Homo sapiens
uucauagucuaugcaaguaaga

SEQ ID NO: 46335 - RNA, 22 nt, Homo sapiens
uucagaucaucccagcuccacu

SEQ ID NO: 46336 - RNA, 22 nt, Homo sapiens
uucacugugugacccugggcca

SEQ ID NO: 46337 - RNA, 22 nt, Homo sapiens
uucauaguaacaguaacuaugg

SEQ ID NO: 46338 - RNA, 22 nt, Homo sapiens
uucuugcuguauccucacaugg

SEQ ID NO: 46339 - RNA, 22 nt, Homo sapiens
uucuuuggauaaaguuuuaugc

SEQ ID NO: 46340 - RNA, 22 nt, Homo sapiens
uucuuugguacaagggccgacc

SEQ ID NO: 46341 - RNA, 19 nt, Homo sapiens
uucuuuguugugggggcug

SEQ ID NO: 46342 - RNA, 22 nt, Homo sapiens
uugaaagucauggcacaggcaa

SEQ ID NO: 46343 - RNA, 22 nt, Homo sapiens
uugaaugucuauuaaguuguuu

SEQ ID NO: 46344 - RNA, 22 nt, Homo sapiens
uugaauggaauguuggaacuau

SEQ ID NO: 46345 - RNA, 21 nt, Homo sapiens
uugaaugguuuuccuugggag

SEQ ID NO: 46346 - RNA, 22 nt, Homo sapiens
uugaauguacuuguucucacua

SEQ ID NO: 46347 - RNA, 22 nt, Homo sapiens
uugaauagcauguuuagugcau

SEQ ID NO: 46348 - RNA, 22 nt, Homo sapiens
uugaauagugacuuugauucug

SEQ ID NO: 46349 - RNA, 22 nt, Homo sapiens
uugaaauguuuagaaguuugga

SEQ ID NO: 46350 - RNA, 22 nt, Homo sapiens
uugaauagaagguuuuuuguuc

SEQ ID NO: 46351 - RNA, 22 nt, Homo sapiens
uugacauaguuucugaaauaga

SEQ ID NO: 46352 - RNA, 20 nt, Homo sapiens
uugacagagggaaaguugcu

SEQ ID NO: 46353 - RNA, 22 nt, Homo sapiens
uugacauaaucauuucacagug

SEQ ID NO: 46354 - RNA, 22 nt, Homo sapiens
uugagaaucuuugcuaaaggaa

SEQ ID NO: 46355 - RNA, 23 nt, Homo sapiens
uugacuguggguacaaugugaua

SEQ ID NO: 46356 - RNA, 22 nt, Homo sapiens
uugagagagaacauuuguuaca

SEQ ID NO: 46357 - RNA, 22 nt, Homo sapiens
uugagaguggaggcuauaucuu

SEQ ID NO: 46358 - RNA, 22 nt, Homo sapiens
uugagauccuuuugcucaucag

SEQ ID NO: 46359 - RNA, 22 nt, Homo sapiens
uugagaucuugauauguuugaa

SEQ ID NO: 46360 - RNA, 22 nt, Homo sapiens
uugagaugaagucuugcucucu

SEQ ID NO: 46361 - RNA, 22 nt, Homo sapiens
uugagaugaaguuuugcucuuu

SEQ ID NO: 46362 - RNA, 22 nt, Homo sapiens
uugagauggagucuugcgcugu

SEQ ID NO: 46363 - RNA, 22 nt, Homo sapiens
uugagauggagucuugcacugu

SEQ ID NO: 46364 - RNA, 22 nt, Homo sapiens
uugagauggagucucguucugu

SEQ ID NO: 46365 - RNA, 22 nt, Homo sapiens
uugagauggaaucucgcuuugu

SEQ ID NO: 46366 - RNA, 22 nt, Homo sapiens
uugagcauugguauagguuuua

SEQ ID NO: 46367 - RNA, 22 nt, Homo sapiens
uugagcuaugaguuaauaggac

SEQ ID NO: 46368 - RNA, 22 nt, Homo sapiens
uugagauuuuccucaaauauuu

SEQ ID NO: 46369 - RNA, 22 nt, Homo sapiens
uugagcaccaugccuggccaug

SEQ ID NO: 46370 - RNA, 22 nt, Homo sapiens
uugagauguggcaguuuaugag

SEQ ID NO: 46371 - RNA, 22 nt, Homo sapiens
uugagauggauagacauagcau

SEQ ID NO: 46372 - RNA, 22 nt, Homo sapiens
uugauguugaggacauaaaccu

SEQ ID NO: 46373 - RNA, 22 nt, Homo sapiens
uugcaacuuagaaaaaucauuu

SEQ ID NO: 46374 - RNA, 22 nt, Homo sapiens
uugcaagaaaugcagauucuca

SEQ ID NO: 46375 - RNA, 22 nt, Homo sapiens
uugcacauggcaggugcucaau

SEQ ID NO: 46376 - RNA, 22 nt, Homo sapiens
uugcagagucaguuauuuugcc

SEQ ID NO: 46377 - RNA, 22 nt, Homo sapiens
uugcagaucccacacucacccu

SEQ ID NO: 46378 - RNA, 22 nt, Homo sapiens
ugucuugagagaggacaugacu

SEQ ID NO: 46379 - RNA, 22 nt, Homo sapiens
ugucuguuugcgaaauugcuuc

SEQ ID NO: 46380 - RNA, 20 nt, Homo sapiens
ugucuauggggguucucugc

SEQ ID NO: 46381 - RNA, 19 nt, Homo sapiens
ugugacugguugucucgcu

SEQ ID NO: 46382 - RNA, 22 nt, Homo sapiens
ugugacugguugucccgcuuuc

SEQ ID NO: 46383 - RNA, 22 nt, Homo sapiens
ugugagacugguucugaaccca

SEQ ID NO: 46384 - RNA, 22 nt, Homo sapiens
ugugaucaugguauuaaucugc

SEQ ID NO: 46385 - RNA, 22 nt, Homo sapiens
ugugaucauuucaggaauuuug

SEQ ID NO: 46386 - RNA, 22 nt, Homo sapiens
ugugaugauuugauaaacguau

SEQ ID NO: 46387 - RNA, 22 nt, Homo sapiens
ugugauuauuuaaauaggacag

SEQ ID NO: 46388 - RNA, 22 nt, Homo sapiens
ugucacguugcuuuucuguugu

SEQ ID NO: 46389 - RNA, 22 nt, Homo sapiens
ugucagaaucugagacgacaac

SEQ ID NO: 46390 - RNA, 22 nt, Homo sapiens
ugucaggaggguccagagaaaa

SEQ ID NO: 46391 - RNA, 22 nt, Homo sapiens
uguauuuguuguuaaauggaga

SEQ ID NO: 46392 - RNA, 22 nt, Homo sapiens
uguauguugggucaaaguacau

SEQ ID NO: 46393 - RNA, 22 nt, Homo sapiens
uguauguugauguuauauucug

SEQ ID NO: 46394 - RNA, 20 nt, Homo sapiens
ugucaagaaacauuacuuau

SEQ ID NO: 46395 - RNA, 22 nt, Homo sapiens
uguagcuuuugagauuuauauu

SEQ ID NO: 46396 - RNA, 22 nt, Homo sapiens
uguagucauuccuuuuugcuuu

SEQ ID NO: 46397 - RNA, 21 nt, Homo sapiens
uguauauguuuauacacacac

SEQ ID NO: 46398 - RNA, 22 nt, Homo sapiens
uguauacauauguauguuuugu

SEQ ID NO: 46399 - RNA, 22 nt, Homo sapiens
uguaaacuaugagcugauuauu

SEQ ID NO: 46400 - RNA, 22 nt, Homo sapiens
uguaacaguaguuacuauucuu

SEQ ID NO: 46401 - RNA, 22 nt, Homo sapiens
uguaaagaaagcuguuguugua

SEQ ID NO: 46402 - RNA, 22 nt, Homo sapiens
uguaagcauuauauaauuguug

SEQ ID NO: 46403 - RNA, 22 nt, Homo sapiens
uguaauaguaggcucacauuug

SEQ ID NO: 46404 - RNA, 23 nt, Homo sapiens
ugguuuguaagagauggacugga

SEQ ID NO: 46405 - RNA, 22 nt, Homo sapiens
ugguuagucuguguguauauau

SEQ ID NO: 46406 - RNA, 22 nt, Homo sapiens
ugguguuugagaagcugauguc

SEQ ID NO: 46407 - RNA, 22 nt, Homo sapiens
uggugcuuaaauaaggcuuuca

SEQ ID NO: 46408 - RNA, 22 nt, Homo sapiens
uggcuagaugagauguacugca

SEQ ID NO: 46409 - RNA, 23 nt, Homo sapiens
uggcuagacguccuuuccugaug

SEQ ID NO: 46410 - RNA, 22 nt, Homo sapiens
uggcggagacauggacuucaga

SEQ ID NO: 46411 - RNA, 20 nt, Homo sapiens
uggcuaaaugaaugauagca

SEQ ID NO: 46412 - RNA, 21 nt, Homo sapiens
uuauaguggcaugauuuauaa

SEQ ID NO: 46413 - RNA, 22 nt, Homo sapiens
uuauagacacguuguaacaaac

SEQ ID NO: 46414 - RNA, 22 nt, Homo sapiens
uuaucacauugacugauuugca

SEQ ID NO: 46415 - RNA, 22 nt, Homo sapiens
uuaucagcagcaugaaaauaga

SEQ ID NO: 46416 - RNA, 22 nt, Homo sapiens
uuagcaauugauucucauaagc

SEQ ID NO: 46417 - RNA, 22 nt, Homo sapiens
uuagcacaucuuucuauguaag

SEQ ID NO: 46418 - RNA, 22 nt, Homo sapiens
uuagaguguagcaggaagaggc

SEQ ID NO: 46419 - RNA, 23 nt, Homo sapiens
uuagaucuuuaaggaaucuccac

SEQ ID NO: 46420 - RNA, 21 nt, Homo sapiens
uuagccuguaagcacuuugca

SEQ ID NO: 46421 - RNA, 21 nt, Homo sapiens
uuaggcagugucagaggugag

SEQ ID NO: 46422 - RNA, 22 nt, Homo sapiens
uuagcagcucuggugacaaggu

SEQ ID NO: 46423 - RNA, 22 nt, Homo sapiens
uucaccagggaagucucaacuc

SEQ ID NO: 46424 - RNA, 16 nt, Homo sapiens
uucacauggcagcagg

SEQ ID NO: 46425 - RNA, 22 nt, Homo sapiens
uucacaugguugccuuuugauc

SEQ ID NO: 46426 - RNA, 17 nt, Homo sapiens
uuauugcuauaagcuga

SEQ ID NO: 46427 - RNA, 22 nt, Homo sapiens
uucacagcuuaauaaggcucag

SEQ ID NO: 46428 - RNA, 22 nt, Homo sapiens
uuauugcuaaaucaugaccaca

SEQ ID NO: 46429 - RNA, 22 nt, Homo sapiens
uucacugagccagacuaagaca

SEQ ID NO: 46430 - RNA, 22 nt, Homo sapiens
uucaccuugggucccacuugcu

SEQ ID NO: 46431 - RNA, 20 nt, Homo sapiens
uucacggaggccgcgccccc

SEQ ID NO: 46432 - RNA, 22 nt, Homo sapiens
uucacugugaacucauauucag

SEQ ID NO: 46433 - RNA, 22 nt, Homo sapiens
uucacuguagccucagccucuu

SEQ ID NO: 46434 - RNA, 22 nt, Homo sapiens
uuauggauuuauauucuguagu

SEQ ID NO: 46435 - RNA, 22 nt, Homo sapiens
uuauggcuauugaugacaauug

SEQ ID NO: 46436 - RNA, 22 nt, Homo sapiens
uuauggcuuugcgguguuagca

SEQ ID NO: 46437 - RNA, 22 nt, Homo sapiens
uuaugguuuauuagcaggguua

SEQ ID NO: 46438 - RNA, 22 nt, Homo sapiens
uuaugucacuguucagucuccc

SEQ ID NO: 46439 - RNA, 22 nt, Homo sapiens
uuaugucuuugagcaaugcugu

SEQ ID NO: 46440 - RNA, 22 nt, Homo sapiens
uuaugugccuuuuugccauuca

SEQ ID NO: 46441 - RNA, 22 nt, Homo sapiens
ugugccacuccagcucuagcuu

SEQ ID NO: 46442 - RNA, 22 nt, Homo sapiens
ugugcacaugauauaucacaua

SEQ ID NO: 46443 - RNA, 22 nt, Homo sapiens
uguguaaauaugauagaggaau

SEQ ID NO: 46444 - RNA, 22 nt, Homo sapiens
uguguaaauauauacacacgug

SEQ ID NO: 46445 - RNA, 22 nt, Homo sapiens
ugugguuuuuuucuccaauagg

SEQ ID NO: 46446 - RNA, 22 nt, Homo sapiens
uuaauagcaaagaguuuagacu

SEQ ID NO: 46447 - RNA, 22 nt, Homo sapiens
uuaauagugacucauuuuccac

SEQ ID NO: 46448 - RNA, 22 nt, Homo sapiens
uuaaucugucuaugauuuuggu

SEQ ID NO: 46449 - RNA, 22 nt, Homo sapiens
uuaauguaauugauugauugac

SEQ ID NO: 46450 - RNA, 22 nt, Homo sapiens
uuaaugaacuuuauuuuguaga

SEQ ID NO: 46451 - RNA, 21 nt, Homo sapiens
uuaaguaauuacccaacucuc

SEQ ID NO: 46452 - RNA, 22 nt, Homo sapiens
uuaagguaugugggcauuuugu

SEQ ID NO: 46453 - RNA, 22 nt, Homo sapiens
uuaaguaaucagagaagagaac

SEQ ID NO: 46454 - RNA, 19 nt, Homo sapiens
uuaagguacuuagaugugu

SEQ ID NO: 46455 - RNA, 22 nt, Homo sapiens
uuaaguuguagcuacaaauaca

SEQ ID NO: 46456 - RNA, 22 nt, Homo sapiens
uuaauaccgucacauggcugaa

SEQ ID NO: 46457 - RNA, 22 nt, Homo sapiens
uuaccugagaaggugacauuug

SEQ ID NO: 46458 - RNA, 22 nt, Homo sapiens
uuacuugagauggggugucacu

SEQ ID NO: 46459 - RNA, 22 nt, Homo sapiens
uuagaauggaaaugcgagguua

SEQ ID NO: 46460 - RNA, 22 nt, Homo sapiens
guggaaaacauaugcuuguuga

SEQ ID NO: 46461 - RNA, 22 nt, Homo sapiens
gugcauacucuggagacauugu

SEQ ID NO: 46462 - RNA, 22 nt, Homo sapiens
gugcauauaaguuguuucuagu

SEQ ID NO: 46463 - RNA, 22 nt, Homo sapiens
gugcaguuugaaaguagaaaca

SEQ ID NO: 46464 - RNA, 22 nt, Homo sapiens
gugggauggaaaugggcuucag

SEQ ID NO: 46465 - RNA, 22 nt, Homo sapiens
gugggagugucccguuuuucca

SEQ ID NO: 46466 - RNA, 22 nt, Homo sapiens
guggaaaaguaguugcgguuuu

SEQ ID NO: 46467 - RNA, 22 nt, Homo sapiens
guggaaaauuauugcuguuuuu

SEQ ID NO: 46468 - RNA, 22 nt, Homo sapiens
guggcuaaagauuuggaaucug

SEQ ID NO: 46469 - RNA, 22 nt, Homo sapiens
gugacgucauuguuccuggcuc

SEQ ID NO: 46470 - RNA, 22 nt, Homo sapiens
gugagacugaguuucgcucuug

SEQ ID NO: 46471 - RNA, 22 nt, Homo sapiens
gugacaucagcuccagguauaa

SEQ ID NO: 46472 - RNA, 22 nt, Homo sapiens
gugacauuauuucagcuacaug

SEQ ID NO: 46473 - RNA, 22 nt, Homo sapiens
gugaauugagagaacuguguua

SEQ ID NO: 46474 - RNA, 22 nt, Homo sapiens
gugaaucauaugccagucaugc

SEQ ID NO: 46475 - RNA, 22 nt, Homo sapiens
gugauuuaguagaugcuaguua

SEQ ID NO: 46476 - RNA, 22 nt, Homo sapiens
gugauuguuaaacugccucucu

SEQ ID NO: 46477 - RNA, 22 nt, Homo sapiens
gugauugugaaaacauuaagaa

SEQ ID NO: 46478 - RNA, 22 nt, Homo sapiens
gugcaaaucucugaguaucuuu

SEQ ID NO: 46479 - RNA, 22 nt, Homo sapiens
gugcacauuguuuaugucuguu

SEQ ID NO: 46480 - RNA, 22 nt, Homo sapiens
guagaagcacaggugaguuggu

SEQ ID NO: 46481 - RNA, 22 nt, Homo sapiens
guacaguuuucaguguucacug

SEQ ID NO: 46482 - RNA, 22 nt, Homo sapiens
guaaucucaccuacuugggagg

SEQ ID NO: 46483 - RNA, 22 nt, Homo sapiens
guaaucucagcuacucaggagg

SEQ ID NO: 46484 - RNA, 22 nt, Homo sapiens
guaaucucagcuacuugggagg

SEQ ID NO: 46485 - RNA, 22 nt, Homo sapiens
guaaucucagcuucuugggagg

SEQ ID NO: 46486 - RNA, 22 nt, Homo sapiens
guacacaacaugcagguuuguu

SEQ ID NO: 46487 - RNA, 22 nt, Homo sapiens
guaaugcacucccaaagaucca

SEQ ID NO: 46488 - RNA, 22 nt, Homo sapiens
gucagugauugauuuaaagacg

SEQ ID NO: 46489 - RNA, 22 nt, Homo sapiens
gucaguucuugugguugcauuc

SEQ ID NO: 46490 - RNA, 18 nt, Homo sapiens
gucauagaaugaugguuc

SEQ ID NO: 46491 - RNA, 21 nt, Homo sapiens
gucauaugucucugauuagug

SEQ ID NO: 46492 - RNA, 22 nt, Homo sapiens
gucugcaugucauaugauagua

SEQ ID NO: 46493 - RNA, 22 nt, Homo sapiens
gucauugcuuaucugcugacgu

SEQ ID NO: 46494 - RNA, 22 nt, Homo sapiens
gucuggcuccuucuacuacaug

SEQ ID NO: 46495 - RNA, 22 nt, Homo sapiens
gucugguugacagcauguggcc

SEQ ID NO: 46496 - RNA, 21 nt, Homo sapiens
gucuuacagccagaugccucu

SEQ ID NO: 46497 - RNA, 22 nt, Homo sapiens
gucuuagguuuaaucacuucua

SEQ ID NO: 46498 - RNA, 22 nt, Homo sapiens
gucuuuguuuggucuguaucag

SEQ ID NO: 46499 - RNA, 22 nt, Homo sapiens
gucuuuguuauuaugaaucaac

SEQ ID NO: 46500 - RNA, 22 nt, Homo sapiens
gucuuuggaaaaaaugucuguu

SEQ ID NO: 46501 - RNA, 22 nt, Homo sapiens
gucuuugcauguauguucauga

SEQ ID NO: 46502 - RNA, 22 nt, Homo sapiens
gugaaaugaaucuggaaauauu

SEQ ID NO: 46503 - RNA, 22 nt, Homo sapiens
gugaaauguguagaggaucugg

SEQ ID NO: 46504 - RNA, 22 nt, Homo sapiens
gugaaaugaaacgcuaugucuu

SEQ ID NO: 46505 - RNA, 22 nt, Homo sapiens
gugaaagauuaaaccagugugu

SEQ ID NO: 46506 - RNA, 22 nt, Homo sapiens
gugaaagcaucugacugugcca

SEQ ID NO: 46507 - RNA, 22 nt, Homo sapiens
gugaagaucccuguccuguucc

SEQ ID NO: 46508 - RNA, 22 nt, Homo sapiens
gugaacaagcaaaggcaggagg

SEQ ID NO: 46509 - RNA, 22 nt, Homo sapiens
gggauguaugauauauguuggu

SEQ ID NO: 46510 - RNA, 22 nt, Homo sapiens
gggauguuuuauacugagccug

SEQ ID NO: 46511 - RNA, 22 nt, Homo sapiens
ggcugguuuucaguuacugagu

SEQ ID NO: 46512 - RNA, 22 nt, Homo sapiens
ggcuuuggucacacaggggcaa

SEQ ID NO: 46513 - RNA, 18 nt, Homo sapiens
ggcugguguuuuaguaua

SEQ ID NO: 46514 - RNA, 21 nt, Homo sapiens
ggugagaaaggagacauagac

SEQ ID NO: 46515 - RNA, 22 nt, Homo sapiens
ggucauggagcuuuacuuuaug

SEQ ID NO: 46516 - RNA, 20 nt, Homo sapiens
ggcaagguagcauuucuucu

SEQ ID NO: 46517 - RNA, 22 nt, Homo sapiens
ggcaccauggaaggacgggagc

SEQ ID NO: 46518 - RNA, 22 nt, Homo sapiens
ggaguaaaagaguaggaggaau

SEQ ID NO: 46519 - RNA, 22 nt, Homo sapiens
ggagucugauuuuuauguugcu

SEQ ID NO: 46520 - RNA, 22 nt, Homo sapiens
ggagucuugcuauguugccaag

SEQ ID NO: 46521 - RNA, 22 nt, Homo sapiens
gcugcuguuauucaucagaacu

SEQ ID NO: 46522 - RNA, 19 nt, Homo sapiens
gcugauguuacauucuugc

SEQ ID NO: 46523 - RNA, 22 nt, Homo sapiens
gcugcuguggcagauuggauuc

SEQ ID NO: 46524 - RNA, 16 nt, Homo sapiens
gcucuuguucucuguu

SEQ ID NO: 46525 - RNA, 22 nt, Homo sapiens
gcugugauucuguguagauagu

SEQ ID NO: 46526 - RNA, 18 nt, Homo sapiens
gcuguugucagagcacau

SEQ ID NO: 46527 - RNA, 22 nt, Homo sapiens
gcuguuugccgccaucgcagac

SEQ ID NO: 46528 - RNA, 22 nt, Homo sapiens
gcuuuggauaaaugucaguuua

SEQ ID NO: 46529 - RNA, 22 nt, Homo sapiens
ggacuagggacauggggagcug

SEQ ID NO: 46530 - RNA, 22 nt, Homo sapiens
gcuuuggcauguagauguaugg

SEQ ID NO: 46531 - RNA, 22 nt, Homo sapiens
gcuaaggcaggagcauugcuug

SEQ ID NO: 46532 - RNA, 22 nt, Homo sapiens
gcacgugcucauuugaggucuu

SEQ ID NO: 46533 - RNA, 22 nt, Homo sapiens
gcaauacugacagcauuaguuu

SEQ ID NO: 46534 - RNA, 22 nt, Homo sapiens
gcaagugucugagguuuuguau

SEQ ID NO: 46535 - RNA, 22 nt, Homo sapiens
gcugcuguaccagaugugguua

SEQ ID NO: 46536 - RNA, 22 nt, Homo sapiens
gcugagaucucuugccugaacu

SEQ ID NO: 46537 - RNA, 22 nt, Homo sapiens
gcucaugggcagugugauuguu

SEQ ID NO: 46538 - RNA, 22 nt, Homo sapiens
gcacauggccacuaggaauaaa

SEQ ID NO: 46539 - RNA, 22 nt, Homo sapiens
gcuccuuugaguagcuucugug

SEQ ID NO: 46540 - RNA, 22 nt, Homo sapiens
uaaagccuagaacuuucagccc

SEQ ID NO: 46541 - RNA, 22 nt, Homo sapiens
guuuuuggggucacuauuaccg

SEQ ID NO: 46542 - RNA, 22 nt, Homo sapiens
uaacauugucuugcuuaguuuu

SEQ ID NO: 46543 - RNA, 22 nt, Homo sapiens
uaacauuguugauuauacuaag

SEQ ID NO: 46544 - RNA, 23 nt, Homo sapiens
uaacauugcaugauuaccugcau

SEQ ID NO: 46545 - RNA, 22 nt, Homo sapiens
uaacauugcuggacuaccugcu

SEQ ID NO: 46546 - RNA, 22 nt, Homo sapiens
uaacugcaaccuccgccucccg

SEQ ID NO: 46547 - RNA, 22 nt, Homo sapiens
uaagacucuggacucuaauguu

SEQ ID NO: 46548 - RNA, 22 nt, Homo sapiens
uaacuucaucauaagucaagaa

SEQ ID NO: 46549 - RNA, 22 nt, Homo sapiens
uaagacugccccagacagcaag

SEQ ID NO: 46550 - RNA, 22 nt, Homo sapiens
gugguuuuuuucugccuuauag

SEQ ID NO: 46551 - RNA, 22 nt, Homo sapiens
guguaaaucaaucuguugucuu

SEQ ID NO: 46552 - RNA, 22 nt, Homo sapiens
guguaacaacagcacuccacug

SEQ ID NO: 46553 - RNA, 22 nt, Homo sapiens
gugguucuagagggacagaaug

SEQ ID NO: 46554 - RNA, 22 nt, Homo sapiens
guuguggagucuucuguucugg

SEQ ID NO: 46555 - RNA, 22 nt, Homo sapiens
guuggucucguauaaaucaagg

SEQ ID NO: 46556 - RNA, 22 nt, Homo sapiens
guuugccuuuuagauaggaaug

SEQ ID NO: 46557 - RNA, 22 nt, Homo sapiens
guuugcauagugcugggagggg

SEQ ID NO: 46558 - RNA, 17 nt, Homo sapiens
guuuggguacuggguaa

SEQ ID NO: 46559 - RNA, 22 nt, Homo sapiens
guuuggauuuucuaauuucugu

SEQ ID NO: 46560 - RNA, 22 nt, Homo sapiens
guuggaguuaagcaguaaugaa

SEQ ID NO: 46561 - RNA, 22 nt, Homo sapiens
guugcugagucccaucaccaga

SEQ ID NO: 46562 - RNA, 22 nt, Homo sapiens
uacauugucauauucucucucu

SEQ ID NO: 46563 - RNA, 22 nt, Homo sapiens
uaccacagucauuacacuugua

SEQ ID NO: 46564 - RNA, 22 nt, Homo sapiens
uacccuguaaucugaaacauga

SEQ ID NO: 46565 - RNA, 22 nt, Homo sapiens
uaccuaguaggagggaggugga

SEQ ID NO: 46566 - RNA, 20 nt, Homo sapiens
uacugcacuuuccucauggu

SEQ ID NO: 46567 - RNA, 22 nt, Homo sapiens
uacugcuuaaaagucaauuacu

SEQ ID NO: 46568 - RNA, 22 nt, Homo sapiens
uacuuagagauuccaggaacuc

SEQ ID NO: 46569 - RNA, 22 nt, Homo sapiens
uagaaagcaugaccuucagaua

SEQ ID NO: 46570 - RNA, 22 nt, Homo sapiens
uaagcagugcaagaauggaaua

SEQ ID NO: 46571 - RNA, 22 nt, Homo sapiens
uaagccuaggucugugcucuuc

SEQ ID NO: 46572 - RNA, 22 nt, Homo sapiens
uaagugcaugauuacaugcaua

SEQ ID NO: 46573 - RNA, 22 nt, Homo sapiens
uaagugaauguuggcuacugaa

SEQ ID NO: 46574 - RNA, 22 nt, Homo sapiens
uaauacugcugugcuugaguug

SEQ ID NO: 46575 - RNA, 22 nt, Homo sapiens
uaaguuguagaacguuuucuua

SEQ ID NO: 46576 - RNA, 20 nt, Homo sapiens
uaagugcuugagacuucuga

SEQ ID NO: 46577 - RNA, 20 nt, Homo sapiens
uaagugcuuuauauugauua

SEQ ID NO: 46578 - RNA, 22 nt, Homo sapiens
uacagucuagaggagaaucagg

SEQ ID NO: 46579 - RNA, 22 nt, Homo sapiens
uaauaguuggcacuggagaaag

SEQ ID NO: 46580 - RNA, 22 nt, Homo sapiens
uaauagcucggauaaacaugau

SEQ ID NO: 46581 - RNA, 22 nt, Homo sapiens
uacaguacagugacaccauuau

SEQ ID NO: 46582 - RNA, 22 nt, Homo sapiens
uacaggauagacaauuuauuaa

SEQ ID NO: 46583 - RNA, 22 nt, Homo sapiens
uauuccauuugggucaggauga

SEQ ID NO: 46584 - RNA, 22 nt, Homo sapiens
uauugauuaauugugauuaggc

SEQ ID NO: 46585 - RNA, 22 nt, Homo sapiens
uauugauuuucaguguucagcu

SEQ ID NO: 46586 - RNA, 22 nt, Homo sapiens
uauugacuugagaagggauuag

SEQ ID NO: 46587 - RNA, 22 nt, Homo sapiens
uauucaucuuaagcuuuggcuu

SEQ ID NO: 46588 - RNA, 22 nt, Homo sapiens
uauggguuucagagggugauag

SEQ ID NO: 46589 - RNA, 22 nt, Homo sapiens
uauggcugugacuuaucuuguu

SEQ ID NO: 46590 - RNA, 22 nt, Homo sapiens
uauggccugaauuagaaaagug

SEQ ID NO: 46591 - RNA, 22 nt, Homo sapiens
uauggcguaugaauuauaucuc

SEQ ID NO: 46592 - RNA, 22 nt, Homo sapiens
uauggauuuuuuugacaagagc

SEQ ID NO: 46593 - RNA, 22 nt, Homo sapiens
uaugaaucugagagaucuggaa

SEQ ID NO: 46594 - RNA, 20 nt, Homo sapiens
uaucacaguucaggaacucu

SEQ ID NO: 46595 - RNA, 22 nt, Homo sapiens
uaucucagaguguacaagauua

SEQ ID NO: 46596 - RNA, 22 nt, Homo sapiens
uaucucagaugagacuuguaac

SEQ ID NO: 46597 - RNA, 23 nt, Homo sapiens
uauaugugucuaggagcuauggu

SEQ ID NO: 46598 - RNA, 22 nt, Homo sapiens
uauauguucugugucccuuucg

SEQ ID NO: 46599 - RNA, 22 nt, Homo sapiens
uauacugucuuuguaugccuag

SEQ ID NO: 46600 - RNA, 22 nt, Homo sapiens
uauagcaaugccccacuccuga

SEQ ID NO: 46601 - RNA, 22 nt, Homo sapiens
uauaacacccacauauagucuu

SEQ ID NO: 46602 - RNA, 22 nt, Homo sapiens
uaucaagaugacaaacuuugcu

SEQ ID NO: 46603 - RNA, 22 nt, Homo sapiens
uaggcauuuuucugauaaacua

SEQ ID NO: 46604 - RNA, 22 nt, Homo sapiens
uagaaucuaacucgcaugaaaa

SEQ ID NO: 46605 - RNA, 22 nt, Homo sapiens
uagaauggaagguugagaagaa

SEQ ID NO: 46606 - RNA, 22 nt, Homo sapiens
uagaauguaaauuccaagggca

SEQ ID NO: 46607 - RNA, 22 nt, Homo sapiens
uagcagucucagaaugcauggu

SEQ ID NO: 46608 - RNA, 22 nt, Homo sapiens
uagcagucuguuaaaacuuuua

SEQ ID NO: 46609 - RNA, 22 nt, Homo sapiens
uagcugaucuuuuaaagaauga

SEQ ID NO: 46610 - RNA, 21 nt, Homo sapiens
uagcuacacugugauucaugg

SEQ ID NO: 46611 - RNA, 22 nt, Homo sapiens
uagguugucuguucacucugau

SEQ ID NO: 46612 - RNA, 22 nt, Homo sapiens
uaggugauugaagguggaaugu

SEQ ID NO: 46613 - RNA, 22 nt, Homo sapiens
uaguucauuauguguugcucag

SEQ ID NO: 46614 - RNA, 22 nt, Homo sapiens
uaguuuaucuucuggauggaca

SEQ ID NO: 46615 - RNA, 22 nt, Homo sapiens
uaguuguugcagguaggaugua

SEQ ID NO: 46616 - RNA, 22 nt, Homo sapiens
uagguagauuuaaagauuuucu

SEQ ID NO: 46617 - RNA, 22 nt, Homo sapiens
uaggcacugagaauaugaggau

SEQ ID NO: 46618 - RNA, 22 nt, Homo sapiens
uaggcgagauguguguuucaug

SEQ ID NO: 46619 - RNA, 22 nt, Homo sapiens
uaggguaguaauaguuguuuca

SEQ ID NO: 46620 - RNA, 19 nt, Homo sapiens
ugagauccacugaagauuc

SEQ ID NO: 46621 - RNA, 22 nt, Homo sapiens
ugagaugaaagcagaaagacuu

SEQ ID NO: 46622 - RNA, 22 nt, Homo sapiens
ugagaugaacuugauuguuuua

SEQ ID NO: 46623 - RNA, 22 nt, Homo sapiens
ugagaucuguaaagucugacau

SEQ ID NO: 46624 - RNA, 22 nt, Homo sapiens
ugagaucaguuguuauaauucu

SEQ ID NO: 46625 - RNA, 22 nt, Homo sapiens
ugagauauugggaguaauguca

SEQ ID NO: 46626 - RNA, 18 nt, Homo sapiens
ugagaucagcaucaaggg

SEQ ID NO: 46627 - RNA, 22 nt, Homo sapiens
ugagauaaucaugugauuucau

SEQ ID NO: 46628 - RNA, 21 nt, Homo sapiens
ugagauaauauguuucugaug

SEQ ID NO: 46629 - RNA, 22 nt, Homo sapiens
ugagauguagauauggauuaga

SEQ ID NO: 46630 - RNA, 22 nt, Homo sapiens
ugagaugaguugcuggcucuga

SEQ ID NO: 46631 - RNA, 22 nt, Homo sapiens
ugagaugauaucuuauuguaau

SEQ ID NO: 46632 - RNA, 22 nt, Homo sapiens
ugagaugaguugcgcucugucg

SEQ ID NO: 46633 - RNA, 22 nt, Homo sapiens
ugagaugagucucgcucuguca

SEQ ID NO: 46634 - RNA, 22 nt, Homo sapiens
ugagaugagaaucaguucuaau

SEQ ID NO: 46635 - RNA, 22 nt, Homo sapiens
ugagaugaagcuagaagaaugg

SEQ ID NO: 46636 - RNA, 22 nt, Homo sapiens
ugagaucugucuuuauaguauu

SEQ ID NO: 46637 - RNA, 22 nt, Homo sapiens
ugagauaaagcauguacugugu

SEQ ID NO: 46638 - RNA, 22 nt, Homo sapiens
ugagauaacuaaaaacauuuug

SEQ ID NO: 46639 - RNA, 22 nt, Homo sapiens
ugagagacagacauuaucuuau

SEQ ID NO: 46640 - RNA, 22 nt, Homo sapiens
ugacaagugauuaaggcauauu

SEQ ID NO: 46641 - RNA, 22 nt, Homo sapiens
ugacaagauauggucuuaucaa

SEQ ID NO: 46642 - RNA, 22 nt, Homo sapiens
ugacaagaacuuuccauaguaa

SEQ ID NO: 46643 - RNA, 22 nt, Homo sapiens
ugacacauguagacaucuggug

SEQ ID NO: 46644 - RNA, 22 nt, Homo sapiens
ugagauuaucuugaucuugaaa

SEQ ID NO: 46645 - RNA, 23 nt, Homo sapiens
ugagguguuaagcagacuugucu

SEQ ID NO: 46646 - RNA, 22 nt, Homo sapiens
ugagguguauugggggaaauuc

SEQ ID NO: 46647 - RNA, 20 nt, Homo sapiens
ugagauuggugugguauaag

SEQ ID NO: 46648 - RNA, 22 nt, Homo sapiens
ugagauguuccaaugacuauua

SEQ ID NO: 46649 - RNA, 22 nt, Homo sapiens
ugagauguuuagauuguugucu

SEQ ID NO: 46650 - RNA, 22 nt, Homo sapiens
ugagauguguccagaucuaguu

SEQ ID NO: 46651 - RNA, 22 nt, Homo sapiens
ugagauguggcuagagagguug

SEQ ID NO: 46652 - RNA, 23 nt, Homo sapiens
ugagaugucugauugcgaggguc

SEQ ID NO: 46653 - RNA, 21 nt, Homo sapiens
ugagaugugaccagggcauca

SEQ ID NO: 46654 - RNA, 19 nt, Homo sapiens
ugaguaucuuuacacaucu

SEQ ID NO: 46655 - RNA, 22 nt, Homo sapiens
ugaguagauccaagacuguccu

SEQ ID NO: 46656 - RNA, 20 nt, Homo sapiens
ugaguagaggaguucuauca

SEQ ID NO: 46657 - RNA, 22 nt, Homo sapiens
ugagguugaaggacauuuuuau

SEQ ID NO: 46658 - RNA, 22 nt, Homo sapiens
ugagguuauuuguucaagaagu

SEQ ID NO: 46659 - RNA, 22 nt, Homo sapiens
ugauauguuagaaucuugcaag

SEQ ID NO: 46660 - RNA, 17 nt, Homo sapiens
ugauauuuucccagaua

SEQ ID NO: 46661 - RNA, 20 nt, Homo sapiens
ugauauuuucugagcaggaa

SEQ ID NO: 46662 - RNA, 21 nt, Homo sapiens
ugauaugguuuggauaugugu

SEQ ID NO: 46663 - RNA, 22 nt, Homo sapiens
ugauaugugaguauaugguuau

SEQ ID NO: 46664 - RNA, 18 nt, Homo sapiens
ugauaugguuuggcucug

SEQ ID NO: 46665 - RNA, 22 nt, Homo sapiens
ugauuagagcccaagcuuugaa

SEQ ID NO: 46666 - RNA, 22 nt, Homo sapiens
ugauguugacuguaggcagaga

SEQ ID NO: 46667 - RNA, 21 nt, Homo sapiens
ugauguugaccuaaguaguga

SEQ ID NO: 46668 - RNA, 21 nt, Homo sapiens
ugaucacaugaaaaccaugca

SEQ ID NO: 46669 - RNA, 22 nt, Homo sapiens
ugagugagguucuacucuguga

SEQ ID NO: 46670 - RNA, 22 nt, Homo sapiens
ugagucuguucucacauugcua

SEQ ID NO: 46671 - RNA, 22 nt, Homo sapiens
ugagucauuuccuuaugcuacu

SEQ ID NO: 46672 - RNA, 22 nt, Homo sapiens
ugagucaugcuggagucauggc

SEQ ID NO: 46673 - RNA, 22 nt, Homo sapiens
ugaguuaauuuuuguaucaugu

SEQ ID NO: 46674 - RNA, 22 nt, Homo sapiens
ugagugugaggaagaauuagaa

SEQ ID NO: 46675 - RNA, 22 nt, Homo sapiens
ugauauggcuuggcuaugucac

SEQ ID NO: 46676 - RNA, 23 nt, Homo sapiens
ugauaugccuaggaguauauuuu

SEQ ID NO: 46677 - RNA, 22 nt, Homo sapiens
ugaguucaauuguauuuuauua

SEQ ID NO: 46678 - RNA, 18 nt, Homo sapiens
ugaguucauuagacuucc

SEQ ID NO: 46679 - RNA, 20 nt, Homo sapiens
ugcauguccucacuuacuug

SEQ ID NO: 46680 - RNA, 17 nt, Homo sapiens
ugcaauuuaagcuagau

SEQ ID NO: 46681 - RNA, 22 nt, Homo sapiens
ugcaagacaucguauuuugguc

SEQ ID NO: 46682 - RNA, 22 nt, Homo sapiens
ugcaaauguuaggugucauuau

SEQ ID NO: 46683 - RNA, 22 nt, Homo sapiens
ugcaaauguuaguaacaccacu

SEQ ID NO: 46684 - RNA, 22 nt, Homo sapiens
ugcaaauuauugggccccaacu

SEQ ID NO: 46685 - RNA, 19 nt, Homo sapiens
ugcaaauucuaaaaacuga

SEQ ID NO: 46686 - RNA, 22 nt, Homo sapiens
ugauucccucaagugccuuaug

SEQ ID NO: 46687 - RNA, 22 nt, Homo sapiens
ugaucucagcucacugguugaa

SEQ ID NO: 46688 - RNA, 22 nt, Homo sapiens
ugauuugucucucagcccuacu

SEQ ID NO: 46689 - RNA, 22 nt, Homo sapiens
ugauuggagaugaauuucguuu

SEQ ID NO: 46690 - RNA, 19 nt, Homo sapiens
ugauuguaagcuuggugag

SEQ ID NO: 46691 - RNA, 22 nt, Homo sapiens
ugauuuccaugagaacaugccu

SEQ ID NO: 46692 - RNA, 22 nt, Homo sapiens
ugauuuguccauguggcacgug

SEQ ID NO: 46693 - RNA, 22 nt, Homo sapiens
ugcgauaguuugcugguaaauu

SEQ ID NO: 46694 - RNA, 22 nt, Homo sapiens
ugccaaggagucagucccuaga

SEQ ID NO: 46695 - RNA, 22 nt, Homo sapiens
ugcauuguuuagaaacacuggg

SEQ ID NO: 46696 - RNA, 22 nt, Homo sapiens
ugcauuagucuguucucacacu

SEQ ID NO: 46697 - RNA, 22 nt, Homo sapiens
ugcauugccgugauuacugucu

SEQ ID NO: 46698 - RNA, 22 nt, Homo sapiens
ugcauuguuccgaauguguccu

SEQ ID NO: 46699 - RNA, 22 nt, Homo sapiens
ugcuaugucuucucucacagag

SEQ ID NO: 46700 - RNA, 23 nt, Homo sapiens
ugcuauguaagcauuuauuaaau

SEQ ID NO: 46701 - RNA, 22 nt, Homo sapiens
ugcgauuauuaugucacuuccu

SEQ ID NO: 46702 - RNA, 22 nt, Homo sapiens
ugcuauguccccacccaaaucu

SEQ ID NO: 46703 - RNA, 22 nt, Homo sapiens
uggaaguauagauaauugaaag

SEQ ID NO: 46704 - RNA, 22 nt, Homo sapiens
uggaaguagauagauuguguca

SEQ ID NO: 46705 - RNA, 22 nt, Homo sapiens
uggaaguuaaaugacucuuucu

SEQ ID NO: 46706 - RNA, 20 nt, Homo sapiens
uggaaucugaagaucucagu

SEQ ID NO: 46707 - RNA, 22 nt, Homo sapiens
uggaaucaucaacgaaugaaau

SEQ ID NO: 46708 - RNA, 22 nt, Homo sapiens
uggaauuaauuaaaauauacug

SEQ ID NO: 46709 - RNA, 22 nt, Homo sapiens
uggaauguaacuugaaacuuuu

SEQ ID NO: 46710 - RNA, 22 nt, Homo sapiens
uggaauguggacucuuaugggg

SEQ ID NO: 46711 - RNA, 22 nt, Homo sapiens
ugcuuguguucagguaaccuuu

SEQ ID NO: 46712 - RNA, 22 nt, Homo sapiens
uggaaggucauuguucauuuga

SEQ ID NO: 46713 - RNA, 22 nt, Homo sapiens
ugcuguguugcuggcuuaaaga

SEQ ID NO: 46714 - RNA, 22 nt, Homo sapiens
ugcugguggucccauaugauua

SEQ ID NO: 46715 - RNA, 22 nt, Homo sapiens
ugcugcuguuguuguuacuagc

SEQ ID NO: 46716 - RNA, 22 nt, Homo sapiens
uggcaccugacuccgagaugca

SEQ ID NO: 46717 - RNA, 22 nt, Homo sapiens
uggauguacagucaguauuugu

SEQ ID NO: 46718 - RNA, 19 nt, Homo sapiens
uggcacauguauacauaug

SEQ ID NO: 46719 - RNA, 22 nt, Homo sapiens
uggauguaauugauucauguug

SEQ ID NO: 46720 - RNA, 22 nt, Homo sapiens
uggauggugauuggaucaugga

SEQ ID NO: 46721 - RNA, 22 nt, Homo sapiens
uggauggagaggcuugugaugc

SEQ ID NO: 46722 - RNA, 22 nt, Homo sapiens
uggauaguuuacugaagagugg

SEQ ID NO: 46723 - RNA, 22 nt, Homo sapiens
uggauagaaauguacuguuuuc

SEQ ID NO: 46724 - RNA, 22 nt, Homo sapiens
uggauagugauaagguagauga

SEQ ID NO: 46725 - RNA, 22 nt, Homo sapiens
uauugcaauuggcagagugcua

SEQ ID NO: 46726 - RNA, 22 nt, Homo sapiens
uauugacuugaugagggagggu

SEQ ID NO: 46727 - RNA, 22 nt, Homo sapiens
uauugacuuuuuuguuaggagg

SEQ ID NO: 46728 - RNA, 22 nt, Homo sapiens
uauuugguagcuauuuugcagu

SEQ ID NO: 46729 - RNA, 22 nt, Homo sapiens
ucaaaaucucuuagcugugucu

SEQ ID NO: 46730 - RNA, 22 nt, Homo sapiens
ucaaacacuccauaucgcgauu

SEQ ID NO: 46731 - RNA, 22 nt, Homo sapiens
ucacagaggagaagaccuuuaa

SEQ ID NO: 46732 - RNA, 22 nt, Homo sapiens
ucaaagacacacaaggagaagg

SEQ ID NO: 46733 - RNA, 23 nt, Homo sapiens
ucacacuuaagagaaaugcagcu

SEQ ID NO: 46734 - RNA, 22 nt, Homo sapiens
ucacacugucuugguuacucuu

SEQ ID NO: 46735 - RNA, 19 nt, Homo sapiens
ucacacuguggcuucuuua

SEQ ID NO: 46736 - RNA, 22 nt, Homo sapiens
ucacacucucaccaacauuugg

SEQ ID NO: 46737 - RNA, 22 nt, Homo sapiens
uauuuguccccuccaaaaguca

SEQ ID NO: 46738 - RNA, 22 nt, Homo sapiens
ucacauagcauaaugucugcaa

SEQ ID NO: 46739 - RNA, 22 nt, Homo sapiens
ucacauguguaaauugguguaa

SEQ ID NO: 46740 - RNA, 22 nt, Homo sapiens
ucacaugugcguuuuggcaugu

SEQ ID NO: 46741 - RNA, 22 nt, Homo sapiens
ucacaugaagauuuuaguauac

SEQ ID NO: 46742 - RNA, 22 nt, Homo sapiens
ucacauggcagagaagaagcuc

SEQ ID NO: 46743 - RNA, 22 nt, Homo sapiens
ucacugagaaugauguuucuga

SEQ ID NO: 46744 - RNA, 22 nt, Homo sapiens
ucacuuugacggccaacuucua

SEQ ID NO: 46745 - RNA, 20 nt, Homo sapiens
ucacugugaacuucuugagg

SEQ ID NO: 46746 - RNA, 22 nt, Homo sapiens
ucauccauacaguuagcaaagg

SEQ ID NO: 46747 - RNA, 22 nt, Homo sapiens
ucaucaguggggaugugguuga

SEQ ID NO: 46748 - RNA, 22 nt, Homo sapiens
ucaugacacuggcaggagcuaa

SEQ ID NO: 46749 - RNA, 22 nt, Homo sapiens
ucaugcaaugagucaggaggca

SEQ ID NO: 46750 - RNA, 22 nt, Homo sapiens
ucauguguugcacugaggaccu

SEQ ID NO: 46751 - RNA, 22 nt, Homo sapiens
ucauuagucaccuagccagcuu

SEQ ID NO: 46752 - RNA, 22 nt, Homo sapiens
uccaguuuggaggcuugaugug

SEQ ID NO: 46753 - RNA, 22 nt, Homo sapiens
ucagggacuuacaaaccagaag

SEQ ID NO: 46754 - RNA, 22 nt, Homo sapiens
ucacuuuguuuuuggauaaguu

SEQ ID NO: 46755 - RNA, 22 nt, Homo sapiens
ucaguaaaugcuguucucuuuu

SEQ ID NO: 46756 - RNA, 22 nt, Homo sapiens
ucauauugguuaaaauaguggg

SEQ ID NO: 46757 - RNA, 22 nt, Homo sapiens
ucauaugucauaguaugaucuu

SEQ ID NO: 46758 - RNA, 20 nt, Homo sapiens
ucauagcuuuuuccacuuua

SEQ ID NO: 46759 - RNA, 22 nt, Homo sapiens
ucauacuguccaauucuagugg

SEQ ID NO: 46760 - RNA, 22 nt, Homo sapiens
ucauaaaguuguuuuaauggga

SEQ ID NO: 46761 - RNA, 22 nt, Homo sapiens
ucaguuuagguguaacggccac

SEQ ID NO: 46762 - RNA, 22 nt, Homo sapiens
ucagguugcuaaguauaauauu

SEQ ID NO: 46763 - RNA, 23 nt, Homo sapiens
ucaguagucauugggaaagugug

SEQ ID NO: 46764 - RNA, 19 nt, Homo sapiens
ucugacagccccagucaac

SEQ ID NO: 46765 - RNA, 22 nt, Homo sapiens
ucucuuggcggaaguugcagug

SEQ ID NO: 46766 - RNA, 22 nt, Homo sapiens
ucucuguuugucuguuacuggu

SEQ ID NO: 46767 - RNA, 22 nt, Homo sapiens
ucucuggauaucuacuuauguu

SEQ ID NO: 46768 - RNA, 19 nt, Homo sapiens
ucucugguguuggagggga

SEQ ID NO: 46769 - RNA, 22 nt, Homo sapiens
ucucugauuaaacaagauagug

SEQ ID NO: 46770 - RNA, 23 nt, Homo sapiens
ucccaagauggaccagaccaagg

SEQ ID NO: 46771 - RNA, 21 nt, Homo sapiens
ucucauagaguuucacuuucu

SEQ ID NO: 46772 - RNA, 22 nt, Homo sapiens
ucuguacugccaaguuucuuua

SEQ ID NO: 46773 - RNA, 22 nt, Homo sapiens
ucuggguuuuguaccgugcucg

SEQ ID NO: 46774 - RNA, 22 nt, Homo sapiens
ucuggguuuuuacaauguuuac

SEQ ID NO: 46775 - RNA, 22 nt, Homo sapiens
ucugugaaugaacacuugaaaa

SEQ ID NO: 46776 - RNA, 22 nt, Homo sapiens
ucugucuuugucaggaccagag

SEQ ID NO: 46777 - RNA, 22 nt, Homo sapiens
ucugucuuugccuaaguuuguc

SEQ ID NO: 46778 - RNA, 22 nt, Homo sapiens
ucugccuacugguuggaggaac

SEQ ID NO: 46779 - RNA, 22 nt, Homo sapiens
ucuggagugugaaguggauaug

SEQ ID NO: 46780 - RNA, 22 nt, Homo sapiens
ucuggcuugugaacugucuucu

SEQ ID NO: 46781 - RNA, 23 nt, Homo sapiens
ucuggcuuugggaugcucaaggg

SEQ ID NO: 46782 - RNA, 18 nt, Homo sapiens
ucuggcuucuuuguucca

SEQ ID NO: 46783 - RNA, 22 nt, Homo sapiens
ugaauguaagaugucugcuggu

SEQ ID NO: 46784 - RNA, 22 nt, Homo sapiens
ugaauguaacuaaaccugugaa

SEQ ID NO: 46785 - RNA, 22 nt, Homo sapiens
ugaaugguaauuuaguaggcac

SEQ ID NO: 46786 - RNA, 22 nt, Homo sapiens
ugaaugcauggggccaagaagg

SEQ ID NO: 46787 - RNA, 22 nt, Homo sapiens
ugaauguauuuauuaccauuca

SEQ ID NO: 46788 - RNA, 22 nt, Homo sapiens
ugaauguccauugauguuuuga

SEQ ID NO: 46789 - RNA, 22 nt, Homo sapiens
ugaaugugauggguuucaugug

SEQ ID NO: 46790 - RNA, 22 nt, Homo sapiens
ugacaagagaccccuccgcagg

SEQ ID NO: 46791 - RNA, 22 nt, Homo sapiens
ugaacacagccugccucugcca

SEQ ID NO: 46792 - RNA, 22 nt, Homo sapiens
ugaaauuauucuuaccaaggug

SEQ ID NO: 46793 - RNA, 22 nt, Homo sapiens
ugaauacuucaaaaaaauagcu

SEQ ID NO: 46794 - RNA, 22 nt, Homo sapiens
ugaauaguaauguguuuggucu

SEQ ID NO: 46795 - RNA, 22 nt, Homo sapiens
ugaaauggaagaagucccuuuu

SEQ ID NO: 46796 - RNA, 22 nt, Homo sapiens
ucugugaaaucauuuccuguaa

SEQ ID NO: 46797 - RNA, 22 nt, Homo sapiens
ucugugcauuguaggauguuua

SEQ ID NO: 46798 - RNA, 22 nt, Homo sapiens
ucuguggucagaguccuuggcc

SEQ ID NO: 46799 - RNA, 22 nt, Homo sapiens
ucuguggucagcauccgccacu

SEQ ID NO: 46800 - RNA, 18 nt, Homo sapiens
ucugugguguaaauacgu

SEQ ID NO: 46801 - RNA, 22 nt, Homo sapiens
ucuugucacugcauccccagcu

SEQ ID NO: 46802 - RNA, 20 nt, Homo sapiens
ucuugggaauguagccuagg

SEQ ID NO: 46803 - RNA, 22 nt, Homo sapiens
ugaaagacugaagaauaggcau

SEQ ID NO: 46804 - RNA, 22 nt, Homo sapiens
ugaaagcuacaggaaaguauuu

SEQ ID NO: 46805 - RNA, 22 nt, Homo sapiens
ccagcaccauuuauuaaauagg

SEQ ID NO: 46806 - RNA, 22 nt, Homo sapiens
ccacauuaccuugcuugcucca

SEQ ID NO: 46807 - RNA, 22 nt, Homo sapiens
ccacccuggagaauuugagguc

SEQ ID NO: 46808 - RNA, 22 nt, Homo sapiens
cauuuugguuaaauagguagcu

SEQ ID NO: 46809 - RNA, 22 nt, Homo sapiens
cauggauuuuuuugaauggcag

SEQ ID NO: 46810 - RNA, 22 nt, Homo sapiens
cauuuuacuuuccagacgugga

SEQ ID NO: 46811 - RNA, 22 nt, Homo sapiens
cauuuugcaguuucugucucca

SEQ ID NO: 46812 - RNA, 22 nt, Homo sapiens
cauugucccucaaugucuauga

SEQ ID NO: 46813 - RNA, 22 nt, Homo sapiens
ccaaaucucauguugaaaugug

SEQ ID NO: 46814 - RNA, 22 nt, Homo sapiens
caugauauugcagaauguuggu

SEQ ID NO: 46815 - RNA, 22 nt, Homo sapiens
caugaaagugagaaacuccugg

SEQ ID NO: 46816 - RNA, 22 nt, Homo sapiens
caugccacuguggacaaagaca

SEQ ID NO: 46817 - RNA, 22 nt, Homo sapiens
cuaauacaguuguccaagcugg

SEQ ID NO: 46818 - RNA, 22 nt, Homo sapiens
cuaagauugucuuaguguguug

SEQ ID NO: 46819 - RNA, 22 nt, Homo sapiens
cuaaaguagccaggacugcagg

SEQ ID NO: 46820 - RNA, 22 nt, Homo sapiens
cuaaaugucucuacuaaguuua

SEQ ID NO: 46821 - RNA, 22 nt, Homo sapiens
cgcuggugucuaagcgacagcu

SEQ ID NO: 46822 - RNA, 19 nt, Homo sapiens
ccucaaguacuaauauguu

SEQ ID NO: 46823 - RNA, 22 nt, Homo sapiens
ccuuuguuuaguugaauuguau

SEQ ID NO: 46824 - RNA, 22 nt, Homo sapiens
cccuugcacuucagagcugcau

SEQ ID NO: 46825 - RNA, 22 nt, Homo sapiens
ccggcuguguggagaggccccu

SEQ ID NO: 46826 - RNA, 22 nt, Homo sapiens
cccugaagauacagaguuuggg

SEQ ID NO: 46827 - RNA, 19 nt, Homo sapiens
caguaucauugcacauagu

SEQ ID NO: 46828 - RNA, 22 nt, Homo sapiens
cagugaauuucaggucaagagu

SEQ ID NO: 46829 - RNA, 22 nt, Homo sapiens
caguccuaugauaaccauuuac

SEQ ID NO: 46830 - RNA, 22 nt, Homo sapiens
caggugguauuugguuuucugu

SEQ ID NO: 46831 - RNA, 22 nt, Homo sapiens
caccacauuccauugaucaggc

SEQ ID NO: 46832 - RNA, 22 nt, Homo sapiens
cagcugcuuuggaaaauauuuu

SEQ ID NO: 46833 - RNA, 22 nt, Homo sapiens
cauacaagcuacaaucacaaag

SEQ ID NO: 46834 - RNA, 21 nt, Homo sapiens
cauaaugcuacuuauuuuaug

SEQ ID NO: 46835 - RNA, 22 nt, Homo sapiens
cauaaaucuuguugaauagcac

SEQ ID NO: 46836 - RNA, 22 nt, Homo sapiens
caguuguuuuaugacauaagau

SEQ ID NO: 46837 - RNA, 22 nt, Homo sapiens
caguguuuuuaacaggugcccg

SEQ ID NO: 46838 - RNA, 22 nt, Homo sapiens
caucauugcacccuauagagaa

SEQ ID NO: 46839 - RNA, 22 nt, Homo sapiens
caucagauugagaucaucuaag

SEQ ID NO: 46840 - RNA, 22 nt, Homo sapiens
caucacuuuuccuuuuacagau

SEQ ID NO: 46841 - RNA, 22 nt, Homo sapiens
caucacaucugcaugguaagua

SEQ ID NO: 46842 - RNA, 22 nt, Homo sapiens
caucacauucugagauacugag

SEQ ID NO: 46843 - RNA, 22 nt, Homo sapiens
caucacaguacuaaucgucaua

SEQ ID NO: 46844 - RNA, 22 nt, Homo sapiens
caaagugcuggccgggcgcagu

SEQ ID NO: 46845 - RNA, 19 nt, Homo sapiens
caaaguguucuucuuugcc

SEQ ID NO: 46846 - RNA, 22 nt, Homo sapiens
caaaugacaucauuucauucaa

SEQ ID NO: 46847 - RNA, 22 nt, Homo sapiens
auuucacuucgcaugguguccg

SEQ ID NO: 46848 - RNA, 22 nt, Homo sapiens
caaaccuguaggggccaagagg

SEQ ID NO: 46849 - RNA, 22 nt, Homo sapiens
auuuaugguuaauauaggaagu

SEQ ID NO: 46850 - RNA, 20 nt, Homo sapiens
auuguccuugauuacacaga

SEQ ID NO: 46851 - RNA, 22 nt, Homo sapiens
cacagugaaugucaucauugcc

SEQ ID NO: 46852 - RNA, 19 nt, Homo sapiens
caacccugcagagaaagga

SEQ ID NO: 46853 - RNA, 22 nt, Homo sapiens
caagagaccugagugucauucu

SEQ ID NO: 46854 - RNA, 22 nt, Homo sapiens
caaaugcuucuauggacugucu

SEQ ID NO: 46855 - RNA, 22 nt, Homo sapiens
auugcaguuagaacagaagucu

SEQ ID NO: 46856 - RNA, 22 nt, Homo sapiens
auuguacuuaagccugggugaa

SEQ ID NO: 46857 - RNA, 22 nt, Homo sapiens
auuguacuccagccuguggagc

SEQ ID NO: 46858 - RNA, 22 nt, Homo sapiens
auuguaguacauuuggugguca

SEQ ID NO: 46859 - RNA, 22 nt, Homo sapiens
auuguguagucuuacugcuugc

SEQ ID NO: 46860 - RNA, 22 nt, Homo sapiens
auugucauuuucugagaaguaa

SEQ ID NO: 46861 - RNA, 22 nt, Homo sapiens
auugucauuuauaacuguguag

SEQ ID NO: 46862 - RNA, 22 nt, Homo sapiens
auugaacacuucugugugccag

SEQ ID NO: 46863 - RNA, 22 nt, Homo sapiens
auggcuguuucugcaaugucua

SEQ ID NO: 46864 - RNA, 22 nt, Homo sapiens
augugcaugcuguucugccaga

SEQ ID NO: 46865 - RNA, 22 nt, Homo sapiens
augugggaggacuuggcuguug

SEQ ID NO: 46866 - RNA, 22 nt, Homo sapiens
auguggaaagcagcaugauaug

SEQ ID NO: 46867 - RNA, 22 nt, Homo sapiens
auggcggugugggcggugcagc

SEQ ID NO: 46868 - RNA, 22 nt, Homo sapiens
auggcggugugaucuuggcuca

SEQ ID NO: 46869 - RNA, 22 nt, Homo sapiens
auggcuauuccauaggcagagc

SEQ ID NO: 46870 - RNA, 22 nt, Homo sapiens
auguuagcaucaauauucauca

SEQ ID NO: 46871 - RNA, 23 nt, Homo sapiens
augugguuuuagguguugaacug

SEQ ID NO: 46872 - RNA, 22 nt, Homo sapiens
auguuguaguaugagucaaaau

SEQ ID NO: 46873 - RNA, 22 nt, Homo sapiens
auguugcaguuuaauuauccua

SEQ ID NO: 46874 - RNA, 22 nt, Homo sapiens
auuccauuuguguggaauggcu

SEQ ID NO: 46875 - RNA, 22 nt, Homo sapiens
auuccauuuguuaucacacccg

SEQ ID NO: 46876 - RNA, 22 nt, Homo sapiens
auuccaguuguaagguuuuuca

SEQ ID NO: 46877 - RNA, 22 nt, Homo sapiens
auuccacagccgauaccaugac

SEQ ID NO: 46878 - RNA, 22 nt, Homo sapiens
auuagggcaggagcaaguacgg

SEQ ID NO: 46879 - RNA, 22 nt, Homo sapiens
auuacaugucuauccaugaaca

SEQ ID NO: 46880 - RNA, 22 nt, Homo sapiens
gacuuugguagaggaaaaaucu

SEQ ID NO: 46881 - RNA, 22 nt, Homo sapiens
gacugcauuugccccaucgaau

SEQ ID NO: 46882 - RNA, 22 nt, Homo sapiens
gacagugagaugucaugugaaa

SEQ ID NO: 46883 - RNA, 22 nt, Homo sapiens
gacaucauuaugagauuuaaac

SEQ ID NO: 46884 - RNA, 22 nt, Homo sapiens
gacauagagccuugacuucauu

SEQ ID NO: 46885 - RNA, 22 nt, Homo sapiens
gacaguuuggugaggaagacga

SEQ ID NO: 46886 - RNA, 20 nt, Homo sapiens
gacauagagacucucaaaaa

SEQ ID NO: 46887 - RNA, 22 nt, Homo sapiens
cuuuggugagggauaaauuuca

SEQ ID NO: 46888 - RNA, 22 nt, Homo sapiens
cuuuguaugucaugacaacugu

SEQ ID NO: 46889 - RNA, 22 nt, Homo sapiens
gaauguuuacuuuguuuaauac

SEQ ID NO: 46890 - RNA, 22 nt, Homo sapiens
cuuuguguggacauuucaggca

SEQ ID NO: 46891 - RNA, 22 nt, Homo sapiens
cuuuguguaggugccucuggcu

SEQ ID NO: 46892 - RNA, 22 nt, Homo sapiens
gagagguaguuuuuuggucguc

SEQ ID NO: 46893 - RNA, 22 nt, Homo sapiens
gagaucaaugggauggaauuga

SEQ ID NO: 46894 - RNA, 22 nt, Homo sapiens
gagauauuuagaaauguguucu

SEQ ID NO: 46895 - RNA, 23 nt, Homo sapiens
gagaucauucuggaauuagagug

SEQ ID NO: 46896 - RNA, 22 nt, Homo sapiens
gagacauugacuuuguuccaga

SEQ ID NO: 46897 - RNA, 21 nt, Homo sapiens
gagaggauucgccagccucuu

SEQ ID NO: 46898 - RNA, 22 nt, Homo sapiens
gagaacugacauuaucguguau

SEQ ID NO: 46899 - RNA, 22 nt, Homo sapiens
gagaacugagauaagugauauu

SEQ ID NO: 46900 - RNA, 22 nt, Homo sapiens
gagaaccuccagcaagguagua

SEQ ID NO: 46901 - RNA, 22 nt, Homo sapiens
gauauguuguuggauucgguua

SEQ ID NO: 46902 - RNA, 22 nt, Homo sapiens
gauauguucuuucacguuggug

SEQ ID NO: 46903 - RNA, 22 nt, Homo sapiens
gaucagauggcuguuggugugu

SEQ ID NO: 46904 - RNA, 19 nt, Homo sapiens
gaucuguugaucaaugugu

SEQ ID NO: 46905 - RNA, 22 nt, Homo sapiens
gaucuguguuuguaugcauaag

SEQ ID NO: 46906 - RNA, 22 nt, Homo sapiens
gaucuguuucaauugucuuagu

SEQ ID NO: 46907 - RNA, 22 nt, Homo sapiens
gauuccacuuucaaauucaaau

SEQ ID NO: 46908 - RNA, 22 nt, Homo sapiens
gauguuguuuagccuuugaugu

SEQ ID NO: 46909 - RNA, 22 nt, Homo sapiens
gaugugaaaucauaguuucuag

SEQ ID NO: 46910 - RNA, 22 nt, Homo sapiens
gaugguuuuuuaagaagagccu

SEQ ID NO: 46911 - RNA, 22 nt, Homo sapiens
gaggucuuacauuuuaauauuu

SEQ ID NO: 46912 - RNA, 22 nt, Homo sapiens
gagauucuucaauauuuauucu

SEQ ID NO: 46913 - RNA, 22 nt, Homo sapiens
gagauguuuuguuaucaaagga

SEQ ID NO: 46914 - RNA, 22 nt, Homo sapiens
gagauuaauacacaucaaaugc

SEQ ID NO: 46915 - RNA, 22 nt, Homo sapiens
gagauguuuguuucacugucac

SEQ ID NO: 46916 - RNA, 22 nt, Homo sapiens
gagaugugugugauuauauaau

SEQ ID NO: 46917 - RNA, 22 nt, Homo sapiens
gaguaaaugucacuguugcugu

SEQ ID NO: 46918 - RNA, 22 nt, Homo sapiens
gauauguucugagaaaugcauu

SEQ ID NO: 46919 - RNA, 22 nt, Homo sapiens
gaguuacauuguaauugccgag

SEQ ID NO: 46920 - RNA, 22 nt, Homo sapiens
cuggaaacaucuuaggaaugca

SEQ ID NO: 46921 - RNA, 22 nt, Homo sapiens
cugcuguuguuaacuuuuggag

SEQ ID NO: 46922 - RNA, 22 nt, Homo sapiens
cugcaagaugcauaggaauuuu

SEQ ID NO: 46923 - RNA, 22 nt, Homo sapiens
cugauauuuuaaaauuggcugg

SEQ ID NO: 46924 - RNA, 22 nt, Homo sapiens
cugaggacaucagggaagcauc

SEQ ID NO: 46925 - RNA, 21 nt, Homo sapiens
cucaaaguacugauauuacag

SEQ ID NO: 46926 - RNA, 22 nt, Homo sapiens
cucacuaggaaguaaaguuugu

SEQ ID NO: 46927 - RNA, 22 nt, Homo sapiens
cucaauuuggaauugucaguaa

SEQ ID NO: 46928 - RNA, 22 nt, Homo sapiens
cucaccuugugauccaccggcc

SEQ ID NO: 46929 - RNA, 22 nt, Homo sapiens
cuauguaccuggaacuguauua

SEQ ID NO: 46930 - RNA, 22 nt, Homo sapiens
cuauuugcauucagaggcaugu

SEQ ID NO: 46931 - RNA, 22 nt, Homo sapiens
cuacucugugguguauuugcau

SEQ ID NO: 46932 - RNA, 22 nt, Homo sapiens
cuacauuguagguauucaaacu

SEQ ID NO: 46933 - RNA, 20 nt, Homo sapiens
cuaaucaucccagaagaaau

SEQ ID NO: 46934 - RNA, 18 nt, Homo sapiens
cuuugcagcuuccagagg

SEQ ID NO: 46935 - RNA, 20 nt, Homo sapiens
cuuuggcaaugagaacaggg

SEQ ID NO: 46936 - RNA, 22 nt, Homo sapiens
cuuuggucaaaauaaguaaguu

SEQ ID NO: 46937 - RNA, 22 nt, Homo sapiens
cuuuccauuguuggagcauaaa

SEQ ID NO: 46938 - RNA, 22 nt, Homo sapiens
cuuugcaaauggccuuuccaag

SEQ ID NO: 46939 - RNA, 22 nt, Homo sapiens
cuuucugaggagaauagagaac

SEQ ID NO: 46940 - RNA, 22 nt, Homo sapiens
cuuguuguggaggggagugcag

SEQ ID NO: 46941 - RNA, 22 nt, Homo sapiens
cuuuacaguuggacucacgagg

SEQ ID NO: 46942 - RNA, 22 nt, Homo sapiens
cuugggccccacccaaaucuua

SEQ ID NO: 46943 - RNA, 22 nt, Homo sapiens
cuuguacuacuuaggaucugga

SEQ ID NO: 46944 - RNA, 22 nt, Homo sapiens
cuucacuuuguuaaacuccaau

SEQ ID NO: 46945 - RNA, 22 nt, Homo sapiens
cuuagguuaugauaaauuuagu

SEQ ID NO: 46946 - RNA, 22 nt, Homo sapiens
cuguauguuucuaugaauguga

SEQ ID NO: 46947 - RNA, 22 nt, Homo sapiens
cuguaugugagaaauaauaagu

SEQ ID NO: 46948 - RNA, 22 nt, Homo sapiens
cugucuaugagccaggaagcca

SEQ ID NO: 46949 - RNA, 22 nt, Homo sapiens
cuguccugcagagucagaauga

SEQ ID NO: 46950 - RNA, 22 nt, Homo sapiens
cugucuggaguccuucgugugc

SEQ ID NO: 46951 - RNA, 22 nt, Homo sapiens
cuguugguguuuaaucacugca

SEQ ID NO: 46952 - RNA, 22 nt, Homo sapiens
cuguugguuaaauuccaugcag

SEQ ID NO: 46953 - RNA, 22 nt, Homo sapiens
cuguacucaucccauaugcacu

SEQ ID NO: 46954 - RNA, 22 nt, Homo sapiens
cugguuuguaaaguuccugaga

SEQ ID NO: 46955 - RNA, 20 nt, Homo sapiens
cuggaugucgaggcagaggu

SEQ ID NO: 46956 - RNA, 22 nt, Homo sapiens
cuggagaucuugacauugaagu

SEQ ID NO: 46957 - RNA, 22 nt, Homo sapiens
cuggacguugaggcugcaguga

SEQ ID NO: 46958 - RNA, 22 nt, Homo sapiens
cuggaauuacaggguugagcua

SEQ ID NO: 46959 - RNA, 22 nt, Homo sapiens
cuggaaucuauggauaacaucg

SEQ ID NO: 46960 - RNA, 22 nt, Homo sapiens
aucauugugugaguugauggga

SEQ ID NO: 46961 - RNA, 22 nt, Homo sapiens
aucagauuccacauuuuaucag

SEQ ID NO: 46962 - RNA, 22 nt, Homo sapiens
auccacaugcaguuggaaacag

SEQ ID NO: 46963 - RNA, 19 nt, Homo sapiens
aucagcacaagugugcuuu

SEQ ID NO: 46964 - RNA, 22 nt, Homo sapiens
aucauugugcaucuucauucca

SEQ ID NO: 46965 - RNA, 22 nt, Homo sapiens
aucagagugaauaaugacaaaa

SEQ ID NO: 46966 - RNA, 22 nt, Homo sapiens
auccaucagacggcaggcguug

SEQ ID NO: 46967 - RNA, 22 nt, Homo sapiens
aucccugagaacuuuuaauguu

SEQ ID NO: 46968 - RNA, 22 nt, Homo sapiens
aucaccauguguacauuagacc

SEQ ID NO: 46969 - RNA, 22 nt, Homo sapiens
auaugguguuugcuauucagcu

SEQ ID NO: 46970 - RNA, 22 nt, Homo sapiens
auauggguuuuauauuaggcuc

SEQ ID NO: 46971 - RNA, 22 nt, Homo sapiens
auauggcuaugugagcauacca

SEQ ID NO: 46972 - RNA, 22 nt, Homo sapiens
aucacguguguuuaugcuacgc

SEQ ID NO: 46973 - RNA, 22 nt, Homo sapiens
aucugcacaucuguguuuuugu

SEQ ID NO: 46974 - RNA, 22 nt, Homo sapiens
aucugcauuagggugaagaccu

SEQ ID NO: 46975 - RNA, 22 nt, Homo sapiens
aucugauggagagcguguggcu

SEQ ID NO: 46976 - RNA, 22 nt, Homo sapiens
aucugguguauuggugcugggu

SEQ ID NO: 46977 - RNA, 22 nt, Homo sapiens
aucuggguccguucugcuucuc

SEQ ID NO: 46978 - RNA, 22 nt, Homo sapiens
aucuggcuccuuuugacaaugc

SEQ ID NO: 46979 - RNA, 22 nt, Homo sapiens
aucugugaaugaaguuauuuug

SEQ ID NO: 46980 - RNA, 22 nt, Homo sapiens
aucuuguccugagguuuuauug

SEQ ID NO: 46981 - RNA, 22 nt, Homo sapiens
auccucugagaucuaggcagag

SEQ ID NO: 46982 - RNA, 21 nt, Homo sapiens
aucgcacaauauaccccugua

SEQ ID NO: 46983 - RNA, 22 nt, Homo sapiens
auccuguagucucacagcccca

SEQ ID NO: 46984 - RNA, 22 nt, Homo sapiens
aucuaaucaucgcaaccuucaa

SEQ ID NO: 46985 - RNA, 22 nt, Homo sapiens
aucuccaggugccagcugcgcc

SEQ ID NO: 46986 - RNA, 22 nt, Homo sapiens
augacauugaaaagcaagugga

SEQ ID NO: 46987 - RNA, 23 nt, Homo sapiens
augacacuguccuugaccauuuc

SEQ ID NO: 46988 - RNA, 22 nt, Homo sapiens
aucuuuggucaucacagcuaga

SEQ ID NO: 46989 - RNA, 22 nt, Homo sapiens
augacaagaguguucagggaga

SEQ ID NO: 46990 - RNA, 22 nt, Homo sapiens
augcaaacaucauagaguguac

SEQ ID NO: 46991 - RNA, 22 nt, Homo sapiens
augauuuuuguaucgccugaug

SEQ ID NO: 46992 - RNA, 22 nt, Homo sapiens
augaugucauuuuaauuucuaa

SEQ ID NO: 46993 - RNA, 22 nt, Homo sapiens
augacuauugcacuuuccuggu

SEQ ID NO: 46994 - RNA, 22 nt, Homo sapiens
augaucauggaaguuuuccugu

SEQ ID NO: 46995 - RNA, 22 nt, Homo sapiens
augcaagacaccgauuagcuuu

SEQ ID NO: 46996 - RNA, 22 nt, Homo sapiens
augcacauauguacugcccuau

SEQ ID NO: 46997 - RNA, 22 nt, Homo sapiens
augcacaucagcuccagggacc

SEQ ID NO: 46998 - RNA, 22 nt, Homo sapiens
augcacaugcgaaaacuugugu

SEQ ID NO: 46999 - RNA, 22 nt, Homo sapiens
augcuaugugugacuucuuaug

SEQ ID NO: 47000 - RNA, 22 nt, Homo sapiens
augcacauggcuaacuuuuuuc

SEQ ID NO: 47001 - RNA, 22 nt, Homo sapiens
auggauuuguaguacaugguug

SEQ ID NO: 47002 - RNA, 22 nt, Homo sapiens
auggcaaaaaaugcaauuacuu

SEQ ID NO: 47003 - RNA, 22 nt, Homo sapiens
auggcacugaagcguauugaca

SEQ ID NO: 47004 - RNA, 22 nt, Homo sapiens
auggcagaaucaagccgacagc

SEQ ID NO: 47005 - RNA, 22 nt, Homo sapiens
auggcaaugcgaugaugacuga

SEQ ID NO: 47006 - RNA, 21 nt, Homo sapiens
agucauaggaguacauaaugc

SEQ ID NO: 47007 - RNA, 22 nt, Homo sapiens
agugacuagaauaugaauuuua

SEQ ID NO: 47008 - RNA, 22 nt, Homo sapiens
agugaauuguucaacaggagga

SEQ ID NO: 47009 - RNA, 22 nt, Homo sapiens
agugagcugcagucuggggucc

SEQ ID NO: 47010 - RNA, 22 nt, Homo sapiens
agugagcuguuuuuacuuucug

SEQ ID NO: 47011 - RNA, 22 nt, Homo sapiens
agucacagccuuuuacuuuaga

SEQ ID NO: 47012 - RNA, 22 nt, Homo sapiens
agucauggaucacaguagccuc

SEQ ID NO: 47013 - RNA, 22 nt, Homo sapiens
agucauagaguuugcccuucuc

SEQ ID NO: 47014 - RNA, 20 nt, Homo sapiens
agucaguuuauuuucucucu

SEQ ID NO: 47015 - RNA, 22 nt, Homo sapiens
agugauguggaguuuggaugga

SEQ ID NO: 47016 - RNA, 22 nt, Homo sapiens
agugaaaucugaagaaggucau

SEQ ID NO: 47017 - RNA, 22 nt, Homo sapiens
agugcacugcccgcuuccuguc

SEQ ID NO: 47018 - RNA, 22 nt, Homo sapiens
agugcacuccagccugggcaac

SEQ ID NO: 47019 - RNA, 22 nt, Homo sapiens
aguggauuuuauuugacaacua

SEQ ID NO: 47020 - RNA, 20 nt, Homo sapiens
agcuguuguuaaaaaggagg

SEQ ID NO: 47021 - RNA, 20 nt, Homo sapiens
agcaucagugguaguguugc

SEQ ID NO: 47022 - RNA, 22 nt, Homo sapiens
aguauguuuugaaaccaagaag

SEQ ID NO: 47023 - RNA, 22 nt, Homo sapiens
aguauuaggugaguguauuuca

SEQ ID NO: 47024 - RNA, 20 nt, Homo sapiens
agcuugguuuggaugaucac

SEQ ID NO: 47025 - RNA, 22 nt, Homo sapiens
agcuguuguuuuaagauacuaa

SEQ ID NO: 47026 - RNA, 22 nt, Homo sapiens
agcuguuuuugugggcauguga

SEQ ID NO: 47027 - RNA, 22 nt, Homo sapiens
auaagaguaguacauaugagac

SEQ ID NO: 47028 - RNA, 22 nt, Homo sapiens
auaagaagugaaccagacgucu

SEQ ID NO: 47029 - RNA, 22 nt, Homo sapiens
auacauguucaagggcauauau

SEQ ID NO: 47030 - RNA, 22 nt, Homo sapiens
auaaaguagaggugaggugcau

SEQ ID NO: 47031 - RNA, 22 nt, Homo sapiens
agugguuuuaaguagagcauac

SEQ ID NO: 47032 - RNA, 20 nt, Homo sapiens
auaaauguauagguguacau

SEQ ID NO: 47033 - RNA, 22 nt, Homo sapiens
auaacagcugcaaggcaaaagc

SEQ ID NO: 47034 - RNA, 22 nt, Homo sapiens
auaaaguguuuaguauaggcaa

SEQ ID NO: 47035 - RNA, 22 nt, Homo sapiens
auaaaugcauugagaacugcug

SEQ ID NO: 47036 - RNA, 22 nt, Homo sapiens
auaaaugcuuagaucuguauau

SEQ ID NO: 47037 - RNA, 22 nt, Homo sapiens
auaaaugcuuccagucauuaaa

SEQ ID NO: 47038 - RNA, 22 nt, Homo sapiens
auaaaugccuguuguuuuaagc

SEQ ID NO: 47039 - RNA, 22 nt, Homo sapiens
auagcagugugaaaauguacua

SEQ ID NO: 47040 - RNA, 22 nt, Homo sapiens
auagcauaucccacaugucaga

SEQ ID NO: 47041 - RNA, 22 nt, Homo sapiens
auagcaucauuucuugaaaaga

SEQ ID NO: 47042 - RNA, 20 nt, Homo sapiens
auagaagacuagugcagcag

SEQ ID NO: 47043 - RNA, 22 nt, Homo sapiens
auaugcacuauacacacguaua

SEQ ID NO: 47044 - RNA, 22 nt, Homo sapiens
auaugcauacauguaugcagga

SEQ ID NO: 47045 - RNA, 22 nt, Homo sapiens
auaucacucccaauaucgcagg

SEQ ID NO: 47046 - RNA, 17 nt, Homo sapiens
auaugaauuuuggagau

SEQ ID NO: 47047 - RNA, 22 nt, Homo sapiens
auagguaguugaggagauuuca

SEQ ID NO: 47048 - RNA, 22 nt, Homo sapiens
auaucacaggaaaggaagauac

SEQ ID NO: 47049 - RNA, 22 nt, Homo sapiens
auagguauuuuuaaaugacugu

SEQ ID NO: 47050 - RNA, 22 nt, Homo sapiens
auagccucauucuucagaugag

SEQ ID NO: 47051 - RNA, 22 nt, Homo sapiens
auagccuguaggccuuaaggug

SEQ ID NO: 47052 - RNA, 22 nt, Homo sapiens
auaggagugugcacagaguagg

SEQ ID NO: 47053 - RNA, 22 nt, Homo sapiens
auagcuguugaauggaauauuc

SEQ ID NO: 47054 - RNA, 22 nt, Homo sapiens
agaagaacauagggugacugaa

SEQ ID NO: 47055 - RNA, 22 nt, Homo sapiens
agaauguaaacagaauagagga

SEQ ID NO: 47056 - RNA, 22 nt, Homo sapiens
agaauacugucuauucauggua

SEQ ID NO: 47057 - RNA, 22 nt, Homo sapiens
agacuguaaugcauaauuuacu

SEQ ID NO: 47058 - RNA, 22 nt, Homo sapiens
agacuuagagagucuauucuau

SEQ ID NO: 47059 - RNA, 22 nt, Homo sapiens
agacuagacagaugaacagcac

SEQ ID NO: 47060 - RNA, 22 nt, Homo sapiens
agaucaauugcugauucgcucu

SEQ ID NO: 47061 - RNA, 22 nt, Homo sapiens
agaucauaugcaguaaugaacu

SEQ ID NO: 47062 - RNA, 22 nt, Homo sapiens
agaugcauugguggcauauuca

SEQ ID NO: 47063 - RNA, 22 nt, Homo sapiens
agaucacagucuuugguuuuag

SEQ ID NO: 47064 - RNA, 22 nt, Homo sapiens
agauauuuguuaggucugucag

SEQ ID NO: 47065 - RNA, 22 nt, Homo sapiens
agauauguuauugauguuaaug

SEQ ID NO: 47066 - RNA, 22 nt, Homo sapiens
agauauguuuaguuucaaaaug

SEQ ID NO: 47067 - RNA, 22 nt, Homo sapiens
agagugcuauagauuagauuuc

SEQ ID NO: 47068 - RNA, 19 nt, Homo sapiens
agaguauuguuacuucucu

SEQ ID NO: 47069 - RNA, 22 nt, Homo sapiens
agcaccaauaacaguuucuagc

SEQ ID NO: 47070 - RNA, 22 nt, Homo sapiens
agcaauaugacauugcuacauc

SEQ ID NO: 47071 - RNA, 22 nt, Homo sapiens
agcaagaaugaacucucccaga

SEQ ID NO: 47072 - RNA, 22 nt, Homo sapiens
agaugguguuggcugaguguau

SEQ ID NO: 47073 - RNA, 22 nt, Homo sapiens
agauggugauaaaugugguacc

SEQ ID NO: 47074 - RNA, 18 nt, Homo sapiens
agaugguguugcuucugu

SEQ ID NO: 47075 - RNA, 19 nt, Homo sapiens
accagauugcauucuugga

SEQ ID NO: 47076 - RNA, 22 nt, Homo sapiens
accaguuuuuuauacaucuucu

SEQ ID NO: 47077 - RNA, 22 nt, Homo sapiens
accaugcaguccaauaugcaca

SEQ ID NO: 47078 - RNA, 22 nt, Homo sapiens
accauugcacuccuuucugggc

SEQ ID NO: 47079 - RNA, 19 nt, Homo sapiens
acagugucucuauaaugau

SEQ ID NO: 47080 - RNA, 22 nt, Homo sapiens
acaguguuacuugauaguguau

SEQ ID NO: 47081 - RNA, 22 nt, Homo sapiens
accaccacucccgcauucuaaa

SEQ ID NO: 47082 - RNA, 21 nt, Homo sapiens
acccccacaccuccuuaguuc

SEQ ID NO: 47083 - RNA, 22 nt, Homo sapiens
acugaguguugauuuagauuaa

SEQ ID NO: 47084 - RNA, 19 nt, Homo sapiens
acugcacuccaaccuccug

SEQ ID NO: 47085 - RNA, 22 nt, Homo sapiens
acuuuuugauggggagaacauu

SEQ ID NO: 47086 - RNA, 22 nt, Homo sapiens
agaaauguuuauucaaacccgu

SEQ ID NO: 47087 - RNA, 20 nt, Homo sapiens
acugcauuuaguccucagga

SEQ ID NO: 47088 - RNA, 22 nt, Homo sapiens
acugcacuccagccuaggcgac

SEQ ID NO: 47089 - RNA, 22 nt, Homo sapiens
acugcacuccagccuccugaca

SEQ ID NO: 47090 - RNA, 22 nt, Homo sapiens
acugcacuccagccuccugggu

SEQ ID NO: 47091 - RNA, 22 nt, Homo sapiens
acugcacuccagacucugucuc

SEQ ID NO: 47092 - RNA, 22 nt, Homo sapiens
acugcacuccagccucaugaca

SEQ ID NO: 47093 - RNA, 22 nt, Homo sapiens
acugcacucccgcccgggugac

SEQ ID NO: 47094 - RNA, 22 nt, Homo sapiens
acugcacuccggccucgugaca

SEQ ID NO: 47095 - RNA, 22 nt, Homo sapiens
acugaaucaucagguguguuug

SEQ ID NO: 47096 - RNA, 20 nt, Homo sapiens
acugcacuccagucucuggg

SEQ ID NO: 47097 - RNA, 22 nt, Homo sapiens
acugcacuccaguuccgggcaa

SEQ ID NO: 47098 - RNA, 22 nt, Homo sapiens
acugcacuccagcuccagggug

SEQ ID NO: 47099 - RNA, 22 nt, Homo sapiens
aauagugcugcaaaaacauacg

SEQ ID NO: 47100 - RNA, 22 nt, Homo sapiens
aaucagcacacugugcuuucca

SEQ ID NO: 47101 - RNA, 22 nt, Homo sapiens
aaucacguagcaguagggagaa

SEQ ID NO: 47102 - RNA, 22 nt, Homo sapiens
aaucauauugucugccaagagg

SEQ ID NO: 47103 - RNA, 22 nt, Homo sapiens
aaucacuaugccaugaaguaca

SEQ ID NO: 47104 - RNA, 22 nt, Homo sapiens
aaugugcuucuggcugugguca

SEQ ID NO: 47105 - RNA, 22 nt, Homo sapiens
aauuacauggcaauugggaaau

SEQ ID NO: 47106 - RNA, 22 nt, Homo sapiens
aauggcagaugaaauugucauu

SEQ ID NO: 47107 - RNA, 23 nt, Homo sapiens
acacaguaaacuaaaagcuagcu

SEQ ID NO: 47108 - RNA, 22 nt, Homo sapiens
acacacgugcauguaugcguau

SEQ ID NO: 47109 - RNA, 22 nt, Homo sapiens
acacaguaaauauugucuccuc

SEQ ID NO: 47110 - RNA, 22 nt, Homo sapiens
acacaaugguaaguguuugugu

SEQ ID NO: 47111 - RNA, 22 nt, Homo sapiens
acacaugugcguagacucuuua

SEQ ID NO: 47112 - RNA, 22 nt, Homo sapiens
acaccaucuccuuauuucucuu

SEQ ID NO: 47113 - RNA, 22 nt, Homo sapiens
acacuguagcugagggcaugcg

SEQ ID NO: 47114 - RNA, 22 nt, Homo sapiens
acaguauaaugcuguagggaga

SEQ ID NO: 47115 - RNA, 22 nt, Homo sapiens
acacuauugagguuuguuugca

SEQ ID NO: 47116 - RNA, 18 nt, Homo sapiens
acagugcugucacugcuu

SEQ ID NO: 47117 - RNA, 18 nt, Homo sapiens
acagugcuggcaugagau

SEQ ID NO: 47118 - RNA, 22 nt, Homo sapiens
acagucauagcagccuuuguua

SEQ ID NO: 47119 - RNA, 23 nt, Homo sapiens
acaguggugugaucuuggcucag

SEQ ID NO: 47120 - RNA, 17 nt, Homo sapiens
acagugcuuugcuuucc

SEQ ID NO: 47121 - RNA, 22 nt, Homo sapiens
acagugcuuucaauguucagua

SEQ ID NO: 47122 - RNA, 22 nt, Homo sapiens
aauaaagcugaauccuuccuga

SEQ ID NO: 47123 - RNA, 22 nt, Homo sapiens
aaguuguaguuagagaguugcu

SEQ ID NO: 47124 - RNA, 23 nt, Homo sapiens
aaguucaugcucaucuguuacac

SEQ ID NO: 47125 - RNA, 22 nt, Homo sapiens
aauagcacugcuaugguuugaa

SEQ ID NO: 47126 - RNA, 22 nt, Homo sapiens
aauaagcugagagaauucuaca

SEQ ID NO: 47127 - RNA, 22 nt, Homo sapiens
aagugaaugaugugaaguguaa

SEQ ID NO: 47128 - RNA, 22 nt, Homo sapiens
aagugaauguuugguagcagug

SEQ ID NO: 47129 - RNA, 22 nt, Homo sapiens
aaguauguaucaagucauacuu

SEQ ID NO: 47130 - RNA, 22 nt, Homo sapiens
aaguauuagugaggauauggaa

SEQ ID NO: 47131 - RNA, 22 nt, Homo sapiens
aagugacuagacuaugaaaccu

SEQ ID NO: 47132 - RNA, 22 nt, Homo sapiens
aagugcaaaucuguggcugaaa

SEQ ID NO: 47133 - RNA, 20 nt, Homo sapiens
aagugcaucguugugucugc

SEQ ID NO: 47134 - RNA, 22 nt, Homo sapiens
aagguaguuuucuuuaaugcug

SEQ ID NO: 47135 - RNA, 22 nt, Homo sapiens
uuuugcaauauguuccugaaua

SEQ ID NO: 47136 - RNA, 23 nt, Homo sapiens
uuuugcaauaagucacuggaaua

SEQ ID NO: 47137 - RNA, 22 nt, Homo sapiens
aaguaaacauuuuguacaauaa

SEQ ID NO: 47138 - RNA, 22 nt, Homo sapiens
aaguaaacauugagagacaaga

SEQ ID NO: 47139 - RNA, 22 nt, Homo sapiens
aaguagcagaggcaagacuuga

SEQ ID NO: 47140 - RNA, 21 nt, Homo sapiens
uuugugguuacugugugagcu

SEQ ID NO: 47141 - RNA, 22 nt, Homo sapiens
uuuguggaaugcucauguguag

SEQ ID NO: 47142 - RNA, 22 nt, Homo sapiens
uuuguucaccucaaggauggga

SEQ ID NO: 47143 - RNA, 20 nt, Homo sapiens
uuuuagcuuuuauugaaagc

SEQ ID NO: 47144 - RNA, 22 nt, Homo sapiens
uuuuagcuuuucccaggacucc

SEQ ID NO: 47145 - RNA, 22 nt, Homo sapiens
uuuuaguugcucagguauucuc

SEQ ID NO: 47146 - RNA, 22 nt, Homo sapiens
uuuuagcagccaugacaaagau

SEQ ID NO: 47147 - RNA, 22 nt, Homo sapiens
uuuguuugaagucgagacaacu

SEQ ID NO: 47148 - RNA, 22 nt, Homo sapiens
uuuuaacagccaggggacggcc

SEQ ID NO: 47149 - RNA, 22 nt, Homo sapiens
uuuuaagcuacaagagacauau

SEQ ID NO: 47150 - RNA, 22 nt, Homo sapiens
uuuuacacaucaccgcucgugu

SEQ ID NO: 47151 - RNA, 22 nt, Homo sapiens
aaaagucuguagugaaagguga

SEQ ID NO: 47152 - RNA, 22 nt, Homo sapiens
aaaagugguguuguuucuaaau

SEQ ID NO: 47153 - RNA, 22 nt, Homo sapiens
aaagucuagaggaucaugugug

SEQ ID NO: 47154 - RNA, 18 nt, Homo sapiens
aaacagugucucuuucug

SEQ ID NO: 47155 - RNA, 22 nt, Homo sapiens
aaacauugaccucauccuggca

SEQ ID NO: 47156 - RNA, 22 nt, Homo sapiens
aaagucuguuuugucagagacu

SEQ ID NO: 47157 - RNA, 22 nt, Homo sapiens
aaagugaauguaucccguaagu

SEQ ID NO: 47158 - RNA, 22 nt, Homo sapiens
aaaguacucaguucaguuccgu

SEQ ID NO: 47159 - RNA, 22 nt, Homo sapiens
aaagugcaguauuugggcagaa

SEQ ID NO: 47160 - RNA, 22 nt, Homo sapiens
aaaguggugugaguauguaucu

SEQ ID NO: 47161 - RNA, 22 nt, Homo sapiens
aaagugcugggauuuuaggcau

SEQ ID NO: 47162 - RNA, 22 nt, Homo sapiens
aaaguguguuuccaaccugugg

SEQ ID NO: 47163 - RNA, 22 nt, Homo sapiens
aaaguggacuaagugaauauga

SEQ ID NO: 47164 - RNA, 22 nt, Homo sapiens
aaaguguuucugcaguagguuu

SEQ ID NO: 47165 - RNA, 22 nt, Homo sapiens
aaagugcaguauuugggcagga

SEQ ID NO: 47166 - RNA, 22 nt, Homo sapiens
aagugcuucagaagacaauauu

SEQ ID NO: 47167 - RNA, 22 nt, Homo sapiens
aaguggaauguuuguggcacaa

SEQ ID NO: 47168 - RNA, 22 nt, Homo sapiens
aagggaaugcgcugccuguguu

SEQ ID NO: 47169 - RNA, 22 nt, Homo sapiens
aaggcaugcugaguccuaaaag

SEQ ID NO: 47170 - RNA, 22 nt, Homo sapiens
aaggcauggugacuauuuaggc

SEQ ID NO: 47171 - RNA, 22 nt, Homo sapiens
aaggcaagauacugguugcuga

SEQ ID NO: 47172 - RNA, 22 nt, Homo sapiens
aagcaucacauaauggaucaug

SEQ ID NO: 47173 - RNA, 20 nt, Homo sapiens
aagcauggguuuuaggguca

SEQ ID NO: 47174 - RNA, 22 nt, Homo sapiens
aaggcaagaaaauggauucucc

SEQ ID NO: 47175 - RNA, 22 nt, Homo sapiens
aagcaggugaugagugggugug

SEQ ID NO: 47176 - RNA, 20 nt, Homo sapiens
aagcagacauuuggaugaaa

SEQ ID NO: 47177 - RNA, 22 nt, Homo sapiens
aagcacccagccucacgccugc

SEQ ID NO: 47178 - RNA, 22 nt, Homo sapiens
aagcacaauuucaccuucuugu

SEQ ID NO: 47179 - RNA, 22 nt, Homo sapiens
aagcacccuuugucuggacaug

SEQ ID NO: 47180 - RNA, 22 nt, Homo sapiens
aagauaguaaacauuuucugcu

SEQ ID NO: 47181 - RNA, 22 nt, Homo sapiens
aaaugcaugaggugggaagaaa

SEQ ID NO: 47182 - RNA, 22 nt, Homo sapiens
aaaugcaucauuaggugauuuu

SEQ ID NO: 47183 - RNA, 22 nt, Homo sapiens
aaaugcacaaagauuuugcacu

SEQ ID NO: 47184 - RNA, 22 nt, Homo sapiens
aaaugcaccacucuggugcagg

SEQ ID NO: 47185 - RNA, 22 nt, Homo sapiens
aaaugcagauuccuaggcccca

SEQ ID NO: 47186 - RNA, 22 nt, Homo sapiens
aaaugcacgcuacccagcuaga

SEQ ID NO: 47187 - RNA, 22 nt, Homo sapiens
aagaguuaguaaaauuuccucu

SEQ ID NO: 47188 - RNA, 22 nt, Homo sapiens
aagaugauguucuuuuucuuag

SEQ ID NO: 47189 - RNA, 22 nt, Homo sapiens
aacauugaacuuggcacaccca

SEQ ID NO: 47190 - RNA, 22 nt, Homo sapiens
aacaguaucuaacgagugauga

SEQ ID NO: 47191 - RNA, 22 nt, Homo sapiens
auggacuuuuuguucagugucu

SEQ ID NO: 47192 - RNA, 22 nt, Homo sapiens
auggauauuuuuugaacauaga

SEQ ID NO: 47193 - RNA, 22 nt, Homo sapiens
auggagaugaauaucaucuguu

SEQ ID NO: 47194 - RNA, 22 nt, Homo sapiens
auggaguguucugaauccuuug

SEQ ID NO: 47195 - RNA, 22 nt, Homo sapiens
auggcuuuguguucagagcuga

SEQ ID NO: 47196 - RNA, 22 nt, Homo sapiens
augggcuaguaaagacaaacuu

SEQ ID NO: 47197 - RNA, 22 nt, Homo sapiens
augguaguagaugugugguuuu

SEQ ID NO: 47198 - RNA, 22 nt, Homo sapiens
auguaguagauauuuauggaaa

SEQ ID NO: 47199 - RNA, 22 nt, Homo sapiens
auguaugagaguuccagcugau

SEQ ID NO: 47200 - RNA, 22 nt, Homo sapiens
auguauacaugcaggucacagg

SEQ ID NO: 47201 - RNA, 21 nt, Homo sapiens
augucauggaugacuaauuca

SEQ ID NO: 47202 - RNA, 22 nt, Homo sapiens
augucacugcacuccugccugg

SEQ ID NO: 47203 - RNA, 22 nt, Homo sapiens
augugacugauguaaucagaca

SEQ ID NO: 47204 - RNA, 22 nt, Homo sapiens
augucugguagccaccuggagg

SEQ ID NO: 47205 - RNA, 22 nt, Homo sapiens
auguggcauuucucauucauuu

SEQ ID NO: 47206 - RNA, 22 nt, Homo sapiens
auguggaaauguauaugugucu

SEQ ID NO: 47207 - RNA, 22 nt, Homo sapiens
augugcuuauagguguauguuu

SEQ ID NO: 47208 - RNA, 22 nt, Homo sapiens
augugggaggaauguguuucca

SEQ ID NO: 47209 - RNA, 22 nt, Homo sapiens
auguggauaucuauaucuggau

SEQ ID NO: 47210 - RNA, 22 nt, Homo sapiens
auguggcacuugacuuucucgc

SEQ ID NO: 47211 - RNA, 22 nt, Homo sapiens
augugacugauggagaauaugu

SEQ ID NO: 47212 - RNA, 22 nt, Homo sapiens
augugaugguuaauuuuaugug

SEQ ID NO: 47213 - RNA, 22 nt, Homo sapiens
augugcauaugaagcacagaca

SEQ ID NO: 47214 - RNA, 22 nt, Homo sapiens
augauuguucucacucaagaga

SEQ ID NO: 47215 - RNA, 20 nt, Homo sapiens
augagguguaugacacugaa

SEQ ID NO: 47216 - RNA, 22 nt, Homo sapiens
augagguguuuauuguauccug

SEQ ID NO: 47217 - RNA, 22 nt, Homo sapiens
augaguaugagaauacauuaag

SEQ ID NO: 47218 - RNA, 22 nt, Homo sapiens
augaggugauuucuguucgggu

SEQ ID NO: 47219 - RNA, 22 nt, Homo sapiens
augagcucauugggugacuggg

SEQ ID NO: 47220 - RNA, 22 nt, Homo sapiens
augagcuccucaaggucagaga

SEQ ID NO: 47221 - RNA, 22 nt, Homo sapiens
aucugcauucccauguuuauug

SEQ ID NO: 47222 - RNA, 20 nt, Homo sapiens
aucucugggcaaaggaaaau

SEQ ID NO: 47223 - RNA, 22 nt, Homo sapiens
aucugguguccucgugggaguc

SEQ ID NO: 47224 - RNA, 22 nt, Homo sapiens
aucugguguggcugugauccuc

SEQ ID NO: 47225 - RNA, 22 nt, Homo sapiens
aucugguguuuccuucacauug

SEQ ID NO: 47226 - RNA, 22 nt, Homo sapiens
aucuguagauucagcacaagcu

SEQ ID NO: 47227 - RNA, 22 nt, Homo sapiens
aucuguguuuaaggucccagaa

SEQ ID NO: 47228 - RNA, 22 nt, Homo sapiens
aucuuuggauacuugauauagu

SEQ ID NO: 47229 - RNA, 22 nt, Homo sapiens
augcauauuccugggccucacu

SEQ ID NO: 47230 - RNA, 18 nt, Homo sapiens
augcauauuuuaaguugu

SEQ ID NO: 47231 - RNA, 22 nt, Homo sapiens
augcauaugucuuuauaguggc

SEQ ID NO: 47232 - RNA, 22 nt, Homo sapiens
augcagcugaggguaguggagc

SEQ ID NO: 47233 - RNA, 22 nt, Homo sapiens
augcagauauuuuugugguugc

SEQ ID NO: 47234 - RNA, 22 nt, Homo sapiens
augcuguuuuguagcucccucu

SEQ ID NO: 47235 - RNA, 22 nt, Homo sapiens
augcuuguguuggggcagugga

SEQ ID NO: 47236 - RNA, 21 nt, Homo sapiens
auggaaagacugccucuucaa

SEQ ID NO: 47237 - RNA, 22 nt, Homo sapiens
augcuguuuugaauucucuaga

SEQ ID NO: 47238 - RNA, 22 nt, Homo sapiens
augcauagcaucugcaaauguu

SEQ ID NO: 47239 - RNA, 19 nt, Homo sapiens
augccucaguuuuguacuu

SEQ ID NO: 47240 - RNA, 22 nt, Homo sapiens
auacaugugccauguugguaug

SEQ ID NO: 47241 - RNA, 22 nt, Homo sapiens
auacaugugugagcgaagaugu

SEQ ID NO: 47242 - RNA, 22 nt, Homo sapiens
auacagugaauacuuacagugu

SEQ ID NO: 47243 - RNA, 22 nt, Homo sapiens
auacaguguauguauaguacau

SEQ ID NO: 47244 - RNA, 22 nt, Homo sapiens
auacacauuccugggccucacc

SEQ ID NO: 47245 - RNA, 19 nt, Homo sapiens
auacacguguauacauaca

SEQ ID NO: 47246 - RNA, 22 nt, Homo sapiens
auacacuagggcuccugcagaa

SEQ ID NO: 47247 - RNA, 22 nt, Homo sapiens
auacagcuaaaauauuaaguua

SEQ ID NO: 47248 - RNA, 22 nt, Homo sapiens
auacaguaucuucuggcaagca

SEQ ID NO: 47249 - RNA, 22 nt, Homo sapiens
auacagguauacaaugcauaau

SEQ ID NO: 47250 - RNA, 23 nt, Homo sapiens
auaaugcaaguggugguaaucug

SEQ ID NO: 47251 - RNA, 22 nt, Homo sapiens
agucacaugcauuuucuucaau

SEQ ID NO: 47252 - RNA, 22 nt, Homo sapiens
agucaaguuuuuucagagaaua

SEQ ID NO: 47253 - RNA, 22 nt, Homo sapiens
aguauuuguuggaauaccuguu

SEQ ID NO: 47254 - RNA, 22 nt, Homo sapiens
agucaagugggguuagauaguu

SEQ ID NO: 47255 - RNA, 22 nt, Homo sapiens
auagaggacugaggugaucuuu

SEQ ID NO: 47256 - RNA, 22 nt, Homo sapiens
auagaguccugcucgaguugcu

SEQ ID NO: 47257 - RNA, 22 nt, Homo sapiens
auagagugcuucaucaguagua

SEQ ID NO: 47258 - RNA, 22 nt, Homo sapiens
auagaucauugucauuuuagau

SEQ ID NO: 47259 - RNA, 22 nt, Homo sapiens
auagaauguauuaguaaauuug

SEQ ID NO: 47260 - RNA, 22 nt, Homo sapiens
auagaagcuauguauaggggcc

SEQ ID NO: 47261 - RNA, 22 nt, Homo sapiens
auagaagcugccaacguuucag

SEQ ID NO: 47262 - RNA, 22 nt, Homo sapiens
auacuguuuuacaucauugccu

SEQ ID NO: 47263 - RNA, 22 nt, Homo sapiens
auagcacaguguguguacacca

SEQ ID NO: 47264 - RNA, 22 nt, Homo sapiens
auagcagaagaagggacaauuc

SEQ ID NO: 47265 - RNA, 22 nt, Homo sapiens
auauagcaaugaaagagaugaa

SEQ ID NO: 47266 - RNA, 22 nt, Homo sapiens
auagugcuggaauaaauauacg

SEQ ID NO: 47267 - RNA, 22 nt, Homo sapiens
aucugcaaauaaugaagauugg

SEQ ID NO: 47268 - RNA, 22 nt, Homo sapiens
aucucugagauguucugauuuu

SEQ ID NO: 47269 - RNA, 22 nt, Homo sapiens
aucuagagacauaguaaagaau

SEQ ID NO: 47270 - RNA, 22 nt, Homo sapiens
aucucagagaaaauuacuaaga

SEQ ID NO: 47271 - RNA, 22 nt, Homo sapiens
aucgcaccauugcacuccagca

SEQ ID NO: 47272 - RNA, 22 nt, Homo sapiens
auccucugagagaguuucauaa

SEQ ID NO: 47273 - RNA, 22 nt, Homo sapiens
auccuguaggcuaguagacagu

SEQ ID NO: 47274 - RNA, 22 nt, Homo sapiens
aucccuguguccagcaccugug

SEQ ID NO: 47275 - RNA, 22 nt, Homo sapiens
auccguugcaagggaagaauga

SEQ ID NO: 47276 - RNA, 22 nt, Homo sapiens
auccugaagcuuuacugaauuc

SEQ ID NO: 47277 - RNA, 22 nt, Homo sapiens
aucagcagcaugaaaagcaacu

SEQ ID NO: 47278 - RNA, 22 nt, Homo sapiens
aucaucacaguuguguguaaug

SEQ ID NO: 47279 - RNA, 22 nt, Homo sapiens
aucauacuguuuugauuacugu

SEQ ID NO: 47280 - RNA, 22 nt, Homo sapiens
aucagugauugauuuaaagacg

SEQ ID NO: 47281 - RNA, 23 nt, Homo sapiens
aucagguuguagaauguguuugc

SEQ ID NO: 47282 - RNA, 22 nt, Homo sapiens
auauagcucuggcuggaugacu

SEQ ID NO: 47283 - RNA, 22 nt, Homo sapiens
auaucaacaugguaggguuggu

SEQ ID NO: 47284 - RNA, 23 nt, Homo sapiens
auauaguagaugugcaguaacau

SEQ ID NO: 47285 - RNA, 22 nt, Homo sapiens
auauaugcacacgugugcauau

SEQ ID NO: 47286 - RNA, 22 nt, Homo sapiens
auaucccaguguguaaacacug

SEQ ID NO: 47287 - RNA, 22 nt, Homo sapiens
auaucccuguauaagugaaugu

SEQ ID NO: 47288 - RNA, 22 nt, Homo sapiens
auaucaagugacuggaguucca

SEQ ID NO: 47289 - RNA, 22 nt, Homo sapiens
auauccguacaguggaauauua

SEQ ID NO: 47290 - RNA, 20 nt, Homo sapiens
auaugcagacacauacauac

SEQ ID NO: 47291 - RNA, 22 nt, Homo sapiens
auaugcaaauccauagagacag

SEQ ID NO: 47292 - RNA, 22 nt, Homo sapiens
auauugguuaaauauuauguga

SEQ ID NO: 47293 - RNA, 20 nt, Homo sapiens
aucaaagacuuagaggggga

SEQ ID NO: 47294 - RNA, 22 nt, Homo sapiens
auauuguacugcuacugguucu

SEQ ID NO: 47295 - RNA, 22 nt, Homo sapiens
aucacagaacuuugagcagaga

SEQ ID NO: 47296 - RNA, 22 nt, Homo sapiens
aucaaauugucauuuuaaggau

SEQ ID NO: 47297 - RNA, 22 nt, Homo sapiens
aucacagaguuaaaacuuucuu

SEQ ID NO: 47298 - RNA, 22 nt, Homo sapiens
aucagagugaugguuuaaguau

SEQ ID NO: 47299 - RNA, 22 nt, Homo sapiens
aucaaaugcuggcagagugccu

SEQ ID NO: 47300 - RNA, 22 nt, Homo sapiens
aucaaaucuccagaaccugucu

SEQ ID NO: 47301 - RNA, 22 nt, Homo sapiens
acgcagcacauucacagcuaug

SEQ ID NO: 47302 - RNA, 22 nt, Homo sapiens
accuucauuguugccaugucca

SEQ ID NO: 47303 - RNA, 22 nt, Homo sapiens
acuacauaugacaucuucuuua

SEQ ID NO: 47304 - RNA, 20 nt, Homo sapiens
acuaaaucucauuuuaugca

SEQ ID NO: 47305 - RNA, 22 nt, Homo sapiens
acucagagauuagcacauguuu

SEQ ID NO: 47306 - RNA, 22 nt, Homo sapiens
acuacugucagacugccacuga

SEQ ID NO: 47307 - RNA, 22 nt, Homo sapiens
acuagagaugcauuuguaguuu

SEQ ID NO: 47308 - RNA, 22 nt, Homo sapiens
acagugacagaaagcugauuau

SEQ ID NO: 47309 - RNA, 22 nt, Homo sapiens
acagugcuguggucaugggucu

SEQ ID NO: 47310 - RNA, 22 nt, Homo sapiens
accugcacagccgaacauagac

SEQ ID NO: 47311 - RNA, 18 nt, Homo sapiens
acuggaauuaaacuuuuu

SEQ ID NO: 47312 - RNA, 22 nt, Homo sapiens
acugcauaaauauguguaauau

SEQ ID NO: 47313 - RNA, 22 nt, Homo sapiens
acugcacuguccuagaguccuc

SEQ ID NO: 47314 - RNA, 20 nt, Homo sapiens
acugcacuccaggcugccca

SEQ ID NO: 47315 - RNA, 22 nt, Homo sapiens
acugcacucuagccccugcgac

SEQ ID NO: 47316 - RNA, 22 nt, Homo sapiens
acugcacuccagccuuggcggc

SEQ ID NO: 47317 - RNA, 22 nt, Homo sapiens
acugcacuccagcccgggugac

SEQ ID NO: 47318 - RNA, 22 nt, Homo sapiens
aauuacucgugucuuuacugcu

SEQ ID NO: 47319 - RNA, 22 nt, Homo sapiens
aauuaguugaaagucugcuuuu

SEQ ID NO: 47320 - RNA, 22 nt, Homo sapiens
aauuaguuggcugccuaugauu

SEQ ID NO: 47321 - RNA, 19 nt, Homo sapiens
aagugguuuaaacuuguau

SEQ ID NO: 47322 - RNA, 22 nt, Homo sapiens
aaguugcuuuagguaagucaau

SEQ ID NO: 47323 - RNA, 22 nt, Homo sapiens
aauaaagcauggcuacuccaua

SEQ ID NO: 47324 - RNA, 22 nt, Homo sapiens
aauaaagcagcuuuuugggacu

SEQ ID NO: 47325 - RNA, 22 nt, Homo sapiens
aauaaagcaggguccuugcacu

SEQ ID NO: 47326 - RNA, 22 nt, Homo sapiens
aaguuguuggaguuccauuguu

SEQ ID NO: 47327 - RNA, 21 nt, Homo sapiens
aauaaagcaaccuuaugccau

SEQ ID NO: 47328 - RNA, 22 nt, Homo sapiens
acacaguaaauauguauugaau

SEQ ID NO: 47329 - RNA, 22 nt, Homo sapiens
acaagacuucuuguauucuagu

SEQ ID NO: 47330 - RNA, 20 nt, Homo sapiens
acaaaugcauucugugacau

SEQ ID NO: 47331 - RNA, 22 nt, Homo sapiens
aauugcauaugcaguagaucua

SEQ ID NO: 47332 - RNA, 22 nt, Homo sapiens
aauugcauugaauuuguagcuu

SEQ ID NO: 47333 - RNA, 16 nt, Homo sapiens
acaaagcuggcuaucu

SEQ ID NO: 47334 - RNA, 22 nt, Homo sapiens
aauuugucaccucucucccuuu

SEQ ID NO: 47335 - RNA, 23 nt, Homo sapiens
aauugcuuuugaggacuuaguug

SEQ ID NO: 47336 - RNA, 22 nt, Homo sapiens
acacaugugaaaaaaauguuac

SEQ ID NO: 47337 - RNA, 22 nt, Homo sapiens
acacauacacauaugguguaua

SEQ ID NO: 47338 - RNA, 22 nt, Homo sapiens
acaauguauauuuuacuguagg

SEQ ID NO: 47339 - RNA, 22 nt, Homo sapiens
acacauuagcaagugcuguuau

SEQ ID NO: 47340 - RNA, 22 nt, Homo sapiens
acacugucaugucucacaggca

SEQ ID NO: 47341 - RNA, 22 nt, Homo sapiens
acacuguuuuaguuauuauagc

SEQ ID NO: 47342 - RNA, 22 nt, Homo sapiens
acacucuaguguucuuaaucag

SEQ ID NO: 47343 - RNA, 22 nt, Homo sapiens
acacuggaguuaaaggugauuu

SEQ ID NO: 47344 - RNA, 20 nt, Homo sapiens
acaguagaagggauuucaaa

SEQ ID NO: 47345 - RNA, 20 nt, Homo sapiens
acagcauagccuuuuaaagc

SEQ ID NO: 47346 - RNA, 22 nt, Homo sapiens
acaggugaaguauuacacuaag

SEQ ID NO: 47347 - RNA, 22 nt, Homo sapiens
acagguauagaaagcuaaaggg

SEQ ID NO: 47348 - RNA, 19 nt, Homo sapiens
acagauagaauguucuaca

SEQ ID NO: 47349 - RNA, 22 nt, Homo sapiens
acagccauuccagccaaauacu

SEQ ID NO: 47350 - RNA, 22 nt, Homo sapiens
agcagcaccaaacagacuaaga

SEQ ID NO: 47351 - RNA, 22 nt, Homo sapiens
agcacgaaaccaaauucuguga

SEQ ID NO: 47352 - RNA, 22 nt, Homo sapiens
agcagcaugaggggacuucugc

SEQ ID NO: 47353 - RNA, 22 nt, Homo sapiens
agcaucauaccaaucugguccu

SEQ ID NO: 47354 - RNA, 22 nt, Homo sapiens
agcaucaugcaguugcuauuca

SEQ ID NO: 47355 - RNA, 22 nt, Homo sapiens
agcagugugaaaauggacuaau

SEQ ID NO: 47356 - RNA, 22 nt, Homo sapiens
agcuccuuugcuuuuuccagga

SEQ ID NO: 47357 - RNA, 22 nt, Homo sapiens
agcagugugagaauggacuaau

SEQ ID NO: 47358 - RNA, 20 nt, Homo sapiens
agcaucguuguguuauagcc

SEQ ID NO: 47359 - RNA, 22 nt, Homo sapiens
agcugauggucuuguaugaugu

SEQ ID NO: 47360 - RNA, 22 nt, Homo sapiens
agacacugaaauguauugaaga

SEQ ID NO: 47361 - RNA, 22 nt, Homo sapiens
agacuagagcagagcccucucu

SEQ ID NO: 47362 - RNA, 22 nt, Homo sapiens
agacuagagggaaaugaguugg

SEQ ID NO: 47363 - RNA, 22 nt, Homo sapiens
agacucauuuuuaucgagcaug

SEQ ID NO: 47364 - RNA, 22 nt, Homo sapiens
agagaucaacugaauuacugga

SEQ ID NO: 47365 - RNA, 22 nt, Homo sapiens
agcaccguucaaacccagguua

SEQ ID NO: 47366 - RNA, 22 nt, Homo sapiens
agcaccauuuauugaaaagaca

SEQ ID NO: 47367 - RNA, 22 nt, Homo sapiens
acuguacugucuggggcagucu

SEQ ID NO: 47368 - RNA, 22 nt, Homo sapiens
acuguauagauggaguugauuu

SEQ ID NO: 47369 - RNA, 22 nt, Homo sapiens
agaaugucagcuggauucagcu

SEQ ID NO: 47370 - RNA, 22 nt, Homo sapiens
agaauguaacucuaugaaggca

SEQ ID NO: 47371 - RNA, 22 nt, Homo sapiens
agaauguauauucuguaguugu

SEQ ID NO: 47372 - RNA, 22 nt, Homo sapiens
acuguacuccauccugggugac

SEQ ID NO: 47373 - RNA, 22 nt, Homo sapiens
acuguacuacagccugggugac

SEQ ID NO: 47374 - RNA, 22 nt, Homo sapiens
acuguacuccagccugggcaac

SEQ ID NO: 47375 - RNA, 22 nt, Homo sapiens
aguaaagccagaccuguuaauu

SEQ ID NO: 47376 - RNA, 22 nt, Homo sapiens
aguaccauuacucacuuauuuu

SEQ ID NO: 47377 - RNA, 22 nt, Homo sapiens
aguaaauuucugugcuuucaua

SEQ ID NO: 47378 - RNA, 22 nt, Homo sapiens
agguuaugauuguagagcgagg

SEQ ID NO: 47379 - RNA, 22 nt, Homo sapiens
agguuaugauuauagagcgagg

SEQ ID NO: 47380 - RNA, 22 nt, Homo sapiens
aggugcuugaaucuaugagcuc

SEQ ID NO: 47381 - RNA, 22 nt, Homo sapiens
agguauauuggacagauguaaa

SEQ ID NO: 47382 - RNA, 22 nt, Homo sapiens
aaauugcuuuugaagacuuagu

SEQ ID NO: 47383 - RNA, 23 nt, Homo sapiens
aaauuugccuauuauuccuaugg

SEQ ID NO: 47384 - RNA, 22 nt, Homo sapiens
aaaugguguuaguagaucuuua

SEQ ID NO: 47385 - RNA, 22 nt, Homo sapiens
aaaugcuucuauguggcauguu

SEQ ID NO: 47386 - RNA, 22 nt, Homo sapiens
aaauugcauugagcugcuuauu

SEQ ID NO: 47387 - RNA, 18 nt, Homo sapiens
aaauucugucccuucuuc

SEQ ID NO: 47388 - RNA, 22 nt, Homo sapiens
aaauucaucaaaugguuuguau

SEQ ID NO: 47389 - RNA, 22 nt, Homo sapiens
aaaugucauggaguguuucccc

SEQ ID NO: 47390 - RNA, 22 nt, Homo sapiens
aggaagacauauagaacuaaaa

SEQ ID NO: 47391 - RNA, 23 nt, Homo sapiens
aggaauggaaaaccaaguaucau

SEQ ID NO: 47392 - RNA, 22 nt, Homo sapiens
aggaauuuaauguaugauaaua

SEQ ID NO: 47393 - RNA, 22 nt, Homo sapiens
aggagcacaggacuuugauuau

SEQ ID NO: 47394 - RNA, 21 nt, Homo sapiens
aggagauguuuguccuuuuag

SEQ ID NO: 47395 - RNA, 22 nt, Homo sapiens
aggagcacuggccuuggaguca

SEQ ID NO: 47396 - RNA, 22 nt, Homo sapiens
agcuuuuugggcagcuauugac

SEQ ID NO: 47397 - RNA, 22 nt, Homo sapiens
agcuuuuugggaggccuuagga

SEQ ID NO: 47398 - RNA, 19 nt, Homo sapiens
agcuuuggcuaacuuucuc

SEQ ID NO: 47399 - RNA, 22 nt, Homo sapiens
agcuggucuuggggaagaguag

SEQ ID NO: 47400 - RNA, 22 nt, Homo sapiens
agcuggcuguagcugcaagucu

SEQ ID NO: 47401 - RNA, 22 nt, Homo sapiens
uaugaauuuuauccaggauaua

SEQ ID NO: 47402 - RNA, 22 nt, Homo sapiens
uaugaagccaggauuuauuauu

SEQ ID NO: 47403 - RNA, 22 nt, Homo sapiens
uaugaaagcuacuucucacaau

SEQ ID NO: 47404 - RNA, 22 nt, Homo sapiens
uaucagcagagucauacuucaa

SEQ ID NO: 47405 - RNA, 22 nt, Homo sapiens
uaugaugcuguuuagaaucucu

SEQ ID NO: 47406 - RNA, 22 nt, Homo sapiens
uauugaauuugagcugucucuu

SEQ ID NO: 47407 - RNA, 18 nt, Homo sapiens
uauuccucuuccucuauc

SEQ ID NO: 47408 - RNA, 20 nt, Homo sapiens
uauucacucuccagucuugc

SEQ ID NO: 47409 - RNA, 22 nt, Homo sapiens
uauggcuuuuauuauguuguag

SEQ ID NO: 47410 - RNA, 22 nt, Homo sapiens
uauuggcucuguuucucugaag

SEQ ID NO: 47411 - RNA, 22 nt, Homo sapiens
uauugcuuuugauucaaggcag

SEQ ID NO: 47412 - RNA, 22 nt, Homo sapiens
uauuugauugacuuuagcagga

SEQ ID NO: 47413 - RNA, 22 nt, Homo sapiens
uauuguuaaagauguuaaugau

SEQ ID NO: 47414 - RNA, 22 nt, Homo sapiens
uaucacagaggguauccuagag

SEQ ID NO: 47415 - RNA, 22 nt, Homo sapiens
uaucacaggucaggaaucuugc

SEQ ID NO: 47416 - RNA, 23 nt, Homo sapiens
uauaacuuuuaauuuacuggccu

SEQ ID NO: 47417 - RNA, 22 nt, Homo sapiens
uauagcuauuguuaauggaacu

SEQ ID NO: 47418 - RNA, 22 nt, Homo sapiens
uauaggacuugguguaguuucu

SEQ ID NO: 47419 - RNA, 22 nt, Homo sapiens
uauagcuugauuauggugaugg

SEQ ID NO: 47420 - RNA, 20 nt, Homo sapiens
uaucacauggggagaaaccu

SEQ ID NO: 47421 - RNA, 22 nt, Homo sapiens
uaucacggaguacauguucugu

SEQ ID NO: 47422 - RNA, 21 nt, Homo sapiens
uaucacauuggugauuaaguu

SEQ ID NO: 47423 - RNA, 22 nt, Homo sapiens
uaucacuguuguuuguuuaagg

SEQ ID NO: 47424 - RNA, 22 nt, Homo sapiens
uaucagcacaguggguucaugg

SEQ ID NO: 47425 - RNA, 22 nt, Homo sapiens
uaguaggacaggauuucaguua

SEQ ID NO: 47426 - RNA, 22 nt, Homo sapiens
uauacacgugugcauauauaca

SEQ ID NO: 47427 - RNA, 22 nt, Homo sapiens
uaguagagauggggcacaugcc

SEQ ID NO: 47428 - RNA, 22 nt, Homo sapiens
uauagcaaugugccacucucug

SEQ ID NO: 47429 - RNA, 22 nt, Homo sapiens
uauacaugugccauguuggugu

SEQ ID NO: 47430 - RNA, 22 nt, Homo sapiens
uauagcacugagaauguaauuc

SEQ ID NO: 47431 - RNA, 17 nt, Homo sapiens
uauagcacuucucacau

SEQ ID NO: 47432 - RNA, 22 nt, Homo sapiens
uauagcacaucuguguguacau

SEQ ID NO: 47433 - RNA, 22 nt, Homo sapiens
uauagcacugaaagaggugauu

SEQ ID NO: 47434 - RNA, 22 nt, Homo sapiens
uaguaacacauugaacgaucgc

SEQ ID NO: 47435 - RNA, 22 nt, Homo sapiens
uaguaaacauaguucuuuugcu

SEQ ID NO: 47436 - RNA, 22 nt, Homo sapiens
uagcaguaagaaacugacauug

SEQ ID NO: 47437 - RNA, 18 nt, Homo sapiens
uagcagacaucauugggg

SEQ ID NO: 47438 - RNA, 22 nt, Homo sapiens
uagcagcaccccacucuacugg

SEQ ID NO: 47439 - RNA, 22 nt, Homo sapiens
uacaguagaaugucuuucaaaa

SEQ ID NO: 47440 - RNA, 22 nt, Homo sapiens
uacaggugcucuacagacagga

SEQ ID NO: 47441 - RNA, 22 nt, Homo sapiens
uacaggcaccuggcuaauuuuu

SEQ ID NO: 47442 - RNA, 22 nt, Homo sapiens
uacauaguagauauaggguuua

SEQ ID NO: 47443 - RNA, 22 nt, Homo sapiens
uacagucuggaggccuguguug

SEQ ID NO: 47444 - RNA, 16 nt, Homo sapiens
uacaauguagaaaaca

SEQ ID NO: 47445 - RNA, 22 nt, Homo sapiens
uacacacguguguauauauaca

SEQ ID NO: 47446 - RNA, 22 nt, Homo sapiens
uacaagcuaaaauggaagauca

SEQ ID NO: 47447 - RNA, 22 nt, Homo sapiens
uacaccauuugauucuuuaagc

SEQ ID NO: 47448 - RNA, 22 nt, Homo sapiens
uacaccaauuuaaucaaaagca

SEQ ID NO: 47449 - RNA, 21 nt, Homo sapiens
uacacuacugguggaaaugca

SEQ ID NO: 47450 - RNA, 22 nt, Homo sapiens
uacagaauauuucugcccugag

SEQ ID NO: 47451 - RNA, 22 nt, Homo sapiens
uacagaauucugucccuugagu

SEQ ID NO: 47452 - RNA, 20 nt, Homo sapiens
uacacguaugagcacaugug

SEQ ID NO: 47453 - RNA, 22 nt, Homo sapiens
uacauacuguaugguucuguuu

SEQ ID NO: 47454 - RNA, 22 nt, Homo sapiens
uacguaucagucguuucuguga

SEQ ID NO: 47455 - RNA, 22 nt, Homo sapiens
uacaugcaugggcaugugugca

SEQ ID NO: 47456 - RNA, 22 nt, Homo sapiens
uacguguauuguuuucacaaga

SEQ ID NO: 47457 - RNA, 21 nt, Homo sapiens
uagauacuguauuaaaccuag

SEQ ID NO: 47458 - RNA, 22 nt, Homo sapiens
uagaggaaugaauuuggccaga

SEQ ID NO: 47459 - RNA, 22 nt, Homo sapiens
uagaccaauuggcauauaguaa

SEQ ID NO: 47460 - RNA, 22 nt, Homo sapiens
uaauagagucauuauuauuguu

SEQ ID NO: 47461 - RNA, 22 nt, Homo sapiens
uaauagcaguguuacuaggacu

SEQ ID NO: 47462 - RNA, 22 nt, Homo sapiens
uaauauguuuugaaaucaggaa

SEQ ID NO: 47463 - RNA, 22 nt, Homo sapiens
uaaucucagcugagcugagauu

SEQ ID NO: 47464 - RNA, 22 nt, Homo sapiens
uaauaguuucagaaguuguuuu

SEQ ID NO: 47465 - RNA, 22 nt, Homo sapiens
uaauaauguuaggcuuacucaa

SEQ ID NO: 47466 - RNA, 21 nt, Homo sapiens
uaauaaugucucagacaccua

SEQ ID NO: 47467 - RNA, 22 nt, Homo sapiens
uacaaaucuagguuuguuacug

SEQ ID NO: 47468 - RNA, 22 nt, Homo sapiens
uacaaagcuuucugcaaaucau

SEQ ID NO: 47469 - RNA, 22 nt, Homo sapiens
uaauugcaguucuguguuauau

SEQ ID NO: 47470 - RNA, 22 nt, Homo sapiens
uaaugcaucagugguaguucuu

SEQ ID NO: 47471 - RNA, 22 nt, Homo sapiens
uaaugcaucaugguuggcaaac

SEQ ID NO: 47472 - RNA, 22 nt, Homo sapiens
guuugcagaucaugaagaaccc

SEQ ID NO: 47473 - RNA, 22 nt, Homo sapiens
uaaguaaaugaaagguugauuu

SEQ ID NO: 47474 - RNA, 22 nt, Homo sapiens
guuuacagucgacuugggaaua

SEQ ID NO: 47475 - RNA, 22 nt, Homo sapiens
guuguggcuugugauuaagcac

SEQ ID NO: 47476 - RNA, 22 nt, Homo sapiens
guuguacuaccucucguauuag

SEQ ID NO: 47477 - RNA, 22 nt, Homo sapiens
guugcuuauuccuguaauccca

SEQ ID NO: 47478 - RNA, 22 nt, Homo sapiens
uaaguauuaggccccaggcugg

SEQ ID NO: 47479 - RNA, 22 nt, Homo sapiens
uaaguacugucagaauuggacu

SEQ ID NO: 47480 - RNA, 22 nt, Homo sapiens
uaaguaauugugguuuuugcca

SEQ ID NO: 47481 - RNA, 22 nt, Homo sapiens
uaagugaaggaaguguguuuac

SEQ ID NO: 47482 - RNA, 22 nt, Homo sapiens
uaagugcuugacuuugauguuu

SEQ ID NO: 47483 - RNA, 23 nt, Homo sapiens
uaagucacacagauuaauuuauu

SEQ ID NO: 47484 - RNA, 22 nt, Homo sapiens
uaagugaauuucacuacugagu

SEQ ID NO: 47485 - RNA, 22 nt, Homo sapiens
gucauugagucagggaguaucu

SEQ ID NO: 47486 - RNA, 22 nt, Homo sapiens
gucauguuuaacuucuugagga

SEQ ID NO: 47487 - RNA, 22 nt, Homo sapiens
guccaagacuaggaguuggcag

SEQ ID NO: 47488 - RNA, 22 nt, Homo sapiens
gucauugucaauugacaauugu

SEQ ID NO: 47489 - RNA, 22 nt, Homo sapiens
gucauuguguggacauggagaa

SEQ ID NO: 47490 - RNA, 22 nt, Homo sapiens
gucuaugguucaggguggagug

SEQ ID NO: 47491 - RNA, 22 nt, Homo sapiens
gucucacagcuagcugcuuuau

SEQ ID NO: 47492 - RNA, 22 nt, Homo sapiens
gucccagagauauugugucuuu

SEQ ID NO: 47493 - RNA, 22 nt, Homo sapiens
gugagauggaguuggugucuuu

SEQ ID NO: 47494 - RNA, 16 nt, Homo sapiens
gugagagaugacaaac

SEQ ID NO: 47495 - RNA, 22 nt, Homo sapiens
gugagauuagcugagauccuug

SEQ ID NO: 47496 - RNA, 21 nt, Homo sapiens
gugcagaugccacagucacuc

SEQ ID NO: 47497 - RNA, 22 nt, Homo sapiens
gugcacgucuuaggaggucacg

SEQ ID NO: 47498 - RNA, 21 nt, Homo sapiens
gugcagacacacauauaggcu

SEQ ID NO: 47499 - RNA, 22 nt, Homo sapiens
gugcaguuuuaagugaguuucu

SEQ ID NO: 47500 - RNA, 22 nt, Homo sapiens
gugcaacaugccuggcuaauuu

SEQ ID NO: 47501 - RNA, 22 nt, Homo sapiens
gugcaguuuugagugaguuucu

SEQ ID NO: 47502 - RNA, 22 nt, Homo sapiens
gugcaaauguuauugagguuuu

SEQ ID NO: 47503 - RNA, 22 nt, Homo sapiens
gugcaagagugacugcaguuuu

SEQ ID NO: 47504 - RNA, 22 nt, Homo sapiens
gugcaagagugauugcaguuuu

SEQ ID NO: 47505 - RNA, 22 nt, Homo sapiens
gugagauggagucuugcuuugu

SEQ ID NO: 47506 - RNA, 22 nt, Homo sapiens
gugggaugaucgcuugagccca

SEQ ID NO: 47507 - RNA, 21 nt, Homo sapiens
guggccuuuggagcaugucag

SEQ ID NO: 47508 - RNA, 22 nt, Homo sapiens
guguauauccuauuaguucugu

SEQ ID NO: 47509 - RNA, 22 nt, Homo sapiens
gugcauaugcaugugcaugcac

SEQ ID NO: 47510 - RNA, 22 nt, Homo sapiens
gugcauaucugugguuggcuga

SEQ ID NO: 47511 - RNA, 22 nt, Homo sapiens
guggcacgaugaucugggcuca

SEQ ID NO: 47512 - RNA, 22 nt, Homo sapiens
guuaugcagcaauugauaaucu

SEQ ID NO: 47513 - RNA, 22 nt, Homo sapiens
guuauguuaaauuguuguaugc

SEQ ID NO: 47514 - RNA, 22 nt, Homo sapiens
guuauuaguugauauuaaguuc

SEQ ID NO: 47515 - RNA, 22 nt, Homo sapiens
guuauugcucucgaagacucuc

SEQ ID NO: 47516 - RNA, 20 nt, Homo sapiens
guucacaggcuuccuuucag

SEQ ID NO: 47517 - RNA, 22 nt, Homo sapiens
guuggaauuaaaaggcaaguau

SEQ ID NO: 47518 - RNA, 22 nt, Homo sapiens
guucaguaguucauucauuuau

SEQ ID NO: 47519 - RNA, 22 nt, Homo sapiens
guucaguuuuaaagggaaauug

SEQ ID NO: 47520 - RNA, 22 nt, Homo sapiens
guucacucuggagaauauugac

SEQ ID NO: 47521 - RNA, 22 nt, Homo sapiens
guuaagaaguguaacuuaaguu

SEQ ID NO: 47522 - RNA, 22 nt, Homo sapiens
guuaaagacauccacauaggag

SEQ ID NO: 47523 - RNA, 22 nt, Homo sapiens
gugugaacaucauagaguguau

SEQ ID NO: 47524 - RNA, 22 nt, Homo sapiens
gugucaguggggagugaucuuc

SEQ ID NO: 47525 - RNA, 22 nt, Homo sapiens
ggcuguguguuaaaauaggcuu

SEQ ID NO: 47526 - RNA, 22 nt, Homo sapiens
gggaagugugguuucuuuacag

SEQ ID NO: 47527 - RNA, 22 nt, Homo sapiens
gggauguaaaagugggcacauu

SEQ ID NO: 47528 - RNA, 22 nt, Homo sapiens
gggagcacaagaaauguuucau

SEQ ID NO: 47529 - RNA, 22 nt, Homo sapiens
gggagugugcacacaugguaua

SEQ ID NO: 47530 - RNA, 22 nt, Homo sapiens
gggaguguguaggacccagugu

SEQ ID NO: 47531 - RNA, 17 nt, Homo sapiens
gggucaccuugcaggua

SEQ ID NO: 47532 - RNA, 22 nt, Homo sapiens
gggcagaugucuggacaccuca

SEQ ID NO: 47533 - RNA, 22 nt, Homo sapiens
gguaacaguggggcuaugcuua

SEQ ID NO: 47534 - RNA, 22 nt, Homo sapiens
gguaauguaacugguauucugu

SEQ ID NO: 47535 - RNA, 22 nt, Homo sapiens
gguauuuaaaguaccugucugc

SEQ ID NO: 47536 - RNA, 22 nt, Homo sapiens
ggaaguuaauacagauagagua

SEQ ID NO: 47537 - RNA, 22 nt, Homo sapiens
ggaagaauauuaggggauuucg

SEQ ID NO: 47538 - RNA, 19 nt, Homo sapiens
ggaaugcaccaguccuugc

SEQ ID NO: 47539 - RNA, 22 nt, Homo sapiens
ggaauguuaaagacuacacuga

SEQ ID NO: 47540 - RNA, 22 nt, Homo sapiens
ggaaaguccuucuguaggcucc

SEQ ID NO: 47541 - RNA, 19 nt, Homo sapiens
ggaaaugucuauuaagauc

SEQ ID NO: 47542 - RNA, 22 nt, Homo sapiens
ggaaaucaucauucucgguaua

SEQ ID NO: 47543 - RNA, 22 nt, Homo sapiens
ggacacaucaugugaccaaggu

SEQ ID NO: 47544 - RNA, 22 nt, Homo sapiens
ggacagaaaggguucaccaaac

SEQ ID NO: 47545 - RNA, 22 nt, Homo sapiens
ggacagaugggcucccgggucu

SEQ ID NO: 47546 - RNA, 22 nt, Homo sapiens
ggccagaugaucuaugaaggaa

SEQ ID NO: 47547 - RNA, 22 nt, Homo sapiens
guauuuuguuagggugugguau

SEQ ID NO: 47548 - RNA, 19 nt, Homo sapiens
guauuugacuuucuuguuu

SEQ ID NO: 47549 - RNA, 22 nt, Homo sapiens
guauugaguaaauguuuauugg

SEQ ID NO: 47550 - RNA, 22 nt, Homo sapiens
guauuguacuacaagcucuuua

SEQ ID NO: 47551 - RNA, 22 nt, Homo sapiens
gucaguuucacucagcuggaac

SEQ ID NO: 47552 - RNA, 22 nt, Homo sapiens
gucaguggauacugucucuguc

SEQ ID NO: 47553 - RNA, 22 nt, Homo sapiens
gucauauaggguuuaccuguau

SEQ ID NO: 47554 - RNA, 22 nt, Homo sapiens
gucauaugcucggaaaauguua

SEQ ID NO: 47555 - RNA, 22 nt, Homo sapiens
gucaucaggacgggucaucugc

SEQ ID NO: 47556 - RNA, 22 nt, Homo sapiens
guagagguagauucuguuuuga

SEQ ID NO: 47557 - RNA, 22 nt, Homo sapiens
guagaauguauacaguauacag

SEQ ID NO: 47558 - RNA, 22 nt, Homo sapiens
guagcagcaauuuacuccauac

SEQ ID NO: 47559 - RNA, 22 nt, Homo sapiens
guaugaguuuucugaugugugg

SEQ ID NO: 47560 - RNA, 22 nt, Homo sapiens
guagaucucaacacuggaagua

SEQ ID NO: 47561 - RNA, 22 nt, Homo sapiens
guauggaagucaguuuguuggc

SEQ ID NO: 47562 - RNA, 22 nt, Homo sapiens
guauggcaugcaugagaauuuc

SEQ ID NO: 47563 - RNA, 22 nt, Homo sapiens
guauggcauuuguggauuggcc

SEQ ID NO: 47564 - RNA, 22 nt, Homo sapiens
guaugugcauuguaaauuuuga

SEQ ID NO: 47565 - RNA, 22 nt, Homo sapiens
guauuagaugguauuugaagau

SEQ ID NO: 47566 - RNA, 22 nt, Homo sapiens
guacauagucacacauauacau

SEQ ID NO: 47567 - RNA, 22 nt, Homo sapiens
guacagugcucacaaugagagc

SEQ ID NO: 47568 - RNA, 22 nt, Homo sapiens
gguguguaaauuacuuaucucu

SEQ ID NO: 47569 - RNA, 22 nt, Homo sapiens
gguuagaaacagguccucagga

SEQ ID NO: 47570 - RNA, 22 nt, Homo sapiens
guaaagacacaugcacacguau

SEQ ID NO: 47571 - RNA, 19 nt, Homo sapiens
gguucaguuuauaaagaug

SEQ ID NO: 47572 - RNA, 22 nt, Homo sapiens
guacacguggcuguguaggagu

SEQ ID NO: 47573 - RNA, 22 nt, Homo sapiens
guacacauacauauaugugugu

SEQ ID NO: 47574 - RNA, 22 nt, Homo sapiens
guaaauaccaguuucuggaaca

SEQ ID NO: 47575 - RNA, 22 nt, Homo sapiens
guaaaucucuguuuucauggac

SEQ ID NO: 47576 - RNA, 22 nt, Homo sapiens
gguccgccugccuuggccuccc

SEQ ID NO: 47577 - RNA, 22 nt, Homo sapiens
ggugaauuguaccccauaggau

SEQ ID NO: 47578 - RNA, 22 nt, Homo sapiens
ggucauggauguuuauaguaca

SEQ ID NO: 47579 - RNA, 22 nt, Homo sapiens
ggugagaaagggauuccuguuc

SEQ ID NO: 47580 - RNA, 22 nt, Homo sapiens
ggugagauaucugcugauguuu

SEQ ID NO: 47581 - RNA, 22 nt, Homo sapiens
cuugcauagaguuauugcccuu

SEQ ID NO: 47582 - RNA, 22 nt, Homo sapiens
cuugcagagucauucuaauuuc

SEQ ID NO: 47583 - RNA, 22 nt, Homo sapiens
cuugcagagcccauggauguca

SEQ ID NO: 47584 - RNA, 22 nt, Homo sapiens
cuuccagcuggguucagucagu

SEQ ID NO: 47585 - RNA, 22 nt, Homo sapiens
cugagguuguucuucucagugg

SEQ ID NO: 47586 - RNA, 22 nt, Homo sapiens
cugagguuaggaguuugagacc

SEQ ID NO: 47587 - RNA, 22 nt, Homo sapiens
cugauguagguggucugugauc

SEQ ID NO: 47588 - RNA, 22 nt, Homo sapiens
cugauuguuugccucuaaaauc

SEQ ID NO: 47589 - RNA, 19 nt, Homo sapiens
cuguuguacuccaggcauu

SEQ ID NO: 47590 - RNA, 22 nt, Homo sapiens
cuguuuguuuaggguacucaga

SEQ ID NO: 47591 - RNA, 22 nt, Homo sapiens
cugcagaucuuggggcuugcca

SEQ ID NO: 47592 - RNA, 22 nt, Homo sapiens
cuuagguuaaucaugaaccuuu

SEQ ID NO: 47593 - RNA, 22 nt, Homo sapiens
cuuaggguacuuuggugcauca

SEQ ID NO: 47594 - RNA, 20 nt, Homo sapiens
cuuaucaguggcaaguauaa

SEQ ID NO: 47595 - RNA, 17 nt, Homo sapiens
cuucaaauaauuucccc

SEQ ID NO: 47596 - RNA, 22 nt, Homo sapiens
gaaguaauaaauggauucuuaa

SEQ ID NO: 47597 - RNA, 23 nt, Homo sapiens
gaaguauagcaugcacauggaaa

SEQ ID NO: 47598 - RNA, 22 nt, Homo sapiens
gaagauucaaccaaaccagaac

SEQ ID NO: 47599 - RNA, 22 nt, Homo sapiens
gaagaucacacuguagaucuau

SEQ ID NO: 47600 - RNA, 22 nt, Homo sapiens
gaagacauuugcugcacguccu

SEQ ID NO: 47601 - RNA, 22 nt, Homo sapiens
cuuugauuauaaaaggguguuu

SEQ ID NO: 47602 - RNA, 22 nt, Homo sapiens
cuuugaugagaaaauacuuugu

SEQ ID NO: 47603 - RNA, 22 nt, Homo sapiens
cuuguguuacauauuuaagaga

SEQ ID NO: 47604 - RNA, 17 nt, Homo sapiens
cuuguugugguaguuug

SEQ ID NO: 47605 - RNA, 22 nt, Homo sapiens
cuuugcacaucucugcuuuccc

SEQ ID NO: 47606 - RNA, 22 nt, Homo sapiens
cuuugcguugaacaaagccaua

SEQ ID NO: 47607 - RNA, 22 nt, Homo sapiens
cuuuggcacuuccuaagugcca

SEQ ID NO: 47608 - RNA, 22 nt, Homo sapiens
cuuuggcauuagccuguauaga

SEQ ID NO: 47609 - RNA, 22 nt, Homo sapiens
cuuuggcaaugucauuuucaau

SEQ ID NO: 47610 - RNA, 22 nt, Homo sapiens
gaaucacaguuauuagagcagc

SEQ ID NO: 47611 - RNA, 22 nt, Homo sapiens
gaaucacagauuaugaguaucu

SEQ ID NO: 47612 - RNA, 22 nt, Homo sapiens
gaaugcuaccagcaucuagugg

SEQ ID NO: 47613 - RNA, 22 nt, Homo sapiens
gaaucauuggguugauucaaga

SEQ ID NO: 47614 - RNA, 22 nt, Homo sapiens
gaauugcacaaaaacugcuugu

SEQ ID NO: 47615 - RNA, 22 nt, Homo sapiens
gagaacuggcgugaacugcacg

SEQ ID NO: 47616 - RNA, 22 nt, Homo sapiens
gagacggagucuugcucuguug

SEQ ID NO: 47617 - RNA, 22 nt, Homo sapiens
gagacggagucacgcccuguca

SEQ ID NO: 47618 - RNA, 22 nt, Homo sapiens
gagacggagucucgcucugucg

SEQ ID NO: 47619 - RNA, 22 nt, Homo sapiens
gagacggagucucgcucuguca

SEQ ID NO: 47620 - RNA, 22 nt, Homo sapiens
gaguauauuugcacuguuaugu

SEQ ID NO: 47621 - RNA, 22 nt, Homo sapiens
gagguuauuggggugcuugugu

SEQ ID NO: 47622 - RNA, 22 nt, Homo sapiens
gagguaugauugacauauaaaa

SEQ ID NO: 47623 - RNA, 22 nt, Homo sapiens
gagguaaguaagaauggcaagc

SEQ ID NO: 47624 - RNA, 22 nt, Homo sapiens
gaggguguuguguugcuuaaua

SEQ ID NO: 47625 - RNA, 22 nt, Homo sapiens
gagaugaaguuaaggaucuuua

SEQ ID NO: 47626 - RNA, 22 nt, Homo sapiens
gagaucuuuaagaacuacugcu

SEQ ID NO: 47627 - RNA, 22 nt, Homo sapiens
gagaugcaccuugucacguuuc

SEQ ID NO: 47628 - RNA, 22 nt, Homo sapiens
gagaucuuggccaaguuucuua

SEQ ID NO: 47629 - RNA, 22 nt, Homo sapiens
gagaucaugcugguucucucau

SEQ ID NO: 47630 - RNA, 22 nt, Homo sapiens
gagauauuauuucccuuucaca

SEQ ID NO: 47631 - RNA, 21 nt, Homo sapiens
gagauagguaccgaagcuuag

SEQ ID NO: 47632 - RNA, 22 nt, Homo sapiens
gagauaauagcuauaggaucuu

SEQ ID NO: 47633 - RNA, 22 nt, Homo sapiens
gaucuguuguuuggaaguauca

SEQ ID NO: 47634 - RNA, 22 nt, Homo sapiens
gaucucaguggauacugugaug

SEQ ID NO: 47635 - RNA, 22 nt, Homo sapiens
gaucaguuucuggagauacgua

SEQ ID NO: 47636 - RNA, 22 nt, Homo sapiens
gaugauguugaauguucucacc

SEQ ID NO: 47637 - RNA, 22 nt, Homo sapiens
gaugauguuacucuuuuuccuu

SEQ ID NO: 47638 - RNA, 22 nt, Homo sapiens
gaugauauuugagucauuagaa

SEQ ID NO: 47639 - RNA, 22 nt, Homo sapiens
gaugagguagaagacucagcaa

SEQ ID NO: 47640 - RNA, 22 nt, Homo sapiens
gaugagguaggccugcuuugaa

SEQ ID NO: 47641 - RNA, 22 nt, Homo sapiens
gauaguugugagaacucuuacu

SEQ ID NO: 47642 - RNA, 22 nt, Homo sapiens
gaguauuuuacaucguguaauu

SEQ ID NO: 47643 - RNA, 22 nt, Homo sapiens
gagucagugucuugcucuguca

SEQ ID NO: 47644 - RNA, 22 nt, Homo sapiens
gauacuggcuuuauagaaugau

SEQ ID NO: 47645 - RNA, 22 nt, Homo sapiens
gauauguaguaguugaaaaaga

SEQ ID NO: 47646 - RNA, 22 nt, Homo sapiens
gauacuguauccuaaaagcuuu

SEQ ID NO: 47647 - RNA, 19 nt, Homo sapiens
gauaucuagggggagguuc

SEQ ID NO: 47648 - RNA, 17 nt, Homo sapiens
gaucacagucgucuccu

SEQ ID NO: 47649 - RNA, 22 nt, Homo sapiens
gauagugaaccaagggguaauu

SEQ ID NO: 47650 - RNA, 22 nt, Homo sapiens
gauauuacuuccaauauugcaa

SEQ ID NO: 47651 - RNA, 22 nt, Homo sapiens
gcugguguagagugcagaaagg

SEQ ID NO: 47652 - RNA, 22 nt, Homo sapiens
gcuggaauuaacauagaugugc

SEQ ID NO: 47653 - RNA, 22 nt, Homo sapiens
gcugcuguuuaguuucuccugg

SEQ ID NO: 47654 - RNA, 22 nt, Homo sapiens
gcgguuuuaagugaguuucuua

SEQ ID NO: 47655 - RNA, 22 nt, Homo sapiens
gcuaaaucuguaaaaugaggag

SEQ ID NO: 47656 - RNA, 19 nt, Homo sapiens
gcggcacuggagacacagc

SEQ ID NO: 47657 - RNA, 22 nt, Homo sapiens
gcccgugagacuggaagcaaga

SEQ ID NO: 47658 - RNA, 20 nt, Homo sapiens
gcauaugucuuuauagcaga

SEQ ID NO: 47659 - RNA, 22 nt, Homo sapiens
gauuugagagaggguguuuaua

SEQ ID NO: 47660 - RNA, 22 nt, Homo sapiens
gauugcuaaauuguccuucugu

SEQ ID NO: 47661 - RNA, 22 nt, Homo sapiens
gcaaaguguuuuuaggaagucu

SEQ ID NO: 47662 - RNA, 22 nt, Homo sapiens
gauuguguucauaggcauguua

SEQ ID NO: 47663 - RNA, 22 nt, Homo sapiens
gauugcaauuuaggugagagag

SEQ ID NO: 47664 - RNA, 22 nt, Homo sapiens
gauuccacuuucugucucuaug

SEQ ID NO: 47665 - RNA, 22 nt, Homo sapiens
gaugcaaauuaagcuugggaca

SEQ ID NO: 47666 - RNA, 22 nt, Homo sapiens
gcagcacaugacuguauguaua

SEQ ID NO: 47667 - RNA, 22 nt, Homo sapiens
gcaacccgucaucuagguuuua

SEQ ID NO: 47668 - RNA, 22 nt, Homo sapiens
gcaggcaugacauuucacucuu

SEQ ID NO: 47669 - RNA, 22 nt, Homo sapiens
gcaguggugugugccagccuag

SEQ ID NO: 47670 - RNA, 23 nt, Homo sapiens
ccgugagagaguucauagaaagc

SEQ ID NO: 47671 - RNA, 22 nt, Homo sapiens
ccccugaaacucacucauuauc

SEQ ID NO: 47672 - RNA, 17 nt, Homo sapiens
ccccugagcgaugcagu

SEQ ID NO: 47673 - RNA, 22 nt, Homo sapiens
cccgugucuuggucuagggccu

SEQ ID NO: 47674 - RNA, 19 nt, Homo sapiens
ccauggcaaugaucugaug

SEQ ID NO: 47675 - RNA, 22 nt, Homo sapiens
cccagcguucggcauggcugag

SEQ ID NO: 47676 - RNA, 22 nt, Homo sapiens
ccccauuguugugguuuuaucu

SEQ ID NO: 47677 - RNA, 22 nt, Homo sapiens
caucagcaauguaugaggguuc

SEQ ID NO: 47678 - RNA, 23 nt, Homo sapiens
caucacauagaggaaagaggaca

SEQ ID NO: 47679 - RNA, 22 nt, Homo sapiens
caucacacuuggauguaagaca

SEQ ID NO: 47680 - RNA, 21 nt, Homo sapiens
caucacauuacucaaaguccu

SEQ ID NO: 47681 - RNA, 22 nt, Homo sapiens
cauaugguuuuauguucuucau

SEQ ID NO: 47682 - RNA, 22 nt, Homo sapiens
ccacaaccucaacagcaucuau

SEQ ID NO: 47683 - RNA, 22 nt, Homo sapiens
cuaugagucugcagaucuauua

SEQ ID NO: 47684 - RNA, 22 nt, Homo sapiens
cuauucacaauggugaagauau

SEQ ID NO: 47685 - RNA, 22 nt, Homo sapiens
cuauucacaggcaauauguaca

SEQ ID NO: 47686 - RNA, 22 nt, Homo sapiens
cuauuugguuggugaaaaaagu

SEQ ID NO: 47687 - RNA, 22 nt, Homo sapiens
ccuucauugcaucuuuaagaga

SEQ ID NO: 47688 - RNA, 22 nt, Homo sapiens
ccuuuguuaguuugcugagaau

SEQ ID NO: 47689 - RNA, 22 nt, Homo sapiens
ccugucuugauuaaauuacuua

SEQ ID NO: 47690 - RNA, 22 nt, Homo sapiens
ccugaugacacgggagauguac

SEQ ID NO: 47691 - RNA, 22 nt, Homo sapiens
cucacaaccuuaugaagcauga

SEQ ID NO: 47692 - RNA, 21 nt, Homo sapiens
cucauauugcuuuuccauggu

SEQ ID NO: 47693 - RNA, 22 nt, Homo sapiens
cucaguuuugccuuguuuaagg

SEQ ID NO: 47694 - RNA, 22 nt, Homo sapiens
cucagggugguggacucuaaua

SEQ ID NO: 47695 - RNA, 22 nt, Homo sapiens
cucaguagaaaauacauggacu

SEQ ID NO: 47696 - RNA, 22 nt, Homo sapiens
cugaagugcuugccacauaaaa

SEQ ID NO: 47697 - RNA, 22 nt, Homo sapiens
cugaauguuucacucugaaaug

SEQ ID NO: 47698 - RNA, 22 nt, Homo sapiens
cugaaaucagccaguuaguuuc

SEQ ID NO: 47699 - RNA, 22 nt, Homo sapiens
cucuuuuguuccuaguuugauc

SEQ ID NO: 47700 - RNA, 22 nt, Homo sapiens
cucugguucugcagugcacccu

SEQ ID NO: 47701 - RNA, 22 nt, Homo sapiens
auuagguuguugcaaaaguaau

SEQ ID NO: 47702 - RNA, 22 nt, Homo sapiens
auuagguuggugcaaaaguaau

SEQ ID NO: 47703 - RNA, 22 nt, Homo sapiens
auuauaguguauacuugaaauu

SEQ ID NO: 47704 - RNA, 22 nt, Homo sapiens
auuauauguguaugugcauacc

SEQ ID NO: 47705 - RNA, 22 nt, Homo sapiens
auuauuaguuguugaaugaagu

SEQ ID NO: 47706 - RNA, 22 nt, Homo sapiens
auuauugacucauagaaaggau

SEQ ID NO: 47707 - RNA, 22 nt, Homo sapiens
auuagguuggugcaaaacuuuc

SEQ ID NO: 47708 - RNA, 22 nt, Homo sapiens
auuaaguuaggauuuugagaua

SEQ ID NO: 47709 - RNA, 22 nt, Homo sapiens
auuacacuuucuauucaaugag

SEQ ID NO: 47710 - RNA, 22 nt, Homo sapiens
auuacauagucaaggugucuca

SEQ ID NO: 47711 - RNA, 22 nt, Homo sapiens
auuggcaauggcaaagcagagu

SEQ ID NO: 47712 - RNA, 22 nt, Homo sapiens
auuggcaagauagcauaugagg

SEQ ID NO: 47713 - RNA, 22 nt, Homo sapiens
auugcuuaagucccuguauuag

SEQ ID NO: 47714 - RNA, 22 nt, Homo sapiens
auugcucuuagaaauauuucuu

SEQ ID NO: 47715 - RNA, 22 nt, Homo sapiens
auuggacagcauuucuagacuu

SEQ ID NO: 47716 - RNA, 22 nt, Homo sapiens
auugcugagacauugcuaaucu

SEQ ID NO: 47717 - RNA, 22 nt, Homo sapiens
auugcauugugaucuucccaga

SEQ ID NO: 47718 - RNA, 22 nt, Homo sapiens
auugcuaacugaaauaagacca

SEQ ID NO: 47719 - RNA, 22 nt, Homo sapiens
auugcauuuucagguuggucug

SEQ ID NO: 47720 - RNA, 22 nt, Homo sapiens
auugcccaggcuggagugcagu

SEQ ID NO: 47721 - RNA, 22 nt, Homo sapiens
auuucuacuccuguguccagaa

SEQ ID NO: 47722 - RNA, 22 nt, Homo sapiens
auuucacugagacaugugccca

SEQ ID NO: 47723 - RNA, 21 nt, Homo sapiens
auuugguggcugugugacacu

SEQ ID NO: 47724 - RNA, 22 nt, Homo sapiens
auuugucacuuaacagccauua

SEQ ID NO: 47725 - RNA, 22 nt, Homo sapiens
auuuugcauugcuguaaaggaa

SEQ ID NO: 47726 - RNA, 22 nt, Homo sapiens
auuuuuggauauagggaaggau

SEQ ID NO: 47727 - RNA, 22 nt, Homo sapiens
auuugguaauauuuaaggacuu

SEQ ID NO: 47728 - RNA, 22 nt, Homo sapiens
auuugguuauucaguuguucag

SEQ ID NO: 47729 - RNA, 22 nt, Homo sapiens
auuugucaauacacuucuucca

SEQ ID NO: 47730 - RNA, 22 nt, Homo sapiens
auuguucuuacaugcugucauc

SEQ ID NO: 47731 - RNA, 22 nt, Homo sapiens
auugucacugugcuccaccagu

SEQ ID NO: 47732 - RNA, 22 nt, Homo sapiens
auuggcuuuauacauaagaaua

SEQ ID NO: 47733 - RNA, 22 nt, Homo sapiens
auuguacuccagccugggugac

SEQ ID NO: 47734 - RNA, 22 nt, Homo sapiens
auuguacuccagccugggcgac

SEQ ID NO: 47735 - RNA, 22 nt, Homo sapiens
auuguacuccagccuaggcaac

SEQ ID NO: 47736 - RNA, 18 nt, Homo sapiens
auuguaagauguauggga

SEQ ID NO: 47737 - RNA, 22 nt, Homo sapiens
auuguacauacaccggugugua

SEQ ID NO: 47738 - RNA, 22 nt, Homo sapiens
caguucaugguaggcaccauag

SEQ ID NO: 47739 - RNA, 22 nt, Homo sapiens
cauaaagauggaggaggccagg

SEQ ID NO: 47740 - RNA, 22 nt, Homo sapiens
cauacagcuaguaaguguaaga

SEQ ID NO: 47741 - RNA, 22 nt, Homo sapiens
cagugcauaggaucuaaaauuu

SEQ ID NO: 47742 - RNA, 22 nt, Homo sapiens
cagugcauagaugugccacauu

SEQ ID NO: 47743 - RNA, 22 nt, Homo sapiens
cagugcauguggcacucuccag

SEQ ID NO: 47744 - RNA, 20 nt, Homo sapiens
cagcacgcacaugagacugu

SEQ ID NO: 47745 - RNA, 22 nt, Homo sapiens
cagcccguaaucccagcacuuu

SEQ ID NO: 47746 - RNA, 22 nt, Homo sapiens
cagcccuacacagacugacuca

SEQ ID NO: 47747 - RNA, 22 nt, Homo sapiens
cagcgaggucugcgucacauug

SEQ ID NO: 47748 - RNA, 22 nt, Homo sapiens
cagcuguuguuaugucugcagg

SEQ ID NO: 47749 - RNA, 22 nt, Homo sapiens
caaagucuucucauuaugucuu

SEQ ID NO: 47750 - RNA, 22 nt, Homo sapiens
caaauugcuugucuguagugga

SEQ ID NO: 47751 - RNA, 22 nt, Homo sapiens
cacauugaauuucugaugacaa

SEQ ID NO: 47752 - RNA, 22 nt, Homo sapiens
caccgguuaaucuguuuuuucu

SEQ ID NO: 47753 - RNA, 22 nt, Homo sapiens
ugagcagaaguuuugauuggcg

SEQ ID NO: 47754 - RNA, 22 nt, Homo sapiens
ugagcagagggagaaguaaauu

SEQ ID NO: 47755 - RNA, 22 nt, Homo sapiens
ugagcuaugaucccaccucugu

SEQ ID NO: 47756 - RNA, 22 nt, Homo sapiens
ugagauguugcucugaaacaag

SEQ ID NO: 47757 - RNA, 22 nt, Homo sapiens
ugagaugugaucaccugaaggg

SEQ ID NO: 47758 - RNA, 22 nt, Homo sapiens
ugagauggcuuuauugcugaau

SEQ ID NO: 47759 - RNA, 22 nt, Homo sapiens
ugacggaggacaccugcggaau

SEQ ID NO: 47760 - RNA, 22 nt, Homo sapiens
ugaguaguauucuaugguaugu

SEQ ID NO: 47761 - RNA, 19 nt, Homo sapiens
ugaguauauuguauucauu

SEQ ID NO: 47762 - RNA, 22 nt, Homo sapiens
ugauaauuuugucagguuuugg

SEQ ID NO: 47763 - RNA, 22 nt, Homo sapiens
ugauagugccuuuuauaucucu

SEQ ID NO: 47764 - RNA, 22 nt, Homo sapiens
ugauaggagauuuucaucugua

SEQ ID NO: 47765 - RNA, 22 nt, Homo sapiens
ugauaugaaagggaaauaagug

SEQ ID NO: 47766 - RNA, 23 nt, Homo sapiens
ugaguagguccacguaugugagu

SEQ ID NO: 47767 - RNA, 22 nt, Homo sapiens
ugaguaggauugguauuucuuc

SEQ ID NO: 47768 - RNA, 22 nt, Homo sapiens
ugaguagaacaucaagucauac

SEQ ID NO: 47769 - RNA, 22 nt, Homo sapiens
ugcauaugucuuuauaguagca

SEQ ID NO: 47770 - RNA, 21 nt, Homo sapiens
ugcauaucucuaaugaccagu

SEQ ID NO: 47771 - RNA, 22 nt, Homo sapiens
ugcauagaauguucuguaaaua

SEQ ID NO: 47772 - RNA, 22 nt, Homo sapiens
ugcauacuguaugcgugcauac

SEQ ID NO: 47773 - RNA, 22 nt, Homo sapiens
ugcaguuuaggaacugguaaca

SEQ ID NO: 47774 - RNA, 22 nt, Homo sapiens
ugcaccaucuugcuucuguggu

SEQ ID NO: 47775 - RNA, 22 nt, Homo sapiens
ugauuagaggaaugguagauua

SEQ ID NO: 47776 - RNA, 22 nt, Homo sapiens
ugauugcacaccugcacucaag

SEQ ID NO: 47777 - RNA, 18 nt, Homo sapiens
ugcaaacauguguguguu

SEQ ID NO: 47778 - RNA, 20 nt, Homo sapiens
ugaugcaaaucuuuaaaagu

SEQ ID NO: 47779 - RNA, 22 nt, Homo sapiens
ugauggcaauggcauucauuuu

SEQ ID NO: 47780 - RNA, 22 nt, Homo sapiens
ugauguaggcauuuaagguuau

SEQ ID NO: 47781 - RNA, 22 nt, Homo sapiens
ugauguaggacauuauuauuuc

SEQ ID NO: 47782 - RNA, 22 nt, Homo sapiens
ugauggccuguucuccauaugu

SEQ ID NO: 47783 - RNA, 22 nt, Homo sapiens
ugaugguguuaccaucuuuacu

SEQ ID NO: 47784 - RNA, 22 nt, Homo sapiens
ugaugucuugcaggcacgagau

SEQ ID NO: 47785 - RNA, 22 nt, Homo sapiens
ugauaugaucgcccuagcuuga

SEQ ID NO: 47786 - RNA, 22 nt, Homo sapiens
ugaucacagcuugacuaaagga

SEQ ID NO: 47787 - RNA, 22 nt, Homo sapiens
ugaucucauuagcaccuuuagc

SEQ ID NO: 47788 - RNA, 22 nt, Homo sapiens
ugauccccucacauuauuauau

SEQ ID NO: 47789 - RNA, 20 nt, Homo sapiens
uggaaaguaagucaugauau

SEQ ID NO: 47790 - RNA, 22 nt, Homo sapiens
ugcgaucuuuuuccuuguuccu

SEQ ID NO: 47791 - RNA, 22 nt, Homo sapiens
ugccuagucuauugagagucuu

SEQ ID NO: 47792 - RNA, 22 nt, Homo sapiens
ugccuuauuccaacugagcucu

SEQ ID NO: 47793 - RNA, 22 nt, Homo sapiens
ugccuagaaacacuauuucucc

SEQ ID NO: 47794 - RNA, 22 nt, Homo sapiens
ugccauagagacucaacagccu

SEQ ID NO: 47795 - RNA, 22 nt, Homo sapiens
ugcauauuuuauaaagauggaa

SEQ ID NO: 47796 - RNA, 22 nt, Homo sapiens
ugcauauucaaggcaggccauu

SEQ ID NO: 47797 - RNA, 22 nt, Homo sapiens
ugcauauucgaguuauuuuggg

SEQ ID NO: 47798 - RNA, 22 nt, Homo sapiens
uggacagacaagguuauagauc

SEQ ID NO: 47799 - RNA, 20 nt, Homo sapiens
uggaagccuggugcuaucuu

SEQ ID NO: 47800 - RNA, 22 nt, Homo sapiens
uggaagacucaagguggugaau

SEQ ID NO: 47801 - RNA, 22 nt, Homo sapiens
uggauuuuaauuauucugucau

SEQ ID NO: 47802 - RNA, 23 nt, Homo sapiens
uggcaagaauucuuaccgugugg

SEQ ID NO: 47803 - RNA, 22 nt, Homo sapiens
ugguauguuuauaaguauagga

SEQ ID NO: 47804 - RNA, 22 nt, Homo sapiens
ugguaugucuuucuuccuguag

SEQ ID NO: 47805 - RNA, 22 nt, Homo sapiens
ugguauguguucuaaaauuaug

SEQ ID NO: 47806 - RNA, 22 nt, Homo sapiens
ugguauguugucucuuuguucu

SEQ ID NO: 47807 - RNA, 20 nt, Homo sapiens
uggucaccuucaggagguuc

SEQ ID NO: 47808 - RNA, 22 nt, Homo sapiens
uggucaugaggugaggcuucuc

SEQ ID NO: 47809 - RNA, 22 nt, Homo sapiens
uggucauggggcagcugacacu

SEQ ID NO: 47810 - RNA, 22 nt, Homo sapiens
ugguaaaaugucauuuaccaga

SEQ ID NO: 47811 - RNA, 22 nt, Homo sapiens
ugguauguaugauuaacaugga

SEQ ID NO: 47812 - RNA, 22 nt, Homo sapiens
ugguaugucuagauggggaagu

SEQ ID NO: 47813 - RNA, 22 nt, Homo sapiens
uggguaggcccucauuggacag

SEQ ID NO: 47814 - RNA, 22 nt, Homo sapiens
ucagguagcuagauuaugugag

SEQ ID NO: 47815 - RNA, 20 nt, Homo sapiens
ucagguagaucuuugagguc

SEQ ID NO: 47816 - RNA, 22 nt, Homo sapiens
ucagggacgcuugacacaagcc

SEQ ID NO: 47817 - RNA, 23 nt, Homo sapiens
ucaguacuccacuuucaauagug

SEQ ID NO: 47818 - RNA, 22 nt, Homo sapiens
ucaguaaucuuagcugugcaga

SEQ ID NO: 47819 - RNA, 22 nt, Homo sapiens
ucaguaguaaauggauuuggaa

SEQ ID NO: 47820 - RNA, 22 nt, Homo sapiens
ucagucauguuuaccagacgua

SEQ ID NO: 47821 - RNA, 22 nt, Homo sapiens
ucaaaaccucagagaguagagc

SEQ ID NO: 47822 - RNA, 22 nt, Homo sapiens
ucauauguaugugcaauuuugu

SEQ ID NO: 47823 - RNA, 21 nt, Homo sapiens
ucaucaagcuguagacaugau

SEQ ID NO: 47824 - RNA, 22 nt, Homo sapiens
ucauagucuaagguucuuuugc

SEQ ID NO: 47825 - RNA, 22 nt, Homo sapiens
ucauaguagucacuuaauaaau

SEQ ID NO: 47826 - RNA, 22 nt, Homo sapiens
ucauacuguugugaaacaaaac

SEQ ID NO: 47827 - RNA, 22 nt, Homo sapiens
ucaugacacagcauacugacuu

SEQ ID NO: 47828 - RNA, 23 nt, Homo sapiens
ucaucacagcauuuccugguauu

SEQ ID NO: 47829 - RNA, 22 nt, Homo sapiens
ucaguggauuuaaccugaauca

SEQ ID NO: 47830 - RNA, 22 nt, Homo sapiens
ucauacaguaguccucacuugu

SEQ ID NO: 47831 - RNA, 22 nt, Homo sapiens
ucaguuuguauuucagguugca

SEQ ID NO: 47832 - RNA, 22 nt, Homo sapiens
ucauacuguuaaaugguuuagu

SEQ ID NO: 47833 - RNA, 22 nt, Homo sapiens
ucauacaggccaccagggaagu

SEQ ID NO: 47834 - RNA, 23 nt, Homo sapiens
ucagugaaggaacaacuaaauag

SEQ ID NO: 47835 - RNA, 20 nt, Homo sapiens
ucagugauugguuuaguuau

SEQ ID NO: 47836 - RNA, 22 nt, Homo sapiens
ucagugauugguuauuuuaggc

SEQ ID NO: 47837 - RNA, 22 nt, Homo sapiens
uccaugaguccauuagaaaaaa

SEQ ID NO: 47838 - RNA, 22 nt, Homo sapiens
uccauguagaagacaggggaga

SEQ ID NO: 47839 - RNA, 22 nt, Homo sapiens
uccaugugaaaaggucgugaua

SEQ ID NO: 47840 - RNA, 22 nt, Homo sapiens
uccauugucuagauguaacaca

SEQ ID NO: 47841 - RNA, 19 nt, Homo sapiens
ucccaagaugcucauacau

SEQ ID NO: 47842 - RNA, 22 nt, Homo sapiens
uccauggagacacauuuuauau

SEQ ID NO: 47843 - RNA, 22 nt, Homo sapiens
uccccggaugacggccgcuuca

SEQ ID NO: 47844 - RNA, 22 nt, Homo sapiens
uccuucauuugucaacucuagu

SEQ ID NO: 47845 - RNA, 22 nt, Homo sapiens
uccugauacgguugcaguucuc

SEQ ID NO: 47846 - RNA, 22 nt, Homo sapiens
ucauguauuaucauuagugggu

SEQ ID NO: 47847 - RNA, 22 nt, Homo sapiens
ucauugcuuauuuguuggugga

SEQ ID NO: 47848 - RNA, 22 nt, Homo sapiens
ucauuggauggaaugcucugua

SEQ ID NO: 47849 - RNA, 22 nt, Homo sapiens
uccacagugguggaauuguuca

SEQ ID NO: 47850 - RNA, 22 nt, Homo sapiens
ucauugguagcucauggaaccg

SEQ ID NO: 47851 - RNA, 18 nt, Homo sapiens
uccacgugcuuuccagau

SEQ ID NO: 47852 - RNA, 22 nt, Homo sapiens
aacaguguuuuggguuuucugg

SEQ ID NO: 47853 - RNA, 22 nt, Homo sapiens
ucuuucacuuagcaugauguuu

SEQ ID NO: 47854 - RNA, 22 nt, Homo sapiens
ucuuugaguuauugugcagacu

SEQ ID NO: 47855 - RNA, 22 nt, Homo sapiens
ucuuugauuuuguuacuaagac

SEQ ID NO: 47856 - RNA, 22 nt, Homo sapiens
ucuuugauguucugaaagaugg

SEQ ID NO: 47857 - RNA, 22 nt, Homo sapiens
aacacuguuuccagucaugauc

SEQ ID NO: 47858 - RNA, 22 nt, Homo sapiens
aacagaauccucuuuuccuggg

SEQ ID NO: 47859 - RNA, 22 nt, Homo sapiens
aacaggcuccuaggggugcacc

SEQ ID NO: 47860 - RNA, 22 nt, Homo sapiens
ucugucuugugguuugagugcc

SEQ ID NO: 47861 - RNA, 22 nt, Homo sapiens
ucugucuuguccucacccuaga

SEQ ID NO: 47862 - RNA, 20 nt, Homo sapiens
ucuggguuuuggccacgccc

SEQ ID NO: 47863 - RNA, 22 nt, Homo sapiens
ucugucaaaucuuauguuguag

SEQ ID NO: 47864 - RNA, 22 nt, Homo sapiens
ucugucacugaaucccugucac

SEQ ID NO: 47865 - RNA, 22 nt, Homo sapiens
ucugguguuauucauguaguuu

SEQ ID NO: 47866 - RNA, 22 nt, Homo sapiens
uccuuuggguagcuguucagau

SEQ ID NO: 47867 - RNA, 22 nt, Homo sapiens
uccuuuggucaguauucuuuug

SEQ ID NO: 47868 - RNA, 22 nt, Homo sapiens
uccuuuguuacaguuggcucug

SEQ ID NO: 47869 - RNA, 18 nt, Homo sapiens
ucucacagcaaucuguca

SEQ ID NO: 47870 - RNA, 22 nt, Homo sapiens
ucucacauuucacagggauggg

SEQ ID NO: 47871 - RNA, 22 nt, Homo sapiens
ucucauggagguagagaguaaa

SEQ ID NO: 47872 - RNA, 22 nt, Homo sapiens
ucucaugaagguggagaguagg

SEQ ID NO: 47873 - RNA, 22 nt, Homo sapiens
ucucaugaagauagagaauaga

SEQ ID NO: 47874 - RNA, 21 nt, Homo sapiens
ugaauauuuggguugugucca

SEQ ID NO: 47875 - RNA, 22 nt, Homo sapiens
ugaaucaugcugcuauaaagac

SEQ ID NO: 47876 - RNA, 22 nt, Homo sapiens
ugaaucauuucuugucuucagu

SEQ ID NO: 47877 - RNA, 22 nt, Homo sapiens
ugaaugcaucauguagggcuca

SEQ ID NO: 47878 - RNA, 22 nt, Homo sapiens
ugaaugcuucaugucugggcug

SEQ ID NO: 47879 - RNA, 22 nt, Homo sapiens
ugaaugguuuuuagagaacaau

SEQ ID NO: 47880 - RNA, 23 nt, Homo sapiens
ugaauguaucgaaugugggaaag

SEQ ID NO: 47881 - RNA, 22 nt, Homo sapiens
ugaauguacuuaacacuggauu

SEQ ID NO: 47882 - RNA, 22 nt, Homo sapiens
ugaauguaacuaaaggacuuuu

SEQ ID NO: 47883 - RNA, 20 nt, Homo sapiens
ugaauguaauuacagaugua

SEQ ID NO: 47884 - RNA, 21 nt, Homo sapiens
ugacauuauuucaugucagua

SEQ ID NO: 47885 - RNA, 22 nt, Homo sapiens
ugacauguccaggugguccugu

SEQ ID NO: 47886 - RNA, 22 nt, Homo sapiens
ugacauguauuagcucagugcu

SEQ ID NO: 47887 - RNA, 23 nt, Homo sapiens
ugacaagagcgagacuuggucuc

SEQ ID NO: 47888 - RNA, 22 nt, Homo sapiens
ugaauguacacgcguacuuguu

SEQ ID NO: 47889 - RNA, 22 nt, Homo sapiens
ucuuugguaauggaugucugau

SEQ ID NO: 47890 - RNA, 22 nt, Homo sapiens
ucuuugguagaagcuauuuuau

SEQ ID NO: 47891 - RNA, 22 nt, Homo sapiens
ugaacacuggauaaggagucag

SEQ ID NO: 47892 - RNA, 22 nt, Homo sapiens
ugaacacaucuccugguaccug

SEQ ID NO: 47893 - RNA, 22 nt, Homo sapiens
ugaaauuuuuuauucguuggcu

SEQ ID NO: 47894 - RNA, 22 nt, Homo sapiens
ugaauacuucguucaaagauaa

SEQ ID NO: 47895 - RNA, 22 nt, Homo sapiens
ugaaguguuuauuuuggccuuc

SEQ ID NO: 47896 - RNA, 22 nt, Homo sapiens
ugaaguguuuuuucaggcaugu

SEQ ID NO: 47897 - RNA, 22 nt, Homo sapiens
ugaauagugucacaauaaacau

SEQ ID NO: 47898 - RNA, 22 nt, Homo sapiens
ugaauaguuugacagaacucuu

SEQ ID NO: 47899 - RNA, 22 nt, Homo sapiens
ugaauauguuaaauaauguucu

SEQ ID NO: 47900 - RNA, 22 nt, Homo sapiens
ugaaguagguucucguaucgcc

SEQ ID NO: 47901 - RNA, 22 nt, Homo sapiens
ugaaguaauguuuuauucuauu

SEQ ID NO: 47902 - RNA, 22 nt, Homo sapiens
ugaagaucuuaggagcugaggg

SEQ ID NO: 47903 - RNA, 22 nt, Homo sapiens
uugauguguuuccaggauuugu

SEQ ID NO: 47904 - RNA, 22 nt, Homo sapiens
uugauguaggcauucaaggcua

SEQ ID NO: 47905 - RNA, 22 nt, Homo sapiens
uugaugauguuucugccuugcc

SEQ ID NO: 47906 - RNA, 18 nt, Homo sapiens
uugaauaguguccaaucu

SEQ ID NO: 47907 - RNA, 22 nt, Homo sapiens
uugaauguaugcuggguuuacu

SEQ ID NO: 47908 - RNA, 22 nt, Homo sapiens
uugcaacauuguaaguuuauau

SEQ ID NO: 47909 - RNA, 18 nt, Homo sapiens
uugcaaauucuucccugu

SEQ ID NO: 47910 - RNA, 22 nt, Homo sapiens
uugaaguagguaccguucaauu

SEQ ID NO: 47911 - RNA, 22 nt, Homo sapiens
uugaaguauagaguuuaagaac

SEQ ID NO: 47912 - RNA, 22 nt, Homo sapiens
uugaaugaaaugaugucauuug

SEQ ID NO: 47913 - RNA, 18 nt, Homo sapiens
uugaauagagccaagcac

SEQ ID NO: 47914 - RNA, 22 nt, Homo sapiens
uugaauaggcucaugcuuauca

SEQ ID NO: 47915 - RNA, 22 nt, Homo sapiens
uugaagguaauugguuuuauga

SEQ ID NO: 47916 - RNA, 22 nt, Homo sapiens
uugaagguaggaugugcuauca

SEQ ID NO: 47917 - RNA, 22 nt, Homo sapiens
uugaagguagaaguucucaauu

SEQ ID NO: 47918 - RNA, 22 nt, Homo sapiens
uucuugguuggcaaccaacagu

SEQ ID NO: 47919 - RNA, 19 nt, Homo sapiens
uugcauauguugaaccagg

SEQ ID NO: 47920 - RNA, 22 nt, Homo sapiens
uugcauauguugaaccaagcgu

SEQ ID NO: 47921 - RNA, 22 nt, Homo sapiens
uugcagugguuucacuggcaaa

SEQ ID NO: 47922 - RNA, 22 nt, Homo sapiens
uugcacaauccugugagugagu

SEQ ID NO: 47923 - RNA, 22 nt, Homo sapiens
uugcacagugguuuagagccug

SEQ ID NO: 47924 - RNA, 22 nt, Homo sapiens
uugccuauucacucugaugaua

SEQ ID NO: 47925 - RNA, 22 nt, Homo sapiens
uugcaucagcuccugauguacu

SEQ ID NO: 47926 - RNA, 22 nt, Homo sapiens
uugcaugcacaguucucaauag

SEQ ID NO: 47927 - RNA, 22 nt, Homo sapiens
uugcauauucucugaggcagga

SEQ ID NO: 47928 - RNA, 22 nt, Homo sapiens
uugcaucagcaggcauaauugg

SEQ ID NO: 47929 - RNA, 22 nt, Homo sapiens
uugcaugguuuuuaucugaaau

SEQ ID NO: 47930 - RNA, 22 nt, Homo sapiens
uuggaaaaauccaccuugaucu

SEQ ID NO: 47931 - RNA, 22 nt, Homo sapiens
uugguaugaaaaggaauuagac

SEQ ID NO: 47932 - RNA, 22 nt, Homo sapiens
uugguccccuucaaccagcugu

SEQ ID NO: 47933 - RNA, 22 nt, Homo sapiens
uugguccucccaugcucaagag

SEQ ID NO: 47934 - RNA, 22 nt, Homo sapiens
uuggucaucucccuccuuuuag

SEQ ID NO: 47935 - RNA, 22 nt, Homo sapiens
uuggcagaauguuagaaacuua

SEQ ID NO: 47936 - RNA, 22 nt, Homo sapiens
uuggcauugccaaacugucaac

SEQ ID NO: 47937 - RNA, 22 nt, Homo sapiens
uuggaauacuuguuaaagucca

SEQ ID NO: 47938 - RNA, 22 nt, Homo sapiens
uuuauggagagauauuuauggu

SEQ ID NO: 47939 - RNA, 22 nt, Homo sapiens
uuuauccagccucuagcaaggu

SEQ ID NO: 47940 - RNA, 22 nt, Homo sapiens
uuuaugcuacauguguuggaaa

SEQ ID NO: 47941 - RNA, 22 nt, Homo sapiens
uuuauagucaggaacuugagga

SEQ ID NO: 47942 - RNA, 23 nt, Homo sapiens
uuuauacguugucauuuaucagg

SEQ ID NO: 47943 - RNA, 22 nt, Homo sapiens
uuuagguuacauauaauccaaa

SEQ ID NO: 47944 - RNA, 21 nt, Homo sapiens
uuuagguagcuuuucugggag

SEQ ID NO: 47945 - RNA, 22 nt, Homo sapiens
uuuaggcaugcaguucuauuua

SEQ ID NO: 47946 - RNA, 22 nt, Homo sapiens
uuguguccccacccaaaucuca

SEQ ID NO: 47947 - RNA, 22 nt, Homo sapiens
uugugucccuacccaaaucuca

SEQ ID NO: 47948 - RNA, 22 nt, Homo sapiens
uuuagcucauucaauuucaguc

SEQ ID NO: 47949 - RNA, 22 nt, Homo sapiens
uuucuauguugaccagucuaga

SEQ ID NO: 47950 - RNA, 16 nt, Homo sapiens
uuucuauguuuuacua

SEQ ID NO: 47951 - RNA, 22 nt, Homo sapiens
uuucgugucuggucugugaugg

SEQ ID NO: 47952 - RNA, 22 nt, Homo sapiens
uuucuacagggcuugccaggua

SEQ ID NO: 47953 - RNA, 22 nt, Homo sapiens
uuucaggcagggagcuucagug

SEQ ID NO: 47954 - RNA, 22 nt, Homo sapiens
uuucgguuaucuagcuuuauga

SEQ ID NO: 47955 - RNA, 22 nt, Homo sapiens
uuucacguuggggaguugagug

SEQ ID NO: 47956 - RNA, 22 nt, Homo sapiens
uuguaguagcauuauuuauaau

SEQ ID NO: 47957 - RNA, 22 nt, Homo sapiens
uuguaguguuuauucugucaac

SEQ ID NO: 47958 - RNA, 22 nt, Homo sapiens
uugucaccucuaaaucucauau

SEQ ID NO: 47959 - RNA, 22 nt, Homo sapiens
uuugagcuagagucucacucug

SEQ ID NO: 47960 - RNA, 22 nt, Homo sapiens
uuugacuuuuagaauaugaguu

SEQ ID NO: 47961 - RNA, 22 nt, Homo sapiens
uuugacuacugaugguguacgc

SEQ ID NO: 47962 - RNA, 22 nt, Homo sapiens
uuugacuaccaggaauguucuu

SEQ ID NO: 47963 - RNA, 22 nt, Homo sapiens
uuugacuagaguguuuuacaac

SEQ ID NO: 47964 - RNA, 22 nt, Homo sapiens
uuugaaguguggcacugaguuu

SEQ ID NO: 47965 - RNA, 22 nt, Homo sapiens
uuugaauggaaguuuugugaaa

SEQ ID NO: 47966 - RNA, 22 nt, Homo sapiens
uuugaagcuaaggugcuugguu

SEQ ID NO: 47967 - RNA, 22 nt, Homo sapiens
uuugauugguguaccugaaagu

SEQ ID NO: 47968 - RNA, 22 nt, Homo sapiens
uuugauuguacuaaaauuguac

SEQ ID NO: 47969 - RNA, 22 nt, Homo sapiens
uuugcaagaugaaaaaguucua

SEQ ID NO: 47970 - RNA, 22 nt, Homo sapiens
uuugaguuugaggugcugauga

SEQ ID NO: 47971 - RNA, 22 nt, Homo sapiens
uuugcacuggagauucaauggg

SEQ ID NO: 47972 - RNA, 22 nt, Homo sapiens
uuugcagagucuuucgcugggc

SEQ ID NO: 47973 - RNA, 22 nt, Homo sapiens
uuugcauauguugaaccagccu

SEQ ID NO: 47974 - RNA, 21 nt, Homo sapiens
uuugcauauguugaaccagcc

SEQ ID NO: 47975 - RNA, 19 nt, Homo sapiens
uuugcauagugagaauaua

SEQ ID NO: 47976 - RNA, 22 nt, Homo sapiens
uuugguugcauucacauauuuc

SEQ ID NO: 47977 - RNA, 22 nt, Homo sapiens
uuugugaaugucauaagcucca

SEQ ID NO: 47978 - RNA, 22 nt, Homo sapiens
uuuguccugccaugguuuauuu

SEQ ID NO: 47979 - RNA, 22 nt, Homo sapiens
uuugucuccuaagacucugugg

SEQ ID NO: 47980 - RNA, 22 nt, Homo sapiens
uuugugagguggauagauugca

SEQ ID NO: 47981 - RNA, 22 nt, Homo sapiens
uuugugacucauggucuagugc

SEQ ID NO: 47982 - RNA, 22 nt, Homo sapiens
uuugugcuccuaugagaaucua

SEQ ID NO: 47983 - RNA, 22 nt, Homo sapiens
uuugugcuccugugagaaucua

SEQ ID NO: 47984 - RNA, 22 nt, Homo sapiens
uuuggucuuuuauuuaaagcag

SEQ ID NO: 47985 - RNA, 22 nt, Homo sapiens
uuuggcuauguuguaucuuucc

SEQ ID NO: 47986 - RNA, 22 nt, Homo sapiens
uuugcaucuuagaaaguucucc

SEQ ID NO: 47987 - RNA, 22 nt, Homo sapiens
uuugccaauauuuuacugagga

SEQ ID NO: 47988 - RNA, 22 nt, Homo sapiens
uuugccaaucagaggcaucuug

SEQ ID NO: 47989 - RNA, 22 nt, Homo sapiens
uucacagucacccuucuccaug

SEQ ID NO: 47990 - RNA, 22 nt, Homo sapiens
uucacagccgcaccccaucacu

SEQ ID NO: 47991 - RNA, 22 nt, Homo sapiens
uucacagaguuauuuuuaugcu

SEQ ID NO: 47992 - RNA, 22 nt, Homo sapiens
uucagguacugggggaguaugg

SEQ ID NO: 47993 - RNA, 22 nt, Homo sapiens
uucagguucauuugcugcuauu

SEQ ID NO: 47994 - RNA, 22 nt, Homo sapiens
uucaggcuccgugccagcuccg

SEQ ID NO: 47995 - RNA, 22 nt, Homo sapiens
uucauacaguggcugcacucca

SEQ ID NO: 47996 - RNA, 22 nt, Homo sapiens
uucaguucugcacugaucuuag

SEQ ID NO: 47997 - RNA, 22 nt, Homo sapiens
uucaguauugcaccuggagucc

SEQ ID NO: 47998 - RNA, 22 nt, Homo sapiens
uucagugucauuaacacaguag

SEQ ID NO: 47999 - RNA, 22 nt, Homo sapiens
uucaauacuguugauccuuaug

SEQ ID NO: 48000 - RNA, 22 nt, Homo sapiens
uucacagagagaacucaaacca

SEQ ID NO: 48001 - RNA, 22 nt, Homo sapiens
uucaaaguuggaggacaaacug

SEQ ID NO: 48002 - RNA, 22 nt, Homo sapiens
uucaaaguaaaaauguguucac

SEQ ID NO: 48003 - RNA, 22 nt, Homo sapiens
uuaugcuugugugaauuuuccc

SEQ ID NO: 48004 - RNA, 22 nt, Homo sapiens
uuaucucaguguuuguaaacaa

SEQ ID NO: 48005 - RNA, 19 nt, Homo sapiens
uuauauaguuucugaggcu

SEQ ID NO: 48006 - RNA, 22 nt, Homo sapiens
uuauagcuaacaucugugaaaa

SEQ ID NO: 48007 - RNA, 22 nt, Homo sapiens
uuauagguuucuacaggacuau

SEQ ID NO: 48008 - RNA, 22 nt, Homo sapiens
uuauauguuagacauggugggu

SEQ ID NO: 48009 - RNA, 22 nt, Homo sapiens
uuauauguuucuuagggacaga

SEQ ID NO: 48010 - RNA, 22 nt, Homo sapiens
uuauaugcuaaacaaggggugg

SEQ ID NO: 48011 - RNA, 22 nt, Homo sapiens
uuacaguaugaguaagaguucu

SEQ ID NO: 48012 - RNA, 22 nt, Homo sapiens
uuacagucucaagagugcugca

SEQ ID NO: 48013 - RNA, 22 nt, Homo sapiens
uuacaugucuugguaagguuag

SEQ ID NO: 48014 - RNA, 22 nt, Homo sapiens
uuacauugcuucaaauucagug

SEQ ID NO: 48015 - RNA, 22 nt, Homo sapiens
uucucagugcuaucuuuuaugc

SEQ ID NO: 48016 - RNA, 22 nt, Homo sapiens
uucuauguuguuagacccacca

SEQ ID NO: 48017 - RNA, 22 nt, Homo sapiens
uucucaguuccuacuuugguga

SEQ ID NO: 48018 - RNA, 22 nt, Homo sapiens
uucuauugguaauauuuucugu

SEQ ID NO: 48019 - RNA, 22 nt, Homo sapiens
uucuucaguuacaacaaggggg

SEQ ID NO: 48020 - RNA, 22 nt, Homo sapiens
uucuucugguuaugaaauuuga

SEQ ID NO: 48021 - RNA, 20 nt, Homo sapiens
uucuugaguuaacaaguuac

SEQ ID NO: 48022 - RNA, 22 nt, Homo sapiens
uucuuagucauguaauagucca

SEQ ID NO: 48023 - RNA, 22 nt, Homo sapiens
uucuuagucaaguuguauuuca

SEQ ID NO: 48024 - RNA, 22 nt, Homo sapiens
uucauaguguaccugaaggcac

SEQ ID NO: 48025 - RNA, 22 nt, Homo sapiens
uucauccccuccaaaucucaug

SEQ ID NO: 48026 - RNA, 22 nt, Homo sapiens
uucaucagggguauuggccaau

SEQ ID NO: 48027 - RNA, 18 nt, Homo sapiens
uucaucaguccucagcug

SEQ ID NO: 48028 - RNA, 22 nt, Homo sapiens
uucaucuggcaauucagagauu

SEQ ID NO: 48029 - RNA, 22 nt, Homo sapiens
uucaucaggaauauugaccugu

SEQ ID NO: 48030 - RNA, 22 nt, Homo sapiens
uucauggaauauugaccauuuu

SEQ ID NO: 48031 - RNA, 22 nt, Homo sapiens
uucauggaguugagaaggcuaa

SEQ ID NO: 48032 - RNA, 22 nt, Homo sapiens
uucauggaugcauuugaggggu

SEQ ID NO: 48033 - RNA, 22 nt, Homo sapiens
uucaugugagucuguauuaacu

SEQ ID NO: 48034 - RNA, 22 nt, Homo sapiens
uuccauguaguugaacgguuuu

SEQ ID NO: 48035 - RNA, 22 nt, Homo sapiens
uuccaugugggcuugucaagua

SEQ ID NO: 48036 - RNA, 22 nt, Homo sapiens
uuccauguugauacgugaaguu

SEQ ID NO: 48037 - RNA, 22 nt, Homo sapiens
uucccguacugguguugccuau

SEQ ID NO: 48038 - RNA, 22 nt, Homo sapiens
uuccccgugaaacuuucucauu

SEQ ID NO: 48039 - RNA, 22 nt, Homo sapiens
uucccaguuggggaaagcgacc

SEQ ID NO: 48040 - RNA, 22 nt, Homo sapiens
uucccuguaucuucugccaugu

SEQ ID NO: 48041 - RNA, 22 nt, Homo sapiens
ugugcaaucagcuucauuacau

SEQ ID NO: 48042 - RNA, 18 nt, Homo sapiens
ugugcaauauuaaccacc

SEQ ID NO: 48043 - RNA, 22 nt, Homo sapiens
ugugguuuuauaaacgugaccu

SEQ ID NO: 48044 - RNA, 23 nt, Homo sapiens
ugugguauuauuccauuuauagg

SEQ ID NO: 48045 - RNA, 22 nt, Homo sapiens
uguggaaauaaaagaaagguua

SEQ ID NO: 48046 - RNA, 20 nt, Homo sapiens
uggugguuuuaugugguuua

SEQ ID NO: 48047 - RNA, 20 nt, Homo sapiens
uguaacaaucuggauguugc

SEQ ID NO: 48048 - RNA, 20 nt, Homo sapiens
uguaacacauggagaacucu

SEQ ID NO: 48049 - RNA, 22 nt, Homo sapiens
uguaagcauugggcaugcaguc

SEQ ID NO: 48050 - RNA, 20 nt, Homo sapiens
uguaaucuaaguuuuaagcc

SEQ ID NO: 48051 - RNA, 22 nt, Homo sapiens
uggucuucuggccuccagaacc

SEQ ID NO: 48052 - RNA, 22 nt, Homo sapiens
uguagacaccaaagacagcaua

SEQ ID NO: 48053 - RNA, 22 nt, Homo sapiens
uguagauaucauuagugcugug

SEQ ID NO: 48054 - RNA, 22 nt, Homo sapiens
uguaaugaucaaaucagaguaa

SEQ ID NO: 48055 - RNA, 22 nt, Homo sapiens
uguaauguuugguagguuaggu

SEQ ID NO: 48056 - RNA, 20 nt, Homo sapiens
uguacacaguguacccacau

SEQ ID NO: 48057 - RNA, 22 nt, Homo sapiens
uguaauuuaaaugauccuugga

SEQ ID NO: 48058 - RNA, 22 nt, Homo sapiens
ugugaugguuuggaagcuucuu

SEQ ID NO: 48059 - RNA, 20 nt, Homo sapiens
ugugauuauuuaguugcaug

SEQ ID NO: 48060 - RNA, 22 nt, Homo sapiens
uuaagagugggaguuggccaca

SEQ ID NO: 48061 - RNA, 22 nt, Homo sapiens
uuaagacaccaaucauuggauu

SEQ ID NO: 48062 - RNA, 22 nt, Homo sapiens
uuaacacugccauugauacugu

SEQ ID NO: 48063 - RNA, 22 nt, Homo sapiens
uuaacaguuaauucuuuggcaa

SEQ ID NO: 48064 - RNA, 22 nt, Homo sapiens
uuaaggaaggagucuuaaaugg

SEQ ID NO: 48065 - RNA, 22 nt, Homo sapiens
uuacacaguugguaggggcaga

SEQ ID NO: 48066 - RNA, 21 nt, Homo sapiens
uguuuuugcuguguaucucuc

SEQ ID NO: 48067 - RNA, 22 nt, Homo sapiens
uguuuuguuagcacucugggaa

SEQ ID NO: 48068 - RNA, 22 nt, Homo sapiens
uuaaauacagcaugguguuucu

SEQ ID NO: 48069 - RNA, 22 nt, Homo sapiens
uuaaaugcuagaauuuucuuug

SEQ ID NO: 48070 - RNA, 22 nt, Homo sapiens
uguuauguauggagugauccca

SEQ ID NO: 48071 - RNA, 22 nt, Homo sapiens
uguuauugagguuacuuauaag

SEQ ID NO: 48072 - RNA, 22 nt, Homo sapiens
uguuuguuugauaugggauaaa

SEQ ID NO: 48073 - RNA, 22 nt, Homo sapiens
uguuacagugacuaauguuuua

SEQ ID NO: 48074 - RNA, 22 nt, Homo sapiens
uguuaaggcagagauaauacau

SEQ ID NO: 48075 - RNA, 22 nt, Homo sapiens
uguuacagcagcacaaaaugga

SEQ ID NO: 48076 - RNA, 22 nt, Homo sapiens
uguuaacauggucucagucugu

SEQ ID NO: 48077 - RNA, 22 nt, Homo sapiens
uguuaagauguguuuuguggcu

SEQ ID NO: 48078 - RNA, 22 nt, Homo sapiens
ugugucuacugagaugaucaug

SEQ ID NO: 48079 - RNA, 22 nt, Homo sapiens
ugugucuugaauuuuguaugua

SEQ ID NO: 48080 - RNA, 22 nt, Homo sapiens
uguguacugcagaguauucugu

SEQ ID NO: 48081 - RNA, 22 nt, Homo sapiens
uguguaauacucuaaugaugca

SEQ ID NO: 48082 - RNA, 22 nt, Homo sapiens
uguguaauaccuuugacuauau

SEQ ID NO: 48083 - RNA, 22 nt, Homo sapiens
ugugucuccugaaaauucacau

SEQ ID NO: 48084 - RNA, 22 nt, Homo sapiens
uuuugcaggcauuggaaguuua

SEQ ID NO: 48085 - RNA, 22 nt, Homo sapiens
uuuuccagugggacucccauua

SEQ ID NO: 48086 - RNA, 22 nt, Homo sapiens
uuuuaugggcuauuugcauuag

SEQ ID NO: 48087 - RNA, 20 nt, Homo sapiens
uuuugcacuccuacuaaggu

SEQ ID NO: 48088 - RNA, 22 nt, Homo sapiens
uuccaagugggaaacaaaaaug

SEQ ID NO: 48089 - RNA, 22 nt, Homo sapiens
uuccauguaguugagcaguuuu

SEQ ID NO: 48090 - RNA, 22 nt, Homo sapiens
uuccauaggcuagaucaaccag

SEQ ID NO: 48091 - RNA, 22 nt, Homo sapiens
uuccagagucaccuuucugucg

SEQ ID NO: 48092 - RNA, 22 nt, Homo sapiens
uuccuacugcccauuaaaaugg

SEQ ID NO: 48093 - RNA, 22 nt, Homo sapiens
uuccuguagcgauuuuaguaau

SEQ ID NO: 48094 - RNA, 22 nt, Homo sapiens
uuccugucuuccaagagagauu

SEQ ID NO: 48095 - RNA, 22 nt, Homo sapiens
uuccucuagacugucgguuucu

SEQ ID NO: 48096 - RNA, 22 nt, Homo sapiens
uuccugagaucagaauucaaau

SEQ ID NO: 48097 - RNA, 22 nt, Homo sapiens
uuccauagucauagugcugaug

SEQ ID NO: 48098 - RNA, 19 nt, Homo sapiens
uucucugguuguacuaccc

SEQ ID NO: 48099 - RNA, 22 nt, Homo sapiens
uucucugggacauaggucgggu

SEQ ID NO: 48100 - RNA, 17 nt, Homo sapiens
uucucaguucugaucuc

SEQ ID NO: 48101 - RNA, 22 nt, Homo sapiens
uucucauggaacaucuguacug

SEQ ID NO: 48102 - RNA, 22 nt, Homo sapiens
uuccuugagaaaggcacaaguu

SEQ ID NO: 48103 - RNA, 22 nt, Homo sapiens
uucuacaggcuguucaagaagc

SEQ ID NO: 48104 - RNA, 22 nt, Homo sapiens
uucguuuguaauccuuacagca

SEQ ID NO: 48105 - RNA, 22 nt, Homo sapiens
uucuaaguaagucuguggggaa

SEQ ID NO: 48106 - RNA, 22 nt, Homo sapiens
uucuauguuugaaaaugccaaa

SEQ ID NO: 48107 - RNA, 22 nt, Homo sapiens
uucuaugguuuaauaguuuggg

SEQ ID NO: 48108 - RNA, 22 nt, Homo sapiens
uucucaauggcaacuuguugcu

SEQ ID NO: 48109 - RNA, 22 nt, Homo sapiens
uucagaugcacacuguagucua

SEQ ID NO: 48110 - RNA, 22 nt, Homo sapiens
uucagcuacuugggaggcugaa

SEQ ID NO: 48111 - RNA, 22 nt, Homo sapiens
uucaaaucuuuggcucccacua

SEQ ID NO: 48112 - RNA, 22 nt, Homo sapiens
uucaaguaguucucaugccuca

SEQ ID NO: 48113 - RNA, 22 nt, Homo sapiens
uucaguaaauguucuuacuaua

SEQ ID NO: 48114 - RNA, 22 nt, Homo sapiens
uucaguacacguguucucauuu

SEQ ID NO: 48115 - RNA, 22 nt, Homo sapiens
uucaggguggagaguaugaggu

SEQ ID NO: 48116 - RNA, 22 nt, Homo sapiens
uucagggacuuuagacaagaga

SEQ ID NO: 48117 - RNA, 22 nt, Homo sapiens
uucagggcauuggaguuucuga

SEQ ID NO: 48118 - RNA, 22 nt, Homo sapiens
uucaguagucuccauagaaccg

SEQ ID NO: 48119 - RNA, 22 nt, Homo sapiens
uucaguagucaaaagauaaggg

SEQ ID NO: 48120 - RNA, 22 nt, Homo sapiens
uucaguaguaaguuggaacucu

SEQ ID NO: 48121 - RNA, 22 nt, Homo sapiens
uucauggugguacaaaagcaau

SEQ ID NO: 48122 - RNA, 22 nt, Homo sapiens
uucauggguuaauuuguucgau

SEQ ID NO: 48123 - RNA, 22 nt, Homo sapiens
uucaguucugcucugaucuuag

SEQ ID NO: 48124 - RNA, 18 nt, Homo sapiens
uucaguuuguaucugggg

SEQ ID NO: 48125 - RNA, 21 nt, Homo sapiens
uuagugcucaguuugacaaaa

SEQ ID NO: 48126 - RNA, 22 nt, Homo sapiens
uuagugaaugggugugauuugu

SEQ ID NO: 48127 - RNA, 22 nt, Homo sapiens
uuauaacagagacuccugugcu

SEQ ID NO: 48128 - RNA, 22 nt, Homo sapiens
uuauugcuuaugauuagguguu

SEQ ID NO: 48129 - RNA, 22 nt, Homo sapiens
uuauacacugugggaguguaaa

SEQ ID NO: 48130 - RNA, 22 nt, Homo sapiens
uuacauguuguggguuguggcc

SEQ ID NO: 48131 - RNA, 22 nt, Homo sapiens
uuacauguggugugaagaagag

SEQ ID NO: 48132 - RNA, 22 nt, Homo sapiens
uuagguuguugccauugaaagu

SEQ ID NO: 48133 - RNA, 22 nt, Homo sapiens
uuaguaguagcugcaugucagu

SEQ ID NO: 48134 - RNA, 22 nt, Homo sapiens
uuaguaguugugauagguaccu

SEQ ID NO: 48135 - RNA, 22 nt, Homo sapiens
uuagguuguuucuggucuuagg

SEQ ID NO: 48136 - RNA, 22 nt, Homo sapiens
uuacaguagaugaggguauaau

SEQ ID NO: 48137 - RNA, 22 nt, Homo sapiens
uuacagcugggugugucuggua

SEQ ID NO: 48138 - RNA, 22 nt, Homo sapiens
uuacauaguguguggguucggg

SEQ ID NO: 48139 - RNA, 22 nt, Homo sapiens
uuacaguguuuguucuguuacu

SEQ ID NO: 48140 - RNA, 22 nt, Homo sapiens
uuacaguugugagccaccaugc

SEQ ID NO: 48141 - RNA, 22 nt, Homo sapiens
uuacaguggugaccuuguauug

SEQ ID NO: 48142 - RNA, 22 nt, Homo sapiens
uguuaucauuacguucuuaguu

SEQ ID NO: 48143 - RNA, 22 nt, Homo sapiens
uguuaguuguucauguuaagag

SEQ ID NO: 48144 - RNA, 22 nt, Homo sapiens
uguuacagcagaauugauugca

SEQ ID NO: 48145 - RNA, 22 nt, Homo sapiens
uguucaauucccaccuaugagu

SEQ ID NO: 48146 - RNA, 22 nt, Homo sapiens
uguuauuuuguguuagggcaca

SEQ ID NO: 48147 - RNA, 19 nt, Homo sapiens
uguugcacauaucaauaug

SEQ ID NO: 48148 - RNA, 22 nt, Homo sapiens
uguugcacugguaauguacuga

SEQ ID NO: 48149 - RNA, 19 nt, Homo sapiens
uguuuggcuauaggucuaa

SEQ ID NO: 48150 - RNA, 22 nt, Homo sapiens
uguuugcuguuuucuccaauga

SEQ ID NO: 48151 - RNA, 22 nt, Homo sapiens
uguuuguuugugauacgguaca

SEQ ID NO: 48152 - RNA, 22 nt, Homo sapiens
uuaacagucacuuagcucauuu

SEQ ID NO: 48153 - RNA, 23 nt, Homo sapiens
uuaagcaacggcugcuuuucaga

SEQ ID NO: 48154 - RNA, 22 nt, Homo sapiens
uuaagcaguggauuagaauuuu

SEQ ID NO: 48155 - RNA, 21 nt, Homo sapiens
uuacaauggcuccuugaaggu

SEQ ID NO: 48156 - RNA, 22 nt, Homo sapiens
uuaauuguccauuauucuguuc

SEQ ID NO: 48157 - RNA, 22 nt, Homo sapiens
uuacagauggauggcagcuggc

SEQ ID NO: 48158 - RNA, 22 nt, Homo sapiens
uuacagauggcacacucaaggg

SEQ ID NO: 48159 - RNA, 22 nt, Homo sapiens
uuaauucugucugcccucaucc

SEQ ID NO: 48160 - RNA, 22 nt, Homo sapiens
uuaaggaaagcauuuaauucag

SEQ ID NO: 48161 - RNA, 22 nt, Homo sapiens
uguuuuggaguggacuuugcau

SEQ ID NO: 48162 - RNA, 22 nt, Homo sapiens
uuaaacucaucacccagguagu

SEQ ID NO: 48163 - RNA, 22 nt, Homo sapiens
uuaaaaguauaggccuggcaua

SEQ ID NO: 48164 - RNA, 22 nt, Homo sapiens
uuaaaugcauagaauguguagu

SEQ ID NO: 48165 - RNA, 22 nt, Homo sapiens
uuaaaugucuguagaugugcug

SEQ ID NO: 48166 - RNA, 22 nt, Homo sapiens
uuaaagcuggcguuacaguuug

SEQ ID NO: 48167 - RNA, 22 nt, Homo sapiens
uuaaaggcaugguuagacaugg

SEQ ID NO: 48168 - RNA, 20 nt, Homo sapiens
uuaaaucuagugcagacuca

SEQ ID NO: 48169 - RNA, 22 nt, Homo sapiens
ugugaacauuuuguauauauua

SEQ ID NO: 48170 - RNA, 22 nt, Homo sapiens
ugugaacagcagcugggcuuug

SEQ ID NO: 48171 - RNA, 22 nt, Homo sapiens
ugugaacagcuccaaaugugga

SEQ ID NO: 48172 - RNA, 21 nt, Homo sapiens
ugugaaaucuaggcagagguu

SEQ ID NO: 48173 - RNA, 22 nt, Homo sapiens
ugugaacagaauuagucaccua

SEQ ID NO: 48174 - RNA, 22 nt, Homo sapiens
ugugaaacauggauagaacugg

SEQ ID NO: 48175 - RNA, 22 nt, Homo sapiens
ugugaaacacgaaagucuaaaa

SEQ ID NO: 48176 - RNA, 23 nt, Homo sapiens
ugucaucaagaugaggucacacu

SEQ ID NO: 48177 - RNA, 22 nt, Homo sapiens
ugucauggauucugagucuggg

SEQ ID NO: 48178 - RNA, 22 nt, Homo sapiens
ugucauggcauuuguaaacugc

SEQ ID NO: 48179 - RNA, 22 nt, Homo sapiens
ugugacaaauuuaguggacugu

SEQ ID NO: 48180 - RNA, 19 nt, Homo sapiens
ugugaagaaaugcugcaag

SEQ ID NO: 48181 - RNA, 22 nt, Homo sapiens
ugugcuauguuauucacauggg

SEQ ID NO: 48182 - RNA, 22 nt, Homo sapiens
ugugcuaauacauacagugcua

SEQ ID NO: 48183 - RNA, 22 nt, Homo sapiens
ugugccuacugugggagcguca

SEQ ID NO: 48184 - RNA, 21 nt, Homo sapiens
uguuaacaugcagauuacugg

SEQ ID NO: 48185 - RNA, 22 nt, Homo sapiens
uguguuuuuauguaaaauggaa

SEQ ID NO: 48186 - RNA, 22 nt, Homo sapiens
ugugcuaaaaugggacuucuaa

SEQ ID NO: 48187 - RNA, 22 nt, Homo sapiens
uugauaugaauggcuguuugug

SEQ ID NO: 48188 - RNA, 22 nt, Homo sapiens
uugagucguuaccuauaacaga

SEQ ID NO: 48189 - RNA, 22 nt, Homo sapiens
uugauauggcugcuuaccauaa

SEQ ID NO: 48190 - RNA, 22 nt, Homo sapiens
uugauauuaaguacugaagugg

SEQ ID NO: 48191 - RNA, 22 nt, Homo sapiens
uugauauucugagaagcugaag

SEQ ID NO: 48192 - RNA, 22 nt, Homo sapiens
uugauauuacucaguaacagau

SEQ ID NO: 48193 - RNA, 22 nt, Homo sapiens
uugauacuagagucuuucugac

SEQ ID NO: 48194 - RNA, 22 nt, Homo sapiens
uugauagguuuuauguauaguu

SEQ ID NO: 48195 - RNA, 22 nt, Homo sapiens
uugauaguuuaauuaaugcuag

SEQ ID NO: 48196 - RNA, 22 nt, Homo sapiens
uugauaauguuaacuuugguca

SEQ ID NO: 48197 - RNA, 22 nt, Homo sapiens
uugaguuugaguauucuaaagc

SEQ ID NO: 48198 - RNA, 22 nt, Homo sapiens
uugaguauuugcagucugaaca

SEQ ID NO: 48199 - RNA, 22 nt, Homo sapiens
uucuguguuuaggucacggcua

SEQ ID NO: 48200 - RNA, 22 nt, Homo sapiens
uucugugguugaaaggagagau

SEQ ID NO: 48201 - RNA, 21 nt, Homo sapiens
uucuucaggcagaaggauuau

SEQ ID NO: 48202 - RNA, 22 nt, Homo sapiens
uucuucaggcauucccagaagc

SEQ ID NO: 48203 - RNA, 22 nt, Homo sapiens
uuggacuacagauuacuucauc

SEQ ID NO: 48204 - RNA, 22 nt, Homo sapiens
uuggacagaugguuacauuuuu

SEQ ID NO: 48205 - RNA, 22 nt, Homo sapiens
uuggaaugcacacugagccugc

SEQ ID NO: 48206 - RNA, 22 nt, Homo sapiens
uuggaauguauggcaucuugcg

SEQ ID NO: 48207 - RNA, 23 nt, Homo sapiens
uugcauugcccuccauaguacuc

SEQ ID NO: 48208 - RNA, 22 nt, Homo sapiens
uugcgaugaagacaaaacaugc

SEQ ID NO: 48209 - RNA, 22 nt, Homo sapiens
uugaucacuguacuaugacuau

SEQ ID NO: 48210 - RNA, 22 nt, Homo sapiens
uugcauauguugaaccagccuu

SEQ ID NO: 48211 - RNA, 19 nt, Homo sapiens
uugcauauguugaaccagc

SEQ ID NO: 48212 - RNA, 22 nt, Homo sapiens
uuguauguugaaugaugguaua

SEQ ID NO: 48213 - RNA, 21 nt, Homo sapiens
uuguaugguugaacuugauac

SEQ ID NO: 48214 - RNA, 22 nt, Homo sapiens
uuguauugucuugaugaguuga

SEQ ID NO: 48215 - RNA, 22 nt, Homo sapiens
uugugaaugaugccgcaauaaa

SEQ ID NO: 48216 - RNA, 22 nt, Homo sapiens
uugucaaacucauucuccaucc

SEQ ID NO: 48217 - RNA, 22 nt, Homo sapiens
uugucaacaugaaacuguguuu

SEQ ID NO: 48218 - RNA, 22 nt, Homo sapiens
uugugaagaugugaagcaagca

SEQ ID NO: 48219 - RNA, 22 nt, Homo sapiens
uugugaauggugccgcaguaaa

SEQ ID NO: 48220 - RNA, 22 nt, Homo sapiens
uugugaauggugccgcaauaaa

SEQ ID NO: 48221 - RNA, 22 nt, Homo sapiens
uuguagcuuuuuaaugugcugc

SEQ ID NO: 48222 - RNA, 22 nt, Homo sapiens
uuguacuauuuuuaucagugau

SEQ ID NO: 48223 - RNA, 22 nt, Homo sapiens
uuguacuucagacaugccaaag

SEQ ID NO: 48224 - RNA, 22 nt, Homo sapiens
uuggauuguuucuagauugggg

SEQ ID NO: 48225 - RNA, 22 nt, Homo sapiens
uuggauuuuaacaaacuaggug

SEQ ID NO: 48226 - RNA, 22 nt, Homo sapiens
uuggauuauaaacugagauuug

SEQ ID NO: 48227 - RNA, 22 nt, Homo sapiens
uuggaugauaaagaagccuaag

SEQ ID NO: 48228 - RNA, 22 nt, Homo sapiens
uuggauugugaaaguauucucu

SEQ ID NO: 48229 - RNA, 22 nt, Homo sapiens
uuggacuuuaagauagagaugu

SEQ ID NO: 48230 - RNA, 22 nt, Homo sapiens
uuggauaguuuaugaaaaaugg

SEQ ID NO: 48231 - RNA, 22 nt, Homo sapiens
uuggcacgugguggggcucgga

SEQ ID NO: 48232 - RNA, 19 nt, Homo sapiens
uuggcccugguucucuucu

SEQ ID NO: 48233 - RNA, 22 nt, Homo sapiens
uuguguuugaugcugacacgca

SEQ ID NO: 48234 - RNA, 22 nt, Homo sapiens
uuguuaugggguggcuugaaag

SEQ ID NO: 48235 - RNA, 22 nt, Homo sapiens
uugugauugagugauccuuguu

SEQ ID NO: 48236 - RNA, 22 nt, Homo sapiens
uugugcauaucagagguuugcu

SEQ ID NO: 48237 - RNA, 22 nt, Homo sapiens
uuucauggaggauuugcuucuu

SEQ ID NO: 48238 - RNA, 22 nt, Homo sapiens
uuucauggaauauagucauuuu

SEQ ID NO: 48239 - RNA, 22 nt, Homo sapiens
uuucauggacgcaaugccuuuu

SEQ ID NO: 48240 - RNA, 22 nt, Homo sapiens
uuucauggagaaucuucuuacu

SEQ ID NO: 48241 - RNA, 22 nt, Homo sapiens
uuguuuagagacuggaauuaaa

SEQ ID NO: 48242 - RNA, 17 nt, Homo sapiens
uuguucccauuaaaaag

SEQ ID NO: 48243 - RNA, 22 nt, Homo sapiens
uuguuuuggagaugagcuaaaa

SEQ ID NO: 48244 - RNA, 22 nt, Homo sapiens
uuugauguccaccucagcccac

SEQ ID NO: 48245 - RNA, 22 nt, Homo sapiens
uuugauguugauacuaccuuca

SEQ ID NO: 48246 - RNA, 22 nt, Homo sapiens
uuugauguugagacuauaaagc

SEQ ID NO: 48247 - RNA, 21 nt, Homo sapiens
uuugaucauuaaaagugaauc

SEQ ID NO: 48248 - RNA, 23 nt, Homo sapiens
uuugagugugauaaacacuguca

SEQ ID NO: 48249 - RNA, 22 nt, Homo sapiens
uuugaggaaaggcauaaguagg

SEQ ID NO: 48250 - RNA, 22 nt, Homo sapiens
uuugagcuugacucagcuggag

SEQ ID NO: 48251 - RNA, 22 nt, Homo sapiens
uuuggcaaagaucaacauguua

SEQ ID NO: 48252 - RNA, 20 nt, Homo sapiens
uuuggcaauaggguuuuugu

SEQ ID NO: 48253 - RNA, 22 nt, Homo sapiens
uuuggcauauuuuaagcugguu

SEQ ID NO: 48254 - RNA, 20 nt, Homo sapiens
uuugaauguaaagcauguca

SEQ ID NO: 48255 - RNA, 22 nt, Homo sapiens
uuucccauuguucugcucugug

SEQ ID NO: 48256 - RNA, 22 nt, Homo sapiens
uuuccaagaugcuuacuuucuc

SEQ ID NO: 48257 - RNA, 18 nt, Homo sapiens
uuucauugagugugauau

SEQ ID NO: 48258 - RNA, 23 nt, Homo sapiens
uuucauggggauuuacucauucc

SEQ ID NO: 48259 - RNA, 22 nt, Homo sapiens
uuuguauguuggagauuggaga

SEQ ID NO: 48260 - RNA, 21 nt, Homo sapiens
uuuguaguagcaugauuuaua

SEQ ID NO: 48261 - RNA, 23 nt, Homo sapiens
uuugugcuaauuuaugggcucuu

SEQ ID NO: 48262 - RNA, 22 nt, Homo sapiens
uuugugcuccucucaguaugug

SEQ ID NO: 48263 - RNA, 22 nt, Homo sapiens
uuuuaguggacaaagguauuua

SEQ ID NO: 48264 - RNA, 22 nt, Homo sapiens
uuuuaguggaauauuuacaguu

SEQ ID NO: 48265 - RNA, 22 nt, Homo sapiens
uuuguucuucguuccugagcca

SEQ ID NO: 48266 - RNA, 22 nt, Homo sapiens
uuugugcuccuguugagaaucu

SEQ ID NO: 48267 - RNA, 22 nt, Homo sapiens
uuugugcugcaauuaauuuccc

SEQ ID NO: 48268 - RNA, 23 nt, Homo sapiens
uuugugucccucuagaauucaug

SEQ ID NO: 48269 - RNA, 22 nt, Homo sapiens
uuugcuuguguaaaaaucugga

SEQ ID NO: 48270 - RNA, 22 nt, Homo sapiens
uuugggacuguauuaaaugccu

SEQ ID NO: 48271 - RNA, 22 nt, Homo sapiens
uuuggccauguuggucaggcug

SEQ ID NO: 48272 - RNA, 22 nt, Homo sapiens
uuuggcauuuuacuacucaaau

SEQ ID NO: 48273 - RNA, 22 nt, Homo sapiens
uuuggcauuaagaugcuguauc

SEQ ID NO: 48274 - RNA, 23 nt, Homo sapiens
uuuguacuaugucaguuuagaua

SEQ ID NO: 48275 - RNA, 22 nt, Homo sapiens
uuuguacacgugggugaauugu

SEQ ID NO: 48276 - RNA, 22 nt, Homo sapiens
uuuguacacuguugguaggauu

SEQ ID NO: 48277 - RNA, 22 nt, Homo sapiens
uuuguacacuguuggugguuau

SEQ ID NO: 48278 - RNA, 22 nt, Homo sapiens
uuugguuuuuguuaucacucau

SEQ ID NO: 48279 - RNA, 22 nt, Homo sapiens
augaguugaagcuacaagaggc

SEQ ID NO: 48280 - RNA, 22 nt, Homo sapiens
augauacugaguugaguucuca

SEQ ID NO: 48281 - RNA, 22 nt, Homo sapiens
augauacuggcuucauagaaug

SEQ ID NO: 48282 - RNA, 22 nt, Homo sapiens
augcacuguuuucuugaugaga

SEQ ID NO: 48283 - RNA, 22 nt, Homo sapiens
augcagacacaaguuauaguaa

SEQ ID NO: 48284 - RNA, 22 nt, Homo sapiens
augagcucauaaagagugauuu

SEQ ID NO: 48285 - RNA, 22 nt, Homo sapiens
augagcuaggacagaaugucag

SEQ ID NO: 48286 - RNA, 22 nt, Homo sapiens
augagauuguuugugugaaaua

SEQ ID NO: 48287 - RNA, 22 nt, Homo sapiens
augagcagaagagauacacugu

SEQ ID NO: 48288 - RNA, 22 nt, Homo sapiens
augaggauagguuucuauuagg

SEQ ID NO: 48289 - RNA, 22 nt, Homo sapiens
augaggugcagaggaaaugagu

SEQ ID NO: 48290 - RNA, 22 nt, Homo sapiens
augaacagagccuugagaaccu

SEQ ID NO: 48291 - RNA, 22 nt, Homo sapiens
augaaaguguguggaaacuuga

SEQ ID NO: 48292 - RNA, 22 nt, Homo sapiens
augaaagguauguuuucuguga

SEQ ID NO: 48293 - RNA, 22 nt, Homo sapiens
aucauugcacaucacagccuca

SEQ ID NO: 48294 - RNA, 22 nt, Homo sapiens
augaaugcagcacuguuuuucu

SEQ ID NO: 48295 - RNA, 22 nt, Homo sapiens
augaauccauuccugccacaga

SEQ ID NO: 48296 - RNA, 22 nt, Homo sapiens
augagaugaggaauggcccucc

SEQ ID NO: 48297 - RNA, 22 nt, Homo sapiens
augagagcaacaccuucacuug

SEQ ID NO: 48298 - RNA, 22 nt, Homo sapiens
augagauaggaacaaacuuaca

SEQ ID NO: 48299 - RNA, 22 nt, Homo sapiens
augcauauuuuaccuagaagag

SEQ ID NO: 48300 - RNA, 22 nt, Homo sapiens
augcaugucaaauuuguagguu

SEQ ID NO: 48301 - RNA, 22 nt, Homo sapiens
augcauggagucuuucacaagu

SEQ ID NO: 48302 - RNA, 22 nt, Homo sapiens
augaguuccuuccuugccuagg

SEQ ID NO: 48303 - RNA, 22 nt, Homo sapiens
auggaaucauccuccugggagc

SEQ ID NO: 48304 - RNA, 21 nt, Homo sapiens
auggacaugguuaggcuuugu

SEQ ID NO: 48305 - RNA, 22 nt, Homo sapiens
auggaucauauucuugaggagg

SEQ ID NO: 48306 - RNA, 21 nt, Homo sapiens
auggacugugugacccugcac

SEQ ID NO: 48307 - RNA, 22 nt, Homo sapiens
auggcuuuuuaaaucauguugu

SEQ ID NO: 48308 - RNA, 22 nt, Homo sapiens
auguaguaugaagaagaugcuu

SEQ ID NO: 48309 - RNA, 22 nt, Homo sapiens
auguaauguuaaauugcuaauu

SEQ ID NO: 48310 - RNA, 22 nt, Homo sapiens
auguaauugagguuuuugccau

SEQ ID NO: 48311 - RNA, 22 nt, Homo sapiens
auguauacauagauacgugugu

SEQ ID NO: 48312 - RNA, 22 nt, Homo sapiens
augucacagguccuagccaagu

SEQ ID NO: 48313 - RNA, 22 nt, Homo sapiens
augucaacauagacaguagagu

SEQ ID NO: 48314 - RNA, 22 nt, Homo sapiens
auguauggcagguuugggguuu

SEQ ID NO: 48315 - RNA, 22 nt, Homo sapiens
augucaaggugggugauaguuu

SEQ ID NO: 48316 - RNA, 22 nt, Homo sapiens
augucuggcagaagacuucuca

SEQ ID NO: 48317 - RNA, 22 nt, Homo sapiens
auggucuuuauuguguugagug

SEQ ID NO: 48318 - RNA, 22 nt, Homo sapiens
augguauuuaacagucuuucua

SEQ ID NO: 48319 - RNA, 22 nt, Homo sapiens
augguuugugcuccuauaagaa

SEQ ID NO: 48320 - RNA, 22 nt, Homo sapiens
auguaaacagaugugcagcuug

SEQ ID NO: 48321 - RNA, 22 nt, Homo sapiens
augguguauugauuauugcugu

SEQ ID NO: 48322 - RNA, 22 nt, Homo sapiens
augguauuuugugauaccuugu

SEQ ID NO: 48323 - RNA, 22 nt, Homo sapiens
aucagcacugaucauacagcuu

SEQ ID NO: 48324 - RNA, 22 nt, Homo sapiens
aucagcagcaugaaaacaggcu

SEQ ID NO: 48325 - RNA, 22 nt, Homo sapiens
aucacauggccagguaguaauc

SEQ ID NO: 48326 - RNA, 22 nt, Homo sapiens
aucagcauucccaaaugaugug

SEQ ID NO: 48327 - RNA, 22 nt, Homo sapiens
aucagcagcaugaaaacggacu

SEQ ID NO: 48328 - RNA, 22 nt, Homo sapiens
aucauaucauuggugaacagug

SEQ ID NO: 48329 - RNA, 22 nt, Homo sapiens
aucauauccuagauauaacuuc

SEQ ID NO: 48330 - RNA, 22 nt, Homo sapiens
aucaaguacuguacugaaagug

SEQ ID NO: 48331 - RNA, 22 nt, Homo sapiens
aucacaggucaaaucauuauuu

SEQ ID NO: 48332 - RNA, 22 nt, Homo sapiens
aucacagauauggguuuaaauc

SEQ ID NO: 48333 - RNA, 22 nt, Homo sapiens
aucacagugaaaacagucaauu

SEQ ID NO: 48334 - RNA, 22 nt, Homo sapiens
aucacagagucacgggcaacuu

SEQ ID NO: 48335 - RNA, 22 nt, Homo sapiens
auauucacagguaucagagauu

SEQ ID NO: 48336 - RNA, 22 nt, Homo sapiens
auauugcuugaggccaggaggu

SEQ ID NO: 48337 - RNA, 18 nt, Homo sapiens
auauugcauuggauggau

SEQ ID NO: 48338 - RNA, 22 nt, Homo sapiens
auauuguuggcugcuggcugau

SEQ ID NO: 48339 - RNA, 22 nt, Homo sapiens
auauuggacugugcuaguuaga

SEQ ID NO: 48340 - RNA, 22 nt, Homo sapiens
auaucaaggccauuuucuaaau

SEQ ID NO: 48341 - RNA, 22 nt, Homo sapiens
auaucacaaacaagucuguacu

SEQ ID NO: 48342 - RNA, 22 nt, Homo sapiens
auaugucuguuuagucuguaau

SEQ ID NO: 48343 - RNA, 22 nt, Homo sapiens
auauguucucauucauaugugg

SEQ ID NO: 48344 - RNA, 22 nt, Homo sapiens
auagugcugcaacaaauauacg

SEQ ID NO: 48345 - RNA, 19 nt, Homo sapiens
auauaacauccaggagcag

SEQ ID NO: 48346 - RNA, 22 nt, Homo sapiens
auauaccuaggcuacaugguuu

SEQ ID NO: 48347 - RNA, 22 nt, Homo sapiens
auagguuuucacuguagauucu

SEQ ID NO: 48348 - RNA, 22 nt, Homo sapiens
auagcagacauuucaaggcagg

SEQ ID NO: 48349 - RNA, 22 nt, Homo sapiens
auagcagaauuuggucaagucu

SEQ ID NO: 48350 - RNA, 22 nt, Homo sapiens
aguaaacuucagaguucuuccu

SEQ ID NO: 48351 - RNA, 22 nt, Homo sapiens
aguaaagcaucagcuagaugug

SEQ ID NO: 48352 - RNA, 22 nt, Homo sapiens
aggugguuuugaugagcaggua

SEQ ID NO: 48353 - RNA, 22 nt, Homo sapiens
agguauuuucaacuuagaaugg

SEQ ID NO: 48354 - RNA, 22 nt, Homo sapiens
auaaaagcaggucuaggucagg

SEQ ID NO: 48355 - RNA, 19 nt, Homo sapiens
agugucauggucauuauuu

SEQ ID NO: 48356 - RNA, 22 nt, Homo sapiens
aguguuuuuaacaagaaagggu

SEQ ID NO: 48357 - RNA, 23 nt, Homo sapiens
auagagcuaggaugcagacagau

SEQ ID NO: 48358 - RNA, 22 nt, Homo sapiens
auacacuggagcaaaccuggag

SEQ ID NO: 48359 - RNA, 22 nt, Homo sapiens
auagcaaugccccacuccuugg

SEQ ID NO: 48360 - RNA, 21 nt, Homo sapiens
auagcacaucagauuuuauua

SEQ ID NO: 48361 - RNA, 22 nt, Homo sapiens
auagaucuauuuauguaucccu

SEQ ID NO: 48362 - RNA, 22 nt, Homo sapiens
auagcaagaugauugauccauu

SEQ ID NO: 48363 - RNA, 22 nt, Homo sapiens
auagcaaugccccaauccuugg

SEQ ID NO: 48364 - RNA, 22 nt, Homo sapiens
auaauacuuuuauuuugaggaa

SEQ ID NO: 48365 - RNA, 19 nt, Homo sapiens
auaaacuagaacugucccc

SEQ ID NO: 48366 - RNA, 22 nt, Homo sapiens
auaaucaugucugaaaccuuug

SEQ ID NO: 48367 - RNA, 22 nt, Homo sapiens
auaaugacuuccaguuccacuc

SEQ ID NO: 48368 - RNA, 22 nt, Homo sapiens
auaaucacacccagguuaaaug

SEQ ID NO: 48369 - RNA, 22 nt, Homo sapiens
auaauaucagguugugaugaug

SEQ ID NO: 48370 - RNA, 22 nt, Homo sapiens
auacaaggaaugaagagauuug

SEQ ID NO: 48371 - RNA, 21 nt, Homo sapiens
acauguacacauguaugcaca

SEQ ID NO: 48372 - RNA, 22 nt, Homo sapiens
acauguagacaacggacaaagu

SEQ ID NO: 48373 - RNA, 22 nt, Homo sapiens
acccguuacuuagcagaccagg

SEQ ID NO: 48374 - RNA, 22 nt, Homo sapiens
acccugucaaaauggaccaauc

SEQ ID NO: 48375 - RNA, 22 nt, Homo sapiens
acauacacuagggauguggugu

SEQ ID NO: 48376 - RNA, 22 nt, Homo sapiens
acaguguuccuuuguugugacu

SEQ ID NO: 48377 - RNA, 22 nt, Homo sapiens
acauacuucuuuacauuccaua

SEQ ID NO: 48378 - RNA, 22 nt, Homo sapiens
acaucauugggggcuacaggug

SEQ ID NO: 48379 - RNA, 22 nt, Homo sapiens
acauccauuugcuuuauuugcu

SEQ ID NO: 48380 - RNA, 22 nt, Homo sapiens
acaucuguacaguggguguggu

SEQ ID NO: 48381 - RNA, 22 nt, Homo sapiens
acugcacuccagccucggcaau

SEQ ID NO: 48382 - RNA, 22 nt, Homo sapiens
acugcacuccagccucggggac

SEQ ID NO: 48383 - RNA, 22 nt, Homo sapiens
acugcacuccagccucggugac

SEQ ID NO: 48384 - RNA, 22 nt, Homo sapiens
acugcacuccagccugugagac

SEQ ID NO: 48385 - RNA, 22 nt, Homo sapiens
accuguagcagacuuaauauuu

SEQ ID NO: 48386 - RNA, 18 nt, Homo sapiens
accuucauuccuuugccu

SEQ ID NO: 48387 - RNA, 22 nt, Homo sapiens
accuuguaucuguuaggauugc

SEQ ID NO: 48388 - RNA, 22 nt, Homo sapiens
acggaacugcuccauucuuugc

SEQ ID NO: 48389 - RNA, 22 nt, Homo sapiens
acguaguagguuuauaauauua

SEQ ID NO: 48390 - RNA, 22 nt, Homo sapiens
acuacaugugaugucaguauau

SEQ ID NO: 48391 - RNA, 22 nt, Homo sapiens
acacuugcuugcaauagccucc

SEQ ID NO: 48392 - RNA, 22 nt, Homo sapiens
acacuuucuggagcugcacaua

SEQ ID NO: 48393 - RNA, 22 nt, Homo sapiens
acacuguugacauuuuguagug

SEQ ID NO: 48394 - RNA, 22 nt, Homo sapiens
acagaauucucagaacugggag

SEQ ID NO: 48395 - RNA, 22 nt, Homo sapiens
acagagcaaugagcuacggucu

SEQ ID NO: 48396 - RNA, 22 nt, Homo sapiens
acagauagcacuaagggaucug

SEQ ID NO: 48397 - RNA, 22 nt, Homo sapiens
acagcagugccccacucuacug

SEQ ID NO: 48398 - RNA, 22 nt, Homo sapiens
acaagcacaaaugcauagaugg

SEQ ID NO: 48399 - RNA, 22 nt, Homo sapiens
acaagcacaaauuuaauccugu

SEQ ID NO: 48400 - RNA, 22 nt, Homo sapiens
aauugccucaagugaucauggc

SEQ ID NO: 48401 - RNA, 22 nt, Homo sapiens
aauucacuuguggcagauccuu

SEQ ID NO: 48402 - RNA, 22 nt, Homo sapiens
aauucacuucuuuuaggcaggg

SEQ ID NO: 48403 - RNA, 22 nt, Homo sapiens
aauucuguauuguuuagggacu

SEQ ID NO: 48404 - RNA, 22 nt, Homo sapiens
aaucuguagaaggugcacauuc

SEQ ID NO: 48405 - RNA, 22 nt, Homo sapiens
aaucugucaguuuuguguuaau

SEQ ID NO: 48406 - RNA, 22 nt, Homo sapiens
aaugacacugagcaucuuucau

SEQ ID NO: 48407 - RNA, 22 nt, Homo sapiens
aaugauacuguguacaagggca

SEQ ID NO: 48408 - RNA, 22 nt, Homo sapiens
aaugcacauaaaauccuccagg

SEQ ID NO: 48409 - RNA, 20 nt, Homo sapiens
aaucuacuugcccauuuagc

SEQ ID NO: 48410 - RNA, 22 nt, Homo sapiens
aaugacuaagaugguacauuuu

SEQ ID NO: 48411 - RNA, 22 nt, Homo sapiens
aaugcaucuagaaaggugaauu

SEQ ID NO: 48412 - RNA, 22 nt, Homo sapiens
aaggcaugcaaagaacauuuua

SEQ ID NO: 48413 - RNA, 22 nt, Homo sapiens
aaggcaacgugaguuguugauu

SEQ ID NO: 48414 - RNA, 22 nt, Homo sapiens
aaggcaagguggauaaugaagc

SEQ ID NO: 48415 - RNA, 22 nt, Homo sapiens
aaggaguguggugaucuugggc

SEQ ID NO: 48416 - RNA, 22 nt, Homo sapiens
aagcuguugguggaucuaccau

SEQ ID NO: 48417 - RNA, 22 nt, Homo sapiens
aagcuguuguucauccugaauu

SEQ ID NO: 48418 - RNA, 19 nt, Homo sapiens
agcagaacaaauguguggg

SEQ ID NO: 48419 - RNA, 22 nt, Homo sapiens
agcacgauggggucacgaugag

SEQ ID NO: 48420 - RNA, 22 nt, Homo sapiens
agcagcaauuuuguaugguuua

SEQ ID NO: 48421 - RNA, 22 nt, Homo sapiens
agaguauacaugugagugagau

SEQ ID NO: 48422 - RNA, 22 nt, Homo sapiens
agcaccacauacuacagagaua

SEQ ID NO: 48423 - RNA, 22 nt, Homo sapiens
agaguauagcaacuuaguaaaa

SEQ ID NO: 48424 - RNA, 22 nt, Homo sapiens
agcagcauuaugauauaucuua

SEQ ID NO: 48425 - RNA, 22 nt, Homo sapiens
agcccagagacuguguaaauuu

SEQ ID NO: 48426 - RNA, 22 nt, Homo sapiens
agccucauucuacauguuaaug

SEQ ID NO: 48427 - RNA, 23 nt, Homo sapiens
agccuguugccuaggcagcucau

SEQ ID NO: 48428 - RNA, 18 nt, Homo sapiens
agagcuaugaacauaugc

SEQ ID NO: 48429 - RNA, 22 nt, Homo sapiens
agagcauugaguuaaugguuca

SEQ ID NO: 48430 - RNA, 22 nt, Homo sapiens
agagguguuaaagucucuuuua

SEQ ID NO: 48431 - RNA, 22 nt, Homo sapiens
agagguauuggaaggaguguca

SEQ ID NO: 48432 - RNA, 22 nt, Homo sapiens
agagaugauuaacauuuuggua

SEQ ID NO: 48433 - RNA, 22 nt, Homo sapiens
acuguacuccagccugggugac

SEQ ID NO: 48434 - RNA, 22 nt, Homo sapiens
acuguacucuacccugggcaac

SEQ ID NO: 48435 - RNA, 22 nt, Homo sapiens
acuggacuuaaugaugaauugu

SEQ ID NO: 48436 - RNA, 22 nt, Homo sapiens
acugcacuccagccuucggaca

SEQ ID NO: 48437 - RNA, 22 nt, Homo sapiens
aggcugguauuuacaaaagcuc

SEQ ID NO: 48438 - RNA, 22 nt, Homo sapiens
agguaaacauggggacugcuac

SEQ ID NO: 48439 - RNA, 22 nt, Homo sapiens
agguaauagcacaugauaccuu

SEQ ID NO: 48440 - RNA, 22 nt, Homo sapiens
aggagcacaauggucaugugga

SEQ ID NO: 48441 - RNA, 23 nt, Homo sapiens
aggagcuuagaaguugccauugc

SEQ ID NO: 48442 - RNA, 22 nt, Homo sapiens
agcuuuggauaccugcuguucc

SEQ ID NO: 48443 - RNA, 22 nt, Homo sapiens
agcuuguuuuccugcaacuaga

SEQ ID NO: 48444 - RNA, 20 nt, Homo sapiens
agcuggguguguuggugcau

SEQ ID NO: 48445 - RNA, 22 nt, Homo sapiens
agcuuguguuuuucuaaguauc

SEQ ID NO: 48446 - RNA, 22 nt, Homo sapiens
aggaauguuaguacuucuuagu

SEQ ID NO: 48447 - RNA, 22 nt, Homo sapiens
aggaauggaaacuuuugauggu

SEQ ID NO: 48448 - RNA, 22 nt, Homo sapiens
agcuacaucuugcucugggaug

SEQ ID NO: 48449 - RNA, 18 nt, Homo sapiens
agcucaguguuugcuuac

SEQ ID NO: 48450 - RNA, 22 nt, Homo sapiens
agcugcaauguuuaguauaaua

SEQ ID NO: 48451 - RNA, 22 nt, Homo sapiens
gauagcauucaauuaucuguug

SEQ ID NO: 48452 - RNA, 22 nt, Homo sapiens
gauauguaaaaauuauaucuga

SEQ ID NO: 48453 - RNA, 22 nt, Homo sapiens
gauaugaguagucgcauugaug

SEQ ID NO: 48454 - RNA, 22 nt, Homo sapiens
gaugagauguucucauggauug

SEQ ID NO: 48455 - RNA, 22 nt, Homo sapiens
gaugagaugagcauuugaauug

SEQ ID NO: 48456 - RNA, 21 nt, Homo sapiens
gauaucuuuauucccaagagc

SEQ ID NO: 48457 - RNA, 22 nt, Homo sapiens
gaucuguuuuccuauuguuugu

SEQ ID NO: 48458 - RNA, 22 nt, Homo sapiens
gauacaccauuuucuagcuauu

SEQ ID NO: 48459 - RNA, 22 nt, Homo sapiens
gaguuuguaaacuauucacuaa

SEQ ID NO: 48460 - RNA, 18 nt, Homo sapiens
gauaacaguggacuaugc

SEQ ID NO: 48461 - RNA, 22 nt, Homo sapiens
gauaaaguauuggguacuaugc

SEQ ID NO: 48462 - RNA, 22 nt, Homo sapiens
gaguucauuuugaaaccuugau

SEQ ID NO: 48463 - RNA, 22 nt, Homo sapiens
gagguaaguggauuaugagguc

SEQ ID NO: 48464 - RNA, 22 nt, Homo sapiens
gagguaagagaauaaacaguuu

SEQ ID NO: 48465 - RNA, 22 nt, Homo sapiens
gacuagggaaaauuauuuuguu

SEQ ID NO: 48466 - RNA, 22 nt, Homo sapiens
gacuagggaccaugagcaaucc

SEQ ID NO: 48467 - RNA, 22 nt, Homo sapiens
gagcagacaugaggaccgcugg

SEQ ID NO: 48468 - RNA, 22 nt, Homo sapiens
gaggaguauuuugucgaauguc

SEQ ID NO: 48469 - RNA, 21 nt, Homo sapiens
gaggauauuuuuauguuugga

SEQ ID NO: 48470 - RNA, 22 nt, Homo sapiens
gagcugccuugccuaugcaaga

SEQ ID NO: 48471 - RNA, 22 nt, Homo sapiens
gagcuuguagugugaaugguau

SEQ ID NO: 48472 - RNA, 22 nt, Homo sapiens
gagcucauuguugcuaaagaga

SEQ ID NO: 48473 - RNA, 22 nt, Homo sapiens
gauggauuuuaagugaaugaaa

SEQ ID NO: 48474 - RNA, 22 nt, Homo sapiens
gauggcauuucuggaucugaca

SEQ ID NO: 48475 - RNA, 22 nt, Homo sapiens
gauuuuuggggaagccucuuau

SEQ ID NO: 48476 - RNA, 22 nt, Homo sapiens
gcaaaaaguagugcugguuagg

SEQ ID NO: 48477 - RNA, 21 nt, Homo sapiens
gcaaacauccuuugaugccag

SEQ ID NO: 48478 - RNA, 22 nt, Homo sapiens
gcaaaauugagaagggaauaua

SEQ ID NO: 48479 - RNA, 20 nt, Homo sapiens
gcaacauggccagagugaau

SEQ ID NO: 48480 - RNA, 22 nt, Homo sapiens
gcagaauugguuucuucuaagg

SEQ ID NO: 48481 - RNA, 22 nt, Homo sapiens
gcaucacagcuccugugcuggc

SEQ ID NO: 48482 - RNA, 22 nt, Homo sapiens
gcaucaaugucuauaguguuug

SEQ ID NO: 48483 - RNA, 19 nt, Homo sapiens
gcaucauuaguugcuuuuc

SEQ ID NO: 48484 - RNA, 22 nt, Homo sapiens
gcagugaugugaucauagcuca

SEQ ID NO: 48485 - RNA, 22 nt, Homo sapiens
gccagauuguccaguuuuuuau

SEQ ID NO: 48486 - RNA, 22 nt, Homo sapiens
cugugcaugcgcggagcugaaa

SEQ ID NO: 48487 - RNA, 17 nt, Homo sapiens
cugugaugaucuugucu

SEQ ID NO: 48488 - RNA, 22 nt, Homo sapiens
cugugacugcagggcauauuug

SEQ ID NO: 48489 - RNA, 22 nt, Homo sapiens
cugugauagguuagucaugaau

SEQ ID NO: 48490 - RNA, 22 nt, Homo sapiens
cugugcuugauuauaugagugu

SEQ ID NO: 48491 - RNA, 22 nt, Homo sapiens
cugucuguuucaaaagugguua

SEQ ID NO: 48492 - RNA, 22 nt, Homo sapiens
cuggugugugacuuuucauuau

SEQ ID NO: 48493 - RNA, 22 nt, Homo sapiens
cuugaacaaagagauuccauua

SEQ ID NO: 48494 - RNA, 22 nt, Homo sapiens
cuugaauguaaauaauguacag

SEQ ID NO: 48495 - RNA, 22 nt, Homo sapiens
cuugaucaaugugguacuugau

SEQ ID NO: 48496 - RNA, 22 nt, Homo sapiens
cuugagcauauucuauauuaaa

SEQ ID NO: 48497 - RNA, 22 nt, Homo sapiens
cugugguugagcuuugccauga

SEQ ID NO: 48498 - RNA, 22 nt, Homo sapiens
cuguuauguuugauggaugaau

SEQ ID NO: 48499 - RNA, 22 nt, Homo sapiens
cuggcagugcuuguuauccugg

SEQ ID NO: 48500 - RNA, 18 nt, Homo sapiens
cuggaugucgaguguguu

SEQ ID NO: 48501 - RNA, 22 nt, Homo sapiens
cugacuuauguggacuauuuca

SEQ ID NO: 48502 - RNA, 22 nt, Homo sapiens
cugagaacaucauucagauauu

SEQ ID NO: 48503 - RNA, 22 nt, Homo sapiens
cugaaauggaaugugugcacag

SEQ ID NO: 48504 - RNA, 22 nt, Homo sapiens
cucugguggaagcagggggcaa

SEQ ID NO: 48505 - RNA, 22 nt, Homo sapiens
cucugauggagauauacaagga

SEQ ID NO: 48506 - RNA, 22 nt, Homo sapiens
cucucuguuugucuguuauugg

SEQ ID NO: 48507 - RNA, 23 nt, Homo sapiens
gaaguaauaaauggauucuuaac

SEQ ID NO: 48508 - RNA, 22 nt, Homo sapiens
gaagugcaguggcacagucaug

SEQ ID NO: 48509 - RNA, 17 nt, Homo sapiens
gaaguguuucuucauga

SEQ ID NO: 48510 - RNA, 19 nt, Homo sapiens
gaaguguuuguucuccaug

SEQ ID NO: 48511 - RNA, 22 nt, Homo sapiens
gacgauaucaaggaaaugaagu

SEQ ID NO: 48512 - RNA, 22 nt, Homo sapiens
gacccuguugggguuuagggcu

SEQ ID NO: 48513 - RNA, 22 nt, Homo sapiens
gacauguuuucauguauuugga

SEQ ID NO: 48514 - RNA, 22 nt, Homo sapiens
gaaugcaugaggggaucagaug

SEQ ID NO: 48515 - RNA, 22 nt, Homo sapiens
gaauggaacugacuauagcuga

SEQ ID NO: 48516 - RNA, 22 nt, Homo sapiens
gaaucacugugguaucccaugc

SEQ ID NO: 48517 - RNA, 22 nt, Homo sapiens
gaaugauacuguuaacgaaaga

SEQ ID NO: 48518 - RNA, 20 nt, Homo sapiens
gaaacaucuauccucuccuu

SEQ ID NO: 48519 - RNA, 22 nt, Homo sapiens
gaaagcugguauagauacauua

SEQ ID NO: 48520 - RNA, 22 nt, Homo sapiens
gaaaguaauuaacgauuguugc

SEQ ID NO: 48521 - RNA, 22 nt, Homo sapiens
gaacuuucuacauuaccucuuu

SEQ ID NO: 48522 - RNA, 23 nt, Homo sapiens
cuuuugcaaugugaucuugccac

SEQ ID NO: 48523 - RNA, 20 nt, Homo sapiens
cuuuuagcagcagcaagaga

SEQ ID NO: 48524 - RNA, 22 nt, Homo sapiens
cuuuuguggaucuucuguugcu

SEQ ID NO: 48525 - RNA, 22 nt, Homo sapiens
cuuuuugcugcagcaauacugg

SEQ ID NO: 48526 - RNA, 22 nt, Homo sapiens
cuuggacaccucaugcccaccu

SEQ ID NO: 48527 - RNA, 22 nt, Homo sapiens
cuugcagaggcccuggggagag

SEQ ID NO: 48528 - RNA, 22 nt, Homo sapiens
cuugcacuugaaauuccaguuu

SEQ ID NO: 48529 - RNA, 22 nt, Homo sapiens
cuuggcuccgacuccccuccaa

SEQ ID NO: 48530 - RNA, 19 nt, Homo sapiens
auuugaucaucaggcacag

SEQ ID NO: 48531 - RNA, 22 nt, Homo sapiens
auuuggcaacguagggaggcau

SEQ ID NO: 48532 - RNA, 22 nt, Homo sapiens
auuggguuaaaggauaugaaca

SEQ ID NO: 48533 - RNA, 22 nt, Homo sapiens
auugcaaagcguagacucuaaa

SEQ ID NO: 48534 - RNA, 22 nt, Homo sapiens
auugccucaauuccaagacugc

SEQ ID NO: 48535 - RNA, 22 nt, Homo sapiens
auugcacaucugcacuacagcc

SEQ ID NO: 48536 - RNA, 22 nt, Homo sapiens
auuauaugucaucacagacacc

SEQ ID NO: 48537 - RNA, 22 nt, Homo sapiens
auuauguuguauuuccuugcag

SEQ ID NO: 48538 - RNA, 22 nt, Homo sapiens
augugcaagaucauuaaagcuc

SEQ ID NO: 48539 - RNA, 22 nt, Homo sapiens
auuagguuaggcaaacuucugu

SEQ ID NO: 48540 - RNA, 22 nt, Homo sapiens
auuagguuagugcaaaaguaau

SEQ ID NO: 48541 - RNA, 22 nt, Homo sapiens
augugacuuuuuccugugccuu

SEQ ID NO: 48542 - RNA, 22 nt, Homo sapiens
augugacuugugaaaaguucag

SEQ ID NO: 48543 - RNA, 22 nt, Homo sapiens
augugacuggaucauggggacg

SEQ ID NO: 48544 - RNA, 22 nt, Homo sapiens
auugaaucuaaaaugagucucu

SEQ ID NO: 48545 - RNA, 22 nt, Homo sapiens
auucaucagggauacuggccug

SEQ ID NO: 48546 - RNA, 22 nt, Homo sapiens
auugaguaaaaaauagugaugu

SEQ ID NO: 48547 - RNA, 22 nt, Homo sapiens
auugaauuugguuugcuaagaa

SEQ ID NO: 48548 - RNA, 22 nt, Homo sapiens
auuauuagucggccagcuguua

SEQ ID NO: 48549 - RNA, 22 nt, Homo sapiens
auuaucacaguuuugcauaugg

SEQ ID NO: 48550 - RNA, 22 nt, Homo sapiens
cacaaaguagauuagucuucca

SEQ ID NO: 48551 - RNA, 22 nt, Homo sapiens
cacaaccuccgccuccuggguu

SEQ ID NO: 48552 - RNA, 22 nt, Homo sapiens
cacacugucuucauuacuguag

SEQ ID NO: 48553 - RNA, 22 nt, Homo sapiens
cacacugucuucaauggguggu

SEQ ID NO: 48554 - RNA, 22 nt, Homo sapiens
cacacuguuuuccauggggguu

SEQ ID NO: 48555 - RNA, 22 nt, Homo sapiens
caagugaauaguugcucucaga

SEQ ID NO: 48556 - RNA, 22 nt, Homo sapiens
caaguguuggcuuguauacaaa

SEQ ID NO: 48557 - RNA, 22 nt, Homo sapiens
auuugucacuauguggcuaaua

SEQ ID NO: 48558 - RNA, 22 nt, Homo sapiens
auuuugguuacauaguugagcu

SEQ ID NO: 48559 - RNA, 21 nt, Homo sapiens
auuuuugcagagcugguagug

SEQ ID NO: 48560 - RNA, 22 nt, Homo sapiens
cacuuugguucaccugaguuuc

SEQ ID NO: 48561 - RNA, 22 nt, Homo sapiens
cagagaaugucuuuuuuaacca

SEQ ID NO: 48562 - RNA, 22 nt, Homo sapiens
cagagucaagcucuuguuccau

SEQ ID NO: 48563 - RNA, 22 nt, Homo sapiens
cagaaguauugguaugcucugu

SEQ ID NO: 48564 - RNA, 22 nt, Homo sapiens
cacugcaguguaauuaagguug

SEQ ID NO: 48565 - RNA, 22 nt, Homo sapiens
cacugcacuccagccuaagagg

SEQ ID NO: 48566 - RNA, 22 nt, Homo sapiens
cacugcaauuacuuuugcacca

SEQ ID NO: 48567 - RNA, 22 nt, Homo sapiens
cuaguaaugucugucuuaugga

SEQ ID NO: 48568 - RNA, 22 nt, Homo sapiens
cuagucacauuuucaucaaaua

SEQ ID NO: 48569 - RNA, 22 nt, Homo sapiens
cuauaguauaguuugaagucag

SEQ ID NO: 48570 - RNA, 22 nt, Homo sapiens
cuaucucauugguuuuugaaag

SEQ ID NO: 48571 - RNA, 22 nt, Homo sapiens
cucagcaguggauuuaccacca

SEQ ID NO: 48572 - RNA, 22 nt, Homo sapiens
cuccauguggcuaacuuuuaaa

SEQ ID NO: 48573 - RNA, 22 nt, Homo sapiens
cuccuguagccccaucaucuuu

SEQ ID NO: 48574 - RNA, 22 nt, Homo sapiens
cuagcagcaugagaauggacca

SEQ ID NO: 48575 - RNA, 22 nt, Homo sapiens
cuagcaacauuucagugaguuu

SEQ ID NO: 48576 - RNA, 22 nt, Homo sapiens
cuagcacauaguuauucacuca

SEQ ID NO: 48577 - RNA, 22 nt, Homo sapiens
ccuggguuacaggugugagcca

SEQ ID NO: 48578 - RNA, 21 nt, Homo sapiens
ccugaugaccucugagaguua

SEQ ID NO: 48579 - RNA, 22 nt, Homo sapiens
ccucuuuguugagacuucacca

SEQ ID NO: 48580 - RNA, 22 nt, Homo sapiens
ccaucacacugugauuauuauc

SEQ ID NO: 48581 - RNA, 22 nt, Homo sapiens
ccaucccuuucugagcaguucc

SEQ ID NO: 48582 - RNA, 22 nt, Homo sapiens
ccagcaccauuuguugaauagg

SEQ ID NO: 48583 - RNA, 22 nt, Homo sapiens
ccagccgggugcaguggcucac

SEQ ID NO: 48584 - RNA, 22 nt, Homo sapiens
cauuguacauaaguauggagua

SEQ ID NO: 48585 - RNA, 22 nt, Homo sapiens
cauugcaguggaguggggaaga

SEQ ID NO: 48586 - RNA, 22 nt, Homo sapiens
cauugcauuuucuuuguaccuu

SEQ ID NO: 48587 - RNA, 22 nt, Homo sapiens
cauugcuaaaagucauauauaa

SEQ ID NO: 48588 - RNA, 22 nt, Homo sapiens
cauugcaaugaggucuugcagu

SEQ ID NO: 48589 - RNA, 22 nt, Homo sapiens
cauuccacauguaggacaauuu

SEQ ID NO: 48590 - RNA, 19 nt, Homo sapiens
caugugcacuacuggcuuc

SEQ ID NO: 48591 - RNA, 22 nt, Homo sapiens
cagcacauagcaguugcucagu

SEQ ID NO: 48592 - RNA, 22 nt, Homo sapiens
cagcacauuacaaguacuuggu

SEQ ID NO: 48593 - RNA, 22 nt, Homo sapiens
cagcuaaauuguuaaauccaag

SEQ ID NO: 48594 - RNA, 22 nt, Homo sapiens
uauugcauguugagcaguaccu

SEQ ID NO: 48595 - RNA, 22 nt, Homo sapiens
uauugcuuuuaacccaaucucu

SEQ ID NO: 48596 - RNA, 22 nt, Homo sapiens
uauugcuggcacauaguagguc

SEQ ID NO: 48597 - RNA, 22 nt, Homo sapiens
uauugcugaaaaugcuaaugau

SEQ ID NO: 48598 - RNA, 22 nt, Homo sapiens
ucaaaguaaagccucaggaugg

SEQ ID NO: 48599 - RNA, 20 nt, Homo sapiens
ucaaaguaugcucugcacua

SEQ ID NO: 48600 - RNA, 22 nt, Homo sapiens
uauugucacuaaaggaagcugg

SEQ ID NO: 48601 - RNA, 22 nt, Homo sapiens
uauuguacauguuauagauuuu

SEQ ID NO: 48602 - RNA, 22 nt, Homo sapiens
ucaaaucaucuuuuccaaagcu

SEQ ID NO: 48603 - RNA, 22 nt, Homo sapiens
ucaaauguuuguuuaaggcuua

SEQ ID NO: 48604 - RNA, 22 nt, Homo sapiens
ucaaauguucccuguacuggcc

SEQ ID NO: 48605 - RNA, 22 nt, Homo sapiens
ucaacagugggcacuguaaaug

SEQ ID NO: 48606 - RNA, 22 nt, Homo sapiens
ucaaauuccaagucuagguagg

SEQ ID NO: 48607 - RNA, 22 nt, Homo sapiens
uaucuacauguagguauguaug

SEQ ID NO: 48608 - RNA, 19 nt, Homo sapiens
uaugcaacuuauagugcug

SEQ ID NO: 48609 - RNA, 22 nt, Homo sapiens
uaugauuuuugggagaggucaa

SEQ ID NO: 48610 - RNA, 22 nt, Homo sapiens
uaugcacuaggcacuguguuug

SEQ ID NO: 48611 - RNA, 22 nt, Homo sapiens
uauggauucuagcucaguaggu

SEQ ID NO: 48612 - RNA, 22 nt, Homo sapiens
uauggauuugcauuccccaugu

SEQ ID NO: 48613 - RNA, 22 nt, Homo sapiens
uauggauuugccuauucuguau

SEQ ID NO: 48614 - RNA, 22 nt, Homo sapiens
uaugccuuuugguucaagcaac

SEQ ID NO: 48615 - RNA, 22 nt, Homo sapiens
uaugcuuauugucucauccacu

SEQ ID NO: 48616 - RNA, 20 nt, Homo sapiens
uauuacagaguaauggugga

SEQ ID NO: 48617 - RNA, 22 nt, Homo sapiens
uauggauuuuggaauauguggg

SEQ ID NO: 48618 - RNA, 22 nt, Homo sapiens
uaugguuuucucuuacguguug

SEQ ID NO: 48619 - RNA, 22 nt, Homo sapiens
uaguaguuuuguguauaauaau

SEQ ID NO: 48620 - RNA, 22 nt, Homo sapiens
uagugcugagauugagaagccc

SEQ ID NO: 48621 - RNA, 22 nt, Homo sapiens
uauagcuagugauuguguguau

SEQ ID NO: 48622 - RNA, 21 nt, Homo sapiens
uauaugacuuacuauugccuc

SEQ ID NO: 48623 - RNA, 22 nt, Homo sapiens
uauagcuaugggauguauuugc

SEQ ID NO: 48624 - RNA, 22 nt, Homo sapiens
uauagcagugugagaacagacu

SEQ ID NO: 48625 - RNA, 22 nt, Homo sapiens
uaucauugccucaaucuguauu

SEQ ID NO: 48626 - RNA, 22 nt, Homo sapiens
uaucccaauguaauaucacaaa

SEQ ID NO: 48627 - RNA, 18 nt, Homo sapiens
uaucauguagggaaguug

SEQ ID NO: 48628 - RNA, 22 nt, Homo sapiens
uaucaucauguuuuugcugugu

SEQ ID NO: 48629 - RNA, 22 nt, Homo sapiens
uaucauaguuuggacuuucauu

SEQ ID NO: 48630 - RNA, 22 nt, Homo sapiens
uaucauagacaaucaguuauug

SEQ ID NO: 48631 - RNA, 22 nt, Homo sapiens
uaucaguauggauucauggauu

SEQ ID NO: 48632 - RNA, 22 nt, Homo sapiens
uauaugcucugggauccugaaa

SEQ ID NO: 48633 - RNA, 22 nt, Homo sapiens
uaauugaaugcagacaccaggg

SEQ ID NO: 48634 - RNA, 22 nt, Homo sapiens
uaaugcuugguuguuuggaaaa

SEQ ID NO: 48635 - RNA, 22 nt, Homo sapiens
uacaacacugguucgacaugug

SEQ ID NO: 48636 - RNA, 22 nt, Homo sapiens
uaaugcacucgaaucauggaau

SEQ ID NO: 48637 - RNA, 22 nt, Homo sapiens
uaaugcauacagaagguguuuu

SEQ ID NO: 48638 - RNA, 22 nt, Homo sapiens
uaauauguauacagacagauac

SEQ ID NO: 48639 - RNA, 22 nt, Homo sapiens
uaagggacgcccccuucucucu

SEQ ID NO: 48640 - RNA, 22 nt, Homo sapiens
uaaguauuuuaauuccuggcau

SEQ ID NO: 48641 - RNA, 22 nt, Homo sapiens
uaaguacuuuacagacauuauc

SEQ ID NO: 48642 - RNA, 22 nt, Homo sapiens
uaaguaauugugguuucugcca

SEQ ID NO: 48643 - RNA, 22 nt, Homo sapiens
uaaguaauugcagcaauuugcc

SEQ ID NO: 48644 - RNA, 22 nt, Homo sapiens
guugaucuauguugcuggcagu

SEQ ID NO: 48645 - RNA, 22 nt, Homo sapiens
guugcagaguucuuccuccuga

SEQ ID NO: 48646 - RNA, 22 nt, Homo sapiens
uaaaguguuuguuauuaaaggu

SEQ ID NO: 48647 - RNA, 22 nt, Homo sapiens
guugacuaggagcuacuacuac

SEQ ID NO: 48648 - RNA, 22 nt, Homo sapiens
guugaacaauagauucauauca

SEQ ID NO: 48649 - RNA, 22 nt, Homo sapiens
guucucacuggugcugguaagu

SEQ ID NO: 48650 - RNA, 22 nt, Homo sapiens
guucuggagauaaagccaaggu

SEQ ID NO: 48651 - RNA, 22 nt, Homo sapiens
guucaucagggauauuggcuua

SEQ ID NO: 48652 - RNA, 22 nt, Homo sapiens
uaacaacauucuaacugacggc

SEQ ID NO: 48653 - RNA, 22 nt, Homo sapiens
uaaaugcucuuuaaaagugcuu

SEQ ID NO: 48654 - RNA, 22 nt, Homo sapiens
uaacaggcuacucuugcauugc

SEQ ID NO: 48655 - RNA, 22 nt, Homo sapiens
uaacaguggucugugguaucug

SEQ ID NO: 48656 - RNA, 22 nt, Homo sapiens
uaacauucacaugcugcaaaaa

SEQ ID NO: 48657 - RNA, 22 nt, Homo sapiens
uacaagcaggaaaugguauaug

SEQ ID NO: 48658 - RNA, 21 nt, Homo sapiens
uacaagcuguagcacaugcca

SEQ ID NO: 48659 - RNA, 22 nt, Homo sapiens
uacaauagugacaaaucagcau

SEQ ID NO: 48660 - RNA, 22 nt, Homo sapiens
uacagaucaguuauuuuguaga

SEQ ID NO: 48661 - RNA, 22 nt, Homo sapiens
uacucuuuagcuccuuaaggaa

SEQ ID NO: 48662 - RNA, 22 nt, Homo sapiens
uacucugcaguaauuccagccc

SEQ ID NO: 48663 - RNA, 22 nt, Homo sapiens
uacucaguagucuguugcuguc

SEQ ID NO: 48664 - RNA, 22 nt, Homo sapiens
uacugcacuccaggcucaccug

SEQ ID NO: 48665 - RNA, 22 nt, Homo sapiens
uagcacaucccuaaaaugcugu

SEQ ID NO: 48666 - RNA, 20 nt, Homo sapiens
uagcacacauguagaauagu

SEQ ID NO: 48667 - RNA, 22 nt, Homo sapiens
uagauuauuccuuugaauggcc

SEQ ID NO: 48668 - RNA, 22 nt, Homo sapiens
uagauuauuggcugauuugauc

SEQ ID NO: 48669 - RNA, 22 nt, Homo sapiens
uagauucaucuguuccuuuuga

SEQ ID NO: 48670 - RNA, 21 nt, Homo sapiens
uagcaaauugcuauuaaggca

SEQ ID NO: 48671 - RNA, 22 nt, Homo sapiens
uagauuaucuguaugugcucuu

SEQ ID NO: 48672 - RNA, 22 nt, Homo sapiens
uagcaaaucaauggaauugaag

SEQ ID NO: 48673 - RNA, 22 nt, Homo sapiens
uagauuaucucaccacucgagu

SEQ ID NO: 48674 - RNA, 22 nt, Homo sapiens
uagauuguuuaaguggcacaca

SEQ ID NO: 48675 - RNA, 21 nt, Homo sapiens
uagauaguugguucugaaucu

SEQ ID NO: 48676 - RNA, 22 nt, Homo sapiens
uagaucaauuaauuguuacuug

SEQ ID NO: 48677 - RNA, 22 nt, Homo sapiens
uagaucauauucagugcuuacu

SEQ ID NO: 48678 - RNA, 22 nt, Homo sapiens
uagauaguuaugauuugaugau

SEQ ID NO: 48679 - RNA, 19 nt, Homo sapiens
uagagguuuaagaaaagaa

SEQ ID NO: 48680 - RNA, 22 nt, Homo sapiens
uagacuguaagauccaggagag

SEQ ID NO: 48681 - RNA, 22 nt, Homo sapiens
gucacaguguuuguucauccca

SEQ ID NO: 48682 - RNA, 22 nt, Homo sapiens
gucagagcacugaguugugggc

SEQ ID NO: 48683 - RNA, 22 nt, Homo sapiens
gucagcuuuuccuuacuuuagg

SEQ ID NO: 48684 - RNA, 22 nt, Homo sapiens
gucguggagcucacagugugcc

SEQ ID NO: 48685 - RNA, 22 nt, Homo sapiens
gucuaugagucccugaauuuaa

SEQ ID NO: 48686 - RNA, 22 nt, Homo sapiens
guccuugaggcuuugacugugg

SEQ ID NO: 48687 - RNA, 22 nt, Homo sapiens
gugaugguccagggaaucucuu

SEQ ID NO: 48688 - RNA, 22 nt, Homo sapiens
gugaucuuucaggcuugaccau

SEQ ID NO: 48689 - RNA, 23 nt, Homo sapiens
gugaucauuguuguggguugaau

SEQ ID NO: 48690 - RNA, 22 nt, Homo sapiens
gugaucuucauggaaggugaaa

SEQ ID NO: 48691 - RNA, 22 nt, Homo sapiens
gugauaucuuacaauucucuuu

SEQ ID NO: 48692 - RNA, 22 nt, Homo sapiens
gugaucauuguauugggguuau

SEQ ID NO: 48693 - RNA, 22 nt, Homo sapiens
gugagcuauguccugguuuggg

SEQ ID NO: 48694 - RNA, 22 nt, Homo sapiens
gugagcuccucucuauguguca

SEQ ID NO: 48695 - RNA, 18 nt, Homo sapiens
guggagugucuuccugga

SEQ ID NO: 48696 - RNA, 22 nt, Homo sapiens
guggaggagaaagaagcauuuc

SEQ ID NO: 48697 - RNA, 22 nt, Homo sapiens
guggaaucuagagaggcaguag

SEQ ID NO: 48698 - RNA, 22 nt, Homo sapiens
guggaauuauagagacaucuug

SEQ ID NO: 48699 - RNA, 22 nt, Homo sapiens
guguaugguaggaugacggagu

SEQ ID NO: 48700 - RNA, 22 nt, Homo sapiens
gugucacagcuuccaucucggu

SEQ ID NO: 48701 - RNA, 22 nt, Homo sapiens
gugucuccugccuucaugcagc

SEQ ID NO: 48702 - RNA, 18 nt, Homo sapiens
gugucugguuaugggagu

SEQ ID NO: 48703 - RNA, 22 nt, Homo sapiens
gugugacuagucaugccugaau

SEQ ID NO: 48704 - RNA, 22 nt, Homo sapiens
guuauguuauguuauguuaugu

SEQ ID NO: 48705 - RNA, 22 nt, Homo sapiens
guuaugcagcuuagaaaaugaa

SEQ ID NO: 48706 - RNA, 18 nt, Homo sapiens
guuagguaguaugaugcu

SEQ ID NO: 48707 - RNA, 22 nt, Homo sapiens
guucagucacgugcccaaguuc

SEQ ID NO: 48708 - RNA, 22 nt, Homo sapiens
guucaguuugcugaugcguuga

SEQ ID NO: 48709 - RNA, 22 nt, Homo sapiens
guucaguuuugaaauguuaauu

SEQ ID NO: 48710 - RNA, 22 nt, Homo sapiens
guuacugucuuccugauugcuu

SEQ ID NO: 48711 - RNA, 22 nt, Homo sapiens
guuagaucauguuuggauaucu

SEQ ID NO: 48712 - RNA, 22 nt, Homo sapiens
guuaagggaagccuggguaaga

SEQ ID NO: 48713 - RNA, 22 nt, Homo sapiens
guguucauggaauuugcaauug

SEQ ID NO: 48714 - RNA, 22 nt, Homo sapiens
guguggaacucaauacaacgca

SEQ ID NO: 48715 - RNA, 22 nt, Homo sapiens
guguuaaucucaaguacucuca

SEQ ID NO: 48716 - RNA, 22 nt, Homo sapiens
guguguaaauggcagugagcuc

SEQ ID NO: 48717 - RNA, 22 nt, Homo sapiens
ggaauguuaaggcgcuguuggu

SEQ ID NO: 48718 - RNA, 21 nt, Homo sapiens
ggaauuuagggaaugauuuag

SEQ ID NO: 48719 - RNA, 22 nt, Homo sapiens
ggaauuaaggcaauugaaagcu

SEQ ID NO: 48720 - RNA, 22 nt, Homo sapiens
ggaaugugugucaugcuuuugc

SEQ ID NO: 48721 - RNA, 22 nt, Homo sapiens
ggaauguauuaaggcauugggc

SEQ ID NO: 48722 - RNA, 22 nt, Homo sapiens
ggaauguaguaauuugguuagu

SEQ ID NO: 48723 - RNA, 22 nt, Homo sapiens
ggagugugauuguucucuguua

SEQ ID NO: 48724 - RNA, 22 nt, Homo sapiens
ggagugucccaaucucagcuca

SEQ ID NO: 48725 - RNA, 22 nt, Homo sapiens
ggaguguaauggcgccaucuca

SEQ ID NO: 48726 - RNA, 22 nt, Homo sapiens
gcgguagcauagacugcaggac

SEQ ID NO: 48727 - RNA, 18 nt, Homo sapiens
ggaagauuggcuaugugc

SEQ ID NO: 48728 - RNA, 22 nt, Homo sapiens
ggccagaugcgguggcucacac

SEQ ID NO: 48729 - RNA, 22 nt, Homo sapiens
ggccggguggccauggcugccc

SEQ ID NO: 48730 - RNA, 22 nt, Homo sapiens
gggcgagaaucggcugcucagc

SEQ ID NO: 48731 - RNA, 22 nt, Homo sapiens
ggcaaaucugcaauuacuuuug

SEQ ID NO: 48732 - RNA, 22 nt, Homo sapiens
ggaucacagccagcucccagaa

SEQ ID NO: 48733 - RNA, 21 nt, Homo sapiens
ggauagaaaacuuggcuguau

SEQ ID NO: 48734 - RNA, 22 nt, Homo sapiens
guauuugguuauugcagccuga

SEQ ID NO: 48735 - RNA, 22 nt, Homo sapiens
guauuuguugcagcagcacuau

SEQ ID NO: 48736 - RNA, 22 nt, Homo sapiens
guauuaguuaucuacugcugug

SEQ ID NO: 48737 - RNA, 21 nt, Homo sapiens
guauggcauugauuaguuacu

SEQ ID NO: 48738 - RNA, 21 nt, Homo sapiens
guaugguugaagugacaagcc

SEQ ID NO: 48739 - RNA, 22 nt, Homo sapiens
guaugcaagugauaugacauau

SEQ ID NO: 48740 - RNA, 22 nt, Homo sapiens
guaugucuugucuauggcugcu

SEQ ID NO: 48741 - RNA, 22 nt, Homo sapiens
guaugucuuuauagcagugugg

SEQ ID NO: 48742 - RNA, 22 nt, Homo sapiens
guagcagucacauagcagauug

SEQ ID NO: 48743 - RNA, 22 nt, Homo sapiens
guaguuuaucagaaagaauagg

SEQ ID NO: 48744 - RNA, 22 nt, Homo sapiens
guauagcacauaauacuugaug

SEQ ID NO: 48745 - RNA, 22 nt, Homo sapiens
guaucauuggcauguaaccaga

SEQ ID NO: 48746 - RNA, 22 nt, Homo sapiens
guaaauguccugcuacagagug

SEQ ID NO: 48747 - RNA, 20 nt, Homo sapiens
guaacagcacuuucccaaag

SEQ ID NO: 48748 - RNA, 22 nt, Homo sapiens
guaagucucaugagaucugaug

SEQ ID NO: 48749 - RNA, 22 nt, Homo sapiens
guaagguuguauuucaagaaac

SEQ ID NO: 48750 - RNA, 22 nt, Homo sapiens
gguauugguugagauuaacuuu

SEQ ID NO: 48751 - RNA, 22 nt, Homo sapiens
ggucacauuggacuaucaaguu

SEQ ID NO: 48752 - RNA, 22 nt, Homo sapiens
ggugucuuguuuaauacucauu

SEQ ID NO: 48753 - RNA, 22 nt, Homo sapiens
guaaacuuccccucaugaauga

SEQ ID NO: 48754 - RNA, 22 nt, Homo sapiens
gggugguuuuauuaucagugac

SEQ ID NO: 48755 - RNA, 22 nt, Homo sapiens
ggguaaaucucuuuucauggcu

SEQ ID NO: 48756 - RNA, 22 nt, Homo sapiens
gggguaguuacuguuguucuuu

SEQ ID NO: 48757 - RNA, 22 nt, Homo sapiens
gguaaguuuggggcuaauuugu

SEQ ID NO: 48758 - RNA, 22 nt, Homo sapiens
gguaaaucuucacuaagacuga

SEQ ID NO: 48759 - RNA, 22 nt, Homo sapiens
ugaugugucaucugagagagug

SEQ ID NO: 48760 - RNA, 22 nt, Homo sapiens
ugcaccaauucuaaacaguucu

SEQ ID NO: 48761 - RNA, 22 nt, Homo sapiens
ugcacaaccucacccccgcucu

SEQ ID NO: 48762 - RNA, 22 nt, Homo sapiens
ugcagagaaacauuuuguauuu

SEQ ID NO: 48763 - RNA, 22 nt, Homo sapiens
ugaugguuuuauuaauaggacc

SEQ ID NO: 48764 - RNA, 21 nt, Homo sapiens
ugaugcuuuucuuaaccuugc

SEQ ID NO: 48765 - RNA, 22 nt, Homo sapiens
ugaugguuuuaaaaagaggagu

SEQ ID NO: 48766 - RNA, 22 nt, Homo sapiens
ugaugaugaaugaucuuuuaca

SEQ ID NO: 48767 - RNA, 22 nt, Homo sapiens
ugauaucugaucauccuugaua

SEQ ID NO: 48768 - RNA, 22 nt, Homo sapiens
ugauaugaaucaaucacucuuc

SEQ ID NO: 48769 - RNA, 22 nt, Homo sapiens
ugaucuguccaccucagcuucc

SEQ ID NO: 48770 - RNA, 22 nt, Homo sapiens
ugcaucaggcugcuuauuacaa

SEQ ID NO: 48771 - RNA, 22 nt, Homo sapiens
ugcauauguugagaugcauauu

SEQ ID NO: 48772 - RNA, 22 nt, Homo sapiens
ugcauauucuaggauuuuguau

SEQ ID NO: 48773 - RNA, 21 nt, Homo sapiens
ugcauauuggaacuuucucuc

SEQ ID NO: 48774 - RNA, 18 nt, Homo sapiens
ugcauauguugaaccagc

SEQ ID NO: 48775 - RNA, 22 nt, Homo sapiens
ugcauaucuucagccgggcacg

SEQ ID NO: 48776 - RNA, 21 nt, Homo sapiens
ugcauacuucucagaugauua

SEQ ID NO: 48777 - RNA, 23 nt, Homo sapiens
ugcauaguacccaauacuuuauc

SEQ ID NO: 48778 - RNA, 22 nt, Homo sapiens
ugcauacacaagcauacaugua

SEQ ID NO: 48779 - RNA, 22 nt, Homo sapiens
ugcauaauuccuugcaccagaa

SEQ ID NO: 48780 - RNA, 22 nt, Homo sapiens
ugcagcauguaggcacguuauu

SEQ ID NO: 48781 - RNA, 22 nt, Homo sapiens
ugcagcauugcacuccagccug

SEQ ID NO: 48782 - RNA, 22 nt, Homo sapiens
ugauaggucuguuuugaaaagg

SEQ ID NO: 48783 - RNA, 22 nt, Homo sapiens
ugauagaucugggcaaaguaaa

SEQ ID NO: 48784 - RNA, 18 nt, Homo sapiens
ugauaucaucacaauuga

SEQ ID NO: 48785 - RNA, 22 nt, Homo sapiens
ugauauauugaaugaugaaaca

SEQ ID NO: 48786 - RNA, 22 nt, Homo sapiens
ugaguucuuccuaucucugccu

SEQ ID NO: 48787 - RNA, 22 nt, Homo sapiens
ugauaacauugggggaagcuga

SEQ ID NO: 48788 - RNA, 22 nt, Homo sapiens
ugauaagaaauuguucauguag

SEQ ID NO: 48789 - RNA, 22 nt, Homo sapiens
ugaguucuuuuagggauauugc

SEQ ID NO: 48790 - RNA, 22 nt, Homo sapiens
ugaguuguugcauucuuggugu

SEQ ID NO: 48791 - RNA, 22 nt, Homo sapiens
ugaggaguauguucuguagacc

SEQ ID NO: 48792 - RNA, 22 nt, Homo sapiens
ugaggaguguauuucauucgcu

SEQ ID NO: 48793 - RNA, 22 nt, Homo sapiens
ugaggcacucuagacuuauuca

SEQ ID NO: 48794 - RNA, 22 nt, Homo sapiens
ugagauuguuagaucaaauggu

SEQ ID NO: 48795 - RNA, 19 nt, Homo sapiens
ugagauuguaugaggagau

SEQ ID NO: 48796 - RNA, 22 nt, Homo sapiens
ugagcacauuuacaucaguucc

SEQ ID NO: 48797 - RNA, 22 nt, Homo sapiens
ugagcacaggugcgcgguuacu

SEQ ID NO: 48798 - RNA, 22 nt, Homo sapiens
ugagacaucucuccugagacag

SEQ ID NO: 48799 - RNA, 22 nt, Homo sapiens
ugagacaucugagauuuuaagc

SEQ ID NO: 48800 - RNA, 22 nt, Homo sapiens
ugagacaugugaauauuuguac

SEQ ID NO: 48801 - RNA, 22 nt, Homo sapiens
ugagaagacaucagcuuucgga

SEQ ID NO: 48802 - RNA, 22 nt, Homo sapiens
ugagaacauuccucuuccuggc

SEQ ID NO: 48803 - RNA, 22 nt, Homo sapiens
ugagaacucaugaaucuuucca

SEQ ID NO: 48804 - RNA, 21 nt, Homo sapiens
ugagacaauccuggucaauau

SEQ ID NO: 48805 - RNA, 20 nt, Homo sapiens
uggaaauuaaccuuucaggu

SEQ ID NO: 48806 - RNA, 22 nt, Homo sapiens
ugccuagagagaaccauaacug

SEQ ID NO: 48807 - RNA, 21 nt, Homo sapiens
ugcccaguggcuuggggucag

SEQ ID NO: 48808 - RNA, 22 nt, Homo sapiens
ugcaugcaucuuuuauaguagc

SEQ ID NO: 48809 - RNA, 22 nt, Homo sapiens
ugccaguauuuuauugagcauu

SEQ ID NO: 48810 - RNA, 22 nt, Homo sapiens
ugccaguauuuuacugaggauu

SEQ ID NO: 48811 - RNA, 20 nt, Homo sapiens
uggaccagagagguggggac

SEQ ID NO: 48812 - RNA, 22 nt, Homo sapiens
uggacuaaagaaacauuccgug

SEQ ID NO: 48813 - RNA, 22 nt, Homo sapiens
uggagauguuuaaaauccacug

SEQ ID NO: 48814 - RNA, 22 nt, Homo sapiens
uggagagcaaagaauuuguuag

SEQ ID NO: 48815 - RNA, 22 nt, Homo sapiens
uggcaaaugugagaugagaacu

SEQ ID NO: 48816 - RNA, 22 nt, Homo sapiens
uggagauccuucauuuuggugu

SEQ ID NO: 48817 - RNA, 20 nt, Homo sapiens
uggaggucaucugucacuac

SEQ ID NO: 48818 - RNA, 18 nt, Homo sapiens
uggauuguacuguguucu

SEQ ID NO: 48819 - RNA, 18 nt, Homo sapiens
uggauuggaaaaguuccu

SEQ ID NO: 48820 - RNA, 21 nt, Homo sapiens
uggauuguacacccuaucauu

SEQ ID NO: 48821 - RNA, 22 nt, Homo sapiens
ugguauguauacuagcgacacu

SEQ ID NO: 48822 - RNA, 22 nt, Homo sapiens
ugguccacuaacccucaguauc

SEQ ID NO: 48823 - RNA, 19 nt, Homo sapiens
uggguaguuuucuggcugg

SEQ ID NO: 48824 - RNA, 22 nt, Homo sapiens
uggguccccuacucuuuccaca

SEQ ID NO: 48825 - RNA, 22 nt, Homo sapiens
uggguaauggagaaauaaaucu

SEQ ID NO: 48826 - RNA, 22 nt, Homo sapiens
uggggugugagggagaaagaaa

SEQ ID NO: 48827 - RNA, 22 nt, Homo sapiens
ugggcggagacgugcagccgcc

SEQ ID NO: 48828 - RNA, 22 nt, Homo sapiens
ugggauguagccuucuauuuuc

SEQ ID NO: 48829 - RNA, 22 nt, Homo sapiens
ugggaugugagucuucgcuuuc

SEQ ID NO: 48830 - RNA, 22 nt, Homo sapiens
uggcauauaauauagaagacua

SEQ ID NO: 48831 - RNA, 22 nt, Homo sapiens
uggcaugauauauauucguuug

SEQ ID NO: 48832 - RNA, 22 nt, Homo sapiens
uggcaagaagagcaugagacca

SEQ ID NO: 48833 - RNA, 22 nt, Homo sapiens
uggcaagagauaugugucuaua

SEQ ID NO: 48834 - RNA, 22 nt, Homo sapiens
uggcauuguccaauaaaauuuu

SEQ ID NO: 48835 - RNA, 19 nt, Homo sapiens
ugggaauguaaauuaguuc

SEQ ID NO: 48836 - RNA, 22 nt, Homo sapiens
ugggauauaaaaaacgcuauuc

SEQ ID NO: 48837 - RNA, 22 nt, Homo sapiens
ucuguguuugaucaagauugua

SEQ ID NO: 48838 - RNA, 22 nt, Homo sapiens
ucugugguucaaaccagcaacu

SEQ ID NO: 48839 - RNA, 22 nt, Homo sapiens
ucuguuguuaucauaauauuga

SEQ ID NO: 48840 - RNA, 22 nt, Homo sapiens
ucuguuguuguuuuaagagaca

SEQ ID NO: 48841 - RNA, 17 nt, Homo sapiens
ucuucuguuacuguggc

SEQ ID NO: 48842 - RNA, 22 nt, Homo sapiens
ucucaaccucccaaguagcugg

SEQ ID NO: 48843 - RNA, 22 nt, Homo sapiens
ucucaauuugauuacauucaua

SEQ ID NO: 48844 - RNA, 22 nt, Homo sapiens
ucuaaaguacuacuacuguugg

SEQ ID NO: 48845 - RNA, 19 nt, Homo sapiens
ucuaaaucucuugauagac

SEQ ID NO: 48846 - RNA, 22 nt, Homo sapiens
ucuaagaauucauuuauaagcc

SEQ ID NO: 48847 - RNA, 22 nt, Homo sapiens
ucuaucacagccccacacucuc

SEQ ID NO: 48848 - RNA, 22 nt, Homo sapiens
ucuaucacagugauguuccaga

SEQ ID NO: 48849 - RNA, 22 nt, Homo sapiens
ucuuuggguagauauguagcug

SEQ ID NO: 48850 - RNA, 22 nt, Homo sapiens
ucuuuggucuacuuucauaugu

SEQ ID NO: 48851 - RNA, 22 nt, Homo sapiens
ucuuugauuaugcagauggguu

SEQ ID NO: 48852 - RNA, 22 nt, Homo sapiens
ucuuugauaagauccagaagaa

SEQ ID NO: 48853 - RNA, 19 nt, Homo sapiens
ucuuugcuuuucuaagagg

SEQ ID NO: 48854 - RNA, 22 nt, Homo sapiens
ucuuugggauauucugaaaggg

SEQ ID NO: 48855 - RNA, 22 nt, Homo sapiens
ucuuuguucaggagccaacucc

SEQ ID NO: 48856 - RNA, 22 nt, Homo sapiens
ucuuugucuacauccuguuaaa

SEQ ID NO: 48857 - RNA, 22 nt, Homo sapiens
ucuuugguuucugucucuguaa

SEQ ID NO: 48858 - RNA, 22 nt, Homo sapiens
ucuuuggugaauggucauccag

SEQ ID NO: 48859 - RNA, 22 nt, Homo sapiens
ugaacagagaaacacuggccau

SEQ ID NO: 48860 - RNA, 16 nt, Homo sapiens
ugaacagagaggauuc

SEQ ID NO: 48861 - RNA, 22 nt, Homo sapiens
ugaaacacacagagaagggaga

SEQ ID NO: 48862 - RNA, 22 nt, Homo sapiens
ucuuuguuuucugauccugaag

SEQ ID NO: 48863 - RNA, 22 nt, Homo sapiens
ugacuagagggcuuuuguguag

SEQ ID NO: 48864 - RNA, 22 nt, Homo sapiens
ugacuacauaaguaaucucaaa

SEQ ID NO: 48865 - RNA, 22 nt, Homo sapiens
ugacuagagacagaaacuaaaa

SEQ ID NO: 48866 - RNA, 22 nt, Homo sapiens
ugacuaaggaaggauuaugugc

SEQ ID NO: 48867 - RNA, 22 nt, Homo sapiens
ugacuauaguaaucacuucaca

SEQ ID NO: 48868 - RNA, 22 nt, Homo sapiens
ugacuaguuugaggacauuaua

SEQ ID NO: 48869 - RNA, 22 nt, Homo sapiens
ugacuauaaauaagcaagggcu

SEQ ID NO: 48870 - RNA, 22 nt, Homo sapiens
ugacuauaucucuguauaaacu

SEQ ID NO: 48871 - RNA, 22 nt, Homo sapiens
ugacuugaacuucuaugucacc

SEQ ID NO: 48872 - RNA, 22 nt, Homo sapiens
ugacuugauacauguuuuugaa

SEQ ID NO: 48873 - RNA, 20 nt, Homo sapiens
ugagaacauguggcauuugg

SEQ ID NO: 48874 - RNA, 21 nt, Homo sapiens
ugacauguugguguucugcac

SEQ ID NO: 48875 - RNA, 21 nt, Homo sapiens
ugacauguugguuugcugcac

SEQ ID NO: 48876 - RNA, 22 nt, Homo sapiens
ugacauggagagagaagccuuu

SEQ ID NO: 48877 - RNA, 22 nt, Homo sapiens
ugacauguagagaacuucucau

SEQ ID NO: 48878 - RNA, 18 nt, Homo sapiens
ugacaucauuuagaaagg

SEQ ID NO: 48879 - RNA, 22 nt, Homo sapiens
ugaagacucaauuauuaugaac

SEQ ID NO: 48880 - RNA, 22 nt, Homo sapiens
ugaacagcacguuuauucagaa

SEQ ID NO: 48881 - RNA, 22 nt, Homo sapiens
ugaacagcuaucuugucagugu

SEQ ID NO: 48882 - RNA, 22 nt, Homo sapiens
ugaacagucaucucucuuguau

SEQ ID NO: 48883 - RNA, 19 nt, Homo sapiens
ugaaguauagggcuucuga

SEQ ID NO: 48884 - RNA, 22 nt, Homo sapiens
ucaccuggagagcuugcuaaua

SEQ ID NO: 48885 - RNA, 19 nt, Homo sapiens
ucaccuugcccugcacaca

SEQ ID NO: 48886 - RNA, 22 nt, Homo sapiens
ucaccaguacuccaaauugagg

SEQ ID NO: 48887 - RNA, 22 nt, Homo sapiens
ucacaccauucuucuacuucag

SEQ ID NO: 48888 - RNA, 22 nt, Homo sapiens
ucacaauucucaauuugugaaa

SEQ ID NO: 48889 - RNA, 20 nt, Homo sapiens
ucacccugacaucugcccag

SEQ ID NO: 48890 - RNA, 22 nt, Homo sapiens
ucacccuguguuuugcguuugc

SEQ ID NO: 48891 - RNA, 18 nt, Homo sapiens
ucacaaccacagugcugu

SEQ ID NO: 48892 - RNA, 22 nt, Homo sapiens
ucaagugcauugauucaguauu

SEQ ID NO: 48893 - RNA, 22 nt, Homo sapiens
ucaacguauuuauauagcagag

SEQ ID NO: 48894 - RNA, 18 nt, Homo sapiens
ucaagcaauugucaugcc

SEQ ID NO: 48895 - RNA, 22 nt, Homo sapiens
ucaacauugcugucaggcaucu

SEQ ID NO: 48896 - RNA, 22 nt, Homo sapiens
ucagcguguggacggccaucuu

SEQ ID NO: 48897 - RNA, 19 nt, Homo sapiens
ucaguagugcacauaagcc

SEQ ID NO: 48898 - RNA, 22 nt, Homo sapiens
ucagucauucacucacucggac

SEQ ID NO: 48899 - RNA, 22 nt, Homo sapiens
ucagaugaucugguaagaacuu

SEQ ID NO: 48900 - RNA, 22 nt, Homo sapiens
ucagauguuuuguuuaucugcu

SEQ ID NO: 48901 - RNA, 19 nt, Homo sapiens
ucagcaguaaucaacuuca

SEQ ID NO: 48902 - RNA, 22 nt, Homo sapiens
ucagauuggugcaaaaguaauu

SEQ ID NO: 48903 - RNA, 22 nt, Homo sapiens
ucagcacauucaaggccugccu

SEQ ID NO: 48904 - RNA, 23 nt, Homo sapiens
ucacuagaguccuggaguuugag

SEQ ID NO: 48905 - RNA, 22 nt, Homo sapiens
ucacuaaagaaaauggcaugga

SEQ ID NO: 48906 - RNA, 22 nt, Homo sapiens
ucagagucuagaucacucacug

SEQ ID NO: 48907 - RNA, 21 nt, Homo sapiens
ucauugguuggcugcccugua

SEQ ID NO: 48908 - RNA, 22 nt, Homo sapiens
ucauuggcuaagcuuguuacac

SEQ ID NO: 48909 - RNA, 18 nt, Homo sapiens
ucauuggugagcaccucc

SEQ ID NO: 48910 - RNA, 22 nt, Homo sapiens
ucauuggaugucugaaaugauu

SEQ ID NO: 48911 - RNA, 22 nt, Homo sapiens
uccacguggucuaucuguccuu

SEQ ID NO: 48912 - RNA, 22 nt, Homo sapiens
ucccugaagcugcagcaacaca

SEQ ID NO: 48913 - RNA, 20 nt, Homo sapiens
ucccucaaacuuuuccacug

SEQ ID NO: 48914 - RNA, 22 nt, Homo sapiens
ucccugagguccuggauuauug

SEQ ID NO: 48915 - RNA, 22 nt, Homo sapiens
ucgcugggaagacugaaguguc

SEQ ID NO: 48916 - RNA, 23 nt, Homo sapiens
ucgguccccuuggcugcccucgg

SEQ ID NO: 48917 - RNA, 22 nt, Homo sapiens
ucggcucagugcaagcucugcc

SEQ ID NO: 48918 - RNA, 19 nt, Homo sapiens
ucgcgccauucuccugccu

SEQ ID NO: 48919 - RNA, 22 nt, Homo sapiens
ucgcauggucuccaggcagcuc

SEQ ID NO: 48920 - RNA, 22 nt, Homo sapiens
uccuuugguuauaggcaccucu

SEQ ID NO: 48921 - RNA, 22 nt, Homo sapiens
uccuuugguucuugucacccca

SEQ ID NO: 48922 - RNA, 22 nt, Homo sapiens
uccuuuggcuaacuuucuaagu

SEQ ID NO: 48923 - RNA, 22 nt, Homo sapiens
uccuuugguggagucuuuaggg

SEQ ID NO: 48924 - RNA, 18 nt, Homo sapiens
uccuuuugggguaggaga

SEQ ID NO: 48925 - RNA, 22 nt, Homo sapiens
ucgacacugaccuaguucagca

SEQ ID NO: 48926 - RNA, 19 nt, Homo sapiens
uccuugauugcaccacugc

SEQ ID NO: 48927 - RNA, 22 nt, Homo sapiens
uccuacaugcaguacauucaaa

SEQ ID NO: 48928 - RNA, 22 nt, Homo sapiens
aaaagcauucagagugcugggc

SEQ ID NO: 48929 - RNA, 22 nt, Homo sapiens
aaagcuaagguagcauuggaga

SEQ ID NO: 48930 - RNA, 22 nt, Homo sapiens
aaagcacuggagucaucaucua

SEQ ID NO: 48931 - RNA, 22 nt, Homo sapiens
aaacugucuggaugcuugugga

SEQ ID NO: 48932 - RNA, 19 nt, Homo sapiens
aauaaugccagaugucugu

SEQ ID NO: 48933 - RNA, 22 nt, Homo sapiens
aauacugugauaucgagcgauu

SEQ ID NO: 48934 - RNA, 22 nt, Homo sapiens
aauaucacaggguguacacuca

SEQ ID NO: 48935 - RNA, 22 nt, Homo sapiens
aauaucacaguggguguacacc

SEQ ID NO: 48936 - RNA, 22 nt, Homo sapiens
aauauagcuauguacaugucca

SEQ ID NO: 48937 - RNA, 22 nt, Homo sapiens
aaucacaguuaguaagggagaa

SEQ ID NO: 48938 - RNA, 22 nt, Homo sapiens
aagugaauucauuguguuauau

SEQ ID NO: 48939 - RNA, 22 nt, Homo sapiens
aaucacauugaaucugcuaccu

SEQ ID NO: 48940 - RNA, 19 nt, Homo sapiens
aauauugacaguggugucu

SEQ ID NO: 48941 - RNA, 23 nt, Homo sapiens
aauaucacaguggguguacaccc

SEQ ID NO: 48942 - RNA, 22 nt, Homo sapiens
aaucccugagcuagacacaaag

SEQ ID NO: 48943 - RNA, 22 nt, Homo sapiens
aaucccauuucucuguguuuuu

SEQ ID NO: 48944 - RNA, 17 nt, Homo sapiens
aaucagauuucugagga

SEQ ID NO: 48945 - RNA, 22 nt, Homo sapiens
aaucugucuuuuguuauugagg

SEQ ID NO: 48946 - RNA, 22 nt, Homo sapiens
aaucugauguuaucagcuuaag

SEQ ID NO: 48947 - RNA, 22 nt, Homo sapiens
aaugcauaauuuguaugaggua

SEQ ID NO: 48948 - RNA, 22 nt, Homo sapiens
aaugcuaucuggaacauuguug

SEQ ID NO: 48949 - RNA, 22 nt, Homo sapiens
aaugcaagauguuaauuauagg

SEQ ID NO: 48950 - RNA, 22 nt, Homo sapiens
aaugcacuccagccugggcgac

SEQ ID NO: 48951 - RNA, 22 nt, Homo sapiens
aaugcacauauauuuccuuauu

SEQ ID NO: 48952 - RNA, 22 nt, Homo sapiens
aaugacagugcuaaagaacccu

SEQ ID NO: 48953 - RNA, 22 nt, Homo sapiens
aaugacagccagauucuucucu

SEQ ID NO: 48954 - RNA, 22 nt, Homo sapiens
aagcuguugguggauguaccau

SEQ ID NO: 48955 - RNA, 22 nt, Homo sapiens
aagcuuucaacuguuugccauu

SEQ ID NO: 48956 - RNA, 22 nt, Homo sapiens
aagcuggcuuucauugagugcu

SEQ ID NO: 48957 - RNA, 22 nt, Homo sapiens
aagcuggagugcaguggugcga

SEQ ID NO: 48958 - RNA, 22 nt, Homo sapiens
aagcuggagugcaguggugcaa

SEQ ID NO: 48959 - RNA, 22 nt, Homo sapiens
aagcugccuugugaaggcauuc

SEQ ID NO: 48960 - RNA, 22 nt, Homo sapiens
aagcuagugagacagugguacu

SEQ ID NO: 48961 - RNA, 22 nt, Homo sapiens
aagcuaguguuccagugaacag

SEQ ID NO: 48962 - RNA, 22 nt, Homo sapiens
aaguauuagcuaauugugcuua

SEQ ID NO: 48963 - RNA, 22 nt, Homo sapiens
aaguaauugagguuuuugcugu

SEQ ID NO: 48964 - RNA, 19 nt, Homo sapiens
aaguaguugugacagaugc

SEQ ID NO: 48965 - RNA, 22 nt, Homo sapiens
aagugcauguauuaguguaguc

SEQ ID NO: 48966 - RNA, 23 nt, Homo sapiens
aagugagcuccaauugggugaga

SEQ ID NO: 48967 - RNA, 22 nt, Homo sapiens
aaagcaucacuuuuccuacuuu

SEQ ID NO: 48968 - RNA, 22 nt, Homo sapiens
aaaguaauugcaguuuuugcaa

SEQ ID NO: 48969 - RNA, 22 nt, Homo sapiens
aaacugaucugaaggccaggcu

SEQ ID NO: 48970 - RNA, 22 nt, Homo sapiens
aaagaagucagccuguccuuug

SEQ ID NO: 48971 - RNA, 22 nt, Homo sapiens
aaagaguucagguagauuucaa

SEQ ID NO: 48972 - RNA, 22 nt, Homo sapiens
aaacgugcagagaucaauagca

SEQ ID NO: 48973 - RNA, 22 nt, Homo sapiens
aaaugcauaucaagauugcccu

SEQ ID NO: 48974 - RNA, 22 nt, Homo sapiens
aaaugcauugagggaaaaggca

SEQ ID NO: 48975 - RNA, 22 nt, Homo sapiens
aaauaacugucagguucuggaa

SEQ ID NO: 48976 - RNA, 22 nt, Homo sapiens
aaauaguagcugaaugagggaa

SEQ ID NO: 48977 - RNA, 22 nt, Homo sapiens
aaauccauuuguucagcuaugc

SEQ ID NO: 48978 - RNA, 21 nt, Homo sapiens
aaaugcacauuacugcuggug

SEQ ID NO: 48979 - RNA, 22 nt, Homo sapiens
aaauuguccuauugguuuaagc

SEQ ID NO: 48980 - RNA, 22 nt, Homo sapiens
aaauuguccuacugguuugagu

SEQ ID NO: 48981 - RNA, 22 nt, Homo sapiens
aaauugcacaaguggugauuug

SEQ ID NO: 48982 - RNA, 22 nt, Homo sapiens
aaauucaugucaccucuaggua

SEQ ID NO: 48983 - RNA, 22 nt, Homo sapiens
aaauugcaaugcgaggcagagg

SEQ ID NO: 48984 - RNA, 22 nt, Homo sapiens
aaauucauuucagcucugggua

SEQ ID NO: 48985 - RNA, 22 nt, Homo sapiens
aacaccauuuuucugcagccuu

SEQ ID NO: 48986 - RNA, 22 nt, Homo sapiens
aacaccauucucuguaacaaga

SEQ ID NO: 48987 - RNA, 22 nt, Homo sapiens
aaccuuuagucagcucuuagga

SEQ ID NO: 48988 - RNA, 22 nt, Homo sapiens
aacugguauugaauuuaggaag

SEQ ID NO: 48989 - RNA, 22 nt, Homo sapiens
augacugucagggcagucauug

SEQ ID NO: 48990 - RNA, 22 nt, Homo sapiens
augagauacuacaaaugaguuu

SEQ ID NO: 48991 - RNA, 22 nt, Homo sapiens
augaccauuucaauugauaugg

SEQ ID NO: 48992 - RNA, 22 nt, Homo sapiens
augaauguaaagaaugugggaa

SEQ ID NO: 48993 - RNA, 23 nt, Homo sapiens
augaauguaaagaaugugggaag

SEQ ID NO: 48994 - RNA, 22 nt, Homo sapiens
augaaugucuuauuuugagaaa

SEQ ID NO: 48995 - RNA, 21 nt, Homo sapiens
augaauguaaagaauguggga

SEQ ID NO: 48996 - RNA, 22 nt, Homo sapiens
augacauagaagcaauccccua

SEQ ID NO: 48997 - RNA, 22 nt, Homo sapiens
augaauacagcuaugcgugcau

SEQ ID NO: 48998 - RNA, 22 nt, Homo sapiens
augaaguauuaggacacauuua

SEQ ID NO: 48999 - RNA, 22 nt, Homo sapiens
aucauguuuauguguaggauau

SEQ ID NO: 49000 - RNA, 22 nt, Homo sapiens
aucauuaguuguggaauucuug

SEQ ID NO: 49001 - RNA, 23 nt, Homo sapiens
auccacauucuaguccuuuaugc

SEQ ID NO: 49002 - RNA, 22 nt, Homo sapiens
auccacauucauggaccagucc

SEQ ID NO: 49003 - RNA, 20 nt, Homo sapiens
aucacuggagaaggaaaccu

SEQ ID NO: 49004 - RNA, 22 nt, Homo sapiens
aucacuguuuugaugcucggac

SEQ ID NO: 49005 - RNA, 22 nt, Homo sapiens
aucaucaugcacuacagccugg

SEQ ID NO: 49006 - RNA, 22 nt, Homo sapiens
aucauguaguaagacacauuua

SEQ ID NO: 49007 - RNA, 22 nt, Homo sapiens
aucaugcacaugcauagguaug

SEQ ID NO: 49008 - RNA, 22 nt, Homo sapiens
augaaacuggagcgccuggagg

SEQ ID NO: 49009 - RNA, 22 nt, Homo sapiens
augaaacuggcuaauuuuugua

SEQ ID NO: 49010 - RNA, 22 nt, Homo sapiens
aucuuuggugcaugauacuuug

SEQ ID NO: 49011 - RNA, 22 nt, Homo sapiens
augaaaacaugauuugccuguu

SEQ ID NO: 49012 - RNA, 22 nt, Homo sapiens
aucuuuggugaguucuuugguc

SEQ ID NO: 49013 - RNA, 22 nt, Homo sapiens
auccauguggauaaauguguau

SEQ ID NO: 49014 - RNA, 22 nt, Homo sapiens
auccauugucuaaugcuaagau

SEQ ID NO: 49015 - RNA, 22 nt, Homo sapiens
augaaaugcauguuaaguccgu

SEQ ID NO: 49016 - RNA, 22 nt, Homo sapiens
augaaagugauaaaugucucua

SEQ ID NO: 49017 - RNA, 22 nt, Homo sapiens
augaacacuccaauuguacucc

SEQ ID NO: 49018 - RNA, 22 nt, Homo sapiens
augaaauugcuaucgcaguacu

SEQ ID NO: 49019 - RNA, 22 nt, Homo sapiens
auagcagugugaaaacagacug

SEQ ID NO: 49020 - RNA, 22 nt, Homo sapiens
auagcagugugagaaugaacua

SEQ ID NO: 49021 - RNA, 21 nt, Homo sapiens
auagggcuuguugauaguuaa

SEQ ID NO: 49022 - RNA, 22 nt, Homo sapiens
auaggcacauuaggaacuuuug

SEQ ID NO: 49023 - RNA, 22 nt, Homo sapiens
auaguagagagggcaaaaugcu

SEQ ID NO: 49024 - RNA, 22 nt, Homo sapiens
auaagucaauggaacagauuaa

SEQ ID NO: 49025 - RNA, 22 nt, Homo sapiens
auaauagcugaucauuuagaag

SEQ ID NO: 49026 - RNA, 22 nt, Homo sapiens
auaacauggaguuugucauuua

SEQ ID NO: 49027 - RNA, 20 nt, Homo sapiens
auaugcauguguuuucacuu

SEQ ID NO: 49028 - RNA, 22 nt, Homo sapiens
auaugcauguacccacacaggc

SEQ ID NO: 49029 - RNA, 22 nt, Homo sapiens
auaugcauacccucaccaacua

SEQ ID NO: 49030 - RNA, 22 nt, Homo sapiens
auauguauuuuaacguguaagg

SEQ ID NO: 49031 - RNA, 22 nt, Homo sapiens
auauugacuuucucuuagauca

SEQ ID NO: 49032 - RNA, 21 nt, Homo sapiens
auauuacuguuagaggacugc

SEQ ID NO: 49033 - RNA, 22 nt, Homo sapiens
auauuacuggccauaucgcagg

SEQ ID NO: 49034 - RNA, 22 nt, Homo sapiens
auauuacuggcuauaucgcaag

SEQ ID NO: 49035 - RNA, 22 nt, Homo sapiens
aucacaguuauaacauccuuuu

SEQ ID NO: 49036 - RNA, 22 nt, Homo sapiens
aucacagcuacuccucugucuu

SEQ ID NO: 49037 - RNA, 22 nt, Homo sapiens
auauuggacucugugcuaggaa

SEQ ID NO: 49038 - RNA, 22 nt, Homo sapiens
auauugcuccuaauaccacggu

SEQ ID NO: 49039 - RNA, 19 nt, Homo sapiens
aucaccauuauuuggaaca

SEQ ID NO: 49040 - RNA, 22 nt, Homo sapiens
auguuugguagugaauauggua

SEQ ID NO: 49041 - RNA, 22 nt, Homo sapiens
auuccacuuagugacucauuug

SEQ ID NO: 49042 - RNA, 22 nt, Homo sapiens
auuccacuuacaugaaguaccu

SEQ ID NO: 49043 - RNA, 22 nt, Homo sapiens
auucaucagggauauuggucug

SEQ ID NO: 49044 - RNA, 20 nt, Homo sapiens
auucaaguaugccuugagaa

SEQ ID NO: 49045 - RNA, 22 nt, Homo sapiens
augugguaggcccaugagucau

SEQ ID NO: 49046 - RNA, 22 nt, Homo sapiens
augugguaguuauagugauaag

SEQ ID NO: 49047 - RNA, 22 nt, Homo sapiens
auguaagugugcucaaauguua

SEQ ID NO: 49048 - RNA, 22 nt, Homo sapiens
auguaacaguauuuggagaugu

SEQ ID NO: 49049 - RNA, 22 nt, Homo sapiens
auguaaacauuuggucuaaauu

SEQ ID NO: 49050 - RNA, 22 nt, Homo sapiens
augguuagauguauccuuucca

SEQ ID NO: 49051 - RNA, 22 nt, Homo sapiens
augugugaaucccagaaccugu

SEQ ID NO: 49052 - RNA, 22 nt, Homo sapiens
auguguauuaccucgauuguga

SEQ ID NO: 49053 - RNA, 22 nt, Homo sapiens
auugaacuguuggagagguuuu

SEQ ID NO: 49054 - RNA, 22 nt, Homo sapiens
auugaacaugccauauguacca

SEQ ID NO: 49055 - RNA, 23 nt, Homo sapiens
auugaacacuuucauaugugagg

SEQ ID NO: 49056 - RNA, 22 nt, Homo sapiens
auucccuuagcugccucagccu

SEQ ID NO: 49057 - RNA, 22 nt, Homo sapiens
auugcacacagaaucaggguaa

SEQ ID NO: 49058 - RNA, 22 nt, Homo sapiens
auugcacuccagccuagguaac

SEQ ID NO: 49059 - RNA, 22 nt, Homo sapiens
auugcacaccagucugggcaaa

SEQ ID NO: 49060 - RNA, 22 nt, Homo sapiens
auugcacuccagccugagcaaa

SEQ ID NO: 49061 - RNA, 22 nt, Homo sapiens
auugcacuccagccuggcaaua

SEQ ID NO: 49062 - RNA, 22 nt, Homo sapiens
auugaguaaaugaaaauugccu

SEQ ID NO: 49063 - RNA, 22 nt, Homo sapiens
auugauagaucauaugguaggu

SEQ ID NO: 49064 - RNA, 23 nt, Homo sapiens
auugauagugccuuugugcuaau

SEQ ID NO: 49065 - RNA, 22 nt, Homo sapiens
auugagcuuuuuaaaauauagu

SEQ ID NO: 49066 - RNA, 22 nt, Homo sapiens
auggauguucuagggaugugau

SEQ ID NO: 49067 - RNA, 22 nt, Homo sapiens
augauguaggccauggguuucu

SEQ ID NO: 49068 - RNA, 22 nt, Homo sapiens
augauguguguuuaagaugucu

SEQ ID NO: 49069 - RNA, 22 nt, Homo sapiens
augauacuguucuaagauuuuu

SEQ ID NO: 49070 - RNA, 22 nt, Homo sapiens
augauagguuuagguuuagaca

SEQ ID NO: 49071 - RNA, 22 nt, Homo sapiens
augauauggguugucaguugua

SEQ ID NO: 49072 - RNA, 22 nt, Homo sapiens
augauggaggccgugauggacg

SEQ ID NO: 49073 - RNA, 22 nt, Homo sapiens
augaugaaguaagugcuuagga

SEQ ID NO: 49074 - RNA, 22 nt, Homo sapiens
augagauuauguaaagagacca

SEQ ID NO: 49075 - RNA, 22 nt, Homo sapiens
augagauuguuuguacuccaca

SEQ ID NO: 49076 - RNA, 15 nt, Homo sapiens
augaguuuuauggag

SEQ ID NO: 49077 - RNA, 22 nt, Homo sapiens
augagaugaauaccgacgaugu

SEQ ID NO: 49078 - RNA, 22 nt, Homo sapiens
auggcuguuuaagaguuucauu

SEQ ID NO: 49079 - RNA, 22 nt, Homo sapiens
auggucuuuuuguuaugagaga

SEQ ID NO: 49080 - RNA, 22 nt, Homo sapiens
augguguccuguuuccccagga

SEQ ID NO: 49081 - RNA, 22 nt, Homo sapiens
aacaccguagaaacacaaggga

SEQ ID NO: 49082 - RNA, 22 nt, Homo sapiens
aacaccuugcagggauuaugac

SEQ ID NO: 49083 - RNA, 22 nt, Homo sapiens
aggcaguuucagugagagguga

SEQ ID NO: 49084 - RNA, 22 nt, Homo sapiens
agcuguuguucucagaggcuuu

SEQ ID NO: 49085 - RNA, 21 nt, Homo sapiens
agcuuguguguaucacagugu

SEQ ID NO: 49086 - RNA, 22 nt, Homo sapiens
aggaucauugacuauuauaagg

SEQ ID NO: 49087 - RNA, 22 nt, Homo sapiens
aggauaguaaugauagagaggc

SEQ ID NO: 49088 - RNA, 22 nt, Homo sapiens
agcuauauugaggaugccauuc

SEQ ID NO: 49089 - RNA, 22 nt, Homo sapiens
agccgguguccacgaagaagag

SEQ ID NO: 49090 - RNA, 22 nt, Homo sapiens
agccuauccaauaucagugaga

SEQ ID NO: 49091 - RNA, 22 nt, Homo sapiens
agcuguaguuugguggauguaa

SEQ ID NO: 49092 - RNA, 22 nt, Homo sapiens
agcuguguugucugaagucaga

SEQ ID NO: 49093 - RNA, 23 nt, Homo sapiens
agcaccaccccaggucacaagug

SEQ ID NO: 49094 - RNA, 22 nt, Homo sapiens
agcaccaugggcugaguaagug

SEQ ID NO: 49095 - RNA, 21 nt, Homo sapiens
agccaguguuccuuguggcuc

SEQ ID NO: 49096 - RNA, 22 nt, Homo sapiens
agccauacaacguaugcaugua

SEQ ID NO: 49097 - RNA, 22 nt, Homo sapiens
aguguuuuuaucaugaaagggu

SEQ ID NO: 49098 - RNA, 22 nt, Homo sapiens
aguguuuuuacaagcacucugg

SEQ ID NO: 49099 - RNA, 22 nt, Homo sapiens
aguguuuuucaugggauacuuu

SEQ ID NO: 49100 - RNA, 22 nt, Homo sapiens
aguggauuuuagacugagauuu

SEQ ID NO: 49101 - RNA, 22 nt, Homo sapiens
aguuagcaaaacucccaaaggu

SEQ ID NO: 49102 - RNA, 22 nt, Homo sapiens
agugguuuuggaauggaauuca

SEQ ID NO: 49103 - RNA, 22 nt, Homo sapiens
auaaagcuauuccucucuuuuu

SEQ ID NO: 49104 - RNA, 23 nt, Homo sapiens
auaaacugucaaaagccagcccu

SEQ ID NO: 49105 - RNA, 22 nt, Homo sapiens
auaaagacacuuggcaugauuu

SEQ ID NO: 49106 - RNA, 22 nt, Homo sapiens
auaaaguucugcuggcauauau

SEQ ID NO: 49107 - RNA, 22 nt, Homo sapiens
auaaaugcaaugguauuuuuga

SEQ ID NO: 49108 - RNA, 18 nt, Homo sapiens
aguuguuuuauccugccc

SEQ ID NO: 49109 - RNA, 22 nt, Homo sapiens
aguuuuugcugauagcaugcuu

SEQ ID NO: 49110 - RNA, 22 nt, Homo sapiens
auaaacagcuuauccucuauuc

SEQ ID NO: 49111 - RNA, 22 nt, Homo sapiens
agguaagucucuaauuaugaau

SEQ ID NO: 49112 - RNA, 23 nt, Homo sapiens
agucaguaugcuccuuggauccc

SEQ ID NO: 49113 - RNA, 22 nt, Homo sapiens
agucagugcauaagaaugaagu

SEQ ID NO: 49114 - RNA, 22 nt, Homo sapiens
agucaguggaguaaauguaauu

SEQ ID NO: 49115 - RNA, 20 nt, Homo sapiens
aggcauguugguuugcgugu

SEQ ID NO: 49116 - RNA, 22 nt, Homo sapiens
agggaagugugcuaugcauuua

SEQ ID NO: 49117 - RNA, 22 nt, Homo sapiens
agggcuuaucuguguagaguuc

SEQ ID NO: 49118 - RNA, 22 nt, Homo sapiens
agugaauguuggaaaguuauuu

SEQ ID NO: 49119 - RNA, 22 nt, Homo sapiens
agugaacaaagaagugcagaua

SEQ ID NO: 49120 - RNA, 17 nt, Homo sapiens
agugagaucauggcuua

SEQ ID NO: 49121 - RNA, 22 nt, Homo sapiens
agucaugggagagaugugaucg

SEQ ID NO: 49122 - RNA, 22 nt, Homo sapiens
agugaucauuugaauugaugau

SEQ ID NO: 49123 - RNA, 22 nt, Homo sapiens
aaugccaucagagaaaacucuu

SEQ ID NO: 49124 - RNA, 18 nt, Homo sapiens
aauggcucuggguucuaa

SEQ ID NO: 49125 - RNA, 22 nt, Homo sapiens
aauggccuuuuucauuauacug

SEQ ID NO: 49126 - RNA, 22 nt, Homo sapiens
aauggcuauuucaugugguagg

SEQ ID NO: 49127 - RNA, 22 nt, Homo sapiens
aaugugcuuucuuucacacagu

SEQ ID NO: 49128 - RNA, 22 nt, Homo sapiens
aaugucacugugguccuccagu

SEQ ID NO: 49129 - RNA, 22 nt, Homo sapiens
aaugguuuuaucagcguccaaa

SEQ ID NO: 49130 - RNA, 22 nt, Homo sapiens
aaugucaugaguccaaccagaa

SEQ ID NO: 49131 - RNA, 22 nt, Homo sapiens
acaugagacuggguuuguaggg

SEQ ID NO: 49132 - RNA, 21 nt, Homo sapiens
acaucagaguugugaagguag

SEQ ID NO: 49133 - RNA, 22 nt, Homo sapiens
acauaaagaagcaggacauugu

SEQ ID NO: 49134 - RNA, 22 nt, Homo sapiens
acauugcagauguguuuaaugu

SEQ ID NO: 49135 - RNA, 22 nt, Homo sapiens
acauguauauaaugcauagcga

SEQ ID NO: 49136 - RNA, 22 nt, Homo sapiens
acaugguacugauuuacgaaau

SEQ ID NO: 49137 - RNA, 22 nt, Homo sapiens
acaugcauccaugugaagagac

SEQ ID NO: 49138 - RNA, 22 nt, Homo sapiens
acaugcauauguuggaagaaag

SEQ ID NO: 49139 - RNA, 22 nt, Homo sapiens
acaugcauggcaugcauuguac

SEQ ID NO: 49140 - RNA, 22 nt, Homo sapiens
acccugucaaaacggaccaauc

SEQ ID NO: 49141 - RNA, 22 nt, Homo sapiens
acccggagagcaggcgagaagg

SEQ ID NO: 49142 - RNA, 22 nt, Homo sapiens
acccguuacuuagcagaccggg

SEQ ID NO: 49143 - RNA, 22 nt, Homo sapiens
acccagaauucagucuuaggcc

SEQ ID NO: 49144 - RNA, 18 nt, Homo sapiens
acauucagcuugaagaua

SEQ ID NO: 49145 - RNA, 20 nt, Homo sapiens
agaugcaugcacauaaacac

SEQ ID NO: 49146 - RNA, 22 nt, Homo sapiens
agaugccuaugaagagaaauua

SEQ ID NO: 49147 - RNA, 22 nt, Homo sapiens
agauggauuuuguagccccagc

SEQ ID NO: 49148 - RNA, 22 nt, Homo sapiens
agaucacucagguuucucccug

SEQ ID NO: 49149 - RNA, 22 nt, Homo sapiens
agaucacaguaccguaaggcug

SEQ ID NO: 49150 - RNA, 22 nt, Homo sapiens
agauacauuggauaaugguggg

SEQ ID NO: 49151 - RNA, 22 nt, Homo sapiens
agcaacauuguucauaauagcu

SEQ ID NO: 49152 - RNA, 22 nt, Homo sapiens
agaguacaggcaaguuagucau

SEQ ID NO: 49153 - RNA, 21 nt, Homo sapiens
agagucaucucuaucuguacc

SEQ ID NO: 49154 - RNA, 22 nt, Homo sapiens
agauacaucuaugugucugugu

SEQ ID NO: 49155 - RNA, 22 nt, Homo sapiens
agagccacacucuccuaacuca

SEQ ID NO: 49156 - RNA, 22 nt, Homo sapiens
agagguauacauuugagagcca

SEQ ID NO: 49157 - RNA, 22 nt, Homo sapiens
agagguuuaauugauucacagu

SEQ ID NO: 49158 - RNA, 22 nt, Homo sapiens
agaaagcgcuucccuuugcugg

SEQ ID NO: 49159 - RNA, 22 nt, Homo sapiens
agaacacugaguucagggucag

SEQ ID NO: 49160 - RNA, 20 nt, Homo sapiens
agaagcauugcucucuucag

SEQ ID NO: 49161 - RNA, 20 nt, Homo sapiens
agagaucaguaauucaucaa

SEQ ID NO: 49162 - RNA, 22 nt, Homo sapiens
agagaucauuuuguuucaaauc

SEQ ID NO: 49163 - RNA, 22 nt, Homo sapiens
acuuuuguuauacagugugaua

SEQ ID NO: 49164 - RNA, 21 nt, Homo sapiens
acuuuguugggggcugaggca

SEQ ID NO: 49165 - RNA, 22 nt, Homo sapiens
agaaacauucucuugccuccuu

SEQ ID NO: 49166 - RNA, 22 nt, Homo sapiens
agaaacacagguggaauugcuu

SEQ ID NO: 49167 - RNA, 22 nt, Homo sapiens
acugcacuccagccuggcggac

SEQ ID NO: 49168 - RNA, 22 nt, Homo sapiens
acugcacuccagccuggacgac

SEQ ID NO: 49169 - RNA, 22 nt, Homo sapiens
acugcacuccagccugugcgua

SEQ ID NO: 49170 - RNA, 22 nt, Homo sapiens
acuuaguauggggcuuuugaga

SEQ ID NO: 49171 - RNA, 22 nt, Homo sapiens
acugcacuccagccuucgugac

SEQ ID NO: 49172 - RNA, 22 nt, Homo sapiens
acuucauucucuggaucagaau

SEQ ID NO: 49173 - RNA, 22 nt, Homo sapiens
acugcacuccagccugagccug

SEQ ID NO: 49174 - RNA, 22 nt, Homo sapiens
acugcacuccagccucgugaca

SEQ ID NO: 49175 - RNA, 22 nt, Homo sapiens
acugcacuccagccugccgaca

SEQ ID NO: 49176 - RNA, 22 nt, Homo sapiens
acugcacuccagccugcugaca

SEQ ID NO: 49177 - RNA, 22 nt, Homo sapiens
acugcacuccagccuggacgaa

SEQ ID NO: 49178 - RNA, 22 nt, Homo sapiens
gugauauguuaggaucuaaguc

SEQ ID NO: 49179 - RNA, 21 nt, Homo sapiens
gugaucaugucacugcacucc

SEQ ID NO: 49180 - RNA, 22 nt, Homo sapiens
gugaugacauucagagaugaag

SEQ ID NO: 49181 - RNA, 22 nt, Homo sapiens
gugaugguaguuuguauuucug

SEQ ID NO: 49182 - RNA, 22 nt, Homo sapiens
gugauuauuaugcacugcaugc

SEQ ID NO: 49183 - RNA, 17 nt, Homo sapiens
gugagguggguaguauc

SEQ ID NO: 49184 - RNA, 22 nt, Homo sapiens
gugagaacugugucuuauaaac

SEQ ID NO: 49185 - RNA, 22 nt, Homo sapiens
gugauaucacuguaucacucca

SEQ ID NO: 49186 - RNA, 22 nt, Homo sapiens
gugagucaugucccaucugauu

SEQ ID NO: 49187 - RNA, 22 nt, Homo sapiens
gugagguugaaaauaauggaaa

SEQ ID NO: 49188 - RNA, 22 nt, Homo sapiens
gugaguaaagguucauugaauu

SEQ ID NO: 49189 - RNA, 22 nt, Homo sapiens
guggaauggaaugauuguguau

SEQ ID NO: 49190 - RNA, 22 nt, Homo sapiens
guggaaguuaagugacuuucug

SEQ ID NO: 49191 - RNA, 22 nt, Homo sapiens
guggaaugcaguguugauucaa

SEQ ID NO: 49192 - RNA, 22 nt, Homo sapiens
gugguuuuuaaaguaccugugg

SEQ ID NO: 49193 - RNA, 22 nt, Homo sapiens
gugguuuuacaaagagaaagau

SEQ ID NO: 49194 - RNA, 22 nt, Homo sapiens
gugguuuuaucccagaaauuaa

SEQ ID NO: 49195 - RNA, 21 nt, Homo sapiens
gugguucuagagaaacagaau

SEQ ID NO: 49196 - RNA, 22 nt, Homo sapiens
gugguuuuaauauucagucuag

SEQ ID NO: 49197 - RNA, 22 nt, Homo sapiens
guggaucacuugaggucaagag

SEQ ID NO: 49198 - RNA, 22 nt, Homo sapiens
gugguguccugcaccuauaguc

SEQ ID NO: 49199 - RNA, 21 nt, Homo sapiens
gugugcuugaauucagcuguc

SEQ ID NO: 49200 - RNA, 21 nt, Homo sapiens
gugugcuugagugaugggauu

SEQ ID NO: 49201 - RNA, 22 nt, Homo sapiens
gugugucuugaccaggaucgga

SEQ ID NO: 49202 - RNA, 22 nt, Homo sapiens
guguuauggagccaaacuacua

SEQ ID NO: 49203 - RNA, 22 nt, Homo sapiens
gugugacagcuauagacaugau

SEQ ID NO: 49204 - RNA, 22 nt, Homo sapiens
gugugacugcucuauuagggcg

SEQ ID NO: 49205 - RNA, 22 nt, Homo sapiens
gugugauuauuucaauugaugc

SEQ ID NO: 49206 - RNA, 22 nt, Homo sapiens
gugugauuguuaauuuuaggug

SEQ ID NO: 49207 - RNA, 22 nt, Homo sapiens
gugugcacaaucuggcaugugc

SEQ ID NO: 49208 - RNA, 22 nt, Homo sapiens
uaaauggauauugccaucuccu

SEQ ID NO: 49209 - RNA, 22 nt, Homo sapiens
uaaaugcuuaauugaaugugga

SEQ ID NO: 49210 - RNA, 22 nt, Homo sapiens
uaaaugacugucaguagaugaa

SEQ ID NO: 49211 - RNA, 22 nt, Homo sapiens
uaaaguuauugccccucaguua

SEQ ID NO: 49212 - RNA, 22 nt, Homo sapiens
uaaagcacuuuuuucugcaugg

SEQ ID NO: 49213 - RNA, 22 nt, Homo sapiens
uaaagcacaaguaaagaauacu

SEQ ID NO: 49214 - RNA, 22 nt, Homo sapiens
uaacaaugucuuaugggcuuaa

SEQ ID NO: 49215 - RNA, 22 nt, Homo sapiens
guugcacagucuuuccuggacu

SEQ ID NO: 49216 - RNA, 22 nt, Homo sapiens
guuugugcuccuaugagaaccu

SEQ ID NO: 49217 - RNA, 22 nt, Homo sapiens
guuuugguuauauggaucaguu

SEQ ID NO: 49218 - RNA, 22 nt, Homo sapiens
guuugugcuccuaugagaaucu

SEQ ID NO: 49219 - RNA, 22 nt, Homo sapiens
uaaacacucacuucauagccau

SEQ ID NO: 49220 - RNA, 22 nt, Homo sapiens
uaaacugucuugcaguuacaug

SEQ ID NO: 49221 - RNA, 22 nt, Homo sapiens
guguuauugagaaauagggugu

SEQ ID NO: 49222 - RNA, 22 nt, Homo sapiens
guucuauguugggaguucacua

SEQ ID NO: 49223 - RNA, 22 nt, Homo sapiens
guugauguugcagucuugagga

SEQ ID NO: 49224 - RNA, 22 nt, Homo sapiens
guugcaauugauguaugucuga

SEQ ID NO: 49225 - RNA, 22 nt, Homo sapiens
guaagacuuauuuucuuuauca

SEQ ID NO: 49226 - RNA, 22 nt, Homo sapiens
guaacacaugcugcucucuggu

SEQ ID NO: 49227 - RNA, 18 nt, Homo sapiens
guaaauguaucuauugcc

SEQ ID NO: 49228 - RNA, 22 nt, Homo sapiens
guaaauguccccugugauauug

SEQ ID NO: 49229 - RNA, 22 nt, Homo sapiens
guaagugauagaauuaggauuc

SEQ ID NO: 49230 - RNA, 22 nt, Homo sapiens
guaauacuggacaggguaucag

SEQ ID NO: 49231 - RNA, 22 nt, Homo sapiens
guaauacuuuugggauauuaga

SEQ ID NO: 49232 - RNA, 22 nt, Homo sapiens
guaaucucagcuacuugggagu

SEQ ID NO: 49233 - RNA, 22 nt, Homo sapiens
guaaucucagcuccucaugagg

SEQ ID NO: 49234 - RNA, 22 nt, Homo sapiens
guaaucucagcuacuugggagc

SEQ ID NO: 49235 - RNA, 22 nt, Homo sapiens
guauacgugcaggucacagggg

SEQ ID NO: 49236 - RNA, 22 nt, Homo sapiens
guauacacccugugauauuauu

SEQ ID NO: 49237 - RNA, 22 nt, Homo sapiens
guaucacguuguuuuggugaaa

SEQ ID NO: 49238 - RNA, 22 nt, Homo sapiens
guauagaucguagaccaauaaa

SEQ ID NO: 49239 - RNA, 22 nt, Homo sapiens
guacaaguaagaaaauugccca

SEQ ID NO: 49240 - RNA, 19 nt, Homo sapiens
guaaucucaguacuuuggu

SEQ ID NO: 49241 - RNA, 22 nt, Homo sapiens
guaaucuguaguaaagcaccau

SEQ ID NO: 49242 - RNA, 19 nt, Homo sapiens
ggcaagaguuguucugugu

SEQ ID NO: 49243 - RNA, 17 nt, Homo sapiens
ggcaagaaguggaacuc

SEQ ID NO: 49244 - RNA, 22 nt, Homo sapiens
ggcaagaaccucaauuaccuuu

SEQ ID NO: 49245 - RNA, 22 nt, Homo sapiens
ggcaguguauuacuuaggguuc

SEQ ID NO: 49246 - RNA, 22 nt, Homo sapiens
ggcaguuuguucuugcuccuuu

SEQ ID NO: 49247 - RNA, 22 nt, Homo sapiens
ggcauguugauagguagaugua

SEQ ID NO: 49248 - RNA, 22 nt, Homo sapiens
gucacagaggcuaagaccccac

SEQ ID NO: 49249 - RNA, 22 nt, Homo sapiens
gucacagaaaaagauaugccaa

SEQ ID NO: 49250 - RNA, 22 nt, Homo sapiens
gucaauguaucuagcuguauua

SEQ ID NO: 49251 - RNA, 22 nt, Homo sapiens
guaucauugccuaaugcucuca

SEQ ID NO: 49252 - RNA, 22 nt, Homo sapiens
gucaacauauuaauuauguucu

SEQ ID NO: 49253 - RNA, 22 nt, Homo sapiens
gucaccauugagucauuuccuc

SEQ ID NO: 49254 - RNA, 22 nt, Homo sapiens
gucucugguugcuuuuguacca

SEQ ID NO: 49255 - RNA, 22 nt, Homo sapiens
gucucauugcaguuagaccugu

SEQ ID NO: 49256 - RNA, 22 nt, Homo sapiens
gucagugcuuuaguucaggaug

SEQ ID NO: 49257 - RNA, 22 nt, Homo sapiens
gucuguuugauccagaucaaaa

SEQ ID NO: 49258 - RNA, 22 nt, Homo sapiens
gucuguuuggggaccuguggcc

SEQ ID NO: 49259 - RNA, 20 nt, Homo sapiens
gucugucuccgaguagaauu

SEQ ID NO: 49260 - RNA, 22 nt, Homo sapiens
gucugucuuuugucuuugaaau

SEQ ID NO: 49261 - RNA, 22 nt, Homo sapiens
gucuggguuuguuuguacuugc

SEQ ID NO: 49262 - RNA, 22 nt, Homo sapiens
gucucuuguuaucauuucugag

SEQ ID NO: 49263 - RNA, 22 nt, Homo sapiens
gucuuuguuuugauuuaccaga

SEQ ID NO: 49264 - RNA, 17 nt, Homo sapiens
gucuuugguugaguuua

SEQ ID NO: 49265 - RNA, 22 nt, Homo sapiens
gugaaacuggguggugagagac

SEQ ID NO: 49266 - RNA, 22 nt, Homo sapiens
gugaaagacagcauuaauggcu

SEQ ID NO: 49267 - RNA, 22 nt, Homo sapiens
gugaaagacauauaugguuuga

SEQ ID NO: 49268 - RNA, 20 nt, Homo sapiens
gucuuguagcucaaguuauu

SEQ ID NO: 49269 - RNA, 22 nt, Homo sapiens
gucuuuaguugaaacauguggu

SEQ ID NO: 49270 - RNA, 22 nt, Homo sapiens
gucuuugaugucuaugugcuuc

SEQ ID NO: 49271 - RNA, 22 nt, Homo sapiens
gucuuugcuuuuaaccagaggu

SEQ ID NO: 49272 - RNA, 22 nt, Homo sapiens
gugaacagcagaugagugagug

SEQ ID NO: 49273 - RNA, 22 nt, Homo sapiens
gugaaguuuuuugcugagaguc

SEQ ID NO: 49274 - RNA, 17 nt, Homo sapiens
gugaaaucaucauuuuu

SEQ ID NO: 49275 - RNA, 22 nt, Homo sapiens
gugacuaagauucuuugauaug

SEQ ID NO: 49276 - RNA, 22 nt, Homo sapiens
gugacugggaguggugaagaua

SEQ ID NO: 49277 - RNA, 22 nt, Homo sapiens
ucaacaggucaauugcauagaa

SEQ ID NO: 49278 - RNA, 22 nt, Homo sapiens
ucaagcaauucuccucucagcc

SEQ ID NO: 49279 - RNA, 22 nt, Homo sapiens
ucaagcaauucgccugucucag

SEQ ID NO: 49280 - RNA, 22 nt, Homo sapiens
ucacaaguguauagacaugucc

SEQ ID NO: 49281 - RNA, 19 nt, Homo sapiens
ucaauucugucaauggcuu

SEQ ID NO: 49282 - RNA, 22 nt, Homo sapiens
ucaaguacuuauuugauaauua

SEQ ID NO: 49283 - RNA, 22 nt, Homo sapiens
ucacaauucacuacaggcuuga

SEQ ID NO: 49284 - RNA, 22 nt, Homo sapiens
ucacaauggcugaacuaauuua

SEQ ID NO: 49285 - RNA, 22 nt, Homo sapiens
ucacacugaauuugaagcaaug

SEQ ID NO: 49286 - RNA, 22 nt, Homo sapiens
ucacaguagggaacugacaaag

SEQ ID NO: 49287 - RNA, 22 nt, Homo sapiens
ucacagacugagccaaauagag

SEQ ID NO: 49288 - RNA, 22 nt, Homo sapiens
ucacccugacaugcggccgaac

SEQ ID NO: 49289 - RNA, 22 nt, Homo sapiens
ucaccagugucagggaacugcu

SEQ ID NO: 49290 - RNA, 19 nt, Homo sapiens
ucaccaguacacaauacaa

SEQ ID NO: 49291 - RNA, 22 nt, Homo sapiens
ucaccggcagacguggccugau

SEQ ID NO: 49292 - RNA, 22 nt, Homo sapiens
ucacgcugcugcaaccagccug

SEQ ID NO: 49293 - RNA, 22 nt, Homo sapiens
ucacaucucagguuucuugaca

SEQ ID NO: 49294 - RNA, 22 nt, Homo sapiens
ucacaugcacaucucuggaacc

SEQ ID NO: 49295 - RNA, 22 nt, Homo sapiens
ucacauagcugaguaaaaugga

SEQ ID NO: 49296 - RNA, 23 nt, Homo sapiens
ucacaguuacuuuugcaucaacc

SEQ ID NO: 49297 - RNA, 22 nt, Homo sapiens
ucacaguucagcauggcugagg

SEQ ID NO: 49298 - RNA, 22 nt, Homo sapiens
ucacaguugauugaaacacagc

SEQ ID NO: 49299 - RNA, 22 nt, Homo sapiens
ucacauggaggugauaguugaa

SEQ ID NO: 49300 - RNA, 22 nt, Homo sapiens
uaucucaguguacaggaugaua

SEQ ID NO: 49301 - RNA, 22 nt, Homo sapiens
uaucucacauauucaguagguu

SEQ ID NO: 49302 - RNA, 22 nt, Homo sapiens
uaucauuguguuauuucuucca

SEQ ID NO: 49303 - RNA, 22 nt, Homo sapiens
uaucacacuggaagaaguuaag

SEQ ID NO: 49304 - RNA, 22 nt, Homo sapiens
uaucacaaacuuagcaguuuaa

SEQ ID NO: 49305 - RNA, 22 nt, Homo sapiens
uaucaucauuggcaggugagaa

SEQ ID NO: 49306 - RNA, 22 nt, Homo sapiens
uaucacacaucaugguaaaucu

SEQ ID NO: 49307 - RNA, 22 nt, Homo sapiens
uaugugguuaauaggaauuugu

SEQ ID NO: 49308 - RNA, 23 nt, Homo sapiens
uaugucuauucuaaugccagcac

SEQ ID NO: 49309 - RNA, 22 nt, Homo sapiens
uaugguuuuaagguuaaggacu

SEQ ID NO: 49310 - RNA, 20 nt, Homo sapiens
uaugguuuuagguauagcau

SEQ ID NO: 49311 - RNA, 22 nt, Homo sapiens
uaucugcacauacacuuauagc

SEQ ID NO: 49312 - RNA, 22 nt, Homo sapiens
uaucugcaucccauuuuuauca

SEQ ID NO: 49313 - RNA, 22 nt, Homo sapiens
ucaaagucuucucaaguaacau

SEQ ID NO: 49314 - RNA, 22 nt, Homo sapiens
ucaaaugcacguagagaaaaua

SEQ ID NO: 49315 - RNA, 20 nt, Homo sapiens
ucaaauucuuggccuccagc

SEQ ID NO: 49316 - RNA, 22 nt, Homo sapiens
ucaacacaguuaaauggggaaa

SEQ ID NO: 49317 - RNA, 22 nt, Homo sapiens
ucaaaguauucuucugagaacc

SEQ ID NO: 49318 - RNA, 20 nt, Homo sapiens
ucaaagacauggcugucaga

SEQ ID NO: 49319 - RNA, 22 nt, Homo sapiens
ucaaacauccccaccagggacu

SEQ ID NO: 49320 - RNA, 22 nt, Homo sapiens
uauugcuggcucugucuucauu

SEQ ID NO: 49321 - RNA, 22 nt, Homo sapiens
uauugcuugaggaaaugguaau

SEQ ID NO: 49322 - RNA, 22 nt, Homo sapiens
uauugcauuugagguugguuga

SEQ ID NO: 49323 - RNA, 22 nt, Homo sapiens
uauugcauauuauucuaguggc

SEQ ID NO: 49324 - RNA, 22 nt, Homo sapiens
uauuagguugguggaaaaguaa

SEQ ID NO: 49325 - RNA, 22 nt, Homo sapiens
uauugcaauuggggaaacuggg

SEQ ID NO: 49326 - RNA, 22 nt, Homo sapiens
uauguuaucaaaaagcuaagga

SEQ ID NO: 49327 - RNA, 22 nt, Homo sapiens
uauuacauccauaggcucugcu

SEQ ID NO: 49328 - RNA, 22 nt, Homo sapiens
uauuacuguuauuccuaucaaa

SEQ ID NO: 49329 - RNA, 22 nt, Homo sapiens
uagggcuugugaucagguguag

SEQ ID NO: 49330 - RNA, 22 nt, Homo sapiens
uagcagucaagauagucauuau

SEQ ID NO: 49331 - RNA, 22 nt, Homo sapiens
uagcaccaaacauauacucagu

SEQ ID NO: 49332 - RNA, 22 nt, Homo sapiens
uagcauccuucucuaaacagga

SEQ ID NO: 49333 - RNA, 22 nt, Homo sapiens
uauaugauugguagacccugca

SEQ ID NO: 49334 - RNA, 22 nt, Homo sapiens
uauaucuagagcggaccaggcu

SEQ ID NO: 49335 - RNA, 22 nt, Homo sapiens
uauaguguuuucaaaaguaugu

SEQ ID NO: 49336 - RNA, 22 nt, Homo sapiens
uaguucauuuuucuugcuuaga

SEQ ID NO: 49337 - RNA, 22 nt, Homo sapiens
uaguugcauuggcugcuaugcu

SEQ ID NO: 49338 - RNA, 22 nt, Homo sapiens
uaguguuuuucauuggcagagg

SEQ ID NO: 49339 - RNA, 22 nt, Homo sapiens
uaguuaguagacucugauuauu

SEQ ID NO: 49340 - RNA, 22 nt, Homo sapiens
uaucaacaggguggccagugua

SEQ ID NO: 49341 - RNA, 22 nt, Homo sapiens
uauauguucuugcacuggaaag

SEQ ID NO: 49342 - RNA, 22 nt, Homo sapiens
uaucaagauggauaaggauaga

SEQ ID NO: 49343 - RNA, 22 nt, Homo sapiens
uaguauguuuauagcauugagu

SEQ ID NO: 49344 - RNA, 20 nt, Homo sapiens
uaguggaaaucagguccucu

SEQ ID NO: 49345 - RNA, 22 nt, Homo sapiens
uagugcugugauuaacauaaug

SEQ ID NO: 49346 - RNA, 22 nt, Homo sapiens
uagugaauguuggcuauuaaua

SEQ ID NO: 49347 - RNA, 22 nt, Homo sapiens
uaccacaggcuggguaaucuau

SEQ ID NO: 49348 - RNA, 23 nt, Homo sapiens
uaccacauuccuucuuuccuguu

SEQ ID NO: 49349 - RNA, 19 nt, Homo sapiens
uaccagcacaguguuugag

SEQ ID NO: 49350 - RNA, 21 nt, Homo sapiens
uaagacugccaguagggcugu

SEQ ID NO: 49351 - RNA, 22 nt, Homo sapiens
uaagaauucuguccgguauacu

SEQ ID NO: 49352 - RNA, 22 nt, Homo sapiens
uaacuccauuuggacucaguau

SEQ ID NO: 49353 - RNA, 22 nt, Homo sapiens
uaacugcaaccucugccugcug

SEQ ID NO: 49354 - RNA, 22 nt, Homo sapiens
uaacuacuucugcuucagagua

SEQ ID NO: 49355 - RNA, 22 nt, Homo sapiens
uaaggauuuuggugauuacacu

SEQ ID NO: 49356 - RNA, 20 nt, Homo sapiens
uaagacaugguccacaugcc

SEQ ID NO: 49357 - RNA, 23 nt, Homo sapiens
uagaauguuuuuccauguuucuu

SEQ ID NO: 49358 - RNA, 22 nt, Homo sapiens
uagaaugucagcuucuugaggg

SEQ ID NO: 49359 - RNA, 22 nt, Homo sapiens
uagaauguauaauauuuuacuu

SEQ ID NO: 49360 - RNA, 22 nt, Homo sapiens
uagaugauucacuuuacuucca

SEQ ID NO: 49361 - RNA, 23 nt, Homo sapiens
uagaucaucaaguuuacugugcu

SEQ ID NO: 49362 - RNA, 22 nt, Homo sapiens
uagauuaucccugauuugucca

SEQ ID NO: 49363 - RNA, 22 nt, Homo sapiens
uagcaagaugaauuugugcaaa

SEQ ID NO: 49364 - RNA, 22 nt, Homo sapiens
uagauuguaauaugcagaaugg

SEQ ID NO: 49365 - RNA, 22 nt, Homo sapiens
uagaacauuccaggugauguug

SEQ ID NO: 49366 - RNA, 22 nt, Homo sapiens
uagaauguaacuuccaugucau

SEQ ID NO: 49367 - RNA, 22 nt, Homo sapiens
uagaagcuacucuucuuguggc

SEQ ID NO: 49368 - RNA, 22 nt, Homo sapiens
uagaauggaaggcauguuugcc

SEQ ID NO: 49369 - RNA, 21 nt, Homo sapiens
uacuggagauacagucugcaa

SEQ ID NO: 49370 - RNA, 22 nt, Homo sapiens
uacuuuguagagugugagaauu

SEQ ID NO: 49371 - RNA, 22 nt, Homo sapiens
gcaagacaugucuaagguuuaa

SEQ ID NO: 49372 - RNA, 22 nt, Homo sapiens
gauguguuuuaggaucucagca

SEQ ID NO: 49373 - RNA, 22 nt, Homo sapiens
gauguguugggaagauuucaag

SEQ ID NO: 49374 - RNA, 22 nt, Homo sapiens
gauguguuuccaggauuuguuu

SEQ ID NO: 49375 - RNA, 22 nt, Homo sapiens
gauggcauuucuggaucugccc

SEQ ID NO: 49376 - RNA, 22 nt, Homo sapiens
gauggcaugugcugccaccaag

SEQ ID NO: 49377 - RNA, 22 nt, Homo sapiens
gauaaauccagauucugaugua

SEQ ID NO: 49378 - RNA, 22 nt, Homo sapiens
gaugcaguaagaaugcauagcg

SEQ ID NO: 49379 - RNA, 22 nt, Homo sapiens
gauggaguugacuaagacaaca

SEQ ID NO: 49380 - RNA, 22 nt, Homo sapiens
gaguuuguacuaauuuguugua

SEQ ID NO: 49381 - RNA, 22 nt, Homo sapiens
gagugcaauggcgcgaucuggg

SEQ ID NO: 49382 - RNA, 23 nt, Homo sapiens
gaguggagacucauugauuuccu

SEQ ID NO: 49383 - RNA, 22 nt, Homo sapiens
gccaagaagugucuaagcagga

SEQ ID NO: 49384 - RNA, 22 nt, Homo sapiens
gcacccugucaaaauggaccaa

SEQ ID NO: 49385 - RNA, 22 nt, Homo sapiens
gcaccguggaguauggggagga

SEQ ID NO: 49386 - RNA, 22 nt, Homo sapiens
gcaauguuacugaauguguuuu

SEQ ID NO: 49387 - RNA, 22 nt, Homo sapiens
gcacagucaacacuuauucacc

SEQ ID NO: 49388 - RNA, 22 nt, Homo sapiens
gcaucacagggagacaggccuc

SEQ ID NO: 49389 - RNA, 22 nt, Homo sapiens
gcacgugcacccacaugcacgu

SEQ ID NO: 49390 - RNA, 22 nt, Homo sapiens
gcaccccuuaccgggcuggguu

SEQ ID NO: 49391 - RNA, 22 nt, Homo sapiens
gcuuguguuuacuguaguuacu

SEQ ID NO: 49392 - RNA, 22 nt, Homo sapiens
ggacauuaacugcaagauagau

SEQ ID NO: 49393 - RNA, 22 nt, Homo sapiens
ggaaagaucagcuaaauguaag

SEQ ID NO: 49394 - RNA, 23 nt, Homo sapiens
ggaaacauccagucuuucaccau

SEQ ID NO: 49395 - RNA, 22 nt, Homo sapiens
gcuuuguugauggugagucugu

SEQ ID NO: 49396 - RNA, 22 nt, Homo sapiens
gcugaaauguuuaauuugggag

SEQ ID NO: 49397 - RNA, 22 nt, Homo sapiens
gcugacagugguuauacuuaga

SEQ ID NO: 49398 - RNA, 22 nt, Homo sapiens
gcucuuuugggguaauucugag

SEQ ID NO: 49399 - RNA, 22 nt, Homo sapiens
gcugauguuuucagguaauucu

SEQ ID NO: 49400 - RNA, 17 nt, Homo sapiens
gcugauguuugcauuuu

SEQ ID NO: 49401 - RNA, 22 nt, Homo sapiens
gcuguugguaaaaaggacauga

SEQ ID NO: 49402 - RNA, 22 nt, Homo sapiens
gcuguguguuaucagaaauugc

SEQ ID NO: 49403 - RNA, 23 nt, Homo sapiens
ggaguguauuggcacgaucucag

SEQ ID NO: 49404 - RNA, 22 nt, Homo sapiens
ggcaaagaugaccauuacuuuu

SEQ ID NO: 49405 - RNA, 22 nt, Homo sapiens
ggauccaucuggaaauguggga

SEQ ID NO: 49406 - RNA, 22 nt, Homo sapiens
ggaucgauuccaaauguagauc

SEQ ID NO: 49407 - RNA, 22 nt, Homo sapiens
ggaugugugcacgcgcacaugc

SEQ ID NO: 49408 - RNA, 20 nt, Homo sapiens
ggagguguugauuuuucuuu

SEQ ID NO: 49409 - RNA, 22 nt, Homo sapiens
ggagaauguaauugguauuuug

SEQ ID NO: 49410 - RNA, 22 nt, Homo sapiens
ggacugagaggacuacagugua

SEQ ID NO: 49411 - RNA, 22 nt, Homo sapiens
cugucagugggaguucaggcuu

SEQ ID NO: 49412 - RNA, 22 nt, Homo sapiens
cugucucagccucuccaguagc

SEQ ID NO: 49413 - RNA, 22 nt, Homo sapiens
cugucuggaggccugcaaauaa

SEQ ID NO: 49414 - RNA, 22 nt, Homo sapiens
cugugguauuauuagaaauauc

SEQ ID NO: 49415 - RNA, 22 nt, Homo sapiens
cugugguuacguucuuugugcu

SEQ ID NO: 49416 - RNA, 23 nt, Homo sapiens
cuuuguacagcuugacuacuggg

SEQ ID NO: 49417 - RNA, 23 nt, Homo sapiens
cuuuguccccacccaaaucucau

SEQ ID NO: 49418 - RNA, 19 nt, Homo sapiens
cuuugguugagcguguugg

SEQ ID NO: 49419 - RNA, 22 nt, Homo sapiens
cuguucaaauuguuugugaagu

SEQ ID NO: 49420 - RNA, 22 nt, Homo sapiens
cuguuaacauguuguggauaau

SEQ ID NO: 49421 - RNA, 18 nt, Homo sapiens
gaaaugccucuugcuuac

SEQ ID NO: 49422 - RNA, 21 nt, Homo sapiens
gaaauacugccuuaggagcug

SEQ ID NO: 49423 - RNA, 22 nt, Homo sapiens
gaaaugucugagauguggcuca

SEQ ID NO: 49424 - RNA, 18 nt, Homo sapiens
gacaguguggcaauuccu

SEQ ID NO: 49425 - RNA, 18 nt, Homo sapiens
gacaguguggcgauuccu

SEQ ID NO: 49426 - RNA, 22 nt, Homo sapiens
gaaauguauuaaugaguugaaa

SEQ ID NO: 49427 - RNA, 22 nt, Homo sapiens
gaaacugcauuucuaacaagcu

SEQ ID NO: 49428 - RNA, 22 nt, Homo sapiens
cuuugugugggccaagggcugg

SEQ ID NO: 49429 - RNA, 21 nt, Homo sapiens
cuuuugcacuccagccugggu

SEQ ID NO: 49430 - RNA, 22 nt, Homo sapiens
gacauguaaggcucucucuguu

SEQ ID NO: 49431 - RNA, 22 nt, Homo sapiens
gacguagagaaaugugaaaugg

SEQ ID NO: 49432 - RNA, 22 nt, Homo sapiens
gacuacaacuucuauuauucag

SEQ ID NO: 49433 - RNA, 17 nt, Homo sapiens
gacgaucaucaggaggc

SEQ ID NO: 49434 - RNA, 22 nt, Homo sapiens
gagauguaagaauuuauuuguu

SEQ ID NO: 49435 - RNA, 18 nt, Homo sapiens
gacuccauuucagccaga

SEQ ID NO: 49436 - RNA, 18 nt, Homo sapiens
gacucaguuucuaaggca

SEQ ID NO: 49437 - RNA, 22 nt, Homo sapiens
gacuggagcuguaugugguuac

SEQ ID NO: 49438 - RNA, 22 nt, Homo sapiens
gagugcaauggcaugaucuggg

SEQ ID NO: 49439 - RNA, 22 nt, Homo sapiens
gagcuguugguuugaaagaauu

SEQ ID NO: 49440 - RNA, 22 nt, Homo sapiens
gagauuuucagcuugacuggga

SEQ ID NO: 49441 - RNA, 22 nt, Homo sapiens
gagauugucaugauuacauugu

SEQ ID NO: 49442 - RNA, 22 nt, Homo sapiens
gagauuauuuaaaaggugauuu

SEQ ID NO: 49443 - RNA, 22 nt, Homo sapiens
gagcccauuucacuuguccagc

SEQ ID NO: 49444 - RNA, 22 nt, Homo sapiens
cagguaguauuugguuacauaa

SEQ ID NO: 49445 - RNA, 23 nt, Homo sapiens
cagguaguucuuuauaguagugu

SEQ ID NO: 49446 - RNA, 22 nt, Homo sapiens
cagcaagucucuaagaguucau

SEQ ID NO: 49447 - RNA, 22 nt, Homo sapiens
caucccugaaccccagaaaucu

SEQ ID NO: 49448 - RNA, 21 nt, Homo sapiens
cauccccugccauuguggucu

SEQ ID NO: 49449 - RNA, 22 nt, Homo sapiens
caugcauuggucuauuauguga

SEQ ID NO: 49450 - RNA, 22 nt, Homo sapiens
cauggagcuaggcuugaucccu

SEQ ID NO: 49451 - RNA, 22 nt, Homo sapiens
cauggcuuucacaguaaagccu

SEQ ID NO: 49452 - RNA, 22 nt, Homo sapiens
cauguauagauuccauaguggu

SEQ ID NO: 49453 - RNA, 22 nt, Homo sapiens
caugguguuaggcacugggaau

SEQ ID NO: 49454 - RNA, 22 nt, Homo sapiens
caugucacuuccucucugaugg

SEQ ID NO: 49455 - RNA, 22 nt, Homo sapiens
cagagaacugaguuauuuucuu

SEQ ID NO: 49456 - RNA, 22 nt, Homo sapiens
cagagcaaugcuuuugcuuuga

SEQ ID NO: 49457 - RNA, 22 nt, Homo sapiens
cagauaguuguagauaugcagc

SEQ ID NO: 49458 - RNA, 22 nt, Homo sapiens
cacugcaguggaagauuaagaa

SEQ ID NO: 49459 - RNA, 22 nt, Homo sapiens
cacugcauccuugaccuucugg

SEQ ID NO: 49460 - RNA, 22 nt, Homo sapiens
cacauguuugcuacauuuuucu

SEQ ID NO: 49461 - RNA, 22 nt, Homo sapiens
cacauguucaggagcacuuaga

SEQ ID NO: 49462 - RNA, 22 nt, Homo sapiens
cacauguuuuagcauggcuguu

SEQ ID NO: 49463 - RNA, 21 nt, Homo sapiens
cacugcacuugccuucugggu

SEQ ID NO: 49464 - RNA, 22 nt, Homo sapiens
cacaaugucuaagauguuucua

SEQ ID NO: 49465 - RNA, 22 nt, Homo sapiens
cacacugucuuucagaaugguu

SEQ ID NO: 49466 - RNA, 22 nt, Homo sapiens
cacagucugggcuuguuuguac

SEQ ID NO: 49467 - RNA, 22 nt, Homo sapiens
caauacuguuaccugaaauagg

SEQ ID NO: 49468 - RNA, 22 nt, Homo sapiens
caaguguuuccuuaaauacuug

SEQ ID NO: 49469 - RNA, 22 nt, Homo sapiens
caaguacugggcuauggauauu

SEQ ID NO: 49470 - RNA, 22 nt, Homo sapiens
auugcacucugaucugcacucc

SEQ ID NO: 49471 - RNA, 22 nt, Homo sapiens
auugcacuggggguuagaauuu

SEQ ID NO: 49472 - RNA, 18 nt, Homo sapiens
auugcacuccugccuggg

SEQ ID NO: 49473 - RNA, 22 nt, Homo sapiens
auugcagauucgcuuuguguug

SEQ ID NO: 49474 - RNA, 22 nt, Homo sapiens
auugcagaaaugacagagcgcc

SEQ ID NO: 49475 - RNA, 23 nt, Homo sapiens
auugcagaaucacagagguagug

SEQ ID NO: 49476 - RNA, 22 nt, Homo sapiens
ccaguuuuuggcaaugaugaau

SEQ ID NO: 49477 - RNA, 22 nt, Homo sapiens
cgaggaguaucuuugugguguu

SEQ ID NO: 49478 - RNA, 22 nt, Homo sapiens
ccaguuuucccagcaccauuaa

SEQ ID NO: 49479 - RNA, 22 nt, Homo sapiens
ccaguuuuucauuuauacuagu

SEQ ID NO: 49480 - RNA, 22 nt, Homo sapiens
cuaaaacuuucugagugcagca

SEQ ID NO: 49481 - RNA, 22 nt, Homo sapiens
cuaaagauagugacaugauuug

SEQ ID NO: 49482 - RNA, 22 nt, Homo sapiens
cuaaagugcuuaaaaucucauu

SEQ ID NO: 49483 - RNA, 16 nt, Homo sapiens
cuaaaaugucuacuug

SEQ ID NO: 49484 - RNA, 22 nt, Homo sapiens
cauuugcacugagacucagcuu

SEQ ID NO: 49485 - RNA, 22 nt, Homo sapiens
cauugucccucaaugacuauga

SEQ ID NO: 49486 - RNA, 22 nt, Homo sapiens
cuccagugcaaagucaugauca

SEQ ID NO: 49487 - RNA, 22 nt, Homo sapiens
cuccauuuggaacagauguccu

SEQ ID NO: 49488 - RNA, 22 nt, Homo sapiens
cuccauuuaucugaaauuuuau

SEQ ID NO: 49489 - RNA, 22 nt, Homo sapiens
cucauugcaaucucugccuccc

SEQ ID NO: 49490 - RNA, 22 nt, Homo sapiens
cuagcagacacuuccagagagu

SEQ ID NO: 49491 - RNA, 22 nt, Homo sapiens
cuagaguguaguuuucuuagga

SEQ ID NO: 49492 - RNA, 22 nt, Homo sapiens
cuagauuauccaacuuauuagc

SEQ ID NO: 49493 - RNA, 21 nt, Homo sapiens
cuaaucucacccuuuucuggg

SEQ ID NO: 49494 - RNA, 22 nt, Homo sapiens
cuaauccugugguagcacucaa

SEQ ID NO: 49495 - RNA, 22 nt, Homo sapiens
cuaaggaaggacugaaaggaca

SEQ ID NO: 49496 - RNA, 22 nt, Homo sapiens
cuaacacagagguuuauuucuc

SEQ ID NO: 49497 - RNA, 22 nt, Homo sapiens
cuacugacacuacugcaaucau

SEQ ID NO: 49498 - RNA, 22 nt, Homo sapiens
cuacugcacaucaucugaguua

SEQ ID NO: 49499 - RNA, 17 nt, Homo sapiens
cucucugguuuaaagca

SEQ ID NO: 49500 - RNA, 22 nt, Homo sapiens
cucgaagacuaagcaucucuga

SEQ ID NO: 49501 - RNA, 22 nt, Homo sapiens
cucccuuugcugaauguuuuuc

SEQ ID NO: 49502 - RNA, 22 nt, Homo sapiens
cugagacuggugauuuaugaag

SEQ ID NO: 49503 - RNA, 22 nt, Homo sapiens
cucugagguuauucguaauauu

SEQ ID NO: 49504 - RNA, 22 nt, Homo sapiens
cugagagaggagcuaaaacugc

SEQ ID NO: 49505 - RNA, 22 nt, Homo sapiens
cugagaucuuauuagaaaugca

SEQ ID NO: 49506 - RNA, 22 nt, Homo sapiens
cugcccguaauccucuccccag

SEQ ID NO: 49507 - RNA, 22 nt, Homo sapiens
cugcauuagucuguuuaguguu

SEQ ID NO: 49508 - RNA, 22 nt, Homo sapiens
cugcauaaucaucucucugcau

SEQ ID NO: 49509 - RNA, 22 nt, Homo sapiens
cuggcagucugccucuucacug

SEQ ID NO: 49510 - RNA, 22 nt, Homo sapiens
cuguaacagaauaaauuuguuu

SEQ ID NO: 49511 - RNA, 22 nt, Homo sapiens
cuggaauguuccuaaagauuca

SEQ ID NO: 49512 - RNA, 22 nt, Homo sapiens
cuggaaucuagaaaagguaagg

SEQ ID NO: 49513 - RNA, 22 nt, Homo sapiens
cuggagauauuggaagaaagaa

SEQ ID NO: 49514 - RNA, 22 nt, Homo sapiens
cuggaauucaaaaucugaauuu

SEQ ID NO: 49515 - RNA, 22 nt, Homo sapiens
cuggaaugcagcuuuaggggcu

SEQ ID NO: 49516 - RNA, 22 nt, Homo sapiens
cuggaguuugaggcugcaguga

SEQ ID NO: 49517 - RNA, 22 nt, Homo sapiens
cuggagcauugguggauuuguu

SEQ ID NO: 49518 - RNA, 22 nt, Homo sapiens
cuggagcaaaggugacucuugu

SEQ ID NO: 49519 - RNA, 22 nt, Homo sapiens
cuggauagagauugaugaugcu

SEQ ID NO: 49520 - RNA, 20 nt, Homo sapiens
cuggaucaucaguaaaguua

SEQ ID NO: 49521 - RNA, 22 nt, Homo sapiens
cuggauguaaaugaaacuacag

SEQ ID NO: 49522 - RNA, 22 nt, Homo sapiens
uuccaauguuccguguugcagu

SEQ ID NO: 49523 - RNA, 21 nt, Homo sapiens
uuccagugagccuagaugccu

SEQ ID NO: 49524 - RNA, 22 nt, Homo sapiens
uuccaguaauagcacagcauug

SEQ ID NO: 49525 - RNA, 22 nt, Homo sapiens
uucacugcaugaaaaggacagc

SEQ ID NO: 49526 - RNA, 22 nt, Homo sapiens
uucaccaguuuugucacgaaug

SEQ ID NO: 49527 - RNA, 23 nt, Homo sapiens
uucaccugguuauuaauagccuc

SEQ ID NO: 49528 - RNA, 23 nt, Homo sapiens
uucaccguguuggccaggcuggu

SEQ ID NO: 49529 - RNA, 22 nt, Homo sapiens
uucagcacugaaaauaugucau

SEQ ID NO: 49530 - RNA, 22 nt, Homo sapiens
uucagauugcauaccgaaagua

SEQ ID NO: 49531 - RNA, 22 nt, Homo sapiens
uucacugugcuuaaauucugcu

SEQ ID NO: 49532 - RNA, 22 nt, Homo sapiens
uugaagacuaccuaccauacuu

SEQ ID NO: 49533 - RNA, 22 nt, Homo sapiens
uugacaaggagugggguugaga

SEQ ID NO: 49534 - RNA, 22 nt, Homo sapiens
uugaaagaaaggagacugaguu

SEQ ID NO: 49535 - RNA, 22 nt, Homo sapiens
uugaaauguguaagcuccgaaa

SEQ ID NO: 49536 - RNA, 22 nt, Homo sapiens
uugaaagucuaggcuuacagua

SEQ ID NO: 49537 - RNA, 22 nt, Homo sapiens
uugaaaguaaacaucacaaaga

SEQ ID NO: 49538 - RNA, 22 nt, Homo sapiens
uugaaagcuaucagagauucca

SEQ ID NO: 49539 - RNA, 21 nt, Homo sapiens
uucuaaguaaauguuggacau

SEQ ID NO: 49540 - RNA, 22 nt, Homo sapiens
uucgucccuuuuggaauccucu

SEQ ID NO: 49541 - RNA, 21 nt, Homo sapiens
uucuacuccggcguuguuuuu

SEQ ID NO: 49542 - RNA, 20 nt, Homo sapiens
uucuaguacuucuguuucca

SEQ ID NO: 49543 - RNA, 22 nt, Homo sapiens
uuccuuguuuauuuacaggagg

SEQ ID NO: 49544 - RNA, 22 nt, Homo sapiens
uuccuucaugcuugaaggguau

SEQ ID NO: 49545 - RNA, 22 nt, Homo sapiens
uuccaguuuuauggguauagag

SEQ ID NO: 49546 - RNA, 22 nt, Homo sapiens
uuccugagagggcugggugcag

SEQ ID NO: 49547 - RNA, 22 nt, Homo sapiens
uugagaucuacuacuguaggag

SEQ ID NO: 49548 - RNA, 22 nt, Homo sapiens
uugagaucugugcuuuugcguu

SEQ ID NO: 49549 - RNA, 22 nt, Homo sapiens
uugagaucuuuuaggccuuugu

SEQ ID NO: 49550 - RNA, 22 nt, Homo sapiens
uugagauacauaauuaugaaug

SEQ ID NO: 49551 - RNA, 22 nt, Homo sapiens
uugagagaaaaaauuuauuggu

SEQ ID NO: 49552 - RNA, 22 nt, Homo sapiens
uugagauggagucucgcugugu

SEQ ID NO: 49553 - RNA, 22 nt, Homo sapiens
uugagauggagucuugcucucu

SEQ ID NO: 49554 - RNA, 22 nt, Homo sapiens
uugagauggagucucacugugu

SEQ ID NO: 49555 - RNA, 22 nt, Homo sapiens
uugacuagaccaucuuucuaga

SEQ ID NO: 49556 - RNA, 22 nt, Homo sapiens
uugacauguaaguacucuauag

SEQ ID NO: 49557 - RNA, 22 nt, Homo sapiens
uugacuuagacauucaguugga

SEQ ID NO: 49558 - RNA, 22 nt, Homo sapiens
uugacuuuuauucacucugcua

SEQ ID NO: 49559 - RNA, 22 nt, Homo sapiens
uugacagaccuuggucauaucc

SEQ ID NO: 49560 - RNA, 22 nt, Homo sapiens
uugacaaugcacugugcuaagu

SEQ ID NO: 49561 - RNA, 22 nt, Homo sapiens
uugacauauguguguccacaua

SEQ ID NO: 49562 - RNA, 22 nt, Homo sapiens
uugagcuaguugcaccagcagg

SEQ ID NO: 49563 - RNA, 22 nt, Homo sapiens
uugagauguaagauguuaauau

SEQ ID NO: 49564 - RNA, 22 nt, Homo sapiens
uugagauguauguauauaaugu

SEQ ID NO: 49565 - RNA, 22 nt, Homo sapiens
uugagauggaguuucaauauug

SEQ ID NO: 49566 - RNA, 22 nt, Homo sapiens
uugagauggaguguugcucugu

SEQ ID NO: 49567 - RNA, 22 nt, Homo sapiens
uugagauggaguucauuuuugu

SEQ ID NO: 49568 - RNA, 22 nt, Homo sapiens
uugagauggagucuugcucugu

SEQ ID NO: 49569 - RNA, 22 nt, Homo sapiens
uugagauggagucuugcucuug

SEQ ID NO: 49570 - RNA, 22 nt, Homo sapiens
uugagauggagucuuguucucu

SEQ ID NO: 49571 - RNA, 22 nt, Homo sapiens
uugagauggagucuuguucuuu

SEQ ID NO: 49572 - RNA, 22 nt, Homo sapiens
uugagauggaguuuugcucuug

SEQ ID NO: 49573 - RNA, 22 nt, Homo sapiens
uugaggaaugucauuuguguuu

SEQ ID NO: 49574 - RNA, 22 nt, Homo sapiens
uugagguauugauaaaacauuu

SEQ ID NO: 49575 - RNA, 20 nt, Homo sapiens
uugaggugugaggggcagag

SEQ ID NO: 49576 - RNA, 22 nt, Homo sapiens
uugaguagaaguaugucaguau

SEQ ID NO: 49577 - RNA, 22 nt, Homo sapiens
uugagugaaggcuguguucuug

SEQ ID NO: 49578 - RNA, 22 nt, Homo sapiens
uugaguauuggacugguaucuu

SEQ ID NO: 49579 - RNA, 22 nt, Homo sapiens
uugaguagugugaugcaugucu

SEQ ID NO: 49580 - RNA, 18 nt, Homo sapiens
uuagguaggucuuugugu

SEQ ID NO: 49581 - RNA, 22 nt, Homo sapiens
uuagguauuuuguuaugucagc

SEQ ID NO: 49582 - RNA, 22 nt, Homo sapiens
uuaguaucauccuucugcauuc

SEQ ID NO: 49583 - RNA, 22 nt, Homo sapiens
uuaguaguuugaguggggguua

SEQ ID NO: 49584 - RNA, 19 nt, Homo sapiens
uuauacuguauuguuuagg

SEQ ID NO: 49585 - RNA, 22 nt, Homo sapiens
uuaguugcauucaugugagagu

SEQ ID NO: 49586 - RNA, 22 nt, Homo sapiens
uuauaaacaugaagauuugggg

SEQ ID NO: 49587 - RNA, 23 nt, Homo sapiens
uuauggcuuuuauuauguugagg

SEQ ID NO: 49588 - RNA, 22 nt, Homo sapiens
uuaugucauuuuuggauguuaa

SEQ ID NO: 49589 - RNA, 22 nt, Homo sapiens
uuauguguuuaauguuucugaa

SEQ ID NO: 49590 - RNA, 22 nt, Homo sapiens
uuauucauuaauugcuaagguu

SEQ ID NO: 49591 - RNA, 22 nt, Homo sapiens
uuauugcucauuugggcauucu

SEQ ID NO: 49592 - RNA, 22 nt, Homo sapiens
uuauugcuccagaggcugauuu

SEQ ID NO: 49593 - RNA, 22 nt, Homo sapiens
uuauuagcacccuaccaugugg

SEQ ID NO: 49594 - RNA, 22 nt, Homo sapiens
uuauuacuccuauuuuguagau

SEQ ID NO: 49595 - RNA, 22 nt, Homo sapiens
uuauuagagauauuugguuagg

SEQ ID NO: 49596 - RNA, 22 nt, Homo sapiens
uuagccggguguguuggcgggc

SEQ ID NO: 49597 - RNA, 22 nt, Homo sapiens
uuaggaucacagaaaauccucu

SEQ ID NO: 49598 - RNA, 22 nt, Homo sapiens
uuaggcuuuucagacacuucau

SEQ ID NO: 49599 - RNA, 22 nt, Homo sapiens
uuaggcuaguuucuuaaacucu

SEQ ID NO: 49600 - RNA, 22 nt, Homo sapiens
uuaggcaggauaguuacauauu

SEQ ID NO: 49601 - RNA, 22 nt, Homo sapiens
uuaggcuaguugauauaguuug

SEQ ID NO: 49602 - RNA, 22 nt, Homo sapiens
uuagcagcaccccacucuacug

SEQ ID NO: 49603 - RNA, 20 nt, Homo sapiens
uuagcagcaugauuuauaau

SEQ ID NO: 49604 - RNA, 22 nt, Homo sapiens
uuacugcucuuuugucaugagu

SEQ ID NO: 49605 - RNA, 22 nt, Homo sapiens
uuacuguauagaaucaucuuga

SEQ ID NO: 49606 - RNA, 19 nt, Homo sapiens
uuagagaucaucugcuuca

SEQ ID NO: 49607 - RNA, 22 nt, Homo sapiens
uuagaucaacauggaacucuau

SEQ ID NO: 49608 - RNA, 22 nt, Homo sapiens
uuagaugaaugucucuuaaaca

SEQ ID NO: 49609 - RNA, 22 nt, Homo sapiens
ugugagacugacagggcagggu

SEQ ID NO: 49610 - RNA, 19 nt, Homo sapiens
ugugagcauuagcauuuag

SEQ ID NO: 49611 - RNA, 22 nt, Homo sapiens
ugugagcuauggaguuguagag

SEQ ID NO: 49612 - RNA, 22 nt, Homo sapiens
uguucuggagaguuuagucugg

SEQ ID NO: 49613 - RNA, 22 nt, Homo sapiens
ugugaugaaggcauagggaugu

SEQ ID NO: 49614 - RNA, 22 nt, Homo sapiens
ugugacuaguggugaaugacgc

SEQ ID NO: 49615 - RNA, 22 nt, Homo sapiens
ugugaauguaaccuuauuugga

SEQ ID NO: 49616 - RNA, 22 nt, Homo sapiens
ugugaacaugacagugggcuag

SEQ ID NO: 49617 - RNA, 19 nt, Homo sapiens
ugugaacaucacagagugu

SEQ ID NO: 49618 - RNA, 22 nt, Homo sapiens
uguuucuacugucucuguagua

SEQ ID NO: 49619 - RNA, 19 nt, Homo sapiens
uuacacaaccuaguggggc

SEQ ID NO: 49620 - RNA, 22 nt, Homo sapiens
uuaauuguaucuauagauguca

SEQ ID NO: 49621 - RNA, 22 nt, Homo sapiens
uuaaugacaucauaggugaagu

SEQ ID NO: 49622 - RNA, 22 nt, Homo sapiens
uuaaucacagugucuuccuuca

SEQ ID NO: 49623 - RNA, 22 nt, Homo sapiens
uuaaucuguucucuguauucua

SEQ ID NO: 49624 - RNA, 22 nt, Homo sapiens
uuaaucaggccguuuccuaaga

SEQ ID NO: 49625 - RNA, 22 nt, Homo sapiens
uugauaucugaugccuauggaa

SEQ ID NO: 49626 - RNA, 22 nt, Homo sapiens
uugauaacauucugcauccuau

SEQ ID NO: 49627 - RNA, 22 nt, Homo sapiens
uugauagacaucugaguuguug

SEQ ID NO: 49628 - RNA, 22 nt, Homo sapiens
uugaguuuaucuaaagaccugg

SEQ ID NO: 49629 - RNA, 22 nt, Homo sapiens
uugaucaauagaauacaacaga

SEQ ID NO: 49630 - RNA, 22 nt, Homo sapiens
uugauauguuguuagauucagu

SEQ ID NO: 49631 - RNA, 23 nt, Homo sapiens
uuggaaugagaccuaagaguuuu

SEQ ID NO: 49632 - RNA, 22 nt, Homo sapiens
uuggaaugugacugauaauauu

SEQ ID NO: 49633 - RNA, 22 nt, Homo sapiens
uuggaauuaaccuggugcugga

SEQ ID NO: 49634 - RNA, 22 nt, Homo sapiens
uuggaauuaagagauauuuucu

SEQ ID NO: 49635 - RNA, 19 nt, Homo sapiens
uuggaauuuuagaguuuga

SEQ ID NO: 49636 - RNA, 22 nt, Homo sapiens
uuggaauuagacaagugguggu

SEQ ID NO: 49637 - RNA, 22 nt, Homo sapiens
uuggaauuuuacuucuguaaga

SEQ ID NO: 49638 - RNA, 22 nt, Homo sapiens
uuggacuaagaacuuaaaauaa

SEQ ID NO: 49639 - RNA, 22 nt, Homo sapiens
uuggccuuucucuaaauacuuu

SEQ ID NO: 49640 - RNA, 22 nt, Homo sapiens
uuggcgacugcugcuaaucagg

SEQ ID NO: 49641 - RNA, 22 nt, Homo sapiens
uuggauuuugguggcaacucau

SEQ ID NO: 49642 - RNA, 22 nt, Homo sapiens
uuggcuuguaaaaugaaaagcu

SEQ ID NO: 49643 - RNA, 22 nt, Homo sapiens
uugggaauguccuaauaucucg

SEQ ID NO: 49644 - RNA, 22 nt, Homo sapiens
uugggcauugcuauaaauucuu

SEQ ID NO: 49645 - RNA, 21 nt, Homo sapiens
uuggggaauggagagguuuuc

SEQ ID NO: 49646 - RNA, 22 nt, Homo sapiens
uuguaagaaucuagcucuuuau

SEQ ID NO: 49647 - RNA, 22 nt, Homo sapiens
uuguacuagaaaauuauucuuu

SEQ ID NO: 49648 - RNA, 22 nt, Homo sapiens
uuguagaucuucaguugcuaca

SEQ ID NO: 49649 - RNA, 23 nt, Homo sapiens
uuguaacuggagaguaacauucc

SEQ ID NO: 49650 - RNA, 22 nt, Homo sapiens
uuguaaagaucauaugcuguuc

SEQ ID NO: 49651 - RNA, 22 nt, Homo sapiens
uugugcaaaguugugguuucug

SEQ ID NO: 49652 - RNA, 22 nt, Homo sapiens
uugugacacagcugggccuaua

SEQ ID NO: 49653 - RNA, 22 nt, Homo sapiens
uugugaauggugcugcaguaaa

SEQ ID NO: 49654 - RNA, 22 nt, Homo sapiens
uugucauuuucagaguguuacg

SEQ ID NO: 49655 - RNA, 22 nt, Homo sapiens
uuguccaagucccauuuguuga

SEQ ID NO: 49656 - RNA, 22 nt, Homo sapiens
uuguccuccacauuugaucagu

SEQ ID NO: 49657 - RNA, 23 nt, Homo sapiens
uuguccccuccaaagcucauguu

SEQ ID NO: 49658 - RNA, 22 nt, Homo sapiens
uuguccucuccaaaucucaugu

SEQ ID NO: 49659 - RNA, 22 nt, Homo sapiens
uuguccuggagguucuugcaag

SEQ ID NO: 49660 - RNA, 21 nt, Homo sapiens
uugucuagagaaauauaucuc

SEQ ID NO: 49661 - RNA, 22 nt, Homo sapiens
uugucuugcagcuuaggcauca

SEQ ID NO: 49662 - RNA, 22 nt, Homo sapiens
uugugaaaucuaggcagagguu

SEQ ID NO: 49663 - RNA, 22 nt, Homo sapiens
uugugaaugaugucgcaauaaa

SEQ ID NO: 49664 - RNA, 22 nt, Homo sapiens
uugugaaugaugucgcaguaaa

SEQ ID NO: 49665 - RNA, 22 nt, Homo sapiens
uuguuauguuggucaguaaugu

SEQ ID NO: 49666 - RNA, 22 nt, Homo sapiens
uugugucccugcccaaaucuca

SEQ ID NO: 49667 - RNA, 22 nt, Homo sapiens
uuuaaagcuaaaauauguuuau

SEQ ID NO: 49668 - RNA, 23 nt, Homo sapiens
uuguucccuuccacucagucucc

SEQ ID NO: 49669 - RNA, 22 nt, Homo sapiens
uuuaauacugcaucuuuacucu

SEQ ID NO: 49670 - RNA, 23 nt, Homo sapiens
uuuaagcuucauguccuaacauc

SEQ ID NO: 49671 - RNA, 20 nt, Homo sapiens
uuuaagacaugcugaauuga

SEQ ID NO: 49672 - RNA, 22 nt, Homo sapiens
uuuagcaaagcaauuuacacca

SEQ ID NO: 49673 - RNA, 18 nt, Homo sapiens
uuuacaguagaaggacuu

SEQ ID NO: 49674 - RNA, 22 nt, Homo sapiens
uuuacagucuuuugugugaguc

SEQ ID NO: 49675 - RNA, 22 nt, Homo sapiens
uuuaauguuacaguauugguau

SEQ ID NO: 49676 - RNA, 22 nt, Homo sapiens
uuuuuggauaaugguacaugua

SEQ ID NO: 49677 - RNA, 22 nt, Homo sapiens
uuuuugagguauaguguggcua

SEQ ID NO: 49678 - RNA, 22 nt, Homo sapiens
uuuuugugguauauugcaacaa

SEQ ID NO: 49679 - RNA, 22 nt, Homo sapiens
uuuuuuaguuagcugggcauga

SEQ ID NO: 49680 - RNA, 23 nt, Homo sapiens
uuuuuguguuucauggaaauagg

SEQ ID NO: 49681 - RNA, 22 nt, Homo sapiens
uuuuuauggccaauccucagaa

SEQ ID NO: 49682 - RNA, 22 nt, Homo sapiens
uuuugugcauggcccaguggua

SEQ ID NO: 49683 - RNA, 22 nt, Homo sapiens
uuuugugacuauuguaaauggg

SEQ ID NO: 49684 - RNA, 19 nt, Homo sapiens
uuuuguacucugugacuug

SEQ ID NO: 49685 - RNA, 21 nt, Homo sapiens
aagaaagcuggacuugccgcu

SEQ ID NO: 49686 - RNA, 22 nt, Homo sapiens
aagagcauuauuuaguaauuuc

SEQ ID NO: 49687 - RNA, 22 nt, Homo sapiens
aaccugaagaaaauauuugcug

SEQ ID NO: 49688 - RNA, 22 nt, Homo sapiens
aacugguauuucccaugaauuu

SEQ ID NO: 49689 - RNA, 22 nt, Homo sapiens
aaccuauaguauugaaaucaag

SEQ ID NO: 49690 - RNA, 22 nt, Homo sapiens
aacuccauuuuagacccuagau

SEQ ID NO: 49691 - RNA, 22 nt, Homo sapiens
aacucugucuccuucaaguuca

SEQ ID NO: 49692 - RNA, 22 nt, Homo sapiens
aacuaugucaaauaaaaugagg

SEQ ID NO: 49693 - RNA, 22 nt, Homo sapiens
uuuuuugguaauugaacaauga

SEQ ID NO: 49694 - RNA, 22 nt, Homo sapiens
aagaugguauuucauuaguuuu

SEQ ID NO: 49695 - RNA, 22 nt, Homo sapiens
aagaugcagaagcccagauguu

SEQ ID NO: 49696 - RNA, 22 nt, Homo sapiens
aagagguuuaacugacucacag

SEQ ID NO: 49697 - RNA, 22 nt, Homo sapiens
aagauagcuaagcuucuucuaa

SEQ ID NO: 49698 - RNA, 22 nt, Homo sapiens
aagcaggugucugugucuguaa

SEQ ID NO: 49699 - RNA, 22 nt, Homo sapiens
aagcuccauuucugccaugaga

SEQ ID NO: 49700 - RNA, 22 nt, Homo sapiens
uuuguaagaugcauagauugca

SEQ ID NO: 49701 - RNA, 22 nt, Homo sapiens
uuuguaauaccugaggcugggu

SEQ ID NO: 49702 - RNA, 23 nt, Homo sapiens
uuuggcauuccagaaauuuucau

SEQ ID NO: 49703 - RNA, 22 nt, Homo sapiens
uuuggcaugggcuauuugcuuu

SEQ ID NO: 49704 - RNA, 22 nt, Homo sapiens
uuuggcaguuauuuacucagug

SEQ ID NO: 49705 - RNA, 22 nt, Homo sapiens
uuuggcacuguaaauuucucuu

SEQ ID NO: 49706 - RNA, 22 nt, Homo sapiens
uuuggcacuauagguaaauuug

SEQ ID NO: 49707 - RNA, 20 nt, Homo sapiens
uuuggcacugagugguauaa

SEQ ID NO: 49708 - RNA, 22 nt, Homo sapiens
uuugcuucacuguuuggcaaaa

SEQ ID NO: 49709 - RNA, 22 nt, Homo sapiens
uuugcuuaaaucuuaaucagau

SEQ ID NO: 49710 - RNA, 22 nt, Homo sapiens
uuuccauguuggugaaaugagg

SEQ ID NO: 49711 - RNA, 22 nt, Homo sapiens
uuuccagguggccaacauuuua

SEQ ID NO: 49712 - RNA, 22 nt, Homo sapiens
uuucauggaggcauuuuagauu

SEQ ID NO: 49713 - RNA, 22 nt, Homo sapiens
uuucccuuuagcuuagugauuu

SEQ ID NO: 49714 - RNA, 22 nt, Homo sapiens
uuugcuaaucaacacuggccug

SEQ ID NO: 49715 - RNA, 22 nt, Homo sapiens
uuugcuauagugaauagugcug

SEQ ID NO: 49716 - RNA, 22 nt, Homo sapiens
uuucaucaagcacagaguagau

SEQ ID NO: 49717 - RNA, 22 nt, Homo sapiens
uuucauggcaguuuggggccug

SEQ ID NO: 49718 - RNA, 22 nt, Homo sapiens
uuucauggcgaggcuucauggg

SEQ ID NO: 49719 - RNA, 22 nt, Homo sapiens
uuugucccccguaguucauaua

SEQ ID NO: 49720 - RNA, 22 nt, Homo sapiens
uuuuggcacuuugucugauucu

SEQ ID NO: 49721 - RNA, 22 nt, Homo sapiens
uuuugcuccuggcaaacucaua

SEQ ID NO: 49722 - RNA, 22 nt, Homo sapiens
uuuguacugagccaagauggua

SEQ ID NO: 49723 - RNA, 22 nt, Homo sapiens
uuuguacuugaagaaucuuuau

SEQ ID NO: 49724 - RNA, 23 nt, Homo sapiens
uuuguaguagcaugauuuauaau

SEQ ID NO: 49725 - RNA, 22 nt, Homo sapiens
uuuguaauccuauuccaaagga

SEQ ID NO: 49726 - RNA, 22 nt, Homo sapiens
uuugucacccugaauguaagau

SEQ ID NO: 49727 - RNA, 22 nt, Homo sapiens
uuuugcauuggcugaggagugu

SEQ ID NO: 49728 - RNA, 22 nt, Homo sapiens
uuuugcaggucaggggcagaga

SEQ ID NO: 49729 - RNA, 22 nt, Homo sapiens
ugagugugacuuagcagaagga

SEQ ID NO: 49730 - RNA, 22 nt, Homo sapiens
ugagucuguuccaaagaaauaa

SEQ ID NO: 49731 - RNA, 22 nt, Homo sapiens
ugagugaaagaagcacuaagga

SEQ ID NO: 49732 - RNA, 22 nt, Homo sapiens
ugaggugaggguaucaaaugcu

SEQ ID NO: 49733 - RNA, 22 nt, Homo sapiens
ugagguaugugaugucuuuuag

SEQ ID NO: 49734 - RNA, 22 nt, Homo sapiens
ugauaagugaaagugcucuauc

SEQ ID NO: 49735 - RNA, 22 nt, Homo sapiens
ugaguuaaucucuacgauagaa

SEQ ID NO: 49736 - RNA, 22 nt, Homo sapiens
ugaguuauuaguagaggcuaug

SEQ ID NO: 49737 - RNA, 22 nt, Homo sapiens
ugcaaccauuguuaagugugca

SEQ ID NO: 49738 - RNA, 21 nt, Homo sapiens
ugcaugguagucacaugauuc

SEQ ID NO: 49739 - RNA, 22 nt, Homo sapiens
ugcauuguaggauguuuagcag

SEQ ID NO: 49740 - RNA, 22 nt, Homo sapiens
ugcauuaucagauguuugcuuu

SEQ ID NO: 49741 - RNA, 21 nt, Homo sapiens
ugcauugucuugaguuuaaau

SEQ ID NO: 49742 - RNA, 22 nt, Homo sapiens
ugcauuguggaucuaaaugcau

SEQ ID NO: 49743 - RNA, 20 nt, Homo sapiens
ugcagcacugggaaugcagu

SEQ ID NO: 49744 - RNA, 22 nt, Homo sapiens
ugcagugucaauaauaauuagu

SEQ ID NO: 49745 - RNA, 19 nt, Homo sapiens
ugcagcaauguaaaagaca

SEQ ID NO: 49746 - RNA, 22 nt, Homo sapiens
ugcaauauccucuacuauaggu

SEQ ID NO: 49747 - RNA, 22 nt, Homo sapiens
ugcaaucaucgcuguuggccac

SEQ ID NO: 49748 - RNA, 22 nt, Homo sapiens
ugcaccauugucaccuggguga

SEQ ID NO: 49749 - RNA, 17 nt, Homo sapiens
ugcaccauuugauuuuu

SEQ ID NO: 49750 - RNA, 22 nt, Homo sapiens
ugcagagucuguccugccugcc

SEQ ID NO: 49751 - RNA, 22 nt, Homo sapiens
ugcagaaucccuucagauccga

SEQ ID NO: 49752 - RNA, 19 nt, Homo sapiens
ugcaaagucagugaagggu

SEQ ID NO: 49753 - RNA, 22 nt, Homo sapiens
ugcaaguaauuggcgaggaguu

SEQ ID NO: 49754 - RNA, 22 nt, Homo sapiens
ugcaagaugagauuuuggaugg

SEQ ID NO: 49755 - RNA, 22 nt, Homo sapiens
ugcugcauuggggauuaaguuu

SEQ ID NO: 49756 - RNA, 23 nt, Homo sapiens
ugcucgguguugacagucacauc

SEQ ID NO: 49757 - RNA, 22 nt, Homo sapiens
ugcuauguuuucccuccuuauc

SEQ ID NO: 49758 - RNA, 22 nt, Homo sapiens
ugccaguuuuuacauuuccugu

SEQ ID NO: 49759 - RNA, 22 nt, Homo sapiens
uggagugauaugguuauauggg

SEQ ID NO: 49760 - RNA, 22 nt, Homo sapiens
uggagugcgugucugaguuuuu

SEQ ID NO: 49761 - RNA, 22 nt, Homo sapiens
uggagucgugcccuugcauuua

SEQ ID NO: 49762 - RNA, 22 nt, Homo sapiens
uggagucuugaugauuuucaaa

SEQ ID NO: 49763 - RNA, 21 nt, Homo sapiens
uggagugaagaguuuauugac

SEQ ID NO: 49764 - RNA, 22 nt, Homo sapiens
uggagugagaacuucaaugaug

SEQ ID NO: 49765 - RNA, 22 nt, Homo sapiens
uggaauuaauccuccugguuuc

SEQ ID NO: 49766 - RNA, 21 nt, Homo sapiens
uggaauuaauggagagguguu

SEQ ID NO: 49767 - RNA, 22 nt, Homo sapiens
uggaauguagcguugacacgag

SEQ ID NO: 49768 - RNA, 22 nt, Homo sapiens
uggaaucuagagaaaugcaaac

SEQ ID NO: 49769 - RNA, 22 nt, Homo sapiens
uggaaguaaccaugaauggaau

SEQ ID NO: 49770 - RNA, 22 nt, Homo sapiens
uggaaaacaugcacauuggauu

SEQ ID NO: 49771 - RNA, 22 nt, Homo sapiens
ugcuuuguuauauggggauucu

SEQ ID NO: 49772 - RNA, 22 nt, Homo sapiens
uggaagucaugcugcaagaaca

SEQ ID NO: 49773 - RNA, 22 nt, Homo sapiens
uggaaguuaaauuaguugauga

SEQ ID NO: 49774 - RNA, 22 nt, Homo sapiens
uggaauacaugucgcugagcug

SEQ ID NO: 49775 - RNA, 22 nt, Homo sapiens
uggaauaucaugagaguuuguu

SEQ ID NO: 49776 - RNA, 22 nt, Homo sapiens
ugcugguuuaaaaugcaaauuc

SEQ ID NO: 49777 - RNA, 22 nt, Homo sapiens
ugcuuuguugaaaaucauuugg

SEQ ID NO: 49778 - RNA, 22 nt, Homo sapiens
ugcuuugguagaaaucuuuggu

SEQ ID NO: 49779 - RNA, 21 nt, Homo sapiens
ugcuuuggucauacuucuucc

SEQ ID NO: 49780 - RNA, 22 nt, Homo sapiens
ugucaguggucuggaugcagcc

SEQ ID NO: 49781 - RNA, 22 nt, Homo sapiens
ugucaggagcaaugauaaauuu

SEQ ID NO: 49782 - RNA, 22 nt, Homo sapiens
ugucacugugcagucaugcauu

SEQ ID NO: 49783 - RNA, 22 nt, Homo sapiens
uguauguaaagacaggauaaca

SEQ ID NO: 49784 - RNA, 22 nt, Homo sapiens
uguauguuguaagacuuagacc

SEQ ID NO: 49785 - RNA, 22 nt, Homo sapiens
ugucaagaugguuugauguugu

SEQ ID NO: 49786 - RNA, 22 nt, Homo sapiens
ugucaauauguaauaacugaau

SEQ ID NO: 49787 - RNA, 22 nt, Homo sapiens
ugucaaugggaauuuguuuuag

SEQ ID NO: 49788 - RNA, 22 nt, Homo sapiens
ugucaaauucuggguuaaaaca

SEQ ID NO: 49789 - RNA, 22 nt, Homo sapiens
ugucaaacauuaugaugcucua

SEQ ID NO: 49790 - RNA, 22 nt, Homo sapiens
ugucaaaugcagugauauuuga

SEQ ID NO: 49791 - RNA, 21 nt, Homo sapiens
ugucgugcaggaucuguggga

SEQ ID NO: 49792 - RNA, 22 nt, Homo sapiens
ugucuagaaaagccugccuucu

SEQ ID NO: 49793 - RNA, 21 nt, Homo sapiens
ugucuagaccucauccuacag

SEQ ID NO: 49794 - RNA, 22 nt, Homo sapiens
ugucugagacuguuuuacuuuc

SEQ ID NO: 49795 - RNA, 16 nt, Homo sapiens
ugucuguuugggcaca

SEQ ID NO: 49796 - RNA, 22 nt, Homo sapiens
ugucuuguagacaauguauagu

SEQ ID NO: 49797 - RNA, 22 nt, Homo sapiens
ugucuuuguuaguuguccuagu

SEQ ID NO: 49798 - RNA, 22 nt, Homo sapiens
ugucuuguagacugaaggcuuc

SEQ ID NO: 49799 - RNA, 22 nt, Homo sapiens
ugucaugguguuaauuuuccug

SEQ ID NO: 49800 - RNA, 22 nt, Homo sapiens
ugucaugaacucacauucuggg

SEQ ID NO: 49801 - RNA, 16 nt, Homo sapiens
uguccaaauaaauaca

SEQ ID NO: 49802 - RNA, 22 nt, Homo sapiens
uguccguuuuguuucaggcuca

SEQ ID NO: 49803 - RNA, 23 nt, Homo sapiens
uggccaagauaaucucaguuuuc

SEQ ID NO: 49804 - RNA, 22 nt, Homo sapiens
uggccaguguuuuuccugggcu

SEQ ID NO: 49805 - RNA, 22 nt, Homo sapiens
uggcgagaaaccauaugcuuuc

SEQ ID NO: 49806 - RNA, 22 nt, Homo sapiens
ugggaaugaaauuacauagcuu

SEQ ID NO: 49807 - RNA, 22 nt, Homo sapiens
uggcuaagaugcacacuucacu

SEQ ID NO: 49808 - RNA, 20 nt, Homo sapiens
uggaguuguggcaguuugga

SEQ ID NO: 49809 - RNA, 22 nt, Homo sapiens
uggaguguguugcagaugaagg

SEQ ID NO: 49810 - RNA, 22 nt, Homo sapiens
uggauccaucacgccucuuccc

SEQ ID NO: 49811 - RNA, 22 nt, Homo sapiens
uggaugaagagaugguaguugc

SEQ ID NO: 49812 - RNA, 22 nt, Homo sapiens
uggcaugucagguuucuggguu

SEQ ID NO: 49813 - RNA, 22 nt, Homo sapiens
uggcaugucguuuuucauagga

SEQ ID NO: 49814 - RNA, 22 nt, Homo sapiens
uggguagauaucauaguugccc

SEQ ID NO: 49815 - RNA, 22 nt, Homo sapiens
uguaaaucuuucacaguugaug

SEQ ID NO: 49816 - RNA, 22 nt, Homo sapiens
uguaaaucugguuaauuggaua

SEQ ID NO: 49817 - RNA, 22 nt, Homo sapiens
uguaaaucuauuuuuaguguuu

SEQ ID NO: 49818 - RNA, 22 nt, Homo sapiens
uguauauguuuguacauauguc

SEQ ID NO: 49819 - RNA, 22 nt, Homo sapiens
ugguuguuuuaaaugucgucug

SEQ ID NO: 49820 - RNA, 22 nt, Homo sapiens
uguaaaaagcccagccgcugag

SEQ ID NO: 49821 - RNA, 23 nt, Homo sapiens
uguaaaagcauuugucagccugg

SEQ ID NO: 49822 - RNA, 22 nt, Homo sapiens
uguaaacuuuugagauugacuu

SEQ ID NO: 49823 - RNA, 23 nt, Homo sapiens
uguaaagcuaugaauuauucuuu

SEQ ID NO: 49824 - RNA, 18 nt, Homo sapiens
uguaaacuaccucaaccu

SEQ ID NO: 49825 - RNA, 22 nt, Homo sapiens
uguaaaccucugaguacaagcu

SEQ ID NO: 49826 - RNA, 20 nt, Homo sapiens
ugguguuugaacagugaaug

SEQ ID NO: 49827 - RNA, 22 nt, Homo sapiens
uggggucguaggugcccgccag

SEQ ID NO: 49828 - RNA, 22 nt, Homo sapiens
ucacuuuggguacuauggaaau

SEQ ID NO: 49829 - RNA, 22 nt, Homo sapiens
ucacugugguuggaaggcuuaa

SEQ ID NO: 49830 - RNA, 22 nt, Homo sapiens
ucacuggucuaaguggaggggg

SEQ ID NO: 49831 - RNA, 22 nt, Homo sapiens
ucacucggugaugauucuuaaa

SEQ ID NO: 49832 - RNA, 22 nt, Homo sapiens
ucacuggcaaauauauccguug

SEQ ID NO: 49833 - RNA, 22 nt, Homo sapiens
ucagaucauauucuucgcugcu

SEQ ID NO: 49834 - RNA, 22 nt, Homo sapiens
ucagaucaguuccacaagaacu

SEQ ID NO: 49835 - RNA, 22 nt, Homo sapiens
uccccuuuguaagauggaaacg

SEQ ID NO: 49836 - RNA, 19 nt, Homo sapiens
ucccuguagaccacagugc

SEQ ID NO: 49837 - RNA, 17 nt, Homo sapiens
ucuaauaauaugcauuu

SEQ ID NO: 49838 - RNA, 22 nt, Homo sapiens
ucgguauuuuagaauugagacu

SEQ ID NO: 49839 - RNA, 22 nt, Homo sapiens
ucugacaaugaacaaucuauag

SEQ ID NO: 49840 - RNA, 22 nt, Homo sapiens
ucugaaucguucccaugcagga

SEQ ID NO: 49841 - RNA, 22 nt, Homo sapiens
ucucugguuuguggaaucuuag

SEQ ID NO: 49842 - RNA, 22 nt, Homo sapiens
ucuauugguugaaauugcuuuu

SEQ ID NO: 49843 - RNA, 22 nt, Homo sapiens
ucucuguuuauuuuugguguau

SEQ ID NO: 49844 - RNA, 22 nt, Homo sapiens
ucucugauuauugcauuucauu

SEQ ID NO: 49845 - RNA, 22 nt, Homo sapiens
ucuauguuuuugcuaguagugu

SEQ ID NO: 49846 - RNA, 22 nt, Homo sapiens
ucucugaaacucuugacauccu

SEQ ID NO: 49847 - RNA, 22 nt, Homo sapiens
ucuauggaguuugaaugagaaa

SEQ ID NO: 49848 - RNA, 22 nt, Homo sapiens
ucugugcuugucauaugcuuug

SEQ ID NO: 49849 - RNA, 22 nt, Homo sapiens
ucugugguaagaaacgcauguc

SEQ ID NO: 49850 - RNA, 22 nt, Homo sapiens
aacauguuuagcagauaccugu

SEQ ID NO: 49851 - RNA, 22 nt, Homo sapiens
ucugugcugagaguugaaaguu

SEQ ID NO: 49852 - RNA, 22 nt, Homo sapiens
ucuggcuuuagcaugugggaag

SEQ ID NO: 49853 - RNA, 22 nt, Homo sapiens
ucugcauaucaugcagaacuau

SEQ ID NO: 49854 - RNA, 22 nt, Homo sapiens
ucugagaugagacuuugaauuu

SEQ ID NO: 49855 - RNA, 22 nt, Homo sapiens
ucugcauauucuagggcaccaa

SEQ ID NO: 49856 - RNA, 22 nt, Homo sapiens
ucuggcaagauauccauugcuu

SEQ ID NO: 49857 - RNA, 23 nt, Homo sapiens
ucugauguuauaaaauucuuugg

SEQ ID NO: 49858 - RNA, 22 nt, Homo sapiens
ucuuaguuuagauuagcaauuc

SEQ ID NO: 49859 - RNA, 22 nt, Homo sapiens
ucugugguuguugcauggaaug

SEQ ID NO: 49860 - RNA, 22 nt, Homo sapiens
ucuugcuuuugcagagcuucuc

SEQ ID NO: 49861 - RNA, 22 nt, Homo sapiens
ucuugcaauuuccuuaguggug

SEQ ID NO: 49862 - RNA, 22 nt, Homo sapiens
ucuucguuuaaagcaguggaag

SEQ ID NO: 49863 - RNA, 22 nt, Homo sapiens
ucuguggugggcuccacccagu

SEQ ID NO: 49864 - RNA, 22 nt, Homo sapiens
ucuugaacuucugcacacucag

SEQ ID NO: 49865 - RNA, 23 nt, Homo sapiens
ucuuguacuuugagugagcaugg

SEQ ID NO: 49866 - RNA, 22 nt, Homo sapiens
ucuuuggucagaaagauuacac

SEQ ID NO: 49867 - RNA, 22 nt, Homo sapiens
ucuuuguguaggucaaucuggc

SEQ ID NO: 49868 - RNA, 22 nt, Homo sapiens
ucuuugguucuguuuauguaau

SEQ ID NO: 49869 - RNA, 23 nt, Homo sapiens
ugacuuaggccucaacuaugacu

SEQ ID NO: 49870 - RNA, 22 nt, Homo sapiens
ugacuuaugcaacucugaugug

SEQ ID NO: 49871 - RNA, 18 nt, Homo sapiens
ugagaacauguguacaca

SEQ ID NO: 49872 - RNA, 22 nt, Homo sapiens
ugacuagugugauguaguaaau

SEQ ID NO: 49873 - RNA, 19 nt, Homo sapiens
ugacuauagccugaucagu

SEQ ID NO: 49874 - RNA, 22 nt, Homo sapiens
ugacuauaggauaacaugcauu

SEQ ID NO: 49875 - RNA, 22 nt, Homo sapiens
ugacuauaguuuucuugacaca

SEQ ID NO: 49876 - RNA, 22 nt, Homo sapiens
ugacaguguccucauucccaac

SEQ ID NO: 49877 - RNA, 18 nt, Homo sapiens
ugacaguuucuuuauauu

SEQ ID NO: 49878 - RNA, 22 nt, Homo sapiens
ugacuaaaacugaguuucauua

SEQ ID NO: 49879 - RNA, 22 nt, Homo sapiens
ugacuacacacaauuugucaag

SEQ ID NO: 49880 - RNA, 22 nt, Homo sapiens
ugaaagcuacagucuccuagga

SEQ ID NO: 49881 - RNA, 18 nt, Homo sapiens
ugaaacacauuuuuuccu

SEQ ID NO: 49882 - RNA, 20 nt, Homo sapiens
ugaaaucuucacuaagucuc

SEQ ID NO: 49883 - RNA, 22 nt, Homo sapiens
ugaaaucuaaaauguuccaaga

SEQ ID NO: 49884 - RNA, 22 nt, Homo sapiens
ucuuuguugcauaggcuuguuc

SEQ ID NO: 49885 - RNA, 22 nt, Homo sapiens
ugaaacauacacucugaugggg

SEQ ID NO: 49886 - RNA, 20 nt, Homo sapiens
ugaaacacauggacuggggu

SEQ ID NO: 49887 - RNA, 20 nt, Homo sapiens
ucuuuuuguggccccagagu

SEQ ID NO: 49888 - RNA, 22 nt, Homo sapiens
ugaaaugcugucuaggggaaau

SEQ ID NO: 49889 - RNA, 22 nt, Homo sapiens
ugaaaugccuuuaaugaauuua

SEQ ID NO: 49890 - RNA, 22 nt, Homo sapiens
ugaaaugcagaacuuuaggucu

SEQ ID NO: 49891 - RNA, 21 nt, Homo sapiens
ugaaaugcaugugcacauuaa

SEQ ID NO: 49892 - RNA, 22 nt, Homo sapiens
ugaaaugcuaauucguagcuaa

SEQ ID NO: 49893 - RNA, 22 nt, Homo sapiens
ugagaacuaaaaugugguauau

SEQ ID NO: 49894 - RNA, 22 nt, Homo sapiens
ugagaacuaaugaagaauuuau

SEQ ID NO: 49895 - RNA, 22 nt, Homo sapiens
ugagaacugguagcacuuguga

SEQ ID NO: 49896 - RNA, 19 nt, Homo sapiens
ugagaauguuaccaggucc

SEQ ID NO: 49897 - RNA, 22 nt, Homo sapiens
ugagacggagucuugcuaaguu

SEQ ID NO: 49898 - RNA, 22 nt, Homo sapiens
ugagacauauuauacugcuuuu

SEQ ID NO: 49899 - RNA, 22 nt, Homo sapiens
ugagauaaucaugugguuuuug

SEQ ID NO: 49900 - RNA, 22 nt, Homo sapiens
ugagauauauauauuugagaca

SEQ ID NO: 49901 - RNA, 22 nt, Homo sapiens
ugagaucuuaucagaaauggug

SEQ ID NO: 49902 - RNA, 22 nt, Homo sapiens
ugagaucucauuaugguuuuaa

SEQ ID NO: 49903 - RNA, 22 nt, Homo sapiens
ugagaugaagucuugcucuguu

SEQ ID NO: 49904 - RNA, 22 nt, Homo sapiens
ugagguaauagauaauauuuuu

SEQ ID NO: 49905 - RNA, 22 nt, Homo sapiens
ugagguaaugcuguagcuguga

SEQ ID NO: 49906 - RNA, 22 nt, Homo sapiens
ugagguaacaaacuaugaguua

SEQ ID NO: 49907 - RNA, 22 nt, Homo sapiens
ugagguaagauguucauuuuuc

SEQ ID NO: 49908 - RNA, 22 nt, Homo sapiens
ugagggaugccugguuuguuuu

SEQ ID NO: 49909 - RNA, 22 nt, Homo sapiens
ugagaugauagauauguuaauu

SEQ ID NO: 49910 - RNA, 21 nt, Homo sapiens
ugagaugauccugcaugcaug

SEQ ID NO: 49911 - RNA, 22 nt, Human herpesvirus 6
gaagaucacuuuguuucugaac

SEQ ID NO: 49912 - RNA, 22 nt, Human herpesvirus 6
ugcuuugccaguauaacuguuu

SEQ ID NO: 49913 - RNA, 22 nt, Human herpesvirus 6
gggugucuaaacgagucuggag

SEQ ID NO: 49914 - RNA, 22 nt, Human herpesvirus 6
guacaaaugauuuaauuucgcu

SEQ ID NO: 49915 - RNA, 22 nt, Human herpesvirus 6
aucgauaauccucgggccaggg

SEQ ID NO: 49916 - RNA, 21 nt, Human herpesvirus 6
aucgcaaaauugauacaaacg

SEQ ID NO: 49917 - RNA, 21 nt, Human herpesvirus 6
auggugucguuuaauuucaca

SEQ ID NO: 49918 - RNA, 22 nt, Human herpesvirus 6
cacacacggcgugagacgccgc

SEQ ID NO: 49919 - RNA, 22 nt, Human herpesvirus 6
aguaaauauuuaucugcaugua

SEQ ID NO: 49920 - RNA, 16 nt, Human herpesvirus 6
ccuggcgauuuucgau

SEQ ID NO: 49921 - RNA, 22 nt, Human herpesvirus 6
cggcgaggcggccggagagccg

SEQ ID NO: 49922 - RNA, 22 nt, Human herpesvirus 6
cggcggauggagcccgcucggu

SEQ ID NO: 49923 - RNA, 22 nt, Human herpesvirus 6
cggcgguugccuguauaggcag

SEQ ID NO: 49924 - RNA, 22 nt, Human herpesvirus 6
uuuggcgacuguuugaaauauu

SEQ ID NO: 49925 - RNA, 22 nt, Human herpesvirus 6
uuuaaaucuaauauucaucggc

SEQ ID NO: 49926 - RNA, 22 nt, Human herpesvirus 6
uuuagaauuaaggaauugguau

SEQ ID NO: 49927 - RNA, 22 nt, Human herpesvirus 6
gccgcagaguugcaagaaaugu

SEQ ID NO: 49928 - RNA, 22 nt, Human herpesvirus 6
gaguaaaucgaacgauacuuac

SEQ ID NO: 49929 - RNA, 22 nt, Human herpesvirus 6
gcaggaagagggaguccaacaa

SEQ ID NO: 49930 - RNA, 22 nt, Human herpesvirus 6
gauugauaaguuuccgacaugc

SEQ ID NO: 49931 - RNA, 22 nt, Human herpesvirus 6
uaagcagccgcgaacucguuaa

SEQ ID NO: 49932 - RNA, 23 nt, Human herpesvirus 6
ucgaaaucgcggaugaauugcgg

SEQ ID NO: 49933 - RNA, 21 nt, Human herpesvirus 6
guuucgugucaguucuguggu

SEQ ID NO: 49934 - RNA, 22 nt, Human herpesvirus 6
gugccuauugcugcuaugccug

SEQ ID NO: 49935 - RNA, 22 nt, Human herpesvirus 6
acguagaaaaucgucaauggug

SEQ ID NO: 49936 - RNA, 21 nt, Human herpesvirus 6
acuuagcagauauucuagauu

SEQ ID NO: 49937 - RNA, 23 nt, Human herpesvirus 6
aagaaaaacaggaacugcgguug

SEQ ID NO: 49938 - RNA, 22 nt, Human herpesvirus 6
aaucuggguuccugcuuaguua

SEQ ID NO: 49939 - RNA, 22 nt, Homo sapiens
auuacuuugcaccaaccuaaua

SEQ ID NO: 49940 - RNA, 22 nt, Homo sapiens
uggagcccuaguuccucauaac

SEQ ID NO: 49941 - RNA, 22 nt, Homo sapiens
agaacuguccauucagcaugaa

SEQ ID NO: 49942 - RNA, 17 nt, Homo sapiens
gucuuugguugaguuua

SEQ ID NO: 49943 - RNA, 22 nt, Homo sapiens
ugagaugaaagcagaaagacuu

SEQ ID NO: 49944 - RNA, 22 nt, Homo sapiens
acugagaucuuuaaauaaauaa

SEQ ID NO: 49945 - RNA, 22 nt, Homo sapiens
ugauuggagaacaaacugcaua

SEQ ID NO: 49946 - RNA, 22 nt, Homo sapiens
aucuuuggauacuugauauagu

SEQ ID NO: 49947 - RNA, 22 nt, Homo sapiens
caaugguuuuuuaguauaagua

SEQ ID NO: 49948 - RNA, 22 nt, Homo sapiens
uaucaguauggauucauggauu

SEQ ID NO: 49949 - RNA, 22 nt, Homo sapiens
acacuauugagguuuguuugca

SEQ ID NO: 49950 - RNA, 22 nt, Homo sapiens
guucucacuggacugugaaaau

SEQ ID NO: 49951 - RNA, 22 nt, Homo sapiens
auaaagacacuuggcaugauuu

SEQ ID NO: 49952 - RNA, 22 nt, Homo sapiens
ugagaucuuuuguggcugagaa

SEQ ID NO: 49953 - RNA, 22 nt, Homo sapiens
auagcagaauuuggucaagucu

SEQ ID NO: 49954 - RNA, 22 nt, Homo sapiens
uguggccuuuguuucaguuggg

SEQ ID NO: 49955 - RNA, 22 nt, Homo sapiens
uuuuaacagccaggggacggcc

SEQ ID NO: 49956 - RNA, 22 nt, Homo sapiens
uuccugagccuuguaucuagua

SEQ ID NO: 49957 - RNA, 19 nt, Homo sapiens
ugugaacaucacagagugu

SEQ ID NO: 49958 - RNA, 22 nt, Homo sapiens
cugugcauguuguccaauucuu

SEQ ID NO: 49959 - RNA, 22 nt, Homo sapiens
agacaagauggcuugagguuca

SEQ ID NO: 49960 - RNA, 22 nt, Homo sapiens
uucuuuggauaaaguuuuaugc

SEQ ID NO: 49961 - RNA, 22 nt, Homo sapiens
gaaugcagcagugacagggcug

SEQ ID NO: 49962 - RNA, 16 nt, Homo sapiens
uugaggcaugucucag

SEQ ID NO: 49963 - RNA, 22 nt, Homo sapiens
uuggaaauguguuugcauucag

SEQ ID NO: 49964 - RNA, 22 nt, Homo sapiens
augcaacuugaaauuuuccgga

SEQ ID NO: 49965 - RNA, 22 nt, Homo sapiens
auugcacuccauccugggcaau

SEQ ID NO: 49966 - RNA, 22 nt, Homo sapiens
auugcacuccagccuggggaac

SEQ ID NO: 49967 - RNA, 22 nt, Homo sapiens
auagcauaucccacaugucaga

SEQ ID NO: 49968 - RNA, 22 nt, Homo sapiens
uagugaauguuggcuauuaaua

SEQ ID NO: 49969 - RNA, 22 nt, Homo sapiens
ucacaaguguauagacaugucc

SEQ ID NO: 49970 - RNA, 22 nt, Homo sapiens
gauaaagauagcaauagggaca

SEQ ID NO: 49971 - RNA, 22 nt, Homo sapiens
uugcacuauuaguauagauguc

SEQ ID NO: 49972 - RNA, 22 nt, Homo sapiens
agcuggcuguggagaaaccccu

SEQ ID NO: 49973 - RNA, 22 nt, Homo sapiens
aagacuguaauccaucuugagu

SEQ ID NO: 49974 - RNA, 22 nt, Homo sapiens
cuacagcagcccaguccccgaa

SEQ ID NO: 49975 - RNA, 22 nt, Homo sapiens
uagcaggaaaggggucagaucu

SEQ ID NO: 49976 - RNA, 20 nt, Homo sapiens
uuggaaaugugaauugggag

SEQ ID NO: 49977 - RNA, 22 nt, Homo sapiens
cuggcagugcuuguuauccugg

SEQ ID NO: 49978 - RNA, 22 nt, Homo sapiens
aaaugcuuucuuggaccauuug

SEQ ID NO: 49979 - RNA, 22 nt, Homo sapiens
cacaguguuacugguaugaagu

SEQ ID NO: 49980 - RNA, 19 nt, Homo sapiens
cauugcacuccacccuggg

SEQ ID NO: 49981 - RNA, 22 nt, Homo sapiens
uucagguaguuuaacuguucca

SEQ ID NO: 49982 - RNA, 22 nt, Homo sapiens
gucucugguugcuuuuguacca

SEQ ID NO: 49983 - RNA, 20 nt, Homo sapiens
uucuauggugaugaguccug

SEQ ID NO: 49984 - RNA, 22 nt, Homo sapiens
gagaucacuguuuauauucucu

SEQ ID NO: 49985 - RNA, 22 nt, Homo sapiens
ggacaagaucuuccaccauuca

SEQ ID NO: 49986 - RNA, 18 nt, Homo sapiens
auucuacaggccuuuuga

SEQ ID NO: 49987 - RNA, 22 nt, Homo sapiens
uugcuuaggcuggagugcagug

SEQ ID NO: 49988 - RNA, 22 nt, Homo sapiens
uauggcuuuguucaacagccuc

SEQ ID NO: 49989 - RNA, 22 nt, Homo sapiens
aacagacugucacauaaaauug

SEQ ID NO: 49990 - RNA, 21 nt, Homo sapiens
ugaaugcuuuaaauauuagaa

SEQ ID NO: 49991 - RNA, 22 nt, Homo sapiens
uggaagauggaguuuuaucauu

SEQ ID NO: 49992 - RNA, 22 nt, Homo sapiens
uaagugcaugauuacaugcaua

SEQ ID NO: 49993 - RNA, 22 nt, Homo sapiens
uucagauugcauaccgaaagua

SEQ ID NO: 49994 - RNA, 22 nt, Homo sapiens
ucacaguccuguuuaggagagg

SEQ ID NO: 49995 - RNA, 22 nt, Homo sapiens
gucagugugauaucugcagggg

SEQ ID NO: 49996 - RNA, 22 nt, Homo sapiens
auauggcuaugugagcauacca

SEQ ID NO: 49997 - RNA, 22 nt, Homo sapiens
guaaucucagcuacucaggagg

SEQ ID NO: 49998 - RNA, 22 nt, Homo sapiens
auguaacugggacacaagccuc

SEQ ID NO: 49999 - RNA, 22 nt, Homo sapiens
auguccaugagcacauguauca

SEQ ID NO: 50000 - RNA, 22 nt, Homo sapiens
augaugcugagguuugggguau

SEQ ID NO: 50001 - RNA, 22 nt, Homo sapiens
uucagugucauuaacacaguag

SEQ ID NO: 50002 - RNA, 22 nt, Homo sapiens
acacuuucuagacaagggaaua

SEQ ID NO: 50003 - RNA, 22 nt, Homo sapiens
ucucuggauaucuacuuauguu

SEQ ID NO: 50004 - RNA, 23 nt, Homo sapiens
aaagacuagucaggugcaguggu

SEQ ID NO: 50005 - RNA, 22 nt, Homo sapiens
cauggcuuuauuuucagcuucu

SEQ ID NO: 50006 - RNA, 22 nt, Homo sapiens
augaacagagccuugagaaccu

SEQ ID NO: 50007 - RNA, 21 nt, Homo sapiens
uuuccuggagcguauggcuuc

SEQ ID NO: 50008 - RNA, 22 nt, Homo sapiens
ugauuuguuuagugccaaguuu

SEQ ID NO: 50009 - RNA, 22 nt, Homo sapiens
ugguucaguugcacaggcuguu

SEQ ID NO: 50010 - RNA, 22 nt, Homo sapiens
augugcaaagcacuguucagca

SEQ ID NO: 50011 - RNA, 23 nt, Homo sapiens
gaaguaauaaauggauucuuaac

SEQ ID NO: 50012 - RNA, 22 nt, Homo sapiens
gugagccaugauuuuaccacug

SEQ ID NO: 50013 - RNA, 17 nt, Homo sapiens
aaguggcuuguucacca

SEQ ID NO: 50014 - RNA, 22 nt, Homo sapiens
auuggcuuuugaaagucugcga

SEQ ID NO: 50015 - RNA, 22 nt, Homo sapiens
cuugguacucugugucccagcu

SEQ ID NO: 50016 - RNA, 22 nt, Homo sapiens
cuuugguuaauaggauauggca

SEQ ID NO: 50017 - RNA, 22 nt, Homo sapiens
uacaccauuugauucuuuaagc

SEQ ID NO: 50018 - RNA, 22 nt, Homo sapiens
ggcaagaacuucacucacuuuu

SEQ ID NO: 50019 - RNA, 22 nt, Homo sapiens
uagucacacacucaacuuuuca

SEQ ID NO: 50020 - RNA, 21 nt, Homo sapiens
uauggauuugccuauucugga

SEQ ID NO: 50021 - RNA, 22 nt, Homo sapiens
accugagacuaggcauuuuaua

SEQ ID NO: 50022 - RNA, 22 nt, Homo sapiens
aucuuuggugcaugauacuuug

SEQ ID NO: 50023 - RNA, 22 nt, Homo sapiens
cauggcuuuuauaacaagaaau

SEQ ID NO: 50024 - RNA, 22 nt, Homo sapiens
caguuacuuuugcaccaaccua

SEQ ID NO: 50025 - RNA, 18 nt, Homo sapiens
uuggacggagagucaaau

SEQ ID NO: 50026 - RNA, 22 nt, Homo sapiens
auggagacaaauaaaggagagu

SEQ ID NO: 50027 - RNA, 22 nt, Homo sapiens
ugaauagacacuaaagacugua

SEQ ID NO: 50028 - RNA, 22 nt, Homo sapiens
uauacagcaaguuacugugcug

SEQ ID NO: 50029 - RNA, 18 nt, Homo sapiens
ugaaacacauuuuuuccu

SEQ ID NO: 50030 - RNA, 22 nt, Homo sapiens
ccuucuuuuguaaggcugaaua

SEQ ID NO: 50031 - RNA, 22 nt, Homo sapiens
gucuguuugauccagaucaaaa

SEQ ID NO: 50032 - RNA, 22 nt, Homo sapiens
ugagaugagucucgcucuguca

SEQ ID NO: 50033 - RNA, 20 nt, Homo sapiens
ucugauugcaacugcaugag

SEQ ID NO: 50034 - RNA, 22 nt, Homo sapiens
aggcaagagugacuacgugaaa

SEQ ID NO: 50035 - RNA, 22 nt, Homo sapiens
uaaguucauucaugaaacuuag

SEQ ID NO: 50036 - RNA, 22 nt, Homo sapiens
caccugagcgggaugcucgccu

SEQ ID NO: 50037 - RNA, 22 nt, Homo sapiens
cacagugaacugguggguuuuu

SEQ ID NO: 50038 - RNA, 22 nt, Homo sapiens
ucuaugguuuauuuccaagugu

SEQ ID NO: 50039 - RNA, 22 nt, Homo sapiens
uucccagugccaggcacuggga

SEQ ID NO: 50040 - RNA, 22 nt, Homo sapiens
aaucacuuugcuacaaggcagu

SEQ ID NO: 50041 - RNA, 22 nt, Homo sapiens
auagcagaacagugucucacug

SEQ ID NO: 50042 - RNA, 19 nt, Homo sapiens
ugugacugguugucucgcu

SEQ ID NO: 50043 - RNA, 22 nt, Homo sapiens
ugugacucuggcacauggugag

SEQ ID NO: 50044 - RNA, 22 nt, Homo sapiens
uugacauaguuucugaaauaga

SEQ ID NO: 50045 - RNA, 22 nt, Homo sapiens
uggucuccuuuguacccugggc

SEQ ID NO: 50046 - RNA, 22 nt, Homo sapiens
uaucacuuugauaguuuaaaug

SEQ ID NO: 50047 - RNA, 22 nt, Homo sapiens
guggaaaucucugugugacuua

SEQ ID NO: 50048 - RNA, 22 nt, Homo sapiens
uuugaguuugaggugcugauga

SEQ ID NO: 50049 - RNA, 21 nt, Homo sapiens
uaaaacuguaacuuuguccug

SEQ ID NO: 50050 - RNA, 22 nt, Homo sapiens
ugucagaaucugagacgacaac

SEQ ID NO: 50051 - RNA, 22 nt, Homo sapiens
uugaggucagagguucgagacc

SEQ ID NO: 50052 - RNA, 22 nt, Homo sapiens
gagcucauuguugcuaaagaga

SEQ ID NO: 50053 - RNA, 22 nt, Homo sapiens
cucuuuggaugccuuaggguua

SEQ ID NO: 50054 - RNA, 19 nt, Homo sapiens
agaguauuguuacuucucu

SEQ ID NO: 50055 - RNA, 22 nt, Homo sapiens
ugucucccuucccauuaggaag

SEQ ID NO: 50056 - RNA, 22 nt, Homo sapiens
uuggaaacauuuaugguaacag

SEQ ID NO: 50057 - RNA, 22 nt, Homo sapiens
aaugcuguguuauuucaugacc

SEQ ID NO: 50058 - RNA, 22 nt, Homo sapiens
uaugagacugguuaauuuuugu

SEQ ID NO: 50059 - RNA, 21 nt, Homo sapiens
cuuugguagaguuuuuagggu

SEQ ID NO: 50060 - RNA, 23 nt, Homo sapiens
ggaaacauccagucuuucaccau

SEQ ID NO: 50061 - RNA, 23 nt, Homo sapiens
caugaacuaguuugcagccauga

SEQ ID NO: 50062 - RNA, 22 nt, Homo sapiens
cauugcacuccagccuuggcaa

SEQ ID NO: 50063 - RNA, 22 nt, Homo sapiens
ugagaucaguuguuauaauucu

SEQ ID NO: 50064 - RNA, 20 nt, Homo sapiens
cauugcacuccagccugcug

SEQ ID NO: 50065 - RNA, 22 nt, Homo sapiens
auucuauaguccuaggauuggg

SEQ ID NO: 50066 - RNA, 23 nt, Homo sapiens
uguauacacccugugcaucuggg

SEQ ID NO: 50067 - RNA, 22 nt, Homo sapiens
augacauugaugcucuggcugg

SEQ ID NO: 50068 - RNA, 22 nt, Homo sapiens
augugcuuauagguguauguuu

SEQ ID NO: 50069 - RNA, 22 nt, Homo sapiens
gcugcuuuugaugacaaaaaca

SEQ ID NO: 50070 - RNA, 22 nt, Homo sapiens
auccugaagcuuuacugaauuc

SEQ ID NO: 50071 - RNA, 22 nt, Homo sapiens
ugagaccuuucauuucucagug

SEQ ID NO: 50072 - RNA, 22 nt, Homo sapiens
acacagugucuguguauuuaaa

SEQ ID NO: 50073 - RNA, 22 nt, Homo sapiens
cacuguggauggaacuauguga

SEQ ID NO: 50074 - RNA, 22 nt, Homo sapiens
uugagggaggcagggcuugucu

SEQ ID NO: 50075 - RNA, 22 nt, Homo sapiens
auaugcaaauccauagagacag

SEQ ID NO: 50076 - RNA, 22 nt, Homo sapiens
ugaaaucuaaaauguuccaaga

SEQ ID NO: 50077 - RNA, 22 nt, Homo sapiens
aaguugguguaugagacagaag

SEQ ID NO: 50078 - RNA, 22 nt, Homo sapiens
cuggaauguuccuaaagauuca

SEQ ID NO: 50079 - RNA, 22 nt, Homo sapiens
auggacuuuuuguucagugucu

SEQ ID NO: 50080 - RNA, 22 nt, Homo sapiens
augaggcacugcgcccuacuga

SEQ ID NO: 50081 - RNA, 22 nt, Homo sapiens
cauacaagcuacaaucacaaag

SEQ ID NO: 50082 - RNA, 22 nt, Homo sapiens
aucccaguucagccucugacac

SEQ ID NO: 50083 - RNA, 22 nt, Homo sapiens
uaccacugccgagaaaacagau

SEQ ID NO: 50084 - RNA, 22 nt, Homo sapiens
cguugcacuccagccugggcaa

SEQ ID NO: 50085 - RNA, 22 nt, Homo sapiens
auccauugucuaaugcuaagau

SEQ ID NO: 50086 - RNA, 22 nt, Homo sapiens
uggucaguugaguccuugccaa

SEQ ID NO: 50087 - RNA, 22 nt, Homo sapiens
aaaguucugcguuagggcuaaa

SEQ ID NO: 50088 - RNA, 22 nt, Homo sapiens
auggcaguuuauucuaaaucaa

SEQ ID NO: 50089 - RNA, 22 nt, Homo sapiens
cacuagagaauagguaguucug

SEQ ID NO: 50090 - RNA, 22 nt, Homo sapiens
uucuguguuuaggucacggcua

SEQ ID NO: 50091 - RNA, 18 nt, Homo sapiens
uguggcuguuuuccaaua

SEQ ID NO: 50092 - RNA, 22 nt, Homo sapiens
auggauauuuuuugaacauaga

SEQ ID NO: 50093 - RNA, 22 nt, Homo sapiens
ugagaccugaucuugguacugc

SEQ ID NO: 50094 - RNA, 22 nt, Homo sapiens
guccaagacuaggaguuggcag

SEQ ID NO: 50095 - RNA, 22 nt, Homo sapiens
uggagugagaacuucaaugaug

SEQ ID NO: 50096 - RNA, 22 nt, Homo sapiens
agaauguuuuagaccaauacaa

SEQ ID NO: 50097 - RNA, 22 nt, Homo sapiens
uuugcuuguguaaaaaucugga

SEQ ID NO: 50098 - RNA, 22 nt, Homo sapiens
auugcacuccagccugagcaaa

SEQ ID NO: 50099 - RNA, 22 nt, Homo sapiens
ugagcugagauuaagcugcugc

SEQ ID NO: 50100 - RNA, 22 nt, Homo sapiens
uguuucuacugucucuguagua

SEQ ID NO: 50101 - RNA, 22 nt, Homo sapiens
uuauggccauucuuguaggagu

SEQ ID NO: 50102 - RNA, 22 nt, Homo sapiens
auuguacuccagccugggcaaa

SEQ ID NO: 50103 - RNA, 22 nt, Homo sapiens
uuaugacauugacaguuuuuag

SEQ ID NO: 50104 - RNA, 22 nt, Homo sapiens
ugagcacuguacuuuaucaggu

SEQ ID NO: 50105 - RNA, 22 nt, Homo sapiens
gugaggcacugcugcuuuccag

SEQ ID NO: 50106 - RNA, 22 nt, Homo sapiens
caguuacuugacacaaccaauu

SEQ ID NO: 50107 - RNA, 22 nt, Homo sapiens
uuggaaaugguaaaggguuaau

SEQ ID NO: 50108 - RNA, 22 nt, Homo sapiens
uugagauggagucucacugugu

SEQ ID NO: 50109 - RNA, 22 nt, Homo sapiens
gaauaaacuagagaggacugag

SEQ ID NO: 50110 - RNA, 22 nt, Homo sapiens
cauugcccuccagccugggcaa

SEQ ID NO: 50111 - RNA, 22 nt, Homo sapiens
uaccagcauuucucuuuaagua

SEQ ID NO: 50112 - RNA, 22 nt, Homo sapiens
cucaguagaaaauacauggacu

SEQ ID NO: 50113 - RNA, 22 nt, Homo sapiens
uuugugagguggauagauugca

SEQ ID NO: 50114 - RNA, 23 nt, Homo sapiens
ggaaugaaaccugguuaugauau

SEQ ID NO: 50115 - RNA, 22 nt, Homo sapiens
auuccacuuagugacucauuug

SEQ ID NO: 50116 - RNA, 22 nt, Homo sapiens
ugacuaaaacugaguuucauua

SEQ ID NO: 50117 - RNA, 22 nt, Homo sapiens
uuugaguaggcuuauauuuugg

SEQ ID NO: 50118 - RNA, 22 nt, Homo sapiens
uaucacuuuuccagcccagcuu

SEQ ID NO: 50119 - RNA, 22 nt, Homo sapiens
uugagauggaaucucgcuuugu

SEQ ID NO: 50120 - RNA, 22 nt, Homo sapiens
gaaagauuuccugagcuagaaa

SEQ ID NO: 50121 - RNA, 22 nt, Homo sapiens
uucucuggucagaggggagguu

SEQ ID NO: 50122 - RNA, 22 nt, Homo sapiens
uugcuuagucaugaaucacuga

SEQ ID NO: 50123 - RNA, 22 nt, Homo sapiens
uugacuuuuauucacucugcua

SEQ ID NO: 50124 - RNA, 22 nt, Homo sapiens
cugucucagugaauugguuuua

SEQ ID NO: 50125 - RNA, 22 nt, Homo sapiens
aaacugcuuuccaugguggcug

SEQ ID NO: 50126 - RNA, 22 nt, Homo sapiens
augagacuagaagagaauaaua

SEQ ID NO: 50127 - RNA, 22 nt, Homo sapiens
uuaguucccucauucuugacuu

SEQ ID NO: 50128 - RNA, 21 nt, Homo sapiens
guggaaauggaauuuacuaau

SEQ ID NO: 50129 - RNA, 22 nt, Homo sapiens
uucaauaugucauuggcaggca

SEQ ID NO: 50130 - RNA, 22 nt, Homo sapiens
ccuucauucauuaauuuagccc

SEQ ID NO: 50131 - RNA, 22 nt, Homo sapiens
uggaacacauaaauagcauagu

SEQ ID NO: 50132 - RNA, 20 nt, Homo sapiens
uggaaucugaagaucucagu

SEQ ID NO: 50133 - RNA, 22 nt, Homo sapiens
uugggagugucucuggacugca

SEQ ID NO: 50134 - RNA, 22 nt, Homo sapiens
ugucagaaucuagaggcugcua

SEQ ID NO: 50135 - RNA, 22 nt, Homo sapiens
ggagaugaaaugagcuacuuaa

SEQ ID NO: 50136 - RNA, 22 nt, Homo sapiens
cucagugucuggggccccaggg

SEQ ID NO: 50137 - RNA, 22 nt, Homo sapiens
uauuguacauauccucccuuca

SEQ ID NO: 50138 - RNA, 22 nt, Homo sapiens
uugagauggagucucacuccuu

SEQ ID NO: 50139 - RNA, 22 nt, Homo sapiens
gagcucaccuuaccucuggagc

SEQ ID NO: 50140 - RNA, 22 nt, Homo sapiens
ugcagaaucccuucagauccga

SEQ ID NO: 50141 - RNA, 22 nt, Homo sapiens
gaaacugcauuucuaacaagcu

SEQ ID NO: 50142 - RNA, 22 nt, Homo sapiens
cugacuaguuuuaaugcagauu

SEQ ID NO: 50143 - RNA, 22 nt, Homo sapiens
uaagacugccccagacagcaag

SEQ ID NO: 50144 - RNA, 22 nt, Homo sapiens
aucccuagaaaaaucagcacau

SEQ ID NO: 50145 - RNA, 18 nt, Homo sapiens
auugcacaccagccuggg

SEQ ID NO: 50146 - RNA, 22 nt, Homo sapiens
ggcagaauugcugaggaugcua

SEQ ID NO: 50147 - RNA, 22 nt, Homo sapiens
gcugaaauguuuaauuugggag

SEQ ID NO: 50148 - RNA, 22 nt, Homo sapiens
uugacaaggagccauugcaucu

SEQ ID NO: 50149 - RNA, 22 nt, Homo sapiens
auugcacuccagccugggcagc

SEQ ID NO: 50150 - RNA, 22 nt, Homo sapiens
ugagcucagcuaguugaggugu

SEQ ID NO: 50151 - RNA, 22 nt, Homo sapiens
ucacaauucucaauuugugaaa

SEQ ID NO: 50152 - RNA, 22 nt, Homo sapiens
cuguucaggaggcauuuggugg

SEQ ID NO: 50153 - RNA, 22 nt, Homo sapiens
ggucagaaagacaggcauucag

SEQ ID NO: 50154 - RNA, 22 nt, Homo sapiens
caugccacuguggacaaagaca

SEQ ID NO: 50155 - RNA, 22 nt, Homo sapiens
augcaacugcacuccagccugg

SEQ ID NO: 50156 - RNA, 22 nt, Homo sapiens
ugaaauuuuuuauucguuggcu

SEQ ID NO: 50157 - RNA, 22 nt, Homo sapiens
gcuguguugugcccagcaucau

SEQ ID NO: 50158 - RNA, 22 nt, Homo sapiens
ccugucuugauuaaauuacuua

SEQ ID NO: 50159 - RNA, 22 nt, Homo sapiens
uuucuacagggcuugccaggua

SEQ ID NO: 50160 - RNA, 22 nt, Homo sapiens
ugccauugcacuccagccuggg

SEQ ID NO: 50161 - RNA, 22 nt, Homo sapiens
ucugucuuguccucacccuaga

SEQ ID NO: 50162 - RNA, 22 nt, Homo sapiens
uucuaugguuuuuaugguguua

SEQ ID NO: 50163 - RNA, 22 nt, Homo sapiens
augacugucagggcagucauug

SEQ ID NO: 50164 - RNA, 22 nt, Homo sapiens
aggaagugugcaauuaauuucu

SEQ ID NO: 50165 - RNA, 21 nt, Homo sapiens
auugcacuccagccugggcga

SEQ ID NO: 50166 - RNA, 21 nt, Homo sapiens
acaucagaguugugaagguag

SEQ ID NO: 50167 - RNA, 22 nt, Homo sapiens
gcugagaucucuugccugaacu

SEQ ID NO: 50168 - RNA, 22 nt, Homo sapiens
uaugacauaguccuuaacccuc

SEQ ID NO: 50169 - RNA, 22 nt, Homo sapiens
cuucaucugguuugugaacuuu

SEQ ID NO: 50170 - RNA, 22 nt, Homo sapiens
ugcacuguggucugagagacag

SEQ ID NO: 50171 - RNA, 22 nt, Homo sapiens
auugcacuccagccugggcuag

SEQ ID NO: 50172 - RNA, 22 nt, Homo sapiens
ugagaucaagguuaauauaauc

SEQ ID NO: 50173 - RNA, 22 nt, Homo sapiens
aacacuguuuccagucaugauc

SEQ ID NO: 50174 - RNA, 23 nt, Homo sapiens
augugugcuuggagagcaggaug

SEQ ID NO: 50175 - RNA, 22 nt, Homo sapiens
ggagaauugcuuggacccggga

SEQ ID NO: 50176 - RNA, 22 nt, Homo sapiens
auggcacuccagccugggcaac

SEQ ID NO: 50177 - RNA, 22 nt, Homo sapiens
agaagaacauagggugacugaa

SEQ ID NO: 50178 - RNA, 22 nt, Homo sapiens
aagugaguaauacgucaguugu

SEQ ID NO: 50179 - RNA, 22 nt, Homo sapiens
ucugucuuugccuaaguuuguc

SEQ ID NO: 50180 - RNA, 22 nt, Homo sapiens
augacuuuucugaaaaccacca

SEQ ID NO: 50181 - RNA, 19 nt, Homo sapiens
ugcaaagucuuuuccuauu

SEQ ID NO: 50182 - RNA, 22 nt, Homo sapiens
auggcaguguaugauuauauua

SEQ ID NO: 50183 - RNA, 22 nt, Homo sapiens
guauacaugucaaaacucacau

SEQ ID NO: 50184 - RNA, 22 nt, Homo sapiens
cauugcacugcagcccgggcaa

SEQ ID NO: 50185 - RNA, 18 nt, Homo sapiens
uugcacuccugccugggu

SEQ ID NO: 50186 - RNA, 22 nt, Homo sapiens
ucacuagaucaagggagagaaa

SEQ ID NO: 50187 - RNA, 22 nt, Homo sapiens
augaggcaggaaaggcguaucu

SEQ ID NO: 50188 - RNA, 22 nt, Homo sapiens
auaaagccaugagcuugagaug

SEQ ID NO: 50189 - RNA, 22 nt, Homo sapiens
cauugcacuuagacaacuuuug

SEQ ID NO: 50190 - RNA, 22 nt, Homo sapiens
uuugcuugaggucuagcuaccc

SEQ ID NO: 50191 - RNA, 22 nt, Homo sapiens
cugagcucauuucuuuugcuac

SEQ ID NO: 50192 - RNA, 22 nt, Homo sapiens
ggaucacuugagaccaggaguu

SEQ ID NO: 50193 - RNA, 22 nt, Homo sapiens
uauggcuucuuuaaauugaggu

SEQ ID NO: 50194 - RNA, 22 nt, Homo sapiens
uuugugauugcacacucaagau

SEQ ID NO: 50195 - RNA, 22 nt, Homo sapiens
aauaucacaguggguguacacc

SEQ ID NO: 50196 - RNA, 22 nt, Homo sapiens
ugcucaguuuaaaacuuuugag

SEQ ID NO: 50197 - RNA, 22 nt, Homo sapiens
ugagaugaguugcgcucugucg

SEQ ID NO: 50198 - RNA, 22 nt, Homo sapiens
aucuacagccagucugguuugu

SEQ ID NO: 50199 - RNA, 22 nt, Homo sapiens
ugagcaagaucuuuauaauuag

SEQ ID NO: 50200 - RNA, 21 nt, Homo sapiens
agcugguuuccacagugugcu

SEQ ID NO: 50201 - RNA, 22 nt, Homo sapiens
gucuuuggaaaaaaugucuguu

SEQ ID NO: 50202 - RNA, 22 nt, Homo sapiens
agcugguuuaauaugcugucug

SEQ ID NO: 50203 - RNA, 22 nt, Homo sapiens
auaaccuauggaucuacucggg

SEQ ID NO: 50204 - RNA, 18 nt, Homo sapiens
gacuuggaguuuacagug

SEQ ID NO: 50205 - RNA, 22 nt, Homo sapiens
uucccuguaucuucugccaugu

SEQ ID NO: 50206 - RNA, 22 nt, Homo sapiens
ugugucacugcacuccagccug

SEQ ID NO: 50207 - RNA, 22 nt, Homo sapiens
ugagaugaggucucgcucuguc

SEQ ID NO: 50208 - RNA, 22 nt, Homo sapiens
aggugguuuugaugagcaggua

SEQ ID NO: 50209 - RNA, 22 nt, Homo sapiens
uccauuugucuauguuucuguu

SEQ ID NO: 50210 - RNA, 22 nt, Homo sapiens
auacaucugccauguuggugug

SEQ ID NO: 50211 - RNA, 22 nt, Homo sapiens
acaauguauauuuuacuguagg

SEQ ID NO: 50212 - RNA, 22 nt, Homo sapiens
aucugugaaugaaguuauuuug

SEQ ID NO: 50213 - RNA, 17 nt, Homo sapiens
ucuaauaauaugcauuu

SEQ ID NO: 50214 - RNA, 22 nt, Homo sapiens
uucuuugguacaagggccgacc

SEQ ID NO: 50215 - RNA, 22 nt, Homo sapiens
gucauugcacuccagccuggac

SEQ ID NO: 50216 - RNA, 22 nt, Homo sapiens
ugaaggcaggagggagaaaagu

SEQ ID NO: 50217 - RNA, 22 nt, Homo sapiens
cuagaagcauauucagaacaga

SEQ ID NO: 50218 - RNA, 22 nt, Homo sapiens
acccuguaggacuauucuaauc

SEQ ID NO: 50219 - RNA, 22 nt, Homo sapiens
ugauauuuuugauccuuaaguu

SEQ ID NO: 50220 - RNA, 22 nt, Homo sapiens
aagucaaggagagaagcuucag

SEQ ID NO: 50221 - RNA, 22 nt, Homo sapiens
ucugucuugugguuugagugcc

SEQ ID NO: 50222 - RNA, 22 nt, Homo sapiens
cuuuugugauucuucaguugcu

SEQ ID NO: 50223 - RNA, 22 nt, Homo sapiens
uaaagcauguaauuagguuaga

SEQ ID NO: 50224 - RNA, 22 nt, Homo sapiens
guagcagaauaucagauaauuu

SEQ ID NO: 50225 - RNA, 22 nt, Homo sapiens
ugagaugaguucucgcucuguc

SEQ ID NO: 50226 - RNA, 20 nt, Homo sapiens
cauugcccuccagccugggc

SEQ ID NO: 50227 - RNA, 22 nt, Homo sapiens
auaugcuuauuagcaagaaaua

SEQ ID NO: 50228 - RNA, 22 nt, Homo sapiens
acuguauagauggaguugauuu

SEQ ID NO: 50229 - RNA, 22 nt, Homo sapiens
acauaaagaagcaggacauugu

SEQ ID NO: 50230 - RNA, 22 nt, Homo sapiens
uagauuguaauaugcagaaugg

SEQ ID NO: 50231 - RNA, 22 nt, Homo sapiens
aaggcaauuuguugugaggauu

SEQ ID NO: 50232 - RNA, 22 nt, Homo sapiens
uggcucauuucuaaacccagcu

SEQ ID NO: 50233 - RNA, 22 nt, Homo sapiens
ucagugccucaguuuuuaaaga

SEQ ID NO: 50234 - RNA, 19 nt, Homo sapiens
uuuuggaaaugugaacagc

SEQ ID NO: 50235 - RNA, 22 nt, Homo sapiens
auggcagugagucucuaguauu

SEQ ID NO: 50236 - RNA, 22 nt, Homo sapiens
uucauaguguuuccuuccagug

SEQ ID NO: 50237 - RNA, 22 nt, Homo sapiens
uuugcauaauaagauuagggug

SEQ ID NO: 50238 - RNA, 22 nt, Homo sapiens
ugagaugaggucucacucuguu

SEQ ID NO: 50239 - RNA, 22 nt, Homo sapiens
uaagagagcuccaucuuuuccu

SEQ ID NO: 50240 - RNA, 22 nt, Homo sapiens
uuggaagacaaugcugauucuc

SEQ ID NO: 50241 - RNA, 22 nt, Homo sapiens
ucuuuggugaauggucauccag

SEQ ID NO: 50242 - RNA, 22 nt, Homo sapiens
uuaauacugcuuaacuuuagga

SEQ ID NO: 50243 - RNA, 19 nt, Homo sapiens
aauggcuuuuccuguuccc

SEQ ID NO: 50244 - RNA, 22 nt, Homo sapiens
uaaagugcugagaugaggcugg

SEQ ID NO: 50245 - RNA, 20 nt, Homo sapiens
aaacucugucuucuuuauca

SEQ ID NO: 50246 - RNA, 22 nt, Homo sapiens
auuccacuuauaugagguaucu

SEQ ID NO: 50247 - RNA, 22 nt, Homo sapiens
cucaguguuaaggccaccucug

SEQ ID NO: 50248 - RNA, 22 nt, Homo sapiens
cauugcaauccagccugggcaa

SEQ ID NO: 50249 - RNA, 22 nt, Homo sapiens
aagugucuuaccgggagggagu

SEQ ID NO: 50250 - RNA, 22 nt, Homo sapiens
uuguguuuuuaguagggaaggg

SEQ ID NO: 50251 - RNA, 21 nt, Homo sapiens
ugcaagaaucaggaagcugcc

SEQ ID NO: 50252 - RNA, 22 nt, Homo sapiens
guucaagugauucuacugccuc

SEQ ID NO: 50253 - RNA, 22 nt, Homo sapiens
uugagauggagucuugcucugu

SEQ ID NO: 50254 - RNA, 22 nt, Homo sapiens
acucagagauuagcacauguuu

SEQ ID NO: 50255 - RNA, 22 nt, Homo sapiens
uuggcaguaucuacuacagcua

SEQ ID NO: 50256 - RNA, 22 nt, Homo sapiens
aauuaguuggcugggugcggug

SEQ ID NO: 50257 - RNA, 20 nt, Homo sapiens
uucuacagucacaggaagau

SEQ ID NO: 50258 - RNA, 22 nt, Homo sapiens
aauauagcuauguacaugucca

SEQ ID NO: 50259 - RNA, 22 nt, Homo sapiens
cuuuguaugucaugacaacugu

SEQ ID NO: 50260 - RNA, 22 nt, Homo sapiens
ucauauugcgguucauugacuu

SEQ ID NO: 50261 - RNA, 22 nt, Homo sapiens
cugagugcaagugauccuccca

SEQ ID NO: 50262 - RNA, 21 nt, Homo sapiens
uucaucuggccguauuccagg

SEQ ID NO: 50263 - RNA, 22 nt, Homo sapiens
auugcacaucugcacuacagcc

SEQ ID NO: 50264 - RNA, 19 nt, Homo sapiens
ugcagcaauguaaaagaca

SEQ ID NO: 50265 - RNA, 22 nt, Homo sapiens
uuauugcacuccagccugggua

SEQ ID NO: 50266 - RNA, 22 nt, Homo sapiens
gucuguuuggggaccuguggcc

SEQ ID NO: 50267 - RNA, 22 nt, Homo sapiens
ggaaugugugucaugcuuuugc

SEQ ID NO: 50268 - RNA, 20 nt, Homo sapiens
agcuggguguguuggugcau

SEQ ID NO: 50269 - RNA, 22 nt, Homo sapiens
auggcuuugggcugcucugccc

SEQ ID NO: 50270 - RNA, 23 nt, Homo sapiens
aucagguuguagaauguguuugc

SEQ ID NO: 50271 - RNA, 22 nt, Homo sapiens
agaugauguuuacugagcauca

SEQ ID NO: 50272 - RNA, 21 nt, Homo sapiens
uggucaguuuucucacuagga

SEQ ID NO: 50273 - RNA, 22 nt, Homo sapiens
cucuuugaguuccuccuggugu

SEQ ID NO: 50274 - RNA, 22 nt, Homo sapiens
uuuugcaaauuccaguggccau

SEQ ID NO: 50275 - RNA, 22 nt, Homo sapiens
gagaugaugagauguucacagu

SEQ ID NO: 50276 - RNA, 22 nt, Homo sapiens
ugagaugaagucucacucuguc

SEQ ID NO: 50277 - RNA, 22 nt, Homo sapiens
aucuuuggugaguucuuugguc

SEQ ID NO: 50278 - RNA, 23 nt, Homo sapiens
agccugguuucccugcuucuccc

SEQ ID NO: 50279 - RNA, 22 nt, Homo sapiens
ugacaagaacuuuccauaguaa

SEQ ID NO: 50280 - RNA, 22 nt, Homo sapiens
uaaggcucuuguuauuuugagg

SEQ ID NO: 50281 - RNA, 22 nt, Homo sapiens
aucacuuugcucuccagugugg

SEQ ID NO: 50282 - RNA, 22 nt, Homo sapiens
ugagaugauuuaauggagccca

SEQ ID NO: 50283 - RNA, 22 nt, Homo sapiens
cugagacacucuuaucugcaua

SEQ ID NO: 50284 - RNA, 22 nt, Homo sapiens
gucagugucuuugcagcucaga

SEQ ID NO: 50285 - RNA, 22 nt, Homo sapiens
cauggcuuguauaagauucuca

SEQ ID NO: 50286 - RNA, 22 nt, Homo sapiens
cauugcacugcauucugggcaa

SEQ ID NO: 50287 - RNA, 22 nt, Homo sapiens
uggcuuuguaagguuucauuuu

SEQ ID NO: 50288 - RNA, 20 nt, Homo sapiens
uagcacacauguagaauagu

SEQ ID NO: 50289 - RNA, 22 nt, Homo sapiens
gucucccagccuacauauuucu

SEQ ID NO: 50290 - RNA, 21 nt, Homo sapiens
auuccacuuuuccuucaggga

SEQ ID NO: 50291 - RNA, 22 nt, Homo sapiens
uugagcaaaacauuaauauuag

SEQ ID NO: 50292 - RNA, 21 nt, Homo sapiens
uuaucccagugucucugcagg

SEQ ID NO: 50293 - RNA, 22 nt, Homo sapiens
ugagccaaugauuugaauagag

SEQ ID NO: 50294 - RNA, 22 nt, Homo sapiens
aaauaguagcugaaugagggaa

SEQ ID NO: 50295 - RNA, 22 nt, Homo sapiens
uugaguccauucgaugcugauu

SEQ ID NO: 50296 - RNA, 22 nt, Homo sapiens
uuugccaauauuuuauugagga

SEQ ID NO: 50297 - RNA, 22 nt, Homo sapiens
cauugcacuccaucuugggcaa

SEQ ID NO: 50298 - RNA, 22 nt, Homo sapiens
acuggcuuauuucacuuagcau

SEQ ID NO: 50299 - RNA, 22 nt, Homo sapiens
ugcaaugugaaauaagcacauc

SEQ ID NO: 50300 - RNA, 22 nt, Homo sapiens
uuauagcuaacaucugugaaaa

SEQ ID NO: 50301 - RNA, 22 nt, Homo sapiens
acaguaugcuuuaaacuuuguu

SEQ ID NO: 50302 - RNA, 22 nt, Homo sapiens
acacacgugcauguaugcguau

SEQ ID NO: 50303 - RNA, 22 nt, Homo sapiens
gucagugucuuaacagagauua

SEQ ID NO: 50304 - RNA, 22 nt, Homo sapiens
agcaagaugaaguugagcuagg

SEQ ID NO: 50305 - RNA, 22 nt, Homo sapiens
uguagcaaaucgauacuauugg

SEQ ID NO: 50306 - RNA, 22 nt, Homo sapiens
augacaagaguguucagggaga

SEQ ID NO: 50307 - RNA, 22 nt, Homo sapiens
cugucuagagggcacaugaugc

SEQ ID NO: 50308 - RNA, 22 nt, Homo sapiens
uauuugguuggugcaaaaguaa

SEQ ID NO: 50309 - RNA, 20 nt, Homo sapiens
ugagaacauguggcauuugg

SEQ ID NO: 50310 - RNA, 22 nt, Homo sapiens
aguaaauuucugugcuuucaua

SEQ ID NO: 50311 - RNA, 22 nt, Homo sapiens
auggaaaugaagggcuggcccu

SEQ ID NO: 50312 - RNA, 22 nt, Homo sapiens
ucugucuuugucaggaccagag

SEQ ID NO: 50313 - RNA, 22 nt, Homo sapiens
ggcaacauggugaaacucuguc

SEQ ID NO: 50314 - RNA, 22 nt, Homo sapiens
cauugcacuccauccuuggcaa

SEQ ID NO: 50315 - RNA, 22 nt, Homo sapiens
cauugcacuccagcuugggcaa

SEQ ID NO: 50316 - RNA, 19 nt, Homo sapiens
ugagaugaagacagggguu

SEQ ID NO: 50317 - RNA, 22 nt, Homo sapiens
uucuacagugacugcagccaua

SEQ ID NO: 50318 - RNA, 22 nt, Homo sapiens
ugagaugagggaagccuaggca

SEQ ID NO: 50319 - RNA, 22 nt, Homo sapiens
auuguacuccagccugggcaag

SEQ ID NO: 50320 - RNA, 22 nt, Homo sapiens
gcuuuguuaaaacacagccaca

SEQ ID NO: 50321 - RNA, 22 nt, Homo sapiens
cauuuuacuuuccagacgugga

SEQ ID NO: 50322 - RNA, 22 nt, Homo sapiens
aucauccagccccagaagggag

SEQ ID NO: 50323 - RNA, 22 nt, Homo sapiens
ucaaauguuuguuuaaggcuua

SEQ ID NO: 50324 - RNA, 22 nt, Homo sapiens
uuugugugugauuauaaaaggu

SEQ ID NO: 50325 - RNA, 22 nt, Homo sapiens
ucauacaguaguccucacuugu

SEQ ID NO: 50326 - RNA, 22 nt, Homo sapiens
uacccucuggauacccuuguuc

SEQ ID NO: 50327 - RNA, 22 nt, Homo sapiens
ugagaugagagaaugcuugccu

SEQ ID NO: 50328 - RNA, 22 nt, Homo sapiens
uggaaguuaaaugacucuuucu

SEQ ID NO: 50329 - RNA, 22 nt, Homo sapiens
acuuuuugauggggagaacauu

SEQ ID NO: 50330 - RNA, 22 nt, Homo sapiens
aagugguuuuuacaaagacaga

SEQ ID NO: 50331 - RNA, 22 nt, Homo sapiens
auggaacauuauagauguaaaa

SEQ ID NO: 50332 - RNA, 20 nt, Homo sapiens
uggaaauuaaccuuucaggu

SEQ ID NO: 50333 - RNA, 22 nt, Homo sapiens
auggcucuuauuauuuugaggu

SEQ ID NO: 50334 - RNA, 22 nt, Homo sapiens
ggacaagagacugggacacuga

SEQ ID NO: 50335 - RNA, 22 nt, Homo sapiens
uuauucagcaccugcuguguuc

SEQ ID NO: 50336 - RNA, 22 nt, Homo sapiens
uucagcuacuugggaggcugaa

SEQ ID NO: 50337 - RNA, 20 nt, Homo sapiens
ugagaacaugugguauuugg

SEQ ID NO: 50338 - RNA, 22 nt, Homo sapiens
aaagagaucuaugggcacuaug

SEQ ID NO: 50339 - RNA, 22 nt, Homo sapiens
ugucaauauguaauaacugaau

SEQ ID NO: 50340 - RNA, 18 nt, Homo sapiens
auugcacuccugccuggg

SEQ ID NO: 50341 - RNA, 22 nt, Homo sapiens
cuuccaaguggggcacgugcca

SEQ ID NO: 50342 - RNA, 22 nt, Homo sapiens
uucucugggacauaggucgggu

SEQ ID NO: 50343 - RNA, 22 nt, Homo sapiens
uccagaguggugaugcuggggc

SEQ ID NO: 50344 - RNA, 20 nt, Homo sapiens
uaugacacugucauaaaaau

SEQ ID NO: 50345 - RNA, 22 nt, Homo sapiens
uagcauaauuuguagaaaauca

SEQ ID NO: 50346 - RNA, 23 nt, Homo sapiens
uuaguaaacucaaugacaccaca

SEQ ID NO: 50347 - RNA, 22 nt, Homo sapiens
ugagaugaucaaaguauaggcu

SEQ ID NO: 50348 - RNA, 22 nt, Homo sapiens
ugugagacugguucugaaccca

SEQ ID NO: 50349 - RNA, 22 nt, Homo sapiens
cuuugguucuguuuauaugcug

SEQ ID NO: 50350 - RNA, 22 nt, Homo sapiens
auacauguuucauguuggugug

SEQ ID NO: 50351 - RNA, 22 nt, Homo sapiens
uugacagaccuuggucauaucc

SEQ ID NO: 50352 - RNA, 22 nt, Homo sapiens
uccuguaaucccagcuaccaga

SEQ ID NO: 50353 - RNA, 22 nt, Homo sapiens
ucucugagaaaaguuucuccca

SEQ ID NO: 50354 - RNA, 20 nt, Homo sapiens
uggagugaagguucuggacc

SEQ ID NO: 50355 - RNA, 22 nt, Homo sapiens
auugcacuccagccuugggcaa

SEQ ID NO: 50356 - RNA, 20 nt, Homo sapiens
agcugguuuuaugaaucuuu

SEQ ID NO: 50357 - RNA, 22 nt, Homo sapiens
auacaaguuauuugaacugcgg

SEQ ID NO: 50358 - RNA, 22 nt, Homo sapiens
uuugacaaugugugcuuguauu

SEQ ID NO: 50359 - RNA, 22 nt, Homo sapiens
ugccaaaaugggcuuuauaccg

SEQ ID NO: 50360 - RNA, 22 nt, Homo sapiens
aagagaugaagguccugacugu

SEQ ID NO: 50361 - RNA, 22 nt, Homo sapiens
uaaguacuuuacagacauuauc

SEQ ID NO: 50362 - RNA, 22 nt, Homo sapiens
ggagaugauuaugaaucacuua

SEQ ID NO: 50363 - RNA, 22 nt, Homo sapiens
uuugugcaaacuaggauugcga

SEQ ID NO: 50364 - RNA, 22 nt, Homo sapiens
uucaagaauuaaaguggcuuuu

SEQ ID NO: 50365 - RNA, 22 nt, Homo sapiens
uguaacaggaggaaaaugugaa

SEQ ID NO: 50366 - RNA, 18 nt, Homo sapiens
acauucagcuugaagaua

SEQ ID NO: 50367 - RNA, 22 nt, Homo sapiens
cauugcacuccagccugccugg

SEQ ID NO: 50368 - RNA, 22 nt, Homo sapiens
acacuguagcugagggcaugcg

SEQ ID NO: 50369 - RNA, 22 nt, Homo sapiens
aaguuaauguuuaagacuccua

SEQ ID NO: 50370 - RNA, 22 nt, Homo sapiens
uucuacuucauuaggaggauug

SEQ ID NO: 50371 - RNA, 22 nt, Homo sapiens
uugagauggaguuucgcucuug

SEQ ID NO: 50372 - RNA, 20 nt, Homo sapiens
cguugcacuccagccugggc

SEQ ID NO: 50373 - RNA, 22 nt, Homo sapiens
uuaacacugccauugauacugu

SEQ ID NO: 50374 - RNA, 22 nt, Homo sapiens
auugcacuccagucugggcaac

SEQ ID NO: 50375 - RNA, 22 nt, Homo sapiens
uugcuccucugccaggaccugu

SEQ ID NO: 50376 - RNA, 22 nt, Homo sapiens
ugugccacugcacuccugccug

SEQ ID NO: 50377 - RNA, 22 nt, Homo sapiens
uggaagaugggaccucaguuuu

SEQ ID NO: 50378 - RNA, 23 nt, Homo sapiens
aauaucacaguggguguacaccc

SEQ ID NO: 50379 - RNA, 22 nt, Homo sapiens
uugagaagugucuguucauguc

SEQ ID NO: 50380 - RNA, 22 nt, Homo sapiens
uugagccaaggauugucuuucc

SEQ ID NO: 50381 - RNA, 22 nt, Homo sapiens
ucacugugcaugaaggaugcug

SEQ ID NO: 50382 - RNA, 22 nt, Homo sapiens
augugcaagaucauuaaagcuc

SEQ ID NO: 50383 - RNA, 22 nt, Homo sapiens
ugugucuccugaaaauucacau

SEQ ID NO: 50384 - RNA, 22 nt, Homo sapiens
agugcaauggugccaucauagc

SEQ ID NO: 50385 - RNA, 22 nt, Homo sapiens
uuggaacacauguuuuucuacc

SEQ ID NO: 50386 - RNA, 22 nt, Homo sapiens
ucuaaguaguagcuggucagaa

SEQ ID NO: 50387 - RNA, 22 nt, Homo sapiens
uuguuuuggagaugagcuaaaa

SEQ ID NO: 50388 - RNA, 22 nt, Homo sapiens
uugguucucuuagccaucuuaa

SEQ ID NO: 50389 - RNA, 22 nt, Homo sapiens
ugugcaaggcucucaaccugug

SEQ ID NO: 50390 - RNA, 22 nt, Homo sapiens
auggcaguuucagcuauaguuu

SEQ ID NO: 50391 - RNA, 22 nt, Homo sapiens
uuaccugagaaggugacauuug

SEQ ID NO: 50392 - RNA, 22 nt, Homo sapiens
ucucuugguugaacaguuugga

SEQ ID NO: 50393 - RNA, 22 nt, Homo sapiens
ugagcugagacaauaaguuuuu

SEQ ID NO: 50394 - RNA, 22 nt, Homo sapiens
gucucccagccuacaucuuucu

SEQ ID NO: 50395 - RNA, 22 nt, Homo sapiens
cugaaagagcauguaacacagu

SEQ ID NO: 50396 - RNA, 22 nt, Homo sapiens
uugcauauucucugaggcagga

SEQ ID NO: 50397 - RNA, 22 nt, Homo sapiens
guacacauacauauaugugugu

SEQ ID NO: 50398 - RNA, 22 nt, Homo sapiens
auguccauggaaucuguagcaa

SEQ ID NO: 50399 - RNA, 22 nt, Homo sapiens
cauugcacuccagccuggccaa

SEQ ID NO: 50400 - RNA, 22 nt, Homo sapiens
ugagcugagaucaugcuauugu

SEQ ID NO: 50401 - RNA, 22 nt, Homo sapiens
gguaaaucuucacuaagacuga

SEQ ID NO: 50402 - RNA, 22 nt, Homo sapiens
gaugagaugagcauuugaauug

SEQ ID NO: 50403 - RNA, 22 nt, Homo sapiens
uaaucucagcuacucaggaggc

SEQ ID NO: 50404 - RNA, 22 nt, Homo sapiens
uaguucauuuuucuugcuuaga

SEQ ID NO: 50405 - RNA, 22 nt, Homo sapiens
uaaguauagguaacagaagcaa

SEQ ID NO: 50406 - RNA, 21 nt, Homo sapiens
ugaacacuggacugagugucc

SEQ ID NO: 50407 - RNA, 22 nt, Homo sapiens
uucaguagucuccauagaaccg

SEQ ID NO: 50408 - RNA, 22 nt, Homo sapiens
uugcacuccggccuggguaaca

SEQ ID NO: 50409 - RNA, 22 nt, Homo sapiens
gaucacuuugaugccaggaacu

SEQ ID NO: 50410 - RNA, 22 nt, Homo sapiens
gggaaauguaaagucauaagau

SEQ ID NO: 50411 - RNA, 22 nt, Homo sapiens
ugagaugagggcugcacucaaa

SEQ ID NO: 50412 - RNA, 22 nt, Homo sapiens
uuugugaggugauggauauguc

SEQ ID NO: 50413 - RNA, 22 nt, Homo sapiens
uuggaagauuacuuaguuuucu

SEQ ID NO: 50414 - RNA, 22 nt, Homo sapiens
gaggcaagaguaguuaaguuag

SEQ ID NO: 50415 - RNA, 22 nt, Homo sapiens
uguggaguguaugugacagaga

SEQ ID NO: 50416 - RNA, 22 nt, Homo sapiens
guacaguuuucaguguucacug

SEQ ID NO: 50417 - RNA, 22 nt, Homo sapiens
agaaugugaacaucuugaaagu

SEQ ID NO: 50418 - RNA, 22 nt, Homo sapiens
ggaaagaucagcuaaauguaag

SEQ ID NO: 50419 - RNA, 22 nt, Homo sapiens
gacuugaagaaucuaagggagg

SEQ ID NO: 50420 - RNA, 22 nt, Homo sapiens
cauugcacuccagccucggcaa

SEQ ID NO: 50421 - RNA, 19 nt, Homo sapiens
ugagauuguaugaggagau

SEQ ID NO: 50422 - RNA, 22 nt, Homo sapiens
guggacaugaauuuuggaggca

SEQ ID NO: 50423 - RNA, 22 nt, Homo sapiens
ugagaugauagauauguuaauu

SEQ ID NO: 50424 - RNA, 20 nt, Homo sapiens
auuccacuuguuugagguac

SEQ ID NO: 50425 - RNA, 22 nt, Homo sapiens
acacaguguuuauugugguuag

SEQ ID NO: 50426 - RNA, 22 nt, Homo sapiens
ugagccaugggguaaaugugau

SEQ ID NO: 50427 - RNA, 19 nt, Homo sapiens
uuccugagaacaagggcuu

SEQ ID NO: 50428 - RNA, 22 nt, Homo sapiens
uuucuauguugaccagucuaga

SEQ ID NO: 50429 - RNA, 22 nt, Homo sapiens
cauugcacuccagccuggcaac

SEQ ID NO: 50430 - RNA, 22 nt, Homo sapiens
cauugcacuccagcucugggcg

SEQ ID NO: 50431 - RNA, 22 nt, Homo sapiens
ucuggaauguaaaguuuauggg

SEQ ID NO: 50432 - RNA, 22 nt, Homo sapiens
ccauugaacaugaaggaaugug

SEQ ID NO: 50433 - RNA, 22 nt, Homo sapiens
cuggcagucugccucuucacug

SEQ ID NO: 50434 - RNA, 22 nt, Homo sapiens
ucaagugcauugauucaguauu

SEQ ID NO: 50435 - RNA, 22 nt, Homo sapiens
auagaagcugccaacguuucag

SEQ ID NO: 50436 - RNA, 22 nt, Homo sapiens
auugcacuccagccuaggcaac

SEQ ID NO: 50437 - RNA, 22 nt, Homo sapiens
aagugccauguggaugggcccu

SEQ ID NO: 50438 - RNA, 18 nt, Homo sapiens
cuaagacacuuggcagag

SEQ ID NO: 50439 - RNA, 22 nt, Homo sapiens
cuggcucugggcuaaagaaaua

SEQ ID NO: 50440 - RNA, 22 nt, Homo sapiens
auggccugaugcaccuguccca

SEQ ID NO: 50441 - RNA, 22 nt, Homo sapiens
ugcaauuuaaugugucccaauu

SEQ ID NO: 50442 - RNA, 22 nt, Homo sapiens
ugagcuguuugaagaagcauuu

SEQ ID NO: 50443 - RNA, 22 nt, Homo sapiens
uacuguacugcaguucugcaaa

SEQ ID NO: 50444 - RNA, 22 nt, Homo sapiens
cauugcacuccagccuagccaa

SEQ ID NO: 50445 - RNA, 22 nt, Homo sapiens
uucagacugggugaagagggua

SEQ ID NO: 50446 - RNA, 22 nt, Homo sapiens
ucagagucuagaucacucacug

SEQ ID NO: 50447 - RNA, 22 nt, Homo sapiens
gacacagugaagucucuacuug

SEQ ID NO: 50448 - RNA, 22 nt, Homo sapiens
aaguaaacauuuuguacaauaa

SEQ ID NO: 50449 - RNA, 22 nt, Homo sapiens
guggaaugcaguguugauucaa

SEQ ID NO: 50450 - RNA, 22 nt, Homo sapiens
auugcacuccagccuggccaac

SEQ ID NO: 50451 - RNA, 22 nt, Homo sapiens
aucccuguaguaauauucuagc

SEQ ID NO: 50452 - RNA, 23 nt, Homo sapiens
uugaggcauguaccaucaauauc

SEQ ID NO: 50453 - RNA, 22 nt, Homo sapiens
auuccacuuccacuaguuucuc

SEQ ID NO: 50454 - RNA, 22 nt, Homo sapiens
uacaaaucuagguuuguuacug

SEQ ID NO: 50455 - RNA, 22 nt, Homo sapiens
uucuuagucauguaauagucca

SEQ ID NO: 50456 - RNA, 21 nt, Homo sapiens
uauggcuuagucaguguuucc

SEQ ID NO: 50457 - RNA, 22 nt, Homo sapiens
uauggcuuuguuaacauuuucu

SEQ ID NO: 50458 - RNA, 17 nt, Homo sapiens
acagugucuaugaaaug

SEQ ID NO: 50459 - RNA, 19 nt, Homo sapiens
ucccugagucuuagcuuga

SEQ ID NO: 50460 - RNA, 22 nt, Homo sapiens
agcugauggucuuguaugaugu

SEQ ID NO: 50461 - RNA, 18 nt, Homo sapiens
aaacugcuuccuuggccu

SEQ ID NO: 50462 - RNA, 22 nt, Homo sapiens
uuagcacauuuccagcacaugg

SEQ ID NO: 50463 - RNA, 22 nt, Homo sapiens
auggaaacauaagaguauagau

SEQ ID NO: 50464 - RNA, 21 nt, Homo sapiens
uuuagguagcuuuucugggag

SEQ ID NO: 50465 - RNA, 22 nt, Homo sapiens
uuggaaaccucugcagguguuu

SEQ ID NO: 50466 - RNA, 22 nt, Homo sapiens
uggccuguaacgcugucucagc

SEQ ID NO: 50467 - RNA, 22 nt, Homo sapiens
guggcagugugaggauccugcu

SEQ ID NO: 50468 - RNA, 22 nt, Homo sapiens
ugacaaguaaacagucagcacc

SEQ ID NO: 50469 - RNA, 22 nt, Homo sapiens
ucuugcuuguuguucccuucau

SEQ ID NO: 50470 - RNA, 22 nt, Homo sapiens
uuaagggaggagcuucaagaug

SEQ ID NO: 50471 - RNA, 22 nt, Homo sapiens
aaguauguaucaagucauacuu

SEQ ID NO: 50472 - RNA, 22 nt, Homo sapiens
cuuugguuuacuuggugcuagu

SEQ ID NO: 50473 - RNA, 22 nt, Homo sapiens
uaagacacuuaaaauguuacau

SEQ ID NO: 50474 - RNA, 19 nt, Homo sapiens
ucuuuagucacauuuuuau

SEQ ID NO: 50475 - RNA, 23 nt, Homo sapiens
uuuggcauuccagaaauuuucau

SEQ ID NO: 50476 - RNA, 22 nt, Homo sapiens
uuguaaucaacacaucauuggg

SEQ ID NO: 50477 - RNA, 22 nt, Homo sapiens
uuuagcaaagcaauuuacacca

SEQ ID NO: 50478 - RNA, 22 nt, Homo sapiens
uggaaaacaugcacauuggauu

SEQ ID NO: 50479 - RNA, 22 nt, Homo sapiens
uacaguguuuugguauuccaca

SEQ ID NO: 50480 - RNA, 22 nt, Homo sapiens
guguuauugagaaauagggugu

SEQ ID NO: 50481 - RNA, 22 nt, Homo sapiens
aaggagcuaagagaucauacau

SEQ ID NO: 50482 - RNA, 22 nt, Homo sapiens
agugcacuccagccugggcaac

SEQ ID NO: 50483 - RNA, 22 nt, Homo sapiens
auugcauaaacacauuucuuau

SEQ ID NO: 50484 - RNA, 22 nt, Homo sapiens
gccaacauggcgcuccauucuu

SEQ ID NO: 50485 - RNA, 22 nt, Homo sapiens
uuauacuacuauaaagagguag

SEQ ID NO: 50486 - RNA, 22 nt, Homo sapiens
ugagaucaugucauuugcacuc

SEQ ID NO: 50487 - RNA, 22 nt, Homo sapiens
uugaguccccacacuggguccc

SEQ ID NO: 50488 - RNA, 22 nt, Homo sapiens
aaugcuguucuuugcuuaaguu

SEQ ID NO: 50489 - RNA, 22 nt, Homo sapiens
caugaaagugagaaacuccugg

SEQ ID NO: 50490 - RNA, 22 nt, Homo sapiens
ucuuucacuuagcaugauguuu

SEQ ID NO: 50491 - RNA, 22 nt, Homo sapiens
aucgcacuccauccugggcaac

SEQ ID NO: 50492 - RNA, 22 nt, Homo sapiens
auauucacagguaucagagauu

SEQ ID NO: 50493 - RNA, 19 nt, Homo sapiens
cucuuuggugucucuucuu

SEQ ID NO: 50494 - RNA, 22 nt, Homo sapiens
gucuuuggaaagacaaaguuca

SEQ ID NO: 50495 - RNA, 22 nt, Homo sapiens
uugacauguaaguacucuauag

SEQ ID NO: 50496 - RNA, 22 nt, Homo sapiens
ugccaacugguuucuuuuaguu

SEQ ID NO: 50497 - RNA, 22 nt, Homo sapiens
gcauaaagcuaauaagacgaag

SEQ ID NO: 50498 - RNA, 22 nt, Homo sapiens
ugagaugaagugauguaaaaca

SEQ ID NO: 50499 - RNA, 22 nt, Homo sapiens
uuggacuucucaaggcaauaaa

SEQ ID NO: 50500 - RNA, 22 nt, Homo sapiens
agugaaaugucaccuuuuagga

SEQ ID NO: 50501 - RNA, 19 nt, Homo sapiens
uucucugguuguacuaccc

SEQ ID NO: 50502 - RNA, 19 nt, Homo sapiens
gugguauuaccuuuugauu

SEQ ID NO: 50503 - RNA, 22 nt, Homo sapiens
uauggcuuuuaacugucguaug

SEQ ID NO: 50504 - RNA, 22 nt, Homo sapiens
gugugacuagucaugccugaau

SEQ ID NO: 50505 - RNA, 22 nt, Homo sapiens
ucauaucauuagaucuacugua

SEQ ID NO: 50506 - RNA, 23 nt, Homo sapiens
ucacacuuaagagaaaugcagcu

SEQ ID NO: 50507 - RNA, 22 nt, Homo sapiens
augagcugauuuccuuaccaua

SEQ ID NO: 50508 - RNA, 20 nt, Homo sapiens
auuccacuuauaugaggucc

SEQ ID NO: 50509 - RNA, 22 nt, Homo sapiens
uggcuuuuauuauguugaggua

SEQ ID NO: 50510 - RNA, 22 nt, Homo sapiens
uacaagcaggaaaugguauaug

SEQ ID NO: 50511 - RNA, 22 nt, Homo sapiens
uuacacaguaggucccuaguaa

SEQ ID NO: 50512 - RNA, 22 nt, Homo sapiens
ugugccuacugauagagccaag

SEQ ID NO: 50513 - RNA, 22 nt, Homo sapiens
guugguuuccuguaacuggaca

SEQ ID NO: 50514 - RNA, 22 nt, Homo sapiens
uuugaaaguaauuugguuggug

SEQ ID NO: 50515 - RNA, 22 nt, Homo sapiens
uaagacuguuggcaauuuuugc

SEQ ID NO: 50516 - RNA, 22 nt, Homo sapiens
aaccuacauucuuaacuguugc

SEQ ID NO: 50517 - RNA, 22 nt, Homo sapiens
caucgcacuccagccugggcaa

SEQ ID NO: 50518 - RNA, 22 nt, Homo sapiens
ugagaugauaucuuauuguaau

SEQ ID NO: 50519 - RNA, 22 nt, Homo sapiens
acauucagcuguuguuucaaug

SEQ ID NO: 50520 - RNA, 22 nt, Homo sapiens
gagcuguuuuucacuagaccaa

SEQ ID NO: 50521 - RNA, 22 nt, Homo sapiens
ugcuuaguguugacccucugcc

SEQ ID NO: 50522 - RNA, 22 nt, Homo sapiens
augucaacauagacaguagagu

SEQ ID NO: 50523 - RNA, 22 nt, Homo sapiens
aaaagcauucagagugcugggc

SEQ ID NO: 50524 - RNA, 22 nt, Homo sapiens
aucuuuggucaucacagcuaga

SEQ ID NO: 50525 - RNA, 22 nt, Homo sapiens
uuaaaaguauaggccuggcaua

SEQ ID NO: 50526 - RNA, 22 nt, Homo sapiens
uuggcagugguucugacggacc

SEQ ID NO: 50527 - RNA, 22 nt, Homo sapiens
uauggcuucuauaaggaagcuu

SEQ ID NO: 50528 - RNA, 22 nt, Homo sapiens
uauggcuuuuauuauguuguag

SEQ ID NO: 50529 - RNA, 22 nt, Homo sapiens
cauaaagauggaggaggccagg

SEQ ID NO: 50530 - RNA, 22 nt, Homo sapiens
ugagcccauuguccugguuuau

SEQ ID NO: 50531 - RNA, 22 nt, Homo sapiens
uuugccaaucagaggcaucuug

SEQ ID NO: 50532 - RNA, 22 nt, Homo sapiens
aaucacuuuggcaccaaccuaa

SEQ ID NO: 50533 - RNA, 22 nt, Homo sapiens
cauggcuuuaagcaacaccaag

SEQ ID NO: 50534 - RNA, 22 nt, Homo sapiens
uuggaaacaccuggugagguua

SEQ ID NO: 50535 - RNA, 22 nt, Homo sapiens
ugugaaacauggauagaacugg

SEQ ID NO: 50536 - RNA, 22 nt, Homo sapiens
aauggcuucuuauugugguuca

SEQ ID NO: 50537 - RNA, 19 nt, Homo sapiens
cauggcuuauaauuuuaau

SEQ ID NO: 50538 - RNA, 22 nt, Homo sapiens
uugacuagaccaucuuucuaga

SEQ ID NO: 50539 - RNA, 22 nt, Homo sapiens
gucuuuaguugaaacauguggu

SEQ ID NO: 50540 - RNA, 22 nt, Homo sapiens
uggaagacaaguguuagcaugg

SEQ ID NO: 50541 - RNA, 22 nt, Homo sapiens
uugagauggagucucgcucugu

SEQ ID NO: 50542 - RNA, 22 nt, Homo sapiens
cauugcacuccagcuugggcga

SEQ ID NO: 50543 - RNA, 22 nt, Homo sapiens
guggaagaccagacuuuccaac

SEQ ID NO: 50544 - RNA, 22 nt, Homo sapiens
uauggcuuuucacuuaaguccu

SEQ ID NO: 50545 - RNA, 22 nt, Homo sapiens
cauggcuuucacaguaaagccu

SEQ ID NO: 50546 - RNA, 22 nt, Homo sapiens
uucuuuggaaacaguacuaauu

SEQ ID NO: 50547 - RNA, 22 nt, Homo sapiens
auugcacaccagucugggcaaa

SEQ ID NO: 50548 - RNA, 22 nt, Homo sapiens
uaucagcagagucauacuucaa

SEQ ID NO: 50549 - RNA, 22 nt, Homo sapiens
cauuaguugaagugcagggaga

SEQ ID NO: 50550 - RNA, 22 nt, Homo sapiens
ugaggugaggguaucaaaugcu

SEQ ID NO: 50551 - RNA, 22 nt, Homo sapiens
gagagcauuaagccaucaucau

SEQ ID NO: 50552 - RNA, 22 nt, Homo sapiens
uuucuacagugaacgauuucua

SEQ ID NO: 50553 - RNA, 22 nt, Homo sapiens
uauuguccacuuugcacugugu

SEQ ID NO: 50554 - RNA, 22 nt, Homo sapiens
uuggaaacgucaccuuuuccuu

SEQ ID NO: 50555 - RNA, 21 nt, Homo sapiens
uggagugaagaguuuauugac

SEQ ID NO: 50556 - RNA, 22 nt, Homo sapiens
uucauacaguggcugcacucca

SEQ ID NO: 50557 - RNA, 21 nt, Homo sapiens
uucuaaguaaauguuggacau

SEQ ID NO: 50558 - RNA, 22 nt, Homo sapiens
uugagauggagucuugcucuug

SEQ ID NO: 50559 - RNA, 22 nt, Homo sapiens
ugagaugaagcuagaagaaugg

SEQ ID NO: 50560 - RNA, 22 nt, Homo sapiens
cuucuguuaguucugauaacuu

SEQ ID NO: 50561 - RNA, 22 nt, Homo sapiens
auaucaaggccauuuucuaaau

SEQ ID NO: 50562 - RNA, 22 nt, Homo sapiens
aaccuguaaccauaugaucagu

SEQ ID NO: 50563 - RNA, 22 nt, Homo sapiens
uuuggucacugccgccgccagc

SEQ ID NO: 50564 - RNA, 22 nt, Homo sapiens
uuugugcaugaagagggggugc

SEQ ID NO: 50565 - RNA, 22 nt, Homo sapiens
ugagaugaacuugauuguuuua

SEQ ID NO: 50566 - RNA, 22 nt, Homo sapiens
aucacuuucuauuucugugcca

SEQ ID NO: 50567 - RNA, 22 nt, Homo sapiens
cugaggcacggcgaccuuaagu

SEQ ID NO: 50568 - RNA, 22 nt, Homo sapiens
guggaauggaaugauuguguau

SEQ ID NO: 50569 - RNA, 22 nt, Homo sapiens
uggugagaaaagaugucuuugu

SEQ ID NO: 50570 - RNA, 22 nt, Homo sapiens
agagaugaagauggggcucccg

SEQ ID NO: 50571 - RNA, 22 nt, Homo sapiens
ugagaugaagucuugcucuguu

SEQ ID NO: 50572 - RNA, 22 nt, Homo sapiens
uauggaaaucuuaccuuauggu

SEQ ID NO: 50573 - RNA, 22 nt, Homo sapiens
uuaaguaaucagagaagagaac

SEQ ID NO: 50574 - RNA, 22 nt, Homo sapiens
ggcaacaugccgaaaccacguc

SEQ ID NO: 50575 - RNA, 19 nt, Homo sapiens
uagguacauucaagucucc

SEQ ID NO: 50576 - RNA, 22 nt, Homo sapiens
uugagcaccaugccuggccaug

SEQ ID NO: 50577 - RNA, 22 nt, Homo sapiens
augugacuuuuuccugugccuu

SEQ ID NO: 50578 - RNA, 22 nt, Homo sapiens
cauugcacuccagccuaggcaa

SEQ ID NO: 50579 - RNA, 22 nt, Homo sapiens
auggcaguuucacucugggauu

SEQ ID NO: 50580 - RNA, 22 nt, Homo sapiens
agaaugugaccuuauuuggaga

SEQ ID NO: 50581 - RNA, 22 nt, Homo sapiens
cuacucugugguguauuugcau

SEQ ID NO: 50582 - RNA, 22 nt, Homo sapiens
gagaaccuccagcaagguagua

SEQ ID NO: 50583 - RNA, 22 nt, Homo sapiens
uguuacagugacuaauguuuua

SEQ ID NO: 50584 - RNA, 22 nt, Homo sapiens
ucccugaaaauuagcauuuuaa

SEQ ID NO: 50585 - RNA, 19 nt, Homo sapiens
uaucacuucccuggaaaca

SEQ ID NO: 50586 - RNA, 22 nt, Homo sapiens
uggagugaaaacacacuaaucu

SEQ ID NO: 50587 - RNA, 22 nt, Homo sapiens
auggcucuuauuauuugaggua

SEQ ID NO: 50588 - RNA, 22 nt, Homo sapiens
agcugguuuauuucuauauccu

SEQ ID NO: 50589 - RNA, 22 nt, Homo sapiens
ugagaugaugggauaagagggc

SEQ ID NO: 50590 - RNA, 22 nt, Homo sapiens
aauggcuuuuaauauccauaau

SEQ ID NO: 50591 - RNA, 22 nt, Homo sapiens
ugagaucagaaggauuucucug

SEQ ID NO: 50592 - RNA, 22 nt, Homo sapiens
uacagucauaaugccuagugac

SEQ ID NO: 50593 - RNA, 22 nt, Homo sapiens
cccagaguucuuaaauacugag

SEQ ID NO: 50594 - RNA, 20 nt, Homo sapiens
uaagccacacagucuaaggu

SEQ ID NO: 50595 - RNA, 22 nt, Homo sapiens
cuuuacaguuggacucacgagg

SEQ ID NO: 50596 - RNA, 22 nt, Homo sapiens
acacauuagcaagugcuguuau

SEQ ID NO: 50597 - RNA, 22 nt, Homo sapiens
ugugggaggugcuaauguaaau

SEQ ID NO: 50598 - RNA, 22 nt, Homo sapiens
uugcacucuccagccucggcaa

SEQ ID NO: 50599 - RNA, 22 nt, Homo sapiens
ugauuugucucucagcccuacu

SEQ ID NO: 50600 - RNA, 22 nt, Homo sapiens
agagaccuguaaaguucaggca

SEQ ID NO: 50601 - RNA, 22 nt, Homo sapiens
uugagauggaguuuugcucuug

SEQ ID NO: 50602 - RNA, 22 nt, Homo sapiens
guaacacucuaaagggaugcac

SEQ ID NO: 50603 - RNA, 22 nt, Homo sapiens
auggcagugucuagggguguuu

SEQ ID NO: 50604 - RNA, 22 nt, Homo sapiens
uugagauguaguuucacuccug

SEQ ID NO: 50605 - RNA, 19 nt, Homo sapiens
uaugcaacuuauagugcug

SEQ ID NO: 50606 - RNA, 22 nt, Homo sapiens
cuggaaacaucuuaggaaugca

SEQ ID NO: 50607 - RNA, 22 nt, Homo sapiens
uguagcuuuugagauuuauauu

SEQ ID NO: 50608 - RNA, 22 nt, Homo sapiens
acugaucaauguuaaggcuuau

SEQ ID NO: 50609 - RNA, 22 nt, Homo sapiens
gucuuggagacauugccauuga

SEQ ID NO: 50610 - RNA, 20 nt, Homo sapiens
uaugacaaagccuagugagu

SEQ ID NO: 50611 - RNA, 22 nt, Homo sapiens
uuugguugcauucacauauuuc

SEQ ID NO: 50612 - RNA, 22 nt, Homo sapiens
cauugcacucuagccucggcaa

SEQ ID NO: 50613 - RNA, 22 nt, Homo sapiens
gggaauguagcaaaucugcaau

SEQ ID NO: 50614 - RNA, 22 nt, Homo sapiens
cuggaauauuagcuggucuuaa

SEQ ID NO: 50615 - RNA, 22 nt, Homo sapiens
cucauggagaacaucugcuagg

SEQ ID NO: 50616 - RNA, 22 nt, Homo sapiens
cucagugucuggcacacagaaa

SEQ ID NO: 50617 - RNA, 22 nt, Homo sapiens
agauguuguucaucugauuguu

SEQ ID NO: 50618 - RNA, 22 nt, Homo sapiens
aauggcuuucagcuuuucccca

SEQ ID NO: 50619 - RNA, 22 nt, Homo sapiens
uuggcagucugaggcacagacu

SEQ ID NO: 50620 - RNA, 22 nt, Homo sapiens
auugcacugcagccugggcaac

SEQ ID NO: 50621 - RNA, 22 nt, Homo sapiens
gugcuuuguuguggcaguggca

SEQ ID NO: 50622 - RNA, 22 nt, Homo sapiens
augucuuucauagagacccaga

SEQ ID NO: 50623 - RNA, 22 nt, Homo sapiens
caucacuuugccuccgucucua

SEQ ID NO: 50624 - RNA, 20 nt, Homo sapiens
agguagauagaugauagaua

SEQ ID NO: 50625 - RNA, 22 nt, Homo sapiens
aucuuuggcgggaauaucacag

SEQ ID NO: 50626 - RNA, 20 nt, Homo sapiens
uugaggucaggaguuuggga

SEQ ID NO: 50627 - RNA, 21 nt, Homo sapiens
uuaaguaauuacccaacucuc

SEQ ID NO: 50628 - RNA, 22 nt, Homo sapiens
cauugcaugccagccugggcaa

SEQ ID NO: 50629 - RNA, 22 nt, Homo sapiens
auggcuuuaagagugucugaau

SEQ ID NO: 50630 - RNA, 22 nt, Homo sapiens
uugagauggaguuucgcucuuu

SEQ ID NO: 50631 - RNA, 22 nt, Homo sapiens
guggcaguuuuaaauaugaaaa

SEQ ID NO: 50632 - RNA, 22 nt, Homo sapiens
uugcacagugguuuagagccug

SEQ ID NO: 50633 - RNA, 18 nt, Homo sapiens
ggaaaacuuuucuaagua

SEQ ID NO: 50634 - RNA, 17 nt, Homo sapiens
ugagcuaagauuacccc

SEQ ID NO: 50635 - RNA, 22 nt, Homo sapiens
cagagagcuugcccuuguauau

SEQ ID NO: 50636 - RNA, 22 nt, Homo sapiens
uugcacauguugaaccagcaaa

SEQ ID NO: 50637 - RNA, 22 nt, Homo sapiens
uuuugcaguuacagagagugag

SEQ ID NO: 50638 - RNA, 22 nt, Homo sapiens
ugagaucugauaggccuggguu

SEQ ID NO: 50639 - RNA, 22 nt, Homo sapiens
uacaaguauuuuuauuagugcc

SEQ ID NO: 50640 - RNA, 22 nt, Homo sapiens
auggcaguuuggucucugugcu

SEQ ID NO: 50641 - RNA, 22 nt, Homo sapiens
uagaccaauuggcauauaguaa

SEQ ID NO: 50642 - RNA, 22 nt, Homo sapiens
ucacuuugacggccaacuucua

SEQ ID NO: 50643 - RNA, 19 nt, Homo sapiens
auugcacuccaaccugggu

SEQ ID NO: 50644 - RNA, 22 nt, Homo sapiens
ucuauguuuuugcuaguagugu

SEQ ID NO: 50645 - RNA, 22 nt, Homo sapiens
ucuugguugaaaauucauaaua

SEQ ID NO: 50646 - RNA, 22 nt, Homo sapiens
uuucauggaggcauuuuagauu

SEQ ID NO: 50647 - RNA, 22 nt, Homo sapiens
ccagucuuggugucuguagcac

SEQ ID NO: 50648 - RNA, 22 nt, Homo sapiens
uauggcuucuuauucuuucccg

SEQ ID NO: 50649 - RNA, 22 nt, Homo sapiens
cucauggagaaccucugcuagg

SEQ ID NO: 50650 - RNA, 22 nt, Homo sapiens
auuguacuccagccugggcagc

SEQ ID NO: 50651 - RNA, 22 nt, Homo sapiens
ugcauggauguuugaacacacu

SEQ ID NO: 50652 - RNA, 22 nt, Homo sapiens
cucaguguuucagcugcucaga

SEQ ID NO: 50653 - RNA, 18 nt, Homo sapiens
aaacagugucucuuucug

SEQ ID NO: 50654 - RNA, 22 nt, Homo sapiens
gagcucauuaaaaauguagaau

SEQ ID NO: 50655 - RNA, 22 nt, Homo sapiens
uuggcagugcccgaugcugggg

SEQ ID NO: 50656 - RNA, 22 nt, Homo sapiens
uugagauggagucucgcucuuu

SEQ ID NO: 50657 - RNA, 22 nt, Homo sapiens
ugacaagaaagcgucuucuuuu

SEQ ID NO: 50658 - RNA, 22 nt, Homo sapiens
auacaagcaguccaacuccaua

SEQ ID NO: 50659 - RNA, 22 nt, Homo sapiens
ugagcugagaaaugcagcagcu

SEQ ID NO: 50660 - RNA, 22 nt, Homo sapiens
caugcacugaguccaccucugg

SEQ ID NO: 50661 - RNA, 22 nt, Homo sapiens
gggcaacauugaguacccugaa

SEQ ID NO: 50662 - RNA, 22 nt, Homo sapiens
uugcauauguugaaccaagcgu

SEQ ID NO: 50663 - RNA, 22 nt, Homo sapiens
agagaugauuaacauuuuggua

SEQ ID NO: 50664 - RNA, 20 nt, Homo sapiens
ugagcucaugacauuuuucu

SEQ ID NO: 50665 - RNA, 22 nt, Homo sapiens
uuuccaagaugcuuacuuucuc

SEQ ID NO: 50666 - RNA, 22 nt, Homo sapiens
uauuugguagcuauuuugcagu

SEQ ID NO: 50667 - RNA, 22 nt, Homo sapiens
aucccugugauccaaucacuuc

SEQ ID NO: 50668 - RNA, 22 nt, Homo sapiens
ugagaugaguugcuggcucuga

SEQ ID NO: 50669 - RNA, 22 nt, Homo sapiens
uuuuauguuuguucccugccaa

SEQ ID NO: 50670 - RNA, 22 nt, Homo sapiens
uagcuguuggugggaagucaga

SEQ ID NO: 50671 - RNA, 22 nt, Homo sapiens
cugggaugugacuguugccccc

SEQ ID NO: 50672 - RNA, 22 nt, Homo sapiens
ugcaaauguuaggugucauuau

SEQ ID NO: 50673 - RNA, 22 nt, Homo sapiens
ucuacagccaguucaggaagaa

SEQ ID NO: 50674 - RNA, 22 nt, Homo sapiens
uuggacuucuaacugacaugga

SEQ ID NO: 50675 - RNA, 22 nt, Homo sapiens
gauacaccauuuucuagcuauu

SEQ ID NO: 50676 - RNA, 22 nt, Homo sapiens
cuggcaguguuucuugugggcu

SEQ ID NO: 50677 - RNA, 22 nt, Homo sapiens
uuaguucauugugacuggacuc

SEQ ID NO: 50678 - RNA, 22 nt, Homo sapiens
uugcugagucuuucuagguugc

SEQ ID NO: 50679 - RNA, 22 nt, Homo sapiens
cugagcuagaccacuuggcucc

SEQ ID NO: 50680 - RNA, 22 nt, Homo sapiens
ugagaucuuggaggcuuuguga

SEQ ID NO: 50681 - RNA, 22 nt, Homo sapiens
cuaauacaguuguccaagcugg

SEQ ID NO: 50682 - RNA, 22 nt, Homo sapiens
uuggucaggcuaaucucgaacg

SEQ ID NO: 50683 - RNA, 18 nt, Homo sapiens
guaaauguaucuauugcc

SEQ ID NO: 50684 - RNA, 22 nt, Homo sapiens
cacaguugccuaucuccugaag

SEQ ID NO: 50685 - RNA, 22 nt, Homo sapiens
cuggcucauuucauuuagcaua

SEQ ID NO: 50686 - RNA, 22 nt, Homo sapiens
auagcagacauuucaaggcagg

SEQ ID NO: 50687 - RNA, 21 nt, Homo sapiens
gugcaaacaucauagaaugua

SEQ ID NO: 50688 - RNA, 22 nt, Homo sapiens
cuggcacagugucagaaacaca

SEQ ID NO: 50689 - RNA, 22 nt, Homo sapiens
ucaguagcaugaaaacagacua

SEQ ID NO: 50690 - RNA, 22 nt, Homo sapiens
uucuuugcaugaucucaaaguc

SEQ ID NO: 50691 - RNA, 22 nt, Homo sapiens
auugcacuccagccuggcaaua

SEQ ID NO: 50692 - RNA, 23 nt, Homo sapiens
ucaguacuccacuuucaauagug

SEQ ID NO: 50693 - RNA, 22 nt, Homo sapiens
ugucucaguucccuucucugga

SEQ ID NO: 50694 - RNA, 22 nt, Homo sapiens
aucauauccuagauauaacuuc

SEQ ID NO: 50695 - RNA, 22 nt, Homo sapiens
uuagguaauauauugcugcuuu

SEQ ID NO: 50696 - RNA, 22 nt, Homo sapiens
uagacaacugaaacacugugca

SEQ ID NO: 50697 - RNA, 22 nt, Homo sapiens
cuauaacagugugguuuggaga

SEQ ID NO: 50698 - RNA, 22 nt, Homo sapiens
gagcugaucuuuucugauucca

SEQ ID NO: 50699 - RNA, 22 nt, Homo sapiens
augaucacuguggaaauucagc

SEQ ID NO: 50700 - RNA, 22 nt, Homo sapiens
uuaaggaaggagucuuaaaugg

SEQ ID NO: 50701 - RNA, 22 nt, Homo sapiens
uauacaugugccauguuggugu

SEQ ID NO: 50702 - RNA, 22 nt, Homo sapiens
auccaagagacugaugacuucc

SEQ ID NO: 50703 - RNA, 22 nt, Homo sapiens
uugaggcaaugaggagaagcug

SEQ ID NO: 50704 - RNA, 22 nt, Homo sapiens
acuuuguguuacccagcaagga

SEQ ID NO: 50705 - RNA, 22 nt, Homo sapiens
ucuaaaacuagauugugaugau

SEQ ID NO: 50706 - RNA, 22 nt, Homo sapiens
ugaaacacacauugcccuuuau

SEQ ID NO: 50707 - RNA, 22 nt, Homo sapiens
caacacagugaaacccgucucu

SEQ ID NO: 50708 - RNA, 22 nt, Homo sapiens
ugagaucacuaagagguaaugg

SEQ ID NO: 50709 - RNA, 22 nt, Homo sapiens
aaguggcauugaggaaaaaaau

SEQ ID NO: 50710 - RNA, 22 nt, Homo sapiens
auuucuacuccuguguccagaa

SEQ ID NO: 50711 - RNA, 22 nt, Homo sapiens
aggcaaugugagaguuuauuca

SEQ ID NO: 50712 - RNA, 22 nt, Homo sapiens
ucauugcacuccagccugggug

SEQ ID NO: 50713 - RNA, 22 nt, Homo sapiens
aggugguuuuaggcagagacau

SEQ ID NO: 50714 - RNA, 22 nt, Homo sapiens
acuuuuguuauacagugugaua

SEQ ID NO: 50715 - RNA, 22 nt, Homo sapiens
uugcauaagugcauucugugau

SEQ ID NO: 50716 - RNA, 22 nt, Homo sapiens
ggggaauguuaaagaauuugca

SEQ ID NO: 50717 - RNA, 22 nt, Homo sapiens
gaaaacugcuucucuggguuuc

SEQ ID NO: 50718 - RNA, 22 nt, Homo sapiens
auugcacuccagccugggcaac

SEQ ID NO: 50719 - RNA, 22 nt, Homo sapiens
auugcacuccagccugggcgac

SEQ ID NO: 50720 - RNA, 22 nt, Homo sapiens
augaagcuagcugauugcugau

SEQ ID NO: 50721 - RNA, 22 nt, Homo sapiens
aagcacccagccucacgccugc

SEQ ID NO: 50722 - RNA, 22 nt, Homo sapiens
uacacagucaaaaauuuccagg

SEQ ID NO: 50723 - RNA, 22 nt, Homo sapiens
uguauguuguaagacuuagacc

SEQ ID NO: 50724 - RNA, 22 nt, Homo sapiens
ugagauucuuacuccugaguuc

SEQ ID NO: 50725 - RNA, 21 nt, Homo sapiens
ugagaugauccugcaugcaug

SEQ ID NO: 50726 - RNA, 22 nt, Homo sapiens
guccaguacucuuuccugaaaa

SEQ ID NO: 50727 - RNA, 22 nt, Homo sapiens
uucaaaaccucugcuuaagccc

SEQ ID NO: 50728 - RNA, 22 nt, Homo sapiens
auuccacuuacaugaaguaccu

SEQ ID NO: 50729 - RNA, 22 nt, Homo sapiens
caggaaugugaggguucccugc

SEQ ID NO: 50730 - RNA, 17 nt, Homo sapiens
auguaauccucaucucu

SEQ ID NO: 50731 - RNA, 22 nt, Homo sapiens
uucuacaggcuguucaagaagc

SEQ ID NO: 50732 - RNA, 22 nt, Homo sapiens
cuagaguacuuaccacagcaug

SEQ ID NO: 50733 - RNA, 22 nt, Homo sapiens
uugaagacuauaugauucuuca

SEQ ID NO: 50734 - RNA, 20 nt, Homo sapiens
cauugcacuccagcuugggc

SEQ ID NO: 50735 - RNA, 22 nt, Homo sapiens
aauaucacaggguguacacuca

SEQ ID NO: 50736 - RNA, 22 nt, Homo sapiens
gagacauugacuuuguuccaga

SEQ ID NO: 50737 - RNA, 22 nt, Homo sapiens
uuggucaucucccuccuuuuag

SEQ ID NO: 50738 - RNA, 22 nt, Homo sapiens
acaguguagugacugccaacuu

SEQ ID NO: 50739 - RNA, 22 nt, Homo sapiens
ugagcugagaucgugccauugu

SEQ ID NO: 50740 - RNA, 22 nt, Homo sapiens
guaaagacacaugcacacguau

SEQ ID NO: 50741 - RNA, 22 nt, Homo sapiens
ugacaagagaccccuccgcagg

SEQ ID NO: 50742 - RNA, 22 nt, Homo sapiens
ggcacgguggcucacgccugua

SEQ ID NO: 50743 - RNA, 23 nt, Homo sapiens
uuuugcaauaagucacuggaaua

SEQ ID NO: 50744 - RNA, 22 nt, Homo sapiens
uggcagaugcucuuggugccca

SEQ ID NO: 50745 - RNA, 22 nt, Homo sapiens
auaaauaguaguugugguggcc

SEQ ID NO: 50746 - RNA, 22 nt, Homo sapiens
uugagauggaguguugcucugu

SEQ ID NO: 50747 - RNA, 22 nt, Homo sapiens
uugagauggagucuugcucucu

SEQ ID NO: 50748 - RNA, 22 nt, Homo sapiens
uggaagauucuagaagauucca

SEQ ID NO: 50749 - RNA, 22 nt, Homo sapiens
auggcuguuccugggaguucua

SEQ ID NO: 50750 - RNA, 22 nt, Homo sapiens
uucuacaugggucgucggugag

SEQ ID NO: 50751 - RNA, 22 nt, Homo sapiens
auugcucuuagaaauauuucuu

SEQ ID NO: 50752 - RNA, 22 nt, Homo sapiens
aagugucagaguugcuaaugac

SEQ ID NO: 50753 - RNA, 22 nt, Homo sapiens
guggaaugaaaacucucucaca

SEQ ID NO: 50754 - RNA, 22 nt, Homo sapiens
auugaguaaaaaauagugaugu

SEQ ID NO: 50755 - RNA, 22 nt, Homo sapiens
aggcaugaaauacaugcauuga

SEQ ID NO: 50756 - RNA, 22 nt, Homo sapiens
ggaauggaacaaagucuugaaa

SEQ ID NO: 50757 - RNA, 22 nt, Homo sapiens
uauggcuuucuacuugaguucu

SEQ ID NO: 50758 - RNA, 22 nt, Homo sapiens
caucacuuuuccuuuuacagau

SEQ ID NO: 50759 - RNA, 22 nt, Homo sapiens
cauugcacuccagccugcugac

SEQ ID NO: 50760 - RNA, 22 nt, Homo sapiens
ugacaagauauggucuuaucaa

SEQ ID NO: 50761 - RNA, 22 nt, Homo sapiens
uacauagucuucuuuugguuau

SEQ ID NO: 50762 - RNA, 22 nt, Homo sapiens
uuuuaugggcuauuugcauuag

SEQ ID NO: 50763 - RNA, 22 nt, Homo sapiens
ugugccuaguaauguguccaga

SEQ ID NO: 50764 - RNA, 22 nt, Homo sapiens
ugagaacugguagcacuuguga

SEQ ID NO: 50765 - RNA, 22 nt, Homo sapiens
cauugcacuccagccugaggga

SEQ ID NO: 50766 - RNA, 22 nt, Homo sapiens
uuacagcagugccccacuccca

SEQ ID NO: 50767 - RNA, 21 nt, Homo sapiens
auagcacuucacuugguuaga

SEQ ID NO: 50768 - RNA, 22 nt, Homo sapiens
uuggagugugcucauaacugcu

SEQ ID NO: 50769 - RNA, 22 nt, Homo sapiens
uuggaaauauguuaagugucau

SEQ ID NO: 50770 - RNA, 22 nt, Homo sapiens
ccugucuugaagagauccuccu

SEQ ID NO: 50771 - RNA, 22 nt, Homo sapiens
uuuguucaccucaaggauggga

SEQ ID NO: 50772 - RNA, 22 nt, Homo sapiens
uuugaaccauuugaagaaugau

SEQ ID NO: 50773 - RNA, 22 nt, Homo sapiens
uuauagacacguuguaacaaac

SEQ ID NO: 50774 - RNA, 22 nt, Homo sapiens
ugagaugagaaucaguucuaau

SEQ ID NO: 50775 - RNA, 22 nt, Homo sapiens
gaaaugcucauuuuggauccuu

SEQ ID NO: 50776 - RNA, 22 nt, Homo sapiens
agcuggcuguagcugcaagucu

SEQ ID NO: 50777 - RNA, 22 nt, Homo sapiens
cuauggcucugucuuuuaaguu

SEQ ID NO: 50778 - RNA, 22 nt, Homo sapiens
ugagguagaggugaacuugacc

SEQ ID NO: 50779 - RNA, 22 nt, Homo sapiens
uaagacuguguaauuuaugaag

SEQ ID NO: 50780 - RNA, 22 nt, Homo sapiens
ugagaugacgacacaccucagu

SEQ ID NO: 50781 - RNA, 22 nt, Homo sapiens
auacaugugccauguugguaug

SEQ ID NO: 50782 - RNA, 23 nt, Homo sapiens
auugcagaaucacagagguagug

SEQ ID NO: 50783 - RNA, 22 nt, Homo sapiens
auggcucuguuccaugugucuu

SEQ ID NO: 50784 - RNA, 22 nt, Homo sapiens
uacagucacauuccugaccaua

SEQ ID NO: 50785 - RNA, 22 nt, Homo sapiens
uaucucuguggguagugcugaa

SEQ ID NO: 50786 - RNA, 22 nt, Homo sapiens
gaugauguugaauguucucacc

SEQ ID NO: 50787 - RNA, 22 nt, Homo sapiens
auacaagugccauguuggugug

SEQ ID NO: 50788 - RNA, 22 nt, Homo sapiens
uuugguuuuuguuaucacucau

SEQ ID NO: 50789 - RNA, 22 nt, Homo sapiens
auugaacuguuggagagguuuu

SEQ ID NO: 50790 - RNA, 22 nt, Homo sapiens
acacuuucuggagcugcacaua

SEQ ID NO: 50791 - RNA, 22 nt, Homo sapiens
cucaguguucccauucuaccuu

SEQ ID NO: 50792 - RNA, 22 nt, Homo sapiens
ccuuggcacuuugccacagugc

SEQ ID NO: 50793 - RNA, 22 nt, Homo sapiens
uugagaugaagucuugcucucu

SEQ ID NO: 50794 - RNA, 22 nt, Homo sapiens
uugagaugaaguuuugcucuuu

SEQ ID NO: 50795 - RNA, 22 nt, Homo sapiens
auagcagaagaagggacaauuc

SEQ ID NO: 50796 - RNA, 22 nt, Homo sapiens
uuaauagugacucauuuuccac

SEQ ID NO: 50797 - RNA, 22 nt, Homo sapiens
guguuauuuugcugggaaugau

SEQ ID NO: 50798 - RNA, 22 nt, Homo sapiens
gacaagagaacacugcuauauu

SEQ ID NO: 50799 - RNA, 22 nt, Homo sapiens
cuuugguuaucuagcuguauga

SEQ ID NO: 50800 - RNA, 22 nt, Homo sapiens
acaaagugccuccuuuuagagu

SEQ ID NO: 50801 - RNA, 22 nt, Homo sapiens
gagcugaucuuuauguaaauuc

SEQ ID NO: 50802 - RNA, 20 nt, Homo sapiens
ucaaagacauggcugucaga

SEQ ID NO: 50803 - RNA, 22 nt, Homo sapiens
ucuuuguuggaguccaaggaua

SEQ ID NO: 50804 - RNA, 22 nt, Homo sapiens
uuauggauuuauauucuguagu

SEQ ID NO: 50805 - RNA, 22 nt, Homo sapiens
ggcaaugucagcuaaugaugga

SEQ ID NO: 50806 - RNA, 22 nt, Homo sapiens
uauugcaauuggcagagugcua

SEQ ID NO: 50807 - RNA, 22 nt, Homo sapiens
auggcucuggauagaaugcagg

SEQ ID NO: 50808 - RNA, 19 nt, Homo sapiens
aguggguguuuucuguuug

SEQ ID NO: 50809 - RNA, 22 nt, Homo sapiens
uuccugagagggcugggugcag

SEQ ID NO: 50810 - RNA, 22 nt, Homo sapiens
cauugcacuccagucugggcaa

SEQ ID NO: 50811 - RNA, 22 nt, Homo sapiens
uuccagcugggggcaacucugc

SEQ ID NO: 50812 - RNA, 20 nt, Homo sapiens
aucucugggcaaaggaaaau

SEQ ID NO: 50813 - RNA, 17 nt, Homo sapiens
cucucugguuuaaagca

SEQ ID NO: 50814 - RNA, 22 nt, Homo sapiens
auugcacuccacccugggcaac

SEQ ID NO: 50815 - RNA, 22 nt, Homo sapiens
gagaucauguacuagaacaccu

SEQ ID NO: 50816 - RNA, 22 nt, Homo sapiens
augacagagauaugugaauuuu

SEQ ID NO: 50817 - RNA, 19 nt, Homo sapiens
uucauacagugagagcagc

SEQ ID NO: 50818 - RNA, 22 nt, Homo sapiens
cuacagcacugagcugugugca

SEQ ID NO: 50819 - RNA, 22 nt, Homo sapiens
uauggccuuuuuaaugauauug

SEQ ID NO: 50820 - RNA, 22 nt, Homo sapiens
uauggccccuacaugugcaaaa

SEQ ID NO: 50821 - RNA, 21 nt, Homo sapiens
ucagaagcucccagggaggac

SEQ ID NO: 50822 - RNA, 22 nt, Homo sapiens
uuauguaaaucaaucuggaauc

SEQ ID NO: 50823 - RNA, 19 nt, Homo sapiens
uggaacugauucaguucug

SEQ ID NO: 50824 - RNA, 23 nt, Homo sapiens
uuuuuguguuucauggaaauagg

SEQ ID NO: 50825 - RNA, 22 nt, Homo sapiens
uuuuugagguauaguguggcua

SEQ ID NO: 50826 - RNA, 22 nt, Homo sapiens
uuuuucacuuaaguuaggcuca

SEQ ID NO: 50827 - RNA, 21 nt, Homo sapiens
uuuuugggcuuucauaguguu

SEQ ID NO: 50828 - RNA, 22 nt, Homo sapiens
uuuugguguacaauucuaugga

SEQ ID NO: 50829 - RNA, 22 nt, Homo sapiens
uuuuggcuuaaagagaauguau

SEQ ID NO: 50830 - RNA, 22 nt, Homo sapiens
uuuuggcacuuugucugauucu

SEQ ID NO: 50831 - RNA, 22 nt, Homo sapiens
uuuugugacuauuguaaauggg

SEQ ID NO: 50832 - RNA, 22 nt, Homo sapiens
uuuuuauggccaauccucagaa

SEQ ID NO: 50833 - RNA, 22 nt, Homo sapiens
uuuugguuaggauggguggcau

SEQ ID NO: 50834 - RNA, 22 nt, Homo sapiens
uuugcaucuuuugcuuccugga

SEQ ID NO: 50835 - RNA, 22 nt, Homo sapiens
uuuugcaggcauuggaaguuua

SEQ ID NO: 50836 - RNA, 22 nt, Homo sapiens
uuugcuuaaaguccuuguggga

SEQ ID NO: 50837 - RNA, 17 nt, Homo sapiens
uuuuggauuagaaaucc

SEQ ID NO: 50838 - RNA, 22 nt, Homo sapiens
uuuugcuugugaauagccacau

SEQ ID NO: 50839 - RNA, 22 nt, Homo sapiens
uuuugcaguuacagagagugag

SEQ ID NO: 50840 - RNA, 22 nt, Homo sapiens
uuuugcucuugguaaugaaaga

SEQ ID NO: 50841 - RNA, 18 nt, Homo sapiens
uuuugcuuaacugcgcca

SEQ ID NO: 50842 - RNA, 22 nt, Homo sapiens
uuugaagcaauugugaauggga

SEQ ID NO: 50843 - RNA, 19 nt, Homo sapiens
uuugaauauaaugcagcua

SEQ ID NO: 50844 - RNA, 22 nt, Homo sapiens
uuugcaagaugaaaaaguucua

SEQ ID NO: 50845 - RNA, 22 nt, Homo sapiens
uuugcaauguugugauggugaa

SEQ ID NO: 50846 - RNA, 20 nt, Homo sapiens
uuugcagaaucuaagaagag

SEQ ID NO: 50847 - RNA, 22 nt, Homo sapiens
uuugcacuggagauucaauggg

SEQ ID NO: 50848 - RNA, 22 nt, Homo sapiens
uuugcagagucuuucgcugggc

SEQ ID NO: 50849 - RNA, 21 nt, Homo sapiens
uuugcacuuugcaaaucccua

SEQ ID NO: 50850 - RNA, 22 nt, Homo sapiens
uuugcaucuuagaaaguucucc

SEQ ID NO: 50851 - RNA, 22 nt, Homo sapiens
uuacuguacugcucuuaaccug

SEQ ID NO: 50852 - RNA, 22 nt, Homo sapiens
uuacugcuuaagugauucaaca

SEQ ID NO: 50853 - RNA, 22 nt, Homo sapiens
uuacuauguuucaaagugucuc

SEQ ID NO: 50854 - RNA, 22 nt, Homo sapiens
uuaccacagugccugucuaaug

SEQ ID NO: 50855 - RNA, 22 nt, Homo sapiens
uuacauugcuucaaauucagug

SEQ ID NO: 50856 - RNA, 22 nt, Homo sapiens
uuaccaguggugcuguaaacuu

SEQ ID NO: 50857 - RNA, 22 nt, Homo sapiens
uuaaguuaggcuucagcagucu

SEQ ID NO: 50858 - RNA, 22 nt, Homo sapiens
uuaagugcucaguuacucaguu

SEQ ID NO: 50859 - RNA, 23 nt, Homo sapiens
uuaagugcuuuucugaaacucuu

SEQ ID NO: 50860 - RNA, 22 nt, Homo sapiens
uuaagugaauuaucuaacaugu

SEQ ID NO: 50861 - RNA, 22 nt, Homo sapiens
uuaaggugaaguucucagaugc

SEQ ID NO: 50862 - RNA, 22 nt, Homo sapiens
uuaagggaggagcuucaagaug

SEQ ID NO: 50863 - RNA, 22 nt, Homo sapiens
uuaaugcuuuugggauauuucu

SEQ ID NO: 50864 - RNA, 22 nt, Homo sapiens
uuaauccugccuuauuucagua

SEQ ID NO: 50865 - RNA, 22 nt, Homo sapiens
uuaaucuguucucuguauucua

SEQ ID NO: 50866 - RNA, 22 nt, Homo sapiens
uguguaauaccuuugacuauau

SEQ ID NO: 50867 - RNA, 22 nt, Homo sapiens
uguguaaauaugauagaggaau

SEQ ID NO: 50868 - RNA, 22 nt, Homo sapiens
uguguacugcagaguauucugu

SEQ ID NO: 50869 - RNA, 22 nt, Homo sapiens
uguguagagaaauauuacuuau

SEQ ID NO: 50870 - RNA, 22 nt, Homo sapiens
ugugucuacugagaugaucaug

SEQ ID NO: 50871 - RNA, 22 nt, Homo sapiens
ugugucuugaauuuuguaugua

SEQ ID NO: 50872 - RNA, 22 nt, Homo sapiens
ugugcacaugauauaucacaua

SEQ ID NO: 50873 - RNA, 22 nt, Homo sapiens
ugugauuauuuauagacaguca

SEQ ID NO: 50874 - RNA, 22 nt, Homo sapiens
ugugauugauauauuuacagaa

SEQ ID NO: 50875 - RNA, 22 nt, Homo sapiens
ugugcaaauuagcacaacccga

SEQ ID NO: 50876 - RNA, 22 nt, Homo sapiens
ugugguauuagguguaguaucu

SEQ ID NO: 50877 - RNA, 22 nt, Homo sapiens
ugugcaugaaauuuaccuuuaa

SEQ ID NO: 50878 - RNA, 22 nt, Homo sapiens
uuaugugccuuuuugccauuca

SEQ ID NO: 50879 - RNA, 22 nt, Homo sapiens
uuauguguuuaauguuucugaa

SEQ ID NO: 50880 - RNA, 22 nt, Homo sapiens
uuaugucuuuuguguucagcua

SEQ ID NO: 50881 - RNA, 22 nt, Homo sapiens
uuauuagagauauuugguuagg

SEQ ID NO: 50882 - RNA, 22 nt, Homo sapiens
uuauuagcacccuaccaugugg

SEQ ID NO: 50883 - RNA, 20 nt, Homo sapiens
uuaugucguuucuugcuuau

SEQ ID NO: 50884 - RNA, 22 nt, Homo sapiens
uuauuagguugguggaaaagua

SEQ ID NO: 50885 - RNA, 22 nt, Homo sapiens
uuauucugucuuuggucucaau

SEQ ID NO: 50886 - RNA, 22 nt, Homo sapiens
uuauuauguuggugcaaaggua

SEQ ID NO: 50887 - RNA, 22 nt, Homo sapiens
uuauggcuauugaugacaauug

SEQ ID NO: 50888 - RNA, 20 nt, Homo sapiens
uucacugggcucucuguugg

SEQ ID NO: 50889 - RNA, 22 nt, Homo sapiens
uucacugugaauaaaggcuccc

SEQ ID NO: 50890 - RNA, 22 nt, Homo sapiens
uucacuguagcuuggauguuua

SEQ ID NO: 50891 - RNA, 22 nt, Homo sapiens
uucacuguaaaaugaagagggu

SEQ ID NO: 50892 - RNA, 22 nt, Homo sapiens
uucacaguggugggagacguca

SEQ ID NO: 50893 - RNA, 22 nt, Homo sapiens
uucacagcuuaauaaggcucag

SEQ ID NO: 50894 - RNA, 22 nt, Homo sapiens
uucaccaguuuugucacgaaug

SEQ ID NO: 50895 - RNA, 21 nt, Homo sapiens
uucaccauggcuccacacucu

SEQ ID NO: 50896 - RNA, 22 nt, Homo sapiens
uuagcagcaucccuggccugua

SEQ ID NO: 50897 - RNA, 22 nt, Homo sapiens
uuaggcaggauaguuacauauu

SEQ ID NO: 50898 - RNA, 23 nt, Homo sapiens
uuagaucuuuaaggaaucuccac

SEQ ID NO: 50899 - RNA, 22 nt, Homo sapiens
uuagaugaaugucucuuaaaca

SEQ ID NO: 50900 - RNA, 22 nt, Homo sapiens
uuagcacaucuuucuauguaag

SEQ ID NO: 50901 - RNA, 22 nt, Homo sapiens
uuagaugaagucacagaaccca

SEQ ID NO: 50902 - RNA, 22 nt, Homo sapiens
uuaucagcagcaugaaaauaga

SEQ ID NO: 50903 - RNA, 22 nt, Homo sapiens
uuaucucagugaacugagugga

SEQ ID NO: 50904 - RNA, 17 nt, Homo sapiens
uuaugagacuucuuagc

SEQ ID NO: 50905 - RNA, 19 nt, Homo sapiens
uuauacuguauuguuuagg

SEQ ID NO: 50906 - RNA, 22 nt, Homo sapiens
uuaggcuaguuucuuaaacucu

SEQ ID NO: 50907 - RNA, 22 nt, Homo sapiens
uuaggcuuuucagacacuucau

SEQ ID NO: 50908 - RNA, 22 nt, Homo sapiens
uuauauguuucuguuuggaggc

SEQ ID NO: 50909 - RNA, 20 nt, Homo sapiens
uggcuaaaugaaugauagca

SEQ ID NO: 50910 - RNA, 23 nt, Homo sapiens
uggcgagacagaaaacuuuuaga

SEQ ID NO: 50911 - RNA, 22 nt, Homo sapiens
uggcucuuucuagacuuaauua

SEQ ID NO: 50912 - RNA, 20 nt, Homo sapiens
uggcucuuugcugcuaaagu

SEQ ID NO: 50913 - RNA, 22 nt, Homo sapiens
ugguguuugagaagcugauguc

SEQ ID NO: 50914 - RNA, 20 nt, Homo sapiens
ugguguuugaacagugaaug

SEQ ID NO: 50915 - RNA, 22 nt, Homo sapiens
ugguguccugucucugcgcuug

SEQ ID NO: 50916 - RNA, 22 nt, Homo sapiens
ugguuguuuuaaaugucgucug

SEQ ID NO: 50917 - RNA, 23 nt, Homo sapiens
uguaaaagcauuugucagccugg

SEQ ID NO: 50918 - RNA, 22 nt, Homo sapiens
uguaaacauguauguguuuaug

SEQ ID NO: 50919 - RNA, 22 nt, Homo sapiens
uguaaaaagcccagccgcugag

SEQ ID NO: 50920 - RNA, 22 nt, Homo sapiens
ugguuaucauagcuaugcuacu

SEQ ID NO: 50921 - RNA, 22 nt, Homo sapiens
ugguucaguugcacaggcuguu

SEQ ID NO: 50922 - RNA, 22 nt, Homo sapiens
uguaagcagcagagacuauccu

SEQ ID NO: 50923 - RNA, 22 nt, Homo sapiens
uguaauguuugguagguuaggu

SEQ ID NO: 50924 - RNA, 22 nt, Homo sapiens
uguaauuuaaaugauccuugga

SEQ ID NO: 50925 - RNA, 20 nt, Homo sapiens
uguaacacauggagaacucu

SEQ ID NO: 50926 - RNA, 22 nt, Homo sapiens
uguaaacuaugagcugauuauu

SEQ ID NO: 50927 - RNA, 22 nt, Homo sapiens
uguaaacuuuugagauugacuu

SEQ ID NO: 50928 - RNA, 21 nt, Homo sapiens
uguagcagcaugauuuauaau

SEQ ID NO: 50929 - RNA, 22 nt, Homo sapiens
uguauacugucuaauauguugu

SEQ ID NO: 50930 - RNA, 21 nt, Homo sapiens
uguauauguuuauacacacac

SEQ ID NO: 50931 - RNA, 22 nt, Homo sapiens
uguauauguuuguacauauguc

SEQ ID NO: 50932 - RNA, 22 nt, Homo sapiens
uguaugagagugaaagcauuuc

SEQ ID NO: 50933 - RNA, 22 nt, Homo sapiens
uguagguagggucuguuuuuga

SEQ ID NO: 50934 - RNA, 22 nt, Homo sapiens
uguagacagcacguaguugagu

SEQ ID NO: 50935 - RNA, 22 nt, Homo sapiens
uguaugagagacauggcugcuu

SEQ ID NO: 50936 - RNA, 21 nt, Homo sapiens
ugucaagugggaaaacaugua

SEQ ID NO: 50937 - RNA, 22 nt, Homo sapiens
uguauguugauguuauauucug

SEQ ID NO: 50938 - RNA, 22 nt, Homo sapiens
uguauguuguaagacuuagacc

SEQ ID NO: 50939 - RNA, 22 nt, Homo sapiens
uguauuuguuguuaaauggaga

SEQ ID NO: 50940 - RNA, 22 nt, Homo sapiens
ugucaaagagacaucugcacuc

SEQ ID NO: 50941 - RNA, 22 nt, Homo sapiens
uguauugcuugaagagugaauu

SEQ ID NO: 50942 - RNA, 22 nt, Homo sapiens
ugucaggaggguccagagaaaa

SEQ ID NO: 50943 - RNA, 22 nt, Homo sapiens
ugucagggaggcucggccgcac

SEQ ID NO: 50944 - RNA, 22 nt, Homo sapiens
ugucaguguacuguaagaauua

SEQ ID NO: 50945 - RNA, 22 nt, Homo sapiens
ugucauagauugcuuggaaaaa

SEQ ID NO: 50946 - RNA, 22 nt, Homo sapiens
uguccaguguuccucagaagaa

SEQ ID NO: 50947 - RNA, 22 nt, Homo sapiens
ugucacguugcuuuucuguugu

SEQ ID NO: 50948 - RNA, 22 nt, Homo sapiens
ugugaugauuugauaaacguau

SEQ ID NO: 50949 - RNA, 22 nt, Homo sapiens
ugugaucaugguauuaaucugc

SEQ ID NO: 50950 - RNA, 22 nt, Homo sapiens
ugugagcuauggaguuguagag

SEQ ID NO: 50951 - RNA, 22 nt, Homo sapiens
ugugaguguguacuaguuauca

SEQ ID NO: 50952 - RNA, 22 nt, Homo sapiens
ugugauaguugcuguucugggc

SEQ ID NO: 50953 - RNA, 22 nt, Homo sapiens
ugucucaguuacggcaauucca

SEQ ID NO: 50954 - RNA, 22 nt, Homo sapiens
ugucucagugauuggcuuucug

SEQ ID NO: 50955 - RNA, 22 nt, Homo sapiens
ugucuaaagaauggcagacuca

SEQ ID NO: 50956 - RNA, 21 nt, Homo sapiens
ugucgugcaggaucuguggga

SEQ ID NO: 50957 - RNA, 22 nt, Homo sapiens
uguccguuuuggcuuucucccu

SEQ ID NO: 50958 - RNA, 22 nt, Homo sapiens
ugucuguuugcgaaauugcuuc

SEQ ID NO: 50959 - RNA, 22 nt, Homo sapiens
ugucugagacuguuuuacuuuc

SEQ ID NO: 50960 - RNA, 21 nt, Homo sapiens
ugucugagagaggagaucuac

SEQ ID NO: 50961 - RNA, 22 nt, Homo sapiens
uugcacuucauguaggccaaag

SEQ ID NO: 50962 - RNA, 22 nt, Homo sapiens
uugcacauggcaggugcucaau

SEQ ID NO: 50963 - RNA, 22 nt, Homo sapiens
uugcacauggcuggggaggccu

SEQ ID NO: 50964 - RNA, 22 nt, Homo sapiens
uugcacauugauuuuguauccu

SEQ ID NO: 50965 - RNA, 22 nt, Homo sapiens
uugcaacauuguaaguuuauau

SEQ ID NO: 50966 - RNA, 22 nt, Homo sapiens
uugagguaguacuuauuauugg

SEQ ID NO: 50967 - RNA, 22 nt, Homo sapiens
uugagguauugauaaaacauuu

SEQ ID NO: 50968 - RNA, 22 nt, Homo sapiens
uugaggaguacugauuagguau

SEQ ID NO: 50969 - RNA, 22 nt, Homo sapiens
uugagauggaguuucacucuug

SEQ ID NO: 50970 - RNA, 22 nt, Homo sapiens
uugagauggaguuucacucugu

SEQ ID NO: 50971 - RNA, 22 nt, Homo sapiens
uugagauggaguguugcucugu

SEQ ID NO: 50972 - RNA, 22 nt, Homo sapiens
uugagauggaguuucaauauug

SEQ ID NO: 50973 - RNA, 22 nt, Homo sapiens
uugagauggaguuucacucucg

SEQ ID NO: 50974 - RNA, 22 nt, Homo sapiens
uugagauguggcaguuuaugag

SEQ ID NO: 50975 - RNA, 22 nt, Homo sapiens
uugagauguaagauguuaauau

SEQ ID NO: 50976 - RNA, 22 nt, Homo sapiens
uugagauuauuguguuccuuua

SEQ ID NO: 50977 - RNA, 22 nt, Homo sapiens
uugagauuuuccucaaauauuu

SEQ ID NO: 50978 - RNA, 22 nt, Homo sapiens
uugagauggagccucacucugc

SEQ ID NO: 50979 - RNA, 22 nt, Homo sapiens
uugagauggagucucacucuug

SEQ ID NO: 50980 - RNA, 22 nt, Homo sapiens
uugagauggagucucacucugc

SEQ ID NO: 50981 - RNA, 22 nt, Homo sapiens
uugagauggagucucacucuuu

SEQ ID NO: 50982 - RNA, 22 nt, Homo sapiens
uugagauggagucucacugugu

SEQ ID NO: 50983 - RNA, 22 nt, Homo sapiens
uugagauggagucucguucugu

SEQ ID NO: 50984 - RNA, 22 nt, Homo sapiens
uugagauggagucucgcugugu

SEQ ID NO: 50985 - RNA, 22 nt, Homo sapiens
uugagauggagucuugcucucu

SEQ ID NO: 50986 - RNA, 22 nt, Homo sapiens
uugagaucaugcuacugcacuc

SEQ ID NO: 50987 - RNA, 22 nt, Homo sapiens
uugagauaggagcuguuguucu

SEQ ID NO: 50988 - RNA, 22 nt, Homo sapiens
uugagauaucuuggccuuugca

SEQ ID NO: 50989 - RNA, 22 nt, Homo sapiens
uugagagagaacauuuguuaca

SEQ ID NO: 50990 - RNA, 22 nt, Homo sapiens
uugacuuuuauucacucugcua

SEQ ID NO: 50991 - RNA, 22 nt, Homo sapiens
uugagaaucuuugcuaaaggaa

SEQ ID NO: 50992 - RNA, 22 nt, Homo sapiens
uugagaaucuuucgaauguucu

SEQ ID NO: 50993 - RNA, 22 nt, Homo sapiens
uugacuucagagcugauucaag

SEQ ID NO: 50994 - RNA, 22 nt, Homo sapiens
uugacuuuuaggaggaaaauga

SEQ ID NO: 50995 - RNA, 22 nt, Homo sapiens
uugacuuagacauucaguugga

SEQ ID NO: 50996 - RNA, 22 nt, Homo sapiens
uugacagagaaaagugugacuu

SEQ ID NO: 50997 - RNA, 22 nt, Homo sapiens
uugacaaugcacugugcuaagu

SEQ ID NO: 50998 - RNA, 22 nt, Homo sapiens
uugacauaguuucugaaauaga

SEQ ID NO: 50999 - RNA, 22 nt, Homo sapiens
uugacauguaaguacucuauag

SEQ ID NO: 51000 - RNA, 22 nt, Homo sapiens
uugaccucaucacuucccaaag

SEQ ID NO: 51001 - RNA, 22 nt, Homo sapiens
uugacguaggaggauguugaga

SEQ ID NO: 51002 - RNA, 22 nt, Homo sapiens
uugaaguaugaccgcugagaau

SEQ ID NO: 51003 - RNA, 22 nt, Homo sapiens
uugaaguaggaaaggaggaggu

SEQ ID NO: 51004 - RNA, 22 nt, Homo sapiens
uugaagacuaccuaccauacuu

SEQ ID NO: 51005 - RNA, 22 nt, Homo sapiens
uugaagacuaauuuagauaaug

SEQ ID NO: 51006 - RNA, 22 nt, Homo sapiens
uugaauagugacuuugauucug

SEQ ID NO: 51007 - RNA, 18 nt, Homo sapiens
uugaauagagccaagcac

SEQ ID NO: 51008 - RNA, 22 nt, Homo sapiens
uugaauaggcucaugcuuauca

SEQ ID NO: 51009 - RNA, 21 nt, Homo sapiens
uugaaugguuuuccuugggag

SEQ ID NO: 51010 - RNA, 22 nt, Homo sapiens
uugacaaggagugggguugaga

SEQ ID NO: 51011 - RNA, 22 nt, Homo sapiens
uugaaaucuuccacagcccaag

SEQ ID NO: 51012 - RNA, 22 nt, Homo sapiens
uugaaagucuaggcuuacagua

SEQ ID NO: 51013 - RNA, 19 nt, Homo sapiens
uucuuuguugugggggcug

SEQ ID NO: 51014 - RNA, 22 nt, Homo sapiens
uugaaagaaaggagacugaguu

SEQ ID NO: 51015 - RNA, 22 nt, Homo sapiens
uugaaagaugaacuggauugga

SEQ ID NO: 51016 - RNA, 22 nt, Homo sapiens
uucuuugcaugaucucaaaguc

SEQ ID NO: 51017 - RNA, 18 nt, Homo sapiens
uucuuguguugauauuuu

SEQ ID NO: 51018 - RNA, 22 nt, Homo sapiens
uucauggaacaaguggguucaa

SEQ ID NO: 51019 - RNA, 22 nt, Homo sapiens
uucaugcaucuguagugguuaa

SEQ ID NO: 51020 - RNA, 22 nt, Homo sapiens
uucauacaguggcugcacucca

SEQ ID NO: 51021 - RNA, 22 nt, Homo sapiens
uucauagucuaugcaaguaaga

SEQ ID NO: 51022 - RNA, 22 nt, Homo sapiens
uucauagugaaaaauucaaagu

SEQ ID NO: 51023 - RNA, 22 nt, Homo sapiens
uucauagucacauucgaugucu

SEQ ID NO: 51024 - RNA, 22 nt, Homo sapiens
uugguaaucccuagugucuaga

SEQ ID NO: 51025 - RNA, 21 nt, Homo sapiens
uuggggaauggagagguuuuc

SEQ ID NO: 51026 - RNA, 22 nt, Homo sapiens
uuggaaauguguuugcauucag

SEQ ID NO: 51027 - RNA, 22 nt, Homo sapiens
uugggaaugcuaaaccucuauu

SEQ ID NO: 51028 - RNA, 22 nt, Homo sapiens
uugcagugguuucacuggcaaa

SEQ ID NO: 51029 - RNA, 19 nt, Homo sapiens
uugcaguauccuauauguu

SEQ ID NO: 51030 - RNA, 22 nt, Homo sapiens
uugcaggugguuuaugcaagac

SEQ ID NO: 51031 - RNA, 22 nt, Homo sapiens
uugcuuagucaugaaucacuga

SEQ ID NO: 51032 - RNA, 22 nt, Homo sapiens
uugcucaccugagaagaauaga

SEQ ID NO: 51033 - RNA, 22 nt, Homo sapiens
uuggaaaaauccaccuugaucu

SEQ ID NO: 51034 - RNA, 22 nt, Homo sapiens
uugcuucauucaacauugaggg

SEQ ID NO: 51035 - RNA, 22 nt, Homo sapiens
uugcuuuguuacugcaguuucc

SEQ ID NO: 51036 - RNA, 19 nt, Homo sapiens
uugguugguuauuucuuac

SEQ ID NO: 51037 - RNA, 22 nt, Homo sapiens
uugguauguguuucauacucaa

SEQ ID NO: 51038 - RNA, 22 nt, Homo sapiens
uuggucucuuaaucacacuuuu

SEQ ID NO: 51039 - RNA, 22 nt, Homo sapiens
uuguccaagucccauuuguuga

SEQ ID NO: 51040 - RNA, 22 nt, Homo sapiens
uugucaguguucacucaaagcu

SEQ ID NO: 51041 - RNA, 22 nt, Homo sapiens
uugucaugguuaauuuuaugua

SEQ ID NO: 51042 - RNA, 22 nt, Homo sapiens
uuguaauguuaggguguccaug

SEQ ID NO: 51043 - RNA, 22 nt, Homo sapiens
uuuaucuguuuaaaacuguuca

SEQ ID NO: 51044 - RNA, 22 nt, Homo sapiens
uuuaugagguagagugguuuau

SEQ ID NO: 51045 - RNA, 22 nt, Homo sapiens
uuuauggagagauauuuauggu

SEQ ID NO: 51046 - RNA, 22 nt, Homo sapiens
uuuauguggagcacuugacaca

SEQ ID NO: 51047 - RNA, 22 nt, Homo sapiens
uuuagcagcaaagagccaugcu

SEQ ID NO: 51048 - RNA, 22 nt, Homo sapiens
uuuagcgaaugcuugcuccugu

SEQ ID NO: 51049 - RNA, 22 nt, Homo sapiens
uuuagcucauucaauuucaguc

SEQ ID NO: 51050 - RNA, 22 nt, Homo sapiens
uuuaguccucugaaaaucuaua

SEQ ID NO: 51051 - RNA, 22 nt, Homo sapiens
uuuaguucauuaaggaaucucc

SEQ ID NO: 51052 - RNA, 22 nt, Homo sapiens
uuuauagucaggaacuugagga

SEQ ID NO: 51053 - RNA, 22 nt, Homo sapiens
uuucugcuugagagaauugcug

SEQ ID NO: 51054 - RNA, 22 nt, Homo sapiens
uuucuauguugaccagucuaga

SEQ ID NO: 51055 - RNA, 22 nt, Homo sapiens
uuucugagaccaaaacuuguaa

SEQ ID NO: 51056 - RNA, 17 nt, Homo sapiens
uuucagaguggaagugu

SEQ ID NO: 51057 - RNA, 22 nt, Homo sapiens
uuuccuggagaaucuuaacaaa

SEQ ID NO: 51058 - RNA, 22 nt, Homo sapiens
uuucuacagggcuugccaggua

SEQ ID NO: 51059 - RNA, 22 nt, Homo sapiens
uuucgugucuggucugugaugg

SEQ ID NO: 51060 - RNA, 22 nt, Homo sapiens
uuuaacauuggaugagaucguc

SEQ ID NO: 51061 - RNA, 22 nt, Homo sapiens
uuuaauacugcaucuuuacucu

SEQ ID NO: 51062 - RNA, 22 nt, Homo sapiens
uugugucaaauggcaauuagca

SEQ ID NO: 51063 - RNA, 19 nt, Homo sapiens
uuuagaucuuuuaugcagc

SEQ ID NO: 51064 - RNA, 22 nt, Homo sapiens
uuuacugucuucagucccucug

SEQ ID NO: 51065 - RNA, 22 nt, Homo sapiens
uuuaaugcugcccagucauggg

SEQ ID NO: 51066 - RNA, 22 nt, Homo sapiens
uuguguacuacaguaugccaca

SEQ ID NO: 51067 - RNA, 22 nt, Homo sapiens
uuuaauguuacaguauugguau

SEQ ID NO: 51068 - RNA, 22 nt, Homo sapiens
uugugguaggcauguaagauga

SEQ ID NO: 51069 - RNA, 22 nt, Homo sapiens
uugugaaaucuaggcagagguu

SEQ ID NO: 51070 - RNA, 22 nt, Homo sapiens
uugugcuuuugagcugagauga

SEQ ID NO: 51071 - RNA, 22 nt, Homo sapiens
uugugaaaaaccucucguggaa

SEQ ID NO: 51072 - RNA, 22 nt, Homo sapiens
uugucuugcagcuuaggcauca

SEQ ID NO: 51073 - RNA, 22 nt, Homo sapiens
uuuuaagcuacaagagacauau

SEQ ID NO: 51074 - RNA, 20 nt, Homo sapiens
uuuuagcacuuguuauggug

SEQ ID NO: 51075 - RNA, 22 nt, Homo sapiens
uuuuaguugcucagguauucuc

SEQ ID NO: 51076 - RNA, 22 nt, Homo sapiens
uuuguguggccuuggccuggca

SEQ ID NO: 51077 - RNA, 22 nt, Homo sapiens
aaguagcagaggcaagacuuga

SEQ ID NO: 51078 - RNA, 22 nt, Homo sapiens
aaguacuguuuaaauugcagaa

SEQ ID NO: 51079 - RNA, 23 nt, Homo sapiens
aagguaagcuagaaagauguaga

SEQ ID NO: 51080 - RNA, 22 nt, Homo sapiens
uuuucaguuuuccagguagccg

SEQ ID NO: 51081 - RNA, 22 nt, Homo sapiens
aagugcuucagaagacaauauu

SEQ ID NO: 51082 - RNA, 22 nt, Homo sapiens
aaguauuagugaggauauggaa

SEQ ID NO: 51083 - RNA, 22 nt, Homo sapiens
aagucaaggagagaagcuucag

SEQ ID NO: 51084 - RNA, 22 nt, Homo sapiens
aagugaauucauuguguuauau

SEQ ID NO: 51085 - RNA, 22 nt, Homo sapiens
aauaagcugagagaauucuaca

SEQ ID NO: 51086 - RNA, 22 nt, Homo sapiens
aauaaagucugaagugugcuua

SEQ ID NO: 51087 - RNA, 22 nt, Homo sapiens
aaguuguaguuagagaguugcu

SEQ ID NO: 51088 - RNA, 22 nt, Homo sapiens
aaguuguuggaguuccauuguu

SEQ ID NO: 51089 - RNA, 22 nt, Homo sapiens
aaguggaauguuuguggcacaa

SEQ ID NO: 51090 - RNA, 18 nt, Homo sapiens
acagugcuggcaugagau

SEQ ID NO: 51091 - RNA, 22 nt, Homo sapiens
acacuauugagguuuguuugca

SEQ ID NO: 51092 - RNA, 22 nt, Homo sapiens
acacuguacuuauguuuugcag

SEQ ID NO: 51093 - RNA, 20 nt, Homo sapiens
acaguagaagggauuucaaa

SEQ ID NO: 51094 - RNA, 22 nt, Homo sapiens
acaguagugggcuacagaauca

SEQ ID NO: 51095 - RNA, 22 nt, Homo sapiens
acacaugugaaaaaaauguuac

SEQ ID NO: 51096 - RNA, 22 nt, Homo sapiens
acacaaugguaaguguuugugu

SEQ ID NO: 51097 - RNA, 22 nt, Homo sapiens
aauuaguugaaagucugcuuuu

SEQ ID NO: 51098 - RNA, 22 nt, Homo sapiens
acaauguauauuuuacuguagg

SEQ ID NO: 51099 - RNA, 22 nt, Homo sapiens
acacaguaaauauugucuccuc

SEQ ID NO: 51100 - RNA, 22 nt, Homo sapiens
acacaguaaauauguauugaau

SEQ ID NO: 51101 - RNA, 22 nt, Homo sapiens
acacaguauaugacaaugcuuu

SEQ ID NO: 51102 - RNA, 22 nt, Homo sapiens
aauggcaaauguuuucuguuga

SEQ ID NO: 51103 - RNA, 22 nt, Homo sapiens
aauggcucuuccuggaguugug

SEQ ID NO: 51104 - RNA, 18 nt, Homo sapiens
aauggcucuggguucuaa

SEQ ID NO: 51105 - RNA, 22 nt, Homo sapiens
aauggccuuuuucauuauacug

SEQ ID NO: 51106 - RNA, 22 nt, Homo sapiens
aauuacucgugucuuuacugcu

SEQ ID NO: 51107 - RNA, 22 nt, Homo sapiens
aaucacauuaaugcucccucag

SEQ ID NO: 51108 - RNA, 22 nt, Homo sapiens
aaucacauugaaucugcuaccu

SEQ ID NO: 51109 - RNA, 22 nt, Homo sapiens
aaucacacuugauguugagcaa

SEQ ID NO: 51110 - RNA, 22 nt, Homo sapiens
aaucacagccagcuuccgcuau

SEQ ID NO: 51111 - RNA, 22 nt, Homo sapiens
aauagcauugaaucuaccaauu

SEQ ID NO: 51112 - RNA, 23 nt, Homo sapiens
aauaucacaguggguguacaccc

SEQ ID NO: 51113 - RNA, 22 nt, Homo sapiens
aaucaacauuguuuuaagucaa

SEQ ID NO: 51114 - RNA, 22 nt, Homo sapiens
agaaagugcuucccuuugguga

SEQ ID NO: 51115 - RNA, 21 nt, Homo sapiens
acuuuguugggggcugaggca

SEQ ID NO: 51116 - RNA, 21 nt, Homo sapiens
agaaaaucuuaugggaaacau

SEQ ID NO: 51117 - RNA, 22 nt, Homo sapiens
acugaguguugauuuagauuaa

SEQ ID NO: 51118 - RNA, 23 nt, Homo sapiens
acugagcaauguuuacauacuug

SEQ ID NO: 51119 - RNA, 22 nt, Homo sapiens
acccaguguucaacauucacau

SEQ ID NO: 51120 - RNA, 22 nt, Homo sapiens
acuauacuguaacuguauucag

SEQ ID NO: 51121 - RNA, 22 nt, Homo sapiens
acuaugcuuuucuuagaauuaa

SEQ ID NO: 51122 - RNA, 22 nt, Homo sapiens
accagucucagguaugucuuua

SEQ ID NO: 51123 - RNA, 19 nt, Homo sapiens
accagauugcauucuugga

SEQ ID NO: 51124 - RNA, 22 nt, Homo sapiens
agauggugugcuaggaaaugua

SEQ ID NO: 51125 - RNA, 22 nt, Homo sapiens
agauggugauaaaugugguacc

SEQ ID NO: 51126 - RNA, 22 nt, Homo sapiens
agaugguauuauagguuucugu

SEQ ID NO: 51127 - RNA, 22 nt, Homo sapiens
agaucacucagguuucucccug

SEQ ID NO: 51128 - RNA, 22 nt, Homo sapiens
agcaauaugacauugcuacauc

SEQ ID NO: 51129 - RNA, 22 nt, Homo sapiens
agauucauccaaguuguugcau

SEQ ID NO: 51130 - RNA, 22 nt, Homo sapiens
agcagcauuaugauauaucuua

SEQ ID NO: 51131 - RNA, 22 nt, Homo sapiens
agcagcuuugcauggccuguga

SEQ ID NO: 51132 - RNA, 22 nt, Homo sapiens
agcacagccuuguguuuucuug

SEQ ID NO: 51133 - RNA, 22 nt, Homo sapiens
agcacagugaaugguuuacuca

SEQ ID NO: 51134 - RNA, 22 nt, Homo sapiens
agcacagugguuaaguuucuua

SEQ ID NO: 51135 - RNA, 22 nt, Homo sapiens
agcagcuuugcauggccugugg

SEQ ID NO: 51136 - RNA, 19 nt, Homo sapiens
agaguauuguuacuucucu

SEQ ID NO: 51137 - RNA, 19 nt, Homo sapiens
agaguauugaauuugcccu

SEQ ID NO: 51138 - RNA, 19 nt, Homo sapiens
agagacucauuguagcauu

SEQ ID NO: 51139 - RNA, 21 nt, Homo sapiens
agagucaucucuaucuguacc

SEQ ID NO: 51140 - RNA, 22 nt, Homo sapiens
agagaucaacugaauuacugga

SEQ ID NO: 51141 - RNA, 22 nt, Homo sapiens
agagauaguuuccaacucauac

SEQ ID NO: 51142 - RNA, 22 nt, Homo sapiens
agauacaucuaugugucugugu

SEQ ID NO: 51143 - RNA, 22 nt, Homo sapiens
agauauuuguuaggucugucag

SEQ ID NO: 51144 - RNA, 22 nt, Homo sapiens
agaugcauuuuuauuggaauac

SEQ ID NO: 51145 - RNA, 22 nt, Homo sapiens
agagaacugauuggaguugggc

SEQ ID NO: 51146 - RNA, 22 nt, Homo sapiens
agacacugaaauguauugaaga

SEQ ID NO: 51147 - RNA, 21 nt, Homo sapiens
agacacuuggaagguuuuaga

SEQ ID NO: 51148 - RNA, 22 nt, Homo sapiens
agacagcuggaguaucauagcu

SEQ ID NO: 51149 - RNA, 22 nt, Homo sapiens
agaauacugucuauucauggua

SEQ ID NO: 51150 - RNA, 20 nt, Homo sapiens
agaagcauugcucucuucag

SEQ ID NO: 51151 - RNA, 22 nt, Homo sapiens
agaagaacauagggugacugaa

SEQ ID NO: 51152 - RNA, 22 nt, Homo sapiens
agaauucugucauguuuauauu

SEQ ID NO: 51153 - RNA, 22 nt, Homo sapiens
auagcuguugaauggaauauuc

SEQ ID NO: 51154 - RNA, 22 nt, Homo sapiens
auaucacaaacaagucuguacu

SEQ ID NO: 51155 - RNA, 22 nt, Homo sapiens
auaucacaggaaaggaagauac

SEQ ID NO: 51156 - RNA, 22 nt, Homo sapiens
auaggcacauuaggaacuuuug

SEQ ID NO: 51157 - RNA, 17 nt, Homo sapiens
auaugaauuuuggagau

SEQ ID NO: 51158 - RNA, 22 nt, Homo sapiens
auaucugcauugccauuuaugu

SEQ ID NO: 51159 - RNA, 22 nt, Homo sapiens
auaucccagugaugauugauag

SEQ ID NO: 51160 - RNA, 22 nt, Homo sapiens
auaucccuguauaagugaaugu

SEQ ID NO: 51161 - RNA, 22 nt, Homo sapiens
auaucacagguguuuaccugau

SEQ ID NO: 51162 - RNA, 20 nt, Homo sapiens
auaugcagacacauacauac

SEQ ID NO: 51163 - RNA, 22 nt, Homo sapiens
auacuguuuuacaucauugccu

SEQ ID NO: 51164 - RNA, 22 nt, Homo sapiens
auagaagcugccaacguuucag

SEQ ID NO: 51165 - RNA, 20 nt, Homo sapiens
auagcauugauggacucaaa

SEQ ID NO: 51166 - RNA, 22 nt, Homo sapiens
auaaaugccuguuguuuuaagc

SEQ ID NO: 51167 - RNA, 22 nt, Homo sapiens
auaaaugcuuagaucuguauau

SEQ ID NO: 51168 - RNA, 22 nt, Homo sapiens
auaaaugcaaugguauuuuuga

SEQ ID NO: 51169 - RNA, 22 nt, Homo sapiens
auaaccuauggaucuacucggg

SEQ ID NO: 51170 - RNA, 20 nt, Homo sapiens
agugguuuucaaauaugucu

SEQ ID NO: 51171 - RNA, 22 nt, Homo sapiens
auaaagguaauaauaguugcau

SEQ ID NO: 51172 - RNA, 22 nt, Homo sapiens
auaaagguaagcacuauccuga

SEQ ID NO: 51173 - RNA, 22 nt, Homo sapiens
auacaugugugagcgaagaugu

SEQ ID NO: 51174 - RNA, 22 nt, Homo sapiens
auaagaagugaaccagacgucu

SEQ ID NO: 51175 - RNA, 22 nt, Homo sapiens
auaagauaguggaagugggauu

SEQ ID NO: 51176 - RNA, 22 nt, Homo sapiens
auaagaugaaggaagccauauc

SEQ ID NO: 51177 - RNA, 22 nt, Homo sapiens
auacaguugccauuucuugugc

SEQ ID NO: 51178 - RNA, 22 nt, Homo sapiens
auacaguguauguauaguacau

SEQ ID NO: 51179 - RNA, 22 nt, Homo sapiens
agcuuguccuccacccacacug

SEQ ID NO: 51180 - RNA, 22 nt, Homo sapiens
agcuugucuuauacuacuucau

SEQ ID NO: 51181 - RNA, 20 nt, Homo sapiens
aguauucacuuuuuucaugg

SEQ ID NO: 51182 - RNA, 22 nt, Homo sapiens
aguaucacaggcaaaacagaau

SEQ ID NO: 51183 - RNA, 22 nt, Homo sapiens
agcaucauaccaaucugguccu

SEQ ID NO: 51184 - RNA, 19 nt, Homo sapiens
agcaucauuauuguuuugg

SEQ ID NO: 51185 - RNA, 22 nt, Homo sapiens
agcauggucacuuugggcccca

SEQ ID NO: 51186 - RNA, 22 nt, Homo sapiens
agcaugacauauuguagagaaa

SEQ ID NO: 51187 - RNA, 22 nt, Homo sapiens
agugcauuugcaucucaauaua

SEQ ID NO: 51188 - RNA, 22 nt, Homo sapiens
agucaagugggguuagauaguu

SEQ ID NO: 51189 - RNA, 22 nt, Homo sapiens
agugaauuguucaacaggagga

SEQ ID NO: 51190 - RNA, 17 nt, Homo sapiens
agugagaucauggcuua

SEQ ID NO: 51191 - RNA, 22 nt, Homo sapiens
agugacuagaauaugaauuuua

SEQ ID NO: 51192 - RNA, 22 nt, Homo sapiens
agugaauguuggaaaguuauuu

SEQ ID NO: 51193 - RNA, 22 nt, Homo sapiens
agucauaggagagauaucacug

SEQ ID NO: 51194 - RNA, 22 nt, Homo sapiens
auggcaauguaagucagaaaaa

SEQ ID NO: 51195 - RNA, 22 nt, Homo sapiens
auggcagaaucaagccgacagc

SEQ ID NO: 51196 - RNA, 18 nt, Homo sapiens
auggcagaacaauuuaca

SEQ ID NO: 51197 - RNA, 22 nt, Homo sapiens
auggcaguuucagcuauaguuu

SEQ ID NO: 51198 - RNA, 22 nt, Homo sapiens
auggcagcccucuuuauccaug

SEQ ID NO: 51199 - RNA, 22 nt, Homo sapiens
auggcaauaauagcuaccauuu

SEQ ID NO: 51200 - RNA, 22 nt, Homo sapiens
auggaacauuauagauguaaaa

SEQ ID NO: 51201 - RNA, 22 nt, Homo sapiens
auggaacauaacuauuugggga

SEQ ID NO: 51202 - RNA, 22 nt, Homo sapiens
auggaaaugaagggcuggcccu

SEQ ID NO: 51203 - RNA, 22 nt, Homo sapiens
auggaacuggagaucauuaugu

SEQ ID NO: 51204 - RNA, 22 nt, Homo sapiens
auggaacuggagaugguuauau

SEQ ID NO: 51205 - RNA, 22 nt, Homo sapiens
augcuaucauucaggauuuguu

SEQ ID NO: 51206 - RNA, 22 nt, Homo sapiens
augcuaugugugacuucuuaug

SEQ ID NO: 51207 - RNA, 22 nt, Homo sapiens
augcuuguugcagccugagccu

SEQ ID NO: 51208 - RNA, 22 nt, Homo sapiens
augcacaugcgaaaacuugugu

SEQ ID NO: 51209 - RNA, 22 nt, Homo sapiens
augcaagacaccgauuagcuuu

SEQ ID NO: 51210 - RNA, 22 nt, Homo sapiens
augaucuagaguaggaaacaga

SEQ ID NO: 51211 - RNA, 22 nt, Homo sapiens
augaucauggaagugcacccau

SEQ ID NO: 51212 - RNA, 22 nt, Homo sapiens
augaugcaguacuuugggaaca

SEQ ID NO: 51213 - RNA, 22 nt, Homo sapiens
augauuuuuguaucgccugaug

SEQ ID NO: 51214 - RNA, 20 nt, Homo sapiens
augcaaacccugcuuugugg

SEQ ID NO: 51215 - RNA, 22 nt, Homo sapiens
augacaagaguguucagggaga

SEQ ID NO: 51216 - RNA, 22 nt, Homo sapiens
augacaaugaaucccuguuuca

SEQ ID NO: 51217 - RNA, 22 nt, Homo sapiens
augaauuuucugauguugggua

SEQ ID NO: 51218 - RNA, 22 nt, Homo sapiens
augaaugucuuauuuugagaaa

SEQ ID NO: 51219 - RNA, 22 nt, Homo sapiens
augaaaacaugauuugccuguu

SEQ ID NO: 51220 - RNA, 22 nt, Homo sapiens
augacauagaagcaauccccua

SEQ ID NO: 51221 - RNA, 20 nt, Homo sapiens
aucucugggcaaaggaaaau

SEQ ID NO: 51222 - RNA, 22 nt, Homo sapiens
aucucagagaaaauuacuaaga

SEQ ID NO: 51223 - RNA, 22 nt, Homo sapiens
aucucaguuaauuccaucuuuc

SEQ ID NO: 51224 - RNA, 22 nt, Homo sapiens
aucuaaucaucgcaaccuucaa

SEQ ID NO: 51225 - RNA, 22 nt, Homo sapiens
aucgcugagaaagggacuuuca

SEQ ID NO: 51226 - RNA, 22 nt, Homo sapiens
aucgugucuggcccugaaugcu

SEQ ID NO: 51227 - RNA, 22 nt, Homo sapiens
auccuacaguccauucuuugug

SEQ ID NO: 51228 - RNA, 22 nt, Homo sapiens
auccuguacuaagguuuuccca

SEQ ID NO: 51229 - RNA, 22 nt, Homo sapiens
auccugaugacacagugcugca

SEQ ID NO: 51230 - RNA, 22 nt, Homo sapiens
auccugagacuuugcugaaguu

SEQ ID NO: 51231 - RNA, 22 nt, Homo sapiens
auccugagacuuuucugaaguu

SEQ ID NO: 51232 - RNA, 22 nt, Homo sapiens
aucuuuaguggcuguuuucaga

SEQ ID NO: 51233 - RNA, 22 nt, Homo sapiens
aucuguguuuaaggucccagaa

SEQ ID NO: 51234 - RNA, 22 nt, Homo sapiens
aucugacuuuuaauuugaaaac

SEQ ID NO: 51235 - RNA, 22 nt, Homo sapiens
aucugcauuagggugaagaccu

SEQ ID NO: 51236 - RNA, 22 nt, Homo sapiens
aucucuugccagucagaauggu

SEQ ID NO: 51237 - RNA, 22 nt, Homo sapiens
aucaccuuucccuuucugaauc

SEQ ID NO: 51238 - RNA, 22 nt, Homo sapiens
aucacuggccuuuuuaaaugcu

SEQ ID NO: 51239 - RNA, 22 nt, Homo sapiens
aucacugggagcagccauuaau

SEQ ID NO: 51240 - RNA, 20 nt, Homo sapiens
aucacuggagaaggaaaccu

SEQ ID NO: 51241 - RNA, 22 nt, Homo sapiens
aucacuuugcucuccagugugg

SEQ ID NO: 51242 - RNA, 23 nt, Homo sapiens
aucacuguuaacaauuucuuccu

SEQ ID NO: 51243 - RNA, 22 nt, Homo sapiens
aucacuggucaugagagaagua

SEQ ID NO: 51244 - RNA, 22 nt, Homo sapiens
auauggcuuuuauuauguugag

SEQ ID NO: 51245 - RNA, 22 nt, Homo sapiens
auauggguuuuauauuaggcuc

SEQ ID NO: 51246 - RNA, 22 nt, Homo sapiens
auaugguguuugcuauucagcu

SEQ ID NO: 51247 - RNA, 22 nt, Homo sapiens
auaugguuuuuggaagcauauc

SEQ ID NO: 51248 - RNA, 22 nt, Homo sapiens
aucaccauguguacauuagacc

SEQ ID NO: 51249 - RNA, 22 nt, Homo sapiens
auauguaguauggaaacauugu

SEQ ID NO: 51250 - RNA, 22 nt, Homo sapiens
aucaccugagcaguauacacug

SEQ ID NO: 51251 - RNA, 22 nt, Homo sapiens
auccaucagacggcaggcguug

SEQ ID NO: 51252 - RNA, 22 nt, Homo sapiens
auccacauucauggaccagucc

SEQ ID NO: 51253 - RNA, 22 nt, Homo sapiens
aucagagugaauaaugacaaaa

SEQ ID NO: 51254 - RNA, 22 nt, Homo sapiens
aucauugugcaucuucauucca

SEQ ID NO: 51255 - RNA, 22 nt, Homo sapiens
auccacaugcaguuggaaacag

SEQ ID NO: 51256 - RNA, 23 nt, Homo sapiens
auccacauucuaguccuuuaugc

SEQ ID NO: 51257 - RNA, 22 nt, Homo sapiens
aucauugugugaguugauggga

SEQ ID NO: 51258 - RNA, 22 nt, Homo sapiens
cuggaaucuauggauaacaucg

SEQ ID NO: 51259 - RNA, 22 nt, Homo sapiens
cuggaauuacaggguugagcua

SEQ ID NO: 51260 - RNA, 22 nt, Homo sapiens
cuggacguugaggcugcaguga

SEQ ID NO: 51261 - RNA, 22 nt, Homo sapiens
cuggaaugcagcuuuaggggcu

SEQ ID NO: 51262 - RNA, 22 nt, Homo sapiens
cuggaauucaaaaucugaauuu

SEQ ID NO: 51263 - RNA, 22 nt, Homo sapiens
cuggauagagauugaugaugcu

SEQ ID NO: 51264 - RNA, 22 nt, Homo sapiens
cuguaacagaauaaauuuguuu

SEQ ID NO: 51265 - RNA, 22 nt, Homo sapiens
cuguucaggaggcauuuggugg

SEQ ID NO: 51266 - RNA, 22 nt, Homo sapiens
cuguuugaggguuugcuuucag

SEQ ID NO: 51267 - RNA, 22 nt, Homo sapiens
cuguucaaauuguuugugaagu

SEQ ID NO: 51268 - RNA, 22 nt, Homo sapiens
cugucucagugaauugguuuua

SEQ ID NO: 51269 - RNA, 22 nt, Homo sapiens
cuguaugugagaaauaauaagu

SEQ ID NO: 51270 - RNA, 22 nt, Homo sapiens
cuuaaguaguuguggaaugaau

SEQ ID NO: 51271 - RNA, 22 nt, Homo sapiens
cuuccagcuggguucagucagu

SEQ ID NO: 51272 - RNA, 22 nt, Homo sapiens
cuugugauugcacggcugccug

SEQ ID NO: 51273 - RNA, 21 nt, Homo sapiens
cuugucuugcuuagaauagac

SEQ ID NO: 51274 - RNA, 18 nt, Homo sapiens
cuugucaaaucuuuccuc

SEQ ID NO: 51275 - RNA, 22 nt, Homo sapiens
cuuuacaguuggacucacgagg

SEQ ID NO: 51276 - RNA, 22 nt, Homo sapiens
cuuuaguugucuccucaagggu

SEQ ID NO: 51277 - RNA, 22 nt, Homo sapiens
cuuguguuacauauuuaagaga

SEQ ID NO: 51278 - RNA, 22 nt, Homo sapiens
cuuucugaggagaauagagaac

SEQ ID NO: 51279 - RNA, 22 nt, Homo sapiens
cuuuccauuguuggagcauaaa

SEQ ID NO: 51280 - RNA, 22 nt, Homo sapiens
cuuuaguuaaaauugggguugu

SEQ ID NO: 51281 - RNA, 22 nt, Homo sapiens
cuuuaugagguuggauggaucu

SEQ ID NO: 51282 - RNA, 22 nt, Homo sapiens
cuuuggcauuagccuguauaga

SEQ ID NO: 51283 - RNA, 20 nt, Homo sapiens
cuuuggcaaugagaacaggg

SEQ ID NO: 51284 - RNA, 22 nt, Homo sapiens
cuuuggauggaaccucucuuuc

SEQ ID NO: 51285 - RNA, 18 nt, Homo sapiens
cuuugcagcuuccagagg

SEQ ID NO: 51286 - RNA, 22 nt, Homo sapiens
cuaaugcagucaggagaaggaa

SEQ ID NO: 51287 - RNA, 22 nt, Homo sapiens
cuacagcacugagcugugugca

SEQ ID NO: 51288 - RNA, 22 nt, Homo sapiens
cuacagcagcccaguccccgaa

SEQ ID NO: 51289 - RNA, 22 nt, Homo sapiens
cuagaagcauauucagaacaga

SEQ ID NO: 51290 - RNA, 22 nt, Homo sapiens
cuauuugcauucagaggcaugu

SEQ ID NO: 51291 - RNA, 22 nt, Homo sapiens
cuauuugguuggugaaaaaagu

SEQ ID NO: 51292 - RNA, 19 nt, Homo sapiens
cuauugcacauagcugaag

SEQ ID NO: 51293 - RNA, 22 nt, Homo sapiens
cucacugugguguccuuaggua

SEQ ID NO: 51294 - RNA, 22 nt, Homo sapiens
cucagaguacuuuucccacuuc

SEQ ID NO: 51295 - RNA, 20 nt, Homo sapiens
cucagauuauucugaagcaa

SEQ ID NO: 51296 - RNA, 22 nt, Homo sapiens
cugagguauaucccauuagaag

SEQ ID NO: 51297 - RNA, 22 nt, Homo sapiens
cugagcaauauagugagaucuu

SEQ ID NO: 51298 - RNA, 22 nt, Homo sapiens
cugagcaaaaugaagacacgau

SEQ ID NO: 51299 - RNA, 22 nt, Homo sapiens
cugagcuaugccuggaaaggca

SEQ ID NO: 51300 - RNA, 18 nt, Homo sapiens
cugagcacugcuuuauga

SEQ ID NO: 51301 - RNA, 22 nt, Homo sapiens
cugagguuaggaguuugagacc

SEQ ID NO: 51302 - RNA, 22 nt, Homo sapiens
cugagguuguucuucucagugg

SEQ ID NO: 51303 - RNA, 22 nt, Homo sapiens
cugauacugagaccuuggguua

SEQ ID NO: 51304 - RNA, 20 nt, Homo sapiens
cugcaaaugcugcugcugau

SEQ ID NO: 51305 - RNA, 22 nt, Homo sapiens
cugaugguuuuacacaagggca

SEQ ID NO: 51306 - RNA, 22 nt, Homo sapiens
cugauugugcagagguguaauu

SEQ ID NO: 51307 - RNA, 22 nt, Homo sapiens
cugauuguuugccucuaaaauc

SEQ ID NO: 51308 - RNA, 22 nt, Homo sapiens
cugauugucaucaauauuauua

SEQ ID NO: 51309 - RNA, 22 nt, Homo sapiens
cugccaguuugauucgggccac

SEQ ID NO: 51310 - RNA, 22 nt, Homo sapiens
cugcauuggguuaugcauuuuu

SEQ ID NO: 51311 - RNA, 22 nt, Homo sapiens
cugcauuagucuguuuaguguu

SEQ ID NO: 51312 - RNA, 19 nt, Homo sapiens
gauauguugagcacccuuu

SEQ ID NO: 51313 - RNA, 22 nt, Homo sapiens
gaguaaauguccuagcuucuug

SEQ ID NO: 51314 - RNA, 22 nt, Homo sapiens
gagaugugguucaaggguguuu

SEQ ID NO: 51315 - RNA, 22 nt, Homo sapiens
gagaugguguuccacugccagu

SEQ ID NO: 51316 - RNA, 22 nt, Homo sapiens
gagauucuucaauauuuauucu

SEQ ID NO: 51317 - RNA, 22 nt, Homo sapiens
gagauuauuuaaaaggugauuu

SEQ ID NO: 51318 - RNA, 22 nt, Homo sapiens
gagauuuucagcuugacuggga

SEQ ID NO: 51319 - RNA, 22 nt, Homo sapiens
gagguggauacauuaaauaaug

SEQ ID NO: 51320 - RNA, 18 nt, Homo sapiens
gauguaguauggugugga

SEQ ID NO: 51321 - RNA, 22 nt, Homo sapiens
gauguaggugcauuugcacgug

SEQ ID NO: 51322 - RNA, 22 nt, Homo sapiens
gauguuguuuagccuuugaugu

SEQ ID NO: 51323 - RNA, 22 nt, Homo sapiens
gcaagagguaucuuauuuuccc

SEQ ID NO: 51324 - RNA, 22 nt, Homo sapiens
gaucuguguuuguaugcauaag

SEQ ID NO: 51325 - RNA, 22 nt, Homo sapiens
gaucugucuuuccuuauagucu

SEQ ID NO: 51326 - RNA, 22 nt, Homo sapiens
gaugguguuuugauaggaauug

SEQ ID NO: 51327 - RNA, 22 nt, Homo sapiens
gaucccauuggcugccaugugg

SEQ ID NO: 51328 - RNA, 22 nt, Homo sapiens
gaucacauuguuucauacauau

SEQ ID NO: 51329 - RNA, 22 nt, Homo sapiens
gaucacauguguacucaaugug

SEQ ID NO: 51330 - RNA, 22 nt, Homo sapiens
gaguggugguucugaaacuuuu

SEQ ID NO: 51331 - RNA, 22 nt, Homo sapiens
gauauguuucuucaauaccuag

SEQ ID NO: 51332 - RNA, 22 nt, Homo sapiens
gaucacauggccauuucuagcu

SEQ ID NO: 51333 - RNA, 17 nt, Homo sapiens
gaucacagucgucuccu

SEQ ID NO: 51334 - RNA, 22 nt, Homo sapiens
gagaacaguguuguauuuuuuc

SEQ ID NO: 51335 - RNA, 22 nt, Homo sapiens
gagaacauacggcauuugguuu

SEQ ID NO: 51336 - RNA, 20 nt, Homo sapiens
gagaacugagaugcguuuga

SEQ ID NO: 51337 - RNA, 22 nt, Homo sapiens
gagaagugcgucguuugaugau

SEQ ID NO: 51338 - RNA, 22 nt, Homo sapiens
gagacugagucuugcuuuguca

SEQ ID NO: 51339 - RNA, 22 nt, Homo sapiens
gagacugagucuugcucuguca

SEQ ID NO: 51340 - RNA, 22 nt, Homo sapiens
gagacugagucuugcccuguca

SEQ ID NO: 51341 - RNA, 22 nt, Homo sapiens
gagacucuuagauuggaaaucu

SEQ ID NO: 51342 - RNA, 22 nt, Homo sapiens
gagacggagucuugcucuguug

SEQ ID NO: 51343 - RNA, 22 nt, Homo sapiens
gagacggagucucgcucugucg

SEQ ID NO: 51344 - RNA, 22 nt, Homo sapiens
gagacggagucucgcucuguca

SEQ ID NO: 51345 - RNA, 22 nt, Homo sapiens
gagaucuucguguggggagaca

SEQ ID NO: 51346 - RNA, 22 nt, Homo sapiens
gagaucuuuaagaacuacugcu

SEQ ID NO: 51347 - RNA, 22 nt, Homo sapiens
gagaugaaguuaaggaucuuua

SEQ ID NO: 51348 - RNA, 22 nt, Homo sapiens
gagauauuuagaaauguguucu

SEQ ID NO: 51349 - RNA, 22 nt, Homo sapiens
gagauauuauuucccuuucaca

SEQ ID NO: 51350 - RNA, 22 nt, Homo sapiens
gagauauucugguuuacuaaau

SEQ ID NO: 51351 - RNA, 22 nt, Homo sapiens
gaauguuuacuuuguuuaauac

SEQ ID NO: 51352 - RNA, 22 nt, Homo sapiens
cuguagcuuuuauaugcuuagc

SEQ ID NO: 51353 - RNA, 20 nt, Homo sapiens
gacaugacuaggagauagcc

SEQ ID NO: 51354 - RNA, 22 nt, Homo sapiens
gacauguuuacaguguugagag

SEQ ID NO: 51355 - RNA, 22 nt, Homo sapiens
gacauguaaggcucucucuguu

SEQ ID NO: 51356 - RNA, 22 nt, Homo sapiens
auuaaguugugccugaaaacuu

SEQ ID NO: 51357 - RNA, 22 nt, Homo sapiens
auuagguaauauaaucauggca

SEQ ID NO: 51358 - RNA, 22 nt, Homo sapiens
auucaugggagcuacuuuaaaa

SEQ ID NO: 51359 - RNA, 22 nt, Homo sapiens
auuccacagccgauaccaugac

SEQ ID NO: 51360 - RNA, 22 nt, Homo sapiens
auuagguagugagaugcugcug

SEQ ID NO: 51361 - RNA, 20 nt, Homo sapiens
auucauggaggagcaauugg

SEQ ID NO: 51362 - RNA, 22 nt, Homo sapiens
auuccaguuguaagguuuuuca

SEQ ID NO: 51363 - RNA, 22 nt, Homo sapiens
auuccaguuugugagaagcugu

SEQ ID NO: 51364 - RNA, 22 nt, Homo sapiens
auguugcaguuuaauuauccua

SEQ ID NO: 51365 - RNA, 22 nt, Homo sapiens
auguuguaguaugagucaaaau

SEQ ID NO: 51366 - RNA, 22 nt, Homo sapiens
auguuauguuaaugauaaugga

SEQ ID NO: 51367 - RNA, 22 nt, Homo sapiens
auuaacaucuagaguuuuggug

SEQ ID NO: 51368 - RNA, 22 nt, Homo sapiens
auuaaggaguggguucauggug

SEQ ID NO: 51369 - RNA, 22 nt, Homo sapiens
auuaagugaaugaaguuguucc

SEQ ID NO: 51370 - RNA, 22 nt, Homo sapiens
auuaaguuaggauuuugagaua

SEQ ID NO: 51371 - RNA, 22 nt, Homo sapiens
auguguauuaccucgauuguga

SEQ ID NO: 51372 - RNA, 19 nt, Homo sapiens
augugguuagcaugacugc

SEQ ID NO: 51373 - RNA, 22 nt, Homo sapiens
auguuauguucuucucuguaua

SEQ ID NO: 51374 - RNA, 22 nt, Homo sapiens
auguuaacaucuuaguuuucau

SEQ ID NO: 51375 - RNA, 22 nt, Homo sapiens
auguuaagauggaacaugggaa

SEQ ID NO: 51376 - RNA, 23 nt, Homo sapiens
augugugcuuggagagcaggaug

SEQ ID NO: 51377 - RNA, 22 nt, Homo sapiens
auggcucuguuccaugugucuu

SEQ ID NO: 51378 - RNA, 22 nt, Homo sapiens
auggccuaugacagguauguug

SEQ ID NO: 51379 - RNA, 22 nt, Homo sapiens
auggcauugaagaguugucccu

SEQ ID NO: 51380 - RNA, 22 nt, Homo sapiens
augugcuugagggaaaucaguu

SEQ ID NO: 51381 - RNA, 22 nt, Homo sapiens
augugcuuauagguguauguuu

SEQ ID NO: 51382 - RNA, 22 nt, Homo sapiens
augugguaggcccaugagucau

SEQ ID NO: 51383 - RNA, 22 nt, Homo sapiens
auggcauuuuuagggcugggug

SEQ ID NO: 51384 - RNA, 22 nt, Homo sapiens
auggcuuuaagagugucugaau

SEQ ID NO: 51385 - RNA, 20 nt, Homo sapiens
augugcuaauauuaauaugu

SEQ ID NO: 51386 - RNA, 22 nt, Homo sapiens
auggcuguuuuuuauguuacag

SEQ ID NO: 51387 - RNA, 22 nt, Homo sapiens
auugaacuuaaaagacuugcca

SEQ ID NO: 51388 - RNA, 22 nt, Homo sapiens
auugcacuccagccuggcagca

SEQ ID NO: 51389 - RNA, 22 nt, Homo sapiens
auugaacuuuugucacugacau

SEQ ID NO: 51390 - RNA, 23 nt, Homo sapiens
auugcagaaucacagagguagug

SEQ ID NO: 51391 - RNA, 22 nt, Homo sapiens
auugcagaaaugacagagcgcc

SEQ ID NO: 51392 - RNA, 22 nt, Homo sapiens
auugcagauucgcuuuguguug

SEQ ID NO: 51393 - RNA, 22 nt, Homo sapiens
auugcacuccagucucaccagg

SEQ ID NO: 51394 - RNA, 22 nt, Homo sapiens
auuguacugccccccuguugcu

SEQ ID NO: 51395 - RNA, 22 nt, Homo sapiens
caacagucagcccauccacaga

SEQ ID NO: 51396 - RNA, 22 nt, Homo sapiens
caaauugcuugucuguagugga

SEQ ID NO: 51397 - RNA, 22 nt, Homo sapiens
caagagaccugagugucauucu

SEQ ID NO: 51398 - RNA, 19 nt, Homo sapiens
caacccugcagagaaagga

SEQ ID NO: 51399 - RNA, 22 nt, Homo sapiens
cacagagugagacccugucucu

SEQ ID NO: 51400 - RNA, 22 nt, Homo sapiens
cacauguuugcuacauuuuucu

SEQ ID NO: 51401 - RNA, 22 nt, Homo sapiens
auugugauggucaaaggaaaua

SEQ ID NO: 51402 - RNA, 22 nt, Homo sapiens
auuuaugguuaauauaggaagu

SEQ ID NO: 51403 - RNA, 22 nt, Homo sapiens
caaaccuguaggggccaagagg

SEQ ID NO: 51404 - RNA, 22 nt, Homo sapiens
caaaugacaucauuucauucaa

SEQ ID NO: 51405 - RNA, 22 nt, Homo sapiens
caaagugguuuauacaugauug

SEQ ID NO: 51406 - RNA, 22 nt, Homo sapiens
caucacaguacuaaucgucaua

SEQ ID NO: 51407 - RNA, 22 nt, Homo sapiens
cauacaugugcuugucuuaugc

SEQ ID NO: 51408 - RNA, 22 nt, Homo sapiens
cauacagcuaguaaguguaaga

SEQ ID NO: 51409 - RNA, 22 nt, Homo sapiens
caucacaugcuuauuuuccuca

SEQ ID NO: 51410 - RNA, 21 nt, Homo sapiens
caucacauuacucaaaguccu

SEQ ID NO: 51411 - RNA, 23 nt, Homo sapiens
caucacauagaggaaagaggaca

SEQ ID NO: 51412 - RNA, 23 nt, Homo sapiens
cagugguguuagagaaaucuuuu

SEQ ID NO: 51413 - RNA, 22 nt, Homo sapiens
caguuguuuuaugacauaagau

SEQ ID NO: 51414 - RNA, 22 nt, Homo sapiens
cauacaagcuacaaucacaaag

SEQ ID NO: 51415 - RNA, 22 nt, Homo sapiens
cagugcaugacuguauauuauc

SEQ ID NO: 51416 - RNA, 22 nt, Homo sapiens
cagugcauguggcacucuccag

SEQ ID NO: 51417 - RNA, 22 nt, Homo sapiens
cagugcauaggaucuaaaauuu

SEQ ID NO: 51418 - RNA, 22 nt, Homo sapiens
cagugcacugggauuauaagug

SEQ ID NO: 51419 - RNA, 23 nt, Homo sapiens
cagcucauuuggguccccuuguc

SEQ ID NO: 51420 - RNA, 22 nt, Homo sapiens
caccaguuuuucagugauucaa

SEQ ID NO: 51421 - RNA, 19 nt, Homo sapiens
caguaucauugcacauagu

SEQ ID NO: 51422 - RNA, 22 nt, Homo sapiens
cccugaagauacagaguuuggg

SEQ ID NO: 51423 - RNA, 22 nt, Homo sapiens
cccugagagcagggucuuucuc

SEQ ID NO: 51424 - RNA, 22 nt, Homo sapiens
cccugagaugugaauuucagag

SEQ ID NO: 51425 - RNA, 22 nt, Homo sapiens
ccuuuguuuaguugaauuguau

SEQ ID NO: 51426 - RNA, 22 nt, Homo sapiens
cgcccuguagcuagcuagaggu

SEQ ID NO: 51427 - RNA, 22 nt, Homo sapiens
cgaguguaguaggccauaugaa

SEQ ID NO: 51428 - RNA, 22 nt, Homo sapiens
cgcuggugucuaagcgacagcu

SEQ ID NO: 51429 - RNA, 22 nt, Homo sapiens
cggcaguggguaagccaagcuu

SEQ ID NO: 51430 - RNA, 22 nt, Homo sapiens
cguugcacuccagccugggcaa

SEQ ID NO: 51431 - RNA, 22 nt, Homo sapiens
cuaaaacuuucugagugcagca

SEQ ID NO: 51432 - RNA, 22 nt, Homo sapiens
cgugaauguuuuggucuuucac

SEQ ID NO: 51433 - RNA, 22 nt, Homo sapiens
cuaaaugcacugucaaaggaag

SEQ ID NO: 51434 - RNA, 22 nt, Homo sapiens
cuaacacagagguuuauuucuc

SEQ ID NO: 51435 - RNA, 22 nt, Homo sapiens
cuaauacguaguauauccauga

SEQ ID NO: 51436 - RNA, 22 nt, Homo sapiens
cuaacuaugucucaggaugucc

SEQ ID NO: 51437 - RNA, 22 nt, Homo sapiens
caugauauugcagaauguuggu

SEQ ID NO: 51438 - RNA, 22 nt, Homo sapiens
ccaaaucucauguugaaaugug

SEQ ID NO: 51439 - RNA, 22 nt, Homo sapiens
ccaaauccauccaaaucauaga

SEQ ID NO: 51440 - RNA, 22 nt, Homo sapiens
cauugucccucaaugucuauga

SEQ ID NO: 51441 - RNA, 22 nt, Homo sapiens
cauuuugcaguuucugucucca

SEQ ID NO: 51442 - RNA, 22 nt, Homo sapiens
cauuuugguuaaauagguagcu

SEQ ID NO: 51443 - RNA, 22 nt, Homo sapiens
ccaccuguacuuaagucacuuu

SEQ ID NO: 51444 - RNA, 17 nt, Homo sapiens
ccccugagcgaugcagu

SEQ ID NO: 51445 - RNA, 22 nt, Homo sapiens
ugaaagacugaagaauaggcau

SEQ ID NO: 51446 - RNA, 22 nt, Homo sapiens
ugaaaguaauugcaguuuuuac

SEQ ID NO: 51447 - RNA, 20 nt, Homo sapiens
ugaaacacauggacuggggu

SEQ ID NO: 51448 - RNA, 22 nt, Homo sapiens
ugaaagacacagaaguugccca

SEQ ID NO: 51449 - RNA, 22 nt, Homo sapiens
ucuuucacuuagcaugauguuu

SEQ ID NO: 51450 - RNA, 22 nt, Homo sapiens
ucuuuagugacaguugugcaag

SEQ ID NO: 51451 - RNA, 22 nt, Homo sapiens
ucuugucacugcauccccagcu

SEQ ID NO: 51452 - RNA, 22 nt, Homo sapiens
ucuuuaguaauuucuguaaggc

SEQ ID NO: 51453 - RNA, 19 nt, Homo sapiens
ucuuuagucacauuuuuau

SEQ ID NO: 51454 - RNA, 22 nt, Homo sapiens
ucuuuaguuaagggacauuuua

SEQ ID NO: 51455 - RNA, 22 nt, Homo sapiens
ucugugguaagaaacgcauguc

SEQ ID NO: 51456 - RNA, 22 nt, Homo sapiens
ucugugcauuguaggauguuua

SEQ ID NO: 51457 - RNA, 22 nt, Homo sapiens
ucugugcauuuucuuuuagacu

SEQ ID NO: 51458 - RNA, 22 nt, Homo sapiens
ucugugcggucuguguuaugaa

SEQ ID NO: 51459 - RNA, 22 nt, Homo sapiens
ucuuggacuuuugugagaaauc

SEQ ID NO: 51460 - RNA, 22 nt, Homo sapiens
ugaaaugcuaauucguagcuaa

SEQ ID NO: 51461 - RNA, 20 nt, Homo sapiens
ugaaaucuucacuaagucuc

SEQ ID NO: 51462 - RNA, 22 nt, Homo sapiens
ugaaauacuuaauuucuccaug

SEQ ID NO: 51463 - RNA, 22 nt, Homo sapiens
ugaaaugccuuuaaugaauuua

SEQ ID NO: 51464 - RNA, 22 nt, Homo sapiens
ugaaaugcagaacuuuaggucu

SEQ ID NO: 51465 - RNA, 22 nt, Homo sapiens
ugaauaggcaguuaaguuuaug

SEQ ID NO: 51466 - RNA, 22 nt, Homo sapiens
ugaacacagccugccucugcca

SEQ ID NO: 51467 - RNA, 22 nt, Homo sapiens
ugaauagaaguggcaggaguag

SEQ ID NO: 51468 - RNA, 22 nt, Homo sapiens
ugaauugucucucacuggguuc

SEQ ID NO: 51469 - RNA, 22 nt, Homo sapiens
ugaauucuguccaaaauaacug

SEQ ID NO: 51470 - RNA, 22 nt, Homo sapiens
ugaaugguaauuuaguaggcac

SEQ ID NO: 51471 - RNA, 22 nt, Homo sapiens
ugaauauuugcuacucacucuu

SEQ ID NO: 51472 - RNA, 21 nt, Homo sapiens
ugaauauuuggguugugucca

SEQ ID NO: 51473 - RNA, 22 nt, Homo sapiens
ugaaucaugcugcuauaaagac

SEQ ID NO: 51474 - RNA, 22 nt, Homo sapiens
ugaaugguaaagaaaagcacug

SEQ ID NO: 51475 - RNA, 18 nt, Homo sapiens
ucuggcuucuuuguucca

SEQ ID NO: 51476 - RNA, 22 nt, Homo sapiens
ucuggccuacaaguaauuuuau

SEQ ID NO: 51477 - RNA, 22 nt, Homo sapiens
ucuggccuacaucauuuuuccg

SEQ ID NO: 51478 - RNA, 22 nt, Homo sapiens
ucuggcuugugaacugucuucu

SEQ ID NO: 51479 - RNA, 22 nt, Homo sapiens
ucugcauauucuagggcaccaa

SEQ ID NO: 51480 - RNA, 22 nt, Homo sapiens
ucugucuuugccuaaguuuguc

SEQ ID NO: 51481 - RNA, 22 nt, Homo sapiens
ucugucuugugguuugagugcc

SEQ ID NO: 51482 - RNA, 22 nt, Homo sapiens
ucugucacugaaucccugucac

SEQ ID NO: 51483 - RNA, 19 nt, Homo sapiens
ucugucacuggggguauuc

SEQ ID NO: 51484 - RNA, 22 nt, Homo sapiens
ucugucacugguggacgaucac

SEQ ID NO: 51485 - RNA, 22 nt, Homo sapiens
ucuguaguuaacagcuucagcu

SEQ ID NO: 51486 - RNA, 22 nt, Homo sapiens
ucucauagaggcagagaguaaa

SEQ ID NO: 51487 - RNA, 19 nt, Homo sapiens
ucucaguguuggucaggug

SEQ ID NO: 51488 - RNA, 22 nt, Homo sapiens
ucucaugaagguggagaguagg

SEQ ID NO: 51489 - RNA, 22 nt, Homo sapiens
ucuccauugaaauggacauaau

SEQ ID NO: 51490 - RNA, 21 nt, Homo sapiens
ucucauugugguuuuaauugg

SEQ ID NO: 51491 - RNA, 22 nt, Homo sapiens
ucucauugauucuggggugaug

SEQ ID NO: 51492 - RNA, 22 nt, Homo sapiens
ucucagugaauugguuuugucu

SEQ ID NO: 51493 - RNA, 19 nt, Homo sapiens
ucucugguguuggagggga

SEQ ID NO: 51494 - RNA, 22 nt, Homo sapiens
ucucugguuaugucauuaagca

SEQ ID NO: 51495 - RNA, 22 nt, Homo sapiens
ucugacagugagagaaaucuga

SEQ ID NO: 51496 - RNA, 22 nt, Homo sapiens
ucucuuggugacuuaaaauguu

SEQ ID NO: 51497 - RNA, 22 nt, Homo sapiens
ucugagacuguuucuaacaagc

SEQ ID NO: 51498 - RNA, 22 nt, Homo sapiens
ucagguugcuaaguauaauauu

SEQ ID NO: 51499 - RNA, 22 nt, Homo sapiens
ucaguagagacaggauuucacc

SEQ ID NO: 51500 - RNA, 22 nt, Homo sapiens
ucaguuuagguguaacggccac

SEQ ID NO: 51501 - RNA, 22 nt, Homo sapiens
ucaguguuuggaaucucaauuu

SEQ ID NO: 51502 - RNA, 21 nt, Homo sapiens
ucauaagcucaacaucuguag

SEQ ID NO: 51503 - RNA, 22 nt, Homo sapiens
ucauacuguccaauucuagugg

SEQ ID NO: 51504 - RNA, 22 nt, Homo sapiens
ucauacaguaguccucacuugu

SEQ ID NO: 51505 - RNA, 18 nt, Homo sapiens
ucauagaucaugacagug

SEQ ID NO: 51506 - RNA, 22 nt, Homo sapiens
ucaguguuuuauccuccagagc

SEQ ID NO: 51507 - RNA, 21 nt, Homo sapiens
ucauauguaucuuugugccuc

SEQ ID NO: 51508 - RNA, 22 nt, Homo sapiens
ucaguaaaugcuguucucuuuu

SEQ ID NO: 51509 - RNA, 22 nt, Homo sapiens
ucagguauuuuaucacaugaag

SEQ ID NO: 51510 - RNA, 22 nt, Homo sapiens
ucacuuuggguacuauggaaau

SEQ ID NO: 51511 - RNA, 22 nt, Homo sapiens
ucaggcacucagcuuagagucu

SEQ ID NO: 51512 - RNA, 22 nt, Homo sapiens
ucagguaaucuauuugucuuuu

SEQ ID NO: 51513 - RNA, 22 nt, Homo sapiens
uccaugaguccauuagaaaaaa

SEQ ID NO: 51514 - RNA, 22 nt, Homo sapiens
uccauguagaagacaggggaga

SEQ ID NO: 51515 - RNA, 22 nt, Homo sapiens
ucauguguugcacugaggaccu

SEQ ID NO: 51516 - RNA, 22 nt, Homo sapiens
ucauugcacucccagacacccu

SEQ ID NO: 51517 - RNA, 22 nt, Homo sapiens
ucauucuuucuguggaggggcu

SEQ ID NO: 51518 - RNA, 22 nt, Homo sapiens
ucaugcaucuuguggaauuuga

SEQ ID NO: 51519 - RNA, 19 nt, Homo sapiens
ucaugugcauacauuuggg

SEQ ID NO: 51520 - RNA, 22 nt, Homo sapiens
ucaugacacuggcaggagcuaa

SEQ ID NO: 51521 - RNA, 22 nt, Homo sapiens
ucauccauacaguuagcaaagg

SEQ ID NO: 51522 - RNA, 21 nt, Homo sapiens
ucaucaagcuguagacaugau

SEQ ID NO: 51523 - RNA, 22 nt, Homo sapiens
ucacuggucuaaguggaggggg

SEQ ID NO: 51524 - RNA, 22 nt, Homo sapiens
ucacauggggaagggacuagcu

SEQ ID NO: 51525 - RNA, 22 nt, Homo sapiens
ucacauucaauuguaauccccg

SEQ ID NO: 51526 - RNA, 20 nt, Homo sapiens
ucacauccucucccaacaug

SEQ ID NO: 51527 - RNA, 22 nt, Homo sapiens
ucacaugaauugucuuguucca

SEQ ID NO: 51528 - RNA, 23 nt, Homo sapiens
ucacaguuacuuuugcaucaacc

SEQ ID NO: 51529 - RNA, 22 nt, Homo sapiens
uauuuguccccuccaaaaguca

SEQ ID NO: 51530 - RNA, 22 nt, Homo sapiens
ucaaacauccccaccagggacu

SEQ ID NO: 51531 - RNA, 22 nt, Homo sapiens
ucacacucucaccaacauuugg

SEQ ID NO: 51532 - RNA, 22 nt, Homo sapiens
ucacacugaauuugaagcaaug

SEQ ID NO: 51533 - RNA, 22 nt, Homo sapiens
ucacagacugagccaaauagag

SEQ ID NO: 51534 - RNA, 20 nt, Homo sapiens
ucacagucacacauaauccu

SEQ ID NO: 51535 - RNA, 22 nt, Homo sapiens
ucacaguagcaaauguuagaaa

SEQ ID NO: 51536 - RNA, 22 nt, Homo sapiens
ucacaguagggaacugacaaag

SEQ ID NO: 51537 - RNA, 18 nt, Homo sapiens
ucacagguaauuaggauu

SEQ ID NO: 51538 - RNA, 22 nt, Homo sapiens
ucacaguaaauccagaagaaau

SEQ ID NO: 51539 - RNA, 22 nt, Homo sapiens
ucaaacacuccauaucgcgauu

SEQ ID NO: 51540 - RNA, 20 nt, Homo sapiens
uauuugguuauuuccauggu

SEQ ID NO: 51541 - RNA, 22 nt, Homo sapiens
uauuuggauagucuggaaaaaa

SEQ ID NO: 51542 - RNA, 22 nt, Homo sapiens
uauugcaauuggggaaacuggg

SEQ ID NO: 51543 - RNA, 22 nt, Homo sapiens
uauuugguuggugcaaaaguaa

SEQ ID NO: 51544 - RNA, 22 nt, Homo sapiens
uauuuggugaaugaaugcaugu

SEQ ID NO: 51545 - RNA, 22 nt, Homo sapiens
uauuugguuauaugaguaaguu

SEQ ID NO: 51546 - RNA, 22 nt, Homo sapiens
uauuugauuaacaagagccuaa

SEQ ID NO: 51547 - RNA, 22 nt, Homo sapiens
uauugcaacagaagaaagaguc

SEQ ID NO: 51548 - RNA, 22 nt, Homo sapiens
uauugcaauuggcagagugcua

SEQ ID NO: 51549 - RNA, 22 nt, Homo sapiens
uauuguuaaagauguuaaugau

SEQ ID NO: 51550 - RNA, 22 nt, Homo sapiens
uauuucaguugcguuucccgag

SEQ ID NO: 51551 - RNA, 22 nt, Homo sapiens
uggauagugauaagguagauga

SEQ ID NO: 51552 - RNA, 20 nt, Homo sapiens
uggaguuugaguucuuggag

SEQ ID NO: 51553 - RNA, 22 nt, Homo sapiens
uggauggugauuggaucaugga

SEQ ID NO: 51554 - RNA, 22 nt, Homo sapiens
uggaugaagagaugguaguugc

SEQ ID NO: 51555 - RNA, 22 nt, Homo sapiens
uggaugacauccuuguaugcag

SEQ ID NO: 51556 - RNA, 22 nt, Homo sapiens
uggcaagcaggacuaaagcacc

SEQ ID NO: 51557 - RNA, 22 nt, Homo sapiens
uggcagaugggugagcuggaga

SEQ ID NO: 51558 - RNA, 22 nt, Homo sapiens
ugcugaguguuaccggacaccg

SEQ ID NO: 51559 - RNA, 22 nt, Homo sapiens
ugcuguguugcuggcuuaaaga

SEQ ID NO: 51560 - RNA, 22 nt, Homo sapiens
ugcugguuuaaaaugcaaauuc

SEQ ID NO: 51561 - RNA, 22 nt, Homo sapiens
uggaaguaaccaugaauggaau

SEQ ID NO: 51562 - RNA, 22 nt, Homo sapiens
uggaagguaaguuuugagcauu

SEQ ID NO: 51563 - RNA, 22 nt, Homo sapiens
ugcuuuguugaaaaucauuugg

SEQ ID NO: 51564 - RNA, 21 nt, Homo sapiens
ugcuuacugaauguuaauuuc

SEQ ID NO: 51565 - RNA, 22 nt, Homo sapiens
uggaauguggacucuuaugggg

SEQ ID NO: 51566 - RNA, 22 nt, Homo sapiens
uggaaugguaucuuguuggggu

SEQ ID NO: 51567 - RNA, 21 nt, Homo sapiens
uggaaucuauuauuccaguuu

SEQ ID NO: 51568 - RNA, 22 nt, Homo sapiens
uggaaguagauagauuguguca

SEQ ID NO: 51569 - RNA, 23 nt, Homo sapiens
ugcucgguguugacagucacauc

SEQ ID NO: 51570 - RNA, 22 nt, Homo sapiens
ugcgauuauuaugucacuuccu

SEQ ID NO: 51571 - RNA, 22 nt, Homo sapiens
ugcgguagugcaaucauggcuc

SEQ ID NO: 51572 - RNA, 22 nt, Homo sapiens
ugcuaucauugauuagugaugu

SEQ ID NO: 51573 - RNA, 18 nt, Homo sapiens
ugcuaugagauuauuuua

SEQ ID NO: 51574 - RNA, 21 nt, Homo sapiens
ugcuacugucacuuccuuugu

SEQ ID NO: 51575 - RNA, 22 nt, Homo sapiens
ugcauuguuccgaauguguccu

SEQ ID NO: 51576 - RNA, 22 nt, Homo sapiens
ugcauuagucuguucucacacu

SEQ ID NO: 51577 - RNA, 18 nt, Homo sapiens
ugcaaacauguguguguu

SEQ ID NO: 51578 - RNA, 22 nt, Homo sapiens
ugccuucuguuaaacgaggaug

SEQ ID NO: 51579 - RNA, 22 nt, Homo sapiens
ugauugucucuccugccccauc

SEQ ID NO: 51580 - RNA, 22 nt, Homo sapiens
ugauuugucugcaggaauagug

SEQ ID NO: 51581 - RNA, 20 nt, Homo sapiens
ugauuaguccacuuggcucu

SEQ ID NO: 51582 - RNA, 22 nt, Homo sapiens
ugauuggagaacaaacugcaua

SEQ ID NO: 51583 - RNA, 22 nt, Homo sapiens
ugauugcacaccugcacucaag

SEQ ID NO: 51584 - RNA, 22 nt, Homo sapiens
ugcaaagaaauuuuggugacca

SEQ ID NO: 51585 - RNA, 22 nt, Homo sapiens
ugcaaaucuuguguaguuguga

SEQ ID NO: 51586 - RNA, 22 nt, Homo sapiens
ugcaagacaucguauuuugguc

SEQ ID NO: 51587 - RNA, 22 nt, Homo sapiens
ugcaagaaacauauuccacaag

SEQ ID NO: 51588 - RNA, 22 nt, Homo sapiens
ugcaaucauuuggaggagaaga

SEQ ID NO: 51589 - RNA, 22 nt, Homo sapiens
ugcaauauccucuacuauaggu

SEQ ID NO: 51590 - RNA, 18 nt, Homo sapiens
ugcaauggagaugcagcc

SEQ ID NO: 51591 - RNA, 22 nt, Homo sapiens
ugauaugaaucaaucacucuuc

SEQ ID NO: 51592 - RNA, 22 nt, Homo sapiens
ugauaugaucgcccuagcuuga

SEQ ID NO: 51593 - RNA, 22 nt, Homo sapiens
ugaguuauuaguagaggcuaug

SEQ ID NO: 51594 - RNA, 22 nt, Homo sapiens
ugagugugaggaagaauuagaa

SEQ ID NO: 51595 - RNA, 22 nt, Homo sapiens
ugagucauuuccuuaugcuacu

SEQ ID NO: 51596 - RNA, 22 nt, Homo sapiens
ugaguauguaggaugugucuua

SEQ ID NO: 51597 - RNA, 22 nt, Homo sapiens
ugaucacagcuugacuaaagga

SEQ ID NO: 51598 - RNA, 22 nt, Homo sapiens
ugauccccucacauuauuauau

SEQ ID NO: 51599 - RNA, 22 nt, Homo sapiens
ugauuagagcccaagcuuugaa

SEQ ID NO: 51600 - RNA, 21 nt, Homo sapiens
ugauaugguuuggauaugugu

SEQ ID NO: 51601 - RNA, 22 nt, Homo sapiens
ugauauguggcuauugagauug

SEQ ID NO: 51602 - RNA, 22 nt, Homo sapiens
ugagguguuugugcaccaucug

SEQ ID NO: 51603 - RNA, 22 nt, Homo sapiens
ugagguguuauccagaguucuu

SEQ ID NO: 51604 - RNA, 20 nt, Homo sapiens
ugaguagaggaguucuauca

SEQ ID NO: 51605 - RNA, 19 nt, Homo sapiens
ugaguauauuguauucauu

SEQ ID NO: 51606 - RNA, 21 nt, Homo sapiens
ugagaugugaccagggcauca

SEQ ID NO: 51607 - RNA, 22 nt, Homo sapiens
ugagauggcuuuauugcugaau

SEQ ID NO: 51608 - RNA, 22 nt, Homo sapiens
ugagauguuuagauuguugucu

SEQ ID NO: 51609 - RNA, 22 nt, Homo sapiens
ugagauguuccaaugacuauua

SEQ ID NO: 51610 - RNA, 22 nt, Homo sapiens
ugagauguugcucugaaacaag

SEQ ID NO: 51611 - RNA, 22 nt, Homo sapiens
ugagauuaaucuuuaaguaaga

SEQ ID NO: 51612 - RNA, 20 nt, Homo sapiens
ugagauuggugugguauaag

SEQ ID NO: 51613 - RNA, 22 nt, Homo sapiens
ugaggugaggguaucaaaugcu

SEQ ID NO: 51614 - RNA, 23 nt, Homo sapiens
ugacaagagcgagacuuggucuc

SEQ ID NO: 51615 - RNA, 22 nt, Homo sapiens
ugacaagcucccucugcaccuu

SEQ ID NO: 51616 - RNA, 22 nt, Homo sapiens
ugagacugaaauuaggaaacug

SEQ ID NO: 51617 - RNA, 22 nt, Homo sapiens
ugagacugguuaauugauaaag

SEQ ID NO: 51618 - RNA, 22 nt, Homo sapiens
ugagagaugaacucugauaugu

SEQ ID NO: 51619 - RNA, 22 nt, Homo sapiens
ugagagaugauaaaauguuugu

SEQ ID NO: 51620 - RNA, 22 nt, Homo sapiens
ugagauaacuaaaaacauuuug

SEQ ID NO: 51621 - RNA, 22 nt, Homo sapiens
ugagaguauaaauugaugcagc

SEQ ID NO: 51622 - RNA, 22 nt, Homo sapiens
ugagacggaguuauuuauaaua

SEQ ID NO: 51623 - RNA, 22 nt, Homo sapiens
ugagacugaguuuugcucguug

SEQ ID NO: 51624 - RNA, 22 nt, Homo sapiens
ugagaugagaaucaguucuaau

SEQ ID NO: 51625 - RNA, 22 nt, Homo sapiens
ugagaugacgacacaccucagu

SEQ ID NO: 51626 - RNA, 22 nt, Homo sapiens
ugagaugagucucgcucuguca

SEQ ID NO: 51627 - RNA, 22 nt, Homo sapiens
ugagaugaguucucgcucuguc

SEQ ID NO: 51628 - RNA, 22 nt, Homo sapiens
ugagaugauaucuuauuguaau

SEQ ID NO: 51629 - RNA, 22 nt, Homo sapiens
ugagauguagauauggauuaga

SEQ ID NO: 51630 - RNA, 22 nt, Homo sapiens
ugagauggaguuucgcuuuugu

SEQ ID NO: 51631 - RNA, 22 nt, Homo sapiens
ugagauggaguuucgcccuugu

SEQ ID NO: 51632 - RNA, 21 nt, Homo sapiens
ugagaugauccugcaugcaug

SEQ ID NO: 51633 - RNA, 20 nt, Homo sapiens
ugagaugcauugggauguuu

SEQ ID NO: 51634 - RNA, 22 nt, Homo sapiens
ugagauaaugcaugugaagauc

SEQ ID NO: 51635 - RNA, 22 nt, Homo sapiens
ugagauauugggaguaauguca

SEQ ID NO: 51636 - RNA, 22 nt, Homo sapiens
ugagaucagaaggauuucucug

SEQ ID NO: 51637 - RNA, 22 nt, Homo sapiens
ugagaugaacuugauuguuuua

SEQ ID NO: 51638 - RNA, 22 nt, Homo sapiens
ugagaucgaguuucgcucuugu

SEQ ID NO: 51639 - RNA, 22 nt, Homo sapiens
ugagaucaugucauuugcacuc

SEQ ID NO: 51640 - RNA, 22 nt, Homo sapiens
uaggcagccagcuguggauuga

SEQ ID NO: 51641 - RNA, 22 nt, Homo sapiens
uagguagaacccagaaaucuga

SEQ ID NO: 51642 - RNA, 22 nt, Homo sapiens
uaggucuccuuuuugccuaaau

SEQ ID NO: 51643 - RNA, 22 nt, Homo sapiens
uaguuguugcagguaggaugua

SEQ ID NO: 51644 - RNA, 22 nt, Homo sapiens
uaguuuaucuucuggauggaca

SEQ ID NO: 51645 - RNA, 22 nt, Homo sapiens
uauaacaaugcaagaauggccu

SEQ ID NO: 51646 - RNA, 22 nt, Homo sapiens
uaguucguguuugaacuagauc

SEQ ID NO: 51647 - RNA, 20 nt, Homo sapiens
uaguggaaaucagguccucu

SEQ ID NO: 51648 - RNA, 22 nt, Homo sapiens
uaguguuuuucauuggcagagg

SEQ ID NO: 51649 - RNA, 22 nt, Homo sapiens
uagguugucuguucacucugau

SEQ ID NO: 51650 - RNA, 22 nt, Homo sapiens
uagcccagugagguugauuugg

SEQ ID NO: 51651 - RNA, 22 nt, Homo sapiens
uagcagucuguuaaaacuuuua

SEQ ID NO: 51652 - RNA, 22 nt, Homo sapiens
uagcaguauugaaagaugaggg

SEQ ID NO: 51653 - RNA, 22 nt, Homo sapiens
uagaauggaagguugagaagaa

SEQ ID NO: 51654 - RNA, 18 nt, Homo sapiens
uagaauauaggucauucu

SEQ ID NO: 51655 - RNA, 22 nt, Homo sapiens
uagaagcacuaucccuccuagu

SEQ ID NO: 51656 - RNA, 22 nt, Homo sapiens
uagaagcuacucuucuuguggc

SEQ ID NO: 51657 - RNA, 22 nt, Homo sapiens
uaggcaauguggcgaaacucug

SEQ ID NO: 51658 - RNA, 22 nt, Homo sapiens
uaggaaguacaucucagaaucu

SEQ ID NO: 51659 - RNA, 21 nt, Homo sapiens
uagcugaugauguaggggaug

SEQ ID NO: 51660 - RNA, 22 nt, Homo sapiens
uagcugcaaaauauagacuucu

SEQ ID NO: 51661 - RNA, 22 nt, Homo sapiens
uaucaagaugacaaacuuugcu

SEQ ID NO: 51662 - RNA, 22 nt, Homo sapiens
uaucaacaggguggccagugua

SEQ ID NO: 51663 - RNA, 22 nt, Homo sapiens
uaucaaacccaaggaggggguu

SEQ ID NO: 51664 - RNA, 22 nt, Homo sapiens
uaucaaucuagggaaacuccaa

SEQ ID NO: 51665 - RNA, 22 nt, Homo sapiens
uaucacaaacuuagcaguuuaa

SEQ ID NO: 51666 - RNA, 22 nt, Homo sapiens
uaucacacaucaugguaaaucu

SEQ ID NO: 51667 - RNA, 22 nt, Homo sapiens
uaucacagaggguauccuagag

SEQ ID NO: 51668 - RNA, 22 nt, Homo sapiens
uaucacagcaaggacccauuau

SEQ ID NO: 51669 - RNA, 22 nt, Homo sapiens
uaucacagcgggguguacaccc

SEQ ID NO: 51670 - RNA, 22 nt, Homo sapiens
uauaaugcacauucccaaaucu

SEQ ID NO: 51671 - RNA, 22 nt, Homo sapiens
uauacagcaaguuacugugcug

SEQ ID NO: 51672 - RNA, 22 nt, Homo sapiens
uauagcacaucuguguguacau

SEQ ID NO: 51673 - RNA, 23 nt, Homo sapiens
uauaugugucuaggagcuauggu

SEQ ID NO: 51674 - RNA, 22 nt, Homo sapiens
uaucucagaugagacuuguaac

SEQ ID NO: 51675 - RNA, 22 nt, Homo sapiens
uaucucagaguguacaagauua

SEQ ID NO: 51676 - RNA, 21 nt, Homo sapiens
uaucacauuggugauuaaguu

SEQ ID NO: 51677 - RNA, 20 nt, Homo sapiens
uaucacauggggagaaaccu

SEQ ID NO: 51678 - RNA, 22 nt, Homo sapiens
uaucacaguaucuagcacagug

SEQ ID NO: 51679 - RNA, 22 nt, Homo sapiens
uaucacaguagaacucuuucca

SEQ ID NO: 51680 - RNA, 22 nt, Homo sapiens
uaugaauuuuauccaggauaua

SEQ ID NO: 51681 - RNA, 22 nt, Homo sapiens
uaugaaagcuacuucucacaau

SEQ ID NO: 51682 - RNA, 22 nt, Homo sapiens
uaucugcacauacacuuauagc

SEQ ID NO: 51683 - RNA, 22 nt, Homo sapiens
uaucucuguggguagugcugaa

SEQ ID NO: 51684 - RNA, 22 nt, Homo sapiens
uauggauuuuuuugacaagagc

SEQ ID NO: 51685 - RNA, 22 nt, Homo sapiens
uauggcauuuuguaagggcuug

SEQ ID NO: 51686 - RNA, 22 nt, Homo sapiens
uaugacuuguuuucuggucugc

SEQ ID NO: 51687 - RNA, 22 nt, Homo sapiens
uaugacauaguccuuaacccuc

SEQ ID NO: 51688 - RNA, 22 nt, Homo sapiens
uaugacuguuugcucauucagg

SEQ ID NO: 51689 - RNA, 22 nt, Homo sapiens
uaugacuuuugaauacagaugg

SEQ ID NO: 51690 - RNA, 22 nt, Homo sapiens
uauggccccuacaugugcaaaa

SEQ ID NO: 51691 - RNA, 22 nt, Homo sapiens
uauggcugugacuuaucuuguu

SEQ ID NO: 51692 - RNA, 22 nt, Homo sapiens
uauggguaguacaaaguguaua

SEQ ID NO: 51693 - RNA, 22 nt, Homo sapiens
uauggguuuuucauaaauaggu

SEQ ID NO: 51694 - RNA, 22 nt, Homo sapiens
uauggcuacuacgaauaaugcu

SEQ ID NO: 51695 - RNA, 22 nt, Homo sapiens
uauucacuguaucauugauggg

SEQ ID NO: 51696 - RNA, 22 nt, Homo sapiens
uauuccauuugugaaaggaagu

SEQ ID NO: 51697 - RNA, 22 nt, Homo sapiens
uauugauuuucaguguucagcu

SEQ ID NO: 51698 - RNA, 22 nt, Homo sapiens
uauuccuuuugcauuuccacau

SEQ ID NO: 51699 - RNA, 22 nt, Homo sapiens
uacaggauagacaauuuauuaa

SEQ ID NO: 51700 - RNA, 22 nt, Homo sapiens
uaauaguuggcacuggagaaag

SEQ ID NO: 51701 - RNA, 22 nt, Homo sapiens
uaauagcaguguuacuaggacu

SEQ ID NO: 51702 - RNA, 22 nt, Homo sapiens
uacaguaguaucuucauuuguu

SEQ ID NO: 51703 - RNA, 22 nt, Homo sapiens
uacagucacauuccugaccaua

SEQ ID NO: 51704 - RNA, 22 nt, Homo sapiens
uaagugcuugacuuugauguuu

SEQ ID NO: 51705 - RNA, 22 nt, Homo sapiens
uaaguggugcauuguuaaaugg

SEQ ID NO: 51706 - RNA, 22 nt, Homo sapiens
uaaguguaaugucugaaguuug

SEQ ID NO: 51707 - RNA, 22 nt, Homo sapiens
uaauacucuucucauuuuacag

SEQ ID NO: 51708 - RNA, 22 nt, Homo sapiens
uaagugaauguuggcuacugaa

SEQ ID NO: 51709 - RNA, 22 nt, Homo sapiens
uaagugaauauggacaguuagc

SEQ ID NO: 51710 - RNA, 22 nt, Homo sapiens
uaagugcaugauuacaugcaua

SEQ ID NO: 51711 - RNA, 21 nt, Homo sapiens
uaagcuaaacauucaguuaac

SEQ ID NO: 51712 - RNA, 22 nt, Homo sapiens
uaagcagugcaagaauggaaua

SEQ ID NO: 51713 - RNA, 22 nt, Homo sapiens
uaagugaaggaaguguguuuac

SEQ ID NO: 51714 - RNA, 22 nt, Homo sapiens
uagaaagcaugaccuucagaua

SEQ ID NO: 51715 - RNA, 22 nt, Homo sapiens
uacuuuguagauuguuuccuuu

SEQ ID NO: 51716 - RNA, 22 nt, Homo sapiens
uagaacaauugcuggauccgaa

SEQ ID NO: 51717 - RNA, 22 nt, Homo sapiens
uacuguguaguuagaccucaga

SEQ ID NO: 51718 - RNA, 22 nt, Homo sapiens
uacugguuuuauauauuucucc

SEQ ID NO: 51719 - RNA, 22 nt, Homo sapiens
uacugcuuaaaagucaauuacu

SEQ ID NO: 51720 - RNA, 22 nt, Homo sapiens
uaccucagccaaugcccagaag

SEQ ID NO: 51721 - RNA, 22 nt, Homo sapiens
uaccucuguaaguaaagauuca

SEQ ID NO: 51722 - RNA, 22 nt, Homo sapiens
uacccucuggauacccuuguuc

SEQ ID NO: 51723 - RNA, 22 nt, Homo sapiens
uaccauguauguuucuccauug

SEQ ID NO: 51724 - RNA, 22 nt, Homo sapiens
uaccaguaaugggucaaaggca

SEQ ID NO: 51725 - RNA, 22 nt, Homo sapiens
uacaugugccauguugguuugc

SEQ ID NO: 51726 - RNA, 22 nt, Homo sapiens
uacauccauccugcugggcagu

SEQ ID NO: 51727 - RNA, 22 nt, Homo sapiens
guguaaaucugcugugaacauu

SEQ ID NO: 51728 - RNA, 22 nt, Homo sapiens
guuggcaagaggugcuguacac

SEQ ID NO: 51729 - RNA, 22 nt, Homo sapiens
guuggaauuaaaaggcaaguau

SEQ ID NO: 51730 - RNA, 22 nt, Homo sapiens
guuuggauuuucuaauuucugu

SEQ ID NO: 51731 - RNA, 22 nt, Homo sapiens
guuuggcuuucucucuauccug

SEQ ID NO: 51732 - RNA, 22 nt, Homo sapiens
gugguuuuuaaaguaccugugg

SEQ ID NO: 51733 - RNA, 22 nt, Homo sapiens
gugguuuuuuucugccuuauag

SEQ ID NO: 51734 - RNA, 22 nt, Homo sapiens
gugguaaaauggcauagagcua

SEQ ID NO: 51735 - RNA, 22 nt, Homo sapiens
uaagaauucuguccgguauacu

SEQ ID NO: 51736 - RNA, 22 nt, Homo sapiens
uaagacacauguguucccaggc

SEQ ID NO: 51737 - RNA, 22 nt, Homo sapiens
uaagacucuggacucuaauguu

SEQ ID NO: 51738 - RNA, 22 nt, Homo sapiens
uaagacacuuaaaauguuacau

SEQ ID NO: 51739 - RNA, 23 nt, Homo sapiens
uaagacacuaacuuuaugcuuug

SEQ ID NO: 51740 - RNA, 22 nt, Homo sapiens
uaacuauagagaauguugagua

SEQ ID NO: 51741 - RNA, 22 nt, Homo sapiens
uaacuccauuuggacucaguau

SEQ ID NO: 51742 - RNA, 22 nt, Homo sapiens
uaacccuuacaacuacacucgu

SEQ ID NO: 51743 - RNA, 22 nt, Homo sapiens
uaaagcuuggauuuaggcuaau

SEQ ID NO: 51744 - RNA, 22 nt, Homo sapiens
guuuuuggggucacuauuaccg

SEQ ID NO: 51745 - RNA, 22 nt, Homo sapiens
uaaaagucaucacaacuggagu

SEQ ID NO: 51746 - RNA, 22 nt, Homo sapiens
guuuaacugguacuucaagucu

SEQ ID NO: 51747 - RNA, 22 nt, Homo sapiens
guuugugcuccuaugagaaucu

SEQ ID NO: 51748 - RNA, 22 nt, Homo sapiens
uaaagcauguaauuagguuaga

SEQ ID NO: 51749 - RNA, 22 nt, Homo sapiens
gcucuuuugggguaauucugag

SEQ ID NO: 51750 - RNA, 22 nt, Homo sapiens
gcucugguuacaaaggcaaauu

SEQ ID NO: 51751 - RNA, 22 nt, Homo sapiens
gcuaaaucuguaaaaugaggag

SEQ ID NO: 51752 - RNA, 17 nt, Homo sapiens
gcugauguuugcauuuu

SEQ ID NO: 51753 - RNA, 22 nt, Homo sapiens
gcacaguuaaagggucauguga

SEQ ID NO: 51754 - RNA, 22 nt, Homo sapiens
gcacagucaacacuuauucacc

SEQ ID NO: 51755 - RNA, 22 nt, Homo sapiens
gcgguuuuaagugaguuucuua

SEQ ID NO: 51756 - RNA, 23 nt, Homo sapiens
ggaaacauccagucuuucaccau

SEQ ID NO: 51757 - RNA, 22 nt, Homo sapiens
ggaaagacaccuuacuauguua

SEQ ID NO: 51758 - RNA, 22 nt, Homo sapiens
ggacuaggagcuaggaagaucu

SEQ ID NO: 51759 - RNA, 22 nt, Homo sapiens
gcuuuggauaaaugucaguuua

SEQ ID NO: 51760 - RNA, 22 nt, Homo sapiens
gcuguugguaaaaaggacauga

SEQ ID NO: 51761 - RNA, 22 nt, Homo sapiens
gcuguguguuaucagaaauugc

SEQ ID NO: 51762 - RNA, 22 nt, Homo sapiens
gcuguauugacuuuguaucaua

SEQ ID NO: 51763 - RNA, 22 nt, Homo sapiens
gcugcuguuuaguuucuccugg

SEQ ID NO: 51764 - RNA, 22 nt, Homo sapiens
gcuggauguuucaauacaaaua

SEQ ID NO: 51765 - RNA, 22 nt, Homo sapiens
gcugcuuuugaugacaaaaaca

SEQ ID NO: 51766 - RNA, 20 nt, Homo sapiens
ggagguguuggauuucuagu

SEQ ID NO: 51767 - RNA, 22 nt, Homo sapiens
ggagaugauuaugaaucacuua

SEQ ID NO: 51768 - RNA, 22 nt, Homo sapiens
ggagaauguaauugguauuuug

SEQ ID NO: 51769 - RNA, 20 nt, Homo sapiens
ggagagugacauaauucugg

SEQ ID NO: 51770 - RNA, 22 nt, Homo sapiens
ggagagugacauauuucuaggc

SEQ ID NO: 51771 - RNA, 22 nt, Homo sapiens
ggcagagucuugcaucuuuaga

SEQ ID NO: 51772 - RNA, 22 nt, Homo sapiens
ggcagaucauuggccucaguuu

SEQ ID NO: 51773 - RNA, 22 nt, Homo sapiens
ggcaagaaccagggauuugcgu

SEQ ID NO: 51774 - RNA, 19 nt, Homo sapiens
ggcaagaguuguucugugu

SEQ ID NO: 51775 - RNA, 22 nt, Homo sapiens
ggucauggauguuuauaguaca

SEQ ID NO: 51776 - RNA, 22 nt, Homo sapiens
ggugacagugguuaaaauuugu

SEQ ID NO: 51777 - RNA, 23 nt, Homo sapiens
ggugaggaguacagagucuucau

SEQ ID NO: 51778 - RNA, 22 nt, Homo sapiens
ggugauguuugaguugagacag

SEQ ID NO: 51779 - RNA, 22 nt, Homo sapiens
ggcuguguguuaaaauaggcuu

SEQ ID NO: 51780 - RNA, 22 nt, Homo sapiens
ggcugguuuucaguuacugagu

SEQ ID NO: 51781 - RNA, 22 nt, Homo sapiens
gggaagugugcagaguucucuu

SEQ ID NO: 51782 - RNA, 22 nt, Homo sapiens
gggaagguaaucauuacuugau

SEQ ID NO: 51783 - RNA, 22 nt, Homo sapiens
gggaauggaagacauuaugaug

SEQ ID NO: 51784 - RNA, 22 nt, Homo sapiens
gggauguuuuauacugagccug

SEQ ID NO: 51785 - RNA, 20 nt, Homo sapiens
gggaugugagguacacucuu

SEQ ID NO: 51786 - RNA, 17 nt, Homo sapiens
gugaaaucaucauuuuu

SEQ ID NO: 51787 - RNA, 22 nt, Homo sapiens
gugaacagaaccugggaucgaa

SEQ ID NO: 51788 - RNA, 22 nt, Homo sapiens
gugaaguuuuuugcugagaguc

SEQ ID NO: 51789 - RNA, 20 nt, Homo sapiens
gugaauacauuugguuucau

SEQ ID NO: 51790 - RNA, 22 nt, Homo sapiens
gugaaacuggguggugagagac

SEQ ID NO: 51791 - RNA, 22 nt, Homo sapiens
gugaaagacauauaugguuuga

SEQ ID NO: 51792 - RNA, 22 nt, Homo sapiens
gugaaauguguagaggaucugg

SEQ ID NO: 51793 - RNA, 20 nt, Homo sapiens
gucuuguagcucaaguuauu

SEQ ID NO: 51794 - RNA, 22 nt, Homo sapiens
gucuuuguuuggucuguaucag

SEQ ID NO: 51795 - RNA, 22 nt, Homo sapiens
gucuuuugcuagccagagagcu

SEQ ID NO: 51796 - RNA, 22 nt, Homo sapiens
gucuugaaggcugaguaccugu

SEQ ID NO: 51797 - RNA, 22 nt, Homo sapiens
gucuguuugauccagaucaaaa

SEQ ID NO: 51798 - RNA, 22 nt, Homo sapiens
gucugugcauuaauacgugcug

SEQ ID NO: 51799 - RNA, 22 nt, Homo sapiens
gucuggcuccuucuacuacaug

SEQ ID NO: 51800 - RNA, 21 nt, Homo sapiens
guccaaaacaguguccaaugc

SEQ ID NO: 51801 - RNA, 22 nt, Homo sapiens
gucugcaugucauaugauagua

SEQ ID NO: 51802 - RNA, 22 nt, Homo sapiens
gucuggcuccugucuaaucacu

SEQ ID NO: 51803 - RNA, 22 nt, Homo sapiens
gucaucaggacgggucaucugc

SEQ ID NO: 51804 - RNA, 22 nt, Homo sapiens
gucaucaucaguccucugugca

SEQ ID NO: 51805 - RNA, 22 nt, Homo sapiens
gucaguuucacucagcuggaac

SEQ ID NO: 51806 - RNA, 22 nt, Homo sapiens
gucaguuugguuaaucauucca

SEQ ID NO: 51807 - RNA, 22 nt, Homo sapiens
gucagugcuuuaguucaggaug

SEQ ID NO: 51808 - RNA, 22 nt, Homo sapiens
gucaugaaguuuugaaugaaau

SEQ ID NO: 51809 - RNA, 19 nt, Homo sapiens
guaaugugcuucaguagca

SEQ ID NO: 51810 - RNA, 22 nt, Homo sapiens
guaaucucagcuacucaggagg

SEQ ID NO: 51811 - RNA, 22 nt, Homo sapiens
guacaugcauaguuuauuucug

SEQ ID NO: 51812 - RNA, 17 nt, Homo sapiens
guacucagugaccaugg

SEQ ID NO: 51813 - RNA, 22 nt, Homo sapiens
gugcacaugcgugcgcacauau

SEQ ID NO: 51814 - RNA, 21 nt, Homo sapiens
gugcagacacacauauaggcu

SEQ ID NO: 51815 - RNA, 22 nt, Homo sapiens
gugcaaugucaggagaugcagc

SEQ ID NO: 51816 - RNA, 22 nt, Homo sapiens
gugcacaacgugcagguuaguu

SEQ ID NO: 51817 - RNA, 22 nt, Homo sapiens
gugcacaacgugcagguuuguu

SEQ ID NO: 51818 - RNA, 22 nt, Homo sapiens
gugcacaacguguagguuuguu

SEQ ID NO: 51819 - RNA, 22 nt, Homo sapiens
gugcacaacgugcaaguuuguu

SEQ ID NO: 51820 - RNA, 22 nt, Homo sapiens
gugcacaucgugcagguuuguu

SEQ ID NO: 51821 - RNA, 22 nt, Homo sapiens
gugcaaaucucugaguaucuuu

SEQ ID NO: 51822 - RNA, 22 nt, Homo sapiens
gugagaugauggguauguuaau

SEQ ID NO: 51823 - RNA, 22 nt, Homo sapiens
gugagauggaguuggugucuuu

SEQ ID NO: 51824 - RNA, 22 nt, Homo sapiens
gugaaucauaugccagucaugc

SEQ ID NO: 51825 - RNA, 22 nt, Homo sapiens
gugaauugagagaacuguguua

SEQ ID NO: 51826 - RNA, 22 nt, Homo sapiens
gugaauguaaagucaugugacu

SEQ ID NO: 51827 - RNA, 22 nt, Homo sapiens
gugacauuauuucagcuacaug

SEQ ID NO: 51828 - RNA, 22 nt, Homo sapiens
gugacaucagcuccagguauaa

SEQ ID NO: 51829 - RNA, 22 nt, Homo sapiens
gugacagucaaagacaugacuu

SEQ ID NO: 51830 - RNA, 22 nt, Homo sapiens
gugagaauauuuuaaauacuaa

SEQ ID NO: 51831 - RNA, 22 nt, Homo sapiens
gugagauccucucuuauauggg

SEQ ID NO: 51832 - RNA, 18 nt, Homo sapiens
gugagaaugacuguucug

SEQ ID NO: 51833 - RNA, 22 nt, Homo sapiens
gugagagaaugacuauguguuu

SEQ ID NO: 51834 - RNA, 22 nt, Homo sapiens
gugacuaagauucuuugauaug

SEQ ID NO: 51835 - RNA, 22 nt, Homo sapiens
gugacuacaggccacaguuugg

SEQ ID NO: 51836 - RNA, 20 nt, Homo sapiens
gugagaacaugugguauuug

SEQ ID NO: 51837 - RNA, 22 nt, Homo sapiens
guggggucaucucauuugugga

SEQ ID NO: 51838 - RNA, 22 nt, Homo sapiens
gugcagugugauccuuccguau

SEQ ID NO: 51839 - RNA, 22 nt, Homo sapiens
gugcucauuuagagagaagcac

SEQ ID NO: 51840 - RNA, 22 nt, Homo sapiens
gugcacaucuguguuccagcua

SEQ ID NO: 51841 - RNA, 22 nt, Homo sapiens
gugccuuuucugagcaaugagc

SEQ ID NO: 51842 - RNA, 18 nt, Homo sapiens
aaagugaugucauucuuu

SEQ ID NO: 51843 - RNA, 22 nt, Homo sapiens
aaagugaauguaucccguaagu

SEQ ID NO: 51844 - RNA, 22 nt, Homo sapiens
aaagugauugcgguuuuugcca

SEQ ID NO: 51845 - RNA, 22 nt, Homo sapiens
aaagugauuguaguuuuugcca

SEQ ID NO: 51846 - RNA, 22 nt, Homo sapiens
aaaguaguagcaguuucugcca

SEQ ID NO: 51847 - RNA, 17 nt, Homo sapiens
aaaguccuuugcuaucu

SEQ ID NO: 51848 - RNA, 22 nt, Homo sapiens
aaaagcuuagaugggcuuguau

SEQ ID NO: 51849 - RNA, 22 nt, Homo sapiens
aaaagcauucagagugcugggc

SEQ ID NO: 51850 - RNA, 22 nt, Homo sapiens
aaaacgcauccucacaggucug

SEQ ID NO: 51851 - RNA, 22 nt, Homo sapiens
aaagugcuuccuuuuugagggu

SEQ ID NO: 51852 - RNA, 22 nt, Homo sapiens
aaaguggacuaagugaauauga

SEQ ID NO: 51853 - RNA, 22 nt, Homo sapiens
aaagugcaguacuucguauauu

SEQ ID NO: 51854 - RNA, 22 nt, Homo sapiens
aaaguacucaguucaguuccgu

SEQ ID NO: 51855 - RNA, 19 nt, Homo sapiens
aaaguacucugaugccucu

SEQ ID NO: 51856 - RNA, 22 nt, Homo sapiens
aaaguacugggauuggccgggu

SEQ ID NO: 51857 - RNA, 22 nt, Homo sapiens
aaagucacuggagaaggaauau

SEQ ID NO: 51858 - RNA, 22 nt, Homo sapiens
aaagucuguuuugucagagacu

SEQ ID NO: 51859 - RNA, 22 nt, Homo sapiens
aaaggcacuagaaguuaccuuu

SEQ ID NO: 51860 - RNA, 22 nt, Homo sapiens
aaaggcacugaucuuauccagu

SEQ ID NO: 51861 - RNA, 22 nt, Homo sapiens
aaaggauucuaauggaaaugcu

SEQ ID NO: 51862 - RNA, 22 nt, Homo sapiens
aacagugcauucagggauauau

SEQ ID NO: 51863 - RNA, 21 nt, Homo sapiens
aacagugcugaacagacaccu

SEQ ID NO: 51864 - RNA, 22 nt, Homo sapiens
aacagucaauugcugaugaccu

SEQ ID NO: 51865 - RNA, 22 nt, Homo sapiens
aacauugaacuuggcacaccca

SEQ ID NO: 51866 - RNA, 22 nt, Homo sapiens
aagaucaucauagagggcauga

SEQ ID NO: 51867 - RNA, 22 nt, Homo sapiens
aaccuacauucuuaacuguugc

SEQ ID NO: 51868 - RNA, 22 nt, Homo sapiens
aaccuguaaccauaugaucagu

SEQ ID NO: 51869 - RNA, 22 nt, Homo sapiens
aaaugacuuuuuaugcagagua

SEQ ID NO: 51870 - RNA, 22 nt, Homo sapiens
aaaugcaucauuaggugauuuu

SEQ ID NO: 51871 - RNA, 22 nt, Homo sapiens
aaaugcaugaggugggaagaaa

SEQ ID NO: 51872 - RNA, 22 nt, Homo sapiens
aaaugcauaucaagauugcccu

SEQ ID NO: 51873 - RNA, 20 nt, Homo sapiens
aacagcacugucugaagcuu

SEQ ID NO: 51874 - RNA, 22 nt, Homo sapiens
aaaugcauggacagcuggucuu

SEQ ID NO: 51875 - RNA, 22 nt, Homo sapiens
aagcagacauguucauuuugaa

SEQ ID NO: 51876 - RNA, 22 nt, Homo sapiens
aagcacaauuucaccuucuugu

SEQ ID NO: 51877 - RNA, 23 nt, Homo sapiens
aaggacacugaacacuucccagc

SEQ ID NO: 51878 - RNA, 22 nt, Homo sapiens
aaggcaugcaguacguuucuau

SEQ ID NO: 51879 - RNA, 22 nt, Homo sapiens
aaggauuguaacaccaagguua

SEQ ID NO: 51880 - RNA, 22 nt, Homo sapiens
aaggcauggugacuauuuaggc

SEQ ID NO: 51881 - RNA, 22 nt, Homo sapiens
aaggcucuuucaacguaaauua

SEQ ID NO: 51882 - RNA, 22 nt, Homo sapiens
aagugguucuaugaguuugcaa

SEQ ID NO: 51883 - RNA, 22 nt, Homo sapiens
agcuggcuguagcugcaagucu

SEQ ID NO: 51884 - RNA, 22 nt, Homo sapiens
agcugcauucguaucauauugu

SEQ ID NO: 51885 - RNA, 22 nt, Homo sapiens
aggacacugauguaugcugugg

SEQ ID NO: 51886 - RNA, 22 nt, Homo sapiens
aggcaugauuguauuuugcucu

SEQ ID NO: 51887 - RNA, 22 nt, Homo sapiens
aaaugcucucuacacguuucug

SEQ ID NO: 51888 - RNA, 22 nt, Homo sapiens
aggaauuuaauguaugauaaua

SEQ ID NO: 51889 - RNA, 22 nt, Homo sapiens
aggaauggaaacuuuugauggu

SEQ ID NO: 51890 - RNA, 18 nt, Homo sapiens
aggaaugguaauacuuca

SEQ ID NO: 51891 - RNA, 22 nt, Homo sapiens
aggaaucuaagguaucagguua

SEQ ID NO: 51892 - RNA, 22 nt, Homo sapiens
aaauugcaaugcgaggcagagg

SEQ ID NO: 51893 - RNA, 22 nt, Homo sapiens
aaauugcauugagcugcuuauu

SEQ ID NO: 51894 - RNA, 22 nt, Homo sapiens
aaaugcuucuauguggcauguu

SEQ ID NO: 51895 - RNA, 22 nt, Homo sapiens
aaaugcuguuccaggaccuauc

SEQ ID NO: 51896 - RNA, 22 nt, Homo sapiens
aaaugcugucaaauuguguucu

SEQ ID NO: 51897 - RNA, 20 nt, Homo sapiens
aaaugcuguaauguuuggga

SEQ ID NO: 51898 - RNA, 22 nt, Homo sapiens
aacaccauucucuguaacaaga

SEQ ID NO: 51899 - RNA, 22 nt, Homo sapiens
aaauugcacaaguggugauuug

SEQ ID NO: 51900 - RNA, 22 nt, Homo sapiens
aaauugcaguuaggaugauggu

SEQ ID NO: 51901 - RNA, 22 nt, Homo sapiens
agguauuuucaacuuagaaugg

SEQ ID NO: 51902 - RNA, 22 nt, Homo sapiens
aggugguauuuaaaauuauuug

SEQ ID NO: 51903 - RNA, 22 nt, Homo sapiens
aguaaauuucugugcuuucaua

SEQ ID NO: 51904 - RNA, 22 nt, Homo sapiens
agguuguguuugugauuagaua

SEQ ID NO: 51905 - RNA, 22 nt, Homo sapiens
aguacaucuggcuggauagaua

SEQ ID NO: 51906 - RNA, 22 nt, Homo sapiens
aguaaacuucagaguucuuccu

SEQ ID NO: 51907 - RNA, 22 nt, Homo sapiens
aguaaagcaucagcuagaugug

SEQ ID NO: 51908 - RNA, 22 nt, Homo sapiens
agaauguuuuagaccaauacaa

SEQ ID NO: 51909 - RNA, 22 nt, Homo sapiens
agcaccauuuauugaaaagaca

SEQ ID NO: 51910 - RNA, 23 nt, Homo sapiens
agcaccuuuccuccacuaucugc

SEQ ID NO: 51911 - RNA, 22 nt, Homo sapiens
agagacauugcuccaacucacc

SEQ ID NO: 51912 - RNA, 22 nt, Homo sapiens
agacuagacagaugaacagcac

SEQ ID NO: 51913 - RNA, 22 nt, Homo sapiens
agaaugauccuucucagaggca

SEQ ID NO: 51914 - RNA, 22 nt, Homo sapiens
agcugauggucuuguaugaugu

SEQ ID NO: 51915 - RNA, 22 nt, Homo sapiens
agcaucaugcaguugcuauuca

SEQ ID NO: 51916 - RNA, 22 nt, Homo sapiens
agcaucacacacuacagggaaa

SEQ ID NO: 51917 - RNA, 22 nt, Homo sapiens
agcagcauauuuuuauaaugua

SEQ ID NO: 51918 - RNA, 22 nt, Homo sapiens
agcagguguccacaauguuugc

SEQ ID NO: 51919 - RNA, 22 nt, Homo sapiens
agcaggauuguuacaauaguaa

SEQ ID NO: 51920 - RNA, 22 nt, Homo sapiens
agcaggacaauaugggaucagg

SEQ ID NO: 51921 - RNA, 20 nt, Homo sapiens
acagcauagccuuuuaaagc

SEQ ID NO: 51922 - RNA, 22 nt, Homo sapiens
acaguacaugauaaauaaggua

SEQ ID NO: 51923 - RNA, 22 nt, Homo sapiens
acaguaaugggccccuuuuccu

SEQ ID NO: 51924 - RNA, 22 nt, Homo sapiens
acagucauagcagccuuuguua

SEQ ID NO: 51925 - RNA, 22 nt, Homo sapiens
acacuguaacucuuugagggca

SEQ ID NO: 51926 - RNA, 22 nt, Homo sapiens
acacuguuuuaguuauuauagc

SEQ ID NO: 51927 - RNA, 22 nt, Homo sapiens
acacugucucuugcugaccaug

SEQ ID NO: 51928 - RNA, 22 nt, Homo sapiens
acacgugcagauuuauauaaau

SEQ ID NO: 51929 - RNA, 22 nt, Homo sapiens
acacagugucuguguauuuaaa

SEQ ID NO: 51930 - RNA, 22 nt, Homo sapiens
aauuugucaccucucucccuuu

SEQ ID NO: 51931 - RNA, 21 nt, Homo sapiens
acaaagcuggagggagacugc

SEQ ID NO: 51932 - RNA, 22 nt, Homo sapiens
aauugcauugaauuuguagcuu

SEQ ID NO: 51933 - RNA, 22 nt, Homo sapiens
aauugcacuaagcauaguccag

SEQ ID NO: 51934 - RNA, 22 nt, Homo sapiens
acaagcacaaaugcauagaugg

SEQ ID NO: 51935 - RNA, 22 nt, Homo sapiens
acaauggaauggaguggaaagu

SEQ ID NO: 51936 - RNA, 22 nt, Homo sapiens
acacacgugcauguaugcguau

SEQ ID NO: 51937 - RNA, 21 nt, Homo sapiens
aauaaagcaaccuuaugccau

SEQ ID NO: 51938 - RNA, 22 nt, Homo sapiens
aauaaagccugucucuuuagag

SEQ ID NO: 51939 - RNA, 22 nt, Homo sapiens
aaguguaaguuaauguuuaggu

SEQ ID NO: 51940 - RNA, 22 nt, Homo sapiens
aaguguaugaaacaguccaugg

SEQ ID NO: 51941 - RNA, 22 nt, Homo sapiens
aaguuaauguuuaagacuccua

SEQ ID NO: 51942 - RNA, 22 nt, Homo sapiens
aauucacuuguggcagauccuu

SEQ ID NO: 51943 - RNA, 22 nt, Homo sapiens
aauucugugagauggugcagau

SEQ ID NO: 51944 - RNA, 22 nt, Homo sapiens
aauugcaauggacaaugcagca

SEQ ID NO: 51945 - RNA, 22 nt, Homo sapiens
aauaaagcuuugagcuuugcug

SEQ ID NO: 51946 - RNA, 22 nt, Homo sapiens
acugcacuccagccucccgucu

SEQ ID NO: 51947 - RNA, 22 nt, Homo sapiens
acugcacuccaaccuuggugac

SEQ ID NO: 51948 - RNA, 22 nt, Homo sapiens
acugcacuccaucuuagguggc

SEQ ID NO: 51949 - RNA, 22 nt, Homo sapiens
acugcauaaauauguguaauau

SEQ ID NO: 51950 - RNA, 22 nt, Homo sapiens
accgaguguucucccgcagcgg

SEQ ID NO: 51951 - RNA, 22 nt, Homo sapiens
acacugucugaugaaaguaguu

SEQ ID NO: 51952 - RNA, 22 nt, Homo sapiens
acaguguuacuugauaguguau

SEQ ID NO: 51953 - RNA, 22 nt, Homo sapiens
acagugcuguggucaugggucu

SEQ ID NO: 51954 - RNA, 18 nt, Homo sapiens
acagugcugucacugcuu

SEQ ID NO: 51955 - RNA, 22 nt, Homo sapiens
acagugcuuucaauguucagua

SEQ ID NO: 51956 - RNA, 22 nt, Homo sapiens
acagugcuuggcacacaguaau

SEQ ID NO: 51957 - RNA, 22 nt, Homo sapiens
acuagagaugcauuuguaguuu

SEQ ID NO: 51958 - RNA, 22 nt, Homo sapiens
acuacaugugaugucaguauau

SEQ ID NO: 51959 - RNA, 22 nt, Homo sapiens
acucauugcucauaccuuaucu

SEQ ID NO: 51960 - RNA, 22 nt, Homo sapiens
acuacauaugacaucuucuuua

SEQ ID NO: 51961 - RNA, 22 nt, Homo sapiens
acguaguagguuuauaauauua

SEQ ID NO: 51962 - RNA, 22 nt, Homo sapiens
acgcagcacauucacagcuaug

SEQ ID NO: 51963 - RNA, 22 nt, Homo sapiens
acggaacugcuccauucuuugc

SEQ ID NO: 51964 - RNA, 22 nt, Homo sapiens
aucaaaucuccagaaccugucu

SEQ ID NO: 51965 - RNA, 22 nt, Homo sapiens
aucaaaugcuggcagagugccu

SEQ ID NO: 51966 - RNA, 22 nt, Homo sapiens
aucaaaguuucccagaaguugu

SEQ ID NO: 51967 - RNA, 22 nt, Homo sapiens
aucaaacugcaaggcagcagca

SEQ ID NO: 51968 - RNA, 22 nt, Homo sapiens
aucacagaguuaaaacuuucuu

SEQ ID NO: 51969 - RNA, 22 nt, Homo sapiens
aucaagcuugacuccuuaaagg

SEQ ID NO: 51970 - RNA, 22 nt, Homo sapiens
aucaaguaaucugaguaagagu

SEQ ID NO: 51971 - RNA, 22 nt, Homo sapiens
aucacagaacuuugagcagaga

SEQ ID NO: 51972 - RNA, 22 nt, Homo sapiens
auauuguacugcuacugguucu

SEQ ID NO: 51973 - RNA, 22 nt, Homo sapiens
auauuggucuucaagaccugug

SEQ ID NO: 51974 - RNA, 22 nt, Homo sapiens
auauaugcacacgugugcauau

SEQ ID NO: 51975 - RNA, 22 nt, Homo sapiens
auaucaacaucgugucauuagu

SEQ ID NO: 51976 - RNA, 22 nt, Homo sapiens
aucacaauuguacguaggagcc

SEQ ID NO: 51977 - RNA, 20 nt, Homo sapiens
aucagguagggccccauuau

SEQ ID NO: 51978 - RNA, 22 nt, Homo sapiens
aucagugauugauuuaaagacg

SEQ ID NO: 51979 - RNA, 22 nt, Homo sapiens
aucccugagccugacucucaga

SEQ ID NO: 51980 - RNA, 22 nt, Homo sapiens
aucagcagcaugaaaacggacu

SEQ ID NO: 51981 - RNA, 22 nt, Homo sapiens
aucagauuccagaggcagcacc

SEQ ID NO: 51982 - RNA, 22 nt, Homo sapiens
aucagauuccacauuuuaucag

SEQ ID NO: 51983 - RNA, 22 nt, Homo sapiens
aucagcagcaugaaaacaggcu

SEQ ID NO: 51984 - RNA, 22 nt, Homo sapiens
aucagcacugaucauacagcuu

SEQ ID NO: 51985 - RNA, 22 nt, Homo sapiens
auccuguaggcuaguagacagu

SEQ ID NO: 51986 - RNA, 22 nt, Homo sapiens
auccuguagucucacagcccca

SEQ ID NO: 51987 - RNA, 22 nt, Homo sapiens
auccucaguggcuuaaguauag

SEQ ID NO: 51988 - RNA, 22 nt, Homo sapiens
aucuagagaggcagucuggccg

SEQ ID NO: 51989 - RNA, 22 nt, Homo sapiens
aucuaaaucucauaugggcaca

SEQ ID NO: 51990 - RNA, 22 nt, Homo sapiens
aucucugagauguucugauuuu

SEQ ID NO: 51991 - RNA, 22 nt, Homo sapiens
aucugcaaagcugggcugagac

SEQ ID NO: 51992 - RNA, 19 nt, Homo sapiens
auaguguaggaaaacagcu

SEQ ID NO: 51993 - RNA, 22 nt, Homo sapiens
auagcagaagaagggacaauuc

SEQ ID NO: 51994 - RNA, 21 nt, Homo sapiens
auagcacaucagauuuuauua

SEQ ID NO: 51995 - RNA, 22 nt, Homo sapiens
auagcaagaugauugauccauu

SEQ ID NO: 51996 - RNA, 22 nt, Homo sapiens
auagcagaauuuggucaagucu

SEQ ID NO: 51997 - RNA, 22 nt, Homo sapiens
auagcagacauuucaaggcagg

SEQ ID NO: 51998 - RNA, 20 nt, Homo sapiens
auagaagacuagugcagcag

SEQ ID NO: 51999 - RNA, 22 nt, Homo sapiens
auacugccuuuagcaaaacagu

SEQ ID NO: 52000 - RNA, 22 nt, Homo sapiens
auacuaugagauaauaaagacu

SEQ ID NO: 52001 - RNA, 22 nt, Homo sapiens
auacagucuguuagauuuccuc

SEQ ID NO: 52002 - RNA, 22 nt, Homo sapiens
auaccugguagucuugcuacac

SEQ ID NO: 52003 - RNA, 22 nt, Homo sapiens
auaccuuguagugcuauuugau

SEQ ID NO: 52004 - RNA, 22 nt, Homo sapiens
auagaauguaauguaccuccuu

SEQ ID NO: 52005 - RNA, 23 nt, Homo sapiens
auagagcuaggaugcagacagau

SEQ ID NO: 52006 - RNA, 22 nt, Homo sapiens
agucaaaugcuuauguauaaag

SEQ ID NO: 52007 - RNA, 22 nt, Homo sapiens
aguauguuuugaaaccaagaag

SEQ ID NO: 52008 - RNA, 22 nt, Homo sapiens
aguaucacaagguguacaccca

SEQ ID NO: 52009 - RNA, 22 nt, Homo sapiens
aguaucaagccacacaugguca

SEQ ID NO: 52010 - RNA, 22 nt, Homo sapiens
agucaaguuuuuucagagaaua

SEQ ID NO: 52011 - RNA, 22 nt, Homo sapiens
agucacagugaccuugucugac

SEQ ID NO: 52012 - RNA, 22 nt, Homo sapiens
agucacaugcauuuucuucaau

SEQ ID NO: 52013 - RNA, 23 nt, Homo sapiens
auaaugcaaguggugguaaucug

SEQ ID NO: 52014 - RNA, 22 nt, Homo sapiens
auaaucaugucugaaaccuuug

SEQ ID NO: 52015 - RNA, 22 nt, Homo sapiens
agucaagauggcaagguaaggc

SEQ ID NO: 52016 - RNA, 22 nt, Homo sapiens
agucacagccuuuuacuuuaga

SEQ ID NO: 52017 - RNA, 18 nt, Homo sapiens
auacaagcagcagagauu

SEQ ID NO: 52018 - RNA, 22 nt, Homo sapiens
auaauguuugauugagcagaua

SEQ ID NO: 52019 - RNA, 22 nt, Homo sapiens
auacacuagggcuccugcagaa

SEQ ID NO: 52020 - RNA, 19 nt, Homo sapiens
auacacguguauacauaca

SEQ ID NO: 52021 - RNA, 22 nt, Homo sapiens
auacacauuccugggccucacc

SEQ ID NO: 52022 - RNA, 22 nt, Homo sapiens
auacacgguaggcacauauuua

SEQ ID NO: 52023 - RNA, 22 nt, Homo sapiens
auacacgugcagaacaugcagg

SEQ ID NO: 52024 - RNA, 22 nt, Homo sapiens
auacaaguuauuugaacugcgg

SEQ ID NO: 52025 - RNA, 22 nt, Homo sapiens
auacagugaauacuuacagugu

SEQ ID NO: 52026 - RNA, 22 nt, Homo sapiens
auacaguguucugggaagaagu

SEQ ID NO: 52027 - RNA, 22 nt, Homo sapiens
auacaugugcaggucagguuac

SEQ ID NO: 52028 - RNA, 22 nt, Homo sapiens
auacaugugucauguugguuug

SEQ ID NO: 52029 - RNA, 22 nt, Homo sapiens
auacaugugccauguugguaug

SEQ ID NO: 52030 - RNA, 22 nt, Homo sapiens
auacaugugccauguugguuug

SEQ ID NO: 52031 - RNA, 22 nt, Homo sapiens
augcuacugauaagcaaucauu

SEQ ID NO: 52032 - RNA, 19 nt, Homo sapiens
augcugguguugcucaaac

SEQ ID NO: 52033 - RNA, 22 nt, Homo sapiens
augcuggugguucacaugcgca

SEQ ID NO: 52034 - RNA, 22 nt, Homo sapiens
augcuauguagaugagggccca

SEQ ID NO: 52035 - RNA, 22 nt, Homo sapiens
augcagauauuuuugugguugc

SEQ ID NO: 52036 - RNA, 22 nt, Homo sapiens
augcauaugucuuuauaguggc

SEQ ID NO: 52037 - RNA, 18 nt, Homo sapiens
augcauauuuuaaguugu

SEQ ID NO: 52038 - RNA, 22 nt, Homo sapiens
augcauauuuuaccuagaagag

SEQ ID NO: 52039 - RNA, 19 nt, Homo sapiens
augcacgugaaaugcauuu

SEQ ID NO: 52040 - RNA, 22 nt, Homo sapiens
augcaauucuagauugauagua

SEQ ID NO: 52041 - RNA, 22 nt, Homo sapiens
augcacauauguacugcccuau

SEQ ID NO: 52042 - RNA, 22 nt, Homo sapiens
augcacaucagcuccagggacc

SEQ ID NO: 52043 - RNA, 22 nt, Homo sapiens
augcaaaucuuaaguaugugug

SEQ ID NO: 52044 - RNA, 22 nt, Homo sapiens
augcaagcacacaagaggaaau

SEQ ID NO: 52045 - RNA, 22 nt, Homo sapiens
aucuuuggauacuugauauagu

SEQ ID NO: 52046 - RNA, 22 nt, Homo sapiens
aucuguagauucagcacaagcu

SEQ ID NO: 52047 - RNA, 22 nt, Homo sapiens
aucugguguuuccuucacauug

SEQ ID NO: 52048 - RNA, 22 nt, Homo sapiens
aucuggcuucuuuuaguccaca

SEQ ID NO: 52049 - RNA, 22 nt, Homo sapiens
aucuggcuccuuuugacaaugc

SEQ ID NO: 52050 - RNA, 22 nt, Homo sapiens
augagcuccucaaggucagaga

SEQ ID NO: 52051 - RNA, 22 nt, Homo sapiens
augagcucauugggugacuggg

SEQ ID NO: 52052 - RNA, 22 nt, Homo sapiens
augagggaagcucacgugucca

SEQ ID NO: 52053 - RNA, 22 nt, Homo sapiens
augagggagggguggugccgca

SEQ ID NO: 52054 - RNA, 22 nt, Homo sapiens
augaggauagguuucuauuagg

SEQ ID NO: 52055 - RNA, 22 nt, Homo sapiens
augugaugguuaauuuuaugug

SEQ ID NO: 52056 - RNA, 22 nt, Homo sapiens
augugacuuuuuccugugccuu

SEQ ID NO: 52057 - RNA, 22 nt, Homo sapiens
augugcaagaucauuaaagcuc

SEQ ID NO: 52058 - RNA, 22 nt, Homo sapiens
auguggcacuugacuuucucgc

SEQ ID NO: 52059 - RNA, 22 nt, Homo sapiens
auuaagagcacauguucugggu

SEQ ID NO: 52060 - RNA, 22 nt, Homo sapiens
auuaaguaaugguuccaauaau

SEQ ID NO: 52061 - RNA, 22 nt, Homo sapiens
auguggaaauguauaugugucu

SEQ ID NO: 52062 - RNA, 22 nt, Homo sapiens
auguggcauuucucauucauuu

SEQ ID NO: 52063 - RNA, 22 nt, Homo sapiens
augugacugauguaaucagaca

SEQ ID NO: 52064 - RNA, 22 nt, Homo sapiens
augucuguuugcugagcccggc

SEQ ID NO: 52065 - RNA, 22 nt, Homo sapiens
augugaaugugaucggauaguc

SEQ ID NO: 52066 - RNA, 22 nt, Homo sapiens
augucaaggugaagaaagauca

SEQ ID NO: 52067 - RNA, 22 nt, Homo sapiens
augucacagguccuagccaagu

SEQ ID NO: 52068 - RNA, 22 nt, Homo sapiens
augucauagaagccugugaacc

SEQ ID NO: 52069 - RNA, 22 nt, Homo sapiens
augucaacauagacaguagagu

SEQ ID NO: 52070 - RNA, 22 nt, Homo sapiens
auguaugagaguuccagcugau

SEQ ID NO: 52071 - RNA, 22 nt, Homo sapiens
auguaguagauauuuauggaaa

SEQ ID NO: 52072 - RNA, 22 nt, Homo sapiens
auguaauguuaaauugcuaauu

SEQ ID NO: 52073 - RNA, 22 nt, Homo sapiens
auggcuuuguguucagagcuga

SEQ ID NO: 52074 - RNA, 22 nt, Homo sapiens
auggcuuuuccugucuugcaug

SEQ ID NO: 52075 - RNA, 21 nt, Homo sapiens
augggacuaacugaugggucu

SEQ ID NO: 52076 - RNA, 22 nt, Homo sapiens
auggcuuuugcccuaaauggau

SEQ ID NO: 52077 - RNA, 22 nt, Homo sapiens
auggagaugugcgaacugagua

SEQ ID NO: 52078 - RNA, 22 nt, Homo sapiens
auggauauuuuuugaacauaga

SEQ ID NO: 52079 - RNA, 22 nt, Homo sapiens
auggaagaaaguuggguucuug

SEQ ID NO: 52080 - RNA, 22 nt, Homo sapiens
uguguuugauaaguccauaguu

SEQ ID NO: 52081 - RNA, 22 nt, Homo sapiens
uguguuuuuauguaaaauggaa

SEQ ID NO: 52082 - RNA, 21 nt, Homo sapiens
uguuaacaugcagauuacugg

SEQ ID NO: 52083 - RNA, 22 nt, Homo sapiens
uguguaauacucuaaugaugca

SEQ ID NO: 52084 - RNA, 22 nt, Homo sapiens
uguuaacauggucucagucugu

SEQ ID NO: 52085 - RNA, 22 nt, Homo sapiens
uguuaguuguucauguuaagag

SEQ ID NO: 52086 - RNA, 22 nt, Homo sapiens
uguuaugaagaugccugguaca

SEQ ID NO: 52087 - RNA, 22 nt, Homo sapiens
uguucaugaguucucauuuuua

SEQ ID NO: 52088 - RNA, 22 nt, Homo sapiens
uguuauguauggagugauccca

SEQ ID NO: 52089 - RNA, 22 nt, Homo sapiens
uguuauguuguuugagaaaguc

SEQ ID NO: 52090 - RNA, 22 nt, Homo sapiens
uuaaaugcauagaauguguagu

SEQ ID NO: 52091 - RNA, 22 nt, Homo sapiens
uguuuguuugagauggagucuc

SEQ ID NO: 52092 - RNA, 22 nt, Homo sapiens
uuaaaaguauaggccuggcaua

SEQ ID NO: 52093 - RNA, 22 nt, Homo sapiens
uuacacaguugguaggggcaga

SEQ ID NO: 52094 - RNA, 19 nt, Homo sapiens
uuaagguacuuagaugugu

SEQ ID NO: 52095 - RNA, 22 nt, Homo sapiens
uuaaggaaggagucuuaaaugg

SEQ ID NO: 52096 - RNA, 22 nt, Homo sapiens
uuaacaguuaauucuuuggcaa

SEQ ID NO: 52097 - RNA, 22 nt, Homo sapiens
uuaacagucacuuagcucauuu

SEQ ID NO: 52098 - RNA, 21 nt, Homo sapiens
uuaacagacaagugucuuccc

SEQ ID NO: 52099 - RNA, 22 nt, Homo sapiens
uuaagacaccaaucauuggauu

SEQ ID NO: 52100 - RNA, 22 nt, Homo sapiens
uuaagaugcauuuugaaguuaa

SEQ ID NO: 52101 - RNA, 20 nt, Homo sapiens
ugugauuauuuaguugcaug

SEQ ID NO: 52102 - RNA, 22 nt, Homo sapiens
uguacuucaagauuaugguuua

SEQ ID NO: 52103 - RNA, 21 nt, Homo sapiens
uguagcagcauaauuuauaau

SEQ ID NO: 52104 - RNA, 22 nt, Homo sapiens
uguaauguuucaucauuauuaa

SEQ ID NO: 52105 - RNA, 22 nt, Homo sapiens
uguacaugggacaggaggagag

SEQ ID NO: 52106 - RNA, 22 nt, Homo sapiens
uggucuccuuuguacccugggc

SEQ ID NO: 52107 - RNA, 20 nt, Homo sapiens
ugguccccugagucuggcuu

SEQ ID NO: 52108 - RNA, 22 nt, Homo sapiens
uggugccgugguccuggggcca

SEQ ID NO: 52109 - RNA, 22 nt, Homo sapiens
uggugcuuaaauaaggcuuuca

SEQ ID NO: 52110 - RNA, 22 nt, Homo sapiens
uguaagcauugggcaugcaguc

SEQ ID NO: 52111 - RNA, 22 nt, Homo sapiens
uguggaguguaugugacagaga

SEQ ID NO: 52112 - RNA, 22 nt, Homo sapiens
uguggcucuucuguucuccacu

SEQ ID NO: 52113 - RNA, 22 nt, Homo sapiens
uguggcauuuucagaaaggaug

SEQ ID NO: 52114 - RNA, 22 nt, Homo sapiens
ugugggaggugcuaauguaaau

SEQ ID NO: 52115 - RNA, 22 nt, Homo sapiens
uguguaaauacaagugcuugaa

SEQ ID NO: 52116 - RNA, 22 nt, Homo sapiens
uguguaaauagcuacggaucug

SEQ ID NO: 52117 - RNA, 22 nt, Homo sapiens
ugugcaaggcucucaaccugug

SEQ ID NO: 52118 - RNA, 22 nt, Homo sapiens
ugugcaaucagcuucauuacau

SEQ ID NO: 52119 - RNA, 23 nt, Homo sapiens
ugugcacauuuacauauauacac

SEQ ID NO: 52120 - RNA, 22 nt, Homo sapiens
uucccugaaauauucacuuuca

SEQ ID NO: 52121 - RNA, 22 nt, Homo sapiens
uuccauguugauacgugaaguu

SEQ ID NO: 52122 - RNA, 22 nt, Homo sapiens
uucaugugagucuguauuaacu

SEQ ID NO: 52123 - RNA, 22 nt, Homo sapiens
uucaugucuuggcuguuagagu

SEQ ID NO: 52124 - RNA, 22 nt, Homo sapiens
uucauggguuaauuuguucgau

SEQ ID NO: 52125 - RNA, 22 nt, Homo sapiens
uucauggauggaaaugauuuug

SEQ ID NO: 52126 - RNA, 22 nt, Homo sapiens
uucauggacucaauaguuucgc

SEQ ID NO: 52127 - RNA, 21 nt, Homo sapiens
uucaucuggccguauuccagg

SEQ ID NO: 52128 - RNA, 22 nt, Homo sapiens
uucauccccuccaaaucucaug

SEQ ID NO: 52129 - RNA, 22 nt, Homo sapiens
uucauaguguaccugaaggcac

SEQ ID NO: 52130 - RNA, 22 nt, Homo sapiens
uucaucacagucuccgaugccc

SEQ ID NO: 52131 - RNA, 22 nt, Homo sapiens
uucaucagcuguagaugucaug

SEQ ID NO: 52132 - RNA, 22 nt, Homo sapiens
uucauagucuaauuuuuuccac

SEQ ID NO: 52133 - RNA, 22 nt, Homo sapiens
uucauaguucuuuuagucauua

SEQ ID NO: 52134 - RNA, 22 nt, Homo sapiens
uucuuagucauguaauagucca

SEQ ID NO: 52135 - RNA, 20 nt, Homo sapiens
uucuugaguuaacaaguuac

SEQ ID NO: 52136 - RNA, 22 nt, Homo sapiens
uucuugcacuuaacugacauuc

SEQ ID NO: 52137 - RNA, 21 nt, Homo sapiens
uucuucaggcagaaggauuau

SEQ ID NO: 52138 - RNA, 22 nt, Homo sapiens
uucuggcuuuuaaagaaauguu

SEQ ID NO: 52139 - RNA, 22 nt, Homo sapiens
uucuggcucgauucucugaccg

SEQ ID NO: 52140 - RNA, 22 nt, Homo sapiens
uucuggcuuauaaacgugacuu

SEQ ID NO: 52141 - RNA, 22 nt, Homo sapiens
uucuggaaaucagcagagggug

SEQ ID NO: 52142 - RNA, 22 nt, Homo sapiens
uucugcuugaucuaguguguug

SEQ ID NO: 52143 - RNA, 22 nt, Homo sapiens
uucuggcuaugggauacuaaau

SEQ ID NO: 52144 - RNA, 22 nt, Homo sapiens
uucucaaggagccuucguaacu

SEQ ID NO: 52145 - RNA, 22 nt, Homo sapiens
uuccguguaguugagcaguuuu

SEQ ID NO: 52146 - RNA, 22 nt, Homo sapiens
uucucagugaacuccagcuugu

SEQ ID NO: 52147 - RNA, 22 nt, Homo sapiens
uuacauguuuauggggguacau

SEQ ID NO: 52148 - RNA, 22 nt, Homo sapiens
uuacaugucuugguaagguuag

SEQ ID NO: 52149 - RNA, 22 nt, Homo sapiens
uuacauguuguggguuguggcc

SEQ ID NO: 52150 - RNA, 22 nt, Homo sapiens
uuacaucaucacauuaguuugc

SEQ ID NO: 52151 - RNA, 23 nt, Homo sapiens
uuacaguggcaugaucucugcuc

SEQ ID NO: 52152 - RNA, 22 nt, Homo sapiens
uuacaguguuuguucuguuacu

SEQ ID NO: 52153 - RNA, 22 nt, Homo sapiens
uuacaguauugcaaggacuagg

SEQ ID NO: 52154 - RNA, 22 nt, Homo sapiens
uuaucacauugacugauuugca

SEQ ID NO: 52155 - RNA, 18 nt, Homo sapiens
uuauaugcauguguagga

SEQ ID NO: 52156 - RNA, 22 nt, Homo sapiens
uuauagcuaacaucugugaaaa

SEQ ID NO: 52157 - RNA, 22 nt, Homo sapiens
uuaugaaguagguuaagagcag

SEQ ID NO: 52158 - RNA, 22 nt, Homo sapiens
uuaugacauugacaguuuuuag

SEQ ID NO: 52159 - RNA, 22 nt, Homo sapiens
uuaugcuugugugaauuuuccc

SEQ ID NO: 52160 - RNA, 22 nt, Homo sapiens
uucaaaguaaaaauguguucac

SEQ ID NO: 52161 - RNA, 22 nt, Homo sapiens
uuaugcuguuuucuggagauuu

SEQ ID NO: 52162 - RNA, 22 nt, Homo sapiens
uuaugcuuauugguguacggua

SEQ ID NO: 52163 - RNA, 22 nt, Homo sapiens
uucaaaucuucguuuugccaua

SEQ ID NO: 52164 - RNA, 22 nt, Homo sapiens
uucaaaucuuuggcucccacua

SEQ ID NO: 52165 - RNA, 22 nt, Homo sapiens
uucaauacuguugauccuuaug

SEQ ID NO: 52166 - RNA, 22 nt, Homo sapiens
uucaagcugggcaaauaagggg

SEQ ID NO: 52167 - RNA, 22 nt, Homo sapiens
uucaagucuuggcuuugccacc

SEQ ID NO: 52168 - RNA, 22 nt, Homo sapiens
uucagugucauuaacacaguag

SEQ ID NO: 52169 - RNA, 22 nt, Homo sapiens
uucaguacuucaaaaucuuuaa

SEQ ID NO: 52170 - RNA, 19 nt, Homo sapiens
uucauacagugagagcagc

SEQ ID NO: 52171 - RNA, 22 nt, Homo sapiens
uucaguacacguguucucauuu

SEQ ID NO: 52172 - RNA, 22 nt, Homo sapiens
uucacagccgcaccccaucacu

SEQ ID NO: 52173 - RNA, 22 nt, Homo sapiens
uuugccaauauuuuacugagga

SEQ ID NO: 52174 - RNA, 22 nt, Homo sapiens
uuugccaaugggaauuuuccua

SEQ ID NO: 52175 - RNA, 19 nt, Homo sapiens
uuugccuaggcacauggcc

SEQ ID NO: 52176 - RNA, 22 nt, Homo sapiens
uuugccuguagacacuuacccu

SEQ ID NO: 52177 - RNA, 22 nt, Homo sapiens
uuuggcauuuuacuacucaaau

SEQ ID NO: 52178 - RNA, 22 nt, Homo sapiens
uuugugcuccuguugagaaucu

SEQ ID NO: 52179 - RNA, 22 nt, Homo sapiens
uuugugcuccuaugagaaucua

SEQ ID NO: 52180 - RNA, 23 nt, Homo sapiens
uuugugacacucuccaucuccag

SEQ ID NO: 52181 - RNA, 22 nt, Homo sapiens
uuuguccugccaugguuuauuu

SEQ ID NO: 52182 - RNA, 22 nt, Homo sapiens
uuugguugccucuaugagccug

SEQ ID NO: 52183 - RNA, 22 nt, Homo sapiens
uuugguuauauauauacacucu

SEQ ID NO: 52184 - RNA, 19 nt, Homo sapiens
uuugcauagugagaauaua

SEQ ID NO: 52185 - RNA, 22 nt, Homo sapiens
uuugcaguguaguuggccagca

SEQ ID NO: 52186 - RNA, 22 nt, Homo sapiens
uuugcauaauaagauuagggug

SEQ ID NO: 52187 - RNA, 22 nt, Homo sapiens
uuugcagagacuuguuaggaau

SEQ ID NO: 52188 - RNA, 22 nt, Homo sapiens
uuugaggaaaggcauaaguagg

SEQ ID NO: 52189 - RNA, 22 nt, Homo sapiens
uuugaguaggcuuauauuuugg

SEQ ID NO: 52190 - RNA, 22 nt, Homo sapiens
uuugaugcaucucuacuuuguu

SEQ ID NO: 52191 - RNA, 22 nt, Homo sapiens
uuugagcuugacucagcuggag

SEQ ID NO: 52192 - RNA, 22 nt, Homo sapiens
uuugauuguacuaaaauuguac

SEQ ID NO: 52193 - RNA, 23 nt, Homo sapiens
uuucuugggcaugcuaugucagu

SEQ ID NO: 52194 - RNA, 22 nt, Homo sapiens
uuucugguuaauuucuaagagc

SEQ ID NO: 52195 - RNA, 22 nt, Homo sapiens
uuugaaguguggcacugaguuu

SEQ ID NO: 52196 - RNA, 22 nt, Homo sapiens
uuugacaaugugugcuuguauu

SEQ ID NO: 52197 - RNA, 22 nt, Homo sapiens
uuugacuagaguguuuuacaac

SEQ ID NO: 52198 - RNA, 22 nt, Homo sapiens
uuugacuaccaggaauguucuu

SEQ ID NO: 52199 - RNA, 22 nt, Homo sapiens
uuugacuuuuagaauaugaguu

SEQ ID NO: 52200 - RNA, 22 nt, Homo sapiens
uuugagaucuuuagaaucaggc

SEQ ID NO: 52201 - RNA, 22 nt, Homo sapiens
uugucaccucuaaaucucauau

SEQ ID NO: 52202 - RNA, 22 nt, Homo sapiens
uugucacugcacuccagucugg

SEQ ID NO: 52203 - RNA, 22 nt, Homo sapiens
uugucacuauaaauaagcauuu

SEQ ID NO: 52204 - RNA, 22 nt, Homo sapiens
uugucaaugggugagugcagag

SEQ ID NO: 52205 - RNA, 21 nt, Homo sapiens
uuguaugguugaacuugauac

SEQ ID NO: 52206 - RNA, 21 nt, Homo sapiens
uugguucccucugacaggucu

SEQ ID NO: 52207 - RNA, 22 nt, Homo sapiens
uugguuaucaucauuucagcaa

SEQ ID NO: 52208 - RNA, 22 nt, Homo sapiens
uuguauguuucugugcacauga

SEQ ID NO: 52209 - RNA, 22 nt, Homo sapiens
uuguauugucuugaugaguuga

SEQ ID NO: 52210 - RNA, 22 nt, Homo sapiens
uuguauaggcucaguaagaauc

SEQ ID NO: 52211 - RNA, 22 nt, Homo sapiens
uugguuauccugucgguaauuc

SEQ ID NO: 52212 - RNA, 22 nt, Homo sapiens
uuguauaguucuauguguuuug

SEQ ID NO: 52213 - RNA, 22 nt, Homo sapiens
uuucagcguggggugcugaaga

SEQ ID NO: 52214 - RNA, 22 nt, Homo sapiens
uuucagagucaucugcccaagu

SEQ ID NO: 52215 - RNA, 23 nt, Homo sapiens
uuucacaguagcuggaucagccu

SEQ ID NO: 52216 - RNA, 22 nt, Homo sapiens
uuucgguuaucuagcuuuauga

SEQ ID NO: 52217 - RNA, 22 nt, Homo sapiens
uuuccuguagggggcaaggccu

SEQ ID NO: 52218 - RNA, 22 nt, Homo sapiens
uuucuacagugaacgauuucua

SEQ ID NO: 52219 - RNA, 16 nt, Homo sapiens
uuucuauguuuuacua

SEQ ID NO: 52220 - RNA, 17 nt, Homo sapiens
uuucucagcccucuucu

SEQ ID NO: 52221 - RNA, 20 nt, Homo sapiens
uuucuccccuauaaaucuca

SEQ ID NO: 52222 - RNA, 21 nt, Homo sapiens
uuucugggggagcauggcagg

SEQ ID NO: 52223 - RNA, 22 nt, Homo sapiens
uuucugugguccucuugaaggu

SEQ ID NO: 52224 - RNA, 22 nt, Homo sapiens
uuguguccccacucaaauuaca

SEQ ID NO: 52225 - RNA, 19 nt, Homo sapiens
uuguguccccacaaaauuc

SEQ ID NO: 52226 - RNA, 22 nt, Homo sapiens
uuuaugcgucuguaauuucuuu

SEQ ID NO: 52227 - RNA, 22 nt, Homo sapiens
uuuauucggcuaggagcuucgg

SEQ ID NO: 52228 - RNA, 22 nt, Homo sapiens
uuggcaaauagguuuuauugca

SEQ ID NO: 52229 - RNA, 22 nt, Homo sapiens
uuggaagacaaugcugauucuc

SEQ ID NO: 52230 - RNA, 22 nt, Homo sapiens
uuggcauugccaaacugucaac

SEQ ID NO: 52231 - RNA, 20 nt, Homo sapiens
uuggcagagucuuuagggua

SEQ ID NO: 52232 - RNA, 21 nt, Homo sapiens
uugguccacaugucauaguua

SEQ ID NO: 52233 - RNA, 22 nt, Homo sapiens
uugguaugaaaaggaauuagac

SEQ ID NO: 52234 - RNA, 22 nt, Homo sapiens
uugguacuacacuucuaaucuu

SEQ ID NO: 52235 - RNA, 22 nt, Homo sapiens
uugguaaugggcugguauaacc

SEQ ID NO: 52236 - RNA, 22 nt, Homo sapiens
uuggccauggagcacuuuucua

SEQ ID NO: 52237 - RNA, 22 nt, Homo sapiens
uuggaaacauuuaugguaacag

SEQ ID NO: 52238 - RNA, 22 nt, Homo sapiens
uuggaaauauguuaagugucau

SEQ ID NO: 52239 - RNA, 22 nt, Homo sapiens
uuggaaaugguaaaggguuaau

SEQ ID NO: 52240 - RNA, 22 nt, Homo sapiens
uuggaacuguucguauugaaau

SEQ ID NO: 52241 - RNA, 22 nt, Homo sapiens
uugcuucuuucgucuggcccca

SEQ ID NO: 52242 - RNA, 22 nt, Homo sapiens
uugccugagaagccaagaauaa

SEQ ID NO: 52243 - RNA, 22 nt, Homo sapiens
uugcaugcuccuuaugagaauc

SEQ ID NO: 52244 - RNA, 22 nt, Homo sapiens
uugcaugggagcugggugaggc

SEQ ID NO: 52245 - RNA, 22 nt, Homo sapiens
uugcaugguggaacuuggagcu

SEQ ID NO: 52246 - RNA, 22 nt, Homo sapiens
uugcauauucucugaggcagga

SEQ ID NO: 52247 - RNA, 22 nt, Homo sapiens
uugcaugcacaguucucaauag

SEQ ID NO: 52248 - RNA, 22 nt, Homo sapiens
uugcauuguacuugguacggcu

SEQ ID NO: 52249 - RNA, 22 nt, Homo sapiens
uugcauugacacaugaagcuca

SEQ ID NO: 52250 - RNA, 23 nt, Homo sapiens
uugcauugcccuccauaguacuc

SEQ ID NO: 52251 - RNA, 22 nt, Homo sapiens
uugccaauauuuuacugagaag

SEQ ID NO: 52252 - RNA, 22 nt, Homo sapiens
uugcacauugauuuuguaucuu

SEQ ID NO: 52253 - RNA, 22 nt, Homo sapiens
uugcacauguugaaccagcaaa

SEQ ID NO: 52254 - RNA, 22 nt, Homo sapiens
uugcacaauggaauuuaucuuu

SEQ ID NO: 52255 - RNA, 22 nt, Homo sapiens
uugcaagauguuaacauuggag

SEQ ID NO: 52256 - RNA, 22 nt, Homo sapiens
uugcacauugcaccuuuuguau

SEQ ID NO: 52257 - RNA, 22 nt, Homo sapiens
uugcacauuuuuucuggcagaa

SEQ ID NO: 52258 - RNA, 22 nt, Homo sapiens
uugcacuugcugaggagugauu

SEQ ID NO: 52259 - RNA, 19 nt, Homo sapiens
uugcauauguugaaccagc

SEQ ID NO: 52260 - RNA, 22 nt, Homo sapiens
uugcaguacuucuggcuuuaca

SEQ ID NO: 52261 - RNA, 22 nt, Homo sapiens
uugcaccuuaugucuguucucu

SEQ ID NO: 52262 - RNA, 22 nt, Homo sapiens
uugcagaucccacacucacccu

SEQ ID NO: 52263 - RNA, 22 nt, Homo sapiens
uucuugguuuaucgcuuuaaaa

SEQ ID NO: 52264 - RNA, 22 nt, Homo sapiens
uucuugguguaguaguugaaaa

SEQ ID NO: 52265 - RNA, 22 nt, Homo sapiens
uugaagguagaaguucucaauu

SEQ ID NO: 52266 - RNA, 22 nt, Homo sapiens
uugaaguagcauuucaugucua

SEQ ID NO: 52267 - RNA, 22 nt, Homo sapiens
uugaagguaggaugugcuauca

SEQ ID NO: 52268 - RNA, 22 nt, Homo sapiens
uugaauagaaguguugaaagug

SEQ ID NO: 52269 - RNA, 22 nt, Homo sapiens
uugaaugaaauuggugugggga

SEQ ID NO: 52270 - RNA, 22 nt, Homo sapiens
uugaaguauagaguuuaagaac

SEQ ID NO: 52271 - RNA, 22 nt, Homo sapiens
uugaaguagguaccguucaauu

SEQ ID NO: 52272 - RNA, 22 nt, Homo sapiens
uugaauagaagguuuuuuguuc

SEQ ID NO: 52273 - RNA, 22 nt, Homo sapiens
uugauuuguagaaugccccaac

SEQ ID NO: 52274 - RNA, 22 nt, Homo sapiens
uugaauguaugcuggguuuacu

SEQ ID NO: 52275 - RNA, 18 nt, Homo sapiens
uugaaugcgucccagaga

SEQ ID NO: 52276 - RNA, 22 nt, Homo sapiens
uugaucugugucccugcccaau

SEQ ID NO: 52277 - RNA, 22 nt, Homo sapiens
uugacaaggagccauugcaucu

SEQ ID NO: 52278 - RNA, 22 nt, Homo sapiens
uugaucuguguuagaagcuaag

SEQ ID NO: 52279 - RNA, 22 nt, Homo sapiens
ugaagaucuuaggagcugaggg

SEQ ID NO: 52280 - RNA, 22 nt, Homo sapiens
ugaagacucauacuugaaucag

SEQ ID NO: 52281 - RNA, 22 nt, Homo sapiens
ugaaauuguuugcaaggauagg

SEQ ID NO: 52282 - RNA, 22 nt, Homo sapiens
ugaagacucaauuauuaugaac

SEQ ID NO: 52283 - RNA, 19 nt, Homo sapiens
ugaaguauagggcuucuga

SEQ ID NO: 52284 - RNA, 22 nt, Homo sapiens
ugaauauguuaaauaauguucu

SEQ ID NO: 52285 - RNA, 22 nt, Homo sapiens
ugaauagagcugcaguggacau

SEQ ID NO: 52286 - RNA, 22 nt, Homo sapiens
ugaagugaagacucacagaagg

SEQ ID NO: 52287 - RNA, 22 nt, Homo sapiens
ugaauagaaguuuacuccuuuu

SEQ ID NO: 52288 - RNA, 21 nt, Homo sapiens
ugaauacugcugcucccuuug

SEQ ID NO: 52289 - RNA, 22 nt, Homo sapiens
ugaaauuuuuuauucguuggcu

SEQ ID NO: 52290 - RNA, 21 nt, Homo sapiens
ugaacacuggacugagugucc

SEQ ID NO: 52291 - RNA, 22 nt, Homo sapiens
ugaacagcaccuccuagaguug

SEQ ID NO: 52292 - RNA, 22 nt, Homo sapiens
ugaacagcacguuuauucagaa

SEQ ID NO: 52293 - RNA, 22 nt, Homo sapiens
ugaacagcuaucuugucagugu

SEQ ID NO: 52294 - RNA, 22 nt, Homo sapiens
ugaaauguuaaacaaguggcuc

SEQ ID NO: 52295 - RNA, 22 nt, Homo sapiens
ucuuugguaauggaugucugau

SEQ ID NO: 52296 - RNA, 22 nt, Homo sapiens
ugacaucugcuugugcccagga

SEQ ID NO: 52297 - RNA, 22 nt, Homo sapiens
ugacauggagagagaagccuuu

SEQ ID NO: 52298 - RNA, 22 nt, Homo sapiens
ugacaagacuacauaucccauu

SEQ ID NO: 52299 - RNA, 22 nt, Homo sapiens
ugaauuguuuacgagaugugag

SEQ ID NO: 52300 - RNA, 22 nt, Homo sapiens
ugacaagaaagcgucuucuuuu

SEQ ID NO: 52301 - RNA, 22 nt, Homo sapiens
ugacauguauuagcucagugcu

SEQ ID NO: 52302 - RNA, 22 nt, Homo sapiens
ugacauguccaggugguccugu

SEQ ID NO: 52303 - RNA, 23 nt, Homo sapiens
ugacauguaauucaguccagcag

SEQ ID NO: 52304 - RNA, 18 nt, Homo sapiens
ugacauugagcugagaaa

SEQ ID NO: 52305 - RNA, 21 nt, Homo sapiens
ugacauguugguuugcugcac

SEQ ID NO: 52306 - RNA, 21 nt, Homo sapiens
ugacauguugguguucugcac

SEQ ID NO: 52307 - RNA, 22 nt, Homo sapiens
ugaauguacuuaacacuggauu

SEQ ID NO: 52308 - RNA, 22 nt, Homo sapiens
ugaauguccauugauguuuuga

SEQ ID NO: 52309 - RNA, 22 nt, Homo sapiens
ugaaugugauggguuucaugug

SEQ ID NO: 52310 - RNA, 22 nt, Homo sapiens
ugaauguuguugguugagauau

SEQ ID NO: 52311 - RNA, 23 nt, Homo sapiens
ugaauguuuauucucggugcaga

SEQ ID NO: 52312 - RNA, 22 nt, Homo sapiens
ugaauguuugcagcuuauacca

SEQ ID NO: 52313 - RNA, 22 nt, Homo sapiens
ugaauuguuucauucuuuacau

SEQ ID NO: 52314 - RNA, 22 nt, Homo sapiens
ugaaugguuuuuagagaacaau

SEQ ID NO: 52315 - RNA, 22 nt, Homo sapiens
ugaaugcuucaugucugggcug

SEQ ID NO: 52316 - RNA, 22 nt, Homo sapiens
ugaauguaagaugucugcuggu

SEQ ID NO: 52317 - RNA, 22 nt, Homo sapiens
ugaaugcaucauguagggcuca

SEQ ID NO: 52318 - RNA, 22 nt, Homo sapiens
ugaaugcaucuagaaauuuauu

SEQ ID NO: 52319 - RNA, 22 nt, Homo sapiens
ugaaugcauggggccaagaagg

SEQ ID NO: 52320 - RNA, 22 nt, Homo sapiens
ugaaucauuucuugucuucagu

SEQ ID NO: 52321 - RNA, 19 nt, Homo sapiens
ugaaugacaucuaaagucc

SEQ ID NO: 52322 - RNA, 22 nt, Homo sapiens
ucucaugaagauagagaauaga

SEQ ID NO: 52323 - RNA, 20 nt, Homo sapiens
ucucauggagggaaagagca

SEQ ID NO: 52324 - RNA, 20 nt, Homo sapiens
ucucauggagguagagaaua

SEQ ID NO: 52325 - RNA, 22 nt, Homo sapiens
ucucauggcucacccugcauag

SEQ ID NO: 52326 - RNA, 22 nt, Homo sapiens
ucucaauggguuguagacaaag

SEQ ID NO: 52327 - RNA, 22 nt, Homo sapiens
ucucacaccccucucauauacc

SEQ ID NO: 52328 - RNA, 22 nt, Homo sapiens
ucucaaccucccaaguagcugg

SEQ ID NO: 52329 - RNA, 22 nt, Homo sapiens
ucucauggagucaggagcagaa

SEQ ID NO: 52330 - RNA, 22 nt, Homo sapiens
ucucccauccguacacggauug

SEQ ID NO: 52331 - RNA, 22 nt, Homo sapiens
ucugucuuguccucacccuaga

SEQ ID NO: 52332 - RNA, 22 nt, Homo sapiens
ucugucuuugucaggaccagag

SEQ ID NO: 52333 - RNA, 22 nt, Homo sapiens
ucugugcauggcagaggaauga

SEQ ID NO: 52334 - RNA, 19 nt, Homo sapiens
ucuguaguuagggcuacag

SEQ ID NO: 52335 - RNA, 22 nt, Homo sapiens
ucugugaaugaacacuugaaaa

SEQ ID NO: 52336 - RNA, 22 nt, Homo sapiens
ucugugcauuguaacaacuaaa

SEQ ID NO: 52337 - RNA, 22 nt, Homo sapiens
aacaggcuccuaggggugcacc

SEQ ID NO: 52338 - RNA, 22 nt, Homo sapiens
aacagcauaguacccgugauaa

SEQ ID NO: 52339 - RNA, 22 nt, Homo sapiens
aacacuguuuccagucaugauc

SEQ ID NO: 52340 - RNA, 22 nt, Homo sapiens
aacacggcccgcagagcaagcu

SEQ ID NO: 52341 - RNA, 18 nt, Homo sapiens
ucuuuggcugaacuguag

SEQ ID NO: 52342 - RNA, 22 nt, Homo sapiens
ucuuuggcugugaagaauaaug

SEQ ID NO: 52343 - RNA, 22 nt, Homo sapiens
aacagauugcugagccccaccc

SEQ ID NO: 52344 - RNA, 22 nt, Homo sapiens
aacaucaaccaugaggguugga

SEQ ID NO: 52345 - RNA, 22 nt, Homo sapiens
aacaguaucuaacgagugauga

SEQ ID NO: 52346 - RNA, 22 nt, Homo sapiens
uccacagugguugaacuaguaa

SEQ ID NO: 52347 - RNA, 19 nt, Homo sapiens
uccaccgcgugcaccucua

SEQ ID NO: 52348 - RNA, 22 nt, Homo sapiens
ucauugguagcucauggaaccg

SEQ ID NO: 52349 - RNA, 22 nt, Homo sapiens
ucauuggaugucugaaaugauu

SEQ ID NO: 52350 - RNA, 19 nt, Homo sapiens
uccacagugguugaacuag

SEQ ID NO: 52351 - RNA, 22 nt, Homo sapiens
ucauugcuuauuuguuggugga

SEQ ID NO: 52352 - RNA, 22 nt, Homo sapiens
ucauugcauguuaauuaaacag

SEQ ID NO: 52353 - RNA, 22 nt, Homo sapiens
ucauucauuugcucacuccaca

SEQ ID NO: 52354 - RNA, 22 nt, Homo sapiens
ucauuagucaccuagccagcuu

SEQ ID NO: 52355 - RNA, 22 nt, Homo sapiens
ucauucauucauccagcuugag

SEQ ID NO: 52356 - RNA, 22 nt, Homo sapiens
uccuugagucuuugcucagaug

SEQ ID NO: 52357 - RNA, 22 nt, Homo sapiens
uccugagacugaggagcuuugg

SEQ ID NO: 52358 - RNA, 23 nt, Homo sapiens
uccccgggagcaccagcuuguug

SEQ ID NO: 52359 - RNA, 20 nt, Homo sapiens
ucagugauugguuuaguuau

SEQ ID NO: 52360 - RNA, 22 nt, Homo sapiens
ucagugcuguaccaucuaagga

SEQ ID NO: 52361 - RNA, 22 nt, Homo sapiens
ucauacuguuaaaugguuuagu

SEQ ID NO: 52362 - RNA, 22 nt, Homo sapiens
ucaguucauggaggugucugcu

SEQ ID NO: 52363 - RNA, 22 nt, Homo sapiens
ucauacgucuccuugugccacc

SEQ ID NO: 52364 - RNA, 22 nt, Homo sapiens
ucaucaguuuuuuauaugugau

SEQ ID NO: 52365 - RNA, 22 nt, Homo sapiens
ucaugacacagcauacugacuu

SEQ ID NO: 52366 - RNA, 22 nt, Homo sapiens
ucaugagacacacuggaaagga

SEQ ID NO: 52367 - RNA, 22 nt, Homo sapiens
ucaucuggcgaaugugaagagu

SEQ ID NO: 52368 - RNA, 22 nt, Homo sapiens
ucaugaaguaguuaacugguug

SEQ ID NO: 52369 - RNA, 22 nt, Homo sapiens
ucauagaucaaguaauaagaca

SEQ ID NO: 52370 - RNA, 22 nt, Homo sapiens
ucauauguaugugcaauuuugu

SEQ ID NO: 52371 - RNA, 22 nt, Homo sapiens
ucauaugucauaguaugaucuu

SEQ ID NO: 52372 - RNA, 22 nt, Homo sapiens
uauugacuugaugagggagggu

SEQ ID NO: 52373 - RNA, 22 nt, Homo sapiens
uauuugguuacuugaauagcua

SEQ ID NO: 52374 - RNA, 19 nt, Homo sapiens
ucagcaguaaucaacuuca

SEQ ID NO: 52375 - RNA, 22 nt, Homo sapiens
ucagauuggugcaaaaguaauu

SEQ ID NO: 52376 - RNA, 22 nt, Homo sapiens
ucagcaguggacagaaugguag

SEQ ID NO: 52377 - RNA, 22 nt, Homo sapiens
ucagcagugugaaaauggacua

SEQ ID NO: 52378 - RNA, 22 nt, Homo sapiens
ucagucauguuuaccagacgua

SEQ ID NO: 52379 - RNA, 22 nt, Homo sapiens
ucaguaaucuuagcugugcaga

SEQ ID NO: 52380 - RNA, 22 nt, Homo sapiens
ucaggugcaguggcucaugcuu

SEQ ID NO: 52381 - RNA, 22 nt, Homo sapiens
uggguagauaucauaguugccc

SEQ ID NO: 52382 - RNA, 22 nt, Homo sapiens
uggcuuuuccuugaaucugccu

SEQ ID NO: 52383 - RNA, 22 nt, Homo sapiens
uggcuguuguuacuaacaguuc

SEQ ID NO: 52384 - RNA, 22 nt, Homo sapiens
ugguaucauuuuaucugcucua

SEQ ID NO: 52385 - RNA, 22 nt, Homo sapiens
ugguaagaggcccugaguuugu

SEQ ID NO: 52386 - RNA, 22 nt, Homo sapiens
uggucauggggcagcugacacu

SEQ ID NO: 52387 - RNA, 22 nt, Homo sapiens
uggucagaaaauuacuugauau

SEQ ID NO: 52388 - RNA, 22 nt, Homo sapiens
ugguauguguucuaaaauuaug

SEQ ID NO: 52389 - RNA, 22 nt, Homo sapiens
ugguaugucuuucuuccuguag

SEQ ID NO: 52390 - RNA, 22 nt, Homo sapiens
ugguauguuuauaaguauagga

SEQ ID NO: 52391 - RNA, 22 nt, Homo sapiens
ugguauuuaauauaugagaguu

SEQ ID NO: 52392 - RNA, 22 nt, Homo sapiens
uggucaccugaauuaugcaugu

SEQ ID NO: 52393 - RNA, 22 nt, Homo sapiens
uggcaagagaacaacaucucuc

SEQ ID NO: 52394 - RNA, 22 nt, Homo sapiens
uggcaagagcaaaauguacagu

SEQ ID NO: 52395 - RNA, 22 nt, Homo sapiens
uggcaaaauauuuugguuucug

SEQ ID NO: 52396 - RNA, 22 nt, Homo sapiens
uggcaagaaccacaguuacuuu

SEQ ID NO: 52397 - RNA, 22 nt, Homo sapiens
uggaacugauauugauggaaaa

SEQ ID NO: 52398 - RNA, 22 nt, Homo sapiens
uggaagacauugggugaagggu

SEQ ID NO: 52399 - RNA, 20 nt, Homo sapiens
uggaacuuaauugauggaca

SEQ ID NO: 52400 - RNA, 22 nt, Homo sapiens
uggaagacaaguguuagcaugg

SEQ ID NO: 52401 - RNA, 22 nt, Homo sapiens
uggaagacacauaccugauaac

SEQ ID NO: 52402 - RNA, 22 nt, Homo sapiens
uggaagauggaguuuuaucauu

SEQ ID NO: 52403 - RNA, 23 nt, Homo sapiens
uggaagacuccucucuuggcugc

SEQ ID NO: 52404 - RNA, 22 nt, Homo sapiens
uggaaggucauuguucauuuga

SEQ ID NO: 52405 - RNA, 22 nt, Homo sapiens
uggaagacaggcuguauuuuaa

SEQ ID NO: 52406 - RNA, 18 nt, Homo sapiens
uggacagugauuauccau

SEQ ID NO: 52407 - RNA, 22 nt, Homo sapiens
uggagaacauucauuugcaaga

SEQ ID NO: 52408 - RNA, 22 nt, Homo sapiens
uggagagugauaaguaaaugga

SEQ ID NO: 52409 - RNA, 18 nt, Homo sapiens
uggauuggaaaaguuccu

SEQ ID NO: 52410 - RNA, 22 nt, Homo sapiens
uggauguacagucaguauuugu

SEQ ID NO: 52411 - RNA, 22 nt, Homo sapiens
uggauguauacaugcaggucac

SEQ ID NO: 52412 - RNA, 22 nt, Homo sapiens
ugcauauuuuauaaagauggaa

SEQ ID NO: 52413 - RNA, 18 nt, Homo sapiens
ugcauauguugaaccagc

SEQ ID NO: 52414 - RNA, 21 nt, Homo sapiens
ugcauauuggaacuuucucuc

SEQ ID NO: 52415 - RNA, 22 nt, Homo sapiens
ugccugauacccucugucucuc

SEQ ID NO: 52416 - RNA, 22 nt, Homo sapiens
ugcgaucuuuuuccuuguuccu

SEQ ID NO: 52417 - RNA, 23 nt, Homo sapiens
uggaacugaauuucuuagcauuu

SEQ ID NO: 52418 - RNA, 22 nt, Homo sapiens
uggaacacauaaauagcauagu

SEQ ID NO: 52419 - RNA, 22 nt, Homo sapiens
uggaaaucuaaguuuggauuga

SEQ ID NO: 52420 - RNA, 22 nt, Homo sapiens
uggaaauuaacagggauugucc

SEQ ID NO: 52421 - RNA, 20 nt, Homo sapiens
uggaaauuaaccuuucaggu

SEQ ID NO: 52422 - RNA, 22 nt, Homo sapiens
ugauaugugaguauaugguuau

SEQ ID NO: 52423 - RNA, 22 nt, Homo sapiens
ugauccuguccuuaugauguua

SEQ ID NO: 52424 - RNA, 22 nt, Homo sapiens
ugaucugucacuuaucacauuu

SEQ ID NO: 52425 - RNA, 22 nt, Homo sapiens
ugaugaugaaugaucuuuuaca

SEQ ID NO: 52426 - RNA, 23 nt, Homo sapiens
ugauaugccuaggaguauauuuu

SEQ ID NO: 52427 - RNA, 22 nt, Homo sapiens
ugauauguguaaacaauguaua

SEQ ID NO: 52428 - RNA, 17 nt, Homo sapiens
ugauauuuucccagaua

SEQ ID NO: 52429 - RNA, 20 nt, Homo sapiens
ugauauuuucugagcaggaa

SEQ ID NO: 52430 - RNA, 22 nt, Homo sapiens
ugauauuuuugauccuuaaguu

SEQ ID NO: 52431 - RNA, 22 nt, Homo sapiens
ugaugucuugcaggcacgagau

SEQ ID NO: 52432 - RNA, 22 nt, Homo sapiens
ugaugucuugagauggagcuua

SEQ ID NO: 52433 - RNA, 22 nt, Homo sapiens
ugauggccuguucuccauaugu

SEQ ID NO: 52434 - RNA, 22 nt, Homo sapiens
ugauguaggacauuauuauuuc

SEQ ID NO: 52435 - RNA, 22 nt, Homo sapiens
ugaucuguccaccucagcuucc

SEQ ID NO: 52436 - RNA, 22 nt, Homo sapiens
ugauuugucucucagcccuacu

SEQ ID NO: 52437 - RNA, 22 nt, Homo sapiens
ugcacaaccucacccccgcucu

SEQ ID NO: 52438 - RNA, 17 nt, Homo sapiens
ugcaauuuaagcuagau

SEQ ID NO: 52439 - RNA, 21 nt, Homo sapiens
ugcagugugguugcccugcug

SEQ ID NO: 52440 - RNA, 22 nt, Homo sapiens
ugcauaucuucagccgggcacg

SEQ ID NO: 52441 - RNA, 22 nt, Homo sapiens
ugaguagaacuccuggagaugu

SEQ ID NO: 52442 - RNA, 22 nt, Homo sapiens
ugaguaggauugguauuucuuc

SEQ ID NO: 52443 - RNA, 22 nt, Homo sapiens
ugaguagaagugaagauagugg

SEQ ID NO: 52444 - RNA, 22 nt, Homo sapiens
ugaggaguauguucuguagacc

SEQ ID NO: 52445 - RNA, 22 nt, Homo sapiens
ugaggaguguauuucauucgcu

SEQ ID NO: 52446 - RNA, 22 nt, Homo sapiens
ugauaugaaagggaaauaagug

SEQ ID NO: 52447 - RNA, 22 nt, Homo sapiens
ugauaggucuguuuugaaaagg

SEQ ID NO: 52448 - RNA, 18 nt, Homo sapiens
ugauaucaucacaauuga

SEQ ID NO: 52449 - RNA, 18 nt, Homo sapiens
ugauaucaaugauagcca

SEQ ID NO: 52450 - RNA, 22 nt, Homo sapiens
ugauagaucugggcaaaguaaa

SEQ ID NO: 52451 - RNA, 22 nt, Homo sapiens
ugauaagugagauagcaaguga

SEQ ID NO: 52452 - RNA, 22 nt, Homo sapiens
ugacggaggacaccugcggaau

SEQ ID NO: 52453 - RNA, 22 nt, Homo sapiens
ugacggaggcauuggaagcuug

SEQ ID NO: 52454 - RNA, 22 nt, Homo sapiens
ugagauggcugaauucagaaua

SEQ ID NO: 52455 - RNA, 23 nt, Homo sapiens
ugagaugucugauugcgaggguc

SEQ ID NO: 52456 - RNA, 22 nt, Homo sapiens
ugagaugguaaauuuuuguugu

SEQ ID NO: 52457 - RNA, 22 nt, Homo sapiens
ugagauguggcuagagagguug

SEQ ID NO: 52458 - RNA, 22 nt, Homo sapiens
ugagauguguccagaucuaguu

SEQ ID NO: 52459 - RNA, 22 nt, Homo sapiens
ugagauggaguuucgcucuugu

SEQ ID NO: 52460 - RNA, 23 nt, Homo sapiens
ugagauuauaaucuuuuacuucu

SEQ ID NO: 52461 - RNA, 22 nt, Homo sapiens
ugagcuaugaucccaccucugu

SEQ ID NO: 52462 - RNA, 22 nt, Homo sapiens
ugagcagaguuguuucuccuga

SEQ ID NO: 52463 - RNA, 22 nt, Homo sapiens
ugagcagagaucacggcauugu

SEQ ID NO: 52464 - RNA, 22 nt, Homo sapiens
ugagcagagaagugcccugcgc

SEQ ID NO: 52465 - RNA, 22 nt, Homo sapiens
ugagcacauuuacaucaguucc

SEQ ID NO: 52466 - RNA, 22 nt, Homo sapiens
ugagcagaaagcugcaaggucg

SEQ ID NO: 52467 - RNA, 22 nt, Homo sapiens
ugagauuguuagaucaaauggu

SEQ ID NO: 52468 - RNA, 22 nt, Homo sapiens
caccuugugauccacccgccuu

SEQ ID NO: 52469 - RNA, 18 nt, Homo sapiens
cacugagcccuucacucu

SEQ ID NO: 52470 - RNA, 22 nt, Homo sapiens
cacugcacuccagccuaagagg

SEQ ID NO: 52471 - RNA, 23 nt, Homo sapiens
caccaguauaauuagcuuuuaaa

SEQ ID NO: 52472 - RNA, 22 nt, Homo sapiens
cacauugaauuucugaugacaa

SEQ ID NO: 52473 - RNA, 22 nt, Homo sapiens
caacauccaccuccuggguuca

SEQ ID NO: 52474 - RNA, 22 nt, Homo sapiens
caaauugcuuguggaggauaau

SEQ ID NO: 52475 - RNA, 22 nt, Homo sapiens
caacacuguuuauuggauagcc

SEQ ID NO: 52476 - RNA, 22 nt, Homo sapiens
caaagucuucucauuaugucuu

SEQ ID NO: 52477 - RNA, 22 nt, Homo sapiens
caaauacuuucauguugucuug

SEQ ID NO: 52478 - RNA, 22 nt, Homo sapiens
auuuuugguugucagcacuagg

SEQ ID NO: 52479 - RNA, 22 nt, Homo sapiens
auuugucacuauguggcuaaua

SEQ ID NO: 52480 - RNA, 22 nt, Homo sapiens
cagcugcuuuggaaaauauuuu

SEQ ID NO: 52481 - RNA, 22 nt, Homo sapiens
cagcugaugucgaaugcacucu

SEQ ID NO: 52482 - RNA, 22 nt, Homo sapiens
cagcucauugcagucucgaccu

SEQ ID NO: 52483 - RNA, 22 nt, Homo sapiens
cagugcauccauguucagcagu

SEQ ID NO: 52484 - RNA, 22 nt, Homo sapiens
cagucacagugacaggaugugg

SEQ ID NO: 52485 - RNA, 22 nt, Homo sapiens
caguucaugguaggcaccauag

SEQ ID NO: 52486 - RNA, 22 nt, Homo sapiens
caguguuuuuaacaggugcccg

SEQ ID NO: 52487 - RNA, 22 nt, Homo sapiens
auuggcaauguacauaucuugc

SEQ ID NO: 52488 - RNA, 22 nt, Homo sapiens
auugucacugugcuccaccagu

SEQ ID NO: 52489 - RNA, 22 nt, Homo sapiens
auugugauugcugcuaggccua

SEQ ID NO: 52490 - RNA, 22 nt, Homo sapiens
auuguucuuacaugcugucauc

SEQ ID NO: 52491 - RNA, 22 nt, Homo sapiens
auuuaacuggucuaggggccca

SEQ ID NO: 52492 - RNA, 22 nt, Homo sapiens
auuugucaauacacuucuucca

SEQ ID NO: 52493 - RNA, 22 nt, Homo sapiens
auuugguuauucaguuguucag

SEQ ID NO: 52494 - RNA, 22 nt, Homo sapiens
auuuugguuacauaguugagcu

SEQ ID NO: 52495 - RNA, 22 nt, Homo sapiens
auuuugcauugcuguaaaggaa

SEQ ID NO: 52496 - RNA, 22 nt, Homo sapiens
auuucacugagacaugugccca

SEQ ID NO: 52497 - RNA, 22 nt, Homo sapiens
auugcaugucauguuuagugua

SEQ ID NO: 52498 - RNA, 22 nt, Homo sapiens
auugcaguuagaacagaagucu

SEQ ID NO: 52499 - RNA, 22 nt, Homo sapiens
auugcuaacugaaauaagacca

SEQ ID NO: 52500 - RNA, 22 nt, Homo sapiens
auugcauugugaucuucccaga

SEQ ID NO: 52501 - RNA, 22 nt, Homo sapiens
auuggaacugaaauaauaacuu

SEQ ID NO: 52502 - RNA, 22 nt, Homo sapiens
auugcuuacccuguauuagauc

SEQ ID NO: 52503 - RNA, 22 nt, Homo sapiens
auuggcaauagcuuucuuacua

SEQ ID NO: 52504 - RNA, 22 nt, Homo sapiens
auuggcaauggcaaagcagagu

SEQ ID NO: 52505 - RNA, 22 nt, Homo sapiens
auuacauagucaaggugucuca

SEQ ID NO: 52506 - RNA, 22 nt, Homo sapiens
auuagguuggugcaaaacuuuc

SEQ ID NO: 52507 - RNA, 22 nt, Homo sapiens
auuagguuagugcaaaaguaau

SEQ ID NO: 52508 - RNA, 22 nt, Homo sapiens
auuagguuaggcaaacuucugu

SEQ ID NO: 52509 - RNA, 22 nt, Homo sapiens
auuagggcaggagcaaguacgg

SEQ ID NO: 52510 - RNA, 22 nt, Homo sapiens
auuagguuguugcaaaaguaau

SEQ ID NO: 52511 - RNA, 22 nt, Homo sapiens
cucugguuucgcaggaaauaga

SEQ ID NO: 52512 - RNA, 22 nt, Homo sapiens
cucauugcaaucuccaccuccc

SEQ ID NO: 52513 - RNA, 22 nt, Homo sapiens
cucuuugaguuccuccuggugu

SEQ ID NO: 52514 - RNA, 22 nt, Homo sapiens
cucuuacaguguguggugaaag

SEQ ID NO: 52515 - RNA, 22 nt, Homo sapiens
cugaaagagcauuugaaugggu

SEQ ID NO: 52516 - RNA, 22 nt, Homo sapiens
cugaaauggaaugugugcacag

SEQ ID NO: 52517 - RNA, 22 nt, Homo sapiens
cucacaaccuuaugaagcauga

SEQ ID NO: 52518 - RNA, 22 nt, Homo sapiens
cucaaguacaugggauuacagg

SEQ ID NO: 52519 - RNA, 22 nt, Homo sapiens
cucaauuuggaauugucaguaa

SEQ ID NO: 52520 - RNA, 22 nt, Homo sapiens
cucacggugcaggcuucuggga

SEQ ID NO: 52521 - RNA, 22 nt, Homo sapiens
ccugagaucauacuguuaguaa

SEQ ID NO: 52522 - RNA, 22 nt, Homo sapiens
ccugagacgaauggagugaaca

SEQ ID NO: 52523 - RNA, 22 nt, Homo sapiens
ccuuuguuaguuugcugagaau

SEQ ID NO: 52524 - RNA, 22 nt, Homo sapiens
cuauucacaggcaauauguaca

SEQ ID NO: 52525 - RNA, 22 nt, Homo sapiens
cuagucacauuuucaucaaaua

SEQ ID NO: 52526 - RNA, 22 nt, Homo sapiens
cuaugcuucuuaaauuaguuau

SEQ ID NO: 52527 - RNA, 22 nt, Homo sapiens
cuauaugucuguuuugguacca

SEQ ID NO: 52528 - RNA, 22 nt, Homo sapiens
cuaguaaugucugucuuaugga

SEQ ID NO: 52529 - RNA, 23 nt, Homo sapiens
ccacacuguuuagaauggcauca

SEQ ID NO: 52530 - RNA, 22 nt, Homo sapiens
ccacugcacuccagcccggcaa

SEQ ID NO: 52531 - RNA, 22 nt, Homo sapiens
ccagaguucuaggcauuggaaa

SEQ ID NO: 52532 - RNA, 22 nt, Homo sapiens
cauaugguuuuauguucuucau

SEQ ID NO: 52533 - RNA, 19 nt, Homo sapiens
caucacagagucuuccauu

SEQ ID NO: 52534 - RNA, 22 nt, Homo sapiens
caucacauucugagauacugag

SEQ ID NO: 52535 - RNA, 22 nt, Homo sapiens
caucacaucugcaugguaagua

SEQ ID NO: 52536 - RNA, 22 nt, Homo sapiens
caucagcaauguaugaggguuc

SEQ ID NO: 52537 - RNA, 22 nt, Homo sapiens
caucagauugagaucaucuaag

SEQ ID NO: 52538 - RNA, 22 nt, Homo sapiens
cccagagacagaaugauaaacu

SEQ ID NO: 52539 - RNA, 19 nt, Homo sapiens
ccauggcaaugaucugaug

SEQ ID NO: 52540 - RNA, 22 nt, Homo sapiens
ccaucccuuucugagcaguucc

SEQ ID NO: 52541 - RNA, 18 nt, Homo sapiens
ccauucaacagauuuguc

SEQ ID NO: 52542 - RNA, 22 nt, Homo sapiens
ccccauuugaacuccuucaacu

SEQ ID NO: 52543 - RNA, 21 nt, Homo sapiens
ccccugauacuuagucaagag

SEQ ID NO: 52544 - RNA, 23 nt, Homo sapiens
ccgugagagaguucauagaaagc

SEQ ID NO: 52545 - RNA, 22 nt, Homo sapiens
gcagucaucugaaggcuuaacu

SEQ ID NO: 52546 - RNA, 22 nt, Homo sapiens
gcaggaauuucucugcagaccc

SEQ ID NO: 52547 - RNA, 22 nt, Homo sapiens
gcaaaugcuaugccauuuuaua

SEQ ID NO: 52548 - RNA, 22 nt, Homo sapiens
gcagcacaugacuguauguaua

SEQ ID NO: 52549 - RNA, 22 nt, Homo sapiens
gauuccacuuucaaauucaaau

SEQ ID NO: 52550 - RNA, 22 nt, Homo sapiens
gauuagucccauuuuacaggug

SEQ ID NO: 52551 - RNA, 22 nt, Homo sapiens
gauuccauuuguggcuauuuac

SEQ ID NO: 52552 - RNA, 21 nt, Homo sapiens
gcaaacauccuuugaugccag

SEQ ID NO: 52553 - RNA, 22 nt, Homo sapiens
gcaaaucuuauguccucacauu

SEQ ID NO: 52554 - RNA, 22 nt, Homo sapiens
gauugcuaaauuguccuucugu

SEQ ID NO: 52555 - RNA, 22 nt, Homo sapiens
gauuccacuuacuuagcauucc

SEQ ID NO: 52556 - RNA, 22 nt, Homo sapiens
gauuggcauugcugcaccugag

SEQ ID NO: 52557 - RNA, 22 nt, Homo sapiens
gauuuguuggccugugagcuag

SEQ ID NO: 52558 - RNA, 22 nt, Homo sapiens
gauuuuccaguggcccugauca

SEQ ID NO: 52559 - RNA, 22 nt, Homo sapiens
gcaaaauugagaagggaauaua

SEQ ID NO: 52560 - RNA, 22 nt, Homo sapiens
gcgugguguuagaaugagaagu

SEQ ID NO: 52561 - RNA, 22 nt, Homo sapiens
gcgguagcauagacugcaggac

SEQ ID NO: 52562 - RNA, 22 nt, Homo sapiens
gcuggaauuaacauagaugugc

SEQ ID NO: 52563 - RNA, 22 nt, Homo sapiens
gcugcuguggcagauuggauuc

SEQ ID NO: 52564 - RNA, 22 nt, Homo sapiens
gcuacugucuaucugugcuucu

SEQ ID NO: 52565 - RNA, 22 nt, Homo sapiens
gcugguguagagugcagaaagg

SEQ ID NO: 52566 - RNA, 22 nt, Homo sapiens
gcugguguugugaaucaggccg

SEQ ID NO: 52567 - RNA, 22 nt, Homo sapiens
gauauguugaguagaguuuuug

SEQ ID NO: 52568 - RNA, 22 nt, Homo sapiens
gauauguucugagaaaugcauu

SEQ ID NO: 52569 - RNA, 22 nt, Homo sapiens
gauauguuagggggagaaguua

SEQ ID NO: 52570 - RNA, 22 nt, Homo sapiens
gauauugacuuauucuauguuu

SEQ ID NO: 52571 - RNA, 22 nt, Homo sapiens
gaucacaugggagaaugagagu

SEQ ID NO: 52572 - RNA, 22 nt, Homo sapiens
gauauguaaaaauuauaucuga

SEQ ID NO: 52573 - RNA, 22 nt, Homo sapiens
gauaugugauaagaguuaucuu

SEQ ID NO: 52574 - RNA, 22 nt, Homo sapiens
gauagcagccauucuuuuuauu

SEQ ID NO: 52575 - RNA, 22 nt, Homo sapiens
gaugagguaggccugcuuugaa

SEQ ID NO: 52576 - RNA, 22 nt, Homo sapiens
gaucucaguggauacugugaug

SEQ ID NO: 52577 - RNA, 22 nt, Homo sapiens
gaucuggucuuugauuagacac

SEQ ID NO: 52578 - RNA, 22 nt, Homo sapiens
gaucuguuguuuggaaguauca

SEQ ID NO: 52579 - RNA, 22 nt, Homo sapiens
gagaucacuucuguauucuaca

SEQ ID NO: 52580 - RNA, 22 nt, Homo sapiens
gagaucuuggccaaguuucuua

SEQ ID NO: 52581 - RNA, 22 nt, Homo sapiens
gagaugguacacauacgauucu

SEQ ID NO: 52582 - RNA, 22 nt, Homo sapiens
gaguaaaugucacuguugcugu

SEQ ID NO: 52583 - RNA, 22 nt, Homo sapiens
gagguuuuagugagucccacug

SEQ ID NO: 52584 - RNA, 22 nt, Homo sapiens
gagacugagucuugcucugucg

SEQ ID NO: 52585 - RNA, 22 nt, Homo sapiens
gagagguaguuuuuuggucguc

SEQ ID NO: 52586 - RNA, 22 nt, Homo sapiens
gagaacugagugugcuggcgga

SEQ ID NO: 52587 - RNA, 22 nt, Homo sapiens
gacagugagaugucaugugaaa

SEQ ID NO: 52588 - RNA, 22 nt, Homo sapiens
gagaaccuccagcaagguagua

SEQ ID NO: 52589 - RNA, 22 nt, Homo sapiens
gagaaguaaauuuauuugcaaa

SEQ ID NO: 52590 - RNA, 22 nt, Homo sapiens
gaauugcacaaaaacugcuugu

SEQ ID NO: 52591 - RNA, 22 nt, Homo sapiens
gaaugucuuauugcucguugua

SEQ ID NO: 52592 - RNA, 22 nt, Homo sapiens
gaaucauuggguugauucaaga

SEQ ID NO: 52593 - RNA, 22 nt, Homo sapiens
gaaugauacuguuaacgaaaga

SEQ ID NO: 52594 - RNA, 22 nt, Homo sapiens
gacagacacaauugauccauga

SEQ ID NO: 52595 - RNA, 22 nt, Homo sapiens
gacaccugguguggaacuggag

SEQ ID NO: 52596 - RNA, 22 nt, Homo sapiens
gacacagugaagucucuacuug

SEQ ID NO: 52597 - RNA, 22 nt, Homo sapiens
gaaucacaguuauuagagcagc

SEQ ID NO: 52598 - RNA, 22 nt, Homo sapiens
gaaugcaugaggggaucagaug

SEQ ID NO: 52599 - RNA, 22 nt, Homo sapiens
gaauacuguccaagagugaugg

SEQ ID NO: 52600 - RNA, 22 nt, Homo sapiens
cuuuggcacuuccuaagugcca

SEQ ID NO: 52601 - RNA, 22 nt, Homo sapiens
cuuugcaaauggccuuuccaag

SEQ ID NO: 52602 - RNA, 22 nt, Homo sapiens
cuuugauuauaaaaggguguuu

SEQ ID NO: 52603 - RNA, 22 nt, Homo sapiens
gaagaaguacaagacaaauuuu

SEQ ID NO: 52604 - RNA, 22 nt, Homo sapiens
gaacuuucuacauuaccucuuu

SEQ ID NO: 52605 - RNA, 22 nt, Homo sapiens
gaagcauugauccacaggcgug

SEQ ID NO: 52606 - RNA, 22 nt, Homo sapiens
gaagguauauucuguuaaugcu

SEQ ID NO: 52607 - RNA, 22 nt, Homo sapiens
cuucaaguguggccaccugacc

SEQ ID NO: 52608 - RNA, 22 nt, Homo sapiens
cuucaccaguuuggcagucuca

SEQ ID NO: 52609 - RNA, 22 nt, Homo sapiens
cuucaagucuuuggauaauuag

SEQ ID NO: 52610 - RNA, 22 nt, Homo sapiens
cuuagguuaugauaaauuuagu

SEQ ID NO: 52611 - RNA, 22 nt, Homo sapiens
cuguuugauuaagugguggaaa

SEQ ID NO: 52612 - RNA, 22 nt, Homo sapiens
cuguuuguuuaggguacucaga

SEQ ID NO: 52613 - RNA, 22 nt, Homo sapiens
cuuaacagugguauugaugacc

SEQ ID NO: 52614 - RNA, 22 nt, Homo sapiens
cuguugcaguuauggcugcagg

SEQ ID NO: 52615 - RNA, 22 nt, Homo sapiens
cugcaagaugcauaggaauuuu

SEQ ID NO: 52616 - RNA, 20 nt, Homo sapiens
cugcacauccacucuacuuc

SEQ ID NO: 52617 - RNA, 22 nt, Homo sapiens
cugauguagguggucugugauc

SEQ ID NO: 52618 - RNA, 22 nt, Homo sapiens
cugauaguucucuuuagaguuu

SEQ ID NO: 52619 - RNA, 22 nt, Homo sapiens
cugaggugggaggauuggcuug

SEQ ID NO: 52620 - RNA, 22 nt, Homo sapiens
cugaucuaugaacacaggauau

SEQ ID NO: 52621 - RNA, 22 nt, Homo sapiens
cugaucuguuauacuuuucuau

SEQ ID NO: 52622 - RNA, 22 nt, Homo sapiens
cugauauuuuaaaauuggcugg

SEQ ID NO: 52623 - RNA, 22 nt, Homo sapiens
cugauacugaaagcuguugguu

SEQ ID NO: 52624 - RNA, 22 nt, Homo sapiens
cugacaagugaucacagcagca

SEQ ID NO: 52625 - RNA, 22 nt, Homo sapiens
cuucaugggagaaccacaggua

SEQ ID NO: 52626 - RNA, 22 nt, Homo sapiens
cuucacuuuguuaaacuccaau

SEQ ID NO: 52627 - RNA, 22 nt, Homo sapiens
cuugacaaugcuucaggcugaa

SEQ ID NO: 52628 - RNA, 22 nt, Homo sapiens
cuugaauguaaauaauguacag

SEQ ID NO: 52629 - RNA, 22 nt, Homo sapiens
cuugaacaaagagauuccauua

SEQ ID NO: 52630 - RNA, 22 nt, Homo sapiens
cuucuguuaguucugauaacuu

SEQ ID NO: 52631 - RNA, 22 nt, Homo sapiens
cuucuugagacuuaggcuuugg

SEQ ID NO: 52632 - RNA, 22 nt, Homo sapiens
cuugauagugguaaucauuuuu

SEQ ID NO: 52633 - RNA, 19 nt, Homo sapiens
cuugccccauucauccucu

SEQ ID NO: 52634 - RNA, 20 nt, Homo sapiens
cuugcuccccuuguucuaga

SEQ ID NO: 52635 - RNA, 22 nt, Homo sapiens
cuuggacaccucaugcccaccu

SEQ ID NO: 52636 - RNA, 22 nt, Homo sapiens
cuuggauuauaauggaauauuu

SEQ ID NO: 52637 - RNA, 22 nt, Homo sapiens
ggucccccuccacucucgcaaa

SEQ ID NO: 52638 - RNA, 22 nt, Homo sapiens
guaaaucucuguuuucauggac

SEQ ID NO: 52639 - RNA, 22 nt, Homo sapiens
guacaguucucuuuguugucag

SEQ ID NO: 52640 - RNA, 20 nt, Homo sapiens
guaaacucucagcauagaug

SEQ ID NO: 52641 - RNA, 22 nt, Homo sapiens
gguguuccccuuaccucuuggc

SEQ ID NO: 52642 - RNA, 22 nt, Homo sapiens
guacaguuuucaguguucacug

SEQ ID NO: 52643 - RNA, 22 nt, Homo sapiens
guacaguuuagugcuuugagaa

SEQ ID NO: 52644 - RNA, 22 nt, Homo sapiens
guauuagguuggugcaaaauaa

SEQ ID NO: 52645 - RNA, 22 nt, Homo sapiens
guaugugacuggaacaguagga

SEQ ID NO: 52646 - RNA, 22 nt, Homo sapiens
guaugcaagugauaugacauau

SEQ ID NO: 52647 - RNA, 22 nt, Homo sapiens
guagaucucaacacuggaagua

SEQ ID NO: 52648 - RNA, 22 nt, Homo sapiens
guagaagcacaggugaguuggu

SEQ ID NO: 52649 - RNA, 22 nt, Homo sapiens
guagagguagauucuguuuuga

SEQ ID NO: 52650 - RNA, 22 nt, Homo sapiens
gucagugucuuaacagagauua

SEQ ID NO: 52651 - RNA, 21 nt, Homo sapiens
gucauaugucucugauuagug

SEQ ID NO: 52652 - RNA, 19 nt, Homo sapiens
guauuugacuuucuuguuu

SEQ ID NO: 52653 - RNA, 22 nt, Homo sapiens
guauuugauuauagcaugcuua

SEQ ID NO: 52654 - RNA, 22 nt, Homo sapiens
guauuagguuggugcaaaauug

SEQ ID NO: 52655 - RNA, 22 nt, Homo sapiens
guauuuuguuagggugugguau

SEQ ID NO: 52656 - RNA, 22 nt, Homo sapiens
ggcauguuuaguagaauguggu

SEQ ID NO: 52657 - RNA, 22 nt, Homo sapiens
ggacagaaaggguucaccaaac

SEQ ID NO: 52658 - RNA, 22 nt, Homo sapiens
ggaauuaaggcaauugaaagcu

SEQ ID NO: 52659 - RNA, 22 nt, Homo sapiens
ggaaaucaucauucucgguaua

SEQ ID NO: 52660 - RNA, 22 nt, Homo sapiens
ggaauguuaaagacuacacuga

SEQ ID NO: 52661 - RNA, 19 nt, Homo sapiens
ggaaugcaccaguccuugc

SEQ ID NO: 52662 - RNA, 22 nt, Homo sapiens
ggaaugcagugagcauuagaua

SEQ ID NO: 52663 - RNA, 22 nt, Homo sapiens
ggaagguaauuggguaaugaga

SEQ ID NO: 52664 - RNA, 22 nt, Homo sapiens
ggaagacaguguggugauuccu

SEQ ID NO: 52665 - RNA, 22 nt, Homo sapiens
gggaguagagaguuucucugac

SEQ ID NO: 52666 - RNA, 22 nt, Homo sapiens
gggcaaaacuguacugccaagg

SEQ ID NO: 52667 - RNA, 22 nt, Homo sapiens
gggaaauguaaagucauaagau

SEQ ID NO: 52668 - RNA, 22 nt, Homo sapiens
guguaugugagaaugcucaugu

SEQ ID NO: 52669 - RNA, 22 nt, Homo sapiens
gugucucagcccagaccuauuu

SEQ ID NO: 52670 - RNA, 22 nt, Homo sapiens
guguuugauugcaaauaaucua

SEQ ID NO: 52671 - RNA, 22 nt, Homo sapiens
guuacugucuuccugauugcuu

SEQ ID NO: 52672 - RNA, 22 nt, Homo sapiens
guucaguuuuaaagggaaauug

SEQ ID NO: 52673 - RNA, 22 nt, Homo sapiens
guucaucaggcuuucucuagag

SEQ ID NO: 52674 - RNA, 22 nt, Homo sapiens
guugcugagucccaucaccaga

SEQ ID NO: 52675 - RNA, 18 nt, Homo sapiens
guuagguaguaugaugcu

SEQ ID NO: 52676 - RNA, 22 nt, Homo sapiens
guuauauguuuggaaugaggaa

SEQ ID NO: 52677 - RNA, 22 nt, Homo sapiens
gugcauaucugugguuggcuga

SEQ ID NO: 52678 - RNA, 22 nt, Homo sapiens
gugcauaugcaugugcaugcac

SEQ ID NO: 52679 - RNA, 22 nt, Homo sapiens
gugcaugcaucuuuauaguagc

SEQ ID NO: 52680 - RNA, 22 nt, Homo sapiens
gugcaugucuaugcgagucuaa

SEQ ID NO: 52681 - RNA, 22 nt, Homo sapiens
gugcccacugucuguccuguag

SEQ ID NO: 52682 - RNA, 22 nt, Homo sapiens
guguauacauagaauuguguau

SEQ ID NO: 52683 - RNA, 22 nt, Homo sapiens
guggcaguuuuaaauaugaaaa

SEQ ID NO: 52684 - RNA, 22 nt, Homo sapiens
guggcgaagauggauugaguca

SEQ ID NO: 52685 - RNA, 22 nt, Homo sapiens
gugcaauguuaauuacuugacu

SEQ ID NO: 52686 - RNA, 22 nt, Homo sapiens
gugauuuaguagaugcuaguua

SEQ ID NO: 52687 - RNA, 22 nt, Homo sapiens
gugcaguuugaaaguagaaaca

SEQ ID NO: 52688 - RNA, 23 nt, Homo sapiens
gugcaguggcgagauuucggcuc

SEQ ID NO: 52689 - RNA, 22 nt, Homo sapiens
gugcaauucacuguuaugucug

SEQ ID NO: 52690 - RNA, 22 nt, Homo sapiens
gugcacauauggugcauaagug

SEQ ID NO: 52691 - RNA, 22 nt, Homo sapiens
gugcacaaaucuuaaauguaca

SEQ ID NO: 52692 - RNA, 22 nt, Homo sapiens
gugcacaacaugcagguuuguu

SEQ ID NO: 52693 - RNA, 22 nt, Homo sapiens
gugcacaacaugcaguuuuguu

SEQ ID NO: 52694 - RNA, 22 nt, Homo sapiens
gugcacaacgugcaggcuuguu

SEQ ID NO: 52695 - RNA, 22 nt, Homo sapiens
gugcacaugguagguauugagu

SEQ ID NO: 52696 - RNA, 22 nt, Homo sapiens
gugcacauuguuuaugucuguu

SEQ ID NO: 52697 - RNA, 22 nt, Homo sapiens
gugcacaaugugcagguuuguu

SEQ ID NO: 52698 - RNA, 22 nt, Homo sapiens
gugagcagagaucgcgugauug

SEQ ID NO: 52699 - RNA, 16 nt, Homo sapiens
gugagagaugacaaac

SEQ ID NO: 52700 - RNA, 22 nt, Homo sapiens
gucgguguuuccugagaacgaa

SEQ ID NO: 52701 - RNA, 22 nt, Homo sapiens
gugagaugguaucucauugugg

SEQ ID NO: 52702 - RNA, 22 nt, Homo sapiens
gugagaugaggucucacucugu

SEQ ID NO: 52703 - RNA, 22 nt, Homo sapiens
gucuaugguucaggguggagug

SEQ ID NO: 52704 - RNA, 22 nt, Homo sapiens
gucauuguguggacauggagaa

SEQ ID NO: 52705 - RNA, 22 nt, Homo sapiens
gucauugucaauugacaauugu

SEQ ID NO: 52706 - RNA, 22 nt, Homo sapiens
guccagagaagucauuacuuca

SEQ ID NO: 52707 - RNA, 22 nt, Homo sapiens
gucauguuuaacuucuugagga

SEQ ID NO: 52708 - RNA, 22 nt, Homo sapiens
gucauugcacuccagccuggac

SEQ ID NO: 52709 - RNA, 22 nt, Homo sapiens
gucauugcuuaaggguucaugc

SEQ ID NO: 52710 - RNA, 22 nt, Homo sapiens
gucauugcuuaucugcugacgu

SEQ ID NO: 52711 - RNA, 22 nt, Homo sapiens
gucaugcaggguucgccagccc

SEQ ID NO: 52712 - RNA, 18 nt, Homo sapiens
gucauagaaugaugguuc

SEQ ID NO: 52713 - RNA, 22 nt, Homo sapiens
uaagugaauuucacuacugagu

SEQ ID NO: 52714 - RNA, 22 nt, Homo sapiens
uaaguagugugcauguauguau

SEQ ID NO: 52715 - RNA, 22 nt, Homo sapiens
uaagugcuguguuguuaccuaa

SEQ ID NO: 52716 - RNA, 22 nt, Homo sapiens
uaaguaauuguuaauagggaag

SEQ ID NO: 52717 - RNA, 22 nt, Homo sapiens
uaaguaguguugagacaaguuu

SEQ ID NO: 52718 - RNA, 22 nt, Homo sapiens
guugcuuauuccuguaauccca

SEQ ID NO: 52719 - RNA, 22 nt, Homo sapiens
guuggcaaguggcugagcuggg

SEQ ID NO: 52720 - RNA, 22 nt, Homo sapiens
guuguacuaccucucguauuag

SEQ ID NO: 52721 - RNA, 22 nt, Homo sapiens
guuggugaccugaagagaguaa

SEQ ID NO: 52722 - RNA, 22 nt, Homo sapiens
guuguggcuugugauuaagcac

SEQ ID NO: 52723 - RNA, 22 nt, Homo sapiens
guuugcagaucaugaagaaccc

SEQ ID NO: 52724 - RNA, 22 nt, Homo sapiens
guuuggauauuaggcaagagua

SEQ ID NO: 52725 - RNA, 22 nt, Homo sapiens
uaaugcauguaaugggcugaua

SEQ ID NO: 52726 - RNA, 22 nt, Homo sapiens
uaaugcauacagaagguguuuu

SEQ ID NO: 52727 - RNA, 22 nt, Homo sapiens
uaaugcacucgaaucauggaau

SEQ ID NO: 52728 - RNA, 22 nt, Homo sapiens
uaaugcacuuuccuccaaggcu

SEQ ID NO: 52729 - RNA, 22 nt, Homo sapiens
uaauucacauaaagcacuuaga

SEQ ID NO: 52730 - RNA, 22 nt, Homo sapiens
uaauugaaugcagacaccaggg

SEQ ID NO: 52731 - RNA, 22 nt, Homo sapiens
uaauugcaguucuguguuauau

SEQ ID NO: 52732 - RNA, 22 nt, Homo sapiens
uacaaaucuagguuuguuacug

SEQ ID NO: 52733 - RNA, 22 nt, Homo sapiens
uacaacacugguucgacaugug

SEQ ID NO: 52734 - RNA, 22 nt, Homo sapiens
uacaagcaggaaaugguauaug

SEQ ID NO: 52735 - RNA, 22 nt, Homo sapiens
uacaagcacaggcagcaggcug

SEQ ID NO: 52736 - RNA, 22 nt, Homo sapiens
uaauacuagugaauagcaggau

SEQ ID NO: 52737 - RNA, 22 nt, Homo sapiens
uaaguugcagguugugauucca

SEQ ID NO: 52738 - RNA, 22 nt, Homo sapiens
uaaguuguagaacguuuucuua

SEQ ID NO: 52739 - RNA, 23 nt, Homo sapiens
uaaguucaucucuaauaggugga

SEQ ID NO: 52740 - RNA, 22 nt, Homo sapiens
uaagugguguucauucuuuuga

SEQ ID NO: 52741 - RNA, 22 nt, Homo sapiens
uaaucucagcugagcugagauu

SEQ ID NO: 52742 - RNA, 22 nt, Homo sapiens
uaauauguuuugaaaucaggaa

SEQ ID NO: 52743 - RNA, 22 nt, Homo sapiens
uaauagagucauuauuauuguu

SEQ ID NO: 52744 - RNA, 22 nt, Homo sapiens
uacugcacuccagcuuaggaga

SEQ ID NO: 52745 - RNA, 22 nt, Homo sapiens
uagacccauuguucagagagug

SEQ ID NO: 52746 - RNA, 22 nt, Homo sapiens
uagagcuugacacuuuccaugg

SEQ ID NO: 52747 - RNA, 22 nt, Homo sapiens
uagagcaugugccauacguaca

SEQ ID NO: 52748 - RNA, 21 nt, Homo sapiens
uagauacuguauuaaaccuag

SEQ ID NO: 52749 - RNA, 22 nt, Homo sapiens
uagaguguuuuguuaggcagca

SEQ ID NO: 52750 - RNA, 19 nt, Homo sapiens
uagagguuuaagaaaagaa

SEQ ID NO: 52751 - RNA, 22 nt, Homo sapiens
uacuauugcaucggugauuagg

SEQ ID NO: 52752 - RNA, 22 nt, Homo sapiens
uacuacuuucucuucugggaaa

SEQ ID NO: 52753 - RNA, 23 nt, Homo sapiens
uacuaguaagcguguucuuugca

SEQ ID NO: 52754 - RNA, 22 nt, Homo sapiens
uacugcacuccacccuggguga

SEQ ID NO: 52755 - RNA, 22 nt, Homo sapiens
uacucugcagccauaaaacaga

SEQ ID NO: 52756 - RNA, 20 nt, Homo sapiens
uacugcacuccauccugggu

SEQ ID NO: 52757 - RNA, 22 nt, Homo sapiens
uacugcacuccagccuggguga

SEQ ID NO: 52758 - RNA, 20 nt, Homo sapiens
uacacguaugagcacaugug

SEQ ID NO: 52759 - RNA, 22 nt, Homo sapiens
uacacgugcacaacgugcacgu

SEQ ID NO: 52760 - RNA, 22 nt, Homo sapiens
uacagcuaugugcaugcaugcu

SEQ ID NO: 52761 - RNA, 16 nt, Homo sapiens
uacaauguagaaaaca

SEQ ID NO: 52762 - RNA, 22 nt, Homo sapiens
uacagugcauagaggcaugaua

SEQ ID NO: 52763 - RNA, 22 nt, Homo sapiens
uacaucagccugaaagagcucg

SEQ ID NO: 52764 - RNA, 22 nt, Homo sapiens
uacaggcaccuggcuaauuuuu

SEQ ID NO: 52765 - RNA, 22 nt, Homo sapiens
uacagucuagaggagaaucagg

SEQ ID NO: 52766 - RNA, 22 nt, Homo sapiens
uacaguaggauuuucagggucu

SEQ ID NO: 52767 - RNA, 20 nt, Homo sapiens
uagcagcagacagagggagg

SEQ ID NO: 52768 - RNA, 22 nt, Homo sapiens
uagcacuauuuuucacuauccu

SEQ ID NO: 52769 - RNA, 21 nt, Homo sapiens
uagcagcguuguugcaaaugu

SEQ ID NO: 52770 - RNA, 22 nt, Homo sapiens
uagcaguaaagaaugugauguu

SEQ ID NO: 52771 - RNA, 22 nt, Homo sapiens
uagcaguauaugagagcuauug

SEQ ID NO: 52772 - RNA, 22 nt, Homo sapiens
uaguaaacauuuuucuaucauu

SEQ ID NO: 52773 - RNA, 20 nt, Homo sapiens
uagguuuucacagaauugcc

SEQ ID NO: 52774 - RNA, 17 nt, Homo sapiens
uauagcacuucucacau

SEQ ID NO: 52775 - RNA, 21 nt, Homo sapiens
uauagcagcacgauuuauagu

SEQ ID NO: 52776 - RNA, 22 nt, Homo sapiens
uauacaugugggcaucaggaga

SEQ ID NO: 52777 - RNA, 22 nt, Homo sapiens
uauaagguuaggaaaaauuucu

SEQ ID NO: 52778 - RNA, 22 nt, Homo sapiens
uaucacuuugauaguuuaaaug

SEQ ID NO: 52779 - RNA, 22 nt, Homo sapiens
uaucacggaguacauguucugu

SEQ ID NO: 52780 - RNA, 22 nt, Homo sapiens
uaucacaguugcauauuuaagg

SEQ ID NO: 52781 - RNA, 22 nt, Homo sapiens
uauagcaguguaagaaucgagu

SEQ ID NO: 52782 - RNA, 22 nt, Homo sapiens
uaucacaggucaggaaucuugc

SEQ ID NO: 52783 - RNA, 22 nt, Homo sapiens
uaucacagguggacugcacacc

SEQ ID NO: 52784 - RNA, 22 nt, Homo sapiens
uauugucacuaaaggaagcugg

SEQ ID NO: 52785 - RNA, 22 nt, Homo sapiens
uauuugauugacuuuagcagga

SEQ ID NO: 52786 - RNA, 22 nt, Homo sapiens
uauuugguagcuauuuugcagu

SEQ ID NO: 52787 - RNA, 22 nt, Homo sapiens
uauuguuuuucccaggagucua

SEQ ID NO: 52788 - RNA, 22 nt, Homo sapiens
uauuucacaucuaugaagugag

SEQ ID NO: 52789 - RNA, 22 nt, Homo sapiens
uauugauuaauugugauuaggc

SEQ ID NO: 52790 - RNA, 22 nt, Homo sapiens
uauugcaaauggugaucccagg

SEQ ID NO: 52791 - RNA, 22 nt, Homo sapiens
uauuagugucuuuugguuagaa

SEQ ID NO: 52792 - RNA, 22 nt, Homo sapiens
uauggcguaugaauuauaucuc

SEQ ID NO: 52793 - RNA, 22 nt, Homo sapiens
uauggcugcuuucacacuacaa

SEQ ID NO: 52794 - RNA, 22 nt, Homo sapiens
uauuccauuugggucaggauga

SEQ ID NO: 52795 - RNA, 22 nt, Homo sapiens
uaugagacugguuaauuuuugu

SEQ ID NO: 52796 - RNA, 22 nt, Homo sapiens
uaugacuuuggaaaaauuacuu

SEQ ID NO: 52797 - RNA, 22 nt, Homo sapiens
uaucacccuuucauuguucuuc

SEQ ID NO: 52798 - RNA, 22 nt, Homo sapiens
uaucaucauguuuuugcugugu

SEQ ID NO: 52799 - RNA, 20 nt, Homo sapiens
uaugaaacaguguagagcaa

SEQ ID NO: 52800 - RNA, 22 nt, Homo sapiens
uaugaagccaggauuuauuauu

SEQ ID NO: 52801 - RNA, 20 nt, Homo sapiens
uaugacaaagccuagugagu

SEQ ID NO: 52802 - RNA, 20 nt, Homo sapiens
uaugaccugucuuuucucuc

SEQ ID NO: 52803 - RNA, 22 nt, Homo sapiens
uauggcauuauuuugauagaca

SEQ ID NO: 52804 - RNA, 22 nt, Homo sapiens
uauggcauuguuggugaugaua

SEQ ID NO: 52805 - RNA, 22 nt, Homo sapiens
uauggccugaauuagaaaagug

SEQ ID NO: 52806 - RNA, 22 nt, Homo sapiens
uauggccuuuuuaaugauauug

SEQ ID NO: 52807 - RNA, 22 nt, Homo sapiens
uaugcacacacguguuuaugug

SEQ ID NO: 52808 - RNA, 22 nt, Homo sapiens
uaugcacaugcaugcuugaaua

SEQ ID NO: 52809 - RNA, 22 nt, Homo sapiens
uauggaaaucuuaccuuauggu

SEQ ID NO: 52810 - RNA, 22 nt, Homo sapiens
uuuugcaauauguuccugaaua

SEQ ID NO: 52811 - RNA, 21 nt, Homo sapiens
uuuugcacacuaugcagcuuu

SEQ ID NO: 52812 - RNA, 22 nt, Homo sapiens
uuuuauguuuguucccugccaa

SEQ ID NO: 52813 - RNA, 22 nt, Homo sapiens
uuugguuuuuguuaucacucau

SEQ ID NO: 52814 - RNA, 22 nt, Homo sapiens
uuuguaagaugcauagauugca

SEQ ID NO: 52815 - RNA, 22 nt, Homo sapiens
uuugguugucacaacuggggga

SEQ ID NO: 52816 - RNA, 22 nt, Homo sapiens
uuugguugcauucacauauuuc

SEQ ID NO: 52817 - RNA, 22 nt, Homo sapiens
uuuggucuuuuauuuaaagcag

SEQ ID NO: 52818 - RNA, 22 nt, Homo sapiens
uuuguaauccuauuccaaagga

SEQ ID NO: 52819 - RNA, 22 nt, Homo sapiens
uuuguacugagccaagauggua

SEQ ID NO: 52820 - RNA, 22 nt, Homo sapiens
uuuguacuucauacaauaacuc

SEQ ID NO: 52821 - RNA, 21 nt, Homo sapiens
uuuggcauuaugucaccagag

SEQ ID NO: 52822 - RNA, 23 nt, Homo sapiens
uuuggcauuccagaaauuuucau

SEQ ID NO: 52823 - RNA, 22 nt, Homo sapiens
uuuggcauuuaaauaugcaugg

SEQ ID NO: 52824 - RNA, 22 nt, Homo sapiens
uuugggacuguauuaaaugccu

SEQ ID NO: 52825 - RNA, 22 nt, Homo sapiens
uuuggcuuuuguaauaacugcc

SEQ ID NO: 52826 - RNA, 22 nt, Homo sapiens
uuuguuugaagucgagacaacu

SEQ ID NO: 52827 - RNA, 22 nt, Homo sapiens
uuuuacacaucaccgcucgugu

SEQ ID NO: 52828 - RNA, 22 nt, Homo sapiens
uuuuacacuucgguugugugca

SEQ ID NO: 52829 - RNA, 22 nt, Homo sapiens
uuuuacacuguugguuggaaug

SEQ ID NO: 52830 - RNA, 22 nt, Homo sapiens
uuugugcuccugugagaaucua

SEQ ID NO: 52831 - RNA, 22 nt, Homo sapiens
uuugugagguggauagauugca

SEQ ID NO: 52832 - RNA, 22 nt, Homo sapiens
uuugugaaugucauaagcucca

SEQ ID NO: 52833 - RNA, 21 nt, Homo sapiens
uuuguaguagcaugauuuaua

SEQ ID NO: 52834 - RNA, 22 nt, Homo sapiens
uuugucaauaacuaccaacagg

SEQ ID NO: 52835 - RNA, 23 nt, Homo sapiens
uuucauggggauuuacucauucc

SEQ ID NO: 52836 - RNA, 18 nt, Homo sapiens
uuucauugagugugauau

SEQ ID NO: 52837 - RNA, 22 nt, Homo sapiens
uuuccaagaugcuuacuuucuc

SEQ ID NO: 52838 - RNA, 22 nt, Homo sapiens
uuucccauuguucugcucugug

SEQ ID NO: 52839 - RNA, 20 nt, Homo sapiens
uuugaauguaaagcauguca

SEQ ID NO: 52840 - RNA, 22 nt, Homo sapiens
uuugacuguggagucgaugcuu

SEQ ID NO: 52841 - RNA, 18 nt, Homo sapiens
uuugacugguguccuuau

SEQ ID NO: 52842 - RNA, 22 nt, Homo sapiens
uuugagauaucuuccaucagua

SEQ ID NO: 52843 - RNA, 22 nt, Homo sapiens
uuugagcuagagucucacucug

SEQ ID NO: 52844 - RNA, 22 nt, Homo sapiens
uuuggcacuguaaauuucucuu

SEQ ID NO: 52845 - RNA, 22 nt, Homo sapiens
uuugauacuggguguggacaaa

SEQ ID NO: 52846 - RNA, 22 nt, Homo sapiens
uuugauguugagacuauaaagc

SEQ ID NO: 52847 - RNA, 22 nt, Homo sapiens
uuguuuuggagaugagcuaaaa

SEQ ID NO: 52848 - RNA, 22 nt, Homo sapiens
uuguuauguuggucaguaaugu

SEQ ID NO: 52849 - RNA, 22 nt, Homo sapiens
uuguuguggauuaaauuugcau

SEQ ID NO: 52850 - RNA, 22 nt, Homo sapiens
uuucauagccuuugucgucuga

SEQ ID NO: 52851 - RNA, 15 nt, Homo sapiens
uuucaguacagauuc

SEQ ID NO: 52852 - RNA, 22 nt, Homo sapiens
uuucauggaggcauuuuagauu

SEQ ID NO: 52853 - RNA, 22 nt, Homo sapiens
uuucauccggcuguguauuaug

SEQ ID NO: 52854 - RNA, 22 nt, Homo sapiens
uugugcauaucagagguuugcu

SEQ ID NO: 52855 - RNA, 22 nt, Homo sapiens
uugugaucuucagaaaguggcu

SEQ ID NO: 52856 - RNA, 22 nt, Homo sapiens
uugugcauguauauuaguucac

SEQ ID NO: 52857 - RNA, 22 nt, Homo sapiens
uugugcaugaugcauacauggu

SEQ ID NO: 52858 - RNA, 22 nt, Homo sapiens
uugugucccugcccaaaucuca

SEQ ID NO: 52859 - RNA, 22 nt, Homo sapiens
uugugucccuacccaaaucuca

SEQ ID NO: 52860 - RNA, 22 nt, Homo sapiens
uuguguccccacccaaaucuca

SEQ ID NO: 52861 - RNA, 19 nt, Homo sapiens
uuggcccugguucucuucu

SEQ ID NO: 52862 - RNA, 22 nt, Homo sapiens
uuggccaauggugauucccggc

SEQ ID NO: 52863 - RNA, 22 nt, Homo sapiens
uuggcauuuuggacacccagga

SEQ ID NO: 52864 - RNA, 22 nt, Homo sapiens
uuggcauuguggauggaaucau

SEQ ID NO: 52865 - RNA, 20 nt, Homo sapiens
uuggcauuuagacaagaguu

SEQ ID NO: 52866 - RNA, 22 nt, Homo sapiens
uuggcagaguuaauuuguugag

SEQ ID NO: 52867 - RNA, 22 nt, Homo sapiens
uuggcacugagcaagaacaggg

SEQ ID NO: 52868 - RNA, 22 nt, Homo sapiens
uuggcacugggaaaaugaccac

SEQ ID NO: 52869 - RNA, 22 nt, Homo sapiens
uuggcagugcccgaugcugggg

SEQ ID NO: 52870 - RNA, 22 nt, Homo sapiens
uuggcauagaggcucucaagcu

SEQ ID NO: 52871 - RNA, 22 nt, Homo sapiens
uuggacuuuaagauagagaugu

SEQ ID NO: 52872 - RNA, 22 nt, Homo sapiens
uuggaugauaaagaagccuaag

SEQ ID NO: 52873 - RNA, 22 nt, Homo sapiens
uuggauggucuuuauauaguau

SEQ ID NO: 52874 - RNA, 22 nt, Homo sapiens
uuguacuuuuaguagagacggg

SEQ ID NO: 52875 - RNA, 22 nt, Homo sapiens
uuguauacucuauuuuagcagu

SEQ ID NO: 52876 - RNA, 22 nt, Homo sapiens
uuguagaucuucaguugcuaca

SEQ ID NO: 52877 - RNA, 22 nt, Homo sapiens
uuggcucugcgucucgcggacg

SEQ ID NO: 52878 - RNA, 22 nt, Homo sapiens
uuggccuuucucuaaauacuuu

SEQ ID NO: 52879 - RNA, 22 nt, Homo sapiens
uuggccuuuucaaugccucuuu

SEQ ID NO: 52880 - RNA, 22 nt, Homo sapiens
uuggccgugucauuugcuuuga

SEQ ID NO: 52881 - RNA, 22 nt, Homo sapiens
uugugaauggugccucaguaaa

SEQ ID NO: 52882 - RNA, 22 nt, Homo sapiens
uugugaauggugccacaauaaa

SEQ ID NO: 52883 - RNA, 22 nt, Homo sapiens
uuguauguuuguucuuucagau

SEQ ID NO: 52884 - RNA, 22 nt, Homo sapiens
uuguaugucuucauuugaaaaa

SEQ ID NO: 52885 - RNA, 19 nt, Homo sapiens
uugcauauguugaaccagg

SEQ ID NO: 52886 - RNA, 22 nt, Homo sapiens
uugcaucagcuccugauguacu

SEQ ID NO: 52887 - RNA, 22 nt, Homo sapiens
uugcaugucauaacugauggaa

SEQ ID NO: 52888 - RNA, 22 nt, Homo sapiens
uugcaugguuuuuaucugaaau

SEQ ID NO: 52889 - RNA, 22 nt, Homo sapiens
uugaucacuguacuaugacuau

SEQ ID NO: 52890 - RNA, 22 nt, Homo sapiens
uugauauguuguuagauucagu

SEQ ID NO: 52891 - RNA, 22 nt, Homo sapiens
uugaugauguuucugccuugcc

SEQ ID NO: 52892 - RNA, 22 nt, Homo sapiens
uugauguaggcauucaaggcua

SEQ ID NO: 52893 - RNA, 22 nt, Homo sapiens
uugcauuuucuaggagggcaaa

SEQ ID NO: 52894 - RNA, 22 nt, Homo sapiens
uuggaaugugacugauaauauu

SEQ ID NO: 52895 - RNA, 22 nt, Homo sapiens
uuggaaugcacacugagccugc

SEQ ID NO: 52896 - RNA, 22 nt, Homo sapiens
uuggaauuaaccuggugcugga

SEQ ID NO: 52897 - RNA, 22 nt, Homo sapiens
uuggaauuagacaagugguggu

SEQ ID NO: 52898 - RNA, 22 nt, Homo sapiens
uuggaauuuuacuucuguaaga

SEQ ID NO: 52899 - RNA, 22 nt, Homo sapiens
uuggacaagauugcagagaauu

SEQ ID NO: 52900 - RNA, 18 nt, Homo sapiens
uuggacggagagucaaau

SEQ ID NO: 52901 - RNA, 22 nt, Homo sapiens
uuggacuaagaacuuaaaauaa

SEQ ID NO: 52902 - RNA, 22 nt, Homo sapiens
uuggacuacagauuacuucauc

SEQ ID NO: 52903 - RNA, 22 nt, Homo sapiens
uuggacuggaacuauaccauug

SEQ ID NO: 52904 - RNA, 22 nt, Homo sapiens
uucuucaguuacaacaaggggg

SEQ ID NO: 52905 - RNA, 22 nt, Homo sapiens
uucuguguuuaggucacggcua

SEQ ID NO: 52906 - RNA, 22 nt, Homo sapiens
uucugugcuuguggaugaagug

SEQ ID NO: 52907 - RNA, 22 nt, Homo sapiens
uugaguaguaaggauauuaucu

SEQ ID NO: 52908 - RNA, 22 nt, Homo sapiens
uugaguagaaguaugucaguau

SEQ ID NO: 52909 - RNA, 22 nt, Homo sapiens
uugaggugaauuugcaggaugc

SEQ ID NO: 52910 - RNA, 22 nt, Homo sapiens
uugaguuuaucuaaagaccugg

SEQ ID NO: 52911 - RNA, 22 nt, Homo sapiens
uugauagguuuuauguauaguu

SEQ ID NO: 52912 - RNA, 22 nt, Homo sapiens
uugauauuacucaguaacagau

SEQ ID NO: 52913 - RNA, 22 nt, Homo sapiens
uugauauguguauagcaugugg

SEQ ID NO: 52914 - RNA, 22 nt, Homo sapiens
uugauaugacuaucuuuuaugu

SEQ ID NO: 52915 - RNA, 22 nt, Homo sapiens
uguggcaaagucuugugaauau

SEQ ID NO: 52916 - RNA, 22 nt, Homo sapiens
uguggcauugaauaaccuugga

SEQ ID NO: 52917 - RNA, 22 nt, Homo sapiens
ugugucuuguuuuuucccaggc

SEQ ID NO: 52918 - RNA, 22 nt, Homo sapiens
uguuaagaugucaauuuuccac

SEQ ID NO: 52919 - RNA, 22 nt, Homo sapiens
uguuaacauuuuagagugggaa

SEQ ID NO: 52920 - RNA, 22 nt, Homo sapiens
ugugucuuguuuauagcuuucu

SEQ ID NO: 52921 - RNA, 22 nt, Homo sapiens
ugugcuauguuauucacauggg

SEQ ID NO: 52922 - RNA, 22 nt, Homo sapiens
ugugaauggugcugcaaugaac

SEQ ID NO: 52923 - RNA, 22 nt, Homo sapiens
ugugaauggugcugccgugaag

SEQ ID NO: 52924 - RNA, 22 nt, Homo sapiens
ugugaauguaaccuuauuugga

SEQ ID NO: 52925 - RNA, 22 nt, Homo sapiens
ugugacaaauuuaguggacugu

SEQ ID NO: 52926 - RNA, 22 nt, Homo sapiens
ugugacagguagguaauuuuug

SEQ ID NO: 52927 - RNA, 22 nt, Homo sapiens
ugucauguaaagaguaaauggu

SEQ ID NO: 52928 - RNA, 22 nt, Homo sapiens
ugucauguauauaccacuucca

SEQ ID NO: 52929 - RNA, 22 nt, Homo sapiens
ugucaugucaacuauggaauuu

SEQ ID NO: 52930 - RNA, 22 nt, Homo sapiens
ugucaugaacucacauucuggg

SEQ ID NO: 52931 - RNA, 21 nt, Homo sapiens
uggucccuucagaucggauuu

SEQ ID NO: 52932 - RNA, 22 nt, Homo sapiens
ugugaaacauggauagaacugg

SEQ ID NO: 52933 - RNA, 20 nt, Homo sapiens
ugugaacuguagauagucuu

SEQ ID NO: 52934 - RNA, 22 nt, Homo sapiens
ugucauguugagaaacuuggau

SEQ ID NO: 52935 - RNA, 16 nt, Homo sapiens
uguccaaauaaauaca

SEQ ID NO: 52936 - RNA, 22 nt, Homo sapiens
ugucuuguagacaauguauagu

SEQ ID NO: 52937 - RNA, 20 nt, Homo sapiens
uuaaaucuagugcagacuca

SEQ ID NO: 52938 - RNA, 22 nt, Homo sapiens
uuaaauacagcaugguguuucu

SEQ ID NO: 52939 - RNA, 22 nt, Homo sapiens
uguuuuguuagcacucugggaa

SEQ ID NO: 52940 - RNA, 22 nt, Homo sapiens
uuaaaugucuguagaugugcug

SEQ ID NO: 52941 - RNA, 22 nt, Homo sapiens
uuaaaugcucacauaaagguag

SEQ ID NO: 52942 - RNA, 22 nt, Homo sapiens
uuaaacucaucacccagguagu

SEQ ID NO: 52943 - RNA, 22 nt, Homo sapiens
uguuuuggaguggacuuugcau

SEQ ID NO: 52944 - RNA, 22 nt, Homo sapiens
uguuuuggaggccagaagucca

SEQ ID NO: 52945 - RNA, 21 nt, Homo sapiens
uguuuuugcuguguaucucuc

SEQ ID NO: 52946 - RNA, 22 nt, Homo sapiens
uuaaggaguagugucugguauu

SEQ ID NO: 52947 - RNA, 22 nt, Homo sapiens
uuacagauggcacacucaaggg

SEQ ID NO: 52948 - RNA, 22 nt, Homo sapiens
uuacagauggauggcagcuggc

SEQ ID NO: 52949 - RNA, 22 nt, Homo sapiens
uuaagcaguggauuagaauuuu

SEQ ID NO: 52950 - RNA, 22 nt, Homo sapiens
uguuuguuugugauacgguaca

SEQ ID NO: 52951 - RNA, 22 nt, Homo sapiens
uguuuguuugauaugggauaaa

SEQ ID NO: 52952 - RNA, 22 nt, Homo sapiens
uguuugcuguuuucuccaauga

SEQ ID NO: 52953 - RNA, 22 nt, Homo sapiens
uguuugcuuaacguggagccag

SEQ ID NO: 52954 - RNA, 22 nt, Homo sapiens
uguugcuuaagccacccagucu

SEQ ID NO: 52955 - RNA, 22 nt, Homo sapiens
uguuggacuuacuuggcagauu

SEQ ID NO: 52956 - RNA, 22 nt, Homo sapiens
uguuauuuuguguuagggcaca

SEQ ID NO: 52957 - RNA, 22 nt, Homo sapiens
uguuauugagguuacuuauaag

SEQ ID NO: 52958 - RNA, 22 nt, Homo sapiens
uguucuggagaguuuagucugg

SEQ ID NO: 52959 - RNA, 22 nt, Homo sapiens
uguuaagauguguuuuguggcu

SEQ ID NO: 52960 - RNA, 22 nt, Homo sapiens
uguuaaggcagagauaauacau

SEQ ID NO: 52961 - RNA, 22 nt, Homo sapiens
uguuagguuggugcaaaaguga

SEQ ID NO: 52962 - RNA, 22 nt, Homo sapiens
uguuaucauuacguucuuaguu

SEQ ID NO: 52963 - RNA, 22 nt, Homo sapiens
uguuauguuuuagagguuucaa

SEQ ID NO: 52964 - RNA, 19 nt, Homo sapiens
uuacauccauugcauuuca

SEQ ID NO: 52965 - RNA, 22 nt, Homo sapiens
uuacaguaugaguaagaguucu

SEQ ID NO: 52966 - RNA, 22 nt, Homo sapiens
uuacauguggugugaagaagag

SEQ ID NO: 52967 - RNA, 22 nt, Homo sapiens
uuagguaauauauugcugcuuu

SEQ ID NO: 52968 - RNA, 22 nt, Homo sapiens
uuauacacugugggaguguaaa

SEQ ID NO: 52969 - RNA, 22 nt, Homo sapiens
uucaaaguuggaggacaaacug

SEQ ID NO: 52970 - RNA, 20 nt, Homo sapiens
uuaguucauuuagaagguuu

SEQ ID NO: 52971 - RNA, 22 nt, Homo sapiens
uuagguaggugcuuuuuucaca

SEQ ID NO: 52972 - RNA, 21 nt, Homo sapiens
uuagugcucaguuugacaaaa

SEQ ID NO: 52973 - RNA, 22 nt, Homo sapiens
uuaguaguuugaguggggguua

SEQ ID NO: 52974 - RNA, 18 nt, Homo sapiens
uucaguuuguaucugggg

SEQ ID NO: 52975 - RNA, 22 nt, Homo sapiens
uucauguaauuccauaagguaa

SEQ ID NO: 52976 - RNA, 22 nt, Homo sapiens
uucagugccuggaagucgugcu

SEQ ID NO: 52977 - RNA, 22 nt, Homo sapiens
uucagggcauuggaguuucuga

SEQ ID NO: 52978 - RNA, 22 nt, Homo sapiens
uucaggcaccauggucauugau

SEQ ID NO: 52979 - RNA, 22 nt, Homo sapiens
uucaggcaccauugucauugau

SEQ ID NO: 52980 - RNA, 22 nt, Homo sapiens
uucagguaauuaugguuugucu

SEQ ID NO: 52981 - RNA, 22 nt, Homo sapiens
uucagguaguuuaacuguucca

SEQ ID NO: 52982 - RNA, 22 nt, Homo sapiens
uucagguaucccuugucuauag

SEQ ID NO: 52983 - RNA, 22 nt, Homo sapiens
uucaaaguguugguuuugggcu

SEQ ID NO: 52984 - RNA, 22 nt, Homo sapiens
uucagauugcauaccgaaagua

SEQ ID NO: 52985 - RNA, 22 nt, Homo sapiens
uucagaugcacacuguagucua

SEQ ID NO: 52986 - RNA, 22 nt, Homo sapiens
uucucaauggcaacuuguugcu

SEQ ID NO: 52987 - RNA, 22 nt, Homo sapiens
uucucacaguacagggagcucu

SEQ ID NO: 52988 - RNA, 22 nt, Homo sapiens
uucuauugguaauauuuucugu

SEQ ID NO: 52989 - RNA, 22 nt, Homo sapiens
uucuaaguaagucuguggggaa

SEQ ID NO: 52990 - RNA, 22 nt, Homo sapiens
uucgucaugagacagaugcuga

SEQ ID NO: 52991 - RNA, 22 nt, Homo sapiens
uuccuugagaaaguacaaggcu

SEQ ID NO: 52992 - RNA, 22 nt, Homo sapiens
uuccuugagagcuugauaucac

SEQ ID NO: 52993 - RNA, 22 nt, Homo sapiens
uuccuuguagcaaaugcgauga

SEQ ID NO: 52994 - RNA, 22 nt, Homo sapiens
uucucaguaauuccagauuuuu

SEQ ID NO: 52995 - RNA, 22 nt, Homo sapiens
uucucugggacauaggucgggu

SEQ ID NO: 52996 - RNA, 19 nt, Homo sapiens
uucucugguuguacuaccc

SEQ ID NO: 52997 - RNA, 22 nt, Homo sapiens
uucuggcucaggucaacacuuc

SEQ ID NO: 52998 - RNA, 22 nt, Homo sapiens
uuccaugugggcuugucaagua

SEQ ID NO: 52999 - RNA, 22 nt, Homo sapiens
uuccucuagacugucgguuucu

SEQ ID NO: 53000 - RNA, 22 nt, Homo sapiens
uuccuacuguucaucaggaacc

SEQ ID NO: 53001 - RNA, 22 nt, Homo sapiens
uuccauaggcuagaucaaccag

SEQ ID NO: 53002 - RNA, 22 nt, Homo sapiens
uuccaguguguucauccucaga

SEQ ID NO: 53003 - RNA, 22 nt, Homo sapiens
uuccauguaguugagcaguuuu

SEQ ID NO: 53004 - RNA, 22 nt, Homo sapiens
uuccaauguuccguguugcagu

SEQ ID NO: 53005 - RNA, 22 nt, Homo sapiens
uuccacgugaaguauucuaaag

SEQ ID NO: 53006 - RNA, 22 nt, Homo sapiens
uuccagaugggaguucuauucu

SEQ ID NO: 53007 - RNA, 22 nt, Homo sapiens
uuccacagggauuugcauugau

SEQ ID NO: 53008 - RNA, 22 nt, Homo sapiens
uccuacaugcaguacauucaaa

SEQ ID NO: 53009 - RNA, 22 nt, Homo sapiens
uccugagaauagaguugcaugu

SEQ ID NO: 53010 - RNA, 22 nt, Homo sapiens
ucccugagugauugaaaauaaa

SEQ ID NO: 53011 - RNA, 22 nt, Homo sapiens
uccugagacucacaggcucccc

SEQ ID NO: 53012 - RNA, 22 nt, Homo sapiens
uccuugagccucccagacucag

SEQ ID NO: 53013 - RNA, 22 nt, Homo sapiens
ucgacacugaccuaguucagca

SEQ ID NO: 53014 - RNA, 22 nt, Homo sapiens
ucgagcaauugucaugucucag

SEQ ID NO: 53015 - RNA, 22 nt, Homo sapiens
ucgguauuuuagaauugagacu

SEQ ID NO: 53016 - RNA, 23 nt, Homo sapiens
ucgguccccuuggcugcccucgg

SEQ ID NO: 53017 - RNA, 22 nt, Homo sapiens
ucccugagcaaaguuuucugua

SEQ ID NO: 53018 - RNA, 22 nt, Homo sapiens
ucccugaagcugcagcaacaca

SEQ ID NO: 53019 - RNA, 20 nt, Homo sapiens
ucccuaagagccuuuccuuc

SEQ ID NO: 53020 - RNA, 22 nt, Homo sapiens
uccccggaugacggccgcuuca

SEQ ID NO: 53021 - RNA, 22 nt, Homo sapiens
ucauuggauggaaugcucugua

SEQ ID NO: 53022 - RNA, 18 nt, Homo sapiens
ucauuggugagcaccucc

SEQ ID NO: 53023 - RNA, 22 nt, Homo sapiens
ucauuggcuaagcuuguuacac

SEQ ID NO: 53024 - RNA, 22 nt, Homo sapiens
ucauugguugcguaauuugauu

SEQ ID NO: 53025 - RNA, 22 nt, Homo sapiens
uccacaauggcugaacuagauu

SEQ ID NO: 53026 - RNA, 22 nt, Homo sapiens
uccacagugguggaauuguuca

SEQ ID NO: 53027 - RNA, 22 nt, Homo sapiens
uccacagugguugaacuaguuu

SEQ ID NO: 53028 - RNA, 22 nt, Homo sapiens
ucagaucaguuccacaagaacu

SEQ ID NO: 53029 - RNA, 22 nt, Homo sapiens
ucagaucauauucuucgcugcu

SEQ ID NO: 53030 - RNA, 21 nt, Homo sapiens
ucacuaguaaaaggugaacug

SEQ ID NO: 53031 - RNA, 20 nt, Homo sapiens
ucagcagucuggagcagagg

SEQ ID NO: 53032 - RNA, 22 nt, Homo sapiens
ucagcguguggacggccaucuu

SEQ ID NO: 53033 - RNA, 22 nt, Homo sapiens
ucagcagugugaaaacaaacua

SEQ ID NO: 53034 - RNA, 22 nt, Homo sapiens
ucaacauugcugucaggcaucu

SEQ ID NO: 53035 - RNA, 22 nt, Homo sapiens
ucaagcaauucgccugucucag

SEQ ID NO: 53036 - RNA, 18 nt, Homo sapiens
ucaagcaauugucaugcc

SEQ ID NO: 53037 - RNA, 22 nt, Homo sapiens
ucaaggcacuagcugagcugca

SEQ ID NO: 53038 - RNA, 22 nt, Homo sapiens
ucaaguacuuauuugauaauua

SEQ ID NO: 53039 - RNA, 22 nt, Homo sapiens
ucaaguacuuugcauagugccg

SEQ ID NO: 53040 - RNA, 22 nt, Homo sapiens
ucaagguacguugccucagauu

SEQ ID NO: 53041 - RNA, 20 nt, Homo sapiens
ucaaggcaggaacuguacau

SEQ ID NO: 53042 - RNA, 18 nt, Homo sapiens
ucacaaccacagugcugu

SEQ ID NO: 53043 - RNA, 22 nt, Homo sapiens
ucaaugcaaccuccaccucugg

SEQ ID NO: 53044 - RNA, 22 nt, Homo sapiens
ucacaauucucaauuugugaaa

SEQ ID NO: 53045 - RNA, 22 nt, Homo sapiens
ucacaauucacuacaggcuuga

SEQ ID NO: 53046 - RNA, 21 nt, Homo sapiens
ucacaaugaacagcagcagaa

SEQ ID NO: 53047 - RNA, 22 nt, Homo sapiens
ucacaauggcugaacuaauuua

SEQ ID NO: 53048 - RNA, 22 nt, Homo sapiens
ucaccuuacuugcuucugaacu

SEQ ID NO: 53049 - RNA, 18 nt, Homo sapiens
ucaccuugcuuuuagaac

SEQ ID NO: 53050 - RNA, 22 nt, Homo sapiens
ugaaguaauguuuuauucuauu

SEQ ID NO: 53051 - RNA, 22 nt, Homo sapiens
ugaaggcaggagggagaaaagu

SEQ ID NO: 53052 - RNA, 22 nt, Homo sapiens
ugaaggacauucuaugguagau

SEQ ID NO: 53053 - RNA, 22 nt, Homo sapiens
ugaauacugugcaaaggauuug

SEQ ID NO: 53054 - RNA, 22 nt, Homo sapiens
ugaacagucaucucucuuguau

SEQ ID NO: 53055 - RNA, 22 nt, Homo sapiens
ugaacugagacuagacuuguuc

SEQ ID NO: 53056 - RNA, 22 nt, Homo sapiens
ugaagacucaguuugagggaca

SEQ ID NO: 53057 - RNA, 22 nt, Homo sapiens
ugaagacauuuuugggugugua

SEQ ID NO: 53058 - RNA, 22 nt, Homo sapiens
ugaagcuaggauuaauuuucau

SEQ ID NO: 53059 - RNA, 22 nt, Homo sapiens
ugaaggacauaaggcagaguga

SEQ ID NO: 53060 - RNA, 22 nt, Homo sapiens
ugaagagucuaaaucugucuuc

SEQ ID NO: 53061 - RNA, 18 nt, Homo sapiens
ugacaucauuuagaaagg

SEQ ID NO: 53062 - RNA, 22 nt, Homo sapiens
ugacaugagauuugggaggggc

SEQ ID NO: 53063 - RNA, 22 nt, Homo sapiens
ugacauguagagaacuucucau

SEQ ID NO: 53064 - RNA, 22 nt, Homo sapiens
ugacauggagggugcggcugca

SEQ ID NO: 53065 - RNA, 22 nt, Homo sapiens
ugacauggaagauguucaugau

SEQ ID NO: 53066 - RNA, 21 nt, Homo sapiens
ugacauguuggugugcugcac

SEQ ID NO: 53067 - RNA, 21 nt, Homo sapiens
ugacauuauuucaugucagua

SEQ ID NO: 53068 - RNA, 22 nt, Homo sapiens
ugacauuacagucacuugcugu

SEQ ID NO: 53069 - RNA, 20 nt, Homo sapiens
ugagaacauguggcauuugg

SEQ ID NO: 53070 - RNA, 19 nt, Homo sapiens
ugagaacaugugguauuug

SEQ ID NO: 53071 - RNA, 20 nt, Homo sapiens
ugagaacaugugguauuugg

SEQ ID NO: 53072 - RNA, 22 nt, Homo sapiens
ugagaacuagagaacaagguga

SEQ ID NO: 53073 - RNA, 16 nt, Homo sapiens
ugagaacaugugacau

SEQ ID NO: 53074 - RNA, 22 nt, Homo sapiens
ugacuugaaacgugaacagauc

SEQ ID NO: 53075 - RNA, 22 nt, Homo sapiens
ugacugguguuuaaugagucaa

SEQ ID NO: 53076 - RNA, 22 nt, Homo sapiens
ugacuacacacaauuugucaag

SEQ ID NO: 53077 - RNA, 22 nt, Homo sapiens
ugacauugggagugaagugaag

SEQ ID NO: 53078 - RNA, 22 nt, Homo sapiens
ugaaacacacagagaagggaga

SEQ ID NO: 53079 - RNA, 22 nt, Homo sapiens
ucuuugucuacauccuguuaaa

SEQ ID NO: 53080 - RNA, 22 nt, Homo sapiens
ucuuuguguaggucaaucuggc

SEQ ID NO: 53081 - RNA, 19 nt, Homo sapiens
ucuuugcuuuucuaagagg

SEQ ID NO: 53082 - RNA, 22 nt, Homo sapiens
ucuuugauuuuguuacuaagac

SEQ ID NO: 53083 - RNA, 22 nt, Homo sapiens
ucuugaacuucugcacacucag

SEQ ID NO: 53084 - RNA, 22 nt, Homo sapiens
ucuuuggguagauauguagcug

SEQ ID NO: 53085 - RNA, 22 nt, Homo sapiens
ucuaauguaaccugcaaauauu

SEQ ID NO: 53086 - RNA, 22 nt, Homo sapiens
ucuaagacuaagggcuagcuuc

SEQ ID NO: 53087 - RNA, 19 nt, Homo sapiens
ucuaaaucucuugauagac

SEQ ID NO: 53088 - RNA, 22 nt, Homo sapiens
ucucaauuugauuacauucaua

SEQ ID NO: 53089 - RNA, 22 nt, Homo sapiens
ucucaagaugguagaugggaau

SEQ ID NO: 53090 - RNA, 22 nt, Homo sapiens
ucuauugguugaaauugcuuuu

SEQ ID NO: 53091 - RNA, 22 nt, Homo sapiens
ucuauggaguuugaaugagaaa

SEQ ID NO: 53092 - RNA, 19 nt, Homo sapiens
ucucacagcucuacuaugu

SEQ ID NO: 53093 - RNA, 18 nt, Homo sapiens
ucucacagcaaucuguca

SEQ ID NO: 53094 - RNA, 22 nt, Homo sapiens
ucuuaggugaugauugauguga

SEQ ID NO: 53095 - RNA, 22 nt, Homo sapiens
ucugugguucaaaccagcaacu

SEQ ID NO: 53096 - RNA, 22 nt, Homo sapiens
ucucacauuucacagggauggg

SEQ ID NO: 53097 - RNA, 22 nt, Homo sapiens
ucugugguuguugcauggaaug

SEQ ID NO: 53098 - RNA, 22 nt, Homo sapiens
ucuguguugaucacacugggag

SEQ ID NO: 53099 - RNA, 22 nt, Homo sapiens
ucuguguuugaucaagauugua

SEQ ID NO: 53100 - RNA, 22 nt, Homo sapiens
ugggaauaugauacaggucuuu

SEQ ID NO: 53101 - RNA, 20 nt, Homo sapiens
ugggaaauguccaggacaua

SEQ ID NO: 53102 - RNA, 22 nt, Homo sapiens
uggcuuuuaucuacucucaacu

SEQ ID NO: 53103 - RNA, 22 nt, Homo sapiens
uggcuuucuggggcuucuguuc

SEQ ID NO: 53104 - RNA, 22 nt, Homo sapiens
uggcuuuuccaggcauuacgau

SEQ ID NO: 53105 - RNA, 23 nt, Homo sapiens
uggcauuuuuggcaaugccuucu

SEQ ID NO: 53106 - RNA, 22 nt, Homo sapiens
uggcauguuggguguugacucc

SEQ ID NO: 53107 - RNA, 22 nt, Homo sapiens
uggcauuuugugugaauuagaa

SEQ ID NO: 53108 - RNA, 22 nt, Homo sapiens
uggcauguauuuuguguauuaa

SEQ ID NO: 53109 - RNA, 22 nt, Homo sapiens
uggcaugucguuuuucauagga

SEQ ID NO: 53110 - RNA, 22 nt, Homo sapiens
uggcauauaauauagaagacua

SEQ ID NO: 53111 - RNA, 22 nt, Homo sapiens
uggggugugagggagaaagaaa

SEQ ID NO: 53112 - RNA, 22 nt, Homo sapiens
uggucaugaggugaggcuucuc

SEQ ID NO: 53113 - RNA, 22 nt, Homo sapiens
uggucagaugcugaguggaucu

SEQ ID NO: 53114 - RNA, 22 nt, Homo sapiens
ugguaugucuagauggggaagu

SEQ ID NO: 53115 - RNA, 22 nt, Homo sapiens
ugguauguaugauuaacaugga

SEQ ID NO: 53116 - RNA, 22 nt, Homo sapiens
ugguaagaaaaccauuauuagc

SEQ ID NO: 53117 - RNA, 22 nt, Homo sapiens
ugguaagaucagaacuggaguc

SEQ ID NO: 53118 - RNA, 22 nt, Homo sapiens
ugguaaacaacaggagaacuug

SEQ ID NO: 53119 - RNA, 22 nt, Homo sapiens
uggagauccuucauuuuggugu

SEQ ID NO: 53120 - RNA, 22 nt, Homo sapiens
uggcaaaugugagaugagaacu

SEQ ID NO: 53121 - RNA, 22 nt, Homo sapiens
uggauuguuucucuugguauga

SEQ ID NO: 53122 - RNA, 18 nt, Homo sapiens
uggagauaagaagaacuu

SEQ ID NO: 53123 - RNA, 22 nt, Homo sapiens
uggagaacugaugucuccaaga

SEQ ID NO: 53124 - RNA, 22 nt, Homo sapiens
uggaauuuacuuauuuaggggc

SEQ ID NO: 53125 - RNA, 22 nt, Homo sapiens
ugccaggaugaggucaauguuu

SEQ ID NO: 53126 - RNA, 22 nt, Homo sapiens
ugcaugcaucuuuuauaguagc

SEQ ID NO: 53127 - RNA, 22 nt, Homo sapiens
ugcauggaagggagggaaagag

SEQ ID NO: 53128 - RNA, 22 nt, Homo sapiens
uggaaaguacuugaguuuguau

SEQ ID NO: 53129 - RNA, 20 nt, Homo sapiens
uggaaaguaagucaugauau

SEQ ID NO: 53130 - RNA, 22 nt, Homo sapiens
uggaagauucuagaagauucca

SEQ ID NO: 53131 - RNA, 22 nt, Homo sapiens
uggaagacucaagguggugaau

SEQ ID NO: 53132 - RNA, 19 nt, Homo sapiens
uggaacugauucaguucug

SEQ ID NO: 53133 - RNA, 19 nt, Homo sapiens
ugagaauguuaccaggucc

SEQ ID NO: 53134 - RNA, 22 nt, Homo sapiens
ugagaauauuugaagauguuag

SEQ ID NO: 53135 - RNA, 22 nt, Homo sapiens
ugagaagacaucuuugcuuugu

SEQ ID NO: 53136 - RNA, 22 nt, Homo sapiens
ugagaagacaucagcuuucgga

SEQ ID NO: 53137 - RNA, 22 nt, Homo sapiens
ugagacggagucuggcacuguc

SEQ ID NO: 53138 - RNA, 22 nt, Homo sapiens
ugagcagaaguuuugauuggcg

SEQ ID NO: 53139 - RNA, 19 nt, Homo sapiens
ugagauuguaugaggagau

SEQ ID NO: 53140 - RNA, 22 nt, Homo sapiens
ugagauuguaucugcaaugugu

SEQ ID NO: 53141 - RNA, 22 nt, Homo sapiens
ugagcgaugggaggaagugaua

SEQ ID NO: 53142 - RNA, 23 nt, Homo sapiens
ugagccaugggacuccaagggag

SEQ ID NO: 53143 - RNA, 22 nt, Homo sapiens
ugagcagugagugugcugcagg

SEQ ID NO: 53144 - RNA, 22 nt, Homo sapiens
ugagguaauagauaauauuuuu

SEQ ID NO: 53145 - RNA, 22 nt, Homo sapiens
ugaggagugaacuauuucugau

SEQ ID NO: 53146 - RNA, 22 nt, Homo sapiens
ugagcuauguucuucuuguuuu

SEQ ID NO: 53147 - RNA, 22 nt, Homo sapiens
ugauaagaaauuguucauguag

SEQ ID NO: 53148 - RNA, 22 nt, Homo sapiens
ugaguucuuuguagauucugug

SEQ ID NO: 53149 - RNA, 22 nt, Homo sapiens
ugagguaugugaugucuuuuag

SEQ ID NO: 53150 - RNA, 22 nt, Homo sapiens
ugauagugccuuuuauaucucu

SEQ ID NO: 53151 - RNA, 20 nt, Homo sapiens
ugcagcacgggcccuuucca

SEQ ID NO: 53152 - RNA, 20 nt, Homo sapiens
ugcagcacugggaaugcagu

SEQ ID NO: 53153 - RNA, 22 nt, Homo sapiens
ugcagcacuguucacaauagcc

SEQ ID NO: 53154 - RNA, 22 nt, Homo sapiens
ugcaguuuaggaacugguaaca

SEQ ID NO: 53155 - RNA, 22 nt, Homo sapiens
ugcagugugauuuucuggcuga

SEQ ID NO: 53156 - RNA, 22 nt, Homo sapiens
ugcagugcaugacuguguuaug

SEQ ID NO: 53157 - RNA, 22 nt, Homo sapiens
ugcagugugaaagagccugaca

SEQ ID NO: 53158 - RNA, 22 nt, Homo sapiens
ugcauacacaagcauacaugua

SEQ ID NO: 53159 - RNA, 22 nt, Homo sapiens
ugcauaggagcagggucuaugu

SEQ ID NO: 53160 - RNA, 22 nt, Homo sapiens
ugcauaucuucuuuugagaaau

SEQ ID NO: 53161 - RNA, 22 nt, Homo sapiens
ugcauaucuuguggaauaucuc

SEQ ID NO: 53162 - RNA, 21 nt, Homo sapiens
ugcauaucucuaaugaccagu

SEQ ID NO: 53163 - RNA, 22 nt, Homo sapiens
ugcauaugucuuuauaguagca

SEQ ID NO: 53164 - RNA, 22 nt, Homo sapiens
ugcaucaggcugcuuauuacaa

SEQ ID NO: 53165 - RNA, 22 nt, Homo sapiens
ugaucuguguaacauaggaguc

SEQ ID NO: 53166 - RNA, 22 nt, Homo sapiens
ugaucucauuagcaccuuuagc

SEQ ID NO: 53167 - RNA, 22 nt, Homo sapiens
ugauaucugaucauccuugaua

SEQ ID NO: 53168 - RNA, 22 nt, Homo sapiens
ugauaugaaguuagcuggcugu

SEQ ID NO: 53169 - RNA, 22 nt, Homo sapiens
ugaugguuuuaaaaagaggagu

SEQ ID NO: 53170 - RNA, 21 nt, Homo sapiens
ugaugcuuuucuuaaccuugc

SEQ ID NO: 53171 - RNA, 16 nt, Homo sapiens
ugcagaguaggugaau

SEQ ID NO: 53172 - RNA, 22 nt, Homo sapiens
ugcagcacaguagguuugcaau

SEQ ID NO: 53173 - RNA, 22 nt, Homo sapiens
ugcacuguggucugagagacag

SEQ ID NO: 53174 - RNA, 22 nt, Homo sapiens
ugcacacucuguaugagaaucu

SEQ ID NO: 53175 - RNA, 22 nt, Homo sapiens
ugcaccaauucuaaacaguucu

SEQ ID NO: 53176 - RNA, 22 nt, Homo sapiens
ugaugugucaucugagagagug

SEQ ID NO: 53177 - RNA, 22 nt, Homo sapiens
ugauguguuuuguaguucaacu

SEQ ID NO: 53178 - RNA, 22 nt, Homo sapiens
gguaaacauacugcugucuucu

SEQ ID NO: 53179 - RNA, 22 nt, Homo sapiens
gguaauguaacugguauucugu

SEQ ID NO: 53180 - RNA, 17 nt, Homo sapiens
gguacguuuuguucugu

SEQ ID NO: 53181 - RNA, 22 nt, Homo sapiens
guaaacuuccccucaugaauga

SEQ ID NO: 53182 - RNA, 22 nt, Homo sapiens
gguuagaaacagguccucagga

SEQ ID NO: 53183 - RNA, 22 nt, Homo sapiens
gguguguaaauuacuuaucucu

SEQ ID NO: 53184 - RNA, 22 nt, Homo sapiens
gguauuuaaaguaccugucugc

SEQ ID NO: 53185 - RNA, 22 nt, Homo sapiens
guaagacuuauuuucuuuauca

SEQ ID NO: 53186 - RNA, 22 nt, Homo sapiens
guaacucugucacuuacuaguu

SEQ ID NO: 53187 - RNA, 22 nt, Homo sapiens
guaacccuguaggccuaaagua

SEQ ID NO: 53188 - RNA, 22 nt, Homo sapiens
guaaccuauaguuaccaauagu

SEQ ID NO: 53189 - RNA, 22 nt, Homo sapiens
guaacguaaugucaaaaucuau

SEQ ID NO: 53190 - RNA, 22 nt, Homo sapiens
guaaauguccccugugauauug

SEQ ID NO: 53191 - RNA, 22 nt, Homo sapiens
guaaagacacaugcacacguau

SEQ ID NO: 53192 - RNA, 22 nt, Homo sapiens
guaucaugaaguuucuucauuu

SEQ ID NO: 53193 - RNA, 22 nt, Homo sapiens
guaugaaaaucggagauugggu

SEQ ID NO: 53194 - RNA, 22 nt, Homo sapiens
guaucacacuuauugaccugca

SEQ ID NO: 53195 - RNA, 22 nt, Homo sapiens
guagguaaguacuucuggugag

SEQ ID NO: 53196 - RNA, 22 nt, Homo sapiens
guaggcacugaguguuuuacag

SEQ ID NO: 53197 - RNA, 22 nt, Homo sapiens
guaggcacuggcucagcuuauc

SEQ ID NO: 53198 - RNA, 22 nt, Homo sapiens
guaugucuuuauagcagugugg

SEQ ID NO: 53199 - RNA, 22 nt, Homo sapiens
guauggcaugcaugagaauuuc

SEQ ID NO: 53200 - RNA, 22 nt, Homo sapiens
guauggcauuuguggauuggcc

SEQ ID NO: 53201 - RNA, 22 nt, Homo sapiens
guauugaguaaauguuuauugg

SEQ ID NO: 53202 - RNA, 22 nt, Homo sapiens
guauuguacuacaagcucuuua

SEQ ID NO: 53203 - RNA, 22 nt, Homo sapiens
guauuuguugcagcagcacuau

SEQ ID NO: 53204 - RNA, 22 nt, Homo sapiens
ggaucacagagcuugggaaagg

SEQ ID NO: 53205 - RNA, 22 nt, Homo sapiens
ggaucuauuucaugauaaccuu

SEQ ID NO: 53206 - RNA, 22 nt, Homo sapiens
ggcaacaugccgaaaccacguc

SEQ ID NO: 53207 - RNA, 22 nt, Homo sapiens
ggcaaauucuuguaugccuacu

SEQ ID NO: 53208 - RNA, 22 nt, Homo sapiens
ggcaaagaugaccauuacuuuu

SEQ ID NO: 53209 - RNA, 22 nt, Homo sapiens
ggcaguuucucaggcaggggua

SEQ ID NO: 53210 - RNA, 22 nt, Homo sapiens
gggcgagaaucggcugcucagc

SEQ ID NO: 53211 - RNA, 22 nt, Homo sapiens
ggccggguggccauggcugccc

SEQ ID NO: 53212 - RNA, 22 nt, Homo sapiens
ggcaugcauuguacuaguaugc

SEQ ID NO: 53213 - RNA, 22 nt, Homo sapiens
ggcauguauucuuauuauuccu

SEQ ID NO: 53214 - RNA, 22 nt, Homo sapiens
ggcaguuuguuugugaggucca

SEQ ID NO: 53215 - RNA, 22 nt, Homo sapiens
ggaagagugaauuaucuugacu

SEQ ID NO: 53216 - RNA, 20 nt, Homo sapiens
ggaagagugacacaagguau

SEQ ID NO: 53217 - RNA, 22 nt, Homo sapiens
ggaagguaauuggcuaaugaga

SEQ ID NO: 53218 - RNA, 22 nt, Homo sapiens
ggaaguuaauacagauagagua

SEQ ID NO: 53219 - RNA, 22 nt, Homo sapiens
ggacaaaguauuuucaaaugua

SEQ ID NO: 53220 - RNA, 22 nt, Homo sapiens
ggaauauaaaacuuuugacagg

SEQ ID NO: 53221 - RNA, 22 nt, Homo sapiens
ggaauaguauaaauaccacaaa

SEQ ID NO: 53222 - RNA, 22 nt, Homo sapiens
ggaauugcaucaaaugcaggua

SEQ ID NO: 53223 - RNA, 21 nt, Homo sapiens
ggaauuuagggaaugauuuag

SEQ ID NO: 53224 - RNA, 22 nt, Homo sapiens
ggaauguuaaggcgcuguuggu

SEQ ID NO: 53225 - RNA, 22 nt, Homo sapiens
guguguaaauggcagugagcuc

SEQ ID NO: 53226 - RNA, 22 nt, Homo sapiens
gugugucuugaccaggaucgga

SEQ ID NO: 53227 - RNA, 22 nt, Homo sapiens
guguggcaggugggggcucaga

SEQ ID NO: 53228 - RNA, 22 nt, Homo sapiens
guguucauggaauuugcaauug

SEQ ID NO: 53229 - RNA, 22 nt, Homo sapiens
guguugcacauucuguggaugu

SEQ ID NO: 53230 - RNA, 22 nt, Homo sapiens
guuaagaaguguaacuuaaguu

SEQ ID NO: 53231 - RNA, 22 nt, Homo sapiens
guuagcuaguagacaauuuucc

SEQ ID NO: 53232 - RNA, 22 nt, Homo sapiens
guucaguuugcugaugcguuga

SEQ ID NO: 53233 - RNA, 22 nt, Homo sapiens
guucagucacgugcccaaguuc

SEQ ID NO: 53234 - RNA, 20 nt, Homo sapiens
guucacaggcuuccuuucag

SEQ ID NO: 53235 - RNA, 22 nt, Homo sapiens
guuauugcucucgaagacucuc

SEQ ID NO: 53236 - RNA, 22 nt, Homo sapiens
guuaaugcuggaauaaguuaag

SEQ ID NO: 53237 - RNA, 22 nt, Homo sapiens
guuauguaucuugauugggugg

SEQ ID NO: 53238 - RNA, 22 nt, Homo sapiens
guuauguuaaauuguuguaugc

SEQ ID NO: 53239 - RNA, 18 nt, Homo sapiens
gugucugguuaugggagu

SEQ ID NO: 53240 - RNA, 22 nt, Homo sapiens
gugucuccugccuucaugcagc

SEQ ID NO: 53241 - RNA, 22 nt, Homo sapiens
gugucaugggcauguccuuaac

SEQ ID NO: 53242 - RNA, 22 nt, Homo sapiens
gugugauuauuucaauugaugc

SEQ ID NO: 53243 - RNA, 22 nt, Homo sapiens
gugugauuguuaauuuuaggug

SEQ ID NO: 53244 - RNA, 22 nt, Homo sapiens
gugucacagcuuccaucucggu

SEQ ID NO: 53245 - RNA, 22 nt, Homo sapiens
guguauguuucucccugucccu

SEQ ID NO: 53246 - RNA, 22 nt, Homo sapiens
guguauguuguccauggaugcg

SEQ ID NO: 53247 - RNA, 22 nt, Homo sapiens
guggacagagacuaaauguugu

SEQ ID NO: 53248 - RNA, 22 nt, Homo sapiens
guggaaguuaagugacuuucug

SEQ ID NO: 53249 - RNA, 22 nt, Homo sapiens
guggaauauaaagcaucgugua

SEQ ID NO: 53250 - RNA, 22 nt, Homo sapiens
guguaauacauuagcaaaccaa

SEQ ID NO: 53251 - RNA, 22 nt, Homo sapiens
guguagagaaauagccugaagg

SEQ ID NO: 53252 - RNA, 22 nt, Homo sapiens
guggaucacuugagguuagaag

SEQ ID NO: 53253 - RNA, 22 nt, Homo sapiens
gugagcgaggaaacgacggcgc

SEQ ID NO: 53254 - RNA, 22 nt, Homo sapiens
gugagcauucaaggaaggagcu

SEQ ID NO: 53255 - RNA, 22 nt, Homo sapiens
gugagcauuacucaugggauca

SEQ ID NO: 53256 - RNA, 21 nt, Homo sapiens
gugaggaguuacuggcuuuga

SEQ ID NO: 53257 - RNA, 22 nt, Homo sapiens
gugauagaucugggauucagaa

SEQ ID NO: 53258 - RNA, 22 nt, Homo sapiens
gugaguaaagguucauugaauu

SEQ ID NO: 53259 - RNA, 22 nt, Homo sapiens
gugaugguccagggaaucucuu

SEQ ID NO: 53260 - RNA, 22 nt, Homo sapiens
gugaugguaguuuguauuucug

SEQ ID NO: 53261 - RNA, 22 nt, Homo sapiens
gugauugcauuaugaauauuau

SEQ ID NO: 53262 - RNA, 22 nt, Homo sapiens
guccauuuguuuccagagcacu

SEQ ID NO: 53263 - RNA, 22 nt, Homo sapiens
gucuaugagucccugaauuuaa

SEQ ID NO: 53264 - RNA, 22 nt, Homo sapiens
gucuaguuuuaauacauuaaga

SEQ ID NO: 53265 - RNA, 22 nt, Homo sapiens
gucucacaggcaugaugccagc

SEQ ID NO: 53266 - RNA, 22 nt, Homo sapiens
gucucccagccuacaucuuucu

SEQ ID NO: 53267 - RNA, 22 nt, Homo sapiens
gugagauuaccauuuaaaucag

SEQ ID NO: 53268 - RNA, 22 nt, Homo sapiens
gucagcuuuuccuuacuuuagg

SEQ ID NO: 53269 - RNA, 22 nt, Homo sapiens
gucagcaucaccaugucuauga

SEQ ID NO: 53270 - RNA, 22 nt, Homo sapiens
gucacuguuuccuauuauauuu

SEQ ID NO: 53271 - RNA, 22 nt, Homo sapiens
gucacuguggagaagaaagugg

SEQ ID NO: 53272 - RNA, 22 nt, Homo sapiens
gucacagaaaaagauaugccaa

SEQ ID NO: 53273 - RNA, 22 nt, Homo sapiens
uacugcacuugaccuccugggc

SEQ ID NO: 53274 - RNA, 22 nt, Homo sapiens
uagacacugcauauuuuuuuaa

SEQ ID NO: 53275 - RNA, 22 nt, Homo sapiens
uagagccauugcagauguuuga

SEQ ID NO: 53276 - RNA, 22 nt, Homo sapiens
uagauaguuaugauuugaugau

SEQ ID NO: 53277 - RNA, 21 nt, Homo sapiens
uagcaaauugcuauuaaggca

SEQ ID NO: 53278 - RNA, 22 nt, Homo sapiens
uagcacagggaauugguucucu

SEQ ID NO: 53279 - RNA, 22 nt, Homo sapiens
uacugcacucuagccuggguga

SEQ ID NO: 53280 - RNA, 22 nt, Homo sapiens
uacugcacuccagccugggaga

SEQ ID NO: 53281 - RNA, 22 nt, Homo sapiens
uacugcacuccaaccugagaga

SEQ ID NO: 53282 - RNA, 22 nt, Homo sapiens
uaccuuaucccuaacuucccau

SEQ ID NO: 53283 - RNA, 22 nt, Homo sapiens
uacaccauuugauucuuuaagc

SEQ ID NO: 53284 - RNA, 22 nt, Homo sapiens
uacaccaauuuaaucaaaagca

SEQ ID NO: 53285 - RNA, 22 nt, Homo sapiens
uacaggaaugucagguugcugu

SEQ ID NO: 53286 - RNA, 22 nt, Homo sapiens
uacaauagugacaaaucagcau

SEQ ID NO: 53287 - RNA, 22 nt, Homo sapiens
uacacacguguguauauauaca

SEQ ID NO: 53288 - RNA, 21 nt, Homo sapiens
uacaagcuguagcacaugcca

SEQ ID NO: 53289 - RNA, 22 nt, Homo sapiens
uacaagcuaaaauggaagauca

SEQ ID NO: 53290 - RNA, 22 nt, Homo sapiens
uacaagguaucagugaccguaa

SEQ ID NO: 53291 - RNA, 22 nt, Homo sapiens
uaacauucacaugcugcaaaaa

SEQ ID NO: 53292 - RNA, 22 nt, Homo sapiens
uaagcuauagugaauaaauugc

SEQ ID NO: 53293 - RNA, 23 nt, Homo sapiens
uaacauguuuuuaagggaagcuu

SEQ ID NO: 53294 - RNA, 22 nt, Homo sapiens
uaacauagucauauacuugcuu

SEQ ID NO: 53295 - RNA, 22 nt, Homo sapiens
uaacagucaagguuugaccagg

SEQ ID NO: 53296 - RNA, 22 nt, Homo sapiens
uaaaugcucuuuaaaagugcuu

SEQ ID NO: 53297 - RNA, 22 nt, Homo sapiens
uaaauugcauaaguacaaauga

SEQ ID NO: 53298 - RNA, 22 nt, Homo sapiens
uaaaugcuuaauugaaugugga

SEQ ID NO: 53299 - RNA, 22 nt, Homo sapiens
guugagcaaacagcuuaacagu

SEQ ID NO: 53300 - RNA, 22 nt, Homo sapiens
guugcagaguucuuccuccuga

SEQ ID NO: 53301 - RNA, 22 nt, Homo sapiens
uaaguaauugcagcaauuugcc

SEQ ID NO: 53302 - RNA, 22 nt, Homo sapiens
uaaguacuuuacagacauuauc

SEQ ID NO: 53303 - RNA, 19 nt, Homo sapiens
uaaguagaugacugaugcu

SEQ ID NO: 53304 - RNA, 22 nt, Homo sapiens
uaaguauuuuaauuccuggcau

SEQ ID NO: 53305 - RNA, 23 nt, Homo sapiens
uaagucacacagauuaauuuauu

SEQ ID NO: 53306 - RNA, 22 nt, Homo sapiens
uaaguacugucagaauuggacu

SEQ ID NO: 53307 - RNA, 22 nt, Homo sapiens
uaaguaaaugaaagguugauuu

SEQ ID NO: 53308 - RNA, 22 nt, Homo sapiens
uaauauguauacagacagauac

SEQ ID NO: 53309 - RNA, 22 nt, Homo sapiens
uaaucacagagguuuggccuca

SEQ ID NO: 53310 - RNA, 22 nt, Homo sapiens
uaagucuuuuuggaguuuauaa

SEQ ID NO: 53311 - RNA, 22 nt, Homo sapiens
uaaugcaucagugguaguucuu

SEQ ID NO: 53312 - RNA, 22 nt, Homo sapiens
uaaugcaucaugguuggcaaac

SEQ ID NO: 53313 - RNA, 22 nt, Homo sapiens
uaauucuguauguaucagaguu

SEQ ID NO: 53314 - RNA, 22 nt, Homo sapiens
uaaugcuugguuguuuggaaaa

SEQ ID NO: 53315 - RNA, 22 nt, Homo sapiens
uaaucucagcuacucaggaggc

SEQ ID NO: 53316 - RNA, 22 nt, Homo sapiens
uaucaccuugguagucuugggg

SEQ ID NO: 53317 - RNA, 22 nt, Homo sapiens
uaucaguauggauucauggauu

SEQ ID NO: 53318 - RNA, 22 nt, Homo sapiens
uaucagcagagucauacuucaa

SEQ ID NO: 53319 - RNA, 22 nt, Homo sapiens
uaucagcacaguggguucaugg

SEQ ID NO: 53320 - RNA, 22 nt, Homo sapiens
uaucagaucccaauuucuggcc

SEQ ID NO: 53321 - RNA, 22 nt, Homo sapiens
uaucauugccucaaucuguauu

SEQ ID NO: 53322 - RNA, 22 nt, Homo sapiens
uauagcuuaaaguuuagauccu

SEQ ID NO: 53323 - RNA, 22 nt, Homo sapiens
uauagcacugaaagaggugauu

SEQ ID NO: 53324 - RNA, 21 nt, Homo sapiens
uauagcagcacgauuuauaau

SEQ ID NO: 53325 - RNA, 22 nt, Homo sapiens
uauaguguuuucaaaaguaugu

SEQ ID NO: 53326 - RNA, 22 nt, Homo sapiens
uagugaauguuggcuauuaaua

SEQ ID NO: 53327 - RNA, 22 nt, Homo sapiens
uagugaaugucacuggcuguug

SEQ ID NO: 53328 - RNA, 22 nt, Homo sapiens
uagucaaaucugaaggaaauuu

SEQ ID NO: 53329 - RNA, 22 nt, Homo sapiens
uagucagcaauguucauguucu

SEQ ID NO: 53330 - RNA, 22 nt, Homo sapiens
uaguaaacauaguucuuuugcu

SEQ ID NO: 53331 - RNA, 22 nt, Homo sapiens
uagcagaauaacuugccagccu

SEQ ID NO: 53332 - RNA, 18 nt, Homo sapiens
uagcagacaucauugggg

SEQ ID NO: 53333 - RNA, 22 nt, Homo sapiens
uagcaccugugcacaccaggca

SEQ ID NO: 53334 - RNA, 22 nt, Homo sapiens
uagcaccuuagcauuucuagug

SEQ ID NO: 53335 - RNA, 22 nt, Homo sapiens
uagcaggaaaccuguguugagg

SEQ ID NO: 53336 - RNA, 19 nt, Homo sapiens
uauguaguugucaagggag

SEQ ID NO: 53337 - RNA, 22 nt, Homo sapiens
uauggauuuuggaauauguggg

SEQ ID NO: 53338 - RNA, 22 nt, Homo sapiens
uaugucuucuuuagagaaaugu

SEQ ID NO: 53339 - RNA, 22 nt, Homo sapiens
uauuacugucaauaucacagaa

SEQ ID NO: 53340 - RNA, 22 nt, Homo sapiens
uauguguuuuauggucagggag

SEQ ID NO: 53341 - RNA, 22 nt, Homo sapiens
uauuacuguuauuccuaucaaa

SEQ ID NO: 53342 - RNA, 22 nt, Homo sapiens
uauuagugccuaagucuuaggg

SEQ ID NO: 53343 - RNA, 22 nt, Homo sapiens
uauuauagugauaggucuacug

SEQ ID NO: 53344 - RNA, 22 nt, Homo sapiens
uaugcuuauugucucauccacu

SEQ ID NO: 53345 - RNA, 22 nt, Homo sapiens
uauggacuuuaggauagcuuuu

SEQ ID NO: 53346 - RNA, 22 nt, Homo sapiens
uaugcacuaggcacuguguuug

SEQ ID NO: 53347 - RNA, 22 nt, Homo sapiens
uaugcacacguguccaugugca

SEQ ID NO: 53348 - RNA, 22 nt, Homo sapiens
uaugcacaugugccugggugug

SEQ ID NO: 53349 - RNA, 22 nt, Homo sapiens
ucaaauuccaagucuagguagg

SEQ ID NO: 53350 - RNA, 22 nt, Homo sapiens
ucaaaugcucuuugcagagagg

SEQ ID NO: 53351 - RNA, 22 nt, Homo sapiens
ucaaaugauucagaagccaccu

SEQ ID NO: 53352 - RNA, 22 nt, Homo sapiens
ucaaaugcacguagagaaaaua

SEQ ID NO: 53353 - RNA, 17 nt, Homo sapiens
ucaaaugcucccaguga

SEQ ID NO: 53354 - RNA, 22 nt, Homo sapiens
ucaaaucaucuuuuccaaagcu

SEQ ID NO: 53355 - RNA, 22 nt, Homo sapiens
ucaaagugcuauggcucagguu

SEQ ID NO: 53356 - RNA, 22 nt, Homo sapiens
ucaaaguauucuucugagaacc

SEQ ID NO: 53357 - RNA, 22 nt, Homo sapiens
ucaaagacacacaaggagaagg

SEQ ID NO: 53358 - RNA, 22 nt, Homo sapiens
ucaaagugacaaaguugcagca

SEQ ID NO: 53359 - RNA, 22 nt, Homo sapiens
uauuguacauguuauagauuuu

SEQ ID NO: 53360 - RNA, 22 nt, Homo sapiens
uauugucaccaucccuguuuua

SEQ ID NO: 53361 - RNA, 22 nt, Homo sapiens
ucaaaguaaagccucaggaugg

SEQ ID NO: 53362 - RNA, 22 nt, Homo sapiens
uauugcugaugcugaagggaag

SEQ ID NO: 53363 - RNA, 22 nt, Homo sapiens
uauugcuggcucugucuucauu

SEQ ID NO: 53364 - RNA, 22 nt, Homo sapiens
uauugguuacuguugaucgcca

SEQ ID NO: 53365 - RNA, 22 nt, Homo sapiens
uauuggcucuguuucucugaag

SEQ ID NO: 53366 - RNA, 22 nt, Homo sapiens
uauugcauguugagcaguaccu

SEQ ID NO: 53367 - RNA, 22 nt, Homo sapiens
uauugcauuugagguugguuga

SEQ ID NO: 53368 - RNA, 22 nt, Homo sapiens
uauugcuaaaacucaugguugc

SEQ ID NO: 53369 - RNA, 19 nt, Homo sapiens
cauggcuuauaauuuuaau

SEQ ID NO: 53370 - RNA, 22 nt, Homo sapiens
cauggcuuuaagcaacaccaag

SEQ ID NO: 53371 - RNA, 22 nt, Homo sapiens
cagcacauagcaguugcucagu

SEQ ID NO: 53372 - RNA, 22 nt, Homo sapiens
cagcaucauucaucugggguaa

SEQ ID NO: 53373 - RNA, 22 nt, Homo sapiens
cauguauagauuccauaguggu

SEQ ID NO: 53374 - RNA, 22 nt, Homo sapiens
cauuccacauguaggacaauuu

SEQ ID NO: 53375 - RNA, 22 nt, Homo sapiens
cauugcacacauuuaccuaugu

SEQ ID NO: 53376 - RNA, 20 nt, Homo sapiens
cauuccacuuuccugucagu

SEQ ID NO: 53377 - RNA, 22 nt, Homo sapiens
cauugcaacuucugccucccag

SEQ ID NO: 53378 - RNA, 22 nt, Homo sapiens
cauugcauuuucuuuguaccuu

SEQ ID NO: 53379 - RNA, 20 nt, Homo sapiens
ccagcaucauuagauucugg

SEQ ID NO: 53380 - RNA, 22 nt, Homo sapiens
ccaguuuuuggcaaugaugaau

SEQ ID NO: 53381 - RNA, 22 nt, Homo sapiens
ccaguuuuucauuuauacuagu

SEQ ID NO: 53382 - RNA, 22 nt, Homo sapiens
cccagaguucuuaaauacugag

SEQ ID NO: 53383 - RNA, 22 nt, Homo sapiens
ccauugaacaugaaggaaugug

SEQ ID NO: 53384 - RNA, 20 nt, Homo sapiens
ccaguguuauuuauguucua

SEQ ID NO: 53385 - RNA, 22 nt, Homo sapiens
ccagugucugacagacacggcg

SEQ ID NO: 53386 - RNA, 21 nt, Homo sapiens
ccucuuugagggaagaaaggg

SEQ ID NO: 53387 - RNA, 22 nt, Homo sapiens
ccccauuguugugguuuuaucu

SEQ ID NO: 53388 - RNA, 22 nt, Homo sapiens
ccuucauccuccagcaggcuag

SEQ ID NO: 53389 - RNA, 22 nt, Homo sapiens
ccuugucacugaguggaaugaa

SEQ ID NO: 53390 - RNA, 22 nt, Homo sapiens
ccuucauucauuaauuuagccc

SEQ ID NO: 53391 - RNA, 22 nt, Homo sapiens
ccuucuuuuguaaggcugaaua

SEQ ID NO: 53392 - RNA, 22 nt, Homo sapiens
ccugucuugauuaaauuacuua

SEQ ID NO: 53393 - RNA, 22 nt, Homo sapiens
cuagcacauaguuauucacuca

SEQ ID NO: 53394 - RNA, 22 nt, Homo sapiens
cuagauuguuuccauaaugaca

SEQ ID NO: 53395 - RNA, 22 nt, Homo sapiens
cuagcagacaugggcugaacca

SEQ ID NO: 53396 - RNA, 22 nt, Homo sapiens
cuagcuuuugauguaaagugag

SEQ ID NO: 53397 - RNA, 22 nt, Homo sapiens
cuaggcacgccugggucuccag

SEQ ID NO: 53398 - RNA, 22 nt, Homo sapiens
cuaggcacugauaguuguauuu

SEQ ID NO: 53399 - RNA, 22 nt, Homo sapiens
cucgaagacuaagcaucucuga

SEQ ID NO: 53400 - RNA, 22 nt, Homo sapiens
cuccaguuucagaaucccaugu

SEQ ID NO: 53401 - RNA, 22 nt, Homo sapiens
cucauugcaaucucugccuccc

SEQ ID NO: 53402 - RNA, 22 nt, Homo sapiens
cucauggagaacaucugcuagg

SEQ ID NO: 53403 - RNA, 22 nt, Homo sapiens
cucauggaauacuucacagcca

SEQ ID NO: 53404 - RNA, 22 nt, Homo sapiens
cuaucugcacaggguggaaauu

SEQ ID NO: 53405 - RNA, 22 nt, Homo sapiens
cuagugcaauccuuugauggua

SEQ ID NO: 53406 - RNA, 22 nt, Homo sapiens
cucauggagaaccucugcuagg

SEQ ID NO: 53407 - RNA, 21 nt, Homo sapiens
cucauauugcuuuuccauggu

SEQ ID NO: 53408 - RNA, 22 nt, Homo sapiens
cacugcaauuacuuuugcacca

SEQ ID NO: 53409 - RNA, 22 nt, Homo sapiens
cacgugcuuucuuuucauuuag

SEQ ID NO: 53410 - RNA, 22 nt, Homo sapiens
cacugcacuccagucugacgac

SEQ ID NO: 53411 - RNA, 22 nt, Homo sapiens
cacugcacuccagucuggcgac

SEQ ID NO: 53412 - RNA, 22 nt, Homo sapiens
cacugcacuccaguuuggauga

SEQ ID NO: 53413 - RNA, 22 nt, Homo sapiens
cagacaugucuuguggccgugg

SEQ ID NO: 53414 - RNA, 22 nt, Homo sapiens
cagaguuaguagccuuugacaa

SEQ ID NO: 53415 - RNA, 22 nt, Homo sapiens
cagauaguuguagguguguggc

SEQ ID NO: 53416 - RNA, 22 nt, Homo sapiens
cagauguaguauuuuagugaaa

SEQ ID NO: 53417 - RNA, 21 nt, Homo sapiens
auuuuugcagagcugguagug

SEQ ID NO: 53418 - RNA, 22 nt, Homo sapiens
auuugucacuuaacagccauua

SEQ ID NO: 53419 - RNA, 22 nt, Homo sapiens
caaguacugggcuauggauauu

SEQ ID NO: 53420 - RNA, 22 nt, Homo sapiens
cacccuugcagggacagcuuug

SEQ ID NO: 53421 - RNA, 22 nt, Homo sapiens
cacacugucuucaauggguggu

SEQ ID NO: 53422 - RNA, 22 nt, Homo sapiens
cacaccuaccucauuauggaca

SEQ ID NO: 53423 - RNA, 22 nt, Homo sapiens
cacaaccuccgccuccuggguu

SEQ ID NO: 53424 - RNA, 22 nt, Homo sapiens
cacaaugucugguaggccacuu

SEQ ID NO: 53425 - RNA, 22 nt, Homo sapiens
caauugcacucuuagguguaca

SEQ ID NO: 53426 - RNA, 22 nt, Homo sapiens
caaugcauuauucucccacuuc

SEQ ID NO: 53427 - RNA, 22 nt, Homo sapiens
auuaucacaguuuugcauaugg

SEQ ID NO: 53428 - RNA, 22 nt, Homo sapiens
auuauugacucauagaaaggau

SEQ ID NO: 53429 - RNA, 22 nt, Homo sapiens
auuauuagucggccagcuguua

SEQ ID NO: 53430 - RNA, 22 nt, Homo sapiens
auuauuaguuguugaaugaagu

SEQ ID NO: 53431 - RNA, 22 nt, Homo sapiens
auugaauuugguuugcuaagaa

SEQ ID NO: 53432 - RNA, 22 nt, Homo sapiens
auucacuuuuauagacaggucu

SEQ ID NO: 53433 - RNA, 22 nt, Homo sapiens
auucaucagggauacuggccug

SEQ ID NO: 53434 - RNA, 20 nt, Homo sapiens
auugaagacuccggggcaga

SEQ ID NO: 53435 - RNA, 22 nt, Homo sapiens
auugaaucuaaaaugagucucu

SEQ ID NO: 53436 - RNA, 22 nt, Homo sapiens
auucagaggggcagcugucuug

SEQ ID NO: 53437 - RNA, 22 nt, Homo sapiens
auucauagugcuaagguguauc

SEQ ID NO: 53438 - RNA, 22 nt, Homo sapiens
augugcaacugcuggaacaguc

SEQ ID NO: 53439 - RNA, 22 nt, Homo sapiens
augugcaaauuuccaaacucuu

SEQ ID NO: 53440 - RNA, 17 nt, Homo sapiens
augugaauguucaaaua

SEQ ID NO: 53441 - RNA, 22 nt, Homo sapiens
auuauauguguaugugcauacc

SEQ ID NO: 53442 - RNA, 22 nt, Homo sapiens
auuauaugucaucacagacacc

SEQ ID NO: 53443 - RNA, 22 nt, Homo sapiens
auuagguuggugcaaaaguaau

SEQ ID NO: 53444 - RNA, 22 nt, Homo sapiens
auugcacaucugcacuacagcc

SEQ ID NO: 53445 - RNA, 22 nt, Homo sapiens
auugcacuccagccugagcaaa

SEQ ID NO: 53446 - RNA, 19 nt, Homo sapiens
auugcacuccaaccugggu

SEQ ID NO: 53447 - RNA, 22 nt, Homo sapiens
auugcacuccagccuagguaac

SEQ ID NO: 53448 - RNA, 22 nt, Homo sapiens
auugcucuuagaaauauuucuu

SEQ ID NO: 53449 - RNA, 22 nt, Homo sapiens
auugcaauuaguccauagaguu

SEQ ID NO: 53450 - RNA, 22 nt, Homo sapiens
auugaguaacaauuuuguucaa

SEQ ID NO: 53451 - RNA, 22 nt, Homo sapiens
auugauagaucauaugguaggu

SEQ ID NO: 53452 - RNA, 22 nt, Homo sapiens
auuucuacuccuguguccagaa

SEQ ID NO: 53453 - RNA, 22 nt, Homo sapiens
auuguacauacaccggugugua

SEQ ID NO: 53454 - RNA, 19 nt, Homo sapiens
auuugaucaucaggcacag

SEQ ID NO: 53455 - RNA, 20 nt, Homo sapiens
auuugcauuauggagcaccc

SEQ ID NO: 53456 - RNA, 22 nt, Homo sapiens
auuugacacugagagccucagu

SEQ ID NO: 53457 - RNA, 22 nt, Homo sapiens
auuggcagaaaucuuuauagua

SEQ ID NO: 53458 - RNA, 22 nt, Homo sapiens
auuggcauauccacgacaaugc

SEQ ID NO: 53459 - RNA, 22 nt, Homo sapiens
auuggauagucuuuaucuguug

SEQ ID NO: 53460 - RNA, 22 nt, Homo sapiens
auuggcaagauagcauaugagg

SEQ ID NO: 53461 - RNA, 22 nt, Homo sapiens
cuuggcauuguguugauagaag

SEQ ID NO: 53462 - RNA, 22 nt, Homo sapiens
cuuuuacacuguuggcaggauu

SEQ ID NO: 53463 - RNA, 22 nt, Homo sapiens
cuuuuacacugguggugggaau

SEQ ID NO: 53464 - RNA, 22 nt, Homo sapiens
cuugcagagcccauggauguca

SEQ ID NO: 53465 - RNA, 22 nt, Homo sapiens
cuugcagaggcccuggggagag

SEQ ID NO: 53466 - RNA, 22 nt, Homo sapiens
cuugcagagucauucuaauuuc

SEQ ID NO: 53467 - RNA, 22 nt, Homo sapiens
cuuuuugcugcagcaauacugg

SEQ ID NO: 53468 - RNA, 22 nt, Homo sapiens
cuuuugugauucuucaguugcu

SEQ ID NO: 53469 - RNA, 22 nt, Homo sapiens
cuuuuggcuuagaauugucuug

SEQ ID NO: 53470 - RNA, 22 nt, Homo sapiens
cuuuugugauuccucaguuacu

SEQ ID NO: 53471 - RNA, 22 nt, Homo sapiens
cuuuugcugggucagcgguggu

SEQ ID NO: 53472 - RNA, 23 nt, Homo sapiens
cuuuugcaaugugaucuugccac

SEQ ID NO: 53473 - RNA, 22 nt, Homo sapiens
cuuuuacacuguuggugggaau

SEQ ID NO: 53474 - RNA, 22 nt, Homo sapiens
gaacuuguguugcuucacaugu

SEQ ID NO: 53475 - RNA, 22 nt, Homo sapiens
gaagaacuaggugagaucuaga

SEQ ID NO: 53476 - RNA, 22 nt, Homo sapiens
gaaauguuuuucaugugggcaa

SEQ ID NO: 53477 - RNA, 22 nt, Homo sapiens
gaaaguaauuaacgauuguugc

SEQ ID NO: 53478 - RNA, 21 nt, Homo sapiens
gaaauacugccuuaggagcug

SEQ ID NO: 53479 - RNA, 18 nt, Homo sapiens
gaaaugccucuugcuuac

SEQ ID NO: 53480 - RNA, 22 nt, Homo sapiens
gaaagacuuucugcuguggaua

SEQ ID NO: 53481 - RNA, 22 nt, Homo sapiens
cuuuuugcuagagucuaggguc

SEQ ID NO: 53482 - RNA, 22 nt, Homo sapiens
gaaaacugcuucucuggguuuc

SEQ ID NO: 53483 - RNA, 22 nt, Homo sapiens
cuuuuugguagagcaggugugc

SEQ ID NO: 53484 - RNA, 22 nt, Homo sapiens
gaaucauuguuucuaaguuugu

SEQ ID NO: 53485 - RNA, 22 nt, Homo sapiens
gaaucacagauuaugaguaucu

SEQ ID NO: 53486 - RNA, 22 nt, Homo sapiens
gacauguuuuuuaagguuuaug

SEQ ID NO: 53487 - RNA, 22 nt, Homo sapiens
gaauacugacuauuucaucugg

SEQ ID NO: 53488 - RNA, 22 nt, Homo sapiens
gaaguaguaaaauuuauugcag

SEQ ID NO: 53489 - RNA, 22 nt, Homo sapiens
gaauaaacuagagaggacugag

SEQ ID NO: 53490 - RNA, 22 nt, Homo sapiens
gaaguaauaaauggauucuuaa

SEQ ID NO: 53491 - RNA, 22 nt, Homo sapiens
gaagaucacacuguagaucuau

SEQ ID NO: 53492 - RNA, 22 nt, Homo sapiens
gaagacauuugcugcacguccu

SEQ ID NO: 53493 - RNA, 22 nt, Homo sapiens
cucucuguuugucuguuauugg

SEQ ID NO: 53494 - RNA, 22 nt, Homo sapiens
cugaaaucagccaguuaguuuc

SEQ ID NO: 53495 - RNA, 22 nt, Homo sapiens
cugaaauguccaucgacugaug

SEQ ID NO: 53496 - RNA, 22 nt, Homo sapiens
cugacaagauucaucacucagu

SEQ ID NO: 53497 - RNA, 22 nt, Homo sapiens
cugaaagagcauguaacacagu

SEQ ID NO: 53498 - RNA, 18 nt, Homo sapiens
cuggaugucgaguguguu

SEQ ID NO: 53499 - RNA, 22 nt, Homo sapiens
cugacguguuuuccagaccuuu

SEQ ID NO: 53500 - RNA, 22 nt, Homo sapiens
cugacauggggauccaccuuag

SEQ ID NO: 53501 - RNA, 22 nt, Homo sapiens
cugacagaugacugccacugua

SEQ ID NO: 53502 - RNA, 22 nt, Homo sapiens
cuggcagugcuuguuauccugg

SEQ ID NO: 53503 - RNA, 22 nt, Homo sapiens
cuggcagucugccucuucacug

SEQ ID NO: 53504 - RNA, 22 nt, Homo sapiens
cuguuauguuugauggaugaau

SEQ ID NO: 53505 - RNA, 20 nt, Homo sapiens
cuuccaguggccccaucuuu

SEQ ID NO: 53506 - RNA, 22 nt, Homo sapiens
cuugagcauauucuauauuaaa

SEQ ID NO: 53507 - RNA, 20 nt, Homo sapiens
cuugaagacuaugcugcuga

SEQ ID NO: 53508 - RNA, 22 nt, Homo sapiens
cugugcuugauuauaugagugu

SEQ ID NO: 53509 - RNA, 19 nt, Homo sapiens
cugugcauuucuguggaag

SEQ ID NO: 53510 - RNA, 22 nt, Homo sapiens
cugugcuaggcaaugugguaga

SEQ ID NO: 53511 - RNA, 23 nt, Homo sapiens
cuguggauaugaguuguaaaugg

SEQ ID NO: 53512 - RNA, 22 nt, Homo sapiens
cugugauagguuagucaugaau

SEQ ID NO: 53513 - RNA, 17 nt, Homo sapiens
cugugaugaucuugucu

SEQ ID NO: 53514 - RNA, 22 nt, Homo sapiens
cugugcauaugacuuuauugga

SEQ ID NO: 53515 - RNA, 22 nt, Homo sapiens
gcauugcacuuggcauagacug

SEQ ID NO: 53516 - RNA, 22 nt, Homo sapiens
gccaagaagugucuaagcagga

SEQ ID NO: 53517 - RNA, 22 nt, Homo sapiens
gcagugcaugacgguauauaua

SEQ ID NO: 53518 - RNA, 22 nt, Homo sapiens
gcagugugauguuuuaaucuau

SEQ ID NO: 53519 - RNA, 23 nt, Homo sapiens
gcagucauuuggaaaagguugaa

SEQ ID NO: 53520 - RNA, 22 nt, Homo sapiens
gcaguggugugugccagccuag

SEQ ID NO: 53521 - RNA, 22 nt, Homo sapiens
gcaguguucaaaucaugcccau

SEQ ID NO: 53522 - RNA, 20 nt, Homo sapiens
gcaguguucacuguauuccu

SEQ ID NO: 53523 - RNA, 22 nt, Homo sapiens
gcaguagugcgaucucagcuca

SEQ ID NO: 53524 - RNA, 19 nt, Homo sapiens
gcaucauuaguugcuuuuc

SEQ ID NO: 53525 - RNA, 22 nt, Homo sapiens
gcaucaaugucuauaguguuug

SEQ ID NO: 53526 - RNA, 22 nt, Homo sapiens
gcauauguuuggguguguauau

SEQ ID NO: 53527 - RNA, 22 nt, Homo sapiens
gcaucacagcuccugugcuggc

SEQ ID NO: 53528 - RNA, 19 nt, Homo sapiens
gcagagaugugguagcuug

SEQ ID NO: 53529 - RNA, 20 nt, Homo sapiens
gcaacauggccagagugaau

SEQ ID NO: 53530 - RNA, 22 nt, Homo sapiens
gcagaucucuucauuucucuua

SEQ ID NO: 53531 - RNA, 22 nt, Homo sapiens
gcagaucuucgcgguaaguguu

SEQ ID NO: 53532 - RNA, 22 nt, Homo sapiens
gcaaagaaugcagauuugccuc

SEQ ID NO: 53533 - RNA, 22 nt, Homo sapiens
gcaaaugcuacaccauuuugua

SEQ ID NO: 53534 - RNA, 22 nt, Homo sapiens
gauuuuuggggaagccucuuau

SEQ ID NO: 53535 - RNA, 22 nt, Homo sapiens
gauuuugguuagggaaggauac

SEQ ID NO: 53536 - RNA, 22 nt, Homo sapiens
gauuguguucauaggcauguua

SEQ ID NO: 53537 - RNA, 22 nt, Homo sapiens
gauugcaauuuaggugagagag

SEQ ID NO: 53538 - RNA, 22 nt, Homo sapiens
gauggcauuucuggaucugaca

SEQ ID NO: 53539 - RNA, 22 nt, Homo sapiens
gauggcaugugcugccaccaag

SEQ ID NO: 53540 - RNA, 22 nt, Homo sapiens
gagcucauuaaaaauguagaau

SEQ ID NO: 53541 - RNA, 22 nt, Homo sapiens
gagcucauuaaaguaggaccua

SEQ ID NO: 53542 - RNA, 22 nt, Homo sapiens
gagcugaauugcugccauuugc

SEQ ID NO: 53543 - RNA, 22 nt, Homo sapiens
gagcaucaguggccucaucuca

SEQ ID NO: 53544 - RNA, 22 nt, Homo sapiens
gagcaguugagagugcuggcca

SEQ ID NO: 53545 - RNA, 18 nt, Homo sapiens
gagcaccuuuuuugcaga

SEQ ID NO: 53546 - RNA, 22 nt, Homo sapiens
gacuagggaaaauuauuuuguu

SEQ ID NO: 53547 - RNA, 22 nt, Homo sapiens
gacuagagcugaucauguuacu

SEQ ID NO: 53548 - RNA, 22 nt, Homo sapiens
gacguagagaaaugugaaaugg

SEQ ID NO: 53549 - RNA, 22 nt, Homo sapiens
gacucuguagacaaucacaucu

SEQ ID NO: 53550 - RNA, 22 nt, Homo sapiens
gagguaagaguuuuccauuucu

SEQ ID NO: 53551 - RNA, 22 nt, Homo sapiens
gagguacgaaauacacuguacu

SEQ ID NO: 53552 - RNA, 21 nt, Homo sapiens
gagguagggauuaaagaccuc

SEQ ID NO: 53553 - RNA, 22 nt, Homo sapiens
gaguucauaucuaugagugugc

SEQ ID NO: 53554 - RNA, 22 nt, Homo sapiens
gauaaauccagauucugaugua

SEQ ID NO: 53555 - RNA, 18 nt, Homo sapiens
gauaacaguggacuaugc

SEQ ID NO: 53556 - RNA, 22 nt, Homo sapiens
gauaaaucuuggcuagucuaag

SEQ ID NO: 53557 - RNA, 22 nt, Homo sapiens
gauacuggcuuuauagaaugau

SEQ ID NO: 53558 - RNA, 22 nt, Homo sapiens
gaugagaugagcauuugaauug

SEQ ID NO: 53559 - RNA, 22 nt, Homo sapiens
gaugagauguucucauggauug

SEQ ID NO: 53560 - RNA, 22 nt, Homo sapiens
gaugagcuaaguucucacagca

SEQ ID NO: 53561 - RNA, 22 nt, Homo sapiens
gaugauguuacucuuuuuccuu

SEQ ID NO: 53562 - RNA, 22 nt, Homo sapiens
gauauguaguaguugaaaaaga

SEQ ID NO: 53563 - RNA, 22 nt, Homo sapiens
gauauguguaucuauguacaug

SEQ ID NO: 53564 - RNA, 22 nt, Homo sapiens
agcugcacugguauaggagaaa

SEQ ID NO: 53565 - RNA, 22 nt, Homo sapiens
agcuggaauuuaagguagauag

SEQ ID NO: 53566 - RNA, 22 nt, Homo sapiens
agcuacaucuugcucugggaug

SEQ ID NO: 53567 - RNA, 22 nt, Homo sapiens
agcuagcauucauaguuugagg

SEQ ID NO: 53568 - RNA, 22 nt, Homo sapiens
agcuaaaucucauguugaauug

SEQ ID NO: 53569 - RNA, 21 nt, Homo sapiens
agcuaaauuggaaauuucugu

SEQ ID NO: 53570 - RNA, 22 nt, Homo sapiens
aggaaguaauaaguuugguucu

SEQ ID NO: 53571 - RNA, 23 nt, Homo sapiens
aggaaguaacuaucuuuucuguc

SEQ ID NO: 53572 - RNA, 23 nt, Homo sapiens
aggaauggaaaaccaaguaucau

SEQ ID NO: 53573 - RNA, 22 nt, Homo sapiens
aggaagacauauagaacuaaaa

SEQ ID NO: 53574 - RNA, 22 nt, Homo sapiens
aggaacuguaacuaugucucug

SEQ ID NO: 53575 - RNA, 22 nt, Homo sapiens
agcuuuuugggaggccuuagga

SEQ ID NO: 53576 - RNA, 21 nt, Homo sapiens
aggaagacuaugaucaauugg

SEQ ID NO: 53577 - RNA, 22 nt, Homo sapiens
aggaagguaaacuaacuugccu

SEQ ID NO: 53578 - RNA, 22 nt, Homo sapiens
agcuuuuugggcagcuauugac

SEQ ID NO: 53579 - RNA, 22 nt, Homo sapiens
aggauacugguaugggcugaau

SEQ ID NO: 53580 - RNA, 21 nt, Homo sapiens
aggagauguuuguccuuuuag

SEQ ID NO: 53581 - RNA, 22 nt, Homo sapiens
aggagaugaagcuuuaucuaaa

SEQ ID NO: 53582 - RNA, 21 nt, Homo sapiens
aggauaguagauuaaauauuu

SEQ ID NO: 53583 - RNA, 22 nt, Homo sapiens
aggauuagagacuucucuaccu

SEQ ID NO: 53584 - RNA, 22 nt, Homo sapiens
agguaauagcacaugauaccuu

SEQ ID NO: 53585 - RNA, 22 nt, Homo sapiens
aggcuuauuaagauucccuuau

SEQ ID NO: 53586 - RNA, 22 nt, Homo sapiens
aggcuuuuguuuuggucucagg

SEQ ID NO: 53587 - RNA, 22 nt, Homo sapiens
aggcaugaguucagaggguaug

SEQ ID NO: 53588 - RNA, 22 nt, Homo sapiens
aggcaugaaauacaugcauuga

SEQ ID NO: 53589 - RNA, 18 nt, Homo sapiens
acuggauguaaagggucc

SEQ ID NO: 53590 - RNA, 22 nt, Homo sapiens
acuggauguuagggauuuuauu

SEQ ID NO: 53591 - RNA, 22 nt, Homo sapiens
acuguguguuugucuagcacag

SEQ ID NO: 53592 - RNA, 22 nt, Homo sapiens
acuuggcaaaguuuuaaacagc

SEQ ID NO: 53593 - RNA, 22 nt, Homo sapiens
acuguauagauggaguugauuu

SEQ ID NO: 53594 - RNA, 22 nt, Homo sapiens
agagaucauuuuguuucaaauc

SEQ ID NO: 53595 - RNA, 22 nt, Homo sapiens
agagcaaugggugaauauuaaa

SEQ ID NO: 53596 - RNA, 20 nt, Homo sapiens
agagcaaagccgcaccccua

SEQ ID NO: 53597 - RNA, 22 nt, Homo sapiens
agagaucacugaaucacggggg

SEQ ID NO: 53598 - RNA, 22 nt, Homo sapiens
agagauuauccuggcuucucug

SEQ ID NO: 53599 - RNA, 22 nt, Homo sapiens
agagguguuaaagucucuuuua

SEQ ID NO: 53600 - RNA, 22 nt, Homo sapiens
agagguuuaauugauucacagu

SEQ ID NO: 53601 - RNA, 22 nt, Homo sapiens
agccuauccaauaucagugaga

SEQ ID NO: 53602 - RNA, 22 nt, Homo sapiens
agcccagagacuguguaaauuu

SEQ ID NO: 53603 - RNA, 22 nt, Homo sapiens
agccauacaacguaugcaugua

SEQ ID NO: 53604 - RNA, 22 nt, Homo sapiens
agcauuaguugugaagccuuua

SEQ ID NO: 53605 - RNA, 22 nt, Homo sapiens
agcagcauggguauaaaucucc

SEQ ID NO: 53606 - RNA, 22 nt, Homo sapiens
agcagcaugcaaauggacuaau

SEQ ID NO: 53607 - RNA, 22 nt, Homo sapiens
agcaccacauacuacagagaua

SEQ ID NO: 53608 - RNA, 22 nt, Homo sapiens
agaguauacaugugagugagau

SEQ ID NO: 53609 - RNA, 22 nt, Homo sapiens
agcaccauuucucuaaagcacu

SEQ ID NO: 53610 - RNA, 23 nt, Homo sapiens
agcaccaccccaggucacaagug

SEQ ID NO: 53611 - RNA, 22 nt, Homo sapiens
agcacgaaaccaaauucuguga

SEQ ID NO: 53612 - RNA, 22 nt, Homo sapiens
aaggaaguaauuugguuuauag

SEQ ID NO: 53613 - RNA, 22 nt, Homo sapiens
aagcuguugguggaucuaccau

SEQ ID NO: 53614 - RNA, 22 nt, Homo sapiens
aagcuguugguggauguaccau

SEQ ID NO: 53615 - RNA, 22 nt, Homo sapiens
aaggauuguaaaguugacaaau

SEQ ID NO: 53616 - RNA, 22 nt, Homo sapiens
aaggcaugcaaagaacauuuua

SEQ ID NO: 53617 - RNA, 22 nt, Homo sapiens
aaggcgguguggauccuacagc

SEQ ID NO: 53618 - RNA, 22 nt, Homo sapiens
aaugcacauauauuuccuuauu

SEQ ID NO: 53619 - RNA, 22 nt, Homo sapiens
aaugcacauaaaauccuccagg

SEQ ID NO: 53620 - RNA, 22 nt, Homo sapiens
aaugauauguuauguuuagguu

SEQ ID NO: 53621 - RNA, 22 nt, Homo sapiens
aaugacagccagauucuucucu

SEQ ID NO: 53622 - RNA, 22 nt, Homo sapiens
aaucugauguuaucagcuuaag

SEQ ID NO: 53623 - RNA, 22 nt, Homo sapiens
aaucugucuuuuguuauugagg

SEQ ID NO: 53624 - RNA, 22 nt, Homo sapiens
aaucugucaguuuuguguuaau

SEQ ID NO: 53625 - RNA, 22 nt, Homo sapiens
aaucuguagaaggugcacauuc

SEQ ID NO: 53626 - RNA, 22 nt, Homo sapiens
aauucuguauuguuuagggacu

SEQ ID NO: 53627 - RNA, 22 nt, Homo sapiens
aauugccucaagugaucauggc

SEQ ID NO: 53628 - RNA, 22 nt, Homo sapiens
aauugcacuggaaguaacugag

SEQ ID NO: 53629 - RNA, 22 nt, Homo sapiens
aauugcaccaucuagaucaaga

SEQ ID NO: 53630 - RNA, 22 nt, Homo sapiens
acaagcacaaauuuaauccugu

SEQ ID NO: 53631 - RNA, 20 nt, Homo sapiens
acaaaugcauucugugacau

SEQ ID NO: 53632 - RNA, 22 nt, Homo sapiens
acaaaguauggaauguuggugu

SEQ ID NO: 53633 - RNA, 22 nt, Homo sapiens
acaaagugccuccuuuuagagu

SEQ ID NO: 53634 - RNA, 22 nt, Homo sapiens
aauugguuaagauaagaucaua

SEQ ID NO: 53635 - RNA, 22 nt, Homo sapiens
acagagcaaugagcuacggucu

SEQ ID NO: 53636 - RNA, 22 nt, Homo sapiens
acagauagacauauauagcuca

SEQ ID NO: 53637 - RNA, 22 nt, Homo sapiens
acacuguagcugagggcaugcg

SEQ ID NO: 53638 - RNA, 22 nt, Homo sapiens
acacuguugacauuuuguagug

SEQ ID NO: 53639 - RNA, 22 nt, Homo sapiens
acacuguauccuucuguccuuu

SEQ ID NO: 53640 - RNA, 22 nt, Homo sapiens
acacuuucuggagcugcacaua

SEQ ID NO: 53641 - RNA, 20 nt, Homo sapiens
acacugugcuaaggauuuuc

SEQ ID NO: 53642 - RNA, 22 nt, Homo sapiens
accuuguaucuguuaggauugc

SEQ ID NO: 53643 - RNA, 22 nt, Homo sapiens
accuugcacugagccgagauug

SEQ ID NO: 53644 - RNA, 22 nt, Homo sapiens
accugcacagccgaacauagac

SEQ ID NO: 53645 - RNA, 22 nt, Homo sapiens
acaucccuuucccacccuucac

SEQ ID NO: 53646 - RNA, 18 nt, Homo sapiens
acaucccaugcuggggug

SEQ ID NO: 53647 - RNA, 22 nt, Homo sapiens
acaugccucccugguccgcugu

SEQ ID NO: 53648 - RNA, 19 nt, Homo sapiens
acauggauuuugugcaaac

SEQ ID NO: 53649 - RNA, 22 nt, Homo sapiens
acauaugaguacaugugccaug

SEQ ID NO: 53650 - RNA, 22 nt, Homo sapiens
acaguguuccuuuguugugacu

SEQ ID NO: 53651 - RNA, 22 nt, Homo sapiens
acauacacuagggauguggugu

SEQ ID NO: 53652 - RNA, 22 nt, Homo sapiens
acccugucacucccaucaauuu

SEQ ID NO: 53653 - RNA, 22 nt, Homo sapiens
acccgugcugaauauguaggug

SEQ ID NO: 53654 - RNA, 22 nt, Homo sapiens
acccgcccagguguggccggga

SEQ ID NO: 53655 - RNA, 22 nt, Homo sapiens
auacaagugccauguuggugug

SEQ ID NO: 53656 - RNA, 22 nt, Homo sapiens
auaauugcuaagugaagauggu

SEQ ID NO: 53657 - RNA, 22 nt, Homo sapiens
auaaucacacccagguuaaaug

SEQ ID NO: 53658 - RNA, 22 nt, Homo sapiens
auaauaguguuuagauuuggga

SEQ ID NO: 53659 - RNA, 23 nt, Homo sapiens
auaaacugucaaaagccagcccu

SEQ ID NO: 53660 - RNA, 18 nt, Homo sapiens
aguuguuuuauccugccc

SEQ ID NO: 53661 - RNA, 22 nt, Homo sapiens
auaaguauuuggacuuuacugu

SEQ ID NO: 53662 - RNA, 17 nt, Homo sapiens
auaaacucaucauuuuu

SEQ ID NO: 53663 - RNA, 22 nt, Homo sapiens
auagcaaugcaagaauggcuua

SEQ ID NO: 53664 - RNA, 22 nt, Homo sapiens
auagaguccugcucgaguugcu

SEQ ID NO: 53665 - RNA, 22 nt, Homo sapiens
auagaucuauuuauguaucccu

SEQ ID NO: 53666 - RNA, 22 nt, Homo sapiens
auagcacaguguguguacacca

SEQ ID NO: 53667 - RNA, 22 nt, Homo sapiens
auagcacauggcauccucucuu

SEQ ID NO: 53668 - RNA, 22 nt, Homo sapiens
auagcacacuauagcuucaaac

SEQ ID NO: 53669 - RNA, 22 nt, Homo sapiens
auagacacugaaaucccugcca

SEQ ID NO: 53670 - RNA, 22 nt, Homo sapiens
auagaauguauuaguaaauuug

SEQ ID NO: 53671 - RNA, 22 nt, Homo sapiens
aguguuuuuacaagcacucugg

SEQ ID NO: 53672 - RNA, 22 nt, Homo sapiens
aguaccacgugaugccauuuuc

SEQ ID NO: 53673 - RNA, 22 nt, Homo sapiens
aguaagauggcaacucuccaca

SEQ ID NO: 53674 - RNA, 22 nt, Homo sapiens
agguuuucagccccagccuagg

SEQ ID NO: 53675 - RNA, 22 nt, Homo sapiens
aguugcaagucuugaguaaaga

SEQ ID NO: 53676 - RNA, 22 nt, Homo sapiens
aguguuuuucaugggauacuuu

SEQ ID NO: 53677 - RNA, 22 nt, Homo sapiens
aggugcuugaaucuaugagcuc

SEQ ID NO: 53678 - RNA, 22 nt, Homo sapiens
auagcagcaccucacucuacug

SEQ ID NO: 53679 - RNA, 22 nt, Homo sapiens
auagguauuuuuaaaugacugu

SEQ ID NO: 53680 - RNA, 22 nt, Homo sapiens
auagucaaaucucauuaccccc

SEQ ID NO: 53681 - RNA, 22 nt, Homo sapiens
auauguucucauucauaugugg

SEQ ID NO: 53682 - RNA, 23 nt, Homo sapiens
auauaguagaugugcaguaacau

SEQ ID NO: 53683 - RNA, 22 nt, Homo sapiens
auauugguuaaauauuauguga

SEQ ID NO: 53684 - RNA, 22 nt, Homo sapiens
auauugcuccuaauaccacggu

SEQ ID NO: 53685 - RNA, 22 nt, Homo sapiens
auauuggacucugugcuaggaa

SEQ ID NO: 53686 - RNA, 22 nt, Homo sapiens
auauucacagguaucagagauu

SEQ ID NO: 53687 - RNA, 21 nt, Homo sapiens
auauuacuguuagaggacugc

SEQ ID NO: 53688 - RNA, 22 nt, Homo sapiens
aucacagagucacgggcaacuu

SEQ ID NO: 53689 - RNA, 22 nt, Homo sapiens
aucacagcuacuccucugucuu

SEQ ID NO: 53690 - RNA, 22 nt, Homo sapiens
aucacagcccuccucuuggaug

SEQ ID NO: 53691 - RNA, 22 nt, Homo sapiens
aucacagugagcauaugucuau

SEQ ID NO: 53692 - RNA, 22 nt, Homo sapiens
aucaaguacuguacugaaagug

SEQ ID NO: 53693 - RNA, 22 nt, Homo sapiens
aucaaaguaggcauauguuuuu

SEQ ID NO: 53694 - RNA, 22 nt, Homo sapiens
aucaaagugaaauauuaguuau

SEQ ID NO: 53695 - RNA, 22 nt, Homo sapiens
aucaaaguaucucaauauggua

SEQ ID NO: 53696 - RNA, 22 nt, Homo sapiens
aucauauccuagauauaacuuc

SEQ ID NO: 53697 - RNA, 22 nt, Homo sapiens
aucaucacaguuguguguaaug

SEQ ID NO: 53698 - RNA, 22 nt, Homo sapiens
aucauaucaucugcaaacaaag

SEQ ID NO: 53699 - RNA, 23 nt, Homo sapiens
aucagguuguagaauguguuugc

SEQ ID NO: 53700 - RNA, 22 nt, Homo sapiens
aucagcauucccaaaugaugug

SEQ ID NO: 53701 - RNA, 22 nt, Homo sapiens
aucagucuguuggaauaucgcu

SEQ ID NO: 53702 - RNA, 22 nt, Homo sapiens
aucaccagaugcuucaagcaga

SEQ ID NO: 53703 - RNA, 22 nt, Homo sapiens
aucacaguuaagaggugaugaa

SEQ ID NO: 53704 - RNA, 22 nt, Homo sapiens
aucacaguggcucacaagagcc

SEQ ID NO: 53705 - RNA, 19 nt, Homo sapiens
aucagcacaagugugcuuu

SEQ ID NO: 53706 - RNA, 22 nt, Homo sapiens
auggucccuguuccaugcuccu

SEQ ID NO: 53707 - RNA, 22 nt, Homo sapiens
augguauuuaacagucuuucua

SEQ ID NO: 53708 - RNA, 22 nt, Homo sapiens
augggagugugguuagagaccu

SEQ ID NO: 53709 - RNA, 22 nt, Homo sapiens
augucuagagugauacugaagc

SEQ ID NO: 53710 - RNA, 20 nt, Homo sapiens
augucaggaagggagucagg

SEQ ID NO: 53711 - RNA, 22 nt, Homo sapiens
auguaguaugaagaagaugcuu

SEQ ID NO: 53712 - RNA, 22 nt, Homo sapiens
auggcuuuuuaaaucauguugu

SEQ ID NO: 53713 - RNA, 22 nt, Homo sapiens
auggcuuuuauuguguugaggu

SEQ ID NO: 53714 - RNA, 22 nt, Homo sapiens
auggcuuugggcugcucugccc

SEQ ID NO: 53715 - RNA, 22 nt, Homo sapiens
auggcuuuggucucccagugau

SEQ ID NO: 53716 - RNA, 22 nt, Homo sapiens
auggacuuuuuguucagugucu

SEQ ID NO: 53717 - RNA, 19 nt, Homo sapiens
auggauacauuuucugcua

SEQ ID NO: 53718 - RNA, 22 nt, Homo sapiens
auggaguuuacuuaguguaaua

SEQ ID NO: 53719 - RNA, 21 nt, Homo sapiens
auggacaugguuaggcuuugu

SEQ ID NO: 53720 - RNA, 20 nt, Homo sapiens
auggaccuggauuaacagca

SEQ ID NO: 53721 - RNA, 22 nt, Homo sapiens
auggaagcugauuagauaguac

SEQ ID NO: 53722 - RNA, 22 nt, Homo sapiens
augccacugcacuucagcuugg

SEQ ID NO: 53723 - RNA, 22 nt, Homo sapiens
augccacuguuuaugucacuua

SEQ ID NO: 53724 - RNA, 22 nt, Homo sapiens
augcaugucaaauuuguagguu

SEQ ID NO: 53725 - RNA, 18 nt, Homo sapiens
augagagccgauuccugg

SEQ ID NO: 53726 - RNA, 22 nt, Homo sapiens
augagaugaggaauggcccucc

SEQ ID NO: 53727 - RNA, 22 nt, Homo sapiens
augagaucugugaacaccuguc

SEQ ID NO: 53728 - RNA, 22 nt, Homo sapiens
augagauuauguaaagagacca

SEQ ID NO: 53729 - RNA, 22 nt, Homo sapiens
augagaaucauuucagcuugua

SEQ ID NO: 53730 - RNA, 22 nt, Homo sapiens
augagaacugucaaugagagcu

SEQ ID NO: 53731 - RNA, 22 nt, Homo sapiens
augagacuagaagagaauaaua

SEQ ID NO: 53732 - RNA, 22 nt, Homo sapiens
augagacuguucuuccucauug

SEQ ID NO: 53733 - RNA, 22 nt, Homo sapiens
augagacaguucccuuuaucuu

SEQ ID NO: 53734 - RNA, 22 nt, Homo sapiens
augaaugcagcacuguuuuucu

SEQ ID NO: 53735 - RNA, 22 nt, Homo sapiens
augaaguguguguucaagucuu

SEQ ID NO: 53736 - RNA, 22 nt, Homo sapiens
augaacucaucauuuuuugugg

SEQ ID NO: 53737 - RNA, 22 nt, Homo sapiens
augaagaucucugccuuguguc

SEQ ID NO: 53738 - RNA, 20 nt, Homo sapiens
augaagugaaguuagggaac

SEQ ID NO: 53739 - RNA, 22 nt, Homo sapiens
augaacgugugcauauaagcag

SEQ ID NO: 53740 - RNA, 18 nt, Homo sapiens
augaagucaucacuuuua

SEQ ID NO: 53741 - RNA, 22 nt, Homo sapiens
aucauugcacaucacagccuca

SEQ ID NO: 53742 - RNA, 22 nt, Homo sapiens
augaaagugauaaaugucucua

SEQ ID NO: 53743 - RNA, 18 nt, Homo sapiens
aucauugcacugucuugc

SEQ ID NO: 53744 - RNA, 22 nt, Homo sapiens
aucauguuuauguguaggauau

SEQ ID NO: 53745 - RNA, 22 nt, Homo sapiens
aucaucaugcacuacagccugg

SEQ ID NO: 53746 - RNA, 22 nt, Homo sapiens
augaaaguguguggaaacuuga

SEQ ID NO: 53747 - RNA, 22 nt, Homo sapiens
augaaauguaugagucuggguu

SEQ ID NO: 53748 - RNA, 22 nt, Homo sapiens
augaacagagccuugagaaccu

SEQ ID NO: 53749 - RNA, 22 nt, Homo sapiens
augaacacuccaauuguacucc

SEQ ID NO: 53750 - RNA, 22 nt, Homo sapiens
augaaaucacugugaugcccua

SEQ ID NO: 53751 - RNA, 17 nt, Homo sapiens
augaacucaucguucuu

SEQ ID NO: 53752 - RNA, 18 nt, Homo sapiens
augaacucaucauuuuua

SEQ ID NO: 53753 - RNA, 22 nt, Homo sapiens
augaggugcagaggaaaugagu

SEQ ID NO: 53754 - RNA, 22 nt, Homo sapiens
augaggugauaucuggaaauua

SEQ ID NO: 53755 - RNA, 21 nt, Homo sapiens
augagauguuagacuuuagac

SEQ ID NO: 53756 - RNA, 22 nt, Homo sapiens
augagcuauggagacagggcca

SEQ ID NO: 53757 - RNA, 22 nt, Homo sapiens
augagcucauaaagagugauuu

SEQ ID NO: 53758 - RNA, 22 nt, Homo sapiens
augcagacacaaguuauaguaa

SEQ ID NO: 53759 - RNA, 22 nt, Homo sapiens
augcacuguuguuauuggauaa

SEQ ID NO: 53760 - RNA, 22 nt, Homo sapiens
augcagugugcaacagauuaag

SEQ ID NO: 53761 - RNA, 22 nt, Homo sapiens
augcauauuccugggccucacu

SEQ ID NO: 53762 - RNA, 22 nt, Homo sapiens
augauagguuuagguuuagaca

SEQ ID NO: 53763 - RNA, 22 nt, Homo sapiens
augcacauggcuaacuuuuuuc

SEQ ID NO: 53764 - RNA, 22 nt, Homo sapiens
augauacugaguugaguucuca

SEQ ID NO: 53765 - RNA, 22 nt, Homo sapiens
aaacugucuucugacaguuucc

SEQ ID NO: 53766 - RNA, 22 nt, Homo sapiens
aaacuugucuaauuauaagcau

SEQ ID NO: 53767 - RNA, 22 nt, Homo sapiens
aaacccauauaccagcugugcu

SEQ ID NO: 53768 - RNA, 22 nt, Homo sapiens
aaacccguagauccgaucuugu

SEQ ID NO: 53769 - RNA, 22 nt, Homo sapiens
aaacgugcagagaucaauagca

SEQ ID NO: 53770 - RNA, 22 nt, Homo sapiens
aaagaguucagguagauuucaa

SEQ ID NO: 53771 - RNA, 18 nt, Homo sapiens
aaacagugucucuuucug

SEQ ID NO: 53772 - RNA, 22 nt, Homo sapiens
aaaagucuguagugaaagguga

SEQ ID NO: 53773 - RNA, 21 nt, Homo sapiens
aagaaagcuggacuugccgcu

SEQ ID NO: 53774 - RNA, 22 nt, Homo sapiens
aacuugcacuugauugagagcu

SEQ ID NO: 53775 - RNA, 22 nt, Homo sapiens
aacugcuguuuggguacuggug

SEQ ID NO: 53776 - RNA, 22 nt, Homo sapiens
aacucacauucuuucuugguac

SEQ ID NO: 53777 - RNA, 22 nt, Homo sapiens
aacucugucuccuucaaguuca

SEQ ID NO: 53778 - RNA, 22 nt, Homo sapiens
aagagagcuaugugcauaauua

SEQ ID NO: 53779 - RNA, 22 nt, Homo sapiens
aacuaggccuagaaguugagua

SEQ ID NO: 53780 - RNA, 22 nt, Homo sapiens
aacaccauuuuucugcagccuu

SEQ ID NO: 53781 - RNA, 22 nt, Homo sapiens
aacaccaucccuuugaugcuuu

SEQ ID NO: 53782 - RNA, 22 nt, Homo sapiens
aaauuguccuacugguuugagu

SEQ ID NO: 53783 - RNA, 22 nt, Homo sapiens
aaaugucauggaguguuucccc

SEQ ID NO: 53784 - RNA, 22 nt, Homo sapiens
aaaugcagauuccuaggcccca

SEQ ID NO: 53785 - RNA, 22 nt, Homo sapiens
aaauccauuuguucagcuaugc

SEQ ID NO: 53786 - RNA, 15 nt, Homo sapiens
aaauaugucaguucu

SEQ ID NO: 53787 - RNA, 22 nt, Homo sapiens
aaaugcauugagggaaaaggca

SEQ ID NO: 53788 - RNA, 22 nt, Homo sapiens
aaaugcucuuuaugaaguugga

SEQ ID NO: 53789 - RNA, 22 nt, Homo sapiens
aaaugcaugaauaagcucgugu

SEQ ID NO: 53790 - RNA, 22 nt, Homo sapiens
aaacucuguagcagagacagau

SEQ ID NO: 53791 - RNA, 20 nt, Homo sapiens
aaacucugucuucuuuauca

SEQ ID NO: 53792 - RNA, 23 nt, Homo sapiens
aaagacuagucaggugcaguggu

SEQ ID NO: 53793 - RNA, 22 nt, Homo sapiens
aaagaagucagccuguccuuug

SEQ ID NO: 53794 - RNA, 22 nt, Homo sapiens
aaagcacuggagucaucaucua

SEQ ID NO: 53795 - RNA, 22 nt, Homo sapiens
aaagcugucaaggcaggaggcu

SEQ ID NO: 53796 - RNA, 23 nt, Homo sapiens
aagugagcuccaauugggugaga

SEQ ID NO: 53797 - RNA, 22 nt, Homo sapiens
aagugacuagacuaugaaaccu

SEQ ID NO: 53798 - RNA, 22 nt, Homo sapiens
aagucaguuugggagaagcuau

SEQ ID NO: 53799 - RNA, 22 nt, Homo sapiens
aagugaaugaugugaaguguaa

SEQ ID NO: 53800 - RNA, 22 nt, Homo sapiens
aagugaaugugcuggaauagcu

SEQ ID NO: 53801 - RNA, 20 nt, Homo sapiens
aagugcaucguugugucugc

SEQ ID NO: 53802 - RNA, 22 nt, Homo sapiens
aauaagcauaguaccugauagg

SEQ ID NO: 53803 - RNA, 22 nt, Homo sapiens
aauaaguugagaugaggucaua

SEQ ID NO: 53804 - RNA, 22 nt, Homo sapiens
aaguaauugagguuuuugcugu

SEQ ID NO: 53805 - RNA, 22 nt, Homo sapiens
aaguaaacauuuuguacaauaa

SEQ ID NO: 53806 - RNA, 22 nt, Homo sapiens
aaguaguuaggaacauucucuc

SEQ ID NO: 53807 - RNA, 22 nt, Homo sapiens
aaguauagcuaugauaaacauu

SEQ ID NO: 53808 - RNA, 22 nt, Homo sapiens
aagcucauugagaucuauggcu

SEQ ID NO: 53809 - RNA, 22 nt, Homo sapiens
aaggaacuggaauauuuugaac

SEQ ID NO: 53810 - RNA, 21 nt, Homo sapiens
aagguuuuuagugcuugacuu

SEQ ID NO: 53811 - RNA, 22 nt, Homo sapiens
aaguaaacauugagagacaaga

SEQ ID NO: 53812 - RNA, 17 nt, Homo sapiens
aaugagacauuucugcu

SEQ ID NO: 53813 - RNA, 22 nt, Homo sapiens
aaugcuaucuggaacauuguug

SEQ ID NO: 53814 - RNA, 22 nt, Homo sapiens
aaucucagagauaucugugucc

SEQ ID NO: 53815 - RNA, 22 nt, Homo sapiens
aaucagcacacugugcuuucca

SEQ ID NO: 53816 - RNA, 22 nt, Homo sapiens
aauccauuugccgucuauccau

SEQ ID NO: 53817 - RNA, 20 nt, Homo sapiens
aaucuacuugcccauuuagc

SEQ ID NO: 53818 - RNA, 21 nt, Homo sapiens
aaucacaguuguucugccuuc

SEQ ID NO: 53819 - RNA, 22 nt, Homo sapiens
aauaucacaggguguacacuca

SEQ ID NO: 53820 - RNA, 22 nt, Homo sapiens
aauacugugauaucgagcgauu

SEQ ID NO: 53821 - RNA, 22 nt, Homo sapiens
aauacugcuuugauguaagcua

SEQ ID NO: 53822 - RNA, 22 nt, Homo sapiens
aauacucaguccuggugaggcu

SEQ ID NO: 53823 - RNA, 22 nt, Homo sapiens
acuuugcuuagagggcauuaaa

SEQ ID NO: 53824 - RNA, 22 nt, Homo sapiens
agaaacacagguggaauugcuu

SEQ ID NO: 53825 - RNA, 22 nt, Homo sapiens
agaaacauucucuugccuccuu

SEQ ID NO: 53826 - RNA, 22 nt, Homo sapiens
acuuuuguuauacagugugaua

SEQ ID NO: 53827 - RNA, 22 nt, Homo sapiens
agagaucaauaugaaggaaaug

SEQ ID NO: 53828 - RNA, 20 nt, Homo sapiens
agagaucaguaauucaucaa

SEQ ID NO: 53829 - RNA, 22 nt, Homo sapiens
agaaccaaucccacauggauac

SEQ ID NO: 53830 - RNA, 22 nt, Homo sapiens
agaacacugaguucagggucag

SEQ ID NO: 53831 - RNA, 23 nt, Homo sapiens
agaaaugucuauucagggucccu

SEQ ID NO: 53832 - RNA, 22 nt, Homo sapiens
agagcauugaguuaaugguuca

SEQ ID NO: 53833 - RNA, 22 nt, Homo sapiens
agagcacuguggguccaaauau

SEQ ID NO: 53834 - RNA, 22 nt, Homo sapiens
agagaugauuaacauuuuggua

SEQ ID NO: 53835 - RNA, 22 nt, Homo sapiens
agagugcaauggcaccaucucg

SEQ ID NO: 53836 - RNA, 22 nt, Homo sapiens
agaguacaggcaaguuagucau

SEQ ID NO: 53837 - RNA, 20 nt, Homo sapiens
agagguuuugauagguucug

SEQ ID NO: 53838 - RNA, 22 nt, Homo sapiens
agaguaguuuauuaugcuaagg

SEQ ID NO: 53839 - RNA, 22 nt, Homo sapiens
agaguauagcaacuuaguaaaa

SEQ ID NO: 53840 - RNA, 22 nt, Homo sapiens
agaugguguuggcugaguguau

SEQ ID NO: 53841 - RNA, 22 nt, Homo sapiens
agauaugucugcuauuugcugu

SEQ ID NO: 53842 - RNA, 22 nt, Homo sapiens
agauauguuauugauguuaaug

SEQ ID NO: 53843 - RNA, 22 nt, Homo sapiens
agauauguuuaguuucaaaaug

SEQ ID NO: 53844 - RNA, 22 nt, Homo sapiens
agaucaauugcugauucgcucu

SEQ ID NO: 53845 - RNA, 22 nt, Homo sapiens
agaucacagucuuugguuuuag

SEQ ID NO: 53846 - RNA, 20 nt, Homo sapiens
agaugcaugcacauaaacac

SEQ ID NO: 53847 - RNA, 18 nt, Homo sapiens
acauucagcuugaagaua

SEQ ID NO: 53848 - RNA, 22 nt, Homo sapiens
accacagugcuuccugcucacg

SEQ ID NO: 53849 - RNA, 22 nt, Homo sapiens
accaccacucccgcauucuaaa

SEQ ID NO: 53850 - RNA, 22 nt, Homo sapiens
accaguuuuuuauacaucuucu

SEQ ID NO: 53851 - RNA, 22 nt, Homo sapiens
accaccauugcacugaacuuuc

SEQ ID NO: 53852 - RNA, 22 nt, Homo sapiens
accauugcacuccagccugggc

SEQ ID NO: 53853 - RNA, 22 nt, Homo sapiens
accauugcacuccagccuuggc

SEQ ID NO: 53854 - RNA, 22 nt, Homo sapiens
acccagaagucauucaggaaca

SEQ ID NO: 53855 - RNA, 22 nt, Homo sapiens
acccuacauaguagauccuaca

SEQ ID NO: 53856 - RNA, 22 nt, Homo sapiens
acccucaagggacugacagaau

SEQ ID NO: 53857 - RNA, 22 nt, Homo sapiens
acaugcauggcaugcauuguac

SEQ ID NO: 53858 - RNA, 22 nt, Homo sapiens
acauaaagaagcaggacauugu

SEQ ID NO: 53859 - RNA, 22 nt, Homo sapiens
acauacuucuuuacauuccaua

SEQ ID NO: 53860 - RNA, 22 nt, Homo sapiens
acaucuguacaguggguguggu

SEQ ID NO: 53861 - RNA, 22 nt, Homo sapiens
acaucccaugccuggguacucc

SEQ ID NO: 53862 - RNA, 22 nt, Homo sapiens
aaugguuuuaucagcguccaaa

SEQ ID NO: 53863 - RNA, 22 nt, Homo sapiens
aauuacauggcaauugggaaau

SEQ ID NO: 53864 - RNA, 22 nt, Homo sapiens
aauguguuuugaaaucaggaag

SEQ ID NO: 53865 - RNA, 22 nt, Homo sapiens
aauggcauuugccagggcaaag

SEQ ID NO: 53866 - RNA, 22 nt, Homo sapiens
aaugcuguucuuugcuuaaguu

SEQ ID NO: 53867 - RNA, 22 nt, Homo sapiens
aaugcuguguuauuucaugacc

SEQ ID NO: 53868 - RNA, 22 nt, Homo sapiens
agugcauugcaucucugcuuca

SEQ ID NO: 53869 - RNA, 22 nt, Homo sapiens
agugagcuggagaaaagaaacu

SEQ ID NO: 53870 - RNA, 22 nt, Homo sapiens
agugagcuguuuuuacuuucug

SEQ ID NO: 53871 - RNA, 22 nt, Homo sapiens
agugagcugcagucuggggucc

SEQ ID NO: 53872 - RNA, 22 nt, Homo sapiens
agguaaacauggggacugcuac

SEQ ID NO: 53873 - RNA, 22 nt, Homo sapiens
agucagugcauaagaaugaagu

SEQ ID NO: 53874 - RNA, 23 nt, Homo sapiens
agucaguaugcuccuuggauccc

SEQ ID NO: 53875 - RNA, 20 nt, Homo sapiens
agguagauagaugauagaua

SEQ ID NO: 53876 - RNA, 22 nt, Homo sapiens
auaaacagcuuauccucuauuc

SEQ ID NO: 53877 - RNA, 22 nt, Homo sapiens
auaaaagcaggucuaggucagg

SEQ ID NO: 53878 - RNA, 18 nt, Homo sapiens
auaaacucaucauuuuua

SEQ ID NO: 53879 - RNA, 22 nt, Homo sapiens
aguuuuugcugauagcaugcuu

SEQ ID NO: 53880 - RNA, 22 nt, Homo sapiens
aguuggugauugauugggucug

SEQ ID NO: 53881 - RNA, 21 nt, Homo sapiens
aguucacauggcuccuguguu

SEQ ID NO: 53882 - RNA, 22 nt, Homo sapiens
auaaaugcauugagaacugcug

SEQ ID NO: 53883 - RNA, 22 nt, Homo sapiens
auaaagacacuuggcaugauuu

SEQ ID NO: 53884 - RNA, 22 nt, Homo sapiens
auaaagcuauuccucucuuuuu

SEQ ID NO: 53885 - RNA, 22 nt, Homo sapiens
auaaaguguuuaguauaggcaa

SEQ ID NO: 53886 - RNA, 22 nt, Homo sapiens
aguguuuuuaacaagaaagggu

SEQ ID NO: 53887 - RNA, 22 nt, Homo sapiens
aguuagcaaaacucccaaaggu

SEQ ID NO: 53888 - RNA, 22 nt, Homo sapiens
aguuaguguugugauaaaucca

SEQ ID NO: 53889 - RNA, 22 nt, Homo sapiens
aguguuuuuaucaugaaagggu

SEQ ID NO: 53890 - RNA, 22 nt, Homo sapiens
agcaccaugggcugaguaagug

SEQ ID NO: 53891 - RNA, 22 nt, Homo sapiens
agcaagacauggcuuccaaaug

SEQ ID NO: 53892 - RNA, 22 nt, Homo sapiens
agcaaccuugaauagcccuuuc

SEQ ID NO: 53893 - RNA, 22 nt, Homo sapiens
agcucauugcuguccuggagga

SEQ ID NO: 53894 - RNA, 22 nt, Homo sapiens
aggauaguaaugauagagaggc

SEQ ID NO: 53895 - RNA, 22 nt, Homo sapiens
agcuucauuccaacuuccuucu

SEQ ID NO: 53896 - RNA, 22 nt, Homo sapiens
aggcaguuucagugagagguga

SEQ ID NO: 53897 - RNA, 22 nt, Homo sapiens
aacaccuugcagggauuaugac

SEQ ID NO: 53898 - RNA, 22 nt, Homo sapiens
aggcauguggcucuguucugac

SEQ ID NO: 53899 - RNA, 22 nt, Homo sapiens
aacaccguagaaacacaaggga

SEQ ID NO: 53900 - RNA, 22 nt, Homo sapiens
aggcaggugaaagauaguuuua

SEQ ID NO: 53901 - RNA, 22 nt, Homo sapiens
aggcagaugagguccucagcug

SEQ ID NO: 53902 - RNA, 22 nt, Homo sapiens
augguguccuguuuccccagga

SEQ ID NO: 53903 - RNA, 22 nt, Homo sapiens
augguguauugauuauugcugu

SEQ ID NO: 53904 - RNA, 22 nt, Homo sapiens
auggucuuuuuguuaugagaga

SEQ ID NO: 53905 - RNA, 22 nt, Homo sapiens
auggucuuuguuucuaauucug

SEQ ID NO: 53906 - RNA, 22 nt, Homo sapiens
auggucuuuauuguguugagug

SEQ ID NO: 53907 - RNA, 22 nt, Homo sapiens
auggcguggagauauggucagc

SEQ ID NO: 53908 - RNA, 22 nt, Homo sapiens
auggcuauucuucuuuugucag

SEQ ID NO: 53909 - RNA, 22 nt, Homo sapiens
auggccauuacuaagaauguuu

SEQ ID NO: 53910 - RNA, 22 nt, Homo sapiens
auggcacugccuggcuucaugg

SEQ ID NO: 53911 - RNA, 22 nt, Homo sapiens
auggcaucgucaccuuuucagu

SEQ ID NO: 53912 - RNA, 22 nt, Homo sapiens
augagauauuuuauaagaucau

SEQ ID NO: 53913 - RNA, 22 nt, Homo sapiens
augagaacauaucaagugauug

SEQ ID NO: 53914 - RNA, 22 nt, Homo sapiens
augagauaggaacaaacuuaca

SEQ ID NO: 53915 - RNA, 22 nt, Homo sapiens
augagaugcaagauuagauggg

SEQ ID NO: 53916 - RNA, 22 nt, Homo sapiens
augauaaguuauuagaagaaga

SEQ ID NO: 53917 - RNA, 22 nt, Homo sapiens
augauacuggcuucauagaaug

SEQ ID NO: 53918 - RNA, 22 nt, Homo sapiens
augagauuguuuguacuccaca

SEQ ID NO: 53919 - RNA, 22 nt, Homo sapiens
augaucauggaaguuuuccugu

SEQ ID NO: 53920 - RNA, 22 nt, Homo sapiens
augauagucuugagaagcauuu

SEQ ID NO: 53921 - RNA, 22 nt, Homo sapiens
augauauggguugucaguugua

SEQ ID NO: 53922 - RNA, 22 nt, Homo sapiens
augaucacaccacugcacucca

SEQ ID NO: 53923 - RNA, 22 nt, Homo sapiens
augauguguguuuaagaugucu

SEQ ID NO: 53924 - RNA, 22 nt, Homo sapiens
augaugucauuuuaauuucuaa

SEQ ID NO: 53925 - RNA, 22 nt, Homo sapiens
auggauguucuagggaugugau

SEQ ID NO: 53926 - RNA, 22 nt, Homo sapiens
auggauuuguaguacaugguug

SEQ ID NO: 53927 - RNA, 22 nt, Homo sapiens
auggcaaugcgaugaugacuga

SEQ ID NO: 53928 - RNA, 22 nt, Homo sapiens
auggcacugaagcguauugaca

SEQ ID NO: 53929 - RNA, 22 nt, Homo sapiens
auugaguaaaaaauagugaugu

SEQ ID NO: 53930 - RNA, 21 nt, Homo sapiens
auugagcacaugaaacauggc

SEQ ID NO: 53931 - RNA, 22 nt, Homo sapiens
auugacuugauauauagcugau

SEQ ID NO: 53932 - RNA, 22 nt, Homo sapiens
auugcaaagcguagacucuaaa

SEQ ID NO: 53933 - RNA, 22 nt, Homo sapiens
auugcacuccagccugcggaac

SEQ ID NO: 53934 - RNA, 22 nt, Homo sapiens
auugcacacagaaucaggguaa

SEQ ID NO: 53935 - RNA, 19 nt, Homo sapiens
auugauuaaguuugcuguc

SEQ ID NO: 53936 - RNA, 22 nt, Homo sapiens
auuccauuuguguggaauggcu

SEQ ID NO: 53937 - RNA, 22 nt, Homo sapiens
auugaacacagaguagcuuucc

SEQ ID NO: 53938 - RNA, 22 nt, Homo sapiens
auugaacaugccauauguacca

SEQ ID NO: 53939 - RNA, 22 nt, Homo sapiens
auugaacacuucugugugccag

SEQ ID NO: 53940 - RNA, 22 nt, Homo sapiens
auugaacuuacuaucuaaacua

SEQ ID NO: 53941 - RNA, 22 nt, Homo sapiens
auugaaugaaauggcagacacu

SEQ ID NO: 53942 - RNA, 22 nt, Homo sapiens
augugugaaucccagaaccugu

SEQ ID NO: 53943 - RNA, 22 nt, Homo sapiens
auguguaaagcuuuucuuuguu

SEQ ID NO: 53944 - RNA, 22 nt, Homo sapiens
auguguucaucacagcacaauu

SEQ ID NO: 53945 - RNA, 22 nt, Homo sapiens
auguuagcaucaauauucauca

SEQ ID NO: 53946 - RNA, 18 nt, Homo sapiens
auguuauguuuguagaag

SEQ ID NO: 53947 - RNA, 20 nt, Homo sapiens
auucaaguaugccuugagaa

SEQ ID NO: 53948 - RNA, 22 nt, Homo sapiens
auucacuguggcuuucucugau

SEQ ID NO: 53949 - RNA, 22 nt, Homo sapiens
auucaucagggauauuggucug

SEQ ID NO: 53950 - RNA, 22 nt, Homo sapiens
auguuugguagugaauauggua

SEQ ID NO: 53951 - RNA, 22 nt, Homo sapiens
auguuuagagagggugucaaau

SEQ ID NO: 53952 - RNA, 20 nt, Homo sapiens
aucaccacagcucguucaug

SEQ ID NO: 53953 - RNA, 22 nt, Homo sapiens
aucacugggcaagauaucauga

SEQ ID NO: 53954 - RNA, 22 nt, Homo sapiens
aucacuguccacucaucuuucu

SEQ ID NO: 53955 - RNA, 21 nt, Homo sapiens
aucaccgugcaguucuccagg

SEQ ID NO: 53956 - RNA, 22 nt, Homo sapiens
auauuggacugugcuaguuaga

SEQ ID NO: 53957 - RNA, 22 nt, Homo sapiens
aucacagauauggguuuaaauc

SEQ ID NO: 53958 - RNA, 22 nt, Homo sapiens
auauugcuuagugaugaagucu

SEQ ID NO: 53959 - RNA, 22 nt, Homo sapiens
aucacauuuauaguggcacgca

SEQ ID NO: 53960 - RNA, 22 nt, Homo sapiens
aucacagugaaaacagucaauu

SEQ ID NO: 53961 - RNA, 22 nt, Homo sapiens
aucacaggucaaaucauuauuu

SEQ ID NO: 53962 - RNA, 22 nt, Homo sapiens
auauuagcacuaaugucacgau

SEQ ID NO: 53963 - RNA, 22 nt, Homo sapiens
auauguauuuuaacguguaagg

SEQ ID NO: 53964 - RNA, 22 nt, Homo sapiens
auaugucuguuuagucuguaau

SEQ ID NO: 53965 - RNA, 22 nt, Homo sapiens
auaugcauacccucaccaacua

SEQ ID NO: 53966 - RNA, 22 nt, Homo sapiens
auaugcauguacccacacaggc

SEQ ID NO: 53967 - RNA, 22 nt, Homo sapiens
auaugcauacauguaugcagga

SEQ ID NO: 53968 - RNA, 22 nt, Homo sapiens
auauggcuaugugagcauacca

SEQ ID NO: 53969 - RNA, 20 nt, Homo sapiens
auaugguugugagugauuuu

SEQ ID NO: 53970 - RNA, 22 nt, Homo sapiens
auauggguauuaagaaucaaaa

SEQ ID NO: 53971 - RNA, 22 nt, Homo sapiens
auaacauggaguuugucauuua

SEQ ID NO: 53972 - RNA, 22 nt, Homo sapiens
auaacauccuuucuuaucguug

SEQ ID NO: 53973 - RNA, 22 nt, Homo sapiens
auaagaucauuugcuaagaggg

SEQ ID NO: 53974 - RNA, 22 nt, Homo sapiens
auaauagcugaucauuuagaag

SEQ ID NO: 53975 - RNA, 22 nt, Homo sapiens
auaauaucagguugugaugaug

SEQ ID NO: 53976 - RNA, 22 nt, Homo sapiens
auaagucaauggaacagauuaa

SEQ ID NO: 53977 - RNA, 22 nt, Homo sapiens
auaagugagugauucaguguua

SEQ ID NO: 53978 - RNA, 22 nt, Homo sapiens
auagguaguugaggagauuuca

SEQ ID NO: 53979 - RNA, 22 nt, Homo sapiens
auagguuuucacuguagauucu

SEQ ID NO: 53980 - RNA, 22 nt, Homo sapiens
auagccaguagagagcuguuag

SEQ ID NO: 53981 - RNA, 22 nt, Homo sapiens
auagcuguccuuacuagcuagg

SEQ ID NO: 53982 - RNA, 22 nt, Homo sapiens
auaggacuauugugaggauuaa

SEQ ID NO: 53983 - RNA, 22 nt, Homo sapiens
auaggagugugcacagaguagg

SEQ ID NO: 53984 - RNA, 22 nt, Homo sapiens
auagcaucauuucuugaaaaga

SEQ ID NO: 53985 - RNA, 22 nt, Homo sapiens
auaggcaagaugagguuuuuau

SEQ ID NO: 53986 - RNA, 22 nt, Homo sapiens
augaaaugcauguuaaguccgu

SEQ ID NO: 53987 - RNA, 22 nt, Homo sapiens
augaaaucuuuggcagaucuua

SEQ ID NO: 53988 - RNA, 22 nt, Homo sapiens
auccauugucuaaugcuaagau

SEQ ID NO: 53989 - RNA, 22 nt, Homo sapiens
augaaacuggcuaauuuuugua

SEQ ID NO: 53990 - RNA, 22 nt, Homo sapiens
augaaaagcauaaacgcugaag

SEQ ID NO: 53991 - RNA, 22 nt, Homo sapiens
aucauccugucaggagcuguga

SEQ ID NO: 53992 - RNA, 22 nt, Homo sapiens
aucauccagccccagaagggag

SEQ ID NO: 53993 - RNA, 22 nt, Homo sapiens
aucauguaguaagacacauuua

SEQ ID NO: 53994 - RNA, 22 nt, Homo sapiens
aucauggaguauuugcaagucu

SEQ ID NO: 53995 - RNA, 22 nt, Homo sapiens
aucacuguuuugaugcucggac

SEQ ID NO: 53996 - RNA, 22 nt, Homo sapiens
auccaagagacugaugacuucc

SEQ ID NO: 53997 - RNA, 22 nt, Homo sapiens
aucauuaguuguggaauucuug

SEQ ID NO: 53998 - RNA, 22 nt, Homo sapiens
augaaguauuaggacacauuua

SEQ ID NO: 53999 - RNA, 22 nt, Homo sapiens
augaauacugcugcaaugaaca

SEQ ID NO: 54000 - RNA, 22 nt, Homo sapiens
augaaugcacugcggguggaug

SEQ ID NO: 54001 - RNA, 17 nt, Homo sapiens
augaagucaucauuuuu

SEQ ID NO: 54002 - RNA, 22 nt, Homo sapiens
augaagugcaugauaguugguu

SEQ ID NO: 54003 - RNA, 22 nt, Homo sapiens
augaagcuagcugauugcugau

SEQ ID NO: 54004 - RNA, 19 nt, Homo sapiens
augaacucauucuuuuuau

SEQ ID NO: 54005 - RNA, 22 nt, Homo sapiens
augaagagaaaguggaucuugg

SEQ ID NO: 54006 - RNA, 18 nt, Homo sapiens
augaacucaucauuuuuu

SEQ ID NO: 54007 - RNA, 22 nt, Homo sapiens
augacacugcagagauguccca

SEQ ID NO: 54008 - RNA, 22 nt, Homo sapiens
augacauugaaaagcaagugga

SEQ ID NO: 54009 - RNA, 22 nt, Homo sapiens
augacaagagccuucuuuccuu

SEQ ID NO: 54010 - RNA, 22 nt, Homo sapiens
augaaugcaucuaucaaagcau

SEQ ID NO: 54011 - RNA, 22 nt, Homo sapiens
augacugagacuaacuuacuuu

SEQ ID NO: 54012 - RNA, 22 nt, Homo sapiens
augacuauugcacuuuccuggu

SEQ ID NO: 54013 - RNA, 22 nt, Homo sapiens
augagauacuacaaaugaguuu

SEQ ID NO: 54014 - RNA, 22 nt, Homo sapiens
augagaaugaagccuggcgugu

SEQ ID NO: 54015 - RNA, 22 nt, Homo sapiens
augacugucagggcagucauug

SEQ ID NO: 54016 - RNA, 22 nt, Homo sapiens
augagaauguaaguuaaugaaa

SEQ ID NO: 54017 - RNA, 22 nt, Homo sapiens
augagaaugauucuguuauggu

SEQ ID NO: 54018 - RNA, 22 nt, Homo sapiens
ugagaugcuccucuugcaaagc

SEQ ID NO: 54019 - RNA, 22 nt, Homo sapiens
ugagauggagucuugucgccua

SEQ ID NO: 54020 - RNA, 22 nt, Homo sapiens
ugagaugcuuguaaauucauuu

SEQ ID NO: 54021 - RNA, 22 nt, Homo sapiens
ugagauggaguuucacuuuugu

SEQ ID NO: 54022 - RNA, 17 nt, Homo sapiens
ugaggcacuaguaucac

SEQ ID NO: 54023 - RNA, 22 nt, Homo sapiens
ugagaugauuuaauggagccca

SEQ ID NO: 54024 - RNA, 22 nt, Homo sapiens
ugagaugaguugcgcucugucg

SEQ ID NO: 54025 - RNA, 22 nt, Homo sapiens
ugagaugaguugcuggcucuga

SEQ ID NO: 54026 - RNA, 22 nt, Homo sapiens
ugagguaagauguucauuuuuc

SEQ ID NO: 54027 - RNA, 22 nt, Homo sapiens
ugagguaacaaacuaugaguua

SEQ ID NO: 54028 - RNA, 22 nt, Homo sapiens
ugagguaaugcuguagcuguga

SEQ ID NO: 54029 - RNA, 22 nt, Homo sapiens
ugagaugaagcuagaagaaugg

SEQ ID NO: 54030 - RNA, 22 nt, Homo sapiens
ugagaugaggucucgcucuguc

SEQ ID NO: 54031 - RNA, 22 nt, Homo sapiens
ugagaucguugcgugagcgugu

SEQ ID NO: 54032 - RNA, 22 nt, Homo sapiens
ugagaucgagucucgcucuguc

SEQ ID NO: 54033 - RNA, 22 nt, Homo sapiens
ugagaucuuaccuuccugccuu

SEQ ID NO: 54034 - RNA, 18 nt, Homo sapiens
ugagaucagcaucaaggg

SEQ ID NO: 54035 - RNA, 22 nt, Homo sapiens
ugagaucaguuguuauaauucu

SEQ ID NO: 54036 - RNA, 22 nt, Homo sapiens
ugagauaguacuuuuuuaaagg

SEQ ID NO: 54037 - RNA, 22 nt, Homo sapiens
ugagacaucucuccugagacag

SEQ ID NO: 54038 - RNA, 22 nt, Homo sapiens
ugagacggagucucgcucuguc

SEQ ID NO: 54039 - RNA, 22 nt, Homo sapiens
ugagacggagucuugcuaaguu

SEQ ID NO: 54040 - RNA, 22 nt, Homo sapiens
ugagacggagucucgcuguguc

SEQ ID NO: 54041 - RNA, 22 nt, Homo sapiens
ugagacggagucucgcucuguu

SEQ ID NO: 54042 - RNA, 22 nt, Homo sapiens
ugagacggaguuucgcucuugu

SEQ ID NO: 54043 - RNA, 22 nt, Homo sapiens
ugagaaugacugggcaugcugc

SEQ ID NO: 54044 - RNA, 22 nt, Homo sapiens
ugagacacuucccagaucccuu

SEQ ID NO: 54045 - RNA, 22 nt, Homo sapiens
ugagaagugauauagaaguuaa

SEQ ID NO: 54046 - RNA, 22 nt, Homo sapiens
ugagagacagacauuaucuuau

SEQ ID NO: 54047 - RNA, 22 nt, Homo sapiens
ugagacugauaggacauuuucu

SEQ ID NO: 54048 - RNA, 22 nt, Homo sapiens
ugagacugaguuucgcucuugu

SEQ ID NO: 54049 - RNA, 22 nt, Homo sapiens
ugagacugagucucgcucuugu

SEQ ID NO: 54050 - RNA, 22 nt, Homo sapiens
ugagacgucuucucuucuucaa

SEQ ID NO: 54051 - RNA, 22 nt, Homo sapiens
ugagacggaguuuugcucuugu

SEQ ID NO: 54052 - RNA, 22 nt, Homo sapiens
ugagagucacugaccugguaua

SEQ ID NO: 54053 - RNA, 22 nt, Homo sapiens
ugagagcuuugaugcacuguuu

SEQ ID NO: 54054 - RNA, 22 nt, Homo sapiens
ugagagcuuuuuugccugguga

SEQ ID NO: 54055 - RNA, 22 nt, Homo sapiens
ugagagaugaacuauucuugaa

SEQ ID NO: 54056 - RNA, 22 nt, Homo sapiens
ugaaauggaaagaguguagacu

SEQ ID NO: 54057 - RNA, 22 nt, Homo sapiens
ugaaaugguuaugugaggagau

SEQ ID NO: 54058 - RNA, 21 nt, Homo sapiens
ugaaaugcaugugcacauuaa

SEQ ID NO: 54059 - RNA, 22 nt, Homo sapiens
ugaaaugauuauaugguguuug

SEQ ID NO: 54060 - RNA, 22 nt, Homo sapiens
ugaaaugcugucuaggggaaau

SEQ ID NO: 54061 - RNA, 22 nt, Homo sapiens
ugacaaguaaacagucagcacc

SEQ ID NO: 54062 - RNA, 22 nt, Homo sapiens
ugacaagauauggucuuaucaa

SEQ ID NO: 54063 - RNA, 22 nt, Homo sapiens
ugacacagugggggauccuuuu

SEQ ID NO: 54064 - RNA, 21 nt, Homo sapiens
ugacagaaaauugaguuugcu

SEQ ID NO: 54065 - RNA, 17 nt, Homo sapiens
ugacagaaacuuguugu

SEQ ID NO: 54066 - RNA, 22 nt, Homo sapiens
ucuuuuguaaaaugaggaggug

SEQ ID NO: 54067 - RNA, 22 nt, Homo sapiens
ugaaacauacacucugaugggg

SEQ ID NO: 54068 - RNA, 22 nt, Homo sapiens
ucuuuguuuucugauccugaag

SEQ ID NO: 54069 - RNA, 22 nt, Homo sapiens
ugaaagacugaaagcuuuucuu

SEQ ID NO: 54070 - RNA, 22 nt, Homo sapiens
ugaaagcuacaggaaaguauuu

SEQ ID NO: 54071 - RNA, 20 nt, Homo sapiens
ugacaguuaagggauagaag

SEQ ID NO: 54072 - RNA, 22 nt, Homo sapiens
ugacagugugagauccugucuc

SEQ ID NO: 54073 - RNA, 22 nt, Homo sapiens
ugacuagcagagugagaaacuc

SEQ ID NO: 54074 - RNA, 22 nt, Homo sapiens
ugacuacauaaguaaucucaaa

SEQ ID NO: 54075 - RNA, 18 nt, Homo sapiens
ugagaacauguguacaca

SEQ ID NO: 54076 - RNA, 22 nt, Homo sapiens
ugagaacauuccucuuccuggc

SEQ ID NO: 54077 - RNA, 17 nt, Homo sapiens
ugagaacaugugguauu

SEQ ID NO: 54078 - RNA, 22 nt, Homo sapiens
ugagaacagcagcuugggacac

SEQ ID NO: 54079 - RNA, 22 nt, Homo sapiens
ugagaacaugugauauuuggug

SEQ ID NO: 54080 - RNA, 16 nt, Homo sapiens
ugagaacaugugauau

SEQ ID NO: 54081 - RNA, 22 nt, Homo sapiens
ugacuuaugcaacucugaugug

SEQ ID NO: 54082 - RNA, 22 nt, Homo sapiens
ucuuuggucagaaagauuacac

SEQ ID NO: 54083 - RNA, 23 nt, Homo sapiens
ucuugguuauagaaaaauaguug

SEQ ID NO: 54084 - RNA, 22 nt, Homo sapiens
ucuugguaaugucacauuuccu

SEQ ID NO: 54085 - RNA, 22 nt, Homo sapiens
ucuuugguauugugaauagugu

SEQ ID NO: 54086 - RNA, 20 nt, Homo sapiens
ucuugaacuuagucaacagg

SEQ ID NO: 54087 - RNA, 22 nt, Homo sapiens
ucuugcaguucccaaauucaca

SEQ ID NO: 54088 - RNA, 22 nt, Homo sapiens
ucuugcauuuuuaaauagugcu

SEQ ID NO: 54089 - RNA, 22 nt, Homo sapiens
ucuguguugaugcucauuaauu

SEQ ID NO: 54090 - RNA, 22 nt, Homo sapiens
ucuguguuuagacccaggguag

SEQ ID NO: 54091 - RNA, 22 nt, Homo sapiens
ucuuaguuuagauuagcaauuc

SEQ ID NO: 54092 - RNA, 22 nt, Homo sapiens
ucuuagugcggcugcugcagcc

SEQ ID NO: 54093 - RNA, 17 nt, Homo sapiens
ucuucuguuacuguggc

SEQ ID NO: 54094 - RNA, 22 nt, Homo sapiens
ucugaguggcagaaugagcuga

SEQ ID NO: 54095 - RNA, 22 nt, Homo sapiens
ucuggagugugaaguggauaug

SEQ ID NO: 54096 - RNA, 22 nt, Homo sapiens
ucugccaaccacaaaauuuauu

SEQ ID NO: 54097 - RNA, 22 nt, Homo sapiens
ucugcauaucaugcagaacuau

SEQ ID NO: 54098 - RNA, 22 nt, Homo sapiens
ucugcaagucuaaacuagccau

SEQ ID NO: 54099 - RNA, 22 nt, Homo sapiens
ucuggcuccacacuuuauuaac

SEQ ID NO: 54100 - RNA, 22 nt, Homo sapiens
ucuggcuccaaagucuauuuuu

SEQ ID NO: 54101 - RNA, 22 nt, Homo sapiens
aacauguuuagcagauaccugu

SEQ ID NO: 54102 - RNA, 22 nt, Homo sapiens
ucugugcuugucauaugcuuug

SEQ ID NO: 54103 - RNA, 22 nt, Homo sapiens
ucuguggucagcauccgccacu

SEQ ID NO: 54104 - RNA, 18 nt, Homo sapiens
ucugugguguaaauacgu

SEQ ID NO: 54105 - RNA, 22 nt, Homo sapiens
ucugugguucaggcuggagugc

SEQ ID NO: 54106 - RNA, 22 nt, Homo sapiens
ucuaagaauucauuuauaagcc

SEQ ID NO: 54107 - RNA, 22 nt, Homo sapiens
ucuaaugcucugagaacagugc

SEQ ID NO: 54108 - RNA, 22 nt, Homo sapiens
ucucugaaacucuugacauccu

SEQ ID NO: 54109 - RNA, 22 nt, Homo sapiens
ucucugagaccacuccaaacuc

SEQ ID NO: 54110 - RNA, 22 nt, Homo sapiens
ucuaugguuuauuuccaagugu

SEQ ID NO: 54111 - RNA, 22 nt, Homo sapiens
ucucugauuauugcauuucauu

SEQ ID NO: 54112 - RNA, 22 nt, Homo sapiens
ucucugauuaaacaagauagug

SEQ ID NO: 54113 - RNA, 22 nt, Homo sapiens
ucucuguuuauuuuugguguau

SEQ ID NO: 54114 - RNA, 22 nt, Homo sapiens
ucucugguuuguggaaucuuag

SEQ ID NO: 54115 - RNA, 22 nt, Homo sapiens
ucucuguuugucuguuacuggu

SEQ ID NO: 54116 - RNA, 22 nt, Homo sapiens
ucggcucagugcaagcucugcc

SEQ ID NO: 54117 - RNA, 17 nt, Homo sapiens
ucuaauaauaugcauuu

SEQ ID NO: 54118 - RNA, 22 nt, Homo sapiens
ucguggccugugaguccucccc

SEQ ID NO: 54119 - RNA, 17 nt, Homo sapiens
ucccuguuuuuucaguc

SEQ ID NO: 54120 - RNA, 22 nt, Homo sapiens
ucccugagguccuggauuauug

SEQ ID NO: 54121 - RNA, 22 nt, Homo sapiens
ucagagucuagaucacucacug

SEQ ID NO: 54122 - RNA, 22 nt, Homo sapiens
ucacuggcaaauauauccguug

SEQ ID NO: 54123 - RNA, 22 nt, Homo sapiens
ucacugagcacaggagaugugc

SEQ ID NO: 54124 - RNA, 21 nt, Homo sapiens
ucacugagcaucaugguuuca

SEQ ID NO: 54125 - RNA, 22 nt, Homo sapiens
ucacugagcuagaucacuugac

SEQ ID NO: 54126 - RNA, 22 nt, Homo sapiens
ucacugugguuuugaugugcau

SEQ ID NO: 54127 - RNA, 22 nt, Homo sapiens
ucagacacugagcaaacgacua

SEQ ID NO: 54128 - RNA, 22 nt, Homo sapiens
ugggcaaaugcuuuuuagucaa

SEQ ID NO: 54129 - RNA, 22 nt, Homo sapiens
ugggaucgucaagugaggcucg

SEQ ID NO: 54130 - RNA, 19 nt, Homo sapiens
ugggaauguaaauuaguuc

SEQ ID NO: 54131 - RNA, 22 nt, Homo sapiens
ugggaucauucaaugacgaaau

SEQ ID NO: 54132 - RNA, 22 nt, Homo sapiens
uguaaaccucugaguacaagcu

SEQ ID NO: 54133 - RNA, 18 nt, Homo sapiens
uguaaacuaccucaaccu

SEQ ID NO: 54134 - RNA, 23 nt, Homo sapiens
ugguuuguaagagauggacugga

SEQ ID NO: 54135 - RNA, 22 nt, Homo sapiens
uguaaaucuauuuuuaguguuu

SEQ ID NO: 54136 - RNA, 22 nt, Homo sapiens
uggcauguguuugaaugaguau

SEQ ID NO: 54137 - RNA, 19 nt, Homo sapiens
uggcaugaaugugaacuaa

SEQ ID NO: 54138 - RNA, 22 nt, Homo sapiens
uggcaugauguguucauugaaa

SEQ ID NO: 54139 - RNA, 22 nt, Homo sapiens
uggcaugggguaguagcgcugg

SEQ ID NO: 54140 - RNA, 22 nt, Homo sapiens
uggcaugauauauauucguuug

SEQ ID NO: 54141 - RNA, 22 nt, Homo sapiens
uggauggagaggcuugugaugc

SEQ ID NO: 54142 - RNA, 22 nt, Homo sapiens
uggauguaauugauucauguug

SEQ ID NO: 54143 - RNA, 22 nt, Homo sapiens
uggaugacuguuauaugcauau

SEQ ID NO: 54144 - RNA, 22 nt, Homo sapiens
uggauauguucuuuguguaagg

SEQ ID NO: 54145 - RNA, 18 nt, Homo sapiens
uggauaguuguuggcaga

SEQ ID NO: 54146 - RNA, 22 nt, Homo sapiens
uggaguguguugcagaugaagg

SEQ ID NO: 54147 - RNA, 22 nt, Homo sapiens
uggcgggaaaguugggagaaga

SEQ ID NO: 54148 - RNA, 22 nt, Homo sapiens
ugggaucagucuggaauauuga

SEQ ID NO: 54149 - RNA, 22 nt, Homo sapiens
uggcgagaaaccauaugcuuuc

SEQ ID NO: 54150 - RNA, 22 nt, Homo sapiens
uggcgagaaucacauucuaauu

SEQ ID NO: 54151 - RNA, 22 nt, Homo sapiens
uggcauuuucucuguucuuaga

SEQ ID NO: 54152 - RNA, 22 nt, Homo sapiens
uggcauuuuguuuuagaauuag

SEQ ID NO: 54153 - RNA, 22 nt, Homo sapiens
uguccguuuuguuucaggcuca

SEQ ID NO: 54154 - RNA, 20 nt, Homo sapiens
ugucccaaccccauggguuc

SEQ ID NO: 54155 - RNA, 20 nt, Homo sapiens
ugucauuaagcacugugcca

SEQ ID NO: 54156 - RNA, 22 nt, Homo sapiens
ugucauguugguguacugcacc

SEQ ID NO: 54157 - RNA, 22 nt, Homo sapiens
ugucauguuucuacugaccaaa

SEQ ID NO: 54158 - RNA, 23 nt, Homo sapiens
ugucaucaagaugaggucacacu

SEQ ID NO: 54159 - RNA, 22 nt, Homo sapiens
ugucauguggcuaacgauucau

SEQ ID NO: 54160 - RNA, 22 nt, Homo sapiens
ugucaugucuuuguguaucaau

SEQ ID NO: 54161 - RNA, 22 nt, Homo sapiens
ugucuuguagacugaaggcuuc

SEQ ID NO: 54162 - RNA, 21 nt, Homo sapiens
ugugaaaucuaggcagagguu

SEQ ID NO: 54163 - RNA, 20 nt, Homo sapiens
ugucuauggggguucucugc

SEQ ID NO: 54164 - RNA, 22 nt, Homo sapiens
ugucaaauucuggguuaaaaca

SEQ ID NO: 54165 - RNA, 22 nt, Homo sapiens
ugucaacauuuaucaaguuauu

SEQ ID NO: 54166 - RNA, 20 nt, Homo sapiens
ugucaagaaacauuacuuau

SEQ ID NO: 54167 - RNA, 22 nt, Homo sapiens
ugucaauauguaauaacugaau

SEQ ID NO: 54168 - RNA, 22 nt, Homo sapiens
uguaugaguuguuuauaaauuu

SEQ ID NO: 54169 - RNA, 22 nt, Homo sapiens
uguauguugggucaaaguacau

SEQ ID NO: 54170 - RNA, 22 nt, Homo sapiens
ugucacagagauuuugguaugu

SEQ ID NO: 54171 - RNA, 22 nt, Homo sapiens
ugucacaguuuguacuuuauag

SEQ ID NO: 54172 - RNA, 22 nt, Homo sapiens
ugucagaaucugagacgacaac

SEQ ID NO: 54173 - RNA, 22 nt, Homo sapiens
ugucaguggacugugaaaggca

SEQ ID NO: 54174 - RNA, 22 nt, Homo sapiens
ugucaguuuuaacuagggaaua

SEQ ID NO: 54175 - RNA, 22 nt, Homo sapiens
ugucauauagaauguucuauga

SEQ ID NO: 54176 - RNA, 22 nt, Homo sapiens
ugucaucauuggaaucugccuc

SEQ ID NO: 54177 - RNA, 22 nt, Homo sapiens
uggaagugucugugcccagcuc

SEQ ID NO: 54178 - RNA, 22 nt, Homo sapiens
uggaaucuacuaaagcaaaauc

SEQ ID NO: 54179 - RNA, 22 nt, Homo sapiens
uggaaucaucaacgaaugaaau

SEQ ID NO: 54180 - RNA, 22 nt, Homo sapiens
uggaaguuaaauuaguugauga

SEQ ID NO: 54181 - RNA, 22 nt, Homo sapiens
uggaaguauagauaauugaaag

SEQ ID NO: 54182 - RNA, 22 nt, Homo sapiens
uggaaucuagagaaaugcaaac

SEQ ID NO: 54183 - RNA, 21 nt, Homo sapiens
uggaaucuauagaggcaguag

SEQ ID NO: 54184 - RNA, 19 nt, Homo sapiens
uggaauggauuuaaaugug

SEQ ID NO: 54185 - RNA, 22 nt, Homo sapiens
uggaaugggauuggaaauuuug

SEQ ID NO: 54186 - RNA, 22 nt, Homo sapiens
uggaauggagagagggugcacg

SEQ ID NO: 54187 - RNA, 22 nt, Homo sapiens
uggaauguagcguugacacgag

SEQ ID NO: 54188 - RNA, 20 nt, Homo sapiens
uggaaucugaagaucucagu

SEQ ID NO: 54189 - RNA, 22 nt, Homo sapiens
uggaauguaacuugaaacuuuu

SEQ ID NO: 54190 - RNA, 21 nt, Homo sapiens
uggaauuaauggagagguguu

SEQ ID NO: 54191 - RNA, 22 nt, Homo sapiens
uggaauuaauccuccugguuuc

SEQ ID NO: 54192 - RNA, 22 nt, Homo sapiens
uggaauuaauuaaaauauacug

SEQ ID NO: 54193 - RNA, 22 nt, Homo sapiens
uggagugcaauggugagaucuu

SEQ ID NO: 54194 - RNA, 22 nt, Homo sapiens
uggagugcgagggugaaacuuu

SEQ ID NO: 54195 - RNA, 20 nt, Homo sapiens
uggagugcuguguugagaag

SEQ ID NO: 54196 - RNA, 22 nt, Homo sapiens
ugccaguuuuuacauuuccugu

SEQ ID NO: 54197 - RNA, 23 nt, Homo sapiens
ugcuauguaagcauuuauuaaau

SEQ ID NO: 54198 - RNA, 22 nt, Homo sapiens
ugcauuguuuagaaacacuggg

SEQ ID NO: 54199 - RNA, 22 nt, Homo sapiens
ugcuauguuuucccuccuuauc

SEQ ID NO: 54200 - RNA, 22 nt, Homo sapiens
ugcuaugucuucucucacagag

SEQ ID NO: 54201 - RNA, 22 nt, Homo sapiens
ugcuauguccccacccaaaucu

SEQ ID NO: 54202 - RNA, 22 nt, Homo sapiens
ugcugcauuggggauuaaguuu

SEQ ID NO: 54203 - RNA, 22 nt, Homo sapiens
ugcuggugauucagauucaaau

SEQ ID NO: 54204 - RNA, 22 nt, Homo sapiens
ugcaagaggagacuguacucag

SEQ ID NO: 54205 - RNA, 22 nt, Homo sapiens
ugcagaaucccuucagauccga

SEQ ID NO: 54206 - RNA, 22 nt, Homo sapiens
ugcaccauugcauacuuaauua

SEQ ID NO: 54207 - RNA, 22 nt, Homo sapiens
ugcagagaaacauuuuguauuu

SEQ ID NO: 54208 - RNA, 22 nt, Homo sapiens
ugcauggauguuugaacacacu

SEQ ID NO: 54209 - RNA, 22 nt, Homo sapiens
ugcaguacugucagacuucuua

SEQ ID NO: 54210 - RNA, 22 nt, Homo sapiens
ugcaagaaucagccuaucauua

SEQ ID NO: 54211 - RNA, 21 nt, Homo sapiens
ugcaagaaucaggaagcugcc

SEQ ID NO: 54212 - RNA, 22 nt, Homo sapiens
ugcaaauguuaggugucauuau

SEQ ID NO: 54213 - RNA, 22 nt, Homo sapiens
ugaguucaauuguauuuuauua

SEQ ID NO: 54214 - RNA, 18 nt, Homo sapiens
ugaguucauuagacuucc

SEQ ID NO: 54215 - RNA, 22 nt, Homo sapiens
ugaguucuuuuacauuuugaau

SEQ ID NO: 54216 - RNA, 22 nt, Homo sapiens
ugagguagguaccauuaucacu

SEQ ID NO: 54217 - RNA, 22 nt, Homo sapiens
ugagguguauugggggaaauuc

SEQ ID NO: 54218 - RNA, 22 nt, Homo sapiens
ugagguguuaacuuuacuuuua

SEQ ID NO: 54219 - RNA, 23 nt, Homo sapiens
ugagguguuaagcagacuugucu

SEQ ID NO: 54220 - RNA, 22 nt, Homo sapiens
ugagucaugcuggagucauggc

SEQ ID NO: 54221 - RNA, 22 nt, Homo sapiens
ugaguauuugggggaccagaga

SEQ ID NO: 54222 - RNA, 22 nt, Homo sapiens
ugaguuaauuuuuguaucaugu

SEQ ID NO: 54223 - RNA, 22 nt, Homo sapiens
uuuugcaggucaggggcagaga

SEQ ID NO: 54224 - RNA, 22 nt, Homo sapiens
uuuugcaccauccuaauaguau

SEQ ID NO: 54225 - RNA, 22 nt, Homo sapiens
uuuugcauuggcugaggagugu

SEQ ID NO: 54226 - RNA, 22 nt, Homo sapiens
uuuugccggcauguugggcuuc

SEQ ID NO: 54227 - RNA, 21 nt, Homo sapiens
uuuguccaccuguguucacca

SEQ ID NO: 54228 - RNA, 22 nt, Homo sapiens
uuugucauagcagcaggaaugg

SEQ ID NO: 54229 - RNA, 22 nt, Homo sapiens
uuuguagcuacaaagugagaug

SEQ ID NO: 54230 - RNA, 22 nt, Homo sapiens
uuuguagcucacucugagcuga

SEQ ID NO: 54231 - RNA, 22 nt, Homo sapiens
uuuguauguuggagauuggaga

SEQ ID NO: 54232 - RNA, 23 nt, Homo sapiens
uuuguaguagcaugauuuauaau

SEQ ID NO: 54233 - RNA, 22 nt, Homo sapiens
uuuugcuccuggcaaacucaua

SEQ ID NO: 54234 - RNA, 22 nt, Homo sapiens
uuuuggcucuugguaggucaga

SEQ ID NO: 54235 - RNA, 19 nt, Homo sapiens
uuuuggaaaugugaacagc

SEQ ID NO: 54236 - RNA, 22 nt, Homo sapiens
uuuugguucaauuaauuugcua

SEQ ID NO: 54237 - RNA, 22 nt, Homo sapiens
uuucauggaauauagucauuuu

SEQ ID NO: 54238 - RNA, 19 nt, Homo sapiens
uuucauguuuuuggugaga

SEQ ID NO: 54239 - RNA, 22 nt, Homo sapiens
uuucaucaagcacagaguagau

SEQ ID NO: 54240 - RNA, 22 nt, Homo sapiens
uuucaguguggcaggcauagcu

SEQ ID NO: 54241 - RNA, 22 nt, Homo sapiens
uuucauggagaaucuucuuacu

SEQ ID NO: 54242 - RNA, 22 nt, Homo sapiens
uuuccacauggacuuaccuucg

SEQ ID NO: 54243 - RNA, 22 nt, Homo sapiens
uuuccaguuggaaagccuguuu

SEQ ID NO: 54244 - RNA, 22 nt, Homo sapiens
uuugcuuaaaucuuaaucagau

SEQ ID NO: 54245 - RNA, 22 nt, Homo sapiens
uuugcuuaguaaauguagaaaa

SEQ ID NO: 54246 - RNA, 22 nt, Homo sapiens
uuugcugagucauuccaugcug

SEQ ID NO: 54247 - RNA, 22 nt, Homo sapiens
uuugcugagucugacuucaugg

SEQ ID NO: 54248 - RNA, 22 nt, Homo sapiens
uuuggcaauuugacuguauagg

SEQ ID NO: 54249 - RNA, 22 nt, Homo sapiens
uuuggcaaagaucaacauguua

SEQ ID NO: 54250 - RNA, 22 nt, Homo sapiens
uuugcuuguguaaaaaucugga

SEQ ID NO: 54251 - RNA, 22 nt, Homo sapiens
uuuggcauuagauaauugugua

SEQ ID NO: 54252 - RNA, 22 nt, Homo sapiens
uuuggcauuaagaugcuguauc

SEQ ID NO: 54253 - RNA, 22 nt, Homo sapiens
uuuguaauaccugaggcugggu

SEQ ID NO: 54254 - RNA, 21 nt, Homo sapiens
aagcaugguguaucuuuccau

SEQ ID NO: 54255 - RNA, 22 nt, Homo sapiens
aagcugccuugcugaggagaaa

SEQ ID NO: 54256 - RNA, 22 nt, Homo sapiens
aagcaggugucugugucuguaa

SEQ ID NO: 54257 - RNA, 22 nt, Homo sapiens
aagcaggugugggaggaaaugg

SEQ ID NO: 54258 - RNA, 20 nt, Homo sapiens
aagcagacauuuggaugaaa

SEQ ID NO: 54259 - RNA, 22 nt, Homo sapiens
aagcaggugaugagugggugug

SEQ ID NO: 54260 - RNA, 22 nt, Homo sapiens
aagcaucauuuggaauuugaga

SEQ ID NO: 54261 - RNA, 22 nt, Homo sapiens
aagcaucacauaauggaucaug

SEQ ID NO: 54262 - RNA, 21 nt, Homo sapiens
aagcacauugaguguguguga

SEQ ID NO: 54263 - RNA, 22 nt, Homo sapiens
aagaguuaguaaaauuuccucu

SEQ ID NO: 54264 - RNA, 22 nt, Homo sapiens
aagcaacacaucugccccgguu

SEQ ID NO: 54265 - RNA, 22 nt, Homo sapiens
aacuaugucaaauaaaaugagg

SEQ ID NO: 54266 - RNA, 22 nt, Homo sapiens
aacugcacuaggacagguuuuu

SEQ ID NO: 54267 - RNA, 22 nt, Homo sapiens
aacccugacacaagcagaauuu

SEQ ID NO: 54268 - RNA, 22 nt, Homo sapiens
aagagaacugacaguaccuggg

SEQ ID NO: 54269 - RNA, 22 nt, Homo sapiens
aagacuguaauccaucuugagu

SEQ ID NO: 54270 - RNA, 22 nt, Homo sapiens
uuuuugagaauuggugaaacac

SEQ ID NO: 54271 - RNA, 22 nt, Homo sapiens
uuuuugauuaauggguagacca

SEQ ID NO: 54272 - RNA, 22 nt, Homo sapiens
uuuuuuaguuagcugggcauga

SEQ ID NO: 54273 - RNA, 22 nt, Homo sapiens
uuuuugugguauauugcaacaa

SEQ ID NO: 54274 - RNA, 22 nt, Homo sapiens
uuuuugaguaaauauaaauugu

SEQ ID NO: 54275 - RNA, 22 nt, Homo sapiens
uuuuuggaggagguuagaucau

SEQ ID NO: 54276 - RNA, 22 nt, Homo sapiens
uuuuuggauaaugguacaugua

SEQ ID NO: 54277 - RNA, 16 nt, Homo sapiens
uuuuugcagaaaugac

SEQ ID NO: 54278 - RNA, 21 nt, Homo sapiens
uuuacuguggacccauugcuu

SEQ ID NO: 54279 - RNA, 22 nt, Homo sapiens
uuuacugugggguuucuuagag

SEQ ID NO: 54280 - RNA, 23 nt, Homo sapiens
uuucaguaguuguauccuguugc

SEQ ID NO: 54281 - RNA, 22 nt, Homo sapiens
uuuagcagcaaagagcuguguu

SEQ ID NO: 54282 - RNA, 22 nt, Homo sapiens
uuuaaagcuccaagcaugucug

SEQ ID NO: 54283 - RNA, 23 nt, Homo sapiens
uuuaagcuucauguccuaacauc

SEQ ID NO: 54284 - RNA, 22 nt, Homo sapiens
uuuaagguauguggugaaaauu

SEQ ID NO: 54285 - RNA, 22 nt, Homo sapiens
uuuaaggcaggucuggugguga

SEQ ID NO: 54286 - RNA, 22 nt, Homo sapiens
uuguuaugggguggcuugaaag

SEQ ID NO: 54287 - RNA, 22 nt, Homo sapiens
uuguugcacugcuuuccuggcc

SEQ ID NO: 54288 - RNA, 22 nt, Homo sapiens
uuguuauguuaaacuacugaaa

SEQ ID NO: 54289 - RNA, 22 nt, Homo sapiens
uuuaaagcuaaaauauguuuau

SEQ ID NO: 54290 - RNA, 22 nt, Homo sapiens
uuguguuugaugcugacacgca

SEQ ID NO: 54291 - RNA, 22 nt, Homo sapiens
uuguguuuuuaguagggaaggg

SEQ ID NO: 54292 - RNA, 22 nt, Homo sapiens
uuguuauguaucucaagauaaa

SEQ ID NO: 54293 - RNA, 22 nt, Homo sapiens
uugucuccuagacgaccaggcg

SEQ ID NO: 54294 - RNA, 21 nt, Homo sapiens
uugucuagagaaauauaucuc

SEQ ID NO: 54295 - RNA, 22 nt, Homo sapiens
uugucucacuggaguuuaguaa

SEQ ID NO: 54296 - RNA, 22 nt, Homo sapiens
uuguccuccacauuugaucagu

SEQ ID NO: 54297 - RNA, 22 nt, Homo sapiens
uugucccauggggucuuccuuu

SEQ ID NO: 54298 - RNA, 22 nt, Homo sapiens
uugugaauggugcugcaguaaa

SEQ ID NO: 54299 - RNA, 22 nt, Homo sapiens
uugugauggugcauacugagcu

SEQ ID NO: 54300 - RNA, 22 nt, Homo sapiens
uugugagggagcuaagaugagu

SEQ ID NO: 54301 - RNA, 22 nt, Homo sapiens
uugugauugagugauccuuguu

SEQ ID NO: 54302 - RNA, 23 nt, Homo sapiens
uuguaacuggagaguaacauucc

SEQ ID NO: 54303 - RNA, 22 nt, Homo sapiens
uuguaacaugcuuucacuucag

SEQ ID NO: 54304 - RNA, 22 nt, Homo sapiens
uuguaagaaucuagcucuuuau

SEQ ID NO: 54305 - RNA, 22 nt, Homo sapiens
uuguaauguuaccaaauggugu

SEQ ID NO: 54306 - RNA, 22 nt, Homo sapiens
uuguacaggaguguaagcuuca

SEQ ID NO: 54307 - RNA, 22 nt, Homo sapiens
uugggaauguccuaauaucucg

SEQ ID NO: 54308 - RNA, 22 nt, Homo sapiens
uuggauuuuaacaaacuaggug

SEQ ID NO: 54309 - RNA, 22 nt, Homo sapiens
uuggacugagaguuccaccauu

SEQ ID NO: 54310 - RNA, 19 nt, Homo sapiens
uuggaauuuuagaguuuga

SEQ ID NO: 54311 - RNA, 22 nt, Homo sapiens
uuggaauuaagagauauuuucu

SEQ ID NO: 54312 - RNA, 23 nt, Homo sapiens
uuggaaugagaccuaagaguuuu

SEQ ID NO: 54313 - RNA, 22 nt, Homo sapiens
uuggaauauaaccuguuucuaa

SEQ ID NO: 54314 - RNA, 22 nt, Homo sapiens
uugaucuggagagaggcccgug

SEQ ID NO: 54315 - RNA, 22 nt, Homo sapiens
uugaucaucagcuuugucaucu

SEQ ID NO: 54316 - RNA, 22 nt, Homo sapiens
uugauauggcugcuuaccauaa

SEQ ID NO: 54317 - RNA, 22 nt, Homo sapiens
uugauauguggaauauuuaucu

SEQ ID NO: 54318 - RNA, 19 nt, Homo sapiens
uugauaugauuaggagcac

SEQ ID NO: 54319 - RNA, 22 nt, Homo sapiens
uugauaauguuaacuuugguca

SEQ ID NO: 54320 - RNA, 22 nt, Homo sapiens
uugauagacaucugaguuguug

SEQ ID NO: 54321 - RNA, 22 nt, Homo sapiens
uugauaucugaugccuauggaa

SEQ ID NO: 54322 - RNA, 22 nt, Homo sapiens
uugauaugaauggcuguuugug

SEQ ID NO: 54323 - RNA, 22 nt, Homo sapiens
uugauaguccuguaucuauuuu

SEQ ID NO: 54324 - RNA, 22 nt, Homo sapiens
uuaaucaggccguuuccuaaga

SEQ ID NO: 54325 - RNA, 22 nt, Homo sapiens
uuaaugaacuuuauuuuguaga

SEQ ID NO: 54326 - RNA, 22 nt, Homo sapiens
uuaaucacagugucuuccuuca

SEQ ID NO: 54327 - RNA, 22 nt, Homo sapiens
uuaaguuguagcuacaaauaca

SEQ ID NO: 54328 - RNA, 22 nt, Homo sapiens
uuaauuguaucuauagauguca

SEQ ID NO: 54329 - RNA, 22 nt, Homo sapiens
uuacacaguaggucccuaguaa

SEQ ID NO: 54330 - RNA, 22 nt, Homo sapiens
uuaauuguccauuauucuguuc

SEQ ID NO: 54331 - RNA, 20 nt, Homo sapiens
uuacuauguaguauuggcuc

SEQ ID NO: 54332 - RNA, 22 nt, Homo sapiens
uuaagucacacuagacaacuga

SEQ ID NO: 54333 - RNA, 19 nt, Homo sapiens
uguugcacauaucaauaug

SEQ ID NO: 54334 - RNA, 22 nt, Homo sapiens
uguuuaguuaagacauagaauu

SEQ ID NO: 54335 - RNA, 22 nt, Homo sapiens
uguugcacugguaauguacuga

SEQ ID NO: 54336 - RNA, 22 nt, Homo sapiens
ugugaaugaagaaugcuaaccu

SEQ ID NO: 54337 - RNA, 22 nt, Homo sapiens
ugugaauggugcuuccuagaug

SEQ ID NO: 54338 - RNA, 22 nt, Homo sapiens
ugugaaugauggagugucgaau

SEQ ID NO: 54339 - RNA, 22 nt, Homo sapiens
ugugaauguaagaaaauccaac

SEQ ID NO: 54340 - RNA, 22 nt, Homo sapiens
ugugacagcacagcaucucuuu

SEQ ID NO: 54341 - RNA, 18 nt, Homo sapiens
ugugacauugagcauguc

SEQ ID NO: 54342 - RNA, 22 nt, Homo sapiens
ugugauaguuggcuaaagcagu

SEQ ID NO: 54343 - RNA, 22 nt, Homo sapiens
ugugaucaugcuccaggcgaga

SEQ ID NO: 54344 - RNA, 22 nt, Homo sapiens
ugugaucauuucaggaauuuug

SEQ ID NO: 54345 - RNA, 19 nt, Homo sapiens
ugugauaguugaaccugcc

SEQ ID NO: 54346 - RNA, 22 nt, Homo sapiens
ugugaucaauuagugaugucug

SEQ ID NO: 54347 - RNA, 22 nt, Homo sapiens
ugugagaaaugcagaaucucag

SEQ ID NO: 54348 - RNA, 22 nt, Homo sapiens
uuagauuauugagcauccacug

SEQ ID NO: 54349 - RNA, 22 nt, Homo sapiens
uuagcacaguucauucauguua

SEQ ID NO: 54350 - RNA, 19 nt, Homo sapiens
uuagagaucaucugcuuca

SEQ ID NO: 54351 - RNA, 22 nt, Homo sapiens
uuagaguacaggggaaucaagg

SEQ ID NO: 54352 - RNA, 22 nt, Homo sapiens
uuagaguguagcaggaagaggc

SEQ ID NO: 54353 - RNA, 22 nt, Homo sapiens
uuacuguauagaaucaucuuga

SEQ ID NO: 54354 - RNA, 22 nt, Homo sapiens
uuagaauggaaaugcgagguua

SEQ ID NO: 54355 - RNA, 20 nt, Homo sapiens
uuagcagcaugauuuauaau

SEQ ID NO: 54356 - RNA, 22 nt, Homo sapiens
uuagcagccuucaagcuccaag

SEQ ID NO: 54357 - RNA, 22 nt, Homo sapiens
uuagcacauuuccagcacaugg

SEQ ID NO: 54358 - RNA, 21 nt, Homo sapiens
uuaggcagugucagaggugag

SEQ ID NO: 54359 - RNA, 16 nt, Homo sapiens
uuaggcagugugauac

SEQ ID NO: 54360 - RNA, 22 nt, Homo sapiens
uuaggcuuuauugaaaacaaua

SEQ ID NO: 54361 - RNA, 22 nt, Homo sapiens
uuauuacuccuauuuuguagau

SEQ ID NO: 54362 - RNA, 22 nt, Homo sapiens
uuauuagguuagugcaaaaguu

SEQ ID NO: 54363 - RNA, 22 nt, Homo sapiens
uuauucagcaccugcuguguuc

SEQ ID NO: 54364 - RNA, 22 nt, Homo sapiens
uuauugcuuuugugcaggugag

SEQ ID NO: 54365 - RNA, 22 nt, Homo sapiens
uuauucauuaauugcuaagguu

SEQ ID NO: 54366 - RNA, 22 nt, Homo sapiens
uuaugucacuguucagucuccc

SEQ ID NO: 54367 - RNA, 22 nt, Homo sapiens
uuaugucuuugagcaaugcugu

SEQ ID NO: 54368 - RNA, 22 nt, Homo sapiens
uuaugguacaugugcacaaugu

SEQ ID NO: 54369 - RNA, 22 nt, Homo sapiens
uuaugguuuucucucacgcagg

SEQ ID NO: 54370 - RNA, 22 nt, Homo sapiens
uuagguauuuuguuaugucagc

SEQ ID NO: 54371 - RNA, 22 nt, Homo sapiens
uugaguagugugaugcaugucu

SEQ ID NO: 54372 - RNA, 22 nt, Homo sapiens
uugagguauaaagguagguugu

SEQ ID NO: 54373 - RNA, 22 nt, Homo sapiens
uugaggaggcagucuguccguu

SEQ ID NO: 54374 - RNA, 22 nt, Homo sapiens
uugagguaggaggagcuuggau

SEQ ID NO: 54375 - RNA, 22 nt, Homo sapiens
uugaggaaugugauuucaaaua

SEQ ID NO: 54376 - RNA, 22 nt, Homo sapiens
uugagauggaguuuugcucuug

SEQ ID NO: 54377 - RNA, 22 nt, Homo sapiens
uugagauggauagacauagcau

SEQ ID NO: 54378 - RNA, 22 nt, Homo sapiens
uugagauggagucuuguucuuu

SEQ ID NO: 54379 - RNA, 22 nt, Homo sapiens
uugagauggagucuuguucucu

SEQ ID NO: 54380 - RNA, 22 nt, Homo sapiens
uugagauggagucuugcucuug

SEQ ID NO: 54381 - RNA, 22 nt, Homo sapiens
uugagauggagucuugcucugu

SEQ ID NO: 54382 - RNA, 22 nt, Homo sapiens
uugagaugaaguuuugcucuuu

SEQ ID NO: 54383 - RNA, 22 nt, Homo sapiens
uugagauguauguauauaaugu

SEQ ID NO: 54384 - RNA, 23 nt, Homo sapiens
uugaaaagucaguagccucugau

SEQ ID NO: 54385 - RNA, 22 nt, Homo sapiens
uugacaaguuguccaguaugag

SEQ ID NO: 54386 - RNA, 22 nt, Homo sapiens
uugacugugguaauggaagcug

SEQ ID NO: 54387 - RNA, 22 nt, Homo sapiens
uugacuagaccaucuuucuaga

SEQ ID NO: 54388 - RNA, 22 nt, Homo sapiens
uugagauggagcuucacucuug

SEQ ID NO: 54389 - RNA, 22 nt, Homo sapiens
uugagauggagucucacucugu

SEQ ID NO: 54390 - RNA, 22 nt, Homo sapiens
uugagauggagucucacucuuc

SEQ ID NO: 54391 - RNA, 22 nt, Homo sapiens
uugagaucuugauauguuugaa

SEQ ID NO: 54392 - RNA, 22 nt, Homo sapiens
uugagauggagucuugcgcugu

SEQ ID NO: 54393 - RNA, 22 nt, Homo sapiens
uugagauggagucuugcacugu

SEQ ID NO: 54394 - RNA, 17 nt, Homo sapiens
uugagaguauaucuuac

SEQ ID NO: 54395 - RNA, 22 nt, Homo sapiens
uugagauagaauaggaauggga

SEQ ID NO: 54396 - RNA, 22 nt, Homo sapiens
uugagaucuuuuaggccuuugu

SEQ ID NO: 54397 - RNA, 22 nt, Homo sapiens
uugagaugaagucuugcucucu

SEQ ID NO: 54398 - RNA, 22 nt, Homo sapiens
uugagauccuuuugcucaucag

SEQ ID NO: 54399 - RNA, 22 nt, Homo sapiens
uuccugagagggcugggugcag

SEQ ID NO: 54400 - RNA, 22 nt, Homo sapiens
uuccuguagcgauuuuaguaau

SEQ ID NO: 54401 - RNA, 22 nt, Homo sapiens
uuccuugaaacagucaagagaa

SEQ ID NO: 54402 - RNA, 22 nt, Homo sapiens
uuccuugagucuuuuuccugag

SEQ ID NO: 54403 - RNA, 21 nt, Homo sapiens
uucuacuccggcguuguuuuu

SEQ ID NO: 54404 - RNA, 22 nt, Homo sapiens
uucuacagugacugcagccaua

SEQ ID NO: 54405 - RNA, 22 nt, Homo sapiens
uucguuuguaauccuuacagca

SEQ ID NO: 54406 - RNA, 21 nt, Homo sapiens
uucuaaguaaauguuggacau

SEQ ID NO: 54407 - RNA, 22 nt, Homo sapiens
uucgagagaaaaggcauauaug

SEQ ID NO: 54408 - RNA, 21 nt, Homo sapiens
uucggcaauaugaaccaaugu

SEQ ID NO: 54409 - RNA, 22 nt, Homo sapiens
uugaaagcuaucucaaaucgcu

SEQ ID NO: 54410 - RNA, 22 nt, Homo sapiens
uugaaagacagaggggcaaguu

SEQ ID NO: 54411 - RNA, 22 nt, Homo sapiens
uugaaagacaucaccuacugcu

SEQ ID NO: 54412 - RNA, 22 nt, Homo sapiens
uugaaaguaaacaucacaaaga

SEQ ID NO: 54413 - RNA, 21 nt, Homo sapiens
uucuuugcucaguguuagagu

SEQ ID NO: 54414 - RNA, 22 nt, Homo sapiens
uugaaauguuuagaaguuugga

SEQ ID NO: 54415 - RNA, 22 nt, Homo sapiens
uugaagacuaaguuaucaggau

SEQ ID NO: 54416 - RNA, 22 nt, Homo sapiens
uucacugugcuuaaauucugcu

SEQ ID NO: 54417 - RNA, 22 nt, Homo sapiens
uucagagagggagggauaccua

SEQ ID NO: 54418 - RNA, 22 nt, Homo sapiens
uucacugugaacucauauucag

SEQ ID NO: 54419 - RNA, 22 nt, Homo sapiens
uucagagugguaugaagugaug

SEQ ID NO: 54420 - RNA, 22 nt, Homo sapiens
uucagagcauugguuuuuugaa

SEQ ID NO: 54421 - RNA, 22 nt, Homo sapiens
uucagaguggacagaaauuaag

SEQ ID NO: 54422 - RNA, 22 nt, Homo sapiens
uucacugcaugaaaaggacagc

SEQ ID NO: 54423 - RNA, 22 nt, Homo sapiens
uucacugagccagacuaagaca

SEQ ID NO: 54424 - RNA, 21 nt, Homo sapiens
uuccagugagccuagaugccu

SEQ ID NO: 54425 - RNA, 22 nt, Homo sapiens
uuccaguggacuacuucauccu

SEQ ID NO: 54426 - RNA, 22 nt, Homo sapiens
uuccaguuauuauaccucuuaa

SEQ ID NO: 54427 - RNA, 22 nt, Homo sapiens
uuccaguugugagcuauccggg

SEQ ID NO: 54428 - RNA, 22 nt, Homo sapiens
uuccacaggguugaacuaguuu

SEQ ID NO: 54429 - RNA, 22 nt, Homo sapiens
cuggauguaaaugaaacuacag

SEQ ID NO: 54430 - RNA, 20 nt, Homo sapiens
cuggaugucgaggcagaggu

SEQ ID NO: 54431 - RNA, 22 nt, Homo sapiens
cuggcaaauguuuucuguaaag

SEQ ID NO: 54432 - RNA, 22 nt, Homo sapiens
cuggacaaaucuggaaagaacc

SEQ ID NO: 54433 - RNA, 22 nt, Homo sapiens
cuggaaucuagaaaagguaagg

SEQ ID NO: 54434 - RNA, 22 nt, Homo sapiens
cuggaaacaucuuaggaaugca

SEQ ID NO: 54435 - RNA, 22 nt, Homo sapiens
cugguuuguaaaguuccugaga

SEQ ID NO: 54436 - RNA, 22 nt, Homo sapiens
cuggugugugacuuuucauuau

SEQ ID NO: 54437 - RNA, 22 nt, Homo sapiens
cuggucguuauuuaucuucuca

SEQ ID NO: 54438 - RNA, 21 nt, Homo sapiens
cugguguuagcacuucuuccc

SEQ ID NO: 54439 - RNA, 22 nt, Homo sapiens
cugggaucaguucuagucagaa

SEQ ID NO: 54440 - RNA, 22 nt, Homo sapiens
cugaggacaucagggaagcauc

SEQ ID NO: 54441 - RNA, 22 nt, Homo sapiens
cugcccguaauccucuccccag

SEQ ID NO: 54442 - RNA, 22 nt, Homo sapiens
cugacaugcagccacugcaccu

SEQ ID NO: 54443 - RNA, 22 nt, Homo sapiens
cugagauacacuaauagucucu

SEQ ID NO: 54444 - RNA, 17 nt, Homo sapiens
cugaccucauuguguac

SEQ ID NO: 54445 - RNA, 22 nt, Homo sapiens
cugacugugcaugcccagcccc

SEQ ID NO: 54446 - RNA, 22 nt, Homo sapiens
cugacuuauguggacuauuuca

SEQ ID NO: 54447 - RNA, 22 nt, Homo sapiens
cugagaacaucauucagauauu

SEQ ID NO: 54448 - RNA, 17 nt, Homo sapiens
cucucugguuuaaagca

SEQ ID NO: 54449 - RNA, 22 nt, Homo sapiens
cucugagccugagguuccuacu

SEQ ID NO: 54450 - RNA, 22 nt, Homo sapiens
cuacaguagagaggauguagaa

SEQ ID NO: 54451 - RNA, 22 nt, Homo sapiens
cuacauuguagguauucaaacu

SEQ ID NO: 54452 - RNA, 22 nt, Homo sapiens
cuacaguuauguuuuaaaugug

SEQ ID NO: 54453 - RNA, 22 nt, Homo sapiens
cuaauccugugguagcacucaa

SEQ ID NO: 54454 - RNA, 18 nt, Homo sapiens
cuaauacuauucaacaag

SEQ ID NO: 54455 - RNA, 21 nt, Homo sapiens
cuaaucucacccuuuucuggg

SEQ ID NO: 54456 - RNA, 22 nt, Homo sapiens
cuaagugaacugucacugagaa

SEQ ID NO: 54457 - RNA, 22 nt, Homo sapiens
cuagaguguaguuuucuuagga

SEQ ID NO: 54458 - RNA, 22 nt, Homo sapiens
cuagcagcaugagaauggacca

SEQ ID NO: 54459 - RNA, 22 nt, Homo sapiens
cuagcagcauaagaaucaccaa

SEQ ID NO: 54460 - RNA, 22 nt, Homo sapiens
cuccauuuggaacagauguccu

SEQ ID NO: 54461 - RNA, 22 nt, Homo sapiens
cuagcuuuuuaugacaaucuug

SEQ ID NO: 54462 - RNA, 22 nt, Homo sapiens
cauugucccucaaugacuauga

SEQ ID NO: 54463 - RNA, 22 nt, Homo sapiens
cauuguacauaaguauggagua

SEQ ID NO: 54464 - RNA, 19 nt, Homo sapiens
ccaguguugccagagcuga

SEQ ID NO: 54465 - RNA, 16 nt, Homo sapiens
cuaaaaugucuacuug

SEQ ID NO: 54466 - RNA, 22 nt, Homo sapiens
cgcaguguuugugucccugggu

SEQ ID NO: 54467 - RNA, 22 nt, Homo sapiens
ccaucacacugugauuauuauc

SEQ ID NO: 54468 - RNA, 22 nt, Homo sapiens
caacucuguaggauccaggugg

SEQ ID NO: 54469 - RNA, 22 nt, Homo sapiens
auugcacuggggguuagaauuu

SEQ ID NO: 54470 - RNA, 22 nt, Homo sapiens
caagugaauaguugcucucaga

SEQ ID NO: 54471 - RNA, 22 nt, Homo sapiens
cacagucugggcuuguuuguac

SEQ ID NO: 54472 - RNA, 19 nt, Homo sapiens
caauacuucuuggcauaca

SEQ ID NO: 54473 - RNA, 22 nt, Homo sapiens
cacaaugucuaagauguuucua

SEQ ID NO: 54474 - RNA, 22 nt, Homo sapiens
cacaaaguagauuagucuucca

SEQ ID NO: 54475 - RNA, 22 nt, Homo sapiens
caauggcacgaucucgucucac

SEQ ID NO: 54476 - RNA, 22 nt, Homo sapiens
caaugguacuagauaucuucag

SEQ ID NO: 54477 - RNA, 21 nt, Homo sapiens
cacugcacuugccuucugggu

SEQ ID NO: 54478 - RNA, 22 nt, Homo sapiens
cacauguucaggagcacuuaga

SEQ ID NO: 54479 - RNA, 22 nt, Homo sapiens
cacugcaguggaagauuaagaa

SEQ ID NO: 54480 - RNA, 22 nt, Homo sapiens
cagauaguuguagauaugcagc

SEQ ID NO: 54481 - RNA, 22 nt, Homo sapiens
cagauacuccuggucucaggag

SEQ ID NO: 54482 - RNA, 22 nt, Homo sapiens
cagagucaagcucuuguuccau

SEQ ID NO: 54483 - RNA, 22 nt, Homo sapiens
cagagaacugaguuauuuucuu

SEQ ID NO: 54484 - RNA, 22 nt, Homo sapiens
cagagaucaugcaacugcucgc

SEQ ID NO: 54485 - RNA, 22 nt, Homo sapiens
cagaaguauugguaugcucugu

SEQ ID NO: 54486 - RNA, 22 nt, Homo sapiens
caugucacuuccucucugaugg

SEQ ID NO: 54487 - RNA, 22 nt, Homo sapiens
cauggcucuuugcugcuaaagu

SEQ ID NO: 54488 - RNA, 22 nt, Homo sapiens
cauugcaaugaggucuugcagu

SEQ ID NO: 54489 - RNA, 22 nt, Homo sapiens
cauugcaauccagccugggcaa

SEQ ID NO: 54490 - RNA, 22 nt, Homo sapiens
caugccacugcacgccauccug

SEQ ID NO: 54491 - RNA, 19 nt, Homo sapiens
caugccacugcacuugagu

SEQ ID NO: 54492 - RNA, 22 nt, Homo sapiens
caucccugaaccccagaaaucu

SEQ ID NO: 54493 - RNA, 22 nt, Homo sapiens
caucauugcacccuauagagaa

SEQ ID NO: 54494 - RNA, 22 nt, Homo sapiens
cagcuguuguuccagucuuuua

SEQ ID NO: 54495 - RNA, 22 nt, Homo sapiens
cagauggucuuaaggcagccuu

SEQ ID NO: 54496 - RNA, 22 nt, Homo sapiens
cagcaaaucauccuauuugagc

SEQ ID NO: 54497 - RNA, 22 nt, Homo sapiens
caguacaauguggaaaaggagu

SEQ ID NO: 54498 - RNA, 22 nt, Homo sapiens
caggugguauuugguuuucugu

SEQ ID NO: 54499 - RNA, 22 nt, Homo sapiens
cagguaguauuugguuacauaa

SEQ ID NO: 54500 - RNA, 22 nt, Homo sapiens
gagcagacaugaggaccgcugg

SEQ ID NO: 54501 - RNA, 20 nt, Homo sapiens
gagcucaucuucuuuaccac

SEQ ID NO: 54502 - RNA, 22 nt, Homo sapiens
gagcacauaugacauuuucuuc

SEQ ID NO: 54503 - RNA, 22 nt, Homo sapiens
gagauucaucuagguccagaga

SEQ ID NO: 54504 - RNA, 22 nt, Homo sapiens
gagauuaauacacaucaaaugc

SEQ ID NO: 54505 - RNA, 22 nt, Homo sapiens
gagcugaucuuuucugauucca

SEQ ID NO: 54506 - RNA, 22 nt, Homo sapiens
gagcucauuguugcuaaagaga

SEQ ID NO: 54507 - RNA, 22 nt, Homo sapiens
gagucagugucuugcucuguca

SEQ ID NO: 54508 - RNA, 21 nt, Homo sapiens
gaggauauuuuuauguuugga

SEQ ID NO: 54509 - RNA, 22 nt, Homo sapiens
gagaacagagauaauuuuacuu

SEQ ID NO: 54510 - RNA, 18 nt, Homo sapiens
gacuuggaguuuacagug

SEQ ID NO: 54511 - RNA, 22 nt, Homo sapiens
gacuucaucauacuaugugugg

SEQ ID NO: 54512 - RNA, 22 nt, Homo sapiens
gagaacauuuaagccacucagg

SEQ ID NO: 54513 - RNA, 22 nt, Homo sapiens
gagaacauuaauaguuaauuuu

SEQ ID NO: 54514 - RNA, 22 nt, Homo sapiens
gagaugucuauuucagagaugu

SEQ ID NO: 54515 - RNA, 22 nt, Homo sapiens
gagaugugugugauuauauaau

SEQ ID NO: 54516 - RNA, 22 nt, Homo sapiens
gagauguuuguuucacugucac

SEQ ID NO: 54517 - RNA, 22 nt, Homo sapiens
gacuacaacuucuauuauucag

SEQ ID NO: 54518 - RNA, 22 nt, Homo sapiens
gaccuuguagaaucucaugauu

SEQ ID NO: 54519 - RNA, 22 nt, Homo sapiens
gacuagagagccaaccgucagg

SEQ ID NO: 54520 - RNA, 22 nt, Homo sapiens
gacuagggaccaugagcaaucc

SEQ ID NO: 54521 - RNA, 20 nt, Homo sapiens
gacauguugguuugcugcac

SEQ ID NO: 54522 - RNA, 22 nt, Homo sapiens
gacauguuuucaagauuuauaa

SEQ ID NO: 54523 - RNA, 22 nt, Homo sapiens
gacauguuucucucuguuuacu

SEQ ID NO: 54524 - RNA, 22 nt, Homo sapiens
gacauguuuucauguauuugga

SEQ ID NO: 54525 - RNA, 20 nt, Homo sapiens
gacauguuuuguggccuaac

SEQ ID NO: 54526 - RNA, 21 nt, Homo sapiens
cuuuugcacuccagccugggu

SEQ ID NO: 54527 - RNA, 22 nt, Homo sapiens
cuuuuggcuuaagauugucuug

SEQ ID NO: 54528 - RNA, 22 nt, Homo sapiens
cuuuuacacuguuagugggaau

SEQ ID NO: 54529 - RNA, 22 nt, Homo sapiens
cuuuugugauucuucaguuacu

SEQ ID NO: 54530 - RNA, 22 nt, Homo sapiens
cuuuuacacugcuggugggaau

SEQ ID NO: 54531 - RNA, 20 nt, Homo sapiens
gaaacaucuauccucuccuu

SEQ ID NO: 54532 - RNA, 21 nt, Homo sapiens
cuuuuuacucguucauaugca

SEQ ID NO: 54533 - RNA, 20 nt, Homo sapiens
gacauagagacucucaaaaa

SEQ ID NO: 54534 - RNA, 22 nt, Homo sapiens
gaaaugucugagauguggcuca

SEQ ID NO: 54535 - RNA, 23 nt, Homo sapiens
gaaaugucuuagugaaauugcuu

SEQ ID NO: 54536 - RNA, 22 nt, Homo sapiens
gaaauguugauagugggcauug

SEQ ID NO: 54537 - RNA, 22 nt, Homo sapiens
gaaaucucuacuauuuugaucu

SEQ ID NO: 54538 - RNA, 22 nt, Homo sapiens
cugucuggaggccugcaaauaa

SEQ ID NO: 54539 - RNA, 22 nt, Homo sapiens
cugucucagccucuccaguagc

SEQ ID NO: 54540 - RNA, 22 nt, Homo sapiens
cugucuaugagccaggaagcca

SEQ ID NO: 54541 - RNA, 22 nt, Homo sapiens
cugucagugggaguucaggcuu

SEQ ID NO: 54542 - RNA, 22 nt, Homo sapiens
cuguauguuucuaugaauguga

SEQ ID NO: 54543 - RNA, 22 nt, Homo sapiens
cugugaucuuuuuucauguggu

SEQ ID NO: 54544 - RNA, 22 nt, Homo sapiens
cugugauuauauaguuaaggua

SEQ ID NO: 54545 - RNA, 22 nt, Homo sapiens
cugugcaugcgcggagcugaaa

SEQ ID NO: 54546 - RNA, 22 nt, Homo sapiens
cugugcacaucuggcggcccga

SEQ ID NO: 54547 - RNA, 22 nt, Homo sapiens
cugugcauggauuuuaagauug

SEQ ID NO: 54548 - RNA, 22 nt, Homo sapiens
ggagaucacucuuuguagcgug

SEQ ID NO: 54549 - RNA, 22 nt, Homo sapiens
ggagaucauuuccuauuugaag

SEQ ID NO: 54550 - RNA, 22 nt, Homo sapiens
ggagaugaaaugagcuacuuaa

SEQ ID NO: 54551 - RNA, 20 nt, Homo sapiens
ggagguguugauuuuucuuu

SEQ ID NO: 54552 - RNA, 22 nt, Homo sapiens
ggaugugugcacgcgcacaugc

SEQ ID NO: 54553 - RNA, 21 nt, Homo sapiens
ggauucaucccucaugaauuu

SEQ ID NO: 54554 - RNA, 23 nt, Homo sapiens
ggauucaucuguuuguucgcugu

SEQ ID NO: 54555 - RNA, 22 nt, Homo sapiens
ggcaaaaucgcaauuacuuuug

SEQ ID NO: 54556 - RNA, 22 nt, Homo sapiens
ggagugugauucaguauaauau

SEQ ID NO: 54557 - RNA, 22 nt, Homo sapiens
ggagugugauuguucucuguua

SEQ ID NO: 54558 - RNA, 19 nt, Homo sapiens
gcugauguuacauucuugc

SEQ ID NO: 54559 - RNA, 22 nt, Homo sapiens
gcucguuuuugccucugguugc

SEQ ID NO: 54560 - RNA, 16 nt, Homo sapiens
gcucuuguucucuguu

SEQ ID NO: 54561 - RNA, 22 nt, Homo sapiens
ggaaagacuauuguaaaggaug

SEQ ID NO: 54562 - RNA, 22 nt, Homo sapiens
ggacauuaacugcaagauagau

SEQ ID NO: 54563 - RNA, 22 nt, Homo sapiens
gcuguuugccgccaucgcagac

SEQ ID NO: 54564 - RNA, 22 nt, Homo sapiens
gcacgcauuguccuucuaguca

SEQ ID NO: 54565 - RNA, 22 nt, Homo sapiens
gaugguuuuuuaagaagagccu

SEQ ID NO: 54566 - RNA, 22 nt, Homo sapiens
gcaccauugacaagaaauaggu

SEQ ID NO: 54567 - RNA, 22 nt, Homo sapiens
gcaugcauuuuccuaacuagaa

SEQ ID NO: 54568 - RNA, 22 nt, Homo sapiens
gcucaugagacaagcaggagua

SEQ ID NO: 54569 - RNA, 22 nt, Homo sapiens
gaguuacauuguaauugccgag

SEQ ID NO: 54570 - RNA, 22 nt, Homo sapiens
gauacaccauuuucuagcuauu

SEQ ID NO: 54571 - RNA, 22 nt, Homo sapiens
gauggcauuucuggaucugccc

SEQ ID NO: 54572 - RNA, 22 nt, Homo sapiens
gaugugaaaucauaguuucuag

SEQ ID NO: 54573 - RNA, 22 nt, Homo sapiens
gauguguuuccaggauuuguuu

SEQ ID NO: 54574 - RNA, 22 nt, Homo sapiens
gauguguuuaucacccaguccu

SEQ ID NO: 54575 - RNA, 22 nt, Homo sapiens
gauguguugggaagauuucaag

SEQ ID NO: 54576 - RNA, 22 nt, Homo sapiens
gauguguuuuaggaucucagca

SEQ ID NO: 54577 - RNA, 22 nt, Homo sapiens
gcaagacaugucuaagguuuaa

SEQ ID NO: 54578 - RNA, 22 nt, Homo sapiens
gauguguuuguuucuggaggag

SEQ ID NO: 54579 - RNA, 22 nt, Homo sapiens
uacuuuguagagugugagaauu

SEQ ID NO: 54580 - RNA, 22 nt, Homo sapiens
uagaauggaaggcauguuugcc

SEQ ID NO: 54581 - RNA, 22 nt, Homo sapiens
uagaaucuaacucgcaugaaaa

SEQ ID NO: 54582 - RNA, 22 nt, Homo sapiens
uacugcuuaagggcaugggccc

SEQ ID NO: 54583 - RNA, 18 nt, Homo sapiens
uacugcacucuccagccu

SEQ ID NO: 54584 - RNA, 22 nt, Homo sapiens
uagauuauuccuuugaauggcc

SEQ ID NO: 54585 - RNA, 22 nt, Homo sapiens
uagauucaucuguuccuuuuga

SEQ ID NO: 54586 - RNA, 22 nt, Homo sapiens
uagcaagaugaauuugugcaaa

SEQ ID NO: 54587 - RNA, 20 nt, Homo sapiens
uagcacacauguagaauagu

SEQ ID NO: 54588 - RNA, 22 nt, Homo sapiens
uagauuaucccugauuugucca

SEQ ID NO: 54589 - RNA, 22 nt, Homo sapiens
uacccgucuacuuugaacaaaa

SEQ ID NO: 54590 - RNA, 22 nt, Homo sapiens
uagauuaucucaccacucgagu

SEQ ID NO: 54591 - RNA, 23 nt, Homo sapiens
uagaucaucaaguuuacugugcu

SEQ ID NO: 54592 - RNA, 22 nt, Homo sapiens
uagaucauauucagugcuuacu

SEQ ID NO: 54593 - RNA, 22 nt, Homo sapiens
uagaauguauaauauuuuacuu

SEQ ID NO: 54594 - RNA, 23 nt, Homo sapiens
uagaauguuuuuccauguuucuu

SEQ ID NO: 54595 - RNA, 20 nt, Homo sapiens
uaagacaugguccacaugcc

SEQ ID NO: 54596 - RNA, 22 nt, Homo sapiens
uaagacuuuuugggaauauaga

SEQ ID NO: 54597 - RNA, 22 nt, Homo sapiens
uaagcaguaaaugaagucuugc

SEQ ID NO: 54598 - RNA, 22 nt, Homo sapiens
uaaggauuuuggugauuacacu

SEQ ID NO: 54599 - RNA, 22 nt, Homo sapiens
uaagcuaauguguuuucucuua

SEQ ID NO: 54600 - RNA, 22 nt, Homo sapiens
uaacuaaagagaagucaauguc

SEQ ID NO: 54601 - RNA, 22 nt, Homo sapiens
uaacugcaaccucugccugcug

SEQ ID NO: 54602 - RNA, 22 nt, Homo sapiens
uaacugcaaccuccgccucccg

SEQ ID NO: 54603 - RNA, 22 nt, Homo sapiens
uaagacugccccagacagcaag

SEQ ID NO: 54604 - RNA, 22 nt, Homo sapiens
uaagacuguguaauuuaugaag

SEQ ID NO: 54605 - RNA, 20 nt, Homo sapiens
uaacuguggcuucuuuuggc

SEQ ID NO: 54606 - RNA, 22 nt, Homo sapiens
uacauugucauauucucucucu

SEQ ID NO: 54607 - RNA, 22 nt, Homo sapiens
uacauugcacuuuauuagauac

SEQ ID NO: 54608 - RNA, 18 nt, Homo sapiens
uaaggcacuauaggcauu

SEQ ID NO: 54609 - RNA, 22 nt, Homo sapiens
uaguauguuuauagcauugagu

SEQ ID NO: 54610 - RNA, 22 nt, Homo sapiens
uagucacacacucaacuuuuca

SEQ ID NO: 54611 - RNA, 22 nt, Homo sapiens
uaguaucacaagguguacaccc

SEQ ID NO: 54612 - RNA, 22 nt, Homo sapiens
uaguaguuuuguguauaauaau

SEQ ID NO: 54613 - RNA, 22 nt, Homo sapiens
uaggguaguaauaguuguuuca

SEQ ID NO: 54614 - RNA, 19 nt, Homo sapiens
uaucaaguaugcacuguac

SEQ ID NO: 54615 - RNA, 22 nt, Homo sapiens
uauauguucuugcacuggaaag

SEQ ID NO: 54616 - RNA, 22 nt, Homo sapiens
uaguugcauucaggauaugacg

SEQ ID NO: 54617 - RNA, 22 nt, Homo sapiens
uaguucauuauguguugcucag

SEQ ID NO: 54618 - RNA, 22 nt, Homo sapiens
uauauaagcugaugagccacaa

SEQ ID NO: 54619 - RNA, 22 nt, Homo sapiens
uauaugauugguagacccugca

SEQ ID NO: 54620 - RNA, 22 nt, Homo sapiens
uagcuccagugggguuacugcu

SEQ ID NO: 54621 - RNA, 22 nt, Homo sapiens
uagcuaaauucagcucuaggua

SEQ ID NO: 54622 - RNA, 22 nt, Homo sapiens
uagcaccucuuuggccuuucgu

SEQ ID NO: 54623 - RNA, 22 nt, Homo sapiens
uagcacuauguuaucacauacu

SEQ ID NO: 54624 - RNA, 22 nt, Homo sapiens
uagcaguuguuguuacuuguau

SEQ ID NO: 54625 - RNA, 22 nt, Homo sapiens
uaggcuuuucugggaugugggc

SEQ ID NO: 54626 - RNA, 22 nt, Homo sapiens
uaggcacugagaauaugaggau

SEQ ID NO: 54627 - RNA, 22 nt, Homo sapiens
uaggcacuguguuuguaggagu

SEQ ID NO: 54628 - RNA, 22 nt, Homo sapiens
uaggcauuuuucugauaaacua

SEQ ID NO: 54629 - RNA, 22 nt, Homo sapiens
uaggacuuuucuugagagugac

SEQ ID NO: 54630 - RNA, 22 nt, Homo sapiens
uaggacaaugguacagcagaaa

SEQ ID NO: 54631 - RNA, 22 nt, Homo sapiens
uaggaaugaacgauuuauuggu

SEQ ID NO: 54632 - RNA, 22 nt, Homo sapiens
uagcugaucuuuuaaagaauga

SEQ ID NO: 54633 - RNA, 22 nt, Homo sapiens
uagcugcauccugugcacucaa

SEQ ID NO: 54634 - RNA, 22 nt, Homo sapiens
uauguuaucaaaaagcuaagga

SEQ ID NO: 54635 - RNA, 22 nt, Homo sapiens
uaugugcacaugcccuggugac

SEQ ID NO: 54636 - RNA, 22 nt, Homo sapiens
uauugcauauuauucuaguggc

SEQ ID NO: 54637 - RNA, 20 nt, Homo sapiens
ucaaaguaugcucugcacua

SEQ ID NO: 54638 - RNA, 22 nt, Homo sapiens
ucaacacaguuaaauggggaaa

SEQ ID NO: 54639 - RNA, 22 nt, Homo sapiens
ucaaaugauucuccugccucag

SEQ ID NO: 54640 - RNA, 21 nt, Homo sapiens
ucaaaguguucuuuuguugaa

SEQ ID NO: 54641 - RNA, 22 nt, Homo sapiens
ucaaagucuucucaaguaacau

SEQ ID NO: 54642 - RNA, 22 nt, Homo sapiens
ucaaagugagcuccuucucacu

SEQ ID NO: 54643 - RNA, 22 nt, Homo sapiens
uaucugcaucccauuuuuauca

SEQ ID NO: 54644 - RNA, 22 nt, Homo sapiens
uaucucuuuucauguguaaaug

SEQ ID NO: 54645 - RNA, 18 nt, Homo sapiens
uaucucauuucuuagguc

SEQ ID NO: 54646 - RNA, 22 nt, Homo sapiens
uaugggcuuuguuuuguacuag

SEQ ID NO: 54647 - RNA, 22 nt, Homo sapiens
uaugguuuucucuuacguguug

SEQ ID NO: 54648 - RNA, 17 nt, Homo sapiens
uauguaguacuuauaaa

SEQ ID NO: 54649 - RNA, 22 nt, Homo sapiens
uaugucacagguuuuggugaaa

SEQ ID NO: 54650 - RNA, 22 nt, Homo sapiens
uaugucuuuugcuugcaaauag

SEQ ID NO: 54651 - RNA, 22 nt, Homo sapiens
uaucaugucuguguguaccuag

SEQ ID NO: 54652 - RNA, 22 nt, Homo sapiens
uaucacacuguuggauuugauu

SEQ ID NO: 54653 - RNA, 22 nt, Homo sapiens
uaucauuguguuauuucuucca

SEQ ID NO: 54654 - RNA, 18 nt, Homo sapiens
uaucauguagggaaguug

SEQ ID NO: 54655 - RNA, 22 nt, Homo sapiens
uaucucagagaaucagauuuac

SEQ ID NO: 54656 - RNA, 22 nt, Homo sapiens
ucacauggaaaaguccaguaaa

SEQ ID NO: 54657 - RNA, 22 nt, Homo sapiens
ucacaguugauugaaacacagc

SEQ ID NO: 54658 - RNA, 22 nt, Homo sapiens
ucacaguucagcauggcugagg

SEQ ID NO: 54659 - RNA, 22 nt, Homo sapiens
ucacauagcauaaugucugcaa

SEQ ID NO: 54660 - RNA, 22 nt, Homo sapiens
ucacaucucagguuucuugaca

SEQ ID NO: 54661 - RNA, 22 nt, Homo sapiens
ucaccggagguggguugaccag

SEQ ID NO: 54662 - RNA, 22 nt, Homo sapiens
ucacagaugcuugacccauuuc

SEQ ID NO: 54663 - RNA, 22 nt, Homo sapiens
ucacagcggucgaacuaauuug

SEQ ID NO: 54664 - RNA, 22 nt, Homo sapiens
ucacagucaaaguaaucauaga

SEQ ID NO: 54665 - RNA, 22 nt, Homo sapiens
ucacaccauucuucuacuucag

SEQ ID NO: 54666 - RNA, 22 nt, Homo sapiens
ucacaauggagacucgggcgga

SEQ ID NO: 54667 - RNA, 22 nt, Homo sapiens
ucacaauguaaaugaggguugg

SEQ ID NO: 54668 - RNA, 22 nt, Homo sapiens
ucaagugcauugauucaguauu

SEQ ID NO: 54669 - RNA, 18 nt, Homo sapiens
ucaauguggauguucuuu

SEQ ID NO: 54670 - RNA, 22 nt, Homo sapiens
ucaauguaucuccaagaauuga

SEQ ID NO: 54671 - RNA, 20 nt, Homo sapiens
ucacaagccaagaucacguc

SEQ ID NO: 54672 - RNA, 22 nt, Homo sapiens
ucaaguacugccuugcucuggc

SEQ ID NO: 54673 - RNA, 22 nt, Homo sapiens
ucaacagugggcacuguaaaug

SEQ ID NO: 54674 - RNA, 22 nt, Homo sapiens
gugaaaugaaacgcuaugucuu

SEQ ID NO: 54675 - RNA, 22 nt, Homo sapiens
gugaaaugaaucuggaaauauu

SEQ ID NO: 54676 - RNA, 22 nt, Homo sapiens
gugaacaauguuuuauccuggg

SEQ ID NO: 54677 - RNA, 22 nt, Homo sapiens
gugaacagcagaugagugagug

SEQ ID NO: 54678 - RNA, 22 nt, Homo sapiens
gugaaugaaugggugaauacau

SEQ ID NO: 54679 - RNA, 22 nt, Homo sapiens
gugaaucuguuuucuucuguuc

SEQ ID NO: 54680 - RNA, 22 nt, Homo sapiens
gucuuugaugucuaugugcuuc

SEQ ID NO: 54681 - RNA, 22 nt, Homo sapiens
gucuuugcauguauguucauga

SEQ ID NO: 54682 - RNA, 22 nt, Homo sapiens
gucuuuaguugaaacauguggu

SEQ ID NO: 54683 - RNA, 22 nt, Homo sapiens
gucuuccagccuccaucuuucu

SEQ ID NO: 54684 - RNA, 22 nt, Homo sapiens
gugaaagacagcauuaauggcu

SEQ ID NO: 54685 - RNA, 22 nt, Homo sapiens
gugaaagauuaaaccagugugu

SEQ ID NO: 54686 - RNA, 22 nt, Homo sapiens
gugaaagcaucugacugugcca

SEQ ID NO: 54687 - RNA, 22 nt, Homo sapiens
gugaaaagaugagcaccauaca

SEQ ID NO: 54688 - RNA, 22 nt, Homo sapiens
gucuuuguuauuaugaaucaac

SEQ ID NO: 54689 - RNA, 22 nt, Homo sapiens
gucuggcuuaucucacuuacca

SEQ ID NO: 54690 - RNA, 20 nt, Homo sapiens
gucugucuccgaguagaauu

SEQ ID NO: 54691 - RNA, 22 nt, Homo sapiens
gucuguuuggggaccuguggcc

SEQ ID NO: 54692 - RNA, 22 nt, Homo sapiens
gucugguacuuguuuguaaggg

SEQ ID NO: 54693 - RNA, 22 nt, Homo sapiens
gucagggagucucuaucagugg

SEQ ID NO: 54694 - RNA, 22 nt, Homo sapiens
gucucauugcaguuagaccugu

SEQ ID NO: 54695 - RNA, 22 nt, Homo sapiens
gucucccagccuacauauuucu

SEQ ID NO: 54696 - RNA, 22 nt, Homo sapiens
gucucugguugcuuuuguacca

SEQ ID NO: 54697 - RNA, 22 nt, Homo sapiens
gucuccgagccguguggagccg

SEQ ID NO: 54698 - RNA, 22 nt, Homo sapiens
gucacauugaugcccauggugg

SEQ ID NO: 54699 - RNA, 22 nt, Homo sapiens
gucacggagauauggauucgga

SEQ ID NO: 54700 - RNA, 22 nt, Homo sapiens
gucacugucuacuguaauagcc

SEQ ID NO: 54701 - RNA, 22 nt, Homo sapiens
gucacugggugcugcgccuguc

SEQ ID NO: 54702 - RNA, 22 nt, Homo sapiens
gucagcaaagaggaauaguuug

SEQ ID NO: 54703 - RNA, 22 nt, Homo sapiens
gucaacauauuaauuauguucu

SEQ ID NO: 54704 - RNA, 22 nt, Homo sapiens
gucacagaggcuaagaccccac

SEQ ID NO: 54705 - RNA, 22 nt, Homo sapiens
ggcauguugauagguagaugua

SEQ ID NO: 54706 - RNA, 21 nt, Homo sapiens
ggcaugaauggaaaagugaga

SEQ ID NO: 54707 - RNA, 22 nt, Homo sapiens
ggcaguguauuacuuaggguuc

SEQ ID NO: 54708 - RNA, 22 nt, Homo sapiens
ggcaguguuauuauauuuuugg

SEQ ID NO: 54709 - RNA, 22 nt, Homo sapiens
ggcaguuuggcaguuucauaaa

SEQ ID NO: 54710 - RNA, 22 nt, Homo sapiens
ggcagaguggacauuuaaaugu

SEQ ID NO: 54711 - RNA, 22 nt, Homo sapiens
ggcagcaugggugccuuuguga

SEQ ID NO: 54712 - RNA, 22 nt, Homo sapiens
ggcaagaaccacaauuacuuuu

SEQ ID NO: 54713 - RNA, 22 nt, Homo sapiens
ggcacaauugcagcaauaaaca

SEQ ID NO: 54714 - RNA, 22 nt, Homo sapiens
guaaugcacucccaaagaucca

SEQ ID NO: 54715 - RNA, 22 nt, Homo sapiens
guacaagugcaguuucguuaca

SEQ ID NO: 54716 - RNA, 22 nt, Homo sapiens
guauaaguugacucaaucuuug

SEQ ID NO: 54717 - RNA, 23 nt, Homo sapiens
guaguuugaugcaauccacuugu

SEQ ID NO: 54718 - RNA, 22 nt, Homo sapiens
guaguuuaucagaaagaauagg

SEQ ID NO: 54719 - RNA, 22 nt, Homo sapiens
guaaugaacuugaaagccuguu

SEQ ID NO: 54720 - RNA, 22 nt, Homo sapiens
guaagguuguauuucaagaaac

SEQ ID NO: 54721 - RNA, 22 nt, Homo sapiens
guaagugauagaauuaggauuc

SEQ ID NO: 54722 - RNA, 22 nt, Homo sapiens
guaagucucaugagaucugaug

SEQ ID NO: 54723 - RNA, 22 nt, Homo sapiens
ggcauguaauuauucaaagugg

SEQ ID NO: 54724 - RNA, 22 nt, Homo sapiens
guaacacaugcugcucucuggu

SEQ ID NO: 54725 - RNA, 20 nt, Homo sapiens
guaacagcacuuucccaaag

SEQ ID NO: 54726 - RNA, 22 nt, Homo sapiens
guugcaauugauguaugucuga

SEQ ID NO: 54727 - RNA, 20 nt, Homo sapiens
guugaugcugaaguugcuua

SEQ ID NO: 54728 - RNA, 22 nt, Homo sapiens
guucucacuggacugugaaaau

SEQ ID NO: 54729 - RNA, 22 nt, Homo sapiens
guugaguuugaccugaacucug

SEQ ID NO: 54730 - RNA, 17 nt, Homo sapiens
guugaguuugagucaag

SEQ ID NO: 54731 - RNA, 22 nt, Homo sapiens
guucucacuggugcugguaagu

SEQ ID NO: 54732 - RNA, 22 nt, Homo sapiens
guucuggagauaaagccaaggu

SEQ ID NO: 54733 - RNA, 20 nt, Homo sapiens
guucuugcucguguaucuuc

SEQ ID NO: 54734 - RNA, 22 nt, Homo sapiens
guguuauugagaaauagggugu

SEQ ID NO: 54735 - RNA, 20 nt, Homo sapiens
guucauguaauuaguucagg

SEQ ID NO: 54736 - RNA, 22 nt, Homo sapiens
uaaacugucuugcaguuacaug

SEQ ID NO: 54737 - RNA, 22 nt, Homo sapiens
uaaaccuagcauuuugcauaug

SEQ ID NO: 54738 - RNA, 22 nt, Homo sapiens
uaaacugcuugaggguaaguac

SEQ ID NO: 54739 - RNA, 21 nt, Homo sapiens
uaaaacuguaacuuuguccug

SEQ ID NO: 54740 - RNA, 22 nt, Homo sapiens
guuuugguuauauggaucaguu

SEQ ID NO: 54741 - RNA, 22 nt, Homo sapiens
guugcacagucuuuccuggacu

SEQ ID NO: 54742 - RNA, 22 nt, Homo sapiens
guugcaaaguaauugugguuuu

SEQ ID NO: 54743 - RNA, 22 nt, Homo sapiens
uaacaacauucuaacugacggc

SEQ ID NO: 54744 - RNA, 22 nt, Homo sapiens
uaacaggcaaggucacaccuug

SEQ ID NO: 54745 - RNA, 22 nt, Homo sapiens
uaacaggcuacucuugcauugc

SEQ ID NO: 54746 - RNA, 22 nt, Homo sapiens
uaacaguauaugugguaucuau

SEQ ID NO: 54747 - RNA, 22 nt, Homo sapiens
uaacauuguugauuauacuaag

SEQ ID NO: 54748 - RNA, 22 nt, Homo sapiens
uaaagcacaaguaaagaauacu

SEQ ID NO: 54749 - RNA, 18 nt, Homo sapiens
uaaaggcacuguguuguu

SEQ ID NO: 54750 - RNA, 21 nt, Homo sapiens
uaaagcuagaaccuuagcuuu

SEQ ID NO: 54751 - RNA, 21 nt, Homo sapiens
uaaaugucauacaaagcaaug

SEQ ID NO: 54752 - RNA, 22 nt, Homo sapiens
guguaaaacaauuagaggauuu

SEQ ID NO: 54753 - RNA, 21 nt, Homo sapiens
gugugcuugaauucagcuguc

SEQ ID NO: 54754 - RNA, 22 nt, Homo sapiens
gugguuuuaauauucagucuag

SEQ ID NO: 54755 - RNA, 22 nt, Homo sapiens
gugguuuucaacuccaccugca

SEQ ID NO: 54756 - RNA, 22 nt, Homo sapiens
guggaaugcaguguugauucaa

SEQ ID NO: 54757 - RNA, 22 nt, Homo sapiens
guggaaugauaucucauugugg

SEQ ID NO: 54758 - RNA, 17 nt, Homo sapiens
guggaaugucaugucaa

SEQ ID NO: 54759 - RNA, 22 nt, Homo sapiens
guggaauuauagagacaucuug

SEQ ID NO: 54760 - RNA, 22 nt, Homo sapiens
guggacaugaauuuuggaggca

SEQ ID NO: 54761 - RNA, 22 nt, Homo sapiens
guggacggagguugcagugagc

SEQ ID NO: 54762 - RNA, 22 nt, Homo sapiens
gugauugucuaaucaagauaca

SEQ ID NO: 54763 - RNA, 22 nt, Homo sapiens
gugauugugaaaacauuaagaa

SEQ ID NO: 54764 - RNA, 22 nt, Homo sapiens
gugcuuuguuguggcaguggca

SEQ ID NO: 54765 - RNA, 22 nt, Homo sapiens
gugaguuauuauuuauguaaac

SEQ ID NO: 54766 - RNA, 22 nt, Homo sapiens
gugauagguugucacugucacu

SEQ ID NO: 54767 - RNA, 22 nt, Homo sapiens
gugagaagaaaaauauggcugu

SEQ ID NO: 54768 - RNA, 22 nt, Homo sapiens
gugauguguuucaacagcuccu

SEQ ID NO: 54769 - RNA, 22 nt, Homo sapiens
gugaucucagcucacuggaacc

SEQ ID NO: 54770 - RNA, 21 nt, Homo sapiens
gugaucaugucacugcacucc

SEQ ID NO: 54771 - RNA, 22 nt, Homo sapiens
gugauauguuaggaucuaaguc

SEQ ID NO: 54772 - RNA, 22 nt, Human herpesvirus 6B
aauucucauuuaaaagcgauag

SEQ ID NO: 54773 - RNA, 22 nt, Human herpesvirus 6B
ucuuugaaggacuaucugagac

SEQ ID NO: 54774 - RNA, 19 nt, Human herpesvirus 6B
gguuccacuugugcacggu

SEQ ID NO: 54775 - RNA, 21 nt, Human herpesvirus 6B
cuaugcuuuuguacucgcuua

SEQ ID NO: 54776 - RNA, 23 nt, Human herpesvirus 6B
agaaaaacaggaacugcgguugc

SEQ ID NO: 54777 - RNA, 19 nt, Human herpesvirus 6B
auucucauuaguguuauuc

SEQ ID NO: 54778 - RNA, 22 nt, Human herpesvirus 6B
acauuucugaagaugaucuccu

SEQ ID NO: 54779 - RNA, 21 nt, Human herpesvirus 6B
uggcgccgacccugccgcggc

SEQ ID NO: 54780 - RNA, 22 nt, Human herpesvirus 6B
ucuuugaaggacuaucugagac

SEQ ID NO: 54781 - RNA, 22 nt, Human herpesvirus 6B
ugaaaauggcugaauaauauua

SEQ ID NO: 54782 - RNA, 22 nt, Human herpesvirus 6B
ugaugcguauucucacucaaug

SEQ ID NO: 54783 - RNA, 22 nt, Human herpesvirus 6B
cggcggauggagcccgcucggu

SEQ ID NO: 54784 - RNA, 22 nt, Human herpesvirus 6B
cggaagguagcgucagauucga

SEQ ID NO: 54785 - RNA, 19 nt, Human herpesvirus 6B
auucucauuaguguuauuc

SEQ ID NO: 54786 - RNA, 21 nt, Human herpesvirus 6B
auacgucucccaguucguuaa

SEQ ID NO: 54787 - RNA, 22 nt, Human herpesvirus 6B
guacaaaugauuuaauuucgcu

SEQ ID NO: 54788 - RNA, 19 nt, Human herpesvirus 6B
gguuccacuugugcacggu

SEQ ID NO: 54789 - RNA, 22 nt, Human herpesvirus 6B
gggugucuaaaugagucuggag

SEQ ID NO: 54790 - RNA, 22 nt, Human herpesvirus 6B
gggcuccggcuuccucuccguc

SEQ ID NO: 54791 - RNA, 22 nt, Human herpesvirus 6B
gcugauaguuaaauguuauaag

SEQ ID NO: 54792 - RNA, 22 nt, Human herpesvirus 6B
ggcgaacaauuggauuuucaga

SEQ ID NO: 54793 - RNA, 20 nt, Human herpesvirus 6B
uuucugagaucgcuuuuacg

SEQ ID NO: 54794 - RNA, 22 nt, Human herpesvirus 6B
uggcgccgacccugccgcggca

SEQ ID NO: 54795 - RNA, 22 nt, Human herpesvirus 6B
ugguuuuauaagcucaagaggg

SEQ ID NO: 54796 - RNA, 22 nt, Human herpesvirus 6B
ucgaacaacgcguuggcgaaau

SEQ ID NO: 54797 - RNA, 22 nt, Human herpesvirus 6B
uaagaauuggugucauucgugg

SEQ ID NO: 54798 - RNA, 22 nt, Human herpesvirus 6B
gaucccgcucggagcucucuca

SEQ ID NO: 54799 - RNA, 22 nt, Human herpesvirus 6B
gcaggaagagggaguccaacaa

SEQ ID NO: 54800 - RNA, 23 nt, Human herpesvirus 6B
gagagcuacaaugucuuuuacgg

SEQ ID NO: 54801 - RNA, 22 nt, Human herpesvirus 6B
acauuucugaagaugaucuccu

SEQ ID NO: 54802 - RNA, 23 nt, Human herpesvirus 6B
agagauucuggaaucgagcacuc

SEQ ID NO: 54803 - RNA, 22 nt, Human herpesvirus 6B
agccauuugaaaaauuuccaga

SEQ ID NO: 54804 - RNA, 23 nt, Human herpesvirus 6B
agaaaaacaggaacugcgguugc

SEQ ID NO: 54805 - RNA, 22 nt, Human herpesvirus 6B
agaaugacaagcuaauguaugc

SEQ ID NO: 54806 - RNA, 22 nt, Human herpesvirus 6B
ccuaagaaauauugcaugcauu

SEQ ID NO: 54807 - RNA, 22 nt, Human herpesvirus 6B
cgucuauuagauaagagaguuu

SEQ ID NO: 54808 - RNA, 22 nt, Homo sapiens
ugagcugagaaaugcagcagcu

SEQ ID NO: 54809 - RNA, 22 nt, Homo sapiens
gagcucauuaaaaauguagaau

SEQ ID NO: 54810 - RNA, 22 nt, Homo sapiens
cacuagagaauagguaguucug

SEQ ID NO: 54811 - RNA, 22 nt, Homo sapiens
cauuuuacuuuccagacgugga

SEQ ID NO: 54812 - RNA, 22 nt, Homo sapiens
uugacuagaccaucuuucuaga

SEQ ID NO: 54813 - RNA, 22 nt, Homo sapiens
agagaugaagauggggcucccg

SEQ ID NO: 54814 - RNA, 22 nt, Homo sapiens
aggaagugugcaauuaauuucu

SEQ ID NO: 54815 - RNA, 22 nt, Homo sapiens
aagugucuuaccgggagggagu

SEQ ID NO: 54816 - RNA, 22 nt, Homo sapiens
uucaaaaccucugcuuaagccc

SEQ ID NO: 54817 - RNA, 22 nt, Homo sapiens
acacuuucuggagcugcacaua

SEQ ID NO: 54818 - RNA, 22 nt, Homo sapiens
uugagauggagucuugcucugu

SEQ ID NO: 54819 - RNA, 22 nt, Homo sapiens
aggcaagagugacuacgugaaa

SEQ ID NO: 54820 - RNA, 19 nt, Homo sapiens
uaucacuucccuggaaaca

SEQ ID NO: 54821 - RNA, 19 nt, Homo sapiens
aauggcuuuuccuguuccc

SEQ ID NO: 54822 - RNA, 22 nt, Homo sapiens
uauuguacauauccucccuuca

SEQ ID NO: 54823 - RNA, 22 nt, Homo sapiens
aucuuuggcgggaauaucacag

SEQ ID NO: 54824 - RNA, 22 nt, Homo sapiens
guauacaugucaaaacucacau

SEQ ID NO: 54825 - RNA, 23 nt, Homo sapiens
uguauacacccugugcaucuggg

SEQ ID NO: 54826 - RNA, 22 nt, Homo sapiens
gacaagagaacacugcuauauu

SEQ ID NO: 54827 - RNA, 22 nt, Homo sapiens
uuauggccauucuuguaggagu

SEQ ID NO: 54828 - RNA, 22 nt, Homo sapiens
uucauacaguggcugcacucca

SEQ ID NO: 54829 - RNA, 20 nt, Homo sapiens
uggaaucugaagaucucagu

SEQ ID NO: 54830 - RNA, 22 nt, Homo sapiens
auggauauuuuuugaacauaga

SEQ ID NO: 54831 - RNA, 20 nt, Homo sapiens
uagcacacauguagaauagu

SEQ ID NO: 54832 - RNA, 22 nt, Homo sapiens
gaauaaacuagagaggacugag

SEQ ID NO: 54833 - RNA, 22 nt, Homo sapiens
guaaagacacaugcacacguau

SEQ ID NO: 54834 - RNA, 22 nt, Homo sapiens
uucucugggacauaggucgggu

SEQ ID NO: 54835 - RNA, 22 nt, Homo sapiens
uuccagcugggggcaacucugc

SEQ ID NO: 54836 - RNA, 22 nt, Homo sapiens
uuaguucccucauucuugacuu

SEQ ID NO: 54837 - RNA, 19 nt, Homo sapiens
ugcagcaauguaaaagaca

SEQ ID NO: 54838 - RNA, 22 nt, Homo sapiens
cacaguugccuaucuccugaag

SEQ ID NO: 54839 - RNA, 22 nt, Homo sapiens
uucuacaggcuguucaagaagc

SEQ ID NO: 54840 - RNA, 22 nt, Homo sapiens
aucauccagccccagaagggag

SEQ ID NO: 54841 - RNA, 22 nt, Homo sapiens
auuccacuuacaugaaguaccu

SEQ ID NO: 54842 - RNA, 21 nt, Homo sapiens
acaucagaguugugaagguag

SEQ ID NO: 54843 - RNA, 22 nt, Homo sapiens
acucagagauuagcacauguuu

SEQ ID NO: 54844 - RNA, 22 nt, Homo sapiens
uucuguguuuaggucacggcua

SEQ ID NO: 54845 - RNA, 22 nt, Homo sapiens
ccagucuuggugucuguagcac

SEQ ID NO: 54846 - RNA, 22 nt, Homo sapiens
caggaaugugaggguucccugc

SEQ ID NO: 54847 - RNA, 22 nt, Homo sapiens
caucacuuugccuccgucucua

SEQ ID NO: 54848 - RNA, 22 nt, Homo sapiens
uuggucaucucccuccuuuuag

SEQ ID NO: 54849 - RNA, 22 nt, Homo sapiens
ugcaaugugaaauaagcacauc

SEQ ID NO: 54850 - RNA, 22 nt, Homo sapiens
cuagaagcauauucagaacaga

SEQ ID NO: 54851 - RNA, 21 nt, Homo sapiens
auugcacuccagccugggcga

SEQ ID NO: 54852 - RNA, 20 nt, Homo sapiens
ugagaacauguggcauuugg

SEQ ID NO: 54853 - RNA, 22 nt, Homo sapiens
uugagauggagucucgcucugu

SEQ ID NO: 54854 - RNA, 22 nt, Homo sapiens
ugauuugucucucagcccuacu

SEQ ID NO: 54855 - RNA, 22 nt, Homo sapiens
aauaucacaguggguguacacc

SEQ ID NO: 54856 - RNA, 18 nt, Homo sapiens
uugcacuccugccugggu

SEQ ID NO: 54857 - RNA, 22 nt, Homo sapiens
uucauaguguuuccuuccagug

SEQ ID NO: 54858 - RNA, 22 nt, Homo sapiens
auggcaguguaugauuauauua

SEQ ID NO: 54859 - RNA, 22 nt, Homo sapiens
aucuacagccagucugguuugu

SEQ ID NO: 54860 - RNA, 22 nt, Homo sapiens
uuuugcaaauuccaguggccau

SEQ ID NO: 54861 - RNA, 22 nt, Homo sapiens
uuggagugugcucauaacugcu

SEQ ID NO: 54862 - RNA, 22 nt, Homo sapiens
uuucuacagugaacgauuucua

SEQ ID NO: 54863 - RNA, 22 nt, Homo sapiens
uaaggcucuuguuauuuugagg

SEQ ID NO: 54864 - RNA, 22 nt, Homo sapiens
cauggcuuguauaagauucuca

SEQ ID NO: 54865 - RNA, 22 nt, Homo sapiens
auggcuuuaagagugucugaau

SEQ ID NO: 54866 - RNA, 23 nt, Homo sapiens
augugugcuuggagagcaggaug

SEQ ID NO: 54867 - RNA, 22 nt, Homo sapiens
uacaagcaggaaaugguauaug

SEQ ID NO: 54868 - RNA, 22 nt, Homo sapiens
gugcuuuguuguggcaguggca

SEQ ID NO: 54869 - RNA, 22 nt, Homo sapiens
cugagcuagaccacuuggcucc

SEQ ID NO: 54870 - RNA, 22 nt, Homo sapiens
cugagugcaagugauccuccca

SEQ ID NO: 54871 - RNA, 22 nt, Homo sapiens
ugauauuuuugauccuuaaguu

SEQ ID NO: 54872 - RNA, 22 nt, Homo sapiens
auugcacuccagccuugggcaa

SEQ ID NO: 54873 - RNA, 22 nt, Homo sapiens
uaaagugcugagaugaggcugg

SEQ ID NO: 54874 - RNA, 22 nt, Homo sapiens
uuugcuugaggucuagcuaccc

SEQ ID NO: 54875 - RNA, 22 nt, Homo sapiens
uuggaaaccucugcagguguuu

SEQ ID NO: 54876 - RNA, 22 nt, Homo sapiens
uuugguuuuuguuaucacucau

SEQ ID NO: 54877 - RNA, 22 nt, Homo sapiens
ugcagaaucccuucagauccga

SEQ ID NO: 54878 - RNA, 20 nt, Homo sapiens
uucuauggugaugaguccug

SEQ ID NO: 54879 - RNA, 22 nt, Homo sapiens
auacaagcaguccaacuccaua

SEQ ID NO: 54880 - RNA, 22 nt, Homo sapiens
aacacuguuuccagucaugauc

SEQ ID NO: 54881 - RNA, 22 nt, Homo sapiens
ugagaucagaaggauuucucug

SEQ ID NO: 54882 - RNA, 22 nt, Homo sapiens
aauuaguuggcugggugcggug

SEQ ID NO: 54883 - RNA, 22 nt, Homo sapiens
ugagauucuuacuccugaguuc

SEQ ID NO: 54884 - RNA, 22 nt, Homo sapiens
cuuuguaugucaugacaacugu

SEQ ID NO: 54885 - RNA, 22 nt, Homo sapiens
uggcuuuuauuauguugaggua

SEQ ID NO: 54886 - RNA, 22 nt, Homo sapiens
cauugcacugcagcccgggcaa

SEQ ID NO: 54887 - RNA, 22 nt, Homo sapiens
augacugucagggcagucauug

SEQ ID NO: 54888 - RNA, 22 nt, Homo sapiens
gacuugaagaaucuaagggagg

SEQ ID NO: 54889 - RNA, 22 nt, Homo sapiens
aaauaguagcugaaugagggaa

SEQ ID NO: 54890 - RNA, 22 nt, Homo sapiens
ugugccacugcacuccugccug

SEQ ID NO: 54891 - RNA, 22 nt, Homo sapiens
ugagaugagggcugcacucaaa

SEQ ID NO: 54892 - RNA, 22 nt, Homo sapiens
agugcaauggugccaucauagc

SEQ ID NO: 54893 - RNA, 22 nt, Homo sapiens
aucugugaaugaaguuauuuug

SEQ ID NO: 54894 - RNA, 22 nt, Homo sapiens
cauggcuuuaagcaacaccaag

SEQ ID NO: 54895 - RNA, 22 nt, Homo sapiens
uuaaggaaggagucuuaaaugg

SEQ ID NO: 54896 - RNA, 22 nt, Homo sapiens
ugaaggcaggagggagaaaagu

SEQ ID NO: 54897 - RNA, 22 nt, Homo sapiens
cucaguguucccauucuaccuu

SEQ ID NO: 54898 - RNA, 22 nt, Homo sapiens
ugagaugaagcuagaagaaugg

SEQ ID NO: 54899 - RNA, 22 nt, Homo sapiens
uugaguccccacacuggguccc

SEQ ID NO: 54900 - RNA, 22 nt, Homo sapiens
ugugagacugguucugaaccca

SEQ ID NO: 54901 - RNA, 23 nt, Homo sapiens
uuaguaaacucaaugacaccaca

SEQ ID NO: 54902 - RNA, 22 nt, Homo sapiens
uucaagaauuaaaguggcuuuu

SEQ ID NO: 54903 - RNA, 22 nt, Homo sapiens
uuaaaaguauaggccuggcaua

SEQ ID NO: 54904 - RNA, 22 nt, Homo sapiens
agaacuguccauucagcaugaa

SEQ ID NO: 54905 - RNA, 22 nt, Homo sapiens
ucacaauucucaauuugugaaa

SEQ ID NO: 54906 - RNA, 22 nt, Homo sapiens
uaaguacuuuacagacauuauc

SEQ ID NO: 54907 - RNA, 22 nt, Homo sapiens
auugcacuccauccugggcaau

SEQ ID NO: 54908 - RNA, 22 nt, Homo sapiens
uaucacuuugauaguuuaaaug

SEQ ID NO: 54909 - RNA, 22 nt, Homo sapiens
uuugugcaaacuaggauugcga

SEQ ID NO: 54910 - RNA, 22 nt, Homo sapiens
ucauaucauuagaucuacugua

SEQ ID NO: 54911 - RNA, 22 nt, Homo sapiens
gaugagaugagcauuugaauug

SEQ ID NO: 54912 - RNA, 22 nt, Homo sapiens
aauggcuucuuauugugguuca

SEQ ID NO: 54913 - RNA, 21 nt, Homo sapiens
uuuagguagcuuuucugggag

SEQ ID NO: 54914 - RNA, 22 nt, Homo sapiens
uagugaauguuggcuauuaaua

SEQ ID NO: 54915 - RNA, 21 nt, Homo sapiens
ugcaagaaucaggaagcugcc

SEQ ID NO: 54916 - RNA, 18 nt, Homo sapiens
auugcacuccugccuggg

SEQ ID NO: 54917 - RNA, 22 nt, Homo sapiens
uacccucuggauacccuuguuc

SEQ ID NO: 54918 - RNA, 22 nt, Homo sapiens
cauugcacuccagcucugggcg

SEQ ID NO: 54919 - RNA, 22 nt, Homo sapiens
auaaauaguaguugugguggcc

SEQ ID NO: 54920 - RNA, 22 nt, Homo sapiens
auaaagacacuuggcaugauuu

SEQ ID NO: 54921 - RNA, 22 nt, Homo sapiens
aaaagcauucagagugcugggc

SEQ ID NO: 54922 - RNA, 22 nt, Homo sapiens
uauuugguagcuauuuugcagu

SEQ ID NO: 54923 - RNA, 22 nt, Homo sapiens
uucagcuacuugggaggcugaa

SEQ ID NO: 54924 - RNA, 22 nt, Homo sapiens
uucagugucauuaacacaguag

SEQ ID NO: 54925 - RNA, 22 nt, Homo sapiens
ccauugaacaugaaggaaugug

SEQ ID NO: 54926 - RNA, 20 nt, Homo sapiens
agcuggguguguuggugcau

SEQ ID NO: 54927 - RNA, 22 nt, Homo sapiens
gaggcaagaguaguuaaguuag

SEQ ID NO: 54928 - RNA, 22 nt, Homo sapiens
ugagaugaguugcuggcucuga

SEQ ID NO: 54929 - RNA, 22 nt, Homo sapiens
acuuuguguuacccagcaagga

SEQ ID NO: 54930 - RNA, 22 nt, Homo sapiens
gagacauugacuuuguuccaga

SEQ ID NO: 54931 - RNA, 22 nt, Homo sapiens
acacagugucuguguauuuaaa

SEQ ID NO: 54932 - RNA, 22 nt, Homo sapiens
gagcugaucuuuucugauucca

SEQ ID NO: 54933 - RNA, 22 nt, Homo sapiens
agcuggcuguagcugcaagucu

SEQ ID NO: 54934 - RNA, 22 nt, Homo sapiens
uuauagacacguuguaacaaac

SEQ ID NO: 54935 - RNA, 22 nt, Homo sapiens
uauacaugugccauguuggugu

SEQ ID NO: 54936 - RNA, 22 nt, Homo sapiens
ucagugccucaguuuuuaaaga

SEQ ID NO: 54937 - RNA, 17 nt, Homo sapiens
acagugucuaugaaaug

SEQ ID NO: 54938 - RNA, 22 nt, Homo sapiens
cauggcuuuauuuucagcuucu

SEQ ID NO: 54939 - RNA, 22 nt, Homo sapiens
uacacagucaaaaauuuccagg

SEQ ID NO: 54940 - RNA, 22 nt, Homo sapiens
augcaacugcacuccagccugg

SEQ ID NO: 54941 - RNA, 22 nt, Homo sapiens
uucagauugcauaccgaaagua

SEQ ID NO: 54942 - RNA, 22 nt, Homo sapiens
uuggaaacauuuaugguaacag

SEQ ID NO: 54943 - RNA, 22 nt, Homo sapiens
ugagaugaaagcagaaagacuu

SEQ ID NO: 54944 - RNA, 22 nt, Homo sapiens
ggggaauguuaaagaauuugca

SEQ ID NO: 54945 - RNA, 22 nt, Homo sapiens
acuuuuugauggggagaacauu

SEQ ID NO: 54946 - RNA, 22 nt, Homo sapiens
ugagcaagaucuuuauaauuag

SEQ ID NO: 54947 - RNA, 22 nt, Homo sapiens
aggugguuuugaugagcaggua

SEQ ID NO: 54948 - RNA, 22 nt, Homo sapiens
uugcacuauuaguauagauguc

SEQ ID NO: 54949 - RNA, 22 nt, Homo sapiens
auugcacuccagccugggcgac

SEQ ID NO: 54950 - RNA, 22 nt, Homo sapiens
agauguuguucaucugauuguu

SEQ ID NO: 54951 - RNA, 22 nt, Homo sapiens
guugguuuccuguaacuggaca

SEQ ID NO: 54952 - RNA, 22 nt, Homo sapiens
ugugucacugcacuccagccug

SEQ ID NO: 54953 - RNA, 22 nt, Homo sapiens
ugaaacacacauugcccuuuau

SEQ ID NO: 54954 - RNA, 22 nt, Homo sapiens
ugagaugagaaucaguucuaau

SEQ ID NO: 54955 - RNA, 19 nt, Homo sapiens
cauugcacuccacccuggg

SEQ ID NO: 54956 - RNA, 22 nt, Homo sapiens
uucuacagugacugcagccaua

SEQ ID NO: 54957 - RNA, 20 nt, Homo sapiens
cguugcacuccagccugggc

SEQ ID NO: 54958 - RNA, 19 nt, Homo sapiens
ugagauuguaugaggagau

SEQ ID NO: 54959 - RNA, 22 nt, Homo sapiens
uggcagaugcucuuggugccca

SEQ ID NO: 54960 - RNA, 22 nt, Homo sapiens
gucagugucuuaacagagauua

SEQ ID NO: 54961 - RNA, 22 nt, Homo sapiens
ucugucuuguccucacccuaga

SEQ ID NO: 54962 - RNA, 22 nt, Homo sapiens
guggaaaucucugugugacuua

SEQ ID NO: 54963 - RNA, 22 nt, Homo sapiens
aucacuuugcucuccagugugg

SEQ ID NO: 54964 - RNA, 20 nt, Homo sapiens
uggagugaagguucuggacc

SEQ ID NO: 54965 - RNA, 22 nt, Homo sapiens
ccugucuugauuaaauuacuua

SEQ ID NO: 54966 - RNA, 22 nt, Homo sapiens
auaucaaggccauuuucuaaau

SEQ ID NO: 54967 - RNA, 22 nt, Homo sapiens
guggcaguuuuaaauaugaaaa

SEQ ID NO: 54968 - RNA, 22 nt, Homo sapiens
auuccacuuccacuaguuucuc

SEQ ID NO: 54969 - RNA, 22 nt, Homo sapiens
auggcacuccagccugggcaac

SEQ ID NO: 54970 - RNA, 22 nt, Homo sapiens
auugcacuccagucugggcaac

SEQ ID NO: 54971 - RNA, 22 nt, Homo sapiens
auugcacuccacccugggcaac

SEQ ID NO: 54972 - RNA, 22 nt, Homo sapiens
caccugagcgggaugcucgccu

SEQ ID NO: 54973 - RNA, 22 nt, Homo sapiens
uuggucaggcuaaucucgaacg

SEQ ID NO: 54974 - RNA, 22 nt, Homo sapiens
uugacaaggagccauugcaucu

SEQ ID NO: 54975 - RNA, 22 nt, Homo sapiens
gaaaugcucauuuuggauccuu

SEQ ID NO: 54976 - RNA, 22 nt, Homo sapiens
ugagaugaguucucgcucuguc

SEQ ID NO: 54977 - RNA, 22 nt, Homo sapiens
auacaucugccauguuggugug

SEQ ID NO: 54978 - RNA, 22 nt, Homo sapiens
ugagaugaguugcgcucugucg

SEQ ID NO: 54979 - RNA, 22 nt, Homo sapiens
aagugguuuuuacaaagacaga

SEQ ID NO: 54980 - RNA, 20 nt, Homo sapiens
uaugacacugucauaaaaau

SEQ ID NO: 54981 - RNA, 19 nt, Homo sapiens
uucucugguuguacuaccc

SEQ ID NO: 54982 - RNA, 19 nt, Homo sapiens
aguggguguuuucuguuug

SEQ ID NO: 54983 - RNA, 22 nt, Homo sapiens
ugagaugaucaaaguauaggcu

SEQ ID NO: 54984 - RNA, 22 nt, Homo sapiens
uuauucagcaccugcuguguuc

SEQ ID NO: 54985 - RNA, 22 nt, Homo sapiens
auauggcuaugugagcauacca

SEQ ID NO: 54986 - RNA, 22 nt, Homo sapiens
auaaccuauggaucuacucggg

SEQ ID NO: 54987 - RNA, 22 nt, Homo sapiens
auugcacugcagccugggcaac

SEQ ID NO: 54988 - RNA, 22 nt, Homo sapiens
uucuuugcaugaucucaaaguc

SEQ ID NO: 54989 - RNA, 22 nt, Homo sapiens
auugcacuccagccugagcaaa

SEQ ID NO: 54990 - RNA, 22 nt, Homo sapiens
acauaaagaagcaggacauugu

SEQ ID NO: 54991 - RNA, 22 nt, Homo sapiens
uggugagaaaagaugucuuugu

SEQ ID NO: 54992 - RNA, 22 nt, Homo sapiens
cuugguacucugugucccagcu

SEQ ID NO: 54993 - RNA, 22 nt, Homo sapiens
guggaagaccagacuuuccaac

SEQ ID NO: 54994 - RNA, 22 nt, Homo sapiens
uagacaacugaaacacugugca

SEQ ID NO: 54995 - RNA, 22 nt, Homo sapiens
cuggcacagugucagaaacaca

SEQ ID NO: 54996 - RNA, 22 nt, Homo sapiens
uuaguucauugugacuggacuc

SEQ ID NO: 54997 - RNA, 22 nt, Homo sapiens
uauuguccacuuugcacugugu

SEQ ID NO: 54998 - RNA, 22 nt, Homo sapiens
auggcaguuucacucugggauu

SEQ ID NO: 54999 - RNA, 22 nt, Homo sapiens
uugagaugaagucuugcucucu

SEQ ID NO: 55000 - RNA, 22 nt, Homo sapiens
uugagaugaaguuuugcucuuu

SEQ ID NO: 55001 - RNA, 22 nt, Homo sapiens
aauaucacaggguguacacuca

SEQ ID NO: 55002 - RNA, 22 nt, Homo sapiens
cauugcacuccagccugaggga

SEQ ID NO: 55003 - RNA, 22 nt, Homo sapiens
uucccuguaucuucugccaugu

SEQ ID NO: 55004 - RNA, 22 nt, Homo sapiens
ugagaucaagguuaauauaauc

SEQ ID NO: 55005 - RNA, 23 nt, Homo sapiens
ggaaacauccagucuuucaccau

SEQ ID NO: 55006 - RNA, 17 nt, Homo sapiens
aaguggcuuguucacca

SEQ ID NO: 55007 - RNA, 22 nt, Homo sapiens
uucagacugggugaagagggua

SEQ ID NO: 55008 - RNA, 22 nt, Homo sapiens
uacagucacauuccugaccaua

SEQ ID NO: 55009 - RNA, 22 nt, Homo sapiens
aggcaaugugagaguuuauuca

SEQ ID NO: 55010 - RNA, 22 nt, Homo sapiens
ugagaugagagaaugcuugccu

SEQ ID NO: 55011 - RNA, 19 nt, Homo sapiens
ugugacugguugucucgcu

SEQ ID NO: 55012 - RNA, 22 nt, Homo sapiens
ggcaaugucagcuaaugaugga

SEQ ID NO: 55013 - RNA, 22 nt, Homo sapiens
auggaaaugaagggcuggcccu

SEQ ID NO: 55014 - RNA, 22 nt, Homo sapiens
ugacaagagaccccuccgcagg

SEQ ID NO: 55015 - RNA, 22 nt, Homo sapiens
uauggcuuuuaacugucguaug

SEQ ID NO: 55016 - RNA, 22 nt, Homo sapiens
uguauguuguaagacuuagacc

SEQ ID NO: 55017 - RNA, 22 nt, Homo sapiens
ugugacucuggcacauggugag

SEQ ID NO: 55018 - RNA, 22 nt, Homo sapiens
gagcugaucuuuauguaaauuc

SEQ ID NO: 55019 - RNA, 22 nt, Homo sapiens
uauuugguuggugcaaaaguaa

SEQ ID NO: 55020 - RNA, 22 nt, Homo sapiens
cuauggcucugucuuuuaaguu

SEQ ID NO: 55021 - RNA, 22 nt, Homo sapiens
uaaguucauucaugaaacuuag

SEQ ID NO: 55022 - RNA, 22 nt, Homo sapiens
aaaugcuuucuuggaccauuug

SEQ ID NO: 55023 - RNA, 22 nt, Homo sapiens
uuuguucaccucaaggauggga

SEQ ID NO: 55024 - RNA, 20 nt, Homo sapiens
uucuacagucacaggaagau

SEQ ID NO: 55025 - RNA, 22 nt, Homo sapiens
uuagguaauauauugcugcuuu

SEQ ID NO: 55026 - RNA, 22 nt, Homo sapiens
uugagauggagucuugcucuug

SEQ ID NO: 55027 - RNA, 22 nt, Homo sapiens
ugaggugaggguaucaaaugcu

SEQ ID NO: 55028 - RNA, 22 nt, Homo sapiens
cuagaguacuuaccacagcaug

SEQ ID NO: 55029 - RNA, 22 nt, Homo sapiens
caucgcacuccagccugggcaa

SEQ ID NO: 55030 - RNA, 22 nt, Homo sapiens
cauugcacuccauccuuggcaa

SEQ ID NO: 55031 - RNA, 22 nt, Homo sapiens
auuguacuccagccugggcaaa

SEQ ID NO: 55032 - RNA, 22 nt, Homo sapiens
acaguguagugacugccaacuu

SEQ ID NO: 55033 - RNA, 22 nt, Homo sapiens
uugcacauguugaaccagcaaa

SEQ ID NO: 55034 - RNA, 22 nt, Homo sapiens
auugcacuccagccuggggaac

SEQ ID NO: 55035 - RNA, 21 nt, Homo sapiens
uucuaaguaaauguuggacau

SEQ ID NO: 55036 - RNA, 22 nt, Homo sapiens
uaccagcauuucucuuuaagua

SEQ ID NO: 55037 - RNA, 22 nt, Homo sapiens
augucaacauagacaguagagu

SEQ ID NO: 55038 - RNA, 22 nt, Homo sapiens
auugcacaccagucugggcaaa

SEQ ID NO: 55039 - RNA, 20 nt, Homo sapiens
cauugcacuccagccugcug

SEQ ID NO: 55040 - RNA, 22 nt, Homo sapiens
augagacuagaagagaauaaua

SEQ ID NO: 55041 - RNA, 22 nt, Homo sapiens
ugaauagacacuaaagacugua

SEQ ID NO: 55042 - RNA, 22 nt, Homo sapiens
ugucagaaucugagacgacaac

SEQ ID NO: 55043 - RNA, 23 nt, Homo sapiens
aauaucacaguggguguacaccc

SEQ ID NO: 55044 - RNA, 22 nt, Homo sapiens
agaaugugaccuuauuuggaga

SEQ ID NO: 55045 - RNA, 22 nt, Homo sapiens
guggcagugugaggauccugcu

SEQ ID NO: 55046 - RNA, 22 nt, Homo sapiens
auugcacuccagccuggccaac

SEQ ID NO: 55047 - RNA, 22 nt, Homo sapiens
acugaucaauguuaaggcuuau

SEQ ID NO: 55048 - RNA, 22 nt, Homo sapiens
auuguacuccagccugggcagc

SEQ ID NO: 55049 - RNA, 20 nt, Homo sapiens
uggaaauuaaccuuucaggu

SEQ ID NO: 55050 - RNA, 21 nt, Homo sapiens
ugagaugauccugcaugcaug

SEQ ID NO: 55051 - RNA, 22 nt, Homo sapiens
uucagguaguuuaacuguucca

SEQ ID NO: 55052 - RNA, 21 nt, Homo sapiens
cuuugguagaguuuuuagggu

SEQ ID NO: 55053 - RNA, 22 nt, Homo sapiens
ugagcucagcuaguugaggugu

SEQ ID NO: 55054 - RNA, 22 nt, Homo sapiens
uauggcuucuuauucuuucccg

SEQ ID NO: 55055 - RNA, 22 nt, Homo sapiens
uacauagucuucuuuugguuau

SEQ ID NO: 55056 - RNA, 22 nt, Homo sapiens
ugguucaguugcacaggcuguu

SEQ ID NO: 55057 - RNA, 22 nt, Homo sapiens
aucauauccuagauauaacuuc

SEQ ID NO: 55058 - RNA, 22 nt, Homo sapiens
auggcucuuauuauuugaggua

SEQ ID NO: 55059 - RNA, 22 nt, Homo sapiens
auccaagagacugaugacuucc

SEQ ID NO: 55060 - RNA, 22 nt, Homo sapiens
uuuggucacugccgccgccagc

SEQ ID NO: 55061 - RNA, 22 nt, Homo sapiens
cauugcacucuagccucggcaa

SEQ ID NO: 55062 - RNA, 18 nt, Homo sapiens
ugaaacacauuuuuuccu

SEQ ID NO: 55063 - RNA, 22 nt, Homo sapiens
uuggaaacgucaccuuuuccuu

SEQ ID NO: 55064 - RNA, 22 nt, Homo sapiens
cauugcacuccagcuugggcaa

SEQ ID NO: 55065 - RNA, 22 nt, Homo sapiens
uggccuguaacgcugucucagc

SEQ ID NO: 55066 - RNA, 22 nt, Homo sapiens
ugagaugauaucuuauuguaau

SEQ ID NO: 55067 - RNA, 22 nt, Homo sapiens
uugagauggagucucacuccuu

SEQ ID NO: 55068 - RNA, 22 nt, Homo sapiens
uugacagaccuuggucauaucc

SEQ ID NO: 55069 - RNA, 22 nt, Homo sapiens
agagaccuguaaaguucaggca

SEQ ID NO: 55070 - RNA, 22 nt, Homo sapiens
guacacauacauauaugugugu

SEQ ID NO: 55071 - RNA, 22 nt, Homo sapiens
uugagauguaguuucacuccug

SEQ ID NO: 55072 - RNA, 22 nt, Homo sapiens
gugagccaugauuuuaccacug

SEQ ID NO: 55073 - RNA, 22 nt, Homo sapiens
uagauuguaauaugcagaaugg

SEQ ID NO: 55074 - RNA, 18 nt, Homo sapiens
uuggacggagagucaaau

SEQ ID NO: 55075 - RNA, 22 nt, Homo sapiens
uaagagagcuccaucuuuuccu

SEQ ID NO: 55076 - RNA, 22 nt, Homo sapiens
uugcugagucuuucuagguugc

SEQ ID NO: 55077 - RNA, 22 nt, Homo sapiens
gguaaaucuucacuaagacuga

SEQ ID NO: 55078 - RNA, 22 nt, Homo sapiens
auggcaguuuggucucugugcu

SEQ ID NO: 55079 - RNA, 22 nt, Homo sapiens
cucagugucuggcacacagaaa

SEQ ID NO: 55080 - RNA, 22 nt, Homo sapiens
auccugaagcuuuacugaauuc

SEQ ID NO: 55081 - RNA, 22 nt, Homo sapiens
aggcaugaaauacaugcauuga

SEQ ID NO: 55082 - RNA, 22 nt, Homo sapiens
ucucuugguugaacaguuugga

SEQ ID NO: 55083 - RNA, 22 nt, Homo sapiens
agcugauggucuuguaugaugu

SEQ ID NO: 55084 - RNA, 22 nt, Homo sapiens
auggcaguuuauucuaaaucaa

SEQ ID NO: 55085 - RNA, 22 nt, Homo sapiens
uuauacuacuauaaagagguag

SEQ ID NO: 55086 - RNA, 22 nt, Homo sapiens
ggcaacaugccgaaaccacguc

SEQ ID NO: 55087 - RNA, 22 nt, Homo sapiens
augaggcacugcgcccuacuga

SEQ ID NO: 55088 - RNA, 22 nt, Homo sapiens
agaaugugaacaucuugaaagu

SEQ ID NO: 55089 - RNA, 22 nt, Homo sapiens
uuugaguaggcuuauauuuugg

SEQ ID NO: 55090 - RNA, 22 nt, Homo sapiens
gagagcauuaagccaucaucau

SEQ ID NO: 55091 - RNA, 22 nt, Homo sapiens
auggcucuguuccaugugucuu

SEQ ID NO: 55092 - RNA, 22 nt, Homo sapiens
acaaagugccuccuuuuagagu

SEQ ID NO: 55093 - RNA, 22 nt, Homo sapiens
auuccacuuagugacucauuug

SEQ ID NO: 55094 - RNA, 22 nt, Homo sapiens
uauggcuucuuuaaauugaggu

SEQ ID NO: 55095 - RNA, 22 nt, Homo sapiens
uggaaaacaugcacauuggauu

SEQ ID NO: 55096 - RNA, 22 nt, Homo sapiens
ucuaaaacuagauugugaugau

SEQ ID NO: 55097 - RNA, 22 nt, Homo sapiens
uaagacuguguaauuuaugaag

SEQ ID NO: 55098 - RNA, 22 nt, Homo sapiens
ccuuggcacuuugccacagugc

SEQ ID NO: 55099 - RNA, 22 nt, Homo sapiens
gaaacugcauuucuaacaagcu

SEQ ID NO: 55100 - RNA, 22 nt, Homo sapiens
guucaagugauucuacugccuc

SEQ ID NO: 55101 - RNA, 22 nt, Homo sapiens
acuuuuguuauacagugugaua

SEQ ID NO: 55102 - RNA, 22 nt, Homo sapiens
uucuuugguacaagggccgacc

SEQ ID NO: 55103 - RNA, 22 nt, Homo sapiens
uuuagcaaagcaauuuacacca

SEQ ID NO: 55104 - RNA, 22 nt, Homo sapiens
aaguuaauguuuaagacuccua

SEQ ID NO: 55105 - RNA, 20 nt, Homo sapiens
aucucugggcaaaggaaaau

SEQ ID NO: 55106 - RNA, 22 nt, Homo sapiens
cguugcacuccagccugggcaa

SEQ ID NO: 55107 - RNA, 22 nt, Homo sapiens
ucugucuuugccuaaguuuguc

SEQ ID NO: 55108 - RNA, 22 nt, Homo sapiens
augacuuuucugaaaaccacca

SEQ ID NO: 55109 - RNA, 22 nt, Homo sapiens
cauggcuuucacaguaaagccu

SEQ ID NO: 55110 - RNA, 22 nt, Homo sapiens
guacaguuuucaguguucacug

SEQ ID NO: 55111 - RNA, 23 nt, Homo sapiens
auugcagaaucacagagguagug

SEQ ID NO: 55112 - RNA, 22 nt, Homo sapiens
auaaagccaugagcuugagaug

SEQ ID NO: 55113 - RNA, 22 nt, Homo sapiens
uauggcuuuucacuuaaguccu

SEQ ID NO: 55114 - RNA, 22 nt, Homo sapiens
uaucagcagagucauacuucaa

SEQ ID NO: 55115 - RNA, 22 nt, Homo sapiens
gucuuggagacauugccauuga

SEQ ID NO: 55116 - RNA, 22 nt, Homo sapiens
ugucagaaucuagaggcugcua

SEQ ID NO: 55117 - RNA, 22 nt, Homo sapiens
ugagcugagaucaugcuauugu

SEQ ID NO: 55118 - RNA, 22 nt, Homo sapiens
augugcaagaucauuaaagcuc

SEQ ID NO: 55119 - RNA, 18 nt, Homo sapiens
uguggcuguuuuccaaua

SEQ ID NO: 55120 - RNA, 22 nt, Homo sapiens
uuugcuuguguaaaaaucugga

SEQ ID NO: 55121 - RNA, 22 nt, Homo sapiens
ugugucuccugaaaauucacau

SEQ ID NO: 55122 - RNA, 22 nt, Homo sapiens
gucuguuuggggaccuguggcc

SEQ ID NO: 55123 - RNA, 22 nt, Homo sapiens
auggcuuugggcugcucugccc

SEQ ID NO: 55124 - RNA, 22 nt, Homo sapiens
uugcuccucugccaggaccugu

SEQ ID NO: 55125 - RNA, 22 nt, Homo sapiens
uucucuggucagaggggagguu

SEQ ID NO: 55126 - RNA, 22 nt, Homo sapiens
agaauguuuuagaccaauacaa

SEQ ID NO: 55127 - RNA, 22 nt, Homo sapiens
ugugcaaggcucucaaccugug

SEQ ID NO: 55128 - RNA, 22 nt, Homo sapiens
auggccugaugcaccuguccca

SEQ ID NO: 55129 - RNA, 22 nt, Homo sapiens
ugccaaaaugggcuuuauaccg

SEQ ID NO: 55130 - RNA, 22 nt, Homo sapiens
cacaguguuacugguaugaagu

SEQ ID NO: 55131 - RNA, 22 nt, Homo sapiens
ucacugugcaugaaggaugcug

SEQ ID NO: 55132 - RNA, 22 nt, Homo sapiens
aaccuacauucuuaacuguugc

SEQ ID NO: 55133 - RNA, 22 nt, Homo sapiens
uaucaguauggauucauggauu

SEQ ID NO: 55134 - RNA, 22 nt, Homo sapiens
cuucuguuaguucugauaacuu

SEQ ID NO: 55135 - RNA, 22 nt, Homo sapiens
uugagcaccaugccuggccaug

SEQ ID NO: 55136 - RNA, 21 nt, Homo sapiens
guggaaauggaauuuacuaau

SEQ ID NO: 55137 - RNA, 22 nt, Homo sapiens
uguuacagugacuaauguuuua

SEQ ID NO: 55138 - RNA, 22 nt, Homo sapiens
uugcacucuccagccucggcaa

SEQ ID NO: 55139 - RNA, 22 nt, Homo sapiens
gaaagauuuccugagcuagaaa

SEQ ID NO: 55140 - RNA, 22 nt, Homo sapiens
aaguaaacauuuuguacaauaa

SEQ ID NO: 55141 - RNA, 22 nt, Homo sapiens
aacagacugucacauaaaauug

SEQ ID NO: 55142 - RNA, 22 nt, Homo sapiens
auugaacuguuggagagguuuu

SEQ ID NO: 55143 - RNA, 22 nt, Homo sapiens
cuuugguuaauaggauauggca

SEQ ID NO: 55144 - RNA, 22 nt, Homo sapiens
aauggcuuuuaauauccauaau

SEQ ID NO: 55145 - RNA, 22 nt, Homo sapiens
uugacauaguuucugaaauaga

SEQ ID NO: 55146 - RNA, 22 nt, Homo sapiens
ugagccaugggguaaaugugau

SEQ ID NO: 55147 - RNA, 22 nt, Homo sapiens
auugcauaaacacauuucuuau

SEQ ID NO: 55148 - RNA, 22 nt, Homo sapiens
auggcucuuauuauuuugaggu

SEQ ID NO: 55149 - RNA, 22 nt, Homo sapiens
uuccugagagggcugggugcag

SEQ ID NO: 55150 - RNA, 22 nt, Homo sapiens
ugagcugagacaauaaguuuuu

SEQ ID NO: 55151 - RNA, 22 nt, Homo sapiens
ugugccuacugauagagccaag

SEQ ID NO: 55152 - RNA, 22 nt, Homo sapiens
uuacacaguaggucccuaguaa

SEQ ID NO: 55153 - RNA, 20 nt, Homo sapiens
uuggaaaugugaauugggag

SEQ ID NO: 55154 - RNA, 22 nt, Homo sapiens
gcugagaucucuugccugaacu

SEQ ID NO: 55155 - RNA, 22 nt, Homo sapiens
auggcucuggauagaaugcagg

SEQ ID NO: 55156 - RNA, 22 nt, Homo sapiens
ugagaugaugggauaagagggc

SEQ ID NO: 55157 - RNA, 22 nt, Homo sapiens
uuugaaaguaauuugguuggug

SEQ ID NO: 55158 - RNA, 22 nt, Homo sapiens
uugagggaggcagggcuugucu

SEQ ID NO: 55159 - RNA, 22 nt, Homo sapiens
cuggaauauuagcuggucuuaa

SEQ ID NO: 55160 - RNA, 22 nt, Homo sapiens
ugagaccuuucauuucucagug

SEQ ID NO: 55161 - RNA, 22 nt, Homo sapiens
caaugguuuuuuaguauaagua

SEQ ID NO: 55162 - RNA, 22 nt, Homo sapiens
auacauguuucauguuggugug

SEQ ID NO: 55163 - RNA, 22 nt, Homo sapiens
auaugcaaauccauagagacag

SEQ ID NO: 55164 - RNA, 23 nt, Homo sapiens
caugaacuaguuugcagccauga

SEQ ID NO: 55165 - RNA, 22 nt, Homo sapiens
cugaggcacggcgaccuuaagu

SEQ ID NO: 55166 - RNA, 22 nt, Homo sapiens
caucacuuuuccuuuuacagau

SEQ ID NO: 55167 - RNA, 22 nt, Homo sapiens
uuucuauguugaccagucuaga

SEQ ID NO: 55168 - RNA, 22 nt, Homo sapiens
guaaucucagcuacucaggagg

SEQ ID NO: 55169 - RNA, 22 nt, Homo sapiens
uuaaguaaucagagaagagaac

SEQ ID NO: 55170 - RNA, 22 nt, Homo sapiens
ucuuucacuuagcaugauguuu

SEQ ID NO: 55171 - RNA, 22 nt, Homo sapiens
uauggaaaucuuaccuuauggu

SEQ ID NO: 55172 - RNA, 19 nt, Homo sapiens
ugugaacaucacagagugu

SEQ ID NO: 55173 - RNA, 22 nt, Homo sapiens
cauacaagcuacaaucacaaag

SEQ ID NO: 55174 - RNA, 22 nt, Homo sapiens
cuuuacaguuggacucacgagg

SEQ ID NO: 55175 - RNA, 22 nt, Homo sapiens
ugagaugaggucucgcucuguc

SEQ ID NO: 55176 - RNA, 22 nt, Homo sapiens
ugugggaggugcuaauguaaau

SEQ ID NO: 55177 - RNA, 21 nt, Homo sapiens
auagcacuucacuugguuaga

SEQ ID NO: 55178 - RNA, 22 nt, Homo sapiens
uauggcuuuuauuauguuguag

SEQ ID NO: 55179 - RNA, 22 nt, Homo sapiens
gugugacuagucaugccugaau

SEQ ID NO: 55180 - RNA, 22 nt, Homo sapiens
cuggcucauuucauuuagcaua

SEQ ID NO: 55181 - RNA, 22 nt, Homo sapiens
gcugaaauguuuaauuugggag

SEQ ID NO: 55182 - RNA, 22 nt, Homo sapiens
auccauugucuaaugcuaagau

SEQ ID NO: 55183 - RNA, 22 nt, Homo sapiens
auggacuuuuuguucagugucu

SEQ ID NO: 55184 - RNA, 22 nt, Homo sapiens
ggagaauugcuuggacccggga

SEQ ID NO: 55185 - RNA, 19 nt, Homo sapiens
uucauacagugagagcagc

SEQ ID NO: 55186 - RNA, 22 nt, Homo sapiens
uacagucauaaugccuagugac

SEQ ID NO: 55187 - RNA, 22 nt, Homo sapiens
uaagacuguuggcaauuuuugc

SEQ ID NO: 55188 - RNA, 22 nt, Homo sapiens
ucacaaguguauagacaugucc

SEQ ID NO: 55189 - RNA, 22 nt, Homo sapiens
aguaaauuucugugcuuucaua

SEQ ID NO: 55190 - RNA, 22 nt, Homo sapiens
ugcaauuuaaugugucccaauu

SEQ ID NO: 55191 - RNA, 22 nt, Homo sapiens
uauggcuuuguucaacagccuc

SEQ ID NO: 55192 - RNA, 22 nt, Homo sapiens
cuggcucugggcuaaagaaaua

SEQ ID NO: 55193 - RNA, 18 nt, Homo sapiens
auucuacaggccuuuuga

SEQ ID NO: 55194 - RNA, 22 nt, Homo sapiens
uuggaagacaaugcugauucuc

SEQ ID NO: 55195 - RNA, 22 nt, Homo sapiens
uugaagacuauaugauucuuca

SEQ ID NO: 55196 - RNA, 19 nt, Homo sapiens
ugagaugaagacagggguu

SEQ ID NO: 55197 - RNA, 22 nt, Homo sapiens
uugagauggaguguugcucugu

SEQ ID NO: 55198 - RNA, 22 nt, Homo sapiens
uugagauggagucuugcucucu

SEQ ID NO: 55199 - RNA, 22 nt, Homo sapiens
ucugucuuugucaggaccagag

SEQ ID NO: 55200 - RNA, 22 nt, Homo sapiens
uuggcagucugaggcacagacu

SEQ ID NO: 55201 - RNA, 22 nt, Homo sapiens
ucuauguuuuugcuaguagugu

SEQ ID NO: 55202 - RNA, 22 nt, Homo sapiens
ugagaugaagugauguaaaaca

SEQ ID NO: 55203 - RNA, 22 nt, Homo sapiens
ugagaugaagucuugcucuguu

SEQ ID NO: 55204 - RNA, 19 nt, Homo sapiens
uagguacauucaagucucc

SEQ ID NO: 55205 - RNA, 22 nt, Homo sapiens
ugaaaucuaaaauguuccaaga

SEQ ID NO: 55206 - RNA, 22 nt, Homo sapiens
gucagugugauaucugcagggg

SEQ ID NO: 55207 - RNA, 22 nt, Homo sapiens
gagcucauuguugcuaaagaga

SEQ ID NO: 55208 - RNA, 22 nt, Homo sapiens
gucuuuggaaagacaaaguuca

SEQ ID NO: 55209 - RNA, 22 nt, Homo sapiens
agugcacuccagccugggcaac

SEQ ID NO: 55210 - RNA, 22 nt, Homo sapiens
aaaguucugcguuagggcuaaa

SEQ ID NO: 55211 - RNA, 22 nt, Homo sapiens
cucauggagaacaucugcuagg

SEQ ID NO: 55212 - RNA, 22 nt, Homo sapiens
cauuaguugaagugcagggaga

SEQ ID NO: 55213 - RNA, 22 nt, Homo sapiens
ugauuuguuuagugccaaguuu

SEQ ID NO: 55214 - RNA, 22 nt, Homo sapiens
uuaugacauugacaguuuuuag

SEQ ID NO: 55215 - RNA, 22 nt, Homo sapiens
gucuuuaguugaaacauguggu

SEQ ID NO: 55216 - RNA, 22 nt, Homo sapiens
ucaaauguuuguuuaaggcuua

SEQ ID NO: 55217 - RNA, 22 nt, Homo sapiens
uuugccaaucagaggcaucuug

SEQ ID NO: 55218 - RNA, 22 nt, Homo sapiens
aucccugugauccaaucacuuc

SEQ ID NO: 55219 - RNA, 22 nt, Homo sapiens
cauggcuuuuauaacaagaaau

SEQ ID NO: 55220 - RNA, 22 nt, Homo sapiens
aagucaaggagagaagcuucag

SEQ ID NO: 55221 - RNA, 21 nt, Homo sapiens
uauggauuugccuauucugga

SEQ ID NO: 55222 - RNA, 22 nt, Homo sapiens
ugacaaguaaacagucagcacc

SEQ ID NO: 55223 - RNA, 22 nt, Homo sapiens
acuggcuuauuucacuuagcau

SEQ ID NO: 55224 - RNA, 22 nt, Homo sapiens
uguggaguguaugugacagaga

SEQ ID NO: 55225 - RNA, 22 nt, Homo sapiens
guccaguacucuuuccugaaaa

SEQ ID NO: 55226 - RNA, 22 nt, Homo sapiens
auagcagaacagugucucacug

SEQ ID NO: 55227 - RNA, 18 nt, Homo sapiens
guaaauguaucuauugcc

SEQ ID NO: 55228 - RNA, 22 nt, Homo sapiens
augacauugaugcucuggcugg

SEQ ID NO: 55229 - RNA, 22 nt, Homo sapiens
uuugugcaugaagagggggugc

SEQ ID NO: 55230 - RNA, 22 nt, Homo sapiens
ggcaagaacuucacucacuuuu

SEQ ID NO: 55231 - RNA, 23 nt, Homo sapiens
aucagguuguagaauguguuugc

SEQ ID NO: 55232 - RNA, 22 nt, Homo sapiens
auuccacuuauaugagguaucu

SEQ ID NO: 55233 - RNA, 22 nt, Homo sapiens
gcuguguugugcccagcaucau

SEQ ID NO: 55234 - RNA, 22 nt, Homo sapiens
aaucacuuugcuacaaggcagu

SEQ ID NO: 55235 - RNA, 22 nt, Homo sapiens
agagaugauuaacauuuuggua

SEQ ID NO: 55236 - RNA, 22 nt, Homo sapiens
uugagauggaguuucgcucuuu

SEQ ID NO: 55237 - RNA, 22 nt, Homo sapiens
ucuacagccaguucaggaagaa

SEQ ID NO: 55238 - RNA, 22 nt, Homo sapiens
acaguaugcuuuaaacuuuguu

SEQ ID NO: 55239 - RNA, 22 nt, Homo sapiens
augugcuuauagguguauguuu

SEQ ID NO: 55240 - RNA, 22 nt, Homo sapiens
ugagccaaugauuugaauagag

SEQ ID NO: 55241 - RNA, 22 nt, Homo sapiens
ugugccuaguaauguguccaga

SEQ ID NO: 55242 - RNA, 22 nt, Homo sapiens
uugagauggaaucucgcuuugu

SEQ ID NO: 55243 - RNA, 22 nt, Homo sapiens
uuucauggaggcauuuuagauu

SEQ ID NO: 55244 - RNA, 22 nt, Homo sapiens
ggcaacauggugaaacucuguc

SEQ ID NO: 55245 - RNA, 22 nt, Homo sapiens
aaugcuguucuuugcuuaaguu

SEQ ID NO: 55246 - RNA, 22 nt, Homo sapiens
auuacuuugcaccaaccuaaua

SEQ ID NO: 55247 - RNA, 22 nt, Homo sapiens
uuggacuucuaacugacaugga

SEQ ID NO: 55248 - RNA, 22 nt, Homo sapiens
auagcauaucccacaugucaga

SEQ ID NO: 55249 - RNA, 22 nt, Homo sapiens
uacaguguuuugguauuccaca

SEQ ID NO: 55250 - RNA, 22 nt, Homo sapiens
cucauggagaaccucugcuagg

SEQ ID NO: 55251 - RNA, 21 nt, Homo sapiens
uggucaguuuucucacuagga

SEQ ID NO: 55252 - RNA, 22 nt, Homo sapiens
cucaguguuucagcugcucaga

SEQ ID NO: 55253 - RNA, 22 nt, Homo sapiens
aucuuuggugaguucuuugguc

SEQ ID NO: 55254 - RNA, 22 nt, Homo sapiens
uuaauacugcuuaacuuuagga

SEQ ID NO: 55255 - RNA, 22 nt, Homo sapiens
ggagaugaaaugagcuacuuaa

SEQ ID NO: 55256 - RNA, 22 nt, Homo sapiens
uacaaguauuuuuauuagugcc

SEQ ID NO: 55257 - RNA, 22 nt, Homo sapiens
augacaagaguguucagggaga

SEQ ID NO: 55258 - RNA, 22 nt, Homo sapiens
ucacuagaucaagggagagaaa

SEQ ID NO: 55259 - RNA, 22 nt, Homo sapiens
ugagaacugguagcacuuguga

SEQ ID NO: 55260 - RNA, 21 nt, Homo sapiens
uuaaguaauuacccaacucuc

SEQ ID NO: 55261 - RNA, 17 nt, Homo sapiens
auguaauccucaucucu

SEQ ID NO: 55262 - RNA, 22 nt, Homo sapiens
ucuuuggugaauggucauccag

SEQ ID NO: 55263 - RNA, 22 nt, Homo sapiens
uguuucuacugucucuguagua

SEQ ID NO: 55264 - RNA, 22 nt, Homo sapiens
cauugcacuccaucuugggcaa

SEQ ID NO: 55265 - RNA, 22 nt, Homo sapiens
auagcagaagaagggacaauuc

SEQ ID NO: 55266 - RNA, 22 nt, Homo sapiens
ccugucuugaagagauccuccu

SEQ ID NO: 55267 - RNA, 22 nt, Homo sapiens
uuauguaaaucaaucuggaauc

SEQ ID NO: 55268 - RNA, 22 nt, Homo sapiens
cugagcucauuucuuuugcuac

SEQ ID NO: 55269 - RNA, 22 nt, Homo sapiens
uggaaguuaaaugacucuuucu

SEQ ID NO: 55270 - RNA, 22 nt, Homo sapiens
uggcuuuguaagguuucauuuu

SEQ ID NO: 55271 - RNA, 22 nt, Homo sapiens
uuugugugugauuauaaaaggu

SEQ ID NO: 55272 - RNA, 22 nt, Homo sapiens
aaguggcauugaggaaaaaaau

SEQ ID NO: 55273 - RNA, 22 nt, Homo sapiens
auugcacuccagccugggcaac

SEQ ID NO: 55274 - RNA, 22 nt, Homo sapiens
gauacaccauuuucuagcuauu

SEQ ID NO: 55275 - RNA, 22 nt, Homo sapiens
uuuccaagaugcuuacuuucuc

SEQ ID NO: 55276 - RNA, 22 nt, Homo sapiens
uuugcauaauaagauuagggug

SEQ ID NO: 55277 - RNA, 22 nt, Homo sapiens
gggaauguagcaaaucugcaau

SEQ ID NO: 55278 - RNA, 21 nt, Homo sapiens
uuaucccagugucucugcagg

SEQ ID NO: 55279 - RNA, 22 nt, Homo sapiens
gagaugaugagauguucacagu

SEQ ID NO: 55280 - RNA, 22 nt, Homo sapiens
uucuuuggaaacaguacuaauu

SEQ ID NO: 55281 - RNA, 22 nt, Homo sapiens
uuuuaugggcuauuugcauuag

SEQ ID NO: 55282 - RNA, 22 nt, Homo sapiens
cauugcccuccagccugggcaa

SEQ ID NO: 55283 - RNA, 23 nt, Homo sapiens
ggaaugaaaccugguuaugauau

SEQ ID NO: 55284 - RNA, 22 nt, Homo sapiens
cauugcacuccagccugcugac

SEQ ID NO: 55285 - RNA, 22 nt, Homo sapiens
uugaggcaaugaggagaagcug

SEQ ID NO: 55286 - RNA, 22 nt, Homo sapiens
uccagaguggugaugcuggggc

SEQ ID NO: 55287 - RNA, 19 nt, Homo sapiens
ucccugagucuuagcuuga

SEQ ID NO: 55288 - RNA, 22 nt, Homo sapiens
ugagaugagggaagccuaggca

SEQ ID NO: 55289 - RNA, 22 nt, Homo sapiens
uuugguugcauucacauauuuc

SEQ ID NO: 55290 - RNA, 22 nt, Homo sapiens
auuguacuccagccugggcaag

SEQ ID NO: 55291 - RNA, 22 nt, Homo sapiens
caugccacuguggacaaagaca

SEQ ID NO: 55292 - RNA, 22 nt, Homo sapiens
uaagacacuuaaaauguuacau

SEQ ID NO: 55293 - RNA, 20 nt, Homo sapiens
cauugcacuccagcuugggc

SEQ ID NO: 55294 - RNA, 22 nt, Homo sapiens
uuacagcagugccccacuccca

SEQ ID NO: 55295 - RNA, 22 nt, Homo sapiens
uggaacacauaaauagcauagu

SEQ ID NO: 55296 - RNA, 22 nt, Homo sapiens
cauugcaugccagccugggcaa

SEQ ID NO: 55297 - RNA, 22 nt, Homo sapiens
uuggcaguaucuacuacagcua

SEQ ID NO: 55298 - RNA, 22 nt, Homo sapiens
uuggaaaugguaaaggguuaau

SEQ ID NO: 55299 - RNA, 18 nt, Homo sapiens
aaacagugucucuuucug

SEQ ID NO: 55300 - RNA, 22 nt, Homo sapiens
uuugccaauauuuuauugagga

SEQ ID NO: 55301 - RNA, 22 nt, Homo sapiens
ucaguagcaugaaaacagacua

SEQ ID NO: 55302 - RNA, 22 nt, Homo sapiens
ucucugagaaaaguuucuccca

SEQ ID NO: 55303 - RNA, 22 nt, Homo sapiens
cuacucugugguguauuugcau

SEQ ID NO: 55304 - RNA, 22 nt, Homo sapiens
acaauguauauuuuacuguagg

SEQ ID NO: 55305 - RNA, 22 nt, Homo sapiens
ugcaaauguuaggugucauuau

SEQ ID NO: 55306 - RNA, 22 nt, Homo sapiens
cuggcaguguuucuugugggcu

SEQ ID NO: 55307 - RNA, 22 nt, Homo sapiens
ugcacuguggucugagagacag

SEQ ID NO: 55308 - RNA, 22 nt, Homo sapiens
aucccuagaaaaaucagcacau

SEQ ID NO: 55309 - RNA, 22 nt, Homo sapiens
uaucucuguggguagugcugaa

SEQ ID NO: 55310 - RNA, 22 nt, Homo sapiens
uagaccaauuggcauauaguaa

SEQ ID NO: 55311 - RNA, 22 nt, Homo sapiens
cugggaugugacuguugccccc

SEQ ID NO: 55312 - RNA, 22 nt, Homo sapiens
ugagaugaagucucacucuguc

SEQ ID NO: 55313 - RNA, 19 nt, Homo sapiens
ugcaaagucuuuuccuauu

SEQ ID NO: 55314 - RNA, 22 nt, Homo sapiens
aauauagcuauguacaugucca

SEQ ID NO: 55315 - RNA, 22 nt, Homo sapiens
guaacacucuaaagggaugcac

SEQ ID NO: 55316 - RNA, 22 nt, Homo sapiens
cuacagcacugagcugugugca

SEQ ID NO: 55317 - RNA, 20 nt, Homo sapiens
ugagaacaugugguauuugg

SEQ ID NO: 55318 - RNA, 22 nt, Homo sapiens
uugagauggaguuuugcucuug

SEQ ID NO: 55319 - RNA, 22 nt, Homo sapiens
uuaacacugccauugauacugu

SEQ ID NO: 55320 - RNA, 23 nt, Homo sapiens
agccugguuucccugcuucuccc

SEQ ID NO: 55321 - RNA, 22 nt, Homo sapiens
agcaagaugaaguugagcuagg

SEQ ID NO: 55322 - RNA, 22 nt, Homo sapiens
uuuuauguuuguucccugccaa

SEQ ID NO: 55323 - RNA, 22 nt, Homo sapiens
uugagauggagucucgcucuuu

SEQ ID NO: 55324 - RNA, 22 nt, Homo sapiens
uucuaugguuuuuaugguguua

SEQ ID NO: 55325 - RNA, 22 nt, Homo sapiens
uaccacugccgagaaaacagau

SEQ ID NO: 55326 - RNA, 22 nt, Homo sapiens
ucuggaauguaaaguuuauggg

SEQ ID NO: 55327 - RNA, 19 nt, Homo sapiens
uaugcaacuuauagugcug

SEQ ID NO: 55328 - RNA, 22 nt, Homo sapiens
cauugcacuccagccuggcaac

SEQ ID NO: 55329 - RNA, 22 nt, Homo sapiens
guggaauggaaugauuguguau

SEQ ID NO: 55330 - RNA, 22 nt, Homo sapiens
uugguucucuuagccaucuuaa

SEQ ID NO: 55331 - RNA, 22 nt, Homo sapiens
uuauggauuuauauucuguagu

SEQ ID NO: 55332 - RNA, 22 nt, Homo sapiens
caugaaagugagaaacuccugg

SEQ ID NO: 55333 - RNA, 22 nt, Homo sapiens
uuguguuuuuaguagggaaggg

SEQ ID NO: 55334 - RNA, 22 nt, Homo sapiens
gucucugguugcuuuuguacca

SEQ ID NO: 55335 - RNA, 22 nt, Homo sapiens
gucauugcacuccagccuggac

SEQ ID NO: 55336 - RNA, 22 nt, Homo sapiens
ugagaucuuuuguggcugagaa

SEQ ID NO: 55337 - RNA, 22 nt, Homo sapiens
uggaagauucuagaagauucca

SEQ ID NO: 55338 - RNA, 22 nt, Homo sapiens
uugagaagugucuguucauguc

SEQ ID NO: 55339 - RNA, 22 nt, Homo sapiens
aagacuguaauccaucuugagu

SEQ ID NO: 55340 - RNA, 22 nt, Homo sapiens
uugagcaaaacauuaauauuag

SEQ ID NO: 55341 - RNA, 22 nt, Homo sapiens
cauugcacugcauucugggcaa

SEQ ID NO: 55342 - RNA, 22 nt, Homo sapiens
agaugauguuuacugagcauca

SEQ ID NO: 55343 - RNA, 22 nt, Homo sapiens
uucuacuucauuaggaggauug

SEQ ID NO: 55344 - RNA, 22 nt, Homo sapiens
auacaaguuauuugaacugcgg

SEQ ID NO: 55345 - RNA, 22 nt, Homo sapiens
aaguugguguaugagacagaag

SEQ ID NO: 55346 - RNA, 22 nt, Homo sapiens
cagagagcuugcccuuguauau

SEQ ID NO: 55347 - RNA, 22 nt, Homo sapiens
augaagcuagcugauugcugau

SEQ ID NO: 55348 - RNA, 22 nt, Homo sapiens
ugacaagaaagcgucuucuuuu

SEQ ID NO: 55349 - RNA, 23 nt, Homo sapiens
uuuugcaauaagucacuggaaua

SEQ ID NO: 55350 - RNA, 22 nt, Homo sapiens
cuuugguucuguuuauaugcug

SEQ ID NO: 55351 - RNA, 22 nt, Homo sapiens
acccuguaggacuauucuaauc

SEQ ID NO: 55352 - RNA, 22 nt, Homo sapiens
gaaugcagcagugacagggcug

SEQ ID NO: 55353 - RNA, 22 nt, Homo sapiens
uugcauaagugcauucugugau

SEQ ID NO: 55354 - RNA, 22 nt, Homo sapiens
aucgcacuccauccugggcaac

SEQ ID NO: 55355 - RNA, 22 nt, Homo sapiens
aucuuuggauacuugauauagu

SEQ ID NO: 55356 - RNA, 21 nt, Homo sapiens
gugcaaacaucauagaaugua

SEQ ID NO: 55357 - RNA, 18 nt, Homo sapiens
acauucagcuugaagaua

SEQ ID NO: 55358 - RNA, 22 nt, Homo sapiens
gggcaacauugaguacccugaa

SEQ ID NO: 55359 - RNA, 22 nt, Homo sapiens
ucauugcacuccagccugggug

SEQ ID NO: 55360 - RNA, 22 nt, Homo sapiens
guggaaugcaguguugauucaa

SEQ ID NO: 55361 - RNA, 22 nt, Homo sapiens
uccuguaaucccagcuaccaga

SEQ ID NO: 55362 - RNA, 22 nt, Homo sapiens
auggcuguuccugggaguucua

SEQ ID NO: 55363 - RNA, 22 nt, Homo sapiens
guguuauuuugcugggaaugau

SEQ ID NO: 55364 - RNA, 22 nt, Homo sapiens
uugcacagugguuuagagccug

SEQ ID NO: 55365 - RNA, 22 nt, Homo sapiens
aagagaugaagguccugacugu

SEQ ID NO: 55366 - RNA, 22 nt, Homo sapiens
cugaaagagcauguaacacagu

SEQ ID NO: 55367 - RNA, 22 nt, Homo sapiens
auagcagacauuucaaggcagg

SEQ ID NO: 55368 - RNA, 22 nt, Homo sapiens
cuacagcagcccaguccccgaa

SEQ ID NO: 55369 - RNA, 22 nt, Homo sapiens
ggcacgguggcucacgccugua

SEQ ID NO: 55370 - RNA, 22 nt, Homo sapiens
aucccaguucagccucugacac

SEQ ID NO: 55371 - RNA, 22 nt, Homo sapiens
augaggcaggaaaggcguaucu

SEQ ID NO: 55372 - RNA, 22 nt, Homo sapiens
cuuugguuaucuagcuguauga

SEQ ID NO: 55373 - RNA, 20 nt, Homo sapiens
ugagcucaugacauuuuucu

SEQ ID NO: 55374 - RNA, 22 nt, Homo sapiens
caugcacugaguccaccucugg

SEQ ID NO: 55375 - RNA, 22 nt, Homo sapiens
cuggaauguuccuaaagauuca

SEQ ID NO: 55376 - RNA, 22 nt, Homo sapiens
ggagaugauuaugaaucacuua

SEQ ID NO: 55377 - RNA, 22 nt, Homo sapiens
augaacagagccuugagaaccu

SEQ ID NO: 55378 - RNA, 22 nt, Homo sapiens
gggaaauguaaagucauaagau

SEQ ID NO: 55379 - RNA, 22 nt, Homo sapiens
ugucaauauguaauaacugaau

SEQ ID NO: 55380 - RNA, 22 nt, Homo sapiens
ucacaguccuguuuaggagagg

SEQ ID NO: 55381 - RNA, 22 nt, Homo sapiens
auguaacugggacacaagccuc

SEQ ID NO: 55382 - RNA, 22 nt, Homo sapiens
gucuuuggaaaaaaugucuguu

SEQ ID NO: 55383 - RNA, 22 nt, Homo sapiens
uguagcaaaucgauacuauugg

SEQ ID NO: 55384 - RNA, 22 nt, Homo sapiens
uugaguccauucgaugcugauu

SEQ ID NO: 55385 - RNA, 22 nt, Homo sapiens
ucaagugcauugauucaguauu

SEQ ID NO: 55386 - RNA, 22 nt, Homo sapiens
uauugcaauuggcagagugcua

SEQ ID NO: 55387 - RNA, 22 nt, Homo sapiens
auacaugugccauguugguaug

SEQ ID NO: 55388 - RNA, 19 nt, Homo sapiens
uuuuggaaaugugaacagc

SEQ ID NO: 55389 - RNA, 22 nt, Homo sapiens
auugcacuccagccuggcaaua

SEQ ID NO: 55390 - RNA, 22 nt, Homo sapiens
ucuugcuuguuguucccuucau

SEQ ID NO: 55391 - RNA, 22 nt, Homo sapiens
gcugcuuuugaugacaaaaaca

SEQ ID NO: 55392 - RNA, 22 nt, Homo sapiens
ugagaucaguuguuauaauucu

SEQ ID NO: 55393 - RNA, 22 nt, Homo sapiens
gaugauguugaauguucucacc

SEQ ID NO: 55394 - RNA, 22 nt, Homo sapiens
aaggcaauuuguugugaggauu

SEQ ID NO: 55395 - RNA, 22 nt, Homo sapiens
ugacaagauauggucuuaucaa

SEQ ID NO: 55396 - RNA, 22 nt, Homo sapiens
ucauauugcgguucauugacuu

SEQ ID NO: 55397 - RNA, 22 nt, Homo sapiens
uuggaaacaccuggugagguua

SEQ ID NO: 55398 - RNA, 20 nt, Homo sapiens
agguagauagaugauagaua

SEQ ID NO: 55399 - RNA, 20 nt, Homo sapiens
ucaaagacauggcugucaga

SEQ ID NO: 55400 - RNA, 22 nt, Homo sapiens
cucuuuggaugccuuaggguua

SEQ ID NO: 55401 - RNA, 22 nt, Homo sapiens
cucuuugaguuccuccuggugu

SEQ ID NO: 55402 - RNA, 22 nt, Homo sapiens
uuuugcaguuacagagagugag

SEQ ID NO: 55403 - RNA, 22 nt, Homo sapiens
auggaacauuauagauguaaaa

SEQ ID NO: 55404 - RNA, 22 nt, Homo sapiens
auugcacaucugcacuacagcc

SEQ ID NO: 55405 - RNA, 22 nt, Homo sapiens
ugacuaaaacugaguuucauua

SEQ ID NO: 55406 - RNA, 22 nt, Homo sapiens
augugcaaagcacuguucagca

SEQ ID NO: 55407 - RNA, 22 nt, Homo sapiens
ucuugguugaaaauucauaaua

SEQ ID NO: 55408 - RNA, 22 nt, Homo sapiens
cauugcacuccagcuugggcga

SEQ ID NO: 55409 - RNA, 22 nt, Homo sapiens
cugucucagugaauugguuuua

SEQ ID NO: 55410 - RNA, 22 nt, Homo sapiens
aaguauguaucaagucauacuu

SEQ ID NO: 55411 - RNA, 22 nt, Homo sapiens
ugccauugcacuccagccuggg

SEQ ID NO: 55412 - RNA, 18 nt, Homo sapiens
ggaaaacuuuucuaagua

SEQ ID NO: 55413 - RNA, 22 nt, Homo sapiens
cugacuaguuuuaaugcagauu

SEQ ID NO: 55414 - RNA, 22 nt, Homo sapiens
guagcagaauaucagauaauuu

SEQ ID NO: 55415 - RNA, 22 nt, Homo sapiens
ugugaaacauggauagaacugg

SEQ ID NO: 55416 - RNA, 22 nt, Homo sapiens
ucacuuugacggccaacuucua

SEQ ID NO: 55417 - RNA, 22 nt, Homo sapiens
auuucuacuccuguguccagaa

SEQ ID NO: 55418 - RNA, 22 nt, Homo sapiens
auugcacuccagccugggcagc

SEQ ID NO: 55419 - RNA, 22 nt, Homo sapiens
uuggaaauauguuaagugucau

SEQ ID NO: 55420 - RNA, 22 nt, Homo sapiens
uauggccccuacaugugcaaaa

SEQ ID NO: 55421 - RNA, 20 nt, Homo sapiens
aaacucugucuucuuuauca

SEQ ID NO: 55422 - RNA, 19 nt, Homo sapiens
auugcacuccaaccugggu

SEQ ID NO: 55423 - RNA, 22 nt, Homo sapiens
uggcucauuucuaaacccagcu

SEQ ID NO: 55424 - RNA, 22 nt, Homo sapiens
aagcacccagccucacgccugc

SEQ ID NO: 55425 - RNA, 23 nt, Homo sapiens
uugaggcauguaccaucaauauc

SEQ ID NO: 55426 - RNA, 20 nt, Homo sapiens
cauugcccuccagccugggc

SEQ ID NO: 55427 - RNA, 22 nt, Homo sapiens
uugagauggagucucacugugu

SEQ ID NO: 55428 - RNA, 22 nt, Homo sapiens
uuugugagguggauagauugca

SEQ ID NO: 55429 - RNA, 22 nt, Homo sapiens
ugcauggauguuugaacacacu

SEQ ID NO: 55430 - RNA, 22 nt, Homo sapiens
caacacagugaaacccgucucu

SEQ ID NO: 55431 - RNA, 22 nt, Homo sapiens
uuggaagauuacuuaguuuucu

SEQ ID NO: 55432 - RNA, 22 nt, Homo sapiens
aucacuuucuauuucugugcca

SEQ ID NO: 55433 - RNA, 22 nt, Homo sapiens
uucccagugccaggcacuggga

SEQ ID NO: 55434 - RNA, 22 nt, Homo sapiens
ggucagaaagacaggcauucag

SEQ ID NO: 55435 - RNA, 17 nt, Homo sapiens
ugagcuaagauuacccc

SEQ ID NO: 55436 - RNA, 22 nt, Homo sapiens
auaugcuuauuagcaagaaaua

SEQ ID NO: 55437 - RNA, 22 nt, Homo sapiens
cauugcacuccagccuaggcaa

SEQ ID NO: 55438 - RNA, 22 nt, Homo sapiens
cauugcacuuagacaacuuuug

SEQ ID NO: 55439 - RNA, 21 nt, Homo sapiens
uuuccuggagcguauggcuuc

SEQ ID NO: 55440 - RNA, 22 nt, Homo sapiens
aaugcuguguuauuucaugacc

SEQ ID NO: 55441 - RNA, 22 nt, Homo sapiens
auugcacuccagccuaggcaac

SEQ ID NO: 55442 - RNA, 20 nt, Homo sapiens
uugaggucaggaguuuggga

SEQ ID NO: 55443 - RNA, 22 nt, Homo sapiens
aagugucagaguugcuaaugac

SEQ ID NO: 55444 - RNA, 22 nt, Homo sapiens
cauugcacuccagccugccugg

SEQ ID NO: 55445 - RNA, 22 nt, Homo sapiens
uuaauagugacucauuuuccac

SEQ ID NO: 55446 - RNA, 17 nt, Homo sapiens
cucucugguuuaaagca

SEQ ID NO: 55447 - RNA, 22 nt, Homo sapiens
uaaagcauguaauuagguuaga

SEQ ID NO: 55448 - RNA, 22 nt, Homo sapiens
ggacaagagacugggacacuga

SEQ ID NO: 55449 - RNA, 22 nt, Homo sapiens
ugagaugacgacacaccucagu

SEQ ID NO: 55450 - RNA, 22 nt, Homo sapiens
uugaggucagagguucgagacc

SEQ ID NO: 55451 - RNA, 22 nt, Homo sapiens
ugagcccauuguccugguuuau

SEQ ID NO: 55452 - RNA, 22 nt, Homo sapiens
gcuuuguuaaaacacagccaca

SEQ ID NO: 55453 - RNA, 22 nt, Homo sapiens
gucuguuugauccagaucaaaa

SEQ ID NO: 55454 - RNA, 19 nt, Homo sapiens
cauggcuuauaauuuuaau

SEQ ID NO: 55455 - RNA, 22 nt, Homo sapiens
gagaucacuguuuauauucucu

SEQ ID NO: 55456 - RNA, 22 nt, Homo sapiens
agugaaaugucaccuuuuagga

SEQ ID NO: 55457 - RNA, 22 nt, Homo sapiens
acacuauugagguuuguuugca

SEQ ID NO: 55458 - RNA, 22 nt, Homo sapiens
ugagguagaggugaacuugacc

SEQ ID NO: 55459 - RNA, 19 nt, Homo sapiens
agaguauuguuacuucucu

SEQ ID NO: 55460 - RNA, 22 nt, Homo sapiens
gucagugucuuugcagcucaga

SEQ ID NO: 55461 - RNA, 22 nt, Homo sapiens
uggagcccuaguuccucauaac

SEQ ID NO: 55462 - RNA, 22 nt, Homo sapiens
auacaagugccauguuggugug

SEQ ID NO: 55463 - RNA, 22 nt, Homo sapiens
gcauaaagcuaauaagacgaag

SEQ ID NO: 55464 - RNA, 22 nt, Homo sapiens
uauggcuuuguuaacauuuucu

SEQ ID NO: 55465 - RNA, 22 nt, Homo sapiens
ggaauggaacaaagucuugaaa

SEQ ID NO: 55466 - RNA, 22 nt, Homo sapiens
ugagaucacuaagagguaaugg

SEQ ID NO: 55467 - RNA, 21 nt, Homo sapiens
agcugguuuccacagugugcu

SEQ ID NO: 55468 - RNA, 22 nt, Homo sapiens
ugucucaguucccuucucugga

SEQ ID NO: 55469 - RNA, 22 nt, Homo sapiens
uuugugauugcacacucaagau

SEQ ID NO: 55470 - RNA, 22 nt, Homo sapiens
cucaguguuaaggccaccucug

SEQ ID NO: 55471 - RNA, 22 nt, Homo sapiens
ucuuuguuggaguccaaggaua

SEQ ID NO: 55472 - RNA, 21 nt, Homo sapiens
uaaaacuguaacuuuguccug

SEQ ID NO: 55473 - RNA, 22 nt, Homo sapiens
auugaguaaaaaauagugaugu

SEQ ID NO: 55474 - RNA, 22 nt, Homo sapiens
uauggcuuucuacuugaguucu

SEQ ID NO: 55475 - RNA, 22 nt, Homo sapiens
uucuuagucauguaauagucca

SEQ ID NO: 55476 - RNA, 22 nt, Homo sapiens
agcuggcuguggagaaaccccu

SEQ ID NO: 55477 - RNA, 22 nt, Homo sapiens
aaccuguaaccauaugaucagu

SEQ ID NO: 55478 - RNA, 22 nt, Homo sapiens
uugcauauguugaaccaagcgu

SEQ ID NO: 55479 - RNA, 22 nt, Homo sapiens
augucuuucauagagacccaga

SEQ ID NO: 55480 - RNA, 22 nt, Homo sapiens
ucugucuugugguuugagugcc

SEQ ID NO: 55481 - RNA, 22 nt, Homo sapiens
ugagcugagaucgugccauugu

SEQ ID NO: 55482 - RNA, 23 nt, Homo sapiens
uuuggcauuccagaaauuuucau

SEQ ID NO: 55483 - RNA, 22 nt, Homo sapiens
cugagacacucuuaucugcaua

SEQ ID NO: 55484 - RNA, 22 nt, Homo sapiens
auguccaugagcacauguauca

SEQ ID NO: 55485 - RNA, 19 nt, Homo sapiens
ucuuuagucacauuuuuau

SEQ ID NO: 55486 - RNA, 22 nt, Homo sapiens
aagugccauguggaugggcccu

SEQ ID NO: 55487 - RNA, 22 nt, Homo sapiens
aucccuguaguaauauucuagc

SEQ ID NO: 55488 - RNA, 22 nt, Homo sapiens
uggaagauggaguuuuaucauu

SEQ ID NO: 55489 - RNA, 22 nt, Homo sapiens
uuauagcuaacaucugugaaaa

SEQ ID NO: 55490 - RNA, 22 nt, Homo sapiens
gauaaagauagcaauagggaca

SEQ ID NO: 55491 - RNA, 22 nt, Homo sapiens
uagcaggaaaggggucagaucu

SEQ ID NO: 55492 - RNA, 22 nt, Homo sapiens
aaggagcuaagagaucauacau

SEQ ID NO: 55493 - RNA, 22 nt, Homo sapiens
uuggcagugcccgaugcugggg

SEQ ID NO: 55494 - RNA, 22 nt, Homo sapiens
guggacaugaauuuuggaggca

SEQ ID NO: 55495 - RNA, 22 nt, Homo sapiens
aaucacuuuggcaccaaccuaa

SEQ ID NO: 55496 - RNA, 22 nt, Homo sapiens
uugacuuuuauucacucugcua

SEQ ID NO: 55497 - RNA, 22 nt, Homo sapiens
uagucacacacucaacuuuuca

SEQ ID NO: 55498 - RNA, 22 nt, Homo sapiens
accugagacuaggcauuuuaua

SEQ ID NO: 55499 - RNA, 22 nt, Homo sapiens
uaaucucagcuacucaggaggc

SEQ ID NO: 55500 - RNA, 22 nt, Homo sapiens
auugcucuuagaaauauuucuu

SEQ ID NO: 55501 - RNA, 22 nt, Homo sapiens
uaugagacugguuaauuuuugu

SEQ ID NO: 55502 - RNA, 22 nt, Homo sapiens
cacagugaacugguggguuuuu

SEQ ID NO: 55503 - RNA, 21 nt, Homo sapiens
uauggcuuagucaguguuucc

SEQ ID NO: 55504 - RNA, 21 nt, Homo sapiens
uggagugaagaguuuauugac

SEQ ID NO: 55505 - RNA, 23 nt, Homo sapiens
gaaguaauaaauggauucuuaac

SEQ ID NO: 55506 - RNA, 22 nt, Homo sapiens
aucuuuggucaucacagcuaga

SEQ ID NO: 55507 - RNA, 22 nt, Homo sapiens
ugagaucuuggaggcuuuguga

SEQ ID NO: 55508 - RNA, 22 nt, Homo sapiens
cauugcaauccagccugggcaa

SEQ ID NO: 55509 - RNA, 22 nt, Homo sapiens
ugagcugagauuaagcugcugc

SEQ ID NO: 55510 - RNA, 22 nt, Homo sapiens
uauggcuucuauaaggaagcuu

SEQ ID NO: 55511 - RNA, 22 nt, Homo sapiens
uaagugcaugauuacaugcaua

SEQ ID NO: 55512 - RNA, 22 nt, Homo sapiens
auggaaacauaagaguauagau

SEQ ID NO: 55513 - RNA, 22 nt, Homo sapiens
uagcuguuggugggaagucaga

SEQ ID NO: 55514 - RNA, 22 nt, Homo sapiens
cuuuugugauucuucaguugcu

SEQ ID NO: 55515 - RNA, 22 nt, Homo sapiens
cauaaagauggaggaggccagg

SEQ ID NO: 55516 - RNA, 22 nt, Homo sapiens
ugagaugaggucucacucuguu

SEQ ID NO: 55517 - RNA, 22 nt, Homo sapiens
gagcuguuuuucacuagaccaa

SEQ ID NO: 55518 - RNA, 22 nt, Homo sapiens
ugagaugauagauauguuaauu

SEQ ID NO: 55519 - RNA, 23 nt, Homo sapiens
aaagacuagucaggugcaguggu

SEQ ID NO: 55520 - RNA, 22 nt, Homo sapiens
caguuacuuuugcaccaaccua

SEQ ID NO: 55521 - RNA, 22 nt, Homo sapiens
augugacuuuuuccugugccuu

SEQ ID NO: 55522 - RNA, 22 nt, Homo sapiens
auuggcuuuugaaagucugcga

SEQ ID NO: 55523 - RNA, 22 nt, Homo sapiens
auggcagugagucucuaguauu

SEQ ID NO: 55524 - RNA, 22 nt, Homo sapiens
acugagaucuuuaaauaaauaa

SEQ ID NO: 55525 - RNA, 22 nt, Homo sapiens
ugagaugagucucgcucuguca

SEQ ID NO: 55526 - RNA, 22 nt, Homo sapiens
ggaaugugugucaugcuuuugc

SEQ ID NO: 55527 - RNA, 22 nt, Homo sapiens
uaucacuuuuccagcccagcuu

SEQ ID NO: 55528 - RNA, 22 nt, Homo sapiens
cuggcagugcuuguuauccugg

SEQ ID NO: 55529 - RNA, 22 nt, Homo sapiens
uaguucauuuuucuugcuuaga

SEQ ID NO: 55530 - RNA, 22 nt, Homo sapiens
uuguaaucaacacaucauuggg

SEQ ID NO: 55531 - RNA, 22 nt, Homo sapiens
uuugaaccauuugaagaaugau

SEQ ID NO: 55532 - RNA, 22 nt, Homo sapiens
ucuaaguaguagcuggucagaa

SEQ ID NO: 55533 - RNA, 22 nt, Homo sapiens
guguuauugagaaauagggugu

SEQ ID NO: 55534 - RNA, 18 nt, Homo sapiens
gacuuggaguuuacagug

SEQ ID NO: 55535 - RNA, 22 nt, Homo sapiens
uugcauauucucugaggcagga

SEQ ID NO: 55536 - RNA, 22 nt, Homo sapiens
uuggaaauguguuugcauucag

SEQ ID NO: 55537 - RNA, 22 nt, Homo sapiens
acauucagcuguuguuucaaug

SEQ ID NO: 55538 - RNA, 22 nt, Homo sapiens
ugccaacugguuucuuuuaguu

SEQ ID NO: 55539 - RNA, 20 nt, Homo sapiens
ucugauugcaacugcaugag

SEQ ID NO: 55540 - RNA, 22 nt, Homo sapiens
ugagaugauuuaauggagccca

SEQ ID NO: 55541 - RNA, 22 nt, Homo sapiens
aauggcuuucagcuuuucccca

SEQ ID NO: 55542 - RNA, 22 nt, Homo sapiens
gaaaacugcuucucuggguuuc

SEQ ID NO: 55543 - RNA, 22 nt, Homo sapiens
auagaagcugccaacguuucag

SEQ ID NO: 55544 - RNA, 22 nt, Homo sapiens
uauacagcaaguuacugugcug

SEQ ID NO: 55545 - RNA, 20 nt, Homo sapiens
agcugguuuuaugaaucuuu

SEQ ID NO: 55546 - RNA, 22 nt, Homo sapiens
uugcuuaggcuggagugcagug

SEQ ID NO: 55547 - RNA, 22 nt, Homo sapiens
uuuuaacagccaggggacggcc

SEQ ID NO: 55548 - RNA, 22 nt, Homo sapiens
ucccugaaaauuagcauuuuaa

SEQ ID NO: 55549 - RNA, 22 nt, Homo sapiens
gagaaccuccagcaagguagua

SEQ ID NO: 55550 - RNA, 22 nt, Homo sapiens
agcugguuuaauaugcugucug

SEQ ID NO: 55551 - RNA, 22 nt, Homo sapiens
ugagcuguuugaagaagcauuu

SEQ ID NO: 55552 - RNA, 22 nt, Homo sapiens
aggugguuuuaggcagagacau

SEQ ID NO: 55553 - RNA, 22 nt, Homo sapiens
auggcaguuucagcuauaguuu

SEQ ID NO: 55554 - RNA, 22 nt, Homo sapiens
gagaucauguacuagaacaccu

SEQ ID NO: 55555 - RNA, 22 nt, Homo sapiens
ucuaugguuuauuuccaagugu

SEQ ID NO: 55556 - RNA, 18 nt, Homo sapiens
aaacugcuuccuuggccu

SEQ ID NO: 55557 - RNA, 22 nt, Homo sapiens
ugagaugaacuugauuguuuua

SEQ ID NO: 55558 - RNA, 22 nt, Homo sapiens
ugcucaguuuaaaacuuuugag

SEQ ID NO: 55559 - RNA, 22 nt, Homo sapiens
uucuacaugggucgucggugag

SEQ ID NO: 55560 - RNA, 22 nt, Homo sapiens
cuggcagucugccucuucacug

SEQ ID NO: 55561 - RNA, 22 nt, Homo sapiens
ggcagaauugcugaggaugcua

SEQ ID NO: 55562 - RNA, 22 nt, Homo sapiens
auagcagaauuuggucaagucu

SEQ ID NO: 55563 - RNA, 22 nt, Homo sapiens
caguuacuugacacaaccaauu

SEQ ID NO: 55564 - RNA, 20 nt, Homo sapiens
uaugacaaagccuagugagu

SEQ ID NO: 55565 - RNA, 22 nt, Homo sapiens
ucauacaguaguccucacuugu

SEQ ID NO: 55566 - RNA, 22 nt, Homo sapiens
uuugaguuugaggugcugauga

SEQ ID NO: 55567 - RNA, 22 nt, Homo sapiens
uugcacuccggccuggguaaca

SEQ ID NO: 55568 - RNA, 22 nt, Homo sapiens
guccaagacuaggaguuggcag

SEQ ID NO: 55569 - RNA, 22 nt, Homo sapiens
gucucccagccuacauauuucu

SEQ ID NO: 55570 - RNA, 22 nt, Homo sapiens
uggaagacaaguguuagcaugg

SEQ ID NO: 55571 - RNA, 22 nt, Homo sapiens
uggagugagaacuucaaugaug

SEQ ID NO: 55572 - RNA, 22 nt, Homo sapiens
uuccugagccuuguaucuagua

SEQ ID NO: 55573 - RNA, 22 nt, Homo sapiens
cucagugucuggggccccaggg

SEQ ID NO: 55574 - RNA, 21 nt, Homo sapiens
uucaucuggccguauuccagg

SEQ ID NO: 55575 - RNA, 22 nt, Homo sapiens
uguagcuuuugagauuuauauu

SEQ ID NO: 55576 - RNA, 22 nt, Homo sapiens
aaagagaucuaugggcacuaug

SEQ ID NO: 55577 - RNA, 22 nt, Homo sapiens
cugucuagagggcacaugaugc

SEQ ID NO: 55578 - RNA, 22 nt, Homo sapiens
guggaaugaaaacucucucaca

SEQ ID NO: 55579 - RNA, 22 nt, Homo sapiens
cuaauacaguuguccaagcugg

SEQ ID NO: 55580 - RNA, 22 nt, Homo sapiens
auggagacaaauaaaggagagu

SEQ ID NO: 55581 - RNA, 21 nt, Homo sapiens
auuccacuuuuccuucaggga

SEQ ID NO: 55582 - RNA, 19 nt, Homo sapiens
gugguauuaccuuuugauu

SEQ ID NO: 55583 - RNA, 22 nt, Homo sapiens
gacacagugaagucucuacuug

SEQ ID NO: 55584 - RNA, 20 nt, Homo sapiens
uaagccacacagucuaaggu

SEQ ID NO: 55585 - RNA, 22 nt, Homo sapiens
cuguucaggaggcauuuggugg

SEQ ID NO: 55586 - RNA, 22 nt, Homo sapiens
uugggagugucucuggacugca

SEQ ID NO: 55587 - RNA, 22 nt, Homo sapiens
uuucuacagggcuugccaggua

SEQ ID NO: 55588 - RNA, 22 nt, Homo sapiens
ucagagucuagaucacucacug

SEQ ID NO: 55589 - RNA, 22 nt, Homo sapiens
uuaagggaggagcuucaagaug

SEQ ID NO: 55590 - RNA, 22 nt, Homo sapiens
uggucaguugaguccuugccaa

SEQ ID NO: 55591 - RNA, 22 nt, Homo sapiens
ugagaucugauaggccuggguu

SEQ ID NO: 55592 - RNA, 22 nt, Homo sapiens
ugucucccuucccauuaggaag

SEQ ID NO: 55593 - RNA, 22 nt, Homo sapiens
uggucuccuuuguacccugggc

SEQ ID NO: 55594 - RNA, 22 nt, Homo sapiens
ccuucauucauuaauuuagccc

SEQ ID NO: 55595 - RNA, 22 nt, Homo sapiens
acuguauagauggaguugauuu

SEQ ID NO: 55596 - RNA, 22 nt, Homo sapiens
uaagacugccccagacagcaag

SEQ ID NO: 55597 - RNA, 22 nt, Homo sapiens
uugagauggaguuucgcucuug

SEQ ID NO: 55598 - RNA, 18 nt, Homo sapiens
cuaagacacuuggcagag

SEQ ID NO: 55599 - RNA, 22 nt, Homo sapiens
ugcuuaguguugacccucugcc

SEQ ID NO: 55600 - RNA, 22 nt, Homo sapiens
gucucccagccuacaucuuucu

SEQ ID NO: 55601 - RNA, 22 nt, Homo sapiens
ggaaagaucagcuaaauguaag

SEQ ID NO: 55602 - RNA, 22 nt, Homo sapiens
cacuguggauggaacuauguga

SEQ ID NO: 55603 - RNA, 22 nt, Homo sapiens
cauugcacuccagccuggccaa

SEQ ID NO: 55604 - RNA, 22 nt, Homo sapiens
augacagagauaugugaauuuu

SEQ ID NO: 55605 - RNA, 22 nt, Homo sapiens
gagcucaccuuaccucuggagc

SEQ ID NO: 55606 - RNA, 22 nt, Homo sapiens
cccagaguucuuaaauacugag

SEQ ID NO: 55607 - RNA, 22 nt, Homo sapiens
uucaauaugucauuggcaggca

SEQ ID NO: 55608 - RNA, 22 nt, Homo sapiens
cuucaucugguuugugaacuuu

SEQ ID NO: 55609 - RNA, 22 nt, Homo sapiens
uuguuuuggagaugagcuaaaa

SEQ ID NO: 55610 - RNA, 22 nt, Homo sapiens
ugaaauuuuuuauucguuggcu

SEQ ID NO: 55611 - RNA, 19 nt, Homo sapiens
uuccugagaacaagggcuu

SEQ ID NO: 55612 - RNA, 22 nt, Homo sapiens
uuggaacacauguuuuucuacc

SEQ ID NO: 55613 - RNA, 22 nt, Homo sapiens
gccaacauggcgcuccauucuu

SEQ ID NO: 55614 - RNA, 22 nt, Homo sapiens
ucucuggauaucuacuuauguu

SEQ ID NO: 55615 - RNA, 22 nt, Homo sapiens
cuuugguuuacuuggugcuagu

SEQ ID NO: 55616 - RNA, 22 nt, Homo sapiens
acacacgugcauguaugcguau

SEQ ID NO: 55617 - RNA, 22 nt, Homo sapiens
cugugcauguuguccaauucuu

SEQ ID NO: 55618 - RNA, 22 nt, Homo sapiens
uacaccauuugauucuuuaagc

SEQ ID NO: 55619 - RNA, 22 nt, Homo sapiens
augcaacuugaaauuuuccgga

SEQ ID NO: 55620 - RNA, 22 nt, Homo sapiens
auggcagugucuagggguguuu

SEQ ID NO: 55621 - RNA, 22 nt, Homo sapiens
auugcacuccagccugggcuag

SEQ ID NO: 55622 - RNA, 22 nt, Homo sapiens
gaucacuuugaugccaggaacu

SEQ ID NO: 55623 - RNA, 22 nt, Homo sapiens
aagugaguaauacgucaguugu

SEQ ID NO: 55624 - RNA, 22 nt, Homo sapiens
uggaagaugggaccucaguuuu

SEQ ID NO: 55625 - RNA, 22 nt, Homo sapiens
cuauaacagugugguuuggaga

SEQ ID NO: 55626 - RNA, 22 nt, Homo sapiens
uucuuuggauaaaguuuuaugc

SEQ ID NO: 55627 - RNA, 23 nt, Homo sapiens
ucaguacuccacuuucaauagug

SEQ ID NO: 55628 - RNA, 22 nt, Homo sapiens
agacaagauggcuugagguuca

SEQ ID NO: 55629 - RNA, 22 nt, Homo sapiens
acacauuagcaagugcuguuau

SEQ ID NO: 55630 - RNA, 21 nt, Homo sapiens
ugaacacuggacugagugucc

SEQ ID NO: 55631 - RNA, 22 nt, Homo sapiens
ugacaagaacuuuccauaguaa

SEQ ID NO: 55632 - RNA, 22 nt, Homo sapiens
cuuccaaguggggcacgugcca

SEQ ID NO: 55633 - RNA, 20 nt, Homo sapiens
auuccacuuguuugagguac

SEQ ID NO: 55634 - RNA, 22 nt, Homo sapiens
uaaguauagguaacagaagcaa

SEQ ID NO: 55635 - RNA, 22 nt, Homo sapiens
uuggcagugguucugacggacc

SEQ ID NO: 55636 - RNA, 22 nt, Homo sapiens
uuauugcacuccagccugggua

SEQ ID NO: 55637 - RNA, 22 nt, Homo sapiens
acacuguagcugagggcaugcg

SEQ ID NO: 55638 - RNA, 22 nt, Homo sapiens
acacaguguuuauugugguuag

SEQ ID NO: 55639 - RNA, 17 nt, Homo sapiens
ucuaauaauaugcauuu

SEQ ID NO: 55640 - RNA, 22 nt, Homo sapiens
ugagaccugaucuugguacugc

SEQ ID NO: 55641 - RNA, 22 nt, Homo sapiens
auucuauaguccuaggauuggg

SEQ ID NO: 55642 - RNA, 22 nt, Homo sapiens
uguaacaggaggaaaaugugaa

SEQ ID NO: 55643 - RNA, 22 nt, Homo sapiens
uauggccuuuuuaaugauauug

SEQ ID NO: 55644 - RNA, 22 nt, Homo sapiens
augaucacuguggaaauucagc

SEQ ID NO: 55645 - RNA, 22 nt, Homo sapiens
cauugcacuccagccuuggcaa

SEQ ID NO: 55646 - RNA, 22 nt, Homo sapiens
cauugcacuccagccuagccaa

SEQ ID NO: 55647 - RNA, 22 nt, Homo sapiens
uagcauaauuuguagaaaauca

SEQ ID NO: 55648 - RNA, 22 nt, Homo sapiens
uguggccuuuguuucaguuggg

SEQ ID NO: 55649 - RNA, 22 nt, Homo sapiens
uacuguacugcaguucugcaaa

SEQ ID NO: 55650 - RNA, 22 nt, Homo sapiens
cauugcacuccagccucggcaa

SEQ ID NO: 55651 - RNA, 22 nt, Homo sapiens
uacaaaucuagguuuguuacug

SEQ ID NO: 55652 - RNA, 22 nt, Homo sapiens
cuggaaacaucuuaggaaugca

SEQ ID NO: 55653 - RNA, 22 nt, Homo sapiens
uaugacauaguccuuaacccuc

SEQ ID NO: 55654 - RNA, 20 nt, Homo sapiens
auuccacuuauaugaggucc

SEQ ID NO: 55655 - RNA, 16 nt, Homo sapiens
uugaggcaugucucag

SEQ ID NO: 55656 - RNA, 22 nt, Homo sapiens
ugauuggagaacaaacugcaua

SEQ ID NO: 55657 - RNA, 22 nt, Homo sapiens
uugagccaaggauugucuuucc

SEQ ID NO: 55658 - RNA, 22 nt, Homo sapiens
ccuucuuuuguaaggcugaaua

SEQ ID NO: 55659 - RNA, 22 nt, Homo sapiens
uucaguagucuccauagaaccg

SEQ ID NO: 55660 - RNA, 22 nt, Homo sapiens
augagcugauuuccuuaccaua

SEQ ID NO: 55661 - RNA, 22 nt, Homo sapiens
uuugugaggugauggauauguc

SEQ ID NO: 55662 - RNA, 22 nt, Homo sapiens
agaagaacauagggugacugaa

SEQ ID NO: 55663 - RNA, 22 nt, Homo sapiens
cucaguagaaaauacauggacu

SEQ ID NO: 55664 - RNA, 22 nt, Homo sapiens
ugagaucaugucauuugcacuc

SEQ ID NO: 55665 - RNA, 22 nt, Homo sapiens
guucucacuggacugugaaaau

SEQ ID NO: 55666 - RNA, 22 nt, Homo sapiens
uuaccugagaaggugacauuug

SEQ ID NO: 55667 - RNA, 23 nt, Homo sapiens
ucacacuuaagagaaaugcagcu

SEQ ID NO: 55668 - RNA, 22 nt, Homo sapiens
uccauuugucuauguuucuguu

SEQ ID NO: 55669 - RNA, 22 nt, Homo sapiens
acacuuucuagacaagggaaua

SEQ ID NO: 55670 - RNA, 22 nt, Homo sapiens
augaugcugagguuugggguau

SEQ ID NO: 55671 - RNA, 22 nt, Homo sapiens
uugcuuagucaugaaucacuga

SEQ ID NO: 55672 - RNA, 22 nt, Homo sapiens
ugagcacuguacuuuaucaggu

SEQ ID NO: 55673 - RNA, 22 nt, Homo sapiens
gugaggcacugcugcuuuccag

SEQ ID NO: 55674 - RNA, 22 nt, Homo sapiens
agcugguuuauuucuauauccu

SEQ ID NO: 55675 - RNA, 21 nt, Homo sapiens
ucagaagcucccagggaggac

SEQ ID NO: 55676 - RNA, 22 nt, Homo sapiens
auauucacagguaucagagauu

SEQ ID NO: 55677 - RNA, 17 nt, Homo sapiens
gucuuugguugaguuua

SEQ ID NO: 55678 - RNA, 22 nt, Homo sapiens
auguccauggaaucuguagcaa

SEQ ID NO: 55679 - RNA, 18 nt, Homo sapiens
auugcacaccagccuggg

SEQ ID NO: 55680 - RNA, 22 nt, Homo sapiens
aaacugcuuuccaugguggcug

SEQ ID NO: 55681 - RNA, 22 nt, Homo sapiens
ggaucacuugagaccaggaguu

SEQ ID NO: 55682 - RNA, 19 nt, Homo sapiens
cucuuuggugucucuucuu

SEQ ID NO: 55683 - RNA, 22 nt, Homo sapiens
uuagcacauuuccagcacaugg

SEQ ID NO: 55684 - RNA, 19 nt, Homo sapiens
uggaacugauucaguucug

SEQ ID NO: 55685 - RNA, 21 nt, Homo sapiens
ugaaugcuuuaaauauuagaa

SEQ ID NO: 55686 - RNA, 22 nt, Homo sapiens
uuugacaaugugugcuuguauu

SEQ ID NO: 55687 - RNA, 22 nt, Homo sapiens
cauugcacuccagucugggcaa

SEQ ID NO: 55688 - RNA, 22 nt, Homo sapiens
uggagugaaaacacacuaaucu

SEQ ID NO: 55689 - RNA, 22 nt, Homo sapiens
aucuuuggugcaugauacuuug

SEQ ID NO: 55690 - RNA, 22 nt, Homo sapiens
uuggacuucucaaggcaauaaa

SEQ ID NO: 55691 - RNA, 22 nt, Homo sapiens
ggacaagaucuuccaccauuca

SEQ ID NO: 55692 - RNA, 22 nt, Homo sapiens
uugacauguaaguacucuauag

SEQ ID NO: 55693 - RNA, 22 nt, Homo sapiens
uuuuuuaguuagcugggcauga

SEQ ID NO: 55694 - RNA, 21 nt, Homo sapiens
uuuuugggcuuucauaguguu

SEQ ID NO: 55695 - RNA, 22 nt, Homo sapiens
uuuuuggauaaugguacaugua

SEQ ID NO: 55696 - RNA, 22 nt, Homo sapiens
uuuuuggguaaugauuaucaau

SEQ ID NO: 55697 - RNA, 22 nt, Homo sapiens
uuuuuggaggagguuagaucau

SEQ ID NO: 55698 - RNA, 22 nt, Homo sapiens
uuuuucacuuaaguuaggcuca

SEQ ID NO: 55699 - RNA, 22 nt, Homo sapiens
uuuuugagaauuggugaaacac

SEQ ID NO: 55700 - RNA, 22 nt, Homo sapiens
uuuuugagguauaguguggcua

SEQ ID NO: 55701 - RNA, 22 nt, Homo sapiens
uuuuugaguaaauauaaauugu

SEQ ID NO: 55702 - RNA, 16 nt, Homo sapiens
uuuuugcagaaaugac

SEQ ID NO: 55703 - RNA, 22 nt, Homo sapiens
uuuuugauuaauggguagacca

SEQ ID NO: 55704 - RNA, 22 nt, Homo sapiens
uuuugguuguuggguaagagua

SEQ ID NO: 55705 - RNA, 22 nt, Homo sapiens
uuuuuauggccaauccucagaa

SEQ ID NO: 55706 - RNA, 22 nt, Homo sapiens
uuuuguacgccuguguccauca

SEQ ID NO: 55707 - RNA, 22 nt, Homo sapiens
uuuuggcacuuugucugauucu

SEQ ID NO: 55708 - RNA, 20 nt, Homo sapiens
uuuuggcuuaaagcagucug

SEQ ID NO: 55709 - RNA, 22 nt, Homo sapiens
uuuugguaaugaacuuaggaag

SEQ ID NO: 55710 - RNA, 19 nt, Homo sapiens
uuugcauagugagaauaua

SEQ ID NO: 55711 - RNA, 22 nt, Homo sapiens
uuugcagagucuuucgcugggc

SEQ ID NO: 55712 - RNA, 22 nt, Homo sapiens
uuugcagugucagcuucugugu

SEQ ID NO: 55713 - RNA, 22 nt, Homo sapiens
uuucugaggccucaccagaagc

SEQ ID NO: 55714 - RNA, 22 nt, Homo sapiens
uuugcacuuuaauauaauguga

SEQ ID NO: 55715 - RNA, 20 nt, Homo sapiens
uuugcagaaucuaagaagag

SEQ ID NO: 55716 - RNA, 22 nt, Homo sapiens
uuugcaauguugugauggugaa

SEQ ID NO: 55717 - RNA, 19 nt, Homo sapiens
uuugaauauaaugcagcua

SEQ ID NO: 55718 - RNA, 22 nt, Homo sapiens
uuugaaugcaacaaaugcggga

SEQ ID NO: 55719 - RNA, 22 nt, Homo sapiens
uuugaagcaauugugaauggga

SEQ ID NO: 55720 - RNA, 22 nt, Homo sapiens
uuucuugguuguauuuagacuu

SEQ ID NO: 55721 - RNA, 18 nt, Homo sapiens
uuuugcuuaacugcgcca

SEQ ID NO: 55722 - RNA, 22 nt, Homo sapiens
uuuugcauuggcugaggagugu

SEQ ID NO: 55723 - RNA, 19 nt, Homo sapiens
uuuuggaaaugugaacagc

SEQ ID NO: 55724 - RNA, 17 nt, Homo sapiens
uuuuggauuagaaaucc

SEQ ID NO: 55725 - RNA, 22 nt, Homo sapiens
uuugcugagucauuccaugcug

SEQ ID NO: 55726 - RNA, 22 nt, Homo sapiens
uugugaaaaaccucucguggaa

SEQ ID NO: 55727 - RNA, 22 nt, Homo sapiens
uugucucacuggaguuuaguaa

SEQ ID NO: 55728 - RNA, 22 nt, Homo sapiens
uugugcuuuugagcugagauga

SEQ ID NO: 55729 - RNA, 22 nt, Homo sapiens
uugugcuugauuugccuagcug

SEQ ID NO: 55730 - RNA, 22 nt, Homo sapiens
uuuaaugcugcccagucauggg

SEQ ID NO: 55731 - RNA, 22 nt, Homo sapiens
uuuagcaauucauuuugugucu

SEQ ID NO: 55732 - RNA, 22 nt, Homo sapiens
uuuagcaauggagggugacuuu

SEQ ID NO: 55733 - RNA, 22 nt, Homo sapiens
uugugucaaauggcaauuagca

SEQ ID NO: 55734 - RNA, 22 nt, Homo sapiens
uuuaaguguuuguuccugaaaa

SEQ ID NO: 55735 - RNA, 22 nt, Homo sapiens
uuuaacauuggaugagaucguc

SEQ ID NO: 55736 - RNA, 22 nt, Homo sapiens
uuuaagguauguggugaaaauu

SEQ ID NO: 55737 - RNA, 22 nt, Homo sapiens
uuucgugucuggucugugaugg

SEQ ID NO: 55738 - RNA, 17 nt, Homo sapiens
uuucagaguggaagugu

SEQ ID NO: 55739 - RNA, 22 nt, Homo sapiens
uuucaggcaagggugacccuga

SEQ ID NO: 55740 - RNA, 21 nt, Homo sapiens
uuucacugugaguuuuucugu

SEQ ID NO: 55741 - RNA, 22 nt, Homo sapiens
uuucagagucaucugcccaagu

SEQ ID NO: 55742 - RNA, 22 nt, Homo sapiens
uuucacagagggcuucuuucua

SEQ ID NO: 55743 - RNA, 21 nt, Homo sapiens
uuucugggggagcauggcagg

SEQ ID NO: 55744 - RNA, 22 nt, Homo sapiens
uuucugguuaauuucuaagagc

SEQ ID NO: 55745 - RNA, 23 nt, Homo sapiens
uuucuugggcaugcuaugucagu

SEQ ID NO: 55746 - RNA, 22 nt, Homo sapiens
uuucugcuugagagaauugcug

SEQ ID NO: 55747 - RNA, 22 nt, Homo sapiens
uuuagguacgcaccggcucagu

SEQ ID NO: 55748 - RNA, 22 nt, Homo sapiens
uuuagguauuugguauagcagu

SEQ ID NO: 55749 - RNA, 22 nt, Homo sapiens
uuuagcacugugauugacaaaa

SEQ ID NO: 55750 - RNA, 22 nt, Homo sapiens
uuuagguagucaaagguuaguc

SEQ ID NO: 55751 - RNA, 22 nt, Homo sapiens
uuuauugcucuaaaguugccau

SEQ ID NO: 55752 - RNA, 22 nt, Homo sapiens
uuuaugcgucuguaauuucuuu

SEQ ID NO: 55753 - RNA, 22 nt, Homo sapiens
uuuaugcuacauguguuggaaa

SEQ ID NO: 55754 - RNA, 22 nt, Homo sapiens
uuuauggagagauauuuauggu

SEQ ID NO: 55755 - RNA, 22 nt, Homo sapiens
uuuaucaggccuuuggaaaaau

SEQ ID NO: 55756 - RNA, 22 nt, Homo sapiens
uuguaauguuaggguguccaug

SEQ ID NO: 55757 - RNA, 23 nt, Homo sapiens
uuguacacuaagaaucgcagaug

SEQ ID NO: 55758 - RNA, 22 nt, Homo sapiens
uuguaaucaacacaucauuggg

SEQ ID NO: 55759 - RNA, 22 nt, Homo sapiens
uuguaauguuaccaaauggugu

SEQ ID NO: 55760 - RNA, 22 nt, Homo sapiens
uuguccaagucccauuuguuga

SEQ ID NO: 55761 - RNA, 22 nt, Homo sapiens
uugguauguaauuuauauugua

SEQ ID NO: 55762 - RNA, 22 nt, Homo sapiens
uuguaaagucugucucagucag

SEQ ID NO: 55763 - RNA, 22 nt, Homo sapiens
uuguaaaguucucucccgaaaa

SEQ ID NO: 55764 - RNA, 22 nt, Homo sapiens
uuguaacaguuuauugacucga

SEQ ID NO: 55765 - RNA, 22 nt, Homo sapiens
uuguaacaugcuuucacuucag

SEQ ID NO: 55766 - RNA, 22 nt, Homo sapiens
uugguuaucaucauuucagcaa

SEQ ID NO: 55767 - RNA, 22 nt, Homo sapiens
uugguucucuuagccaucuuaa

SEQ ID NO: 55768 - RNA, 22 nt, Homo sapiens
uugcuuuguuacugcaguuucc

SEQ ID NO: 55769 - RNA, 22 nt, Homo sapiens
uugcuuagucaugaaucacuga

SEQ ID NO: 55770 - RNA, 19 nt, Homo sapiens
uugcaguauccuauauguu

SEQ ID NO: 55771 - RNA, 22 nt, Homo sapiens
uugcauagaggugaguauagua

SEQ ID NO: 55772 - RNA, 19 nt, Homo sapiens
uugcauagguugaaccagc

SEQ ID NO: 55773 - RNA, 22 nt, Homo sapiens
uugcauaauaagagggauacgu

SEQ ID NO: 55774 - RNA, 22 nt, Homo sapiens
uugggaaugcuaaaccucuauu

SEQ ID NO: 55775 - RNA, 22 nt, Homo sapiens
uuggcuuuuaugcagcuuaggu

SEQ ID NO: 55776 - RNA, 22 nt, Homo sapiens
uuggaauauaaccuguuucuaa

SEQ ID NO: 55777 - RNA, 22 nt, Homo sapiens
uuggcuuaguugaccacagucu

SEQ ID NO: 55778 - RNA, 22 nt, Homo sapiens
uuggaauacuuguuaaagucca

SEQ ID NO: 55779 - RNA, 22 nt, Homo sapiens
uuggaacacauguuuuucuacc

SEQ ID NO: 55780 - RNA, 22 nt, Homo sapiens
uuggaaauguguuugcauucag

SEQ ID NO: 55781 - RNA, 22 nt, Homo sapiens
uuggaaauauguuaagugucau

SEQ ID NO: 55782 - RNA, 22 nt, Homo sapiens
uuggaagacaaugcugauucuc

SEQ ID NO: 55783 - RNA, 22 nt, Homo sapiens
uugggaauguccuaauaucucg

SEQ ID NO: 55784 - RNA, 22 nt, Homo sapiens
uugggauggaaauuuguacccc

SEQ ID NO: 55785 - RNA, 22 nt, Homo sapiens
uugggguagaauugcaacauau

SEQ ID NO: 55786 - RNA, 22 nt, Homo sapiens
uucauaguauuuuucuccaaau

SEQ ID NO: 55787 - RNA, 18 nt, Homo sapiens
uucauaguagcaugauuu

SEQ ID NO: 55788 - RNA, 22 nt, Homo sapiens
uucauagucuaugcaaguaaga

SEQ ID NO: 55789 - RNA, 22 nt, Homo sapiens
uucauagucuaauuuuuuccac

SEQ ID NO: 55790 - RNA, 22 nt, Homo sapiens
uucauagaggacauuacuggag

SEQ ID NO: 55791 - RNA, 22 nt, Homo sapiens
uucacuguuaagcaguuaaacu

SEQ ID NO: 55792 - RNA, 22 nt, Homo sapiens
uucaucagcuguagaugucaug

SEQ ID NO: 55793 - RNA, 18 nt, Homo sapiens
uucauauguugaaccaga

SEQ ID NO: 55794 - RNA, 22 nt, Homo sapiens
uucaucuggcaauucagagauu

SEQ ID NO: 55795 - RNA, 22 nt, Homo sapiens
uucauccccuccaaaucucaug

SEQ ID NO: 55796 - RNA, 22 nt, Homo sapiens
uucuugguuuaucgcuuuaaaa

SEQ ID NO: 55797 - RNA, 21 nt, Homo sapiens
uucuuugcucaguguuagagu

SEQ ID NO: 55798 - RNA, 22 nt, Homo sapiens
uucuuuggauaaaguuuuaugc

SEQ ID NO: 55799 - RNA, 23 nt, Homo sapiens
uugaaaagucaguagccucugau

SEQ ID NO: 55800 - RNA, 22 nt, Homo sapiens
uugaaagucuaggcuuacagua

SEQ ID NO: 55801 - RNA, 22 nt, Homo sapiens
uugaaaguguucacaaugguau

SEQ ID NO: 55802 - RNA, 22 nt, Homo sapiens
uugaaagucauggcacaggcaa

SEQ ID NO: 55803 - RNA, 22 nt, Homo sapiens
uugaaagucauuucuucuaagu

SEQ ID NO: 55804 - RNA, 22 nt, Homo sapiens
uugaaagcuaucucaaaucgcu

SEQ ID NO: 55805 - RNA, 22 nt, Homo sapiens
uugaauguguugggaagcccuu

SEQ ID NO: 55806 - RNA, 22 nt, Homo sapiens
uugacaaggagccauugcaucu

SEQ ID NO: 55807 - RNA, 22 nt, Homo sapiens
uugaauaggcucaugcuuauca

SEQ ID NO: 55808 - RNA, 18 nt, Homo sapiens
uugaauagagccaagcac

SEQ ID NO: 55809 - RNA, 22 nt, Homo sapiens
uugaauagaaguguugaaagug

SEQ ID NO: 55810 - RNA, 22 nt, Homo sapiens
uugaauagcauguuuagugcau

SEQ ID NO: 55811 - RNA, 22 nt, Homo sapiens
uugaauaguggugaaaguuuga

SEQ ID NO: 55812 - RNA, 22 nt, Homo sapiens
uugaaauguuuagaaguuugga

SEQ ID NO: 55813 - RNA, 22 nt, Homo sapiens
uugaauagaagguuuuuuguuc

SEQ ID NO: 55814 - RNA, 22 nt, Homo sapiens
uugacauugcuguaguguccag

SEQ ID NO: 55815 - RNA, 22 nt, Homo sapiens
uugacaguggcuuaaauugguu

SEQ ID NO: 55816 - RNA, 22 nt, Homo sapiens
uugacauaguuucugaaauaga

SEQ ID NO: 55817 - RNA, 22 nt, Homo sapiens
uugacaaguuguccaguaugag

SEQ ID NO: 55818 - RNA, 22 nt, Homo sapiens
uugacauaaucauuucacagug

SEQ ID NO: 55819 - RNA, 22 nt, Homo sapiens
uugacugggccagacagagauc

SEQ ID NO: 55820 - RNA, 22 nt, Homo sapiens
uugagaaucuuucgaauguucu

SEQ ID NO: 55821 - RNA, 22 nt, Homo sapiens
uugagacggagucuugcucuuu

SEQ ID NO: 55822 - RNA, 22 nt, Homo sapiens
uugagagagaacauuuguuaca

SEQ ID NO: 55823 - RNA, 22 nt, Homo sapiens
uugagaugaaguuuugcucuuu

SEQ ID NO: 55824 - RNA, 22 nt, Homo sapiens
uugagaugaagucuugcucucu

SEQ ID NO: 55825 - RNA, 22 nt, Homo sapiens
uugagauggagucuugcucuug

SEQ ID NO: 55826 - RNA, 22 nt, Homo sapiens
uugagauggagucuugcgcugu

SEQ ID NO: 55827 - RNA, 22 nt, Homo sapiens
uugagauggagucuugcacugu

SEQ ID NO: 55828 - RNA, 22 nt, Homo sapiens
uugagauggagucucgcucuuu

SEQ ID NO: 55829 - RNA, 22 nt, Homo sapiens
uugagauggagucucacgcauu

SEQ ID NO: 55830 - RNA, 22 nt, Homo sapiens
uugagauuuuccucaaauauuu

SEQ ID NO: 55831 - RNA, 22 nt, Homo sapiens
uugagcaaugaacgauucaggg

SEQ ID NO: 55832 - RNA, 22 nt, Homo sapiens
uugagauuauuguguuccuuua

SEQ ID NO: 55833 - RNA, 22 nt, Homo sapiens
uugagcaaaacauuaauauuag

SEQ ID NO: 55834 - RNA, 21 nt, Homo sapiens
uugagcaacuaggguuauagg

SEQ ID NO: 55835 - RNA, 22 nt, Homo sapiens
uugagauggagucuuguucucu

SEQ ID NO: 55836 - RNA, 22 nt, Homo sapiens
uugagauggagucuuguucuuu

SEQ ID NO: 55837 - RNA, 22 nt, Homo sapiens
uugagauggauagacauagcau

SEQ ID NO: 55838 - RNA, 22 nt, Homo sapiens
uugagauggaguuucgcucuug

SEQ ID NO: 55839 - RNA, 22 nt, Homo sapiens
uugagauggaguuucgcucuuu

SEQ ID NO: 55840 - RNA, 22 nt, Homo sapiens
uugaggaagugguuccccagag

SEQ ID NO: 55841 - RNA, 22 nt, Homo sapiens
uugaggaaugugauuucaaaua

SEQ ID NO: 55842 - RNA, 22 nt, Homo sapiens
uugcaacuuagaaaaaucauuu

SEQ ID NO: 55843 - RNA, 22 nt, Homo sapiens
uugagcucuucuagcaauucua

SEQ ID NO: 55844 - RNA, 22 nt, Homo sapiens
uugcacauugauuuuguaucuu

SEQ ID NO: 55845 - RNA, 22 nt, Homo sapiens
uugcacauggcaggugcucaau

SEQ ID NO: 55846 - RNA, 22 nt, Homo sapiens
uugcagaucccacacucacccu

SEQ ID NO: 55847 - RNA, 22 nt, Homo sapiens
uugcagcaacauggaugaaacu

SEQ ID NO: 55848 - RNA, 22 nt, Homo sapiens
ugucuugagagaggacaugacu

SEQ ID NO: 55849 - RNA, 20 nt, Homo sapiens
ugucuauggggguucucugc

SEQ ID NO: 55850 - RNA, 22 nt, Homo sapiens
ugucuagaucugaauguaauug

SEQ ID NO: 55851 - RNA, 22 nt, Homo sapiens
ugugauaguugcuguucugggc

SEQ ID NO: 55852 - RNA, 22 nt, Homo sapiens
ugugauaguuggcuaaagcagu

SEQ ID NO: 55853 - RNA, 19 nt, Homo sapiens
ugugacugguugucucgcu

SEQ ID NO: 55854 - RNA, 22 nt, Homo sapiens
ugugacugguugucccacuuuc

SEQ ID NO: 55855 - RNA, 22 nt, Homo sapiens
ugugaucaauuagugaugucug

SEQ ID NO: 55856 - RNA, 22 nt, Homo sapiens
ugugaugaagaguccaagaaca

SEQ ID NO: 55857 - RNA, 22 nt, Homo sapiens
ugugaugguuuagcauuuucuu

SEQ ID NO: 55858 - RNA, 22 nt, Homo sapiens
ugucacugugaguuugacugcu

SEQ ID NO: 55859 - RNA, 22 nt, Homo sapiens
ugucacaguuuguacuuuauag

SEQ ID NO: 55860 - RNA, 22 nt, Homo sapiens
ugucacugugcagucaugcauu

SEQ ID NO: 55861 - RNA, 22 nt, Homo sapiens
ugucagaaucuagaggcugcua

SEQ ID NO: 55862 - RNA, 22 nt, Homo sapiens
ugucccaguuggguauugaauu

SEQ ID NO: 55863 - RNA, 22 nt, Homo sapiens
ugucaguuucaguguuagccuu

SEQ ID NO: 55864 - RNA, 22 nt, Homo sapiens
ugucaaagagacaucugcacuc

SEQ ID NO: 55865 - RNA, 22 nt, Homo sapiens
uguauuuguuguuaaauggaga

SEQ ID NO: 55866 - RNA, 22 nt, Homo sapiens
uguauguaauugaaguuaaguu

SEQ ID NO: 55867 - RNA, 22 nt, Homo sapiens
ugucaaguugugguucaauuuu

SEQ ID NO: 55868 - RNA, 20 nt, Homo sapiens
ugucaagaaacauuacuuau

SEQ ID NO: 55869 - RNA, 22 nt, Homo sapiens
ugucaacauuuaucaaguuauu

SEQ ID NO: 55870 - RNA, 22 nt, Homo sapiens
uguauaacucacauugaaguuu

SEQ ID NO: 55871 - RNA, 22 nt, Homo sapiens
uguaugcuuuugagagauauuu

SEQ ID NO: 55872 - RNA, 21 nt, Homo sapiens
uguauauguuuauacacacac

SEQ ID NO: 55873 - RNA, 21 nt, Homo sapiens
uguauacauauguuaggugca

SEQ ID NO: 55874 - RNA, 22 nt, Homo sapiens
uguauacauguguguucacgca

SEQ ID NO: 55875 - RNA, 22 nt, Homo sapiens
uguauaggcaaauuuccucaug

SEQ ID NO: 55876 - RNA, 21 nt, Homo sapiens
uguauacauggaagaaugguc

SEQ ID NO: 55877 - RNA, 22 nt, Homo sapiens
uguaaacuuuugagauugacuu

SEQ ID NO: 55878 - RNA, 18 nt, Homo sapiens
uguaaacuaccucaaccu

SEQ ID NO: 55879 - RNA, 22 nt, Homo sapiens
uguaaacuaugagcugauuauu

SEQ ID NO: 55880 - RNA, 22 nt, Homo sapiens
uguaacaguaguuacuauucuu

SEQ ID NO: 55881 - RNA, 22 nt, Homo sapiens
uguaaagaaagcuguuguugua

SEQ ID NO: 55882 - RNA, 16 nt, Homo sapiens
uguaaauguuuugcau

SEQ ID NO: 55883 - RNA, 22 nt, Homo sapiens
uguaagcagcagagacuauccu

SEQ ID NO: 55884 - RNA, 22 nt, Homo sapiens
uguaauaguaggcucacauuug

SEQ ID NO: 55885 - RNA, 22 nt, Homo sapiens
uguaaugaucaaaucagaguaa

SEQ ID NO: 55886 - RNA, 22 nt, Homo sapiens
ugguuaucauagcuaugcuacu

SEQ ID NO: 55887 - RNA, 21 nt, Homo sapiens
ugguugauccuccuagugccu

SEQ ID NO: 55888 - RNA, 17 nt, Homo sapiens
uggugcuugaaaguugc

SEQ ID NO: 55889 - RNA, 22 nt, Homo sapiens
uggugcuugaugaggguggagc

SEQ ID NO: 55890 - RNA, 22 nt, Homo sapiens
ugguguuugagaagcugauguc

SEQ ID NO: 55891 - RNA, 22 nt, Homo sapiens
uggugcuuaaauaaggcuuuca

SEQ ID NO: 55892 - RNA, 22 nt, Homo sapiens
uggcuagauauccagaguucug

SEQ ID NO: 55893 - RNA, 23 nt, Homo sapiens
uggcuagacguccuuuccugaug

SEQ ID NO: 55894 - RNA, 19 nt, Homo sapiens
uggcuagagcagauauccu

SEQ ID NO: 55895 - RNA, 22 nt, Homo sapiens
uuaggcuaguuucuuaaacucu

SEQ ID NO: 55896 - RNA, 18 nt, Homo sapiens
uuauaugcauguguagga

SEQ ID NO: 55897 - RNA, 22 nt, Homo sapiens
uuaucacauugacugauuugca

SEQ ID NO: 55898 - RNA, 22 nt, Homo sapiens
uuauauguuuguacuuaggccu

SEQ ID NO: 55899 - RNA, 22 nt, Homo sapiens
uuaucaaacccuaggagguggu

SEQ ID NO: 55900 - RNA, 22 nt, Homo sapiens
uuauaguuuuucaccuggagaa

SEQ ID NO: 55901 - RNA, 22 nt, Homo sapiens
uuagcagcacaaaagcagacua

SEQ ID NO: 55902 - RNA, 22 nt, Homo sapiens
uuagcacaucuuucuauguaag

SEQ ID NO: 55903 - RNA, 22 nt, Homo sapiens
uuagcaauagccugcaucugca

SEQ ID NO: 55904 - RNA, 22 nt, Homo sapiens
uuagauguuuagaagugggcca

SEQ ID NO: 55905 - RNA, 22 nt, Homo sapiens
uuagauuauugguguuuugcaa

SEQ ID NO: 55906 - RNA, 23 nt, Homo sapiens
uuagaucuuuaaggaaucuccac

SEQ ID NO: 55907 - RNA, 22 nt, Homo sapiens
uuagaaaguagaaaagcugguu

SEQ ID NO: 55908 - RNA, 22 nt, Homo sapiens
uuaggcuaguugauauaguuug

SEQ ID NO: 55909 - RNA, 22 nt, Homo sapiens
uuagcagugugagcacagacua

SEQ ID NO: 55910 - RNA, 22 nt, Homo sapiens
uuagcagugugaaaaaagacua

SEQ ID NO: 55911 - RNA, 22 nt, Homo sapiens
uucacaugguugccuuuugauc

SEQ ID NO: 55912 - RNA, 22 nt, Homo sapiens
uucacaguguguacaccagggg

SEQ ID NO: 55913 - RNA, 22 nt, Homo sapiens
uucacagcuuaauaaggcucag

SEQ ID NO: 55914 - RNA, 22 nt, Homo sapiens
uucacaguggugggagacguca

SEQ ID NO: 55915 - RNA, 22 nt, Homo sapiens
uucacagugugaucuaugggca

SEQ ID NO: 55916 - RNA, 22 nt, Homo sapiens
uucacagucacccuucuccaug

SEQ ID NO: 55917 - RNA, 22 nt, Homo sapiens
uuauugcuaaaucaugaccaca

SEQ ID NO: 55918 - RNA, 22 nt, Homo sapiens
uucacuguagccucagccucuu

SEQ ID NO: 55919 - RNA, 22 nt, Homo sapiens
uucacugagccagacuaagaca

SEQ ID NO: 55920 - RNA, 22 nt, Homo sapiens
uuaugcuugugugaauuuuccc

SEQ ID NO: 55921 - RNA, 22 nt, Homo sapiens
uuaugucacuguucagucuccc

SEQ ID NO: 55922 - RNA, 22 nt, Homo sapiens
uuaugguacaugugcacaaugu

SEQ ID NO: 55923 - RNA, 20 nt, Homo sapiens
uuaugucguuucuugcuuau

SEQ ID NO: 55924 - RNA, 22 nt, Homo sapiens
uuaugucuuugagcaaugcugu

SEQ ID NO: 55925 - RNA, 22 nt, Homo sapiens
ugugcaugacagcauacaaacg

SEQ ID NO: 55926 - RNA, 22 nt, Homo sapiens
ugugccaaaucccauaauaaau

SEQ ID NO: 55927 - RNA, 22 nt, Homo sapiens
ugugccacuccagcucuagcuu

SEQ ID NO: 55928 - RNA, 22 nt, Homo sapiens
ugugccacuccaggaggcuguu

SEQ ID NO: 55929 - RNA, 22 nt, Homo sapiens
ugugccacugcacuccugccug

SEQ ID NO: 55930 - RNA, 22 nt, Homo sapiens
ugugcacaauguacagguuagu

SEQ ID NO: 55931 - RNA, 22 nt, Homo sapiens
ugugcaaucuuccauuuuuagg

SEQ ID NO: 55932 - RNA, 22 nt, Homo sapiens
uguguaaauagcuacggaucug

SEQ ID NO: 55933 - RNA, 22 nt, Homo sapiens
uguguagagaaauauuacuuau

SEQ ID NO: 55934 - RNA, 22 nt, Homo sapiens
uguguaaauaugauagaggaau

SEQ ID NO: 55935 - RNA, 22 nt, Homo sapiens
uguguaaagcuuguuccagaaa

SEQ ID NO: 55936 - RNA, 22 nt, Homo sapiens
uguguaaauauauacacacgug

SEQ ID NO: 55937 - RNA, 22 nt, Homo sapiens
ugugguuuuucacauuuagaga

SEQ ID NO: 55938 - RNA, 22 nt, Homo sapiens
uuaaucugucuaugauuuuggu

SEQ ID NO: 55939 - RNA, 22 nt, Homo sapiens
uuaauagugacucauuuuccac

SEQ ID NO: 55940 - RNA, 22 nt, Homo sapiens
uuaaucacagcugaacucaaac

SEQ ID NO: 55941 - RNA, 22 nt, Homo sapiens
uuaauguaauugauugauugac

SEQ ID NO: 55942 - RNA, 22 nt, Homo sapiens
uuaaugaacuuuauuuuguaga

SEQ ID NO: 55943 - RNA, 22 nt, Homo sapiens
uuaagguaugugggcauuuugu

SEQ ID NO: 55944 - RNA, 19 nt, Homo sapiens
uuaagugugauaucucagu

SEQ ID NO: 55945 - RNA, 22 nt, Homo sapiens
uuacccuuugcauuaccaacaa

SEQ ID NO: 55946 - RNA, 22 nt, Homo sapiens
uuacauguuguggguuguggcc

SEQ ID NO: 55947 - RNA, 22 nt, Homo sapiens
uuacuguacugcucuuaaccug

SEQ ID NO: 55948 - RNA, 20 nt, Homo sapiens
uuagaguaguaugauuuaua

SEQ ID NO: 55949 - RNA, 22 nt, Homo sapiens
gugcuuguauuuaaaucaugug

SEQ ID NO: 55950 - RNA, 22 nt, Homo sapiens
gugcagugugauccuuccguau

SEQ ID NO: 55951 - RNA, 22 nt, Homo sapiens
gugggauggagagaagguauga

SEQ ID NO: 55952 - RNA, 22 nt, Homo sapiens
guggcuuuauuuagaagcaggg

SEQ ID NO: 55953 - RNA, 22 nt, Homo sapiens
guggcuuuaaguacgauugagg

SEQ ID NO: 55954 - RNA, 22 nt, Homo sapiens
guggaaaauuauugcuguuuuu

SEQ ID NO: 55955 - RNA, 22 nt, Homo sapiens
gugagaauugacacccuugucu

SEQ ID NO: 55956 - RNA, 22 nt, Homo sapiens
gugagaauauuuuaaauacuaa

SEQ ID NO: 55957 - RNA, 22 nt, Homo sapiens
gugaagugugaccucagcaucu

SEQ ID NO: 55958 - RNA, 22 nt, Homo sapiens
gugacauuauuucagcuacaug

SEQ ID NO: 55959 - RNA, 22 nt, Homo sapiens
gugaaucauaugccagucaugc

SEQ ID NO: 55960 - RNA, 22 nt, Homo sapiens
gugaauguuuucuuacauggua

SEQ ID NO: 55961 - RNA, 22 nt, Homo sapiens
gugauugugaaaacauuaagaa

SEQ ID NO: 55962 - RNA, 21 nt, Homo sapiens
gugcaaacaucauagaaugua

SEQ ID NO: 55963 - RNA, 18 nt, Homo sapiens
gugcaaugaauagcagag

SEQ ID NO: 55964 - RNA, 22 nt, Homo sapiens
gugcacaacgugcaaguuuguu

SEQ ID NO: 55965 - RNA, 22 nt, Homo sapiens
gugcacaaucgugcauuccuug

SEQ ID NO: 55966 - RNA, 22 nt, Homo sapiens
gugcaaugaguguggcaaagcc

SEQ ID NO: 55967 - RNA, 22 nt, Homo sapiens
guacaguaguaaaagugaauga

SEQ ID NO: 55968 - RNA, 22 nt, Homo sapiens
guaauagucucaaacuccugga

SEQ ID NO: 55969 - RNA, 22 nt, Homo sapiens
guacaaguaagaaaauugccca

SEQ ID NO: 55970 - RNA, 22 nt, Homo sapiens
guaaugcacucccaaagaucca

SEQ ID NO: 55971 - RNA, 22 nt, Homo sapiens
gucaugaaguuuugaaugaaau

SEQ ID NO: 55972 - RNA, 22 nt, Homo sapiens
gucaugaacuguacuacuccua

SEQ ID NO: 55973 - RNA, 22 nt, Homo sapiens
gucauugaaguggaaucaucca

SEQ ID NO: 55974 - RNA, 22 nt, Homo sapiens
gucauuguguggacauggagaa

SEQ ID NO: 55975 - RNA, 22 nt, Homo sapiens
gucuguuugauccagaucaaaa

SEQ ID NO: 55976 - RNA, 22 nt, Homo sapiens
gucugguugacagcauguggcc

SEQ ID NO: 55977 - RNA, 22 nt, Homo sapiens
gucuugaaggcugaguaccugu

SEQ ID NO: 55978 - RNA, 22 nt, Homo sapiens
gucuuccagccuccaucuuucu

SEQ ID NO: 55979 - RNA, 22 nt, Homo sapiens
gucuuugcauguauguucauga

SEQ ID NO: 55980 - RNA, 22 nt, Homo sapiens
gucuuugagauaggguuauuuu

SEQ ID NO: 55981 - RNA, 22 nt, Homo sapiens
gugaaauguguagaggaucugg

SEQ ID NO: 55982 - RNA, 22 nt, Homo sapiens
gugaaagauuaaaccagugugu

SEQ ID NO: 55983 - RNA, 22 nt, Homo sapiens
gugaaaugaaacgcuaugucuu

SEQ ID NO: 55984 - RNA, 22 nt, Homo sapiens
gugaaagcaucugacugugcca

SEQ ID NO: 55985 - RNA, 22 nt, Homo sapiens
gugaagaucccuguccuguucc

SEQ ID NO: 55986 - RNA, 22 nt, Homo sapiens
gggaguagagaguuucucugac

SEQ ID NO: 55987 - RNA, 22 nt, Homo sapiens
gggcacgugugugcugugcuca

SEQ ID NO: 55988 - RNA, 23 nt, Homo sapiens
gggauuguaaaauaugagggcag

SEQ ID NO: 55989 - RNA, 22 nt, Homo sapiens
gggauuguaauacugaguuggu

SEQ ID NO: 55990 - RNA, 20 nt, Homo sapiens
gggaaucguaauagaauauu

SEQ ID NO: 55991 - RNA, 22 nt, Homo sapiens
gggaacaugagaaugugaauga

SEQ ID NO: 55992 - RNA, 22 nt, Homo sapiens
ggugacagugguuaaaauuugu

SEQ ID NO: 55993 - RNA, 21 nt, Homo sapiens
ggugagaaaggagacauagac

SEQ ID NO: 55994 - RNA, 22 nt, Homo sapiens
ggcaagaagaacuauaacuuuu

SEQ ID NO: 55995 - RNA, 22 nt, Homo sapiens
ggcaauauauucugaauucagu

SEQ ID NO: 55996 - RNA, 22 nt, Homo sapiens
ggcaaguugcuauucuuuaaug

SEQ ID NO: 55997 - RNA, 22 nt, Homo sapiens
ggcagcacaauuuucugaugga

SEQ ID NO: 55998 - RNA, 22 nt, Homo sapiens
ggagaucauuuccuauuugaag

SEQ ID NO: 55999 - RNA, 22 nt, Homo sapiens
ggagaucuuugaaguguugugc

SEQ ID NO: 56000 - RNA, 22 nt, Homo sapiens
ggagaugaaaugagcuacuuaa

SEQ ID NO: 56001 - RNA, 21 nt, Homo sapiens
ggcaagaaacacaaucaagua

SEQ ID NO: 56002 - RNA, 22 nt, Homo sapiens
gcuggcaaguggccuacuuugu

SEQ ID NO: 56003 - RNA, 22 nt, Homo sapiens
gcuguauugacuuuguaucaua

SEQ ID NO: 56004 - RNA, 22 nt, Homo sapiens
gcugucuggagucuguucaaug

SEQ ID NO: 56005 - RNA, 22 nt, Homo sapiens
gcugugauucuguguagauagu

SEQ ID NO: 56006 - RNA, 19 nt, Homo sapiens
gcuucuugaggacgaugac

SEQ ID NO: 56007 - RNA, 22 nt, Homo sapiens
gcuuuggauaaaugucaguuua

SEQ ID NO: 56008 - RNA, 21 nt, Homo sapiens
gcuuuuucggaagucuuuggc

SEQ ID NO: 56009 - RNA, 22 nt, Homo sapiens
gcuuuguugauggugagucugu

SEQ ID NO: 56010 - RNA, 22 nt, Homo sapiens
ggaaauguuggugucaugaguu

SEQ ID NO: 56011 - RNA, 19 nt, Homo sapiens
ggaaaugucuauuaagauc

SEQ ID NO: 56012 - RNA, 22 nt, Homo sapiens
ggaaaucucugaggcucccuuc

SEQ ID NO: 56013 - RNA, 22 nt, Homo sapiens
ggaaagaucagcuaaauguaag

SEQ ID NO: 56014 - RNA, 22 nt, Homo sapiens
ggaaagauguaauauuaucuaa

SEQ ID NO: 56015 - RNA, 22 nt, Homo sapiens
gcaccauugacaagaaauaggu

SEQ ID NO: 56016 - RNA, 21 nt, Homo sapiens
gcaaguacuaucaucauuauc

SEQ ID NO: 56017 - RNA, 22 nt, Homo sapiens
gcaauguuacugaauguguuuu

SEQ ID NO: 56018 - RNA, 22 nt, Homo sapiens
gcugcuguaccagaugugguua

SEQ ID NO: 56019 - RNA, 22 nt, Homo sapiens
gcugagaucucuugccugaacu

SEQ ID NO: 56020 - RNA, 22 nt, Homo sapiens
gcugaaauguuuaauuugggag

SEQ ID NO: 56021 - RNA, 22 nt, Homo sapiens
gcugacacugggcuauagaucu

SEQ ID NO: 56022 - RNA, 22 nt, Homo sapiens
gcuaugguuuuuagcuccauca

SEQ ID NO: 56023 - RNA, 22 nt, Homo sapiens
gcuccauuuuccauuucucuaa

SEQ ID NO: 56024 - RNA, 22 nt, Homo sapiens
uaaagcauguaauuagguuaga

SEQ ID NO: 56025 - RNA, 22 nt, Homo sapiens
uaaacugucuuuggagcuuugc

SEQ ID NO: 56026 - RNA, 22 nt, Homo sapiens
guuugguugcauggaaaauuua

SEQ ID NO: 56027 - RNA, 22 nt, Homo sapiens
guuuuuggggucacuauuaccg

SEQ ID NO: 56028 - RNA, 22 nt, Homo sapiens
uaacauugcuggacuaccugcu

SEQ ID NO: 56029 - RNA, 22 nt, Homo sapiens
uaacugccuacugugcaaauau

SEQ ID NO: 56030 - RNA, 22 nt, Homo sapiens
uaagacugccccagacagcaag

SEQ ID NO: 56031 - RNA, 22 nt, Homo sapiens
uaagaugaaggcucaccuagaa

SEQ ID NO: 56032 - RNA, 22 nt, Homo sapiens
gugguagaaauguagaugcuag

SEQ ID NO: 56033 - RNA, 19 nt, Homo sapiens
gugguauuaccuuuugauu

SEQ ID NO: 56034 - RNA, 22 nt, Homo sapiens
guguaaaucaaucuguugucuu

SEQ ID NO: 56035 - RNA, 22 nt, Homo sapiens
gugguuuuuaaaguaccugugg

SEQ ID NO: 56036 - RNA, 22 nt, Homo sapiens
gugguuuuaucccagaaauuaa

SEQ ID NO: 56037 - RNA, 22 nt, Homo sapiens
gugguuuuaauauucagucuag

SEQ ID NO: 56038 - RNA, 22 nt, Homo sapiens
guuuggcuuucucucuauccug

SEQ ID NO: 56039 - RNA, 22 nt, Homo sapiens
guuuggauuuucuaauuucugu

SEQ ID NO: 56040 - RNA, 22 nt, Homo sapiens
guuggcaagaggugcuguacac

SEQ ID NO: 56041 - RNA, 22 nt, Homo sapiens
guuggcaaguggcugagcuggg

SEQ ID NO: 56042 - RNA, 22 nt, Homo sapiens
guguaaaucugcugugaacauu

SEQ ID NO: 56043 - RNA, 22 nt, Homo sapiens
uacauguauacaggguuuacuu

SEQ ID NO: 56044 - RNA, 22 nt, Homo sapiens
uacauguauccauuguuuuugg

SEQ ID NO: 56045 - RNA, 22 nt, Homo sapiens
uacauugucauauucucucucu

SEQ ID NO: 56046 - RNA, 22 nt, Homo sapiens
uacauguauguguuuauggcug

SEQ ID NO: 56047 - RNA, 19 nt, Homo sapiens
uacuggcucgggaauuuuc

SEQ ID NO: 56048 - RNA, 22 nt, Homo sapiens
uacuguacugcaguucugcaaa

SEQ ID NO: 56049 - RNA, 22 nt, Homo sapiens
uacuuuguagauuguuuccuuu

SEQ ID NO: 56050 - RNA, 22 nt, Homo sapiens
uagaaagcaugaccuucagaua

SEQ ID NO: 56051 - RNA, 22 nt, Homo sapiens
uaagcuagcauagggguaaauu

SEQ ID NO: 56052 - RNA, 21 nt, Homo sapiens
uaagcuaaacauucaguuaac

SEQ ID NO: 56053 - RNA, 22 nt, Homo sapiens
uaaguuguagaacguuuucuua

SEQ ID NO: 56054 - RNA, 20 nt, Homo sapiens
uaagugcuugagacuucuga

SEQ ID NO: 56055 - RNA, 22 nt, Homo sapiens
uacaguggaaguuaaccccauu

SEQ ID NO: 56056 - RNA, 22 nt, Homo sapiens
uacaguggcaugucaggugcuu

SEQ ID NO: 56057 - RNA, 22 nt, Homo sapiens
uacagugggcacuggcgcccug

SEQ ID NO: 56058 - RNA, 22 nt, Homo sapiens
uaauaguuggcacuggagaaag

SEQ ID NO: 56059 - RNA, 22 nt, Homo sapiens
uacaguacagugacaccauuau

SEQ ID NO: 56060 - RNA, 22 nt, Homo sapiens
uauuccauuugggucaggauga

SEQ ID NO: 56061 - RNA, 22 nt, Homo sapiens
uauugaacuggaucagaaggcc

SEQ ID NO: 56062 - RNA, 22 nt, Homo sapiens
uauuccauuugugaaaggaagu

SEQ ID NO: 56063 - RNA, 22 nt, Homo sapiens
uauugauuaauugugauuaggc

SEQ ID NO: 56064 - RNA, 22 nt, Homo sapiens
uauucaucuuaagcuuuggcuu

SEQ ID NO: 56065 - RNA, 20 nt, Homo sapiens
uauucacucuccagucuugc

SEQ ID NO: 56066 - RNA, 22 nt, Homo sapiens
uauggcuucuauaaggaagcuu

SEQ ID NO: 56067 - RNA, 22 nt, Homo sapiens
uaugacuuuggaaaaauuacuu

SEQ ID NO: 56068 - RNA, 22 nt, Homo sapiens
uaugacguuuuauuggcgcagu

SEQ ID NO: 56069 - RNA, 22 nt, Homo sapiens
uauggcauuuuguaagggcuug

SEQ ID NO: 56070 - RNA, 22 nt, Homo sapiens
uauggcaaugcauaggaaggaa

SEQ ID NO: 56071 - RNA, 22 nt, Homo sapiens
uaugaaagcuacuucucacaau

SEQ ID NO: 56072 - RNA, 22 nt, Homo sapiens
uaugaauuuuauccaggauaua

SEQ ID NO: 56073 - RNA, 22 nt, Homo sapiens
uaugaaucugagagaucuggaa

SEQ ID NO: 56074 - RNA, 22 nt, Homo sapiens
uaucacaggucaggaaucuugc

SEQ ID NO: 56075 - RNA, 22 nt, Homo sapiens
uaucacaguaaaucugggugca

SEQ ID NO: 56076 - RNA, 22 nt, Homo sapiens
uaucacagguggacugcacacc

SEQ ID NO: 56077 - RNA, 22 nt, Homo sapiens
uaucucagagaaucagauuuac

SEQ ID NO: 56078 - RNA, 21 nt, Homo sapiens
uaucucaguuuuccuuugugg

SEQ ID NO: 56079 - RNA, 22 nt, Homo sapiens
uaucucagaugagacuuguaac

SEQ ID NO: 56080 - RNA, 22 nt, Homo sapiens
uauacuguuuucuauaguggcu

SEQ ID NO: 56081 - RNA, 22 nt, Homo sapiens
uauagcaaugccccacuccuga

SEQ ID NO: 56082 - RNA, 20 nt, Homo sapiens
uauagcaauuuuuuucuccu

SEQ ID NO: 56083 - RNA, 22 nt, Homo sapiens
uaucaaacccaaggaggggguu

SEQ ID NO: 56084 - RNA, 22 nt, Homo sapiens
uaucaacaggguggccagugua

SEQ ID NO: 56085 - RNA, 22 nt, Homo sapiens
uagcuguuggugggaagucaga

SEQ ID NO: 56086 - RNA, 22 nt, Homo sapiens
uaggaaguuucuugauuacuua

SEQ ID NO: 56087 - RNA, 22 nt, Homo sapiens
uaggcaauguggcgaaacucug

SEQ ID NO: 56088 - RNA, 22 nt, Homo sapiens
uaggcaaguugcccaaucucuc

SEQ ID NO: 56089 - RNA, 18 nt, Homo sapiens
uagaauauaggucauucu

SEQ ID NO: 56090 - RNA, 22 nt, Homo sapiens
uagaaugaaacaagcugugccu

SEQ ID NO: 56091 - RNA, 22 nt, Homo sapiens
uagaauguaaauuccaagggca

SEQ ID NO: 56092 - RNA, 22 nt, Homo sapiens
uagcagugugaaaacagacuaa

SEQ ID NO: 56093 - RNA, 22 nt, Homo sapiens
uagcaugacacuuguugaaugc

SEQ ID NO: 56094 - RNA, 18 nt, Homo sapiens
uagcaugaugcugagugc

SEQ ID NO: 56095 - RNA, 22 nt, Homo sapiens
uagcauaauuuguagaaaauca

SEQ ID NO: 56096 - RNA, 22 nt, Homo sapiens
uagguugucuguucacucugau

SEQ ID NO: 56097 - RNA, 20 nt, Homo sapiens
uagguuuucacagaauugcc

SEQ ID NO: 56098 - RNA, 22 nt, Homo sapiens
uagugcugugauauuuuuggcc

SEQ ID NO: 56099 - RNA, 22 nt, Homo sapiens
uagguuguucuauuaucuuaca

SEQ ID NO: 56100 - RNA, 22 nt, Homo sapiens
uagguuguccaucucuagaagc

SEQ ID NO: 56101 - RNA, 22 nt, Homo sapiens
uaguguuuuucauuggcagagg

SEQ ID NO: 56102 - RNA, 18 nt, Homo sapiens
uagugcuguucucaugau

SEQ ID NO: 56103 - RNA, 22 nt, Homo sapiens
uaguucguguuugaacuagauc

SEQ ID NO: 56104 - RNA, 22 nt, Homo sapiens
uaguuaguagacucugauuauu

SEQ ID NO: 56105 - RNA, 22 nt, Homo sapiens
uaguuauggaguaauuuuaagc

SEQ ID NO: 56106 - RNA, 22 nt, Homo sapiens
uauaacaaugcaagaauggccu

SEQ ID NO: 56107 - RNA, 22 nt, Homo sapiens
uauaagguuaggaaaaauuucu

SEQ ID NO: 56108 - RNA, 22 nt, Homo sapiens
uagguaagauguuaacagcuga

SEQ ID NO: 56109 - RNA, 22 nt, Homo sapiens
ugagauccaugcuauuugggcu

SEQ ID NO: 56110 - RNA, 22 nt, Homo sapiens
ugagauauugggaguaauguca

SEQ ID NO: 56111 - RNA, 18 nt, Homo sapiens
ugagaucagcaucaaggg

SEQ ID NO: 56112 - RNA, 22 nt, Homo sapiens
ugagaucacuaagagguaaugg

SEQ ID NO: 56113 - RNA, 22 nt, Homo sapiens
ugagauagggucucacucuguc

SEQ ID NO: 56114 - RNA, 22 nt, Homo sapiens
ugagaugcuccucuugcaaagc

SEQ ID NO: 56115 - RNA, 22 nt, Homo sapiens
ugagaugcuuguaaauucauuu

SEQ ID NO: 56116 - RNA, 22 nt, Homo sapiens
ugagauggagucuugucgccua

SEQ ID NO: 56117 - RNA, 22 nt, Homo sapiens
ugagauggcugaauucagaaua

SEQ ID NO: 56118 - RNA, 22 nt, Homo sapiens
ugagauggaucuuggauuugaa

SEQ ID NO: 56119 - RNA, 22 nt, Homo sapiens
ugagauguagauauggauuaga

SEQ ID NO: 56120 - RNA, 22 nt, Homo sapiens
ugagaucugucuuuauaguauu

SEQ ID NO: 56121 - RNA, 22 nt, Homo sapiens
ugagaguauaaauugaugcagc

SEQ ID NO: 56122 - RNA, 22 nt, Homo sapiens
ugagauaaagcauguacugugu

SEQ ID NO: 56123 - RNA, 22 nt, Homo sapiens
ugagacugguuaauugauaaag

SEQ ID NO: 56124 - RNA, 22 nt, Homo sapiens
ugagacugagucucgcucuauu

SEQ ID NO: 56125 - RNA, 23 nt, Homo sapiens
ugacagugcuugaaauugcucuu

SEQ ID NO: 56126 - RNA, 22 nt, Homo sapiens
ugacaagugauuaaggcauauu

SEQ ID NO: 56127 - RNA, 22 nt, Homo sapiens
ugacaagaacuuuccauaguaa

SEQ ID NO: 56128 - RNA, 22 nt, Homo sapiens
ugacagagcaggacuucaucuc

SEQ ID NO: 56129 - RNA, 22 nt, Homo sapiens
ugacagcaucaggauuggagag

SEQ ID NO: 56130 - RNA, 23 nt, Homo sapiens
ugagauuauaaucuuuuacuucu

SEQ ID NO: 56131 - RNA, 21 nt, Homo sapiens
ugagauuaaguuguuuagaag

SEQ ID NO: 56132 - RNA, 22 nt, Homo sapiens
ugagauguuuagauuguugucu

SEQ ID NO: 56133 - RNA, 22 nt, Homo sapiens
ugagauggguaauuaaauggug

SEQ ID NO: 56134 - RNA, 22 nt, Homo sapiens
ugaguagcuaauguuuacugag

SEQ ID NO: 56135 - RNA, 22 nt, Homo sapiens
ugaguacugauuuaagauacac

SEQ ID NO: 56136 - RNA, 22 nt, Homo sapiens
ugaguagaacuagucuagagcu

SEQ ID NO: 56137 - RNA, 22 nt, Homo sapiens
ugauauguggcuauugagauug

SEQ ID NO: 56138 - RNA, 22 nt, Homo sapiens
ugauauguggauucagcucaaa

SEQ ID NO: 56139 - RNA, 22 nt, Homo sapiens
ugauauguuagaaucuugcaag

SEQ ID NO: 56140 - RNA, 17 nt, Homo sapiens
ugauauuuucccagaua

SEQ ID NO: 56141 - RNA, 22 nt, Homo sapiens
ugauaugucacuugaucauggu

SEQ ID NO: 56142 - RNA, 22 nt, Homo sapiens
ugauauguaugugaccuagaaa

SEQ ID NO: 56143 - RNA, 22 nt, Homo sapiens
ugauaugucccucgacaucagg

SEQ ID NO: 56144 - RNA, 22 nt, Homo sapiens
ugauaugugaguauaugguuau

SEQ ID NO: 56145 - RNA, 21 nt, Homo sapiens
ugauguugaccuaaguaguga

SEQ ID NO: 56146 - RNA, 22 nt, Homo sapiens
ugagucauuuccuuaugcuacu

SEQ ID NO: 56147 - RNA, 22 nt, Homo sapiens
ugagucaugcuggagucauggc

SEQ ID NO: 56148 - RNA, 22 nt, Homo sapiens
ugagucauguaauaaugcugcu

SEQ ID NO: 56149 - RNA, 22 nt, Homo sapiens
ugagugugaggaagaauuagaa

SEQ ID NO: 56150 - RNA, 22 nt, Homo sapiens
ugaguucauggucauuugucac

SEQ ID NO: 56151 - RNA, 22 nt, Homo sapiens
ugauaugaucgcccuagcuuga

SEQ ID NO: 56152 - RNA, 22 nt, Homo sapiens
ugauaugaaucaaucacucuuc

SEQ ID NO: 56153 - RNA, 23 nt, Homo sapiens
ugauaugccuaggaguauauuuu

SEQ ID NO: 56154 - RNA, 22 nt, Homo sapiens
ugauaugcuuugaacucucugg

SEQ ID NO: 56155 - RNA, 22 nt, Homo sapiens
ugagucaauggaggcucagagc

SEQ ID NO: 56156 - RNA, 22 nt, Homo sapiens
ugcaauauccucuacuauaggu

SEQ ID NO: 56157 - RNA, 22 nt, Homo sapiens
ugcaaguaauuccagcuacuga

SEQ ID NO: 56158 - RNA, 17 nt, Homo sapiens
ugcaauuuaagcuagau

SEQ ID NO: 56159 - RNA, 22 nt, Homo sapiens
ugcaagaaacauauuccacaag

SEQ ID NO: 56160 - RNA, 22 nt, Homo sapiens
ugcaaaugucaaggguuagugu

SEQ ID NO: 56161 - RNA, 22 nt, Homo sapiens
ugcaagacaucguauuuugguc

SEQ ID NO: 56162 - RNA, 22 nt, Homo sapiens
ugcaagaaucagccuaucauua

SEQ ID NO: 56163 - RNA, 22 nt, Homo sapiens
ugcaagauaggcaguuugcacu

SEQ ID NO: 56164 - RNA, 22 nt, Homo sapiens
ugcaagaaucuuucaggcuagc

SEQ ID NO: 56165 - RNA, 22 nt, Homo sapiens
ugcaagacacuguccugggcau

SEQ ID NO: 56166 - RNA, 22 nt, Homo sapiens
ugcaagacuaaaccuuccccuc

SEQ ID NO: 56167 - RNA, 22 nt, Homo sapiens
ugcaagaugauuucaauugaua

SEQ ID NO: 56168 - RNA, 22 nt, Homo sapiens
ugcaagacugcaguuacuuuug

SEQ ID NO: 56169 - RNA, 22 nt, Homo sapiens
ugcaagcacacccagggauugu

SEQ ID NO: 56170 - RNA, 22 nt, Homo sapiens
ugcaaaguccucauucuuaccc

SEQ ID NO: 56171 - RNA, 19 nt, Homo sapiens
ugcaaagucuuuuccuauu

SEQ ID NO: 56172 - RNA, 22 nt, Homo sapiens
ugcaaagaaauuuuggugacca

SEQ ID NO: 56173 - RNA, 19 nt, Homo sapiens
ugcaaauucuaaaaacuga

SEQ ID NO: 56174 - RNA, 22 nt, Homo sapiens
ugcaaauguuaguaacaccacu

SEQ ID NO: 56175 - RNA, 22 nt, Homo sapiens
ugcaaauguuaggugucauuau

SEQ ID NO: 56176 - RNA, 20 nt, Homo sapiens
ugauugaccagagcaguuuu

SEQ ID NO: 56177 - RNA, 22 nt, Homo sapiens
ugauuugucugcaggaauagug

SEQ ID NO: 56178 - RNA, 19 nt, Homo sapiens
ugauuguaagcuuggugag

SEQ ID NO: 56179 - RNA, 22 nt, Homo sapiens
ugauuggagaugaauuucguuu

SEQ ID NO: 56180 - RNA, 22 nt, Homo sapiens
ugcauuguuuagaaacacuggg

SEQ ID NO: 56181 - RNA, 22 nt, Homo sapiens
ugcauuguggaucuaaaugcau

SEQ ID NO: 56182 - RNA, 22 nt, Homo sapiens
ugcauuaguaaguaauuuuaau

SEQ ID NO: 56183 - RNA, 22 nt, Homo sapiens
ugcauuguauuguugacucgcc

SEQ ID NO: 56184 - RNA, 19 nt, Homo sapiens
ugcauugucugggaaaugg

SEQ ID NO: 56185 - RNA, 18 nt, Homo sapiens
ugcuaugagauuauuuua

SEQ ID NO: 56186 - RNA, 23 nt, Homo sapiens
ugcucgguguugacagucacauc

SEQ ID NO: 56187 - RNA, 22 nt, Homo sapiens
ugcugcaaacaugagaggaagu

SEQ ID NO: 56188 - RNA, 22 nt, Homo sapiens
uggaaguagauagauuguguca

SEQ ID NO: 56189 - RNA, 22 nt, Homo sapiens
uggaaguauagauaauugaaag

SEQ ID NO: 56190 - RNA, 22 nt, Homo sapiens
uggaaguuaaaugacucuuucu

SEQ ID NO: 56191 - RNA, 21 nt, Homo sapiens
uggaaguguacaauuauaccc

SEQ ID NO: 56192 - RNA, 21 nt, Homo sapiens
uggaaucuauuauuccaguuu

SEQ ID NO: 56193 - RNA, 22 nt, Homo sapiens
uggaaucaucaacgaaugaaau

SEQ ID NO: 56194 - RNA, 22 nt, Homo sapiens
uggaaucuacuaaagcaaaauc

SEQ ID NO: 56195 - RNA, 20 nt, Homo sapiens
uggaaucuaggcggagguuu

SEQ ID NO: 56196 - RNA, 20 nt, Homo sapiens
uggaaucugaagaucucagu

SEQ ID NO: 56197 - RNA, 22 nt, Homo sapiens
uggaaucuuaggugaaggcuuu

SEQ ID NO: 56198 - RNA, 22 nt, Homo sapiens
uggaaugcucuccccacggacu

SEQ ID NO: 56199 - RNA, 22 nt, Homo sapiens
uggaauguggacucuuaugggg

SEQ ID NO: 56200 - RNA, 22 nt, Homo sapiens
uggaaugucuauguuuuugauu

SEQ ID NO: 56201 - RNA, 21 nt, Homo sapiens
uggaauguucugacuucaggg

SEQ ID NO: 56202 - RNA, 18 nt, Homo sapiens
uggaauguuuggguuaau

SEQ ID NO: 56203 - RNA, 22 nt, Homo sapiens
uggaauguuuaucaaaacagua

SEQ ID NO: 56204 - RNA, 22 nt, Homo sapiens
uggaagguaaguuuugagcauu

SEQ ID NO: 56205 - RNA, 22 nt, Homo sapiens
uggaaggucauuguucauuuga

SEQ ID NO: 56206 - RNA, 22 nt, Homo sapiens
ugcuguguugcuggcuuaaaga

SEQ ID NO: 56207 - RNA, 22 nt, Homo sapiens
ugcugcuguuguuguuacuagc

SEQ ID NO: 56208 - RNA, 22 nt, Homo sapiens
uggcaguuuacagcuuuaggag

SEQ ID NO: 56209 - RNA, 22 nt, Homo sapiens
uggcaauauccacaauuacuuu

SEQ ID NO: 56210 - RNA, 22 nt, Homo sapiens
uggcagacaaauuugagcauau

SEQ ID NO: 56211 - RNA, 22 nt, Homo sapiens
uggcaagaucacaauuacuuuu

SEQ ID NO: 56212 - RNA, 22 nt, Homo sapiens
uggauguauacaugcaggucac

SEQ ID NO: 56213 - RNA, 22 nt, Homo sapiens
uggcaagagauaugugucuaua

SEQ ID NO: 56214 - RNA, 22 nt, Homo sapiens
uggaugacuguuauaugcauau

SEQ ID NO: 56215 - RNA, 22 nt, Homo sapiens
uggauggagaggcuugugaugc

SEQ ID NO: 56216 - RNA, 18 nt, Homo sapiens
uggauaugaaauucugga

SEQ ID NO: 56217 - RNA, 22 nt, Homo sapiens
uggauauguuuauauguugucu

SEQ ID NO: 56218 - RNA, 22 nt, Homo sapiens
uggauagaaauguacuguuuuc

SEQ ID NO: 56219 - RNA, 22 nt, Homo sapiens
uauuucaguugcguuucccgag

SEQ ID NO: 56220 - RNA, 22 nt, Homo sapiens
uauuucaguugugcagguaguu

SEQ ID NO: 56221 - RNA, 22 nt, Homo sapiens
uauuguccaauaggauguuccu

SEQ ID NO: 56222 - RNA, 22 nt, Homo sapiens
uauugcaauuggcagagugcua

SEQ ID NO: 56223 - RNA, 22 nt, Homo sapiens
uauugcacuccucaugcauuug

SEQ ID NO: 56224 - RNA, 22 nt, Homo sapiens
uauugcaacagaagaaagaguc

SEQ ID NO: 56225 - RNA, 22 nt, Homo sapiens
uauugcaaauggugaucccagg

SEQ ID NO: 56226 - RNA, 22 nt, Homo sapiens
uauuugauuaacaagagccuaa

SEQ ID NO: 56227 - RNA, 22 nt, Homo sapiens
uauuugguuauaugaguaaguu

SEQ ID NO: 56228 - RNA, 22 nt, Homo sapiens
uauuuggauagucuggaaaaaa

SEQ ID NO: 56229 - RNA, 22 nt, Homo sapiens
ucacaguaacuuuguugcuuuu

SEQ ID NO: 56230 - RNA, 22 nt, Homo sapiens
ucacaguagagcuucuuucaga

SEQ ID NO: 56231 - RNA, 22 nt, Homo sapiens
ucacaguaucaugggggacaga

SEQ ID NO: 56232 - RNA, 22 nt, Homo sapiens
ucacagcuaaaaugaaaguagu

SEQ ID NO: 56233 - RNA, 22 nt, Homo sapiens
ucacacuguuuugauuauuaua

SEQ ID NO: 56234 - RNA, 22 nt, Homo sapiens
ucaaacugcuugaggccauuua

SEQ ID NO: 56235 - RNA, 22 nt, Homo sapiens
ucacacucucaccaacauuugg

SEQ ID NO: 56236 - RNA, 22 nt, Homo sapiens
uauuuguccccuccaaaaguca

SEQ ID NO: 56237 - RNA, 22 nt, Homo sapiens
ucacagucacugucacguugaa

SEQ ID NO: 56238 - RNA, 22 nt, Homo sapiens
ucacauguguaugagcuuugau

SEQ ID NO: 56239 - RNA, 22 nt, Homo sapiens
ucacaugucagccguggggaag

SEQ ID NO: 56240 - RNA, 20 nt, Homo sapiens
ucacugugaacuucuugagg

SEQ ID NO: 56241 - RNA, 22 nt, Homo sapiens
ucacuguugaugggcaugcagg

SEQ ID NO: 56242 - RNA, 22 nt, Homo sapiens
ucacuguguauguauaugcagg

SEQ ID NO: 56243 - RNA, 22 nt, Homo sapiens
ucacuggccaaauucuggguga

SEQ ID NO: 56244 - RNA, 22 nt, Homo sapiens
ucaucagugcuugcaaauuauu

SEQ ID NO: 56245 - RNA, 22 nt, Homo sapiens
ucauccauacaguuagcaaagg

SEQ ID NO: 56246 - RNA, 22 nt, Homo sapiens
ucaucaguuuuuuauaugugau

SEQ ID NO: 56247 - RNA, 22 nt, Homo sapiens
ucaugacacuggcaggagcuaa

SEQ ID NO: 56248 - RNA, 22 nt, Homo sapiens
ucaugagacacacuggaaagga

SEQ ID NO: 56249 - RNA, 22 nt, Homo sapiens
ucaucaguggggaugugguuga

SEQ ID NO: 56250 - RNA, 22 nt, Homo sapiens
ucaugugaggauaacaauagug

SEQ ID NO: 56251 - RNA, 22 nt, Homo sapiens
ucaugucuuguuguauuuauuu

SEQ ID NO: 56252 - RNA, 22 nt, Homo sapiens
ucauguaauuuugugucuauga

SEQ ID NO: 56253 - RNA, 22 nt, Homo sapiens
ucaugcaucuuguggaauuuga

SEQ ID NO: 56254 - RNA, 22 nt, Homo sapiens
uccagguuuugugaguuuaaau

SEQ ID NO: 56255 - RNA, 22 nt, Homo sapiens
uccagugugcaggcaaguuuga

SEQ ID NO: 56256 - RNA, 22 nt, Homo sapiens
uccaguuuggaggcuugaugug

SEQ ID NO: 56257 - RNA, 22 nt, Homo sapiens
uccaguuuucuuuccuagggcu

SEQ ID NO: 56258 - RNA, 22 nt, Homo sapiens
uccaguuuuguuaacauauggu

SEQ ID NO: 56259 - RNA, 22 nt, Homo sapiens
ucagguauuuauagcaaugcaa

SEQ ID NO: 56260 - RNA, 22 nt, Homo sapiens
ucagguaucuuuauagcgaugc

SEQ ID NO: 56261 - RNA, 22 nt, Homo sapiens
ucauaggucugagaagaaaaua

SEQ ID NO: 56262 - RNA, 22 nt, Homo sapiens
ucauaugucauaguaugaucuu

SEQ ID NO: 56263 - RNA, 22 nt, Homo sapiens
ucauauugguuaaaauaguggg

SEQ ID NO: 56264 - RNA, 22 nt, Homo sapiens
ucauagaucaaguaauaagaca

SEQ ID NO: 56265 - RNA, 20 nt, Homo sapiens
ucauagggugguggcagugg

SEQ ID NO: 56266 - RNA, 20 nt, Homo sapiens
ucauacuguggaguaccagg

SEQ ID NO: 56267 - RNA, 22 nt, Homo sapiens
ucaguagagacaggauuucacc

SEQ ID NO: 56268 - RNA, 22 nt, Homo sapiens
ucugagaugagacuuugaauuu

SEQ ID NO: 56269 - RNA, 22 nt, Homo sapiens
ucugagguuacugcuuuguaga

SEQ ID NO: 56270 - RNA, 22 nt, Homo sapiens
ucugagcaauaaacaacauauu

SEQ ID NO: 56271 - RNA, 22 nt, Homo sapiens
ucugagcaauagauguggauau

SEQ ID NO: 56272 - RNA, 22 nt, Homo sapiens
ucucugguuuguggaaucuuag

SEQ ID NO: 56273 - RNA, 22 nt, Homo sapiens
ucugacagugagagaaaucuga

SEQ ID NO: 56274 - RNA, 22 nt, Homo sapiens
ucugacagugugaauauugacu

SEQ ID NO: 56275 - RNA, 22 nt, Homo sapiens
ucugacacuucugcagaauuga

SEQ ID NO: 56276 - RNA, 22 nt, Homo sapiens
ucugacuagacaagcaguguac

SEQ ID NO: 56277 - RNA, 22 nt, Homo sapiens
ucucuguuuagagccagcaauu

SEQ ID NO: 56278 - RNA, 22 nt, Homo sapiens
ucucugauuaaacaagauagug

SEQ ID NO: 56279 - RNA, 22 nt, Homo sapiens
ucucugagaccacuccaaacuc

SEQ ID NO: 56280 - RNA, 22 nt, Homo sapiens
ucucuguuugucuguuacuggu

SEQ ID NO: 56281 - RNA, 22 nt, Homo sapiens
ucccaguggucuugaaacaggg

SEQ ID NO: 56282 - RNA, 19 nt, Homo sapiens
ucccaauguuuccaggcag

SEQ ID NO: 56283 - RNA, 22 nt, Homo sapiens
ucccaguauucauuuacagaag

SEQ ID NO: 56284 - RNA, 22 nt, Homo sapiens
ucccacugucuucucgugcucg

SEQ ID NO: 56285 - RNA, 20 nt, Homo sapiens
ucucauagagguagagaaua

SEQ ID NO: 56286 - RNA, 22 nt, Homo sapiens
ucuguaguuaacagcuucagcu

SEQ ID NO: 56287 - RNA, 19 nt, Homo sapiens
ucuguaguuagggcuacag

SEQ ID NO: 56288 - RNA, 22 nt, Homo sapiens
ucugucacugguggacgaucac

SEQ ID NO: 56289 - RNA, 22 nt, Homo sapiens
ucugucaaaucuuauguuguag

SEQ ID NO: 56290 - RNA, 22 nt, Homo sapiens
ucugucuugugguuugagugcc

SEQ ID NO: 56291 - RNA, 22 nt, Homo sapiens
ucugugaaugugaccuuauuug

SEQ ID NO: 56292 - RNA, 22 nt, Homo sapiens
ucuguacugccaaguuucuuua

SEQ ID NO: 56293 - RNA, 22 nt, Homo sapiens
ucuggcauuuucucugcuugca

SEQ ID NO: 56294 - RNA, 23 nt, Homo sapiens
ucugauguuauaaaauucuuugg

SEQ ID NO: 56295 - RNA, 22 nt, Homo sapiens
ucuggcuugugaacugucuucu

SEQ ID NO: 56296 - RNA, 18 nt, Homo sapiens
ucuggcuucuuuguucca

SEQ ID NO: 56297 - RNA, 22 nt, Homo sapiens
ugaauguaacuaaaccugugaa

SEQ ID NO: 56298 - RNA, 22 nt, Homo sapiens
ugaauguaagaugucugcuggu

SEQ ID NO: 56299 - RNA, 22 nt, Homo sapiens
ugaaucaugcugcuauaaagac

SEQ ID NO: 56300 - RNA, 22 nt, Homo sapiens
ugaauggauccaauucuuagua

SEQ ID NO: 56301 - RNA, 22 nt, Homo sapiens
ugaaugcaucuagaaauuuauu

SEQ ID NO: 56302 - RNA, 22 nt, Homo sapiens
ugaauucuguccaaaauaacug

SEQ ID NO: 56303 - RNA, 22 nt, Homo sapiens
ugaauguuguugguugagauau

SEQ ID NO: 56304 - RNA, 22 nt, Homo sapiens
ugaauuguuuacgagaugugag

SEQ ID NO: 56305 - RNA, 22 nt, Homo sapiens
ugacaagaaagcgucuucuuuu

SEQ ID NO: 56306 - RNA, 22 nt, Homo sapiens
ugaauagaaguggcaggaguag

SEQ ID NO: 56307 - RNA, 22 nt, Homo sapiens
ugaacacaucuccugguaccug

SEQ ID NO: 56308 - RNA, 22 nt, Homo sapiens
ugaacacagccugccucugcca

SEQ ID NO: 56309 - RNA, 22 nt, Homo sapiens
ugaaauuguuugcaaggauagg

SEQ ID NO: 56310 - RNA, 22 nt, Homo sapiens
ugaaauguuaaacaaguggcuc

SEQ ID NO: 56311 - RNA, 22 nt, Homo sapiens
ugaaauuuuuuauucguuggcu

SEQ ID NO: 56312 - RNA, 22 nt, Homo sapiens
ugaauagacacuaaagacugua

SEQ ID NO: 56313 - RNA, 22 nt, Homo sapiens
ugaauagagcugcaguggacau

SEQ ID NO: 56314 - RNA, 22 nt, Homo sapiens
ugaauagugucacaauaaacau

SEQ ID NO: 56315 - RNA, 22 nt, Homo sapiens
ugaaaugcagaacuuuaggucu

SEQ ID NO: 56316 - RNA, 22 nt, Homo sapiens
ugaaaucuaaaauguuccaaga

SEQ ID NO: 56317 - RNA, 22 nt, Homo sapiens
ugaaaugccuuuaaugaauuua

SEQ ID NO: 56318 - RNA, 22 nt, Homo sapiens
ugaaagguuuaauucugugaga

SEQ ID NO: 56319 - RNA, 22 nt, Homo sapiens
ugaaaugccuugagauuuugac

SEQ ID NO: 56320 - RNA, 22 nt, Homo sapiens
ugaaauguguuaucugggccug

SEQ ID NO: 56321 - RNA, 22 nt, Homo sapiens
ugaaaugguuaugugaggagau

SEQ ID NO: 56322 - RNA, 22 nt, Homo sapiens
ugaaauguaaguugucuagucu

SEQ ID NO: 56323 - RNA, 22 nt, Homo sapiens
ucuugcauuuuuaaauagugcu

SEQ ID NO: 56324 - RNA, 21 nt, Homo sapiens
ucuuggguugaauucucccag

SEQ ID NO: 56325 - RNA, 22 nt, Homo sapiens
ucugugcauuguaggauguuua

SEQ ID NO: 56326 - RNA, 22 nt, Homo sapiens
ucugugcauuguaacaacuaaa

SEQ ID NO: 56327 - RNA, 22 nt, Homo sapiens
ucuguggucagaguccuuggcc

SEQ ID NO: 56328 - RNA, 22 nt, Homo sapiens
ucuguggugggcuccacccagu

SEQ ID NO: 56329 - RNA, 17 nt, Homo sapiens
ucuugugguucuugaau

SEQ ID NO: 56330 - RNA, 21 nt, Homo sapiens
ucuugguauguauuuaggagg

SEQ ID NO: 56331 - RNA, 20 nt, Homo sapiens
ucuugguuggaggucuuuua

SEQ ID NO: 56332 - RNA, 22 nt, Homo sapiens
ucuuuagugacaguugugcaag

SEQ ID NO: 56333 - RNA, 22 nt, Homo sapiens
ugaaagacugaaagcuuuucuu

SEQ ID NO: 56334 - RNA, 22 nt, Homo sapiens
ucuugguuuauugauggagagg

SEQ ID NO: 56335 - RNA, 22 nt, Homo sapiens
ugaaaguuauauugugaaauuc

SEQ ID NO: 56336 - RNA, 22 nt, Homo sapiens
ugaaagacugaagaauaggcau

SEQ ID NO: 56337 - RNA, 22 nt, Homo sapiens
ugaaagcuacaggaaaguauuu

SEQ ID NO: 56338 - RNA, 22 nt, Homo sapiens
ccagcaccauuuauuaaauagg

SEQ ID NO: 56339 - RNA, 22 nt, Homo sapiens
ccagaguggagccuuugcgagg

SEQ ID NO: 56340 - RNA, 22 nt, Homo sapiens
ccacagucuaugcaacaagguc

SEQ ID NO: 56341 - RNA, 22 nt, Homo sapiens
caugauauugcagaauguuggu

SEQ ID NO: 56342 - RNA, 22 nt, Homo sapiens
caugaaagugagaaacuccugg

SEQ ID NO: 56343 - RNA, 18 nt, Homo sapiens
cuaagacacuuggcagag

SEQ ID NO: 56344 - RNA, 22 nt, Homo sapiens
cuaagguaggagaaucacucaa

SEQ ID NO: 56345 - RNA, 22 nt, Homo sapiens
cuaacacagagguuuauuucuc

SEQ ID NO: 56346 - RNA, 22 nt, Homo sapiens
cuaacacagggcaagucaggcu

SEQ ID NO: 56347 - RNA, 22 nt, Homo sapiens
cgugaauguuuuggucuuucac

SEQ ID NO: 56348 - RNA, 19 nt, Homo sapiens
cccuggcacauggaaaaug

SEQ ID NO: 56349 - RNA, 22 nt, Homo sapiens
caguccuaugauaaccauuuac

SEQ ID NO: 56350 - RNA, 22 nt, Homo sapiens
cagugacacugaaaaguucggg

SEQ ID NO: 56351 - RNA, 22 nt, Homo sapiens
caggugguauuugguuuucugu

SEQ ID NO: 56352 - RNA, 22 nt, Homo sapiens
cagcugcuuuggaaaauauuuu

SEQ ID NO: 56353 - RNA, 22 nt, Homo sapiens
cacagucugggcuuguuuguac

SEQ ID NO: 56354 - RNA, 22 nt, Homo sapiens
cagcuguuguuccagucuuuua

SEQ ID NO: 56355 - RNA, 22 nt, Homo sapiens
cagugcacugggauuauaagug

SEQ ID NO: 56356 - RNA, 22 nt, Homo sapiens
cagugcaaccuccaucucucgg

SEQ ID NO: 56357 - RNA, 22 nt, Homo sapiens
cagugcaugacuguauauuauc

SEQ ID NO: 56358 - RNA, 22 nt, Homo sapiens
caguggaugauguuuucugugg

SEQ ID NO: 56359 - RNA, 22 nt, Homo sapiens
cauacaagcuacaaucacaaag

SEQ ID NO: 56360 - RNA, 21 nt, Homo sapiens
cauaaugcuacuuauuuuaug

SEQ ID NO: 56361 - RNA, 22 nt, Homo sapiens
caguuguuuuaugacauaagau

SEQ ID NO: 56362 - RNA, 22 nt, Homo sapiens
caugaaagacugaggaauugga

SEQ ID NO: 56363 - RNA, 22 nt, Homo sapiens
cauacaguaggcacuauuugua

SEQ ID NO: 56364 - RNA, 22 nt, Homo sapiens
cauacaugugcuugucuuaugc

SEQ ID NO: 56365 - RNA, 22 nt, Homo sapiens
caucacaguacuaaucgucaua

SEQ ID NO: 56366 - RNA, 22 nt, Homo sapiens
caaagucuucaguugauucuga

SEQ ID NO: 56367 - RNA, 22 nt, Homo sapiens
caaaggcuuccacugcauccuu

SEQ ID NO: 56368 - RNA, 22 nt, Homo sapiens
caaaccuguaggggccaagagg

SEQ ID NO: 56369 - RNA, 22 nt, Homo sapiens
auuucacuucgcaugguguccg

SEQ ID NO: 56370 - RNA, 22 nt, Homo sapiens
auuuuugguuucaccugcacgc

SEQ ID NO: 56371 - RNA, 22 nt, Homo sapiens
auuuaugguuaauauaggaagu

SEQ ID NO: 56372 - RNA, 22 nt, Homo sapiens
auuguucuuguguccuuuuccu

SEQ ID NO: 56373 - RNA, 22 nt, Homo sapiens
auugugauggucaaaggaaaua

SEQ ID NO: 56374 - RNA, 22 nt, Homo sapiens
auuguuccccggucauuuuugu

SEQ ID NO: 56375 - RNA, 22 nt, Homo sapiens
cacauguuugcuacauuuuucu

SEQ ID NO: 56376 - RNA, 22 nt, Homo sapiens
cacauugcaggaaaguucauua

SEQ ID NO: 56377 - RNA, 22 nt, Homo sapiens
cacauagucccugcuaaucuuc

SEQ ID NO: 56378 - RNA, 22 nt, Homo sapiens
caacacuguuuauuggauagcc

SEQ ID NO: 56379 - RNA, 22 nt, Homo sapiens
caaauugcuugucuguagugga

SEQ ID NO: 56380 - RNA, 20 nt, Homo sapiens
caaauugcuuucuugguuuu

SEQ ID NO: 56381 - RNA, 22 nt, Homo sapiens
caaaugcuucuauggacugucu

SEQ ID NO: 56382 - RNA, 22 nt, Homo sapiens
caaaugaucugcuggccucagc

SEQ ID NO: 56383 - RNA, 22 nt, Homo sapiens
caaauugcuuguggaggauaau

SEQ ID NO: 56384 - RNA, 22 nt, Homo sapiens
auugucacuuaaaagugcaugu

SEQ ID NO: 56385 - RNA, 21 nt, Homo sapiens
auuguauguaaaccaaaugag

SEQ ID NO: 56386 - RNA, 22 nt, Homo sapiens
auugucauuuauaacuguguag

SEQ ID NO: 56387 - RNA, 22 nt, Homo sapiens
auugucauuuucugagaaguaa

SEQ ID NO: 56388 - RNA, 22 nt, Homo sapiens
auuguguagucuuacugcuugc

SEQ ID NO: 56389 - RNA, 22 nt, Homo sapiens
auugcagcccacccugggugau

SEQ ID NO: 56390 - RNA, 22 nt, Homo sapiens
auugcaguuucaacuccagggc

SEQ ID NO: 56391 - RNA, 22 nt, Homo sapiens
auuguacuccagccuaggcaac

SEQ ID NO: 56392 - RNA, 22 nt, Homo sapiens
auuguacuccagccugggugac

SEQ ID NO: 56393 - RNA, 22 nt, Homo sapiens
auugcagaaaugacagagcgcc

SEQ ID NO: 56394 - RNA, 22 nt, Homo sapiens
auugaacuuacuaucuaaacua

SEQ ID NO: 56395 - RNA, 22 nt, Homo sapiens
auucuauaguccuaggauuggg

SEQ ID NO: 56396 - RNA, 22 nt, Homo sapiens
auugaacacagaguagcuuucc

SEQ ID NO: 56397 - RNA, 22 nt, Homo sapiens
auugaacacuucugugugccag

SEQ ID NO: 56398 - RNA, 23 nt, Homo sapiens
auugaacacuuucauaugugagg

SEQ ID NO: 56399 - RNA, 22 nt, Homo sapiens
augugccaauuaggauuccaag

SEQ ID NO: 56400 - RNA, 20 nt, Homo sapiens
augugcuaauauuaauaugu

SEQ ID NO: 56401 - RNA, 22 nt, Homo sapiens
auggcuuuaagagugucugaau

SEQ ID NO: 56402 - RNA, 22 nt, Homo sapiens
auggcuguuucugcaaugucua

SEQ ID NO: 56403 - RNA, 22 nt, Homo sapiens
augugcuuuuggugagagauuu

SEQ ID NO: 56404 - RNA, 22 nt, Homo sapiens
auguggaaagcagcaugauaug

SEQ ID NO: 56405 - RNA, 22 nt, Homo sapiens
auggcauugaagaguugucccu

SEQ ID NO: 56406 - RNA, 22 nt, Homo sapiens
auggcuauuccauaggcagagc

SEQ ID NO: 56407 - RNA, 23 nt, Homo sapiens
augugugcuuggagagcaggaug

SEQ ID NO: 56408 - RNA, 22 nt, Homo sapiens
auguguaaagcuuuucuuuguu

SEQ ID NO: 56409 - RNA, 22 nt, Homo sapiens
augugugcuugugacacagccu

SEQ ID NO: 56410 - RNA, 22 nt, Homo sapiens
auguuauguucuucucuguaua

SEQ ID NO: 56411 - RNA, 22 nt, Homo sapiens
auguuagcaucaauauucauca

SEQ ID NO: 56412 - RNA, 22 nt, Homo sapiens
auguuacggaguuuuuauccag

SEQ ID NO: 56413 - RNA, 22 nt, Homo sapiens
auuaacaucuagaguuuuggug

SEQ ID NO: 56414 - RNA, 22 nt, Homo sapiens
auguuuagagagggugucaaau

SEQ ID NO: 56415 - RNA, 23 nt, Homo sapiens
auuccaguggcaauuggagaaac

SEQ ID NO: 56416 - RNA, 22 nt, Homo sapiens
auuccacuuacaugaaguaccu

SEQ ID NO: 56417 - RNA, 20 nt, Homo sapiens
auucauggaggagcaauugg

SEQ ID NO: 56418 - RNA, 22 nt, Homo sapiens
auucaucagggauacuggccug

SEQ ID NO: 56419 - RNA, 22 nt, Homo sapiens
auuccacagccgauaccaugac

SEQ ID NO: 56420 - RNA, 22 nt, Homo sapiens
auucaugggagcuacuuuaaaa

SEQ ID NO: 56421 - RNA, 22 nt, Homo sapiens
auuaaguugugccugaaaacuu

SEQ ID NO: 56422 - RNA, 22 nt, Homo sapiens
auuaagugcuugcagaagucca

SEQ ID NO: 56423 - RNA, 22 nt, Homo sapiens
auuacaugucuauccaugaaca

SEQ ID NO: 56424 - RNA, 22 nt, Homo sapiens
auuacuuugcaccaaccuaaua

SEQ ID NO: 56425 - RNA, 22 nt, Homo sapiens
auuagaugguuauaggugugag

SEQ ID NO: 56426 - RNA, 20 nt, Homo sapiens
gacauguugguuugcugcac

SEQ ID NO: 56427 - RNA, 22 nt, Homo sapiens
gacauguuuacaguguugagag

SEQ ID NO: 56428 - RNA, 22 nt, Homo sapiens
gacugcagugcagcuguuaggc

SEQ ID NO: 56429 - RNA, 22 nt, Homo sapiens
gacuuugguagaggaaaaaucu

SEQ ID NO: 56430 - RNA, 18 nt, Homo sapiens
gacaguguggcaauuccu

SEQ ID NO: 56431 - RNA, 22 nt, Homo sapiens
gacaucauuaugagauuuaaac

SEQ ID NO: 56432 - RNA, 20 nt, Homo sapiens
gacauagagacucucaaaaa

SEQ ID NO: 56433 - RNA, 18 nt, Homo sapiens
gacaguguggcgauuccu

SEQ ID NO: 56434 - RNA, 22 nt, Homo sapiens
gacaguuuggugaggaagacga

SEQ ID NO: 56435 - RNA, 22 nt, Homo sapiens
gacagugagaugucaugugaaa

SEQ ID NO: 56436 - RNA, 18 nt, Homo sapiens
gacagugugaagauuccu

SEQ ID NO: 56437 - RNA, 22 nt, Homo sapiens
gacagacacaauugauccauga

SEQ ID NO: 56438 - RNA, 22 nt, Homo sapiens
cuuugguguauuuucagagacc

SEQ ID NO: 56439 - RNA, 22 nt, Homo sapiens
gaauguuuacuuuguuuaauac

SEQ ID NO: 56440 - RNA, 22 nt, Homo sapiens
gacaaguuugauuuauuccaag

SEQ ID NO: 56441 - RNA, 22 nt, Homo sapiens
gacacagugaagucucuacuug

SEQ ID NO: 56442 - RNA, 22 nt, Homo sapiens
gaaugucuuauugcucguugua

SEQ ID NO: 56443 - RNA, 22 nt, Homo sapiens
gaauggaacugacuauagcuga

SEQ ID NO: 56444 - RNA, 22 nt, Homo sapiens
gagaucaguuaaugaagugagc

SEQ ID NO: 56445 - RNA, 22 nt, Homo sapiens
gagaugaugagauguucacagu

SEQ ID NO: 56446 - RNA, 22 nt, Homo sapiens
gagaugaagugucaauaaggau

SEQ ID NO: 56447 - RNA, 22 nt, Homo sapiens
gagauggagacuuggccuuaaa

SEQ ID NO: 56448 - RNA, 22 nt, Homo sapiens
gagaucauguacuagaacaccu

SEQ ID NO: 56449 - RNA, 22 nt, Homo sapiens
gagacauugacuuuguuccaga

SEQ ID NO: 56450 - RNA, 22 nt, Homo sapiens
gagagaguacuugauauaauuu

SEQ ID NO: 56451 - RNA, 22 nt, Homo sapiens
gagacauguuugccaauaauuu

SEQ ID NO: 56452 - RNA, 22 nt, Homo sapiens
gaucaauuggcugaagacacgu

SEQ ID NO: 56453 - RNA, 22 nt, Homo sapiens
gauauugacuuauucuauguuu

SEQ ID NO: 56454 - RNA, 22 nt, Homo sapiens
gauauguuguuggauucgguua

SEQ ID NO: 56455 - RNA, 22 nt, Homo sapiens
gaucugagaaagugucauaaca

SEQ ID NO: 56456 - RNA, 22 nt, Homo sapiens
gaucuguuguuuggaaguauca

SEQ ID NO: 56457 - RNA, 22 nt, Homo sapiens
gcaagaaugagaaggauuaauu

SEQ ID NO: 56458 - RNA, 22 nt, Homo sapiens
gcaagauuguguggcugaagua

SEQ ID NO: 56459 - RNA, 22 nt, Homo sapiens
gauuccacuuucaaauucaaau

SEQ ID NO: 56460 - RNA, 22 nt, Homo sapiens
gauuccacuuacuuagcauucc

SEQ ID NO: 56461 - RNA, 22 nt, Homo sapiens
gauguuguuuagccuuugaugu

SEQ ID NO: 56462 - RNA, 22 nt, Homo sapiens
gauuagcacuucaguuacagua

SEQ ID NO: 56463 - RNA, 22 nt, Homo sapiens
gauuagagaaauacugcugcua

SEQ ID NO: 56464 - RNA, 22 nt, Homo sapiens
gaugugaaaucauaguuucuag

SEQ ID NO: 56465 - RNA, 22 nt, Homo sapiens
gagauuuucagcuugacuggga

SEQ ID NO: 56466 - RNA, 22 nt, Homo sapiens
gagauucuucaauauuuauucu

SEQ ID NO: 56467 - RNA, 22 nt, Homo sapiens
gagauugucaugauuacauugu

SEQ ID NO: 56468 - RNA, 22 nt, Homo sapiens
gagcaaugauugagccacugua

SEQ ID NO: 56469 - RNA, 22 nt, Homo sapiens
gagcacauaugacauuuucuuc

SEQ ID NO: 56470 - RNA, 22 nt, Homo sapiens
gagauuaauacacaucaaaugc

SEQ ID NO: 56471 - RNA, 22 nt, Homo sapiens
gagguguagagauauaccugaa

SEQ ID NO: 56472 - RNA, 22 nt, Homo sapiens
gauauguugaguagaguuuuug

SEQ ID NO: 56473 - RNA, 22 nt, Homo sapiens
cugcauuugaugacguauggug

SEQ ID NO: 56474 - RNA, 22 nt, Homo sapiens
cugauugugcagagguguaauu

SEQ ID NO: 56475 - RNA, 20 nt, Homo sapiens
cugcaaaugcugcugcugau

SEQ ID NO: 56476 - RNA, 20 nt, Homo sapiens
cugcacauccacucuacuuc

SEQ ID NO: 56477 - RNA, 22 nt, Homo sapiens
cugcaauguuugaaauggcaaa

SEQ ID NO: 56478 - RNA, 22 nt, Homo sapiens
cugauauuuuaaaauuggcugg

SEQ ID NO: 56479 - RNA, 22 nt, Homo sapiens
cugauaguucucuuuagaguuu

SEQ ID NO: 56480 - RNA, 22 nt, Homo sapiens
cugauauuuuucuggcuugugu

SEQ ID NO: 56481 - RNA, 22 nt, Homo sapiens
cugagcaugacaucaugugacu

SEQ ID NO: 56482 - RNA, 22 nt, Homo sapiens
cugagcaaaaugaagacacgau

SEQ ID NO: 56483 - RNA, 22 nt, Homo sapiens
cucacugucaacauguauuugg

SEQ ID NO: 56484 - RNA, 22 nt, Homo sapiens
cugagauaauuucuagguguca

SEQ ID NO: 56485 - RNA, 22 nt, Homo sapiens
cugagaucuuauuagaaaugca

SEQ ID NO: 56486 - RNA, 22 nt, Homo sapiens
cugagauuaagauauugggagu

SEQ ID NO: 56487 - RNA, 22 nt, Homo sapiens
cugagauuuuuagauccuggcg

SEQ ID NO: 56488 - RNA, 21 nt, Homo sapiens
cucaaaguacugauauuacag

SEQ ID NO: 56489 - RNA, 22 nt, Homo sapiens
cucaaaguacuuugguuauugu

SEQ ID NO: 56490 - RNA, 22 nt, Homo sapiens
cucaaagugcugggacuggcug

SEQ ID NO: 56491 - RNA, 22 nt, Homo sapiens
cuagaguacuuaccacagcaug

SEQ ID NO: 56492 - RNA, 18 nt, Homo sapiens
cuaauacuauucaacaag

SEQ ID NO: 56493 - RNA, 21 nt, Homo sapiens
cuaaucucacccuuuucuggg

SEQ ID NO: 56494 - RNA, 20 nt, Homo sapiens
cuaaucaucccagaagaaau

SEQ ID NO: 56495 - RNA, 22 nt, Homo sapiens
cuuuggauggaaccucucuuuc

SEQ ID NO: 56496 - RNA, 20 nt, Homo sapiens
cuuuggcaaugagaacaggg

SEQ ID NO: 56497 - RNA, 22 nt, Homo sapiens
cuuuggguauucucccuugggg

SEQ ID NO: 56498 - RNA, 22 nt, Homo sapiens
cuuuaugagguuggauggaucu

SEQ ID NO: 56499 - RNA, 22 nt, Homo sapiens
cuuucucagugagacccgagau

SEQ ID NO: 56500 - RNA, 22 nt, Homo sapiens
cuuugcaaauggccuuuccaag

SEQ ID NO: 56501 - RNA, 22 nt, Homo sapiens
cuuguucuccuaagaugaaugc

SEQ ID NO: 56502 - RNA, 22 nt, Homo sapiens
cuuguuguggaggggagugcag

SEQ ID NO: 56503 - RNA, 22 nt, Homo sapiens
cuuuaguugucuccucaagggu

SEQ ID NO: 56504 - RNA, 22 nt, Homo sapiens
cuuuagcaaggauauggggaug

SEQ ID NO: 56505 - RNA, 21 nt, Homo sapiens
cuugucuugcuuagaauagac

SEQ ID NO: 56506 - RNA, 20 nt, Homo sapiens
cuuaaugcagcauuucucag

SEQ ID NO: 56507 - RNA, 22 nt, Homo sapiens
cuuaagcauugacuuuggacag

SEQ ID NO: 56508 - RNA, 22 nt, Homo sapiens
cuuacagucuaucagccacaac

SEQ ID NO: 56509 - RNA, 17 nt, Homo sapiens
cuucaaauaauuucccc

SEQ ID NO: 56510 - RNA, 22 nt, Homo sapiens
cuguaugugagaaauaauaagu

SEQ ID NO: 56511 - RNA, 22 nt, Homo sapiens
cuguauguuucuaugaauguga

SEQ ID NO: 56512 - RNA, 22 nt, Homo sapiens
cugucuaugagccaggaagcca

SEQ ID NO: 56513 - RNA, 22 nt, Homo sapiens
cugucacuggggcacauguccc

SEQ ID NO: 56514 - RNA, 22 nt, Homo sapiens
cugucucagugaauugguuuua

SEQ ID NO: 56515 - RNA, 22 nt, Homo sapiens
cuguugguuaaauuccaugcag

SEQ ID NO: 56516 - RNA, 22 nt, Homo sapiens
cuguaaagaucacagagcuggu

SEQ ID NO: 56517 - RNA, 22 nt, Homo sapiens
cuggagaucuugacauugaagu

SEQ ID NO: 56518 - RNA, 22 nt, Homo sapiens
cuggaauucaaaaucugaauuu

SEQ ID NO: 56519 - RNA, 22 nt, Homo sapiens
cuggaauguuccuaaagauuca

SEQ ID NO: 56520 - RNA, 22 nt, Homo sapiens
cuggaauuacaggguugagcua

SEQ ID NO: 56521 - RNA, 22 nt, Homo sapiens
cuggaaucuauggauaacaucg

SEQ ID NO: 56522 - RNA, 22 nt, Homo sapiens
aucauugugugaguugauggga

SEQ ID NO: 56523 - RNA, 22 nt, Homo sapiens
auccaagagacugaugacuucc

SEQ ID NO: 56524 - RNA, 23 nt, Homo sapiens
auccacauucuaguccuuuaugc

SEQ ID NO: 56525 - RNA, 22 nt, Homo sapiens
auccacaugcaguuggaaacag

SEQ ID NO: 56526 - RNA, 22 nt, Homo sapiens
aucagagugaauaaugacaaaa

SEQ ID NO: 56527 - RNA, 20 nt, Homo sapiens
auaugguugugagugauuuu

SEQ ID NO: 56528 - RNA, 22 nt, Homo sapiens
auauggcuaugugagcauacca

SEQ ID NO: 56529 - RNA, 22 nt, Homo sapiens
aucacuguaaguuuacacuuug

SEQ ID NO: 56530 - RNA, 22 nt, Homo sapiens
aucagaaucucuagaggacugu

SEQ ID NO: 56531 - RNA, 22 nt, Homo sapiens
aucacuaugcaggugucucggg

SEQ ID NO: 56532 - RNA, 22 nt, Homo sapiens
aucacugggagcagccauuaau

SEQ ID NO: 56533 - RNA, 22 nt, Homo sapiens
aucacuggccuuuuuaaaugcu

SEQ ID NO: 56534 - RNA, 22 nt, Homo sapiens
aucacguguguuuaugcuacgc

SEQ ID NO: 56535 - RNA, 22 nt, Homo sapiens
aucugcacaucuguguuuuugu

SEQ ID NO: 56536 - RNA, 22 nt, Homo sapiens
aucuuuggcgggaauaucacag

SEQ ID NO: 56537 - RNA, 22 nt, Homo sapiens
aucuuugauuagacugauggau

SEQ ID NO: 56538 - RNA, 22 nt, Homo sapiens
auccuguaggcuaguagacagu

SEQ ID NO: 56539 - RNA, 22 nt, Homo sapiens
auccuguagucucacagcccca

SEQ ID NO: 56540 - RNA, 22 nt, Homo sapiens
aucgcaauguuuagaauuuugu

SEQ ID NO: 56541 - RNA, 22 nt, Homo sapiens
aucuacuugcugggucucugga

SEQ ID NO: 56542 - RNA, 22 nt, Homo sapiens
augacauagcauggugccugcu

SEQ ID NO: 56543 - RNA, 22 nt, Homo sapiens
augacaguaugacuccaaaagu

SEQ ID NO: 56544 - RNA, 19 nt, Homo sapiens
augaccauuuccauaguau

SEQ ID NO: 56545 - RNA, 19 nt, Homo sapiens
augacauuuggggguggac

SEQ ID NO: 56546 - RNA, 22 nt, Homo sapiens
aucuuuggugaguucuuugguc

SEQ ID NO: 56547 - RNA, 22 nt, Homo sapiens
augaaacuggagcgccuggagg

SEQ ID NO: 56548 - RNA, 22 nt, Homo sapiens
augaaugucuuauuuugagaaa

SEQ ID NO: 56549 - RNA, 22 nt, Homo sapiens
augaauucaucugguuuuggga

SEQ ID NO: 56550 - RNA, 22 nt, Homo sapiens
augacaagagccuucuuuccuu

SEQ ID NO: 56551 - RNA, 22 nt, Homo sapiens
augacaagaguguucagggaga

SEQ ID NO: 56552 - RNA, 20 nt, Homo sapiens
augcaaacccugcuuugugg

SEQ ID NO: 56553 - RNA, 22 nt, Homo sapiens
augauuuuuguaucgccugaug

SEQ ID NO: 56554 - RNA, 22 nt, Homo sapiens
augauucugaucuagagcuugg

SEQ ID NO: 56555 - RNA, 22 nt, Homo sapiens
augaucuagaguaggaaacaga

SEQ ID NO: 56556 - RNA, 22 nt, Homo sapiens
augaucaucugaaagcuuuuac

SEQ ID NO: 56557 - RNA, 22 nt, Homo sapiens
augcaagacaccgauuagcuuu

SEQ ID NO: 56558 - RNA, 22 nt, Homo sapiens
augcaagcacacaagaggaaau

SEQ ID NO: 56559 - RNA, 22 nt, Homo sapiens
augcaacuugaaauuuuccgga

SEQ ID NO: 56560 - RNA, 22 nt, Homo sapiens
augcaagacaccacgugagaau

SEQ ID NO: 56561 - RNA, 22 nt, Homo sapiens
augccucugacaauuggauucu

SEQ ID NO: 56562 - RNA, 22 nt, Homo sapiens
auggaaacauaagaguauagau

SEQ ID NO: 56563 - RNA, 22 nt, Homo sapiens
augcuaugugugacuucuuaug

SEQ ID NO: 56564 - RNA, 22 nt, Homo sapiens
augcuacugaccccuacuuaca

SEQ ID NO: 56565 - RNA, 22 nt, Homo sapiens
augcuacugauaagcaaucauu

SEQ ID NO: 56566 - RNA, 22 nt, Homo sapiens
augcuacuggacaauggugacu

SEQ ID NO: 56567 - RNA, 22 nt, Homo sapiens
auggaacuggagaugguuauau

SEQ ID NO: 56568 - RNA, 22 nt, Homo sapiens
auggaacuggagaucauuaugu

SEQ ID NO: 56569 - RNA, 22 nt, Homo sapiens
auggaaaugaagggcuggcccu

SEQ ID NO: 56570 - RNA, 22 nt, Homo sapiens
auggauuuguaguacaugguug

SEQ ID NO: 56571 - RNA, 22 nt, Homo sapiens
auggcagagucagaaagucagg

SEQ ID NO: 56572 - RNA, 18 nt, Homo sapiens
auggcagaacaauuuaca

SEQ ID NO: 56573 - RNA, 22 nt, Homo sapiens
auggauuuugaacuugagaguu

SEQ ID NO: 56574 - RNA, 23 nt, Homo sapiens
agucuguguuuacaggcucucug

SEQ ID NO: 56575 - RNA, 22 nt, Homo sapiens
agugaauguuggaaaguuauuu

SEQ ID NO: 56576 - RNA, 22 nt, Homo sapiens
agugagcuguuuuuacuuucug

SEQ ID NO: 56577 - RNA, 22 nt, Homo sapiens
agucacagccuuuuacuuuaga

SEQ ID NO: 56578 - RNA, 22 nt, Homo sapiens
agucagauuggcauuuguuggg

SEQ ID NO: 56579 - RNA, 22 nt, Homo sapiens
agugcaauggugccaucauagc

SEQ ID NO: 56580 - RNA, 22 nt, Homo sapiens
agugcaauggcgugaucuuggc

SEQ ID NO: 56581 - RNA, 22 nt, Homo sapiens
agugaucauuugaauugaugau

SEQ ID NO: 56582 - RNA, 22 nt, Homo sapiens
aguggguguuccauuggauaaa

SEQ ID NO: 56583 - RNA, 19 nt, Homo sapiens
agcaucauuauuguuuugg

SEQ ID NO: 56584 - RNA, 20 nt, Homo sapiens
agcaucauugcaauuuguca

SEQ ID NO: 56585 - RNA, 20 nt, Homo sapiens
agcuguuguuaaaaaggagg

SEQ ID NO: 56586 - RNA, 22 nt, Homo sapiens
aguaucacaggcaaaacagaau

SEQ ID NO: 56587 - RNA, 21 nt, Homo sapiens
aguagcacugugucuuacaaa

SEQ ID NO: 56588 - RNA, 20 nt, Homo sapiens
aguauucacuuuuuucaugg

SEQ ID NO: 56589 - RNA, 22 nt, Homo sapiens
agucaaaugcuuauguauaaag

SEQ ID NO: 56590 - RNA, 22 nt, Homo sapiens
agucaagauggcaagguaaggc

SEQ ID NO: 56591 - RNA, 22 nt, Homo sapiens
agucaaggaggccuuucagaug

SEQ ID NO: 56592 - RNA, 22 nt, Homo sapiens
agucaacaucaugaaguggaaa

SEQ ID NO: 56593 - RNA, 22 nt, Homo sapiens
agucaagaaucucagcaucuuu

SEQ ID NO: 56594 - RNA, 22 nt, Homo sapiens
aguacugucagcaggguguuga

SEQ ID NO: 56595 - RNA, 22 nt, Homo sapiens
agcuguuuuugugggcauguga

SEQ ID NO: 56596 - RNA, 22 nt, Homo sapiens
agcuguuguuuuaagauacuaa

SEQ ID NO: 56597 - RNA, 22 nt, Homo sapiens
agcuucacaaugcagagggcag

SEQ ID NO: 56598 - RNA, 22 nt, Homo sapiens
auacaguugccauuucuugugc

SEQ ID NO: 56599 - RNA, 22 nt, Homo sapiens
auacaucugccauguuggugug

SEQ ID NO: 56600 - RNA, 22 nt, Homo sapiens
auaagaagugaaccagacgucu

SEQ ID NO: 56601 - RNA, 22 nt, Homo sapiens
auaagcuaagaguuucugggcu

SEQ ID NO: 56602 - RNA, 22 nt, Homo sapiens
auacaugugucauguugguuug

SEQ ID NO: 56603 - RNA, 22 nt, Homo sapiens
auacaugugccaugcuggugug

SEQ ID NO: 56604 - RNA, 22 nt, Homo sapiens
auacaugugccauguucgugug

SEQ ID NO: 56605 - RNA, 22 nt, Homo sapiens
auacaugugccauguugguuug

SEQ ID NO: 56606 - RNA, 20 nt, Homo sapiens
agugguuuucaaauaugucu

SEQ ID NO: 56607 - RNA, 22 nt, Homo sapiens
agugguuuuaaguagagcauac

SEQ ID NO: 56608 - RNA, 22 nt, Homo sapiens
auaacagcauuauugcauacgu

SEQ ID NO: 56609 - RNA, 22 nt, Homo sapiens
auaacagcugcaaggcaaaagc

SEQ ID NO: 56610 - RNA, 22 nt, Homo sapiens
auaaauucauuuaagcuccuua

SEQ ID NO: 56611 - RNA, 22 nt, Homo sapiens
auaaaugcuuccagucauuaaa

SEQ ID NO: 56612 - RNA, 20 nt, Homo sapiens
auagcauugauggacucaaa

SEQ ID NO: 56613 - RNA, 22 nt, Homo sapiens
auagcauaucccacaugucaga

SEQ ID NO: 56614 - RNA, 22 nt, Homo sapiens
auagcauagucagcuucgcuga

SEQ ID NO: 56615 - RNA, 22 nt, Homo sapiens
auagcagcagcuaguagugaua

SEQ ID NO: 56616 - RNA, 22 nt, Homo sapiens
auacuguauaggauuguagccu

SEQ ID NO: 56617 - RNA, 22 nt, Homo sapiens
auaugcacaguggaguacuauu

SEQ ID NO: 56618 - RNA, 22 nt, Homo sapiens
auaucacucccaauaucgcagg

SEQ ID NO: 56619 - RNA, 22 nt, Homo sapiens
auaugcaaauccauagagacag

SEQ ID NO: 56620 - RNA, 22 nt, Homo sapiens
auagguaguugaggagauuuca

SEQ ID NO: 56621 - RNA, 22 nt, Homo sapiens
auaucacaggaaaggaagauac

SEQ ID NO: 56622 - RNA, 22 nt, Homo sapiens
auaucacaaacaagucuguacu

SEQ ID NO: 56623 - RNA, 22 nt, Homo sapiens
auagccuguaggccuuaaggug

SEQ ID NO: 56624 - RNA, 22 nt, Homo sapiens
agaauucugucauguuuauauu

SEQ ID NO: 56625 - RNA, 22 nt, Homo sapiens
agaaugucaguauuggcuaaaa

SEQ ID NO: 56626 - RNA, 22 nt, Homo sapiens
agaauguuuuagaccaauacaa

SEQ ID NO: 56627 - RNA, 22 nt, Homo sapiens
agaauguaacucuaugaaggca

SEQ ID NO: 56628 - RNA, 22 nt, Homo sapiens
agaacuguccauucagcaugaa

SEQ ID NO: 56629 - RNA, 22 nt, Homo sapiens
agacagcuggaguaucauagcu

SEQ ID NO: 56630 - RNA, 22 nt, Homo sapiens
agacacugaaauguauugaaga

SEQ ID NO: 56631 - RNA, 22 nt, Homo sapiens
agacaguguguguauauauggu

SEQ ID NO: 56632 - RNA, 22 nt, Homo sapiens
agacagcugggaaauggagugu

SEQ ID NO: 56633 - RNA, 22 nt, Homo sapiens
agacaguauuggcaaagugugu

SEQ ID NO: 56634 - RNA, 20 nt, Homo sapiens
agacaguguggagauuccuu

SEQ ID NO: 56635 - RNA, 22 nt, Homo sapiens
agaugcauuuuuauuggaauac

SEQ ID NO: 56636 - RNA, 22 nt, Homo sapiens
agaucauaugcaguaaugaacu

SEQ ID NO: 56637 - RNA, 20 nt, Homo sapiens
agaugcaugcacauaaacac

SEQ ID NO: 56638 - RNA, 22 nt, Homo sapiens
agauauuuguuaggucugucag

SEQ ID NO: 56639 - RNA, 22 nt, Homo sapiens
agauaugucugcuauuugcugu

SEQ ID NO: 56640 - RNA, 22 nt, Homo sapiens
agauauguuuaguuucaaaaug

SEQ ID NO: 56641 - RNA, 22 nt, Homo sapiens
agagauaguuuccaacucauac

SEQ ID NO: 56642 - RNA, 22 nt, Homo sapiens
agagauaauuagguuaaaugag

SEQ ID NO: 56643 - RNA, 22 nt, Homo sapiens
agagauacauucugagaagugc

SEQ ID NO: 56644 - RNA, 22 nt, Homo sapiens
agagaucaacugaauuacugga

SEQ ID NO: 56645 - RNA, 22 nt, Homo sapiens
agagauaaagauuuuaauuuug

SEQ ID NO: 56646 - RNA, 19 nt, Homo sapiens
agaguauuguuacuucucu

SEQ ID NO: 56647 - RNA, 21 nt, Homo sapiens
agcagcuuugguugaagcaga

SEQ ID NO: 56648 - RNA, 22 nt, Homo sapiens
agcagugucauuuucuggugag

SEQ ID NO: 56649 - RNA, 19 nt, Homo sapiens
agcaguguggagauuucuc

SEQ ID NO: 56650 - RNA, 22 nt, Homo sapiens
agcagcauuaugauauaucuua

SEQ ID NO: 56651 - RNA, 22 nt, Homo sapiens
agauucauccaaguuguugcau

SEQ ID NO: 56652 - RNA, 22 nt, Homo sapiens
agcaaaucuaugaauguauauu

SEQ ID NO: 56653 - RNA, 22 nt, Homo sapiens
agcaauaugacauugcuacauc

SEQ ID NO: 56654 - RNA, 22 nt, Homo sapiens
agcaagaaugaacucucccaga

SEQ ID NO: 56655 - RNA, 22 nt, Homo sapiens
agcaagacauggcuuccaaaug

SEQ ID NO: 56656 - RNA, 22 nt, Homo sapiens
agcaagaugaaguugagcuagg

SEQ ID NO: 56657 - RNA, 23 nt, Homo sapiens
agaugcauucuuguaggauauau

SEQ ID NO: 56658 - RNA, 22 nt, Homo sapiens
agaugcuguuaucaacuguagc

SEQ ID NO: 56659 - RNA, 19 nt, Homo sapiens
accagauugcauucuugga

SEQ ID NO: 56660 - RNA, 22 nt, Homo sapiens
accacagugcuuccugcucacg

SEQ ID NO: 56661 - RNA, 22 nt, Homo sapiens
acccagaauucagucuuaggcc

SEQ ID NO: 56662 - RNA, 22 nt, Homo sapiens
accauugcacuccagcccaggc

SEQ ID NO: 56663 - RNA, 19 nt, Homo sapiens
acauugcauuuguaggcuu

SEQ ID NO: 56664 - RNA, 22 nt, Homo sapiens
acauugcauauggcacccucuu

SEQ ID NO: 56665 - RNA, 19 nt, Homo sapiens
acagugucucuauaaugau

SEQ ID NO: 56666 - RNA, 18 nt, Homo sapiens
acagugucauggcucaau

SEQ ID NO: 56667 - RNA, 22 nt, Homo sapiens
acagugucaugucguguucccc

SEQ ID NO: 56668 - RNA, 22 nt, Homo sapiens
acauucagcuguuguuucaaug

SEQ ID NO: 56669 - RNA, 22 nt, Homo sapiens
acucauugcucauaccuuaucu

SEQ ID NO: 56670 - RNA, 22 nt, Homo sapiens
acuauacugaagcaaauuaaca

SEQ ID NO: 56671 - RNA, 22 nt, Homo sapiens
acugcaaugucgaauagagaug

SEQ ID NO: 56672 - RNA, 20 nt, Homo sapiens
acuuuuugaugaggucguuu

SEQ ID NO: 56673 - RNA, 22 nt, Homo sapiens
acuuuuugauggggagaacauu

SEQ ID NO: 56674 - RNA, 22 nt, Homo sapiens
agaacacugaguucagggucag

SEQ ID NO: 56675 - RNA, 23 nt, Homo sapiens
agaaaugucuauucagggucccu

SEQ ID NO: 56676 - RNA, 20 nt, Homo sapiens
acugcauuuaguccucagga

SEQ ID NO: 56677 - RNA, 18 nt, Homo sapiens
acugcacuccauccuagg

SEQ ID NO: 56678 - RNA, 22 nt, Homo sapiens
aaucaacauuguuuuaagucaa

SEQ ID NO: 56679 - RNA, 19 nt, Homo sapiens
aauauugacaguggugucu

SEQ ID NO: 56680 - RNA, 22 nt, Homo sapiens
aauauugucaaaauggauucca

SEQ ID NO: 56681 - RNA, 22 nt, Homo sapiens
aauagcauugaaucuaccaauu

SEQ ID NO: 56682 - RNA, 22 nt, Homo sapiens
aauacuuccaaaucuagucauu

SEQ ID NO: 56683 - RNA, 22 nt, Homo sapiens
aauacugaaaguauuuucaaau

SEQ ID NO: 56684 - RNA, 22 nt, Homo sapiens
aauaugucugcuaauuguuucu

SEQ ID NO: 56685 - RNA, 22 nt, Homo sapiens
aaucacauugaaucugcuaccu

SEQ ID NO: 56686 - RNA, 22 nt, Homo sapiens
aaucauauugucugccaagagg

SEQ ID NO: 56687 - RNA, 22 nt, Homo sapiens
aaucacguagcaguagggagaa

SEQ ID NO: 56688 - RNA, 17 nt, Homo sapiens
aaucagauuucugagga

SEQ ID NO: 56689 - RNA, 22 nt, Homo sapiens
aaucagcacacugugcuuucca

SEQ ID NO: 56690 - RNA, 22 nt, Homo sapiens
aauuacucgugucuuuacugcu

SEQ ID NO: 56691 - RNA, 22 nt, Homo sapiens
aauuacauggcaauugggaaau

SEQ ID NO: 56692 - RNA, 22 nt, Homo sapiens
aaugugcacuuggagccuugcu

SEQ ID NO: 56693 - RNA, 22 nt, Homo sapiens
aaugugccuacagugggcuguu

SEQ ID NO: 56694 - RNA, 21 nt, Homo sapiens
aaugguguugccaacaaggug

SEQ ID NO: 56695 - RNA, 22 nt, Homo sapiens
aauccugucuugccauccaaua

SEQ ID NO: 56696 - RNA, 22 nt, Homo sapiens
aauggcagaugaaauugucauu

SEQ ID NO: 56697 - RNA, 22 nt, Homo sapiens
acacaguauaugacaaugcuuu

SEQ ID NO: 56698 - RNA, 22 nt, Homo sapiens
acacaguaagcacaguguagau

SEQ ID NO: 56699 - RNA, 22 nt, Homo sapiens
acacacgugcauguaugcguau

SEQ ID NO: 56700 - RNA, 23 nt, Homo sapiens
acacaguaaacuaaaagcuagcu

SEQ ID NO: 56701 - RNA, 22 nt, Homo sapiens
acacagucaaauccacuuggcu

SEQ ID NO: 56702 - RNA, 22 nt, Homo sapiens
acacaugugcguagacucuuua

SEQ ID NO: 56703 - RNA, 22 nt, Homo sapiens
acacauuagcaagugcuguuau

SEQ ID NO: 56704 - RNA, 22 nt, Homo sapiens
acaccaucuccuuauuucucuu

SEQ ID NO: 56705 - RNA, 21 nt, Homo sapiens
acaguaguaauaguguagcca

SEQ ID NO: 56706 - RNA, 22 nt, Homo sapiens
aagugguguuuguauuuaugca

SEQ ID NO: 56707 - RNA, 22 nt, Homo sapiens
aaguuguaguuagagaguugcu

SEQ ID NO: 56708 - RNA, 22 nt, Homo sapiens
aaguuaauguuuaagacuccua

SEQ ID NO: 56709 - RNA, 22 nt, Homo sapiens
aauaaagcuuugagcuuugcug

SEQ ID NO: 56710 - RNA, 22 nt, Homo sapiens
aauaagcauaguaccugauagg

SEQ ID NO: 56711 - RNA, 22 nt, Homo sapiens
aauaagcugagagaauucuaca

SEQ ID NO: 56712 - RNA, 22 nt, Homo sapiens
aaguccaugaagucuugugggu

SEQ ID NO: 56713 - RNA, 22 nt, Homo sapiens
aagucaaggagagaagcuucag

SEQ ID NO: 56714 - RNA, 22 nt, Homo sapiens
aagucaaggagagaggcgucag

SEQ ID NO: 56715 - RNA, 22 nt, Homo sapiens
aaguauguaucaagucauacuu

SEQ ID NO: 56716 - RNA, 22 nt, Homo sapiens
aagugcuucagaagacaauauu

SEQ ID NO: 56717 - RNA, 20 nt, Homo sapiens
uuuugaacuuggcaaccugu

SEQ ID NO: 56718 - RNA, 23 nt, Homo sapiens
aagguaagcuagaaagauguaga

SEQ ID NO: 56719 - RNA, 22 nt, Homo sapiens
aaguaaacauuuuguacaauaa

SEQ ID NO: 56720 - RNA, 22 nt, Homo sapiens
aaguaaauauccgguaguccca

SEQ ID NO: 56721 - RNA, 22 nt, Homo sapiens
aaguaaaucuuaugucagggag

SEQ ID NO: 56722 - RNA, 22 nt, Homo sapiens
uuuguguggccuuggccuggca

SEQ ID NO: 56723 - RNA, 22 nt, Homo sapiens
uuuguucaccucaaggauggga

SEQ ID NO: 56724 - RNA, 22 nt, Homo sapiens
uuuguggaaugcucauguguag

SEQ ID NO: 56725 - RNA, 22 nt, Homo sapiens
uuugugcugcaauuaauuuccc

SEQ ID NO: 56726 - RNA, 22 nt, Homo sapiens
uuuguggaaugcccuuauuuau

SEQ ID NO: 56727 - RNA, 21 nt, Homo sapiens
uuuguguccccacccaaaucu

SEQ ID NO: 56728 - RNA, 22 nt, Homo sapiens
uuuguguccccacccaaaucuc

SEQ ID NO: 56729 - RNA, 23 nt, Homo sapiens
uuuguguccccacccaaaucuca

SEQ ID NO: 56730 - RNA, 22 nt, Homo sapiens
uuuuaugggcuauuugcauuag

SEQ ID NO: 56731 - RNA, 22 nt, Homo sapiens
uuuucaguggccauaguggaga

SEQ ID NO: 56732 - RNA, 22 nt, Homo sapiens
uuuuaguggaauauuuacaguu

SEQ ID NO: 56733 - RNA, 22 nt, Homo sapiens
uuuuagcuuuucccaggacucc

SEQ ID NO: 56734 - RNA, 20 nt, Homo sapiens
uuuuagcuuuuauugaaagc

SEQ ID NO: 56735 - RNA, 22 nt, Homo sapiens
uuuuagcagccaugacaaagau

SEQ ID NO: 56736 - RNA, 22 nt, Homo sapiens
uuuuacacuucgguugugugca

SEQ ID NO: 56737 - RNA, 22 nt, Homo sapiens
uuuuaagcuacaagagacauau

SEQ ID NO: 56738 - RNA, 22 nt, Homo sapiens
uuuuaacagccaggggacggcc

SEQ ID NO: 56739 - RNA, 22 nt, Homo sapiens
uuuguuugaagucgagacaacu

SEQ ID NO: 56740 - RNA, 22 nt, Homo sapiens
aaagucuagaggaucaugugug

SEQ ID NO: 56741 - RNA, 18 nt, Homo sapiens
aaacagugucucuuucug

SEQ ID NO: 56742 - RNA, 22 nt, Homo sapiens
aaacauugaccucauccuggca

SEQ ID NO: 56743 - RNA, 22 nt, Homo sapiens
aaagugauuguaguuuuugcca

SEQ ID NO: 56744 - RNA, 18 nt, Homo sapiens
aaagugaugucauucuuu

SEQ ID NO: 56745 - RNA, 22 nt, Homo sapiens
aaagugauguccaggcuuucag

SEQ ID NO: 56746 - RNA, 22 nt, Homo sapiens
aaagggcuguuucuugacuugg

SEQ ID NO: 56747 - RNA, 22 nt, Homo sapiens
aaaggcaucauuaguaccaagu

SEQ ID NO: 56748 - RNA, 22 nt, Homo sapiens
aaagucuguuuugucagagacu

SEQ ID NO: 56749 - RNA, 22 nt, Homo sapiens
aaagucuguuacagcuauuucu

SEQ ID NO: 56750 - RNA, 22 nt, Homo sapiens
aaagugccugacucauaguuag

SEQ ID NO: 56751 - RNA, 22 nt, Homo sapiens
aaagugcugggauuaggccagg

SEQ ID NO: 56752 - RNA, 22 nt, Homo sapiens
aaaguggugugaguauguaucu

SEQ ID NO: 56753 - RNA, 22 nt, Homo sapiens
aaagcugucaaggcaggaggcu

SEQ ID NO: 56754 - RNA, 22 nt, Homo sapiens
aaagcuagagaagcugcuguca

SEQ ID NO: 56755 - RNA, 22 nt, Homo sapiens
aaagugcugagauuguaggcau

SEQ ID NO: 56756 - RNA, 22 nt, Homo sapiens
aaagugcaguacuucguauauu

SEQ ID NO: 56757 - RNA, 22 nt, Homo sapiens
aaagugauugcgguuuuugcca

SEQ ID NO: 56758 - RNA, 22 nt, Homo sapiens
aaaguggacuaagugaauauga

SEQ ID NO: 56759 - RNA, 22 nt, Homo sapiens
aaaguguguuuccaaccugugg

SEQ ID NO: 56760 - RNA, 22 nt, Homo sapiens
aaauaacugucagguucuggaa

SEQ ID NO: 56761 - RNA, 22 nt, Homo sapiens
aaauccaucucuuggggcauug

SEQ ID NO: 56762 - RNA, 22 nt, Homo sapiens
aaaguucuugcugaaggauuau

SEQ ID NO: 56763 - RNA, 22 nt, Homo sapiens
aagugguucuaugaguuugcaa

SEQ ID NO: 56764 - RNA, 22 nt, Homo sapiens
aaggugcucucuuauguagaaa

SEQ ID NO: 56765 - RNA, 20 nt, Homo sapiens
aagugcuauuucuuuugugg

SEQ ID NO: 56766 - RNA, 22 nt, Homo sapiens
aaggcauggugacuauuuaggc

SEQ ID NO: 56767 - RNA, 22 nt, Homo sapiens
aagggaaugcuuccaguuugug

SEQ ID NO: 56768 - RNA, 22 nt, Homo sapiens
aaggcaugcaaagaacauuuua

SEQ ID NO: 56769 - RNA, 22 nt, Homo sapiens
aaggcaguggcagaagauguca

SEQ ID NO: 56770 - RNA, 22 nt, Homo sapiens
aaggcaauuuguugugaggauu

SEQ ID NO: 56771 - RNA, 22 nt, Homo sapiens
aaggcaagaaugcgugcuuuca

SEQ ID NO: 56772 - RNA, 22 nt, Homo sapiens
aaggaauacuggugguugcuau

SEQ ID NO: 56773 - RNA, 22 nt, Homo sapiens
aaggaauucaaauuuucucugg

SEQ ID NO: 56774 - RNA, 22 nt, Homo sapiens
aaggcaagaaaauggauucucc

SEQ ID NO: 56775 - RNA, 22 nt, Homo sapiens
aaggcaagaagagaaccaucgg

SEQ ID NO: 56776 - RNA, 22 nt, Homo sapiens
aaggaguaucuguuuucucacc

SEQ ID NO: 56777 - RNA, 22 nt, Homo sapiens
aaggaaguaauuugguuuauag

SEQ ID NO: 56778 - RNA, 23 nt, Homo sapiens
aagcaugcacagcuguuuguggu

SEQ ID NO: 56779 - RNA, 22 nt, Homo sapiens
aagcaucauuuggaauuugaga

SEQ ID NO: 56780 - RNA, 22 nt, Homo sapiens
aagcagacauguucauuuugaa

SEQ ID NO: 56781 - RNA, 21 nt, Homo sapiens
aagcacauugaguguguguga

SEQ ID NO: 56782 - RNA, 22 nt, Homo sapiens
aagaugguauuucauuaguuuu

SEQ ID NO: 56783 - RNA, 20 nt, Homo sapiens
aagcaagcauuugcaaucau

SEQ ID NO: 56784 - RNA, 22 nt, Homo sapiens
aacagcauaguacccgugauaa

SEQ ID NO: 56785 - RNA, 22 nt, Homo sapiens
aacagcacacccgcugcuucca

SEQ ID NO: 56786 - RNA, 22 nt, Homo sapiens
aaaugcaugaauaagcucgugu

SEQ ID NO: 56787 - RNA, 22 nt, Homo sapiens
aaaugcaugaggugggaagaaa

SEQ ID NO: 56788 - RNA, 22 nt, Homo sapiens
aaaugcaccacucuggugcagg

SEQ ID NO: 56789 - RNA, 22 nt, Homo sapiens
aagaugauguucuuuuucuuag

SEQ ID NO: 56790 - RNA, 22 nt, Homo sapiens
aacauugaacuuggcacaccca

SEQ ID NO: 56791 - RNA, 21 nt, Homo sapiens
aacagugcuuaguagauguuc

SEQ ID NO: 56792 - RNA, 22 nt, Homo sapiens
aacaguguuuuggguuuucugg

SEQ ID NO: 56793 - RNA, 22 nt, Homo sapiens
aacaggguguuugcaguuucuu

SEQ ID NO: 56794 - RNA, 22 nt, Homo sapiens
auggaagaaaguuggguucuug

SEQ ID NO: 56795 - RNA, 22 nt, Homo sapiens
auggaacauaacuauuugggga

SEQ ID NO: 56796 - RNA, 22 nt, Homo sapiens
auggaacauuauagauguaaaa

SEQ ID NO: 56797 - RNA, 22 nt, Homo sapiens
auggaagaaacgauuuucugga

SEQ ID NO: 56798 - RNA, 22 nt, Homo sapiens
auggaauguggaaugguaagua

SEQ ID NO: 56799 - RNA, 22 nt, Homo sapiens
auggacauuaaagcgauguaga

SEQ ID NO: 56800 - RNA, 22 nt, Homo sapiens
auggaagucucuguuaaguuuc

SEQ ID NO: 56801 - RNA, 22 nt, Homo sapiens
auggauauuuuuugaacauaga

SEQ ID NO: 56802 - RNA, 22 nt, Homo sapiens
auggcuuucaggacguggcgag

SEQ ID NO: 56803 - RNA, 22 nt, Homo sapiens
auggcuuugggcugcucugccc

SEQ ID NO: 56804 - RNA, 22 nt, Homo sapiens
auggagaugaauaucaucuguu

SEQ ID NO: 56805 - RNA, 22 nt, Homo sapiens
auggauaugcuuccaacugccu

SEQ ID NO: 56806 - RNA, 22 nt, Homo sapiens
auggcuuuuuucuugggcacuc

SEQ ID NO: 56807 - RNA, 22 nt, Homo sapiens
auggcuuguuaugcauuaguac

SEQ ID NO: 56808 - RNA, 22 nt, Homo sapiens
auggcuuuugaccugguaggau

SEQ ID NO: 56809 - RNA, 22 nt, Homo sapiens
auggcuuuguguucagagcuga

SEQ ID NO: 56810 - RNA, 22 nt, Homo sapiens
auggcuuuuauuguguugaggu

SEQ ID NO: 56811 - RNA, 22 nt, Homo sapiens
auguaauguuaaauugcuaauu

SEQ ID NO: 56812 - RNA, 22 nt, Homo sapiens
auguaguagauauuuauggaaa

SEQ ID NO: 56813 - RNA, 22 nt, Homo sapiens
auguaugagaguuccagcugau

SEQ ID NO: 56814 - RNA, 22 nt, Homo sapiens
auguagugugauuuucacuaga

SEQ ID NO: 56815 - RNA, 22 nt, Homo sapiens
augucaaagaggaaaacuggau

SEQ ID NO: 56816 - RNA, 22 nt, Homo sapiens
augucauagaagccugugaacc

SEQ ID NO: 56817 - RNA, 22 nt, Homo sapiens
auguccaugagcacauguauca

SEQ ID NO: 56818 - RNA, 22 nt, Homo sapiens
augugacagugguuuuaagcgu

SEQ ID NO: 56819 - RNA, 22 nt, Homo sapiens
augugacugauguaaucagaca

SEQ ID NO: 56820 - RNA, 22 nt, Homo sapiens
augugaccaucucuccacuaau

SEQ ID NO: 56821 - RNA, 22 nt, Homo sapiens
augugaacaucauagaaugcac

SEQ ID NO: 56822 - RNA, 22 nt, Homo sapiens
augugaacugaauuaauucaca

SEQ ID NO: 56823 - RNA, 22 nt, Homo sapiens
augucuagagugauacugaagc

SEQ ID NO: 56824 - RNA, 22 nt, Homo sapiens
auguggcauuucucauucauuu

SEQ ID NO: 56825 - RNA, 22 nt, Homo sapiens
auuaaguaaugguuccaauaau

SEQ ID NO: 56826 - RNA, 22 nt, Homo sapiens
auuaagugcuugccagugcugg

SEQ ID NO: 56827 - RNA, 21 nt, Homo sapiens
augugcacuaugucauuuaau

SEQ ID NO: 56828 - RNA, 22 nt, Homo sapiens
augugcauaugaagcacagaca

SEQ ID NO: 56829 - RNA, 18 nt, Homo sapiens
augugcaauuuuguauuu

SEQ ID NO: 56830 - RNA, 22 nt, Homo sapiens
augugcagauguuacaaauugu

SEQ ID NO: 56831 - RNA, 22 nt, Homo sapiens
augugccauucucauggcgcuu

SEQ ID NO: 56832 - RNA, 22 nt, Homo sapiens
augagcucauugggugacuggg

SEQ ID NO: 56833 - RNA, 22 nt, Homo sapiens
augaggaaggagccuuugucug

SEQ ID NO: 56834 - RNA, 22 nt, Homo sapiens
augauuguucucacucaagaga

SEQ ID NO: 56835 - RNA, 22 nt, Homo sapiens
augcaaacaucugaagagacau

SEQ ID NO: 56836 - RNA, 22 nt, Homo sapiens
aucugcauucccauguuuauug

SEQ ID NO: 56837 - RNA, 22 nt, Homo sapiens
aucugugaaugaaguuauuuug

SEQ ID NO: 56838 - RNA, 22 nt, Homo sapiens
aucugugguuguaugcauauua

SEQ ID NO: 56839 - RNA, 22 nt, Homo sapiens
aucuuuggauacuugauauagu

SEQ ID NO: 56840 - RNA, 22 nt, Homo sapiens
augcaaggaugguuagauauau

SEQ ID NO: 56841 - RNA, 22 nt, Homo sapiens
augcaauggaaaggacaauuac

SEQ ID NO: 56842 - RNA, 19 nt, Homo sapiens
augcaaugucacaggcugc

SEQ ID NO: 56843 - RNA, 22 nt, Homo sapiens
augcaauucuagauugauagua

SEQ ID NO: 56844 - RNA, 22 nt, Homo sapiens
augcacaugcgaaaacuugugu

SEQ ID NO: 56845 - RNA, 22 nt, Homo sapiens
augcauaugucuuuauaguggc

SEQ ID NO: 56846 - RNA, 22 nt, Homo sapiens
augcacuuggcaggaugauucc

SEQ ID NO: 56847 - RNA, 22 nt, Homo sapiens
augcagugugcaacagauuaag

SEQ ID NO: 56848 - RNA, 22 nt, Homo sapiens
augcuguuuugaauucucuaga

SEQ ID NO: 56849 - RNA, 21 nt, Homo sapiens
auggaaagacugccucuucaa

SEQ ID NO: 56850 - RNA, 22 nt, Homo sapiens
auggaaagcuguuccuacacaa

SEQ ID NO: 56851 - RNA, 22 nt, Homo sapiens
augcuguuuuguagcucccucu

SEQ ID NO: 56852 - RNA, 22 nt, Homo sapiens
augccauugcacuccagccuag

SEQ ID NO: 56853 - RNA, 22 nt, Homo sapiens
augccacuguuuaugucacuua

SEQ ID NO: 56854 - RNA, 19 nt, Homo sapiens
augccacagugaggucaga

SEQ ID NO: 56855 - RNA, 22 nt, Homo sapiens
auacaugugccauguugguaug

SEQ ID NO: 56856 - RNA, 22 nt, Homo sapiens
auacaugugugagcgaagaugu

SEQ ID NO: 56857 - RNA, 22 nt, Homo sapiens
auacauguucaagggcauauau

SEQ ID NO: 56858 - RNA, 22 nt, Homo sapiens
auacauguuucauguuggugug

SEQ ID NO: 56859 - RNA, 22 nt, Homo sapiens
auacaugugcaggucagguuac

SEQ ID NO: 56860 - RNA, 22 nt, Homo sapiens
auacaugugccauggugguuug

SEQ ID NO: 56861 - RNA, 22 nt, Homo sapiens
auacaguaucuucuggcaagca

SEQ ID NO: 56862 - RNA, 22 nt, Homo sapiens
auacaguauggagggcccagcu

SEQ ID NO: 56863 - RNA, 22 nt, Homo sapiens
auaauguuuauccagaggaguu

SEQ ID NO: 56864 - RNA, 22 nt, Homo sapiens
auacaaggaaugaagagauuug

SEQ ID NO: 56865 - RNA, 22 nt, Homo sapiens
agucaaguuuuuucagagaaua

SEQ ID NO: 56866 - RNA, 22 nt, Homo sapiens
aguaucaagccacacaugguca

SEQ ID NO: 56867 - RNA, 22 nt, Homo sapiens
aguauguuuugaaaccaagaag

SEQ ID NO: 56868 - RNA, 22 nt, Homo sapiens
aguauuaggugaguguauuuca

SEQ ID NO: 56869 - RNA, 22 nt, Homo sapiens
agucaagugggguuagauaguu

SEQ ID NO: 56870 - RNA, 22 nt, Homo sapiens
auagaauguauuaguaaauuug

SEQ ID NO: 56871 - RNA, 22 nt, Homo sapiens
auagaauguaauguaccuccuu

SEQ ID NO: 56872 - RNA, 22 nt, Homo sapiens
auagaaucaucugugcacuagu

SEQ ID NO: 56873 - RNA, 22 nt, Homo sapiens
auagaagcuauguauaggggcc

SEQ ID NO: 56874 - RNA, 22 nt, Homo sapiens
auagaguuagaaagaaauguuu

SEQ ID NO: 56875 - RNA, 22 nt, Homo sapiens
auacugguuuuugucaugugga

SEQ ID NO: 56876 - RNA, 20 nt, Homo sapiens
auagaagacuagugcagcag

SEQ ID NO: 56877 - RNA, 22 nt, Homo sapiens
auacuguuuuacaucauugccu

SEQ ID NO: 56878 - RNA, 22 nt, Homo sapiens
auagcagaauuuggucaagucu

SEQ ID NO: 56879 - RNA, 21 nt, Homo sapiens
auagcacaucagauuuuauua

SEQ ID NO: 56880 - RNA, 22 nt, Homo sapiens
auagcagaagaagggacaauuc

SEQ ID NO: 56881 - RNA, 22 nt, Homo sapiens
auagugcuggaauaaauauacg

SEQ ID NO: 56882 - RNA, 22 nt, Homo sapiens
auagugcuguauuaaacauacg

SEQ ID NO: 56883 - RNA, 22 nt, Homo sapiens
auagugcugugaugaacauaca

SEQ ID NO: 56884 - RNA, 22 nt, Homo sapiens
auauagcaaugaaagagaugaa

SEQ ID NO: 56885 - RNA, 22 nt, Homo sapiens
auagugcugcaauuaacauaca

SEQ ID NO: 56886 - RNA, 22 nt, Homo sapiens
auagugcugcauuaaacauacg

SEQ ID NO: 56887 - RNA, 22 nt, Homo sapiens
aucugcaaauaaugaagauugg

SEQ ID NO: 56888 - RNA, 22 nt, Homo sapiens
aucucugagauguucugauuuu

SEQ ID NO: 56889 - RNA, 22 nt, Homo sapiens
aucuacagccagucugguuugu

SEQ ID NO: 56890 - RNA, 22 nt, Homo sapiens
auccugaagcuuuacugaauuc

SEQ ID NO: 56891 - RNA, 22 nt, Homo sapiens
auccguugcaagggaagaauga

SEQ ID NO: 56892 - RNA, 22 nt, Homo sapiens
aucagcagcaugaaaacaggcu

SEQ ID NO: 56893 - RNA, 22 nt, Homo sapiens
aucagauuccacauuuuaucag

SEQ ID NO: 56894 - RNA, 22 nt, Homo sapiens
aucagauuccagaggcagcacc

SEQ ID NO: 56895 - RNA, 22 nt, Homo sapiens
aucagcagcaugaaaagcaacu

SEQ ID NO: 56896 - RNA, 22 nt, Homo sapiens
aucagcauucccaaaugaugug

SEQ ID NO: 56897 - RNA, 22 nt, Homo sapiens
aucaucacaguuguguguaaug

SEQ ID NO: 56898 - RNA, 23 nt, Homo sapiens
aucagguuguagaauguguuugc

SEQ ID NO: 56899 - RNA, 22 nt, Homo sapiens
aucauacuguuuugauuacugu

SEQ ID NO: 56900 - RNA, 22 nt, Homo sapiens
aucauagcucacugcagccucg

SEQ ID NO: 56901 - RNA, 22 nt, Homo sapiens
auauaugcuaagugcuaauaaa

SEQ ID NO: 56902 - RNA, 22 nt, Homo sapiens
auauaugcacacgugugcauau

SEQ ID NO: 56903 - RNA, 22 nt, Homo sapiens
auaucccuguauaagugaaugu

SEQ ID NO: 56904 - RNA, 22 nt, Homo sapiens
auaucaaggccauuuucuaaau

SEQ ID NO: 56905 - RNA, 20 nt, Homo sapiens
auaugcagacacauacauac

SEQ ID NO: 56906 - RNA, 22 nt, Homo sapiens
aucacagaguuaaaacuuucuu

SEQ ID NO: 56907 - RNA, 22 nt, Homo sapiens
aucagaaucucuagugggacca

SEQ ID NO: 56908 - RNA, 22 nt, Homo sapiens
aucagaaucucuugagaguguu

SEQ ID NO: 56909 - RNA, 22 nt, Homo sapiens
aucagagugaugguuuaaguau

SEQ ID NO: 56910 - RNA, 22 nt, Homo sapiens
aucagaguggguuuuaaaagug

SEQ ID NO: 56911 - RNA, 19 nt, Homo sapiens
aucaaacugcucuuugagg

SEQ ID NO: 56912 - RNA, 22 nt, Homo sapiens
aucaaagccaugcucaguuuuc

SEQ ID NO: 56913 - RNA, 22 nt, Homo sapiens
aucaaaguaucucaauauggua

SEQ ID NO: 56914 - RNA, 22 nt, Homo sapiens
aucaaaguaggcauauguuuuu

SEQ ID NO: 56915 - RNA, 22 nt, Homo sapiens
aucaaaguuucccagaaguugu

SEQ ID NO: 56916 - RNA, 22 nt, Homo sapiens
aucaaaugcuggcagagugccu

SEQ ID NO: 56917 - RNA, 22 nt, Homo sapiens
acgagguuaggaguuaaaggcu

SEQ ID NO: 56918 - RNA, 22 nt, Homo sapiens
accuugcacugagccgagauug

SEQ ID NO: 56919 - RNA, 22 nt, Homo sapiens
acgaagacuauucaaaagguua

SEQ ID NO: 56920 - RNA, 20 nt, Homo sapiens
acuaaaucucauuuuaugca

SEQ ID NO: 56921 - RNA, 22 nt, Homo sapiens
acucagagauuagcacauguuu

SEQ ID NO: 56922 - RNA, 22 nt, Homo sapiens
acuacuucuaaguuuuggaaga

SEQ ID NO: 56923 - RNA, 23 nt, Homo sapiens
acugagcaauguuuacauacuug

SEQ ID NO: 56924 - RNA, 22 nt, Homo sapiens
acuccauuuggacucugggagg

SEQ ID NO: 56925 - RNA, 22 nt, Homo sapiens
acagugacagaaagcugauuau

SEQ ID NO: 56926 - RNA, 22 nt, Homo sapiens
acagugcuguggucaugggucu

SEQ ID NO: 56927 - RNA, 17 nt, Homo sapiens
acagugucuaugaaaug

SEQ ID NO: 56928 - RNA, 22 nt, Homo sapiens
acaguguuacuugauaguguau

SEQ ID NO: 56929 - RNA, 16 nt, Homo sapiens
accuguacagcaugug

SEQ ID NO: 56930 - RNA, 18 nt, Homo sapiens
acuggaauuaaacuuuuu

SEQ ID NO: 56931 - RNA, 22 nt, Homo sapiens
acugcauuugucccuuuugaac

SEQ ID NO: 56932 - RNA, 23 nt, Homo sapiens
acugcaauuacguuugcaccaac

SEQ ID NO: 56933 - RNA, 22 nt, Homo sapiens
acucugucuaguuguaaaauuu

SEQ ID NO: 56934 - RNA, 22 nt, Homo sapiens
acugcaauuacuguuguaccaa

SEQ ID NO: 56935 - RNA, 22 nt, Homo sapiens
aauaaaguaggaggugaggaaa

SEQ ID NO: 56936 - RNA, 22 nt, Homo sapiens
aauuaguugaaagucugcuuuu

SEQ ID NO: 56937 - RNA, 22 nt, Homo sapiens
aauuaggcuagaauguuauuaa

SEQ ID NO: 56938 - RNA, 22 nt, Homo sapiens
aauugcaccaucuagaucaaga

SEQ ID NO: 56939 - RNA, 22 nt, Homo sapiens
aauugaaugcagaugccaggga

SEQ ID NO: 56940 - RNA, 22 nt, Homo sapiens
aaguugcuuuagguaagucaau

SEQ ID NO: 56941 - RNA, 22 nt, Homo sapiens
aaguugguguaugagacagaag

SEQ ID NO: 56942 - RNA, 22 nt, Homo sapiens
aauaaagccugucucuuuagag

SEQ ID NO: 56943 - RNA, 22 nt, Homo sapiens
aauaaagcauggcuacuccaua

SEQ ID NO: 56944 - RNA, 21 nt, Homo sapiens
aauaaagcaaccuuaugccau

SEQ ID NO: 56945 - RNA, 22 nt, Homo sapiens
aaguuguuggaguuccauuguu

SEQ ID NO: 56946 - RNA, 22 nt, Homo sapiens
acaagugaauacaggauucucu

SEQ ID NO: 56947 - RNA, 20 nt, Homo sapiens
acaaaugcauucugugacau

SEQ ID NO: 56948 - RNA, 17 nt, Homo sapiens
acaaauugccagcuagg

SEQ ID NO: 56949 - RNA, 22 nt, Homo sapiens
acaaaguauggaauguuggugu

SEQ ID NO: 56950 - RNA, 22 nt, Homo sapiens
aauugcauugaauuuguagcuu

SEQ ID NO: 56951 - RNA, 22 nt, Homo sapiens
aauugcuucuguauuuuggaca

SEQ ID NO: 56952 - RNA, 23 nt, Homo sapiens
aauugcuuuugaggacuuaguug

SEQ ID NO: 56953 - RNA, 22 nt, Homo sapiens
aauugguuaagauaagaucaua

SEQ ID NO: 56954 - RNA, 22 nt, Homo sapiens
acacagugucuguguauuuaaa

SEQ ID NO: 56955 - RNA, 22 nt, Homo sapiens
acacaugugaaaaaaauguuac

SEQ ID NO: 56956 - RNA, 22 nt, Homo sapiens
acacauacacauaugguguaua

SEQ ID NO: 56957 - RNA, 22 nt, Homo sapiens
acaccuguggucccaguaacuu

SEQ ID NO: 56958 - RNA, 22 nt, Homo sapiens
acacugucucuugcugaccaug

SEQ ID NO: 56959 - RNA, 22 nt, Homo sapiens
acacuguuuuaguuauuauagc

SEQ ID NO: 56960 - RNA, 22 nt, Homo sapiens
acacuauugagguuuguuugca

SEQ ID NO: 56961 - RNA, 23 nt, Homo sapiens
acagucuaguuugaagucaggua

SEQ ID NO: 56962 - RNA, 19 nt, Homo sapiens
acaguauugugcacagguu

SEQ ID NO: 56963 - RNA, 22 nt, Homo sapiens
acaguacucugcucuuuugauu

SEQ ID NO: 56964 - RNA, 21 nt, Homo sapiens
acaguacuugagaucuuuuga

SEQ ID NO: 56965 - RNA, 20 nt, Homo sapiens
acaguagaagggauuucaaa

SEQ ID NO: 56966 - RNA, 22 nt, Homo sapiens
acaguagaaaacaauggauuug

SEQ ID NO: 56967 - RNA, 20 nt, Homo sapiens
acagcauagccuuuuaaagc

SEQ ID NO: 56968 - RNA, 22 nt, Homo sapiens
acagaacugggcuugcuuuugg

SEQ ID NO: 56969 - RNA, 22 nt, Homo sapiens
acacuuucuagacaagggaaua

SEQ ID NO: 56970 - RNA, 22 nt, Homo sapiens
acagccauuccagccaaauacu

SEQ ID NO: 56971 - RNA, 19 nt, Homo sapiens
acagauagaauguucuaca

SEQ ID NO: 56972 - RNA, 22 nt, Homo sapiens
agcagguauucgggucaugggg

SEQ ID NO: 56973 - RNA, 22 nt, Homo sapiens
agcagcuuugaucugaaugauu

SEQ ID NO: 56974 - RNA, 22 nt, Homo sapiens
agcagguguccacaauguuugc

SEQ ID NO: 56975 - RNA, 22 nt, Homo sapiens
agcaucaugcaguugcuauuca

SEQ ID NO: 56976 - RNA, 22 nt, Homo sapiens
agcaucauguuuucgagguuca

SEQ ID NO: 56977 - RNA, 22 nt, Homo sapiens
agcugauggucuuguaugaugu

SEQ ID NO: 56978 - RNA, 20 nt, Homo sapiens
agcaucguuguguuauagcc

SEQ ID NO: 56979 - RNA, 22 nt, Homo sapiens
agagacauugcuccaacucacc

SEQ ID NO: 56980 - RNA, 19 nt, Homo sapiens
agagacucauuguagcauu

SEQ ID NO: 56981 - RNA, 22 nt, Homo sapiens
agacaagauggcuugagguuca

SEQ ID NO: 56982 - RNA, 22 nt, Homo sapiens
agaauguauauucuguaguugu

SEQ ID NO: 56983 - RNA, 19 nt, Homo sapiens
agaaucuaaauuauuucug

SEQ ID NO: 56984 - RNA, 22 nt, Homo sapiens
acuguauagauggaguugauuu

SEQ ID NO: 56985 - RNA, 22 nt, Homo sapiens
acuguguguuugucuagcacag

SEQ ID NO: 56986 - RNA, 22 nt, Homo sapiens
acugguuguuuaacugaauuga

SEQ ID NO: 56987 - RNA, 22 nt, Homo sapiens
acuggcuuuugagaaaaacacu

SEQ ID NO: 56988 - RNA, 22 nt, Homo sapiens
aguacaauguugaguagaagug

SEQ ID NO: 56989 - RNA, 22 nt, Homo sapiens
aguacaucuggcuggauagaua

SEQ ID NO: 56990 - RNA, 22 nt, Homo sapiens
aguaaauuucugugcuuucaua

SEQ ID NO: 56991 - RNA, 22 nt, Homo sapiens
agguuuucagccccagccuagg

SEQ ID NO: 56992 - RNA, 22 nt, Homo sapiens
aggugcuugaaucuaugagcuc

SEQ ID NO: 56993 - RNA, 22 nt, Homo sapiens
aggugcugagcagagaauccug

SEQ ID NO: 56994 - RNA, 22 nt, Homo sapiens
agguauguaugucuguacagcg

SEQ ID NO: 56995 - RNA, 22 nt, Homo sapiens
aaauuguccuacugguuugagu

SEQ ID NO: 56996 - RNA, 22 nt, Homo sapiens
aacaccaucccuuugaugcuuu

SEQ ID NO: 56997 - RNA, 23 nt, Homo sapiens
aaauuugccuauuauuccuaugg

SEQ ID NO: 56998 - RNA, 22 nt, Homo sapiens
aaauugcuuuugaagacuuagu

SEQ ID NO: 56999 - RNA, 22 nt, Homo sapiens
aaaugguguuaguagaucuuua

SEQ ID NO: 57000 - RNA, 22 nt, Homo sapiens
aaauugcaaugcgaggcagagg

SEQ ID NO: 57001 - RNA, 22 nt, Homo sapiens
aaauucauuucagcucugggua

SEQ ID NO: 57002 - RNA, 22 nt, Homo sapiens
aggaagugucuucuuuuaggca

SEQ ID NO: 57003 - RNA, 22 nt, Homo sapiens
aggaauuuaauguaugauaaua

SEQ ID NO: 57004 - RNA, 22 nt, Homo sapiens
aggcaugauggcuccagaucau

SEQ ID NO: 57005 - RNA, 22 nt, Homo sapiens
agcugcauucguaucauauugu

SEQ ID NO: 57006 - RNA, 22 nt, Homo sapiens
agcuggcuguagcugcaagucu

SEQ ID NO: 57007 - RNA, 19 nt, Homo sapiens
agcuuuggcuaacuuucuc

SEQ ID NO: 57008 - RNA, 22 nt, Homo sapiens
agcuuuuugggaggccuuagga

SEQ ID NO: 57009 - RNA, 22 nt, Homo sapiens
uaugcacacacguguuuaugug

SEQ ID NO: 57010 - RNA, 20 nt, Homo sapiens
uaugacaaagccuagugagu

SEQ ID NO: 57011 - RNA, 22 nt, Homo sapiens
uaugaagccaggauuuauuauu

SEQ ID NO: 57012 - RNA, 22 nt, Homo sapiens
uaucauaguuuggacuuucauu

SEQ ID NO: 57013 - RNA, 22 nt, Homo sapiens
uaucagcagagucauacuucaa

SEQ ID NO: 57014 - RNA, 22 nt, Homo sapiens
uaugagcacauauguaucuaug

SEQ ID NO: 57015 - RNA, 22 nt, Homo sapiens
uaugacuuuugaauacagaugg

SEQ ID NO: 57016 - RNA, 22 nt, Homo sapiens
uaugaggaguauaacccgguga

SEQ ID NO: 57017 - RNA, 22 nt, Homo sapiens
uaugaugcuguuuagaaucucu

SEQ ID NO: 57018 - RNA, 22 nt, Homo sapiens
uauuccuuuugcauuuccacau

SEQ ID NO: 57019 - RNA, 22 nt, Homo sapiens
uauugaacgugggauauugaag

SEQ ID NO: 57020 - RNA, 22 nt, Homo sapiens
uauugaauuugagcugucucuu

SEQ ID NO: 57021 - RNA, 22 nt, Homo sapiens
uauuccacuggcacugcauuug

SEQ ID NO: 57022 - RNA, 22 nt, Homo sapiens
uauggcguaugaauuauaucuc

SEQ ID NO: 57023 - RNA, 22 nt, Homo sapiens
uaugggauuucauuaagugucu

SEQ ID NO: 57024 - RNA, 22 nt, Homo sapiens
uauuauuguccuucuauaccca

SEQ ID NO: 57025 - RNA, 22 nt, Homo sapiens
uauucaagccaaauucaagcca

SEQ ID NO: 57026 - RNA, 22 nt, Homo sapiens
uauuaguuguaugauucccaag

SEQ ID NO: 57027 - RNA, 22 nt, Homo sapiens
uauuaguuuucuguggauuaca

SEQ ID NO: 57028 - RNA, 22 nt, Homo sapiens
uauugauuuucaguguucagcu

SEQ ID NO: 57029 - RNA, 22 nt, Homo sapiens
uauugcuuuugauucaaggcag

SEQ ID NO: 57030 - RNA, 22 nt, Homo sapiens
uauugucaccaucccuguuuua

SEQ ID NO: 57031 - RNA, 22 nt, Homo sapiens
uauugcuuuuaacccaaucucu

SEQ ID NO: 57032 - RNA, 22 nt, Homo sapiens
uauuguuuuucccaggagucua

SEQ ID NO: 57033 - RNA, 22 nt, Homo sapiens
uauuugauugacuuuagcagga

SEQ ID NO: 57034 - RNA, 22 nt, Homo sapiens
uauuguuaaagauguuaaugau

SEQ ID NO: 57035 - RNA, 22 nt, Homo sapiens
uaucacaguagaacucuuucca

SEQ ID NO: 57036 - RNA, 22 nt, Homo sapiens
uaucacagcgggguguacaccc

SEQ ID NO: 57037 - RNA, 22 nt, Homo sapiens
uaucacagcaaggacccauuau

SEQ ID NO: 57038 - RNA, 22 nt, Homo sapiens
uaucacagcauugucuauaaua

SEQ ID NO: 57039 - RNA, 21 nt, Homo sapiens
uauaguaguaugauuuacaau

SEQ ID NO: 57040 - RNA, 20 nt, Homo sapiens
uaucacauggggagaaaccu

SEQ ID NO: 57041 - RNA, 22 nt, Homo sapiens
uaucacaguaucuagcacagug

SEQ ID NO: 57042 - RNA, 21 nt, Homo sapiens
uaucacauuggugauuaaguu

SEQ ID NO: 57043 - RNA, 22 nt, Homo sapiens
uaucaccauguccguuuuaaaa

SEQ ID NO: 57044 - RNA, 22 nt, Homo sapiens
uaucagaucccaauuucuggcc

SEQ ID NO: 57045 - RNA, 22 nt, Homo sapiens
uaucagauugcugccaucugcu

SEQ ID NO: 57046 - RNA, 22 nt, Homo sapiens
uauaaccauuucuucucucuuc

SEQ ID NO: 57047 - RNA, 18 nt, Homo sapiens
uaguacuguucucaugau

SEQ ID NO: 57048 - RNA, 22 nt, Homo sapiens
uauagcaaugugccacucucug

SEQ ID NO: 57049 - RNA, 22 nt, Homo sapiens
uaguaaacauaguucuuuugcu

SEQ ID NO: 57050 - RNA, 22 nt, Homo sapiens
uaguaacacauugaacgaucgc

SEQ ID NO: 57051 - RNA, 22 nt, Homo sapiens
uaguaccauucccaaaccaacu

SEQ ID NO: 57052 - RNA, 23 nt, Homo sapiens
uagguuauuugguaaauauaugu

SEQ ID NO: 57053 - RNA, 22 nt, Homo sapiens
uagguagguggaaaaguaauug

SEQ ID NO: 57054 - RNA, 22 nt, Homo sapiens
uagguagugugugcaugagagg

SEQ ID NO: 57055 - RNA, 22 nt, Homo sapiens
uagcaguaucccaccaucuggu

SEQ ID NO: 57056 - RNA, 22 nt, Homo sapiens
uagguagauuuaaagauuuucu

SEQ ID NO: 57057 - RNA, 22 nt, Homo sapiens
uagcagcauuuuuguagaguau

SEQ ID NO: 57058 - RNA, 22 nt, Homo sapiens
uagcagaauauaccucuuacuu

SEQ ID NO: 57059 - RNA, 22 nt, Homo sapiens
uagcagcagugguguauuuaga

SEQ ID NO: 57060 - RNA, 22 nt, Homo sapiens
uacaguauuaugagugauugaa

SEQ ID NO: 57061 - RNA, 22 nt, Homo sapiens
uacaguaauguuaaucuuugug

SEQ ID NO: 57062 - RNA, 22 nt, Homo sapiens
uacaucagccugaaagagcucg

SEQ ID NO: 57063 - RNA, 22 nt, Homo sapiens
uacagucuggaggccuguguug

SEQ ID NO: 57064 - RNA, 22 nt, Homo sapiens
uacaguggugugaucucagcuc

SEQ ID NO: 57065 - RNA, 22 nt, Homo sapiens
uacaaguaauaagggaagaauu

SEQ ID NO: 57066 - RNA, 22 nt, Homo sapiens
uacaaguauuuuuauuagugcc

SEQ ID NO: 57067 - RNA, 22 nt, Homo sapiens
uacaauagugacaaaucagcau

SEQ ID NO: 57068 - RNA, 22 nt, Homo sapiens
uacaccaauuuaaucaaaagca

SEQ ID NO: 57069 - RNA, 22 nt, Homo sapiens
uacagaauugcagguguggcag

SEQ ID NO: 57070 - RNA, 20 nt, Homo sapiens
uacacguguagcauucucua

SEQ ID NO: 57071 - RNA, 18 nt, Homo sapiens
uacagaacuggaguagaa

SEQ ID NO: 57072 - RNA, 23 nt, Homo sapiens
uagaauguuuuuccauguuucuu

SEQ ID NO: 57073 - RNA, 22 nt, Homo sapiens
uacuagaaccuuauucagagug

SEQ ID NO: 57074 - RNA, 22 nt, Homo sapiens
uacguuaucagguaugcaagag

SEQ ID NO: 57075 - RNA, 22 nt, Homo sapiens
uacaugcaugggcaugugugca

SEQ ID NO: 57076 - RNA, 22 nt, Homo sapiens
uagagugcugucaaagacuugu

SEQ ID NO: 57077 - RNA, 22 nt, Homo sapiens
uagagcuugacacuuuccaugg

SEQ ID NO: 57078 - RNA, 22 nt, Homo sapiens
uagacacuagauaugugacuga

SEQ ID NO: 57079 - RNA, 22 nt, Homo sapiens
uagacacugcauauuuuuuuaa

SEQ ID NO: 57080 - RNA, 22 nt, Homo sapiens
uagaccaauuggcauauaguaa

SEQ ID NO: 57081 - RNA, 22 nt, Homo sapiens
uagagaucuuauauuuuaugac

SEQ ID NO: 57082 - RNA, 22 nt, Homo sapiens
uagagauaucaauuucauggug

SEQ ID NO: 57083 - RNA, 22 nt, Homo sapiens
uaauagagucauuauuauuguu

SEQ ID NO: 57084 - RNA, 22 nt, Homo sapiens
uaaguuguugacauuaggggaa

SEQ ID NO: 57085 - RNA, 22 nt, Homo sapiens
uaauagcaguguuacuaggacu

SEQ ID NO: 57086 - RNA, 22 nt, Homo sapiens
uaauauguuuugaaaucaggaa

SEQ ID NO: 57087 - RNA, 22 nt, Homo sapiens
uaaucucagcugagcugagauu

SEQ ID NO: 57088 - RNA, 22 nt, Homo sapiens
uaauaguuucagaaguuguuuu

SEQ ID NO: 57089 - RNA, 22 nt, Homo sapiens
uaaguguaaugucugaaguuug

SEQ ID NO: 57090 - RNA, 23 nt, Homo sapiens
uaaguucaucucuaauaggugga

SEQ ID NO: 57091 - RNA, 22 nt, Homo sapiens
uaauacuagugaauagcaggau

SEQ ID NO: 57092 - RNA, 22 nt, Homo sapiens
uaauacucuucucauuuuacag

SEQ ID NO: 57093 - RNA, 22 nt, Homo sapiens
uaauaauguuaggcuuacucaa

SEQ ID NO: 57094 - RNA, 21 nt, Homo sapiens
uaauaaugucucagacaccua

SEQ ID NO: 57095 - RNA, 20 nt, Homo sapiens
uaaguuguauuugucaugaa

SEQ ID NO: 57096 - RNA, 22 nt, Homo sapiens
uacaaaucuagguuuguuacug

SEQ ID NO: 57097 - RNA, 22 nt, Homo sapiens
uacaaaguaacaguuccuguau

SEQ ID NO: 57098 - RNA, 22 nt, Homo sapiens
uacaaagcuuucugcaaaucau

SEQ ID NO: 57099 - RNA, 22 nt, Homo sapiens
uaaugugcuucucuaccauagg

SEQ ID NO: 57100 - RNA, 22 nt, Homo sapiens
uaaugcuguggucugguuuaaa

SEQ ID NO: 57101 - RNA, 22 nt, Homo sapiens
uaaugcaucagugguaguucuu

SEQ ID NO: 57102 - RNA, 22 nt, Homo sapiens
uaaugcaucaugguuggcaaac

SEQ ID NO: 57103 - RNA, 22 nt, Homo sapiens
guuugcagaucaugaagaaccc

SEQ ID NO: 57104 - RNA, 22 nt, Homo sapiens
uaaguaaaugaaagguugauuu

SEQ ID NO: 57105 - RNA, 22 nt, Homo sapiens
guugugcuuaagccuauugauu

SEQ ID NO: 57106 - RNA, 22 nt, Homo sapiens
guuguacuaccucucguauuag

SEQ ID NO: 57107 - RNA, 22 nt, Homo sapiens
uaaguagcugggaguacaggca

SEQ ID NO: 57108 - RNA, 22 nt, Homo sapiens
uaaguauuaugugcugcauuuu

SEQ ID NO: 57109 - RNA, 22 nt, Homo sapiens
uaaguaauugugguuuuugcca

SEQ ID NO: 57110 - RNA, 22 nt, Homo sapiens
uaaguacaugcuagauggaaug

SEQ ID NO: 57111 - RNA, 20 nt, Homo sapiens
uaagugcuugaugaaugaac

SEQ ID NO: 57112 - RNA, 22 nt, Homo sapiens
uaagugaauuucacuacugagu

SEQ ID NO: 57113 - RNA, 22 nt, Homo sapiens
uaagucguggaugauucuucgg

SEQ ID NO: 57114 - RNA, 22 nt, Homo sapiens
uaagugaaggaaguguguuuac

SEQ ID NO: 57115 - RNA, 22 nt, Homo sapiens
gucauggacaguuugcuaauug

SEQ ID NO: 57116 - RNA, 22 nt, Homo sapiens
gucauggaacaacuuaaaguca

SEQ ID NO: 57117 - RNA, 22 nt, Homo sapiens
guccagagaagucauuacuuca

SEQ ID NO: 57118 - RNA, 22 nt, Homo sapiens
guccaguacucuuuccugaaaa

SEQ ID NO: 57119 - RNA, 18 nt, Homo sapiens
guccauuuguugguacac

SEQ ID NO: 57120 - RNA, 22 nt, Homo sapiens
gucauugucaauugacaauugu

SEQ ID NO: 57121 - RNA, 22 nt, Homo sapiens
guccaagacuaggaguuggcag

SEQ ID NO: 57122 - RNA, 22 nt, Homo sapiens
guccuguuuuuaagguucauag

SEQ ID NO: 57123 - RNA, 22 nt, Homo sapiens
gucccagagauauugugucuuu

SEQ ID NO: 57124 - RNA, 22 nt, Homo sapiens
guccauuuguuuccagagcacu

SEQ ID NO: 57125 - RNA, 22 nt, Homo sapiens
gugagauuagcugagauccuug

SEQ ID NO: 57126 - RNA, 22 nt, Homo sapiens
gugagauuaguucuggaccugg

SEQ ID NO: 57127 - RNA, 22 nt, Homo sapiens
gugcacaucgugcagguuuguu

SEQ ID NO: 57128 - RNA, 22 nt, Homo sapiens
gugcacauuguuuaugucuguu

SEQ ID NO: 57129 - RNA, 22 nt, Homo sapiens
gugcacaaaucuuaaauguaca

SEQ ID NO: 57130 - RNA, 22 nt, Homo sapiens
gugcaguguuugcauggaauca

SEQ ID NO: 57131 - RNA, 22 nt, Homo sapiens
gugauuguuaaacugccucucu

SEQ ID NO: 57132 - RNA, 22 nt, Homo sapiens
gugcaacaucccuccauaauuu

SEQ ID NO: 57133 - RNA, 22 nt, Homo sapiens
gugcaaacuccaggucucuuca

SEQ ID NO: 57134 - RNA, 22 nt, Homo sapiens
gugcaauguuaauuacuugacu

SEQ ID NO: 57135 - RNA, 22 nt, Homo sapiens
gugcaaugagaaggggcucugg

SEQ ID NO: 57136 - RNA, 22 nt, Homo sapiens
gugcaaugucaggagaugcagc

SEQ ID NO: 57137 - RNA, 22 nt, Homo sapiens
gugcaagagugauugcaguuuu

SEQ ID NO: 57138 - RNA, 22 nt, Homo sapiens
gugcaagagugacugcaguuuu

SEQ ID NO: 57139 - RNA, 22 nt, Homo sapiens
gugaggaaggaaaccugcuagc

SEQ ID NO: 57140 - RNA, 22 nt, Homo sapiens
gugaggcacugcugcuuuccag

SEQ ID NO: 57141 - RNA, 22 nt, Homo sapiens
guggcauuucccaaaguauucu

SEQ ID NO: 57142 - RNA, 22 nt, Homo sapiens
guggcuauuguucccugguugc

SEQ ID NO: 57143 - RNA, 22 nt, Homo sapiens
guguaauaaucguggacuaugu

SEQ ID NO: 57144 - RNA, 22 nt, Homo sapiens
gugcuauguuauccagcaagau

SEQ ID NO: 57145 - RNA, 23 nt, Homo sapiens
gugcaugagucuuuauaguagca

SEQ ID NO: 57146 - RNA, 22 nt, Homo sapiens
guggcagagucagagggaaaug

SEQ ID NO: 57147 - RNA, 21 nt, Homo sapiens
gugcuuguagccucacuucug

SEQ ID NO: 57148 - RNA, 22 nt, Homo sapiens
guuauguuaaauuguuguaugc

SEQ ID NO: 57149 - RNA, 22 nt, Homo sapiens
guuauuaguugauauuaaguuc

SEQ ID NO: 57150 - RNA, 22 nt, Homo sapiens
guuggaauuaaaaggcaaguau

SEQ ID NO: 57151 - RNA, 22 nt, Homo sapiens
guucaucaggcuuucucuagag

SEQ ID NO: 57152 - RNA, 22 nt, Homo sapiens
guucaguuuuaaagggaaauug

SEQ ID NO: 57153 - RNA, 22 nt, Homo sapiens
guucacucuggagaauauugac

SEQ ID NO: 57154 - RNA, 22 nt, Homo sapiens
guucagcaggggcuucaauggu

SEQ ID NO: 57155 - RNA, 22 nt, Homo sapiens
guuaaagacauccacauaggag

SEQ ID NO: 57156 - RNA, 22 nt, Homo sapiens
guuaagaaguguaacuuaaguu

SEQ ID NO: 57157 - RNA, 22 nt, Homo sapiens
guguuugauugcaaauaaucua

SEQ ID NO: 57158 - RNA, 22 nt, Homo sapiens
guguaugugagaaugcucaugu

SEQ ID NO: 57159 - RNA, 21 nt, Homo sapiens
gugucacagacaugacagaug

SEQ ID NO: 57160 - RNA, 22 nt, Homo sapiens
gugucaguggggagugaucuuc

SEQ ID NO: 57161 - RNA, 22 nt, Homo sapiens
gggaaauguaaagucauaagau

SEQ ID NO: 57162 - RNA, 22 nt, Homo sapiens
gggaucaacuuauacuaaaauu

SEQ ID NO: 57163 - RNA, 22 nt, Homo sapiens
gggaugaagaagaauaguucgu

SEQ ID NO: 57164 - RNA, 22 nt, Homo sapiens
gguauuuaaaguaccugucugc

SEQ ID NO: 57165 - RNA, 22 nt, Homo sapiens
gguauuauuugccuuuuacuga

SEQ ID NO: 57166 - RNA, 22 nt, Homo sapiens
gguaucuuggagagagaaguga

SEQ ID NO: 57167 - RNA, 22 nt, Homo sapiens
ggaauaguauaaauaccacaaa

SEQ ID NO: 57168 - RNA, 22 nt, Homo sapiens
ggaauguuaaagacuacacuga

SEQ ID NO: 57169 - RNA, 22 nt, Homo sapiens
ggaauggaacaaagucuugaaa

SEQ ID NO: 57170 - RNA, 22 nt, Homo sapiens
ggaaauguaaacaauggggcua

SEQ ID NO: 57171 - RNA, 22 nt, Homo sapiens
ggaaauguuuagcauccacuuu

SEQ ID NO: 57172 - RNA, 23 nt, Homo sapiens
ggcauuguggcucacaucuguaa

SEQ ID NO: 57173 - RNA, 22 nt, Homo sapiens
ggcucguguuuucuguccaguu

SEQ ID NO: 57174 - RNA, 22 nt, Homo sapiens
ggcucagugaucuguuucugua

SEQ ID NO: 57175 - RNA, 22 nt, Homo sapiens
guauuuuguuagggugugguau

SEQ ID NO: 57176 - RNA, 22 nt, Homo sapiens
guauuagguuggugcaaaauug

SEQ ID NO: 57177 - RNA, 22 nt, Homo sapiens
guauuugauuauagcaugcuua

SEQ ID NO: 57178 - RNA, 19 nt, Homo sapiens
guauuugacuuucuuguuu

SEQ ID NO: 57179 - RNA, 18 nt, Homo sapiens
guauuccagccugaguga

SEQ ID NO: 57180 - RNA, 22 nt, Homo sapiens
gucauaugcucggaaaauguua

SEQ ID NO: 57181 - RNA, 22 nt, Homo sapiens
gucaucaggacgggucaucugc

SEQ ID NO: 57182 - RNA, 22 nt, Homo sapiens
gucaucaucaguccucugugca

SEQ ID NO: 57183 - RNA, 22 nt, Homo sapiens
gucaguuugguuaaucauucca

SEQ ID NO: 57184 - RNA, 22 nt, Homo sapiens
gucaguggauacugucucuguc

SEQ ID NO: 57185 - RNA, 22 nt, Homo sapiens
guagaauguauguauaacgcaa

SEQ ID NO: 57186 - RNA, 22 nt, Homo sapiens
guaugcaagugauaugacauau

SEQ ID NO: 57187 - RNA, 22 nt, Homo sapiens
guauggaagucaguuuguuggc

SEQ ID NO: 57188 - RNA, 22 nt, Homo sapiens
guauuagguuggugcaaaauaa

SEQ ID NO: 57189 - RNA, 22 nt, Homo sapiens
guauuagaugguauuugaagau

SEQ ID NO: 57190 - RNA, 22 nt, Homo sapiens
guaugucuuuauagcagugugg

SEQ ID NO: 57191 - RNA, 22 nt, Homo sapiens
guacaugugcacagugugcagg

SEQ ID NO: 57192 - RNA, 22 nt, Homo sapiens
guagaaaguuugcugucacaug

SEQ ID NO: 57193 - RNA, 22 nt, Homo sapiens
gguguguaaauuacuuaucucu

SEQ ID NO: 57194 - RNA, 17 nt, Homo sapiens
guacacuucuucuguga

SEQ ID NO: 57195 - RNA, 22 nt, Homo sapiens
guaaaucucuguuuucauggac

SEQ ID NO: 57196 - RNA, 22 nt, Homo sapiens
guacacauacauauaugugugu

SEQ ID NO: 57197 - RNA, 22 nt, Homo sapiens
cuugauagugguaaucauuuuu

SEQ ID NO: 57198 - RNA, 18 nt, Homo sapiens
cuugucaaaucuuuccuc

SEQ ID NO: 57199 - RNA, 22 nt, Homo sapiens
cuucucagugcucaucuuauuu

SEQ ID NO: 57200 - RNA, 22 nt, Homo sapiens
cuugacaucugucaguuccuca

SEQ ID NO: 57201 - RNA, 22 nt, Homo sapiens
cuucagcaauauauccccuggg

SEQ ID NO: 57202 - RNA, 18 nt, Homo sapiens
cuucauugcuguuuugcu

SEQ ID NO: 57203 - RNA, 22 nt, Homo sapiens
cugauugucaucaauauuauua

SEQ ID NO: 57204 - RNA, 21 nt, Homo sapiens
cugcaaaugcugcugccugau

SEQ ID NO: 57205 - RNA, 22 nt, Homo sapiens
cugcaauggagaaagugagacu

SEQ ID NO: 57206 - RNA, 22 nt, Homo sapiens
cuguuugaggguuugcuuucag

SEQ ID NO: 57207 - RNA, 19 nt, Homo sapiens
cuguuguacuccaggcauu

SEQ ID NO: 57208 - RNA, 18 nt, Homo sapiens
cuuaacauugggaugaua

SEQ ID NO: 57209 - RNA, 22 nt, Homo sapiens
cuguuuguuuaggguacucaga

SEQ ID NO: 57210 - RNA, 20 nt, Homo sapiens
cuuaucaguggcaaguauaa

SEQ ID NO: 57211 - RNA, 22 nt, Homo sapiens
cuuagcaaugucguguacucac

SEQ ID NO: 57212 - RNA, 22 nt, Homo sapiens
cuuaaguaguuguggaaugaau

SEQ ID NO: 57213 - RNA, 22 nt, Homo sapiens
cuucaagucuuuggauaauuag

SEQ ID NO: 57214 - RNA, 22 nt, Homo sapiens
gaagauucaaccaaaccagaac

SEQ ID NO: 57215 - RNA, 23 nt, Homo sapiens
gaaguauagcaugcacauggaaa

SEQ ID NO: 57216 - RNA, 22 nt, Homo sapiens
gaauacugacuauuucaucugg

SEQ ID NO: 57217 - RNA, 22 nt, Homo sapiens
gaauaaacuagagaggacugag

SEQ ID NO: 57218 - RNA, 22 nt, Homo sapiens
gaagaaguacaagacaaauuuu

SEQ ID NO: 57219 - RNA, 22 nt, Homo sapiens
gaacuguaaagaaauucuaagg

SEQ ID NO: 57220 - RNA, 22 nt, Homo sapiens
cuuugauuauaaaaggguguuu

SEQ ID NO: 57221 - RNA, 22 nt, Homo sapiens
cuuugaugagaaaauacuuugu

SEQ ID NO: 57222 - RNA, 22 nt, Homo sapiens
cuuucacacuguuggugggaau

SEQ ID NO: 57223 - RNA, 17 nt, Homo sapiens
cuuguugugguaguuug

SEQ ID NO: 57224 - RNA, 22 nt, Homo sapiens
cuuuacaguuggacucacgagg

SEQ ID NO: 57225 - RNA, 22 nt, Homo sapiens
cuuguguuacauauuuaagaga

SEQ ID NO: 57226 - RNA, 18 nt, Homo sapiens
cuuugcagcuuccagagg

SEQ ID NO: 57227 - RNA, 22 nt, Homo sapiens
cuuugcuaauccaacccucauc

SEQ ID NO: 57228 - RNA, 23 nt, Homo sapiens
cuuugguaggaaauuugaauuau

SEQ ID NO: 57229 - RNA, 22 nt, Homo sapiens
cuuuggugagggauaaauuuca

SEQ ID NO: 57230 - RNA, 21 nt, Homo sapiens
cuuugguagaguuuuuagggu

SEQ ID NO: 57231 - RNA, 22 nt, Homo sapiens
gaauagugcugcaagaaacaua

SEQ ID NO: 57232 - RNA, 17 nt, Homo sapiens
gaaguguuucuucauga

SEQ ID NO: 57233 - RNA, 22 nt, Homo sapiens
gaaucaauugaucuaugugucu

SEQ ID NO: 57234 - RNA, 22 nt, Homo sapiens
gaaugcaugaggggaucagaug

SEQ ID NO: 57235 - RNA, 22 nt, Homo sapiens
gaaucauuggguugauucaaga

SEQ ID NO: 57236 - RNA, 22 nt, Homo sapiens
gaauugcacaaaaacugcuugu

SEQ ID NO: 57237 - RNA, 22 nt, Homo sapiens
gagacauguuugcuuaucugag

SEQ ID NO: 57238 - RNA, 22 nt, Homo sapiens
gagaugauuugccccauguauu

SEQ ID NO: 57239 - RNA, 22 nt, Homo sapiens
gagguaaguaagaauggcaagc

SEQ ID NO: 57240 - RNA, 22 nt, Homo sapiens
gagaucuuggccaaguuucuua

SEQ ID NO: 57241 - RNA, 22 nt, Homo sapiens
gagauggagucuuuuucuguca

SEQ ID NO: 57242 - RNA, 22 nt, Homo sapiens
gagauggaguuucacuucgcuc

SEQ ID NO: 57243 - RNA, 22 nt, Homo sapiens
gagaugaaguuaaggaucuuua

SEQ ID NO: 57244 - RNA, 22 nt, Homo sapiens
gagauaaauaggucacaguucu

SEQ ID NO: 57245 - RNA, 22 nt, Homo sapiens
gagauacacccagugcagaggc

SEQ ID NO: 57246 - RNA, 22 nt, Homo sapiens
gagagugcuuuggguguaggcc

SEQ ID NO: 57247 - RNA, 22 nt, Homo sapiens
gagauaguguggguacagcuau

SEQ ID NO: 57248 - RNA, 22 nt, Homo sapiens
gagauauucugguuuacuaaau

SEQ ID NO: 57249 - RNA, 22 nt, Homo sapiens
gagauauuauuucccuuucaca

SEQ ID NO: 57250 - RNA, 22 nt, Homo sapiens
gagauauuuagaaauguguucu

SEQ ID NO: 57251 - RNA, 22 nt, Homo sapiens
gagaucaaguauucuccacuaa

SEQ ID NO: 57252 - RNA, 19 nt, Homo sapiens
gaucuguugaucaaugugu

SEQ ID NO: 57253 - RNA, 22 nt, Homo sapiens
gaucaguuucuggagauacgua

SEQ ID NO: 57254 - RNA, 22 nt, Homo sapiens
gaucagauggcuguuggugugu

SEQ ID NO: 57255 - RNA, 22 nt, Homo sapiens
gaugagaugagcauuugaauug

SEQ ID NO: 57256 - RNA, 22 nt, Homo sapiens
gaugacacugggucaaaucuca

SEQ ID NO: 57257 - RNA, 22 nt, Homo sapiens
gaugagguaguguaccuagucu

SEQ ID NO: 57258 - RNA, 22 nt, Homo sapiens
gauaguugugagaacucuuacu

SEQ ID NO: 57259 - RNA, 22 nt, Homo sapiens
gaguauuuuacaucguguaauu

SEQ ID NO: 57260 - RNA, 22 nt, Homo sapiens
gauauguguaucuauguacaug

SEQ ID NO: 57261 - RNA, 22 nt, Homo sapiens
gauauguaguaguugaaaaaga

SEQ ID NO: 57262 - RNA, 22 nt, Homo sapiens
gaucagagugaaccuuguuaug

SEQ ID NO: 57263 - RNA, 22 nt, Homo sapiens
gauauguuagggggagaaguua

SEQ ID NO: 57264 - RNA, 22 nt, Homo sapiens
gauauguucugagaaaugcauu

SEQ ID NO: 57265 - RNA, 22 nt, Homo sapiens
gauauguuucuucaauaccuag

SEQ ID NO: 57266 - RNA, 22 nt, Homo sapiens
gauauuacuuccaauauugcaa

SEQ ID NO: 57267 - RNA, 22 nt, Homo sapiens
gcuguaguugaggauuuuaaga

SEQ ID NO: 57268 - RNA, 22 nt, Homo sapiens
gcuguauuguugaaggaaaugu

SEQ ID NO: 57269 - RNA, 22 nt, Homo sapiens
gcugcuguuauucaucagaacu

SEQ ID NO: 57270 - RNA, 20 nt, Homo sapiens
gcauaugucuuuauagcaga

SEQ ID NO: 57271 - RNA, 22 nt, Homo sapiens
gccauggugucuuauuuuugug

SEQ ID NO: 57272 - RNA, 22 nt, Homo sapiens
gauuugguguucuggcucaaga

SEQ ID NO: 57273 - RNA, 22 nt, Homo sapiens
gcaaaguaauuguuguuuuugc

SEQ ID NO: 57274 - RNA, 22 nt, Homo sapiens
gcaaaguguuuuuaggaagucu

SEQ ID NO: 57275 - RNA, 20 nt, Homo sapiens
gcaaaguuuagcucccacua

SEQ ID NO: 57276 - RNA, 22 nt, Homo sapiens
gauugcaauuuaggugagagag

SEQ ID NO: 57277 - RNA, 22 nt, Homo sapiens
gauuccauugcgaauuuucaga

SEQ ID NO: 57278 - RNA, 22 nt, Homo sapiens
gauuguguucauaggcauguua

SEQ ID NO: 57279 - RNA, 22 nt, Homo sapiens
gaugaucaugaccuacagaugg

SEQ ID NO: 57280 - RNA, 22 nt, Homo sapiens
gaugcagcuaggauuugugaca

SEQ ID NO: 57281 - RNA, 19 nt, Homo sapiens
gaugcaaugcacugagguc

SEQ ID NO: 57282 - RNA, 20 nt, Homo sapiens
gcagcaccauauuucuaaga

SEQ ID NO: 57283 - RNA, 22 nt, Homo sapiens
gcaagaaucugggaguaaaauu

SEQ ID NO: 57284 - RNA, 22 nt, Homo sapiens
gcagaucucuucauuucucuua

SEQ ID NO: 57285 - RNA, 22 nt, Homo sapiens
gcaggaauuucucugcagaccc

SEQ ID NO: 57286 - RNA, 22 nt, Homo sapiens
gcagucacagggagauggugac

SEQ ID NO: 57287 - RNA, 22 nt, Homo sapiens
ccccggguggauguacauguga

SEQ ID NO: 57288 - RNA, 22 nt, Homo sapiens
ccauugaacaugaaggaaugug

SEQ ID NO: 57289 - RNA, 18 nt, Homo sapiens
cccagugacuuauggccu

SEQ ID NO: 57290 - RNA, 22 nt, Homo sapiens
caucacuguugguacaaguaau

SEQ ID NO: 57291 - RNA, 22 nt, Homo sapiens
caucacaugcuuauuuuccuca

SEQ ID NO: 57292 - RNA, 22 nt, Homo sapiens
cauuuugcaguuucugucucca

SEQ ID NO: 57293 - RNA, 21 nt, Homo sapiens
caucacauuacucaaaguccu

SEQ ID NO: 57294 - RNA, 22 nt, Homo sapiens
cauaugguuuuauguucuucau

SEQ ID NO: 57295 - RNA, 22 nt, Homo sapiens
caucaaaguggagggaaggacc

SEQ ID NO: 57296 - RNA, 21 nt, Homo sapiens
caucaaauugucauggugggu

SEQ ID NO: 57297 - RNA, 22 nt, Homo sapiens
ccagauguuuucauucagcaag

SEQ ID NO: 57298 - RNA, 20 nt, Homo sapiens
ccaucaguccucucuuguuc

SEQ ID NO: 57299 - RNA, 22 nt, Homo sapiens
ccaaggcacugauucuguacuc

SEQ ID NO: 57300 - RNA, 22 nt, Homo sapiens
cauuuugguuaaauagguagcu

SEQ ID NO: 57301 - RNA, 22 nt, Homo sapiens
ccaaauccauccaaaucauaga

SEQ ID NO: 57302 - RNA, 22 nt, Homo sapiens
cuauauacugccugcugauuag

SEQ ID NO: 57303 - RNA, 22 nt, Homo sapiens
cuaugcuucuuaaauuaguuau

SEQ ID NO: 57304 - RNA, 22 nt, Homo sapiens
cuauggcuguagucccugugua

SEQ ID NO: 57305 - RNA, 22 nt, Homo sapiens
cucaaagugcuaagauuaggcu

SEQ ID NO: 57306 - RNA, 22 nt, Homo sapiens
cucaaagugcugggauuggcca

SEQ ID NO: 57307 - RNA, 19 nt, Homo sapiens
cucaaagugguauuuggag

SEQ ID NO: 57308 - RNA, 22 nt, Homo sapiens
cucaaaguguggucuguggguu

SEQ ID NO: 57309 - RNA, 22 nt, Homo sapiens
ccuuuguuuaguugaauuguau

SEQ ID NO: 57310 - RNA, 21 nt, Homo sapiens
ccugaagaagugaccucugag

SEQ ID NO: 57311 - RNA, 20 nt, Homo sapiens
cucagauuauucugaagcaa

SEQ ID NO: 57312 - RNA, 21 nt, Homo sapiens
cucauauugcuuuuccauggu

SEQ ID NO: 57313 - RNA, 22 nt, Homo sapiens
cugaaauggaaugugugcacag

SEQ ID NO: 57314 - RNA, 22 nt, Homo sapiens
cugaaauguccaucgacugaug

SEQ ID NO: 57315 - RNA, 22 nt, Homo sapiens
cugaaagagcauuugaaugggu

SEQ ID NO: 57316 - RNA, 22 nt, Homo sapiens
cugaaaucagccaguuaguuuc

SEQ ID NO: 57317 - RNA, 22 nt, Homo sapiens
cugaaagagcauguaacacagu

SEQ ID NO: 57318 - RNA, 22 nt, Homo sapiens
cucuuuuguuuagcugagaggg

SEQ ID NO: 57319 - RNA, 22 nt, Homo sapiens
cucuuacaguguguggugaaag

SEQ ID NO: 57320 - RNA, 22 nt, Homo sapiens
cucuuggguagauuuugcagag

SEQ ID NO: 57321 - RNA, 22 nt, Homo sapiens
cucuuuuguuccuaguuugauc

SEQ ID NO: 57322 - RNA, 19 nt, Homo sapiens
cucuuuggugucucuucuu

SEQ ID NO: 57323 - RNA, 22 nt, Homo sapiens
cucugauggagauauacaagga

SEQ ID NO: 57324 - RNA, 22 nt, Homo sapiens
cucauuaguuguuuuaagauga

SEQ ID NO: 57325 - RNA, 22 nt, Homo sapiens
cucugguucugcagugcacccu

SEQ ID NO: 57326 - RNA, 22 nt, Homo sapiens
auuauugacucauagaaaggau

SEQ ID NO: 57327 - RNA, 20 nt, Homo sapiens
auugcagcaugauuuauaau

SEQ ID NO: 57328 - RNA, 22 nt, Homo sapiens
auuauguuguauuuccuugcag

SEQ ID NO: 57329 - RNA, 22 nt, Homo sapiens
auuacauagucaaggugucuca

SEQ ID NO: 57330 - RNA, 22 nt, Homo sapiens
auuacacuuucuauucaaugag

SEQ ID NO: 57331 - RNA, 22 nt, Homo sapiens
auuaaguuaggauuuugagaua

SEQ ID NO: 57332 - RNA, 22 nt, Homo sapiens
auugcuuacccuguauuagauc

SEQ ID NO: 57333 - RNA, 22 nt, Homo sapiens
auugcuucugauuuuaaaugag

SEQ ID NO: 57334 - RNA, 22 nt, Homo sapiens
auugcuuaagucccuguauuag

SEQ ID NO: 57335 - RNA, 22 nt, Homo sapiens
auuggaacugaaauaauaacuu

SEQ ID NO: 57336 - RNA, 22 nt, Homo sapiens
auugcagauucgcuuuguguug

SEQ ID NO: 57337 - RNA, 22 nt, Homo sapiens
auugcauaaacacauuucuuau

SEQ ID NO: 57338 - RNA, 22 nt, Homo sapiens
auugccacaucucagaggcaga

SEQ ID NO: 57339 - RNA, 22 nt, Homo sapiens
auuuccuguaggggcuugcgaa

SEQ ID NO: 57340 - RNA, 21 nt, Homo sapiens
auuugguggcugugugacacu

SEQ ID NO: 57341 - RNA, 22 nt, Homo sapiens
auuugggaaugugcauuauacu

SEQ ID NO: 57342 - RNA, 22 nt, Homo sapiens
auuuugcauugcuguaaaggaa

SEQ ID NO: 57343 - RNA, 22 nt, Homo sapiens
auuugucacuuaacagccauua

SEQ ID NO: 57344 - RNA, 22 nt, Homo sapiens
auuugucaauacacuucuucca

SEQ ID NO: 57345 - RNA, 21 nt, Homo sapiens
auuugguguuagaaauaaauu

SEQ ID NO: 57346 - RNA, 22 nt, Homo sapiens
auuuagcaauggagguagugua

SEQ ID NO: 57347 - RNA, 22 nt, Homo sapiens
auuguucuuacaugcugucauc

SEQ ID NO: 57348 - RNA, 22 nt, Homo sapiens
auugugauugcugcuaggccua

SEQ ID NO: 57349 - RNA, 22 nt, Homo sapiens
auuguacuuauugccagaauuu

SEQ ID NO: 57350 - RNA, 22 nt, Homo sapiens
auuguaguuugcuauggcaaua

SEQ ID NO: 57351 - RNA, 22 nt, Homo sapiens
auuguacuuaagccugggugaa

SEQ ID NO: 57352 - RNA, 22 nt, Homo sapiens
auuggcuuuauacauaagaaua

SEQ ID NO: 57353 - RNA, 22 nt, Homo sapiens
caguguaugcuucuauuuuugg

SEQ ID NO: 57354 - RNA, 22 nt, Homo sapiens
cauaaaucuuguugaauagcac

SEQ ID NO: 57355 - RNA, 22 nt, Homo sapiens
cagugaauuucaggucaagagu

SEQ ID NO: 57356 - RNA, 23 nt, Homo sapiens
cagugcaugacuguauaugcaaa

SEQ ID NO: 57357 - RNA, 22 nt, Homo sapiens
cagugcauagaugugccacauu

SEQ ID NO: 57358 - RNA, 22 nt, Homo sapiens
caguggacuaaauggggaauau

SEQ ID NO: 57359 - RNA, 22 nt, Homo sapiens
cagcuagcaugcguaacuuucu

SEQ ID NO: 57360 - RNA, 22 nt, Homo sapiens
cagcugaugucgaaugcacucu

SEQ ID NO: 57361 - RNA, 22 nt, Homo sapiens
cagcucuuguuaaaacuaacua

SEQ ID NO: 57362 - RNA, 22 nt, Homo sapiens
cagcuguuguuaugucugcagg

SEQ ID NO: 57363 - RNA, 20 nt, Homo sapiens
cagucauagacaucagaguc

SEQ ID NO: 57364 - RNA, 22 nt, Homo sapiens
auuuuugguugucagcacuagg

SEQ ID NO: 57365 - RNA, 19 nt, Homo sapiens
caaaguguucuucuuugcc

SEQ ID NO: 57366 - RNA, 22 nt, Homo sapiens
caaagucuucucauuaugucuu

SEQ ID NO: 57367 - RNA, 22 nt, Homo sapiens
cacccaguaagcaugaggcccu

SEQ ID NO: 57368 - RNA, 22 nt, Homo sapiens
cagcacauuacaaguacuuggu

SEQ ID NO: 57369 - RNA, 22 nt, Homo sapiens
cagcacauagcaguugcucagu

SEQ ID NO: 57370 - RNA, 22 nt, Homo sapiens
ugagauuguaucugcaaugugu

SEQ ID NO: 57371 - RNA, 22 nt, Homo sapiens
ugagauuaucuguacauaggag

SEQ ID NO: 57372 - RNA, 22 nt, Homo sapiens
ugagauuaucuugaucuugaaa

SEQ ID NO: 57373 - RNA, 22 nt, Homo sapiens
ugagauucucugauuguagguc

SEQ ID NO: 57374 - RNA, 20 nt, Homo sapiens
ugagauuggugugguauaag

SEQ ID NO: 57375 - RNA, 22 nt, Homo sapiens
ugagcaaaauuuuggacauaga

SEQ ID NO: 57376 - RNA, 22 nt, Homo sapiens
ugagcaacauuucaaaacucca

SEQ ID NO: 57377 - RNA, 22 nt, Homo sapiens
ugagcaagaucuuuauaauuag

SEQ ID NO: 57378 - RNA, 22 nt, Homo sapiens
ugagcagaguuguuucuccuga

SEQ ID NO: 57379 - RNA, 22 nt, Homo sapiens
ugagcccauuguccugguuuau

SEQ ID NO: 57380 - RNA, 22 nt, Homo sapiens
ugagcauuguguuugacuguga

SEQ ID NO: 57381 - RNA, 22 nt, Homo sapiens
ugagauuauauuucuuaacaga

SEQ ID NO: 57382 - RNA, 22 nt, Homo sapiens
ugagauuaucguaauguaucuc

SEQ ID NO: 57383 - RNA, 22 nt, Homo sapiens
ugagauuacguucggcccacuu

SEQ ID NO: 57384 - RNA, 22 nt, Homo sapiens
ugagauuaaucuuuaaguaaga

SEQ ID NO: 57385 - RNA, 22 nt, Homo sapiens
ugagauguugcucugaaacaag

SEQ ID NO: 57386 - RNA, 22 nt, Homo sapiens
ugauaagugagauagcaaguga

SEQ ID NO: 57387 - RNA, 20 nt, Homo sapiens
ugauaaguugcacuuuccuu

SEQ ID NO: 57388 - RNA, 22 nt, Homo sapiens
ugauaguguccugugccacauu

SEQ ID NO: 57389 - RNA, 22 nt, Homo sapiens
ugauaggagauuuucaucugua

SEQ ID NO: 57390 - RNA, 22 nt, Homo sapiens
ugauaugaaagggaaauaagug

SEQ ID NO: 57391 - RNA, 22 nt, Homo sapiens
ugauaucugaauagauacacaa

SEQ ID NO: 57392 - RNA, 22 nt, Homo sapiens
ugagguguuugugcaccaucug

SEQ ID NO: 57393 - RNA, 22 nt, Homo sapiens
ugaggaguauguucuguagacc

SEQ ID NO: 57394 - RNA, 22 nt, Homo sapiens
ugcauaucuucuuuugagaaau

SEQ ID NO: 57395 - RNA, 22 nt, Homo sapiens
ugcauauguauacaugugccau

SEQ ID NO: 57396 - RNA, 22 nt, Homo sapiens
ugcaguuuaggaacugguaaca

SEQ ID NO: 57397 - RNA, 22 nt, Homo sapiens
ugcauagaauguucuguaaaua

SEQ ID NO: 57398 - RNA, 22 nt, Homo sapiens
ugcaccacuguacuccagucug

SEQ ID NO: 57399 - RNA, 22 nt, Homo sapiens
ugauuuguuuagugccaaguuu

SEQ ID NO: 57400 - RNA, 18 nt, Homo sapiens
ugcaaacauguguguguu

SEQ ID NO: 57401 - RNA, 22 nt, Homo sapiens
ugcaaugugaaauaagcacauc

SEQ ID NO: 57402 - RNA, 18 nt, Homo sapiens
ugauugacuuauuuaggu

SEQ ID NO: 57403 - RNA, 22 nt, Homo sapiens
ugauuguucuguccccaggggc

SEQ ID NO: 57404 - RNA, 20 nt, Homo sapiens
ugaugcaaaucuuuaaaagu

SEQ ID NO: 57405 - RNA, 22 nt, Homo sapiens
ugauggcacagugaguuccagg

SEQ ID NO: 57406 - RNA, 22 nt, Homo sapiens
ugaugacauugucacagucuga

SEQ ID NO: 57407 - RNA, 22 nt, Homo sapiens
ugauguaggacauuauuauuuc

SEQ ID NO: 57408 - RNA, 22 nt, Homo sapiens
ugaugguuuuauuaauaggacc

SEQ ID NO: 57409 - RNA, 22 nt, Homo sapiens
ugauguguuuuguaguucaacu

SEQ ID NO: 57410 - RNA, 22 nt, Homo sapiens
ugauuagagcccaagcuuugaa

SEQ ID NO: 57411 - RNA, 22 nt, Homo sapiens
ugauauuuuugauccuuaaguu

SEQ ID NO: 57412 - RNA, 22 nt, Homo sapiens
ugaucaaagugcuggaauuaca

SEQ ID NO: 57413 - RNA, 22 nt, Homo sapiens
ugauauguguaaacaauguaua

SEQ ID NO: 57414 - RNA, 22 nt, Homo sapiens
ugauaugaaguucaaaccaggu

SEQ ID NO: 57415 - RNA, 22 nt, Homo sapiens
ugauccagugcucaguuggagu

SEQ ID NO: 57416 - RNA, 20 nt, Homo sapiens
uggaaauuaaccuuucaggu

SEQ ID NO: 57417 - RNA, 22 nt, Homo sapiens
uggaaauuaacagggauugucc

SEQ ID NO: 57418 - RNA, 22 nt, Homo sapiens
uggaaaucuaaguuuggauuga

SEQ ID NO: 57419 - RNA, 22 nt, Homo sapiens
ugcgauaguuugcugguaaauu

SEQ ID NO: 57420 - RNA, 23 nt, Homo sapiens
ugccuagaugcugcccugggaca

SEQ ID NO: 57421 - RNA, 22 nt, Homo sapiens
ugccuaguggccuuaugaguau

SEQ ID NO: 57422 - RNA, 18 nt, Homo sapiens
ugcauauguugaaccagc

SEQ ID NO: 57423 - RNA, 22 nt, Homo sapiens
ugauuggagaacaaacugcaua

SEQ ID NO: 57424 - RNA, 22 nt, Homo sapiens
ugcauauguugagaugcauauu

SEQ ID NO: 57425 - RNA, 22 nt, Homo sapiens
ugcauauuuuauaaagauggaa

SEQ ID NO: 57426 - RNA, 22 nt, Homo sapiens
ugcauauucgaguuauuuuggg

SEQ ID NO: 57427 - RNA, 22 nt, Homo sapiens
ugccaguuuuuacauuuccugu

SEQ ID NO: 57428 - RNA, 22 nt, Homo sapiens
ugccaugaagagaggaagcagu

SEQ ID NO: 57429 - RNA, 22 nt, Homo sapiens
ugccaugaaguaauggcaaaaa

SEQ ID NO: 57430 - RNA, 23 nt, Homo sapiens
ugccuagaccaucagccugaggu

SEQ ID NO: 57431 - RNA, 22 nt, Homo sapiens
uggauguacagucaguauuugu

SEQ ID NO: 57432 - RNA, 22 nt, Homo sapiens
uggauugaaagcuuuaauauug

SEQ ID NO: 57433 - RNA, 22 nt, Homo sapiens
uggauguaauugauucauguug

SEQ ID NO: 57434 - RNA, 19 nt, Homo sapiens
uggauuguuagagcagugu

SEQ ID NO: 57435 - RNA, 22 nt, Homo sapiens
uggagacaaagauagaaaagca

SEQ ID NO: 57436 - RNA, 22 nt, Homo sapiens
uggaagauggaguuuuaucauu

SEQ ID NO: 57437 - RNA, 22 nt, Homo sapiens
uggaagacacauaccugauaac

SEQ ID NO: 57438 - RNA, 22 nt, Homo sapiens
uggcaagaaccacaguuacuuu

SEQ ID NO: 57439 - RNA, 22 nt, Homo sapiens
uggcaacaucuggggacauguu

SEQ ID NO: 57440 - RNA, 22 nt, Homo sapiens
uggcaagaacugcaauugcuuu

SEQ ID NO: 57441 - RNA, 22 nt, Homo sapiens
uggcaaaauauuuugguuucug

SEQ ID NO: 57442 - RNA, 20 nt, Homo sapiens
uggcaagauggcagaauaga

SEQ ID NO: 57443 - RNA, 22 nt, Homo sapiens
uggcaagaccccaucucuacaa

SEQ ID NO: 57444 - RNA, 22 nt, Homo sapiens
uggcaagagcugcauucaucug

SEQ ID NO: 57445 - RNA, 22 nt, Homo sapiens
uggcagauggugacaccauuag

SEQ ID NO: 57446 - RNA, 21 nt, Homo sapiens
uggcuauuucuguggcauaca

SEQ ID NO: 57447 - RNA, 22 nt, Homo sapiens
uggcucuuucuagacuuaauua

SEQ ID NO: 57448 - RNA, 22 nt, Homo sapiens
uggcaguuuuugccuucaauac

SEQ ID NO: 57449 - RNA, 22 nt, Homo sapiens
uggcauauaaagauguguucaa

SEQ ID NO: 57450 - RNA, 22 nt, Homo sapiens
ugguauuuaauauaugagaguu

SEQ ID NO: 57451 - RNA, 22 nt, Homo sapiens
ugguacuucaugcucacagaua

SEQ ID NO: 57452 - RNA, 22 nt, Homo sapiens
ugguauguaugauuaacaugga

SEQ ID NO: 57453 - RNA, 22 nt, Homo sapiens
uggcuguuguuacuaacaguuc

SEQ ID NO: 57454 - RNA, 20 nt, Homo sapiens
uggcucuuugcugcuaaagu

SEQ ID NO: 57455 - RNA, 22 nt, Homo sapiens
uggcuuucuggggcuucuguuc

SEQ ID NO: 57456 - RNA, 20 nt, Homo sapiens
uggcuucuuaauugcaggca

SEQ ID NO: 57457 - RNA, 22 nt, Homo sapiens
uggguagauaucauaguugccc

SEQ ID NO: 57458 - RNA, 22 nt, Homo sapiens
ugggaacugaggugaaaagaca

SEQ ID NO: 57459 - RNA, 20 nt, Homo sapiens
ucagguagggcuucaacauu

SEQ ID NO: 57460 - RNA, 22 nt, Homo sapiens
ucagguaucuucauagcaaugc

SEQ ID NO: 57461 - RNA, 22 nt, Homo sapiens
ucagguaucucuauagcaaugu

SEQ ID NO: 57462 - RNA, 22 nt, Homo sapiens
ucaguaaucuuagcugugcaga

SEQ ID NO: 57463 - RNA, 22 nt, Homo sapiens
ucaguaaaugcuguucucuuuu

SEQ ID NO: 57464 - RNA, 23 nt, Homo sapiens
ucaguacucuauaagugccagcu

SEQ ID NO: 57465 - RNA, 22 nt, Homo sapiens
ucaguacuuuggagcucacaua

SEQ ID NO: 57466 - RNA, 18 nt, Homo sapiens
ucagucacugccuggcuu

SEQ ID NO: 57467 - RNA, 20 nt, Homo sapiens
ucaguauauuguuuccacag

SEQ ID NO: 57468 - RNA, 22 nt, Homo sapiens
uauuugguuggugcaaaaguaa

SEQ ID NO: 57469 - RNA, 22 nt, Homo sapiens
uauuuggugaaugaaugcaugu

SEQ ID NO: 57470 - RNA, 22 nt, Homo sapiens
ucaaaaccucagagaguagagc

SEQ ID NO: 57471 - RNA, 22 nt, Homo sapiens
ucaaaaucucuuagcugugucu

SEQ ID NO: 57472 - RNA, 22 nt, Homo sapiens
ucagauguuucuuuaacgcaug

SEQ ID NO: 57473 - RNA, 22 nt, Homo sapiens
ucauauguaugugcaauuuugu

SEQ ID NO: 57474 - RNA, 18 nt, Homo sapiens
ucauagaucaugacagug

SEQ ID NO: 57475 - RNA, 22 nt, Homo sapiens
ucaucuggcgaaugugaagagu

SEQ ID NO: 57476 - RNA, 22 nt, Homo sapiens
ucaugacacagcauacugacuu

SEQ ID NO: 57477 - RNA, 21 nt, Homo sapiens
ucaucagucaaagacaauggu

SEQ ID NO: 57478 - RNA, 20 nt, Homo sapiens
ucaucaguuggugcucgcug

SEQ ID NO: 57479 - RNA, 22 nt, Homo sapiens
ucaguguuuuauccuccagagc

SEQ ID NO: 57480 - RNA, 23 nt, Homo sapiens
ucagugaaggaacaacuaaauag

SEQ ID NO: 57481 - RNA, 22 nt, Homo sapiens
ucccaguuuuucugaauaguca

SEQ ID NO: 57482 - RNA, 22 nt, Homo sapiens
uccuucauuugucaacucuagu

SEQ ID NO: 57483 - RNA, 22 nt, Homo sapiens
uccuugaaacaggaagaauuca

SEQ ID NO: 57484 - RNA, 22 nt, Homo sapiens
uccugauacgguugcaguucuc

SEQ ID NO: 57485 - RNA, 22 nt, Homo sapiens
uccuucaguccaguggguuuug

SEQ ID NO: 57486 - RNA, 22 nt, Homo sapiens
uccauuuguagguagugagaca

SEQ ID NO: 57487 - RNA, 19 nt, Homo sapiens
uccaugagcccacagugau

SEQ ID NO: 57488 - RNA, 20 nt, Homo sapiens
uccaguuuuggagacauucu

SEQ ID NO: 57489 - RNA, 22 nt, Homo sapiens
uccauaguacuagaaacugacc

SEQ ID NO: 57490 - RNA, 22 nt, Homo sapiens
uccaguuguuauuuuuauaaag

SEQ ID NO: 57491 - RNA, 22 nt, Homo sapiens
ucauucauucuucaguggguac

SEQ ID NO: 57492 - RNA, 22 nt, Homo sapiens
ucaguguuuggaaucucaauuu

SEQ ID NO: 57493 - RNA, 22 nt, Homo sapiens
ucaugugagcacagagcaagau

SEQ ID NO: 57494 - RNA, 22 nt, Homo sapiens
ucauugcauguuaauuaaacag

SEQ ID NO: 57495 - RNA, 22 nt, Homo sapiens
ucauuggauggaaugcucugua

SEQ ID NO: 57496 - RNA, 22 nt, Homo sapiens
ucauguauuaucauuagugggu

SEQ ID NO: 57497 - RNA, 19 nt, Homo sapiens
ucauggcuuuuucagcugu

SEQ ID NO: 57498 - RNA, 20 nt, Homo sapiens
ucaugccacugcgcuccagc

SEQ ID NO: 57499 - RNA, 22 nt, Homo sapiens
ucauggcuuuuauuauguugag

SEQ ID NO: 57500 - RNA, 22 nt, Homo sapiens
uccacagugguggaauuguuca

SEQ ID NO: 57501 - RNA, 22 nt, Homo sapiens
uccaauguaaucaucauugaau

SEQ ID NO: 57502 - RNA, 22 nt, Homo sapiens
ucauugguucuggguguuguug

SEQ ID NO: 57503 - RNA, 22 nt, Homo sapiens
uccacagugguugaacuaguaa

SEQ ID NO: 57504 - RNA, 22 nt, Homo sapiens
uccagcuuuuucuaauucugug

SEQ ID NO: 57505 - RNA, 22 nt, Homo sapiens
uccagaguggugaugcuggggc

SEQ ID NO: 57506 - RNA, 22 nt, Homo sapiens
uccacuuuugugcugaauugga

SEQ ID NO: 57507 - RNA, 22 nt, Homo sapiens
aacaucaaccaugaggguugga

SEQ ID NO: 57508 - RNA, 22 nt, Homo sapiens
ucuuugaguguauacuuagauu

SEQ ID NO: 57509 - RNA, 22 nt, Homo sapiens
ucuuucacuuagcaugauguuu

SEQ ID NO: 57510 - RNA, 22 nt, Homo sapiens
ucuuuaguuaagggacauuuua

SEQ ID NO: 57511 - RNA, 22 nt, Homo sapiens
ucuuugauaagauccagaagaa

SEQ ID NO: 57512 - RNA, 22 nt, Homo sapiens
ucuuuggagacaaccccagucu

SEQ ID NO: 57513 - RNA, 22 nt, Homo sapiens
ucuuugauguucugaaagaugg

SEQ ID NO: 57514 - RNA, 22 nt, Homo sapiens
aacacuaucugccuuacaggga

SEQ ID NO: 57515 - RNA, 22 nt, Homo sapiens
aacagaauccucuuuuccuggg

SEQ ID NO: 57516 - RNA, 22 nt, Homo sapiens
aacacuggcugcucgaguucuc

SEQ ID NO: 57517 - RNA, 22 nt, Homo sapiens
aacaggcuccuaggggugcacc

SEQ ID NO: 57518 - RNA, 22 nt, Homo sapiens
aacagacugucacauaaaauug

SEQ ID NO: 57519 - RNA, 22 nt, Homo sapiens
aacaccuugcagggauuaugac

SEQ ID NO: 57520 - RNA, 22 nt, Homo sapiens
ucugucuuugccuaaguuuguc

SEQ ID NO: 57521 - RNA, 23 nt, Homo sapiens
ucucauuccuugaaaauaaugac

SEQ ID NO: 57522 - RNA, 21 nt, Homo sapiens
ucucauuacugaugagccaga

SEQ ID NO: 57523 - RNA, 21 nt, Homo sapiens
ucucauugugguuuuaauugg

SEQ ID NO: 57524 - RNA, 22 nt, Homo sapiens
ucuggugugcucuggacuugca

SEQ ID NO: 57525 - RNA, 22 nt, Homo sapiens
uccuuugguggagucuuuaggg

SEQ ID NO: 57526 - RNA, 22 nt, Homo sapiens
uccuuuaguuaauaaagacaag

SEQ ID NO: 57527 - RNA, 22 nt, Homo sapiens
ucucagcacaaacaaaauugcu

SEQ ID NO: 57528 - RNA, 22 nt, Homo sapiens
ugaaugauuuuaaaagccucuc

SEQ ID NO: 57529 - RNA, 22 nt, Homo sapiens
ugaauaggcaguuaaguuuaug

SEQ ID NO: 57530 - RNA, 21 nt, Homo sapiens
ugaauauuuggguugugucca

SEQ ID NO: 57531 - RNA, 22 nt, Homo sapiens
ugaauauguuaauuagcaucau

SEQ ID NO: 57532 - RNA, 22 nt, Homo sapiens
ugaaugguaaagaaaagcacug

SEQ ID NO: 57533 - RNA, 22 nt, Homo sapiens
ugaauuguuucauucuuuacau

SEQ ID NO: 57534 - RNA, 22 nt, Homo sapiens
ugaauguuugcuuacuuccaua

SEQ ID NO: 57535 - RNA, 21 nt, Homo sapiens
ugacauguugguuugcugcac

SEQ ID NO: 57536 - RNA, 21 nt, Homo sapiens
ugacauuauuucaugucagua

SEQ ID NO: 57537 - RNA, 22 nt, Homo sapiens
ugacauugggagugaagugaag

SEQ ID NO: 57538 - RNA, 22 nt, Homo sapiens
ugacauguagagaacuucucau

SEQ ID NO: 57539 - RNA, 21 nt, Homo sapiens
ugacauguuggugugcugcac

SEQ ID NO: 57540 - RNA, 22 nt, Homo sapiens
ugacaagacuacauaucccauu

SEQ ID NO: 57541 - RNA, 22 nt, Homo sapiens
ugacaugauuguauauuuagaa

SEQ ID NO: 57542 - RNA, 22 nt, Homo sapiens
ucuuugguaauggaugucugau

SEQ ID NO: 57543 - RNA, 22 nt, Homo sapiens
ucuuugguaggaguaggaggcc

SEQ ID NO: 57544 - RNA, 22 nt, Homo sapiens
ugaacagagaaacacuggccau

SEQ ID NO: 57545 - RNA, 22 nt, Homo sapiens
ugaaauguugggugauggaauc

SEQ ID NO: 57546 - RNA, 22 nt, Homo sapiens
ugaaauuauucuuaccaaggug

SEQ ID NO: 57547 - RNA, 22 nt, Homo sapiens
ugaauacuucguucaaagauaa

SEQ ID NO: 57548 - RNA, 22 nt, Homo sapiens
ugaaguguuuuuucaggcaugu

SEQ ID NO: 57549 - RNA, 22 nt, Homo sapiens
ugaaguaauguuuuauucuauu

SEQ ID NO: 57550 - RNA, 22 nt, Homo sapiens
ugaagacucaauuauuaugaac

SEQ ID NO: 57551 - RNA, 22 nt, Homo sapiens
ugaagacauuuuugggugugua

SEQ ID NO: 57552 - RNA, 22 nt, Homo sapiens
ugaagacucauacuugaaucag

SEQ ID NO: 57553 - RNA, 22 nt, Homo sapiens
uugauguaggcauucaaggcua

SEQ ID NO: 57554 - RNA, 18 nt, Homo sapiens
uugaauaguguccaaucu

SEQ ID NO: 57555 - RNA, 17 nt, Homo sapiens
uugaaugcauuacuugg

SEQ ID NO: 57556 - RNA, 22 nt, Homo sapiens
uugauuuguagaaugccccaac

SEQ ID NO: 57557 - RNA, 22 nt, Homo sapiens
uugcaacauuguaaguuuauau

SEQ ID NO: 57558 - RNA, 22 nt, Homo sapiens
uugauguugaggacauaaaccu

SEQ ID NO: 57559 - RNA, 22 nt, Homo sapiens
uugauuagauccaguugauuga

SEQ ID NO: 57560 - RNA, 22 nt, Homo sapiens
uugauugacaugucucuguuca

SEQ ID NO: 57561 - RNA, 22 nt, Homo sapiens
uugauuagugacuggcuacacg

SEQ ID NO: 57562 - RNA, 22 nt, Homo sapiens
uugaaguguguauacauugugg

SEQ ID NO: 57563 - RNA, 22 nt, Homo sapiens
uugaaugaaauuggugugggga

SEQ ID NO: 57564 - RNA, 22 nt, Homo sapiens
uugaaugaaaugaugucauuug

SEQ ID NO: 57565 - RNA, 22 nt, Homo sapiens
uugaauagugacuuugauucug

SEQ ID NO: 57566 - RNA, 22 nt, Homo sapiens
uugaagguaggaugugcuauca

SEQ ID NO: 57567 - RNA, 22 nt, Homo sapiens
uugaagguaauugguuuuauga

SEQ ID NO: 57568 - RNA, 22 nt, Homo sapiens
uugaagacuauaugauucuuca

SEQ ID NO: 57569 - RNA, 22 nt, Homo sapiens
uucuugcuguauccucacaugg

SEQ ID NO: 57570 - RNA, 22 nt, Homo sapiens
uugcagcaaagagggaggggca

SEQ ID NO: 57571 - RNA, 22 nt, Homo sapiens
uugcagcaaauaggaaugagga

SEQ ID NO: 57572 - RNA, 18 nt, Homo sapiens
uugcauaguguauccaaa

SEQ ID NO: 57573 - RNA, 22 nt, Homo sapiens
uugcauagacaauauuaaucuu

SEQ ID NO: 57574 - RNA, 23 nt, Homo sapiens
uugcauagacauccucauagauu

SEQ ID NO: 57575 - RNA, 22 nt, Homo sapiens
uugcacuucauguaggccaaag

SEQ ID NO: 57576 - RNA, 22 nt, Homo sapiens
uugcacauugcaccuuuuguau

SEQ ID NO: 57577 - RNA, 22 nt, Homo sapiens
uugcacauugauuuuguauccu

SEQ ID NO: 57578 - RNA, 22 nt, Homo sapiens
uugcaagaaaugcagauucuca

SEQ ID NO: 57579 - RNA, 22 nt, Homo sapiens
uugcaaaguugccaaggaagga

SEQ ID NO: 57580 - RNA, 22 nt, Homo sapiens
uugcacaauggaauuuaucuuu

SEQ ID NO: 57581 - RNA, 22 nt, Homo sapiens
uugcacaauccugugagugagu

SEQ ID NO: 57582 - RNA, 22 nt, Homo sapiens
uugcaaugugaugugauuugga

SEQ ID NO: 57583 - RNA, 22 nt, Homo sapiens
uugcacagugcuuucuuugccc

SEQ ID NO: 57584 - RNA, 22 nt, Homo sapiens
uugccauagugcugccagauau

SEQ ID NO: 57585 - RNA, 22 nt, Homo sapiens
uugccauggaguagaauugaag

SEQ ID NO: 57586 - RNA, 22 nt, Homo sapiens
uugccuaguuuaggucugugcu

SEQ ID NO: 57587 - RNA, 22 nt, Homo sapiens
uugcaucagcuccugauguacu

SEQ ID NO: 57588 - RNA, 22 nt, Homo sapiens
uugcaucagcaggcauaauugg

SEQ ID NO: 57589 - RNA, 22 nt, Homo sapiens
uugcaugguuuuuaucugaaau

SEQ ID NO: 57590 - RNA, 22 nt, Homo sapiens
uugcuaagucaagagaaaugau

SEQ ID NO: 57591 - RNA, 22 nt, Homo sapiens
uugcuaguguuugguugauggu

SEQ ID NO: 57592 - RNA, 22 nt, Homo sapiens
uugcgaugaagacaaaacaugc

SEQ ID NO: 57593 - RNA, 22 nt, Homo sapiens
uugcuggugguucgagcaacac

SEQ ID NO: 57594 - RNA, 22 nt, Homo sapiens
uuggaacuguucguauugaaau

SEQ ID NO: 57595 - RNA, 22 nt, Homo sapiens
uuggaagacauucugucugcua

SEQ ID NO: 57596 - RNA, 22 nt, Homo sapiens
uuggaaaaauccaccuugaucu

SEQ ID NO: 57597 - RNA, 22 nt, Homo sapiens
uugcuucauucaacauugaggg

SEQ ID NO: 57598 - RNA, 22 nt, Homo sapiens
uuggcauuuuggacacccagga

SEQ ID NO: 57599 - RNA, 22 nt, Homo sapiens
uugguaaugggcugguauaacc

SEQ ID NO: 57600 - RNA, 22 nt, Homo sapiens
uugguacuagcugaucgcagag

SEQ ID NO: 57601 - RNA, 22 nt, Homo sapiens
uugguaugaaaaggaauuagac

SEQ ID NO: 57602 - RNA, 22 nt, Homo sapiens
uugguaguuucugucuuuagau

SEQ ID NO: 57603 - RNA, 20 nt, Homo sapiens
uuggcagagucuuuagggua

SEQ ID NO: 57604 - RNA, 21 nt, Homo sapiens
uuggcacucuucucuccuuau

SEQ ID NO: 57605 - RNA, 22 nt, Homo sapiens
uuggcacugagcaagaacaggg

SEQ ID NO: 57606 - RNA, 22 nt, Homo sapiens
uuggcauugccaaacugucaac

SEQ ID NO: 57607 - RNA, 22 nt, Homo sapiens
uuggcauuguggauggaaucau

SEQ ID NO: 57608 - RNA, 22 nt, Homo sapiens
uuggaagcacauuguuuaauua

SEQ ID NO: 57609 - RNA, 22 nt, Homo sapiens
uuggaagagaagggagauaaac

SEQ ID NO: 57610 - RNA, 22 nt, Homo sapiens
uuggaauacucaaaagguuggg

SEQ ID NO: 57611 - RNA, 22 nt, Homo sapiens
uuggaaggcuccuaaugaaugg

SEQ ID NO: 57612 - RNA, 22 nt, Homo sapiens
uuggaaguguguauguauagcu

SEQ ID NO: 57613 - RNA, 22 nt, Homo sapiens
uuggcaaguuucugucagcaaa

SEQ ID NO: 57614 - RNA, 22 nt, Homo sapiens
uuggcaauauuuacugaaguug

SEQ ID NO: 57615 - RNA, 22 nt, Homo sapiens
uuucaacuaauuuuuuggugag

SEQ ID NO: 57616 - RNA, 22 nt, Homo sapiens
uuuauguggagcacuugacaca

SEQ ID NO: 57617 - RNA, 22 nt, Homo sapiens
uuuauccagccucuagcaaggu

SEQ ID NO: 57618 - RNA, 23 nt, Homo sapiens
uuuauacguugucauuuaucagg

SEQ ID NO: 57619 - RNA, 22 nt, Homo sapiens
uuuaguccucugaaaaucuaua

SEQ ID NO: 57620 - RNA, 22 nt, Homo sapiens
uugugguuuuaucuaccuuugg

SEQ ID NO: 57621 - RNA, 22 nt, Homo sapiens
uuguguaguaccucucacauug

SEQ ID NO: 57622 - RNA, 21 nt, Homo sapiens
uuuagguagcuuuucugggag

SEQ ID NO: 57623 - RNA, 22 nt, Homo sapiens
uuuagcucauucaauuucaguc

SEQ ID NO: 57624 - RNA, 22 nt, Homo sapiens
uuucugugguccucuugaaggu

SEQ ID NO: 57625 - RNA, 22 nt, Homo sapiens
uuucugggggugcugauggaaa

SEQ ID NO: 57626 - RNA, 22 nt, Homo sapiens
uuucugagaccaaaacuuguaa

SEQ ID NO: 57627 - RNA, 16 nt, Homo sapiens
uuucuauguuuuacua

SEQ ID NO: 57628 - RNA, 22 nt, Homo sapiens
uuucuauguugaccagucuaga

SEQ ID NO: 57629 - RNA, 22 nt, Homo sapiens
uuucuacagugaacgauuucua

SEQ ID NO: 57630 - RNA, 22 nt, Homo sapiens
uuucuacagggcuugccaggua

SEQ ID NO: 57631 - RNA, 22 nt, Homo sapiens
uuuccuguagggggcaaggccu

SEQ ID NO: 57632 - RNA, 22 nt, Homo sapiens
uuucaguagagacacgguuuug

SEQ ID NO: 57633 - RNA, 22 nt, Homo sapiens
uuucacuagccagcccuuuauu

SEQ ID NO: 57634 - RNA, 22 nt, Homo sapiens
uuguauaguucuauguguuuug

SEQ ID NO: 57635 - RNA, 22 nt, Homo sapiens
uuguauccaucuuucaggcaac

SEQ ID NO: 57636 - RNA, 22 nt, Homo sapiens
uuguauacucuauuuuagcagu

SEQ ID NO: 57637 - RNA, 22 nt, Homo sapiens
uuguauugucuugaugaguuga

SEQ ID NO: 57638 - RNA, 20 nt, Homo sapiens
uuggugaccuacagaugugg

SEQ ID NO: 57639 - RNA, 22 nt, Homo sapiens
uuggucugcucugauguuuucu

SEQ ID NO: 57640 - RNA, 22 nt, Homo sapiens
uugguucucuuuauaugcugga

SEQ ID NO: 57641 - RNA, 22 nt, Homo sapiens
uuguaguguuuauucugucaac

SEQ ID NO: 57642 - RNA, 22 nt, Homo sapiens
uuguaguagcauuauuuauaau

SEQ ID NO: 57643 - RNA, 22 nt, Homo sapiens
uugugcuuuuuaaauagcuucc

SEQ ID NO: 57644 - RNA, 22 nt, Homo sapiens
uugugguaggaguugccauguu

SEQ ID NO: 57645 - RNA, 22 nt, Homo sapiens
uugugguugacuaaauuuguaa

SEQ ID NO: 57646 - RNA, 22 nt, Homo sapiens
uugugguugaugaagacugucu

SEQ ID NO: 57647 - RNA, 22 nt, Homo sapiens
uugugguaggcauguaagauga

SEQ ID NO: 57648 - RNA, 22 nt, Homo sapiens
uugugguagugaaugagucuca

SEQ ID NO: 57649 - RNA, 22 nt, Homo sapiens
uuguaugucuucauuugaaaaa

SEQ ID NO: 57650 - RNA, 22 nt, Homo sapiens
uugucaaacucauucuccaucc

SEQ ID NO: 57651 - RNA, 22 nt, Homo sapiens
uugucacauggggcggcugccc

SEQ ID NO: 57652 - RNA, 22 nt, Homo sapiens
uugucaugguuaauuuuaugua

SEQ ID NO: 57653 - RNA, 22 nt, Homo sapiens
uuugagaucuuuagaaucaggc

SEQ ID NO: 57654 - RNA, 22 nt, Homo sapiens
uuugagaaugcuaccagagaag

SEQ ID NO: 57655 - RNA, 22 nt, Homo sapiens
uuugacuagaguguuuuacaac

SEQ ID NO: 57656 - RNA, 22 nt, Homo sapiens
uuugacucacagccuggcugcc

SEQ ID NO: 57657 - RNA, 22 nt, Homo sapiens
uuugaagugugaugccuugaug

SEQ ID NO: 57658 - RNA, 22 nt, Homo sapiens
uuugaaguguggcacugaguuu

SEQ ID NO: 57659 - RNA, 22 nt, Homo sapiens
uuugaauggaaguuuugugaaa

SEQ ID NO: 57660 - RNA, 22 nt, Homo sapiens
uuugaagcuaaggugcuugguu

SEQ ID NO: 57661 - RNA, 22 nt, Homo sapiens
uuugaaccauuugaagaaugau

SEQ ID NO: 57662 - RNA, 22 nt, Homo sapiens
uuugaagacuacugggagugaa

SEQ ID NO: 57663 - RNA, 22 nt, Homo sapiens
uuugauuguacuaaaauuguac

SEQ ID NO: 57664 - RNA, 22 nt, Homo sapiens
uuugauguugagacuauaaagc

SEQ ID NO: 57665 - RNA, 22 nt, Homo sapiens
uuugauacuggguguggacaaa

SEQ ID NO: 57666 - RNA, 22 nt, Homo sapiens
uuugcagagacuuguuaggaau

SEQ ID NO: 57667 - RNA, 23 nt, Homo sapiens
uuugcacuugcuccuucuauggc

SEQ ID NO: 57668 - RNA, 22 nt, Homo sapiens
uuugcauaauaagauuagggug

SEQ ID NO: 57669 - RNA, 22 nt, Homo sapiens
uuugguuauauauauacacucu

SEQ ID NO: 57670 - RNA, 22 nt, Homo sapiens
uuugguguauauguaaacuaug

SEQ ID NO: 57671 - RNA, 22 nt, Homo sapiens
uuugucuccuaagacucugugg

SEQ ID NO: 57672 - RNA, 22 nt, Homo sapiens
uuugugacucauggucuagugc

SEQ ID NO: 57673 - RNA, 22 nt, Homo sapiens
uuugugagguggauagauugca

SEQ ID NO: 57674 - RNA, 22 nt, Homo sapiens
uuugugauugcacacucaagau

SEQ ID NO: 57675 - RNA, 22 nt, Homo sapiens
uuugugcuauguuauauauucu

SEQ ID NO: 57676 - RNA, 22 nt, Homo sapiens
uuugugcuccuaugagaaucua

SEQ ID NO: 57677 - RNA, 18 nt, Homo sapiens
uuugugcuccacaaagga

SEQ ID NO: 57678 - RNA, 22 nt, Homo sapiens
uuugugcuccucucaguaugug

SEQ ID NO: 57679 - RNA, 22 nt, Homo sapiens
uuugugcuccugugagaaucua

SEQ ID NO: 57680 - RNA, 22 nt, Homo sapiens
uuugccacugcaggcuguuuaa

SEQ ID NO: 57681 - RNA, 22 nt, Homo sapiens
uuugccaaugggaauuuuccua

SEQ ID NO: 57682 - RNA, 22 nt, Homo sapiens
uuugccaaucagaggcaucuug

SEQ ID NO: 57683 - RNA, 22 nt, Homo sapiens
uuugcaucuuagaaaguucucc

SEQ ID NO: 57684 - RNA, 22 nt, Homo sapiens
uuugcaucuuuugcuuccugga

SEQ ID NO: 57685 - RNA, 22 nt, Homo sapiens
uuugggccaugguuuguguaua

SEQ ID NO: 57686 - RNA, 22 nt, Homo sapiens
uuuggcuuugagaagcagugga

SEQ ID NO: 57687 - RNA, 22 nt, Homo sapiens
uuuggcuuuugugauacguaau

SEQ ID NO: 57688 - RNA, 22 nt, Homo sapiens
uuugggaaugaguuuaucauuu

SEQ ID NO: 57689 - RNA, 22 nt, Homo sapiens
uucacaguacucccuggaauua

SEQ ID NO: 57690 - RNA, 22 nt, Homo sapiens
uucagcuacuuggaaacagcaa

SEQ ID NO: 57691 - RNA, 22 nt, Homo sapiens
uucagggagaaggcaaacguug

SEQ ID NO: 57692 - RNA, 19 nt, Homo sapiens
uucauacagugagagcagc

SEQ ID NO: 57693 - RNA, 22 nt, Homo sapiens
uucaggcuuuuauuuacugaua

SEQ ID NO: 57694 - RNA, 22 nt, Homo sapiens
uucauacaguggcugcacucca

SEQ ID NO: 57695 - RNA, 22 nt, Homo sapiens
uucaguagucaaaagauaaggg

SEQ ID NO: 57696 - RNA, 22 nt, Homo sapiens
uucaguauugcaccuggagucc

SEQ ID NO: 57697 - RNA, 22 nt, Homo sapiens
uucaagucuuggcuuugccacc

SEQ ID NO: 57698 - RNA, 22 nt, Homo sapiens
uucaagugguucagaagucuga

SEQ ID NO: 57699 - RNA, 22 nt, Homo sapiens
uucaaguguucaggagcuacag

SEQ ID NO: 57700 - RNA, 22 nt, Homo sapiens
uucaaguaagaaagacaucagg

SEQ ID NO: 57701 - RNA, 22 nt, Homo sapiens
uucaauaugucauuggcaggca

SEQ ID NO: 57702 - RNA, 19 nt, Homo sapiens
uucaaugcagcauugccac

SEQ ID NO: 57703 - RNA, 21 nt, Homo sapiens
uucacaagggaaguagggggc

SEQ ID NO: 57704 - RNA, 22 nt, Homo sapiens
uucaaaguguugguuuugggcu

SEQ ID NO: 57705 - RNA, 22 nt, Homo sapiens
uucaagcuacaguggcaggguu

SEQ ID NO: 57706 - RNA, 22 nt, Homo sapiens
uucaaaggauagauuaagauca

SEQ ID NO: 57707 - RNA, 22 nt, Homo sapiens
uucaaaguuggaggacaaacug

SEQ ID NO: 57708 - RNA, 22 nt, Homo sapiens
uuauggauuuauauucuguagu

SEQ ID NO: 57709 - RNA, 22 nt, Homo sapiens
uuaugacauugacaguuuuuag

SEQ ID NO: 57710 - RNA, 22 nt, Homo sapiens
uuaugcagcaaagugcuugaaa

SEQ ID NO: 57711 - RNA, 22 nt, Homo sapiens
uuaucucaguguuuguaaacaa

SEQ ID NO: 57712 - RNA, 22 nt, Homo sapiens
uuaucauagugcaguuuucuga

SEQ ID NO: 57713 - RNA, 20 nt, Homo sapiens
uuauagcuacaucuugacug

SEQ ID NO: 57714 - RNA, 22 nt, Homo sapiens
uuauaugcuaaacaaggggugg

SEQ ID NO: 57715 - RNA, 22 nt, Homo sapiens
uuauauguuucuuagggacaga

SEQ ID NO: 57716 - RNA, 22 nt, Homo sapiens
uuacagcagugccccacuccca

SEQ ID NO: 57717 - RNA, 22 nt, Homo sapiens
uuacagucuuaggcagugcuuu

SEQ ID NO: 57718 - RNA, 22 nt, Homo sapiens
uuacaucaucacauuaguuugc

SEQ ID NO: 57719 - RNA, 22 nt, Homo sapiens
uuacaugucuugguaagguuag

SEQ ID NO: 57720 - RNA, 22 nt, Homo sapiens
uuacauugcuucaaauucagug

SEQ ID NO: 57721 - RNA, 22 nt, Homo sapiens
uuaccacagugccugucuaaug

SEQ ID NO: 57722 - RNA, 22 nt, Homo sapiens
uuaccagagaagacgaggggga

SEQ ID NO: 57723 - RNA, 22 nt, Homo sapiens
uucucagugaaguuuagaacau

SEQ ID NO: 57724 - RNA, 22 nt, Homo sapiens
uucucagcccccugacagucag

SEQ ID NO: 57725 - RNA, 22 nt, Homo sapiens
uucucagugcuaucuuuuaugc

SEQ ID NO: 57726 - RNA, 22 nt, Homo sapiens
uucucaguuccuacuuugguga

SEQ ID NO: 57727 - RNA, 17 nt, Homo sapiens
uucucaguucugaucuc

SEQ ID NO: 57728 - RNA, 22 nt, Homo sapiens
uucucgcuuuuuccaccuguau

SEQ ID NO: 57729 - RNA, 22 nt, Homo sapiens
uucccuuucugccuugaaucuu

SEQ ID NO: 57730 - RNA, 22 nt, Homo sapiens
uucugcuagucugucagaucuu

SEQ ID NO: 57731 - RNA, 22 nt, Homo sapiens
uucuggcuuuuaaagaaauguu

SEQ ID NO: 57732 - RNA, 22 nt, Homo sapiens
uucugguuaauacuugcaaaaa

SEQ ID NO: 57733 - RNA, 22 nt, Homo sapiens
uucugugcugaaucaaagacug

SEQ ID NO: 57734 - RNA, 22 nt, Homo sapiens
uucuucaggcauucccagaagc

SEQ ID NO: 57735 - RNA, 22 nt, Homo sapiens
uucuucaguuacaacaaggggg

SEQ ID NO: 57736 - RNA, 22 nt, Homo sapiens
uucuugcacuuaacugacauuc

SEQ ID NO: 57737 - RNA, 20 nt, Homo sapiens
uucuugaguuaacaaguuac

SEQ ID NO: 57738 - RNA, 22 nt, Homo sapiens
uucuucugguuaugaaauuuga

SEQ ID NO: 57739 - RNA, 22 nt, Homo sapiens
uucuuagucauguaauagucca

SEQ ID NO: 57740 - RNA, 22 nt, Homo sapiens
uucuuagucaaguuguauuuca

SEQ ID NO: 57741 - RNA, 22 nt, Homo sapiens
uucauaguguaccugaaggcac

SEQ ID NO: 57742 - RNA, 22 nt, Homo sapiens
uucauaguguuuccuuccagug

SEQ ID NO: 57743 - RNA, 22 nt, Homo sapiens
uucauagugaaaaauucaaagu

SEQ ID NO: 57744 - RNA, 22 nt, Homo sapiens
uucauaguaacaguaacuaugg

SEQ ID NO: 57745 - RNA, 22 nt, Homo sapiens
uucaucagggagaaauaauuuc

SEQ ID NO: 57746 - RNA, 22 nt, Homo sapiens
uucaugcaucuguagugguuaa

SEQ ID NO: 57747 - RNA, 22 nt, Homo sapiens
uucauggaguugagaaggcuaa

SEQ ID NO: 57748 - RNA, 22 nt, Homo sapiens
uucauguaauauuucacagcuu

SEQ ID NO: 57749 - RNA, 22 nt, Homo sapiens
uucauguaauauauuucaggcc

SEQ ID NO: 57750 - RNA, 20 nt, Homo sapiens
uucaugggagcaaagaggcc

SEQ ID NO: 57751 - RNA, 22 nt, Homo sapiens
uucauugaaugauuuuuagaag

SEQ ID NO: 57752 - RNA, 22 nt, Homo sapiens
uuccauugugucaucuuggugg

SEQ ID NO: 57753 - RNA, 22 nt, Homo sapiens
uuccauuuguucggugucgcca

SEQ ID NO: 57754 - RNA, 22 nt, Homo sapiens
uuccauguaguugagcaguuuu

SEQ ID NO: 57755 - RNA, 22 nt, Homo sapiens
uuccaugagaugcaucaaagcu

SEQ ID NO: 57756 - RNA, 22 nt, Homo sapiens
uucccucagaaacacacagccc

SEQ ID NO: 57757 - RNA, 22 nt, Homo sapiens
uucccuugcaggaugaucugga

SEQ ID NO: 57758 - RNA, 23 nt, Homo sapiens
ugugcacauuuacauauauacac

SEQ ID NO: 57759 - RNA, 22 nt, Homo sapiens
ugugcaccucuucacacaggga

SEQ ID NO: 57760 - RNA, 22 nt, Homo sapiens
ugugauugauauauuuacagaa

SEQ ID NO: 57761 - RNA, 22 nt, Homo sapiens
ugugcuugaaauucaguuuuga

SEQ ID NO: 57762 - RNA, 22 nt, Homo sapiens
ugugccacugcacuccugggug

SEQ ID NO: 57763 - RNA, 22 nt, Homo sapiens
ugugcguguaagagaucuaggu

SEQ ID NO: 57764 - RNA, 22 nt, Homo sapiens
ugugccacugcacuucagccug

SEQ ID NO: 57765 - RNA, 23 nt, Homo sapiens
ugugguauuauuccauuuauagg

SEQ ID NO: 57766 - RNA, 22 nt, Homo sapiens
uguggcuucuuugguucaguau

SEQ ID NO: 57767 - RNA, 22 nt, Homo sapiens
uguggcaaagucuugugaauau

SEQ ID NO: 57768 - RNA, 22 nt, Homo sapiens
uguaagcauugggcaugcaguc

SEQ ID NO: 57769 - RNA, 22 nt, Homo sapiens
uguaagcauuauauaauuguug

SEQ ID NO: 57770 - RNA, 20 nt, Homo sapiens
uguaaucuaaguuuuaagcc

SEQ ID NO: 57771 - RNA, 19 nt, Homo sapiens
uguacacuguaaaccugug

SEQ ID NO: 57772 - RNA, 22 nt, Homo sapiens
uguagacaccaaagacagcaua

SEQ ID NO: 57773 - RNA, 22 nt, Homo sapiens
uguaauguuucaucauuauuaa

SEQ ID NO: 57774 - RNA, 22 nt, Homo sapiens
uguaauguuugguagguuaggu

SEQ ID NO: 57775 - RNA, 22 nt, Homo sapiens
uguaauuuaaaugauccuugga

SEQ ID NO: 57776 - RNA, 22 nt, Homo sapiens
uguagguagggucuguuuuuga

SEQ ID NO: 57777 - RNA, 22 nt, Homo sapiens
uguagacagcacguaguugagu

SEQ ID NO: 57778 - RNA, 22 nt, Homo sapiens
uguagcaaaucgauacuauugg

SEQ ID NO: 57779 - RNA, 20 nt, Homo sapiens
ugugauuauuuaguugcaug

SEQ ID NO: 57780 - RNA, 22 nt, Homo sapiens
ugugaugguuuggaagcuucuu

SEQ ID NO: 57781 - RNA, 22 nt, Homo sapiens
ugugauuauuuaaauaggacag

SEQ ID NO: 57782 - RNA, 22 nt, Homo sapiens
ugugauuauuuauagacaguca

SEQ ID NO: 57783 - RNA, 22 nt, Homo sapiens
uuaagcuaguuuauucaggaaa

SEQ ID NO: 57784 - RNA, 22 nt, Homo sapiens
uuaagcaguggauuagaauuuu

SEQ ID NO: 57785 - RNA, 22 nt, Homo sapiens
uuaagccacucaagagauagag

SEQ ID NO: 57786 - RNA, 22 nt, Homo sapiens
uuaagacaccaaucauuggauu

SEQ ID NO: 57787 - RNA, 22 nt, Homo sapiens
uuaacacugccauugauacugu

SEQ ID NO: 57788 - RNA, 22 nt, Homo sapiens
uuaacagugucaaucuguagua

SEQ ID NO: 57789 - RNA, 22 nt, Homo sapiens
uuaagcugaauuuaagcuucgg

SEQ ID NO: 57790 - RNA, 22 nt, Homo sapiens
uuaaggcuccuguuggcuuuua

SEQ ID NO: 57791 - RNA, 22 nt, Homo sapiens
uuaaggcuuguacuuguuuucu

SEQ ID NO: 57792 - RNA, 22 nt, Homo sapiens
uuacacaguugguaggggcaga

SEQ ID NO: 57793 - RNA, 22 nt, Homo sapiens
uuacagauggauggcagcuggc

SEQ ID NO: 57794 - RNA, 22 nt, Homo sapiens
uuaaaaguauaggccuggcaua

SEQ ID NO: 57795 - RNA, 22 nt, Homo sapiens
uuaaaagcuaucuccaagguca

SEQ ID NO: 57796 - RNA, 21 nt, Homo sapiens
uguuuuugcuguguaucucuc

SEQ ID NO: 57797 - RNA, 22 nt, Homo sapiens
uguuuguuugagauggagucuc

SEQ ID NO: 57798 - RNA, 22 nt, Homo sapiens
uguuuuguuagcacucugggaa

SEQ ID NO: 57799 - RNA, 22 nt, Homo sapiens
uuaaaugcauagaauguguagu

SEQ ID NO: 57800 - RNA, 22 nt, Homo sapiens
uuaaaugcuagaauuuucuuug

SEQ ID NO: 57801 - RNA, 22 nt, Homo sapiens
uuaaauacagcaugguguuucu

SEQ ID NO: 57802 - RNA, 22 nt, Homo sapiens
uuaaagccauaccugagagagu

SEQ ID NO: 57803 - RNA, 22 nt, Homo sapiens
uguuauugagguuacuuauaag

SEQ ID NO: 57804 - RNA, 22 nt, Homo sapiens
uguuuguuugauaugggauaaa

SEQ ID NO: 57805 - RNA, 22 nt, Homo sapiens
uguuaguuguucauguuaagag

SEQ ID NO: 57806 - RNA, 22 nt, Homo sapiens
uguuacagugacuaauguuuua

SEQ ID NO: 57807 - RNA, 22 nt, Homo sapiens
uguuaacauggucucagucugu

SEQ ID NO: 57808 - RNA, 22 nt, Homo sapiens
uguuacagcagcacaaaaugga

SEQ ID NO: 57809 - RNA, 22 nt, Homo sapiens
uguuaagaugucaauuuuccac

SEQ ID NO: 57810 - RNA, 22 nt, Homo sapiens
uguguaauacucuaaugaugca

SEQ ID NO: 57811 - RNA, 22 nt, Homo sapiens
uguguaauaccuuugacuauau

SEQ ID NO: 57812 - RNA, 22 nt, Homo sapiens
ugugucuugaauuuuguaugua

SEQ ID NO: 57813 - RNA, 22 nt, Homo sapiens
uguguauaucacugcaugagug

SEQ ID NO: 57814 - RNA, 22 nt, Homo sapiens
uuuuauguuuguucccugccaa

SEQ ID NO: 57815 - RNA, 19 nt, Homo sapiens
uuuuccccuuucuuaagac

SEQ ID NO: 57816 - RNA, 22 nt, Homo sapiens
uuuugcaauauguuccugaaua

SEQ ID NO: 57817 - RNA, 23 nt, Homo sapiens
uuuugcaauaagucacuggaaua

SEQ ID NO: 57818 - RNA, 20 nt, Homo sapiens
uuuugcacuccuacuaaggu

SEQ ID NO: 57819 - RNA, 22 nt, Homo sapiens
uuccacaaugguugaacuaauu

SEQ ID NO: 57820 - RNA, 22 nt, Homo sapiens
uuccagaugggaguucuauucu

SEQ ID NO: 57821 - RNA, 22 nt, Homo sapiens
uucaugucuuggcuguuagagu

SEQ ID NO: 57822 - RNA, 22 nt, Homo sapiens
uucauuggacuuguguucuuga

SEQ ID NO: 57823 - RNA, 22 nt, Homo sapiens
uuccagcugggggcaacucugc

SEQ ID NO: 57824 - RNA, 22 nt, Homo sapiens
uuccagugggacgagaugugga

SEQ ID NO: 57825 - RNA, 22 nt, Homo sapiens
uuccuaguccugagucucugcg

SEQ ID NO: 57826 - RNA, 22 nt, Homo sapiens
uuccugucuuccaagagagauu

SEQ ID NO: 57827 - RNA, 22 nt, Homo sapiens
uucccaguggaacauguaguca

SEQ ID NO: 57828 - RNA, 22 nt, Homo sapiens
uucccaguuggggaaagcgacc

SEQ ID NO: 57829 - RNA, 22 nt, Homo sapiens
uucucaguaauuccagauuuuu

SEQ ID NO: 57830 - RNA, 22 nt, Homo sapiens
uucucagugaacuccagcuugu

SEQ ID NO: 57831 - RNA, 22 nt, Homo sapiens
uucucaaggagccuucguaacu

SEQ ID NO: 57832 - RNA, 22 nt, Homo sapiens
uucucauggaacaucuguacug

SEQ ID NO: 57833 - RNA, 22 nt, Homo sapiens
uuccuugagaaaggcacaaguu

SEQ ID NO: 57834 - RNA, 22 nt, Homo sapiens
uuccuucaugcuugaaggguau

SEQ ID NO: 57835 - RNA, 22 nt, Homo sapiens
uucguuuguaauccuuacagca

SEQ ID NO: 57836 - RNA, 22 nt, Homo sapiens
uucuacaggcuguucaagaagc

SEQ ID NO: 57837 - RNA, 22 nt, Homo sapiens
uucuauugguaauauuuucugu

SEQ ID NO: 57838 - RNA, 22 nt, Homo sapiens
uucuaugguuuaauaguuuggg

SEQ ID NO: 57839 - RNA, 22 nt, Homo sapiens
uucuauguuugaaaaugccaaa

SEQ ID NO: 57840 - RNA, 22 nt, Homo sapiens
uucuagcaauggcagagugucu

SEQ ID NO: 57841 - RNA, 22 nt, Homo sapiens
uucuacuccucauggcagguug

SEQ ID NO: 57842 - RNA, 22 nt, Homo sapiens
uucagaugcacacuguagucua

SEQ ID NO: 57843 - RNA, 22 nt, Homo sapiens
uucacaauuaaaugugguuauu

SEQ ID NO: 57844 - RNA, 22 nt, Homo sapiens
uucacagagagaacucaaacca

SEQ ID NO: 57845 - RNA, 22 nt, Homo sapiens
uucacaaugccuuguugauggu

SEQ ID NO: 57846 - RNA, 22 nt, Homo sapiens
uucaauacuguugauccuuaug

SEQ ID NO: 57847 - RNA, 22 nt, Homo sapiens
uucagauugcauaccgaaagua

SEQ ID NO: 57848 - RNA, 20 nt, Homo sapiens
uucagcaaaggaaugggagu

SEQ ID NO: 57849 - RNA, 22 nt, Homo sapiens
uucagcaaugacagccuauaua

SEQ ID NO: 57850 - RNA, 19 nt, Homo sapiens
uucagcagugucugcucuu

SEQ ID NO: 57851 - RNA, 22 nt, Homo sapiens
uucagcaguggccaguggaaau

SEQ ID NO: 57852 - RNA, 22 nt, Homo sapiens
uucaaaguaaagggauggagac

SEQ ID NO: 57853 - RNA, 22 nt, Homo sapiens
uucaagauggcaccagugagug

SEQ ID NO: 57854 - RNA, 22 nt, Homo sapiens
uucaagaauuaaaguggcuuuu

SEQ ID NO: 57855 - RNA, 22 nt, Homo sapiens
uucaaaucuuuggcucccacua

SEQ ID NO: 57856 - RNA, 22 nt, Homo sapiens
uucaaauguucuuucaccaccc

SEQ ID NO: 57857 - RNA, 22 nt, Homo sapiens
uucaagucaaggaaagaggucu

SEQ ID NO: 57858 - RNA, 22 nt, Homo sapiens
uucaagcugggcaaauaagggg

SEQ ID NO: 57859 - RNA, 22 nt, Homo sapiens
uucaagauggccccagugagcc

SEQ ID NO: 57860 - RNA, 22 nt, Homo sapiens
uucaagcuauggugaucuuuuc

SEQ ID NO: 57861 - RNA, 22 nt, Homo sapiens
uucaguacacguguucucauuu

SEQ ID NO: 57862 - RNA, 22 nt, Homo sapiens
uucaguaaauguucuuacuaua

SEQ ID NO: 57863 - RNA, 22 nt, Homo sapiens
uucagugccuggaagucgugcu

SEQ ID NO: 57864 - RNA, 22 nt, Homo sapiens
uucaguggacuuaguagugcuu

SEQ ID NO: 57865 - RNA, 22 nt, Homo sapiens
uucaguggagaggcugaguggu

SEQ ID NO: 57866 - RNA, 22 nt, Homo sapiens
uucaguacuucaaaaucuuuaa

SEQ ID NO: 57867 - RNA, 22 nt, Homo sapiens
uucauguaauuccauaagguaa

SEQ ID NO: 57868 - RNA, 22 nt, Homo sapiens
uucauguagucaucauccugcu

SEQ ID NO: 57869 - RNA, 18 nt, Homo sapiens
uucaguuuguaucugggg

SEQ ID NO: 57870 - RNA, 22 nt, Homo sapiens
uucaguggguggaugaauauga

SEQ ID NO: 57871 - RNA, 22 nt, Homo sapiens
uuaguaguagugcuguaauuuu

SEQ ID NO: 57872 - RNA, 22 nt, Homo sapiens
uuauaacagagacuccugugcu

SEQ ID NO: 57873 - RNA, 22 nt, Homo sapiens
uucaaaucuucguuuugccaua

SEQ ID NO: 57874 - RNA, 22 nt, Homo sapiens
uucaaaguaaaaauguguucac

SEQ ID NO: 57875 - RNA, 22 nt, Homo sapiens
uuauuugguuauuguaauuggg

SEQ ID NO: 57876 - RNA, 22 nt, Homo sapiens
uuacauguggugugaagaagag

SEQ ID NO: 57877 - RNA, 22 nt, Homo sapiens
uuacaggacuaagcagcuuugc

SEQ ID NO: 57878 - RNA, 22 nt, Homo sapiens
uuacaguugugagccaccaugc

SEQ ID NO: 57879 - RNA, 22 nt, Homo sapiens
uuacaguguuuguucuguuacu

SEQ ID NO: 57880 - RNA, 22 nt, Homo sapiens
uguuauguuuuagagguuucaa

SEQ ID NO: 57881 - RNA, 22 nt, Homo sapiens
uguuacagcagaauugauugca

SEQ ID NO: 57882 - RNA, 22 nt, Homo sapiens
uguucuggagccgguucaaaug

SEQ ID NO: 57883 - RNA, 22 nt, Homo sapiens
uguucaauucccaccuaugagu

SEQ ID NO: 57884 - RNA, 22 nt, Homo sapiens
uguucacaguguuucuuugaga

SEQ ID NO: 57885 - RNA, 22 nt, Homo sapiens
uguuauuuuguguuagggcaca

SEQ ID NO: 57886 - RNA, 22 nt, Homo sapiens
uguucaugaguucucauuuuua

SEQ ID NO: 57887 - RNA, 22 nt, Homo sapiens
uguugguuaaaucagguuuuaa

SEQ ID NO: 57888 - RNA, 22 nt, Homo sapiens
uguuucuacugucucuguagua

SEQ ID NO: 57889 - RNA, 22 nt, Homo sapiens
uguugcacugguaauguacuga

SEQ ID NO: 57890 - RNA, 19 nt, Homo sapiens
uguugcacauaucaauaug

SEQ ID NO: 57891 - RNA, 22 nt, Homo sapiens
uguuugcuguuuucuccaauga

SEQ ID NO: 57892 - RNA, 22 nt, Homo sapiens
uguuuguuugugauacgguaca

SEQ ID NO: 57893 - RNA, 23 nt, Homo sapiens
uuaagcaacggcugcuuuucaga

SEQ ID NO: 57894 - RNA, 22 nt, Homo sapiens
uuaagcaaagguaacaugagaa

SEQ ID NO: 57895 - RNA, 22 nt, Homo sapiens
uuaagcucauuuccauucuaca

SEQ ID NO: 57896 - RNA, 22 nt, Homo sapiens
uuaagaugcauuuugaaguuaa

SEQ ID NO: 57897 - RNA, 22 nt, Homo sapiens
uuaauuguccauuauucuguuc

SEQ ID NO: 57898 - RNA, 22 nt, Homo sapiens
uuaauguaucuaucacaucaca

SEQ ID NO: 57899 - RNA, 22 nt, Homo sapiens
uuaauuguaucuauagauguca

SEQ ID NO: 57900 - RNA, 22 nt, Homo sapiens
uguuuuggaggccagaagucca

SEQ ID NO: 57901 - RNA, 22 nt, Homo sapiens
uuaaaccugucuucucacuaau

SEQ ID NO: 57902 - RNA, 22 nt, Homo sapiens
uuaaaugcucacauaaagguag

SEQ ID NO: 57903 - RNA, 22 nt, Homo sapiens
uuaaaugucuguagaugugcug

SEQ ID NO: 57904 - RNA, 21 nt, Homo sapiens
uuaacagacaagugucuuccc

SEQ ID NO: 57905 - RNA, 22 nt, Homo sapiens
uuaaagugcacacgggucaggc

SEQ ID NO: 57906 - RNA, 22 nt, Homo sapiens
uuaaagcuggcguuacaguuug

SEQ ID NO: 57907 - RNA, 22 nt, Homo sapiens
uuaaagugcuguuuuugccggg

SEQ ID NO: 57908 - RNA, 22 nt, Homo sapiens
uuaaaguguuugcagacaggug

SEQ ID NO: 57909 - RNA, 20 nt, Homo sapiens
uuaaaucuagugcagacuca

SEQ ID NO: 57910 - RNA, 20 nt, Homo sapiens
ugucauuaagcacugugcca

SEQ ID NO: 57911 - RNA, 22 nt, Homo sapiens
ugucauuggacuucuuucaugg

SEQ ID NO: 57912 - RNA, 22 nt, Homo sapiens
ugucauucaggaaauucuaagu

SEQ ID NO: 57913 - RNA, 22 nt, Homo sapiens
ugucauguugagaaacuuggau

SEQ ID NO: 57914 - RNA, 22 nt, Homo sapiens
ugucuuuguuaguuguccuagu

SEQ ID NO: 57915 - RNA, 22 nt, Homo sapiens
ugugaacagaauuagucaccua

SEQ ID NO: 57916 - RNA, 21 nt, Homo sapiens
ugugaaaucuaggcagagguu

SEQ ID NO: 57917 - RNA, 23 nt, Homo sapiens
ugucaucaagaugaggucacacu

SEQ ID NO: 57918 - RNA, 22 nt, Homo sapiens
ugucaucauuugagagaagaaa

SEQ ID NO: 57919 - RNA, 22 nt, Homo sapiens
uggucuucuggccuccagaacc

SEQ ID NO: 57920 - RNA, 22 nt, Homo sapiens
uggucuuuucaacaaaugguau

SEQ ID NO: 57921 - RNA, 22 nt, Homo sapiens
ugucaucuagguauuaagcccc

SEQ ID NO: 57922 - RNA, 22 nt, Homo sapiens
ugucaugucaacuauggaauuu

SEQ ID NO: 57923 - RNA, 22 nt, Homo sapiens
ugucaugugagggaacuuguuc

SEQ ID NO: 57924 - RNA, 22 nt, Homo sapiens
ugugacagcacagcaucucuuu

SEQ ID NO: 57925 - RNA, 22 nt, Homo sapiens
ugugacagcacgguucaacugc

SEQ ID NO: 57926 - RNA, 22 nt, Homo sapiens
ugugaauguaagaaaauccaac

SEQ ID NO: 57927 - RNA, 22 nt, Homo sapiens
ugugaagauggacuaauauagu

SEQ ID NO: 57928 - RNA, 22 nt, Homo sapiens
ugugcgugugccuguaagaauu

SEQ ID NO: 57929 - RNA, 22 nt, Homo sapiens
ugugccacugcacucuggccug

SEQ ID NO: 57930 - RNA, 22 nt, Homo sapiens
ugugucuuguuuauagcuuucu

SEQ ID NO: 57931 - RNA, 21 nt, Homo sapiens
uguuaacaugcagauuacugg

SEQ ID NO: 57932 - RNA, 22 nt, Homo sapiens
ugugucuuuuaucacacaaugu

SEQ ID NO: 57933 - RNA, 21 nt, Homo sapiens
uguggcaauggccucacagau

SEQ ID NO: 57934 - RNA, 18 nt, Homo sapiens
uguggcuguuuuccaaua

SEQ ID NO: 57935 - RNA, 22 nt, Homo sapiens
uguggcauuuucagaaaggaug

SEQ ID NO: 57936 - RNA, 22 nt, Homo sapiens
uugauaugacuaucuuuuaugu

SEQ ID NO: 57937 - RNA, 22 nt, Homo sapiens
uugauaugaauggcuguuugug

SEQ ID NO: 57938 - RNA, 22 nt, Homo sapiens
uugauauggcugcuuaccauaa

SEQ ID NO: 57939 - RNA, 22 nt, Homo sapiens
uugauauguaguuggacuugau

SEQ ID NO: 57940 - RNA, 22 nt, Homo sapiens
uugauauguggaauauuuaucu

SEQ ID NO: 57941 - RNA, 22 nt, Homo sapiens
uugauauuaaguacugaagugg

SEQ ID NO: 57942 - RNA, 22 nt, Homo sapiens
uugauauuacucaguaacagau

SEQ ID NO: 57943 - RNA, 22 nt, Homo sapiens
uugauauucugagaagcugaag

SEQ ID NO: 57944 - RNA, 22 nt, Homo sapiens
uugauacuagagucuuucugac

SEQ ID NO: 57945 - RNA, 22 nt, Homo sapiens
uugauagaucagggauuugauu

SEQ ID NO: 57946 - RNA, 22 nt, Homo sapiens
uugauaguccuguaucuauuuu

SEQ ID NO: 57947 - RNA, 22 nt, Homo sapiens
uugagugaaugaaugauuaaau

SEQ ID NO: 57948 - RNA, 22 nt, Homo sapiens
uugaguuugaguauucuaaagc

SEQ ID NO: 57949 - RNA, 22 nt, Homo sapiens
uugauaagaaaaauauaccaga

SEQ ID NO: 57950 - RNA, 22 nt, Homo sapiens
uugaguauuugcagucugaaca

SEQ ID NO: 57951 - RNA, 22 nt, Homo sapiens
uucugugcuuguggaugaagug

SEQ ID NO: 57952 - RNA, 22 nt, Homo sapiens
uucugugguagaaaucucaaau

SEQ ID NO: 57953 - RNA, 22 nt, Homo sapiens
uucugugguuucauuuaccugu

SEQ ID NO: 57954 - RNA, 22 nt, Homo sapiens
uucugugguugaaaggagagau

SEQ ID NO: 57955 - RNA, 22 nt, Homo sapiens
uucuuagguuaaggcugagaga

SEQ ID NO: 57956 - RNA, 22 nt, Homo sapiens
uucuucaggccacaaaaauggu

SEQ ID NO: 57957 - RNA, 21 nt, Homo sapiens
uucuucaggcagaaggauuau

SEQ ID NO: 57958 - RNA, 19 nt, Homo sapiens
uucugguguuuuaagccaa

SEQ ID NO: 57959 - RNA, 22 nt, Homo sapiens
uuggacuaagaacuuaaaauaa

SEQ ID NO: 57960 - RNA, 22 nt, Homo sapiens
uuggacagaugguuacauuuuu

SEQ ID NO: 57961 - RNA, 19 nt, Homo sapiens
uuggaauuuuagaguuuga

SEQ ID NO: 57962 - RNA, 22 nt, Homo sapiens
uuggaaugcacacugagccugc

SEQ ID NO: 57963 - RNA, 22 nt, Homo sapiens
uuggaaugugacugauaauauu

SEQ ID NO: 57964 - RNA, 22 nt, Homo sapiens
uuggaauguauggcaucuugcg

SEQ ID NO: 57965 - RNA, 22 nt, Homo sapiens
uugccaacauggugaacuccca

SEQ ID NO: 57966 - RNA, 22 nt, Homo sapiens
uugcauugacacaugaagcuca

SEQ ID NO: 57967 - RNA, 22 nt, Homo sapiens
uuggaauauuauuauugggcag

SEQ ID NO: 57968 - RNA, 22 nt, Homo sapiens
uugccuauucacucugaugaua

SEQ ID NO: 57969 - RNA, 22 nt, Homo sapiens
uugccugagaagccaagaauaa

SEQ ID NO: 57970 - RNA, 22 nt, Homo sapiens
uugccuuuguuggaaacaagug

SEQ ID NO: 57971 - RNA, 22 nt, Homo sapiens
uugauauguuguuagauucagu

SEQ ID NO: 57972 - RNA, 22 nt, Homo sapiens
uugaucaaaucugagugagaau

SEQ ID NO: 57973 - RNA, 22 nt, Homo sapiens
uugaucacuguacuaugacuau

SEQ ID NO: 57974 - RNA, 18 nt, Homo sapiens
uugcaucauuuuguuguu

SEQ ID NO: 57975 - RNA, 22 nt, Homo sapiens
uugcauuagugugguacauuug

SEQ ID NO: 57976 - RNA, 22 nt, Homo sapiens
uugcaugcacaguucucaauag

SEQ ID NO: 57977 - RNA, 22 nt, Homo sapiens
uuguauguuguuugucagagaa

SEQ ID NO: 57978 - RNA, 21 nt, Homo sapiens
uuguaugguugaacuugauac

SEQ ID NO: 57979 - RNA, 22 nt, Homo sapiens
uuguauguuuguucuuucagau

SEQ ID NO: 57980 - RNA, 22 nt, Homo sapiens
uuguauguuucugugcacauga

SEQ ID NO: 57981 - RNA, 22 nt, Homo sapiens
uugugaauggugccacaauaaa

SEQ ID NO: 57982 - RNA, 22 nt, Homo sapiens
uuggccuccuggucauauccag

SEQ ID NO: 57983 - RNA, 22 nt, Homo sapiens
uuggccuuucucuaaauacuuu

SEQ ID NO: 57984 - RNA, 22 nt, Homo sapiens
uuggcuaugaguccuaugugca

SEQ ID NO: 57985 - RNA, 22 nt, Homo sapiens
uuguagcaaauguguaaacaaa

SEQ ID NO: 57986 - RNA, 22 nt, Homo sapiens
uuguacuuuuaguagagacggg

SEQ ID NO: 57987 - RNA, 22 nt, Homo sapiens
uuguacuucagacaugccaaag

SEQ ID NO: 57988 - RNA, 22 nt, Homo sapiens
uuggaugauaaagaagccuaag

SEQ ID NO: 57989 - RNA, 22 nt, Homo sapiens
uuggauugugaaaguauucucu

SEQ ID NO: 57990 - RNA, 22 nt, Homo sapiens
uuggauuauaaacugagauuug

SEQ ID NO: 57991 - RNA, 22 nt, Homo sapiens
uuggauuuuaacaaacuaggug

SEQ ID NO: 57992 - RNA, 22 nt, Homo sapiens
uuggagagugauauucagaugc

SEQ ID NO: 57993 - RNA, 22 nt, Homo sapiens
uuggauauucaguuuuuccauc

SEQ ID NO: 57994 - RNA, 22 nt, Homo sapiens
uuggagucaucucuguacugua

SEQ ID NO: 57995 - RNA, 22 nt, Homo sapiens
uuggaguguucugguccgggcu

SEQ ID NO: 57996 - RNA, 22 nt, Homo sapiens
uuggcauugaguuucaaaucau

SEQ ID NO: 57997 - RNA, 22 nt, Homo sapiens
uuggcagugguucugacggacc

SEQ ID NO: 57998 - RNA, 22 nt, Homo sapiens
uuggcagucugaggcacagacu

SEQ ID NO: 57999 - RNA, 22 nt, Homo sapiens
uuggcacuugauaauauucugg

SEQ ID NO: 58000 - RNA, 22 nt, Homo sapiens
uuggcagaguuaauuuguugag

SEQ ID NO: 58001 - RNA, 22 nt, Homo sapiens
uuggcaauugcuaugauuugaa

SEQ ID NO: 58002 - RNA, 22 nt, Homo sapiens
uuggcaagaaccuucuuccaag

SEQ ID NO: 58003 - RNA, 20 nt, Homo sapiens
uuggcauuuagacaagaguu

SEQ ID NO: 58004 - RNA, 22 nt, Homo sapiens
uugugcuucaucaccuagcaga

SEQ ID NO: 58005 - RNA, 19 nt, Homo sapiens
uuguguccccacaaaauuc

SEQ ID NO: 58006 - RNA, 22 nt, Homo sapiens
uuguuaugggguggcuugaaag

SEQ ID NO: 58007 - RNA, 22 nt, Homo sapiens
uuguuaagaugcagauucugga

SEQ ID NO: 58008 - RNA, 22 nt, Homo sapiens
uuguuauguaucucaagauaaa

SEQ ID NO: 58009 - RNA, 22 nt, Homo sapiens
uuguguuugaugcugacacgca

SEQ ID NO: 58010 - RNA, 21 nt, Homo sapiens
uugugccaaacccuggaggga

SEQ ID NO: 58011 - RNA, 22 nt, Homo sapiens
uugugcauaucagagguuugcu

SEQ ID NO: 58012 - RNA, 22 nt, Homo sapiens
uugugauugagugauccuuguu

SEQ ID NO: 58013 - RNA, 22 nt, Homo sapiens
uuucauccggcuguguauuaug

SEQ ID NO: 58014 - RNA, 16 nt, Homo sapiens
uuucaucaguuuuaau

SEQ ID NO: 58015 - RNA, 22 nt, Homo sapiens
uuucauggaggcauuuuagauu

SEQ ID NO: 58016 - RNA, 22 nt, Homo sapiens
uuucauggaggauuugcuucuu

SEQ ID NO: 58017 - RNA, 20 nt, Homo sapiens
uuucaguacuuucuacuggc

SEQ ID NO: 58018 - RNA, 22 nt, Homo sapiens
uuucauagccuuugucgucuga

SEQ ID NO: 58019 - RNA, 22 nt, Homo sapiens
uuguucccuucuggcuuuuaug

SEQ ID NO: 58020 - RNA, 22 nt, Homo sapiens
uuguuuuggagaugagcuaaaa

SEQ ID NO: 58021 - RNA, 22 nt, Homo sapiens
uuguuugguugaguauggaagu

SEQ ID NO: 58022 - RNA, 22 nt, Homo sapiens
uuuaaagcuaaaauauguuuau

SEQ ID NO: 58023 - RNA, 23 nt, Homo sapiens
uuucaggcaggugaaagaccagc

SEQ ID NO: 58024 - RNA, 21 nt, Homo sapiens
uuugaucauuaaaagugaauc

SEQ ID NO: 58025 - RNA, 22 nt, Homo sapiens
uuugaugcaucucuacuuuguu

SEQ ID NO: 58026 - RNA, 22 nt, Homo sapiens
uuugcuugaggucuagcuaccc

SEQ ID NO: 58027 - RNA, 23 nt, Homo sapiens
uuugagugugauaaacacuguca

SEQ ID NO: 58028 - RNA, 22 nt, Homo sapiens
uuugaguuugaggugcugauga

SEQ ID NO: 58029 - RNA, 22 nt, Homo sapiens
uuugaggaaaggcauaaguagg

SEQ ID NO: 58030 - RNA, 22 nt, Homo sapiens
uuuggcagaaaacaagaaucug

SEQ ID NO: 58031 - RNA, 22 nt, Homo sapiens
uuuggcagaaaacuaaaaggua

SEQ ID NO: 58032 - RNA, 22 nt, Homo sapiens
uuuggcaauuugacuguauagg

SEQ ID NO: 58033 - RNA, 22 nt, Homo sapiens
uuuggauagugugguccuuuua

SEQ ID NO: 58034 - RNA, 22 nt, Homo sapiens
uuugagauaucuuccaucagua

SEQ ID NO: 58035 - RNA, 18 nt, Homo sapiens
uuugacugguguccuuau

SEQ ID NO: 58036 - RNA, 22 nt, Homo sapiens
uuugacuguggagucgaugcuu

SEQ ID NO: 58037 - RNA, 20 nt, Homo sapiens
uuugaauguaaagcauguca

SEQ ID NO: 58038 - RNA, 22 nt, Homo sapiens
uuugacacugggagugugggug

SEQ ID NO: 58039 - RNA, 22 nt, Homo sapiens
uuugacaaugugugcuuguauu

SEQ ID NO: 58040 - RNA, 22 nt, Homo sapiens
uuucccuuugcuuugucagcca

SEQ ID NO: 58041 - RNA, 22 nt, Homo sapiens
uuuccacauggacuuaccuucg

SEQ ID NO: 58042 - RNA, 22 nt, Homo sapiens
uuucauaguuugcauagggcau

SEQ ID NO: 58043 - RNA, 18 nt, Homo sapiens
uuucauugagugugauau

SEQ ID NO: 58044 - RNA, 22 nt, Homo sapiens
uuugucaauaacuaccaacagg

SEQ ID NO: 58045 - RNA, 22 nt, Homo sapiens
uuugucacccugaauguaagau

SEQ ID NO: 58046 - RNA, 20 nt, Homo sapiens
uuuguaucucuggguacugg

SEQ ID NO: 58047 - RNA, 19 nt, Homo sapiens
uuuguauguuuccaguaau

SEQ ID NO: 58048 - RNA, 22 nt, Homo sapiens
uuuguccugccaugguuuauuu

SEQ ID NO: 58049 - RNA, 19 nt, Homo sapiens
uuuguccugcccuuucuca

SEQ ID NO: 58050 - RNA, 22 nt, Homo sapiens
uuuuagcaaagagacugguggc

SEQ ID NO: 58051 - RNA, 20 nt, Homo sapiens
uuuuagcacuuguuauggug

SEQ ID NO: 58052 - RNA, 22 nt, Homo sapiens
uuuuaguugcucagguauucuc

SEQ ID NO: 58053 - RNA, 22 nt, Homo sapiens
uuuuaguggacaaagguauuua

SEQ ID NO: 58054 - RNA, 22 nt, Homo sapiens
uuuguguccccacccaaacauc

SEQ ID NO: 58055 - RNA, 22 nt, Homo sapiens
uuuguucuucguuccugagcca

SEQ ID NO: 58056 - RNA, 23 nt, Homo sapiens
uuugugucccucuagaauucaug

SEQ ID NO: 58057 - RNA, 16 nt, Homo sapiens
uuugugugugacgaga

SEQ ID NO: 58058 - RNA, 22 nt, Homo sapiens
uuugugugugauuauaaaaggu

SEQ ID NO: 58059 - RNA, 22 nt, Homo sapiens
uuuguguccccacccacaucuc

SEQ ID NO: 58060 - RNA, 22 nt, Homo sapiens
uuugugucccuacccgaaucuc

SEQ ID NO: 58061 - RNA, 21 nt, Homo sapiens
uuugugguuacugugugagcu

SEQ ID NO: 58062 - RNA, 22 nt, Homo sapiens
uuugugcuccuguugagaaucu

SEQ ID NO: 58063 - RNA, 22 nt, Homo sapiens
uuuggcuuuuguaauaacugcc

SEQ ID NO: 58064 - RNA, 21 nt, Homo sapiens
uuuggcuucucugcugcagcc

SEQ ID NO: 58065 - RNA, 22 nt, Homo sapiens
uuugggacuguauuaaaugccu

SEQ ID NO: 58066 - RNA, 22 nt, Homo sapiens
uuugggcuuuuaaucuagagca

SEQ ID NO: 58067 - RNA, 22 nt, Homo sapiens
uuuggguuaguuuuccaaucuu

SEQ ID NO: 58068 - RNA, 22 nt, Homo sapiens
uuuggcauuuaaauaugcaugg

SEQ ID NO: 58069 - RNA, 22 nt, Homo sapiens
uuuggcauuaagaugcuguauc

SEQ ID NO: 58070 - RNA, 22 nt, Homo sapiens
uuuggcauuagagagacuugca

SEQ ID NO: 58071 - RNA, 18 nt, Homo sapiens
uuuggcuguucaugacuc

SEQ ID NO: 58072 - RNA, 22 nt, Homo sapiens
uuuggcuauguuguaucuuucc

SEQ ID NO: 58073 - RNA, 22 nt, Homo sapiens
uuuguacuugguguucuggaaa

SEQ ID NO: 58074 - RNA, 22 nt, Homo sapiens
uuuguacacgugggugaauugu

SEQ ID NO: 58075 - RNA, 22 nt, Homo sapiens
uuugguuauuugaaacuagcau

SEQ ID NO: 58076 - RNA, 22 nt, Homo sapiens
uuugguguauaaaaaugcuagu

SEQ ID NO: 58077 - RNA, 22 nt, Homo sapiens
uuugguugcauucacauauuuc

SEQ ID NO: 58078 - RNA, 22 nt, Homo sapiens
uuugguuuuuguuaucacucau

SEQ ID NO: 58079 - RNA, 22 nt, Homo sapiens
augauacugaguugaguucuca

SEQ ID NO: 58080 - RNA, 19 nt, Homo sapiens
augaguuaggggaaauuuc

SEQ ID NO: 58081 - RNA, 22 nt, Homo sapiens
augcacauggcuaacuuuuuuc

SEQ ID NO: 58082 - RNA, 19 nt, Homo sapiens
augcacgugaaaugcauuu

SEQ ID NO: 58083 - RNA, 22 nt, Homo sapiens
augagauuguuugugugaaaua

SEQ ID NO: 58084 - RNA, 22 nt, Homo sapiens
augagcaaagagaugagacccu

SEQ ID NO: 58085 - RNA, 22 nt, Homo sapiens
augaggugcagaggaaaugagu

SEQ ID NO: 58086 - RNA, 22 nt, Homo sapiens
augaggauagguuucuauuagg

SEQ ID NO: 58087 - RNA, 22 nt, Homo sapiens
augaggaagucaggcccagggg

SEQ ID NO: 58088 - RNA, 22 nt, Homo sapiens
augaggcaggaaaggcguaucu

SEQ ID NO: 58089 - RNA, 22 nt, Homo sapiens
augaaaguguguggaaacuuga

SEQ ID NO: 58090 - RNA, 22 nt, Homo sapiens
aucaggaaccuuuuuggugugu

SEQ ID NO: 58091 - RNA, 18 nt, Homo sapiens
aucauugcacugucuugc

SEQ ID NO: 58092 - RNA, 22 nt, Homo sapiens
augaaagugauaaaugucucua

SEQ ID NO: 58093 - RNA, 22 nt, Homo sapiens
augaagaucucugccuuguguc

SEQ ID NO: 58094 - RNA, 22 nt, Homo sapiens
augaagauguugccuuuuuaau

SEQ ID NO: 58095 - RNA, 20 nt, Homo sapiens
augaaggcaggugugaguuu

SEQ ID NO: 58096 - RNA, 22 nt, Homo sapiens
augaauacugcugcaaugaaca

SEQ ID NO: 58097 - RNA, 22 nt, Homo sapiens
augagacauuaaaguguguuug

SEQ ID NO: 58098 - RNA, 22 nt, Homo sapiens
augagaauguaaguuaaugaaa

SEQ ID NO: 58099 - RNA, 22 nt, Homo sapiens
augagaaucauuucagcuugua

SEQ ID NO: 58100 - RNA, 22 nt, Homo sapiens
augagaaugauucuguuauggu

SEQ ID NO: 58101 - RNA, 22 nt, Homo sapiens
augagaacauaucaagugauug

SEQ ID NO: 58102 - RNA, 22 nt, Homo sapiens
augccacuucucuaagucaugu

SEQ ID NO: 58103 - RNA, 22 nt, Homo sapiens
augccacugcacuucagcuugg

SEQ ID NO: 58104 - RNA, 22 nt, Homo sapiens
augcauggucugaagucaaccu

SEQ ID NO: 58105 - RNA, 22 nt, Homo sapiens
augccauugcacuccagccugg

SEQ ID NO: 58106 - RNA, 22 nt, Homo sapiens
auggaagcauaguauucuauug

SEQ ID NO: 58107 - RNA, 21 nt, Homo sapiens
auggacaugguuaggcuuugu

SEQ ID NO: 58108 - RNA, 22 nt, Homo sapiens
auggaauggcacuuugaagauu

SEQ ID NO: 58109 - RNA, 22 nt, Homo sapiens
auggaaugguugggucauaagg

SEQ ID NO: 58110 - RNA, 22 nt, Homo sapiens
auggaauguaaguuauguuugc

SEQ ID NO: 58111 - RNA, 22 nt, Homo sapiens
auggaauguauagucauguagg

SEQ ID NO: 58112 - RNA, 22 nt, Homo sapiens
auggaguguucugaauccuuug

SEQ ID NO: 58113 - RNA, 22 nt, Homo sapiens
auggacuuuuuguucagugucu

SEQ ID NO: 58114 - RNA, 22 nt, Homo sapiens
auggagaugugcgaacugagua

SEQ ID NO: 58115 - RNA, 22 nt, Homo sapiens
auggcuuuggucucccagugau

SEQ ID NO: 58116 - RNA, 22 nt, Homo sapiens
auggcuuuugcccuaaauggau

SEQ ID NO: 58117 - RNA, 22 nt, Homo sapiens
auggcuuuuuaaaucauguugu

SEQ ID NO: 58118 - RNA, 22 nt, Homo sapiens
auguaauugagguuuuugccau

SEQ ID NO: 58119 - RNA, 22 nt, Homo sapiens
augucaaggugaagaaagauca

SEQ ID NO: 58120 - RNA, 22 nt, Homo sapiens
augucacagguccuagccaagu

SEQ ID NO: 58121 - RNA, 22 nt, Homo sapiens
auggcuuuuccugucuugcaug

SEQ ID NO: 58122 - RNA, 22 nt, Homo sapiens
augggaaaaucagaaggccugg

SEQ ID NO: 58123 - RNA, 22 nt, Homo sapiens
auggucuuuauuguguugagug

SEQ ID NO: 58124 - RNA, 22 nt, Homo sapiens
auggugugugaauuaaauguua

SEQ ID NO: 58125 - RNA, 22 nt, Homo sapiens
auguaaacauuuggucuaaauu

SEQ ID NO: 58126 - RNA, 19 nt, Homo sapiens
aucagcacaagugugcuuu

SEQ ID NO: 58127 - RNA, 22 nt, Homo sapiens
aucacaguuauaacauccuuuu

SEQ ID NO: 58128 - RNA, 19 nt, Homo sapiens
aucaccagucuuuccacug

SEQ ID NO: 58129 - RNA, 22 nt, Homo sapiens
aucagugaaagugaaaucuccg

SEQ ID NO: 58130 - RNA, 22 nt, Homo sapiens
aucagcagcaugaaaacggacu

SEQ ID NO: 58131 - RNA, 22 nt, Homo sapiens
aucaaagugaaauauuaguuau

SEQ ID NO: 58132 - RNA, 22 nt, Homo sapiens
aucaaacugcaaggcagcagca

SEQ ID NO: 58133 - RNA, 22 nt, Homo sapiens
aucaaguaguuauacguaaagg

SEQ ID NO: 58134 - RNA, 22 nt, Homo sapiens
auauugcuuagugaugaagucu

SEQ ID NO: 58135 - RNA, 22 nt, Homo sapiens
aucaaauugucauuuuaaggau

SEQ ID NO: 58136 - RNA, 22 nt, Homo sapiens
aucaaagugaauuaaugagaau

SEQ ID NO: 58137 - RNA, 22 nt, Homo sapiens
aucacagauauggguuuaaauc

SEQ ID NO: 58138 - RNA, 22 nt, Homo sapiens
aucacagugaaaacagucaauu

SEQ ID NO: 58139 - RNA, 22 nt, Homo sapiens
aucacagcccuccucuuggaug

SEQ ID NO: 58140 - RNA, 22 nt, Homo sapiens
aucacagaacuuugagcagaga

SEQ ID NO: 58141 - RNA, 22 nt, Homo sapiens
auauugguuaaauauuauguga

SEQ ID NO: 58142 - RNA, 22 nt, Homo sapiens
auauuguuggcugcuggcugau

SEQ ID NO: 58143 - RNA, 22 nt, Homo sapiens
auauuguacugcuacugguucu

SEQ ID NO: 58144 - RNA, 22 nt, Homo sapiens
auaucaacaucgugucauuagu

SEQ ID NO: 58145 - RNA, 15 nt, Homo sapiens
auauaugcaaugugu

SEQ ID NO: 58146 - RNA, 22 nt, Homo sapiens
auauuacuggccauaucgcagg

SEQ ID NO: 58147 - RNA, 22 nt, Homo sapiens
auauuacuggcuauaucgcaag

SEQ ID NO: 58148 - RNA, 22 nt, Homo sapiens
auaugucuguuuagucuguaau

SEQ ID NO: 58149 - RNA, 22 nt, Homo sapiens
auagguuuucacuguagauucu

SEQ ID NO: 58150 - RNA, 22 nt, Homo sapiens
auagucaguagucucauaauga

SEQ ID NO: 58151 - RNA, 21 nt, Homo sapiens
auagcacuucacuugguuaga

SEQ ID NO: 58152 - RNA, 22 nt, Homo sapiens
auagcacugguuuuucuugguu

SEQ ID NO: 58153 - RNA, 22 nt, Homo sapiens
auauaccuaggcuacaugguuu

SEQ ID NO: 58154 - RNA, 19 nt, Homo sapiens
auauaacauccaggagcag

SEQ ID NO: 58155 - RNA, 19 nt, Homo sapiens
auaguguaggaaaacagcu

SEQ ID NO: 58156 - RNA, 22 nt, Homo sapiens
auagugcugcaacaaauauacg

SEQ ID NO: 58157 - RNA, 22 nt, Homo sapiens
auagugcugcaagaaacauacg

SEQ ID NO: 58158 - RNA, 22 nt, Homo sapiens
auagugcugcaaucaacauaca

SEQ ID NO: 58159 - RNA, 22 nt, Homo sapiens
auagugcugcaauaaacauaug

SEQ ID NO: 58160 - RNA, 22 nt, Homo sapiens
auagugcugcacuaaacauaca

SEQ ID NO: 58161 - RNA, 22 nt, Homo sapiens
aggugcuugagggaagaaauua

SEQ ID NO: 58162 - RNA, 22 nt, Homo sapiens
aguaaagcaucagcuagaugug

SEQ ID NO: 58163 - RNA, 22 nt, Homo sapiens
agguauuuucaacuuagaaugg

SEQ ID NO: 58164 - RNA, 22 nt, Homo sapiens
aggugcugacaggauagguuuc

SEQ ID NO: 58165 - RNA, 22 nt, Homo sapiens
aguaccauuccguuggagcugg

SEQ ID NO: 58166 - RNA, 22 nt, Homo sapiens
auacaguaaugucuuaggcugu

SEQ ID NO: 58167 - RNA, 22 nt, Homo sapiens
auacagcuaaaauauuaaguua

SEQ ID NO: 58168 - RNA, 22 nt, Homo sapiens
auagacugaguggcuuaaacca

SEQ ID NO: 58169 - RNA, 23 nt, Homo sapiens
auagagcuaggaugcagacagau

SEQ ID NO: 58170 - RNA, 22 nt, Homo sapiens
auagaggacugaggugaucuuu

SEQ ID NO: 58171 - RNA, 22 nt, Homo sapiens
auagagcuaccauagaauccag

SEQ ID NO: 58172 - RNA, 22 nt, Homo sapiens
auacaagcaguccaacuccaua

SEQ ID NO: 58173 - RNA, 22 nt, Homo sapiens
auacaaguuauuugaacugcgg

SEQ ID NO: 58174 - RNA, 22 nt, Homo sapiens
auagcacacuauagcuucaaac

SEQ ID NO: 58175 - RNA, 22 nt, Homo sapiens
auagcaaugccccauucccagu

SEQ ID NO: 58176 - RNA, 22 nt, Homo sapiens
auagaucuauuuauguaucccu

SEQ ID NO: 58177 - RNA, 22 nt, Homo sapiens
auagauucauuugaggagauuu

SEQ ID NO: 58178 - RNA, 22 nt, Homo sapiens
auagcaaugccccaauccuugg

SEQ ID NO: 58179 - RNA, 22 nt, Homo sapiens
auaaucaugucugaaaccuuug

SEQ ID NO: 58180 - RNA, 22 nt, Homo sapiens
auaauaucagguugugaugaug

SEQ ID NO: 58181 - RNA, 19 nt, Homo sapiens
auaauuagcagugaggaca

SEQ ID NO: 58182 - RNA, 22 nt, Homo sapiens
auaauguuugauugagcagaua

SEQ ID NO: 58183 - RNA, 22 nt, Homo sapiens
acauguauauaaugcauagcga

SEQ ID NO: 58184 - RNA, 22 nt, Homo sapiens
acaguguuccuuuguugugacu

SEQ ID NO: 58185 - RNA, 22 nt, Homo sapiens
acaguacaugauaaauaaggua

SEQ ID NO: 58186 - RNA, 22 nt, Homo sapiens
acaggugaaguauuacacuaag

SEQ ID NO: 58187 - RNA, 22 nt, Homo sapiens
acaguaaugggccccuuuuccu

SEQ ID NO: 58188 - RNA, 22 nt, Homo sapiens
acauacuucuuuacauuccaua

SEQ ID NO: 58189 - RNA, 22 nt, Homo sapiens
acaucauugggggcuacaggug

SEQ ID NO: 58190 - RNA, 19 nt, Homo sapiens
accuguagaaaguacaaca

SEQ ID NO: 58191 - RNA, 22 nt, Homo sapiens
accugagacuaggcauuuuaua

SEQ ID NO: 58192 - RNA, 22 nt, Homo sapiens
accuuguagcaaaccuaacaua

SEQ ID NO: 58193 - RNA, 22 nt, Homo sapiens
acacuuucuggagcugcacaua

SEQ ID NO: 58194 - RNA, 22 nt, Homo sapiens
acaacaguuuuaucaccccaga

SEQ ID NO: 58195 - RNA, 22 nt, Homo sapiens
acacuguugacauuuuguagug

SEQ ID NO: 58196 - RNA, 22 nt, Homo sapiens
acagaccuauuucaaucauuua

SEQ ID NO: 58197 - RNA, 22 nt, Homo sapiens
acagcagugccccacucuacug

SEQ ID NO: 58198 - RNA, 20 nt, Homo sapiens
acagcacugguuucaagcaa

SEQ ID NO: 58199 - RNA, 21 nt, Homo sapiens
acaaagcuggagggagacugc

SEQ ID NO: 58200 - RNA, 22 nt, Homo sapiens
acaagcacaaauuuaauccugu

SEQ ID NO: 58201 - RNA, 22 nt, Homo sapiens
acaagacuucuuguauucuagu

SEQ ID NO: 58202 - RNA, 22 nt, Homo sapiens
aauucuguauuguuuagggacu

SEQ ID NO: 58203 - RNA, 22 nt, Homo sapiens
aauucacuucuuuuaggcaggg

SEQ ID NO: 58204 - RNA, 22 nt, Homo sapiens
aauucacuuguggcagauccuu

SEQ ID NO: 58205 - RNA, 22 nt, Homo sapiens
aauugaaugauaugggacauuu

SEQ ID NO: 58206 - RNA, 22 nt, Homo sapiens
aauugcaauggacaaugcagca

SEQ ID NO: 58207 - RNA, 22 nt, Homo sapiens
aaucugucuagacaaggagucu

SEQ ID NO: 58208 - RNA, 22 nt, Homo sapiens
aaugacuaagaugguacauuuu

SEQ ID NO: 58209 - RNA, 20 nt, Homo sapiens
aaggcuuucgaguuccaggg

SEQ ID NO: 58210 - RNA, 22 nt, Homo sapiens
aaggcaugcaguacguuucuau

SEQ ID NO: 58211 - RNA, 22 nt, Homo sapiens
aaggcagugugcacauaacacu

SEQ ID NO: 58212 - RNA, 22 nt, Homo sapiens
aaggcaacgugaguuguugauu

SEQ ID NO: 58213 - RNA, 22 nt, Homo sapiens
aaggcaagguggauaaugaagc

SEQ ID NO: 58214 - RNA, 22 nt, Homo sapiens
aaggcagucacuaaauagugag

SEQ ID NO: 58215 - RNA, 22 nt, Homo sapiens
aagcuguugguggaucuaccau

SEQ ID NO: 58216 - RNA, 22 nt, Homo sapiens
aagcugguguguauuauucacu

SEQ ID NO: 58217 - RNA, 22 nt, Homo sapiens
agcacgaaaccaaauucuguga

SEQ ID NO: 58218 - RNA, 22 nt, Homo sapiens
agcagcaauuuuguaugguuua

SEQ ID NO: 58219 - RNA, 22 nt, Homo sapiens
agcagcaccaaacagacuaaga

SEQ ID NO: 58220 - RNA, 22 nt, Homo sapiens
agcagcacaucccuuucuggcc

SEQ ID NO: 58221 - RNA, 22 nt, Homo sapiens
agcaccauuucucuaaagcacu

SEQ ID NO: 58222 - RNA, 22 nt, Homo sapiens
agaguaguuucuauauucuuca

SEQ ID NO: 58223 - RNA, 22 nt, Homo sapiens
agagguagaagauaggcuacag

SEQ ID NO: 58224 - RNA, 22 nt, Homo sapiens
agagcauugaguuaaugguuca

SEQ ID NO: 58225 - RNA, 22 nt, Homo sapiens
acuuuguuauggcaacccuaag

SEQ ID NO: 58226 - RNA, 20 nt, Homo sapiens
agagcaaagccgcaccccua

SEQ ID NO: 58227 - RNA, 22 nt, Homo sapiens
acuuugguuaucauacuuucag

SEQ ID NO: 58228 - RNA, 22 nt, Homo sapiens
acugcauuugucugucucaauu

SEQ ID NO: 58229 - RNA, 22 nt, Homo sapiens
acuggcuguuaggaauuaccuc

SEQ ID NO: 58230 - RNA, 22 nt, Homo sapiens
acugcauuugguaaagucaaga

SEQ ID NO: 58231 - RNA, 22 nt, Homo sapiens
aggcaugauuguauuuugcucu

SEQ ID NO: 58232 - RNA, 22 nt, Homo sapiens
aggcuuuuggagguggcuuucu

SEQ ID NO: 58233 - RNA, 22 nt, Homo sapiens
agguaaguauguuauuacuuuu

SEQ ID NO: 58234 - RNA, 20 nt, Homo sapiens
agguagauagaugauagaua

SEQ ID NO: 58235 - RNA, 21 nt, Homo sapiens
aggcaagauuacuuacgagca

SEQ ID NO: 58236 - RNA, 21 nt, Homo sapiens
aggcaagacuuuuagguuugu

SEQ ID NO: 58237 - RNA, 22 nt, Homo sapiens
aggcaaguugcucaaaugcaaa

SEQ ID NO: 58238 - RNA, 22 nt, Homo sapiens
aggcaaugugagaguuuauuca

SEQ ID NO: 58239 - RNA, 22 nt, Homo sapiens
agcuuuuugggcagcuauugac

SEQ ID NO: 58240 - RNA, 21 nt, Homo sapiens
aggaagacuaugaucaauugg

SEQ ID NO: 58241 - RNA, 22 nt, Homo sapiens
aggaaucuaagguaucagguua

SEQ ID NO: 58242 - RNA, 18 nt, Homo sapiens
aggaaugguaauacuuca

SEQ ID NO: 58243 - RNA, 22 nt, Homo sapiens
aggaaugucaaugguaguuuaa

SEQ ID NO: 58244 - RNA, 22 nt, Homo sapiens
aggaauguuaguacuucuuagu

SEQ ID NO: 58245 - RNA, 21 nt, Homo sapiens
agcuaaauuggaaauuucugu

SEQ ID NO: 58246 - RNA, 22 nt, Homo sapiens
agcuaaaucucauguugaauug

SEQ ID NO: 58247 - RNA, 22 nt, Homo sapiens
agcuccaugauaguaugucugu

SEQ ID NO: 58248 - RNA, 22 nt, Homo sapiens
agcuacuguuagucuaguuagg

SEQ ID NO: 58249 - RNA, 22 nt, Homo sapiens
agcugcaauguuuaguauaaua

SEQ ID NO: 58250 - RNA, 22 nt, Homo sapiens
agcugcaaagggagagaugauu

SEQ ID NO: 58251 - RNA, 22 nt, Homo sapiens
gaucuguuucaauugucuuagu

SEQ ID NO: 58252 - RNA, 22 nt, Homo sapiens
gauauguaaaaauuauaucuga

SEQ ID NO: 58253 - RNA, 22 nt, Homo sapiens
gaugacagugaguaaccccaac

SEQ ID NO: 58254 - RNA, 22 nt, Homo sapiens
gaucuguuuuccuauuguuugu

SEQ ID NO: 58255 - RNA, 22 nt, Homo sapiens
gaugaaacaucuuuggaaacug

SEQ ID NO: 58256 - RNA, 21 nt, Homo sapiens
gauaaguuggcagccagcacc

SEQ ID NO: 58257 - RNA, 22 nt, Homo sapiens
gauaagagaugauuuugccaug

SEQ ID NO: 58258 - RNA, 18 nt, Homo sapiens
gauaacaguggacuaugc

SEQ ID NO: 58259 - RNA, 22 nt, Homo sapiens
gauaaaguauuggguacuaugc

SEQ ID NO: 58260 - RNA, 22 nt, Homo sapiens
gagguaagagaauaaacaguuu

SEQ ID NO: 58261 - RNA, 22 nt, Homo sapiens
gaggacauuaugcuaaguggaa

SEQ ID NO: 58262 - RNA, 22 nt, Homo sapiens
gaggcauugaagauauggaagu

SEQ ID NO: 58263 - RNA, 21 nt, Homo sapiens
gagcacauuguccucuaacgc

SEQ ID NO: 58264 - RNA, 22 nt, Homo sapiens
gagcacauguggagagucuggg

SEQ ID NO: 58265 - RNA, 22 nt, Homo sapiens
gagcacccuuuguugauugcaa

SEQ ID NO: 58266 - RNA, 16 nt, Homo sapiens
gacuaauacaaaggaa

SEQ ID NO: 58267 - RNA, 22 nt, Homo sapiens
gacuaaugaaagagugugauau

SEQ ID NO: 58268 - RNA, 22 nt, Homo sapiens
gagcugaauugcugccauuugc

SEQ ID NO: 58269 - RNA, 22 nt, Homo sapiens
gaggagucagacugugcaaggu

SEQ ID NO: 58270 - RNA, 22 nt, Homo sapiens
gagcuguuuuucacuagaccaa

SEQ ID NO: 58271 - RNA, 22 nt, Homo sapiens
gaggcauugaaauauugcuuau

SEQ ID NO: 58272 - RNA, 22 nt, Homo sapiens
gauggauuuuaagugaaugaaa

SEQ ID NO: 58273 - RNA, 22 nt, Homo sapiens
gaugaucucuggugguaaagac

SEQ ID NO: 58274 - RNA, 22 nt, Homo sapiens
gauggaauuaaaaucagaauca

SEQ ID NO: 58275 - RNA, 22 nt, Homo sapiens
gauuccauuuguggcuauuuac

SEQ ID NO: 58276 - RNA, 22 nt, Homo sapiens
gauuuugguuagggaaggauac

SEQ ID NO: 58277 - RNA, 22 nt, Homo sapiens
gauuuguuggccugugagcuag

SEQ ID NO: 58278 - RNA, 22 nt, Homo sapiens
gauuuuuggggaagccucuuau

SEQ ID NO: 58279 - RNA, 23 nt, Homo sapiens
gcaaauaucguagagugucccug

SEQ ID NO: 58280 - RNA, 22 nt, Homo sapiens
gcaaagaaugcagauuugccuc

SEQ ID NO: 58281 - RNA, 22 nt, Homo sapiens
gcaaaauugagaagggaauaua

SEQ ID NO: 58282 - RNA, 21 nt, Homo sapiens
gcaaacauccuuugaugccag

SEQ ID NO: 58283 - RNA, 22 nt, Homo sapiens
gcaaaaaguagugcugguuagg

SEQ ID NO: 58284 - RNA, 20 nt, Homo sapiens
gcaacauggccagagugaau

SEQ ID NO: 58285 - RNA, 22 nt, Homo sapiens
gcaucacagcuccugugcuggc

SEQ ID NO: 58286 - RNA, 22 nt, Homo sapiens
gcauauguuuggguguguauau

SEQ ID NO: 58287 - RNA, 19 nt, Homo sapiens
gcaucauuaguugcuuuuc

SEQ ID NO: 58288 - RNA, 20 nt, Homo sapiens
gcauaugucuuuauggcagc

SEQ ID NO: 58289 - RNA, 22 nt, Homo sapiens
gcagucaucugaaggcuuaacu

SEQ ID NO: 58290 - RNA, 20 nt, Homo sapiens
gcaguguucacuguauuccu

SEQ ID NO: 58291 - RNA, 22 nt, Homo sapiens
gccaagaucugaauaauuaaga

SEQ ID NO: 58292 - RNA, 22 nt, Homo sapiens
gccaagauugguuuaauauucc

SEQ ID NO: 58293 - RNA, 22 nt, Homo sapiens
gcaugauuuuauaucuauguaa

SEQ ID NO: 58294 - RNA, 23 nt, Homo sapiens
cuguggauaugaguuguaaaugg

SEQ ID NO: 58295 - RNA, 22 nt, Homo sapiens
cuguggguuuuacuguuuuacu

SEQ ID NO: 58296 - RNA, 22 nt, Homo sapiens
cuggguacccuuuaaacaggaa

SEQ ID NO: 58297 - RNA, 20 nt, Homo sapiens
cuugaagacuaugcugcuga

SEQ ID NO: 58298 - RNA, 22 nt, Homo sapiens
cuugaauguaaauaauguacag

SEQ ID NO: 58299 - RNA, 22 nt, Homo sapiens
cuugaacaaagagauuccauua

SEQ ID NO: 58300 - RNA, 18 nt, Homo sapiens
cuuccuuagucugguuaa

SEQ ID NO: 58301 - RNA, 22 nt, Homo sapiens
cuucuguuaguucugauaacuu

SEQ ID NO: 58302 - RNA, 22 nt, Homo sapiens
cuugacacugcaguuuuccugg

SEQ ID NO: 58303 - RNA, 22 nt, Homo sapiens
cuugacacugguuuucugaaua

SEQ ID NO: 58304 - RNA, 22 nt, Homo sapiens
cugugguugagcuuugccauga

SEQ ID NO: 58305 - RNA, 22 nt, Homo sapiens
cugugguuuaaggaauuuugac

SEQ ID NO: 58306 - RNA, 22 nt, Homo sapiens
cuggcaagagugaaccagcugu

SEQ ID NO: 58307 - RNA, 22 nt, Homo sapiens
cuggccagagacauucauuaaa

SEQ ID NO: 58308 - RNA, 22 nt, Homo sapiens
cugaaaguuauucaggggcaag

SEQ ID NO: 58309 - RNA, 22 nt, Homo sapiens
cugagaaugaugauuuccaguu

SEQ ID NO: 58310 - RNA, 22 nt, Homo sapiens
cuggcaaaaagagggcaauaau

SEQ ID NO: 58311 - RNA, 22 nt, Homo sapiens
cugaauguccaggcagagguuu

SEQ ID NO: 58312 - RNA, 22 nt, Homo sapiens
cugaaucauugcauuaucaagg

SEQ ID NO: 58313 - RNA, 22 nt, Homo sapiens
cugaaaugaauuauuuucuuuc

SEQ ID NO: 58314 - RNA, 22 nt, Homo sapiens
cucucuguuugucuguuauugg

SEQ ID NO: 58315 - RNA, 22 nt, Homo sapiens
cucuggauauuccugucuaaaa

SEQ ID NO: 58316 - RNA, 22 nt, Homo sapiens
gaagacauuuacaugggagacc

SEQ ID NO: 58317 - RNA, 22 nt, Homo sapiens
gaagaucacacuguagaucuau

SEQ ID NO: 58318 - RNA, 22 nt, Homo sapiens
gaagauaucuaguaccauuguc

SEQ ID NO: 58319 - RNA, 22 nt, Homo sapiens
gaagcagcauucugguuuuugg

SEQ ID NO: 58320 - RNA, 22 nt, Homo sapiens
gaagcgaggugauuagcagaca

SEQ ID NO: 58321 - RNA, 22 nt, Homo sapiens
gaauagugcugcaaugaacaua

SEQ ID NO: 58322 - RNA, 22 nt, Homo sapiens
gaauagugcugcaauaaacaua

SEQ ID NO: 58323 - RNA, 22 nt, Homo sapiens
gaauagugcugcagcaaacaua

SEQ ID NO: 58324 - RNA, 22 nt, Homo sapiens
gaauagugcugcaguaaacaua

SEQ ID NO: 58325 - RNA, 22 nt, Homo sapiens
gaauagugcugcgauaaacaua

SEQ ID NO: 58326 - RNA, 22 nt, Homo sapiens
gacauuaucagguuuguuuucu

SEQ ID NO: 58327 - RNA, 22 nt, Homo sapiens
gaccacauuccacacaggcuuu

SEQ ID NO: 58328 - RNA, 22 nt, Homo sapiens
gaaucauuguuucuaaguuugu

SEQ ID NO: 58329 - RNA, 22 nt, Homo sapiens
gacauguuucucucuguuuacu

SEQ ID NO: 58330 - RNA, 22 nt, Homo sapiens
gaaagauuuccugagcuagaaa

SEQ ID NO: 58331 - RNA, 22 nt, Homo sapiens
gaaagcugguauagauacauua

SEQ ID NO: 58332 - RNA, 22 nt, Homo sapiens
gaaagauuuuaacugggagacu

SEQ ID NO: 58333 - RNA, 22 nt, Homo sapiens
gaaaucucuacuauuuugaucu

SEQ ID NO: 58334 - RNA, 22 nt, Homo sapiens
gaaaguaauuaacgauuguugc

SEQ ID NO: 58335 - RNA, 22 nt, Homo sapiens
gaaaguguugagauuacaggca

SEQ ID NO: 58336 - RNA, 22 nt, Homo sapiens
gaaaugcucauuuuggauccuu

SEQ ID NO: 58337 - RNA, 22 nt, Homo sapiens
gaaaugucugagauguggcuca

SEQ ID NO: 58338 - RNA, 22 nt, Homo sapiens
gaacuuucuacauuaccucuuu

SEQ ID NO: 58339 - RNA, 22 nt, Homo sapiens
gaacuguuucuggugaaagagu

SEQ ID NO: 58340 - RNA, 23 nt, Homo sapiens
cuuuugcaaugugaucuugccac

SEQ ID NO: 58341 - RNA, 22 nt, Homo sapiens
cuuggauuauaauggaauauuu

SEQ ID NO: 58342 - RNA, 22 nt, Homo sapiens
cuuuuugcugcagcaauacugg

SEQ ID NO: 58343 - RNA, 22 nt, Homo sapiens
cuuuuugcaaauacaacucuga

SEQ ID NO: 58344 - RNA, 22 nt, Homo sapiens
cuugcauuuuggagaaugcuga

SEQ ID NO: 58345 - RNA, 22 nt, Homo sapiens
auuggauagucuuuaucuguug

SEQ ID NO: 58346 - RNA, 22 nt, Homo sapiens
auuggcaauguacauaucuugc

SEQ ID NO: 58347 - RNA, 22 nt, Homo sapiens
auuggcaaucgucuccauuuuu

SEQ ID NO: 58348 - RNA, 20 nt, Homo sapiens
auuugcauuauggagcaccc

SEQ ID NO: 58349 - RNA, 19 nt, Homo sapiens
auuugaucaucaggcacag

SEQ ID NO: 58350 - RNA, 22 nt, Homo sapiens
auuucuacuccuguguccagaa

SEQ ID NO: 58351 - RNA, 22 nt, Homo sapiens
auuggucuauuaaaccuaaguu

SEQ ID NO: 58352 - RNA, 22 nt, Homo sapiens
auugauaguuuaauaggaauug

SEQ ID NO: 58353 - RNA, 22 nt, Homo sapiens
auugagcuuuuuaaaauauagu

SEQ ID NO: 58354 - RNA, 19 nt, Homo sapiens
auugauuaaguuugcuguc

SEQ ID NO: 58355 - RNA, 22 nt, Homo sapiens
auugcaaagcguagacucuaaa

SEQ ID NO: 58356 - RNA, 22 nt, Homo sapiens
auugcaaugggaaacuaugaaa

SEQ ID NO: 58357 - RNA, 22 nt, Homo sapiens
auugcacaucugcacuacagcc

SEQ ID NO: 58358 - RNA, 22 nt, Homo sapiens
auuauaugucaucacagacacc

SEQ ID NO: 58359 - RNA, 22 nt, Homo sapiens
augugcaagaucauuaaagcuc

SEQ ID NO: 58360 - RNA, 17 nt, Homo sapiens
augugaauguucaaaua

SEQ ID NO: 58361 - RNA, 22 nt, Homo sapiens
augugacugauggagaauaugu

SEQ ID NO: 58362 - RNA, 22 nt, Homo sapiens
augucuuucauagagacccaga

SEQ ID NO: 58363 - RNA, 22 nt, Homo sapiens
augugcaaauuuccaaacucuu

SEQ ID NO: 58364 - RNA, 22 nt, Homo sapiens
augugcaaagcacuguucagca

SEQ ID NO: 58365 - RNA, 22 nt, Homo sapiens
augugacuugugaaaaguucag

SEQ ID NO: 58366 - RNA, 22 nt, Homo sapiens
auugacaguuggccaguaagug

SEQ ID NO: 58367 - RNA, 19 nt, Homo sapiens
auugacauugggguguuca

SEQ ID NO: 58368 - RNA, 22 nt, Homo sapiens
auuauuaguuguugaaugaagu

SEQ ID NO: 58369 - RNA, 22 nt, Homo sapiens
auuauuagucggccagcuguua

SEQ ID NO: 58370 - RNA, 22 nt, Homo sapiens
auucaaagugcauguucccacu

SEQ ID NO: 58371 - RNA, 22 nt, Homo sapiens
auucaacuaauuauugaagaug

SEQ ID NO: 58372 - RNA, 23 nt, Homo sapiens
auucaaguagugagagugguuau

SEQ ID NO: 58373 - RNA, 22 nt, Homo sapiens
caauggcaaugaaauagugaga

SEQ ID NO: 58374 - RNA, 21 nt, Homo sapiens
caauggcacaaucucugcuca

SEQ ID NO: 58375 - RNA, 22 nt, Homo sapiens
caagugcuuucuuggggauuua

SEQ ID NO: 58376 - RNA, 22 nt, Homo sapiens
caaguguuuccuuaaauacuug

SEQ ID NO: 58377 - RNA, 22 nt, Homo sapiens
caauggcacuauuggaaaaggu

SEQ ID NO: 58378 - RNA, 22 nt, Homo sapiens
cacaaaguagauuagucuucca

SEQ ID NO: 58379 - RNA, 22 nt, Homo sapiens
cacacugucuucauuacuguag

SEQ ID NO: 58380 - RNA, 22 nt, Homo sapiens
cacacuguuuuccauggggguu

SEQ ID NO: 58381 - RNA, 22 nt, Homo sapiens
caagugaauaguugcucucaga

SEQ ID NO: 58382 - RNA, 22 nt, Homo sapiens
caaguguuggcuuguauacaaa

SEQ ID NO: 58383 - RNA, 22 nt, Homo sapiens
auuuuugguugguaggcuauua

SEQ ID NO: 58384 - RNA, 18 nt, Homo sapiens
auuuuugcaguccacaug

SEQ ID NO: 58385 - RNA, 22 nt, Homo sapiens
auuugucacuauguggcuaaua

SEQ ID NO: 58386 - RNA, 22 nt, Homo sapiens
auuugguuauucaguuguucag

SEQ ID NO: 58387 - RNA, 22 nt, Homo sapiens
cagcaaaucauccuauuugagc

SEQ ID NO: 58388 - RNA, 22 nt, Homo sapiens
cacugcauuacucaugagcaug

SEQ ID NO: 58389 - RNA, 22 nt, Homo sapiens
cacgugcuuucuuuucauuuag

SEQ ID NO: 58390 - RNA, 22 nt, Homo sapiens
caccuguacauggcaguguccu

SEQ ID NO: 58391 - RNA, 22 nt, Homo sapiens
cucaugcugucuucugggguaa

SEQ ID NO: 58392 - RNA, 22 nt, Homo sapiens
cucagucuaugauacuuugcua

SEQ ID NO: 58393 - RNA, 22 nt, Homo sapiens
cucaggcacucugauuccagug

SEQ ID NO: 58394 - RNA, 22 nt, Homo sapiens
cucauugcaaucuccaccuccc

SEQ ID NO: 58395 - RNA, 22 nt, Homo sapiens
cuccauuuggaacagauguccu

SEQ ID NO: 58396 - RNA, 22 nt, Homo sapiens
cuccauuuaguccuuuuagaag

SEQ ID NO: 58397 - RNA, 22 nt, Homo sapiens
cuagcuuuuuaugacaaucuug

SEQ ID NO: 58398 - RNA, 22 nt, Homo sapiens
ccuucauccuccagcaggcuag

SEQ ID NO: 58399 - RNA, 22 nt, Homo sapiens
ccuggcaagagacugaagauag

SEQ ID NO: 58400 - RNA, 22 nt, Homo sapiens
ccaguuuucaagauaaugguuu

SEQ ID NO: 58401 - RNA, 22 nt, Homo sapiens
cauugucccucaaugacuauga

SEQ ID NO: 58402 - RNA, 22 nt, Homo sapiens
ccaguuuuucauuuauacuagu

SEQ ID NO: 58403 - RNA, 22 nt, Homo sapiens
cauugguuuuucaggaguauau

SEQ ID NO: 58404 - RNA, 22 nt, Homo sapiens
ccagcaccauuuguugaauagg

SEQ ID NO: 58405 - RNA, 22 nt, Homo sapiens
cauugcuuuuggugguuuagac

SEQ ID NO: 58406 - RNA, 22 nt, Homo sapiens
cauugcagauccuucaaaugac

SEQ ID NO: 58407 - RNA, 22 nt, Homo sapiens
cauugcacuuagacaacuuuug

SEQ ID NO: 58408 - RNA, 22 nt, Homo sapiens
cauugcacuccacuccugaaca

SEQ ID NO: 58409 - RNA, 22 nt, Homo sapiens
cauugcaaugaggucuugcagu

SEQ ID NO: 58410 - RNA, 22 nt, Homo sapiens
cauuacacuuguaagguuuuuc

SEQ ID NO: 58411 - RNA, 22 nt, Homo sapiens
cauguaacaucccgcuguagga

SEQ ID NO: 58412 - RNA, 22 nt, Homo sapiens
cauguaguagaaggagccagac

SEQ ID NO: 58413 - RNA, 22 nt, Homo sapiens
cauggcuuuaagcaacaccaag

SEQ ID NO: 58414 - RNA, 22 nt, Homo sapiens
cauggcuuucacaguaaagccu

SEQ ID NO: 58415 - RNA, 22 nt, Homo sapiens
caugguacugccacagaagagu

SEQ ID NO: 58416 - RNA, 22 nt, Homo sapiens
cagcuaaauuguuaaauccaag

SEQ ID NO: 58417 - RNA, 22 nt, Homo sapiens
uauugcuaacaucccuuaugua

SEQ ID NO: 58418 - RNA, 22 nt, Homo sapiens
uauugcucaugcauuuaauuuc

SEQ ID NO: 58419 - RNA, 22 nt, Homo sapiens
uauugcagauacccaggaaguu

SEQ ID NO: 58420 - RNA, 22 nt, Homo sapiens
ucaaaguaaagccucaggaugg

SEQ ID NO: 58421 - RNA, 20 nt, Homo sapiens
ucaaaguaugcucugcacua

SEQ ID NO: 58422 - RNA, 22 nt, Homo sapiens
uauuguacauguuauagauuuu

SEQ ID NO: 58423 - RNA, 22 nt, Homo sapiens
ucaaagugacaaaguugcagca

SEQ ID NO: 58424 - RNA, 22 nt, Homo sapiens
ucaaagugagcuccuucucacu

SEQ ID NO: 58425 - RNA, 22 nt, Homo sapiens
ucaaagacacacaaggagaagg

SEQ ID NO: 58426 - RNA, 22 nt, Homo sapiens
ucaaaucaucuuuuccaaagcu

SEQ ID NO: 58427 - RNA, 22 nt, Homo sapiens
ucaaauguuuguuuaaggcuua

SEQ ID NO: 58428 - RNA, 22 nt, Homo sapiens
ucaaauuccaagucuagguagg

SEQ ID NO: 58429 - RNA, 22 nt, Homo sapiens
ucaacagugggcacuguaaaug

SEQ ID NO: 58430 - RNA, 22 nt, Homo sapiens
ucaaauguucccuguacuggcc

SEQ ID NO: 58431 - RNA, 22 nt, Homo sapiens
ucaacaggucaauugcauagaa

SEQ ID NO: 58432 - RNA, 22 nt, Homo sapiens
uaugauuuuugggagaggucaa

SEQ ID NO: 58433 - RNA, 21 nt, Homo sapiens
uaugagucugcaagaaccaca

SEQ ID NO: 58434 - RNA, 22 nt, Homo sapiens
uauggauuugccuauucuguau

SEQ ID NO: 58435 - RNA, 22 nt, Homo sapiens
uauggauuugcauuccccaugu

SEQ ID NO: 58436 - RNA, 22 nt, Homo sapiens
uauggaaaucuuaccuuauggu

SEQ ID NO: 58437 - RNA, 22 nt, Homo sapiens
uaugccuuucucacuaagcuua

SEQ ID NO: 58438 - RNA, 19 nt, Homo sapiens
uaugcuauuuauuagaagu

SEQ ID NO: 58439 - RNA, 22 nt, Homo sapiens
uaugcagacauuguuccaacca

SEQ ID NO: 58440 - RNA, 22 nt, Homo sapiens
uaugcacuauagcauauguggu

SEQ ID NO: 58441 - RNA, 22 nt, Homo sapiens
uauuacagaccauaucgccggg

SEQ ID NO: 58442 - RNA, 22 nt, Homo sapiens
uauuacugucaauaucacagaa

SEQ ID NO: 58443 - RNA, 20 nt, Homo sapiens
uauuacagaguaauggugga

SEQ ID NO: 58444 - RNA, 21 nt, Homo sapiens
uaugguuucuaauucugcagg

SEQ ID NO: 58445 - RNA, 22 nt, Homo sapiens
uaugguuuuaagguuaaggacu

SEQ ID NO: 58446 - RNA, 20 nt, Homo sapiens
uaugguuuuagguauagcau

SEQ ID NO: 58447 - RNA, 22 nt, Homo sapiens
uauggauuuucagauucuuauc

SEQ ID NO: 58448 - RNA, 22 nt, Homo sapiens
uaugguuuucucuuacguguug

SEQ ID NO: 58449 - RNA, 22 nt, Homo sapiens
uagcaggaaaccuguguugagg

SEQ ID NO: 58450 - RNA, 22 nt, Homo sapiens
uagcaguaagaaacugacauug

SEQ ID NO: 58451 - RNA, 22 nt, Homo sapiens
uagcaguaccccaguauccugg

SEQ ID NO: 58452 - RNA, 22 nt, Homo sapiens
uagcagacuauuuugugauaau

SEQ ID NO: 58453 - RNA, 22 nt, Homo sapiens
uagcagaauaacuugccagccu

SEQ ID NO: 58454 - RNA, 22 nt, Homo sapiens
uagcacugucuugcaccugugc

SEQ ID NO: 58455 - RNA, 22 nt, Homo sapiens
uagcagcaaagcaggaucugcu

SEQ ID NO: 58456 - RNA, 22 nt, Homo sapiens
uaguaaacagcucugccacaau

SEQ ID NO: 58457 - RNA, 22 nt, Homo sapiens
uagucacacacucaacuuuuca

SEQ ID NO: 58458 - RNA, 22 nt, Homo sapiens
uaguauguuuauagcauugagu

SEQ ID NO: 58459 - RNA, 22 nt, Homo sapiens
uagugaaugucacuggcuguug

SEQ ID NO: 58460 - RNA, 22 nt, Homo sapiens
uagugcugagauugagaagccc

SEQ ID NO: 58461 - RNA, 22 nt, Homo sapiens
uauaguguuuucaaaaguaugu

SEQ ID NO: 58462 - RNA, 22 nt, Homo sapiens
uauauaagcugaugagccacaa

SEQ ID NO: 58463 - RNA, 22 nt, Homo sapiens
uagugcugugauaaacauauau

SEQ ID NO: 58464 - RNA, 22 nt, Homo sapiens
uauagcauuuugauccuguaga

SEQ ID NO: 58465 - RNA, 22 nt, Homo sapiens
uauagcagugaguauugacuaa

SEQ ID NO: 58466 - RNA, 22 nt, Homo sapiens
uaucauugccucaaucuguauu

SEQ ID NO: 58467 - RNA, 22 nt, Homo sapiens
uaucaucauguuuuugcugugu

SEQ ID NO: 58468 - RNA, 22 nt, Homo sapiens
uaucacuuugauaguuuaaaug

SEQ ID NO: 58469 - RNA, 22 nt, Homo sapiens
uauaugcucugggauccugaaa

SEQ ID NO: 58470 - RNA, 22 nt, Homo sapiens
uaaugcauguaaugggcugaua

SEQ ID NO: 58471 - RNA, 22 nt, Homo sapiens
uaauugaaugcagacaccaggg

SEQ ID NO: 58472 - RNA, 22 nt, Homo sapiens
uaaugugaauagugcuguaaug

SEQ ID NO: 58473 - RNA, 22 nt, Homo sapiens
uaauucuguauguaucagaguu

SEQ ID NO: 58474 - RNA, 22 nt, Homo sapiens
uaauugcaguucuguguuauau

SEQ ID NO: 58475 - RNA, 22 nt, Homo sapiens
uaaugcauacagaagguguuuu

SEQ ID NO: 58476 - RNA, 22 nt, Homo sapiens
uaagucuuuuuggaguuuauaa

SEQ ID NO: 58477 - RNA, 22 nt, Homo sapiens
uaaucacagagguuuggccuca

SEQ ID NO: 58478 - RNA, 22 nt, Homo sapiens
uaauauguauacagacagauac

SEQ ID NO: 58479 - RNA, 22 nt, Homo sapiens
uaaggcuucuuggaauacugca

SEQ ID NO: 58480 - RNA, 22 nt, Homo sapiens
uaaggcuuaugguaaaguccug

SEQ ID NO: 58481 - RNA, 22 nt, Homo sapiens
uaaggcuagcaagaugagaaua

SEQ ID NO: 58482 - RNA, 22 nt, Homo sapiens
uaaggcuaggaauucucugaag

SEQ ID NO: 58483 - RNA, 22 nt, Homo sapiens
uaaggcaaaccuuggcugcagu

SEQ ID NO: 58484 - RNA, 22 nt, Homo sapiens
uaagucacuccagguuaaagug

SEQ ID NO: 58485 - RNA, 22 nt, Homo sapiens
uaaguauuuuaauuccuggcau

SEQ ID NO: 58486 - RNA, 22 nt, Homo sapiens
uaagguguagacuggucacaag

SEQ ID NO: 58487 - RNA, 22 nt, Homo sapiens
guugcaaaguaauugugguuuu

SEQ ID NO: 58488 - RNA, 22 nt, Homo sapiens
uaaaguguuuguuauuaaaggu

SEQ ID NO: 58489 - RNA, 20 nt, Homo sapiens
guugaugcugaaguugcuua

SEQ ID NO: 58490 - RNA, 22 nt, Homo sapiens
guugaacaauagauucauauca

SEQ ID NO: 58491 - RNA, 22 nt, Homo sapiens
guugaaaucaucacuuggcaug

SEQ ID NO: 58492 - RNA, 22 nt, Homo sapiens
guugaaauccuaacccccuagu

SEQ ID NO: 58493 - RNA, 22 nt, Homo sapiens
guucaucagggauauuggcuua

SEQ ID NO: 58494 - RNA, 20 nt, Homo sapiens
guucauguaauuaguucagg

SEQ ID NO: 58495 - RNA, 22 nt, Homo sapiens
guucuggagauaaagccaaggu

SEQ ID NO: 58496 - RNA, 20 nt, Homo sapiens
guucuugcucguguaucuuc

SEQ ID NO: 58497 - RNA, 22 nt, Homo sapiens
guucucacuggugcugguaagu

SEQ ID NO: 58498 - RNA, 22 nt, Homo sapiens
uaaaugcucuuuaaaagugcuu

SEQ ID NO: 58499 - RNA, 21 nt, Homo sapiens
uaaaugucauacaaagcaaug

SEQ ID NO: 58500 - RNA, 22 nt, Homo sapiens
uaacaagagagucagucagucc

SEQ ID NO: 58501 - RNA, 22 nt, Homo sapiens
uaacaguguagaggccuauugg

SEQ ID NO: 58502 - RNA, 22 nt, Homo sapiens
uaacaguguauuccuuuggaca

SEQ ID NO: 58503 - RNA, 22 nt, Homo sapiens
uaacagcauuugugucuaguag

SEQ ID NO: 58504 - RNA, 22 nt, Homo sapiens
uaacaccuuugauagcacuuuu

SEQ ID NO: 58505 - RNA, 21 nt, Homo sapiens
uacaagcuguagcacaugcca

SEQ ID NO: 58506 - RNA, 22 nt, Homo sapiens
uacacagucaaaaauuuccagg

SEQ ID NO: 58507 - RNA, 22 nt, Homo sapiens
uacagcacugugcauagugguu

SEQ ID NO: 58508 - RNA, 22 nt, Homo sapiens
uacagccacauaauguaugauu

SEQ ID NO: 58509 - RNA, 22 nt, Homo sapiens
uacacaugugaguucuuuucua

SEQ ID NO: 58510 - RNA, 22 nt, Homo sapiens
uacagaauucugucccuugagu

SEQ ID NO: 58511 - RNA, 22 nt, Homo sapiens
uacuauugcaucggugauuagg

SEQ ID NO: 58512 - RNA, 20 nt, Homo sapiens
uagcacacauguagaauagu

SEQ ID NO: 58513 - RNA, 22 nt, Homo sapiens
uagcacaucccuaaaaugcugu

SEQ ID NO: 58514 - RNA, 20 nt, Homo sapiens
uagcacaucuggcuguagag

SEQ ID NO: 58515 - RNA, 22 nt, Homo sapiens
uagcacuauuuauugaaaagga

SEQ ID NO: 58516 - RNA, 21 nt, Homo sapiens
uagcaaauugcuauuaaggca

SEQ ID NO: 58517 - RNA, 22 nt, Homo sapiens
uagauuguuuaaguggcacaca

SEQ ID NO: 58518 - RNA, 22 nt, Homo sapiens
uagauucaucuguuccuuuuga

SEQ ID NO: 58519 - RNA, 23 nt, Homo sapiens
uagaucaucaaguuuacugugcu

SEQ ID NO: 58520 - RNA, 22 nt, Homo sapiens
uagauaguuaugauuugaugau

SEQ ID NO: 58521 - RNA, 19 nt, Homo sapiens
uagagguuuaagaaaagaa

SEQ ID NO: 58522 - RNA, 22 nt, Homo sapiens
uagaucauauacuugccaugac

SEQ ID NO: 58523 - RNA, 22 nt, Homo sapiens
uagaucaauuaauuguuacuug

SEQ ID NO: 58524 - RNA, 21 nt, Homo sapiens
uagauaguugguucugaaucu

SEQ ID NO: 58525 - RNA, 22 nt, Homo sapiens
uagaucaacuuugguaagagaa

SEQ ID NO: 58526 - RNA, 20 nt, Homo sapiens
uagacagcuagauuagauag

SEQ ID NO: 58527 - RNA, 22 nt, Homo sapiens
gucacaggaaacuaauaugcgc

SEQ ID NO: 58528 - RNA, 22 nt, Homo sapiens
gucaaugcauccaugaauggcu

SEQ ID NO: 58529 - RNA, 20 nt, Homo sapiens
gucacuggcccagggcuugu

SEQ ID NO: 58530 - RNA, 22 nt, Homo sapiens
gucagaaucucagaugacaacg

SEQ ID NO: 58531 - RNA, 22 nt, Homo sapiens
gucagauaauuugcauccaucu

SEQ ID NO: 58532 - RNA, 22 nt, Homo sapiens
gucagcaaagaggaauaguuug

SEQ ID NO: 58533 - RNA, 22 nt, Homo sapiens
gucagcaaaguucuccugcaga

SEQ ID NO: 58534 - RNA, 22 nt, Homo sapiens
gugagauuaccauuuaaaucag

SEQ ID NO: 58535 - RNA, 22 nt, Homo sapiens
gucucccagccuacaucuuucu

SEQ ID NO: 58536 - RNA, 22 nt, Homo sapiens
gucuaguuuuaauacauuaaga

SEQ ID NO: 58537 - RNA, 22 nt, Homo sapiens
gucuaugagucccugaauuuaa

SEQ ID NO: 58538 - RNA, 20 nt, Homo sapiens
guccauuugcugccauugcu

SEQ ID NO: 58539 - RNA, 22 nt, Homo sapiens
gugaugguccagggaaucucuu

SEQ ID NO: 58540 - RNA, 22 nt, Homo sapiens
gugauuauccacgucuuuguga

SEQ ID NO: 58541 - RNA, 22 nt, Homo sapiens
gugauagaucugggauucagaa

SEQ ID NO: 58542 - RNA, 22 nt, Homo sapiens
gugaguuauuauuuauguaaac

SEQ ID NO: 58543 - RNA, 22 nt, Homo sapiens
gugaucuucauggaaggugaaa

SEQ ID NO: 58544 - RNA, 21 nt, Homo sapiens
gugaggaguuacuggcuuuga

SEQ ID NO: 58545 - RNA, 22 nt, Homo sapiens
gugagauuuucuccagguucag

SEQ ID NO: 58546 - RNA, 22 nt, Homo sapiens
gugagcauauuaguauugcacu

SEQ ID NO: 58547 - RNA, 22 nt, Homo sapiens
gugagcaauugauacuugaagu

SEQ ID NO: 58548 - RNA, 22 nt, Homo sapiens
guggcagaaaagagaagcaaug

SEQ ID NO: 58549 - RNA, 22 nt, Homo sapiens
guggaaucuagagaggcaguag

SEQ ID NO: 58550 - RNA, 22 nt, Homo sapiens
guggaagauaguguguuaaugu

SEQ ID NO: 58551 - RNA, 22 nt, Homo sapiens
guuauguuauguuauguuaugu

SEQ ID NO: 58552 - RNA, 22 nt, Homo sapiens
guuaugcagcuuagaaaaugaa

SEQ ID NO: 58553 - RNA, 22 nt, Homo sapiens
guuaugcagcaauugauaaucu

SEQ ID NO: 58554 - RNA, 22 nt, Homo sapiens
guuauugcucucgaagacucuc

SEQ ID NO: 58555 - RNA, 22 nt, Homo sapiens
guuauggaguauaugugaacug

SEQ ID NO: 58556 - RNA, 22 nt, Homo sapiens
guuauguuaguuacaaggcuag

SEQ ID NO: 58557 - RNA, 22 nt, Homo sapiens
guucaguuuugaaauguuaauu

SEQ ID NO: 58558 - RNA, 22 nt, Homo sapiens
guucaucaggaauauuggccua

SEQ ID NO: 58559 - RNA, 22 nt, Homo sapiens
guucaucagggauauuggccug

SEQ ID NO: 58560 - RNA, 22 nt, Homo sapiens
guucaucagggauacuggccuu

SEQ ID NO: 58561 - RNA, 22 nt, Homo sapiens
guucaucagggauacuggcuua

SEQ ID NO: 58562 - RNA, 21 nt, Homo sapiens
gugugcuugaauucagcuguc

SEQ ID NO: 58563 - RNA, 22 nt, Homo sapiens
guguuaaucucaaguacucuca

SEQ ID NO: 58564 - RNA, 22 nt, Homo sapiens
guguguaaauggcagugagcuc

SEQ ID NO: 58565 - RNA, 22 nt, Homo sapiens
gugugcauggagggggcaguga

SEQ ID NO: 58566 - RNA, 22 nt, Homo sapiens
ggaauguuaaggcgcuguuggu

SEQ ID NO: 58567 - RNA, 21 nt, Homo sapiens
ggaauuuagggaaugauuuag

SEQ ID NO: 58568 - RNA, 22 nt, Homo sapiens
ggaauuaaggcaauugaaagcu

SEQ ID NO: 58569 - RNA, 22 nt, Homo sapiens
ggaauauaaaacuuuugacagg

SEQ ID NO: 58570 - RNA, 22 nt, Homo sapiens
ggacaagaucuuccaccauuca

SEQ ID NO: 58571 - RNA, 22 nt, Homo sapiens
ggacaagagacugggacacuga

SEQ ID NO: 58572 - RNA, 22 nt, Homo sapiens
ggagugucccaaucucagcuca

SEQ ID NO: 58573 - RNA, 22 nt, Homo sapiens
ggaaguauaaacuuaguggagu

SEQ ID NO: 58574 - RNA, 22 nt, Homo sapiens
ggaagaauaaugggccuuagag

SEQ ID NO: 58575 - RNA, 22 nt, Homo sapiens
ggcaugaaguagcccacaggca

SEQ ID NO: 58576 - RNA, 21 nt, Homo sapiens
ggcauugugcccuugcucuag

SEQ ID NO: 58577 - RNA, 22 nt, Homo sapiens
ggcaacaaagacauuucaacau

SEQ ID NO: 58578 - RNA, 22 nt, Homo sapiens
ggcaacaugccgaaaccacguc

SEQ ID NO: 58579 - RNA, 22 nt, Homo sapiens
ggauuuguuggcauuagugaug

SEQ ID NO: 58580 - RNA, 22 nt, Homo sapiens
ggcaaagagacaugcaucgggg

SEQ ID NO: 58581 - RNA, 22 nt, Homo sapiens
ggauugugauaauuguugcaaa

SEQ ID NO: 58582 - RNA, 23 nt, Homo sapiens
ggauucaucuguuuguucgcugu

SEQ ID NO: 58583 - RNA, 22 nt, Homo sapiens
guauuuguugcagcagcacuau

SEQ ID NO: 58584 - RNA, 22 nt, Homo sapiens
gucaaagugauuguaauuaggu

SEQ ID NO: 58585 - RNA, 22 nt, Homo sapiens
gucaaaugcacagaaccauuaa

SEQ ID NO: 58586 - RNA, 22 nt, Homo sapiens
guauuguacuacaagcucuuua

SEQ ID NO: 58587 - RNA, 22 nt, Homo sapiens
guauugccacuuuugaacaguu

SEQ ID NO: 58588 - RNA, 22 nt, Homo sapiens
guauugccugugugccagccac

SEQ ID NO: 58589 - RNA, 22 nt, Homo sapiens
guauuaguuaucuacugcugug

SEQ ID NO: 58590 - RNA, 22 nt, Homo sapiens
guaugugcauuguaaauuuuga

SEQ ID NO: 58591 - RNA, 22 nt, Homo sapiens
guagcagccacacuugauaacu

SEQ ID NO: 58592 - RNA, 22 nt, Homo sapiens
guauaguaguacaaaaguuuuu

SEQ ID NO: 58593 - RNA, 22 nt, Homo sapiens
guaugaaaaucggagauugggu

SEQ ID NO: 58594 - RNA, 22 nt, Homo sapiens
guaugacacaggaagcuuaacc

SEQ ID NO: 58595 - RNA, 22 nt, Homo sapiens
guaugaccucgcuuuauugcag

SEQ ID NO: 58596 - RNA, 22 nt, Homo sapiens
guauccugaaguucucagcacu

SEQ ID NO: 58597 - RNA, 22 nt, Homo sapiens
guaucauuggcauguaaccaga

SEQ ID NO: 58598 - RNA, 22 nt, Homo sapiens
guaaagacacaugcacacguau

SEQ ID NO: 58599 - RNA, 22 nt, Homo sapiens
guaacguaaugucaaaaucuau

SEQ ID NO: 58600 - RNA, 22 nt, Homo sapiens
guaacucugucacuuacuaguu

SEQ ID NO: 58601 - RNA, 22 nt, Homo sapiens
guaacaccaguuauaucaguuc

SEQ ID NO: 58602 - RNA, 22 nt, Homo sapiens
guaaauguccugcuacagagug

SEQ ID NO: 58603 - RNA, 22 nt, Homo sapiens
guaacacaugcugcucucuggu

SEQ ID NO: 58604 - RNA, 22 nt, Homo sapiens
guaagauaguauguuuaaccca

SEQ ID NO: 58605 - RNA, 22 nt, Homo sapiens
ggucaacaucaucaugguaagu

SEQ ID NO: 58606 - RNA, 22 nt, Homo sapiens
guaaacuuccccucaugaauga

SEQ ID NO: 58607 - RNA, 22 nt, Homo sapiens
gguaaguuuggggcuaauuugu

SEQ ID NO: 58608 - RNA, 22 nt, Homo sapiens
ugcaccaauucuaaacaguucu

SEQ ID NO: 58609 - RNA, 22 nt, Homo sapiens
ugcaccacacuccauccugggc

SEQ ID NO: 58610 - RNA, 22 nt, Homo sapiens
ugcaccacugcacugccugggu

SEQ ID NO: 58611 - RNA, 22 nt, Homo sapiens
ugcagaaucccuucagauccga

SEQ ID NO: 58612 - RNA, 22 nt, Homo sapiens
ugcaccauugcauacuuaauua

SEQ ID NO: 58613 - RNA, 22 nt, Homo sapiens
ugcagcacaguagguuugcaau

SEQ ID NO: 58614 - RNA, 23 nt, Homo sapiens
ugcagcacacugaugggucuuga

SEQ ID NO: 58615 - RNA, 22 nt, Homo sapiens
ugcagagaaacauuuuguauuu

SEQ ID NO: 58616 - RNA, 21 nt, Homo sapiens
ugaugcuuuucuuaaccuugc

SEQ ID NO: 58617 - RNA, 21 nt, Homo sapiens
ugaugcaauccgcuaggucgc

SEQ ID NO: 58618 - RNA, 22 nt, Homo sapiens
ugaugguuuuaaaaagaggagu

SEQ ID NO: 58619 - RNA, 22 nt, Homo sapiens
ugaugguuuuauaagggagagu

SEQ ID NO: 58620 - RNA, 22 nt, Homo sapiens
ugaucuguccaccucagcuucc

SEQ ID NO: 58621 - RNA, 22 nt, Homo sapiens
ugaugacacugauuucuucaau

SEQ ID NO: 58622 - RNA, 22 nt, Homo sapiens
ugauaucucuugccuccaaaug

SEQ ID NO: 58623 - RNA, 22 nt, Homo sapiens
ugaugacccugcaguucucaag

SEQ ID NO: 58624 - RNA, 22 nt, Homo sapiens
ugcauccauucuagacucaucu

SEQ ID NO: 58625 - RNA, 21 nt, Homo sapiens
ugcauauuggaacuuucucuc

SEQ ID NO: 58626 - RNA, 22 nt, Homo sapiens
ugcauauucuaggauuuuguau

SEQ ID NO: 58627 - RNA, 22 nt, Homo sapiens
ugcauaucuuguggaauaucuc

SEQ ID NO: 58628 - RNA, 21 nt, Homo sapiens
ugcauacuucucagaugauua

SEQ ID NO: 58629 - RNA, 22 nt, Homo sapiens
ugcauacacaagcauacaugua

SEQ ID NO: 58630 - RNA, 18 nt, Homo sapiens
ugcauacuaucugauuuu

SEQ ID NO: 58631 - RNA, 20 nt, Homo sapiens
ugcaguguccucacuuguca

SEQ ID NO: 58632 - RNA, 22 nt, Homo sapiens
ugcagcacuguucacaauagcc

SEQ ID NO: 58633 - RNA, 20 nt, Homo sapiens
ugcagcacugggaaugcagu

SEQ ID NO: 58634 - RNA, 22 nt, Homo sapiens
ugcagcauguaggcacguuauu

SEQ ID NO: 58635 - RNA, 18 nt, Homo sapiens
ugcagcuuugugauuggc

SEQ ID NO: 58636 - RNA, 22 nt, Homo sapiens
ugcagguaggcaguaucauuua

SEQ ID NO: 58637 - RNA, 22 nt, Homo sapiens
ugauauauugaaugaugaaaca

SEQ ID NO: 58638 - RNA, 18 nt, Homo sapiens
ugauaucaaugauagcca

SEQ ID NO: 58639 - RNA, 22 nt, Homo sapiens
ugauagaucugggcaaaguaaa

SEQ ID NO: 58640 - RNA, 22 nt, Homo sapiens
ugauaggucuguuuugaaaagg

SEQ ID NO: 58641 - RNA, 17 nt, Homo sapiens
ugauaagugugagguga

SEQ ID NO: 58642 - RNA, 18 nt, Homo sapiens
ugaguucauuagacuucc

SEQ ID NO: 58643 - RNA, 22 nt, Homo sapiens
ugauaagaaauuguucauguag

SEQ ID NO: 58644 - RNA, 22 nt, Homo sapiens
ugaguuuaucuaaagaccuggg

SEQ ID NO: 58645 - RNA, 22 nt, Homo sapiens
ugaguuguugcauucuuggugu

SEQ ID NO: 58646 - RNA, 17 nt, Homo sapiens
ugagcuaugauccuguc

SEQ ID NO: 58647 - RNA, 18 nt, Homo sapiens
ugaggaaaggguuugcua

SEQ ID NO: 58648 - RNA, 22 nt, Homo sapiens
ugaggaaugaccccgugugguc

SEQ ID NO: 58649 - RNA, 22 nt, Homo sapiens
ugagcagagggagaaguaaauu

SEQ ID NO: 58650 - RNA, 22 nt, Homo sapiens
ugagccaaugauuugaauagag

SEQ ID NO: 58651 - RNA, 22 nt, Homo sapiens
ugagcagaaagcugcaaggucg

SEQ ID NO: 58652 - RNA, 22 nt, Homo sapiens
ugagcacauuuacaucaguucc

SEQ ID NO: 58653 - RNA, 22 nt, Homo sapiens
ugagacaugugaauauuuguac

SEQ ID NO: 58654 - RNA, 23 nt, Homo sapiens
ugagacauuggaaaguuaggcag

SEQ ID NO: 58655 - RNA, 22 nt, Homo sapiens
ugagacaucucuccugagacag

SEQ ID NO: 58656 - RNA, 22 nt, Homo sapiens
ugagaauauuuuccaugucuca

SEQ ID NO: 58657 - RNA, 22 nt, Homo sapiens
ugagacaucacaaaauccucaa

SEQ ID NO: 58658 - RNA, 22 nt, Homo sapiens
ugagacauacuuacaggggaug

SEQ ID NO: 58659 - RNA, 22 nt, Homo sapiens
ugagaacauuccucuuccuggc

SEQ ID NO: 58660 - RNA, 22 nt, Homo sapiens
ugagaacugccuguauuuaucu

SEQ ID NO: 58661 - RNA, 22 nt, Homo sapiens
ugagaaugacugggcaugcugc

SEQ ID NO: 58662 - RNA, 22 nt, Homo sapiens
ugagacaaucucaucucaguga

SEQ ID NO: 58663 - RNA, 22 nt, Homo sapiens
uggaaacuuauguucuucugug

SEQ ID NO: 58664 - RNA, 19 nt, Homo sapiens
uggaacauaaaaguugguu

SEQ ID NO: 58665 - RNA, 22 nt, Homo sapiens
uggaagacaaguguuagcaugg

SEQ ID NO: 58666 - RNA, 22 nt, Homo sapiens
uggaagacauugggugaagggu

SEQ ID NO: 58667 - RNA, 22 nt, Homo sapiens
uggaagauucuagaagauucca

SEQ ID NO: 58668 - RNA, 22 nt, Homo sapiens
uggaaaauuaggggagguuaua

SEQ ID NO: 58669 - RNA, 22 nt, Homo sapiens
uggaaaguacuugaguuuguau

SEQ ID NO: 58670 - RNA, 22 nt, Homo sapiens
ugcauggaagggagggaaagag

SEQ ID NO: 58671 - RNA, 22 nt, Homo sapiens
ugcaugcaucuuuuauaguagc

SEQ ID NO: 58672 - RNA, 22 nt, Homo sapiens
ugccagaugcaguguucaacaa

SEQ ID NO: 58673 - RNA, 22 nt, Homo sapiens
ugcccuuugucagaugaguagg

SEQ ID NO: 58674 - RNA, 22 nt, Homo sapiens
ugccuagucuauugagagucuu

SEQ ID NO: 58675 - RNA, 22 nt, Homo sapiens
uggaauuuacuuauuuaggggc

SEQ ID NO: 58676 - RNA, 22 nt, Homo sapiens
uggaauuaauuaaaauauacug

SEQ ID NO: 58677 - RNA, 22 nt, Homo sapiens
uggaagcaugcaaucugugggg

SEQ ID NO: 58678 - RNA, 22 nt, Homo sapiens
uggaagacuuuagaggcuuaua

SEQ ID NO: 58679 - RNA, 18 nt, Homo sapiens
uggagauaagaagaacuu

SEQ ID NO: 58680 - RNA, 19 nt, Homo sapiens
uggagauauccccuucaca

SEQ ID NO: 58681 - RNA, 22 nt, Homo sapiens
uggauuuuaauuauucugucau

SEQ ID NO: 58682 - RNA, 22 nt, Homo sapiens
uggcaaaauggaauauguuggg

SEQ ID NO: 58683 - RNA, 22 nt, Homo sapiens
uggcaaaugugagaugagaacu

SEQ ID NO: 58684 - RNA, 21 nt, Homo sapiens
uggcaacgaggugugcauuau

SEQ ID NO: 58685 - RNA, 21 nt, Homo sapiens
uggauuguacacccuaucauu

SEQ ID NO: 58686 - RNA, 22 nt, Homo sapiens
uggauugugaagaccaugggaa

SEQ ID NO: 58687 - RNA, 22 nt, Homo sapiens
ugguaagaaaaccauuauuagc

SEQ ID NO: 58688 - RNA, 22 nt, Homo sapiens
ugguaccuuuuaaugacuaauu

SEQ ID NO: 58689 - RNA, 22 nt, Homo sapiens
ugguaaguuuaacaugcauccc

SEQ ID NO: 58690 - RNA, 22 nt, Homo sapiens
ugguauguuuauaaguauagga

SEQ ID NO: 58691 - RNA, 22 nt, Homo sapiens
uggucaaaugccaaucuguagu

SEQ ID NO: 58692 - RNA, 22 nt, Homo sapiens
uggucagaugcugaguggaucu

SEQ ID NO: 58693 - RNA, 22 nt, Homo sapiens
uggucaguugugccucaauucc

SEQ ID NO: 58694 - RNA, 22 nt, Homo sapiens
uggguaauggagaaauaaaucu

SEQ ID NO: 58695 - RNA, 22 nt, Homo sapiens
uggcaagagaacaacaucucuc

SEQ ID NO: 58696 - RNA, 22 nt, Homo sapiens
uggcaagaacaacaauuacuuu

SEQ ID NO: 58697 - RNA, 22 nt, Homo sapiens
uggcauuuucucuguucuuaga

SEQ ID NO: 58698 - RNA, 21 nt, Homo sapiens
uggcuuauuugaaucuggcuu

SEQ ID NO: 58699 - RNA, 22 nt, Homo sapiens
ugggaacaugaagguuaaagag

SEQ ID NO: 58700 - RNA, 22 nt, Homo sapiens
uggcuuuuccuugaaucugccu

SEQ ID NO: 58701 - RNA, 22 nt, Homo sapiens
ugggaauaugauacaggucuuu

SEQ ID NO: 58702 - RNA, 22 nt, Homo sapiens
ucuguguuugaucaagauugua

SEQ ID NO: 58703 - RNA, 22 nt, Homo sapiens
ucugugguucuagcuacuuugg

SEQ ID NO: 58704 - RNA, 21 nt, Homo sapiens
ucuguguugaucucacuggga

SEQ ID NO: 58705 - RNA, 22 nt, Homo sapiens
ucuguguugaucacacugggag

SEQ ID NO: 58706 - RNA, 17 nt, Homo sapiens
ucuucuguuacuguggc

SEQ ID NO: 58707 - RNA, 20 nt, Homo sapiens
ucuugaacuuagucaacagg

SEQ ID NO: 58708 - RNA, 22 nt, Homo sapiens
ucuucaugcuugaaauaauagc

SEQ ID NO: 58709 - RNA, 22 nt, Homo sapiens
ucuuaguuuagauuagcaauuc

SEQ ID NO: 58710 - RNA, 22 nt, Homo sapiens
ucuguuguuguuuuaagagaca

SEQ ID NO: 58711 - RNA, 22 nt, Homo sapiens
ucuguuguuaucauaauauuga

SEQ ID NO: 58712 - RNA, 18 nt, Homo sapiens
ucucacagcaaucuguca

SEQ ID NO: 58713 - RNA, 22 nt, Homo sapiens
ucucacagaguugaauguuucu

SEQ ID NO: 58714 - RNA, 22 nt, Homo sapiens
ucuauggauaaaaugcccucau

SEQ ID NO: 58715 - RNA, 22 nt, Homo sapiens
ucucaauuugauuacauucaua

SEQ ID NO: 58716 - RNA, 19 nt, Homo sapiens
ucuaaaucucuugauagac

SEQ ID NO: 58717 - RNA, 22 nt, Homo sapiens
ucuaagaauucauuuauaagcc

SEQ ID NO: 58718 - RNA, 22 nt, Homo sapiens
ucuaucacagugauguuccaga

SEQ ID NO: 58719 - RNA, 22 nt, Homo sapiens
ucuaucacagccccacacucuc

SEQ ID NO: 58720 - RNA, 22 nt, Homo sapiens
ucuuugguauugugaauagugu

SEQ ID NO: 58721 - RNA, 19 nt, Homo sapiens
ucuuugguacgugcuuuga

SEQ ID NO: 58722 - RNA, 22 nt, Homo sapiens
ucuuugaguuauugugcagacu

SEQ ID NO: 58723 - RNA, 22 nt, Homo sapiens
ucuuugauuuuguuacuaagac

SEQ ID NO: 58724 - RNA, 22 nt, Homo sapiens
ucuuuggaggcgaucuguuuga

SEQ ID NO: 58725 - RNA, 22 nt, Homo sapiens
ucuuuggauggaaauuggaguc

SEQ ID NO: 58726 - RNA, 22 nt, Homo sapiens
ucuuuguucaggagccaacucc

SEQ ID NO: 58727 - RNA, 16 nt, Homo sapiens
ugaacagagaggauuc

SEQ ID NO: 58728 - RNA, 20 nt, Homo sapiens
ucuuuuuguggccccagagu

SEQ ID NO: 58729 - RNA, 21 nt, Homo sapiens
ugaacacuggacugagugucc

SEQ ID NO: 58730 - RNA, 22 nt, Homo sapiens
ucuuuguuuucugauccugaag

SEQ ID NO: 58731 - RNA, 22 nt, Homo sapiens
ucuuuguuggaguccaaggaua

SEQ ID NO: 58732 - RNA, 22 nt, Homo sapiens
ugaccagaaaacaaauuaguuu

SEQ ID NO: 58733 - RNA, 22 nt, Homo sapiens
ugacuauaggauaacaugcauu

SEQ ID NO: 58734 - RNA, 22 nt, Homo sapiens
ugacuggagucuugcucugucg

SEQ ID NO: 58735 - RNA, 22 nt, Homo sapiens
ugacuugaaacgugaacagauc

SEQ ID NO: 58736 - RNA, 22 nt, Homo sapiens
ugacuugaggcucgcacaaguu

SEQ ID NO: 58737 - RNA, 20 nt, Homo sapiens
ugagaacaugugguauuugg

SEQ ID NO: 58738 - RNA, 20 nt, Homo sapiens
ugagaacauguggcauuugg

SEQ ID NO: 58739 - RNA, 22 nt, Homo sapiens
ugacauuacagucacuugcugu

SEQ ID NO: 58740 - RNA, 22 nt, Homo sapiens
ugacaugaugagcaauaauggc

SEQ ID NO: 58741 - RNA, 22 nt, Homo sapiens
ugacauguauuagcucagugcu

SEQ ID NO: 58742 - RNA, 20 nt, Homo sapiens
ugacaguuaagggauagaag

SEQ ID NO: 58743 - RNA, 18 nt, Homo sapiens
ugacaucauuuagaaagg

SEQ ID NO: 58744 - RNA, 22 nt, Homo sapiens
ugaacuguugggggaaauucag

SEQ ID NO: 58745 - RNA, 22 nt, Homo sapiens
ugaacagcacguuuauucagaa

SEQ ID NO: 58746 - RNA, 22 nt, Homo sapiens
ugaaggaguauggauaagucgu

SEQ ID NO: 58747 - RNA, 22 nt, Homo sapiens
ugaaggcaggagggagaaaagu

SEQ ID NO: 58748 - RNA, 22 nt, Homo sapiens
ucacaccauucuucuacuucag

SEQ ID NO: 58749 - RNA, 22 nt, Homo sapiens
ucacaauucucaauuugugaaa

SEQ ID NO: 58750 - RNA, 20 nt, Homo sapiens
ucacaagccaagaucacguc

SEQ ID NO: 58751 - RNA, 18 nt, Homo sapiens
ucaauguggauguucuuu

SEQ ID NO: 58752 - RNA, 22 nt, Homo sapiens
ucaauugcaucaacaguguaca

SEQ ID NO: 58753 - RNA, 22 nt, Homo sapiens
ucaaguaagaagugggcauaaa

SEQ ID NO: 58754 - RNA, 22 nt, Homo sapiens
ucaagugcauugauucaguauu

SEQ ID NO: 58755 - RNA, 20 nt, Homo sapiens
ucaaggcacgaauaaaaguu

SEQ ID NO: 58756 - RNA, 18 nt, Homo sapiens
ucaagcaauugucaugcc

SEQ ID NO: 58757 - RNA, 21 nt, Homo sapiens
ucaaggaguauacguaugcca

SEQ ID NO: 58758 - RNA, 22 nt, Homo sapiens
ucaagcaauucuccugccucag

SEQ ID NO: 58759 - RNA, 22 nt, Homo sapiens
ucaagcaauucugcugccucag

SEQ ID NO: 58760 - RNA, 22 nt, Homo sapiens
ucaacauugcugucaggcaucu

SEQ ID NO: 58761 - RNA, 19 nt, Homo sapiens
ucaguagugcacauaagcc

SEQ ID NO: 58762 - RNA, 22 nt, Homo sapiens
ucagucauucaauuguugaaug

SEQ ID NO: 58763 - RNA, 22 nt, Homo sapiens
ucagcgggaguggaaagucaga

SEQ ID NO: 58764 - RNA, 22 nt, Homo sapiens
ucaguaguuuuuuuacuaggug

SEQ ID NO: 58765 - RNA, 22 nt, Homo sapiens
ucagcacauucaaggccugccu

SEQ ID NO: 58766 - RNA, 22 nt, Homo sapiens
ucagcaccauguaacaauugau

SEQ ID NO: 58767 - RNA, 22 nt, Homo sapiens
ucagauguuugagaaguauacu

SEQ ID NO: 58768 - RNA, 22 nt, Homo sapiens
ucagauguuuuguuuaucugcu

SEQ ID NO: 58769 - RNA, 22 nt, Homo sapiens
ucagaugaucugguaagaacuu

SEQ ID NO: 58770 - RNA, 22 nt, Homo sapiens
ucagaucaugcuuaugauggga

SEQ ID NO: 58771 - RNA, 23 nt, Homo sapiens
ucacuagaguccuggaguuugag

SEQ ID NO: 58772 - RNA, 22 nt, Homo sapiens
ucagaguggccucucuugaaga

SEQ ID NO: 58773 - RNA, 22 nt, Homo sapiens
ucagagugguuguaccauuuga

SEQ ID NO: 58774 - RNA, 22 nt, Homo sapiens
uccacagugguugaacuaguuu

SEQ ID NO: 58775 - RNA, 22 nt, Homo sapiens
ucauuguccaacuucuuucagu

SEQ ID NO: 58776 - RNA, 22 nt, Homo sapiens
ucauuggcuaagcuuguuacac

SEQ ID NO: 58777 - RNA, 22 nt, Homo sapiens
ucagugucugcauucuuauugu

SEQ ID NO: 58778 - RNA, 22 nt, Homo sapiens
ucaguggagcuacaauucuggg

SEQ ID NO: 58779 - RNA, 22 nt, Homo sapiens
ucagugcuuuuuguugucauca

SEQ ID NO: 58780 - RNA, 17 nt, Homo sapiens
uccagauuucaauugaa

SEQ ID NO: 58781 - RNA, 22 nt, Homo sapiens
uccacguggucuaucuguccuu

SEQ ID NO: 58782 - RNA, 21 nt, Homo sapiens
uccagcuuugagaguuguggu

SEQ ID NO: 58783 - RNA, 22 nt, Homo sapiens
ucggcucagugcaagcucugcc

SEQ ID NO: 58784 - RNA, 19 nt, Homo sapiens
ucgcgccauucuccugccu

SEQ ID NO: 58785 - RNA, 22 nt, Homo sapiens
uccuuuggcuaacuuucuaagu

SEQ ID NO: 58786 - RNA, 22 nt, Homo sapiens
uccuucaugcaucaauguaucc

SEQ ID NO: 58787 - RNA, 22 nt, Homo sapiens
ucccuuucuggaguuucccaag

SEQ ID NO: 58788 - RNA, 17 nt, Homo sapiens
ucccuguuuuuucaguc

SEQ ID NO: 58789 - RNA, 22 nt, Homo sapiens
ucccuguuguuucauaauuuua

SEQ ID NO: 58790 - RNA, 22 nt, Homo sapiens
aaaagucuguagugaaagguga

SEQ ID NO: 58791 - RNA, 22 nt, Homo sapiens
aaaaguucuuugagccuugaca

SEQ ID NO: 58792 - RNA, 22 nt, Homo sapiens
aaaaggcuagcuaguaacagaa

SEQ ID NO: 58793 - RNA, 22 nt, Homo sapiens
aaacagucuucuccugagggac

SEQ ID NO: 58794 - RNA, 22 nt, Homo sapiens
aaagcuaagguagcauuggaga

SEQ ID NO: 58795 - RNA, 22 nt, Homo sapiens
aaagcuacaggaccugcucauu

SEQ ID NO: 58796 - RNA, 18 nt, Homo sapiens
aaaaagugcucaggccua

SEQ ID NO: 58797 - RNA, 22 nt, Homo sapiens
aaaagagcugagagguauucuu

SEQ ID NO: 58798 - RNA, 22 nt, Homo sapiens
aaagcagcaggugguuuucaau

SEQ ID NO: 58799 - RNA, 22 nt, Homo sapiens
aauaauggcaccaaagcacaag

SEQ ID NO: 58800 - RNA, 22 nt, Homo sapiens
aauaaugucacaggggguuagc

SEQ ID NO: 58801 - RNA, 22 nt, Homo sapiens
aauacugugauaucgagcgauu

SEQ ID NO: 58802 - RNA, 22 nt, Homo sapiens
aauaucacaggguguacacuca

SEQ ID NO: 58803 - RNA, 22 nt, Homo sapiens
aauaucacaguggguguacacc

SEQ ID NO: 58804 - RNA, 22 nt, Homo sapiens
aauauagcuauguacaugucca

SEQ ID NO: 58805 - RNA, 22 nt, Homo sapiens
aauagcuguuuuuaauuccugc

SEQ ID NO: 58806 - RNA, 22 nt, Homo sapiens
aaucagagcccucugagcuuca

SEQ ID NO: 58807 - RNA, 22 nt, Homo sapiens
aaucagauuccagugguuggaa

SEQ ID NO: 58808 - RNA, 22 nt, Homo sapiens
aauaucuguguauagauggggg

SEQ ID NO: 58809 - RNA, 22 nt, Homo sapiens
aauaugguuuuaugaagcaauu

SEQ ID NO: 58810 - RNA, 16 nt, Homo sapiens
aauccauuggcccugc

SEQ ID NO: 58811 - RNA, 22 nt, Homo sapiens
aaucugauguuaucagcuuaag

SEQ ID NO: 58812 - RNA, 22 nt, Homo sapiens
aaucuguagaaggugcacauuc

SEQ ID NO: 58813 - RNA, 22 nt, Homo sapiens
aaugcuaucuggaacauuguug

SEQ ID NO: 58814 - RNA, 22 nt, Homo sapiens
aaugcaucuagaaaggugaauu

SEQ ID NO: 58815 - RNA, 22 nt, Homo sapiens
aaugcacauauauuuccuuauu

SEQ ID NO: 58816 - RNA, 22 nt, Homo sapiens
aaugcaagauguuaauuauagg

SEQ ID NO: 58817 - RNA, 22 nt, Homo sapiens
aaugauauguuauguuuagguu

SEQ ID NO: 58818 - RNA, 22 nt, Homo sapiens
aaugaucaauguuugaggugau

SEQ ID NO: 58819 - RNA, 22 nt, Homo sapiens
aaugacagccagauucuucucu

SEQ ID NO: 58820 - RNA, 22 nt, Homo sapiens
aaguaaacauugagagacaaga

SEQ ID NO: 58821 - RNA, 22 nt, Homo sapiens
aagguuguauuuaauauacugu

SEQ ID NO: 58822 - RNA, 22 nt, Homo sapiens
aagcuuucaacuguuugccauu

SEQ ID NO: 58823 - RNA, 22 nt, Homo sapiens
aagcuguugguggauguaccau

SEQ ID NO: 58824 - RNA, 22 nt, Homo sapiens
aagcuguauuguguugcuauaa

SEQ ID NO: 58825 - RNA, 22 nt, Homo sapiens
aagcuaggguuaauuuauuauu

SEQ ID NO: 58826 - RNA, 22 nt, Homo sapiens
aagcuaguguuccagugaacag

SEQ ID NO: 58827 - RNA, 22 nt, Homo sapiens
aagcuggcauucauucguucuu

SEQ ID NO: 58828 - RNA, 22 nt, Homo sapiens
aauaaguugagaugaggucaua

SEQ ID NO: 58829 - RNA, 22 nt, Homo sapiens
aauaagaaguggaagggaccgg

SEQ ID NO: 58830 - RNA, 22 nt, Homo sapiens
aaagcuaccagauucuguugga

SEQ ID NO: 58831 - RNA, 22 nt, Homo sapiens
aaagcaucacuuuuccuacuuu

SEQ ID NO: 58832 - RNA, 22 nt, Homo sapiens
aaaguucuguugauagugcuga

SEQ ID NO: 58833 - RNA, 22 nt, Homo sapiens
aaaggauucuaauggaaaugcu

SEQ ID NO: 58834 - RNA, 22 nt, Homo sapiens
aaagggcuugaauacucuuuuu

SEQ ID NO: 58835 - RNA, 22 nt, Homo sapiens
aaagaagucagccuguccuuug

SEQ ID NO: 58836 - RNA, 22 nt, Homo sapiens
aaacuugucuaauuauaagcau

SEQ ID NO: 58837 - RNA, 22 nt, Homo sapiens
aaagaguucagguagauuucaa

SEQ ID NO: 58838 - RNA, 22 nt, Homo sapiens
aaacucuguagcagagacagau

SEQ ID NO: 58839 - RNA, 22 nt, Homo sapiens
aaaugcauaucaagauugcccu

SEQ ID NO: 58840 - RNA, 22 nt, Homo sapiens
aaaugcauggacagcuggucuu

SEQ ID NO: 58841 - RNA, 22 nt, Homo sapiens
aaaugcucuuuaugaaguugga

SEQ ID NO: 58842 - RNA, 22 nt, Homo sapiens
aaaugcucuguggguaguaaug

SEQ ID NO: 58843 - RNA, 22 nt, Homo sapiens
aaaugcauugagggaaaaggca

SEQ ID NO: 58844 - RNA, 22 nt, Homo sapiens
aaaugcaucauuaggugauuuu

SEQ ID NO: 58845 - RNA, 22 nt, Homo sapiens
aaaugacuuuuuaugcagagua

SEQ ID NO: 58846 - RNA, 22 nt, Homo sapiens
aaauaguagcugaaugagggaa

SEQ ID NO: 58847 - RNA, 19 nt, Homo sapiens
aaaguucuucccuuuggag

SEQ ID NO: 58848 - RNA, 22 nt, Homo sapiens
aaaguguuucugcaguagguuu

SEQ ID NO: 58849 - RNA, 21 nt, Homo sapiens
aaaugcacauuacugcuggug

SEQ ID NO: 58850 - RNA, 22 nt, Homo sapiens
aaaugcagucuuuguucugggc

SEQ ID NO: 58851 - RNA, 22 nt, Homo sapiens
aaaugcuguuccaggaccuauc

SEQ ID NO: 58852 - RNA, 22 nt, Homo sapiens
aaaugcugucaaauuguguucu

SEQ ID NO: 58853 - RNA, 22 nt, Homo sapiens
aaauugcacaaguggugauuug

SEQ ID NO: 58854 - RNA, 22 nt, Homo sapiens
aaauugcaguuaggaugauggu

SEQ ID NO: 58855 - RNA, 22 nt, Homo sapiens
aaauugcauugagcugcuuauu

SEQ ID NO: 58856 - RNA, 22 nt, Homo sapiens
aaauucaugucaccucuaggua

SEQ ID NO: 58857 - RNA, 22 nt, Homo sapiens
aaauucaucaaaugguuuguau

SEQ ID NO: 58858 - RNA, 22 nt, Homo sapiens
aaccuguaaccauaugaucagu

SEQ ID NO: 58859 - RNA, 22 nt, Homo sapiens
aaccuucauuccuuucccugcc

SEQ ID NO: 58860 - RNA, 22 nt, Homo sapiens
aagagcauuauuuaguaauuuc

SEQ ID NO: 58861 - RNA, 22 nt, Homo sapiens
aagagguagcagucacaaaaga

SEQ ID NO: 58862 - RNA, 22 nt, Homo sapiens
aagcgguguugaauuuuguuga

SEQ ID NO: 58863 - RNA, 22 nt, Homo sapiens
aagaggccuaggaaucuguauu

SEQ ID NO: 58864 - RNA, 22 nt, Homo sapiens
aacuggcauguuuuaaggcuua

SEQ ID NO: 58865 - RNA, 22 nt, Homo sapiens
aagacuguaauccaucuugagu

SEQ ID NO: 58866 - RNA, 17 nt, Homo sapiens
augacuucuucagugug

SEQ ID NO: 58867 - RNA, 22 nt, Homo sapiens
augagauaaaccaucucuuaag

SEQ ID NO: 58868 - RNA, 22 nt, Homo sapiens
augagauacuacaaaugaguuu

SEQ ID NO: 58869 - RNA, 22 nt, Homo sapiens
augagacaguucccuuuaucuu

SEQ ID NO: 58870 - RNA, 22 nt, Homo sapiens
augacuaaaggguuuauguuga

SEQ ID NO: 58871 - RNA, 22 nt, Homo sapiens
augacgagaugguguuuggcuu

SEQ ID NO: 58872 - RNA, 22 nt, Homo sapiens
augacuggaacagcaauuuaca

SEQ ID NO: 58873 - RNA, 22 nt, Homo sapiens
augacuggaacggcacuuuaca

SEQ ID NO: 58874 - RNA, 22 nt, Homo sapiens
augaccauuucaauugauaugg

SEQ ID NO: 58875 - RNA, 22 nt, Homo sapiens
augacauugaaaagcaagugga

SEQ ID NO: 58876 - RNA, 22 nt, Homo sapiens
augacauugaugcucuggcugg

SEQ ID NO: 58877 - RNA, 22 nt, Homo sapiens
augacagagauaugugaauuuu

SEQ ID NO: 58878 - RNA, 22 nt, Homo sapiens
augacauagaagcaauccccua

SEQ ID NO: 58879 - RNA, 22 nt, Homo sapiens
augacaguguggauuauuguaa

SEQ ID NO: 58880 - RNA, 22 nt, Homo sapiens
augaagaucaugaagacggcuu

SEQ ID NO: 58881 - RNA, 22 nt, Homo sapiens
augaaguguguguucaagucuu

SEQ ID NO: 58882 - RNA, 22 nt, Homo sapiens
aucauuaguuguggaauucuug

SEQ ID NO: 58883 - RNA, 22 nt, Homo sapiens
aucauguuuauguguaggauau

SEQ ID NO: 58884 - RNA, 22 nt, Homo sapiens
aucaugucuucccagugauucu

SEQ ID NO: 58885 - RNA, 22 nt, Homo sapiens
auccacagugucaauguuguga

SEQ ID NO: 58886 - RNA, 22 nt, Homo sapiens
aucauugugcaucuucauucca

SEQ ID NO: 58887 - RNA, 22 nt, Homo sapiens
auccaguuuuaggagauuucua

SEQ ID NO: 58888 - RNA, 22 nt, Homo sapiens
aucacuuucuauuucugugcca

SEQ ID NO: 58889 - RNA, 22 nt, Homo sapiens
aucaucaugcacuacagccugg

SEQ ID NO: 58890 - RNA, 22 nt, Homo sapiens
aucauggaguauuugcaagucu

SEQ ID NO: 58891 - RNA, 22 nt, Homo sapiens
aucauguaguaagacacauuua

SEQ ID NO: 58892 - RNA, 22 nt, Homo sapiens
aucacuuugcucuccagugugg

SEQ ID NO: 58893 - RNA, 22 nt, Homo sapiens
aucaugcacaugcauagguaug

SEQ ID NO: 58894 - RNA, 22 nt, Homo sapiens
augaaaagcauaaacgcugaag

SEQ ID NO: 58895 - RNA, 22 nt, Homo sapiens
augaaacuggcuaauuuuugua

SEQ ID NO: 58896 - RNA, 22 nt, Homo sapiens
augaaaacaugauuugccuguu

SEQ ID NO: 58897 - RNA, 22 nt, Homo sapiens
aucuuuggugcaugauacuuug

SEQ ID NO: 58898 - RNA, 22 nt, Homo sapiens
augaaaucuuuggcagaucuua

SEQ ID NO: 58899 - RNA, 22 nt, Homo sapiens
augaaaugcauguuaaguccgu

SEQ ID NO: 58900 - RNA, 22 nt, Homo sapiens
augaaagucaauccccaagugu

SEQ ID NO: 58901 - RNA, 22 nt, Homo sapiens
aucuuuggucaucacagcuaga

SEQ ID NO: 58902 - RNA, 22 nt, Homo sapiens
augaaauugcuaucgcaguacu

SEQ ID NO: 58903 - RNA, 22 nt, Homo sapiens
augaacacuccaauuguacucc

SEQ ID NO: 58904 - RNA, 22 nt, Homo sapiens
augaaaucacugugaugcccua

SEQ ID NO: 58905 - RNA, 22 nt, Homo sapiens
auaguacuauugcaguguuaua

SEQ ID NO: 58906 - RNA, 22 nt, Homo sapiens
auagguagcauagcaggaauau

SEQ ID NO: 58907 - RNA, 22 nt, Homo sapiens
auagugcugcaauaaacauaca

SEQ ID NO: 58908 - RNA, 22 nt, Homo sapiens
auagugcugcaauaaacauacg

SEQ ID NO: 58909 - RNA, 22 nt, Homo sapiens
auaagugagugauucaguguua

SEQ ID NO: 58910 - RNA, 22 nt, Homo sapiens
auaagugcuuguugaauaauag

SEQ ID NO: 58911 - RNA, 22 nt, Homo sapiens
auaagucaauggaacagauuaa

SEQ ID NO: 58912 - RNA, 19 nt, Homo sapiens
auaagugaaucacgggggc

SEQ ID NO: 58913 - RNA, 22 nt, Homo sapiens
auaauagcugaucauuuagaag

SEQ ID NO: 58914 - RNA, 22 nt, Homo sapiens
auaagaugaaggaagccauauc

SEQ ID NO: 58915 - RNA, 22 nt, Homo sapiens
auaagaguaguacauaugagac

SEQ ID NO: 58916 - RNA, 22 nt, Homo sapiens
auaaguauuuggacuuuacugu

SEQ ID NO: 58917 - RNA, 22 nt, Homo sapiens
auaaggcugguauagacauuca

SEQ ID NO: 58918 - RNA, 22 nt, Homo sapiens
auaacauccuuucuuaucguug

SEQ ID NO: 58919 - RNA, 22 nt, Homo sapiens
auaacauggaguuugucauuua

SEQ ID NO: 58920 - RNA, 22 nt, Homo sapiens
auaugguacuuaugcucaaacu

SEQ ID NO: 58921 - RNA, 22 nt, Homo sapiens
auagugcugcaaaaaacauacg

SEQ ID NO: 58922 - RNA, 21 nt, Homo sapiens
auauggaacuggugacguguu

SEQ ID NO: 58923 - RNA, 22 nt, Homo sapiens
auagugcugcaauaaacacacg

SEQ ID NO: 58924 - RNA, 22 nt, Homo sapiens
auagugcugcaaugaacauaca

SEQ ID NO: 58925 - RNA, 22 nt, Homo sapiens
auaugcauguacccacacaggc

SEQ ID NO: 58926 - RNA, 22 nt, Homo sapiens
auaugugacuucaugcaaggcu

SEQ ID NO: 58927 - RNA, 22 nt, Homo sapiens
auauguauuuuaacguguaagg

SEQ ID NO: 58928 - RNA, 22 nt, Homo sapiens
auauuagcacuaaugucacgau

SEQ ID NO: 58929 - RNA, 21 nt, Homo sapiens
auauuacuguuagaggacugc

SEQ ID NO: 58930 - RNA, 22 nt, Homo sapiens
aucacaguggcucacaagagcc

SEQ ID NO: 58931 - RNA, 22 nt, Homo sapiens
aucacaguggucagguauagau

SEQ ID NO: 58932 - RNA, 22 nt, Homo sapiens
aucacaguuaagaggugaugaa

SEQ ID NO: 58933 - RNA, 22 nt, Homo sapiens
aucacagugagcauaugucuau

SEQ ID NO: 58934 - RNA, 22 nt, Homo sapiens
aucacaguuuuaccauuuggua

SEQ ID NO: 58935 - RNA, 22 nt, Homo sapiens
auauugcuccuaauaccacggu

SEQ ID NO: 58936 - RNA, 22 nt, Homo sapiens
aucacuguccacucaucuuucu

SEQ ID NO: 58937 - RNA, 22 nt, Homo sapiens
aucacugugauuucuacugugc

SEQ ID NO: 58938 - RNA, 20 nt, Homo sapiens
aucaccacagcucguucaug

SEQ ID NO: 58939 - RNA, 22 nt, Homo sapiens
aucaccuggaggugaucacuug

SEQ ID NO: 58940 - RNA, 22 nt, Homo sapiens
auuaaauguuggacguauacau

SEQ ID NO: 58941 - RNA, 22 nt, Homo sapiens
auguuguaguaugagucaaaau

SEQ ID NO: 58942 - RNA, 22 nt, Homo sapiens
auguugcaguuuaauuauccua

SEQ ID NO: 58943 - RNA, 22 nt, Homo sapiens
auucauagugcuaagguguauc

SEQ ID NO: 58944 - RNA, 22 nt, Homo sapiens
auuccacuuagugacucauuug

SEQ ID NO: 58945 - RNA, 22 nt, Homo sapiens
auucaccauggcuaccaagggu

SEQ ID NO: 58946 - RNA, 20 nt, Homo sapiens
auucaaguaugccuugagaa

SEQ ID NO: 58947 - RNA, 22 nt, Homo sapiens
auucaagugaugcagcuguuuu

SEQ ID NO: 58948 - RNA, 22 nt, Homo sapiens
auucaagugaugugauucuucu

SEQ ID NO: 58949 - RNA, 18 nt, Homo sapiens
auguuauguuuguagaag

SEQ ID NO: 58950 - RNA, 20 nt, Homo sapiens
auguucuggaggacagaagc

SEQ ID NO: 58951 - RNA, 22 nt, Homo sapiens
auguguucaucacagcacaauu

SEQ ID NO: 58952 - RNA, 23 nt, Homo sapiens
augugguuuuagguguugaacug

SEQ ID NO: 58953 - RNA, 22 nt, Homo sapiens
auguaacacagugcggcugggc

SEQ ID NO: 58954 - RNA, 22 nt, Homo sapiens
auguaagugugcucaaauguua

SEQ ID NO: 58955 - RNA, 22 nt, Homo sapiens
auguaacuaucugagccauggg

SEQ ID NO: 58956 - RNA, 22 nt, Homo sapiens
auguaacugggacacaagccuc

SEQ ID NO: 58957 - RNA, 22 nt, Homo sapiens
auugaaugaaauggcagacacu

SEQ ID NO: 58958 - RNA, 20 nt, Homo sapiens
auugaacucaguauucugaa

SEQ ID NO: 58959 - RNA, 20 nt, Homo sapiens
auugaagacuccggggcaga

SEQ ID NO: 58960 - RNA, 22 nt, Homo sapiens
auugaaucuaaaaugagucucu

SEQ ID NO: 58961 - RNA, 22 nt, Homo sapiens
auugaauuugguuugcuaagaa

SEQ ID NO: 58962 - RNA, 20 nt, Homo sapiens
auuccacuuauaugaggucc

SEQ ID NO: 58963 - RNA, 22 nt, Homo sapiens
auugaacuguuggagagguuuu

SEQ ID NO: 58964 - RNA, 22 nt, Homo sapiens
auugaacaugccauauguacca

SEQ ID NO: 58965 - RNA, 22 nt, Homo sapiens
auuccauagugucuguggcaga

SEQ ID NO: 58966 - RNA, 22 nt, Homo sapiens
auuccacuuccacuaguuucuc

SEQ ID NO: 58967 - RNA, 22 nt, Homo sapiens
auuccaguggguuuacauccca

SEQ ID NO: 58968 - RNA, 22 nt, Homo sapiens
auuccaguuugugagaagcugu

SEQ ID NO: 58969 - RNA, 22 nt, Homo sapiens
auugcacaaagagggaaacuga

SEQ ID NO: 58970 - RNA, 23 nt, Homo sapiens
auugauagugccuuugugcuaau

SEQ ID NO: 58971 - RNA, 22 nt, Homo sapiens
auugauagaucauaugguaggu

SEQ ID NO: 58972 - RNA, 22 nt, Homo sapiens
auugagucauuucaaauccaag

SEQ ID NO: 58973 - RNA, 21 nt, Homo sapiens
auugagcacaugaaacauggc

SEQ ID NO: 58974 - RNA, 22 nt, Homo sapiens
auugaguaaaaaauagugaugu

SEQ ID NO: 58975 - RNA, 22 nt, Homo sapiens
auggauuuuaggauacaguuga

SEQ ID NO: 58976 - RNA, 22 nt, Homo sapiens
auggcaauguaagucagaaaaa

SEQ ID NO: 58977 - RNA, 22 nt, Homo sapiens
auggauuuuggggccagaggca

SEQ ID NO: 58978 - RNA, 22 nt, Homo sapiens
auggcaagaagagcaauuauuu

SEQ ID NO: 58979 - RNA, 19 nt, Homo sapiens
augauugucuauggaggaa

SEQ ID NO: 58980 - RNA, 22 nt, Homo sapiens
augauugugaauaugugguuuu

SEQ ID NO: 58981 - RNA, 22 nt, Homo sapiens
augaugcaguacuuugggaaca

SEQ ID NO: 58982 - RNA, 22 nt, Homo sapiens
augauguguguuuaagaugucu

SEQ ID NO: 58983 - RNA, 22 nt, Homo sapiens
augauauuauucuagcccagag

SEQ ID NO: 58984 - RNA, 22 nt, Homo sapiens
augauauggguugucaguugua

SEQ ID NO: 58985 - RNA, 22 nt, Homo sapiens
augauacuguucuaagauuuuu

SEQ ID NO: 58986 - RNA, 22 nt, Homo sapiens
augaucauggaagugcacccau

SEQ ID NO: 58987 - RNA, 22 nt, Homo sapiens
augaugaaguaagugcuuagga

SEQ ID NO: 58988 - RNA, 22 nt, Homo sapiens
augauggaggccgugauggacg

SEQ ID NO: 58989 - RNA, 22 nt, Homo sapiens
augagauuauguaaagagacca

SEQ ID NO: 58990 - RNA, 19 nt, Homo sapiens
augagcaauaguuuuaauc

SEQ ID NO: 58991 - RNA, 22 nt, Homo sapiens
augaguugaagcuacaagaggc

SEQ ID NO: 58992 - RNA, 22 nt, Homo sapiens
augagaugcaagauuagauggg

SEQ ID NO: 58993 - RNA, 22 nt, Homo sapiens
augagauauuuuauaagaucau

SEQ ID NO: 58994 - RNA, 22 nt, Homo sapiens
augagaugaauaccgacgaugu

SEQ ID NO: 58995 - RNA, 22 nt, Homo sapiens
auggucuuuuuguuaugagaga

SEQ ID NO: 58996 - RNA, 22 nt, Homo sapiens
augguuuauuuguaagcagagu

SEQ ID NO: 58997 - RNA, 22 nt, Homo sapiens
auggcucuggauagaaugcagg

SEQ ID NO: 58998 - RNA, 22 nt, Homo sapiens
auggcuugugacccaugcuuca

SEQ ID NO: 58999 - RNA, 22 nt, Homo sapiens
augguaguagaugugugguuuu

SEQ ID NO: 59000 - RNA, 22 nt, Homo sapiens
aggcacacaacccuggaccuga

SEQ ID NO: 59001 - RNA, 22 nt, Homo sapiens
aggcaagugggagacagcauuu

SEQ ID NO: 59002 - RNA, 22 nt, Homo sapiens
aggcaaaugccagcaaucacac

SEQ ID NO: 59003 - RNA, 22 nt, Homo sapiens
aggcaagaaugcuuguuucacc

SEQ ID NO: 59004 - RNA, 22 nt, Homo sapiens
aacaccguagaaacacaaggga

SEQ ID NO: 59005 - RNA, 22 nt, Homo sapiens
aggcaugaaauacaugcauuga

SEQ ID NO: 59006 - RNA, 22 nt, Homo sapiens
aacaccauucucuguaacaaga

SEQ ID NO: 59007 - RNA, 22 nt, Homo sapiens
agcuucauuguuaugaauguca

SEQ ID NO: 59008 - RNA, 22 nt, Homo sapiens
agcuguuguucucagaggcuuu

SEQ ID NO: 59009 - RNA, 22 nt, Homo sapiens
aggagguaggaauugugcuagg

SEQ ID NO: 59010 - RNA, 22 nt, Homo sapiens
agcuguuguacacuuuaccuuu

SEQ ID NO: 59011 - RNA, 22 nt, Homo sapiens
agccuguguugaauuauagaaa

SEQ ID NO: 59012 - RNA, 22 nt, Homo sapiens
agccuagagagccacuuugaga

SEQ ID NO: 59013 - RNA, 22 nt, Homo sapiens
agcggcuguuccccuggucuau

SEQ ID NO: 59014 - RNA, 22 nt, Homo sapiens
agcuaacauuuuuccucuucca

SEQ ID NO: 59015 - RNA, 22 nt, Homo sapiens
agcaacauuuuugaccuuucuu

SEQ ID NO: 59016 - RNA, 22 nt, Homo sapiens
agcaacauggaguuugugcgca

SEQ ID NO: 59017 - RNA, 22 nt, Homo sapiens
agcaagauuguucccauuuucu

SEQ ID NO: 59018 - RNA, 22 nt, Homo sapiens
agcacagugguuaaguuucuua

SEQ ID NO: 59019 - RNA, 22 nt, Homo sapiens
agcacaguuaaaugaggcuucu

SEQ ID NO: 59020 - RNA, 22 nt, Homo sapiens
agcacauuaguaucuaagaaca

SEQ ID NO: 59021 - RNA, 22 nt, Homo sapiens
agcacagugaaugguuuacuca

SEQ ID NO: 59022 - RNA, 22 nt, Homo sapiens
aguguuuuucaugggauacuuu

SEQ ID NO: 59023 - RNA, 22 nt, Homo sapiens
aguguuuuuaacaagaaagggu

SEQ ID NO: 59024 - RNA, 19 nt, Homo sapiens
agugucauggucauuauuu

SEQ ID NO: 59025 - RNA, 22 nt, Homo sapiens
agugguuuuggaauggaauuca

SEQ ID NO: 59026 - RNA, 22 nt, Homo sapiens
aguggcaaugugauguccugaa

SEQ ID NO: 59027 - RNA, 22 nt, Homo sapiens
aguggaaucuguuauacuaacu

SEQ ID NO: 59028 - RNA, 22 nt, Homo sapiens
auaaagcuauuccucucuuuuu

SEQ ID NO: 59029 - RNA, 22 nt, Homo sapiens
auaaagacacuuggcaugauuu

SEQ ID NO: 59030 - RNA, 22 nt, Homo sapiens
auaaagcaaauaggacuauugc

SEQ ID NO: 59031 - RNA, 20 nt, Homo sapiens
auaaauguauagguguacau

SEQ ID NO: 59032 - RNA, 22 nt, Homo sapiens
auaaaugcaaugguauuuuuga

SEQ ID NO: 59033 - RNA, 22 nt, Homo sapiens
auaaaguucugcuggcauauau

SEQ ID NO: 59034 - RNA, 22 nt, Homo sapiens
auaaaugccuguuguuuuaagc

SEQ ID NO: 59035 - RNA, 22 nt, Homo sapiens
aguucaaugcucuuucuacuau

SEQ ID NO: 59036 - RNA, 22 nt, Homo sapiens
aguuuuugcugauagcaugcuu

SEQ ID NO: 59037 - RNA, 18 nt, Homo sapiens
auaaacucaucauuuuua

SEQ ID NO: 59038 - RNA, 17 nt, Homo sapiens
auaaacucaucauuuuu

SEQ ID NO: 59039 - RNA, 22 nt, Homo sapiens
auaaacagcuuauccucuauuc

SEQ ID NO: 59040 - RNA, 22 nt, Homo sapiens
auaaaccuacauuuucacuucu

SEQ ID NO: 59041 - RNA, 22 nt, Homo sapiens
agguaauuuucccagagggaaa

SEQ ID NO: 59042 - RNA, 21 nt, Homo sapiens
agucauaggaguacauaaugc

SEQ ID NO: 59043 - RNA, 22 nt, Homo sapiens
agugaaaucugaagaaggucau

SEQ ID NO: 59044 - RNA, 22 nt, Homo sapiens
agugcauugagacuugugaguu

SEQ ID NO: 59045 - RNA, 22 nt, Homo sapiens
agugcacucuuuccucucuuac

SEQ ID NO: 59046 - RNA, 22 nt, Homo sapiens
aaugcuguguuauuucaugacc

SEQ ID NO: 59047 - RNA, 22 nt, Homo sapiens
aaugccuagugugugacaggug

SEQ ID NO: 59048 - RNA, 22 nt, Homo sapiens
aaugcuguucuuugcuuaaguu

SEQ ID NO: 59049 - RNA, 22 nt, Homo sapiens
aauggcaaauguuuucuguuga

SEQ ID NO: 59050 - RNA, 22 nt, Homo sapiens
aauggcaucuacguuaaauguc

SEQ ID NO: 59051 - RNA, 22 nt, Homo sapiens
aauguguuuugaaaucaggaag

SEQ ID NO: 59052 - RNA, 22 nt, Homo sapiens
acauacacuagggauguggugu

SEQ ID NO: 59053 - RNA, 22 nt, Homo sapiens
aaugugcuuucuuucacacagu

SEQ ID NO: 59054 - RNA, 22 nt, Homo sapiens
aaugugcuuugaaaagagcuga

SEQ ID NO: 59055 - RNA, 22 nt, Homo sapiens
aaugugcuguucagaggagucc

SEQ ID NO: 59056 - RNA, 22 nt, Homo sapiens
aaugugccuacuggagcuugca

SEQ ID NO: 59057 - RNA, 22 nt, Homo sapiens
acaucccaugccuggguacucc

SEQ ID NO: 59058 - RNA, 22 nt, Homo sapiens
acaugagacuggguuuguaggg

SEQ ID NO: 59059 - RNA, 17 nt, Homo sapiens
acaugagacuggauucu

SEQ ID NO: 59060 - RNA, 22 nt, Homo sapiens
acauaguagacacugaaaauau

SEQ ID NO: 59061 - RNA, 22 nt, Homo sapiens
acaucacuguuugauugauuga

SEQ ID NO: 59062 - RNA, 22 nt, Homo sapiens
acaugcauggcaugcauuguac

SEQ ID NO: 59063 - RNA, 22 nt, Homo sapiens
acaugcauccaugugaagagac

SEQ ID NO: 59064 - RNA, 22 nt, Homo sapiens
acaugguacugauuuacgaaau

SEQ ID NO: 59065 - RNA, 22 nt, Homo sapiens
acauguaauugauuuuguguua

SEQ ID NO: 59066 - RNA, 23 nt, Homo sapiens
acauguauagacuuuuuuuccuu

SEQ ID NO: 59067 - RNA, 22 nt, Homo sapiens
acauugcagauguguuuaaugu

SEQ ID NO: 59068 - RNA, 22 nt, Homo sapiens
acccucaagggacugacagaau

SEQ ID NO: 59069 - RNA, 22 nt, Homo sapiens
acccagaagucauucaggaaca

SEQ ID NO: 59070 - RNA, 22 nt, Homo sapiens
accaugcaguccaauaugcaca

SEQ ID NO: 59071 - RNA, 22 nt, Homo sapiens
acccaguguucaacauucacau

SEQ ID NO: 59072 - RNA, 22 nt, Homo sapiens
accaccauugcacugaacuuuc

SEQ ID NO: 59073 - RNA, 22 nt, Homo sapiens
accaguguuuaccaaguagcau

SEQ ID NO: 59074 - RNA, 18 nt, Homo sapiens
acauucagcuugaagaua

SEQ ID NO: 59075 - RNA, 22 nt, Homo sapiens
agaucacagucuuugguuuuag

SEQ ID NO: 59076 - RNA, 22 nt, Homo sapiens
agauauguuauugauguuaaug

SEQ ID NO: 59077 - RNA, 22 nt, Homo sapiens
agcaacauuguucauaauagcu

SEQ ID NO: 59078 - RNA, 22 nt, Homo sapiens
agcaacaucagcagcaggaaaa

SEQ ID NO: 59079 - RNA, 23 nt, Homo sapiens
agcaaaugcucuagcacuccaac

SEQ ID NO: 59080 - RNA, 22 nt, Homo sapiens
agaguauagcaacuuaguaaaa

SEQ ID NO: 59081 - RNA, 19 nt, Homo sapiens
agaguauugaauuugcccu

SEQ ID NO: 59082 - RNA, 22 nt, Homo sapiens
agaguaguuuauuaugcuaagg

SEQ ID NO: 59083 - RNA, 22 nt, Homo sapiens
agauacaucuaugugucugugu

SEQ ID NO: 59084 - RNA, 21 nt, Homo sapiens
agagucaucucuaucuguacc

SEQ ID NO: 59085 - RNA, 22 nt, Homo sapiens
agagcaaugacaugcuaugugg

SEQ ID NO: 59086 - RNA, 22 nt, Homo sapiens
agagcaaugggugaauauuaaa

SEQ ID NO: 59087 - RNA, 22 nt, Homo sapiens
acuuuuugcaaccauuuggacc

SEQ ID NO: 59088 - RNA, 22 nt, Homo sapiens
agagguuuaauugauucacagu

SEQ ID NO: 59089 - RNA, 22 nt, Homo sapiens
agagguuuaacuggcuuauggu

SEQ ID NO: 59090 - RNA, 18 nt, Homo sapiens
agagcuaugaacauaugc

SEQ ID NO: 59091 - RNA, 22 nt, Homo sapiens
agagcuguguuuuaacuuuuua

SEQ ID NO: 59092 - RNA, 22 nt, Homo sapiens
agaaagcgcuucccuuugcugg

SEQ ID NO: 59093 - RNA, 22 nt, Homo sapiens
agagaucauuuuguuucaaauc

SEQ ID NO: 59094 - RNA, 17 nt, Homo sapiens
acuuuuugaggaggcau

SEQ ID NO: 59095 - RNA, 22 nt, Homo sapiens
acuuugguuuauagaauuuagg

SEQ ID NO: 59096 - RNA, 21 nt, Homo sapiens
agaaaaucuuaugggaaacau

SEQ ID NO: 59097 - RNA, 22 nt, Homo sapiens
acuuuuugaugaggucguuugu

SEQ ID NO: 59098 - RNA, 22 nt, Homo sapiens
acuucauucucuggaucagaau

SEQ ID NO: 59099 - RNA, 22 nt, Homo sapiens
gugauauguuaggaucuaaguc

SEQ ID NO: 59100 - RNA, 21 nt, Homo sapiens
gugaucaugucacugcacucc

SEQ ID NO: 59101 - RNA, 22 nt, Homo sapiens
gugaucaugauccugaagcauu

SEQ ID NO: 59102 - RNA, 22 nt, Homo sapiens
gugaugguaguuuguauuucug

SEQ ID NO: 59103 - RNA, 22 nt, Homo sapiens
gugauuauuaugcacugcaugc

SEQ ID NO: 59104 - RNA, 22 nt, Homo sapiens
gugagaaucaaacuacauaaau

SEQ ID NO: 59105 - RNA, 18 nt, Homo sapiens
gugagaaugacuguucug

SEQ ID NO: 59106 - RNA, 22 nt, Homo sapiens
gugagaacugugucuuauaaac

SEQ ID NO: 59107 - RNA, 22 nt, Homo sapiens
gugauagguugucacugucacu

SEQ ID NO: 59108 - RNA, 22 nt, Homo sapiens
gugauugucuaaucaagauaca

SEQ ID NO: 59109 - RNA, 22 nt, Homo sapiens
guggaaaucucugugugacuua

SEQ ID NO: 59110 - RNA, 22 nt, Homo sapiens
guggaaugcaguguugauucaa

SEQ ID NO: 59111 - RNA, 22 nt, Homo sapiens
guggaauacuaugaugguggau

SEQ ID NO: 59112 - RNA, 22 nt, Homo sapiens
guggaauauaaagcaucgugua

SEQ ID NO: 59113 - RNA, 22 nt, Homo sapiens
gugguuuucaacuccaccugca

SEQ ID NO: 59114 - RNA, 22 nt, Homo sapiens
gugguuuuuuucugccuuauag

SEQ ID NO: 59115 - RNA, 22 nt, Homo sapiens
gugguuuuacaaagagaaagau

SEQ ID NO: 59116 - RNA, 22 nt, Homo sapiens
guguuauggagccaaacuacua

SEQ ID NO: 59117 - RNA, 22 nt, Homo sapiens
guguaaaacaauuagaggauuu

SEQ ID NO: 59118 - RNA, 22 nt, Homo sapiens
guguaaaugagugcugaaggag

SEQ ID NO: 59119 - RNA, 20 nt, Homo sapiens
guguaagagcaagcuuccua

SEQ ID NO: 59120 - RNA, 22 nt, Homo sapiens
gugugauuauuucaauugaugc

SEQ ID NO: 59121 - RNA, 22 nt, Homo sapiens
uaaauugcauaaguacaaauga

SEQ ID NO: 59122 - RNA, 22 nt, Homo sapiens
uaaauggauauugccaucuccu

SEQ ID NO: 59123 - RNA, 22 nt, Homo sapiens
uaaaguuauugccccucaguua

SEQ ID NO: 59124 - RNA, 22 nt, Homo sapiens
uaaaugcuuaauugaaugugga

SEQ ID NO: 59125 - RNA, 21 nt, Homo sapiens
uaaagcuuagcuauaguggcu

SEQ ID NO: 59126 - RNA, 22 nt, Homo sapiens
uaaagcuuagauccaugguggc

SEQ ID NO: 59127 - RNA, 18 nt, Homo sapiens
uaaaggcacuguguuguu

SEQ ID NO: 59128 - RNA, 22 nt, Homo sapiens
uaaagcuuggauuuaggcuaau

SEQ ID NO: 59129 - RNA, 22 nt, Homo sapiens
uaaagcacaaguaaagaauacu

SEQ ID NO: 59130 - RNA, 22 nt, Homo sapiens
uaaagccauugucaaguuugua

SEQ ID NO: 59131 - RNA, 22 nt, Homo sapiens
uaacauuguugauuauacuaag

SEQ ID NO: 59132 - RNA, 23 nt, Homo sapiens
uaacauugcaugauuaccugcau

SEQ ID NO: 59133 - RNA, 22 nt, Homo sapiens
uaacaguggucugugguaucug

SEQ ID NO: 59134 - RNA, 22 nt, Homo sapiens
uaacaguguauuuacuacuucc

SEQ ID NO: 59135 - RNA, 22 nt, Homo sapiens
uaacauucacaugcugcaaaaa

SEQ ID NO: 59136 - RNA, 22 nt, Homo sapiens
uaacaccuugcucugucaauaa

SEQ ID NO: 59137 - RNA, 22 nt, Homo sapiens
uaacaacauucuaacugacggc

SEQ ID NO: 59138 - RNA, 22 nt, Homo sapiens
uaacacagagcuccuaaucccu

SEQ ID NO: 59139 - RNA, 18 nt, Homo sapiens
uaaauugcuucaccugag

SEQ ID NO: 59140 - RNA, 22 nt, Homo sapiens
guugcacagucuuuccuggacu

SEQ ID NO: 59141 - RNA, 21 nt, Homo sapiens
uaaaacuguaacuuuguccug

SEQ ID NO: 59142 - RNA, 22 nt, Homo sapiens
uaaaagucaucacaacuggagu

SEQ ID NO: 59143 - RNA, 22 nt, Homo sapiens
uaaacugucuugcaguuacaug

SEQ ID NO: 59144 - RNA, 23 nt, Homo sapiens
guucaucagggauauuggccuga

SEQ ID NO: 59145 - RNA, 22 nt, Homo sapiens
guguucaaacccaggucugucu

SEQ ID NO: 59146 - RNA, 22 nt, Homo sapiens
guguucaaagcugauugagauu

SEQ ID NO: 59147 - RNA, 22 nt, Homo sapiens
guguucauggaauuugcaauug

SEQ ID NO: 59148 - RNA, 22 nt, Homo sapiens
guguucaaauucugacagagag

SEQ ID NO: 59149 - RNA, 22 nt, Homo sapiens
guucaucagggauacuggccug

SEQ ID NO: 59150 - RNA, 22 nt, Homo sapiens
guucucacuggacugugaaaau

SEQ ID NO: 59151 - RNA, 22 nt, Homo sapiens
guaaccuauaguuaccaauagu

SEQ ID NO: 59152 - RNA, 22 nt, Homo sapiens
guaagagaauggguuacuuucc

SEQ ID NO: 59153 - RNA, 22 nt, Homo sapiens
guaaauguccccugugauauug

SEQ ID NO: 59154 - RNA, 18 nt, Homo sapiens
guaaauguaucuauugcc

SEQ ID NO: 59155 - RNA, 22 nt, Homo sapiens
guaauaacuguggaaaaagguu

SEQ ID NO: 59156 - RNA, 22 nt, Homo sapiens
guaagguuguauuucaagaaac

SEQ ID NO: 59157 - RNA, 22 nt, Homo sapiens
guaaucucagcuacgcgggagg

SEQ ID NO: 59158 - RNA, 22 nt, Homo sapiens
guauagaucguagaccaauaaa

SEQ ID NO: 59159 - RNA, 22 nt, Homo sapiens
guaucaugaaguuucuucauuu

SEQ ID NO: 59160 - RNA, 22 nt, Homo sapiens
guauaugccucaguuauagcac

SEQ ID NO: 59161 - RNA, 22 nt, Homo sapiens
ggcacaauugcagcaauaaaca

SEQ ID NO: 59162 - RNA, 22 nt, Homo sapiens
ggcaagugggagggaguguuuc

SEQ ID NO: 59163 - RNA, 22 nt, Homo sapiens
ggcaaguucuaaugauuagaau

SEQ ID NO: 59164 - RNA, 22 nt, Homo sapiens
ggcaagaaccacaauuacuuuu

SEQ ID NO: 59165 - RNA, 22 nt, Homo sapiens
ggcaagaaaaugcaauuacugu

SEQ ID NO: 59166 - RNA, 22 nt, Homo sapiens
ggcaagaaccucaauuaccuuu

SEQ ID NO: 59167 - RNA, 22 nt, Homo sapiens
ggcaagaacuucacucacuuuu

SEQ ID NO: 59168 - RNA, 20 nt, Homo sapiens
ggcaagacccaaagugugug

SEQ ID NO: 59169 - RNA, 22 nt, Homo sapiens
ggcaagaagagaguuuaaacau

SEQ ID NO: 59170 - RNA, 21 nt, Homo sapiens
ggcaugaauggaaaagugaga

SEQ ID NO: 59171 - RNA, 22 nt, Homo sapiens
guaucauugccuaaugcucuca

SEQ ID NO: 59172 - RNA, 22 nt, Homo sapiens
gucagaugcagauuccaguucu

SEQ ID NO: 59173 - RNA, 22 nt, Homo sapiens
gucucccagccuacauauuucu

SEQ ID NO: 59174 - RNA, 22 nt, Homo sapiens
gucagugauugauuuaaagacg

SEQ ID NO: 59175 - RNA, 20 nt, Homo sapiens
gucugucuccgaguagaauu

SEQ ID NO: 59176 - RNA, 22 nt, Homo sapiens
gucugucuuuugucuuugaaau

SEQ ID NO: 59177 - RNA, 22 nt, Homo sapiens
gucucuuguuaucauuucugag

SEQ ID NO: 59178 - RNA, 22 nt, Homo sapiens
gucugcaugucauaugauagua

SEQ ID NO: 59179 - RNA, 22 nt, Homo sapiens
gucuuuugcuagccagagagcu

SEQ ID NO: 59180 - RNA, 22 nt, Homo sapiens
gucuuuaguugaaacauguggu

SEQ ID NO: 59181 - RNA, 20 nt, Homo sapiens
gucuugcuccguugcccagg

SEQ ID NO: 59182 - RNA, 22 nt, Homo sapiens
gucuuugaugucuaugugcuuc

SEQ ID NO: 59183 - RNA, 22 nt, Homo sapiens
gucuuugcuuuuaaccagaggu

SEQ ID NO: 59184 - RNA, 20 nt, Homo sapiens
gugaauacauuugguuucau

SEQ ID NO: 59185 - RNA, 22 nt, Homo sapiens
gugaacaauguuuuauccuggg

SEQ ID NO: 59186 - RNA, 17 nt, Homo sapiens
gugaaaucaucauuuuu

SEQ ID NO: 59187 - RNA, 22 nt, Homo sapiens
ucaaaugauucagaagccaccu

SEQ ID NO: 59188 - RNA, 22 nt, Homo sapiens
ucaacagugauggaaaguuaua

SEQ ID NO: 59189 - RNA, 22 nt, Homo sapiens
ucaagcaauucuccucucagcc

SEQ ID NO: 59190 - RNA, 22 nt, Homo sapiens
ucaacugcuugagaucacaaau

SEQ ID NO: 59191 - RNA, 22 nt, Homo sapiens
ucaagcaauucgccugucucag

SEQ ID NO: 59192 - RNA, 22 nt, Homo sapiens
ucacaaguguauagacaugucc

SEQ ID NO: 59193 - RNA, 22 nt, Homo sapiens
ucaauugcuuaugaagauacau

SEQ ID NO: 59194 - RNA, 22 nt, Homo sapiens
ucaaugaaugaugguugguaug

SEQ ID NO: 59195 - RNA, 22 nt, Homo sapiens
ucaaugcaaccuccaccucugg

SEQ ID NO: 59196 - RNA, 22 nt, Homo sapiens
ucacaauucacuacaggcuuga

SEQ ID NO: 59197 - RNA, 22 nt, Homo sapiens
ucacaauggcugaacuaauuua

SEQ ID NO: 59198 - RNA, 22 nt, Homo sapiens
ucacacgugaacucaucacaga

SEQ ID NO: 59199 - RNA, 23 nt, Homo sapiens
ucacacuuaagagaaaugcagcu

SEQ ID NO: 59200 - RNA, 22 nt, Homo sapiens
ucacaguagcaaauguuagaaa

SEQ ID NO: 59201 - RNA, 20 nt, Homo sapiens
ucacagucacacauaauccu

SEQ ID NO: 59202 - RNA, 22 nt, Homo sapiens
ucacagugcaggaucaguuaau

SEQ ID NO: 59203 - RNA, 22 nt, Homo sapiens
ucacaguguuaaaccuuucuuu

SEQ ID NO: 59204 - RNA, 22 nt, Homo sapiens
ucacaguaaauccagaagaaau

SEQ ID NO: 59205 - RNA, 22 nt, Homo sapiens
ucacagacugagccaaauagag

SEQ ID NO: 59206 - RNA, 22 nt, Homo sapiens
ucacagauaaauaaagaugauu

SEQ ID NO: 59207 - RNA, 22 nt, Homo sapiens
ucacgcugcugcaaccagccug

SEQ ID NO: 59208 - RNA, 22 nt, Homo sapiens
ucacgugguucauaaggcagaa

SEQ ID NO: 59209 - RNA, 19 nt, Homo sapiens
ucacgugcagcagccacac

SEQ ID NO: 59210 - RNA, 22 nt, Homo sapiens
ucaccuuacuugcuucugaacu

SEQ ID NO: 59211 - RNA, 22 nt, Homo sapiens
ucacaucucagguuucuugaca

SEQ ID NO: 59212 - RNA, 22 nt, Homo sapiens
ucacaugaauugucuuguucca

SEQ ID NO: 59213 - RNA, 22 nt, Homo sapiens
ucacauagcugaguaaaaugga

SEQ ID NO: 59214 - RNA, 20 nt, Homo sapiens
ucacauccucucccaacaug

SEQ ID NO: 59215 - RNA, 22 nt, Homo sapiens
ucacaugugaagauugggagua

SEQ ID NO: 59216 - RNA, 22 nt, Homo sapiens
ucacaugggugcaauauaauca

SEQ ID NO: 59217 - RNA, 22 nt, Homo sapiens
ucacaugugacauauauauuug

SEQ ID NO: 59218 - RNA, 22 nt, Homo sapiens
ucacaugugcguuuuggcaugu

SEQ ID NO: 59219 - RNA, 22 nt, Homo sapiens
ucacauguguaaauugguguaa

SEQ ID NO: 59220 - RNA, 22 nt, Homo sapiens
ucacauuguguagccugcucac

SEQ ID NO: 59221 - RNA, 22 nt, Homo sapiens
ucacauucaauuguaauccccg

SEQ ID NO: 59222 - RNA, 22 nt, Homo sapiens
uaucucagaguguacaagauua

SEQ ID NO: 59223 - RNA, 20 nt, Homo sapiens
uaucuacuugcaaaugccau

SEQ ID NO: 59224 - RNA, 22 nt, Homo sapiens
uaucauuguguuauuucuucca

SEQ ID NO: 59225 - RNA, 22 nt, Homo sapiens
uaucacaaacuuagcaguuuaa

SEQ ID NO: 59226 - RNA, 22 nt, Homo sapiens
uaucaaucuagggaaacuccaa

SEQ ID NO: 59227 - RNA, 22 nt, Homo sapiens
uaucaugucuguguguaccuag

SEQ ID NO: 59228 - RNA, 22 nt, Homo sapiens
uaugucuuuugcuugcaaauag

SEQ ID NO: 59229 - RNA, 22 nt, Homo sapiens
uaugucacuggacauaaguucu

SEQ ID NO: 59230 - RNA, 22 nt, Homo sapiens
uaugucaugggguuuuugagau

SEQ ID NO: 59231 - RNA, 22 nt, Homo sapiens
uaucucauccuccuugauccca

SEQ ID NO: 59232 - RNA, 22 nt, Homo sapiens
uaucucuguggguagugcugaa

SEQ ID NO: 59233 - RNA, 22 nt, Homo sapiens
uauugcucugacugauuggaug

SEQ ID NO: 59234 - RNA, 22 nt, Homo sapiens
ucaaagucuucucaaguaacau

SEQ ID NO: 59235 - RNA, 21 nt, Homo sapiens
ucaaaguguucuuuuguugaa

SEQ ID NO: 59236 - RNA, 22 nt, Homo sapiens
ucaaaugcacguagagaaaaua

SEQ ID NO: 59237 - RNA, 17 nt, Homo sapiens
ucaaaugcucccaguga

SEQ ID NO: 59238 - RNA, 20 nt, Homo sapiens
ucaaauucuuggccuccagc

SEQ ID NO: 59239 - RNA, 22 nt, Homo sapiens
ucaaaguauucuucugagaacc

SEQ ID NO: 59240 - RNA, 20 nt, Homo sapiens
ucaaagacauggcugucaga

SEQ ID NO: 59241 - RNA, 22 nt, Homo sapiens
ucaaacugucagguugaccaga

SEQ ID NO: 59242 - RNA, 22 nt, Homo sapiens
uauugcuggcacauaguagguc

SEQ ID NO: 59243 - RNA, 22 nt, Homo sapiens
uauugcuugaggaaaugguaau

SEQ ID NO: 59244 - RNA, 22 nt, Homo sapiens
uauuacuugucugugucucaau

SEQ ID NO: 59245 - RNA, 22 nt, Homo sapiens
uauuacauccauaggcucugcu

SEQ ID NO: 59246 - RNA, 22 nt, Homo sapiens
uagcugcaaaauauagacuucu

SEQ ID NO: 59247 - RNA, 22 nt, Homo sapiens
uaggaaguacaucucagaaucu

SEQ ID NO: 59248 - RNA, 22 nt, Homo sapiens
uagcacaugucagguaauuugc

SEQ ID NO: 59249 - RNA, 22 nt, Homo sapiens
uagcacaucuucuuggccugca

SEQ ID NO: 59250 - RNA, 22 nt, Homo sapiens
uagcuaaauucagcucuaggua

SEQ ID NO: 59251 - RNA, 22 nt, Homo sapiens
uagcaucagauuccauauucua

SEQ ID NO: 59252 - RNA, 22 nt, Homo sapiens
uauaugauugguagacccugca

SEQ ID NO: 59253 - RNA, 22 nt, Homo sapiens
uagugguauuagcgauacuacu

SEQ ID NO: 59254 - RNA, 22 nt, Homo sapiens
uauauguucuugcacuggaaag

SEQ ID NO: 59255 - RNA, 22 nt, Homo sapiens
uauauguuuucauaaggcuaga

SEQ ID NO: 59256 - RNA, 22 nt, Homo sapiens
uagguaaguaauauacagauga

SEQ ID NO: 59257 - RNA, 22 nt, Homo sapiens
uagucaaaucugaaggaaauuu

SEQ ID NO: 59258 - RNA, 22 nt, Homo sapiens
uaguaggacaggauuucaguua

SEQ ID NO: 59259 - RNA, 21 nt, Homo sapiens
uagugcugaggcaguauggga

SEQ ID NO: 59260 - RNA, 22 nt, Homo sapiens
uaguccauuuucaugcugcuau

SEQ ID NO: 59261 - RNA, 22 nt, Homo sapiens
uagugcugugauuaacauaaug

SEQ ID NO: 59262 - RNA, 20 nt, Homo sapiens
uaguggaaaucagguccucu

SEQ ID NO: 59263 - RNA, 22 nt, Homo sapiens
uagugguaguagcaguaauauu

SEQ ID NO: 59264 - RNA, 22 nt, Homo sapiens
uaaggcauuuuuuugaguugca

SEQ ID NO: 59265 - RNA, 22 nt, Homo sapiens
uacauugcacuuuauuagauac

SEQ ID NO: 59266 - RNA, 22 nt, Homo sapiens
uaccacaggcuggguaaucuau

SEQ ID NO: 59267 - RNA, 23 nt, Homo sapiens
uaccacauuccuucuuuccuguu

SEQ ID NO: 59268 - RNA, 16 nt, Homo sapiens
uacauuuguuacaugg

SEQ ID NO: 59269 - RNA, 22 nt, Homo sapiens
uaccaaguauuuucacaugaac

SEQ ID NO: 59270 - RNA, 22 nt, Homo sapiens
uaccacccuuuuuccagaagcc

SEQ ID NO: 59271 - RNA, 22 nt, Homo sapiens
uaccauguauguuucuccauug

SEQ ID NO: 59272 - RNA, 19 nt, Homo sapiens
uacccagaagcagcauugu

SEQ ID NO: 59273 - RNA, 20 nt, Homo sapiens
uaacuguggcuucuuuuggc

SEQ ID NO: 59274 - RNA, 22 nt, Homo sapiens
uaagacacuuaaaauguuacau

SEQ ID NO: 59275 - RNA, 22 nt, Homo sapiens
uaagaauucuguccgguauacu

SEQ ID NO: 59276 - RNA, 22 nt, Homo sapiens
uaacugcaaccuccgccucccg

SEQ ID NO: 59277 - RNA, 22 nt, Homo sapiens
uaacugcaaccucugccugcug

SEQ ID NO: 59278 - RNA, 22 nt, Homo sapiens
uaacuaaagagaagucaauguc

SEQ ID NO: 59279 - RNA, 22 nt, Homo sapiens
uaagcuauagugaauaaauugc

SEQ ID NO: 59280 - RNA, 22 nt, Homo sapiens
uaaggaaggcugugugcuuuua

SEQ ID NO: 59281 - RNA, 18 nt, Homo sapiens
uaagaugcagccuauucc

SEQ ID NO: 59282 - RNA, 22 nt, Homo sapiens
uaagacuuuuugggaauauaga

SEQ ID NO: 59283 - RNA, 20 nt, Homo sapiens
uaagacaugguccacaugcc

SEQ ID NO: 59284 - RNA, 22 nt, Homo sapiens
uaagagcuaggauuuuaaauca

SEQ ID NO: 59285 - RNA, 19 nt, Homo sapiens
uaagaugaagcugucuggg

SEQ ID NO: 59286 - RNA, 22 nt, Homo sapiens
uagaaugucagcuucuugaggg

SEQ ID NO: 59287 - RNA, 22 nt, Homo sapiens
uagaauguauaauauuuuacuu

SEQ ID NO: 59288 - RNA, 22 nt, Homo sapiens
uagauuaucccugauuugucca

SEQ ID NO: 59289 - RNA, 22 nt, Homo sapiens
uagcaagaugaauuugugcaaa

SEQ ID NO: 59290 - RNA, 22 nt, Homo sapiens
uagcaaaucaauggaauugaag

SEQ ID NO: 59291 - RNA, 22 nt, Homo sapiens
uagauuauuccuuugaauggcc

SEQ ID NO: 59292 - RNA, 22 nt, Homo sapiens
uagauuauuggcugauuugauc

SEQ ID NO: 59293 - RNA, 22 nt, Homo sapiens
uagauuaucuuaaggagcauca

SEQ ID NO: 59294 - RNA, 22 nt, Homo sapiens
uagauuguaauaugcagaaugg

SEQ ID NO: 59295 - RNA, 22 nt, Homo sapiens
uacugcagucagacuccugggc

SEQ ID NO: 59296 - RNA, 22 nt, Homo sapiens
uacugcuaccuccagcuucugg

SEQ ID NO: 59297 - RNA, 22 nt, Homo sapiens
uagaacauuccaggugauguug

SEQ ID NO: 59298 - RNA, 22 nt, Homo sapiens
uagaauggaaggcauguuugcc

SEQ ID NO: 59299 - RNA, 22 nt, Homo sapiens
uagaagcuacucuucuuguggc

SEQ ID NO: 59300 - RNA, 22 nt, Homo sapiens
uacuuuguagagugugagaauu

SEQ ID NO: 59301 - RNA, 22 nt, Homo sapiens
uagaacaauugcuggauccgaa

SEQ ID NO: 59302 - RNA, 20 nt, Homo sapiens
gcaagcaugaagaguagaga

SEQ ID NO: 59303 - RNA, 22 nt, Homo sapiens
gcaauggaaucccuugaucaau

SEQ ID NO: 59304 - RNA, 22 nt, Homo sapiens
gcaagacaugucuaagguuuaa

SEQ ID NO: 59305 - RNA, 22 nt, Homo sapiens
gauguguuuccaggauuuguuu

SEQ ID NO: 59306 - RNA, 22 nt, Homo sapiens
gaugguuuucaccugcaugcuu

SEQ ID NO: 59307 - RNA, 22 nt, Homo sapiens
gaugguuuuucuccgauuuaua

SEQ ID NO: 59308 - RNA, 22 nt, Homo sapiens
gauggcauuucuggaucugaca

SEQ ID NO: 59309 - RNA, 22 nt, Homo sapiens
gauaauucuagcagauacaggc

SEQ ID NO: 59310 - RNA, 22 nt, Homo sapiens
gauaaauccagauucugaugua

SEQ ID NO: 59311 - RNA, 22 nt, Homo sapiens
gauaaaucuuggcuagucuaag

SEQ ID NO: 59312 - RNA, 22 nt, Homo sapiens
gauaaagauagcaauagggaca

SEQ ID NO: 59313 - RNA, 22 nt, Homo sapiens
gaguucaauuuccagcuguucu

SEQ ID NO: 59314 - RNA, 22 nt, Homo sapiens
gaguugagagaguuguuauuuc

SEQ ID NO: 59315 - RNA, 22 nt, Homo sapiens
gagugcaauggcgcgaucuggg

SEQ ID NO: 59316 - RNA, 22 nt, Homo sapiens
gagugcaauggcaagaucuugg

SEQ ID NO: 59317 - RNA, 22 nt, Homo sapiens
gagugcaauggcaugaucuugg

SEQ ID NO: 59318 - RNA, 22 nt, Homo sapiens
gcuaguguuugccagcguagcc

SEQ ID NO: 59319 - RNA, 22 nt, Homo sapiens
gcauggaaggcgcuuugugacu

SEQ ID NO: 59320 - RNA, 22 nt, Homo sapiens
gccagauuguccaguuuuuuau

SEQ ID NO: 59321 - RNA, 22 nt, Homo sapiens
gcaugcacaugugaaaaaauga

SEQ ID NO: 59322 - RNA, 22 nt, Homo sapiens
gcaugacaaugauugcucuuca

SEQ ID NO: 59323 - RNA, 22 nt, Homo sapiens
gccaaaaugcugggauuacagg

SEQ ID NO: 59324 - RNA, 22 nt, Homo sapiens
gccaacauggcgcuccauucuu

SEQ ID NO: 59325 - RNA, 18 nt, Homo sapiens
gccaacauguaaacaggu

SEQ ID NO: 59326 - RNA, 22 nt, Homo sapiens
gcacauuacaaguauuagcuca

SEQ ID NO: 59327 - RNA, 22 nt, Homo sapiens
gcacaguaggugguaggacuuu

SEQ ID NO: 59328 - RNA, 22 nt, Homo sapiens
gcacagucaacacuuauucacc

SEQ ID NO: 59329 - RNA, 22 nt, Homo sapiens
gcuguuugccgccaucgcagac

SEQ ID NO: 59330 - RNA, 22 nt, Homo sapiens
ggacauguauauauaugugugu

SEQ ID NO: 59331 - RNA, 22 nt, Homo sapiens
ggaaagacuauuguaaaggaug

SEQ ID NO: 59332 - RNA, 22 nt, Homo sapiens
ggaaagacaccuuacuauguua

SEQ ID NO: 59333 - RNA, 22 nt, Homo sapiens
gcuuuuggaggaacuuaagauu

SEQ ID NO: 59334 - RNA, 22 nt, Homo sapiens
ggauaacagccaggucaaacaa

SEQ ID NO: 59335 - RNA, 22 nt, Homo sapiens
ggcaaaaucgcaauuacuuuug

SEQ ID NO: 59336 - RNA, 22 nt, Homo sapiens
ggcaaaauauugucugguauag

SEQ ID NO: 59337 - RNA, 22 nt, Homo sapiens
ggcaacaugaugaaaugccauc

SEQ ID NO: 59338 - RNA, 23 nt, Homo sapiens
ggauggaaaguuuugagggccac

SEQ ID NO: 59339 - RNA, 22 nt, Homo sapiens
ggagaugauuaugaaucacuua

SEQ ID NO: 59340 - RNA, 22 nt, Homo sapiens
ggagauguuuaaccuuuuaucu

SEQ ID NO: 59341 - RNA, 22 nt, Homo sapiens
ggagaucuuuguuaucuuuuga

SEQ ID NO: 59342 - RNA, 22 nt, Homo sapiens
ggagaauguaauugguauuuug

SEQ ID NO: 59343 - RNA, 22 nt, Homo sapiens
cugucuguuucaaaagugguua

SEQ ID NO: 59344 - RNA, 22 nt, Homo sapiens
cugucagugggaguucaggcuu

SEQ ID NO: 59345 - RNA, 22 nt, Homo sapiens
cugucuagagggcacaugaugc

SEQ ID NO: 59346 - RNA, 22 nt, Homo sapiens
cugucucagccucuccaguagc

SEQ ID NO: 59347 - RNA, 22 nt, Homo sapiens
cugucuggaggccugcaaauaa

SEQ ID NO: 59348 - RNA, 22 nt, Homo sapiens
cuguucaggaggcauuuggugg

SEQ ID NO: 59349 - RNA, 22 nt, Homo sapiens
cuguucaaauuguuugugaagu

SEQ ID NO: 59350 - RNA, 21 nt, Homo sapiens
cuuugguuucugacuugcaua

SEQ ID NO: 59351 - RNA, 23 nt, Homo sapiens
cuuuguacagcuugacuacuggg

SEQ ID NO: 59352 - RNA, 22 nt, Homo sapiens
cuuuguaugucaugacaacugu

SEQ ID NO: 59353 - RNA, 22 nt, Homo sapiens
cugugccaagcuugcgaugugc

SEQ ID NO: 59354 - RNA, 19 nt, Homo sapiens
cuguggucauuauuuugcu

SEQ ID NO: 59355 - RNA, 18 nt, Homo sapiens
gaaaugccucuugcuuac

SEQ ID NO: 59356 - RNA, 22 nt, Homo sapiens
gaaagcuaaugacuuuggguga

SEQ ID NO: 59357 - RNA, 22 nt, Homo sapiens
gaaauguugauagugggcauug

SEQ ID NO: 59358 - RNA, 22 nt, Homo sapiens
gaaaugcucagggguuuuccag

SEQ ID NO: 59359 - RNA, 22 nt, Homo sapiens
gaaauggaucagagcaagcuuu

SEQ ID NO: 59360 - RNA, 20 nt, Homo sapiens
gacauaggcugguaucuggc

SEQ ID NO: 59361 - RNA, 22 nt, Homo sapiens
gaaauguauuaaugaguugaaa

SEQ ID NO: 59362 - RNA, 22 nt, Homo sapiens
gaaauguuuuucaugugggcaa

SEQ ID NO: 59363 - RNA, 18 nt, Homo sapiens
gacaguguggugauuccu

SEQ ID NO: 59364 - RNA, 21 nt, Homo sapiens
cuuuuuacucguucauaugca

SEQ ID NO: 59365 - RNA, 22 nt, Homo sapiens
cuuuuugguagagcaggugugc

SEQ ID NO: 59366 - RNA, 20 nt, Homo sapiens
cuuuuagcagcagcaagaga

SEQ ID NO: 59367 - RNA, 22 nt, Homo sapiens
gacauguuuucauguauuugga

SEQ ID NO: 59368 - RNA, 22 nt, Homo sapiens
gacauguuuuuuaagguuuaug

SEQ ID NO: 59369 - RNA, 22 nt, Homo sapiens
gaaaacugcuucucuggguuuc

SEQ ID NO: 59370 - RNA, 22 nt, Homo sapiens
gacauguuuucaagauuuauaa

SEQ ID NO: 59371 - RNA, 22 nt, Homo sapiens
gacauguaaggcucucucuguu

SEQ ID NO: 59372 - RNA, 22 nt, Homo sapiens
gacuacaacuucuauuauucag

SEQ ID NO: 59373 - RNA, 22 nt, Homo sapiens
gagauuaacauuugaggagcug

SEQ ID NO: 59374 - RNA, 22 nt, Homo sapiens
gagauguagucuugcccuguca

SEQ ID NO: 59375 - RNA, 22 nt, Homo sapiens
gagaacauuaauaguuaauuuu

SEQ ID NO: 59376 - RNA, 18 nt, Homo sapiens
gacuuggaguuuacagug

SEQ ID NO: 59377 - RNA, 22 nt, Homo sapiens
gagaacagagauaauuuuacuu

SEQ ID NO: 59378 - RNA, 22 nt, Homo sapiens
gagugcaagguuuuucugagug

SEQ ID NO: 59379 - RNA, 22 nt, Homo sapiens
gagugcaauggcaugaucuggg

SEQ ID NO: 59380 - RNA, 23 nt, Homo sapiens
gagugcaaugacaugaucucgga

SEQ ID NO: 59381 - RNA, 22 nt, Homo sapiens
gagcugaaguuuccauuuguac

SEQ ID NO: 59382 - RNA, 22 nt, Homo sapiens
gagcuguugguuugaaagaauu

SEQ ID NO: 59383 - RNA, 22 nt, Homo sapiens
gagcuaguguaauauuuugggg

SEQ ID NO: 59384 - RNA, 22 nt, Homo sapiens
cagauguaguauuuuagugaaa

SEQ ID NO: 59385 - RNA, 20 nt, Homo sapiens
cagcaaccugcucucuuccu

SEQ ID NO: 59386 - RNA, 22 nt, Homo sapiens
caggcauuguccaugcugaagg

SEQ ID NO: 59387 - RNA, 22 nt, Homo sapiens
caguacaauguugauuagaagu

SEQ ID NO: 59388 - RNA, 22 nt, Homo sapiens
caguagcaugccucagaaugag

SEQ ID NO: 59389 - RNA, 19 nt, Homo sapiens
caugccacugcacuugagu

SEQ ID NO: 59390 - RNA, 22 nt, Homo sapiens
caugcauuggucuauuauguga

SEQ ID NO: 59391 - RNA, 22 nt, Homo sapiens
caugugcaugcuuucuuaugug

SEQ ID NO: 59392 - RNA, 22 nt, Homo sapiens
cauuaguugaagugcagggaga

SEQ ID NO: 59393 - RNA, 22 nt, Homo sapiens
cauuccacauguaggacaauuu

SEQ ID NO: 59394 - RNA, 22 nt, Homo sapiens
cauugcacuccagcccuggcaa

SEQ ID NO: 59395 - RNA, 22 nt, Homo sapiens
cauugcuaaaagucauauauaa

SEQ ID NO: 59396 - RNA, 22 nt, Homo sapiens
cauugcaugcauauggcuuggu

SEQ ID NO: 59397 - RNA, 22 nt, Homo sapiens
cauggcaucuguguggccucca

SEQ ID NO: 59398 - RNA, 22 nt, Homo sapiens
caugucuuuuaaacauucaacu

SEQ ID NO: 59399 - RNA, 22 nt, Homo sapiens
caugucuuuuauucugugugau

SEQ ID NO: 59400 - RNA, 22 nt, Homo sapiens
cauguauagauuccauaguggu

SEQ ID NO: 59401 - RNA, 22 nt, Homo sapiens
cauggcuuuuauaacaagaaau

SEQ ID NO: 59402 - RNA, 22 nt, Homo sapiens
cagagaacugaguuauuuucuu

SEQ ID NO: 59403 - RNA, 22 nt, Homo sapiens
cagagagcuugcccuuguauau

SEQ ID NO: 59404 - RNA, 22 nt, Homo sapiens
cagagguauugcaaaagccuag

SEQ ID NO: 59405 - RNA, 22 nt, Homo sapiens
cagauaguuguagauaugcagc

SEQ ID NO: 59406 - RNA, 22 nt, Homo sapiens
cagagcaaugcuuuugcuuuga

SEQ ID NO: 59407 - RNA, 22 nt, Homo sapiens
cacauguucaggagcacuuaga

SEQ ID NO: 59408 - RNA, 22 nt, Homo sapiens
cacaguguucauagccaucagg

SEQ ID NO: 59409 - RNA, 21 nt, Homo sapiens
caauggcacgaucuuggcuca

SEQ ID NO: 59410 - RNA, 22 nt, Homo sapiens
caaugguuuuuuaguauaagua

SEQ ID NO: 59411 - RNA, 22 nt, Homo sapiens
cacaaugucuaagauguuucua

SEQ ID NO: 59412 - RNA, 22 nt, Homo sapiens
caauugcacucuuagguguaca

SEQ ID NO: 59413 - RNA, 22 nt, Homo sapiens
cacacugucuucaauggguggu

SEQ ID NO: 59414 - RNA, 22 nt, Homo sapiens
cacagagugagacccugucucu

SEQ ID NO: 59415 - RNA, 22 nt, Homo sapiens
cacaguagaauagagcacuagg

SEQ ID NO: 59416 - RNA, 22 nt, Homo sapiens
cacagucuugcaauauugagau

SEQ ID NO: 59417 - RNA, 22 nt, Homo sapiens
cacagcuaacaacuguuucuuc

SEQ ID NO: 59418 - RNA, 22 nt, Homo sapiens
cacagcacaggcaugaguguca

SEQ ID NO: 59419 - RNA, 22 nt, Homo sapiens
caaguacugggcuauggauauu

SEQ ID NO: 59420 - RNA, 22 nt, Homo sapiens
caagugcuacagagaaaucuuu

SEQ ID NO: 59421 - RNA, 22 nt, Homo sapiens
caagugcuugaugaaugaucaa

SEQ ID NO: 59422 - RNA, 22 nt, Homo sapiens
caaugcauuauucucccacuuc

SEQ ID NO: 59423 - RNA, 22 nt, Homo sapiens
auugcacuggggguuagaauuu

SEQ ID NO: 59424 - RNA, 23 nt, Homo sapiens
auugcagaaucacagagguagug

SEQ ID NO: 59425 - RNA, 22 nt, Homo sapiens
ccaguuuucucacuguugcagu

SEQ ID NO: 59426 - RNA, 22 nt, Homo sapiens
ccaguucaaugauauggaaacu

SEQ ID NO: 59427 - RNA, 22 nt, Homo sapiens
ccaguguuuuugaauuccagga

SEQ ID NO: 59428 - RNA, 22 nt, Homo sapiens
cuaaagugcuuaaaaucucauu

SEQ ID NO: 59429 - RNA, 22 nt, Homo sapiens
cuaaagauagugacaugauuug

SEQ ID NO: 59430 - RNA, 22 nt, Homo sapiens
ccaguguuuggauuagggaugc

SEQ ID NO: 59431 - RNA, 20 nt, Homo sapiens
ccaguguuauuuauguucua

SEQ ID NO: 59432 - RNA, 22 nt, Homo sapiens
ccaguauuuuauugaggguuuu

SEQ ID NO: 59433 - RNA, 22 nt, Homo sapiens
ccagucuuggugucuguagcac

SEQ ID NO: 59434 - RNA, 22 nt, Homo sapiens
cuccauuuaucugaaauuuuau

SEQ ID NO: 59435 - RNA, 22 nt, Homo sapiens
cuagcaggcaagauaagauuca

SEQ ID NO: 59436 - RNA, 22 nt, Homo sapiens
cucauugcaaucucugccuccc

SEQ ID NO: 59437 - RNA, 22 nt, Homo sapiens
cucauuggcuacugaggcuugu

SEQ ID NO: 59438 - RNA, 22 nt, Homo sapiens
cuagagagaagcugugugaccu

SEQ ID NO: 59439 - RNA, 22 nt, Homo sapiens
cuagauuauccaacuuauuagc

SEQ ID NO: 59440 - RNA, 22 nt, Homo sapiens
cuagaguagaguuuccuuagga

SEQ ID NO: 59441 - RNA, 22 nt, Homo sapiens
cuagauuguuuccauaaugaca

SEQ ID NO: 59442 - RNA, 22 nt, Homo sapiens
cuagcacauaguuauucacuca

SEQ ID NO: 59443 - RNA, 22 nt, Homo sapiens
cuaagugaacugucacugagaa

SEQ ID NO: 59444 - RNA, 22 nt, Homo sapiens
cuaaucuagccuuauaaguauu

SEQ ID NO: 59445 - RNA, 22 nt, Homo sapiens
cuaaaugucucuacuaaguuua

SEQ ID NO: 59446 - RNA, 22 nt, Homo sapiens
cuaagauugucuuaguguguug

SEQ ID NO: 59447 - RNA, 22 nt, Homo sapiens
cuacauuguagguauucaaacu

SEQ ID NO: 59448 - RNA, 22 nt, Homo sapiens
cucccagugacccaggaacagg

SEQ ID NO: 59449 - RNA, 22 nt, Homo sapiens
cugagaacaucauucagauauu

SEQ ID NO: 59450 - RNA, 22 nt, Homo sapiens
cugagacuggugauuuaugaag

SEQ ID NO: 59451 - RNA, 22 nt, Homo sapiens
cugagacacucuuaucugcaua

SEQ ID NO: 59452 - RNA, 22 nt, Homo sapiens
cugacuaguuuuaaugcagauu

SEQ ID NO: 59453 - RNA, 22 nt, Homo sapiens
cugacauuguugaucacagcca

SEQ ID NO: 59454 - RNA, 22 nt, Homo sapiens
cucugagguuauucguaauauu

SEQ ID NO: 59455 - RNA, 22 nt, Homo sapiens
cugagauacacuaauagucucu

SEQ ID NO: 59456 - RNA, 22 nt, Homo sapiens
cugagcaucauggcagaaucuu

SEQ ID NO: 59457 - RNA, 22 nt, Homo sapiens
cugagcaauauagugagaucuu

SEQ ID NO: 59458 - RNA, 22 nt, Homo sapiens
cugagcaaagaagugauaauga

SEQ ID NO: 59459 - RNA, 22 nt, Homo sapiens
cugcauuggguuaugcauuuuu

SEQ ID NO: 59460 - RNA, 22 nt, Homo sapiens
cuggcucugggcuaaagaaaua

SEQ ID NO: 59461 - RNA, 22 nt, Homo sapiens
cuggcucugagguguuuagggc

SEQ ID NO: 59462 - RNA, 22 nt, Homo sapiens
cuggcagucugccucuucacug

SEQ ID NO: 59463 - RNA, 22 nt, Homo sapiens
cuguaacagaauaaauuuguuu

SEQ ID NO: 59464 - RNA, 22 nt, Homo sapiens
cugcuguuguuaacuuuuggag

SEQ ID NO: 59465 - RNA, 22 nt, Homo sapiens
cuggaaagaaucaggcuaaacu

SEQ ID NO: 59466 - RNA, 22 nt, Homo sapiens
cuggaauauuagcuggucuuaa

SEQ ID NO: 59467 - RNA, 22 nt, Homo sapiens
cuggacguugaggcugcaguga

SEQ ID NO: 59468 - RNA, 22 nt, Homo sapiens
cuggcaaauguuuucuguaaag

SEQ ID NO: 59469 - RNA, 22 nt, Homo sapiens
cuggcaagaggauaaaguccua

SEQ ID NO: 59470 - RNA, 22 nt, Homo sapiens
cuggagcaaaggugacucuugu

SEQ ID NO: 59471 - RNA, 22 nt, Homo sapiens
cuggagucugacugacacaagg

SEQ ID NO: 59472 - RNA, 22 nt, Homo sapiens
cuggagauuaaccaauugccau

SEQ ID NO: 59473 - RNA, 22 nt, Homo sapiens
uuccaauguuccguguugcagu

SEQ ID NO: 59474 - RNA, 22 nt, Homo sapiens
uucauuggauguuacacugugu

SEQ ID NO: 59475 - RNA, 22 nt, Homo sapiens
uuccaguggaguaaauggacaa

SEQ ID NO: 59476 - RNA, 22 nt, Homo sapiens
uuccaguauuugggcaagcgca

SEQ ID NO: 59477 - RNA, 22 nt, Homo sapiens
uuccaguaauagcacagcauug

SEQ ID NO: 59478 - RNA, 19 nt, Homo sapiens
uucacguaggagaaagaag

SEQ ID NO: 59479 - RNA, 22 nt, Homo sapiens
uucacuggagcccaggaguugg

SEQ ID NO: 59480 - RNA, 23 nt, Homo sapiens
uucaccugguuauuaauagccuc

SEQ ID NO: 59481 - RNA, 22 nt, Homo sapiens
uucacaugacagggugaagcau

SEQ ID NO: 59482 - RNA, 22 nt, Homo sapiens
uucagaguggacagaaauuaag

SEQ ID NO: 59483 - RNA, 22 nt, Homo sapiens
uucagagcauugguuuuuugaa

SEQ ID NO: 59484 - RNA, 22 nt, Homo sapiens
uucacugugaacucauauucag

SEQ ID NO: 59485 - RNA, 22 nt, Homo sapiens
uucacugggugugguggcucac

SEQ ID NO: 59486 - RNA, 22 nt, Homo sapiens
uucacuguaaaaugaagagggu

SEQ ID NO: 59487 - RNA, 22 nt, Homo sapiens
uucacuguagcuuggauguuua

SEQ ID NO: 59488 - RNA, 22 nt, Homo sapiens
uucacugugcuuaaauucugcu

SEQ ID NO: 59489 - RNA, 22 nt, Homo sapiens
uugaagacuaaguuaucaggau

SEQ ID NO: 59490 - RNA, 22 nt, Homo sapiens
uugaacugguaguuggaaaucu

SEQ ID NO: 59491 - RNA, 22 nt, Homo sapiens
uugaacuagaaccugcaaauuu

SEQ ID NO: 59492 - RNA, 22 nt, Homo sapiens
uugacaaggagugggguugaga

SEQ ID NO: 59493 - RNA, 22 nt, Homo sapiens
uugaagacuaccuaccauacuu

SEQ ID NO: 59494 - RNA, 22 nt, Homo sapiens
uugaagacuaauuuagauaaug

SEQ ID NO: 59495 - RNA, 22 nt, Homo sapiens
uugaaauguguaagcuccgaaa

SEQ ID NO: 59496 - RNA, 22 nt, Homo sapiens
uucuaguacucccuggagcugg

SEQ ID NO: 59497 - RNA, 22 nt, Homo sapiens
uugaaaguaaacaucacaaaga

SEQ ID NO: 59498 - RNA, 22 nt, Homo sapiens
uucgucaugagacagaugcuga

SEQ ID NO: 59499 - RNA, 22 nt, Homo sapiens
uuccuugugacuaguagugacc

SEQ ID NO: 59500 - RNA, 21 nt, Homo sapiens
uucuacuccggcguuguuuuu

SEQ ID NO: 59501 - RNA, 20 nt, Homo sapiens
uucuaguacuucuguuucca

SEQ ID NO: 59502 - RNA, 22 nt, Homo sapiens
uuccuuguuuauuuacaggagg

SEQ ID NO: 59503 - RNA, 22 nt, Homo sapiens
uuccuugagagcuugauaucac

SEQ ID NO: 59504 - RNA, 22 nt, Homo sapiens
uuccuuguagcaaaugcgauga

SEQ ID NO: 59505 - RNA, 22 nt, Homo sapiens
uugagaucaugcuacugcacuc

SEQ ID NO: 59506 - RNA, 22 nt, Homo sapiens
uugagaugauggauaugcuaau

SEQ ID NO: 59507 - RNA, 22 nt, Homo sapiens
uugagauggagucuugcucucu

SEQ ID NO: 59508 - RNA, 22 nt, Homo sapiens
uugagauggagucucguucugu

SEQ ID NO: 59509 - RNA, 22 nt, Homo sapiens
uugagauggagucucgcucugu

SEQ ID NO: 59510 - RNA, 22 nt, Homo sapiens
uugagauggagucucacugugu

SEQ ID NO: 59511 - RNA, 22 nt, Homo sapiens
uugagauggagucucgcacugu

SEQ ID NO: 59512 - RNA, 22 nt, Homo sapiens
uugacauguaaguacucuauag

SEQ ID NO: 59513 - RNA, 22 nt, Homo sapiens
uugacugugguaauggaagcug

SEQ ID NO: 59514 - RNA, 22 nt, Homo sapiens
uugacuuagacauucaguugga

SEQ ID NO: 59515 - RNA, 22 nt, Homo sapiens
uugacuuuuauucacucugcua

SEQ ID NO: 59516 - RNA, 22 nt, Homo sapiens
uugagaagugucuguucauguc

SEQ ID NO: 59517 - RNA, 22 nt, Homo sapiens
uugagacugaacauuuguguac

SEQ ID NO: 59518 - RNA, 22 nt, Homo sapiens
uugacagaccuuggucauaucc

SEQ ID NO: 59519 - RNA, 22 nt, Homo sapiens
uugacaaugcacugugcuaagu

SEQ ID NO: 59520 - RNA, 22 nt, Homo sapiens
uugacagagaaaagugugacuu

SEQ ID NO: 59521 - RNA, 20 nt, Homo sapiens
uugacaguggguuguuaaag

SEQ ID NO: 59522 - RNA, 22 nt, Homo sapiens
uugacauauguguguccacaua

SEQ ID NO: 59523 - RNA, 22 nt, Homo sapiens
uugagauguaagauguuaauau

SEQ ID NO: 59524 - RNA, 19 nt, Homo sapiens
uugagaugugaacucacac

SEQ ID NO: 59525 - RNA, 22 nt, Homo sapiens
uugagcucuuccagccuggagc

SEQ ID NO: 59526 - RNA, 22 nt, Homo sapiens
uugagauggaguuucaauauug

SEQ ID NO: 59527 - RNA, 22 nt, Homo sapiens
uugagauggaguucauuuuugu

SEQ ID NO: 59528 - RNA, 22 nt, Homo sapiens
uugagauggaguguugcucugu

SEQ ID NO: 59529 - RNA, 22 nt, Homo sapiens
uugagauggagucuugcucugu

SEQ ID NO: 59530 - RNA, 22 nt, Homo sapiens
uugagauggugccacuguacuc

SEQ ID NO: 59531 - RNA, 22 nt, Homo sapiens
uugagauggaguuuugcucuug

SEQ ID NO: 59532 - RNA, 22 nt, Homo sapiens
uugaggaaugucauuuguguuu

SEQ ID NO: 59533 - RNA, 22 nt, Homo sapiens
uugaguagaaguaugucaguau

SEQ ID NO: 59534 - RNA, 22 nt, Homo sapiens
uuaguaguaguuugcauuuacc

SEQ ID NO: 59535 - RNA, 22 nt, Homo sapiens
uuaguaguugugauagguaccu

SEQ ID NO: 59536 - RNA, 22 nt, Homo sapiens
uuauaaacaugaagauuugggg

SEQ ID NO: 59537 - RNA, 19 nt, Homo sapiens
uuauacuguauuguuuagg

SEQ ID NO: 59538 - RNA, 22 nt, Homo sapiens
uuauagacacguuguaacaaac

SEQ ID NO: 59539 - RNA, 22 nt, Homo sapiens
uuaugucuuuuguguucagcua

SEQ ID NO: 59540 - RNA, 22 nt, Homo sapiens
uuauugaguaaaaagaaugguu

SEQ ID NO: 59541 - RNA, 22 nt, Homo sapiens
uuauuagagauauuugguuagg

SEQ ID NO: 59542 - RNA, 22 nt, Homo sapiens
uuauuagcacccuaccaugugg

SEQ ID NO: 59543 - RNA, 22 nt, Homo sapiens
uuaggcaggauaguuacauauu

SEQ ID NO: 59544 - RNA, 21 nt, Homo sapiens
uuagccuguaagcacuuugca

SEQ ID NO: 59545 - RNA, 22 nt, Homo sapiens
uuagcccaucuugaggaaagua

SEQ ID NO: 59546 - RNA, 22 nt, Homo sapiens
uuagcauccauaggagauuggu

SEQ ID NO: 59547 - RNA, 21 nt, Homo sapiens
uuagcauccauguucaucaac

SEQ ID NO: 59548 - RNA, 22 nt, Homo sapiens
uuagcacauuuccagcacaugg

SEQ ID NO: 59549 - RNA, 22 nt, Homo sapiens
uuagcacugagaauggcuugcu

SEQ ID NO: 59550 - RNA, 22 nt, Homo sapiens
uuagcacuugggaguauuuauu

SEQ ID NO: 59551 - RNA, 20 nt, Homo sapiens
uuagcagcaugauuuauaau

SEQ ID NO: 59552 - RNA, 22 nt, Homo sapiens
uuagaauggaaaugcgagguua

SEQ ID NO: 59553 - RNA, 22 nt, Homo sapiens
uuagaacuagaggaguuugagu

SEQ ID NO: 59554 - RNA, 22 nt, Homo sapiens
uuagacacacauacauuuaucu

SEQ ID NO: 59555 - RNA, 22 nt, Homo sapiens
uuagaacagugcucaccacaaa

SEQ ID NO: 59556 - RNA, 22 nt, Homo sapiens
uuacuguauagaaucaucuuga

SEQ ID NO: 59557 - RNA, 22 nt, Homo sapiens
uuagauaguacugaaugguucu

SEQ ID NO: 59558 - RNA, 19 nt, Homo sapiens
uuagagaucaucugcuuca

SEQ ID NO: 59559 - RNA, 22 nt, Homo sapiens
uuagaugaagucacagaaccca

SEQ ID NO: 59560 - RNA, 18 nt, Homo sapiens
uuagaugguuuuaaaacu

SEQ ID NO: 59561 - RNA, 21 nt, Homo sapiens
ugugacuguugcauuugucgu

SEQ ID NO: 59562 - RNA, 22 nt, Homo sapiens
ugugagaucucagaauugaacu

SEQ ID NO: 59563 - RNA, 22 nt, Homo sapiens
ugugacugguugucccgcuuuc

SEQ ID NO: 59564 - RNA, 19 nt, Homo sapiens
ugugauaguugaaccugcc

SEQ ID NO: 59565 - RNA, 22 nt, Homo sapiens
uguucuugaguugggaguacaa

SEQ ID NO: 59566 - RNA, 22 nt, Homo sapiens
ugugaugaaggcauagggaugu

SEQ ID NO: 59567 - RNA, 22 nt, Homo sapiens
ugugaugauuugauaaacguau

SEQ ID NO: 59568 - RNA, 18 nt, Homo sapiens
ugugauggauauguuaau

SEQ ID NO: 59569 - RNA, 18 nt, Homo sapiens
ugugacauugagcauguc

SEQ ID NO: 59570 - RNA, 22 nt, Homo sapiens
ugugacaguguuacauuucaug

SEQ ID NO: 59571 - RNA, 22 nt, Homo sapiens
ugugacaaauuuaguggacugu

SEQ ID NO: 59572 - RNA, 22 nt, Homo sapiens
ugugacacugaauggcagaacu

SEQ ID NO: 59573 - RNA, 19 nt, Homo sapiens
ugugaagaaaugcugcaag

SEQ ID NO: 59574 - RNA, 22 nt, Homo sapiens
ugugaaugaagaaugcuaaccu

SEQ ID NO: 59575 - RNA, 22 nt, Homo sapiens
ugugaagaaagucauugguagc

SEQ ID NO: 59576 - RNA, 19 nt, Homo sapiens
ugugaacaucacagagugu

SEQ ID NO: 59577 - RNA, 22 nt, Homo sapiens
ugugaacauuuuguauauauua

SEQ ID NO: 59578 - RNA, 22 nt, Homo sapiens
uguugcauuugucaaggucaag

SEQ ID NO: 59579 - RNA, 22 nt, Homo sapiens
uguuuaguuaagacauagaauu

SEQ ID NO: 59580 - RNA, 22 nt, Homo sapiens
uuaaguguaaguggugugggac

SEQ ID NO: 59581 - RNA, 22 nt, Homo sapiens
uguuugcuguguggaguagcag

SEQ ID NO: 59582 - RNA, 22 nt, Homo sapiens
uguuugcuuaacguggagccag

SEQ ID NO: 59583 - RNA, 22 nt, Homo sapiens
uuaccagucugauaaacagaaa

SEQ ID NO: 59584 - RNA, 21 nt, Homo sapiens
uuacaauggcuccuugaaggu

SEQ ID NO: 59585 - RNA, 22 nt, Homo sapiens
uuaauacugcuuaacuuuagga

SEQ ID NO: 59586 - RNA, 22 nt, Homo sapiens
uuaaucaggccguuuccuaaga

SEQ ID NO: 59587 - RNA, 22 nt, Homo sapiens
uuaaucuguucucuguauucua

SEQ ID NO: 59588 - RNA, 22 nt, Homo sapiens
uugauauauugcaugggcuacu

SEQ ID NO: 59589 - RNA, 22 nt, Homo sapiens
uugauaauguuaacuuugguca

SEQ ID NO: 59590 - RNA, 22 nt, Homo sapiens
uugaguuuaucuaaagaccugg

SEQ ID NO: 59591 - RNA, 22 nt, Homo sapiens
uugauauguguauagcaugugg

SEQ ID NO: 59592 - RNA, 22 nt, Homo sapiens
uugaucaauagaauacaacaga

SEQ ID NO: 59593 - RNA, 22 nt, Homo sapiens
uugaucaucagcuuugucaucu

SEQ ID NO: 59594 - RNA, 22 nt, Homo sapiens
uugauauucuuucuggauccca

SEQ ID NO: 59595 - RNA, 22 nt, Homo sapiens
uuggaauguacucuagccuaug

SEQ ID NO: 59596 - RNA, 22 nt, Homo sapiens
uuggaauuaagagauauuuucu

SEQ ID NO: 59597 - RNA, 22 nt, Homo sapiens
uuggaauuuuacuucuguaaga

SEQ ID NO: 59598 - RNA, 22 nt, Homo sapiens
uuggacuggaacuauaccauug

SEQ ID NO: 59599 - RNA, 22 nt, Homo sapiens
uuggacugugagguuucguggg

SEQ ID NO: 59600 - RNA, 22 nt, Homo sapiens
uuggacuucuaacugacaugga

SEQ ID NO: 59601 - RNA, 22 nt, Homo sapiens
uuggauuuugguggcaacucau

SEQ ID NO: 59602 - RNA, 22 nt, Homo sapiens
uuggccuuuucaaugccucuuu

SEQ ID NO: 59603 - RNA, 22 nt, Homo sapiens
uuggcucuggcugggcuccagc

SEQ ID NO: 59604 - RNA, 22 nt, Homo sapiens
uuggcuguguuuauaugcugga

SEQ ID NO: 59605 - RNA, 22 nt, Homo sapiens
uuggcuguguuucccuacaaau

SEQ ID NO: 59606 - RNA, 22 nt, Homo sapiens
uugggguaggaauauggaauga

SEQ ID NO: 59607 - RNA, 22 nt, Homo sapiens
uuguaccacagggcaugaagug

SEQ ID NO: 59608 - RNA, 22 nt, Homo sapiens
uuguaagaaucuagcucuuuau

SEQ ID NO: 59609 - RNA, 22 nt, Homo sapiens
uuguacuagaaaauuauucuuu

SEQ ID NO: 59610 - RNA, 22 nt, Homo sapiens
uuguacuagucauauuuugaaa

SEQ ID NO: 59611 - RNA, 22 nt, Homo sapiens
uuguaacaguucugcgagcagc

SEQ ID NO: 59612 - RNA, 22 nt, Homo sapiens
uuguaaagaucauaugcuguuc

SEQ ID NO: 59613 - RNA, 22 nt, Homo sapiens
uuguaaacaucuguacauugcu

SEQ ID NO: 59614 - RNA, 22 nt, Homo sapiens
uugguaaaaugaccacagacau

SEQ ID NO: 59615 - RNA, 22 nt, Homo sapiens
uugggauaaucacaaaguaaaa

SEQ ID NO: 59616 - RNA, 22 nt, Homo sapiens
uugugcauguauauuaguucac

SEQ ID NO: 59617 - RNA, 22 nt, Homo sapiens
uugugauggugcauacugagcu

SEQ ID NO: 59618 - RNA, 22 nt, Homo sapiens
uugugacacagcugggccuaua

SEQ ID NO: 59619 - RNA, 22 nt, Homo sapiens
uugugcuuguaacuacauucag

SEQ ID NO: 59620 - RNA, 22 nt, Homo sapiens
uugugcuugcuguguucuaugc

SEQ ID NO: 59621 - RNA, 20 nt, Homo sapiens
uugugcauugggccauuggg

SEQ ID NO: 59622 - RNA, 22 nt, Homo sapiens
uugugccauucuucugccucag

SEQ ID NO: 59623 - RNA, 22 nt, Homo sapiens
uugucauuuucagaguguuacg

SEQ ID NO: 59624 - RNA, 22 nt, Homo sapiens
uuguccucuccaaaucucaugu

SEQ ID NO: 59625 - RNA, 22 nt, Homo sapiens
uugucuccuagacgaccaggcg

SEQ ID NO: 59626 - RNA, 22 nt, Homo sapiens
uugucuugcagcuuaggcauca

SEQ ID NO: 59627 - RNA, 22 nt, Homo sapiens
uugugaaugaugccgcaauaaa

SEQ ID NO: 59628 - RNA, 22 nt, Homo sapiens
uugugaauggugccgcaauaaa

SEQ ID NO: 59629 - RNA, 22 nt, Homo sapiens
uugugaaugaugucgcaauaaa

SEQ ID NO: 59630 - RNA, 22 nt, Homo sapiens
uuguuauguuggucaguaaugu

SEQ ID NO: 59631 - RNA, 22 nt, Homo sapiens
uuguguuuuuaguagggaaggg

SEQ ID NO: 59632 - RNA, 22 nt, Homo sapiens
uugugcuuaauaaaaaguggua

SEQ ID NO: 59633 - RNA, 22 nt, Homo sapiens
uuuaaagcacggaguuuguggc

SEQ ID NO: 59634 - RNA, 22 nt, Homo sapiens
uuguuguggauuaaauuugcau

SEQ ID NO: 59635 - RNA, 23 nt, Homo sapiens
uuguucccuuccacucagucucc

SEQ ID NO: 59636 - RNA, 22 nt, Homo sapiens
uuuaagccaggugcaguggcuc

SEQ ID NO: 59637 - RNA, 22 nt, Homo sapiens
uuuaaagcuccaagcaugucug

SEQ ID NO: 59638 - RNA, 22 nt, Homo sapiens
uuuaaaguuagaaggaaagggc

SEQ ID NO: 59639 - RNA, 22 nt, Homo sapiens
uuuagcagcaaagagcuguguu

SEQ ID NO: 59640 - RNA, 22 nt, Homo sapiens
uuuagcagcaaagagccaugcu

SEQ ID NO: 59641 - RNA, 22 nt, Homo sapiens
uuuacugugggguuucuuagag

SEQ ID NO: 59642 - RNA, 17 nt, Homo sapiens
uuuaaugcuaggacucu

SEQ ID NO: 59643 - RNA, 22 nt, Homo sapiens
uuuacccugaggaaucuauuuu

SEQ ID NO: 59644 - RNA, 19 nt, Homo sapiens
uuuagaucuuuuaugcagc

SEQ ID NO: 59645 - RNA, 22 nt, Homo sapiens
uuuaauguuacaguauugguau

SEQ ID NO: 59646 - RNA, 22 nt, Homo sapiens
uuuuugugguauauugcaacaa

SEQ ID NO: 59647 - RNA, 22 nt, Homo sapiens
uuuuugguugguaggcuauuaa

SEQ ID NO: 59648 - RNA, 21 nt, Homo sapiens
uuuuugguggucauggauaga

SEQ ID NO: 59649 - RNA, 23 nt, Homo sapiens
uuuuuguguuucauggaaauagg

SEQ ID NO: 59650 - RNA, 22 nt, Homo sapiens
uuuugugacuauuguaaauggg

SEQ ID NO: 59651 - RNA, 19 nt, Homo sapiens
uuuuguacucugugacuug

SEQ ID NO: 59652 - RNA, 22 nt, Homo sapiens
aagaccuaugcaggaagaaaug

SEQ ID NO: 59653 - RNA, 20 nt, Homo sapiens
aagacacuguccccacugga

SEQ ID NO: 59654 - RNA, 22 nt, Homo sapiens
aacuggcauagccagacuucuc

SEQ ID NO: 59655 - RNA, 22 nt, Homo sapiens
aagcaaacaucagcuugguuaa

SEQ ID NO: 59656 - RNA, 22 nt, Homo sapiens
aagaugcagaagcccagauguu

SEQ ID NO: 59657 - RNA, 22 nt, Homo sapiens
aagaugauguuguguuuucacu

SEQ ID NO: 59658 - RNA, 22 nt, Homo sapiens
aagauauguuaguuauaaacuc

SEQ ID NO: 59659 - RNA, 22 nt, Homo sapiens
uuuuuugguaauugaacaauga

SEQ ID NO: 59660 - RNA, 22 nt, Homo sapiens
aagcaguguggacuaaugggaa

SEQ ID NO: 59661 - RNA, 22 nt, Homo sapiens
aagcagauguguugaaaguacu

SEQ ID NO: 59662 - RNA, 22 nt, Homo sapiens
aagcugcauuuucuagaugcuu

SEQ ID NO: 59663 - RNA, 22 nt, Homo sapiens
aagcucuuguugaaucuuguca

SEQ ID NO: 59664 - RNA, 20 nt, Homo sapiens
aagcugaguguuuuuuuaau

SEQ ID NO: 59665 - RNA, 22 nt, Homo sapiens
aagcuacuuuggugguuccuua

SEQ ID NO: 59666 - RNA, 22 nt, Homo sapiens
uuuguaagaugcauagauugca

SEQ ID NO: 59667 - RNA, 23 nt, Homo sapiens
uuuggcauuccagaaauuuucau

SEQ ID NO: 59668 - RNA, 22 nt, Homo sapiens
uuuggcauuugaguuuguagga

SEQ ID NO: 59669 - RNA, 22 nt, Homo sapiens
uuuggcauuagauaauugugua

SEQ ID NO: 59670 - RNA, 22 nt, Homo sapiens
uuuggcaugggcuauuugcuuu

SEQ ID NO: 59671 - RNA, 22 nt, Homo sapiens
uuuggaagaugccacuguauca

SEQ ID NO: 59672 - RNA, 22 nt, Homo sapiens
uuuggaaugaaacagcagagcc

SEQ ID NO: 59673 - RNA, 22 nt, Homo sapiens
uuuggcacuguaaauuucucuu

SEQ ID NO: 59674 - RNA, 20 nt, Homo sapiens
uuuggcacugagugguauaa

SEQ ID NO: 59675 - RNA, 22 nt, Homo sapiens
uuugcuucacuguuuggcaaaa

SEQ ID NO: 59676 - RNA, 22 nt, Homo sapiens
uuugcuuaguaaauguagaaaa

SEQ ID NO: 59677 - RNA, 22 nt, Homo sapiens
uuugcuuaaaucuuaaucagau

SEQ ID NO: 59678 - RNA, 22 nt, Homo sapiens
uuuccaagaugcuuacuuucuc

SEQ ID NO: 59679 - RNA, 22 nt, Homo sapiens
uuuccauguuggugaaaugagg

SEQ ID NO: 59680 - RNA, 22 nt, Homo sapiens
uuucccugaaggcucugaaguc

SEQ ID NO: 59681 - RNA, 22 nt, Homo sapiens
uuugcuauagugaauagugcug

SEQ ID NO: 59682 - RNA, 22 nt, Homo sapiens
uuucccuuuagcuuagugauuu

SEQ ID NO: 59683 - RNA, 22 nt, Homo sapiens
uuucauggagaaucuucuuacu

SEQ ID NO: 59684 - RNA, 22 nt, Homo sapiens
uuucauagaucaugcuuuugga

SEQ ID NO: 59685 - RNA, 22 nt, Homo sapiens
uuucauagccuucuaaugaguu

SEQ ID NO: 59686 - RNA, 19 nt, Homo sapiens
uuucauguuuuuggugaga

SEQ ID NO: 59687 - RNA, 22 nt, Homo sapiens
uuucauggcgaggcuucauggg

SEQ ID NO: 59688 - RNA, 22 nt, Homo sapiens
uuuugguucaauuaauuugcua

SEQ ID NO: 59689 - RNA, 22 nt, Homo sapiens
uuuugguguacaauucuaugga

SEQ ID NO: 59690 - RNA, 22 nt, Homo sapiens
uuuuggcucugucuguaucuuu

SEQ ID NO: 59691 - RNA, 22 nt, Homo sapiens
uuuuggcucuugguaggucaga

SEQ ID NO: 59692 - RNA, 22 nt, Homo sapiens
uuuuggcuuuuccucagcaagc

SEQ ID NO: 59693 - RNA, 22 nt, Homo sapiens
uuuugcuccuggcaaacucaua

SEQ ID NO: 59694 - RNA, 22 nt, Homo sapiens
uuuuggacuucaauuugacacu

SEQ ID NO: 59695 - RNA, 23 nt, Homo sapiens
uuuguaguagcaugauuuauaau

SEQ ID NO: 59696 - RNA, 18 nt, Homo sapiens
uuuguacuuuuucuaaug

SEQ ID NO: 59697 - RNA, 22 nt, Homo sapiens
uuuguacuugaagaaucuuuau

SEQ ID NO: 59698 - RNA, 22 nt, Homo sapiens
uuuguacuucauugguucuacu

SEQ ID NO: 59699 - RNA, 22 nt, Homo sapiens
uuuguacugagccaagauggua

SEQ ID NO: 59700 - RNA, 22 nt, Homo sapiens
uuuguacuucauacaauaacuc

SEQ ID NO: 59701 - RNA, 22 nt, Homo sapiens
uuuguacuccuuggccagcuuc

SEQ ID NO: 59702 - RNA, 22 nt, Homo sapiens
uuuguaauccuauuccaaagga

SEQ ID NO: 59703 - RNA, 22 nt, Homo sapiens
uuuguacacuguugguaggauu

SEQ ID NO: 59704 - RNA, 22 nt, Homo sapiens
uuuguacuaugguuuuucacua

SEQ ID NO: 59705 - RNA, 22 nt, Homo sapiens
uuuguacucccuuuagauaaaa

SEQ ID NO: 59706 - RNA, 22 nt, Homo sapiens
uuugucauagcagcaggaaugg

SEQ ID NO: 59707 - RNA, 21 nt, Homo sapiens
uuuguaguagcaugauuuaua

SEQ ID NO: 59708 - RNA, 21 nt, Homo sapiens
uuuugcacacuaugcagcuuu

SEQ ID NO: 59709 - RNA, 22 nt, Homo sapiens
uuuugcacauugauuugguauc

SEQ ID NO: 59710 - RNA, 22 nt, Homo sapiens
uuuugcaccauccuaauaguau

SEQ ID NO: 59711 - RNA, 22 nt, Homo sapiens
ugagugugacuuagcagaagga

SEQ ID NO: 59712 - RNA, 22 nt, Homo sapiens
ugagucaauucuaacaauggca

SEQ ID NO: 59713 - RNA, 22 nt, Homo sapiens
ugagguguuaacuuuacuuuua

SEQ ID NO: 59714 - RNA, 22 nt, Homo sapiens
ugaguucuuuuacauuuugaau

SEQ ID NO: 59715 - RNA, 22 nt, Homo sapiens
ugaguuguagcuauaguuucuu

SEQ ID NO: 59716 - RNA, 22 nt, Homo sapiens
ugauaagugaaagugcucuauc

SEQ ID NO: 59717 - RNA, 23 nt, Homo sapiens
ugauaacagcauaugaagauucu

SEQ ID NO: 59718 - RNA, 20 nt, Homo sapiens
ugaguuccuuguucagaagc

SEQ ID NO: 59719 - RNA, 22 nt, Homo sapiens
ugaguuauuaguagaggcuaug

SEQ ID NO: 59720 - RNA, 22 nt, Homo sapiens
ugcaaagucgaaacugcaguuu

SEQ ID NO: 59721 - RNA, 22 nt, Homo sapiens
ugcaaccauuguuaagugugca

SEQ ID NO: 59722 - RNA, 22 nt, Homo sapiens
ugcauggauguuugaacacacu

SEQ ID NO: 59723 - RNA, 22 nt, Homo sapiens
ugcauuguuccgaauguguccu

SEQ ID NO: 59724 - RNA, 21 nt, Homo sapiens
ugcauugucuugaguuuaaau

SEQ ID NO: 59725 - RNA, 22 nt, Homo sapiens
ugcauuaucagauguuugcuuu

SEQ ID NO: 59726 - RNA, 22 nt, Homo sapiens
ugcagugucaauaauaauuagu

SEQ ID NO: 59727 - RNA, 22 nt, Homo sapiens
ugcagguacuugacaacuuggg

SEQ ID NO: 59728 - RNA, 19 nt, Homo sapiens
ugcagcaauguaaaagaca

SEQ ID NO: 59729 - RNA, 20 nt, Homo sapiens
ugcagauucaaccaacugug

SEQ ID NO: 59730 - RNA, 20 nt, Homo sapiens
ugcagcacgggcccuuucca

SEQ ID NO: 59731 - RNA, 17 nt, Homo sapiens
ugcagcacacugauggg

SEQ ID NO: 59732 - RNA, 22 nt, Homo sapiens
ugcaagaugagauuuuggaugg

SEQ ID NO: 59733 - RNA, 20 nt, Homo sapiens
ugcaaguugccuuuggaggc

SEQ ID NO: 59734 - RNA, 22 nt, Homo sapiens
ugcugcuguuaucauuuuacca

SEQ ID NO: 59735 - RNA, 22 nt, Homo sapiens
ugcugguaguuuaugacuaauu

SEQ ID NO: 59736 - RNA, 22 nt, Homo sapiens
ugcugcauuggggauuaaguuu

SEQ ID NO: 59737 - RNA, 22 nt, Homo sapiens
ugcugcaaacaggcaucugugg

SEQ ID NO: 59738 - RNA, 22 nt, Homo sapiens
ugcugcaaucucggcacuuugg

SEQ ID NO: 59739 - RNA, 21 nt, Homo sapiens
ugcuccauuuucuagccugaa

SEQ ID NO: 59740 - RNA, 22 nt, Homo sapiens
ugcuauguuuucccuccuuauc

SEQ ID NO: 59741 - RNA, 22 nt, Homo sapiens
ugcauuguuuuugguucccagg

SEQ ID NO: 59742 - RNA, 22 nt, Homo sapiens
ugccaaaaugggcuuuauaccg

SEQ ID NO: 59743 - RNA, 22 nt, Homo sapiens
ugccagaugcuggugugagggg

SEQ ID NO: 59744 - RNA, 22 nt, Homo sapiens
ugccaguauuuuauugagcauu

SEQ ID NO: 59745 - RNA, 22 nt, Homo sapiens
ugcuauguaacacauuaccuuu

SEQ ID NO: 59746 - RNA, 22 nt, Homo sapiens
ugcuaucauugauuagugaugu

SEQ ID NO: 59747 - RNA, 20 nt, Homo sapiens
ugccagugugucaauuuaua

SEQ ID NO: 59748 - RNA, 22 nt, Homo sapiens
uggacaagauagguucuauauu

SEQ ID NO: 59749 - RNA, 21 nt, Homo sapiens
uggaauuaauggagagguguu

SEQ ID NO: 59750 - RNA, 22 nt, Homo sapiens
uggaauguuauggcuuuaaucu

SEQ ID NO: 59751 - RNA, 22 nt, Homo sapiens
uggaauguagcguugacacgag

SEQ ID NO: 59752 - RNA, 22 nt, Homo sapiens
uggaaugugaauaacuuccuuc

SEQ ID NO: 59753 - RNA, 22 nt, Homo sapiens
uggaaugguaucuuguuggggu

SEQ ID NO: 59754 - RNA, 21 nt, Homo sapiens
uggaaucuauagaggcaguag

SEQ ID NO: 59755 - RNA, 22 nt, Homo sapiens
uggaaucuagagaaaugcaaac

SEQ ID NO: 59756 - RNA, 22 nt, Homo sapiens
uggaagucaugcugcaagaaca

SEQ ID NO: 59757 - RNA, 22 nt, Homo sapiens
uggaaguuaaauuaguugauga

SEQ ID NO: 59758 - RNA, 22 nt, Homo sapiens
uggaagucuucauuauguauag

SEQ ID NO: 59759 - RNA, 22 nt, Homo sapiens
ugcuuuguugaaaaucauuugg

SEQ ID NO: 59760 - RNA, 19 nt, Homo sapiens
ugucaucaucuuuucuugc

SEQ ID NO: 59761 - RNA, 22 nt, Homo sapiens
ugucaucuagguuuuaagccuu

SEQ ID NO: 59762 - RNA, 21 nt, Homo sapiens
ugucaguuuccagaguucaac

SEQ ID NO: 59763 - RNA, 22 nt, Homo sapiens
ugucagaaucugagacgacaac

SEQ ID NO: 59764 - RNA, 22 nt, Homo sapiens
ugucacagagauuuugguaugu

SEQ ID NO: 59765 - RNA, 18 nt, Homo sapiens
ugucacuggauaaugguc

SEQ ID NO: 59766 - RNA, 22 nt, Homo sapiens
uguauguugggucaaaguacau

SEQ ID NO: 59767 - RNA, 22 nt, Homo sapiens
uguauguuguaagacuuagacc

SEQ ID NO: 59768 - RNA, 22 nt, Homo sapiens
ugucaauauguaauaacugaau

SEQ ID NO: 59769 - RNA, 22 nt, Homo sapiens
ugucaaugggaauuuguuuuag

SEQ ID NO: 59770 - RNA, 22 nt, Homo sapiens
ugucaagaugguuugauguugu

SEQ ID NO: 59771 - RNA, 22 nt, Homo sapiens
ugucaaauucuggguuaaaaca

SEQ ID NO: 59772 - RNA, 22 nt, Homo sapiens
ugucaaaugcagugauauuuga

SEQ ID NO: 59773 - RNA, 22 nt, Homo sapiens
uguccuguaggaggcagaacaa

SEQ ID NO: 59774 - RNA, 22 nt, Homo sapiens
ugucuggaguccauagaagugu

SEQ ID NO: 59775 - RNA, 22 nt, Homo sapiens
ugucuguuugcgaaauugcuuc

SEQ ID NO: 59776 - RNA, 22 nt, Homo sapiens
ugucugagacuguuuuacuuuc

SEQ ID NO: 59777 - RNA, 22 nt, Homo sapiens
ugucucaguuacggcaauucca

SEQ ID NO: 59778 - RNA, 22 nt, Homo sapiens
ugugaaaucagauagccuuuuu

SEQ ID NO: 59779 - RNA, 22 nt, Homo sapiens
ugugaacaaaauuuguugcaua

SEQ ID NO: 59780 - RNA, 22 nt, Homo sapiens
ugucuuguagacugaaggcuuc

SEQ ID NO: 59781 - RNA, 22 nt, Homo sapiens
ugucuuguagacaauguauagu

SEQ ID NO: 59782 - RNA, 22 nt, Homo sapiens
ugucuuggagaauccuggguuu

SEQ ID NO: 59783 - RNA, 22 nt, Homo sapiens
ugucaugucuuuguguaucaau

SEQ ID NO: 59784 - RNA, 22 nt, Homo sapiens
ugucauguaaagaguaaauggu

SEQ ID NO: 59785 - RNA, 22 nt, Homo sapiens
ugucaugaacucacauucuggg

SEQ ID NO: 59786 - RNA, 20 nt, Homo sapiens
ugucccaaccccauggguuc

SEQ ID NO: 59787 - RNA, 22 nt, Homo sapiens
uggcauuuuguuuuagaauuag

SEQ ID NO: 59788 - RNA, 22 nt, Homo sapiens
uggcauuuugugugaauuagaa

SEQ ID NO: 59789 - RNA, 23 nt, Homo sapiens
uggccagaaacuucuuuucaucc

SEQ ID NO: 59790 - RNA, 22 nt, Homo sapiens
uggccagagggcaauuagcugu

SEQ ID NO: 59791 - RNA, 22 nt, Homo sapiens
uggccuguaacgcugucucagc

SEQ ID NO: 59792 - RNA, 22 nt, Homo sapiens
ugggaucauuaugcauagugua

SEQ ID NO: 59793 - RNA, 22 nt, Homo sapiens
uggaguguguugcagaugaagg

SEQ ID NO: 59794 - RNA, 20 nt, Homo sapiens
uggaguuugaguucuuggag

SEQ ID NO: 59795 - RNA, 22 nt, Homo sapiens
uggauagaacuaagugcuuaga

SEQ ID NO: 59796 - RNA, 22 nt, Homo sapiens
uggauauguucuuuguguaagg

SEQ ID NO: 59797 - RNA, 22 nt, Homo sapiens
uggaugaagagaugguaguugc

SEQ ID NO: 59798 - RNA, 22 nt, Homo sapiens
uggcauguuggguguugacucc

SEQ ID NO: 59799 - RNA, 22 nt, Homo sapiens
uggcauuguccaauaaaauuuu

SEQ ID NO: 59800 - RNA, 22 nt, Homo sapiens
uguauaguugagucaaguuuca

SEQ ID NO: 59801 - RNA, 22 nt, Homo sapiens
uguauacugucuaauauguugu

SEQ ID NO: 59802 - RNA, 23 nt, Homo sapiens
uguaaaagcauuugucagccugg

SEQ ID NO: 59803 - RNA, 22 nt, Homo sapiens
uguaaacauguauguguuuaug

SEQ ID NO: 59804 - RNA, 22 nt, Homo sapiens
uguaaaccauauauguauguag

SEQ ID NO: 59805 - RNA, 23 nt, Homo sapiens
uguaaagcuaugaauuauucuuu

SEQ ID NO: 59806 - RNA, 22 nt, Homo sapiens
ucagaguaguuccuggcagaaa

SEQ ID NO: 59807 - RNA, 22 nt, Homo sapiens
ucagagcaaagacacuuuauca

SEQ ID NO: 59808 - RNA, 22 nt, Homo sapiens
ucacuuggugaacacauuaugu

SEQ ID NO: 59809 - RNA, 22 nt, Homo sapiens
ucacugugagaguuuauccugu

SEQ ID NO: 59810 - RNA, 22 nt, Homo sapiens
ucacuaaagaaaauggcaugga

SEQ ID NO: 59811 - RNA, 22 nt, Homo sapiens
ucacugaaaccgccuccaccuc

SEQ ID NO: 59812 - RNA, 22 nt, Homo sapiens
ucacucggugaugauucuuaaa

SEQ ID NO: 59813 - RNA, 22 nt, Homo sapiens
ucacucagaccuggugauaugc

SEQ ID NO: 59814 - RNA, 22 nt, Homo sapiens
ucagagugcagggaguagcagc

SEQ ID NO: 59815 - RNA, 22 nt, Homo sapiens
ucagaguggagucugcagccuu

SEQ ID NO: 59816 - RNA, 22 nt, Homo sapiens
ucagaguguuuuccaacuuggu

SEQ ID NO: 59817 - RNA, 22 nt, Homo sapiens
ucagaugaugucccuguucuaa

SEQ ID NO: 59818 - RNA, 22 nt, Homo sapiens
ucccuagacuccugccuuucag

SEQ ID NO: 59819 - RNA, 22 nt, Homo sapiens
ucccuguuaggcacagauuuau

SEQ ID NO: 59820 - RNA, 17 nt, Homo sapiens
ucuaauaauaugcauuu

SEQ ID NO: 59821 - RNA, 22 nt, Homo sapiens
ucuaaagcauccagauugcuuc

SEQ ID NO: 59822 - RNA, 22 nt, Homo sapiens
ucgguauuuuagaauugagacu

SEQ ID NO: 59823 - RNA, 22 nt, Homo sapiens
ucgugcaaacguaauugugguu

SEQ ID NO: 59824 - RNA, 22 nt, Homo sapiens
ucccuugguaauucuguuccuu

SEQ ID NO: 59825 - RNA, 22 nt, Homo sapiens
uccuacaugcaguacauucaaa

SEQ ID NO: 59826 - RNA, 22 nt, Homo sapiens
ucugaaucguucccaugcagga

SEQ ID NO: 59827 - RNA, 22 nt, Homo sapiens
ucucuguuuauuuuugguguau

SEQ ID NO: 59828 - RNA, 22 nt, Homo sapiens
ucuaaugcucugagaacagugc

SEQ ID NO: 59829 - RNA, 22 nt, Homo sapiens
ucuauggaguuugaaugagaaa

SEQ ID NO: 59830 - RNA, 22 nt, Homo sapiens
ucuagaugaaguauaaaguagu

SEQ ID NO: 59831 - RNA, 22 nt, Homo sapiens
ucugugguucaaaccagcaacu

SEQ ID NO: 59832 - RNA, 22 nt, Homo sapiens
ucuguggucagcauccgccacu

SEQ ID NO: 59833 - RNA, 22 nt, Homo sapiens
ucugugcuugucauaugcuuug

SEQ ID NO: 59834 - RNA, 22 nt, Homo sapiens
aacauguuuagcagauaccugu

SEQ ID NO: 59835 - RNA, 22 nt, Homo sapiens
ucugugcggucuguguuaugaa

SEQ ID NO: 59836 - RNA, 22 nt, Homo sapiens
ucuggcaagagccgagggcagu

SEQ ID NO: 59837 - RNA, 23 nt, Homo sapiens
ucuggcuuugggaugcucaaggg

SEQ ID NO: 59838 - RNA, 22 nt, Homo sapiens
ucugcaagucuaaacuagccau

SEQ ID NO: 59839 - RNA, 22 nt, Homo sapiens
ucugccaaccacaaaauuuauu

SEQ ID NO: 59840 - RNA, 22 nt, Homo sapiens
ucugccacugucauugugugau

SEQ ID NO: 59841 - RNA, 22 nt, Homo sapiens
ucuggccuccuaugagaaucga

SEQ ID NO: 59842 - RNA, 22 nt, Homo sapiens
ucuggccuagaacaauuaauua

SEQ ID NO: 59843 - RNA, 22 nt, Homo sapiens
ucugagucaucacaaaugaugc

SEQ ID NO: 59844 - RNA, 22 nt, Homo sapiens
ucugagguuaaauuuuauaguu

SEQ ID NO: 59845 - RNA, 22 nt, Homo sapiens
ucuguguuuagacccaggguag

SEQ ID NO: 59846 - RNA, 22 nt, Homo sapiens
ucuuagguaagaaauuuuaaca

SEQ ID NO: 59847 - RNA, 19 nt, Homo sapiens
ucuugcacaugugaacuca

SEQ ID NO: 59848 - RNA, 22 nt, Homo sapiens
ucuugcaccuacaugcuuuguc

SEQ ID NO: 59849 - RNA, 22 nt, Homo sapiens
ucuucguuuaaagcaguggaag

SEQ ID NO: 59850 - RNA, 22 nt, Homo sapiens
ucuugcacaaauuauuuuaacu

SEQ ID NO: 59851 - RNA, 22 nt, Homo sapiens
ucuugcuuuugcagagcuucuc

SEQ ID NO: 59852 - RNA, 22 nt, Homo sapiens
ucuugcuuguuguucccuucau

SEQ ID NO: 59853 - RNA, 22 nt, Homo sapiens
ucuuggguuguuggcuucuccu

SEQ ID NO: 59854 - RNA, 22 nt, Homo sapiens
ucuuuaguaauuucuguaaggc

SEQ ID NO: 59855 - RNA, 22 nt, Homo sapiens
ucuugguuaggggaaauaggca

SEQ ID NO: 59856 - RNA, 23 nt, Homo sapiens
ucuugguuauagaaaaauaguug

SEQ ID NO: 59857 - RNA, 23 nt, Homo sapiens
ucuuguacuuugagugagcaugg

SEQ ID NO: 59858 - RNA, 22 nt, Homo sapiens
ucuugguuuauugugguaugaa

SEQ ID NO: 59859 - RNA, 22 nt, Homo sapiens
ucuuuguguaggucaaucuggc

SEQ ID NO: 59860 - RNA, 22 nt, Homo sapiens
ugacuuaugcaacucugaugug

SEQ ID NO: 59861 - RNA, 22 nt, Homo sapiens
ugacuucagacugaaaugauuc

SEQ ID NO: 59862 - RNA, 22 nt, Homo sapiens
ugacuugagcuggagccugccu

SEQ ID NO: 59863 - RNA, 22 nt, Homo sapiens
ugacuggaaacaguguuauuug

SEQ ID NO: 59864 - RNA, 22 nt, Homo sapiens
ugagaacaugugauauuuggug

SEQ ID NO: 59865 - RNA, 22 nt, Homo sapiens
ugacuuuagaauuuuauccaga

SEQ ID NO: 59866 - RNA, 19 nt, Homo sapiens
ugagaacaugugguauuug

SEQ ID NO: 59867 - RNA, 18 nt, Homo sapiens
ugagaacauguguacaca

SEQ ID NO: 59868 - RNA, 22 nt, Homo sapiens
ugacuauaguuuucuugacaca

SEQ ID NO: 59869 - RNA, 22 nt, Homo sapiens
ugacuauugauuuagacgugcu

SEQ ID NO: 59870 - RNA, 22 nt, Homo sapiens
ugacuaaaacugaguuucauua

SEQ ID NO: 59871 - RNA, 22 nt, Homo sapiens
ugacuaaggaaggauuaugugc

SEQ ID NO: 59872 - RNA, 20 nt, Homo sapiens
ugacaucagcaauguaauaa

SEQ ID NO: 59873 - RNA, 22 nt, Homo sapiens
ugaaagacacagaaguugccca

SEQ ID NO: 59874 - RNA, 20 nt, Homo sapiens
ugaaaucuucacuaagucuc

SEQ ID NO: 59875 - RNA, 22 nt, Homo sapiens
ugaaauaguuaaguugccuagu

SEQ ID NO: 59876 - RNA, 22 nt, Homo sapiens
ucuuuguugcauaggcuuguuc

SEQ ID NO: 59877 - RNA, 22 nt, Homo sapiens
ugaaacauacacucugaugggg

SEQ ID NO: 59878 - RNA, 22 nt, Homo sapiens
ugaaaaguuguugaaggcuuca

SEQ ID NO: 59879 - RNA, 22 nt, Homo sapiens
ugaaacacacagagaagggaga

SEQ ID NO: 59880 - RNA, 17 nt, Homo sapiens
ugacagaaacuuguugu

SEQ ID NO: 59881 - RNA, 21 nt, Homo sapiens
ugacagaaaauugaguuugcu

SEQ ID NO: 59882 - RNA, 22 nt, Homo sapiens
ugacacagugggggauccuuuu

SEQ ID NO: 59883 - RNA, 22 nt, Homo sapiens
ugaaagguauagguucuggagg

SEQ ID NO: 59884 - RNA, 22 nt, Homo sapiens
ugacagguugauaggugcagca

SEQ ID NO: 59885 - RNA, 23 nt, Homo sapiens
ugacagaccuucuggaagaaguc

SEQ ID NO: 59886 - RNA, 22 nt, Homo sapiens
ugaaaugcugucuaggggaaau

SEQ ID NO: 59887 - RNA, 22 nt, Homo sapiens
ugaaaugauuauaugguguuug

SEQ ID NO: 59888 - RNA, 21 nt, Homo sapiens
ugaaaugcaugugcacauuaa

SEQ ID NO: 59889 - RNA, 22 nt, Homo sapiens
ugaaauggaagaagucccuuuu

SEQ ID NO: 59890 - RNA, 22 nt, Homo sapiens
ugaaauggugcggucugcagca

SEQ ID NO: 59891 - RNA, 22 nt, Homo sapiens
ugaaauggaaagaguguagacu

SEQ ID NO: 59892 - RNA, 22 nt, Homo sapiens
ugagagaugaacucugauaugu

SEQ ID NO: 59893 - RNA, 22 nt, Homo sapiens
ugagauaaucaugugauuucau

SEQ ID NO: 59894 - RNA, 22 nt, Homo sapiens
ugagacugagucuugcucuauu

SEQ ID NO: 59895 - RNA, 22 nt, Homo sapiens
ugagaauauuugaagauguuag

SEQ ID NO: 59896 - RNA, 19 nt, Homo sapiens
ugagaauguuaccaggucc

SEQ ID NO: 59897 - RNA, 22 nt, Homo sapiens
ugagacaucugagauuuuaagc

SEQ ID NO: 59898 - RNA, 22 nt, Homo sapiens
ugagacauauuauacugcuuuu

SEQ ID NO: 59899 - RNA, 22 nt, Homo sapiens
ugagauaguacuuuuuuaaagg

SEQ ID NO: 59900 - RNA, 22 nt, Homo sapiens
ugagaucaguuguuauaauucu

SEQ ID NO: 59901 - RNA, 22 nt, Homo sapiens
ugagaucaagguuaauauaauc

SEQ ID NO: 59902 - RNA, 18 nt, Homo sapiens
ugagauacuagaauaggu

SEQ ID NO: 59903 - RNA, 22 nt, Homo sapiens
ugagaucuuaucagaaauggug

SEQ ID NO: 59904 - RNA, 22 nt, Homo sapiens
ugagguaagauguucauuuuuc

SEQ ID NO: 59905 - RNA, 22 nt, Homo sapiens
ugagaugcaaaaugagaauugu

SEQ ID NO: 59906 - RNA, 22 nt, Homo sapiens
ugagaugauagauauguuaauu

SEQ ID NO: 59907 - RNA, 22 nt, Homo sapiens
ugagauggaguuucacuuuugu

SEQ ID NO: 59908 - RNA, 21 nt, Human herpesvirus 7
aaaaagauugugagcaauuua

SEQ ID NO: 59909 - RNA, 22 nt, Human herpesvirus 7
uuauagacguggaauuucuugg

SEQ ID NO: 59910 - RNA, 22 nt, Human herpesvirus 7
gauauuuuggguaauaugucuu

SEQ ID NO: 59911 - RNA, 22 nt, Human herpesvirus 7
ugauauuuuuaacacaauggca

SEQ ID NO: 59912 - RNA, 22 nt, Human herpesvirus 7
ugccauugaaugcguuggaaau

SEQ ID NO: 59913 - RNA, 22 nt, Human herpesvirus 7
aucuucuagaguuauugccgug

SEQ ID NO: 59914 - RNA, 22 nt, Human herpesvirus 7
aggauguagauucgacauucuc

SEQ ID NO: 59915 - RNA, 22 nt, Human herpesvirus 7
cguagagagcauuagcauuaaa

SEQ ID NO: 59916 - RNA, 21 nt, Human herpesvirus 7
aaaaagauugugagcaauuua

SEQ ID NO: 59917 - RNA, 22 nt, Human herpesvirus 7
uuggagucguucuauguaugaa

SEQ ID NO: 59918 - RNA, 22 nt, Human herpesvirus 7
uuauagacguggaauuucuugg

SEQ ID NO: 59919 - RNA, 22 nt, Human herpesvirus 7
uuccuauguguguaugaugaua

SEQ ID NO: 59920 - RNA, 22 nt, Human herpesvirus 7
uucaugcucaucgucuccaagc

SEQ ID NO: 59921 - RNA, 22 nt, Human herpesvirus 7
ugugauuauugcauuugcuuca

SEQ ID NO: 59922 - RNA, 22 nt, Human herpesvirus 7
ugucaucguaauaauggaaacu

SEQ ID NO: 59923 - RNA, 22 nt, Human herpesvirus 7
gauauuuuggguaauaugucuu

SEQ ID NO: 59924 - RNA, 22 nt, Human herpesvirus 7
gcaauugacacauuuuacggug

SEQ ID NO: 59925 - RNA, 22 nt, Human herpesvirus 7
uauugguacauaucuuuaugag

SEQ ID NO: 59926 - RNA, 22 nt, Human herpesvirus 7
uaauuucugguauggaauuggc

SEQ ID NO: 59927 - RNA, 22 nt, Human herpesvirus 7
uagaucgcuuuaaaaucuuauu

SEQ ID NO: 59928 - RNA, 22 nt, Human herpesvirus 7
cacuggagaaugucgaggucuu

SEQ ID NO: 59929 - RNA, 22 nt, Human herpesvirus 7
acauuuguggccaggcaauuga

SEQ ID NO: 59930 - RNA, 22 nt, Human herpesvirus 7
acacugaaacauaguacaaggg

SEQ ID NO: 59931 - RNA, 22 nt, Human herpesvirus 7
aaucaaguauuucagucuguag

SEQ ID NO: 59932 - RNA, 22 nt, Human herpesvirus 7
aagacguauuggucaauauaau

SEQ ID NO: 59933 - RNA, 22 nt, Human herpesvirus 7
aagaggaauagcacgucgcgga

SEQ ID NO: 59934 - RNA, 22 nt, Homo sapiens
ggcaaugucagcuaaugaugga

SEQ ID NO: 59935 - RNA, 22 nt, Homo sapiens
uaucagcagagucauacuucaa

SEQ ID NO: 59936 - RNA, 22 nt, Homo sapiens
agcuggcuguagcugcaagucu

SEQ ID NO: 59937 - RNA, 22 nt, Homo sapiens
uguauguuguaagacuuagacc

SEQ ID NO: 59938 - RNA, 22 nt, Homo sapiens
ugagaucagaaggauuucucug

SEQ ID NO: 59939 - RNA, 22 nt, Homo sapiens
ugagcuguuugaagaagcauuu

SEQ ID NO: 59940 - RNA, 21 nt, Homo sapiens
auuccacuuuuccuucaggga

SEQ ID NO: 59941 - RNA, 22 nt, Homo sapiens
auggcaguguaugauuauauua

SEQ ID NO: 59942 - RNA, 22 nt, Homo sapiens
uauuguccacuuugcacugugu

SEQ ID NO: 59943 - RNA, 22 nt, Homo sapiens
auggcucuuauuauuugaggua

SEQ ID NO: 59944 - RNA, 22 nt, Homo sapiens
uaagacugccccagacagcaag

SEQ ID NO: 59945 - RNA, 22 nt, Homo sapiens
uucucuggucagaggggagguu

SEQ ID NO: 59946 - RNA, 22 nt, Homo sapiens
cugggaugugacuguugccccc

SEQ ID NO: 59947 - RNA, 22 nt, Homo sapiens
gucagugucuuugcagcucaga

SEQ ID NO: 59948 - RNA, 22 nt, Homo sapiens
uugagauggagucuugcucuug

SEQ ID NO: 59949 - RNA, 22 nt, Homo sapiens
uggcagaugcucuuggugccca

SEQ ID NO: 59950 - RNA, 22 nt, Homo sapiens
gaaagauuuccugagcuagaaa

SEQ ID NO: 59951 - RNA, 22 nt, Homo sapiens
auugcacuccagccugggcuag

SEQ ID NO: 59952 - RNA, 22 nt, Homo sapiens
ugagguagaggugaacuugacc

SEQ ID NO: 59953 - RNA, 22 nt, Homo sapiens
uuaauagugacucauuuuccac

SEQ ID NO: 59954 - RNA, 22 nt, Homo sapiens
uguuacagugacuaauguuuua

SEQ ID NO: 59955 - RNA, 22 nt, Homo sapiens
uugagauggagucucgcucugu

SEQ ID NO: 59956 - RNA, 22 nt, Homo sapiens
ucugucuugugguuugagugcc

SEQ ID NO: 59957 - RNA, 22 nt, Homo sapiens
uugagaugaagucuugcucucu

SEQ ID NO: 59958 - RNA, 22 nt, Homo sapiens
uugagaugaaguuuugcucuuu

SEQ ID NO: 59959 - RNA, 22 nt, Homo sapiens
uuggaaaccucugcagguguuu

SEQ ID NO: 59960 - RNA, 22 nt, Homo sapiens
ugugccuaguaauguguccaga

SEQ ID NO: 59961 - RNA, 22 nt, Homo sapiens
ugagcugagauuaagcugcugc

SEQ ID NO: 59962 - RNA, 22 nt, Homo sapiens
gucagugucuuaacagagauua

SEQ ID NO: 59963 - RNA, 17 nt, Homo sapiens
acagugucuaugaaaug

SEQ ID NO: 59964 - RNA, 22 nt, Homo sapiens
auacaucugccauguuggugug

SEQ ID NO: 59965 - RNA, 22 nt, Homo sapiens
ugacaagauauggucuuaucaa

SEQ ID NO: 59966 - RNA, 22 nt, Homo sapiens
aagugguuuuuacaaagacaga

SEQ ID NO: 59967 - RNA, 22 nt, Homo sapiens
gaugauguugaauguucucacc

SEQ ID NO: 59968 - RNA, 22 nt, Homo sapiens
cucaguguuaaggccaccucug

SEQ ID NO: 59969 - RNA, 22 nt, Homo sapiens
ugagaucugauaggccuggguu

SEQ ID NO: 59970 - RNA, 22 nt, Homo sapiens
auguaacugggacacaagccuc

SEQ ID NO: 59971 - RNA, 22 nt, Homo sapiens
cuauaacagugugguuuggaga

SEQ ID NO: 59972 - RNA, 22 nt, Homo sapiens
augaacagagccuugagaaccu

SEQ ID NO: 59973 - RNA, 22 nt, Homo sapiens
cauugcaugccagccugggcaa

SEQ ID NO: 59974 - RNA, 22 nt, Homo sapiens
auacaagugccauguuggugug

SEQ ID NO: 59975 - RNA, 22 nt, Homo sapiens
acauucagcuguuguuucaaug

SEQ ID NO: 59976 - RNA, 22 nt, Homo sapiens
cuucaucugguuugugaacuuu

SEQ ID NO: 59977 - RNA, 22 nt, Homo sapiens
ugcaaauguuaggugucauuau

SEQ ID NO: 59978 - RNA, 22 nt, Homo sapiens
agcaagaugaaguugagcuagg

SEQ ID NO: 59979 - RNA, 22 nt, Homo sapiens
uauggcuuuguuaacauuuucu

SEQ ID NO: 59980 - RNA, 22 nt, Homo sapiens
gaauaaacuagagaggacugag

SEQ ID NO: 59981 - RNA, 22 nt, Homo sapiens
uugaagacuauaugauucuuca

SEQ ID NO: 59982 - RNA, 22 nt, Homo sapiens
auugcacaccagucugggcaaa

SEQ ID NO: 59983 - RNA, 22 nt, Homo sapiens
ugucagaaucuagaggcugcua

SEQ ID NO: 59984 - RNA, 22 nt, Homo sapiens
cugagcuagaccacuuggcucc

SEQ ID NO: 59985 - RNA, 22 nt, Homo sapiens
aaacugcuuuccaugguggcug

SEQ ID NO: 59986 - RNA, 22 nt, Homo sapiens
augacugucagggcagucauug

SEQ ID NO: 59987 - RNA, 22 nt, Homo sapiens
cugaggcacggcgaccuuaagu

SEQ ID NO: 59988 - RNA, 22 nt, Homo sapiens
caucacuuuuccuuuuacagau

SEQ ID NO: 59989 - RNA, 22 nt, Homo sapiens
uaaguauagguaacagaagcaa

SEQ ID NO: 59990 - RNA, 22 nt, Homo sapiens
ggcacgguggcucacgccugua

SEQ ID NO: 59991 - RNA, 22 nt, Homo sapiens
caugcacugaguccaccucugg

SEQ ID NO: 59992 - RNA, 22 nt, Homo sapiens
uguaacaggaggaaaaugugaa

SEQ ID NO: 59993 - RNA, 22 nt, Homo sapiens
ggaucacuugagaccaggaguu

SEQ ID NO: 59994 - RNA, 22 nt, Homo sapiens
aggcaugaaauacaugcauuga

SEQ ID NO: 59995 - RNA, 22 nt, Homo sapiens
uuugcuuguguaaaaaucugga

SEQ ID NO: 59996 - RNA, 20 nt, Homo sapiens
cauugcccuccagccugggc

SEQ ID NO: 59997 - RNA, 22 nt, Homo sapiens
ucuaaaacuagauugugaugau

SEQ ID NO: 59998 - RNA, 22 nt, Homo sapiens
guggcaguuuuaaauaugaaaa

SEQ ID NO: 59999 - RNA, 22 nt, Homo sapiens
uguagcuuuugagauuuauauu

SEQ ID NO: 60000 - RNA, 22 nt, Homo sapiens
aauaucacaggguguacacuca

SEQ ID NO: 60001 - RNA, 22 nt, Homo sapiens
aagagaugaagguccugacugu

SEQ ID NO: 60002 - RNA, 22 nt, Homo sapiens
augacaagaguguucagggaga

SEQ ID NO: 60003 - RNA, 22 nt, Homo sapiens
aucccaguucagccucugacac

SEQ ID NO: 60004 - RNA, 21 nt, Homo sapiens
guggaaauggaauuuacuaau

SEQ ID NO: 60005 - RNA, 22 nt, Homo sapiens
uauuugguuggugcaaaaguaa

SEQ ID NO: 60006 - RNA, 18 nt, Homo sapiens
uugcacuccugccugggu

SEQ ID NO: 60007 - RNA, 22 nt, Homo sapiens
agaagaacauagggugacugaa

SEQ ID NO: 60008 - RNA, 19 nt, Homo sapiens
auugcacuccaaccugggu

SEQ ID NO: 60009 - RNA, 22 nt, Homo sapiens
uagacaacugaaacacugugca

SEQ ID NO: 60010 - RNA, 22 nt, Homo sapiens
uugagauguaguuucacuccug

SEQ ID NO: 60011 - RNA, 19 nt, Homo sapiens
uaucacuucccuggaaaca

SEQ ID NO: 60012 - RNA, 22 nt, Homo sapiens
aucccuagaaaaaucagcacau

SEQ ID NO: 60013 - RNA, 22 nt, Homo sapiens
ucacuagaucaagggagagaaa

SEQ ID NO: 60014 - RNA, 22 nt, Homo sapiens
auggaaacauaagaguauagau

SEQ ID NO: 60015 - RNA, 22 nt, Homo sapiens
cuacagcagcccaguccccgaa

SEQ ID NO: 60016 - RNA, 22 nt, Homo sapiens
gcuuuguuaaaacacagccaca

SEQ ID NO: 60017 - RNA, 22 nt, Homo sapiens
ugagaugagagaaugcuugccu

SEQ ID NO: 60018 - RNA, 22 nt, Homo sapiens
ggaauggaacaaagucuugaaa

SEQ ID NO: 60019 - RNA, 22 nt, Homo sapiens
uuggaacacauguuuuucuacc

SEQ ID NO: 60020 - RNA, 22 nt, Homo sapiens
aaguauguaucaagucauacuu

SEQ ID NO: 60021 - RNA, 22 nt, Homo sapiens
cacuagagaauagguaguucug

SEQ ID NO: 60022 - RNA, 22 nt, Homo sapiens
uugcacauguugaaccagcaaa

SEQ ID NO: 60023 - RNA, 22 nt, Homo sapiens
aucuuuggucaucacagcuaga

SEQ ID NO: 60024 - RNA, 22 nt, Homo sapiens
gggaauguagcaaaucugcaau

SEQ ID NO: 60025 - RNA, 22 nt, Homo sapiens
cacuguggauggaacuauguga

SEQ ID NO: 60026 - RNA, 22 nt, Homo sapiens
agagaccuguaaaguucaggca

SEQ ID NO: 60027 - RNA, 22 nt, Homo sapiens
cuagaguacuuaccacagcaug

SEQ ID NO: 60028 - RNA, 22 nt, Homo sapiens
cuucuguuaguucugauaacuu

SEQ ID NO: 60029 - RNA, 22 nt, Homo sapiens
ugugucuccugaaaauucacau

SEQ ID NO: 60030 - RNA, 22 nt, Homo sapiens
ucacaauucucaauuugugaaa

SEQ ID NO: 60031 - RNA, 22 nt, Homo sapiens
uuauggccauucuuguaggagu

SEQ ID NO: 60032 - RNA, 22 nt, Homo sapiens
uuaagggaggagcuucaagaug

SEQ ID NO: 60033 - RNA, 20 nt, Homo sapiens
ugagaacauguggcauuugg

SEQ ID NO: 60034 - RNA, 19 nt, Homo sapiens
ugagaugaagacagggguu

SEQ ID NO: 60035 - RNA, 22 nt, Homo sapiens
ucaaauguuuguuuaaggcuua

SEQ ID NO: 60036 - RNA, 22 nt, Homo sapiens
ugagaugauagauauguuaauu

SEQ ID NO: 60037 - RNA, 22 nt, Homo sapiens
uaccacugccgagaaaacagau

SEQ ID NO: 60038 - RNA, 20 nt, Homo sapiens
cauugcacuccagccugcug

SEQ ID NO: 60039 - RNA, 22 nt, Homo sapiens
gaaacugcauuucuaacaagcu

SEQ ID NO: 60040 - RNA, 22 nt, Homo sapiens
cuggcucugggcuaaagaaaua

SEQ ID NO: 60041 - RNA, 22 nt, Homo sapiens
ggaaugugugucaugcuuuugc

SEQ ID NO: 60042 - RNA, 22 nt, Homo sapiens
gugaggcacugcugcuuuccag

SEQ ID NO: 60043 - RNA, 20 nt, Homo sapiens
aaacucugucuucuuuauca

SEQ ID NO: 60044 - RNA, 22 nt, Homo sapiens
aucccugugauccaaucacuuc

SEQ ID NO: 60045 - RNA, 22 nt, Homo sapiens
uaaucucagcuacucaggaggc

SEQ ID NO: 60046 - RNA, 21 nt, Homo sapiens
uggagugaagaguuuauugac

SEQ ID NO: 60047 - RNA, 22 nt, Homo sapiens
ugagaccugaucuugguacugc

SEQ ID NO: 60048 - RNA, 22 nt, Homo sapiens
cuggcaguguuucuugugggcu

SEQ ID NO: 60049 - RNA, 22 nt, Homo sapiens
auaugcaaauccauagagacag

SEQ ID NO: 60050 - RNA, 22 nt, Homo sapiens
aauggcuuuuaauauccauaau

SEQ ID NO: 60051 - RNA, 22 nt, Homo sapiens
augagcugauuuccuuaccaua

SEQ ID NO: 60052 - RNA, 22 nt, Homo sapiens
uggaagauggaguuuuaucauu

SEQ ID NO: 60053 - RNA, 22 nt, Homo sapiens
uugagauggaguuucgcucuuu

SEQ ID NO: 60054 - RNA, 22 nt, Homo sapiens
uugagauggagucucgcucuuu

SEQ ID NO: 60055 - RNA, 22 nt, Homo sapiens
auggcaguuucagcuauaguuu

SEQ ID NO: 60056 - RNA, 22 nt, Homo sapiens
ucuauguuuuugcuaguagugu

SEQ ID NO: 60057 - RNA, 23 nt, Homo sapiens
ggaaugaaaccugguuaugauau

SEQ ID NO: 60058 - RNA, 22 nt, Homo sapiens
cguugcacuccagccugggcaa

SEQ ID NO: 60059 - RNA, 22 nt, Homo sapiens
aucccuguaguaauauucuagc

SEQ ID NO: 60060 - RNA, 22 nt, Homo sapiens
uuuccaagaugcuuacuuucuc

SEQ ID NO: 60061 - RNA, 22 nt, Homo sapiens
gagcucauuguugcuaaagaga

SEQ ID NO: 60062 - RNA, 22 nt, Homo sapiens
uagcaggaaaggggucagaucu

SEQ ID NO: 60063 - RNA, 22 nt, Homo sapiens
ugagaucuuggaggcuuuguga

SEQ ID NO: 60064 - RNA, 22 nt, Homo sapiens
uuauacuacuauaaagagguag

SEQ ID NO: 60065 - RNA, 22 nt, Homo sapiens
augugcaaagcacuguucagca

SEQ ID NO: 60066 - RNA, 22 nt, Homo sapiens
guucaagugauucuacugccuc

SEQ ID NO: 60067 - RNA, 22 nt, Homo sapiens
acaaagugccuccuuuuagagu

SEQ ID NO: 60068 - RNA, 22 nt, Homo sapiens
ccuuggcacuuugccacagugc

SEQ ID NO: 60069 - RNA, 22 nt, Homo sapiens
uucuacaugggucgucggugag

SEQ ID NO: 60070 - RNA, 22 nt, Homo sapiens
augcaacuugaaauuuuccgga

SEQ ID NO: 60071 - RNA, 22 nt, Homo sapiens
uucuuugguacaagggccgacc

SEQ ID NO: 60072 - RNA, 22 nt, Homo sapiens
ugacaagaacuuuccauaguaa

SEQ ID NO: 60073 - RNA, 22 nt, Homo sapiens
uauggcuuuucacuuaaguccu

SEQ ID NO: 60074 - RNA, 22 nt, Homo sapiens
cauggcuuucacaguaaagccu

SEQ ID NO: 60075 - RNA, 22 nt, Homo sapiens
uuaacacugccauugauacugu

SEQ ID NO: 60076 - RNA, 22 nt, Homo sapiens
auaugcuuauuagcaagaaaua

SEQ ID NO: 60077 - RNA, 22 nt, Homo sapiens
uagaccaauuggcauauaguaa

SEQ ID NO: 60078 - RNA, 22 nt, Homo sapiens
ugagaccuuucauuucucagug

SEQ ID NO: 60079 - RNA, 22 nt, Homo sapiens
auuggcuuuugaaagucugcga

SEQ ID NO: 60080 - RNA, 22 nt, Homo sapiens
cuuccaaguggggcacgugcca

SEQ ID NO: 60081 - RNA, 22 nt, Homo sapiens
aggugguuuuaggcagagacau

SEQ ID NO: 60082 - RNA, 23 nt, Homo sapiens
aaagacuagucaggugcaguggu

SEQ ID NO: 60083 - RNA, 22 nt, Homo sapiens
acaguaugcuuuaaacuuuguu

SEQ ID NO: 60084 - RNA, 22 nt, Homo sapiens
uggcucauuucuaaacccagcu

SEQ ID NO: 60085 - RNA, 22 nt, Homo sapiens
ugagccaaugauuugaauagag

SEQ ID NO: 60086 - RNA, 22 nt, Homo sapiens
ggcaacauggugaaacucuguc

SEQ ID NO: 60087 - RNA, 22 nt, Homo sapiens
cuguucaggaggcauuuggugg

SEQ ID NO: 60088 - RNA, 22 nt, Homo sapiens
acucagagauuagcacauguuu

SEQ ID NO: 60089 - RNA, 22 nt, Homo sapiens
uugcuuagucaugaaucacuga

SEQ ID NO: 60090 - RNA, 22 nt, Homo sapiens
uuuugcaaauuccaguggccau

SEQ ID NO: 60091 - RNA, 22 nt, Homo sapiens
uucauaguguuuccuuccagug

SEQ ID NO: 60092 - RNA, 22 nt, Homo sapiens
uuauugcacuccagccugggua

SEQ ID NO: 60093 - RNA, 22 nt, Homo sapiens
auugcacugcagccugggcaac

SEQ ID NO: 60094 - RNA, 22 nt, Homo sapiens
ugagaugaagcuagaagaaugg

SEQ ID NO: 60095 - RNA, 22 nt, Homo sapiens
auggcucuuauuauuuugaggu

SEQ ID NO: 60096 - RNA, 22 nt, Homo sapiens
cucuuugaguuccuccuggugu

SEQ ID NO: 60097 - RNA, 22 nt, Homo sapiens
uucccagugccaggcacuggga

SEQ ID NO: 60098 - RNA, 22 nt, Homo sapiens
uggucaguugaguccuugccaa

SEQ ID NO: 60099 - RNA, 22 nt, Homo sapiens
auuccacuuagugacucauuug

SEQ ID NO: 60100 - RNA, 22 nt, Homo sapiens
auggcuuugggcugcucugccc

SEQ ID NO: 60101 - RNA, 22 nt, Homo sapiens
uggaagaugggaccucaguuuu

SEQ ID NO: 60102 - RNA, 22 nt, Homo sapiens
ucuugguugaaaauucauaaua

SEQ ID NO: 60103 - RNA, 22 nt, Homo sapiens
auacaagcaguccaacuccaua

SEQ ID NO: 60104 - RNA, 22 nt, Homo sapiens
uucaguagucuccauagaaccg

SEQ ID NO: 60105 - RNA, 22 nt, Homo sapiens
uucuuagucauguaauagucca

SEQ ID NO: 60106 - RNA, 22 nt, Homo sapiens
cuuugguuuacuuggugcuagu

SEQ ID NO: 60107 - RNA, 22 nt, Homo sapiens
auggcucuguuccaugugucuu

SEQ ID NO: 60108 - RNA, 22 nt, Homo sapiens
uuugccaaucagaggcaucuug

SEQ ID NO: 60109 - RNA, 22 nt, Homo sapiens
uuaaguaaucagagaagagaac

SEQ ID NO: 60110 - RNA, 22 nt, Homo sapiens
ugagaugaagucuugcucuguu

SEQ ID NO: 60111 - RNA, 23 nt, Homo sapiens
caugaacuaguuugcagccauga

SEQ ID NO: 60112 - RNA, 22 nt, Homo sapiens
ugagaugauaucuuauuguaau

SEQ ID NO: 60113 - RNA, 22 nt, Homo sapiens
uauggcuucuuauucuuucccg

SEQ ID NO: 60114 - RNA, 22 nt, Homo sapiens
cauuaguugaagugcagggaga

SEQ ID NO: 60115 - RNA, 22 nt, Homo sapiens
uuggaaacgucaccuuuuccuu

SEQ ID NO: 60116 - RNA, 22 nt, Homo sapiens
acuguauagauggaguugauuu

SEQ ID NO: 60117 - RNA, 21 nt, Homo sapiens
auugcacuccagccugggcga

SEQ ID NO: 60118 - RNA, 22 nt, Homo sapiens
uggccuguaacgcugucucagc

SEQ ID NO: 60119 - RNA, 22 nt, Homo sapiens
auugcacuccagccugggcagc

SEQ ID NO: 60120 - RNA, 22 nt, Homo sapiens
uuggaagacaaugcugauucuc

SEQ ID NO: 60121 - RNA, 22 nt, Homo sapiens
gacacagugaagucucuacuug

SEQ ID NO: 60122 - RNA, 22 nt, Homo sapiens
caugccacuguggacaaagaca

SEQ ID NO: 60123 - RNA, 22 nt, Homo sapiens
caggaaugugaggguucccugc

SEQ ID NO: 60124 - RNA, 22 nt, Homo sapiens
agugcacuccagccugggcaac

SEQ ID NO: 60125 - RNA, 22 nt, Homo sapiens
uuggucaucucccuccuuuuag

SEQ ID NO: 60126 - RNA, 22 nt, Homo sapiens
augacauugaugcucuggcugg

SEQ ID NO: 60127 - RNA, 22 nt, Homo sapiens
cuacucugugguguauuugcau

SEQ ID NO: 60128 - RNA, 22 nt, Homo sapiens
cucauggagaacaucugcuagg

SEQ ID NO: 60129 - RNA, 20 nt, Homo sapiens
uaagccacacagucuaaggu

SEQ ID NO: 60130 - RNA, 22 nt, Homo sapiens
uguuucuacugucucuguagua

SEQ ID NO: 60131 - RNA, 22 nt, Homo sapiens
uuaccugagaaggugacauuug

SEQ ID NO: 60132 - RNA, 22 nt, Homo sapiens
auugcacuccagccuggccaac

SEQ ID NO: 60133 - RNA, 22 nt, Homo sapiens
gaugagaugagcauuugaauug

SEQ ID NO: 60134 - RNA, 22 nt, Homo sapiens
uaucaguauggauucauggauu

SEQ ID NO: 60135 - RNA, 22 nt, Homo sapiens
auugcacuccagccuggggaac

SEQ ID NO: 60136 - RNA, 22 nt, Homo sapiens
cuggaaacaucuuaggaaugca

SEQ ID NO: 60137 - RNA, 22 nt, Homo sapiens
gugagccaugauuuuaccacug

SEQ ID NO: 60138 - RNA, 22 nt, Homo sapiens
ccuucuuuuguaaggcugaaua

SEQ ID NO: 60139 - RNA, 22 nt, Homo sapiens
cugagacacucuuaucugcaua

SEQ ID NO: 60140 - RNA, 22 nt, Homo sapiens
uugcacucuccagccucggcaa

SEQ ID NO: 60141 - RNA, 22 nt, Homo sapiens
aucuuuggugaguucuuugguc

SEQ ID NO: 60142 - RNA, 22 nt, Homo sapiens
cuggaauauuagcuggucuuaa

SEQ ID NO: 60143 - RNA, 22 nt, Homo sapiens
uucuacaggcuguucaagaagc

SEQ ID NO: 60144 - RNA, 22 nt, Homo sapiens
auagcagaacagugucucacug

SEQ ID NO: 60145 - RNA, 22 nt, Homo sapiens
uuugaaaguaauuugguuggug

SEQ ID NO: 60146 - RNA, 18 nt, Homo sapiens
cuaagacacuuggcagag

SEQ ID NO: 60147 - RNA, 22 nt, Homo sapiens
ggagaugaaaugagcuacuuaa

SEQ ID NO: 60148 - RNA, 22 nt, Homo sapiens
uagcuguuggugggaagucaga

SEQ ID NO: 60149 - RNA, 22 nt, Homo sapiens
uuggaaaugguaaaggguuaau

SEQ ID NO: 60150 - RNA, 22 nt, Homo sapiens
agaauguuuuagaccaauacaa

SEQ ID NO: 60151 - RNA, 22 nt, Homo sapiens
aaagagaucuaugggcacuaug

SEQ ID NO: 60152 - RNA, 22 nt, Homo sapiens
cugagugcaagugauccuccca

SEQ ID NO: 60153 - RNA, 19 nt, Homo sapiens
uaugcaacuuauagugcug

SEQ ID NO: 60154 - RNA, 22 nt, Homo sapiens
uuuggucacugccgccgccagc

SEQ ID NO: 60155 - RNA, 23 nt, Homo sapiens
uguauacacccugugcaucuggg

SEQ ID NO: 60156 - RNA, 22 nt, Homo sapiens
gucuuggagacauugccauuga

SEQ ID NO: 60157 - RNA, 22 nt, Homo sapiens
uuucuacagugaacgauuucua

SEQ ID NO: 60158 - RNA, 22 nt, Homo sapiens
cucaguagaaaauacauggacu

SEQ ID NO: 60159 - RNA, 22 nt, Homo sapiens
uacagucauaaugccuagugac

SEQ ID NO: 60160 - RNA, 22 nt, Homo sapiens
aagucaaggagagaagcuucag

SEQ ID NO: 60161 - RNA, 22 nt, Homo sapiens
auagcauaucccacaugucaga

SEQ ID NO: 60162 - RNA, 22 nt, Homo sapiens
cuaauacaguuguccaagcugg

SEQ ID NO: 60163 - RNA, 22 nt, Homo sapiens
uauggaaaucuuaccuuauggu

SEQ ID NO: 60164 - RNA, 22 nt, Homo sapiens
auguccaugagcacauguauca

SEQ ID NO: 60165 - RNA, 22 nt, Homo sapiens
ucuacagccaguucaggaagaa

SEQ ID NO: 60166 - RNA, 22 nt, Homo sapiens
uagucacacacucaacuuuuca

SEQ ID NO: 60167 - RNA, 22 nt, Homo sapiens
auuacuuugcaccaaccuaaua

SEQ ID NO: 60168 - RNA, 21 nt, Homo sapiens
uggucaguuuucucacuagga

SEQ ID NO: 60169 - RNA, 22 nt, Homo sapiens
gucagugugauaucugcagggg

SEQ ID NO: 60170 - RNA, 22 nt, Homo sapiens
cucaguguuucagcugcucaga

SEQ ID NO: 60171 - RNA, 22 nt, Homo sapiens
augugacuuuuuccugugccuu

SEQ ID NO: 60172 - RNA, 22 nt, Homo sapiens
uuggcagugcccgaugcugggg

SEQ ID NO: 60173 - RNA, 22 nt, Homo sapiens
aaucacuuuggcaccaaccuaa

SEQ ID NO: 60174 - RNA, 19 nt, Homo sapiens
ucuuuagucacauuuuuau

SEQ ID NO: 60175 - RNA, 22 nt, Homo sapiens
aagugccauguggaugggcccu

SEQ ID NO: 60176 - RNA, 22 nt, Homo sapiens
auggcaguuuggucucugugcu

SEQ ID NO: 60177 - RNA, 22 nt, Homo sapiens
gucuuuaguugaaacauguggu

SEQ ID NO: 60178 - RNA, 22 nt, Homo sapiens
agaaugugaccuuauuuggaga

SEQ ID NO: 60179 - RNA, 22 nt, Homo sapiens
uaucacuuuuccagcccagcuu

SEQ ID NO: 60180 - RNA, 22 nt, Homo sapiens
uucuuuggaaacaguacuaauu

SEQ ID NO: 60181 - RNA, 22 nt, Homo sapiens
agaacuguccauucagcaugaa

SEQ ID NO: 60182 - RNA, 22 nt, Homo sapiens
uuggcagucugaggcacagacu

SEQ ID NO: 60183 - RNA, 19 nt, Homo sapiens
gugguauuaccuuuugauu

SEQ ID NO: 60184 - RNA, 22 nt, Homo sapiens
ugucagaaucugagacgacaac

SEQ ID NO: 60185 - RNA, 22 nt, Homo sapiens
ucaagugcauugauucaguauu

SEQ ID NO: 60186 - RNA, 22 nt, Homo sapiens
gagaucauguacuagaacaccu

SEQ ID NO: 60187 - RNA, 22 nt, Homo sapiens
aagugaguaauacgucaguugu

SEQ ID NO: 60188 - RNA, 22 nt, Homo sapiens
uauggcuuuuauuauguuguag

SEQ ID NO: 60189 - RNA, 22 nt, Homo sapiens
cauaaagauggaggaggccagg

SEQ ID NO: 60190 - RNA, 22 nt, Homo sapiens
ugcuuaguguugacccucugcc

SEQ ID NO: 60191 - RNA, 22 nt, Homo sapiens
agugaaaugucaccuuuuagga

SEQ ID NO: 60192 - RNA, 22 nt, Homo sapiens
aagacuguaauccaucuugagu

SEQ ID NO: 60193 - RNA, 22 nt, Homo sapiens
cuuuugugauucuucaguugcu

SEQ ID NO: 60194 - RNA, 22 nt, Homo sapiens
uugagauggagucuugcucugu

SEQ ID NO: 60195 - RNA, 22 nt, Homo sapiens
ugagaugagucucgcucuguca

SEQ ID NO: 60196 - RNA, 22 nt, Homo sapiens
uuucauggaggcauuuuagauu

SEQ ID NO: 60197 - RNA, 22 nt, Homo sapiens
auuccacuuccacuaguuucuc

SEQ ID NO: 60198 - RNA, 20 nt, Homo sapiens
ugagcucaugacauuuuucu

SEQ ID NO: 60199 - RNA, 23 nt, Homo sapiens
uugaggcauguaccaucaauauc

SEQ ID NO: 60200 - RNA, 22 nt, Homo sapiens
aggcaaugugagaguuuauuca

SEQ ID NO: 60201 - RNA, 22 nt, Homo sapiens
acacauuagcaagugcuguuau

SEQ ID NO: 60202 - RNA, 22 nt, Homo sapiens
auugcauaaacacauuucuuau

SEQ ID NO: 60203 - RNA, 22 nt, Homo sapiens
ugagccaugggguaaaugugau

SEQ ID NO: 60204 - RNA, 22 nt, Homo sapiens
gagcuguuuuucacuagaccaa

SEQ ID NO: 60205 - RNA, 21 nt, Homo sapiens
gugcaaacaucauagaaugua

SEQ ID NO: 60206 - RNA, 22 nt, Homo sapiens
aucuuuggauacuugauauagu

SEQ ID NO: 60207 - RNA, 22 nt, Homo sapiens
augaugcugagguuugggguau

SEQ ID NO: 60208 - RNA, 22 nt, Homo sapiens
cuuugguucuguuuauaugcug

SEQ ID NO: 60209 - RNA, 22 nt, Homo sapiens
uauggcuuucuacuugaguucu

SEQ ID NO: 60210 - RNA, 22 nt, Homo sapiens
uucagugucauuaacacaguag

SEQ ID NO: 60211 - RNA, 22 nt, Homo sapiens
ugagaugagggcugcacucaaa

SEQ ID NO: 60212 - RNA, 22 nt, Homo sapiens
auggcuguuccugggaguucua

SEQ ID NO: 60213 - RNA, 22 nt, Homo sapiens
uucuacuucauuaggaggauug

SEQ ID NO: 60214 - RNA, 22 nt, Homo sapiens
ugagaucuuuuguggcugagaa

SEQ ID NO: 60215 - RNA, 22 nt, Homo sapiens
ugagaugaucaaaguauaggcu

SEQ ID NO: 60216 - RNA, 22 nt, Homo sapiens
uuauggauuuauauucuguagu

SEQ ID NO: 60217 - RNA, 22 nt, Homo sapiens
ugugucacugcacuccagccug

SEQ ID NO: 60218 - RNA, 22 nt, Homo sapiens
augcaacugcacuccagccugg

SEQ ID NO: 60219 - RNA, 22 nt, Homo sapiens
ugucucaguucccuucucugga

SEQ ID NO: 60220 - RNA, 22 nt, Homo sapiens
uggaagauucuagaagauucca

SEQ ID NO: 60221 - RNA, 22 nt, Homo sapiens
agcuggcuguggagaaaccccu

SEQ ID NO: 60222 - RNA, 22 nt, Homo sapiens
agauguuguucaucugauuguu

SEQ ID NO: 60223 - RNA, 22 nt, Homo sapiens
auugcacuccagccugggcgac

SEQ ID NO: 60224 - RNA, 22 nt, Homo sapiens
uucagauugcauaccgaaagua

SEQ ID NO: 60225 - RNA, 20 nt, Homo sapiens
uaugacacugucauaaaaau

SEQ ID NO: 60226 - RNA, 22 nt, Homo sapiens
uugcauauguugaaccaagcgu

SEQ ID NO: 60227 - RNA, 22 nt, Homo sapiens
ucauauugcgguucauugacuu

SEQ ID NO: 60228 - RNA, 22 nt, Homo sapiens
uccuguaaucccagcuaccaga

SEQ ID NO: 60229 - RNA, 22 nt, Homo sapiens
ucagugccucaguuuuuaaaga

SEQ ID NO: 60230 - RNA, 22 nt, Homo sapiens
auauggcuaugugagcauacca

SEQ ID NO: 60231 - RNA, 22 nt, Homo sapiens
aagugucagaguugcuaaugac

SEQ ID NO: 60232 - RNA, 22 nt, Homo sapiens
auacaaguuauuugaacugcgg

SEQ ID NO: 60233 - RNA, 22 nt, Homo sapiens
cauugcacuccagccugccugg

SEQ ID NO: 60234 - RNA, 22 nt, Homo sapiens
cauugcacuccagccuagccaa

SEQ ID NO: 60235 - RNA, 22 nt, Homo sapiens
uucagacugggugaagagggua

SEQ ID NO: 60236 - RNA, 22 nt, Homo sapiens
uauugcaauuggcagagugcua

SEQ ID NO: 60237 - RNA, 22 nt, Homo sapiens
guucucacuggacugugaaaau

SEQ ID NO: 60238 - RNA, 22 nt, Homo sapiens
cauggcuuuauuuucagcuucu

SEQ ID NO: 60239 - RNA, 22 nt, Homo sapiens
aaggcaauuuguugugaggauu

SEQ ID NO: 60240 - RNA, 22 nt, Homo sapiens
gaggcaagaguaguuaaguuag

SEQ ID NO: 60241 - RNA, 22 nt, Homo sapiens
uaaagcauguaauuagguuaga

SEQ ID NO: 60242 - RNA, 22 nt, Homo sapiens
uugacauguaaguacucuauag

SEQ ID NO: 60243 - RNA, 22 nt, Homo sapiens
ugaaacacacauugcccuuuau

SEQ ID NO: 60244 - RNA, 22 nt, Homo sapiens
ugagaucacuaagagguaaugg

SEQ ID NO: 60245 - RNA, 22 nt, Homo sapiens
gggcaacauugaguacccugaa

SEQ ID NO: 60246 - RNA, 22 nt, Homo sapiens
ugagaugagggaagccuaggca

SEQ ID NO: 60247 - RNA, 21 nt, Homo sapiens
agcugguuuccacagugugcu

SEQ ID NO: 60248 - RNA, 22 nt, Homo sapiens
acuuuuugauggggagaacauu

SEQ ID NO: 60249 - RNA, 22 nt, Homo sapiens
uugaguccauucgaugcugauu

SEQ ID NO: 60250 - RNA, 22 nt, Homo sapiens
auugcacuccagccuaggcaac

SEQ ID NO: 60251 - RNA, 22 nt, Homo sapiens
ccagucuuggugucuguagcac

SEQ ID NO: 60252 - RNA, 22 nt, Homo sapiens
ucacaguccuguuuaggagagg

SEQ ID NO: 60253 - RNA, 23 nt, Homo sapiens
uuuugcaauaagucacuggaaua

SEQ ID NO: 60254 - RNA, 22 nt, Homo sapiens
uugagggaggcagggcuugucu

SEQ ID NO: 60255 - RNA, 21 nt, Homo sapiens
uaaaacuguaacuuuguccug

SEQ ID NO: 60256 - RNA, 22 nt, Homo sapiens
guugguuuccuguaacuggaca

SEQ ID NO: 60257 - RNA, 22 nt, Homo sapiens
ugagaacugguagcacuuguga

SEQ ID NO: 60258 - RNA, 22 nt, Homo sapiens
aagugucuuaccgggagggagu

SEQ ID NO: 60259 - RNA, 22 nt, Homo sapiens
ugcaaugugaaauaagcacauc

SEQ ID NO: 60260 - RNA, 21 nt, Homo sapiens
uauggcuuagucaguguuucc

SEQ ID NO: 60261 - RNA, 22 nt, Homo sapiens
ccuucauucauuaauuuagccc

SEQ ID NO: 60262 - RNA, 22 nt, Homo sapiens
uaugacauaguccuuaacccuc

SEQ ID NO: 60263 - RNA, 22 nt, Homo sapiens
cuauggcucugucuuuuaaguu

SEQ ID NO: 60264 - RNA, 22 nt, Homo sapiens
ugaauagacacuaaagacugua

SEQ ID NO: 60265 - RNA, 22 nt, Homo sapiens
ugucucccuucccauuaggaag

SEQ ID NO: 60266 - RNA, 22 nt, Homo sapiens
uaagacacuuaaaauguuacau

SEQ ID NO: 60267 - RNA, 22 nt, Homo sapiens
guccaagacuaggaguuggcag

SEQ ID NO: 60268 - RNA, 23 nt, Homo sapiens
augugugcuuggagagcaggaug

SEQ ID NO: 60269 - RNA, 22 nt, Homo sapiens
cauugcacuccagccuuggcaa

SEQ ID NO: 60270 - RNA, 23 nt, Homo sapiens
aauaucacaguggguguacaccc

SEQ ID NO: 60271 - RNA, 22 nt, Homo sapiens
uggagugagaacuucaaugaug

SEQ ID NO: 60272 - RNA, 22 nt, Homo sapiens
cauugcacuccauccuuggcaa

SEQ ID NO: 60273 - RNA, 22 nt, Homo sapiens
uggaagacaaguguuagcaugg

SEQ ID NO: 60274 - RNA, 22 nt, Homo sapiens
uuccagcugggggcaacucugc

SEQ ID NO: 60275 - RNA, 22 nt, Homo sapiens
cuuugguuaucuagcuguauga

SEQ ID NO: 60276 - RNA, 22 nt, Homo sapiens
gagcugaucuuuucugauucca

SEQ ID NO: 60277 - RNA, 22 nt, Homo sapiens
uauggccccuacaugugcaaaa

SEQ ID NO: 60278 - RNA, 22 nt, Homo sapiens
guguuauuuugcugggaaugau

SEQ ID NO: 60279 - RNA, 22 nt, Homo sapiens
caucgcacuccagccugggcaa

SEQ ID NO: 60280 - RNA, 22 nt, Homo sapiens
uugaggucagagguucgagacc

SEQ ID NO: 60281 - RNA, 22 nt, Homo sapiens
uauacaugugccauguuggugu

SEQ ID NO: 60282 - RNA, 22 nt, Homo sapiens
aaaguucugcguuagggcuaaa

SEQ ID NO: 60283 - RNA, 22 nt, Homo sapiens
uuaugacauugacaguuuuuag

SEQ ID NO: 60284 - RNA, 21 nt, Homo sapiens
auagcacuucacuugguuaga

SEQ ID NO: 60285 - RNA, 22 nt, Homo sapiens
uugggagugucucuggacugca

SEQ ID NO: 60286 - RNA, 20 nt, Homo sapiens
uucuauggugaugaguccug

SEQ ID NO: 60287 - RNA, 22 nt, Homo sapiens
acacuguagcugagggcaugcg

SEQ ID NO: 60288 - RNA, 22 nt, Homo sapiens
auagcagacauuucaaggcagg

SEQ ID NO: 60289 - RNA, 22 nt, Homo sapiens
ugugccuacugauagagccaag

SEQ ID NO: 60290 - RNA, 22 nt, Homo sapiens
gagacauugacuuuguuccaga

SEQ ID NO: 60291 - RNA, 22 nt, Homo sapiens
aguaaauuucugugcuuucaua

SEQ ID NO: 60292 - RNA, 22 nt, Homo sapiens
cauugcacuccagucugggcaa

SEQ ID NO: 60293 - RNA, 19 nt, Homo sapiens
uucucugguuguacuaccc

SEQ ID NO: 60294 - RNA, 22 nt, Homo sapiens
ugagcacuguacuuuaucaggu

SEQ ID NO: 60295 - RNA, 22 nt, Homo sapiens
auggcuuuaagagugucugaau

SEQ ID NO: 60296 - RNA, 22 nt, Homo sapiens
guacaguuuucaguguucacug

SEQ ID NO: 60297 - RNA, 22 nt, Homo sapiens
ggcagaauugcugaggaugcua

SEQ ID NO: 60298 - RNA, 22 nt, Homo sapiens
ugugacucuggcacauggugag

SEQ ID NO: 60299 - RNA, 22 nt, Homo sapiens
ggaaagaucagcuaaauguaag

SEQ ID NO: 60300 - RNA, 20 nt, Homo sapiens
ugagaacaugugguauuugg

SEQ ID NO: 60301 - RNA, 22 nt, Homo sapiens
uuuagcaaagcaauuuacacca

SEQ ID NO: 60302 - RNA, 22 nt, Homo sapiens
gaaaugcucauuuuggauccuu

SEQ ID NO: 60303 - RNA, 22 nt, Homo sapiens
uggcuuuuauuauguugaggua

SEQ ID NO: 60304 - RNA, 22 nt, Homo sapiens
uaucucuguggguagugcugaa

SEQ ID NO: 60305 - RNA, 22 nt, Homo sapiens
gguaaaucuucacuaagacuga

SEQ ID NO: 60306 - RNA, 22 nt, Homo sapiens
cauugcacuccagccuaggcaa

SEQ ID NO: 60307 - RNA, 22 nt, Homo sapiens
ucucuugguugaacaguuugga

SEQ ID NO: 60308 - RNA, 22 nt, Homo sapiens
uugagauggagucucacugugu

SEQ ID NO: 60309 - RNA, 22 nt, Homo sapiens
uucauacaguggcugcacucca

SEQ ID NO: 60310 - RNA, 22 nt, Homo sapiens
ugugaaacauggauagaacugg

SEQ ID NO: 60311 - RNA, 22 nt, Homo sapiens
aggaagugugcaauuaauuucu

SEQ ID NO: 60312 - RNA, 22 nt, Homo sapiens
uuugugauugcacacucaagau

SEQ ID NO: 60313 - RNA, 22 nt, Homo sapiens
acacuuucuggagcugcacaua

SEQ ID NO: 60314 - RNA, 22 nt, Homo sapiens
cugugcauguuguccaauucuu

SEQ ID NO: 60315 - RNA, 22 nt, Homo sapiens
cuugguacucugugucccagcu

SEQ ID NO: 60316 - RNA, 22 nt, Homo sapiens
uugcauauucucugaggcagga

SEQ ID NO: 60317 - RNA, 22 nt, Homo sapiens
uuggaagauuacuuaguuuucu

SEQ ID NO: 60318 - RNA, 22 nt, Homo sapiens
uuugugagguggauagauugca

SEQ ID NO: 60319 - RNA, 22 nt, Homo sapiens
auaaccuauggaucuacucggg

SEQ ID NO: 60320 - RNA, 22 nt, Homo sapiens
uuugcauaauaagauuagggug

SEQ ID NO: 60321 - RNA, 22 nt, Homo sapiens
guggaagaccagacuuuccaac

SEQ ID NO: 60322 - RNA, 22 nt, Homo sapiens
uucuuugcaugaucucaaaguc

SEQ ID NO: 60323 - RNA, 22 nt, Homo sapiens
auagcagaauuuggucaagucu

SEQ ID NO: 60324 - RNA, 22 nt, Homo sapiens
uugcuuaggcuggagugcagug

SEQ ID NO: 60325 - RNA, 19 nt, Homo sapiens
aauggcuuuuccuguuccc

SEQ ID NO: 60326 - RNA, 20 nt, Homo sapiens
agcugguuuuaugaaucuuu

SEQ ID NO: 60327 - RNA, 22 nt, Homo sapiens
gagagcauuaagccaucaucau

SEQ ID NO: 60328 - RNA, 22 nt, Homo sapiens
ugagaugaacuugauuguuuua

SEQ ID NO: 60329 - RNA, 22 nt, Homo sapiens
ggcaacaugccgaaaccacguc

SEQ ID NO: 60330 - RNA, 22 nt, Homo sapiens
cacaguguuacugguaugaagu

SEQ ID NO: 60331 - RNA, 22 nt, Homo sapiens
uuguaaucaacacaucauuggg

SEQ ID NO: 60332 - RNA, 22 nt, Homo sapiens
aaccuguaaccauaugaucagu

SEQ ID NO: 60333 - RNA, 22 nt, Homo sapiens
auugcacuccagucugggcaac

SEQ ID NO: 60334 - RNA, 22 nt, Homo sapiens
aucacuuucuauuucugugcca

SEQ ID NO: 60335 - RNA, 22 nt, Homo sapiens
uaguucauuuuucuugcuuaga

SEQ ID NO: 60336 - RNA, 18 nt, Homo sapiens
aaacagugucucuuucug

SEQ ID NO: 60337 - RNA, 22 nt, Homo sapiens
aaguaaacauuuuguacaauaa

SEQ ID NO: 60338 - RNA, 22 nt, Homo sapiens
cauacaagcuacaaucacaaag

SEQ ID NO: 60339 - RNA, 22 nt, Homo sapiens
uucuacagugacugcagccaua

SEQ ID NO: 60340 - RNA, 22 nt, Homo sapiens
aacacuguuuccagucaugauc

SEQ ID NO: 60341 - RNA, 22 nt, Homo sapiens
aucauccagccccagaagggag

SEQ ID NO: 60342 - RNA, 22 nt, Homo sapiens
ugagcaagaucuuuauaauuag

SEQ ID NO: 60343 - RNA, 22 nt, Homo sapiens
cuagaagcauauucagaacaga

SEQ ID NO: 60344 - RNA, 22 nt, Homo sapiens
uuugccaauauuuuauugagga

SEQ ID NO: 60345 - RNA, 22 nt, Homo sapiens
acaauguauauuuuacuguagg

SEQ ID NO: 60346 - RNA, 22 nt, Homo sapiens
auugcacuccacccugggcaac

SEQ ID NO: 60347 - RNA, 22 nt, Homo sapiens
uuuguucaccucaaggauggga

SEQ ID NO: 60348 - RNA, 22 nt, Homo sapiens
cauugcacugcauucugggcaa

SEQ ID NO: 60349 - RNA, 22 nt, Homo sapiens
auacaugugccauguugguaug

SEQ ID NO: 60350 - RNA, 22 nt, Homo sapiens
uccauuugucuauguuucuguu

SEQ ID NO: 60351 - RNA, 22 nt, Homo sapiens
acccuguaggacuauucuaauc

SEQ ID NO: 60352 - RNA, 22 nt, Homo sapiens
guaaagacacaugcacacguau

SEQ ID NO: 60353 - RNA, 19 nt, Homo sapiens
uuccugagaacaagggcuu

SEQ ID NO: 60354 - RNA, 22 nt, Homo sapiens
ucacugugcaugaaggaugcug

SEQ ID NO: 60355 - RNA, 18 nt, Homo sapiens
ggaaaacuuuucuaagua

SEQ ID NO: 60356 - RNA, 22 nt, Homo sapiens
uuagguaauauauugcugcuuu

SEQ ID NO: 60357 - RNA, 22 nt, Homo sapiens
gcauaaagcuaauaagacgaag

SEQ ID NO: 60358 - RNA, 17 nt, Homo sapiens
ucuaauaauaugcauuu

SEQ ID NO: 60359 - RNA, 22 nt, Homo sapiens
cauggcuuuaagcaacaccaag

SEQ ID NO: 60360 - RNA, 23 nt, Homo sapiens
agccugguuucccugcuucuccc

SEQ ID NO: 60361 - RNA, 22 nt, Homo sapiens
gauacaccauuuucuagcuauu

SEQ ID NO: 60362 - RNA, 19 nt, Homo sapiens
cauugcacuccacccuggg

SEQ ID NO: 60363 - RNA, 22 nt, Homo sapiens
ucuuucacuuagcaugauguuu

SEQ ID NO: 60364 - RNA, 22 nt, Homo sapiens
gagcucauuaaaaauguagaau

SEQ ID NO: 60365 - RNA, 22 nt, Homo sapiens
auugcacuccagccuggcaaua

SEQ ID NO: 60366 - RNA, 22 nt, Homo sapiens
auugaacuguuggagagguuuu

SEQ ID NO: 60367 - RNA, 22 nt, Homo sapiens
uguagcaaaucgauacuauugg

SEQ ID NO: 60368 - RNA, 22 nt, Homo sapiens
aucuacagccagucugguuugu

SEQ ID NO: 60369 - RNA, 22 nt, Homo sapiens
gcugcuuuugaugacaaaaaca

SEQ ID NO: 60370 - RNA, 22 nt, Homo sapiens
gacaagagaacacugcuauauu

SEQ ID NO: 60371 - RNA, 22 nt, Homo sapiens
ugagaucaguuguuauaauucu

SEQ ID NO: 60372 - RNA, 22 nt, Homo sapiens
auugaguaaaaaauagugaugu

SEQ ID NO: 60373 - RNA, 22 nt, Homo sapiens
ugcacuguggucugagagacag

SEQ ID NO: 60374 - RNA, 22 nt, Homo sapiens
ugaaggcaggagggagaaaagu

SEQ ID NO: 60375 - RNA, 22 nt, Homo sapiens
cuacagcacugagcugugugca

SEQ ID NO: 60376 - RNA, 22 nt, Homo sapiens
uuacagcagugccccacuccca

SEQ ID NO: 60377 - RNA, 22 nt, Homo sapiens
uuggaaacauuuaugguaacag

SEQ ID NO: 60378 - RNA, 22 nt, Homo sapiens
uucuaugguuuuuaugguguua

SEQ ID NO: 60379 - RNA, 22 nt, Homo sapiens
cucuuuggaugccuuaggguua

SEQ ID NO: 60380 - RNA, 22 nt, Homo sapiens
uaaggcucuuguuauuuugagg

SEQ ID NO: 60381 - RNA, 22 nt, Homo sapiens
agugcaauggugccaucauagc

SEQ ID NO: 60382 - RNA, 22 nt, Homo sapiens
auggacuuuuuguucagugucu

SEQ ID NO: 60383 - RNA, 22 nt, Homo sapiens
auagcagaagaagggacaauuc

SEQ ID NO: 60384 - RNA, 22 nt, Homo sapiens
augacagagauaugugaauuuu

SEQ ID NO: 60385 - RNA, 19 nt, Homo sapiens
cucuuuggugucucuucuu

SEQ ID NO: 60386 - RNA, 22 nt, Homo sapiens
gagcugaucuuuauguaaauuc

SEQ ID NO: 60387 - RNA, 20 nt, Homo sapiens
ucaaagacauggcugucaga

SEQ ID NO: 60388 - RNA, 22 nt, Homo sapiens
ugcucaguuuaaaacuuuugag

SEQ ID NO: 60389 - RNA, 22 nt, Homo sapiens
gucuguuuggggaccuguggcc

SEQ ID NO: 60390 - RNA, 22 nt, Homo sapiens
uugagauggaaucucgcuuugu

SEQ ID NO: 60391 - RNA, 22 nt, Homo sapiens
aaguuaauguuuaagacuccua

SEQ ID NO: 60392 - RNA, 22 nt, Homo sapiens
ugagcccauuguccugguuuau

SEQ ID NO: 60393 - RNA, 22 nt, Homo sapiens
ugagcucagcuaguugaggugu

SEQ ID NO: 60394 - RNA, 18 nt, Homo sapiens
guaaauguaucuauugcc

SEQ ID NO: 60395 - RNA, 22 nt, Homo sapiens
uugagcaaaacauuaauauuag

SEQ ID NO: 60396 - RNA, 22 nt, Homo sapiens
ugguucaguugcacaggcuguu

SEQ ID NO: 60397 - RNA, 22 nt, Homo sapiens
cauugcacugcagcccgggcaa

SEQ ID NO: 60398 - RNA, 22 nt, Homo sapiens
uugacauaguuucugaaauaga

SEQ ID NO: 60399 - RNA, 22 nt, Homo sapiens
augacuuuucugaaaaccacca

SEQ ID NO: 60400 - RNA, 19 nt, Homo sapiens
ugugacugguugucucgcu

SEQ ID NO: 60401 - RNA, 22 nt, Homo sapiens
ucugucuuugccuaaguuuguc

SEQ ID NO: 60402 - RNA, 21 nt, Homo sapiens
ugcaagaaucaggaagcugcc

SEQ ID NO: 60403 - RNA, 22 nt, Homo sapiens
guccaguacucuuuccugaaaa

SEQ ID NO: 60404 - RNA, 23 nt, Homo sapiens
gaaguaauaaauggauucuuaac

SEQ ID NO: 60405 - RNA, 22 nt, Homo sapiens
cauugcacuccagcuugggcga

SEQ ID NO: 60406 - RNA, 22 nt, Homo sapiens
uaagacuguguaauuuaugaag

SEQ ID NO: 60407 - RNA, 22 nt, Homo sapiens
ugauuuguuuagugccaaguuu

SEQ ID NO: 60408 - RNA, 22 nt, Homo sapiens
ugauauuuuugauccuuaaguu

SEQ ID NO: 60409 - RNA, 19 nt, Homo sapiens
uagguacauucaagucucc

SEQ ID NO: 60410 - RNA, 22 nt, Homo sapiens
cugucuagagggcacaugaugc

SEQ ID NO: 60411 - RNA, 18 nt, Homo sapiens
uguggcuguuuuccaaua

SEQ ID NO: 60412 - RNA, 21 nt, Homo sapiens
uucaucuggccguauuccagg

SEQ ID NO: 60413 - RNA, 22 nt, Homo sapiens
gucucccagccuacauauuucu

SEQ ID NO: 60414 - RNA, 22 nt, Homo sapiens
ugaggugaggguaucaaaugcu

SEQ ID NO: 60415 - RNA, 22 nt, Homo sapiens
ucauacaguaguccucacuugu

SEQ ID NO: 60416 - RNA, 22 nt, Homo sapiens
uaaguucauucaugaaacuuag

SEQ ID NO: 60417 - RNA, 22 nt, Homo sapiens
auacauguuucauguuggugug

SEQ ID NO: 60418 - RNA, 22 nt, Homo sapiens
auaaagccaugagcuugagaug

SEQ ID NO: 60419 - RNA, 22 nt, Homo sapiens
cucagugucuggggccccaggg

SEQ ID NO: 60420 - RNA, 20 nt, Homo sapiens
uugaggucaggaguuuggga

SEQ ID NO: 60421 - RNA, 22 nt, Homo sapiens
auuguacuccagccugggcaaa

SEQ ID NO: 60422 - RNA, 22 nt, Homo sapiens
acacagugucuguguauuuaaa

SEQ ID NO: 60423 - RNA, 22 nt, Homo sapiens
uaagacuguuggcaauuuuugc

SEQ ID NO: 60424 - RNA, 22 nt, Homo sapiens
auugcucuuagaaauauuucuu

SEQ ID NO: 60425 - RNA, 22 nt, Homo sapiens
uugacagaccuuggucauaucc

SEQ ID NO: 60426 - RNA, 23 nt, Homo sapiens
auugcagaaucacagagguagug

SEQ ID NO: 60427 - RNA, 22 nt, Homo sapiens
guauacaugucaaaacucacau

SEQ ID NO: 60428 - RNA, 22 nt, Homo sapiens
uugagccaaggauugucuuucc

SEQ ID NO: 60429 - RNA, 22 nt, Homo sapiens
guguuauugagaaauagggugu

SEQ ID NO: 60430 - RNA, 22 nt, Homo sapiens
auagaagcugccaacguuucag

SEQ ID NO: 60431 - RNA, 22 nt, Homo sapiens
guagcagaauaucagauaauuu

SEQ ID NO: 60432 - RNA, 22 nt, Homo sapiens
auuucuacuccuguguccagaa

SEQ ID NO: 60433 - RNA, 22 nt, Homo sapiens
acauaaagaagcaggacauugu

SEQ ID NO: 60434 - RNA, 22 nt, Homo sapiens
uuuugcaguuacagagagugag

SEQ ID NO: 60435 - RNA, 22 nt, Homo sapiens
ugagaucaugucauuugcacuc

SEQ ID NO: 60436 - RNA, 22 nt, Homo sapiens
uggaaaacaugcacauuggauu

SEQ ID NO: 60437 - RNA, 22 nt, Homo sapiens
uugcacagugguuuagagccug

SEQ ID NO: 60438 - RNA, 22 nt, Homo sapiens
cauugcccuccagccugggcaa

SEQ ID NO: 60439 - RNA, 22 nt, Homo sapiens
uacaccauuugauucuuuaagc

SEQ ID NO: 60440 - RNA, 22 nt, Homo sapiens
gccaacauggcgcuccauucuu

SEQ ID NO: 60441 - RNA, 22 nt, Homo sapiens
augagacuagaagagaauaaua

SEQ ID NO: 60442 - RNA, 22 nt, Homo sapiens
cuuugguuaauaggauauggca

SEQ ID NO: 60443 - RNA, 22 nt, Homo sapiens
gucuuuggaaaaaaugucuguu

SEQ ID NO: 60444 - RNA, 22 nt, Homo sapiens
ugacaagaaagcgucuucuuuu

SEQ ID NO: 60445 - RNA, 22 nt, Homo sapiens
uuauagacacguuguaacaaac

SEQ ID NO: 60446 - RNA, 22 nt, Homo sapiens
aucacuuugcucuccagugugg

SEQ ID NO: 60447 - RNA, 22 nt, Homo sapiens
cuggcucauuucauuuagcaua

SEQ ID NO: 60448 - RNA, 22 nt, Homo sapiens
uugcugagucuuucuagguugc

SEQ ID NO: 60449 - RNA, 22 nt, Homo sapiens
uuugguugcauucacauauuuc

SEQ ID NO: 60450 - RNA, 22 nt, Homo sapiens
cauugcacuccagccugcugac

SEQ ID NO: 60451 - RNA, 22 nt, Homo sapiens
uauggcuuuuaacugucguaug

SEQ ID NO: 60452 - RNA, 22 nt, Homo sapiens
gcugaaauguuuaauuugggag

SEQ ID NO: 60453 - RNA, 22 nt, Homo sapiens
acacacgugcauguaugcguau

SEQ ID NO: 60454 - RNA, 22 nt, Homo sapiens
auaucaaggccauuuucuaaau

SEQ ID NO: 60455 - RNA, 22 nt, Homo sapiens
uugagcaccaugccuggccaug

SEQ ID NO: 60456 - RNA, 22 nt, Homo sapiens
auuccacuuacaugaaguaccu

SEQ ID NO: 60457 - RNA, 18 nt, Homo sapiens
auucuacaggccuuuuga

SEQ ID NO: 60458 - RNA, 22 nt, Homo sapiens
ugagaugaugggauaagagggc

SEQ ID NO: 60459 - RNA, 22 nt, Homo sapiens
aaccuacauucuuaacuguugc

SEQ ID NO: 60460 - RNA, 22 nt, Homo sapiens
uuauagcuaacaucugugaaaa

SEQ ID NO: 60461 - RNA, 22 nt, Homo sapiens
auggcagugagucucuaguauu

SEQ ID NO: 60462 - RNA, 22 nt, Homo sapiens
auuccacuuauaugagguaucu

SEQ ID NO: 60463 - RNA, 22 nt, Homo sapiens
uccagaguggugaugcuggggc

SEQ ID NO: 60464 - RNA, 22 nt, Homo sapiens
ugugggaggugcuaauguaaau

SEQ ID NO: 60465 - RNA, 22 nt, Homo sapiens
uucaauaugucauuggcaggca

SEQ ID NO: 60466 - RNA, 22 nt, Homo sapiens
ucucugagaaaaguuucuccca

SEQ ID NO: 60467 - RNA, 22 nt, Homo sapiens
uuaauacugcuuaacuuuagga

SEQ ID NO: 60468 - RNA, 22 nt, Homo sapiens
cauggcuuguauaagauucuca

SEQ ID NO: 60469 - RNA, 22 nt, Homo sapiens
acacuuucuagacaagggaaua

SEQ ID NO: 60470 - RNA, 22 nt, Homo sapiens
auggauauuuuuugaacauaga

SEQ ID NO: 60471 - RNA, 22 nt, Homo sapiens
auggcaguuuauucuaaaucaa

SEQ ID NO: 60472 - RNA, 22 nt, Homo sapiens
aacagacugucacauaaaauug

SEQ ID NO: 60473 - RNA, 22 nt, Homo sapiens
gauaaagauagcaauagggaca

SEQ ID NO: 60474 - RNA, 22 nt, Homo sapiens
caugaaagugagaaacuccugg

SEQ ID NO: 60475 - RNA, 22 nt, Homo sapiens
uugagauggaguuuugcucuug

SEQ ID NO: 60476 - RNA, 22 nt, Homo sapiens
uacaaaucuagguuuguuacug

SEQ ID NO: 60477 - RNA, 21 nt, Homo sapiens
uuuagguagcuuuucugggag

SEQ ID NO: 60478 - RNA, 22 nt, Homo sapiens
gagcucaccuuaccucuggagc

SEQ ID NO: 60479 - RNA, 23 nt, Homo sapiens
ucaguacuccacuuucaauagug

SEQ ID NO: 60480 - RNA, 20 nt, Homo sapiens
uggaaucugaagaucucagu

SEQ ID NO: 60481 - RNA, 22 nt, Homo sapiens
uugacuagaccaucuuucuaga

SEQ ID NO: 60482 - RNA, 22 nt, Homo sapiens
ugccaaaaugggcuuuauaccg

SEQ ID NO: 60483 - RNA, 22 nt, Homo sapiens
ucugucuuugucaggaccagag

SEQ ID NO: 60484 - RNA, 22 nt, Homo sapiens
uauggcuucuauaaggaagcuu

SEQ ID NO: 60485 - RNA, 21 nt, Homo sapiens
ugaacacuggacugagugucc

SEQ ID NO: 60486 - RNA, 22 nt, Homo sapiens
ugagaugaagugauguaaaaca

SEQ ID NO: 60487 - RNA, 20 nt, Homo sapiens
uaugacaaagccuagugagu

SEQ ID NO: 60488 - RNA, 22 nt, Homo sapiens
gucuuuggaaagacaaaguuca

SEQ ID NO: 60489 - RNA, 17 nt, Homo sapiens
auguaauccucaucucu

SEQ ID NO: 60490 - RNA, 22 nt, Homo sapiens
cauugcacuccaucuugggcaa

SEQ ID NO: 60491 - RNA, 22 nt, Homo sapiens
uugguucucuuagccaucuuaa

SEQ ID NO: 60492 - RNA, 22 nt, Homo sapiens
auggcagugucuagggguguuu

SEQ ID NO: 60493 - RNA, 22 nt, Homo sapiens
auugcacuccagccuugggcaa

SEQ ID NO: 60494 - RNA, 22 nt, Homo sapiens
cauugcacucuagccucggcaa

SEQ ID NO: 60495 - RNA, 22 nt, Homo sapiens
augucaacauagacaguagagu

SEQ ID NO: 60496 - RNA, 21 nt, Homo sapiens
uauggauuugccuauucugga

SEQ ID NO: 60497 - RNA, 20 nt, Homo sapiens
uuggaaaugugaauugggag

SEQ ID NO: 60498 - RNA, 18 nt, Homo sapiens
ugaaacacauuuuuuccu

SEQ ID NO: 60499 - RNA, 22 nt, Homo sapiens
agagaugauuaacauuuuggua

SEQ ID NO: 60500 - RNA, 22 nt, Homo sapiens
auguccauggaaucuguagcaa

SEQ ID NO: 60501 - RNA, 23 nt, Homo sapiens
aucagguuguagaauguguuugc

SEQ ID NO: 60502 - RNA, 22 nt, Homo sapiens
uuugacaaugugugcuuguauu

SEQ ID NO: 60503 - RNA, 22 nt, Homo sapiens
agacaagauggcuugagguuca

SEQ ID NO: 60504 - RNA, 22 nt, Homo sapiens
uucuuuggauaaaguuuuaugc

SEQ ID NO: 60505 - RNA, 22 nt, Homo sapiens
uuucuauguugaccagucuaga

SEQ ID NO: 60506 - RNA, 22 nt, Homo sapiens
uuaguucauugugacuggacuc

SEQ ID NO: 60507 - RNA, 22 nt, Homo sapiens
auggccugaugcaccuguccca

SEQ ID NO: 60508 - RNA, 22 nt, Homo sapiens
cuuuguaugucaugacaacugu

SEQ ID NO: 60509 - RNA, 18 nt, Homo sapiens
gacuuggaguuuacagug

SEQ ID NO: 60510 - RNA, 22 nt, Homo sapiens
uauggcuucuuuaaauugaggu

SEQ ID NO: 60511 - RNA, 22 nt, Homo sapiens
aauuaguuggcugggugcggug

SEQ ID NO: 60512 - RNA, 22 nt, Homo sapiens
ucacuuugacggccaacuucua

SEQ ID NO: 60513 - RNA, 22 nt, Homo sapiens
aauauagcuauguacaugucca

SEQ ID NO: 60514 - RNA, 22 nt, Homo sapiens
agaaugugaacaucuugaaagu

SEQ ID NO: 60515 - RNA, 22 nt, Homo sapiens
aucuuuggugcaugauacuuug

SEQ ID NO: 60516 - RNA, 22 nt, Homo sapiens
auggcaguuucacucugggauu

SEQ ID NO: 60517 - RNA, 17 nt, Homo sapiens
ugagcuaagauuacccc

SEQ ID NO: 60518 - RNA, 18 nt, Homo sapiens
aaacugcuuccuuggccu

SEQ ID NO: 60519 - RNA, 22 nt, Homo sapiens
uaagagagcuccaucuuuuccu

SEQ ID NO: 60520 - RNA, 22 nt, Homo sapiens
auucuauaguccuaggauuggg

SEQ ID NO: 60521 - RNA, 22 nt, Homo sapiens
uauacagcaaguuacugugcug

SEQ ID NO: 60522 - RNA, 22 nt, Homo sapiens
aucauauccuagauauaacuuc

SEQ ID NO: 60523 - RNA, 21 nt, Homo sapiens
ugaaugcuuuaaauauuagaa

SEQ ID NO: 60524 - RNA, 22 nt, Homo sapiens
auggaacauuauagauguaaaa

SEQ ID NO: 60525 - RNA, 22 nt, Homo sapiens
uagcauaauuuguagaaaauca

SEQ ID NO: 60526 - RNA, 22 nt, Homo sapiens
uuugaaccauuugaagaaugau

SEQ ID NO: 60527 - RNA, 22 nt, Homo sapiens
caccugagcgggaugcucgccu

SEQ ID NO: 60528 - RNA, 22 nt, Homo sapiens
uuggucaggcuaaucucgaacg

SEQ ID NO: 60529 - RNA, 22 nt, Homo sapiens
uuugcuugaggucuagcuaccc

SEQ ID NO: 60530 - RNA, 22 nt, Homo sapiens
aucuuuggcgggaauaucacag

SEQ ID NO: 60531 - RNA, 22 nt, Homo sapiens
aaauaguagcugaaugagggaa

SEQ ID NO: 60532 - RNA, 22 nt, Homo sapiens
uuggaaauauguuaagugucau

SEQ ID NO: 60533 - RNA, 19 nt, Homo sapiens
ugcagcaauguaaaagaca

SEQ ID NO: 60534 - RNA, 22 nt, Homo sapiens
uucccuguaucuucugccaugu

SEQ ID NO: 60535 - RNA, 22 nt, Homo sapiens
uacaguguuuugguauuccaca

SEQ ID NO: 60536 - RNA, 22 nt, Homo sapiens
ugauuugucucucagcccuacu

SEQ ID NO: 60537 - RNA, 22 nt, Homo sapiens
acuggcuuauuucacuuagcau

SEQ ID NO: 60538 - RNA, 22 nt, Homo sapiens
auggagacaaauaaaggagagu

SEQ ID NO: 60539 - RNA, 22 nt, Homo sapiens
aaugcuguucuuugcuuaaguu

SEQ ID NO: 60540 - RNA, 22 nt, Homo sapiens
ugagaugaggucucacucuguu

SEQ ID NO: 60541 - RNA, 22 nt, Homo sapiens
acugagaucuuuaaauaaauaa

SEQ ID NO: 60542 - RNA, 22 nt, Homo sapiens
ggcaagaacuucacucacuuuu

SEQ ID NO: 60543 - RNA, 22 nt, Homo sapiens
cucauggagaaccucugcuagg

SEQ ID NO: 60544 - RNA, 22 nt, Homo sapiens
accugagacuaggcauuuuaua

SEQ ID NO: 60545 - RNA, 22 nt, Homo sapiens
uuggacuucucaaggcaauaaa

SEQ ID NO: 60546 - RNA, 22 nt, Homo sapiens
uucuguguuuaggucacggcua

SEQ ID NO: 60547 - RNA, 22 nt, Homo sapiens
uagauuguaauaugcagaaugg

SEQ ID NO: 60548 - RNA, 22 nt, Homo sapiens
auuguacuccagccugggcagc

SEQ ID NO: 60549 - RNA, 22 nt, Homo sapiens
aauggcuuucagcuuuucccca

SEQ ID NO: 60550 - RNA, 18 nt, Homo sapiens
uuggacggagagucaaau

SEQ ID NO: 60551 - RNA, 22 nt, Homo sapiens
auauucacagguaucagagauu

SEQ ID NO: 60552 - RNA, 23 nt, Homo sapiens
uuuggcauuccagaaauuuucau

SEQ ID NO: 60553 - RNA, 22 nt, Homo sapiens
aggcaagagugacuacgugaaa

SEQ ID NO: 60554 - RNA, 22 nt, Homo sapiens
cauugcacuccagccuggccaa

SEQ ID NO: 60555 - RNA, 22 nt, Homo sapiens
caguuacuuuugcaccaaccua

SEQ ID NO: 60556 - RNA, 21 nt, Homo sapiens
uuaaguaauuacccaacucuc

SEQ ID NO: 60557 - RNA, 22 nt, Homo sapiens
uuucuacagggcuugccaggua

SEQ ID NO: 60558 - RNA, 22 nt, Homo sapiens
uucagguaguuuaacuguucca

SEQ ID NO: 60559 - RNA, 22 nt, Homo sapiens
uuugugugugauuauaaaaggu

SEQ ID NO: 60560 - RNA, 18 nt, Homo sapiens
auugcacaccagccuggg

SEQ ID NO: 60561 - RNA, 22 nt, Homo sapiens
ugauuggagaacaaacugcaua

SEQ ID NO: 60562 - RNA, 22 nt, Homo sapiens
uuuuauguuuguucccugccaa

SEQ ID NO: 60563 - RNA, 22 nt, Homo sapiens
uauuguacauauccucccuuca

SEQ ID NO: 60564 - RNA, 22 nt, Homo sapiens
uugcacuccggccuggguaaca

SEQ ID NO: 60565 - RNA, 22 nt, Homo sapiens
uaugagacugguuaauuuuugu

SEQ ID NO: 60566 - RNA, 22 nt, Homo sapiens
uggaacacauaaauagcauagu

SEQ ID NO: 60567 - RNA, 22 nt, Homo sapiens
guaacacucuaaagggaugcac

SEQ ID NO: 60568 - RNA, 22 nt, Homo sapiens
uacauagucuucuuuugguuau

SEQ ID NO: 60569 - RNA, 22 nt, Homo sapiens
uuugaguuugaggugcugauga

SEQ ID NO: 60570 - RNA, 22 nt, Homo sapiens
gugugacuagucaugccugaau

SEQ ID NO: 60571 - RNA, 22 nt, Homo sapiens
uuugugaggugauggauauguc

SEQ ID NO: 60572 - RNA, 22 nt, Homo sapiens
caguuacuugacacaaccaauu

SEQ ID NO: 60573 - RNA, 22 nt, Homo sapiens
uuuuaugggcuauuugcauuag

SEQ ID NO: 60574 - RNA, 22 nt, Homo sapiens
auccauugucuaaugcuaagau

SEQ ID NO: 60575 - RNA, 22 nt, Homo sapiens
cauugcacuccagcuugggcaa

SEQ ID NO: 60576 - RNA, 22 nt, Homo sapiens
uuaguucccucauucuugacuu

SEQ ID NO: 60577 - RNA, 22 nt, Homo sapiens
auuguacuccagccugggcaag

SEQ ID NO: 60578 - RNA, 22 nt, Homo sapiens
cauuuuacuuuccagacgugga

SEQ ID NO: 60579 - RNA, 22 nt, Homo sapiens
ugccauugcacuccagccuggg

SEQ ID NO: 60580 - RNA, 22 nt, Homo sapiens
guggaaugaaaacucucucaca

SEQ ID NO: 60581 - RNA, 22 nt, Homo sapiens
ugcaauuuaaugugucccaauu

SEQ ID NO: 60582 - RNA, 22 nt, Homo sapiens
aaggagcuaagagaucauacau

SEQ ID NO: 60583 - RNA, 22 nt, Homo sapiens
cauugcacuccagccuggcaac

SEQ ID NO: 60584 - RNA, 22 nt, Homo sapiens
augugcuuauagguguauguuu

SEQ ID NO: 60585 - RNA, 22 nt, Homo sapiens
agagaugaagauggggcucccg

SEQ ID NO: 60586 - RNA, 22 nt, Homo sapiens
guggaauggaaugauuguguau

SEQ ID NO: 60587 - RNA, 20 nt, Homo sapiens
ucugauugcaacugcaugag

SEQ ID NO: 60588 - RNA, 19 nt, Homo sapiens
ucccugagucuuagcuuga

SEQ ID NO: 60589 - RNA, 22 nt, Homo sapiens
ucagagucuagaucacucacug

SEQ ID NO: 60590 - RNA, 22 nt, Homo sapiens
gcuguguugugcccagcaucau

SEQ ID NO: 60591 - RNA, 22 nt, Homo sapiens
uugaguccccacacuggguccc

SEQ ID NO: 60592 - RNA, 22 nt, Homo sapiens
uuggacuucuaacugacaugga

SEQ ID NO: 60593 - RNA, 22 nt, Homo sapiens
guggacaugaauuuuggaggca

SEQ ID NO: 60594 - RNA, 22 nt, Homo sapiens
uaagugcaugauuacaugcaua

SEQ ID NO: 60595 - RNA, 22 nt, Homo sapiens
ugagcugagaaaugcagcagcu

SEQ ID NO: 60596 - RNA, 22 nt, Homo sapiens
uuccugagccuuguaucuagua

SEQ ID NO: 60597 - RNA, 22 nt, Homo sapiens
aaucacuuugcuacaaggcagu

SEQ ID NO: 60598 - RNA, 22 nt, Homo sapiens
cauggcuuuuauaacaagaaau

SEQ ID NO: 60599 - RNA, 22 nt, Homo sapiens
ugacaaguaaacagucagcacc

SEQ ID NO: 60600 - RNA, 22 nt, Homo sapiens
cauugcaauccagccugggcaa

SEQ ID NO: 60601 - RNA, 22 nt, Homo sapiens
guggcagugugaggauccugcu

SEQ ID NO: 60602 - RNA, 22 nt, Homo sapiens
agcugauggucuuguaugaugu

SEQ ID NO: 60603 - RNA, 22 nt, Homo sapiens
uugacuuuuauucacucugcua

SEQ ID NO: 60604 - RNA, 22 nt, Homo sapiens
uauggcuuuguucaacagccuc

SEQ ID NO: 60605 - RNA, 22 nt, Homo sapiens
uguggaguguaugugacagaga

SEQ ID NO: 60606 - RNA, 22 nt, Homo sapiens
uuugugcaugaagagggggugc

SEQ ID NO: 60607 - RNA, 22 nt, Homo sapiens
aggugguuuugaugagcaggua

SEQ ID NO: 60608 - RNA, 22 nt, Homo sapiens
aaguugguguaugagacagaag

SEQ ID NO: 60609 - RNA, 22 nt, Homo sapiens
uugacaaggagccauugcaucu

SEQ ID NO: 60610 - RNA, 22 nt, Homo sapiens
agcugguuuaauaugcugucug

SEQ ID NO: 60611 - RNA, 22 nt, Homo sapiens
ggacaagagacugggacacuga

SEQ ID NO: 60612 - RNA, 20 nt, Homo sapiens
uucuacagucacaggaagau

SEQ ID NO: 60613 - RNA, 19 nt, Homo sapiens
ugagauuguaugaggagau

SEQ ID NO: 60614 - RNA, 21 nt, Homo sapiens
cuuugguagaguuuuuagggu

SEQ ID NO: 60615 - RNA, 21 nt, Homo sapiens
ugagaugauccugcaugcaug

SEQ ID NO: 60616 - RNA, 22 nt, Homo sapiens
acugaucaauguuaaggcuuau

SEQ ID NO: 60617 - RNA, 22 nt, Homo sapiens
aaugcuguguuauuucaugacc

SEQ ID NO: 60618 - RNA, 21 nt, Homo sapiens
uucuaaguaaauguuggacau

SEQ ID NO: 60619 - RNA, 22 nt, Homo sapiens
ugagaugacgacacaccucagu

SEQ ID NO: 60620 - RNA, 22 nt, Homo sapiens
ugagcugagaucgugccauugu

SEQ ID NO: 60621 - RNA, 22 nt, Homo sapiens
ugaaauuuuuuauucguuggcu

SEQ ID NO: 60622 - RNA, 19 nt, Homo sapiens
cauggcuuauaauuuuaau

SEQ ID NO: 60623 - RNA, 22 nt, Homo sapiens
augaagcuagcugauugcugau

SEQ ID NO: 60624 - RNA, 22 nt, Homo sapiens
uacagucacauuccugaccaua

SEQ ID NO: 60625 - RNA, 22 nt, Homo sapiens
ugagauucuuacuccugaguuc

SEQ ID NO: 60626 - RNA, 22 nt, Homo sapiens
cccagaguucuuaaauacugag

SEQ ID NO: 60627 - RNA, 22 nt, Homo sapiens
ugaaaucuaaaauguuccaaga

SEQ ID NO: 60628 - RNA, 22 nt, Homo sapiens
gacuugaagaaucuaagggagg

SEQ ID NO: 60629 - RNA, 22 nt, Homo sapiens
uggucuccuuuguacccugggc

SEQ ID NO: 60630 - RNA, 22 nt, Homo sapiens
cauugcacuccagccucggcaa

SEQ ID NO: 60631 - RNA, 22 nt, Homo sapiens
cucagugucuggcacacagaaa

SEQ ID NO: 60632 - RNA, 22 nt, Homo sapiens
cuuuacaguuggacucacgagg

SEQ ID NO: 60633 - RNA, 19 nt, Homo sapiens
aguggguguuuucuguuug

SEQ ID NO: 60634 - RNA, 22 nt, Homo sapiens
uuacacaguaggucccuaguaa

SEQ ID NO: 60635 - RNA, 20 nt, Homo sapiens
auuccacuuauaugaggucc

SEQ ID NO: 60636 - RNA, 22 nt, Homo sapiens
uaccagcauuucucuuuaagua

SEQ ID NO: 60637 - RNA, 22 nt, Homo sapiens
auccugaagcuuuacugaauuc

SEQ ID NO: 60638 - RNA, 22 nt, Homo sapiens
uauggccuuuuuaaugauauug

SEQ ID NO: 60639 - RNA, 22 nt, Homo sapiens
augaggcaggaaaggcguaucu

SEQ ID NO: 60640 - RNA, 22 nt, Homo sapiens
ugcagaaucccuucagauccga

SEQ ID NO: 60641 - RNA, 22 nt, Homo sapiens
ugccaacugguuucuuuuaguu

SEQ ID NO: 60642 - RNA, 22 nt, Homo sapiens
cacagugaacugguggguuuuu

SEQ ID NO: 60643 - RNA, 22 nt, Homo sapiens
uuggaaacaccuggugagguua

SEQ ID NO: 60644 - RNA, 22 nt, Homo sapiens
uacaaguauuuuuauuagugcc

SEQ ID NO: 60645 - RNA, 22 nt, Homo sapiens
ugugcaaggcucucaaccugug

SEQ ID NO: 60646 - RNA, 22 nt, Homo sapiens
uacaagcaggaaaugguauaug

SEQ ID NO: 60647 - RNA, 21 nt, Homo sapiens
uuuccuggagcguauggcuuc

SEQ ID NO: 60648 - RNA, 22 nt, Homo sapiens
uggagcccuaguuccucauaac

SEQ ID NO: 60649 - RNA, 22 nt, Homo sapiens
uuguuuuggagaugagcuaaaa

SEQ ID NO: 60650 - RNA, 22 nt, Homo sapiens
uguggccuuuguuucaguuggg

SEQ ID NO: 60651 - RNA, 17 nt, Homo sapiens
cucucugguuuaaagca

SEQ ID NO: 60652 - RNA, 22 nt, Homo sapiens
uuuuaacagccaggggacggcc

SEQ ID NO: 60653 - RNA, 22 nt, Homo sapiens
cugacuaguuuuaaugcagauu

SEQ ID NO: 60654 - RNA, 22 nt, Homo sapiens
uggagugaaaacacacuaaucu

SEQ ID NO: 60655 - RNA, 22 nt, Homo sapiens
uuauucagcaccugcuguguuc

SEQ ID NO: 60656 - RNA, 22 nt, Homo sapiens
gagaugaugagauguucacagu

SEQ ID NO: 60657 - RNA, 22 nt, Homo sapiens
agcugguuuauuucuauauccu

SEQ ID NO: 60658 - RNA, 22 nt, Homo sapiens
uuccugagagggcugggugcag

SEQ ID NO: 60659 - RNA, 22 nt, Homo sapiens
guacacauacauauaugugugu

SEQ ID NO: 60660 - RNA, 22 nt, Homo sapiens
auugcacuccagccugggcaac

SEQ ID NO: 60661 - RNA, 22 nt, Homo sapiens
ccugucuugauuaaauuacuua

SEQ ID NO: 60662 - RNA, 22 nt, Homo sapiens
auggcucuggauagaaugcagg

SEQ ID NO: 60663 - RNA, 22 nt, Homo sapiens
acaguguagugacugccaacuu

SEQ ID NO: 60664 - RNA, 20 nt, Homo sapiens
uagcacacauguagaauagu

SEQ ID NO: 60665 - RNA, 22 nt, Homo sapiens
ugacuaaaacugaguuucauua

SEQ ID NO: 60666 - RNA, 22 nt, Homo sapiens
cugucucagugaauugguuuua

SEQ ID NO: 60667 - RNA, 22 nt, Homo sapiens
ugagaugaguucucgcucuguc

SEQ ID NO: 60668 - RNA, 22 nt, Homo sapiens
ucuaugguuuauuuccaagugu

SEQ ID NO: 60669 - RNA, 22 nt, Homo sapiens
gucucccagccuacaucuuucu

SEQ ID NO: 60670 - RNA, 22 nt, Homo sapiens
auccaagagacugaugacuucc

SEQ ID NO: 60671 - RNA, 19 nt, Homo sapiens
uggaacugauucaguucug

SEQ ID NO: 60672 - RNA, 22 nt, Homo sapiens
gagaaccuccagcaagguagua

SEQ ID NO: 60673 - RNA, 22 nt, Homo sapiens
ugagcugagaucaugcuauugu

SEQ ID NO: 60674 - RNA, 22 nt, Homo sapiens
ucccugaaaauuagcauuuuaa

SEQ ID NO: 60675 - RNA, 22 nt, Homo sapiens
ugagaugauuuaauggagccca

SEQ ID NO: 60676 - RNA, 21 nt, Homo sapiens
acaucagaguugugaagguag

SEQ ID NO: 60677 - RNA, 22 nt, Homo sapiens
cauugcacuuagacaacuuuug

SEQ ID NO: 60678 - RNA, 22 nt, Homo sapiens
ucuugcuuguuguucccuucau

SEQ ID NO: 60679 - RNA, 22 nt, Homo sapiens
ucauaucauuagaucuacugua

SEQ ID NO: 60680 - RNA, 22 nt, Homo sapiens
uugagauggagucucacuccuu

SEQ ID NO: 60681 - RNA, 20 nt, Homo sapiens
cauugcacuccagcuugggc

SEQ ID NO: 60682 - RNA, 22 nt, Homo sapiens
cuggcagugcuuguuauccugg

SEQ ID NO: 60683 - RNA, 17 nt, Homo sapiens
gucuuugguugaguuua

SEQ ID NO: 60684 - RNA, 22 nt, Homo sapiens
uugagauggaguguugcucugu

SEQ ID NO: 60685 - RNA, 22 nt, Homo sapiens
uugagauggagucuugcucucu

SEQ ID NO: 60686 - RNA, 22 nt, Homo sapiens
ggagaugauuaugaaucacuua

SEQ ID NO: 60687 - RNA, 19 nt, Homo sapiens
ugcaaagucuuuuccuauu

SEQ ID NO: 60688 - RNA, 22 nt, Homo sapiens
cacaguugccuaucuccugaag

SEQ ID NO: 60689 - RNA, 22 nt, Homo sapiens
aaguggcauugaggaaaaaaau

SEQ ID NO: 60690 - RNA, 22 nt, Homo sapiens
ggacaagaucuuccaccauuca

SEQ ID NO: 60691 - RNA, 22 nt, Homo sapiens
uuagcacauuuccagcacaugg

SEQ ID NO: 60692 - RNA, 22 nt, Homo sapiens
aucugugaaugaaguuauuuug

SEQ ID NO: 60693 - RNA, 22 nt, Homo sapiens
uuaaggaaggagucuuaaaugg

SEQ ID NO: 60694 - RNA, 22 nt, Homo sapiens
gagaucacuguuuauauucucu

SEQ ID NO: 60695 - RNA, 22 nt, Homo sapiens
ugagaugaaagcagaaagacuu

SEQ ID NO: 60696 - RNA, 19 nt, Homo sapiens
ugugaacaucacagagugu

SEQ ID NO: 60697 - RNA, 22 nt, Homo sapiens
ucacaaguguauagacaugucc

SEQ ID NO: 60698 - RNA, 22 nt, Homo sapiens
cucaguguucccauucuaccuu

SEQ ID NO: 60699 - RNA, 20 nt, Homo sapiens
uggagugaagguucuggacc

SEQ ID NO: 60700 - RNA, 22 nt, Homo sapiens
uauuugguagcuauuuugcagu

SEQ ID NO: 60701 - RNA, 22 nt, Homo sapiens
ggggaauguuaaagaauuugca

SEQ ID NO: 60702 - RNA, 22 nt, Homo sapiens
guaaucucagcuacucaggagg

SEQ ID NO: 60703 - RNA, 22 nt, Homo sapiens
cauugcacuccagcucugggcg

SEQ ID NO: 60704 - RNA, 22 nt, Homo sapiens
gucuguuugauccagaucaaaa

SEQ ID NO: 60705 - RNA, 22 nt, Homo sapiens
uacuguacugcaguucugcaaa

SEQ ID NO: 60706 - RNA, 20 nt, Homo sapiens
aucucugggcaaaggaaaau

SEQ ID NO: 60707 - RNA, 22 nt, Homo sapiens
guggaaaucucugugugacuua

SEQ ID NO: 60708 - RNA, 22 nt, Homo sapiens
uuggagugugcucauaacugcu

SEQ ID NO: 60709 - RNA, 22 nt, Homo sapiens
ucugucuuguccucacccuaga

SEQ ID NO: 60710 - RNA, 22 nt, Homo sapiens
uggcuuuguaagguuucauuuu

SEQ ID NO: 60711 - RNA, 22 nt, Homo sapiens
ugagaucaagguuaauauaauc

SEQ ID NO: 60712 - RNA, 23 nt, Homo sapiens
ucacacuuaagagaaaugcagcu

SEQ ID NO: 60713 - RNA, 22 nt, Homo sapiens
augaucacuguggaaauucagc

SEQ ID NO: 60714 - RNA, 22 nt, Homo sapiens
augugcaagaucauuaaagcuc

SEQ ID NO: 60715 - RNA, 22 nt, Homo sapiens
aauaucacaguggguguacacc

SEQ ID NO: 60716 - RNA, 22 nt, Homo sapiens
gggaaauguaaagucauaagau

SEQ ID NO: 60717 - RNA, 22 nt, Homo sapiens
aauggcuucuuauugugguuca

SEQ ID NO: 60718 - RNA, 22 nt, Homo sapiens
uaaguacuuuacagacauuauc

SEQ ID NO: 60719 - RNA, 22 nt, Homo sapiens
cugaaagagcauguaacacagu

SEQ ID NO: 60720 - RNA, 22 nt, Homo sapiens
uaaagugcugagaugaggcugg

SEQ ID NO: 60721 - RNA, 21 nt, Homo sapiens
ucagaagcucccagggaggac

SEQ ID NO: 60722 - RNA, 22 nt, Homo sapiens
uuauguaaaucaaucuggaauc

SEQ ID NO: 60723 - RNA, 22 nt, Homo sapiens
aaaugcuuucuuggaccauuug

SEQ ID NO: 60724 - RNA, 22 nt, Homo sapiens
cugagcucauuucuuuugcuac

SEQ ID NO: 60725 - RNA, 22 nt, Homo sapiens
uuugguuuuuguuaucacucau

SEQ ID NO: 60726 - RNA, 22 nt, Homo sapiens
uuggcaguaucuacuacagcua

SEQ ID NO: 60727 - RNA, 22 nt, Homo sapiens
acacaguguuuauugugguuag

SEQ ID NO: 60728 - RNA, 20 nt, Homo sapiens
uggaaauuaaccuuucaggu

SEQ ID NO: 60729 - RNA, 22 nt, Homo sapiens
cuggcacagugucagaaacaca

SEQ ID NO: 60730 - RNA, 22 nt, Homo sapiens
gaucacuuugaugccaggaacu

SEQ ID NO: 60731 - RNA, 22 nt, Homo sapiens
uggugagaaaagaugucuuugu

SEQ ID NO: 60732 - RNA, 22 nt, Homo sapiens
ugagaugaguugcgcucugucg

SEQ ID NO: 60733 - RNA, 22 nt, Homo sapiens
ggucagaaagacaggcauucag

SEQ ID NO: 60734 - RNA, 22 nt, Homo sapiens
caacacagugaaacccgucucu

SEQ ID NO: 60735 - RNA, 22 nt, Homo sapiens
ugugccacugcacuccugccug

SEQ ID NO: 60736 - RNA, 22 nt, Homo sapiens
auugcacuccauccugggcaau

SEQ ID NO: 60737 - RNA, 22 nt, Homo sapiens
uggaaguuaaaugacucuuucu

SEQ ID NO: 60738 - RNA, 22 nt, Homo sapiens
uuugaguaggcuuauauuuugg

SEQ ID NO: 60739 - RNA, 22 nt, Homo sapiens
uuggaaauguguuugcauucag

SEQ ID NO: 60740 - RNA, 22 nt, Homo sapiens
uugagauggaguuucgcucuug

SEQ ID NO: 60741 - RNA, 22 nt, Homo sapiens
augucuuucauagagacccaga

SEQ ID NO: 60742 - RNA, 22 nt, Homo sapiens
uugcuccucugccaggaccugu

SEQ ID NO: 60743 - RNA, 22 nt, Homo sapiens
gaaaacugcuucucuggguuuc

SEQ ID NO: 60744 - RNA, 22 nt, Homo sapiens
ucucuggauaucuacuuauguu

SEQ ID NO: 60745 - RNA, 17 nt, Homo sapiens
aaguggcuuguucacca

SEQ ID NO: 60746 - RNA, 22 nt, Homo sapiens
ucuaaguaguagcuggucagaa

SEQ ID NO: 60747 - RNA, 22 nt, Homo sapiens
ugagaugaagucucacucuguc

SEQ ID NO: 60748 - RNA, 20 nt, Homo sapiens
auuccacuuguuugagguac

SEQ ID NO: 60749 - RNA, 22 nt, Homo sapiens
uuggcagugguucugacggacc

SEQ ID NO: 60750 - RNA, 22 nt, Homo sapiens
ugagaugaggucucgcucuguc

SEQ ID NO: 60751 - RNA, 22 nt, Homo sapiens
aagcacccagccucacgccugc

SEQ ID NO: 60752 - RNA, 22 nt, Homo sapiens
auggcacuccagccugggcaac

SEQ ID NO: 60753 - RNA, 22 nt, Homo sapiens
augaggcacugcgcccuacuga

SEQ ID NO: 60754 - RNA, 16 nt, Homo sapiens
uugaggcaugucucag

SEQ ID NO: 60755 - RNA, 22 nt, Homo sapiens
ugcauggauguuugaacacacu

SEQ ID NO: 60756 - RNA, 20 nt, Homo sapiens
cguugcacuccagccugggc

SEQ ID NO: 60757 - RNA, 22 nt, Homo sapiens
auugcacaucugcacuacagcc

SEQ ID NO: 60758 - RNA, 22 nt, Homo sapiens
gcugagaucucuugccugaacu

SEQ ID NO: 60759 - RNA, 23 nt, Homo sapiens
ggaaacauccagucuuucaccau

SEQ ID NO: 60760 - RNA, 22 nt, Homo sapiens
acuuuuguuauacagugugaua

SEQ ID NO: 60761 - RNA, 22 nt, Homo sapiens
cuggcagucugccucuucacug

SEQ ID NO: 60762 - RNA, 22 nt, Homo sapiens
auugcacuccagccugagcaaa

SEQ ID NO: 60763 - RNA, 22 nt, Homo sapiens
caucacuuugccuccgucucua

SEQ ID NO: 60764 - RNA, 22 nt, Homo sapiens
caaugguuuuuuaguauaagua

SEQ ID NO: 60765 - RNA, 22 nt, Homo sapiens
ggagaauugcuuggacccggga

SEQ ID NO: 60766 - RNA, 22 nt, Homo sapiens
ucuuuggugaauggucauccag

SEQ ID NO: 60767 - RNA, 22 nt, Homo sapiens
ugagcugagacaauaaguuuuu

SEQ ID NO: 60768 - RNA, 22 nt, Homo sapiens
aucgcacuccauccugggcaac

SEQ ID NO: 60769 - RNA, 22 nt, Homo sapiens
uugcacuauuaguauagauguc

SEQ ID NO: 60770 - RNA, 22 nt, Homo sapiens
ccugucuugaagagauccuccu

SEQ ID NO: 60771 - RNA, 19 nt, Homo sapiens
agaguauuguuacuucucu

SEQ ID NO: 60772 - RNA, 22 nt, Homo sapiens
uaucacuuugauaguuuaaaug

SEQ ID NO: 60773 - RNA, 22 nt, Homo sapiens
ucuuuguuggaguccaaggaua

SEQ ID NO: 60774 - RNA, 22 nt, Homo sapiens
uucucugggacauaggucgggu

SEQ ID NO: 60775 - RNA, 22 nt, Homo sapiens
gaaugcagcagugacagggcug

SEQ ID NO: 60776 - RNA, 21 nt, Homo sapiens
uuaucccagugucucugcagg

SEQ ID NO: 60777 - RNA, 22 nt, Homo sapiens
ugagaugagaaucaguucuaau

SEQ ID NO: 60778 - RNA, 22 nt, Homo sapiens
gugcuuuguuguggcaguggca

SEQ ID NO: 60779 - RNA, 22 nt, Homo sapiens
auaaauaguaguugugguggcc

SEQ ID NO: 60780 - RNA, 22 nt, Homo sapiens
uugaggcaaugaggagaagcug

SEQ ID NO: 60781 - RNA, 22 nt, Homo sapiens
ucaguagcaugaaaacagacua

SEQ ID NO: 60782 - RNA, 22 nt, Homo sapiens
uacacagucaaaaauuuccagg

SEQ ID NO: 60783 - RNA, 22 nt, Homo sapiens
uacccucuggauacccuuguuc

SEQ ID NO: 60784 - RNA, 22 nt, Homo sapiens
ucuggaauguaaaguuuauggg

SEQ ID NO: 60785 - RNA, 23 nt, Homo sapiens
uuaguaaacucaaugacaccaca

SEQ ID NO: 60786 - RNA, 22 nt, Homo sapiens
ugucaauauguaauaacugaau

SEQ ID NO: 60787 - RNA, 22 nt, Homo sapiens
uucaaaaccucugcuuaagccc

SEQ ID NO: 60788 - RNA, 22 nt, Homo sapiens
gucucugguugcuuuuguacca

SEQ ID NO: 60789 - RNA, 22 nt, Homo sapiens
acuuuguguuacccagcaagga

SEQ ID NO: 60790 - RNA, 22 nt, Homo sapiens
cauugcacuccagccugaggga

SEQ ID NO: 60791 - RNA, 22 nt, Homo sapiens
uugcauaagugcauucugugau

SEQ ID NO: 60792 - RNA, 22 nt, Homo sapiens
acacuauugagguuuguuugca

SEQ ID NO: 60793 - RNA, 18 nt, Homo sapiens
acauucagcuugaagaua

SEQ ID NO: 60794 - RNA, 22 nt, Homo sapiens
auggaaaugaagggcuggcccu

SEQ ID NO: 60795 - RNA, 19 nt, Homo sapiens
uucauacagugagagcagc

SEQ ID NO: 60796 - RNA, 22 nt, Homo sapiens
cuggaauguuccuaaagauuca

SEQ ID NO: 60797 - RNA, 22 nt, Homo sapiens
auaaagacacuuggcaugauuu

SEQ ID NO: 60798 - RNA, 22 nt, Homo sapiens
ugacaagagaccccuccgcagg

SEQ ID NO: 60799 - RNA, 22 nt, Homo sapiens
guggaaugcaguguugauucaa

SEQ ID NO: 60800 - RNA, 18 nt, Homo sapiens
auugcacuccugccuggg

SEQ ID NO: 60801 - RNA, 20 nt, Homo sapiens
agguagauagaugauagaua

SEQ ID NO: 60802 - RNA, 22 nt, Homo sapiens
gucauugcacuccagccuggac

SEQ ID NO: 60803 - RNA, 22 nt, Homo sapiens
ucauugcacuccagccugggug

SEQ ID NO: 60804 - RNA, 22 nt, Homo sapiens
uuugugcaaacuaggauugcga

SEQ ID NO: 60805 - RNA, 22 nt, Homo sapiens
uucagcuacuugggaggcugaa

SEQ ID NO: 60806 - RNA, 22 nt, Homo sapiens
uagugaauguuggcuauuaaua

SEQ ID NO: 60807 - RNA, 22 nt, Homo sapiens
ccauugaacaugaaggaaugug

SEQ ID NO: 60808 - RNA, 22 nt, Homo sapiens
agaugauguuuacugagcauca

SEQ ID NO: 60809 - RNA, 19 nt, Homo sapiens
uuuuggaaaugugaacagc

SEQ ID NO: 60810 - RNA, 22 nt, Homo sapiens
uuaaaaguauaggccuggcaua

SEQ ID NO: 60811 - RNA, 22 nt, Homo sapiens
uucaagaauuaaaguggcuuuu

SEQ ID NO: 60812 - RNA, 20 nt, Homo sapiens
agcuggguguguuggugcau

SEQ ID NO: 60813 - RNA, 22 nt, Homo sapiens
uuguguuuuuaguagggaaggg

SEQ ID NO: 60814 - RNA, 22 nt, Homo sapiens
cagagagcuugcccuuguauau

SEQ ID NO: 60815 - RNA, 22 nt, Homo sapiens
ugugagacugguucugaaccca

SEQ ID NO: 60816 - RNA, 22 nt, Homo sapiens
uugagaagugucuguucauguc

SEQ ID NO: 60817 - RNA, 22 nt, Homo sapiens
aaaagcauucagagugcugggc

SEQ ID NO: 60818 - RNA, 22 nt, Homo sapiens
ugagaugaguugcuggcucuga

SEQ ID NO: 60819 - RNA, 22 nt, Homo sapiens
uuuugcaggcauuggaaguuua

SEQ ID NO: 60820 - RNA, 22 nt, Homo sapiens
uuugccaaugggaauuuuccua

SEQ ID NO: 60821 - RNA, 22 nt, Homo sapiens
uuuugcuugugaauagccacau

SEQ ID NO: 60822 - RNA, 22 nt, Homo sapiens
uuugaagcaauugugaauggga

SEQ ID NO: 60823 - RNA, 20 nt, Homo sapiens
uuugcagaaucuaagaagag

SEQ ID NO: 60824 - RNA, 22 nt, Homo sapiens
uuugcaccuuccuaguggcuga

SEQ ID NO: 60825 - RNA, 22 nt, Homo sapiens
uuugcagagucuuucgcugggc

SEQ ID NO: 60826 - RNA, 22 nt, Homo sapiens
uuuugguguacaauucuaugga

SEQ ID NO: 60827 - RNA, 22 nt, Homo sapiens
uuuuggcucugucuguaucuuu

SEQ ID NO: 60828 - RNA, 21 nt, Homo sapiens
uuuuugggcuuucauaguguu

SEQ ID NO: 60829 - RNA, 22 nt, Homo sapiens
uuaccacagugccugucuaaug

SEQ ID NO: 60830 - RNA, 22 nt, Homo sapiens
uuaccuguguuuugggcccaga

SEQ ID NO: 60831 - RNA, 19 nt, Homo sapiens
uuaaguaguuagagggucu

SEQ ID NO: 60832 - RNA, 22 nt, Homo sapiens
uuaaguagcugggcaugguggu

SEQ ID NO: 60833 - RNA, 22 nt, Homo sapiens
uuaaugaacuuuauuuuguaga

SEQ ID NO: 60834 - RNA, 22 nt, Homo sapiens
uuaauguaauugauugauugac

SEQ ID NO: 60835 - RNA, 22 nt, Homo sapiens
ugugguuuuucacauuuagaga

SEQ ID NO: 60836 - RNA, 22 nt, Homo sapiens
ugugucuugaauuuuguaugua

SEQ ID NO: 60837 - RNA, 22 nt, Homo sapiens
ugugucuacugagaugaucaug

SEQ ID NO: 60838 - RNA, 22 nt, Homo sapiens
ugugcacaauguacagguuagu

SEQ ID NO: 60839 - RNA, 22 nt, Homo sapiens
ugugauugauauauuuacagaa

SEQ ID NO: 60840 - RNA, 22 nt, Homo sapiens
ugugcacauaacauuuuuuuag

SEQ ID NO: 60841 - RNA, 22 nt, Homo sapiens
ugugcaugacagcauacaaacg

SEQ ID NO: 60842 - RNA, 22 nt, Homo sapiens
ugugcacuggaccuugucuucu

SEQ ID NO: 60843 - RNA, 22 nt, Homo sapiens
uuaugucuuugagcaaugcugu

SEQ ID NO: 60844 - RNA, 22 nt, Homo sapiens
uuauuagguuaaccuauagcua

SEQ ID NO: 60845 - RNA, 22 nt, Homo sapiens
uuaugguacaugugcacaaugu

SEQ ID NO: 60846 - RNA, 22 nt, Homo sapiens
uuaugucauuuuuggauguuaa

SEQ ID NO: 60847 - RNA, 22 nt, Homo sapiens
uuaugguuuuuagcagaguaau

SEQ ID NO: 60848 - RNA, 22 nt, Homo sapiens
uucacugggugugguggcucac

SEQ ID NO: 60849 - RNA, 22 nt, Homo sapiens
uucacuguagccucagccucuu

SEQ ID NO: 60850 - RNA, 22 nt, Homo sapiens
uuauugcuaaaucaugaccaca

SEQ ID NO: 60851 - RNA, 22 nt, Homo sapiens
uucaccuguagcaugcccuugg

SEQ ID NO: 60852 - RNA, 22 nt, Homo sapiens
uuauauguuucuuagggacaga

SEQ ID NO: 60853 - RNA, 22 nt, Homo sapiens
uuaucagcagcaugaaacugga

SEQ ID NO: 60854 - RNA, 22 nt, Homo sapiens
uuaugaaguagguuaagagcag

SEQ ID NO: 60855 - RNA, 17 nt, Homo sapiens
uuaugagacuucuuagc

SEQ ID NO: 60856 - RNA, 22 nt, Homo sapiens
uuagggaggcucaggacaagag

SEQ ID NO: 60857 - RNA, 22 nt, Homo sapiens
uggcggagacauggacuucaga

SEQ ID NO: 60858 - RNA, 22 nt, Homo sapiens
uggcuagaugagauguacugca

SEQ ID NO: 60859 - RNA, 22 nt, Homo sapiens
uggcuguuuauuucaccugggc

SEQ ID NO: 60860 - RNA, 22 nt, Homo sapiens
uggcucauuucuaaacccagcu

SEQ ID NO: 60861 - RNA, 22 nt, Homo sapiens
uggcuguuuauuucaccuggau

SEQ ID NO: 60862 - RNA, 20 nt, Homo sapiens
uggugucuuggaaagagcuc

SEQ ID NO: 60863 - RNA, 22 nt, Homo sapiens
uggugcuugaugaggguggagc

SEQ ID NO: 60864 - RNA, 22 nt, Homo sapiens
uggugcaaauguaauugugguu

SEQ ID NO: 60865 - RNA, 22 nt, Homo sapiens
ugguucaguugcacaggcuguu

SEQ ID NO: 60866 - RNA, 22 nt, Homo sapiens
uguaaaaagcccagccgcugag

SEQ ID NO: 60867 - RNA, 22 nt, Homo sapiens
ugguuguuuuaaaugucgucug

SEQ ID NO: 60868 - RNA, 22 nt, Homo sapiens
uguaagcauugggcaugcaguc

SEQ ID NO: 60869 - RNA, 22 nt, Homo sapiens
uguaauaguaggcucacauuug

SEQ ID NO: 60870 - RNA, 21 nt, Homo sapiens
uguaacugcaaaccucagauu

SEQ ID NO: 60871 - RNA, 22 nt, Homo sapiens
uguaacaguaguuacuauucuu

SEQ ID NO: 60872 - RNA, 20 nt, Homo sapiens
uguaacaaucuggauguugc

SEQ ID NO: 60873 - RNA, 22 nt, Homo sapiens
uguaaacuaugagcugauuauu

SEQ ID NO: 60874 - RNA, 21 nt, Homo sapiens
uguauacauggaagaaugguc

SEQ ID NO: 60875 - RNA, 21 nt, Homo sapiens
uguauacauauguuaggugca

SEQ ID NO: 60876 - RNA, 20 nt, Homo sapiens
uguagguguacaguaaggag

SEQ ID NO: 60877 - RNA, 22 nt, Homo sapiens
uguagauaucauuagugcugug

SEQ ID NO: 60878 - RNA, 22 nt, Homo sapiens
uguagauaucuaucaggucaau

SEQ ID NO: 60879 - RNA, 22 nt, Homo sapiens
ugucaacauuuaucaaguuauu

SEQ ID NO: 60880 - RNA, 22 nt, Homo sapiens
uguauguagugaccagggccag

SEQ ID NO: 60881 - RNA, 22 nt, Homo sapiens
uguauguuguaagacuuagacc

SEQ ID NO: 60882 - RNA, 22 nt, Homo sapiens
uguauguugggucaaaguacau

SEQ ID NO: 60883 - RNA, 22 nt, Homo sapiens
ugucaaacauuaugaugcucua

SEQ ID NO: 60884 - RNA, 22 nt, Homo sapiens
ugucccaguuggguauugaauu

SEQ ID NO: 60885 - RNA, 22 nt, Homo sapiens
ugucccguuuucgaggcugcag

SEQ ID NO: 60886 - RNA, 22 nt, Homo sapiens
ugucaguuucuugagauggaac

SEQ ID NO: 60887 - RNA, 21 nt, Homo sapiens
ugucaguuuccagaguucaac

SEQ ID NO: 60888 - RNA, 18 nt, Homo sapiens
ugucacuggauaaugguc

SEQ ID NO: 60889 - RNA, 18 nt, Homo sapiens
ugucagaguggauuguaa

SEQ ID NO: 60890 - RNA, 22 nt, Homo sapiens
ugucacccuuuauccauuuccu

SEQ ID NO: 60891 - RNA, 22 nt, Homo sapiens
ugucacagagauuuugguaugu

SEQ ID NO: 60892 - RNA, 22 nt, Homo sapiens
ugucacugugaguuugacugcu

SEQ ID NO: 60893 - RNA, 22 nt, Homo sapiens
ugugagaaaugcagaaucucag

SEQ ID NO: 60894 - RNA, 22 nt, Homo sapiens
ugugagacugguucugaaccca

SEQ ID NO: 60895 - RNA, 22 nt, Homo sapiens
ugugagacugacagggcagggu

SEQ ID NO: 60896 - RNA, 22 nt, Homo sapiens
ugugaguguguacuaguuauca

SEQ ID NO: 60897 - RNA, 22 nt, Homo sapiens
ugucuagaucugaauguaauug

SEQ ID NO: 60898 - RNA, 22 nt, Homo sapiens
uguccguuuuggcuuucucccu

SEQ ID NO: 60899 - RNA, 22 nt, Homo sapiens
uguccguuuuguuucaggcuca

SEQ ID NO: 60900 - RNA, 21 nt, Homo sapiens
ugucugagagaggagaucuac

SEQ ID NO: 60901 - RNA, 22 nt, Homo sapiens
uugcaggcaugagccaccgugc

SEQ ID NO: 60902 - RNA, 22 nt, Homo sapiens
uugcacugagauuuugcuuaca

SEQ ID NO: 60903 - RNA, 22 nt, Homo sapiens
uugcacuugcugaggagugauu

SEQ ID NO: 60904 - RNA, 22 nt, Homo sapiens
uugcagagccccacacugggcu

SEQ ID NO: 60905 - RNA, 22 nt, Homo sapiens
uugaggaaugugauuucaaaua

SEQ ID NO: 60906 - RNA, 16 nt, Homo sapiens
uugaggcaugucucag

SEQ ID NO: 60907 - RNA, 21 nt, Homo sapiens
uugagcaacuaggguuauagg

SEQ ID NO: 60908 - RNA, 22 nt, Homo sapiens
uugaaugaaaugaugucauuug

SEQ ID NO: 60909 - RNA, 22 nt, Homo sapiens
uugaaaguguucacaaugguau

SEQ ID NO: 60910 - RNA, 22 nt, Homo sapiens
uugaaagucuaggcuuacagua

SEQ ID NO: 60911 - RNA, 22 nt, Homo sapiens
uucauggaauauugaccauuuu

SEQ ID NO: 60912 - RNA, 22 nt, Homo sapiens
uucaucuggcaauucagagauu

SEQ ID NO: 60913 - RNA, 22 nt, Homo sapiens
uucacugugcuuaaauucugcu

SEQ ID NO: 60914 - RNA, 22 nt, Homo sapiens
uugggucaguuccuugacuccu

SEQ ID NO: 60915 - RNA, 22 nt, Homo sapiens
uuggggcacggccucuguugcc

SEQ ID NO: 60916 - RNA, 22 nt, Homo sapiens
uugggccacuuuaguuuccuua

SEQ ID NO: 60917 - RNA, 22 nt, Homo sapiens
uuggcuuuuaugcagcuuaggu

SEQ ID NO: 60918 - RNA, 22 nt, Homo sapiens
uugcuaguguuugguugauggu

SEQ ID NO: 60919 - RNA, 22 nt, Homo sapiens
uugcgcuuuuccuauguugccc

SEQ ID NO: 60920 - RNA, 22 nt, Homo sapiens
uuggaaaaauccaccuugaucu

SEQ ID NO: 60921 - RNA, 22 nt, Homo sapiens
uugcuuuguugucuggggaaua

SEQ ID NO: 60922 - RNA, 22 nt, Homo sapiens
uuguaaagaucauaugcuguuc

SEQ ID NO: 60923 - RNA, 22 nt, Homo sapiens
uuggucucuuaaucacacuuuu

SEQ ID NO: 60924 - RNA, 22 nt, Homo sapiens
uugguccccacuccccugccaa

SEQ ID NO: 60925 - RNA, 22 nt, Homo sapiens
uugguccccuucaaccagcugu

SEQ ID NO: 60926 - RNA, 23 nt, Homo sapiens
uuguaacuggagaguaacauucc

SEQ ID NO: 60927 - RNA, 22 nt, Homo sapiens
uugucauggucuugauccauua

SEQ ID NO: 60928 - RNA, 22 nt, Homo sapiens
uuguccuugagauaguuugcag

SEQ ID NO: 60929 - RNA, 22 nt, Homo sapiens
uuguaauguuaccaaauggugu

SEQ ID NO: 60930 - RNA, 22 nt, Homo sapiens
uuguaaucaacacaucauuggg

SEQ ID NO: 60931 - RNA, 22 nt, Homo sapiens
uuguaaaguucuuaggaagcuc

SEQ ID NO: 60932 - RNA, 22 nt, Homo sapiens
uugucaccucuaaaucucauau

SEQ ID NO: 60933 - RNA, 22 nt, Homo sapiens
uuuauccagccucuagcaaggu

SEQ ID NO: 60934 - RNA, 22 nt, Homo sapiens
uuuaugagguagagugguuuau

SEQ ID NO: 60935 - RNA, 19 nt, Homo sapiens
uuucacacucgccuacuuc

SEQ ID NO: 60936 - RNA, 22 nt, Homo sapiens
uuuagguaauauuaaguagcug

SEQ ID NO: 60937 - RNA, 21 nt, Homo sapiens
uuucugggggagcauggcagg

SEQ ID NO: 60938 - RNA, 22 nt, Homo sapiens
uuuaagccaggugcaguggcuc

SEQ ID NO: 60939 - RNA, 22 nt, Homo sapiens
uugugguuuuaucuaccuuugg

SEQ ID NO: 60940 - RNA, 21 nt, Homo sapiens
uuuacuguggacccauugcuu

SEQ ID NO: 60941 - RNA, 22 nt, Homo sapiens
uuuaauguuacaguauugguau

SEQ ID NO: 60942 - RNA, 22 nt, Homo sapiens
uuuaaugcacuaggugguguuc

SEQ ID NO: 60943 - RNA, 22 nt, Homo sapiens
uugugcuuuuuaaauagcuucc

SEQ ID NO: 60944 - RNA, 22 nt, Homo sapiens
uuguccuugagauaguuugcug

SEQ ID NO: 60945 - RNA, 22 nt, Homo sapiens
uugucuugcagcuuaggcauca

SEQ ID NO: 60946 - RNA, 19 nt, Homo sapiens
uugugggaggacagagggg

SEQ ID NO: 60947 - RNA, 22 nt, Homo sapiens
uugugguugaugaagacugucu

SEQ ID NO: 60948 - RNA, 22 nt, Homo sapiens
uugugguugacuaaauuuguaa

SEQ ID NO: 60949 - RNA, 22 nt, Homo sapiens
uuuuacacuguugguuggaaug

SEQ ID NO: 60950 - RNA, 22 nt, Homo sapiens
uuuuaguggaauauuuacaguu

SEQ ID NO: 60951 - RNA, 22 nt, Homo sapiens
aaguaaacauuuuguacaauaa

SEQ ID NO: 60952 - RNA, 22 nt, Homo sapiens
aaguaaacauugagagacaaga

SEQ ID NO: 60953 - RNA, 22 nt, Homo sapiens
aaguaagcauccaauaaauguu

SEQ ID NO: 60954 - RNA, 22 nt, Homo sapiens
aaggugcuguaagcauccaugu

SEQ ID NO: 60955 - RNA, 17 nt, Homo sapiens
aaggugcuucgaccucc

SEQ ID NO: 60956 - RNA, 22 nt, Homo sapiens
aagguggaguugacaauuuuca

SEQ ID NO: 60957 - RNA, 18 nt, Homo sapiens
aaggugcuucuguucuga

SEQ ID NO: 60958 - RNA, 22 nt, Homo sapiens
aagugcuucuuuccucgagaag

SEQ ID NO: 60959 - RNA, 22 nt, Homo sapiens
aagugcucuugugggaagagag

SEQ ID NO: 60960 - RNA, 22 nt, Homo sapiens
aagugcuggccuacucaaucga

SEQ ID NO: 60961 - RNA, 23 nt, Homo sapiens
aagugagcuccaauugggugaga

SEQ ID NO: 60962 - RNA, 22 nt, Homo sapiens
aaguauuagcuaauugugcuua

SEQ ID NO: 60963 - RNA, 22 nt, Homo sapiens
aagucauggagaagguggaggu

SEQ ID NO: 60964 - RNA, 22 nt, Homo sapiens
aagugacauugugcccauuuga

SEQ ID NO: 60965 - RNA, 19 nt, Homo sapiens
aauaaugccagaugucugu

SEQ ID NO: 60966 - RNA, 22 nt, Homo sapiens
aauaauggcaccaaagcacaag

SEQ ID NO: 60967 - RNA, 22 nt, Homo sapiens
aauaagaaguggaagggaccgg

SEQ ID NO: 60968 - RNA, 22 nt, Homo sapiens
aauacucaguccuggugaggcu

SEQ ID NO: 60969 - RNA, 22 nt, Homo sapiens
aauaagcauaguaccugauagg

SEQ ID NO: 60970 - RNA, 20 nt, Homo sapiens
aauaacagccccagggaggu

SEQ ID NO: 60971 - RNA, 22 nt, Homo sapiens
aauaaagucugaagugugcuua

SEQ ID NO: 60972 - RNA, 22 nt, Homo sapiens
aauaaagcaggguccuugcacu

SEQ ID NO: 60973 - RNA, 22 nt, Homo sapiens
aaguguaugaaacaguccaugg

SEQ ID NO: 60974 - RNA, 22 nt, Homo sapiens
aaguggcauugaggaaaaaaau

SEQ ID NO: 60975 - RNA, 22 nt, Homo sapiens
aagugcucuugaaacugucuua

SEQ ID NO: 60976 - RNA, 21 nt, Homo sapiens
acaguaguaauaguguagcca

SEQ ID NO: 60977 - RNA, 22 nt, Homo sapiens
acaguagcgcaaucucggcuca

SEQ ID NO: 60978 - RNA, 19 nt, Homo sapiens
acaguauugugcacagguu

SEQ ID NO: 60979 - RNA, 22 nt, Homo sapiens
acacuguaacucuuugagggca

SEQ ID NO: 60980 - RNA, 22 nt, Homo sapiens
acacuauugagguuuguuugca

SEQ ID NO: 60981 - RNA, 18 nt, Homo sapiens
acagugcugucacugcuu

SEQ ID NO: 60982 - RNA, 22 nt, Homo sapiens
acagucacaauuuguaccuuuu

SEQ ID NO: 60983 - RNA, 22 nt, Homo sapiens
acacuggaguuaaaggugauuu

SEQ ID NO: 60984 - RNA, 22 nt, Homo sapiens
acagugcuuucaauguucagua

SEQ ID NO: 60985 - RNA, 22 nt, Homo sapiens
acagugcuguggucaugggucu

SEQ ID NO: 60986 - RNA, 22 nt, Homo sapiens
acagugcuucugauaugaugcc

SEQ ID NO: 60987 - RNA, 22 nt, Homo sapiens
acaccauugcauuccagccugg

SEQ ID NO: 60988 - RNA, 22 nt, Homo sapiens
acacaugugcguagacucuuua

SEQ ID NO: 60989 - RNA, 22 nt, Homo sapiens
acacaguguuuauugugguuag

SEQ ID NO: 60990 - RNA, 22 nt, Homo sapiens
acacaguaagcacaguguagau

SEQ ID NO: 60991 - RNA, 22 nt, Homo sapiens
acaauguauauuuuacuguagg

SEQ ID NO: 60992 - RNA, 22 nt, Homo sapiens
acacaaugguaaguguuugugu

SEQ ID NO: 60993 - RNA, 22 nt, Homo sapiens
aauggcacaccuagcccuaacc

SEQ ID NO: 60994 - RNA, 22 nt, Homo sapiens
aauggcuauuucaugugguagg

SEQ ID NO: 60995 - RNA, 22 nt, Homo sapiens
aauggcaucuagaguggugaau

SEQ ID NO: 60996 - RNA, 19 nt, Homo sapiens
aauggcuuuuccuguuccc

SEQ ID NO: 60997 - RNA, 22 nt, Homo sapiens
aaugugcuguucagaggagucc

SEQ ID NO: 60998 - RNA, 22 nt, Homo sapiens
aaugucacugugguccuccagu

SEQ ID NO: 60999 - RNA, 22 nt, Homo sapiens
aaucagcacacugugcuuucca

SEQ ID NO: 61000 - RNA, 22 nt, Homo sapiens
aaucaccaugcacuacagccuu

SEQ ID NO: 61001 - RNA, 22 nt, Homo sapiens
aauagcauugaaucuaccaauu

SEQ ID NO: 61002 - RNA, 22 nt, Homo sapiens
acugcacuccaguuccgggcaa

SEQ ID NO: 61003 - RNA, 22 nt, Homo sapiens
acugcacuccggccuggcaaca

SEQ ID NO: 61004 - RNA, 22 nt, Homo sapiens
acugcacuccaaccuuggugac

SEQ ID NO: 61005 - RNA, 22 nt, Homo sapiens
acugcacuccagccuugcgaca

SEQ ID NO: 61006 - RNA, 22 nt, Homo sapiens
acugcacuccagccuugugaca

SEQ ID NO: 61007 - RNA, 22 nt, Homo sapiens
acugcauaaauauguguaauau

SEQ ID NO: 61008 - RNA, 22 nt, Homo sapiens
acugcacugcagccuggccaac

SEQ ID NO: 61009 - RNA, 23 nt, Homo sapiens
agaaaugucuauucagggucccu

SEQ ID NO: 61010 - RNA, 22 nt, Homo sapiens
agaaccauuagagggagauauu

SEQ ID NO: 61011 - RNA, 22 nt, Homo sapiens
agaaacauucucuugccuccuu

SEQ ID NO: 61012 - RNA, 20 nt, Homo sapiens
acuuuuugaugaggucguuu

SEQ ID NO: 61013 - RNA, 22 nt, Homo sapiens
acucuguauaaacauugcugua

SEQ ID NO: 61014 - RNA, 22 nt, Homo sapiens
acugagucauugggugcccaga

SEQ ID NO: 61015 - RNA, 21 nt, Homo sapiens
acccccacaccuccuuaguuc

SEQ ID NO: 61016 - RNA, 22 nt, Homo sapiens
acccaguguucaacauucacau

SEQ ID NO: 61017 - RNA, 22 nt, Homo sapiens
acuccacuuucaccacagcgga

SEQ ID NO: 61018 - RNA, 18 nt, Homo sapiens
acaguguguaaggguucu

SEQ ID NO: 61019 - RNA, 19 nt, Homo sapiens
acagugucucuauaaugau

SEQ ID NO: 61020 - RNA, 22 nt, Homo sapiens
accaccacucccgcauucuaaa

SEQ ID NO: 61021 - RNA, 22 nt, Homo sapiens
accacguagaugagagaguuaa

SEQ ID NO: 61022 - RNA, 18 nt, Homo sapiens
agaugguguugcuucugu

SEQ ID NO: 61023 - RNA, 22 nt, Homo sapiens
agcaagaugaaguugagcuagg

SEQ ID NO: 61024 - RNA, 22 nt, Homo sapiens
agcaauaugacauugcuacauc

SEQ ID NO: 61025 - RNA, 22 nt, Homo sapiens
agcaccaauaacaguuucuagc

SEQ ID NO: 61026 - RNA, 22 nt, Homo sapiens
agcaacauagaaauuugggugg

SEQ ID NO: 61027 - RNA, 22 nt, Homo sapiens
agcaaccagaggagaugaggcu

SEQ ID NO: 61028 - RNA, 22 nt, Homo sapiens
agcacacuggguggcuuaaaca

SEQ ID NO: 61029 - RNA, 22 nt, Homo sapiens
agcagcuuugcauggccugugg

SEQ ID NO: 61030 - RNA, 22 nt, Homo sapiens
agagacauugcuccaacucacc

SEQ ID NO: 61031 - RNA, 22 nt, Homo sapiens
agagauaguuuccaacucauac

SEQ ID NO: 61032 - RNA, 22 nt, Homo sapiens
agauaugucugcuauuugcugu

SEQ ID NO: 61033 - RNA, 22 nt, Homo sapiens
agaucacagucuuugguuuuag

SEQ ID NO: 61034 - RNA, 22 nt, Homo sapiens
agagugcaauggcaccaucucg

SEQ ID NO: 61035 - RNA, 20 nt, Homo sapiens
agacaguguggagauuccuu

SEQ ID NO: 61036 - RNA, 21 nt, Homo sapiens
agacacuuggaagguuuuaga

SEQ ID NO: 61037 - RNA, 22 nt, Homo sapiens
agagaacugauucagggaaaau

SEQ ID NO: 61038 - RNA, 22 nt, Homo sapiens
agacuagacagaugaacagcac

SEQ ID NO: 61039 - RNA, 22 nt, Homo sapiens
agacaucauuugauggugggag

SEQ ID NO: 61040 - RNA, 22 nt, Homo sapiens
agaacuguccauucagcaugaa

SEQ ID NO: 61041 - RNA, 20 nt, Homo sapiens
agaagcauugcucucuucag

SEQ ID NO: 61042 - RNA, 22 nt, Homo sapiens
agaaugucagcuggauucagcu

SEQ ID NO: 61043 - RNA, 22 nt, Homo sapiens
agacaagauggcuugagguuca

SEQ ID NO: 61044 - RNA, 22 nt, Homo sapiens
auagccucauucuucagaugag

SEQ ID NO: 61045 - RNA, 22 nt, Homo sapiens
auauccaugccauagguuuuga

SEQ ID NO: 61046 - RNA, 22 nt, Homo sapiens
auaucacagguguuuaccugau

SEQ ID NO: 61047 - RNA, 20 nt, Homo sapiens
auaugcagacacauacauac

SEQ ID NO: 61048 - RNA, 22 nt, Homo sapiens
auagcaucauuucuugaaaaga

SEQ ID NO: 61049 - RNA, 22 nt, Homo sapiens
auagcagugugaaaauugacug

SEQ ID NO: 61050 - RNA, 22 nt, Homo sapiens
auaaaugcaaugguauuuuuga

SEQ ID NO: 61051 - RNA, 22 nt, Homo sapiens
auaaaguucugcuggcauauau

SEQ ID NO: 61052 - RNA, 22 nt, Homo sapiens
auaacagcauuauugcauacgu

SEQ ID NO: 61053 - RNA, 22 nt, Homo sapiens
agugguuuuaaguagagcauac

SEQ ID NO: 61054 - RNA, 22 nt, Homo sapiens
agugguuuuggaauggaauuca

SEQ ID NO: 61055 - RNA, 23 nt, Homo sapiens
aguggucuccugggcccagcugu

SEQ ID NO: 61056 - RNA, 22 nt, Homo sapiens
auaaagcaaauaggacuauugc

SEQ ID NO: 61057 - RNA, 22 nt, Homo sapiens
auacaugugccauggugguuug

SEQ ID NO: 61058 - RNA, 22 nt, Homo sapiens
auacauguucaagggcauauau

SEQ ID NO: 61059 - RNA, 22 nt, Homo sapiens
auacccaguaguggaauugcua

SEQ ID NO: 61060 - RNA, 22 nt, Homo sapiens
auacuggcuuuccaauugugau

SEQ ID NO: 61061 - RNA, 22 nt, Homo sapiens
auacugguuuuugucaugugga

SEQ ID NO: 61062 - RNA, 22 nt, Homo sapiens
aguggcuuuuuaguggcagaug

SEQ ID NO: 61063 - RNA, 19 nt, Homo sapiens
aguggguguuuucuguuug

SEQ ID NO: 61064 - RNA, 22 nt, Homo sapiens
agugaucauuugaauugaugau

SEQ ID NO: 61065 - RNA, 22 nt, Homo sapiens
agugcauuugcaucucaauaua

SEQ ID NO: 61066 - RNA, 22 nt, Homo sapiens
agucagugcauaagaaugaagu

SEQ ID NO: 61067 - RNA, 22 nt, Homo sapiens
agucacaugcauuuucuucaau

SEQ ID NO: 61068 - RNA, 22 nt, Homo sapiens
agucacggugguuugcacuugu

SEQ ID NO: 61069 - RNA, 22 nt, Homo sapiens
agugacuagaauaugaauuuua

SEQ ID NO: 61070 - RNA, 22 nt, Homo sapiens
agucaugggagagaugugaucg

SEQ ID NO: 61071 - RNA, 22 nt, Homo sapiens
auggcacagaguagaugcucaa

SEQ ID NO: 61072 - RNA, 22 nt, Homo sapiens
auggcagcaccccacucuacug

SEQ ID NO: 61073 - RNA, 22 nt, Homo sapiens
auggaacuggagaugguuauau

SEQ ID NO: 61074 - RNA, 22 nt, Homo sapiens
auggaaacauaagaguauagau

SEQ ID NO: 61075 - RNA, 22 nt, Homo sapiens
augcuggugguucacaugcgca

SEQ ID NO: 61076 - RNA, 22 nt, Homo sapiens
augcccauuuguuuucugaaag

SEQ ID NO: 61077 - RNA, 22 nt, Homo sapiens
augauguguguuuaagaugucu

SEQ ID NO: 61078 - RNA, 20 nt, Homo sapiens
augcaaacccugcuuugugg

SEQ ID NO: 61079 - RNA, 22 nt, Homo sapiens
augacaaugaaucccuguuuca

SEQ ID NO: 61080 - RNA, 22 nt, Homo sapiens
augacaguguggauuauuguaa

SEQ ID NO: 61081 - RNA, 22 nt, Homo sapiens
augacauugaaaagcaagugga

SEQ ID NO: 61082 - RNA, 22 nt, Homo sapiens
aucgugucuggcccugaaugcu

SEQ ID NO: 61083 - RNA, 20 nt, Homo sapiens
aucguggccugaggagauac

SEQ ID NO: 61084 - RNA, 22 nt, Homo sapiens
aucuccaggugccagcugcgcc

SEQ ID NO: 61085 - RNA, 22 nt, Homo sapiens
auccuguagagaugagggugga

SEQ ID NO: 61086 - RNA, 22 nt, Homo sapiens
auccugaagcuuuacugaauuc

SEQ ID NO: 61087 - RNA, 22 nt, Homo sapiens
aucuuguguugaauggugcaga

SEQ ID NO: 61088 - RNA, 22 nt, Homo sapiens
aucuggcuccuuuugacaaugc

SEQ ID NO: 61089 - RNA, 22 nt, Homo sapiens
auauguauuuuaacguguaagg

SEQ ID NO: 61090 - RNA, 22 nt, Homo sapiens
aucagaaucucuagugggacca

SEQ ID NO: 61091 - RNA, 22 nt, Homo sapiens
auccagaugggcuuaauguaau

SEQ ID NO: 61092 - RNA, 22 nt, Homo sapiens
auccaguuuuaggagauuucua

SEQ ID NO: 61093 - RNA, 22 nt, Homo sapiens
aucccugaggaauuucugcacu

SEQ ID NO: 61094 - RNA, 22 nt, Homo sapiens
aucccuguaacuagcagccccu

SEQ ID NO: 61095 - RNA, 22 nt, Homo sapiens
cuguaaaguucucauuguagcc

SEQ ID NO: 61096 - RNA, 22 nt, Homo sapiens
cuguagacauuaggccugcacu

SEQ ID NO: 61097 - RNA, 22 nt, Homo sapiens
cuggauguaaaugaaacuacag

SEQ ID NO: 61098 - RNA, 22 nt, Homo sapiens
cuguuugaggguuugcuuucag

SEQ ID NO: 61099 - RNA, 22 nt, Homo sapiens
cugucuagagggcacaugaugc

SEQ ID NO: 61100 - RNA, 22 nt, Homo sapiens
cugucuggaguccuucgugugc

SEQ ID NO: 61101 - RNA, 22 nt, Homo sapiens
cuguuauguuugauggaugaau

SEQ ID NO: 61102 - RNA, 22 nt, Homo sapiens
cugucuaugagccaggaagcca

SEQ ID NO: 61103 - RNA, 22 nt, Homo sapiens
cuguaugugagaaauaauaagu

SEQ ID NO: 61104 - RNA, 19 nt, Homo sapiens
cuuaggugaccaguuccca

SEQ ID NO: 61105 - RNA, 22 nt, Homo sapiens
cuuaagcauugacuuuggacag

SEQ ID NO: 61106 - RNA, 22 nt, Homo sapiens
cuugugcaugaccccagguggg

SEQ ID NO: 61107 - RNA, 18 nt, Homo sapiens
cuucauugcuguuuugcu

SEQ ID NO: 61108 - RNA, 20 nt, Homo sapiens
cuuggcuuucuugguguuaa

SEQ ID NO: 61109 - RNA, 22 nt, Homo sapiens
cuuggcuucuuuauguggcuau

SEQ ID NO: 61110 - RNA, 22 nt, Homo sapiens
cuuuaguugucuccucaagggu

SEQ ID NO: 61111 - RNA, 22 nt, Homo sapiens
cuuuaugagguuggauggaucu

SEQ ID NO: 61112 - RNA, 22 nt, Homo sapiens
cuuuggcauuagccuguauaga

SEQ ID NO: 61113 - RNA, 18 nt, Homo sapiens
cuuugcagcuuccagagg

SEQ ID NO: 61114 - RNA, 22 nt, Homo sapiens
cuacuauguagagauauugaau

SEQ ID NO: 61115 - RNA, 22 nt, Homo sapiens
cuacugcacaucaucugaguua

SEQ ID NO: 61116 - RNA, 22 nt, Homo sapiens
cuagaagguaagagcuggaugc

SEQ ID NO: 61117 - RNA, 22 nt, Homo sapiens
cuaugucuuucauauuuugggg

SEQ ID NO: 61118 - RNA, 22 nt, Homo sapiens
cuauuagguuggggcgaaagua

SEQ ID NO: 61119 - RNA, 22 nt, Homo sapiens
cuauuagguuggugcaaaaguc

SEQ ID NO: 61120 - RNA, 22 nt, Homo sapiens
cuauuagguuggugcaaaagua

SEQ ID NO: 61121 - RNA, 22 nt, Homo sapiens
cucacaugcucaccugguguuc

SEQ ID NO: 61122 - RNA, 22 nt, Homo sapiens
cucaccuugugauccacccacc

SEQ ID NO: 61123 - RNA, 22 nt, Homo sapiens
cugagacuggugauuuaugaag

SEQ ID NO: 61124 - RNA, 22 nt, Homo sapiens
cugagcacugagauccucuagc

SEQ ID NO: 61125 - RNA, 22 nt, Homo sapiens
cugagcaucauggcagaaucuu

SEQ ID NO: 61126 - RNA, 22 nt, Homo sapiens
cugaggugauauauacauauuu

SEQ ID NO: 61127 - RNA, 22 nt, Homo sapiens
cugaggacaucagggaagcauc

SEQ ID NO: 61128 - RNA, 22 nt, Homo sapiens
cugaugaaguauuuguucugga

SEQ ID NO: 61129 - RNA, 22 nt, Homo sapiens
cugaucuguuauacuuuucuau

SEQ ID NO: 61130 - RNA, 22 nt, Homo sapiens
cugaucuguagcagccaccaca

SEQ ID NO: 61131 - RNA, 22 nt, Homo sapiens
cugauacugagaccuuggguua

SEQ ID NO: 61132 - RNA, 20 nt, Homo sapiens
cugauacagccugagcucuc

SEQ ID NO: 61133 - RNA, 20 nt, Homo sapiens
cugaggugggagaaucgcuu

SEQ ID NO: 61134 - RNA, 22 nt, Homo sapiens
cugaggugggaggauuacuuga

SEQ ID NO: 61135 - RNA, 22 nt, Homo sapiens
cugcagaucuuggggcuugcca

SEQ ID NO: 61136 - RNA, 19 nt, Homo sapiens
cugcacugagaaaaggagg

SEQ ID NO: 61137 - RNA, 22 nt, Homo sapiens
gauauguucugagaaaugcauu

SEQ ID NO: 61138 - RNA, 22 nt, Homo sapiens
gagugcaaagguccugaggugg

SEQ ID NO: 61139 - RNA, 22 nt, Homo sapiens
gagugcaauggugcuaucucgg

SEQ ID NO: 61140 - RNA, 22 nt, Homo sapiens
gagugcaauggcaccgucucgg

SEQ ID NO: 61141 - RNA, 22 nt, Homo sapiens
gagugcaauggcaugaucuggg

SEQ ID NO: 61142 - RNA, 22 nt, Homo sapiens
gagugcaauggcaugaucuugg

SEQ ID NO: 61143 - RNA, 22 nt, Homo sapiens
gagugcaauggcaagaucuugg

SEQ ID NO: 61144 - RNA, 22 nt, Homo sapiens
gagauguuuguuucacugucac

SEQ ID NO: 61145 - RNA, 22 nt, Homo sapiens
gagaugugguucaaggguguuu

SEQ ID NO: 61146 - RNA, 22 nt, Homo sapiens
gagauguaagaauuuauuuguu

SEQ ID NO: 61147 - RNA, 22 nt, Homo sapiens
gagauucaucuagguccagaga

SEQ ID NO: 61148 - RNA, 22 nt, Homo sapiens
gaggucuuacauuuuaauauuu

SEQ ID NO: 61149 - RNA, 22 nt, Homo sapiens
gaggucaugucgggccccagga

SEQ ID NO: 61150 - RNA, 22 nt, Homo sapiens
gauguguuuuaggaucucagca

SEQ ID NO: 61151 - RNA, 22 nt, Homo sapiens
gauguguuuccaggauuuguuu

SEQ ID NO: 61152 - RNA, 22 nt, Homo sapiens
gauggcucugcaggugagggua

SEQ ID NO: 61153 - RNA, 22 nt, Homo sapiens
gaugguuuucaccugcaugcuu

SEQ ID NO: 61154 - RNA, 22 nt, Homo sapiens
gauggugucccaggcucaggcu

SEQ ID NO: 61155 - RNA, 22 nt, Homo sapiens
gaucaguuucuggagauacgua

SEQ ID NO: 61156 - RNA, 22 nt, Homo sapiens
gaucucaguggauacugugaug

SEQ ID NO: 61157 - RNA, 22 nt, Homo sapiens
gagaacuaaugauguacuaggc

SEQ ID NO: 61158 - RNA, 22 nt, Homo sapiens
gagacugagucucgcucugccg

SEQ ID NO: 61159 - RNA, 22 nt, Homo sapiens
gagacauguuugcuuaucugag

SEQ ID NO: 61160 - RNA, 22 nt, Homo sapiens
gagaaugaacagacugccucuu

SEQ ID NO: 61161 - RNA, 22 nt, Homo sapiens
gagacggagucucgcucuguca

SEQ ID NO: 61162 - RNA, 22 nt, Homo sapiens
gagaucacuucuguauucuaca

SEQ ID NO: 61163 - RNA, 22 nt, Homo sapiens
gagaucauucugauccagaguc

SEQ ID NO: 61164 - RNA, 22 nt, Homo sapiens
gagaucuuggccaaguuucuua

SEQ ID NO: 61165 - RNA, 22 nt, Homo sapiens
gagaugauuugccccauguauu

SEQ ID NO: 61166 - RNA, 22 nt, Homo sapiens
gagaugcaccuugucacguuuc

SEQ ID NO: 61167 - RNA, 22 nt, Homo sapiens
gagaggucguauaugauuucug

SEQ ID NO: 61168 - RNA, 22 nt, Homo sapiens
gagauaaauaggucacaguucu

SEQ ID NO: 61169 - RNA, 22 nt, Homo sapiens
gaaugguaaacuuccaugacug

SEQ ID NO: 61170 - RNA, 22 nt, Homo sapiens
cuuuguggggucuuuccucaaa

SEQ ID NO: 61171 - RNA, 22 nt, Homo sapiens
gaauucugucgcuuacuagaug

SEQ ID NO: 61172 - RNA, 22 nt, Homo sapiens
cuuugguggagucuuuagguuc

SEQ ID NO: 61173 - RNA, 22 nt, Homo sapiens
cuuuggugauagauaccccaua

SEQ ID NO: 61174 - RNA, 22 nt, Homo sapiens
gacagacacaauugauccauga

SEQ ID NO: 61175 - RNA, 22 nt, Homo sapiens
gacagagcaagacccuauuuaa

SEQ ID NO: 61176 - RNA, 22 nt, Homo sapiens
gacuggcuguuuucuuuauuau

SEQ ID NO: 61177 - RNA, 20 nt, Homo sapiens
gacauguugguuugcugcac

SEQ ID NO: 61178 - RNA, 22 nt, Homo sapiens
auuacacuuucuauucaaugag

SEQ ID NO: 61179 - RNA, 22 nt, Homo sapiens
auuccacuuagugacucauuug

SEQ ID NO: 61180 - RNA, 22 nt, Homo sapiens
auuccacuuauaugagguaucu

SEQ ID NO: 61181 - RNA, 20 nt, Homo sapiens
auuccacuuguuugagguac

SEQ ID NO: 61182 - RNA, 21 nt, Homo sapiens
auuccacuuuuccuucaggga

SEQ ID NO: 61183 - RNA, 23 nt, Homo sapiens
auuccaguggcaauuggagaaac

SEQ ID NO: 61184 - RNA, 22 nt, Homo sapiens
auuccaguuugugagaagcugu

SEQ ID NO: 61185 - RNA, 22 nt, Homo sapiens
auucccuuagcugccucagccu

SEQ ID NO: 61186 - RNA, 22 nt, Homo sapiens
auguuauguuaaugauaaugga

SEQ ID NO: 61187 - RNA, 22 nt, Homo sapiens
auguuguaguaugagucaaaau

SEQ ID NO: 61188 - RNA, 22 nt, Homo sapiens
auguugcaguuuaauuauccua

SEQ ID NO: 61189 - RNA, 22 nt, Homo sapiens
auuaaguuaggauuuugagaua

SEQ ID NO: 61190 - RNA, 22 nt, Homo sapiens
auuaaguaaugguuccaauaau

SEQ ID NO: 61191 - RNA, 22 nt, Homo sapiens
auguuauguucuucucuguaua

SEQ ID NO: 61192 - RNA, 23 nt, Homo sapiens
augugguuuuagguguugaacug

SEQ ID NO: 61193 - RNA, 22 nt, Homo sapiens
auggcucuguuccaugugucuu

SEQ ID NO: 61194 - RNA, 22 nt, Homo sapiens
auggccugaugcaccuguccca

SEQ ID NO: 61195 - RNA, 22 nt, Homo sapiens
auggcaguuuauucuaaaucaa

SEQ ID NO: 61196 - RNA, 22 nt, Homo sapiens
auggcccuguguggagcugcug

SEQ ID NO: 61197 - RNA, 22 nt, Homo sapiens
augugcuuaaaaaugcagagaa

SEQ ID NO: 61198 - RNA, 22 nt, Homo sapiens
augugcuaguaucaaacgagac

SEQ ID NO: 61199 - RNA, 22 nt, Homo sapiens
auguggcacuugacuuucucgc

SEQ ID NO: 61200 - RNA, 22 nt, Homo sapiens
auguggcuuuucaacuguguga

SEQ ID NO: 61201 - RNA, 18 nt, Homo sapiens
auguggcuuuugaaggcu

SEQ ID NO: 61202 - RNA, 22 nt, Homo sapiens
augugcaugcuguucugccaga

SEQ ID NO: 61203 - RNA, 22 nt, Homo sapiens
augugccauucucauggcgcuu

SEQ ID NO: 61204 - RNA, 22 nt, Homo sapiens
auugcacuggggguuagaauuu

SEQ ID NO: 61205 - RNA, 22 nt, Homo sapiens
auugucccucuuaaucccagca

SEQ ID NO: 61206 - RNA, 22 nt, Homo sapiens
auugucacugugcuccaccagu

SEQ ID NO: 61207 - RNA, 22 nt, Homo sapiens
cacauguucaggagcacuuaga

SEQ ID NO: 61208 - RNA, 22 nt, Homo sapiens
cacauagcuagucaguagugaa

SEQ ID NO: 61209 - RNA, 22 nt, Homo sapiens
auuguucuuacaugcugucauc

SEQ ID NO: 61210 - RNA, 22 nt, Homo sapiens
caaagucuucaguugauucuga

SEQ ID NO: 61211 - RNA, 22 nt, Homo sapiens
caaaggugcuuuccagguccaa

SEQ ID NO: 61212 - RNA, 22 nt, Homo sapiens
caaagugguuuauacaugauug

SEQ ID NO: 61213 - RNA, 22 nt, Homo sapiens
caaagugcuggccgggcgcagu

SEQ ID NO: 61214 - RNA, 22 nt, Homo sapiens
caaagugcugggaugggccagg

SEQ ID NO: 61215 - RNA, 22 nt, Homo sapiens
caaagugcugaaagaggccagg

SEQ ID NO: 61216 - RNA, 22 nt, Homo sapiens
cauagcacugcacuucagccug

SEQ ID NO: 61217 - RNA, 22 nt, Homo sapiens
cauagguugggcguuugauuuu

SEQ ID NO: 61218 - RNA, 22 nt, Homo sapiens
cauaaugcuaagagcugccccu

SEQ ID NO: 61219 - RNA, 22 nt, Homo sapiens
caucaggugaggauucaaugca

SEQ ID NO: 61220 - RNA, 22 nt, Homo sapiens
caucagcaauguaugaggguuc

SEQ ID NO: 61221 - RNA, 22 nt, Homo sapiens
caucacuuugccuccgucucua

SEQ ID NO: 61222 - RNA, 22 nt, Homo sapiens
caguuguuuuaugacauaagau

SEQ ID NO: 61223 - RNA, 22 nt, Homo sapiens
cauaaaucuuguugaauagcac

SEQ ID NO: 61224 - RNA, 21 nt, Homo sapiens
cauaaugcuacuuauuuuaug

SEQ ID NO: 61225 - RNA, 23 nt, Homo sapiens
cagugguguuagagaaaucuuuu

SEQ ID NO: 61226 - RNA, 22 nt, Homo sapiens
cagugguuuuuagcuugcuggg

SEQ ID NO: 61227 - RNA, 22 nt, Homo sapiens
cagugguuuucucaguucagca

SEQ ID NO: 61228 - RNA, 22 nt, Homo sapiens
cagugcuuguuauuguucuauu

SEQ ID NO: 61229 - RNA, 23 nt, Homo sapiens
cagugcauuguggcauucagcau

SEQ ID NO: 61230 - RNA, 22 nt, Homo sapiens
cagcuguguuauaaacuaccau

SEQ ID NO: 61231 - RNA, 22 nt, Homo sapiens
caccaaccucaguagcaucugu

SEQ ID NO: 61232 - RNA, 22 nt, Homo sapiens
cacccaguaagcaugaggcccu

SEQ ID NO: 61233 - RNA, 22 nt, Homo sapiens
cagguacauuuuaaagggcuca

SEQ ID NO: 61234 - RNA, 22 nt, Homo sapiens
cagguacuucugggcugagcag

SEQ ID NO: 61235 - RNA, 22 nt, Homo sapiens
caggcaaggugaaguguacugg

SEQ ID NO: 61236 - RNA, 22 nt, Homo sapiens
cagugcaaagccucugcccaga

SEQ ID NO: 61237 - RNA, 19 nt, Homo sapiens
caguaucauugcacauagu

SEQ ID NO: 61238 - RNA, 22 nt, Homo sapiens
caguacaauguggaaaaggagu

SEQ ID NO: 61239 - RNA, 22 nt, Homo sapiens
cccuggacauucaucauuaugu

SEQ ID NO: 61240 - RNA, 22 nt, Homo sapiens
ccuaggcacugggguccagccc

SEQ ID NO: 61241 - RNA, 22 nt, Homo sapiens
cccuggacacacacuuuuauuc

SEQ ID NO: 61242 - RNA, 22 nt, Homo sapiens
cgaguagcacaaugugugugau

SEQ ID NO: 61243 - RNA, 22 nt, Homo sapiens
cgcccuguagcuagcuagaggu

SEQ ID NO: 61244 - RNA, 22 nt, Homo sapiens
cgccgggggaugggcaccagcg

SEQ ID NO: 61245 - RNA, 22 nt, Homo sapiens
cgugaauguuuuggucuuucac

SEQ ID NO: 61246 - RNA, 22 nt, Homo sapiens
cuaaaacuuucugagugcagca

SEQ ID NO: 61247 - RNA, 22 nt, Homo sapiens
cggugcaaauguaauugcaguu

SEQ ID NO: 61248 - RNA, 22 nt, Homo sapiens
cgcuggugaucuagacccccaa

SEQ ID NO: 61249 - RNA, 22 nt, Homo sapiens
cuaagugaacugucacugagaa

SEQ ID NO: 61250 - RNA, 22 nt, Homo sapiens
caugccacuguggacaaagaca

SEQ ID NO: 61251 - RNA, 22 nt, Homo sapiens
cauugucccucaaugucuauga

SEQ ID NO: 61252 - RNA, 22 nt, Homo sapiens
ccaaggcacugauucuguacuc

SEQ ID NO: 61253 - RNA, 23 nt, Homo sapiens
ccacaaugguugaacuagauuac

SEQ ID NO: 61254 - RNA, 22 nt, Homo sapiens
ccacaaccuccauauccugggu

SEQ ID NO: 61255 - RNA, 22 nt, Homo sapiens
ccacaguggauuaaaguuacug

SEQ ID NO: 61256 - RNA, 22 nt, Homo sapiens
ccacccuggagaauuugagguc

SEQ ID NO: 61257 - RNA, 22 nt, Homo sapiens
ccacuguuuaaauggcugagga

SEQ ID NO: 61258 - RNA, 22 nt, Homo sapiens
ccaccuguacuuaagucacuuu

SEQ ID NO: 61259 - RNA, 22 nt, Homo sapiens
ccccggguggauguacauguga

SEQ ID NO: 61260 - RNA, 22 nt, Homo sapiens
ccccauuugaacuccuucaacu

SEQ ID NO: 61261 - RNA, 22 nt, Homo sapiens
ugaaaguuauauugugaaauuc

SEQ ID NO: 61262 - RNA, 22 nt, Homo sapiens
ugaaaguaauugcaguuuuuac

SEQ ID NO: 61263 - RNA, 22 nt, Homo sapiens
ugaaacacaccuccucuccauc

SEQ ID NO: 61264 - RNA, 22 nt, Homo sapiens
ucuuggguuugccuugcugcug

SEQ ID NO: 61265 - RNA, 17 nt, Homo sapiens
ucuugugguucuugaau

SEQ ID NO: 61266 - RNA, 22 nt, Homo sapiens
ucuuuaguaauuucuguaaggc

SEQ ID NO: 61267 - RNA, 22 nt, Homo sapiens
ucuguggugggcuccacccagu

SEQ ID NO: 61268 - RNA, 22 nt, Homo sapiens
ucuguggucagcauccgccacu

SEQ ID NO: 61269 - RNA, 22 nt, Homo sapiens
ucugugguaagaaacgcauguc

SEQ ID NO: 61270 - RNA, 19 nt, Homo sapiens
ucugugcuugucccccugu

SEQ ID NO: 61271 - RNA, 21 nt, Homo sapiens
ucuuggguugaauucucccag

SEQ ID NO: 61272 - RNA, 22 nt, Homo sapiens
ucuuggguuuguccuucuccua

SEQ ID NO: 61273 - RNA, 22 nt, Homo sapiens
ucuuggacuuuugugagaaauc

SEQ ID NO: 61274 - RNA, 22 nt, Homo sapiens
ugaaauuguuugcaaggauagg

SEQ ID NO: 61275 - RNA, 22 nt, Homo sapiens
ugacaagagaccccuccgcagg

SEQ ID NO: 61276 - RNA, 22 nt, Homo sapiens
ugaauguuugcagcuuauacca

SEQ ID NO: 61277 - RNA, 22 nt, Homo sapiens
ugaauguuugcuuacuuccaua

SEQ ID NO: 61278 - RNA, 22 nt, Homo sapiens
ugaaugguaauuuaguaggcac

SEQ ID NO: 61279 - RNA, 18 nt, Homo sapiens
ucuggcuucuuuguucca

SEQ ID NO: 61280 - RNA, 22 nt, Homo sapiens
ucuggccuacaucauuuuuccg

SEQ ID NO: 61281 - RNA, 22 nt, Homo sapiens
ucuggcuuauuucacuuagcau

SEQ ID NO: 61282 - RNA, 22 nt, Homo sapiens
ucuggcuuuuaacaucuauaaa

SEQ ID NO: 61283 - RNA, 22 nt, Homo sapiens
ucugcaagucuaaacuagccau

SEQ ID NO: 61284 - RNA, 23 nt, Homo sapiens
ucuggaucauucguagugccagc

SEQ ID NO: 61285 - RNA, 22 nt, Homo sapiens
ucuggcaagauauccauugcuu

SEQ ID NO: 61286 - RNA, 22 nt, Homo sapiens
ucugguggugaugagagacagu

SEQ ID NO: 61287 - RNA, 22 nt, Homo sapiens
ucugucacugguggacgaucac

SEQ ID NO: 61288 - RNA, 20 nt, Homo sapiens
ucucauggagguagagaaua

SEQ ID NO: 61289 - RNA, 23 nt, Homo sapiens
ucccaagauggaccagaccaagg

SEQ ID NO: 61290 - RNA, 22 nt, Homo sapiens
ucucaguggugcuggcagggga

SEQ ID NO: 61291 - RNA, 22 nt, Homo sapiens
ucucagugugguaaaaguuuuu

SEQ ID NO: 61292 - RNA, 22 nt, Homo sapiens
ucucuguuuauuuuugguguau

SEQ ID NO: 61293 - RNA, 22 nt, Homo sapiens
ucucuguuuagagccagcaauu

SEQ ID NO: 61294 - RNA, 22 nt, Homo sapiens
ucugacacagugauuaguaaau

SEQ ID NO: 61295 - RNA, 22 nt, Homo sapiens
ucaguagagacaggauuucacc

SEQ ID NO: 61296 - RNA, 22 nt, Homo sapiens
ucauacgucuccuugugccacc

SEQ ID NO: 61297 - RNA, 22 nt, Homo sapiens
ucauaucauuagaucuacugua

SEQ ID NO: 61298 - RNA, 23 nt, Homo sapiens
ucagguaguuucagaggaccuug

SEQ ID NO: 61299 - RNA, 22 nt, Homo sapiens
ucagguccuuacugugcucccu

SEQ ID NO: 61300 - RNA, 22 nt, Homo sapiens
ucaggcaccuuccucuuaucug

SEQ ID NO: 61301 - RNA, 22 nt, Homo sapiens
uccaguuuggaggcuugaugug

SEQ ID NO: 61302 - RNA, 22 nt, Homo sapiens
uccauugucuagauguaacaca

SEQ ID NO: 61303 - RNA, 22 nt, Homo sapiens
uccagguuuggcuuuauaacuu

SEQ ID NO: 61304 - RNA, 22 nt, Homo sapiens
uccaguguuauaauaugcgucu

SEQ ID NO: 61305 - RNA, 22 nt, Homo sapiens
ucauugcacuccagccugggug

SEQ ID NO: 61306 - RNA, 22 nt, Homo sapiens
uccagguacucagggggcugag

SEQ ID NO: 61307 - RNA, 22 nt, Homo sapiens
ucauugcacucccagacacccu

SEQ ID NO: 61308 - RNA, 22 nt, Homo sapiens
ucauuagucaccuagccagcuu

SEQ ID NO: 61309 - RNA, 22 nt, Homo sapiens
ucauggcacugaugagaguuuc

SEQ ID NO: 61310 - RNA, 22 nt, Homo sapiens
ucauggcuuuuauuauguugag

SEQ ID NO: 61311 - RNA, 22 nt, Homo sapiens
ucauguacuuguagucccggcu

SEQ ID NO: 61312 - RNA, 22 nt, Homo sapiens
ucaucagugcuugcaaauuauu

SEQ ID NO: 61313 - RNA, 22 nt, Homo sapiens
ucaucagaguuuacaagcucag

SEQ ID NO: 61314 - RNA, 22 nt, Homo sapiens
ucacuggaggagaggaagugga

SEQ ID NO: 61315 - RNA, 22 nt, Homo sapiens
ucacuggagauagcaaucuggu

SEQ ID NO: 61316 - RNA, 22 nt, Homo sapiens
ucacugugguuuugaugugcau

SEQ ID NO: 61317 - RNA, 22 nt, Homo sapiens
ucacugugguuugggaaagugc

SEQ ID NO: 61318 - RNA, 20 nt, Homo sapiens
ucacugaguaucuacgauua

SEQ ID NO: 61319 - RNA, 22 nt, Homo sapiens
ucaccaccuuccaggaccacug

SEQ ID NO: 61320 - RNA, 22 nt, Homo sapiens
ucaccaguaauaaagagccugc

SEQ ID NO: 61321 - RNA, 22 nt, Homo sapiens
ucacucagaccuggugauaugc

SEQ ID NO: 61322 - RNA, 22 nt, Homo sapiens
ucaccaccugcugauuguagag

SEQ ID NO: 61323 - RNA, 22 nt, Homo sapiens
ucaccaccugcugaucauagag

SEQ ID NO: 61324 - RNA, 22 nt, Homo sapiens
ucacaugugacauauauauuug

SEQ ID NO: 61325 - RNA, 22 nt, Homo sapiens
ucacauucaauuguaauccccg

SEQ ID NO: 61326 - RNA, 22 nt, Homo sapiens
ucacaugugaagauugggagua

SEQ ID NO: 61327 - RNA, 22 nt, Homo sapiens
ucacauguguaaauugguguaa

SEQ ID NO: 61328 - RNA, 23 nt, Homo sapiens
ucacaguuacuuuugcaucaacc

SEQ ID NO: 61329 - RNA, 22 nt, Homo sapiens
ucacaucucagguuucuugaca

SEQ ID NO: 61330 - RNA, 22 nt, Homo sapiens
ucacauagcauaaugucugcaa

SEQ ID NO: 61331 - RNA, 22 nt, Homo sapiens
uauuuguccccuccaaaaguca

SEQ ID NO: 61332 - RNA, 22 nt, Homo sapiens
ucacacucucaccaacauuugg

SEQ ID NO: 61333 - RNA, 22 nt, Homo sapiens
ucacacugaaacuaggguguga

SEQ ID NO: 61334 - RNA, 22 nt, Homo sapiens
ucacacugcaucuguuggaauu

SEQ ID NO: 61335 - RNA, 19 nt, Homo sapiens
ucacacuguggcuucuuua

SEQ ID NO: 61336 - RNA, 22 nt, Homo sapiens
ucacacuguuuugauuauuaua

SEQ ID NO: 61337 - RNA, 21 nt, Homo sapiens
ucacagccuaggaccugaaga

SEQ ID NO: 61338 - RNA, 20 nt, Homo sapiens
uauuugguuauuuccauggu

SEQ ID NO: 61339 - RNA, 22 nt, Homo sapiens
ucaaacacuccauaucgcgauu

SEQ ID NO: 61340 - RNA, 22 nt, Homo sapiens
uauuugguuauaugaguaaguu

SEQ ID NO: 61341 - RNA, 22 nt, Homo sapiens
uauuuggugaaugaaugcaugu

SEQ ID NO: 61342 - RNA, 22 nt, Homo sapiens
uauuguuuuucccaggagucua

SEQ ID NO: 61343 - RNA, 22 nt, Homo sapiens
uggcaagagauaugugucuaua

SEQ ID NO: 61344 - RNA, 22 nt, Homo sapiens
uggcaagagcaaaauguacagu

SEQ ID NO: 61345 - RNA, 22 nt, Homo sapiens
uggcaagcuuuaauugacucuu

SEQ ID NO: 61346 - RNA, 22 nt, Homo sapiens
uggcagacaaauuugagcauau

SEQ ID NO: 61347 - RNA, 22 nt, Homo sapiens
uggcaccauccaggugucucua

SEQ ID NO: 61348 - RNA, 22 nt, Homo sapiens
uggcacuggagauacauuaaua

SEQ ID NO: 61349 - RNA, 19 nt, Homo sapiens
uggcacuugacguccggau

SEQ ID NO: 61350 - RNA, 22 nt, Homo sapiens
uggcaauaauucagugugggcu

SEQ ID NO: 61351 - RNA, 20 nt, Homo sapiens
uggcaagauggcagaauaga

SEQ ID NO: 61352 - RNA, 22 nt, Homo sapiens
uggccagugucuauugguuucc

SEQ ID NO: 61353 - RNA, 22 nt, Homo sapiens
uggccaguguuuuuccugggcu

SEQ ID NO: 61354 - RNA, 22 nt, Homo sapiens
uggccaguugaagacaaugcuc

SEQ ID NO: 61355 - RNA, 22 nt, Homo sapiens
uggcagcugcuucaugggaugc

SEQ ID NO: 61356 - RNA, 22 nt, Homo sapiens
uggcaggugcacuggcuuugaa

SEQ ID NO: 61357 - RNA, 22 nt, Homo sapiens
ugcuggcguuacucuccaucag

SEQ ID NO: 61358 - RNA, 22 nt, Homo sapiens
uggagucuugcucuguugccca

SEQ ID NO: 61359 - RNA, 21 nt, Homo sapiens
uggagugcaacacuagguaua

SEQ ID NO: 61360 - RNA, 22 nt, Homo sapiens
uggaaugguaucuuguuggggu

SEQ ID NO: 61361 - RNA, 21 nt, Homo sapiens
uggaaguguacaauuauaccc

SEQ ID NO: 61362 - RNA, 22 nt, Homo sapiens
ugcugcacuuauggcucugagg

SEQ ID NO: 61363 - RNA, 22 nt, Homo sapiens
ugcuauguccccacccaaaucu

SEQ ID NO: 61364 - RNA, 21 nt, Homo sapiens
ugcuccauuuucuagccugaa

SEQ ID NO: 61365 - RNA, 22 nt, Homo sapiens
ugcuauguaacacauuaccuuu

SEQ ID NO: 61366 - RNA, 23 nt, Homo sapiens
ugcuauguaagcauuuauuaaau

SEQ ID NO: 61367 - RNA, 19 nt, Homo sapiens
ugcauugucugggaaaugg

SEQ ID NO: 61368 - RNA, 22 nt, Homo sapiens
ugcauuguuccgaauguguccu

SEQ ID NO: 61369 - RNA, 21 nt, Homo sapiens
ugcauugucuugaguuuaaau

SEQ ID NO: 61370 - RNA, 22 nt, Homo sapiens
ugcauugcacuugcaugagaua

SEQ ID NO: 61371 - RNA, 20 nt, Homo sapiens
ugccaagaaaugaggguauu

SEQ ID NO: 61372 - RNA, 22 nt, Homo sapiens
ugcgauaguuugcugguaaauu

SEQ ID NO: 61373 - RNA, 22 nt, Homo sapiens
ugccaaggagucagucccuaga

SEQ ID NO: 61374 - RNA, 20 nt, Homo sapiens
ugccaagaugacuauagcuc

SEQ ID NO: 61375 - RNA, 21 nt, Homo sapiens
ugcauuguugcugagagcagg

SEQ ID NO: 61376 - RNA, 19 nt, Homo sapiens
ugcaaauucuaaaaacuga

SEQ ID NO: 61377 - RNA, 22 nt, Homo sapiens
ugcaaagaaauuuuggugacca

SEQ ID NO: 61378 - RNA, 22 nt, Homo sapiens
ugaguguccaaguaaggugaaa

SEQ ID NO: 61379 - RNA, 22 nt, Homo sapiens
ugagucauuuccuuaugcuacu

SEQ ID NO: 61380 - RNA, 21 nt, Homo sapiens
ugauguugaccuaaguaguga

SEQ ID NO: 61381 - RNA, 22 nt, Homo sapiens
ugauccuguccuuaugauguua

SEQ ID NO: 61382 - RNA, 22 nt, Homo sapiens
ugauaugugaguauaugguuau

SEQ ID NO: 61383 - RNA, 22 nt, Homo sapiens
ugauauguggcuauugagauug

SEQ ID NO: 61384 - RNA, 22 nt, Homo sapiens
ugagguugucagugucauucuu

SEQ ID NO: 61385 - RNA, 22 nt, Homo sapiens
ugagguuguccacuauaaucca

SEQ ID NO: 61386 - RNA, 22 nt, Homo sapiens
ugagguuggguaauuuaugaag

SEQ ID NO: 61387 - RNA, 22 nt, Homo sapiens
ugagauguuuguuucagugccu

SEQ ID NO: 61388 - RNA, 22 nt, Homo sapiens
ugagauuaucuugaucuugaaa

SEQ ID NO: 61389 - RNA, 22 nt, Homo sapiens
ugaggugagauggcuaccccaa

SEQ ID NO: 61390 - RNA, 22 nt, Homo sapiens
ugagguguauugggggaaauuc

SEQ ID NO: 61391 - RNA, 23 nt, Homo sapiens
ugagguguuaagcagacuugucu

SEQ ID NO: 61392 - RNA, 22 nt, Homo sapiens
ugacacauguagacaucuggug

SEQ ID NO: 61393 - RNA, 22 nt, Homo sapiens
ugacaagaacuuuccauaguaa

SEQ ID NO: 61394 - RNA, 22 nt, Homo sapiens
ugacaagaguagagagggugcc

SEQ ID NO: 61395 - RNA, 22 nt, Homo sapiens
ugacaguaaacagucuugauua

SEQ ID NO: 61396 - RNA, 22 nt, Homo sapiens
ugagaugaagucucacucuguc

SEQ ID NO: 61397 - RNA, 22 nt, Homo sapiens
ugagaugaagcuagaagaaugg

SEQ ID NO: 61398 - RNA, 22 nt, Homo sapiens
ugagaugacgacacaccucagu

SEQ ID NO: 61399 - RNA, 22 nt, Homo sapiens
ugagaugcuccucuugcaaagc

SEQ ID NO: 61400 - RNA, 21 nt, Homo sapiens
ugagauaauauguuucugaug

SEQ ID NO: 61401 - RNA, 20 nt, Homo sapiens
ugagauccacgugaaguaug

SEQ ID NO: 61402 - RNA, 22 nt, Homo sapiens
ugagauccaugcuauuugggcu

SEQ ID NO: 61403 - RNA, 22 nt, Homo sapiens
ugagauccugagaguugggacu

SEQ ID NO: 61404 - RNA, 22 nt, Homo sapiens
ugagauccugugacuacacuga

SEQ ID NO: 61405 - RNA, 19 nt, Homo sapiens
uagggcacgaggcagaguc

SEQ ID NO: 61406 - RNA, 22 nt, Homo sapiens
uaggcagccagcuguggauuga

SEQ ID NO: 61407 - RNA, 22 nt, Homo sapiens
uaggugaauguaguaagguguu

SEQ ID NO: 61408 - RNA, 22 nt, Homo sapiens
uagguagaacccagaaaucuga

SEQ ID NO: 61409 - RNA, 22 nt, Homo sapiens
uagguagauuuaaagauuuucu

SEQ ID NO: 61410 - RNA, 22 nt, Homo sapiens
uagguaggauagucuuuauuuu

SEQ ID NO: 61411 - RNA, 18 nt, Homo sapiens
uagugcuguucucaugau

SEQ ID NO: 61412 - RNA, 22 nt, Homo sapiens
uagugguaguagcaguaauauu

SEQ ID NO: 61413 - RNA, 21 nt, Homo sapiens
uagcauacauuuugcaucuua

SEQ ID NO: 61414 - RNA, 22 nt, Homo sapiens
uagcauggaggcggccauagug

SEQ ID NO: 61415 - RNA, 22 nt, Homo sapiens
uagcauccuucucuaaacagga

SEQ ID NO: 61416 - RNA, 18 nt, Homo sapiens
uagcucuuguugguccau

SEQ ID NO: 61417 - RNA, 22 nt, Homo sapiens
uagcaguucauuguugugugaa

SEQ ID NO: 61418 - RNA, 22 nt, Homo sapiens
uagcagugucuagguaggccau

SEQ ID NO: 61419 - RNA, 23 nt, Homo sapiens
uagaauguuuuuccauguuucuu

SEQ ID NO: 61420 - RNA, 22 nt, Homo sapiens
uagaauggaaggcauguuugcc

SEQ ID NO: 61421 - RNA, 22 nt, Homo sapiens
uaucaaacccaaggaggggguu

SEQ ID NO: 61422 - RNA, 22 nt, Homo sapiens
uaucacacuguuggauuugauu

SEQ ID NO: 61423 - RNA, 20 nt, Homo sapiens
uauagcaauuuuuuucuccu

SEQ ID NO: 61424 - RNA, 22 nt, Homo sapiens
uauacgugcagaucacagggga

SEQ ID NO: 61425 - RNA, 22 nt, Homo sapiens
uaugagagcugguagguagaga

SEQ ID NO: 61426 - RNA, 22 nt, Homo sapiens
uauggcuuuguuaacauuuucu

SEQ ID NO: 61427 - RNA, 22 nt, Homo sapiens
uauggcuuuucacuuaaguccu

SEQ ID NO: 61428 - RNA, 22 nt, Homo sapiens
uauggguauuuuauacauaacc

SEQ ID NO: 61429 - RNA, 22 nt, Homo sapiens
uauggcugugacuuaucuuguu

SEQ ID NO: 61430 - RNA, 22 nt, Homo sapiens
uauggcuuucuacuugaguucu

SEQ ID NO: 61431 - RNA, 22 nt, Homo sapiens
uauggcugcuuucacacuacaa

SEQ ID NO: 61432 - RNA, 22 nt, Homo sapiens
uauuccacuuacaugagguauc

SEQ ID NO: 61433 - RNA, 22 nt, Homo sapiens
uauuccacacuguuggugggau

SEQ ID NO: 61434 - RNA, 22 nt, Homo sapiens
uauggguuuauuucuggucuca

SEQ ID NO: 61435 - RNA, 22 nt, Homo sapiens
uauggguuuuugucuguuuacu

SEQ ID NO: 61436 - RNA, 22 nt, Homo sapiens
uauggucuuugagaggugacug

SEQ ID NO: 61437 - RNA, 22 nt, Homo sapiens
uauugauuaauugugauuaggc

SEQ ID NO: 61438 - RNA, 18 nt, Homo sapiens
uauuccucuuccucuauc

SEQ ID NO: 61439 - RNA, 22 nt, Homo sapiens
uauugauuuucaguguucagcu

SEQ ID NO: 61440 - RNA, 22 nt, Homo sapiens
uauugaacuggaucagaaggcc

SEQ ID NO: 61441 - RNA, 22 nt, Homo sapiens
uacauaguagauauaggguuua

SEQ ID NO: 61442 - RNA, 22 nt, Homo sapiens
uacaguguuuugguauuccaca

SEQ ID NO: 61443 - RNA, 20 nt, Homo sapiens
uacauaguaaacugagagca

SEQ ID NO: 61444 - RNA, 22 nt, Homo sapiens
uacauagucuucuuuugguuau

SEQ ID NO: 61445 - RNA, 22 nt, Homo sapiens
uacagugcuugguaucuaguaa

SEQ ID NO: 61446 - RNA, 22 nt, Homo sapiens
uacagugcuuuuugguggagaa

SEQ ID NO: 61447 - RNA, 22 nt, Homo sapiens
uacagugcauagaggcaugaua

SEQ ID NO: 61448 - RNA, 22 nt, Homo sapiens
uacaguccaugcauuauccucc

SEQ ID NO: 61449 - RNA, 22 nt, Homo sapiens
uaagugaauguuggcuacugaa

SEQ ID NO: 61450 - RNA, 22 nt, Homo sapiens
uacugcuuaagggcaugggccc

SEQ ID NO: 61451 - RNA, 22 nt, Homo sapiens
uacuggccuugaacucuggugu

SEQ ID NO: 61452 - RNA, 22 nt, Homo sapiens
uacuggccccaaaguagguagu

SEQ ID NO: 61453 - RNA, 22 nt, Homo sapiens
uaccuguagacuacagcuucag

SEQ ID NO: 61454 - RNA, 19 nt, Homo sapiens
uacauaguauuuaguggca

SEQ ID NO: 61455 - RNA, 22 nt, Homo sapiens
uaccacagucauuacacuugua

SEQ ID NO: 61456 - RNA, 22 nt, Homo sapiens
uacauugucauauucucucucu

SEQ ID NO: 61457 - RNA, 22 nt, Homo sapiens
uacauugcacuuuauuagauac

SEQ ID NO: 61458 - RNA, 22 nt, Homo sapiens
uacauccauccugcugggcagu

SEQ ID NO: 61459 - RNA, 19 nt, Homo sapiens
uacaugcagcaggcacgca

SEQ ID NO: 61460 - RNA, 22 nt, Homo sapiens
uaccagugucagcuuccugugu

SEQ ID NO: 61461 - RNA, 22 nt, Homo sapiens
uaccaccauuguaguuuggaaa

SEQ ID NO: 61462 - RNA, 22 nt, Homo sapiens
uaccacaggcuggguaaucuau

SEQ ID NO: 61463 - RNA, 22 nt, Homo sapiens
guugccuaggcuggcgugcagu

SEQ ID NO: 61464 - RNA, 22 nt, Homo sapiens
guuguggcuugugauuaagcac

SEQ ID NO: 61465 - RNA, 22 nt, Homo sapiens
guuugcacuccuaugagaaucu

SEQ ID NO: 61466 - RNA, 22 nt, Homo sapiens
gugguuuuuaaaguaccugugg

SEQ ID NO: 61467 - RNA, 22 nt, Homo sapiens
guguaacaacagcacuccacug

SEQ ID NO: 61468 - RNA, 22 nt, Homo sapiens
guggucagaaaucucaguggca

SEQ ID NO: 61469 - RNA, 22 nt, Homo sapiens
gugguguccugcaccuauaguc

SEQ ID NO: 61470 - RNA, 22 nt, Homo sapiens
gugguaaaauggcauagagcua

SEQ ID NO: 61471 - RNA, 22 nt, Homo sapiens
guggugucuuuuuugauuagga

SEQ ID NO: 61472 - RNA, 22 nt, Homo sapiens
gugguguuugagcugccaggga

SEQ ID NO: 61473 - RNA, 22 nt, Homo sapiens
uaagaugaaggcucaccuagaa

SEQ ID NO: 61474 - RNA, 22 nt, Homo sapiens
uaagacugccccagacagcaag

SEQ ID NO: 61475 - RNA, 22 nt, Homo sapiens
uaagacacauguguucccaggc

SEQ ID NO: 61476 - RNA, 22 nt, Homo sapiens
uaacucugccuagugacauggu

SEQ ID NO: 61477 - RNA, 22 nt, Homo sapiens
uaaacacucacuucauagccau

SEQ ID NO: 61478 - RNA, 22 nt, Homo sapiens
uaaaccacguuuacauuugaga

SEQ ID NO: 61479 - RNA, 22 nt, Homo sapiens
guuugugguuaaagccuuucau

SEQ ID NO: 61480 - RNA, 22 nt, Homo sapiens
uaaacugcuugaggguaaguac

SEQ ID NO: 61481 - RNA, 22 nt, Homo sapiens
uaaagcauguaauuagguuaga

SEQ ID NO: 61482 - RNA, 22 nt, Homo sapiens
uaaagcacaaguaaagaauacu

SEQ ID NO: 61483 - RNA, 22 nt, Homo sapiens
uaaagagcuuuugaggugucau

SEQ ID NO: 61484 - RNA, 22 nt, Homo sapiens
uaaagcacuuuuuucugcaugg

SEQ ID NO: 61485 - RNA, 17 nt, Homo sapiens
uaaagccagucaaguca

SEQ ID NO: 61486 - RNA, 22 nt, Homo sapiens
gcucguccccuccugacucugc

SEQ ID NO: 61487 - RNA, 22 nt, Homo sapiens
gcuccuuugaguagcuucugug

SEQ ID NO: 61488 - RNA, 22 nt, Homo sapiens
gcuaggagaucugcugcucucu

SEQ ID NO: 61489 - RNA, 19 nt, Homo sapiens
gcucaccuugcugcuccag

SEQ ID NO: 61490 - RNA, 22 nt, Homo sapiens
gcugcguguagaguucucacug

SEQ ID NO: 61491 - RNA, 22 nt, Homo sapiens
gcugauguuuucagguaauucu

SEQ ID NO: 61492 - RNA, 22 nt, Homo sapiens
gcaaugcugucugugcacagau

SEQ ID NO: 61493 - RNA, 22 nt, Homo sapiens
gcacaguggcucccgucuauaa

SEQ ID NO: 61494 - RNA, 22 nt, Homo sapiens
gcaccacugcacucucagcuug

SEQ ID NO: 61495 - RNA, 22 nt, Homo sapiens
gcacauauguaaauagcugccu

SEQ ID NO: 61496 - RNA, 22 nt, Homo sapiens
gcaccauugacaagaaauaggu

SEQ ID NO: 61497 - RNA, 22 nt, Homo sapiens
gcacccugucaaaauggaccaa

SEQ ID NO: 61498 - RNA, 22 nt, Homo sapiens
gcgugguguuagaaugagaagu

SEQ ID NO: 61499 - RNA, 18 nt, Homo sapiens
ggaaaacuuuucuaagua

SEQ ID NO: 61500 - RNA, 22 nt, Homo sapiens
ggaaauguuggugucaugaguu

SEQ ID NO: 61501 - RNA, 22 nt, Homo sapiens
ggacuggaagcauauuuauuuu

SEQ ID NO: 61502 - RNA, 22 nt, Homo sapiens
ggacuguaguuucccgggcugg

SEQ ID NO: 61503 - RNA, 22 nt, Homo sapiens
gcuucauggaggcugggcgcag

SEQ ID NO: 61504 - RNA, 22 nt, Homo sapiens
gcuuguguucaagucacccuua

SEQ ID NO: 61505 - RNA, 19 nt, Homo sapiens
gcuuguccacgugagauaa

SEQ ID NO: 61506 - RNA, 20 nt, Homo sapiens
gcugugcuuaauacacuuuc

SEQ ID NO: 61507 - RNA, 22 nt, Homo sapiens
gcuguguucucgaggcggggga

SEQ ID NO: 61508 - RNA, 22 nt, Homo sapiens
gcuguauugacuuuguaucaua

SEQ ID NO: 61509 - RNA, 22 nt, Homo sapiens
gcuggguucagagugggcugcg

SEQ ID NO: 61510 - RNA, 19 nt, Homo sapiens
gcugauguuacauucuugc

SEQ ID NO: 61511 - RNA, 22 nt, Homo sapiens
ggcaagaaagaaaucaucuguc

SEQ ID NO: 61512 - RNA, 22 nt, Homo sapiens
ggaguaggaaggaaauguuaaa

SEQ ID NO: 61513 - RNA, 22 nt, Homo sapiens
ggagcaaugccucauucucacu

SEQ ID NO: 61514 - RNA, 22 nt, Homo sapiens
ggcacuguugccggccugaauu

SEQ ID NO: 61515 - RNA, 22 nt, Homo sapiens
ggcacgguggcucacgccugua

SEQ ID NO: 61516 - RNA, 22 nt, Homo sapiens
ggcacgguggcucacaccugua

SEQ ID NO: 61517 - RNA, 22 nt, Homo sapiens
ggcacaauugcagcaauaaaca

SEQ ID NO: 61518 - RNA, 19 nt, Homo sapiens
ggcaauacuuucuuguugg

SEQ ID NO: 61519 - RNA, 19 nt, Homo sapiens
ggcaagaguuguucugugu

SEQ ID NO: 61520 - RNA, 17 nt, Homo sapiens
ggcaagaaguggaacuc

SEQ ID NO: 61521 - RNA, 22 nt, Homo sapiens
ggugagauaucugcugauguuu

SEQ ID NO: 61522 - RNA, 22 nt, Homo sapiens
ggugacagugguuaaaauuugu

SEQ ID NO: 61523 - RNA, 19 nt, Homo sapiens
ggucauggagguuguguga

SEQ ID NO: 61524 - RNA, 22 nt, Homo sapiens
ggucauagagaauucaccagga

SEQ ID NO: 61525 - RNA, 22 nt, Homo sapiens
ggugagcacagaaugcccugag

SEQ ID NO: 61526 - RNA, 22 nt, Homo sapiens
gggagugugcacacaugguaua

SEQ ID NO: 61527 - RNA, 22 nt, Homo sapiens
gggauguaaaagugggcacauu

SEQ ID NO: 61528 - RNA, 22 nt, Homo sapiens
gugaacaauguuuuauccuggg

SEQ ID NO: 61529 - RNA, 22 nt, Homo sapiens
gucuuuugcuagccagagagcu

SEQ ID NO: 61530 - RNA, 22 nt, Homo sapiens
gucuuuguuuggucuguaucag

SEQ ID NO: 61531 - RNA, 22 nt, Homo sapiens
gucuuagguuuaaucacuucua

SEQ ID NO: 61532 - RNA, 22 nt, Homo sapiens
gucuugaaggcugaguaccugu

SEQ ID NO: 61533 - RNA, 22 nt, Homo sapiens
gucugugcauuaauacgugcug

SEQ ID NO: 61534 - RNA, 22 nt, Homo sapiens
gucuccggauguuguuuuuggg

SEQ ID NO: 61535 - RNA, 22 nt, Homo sapiens
gucauugcacuccagccuggac

SEQ ID NO: 61536 - RNA, 22 nt, Homo sapiens
gucauggaaaucuacauuguua

SEQ ID NO: 61537 - RNA, 22 nt, Homo sapiens
gucaugggguacuacacauggg

SEQ ID NO: 61538 - RNA, 22 nt, Homo sapiens
gucaguggagaaaaggacaugu

SEQ ID NO: 61539 - RNA, 22 nt, Homo sapiens
gucaucaggacgggucaucugc

SEQ ID NO: 61540 - RNA, 22 nt, Homo sapiens
guaaucuguaguaaagcaccau

SEQ ID NO: 61541 - RNA, 22 nt, Homo sapiens
guagaaaguuugcugucacaug

SEQ ID NO: 61542 - RNA, 22 nt, Homo sapiens
guaccuguauguucauuucaca

SEQ ID NO: 61543 - RNA, 22 nt, Homo sapiens
gugcagaugucuuuauaguagc

SEQ ID NO: 61544 - RNA, 22 nt, Homo sapiens
gugcaaccaucaccacugacuc

SEQ ID NO: 61545 - RNA, 22 nt, Homo sapiens
gugaauguuuucuuacauggua

SEQ ID NO: 61546 - RNA, 22 nt, Homo sapiens
gugacacagcaagacuccgucu

SEQ ID NO: 61547 - RNA, 22 nt, Homo sapiens
gugagaauauuuuaaauacuaa

SEQ ID NO: 61548 - RNA, 22 nt, Homo sapiens
gugagaaucaaacuacauaaau

SEQ ID NO: 61549 - RNA, 22 nt, Homo sapiens
gugagaauugacacccuugucu

SEQ ID NO: 61550 - RNA, 22 nt, Homo sapiens
gugagauaaugucucauugugg

SEQ ID NO: 61551 - RNA, 22 nt, Homo sapiens
gugacuggacucugaagaaaau

SEQ ID NO: 61552 - RNA, 22 nt, Homo sapiens
guggaaaauuauugcuguuuuu

SEQ ID NO: 61553 - RNA, 22 nt, Homo sapiens
guggcuuguaggggucaaggga

SEQ ID NO: 61554 - RNA, 21 nt, Homo sapiens
guggccuuuggagcaugucag

SEQ ID NO: 61555 - RNA, 22 nt, Homo sapiens
guggcuuuauuuagaagcaggg

SEQ ID NO: 61556 - RNA, 22 nt, Homo sapiens
gugggcaaagcuaguguguaga

SEQ ID NO: 61557 - RNA, 22 nt, Homo sapiens
gugggguagcaggcuccuaucu

SEQ ID NO: 61558 - RNA, 22 nt, Homo sapiens
gugcauaucugugguuggcuga

SEQ ID NO: 61559 - RNA, 22 nt, Homo sapiens
gugcaugucuaugcgagucuaa

SEQ ID NO: 61560 - RNA, 22 nt, Homo sapiens
gugcauguccacuaguccauau

SEQ ID NO: 61561 - RNA, 22 nt, Homo sapiens
gugcuauguuauccagcaagau

SEQ ID NO: 61562 - RNA, 22 nt, Homo sapiens
gugccacugcacuccggccugg

SEQ ID NO: 61563 - RNA, 22 nt, Homo sapiens
gugccacaguguuaagggauuc

SEQ ID NO: 61564 - RNA, 22 nt, Homo sapiens
aaagucuguuuugucagagacu

SEQ ID NO: 61565 - RNA, 22 nt, Homo sapiens
aaacauugaccucauccuggca

SEQ ID NO: 61566 - RNA, 22 nt, Homo sapiens
aaaguucuugcugaaggauuau

SEQ ID NO: 61567 - RNA, 19 nt, Homo sapiens
aaaguguuuuaaagaggau

SEQ ID NO: 61568 - RNA, 22 nt, Homo sapiens
aaaguguguuuccaaccugugg

SEQ ID NO: 61569 - RNA, 22 nt, Homo sapiens
aaaugccucccauucuacugac

SEQ ID NO: 61570 - RNA, 22 nt, Homo sapiens
aaaguggacuaagugaauauga

SEQ ID NO: 61571 - RNA, 22 nt, Homo sapiens
aaaguggugggauuccaggcau

SEQ ID NO: 61572 - RNA, 22 nt, Homo sapiens
aaagugcugagauuguaggcau

SEQ ID NO: 61573 - RNA, 22 nt, Homo sapiens
aaagugcuguagacugggcgca

SEQ ID NO: 61574 - RNA, 22 nt, Homo sapiens
aaagugcuuacuaaguugccaa

SEQ ID NO: 61575 - RNA, 22 nt, Homo sapiens
aaagugcugggauuggcugggc

SEQ ID NO: 61576 - RNA, 22 nt, Homo sapiens
aaagugcugggauuaggccagg

SEQ ID NO: 61577 - RNA, 22 nt, Homo sapiens
aaagugcuucucuuuggugggu

SEQ ID NO: 61578 - RNA, 22 nt, Homo sapiens
aaagugcuaggauuaccugggg

SEQ ID NO: 61579 - RNA, 22 nt, Homo sapiens
aaagugcugagacagacuggga

SEQ ID NO: 61580 - RNA, 22 nt, Homo sapiens
aaaggcaucauuaguaccaagu

SEQ ID NO: 61581 - RNA, 21 nt, Homo sapiens
aacagugcugaacagacaccu

SEQ ID NO: 61582 - RNA, 22 nt, Homo sapiens
aacagugcauucagggauauau

SEQ ID NO: 61583 - RNA, 22 nt, Homo sapiens
aacaguaucuaacgagugauga

SEQ ID NO: 61584 - RNA, 22 nt, Homo sapiens
aacaguguuuuggguuuucugg

SEQ ID NO: 61585 - RNA, 21 nt, Homo sapiens
aacagugcuuaguagauguuc

SEQ ID NO: 61586 - RNA, 22 nt, Homo sapiens
aacagugcuguuauaaauguac

SEQ ID NO: 61587 - RNA, 22 nt, Homo sapiens
aacccugacacaagcagaauuu

SEQ ID NO: 61588 - RNA, 22 nt, Homo sapiens
aaccacauggcucaguggacau

SEQ ID NO: 61589 - RNA, 21 nt, Homo sapiens
aaaugcacauuacugcuggug

SEQ ID NO: 61590 - RNA, 22 nt, Homo sapiens
aaaugcacaaagauuuugcacu

SEQ ID NO: 61591 - RNA, 22 nt, Homo sapiens
aacagcacacccgcugcuucca

SEQ ID NO: 61592 - RNA, 21 nt, Homo sapiens
aagcacauugaguguguguga

SEQ ID NO: 61593 - RNA, 22 nt, Homo sapiens
aagauaguaaacauuuucugcu

SEQ ID NO: 61594 - RNA, 20 nt, Homo sapiens
aagcagacauuuggaugaaa

SEQ ID NO: 61595 - RNA, 22 nt, Homo sapiens
aagccacuguaccugucucuua

SEQ ID NO: 61596 - RNA, 22 nt, Homo sapiens
aaggcuguucauuuagcacagu

SEQ ID NO: 61597 - RNA, 22 nt, Homo sapiens
aagugcucuugaaacugccuua

SEQ ID NO: 61598 - RNA, 22 nt, Homo sapiens
aaggugcucucuuauguagaaa

SEQ ID NO: 61599 - RNA, 22 nt, Homo sapiens
aagugguguuugggagcuggac

SEQ ID NO: 61600 - RNA, 22 nt, Homo sapiens
aagugcuuuacacaugcaugau

SEQ ID NO: 61601 - RNA, 22 nt, Homo sapiens
agcugguuuaauaugcugucug

SEQ ID NO: 61602 - RNA, 20 nt, Homo sapiens
agcugcagauauaaauccgc

SEQ ID NO: 61603 - RNA, 22 nt, Homo sapiens
aaaugcucuguggguaguaaug

SEQ ID NO: 61604 - RNA, 22 nt, Homo sapiens
aggacacugauguaugcugugg

SEQ ID NO: 61605 - RNA, 19 nt, Homo sapiens
aggacuaaagacuagaagu

SEQ ID NO: 61606 - RNA, 22 nt, Homo sapiens
aggaauuuaauguaugauaaua

SEQ ID NO: 61607 - RNA, 22 nt, Homo sapiens
aggacacugauagucuuuggca

SEQ ID NO: 61608 - RNA, 22 nt, Homo sapiens
aggugcaugcuucacuggauau

SEQ ID NO: 61609 - RNA, 22 nt, Homo sapiens
aggugcuauauuucgaggauag

SEQ ID NO: 61610 - RNA, 22 nt, Homo sapiens
aggugguguuggguuccagccc

SEQ ID NO: 61611 - RNA, 22 nt, Homo sapiens
acuggcuuauuucacuuagcau

SEQ ID NO: 61612 - RNA, 22 nt, Homo sapiens
acuggcuguuaggaauuaccuc

SEQ ID NO: 61613 - RNA, 18 nt, Homo sapiens
acuggauguaaagggucc

SEQ ID NO: 61614 - RNA, 22 nt, Homo sapiens
acuggcaauggcagaaauaguu

SEQ ID NO: 61615 - RNA, 22 nt, Homo sapiens
acuguacuccagccugggcaac

SEQ ID NO: 61616 - RNA, 22 nt, Homo sapiens
acuguauagauggaguugauuu

SEQ ID NO: 61617 - RNA, 22 nt, Homo sapiens
acuguacugucuggggcagucu

SEQ ID NO: 61618 - RNA, 22 nt, Homo sapiens
agaauguuuuagaccaauacaa

SEQ ID NO: 61619 - RNA, 20 nt, Homo sapiens
agacagcugcagcccacauc

SEQ ID NO: 61620 - RNA, 19 nt, Homo sapiens
agacuggcccaggcgggug

SEQ ID NO: 61621 - RNA, 22 nt, Homo sapiens
agcauggucacuuugggcccca

SEQ ID NO: 61622 - RNA, 22 nt, Homo sapiens
agccaagacucuguuccccuug

SEQ ID NO: 61623 - RNA, 22 nt, Homo sapiens
agcugcaauguuuaguauaaua

SEQ ID NO: 61624 - RNA, 22 nt, Homo sapiens
agcagugugaaaugauuuaagg

SEQ ID NO: 61625 - RNA, 22 nt, Homo sapiens
agcaguguggccuuagacccgg

SEQ ID NO: 61626 - RNA, 22 nt, Homo sapiens
agcaguagaauuccugcaucac

SEQ ID NO: 61627 - RNA, 22 nt, Homo sapiens
agcagcuuugcauggccuguga

SEQ ID NO: 61628 - RNA, 22 nt, Homo sapiens
agcagcaccaaacagacuaaga

SEQ ID NO: 61629 - RNA, 22 nt, Homo sapiens
agcagauguuuagugagcgccu

SEQ ID NO: 61630 - RNA, 22 nt, Homo sapiens
agcagcgacacccuguggugag

SEQ ID NO: 61631 - RNA, 22 nt, Homo sapiens
acagaccuauuucaaucauuua

SEQ ID NO: 61632 - RNA, 20 nt, Homo sapiens
acagcauagccuuuuaaagc

SEQ ID NO: 61633 - RNA, 18 nt, Homo sapiens
acagugcuggcaugagau

SEQ ID NO: 61634 - RNA, 20 nt, Homo sapiens
acacuggaguaucaaggccc

SEQ ID NO: 61635 - RNA, 22 nt, Homo sapiens
acacgugcguauauguacguau

SEQ ID NO: 61636 - RNA, 22 nt, Homo sapiens
acacguguugaaauuuaauugc

SEQ ID NO: 61637 - RNA, 22 nt, Homo sapiens
acacuguuuuaguuauuauagc

SEQ ID NO: 61638 - RNA, 22 nt, Homo sapiens
acacaugugaaaaaaauguuac

SEQ ID NO: 61639 - RNA, 22 nt, Homo sapiens
aauugcauaugcaguagaucua

SEQ ID NO: 61640 - RNA, 22 nt, Homo sapiens
acacaguaaauauguauugaau

SEQ ID NO: 61641 - RNA, 22 nt, Homo sapiens
acacaguaaauauugucuccuc

SEQ ID NO: 61642 - RNA, 22 nt, Homo sapiens
aaguugguguaugagacagaag

SEQ ID NO: 61643 - RNA, 22 nt, Homo sapiens
aauaaagcugaauccuuccuga

SEQ ID NO: 61644 - RNA, 22 nt, Homo sapiens
acugaguguugauuuagauuaa

SEQ ID NO: 61645 - RNA, 21 nt, Homo sapiens
acugauguuugaaauucgcug

SEQ ID NO: 61646 - RNA, 22 nt, Homo sapiens
acugcacuccagcccaggugac

SEQ ID NO: 61647 - RNA, 22 nt, Homo sapiens
acugcacuccagccucccgucu

SEQ ID NO: 61648 - RNA, 22 nt, Homo sapiens
acugcacuccagcccgggugac

SEQ ID NO: 61649 - RNA, 22 nt, Homo sapiens
acugcacuccagcuccagggug

SEQ ID NO: 61650 - RNA, 22 nt, Homo sapiens
acugcacuucagccuugugaca

SEQ ID NO: 61651 - RNA, 22 nt, Homo sapiens
acugcacucccgcccgggugac

SEQ ID NO: 61652 - RNA, 19 nt, Homo sapiens
acugcacuccuccuugggu

SEQ ID NO: 61653 - RNA, 22 nt, Homo sapiens
accuggcacuuagcaaaucuga

SEQ ID NO: 61654 - RNA, 22 nt, Homo sapiens
accuguagcagacuuaauauuu

SEQ ID NO: 61655 - RNA, 22 nt, Homo sapiens
acaguguuacuugauaguguau

SEQ ID NO: 61656 - RNA, 22 nt, Homo sapiens
accgaguguucucccgcagcgg

SEQ ID NO: 61657 - RNA, 17 nt, Homo sapiens
acagugucuaugaaaug

SEQ ID NO: 61658 - RNA, 17 nt, Homo sapiens
acagugcuuugcuuucc

SEQ ID NO: 61659 - RNA, 22 nt, Homo sapiens
acaguggugcgaucucggcuca

SEQ ID NO: 61660 - RNA, 22 nt, Homo sapiens
acagugcuuggcacacaguaau

SEQ ID NO: 61661 - RNA, 19 nt, Homo sapiens
acagugcuuugucagaagc

SEQ ID NO: 61662 - RNA, 22 nt, Homo sapiens
acagugcuuuuguuccucuccu

SEQ ID NO: 61663 - RNA, 22 nt, Homo sapiens
acggcaguguggugcggucagg

SEQ ID NO: 61664 - RNA, 22 nt, Homo sapiens
aucaaagccaugcucaguuuuc

SEQ ID NO: 61665 - RNA, 22 nt, Homo sapiens
aucagagccugugugcccugaa

SEQ ID NO: 61666 - RNA, 22 nt, Homo sapiens
auauuggccuaaaauucucuuu

SEQ ID NO: 61667 - RNA, 22 nt, Homo sapiens
auaucugcauugccauuuaugu

SEQ ID NO: 61668 - RNA, 22 nt, Homo sapiens
auauugguuaaauauuauguga

SEQ ID NO: 61669 - RNA, 22 nt, Homo sapiens
auaucacaaacaagucuguacu

SEQ ID NO: 61670 - RNA, 23 nt, Homo sapiens
auauaguagaugugcaguaacau

SEQ ID NO: 61671 - RNA, 21 nt, Homo sapiens
aucauaugcucacuccuagaa

SEQ ID NO: 61672 - RNA, 22 nt, Homo sapiens
aucagugauugauuuaaagacg

SEQ ID NO: 61673 - RNA, 22 nt, Homo sapiens
aucccugugacgagcaucccua

SEQ ID NO: 61674 - RNA, 18 nt, Homo sapiens
aucagggugaagagagga

SEQ ID NO: 61675 - RNA, 22 nt, Homo sapiens
aucagcagcaugaaaagcaacu

SEQ ID NO: 61676 - RNA, 22 nt, Homo sapiens
aucagcagcaugaaaacggacu

SEQ ID NO: 61677 - RNA, 22 nt, Homo sapiens
aucagcacugaucauacagcuu

SEQ ID NO: 61678 - RNA, 22 nt, Homo sapiens
aucccugugauccaaucacuuc

SEQ ID NO: 61679 - RNA, 22 nt, Homo sapiens
auccugagacuuugcugaaguu

SEQ ID NO: 61680 - RNA, 22 nt, Homo sapiens
auccucugagaucuaggcagag

SEQ ID NO: 61681 - RNA, 22 nt, Homo sapiens
aucuacagccagucugguuugu

SEQ ID NO: 61682 - RNA, 22 nt, Homo sapiens
aucgcgccauuguacuccagcc

SEQ ID NO: 61683 - RNA, 22 nt, Homo sapiens
auauaccuaggcuacaugguuu

SEQ ID NO: 61684 - RNA, 21 nt, Homo sapiens
auagcacaucagauuuuauua

SEQ ID NO: 61685 - RNA, 22 nt, Homo sapiens
auagcacaguguguguacacca

SEQ ID NO: 61686 - RNA, 22 nt, Homo sapiens
auagcagcagcuaguagugaua

SEQ ID NO: 61687 - RNA, 20 nt, Homo sapiens
auagaagacuagugcagcag

SEQ ID NO: 61688 - RNA, 22 nt, Homo sapiens
auacgugcaggucacaggggau

SEQ ID NO: 61689 - RNA, 22 nt, Homo sapiens
auagagugcuucaucaguagua

SEQ ID NO: 61690 - RNA, 22 nt, Homo sapiens
auagacugaguggcuuaaacca

SEQ ID NO: 61691 - RNA, 22 nt, Homo sapiens
auagaagcugccaacguuucag

SEQ ID NO: 61692 - RNA, 22 nt, Homo sapiens
agucaagaugagauuugggugg

SEQ ID NO: 61693 - RNA, 22 nt, Homo sapiens
aguauguuuugaaaccaagaag

SEQ ID NO: 61694 - RNA, 22 nt, Homo sapiens
aguaucacaguggguguauacc

SEQ ID NO: 61695 - RNA, 22 nt, Homo sapiens
aguaccauuccguuggagcugg

SEQ ID NO: 61696 - RNA, 21 nt, Homo sapiens
aguagcacugugucuuacaaa

SEQ ID NO: 61697 - RNA, 22 nt, Homo sapiens
auaaucacacccagguuaaaug

SEQ ID NO: 61698 - RNA, 22 nt, Homo sapiens
auacaucugccauguuggugug

SEQ ID NO: 61699 - RNA, 22 nt, Homo sapiens
auacaugugcaggucagguuac

SEQ ID NO: 61700 - RNA, 22 nt, Homo sapiens
auacaguguauguauaguacau

SEQ ID NO: 61701 - RNA, 19 nt, Homo sapiens
augccacagugaggucaga

SEQ ID NO: 61702 - RNA, 22 nt, Homo sapiens
augcauggagucuuucacaagu

SEQ ID NO: 61703 - RNA, 22 nt, Homo sapiens
auggaaaugaagggcuggcccu

SEQ ID NO: 61704 - RNA, 22 nt, Homo sapiens
augcauaugucuuuauaguggc

SEQ ID NO: 61705 - RNA, 22 nt, Homo sapiens
augcauagugggaugcucugug

SEQ ID NO: 61706 - RNA, 19 nt, Homo sapiens
augcaaugucacaggcugc

SEQ ID NO: 61707 - RNA, 22 nt, Homo sapiens
augagcaucaccagaaucaaua

SEQ ID NO: 61708 - RNA, 22 nt, Homo sapiens
aucugugaaugaaguuauuuug

SEQ ID NO: 61709 - RNA, 22 nt, Homo sapiens
aucugguguuuuucucccucgu

SEQ ID NO: 61710 - RNA, 22 nt, Homo sapiens
aucugcauuagggugaagaccu

SEQ ID NO: 61711 - RNA, 22 nt, Homo sapiens
aucuggcuucuuuuaguccaca

SEQ ID NO: 61712 - RNA, 22 nt, Homo sapiens
augauuguucucacucaagaga

SEQ ID NO: 61713 - RNA, 22 nt, Homo sapiens
augaguauguucuguauuuuca

SEQ ID NO: 61714 - RNA, 22 nt, Homo sapiens
augaggagguaugauuuucuga

SEQ ID NO: 61715 - RNA, 22 nt, Homo sapiens
augagcuauggagcucccaccu

SEQ ID NO: 61716 - RNA, 22 nt, Homo sapiens
augagggcggacgcccuggaga

SEQ ID NO: 61717 - RNA, 20 nt, Homo sapiens
augugcaguguggcaaccaa

SEQ ID NO: 61718 - RNA, 22 nt, Homo sapiens
augugcaacugcuggaacaguc

SEQ ID NO: 61719 - RNA, 22 nt, Homo sapiens
auguggcuuuccuagaucuuag

SEQ ID NO: 61720 - RNA, 22 nt, Homo sapiens
augugcuugagggaaaucaguu

SEQ ID NO: 61721 - RNA, 22 nt, Homo sapiens
augugcuuauagguguauguuu

SEQ ID NO: 61722 - RNA, 22 nt, Homo sapiens
augugcuuuuggugagagauuu

SEQ ID NO: 61723 - RNA, 22 nt, Homo sapiens
augucuggcagaagacuucuca

SEQ ID NO: 61724 - RNA, 22 nt, Homo sapiens
augucuuucauagagacccaga

SEQ ID NO: 61725 - RNA, 22 nt, Homo sapiens
augucugguagccaccuggagg

SEQ ID NO: 61726 - RNA, 22 nt, Homo sapiens
auguccaugagcacauguauca

SEQ ID NO: 61727 - RNA, 22 nt, Homo sapiens
augucacugcacuccugccugg

SEQ ID NO: 61728 - RNA, 22 nt, Homo sapiens
augucaacauagacaguagagu

SEQ ID NO: 61729 - RNA, 22 nt, Homo sapiens
auguagugugauuuucacuaga

SEQ ID NO: 61730 - RNA, 22 nt, Homo sapiens
augggcacugauguauucugug

SEQ ID NO: 61731 - RNA, 22 nt, Homo sapiens
augggguaggcuugcuguagua

SEQ ID NO: 61732 - RNA, 22 nt, Homo sapiens
augggucuccugaauacagcac

SEQ ID NO: 61733 - RNA, 22 nt, Homo sapiens
auggcuuuguguucagagcuga

SEQ ID NO: 61734 - RNA, 22 nt, Homo sapiens
augggaaaaucagaaggccugg

SEQ ID NO: 61735 - RNA, 22 nt, Homo sapiens
augggacugggugccguggagc

SEQ ID NO: 61736 - RNA, 22 nt, Homo sapiens
auggaggacaaugucaccuuca

SEQ ID NO: 61737 - RNA, 22 nt, Homo sapiens
auggcuuuaagagugucugaau

SEQ ID NO: 61738 - RNA, 22 nt, Homo sapiens
auggauauugccuaggguagua

SEQ ID NO: 61739 - RNA, 22 nt, Homo sapiens
auggagagaauuauucucucag

SEQ ID NO: 61740 - RNA, 19 nt, Homo sapiens
augccuggagaugguuaua

SEQ ID NO: 61741 - RNA, 22 nt, Homo sapiens
uguguacugcagaguauucugu

SEQ ID NO: 61742 - RNA, 22 nt, Homo sapiens
ugugucuugcuggugccugcau

SEQ ID NO: 61743 - RNA, 22 nt, Homo sapiens
uguuacagcagcacaaaaugga

SEQ ID NO: 61744 - RNA, 22 nt, Homo sapiens
uguuaacauuuuagagugggaa

SEQ ID NO: 61745 - RNA, 22 nt, Homo sapiens
uguuaguuguucauguuaagag

SEQ ID NO: 61746 - RNA, 22 nt, Homo sapiens
uguuaugaagaugccugguaca

SEQ ID NO: 61747 - RNA, 22 nt, Homo sapiens
uguucauggauccaguggcuuc

SEQ ID NO: 61748 - RNA, 22 nt, Homo sapiens
uguuauugagguuacuuauaag

SEQ ID NO: 61749 - RNA, 22 nt, Homo sapiens
uuaaaccugucuucucacuaau

SEQ ID NO: 61750 - RNA, 22 nt, Homo sapiens
uguuuguuugagauggagucuc

SEQ ID NO: 61751 - RNA, 22 nt, Homo sapiens
uguuuguuugugauacgguaca

SEQ ID NO: 61752 - RNA, 21 nt, Homo sapiens
uguuuuugcuguguaucucuc

SEQ ID NO: 61753 - RNA, 22 nt, Homo sapiens
uuaaguaaucagagaagagaac

SEQ ID NO: 61754 - RNA, 22 nt, Homo sapiens
uuaacagcacuacguggggauc

SEQ ID NO: 61755 - RNA, 22 nt, Homo sapiens
uuaacagcacaugcugucccuu

SEQ ID NO: 61756 - RNA, 22 nt, Homo sapiens
uguagacagcacguaguugagu

SEQ ID NO: 61757 - RNA, 22 nt, Homo sapiens
uguacacauaugugggguacau

SEQ ID NO: 61758 - RNA, 22 nt, Homo sapiens
uguagacaccaaagacagcaua

SEQ ID NO: 61759 - RNA, 19 nt, Homo sapiens
uguaccagcaagucuuuuc

SEQ ID NO: 61760 - RNA, 22 nt, Homo sapiens
uguaacaggaggaaaaugugaa

SEQ ID NO: 61761 - RNA, 22 nt, Homo sapiens
uggugccgugguccuggggcca

SEQ ID NO: 61762 - RNA, 22 nt, Homo sapiens
uggucucuuugcuuuagucauc

SEQ ID NO: 61763 - RNA, 20 nt, Homo sapiens
uguggcacuguaucucucag

SEQ ID NO: 61764 - RNA, 22 nt, Homo sapiens
uguggccuuuguuucaguuggg

SEQ ID NO: 61765 - RNA, 22 nt, Homo sapiens
ugugcuuguaaaggccagagca

SEQ ID NO: 61766 - RNA, 22 nt, Homo sapiens
uguggaaauuguuguauuuaau

SEQ ID NO: 61767 - RNA, 22 nt, Homo sapiens
ugugguuuuaguaaaacuaugu

SEQ ID NO: 61768 - RNA, 22 nt, Homo sapiens
ugugccacugcacuucagccug

SEQ ID NO: 61769 - RNA, 22 nt, Homo sapiens
ugugccacugcacucuggccug

SEQ ID NO: 61770 - RNA, 22 nt, Homo sapiens
ugugccacuccagcucuagcuu

SEQ ID NO: 61771 - RNA, 22 nt, Homo sapiens
ugugccacugcacuccugccug

SEQ ID NO: 61772 - RNA, 22 nt, Homo sapiens
ugugcguguaagagaucuaggu

SEQ ID NO: 61773 - RNA, 22 nt, Homo sapiens
ugugauugauuaaugugugcua

SEQ ID NO: 61774 - RNA, 23 nt, Homo sapiens
ugugcacauuuacauauauacac

SEQ ID NO: 61775 - RNA, 22 nt, Homo sapiens
ugugccacuccaaccuggguga

SEQ ID NO: 61776 - RNA, 22 nt, Homo sapiens
uucccuguaucuucugccaugu

SEQ ID NO: 61777 - RNA, 22 nt, Homo sapiens
uucauguagucaucauccugcu

SEQ ID NO: 61778 - RNA, 22 nt, Homo sapiens
uucauguaauauauuucaggcc

SEQ ID NO: 61779 - RNA, 22 nt, Homo sapiens
uucauagugaaaaauucaaagu

SEQ ID NO: 61780 - RNA, 22 nt, Homo sapiens
uucuuagucauguaauagucca

SEQ ID NO: 61781 - RNA, 22 nt, Homo sapiens
uucuucaggcauucccagaagc

SEQ ID NO: 61782 - RNA, 22 nt, Homo sapiens
uucugugcuuguggaugaagug

SEQ ID NO: 61783 - RNA, 22 nt, Homo sapiens
uucugcuugaucuaguguguug

SEQ ID NO: 61784 - RNA, 22 nt, Homo sapiens
uucugccaaucaacccacaucc

SEQ ID NO: 61785 - RNA, 22 nt, Homo sapiens
uuacauguuguggguuguggcc

SEQ ID NO: 61786 - RNA, 22 nt, Homo sapiens
uuacauaguguguggguucggg

SEQ ID NO: 61787 - RNA, 22 nt, Homo sapiens
uuacaguucugguggagaggua

SEQ ID NO: 61788 - RNA, 20 nt, Homo sapiens
uuacagugggaccuuccuga

SEQ ID NO: 61789 - RNA, 22 nt, Homo sapiens
uuaugccagugauuauaagggc

SEQ ID NO: 61790 - RNA, 22 nt, Homo sapiens
uucaagaauuaaaguggcuuuu

SEQ ID NO: 61791 - RNA, 22 nt, Homo sapiens
uucaagauggcaccagugagug

SEQ ID NO: 61792 - RNA, 22 nt, Homo sapiens
uucaaauguucuuucaccaccc

SEQ ID NO: 61793 - RNA, 22 nt, Homo sapiens
uucacacuagccacucugguag

SEQ ID NO: 61794 - RNA, 18 nt, Homo sapiens
uucaguuuguaucugggg

SEQ ID NO: 61795 - RNA, 22 nt, Homo sapiens
uucacagucacccuucuccaug

SEQ ID NO: 61796 - RNA, 22 nt, Homo sapiens
uucacaguggugggagacguca

SEQ ID NO: 61797 - RNA, 22 nt, Homo sapiens
uuugggccauggcuuuuccacg

SEQ ID NO: 61798 - RNA, 22 nt, Homo sapiens
uuugggcuuuuaaucuagagca

SEQ ID NO: 61799 - RNA, 22 nt, Homo sapiens
uuugguaguuuguugggaccca

SEQ ID NO: 61800 - RNA, 22 nt, Homo sapiens
uuuggcauuugaguuuguagga

SEQ ID NO: 61801 - RNA, 22 nt, Homo sapiens
uuuggccauguuggucaggcug

SEQ ID NO: 61802 - RNA, 22 nt, Homo sapiens
uuuggcuguuucuggacuaaga

SEQ ID NO: 61803 - RNA, 18 nt, Homo sapiens
uuuggcuguucaugacuc

SEQ ID NO: 61804 - RNA, 22 nt, Homo sapiens
uuugugcuccugugagaaucua

SEQ ID NO: 61805 - RNA, 18 nt, Homo sapiens
uuugugcuccacaaagga

SEQ ID NO: 61806 - RNA, 22 nt, Homo sapiens
uuugugcuccuaugagaaucua

SEQ ID NO: 61807 - RNA, 22 nt, Homo sapiens
uuugugcuauguuauauauucu

SEQ ID NO: 61808 - RNA, 22 nt, Homo sapiens
uuugugagguggauagauugca

SEQ ID NO: 61809 - RNA, 22 nt, Homo sapiens
uuugauacuggguguggacaaa

SEQ ID NO: 61810 - RNA, 19 nt, Homo sapiens
uuugaauauaaugcagcua

SEQ ID NO: 61811 - RNA, 22 nt, Homo sapiens
uuugacaaugugugcuuguauu

SEQ ID NO: 61812 - RNA, 22 nt, Homo sapiens
uugucaugguuaauuuuaugua

SEQ ID NO: 61813 - RNA, 22 nt, Homo sapiens
uugugcuuuugagcugagauga

SEQ ID NO: 61814 - RNA, 22 nt, Homo sapiens
uugucacuauaaauaagcauuu

SEQ ID NO: 61815 - RNA, 22 nt, Homo sapiens
uugucaaacucauucuccaucc

SEQ ID NO: 61816 - RNA, 22 nt, Homo sapiens
uugugguuuuagcacuguggau

SEQ ID NO: 61817 - RNA, 16 nt, Homo sapiens
uuguggcuuuugcaca

SEQ ID NO: 61818 - RNA, 22 nt, Homo sapiens
uuguggcuuaucucauuuagcg

SEQ ID NO: 61819 - RNA, 22 nt, Homo sapiens
uuguaguguuuauucugucaac

SEQ ID NO: 61820 - RNA, 22 nt, Homo sapiens
uuggucucaucaagagcagcuu

SEQ ID NO: 61821 - RNA, 23 nt, Homo sapiens
uuggucucccaaaguguugagau

SEQ ID NO: 61822 - RNA, 22 nt, Homo sapiens
uugguuaucaucauuucagcaa

SEQ ID NO: 61823 - RNA, 22 nt, Homo sapiens
uuguauguuucugugcacauga

SEQ ID NO: 61824 - RNA, 22 nt, Homo sapiens
uuguauguugaaugaugguaua

SEQ ID NO: 61825 - RNA, 22 nt, Homo sapiens
uuguagcuuuuuaaugugcugc

SEQ ID NO: 61826 - RNA, 22 nt, Homo sapiens
uuuccuguagggggcaaggccu

SEQ ID NO: 61827 - RNA, 22 nt, Homo sapiens
uuucgugucuggucugugaugg

SEQ ID NO: 61828 - RNA, 22 nt, Homo sapiens
uuucugcuugagagaauugcug

SEQ ID NO: 61829 - RNA, 22 nt, Homo sapiens
uuuagggcaggccuggugguga

SEQ ID NO: 61830 - RNA, 22 nt, Homo sapiens
uugugguuuucagcuuauauau

SEQ ID NO: 61831 - RNA, 22 nt, Homo sapiens
uuuaguccucugaaaaucuaua

SEQ ID NO: 61832 - RNA, 22 nt, Homo sapiens
uuuagguauuugguauagcagu

SEQ ID NO: 61833 - RNA, 22 nt, Homo sapiens
uuuaucuguuuaaaacuguuca

SEQ ID NO: 61834 - RNA, 22 nt, Homo sapiens
uuuauguggagcacuugacaca

SEQ ID NO: 61835 - RNA, 22 nt, Homo sapiens
uuggcaagaaccuucuuccaag

SEQ ID NO: 61836 - RNA, 22 nt, Homo sapiens
uuggcagugguucugacggacc

SEQ ID NO: 61837 - RNA, 22 nt, Homo sapiens
uuggcacugagcaagaacaggg

SEQ ID NO: 61838 - RNA, 22 nt, Homo sapiens
uuggcagcauuccagccaagca

SEQ ID NO: 61839 - RNA, 22 nt, Homo sapiens
uugguaguuucugucuuuagau

SEQ ID NO: 61840 - RNA, 22 nt, Homo sapiens
uuggcccugcugaccauucccu

SEQ ID NO: 61841 - RNA, 22 nt, Homo sapiens
uugcuuuguuacugcaguuucc

SEQ ID NO: 61842 - RNA, 22 nt, Homo sapiens
uuggaaacauuuaugguaacag

SEQ ID NO: 61843 - RNA, 22 nt, Homo sapiens
uuggaaaccucugcagguguuu

SEQ ID NO: 61844 - RNA, 22 nt, Homo sapiens
uuggaaacaccuggugagguua

SEQ ID NO: 61845 - RNA, 22 nt, Homo sapiens
uugcuagucucuguuucaggau

SEQ ID NO: 61846 - RNA, 22 nt, Homo sapiens
uugcuacuuggauguacaugug

SEQ ID NO: 61847 - RNA, 22 nt, Homo sapiens
uugcggcaguacagcccaggua

SEQ ID NO: 61848 - RNA, 22 nt, Homo sapiens
uugccuuuguuggaaacaagug

SEQ ID NO: 61849 - RNA, 22 nt, Homo sapiens
uugcaugcuccuuaugagaauc

SEQ ID NO: 61850 - RNA, 20 nt, Homo sapiens
uugccgagagaaagguguua

SEQ ID NO: 61851 - RNA, 22 nt, Homo sapiens
uugcccuuuagguaacuauaua

SEQ ID NO: 61852 - RNA, 23 nt, Homo sapiens
uugcauugcccuccauaguacuc

SEQ ID NO: 61853 - RNA, 22 nt, Homo sapiens
uugcauugacacaugaagcuca

SEQ ID NO: 61854 - RNA, 22 nt, Homo sapiens
uugcacuuccgccugggugaca

SEQ ID NO: 61855 - RNA, 22 nt, Homo sapiens
uugcaguacuucuggcuuuaca

SEQ ID NO: 61856 - RNA, 22 nt, Homo sapiens
uugcagaucccacacucacccu

SEQ ID NO: 61857 - RNA, 22 nt, Homo sapiens
uucuuugcaugaucucaaaguc

SEQ ID NO: 61858 - RNA, 22 nt, Homo sapiens
ugaagacauuuuugggugugua

SEQ ID NO: 61859 - RNA, 22 nt, Homo sapiens
ugaaggcaggagggagaaaagu

SEQ ID NO: 61860 - RNA, 22 nt, Homo sapiens
ugaagugaagcaguaguguggg

SEQ ID NO: 61861 - RNA, 20 nt, Homo sapiens
ugaacugguuacuuucuguc

SEQ ID NO: 61862 - RNA, 22 nt, Homo sapiens
ugaacagcacguuuauucagaa

SEQ ID NO: 61863 - RNA, 22 nt, Homo sapiens
ugaacagcaccuccuagaguug

SEQ ID NO: 61864 - RNA, 22 nt, Homo sapiens
ugaaaugucuuuaggaggcuuc

SEQ ID NO: 61865 - RNA, 23 nt, Homo sapiens
ugacaagagcgagacuuggucuc

SEQ ID NO: 61866 - RNA, 22 nt, Homo sapiens
ugacauguagagaacuucucau

SEQ ID NO: 61867 - RNA, 22 nt, Homo sapiens
ugacauugggagugaagugaag

SEQ ID NO: 61868 - RNA, 16 nt, Homo sapiens
ugaauguuuguggcug

SEQ ID NO: 61869 - RNA, 23 nt, Homo sapiens
ugaauguuuauucucggugcaga

SEQ ID NO: 61870 - RNA, 22 nt, Homo sapiens
ugaauguuguugguugagauau

SEQ ID NO: 61871 - RNA, 22 nt, Homo sapiens
ugaaugugauggguuucaugug

SEQ ID NO: 61872 - RNA, 22 nt, Homo sapiens
ugaaugguuuuuagagaacaau

SEQ ID NO: 61873 - RNA, 22 nt, Homo sapiens
ugaaugcaucuagaaauuuauu

SEQ ID NO: 61874 - RNA, 19 nt, Homo sapiens
ucucaguguuggucaggug

SEQ ID NO: 61875 - RNA, 22 nt, Homo sapiens
ucucagugaauugguuuugucu

SEQ ID NO: 61876 - RNA, 22 nt, Homo sapiens
ucucagugacugcugggucccc

SEQ ID NO: 61877 - RNA, 22 nt, Homo sapiens
uccuuuaguuaauaaagacaag

SEQ ID NO: 61878 - RNA, 22 nt, Homo sapiens
ucgcaccauugcacuccagcca

SEQ ID NO: 61879 - RNA, 22 nt, Homo sapiens
uccuuuguuacaguuggcucug

SEQ ID NO: 61880 - RNA, 22 nt, Homo sapiens
uccuuuagacugaauccugaga

SEQ ID NO: 61881 - RNA, 22 nt, Homo sapiens
ucuguaguuaacagcuucagcu

SEQ ID NO: 61882 - RNA, 22 nt, Homo sapiens
ucucccauccguacacggauug

SEQ ID NO: 61883 - RNA, 22 nt, Homo sapiens
ucucccauccaugaacuucugu

SEQ ID NO: 61884 - RNA, 22 nt, Homo sapiens
ucugugcauggcagaggaauga

SEQ ID NO: 61885 - RNA, 22 nt, Homo sapiens
aacagaccuagauaguauaguc

SEQ ID NO: 61886 - RNA, 22 nt, Homo sapiens
aacacuguuuccagucaugauc

SEQ ID NO: 61887 - RNA, 22 nt, Homo sapiens
ucuuucacuuagcaugauguuu

SEQ ID NO: 61888 - RNA, 22 nt, Homo sapiens
aacagucuccaguuguauccau

SEQ ID NO: 61889 - RNA, 22 nt, Homo sapiens
aacagugcuucauucacacauu

SEQ ID NO: 61890 - RNA, 22 nt, Homo sapiens
aacagucaauugcugaugaccu

SEQ ID NO: 61891 - RNA, 17 nt, Homo sapiens
uccagauuucaauugaa

SEQ ID NO: 61892 - RNA, 22 nt, Homo sapiens
uccagguuucaugcucuuuauu

SEQ ID NO: 61893 - RNA, 22 nt, Homo sapiens
uccaccgugggcugcggggcuc

SEQ ID NO: 61894 - RNA, 21 nt, Homo sapiens
ucauugggugcagcccacccu

SEQ ID NO: 61895 - RNA, 19 nt, Homo sapiens
uccacagugguugaacuag

SEQ ID NO: 61896 - RNA, 22 nt, Homo sapiens
uccacaguggugaggugcagca

SEQ ID NO: 61897 - RNA, 22 nt, Homo sapiens
ucauggcauuguuaaggguuuu

SEQ ID NO: 61898 - RNA, 19 nt, Homo sapiens
ucauggcuuuuucagcugu

SEQ ID NO: 61899 - RNA, 22 nt, Homo sapiens
ucaugggagcccccaucaugag

SEQ ID NO: 61900 - RNA, 23 nt, Homo sapiens
ucaugguagcaccaacaauaacu

SEQ ID NO: 61901 - RNA, 22 nt, Homo sapiens
ucauguauuaucauuagugggu

SEQ ID NO: 61902 - RNA, 23 nt, Homo sapiens
ucauguauucccuguaaugggua

SEQ ID NO: 61903 - RNA, 22 nt, Homo sapiens
ucauugcauguuaauuaaacag

SEQ ID NO: 61904 - RNA, 22 nt, Homo sapiens
ucaugguuuuauaacccucuug

SEQ ID NO: 61905 - RNA, 22 nt, Homo sapiens
ucauggggugagcuacaggcac

SEQ ID NO: 61906 - RNA, 22 nt, Homo sapiens
ucaugucuuguuguauuuauuu

SEQ ID NO: 61907 - RNA, 22 nt, Homo sapiens
ucaugugagcaaguugggcuca

SEQ ID NO: 61908 - RNA, 22 nt, Homo sapiens
uccagguuuugugaguuuaaau

SEQ ID NO: 61909 - RNA, 22 nt, Homo sapiens
uccaugugaaaaggucgugaua

SEQ ID NO: 61910 - RNA, 22 nt, Homo sapiens
uccaguuuucuuuccuagggcu

SEQ ID NO: 61911 - RNA, 22 nt, Homo sapiens
uccuggcuccacuguuuauucc

SEQ ID NO: 61912 - RNA, 22 nt, Homo sapiens
uccuugaaacaggaagaauuca

SEQ ID NO: 61913 - RNA, 17 nt, Homo sapiens
ucccauguuucuucuac

SEQ ID NO: 61914 - RNA, 22 nt, Homo sapiens
ucccagucuagagccggauugg

SEQ ID NO: 61915 - RNA, 22 nt, Homo sapiens
uccugagacucacaggcucccc

SEQ ID NO: 61916 - RNA, 22 nt, Homo sapiens
uccugagagcagacccucuaua

SEQ ID NO: 61917 - RNA, 21 nt, Homo sapiens
uccugagagaggaguaacucu

SEQ ID NO: 61918 - RNA, 22 nt, Homo sapiens
ucagugcuguuugcccucguuu

SEQ ID NO: 61919 - RNA, 22 nt, Homo sapiens
ucaguggagcuacaauucuggg

SEQ ID NO: 61920 - RNA, 22 nt, Homo sapiens
ucagugcgugcauagccuggau

SEQ ID NO: 61921 - RNA, 22 nt, Homo sapiens
ucaguggauuauuaaagucacc

SEQ ID NO: 61922 - RNA, 22 nt, Homo sapiens
ucaguguugauggcugcugacu

SEQ ID NO: 61923 - RNA, 22 nt, Homo sapiens
ucagugucugugcaccgcugga

SEQ ID NO: 61924 - RNA, 22 nt, Homo sapiens
ucagugguuaaaagauucuaga

SEQ ID NO: 61925 - RNA, 20 nt, Homo sapiens
ucaucaguuggugcucgcug

SEQ ID NO: 61926 - RNA, 22 nt, Homo sapiens
ucauacuguugugaaacaaaac

SEQ ID NO: 61927 - RNA, 21 nt, Homo sapiens
ucaucaagcuguagacaugau

SEQ ID NO: 61928 - RNA, 22 nt, Homo sapiens
ucauauugguuaaaauaguggg

SEQ ID NO: 61929 - RNA, 22 nt, Homo sapiens
ucagaugcauccauaccccacu

SEQ ID NO: 61930 - RNA, 22 nt, Homo sapiens
ucagcagugagagaccucaccc

SEQ ID NO: 61931 - RNA, 22 nt, Homo sapiens
ucaguagcauugcuuauacagu

SEQ ID NO: 61932 - RNA, 22 nt, Homo sapiens
ucaguaaucuuagcugugcaga

SEQ ID NO: 61933 - RNA, 21 nt, Homo sapiens
ucaggcuuuuugagugccaau

SEQ ID NO: 61934 - RNA, 20 nt, Homo sapiens
ucaggcuccgcauuaacuua

SEQ ID NO: 61935 - RNA, 22 nt, Homo sapiens
uggguagaugaauccauuccaa

SEQ ID NO: 61936 - RNA, 22 nt, Homo sapiens
ugggaaacauccagcacauacu

SEQ ID NO: 61937 - RNA, 20 nt, Homo sapiens
ugggaaauguccaggacaua

SEQ ID NO: 61938 - RNA, 23 nt, Homo sapiens
uggguucauucuugaagucagug

SEQ ID NO: 61939 - RNA, 20 nt, Homo sapiens
uggcuucuuaauugcaggca

SEQ ID NO: 61940 - RNA, 22 nt, Homo sapiens
uggcuguuuauuucacaugggu

SEQ ID NO: 61941 - RNA, 22 nt, Homo sapiens
uggcuguuguuacuaacaguuc

SEQ ID NO: 61942 - RNA, 23 nt, Homo sapiens
ugguaacauguuguggcagggga

SEQ ID NO: 61943 - RNA, 22 nt, Homo sapiens
uggcuacagaaaguacuaguga

SEQ ID NO: 61944 - RNA, 22 nt, Homo sapiens
uggcucuuucuagacuuaauua

SEQ ID NO: 61945 - RNA, 21 nt, Homo sapiens
uggcuauuucuguggcauaca

SEQ ID NO: 61946 - RNA, 22 nt, Homo sapiens
uggcuagauauccagaguucug

SEQ ID NO: 61947 - RNA, 22 nt, Homo sapiens
uggcuauuucgucaugcucccc

SEQ ID NO: 61948 - RNA, 22 nt, Homo sapiens
uggcagcgcaguugaaaaagaa

SEQ ID NO: 61949 - RNA, 22 nt, Homo sapiens
uggcagugggagauauuuuauu

SEQ ID NO: 61950 - RNA, 22 nt, Homo sapiens
uggcaagaucacaauuacuuuu

SEQ ID NO: 61951 - RNA, 22 nt, Homo sapiens
uggcaagcaggacuaaagcacc

SEQ ID NO: 61952 - RNA, 22 nt, Homo sapiens
uggcaaauagcaauaggagggu

SEQ ID NO: 61953 - RNA, 22 nt, Homo sapiens
uggcaaauauuuuguuuuguaa

SEQ ID NO: 61954 - RNA, 22 nt, Homo sapiens
uggcaaauguaguacccaauag

SEQ ID NO: 61955 - RNA, 22 nt, Homo sapiens
uggcaaauuccaaaguuaauuc

SEQ ID NO: 61956 - RNA, 22 nt, Homo sapiens
uggaagacucuagucucuugag

SEQ ID NO: 61957 - RNA, 22 nt, Homo sapiens
uggaagcaugcaaucugugggg

SEQ ID NO: 61958 - RNA, 23 nt, Homo sapiens
uggaggacaagcauggauaguga

SEQ ID NO: 61959 - RNA, 22 nt, Homo sapiens
ugccuagagagaaccauaacug

SEQ ID NO: 61960 - RNA, 22 nt, Homo sapiens
ugccaugaaguaauggcaaaaa

SEQ ID NO: 61961 - RNA, 22 nt, Homo sapiens
ugcaucaggcugcuuauuacaa

SEQ ID NO: 61962 - RNA, 22 nt, Homo sapiens
ugccuaggcuggaaugcaaugg

SEQ ID NO: 61963 - RNA, 22 nt, Homo sapiens
ugccuaggcuggaaugcagugg

SEQ ID NO: 61964 - RNA, 22 nt, Homo sapiens
ugccuaggcuggagugcagugg

SEQ ID NO: 61965 - RNA, 22 nt, Homo sapiens
ugccuaggcuggaguguagugg

SEQ ID NO: 61966 - RNA, 22 nt, Homo sapiens
ugccuggagagcuccuacauau

SEQ ID NO: 61967 - RNA, 22 nt, Homo sapiens
ugauccagugcucaguuggagu

SEQ ID NO: 61968 - RNA, 22 nt, Homo sapiens
ugaucacagcuugacuaaagga

SEQ ID NO: 61969 - RNA, 21 nt, Homo sapiens
ugaucacaugaaaaccaugca

SEQ ID NO: 61970 - RNA, 22 nt, Homo sapiens
ugaucugucacuuaucacauuu

SEQ ID NO: 61971 - RNA, 22 nt, Homo sapiens
ugauauguguaaacaauguaua

SEQ ID NO: 61972 - RNA, 22 nt, Homo sapiens
ugauuuguccauguggcacgug

SEQ ID NO: 61973 - RNA, 22 nt, Homo sapiens
ugauuuguuuagugccaaguuu

SEQ ID NO: 61974 - RNA, 22 nt, Homo sapiens
ugcaccacugcacuccagcuug

SEQ ID NO: 61975 - RNA, 22 nt, Homo sapiens
ugcauacacaagcauacaugua

SEQ ID NO: 61976 - RNA, 18 nt, Homo sapiens
ugaggaaaggguuugcua

SEQ ID NO: 61977 - RNA, 22 nt, Homo sapiens
ugagguguuugugcaccaucug

SEQ ID NO: 61978 - RNA, 22 nt, Homo sapiens
ugagguugaaggacauuuuuau

SEQ ID NO: 61979 - RNA, 22 nt, Homo sapiens
ugagguuggggucagggcuagc

SEQ ID NO: 61980 - RNA, 22 nt, Homo sapiens
ugaguacuacuaguuacugcua

SEQ ID NO: 61981 - RNA, 22 nt, Homo sapiens
ugagguugguauuacugucucu

SEQ ID NO: 61982 - RNA, 22 nt, Homo sapiens
ugauaugaaguuagcuggcugu

SEQ ID NO: 61983 - RNA, 22 nt, Homo sapiens
ugauaggucacucaacagugag

SEQ ID NO: 61984 - RNA, 22 nt, Homo sapiens
ugauagucauucaauuuagcca

SEQ ID NO: 61985 - RNA, 19 nt, Homo sapiens
ugaguauauuguauucauu

SEQ ID NO: 61986 - RNA, 22 nt, Homo sapiens
ugagauguguccagaucuaguu

SEQ ID NO: 61987 - RNA, 22 nt, Homo sapiens
ugagauguggcuagagagguug

SEQ ID NO: 61988 - RNA, 22 nt, Homo sapiens
ugagauuauauuucuuaacaga

SEQ ID NO: 61989 - RNA, 22 nt, Homo sapiens
ugacggaggcauuggaagcuug

SEQ ID NO: 61990 - RNA, 22 nt, Homo sapiens
ugacggaggacaccugcggaau

SEQ ID NO: 61991 - RNA, 19 nt, Homo sapiens
ugaccagggacagaaacca

SEQ ID NO: 61992 - RNA, 22 nt, Homo sapiens
ugagcauauugugauaccuaaa

SEQ ID NO: 61993 - RNA, 22 nt, Homo sapiens
ugagcaauaaaguuacacaguu

SEQ ID NO: 61994 - RNA, 23 nt, Homo sapiens
ugagcaauauucuacuauugagu

SEQ ID NO: 61995 - RNA, 22 nt, Homo sapiens
caccuguacauggcaguguccu

SEQ ID NO: 61996 - RNA, 22 nt, Homo sapiens
caccgagguuggagugcagugg

SEQ ID NO: 61997 - RNA, 22 nt, Homo sapiens
caccauguguucagaaggauug

SEQ ID NO: 61998 - RNA, 19 nt, Homo sapiens
caccagugcaugcuacuau

SEQ ID NO: 61999 - RNA, 22 nt, Homo sapiens
caccacuacaccccaggcuggg

SEQ ID NO: 62000 - RNA, 22 nt, Homo sapiens
caaagucuucucauuaugucuu

SEQ ID NO: 62001 - RNA, 22 nt, Homo sapiens
caacaguaaagcauuuuuaagu

SEQ ID NO: 62002 - RNA, 22 nt, Homo sapiens
caacacagugaaacccgucucu

SEQ ID NO: 62003 - RNA, 22 nt, Homo sapiens
caacagucagcccauccacaga

SEQ ID NO: 62004 - RNA, 22 nt, Homo sapiens
cacauugcaggaaaguucauua

SEQ ID NO: 62005 - RNA, 20 nt, Homo sapiens
cagucauagacaucagaguc

SEQ ID NO: 62006 - RNA, 22 nt, Homo sapiens
cagcuguuguuaugucugcagg

SEQ ID NO: 62007 - RNA, 22 nt, Homo sapiens
cagcucuuguuaaaacuaacua

SEQ ID NO: 62008 - RNA, 22 nt, Homo sapiens
cagcgaggucugcgucacauug

SEQ ID NO: 62009 - RNA, 22 nt, Homo sapiens
cagugcuuuaucaaguccucca

SEQ ID NO: 62010 - RNA, 22 nt, Homo sapiens
cagugacacugaaaaguucggg

SEQ ID NO: 62011 - RNA, 18 nt, Homo sapiens
cagugcaauacaggagag

SEQ ID NO: 62012 - RNA, 22 nt, Homo sapiens
cagugcacugggauuauaagug

SEQ ID NO: 62013 - RNA, 22 nt, Homo sapiens
cauaaagauggaggaggccagg

SEQ ID NO: 62014 - RNA, 22 nt, Homo sapiens
caguggaugauguuuucugugg

SEQ ID NO: 62015 - RNA, 22 nt, Homo sapiens
auuggugaccugcggcaguaug

SEQ ID NO: 62016 - RNA, 22 nt, Homo sapiens
auuguacuccagccuaggcaac

SEQ ID NO: 62017 - RNA, 22 nt, Homo sapiens
auuguacugccccccuguugcu

SEQ ID NO: 62018 - RNA, 22 nt, Homo sapiens
auuguguuugaaugaggcucca

SEQ ID NO: 62019 - RNA, 21 nt, Homo sapiens
auuugguguuagaaauaaauu

SEQ ID NO: 62020 - RNA, 22 nt, Homo sapiens
auuuggcagugaagggaucaca

SEQ ID NO: 62021 - RNA, 22 nt, Homo sapiens
auuuggcaauuuugaagaugcc

SEQ ID NO: 62022 - RNA, 22 nt, Homo sapiens
auugccacaucucagaggcaga

SEQ ID NO: 62023 - RNA, 22 nt, Homo sapiens
auugcccauaaggauauuguca

SEQ ID NO: 62024 - RNA, 22 nt, Homo sapiens
auugcuuuuacugggagcuuug

SEQ ID NO: 62025 - RNA, 22 nt, Homo sapiens
auuggcagaaaucuuuauagua

SEQ ID NO: 62026 - RNA, 22 nt, Homo sapiens
auuagguuggugcaaaacuuuc

SEQ ID NO: 62027 - RNA, 22 nt, Homo sapiens
auuauaguguauacuugaaauu

SEQ ID NO: 62028 - RNA, 22 nt, Homo sapiens
cugaaaagcaucugcauagcug

SEQ ID NO: 62029 - RNA, 22 nt, Homo sapiens
cugaauguuucacucugaaaug

SEQ ID NO: 62030 - RNA, 22 nt, Homo sapiens
cugaauguuuucuucuauucug

SEQ ID NO: 62031 - RNA, 22 nt, Homo sapiens
cucaguggauuagauaaugcac

SEQ ID NO: 62032 - RNA, 22 nt, Homo sapiens
cucagugucuggcacacagaaa

SEQ ID NO: 62033 - RNA, 22 nt, Homo sapiens
cucaccuugugauccacccgcc

SEQ ID NO: 62034 - RNA, 22 nt, Homo sapiens
cucaccuugugauccaccggcc

SEQ ID NO: 62035 - RNA, 22 nt, Homo sapiens
cucaaguacaugggauuacagg

SEQ ID NO: 62036 - RNA, 22 nt, Homo sapiens
cucacagucagaagggacuugc

SEQ ID NO: 62037 - RNA, 21 nt, Homo sapiens
ccugaagaagugaccucugag

SEQ ID NO: 62038 - RNA, 22 nt, Homo sapiens
ccugagacugauugacucacaa

SEQ ID NO: 62039 - RNA, 22 nt, Homo sapiens
ccuguguuaugguuucuaaugu

SEQ ID NO: 62040 - RNA, 22 nt, Homo sapiens
ccuggcacugggccccguggcu

SEQ ID NO: 62041 - RNA, 23 nt, Homo sapiens
ccuguagaaugucugugauacuu

SEQ ID NO: 62042 - RNA, 22 nt, Homo sapiens
cuagcuuuuuaugacaaucuug

SEQ ID NO: 62043 - RNA, 22 nt, Homo sapiens
ccuucauucauuaauuuagccc

SEQ ID NO: 62044 - RNA, 22 nt, Homo sapiens
cuaugcuucuuaaauuaguuau

SEQ ID NO: 62045 - RNA, 22 nt, Homo sapiens
cuaucugcacaggguggaaauu

SEQ ID NO: 62046 - RNA, 22 nt, Homo sapiens
cuaguaaugucugucuuaugga

SEQ ID NO: 62047 - RNA, 22 nt, Homo sapiens
ccacaaccucaacagcaucuau

SEQ ID NO: 62048 - RNA, 22 nt, Homo sapiens
ccacacugucuuggugggaaac

SEQ ID NO: 62049 - RNA, 19 nt, Homo sapiens
ccacaaugguugaacuaga

SEQ ID NO: 62050 - RNA, 23 nt, Homo sapiens
ccacacuguuuagaauggcauca

SEQ ID NO: 62051 - RNA, 22 nt, Homo sapiens
ccacagucuaugcaacaagguc

SEQ ID NO: 62052 - RNA, 22 nt, Homo sapiens
ccagcaccauuuauuaaauagg

SEQ ID NO: 62053 - RNA, 22 nt, Homo sapiens
ccacccuuccauucuuccucuu

SEQ ID NO: 62054 - RNA, 22 nt, Homo sapiens
ccacauuaccuugcuugcucca

SEQ ID NO: 62055 - RNA, 21 nt, Homo sapiens
caucaaauugucauggugggu

SEQ ID NO: 62056 - RNA, 18 nt, Homo sapiens
cauagcacuucagcacau

SEQ ID NO: 62057 - RNA, 22 nt, Homo sapiens
cauacaagcuacaaucacaaag

SEQ ID NO: 62058 - RNA, 21 nt, Homo sapiens
caucacauuacucaaaguccu

SEQ ID NO: 62059 - RNA, 22 nt, Homo sapiens
cccaguguuacgugacagccug

SEQ ID NO: 62060 - RNA, 23 nt, Homo sapiens
ccauugcacuccagccucaguga

SEQ ID NO: 62061 - RNA, 22 nt, Homo sapiens
cccacaguggccucauauccuu

SEQ ID NO: 62062 - RNA, 19 nt, Homo sapiens
ccauggcaaugaucugaug

SEQ ID NO: 62063 - RNA, 22 nt, Homo sapiens
ccauggcuucugcauucuguca

SEQ ID NO: 62064 - RNA, 21 nt, Homo sapiens
ccccugauacuuagucaagag

SEQ ID NO: 62065 - RNA, 22 nt, Homo sapiens
cccgugucuuggucuagggccu

SEQ ID NO: 62066 - RNA, 22 nt, Homo sapiens
ccgugcacggaaaggcauauuu

SEQ ID NO: 62067 - RNA, 22 nt, Homo sapiens
ccggcugugugacugugggcag

SEQ ID NO: 62068 - RNA, 22 nt, Homo sapiens
ccucauggagaaccucugcuag

SEQ ID NO: 62069 - RNA, 22 nt, Homo sapiens
cccuguguuguucaaggaucug

SEQ ID NO: 62070 - RNA, 22 nt, Homo sapiens
cccugacauucggagauguagu

SEQ ID NO: 62071 - RNA, 22 nt, Homo sapiens
cccugaagauacagaguuuggg

SEQ ID NO: 62072 - RNA, 19 nt, Homo sapiens
cccuggcacauggaaaaug

SEQ ID NO: 62073 - RNA, 22 nt, Homo sapiens
gcaguggugugugccagccuag

SEQ ID NO: 62074 - RNA, 17 nt, Homo sapiens
gcauaugucgaaccagc

SEQ ID NO: 62075 - RNA, 20 nt, Homo sapiens
gcagcaccauauuucuaaga

SEQ ID NO: 62076 - RNA, 22 nt, Homo sapiens
gcagcacaugacuguauguaua

SEQ ID NO: 62077 - RNA, 22 nt, Homo sapiens
gauuagugacguugagcacugu

SEQ ID NO: 62078 - RNA, 22 nt, Homo sapiens
gauuguguucauaggcauguua

SEQ ID NO: 62079 - RNA, 22 nt, Homo sapiens
gcaaaguguuuuuaggaagucu

SEQ ID NO: 62080 - RNA, 19 nt, Homo sapiens
gcaguauugaaggccaguc

SEQ ID NO: 62081 - RNA, 22 nt, Homo sapiens
gcccugauacauucuucugccu

SEQ ID NO: 62082 - RNA, 22 nt, Homo sapiens
gccuagagaguuaucaggcugu

SEQ ID NO: 62083 - RNA, 22 nt, Homo sapiens
gccuaguguuaauguguguuca

SEQ ID NO: 62084 - RNA, 19 nt, Homo sapiens
gcugguuguccacucucuc

SEQ ID NO: 62085 - RNA, 22 nt, Homo sapiens
gauauguuagggggagaaguua

SEQ ID NO: 62086 - RNA, 22 nt, Homo sapiens
gauauugacuuauucuauguuu

SEQ ID NO: 62087 - RNA, 22 nt, Homo sapiens
gaucacauggccauuucuagcu

SEQ ID NO: 62088 - RNA, 22 nt, Homo sapiens
gauaugaguagucgcauugaug

SEQ ID NO: 62089 - RNA, 22 nt, Homo sapiens
gauacuggcuuuauagaaugau

SEQ ID NO: 62090 - RNA, 22 nt, Homo sapiens
gaugaucucuggugguaaagac

SEQ ID NO: 62091 - RNA, 22 nt, Homo sapiens
gaugacagcugacucccuugcu

SEQ ID NO: 62092 - RNA, 22 nt, Homo sapiens
gaugaggcuagagacaugugua

SEQ ID NO: 62093 - RNA, 22 nt, Homo sapiens
gaucuguguuuguaugcauaag

SEQ ID NO: 62094 - RNA, 22 nt, Homo sapiens
gagauagguauuucauuuaccc

SEQ ID NO: 62095 - RNA, 22 nt, Homo sapiens
gagagugugucagaggcugcga

SEQ ID NO: 62096 - RNA, 22 nt, Homo sapiens
gagauaggauucacuuucaugu

SEQ ID NO: 62097 - RNA, 22 nt, Homo sapiens
gagaucauugugggccaagcug

SEQ ID NO: 62098 - RNA, 22 nt, Homo sapiens
gaggcauuauucccaucuuaca

SEQ ID NO: 62099 - RNA, 22 nt, Homo sapiens
gagguauggauaucuggagagg

SEQ ID NO: 62100 - RNA, 22 nt, Homo sapiens
gagguguagagauauaccugaa

SEQ ID NO: 62101 - RNA, 22 nt, Homo sapiens
gagaacuggcugauucaaggac

SEQ ID NO: 62102 - RNA, 22 nt, Homo sapiens
gagacggagucuugcucuguug

SEQ ID NO: 62103 - RNA, 22 nt, Homo sapiens
gagacggagucucgcucugucg

SEQ ID NO: 62104 - RNA, 22 nt, Homo sapiens
gagacggagucacgcccuguca

SEQ ID NO: 62105 - RNA, 22 nt, Homo sapiens
gacacagugaagucucuacuug

SEQ ID NO: 62106 - RNA, 22 nt, Homo sapiens
gacaccugguguggaacuggag

SEQ ID NO: 62107 - RNA, 22 nt, Homo sapiens
gacaccauuucaguacuagguu

SEQ ID NO: 62108 - RNA, 22 nt, Homo sapiens
gacacuggguguuuguuggcgu

SEQ ID NO: 62109 - RNA, 22 nt, Homo sapiens
cuuuggugagggauaaauuuca

SEQ ID NO: 62110 - RNA, 20 nt, Homo sapiens
cuuuggcaaugagaacaggg

SEQ ID NO: 62111 - RNA, 22 nt, Homo sapiens
cuuuggcaaugucauuuucaau

SEQ ID NO: 62112 - RNA, 22 nt, Homo sapiens
cuuguguuacauauuuaagaga

SEQ ID NO: 62113 - RNA, 22 nt, Homo sapiens
cuuuacacauccuaaccagugu

SEQ ID NO: 62114 - RNA, 22 nt, Homo sapiens
gaacugggguuggguugcgaua

SEQ ID NO: 62115 - RNA, 20 nt, Homo sapiens
gaacugguguauguuuaacu

SEQ ID NO: 62116 - RNA, 22 nt, Homo sapiens
cuuugguguauuuucagagacc

SEQ ID NO: 62117 - RNA, 18 nt, Homo sapiens
gaagaaguaggcauggca

SEQ ID NO: 62118 - RNA, 22 nt, Homo sapiens
gaagagacagguucccacaaaa

SEQ ID NO: 62119 - RNA, 22 nt, Homo sapiens
gaagcgaggugauuagcagaca

SEQ ID NO: 62120 - RNA, 22 nt, Homo sapiens
gaaggagcuuaucugccauuuc

SEQ ID NO: 62121 - RNA, 22 nt, Homo sapiens
cuucacuggagucccuggauuc

SEQ ID NO: 62122 - RNA, 22 nt, Homo sapiens
cuuaaguaguuguggaaugaau

SEQ ID NO: 62123 - RNA, 18 nt, Homo sapiens
cuuaacauugggaugaua

SEQ ID NO: 62124 - RNA, 22 nt, Homo sapiens
cuguugguguuuaaucacugca

SEQ ID NO: 62125 - RNA, 22 nt, Homo sapiens
cugauuuguccccagccucaug

SEQ ID NO: 62126 - RNA, 22 nt, Homo sapiens
cugauuguucuugcugggccuu

SEQ ID NO: 62127 - RNA, 22 nt, Homo sapiens
cugacaagugaucacagcagca

SEQ ID NO: 62128 - RNA, 22 nt, Homo sapiens
cugaggugggagaaucacauaa

SEQ ID NO: 62129 - RNA, 22 nt, Homo sapiens
cugauacugaaagcuguugguu

SEQ ID NO: 62130 - RNA, 22 nt, Homo sapiens
cuucaucugguuugugaacuuu

SEQ ID NO: 62131 - RNA, 22 nt, Homo sapiens
cuuccaguggcagccgggcaug

SEQ ID NO: 62132 - RNA, 22 nt, Homo sapiens
cuugacacugcaguuuuccugg

SEQ ID NO: 62133 - RNA, 22 nt, Homo sapiens
cuugacacugucacucaggcca

SEQ ID NO: 62134 - RNA, 22 nt, Homo sapiens
cuugugccugaucuuagggggc

SEQ ID NO: 62135 - RNA, 21 nt, Homo sapiens
cuugucuugcuuagaauagac

SEQ ID NO: 62136 - RNA, 22 nt, Homo sapiens
cuuggguugauugauaaugcca

SEQ ID NO: 62137 - RNA, 22 nt, Homo sapiens
cuugggcagugugcauguguau

SEQ ID NO: 62138 - RNA, 22 nt, Homo sapiens
cuugcacucagaagauucaguu

SEQ ID NO: 62139 - RNA, 22 nt, Homo sapiens
cuuggcauugccccuggaauuu

SEQ ID NO: 62140 - RNA, 22 nt, Homo sapiens
cuuggcauuguguugauagaag

SEQ ID NO: 62141 - RNA, 22 nt, Homo sapiens
gguguguaaauuacuuaucucu

SEQ ID NO: 62142 - RNA, 22 nt, Homo sapiens
gguguuccccuuaccucuuggc

SEQ ID NO: 62143 - RNA, 22 nt, Homo sapiens
guacccuggaacaacccaauuu

SEQ ID NO: 62144 - RNA, 22 nt, Homo sapiens
guacauguaugcaugcaugcau

SEQ ID NO: 62145 - RNA, 22 nt, Homo sapiens
ggucuuggagaauuguccuggg

SEQ ID NO: 62146 - RNA, 22 nt, Homo sapiens
ggugauguuugaguugagacag

SEQ ID NO: 62147 - RNA, 22 nt, Homo sapiens
ggugaguggugcuuaaguucag

SEQ ID NO: 62148 - RNA, 22 nt, Homo sapiens
ggugcagcacaccaacauggca

SEQ ID NO: 62149 - RNA, 22 nt, Homo sapiens
guauuagguuggugcaaaauaa

SEQ ID NO: 62150 - RNA, 22 nt, Homo sapiens
guauggcauuuguggauuggcc

SEQ ID NO: 62151 - RNA, 22 nt, Homo sapiens
guaugguuuauagggaaauugu

SEQ ID NO: 62152 - RNA, 22 nt, Homo sapiens
guagagguagacuuccuugucu

SEQ ID NO: 62153 - RNA, 22 nt, Homo sapiens
guagagguagauucuguuuuga

SEQ ID NO: 62154 - RNA, 22 nt, Homo sapiens
gucaucaucaguccucugugca

SEQ ID NO: 62155 - RNA, 22 nt, Homo sapiens
guauuguacuacaagcucuuua

SEQ ID NO: 62156 - RNA, 18 nt, Homo sapiens
ggcugguguuuuaguaua

SEQ ID NO: 62157 - RNA, 22 nt, Homo sapiens
ggccugaugaaauguuagagua

SEQ ID NO: 62158 - RNA, 22 nt, Homo sapiens
ggcuagagaauagugccacuaa

SEQ ID NO: 62159 - RNA, 22 nt, Homo sapiens
ggcccugagacaggaaaaagcu

SEQ ID NO: 62160 - RNA, 22 nt, Homo sapiens
ggccggguggccauggcugccc

SEQ ID NO: 62161 - RNA, 22 nt, Homo sapiens
ggcauguuuaguagaauguggu

SEQ ID NO: 62162 - RNA, 22 nt, Homo sapiens
ggacagaugggcucccgggucu

SEQ ID NO: 62163 - RNA, 22 nt, Homo sapiens
ggaaaucucugaggcucccuuc

SEQ ID NO: 62164 - RNA, 22 nt, Homo sapiens
ggaaaguccuucuguaggcucc

SEQ ID NO: 62165 - RNA, 22 nt, Homo sapiens
gcugucuggagucuguucaaug

SEQ ID NO: 62166 - RNA, 22 nt, Homo sapiens
ggaauguuaaggcgcuguuggu

SEQ ID NO: 62167 - RNA, 18 nt, Homo sapiens
ggaagauuggcuaugugc

SEQ ID NO: 62168 - RNA, 22 nt, Homo sapiens
gguagacaucgugcucugugau

SEQ ID NO: 62169 - RNA, 22 nt, Homo sapiens
gguaacaguggggcuaugcuua

SEQ ID NO: 62170 - RNA, 22 nt, Homo sapiens
gguaaacauaagagagcugacu

SEQ ID NO: 62171 - RNA, 22 nt, Homo sapiens
ggguaggcaagcggaugucaga

SEQ ID NO: 62172 - RNA, 22 nt, Homo sapiens
gggucauggaugugaagcuaga

SEQ ID NO: 62173 - RNA, 22 nt, Homo sapiens
gggcaguauggucauuuucaca

SEQ ID NO: 62174 - RNA, 22 nt, Homo sapiens
gggccagaugcauuuguuauuu

SEQ ID NO: 62175 - RNA, 22 nt, Homo sapiens
gggcuagaauccgcgucucuug

SEQ ID NO: 62176 - RNA, 22 nt, Homo sapiens
gggaggucauuguucaaugcug

SEQ ID NO: 62177 - RNA, 22 nt, Homo sapiens
gggagcacaagaaauguuucau

SEQ ID NO: 62178 - RNA, 19 nt, Homo sapiens
gggcaaaucuggaaauuua

SEQ ID NO: 62179 - RNA, 21 nt, Homo sapiens
gggcaaaucuuuauccuaagc

SEQ ID NO: 62180 - RNA, 22 nt, Homo sapiens
ggcccaguugcgggugguaccg

SEQ ID NO: 62181 - RNA, 22 nt, Homo sapiens
ggcucuguugcuaccaauuaag

SEQ ID NO: 62182 - RNA, 22 nt, Homo sapiens
ggcuuuggucacacaggggcaa

SEQ ID NO: 62183 - RNA, 22 nt, Homo sapiens
gugucaugagggggacaggaag

SEQ ID NO: 62184 - RNA, 22 nt, Homo sapiens
gugucuccugccuucaugcagc

SEQ ID NO: 62185 - RNA, 22 nt, Homo sapiens
guguccucgaguacacaucagg

SEQ ID NO: 62186 - RNA, 22 nt, Homo sapiens
guguccuaugaaacaggaucca

SEQ ID NO: 62187 - RNA, 22 nt, Homo sapiens
guguuugauugcaaauaaucua

SEQ ID NO: 62188 - RNA, 22 nt, Homo sapiens
gugucuccuguggagcuaugua

SEQ ID NO: 62189 - RNA, 18 nt, Homo sapiens
gugucugguuaugggagu

SEQ ID NO: 62190 - RNA, 22 nt, Homo sapiens
guuaaagacauccacauaggag

SEQ ID NO: 62191 - RNA, 22 nt, Homo sapiens
guugcugagucccaucaccaga

SEQ ID NO: 62192 - RNA, 22 nt, Homo sapiens
gugcuuguguuaauauguagcu

SEQ ID NO: 62193 - RNA, 22 nt, Homo sapiens
gugcuuauccccauucuggagg

SEQ ID NO: 62194 - RNA, 22 nt, Homo sapiens
guggcagaacagguaggguucu

SEQ ID NO: 62195 - RNA, 22 nt, Homo sapiens
gugggguaggugacuugaugag

SEQ ID NO: 62196 - RNA, 22 nt, Homo sapiens
guggcuagaaugaagguagcug

SEQ ID NO: 62197 - RNA, 22 nt, Homo sapiens
gugggaugcaaguaaaauuguc

SEQ ID NO: 62198 - RNA, 22 nt, Homo sapiens
gugggaagcuggaacucccucc

SEQ ID NO: 62199 - RNA, 22 nt, Homo sapiens
gugaggaaggaaaccugcuagc

SEQ ID NO: 62200 - RNA, 22 nt, Homo sapiens
gugagcauucaaggaaggagcu

SEQ ID NO: 62201 - RNA, 22 nt, Homo sapiens
gugcaaacuccaggucucuuca

SEQ ID NO: 62202 - RNA, 22 nt, Homo sapiens
gugaggucagggcuguggacag

SEQ ID NO: 62203 - RNA, 22 nt, Homo sapiens
gugcaguguuugcauggaauca

SEQ ID NO: 62204 - RNA, 23 nt, Homo sapiens
gugcaguggcgagauuucggcuc

SEQ ID NO: 62205 - RNA, 22 nt, Homo sapiens
gugcacuguagaacccuuuguu

SEQ ID NO: 62206 - RNA, 22 nt, Homo sapiens
gugcacgucuuaggaggucacg

SEQ ID NO: 62207 - RNA, 22 nt, Homo sapiens
gugcacauuguuuaugucuguu

SEQ ID NO: 62208 - RNA, 22 nt, Homo sapiens
gugcacaucgugcagguuuguu

SEQ ID NO: 62209 - RNA, 22 nt, Homo sapiens
gucccugugucuuuauguggcc

SEQ ID NO: 62210 - RNA, 22 nt, Homo sapiens
guccuggagaagcguggaccgg

SEQ ID NO: 62211 - RNA, 22 nt, Homo sapiens
guccuugaggcuuugacugugg

SEQ ID NO: 62212 - RNA, 22 nt, Homo sapiens
guccaagacuaggaguuggcag

SEQ ID NO: 62213 - RNA, 22 nt, Homo sapiens
guccaugagaugaauccacaca

SEQ ID NO: 62214 - RNA, 20 nt, Homo sapiens
guccauuugcugccauugcu

SEQ ID NO: 62215 - RNA, 22 nt, Homo sapiens
gucauugguucuguuuauguga

SEQ ID NO: 62216 - RNA, 22 nt, Homo sapiens
uaagugaauuucacuacugagu

SEQ ID NO: 62217 - RNA, 22 nt, Homo sapiens
uaaguaucaguuuagcuaugau

SEQ ID NO: 62218 - RNA, 22 nt, Homo sapiens
uaaguacuuuacagacauuauc

SEQ ID NO: 62219 - RNA, 22 nt, Homo sapiens
guuggugaccugaagagaguaa

SEQ ID NO: 62220 - RNA, 22 nt, Homo sapiens
uaaugcacuuuccuccaaggcu

SEQ ID NO: 62221 - RNA, 22 nt, Homo sapiens
uaaugugaauagugcuguaaug

SEQ ID NO: 62222 - RNA, 22 nt, Homo sapiens
uaauucuguauguaucagaguu

SEQ ID NO: 62223 - RNA, 22 nt, Homo sapiens
uacaaaguaacaguuccuguau

SEQ ID NO: 62224 - RNA, 22 nt, Homo sapiens
uacaaccucugccucccaaguu

SEQ ID NO: 62225 - RNA, 20 nt, Homo sapiens
uaaguuguauuugucaugaa

SEQ ID NO: 62226 - RNA, 20 nt, Homo sapiens
uaagugcuuuauauugauua

SEQ ID NO: 62227 - RNA, 22 nt, Homo sapiens
uaauaguuucagaaguuguuuu

SEQ ID NO: 62228 - RNA, 22 nt, Homo sapiens
uagacccauuacguaguuucca

SEQ ID NO: 62229 - RNA, 19 nt, Homo sapiens
uagagguuuaagaaaagaa

SEQ ID NO: 62230 - RNA, 22 nt, Homo sapiens
uagauaauuagaggguuuuaag

SEQ ID NO: 62231 - RNA, 22 nt, Homo sapiens
uacgccuguaauaucagcauuu

SEQ ID NO: 62232 - RNA, 22 nt, Homo sapiens
uacuacagccugagcgacugag

SEQ ID NO: 62233 - RNA, 22 nt, Homo sapiens
uacuagaguagugcagagggga

SEQ ID NO: 62234 - RNA, 19 nt, Homo sapiens
uacugcacuccagucuggg

SEQ ID NO: 62235 - RNA, 19 nt, Homo sapiens
uacugcaccucaaccuggg

SEQ ID NO: 62236 - RNA, 22 nt, Homo sapiens
uacugcacuccaaccugagaga

SEQ ID NO: 62237 - RNA, 22 nt, Homo sapiens
uacaggacuauagaacuuuccc

SEQ ID NO: 62238 - RNA, 22 nt, Homo sapiens
uacagaucaguuauuuuguaga

SEQ ID NO: 62239 - RNA, 16 nt, Homo sapiens
uacaauguagaaaaca

SEQ ID NO: 62240 - RNA, 22 nt, Homo sapiens
uacagugggcacuggcgcccug

SEQ ID NO: 62241 - RNA, 22 nt, Homo sapiens
uacaguggcaugucaggugcuu

SEQ ID NO: 62242 - RNA, 22 nt, Homo sapiens
uacagucuggaggccuguguug

SEQ ID NO: 62243 - RNA, 22 nt, Homo sapiens
uacaggcagguguucccugguu

SEQ ID NO: 62244 - RNA, 20 nt, Homo sapiens
uacaggacugagaaucugug

SEQ ID NO: 62245 - RNA, 22 nt, Homo sapiens
uacaguauuaugagugauugaa

SEQ ID NO: 62246 - RNA, 22 nt, Homo sapiens
uacagucuagaggagaaucagg

SEQ ID NO: 62247 - RNA, 22 nt, Homo sapiens
uacaguaggauuuucagggucu

SEQ ID NO: 62248 - RNA, 22 nt, Homo sapiens
uagcagaauauaccucuuacuu

SEQ ID NO: 62249 - RNA, 22 nt, Homo sapiens
uagcagaauaacuugccagccu

SEQ ID NO: 62250 - RNA, 22 nt, Homo sapiens
uagaucacucaggcaauaaaag

SEQ ID NO: 62251 - RNA, 19 nt, Homo sapiens
uagcagcaugauuuauaau

SEQ ID NO: 62252 - RNA, 20 nt, Homo sapiens
uagcaggugucaggugauau

SEQ ID NO: 62253 - RNA, 22 nt, Homo sapiens
uagcaguauacguacugggucc

SEQ ID NO: 62254 - RNA, 22 nt, Homo sapiens
uagguuaugauccaucuuggcu

SEQ ID NO: 62255 - RNA, 22 nt, Homo sapiens
uaggucacugcucugugucuaa

SEQ ID NO: 62256 - RNA, 23 nt, Homo sapiens
uaguaccauauuguuggcagcac

SEQ ID NO: 62257 - RNA, 22 nt, Homo sapiens
uagguucucaggaaugagcuuc

SEQ ID NO: 62258 - RNA, 22 nt, Homo sapiens
uagguuauucauucaucauuua

SEQ ID NO: 62259 - RNA, 22 nt, Homo sapiens
uaguuguugcagguaggaugua

SEQ ID NO: 62260 - RNA, 22 nt, Homo sapiens
uaguagagauggggcacaugcc

SEQ ID NO: 62261 - RNA, 22 nt, Homo sapiens
uauaaccauuucuucucucuuc

SEQ ID NO: 62262 - RNA, 20 nt, Homo sapiens
uauaacaguuuggacccagu

SEQ ID NO: 62263 - RNA, 22 nt, Homo sapiens
uaucagcacaguggguucaugg

SEQ ID NO: 62264 - RNA, 22 nt, Homo sapiens
uaucacuauucauccuagcucc

SEQ ID NO: 62265 - RNA, 21 nt, Homo sapiens
uauaguaguaugauuuacaau

SEQ ID NO: 62266 - RNA, 22 nt, Homo sapiens
uauuguuaaagauguuaaugau

SEQ ID NO: 62267 - RNA, 22 nt, Homo sapiens
uauuguccaauaggauguuccu

SEQ ID NO: 62268 - RNA, 22 nt, Homo sapiens
uauuguccacuuugcacugugu

SEQ ID NO: 62269 - RNA, 22 nt, Homo sapiens
uauuugguagcuauuuugcagu

SEQ ID NO: 62270 - RNA, 22 nt, Homo sapiens
uauggcuuuuauuauguuguag

SEQ ID NO: 62271 - RNA, 22 nt, Homo sapiens
uauuagugucuuuugguuagaa

SEQ ID NO: 62272 - RNA, 21 nt, Homo sapiens
uauggcuuagucaguguuucc

SEQ ID NO: 62273 - RNA, 22 nt, Homo sapiens
uauggcuucuuuaaauugaggu

SEQ ID NO: 62274 - RNA, 22 nt, Homo sapiens
uauggcuuuuaacugucguaug

SEQ ID NO: 62275 - RNA, 22 nt, Homo sapiens
uauuccacuggcacugcauuug

SEQ ID NO: 62276 - RNA, 22 nt, Homo sapiens
uauuccauuugugaaaggaagu

SEQ ID NO: 62277 - RNA, 17 nt, Homo sapiens
uauugaccuuuguaugu

SEQ ID NO: 62278 - RNA, 22 nt, Homo sapiens
uaucagugaaucuuauuuugcc

SEQ ID NO: 62279 - RNA, 22 nt, Homo sapiens
uauggaaaucuuaccuuauggu

SEQ ID NO: 62280 - RNA, 19 nt, Homo sapiens
uaugcuauuuauuagaagu

SEQ ID NO: 62281 - RNA, 22 nt, Homo sapiens
uauggcauuauuuugauagaca

SEQ ID NO: 62282 - RNA, 23 nt, Homo sapiens
uaugccuguuucaaacaaacuuu

SEQ ID NO: 62283 - RNA, 22 nt, Homo sapiens
uuugguuauauauauacacucu

SEQ ID NO: 62284 - RNA, 22 nt, Homo sapiens
uuuggcccccagcucaggacau

SEQ ID NO: 62285 - RNA, 22 nt, Homo sapiens
uuuggccauaauuuuaauuggc

SEQ ID NO: 62286 - RNA, 22 nt, Homo sapiens
uuugggccaugguuuguguaua

SEQ ID NO: 62287 - RNA, 22 nt, Homo sapiens
uuugggccucugauuucuuugg

SEQ ID NO: 62288 - RNA, 22 nt, Homo sapiens
uuugggaaugaguuuaucauuu

SEQ ID NO: 62289 - RNA, 22 nt, Homo sapiens
uuuguggaaugcccuuauuuau

SEQ ID NO: 62290 - RNA, 22 nt, Homo sapiens
uuuguggaaugcucauguguag

SEQ ID NO: 62291 - RNA, 22 nt, Homo sapiens
uuugugucccuacccgaaucuc

SEQ ID NO: 62292 - RNA, 22 nt, Homo sapiens
uuugugugugauuauaaaaggu

SEQ ID NO: 62293 - RNA, 23 nt, Homo sapiens
uuugugucccucuagaauucaug

SEQ ID NO: 62294 - RNA, 22 nt, Homo sapiens
uuuguucaccucaaggauggga

SEQ ID NO: 62295 - RNA, 22 nt, Homo sapiens
uuuuaagcuacaagagacauau

SEQ ID NO: 62296 - RNA, 22 nt, Homo sapiens
uuuuaacagccaggggacggcc

SEQ ID NO: 62297 - RNA, 22 nt, Homo sapiens
uuuuaguggacaaagguauuua

SEQ ID NO: 62298 - RNA, 19 nt, Homo sapiens
uuuguccugcccuuucuca

SEQ ID NO: 62299 - RNA, 22 nt, Homo sapiens
uuuguagcucacucugagcuga

SEQ ID NO: 62300 - RNA, 22 nt, Homo sapiens
uuugucacccugaauguaagau

SEQ ID NO: 62301 - RNA, 22 nt, Homo sapiens
uuucauggcgaggcuucauggg

SEQ ID NO: 62302 - RNA, 22 nt, Homo sapiens
uuugaaugcaacaaaugcggga

SEQ ID NO: 62303 - RNA, 19 nt, Homo sapiens
uuucccugcagaccuacua

SEQ ID NO: 62304 - RNA, 22 nt, Homo sapiens
uuuggcagaaaacuaaaaggua

SEQ ID NO: 62305 - RNA, 22 nt, Homo sapiens
uuuggcagaugacccucaaguu

SEQ ID NO: 62306 - RNA, 22 nt, Homo sapiens
uuuggcauauuuuaagcugguu

SEQ ID NO: 62307 - RNA, 22 nt, Homo sapiens
uuuggcaguuauuuacucagug

SEQ ID NO: 62308 - RNA, 22 nt, Homo sapiens
uuugagguguauggcaaguuga

SEQ ID NO: 62309 - RNA, 22 nt, Homo sapiens
uuugaguuugaggugcugauga

SEQ ID NO: 62310 - RNA, 22 nt, Homo sapiens
uuguuauguuaaacuacugaaa

SEQ ID NO: 62311 - RNA, 22 nt, Homo sapiens
uuucauggaauauagucauuuu

SEQ ID NO: 62312 - RNA, 23 nt, Homo sapiens
uuucaguaguuguauccuguugc

SEQ ID NO: 62313 - RNA, 21 nt, Homo sapiens
uugugccaaacccuggaggga

SEQ ID NO: 62314 - RNA, 22 nt, Homo sapiens
uugugcuuaauaaaaaguggua

SEQ ID NO: 62315 - RNA, 22 nt, Homo sapiens
uuguguuugaugcugacacgca

SEQ ID NO: 62316 - RNA, 22 nt, Homo sapiens
uuguguuuuuaguagggaaggg

SEQ ID NO: 62317 - RNA, 22 nt, Homo sapiens
uuggccagugucuuuuuuuccu

SEQ ID NO: 62318 - RNA, 22 nt, Homo sapiens
uuggcaagaauguaugccgauc

SEQ ID NO: 62319 - RNA, 22 nt, Homo sapiens
uuggcacgugguggggcucgga

SEQ ID NO: 62320 - RNA, 22 nt, Homo sapiens
uuggcacugggaaaaugaccac

SEQ ID NO: 62321 - RNA, 22 nt, Homo sapiens
uuggcagucugaggcacagacu

SEQ ID NO: 62322 - RNA, 22 nt, Homo sapiens
uuggcagcacgcaguccagagg

SEQ ID NO: 62323 - RNA, 22 nt, Homo sapiens
uuggauccauccugucuucucu

SEQ ID NO: 62324 - RNA, 22 nt, Homo sapiens
uuggcaacauagugagaccccc

SEQ ID NO: 62325 - RNA, 22 nt, Homo sapiens
uuggauggucuuuauauaguau

SEQ ID NO: 62326 - RNA, 22 nt, Homo sapiens
uuguacuucagacaugccaaag

SEQ ID NO: 62327 - RNA, 22 nt, Homo sapiens
uuguagcaaauauauuuuggaa

SEQ ID NO: 62328 - RNA, 22 nt, Homo sapiens
uuggcucuggcugggcuccagc

SEQ ID NO: 62329 - RNA, 22 nt, Homo sapiens
uuggcucugcgucucgcggacg

SEQ ID NO: 62330 - RNA, 22 nt, Homo sapiens
uugucaacaugaaacuguguuu

SEQ ID NO: 62331 - RNA, 22 nt, Homo sapiens
uugugacacagcugggccuaua

SEQ ID NO: 62332 - RNA, 22 nt, Homo sapiens
uuguauugucuugaugaguuga

SEQ ID NO: 62333 - RNA, 22 nt, Homo sapiens
uugauauguuguuggauucacu

SEQ ID NO: 62334 - RNA, 22 nt, Homo sapiens
uugaucaucagcuuugucaucu

SEQ ID NO: 62335 - RNA, 22 nt, Homo sapiens
uugccauggaguagaauugaag

SEQ ID NO: 62336 - RNA, 18 nt, Homo sapiens
uugccuauucacucugau

SEQ ID NO: 62337 - RNA, 22 nt, Homo sapiens
uuggacuggaacuauaccauug

SEQ ID NO: 62338 - RNA, 22 nt, Homo sapiens
uucuuagguuaaggcugagaga

SEQ ID NO: 62339 - RNA, 22 nt, Homo sapiens
uucuguguuuaggucacggcua

SEQ ID NO: 62340 - RNA, 22 nt, Homo sapiens
uucugugguuucauuuaccugu

SEQ ID NO: 62341 - RNA, 22 nt, Homo sapiens
uugaguagugugaugcaugucu

SEQ ID NO: 62342 - RNA, 22 nt, Homo sapiens
uugaguagaaguaugucaguau

SEQ ID NO: 62343 - RNA, 22 nt, Homo sapiens
uugauaagaaaaauauaccaga

SEQ ID NO: 62344 - RNA, 22 nt, Homo sapiens
uugauauauugcaugggcuacu

SEQ ID NO: 62345 - RNA, 22 nt, Homo sapiens
uugauaugcuugucaguccauu

SEQ ID NO: 62346 - RNA, 22 nt, Homo sapiens
uguggcuuuuucuuggcugagg

SEQ ID NO: 62347 - RNA, 17 nt, Homo sapiens
uguggcucuuaugcuga

SEQ ID NO: 62348 - RNA, 22 nt, Homo sapiens
uguggcucuucuguucuccacu

SEQ ID NO: 62349 - RNA, 22 nt, Homo sapiens
ugugucuuuuaucacacaaugu

SEQ ID NO: 62350 - RNA, 22 nt, Homo sapiens
uguguuuuuauguaaaauggaa

SEQ ID NO: 62351 - RNA, 22 nt, Homo sapiens
ugugucuuguuuuuucccaggc

SEQ ID NO: 62352 - RNA, 22 nt, Homo sapiens
uguggcuuuguaaccauggguc

SEQ ID NO: 62353 - RNA, 22 nt, Homo sapiens
ugugucuuguuuauagcuuucu

SEQ ID NO: 62354 - RNA, 22 nt, Homo sapiens
uguguuugauaaguccauaguu

SEQ ID NO: 62355 - RNA, 22 nt, Homo sapiens
ugugccacugcacucugggcaa

SEQ ID NO: 62356 - RNA, 22 nt, Homo sapiens
ugugccacuguucuguaaagug

SEQ ID NO: 62357 - RNA, 22 nt, Homo sapiens
ugugccuucuaagaaggagucu

SEQ ID NO: 62358 - RNA, 22 nt, Homo sapiens
ugugcgugugccuguaagaauu

SEQ ID NO: 62359 - RNA, 22 nt, Homo sapiens
ugugcugaucgggcacgguguc

SEQ ID NO: 62360 - RNA, 22 nt, Homo sapiens
ugugacaguuaguuugguguua

SEQ ID NO: 62361 - RNA, 22 nt, Homo sapiens
ugucauggauucugagucuggg

SEQ ID NO: 62362 - RNA, 22 nt, Homo sapiens
uggucccaugaacuuuagguca

SEQ ID NO: 62363 - RNA, 22 nt, Homo sapiens
ugugaacaaaauuuguugcaua

SEQ ID NO: 62364 - RNA, 22 nt, Homo sapiens
ugucauguugguguacugcacc

SEQ ID NO: 62365 - RNA, 22 nt, Homo sapiens
uuaauguaucuaucacaucaca

SEQ ID NO: 62366 - RNA, 22 nt, Homo sapiens
uuacagauggauggcagcuggc

SEQ ID NO: 62367 - RNA, 22 nt, Homo sapiens
uuaagccaggugugguggcaca

SEQ ID NO: 62368 - RNA, 22 nt, Homo sapiens
uuaagcaguggauuagaauuuu

SEQ ID NO: 62369 - RNA, 22 nt, Homo sapiens
uguuuguuugauaugggauaaa

SEQ ID NO: 62370 - RNA, 22 nt, Homo sapiens
uguuugguggucucuucacaug

SEQ ID NO: 62371 - RNA, 20 nt, Homo sapiens
uguugcacucuagccugggu

SEQ ID NO: 62372 - RNA, 22 nt, Homo sapiens
uguucaugaguucucauuuuua

SEQ ID NO: 62373 - RNA, 22 nt, Homo sapiens
uguuacacugugcacuaaauuu

SEQ ID NO: 62374 - RNA, 22 nt, Homo sapiens
uguuauguauggagugauccca

SEQ ID NO: 62375 - RNA, 16 nt, Homo sapiens
uguuauggagacagcu

SEQ ID NO: 62376 - RNA, 23 nt, Homo sapiens
uuacaguggcaugaucucugcuc

SEQ ID NO: 62377 - RNA, 22 nt, Homo sapiens
uuacaugcaugacaaggugcca

SEQ ID NO: 62378 - RNA, 23 nt, Homo sapiens
uuaguaaacucaaugacaccaca

SEQ ID NO: 62379 - RNA, 22 nt, Homo sapiens
uuaguaguugugauagguaccu

SEQ ID NO: 62380 - RNA, 22 nt, Homo sapiens
uuaguaguagcugcaugucagu

SEQ ID NO: 62381 - RNA, 22 nt, Homo sapiens
uuauugcuuuugugcaggugag

SEQ ID NO: 62382 - RNA, 22 nt, Homo sapiens
uuagugaaugcaccacuucuga

SEQ ID NO: 62383 - RNA, 22 nt, Homo sapiens
uuauaaacaugaagauuugggg

SEQ ID NO: 62384 - RNA, 20 nt, Homo sapiens
uuaguucauuuagaagguuu

SEQ ID NO: 62385 - RNA, 22 nt, Homo sapiens
uuaguaguagugcuguaauuuu

SEQ ID NO: 62386 - RNA, 22 nt, Homo sapiens
uuaguaguuugaguggggguua

SEQ ID NO: 62387 - RNA, 22 nt, Homo sapiens
uucagugguuauuugugagauu

SEQ ID NO: 62388 - RNA, 22 nt, Homo sapiens
uucagugucauuaacacaguag

SEQ ID NO: 62389 - RNA, 22 nt, Homo sapiens
uucauggguuaauuuguucgau

SEQ ID NO: 62390 - RNA, 19 nt, Homo sapiens
uucauacagugagagcagc

SEQ ID NO: 62391 - RNA, 23 nt, Homo sapiens
uucaguauugaaugauggcgcug

SEQ ID NO: 62392 - RNA, 22 nt, Homo sapiens
uucaggguggagaguaugaggu

SEQ ID NO: 62393 - RNA, 22 nt, Homo sapiens
uucaagauggccccagugagcc

SEQ ID NO: 62394 - RNA, 22 nt, Homo sapiens
uucagcuacuugggaggcugaa

SEQ ID NO: 62395 - RNA, 22 nt, Homo sapiens
uucagcaaugacagccuauaua

SEQ ID NO: 62396 - RNA, 20 nt, Homo sapiens
uucagcaaaggaaugggagu

SEQ ID NO: 62397 - RNA, 22 nt, Homo sapiens
uucaauaugucauuggcaggca

SEQ ID NO: 62398 - RNA, 23 nt, Homo sapiens
uucuaucaggcccaggagcccug

SEQ ID NO: 62399 - RNA, 22 nt, Homo sapiens
uucuacaugggucgucggugag

SEQ ID NO: 62400 - RNA, 22 nt, Homo sapiens
uucgucaugagacagaugcuga

SEQ ID NO: 62401 - RNA, 22 nt, Homo sapiens
uuccuuguagcaaaugcgauga

SEQ ID NO: 62402 - RNA, 22 nt, Homo sapiens
uuccuugagagcuugauaucac

SEQ ID NO: 62403 - RNA, 22 nt, Homo sapiens
uucucauggugauggcaaaauc

SEQ ID NO: 62404 - RNA, 22 nt, Homo sapiens
uucucgcuuuuuccaccuguau

SEQ ID NO: 62405 - RNA, 22 nt, Homo sapiens
uucugcuagucugucagaucuu

SEQ ID NO: 62406 - RNA, 22 nt, Homo sapiens
uucugugcugaaucaaagacug

SEQ ID NO: 62407 - RNA, 22 nt, Homo sapiens
uucuggccuccauuuuucuccu

SEQ ID NO: 62408 - RNA, 22 nt, Homo sapiens
uucuggcuaugggauacuaaau

SEQ ID NO: 62409 - RNA, 22 nt, Homo sapiens
uucccagagccugggagugagg

SEQ ID NO: 62410 - RNA, 22 nt, Homo sapiens
uucccugaaguguuacucuaga

SEQ ID NO: 62411 - RNA, 22 nt, Homo sapiens
uucccugagcaucuguugagcc

SEQ ID NO: 62412 - RNA, 22 nt, Homo sapiens
uucccuuucuuaaagaguuagg

SEQ ID NO: 62413 - RNA, 22 nt, Homo sapiens
uucccuuucugaaaaucucauu

SEQ ID NO: 62414 - RNA, 22 nt, Homo sapiens
uucccugugggaguaggaaagu

SEQ ID NO: 62415 - RNA, 21 nt, Homo sapiens
uuccagugagccuagaugccu

SEQ ID NO: 62416 - RNA, 22 nt, Homo sapiens
uucauugaaugauuuuuagaag

SEQ ID NO: 62417 - RNA, 22 nt, Homo sapiens
ucccuguuguuucauaauuuua

SEQ ID NO: 62418 - RNA, 22 nt, Homo sapiens
uccugagaauagaguugcaugu

SEQ ID NO: 62419 - RNA, 22 nt, Homo sapiens
ucccuuucuggaguuucccaag

SEQ ID NO: 62420 - RNA, 22 nt, Homo sapiens
ucccuggacagccuugccuggg

SEQ ID NO: 62421 - RNA, 22 nt, Homo sapiens
ucccuguagugccuagaucaga

SEQ ID NO: 62422 - RNA, 22 nt, Homo sapiens
uccuucauuugucaacucuagu

SEQ ID NO: 62423 - RNA, 19 nt, Homo sapiens
ucgcgccauucuccugccu

SEQ ID NO: 62424 - RNA, 22 nt, Homo sapiens
ucgugcaaacguaauugugguu

SEQ ID NO: 62425 - RNA, 21 nt, Homo sapiens
uccagcuuugagaguuguggu

SEQ ID NO: 62426 - RNA, 22 nt, Homo sapiens
uccacguggucuaucuguccuu

SEQ ID NO: 62427 - RNA, 22 nt, Homo sapiens
uccacugagcuagaccacuugg

SEQ ID NO: 62428 - RNA, 22 nt, Homo sapiens
uccccggaugacggccgcuuca

SEQ ID NO: 62429 - RNA, 22 nt, Homo sapiens
uccccugagaccccucagcacu

SEQ ID NO: 62430 - RNA, 22 nt, Homo sapiens
ucccugacagucacagagcuac

SEQ ID NO: 62431 - RNA, 22 nt, Homo sapiens
ucagugcuuuuuguugucauca

SEQ ID NO: 62432 - RNA, 22 nt, Homo sapiens
ucagugcuuggcacagagagcu

SEQ ID NO: 62433 - RNA, 22 nt, Homo sapiens
ucagugggcuauguaauuaacu

SEQ ID NO: 62434 - RNA, 22 nt, Homo sapiens
ucagugucaucuggguuguuug

SEQ ID NO: 62435 - RNA, 22 nt, Homo sapiens
ucauugguucuggguguuguug

SEQ ID NO: 62436 - RNA, 22 nt, Homo sapiens
uccacaguaaggacccugccuu

SEQ ID NO: 62437 - RNA, 22 nt, Homo sapiens
uccaauguaaucaucauugaau

SEQ ID NO: 62438 - RNA, 22 nt, Homo sapiens
uccacagugguugaacuaguuu

SEQ ID NO: 62439 - RNA, 22 nt, Homo sapiens
uccacagugguggaauuguuca

SEQ ID NO: 62440 - RNA, 22 nt, Homo sapiens
uccacagugguugaacuaguaa

SEQ ID NO: 62441 - RNA, 22 nt, Homo sapiens
ucagaguggagucugcagccuu

SEQ ID NO: 62442 - RNA, 22 nt, Homo sapiens
ucagaccauuucauuacagacu

SEQ ID NO: 62443 - RNA, 22 nt, Homo sapiens
ucagacacugagcaaacgacua

SEQ ID NO: 62444 - RNA, 22 nt, Homo sapiens
ucacuaaagaaaauggcaugga

SEQ ID NO: 62445 - RNA, 23 nt, Homo sapiens
ucacggagaccugcaagaccaau

SEQ ID NO: 62446 - RNA, 22 nt, Homo sapiens
ucacgugguucauaaggcagaa

SEQ ID NO: 62447 - RNA, 22 nt, Homo sapiens
ucagaugaucugguaagaacuu

SEQ ID NO: 62448 - RNA, 22 nt, Homo sapiens
ucagcgcauggucgugcggcau

SEQ ID NO: 62449 - RNA, 22 nt, Homo sapiens
ucagugaauauauaacagcgau

SEQ ID NO: 62450 - RNA, 22 nt, Homo sapiens
ucagugaacgaggaggagggug

SEQ ID NO: 62451 - RNA, 19 nt, Homo sapiens
ucagugcuauguaauguag

SEQ ID NO: 62452 - RNA, 22 nt, Homo sapiens
ucagugcuguaccaucuaagga

SEQ ID NO: 62453 - RNA, 21 nt, Homo sapiens
ucagugcugugggcaaggugc

SEQ ID NO: 62454 - RNA, 22 nt, Homo sapiens
ucaaguacuuugcauagugccg

SEQ ID NO: 62455 - RNA, 22 nt, Homo sapiens
ucaaguaagaagugggcauaaa

SEQ ID NO: 62456 - RNA, 22 nt, Homo sapiens
ucaaguaauacucccaucuugg

SEQ ID NO: 62457 - RNA, 22 nt, Homo sapiens
ucaauugcaucaacaguguaca

SEQ ID NO: 62458 - RNA, 22 nt, Homo sapiens
ucacccacacaggagacaggga

SEQ ID NO: 62459 - RNA, 22 nt, Homo sapiens
ucacccuguguuuugcguuugc

SEQ ID NO: 62460 - RNA, 22 nt, Homo sapiens
ucacaccauucuucuacuucag

SEQ ID NO: 62461 - RNA, 22 nt, Homo sapiens
ucacacggugaugauuccuaga

SEQ ID NO: 62462 - RNA, 22 nt, Homo sapiens
ucacaauggcugaacuaauuua

SEQ ID NO: 62463 - RNA, 21 nt, Homo sapiens
ucacaaugaacagcagcagaa

SEQ ID NO: 62464 - RNA, 22 nt, Homo sapiens
ucacaauguaaaugaggguugg

SEQ ID NO: 62465 - RNA, 22 nt, Homo sapiens
ugaagugaaugguaaguaugcc

SEQ ID NO: 62466 - RNA, 22 nt, Homo sapiens
ugaagugaagacucacagaagg

SEQ ID NO: 62467 - RNA, 20 nt, Homo sapiens
ugacaguuaagggauagaag

SEQ ID NO: 62468 - RNA, 21 nt, Homo sapiens
ugacauguugguguucugcac

SEQ ID NO: 62469 - RNA, 22 nt, Homo sapiens
ugacuuuagaauuuuauccaga

SEQ ID NO: 62470 - RNA, 22 nt, Homo sapiens
ugacuucauuuuuggccaugag

SEQ ID NO: 62471 - RNA, 22 nt, Homo sapiens
ugacuggagucuugcucugucg

SEQ ID NO: 62472 - RNA, 22 nt, Homo sapiens
ugacuagggcucuaaacagcuc

SEQ ID NO: 62473 - RNA, 22 nt, Homo sapiens
ugacucagauagguguguauuc

SEQ ID NO: 62474 - RNA, 22 nt, Homo sapiens
ugacuggaaacaguguuauuug

SEQ ID NO: 62475 - RNA, 22 nt, Homo sapiens
ugaccagaaaacaaauuaguuu

SEQ ID NO: 62476 - RNA, 22 nt, Homo sapiens
ugacccuguggcagcgucuaag

SEQ ID NO: 62477 - RNA, 22 nt, Homo sapiens
ugacuagagcaauuggaaacaa

SEQ ID NO: 62478 - RNA, 22 nt, Homo sapiens
ucuuuugggccucuugucagac

SEQ ID NO: 62479 - RNA, 22 nt, Homo sapiens
ucuuuguguucaggagccacgu

SEQ ID NO: 62480 - RNA, 22 nt, Homo sapiens
ucuuugguaauggaugucugau

SEQ ID NO: 62481 - RNA, 22 nt, Homo sapiens
ucuacccugugagggacacagu

SEQ ID NO: 62482 - RNA, 22 nt, Homo sapiens
ucuaagaauucauuuauaagcc

SEQ ID NO: 62483 - RNA, 22 nt, Homo sapiens
ucuaagacuaagggcuagcuuc

SEQ ID NO: 62484 - RNA, 22 nt, Homo sapiens
ucuagaugaaguauaaaguagu

SEQ ID NO: 62485 - RNA, 22 nt, Homo sapiens
ucuauugguugaaauugcuuuu

SEQ ID NO: 62486 - RNA, 22 nt, Homo sapiens
ucuuagugcggcugcugcagcc

SEQ ID NO: 62487 - RNA, 22 nt, Homo sapiens
ucuuaguuggaaugggauaagg

SEQ ID NO: 62488 - RNA, 22 nt, Homo sapiens
ucuuauuuggggaaaggguccu

SEQ ID NO: 62489 - RNA, 22 nt, Homo sapiens
ucuguguugaucacacugggag

SEQ ID NO: 62490 - RNA, 22 nt, Homo sapiens
ucugugguucaggcuggagugc

SEQ ID NO: 62491 - RNA, 21 nt, Homo sapiens
ucuguguugaucucacuggga

SEQ ID NO: 62492 - RNA, 22 nt, Homo sapiens
ucuguguuugaucaagauugua

SEQ ID NO: 62493 - RNA, 22 nt, Homo sapiens
ugggaauaugauacaggucuuu

SEQ ID NO: 62494 - RNA, 22 nt, Homo sapiens
uggcuguuuauuucaccugggu

SEQ ID NO: 62495 - RNA, 22 nt, Homo sapiens
uggcuuucuggggcuucuguuc

SEQ ID NO: 62496 - RNA, 22 nt, Homo sapiens
uggccagugucggaggccagga

SEQ ID NO: 62497 - RNA, 23 nt, Homo sapiens
uggccagaaacuucuuuucaucc

SEQ ID NO: 62498 - RNA, 22 nt, Homo sapiens
uggcaagaacugcaauugcuuu

SEQ ID NO: 62499 - RNA, 22 nt, Homo sapiens
uggcaacaucuggggacauguu

SEQ ID NO: 62500 - RNA, 22 nt, Homo sapiens
uggcaagagaacaacaucucuc

SEQ ID NO: 62501 - RNA, 22 nt, Homo sapiens
uggcaguuucacauggcucaac

SEQ ID NO: 62502 - RNA, 23 nt, Homo sapiens
uggcaagaauucuuaccgugugg

SEQ ID NO: 62503 - RNA, 22 nt, Homo sapiens
uggcaugauauauauucguuug

SEQ ID NO: 62504 - RNA, 22 nt, Homo sapiens
uggcaugucguuuuucauagga

SEQ ID NO: 62505 - RNA, 22 nt, Homo sapiens
uggcauuuuguuuuagaauuag

SEQ ID NO: 62506 - RNA, 20 nt, Homo sapiens
uggcauguugguaugcaccc

SEQ ID NO: 62507 - RNA, 22 nt, Homo sapiens
uggguaggcccucauuggacag

SEQ ID NO: 62508 - RNA, 22 nt, Homo sapiens
ugggcaaauugugagggaggua

SEQ ID NO: 62509 - RNA, 22 nt, Homo sapiens
ugggcaguauggucauuuucgu

SEQ ID NO: 62510 - RNA, 22 nt, Homo sapiens
ugggcagugggacagcuuugug

SEQ ID NO: 62511 - RNA, 22 nt, Homo sapiens
uggucaguugaguccuugccaa

SEQ ID NO: 62512 - RNA, 19 nt, Homo sapiens
uggucaguucugggagcug

SEQ ID NO: 62513 - RNA, 22 nt, Homo sapiens
ugguccacuaacccucaguauc

SEQ ID NO: 62514 - RNA, 22 nt, Homo sapiens
ugguaaguuuaacaugcauccc

SEQ ID NO: 62515 - RNA, 22 nt, Homo sapiens
ugguaagaucagaacuggaguc

SEQ ID NO: 62516 - RNA, 22 nt, Homo sapiens
uggguucccugucuguccuuga

SEQ ID NO: 62517 - RNA, 20 nt, Homo sapiens
uggaggucaucugucacuac

SEQ ID NO: 62518 - RNA, 22 nt, Homo sapiens
uggaggucauuggaucaugggg

SEQ ID NO: 62519 - RNA, 21 nt, Homo sapiens
uggcaacgaggugugcauuau

SEQ ID NO: 62520 - RNA, 22 nt, Homo sapiens
uggcaagaaccacaguuacuuu

SEQ ID NO: 62521 - RNA, 22 nt, Homo sapiens
uggcaaaugugagaugagaacu

SEQ ID NO: 62522 - RNA, 22 nt, Homo sapiens
uggcaaaugaagucagcuguac

SEQ ID NO: 62523 - RNA, 22 nt, Homo sapiens
uggcaaaucagaggcauggaca

SEQ ID NO: 62524 - RNA, 22 nt, Homo sapiens
uggcaaaauauuuugguuucug

SEQ ID NO: 62525 - RNA, 21 nt, Homo sapiens
uggcaaaaugggcaguggguu

SEQ ID NO: 62526 - RNA, 22 nt, Homo sapiens
uggagauguuuaaaauccacug

SEQ ID NO: 62527 - RNA, 22 nt, Homo sapiens
uggagcaaaguugaggccaagc

SEQ ID NO: 62528 - RNA, 22 nt, Homo sapiens
uggagcccuaaacuucuaauau

SEQ ID NO: 62529 - RNA, 20 nt, Homo sapiens
uggaagccuggugcuaucuu

SEQ ID NO: 62530 - RNA, 22 nt, Homo sapiens
ugccuacagaaggggcucagca

SEQ ID NO: 62531 - RNA, 20 nt, Homo sapiens
ugccagugugucaauuuaua

SEQ ID NO: 62532 - RNA, 22 nt, Homo sapiens
ugccaugaagaucccugaaaug

SEQ ID NO: 62533 - RNA, 19 nt, Homo sapiens
ugccauguagcacaugguc

SEQ ID NO: 62534 - RNA, 22 nt, Homo sapiens
ugccaugucauagguuaagccu

SEQ ID NO: 62535 - RNA, 22 nt, Homo sapiens
ugccagaugcaguguucaacaa

SEQ ID NO: 62536 - RNA, 22 nt, Homo sapiens
ugccaguauuuuacugaggauu

SEQ ID NO: 62537 - RNA, 22 nt, Homo sapiens
ugccaguauuuuauugaagauu

SEQ ID NO: 62538 - RNA, 22 nt, Homo sapiens
ugccaguauuuuauugagcauu

SEQ ID NO: 62539 - RNA, 22 nt, Homo sapiens
ugccaguauuuuauugaggauu

SEQ ID NO: 62540 - RNA, 22 nt, Homo sapiens
ugccaguguugccuuucacuag

SEQ ID NO: 62541 - RNA, 20 nt, Homo sapiens
ugccugacacucuuugcuuc

SEQ ID NO: 62542 - RNA, 22 nt, Homo sapiens
uggaagacaggcuguauuuuaa

SEQ ID NO: 62543 - RNA, 22 nt, Homo sapiens
ugagaaugacugggcaugcugc

SEQ ID NO: 62544 - RNA, 22 nt, Homo sapiens
ugagaauguagggcucucccag

SEQ ID NO: 62545 - RNA, 22 nt, Homo sapiens
ugagcacuguacuuuaucaggu

SEQ ID NO: 62546 - RNA, 22 nt, Homo sapiens
ugagcaaaauuuuggacauaga

SEQ ID NO: 62547 - RNA, 17 nt, Homo sapiens
ugaggcacuaguaucac

SEQ ID NO: 62548 - RNA, 22 nt, Homo sapiens
ugagguacaacauggacugaag

SEQ ID NO: 62549 - RNA, 22 nt, Homo sapiens
ugaggcacucuagacuuauuca

SEQ ID NO: 62550 - RNA, 22 nt, Homo sapiens
ugaguucuuuguagauucugug

SEQ ID NO: 62551 - RNA, 22 nt, Homo sapiens
ugauaucugaauagauacacaa

SEQ ID NO: 62552 - RNA, 22 nt, Homo sapiens
ugauaguguccugugccacauu

SEQ ID NO: 62553 - RNA, 22 nt, Homo sapiens
ugcaggguccauugucccaagu

SEQ ID NO: 62554 - RNA, 22 nt, Homo sapiens
ugcagcauugcacuccagccug

SEQ ID NO: 62555 - RNA, 22 nt, Homo sapiens
ugcauaauuccuugcaccagaa

SEQ ID NO: 62556 - RNA, 22 nt, Homo sapiens
ugcagugugcuggggucuccau

SEQ ID NO: 62557 - RNA, 22 nt, Homo sapiens
ugcauccauucuagacucaucu

SEQ ID NO: 62558 - RNA, 22 nt, Homo sapiens
ugcauauguugaaccagccuug

SEQ ID NO: 62559 - RNA, 22 nt, Homo sapiens
ugaugacauugucacagucuga

SEQ ID NO: 62560 - RNA, 22 nt, Homo sapiens
ugaugcuacuaccugggcugaa

SEQ ID NO: 62561 - RNA, 22 nt, Homo sapiens
ugaugaaguauaggaagggcuu

SEQ ID NO: 62562 - RNA, 22 nt, Homo sapiens
ugcaccacuguacuccagucug

SEQ ID NO: 62563 - RNA, 22 nt, Homo sapiens
ugcacacucuguaugagaaucu

SEQ ID NO: 62564 - RNA, 22 nt, Homo sapiens
ugauguugaauuguucagcguc

SEQ ID NO: 62565 - RNA, 15 nt, Homo sapiens
ggguccucucccaaa

SEQ ID NO: 62566 - RNA, 22 nt, Homo sapiens
ggguucccuucuggcucagggu

SEQ ID NO: 62567 - RNA, 22 nt, Homo sapiens
gggcaugaugucuuaugccuau

SEQ ID NO: 62568 - RNA, 22 nt, Homo sapiens
ggguucccugaugagaguuagu

SEQ ID NO: 62569 - RNA, 19 nt, Homo sapiens
ggucagcaaagucuagcug

SEQ ID NO: 62570 - RNA, 22 nt, Homo sapiens
guaaguagcuuuagauauaaau

SEQ ID NO: 62571 - RNA, 20 nt, Homo sapiens
guaacagcacuuucccaaag

SEQ ID NO: 62572 - RNA, 22 nt, Homo sapiens
guaaagacacaugcacacguau

SEQ ID NO: 62573 - RNA, 22 nt, Homo sapiens
guaaaguaaagcacaucaaggu

SEQ ID NO: 62574 - RNA, 22 nt, Homo sapiens
guauccugaaguucucagcacu

SEQ ID NO: 62575 - RNA, 22 nt, Homo sapiens
guagggcaggcugagaaauaua

SEQ ID NO: 62576 - RNA, 22 nt, Homo sapiens
guauuagguuggggcaaaagua

SEQ ID NO: 62577 - RNA, 22 nt, Homo sapiens
guauuaguuaucuacugcugug

SEQ ID NO: 62578 - RNA, 22 nt, Homo sapiens
guauugccugugugccagccac

SEQ ID NO: 62579 - RNA, 22 nt, Homo sapiens
guauuagguuggugcaaaauug

SEQ ID NO: 62580 - RNA, 22 nt, Homo sapiens
ggaugcauuuuugguugucaca

SEQ ID NO: 62581 - RNA, 22 nt, Homo sapiens
ggaucauaugauagcucaauuu

SEQ ID NO: 62582 - RNA, 22 nt, Homo sapiens
ggauccaucuggaaauguggga

SEQ ID NO: 62583 - RNA, 22 nt, Homo sapiens
ggaucacagagcuugggaaagg

SEQ ID NO: 62584 - RNA, 22 nt, Homo sapiens
ggcaaagaugaccauuacuuuu

SEQ ID NO: 62585 - RNA, 22 nt, Homo sapiens
ggcaguuucucaggcaggggua

SEQ ID NO: 62586 - RNA, 22 nt, Homo sapiens
ggcaguguggcugcauauagca

SEQ ID NO: 62587 - RNA, 22 nt, Homo sapiens
ggccagaugaucuaugaaggaa

SEQ ID NO: 62588 - RNA, 18 nt, Homo sapiens
ggcggguguuuuauucac

SEQ ID NO: 62589 - RNA, 22 nt, Homo sapiens
gggcauguggacuuguauguuu

SEQ ID NO: 62590 - RNA, 22 nt, Homo sapiens
gcgguagcauagacugcaggac

SEQ ID NO: 62591 - RNA, 22 nt, Homo sapiens
gcgagcauuguaggaaguucag

SEQ ID NO: 62592 - RNA, 22 nt, Homo sapiens
ggaagccuggaaaaaauuguga

SEQ ID NO: 62593 - RNA, 22 nt, Homo sapiens
ggaagacaguguggugauuccu

SEQ ID NO: 62594 - RNA, 22 nt, Homo sapiens
gcccacuguuaaauuuguuuua

SEQ ID NO: 62595 - RNA, 22 nt, Homo sapiens
gccccgggugaugcagccguca

SEQ ID NO: 62596 - RNA, 22 nt, Homo sapiens
gccuuuggugacaggcaugugu

SEQ ID NO: 62597 - RNA, 22 nt, Homo sapiens
ggagugucugugcuggucaaag

SEQ ID NO: 62598 - RNA, 22 nt, Homo sapiens
ggagugugauucaguauaauau

SEQ ID NO: 62599 - RNA, 22 nt, Homo sapiens
ggacauguauauauaugugugu

SEQ ID NO: 62600 - RNA, 22 nt, Homo sapiens
ggaauguuaaagacuacacuga

SEQ ID NO: 62601 - RNA, 20 nt, Homo sapiens
ggaauguuaaucuccaugau

SEQ ID NO: 62602 - RNA, 21 nt, Homo sapiens
ggaauguugccagcagccaga

SEQ ID NO: 62603 - RNA, 22 nt, Homo sapiens
guguuaaucucaaguacucuca

SEQ ID NO: 62604 - RNA, 22 nt, Homo sapiens
guuacugucuuccugauugcuu

SEQ ID NO: 62605 - RNA, 22 nt, Homo sapiens
guuaugcagcaauugauaaucu

SEQ ID NO: 62606 - RNA, 22 nt, Homo sapiens
guuaggcagugugguauagcag

SEQ ID NO: 62607 - RNA, 22 nt, Homo sapiens
guuaugcagcuuagaaaaugaa

SEQ ID NO: 62608 - RNA, 22 nt, Homo sapiens
guuauguuaaauuguuguaugc

SEQ ID NO: 62609 - RNA, 22 nt, Homo sapiens
guggaaucuagagaggcaguag

SEQ ID NO: 62610 - RNA, 22 nt, Homo sapiens
guggaaugaaaacucucucaca

SEQ ID NO: 62611 - RNA, 22 nt, Homo sapiens
guggcacgaugaucugggcuca

SEQ ID NO: 62612 - RNA, 22 nt, Homo sapiens
guggcaagaauguacaaaaggu

SEQ ID NO: 62613 - RNA, 22 nt, Homo sapiens
guggcagagucagagggaaaug

SEQ ID NO: 62614 - RNA, 21 nt, Homo sapiens
gugucacagacaugacagaug

SEQ ID NO: 62615 - RNA, 22 nt, Homo sapiens
guguaugguuguuguagagaga

SEQ ID NO: 62616 - RNA, 22 nt, Homo sapiens
gugucccagugugcauacaggu

SEQ ID NO: 62617 - RNA, 22 nt, Homo sapiens
gugagcuccucucuauguguca

SEQ ID NO: 62618 - RNA, 21 nt, Homo sapiens
gugaggaguuacuggcuuuga

SEQ ID NO: 62619 - RNA, 21 nt, Homo sapiens
gugaggucauugggcuuucug

SEQ ID NO: 62620 - RNA, 22 nt, Homo sapiens
gugaggucguagucauaggcaa

SEQ ID NO: 62621 - RNA, 22 nt, Homo sapiens
gugaguggacgugaccaauaaa

SEQ ID NO: 62622 - RNA, 22 nt, Homo sapiens
gugauuauuaugcacugcaugc

SEQ ID NO: 62623 - RNA, 18 nt, Homo sapiens
guccauuuguugguacac

SEQ ID NO: 62624 - RNA, 22 nt, Homo sapiens
gucguggagucucuggcuugua

SEQ ID NO: 62625 - RNA, 22 nt, Homo sapiens
gugagauggaguuggugucuuu

SEQ ID NO: 62626 - RNA, 20 nt, Homo sapiens
gucacuggcccagggcuugu

SEQ ID NO: 62627 - RNA, 22 nt, Homo sapiens
gucaccauugagucauuuccuc

SEQ ID NO: 62628 - RNA, 20 nt, Homo sapiens
uagacagcuagauuagauag

SEQ ID NO: 62629 - RNA, 22 nt, Homo sapiens
uagacaacugaaacacugugca

SEQ ID NO: 62630 - RNA, 22 nt, Homo sapiens
uagacacuagauaugugacuga

SEQ ID NO: 62631 - RNA, 20 nt, Homo sapiens
uagagagauauggggguucc

SEQ ID NO: 62632 - RNA, 22 nt, Homo sapiens
uagacugguuuagcacugaaua

SEQ ID NO: 62633 - RNA, 22 nt, Homo sapiens
uagaucaacuuugguaagagaa

SEQ ID NO: 62634 - RNA, 22 nt, Homo sapiens
uagaucauauucagugcuuacu

SEQ ID NO: 62635 - RNA, 22 nt, Homo sapiens
uagauuguuuaaguggcacaca

SEQ ID NO: 62636 - RNA, 22 nt, Homo sapiens
uagcaccacaaucaagauacag

SEQ ID NO: 62637 - RNA, 22 nt, Homo sapiens
uagcaagaugaauuugugcaaa

SEQ ID NO: 62638 - RNA, 18 nt, Homo sapiens
uacugcacucuccagccu

SEQ ID NO: 62639 - RNA, 22 nt, Homo sapiens
uacacgugcacaacgugcacgu

SEQ ID NO: 62640 - RNA, 22 nt, Homo sapiens
uacaccaauuuaaucaaaagca

SEQ ID NO: 62641 - RNA, 22 nt, Homo sapiens
uacagccacauaauguaugauu

SEQ ID NO: 62642 - RNA, 22 nt, Homo sapiens
uacacagucaaaaauuuccagg

SEQ ID NO: 62643 - RNA, 22 nt, Homo sapiens
uacacacguguguauauauaca

SEQ ID NO: 62644 - RNA, 22 nt, Homo sapiens
uacaauagugacaaaucagcau

SEQ ID NO: 62645 - RNA, 21 nt, Homo sapiens
uacaagcuguagcacaugcca

SEQ ID NO: 62646 - RNA, 22 nt, Homo sapiens
uaacagcauuugugucuaguag

SEQ ID NO: 62647 - RNA, 22 nt, Homo sapiens
uaacacccuucuccagguacau

SEQ ID NO: 62648 - RNA, 22 nt, Homo sapiens
uaacaagagagucagucagucc

SEQ ID NO: 62649 - RNA, 21 nt, Homo sapiens
uaaaugucauacaaagcaaug

SEQ ID NO: 62650 - RNA, 22 nt, Homo sapiens
uaaagugaggauggcaguaggu

SEQ ID NO: 62651 - RNA, 22 nt, Homo sapiens
uaaguaguguugagacaaguuu

SEQ ID NO: 62652 - RNA, 23 nt, Homo sapiens
uaagucacacagauuaauuuauu

SEQ ID NO: 62653 - RNA, 22 nt, Homo sapiens
uaagucacuccagguuaaagug

SEQ ID NO: 62654 - RNA, 22 nt, Homo sapiens
uaaguaguuucuggauauucuc

SEQ ID NO: 62655 - RNA, 22 nt, Homo sapiens
uaaggcaaguuuuuaguggaca

SEQ ID NO: 62656 - RNA, 22 nt, Homo sapiens
uaaguaaaugaaagguugauuu

SEQ ID NO: 62657 - RNA, 22 nt, Homo sapiens
uaaugcacucgaaucauggaau

SEQ ID NO: 62658 - RNA, 22 nt, Homo sapiens
uacaaagugggaaacgaagguu

SEQ ID NO: 62659 - RNA, 22 nt, Homo sapiens
uacaaaucuagguuuguuacug

SEQ ID NO: 62660 - RNA, 22 nt, Homo sapiens
uaauucugacaacaguggcguu

SEQ ID NO: 62661 - RNA, 22 nt, Homo sapiens
uaucagauugcugccaucugcu

SEQ ID NO: 62662 - RNA, 22 nt, Homo sapiens
uaucagcagagucauacuucaa

SEQ ID NO: 62663 - RNA, 22 nt, Homo sapiens
uaucaucauuggcaggugagaa

SEQ ID NO: 62664 - RNA, 22 nt, Homo sapiens
uauagcuugauuauggugaugg

SEQ ID NO: 62665 - RNA, 22 nt, Homo sapiens
uagugcugagauugagaagccc

SEQ ID NO: 62666 - RNA, 22 nt, Homo sapiens
uagugacauugcugggaaugcu

SEQ ID NO: 62667 - RNA, 22 nt, Homo sapiens
uaguauguuuauagcauugagu

SEQ ID NO: 62668 - RNA, 22 nt, Homo sapiens
uagucaaaucugaaggaaauuu

SEQ ID NO: 62669 - RNA, 22 nt, Homo sapiens
uaguaaacauuuuucuaucauu

SEQ ID NO: 62670 - RNA, 22 nt, Homo sapiens
uagcagcaaagcaggaucugcu

SEQ ID NO: 62671 - RNA, 22 nt, Homo sapiens
uagcagcaucucuggcuucuac

SEQ ID NO: 62672 - RNA, 22 nt, Homo sapiens
uagcacugucuugcaccugugc

SEQ ID NO: 62673 - RNA, 22 nt, Homo sapiens
uagcagcauuuuuguagaguau

SEQ ID NO: 62674 - RNA, 21 nt, Homo sapiens
uagcagcguuguugcaaaugu

SEQ ID NO: 62675 - RNA, 22 nt, Homo sapiens
uaugucuucuuuagagaaaugu

SEQ ID NO: 62676 - RNA, 22 nt, Homo sapiens
uaugucuauuauguagcaggaa

SEQ ID NO: 62677 - RNA, 22 nt, Homo sapiens
uaugucacuggacauaaguucu

SEQ ID NO: 62678 - RNA, 22 nt, Homo sapiens
uaugucacagguuuuggugaaa

SEQ ID NO: 62679 - RNA, 22 nt, Homo sapiens
uauuagugccuaagucuuaggg

SEQ ID NO: 62680 - RNA, 22 nt, Homo sapiens
uaugcacuauggaaguagcuca

SEQ ID NO: 62681 - RNA, 22 nt, Homo sapiens
uaugcccauuuaaauugaacaa

SEQ ID NO: 62682 - RNA, 22 nt, Homo sapiens
uauccuguagcucauccaccgc

SEQ ID NO: 62683 - RNA, 20 nt, Homo sapiens
ucaaaguaugcucugcacua

SEQ ID NO: 62684 - RNA, 22 nt, Homo sapiens
uauuauuguccuucuauaccca

SEQ ID NO: 62685 - RNA, 22 nt, Homo sapiens
uauugcuccuaauaucacggug

SEQ ID NO: 62686 - RNA, 22 nt, Homo sapiens
cauggcaucuguguggccucca

SEQ ID NO: 62687 - RNA, 22 nt, Homo sapiens
cauggucaccuuccaaguuauu

SEQ ID NO: 62688 - RNA, 22 nt, Homo sapiens
cauggcuuuuauaacaagaaau

SEQ ID NO: 62689 - RNA, 23 nt, Homo sapiens
cauggcuguuaacacuguuugag

SEQ ID NO: 62690 - RNA, 22 nt, Homo sapiens
cagcacauagcaguugcucagu

SEQ ID NO: 62691 - RNA, 21 nt, Homo sapiens
caugucacugcacucuagccu

SEQ ID NO: 62692 - RNA, 22 nt, Homo sapiens
cauuccacauguaggacaauuu

SEQ ID NO: 62693 - RNA, 22 nt, Homo sapiens
cauugcacuccagcccuggcaa

SEQ ID NO: 62694 - RNA, 22 nt, Homo sapiens
cauugcacuccagccuagccaa

SEQ ID NO: 62695 - RNA, 22 nt, Homo sapiens
cauugcacuccagccucggcaa

SEQ ID NO: 62696 - RNA, 22 nt, Homo sapiens
cauugcacuccagccugaguga

SEQ ID NO: 62697 - RNA, 22 nt, Homo sapiens
cauugcacuccagccugaggga

SEQ ID NO: 62698 - RNA, 22 nt, Homo sapiens
cauugcacuccagccuggccaa

SEQ ID NO: 62699 - RNA, 22 nt, Homo sapiens
cauugcacucuaucccgguggg

SEQ ID NO: 62700 - RNA, 22 nt, Homo sapiens
cauugcacucugcauuccaguc

SEQ ID NO: 62701 - RNA, 22 nt, Homo sapiens
cauugcacuccauccuuggcaa

SEQ ID NO: 62702 - RNA, 22 nt, Homo sapiens
cauugcacucuagccucggcaa

SEQ ID NO: 62703 - RNA, 22 nt, Homo sapiens
cauugcuuuuggugguuuagac

SEQ ID NO: 62704 - RNA, 22 nt, Homo sapiens
cauugcaugccagccugggcaa

SEQ ID NO: 62705 - RNA, 22 nt, Homo sapiens
ccagcaccauuuguugaauagg

SEQ ID NO: 62706 - RNA, 22 nt, Homo sapiens
cauugguuaguuaacuuuaaga

SEQ ID NO: 62707 - RNA, 22 nt, Homo sapiens
cauugguuggacaguucucucu

SEQ ID NO: 62708 - RNA, 22 nt, Homo sapiens
ccaggguugagacccacugacu

SEQ ID NO: 62709 - RNA, 23 nt, Homo sapiens
ccaguauuuauguaaggaagugu

SEQ ID NO: 62710 - RNA, 22 nt, Homo sapiens
ccaggguugcuuuagauucuga

SEQ ID NO: 62711 - RNA, 22 nt, Homo sapiens
ccagugcauggaucccaggggg

SEQ ID NO: 62712 - RNA, 22 nt, Homo sapiens
ccaucacacugugauuauuauc

SEQ ID NO: 62713 - RNA, 22 nt, Homo sapiens
ccaucacaggccucagugggaa

SEQ ID NO: 62714 - RNA, 22 nt, Homo sapiens
ccaucacgugcaguggccccac

SEQ ID NO: 62715 - RNA, 21 nt, Homo sapiens
ccauggcaaugguaaacugac

SEQ ID NO: 62716 - RNA, 22 nt, Homo sapiens
ccauggcaauggucagucuauu

SEQ ID NO: 62717 - RNA, 19 nt, Homo sapiens
ccaguguugccagagcuga

SEQ ID NO: 62718 - RNA, 22 nt, Homo sapiens
ccaguuuucucacuguugcagu

SEQ ID NO: 62719 - RNA, 22 nt, Homo sapiens
ccagugucugacagacacggcg

SEQ ID NO: 62720 - RNA, 20 nt, Homo sapiens
ccaguguuauuuauguucua

SEQ ID NO: 62721 - RNA, 22 nt, Homo sapiens
ccagugguugggccggagacgg

SEQ ID NO: 62722 - RNA, 21 nt, Homo sapiens
ccagugguuggaaacuauggg

SEQ ID NO: 62723 - RNA, 21 nt, Homo sapiens
ccugauguucacuuggccuuc

SEQ ID NO: 62724 - RNA, 23 nt, Homo sapiens
cccaguuaauccuuaaucuccac

SEQ ID NO: 62725 - RNA, 21 nt, Homo sapiens
cccagguucucugaggguaga

SEQ ID NO: 62726 - RNA, 22 nt, Homo sapiens
ccuucauccuccagcaggcuag

SEQ ID NO: 62727 - RNA, 22 nt, Homo sapiens
ccuugcacuucccaggugaggc

SEQ ID NO: 62728 - RNA, 22 nt, Homo sapiens
ccuugguggccacaagacauug

SEQ ID NO: 62729 - RNA, 22 nt, Homo sapiens
ccuuggcacuacugacauugua

SEQ ID NO: 62730 - RNA, 22 nt, Homo sapiens
ccuuggcacuuugccacagugc

SEQ ID NO: 62731 - RNA, 22 nt, Homo sapiens
cuaggcacugauaguuguauuu

SEQ ID NO: 62732 - RNA, 22 nt, Homo sapiens
cuagcagcauaagaaucaccaa

SEQ ID NO: 62733 - RNA, 22 nt, Homo sapiens
cuccccuuuaguuucuuaauaa

SEQ ID NO: 62734 - RNA, 21 nt, Homo sapiens
cucucugcuuaugaauaguga

SEQ ID NO: 62735 - RNA, 22 nt, Homo sapiens
cuccuguagccccaucaucuuu

SEQ ID NO: 62736 - RNA, 22 nt, Homo sapiens
cucauuaguuguuuuaagauga

SEQ ID NO: 62737 - RNA, 22 nt, Homo sapiens
cuccagugcaaagucaugauca

SEQ ID NO: 62738 - RNA, 22 nt, Homo sapiens
cucagugucuggggccccaggg

SEQ ID NO: 62739 - RNA, 22 nt, Homo sapiens
cucaguguuaaggccaccucug

SEQ ID NO: 62740 - RNA, 22 nt, Homo sapiens
cucagugguugauuuauuuauc

SEQ ID NO: 62741 - RNA, 22 nt, Homo sapiens
cucauggauggucuggcagcca

SEQ ID NO: 62742 - RNA, 22 nt, Homo sapiens
cuagucacaggaguugaaggau

SEQ ID NO: 62743 - RNA, 22 nt, Homo sapiens
cucagcaguggauuuaccacca

SEQ ID NO: 62744 - RNA, 22 nt, Homo sapiens
cacuaggcuggagugcaguggc

SEQ ID NO: 62745 - RNA, 22 nt, Homo sapiens
cacucaguuugugguacuuugu

SEQ ID NO: 62746 - RNA, 22 nt, Homo sapiens
cacugcacuccagucuggcgac

SEQ ID NO: 62747 - RNA, 22 nt, Homo sapiens
cacugcacuccaguuucgguaa

SEQ ID NO: 62748 - RNA, 21 nt, Homo sapiens
cacugcacuugccuucugggu

SEQ ID NO: 62749 - RNA, 22 nt, Homo sapiens
cagagaucaugcaacugcucgc

SEQ ID NO: 62750 - RNA, 22 nt, Homo sapiens
cagaaguauugguaugcucugu

SEQ ID NO: 62751 - RNA, 22 nt, Homo sapiens
cacuguggauggaacuauguga

SEQ ID NO: 62752 - RNA, 21 nt, Homo sapiens
cagagaucaucucuguuuuaa

SEQ ID NO: 62753 - RNA, 22 nt, Homo sapiens
cacuggucucauggcaugagag

SEQ ID NO: 62754 - RNA, 22 nt, Homo sapiens
cacugcauccucugccuggcgg

SEQ ID NO: 62755 - RNA, 22 nt, Homo sapiens
cacuggcacuguguuuagaugg

SEQ ID NO: 62756 - RNA, 21 nt, Homo sapiens
auuugguggcugugugacacu

SEQ ID NO: 62757 - RNA, 22 nt, Homo sapiens
auuugguguuguuuggagccua

SEQ ID NO: 62758 - RNA, 22 nt, Homo sapiens
caccgagugacaguagccauca

SEQ ID NO: 62759 - RNA, 22 nt, Homo sapiens
cacacugucuucauuacuguag

SEQ ID NO: 62760 - RNA, 22 nt, Homo sapiens
cacaaccuccgccuccuggguu

SEQ ID NO: 62761 - RNA, 22 nt, Homo sapiens
cacaaugucugguaggccacuu

SEQ ID NO: 62762 - RNA, 22 nt, Homo sapiens
cacaaugucuaagauguuucua

SEQ ID NO: 62763 - RNA, 22 nt, Homo sapiens
caauggcacgaucucgucucac

SEQ ID NO: 62764 - RNA, 22 nt, Homo sapiens
caagugcuuucuuggggauuua

SEQ ID NO: 62765 - RNA, 22 nt, Homo sapiens
auucacagggggagaaggguau

SEQ ID NO: 62766 - RNA, 22 nt, Homo sapiens
auugaguaaaaaauagugaugu

SEQ ID NO: 62767 - RNA, 22 nt, Homo sapiens
auugacacugauuuuucuuuaa

SEQ ID NO: 62768 - RNA, 22 nt, Homo sapiens
auucagaggggcagcugucuug

SEQ ID NO: 62769 - RNA, 22 nt, Homo sapiens
augugacugauguaaucagaca

SEQ ID NO: 62770 - RNA, 22 nt, Homo sapiens
augugaacaucauagaaugcac

SEQ ID NO: 62771 - RNA, 22 nt, Homo sapiens
auuauauguguaugugcauacc

SEQ ID NO: 62772 - RNA, 22 nt, Homo sapiens
auugcuaacugaaauaagacca

SEQ ID NO: 62773 - RNA, 22 nt, Homo sapiens
auugcaaugggaaacuaugaaa

SEQ ID NO: 62774 - RNA, 22 nt, Homo sapiens
auugcaauuaguccauagaguu

SEQ ID NO: 62775 - RNA, 22 nt, Homo sapiens
auugaguaacaauuuuguucaa

SEQ ID NO: 62776 - RNA, 22 nt, Homo sapiens
auuggguuaaaggauaugaaca

SEQ ID NO: 62777 - RNA, 22 nt, Homo sapiens
auuguacauacaccggugugua

SEQ ID NO: 62778 - RNA, 19 nt, Homo sapiens
auuuccuggagcuggucuc

SEQ ID NO: 62779 - RNA, 22 nt, Homo sapiens
auuuccuguaggggcuugcgaa

SEQ ID NO: 62780 - RNA, 22 nt, Homo sapiens
auuuggguuuuacaucaggcua

SEQ ID NO: 62781 - RNA, 22 nt, Homo sapiens
auuggcaagauagcauaugagg

SEQ ID NO: 62782 - RNA, 22 nt, Homo sapiens
cuugcauuuuggagaaugcuga

SEQ ID NO: 62783 - RNA, 23 nt, Homo sapiens
cuugagacaaaugcgugugugca

SEQ ID NO: 62784 - RNA, 22 nt, Homo sapiens
cuuuuacacugcuggugggaau

SEQ ID NO: 62785 - RNA, 22 nt, Homo sapiens
cuuuuacacuguuggcaggauu

SEQ ID NO: 62786 - RNA, 22 nt, Homo sapiens
cuuggcaugaagaauaauuuuu

SEQ ID NO: 62787 - RNA, 22 nt, Homo sapiens
cuuuugugauucuucaguugcu

SEQ ID NO: 62788 - RNA, 23 nt, Homo sapiens
cuuuugcaaugugaucuugccac

SEQ ID NO: 62789 - RNA, 21 nt, Homo sapiens
cuuuugcacuccagccugggu

SEQ ID NO: 62790 - RNA, 22 nt, Homo sapiens
cuuuuacacuguuggugggaau

SEQ ID NO: 62791 - RNA, 22 nt, Homo sapiens
cuuuuacacuguuagugggaau

SEQ ID NO: 62792 - RNA, 22 nt, Homo sapiens
gaaaugucugagauguggcuca

SEQ ID NO: 62793 - RNA, 23 nt, Homo sapiens
gaaaugucuuagugaaauugcuu

SEQ ID NO: 62794 - RNA, 22 nt, Homo sapiens
gaaccagcagacuuugacaggu

SEQ ID NO: 62795 - RNA, 22 nt, Homo sapiens
gaaaauccauccccagggagua

SEQ ID NO: 62796 - RNA, 22 nt, Homo sapiens
gaccacauuccacacaggcuuu

SEQ ID NO: 62797 - RNA, 22 nt, Homo sapiens
gacccucuagagggaagcgcuu

SEQ ID NO: 62798 - RNA, 22 nt, Homo sapiens
gaccuggugguccacccgccuu

SEQ ID NO: 62799 - RNA, 22 nt, Homo sapiens
gaauaaacuagagaggacugag

SEQ ID NO: 62800 - RNA, 22 nt, Homo sapiens
gaacuggcuuagugaaacuucc

SEQ ID NO: 62801 - RNA, 22 nt, Homo sapiens
gaagacauuugcugcacguccu

SEQ ID NO: 62802 - RNA, 22 nt, Homo sapiens
cucugguucugcagugcacccu

SEQ ID NO: 62803 - RNA, 22 nt, Homo sapiens
cucuuagauuagccauccuaau

SEQ ID NO: 62804 - RNA, 22 nt, Homo sapiens
cugaaauggaaugugugcacag

SEQ ID NO: 62805 - RNA, 22 nt, Homo sapiens
cugacacuucaaaacugccaau

SEQ ID NO: 62806 - RNA, 19 nt, Homo sapiens
cucuuuggugucucuucuu

SEQ ID NO: 62807 - RNA, 18 nt, Homo sapiens
cuggaugucgaguguguu

SEQ ID NO: 62808 - RNA, 22 nt, Homo sapiens
cugagaaugaugauuuccaguu

SEQ ID NO: 62809 - RNA, 22 nt, Homo sapiens
cugagacacucuuaucugcaua

SEQ ID NO: 62810 - RNA, 22 nt, Homo sapiens
cugaccuaugauuuggcucaaa

SEQ ID NO: 62811 - RNA, 22 nt, Homo sapiens
cugacucagacacauguauaug

SEQ ID NO: 62812 - RNA, 22 nt, Homo sapiens
cuggcaguguuucuugugggcu

SEQ ID NO: 62813 - RNA, 22 nt, Homo sapiens
cuggcgagacagcuccaucacu

SEQ ID NO: 62814 - RNA, 22 nt, Homo sapiens
cuggcaaauaguagagccagga

SEQ ID NO: 62815 - RNA, 22 nt, Homo sapiens
cuggcagucugccucuucacug

SEQ ID NO: 62816 - RNA, 22 nt, Homo sapiens
cugugguguaacucuuggggcg

SEQ ID NO: 62817 - RNA, 22 nt, Homo sapiens
cugugguugagcuuugccauga

SEQ ID NO: 62818 - RNA, 23 nt, Homo sapiens
cuguggugaggcccuagaaucug

SEQ ID NO: 62819 - RNA, 22 nt, Homo sapiens
cuugcacauuacagaucugcau

SEQ ID NO: 62820 - RNA, 21 nt, Homo sapiens
cuucuuggggcagggcagggu

SEQ ID NO: 62821 - RNA, 18 nt, Homo sapiens
cuuccuuagucugguuaa

SEQ ID NO: 62822 - RNA, 20 nt, Homo sapiens
cuugaagacuaugcugcuga

SEQ ID NO: 62823 - RNA, 22 nt, Homo sapiens
cuggcucuguuagaagaaccag

SEQ ID NO: 62824 - RNA, 22 nt, Homo sapiens
cuggugugugacuuuucauuau

SEQ ID NO: 62825 - RNA, 22 nt, Homo sapiens
cugucuguuucaaaagugguua

SEQ ID NO: 62826 - RNA, 22 nt, Homo sapiens
cugugaacaugggagaaauggc

SEQ ID NO: 62827 - RNA, 20 nt, Homo sapiens
cugugguagggaccaggaau

SEQ ID NO: 62828 - RNA, 22 nt, Homo sapiens
cugugcuaggcaaugugguaga

SEQ ID NO: 62829 - RNA, 22 nt, Homo sapiens
cugugcuugauuauaugagugu

SEQ ID NO: 62830 - RNA, 22 nt, Homo sapiens
cugugcaaguuauaggccaggu

SEQ ID NO: 62831 - RNA, 22 nt, Homo sapiens
cugugcacaucuggcggcccga

SEQ ID NO: 62832 - RNA, 22 nt, Homo sapiens
gcauggagcauacauuucuguu

SEQ ID NO: 62833 - RNA, 22 nt, Homo sapiens
gcaugguacuggaugguaguau

SEQ ID NO: 62834 - RNA, 19 nt, Homo sapiens
gccaccuggugcguguucu

SEQ ID NO: 62835 - RNA, 22 nt, Homo sapiens
gcagugcuggagcccccgugug

SEQ ID NO: 62836 - RNA, 22 nt, Homo sapiens
gcagucacagggagauggugac

SEQ ID NO: 62837 - RNA, 22 nt, Homo sapiens
gcagguauuagagagccugaaa

SEQ ID NO: 62838 - RNA, 20 nt, Homo sapiens
gcauaugucuuuauagcaga

SEQ ID NO: 62839 - RNA, 22 nt, Homo sapiens
gcauaaagcuaauaagacgaag

SEQ ID NO: 62840 - RNA, 20 nt, Homo sapiens
gcaguguucugaccugaauc

SEQ ID NO: 62841 - RNA, 22 nt, Homo sapiens
gcagcaguggcaguuaauauuu

SEQ ID NO: 62842 - RNA, 22 nt, Homo sapiens
gcaaaugcuacaccauuuugua

SEQ ID NO: 62843 - RNA, 22 nt, Homo sapiens
gcaaaugcuaugccauuuuaua

SEQ ID NO: 62844 - RNA, 22 nt, Homo sapiens
gauuucaucuuuagaggaagga

SEQ ID NO: 62845 - RNA, 22 nt, Homo sapiens
gauuggccaaacuaaagaacug

SEQ ID NO: 62846 - RNA, 22 nt, Homo sapiens
gauggcacuaagccauguagga

SEQ ID NO: 62847 - RNA, 22 nt, Homo sapiens
gauggcacuuaagagcaagagc

SEQ ID NO: 62848 - RNA, 22 nt, Homo sapiens
gaggaaguuuacaaagcaucug

SEQ ID NO: 62849 - RNA, 22 nt, Homo sapiens
gagcuguugguuugaaagaauu

SEQ ID NO: 62850 - RNA, 22 nt, Homo sapiens
gagcuagguuuugaauccagac

SEQ ID NO: 62851 - RNA, 22 nt, Homo sapiens
gagcugaucuuuauguaaauuc

SEQ ID NO: 62852 - RNA, 22 nt, Homo sapiens
gacuaguuaggucucucacaga

SEQ ID NO: 62853 - RNA, 22 nt, Homo sapiens
gagcacauguggagagucuggg

SEQ ID NO: 62854 - RNA, 21 nt, Homo sapiens
gagcacauuguccucuaacgc

SEQ ID NO: 62855 - RNA, 22 nt, Homo sapiens
gacucuguagacaaucacaucu

SEQ ID NO: 62856 - RNA, 22 nt, Homo sapiens
gagcaguugagagugcuggcca

SEQ ID NO: 62857 - RNA, 22 nt, Homo sapiens
gagcccauuucacuuguccagc

SEQ ID NO: 62858 - RNA, 21 nt, Homo sapiens
gagcuaggugaggcuguaaug

SEQ ID NO: 62859 - RNA, 22 nt, Homo sapiens
gagcuagugcuuaugcaccacu

SEQ ID NO: 62860 - RNA, 22 nt, Homo sapiens
gagcuagggucaugcuacugca

SEQ ID NO: 62861 - RNA, 22 nt, Homo sapiens
gagggcacugcuuuccuuucaa

SEQ ID NO: 62862 - RNA, 19 nt, Homo sapiens
gaguugggguuuacuguaa

SEQ ID NO: 62863 - RNA, 18 nt, Homo sapiens
gauaacaguggacuaugc

SEQ ID NO: 62864 - RNA, 22 nt, Homo sapiens
gauaacagauaaugucaguuau

SEQ ID NO: 62865 - RNA, 22 nt, Homo sapiens
gaugagauguucucauggauug

SEQ ID NO: 62866 - RNA, 19 nt, Homo sapiens
gauaucuagggggagguuc

SEQ ID NO: 62867 - RNA, 22 nt, Homo sapiens
gauauguguuuuagucaggguu

SEQ ID NO: 62868 - RNA, 22 nt, Homo sapiens
agcugcaaagggagagaugauu

SEQ ID NO: 62869 - RNA, 22 nt, Homo sapiens
agcucuuguuaguauuagcagu

SEQ ID NO: 62870 - RNA, 22 nt, Homo sapiens
agcugcacaaauggaugugagg

SEQ ID NO: 62871 - RNA, 22 nt, Homo sapiens
agcuaguguucaccagagguca

SEQ ID NO: 62872 - RNA, 22 nt, Homo sapiens
agcucacagccuagcacuguga

SEQ ID NO: 62873 - RNA, 18 nt, Homo sapiens
agcucaguguuugcuuac

SEQ ID NO: 62874 - RNA, 22 nt, Homo sapiens
agcuaacauuuuuccucuucca

SEQ ID NO: 62875 - RNA, 22 nt, Homo sapiens
aggaauggaaacuuuugauggu

SEQ ID NO: 62876 - RNA, 22 nt, Homo sapiens
aggaaauguuggucccauuucu

SEQ ID NO: 62877 - RNA, 22 nt, Homo sapiens
agcuuguuuuauagaaagucaa

SEQ ID NO: 62878 - RNA, 22 nt, Homo sapiens
agcuggcuguggagaaaccccu

SEQ ID NO: 62879 - RNA, 22 nt, Homo sapiens
aggcacacaacccuggaccuga

SEQ ID NO: 62880 - RNA, 22 nt, Homo sapiens
aggcacggugucucaugccugu

SEQ ID NO: 62881 - RNA, 22 nt, Homo sapiens
aggagcuuuggggaaaacagau

SEQ ID NO: 62882 - RNA, 22 nt, Homo sapiens
agggcaguguuaggacugucug

SEQ ID NO: 62883 - RNA, 21 nt, Homo sapiens
aggcuguuguuuugggaugga

SEQ ID NO: 62884 - RNA, 22 nt, Homo sapiens
acugggucaaaguagaaaacua

SEQ ID NO: 62885 - RNA, 20 nt, Homo sapiens
acuggcacugguaggugugg

SEQ ID NO: 62886 - RNA, 22 nt, Homo sapiens
acuuugcuuagagggcauuaaa

SEQ ID NO: 62887 - RNA, 22 nt, Homo sapiens
acuuggcaaaguuuuaaacagc

SEQ ID NO: 62888 - RNA, 22 nt, Homo sapiens
acuguguguuugucuagcacag

SEQ ID NO: 62889 - RNA, 22 nt, Homo sapiens
acuucauucucuggaucagaau

SEQ ID NO: 62890 - RNA, 22 nt, Homo sapiens
acuguacucuacccugggcaac

SEQ ID NO: 62891 - RNA, 22 nt, Homo sapiens
acugguuguuuaacugaauuga

SEQ ID NO: 62892 - RNA, 22 nt, Homo sapiens
acuuugcuuaucccaggcacug

SEQ ID NO: 62893 - RNA, 22 nt, Homo sapiens
agagcaaugggugaauauuaaa

SEQ ID NO: 62894 - RNA, 22 nt, Homo sapiens
agagcaaugacaugcuaugugg

SEQ ID NO: 62895 - RNA, 22 nt, Homo sapiens
agagcaccauuuagcaagguga

SEQ ID NO: 62896 - RNA, 22 nt, Homo sapiens
agagcaauguuaucagucucug

SEQ ID NO: 62897 - RNA, 22 nt, Homo sapiens
agccaguauuuugaguuggucu

SEQ ID NO: 62898 - RNA, 20 nt, Homo sapiens
agccccauguaaaccacaug

SEQ ID NO: 62899 - RNA, 22 nt, Homo sapiens
agccccauuuguugaaaagacg

SEQ ID NO: 62900 - RNA, 22 nt, Homo sapiens
agccgguguccacgaagaagag

SEQ ID NO: 62901 - RNA, 22 nt, Homo sapiens
agccuguagugagcugugauug

SEQ ID NO: 62902 - RNA, 22 nt, Homo sapiens
agcaccauuguacuccagccug

SEQ ID NO: 62903 - RNA, 22 nt, Homo sapiens
agcaccauugcacuccagccug

SEQ ID NO: 62904 - RNA, 22 nt, Homo sapiens
agcaccaccguugcucuauccc

SEQ ID NO: 62905 - RNA, 22 nt, Homo sapiens
agcaccacaauuuccugccuaa

SEQ ID NO: 62906 - RNA, 22 nt, Homo sapiens
agcaccacauacuacagagaua

SEQ ID NO: 62907 - RNA, 19 nt, Homo sapiens
agcagaacaaauguguggg

SEQ ID NO: 62908 - RNA, 22 nt, Homo sapiens
aaggaguguggugaucuugggc

SEQ ID NO: 62909 - RNA, 23 nt, Homo sapiens
aaggacacugaacacuucccagc

SEQ ID NO: 62910 - RNA, 22 nt, Homo sapiens
aaggaguagaauagaugcaccu

SEQ ID NO: 62911 - RNA, 22 nt, Homo sapiens
aagggaaugcuuccaguuugug

SEQ ID NO: 62912 - RNA, 22 nt, Homo sapiens
aauccugucuugccauccaaua

SEQ ID NO: 62913 - RNA, 22 nt, Homo sapiens
aaugcacauauauuuccuuauu

SEQ ID NO: 62914 - RNA, 22 nt, Homo sapiens
aaugacagccagauucuucucu

SEQ ID NO: 62915 - RNA, 22 nt, Homo sapiens
aaugacacugagcaucuuucau

SEQ ID NO: 62916 - RNA, 22 nt, Homo sapiens
aauugcauaaaauucaacucug

SEQ ID NO: 62917 - RNA, 22 nt, Homo sapiens
acaagcacaaaugcauagaugg

SEQ ID NO: 62918 - RNA, 22 nt, Homo sapiens
acaagcacaaauuuaauccugu

SEQ ID NO: 62919 - RNA, 20 nt, Homo sapiens
acaaaugcauucugugacau

SEQ ID NO: 62920 - RNA, 20 nt, Homo sapiens
acagcacugguuucaagcaa

SEQ ID NO: 62921 - RNA, 22 nt, Homo sapiens
acagcagugccccacucuacug

SEQ ID NO: 62922 - RNA, 19 nt, Homo sapiens
acagauagaauguucuaca

SEQ ID NO: 62923 - RNA, 22 nt, Homo sapiens
acacuguugacauuuuguagug

SEQ ID NO: 62924 - RNA, 22 nt, Homo sapiens
acaagugcuuuuccuggagaca

SEQ ID NO: 62925 - RNA, 22 nt, Homo sapiens
acacugucugaugaaaguaguu

SEQ ID NO: 62926 - RNA, 22 nt, Homo sapiens
acacuguauccuucuguccuuu

SEQ ID NO: 62927 - RNA, 22 nt, Homo sapiens
acacugucucuugcugaccaug

SEQ ID NO: 62928 - RNA, 22 nt, Homo sapiens
acgcagcacauucacagcuaug

SEQ ID NO: 62929 - RNA, 18 nt, Homo sapiens
accuucauuccuuugccu

SEQ ID NO: 62930 - RNA, 22 nt, Homo sapiens
accuucauuguugccaugucca

SEQ ID NO: 62931 - RNA, 22 nt, Homo sapiens
accgggcugagcgcaggccccg

SEQ ID NO: 62932 - RNA, 19 nt, Homo sapiens
acccuguccccaccuuuac

SEQ ID NO: 62933 - RNA, 16 nt, Homo sapiens
accuguacagcaugug

SEQ ID NO: 62934 - RNA, 22 nt, Homo sapiens
accugcacagccgaacauagac

SEQ ID NO: 62935 - RNA, 22 nt, Homo sapiens
accugguuuuaacauuguauua

SEQ ID NO: 62936 - RNA, 22 nt, Homo sapiens
acugcacuccagccuggacgac

SEQ ID NO: 62937 - RNA, 22 nt, Homo sapiens
acugcacuccagccuuagugac

SEQ ID NO: 62938 - RNA, 22 nt, Homo sapiens
acugcacuccagccugcugaca

SEQ ID NO: 62939 - RNA, 22 nt, Homo sapiens
acugcacuccagccucguggac

SEQ ID NO: 62940 - RNA, 22 nt, Homo sapiens
acugcacuccagccugccgaca

SEQ ID NO: 62941 - RNA, 22 nt, Homo sapiens
acugcacuccagccugcccaac

SEQ ID NO: 62942 - RNA, 22 nt, Homo sapiens
acugcacuccagccucgcaaca

SEQ ID NO: 62943 - RNA, 22 nt, Homo sapiens
acauccauuugcuuuauuugcu

SEQ ID NO: 62944 - RNA, 22 nt, Homo sapiens
acaugcauccaugugaagagac

SEQ ID NO: 62945 - RNA, 22 nt, Homo sapiens
acauaguagacacugaaaauau

SEQ ID NO: 62946 - RNA, 22 nt, Homo sapiens
acagccauuccagccaaauacu

SEQ ID NO: 62947 - RNA, 22 nt, Homo sapiens
acauacacuagggauguggugu

SEQ ID NO: 62948 - RNA, 22 nt, Homo sapiens
acauguauauaaugcauagcga

SEQ ID NO: 62949 - RNA, 17 nt, Homo sapiens
accccuaccucagaagc

SEQ ID NO: 62950 - RNA, 22 nt, Homo sapiens
acccggcaguaauccugcgcgc

SEQ ID NO: 62951 - RNA, 22 nt, Homo sapiens
acccguuacuuagcagaccggg

SEQ ID NO: 62952 - RNA, 22 nt, Homo sapiens
acccuacauaguagauccuaca

SEQ ID NO: 62953 - RNA, 20 nt, Homo sapiens
acccucuaggaugauuucuu

SEQ ID NO: 62954 - RNA, 22 nt, Homo sapiens
acccugucaaaacggaccaauc

SEQ ID NO: 62955 - RNA, 21 nt, Homo sapiens
acccucuaguuuucaacaggc

SEQ ID NO: 62956 - RNA, 22 nt, Homo sapiens
acccuggagagugcuguaguaa

SEQ ID NO: 62957 - RNA, 22 nt, Homo sapiens
acccuggaggucuacagugcag

SEQ ID NO: 62958 - RNA, 22 nt, Homo sapiens
auaauguuuauccagaggaguu

SEQ ID NO: 62959 - RNA, 18 nt, Homo sapiens
auacaagcagcagagauu

SEQ ID NO: 62960 - RNA, 22 nt, Homo sapiens
auaaacagcuuauccucuauuc

SEQ ID NO: 62961 - RNA, 22 nt, Homo sapiens
auagcaauuugggaaucagacu

SEQ ID NO: 62962 - RNA, 22 nt, Homo sapiens
auagcacacuauagcuucaaac

SEQ ID NO: 62963 - RNA, 22 nt, Homo sapiens
auacacuggagcaaaccuggag

SEQ ID NO: 62964 - RNA, 22 nt, Homo sapiens
auagacacugaaaucccugcca

SEQ ID NO: 62965 - RNA, 22 nt, Homo sapiens
auagaauguauuaguaaauuug

SEQ ID NO: 62966 - RNA, 22 nt, Homo sapiens
aguguuuuuacaagcacucugg

SEQ ID NO: 62967 - RNA, 22 nt, Homo sapiens
aguguuuuuaacaagaaagggu

SEQ ID NO: 62968 - RNA, 22 nt, Homo sapiens
aguguuuuucaugggauacuuu

SEQ ID NO: 62969 - RNA, 22 nt, Homo sapiens
aguguuuuuaucaugaaagggu

SEQ ID NO: 62970 - RNA, 22 nt, Homo sapiens
aguuggugauugauugggucug

SEQ ID NO: 62971 - RNA, 22 nt, Homo sapiens
agguccacuuacuacuccuguu

SEQ ID NO: 62972 - RNA, 22 nt, Homo sapiens
aggucccauguccucccugacc

SEQ ID NO: 62973 - RNA, 22 nt, Homo sapiens
aggugcaauggugguuuugugg

SEQ ID NO: 62974 - RNA, 22 nt, Homo sapiens
aggugguauuuaaaauuauuug

SEQ ID NO: 62975 - RNA, 22 nt, Homo sapiens
aggugguuuugaugagcaggua

SEQ ID NO: 62976 - RNA, 19 nt, Homo sapiens
auauaacauccaggagcag

SEQ ID NO: 62977 - RNA, 22 nt, Homo sapiens
auagcagcaccucacucuacug

SEQ ID NO: 62978 - RNA, 22 nt, Homo sapiens
auauuguacugcuacugguucu

SEQ ID NO: 62979 - RNA, 22 nt, Homo sapiens
auauuugguuaccugugggucu

SEQ ID NO: 62980 - RNA, 22 nt, Homo sapiens
auauuggucuucaagaccugug

SEQ ID NO: 62981 - RNA, 22 nt, Homo sapiens
auauuagguuggugcaaaagua

SEQ ID NO: 62982 - RNA, 22 nt, Homo sapiens
auauuagguuggugccaaagua

SEQ ID NO: 62983 - RNA, 22 nt, Homo sapiens
auauugcuccuaauaccacggu

SEQ ID NO: 62984 - RNA, 22 nt, Homo sapiens
aucacagguacuauggcugaca

SEQ ID NO: 62985 - RNA, 22 nt, Homo sapiens
aucacaggucaaaucauuauuu

SEQ ID NO: 62986 - RNA, 22 nt, Homo sapiens
aucagcauucccaaaugaugug

SEQ ID NO: 62987 - RNA, 22 nt, Homo sapiens
aucagugaaagugaaaucuccg

SEQ ID NO: 62988 - RNA, 22 nt, Homo sapiens
aucauaucaucugcaaacaaag

SEQ ID NO: 62989 - RNA, 22 nt, Homo sapiens
aucauagcucacugcagccucg

SEQ ID NO: 62990 - RNA, 22 nt, Homo sapiens
aucagcagcaugaaaacaggcu

SEQ ID NO: 62991 - RNA, 22 nt, Homo sapiens
aucacauggccagguaguaauc

SEQ ID NO: 62992 - RNA, 22 nt, Homo sapiens
aucacauuuauaguggcacgca

SEQ ID NO: 62993 - RNA, 22 nt, Homo sapiens
augguugguuaaaucuguguau

SEQ ID NO: 62994 - RNA, 22 nt, Homo sapiens
augggugaguaugaguugacuu

SEQ ID NO: 62995 - RNA, 22 nt, Homo sapiens
augggguaggcuuugcugcagu

SEQ ID NO: 62996 - RNA, 22 nt, Homo sapiens
augggguagguagcucggggaa

SEQ ID NO: 62997 - RNA, 17 nt, Homo sapiens
auguauacauccaugua

SEQ ID NO: 62998 - RNA, 22 nt, Homo sapiens
auguauacaugcaggucacagg

SEQ ID NO: 62999 - RNA, 22 nt, Homo sapiens
auguccauggaaucuguagcaa

SEQ ID NO: 63000 - RNA, 22 nt, Homo sapiens
auggagaugugcgaacugagua

SEQ ID NO: 63001 - RNA, 22 nt, Homo sapiens
auggauaugcuuccaacugccu

SEQ ID NO: 63002 - RNA, 22 nt, Homo sapiens
auggauagucucacucacauac

SEQ ID NO: 63003 - RNA, 22 nt, Homo sapiens
auggacagacacuggccuucug

SEQ ID NO: 63004 - RNA, 22 nt, Homo sapiens
augccauugcacuccagccugg

SEQ ID NO: 63005 - RNA, 22 nt, Homo sapiens
augccauugcacuccagccuag

SEQ ID NO: 63006 - RNA, 22 nt, Homo sapiens
augcauauuuuaccuagaagag

SEQ ID NO: 63007 - RNA, 22 nt, Homo sapiens
augcagguguuuugcacugagu

SEQ ID NO: 63008 - RNA, 22 nt, Homo sapiens
augagaaugauucuguuauggu

SEQ ID NO: 63009 - RNA, 22 nt, Homo sapiens
augagaauguaaguuaaugaaa

SEQ ID NO: 63010 - RNA, 22 nt, Homo sapiens
aucaugcacaugcauagguaug

SEQ ID NO: 63011 - RNA, 22 nt, Homo sapiens
aucauguaguaagacacauuua

SEQ ID NO: 63012 - RNA, 22 nt, Homo sapiens
augaacacuccaauuguacucc

SEQ ID NO: 63013 - RNA, 22 nt, Homo sapiens
augaacagagccuugagaaccu

SEQ ID NO: 63014 - RNA, 22 nt, Homo sapiens
augaggcuauaauuuuuaugua

SEQ ID NO: 63015 - RNA, 22 nt, Homo sapiens
augaggagauauuaaauaccau

SEQ ID NO: 63016 - RNA, 22 nt, Homo sapiens
augaggugcagaggaaaugagu

SEQ ID NO: 63017 - RNA, 22 nt, Homo sapiens
augagcacuuguuuugggcaca

SEQ ID NO: 63018 - RNA, 22 nt, Homo sapiens
augcagcugaggguaguggagc

SEQ ID NO: 63019 - RNA, 22 nt, Homo sapiens
augauauggguugucaguugua

SEQ ID NO: 63020 - RNA, 20 nt, Homo sapiens
augagguguaugacacugaa

SEQ ID NO: 63021 - RNA, 22 nt, Homo sapiens
aaagcacuggagucaucaucua

SEQ ID NO: 63022 - RNA, 23 nt, Homo sapiens
aaagacuagucaggugcaguggu

SEQ ID NO: 63023 - RNA, 22 nt, Homo sapiens
aaagcacugaauaaauuugcuu

SEQ ID NO: 63024 - RNA, 22 nt, Homo sapiens
aaacgugcagagaucaauagca

SEQ ID NO: 63025 - RNA, 22 nt, Homo sapiens
aaacucuguagcagagacagau

SEQ ID NO: 63026 - RNA, 22 nt, Homo sapiens
aaacugcuuuccaugguggcug

SEQ ID NO: 63027 - RNA, 22 nt, Homo sapiens
aaacagucuucuccugagggac

SEQ ID NO: 63028 - RNA, 22 nt, Homo sapiens
aaaaggcuagcuaguaacagaa

SEQ ID NO: 63029 - RNA, 22 nt, Homo sapiens
aacuggcauauucugguugcgg

SEQ ID NO: 63030 - RNA, 22 nt, Homo sapiens
aacuggcacuacaucaagagcu

SEQ ID NO: 63031 - RNA, 22 nt, Homo sapiens
aacuggcauagccagacuucuc

SEQ ID NO: 63032 - RNA, 18 nt, Homo sapiens
aagagcucagcacagguu

SEQ ID NO: 63033 - RNA, 22 nt, Homo sapiens
aagagaugaagguccugacugu

SEQ ID NO: 63034 - RNA, 22 nt, Homo sapiens
aaccuguaaccauaugaucagu

SEQ ID NO: 63035 - RNA, 22 nt, Homo sapiens
aacacuggcugcucgaguucuc

SEQ ID NO: 63036 - RNA, 22 nt, Homo sapiens
aacacggcccgcagagcaagcu

SEQ ID NO: 63037 - RNA, 22 nt, Homo sapiens
aacaccauucucuguaacaaga

SEQ ID NO: 63038 - RNA, 21 nt, Homo sapiens
aaaugugcuuuaguacccuca

SEQ ID NO: 63039 - RNA, 22 nt, Homo sapiens
aaaugcuguuccaggaccuauc

SEQ ID NO: 63040 - RNA, 20 nt, Homo sapiens
aaaugcuguaauguuuggga

SEQ ID NO: 63041 - RNA, 22 nt, Homo sapiens
aaaugucauggaguguuucccc

SEQ ID NO: 63042 - RNA, 22 nt, Homo sapiens
aaaugguguuaguagaucuuua

SEQ ID NO: 63043 - RNA, 22 nt, Homo sapiens
aaaugcagauucugcuuagguu

SEQ ID NO: 63044 - RNA, 22 nt, Homo sapiens
aaaugcaccacucuggugcagg

SEQ ID NO: 63045 - RNA, 22 nt, Homo sapiens
aaaugcacgcuacccagcuaga

SEQ ID NO: 63046 - RNA, 22 nt, Homo sapiens
aaaguguuucugcaguagguuu

SEQ ID NO: 63047 - RNA, 22 nt, Homo sapiens
aaauccauuuguucagcuaugc

SEQ ID NO: 63048 - RNA, 18 nt, Homo sapiens
aaaugcucuucuggaaua

SEQ ID NO: 63049 - RNA, 22 nt, Homo sapiens
aaaccacagugugcugcugggg

SEQ ID NO: 63050 - RNA, 22 nt, Homo sapiens
aaacccauauaccagcugugcu

SEQ ID NO: 63051 - RNA, 22 nt, Homo sapiens
aaacccguagauccgaucuugu

SEQ ID NO: 63052 - RNA, 22 nt, Homo sapiens
aaagagaucuaugggcacuaug

SEQ ID NO: 63053 - RNA, 22 nt, Homo sapiens
aaagaagucagccuguccuuug

SEQ ID NO: 63054 - RNA, 22 nt, Homo sapiens
aaacugucuggaugcuugugga

SEQ ID NO: 63055 - RNA, 22 nt, Homo sapiens
aaagggcuugaauacucuuuuu

SEQ ID NO: 63056 - RNA, 20 nt, Homo sapiens
aaaggcugugagaacgagau

SEQ ID NO: 63057 - RNA, 22 nt, Homo sapiens
aaagcagcaggugguuuucaau

SEQ ID NO: 63058 - RNA, 22 nt, Homo sapiens
aaagcuaccagauucuguugga

SEQ ID NO: 63059 - RNA, 21 nt, Homo sapiens
aaacuggcccaauuguuccau

SEQ ID NO: 63060 - RNA, 22 nt, Homo sapiens
aauaagcugagagaauucuaca

SEQ ID NO: 63061 - RNA, 22 nt, Homo sapiens
aagugcauguauuaguguaguc

SEQ ID NO: 63062 - RNA, 22 nt, Homo sapiens
aagugcacuguaagugcaggau

SEQ ID NO: 63063 - RNA, 22 nt, Homo sapiens
aagcuguauuguguugcuauaa

SEQ ID NO: 63064 - RNA, 22 nt, Homo sapiens
aagcuguguguaagcucucaca

SEQ ID NO: 63065 - RNA, 22 nt, Homo sapiens
aaugauauguuauguuuagguu

SEQ ID NO: 63066 - RNA, 22 nt, Homo sapiens
aaugcacauaaaauccuccagg

SEQ ID NO: 63067 - RNA, 22 nt, Homo sapiens
aaugcauaauuuguaugaggua

SEQ ID NO: 63068 - RNA, 22 nt, Homo sapiens
aauauugucaaaauggauucca

SEQ ID NO: 63069 - RNA, 22 nt, Homo sapiens
aaucacaguguucuugugaggg

SEQ ID NO: 63070 - RNA, 22 nt, Homo sapiens
aauauagcuauguacaugucca

SEQ ID NO: 63071 - RNA, 22 nt, Homo sapiens
acuugacacuuauauuacucac

SEQ ID NO: 63072 - RNA, 22 nt, Homo sapiens
acugcacuccagccuucgugac

SEQ ID NO: 63073 - RNA, 22 nt, Homo sapiens
acugcacuccagccuggacgaa

SEQ ID NO: 63074 - RNA, 22 nt, Homo sapiens
acugcacuccagccucggugac

SEQ ID NO: 63075 - RNA, 22 nt, Homo sapiens
acuuuuugaugaggucguuugu

SEQ ID NO: 63076 - RNA, 21 nt, Homo sapiens
agaaaaucuuaugggaaacau

SEQ ID NO: 63077 - RNA, 22 nt, Homo sapiens
acuuuguguuacccagcaagga

SEQ ID NO: 63078 - RNA, 20 nt, Homo sapiens
agagaucaguaauucaucaa

SEQ ID NO: 63079 - RNA, 22 nt, Homo sapiens
agagauccucauuuuauagaca

SEQ ID NO: 63080 - RNA, 22 nt, Homo sapiens
agagaugaagauggggcucccg

SEQ ID NO: 63081 - RNA, 22 nt, Homo sapiens
agaaccaaucccacauggauac

SEQ ID NO: 63082 - RNA, 22 nt, Homo sapiens
agagguauacauuugagagcca

SEQ ID NO: 63083 - RNA, 22 nt, Homo sapiens
agaugguguuuucucaccagau

SEQ ID NO: 63084 - RNA, 22 nt, Homo sapiens
agaucacaguaccguaaggcug

SEQ ID NO: 63085 - RNA, 22 nt, Homo sapiens
agauggauuuuguagccccagc

SEQ ID NO: 63086 - RNA, 22 nt, Homo sapiens
acauugcucuuaccaaguuugu

SEQ ID NO: 63087 - RNA, 22 nt, Homo sapiens
accacagugcuuccugcucacg

SEQ ID NO: 63088 - RNA, 22 nt, Homo sapiens
accaguuuuuuauacaucuucu

SEQ ID NO: 63089 - RNA, 22 nt, Homo sapiens
accaccauugcacugaacuuuc

SEQ ID NO: 63090 - RNA, 22 nt, Homo sapiens
accacaggguaaaguuagauau

SEQ ID NO: 63091 - RNA, 22 nt, Homo sapiens
acccauacacacauauuuaugu

SEQ ID NO: 63092 - RNA, 22 nt, Homo sapiens
acccugacacgauucuucacuu

SEQ ID NO: 63093 - RNA, 22 nt, Homo sapiens
acccggagagcaggcgagaagg

SEQ ID NO: 63094 - RNA, 22 nt, Homo sapiens
acccugucaaaauggaccaauc

SEQ ID NO: 63095 - RNA, 22 nt, Homo sapiens
acccugucacucccaucaauuu

SEQ ID NO: 63096 - RNA, 22 nt, Homo sapiens
acccugcuaaacagcccccugc

SEQ ID NO: 63097 - RNA, 22 nt, Homo sapiens
acccugucauccacauggugcu

SEQ ID NO: 63098 - RNA, 22 nt, Homo sapiens
acugcacuccagccucggcaau

SEQ ID NO: 63099 - RNA, 23 nt, Homo sapiens
acauguauagacuuuuuuuccuu

SEQ ID NO: 63100 - RNA, 21 nt, Homo sapiens
acauguacacauguaugcaca

SEQ ID NO: 63101 - RNA, 22 nt, Homo sapiens
acaugcauggcaugcauuguac

SEQ ID NO: 63102 - RNA, 22 nt, Homo sapiens
acauggcacugcgggcuucuug

SEQ ID NO: 63103 - RNA, 22 nt, Homo sapiens
acaucauugggggcuacaggug

SEQ ID NO: 63104 - RNA, 22 nt, Homo sapiens
aaugugccuacuggagcuugca

SEQ ID NO: 63105 - RNA, 22 nt, Homo sapiens
aaugucaugaguccaaccagaa

SEQ ID NO: 63106 - RNA, 22 nt, Homo sapiens
acaguguuccuuuguugugacu

SEQ ID NO: 63107 - RNA, 22 nt, Homo sapiens
aaugcuguguuauuucaugacc

SEQ ID NO: 63108 - RNA, 22 nt, Homo sapiens
aauggcuuucagcuuuucccca

SEQ ID NO: 63109 - RNA, 22 nt, Homo sapiens
aauggcauugguccuuuuggau

SEQ ID NO: 63110 - RNA, 22 nt, Homo sapiens
agugcacugcccgcuuccuguc

SEQ ID NO: 63111 - RNA, 23 nt, Homo sapiens
agucuguguuuacaggcucucug

SEQ ID NO: 63112 - RNA, 22 nt, Homo sapiens
agucauaggagagauaucacug

SEQ ID NO: 63113 - RNA, 21 nt, Homo sapiens
agucauaggaguacauaaugc

SEQ ID NO: 63114 - RNA, 22 nt, Homo sapiens
agggagcaaaguggucuuucuc

SEQ ID NO: 63115 - RNA, 23 nt, Homo sapiens
agggcacuauagauguuauucua

SEQ ID NO: 63116 - RNA, 23 nt, Homo sapiens
aggcauuguacaguaauggaaaa

SEQ ID NO: 63117 - RNA, 22 nt, Homo sapiens
aggcauguugcuucgggcuuug

SEQ ID NO: 63118 - RNA, 22 nt, Homo sapiens
aggcuuuuggagguggcuuucu

SEQ ID NO: 63119 - RNA, 20 nt, Homo sapiens
auaaauguauagguguacau

SEQ ID NO: 63120 - RNA, 22 nt, Homo sapiens
auaaaugcuuccagucauuaaa

SEQ ID NO: 63121 - RNA, 22 nt, Homo sapiens
auaaaugcuuagaucuguauau

SEQ ID NO: 63122 - RNA, 22 nt, Homo sapiens
auaaacugucaguggagaguaa

SEQ ID NO: 63123 - RNA, 22 nt, Homo sapiens
auaaaguagaggugaggugcau

SEQ ID NO: 63124 - RNA, 22 nt, Homo sapiens
aguggcacaauuuugacucccc

SEQ ID NO: 63125 - RNA, 22 nt, Homo sapiens
aguggcacuauucucagaguca

SEQ ID NO: 63126 - RNA, 22 nt, Homo sapiens
agugguguugccuguugaccua

SEQ ID NO: 63127 - RNA, 22 nt, Homo sapiens
agcacagugaaugguuuacuca

SEQ ID NO: 63128 - RNA, 22 nt, Homo sapiens
agcacagugguuaaguuucuua

SEQ ID NO: 63129 - RNA, 22 nt, Homo sapiens
agcaacauggaguuugugcgca

SEQ ID NO: 63130 - RNA, 22 nt, Homo sapiens
agccaguauuuccacagagugg

SEQ ID NO: 63131 - RNA, 22 nt, Homo sapiens
agccaguauuuuauugaggauu

SEQ ID NO: 63132 - RNA, 23 nt, Homo sapiens
agcaccaccccaggucacaagug

SEQ ID NO: 63133 - RNA, 22 nt, Homo sapiens
agcgccauugcacuccagccuu

SEQ ID NO: 63134 - RNA, 19 nt, Homo sapiens
agcuguguugccugugaga

SEQ ID NO: 63135 - RNA, 21 nt, Homo sapiens
aggcaaaugaagcagccgcuc

SEQ ID NO: 63136 - RNA, 22 nt, Homo sapiens
agcuugugcuguaugaagggcc

SEQ ID NO: 63137 - RNA, 22 nt, Homo sapiens
aggcagucucugccggcugagg

SEQ ID NO: 63138 - RNA, 22 nt, Homo sapiens
aggcaugugugcagacugucug

SEQ ID NO: 63139 - RNA, 22 nt, Homo sapiens
aacaccauuuuucugcagccuu

SEQ ID NO: 63140 - RNA, 22 nt, Homo sapiens
aggcaagugauagcugcguaau

SEQ ID NO: 63141 - RNA, 22 nt, Homo sapiens
aggcaaaugccagcaaucacac

SEQ ID NO: 63142 - RNA, 22 nt, Homo sapiens
aggcagcuguuauauacugagu

SEQ ID NO: 63143 - RNA, 22 nt, Homo sapiens
augguauggaaggucuggagga

SEQ ID NO: 63144 - RNA, 22 nt, Homo sapiens
augguauuuaacagucuuucua

SEQ ID NO: 63145 - RNA, 22 nt, Homo sapiens
auggcuguuuaagaguuucauu

SEQ ID NO: 63146 - RNA, 22 nt, Homo sapiens
auggcugugagaucgacuuauu

SEQ ID NO: 63147 - RNA, 22 nt, Homo sapiens
auggcuguuccugggaguucua

SEQ ID NO: 63148 - RNA, 22 nt, Homo sapiens
augguguccuguuuccccagga

SEQ ID NO: 63149 - RNA, 22 nt, Homo sapiens
auggcaguuucagcuauaguuu

SEQ ID NO: 63150 - RNA, 22 nt, Homo sapiens
auggcacuuuggacugcuagau

SEQ ID NO: 63151 - RNA, 22 nt, Homo sapiens
auggccuuuuuaucucaccaag

SEQ ID NO: 63152 - RNA, 22 nt, Homo sapiens
augagaugaggaauggcccucc

SEQ ID NO: 63153 - RNA, 22 nt, Homo sapiens
augauaaguuauuagaagaaga

SEQ ID NO: 63154 - RNA, 22 nt, Homo sapiens
augauccagugaguuucaguuc

SEQ ID NO: 63155 - RNA, 22 nt, Homo sapiens
augauagguuuagguuuagaca

SEQ ID NO: 63156 - RNA, 22 nt, Homo sapiens
augauauuauucuagcccagag

SEQ ID NO: 63157 - RNA, 22 nt, Homo sapiens
augaucacugugccuccuguga

SEQ ID NO: 63158 - RNA, 22 nt, Homo sapiens
augaucacaccacugcacucca

SEQ ID NO: 63159 - RNA, 22 nt, Homo sapiens
augauugugaauaugugguuuu

SEQ ID NO: 63160 - RNA, 21 nt, Homo sapiens
auugagcacaugaaacauggc

SEQ ID NO: 63161 - RNA, 22 nt, Homo sapiens
auugagcaauuccuaugugcuu

SEQ ID NO: 63162 - RNA, 22 nt, Homo sapiens
auugcaacaguguugagaggug

SEQ ID NO: 63163 - RNA, 22 nt, Homo sapiens
auuccauagugucuguggcaga

SEQ ID NO: 63164 - RNA, 22 nt, Homo sapiens
auugaacacagaguagcuuucc

SEQ ID NO: 63165 - RNA, 22 nt, Homo sapiens
augugguaggcccaugagucau

SEQ ID NO: 63166 - RNA, 22 nt, Homo sapiens
augugguaguuauagugauaag

SEQ ID NO: 63167 - RNA, 22 nt, Homo sapiens
auguaacacagugcggcugggc

SEQ ID NO: 63168 - RNA, 22 nt, Homo sapiens
auguaacaguauuuggagaugu

SEQ ID NO: 63169 - RNA, 22 nt, Homo sapiens
auguaaacauuuggucuaaauu

SEQ ID NO: 63170 - RNA, 22 nt, Homo sapiens
auguaaacagaugugcagcuug

SEQ ID NO: 63171 - RNA, 19 nt, Homo sapiens
augugguuagcaugacugc

SEQ ID NO: 63172 - RNA, 22 nt, Homo sapiens
auguggugguagccaggacagg

SEQ ID NO: 63173 - RNA, 23 nt, Homo sapiens
augugugcuuggagagcaggaug

SEQ ID NO: 63174 - RNA, 22 nt, Homo sapiens
auucacagcuuuaaaaggcgug

SEQ ID NO: 63175 - RNA, 22 nt, Homo sapiens
auuccacuuacaugaaguaccu

SEQ ID NO: 63176 - RNA, 21 nt, Homo sapiens
aucaccgugcaguucuccagg

SEQ ID NO: 63177 - RNA, 22 nt, Homo sapiens
aucacguguguuuaugcuacgc

SEQ ID NO: 63178 - RNA, 22 nt, Homo sapiens
aucacuaugcaggugucucggg

SEQ ID NO: 63179 - RNA, 18 nt, Homo sapiens
auauugcauuggauggau

SEQ ID NO: 63180 - RNA, 22 nt, Homo sapiens
auauguucucauucauaugugg

SEQ ID NO: 63181 - RNA, 22 nt, Homo sapiens
auaacauggaguuugucauuua

SEQ ID NO: 63182 - RNA, 22 nt, Homo sapiens
auaacagcugcaaggcaaaagc

SEQ ID NO: 63183 - RNA, 22 nt, Homo sapiens
auaacaggaaauacagggcuuu

SEQ ID NO: 63184 - RNA, 22 nt, Homo sapiens
auaaguauuuggacuuuacugu

SEQ ID NO: 63185 - RNA, 22 nt, Homo sapiens
auagcagugugaaaauggacua

SEQ ID NO: 63186 - RNA, 22 nt, Homo sapiens
auaaguagaaugauggucaaaa

SEQ ID NO: 63187 - RNA, 22 nt, Homo sapiens
auaaguaguaaagcagugacua

SEQ ID NO: 63188 - RNA, 22 nt, Homo sapiens
auagugcugcaauaaccauggg

SEQ ID NO: 63189 - RNA, 22 nt, Homo sapiens
auagugcuauggcagaccuuga

SEQ ID NO: 63190 - RNA, 21 nt, Homo sapiens
auagugcuagagaguagcagg

SEQ ID NO: 63191 - RNA, 22 nt, Homo sapiens
auaggagugugcacagaguagg

SEQ ID NO: 63192 - RNA, 22 nt, Homo sapiens
auagcccauuuguugguccugg

SEQ ID NO: 63193 - RNA, 22 nt, Homo sapiens
auaauaguguuuagauuuggga

SEQ ID NO: 63194 - RNA, 22 nt, Homo sapiens
augaaauguaugagucuggguu

SEQ ID NO: 63195 - RNA, 22 nt, Homo sapiens
aucaucaugcacuacagccugg

SEQ ID NO: 63196 - RNA, 22 nt, Homo sapiens
auccacauucauggaccagucc

SEQ ID NO: 63197 - RNA, 23 nt, Homo sapiens
auccacauucuaguccuuuaugc

SEQ ID NO: 63198 - RNA, 22 nt, Homo sapiens
aucauugugugaguugauggga

SEQ ID NO: 63199 - RNA, 20 nt, Homo sapiens
augaagugaaguuagggaac

SEQ ID NO: 63200 - RNA, 22 nt, Homo sapiens
augaauacagcuaugcgugcau

SEQ ID NO: 63201 - RNA, 20 nt, Homo sapiens
augaauguccuugauggcau

SEQ ID NO: 63202 - RNA, 22 nt, Homo sapiens
augaccuuggggaaccaugucu

SEQ ID NO: 63203 - RNA, 22 nt, Homo sapiens
augacuggaacggcacuuuaca

SEQ ID NO: 63204 - RNA, 18 nt, Homo sapiens
augacucuggguguuccu

SEQ ID NO: 63205 - RNA, 22 nt, Homo sapiens
augacuggauaauggacacaca

SEQ ID NO: 63206 - RNA, 22 nt, Homo sapiens
augaccagagagugcgcagggu

SEQ ID NO: 63207 - RNA, 22 nt, Homo sapiens
augagaaugaagccuggcgugu

SEQ ID NO: 63208 - RNA, 22 nt, Homo sapiens
augagaaucauuucagcuugua

SEQ ID NO: 63209 - RNA, 22 nt, Homo sapiens
ugagguaaugcuguagcuguga

SEQ ID NO: 63210 - RNA, 22 nt, Homo sapiens
ugagguagaggugaacuugacc

SEQ ID NO: 63211 - RNA, 22 nt, Homo sapiens
ugagggaugcguacccuaugcc

SEQ ID NO: 63212 - RNA, 19 nt, Homo sapiens
ugagauccacugaagauuc

SEQ ID NO: 63213 - RNA, 22 nt, Homo sapiens
ugagaugaggucucacucuguu

SEQ ID NO: 63214 - RNA, 22 nt, Homo sapiens
ugagacauauuauacugcuuuu

SEQ ID NO: 63215 - RNA, 22 nt, Homo sapiens
ugagaccaacagauuccaguuc

SEQ ID NO: 63216 - RNA, 22 nt, Homo sapiens
ugagaauauuugaagauguuag

SEQ ID NO: 63217 - RNA, 22 nt, Homo sapiens
ugagaauauuuuccaugucuca

SEQ ID NO: 63218 - RNA, 22 nt, Homo sapiens
ugagaagaugaacuccuugguc

SEQ ID NO: 63219 - RNA, 22 nt, Homo sapiens
ugagaacggauacuaagggcug

SEQ ID NO: 63220 - RNA, 22 nt, Homo sapiens
ugagaguagggguugggauugg

SEQ ID NO: 63221 - RNA, 22 nt, Homo sapiens
ugagaguauaaauugaugcagc

SEQ ID NO: 63222 - RNA, 22 nt, Homo sapiens
ugagauaacuaaaaacauuuug

SEQ ID NO: 63223 - RNA, 22 nt, Homo sapiens
ugacagcaucaggauuggagag

SEQ ID NO: 63224 - RNA, 22 nt, Homo sapiens
ugacaggauggagaucgguauu

SEQ ID NO: 63225 - RNA, 17 nt, Homo sapiens
ugacagaaacuuguugu

SEQ ID NO: 63226 - RNA, 22 nt, Homo sapiens
ucuuuguuuucugauccugaag

SEQ ID NO: 63227 - RNA, 22 nt, Homo sapiens
ucuuuguucaggagccaacucc

SEQ ID NO: 63228 - RNA, 22 nt, Homo sapiens
ugaaauaguuaaguugccuagu

SEQ ID NO: 63229 - RNA, 20 nt, Homo sapiens
ugaaaucuucacuaagucuc

SEQ ID NO: 63230 - RNA, 22 nt, Homo sapiens
ugaaagacugaaagcuuuucuu

SEQ ID NO: 63231 - RNA, 22 nt, Homo sapiens
ugaaagcuacaggaaaguauuu

SEQ ID NO: 63232 - RNA, 22 nt, Homo sapiens
ugaaagcuacagucuccuagga

SEQ ID NO: 63233 - RNA, 22 nt, Homo sapiens
ugaaagguuuaauucugugaga

SEQ ID NO: 63234 - RNA, 22 nt, Homo sapiens
ugacuacacacaauuugucaag

SEQ ID NO: 63235 - RNA, 22 nt, Homo sapiens
ugacucaguuucucagguagua

SEQ ID NO: 63236 - RNA, 22 nt, Homo sapiens
ugacuagcagagugagaaacuc

SEQ ID NO: 63237 - RNA, 22 nt, Homo sapiens
ugacuaggaggcuggaggauga

SEQ ID NO: 63238 - RNA, 22 nt, Homo sapiens
ugacuauaaauaagcaagggcu

SEQ ID NO: 63239 - RNA, 22 nt, Homo sapiens
ugacuagggacauucuuccacg

SEQ ID NO: 63240 - RNA, 22 nt, Homo sapiens
ugacuccagagacugugcuguc

SEQ ID NO: 63241 - RNA, 22 nt, Homo sapiens
ugacucuagagcugccuguggc

SEQ ID NO: 63242 - RNA, 22 nt, Homo sapiens
ucuuuguguaggucaaucuggc

SEQ ID NO: 63243 - RNA, 22 nt, Homo sapiens
ucuuugguucuguuuauguaau

SEQ ID NO: 63244 - RNA, 22 nt, Homo sapiens
ucuuggguuguuggcuucuccu

SEQ ID NO: 63245 - RNA, 22 nt, Homo sapiens
ucuugcuuuugcagagcuucuc

SEQ ID NO: 63246 - RNA, 22 nt, Homo sapiens
ucuugcauuuuuaaauagugcu

SEQ ID NO: 63247 - RNA, 22 nt, Homo sapiens
ucuguguuuagacccaggguag

SEQ ID NO: 63248 - RNA, 17 nt, Homo sapiens
ucuucuguuacuguggc

SEQ ID NO: 63249 - RNA, 23 nt, Homo sapiens
ucugauguuauaaaauucuuugg

SEQ ID NO: 63250 - RNA, 22 nt, Homo sapiens
ucugacuagacaagcaguguac

SEQ ID NO: 63251 - RNA, 22 nt, Homo sapiens
ucuggccuacaaguaauuuuau

SEQ ID NO: 63252 - RNA, 22 nt, Homo sapiens
ucuggcacugaugugggaugcu

SEQ ID NO: 63253 - RNA, 22 nt, Homo sapiens
ucugccuacugagcacacagug

SEQ ID NO: 63254 - RNA, 22 nt, Homo sapiens
ucuggcuucugacuuaggggac

SEQ ID NO: 63255 - RNA, 22 nt, Homo sapiens
ucuggcuccaaagucuauuuuu

SEQ ID NO: 63256 - RNA, 22 nt, Homo sapiens
ucuggcuccacacuuuauuaac

SEQ ID NO: 63257 - RNA, 22 nt, Homo sapiens
aacauguuuagcagauaccugu

SEQ ID NO: 63258 - RNA, 22 nt, Homo sapiens
ucugugcuugucauaugcuuug

SEQ ID NO: 63259 - RNA, 22 nt, Homo sapiens
ucuguggucagaguccuuggcc

SEQ ID NO: 63260 - RNA, 22 nt, Homo sapiens
ucuacagccaguucaggaagaa

SEQ ID NO: 63261 - RNA, 20 nt, Homo sapiens
ucuaccuguagguaauuggu

SEQ ID NO: 63262 - RNA, 22 nt, Homo sapiens
ucuauugguaggggcugaggca

SEQ ID NO: 63263 - RNA, 22 nt, Homo sapiens
ucucugauuauugcauuucauu

SEQ ID NO: 63264 - RNA, 22 nt, Homo sapiens
ucccuuuguccaacggauccac

SEQ ID NO: 63265 - RNA, 22 nt, Homo sapiens
ucgcgccauucuccugccucag

SEQ ID NO: 63266 - RNA, 20 nt, Homo sapiens
ucguugguagagagcagggc

SEQ ID NO: 63267 - RNA, 22 nt, Homo sapiens
ucccugagguccuggauuauug

SEQ ID NO: 63268 - RNA, 22 nt, Homo sapiens
ucccguuauuaaccccugccuu

SEQ ID NO: 63269 - RNA, 22 nt, Homo sapiens
uccccugagaacuugcuagaaa

SEQ ID NO: 63270 - RNA, 22 nt, Homo sapiens
uccccgucacacgcaggcuuac

SEQ ID NO: 63271 - RNA, 22 nt, Homo sapiens
ucacuauagaaaacagugugga

SEQ ID NO: 63272 - RNA, 22 nt, Homo sapiens
ucacuggacucuagccugggug

SEQ ID NO: 63273 - RNA, 19 nt, Homo sapiens
ucacuggacagcacacuca

SEQ ID NO: 63274 - RNA, 20 nt, Homo sapiens
ucacuggguucuugaagucu

SEQ ID NO: 63275 - RNA, 22 nt, Homo sapiens
ucacugugagaguuuauccugu

SEQ ID NO: 63276 - RNA, 20 nt, Homo sapiens
ucacugugaacuucuugagg

SEQ ID NO: 63277 - RNA, 22 nt, Homo sapiens
ucacugugcacauaugauaggu

SEQ ID NO: 63278 - RNA, 22 nt, Homo sapiens
uguaaaccauauauguauguag

SEQ ID NO: 63279 - RNA, 22 nt, Homo sapiens
uguaaaccucugaguacaagcu

SEQ ID NO: 63280 - RNA, 21 nt, Homo sapiens
ugguugauccuccuagugccu

SEQ ID NO: 63281 - RNA, 22 nt, Homo sapiens
uguauacauauguauguuuugu

SEQ ID NO: 63282 - RNA, 21 nt, Homo sapiens
uguauauguuuauacacacac

SEQ ID NO: 63283 - RNA, 22 nt, Homo sapiens
uguagucauuugaaggaugucc

SEQ ID NO: 63284 - RNA, 22 nt, Homo sapiens
ugggaugauguuaaacguacuc

SEQ ID NO: 63285 - RNA, 22 nt, Homo sapiens
ugggcaagugacuuggcuucuc

SEQ ID NO: 63286 - RNA, 22 nt, Homo sapiens
ugggcggagacgugcagccgcc

SEQ ID NO: 63287 - RNA, 22 nt, Homo sapiens
ugggccgcugcaggaugguccc

SEQ ID NO: 63288 - RNA, 22 nt, Homo sapiens
uggguagagcacugggggcgag

SEQ ID NO: 63289 - RNA, 22 nt, Homo sapiens
ugguuagucuguguguauauau

SEQ ID NO: 63290 - RNA, 22 nt, Homo sapiens
uggcaucuguucuacacauaaa

SEQ ID NO: 63291 - RNA, 19 nt, Homo sapiens
uggaugacugucugggucu

SEQ ID NO: 63292 - RNA, 20 nt, Homo sapiens
uggcaugaaauuuuccaagc

SEQ ID NO: 63293 - RNA, 18 nt, Homo sapiens
uggauaguuguuggcaga

SEQ ID NO: 63294 - RNA, 22 nt, Homo sapiens
uggaguguguugcagaugaagg

SEQ ID NO: 63295 - RNA, 22 nt, Homo sapiens
uggaguguaauuagccaucagu

SEQ ID NO: 63296 - RNA, 22 nt, Homo sapiens
uggaguguagaagccagccucc

SEQ ID NO: 63297 - RNA, 22 nt, Homo sapiens
uggacacuggagauucgucagu

SEQ ID NO: 63298 - RNA, 22 nt, Homo sapiens
ugggaucauuaugcauagugua

SEQ ID NO: 63299 - RNA, 22 nt, Homo sapiens
uggcgggaaaguugggagaaga

SEQ ID NO: 63300 - RNA, 22 nt, Homo sapiens
ugggaacugaggugaaaagaca

SEQ ID NO: 63301 - RNA, 22 nt, Homo sapiens
uggccagagggcaauuagcugu

SEQ ID NO: 63302 - RNA, 22 nt, Homo sapiens
uguccauuuuuaugcuuauggu

SEQ ID NO: 63303 - RNA, 22 nt, Homo sapiens
uguccaaaucagagguaccaaa

SEQ ID NO: 63304 - RNA, 22 nt, Homo sapiens
ugucaugucuuuguguaucaau

SEQ ID NO: 63305 - RNA, 22 nt, Homo sapiens
ugucuuuguuaguuguccuagu

SEQ ID NO: 63306 - RNA, 22 nt, Homo sapiens
ugucuggaaggguggccuccug

SEQ ID NO: 63307 - RNA, 22 nt, Homo sapiens
ugucuguuugcgaaauugcuuc

SEQ ID NO: 63308 - RNA, 22 nt, Homo sapiens
ugucuagaaaagccugccuucu

SEQ ID NO: 63309 - RNA, 20 nt, Homo sapiens
ugucaagaaacauuacuuau

SEQ ID NO: 63310 - RNA, 22 nt, Homo sapiens
uguauguuuaaggccaguggaa

SEQ ID NO: 63311 - RNA, 22 nt, Homo sapiens
ugucacugugcagucaugcauu

SEQ ID NO: 63312 - RNA, 22 nt, Homo sapiens
ugucagcacaacucagguuccu

SEQ ID NO: 63313 - RNA, 22 nt, Homo sapiens
ugucaucauuugagagaagaaa

SEQ ID NO: 63314 - RNA, 22 nt, Homo sapiens
ugcuuguguucagguaaccuuu

SEQ ID NO: 63315 - RNA, 22 nt, Homo sapiens
ugcuguuguuugaugaaguaau

SEQ ID NO: 63316 - RNA, 22 nt, Homo sapiens
uggaauggagagagggugcacg

SEQ ID NO: 63317 - RNA, 22 nt, Homo sapiens
uggagugagaacuucaaugaug

SEQ ID NO: 63318 - RNA, 22 nt, Homo sapiens
uggaguguaaauuaguucagcc

SEQ ID NO: 63319 - RNA, 22 nt, Homo sapiens
uggaguguagcggcaccuauua

SEQ ID NO: 63320 - RNA, 22 nt, Homo sapiens
ugcuaucauugauuagugaugu

SEQ ID NO: 63321 - RNA, 22 nt, Homo sapiens
ugcuacccuucgucucucuggu

SEQ ID NO: 63322 - RNA, 22 nt, Homo sapiens
ugccaguauuuuguugaagauu

SEQ ID NO: 63323 - RNA, 22 nt, Homo sapiens
ugccaguauuuuguugaggauu

SEQ ID NO: 63324 - RNA, 22 nt, Homo sapiens
ugccaagauuucaggaauuaag

SEQ ID NO: 63325 - RNA, 22 nt, Homo sapiens
ugccaguauuuuauuaagaauu

SEQ ID NO: 63326 - RNA, 19 nt, Homo sapiens
ugccaagaaagucagcuua

SEQ ID NO: 63327 - RNA, 22 nt, Homo sapiens
ugcuauguuuucccuccuuauc

SEQ ID NO: 63328 - RNA, 22 nt, Homo sapiens
ugcaagaugagauuuuggaugg

SEQ ID NO: 63329 - RNA, 17 nt, Homo sapiens
ugcagcacacugauggg

SEQ ID NO: 63330 - RNA, 22 nt, Homo sapiens
ugcagauucguuuugaggggua

SEQ ID NO: 63331 - RNA, 22 nt, Homo sapiens
ugcacuguggucugagagacag

SEQ ID NO: 63332 - RNA, 22 nt, Homo sapiens
ugcagugucaauaauaauuagu

SEQ ID NO: 63333 - RNA, 20 nt, Homo sapiens
ugcaguguccucacuuguca

SEQ ID NO: 63334 - RNA, 20 nt, Homo sapiens
ugcagcacugggaaugcagu

SEQ ID NO: 63335 - RNA, 22 nt, Homo sapiens
ugcagcacuguucacaauagcc

SEQ ID NO: 63336 - RNA, 22 nt, Homo sapiens
ugcaagaaucuuucaggcuagc

SEQ ID NO: 63337 - RNA, 22 nt, Homo sapiens
ugauaagaaauuguucauguag

SEQ ID NO: 63338 - RNA, 22 nt, Homo sapiens
ugaggucuuuauuuagugcuca

SEQ ID NO: 63339 - RNA, 22 nt, Homo sapiens
ugagucagucucacucugcugc

SEQ ID NO: 63340 - RNA, 21 nt, Homo sapiens
uuuguccaccuguguucacca

SEQ ID NO: 63341 - RNA, 22 nt, Homo sapiens
uuuguacucccuuuagauaaaa

SEQ ID NO: 63342 - RNA, 18 nt, Homo sapiens
uuuugcuuaacugcgcca

SEQ ID NO: 63343 - RNA, 22 nt, Homo sapiens
uuuuggugguuaugugucaaug

SEQ ID NO: 63344 - RNA, 22 nt, Homo sapiens
uuuugguguauuguauaaggua

SEQ ID NO: 63345 - RNA, 22 nt, Homo sapiens
uuucauggaggauuugcuucuu

SEQ ID NO: 63346 - RNA, 22 nt, Homo sapiens
uuuccuggagaaucuuaacaaa

SEQ ID NO: 63347 - RNA, 22 nt, Homo sapiens
uuugcugagucugacuucaugg

SEQ ID NO: 63348 - RNA, 22 nt, Homo sapiens
uuuggacuucuagccuccagag

SEQ ID NO: 63349 - RNA, 22 nt, Homo sapiens
uuuggcauuagauaauugugua

SEQ ID NO: 63350 - RNA, 22 nt, Homo sapiens
uuuggcagaaaacaagaaucug

SEQ ID NO: 63351 - RNA, 22 nt, Homo sapiens
aagcuggcauucauucguucuu

SEQ ID NO: 63352 - RNA, 22 nt, Homo sapiens
aagcacaauuucaccuucuugu

SEQ ID NO: 63353 - RNA, 22 nt, Homo sapiens
uuuuuugguaauugaacaauga

SEQ ID NO: 63354 - RNA, 22 nt, Homo sapiens
aagagugcucgugggacucagc

SEQ ID NO: 63355 - RNA, 22 nt, Homo sapiens
aagagugucuuugugcuggccc

SEQ ID NO: 63356 - RNA, 22 nt, Homo sapiens
aacuggcauguuuuaaggcuua

SEQ ID NO: 63357 - RNA, 22 nt, Homo sapiens
aacugguauuucccaugaauuu

SEQ ID NO: 63358 - RNA, 21 nt, Homo sapiens
aacuggugugagaugguaugu

SEQ ID NO: 63359 - RNA, 22 nt, Homo sapiens
aaccuguggauuuugguaucug

SEQ ID NO: 63360 - RNA, 22 nt, Homo sapiens
aacugcacauauuuguaugggu

SEQ ID NO: 63361 - RNA, 22 nt, Homo sapiens
aacuggcauaugaacuuguucu

SEQ ID NO: 63362 - RNA, 22 nt, Homo sapiens
aacugccucugacauaggcagg

SEQ ID NO: 63363 - RNA, 19 nt, Homo sapiens
uuuuguacucugugacuug

SEQ ID NO: 63364 - RNA, 22 nt, Homo sapiens
uuuugugcauggcccaguggua

SEQ ID NO: 63365 - RNA, 19 nt, Homo sapiens
uuuagaucuuuuaugcagc

SEQ ID NO: 63366 - RNA, 22 nt, Homo sapiens
uuuacugugggguuucuuagag

SEQ ID NO: 63367 - RNA, 22 nt, Homo sapiens
uuuagcgaaugcuugcuccugu

SEQ ID NO: 63368 - RNA, 20 nt, Homo sapiens
uuuaagacaugcugaauuga

SEQ ID NO: 63369 - RNA, 22 nt, Homo sapiens
uuuaacauuggaugagaucguc

SEQ ID NO: 63370 - RNA, 22 nt, Homo sapiens
uuuaauagcagggacuuccggg

SEQ ID NO: 63371 - RNA, 22 nt, Homo sapiens
uuuaaguguuuguuccugaaaa

SEQ ID NO: 63372 - RNA, 22 nt, Homo sapiens
uuguuaugggguggcuugaaag

SEQ ID NO: 63373 - RNA, 22 nt, Homo sapiens
uugugucccugcggcugaggag

SEQ ID NO: 63374 - RNA, 22 nt, Homo sapiens
uuguuuuggagaugagcuaaaa

SEQ ID NO: 63375 - RNA, 22 nt, Homo sapiens
uugucuccuagacgaccaggcg

SEQ ID NO: 63376 - RNA, 22 nt, Homo sapiens
uuguccuccacauuugaucagu

SEQ ID NO: 63377 - RNA, 22 nt, Homo sapiens
uugucauuuucagaguguuacg

SEQ ID NO: 63378 - RNA, 22 nt, Homo sapiens
uugugccauucuucugccucag

SEQ ID NO: 63379 - RNA, 22 nt, Homo sapiens
uugugccugguacauggagaaa

SEQ ID NO: 63380 - RNA, 22 nt, Homo sapiens
uugugcuugcuguguucuaugc

SEQ ID NO: 63381 - RNA, 22 nt, Homo sapiens
uugugcuuguaacuacauucag

SEQ ID NO: 63382 - RNA, 22 nt, Homo sapiens
uugugcuugauuugccuagcug

SEQ ID NO: 63383 - RNA, 22 nt, Homo sapiens
uugugcuucaucaccuagcaga

SEQ ID NO: 63384 - RNA, 22 nt, Homo sapiens
uuguaaacaucuguacauugcu

SEQ ID NO: 63385 - RNA, 22 nt, Homo sapiens
uuguaaagucugucucagucag

SEQ ID NO: 63386 - RNA, 22 nt, Homo sapiens
uuguaacaguucugcgagcagc

SEQ ID NO: 63387 - RNA, 22 nt, Homo sapiens
uuguaacaguuuauugacucga

SEQ ID NO: 63388 - RNA, 22 nt, Homo sapiens
uuguaacaugcuuucacuucag

SEQ ID NO: 63389 - RNA, 22 nt, Homo sapiens
uuguaaaguucucucccgaaaa

SEQ ID NO: 63390 - RNA, 22 nt, Homo sapiens
uuguaccacagggcaugaagug

SEQ ID NO: 63391 - RNA, 22 nt, Homo sapiens
uugggcauugcuauaaauucuu

SEQ ID NO: 63392 - RNA, 22 nt, Homo sapiens
uugggcauugggcuaaacuccc

SEQ ID NO: 63393 - RNA, 22 nt, Homo sapiens
uugggcaaguggcaugaccaug

SEQ ID NO: 63394 - RNA, 22 nt, Homo sapiens
uugggcaauaggaagcaggugg

SEQ ID NO: 63395 - RNA, 22 nt, Homo sapiens
uuggcuuaguugaccacagucu

SEQ ID NO: 63396 - RNA, 22 nt, Homo sapiens
uuggcuucuggacuauugugca

SEQ ID NO: 63397 - RNA, 22 nt, Homo sapiens
uuggcuguguuuauaugcugga

SEQ ID NO: 63398 - RNA, 22 nt, Homo sapiens
uuggagcacuggggcacugaca

SEQ ID NO: 63399 - RNA, 22 nt, Homo sapiens
uugauauguguauagcaugugg

SEQ ID NO: 63400 - RNA, 22 nt, Homo sapiens
uugauauguuguuagauucagu

SEQ ID NO: 63401 - RNA, 22 nt, Homo sapiens
uugauaguccuguaucuauuuu

SEQ ID NO: 63402 - RNA, 22 nt, Homo sapiens
uuaccucagaccugcucugugu

SEQ ID NO: 63403 - RNA, 22 nt, Homo sapiens
uguuugcuuaacguggagccag

SEQ ID NO: 63404 - RNA, 18 nt, Homo sapiens
uguuugguucugcgccuc

SEQ ID NO: 63405 - RNA, 22 nt, Homo sapiens
uguuugcuguguggaguagcag

SEQ ID NO: 63406 - RNA, 22 nt, Homo sapiens
uguuucuacugucucuguagua

SEQ ID NO: 63407 - RNA, 22 nt, Homo sapiens
uuaaguagaugaaugugaaugu

SEQ ID NO: 63408 - RNA, 22 nt, Homo sapiens
uguuggcauugcugcugacccu

SEQ ID NO: 63409 - RNA, 19 nt, Homo sapiens
ugugaacaucacagagugu

SEQ ID NO: 63410 - RNA, 22 nt, Homo sapiens
ugugaagaaagucauugguagc

SEQ ID NO: 63411 - RNA, 22 nt, Homo sapiens
ugugacagcacagcaucucuuu

SEQ ID NO: 63412 - RNA, 22 nt, Homo sapiens
ugugacaguguuacauuucaug

SEQ ID NO: 63413 - RNA, 22 nt, Homo sapiens
ugugacagguauccuguguucu

SEQ ID NO: 63414 - RNA, 22 nt, Homo sapiens
ugugacagcacgguucaacugc

SEQ ID NO: 63415 - RNA, 22 nt, Homo sapiens
ugugacagguagguaauuuuug

SEQ ID NO: 63416 - RNA, 22 nt, Homo sapiens
ugugacuaguggugaaugacgc

SEQ ID NO: 63417 - RNA, 22 nt, Homo sapiens
ugugagcuauggaguuguagag

SEQ ID NO: 63418 - RNA, 17 nt, Homo sapiens
uuagacagacauccugc

SEQ ID NO: 63419 - RNA, 22 nt, Homo sapiens
uuagacaguggugcacugcacu

SEQ ID NO: 63420 - RNA, 22 nt, Homo sapiens
uuagacucauuuuggucaagga

SEQ ID NO: 63421 - RNA, 22 nt, Homo sapiens
uuagaauggaaaugcgagguua

SEQ ID NO: 63422 - RNA, 22 nt, Homo sapiens
uuagcacugucuacucuggauu

SEQ ID NO: 63423 - RNA, 22 nt, Homo sapiens
uuagcagugugagcacagacua

SEQ ID NO: 63424 - RNA, 22 nt, Homo sapiens
uuagcagugugaaaaaagacua

SEQ ID NO: 63425 - RNA, 22 nt, Homo sapiens
uuaggcaggauaguuacauauu

SEQ ID NO: 63426 - RNA, 22 nt, Homo sapiens
uuauuagguuagugcaaaaguu

SEQ ID NO: 63427 - RNA, 22 nt, Homo sapiens
uuauuagguugguggaaaagua

SEQ ID NO: 63428 - RNA, 17 nt, Homo sapiens
uuauugcuauaagcuga

SEQ ID NO: 63429 - RNA, 22 nt, Homo sapiens
uuaugguuuauuagcaggguua

SEQ ID NO: 63430 - RNA, 22 nt, Homo sapiens
uuaugguuuuucugugagaugg

SEQ ID NO: 63431 - RNA, 22 nt, Homo sapiens
uuaugguuguuaucuugguucg

SEQ ID NO: 63432 - RNA, 22 nt, Homo sapiens
uuagugcaaacucuucaaugcu

SEQ ID NO: 63433 - RNA, 22 nt, Homo sapiens
uugagggcugaauaccaaucag

SEQ ID NO: 63434 - RNA, 22 nt, Homo sapiens
uugagguagcuuugauggaggu

SEQ ID NO: 63435 - RNA, 22 nt, Homo sapiens
uugaggacugguugaaagcuuu

SEQ ID NO: 63436 - RNA, 22 nt, Homo sapiens
uugagcucaucuucagggguga

SEQ ID NO: 63437 - RNA, 22 nt, Homo sapiens
uugaggaagugguuccccagag

SEQ ID NO: 63438 - RNA, 22 nt, Homo sapiens
uugacaggaugcucagggccca

SEQ ID NO: 63439 - RNA, 22 nt, Homo sapiens
uugacacuaauuauuauaggug

SEQ ID NO: 63440 - RNA, 22 nt, Homo sapiens
uugacacuuuguaagaaagggg

SEQ ID NO: 63441 - RNA, 22 nt, Homo sapiens
uugagaaucuuugcuaaaggaa

SEQ ID NO: 63442 - RNA, 22 nt, Homo sapiens
uugagaaucuuucgaauguucu

SEQ ID NO: 63443 - RNA, 22 nt, Homo sapiens
uugacuuuuaggaggaaaauga

SEQ ID NO: 63444 - RNA, 22 nt, Homo sapiens
uugagaugauggauaugcuaau

SEQ ID NO: 63445 - RNA, 22 nt, Homo sapiens
uuccuuguuuauuuacaggagg

SEQ ID NO: 63446 - RNA, 22 nt, Homo sapiens
uuccuugugacuaguagugacc

SEQ ID NO: 63447 - RNA, 22 nt, Homo sapiens
uugaaagcuaucucaaaucgcu

SEQ ID NO: 63448 - RNA, 22 nt, Homo sapiens
uugaaauguguaagcuccgaaa

SEQ ID NO: 63449 - RNA, 22 nt, Homo sapiens
uugaaaucuuccacagcccaag

SEQ ID NO: 63450 - RNA, 22 nt, Homo sapiens
uugaacuguaagggucugugug

SEQ ID NO: 63451 - RNA, 22 nt, Homo sapiens
uucacuguuaagcaguuaaacu

SEQ ID NO: 63452 - RNA, 22 nt, Homo sapiens
uucacuguagcuuggauguuua

SEQ ID NO: 63453 - RNA, 22 nt, Homo sapiens
uucagaugcacacuguagucua

SEQ ID NO: 63454 - RNA, 22 nt, Homo sapiens
uucacccugguuguagauggac

SEQ ID NO: 63455 - RNA, 22 nt, Homo sapiens
uuccaguggaguaaauggacaa

SEQ ID NO: 63456 - RNA, 22 nt, Homo sapiens
uuccagugggacgagaugugga

SEQ ID NO: 63457 - RNA, 22 nt, Homo sapiens
uuccaguguuugacucaccuuu

SEQ ID NO: 63458 - RNA, 22 nt, Homo sapiens
uuccaguguguucauccucaga

SEQ ID NO: 63459 - RNA, 22 nt, Homo sapiens
uuccaagugggaaacaaaaaug

SEQ ID NO: 63460 - RNA, 22 nt, Homo sapiens
uuccacaggguugaacuaguuu

SEQ ID NO: 63461 - RNA, 22 nt, Homo sapiens
uuccacuuuuuccuugugcucc

SEQ ID NO: 63462 - RNA, 22 nt, Homo sapiens
cuggaggccugaacauaaaugg

SEQ ID NO: 63463 - RNA, 22 nt, Homo sapiens
cuggagauauuggaagaaagaa

SEQ ID NO: 63464 - RNA, 22 nt, Homo sapiens
cuguaacagaauaaauuuguuu

SEQ ID NO: 63465 - RNA, 23 nt, Homo sapiens
cuguacacauauacaucuaagua

SEQ ID NO: 63466 - RNA, 22 nt, Homo sapiens
cuggcucauuucauuuagcaua

SEQ ID NO: 63467 - RNA, 22 nt, Homo sapiens
cuggcagugcuuguuauccugg

SEQ ID NO: 63468 - RNA, 22 nt, Homo sapiens
cugggaucaguucuagucagaa

SEQ ID NO: 63469 - RNA, 22 nt, Homo sapiens
cugggaugugacuguugccccc

SEQ ID NO: 63470 - RNA, 19 nt, Homo sapiens
cugcaugagacaguugguu

SEQ ID NO: 63471 - RNA, 22 nt, Homo sapiens
cugaggauauucagccucugug

SEQ ID NO: 63472 - RNA, 18 nt, Homo sapiens
cugccagugugcucuccg

SEQ ID NO: 63473 - RNA, 22 nt, Homo sapiens
cugagcaugacaucaugugacu

SEQ ID NO: 63474 - RNA, 22 nt, Homo sapiens
cugagcuaugccuggaaaggca

SEQ ID NO: 63475 - RNA, 22 nt, Homo sapiens
cugacaucuucaagugaggaga

SEQ ID NO: 63476 - RNA, 22 nt, Homo sapiens
cuccuggugauuggagugugaa

SEQ ID NO: 63477 - RNA, 22 nt, Homo sapiens
cuacucuggagagugacaauca

SEQ ID NO: 63478 - RNA, 22 nt, Homo sapiens
cuagaggcacagccuaggcacu

SEQ ID NO: 63479 - RNA, 22 nt, Homo sapiens
cuagcugcacuuccugcuacug

SEQ ID NO: 63480 - RNA, 22 nt, Homo sapiens
cuagcagcaugagaauggacca

SEQ ID NO: 63481 - RNA, 22 nt, Homo sapiens
cuccauuuggaacagauguccu

SEQ ID NO: 63482 - RNA, 22 nt, Homo sapiens
cuccacgugaaugccaaguauu

SEQ ID NO: 63483 - RNA, 18 nt, Homo sapiens
ccagugcaaggaaagccc

SEQ ID NO: 63484 - RNA, 22 nt, Homo sapiens
ccagguuucuagaauaauuccu

SEQ ID NO: 63485 - RNA, 22 nt, Homo sapiens
ccagugcugugcaguguaugag

SEQ ID NO: 63486 - RNA, 19 nt, Homo sapiens
ccaguguucugauugcacu

SEQ ID NO: 63487 - RNA, 22 nt, Homo sapiens
cauuugcacugagacucagcuu

SEQ ID NO: 63488 - RNA, 22 nt, Homo sapiens
ccagccgggugcaguggcucac

SEQ ID NO: 63489 - RNA, 22 nt, Homo sapiens
cauuguccuccuggggcuauuu

SEQ ID NO: 63490 - RNA, 22 nt, Homo sapiens
cauugucccucaaugacuauga

SEQ ID NO: 63491 - RNA, 22 nt, Homo sapiens
cauugcucuuacagagugagua

SEQ ID NO: 63492 - RNA, 22 nt, Homo sapiens
cuaaagauagugacaugauuug

SEQ ID NO: 63493 - RNA, 22 nt, Homo sapiens
cuaaagugcuuaaaaucucauu

SEQ ID NO: 63494 - RNA, 22 nt, Homo sapiens
cuaaagugcugagauuauaggu

SEQ ID NO: 63495 - RNA, 22 nt, Homo sapiens
cgugaggaaaacagaggguguu

SEQ ID NO: 63496 - RNA, 22 nt, Homo sapiens
ccaguuuucaagauaaugguuu

SEQ ID NO: 63497 - RNA, 17 nt, Homo sapiens
ccaguuuucccucagug

SEQ ID NO: 63498 - RNA, 22 nt, Homo sapiens
ccaguuuuucauuuauacuagu

SEQ ID NO: 63499 - RNA, 22 nt, Homo sapiens
ccaguuuuuggcaaugaugaau

SEQ ID NO: 63500 - RNA, 22 nt, Homo sapiens
ccuuuguuuaguugaauuguau

SEQ ID NO: 63501 - RNA, 22 nt, Homo sapiens
cgaguguaguaggccauaugaa

SEQ ID NO: 63502 - RNA, 22 nt, Homo sapiens
caagagaccugagugucauucu

SEQ ID NO: 63503 - RNA, 22 nt, Homo sapiens
auugcacuccagucucaccagg

SEQ ID NO: 63504 - RNA, 22 nt, Homo sapiens
caaugcagcuuuuggagagaaa

SEQ ID NO: 63505 - RNA, 22 nt, Homo sapiens
caaucugucuuuuagggggcca

SEQ ID NO: 63506 - RNA, 22 nt, Homo sapiens
caaggugcugagacaggagccc

SEQ ID NO: 63507 - RNA, 23 nt, Homo sapiens
cacagggugaacaccccuaaucc

SEQ ID NO: 63508 - RNA, 22 nt, Homo sapiens
cacaggucauccuggaucaagg

SEQ ID NO: 63509 - RNA, 22 nt, Homo sapiens
cacaguguuacugguaugaagu

SEQ ID NO: 63510 - RNA, 22 nt, Homo sapiens
cacagugaaugucaucauugcc

SEQ ID NO: 63511 - RNA, 22 nt, Homo sapiens
cacacugucuuucagaaugguu

SEQ ID NO: 63512 - RNA, 22 nt, Homo sapiens
cacaccuacuagggccgugggc

SEQ ID NO: 63513 - RNA, 21 nt, Homo sapiens
cacauggaggcagagagugua

SEQ ID NO: 63514 - RNA, 22 nt, Homo sapiens
cacaguugccuaucuccugaag

SEQ ID NO: 63515 - RNA, 22 nt, Homo sapiens
cacugcacuccaguuuggauga

SEQ ID NO: 63516 - RNA, 22 nt, Homo sapiens
cacauguuuuagcauggcuguu

SEQ ID NO: 63517 - RNA, 22 nt, Homo sapiens
cacugcacuccagucugacgac

SEQ ID NO: 63518 - RNA, 22 nt, Homo sapiens
cacugcacuccagucccgucuc

SEQ ID NO: 63519 - RNA, 22 nt, Homo sapiens
cacugcacucuucuucugggca

SEQ ID NO: 63520 - RNA, 22 nt, Homo sapiens
cacugcauggucuagcuggguu

SEQ ID NO: 63521 - RNA, 22 nt, Homo sapiens
cacugcgaccuccaccucccgg

SEQ ID NO: 63522 - RNA, 22 nt, Homo sapiens
cacugcauuacucaugagcaug

SEQ ID NO: 63523 - RNA, 22 nt, Homo sapiens
cacugcauuggaugguuccucc

SEQ ID NO: 63524 - RNA, 22 nt, Homo sapiens
cagagcacuaaagguaaaaggc

SEQ ID NO: 63525 - RNA, 22 nt, Homo sapiens
cagauaguuguagauaugcagc

SEQ ID NO: 63526 - RNA, 22 nt, Homo sapiens
cagaugcaugaccugggcuugg

SEQ ID NO: 63527 - RNA, 22 nt, Homo sapiens
cacuuugguucaccugaguuuc

SEQ ID NO: 63528 - RNA, 22 nt, Homo sapiens
cagacaugucuuguggccgugg

SEQ ID NO: 63529 - RNA, 20 nt, Homo sapiens
cagagcaaagcaguccuggc

SEQ ID NO: 63530 - RNA, 22 nt, Homo sapiens
cacuggucagugaaacaguauu

SEQ ID NO: 63531 - RNA, 22 nt, Homo sapiens
cacuggguuagaacaugcuccu

SEQ ID NO: 63532 - RNA, 22 nt, Homo sapiens
caugggcacugacuugcauucg

SEQ ID NO: 63533 - RNA, 22 nt, Homo sapiens
cauguauagauuccauaguggu

SEQ ID NO: 63534 - RNA, 19 nt, Homo sapiens
caugugcacuacuggcuuc

SEQ ID NO: 63535 - RNA, 22 nt, Homo sapiens
caugucacuuccucucugaugg

SEQ ID NO: 63536 - RNA, 22 nt, Homo sapiens
cauggauuuuuuugaauggcag

SEQ ID NO: 63537 - RNA, 22 nt, Homo sapiens
caugccacugcacuccaaccug

SEQ ID NO: 63538 - RNA, 22 nt, Homo sapiens
cauggcucuuguuuacucccag

SEQ ID NO: 63539 - RNA, 22 nt, Homo sapiens
cauugcacugcagcccgggcaa

SEQ ID NO: 63540 - RNA, 22 nt, Homo sapiens
cauugcacuccagccuuggcaa

SEQ ID NO: 63541 - RNA, 22 nt, Homo sapiens
cauugcacuccagccuugguga

SEQ ID NO: 63542 - RNA, 22 nt, Homo sapiens
cauugcacuccagccuaggcaa

SEQ ID NO: 63543 - RNA, 22 nt, Homo sapiens
cauugcaauccagccugggcaa

SEQ ID NO: 63544 - RNA, 19 nt, Homo sapiens
caugccacugcacuugagu

SEQ ID NO: 63545 - RNA, 22 nt, Homo sapiens
caucgcacuccagcuugggcaa

SEQ ID NO: 63546 - RNA, 22 nt, Homo sapiens
caucccauucgaggggcacagc

SEQ ID NO: 63547 - RNA, 22 nt, Homo sapiens
caucgcacuccagccugggcaa

SEQ ID NO: 63548 - RNA, 22 nt, Homo sapiens
caucccugucgucaagucucug

SEQ ID NO: 63549 - RNA, 22 nt, Homo sapiens
caggcuuuuccacacauggguu

SEQ ID NO: 63550 - RNA, 22 nt, Homo sapiens
caggcacgcuugggagacacac

SEQ ID NO: 63551 - RNA, 20 nt, Homo sapiens
cagcaaccugcucucuuccu

SEQ ID NO: 63552 - RNA, 22 nt, Homo sapiens
caggugcuuacuuaauagccau

SEQ ID NO: 63553 - RNA, 22 nt, Homo sapiens
cagguauagucacuugcccaag

SEQ ID NO: 63554 - RNA, 22 nt, Homo sapiens
gagcacugauuuauuuuugucu

SEQ ID NO: 63555 - RNA, 22 nt, Homo sapiens
gagcacugaauacugugguggu

SEQ ID NO: 63556 - RNA, 22 nt, Homo sapiens
gagcuuggguuaaaguugccuu

SEQ ID NO: 63557 - RNA, 22 nt, Homo sapiens
gaggagauauucugcuggaugg

SEQ ID NO: 63558 - RNA, 22 nt, Homo sapiens
gaggaaguaauuuuaggccugu

SEQ ID NO: 63559 - RNA, 23 nt, Homo sapiens
gagugcaaugacaugaucucgga

SEQ ID NO: 63560 - RNA, 22 nt, Homo sapiens
gagucagugucuugcucuguca

SEQ ID NO: 63561 - RNA, 22 nt, Homo sapiens
gaggaaguagcuacugucuuuc

SEQ ID NO: 63562 - RNA, 22 nt, Homo sapiens
gaggcacucuguacaaaucugc

SEQ ID NO: 63563 - RNA, 22 nt, Homo sapiens
gagaacagaagcauuccuaauu

SEQ ID NO: 63564 - RNA, 22 nt, Homo sapiens
gacgauaucaaggaaaugaagu

SEQ ID NO: 63565 - RNA, 22 nt, Homo sapiens
gagaacauuaauaguuaauuuu

SEQ ID NO: 63566 - RNA, 22 nt, Homo sapiens
gagaacauacggcauuugguuu

SEQ ID NO: 63567 - RNA, 22 nt, Homo sapiens
gacuacaacuucuauuauucag

SEQ ID NO: 63568 - RNA, 22 nt, Homo sapiens
gacguagagaaaugugaaaugg

SEQ ID NO: 63569 - RNA, 22 nt, Homo sapiens
gacuagagagccaaccgucagg

SEQ ID NO: 63570 - RNA, 22 nt, Homo sapiens
gacuagagcugaucauguuacu

SEQ ID NO: 63571 - RNA, 17 nt, Homo sapiens
gacgaucaucaggaggc

SEQ ID NO: 63572 - RNA, 22 nt, Homo sapiens
gaccuguaguuuaguugccugu

SEQ ID NO: 63573 - RNA, 21 nt, Homo sapiens
gaccuguaguaagcauucaca

SEQ ID NO: 63574 - RNA, 22 nt, Homo sapiens
gacccucuagauggaagcacug

SEQ ID NO: 63575 - RNA, 22 nt, Homo sapiens
gacauguuuucaagauuuauaa

SEQ ID NO: 63576 - RNA, 22 nt, Homo sapiens
gacauguuuuuuaagguuuaug

SEQ ID NO: 63577 - RNA, 20 nt, Homo sapiens
gacauguuuuguggccuaac

SEQ ID NO: 63578 - RNA, 22 nt, Homo sapiens
cuuuuacacugguggugggaau

SEQ ID NO: 63579 - RNA, 20 nt, Homo sapiens
gaaacaucuauccucuccuu

SEQ ID NO: 63580 - RNA, 22 nt, Homo sapiens
cuuuuggucuaucagagaagca

SEQ ID NO: 63581 - RNA, 22 nt, Homo sapiens
cuuuuguggaucuucuguugcu

SEQ ID NO: 63582 - RNA, 22 nt, Homo sapiens
cuuuuggugugaagaagcucuu

SEQ ID NO: 63583 - RNA, 18 nt, Homo sapiens
gacaguguggugauuccu

SEQ ID NO: 63584 - RNA, 18 nt, Homo sapiens
gacaguguggcgauuccu

SEQ ID NO: 63585 - RNA, 22 nt, Homo sapiens
gacauagagccuugacuucauu

SEQ ID NO: 63586 - RNA, 20 nt, Homo sapiens
gacauagagacucucaaaaa

SEQ ID NO: 63587 - RNA, 22 nt, Homo sapiens
gaaaguaauuaacgauuguugc

SEQ ID NO: 63588 - RNA, 22 nt, Homo sapiens
cugugcuugagagaugacacag

SEQ ID NO: 63589 - RNA, 22 nt, Homo sapiens
cugugguuacguucuuugugcu

SEQ ID NO: 63590 - RNA, 22 nt, Homo sapiens
cuguuaacauguuguggauaau

SEQ ID NO: 63591 - RNA, 22 nt, Homo sapiens
cugucuggaggccugcaaauaa

SEQ ID NO: 63592 - RNA, 21 nt, Homo sapiens
cugguccccuuuauguaugug

SEQ ID NO: 63593 - RNA, 22 nt, Homo sapiens
cuguacucaucccauaugcacu

SEQ ID NO: 63594 - RNA, 22 nt, Homo sapiens
cugugaucuuuuuucauguggu

SEQ ID NO: 63595 - RNA, 22 nt, Homo sapiens
cugugcauguaugcgugaguuc

SEQ ID NO: 63596 - RNA, 19 nt, Homo sapiens
cugugcauuucuguggaag

SEQ ID NO: 63597 - RNA, 22 nt, Homo sapiens
cugugcaugcgcggagcugaaa

SEQ ID NO: 63598 - RNA, 22 nt, Homo sapiens
cugugcauuggaugucucccug

SEQ ID NO: 63599 - RNA, 22 nt, Homo sapiens
ggagaauugcuuggacccggga

SEQ ID NO: 63600 - RNA, 22 nt, Homo sapiens
ggagauccucugcgggcaaaga

SEQ ID NO: 63601 - RNA, 22 nt, Homo sapiens
ggagaugaaaugagcuacuuaa

SEQ ID NO: 63602 - RNA, 20 nt, Homo sapiens
ggagguuguauaaguacauc

SEQ ID NO: 63603 - RNA, 22 nt, Homo sapiens
ggcaacaugccgaaaccacguc

SEQ ID NO: 63604 - RNA, 22 nt, Homo sapiens
ggcaaagagacaugcaucgggg

SEQ ID NO: 63605 - RNA, 22 nt, Homo sapiens
ggaucacagccagcucccagaa

SEQ ID NO: 63606 - RNA, 22 nt, Homo sapiens
gcuuuguuaaaacacagccaca

SEQ ID NO: 63607 - RNA, 22 nt, Homo sapiens
gcuguuugccgccaucgcagac

SEQ ID NO: 63608 - RNA, 22 nt, Homo sapiens
gcuuggugugcaagugguacua

SEQ ID NO: 63609 - RNA, 22 nt, Homo sapiens
gcuuguguauuaaaccuugcag

SEQ ID NO: 63610 - RNA, 22 nt, Homo sapiens
gcucuuuugggguaauucugag

SEQ ID NO: 63611 - RNA, 17 nt, Homo sapiens
gcugauguuugcauuuu

SEQ ID NO: 63612 - RNA, 22 nt, Homo sapiens
gcugcuguaccagaugugguua

SEQ ID NO: 63613 - RNA, 22 nt, Homo sapiens
gcacaaugccugacgaguccug

SEQ ID NO: 63614 - RNA, 22 nt, Homo sapiens
gcacauuacaaguauuagcuca

SEQ ID NO: 63615 - RNA, 22 nt, Homo sapiens
gcacaguguuacuugauauauu

SEQ ID NO: 63616 - RNA, 22 nt, Homo sapiens
gcagaauugguuucuucuaagg

SEQ ID NO: 63617 - RNA, 22 nt, Homo sapiens
gcaucacagcuccugugcuggc

SEQ ID NO: 63618 - RNA, 17 nt, Homo sapiens
gcauauguugaaccagu

SEQ ID NO: 63619 - RNA, 17 nt, Homo sapiens
gcauauguugaaccagc

SEQ ID NO: 63620 - RNA, 18 nt, Homo sapiens
gccaacauguaaacaggu

SEQ ID NO: 63621 - RNA, 22 nt, Homo sapiens
gcauugcacuuggcauagacug

SEQ ID NO: 63622 - RNA, 22 nt, Homo sapiens
gcauggccuuuaaaugucacag

SEQ ID NO: 63623 - RNA, 22 nt, Homo sapiens
gccagugugaugugaucauggc

SEQ ID NO: 63624 - RNA, 22 nt, Homo sapiens
gccaagaugcugcccacagaca

SEQ ID NO: 63625 - RNA, 20 nt, Homo sapiens
gccacaguuaagcuucugcc

SEQ ID NO: 63626 - RNA, 22 nt, Homo sapiens
gcuaggagauccacugcucucu

SEQ ID NO: 63627 - RNA, 22 nt, Homo sapiens
gcucaugggcagugugauuguu

SEQ ID NO: 63628 - RNA, 22 nt, Homo sapiens
gagugcaauggugccaucucgg

SEQ ID NO: 63629 - RNA, 22 nt, Homo sapiens
gagugguucuauauguaauugg

SEQ ID NO: 63630 - RNA, 22 nt, Homo sapiens
gagugguuuugauuuauagcug

SEQ ID NO: 63631 - RNA, 22 nt, Homo sapiens
gauaaagauagcaauagggaca

SEQ ID NO: 63632 - RNA, 22 nt, Homo sapiens
gaugcaguaagaaugcauagcg

SEQ ID NO: 63633 - RNA, 22 nt, Homo sapiens
gauggcacuguagcaacacaaa

SEQ ID NO: 63634 - RNA, 22 nt, Homo sapiens
gaugguuuuucuccgauuuaua

SEQ ID NO: 63635 - RNA, 22 nt, Homo sapiens
gauguaggugcauuugcacgug

SEQ ID NO: 63636 - RNA, 22 nt, Homo sapiens
gauguagaaagagugggcugga

SEQ ID NO: 63637 - RNA, 22 nt, Homo sapiens
gauguguugggaagauuucaag

SEQ ID NO: 63638 - RNA, 22 nt, Homo sapiens
gcaagagguaucuuauuuuccc

SEQ ID NO: 63639 - RNA, 21 nt, Homo sapiens
uacuggagauacagucugcaa

SEQ ID NO: 63640 - RNA, 22 nt, Homo sapiens
uacuguacugcaguucugcaaa

SEQ ID NO: 63641 - RNA, 22 nt, Homo sapiens
uaccuguagcucuucuaggcug

SEQ ID NO: 63642 - RNA, 20 nt, Homo sapiens
uagcacacauguagaauagu

SEQ ID NO: 63643 - RNA, 19 nt, Homo sapiens
uagaugucuuugcauagau

SEQ ID NO: 63644 - RNA, 22 nt, Homo sapiens
uagaauguauaauauuuuacuu

SEQ ID NO: 63645 - RNA, 22 nt, Homo sapiens
uagaaugucagcuucuugaggg

SEQ ID NO: 63646 - RNA, 22 nt, Homo sapiens
uaacuauagagaauguugagua

SEQ ID NO: 63647 - RNA, 22 nt, Homo sapiens
uaaggauuuuggugauuacacu

SEQ ID NO: 63648 - RNA, 22 nt, Homo sapiens
uaagcuauagugaauaaauugc

SEQ ID NO: 63649 - RNA, 23 nt, Homo sapiens
uaagacacuaacuuuaugcuuug

SEQ ID NO: 63650 - RNA, 22 nt, Homo sapiens
uaacugucucccuugguccuga

SEQ ID NO: 63651 - RNA, 22 nt, Homo sapiens
uacccucuggauacccuuguuc

SEQ ID NO: 63652 - RNA, 22 nt, Homo sapiens
uaccauguauguuucuccauug

SEQ ID NO: 63653 - RNA, 22 nt, Homo sapiens
uaccagcauuucucuuuaagua

SEQ ID NO: 63654 - RNA, 22 nt, Homo sapiens
uaccacugccgagaaaacagau

SEQ ID NO: 63655 - RNA, 19 nt, Homo sapiens
uaccagcacaguguuugag

SEQ ID NO: 63656 - RNA, 20 nt, Homo sapiens
uaguggaaaucagguccucu

SEQ ID NO: 63657 - RNA, 22 nt, Homo sapiens
uagugcuguaauucuaaugaaa

SEQ ID NO: 63658 - RNA, 22 nt, Homo sapiens
uagugcacuacuugugggaaug

SEQ ID NO: 63659 - RNA, 22 nt, Homo sapiens
uaguagugucccugacuaucac

SEQ ID NO: 63660 - RNA, 23 nt, Homo sapiens
uauaugugucuaggagcuauggu

SEQ ID NO: 63661 - RNA, 20 nt, Homo sapiens
uaguggcaugcaccuguagc

SEQ ID NO: 63662 - RNA, 22 nt, Homo sapiens
uagccuguggugaauguuucug

SEQ ID NO: 63663 - RNA, 22 nt, Homo sapiens
uagcaccaaacauauacucagu

SEQ ID NO: 63664 - RNA, 22 nt, Homo sapiens
uagcacccucuccuaguccugc

SEQ ID NO: 63665 - RNA, 22 nt, Homo sapiens
uagcaguauugaaagaugaggg

SEQ ID NO: 63666 - RNA, 22 nt, Homo sapiens
uaggagugugaacccuaugaac

SEQ ID NO: 63667 - RNA, 22 nt, Homo sapiens
uaggcacacaucuacuacaaau

SEQ ID NO: 63668 - RNA, 22 nt, Homo sapiens
uaggcaguguucucacuuguaa

SEQ ID NO: 63669 - RNA, 22 nt, Homo sapiens
uauguuaucaaaaagcuaagga

SEQ ID NO: 63670 - RNA, 22 nt, Homo sapiens
uauugcaacagaagaaagaguc

SEQ ID NO: 63671 - RNA, 22 nt, Homo sapiens
uauugcaauuggcagagugcua

SEQ ID NO: 63672 - RNA, 22 nt, Homo sapiens
uauugcacaugaggagacauug

SEQ ID NO: 63673 - RNA, 22 nt, Homo sapiens
uauugcagaaugugaguuggca

SEQ ID NO: 63674 - RNA, 22 nt, Homo sapiens
uauugcagauacccaggaaguu

SEQ ID NO: 63675 - RNA, 22 nt, Homo sapiens
uauugccucuuuuguaaaagug

SEQ ID NO: 63676 - RNA, 22 nt, Homo sapiens
uaucucuguggguagugcugaa

SEQ ID NO: 63677 - RNA, 22 nt, Homo sapiens
uaucuuggaguuugacaaccaa

SEQ ID NO: 63678 - RNA, 22 nt, Homo sapiens
uaucugguuuuguuacagguuc

SEQ ID NO: 63679 - RNA, 22 nt, Homo sapiens
uauggguuucagagggugauag

SEQ ID NO: 63680 - RNA, 22 nt, Homo sapiens
uaugguuuucucuuacguguug

SEQ ID NO: 63681 - RNA, 22 nt, Homo sapiens
uaugucuuuugcuugcaaauag

SEQ ID NO: 63682 - RNA, 22 nt, Homo sapiens
uaugugguuaauaggaauuugu

SEQ ID NO: 63683 - RNA, 22 nt, Homo sapiens
uaucaugggggguguacacucc

SEQ ID NO: 63684 - RNA, 21 nt, Homo sapiens
uauccacuugcaacagagaag

SEQ ID NO: 63685 - RNA, 20 nt, Homo sapiens
uaucuacuugcaaaugccau

SEQ ID NO: 63686 - RNA, 22 nt, Homo sapiens
ucacauuguacaaacagguaag

SEQ ID NO: 63687 - RNA, 22 nt, Homo sapiens
ucacauuguauauguaccuauc

SEQ ID NO: 63688 - RNA, 22 nt, Homo sapiens
ucacauuaagcuguuauuucuu

SEQ ID NO: 63689 - RNA, 22 nt, Homo sapiens
ucacaugugcguuuuggcaugu

SEQ ID NO: 63690 - RNA, 22 nt, Homo sapiens
ucacauguguaugagcuuugau

SEQ ID NO: 63691 - RNA, 22 nt, Homo sapiens
ucacaugucagccguggggaag

SEQ ID NO: 63692 - RNA, 22 nt, Homo sapiens
ucacagucggugacuucuugcu

SEQ ID NO: 63693 - RNA, 22 nt, Homo sapiens
ucacaguugauugaaacacagc

SEQ ID NO: 63694 - RNA, 22 nt, Homo sapiens
ucacaugcacaucucuggaacc

SEQ ID NO: 63695 - RNA, 21 nt, Homo sapiens
ucaccuguugcgaugaagcug

SEQ ID NO: 63696 - RNA, 22 nt, Homo sapiens
ucacuaggcuggagugcagugg

SEQ ID NO: 63697 - RNA, 18 nt, Homo sapiens
ucaccuugcuuuuagaac

SEQ ID NO: 63698 - RNA, 22 nt, Homo sapiens
ucaccuggagacaugaagacug

SEQ ID NO: 63699 - RNA, 22 nt, Homo sapiens
ucacccugacaugcggccgaac

SEQ ID NO: 63700 - RNA, 20 nt, Homo sapiens
ucacccugacaucugcccag

SEQ ID NO: 63701 - RNA, 22 nt, Homo sapiens
ucacagacugagccaaauagag

SEQ ID NO: 63702 - RNA, 22 nt, Homo sapiens
ucacagucaaaguaaucauaga

SEQ ID NO: 63703 - RNA, 22 nt, Homo sapiens
ucacacugaauuugaagcaaug

SEQ ID NO: 63704 - RNA, 22 nt, Homo sapiens
ucacacugucuugguuacucuu

SEQ ID NO: 63705 - RNA, 22 nt, Homo sapiens
ucacagacauugaggggaccuu

SEQ ID NO: 63706 - RNA, 22 nt, Homo sapiens
ucacaauggagacucgggcgga

SEQ ID NO: 63707 - RNA, 22 nt, Homo sapiens
ucacaauucucaauuugugaaa

SEQ ID NO: 63708 - RNA, 18 nt, Homo sapiens
ucaauguggauguucuuu

SEQ ID NO: 63709 - RNA, 22 nt, Homo sapiens
ucaaguacuuauuugauaauua

SEQ ID NO: 63710 - RNA, 22 nt, Homo sapiens
ucaaguacugccuugcucuggc

SEQ ID NO: 63711 - RNA, 17 nt, Homo sapiens
gugaaaucaucauuuuu

SEQ ID NO: 63712 - RNA, 22 nt, Homo sapiens
gugaacagaaccugggaucgaa

SEQ ID NO: 63713 - RNA, 22 nt, Homo sapiens
gugaacaagcaaaggcaggagg

SEQ ID NO: 63714 - RNA, 22 nt, Homo sapiens
gugaacagcagaugagugagug

SEQ ID NO: 63715 - RNA, 22 nt, Homo sapiens
gugaaugcauuaagaaggggga

SEQ ID NO: 63716 - RNA, 20 nt, Homo sapiens
gugacugagcacgggcacag

SEQ ID NO: 63717 - RNA, 22 nt, Homo sapiens
gugacauuauuucagcuacaug

SEQ ID NO: 63718 - RNA, 22 nt, Homo sapiens
gugaacuguuugaggaagagaa

SEQ ID NO: 63719 - RNA, 22 nt, Homo sapiens
gucuuugcuuuuaaccagaggu

SEQ ID NO: 63720 - RNA, 22 nt, Homo sapiens
gucuuuggaaaaaaugucuguu

SEQ ID NO: 63721 - RNA, 20 nt, Homo sapiens
gucuugcuccguugcccagg

SEQ ID NO: 63722 - RNA, 22 nt, Homo sapiens
gucuuggagaacucagcuuggc

SEQ ID NO: 63723 - RNA, 22 nt, Homo sapiens
gugaaagcaucugacugugcca

SEQ ID NO: 63724 - RNA, 22 nt, Homo sapiens
gucuggguuuguuuguacuugc

SEQ ID NO: 63725 - RNA, 21 nt, Homo sapiens
gucuuacagccagaugccucu

SEQ ID NO: 63726 - RNA, 22 nt, Homo sapiens
gucucagugcgaaucucaaaga

SEQ ID NO: 63727 - RNA, 22 nt, Homo sapiens
gucucccagccuacaucuuucu

SEQ ID NO: 63728 - RNA, 22 nt, Homo sapiens
gucacuguuuccuauuauauuu

SEQ ID NO: 63729 - RNA, 22 nt, Homo sapiens
gucacugccugaggcugaugca

SEQ ID NO: 63730 - RNA, 22 nt, Homo sapiens
gucacugacaagagagaagaac

SEQ ID NO: 63731 - RNA, 22 nt, Homo sapiens
gucacauugaugcccauggugg

SEQ ID NO: 63732 - RNA, 22 nt, Homo sapiens
guaucauugccuaaugcucuca

SEQ ID NO: 63733 - RNA, 22 nt, Homo sapiens
ggcaguuuggcaguuucauaaa

SEQ ID NO: 63734 - RNA, 22 nt, Homo sapiens
ggcagcacaauuuucugaugga

SEQ ID NO: 63735 - RNA, 22 nt, Homo sapiens
ggcacuguggcucaagccugua

SEQ ID NO: 63736 - RNA, 19 nt, Homo sapiens
ggcacugugugagugagga

SEQ ID NO: 63737 - RNA, 23 nt, Homo sapiens
ggcagguuggucuaggucuauuc

SEQ ID NO: 63738 - RNA, 22 nt, Homo sapiens
ggcaguggaagugccaguuucu

SEQ ID NO: 63739 - RNA, 22 nt, Homo sapiens
ggcaagaaccagggauuugcgu

SEQ ID NO: 63740 - RNA, 20 nt, Homo sapiens
ggcaagguagcauuucuucu

SEQ ID NO: 63741 - RNA, 22 nt, Homo sapiens
ggcaaggugcuacagacaguga

SEQ ID NO: 63742 - RNA, 23 nt, Homo sapiens
ggcaagaucucagcucacugcaa

SEQ ID NO: 63743 - RNA, 22 nt, Homo sapiens
ggcacugugaugugagggggua

SEQ ID NO: 63744 - RNA, 19 nt, Homo sapiens
guaaugugcuucaguagca

SEQ ID NO: 63745 - RNA, 22 nt, Homo sapiens
guagugcaguuugagaaucagu

SEQ ID NO: 63746 - RNA, 22 nt, Homo sapiens
guagcagucacauagcagauug

SEQ ID NO: 63747 - RNA, 22 nt, Homo sapiens
guaggcacuggcucagcuuauc

SEQ ID NO: 63748 - RNA, 22 nt, Homo sapiens
guaagucucaugagaucugaug

SEQ ID NO: 63749 - RNA, 22 nt, Homo sapiens
ggcauguauucuuauuauuccu

SEQ ID NO: 63750 - RNA, 22 nt, Homo sapiens
guaacucugucacuuacuaguu

SEQ ID NO: 63751 - RNA, 22 nt, Homo sapiens
guguuauugagaaauagggugu

SEQ ID NO: 63752 - RNA, 20 nt, Homo sapiens
guucauguaauuaguucagg

SEQ ID NO: 63753 - RNA, 22 nt, Homo sapiens
guuuuuggggucacuauuaccg

SEQ ID NO: 63754 - RNA, 21 nt, Homo sapiens
uaaaacuguaacuuuguccug

SEQ ID NO: 63755 - RNA, 22 nt, Homo sapiens
guugcagcacacaggcugucag

SEQ ID NO: 63756 - RNA, 19 nt, Homo sapiens
uaacacaguuguguuugag

SEQ ID NO: 63757 - RNA, 22 nt, Homo sapiens
uaacaggcaaggucacaccuug

SEQ ID NO: 63758 - RNA, 21 nt, Homo sapiens
uaacagcuccacuccauucuc

SEQ ID NO: 63759 - RNA, 22 nt, Homo sapiens
uaacaguggucugugguaucug

SEQ ID NO: 63760 - RNA, 22 nt, Homo sapiens
uaacaguauaugugguaucuau

SEQ ID NO: 63761 - RNA, 22 nt, Homo sapiens
uaacaguauauuuaccaaaccu

SEQ ID NO: 63762 - RNA, 22 nt, Homo sapiens
uaacccacgcagaauggacaag

SEQ ID NO: 63763 - RNA, 22 nt, Homo sapiens
uaaagccauugucaaguuugua

SEQ ID NO: 63764 - RNA, 22 nt, Homo sapiens
uaaaguguuuguuauuaaaggu

SEQ ID NO: 63765 - RNA, 22 nt, Homo sapiens
uaaauggauauugccaucuccu

SEQ ID NO: 63766 - RNA, 22 nt, Homo sapiens
gugugauggcgcacacagggug

SEQ ID NO: 63767 - RNA, 22 nt, Homo sapiens
gugugcaacuuucauuaauauu

SEQ ID NO: 63768 - RNA, 22 nt, Homo sapiens
guguggaacucaauacaacgca

SEQ ID NO: 63769 - RNA, 21 nt, Homo sapiens
gugugcuugaauucagcuguc

SEQ ID NO: 63770 - RNA, 21 nt, Homo sapiens
gugugcuugagugaugggauu

SEQ ID NO: 63771 - RNA, 22 nt, Homo sapiens
guggugucuuguuuaauauaua

SEQ ID NO: 63772 - RNA, 22 nt, Homo sapiens
gugguacuaucuuugguuucag

SEQ ID NO: 63773 - RNA, 22 nt, Homo sapiens
guggaaguuaagugacuuucug

SEQ ID NO: 63774 - RNA, 22 nt, Homo sapiens
guggaaaaguaguugcgguuuu

SEQ ID NO: 63775 - RNA, 22 nt, Homo sapiens
gugauugugaaaacauuaagaa

SEQ ID NO: 63776 - RNA, 22 nt, Homo sapiens
gugcuuuguuguggcaguggca

SEQ ID NO: 63777 - RNA, 22 nt, Homo sapiens
guggaaaacauaugcuuguuga

SEQ ID NO: 63778 - RNA, 18 nt, Homo sapiens
gugagaaugacuguucug

SEQ ID NO: 63779 - RNA, 22 nt, Homo sapiens
gugagaacugcuggggccacag

SEQ ID NO: 63780 - RNA, 22 nt, Homo sapiens
gugaucucagcucacuggaacc

SEQ ID NO: 63781 - RNA, 22 nt, Human herpesvirus 8 (Kaposi`s sarcoma-associated h
ugugucaaccagggcacccucc

SEQ ID NO: 63782 - RNA, 22 nt, Human herpesvirus 8 (Kaposi`s sarcoma-associated h
uggcgcuggaagaaggcugucg

SEQ ID NO: 63783 - RNA, 22 nt, Human herpesvirus 8 (Kaposi`s sarcoma-associated h
uggcugcgcaguccaagggcga

SEQ ID NO: 63784 - RNA, 22 nt, Human herpesvirus 8 (Kaposi`s sarcoma-associated h
uuuuaaaacuucauuguucucc

SEQ ID NO: 63785 - RNA, 22 nt, Human herpesvirus 8 (Kaposi`s sarcoma-associated h
uccgguucccacccacacauuu

SEQ ID NO: 63786 - RNA, 22 nt, Human herpesvirus 8 (Kaposi`s sarcoma-associated h
gugccuuugucuuucguucucg

SEQ ID NO: 63787 - RNA, 22 nt, Human herpesvirus 8 (Kaposi`s sarcoma-associated h
uaacagaucccggucguccacc

SEQ ID NO: 63788 - RNA, 22 nt, Human herpesvirus 8 (Kaposi`s sarcoma-associated h
aaugcuuccggaaauaccaccu

SEQ ID NO: 63789 - RNA, 22 nt, Human herpesvirus 8 (Kaposi`s sarcoma-associated h
cagggggugucuccgucugcuc

SEQ ID NO: 63790 - RNA, 19 nt, Human herpesvirus 8 (Kaposi`s sarcoma-associated h
ccaggguguguggucgccc

SEQ ID NO: 63791 - RNA, 22 nt, Human herpesvirus 8 (Kaposi`s sarcoma-associated h
aaaaauguauguugccaccgga

SEQ ID NO: 63792 - RNA, 22 nt, Human herpesvirus 8 (Kaposi`s sarcoma-associated h
cgccagaugcccgccuucgugc

SEQ ID NO: 63793 - RNA, 22 nt, Human herpesvirus 8 (Kaposi`s sarcoma-associated h
agggccagguguucuacaacca

SEQ ID NO: 63794 - RNA, 19 nt, Human herpesvirus 8 (Kaposi`s sarcoma-associated h
agggcggguuauuggcagu

SEQ ID NO: 63795 - RNA, 22 nt, Human herpesvirus 8 (Kaposi`s sarcoma-associated h
agucccgacuaaugaggacaau

SEQ ID NO: 63796 - RNA, 22 nt, Human herpesvirus 8 (Kaposi`s sarcoma-associated h
agcgggguuuacgcagcugggu

SEQ ID NO: 63797 - RNA, 22 nt, Human herpesvirus 8 (Kaposi`s sarcoma-associated h
auuguaaaagauccgauccuca

SEQ ID NO: 63798 - RNA, 22 nt, Human herpesvirus 8 (Kaposi`s sarcoma-associated h
auuguccccgguugaagccugc

SEQ ID NO: 63799 - RNA, 22 nt, Human herpesvirus 8 (Kaposi`s sarcoma-associated h
ggaaugguggccugguugacac

SEQ ID NO: 63800 - RNA, 22 nt, Human herpesvirus 8 (Kaposi`s sarcoma-associated h
gggucuccugcggaggccaaua

SEQ ID NO: 63801 - RNA, 22 nt, Human herpesvirus 8 (Kaposi`s sarcoma-associated h
ggggacugucauccuguugguc

SEQ ID NO: 63802 - RNA, 22 nt, Human herpesvirus 8 (Kaposi`s sarcoma-associated h
ggugccccuaaagaccgucugu

SEQ ID NO: 63803 - RNA, 22 nt, Human herpesvirus 8 (Kaposi`s sarcoma-associated h
ucuguuuuauauagugaggguu

SEQ ID NO: 63804 - RNA, 22 nt, Homo sapiens
uucccuugcaggaugaucugga

SEQ ID NO: 63805 - RNA, 22 nt, Homo sapiens
ucagaucauuaagguagguuua

SEQ ID NO: 63806 - RNA, 22 nt, Homo sapiens
uugcuuaggcuggagugcagug

SEQ ID NO: 63807 - RNA, 22 nt, Homo sapiens
gagguaaguggauuaugagguc

SEQ ID NO: 63808 - RNA, 22 nt, Homo sapiens
ucacuuuggguacuauggaaau

SEQ ID NO: 63809 - RNA, 22 nt, Homo sapiens
ggcagcacaauuuucugaugga

SEQ ID NO: 63810 - RNA, 22 nt, Homo sapiens
aaguacuguuuaaauugcagaa

SEQ ID NO: 63811 - RNA, 22 nt, Homo sapiens
aguaccauuacucacuuauuuu

SEQ ID NO: 63812 - RNA, 22 nt, Homo sapiens
auuauaugucaucacagacacc

SEQ ID NO: 63813 - RNA, 22 nt, Homo sapiens
gauggcauuucuggaucugccc

SEQ ID NO: 63814 - RNA, 22 nt, Homo sapiens
agacucauuuuuaucgagcaug

SEQ ID NO: 63815 - RNA, 22 nt, Homo sapiens
ucacacugaauuugaagcaaug

SEQ ID NO: 63816 - RNA, 22 nt, Homo sapiens
agaaugugaacaucuugaaagu

SEQ ID NO: 63817 - RNA, 22 nt, Homo sapiens
ugggaacaugaagguuaaagag

SEQ ID NO: 63818 - RNA, 20 nt, Homo sapiens
cugcuccccuacaaaucuca

SEQ ID NO: 63819 - RNA, 22 nt, Homo sapiens
uucugugcuuguggaugaagug

SEQ ID NO: 63820 - RNA, 22 nt, Homo sapiens
caucccugucgucaagucucug

SEQ ID NO: 63821 - RNA, 22 nt, Homo sapiens
gugaguggacgugaccaauaaa

SEQ ID NO: 63822 - RNA, 22 nt, Homo sapiens
ugaugguuuuaaaaagaggagu

SEQ ID NO: 63823 - RNA, 18 nt, Homo sapiens
gucauagaaugaugguuc

SEQ ID NO: 63824 - RNA, 22 nt, Homo sapiens
gauggauuuuaagugaaugaaa

SEQ ID NO: 63825 - RNA, 22 nt, Homo sapiens
uucagggcauuggaguuucuga

SEQ ID NO: 63826 - RNA, 23 nt, Homo sapiens
uuucuugggcaugcuaugucagu

SEQ ID NO: 63827 - RNA, 22 nt, Homo sapiens
gucugguugacagcauguggcc

SEQ ID NO: 63828 - RNA, 22 nt, Homo sapiens
uaugauuuuugggagaggucaa

SEQ ID NO: 63829 - RNA, 22 nt, Homo sapiens
ugugaacauuuuguauauauua

SEQ ID NO: 63830 - RNA, 22 nt, Homo sapiens
caggcagucuggggguguaucc

SEQ ID NO: 63831 - RNA, 22 nt, Homo sapiens
ugagaucacgccacugcacucc

SEQ ID NO: 63832 - RNA, 22 nt, Homo sapiens
augugugcuugauguaaaaagu

SEQ ID NO: 63833 - RNA, 22 nt, Homo sapiens
gucagcaaagaggaauaguuug

SEQ ID NO: 63834 - RNA, 18 nt, Homo sapiens
augaagucaucacuuuua

SEQ ID NO: 63835 - RNA, 22 nt, Homo sapiens
aaucaacauuguuuuaagucaa

SEQ ID NO: 63836 - RNA, 22 nt, Homo sapiens
ucccaguauucauuuacagaag

SEQ ID NO: 63837 - RNA, 22 nt, Homo sapiens
cugagaaugaugauuuccaguu

SEQ ID NO: 63838 - RNA, 22 nt, Homo sapiens
ggagaucuuuaggaguuggacu

SEQ ID NO: 63839 - RNA, 22 nt, Homo sapiens
aggcauugugcaucgaugauuu

SEQ ID NO: 63840 - RNA, 22 nt, Homo sapiens
augauagucuugagaagcauuu

SEQ ID NO: 63841 - RNA, 22 nt, Homo sapiens
uguguuugauaaguccauaguu

SEQ ID NO: 63842 - RNA, 22 nt, Homo sapiens
uggagcccuaguuccucauaac

SEQ ID NO: 63843 - RNA, 22 nt, Homo sapiens
cacagugaacaauauccucugu

SEQ ID NO: 63844 - RNA, 22 nt, Homo sapiens
ugucucccuucccauuaggaag

SEQ ID NO: 63845 - RNA, 22 nt, Homo sapiens
auagcacaguguguguacacca

SEQ ID NO: 63846 - RNA, 22 nt, Homo sapiens
augugcuaguaucaaacgagac

SEQ ID NO: 63847 - RNA, 22 nt, Homo sapiens
uguggccuuuguuucaguuggg

SEQ ID NO: 63848 - RNA, 22 nt, Homo sapiens
gcccuuugugucuggcuggggu

SEQ ID NO: 63849 - RNA, 22 nt, Homo sapiens
uacaaagcuuugaugugucuuu

SEQ ID NO: 63850 - RNA, 22 nt, Homo sapiens
cugagaucugaaccaggagugu

SEQ ID NO: 63851 - RNA, 22 nt, Homo sapiens
ugacucaguuucucagguagua

SEQ ID NO: 63852 - RNA, 22 nt, Homo sapiens
gugagauggagucuugcuuugu

SEQ ID NO: 63853 - RNA, 19 nt, Homo sapiens
uugucuuagaguugucauu

SEQ ID NO: 63854 - RNA, 22 nt, Homo sapiens
agcaagacauggcuuccaaaug

SEQ ID NO: 63855 - RNA, 22 nt, Homo sapiens
uucagggacuuuagacaagaga

SEQ ID NO: 63856 - RNA, 22 nt, Homo sapiens
gucucccagccuacaucuuucu

SEQ ID NO: 63857 - RNA, 22 nt, Homo sapiens
uuggacugagaguuccaccauu

SEQ ID NO: 63858 - RNA, 22 nt, Homo sapiens
uugcuauguugcccagucugga

SEQ ID NO: 63859 - RNA, 22 nt, Homo sapiens
guauacaguugacccuugaacc

SEQ ID NO: 63860 - RNA, 22 nt, Homo sapiens
cacagucugggcuuguuuguac

SEQ ID NO: 63861 - RNA, 17 nt, Homo sapiens
ccccugagcgaugcagu

SEQ ID NO: 63862 - RNA, 22 nt, Homo sapiens
uugcacagucuagcuccaccuu

SEQ ID NO: 63863 - RNA, 22 nt, Homo sapiens
uggucccucugaaaauugggug

SEQ ID NO: 63864 - RNA, 22 nt, Homo sapiens
auggaauguauagucauguagg

SEQ ID NO: 63865 - RNA, 22 nt, Homo sapiens
agcagauguuuagugagcgccu

SEQ ID NO: 63866 - RNA, 22 nt, Homo sapiens
cucaguggauuagauaaugcac

SEQ ID NO: 63867 - RNA, 22 nt, Homo sapiens
auggcacuguguauuuuucugu

SEQ ID NO: 63868 - RNA, 21 nt, Homo sapiens
caugucacugcacucuagccu

SEQ ID NO: 63869 - RNA, 23 nt, Homo sapiens
agauggcauuucaguucuuuagg

SEQ ID NO: 63870 - RNA, 22 nt, Homo sapiens
cugugacugcagggcauauuug

SEQ ID NO: 63871 - RNA, 22 nt, Homo sapiens
uuucaucaagcacagaguagau

SEQ ID NO: 63872 - RNA, 22 nt, Homo sapiens
uccaguuuggaggcuugaugug

SEQ ID NO: 63873 - RNA, 21 nt, Homo sapiens
cuugucuugcuuagaauagac

SEQ ID NO: 63874 - RNA, 22 nt, Homo sapiens
aauugcuucuguauuuuggaca

SEQ ID NO: 63875 - RNA, 22 nt, Homo sapiens
ugaguucaauguuaaugaagca

SEQ ID NO: 63876 - RNA, 22 nt, Homo sapiens
gagguggugguggaggcauagc

SEQ ID NO: 63877 - RNA, 20 nt, Homo sapiens
agguaguuauacaaaugugu

SEQ ID NO: 63878 - RNA, 22 nt, Homo sapiens
gacuagggaaaauuauuuuguu

SEQ ID NO: 63879 - RNA, 22 nt, Homo sapiens
ugggcaagagagcaugacccug

SEQ ID NO: 63880 - RNA, 22 nt, Homo sapiens
uuaaaugcauagaauguguagu

SEQ ID NO: 63881 - RNA, 22 nt, Homo sapiens
caaaugaucugcuggccucagc

SEQ ID NO: 63882 - RNA, 22 nt, Homo sapiens
cuuuguccuucaagguguguca

SEQ ID NO: 63883 - RNA, 22 nt, Homo sapiens
ggcccugagacaggaaaaagcu

SEQ ID NO: 63884 - RNA, 22 nt, Homo sapiens
uuauggcuauugaugacaauug

SEQ ID NO: 63885 - RNA, 22 nt, Homo sapiens
aaggcagugugcacauaacacu

SEQ ID NO: 63886 - RNA, 22 nt, Homo sapiens
ucaacagugggcacuguaaaug

SEQ ID NO: 63887 - RNA, 22 nt, Homo sapiens
gcaaaauugagaagggaauaua

SEQ ID NO: 63888 - RNA, 22 nt, Homo sapiens
ugagauuguucuaugucugguu

SEQ ID NO: 63889 - RNA, 22 nt, Homo sapiens
gugagguaauuagcucccuuag

SEQ ID NO: 63890 - RNA, 22 nt, Homo sapiens
uggacuguaauagagaacagaa

SEQ ID NO: 63891 - RNA, 22 nt, Homo sapiens
uggcaagagcugcauucaucug

SEQ ID NO: 63892 - RNA, 22 nt, Homo sapiens
ccugugguuaaccagcuagaug

SEQ ID NO: 63893 - RNA, 22 nt, Homo sapiens
aauagcacuguagauggaggaa

SEQ ID NO: 63894 - RNA, 22 nt, Homo sapiens
cuaggcacugauaguuguauuu

SEQ ID NO: 63895 - RNA, 22 nt, Homo sapiens
uugggcaauaggaagcaggugg

SEQ ID NO: 63896 - RNA, 22 nt, Homo sapiens
uuccaguuauuauaccucuuaa

SEQ ID NO: 63897 - RNA, 22 nt, Homo sapiens
uucugugcugaaucaaagacug

SEQ ID NO: 63898 - RNA, 22 nt, Homo sapiens
ucagauguuuuguuuaucugcu

SEQ ID NO: 63899 - RNA, 22 nt, Homo sapiens
uuugaguuugaggugcugauga

SEQ ID NO: 63900 - RNA, 22 nt, Homo sapiens
guggaggacuggauaaagaaaa

SEQ ID NO: 63901 - RNA, 22 nt, Homo sapiens
gggaaaaugucuauugaaugaa

SEQ ID NO: 63902 - RNA, 22 nt, Homo sapiens
ucccagaaacgcauauguucau

SEQ ID NO: 63903 - RNA, 22 nt, Homo sapiens
acacugcugaguaaauaauuuu

SEQ ID NO: 63904 - RNA, 22 nt, Homo sapiens
ugcaagauaggcaguuugcacu

SEQ ID NO: 63905 - RNA, 22 nt, Homo sapiens
ugcaaaucuuguguaguuguga

SEQ ID NO: 63906 - RNA, 22 nt, Homo sapiens
cacccagucaucuuggguuuuu

SEQ ID NO: 63907 - RNA, 22 nt, Homo sapiens
uacaaagcuacucgagggcagg

SEQ ID NO: 63908 - RNA, 22 nt, Homo sapiens
gaugagaucauaaguguggagc

SEQ ID NO: 63909 - RNA, 22 nt, Homo sapiens
ucaagcaauucgccugucucag

SEQ ID NO: 63910 - RNA, 22 nt, Homo sapiens
cauugcacuccagucugggcaa

SEQ ID NO: 63911 - RNA, 22 nt, Homo sapiens
caugaugcuagguauggaugaa

SEQ ID NO: 63912 - RNA, 22 nt, Homo sapiens
auacacauuccugggccucacc

SEQ ID NO: 63913 - RNA, 22 nt, Homo sapiens
auggcagugucuagggguguuu

SEQ ID NO: 63914 - RNA, 22 nt, Homo sapiens
ugaaagguuuaauucugugaga

SEQ ID NO: 63915 - RNA, 22 nt, Homo sapiens
uauggcuucuauaaggaagcuu

SEQ ID NO: 63916 - RNA, 22 nt, Homo sapiens
agagcacuguggguccaaauau

SEQ ID NO: 63917 - RNA, 22 nt, Homo sapiens
uauagcauuuugauccuguaga

SEQ ID NO: 63918 - RNA, 22 nt, Homo sapiens
gagggcacugcuuuccuuucaa

SEQ ID NO: 63919 - RNA, 22 nt, Homo sapiens
uguacaugggacaggaggagag

SEQ ID NO: 63920 - RNA, 22 nt, Homo sapiens
aacuggucuuuggaggaggagg

SEQ ID NO: 63921 - RNA, 22 nt, Homo sapiens
auggcccccuguuugugaacau

SEQ ID NO: 63922 - RNA, 22 nt, Homo sapiens
aaaugcugucaaauuguguucu

SEQ ID NO: 63923 - RNA, 22 nt, Homo sapiens
caaagucuucucauuaugucuu

SEQ ID NO: 63924 - RNA, 23 nt, Homo sapiens
uugugucccuacccaaaucucau

SEQ ID NO: 63925 - RNA, 22 nt, Homo sapiens
uuugacuuuuagaauaugaguu

SEQ ID NO: 63926 - RNA, 20 nt, Homo sapiens
acugggcuaccgaaguaagg

SEQ ID NO: 63927 - RNA, 22 nt, Homo sapiens
ggagaucuuguuaaaguacaga

SEQ ID NO: 63928 - RNA, 22 nt, Homo sapiens
ggaugcauuuuugguugucaca

SEQ ID NO: 63929 - RNA, 17 nt, Homo sapiens
acccagucuuuuugcac

SEQ ID NO: 63930 - RNA, 22 nt, Homo sapiens
ugagaaccucugugugcccacu

SEQ ID NO: 63931 - RNA, 22 nt, Homo sapiens
uaagugaauuugacagguaaug

SEQ ID NO: 63932 - RNA, 22 nt, Homo sapiens
uuguguccccacccaaaucuca

SEQ ID NO: 63933 - RNA, 22 nt, Homo sapiens
caggcaaggugaaguguacugg

SEQ ID NO: 63934 - RNA, 22 nt, Homo sapiens
gcugguguagagugcagaaagg

SEQ ID NO: 63935 - RNA, 22 nt, Homo sapiens
uugaagacuaaguuaucaggau

SEQ ID NO: 63936 - RNA, 22 nt, Homo sapiens
aagcagauguguugaaaguacu

SEQ ID NO: 63937 - RNA, 17 nt, Homo sapiens
gacgaucaucaggaggc

SEQ ID NO: 63938 - RNA, 22 nt, Homo sapiens
caugaaagugagaaacuccugg

SEQ ID NO: 63939 - RNA, 22 nt, Homo sapiens
ugccagaugcaguguucaacaa

SEQ ID NO: 63940 - RNA, 22 nt, Homo sapiens
ucuuaggugaugauugauguga

SEQ ID NO: 63941 - RNA, 22 nt, Homo sapiens
uugggcaaguggcaugaccaug

SEQ ID NO: 63942 - RNA, 22 nt, Homo sapiens
ucacaauucucaauuugugaaa

SEQ ID NO: 63943 - RNA, 22 nt, Homo sapiens
acccuuugucaaucaguacuaa

SEQ ID NO: 63944 - RNA, 22 nt, Homo sapiens
cuaaagugcuuaaaaucucauu

SEQ ID NO: 63945 - RNA, 23 nt, Homo sapiens
aagguaagcuagaaagauguaga

SEQ ID NO: 63946 - RNA, 22 nt, Homo sapiens
uaacuacuucugcuucagagua

SEQ ID NO: 63947 - RNA, 22 nt, Homo sapiens
auugugauggucaaaggaaaua

SEQ ID NO: 63948 - RNA, 22 nt, Homo sapiens
gucccugaggaacauccagggc

SEQ ID NO: 63949 - RNA, 22 nt, Homo sapiens
cauggccuuuggaaugugucua

SEQ ID NO: 63950 - RNA, 22 nt, Homo sapiens
ugagcugguacuaauauuauca

SEQ ID NO: 63951 - RNA, 22 nt, Homo sapiens
ugucaaugggaauuuguuuuag

SEQ ID NO: 63952 - RNA, 21 nt, Homo sapiens
cuuugguuucugacuugcaua

SEQ ID NO: 63953 - RNA, 22 nt, Homo sapiens
ugagagcugcauucuugaaagc

SEQ ID NO: 63954 - RNA, 22 nt, Homo sapiens
aaaugcaguugguggggauaug

SEQ ID NO: 63955 - RNA, 22 nt, Homo sapiens
aucucaguucaggcuggccaca

SEQ ID NO: 63956 - RNA, 22 nt, Homo sapiens
uugcucaggcuggaguacaaug

SEQ ID NO: 63957 - RNA, 22 nt, Homo sapiens
cucucuguuugucuguuauugg

SEQ ID NO: 63958 - RNA, 22 nt, Homo sapiens
augugcuuuuggugagagauuu

SEQ ID NO: 63959 - RNA, 22 nt, Homo sapiens
agagugcaauggcaccaucucg

SEQ ID NO: 63960 - RNA, 22 nt, Homo sapiens
guucuggagauaaagccaaggu

SEQ ID NO: 63961 - RNA, 22 nt, Homo sapiens
ugcauggauguuugaacacacu

SEQ ID NO: 63962 - RNA, 19 nt, Homo sapiens
ucccugagucuuagcuuga

SEQ ID NO: 63963 - RNA, 22 nt, Homo sapiens
gcaguguggguagagggcaaga

SEQ ID NO: 63964 - RNA, 22 nt, Homo sapiens
auugcacaaagagggaaacuga

SEQ ID NO: 63965 - RNA, 22 nt, Homo sapiens
aaauugcaguuaggaugauggu

SEQ ID NO: 63966 - RNA, 22 nt, Homo sapiens
uaucaccauguccguuuuaaaa

SEQ ID NO: 63967 - RNA, 22 nt, Homo sapiens
uuguccuggagguucuugcaag

SEQ ID NO: 63968 - RNA, 22 nt, Homo sapiens
ucauaguacuuuguuuugaaaa

SEQ ID NO: 63969 - RNA, 22 nt, Homo sapiens
ugugccacugcacucuggccug

SEQ ID NO: 63970 - RNA, 22 nt, Homo sapiens
cccuguguuuagcugaagguuu

SEQ ID NO: 63971 - RNA, 22 nt, Homo sapiens
cucauggagaaccucugcuagg

SEQ ID NO: 63972 - RNA, 22 nt, Homo sapiens
augcauggucugaagucaaccu

SEQ ID NO: 63973 - RNA, 22 nt, Homo sapiens
caagaggcuguguauaaagcca

SEQ ID NO: 63974 - RNA, 22 nt, Homo sapiens
aagagguuuaacugacucacag

SEQ ID NO: 63975 - RNA, 22 nt, Homo sapiens
auagcauaucccacaugucaga

SEQ ID NO: 63976 - RNA, 22 nt, Homo sapiens
gggaugaagcccuaggguuggu

SEQ ID NO: 63977 - RNA, 18 nt, Homo sapiens
ucaagcaauugucaugcc

SEQ ID NO: 63978 - RNA, 22 nt, Homo sapiens
uaucauaguuuggacuuucauu

SEQ ID NO: 63979 - RNA, 19 nt, Homo sapiens
auacacguguauacauaca

SEQ ID NO: 63980 - RNA, 18 nt, Homo sapiens
acagugcuggcaugagau

SEQ ID NO: 63981 - RNA, 20 nt, Homo sapiens
uucccucagccuugagggua

SEQ ID NO: 63982 - RNA, 22 nt, Homo sapiens
gaagguaguuuauagauguggu

SEQ ID NO: 63983 - RNA, 22 nt, Homo sapiens
auggagaugugcgaacugagua

SEQ ID NO: 63984 - RNA, 22 nt, Homo sapiens
ggaggcuaguaaaaagguagaa

SEQ ID NO: 63985 - RNA, 20 nt, Homo sapiens
cucccugacaaauguggaaa

SEQ ID NO: 63986 - RNA, 20 nt, Homo sapiens
gcaugagucuuuauaguaga

SEQ ID NO: 63987 - RNA, 22 nt, Homo sapiens
uuaaaugcucacauaaagguag

SEQ ID NO: 63988 - RNA, 22 nt, Homo sapiens
uucugugguagaaaucucaaau

SEQ ID NO: 63989 - RNA, 22 nt, Homo sapiens
ugcaguacauucagcauccucu

SEQ ID NO: 63990 - RNA, 22 nt, Homo sapiens
gaaaugucugagauguggcuca

SEQ ID NO: 63991 - RNA, 22 nt, Homo sapiens
gcuggcaagaugcugaugcaac

SEQ ID NO: 63992 - RNA, 22 nt, Homo sapiens
aaagugccugacucauaguuag

SEQ ID NO: 63993 - RNA, 22 nt, Homo sapiens
ucccuugagccuggcuucucac

SEQ ID NO: 63994 - RNA, 22 nt, Homo sapiens
ggcaugguggugugugccuaua

SEQ ID NO: 63995 - RNA, 22 nt, Homo sapiens
gcugguguugugaaucaggccg

SEQ ID NO: 63996 - RNA, 22 nt, Homo sapiens
uuugguccaguguucagguccu

SEQ ID NO: 63997 - RNA, 22 nt, Homo sapiens
cccucauucauucauccuaugu

SEQ ID NO: 63998 - RNA, 22 nt, Homo sapiens
ugggaauaugauacaggucuuu

SEQ ID NO: 63999 - RNA, 22 nt, Homo sapiens
cugagacacucuuaucugcaua

SEQ ID NO: 64000 - RNA, 20 nt, Homo sapiens
ugagccccuggacucaagcg

SEQ ID NO: 64001 - RNA, 22 nt, Homo sapiens
gucaguggagaaaaggacaugu

SEQ ID NO: 64002 - RNA, 22 nt, Homo sapiens
agaaugucaguauuggcuaaaa

SEQ ID NO: 64003 - RNA, 22 nt, Homo sapiens
uuggcuucuggacuauugugca

SEQ ID NO: 64004 - RNA, 22 nt, Homo sapiens
ucuccauuuguaaggguuucuc

SEQ ID NO: 64005 - RNA, 21 nt, Homo sapiens
uguuaacaugcagauuacugg

SEQ ID NO: 64006 - RNA, 22 nt, Homo sapiens
auuccuuaggcccuuugguuag

SEQ ID NO: 64007 - RNA, 22 nt, Homo sapiens
uucaaaguaaaaauguguucac

SEQ ID NO: 64008 - RNA, 22 nt, Homo sapiens
ggugacugguuuaucuggcagu

SEQ ID NO: 64009 - RNA, 22 nt, Homo sapiens
guuugccuuuuagauaggaaug

SEQ ID NO: 64010 - RNA, 22 nt, Homo sapiens
uggcaguuuacagcuuuaggag

SEQ ID NO: 64011 - RNA, 22 nt, Homo sapiens
uaagugcaugauuacaugcaua

SEQ ID NO: 64012 - RNA, 22 nt, Homo sapiens
ggcuagagaauagugccacuaa

SEQ ID NO: 64013 - RNA, 22 nt, Homo sapiens
uaucaaggccacucauuuuaug

SEQ ID NO: 64014 - RNA, 22 nt, Homo sapiens
auccaguuuuaggagauuucua

SEQ ID NO: 64015 - RNA, 21 nt, Homo sapiens
ugcucaugaguaaugcaguga

SEQ ID NO: 64016 - RNA, 19 nt, Homo sapiens
ucugucacuggggguauuc

SEQ ID NO: 64017 - RNA, 22 nt, Homo sapiens
ugagaugaagugauguaaaaca

SEQ ID NO: 64018 - RNA, 19 nt, Homo sapiens
uagguacauucaagucucc

SEQ ID NO: 64019 - RNA, 22 nt, Homo sapiens
auccucugagaucuaggcagag

SEQ ID NO: 64020 - RNA, 22 nt, Homo sapiens
uugaagugaagaacaauaucac

SEQ ID NO: 64021 - RNA, 22 nt, Homo sapiens
guugaggcaggagaauuacuug

SEQ ID NO: 64022 - RNA, 22 nt, Homo sapiens
augauuuuuguaucgccugaug

SEQ ID NO: 64023 - RNA, 22 nt, Homo sapiens
ucccuagagaagugauuuuuga

SEQ ID NO: 64024 - RNA, 22 nt, Homo sapiens
uggauuuuaauuauucugucau

SEQ ID NO: 64025 - RNA, 22 nt, Homo sapiens
uugaggugaauuugcaggaugc

SEQ ID NO: 64026 - RNA, 22 nt, Homo sapiens
uggagcccuaaacuucuaauau

SEQ ID NO: 64027 - RNA, 22 nt, Homo sapiens
uugaaagucauggcacaggcaa

SEQ ID NO: 64028 - RNA, 22 nt, Homo sapiens
ugacaaguaaacagucagcacc

SEQ ID NO: 64029 - RNA, 22 nt, Homo sapiens
ucagaugauuccguugacgaga

SEQ ID NO: 64030 - RNA, 22 nt, Homo sapiens
agucacaugcauuuucuucaau

SEQ ID NO: 64031 - RNA, 22 nt, Homo sapiens
guuauugcucucgaagacucuc

SEQ ID NO: 64032 - RNA, 17 nt, Homo sapiens
accagugcaugugcuuu

SEQ ID NO: 64033 - RNA, 22 nt, Homo sapiens
gugguaggaaagugcaaaugua

SEQ ID NO: 64034 - RNA, 22 nt, Homo sapiens
aaucacaggucuuggcugcaug

SEQ ID NO: 64035 - RNA, 22 nt, Homo sapiens
uugaggacugcuaagcauuuga

SEQ ID NO: 64036 - RNA, 22 nt, Homo sapiens
agugcacuccagccugggcaac

SEQ ID NO: 64037 - RNA, 22 nt, Homo sapiens
ucagauguuucuuuaacgcaug

SEQ ID NO: 64038 - RNA, 22 nt, Homo sapiens
uguggcagugcuuuaugaaacc

SEQ ID NO: 64039 - RNA, 22 nt, Homo sapiens
uggaagugaacaaccaaggcag

SEQ ID NO: 64040 - RNA, 22 nt, Homo sapiens
gaaaugcucagggguuuuccag

SEQ ID NO: 64041 - RNA, 22 nt, Homo sapiens
guccaaauccaugggauguaca

SEQ ID NO: 64042 - RNA, 19 nt, Homo sapiens
gcagagaugugguagcuug

SEQ ID NO: 64043 - RNA, 22 nt, Homo sapiens
ucucccauccguacacggauug

SEQ ID NO: 64044 - RNA, 22 nt, Homo sapiens
uugauauguuguuagauucagu

SEQ ID NO: 64045 - RNA, 23 nt, Homo sapiens
uaugacagaggaagggggagcug

SEQ ID NO: 64046 - RNA, 20 nt, Homo sapiens
aacagcacugucugaagcuu

SEQ ID NO: 64047 - RNA, 22 nt, Homo sapiens
uucacacugggccuacucugug

SEQ ID NO: 64048 - RNA, 22 nt, Homo sapiens
ucauugcauuccagcccaagca

SEQ ID NO: 64049 - RNA, 22 nt, Homo sapiens
ugccaguauuuuauugagcauu

SEQ ID NO: 64050 - RNA, 22 nt, Homo sapiens
cacauagucccugcuaaucuuc

SEQ ID NO: 64051 - RNA, 22 nt, Homo sapiens
uauuagugucuuuugguuagaa

SEQ ID NO: 64052 - RNA, 22 nt, Homo sapiens
uucaucagggagaaauaauuuc

SEQ ID NO: 64053 - RNA, 22 nt, Homo sapiens
gugucaugggcauguccuuaac

SEQ ID NO: 64054 - RNA, 23 nt, Homo sapiens
uuauggcuuuuauuauguugagg

SEQ ID NO: 64055 - RNA, 22 nt, Homo sapiens
uuauucauuaauugcuaagguu

SEQ ID NO: 64056 - RNA, 22 nt, Homo sapiens
ugacaacugauuaacuccuuua

SEQ ID NO: 64057 - RNA, 22 nt, Homo sapiens
gugcacaacgugcagguuuguu

SEQ ID NO: 64058 - RNA, 20 nt, Homo sapiens
ugggaacaugugguauaugg

SEQ ID NO: 64059 - RNA, 22 nt, Homo sapiens
ucaguggauuuaaccugaauca

SEQ ID NO: 64060 - RNA, 22 nt, Homo sapiens
gucagguaccugaaagcagcca

SEQ ID NO: 64061 - RNA, 22 nt, Homo sapiens
acuacaugugaugucaguauau

SEQ ID NO: 64062 - RNA, 22 nt, Homo sapiens
ccuggcacugagcaguguucua

SEQ ID NO: 64063 - RNA, 22 nt, Homo sapiens
cagcaaaucauccuauuugagc

SEQ ID NO: 64064 - RNA, 22 nt, Homo sapiens
aagguggugucagagagcuuau

SEQ ID NO: 64065 - RNA, 22 nt, Homo sapiens
ugggaugaauacaaugggauca

SEQ ID NO: 64066 - RNA, 22 nt, Homo sapiens
cuugaauguaaauaauguacag

SEQ ID NO: 64067 - RNA, 22 nt, Homo sapiens
ugaaacacacagagaagggaga

SEQ ID NO: 64068 - RNA, 22 nt, Homo sapiens
aauaucacaguuggguguacac

SEQ ID NO: 64069 - RNA, 22 nt, Homo sapiens
uuuguacuaugguuuuucacua

SEQ ID NO: 64070 - RNA, 22 nt, Homo sapiens
ccacacugucuuggugggaaac

SEQ ID NO: 64071 - RNA, 22 nt, Homo sapiens
aauacugaaaguauuuucaaau

SEQ ID NO: 64072 - RNA, 23 nt, Homo sapiens
ucacuagaguccuggaguuugag

SEQ ID NO: 64073 - RNA, 22 nt, Homo sapiens
ugacagagcaggacuucaucuc

SEQ ID NO: 64074 - RNA, 22 nt, Homo sapiens
aaagugauguccaggcuuucag

SEQ ID NO: 64075 - RNA, 22 nt, Homo sapiens
uuugacuaccaggaauguucuu

SEQ ID NO: 64076 - RNA, 22 nt, Homo sapiens
cugagaucguggggcugcuguc

SEQ ID NO: 64077 - RNA, 22 nt, Homo sapiens
auaaucaugucugaaaccuuug

SEQ ID NO: 64078 - RNA, 22 nt, Homo sapiens
ccuucuuuuguaaggcugaaua

SEQ ID NO: 64079 - RNA, 22 nt, Homo sapiens
auuuugcauugcuguaaaggaa

SEQ ID NO: 64080 - RNA, 22 nt, Homo sapiens
cuauaugucuguuuugguacca

SEQ ID NO: 64081 - RNA, 22 nt, Homo sapiens
ugucauggggaaaauaacagac

SEQ ID NO: 64082 - RNA, 22 nt, Homo sapiens
augauggaggccgugauggacg

SEQ ID NO: 64083 - RNA, 22 nt, Homo sapiens
cauugcaugcauauggcuuggu

SEQ ID NO: 64084 - RNA, 20 nt, Homo sapiens
gugagguagaggguuaccug

SEQ ID NO: 64085 - RNA, 22 nt, Homo sapiens
aucuccaggugccagcugcgcc

SEQ ID NO: 64086 - RNA, 22 nt, Homo sapiens
ugauaacauuucuucugguaca

SEQ ID NO: 64087 - RNA, 22 nt, Homo sapiens
uugagaugauggauaugcuaau

SEQ ID NO: 64088 - RNA, 22 nt, Homo sapiens
uuugcacucaguaagugggagc

SEQ ID NO: 64089 - RNA, 22 nt, Homo sapiens
ucugucacugaaucccugucac

SEQ ID NO: 64090 - RNA, 22 nt, Homo sapiens
uuagcaauugauucucauaagc

SEQ ID NO: 64091 - RNA, 22 nt, Homo sapiens
ucugccuacugguuggaggaac

SEQ ID NO: 64092 - RNA, 22 nt, Homo sapiens
aggcaacaugguaaaacccugu

SEQ ID NO: 64093 - RNA, 22 nt, Homo sapiens
aaggugcucucuuauguagaaa

SEQ ID NO: 64094 - RNA, 22 nt, Homo sapiens
uguucuggagaguuuagucugg

SEQ ID NO: 64095 - RNA, 22 nt, Homo sapiens
agcaacauuguucauaauagcu

SEQ ID NO: 64096 - RNA, 22 nt, Homo sapiens
guggcaugaaagcaucugugau

SEQ ID NO: 64097 - RNA, 22 nt, Homo sapiens
ucuuaguuuagauuagcaauuc

SEQ ID NO: 64098 - RNA, 22 nt, Homo sapiens
agugcaguggcacaaucuuggc

SEQ ID NO: 64099 - RNA, 17 nt, Homo sapiens
ugaggcacuaguaucac

SEQ ID NO: 64100 - RNA, 22 nt, Homo sapiens
ugugcaaauguuaaacuaacuu

SEQ ID NO: 64101 - RNA, 22 nt, Homo sapiens
auggcagcccucuuuauccaug

SEQ ID NO: 64102 - RNA, 20 nt, Homo sapiens
gcaaauggaucccacaagcc

SEQ ID NO: 64103 - RNA, 22 nt, Homo sapiens
aggcaugugugcagacugucug

SEQ ID NO: 64104 - RNA, 22 nt, Homo sapiens
ugaaaugaucaguuugguuacu

SEQ ID NO: 64105 - RNA, 22 nt, Homo sapiens
gaucacauggccauuucuagcu

SEQ ID NO: 64106 - RNA, 22 nt, Homo sapiens
ugauaugaaguucaaaccaggu

SEQ ID NO: 64107 - RNA, 22 nt, Homo sapiens
uugcacaguguguacagcacca

SEQ ID NO: 64108 - RNA, 22 nt, Homo sapiens
aauaaaguaggaggugaggaaa

SEQ ID NO: 64109 - RNA, 22 nt, Homo sapiens
guuagguagaaguuuacuuuga

SEQ ID NO: 64110 - RNA, 20 nt, Homo sapiens
uguacacaguguacccacau

SEQ ID NO: 64111 - RNA, 22 nt, Homo sapiens
ucaugaaguaguuaacugguug

SEQ ID NO: 64112 - RNA, 22 nt, Homo sapiens
uaauaauguuaggcuuacucaa

SEQ ID NO: 64113 - RNA, 22 nt, Homo sapiens
ugcuaugucuucucucacagag

SEQ ID NO: 64114 - RNA, 22 nt, Homo sapiens
ugaggaguguauuucauucgcu

SEQ ID NO: 64115 - RNA, 22 nt, Homo sapiens
aaaugucauggaguguuucccc

SEQ ID NO: 64116 - RNA, 22 nt, Homo sapiens
ugagguuauuuguucaagaagu

SEQ ID NO: 64117 - RNA, 22 nt, Homo sapiens
ccagugcugugcaguguaugag

SEQ ID NO: 64118 - RNA, 22 nt, Homo sapiens
aaaugcacgcuacccagcuaga

SEQ ID NO: 64119 - RNA, 22 nt, Homo sapiens
ucacaucucagguuucuugaca

SEQ ID NO: 64120 - RNA, 22 nt, Homo sapiens
ugcauccauucuagacucaucu

SEQ ID NO: 64121 - RNA, 22 nt, Homo sapiens
uccaguacaggucucucauuuc

SEQ ID NO: 64122 - RNA, 18 nt, Homo sapiens
ucugugguguaaauacgu

SEQ ID NO: 64123 - RNA, 22 nt, Homo sapiens
auaaaugcuuagaucuguauau

SEQ ID NO: 64124 - RNA, 22 nt, Homo sapiens
uugcaaaucucuuguguuuggu

SEQ ID NO: 64125 - RNA, 23 nt, Homo sapiens
acugagcaauguuuacauacuug

SEQ ID NO: 64126 - RNA, 22 nt, Homo sapiens
uugagauggagucuugcacugu

SEQ ID NO: 64127 - RNA, 22 nt, Homo sapiens
uucacaaugccuuguugauggu

SEQ ID NO: 64128 - RNA, 21 nt, Homo sapiens
ugacuagauuccagauuggcc

SEQ ID NO: 64129 - RNA, 22 nt, Homo sapiens
ugugcaugacagcauacaaacg

SEQ ID NO: 64130 - RNA, 22 nt, Homo sapiens
augagaccagcagaaaaccugu

SEQ ID NO: 64131 - RNA, 22 nt, Homo sapiens
uuggccccucccaaauuucaug

SEQ ID NO: 64132 - RNA, 20 nt, Homo sapiens
cuuuguccuccugcugugcu

SEQ ID NO: 64133 - RNA, 22 nt, Homo sapiens
auggucuuuuuguuaugagaga

SEQ ID NO: 64134 - RNA, 22 nt, Homo sapiens
augacaagagccuucuuuccuu

SEQ ID NO: 64135 - RNA, 21 nt, Homo sapiens
uucuaaguaaauguuggacau

SEQ ID NO: 64136 - RNA, 22 nt, Homo sapiens
aaggcaagagaaaauuucgagu

SEQ ID NO: 64137 - RNA, 22 nt, Homo sapiens
uuuauccagccucuagcaaggu

SEQ ID NO: 64138 - RNA, 22 nt, Homo sapiens
guggaaaaguaguugcgguuuu

SEQ ID NO: 64139 - RNA, 22 nt, Homo sapiens
auuugucacuuaacagccauua

SEQ ID NO: 64140 - RNA, 22 nt, Homo sapiens
auggcagugagucucuaguauu

SEQ ID NO: 64141 - RNA, 22 nt, Homo sapiens
ccucauggagaacaucugcuag

SEQ ID NO: 64142 - RNA, 20 nt, Homo sapiens
uugacaguggguuguuaaag

SEQ ID NO: 64143 - RNA, 22 nt, Homo sapiens
ugugacugguugucccgcuuuc

SEQ ID NO: 64144 - RNA, 22 nt, Homo sapiens
uuggaaaaauccaccuugaucu

SEQ ID NO: 64145 - RNA, 21 nt, Homo sapiens
ugacagaaaauugaguuugcu

SEQ ID NO: 64146 - RNA, 22 nt, Homo sapiens
aauggcacuuuauaaauguuaa

SEQ ID NO: 64147 - RNA, 20 nt, Homo sapiens
augaagugaaguuagggaac

SEQ ID NO: 64148 - RNA, 22 nt, Homo sapiens
aguacugucugguuaccugaca

SEQ ID NO: 64149 - RNA, 22 nt, Homo sapiens
ugagaagugacgcagcaggguu

SEQ ID NO: 64150 - RNA, 22 nt, Homo sapiens
uccuugaaacaggaagaauuca

SEQ ID NO: 64151 - RNA, 22 nt, Homo sapiens
gucaaggaauuuauccauuucu

SEQ ID NO: 64152 - RNA, 18 nt, Homo sapiens
guuagguaguaugaugcu

SEQ ID NO: 64153 - RNA, 22 nt, Homo sapiens
uccugagacugaggagcuuugg

SEQ ID NO: 64154 - RNA, 22 nt, Homo sapiens
auacaguaucuucuggcaagca

SEQ ID NO: 64155 - RNA, 21 nt, Homo sapiens
acccucuaguuuucaacaggc

SEQ ID NO: 64156 - RNA, 22 nt, Homo sapiens
aaagugcaguauuugggcagga

SEQ ID NO: 64157 - RNA, 22 nt, Homo sapiens
acugggucaaaguagaaaacua

SEQ ID NO: 64158 - RNA, 22 nt, Homo sapiens
ugucacaguuuguacuuuauag

SEQ ID NO: 64159 - RNA, 22 nt, Homo sapiens
ucucaaguaacugggacaauaa

SEQ ID NO: 64160 - RNA, 22 nt, Homo sapiens
gggguaggcuacacugaguucc

SEQ ID NO: 64161 - RNA, 22 nt, Homo sapiens
aggcaaguugcucaaaugcaaa

SEQ ID NO: 64162 - RNA, 22 nt, Homo sapiens
auuuagcaauggagguagugua

SEQ ID NO: 64163 - RNA, 21 nt, Homo sapiens
ugagaugauccugcaugcaug

SEQ ID NO: 64164 - RNA, 20 nt, Homo sapiens
ucacugagugguccacagua

SEQ ID NO: 64165 - RNA, 22 nt, Homo sapiens
gcugaguaguauuucauuguau

SEQ ID NO: 64166 - RNA, 22 nt, Homo sapiens
ucaacauugcugucaggcaucu

SEQ ID NO: 64167 - RNA, 22 nt, Homo sapiens
cauugcacucuagucuggguga

SEQ ID NO: 64168 - RNA, 22 nt, Homo sapiens
uugaggugggaggaucacuuga

SEQ ID NO: 64169 - RNA, 22 nt, Homo sapiens
cugagaauguaaaugaagcuuu

SEQ ID NO: 64170 - RNA, 22 nt, Homo sapiens
caugaaagacugaggaauugga

SEQ ID NO: 64171 - RNA, 22 nt, Homo sapiens
uucaccuguagcaugcccuugg

SEQ ID NO: 64172 - RNA, 22 nt, Homo sapiens
uuucauagaucaugcuuuugga

SEQ ID NO: 64173 - RNA, 22 nt, Homo sapiens
aaauggauuaaguucacuugcu

SEQ ID NO: 64174 - RNA, 22 nt, Homo sapiens
ucacugaaacuguccuggguua

SEQ ID NO: 64175 - RNA, 22 nt, Homo sapiens
cugaagugugaaagucuuuuuu

SEQ ID NO: 64176 - RNA, 19 nt, Homo sapiens
ucagaucagcccaagggau

SEQ ID NO: 64177 - RNA, 22 nt, Homo sapiens
gugggcaagucacuucaguucu

SEQ ID NO: 64178 - RNA, 17 nt, Homo sapiens
ucucccaucccuuucuc

SEQ ID NO: 64179 - RNA, 22 nt, Homo sapiens
uaacccacgcagaauggacaag

SEQ ID NO: 64180 - RNA, 22 nt, Homo sapiens
uggagucuugaugauuuucaaa

SEQ ID NO: 64181 - RNA, 22 nt, Homo sapiens
uugagcccuggagguggaggcu

SEQ ID NO: 64182 - RNA, 22 nt, Homo sapiens
ggucaggagaaugguaacugag

SEQ ID NO: 64183 - RNA, 22 nt, Homo sapiens
ggcaaagaugaccauuacuuuu

SEQ ID NO: 64184 - RNA, 22 nt, Homo sapiens
aauaauggcaccaaagcacaag

SEQ ID NO: 64185 - RNA, 22 nt, Homo sapiens
aggucccauguccucccugacc

SEQ ID NO: 64186 - RNA, 22 nt, Homo sapiens
auggcaauguaagucagaaaaa

SEQ ID NO: 64187 - RNA, 19 nt, Homo sapiens
caguaucauugcacauagu

SEQ ID NO: 64188 - RNA, 22 nt, Homo sapiens
ugucauagauugcuuggaaaaa

SEQ ID NO: 64189 - RNA, 22 nt, Homo sapiens
ugugcuugaauuuaguagcuua

SEQ ID NO: 64190 - RNA, 22 nt, Homo sapiens
ggagucugaacuggacaaugac

SEQ ID NO: 64191 - RNA, 19 nt, Homo sapiens
aaagguaguaaccucugau

SEQ ID NO: 64192 - RNA, 22 nt, Homo sapiens
cucccauugcaaacaacagaag

SEQ ID NO: 64193 - RNA, 19 nt, Homo sapiens
ucucugguguuggagggga

SEQ ID NO: 64194 - RNA, 22 nt, Homo sapiens
ugcuuaguuguauguuccacau

SEQ ID NO: 64195 - RNA, 22 nt, Homo sapiens
gggaugaaguugauguagaaag

SEQ ID NO: 64196 - RNA, 22 nt, Homo sapiens
uugagauaggagcuguuguucu

SEQ ID NO: 64197 - RNA, 20 nt, Homo sapiens
acaaaugcauucugugacau

SEQ ID NO: 64198 - RNA, 22 nt, Homo sapiens
uugcuucauucaacauugaggg

SEQ ID NO: 64199 - RNA, 22 nt, Homo sapiens
auagaagcugccaacguuucag

SEQ ID NO: 64200 - RNA, 22 nt, Homo sapiens
ucacaugaagauuuuaguauac

SEQ ID NO: 64201 - RNA, 22 nt, Homo sapiens
aaguauguaucaagucauacuu

SEQ ID NO: 64202 - RNA, 22 nt, Homo sapiens
uugaaagcuaucagagauucca

SEQ ID NO: 64203 - RNA, 22 nt, Homo sapiens
ucugugaaugugaccuuauuug

SEQ ID NO: 64204 - RNA, 22 nt, Homo sapiens
uucaguggguggaugaauauga

SEQ ID NO: 64205 - RNA, 22 nt, Homo sapiens
ugugauguggagggcagaucca

SEQ ID NO: 64206 - RNA, 22 nt, Homo sapiens
uaugaauuuuauccaggauaua

SEQ ID NO: 64207 - RNA, 22 nt, Homo sapiens
cucaaaugguccagcuaguggu

SEQ ID NO: 64208 - RNA, 22 nt, Homo sapiens
ugacucaguuguuagucuucau

SEQ ID NO: 64209 - RNA, 22 nt, Homo sapiens
uggacagacaagguuauagauc

SEQ ID NO: 64210 - RNA, 22 nt, Homo sapiens
ugccaguauuuuauugaggauu

SEQ ID NO: 64211 - RNA, 22 nt, Homo sapiens
ccaaggaauacccucccuuuuu

SEQ ID NO: 64212 - RNA, 22 nt, Homo sapiens
uggaagacaggcuguauuuuaa

SEQ ID NO: 64213 - RNA, 22 nt, Homo sapiens
agaugcuguuaucaacuguagc

SEQ ID NO: 64214 - RNA, 23 nt, Homo sapiens
augaauguaaggaguguaagaaa

SEQ ID NO: 64215 - RNA, 22 nt, Homo sapiens
cacauguuuuagcauggcuguu

SEQ ID NO: 64216 - RNA, 22 nt, Homo sapiens
ucaguaaauguuaggacauuuc

SEQ ID NO: 64217 - RNA, 22 nt, Homo sapiens
cacagcuaacaacuguuucuuc

SEQ ID NO: 64218 - RNA, 22 nt, Homo sapiens
auagaagcuauguauaggggcc

SEQ ID NO: 64219 - RNA, 23 nt, Homo sapiens
ugugacacuuccgucaguucauu

SEQ ID NO: 64220 - RNA, 22 nt, Homo sapiens
ucaaggcaguggccuuccuucu

SEQ ID NO: 64221 - RNA, 22 nt, Homo sapiens
uaguugcaucuuaggucuguga

SEQ ID NO: 64222 - RNA, 22 nt, Homo sapiens
ccuugguaauguguuuuauucu

SEQ ID NO: 64223 - RNA, 22 nt, Homo sapiens
cuguugguuaaauuccaugcag

SEQ ID NO: 64224 - RNA, 22 nt, Homo sapiens
augagcacuuguuuugggcaca

SEQ ID NO: 64225 - RNA, 22 nt, Homo sapiens
agcuguaguuugguggauguaa

SEQ ID NO: 64226 - RNA, 22 nt, Homo sapiens
uuacauguuguggguuguggcc

SEQ ID NO: 64227 - RNA, 22 nt, Homo sapiens
auugcuaacugaaauaagacca

SEQ ID NO: 64228 - RNA, 22 nt, Homo sapiens
auuaacaucuagaguuuuggug

SEQ ID NO: 64229 - RNA, 22 nt, Homo sapiens
agggaagugugcuaugcauuua

SEQ ID NO: 64230 - RNA, 22 nt, Homo sapiens
cugaggacaucagggaagcauc

SEQ ID NO: 64231 - RNA, 22 nt, Homo sapiens
agagccacacucuccuaacuca

SEQ ID NO: 64232 - RNA, 22 nt, Homo sapiens
uucaucuggcaauucagagauu

SEQ ID NO: 64233 - RNA, 22 nt, Homo sapiens
cuggcacagugucagaaacaca

SEQ ID NO: 64234 - RNA, 23 nt, Homo sapiens
aagugagcuccaauugggugaga

SEQ ID NO: 64235 - RNA, 22 nt, Homo sapiens
ucucugacacugaccccaaaaa

SEQ ID NO: 64236 - RNA, 22 nt, Homo sapiens
ucaccaguaauaaagagccugc

SEQ ID NO: 64237 - RNA, 20 nt, Homo sapiens
uaucacaguucaggaacucu

SEQ ID NO: 64238 - RNA, 22 nt, Homo sapiens
guagcagucacauagcagauug

SEQ ID NO: 64239 - RNA, 22 nt, Homo sapiens
cuucaguucuguaaggacagca

SEQ ID NO: 64240 - RNA, 22 nt, Homo sapiens
guagaagcacaggugaguuggu

SEQ ID NO: 64241 - RNA, 22 nt, Homo sapiens
uggaaaguccaagccaaccggg

SEQ ID NO: 64242 - RNA, 18 nt, Homo sapiens
augaccugcggguuauau

SEQ ID NO: 64243 - RNA, 22 nt, Homo sapiens
ucccugagugauugaaaauaaa

SEQ ID NO: 64244 - RNA, 22 nt, Homo sapiens
uugcaugcuccuuaugagaauc

SEQ ID NO: 64245 - RNA, 22 nt, Homo sapiens
cugaaauggaaugugugcacag

SEQ ID NO: 64246 - RNA, 22 nt, Homo sapiens
auggaaggagaggaaugaauga

SEQ ID NO: 64247 - RNA, 22 nt, Homo sapiens
aucacauuuauaguggcacgca

SEQ ID NO: 64248 - RNA, 22 nt, Homo sapiens
ugauaacauugggggaagcuga

SEQ ID NO: 64249 - RNA, 22 nt, Homo sapiens
uuggccccuuucauccacagcu

SEQ ID NO: 64250 - RNA, 22 nt, Homo sapiens
gucagggagggauagaugauua

SEQ ID NO: 64251 - RNA, 21 nt, Homo sapiens
ugcaugguagucacaugauuc

SEQ ID NO: 64252 - RNA, 22 nt, Homo sapiens
uuucauggaauauagucauuuu

SEQ ID NO: 64253 - RNA, 22 nt, Homo sapiens
ugaggugaaguaauauucuaag

SEQ ID NO: 64254 - RNA, 22 nt, Homo sapiens
auauucacagguaucagagauu

SEQ ID NO: 64255 - RNA, 22 nt, Homo sapiens
caguacaauguggaaaaggagu

SEQ ID NO: 64256 - RNA, 22 nt, Homo sapiens
ggagugugauuguucucuguua

SEQ ID NO: 64257 - RNA, 22 nt, Homo sapiens
caugugcaugagcacauacgug

SEQ ID NO: 64258 - RNA, 22 nt, Homo sapiens
aggcaagagugacuacgugaaa

SEQ ID NO: 64259 - RNA, 22 nt, Homo sapiens
uaccaguaaugguucuagagga

SEQ ID NO: 64260 - RNA, 22 nt, Homo sapiens
acauggcacugcgggcuucuug

SEQ ID NO: 64261 - RNA, 22 nt, Homo sapiens
acccaguagucauucaggagca

SEQ ID NO: 64262 - RNA, 22 nt, Homo sapiens
uagaauguaacuuccaugucau

SEQ ID NO: 64263 - RNA, 22 nt, Homo sapiens
ccucauggagaaccucugcuag

SEQ ID NO: 64264 - RNA, 22 nt, Homo sapiens
augggcaaauguuggaaauucc

SEQ ID NO: 64265 - RNA, 22 nt, Homo sapiens
augugcacaugcuuacauguga

SEQ ID NO: 64266 - RNA, 22 nt, Homo sapiens
gucacuggcugucuuguaugau

SEQ ID NO: 64267 - RNA, 22 nt, Homo sapiens
auggaaggagaauggucuuuga

SEQ ID NO: 64268 - RNA, 22 nt, Homo sapiens
ucccuacugggguacugccuag

SEQ ID NO: 64269 - RNA, 22 nt, Homo sapiens
ugggaugaugcuugagaauauc

SEQ ID NO: 64270 - RNA, 22 nt, Homo sapiens
ccauggcuauucuguaaggguu

SEQ ID NO: 64271 - RNA, 22 nt, Homo sapiens
uaguugcauucaggauaugacg

SEQ ID NO: 64272 - RNA, 22 nt, Homo sapiens
gugcacauauggugcauaagug

SEQ ID NO: 64273 - RNA, 22 nt, Homo sapiens
gagugcaauggcaagaucuugg

SEQ ID NO: 64274 - RNA, 22 nt, Homo sapiens
aagugaccuaacaaugaaggcc

SEQ ID NO: 64275 - RNA, 22 nt, Homo sapiens
agaucauaugcaguaaugaacu

SEQ ID NO: 64276 - RNA, 22 nt, Homo sapiens
ugagugaacgcugagaccaaau

SEQ ID NO: 64277 - RNA, 22 nt, Homo sapiens
ucuguaacauccaccuucuggg

SEQ ID NO: 64278 - RNA, 22 nt, Homo sapiens
gauacuguauccuaaaagcuuu

SEQ ID NO: 64279 - RNA, 22 nt, Homo sapiens
aaagagaucuaugggcacuaug

SEQ ID NO: 64280 - RNA, 22 nt, Homo sapiens
guagaagcacagggccuguauu

SEQ ID NO: 64281 - RNA, 22 nt, Homo sapiens
uuugacuagaguguuuuacaac

SEQ ID NO: 64282 - RNA, 22 nt, Homo sapiens
uaccucaguucaauaacagaua

SEQ ID NO: 64283 - RNA, 21 nt, Homo sapiens
cugcaaaugcugcugccugau

SEQ ID NO: 64284 - RNA, 18 nt, Homo sapiens
aauggcucuggguucuaa

SEQ ID NO: 64285 - RNA, 22 nt, Homo sapiens
ugauaagaaauuguucauguag

SEQ ID NO: 64286 - RNA, 16 nt, Homo sapiens
uuauugcauucuucuc

SEQ ID NO: 64287 - RNA, 22 nt, Homo sapiens
ugagaaacuaaguaaugaguaa

SEQ ID NO: 64288 - RNA, 22 nt, Homo sapiens
uuagguagucucugucagaggg

SEQ ID NO: 64289 - RNA, 23 nt, Homo sapiens
uuguccccuccaaagcucauguu

SEQ ID NO: 64290 - RNA, 22 nt, Homo sapiens
uaugugcacaugcccuggugac

SEQ ID NO: 64291 - RNA, 22 nt, Homo sapiens
uacaguggaaguuaaccccauu

SEQ ID NO: 64292 - RNA, 22 nt, Homo sapiens
ugugcacaacaugcagguuugu

SEQ ID NO: 64293 - RNA, 22 nt, Homo sapiens
uuuguacuccuuggccagcuuc

SEQ ID NO: 64294 - RNA, 22 nt, Homo sapiens
auggccuuucuggcacauuucc

SEQ ID NO: 64295 - RNA, 22 nt, Homo sapiens
ugagaugauaucuuauuguaau

SEQ ID NO: 64296 - RNA, 22 nt, Homo sapiens
guaucauugccuaaugcucuca

SEQ ID NO: 64297 - RNA, 22 nt, Homo sapiens
uggcagauaggauacaggacua

SEQ ID NO: 64298 - RNA, 22 nt, Homo sapiens
auaaaugccuguuguuuuaagc

SEQ ID NO: 64299 - RNA, 22 nt, Homo sapiens
auuacaugucuauccaugaaca

SEQ ID NO: 64300 - RNA, 22 nt, Homo sapiens
cuuagguuaugauaaauuuagu

SEQ ID NO: 64301 - RNA, 22 nt, Homo sapiens
gccaguguuuuauugagaauuu

SEQ ID NO: 64302 - RNA, 22 nt, Homo sapiens
aggugcugagcagagaauccug

SEQ ID NO: 64303 - RNA, 22 nt, Homo sapiens
cacaguguuccagcuauuugaa

SEQ ID NO: 64304 - RNA, 22 nt, Homo sapiens
cugaggucugaauccagguauc

SEQ ID NO: 64305 - RNA, 22 nt, Homo sapiens
cuagcacauaguuauucacuca

SEQ ID NO: 64306 - RNA, 18 nt, Homo sapiens
cccagugacuuauggccu

SEQ ID NO: 64307 - RNA, 22 nt, Homo sapiens
gggagugugcacacaugguaua

SEQ ID NO: 64308 - RNA, 22 nt, Homo sapiens
acauaugaguacaugugccaug

SEQ ID NO: 64309 - RNA, 22 nt, Homo sapiens
uugauaauguuaacuuugguca

SEQ ID NO: 64310 - RNA, 23 nt, Homo sapiens
gaguggagacucauugauuuccu

SEQ ID NO: 64311 - RNA, 22 nt, Homo sapiens
auagaucauugucauuuuagau

SEQ ID NO: 64312 - RNA, 22 nt, Homo sapiens
aaggagcuuaagugacuuguac

SEQ ID NO: 64313 - RNA, 22 nt, Homo sapiens
uucaccuugggucccacuugcu

SEQ ID NO: 64314 - RNA, 22 nt, Homo sapiens
gagauggagucuuuuucuguca

SEQ ID NO: 64315 - RNA, 22 nt, Homo sapiens
auaaaugcuuccagucauuaaa

SEQ ID NO: 64316 - RNA, 22 nt, Homo sapiens
agacucauuuccauagucagcu

SEQ ID NO: 64317 - RNA, 18 nt, Homo sapiens
cugagcacugcuuuauga

SEQ ID NO: 64318 - RNA, 22 nt, Homo sapiens
aucccugagccugacucucaga

SEQ ID NO: 64319 - RNA, 22 nt, Homo sapiens
uugagggagcauuuguuuugag

SEQ ID NO: 64320 - RNA, 22 nt, Homo sapiens
gcacaguuaaagggucauguga

SEQ ID NO: 64321 - RNA, 22 nt, Homo sapiens
auggucuuuucccuggauuaua

SEQ ID NO: 64322 - RNA, 22 nt, Homo sapiens
cugauuguuugccucuaaaauc

SEQ ID NO: 64323 - RNA, 22 nt, Homo sapiens
gugcacaaugugcagguuuguu

SEQ ID NO: 64324 - RNA, 22 nt, Homo sapiens
gugcacaacgugcaggcuuguu

SEQ ID NO: 64325 - RNA, 22 nt, Homo sapiens
ugugcacauugugcagguugau

SEQ ID NO: 64326 - RNA, 21 nt, Homo sapiens
caauggcacaaucucugcuca

SEQ ID NO: 64327 - RNA, 22 nt, Homo sapiens
agugcaguggcucaaaaugccu

SEQ ID NO: 64328 - RNA, 22 nt, Homo sapiens
aaaugcacaaagauuuugcacu

SEQ ID NO: 64329 - RNA, 22 nt, Homo sapiens
ucacaagugagaggaauuagau

SEQ ID NO: 64330 - RNA, 18 nt, Homo sapiens
uuuugcuuaacugcgcca

SEQ ID NO: 64331 - RNA, 22 nt, Homo sapiens
uugcacauugcaccuuuuguau

SEQ ID NO: 64332 - RNA, 22 nt, Homo sapiens
uaucacagauauuaugggccaa

SEQ ID NO: 64333 - RNA, 22 nt, Homo sapiens
gagaugaaguuaaggaucuuua

SEQ ID NO: 64334 - RNA, 22 nt, Homo sapiens
ugucagcacaacucagguuccu

SEQ ID NO: 64335 - RNA, 22 nt, Homo sapiens
uuuguacacgugggugaauugu

SEQ ID NO: 64336 - RNA, 22 nt, Homo sapiens
aagugcuuccuuucagaggguu

SEQ ID NO: 64337 - RNA, 22 nt, Homo sapiens
aucaucaugcacuacagccugg

SEQ ID NO: 64338 - RNA, 20 nt, Homo sapiens
ugagauuggugugguauaag

SEQ ID NO: 64339 - RNA, 22 nt, Homo sapiens
uagcuccacagcuauauauaau

SEQ ID NO: 64340 - RNA, 22 nt, Homo sapiens
aggagcuuuggggaaaacagau

SEQ ID NO: 64341 - RNA, 22 nt, Homo sapiens
acccaguguucagacuaccugu

SEQ ID NO: 64342 - RNA, 22 nt, Homo sapiens
gaucacauuguuucauacauau

SEQ ID NO: 64343 - RNA, 22 nt, Homo sapiens
ugacagugaauaagucucuuaa

SEQ ID NO: 64344 - RNA, 22 nt, Homo sapiens
ggaaagacaccuuacuauguua

SEQ ID NO: 64345 - RNA, 22 nt, Homo sapiens
ucauaguagucacuuaauaaau

SEQ ID NO: 64346 - RNA, 22 nt, Homo sapiens
gggaggucauuguaaggucuua

SEQ ID NO: 64347 - RNA, 22 nt, Homo sapiens
uauagcuaugggauguauuugc

SEQ ID NO: 64348 - RNA, 22 nt, Homo sapiens
uucauggacucaauaguuucgc

SEQ ID NO: 64349 - RNA, 22 nt, Homo sapiens
cugugcacaucuggcggcccga

SEQ ID NO: 64350 - RNA, 22 nt, Homo sapiens
agaguauagcaacuuaguaaaa

SEQ ID NO: 64351 - RNA, 22 nt, Homo sapiens
ucaagcaauucuccucucagcc

SEQ ID NO: 64352 - RNA, 22 nt, Homo sapiens
uagacccauuacguaguuucca

SEQ ID NO: 64353 - RNA, 22 nt, Homo sapiens
gaaggcaugcugcauggccaga

SEQ ID NO: 64354 - RNA, 22 nt, Homo sapiens
ugagaugaucaaaguauaggcu

SEQ ID NO: 64355 - RNA, 22 nt, Homo sapiens
gugcacaaaucuuaaauguaca

SEQ ID NO: 64356 - RNA, 22 nt, Homo sapiens
agaugauguuuacugagcauca

SEQ ID NO: 64357 - RNA, 22 nt, Homo sapiens
cucaccuugugauccuccugcc

SEQ ID NO: 64358 - RNA, 22 nt, Homo sapiens
ugaguucuuccuaucucugccu

SEQ ID NO: 64359 - RNA, 22 nt, Homo sapiens
uugugaauggugccacaauaaa

SEQ ID NO: 64360 - RNA, 22 nt, Homo sapiens
aggcuguguggauaauauuggg

SEQ ID NO: 64361 - RNA, 22 nt, Homo sapiens
aagcuccauuucugccaugaga

SEQ ID NO: 64362 - RNA, 21 nt, Homo sapiens
uucuuugcucaguguuagagu

SEQ ID NO: 64363 - RNA, 22 nt, Homo sapiens
guuaugcagcaauugauaaucu

SEQ ID NO: 64364 - RNA, 22 nt, Homo sapiens
uugcaugucugcuucuccuccu

SEQ ID NO: 64365 - RNA, 22 nt, Homo sapiens
uugagaaucuuucgaauguucu

SEQ ID NO: 64366 - RNA, 22 nt, Homo sapiens
ugagagacaguuucgucggagg

SEQ ID NO: 64367 - RNA, 22 nt, Homo sapiens
aagcuguguguaagcucucaca

SEQ ID NO: 64368 - RNA, 22 nt, Homo sapiens
acccucagaccaguuucccugg

SEQ ID NO: 64369 - RNA, 22 nt, Homo sapiens
ugaugaaguauaggaagggcuu

SEQ ID NO: 64370 - RNA, 22 nt, Homo sapiens
cugucuggaggccugcaaauaa

SEQ ID NO: 64371 - RNA, 22 nt, Homo sapiens
aaggcagucacuaaauagugag

SEQ ID NO: 64372 - RNA, 22 nt, Homo sapiens
ugucauguuucuacugaccaaa

SEQ ID NO: 64373 - RNA, 19 nt, Homo sapiens
ugagauuguaugaggagau

SEQ ID NO: 64374 - RNA, 22 nt, Homo sapiens
guacaggugcaggaugggcagg

SEQ ID NO: 64375 - RNA, 22 nt, Homo sapiens
ucugugguucuagcuacuuugg

SEQ ID NO: 64376 - RNA, 22 nt, Homo sapiens
aaaugggacugggguccuuuga

SEQ ID NO: 64377 - RNA, 18 nt, Homo sapiens
ugcaauggagaugcagcc

SEQ ID NO: 64378 - RNA, 22 nt, Homo sapiens
agugcauuuguucugugucagg

SEQ ID NO: 64379 - RNA, 22 nt, Homo sapiens
ucccauguagcuaggauuacag

SEQ ID NO: 64380 - RNA, 22 nt, Homo sapiens
uugcauauguugaaccaagcgu

SEQ ID NO: 64381 - RNA, 22 nt, Homo sapiens
uuucacuagccagcccuuuauu

SEQ ID NO: 64382 - RNA, 22 nt, Homo sapiens
uugggcuugagggugcccaguc

SEQ ID NO: 64383 - RNA, 19 nt, Homo sapiens
augccuggagaugguuaua

SEQ ID NO: 64384 - RNA, 22 nt, Homo sapiens
auuguaauuuuagagaaagugg

SEQ ID NO: 64385 - RNA, 22 nt, Homo sapiens
gucugucuuuugucuuugaaau

SEQ ID NO: 64386 - RNA, 18 nt, Homo sapiens
aaguauagagagcccuua

SEQ ID NO: 64387 - RNA, 22 nt, Homo sapiens
uauuccuuuugcauuuccacau

SEQ ID NO: 64388 - RNA, 22 nt, Homo sapiens
caccaaccucaguagcaucugu

SEQ ID NO: 64389 - RNA, 22 nt, Homo sapiens
uaaguaaaugaaagguugauuu

SEQ ID NO: 64390 - RNA, 22 nt, Homo sapiens
ugagucccuaagacccucaggu

SEQ ID NO: 64391 - RNA, 23 nt, Homo sapiens
agucuguguuuacaggcucucug

SEQ ID NO: 64392 - RNA, 22 nt, Homo sapiens
accauugcacuccagcccaggc

SEQ ID NO: 64393 - RNA, 22 nt, Homo sapiens
gagaucaguuaaugaagugagc

SEQ ID NO: 64394 - RNA, 22 nt, Homo sapiens
augggguaggcuugcuguagua

SEQ ID NO: 64395 - RNA, 23 nt, Homo sapiens
uggcauuuuaguuagcuucagug

SEQ ID NO: 64396 - RNA, 22 nt, Homo sapiens
cauugcacuccagcucugggcg

SEQ ID NO: 64397 - RNA, 22 nt, Homo sapiens
auauaugcuaagugcuaauaaa

SEQ ID NO: 64398 - RNA, 22 nt, Homo sapiens
aaggcuguuguguaauaggauu

SEQ ID NO: 64399 - RNA, 22 nt, Homo sapiens
uggcaagaaggauuuauuccuu

SEQ ID NO: 64400 - RNA, 22 nt, Homo sapiens
ugugguccucugaaggcuuuuc

SEQ ID NO: 64401 - RNA, 22 nt, Homo sapiens
gugacagucaaagacaugacuu

SEQ ID NO: 64402 - RNA, 22 nt, Homo sapiens
ugcauaugcagcauuuaugauu

SEQ ID NO: 64403 - RNA, 22 nt, Homo sapiens
uucauggaugcauuugaggggu

SEQ ID NO: 64404 - RNA, 22 nt, Homo sapiens
guaugacacaggaagcuuaacc

SEQ ID NO: 64405 - RNA, 22 nt, Homo sapiens
uugccauggaguagaauugaag

SEQ ID NO: 64406 - RNA, 22 nt, Homo sapiens
cuguggauguauugcacagucu

SEQ ID NO: 64407 - RNA, 22 nt, Homo sapiens
ugaaagcuacagucuccuagga

SEQ ID NO: 64408 - RNA, 22 nt, Homo sapiens
uaaggcuagcaagaugagaaua

SEQ ID NO: 64409 - RNA, 22 nt, Homo sapiens
ccaguucaaugauauggaaacu

SEQ ID NO: 64410 - RNA, 19 nt, Homo sapiens
uuuuggaaaugugaacagc

SEQ ID NO: 64411 - RNA, 22 nt, Homo sapiens
uugaaagucauuucuucuaagu

SEQ ID NO: 64412 - RNA, 22 nt, Homo sapiens
uugaacugguaguuggaaaucu

SEQ ID NO: 64413 - RNA, 22 nt, Homo sapiens
ugagauaguuguagauguacau

SEQ ID NO: 64414 - RNA, 22 nt, Homo sapiens
auggcagcaccccacucuacug

SEQ ID NO: 64415 - RNA, 22 nt, Homo sapiens
uugaaguagcauuucaugucua

SEQ ID NO: 64416 - RNA, 22 nt, Homo sapiens
uccauggagacacauuuuauau

SEQ ID NO: 64417 - RNA, 22 nt, Homo sapiens
uggugagaaaugagaugcuuuu

SEQ ID NO: 64418 - RNA, 22 nt, Homo sapiens
acacuggguaacauaucuguua

SEQ ID NO: 64419 - RNA, 22 nt, Homo sapiens
aaaugguguuaguagaucuuua

SEQ ID NO: 64420 - RNA, 22 nt, Homo sapiens
gucagggagucucuaucagugg

SEQ ID NO: 64421 - RNA, 22 nt, Homo sapiens
auucacagggggagaaggguau

SEQ ID NO: 64422 - RNA, 22 nt, Homo sapiens
aucccaguucagccucugacac

SEQ ID NO: 64423 - RNA, 20 nt, Homo sapiens
uuuuagcacuuguuauggug

SEQ ID NO: 64424 - RNA, 22 nt, Homo sapiens
uucagugguuauuugugagauu

SEQ ID NO: 64425 - RNA, 22 nt, Homo sapiens
ucaaaugcuguauuguaguaau

SEQ ID NO: 64426 - RNA, 22 nt, Homo sapiens
gagaaugcaugaaagacuuaca

SEQ ID NO: 64427 - RNA, 22 nt, Homo sapiens
ugccaguauuuuguugaggauu

SEQ ID NO: 64428 - RNA, 22 nt, Homo sapiens
aaagucuguuuugucagagacu

SEQ ID NO: 64429 - RNA, 20 nt, Homo sapiens
aaaugcuguaauguuuggga

SEQ ID NO: 64430 - RNA, 22 nt, Homo sapiens
ugagcagaaguuuugauuggcg

SEQ ID NO: 64431 - RNA, 20 nt, Homo sapiens
ugauauuuucugagcaggaa

SEQ ID NO: 64432 - RNA, 22 nt, Homo sapiens
uugugcaaaaguaauugcgguu

SEQ ID NO: 64433 - RNA, 22 nt, Homo sapiens
augaaauugcuaucgcaguacu

SEQ ID NO: 64434 - RNA, 22 nt, Homo sapiens
ucacagaggagaagaccuuuaa

SEQ ID NO: 64435 - RNA, 22 nt, Homo sapiens
auggcaaaauguuccuaguggu

SEQ ID NO: 64436 - RNA, 22 nt, Homo sapiens
aaucacacuugauguugagcaa

SEQ ID NO: 64437 - RNA, 22 nt, Homo sapiens
uugaggaggcagucuucccauu

SEQ ID NO: 64438 - RNA, 22 nt, Homo sapiens
cuagaagcauauucagaacaga

SEQ ID NO: 64439 - RNA, 22 nt, Homo sapiens
augauuguucucacucaagaga

SEQ ID NO: 64440 - RNA, 22 nt, Homo sapiens
ggcaagugucagcagcaacacc

SEQ ID NO: 64441 - RNA, 22 nt, Homo sapiens
uaacccagugucugugaugggu

SEQ ID NO: 64442 - RNA, 20 nt, Homo sapiens
uuaguucauuuagaagguuu

SEQ ID NO: 64443 - RNA, 22 nt, Homo sapiens
uugaaaguaaacaucacaaaga

SEQ ID NO: 64444 - RNA, 22 nt, Homo sapiens
auagcaucauuucuugaaaaga

SEQ ID NO: 64445 - RNA, 22 nt, Homo sapiens
ucugacucuggagucucagguu

SEQ ID NO: 64446 - RNA, 22 nt, Homo sapiens
aaaugcccuaaaauggagcauc

SEQ ID NO: 64447 - RNA, 22 nt, Homo sapiens
uggcaaguuacuggcaaaaucu

SEQ ID NO: 64448 - RNA, 22 nt, Homo sapiens
guagagugcugggcacuggcuc

SEQ ID NO: 64449 - RNA, 22 nt, Homo sapiens
ugaaagguauagguucuggagg

SEQ ID NO: 64450 - RNA, 22 nt, Homo sapiens
agcugcaauguuuaguauaaua

SEQ ID NO: 64451 - RNA, 22 nt, Homo sapiens
ucuugcuuuugcagagcuucuc

SEQ ID NO: 64452 - RNA, 22 nt, Homo sapiens
uugcacagugcuuucuuugccc

SEQ ID NO: 64453 - RNA, 22 nt, Homo sapiens
uuugauugguguaccugaaagu

SEQ ID NO: 64454 - RNA, 22 nt, Homo sapiens
ugagaugaguugcuggcucuga

SEQ ID NO: 64455 - RNA, 22 nt, Homo sapiens
ugagucagucucacucugcugc

SEQ ID NO: 64456 - RNA, 22 nt, Homo sapiens
caaaggugcuuuccagguccaa

SEQ ID NO: 64457 - RNA, 22 nt, Homo sapiens
gaggcaagaguaguuaaguuag

SEQ ID NO: 64458 - RNA, 22 nt, Homo sapiens
ugcagcauugcacuccagccug

SEQ ID NO: 64459 - RNA, 22 nt, Homo sapiens
cagcgaggucugcgucacauug

SEQ ID NO: 64460 - RNA, 21 nt, Homo sapiens
uucaucagccagaaaucaagc

SEQ ID NO: 64461 - RNA, 22 nt, Homo sapiens
ugagaugaaagcagaaagacuu

SEQ ID NO: 64462 - RNA, 22 nt, Homo sapiens
aaggcauucucaaacuaguucu

SEQ ID NO: 64463 - RNA, 19 nt, Homo sapiens
agacuggcccaggcgggug

SEQ ID NO: 64464 - RNA, 18 nt, Homo sapiens
ugauaucaucacaauuga

SEQ ID NO: 64465 - RNA, 22 nt, Homo sapiens
ugucaguggucuggaugcagcc

SEQ ID NO: 64466 - RNA, 22 nt, Homo sapiens
ucuccggguggcggcgaaggga

SEQ ID NO: 64467 - RNA, 22 nt, Homo sapiens
auguaaacuacagauuuugggu

SEQ ID NO: 64468 - RNA, 22 nt, Homo sapiens
augcagaucacauuuuucuguc

SEQ ID NO: 64469 - RNA, 22 nt, Homo sapiens
aaucacaguguucuugugaggg

SEQ ID NO: 64470 - RNA, 22 nt, Homo sapiens
gugugauuguuaauuuuaggug

SEQ ID NO: 64471 - RNA, 22 nt, Homo sapiens
gcugcuuuugaugacaaaaaca

SEQ ID NO: 64472 - RNA, 22 nt, Homo sapiens
ucucaguguuaucuaucugccu

SEQ ID NO: 64473 - RNA, 22 nt, Homo sapiens
uucuacagugacugcagccaua

SEQ ID NO: 64474 - RNA, 22 nt, Homo sapiens
ugaagacucaauuauuaugaac

SEQ ID NO: 64475 - RNA, 22 nt, Homo sapiens
ggguucccuucuggcucagggu

SEQ ID NO: 64476 - RNA, 22 nt, Homo sapiens
gugcacaacaugcagguuuguu

SEQ ID NO: 64477 - RNA, 22 nt, Homo sapiens
uggcaaagugugacgugggggu

SEQ ID NO: 64478 - RNA, 22 nt, Homo sapiens
aggaagguaaacuaacuugccu

SEQ ID NO: 64479 - RNA, 22 nt, Homo sapiens
cucugguucugcagugcacccu

SEQ ID NO: 64480 - RNA, 21 nt, Homo sapiens
augugcacuaugucauuuaau

SEQ ID NO: 64481 - RNA, 20 nt, Homo sapiens
ugaguuccuuguucagaagc

SEQ ID NO: 64482 - RNA, 20 nt, Homo sapiens
uuggcauuuagacaagaguu

SEQ ID NO: 64483 - RNA, 22 nt, Homo sapiens
aaugcuguguuauuucaugacc

SEQ ID NO: 64484 - RNA, 22 nt, Homo sapiens
gagacugagucucgcucugccg

SEQ ID NO: 64485 - RNA, 22 nt, Homo sapiens
augcauauuccugggccucacu

SEQ ID NO: 64486 - RNA, 21 nt, Homo sapiens
cuuuugcacuccagccugggu

SEQ ID NO: 64487 - RNA, 22 nt, Homo sapiens
augcauaugucuuuauaguggc

SEQ ID NO: 64488 - RNA, 22 nt, Homo sapiens
aaagugcugggauuuuaggcau

SEQ ID NO: 64489 - RNA, 22 nt, Homo sapiens
uuugucccuuugcaguggcaca

SEQ ID NO: 64490 - RNA, 17 nt, Homo sapiens
ggcaggauccaggaucc

SEQ ID NO: 64491 - RNA, 22 nt, Homo sapiens
caccaguuuuucagugauucaa

SEQ ID NO: 64492 - RNA, 22 nt, Homo sapiens
uaaagaugcugggaaggcuagg

SEQ ID NO: 64493 - RNA, 22 nt, Homo sapiens
auggcuuuguguucagagcuga

SEQ ID NO: 64494 - RNA, 22 nt, Homo sapiens
uaggcagccagcuguggauuga

SEQ ID NO: 64495 - RNA, 22 nt, Homo sapiens
uuuggucuuuuauuuaaagcag

SEQ ID NO: 64496 - RNA, 22 nt, Homo sapiens
uaaaugcuugagaugauggaua

SEQ ID NO: 64497 - RNA, 22 nt, Homo sapiens
uuacuauguuucaaagugucuc

SEQ ID NO: 64498 - RNA, 22 nt, Homo sapiens
ugugaagauggacuaauauagu

SEQ ID NO: 64499 - RNA, 22 nt, Homo sapiens
ccaaguguuuucauuguuccau

SEQ ID NO: 64500 - RNA, 22 nt, Homo sapiens
uucuugcugaauugugcccuuc

SEQ ID NO: 64501 - RNA, 22 nt, Homo sapiens
aaagugauugcgguuuuugcca

SEQ ID NO: 64502 - RNA, 22 nt, Homo sapiens
gauggaauuaaaaucagaauca

SEQ ID NO: 64503 - RNA, 22 nt, Homo sapiens
gugagacugguccugaacccag

SEQ ID NO: 64504 - RNA, 19 nt, Homo sapiens
ucccuuuguauggacauac

SEQ ID NO: 64505 - RNA, 22 nt, Homo sapiens
ucugugguucaaaccagcaacu

SEQ ID NO: 64506 - RNA, 22 nt, Homo sapiens
auggcuuuggucucccagugau

SEQ ID NO: 64507 - RNA, 22 nt, Homo sapiens
cugacugugcaugcccagcccc

SEQ ID NO: 64508 - RNA, 22 nt, Homo sapiens
uacuuagagacaugcagcacug

SEQ ID NO: 64509 - RNA, 22 nt, Homo sapiens
gucugugcauuaauacgugcug

SEQ ID NO: 64510 - RNA, 22 nt, Homo sapiens
uaacaguauaugugguaucuau

SEQ ID NO: 64511 - RNA, 23 nt, Homo sapiens
uugacuguggguacaaugugaua

SEQ ID NO: 64512 - RNA, 22 nt, Homo sapiens
agagacauugcuccaacucacc

SEQ ID NO: 64513 - RNA, 22 nt, Homo sapiens
ugagaucaaggugggcccuggg

SEQ ID NO: 64514 - RNA, 22 nt, Homo sapiens
ucugugguuguugcauggaaug

SEQ ID NO: 64515 - RNA, 22 nt, Homo sapiens
aucacaauuguacguaggagcc

SEQ ID NO: 64516 - RNA, 20 nt, Homo sapiens
ugcauguccucacuuacuug

SEQ ID NO: 64517 - RNA, 22 nt, Homo sapiens
acugugcuguuuuaauuauuga

SEQ ID NO: 64518 - RNA, 22 nt, Homo sapiens
uggcaugcauuguggguaauua

SEQ ID NO: 64519 - RNA, 17 nt, Homo sapiens
ucaaaugcucccaguga

SEQ ID NO: 64520 - RNA, 22 nt, Homo sapiens
ugugcacaaugugcagguuugu

SEQ ID NO: 64521 - RNA, 22 nt, Homo sapiens
gugagucagucuguguagggcu

SEQ ID NO: 64522 - RNA, 22 nt, Homo sapiens
auggaagaaaguuggguucuug

SEQ ID NO: 64523 - RNA, 22 nt, Homo sapiens
ugugccacugcacuccugccug

SEQ ID NO: 64524 - RNA, 22 nt, Homo sapiens
uuacagguggagaaguaaggcu

SEQ ID NO: 64525 - RNA, 22 nt, Homo sapiens
uuuaguacugcuuuaugugugu

SEQ ID NO: 64526 - RNA, 22 nt, Homo sapiens
caaaggcuucugaaacugcaga

SEQ ID NO: 64527 - RNA, 22 nt, Homo sapiens
augaaagguugucuuaagccau

SEQ ID NO: 64528 - RNA, 22 nt, Homo sapiens
uucaggcaccauugucauugau

SEQ ID NO: 64529 - RNA, 22 nt, Homo sapiens
ugucuagaucugaauguaauug

SEQ ID NO: 64530 - RNA, 22 nt, Homo sapiens
acagugcuucugauaugaugcc

SEQ ID NO: 64531 - RNA, 19 nt, Homo sapiens
gugugcauaucacagagca

SEQ ID NO: 64532 - RNA, 17 nt, Homo sapiens
acaaauugccagcuagg

SEQ ID NO: 64533 - RNA, 22 nt, Homo sapiens
cagcaucauucaucugggguaa

SEQ ID NO: 64534 - RNA, 22 nt, Homo sapiens
augagauuguuugugugaaaua

SEQ ID NO: 64535 - RNA, 22 nt, Homo sapiens
aucuugcauuugcuaaaaugca

SEQ ID NO: 64536 - RNA, 22 nt, Homo sapiens
agauacaucuaugugucugugu

SEQ ID NO: 64537 - RNA, 23 nt, Homo sapiens
gcuaggagagaugaaacacaggu

SEQ ID NO: 64538 - RNA, 22 nt, Homo sapiens
aagaugauguucuuuuucuuag

SEQ ID NO: 64539 - RNA, 22 nt, Homo sapiens
uccacaauggagaagaguauga

SEQ ID NO: 64540 - RNA, 22 nt, Homo sapiens
auugcacaucugcacuacagcc

SEQ ID NO: 64541 - RNA, 22 nt, Homo sapiens
uagcaugacacuuguugaaugc

SEQ ID NO: 64542 - RNA, 22 nt, Homo sapiens
uagaaugucagcuucuugaggg

SEQ ID NO: 64543 - RNA, 22 nt, Homo sapiens
augacugucagggcagucauug

SEQ ID NO: 64544 - RNA, 22 nt, Homo sapiens
gugaaagacagcauuaauggcu

SEQ ID NO: 64545 - RNA, 22 nt, Homo sapiens
augaggaaggagccuuugucug

SEQ ID NO: 64546 - RNA, 19 nt, Homo sapiens
aaaugugcacuguuuucca

SEQ ID NO: 64547 - RNA, 22 nt, Homo sapiens
ugagcagaaagcugcaaggucg

SEQ ID NO: 64548 - RNA, 22 nt, Homo sapiens
uuucauagccuuugucgucuga

SEQ ID NO: 64549 - RNA, 22 nt, Homo sapiens
gguggugguauuucagaaaaug

SEQ ID NO: 64550 - RNA, 22 nt, Homo sapiens
ugccaguguuuuguugaagauu

SEQ ID NO: 64551 - RNA, 22 nt, Homo sapiens
uggacauguacauauguguaug

SEQ ID NO: 64552 - RNA, 22 nt, Homo sapiens
uugagggaagccagaggucugc

SEQ ID NO: 64553 - RNA, 22 nt, Homo sapiens
uggcaugauccuagauucaaca

SEQ ID NO: 64554 - RNA, 22 nt, Homo sapiens
guuauguuaguuacaaggcuag

SEQ ID NO: 64555 - RNA, 22 nt, Homo sapiens
acagugcuuggcacacaguaau

SEQ ID NO: 64556 - RNA, 22 nt, Homo sapiens
ugacuagagggcuuuuguguag

SEQ ID NO: 64557 - RNA, 22 nt, Homo sapiens
ucucacagaguugaauguuucu

SEQ ID NO: 64558 - RNA, 22 nt, Homo sapiens
gaaucacugugguaucccaugc

SEQ ID NO: 64559 - RNA, 22 nt, Homo sapiens
uggcagcgugaauguggcugaa

SEQ ID NO: 64560 - RNA, 21 nt, Homo sapiens
auccuucuuuuucaaccugug

SEQ ID NO: 64561 - RNA, 22 nt, Homo sapiens
gcaaaguguuuuuaggaagucu

SEQ ID NO: 64562 - RNA, 22 nt, Homo sapiens
augcauauuuuaccuagaagag

SEQ ID NO: 64563 - RNA, 22 nt, Homo sapiens
uaaaugacugucaguagaugaa

SEQ ID NO: 64564 - RNA, 22 nt, Homo sapiens
aggugcugacaggauagguuuc

SEQ ID NO: 64565 - RNA, 22 nt, Homo sapiens
cucuuuuguuuagcugagaggg

SEQ ID NO: 64566 - RNA, 22 nt, Homo sapiens
cuacagcagcccaguccccgaa

SEQ ID NO: 64567 - RNA, 18 nt, Homo sapiens
uugcaaauucuucccugu

SEQ ID NO: 64568 - RNA, 22 nt, Homo sapiens
aucaaguaaucugaguaagagu

SEQ ID NO: 64569 - RNA, 22 nt, Homo sapiens
ugggaugauguuaaacguacuc

SEQ ID NO: 64570 - RNA, 22 nt, Homo sapiens
aagaugcagucauacuggagua

SEQ ID NO: 64571 - RNA, 22 nt, Homo sapiens
uaaguucauucaugaaacuuag

SEQ ID NO: 64572 - RNA, 23 nt, Homo sapiens
ugugcacauuuacauauauacac

SEQ ID NO: 64573 - RNA, 22 nt, Homo sapiens
uucccagagagggacuucuaau

SEQ ID NO: 64574 - RNA, 22 nt, Homo sapiens
auaaaugcaaugguauuuuuga

SEQ ID NO: 64575 - RNA, 22 nt, Homo sapiens
caccagguuggagugcaguggu

SEQ ID NO: 64576 - RNA, 22 nt, Homo sapiens
ugagggaugccugguuuguuuu

SEQ ID NO: 64577 - RNA, 22 nt, Homo sapiens
uagcaguagacagacuuuggcu

SEQ ID NO: 64578 - RNA, 22 nt, Homo sapiens
uaaguauuaugugcugcauuuu

SEQ ID NO: 64579 - RNA, 22 nt, Homo sapiens
uucagggagaaggcaaacguug

SEQ ID NO: 64580 - RNA, 22 nt, Homo sapiens
uuugcagugucagcuucugugu

SEQ ID NO: 64581 - RNA, 22 nt, Homo sapiens
auacaguguauguauaguacau

SEQ ID NO: 64582 - RNA, 22 nt, Homo sapiens
ucuaaaguacuacuacuguugg

SEQ ID NO: 64583 - RNA, 22 nt, Homo sapiens
uccuuggugacauuucuugucu

SEQ ID NO: 64584 - RNA, 22 nt, Homo sapiens
gagaaugaacagacugccucuu

SEQ ID NO: 64585 - RNA, 22 nt, Homo sapiens
ugacuugauccauggggcucca

SEQ ID NO: 64586 - RNA, 22 nt, Homo sapiens
cuguuagguuaaggaauggcaa

SEQ ID NO: 64587 - RNA, 22 nt, Homo sapiens
ugaaaugcugucuaggggaaau

SEQ ID NO: 64588 - RNA, 22 nt, Homo sapiens
ucaaguaagaagugggcauaaa

SEQ ID NO: 64589 - RNA, 23 nt, Homo sapiens
cuugagacaaaugcgugugugca

SEQ ID NO: 64590 - RNA, 22 nt, Homo sapiens
uuucaucagccagggucagucu

SEQ ID NO: 64591 - RNA, 22 nt, Homo sapiens
ucuuucacuuagcaugauguuu

SEQ ID NO: 64592 - RNA, 22 nt, Homo sapiens
ugaggagugagaaauugguuuc

SEQ ID NO: 64593 - RNA, 22 nt, Homo sapiens
agcugguaugaaaaucucccca

SEQ ID NO: 64594 - RNA, 22 nt, Homo sapiens
ugacagcaucaggauuggagag

SEQ ID NO: 64595 - RNA, 22 nt, Homo sapiens
uacucacauucuguuucuugcu

SEQ ID NO: 64596 - RNA, 22 nt, Homo sapiens
uccugcauucugacuugcuuuc

SEQ ID NO: 64597 - RNA, 22 nt, Homo sapiens
uguuaacauggucucagucugu

SEQ ID NO: 64598 - RNA, 22 nt, Homo sapiens
ugaauacuucaaaaaaauagcu

SEQ ID NO: 64599 - RNA, 22 nt, Homo sapiens
uuccuacugcccauuaaaaugg

SEQ ID NO: 64600 - RNA, 22 nt, Homo sapiens
gagacugagucuugcucuguca

SEQ ID NO: 64601 - RNA, 22 nt, Homo sapiens
gugcaaguguaauacagcuagg

SEQ ID NO: 64602 - RNA, 22 nt, Homo sapiens
uucauguaauuccauaagguaa

SEQ ID NO: 64603 - RNA, 22 nt, Homo sapiens
gcccaguagcaguacaucccuu

SEQ ID NO: 64604 - RNA, 22 nt, Homo sapiens
uuccaguuuuauggguauagag

SEQ ID NO: 64605 - RNA, 22 nt, Homo sapiens
acaguggugcgaucucggcuca

SEQ ID NO: 64606 - RNA, 19 nt, Homo sapiens
uggcaugaaugugaacuaa

SEQ ID NO: 64607 - RNA, 22 nt, Homo sapiens
acugggauauuauugguaauau

SEQ ID NO: 64608 - RNA, 22 nt, Homo sapiens
ucacagaugaggcgagaggcag

SEQ ID NO: 64609 - RNA, 22 nt, Homo sapiens
ccaguuuucucacuguugcagu

SEQ ID NO: 64610 - RNA, 22 nt, Homo sapiens
ugcaaaguccucauucuuaccc

SEQ ID NO: 64611 - RNA, 22 nt, Homo sapiens
ucuguggucagcauccgccacu

SEQ ID NO: 64612 - RNA, 22 nt, Homo sapiens
uuagguaauauauugcugcuuu

SEQ ID NO: 64613 - RNA, 22 nt, Homo sapiens
uugacuguaagauggcuauuac

SEQ ID NO: 64614 - RNA, 22 nt, Homo sapiens
ugaaacacaccuccucuccauc

SEQ ID NO: 64615 - RNA, 22 nt, Homo sapiens
ugucuuggagaauccuggguuu

SEQ ID NO: 64616 - RNA, 21 nt, Homo sapiens
aggcaagauuacuuacgagca

SEQ ID NO: 64617 - RNA, 22 nt, Homo sapiens
guaacagucucaacaguggucu

SEQ ID NO: 64618 - RNA, 21 nt, Homo sapiens
uaaaacuguaacuuuguccug

SEQ ID NO: 64619 - RNA, 22 nt, Homo sapiens
gaggcaaguggccaccgagucu

SEQ ID NO: 64620 - RNA, 22 nt, Homo sapiens
uugacugggccagacagagauc

SEQ ID NO: 64621 - RNA, 22 nt, Homo sapiens
augaucacuguggaaauucagc

SEQ ID NO: 64622 - RNA, 22 nt, Homo sapiens
caugugcaugcuuucuuaugug

SEQ ID NO: 64623 - RNA, 22 nt, Homo sapiens
uugugcaugaugcauacauggu

SEQ ID NO: 64624 - RNA, 22 nt, Homo sapiens
agcuaaaucucauguugaauug

SEQ ID NO: 64625 - RNA, 22 nt, Homo sapiens
ugcaauauccucuacuauaggu

SEQ ID NO: 64626 - RNA, 22 nt, Homo sapiens
cuggagcaaaggugacucuugu

SEQ ID NO: 64627 - RNA, 22 nt, Homo sapiens
aauggcagaugaaauugucauu

SEQ ID NO: 64628 - RNA, 22 nt, Homo sapiens
cuauuagguuggggcgaaagua

SEQ ID NO: 64629 - RNA, 22 nt, Homo sapiens
ugugagaucucagaauugaacu

SEQ ID NO: 64630 - RNA, 22 nt, Homo sapiens
agugcaguggugccaucauaac

SEQ ID NO: 64631 - RNA, 22 nt, Homo sapiens
gagaugaaaucuugcucuguca

SEQ ID NO: 64632 - RNA, 22 nt, Homo sapiens
aagugguuuuuacaaagacaga

SEQ ID NO: 64633 - RNA, 19 nt, Homo sapiens
cugugcauuucuguggaag

SEQ ID NO: 64634 - RNA, 22 nt, Homo sapiens
uuaucauagugcaguuuucuga

SEQ ID NO: 64635 - RNA, 22 nt, Homo sapiens
uaggcaguggagaaauaaacag

SEQ ID NO: 64636 - RNA, 17 nt, Homo sapiens
auaugaauuuuggagau

SEQ ID NO: 64637 - RNA, 22 nt, Homo sapiens
caacaguaaagcauuuuuaagu

SEQ ID NO: 64638 - RNA, 22 nt, Homo sapiens
uugugcacauguacccuagaac

SEQ ID NO: 64639 - RNA, 22 nt, Homo sapiens
ugcaaagucgaaacugcaguuu

SEQ ID NO: 64640 - RNA, 22 nt, Homo sapiens
auauagcaaugaaagagaugaa

SEQ ID NO: 64641 - RNA, 22 nt, Homo sapiens
uugaauggaauguuggaacuau

SEQ ID NO: 64642 - RNA, 22 nt, Homo sapiens
ggcaguuuguucuugcuccuuu

SEQ ID NO: 64643 - RNA, 22 nt, Homo sapiens
ucuaauguaaccugcaaauauu

SEQ ID NO: 64644 - RNA, 22 nt, Homo sapiens
gcugguauuacaggcaugagcc

SEQ ID NO: 64645 - RNA, 22 nt, Homo sapiens
cuccaguuucagaaucccaugu

SEQ ID NO: 64646 - RNA, 22 nt, Homo sapiens
ugacuauaggauaacaugcauu

SEQ ID NO: 64647 - RNA, 22 nt, Homo sapiens
uauuccacaauaugauuuuuaa

SEQ ID NO: 64648 - RNA, 22 nt, Homo sapiens
uugagauacauaauuaugaaug

SEQ ID NO: 64649 - RNA, 22 nt, Homo sapiens
agcaauaugacauugcuacauc

SEQ ID NO: 64650 - RNA, 22 nt, Homo sapiens
gaggcagucuguccauucucag

SEQ ID NO: 64651 - RNA, 22 nt, Homo sapiens
uucacugcacuccagccugagc

SEQ ID NO: 64652 - RNA, 22 nt, Homo sapiens
gucuagaacuucugaccuuagg

SEQ ID NO: 64653 - RNA, 22 nt, Homo sapiens
gagaaguaaauuuauuugcaaa

SEQ ID NO: 64654 - RNA, 22 nt, Homo sapiens
uggcaauguggaaugguccagg

SEQ ID NO: 64655 - RNA, 22 nt, Homo sapiens
uugagcucaucaagauagagaa

SEQ ID NO: 64656 - RNA, 22 nt, Homo sapiens
caaggaauucucaauagaguua

SEQ ID NO: 64657 - RNA, 22 nt, Homo sapiens
cuggaaaguagacaaucuaaaa

SEQ ID NO: 64658 - RNA, 22 nt, Homo sapiens
ugaaggcaggagggagaaaagu

SEQ ID NO: 64659 - RNA, 22 nt, Homo sapiens
aacccugagucaugagucuaga

SEQ ID NO: 64660 - RNA, 22 nt, Homo sapiens
ugucaguguaugagccccggau

SEQ ID NO: 64661 - RNA, 22 nt, Homo sapiens
uaaaugcucuuuaaaagugcuu

SEQ ID NO: 64662 - RNA, 22 nt, Homo sapiens
cuggaguuugaggcugcaguga

SEQ ID NO: 64663 - RNA, 22 nt, Homo sapiens
auuguacucuagccucugggca

SEQ ID NO: 64664 - RNA, 17 nt, Homo sapiens
uugggcaagguagguga

SEQ ID NO: 64665 - RNA, 22 nt, Homo sapiens
cacugaaugugagguuggggag

SEQ ID NO: 64666 - RNA, 22 nt, Homo sapiens
gcaaaugcuaugccauuuuaua

SEQ ID NO: 64667 - RNA, 22 nt, Homo sapiens
uuaauagugacucauuuuccac

SEQ ID NO: 64668 - RNA, 22 nt, Homo sapiens
gacuuagagauguuguauuugg

SEQ ID NO: 64669 - RNA, 22 nt, Homo sapiens
uucugugguugaaaggagagau

SEQ ID NO: 64670 - RNA, 22 nt, Homo sapiens
auggacagaaaaaaauagaugu

SEQ ID NO: 64671 - RNA, 22 nt, Homo sapiens
augagauucuuagagaagucug

SEQ ID NO: 64672 - RNA, 22 nt, Homo sapiens
uuggaccacuugauuucugguc

SEQ ID NO: 64673 - RNA, 20 nt, Homo sapiens
uucacaggcagcuucuuucu

SEQ ID NO: 64674 - RNA, 20 nt, Homo sapiens
cagugcacuuucccacuggu

SEQ ID NO: 64675 - RNA, 22 nt, Homo sapiens
guuugugcuccuaugagaaucu

SEQ ID NO: 64676 - RNA, 22 nt, Homo sapiens
aaagcuagagaagcugcuguca

SEQ ID NO: 64677 - RNA, 22 nt, Homo sapiens
cauuugguggcuacagaguaac

SEQ ID NO: 64678 - RNA, 22 nt, Homo sapiens
gugcacaacgugcagguuaguu

SEQ ID NO: 64679 - RNA, 20 nt, Homo sapiens
auaugcauguguuuucacuu

SEQ ID NO: 64680 - RNA, 22 nt, Homo sapiens
uuugguuauuugaaacuagcau

SEQ ID NO: 64681 - RNA, 19 nt, Homo sapiens
ucacgugcagcagccacac

SEQ ID NO: 64682 - RNA, 22 nt, Homo sapiens
uauuacugucaauaucacagaa

SEQ ID NO: 64683 - RNA, 23 nt, Homo sapiens
cuuuugcaaugugaucuugccac

SEQ ID NO: 64684 - RNA, 22 nt, Homo sapiens
cagugcuuuaucaaguccucca

SEQ ID NO: 64685 - RNA, 22 nt, Homo sapiens
ucccugacagucacagagcuac

SEQ ID NO: 64686 - RNA, 22 nt, Homo sapiens
agaguacugacguuugcaaauu

SEQ ID NO: 64687 - RNA, 19 nt, Homo sapiens
caucccugagcugaagugg

SEQ ID NO: 64688 - RNA, 22 nt, Homo sapiens
uuguacuauuuuuaucagugau

SEQ ID NO: 64689 - RNA, 22 nt, Homo sapiens
ugggaucagcugggcucucugu

SEQ ID NO: 64690 - RNA, 22 nt, Homo sapiens
uaaagcacaaguaaagaauacu

SEQ ID NO: 64691 - RNA, 22 nt, Homo sapiens
gcaugugaauguguaagaaaau

SEQ ID NO: 64692 - RNA, 22 nt, Homo sapiens
aagcugccuugugaaggcauuc

SEQ ID NO: 64693 - RNA, 22 nt, Homo sapiens
auugcacaccagucugggcaaa

SEQ ID NO: 64694 - RNA, 22 nt, Homo sapiens
accccugagaucgaaucaugcu

SEQ ID NO: 64695 - RNA, 22 nt, Homo sapiens
uucaaggacuaaggauuuuugg

SEQ ID NO: 64696 - RNA, 22 nt, Homo sapiens
uucccucagaaacacacagccc

SEQ ID NO: 64697 - RNA, 22 nt, Homo sapiens
aagggaaugugguagcugguuu

SEQ ID NO: 64698 - RNA, 22 nt, Homo sapiens
auacagguauacaaugcauaau

SEQ ID NO: 64699 - RNA, 21 nt, Homo sapiens
cucauauugcuuuuccauggu

SEQ ID NO: 64700 - RNA, 22 nt, Homo sapiens
ugcauggucauacauggcaccc

SEQ ID NO: 64701 - RNA, 22 nt, Homo sapiens
cagcugcuuuggaaaauauuuu

SEQ ID NO: 64702 - RNA, 22 nt, Homo sapiens
ucaccuggagacaugaagacug

SEQ ID NO: 64703 - RNA, 22 nt, Homo sapiens
gagaaccauuuggagaaaaagu

SEQ ID NO: 64704 - RNA, 22 nt, Homo sapiens
gugaucuuucaggcuugaccau

SEQ ID NO: 64705 - RNA, 22 nt, Homo sapiens
cugagcacugagauccucuagc

SEQ ID NO: 64706 - RNA, 22 nt, Homo sapiens
cugagagaggagcuaaaacugc

SEQ ID NO: 64707 - RNA, 22 nt, Homo sapiens
cauauucacuuuacagagcugu

SEQ ID NO: 64708 - RNA, 22 nt, Homo sapiens
acauaguagacacugaaaauau

SEQ ID NO: 64709 - RNA, 22 nt, Homo sapiens
gauuagcacuucaguuacagua

SEQ ID NO: 64710 - RNA, 22 nt, Homo sapiens
ucagugaauacauguacucaug

SEQ ID NO: 64711 - RNA, 22 nt, Homo sapiens
uaaugguuuugcaccaucccuc

SEQ ID NO: 64712 - RNA, 22 nt, Homo sapiens
ugaagugaagcaguaguguggg

SEQ ID NO: 64713 - RNA, 19 nt, Homo sapiens
ucccaagaugcucauacau

SEQ ID NO: 64714 - RNA, 22 nt, Homo sapiens
augugcauaugaagcacagaca

SEQ ID NO: 64715 - RNA, 22 nt, Homo sapiens
ugagaagugauauagaaguuaa

SEQ ID NO: 64716 - RNA, 20 nt, Homo sapiens
uaaaugccucaugcuuuauu

SEQ ID NO: 64717 - RNA, 22 nt, Homo sapiens
uggcaggugcacuggcuuugaa

SEQ ID NO: 64718 - RNA, 22 nt, Homo sapiens
aggcaagugggagacagcauuu

SEQ ID NO: 64719 - RNA, 22 nt, Homo sapiens
gcagcagugcccuggauggaaa

SEQ ID NO: 64720 - RNA, 22 nt, Homo sapiens
guguagagaaauagccugaagg

SEQ ID NO: 64721 - RNA, 22 nt, Homo sapiens
uuaaaugcuagaauuuucuuug

SEQ ID NO: 64722 - RNA, 22 nt, Homo sapiens
gccccaguacaggcuccuuaga

SEQ ID NO: 64723 - RNA, 22 nt, Homo sapiens
ucugucaaaucuuauguuguag

SEQ ID NO: 64724 - RNA, 22 nt, Homo sapiens
gagacauugacuuuguuccaga

SEQ ID NO: 64725 - RNA, 21 nt, Homo sapiens
ucuaccuacugcucacaggcu

SEQ ID NO: 64726 - RNA, 19 nt, Homo sapiens
agcagaacaaauguguggg

SEQ ID NO: 64727 - RNA, 22 nt, Homo sapiens
ucccugacagggucugagcuuu

SEQ ID NO: 64728 - RNA, 22 nt, Homo sapiens
uggagacugaucccucuuuccu

SEQ ID NO: 64729 - RNA, 19 nt, Homo sapiens
uuguguccccacaaaauuc

SEQ ID NO: 64730 - RNA, 22 nt, Homo sapiens
caagguacuuuuacaauuuccc

SEQ ID NO: 64731 - RNA, 22 nt, Homo sapiens
auugcaguuucaacuccagggc

SEQ ID NO: 64732 - RNA, 22 nt, Homo sapiens
ccagccgggugcaguggcucac

SEQ ID NO: 64733 - RNA, 22 nt, Homo sapiens
caggcauuguauuguaaucccc

SEQ ID NO: 64734 - RNA, 23 nt, Homo sapiens
uagcuucucccagaccugcuccc

SEQ ID NO: 64735 - RNA, 22 nt, Homo sapiens
ugagucuguucucacauugcua

SEQ ID NO: 64736 - RNA, 22 nt, Homo sapiens
ucagugaauguuggccacuacu

SEQ ID NO: 64737 - RNA, 22 nt, Homo sapiens
uugauauguguauagcaugugg

SEQ ID NO: 64738 - RNA, 22 nt, Homo sapiens
gccauggaggauuuauagaggc

SEQ ID NO: 64739 - RNA, 22 nt, Homo sapiens
uucuuuaguucacuugcuccag

SEQ ID NO: 64740 - RNA, 22 nt, Homo sapiens
ucagaucacuggcgcuggcgga

SEQ ID NO: 64741 - RNA, 20 nt, Homo sapiens
ggagagugacauaauucugg

SEQ ID NO: 64742 - RNA, 22 nt, Homo sapiens
uuuccaagaugcuuacuuucuc

SEQ ID NO: 64743 - RNA, 22 nt, Homo sapiens
guacauagucacacauauacau

SEQ ID NO: 64744 - RNA, 22 nt, Homo sapiens
ucugugguucaggcuggagugc

SEQ ID NO: 64745 - RNA, 22 nt, Homo sapiens
caugccacugcacgccauccug

SEQ ID NO: 64746 - RNA, 18 nt, Homo sapiens
ggaaaacuuuucuaagua

SEQ ID NO: 64747 - RNA, 22 nt, Homo sapiens
uuugcuugaggucuagcuaccc

SEQ ID NO: 64748 - RNA, 22 nt, Homo sapiens
uggaaaguacuugaguuuguau

SEQ ID NO: 64749 - RNA, 22 nt, Homo sapiens
uuauagcagugcaggaacagac

SEQ ID NO: 64750 - RNA, 22 nt, Homo sapiens
guaacccuguaggccuaaagua

SEQ ID NO: 64751 - RNA, 21 nt, Homo sapiens
cuuuaugcuguguuagaaaag

SEQ ID NO: 64752 - RNA, 22 nt, Homo sapiens
agguauuuucaacuuagaaugg

SEQ ID NO: 64753 - RNA, 20 nt, Homo sapiens
gggaugugagguacacucuu

SEQ ID NO: 64754 - RNA, 22 nt, Homo sapiens
acuagguaguaaucugcagaga

SEQ ID NO: 64755 - RNA, 23 nt, Homo sapiens
ugauaacagcauaugaagauucu

SEQ ID NO: 64756 - RNA, 22 nt, Homo sapiens
auggaggaggaagcugaaacaa

SEQ ID NO: 64757 - RNA, 22 nt, Homo sapiens
uuuguacucccuuuagauaaaa

SEQ ID NO: 64758 - RNA, 22 nt, Homo sapiens
ugacacagcaagauggaaccau

SEQ ID NO: 64759 - RNA, 22 nt, Homo sapiens
aguaucaagccacacaugguca

SEQ ID NO: 64760 - RNA, 22 nt, Homo sapiens
uugaaguauagaguuuaagaac

SEQ ID NO: 64761 - RNA, 22 nt, Homo sapiens
uccuuuaguuaauaaagacaag

SEQ ID NO: 64762 - RNA, 22 nt, Homo sapiens
ucagcagugugaaaacaaacua

SEQ ID NO: 64763 - RNA, 19 nt, Homo sapiens
uguugcacauaucaauaug

SEQ ID NO: 64764 - RNA, 23 nt, Homo sapiens
gucuggucccugguuggaaacca

SEQ ID NO: 64765 - RNA, 22 nt, Homo sapiens
gacuugaagaaucuaagggagg

SEQ ID NO: 64766 - RNA, 22 nt, Homo sapiens
aucgcgccauuguacuccagcc

SEQ ID NO: 64767 - RNA, 22 nt, Homo sapiens
gucacauugaugcccauggugg

SEQ ID NO: 64768 - RNA, 22 nt, Homo sapiens
auauaguguuuuuugguacgcu

SEQ ID NO: 64769 - RNA, 22 nt, Homo sapiens
agugacaugggaucaaaucuga

SEQ ID NO: 64770 - RNA, 22 nt, Homo sapiens
ucuccaguuuccuucgucuauc

SEQ ID NO: 64771 - RNA, 22 nt, Homo sapiens
aagcugugucuugucagcuacc

SEQ ID NO: 64772 - RNA, 22 nt, Homo sapiens
aaacauugaccucauccuggca

SEQ ID NO: 64773 - RNA, 22 nt, Homo sapiens
auuaauguaauuaguaaaguug

SEQ ID NO: 64774 - RNA, 22 nt, Homo sapiens
guggcaaguguuccaagaggcg

SEQ ID NO: 64775 - RNA, 22 nt, Homo sapiens
ugugacacugaauggcagaacu

SEQ ID NO: 64776 - RNA, 22 nt, Homo sapiens
aggagguagggugugaaacagc

SEQ ID NO: 64777 - RNA, 23 nt, Homo sapiens
agaaaugucuauucagggucccu

SEQ ID NO: 64778 - RNA, 22 nt, Homo sapiens
ggagauccucugcgggcaaaga

SEQ ID NO: 64779 - RNA, 22 nt, Homo sapiens
ugacuugaguaacuggcucagg

SEQ ID NO: 64780 - RNA, 22 nt, Homo sapiens
aucccugagaacuuuuaauguu

SEQ ID NO: 64781 - RNA, 22 nt, Homo sapiens
guaaaugcagaugcaugaccuu

SEQ ID NO: 64782 - RNA, 22 nt, Homo sapiens
aagaugcagucauacuggagga

SEQ ID NO: 64783 - RNA, 22 nt, Homo sapiens
uucacaauuaaaugugguuauu

SEQ ID NO: 64784 - RNA, 22 nt, Homo sapiens
uuauguccuuuaacuucaucac

SEQ ID NO: 64785 - RNA, 22 nt, Homo sapiens
ugugcacauaacauuuuuuuag

SEQ ID NO: 64786 - RNA, 22 nt, Homo sapiens
uuucaccguguuggccaggcug

SEQ ID NO: 64787 - RNA, 22 nt, Homo sapiens
cugagaucaugggucagguggu

SEQ ID NO: 64788 - RNA, 22 nt, Homo sapiens
ucacccacacaggagacaggga

SEQ ID NO: 64789 - RNA, 22 nt, Homo sapiens
uuacguaguuuuggagaucaua

SEQ ID NO: 64790 - RNA, 22 nt, Homo sapiens
augugcaugcuguucugccaga

SEQ ID NO: 64791 - RNA, 22 nt, Homo sapiens
uaagugcaacauaaguguuaaa

SEQ ID NO: 64792 - RNA, 22 nt, Homo sapiens
aaagucuagaggaucaugugug

SEQ ID NO: 64793 - RNA, 22 nt, Homo sapiens
cagugcaugacuguauauuauc

SEQ ID NO: 64794 - RNA, 22 nt, Homo sapiens
agcuccaugauaguaugucugu

SEQ ID NO: 64795 - RNA, 19 nt, Homo sapiens
cuauugcacauagcugaag

SEQ ID NO: 64796 - RNA, 22 nt, Homo sapiens
uagcacaucuucuuggccugca

SEQ ID NO: 64797 - RNA, 22 nt, Homo sapiens
gaauaaacuagagaggacugag

SEQ ID NO: 64798 - RNA, 22 nt, Homo sapiens
uggaguguagaagccagccucc

SEQ ID NO: 64799 - RNA, 22 nt, Homo sapiens
ugagggaugcguacccuaugcc

SEQ ID NO: 64800 - RNA, 22 nt, Homo sapiens
uuaagcaaagguaacaugagaa

SEQ ID NO: 64801 - RNA, 22 nt, Homo sapiens
aaagaagucagccuguccuuug

SEQ ID NO: 64802 - RNA, 22 nt, Homo sapiens
uggaugaagagaugguaguugc

SEQ ID NO: 64803 - RNA, 21 nt, Homo sapiens
uuguaugguugaacuugauac

SEQ ID NO: 64804 - RNA, 22 nt, Homo sapiens
uuaugucuuugagcaaugcugu

SEQ ID NO: 64805 - RNA, 22 nt, Homo sapiens
uggcauuuucucuguucuuaga

SEQ ID NO: 64806 - RNA, 22 nt, Homo sapiens
ucagaucauauucuucgcugcu

SEQ ID NO: 64807 - RNA, 22 nt, Homo sapiens
aucccugaggaauuucugcacu

SEQ ID NO: 64808 - RNA, 22 nt, Homo sapiens
ugaggugagggguuaggugcua

SEQ ID NO: 64809 - RNA, 22 nt, Homo sapiens
ugucaaagagacaucugcacuc

SEQ ID NO: 64810 - RNA, 22 nt, Homo sapiens
ucuuaggugggccaucacccca

SEQ ID NO: 64811 - RNA, 19 nt, Homo sapiens
ucccuuuguagguaaccug

SEQ ID NO: 64812 - RNA, 22 nt, Homo sapiens
caugccacuguggacaaagaca

SEQ ID NO: 64813 - RNA, 22 nt, Homo sapiens
gaggugguagguucacagcagc

SEQ ID NO: 64814 - RNA, 22 nt, Homo sapiens
aaaugcuguuccaggaccuauc

SEQ ID NO: 64815 - RNA, 22 nt, Homo sapiens
ugacugugcagcuccaucaggg

SEQ ID NO: 64816 - RNA, 22 nt, Homo sapiens
cacccaguaagcaugaggcccu

SEQ ID NO: 64817 - RNA, 22 nt, Homo sapiens
uugugcaaaguugugguuucug

SEQ ID NO: 64818 - RNA, 22 nt, Homo sapiens
ucuguggucagaguccuuggcc

SEQ ID NO: 64819 - RNA, 22 nt, Homo sapiens
ggucugguguugaaauucuuca

SEQ ID NO: 64820 - RNA, 22 nt, Homo sapiens
cugagaguugaugaaauauggu

SEQ ID NO: 64821 - RNA, 22 nt, Homo sapiens
ugaauauguuaauuagcaucau

SEQ ID NO: 64822 - RNA, 22 nt, Homo sapiens
uucaaguaguucucaugccuca

SEQ ID NO: 64823 - RNA, 22 nt, Homo sapiens
cuucugauugaaaauggaguag

SEQ ID NO: 64824 - RNA, 18 nt, Homo sapiens
uggauuggaaaaguuccu

SEQ ID NO: 64825 - RNA, 23 nt, Homo sapiens
aggccaguuuuuccugcuugcug

SEQ ID NO: 64826 - RNA, 22 nt, Homo sapiens
ugggaugaaaauagcuucuucc

SEQ ID NO: 64827 - RNA, 22 nt, Homo sapiens
uugcagcaacauggaugaaacu

SEQ ID NO: 64828 - RNA, 22 nt, Homo sapiens
uggcuuuguaagguuucauuuu

SEQ ID NO: 64829 - RNA, 22 nt, Homo sapiens
uugguccccuucaaccagcugu

SEQ ID NO: 64830 - RNA, 22 nt, Homo sapiens
augaaagucaauccccaagugu

SEQ ID NO: 64831 - RNA, 22 nt, Homo sapiens
uugugucccugcccaaaucuca

SEQ ID NO: 64832 - RNA, 23 nt, Homo sapiens
uacagcugcagaaucaggcuaag

SEQ ID NO: 64833 - RNA, 22 nt, Homo sapiens
uugugcuccugugagaaucuag

SEQ ID NO: 64834 - RNA, 21 nt, Homo sapiens
uuuacuguggacccauugcuu

SEQ ID NO: 64835 - RNA, 22 nt, Homo sapiens
cugugaucuuuuuucauguggu

SEQ ID NO: 64836 - RNA, 22 nt, Homo sapiens
augacaguguggauuauuguaa

SEQ ID NO: 64837 - RNA, 20 nt, Homo sapiens
auggcccugcugggaguguc

SEQ ID NO: 64838 - RNA, 22 nt, Homo sapiens
ugcaguacugucagacuucuua

SEQ ID NO: 64839 - RNA, 22 nt, Homo sapiens
cugaugguuuuacacaagggca

SEQ ID NO: 64840 - RNA, 22 nt, Homo sapiens
caggcagugggagacaaaacug

SEQ ID NO: 64841 - RNA, 22 nt, Homo sapiens
gugaccagaugggcaggggugu

SEQ ID NO: 64842 - RNA, 22 nt, Homo sapiens
uucaguggacuuaguagugcuu

SEQ ID NO: 64843 - RNA, 22 nt, Homo sapiens
ugggaucuuuccuauuagcgag

SEQ ID NO: 64844 - RNA, 22 nt, Homo sapiens
guggaagugucuggggccaggg

SEQ ID NO: 64845 - RNA, 23 nt, Homo sapiens
ggugaggaguacagagucuucau

SEQ ID NO: 64846 - RNA, 22 nt, Homo sapiens
ugggcaguauggucauuuucgu

SEQ ID NO: 64847 - RNA, 22 nt, Homo sapiens
ucaagcaauucugcugccucag

SEQ ID NO: 64848 - RNA, 22 nt, Homo sapiens
ucugugguaagaaacgcauguc

SEQ ID NO: 64849 - RNA, 22 nt, Homo sapiens
ugauggcaauggcauucauuuu

SEQ ID NO: 64850 - RNA, 22 nt, Homo sapiens
cuugccuuugucuucaaaggcu

SEQ ID NO: 64851 - RNA, 22 nt, Homo sapiens
guauggcacuauccucucugau

SEQ ID NO: 64852 - RNA, 22 nt, Homo sapiens
ugggaucauuaugcauagugua

SEQ ID NO: 64853 - RNA, 22 nt, Homo sapiens
uagaauguaacaguuaaaagca

SEQ ID NO: 64854 - RNA, 22 nt, Homo sapiens
gacuggccuauaauggcgaauu

SEQ ID NO: 64855 - RNA, 22 nt, Homo sapiens
uaaagccauugucaaguuugua

SEQ ID NO: 64856 - RNA, 22 nt, Homo sapiens
ugacuugaucacccccuaaggg

SEQ ID NO: 64857 - RNA, 22 nt, Homo sapiens
auagugcugugaugaacauaca

SEQ ID NO: 64858 - RNA, 22 nt, Homo sapiens
cauugcacuccagccugcugac

SEQ ID NO: 64859 - RNA, 21 nt, Homo sapiens
aucugugagaccuuggggguu

SEQ ID NO: 64860 - RNA, 22 nt, Homo sapiens
uucacugugcuuaaauucugcu

SEQ ID NO: 64861 - RNA, 19 nt, Homo sapiens
uggucaguucugggagcug

SEQ ID NO: 64862 - RNA, 22 nt, Homo sapiens
ucauacuguugugaaacaaaac

SEQ ID NO: 64863 - RNA, 22 nt, Homo sapiens
uagcugcccagcacgaaguugg

SEQ ID NO: 64864 - RNA, 22 nt, Homo sapiens
gucacugggugcugcgccuguc

SEQ ID NO: 64865 - RNA, 22 nt, Homo sapiens
uagaauguauaauauuuuacuu

SEQ ID NO: 64866 - RNA, 22 nt, Homo sapiens
uacaaagcuuucugcaaaucau

SEQ ID NO: 64867 - RNA, 22 nt, Homo sapiens
auggccuuguauaccuggcaaa

SEQ ID NO: 64868 - RNA, 19 nt, Homo sapiens
uuccugagaacaagggcuu

SEQ ID NO: 64869 - RNA, 22 nt, Homo sapiens
gacauagagccuugacuucauu

SEQ ID NO: 64870 - RNA, 22 nt, Homo sapiens
cuaagugaguauaauuuuaaga

SEQ ID NO: 64871 - RNA, 22 nt, Homo sapiens
augcagagaaaucuaaaauaug

SEQ ID NO: 64872 - RNA, 22 nt, Homo sapiens
uauggauuugccuauucuguau

SEQ ID NO: 64873 - RNA, 23 nt, Homo sapiens
uuggucucccaaaguguugagau

SEQ ID NO: 64874 - RNA, 22 nt, Homo sapiens
acagugcuuucaauguucagua

SEQ ID NO: 64875 - RNA, 22 nt, Homo sapiens
augcccauuuguuuucugaaag

SEQ ID NO: 64876 - RNA, 22 nt, Homo sapiens
uccugagacucacaggcucccc

SEQ ID NO: 64877 - RNA, 22 nt, Homo sapiens
ugaucacagcuugacuaaagga

SEQ ID NO: 64878 - RNA, 22 nt, Homo sapiens
gugcacaaucgugcauuccuug

SEQ ID NO: 64879 - RNA, 22 nt, Homo sapiens
aaagugcaguacuucguauauu

SEQ ID NO: 64880 - RNA, 22 nt, Homo sapiens
augugcacaacgugcagguuug

SEQ ID NO: 64881 - RNA, 22 nt, Homo sapiens
acccugugagagaguuaauauu

SEQ ID NO: 64882 - RNA, 21 nt, Homo sapiens
ugcagccauucagcccuaugc

SEQ ID NO: 64883 - RNA, 18 nt, Homo sapiens
auauugcauuggauggau

SEQ ID NO: 64884 - RNA, 22 nt, Homo sapiens
cuacagguaugaaagggaguau

SEQ ID NO: 64885 - RNA, 22 nt, Homo sapiens
uaucacacuguuggauuugauu

SEQ ID NO: 64886 - RNA, 22 nt, Homo sapiens
uuggucucuuaaucacacuuuu

SEQ ID NO: 64887 - RNA, 22 nt, Homo sapiens
uucuccugguggacccuaaacg

SEQ ID NO: 64888 - RNA, 22 nt, Homo sapiens
agugaaaucugaagaaggucau

SEQ ID NO: 64889 - RNA, 22 nt, Homo sapiens
aagugguguuugggagcuggac

SEQ ID NO: 64890 - RNA, 22 nt, Homo sapiens
uucccuagaacacauggaggga

SEQ ID NO: 64891 - RNA, 22 nt, Homo sapiens
augagcagaagagauacacugu

SEQ ID NO: 64892 - RNA, 22 nt, Homo sapiens
auaucaacaugguaggguuggu

SEQ ID NO: 64893 - RNA, 22 nt, Homo sapiens
uccagcuuuuucuaauucugug

SEQ ID NO: 64894 - RNA, 22 nt, Homo sapiens
ucucaaguggucgcaguuagau

SEQ ID NO: 64895 - RNA, 22 nt, Homo sapiens
agacaguguguguauauauggu

SEQ ID NO: 64896 - RNA, 22 nt, Homo sapiens
ucauggggugagcuacaggcac

SEQ ID NO: 64897 - RNA, 22 nt, Homo sapiens
ucaguggagccucacucugugg

SEQ ID NO: 64898 - RNA, 22 nt, Homo sapiens
uauugccugucuccaaaaauca

SEQ ID NO: 64899 - RNA, 22 nt, Homo sapiens
ugauauguaacuacuccuuaua

SEQ ID NO: 64900 - RNA, 20 nt, Homo sapiens
agcuccauuccugaaggcug

SEQ ID NO: 64901 - RNA, 22 nt, Homo sapiens
caugucuuuuaaacauucaacu

SEQ ID NO: 64902 - RNA, 20 nt, Homo sapiens
guggaagauaaguagccuga

SEQ ID NO: 64903 - RNA, 22 nt, Homo sapiens
ccagaguuucugauucagcagg

SEQ ID NO: 64904 - RNA, 22 nt, Homo sapiens
ucugugaaugaacacuugaaaa

SEQ ID NO: 64905 - RNA, 22 nt, Homo sapiens
uugugcuccuaugagaaucuaa

SEQ ID NO: 64906 - RNA, 22 nt, Homo sapiens
uuugagcauuagggcaaaggca

SEQ ID NO: 64907 - RNA, 22 nt, Homo sapiens
gugaaguuuuuugcugagaguc

SEQ ID NO: 64908 - RNA, 17 nt, Homo sapiens
ugagaacaugugguauu

SEQ ID NO: 64909 - RNA, 22 nt, Homo sapiens
ucaaagacacacaaggagaagg

SEQ ID NO: 64910 - RNA, 22 nt, Homo sapiens
gugucccagugugcauacaggu

SEQ ID NO: 64911 - RNA, 22 nt, Homo sapiens
auggcaguuucagcuauaguuu

SEQ ID NO: 64912 - RNA, 22 nt, Homo sapiens
uugauaguuuuaaaauuaaucu

SEQ ID NO: 64913 - RNA, 22 nt, Homo sapiens
uuuaaggcaugccuguacaugc

SEQ ID NO: 64914 - RNA, 22 nt, Homo sapiens
ggaguaggcuguccggcaccca

SEQ ID NO: 64915 - RNA, 21 nt, Homo sapiens
agcuuguguguaucacagugu

SEQ ID NO: 64916 - RNA, 22 nt, Homo sapiens
ugugcacaaccugcagguuugu

SEQ ID NO: 64917 - RNA, 22 nt, Homo sapiens
uaggagugugaacccuaugaac

SEQ ID NO: 64918 - RNA, 22 nt, Homo sapiens
ugagaugaugggauaagagggc

SEQ ID NO: 64919 - RNA, 21 nt, Homo sapiens
ugcauggagaacacugagggu

SEQ ID NO: 64920 - RNA, 22 nt, Homo sapiens
aggagaucagccucccugcaac

SEQ ID NO: 64921 - RNA, 22 nt, Homo sapiens
uugacauaguuucugaaauaga

SEQ ID NO: 64922 - RNA, 22 nt, Homo sapiens
auucccuuagcugccucagccu

SEQ ID NO: 64923 - RNA, 22 nt, Homo sapiens
uuuagguauuugguauagcagu

SEQ ID NO: 64924 - RNA, 22 nt, Homo sapiens
ugcauuaucagauguuugcuuu

SEQ ID NO: 64925 - RNA, 22 nt, Homo sapiens
uuuaugcuacauguguuggaaa

SEQ ID NO: 64926 - RNA, 22 nt, Homo sapiens
ucucagcacaaacaaaauugcu

SEQ ID NO: 64927 - RNA, 22 nt, Homo sapiens
cccagaguucuuaaauacugag

SEQ ID NO: 64928 - RNA, 22 nt, Homo sapiens
aacaguaucuaacgagugauga

SEQ ID NO: 64929 - RNA, 19 nt, Homo sapiens
ucuuugcuuuucuaagagg

SEQ ID NO: 64930 - RNA, 19 nt, Homo sapiens
cuguggucauuauuuugcu

SEQ ID NO: 64931 - RNA, 22 nt, Homo sapiens
ucagaugaucugguaagaacuu

SEQ ID NO: 64932 - RNA, 22 nt, Homo sapiens
uugugucccuacccaaaucuca

SEQ ID NO: 64933 - RNA, 20 nt, Homo sapiens
gucuugcuccguugcccagg

SEQ ID NO: 64934 - RNA, 18 nt, Homo sapiens
uaagaugcagccuauucc

SEQ ID NO: 64935 - RNA, 22 nt, Homo sapiens
cacagagugagacccugucucu

SEQ ID NO: 64936 - RNA, 23 nt, Homo sapiens
cuguggugaggcccuagaaucug

SEQ ID NO: 64937 - RNA, 22 nt, Homo sapiens
auguaugagaguuccagcugau

SEQ ID NO: 64938 - RNA, 22 nt, Homo sapiens
uucaagucaauuuuugaaugac

SEQ ID NO: 64939 - RNA, 22 nt, Homo sapiens
uguuaugaagaugccugguaca

SEQ ID NO: 64940 - RNA, 22 nt, Homo sapiens
uuacuggcuuucacugguguua

SEQ ID NO: 64941 - RNA, 22 nt, Homo sapiens
uuuguccccgcccagaucucau

SEQ ID NO: 64942 - RNA, 19 nt, Homo sapiens
cucauggagaaggagaaua

SEQ ID NO: 64943 - RNA, 22 nt, Homo sapiens
guaaauaccaguuucuggaaca

SEQ ID NO: 64944 - RNA, 22 nt, Homo sapiens
uuugacaaugugugcuuguauu

SEQ ID NO: 64945 - RNA, 17 nt, Homo sapiens
ucuaauaauaugcauuu

SEQ ID NO: 64946 - RNA, 22 nt, Homo sapiens
uuuagguagucaaagguuaguc

SEQ ID NO: 64947 - RNA, 22 nt, Homo sapiens
ccuucauccuccagcaggcuag

SEQ ID NO: 64948 - RNA, 22 nt, Homo sapiens
uuuaacauuggaugagaucguc

SEQ ID NO: 64949 - RNA, 22 nt, Homo sapiens
uuauacacugugggaguguaaa

SEQ ID NO: 64950 - RNA, 22 nt, Homo sapiens
uacaaaguaacaguuccuguau

SEQ ID NO: 64951 - RNA, 20 nt, Homo sapiens
gucugucuccgaguagaauu

SEQ ID NO: 64952 - RNA, 22 nt, Homo sapiens
ucacaaguguauagacaugucc

SEQ ID NO: 64953 - RNA, 22 nt, Homo sapiens
uuacagauggcacacucaaggg

SEQ ID NO: 64954 - RNA, 22 nt, Homo sapiens
uuacaguagaugaggguauaau

SEQ ID NO: 64955 - RNA, 22 nt, Homo sapiens
cugggcaaugcggcuggauaga

SEQ ID NO: 64956 - RNA, 22 nt, Homo sapiens
uguggcucuucuguucuccacu

SEQ ID NO: 64957 - RNA, 22 nt, Homo sapiens
gagacugagucuugcucugucg

SEQ ID NO: 64958 - RNA, 22 nt, Homo sapiens
uauacugucuuuguaugccuag

SEQ ID NO: 64959 - RNA, 22 nt, Homo sapiens
uuagcacaguucauucauguua

SEQ ID NO: 64960 - RNA, 22 nt, Homo sapiens
cagagugcauguuuagaugagu

SEQ ID NO: 64961 - RNA, 22 nt, Homo sapiens
augcaaaucuuaaguaugugug

SEQ ID NO: 64962 - RNA, 22 nt, Homo sapiens
uuaaaugcacauacuugagaaa

SEQ ID NO: 64963 - RNA, 22 nt, Homo sapiens
ugugccacugcacucugggcaa

SEQ ID NO: 64964 - RNA, 22 nt, Homo sapiens
uuuguacuugguguucuggaaa

SEQ ID NO: 64965 - RNA, 22 nt, Homo sapiens
cuauuagguuggugcaaaaguc

SEQ ID NO: 64966 - RNA, 18 nt, Homo sapiens
augcauauuuuaaguugu

SEQ ID NO: 64967 - RNA, 22 nt, Homo sapiens
ucacacugucuugguuacucuu

SEQ ID NO: 64968 - RNA, 22 nt, Homo sapiens
uccucauggagaaccucugcua

SEQ ID NO: 64969 - RNA, 22 nt, Homo sapiens
auggcauugaagaguugucccu

SEQ ID NO: 64970 - RNA, 22 nt, Homo sapiens
uuaauguaucuaucacaucaca

SEQ ID NO: 64971 - RNA, 22 nt, Homo sapiens
ugagcaucucuaaaaggagcaa

SEQ ID NO: 64972 - RNA, 19 nt, Homo sapiens
ucaugugcauacauuuggg

SEQ ID NO: 64973 - RNA, 22 nt, Homo sapiens
ugaagugcugugggccaggcgu

SEQ ID NO: 64974 - RNA, 22 nt, Homo sapiens
uaagguguagacuggucacaag

SEQ ID NO: 64975 - RNA, 22 nt, Homo sapiens
gugcacaucuguguuccagcua

SEQ ID NO: 64976 - RNA, 20 nt, Homo sapiens
augaaggcaggugugaguuu

SEQ ID NO: 64977 - RNA, 22 nt, Homo sapiens
uagcuucuccauagcuccaugu

SEQ ID NO: 64978 - RNA, 22 nt, Homo sapiens
agugcaauggugccaucauagc

SEQ ID NO: 64979 - RNA, 22 nt, Homo sapiens
gucaccagcuguguuagccccu

SEQ ID NO: 64980 - RNA, 22 nt, Homo sapiens
ucagaucaugcuuaugauggga

SEQ ID NO: 64981 - RNA, 21 nt, Homo sapiens
gugguucuagagaaacagaau

SEQ ID NO: 64982 - RNA, 22 nt, Homo sapiens
aagugcuuuacacaugcaugau

SEQ ID NO: 64983 - RNA, 22 nt, Homo sapiens
ugagccaugguuagcuucucau

SEQ ID NO: 64984 - RNA, 22 nt, Homo sapiens
ucaccuggagccuucacauucu

SEQ ID NO: 64985 - RNA, 22 nt, Homo sapiens
aucugugaaugaaguuauuuug

SEQ ID NO: 64986 - RNA, 22 nt, Homo sapiens
aaggcaagaaaauggauucucc

SEQ ID NO: 64987 - RNA, 22 nt, Homo sapiens
cuagguucucaaaccagcguca

SEQ ID NO: 64988 - RNA, 22 nt, Homo sapiens
gagacugagucucacucuguca

SEQ ID NO: 64989 - RNA, 22 nt, Homo sapiens
gagaugugguucaaggguguuu

SEQ ID NO: 64990 - RNA, 22 nt, Homo sapiens
uggaaaguacugagguccaccu

SEQ ID NO: 64991 - RNA, 22 nt, Homo sapiens
uugagauggugccacuguacuc

SEQ ID NO: 64992 - RNA, 22 nt, Homo sapiens
ugugcacaaugugcagguuuga

SEQ ID NO: 64993 - RNA, 22 nt, Homo sapiens
ugugcacaauguacagguuagu

SEQ ID NO: 64994 - RNA, 22 nt, Homo sapiens
ugugcaaggcucucaaccugug

SEQ ID NO: 64995 - RNA, 22 nt, Homo sapiens
gugaacagaaccugggaucgaa

SEQ ID NO: 64996 - RNA, 22 nt, Homo sapiens
cacucaguuugugguacuuugu

SEQ ID NO: 64997 - RNA, 22 nt, Homo sapiens
ugaaacacacauugcccuuuau

SEQ ID NO: 64998 - RNA, 21 nt, Homo sapiens
uuggggaauggagagguuuuc

SEQ ID NO: 64999 - RNA, 22 nt, Homo sapiens
cauaguacuugcauaguacuau

SEQ ID NO: 65000 - RNA, 22 nt, Homo sapiens
ugucuuugguucaggcaaggag

SEQ ID NO: 65001 - RNA, 22 nt, Homo sapiens
uugucacccuacauaacaggga

SEQ ID NO: 65002 - RNA, 22 nt, Homo sapiens
cagagaaugucuuuuuuaacca

SEQ ID NO: 65003 - RNA, 22 nt, Homo sapiens
uucucaaggagccuucguaacu

SEQ ID NO: 65004 - RNA, 22 nt, Homo sapiens
augcacaguccagcccaugugg

SEQ ID NO: 65005 - RNA, 23 nt, Homo sapiens
ugggucaguuuuucugacaucau

SEQ ID NO: 65006 - RNA, 22 nt, Homo sapiens
guuaagaaguguaacuuaaguu

SEQ ID NO: 65007 - RNA, 22 nt, Homo sapiens
uucucuguggauugggugagag

SEQ ID NO: 65008 - RNA, 22 nt, Homo sapiens
cugcagucaucugaagauuuug

SEQ ID NO: 65009 - RNA, 22 nt, Homo sapiens
ucucuguuuauuuuugguguau

SEQ ID NO: 65010 - RNA, 22 nt, Homo sapiens
uuugcuauagugaauagugcug

SEQ ID NO: 65011 - RNA, 22 nt, Homo sapiens
gugaggcacugcugcuuuccag

SEQ ID NO: 65012 - RNA, 22 nt, Homo sapiens
auccugaagcuuuacugaauuc

SEQ ID NO: 65013 - RNA, 22 nt, Homo sapiens
acccuugaguguguuucaggca

SEQ ID NO: 65014 - RNA, 22 nt, Homo sapiens
augagauacuacaaaugaguuu

SEQ ID NO: 65015 - RNA, 22 nt, Homo sapiens
ucaguggauuauuaaagucacc

SEQ ID NO: 65016 - RNA, 22 nt, Homo sapiens
cuuugugcccuucugcccauca

SEQ ID NO: 65017 - RNA, 22 nt, Homo sapiens
agccuguguugaauuauagaaa

SEQ ID NO: 65018 - RNA, 22 nt, Homo sapiens
uaguugcauuggcugcuaugcu

SEQ ID NO: 65019 - RNA, 22 nt, Homo sapiens
ugaaaucauguaguuauugcaa

SEQ ID NO: 65020 - RNA, 21 nt, Homo sapiens
gcaaaggaauugccuaagcuu

SEQ ID NO: 65021 - RNA, 22 nt, Homo sapiens
uugcaaagaccucuucacuucc

SEQ ID NO: 65022 - RNA, 22 nt, Homo sapiens
gucuuugcauguauguucauga

SEQ ID NO: 65023 - RNA, 22 nt, Homo sapiens
agcuccauuguaaucaccuggu

SEQ ID NO: 65024 - RNA, 22 nt, Homo sapiens
ugugcacaugauauaucacaua

SEQ ID NO: 65025 - RNA, 22 nt, Homo sapiens
uaguacccuugaagcagacaua

SEQ ID NO: 65026 - RNA, 22 nt, Homo sapiens
augcauagcaucugcaaauguu

SEQ ID NO: 65027 - RNA, 22 nt, Homo sapiens
uuaacagucacuuagcucauuu

SEQ ID NO: 65028 - RNA, 22 nt, Homo sapiens
ugagaucuuaccuuccugccuu

SEQ ID NO: 65029 - RNA, 23 nt, Homo sapiens
uugggcaaaucacugagggcaga

SEQ ID NO: 65030 - RNA, 20 nt, Homo sapiens
ugaaacacauggacuggggu

SEQ ID NO: 65031 - RNA, 22 nt, Homo sapiens
agcacagugguuaaguuucuua

SEQ ID NO: 65032 - RNA, 22 nt, Homo sapiens
uugguucucuuagccaucuuaa

SEQ ID NO: 65033 - RNA, 22 nt, Homo sapiens
ucugcaagucuaaacuagccau

SEQ ID NO: 65034 - RNA, 22 nt, Homo sapiens
augaaaucuuuggcagaucuua

SEQ ID NO: 65035 - RNA, 22 nt, Homo sapiens
cccagugugcugggugacagcu

SEQ ID NO: 65036 - RNA, 22 nt, Homo sapiens
aucauccugucaggagcuguga

SEQ ID NO: 65037 - RNA, 22 nt, Homo sapiens
ucugugcauggcagaggaauga

SEQ ID NO: 65038 - RNA, 22 nt, Homo sapiens
uuaaauacagcaugguguuucu

SEQ ID NO: 65039 - RNA, 22 nt, Homo sapiens
cugagagaugagaccucucacu

SEQ ID NO: 65040 - RNA, 22 nt, Homo sapiens
ugcaaucauuuggaggagaaga

SEQ ID NO: 65041 - RNA, 21 nt, Homo sapiens
augacccuggguguccuuucc

SEQ ID NO: 65042 - RNA, 23 nt, Homo sapiens
acagucuaguuugaagucaggua

SEQ ID NO: 65043 - RNA, 22 nt, Homo sapiens
caaauugcuugucuguagugga

SEQ ID NO: 65044 - RNA, 17 nt, Homo sapiens
uuagacagacauccugc

SEQ ID NO: 65045 - RNA, 23 nt, Homo sapiens
cagugguguuagagaaaucuuuu

SEQ ID NO: 65046 - RNA, 22 nt, Homo sapiens
ggcagaauugcugaggaugcua

SEQ ID NO: 65047 - RNA, 22 nt, Homo sapiens
uuagaacaguguuugccucgcu

SEQ ID NO: 65048 - RNA, 22 nt, Homo sapiens
aaguagcagaggcaagacuuga

SEQ ID NO: 65049 - RNA, 19 nt, Homo sapiens
uugcaguauccuauauguu

SEQ ID NO: 65050 - RNA, 22 nt, Homo sapiens
uaacucugccuagugacauggu

SEQ ID NO: 65051 - RNA, 22 nt, Homo sapiens
agucgguguuacugacagaaug

SEQ ID NO: 65052 - RNA, 22 nt, Homo sapiens
ucuugguaaugucacauuuccu

SEQ ID NO: 65053 - RNA, 22 nt, Homo sapiens
ccaguguucuggaaggcugagu

SEQ ID NO: 65054 - RNA, 22 nt, Homo sapiens
ucagugcuguuugcccucguuu

SEQ ID NO: 65055 - RNA, 22 nt, Homo sapiens
aaaacgcauccucacaggucug

SEQ ID NO: 65056 - RNA, 22 nt, Homo sapiens
aagucaaggagagaagcuucag

SEQ ID NO: 65057 - RNA, 23 nt, Homo sapiens
gaaaugucuuagugaaauugcuu

SEQ ID NO: 65058 - RNA, 22 nt, Homo sapiens
augucacagguccuagccaagu

SEQ ID NO: 65059 - RNA, 22 nt, Homo sapiens
augaaaguguguggaaacuuga

SEQ ID NO: 65060 - RNA, 22 nt, Homo sapiens
auggucccauucauucacguau

SEQ ID NO: 65061 - RNA, 22 nt, Homo sapiens
guggaaaauuauugcuguuuuu

SEQ ID NO: 65062 - RNA, 19 nt, Homo sapiens
augcaaugucacaggcugc

SEQ ID NO: 65063 - RNA, 22 nt, Homo sapiens
aucagauggcuaaaacagaaga

SEQ ID NO: 65064 - RNA, 22 nt, Homo sapiens
ucacugaaaccuccaccucucg

SEQ ID NO: 65065 - RNA, 22 nt, Homo sapiens
ugagauauugggaguaauguca

SEQ ID NO: 65066 - RNA, 22 nt, Homo sapiens
aaggcaagauacugguugcuga

SEQ ID NO: 65067 - RNA, 22 nt, Homo sapiens
ugacuugaggcucgcacaaguu

SEQ ID NO: 65068 - RNA, 22 nt, Homo sapiens
aaugcacauauauuuccuuauu

SEQ ID NO: 65069 - RNA, 22 nt, Homo sapiens
cuuggcuucuuuauguggcuau

SEQ ID NO: 65070 - RNA, 22 nt, Homo sapiens
aggagcacaauggucaugugga

SEQ ID NO: 65071 - RNA, 22 nt, Homo sapiens
ugagagucauacaaauaaaaau

SEQ ID NO: 65072 - RNA, 22 nt, Homo sapiens
uuguacuagucauauuuugaaa

SEQ ID NO: 65073 - RNA, 22 nt, Homo sapiens
auagaucuauuuauguaucccu

SEQ ID NO: 65074 - RNA, 22 nt, Homo sapiens
ucagugcuguaccaucuaagga

SEQ ID NO: 65075 - RNA, 22 nt, Homo sapiens
ggauaucauuauuucuagggcu

SEQ ID NO: 65076 - RNA, 22 nt, Homo sapiens
ucugagacuguuucuaacaagc

SEQ ID NO: 65077 - RNA, 22 nt, Homo sapiens
uuucccauuguucugcucugug

SEQ ID NO: 65078 - RNA, 22 nt, Homo sapiens
auccugaugacacagugcugca

SEQ ID NO: 65079 - RNA, 22 nt, Homo sapiens
ucauggggugcuuugcuagauu

SEQ ID NO: 65080 - RNA, 22 nt, Homo sapiens
guaaaguaaagcacaucaaggu

SEQ ID NO: 65081 - RNA, 18 nt, Homo sapiens
aggagcauagugcuauga

SEQ ID NO: 65082 - RNA, 22 nt, Homo sapiens
augaaagguauguuuucuguga

SEQ ID NO: 65083 - RNA, 22 nt, Homo sapiens
agaaacacagguggaauugcuu

SEQ ID NO: 65084 - RNA, 22 nt, Homo sapiens
ucacacugcaucuguuggaauu

SEQ ID NO: 65085 - RNA, 22 nt, Homo sapiens
agcugccagucuuguaaggccu

SEQ ID NO: 65086 - RNA, 22 nt, Homo sapiens
cucauggagaacaucugcuagg

SEQ ID NO: 65087 - RNA, 22 nt, Homo sapiens
uuuguacuugaaacccagggcc

SEQ ID NO: 65088 - RNA, 22 nt, Homo sapiens
ugugucacugaggguuagugua

SEQ ID NO: 65089 - RNA, 18 nt, Homo sapiens
cugccagugugcucuccg

SEQ ID NO: 65090 - RNA, 22 nt, Homo sapiens
cugaaaguuauucaggggcaag

SEQ ID NO: 65091 - RNA, 22 nt, Homo sapiens
uagacccauuguucagagagug

SEQ ID NO: 65092 - RNA, 22 nt, Homo sapiens
gguaucuuggagagagaaguga

SEQ ID NO: 65093 - RNA, 22 nt, Homo sapiens
agaacacugaguucagggucag

SEQ ID NO: 65094 - RNA, 22 nt, Homo sapiens
uuggaagacaaugcugauucuc

SEQ ID NO: 65095 - RNA, 22 nt, Homo sapiens
ggugaucauugucucuaguaug

SEQ ID NO: 65096 - RNA, 22 nt, Homo sapiens
ugcauagaauguucuguaaaua

SEQ ID NO: 65097 - RNA, 19 nt, Homo sapiens
uacuggcucgggaauuuuc

SEQ ID NO: 65098 - RNA, 22 nt, Homo sapiens
augacauugaugcucuggcugg

SEQ ID NO: 65099 - RNA, 22 nt, Homo sapiens
cauuuugcaguuucugucucca

SEQ ID NO: 65100 - RNA, 22 nt, Homo sapiens
gcacauggccacuaggaauaaa

SEQ ID NO: 65101 - RNA, 20 nt, Homo sapiens
ucucccaaacagcaggcccu

SEQ ID NO: 65102 - RNA, 22 nt, Homo sapiens
gugaucuucauggaaggugaaa

SEQ ID NO: 65103 - RNA, 23 nt, Homo sapiens
ugucaucaagaugaggucacacu

SEQ ID NO: 65104 - RNA, 17 nt, Homo sapiens
ugugauugaagucaucc

SEQ ID NO: 65105 - RNA, 22 nt, Homo sapiens
aaugugcacuuggagccuugcu

SEQ ID NO: 65106 - RNA, 22 nt, Homo sapiens
ugccaguauuuuguugaagauu

SEQ ID NO: 65107 - RNA, 22 nt, Homo sapiens
uaacaacauucuaacugacggc

SEQ ID NO: 65108 - RNA, 22 nt, Homo sapiens
acugcacuccagccugugagac

SEQ ID NO: 65109 - RNA, 22 nt, Homo sapiens
ugugauuauuuauagacaguca

SEQ ID NO: 65110 - RNA, 19 nt, Homo sapiens
uuggaauuuuagaguuuga

SEQ ID NO: 65111 - RNA, 22 nt, Homo sapiens
ggcaaaugaagauggagaggcu

SEQ ID NO: 65112 - RNA, 22 nt, Homo sapiens
aaagugcacuuggaagagggcc

SEQ ID NO: 65113 - RNA, 22 nt, Homo sapiens
acacuguuuuaguuauuauagc

SEQ ID NO: 65114 - RNA, 22 nt, Homo sapiens
gggaugaagaagaauaguucgu

SEQ ID NO: 65115 - RNA, 16 nt, Homo sapiens
uuucaucaguuuuaau

SEQ ID NO: 65116 - RNA, 22 nt, Homo sapiens
ugcuggugauucagauucaaau

SEQ ID NO: 65117 - RNA, 22 nt, Homo sapiens
uacuggccuugaacucuggugu

SEQ ID NO: 65118 - RNA, 22 nt, Homo sapiens
auguuagcaucuggcacuaugg

SEQ ID NO: 65119 - RNA, 21 nt, Homo sapiens
uggucccuucagaucggauuu

SEQ ID NO: 65120 - RNA, 20 nt, Homo sapiens
ugauauuucuggaaguggag

SEQ ID NO: 65121 - RNA, 22 nt, Homo sapiens
uugagauggagucucgcacugu

SEQ ID NO: 65122 - RNA, 22 nt, Homo sapiens
ugugacuaguggugaaugacgc

SEQ ID NO: 65123 - RNA, 22 nt, Homo sapiens
cugagcaaaaugaagacacgau

SEQ ID NO: 65124 - RNA, 22 nt, Homo sapiens
auucaucagggauauuggucug

SEQ ID NO: 65125 - RNA, 22 nt, Homo sapiens
ugcucaccugcugcucaccucc

SEQ ID NO: 65126 - RNA, 22 nt, Homo sapiens
uuuaaagcuaaaauauguuuau

SEQ ID NO: 65127 - RNA, 22 nt, Homo sapiens
ucauguaauuuugugucuauga

SEQ ID NO: 65128 - RNA, 22 nt, Homo sapiens
uugagcacugucugugugcagu

SEQ ID NO: 65129 - RNA, 20 nt, Homo sapiens
uaagccacacagucuaaggu

SEQ ID NO: 65130 - RNA, 22 nt, Homo sapiens
ugaaauuauucuuaccaaggug

SEQ ID NO: 65131 - RNA, 20 nt, Homo sapiens
ucaaggcacgaauaaaaguu

SEQ ID NO: 65132 - RNA, 22 nt, Homo sapiens
cuugcacauuacagaucugcau

SEQ ID NO: 65133 - RNA, 22 nt, Homo sapiens
gucaguggauacugucucuguc

SEQ ID NO: 65134 - RNA, 22 nt, Homo sapiens
uuuugguauaugcaggggucuu

SEQ ID NO: 65135 - RNA, 22 nt, Homo sapiens
aaugugcuuucuuucacacagu

SEQ ID NO: 65136 - RNA, 22 nt, Homo sapiens
uaaguugcagguugugauucca

SEQ ID NO: 65137 - RNA, 19 nt, Homo sapiens
uuggucccuuuggguucuu

SEQ ID NO: 65138 - RNA, 22 nt, Homo sapiens
ugaauagacacuaaagacugua

SEQ ID NO: 65139 - RNA, 22 nt, Homo sapiens
aauccaugugcuuuaccauuuu

SEQ ID NO: 65140 - RNA, 22 nt, Homo sapiens
ugcaaauguuauuuugguuucu

SEQ ID NO: 65141 - RNA, 22 nt, Homo sapiens
uaguauguuuauagcauugagu

SEQ ID NO: 65142 - RNA, 17 nt, Homo sapiens
ggaagccuuugguuuaa

SEQ ID NO: 65143 - RNA, 22 nt, Homo sapiens
gagcucaccuuaccucuggagc

SEQ ID NO: 65144 - RNA, 22 nt, Homo sapiens
uccuuggucauggaagagacag

SEQ ID NO: 65145 - RNA, 22 nt, Homo sapiens
aaaguacugggauuggccgggu

SEQ ID NO: 65146 - RNA, 22 nt, Homo sapiens
agugcaguugucacgugccuuc

SEQ ID NO: 65147 - RNA, 22 nt, Homo sapiens
augucaacauagacaguagagu

SEQ ID NO: 65148 - RNA, 22 nt, Homo sapiens
ucuuugauuuuguuacuaagac

SEQ ID NO: 65149 - RNA, 22 nt, Homo sapiens
ucgcauuucccucuguagcuuc

SEQ ID NO: 65150 - RNA, 22 nt, Homo sapiens
ugucuacugaugauguaguuaa

SEQ ID NO: 65151 - RNA, 22 nt, Homo sapiens
augagacuagaagagaauaaua

SEQ ID NO: 65152 - RNA, 22 nt, Homo sapiens
agagaugauuaacauuuuggua

SEQ ID NO: 65153 - RNA, 21 nt, Homo sapiens
uuugcauauguugaaccagcc

SEQ ID NO: 65154 - RNA, 19 nt, Homo sapiens
ucaccaguacacaauacaa

SEQ ID NO: 65155 - RNA, 22 nt, Homo sapiens
ugagaucuguaaagucugacau

SEQ ID NO: 65156 - RNA, 22 nt, Homo sapiens
ucuauggauaaaaugcccucau

SEQ ID NO: 65157 - RNA, 21 nt, Homo sapiens
uugcaaaugcugcugccugau

SEQ ID NO: 65158 - RNA, 22 nt, Homo sapiens
uaugaugcugagguuuggagug

SEQ ID NO: 65159 - RNA, 18 nt, Homo sapiens
uguaaacuaccucaaccu

SEQ ID NO: 65160 - RNA, 22 nt, Homo sapiens
uucacugugaacucauauucag

SEQ ID NO: 65161 - RNA, 22 nt, Homo sapiens
gugacugggaguggugaagaua

SEQ ID NO: 65162 - RNA, 22 nt, Homo sapiens
gugucacuguugagaaguccac

SEQ ID NO: 65163 - RNA, 22 nt, Homo sapiens
gugaaucauaugccagucaugc

SEQ ID NO: 65164 - RNA, 22 nt, Homo sapiens
gaaugcaugaggggaucagaug

SEQ ID NO: 65165 - RNA, 22 nt, Homo sapiens
ugaggagugaacuauuucugau

SEQ ID NO: 65166 - RNA, 22 nt, Homo sapiens
augaagugcaugauaguugguu

SEQ ID NO: 65167 - RNA, 20 nt, Homo sapiens
ugugauuauuuaguugcaug

SEQ ID NO: 65168 - RNA, 22 nt, Homo sapiens
uaacccuuaguaucuguggguu

SEQ ID NO: 65169 - RNA, 22 nt, Homo sapiens
cuggcaaaaagagggcaauaau

SEQ ID NO: 65170 - RNA, 22 nt, Homo sapiens
auggcccuguguggagcugcug

SEQ ID NO: 65171 - RNA, 22 nt, Homo sapiens
cuacugacacuacugcaaucau

SEQ ID NO: 65172 - RNA, 22 nt, Homo sapiens
cugagagugguauguuuaagug

SEQ ID NO: 65173 - RNA, 22 nt, Homo sapiens
ugagaacagauggcuuuauuau

SEQ ID NO: 65174 - RNA, 20 nt, Homo sapiens
uucuugaguuaacaaguuac

SEQ ID NO: 65175 - RNA, 22 nt, Homo sapiens
uagcacaugucagguaauuugc

SEQ ID NO: 65176 - RNA, 22 nt, Homo sapiens
ucagagcaaagacacuuuauca

SEQ ID NO: 65177 - RNA, 22 nt, Homo sapiens
aagugguguuuguauuuaugca

SEQ ID NO: 65178 - RNA, 22 nt, Homo sapiens
auuggccaaugggacgucagca

SEQ ID NO: 65179 - RNA, 22 nt, Homo sapiens
guuggcuguuucccccaaguga

SEQ ID NO: 65180 - RNA, 22 nt, Homo sapiens
uuugugcaugaagagggggugc

SEQ ID NO: 65181 - RNA, 22 nt, Homo sapiens
uaaguaauugcagcaauuugcc

SEQ ID NO: 65182 - RNA, 22 nt, Homo sapiens
cucagugguugauuuauuuauc

SEQ ID NO: 65183 - RNA, 22 nt, Homo sapiens
uagaauguaaauuccaagggca

SEQ ID NO: 65184 - RNA, 22 nt, Homo sapiens
uucaagucaacaagcacuugag

SEQ ID NO: 65185 - RNA, 22 nt, Homo sapiens
uuagauuauugguguuuugcaa

SEQ ID NO: 65186 - RNA, 22 nt, Homo sapiens
ugacaggauggagaucgguauu

SEQ ID NO: 65187 - RNA, 22 nt, Homo sapiens
uuugcaagaugaaaaaguucua

SEQ ID NO: 65188 - RNA, 22 nt, Homo sapiens
uuaugacauugacaguuuuuag

SEQ ID NO: 65189 - RNA, 22 nt, Homo sapiens
gccaaaaugcugggauuacagg

SEQ ID NO: 65190 - RNA, 22 nt, Homo sapiens
guguaaaucaaucuguugucuu

SEQ ID NO: 65191 - RNA, 22 nt, Homo sapiens
uugagauggauagacauagcau

SEQ ID NO: 65192 - RNA, 22 nt, Homo sapiens
uugaaggaggugcucacucucg

SEQ ID NO: 65193 - RNA, 22 nt, Homo sapiens
ucauagaucaaguaauaagaca

SEQ ID NO: 65194 - RNA, 22 nt, Homo sapiens
uuugagcauggaaauggcauga

SEQ ID NO: 65195 - RNA, 22 nt, Homo sapiens
ugucuuuguuaguuguccuagu

SEQ ID NO: 65196 - RNA, 22 nt, Homo sapiens
augaugcugcaguuguugccaa

SEQ ID NO: 65197 - RNA, 22 nt, Homo sapiens
uggcuuuuaucuacucucaacu

SEQ ID NO: 65198 - RNA, 22 nt, Homo sapiens
uucauagugaaaaauucaaagu

SEQ ID NO: 65199 - RNA, 21 nt, Homo sapiens
auggugagaaaguagugucaa

SEQ ID NO: 65200 - RNA, 22 nt, Homo sapiens
gugucacagcuuccaucucggu

SEQ ID NO: 65201 - RNA, 22 nt, Homo sapiens
ggcuguguguuaaaauaggcuu

SEQ ID NO: 65202 - RNA, 22 nt, Homo sapiens
ugagaagacaucagcuuucgga

SEQ ID NO: 65203 - RNA, 22 nt, Homo sapiens
ucagugcuuggcacagagagcu

SEQ ID NO: 65204 - RNA, 22 nt, Homo sapiens
ucacuagggaucacuuuacccg

SEQ ID NO: 65205 - RNA, 22 nt, Homo sapiens
gaggcuagauggggaugugucc

SEQ ID NO: 65206 - RNA, 22 nt, Homo sapiens
uuugagauaucuuccaucagua

SEQ ID NO: 65207 - RNA, 22 nt, Homo sapiens
uccuuggucaaaaagaaagugu

SEQ ID NO: 65208 - RNA, 22 nt, Homo sapiens
ugagaugauagauauguuaauu

SEQ ID NO: 65209 - RNA, 23 nt, Homo sapiens
ccacacuguuuagaauggcauca

SEQ ID NO: 65210 - RNA, 22 nt, Homo sapiens
accucagcccggggaaguugag

SEQ ID NO: 65211 - RNA, 22 nt, Homo sapiens
uaucccuguggacuucccaaca

SEQ ID NO: 65212 - RNA, 22 nt, Homo sapiens
uaucaacaggguggccagugua

SEQ ID NO: 65213 - RNA, 22 nt, Homo sapiens
ccagauguuuucauucagcaag

SEQ ID NO: 65214 - RNA, 20 nt, Homo sapiens
gugagucauuaguaaccaaa

SEQ ID NO: 65215 - RNA, 22 nt, Homo sapiens
auaugcauacauguaugcagga

SEQ ID NO: 65216 - RNA, 22 nt, Homo sapiens
ugccuaggcuggaaugcagugg

SEQ ID NO: 65217 - RNA, 22 nt, Homo sapiens
agugggccccuagaggugaggu

SEQ ID NO: 65218 - RNA, 22 nt, Homo sapiens
ugauuuguuuagugccaaguuu

SEQ ID NO: 65219 - RNA, 21 nt, Homo sapiens
uucucaggguguguccuaccc

SEQ ID NO: 65220 - RNA, 22 nt, Homo sapiens
ucaccaccuuccaggaccacug

SEQ ID NO: 65221 - RNA, 21 nt, Homo sapiens
aggagcauuguugugguggag

SEQ ID NO: 65222 - RNA, 22 nt, Homo sapiens
ugacaugauguuccuacacugu

SEQ ID NO: 65223 - RNA, 22 nt, Homo sapiens
uggcaguuucacauggcucaac

SEQ ID NO: 65224 - RNA, 22 nt, Homo sapiens
uggcaaauagcaauaggagggu

SEQ ID NO: 65225 - RNA, 22 nt, Homo sapiens
agguauguaugucuguacagcg

SEQ ID NO: 65226 - RNA, 22 nt, Homo sapiens
guucaucagggauacuggcuua

SEQ ID NO: 65227 - RNA, 22 nt, Homo sapiens
ucaaaugguccacgugaacauu

SEQ ID NO: 65228 - RNA, 22 nt, Homo sapiens
ugaauacuucguucaaagauaa

SEQ ID NO: 65229 - RNA, 22 nt, Homo sapiens
ucagugaauauauaacagcgau

SEQ ID NO: 65230 - RNA, 22 nt, Homo sapiens
ugauccuguccuuaugauguua

SEQ ID NO: 65231 - RNA, 22 nt, Homo sapiens
cuuaaugcuacggcucuguguu

SEQ ID NO: 65232 - RNA, 22 nt, Homo sapiens
ucauucuuucuguggaggggcu

SEQ ID NO: 65233 - RNA, 22 nt, Homo sapiens
cugcaagaaucguaguauuuga

SEQ ID NO: 65234 - RNA, 22 nt, Homo sapiens
ugacauugggagugaagugaag

SEQ ID NO: 65235 - RNA, 22 nt, Homo sapiens
ggcaaguugcuauucuuuaaug

SEQ ID NO: 65236 - RNA, 22 nt, Homo sapiens
ucugagguaggugcauggauac

SEQ ID NO: 65237 - RNA, 22 nt, Homo sapiens
guucacaguuucuaaucccagc

SEQ ID NO: 65238 - RNA, 22 nt, Homo sapiens
uaaggcacccuucugaguagag

SEQ ID NO: 65239 - RNA, 22 nt, Homo sapiens
uggagucuugcucuguugccca

SEQ ID NO: 65240 - RNA, 22 nt, Homo sapiens
cuaaugcagucaggagaaggaa

SEQ ID NO: 65241 - RNA, 22 nt, Homo sapiens
ucugugcauuacacuuuucuca

SEQ ID NO: 65242 - RNA, 22 nt, Homo sapiens
uuggcaacauagugagaccccc

SEQ ID NO: 65243 - RNA, 22 nt, Homo sapiens
ugcuacccuucgucucucuggu

SEQ ID NO: 65244 - RNA, 22 nt, Homo sapiens
ugagagucacugaccugguaua

SEQ ID NO: 65245 - RNA, 19 nt, Homo sapiens
ugagauccacugaagauuc

SEQ ID NO: 65246 - RNA, 22 nt, Homo sapiens
ugacaguaaacagucuugauua

SEQ ID NO: 65247 - RNA, 18 nt, Homo sapiens
auugcacaccagccuggg

SEQ ID NO: 65248 - RNA, 22 nt, Homo sapiens
ggaaagacuauuguaaaggaug

SEQ ID NO: 65249 - RNA, 22 nt, Homo sapiens
uuguuauguaucucaagauaaa

SEQ ID NO: 65250 - RNA, 22 nt, Homo sapiens
gugcauacucuggagacauugu

SEQ ID NO: 65251 - RNA, 22 nt, Homo sapiens
uauacuguuuucuauaguggcu

SEQ ID NO: 65252 - RNA, 22 nt, Homo sapiens
aaccuucauuccuuucccugcc

SEQ ID NO: 65253 - RNA, 22 nt, Homo sapiens
cuugguuacauuuuccuagaaa

SEQ ID NO: 65254 - RNA, 22 nt, Homo sapiens
ucaguggagcuacaauucuggg

SEQ ID NO: 65255 - RNA, 21 nt, Homo sapiens
cucaaaguacugauauuacag

SEQ ID NO: 65256 - RNA, 22 nt, Homo sapiens
uugaggcuuuugaccucaugug

SEQ ID NO: 65257 - RNA, 22 nt, Homo sapiens
gacuggccauugauacagaggu

SEQ ID NO: 65258 - RNA, 22 nt, Homo sapiens
auccauugcucaagagaaguca

SEQ ID NO: 65259 - RNA, 22 nt, Homo sapiens
ugacagaggucuuuuaauagcu

SEQ ID NO: 65260 - RNA, 22 nt, Homo sapiens
augacccugaccuaagccaauc

SEQ ID NO: 65261 - RNA, 22 nt, Homo sapiens
gcuaugucuguugcucuugggc

SEQ ID NO: 65262 - RNA, 22 nt, Homo sapiens
gcagugugugaggaauuugggu

SEQ ID NO: 65263 - RNA, 22 nt, Homo sapiens
auagugcugcaaugaacauaca

SEQ ID NO: 65264 - RNA, 22 nt, Homo sapiens
uuguacuagaaaauuauucuuu

SEQ ID NO: 65265 - RNA, 18 nt, Homo sapiens
ugaguucauuagacuucc

SEQ ID NO: 65266 - RNA, 22 nt, Homo sapiens
agaauguauauucuguaguugu

SEQ ID NO: 65267 - RNA, 22 nt, Homo sapiens
augcuuguguuggggcagugga

SEQ ID NO: 65268 - RNA, 22 nt, Homo sapiens
uuggcccugcugaccauucccu

SEQ ID NO: 65269 - RNA, 22 nt, Homo sapiens
aaguaauggaguuauuuuauga

SEQ ID NO: 65270 - RNA, 22 nt, Homo sapiens
agcuuguuuucccauaacuaga

SEQ ID NO: 65271 - RNA, 23 nt, Homo sapiens
gcagcaaugucacagggguccgg

SEQ ID NO: 65272 - RNA, 22 nt, Homo sapiens
augaagagaaaguggaucuugg

SEQ ID NO: 65273 - RNA, 22 nt, Homo sapiens
uuucauggacgcaaugccuuuu

SEQ ID NO: 65274 - RNA, 22 nt, Homo sapiens
ugugcuauguuauucacauggg

SEQ ID NO: 65275 - RNA, 22 nt, Homo sapiens
auuauauguguaugugcauacc

SEQ ID NO: 65276 - RNA, 22 nt, Homo sapiens
uugugcauguauauuaguucac

SEQ ID NO: 65277 - RNA, 23 nt, Homo sapiens
uagaauguuuuuccauguuucuu

SEQ ID NO: 65278 - RNA, 22 nt, Homo sapiens
caacacagugaaacccgucucu

SEQ ID NO: 65279 - RNA, 22 nt, Homo sapiens
agcccuuagauggcuccuucca

SEQ ID NO: 65280 - RNA, 22 nt, Homo sapiens
agucacagccuuuuacuuuaga

SEQ ID NO: 65281 - RNA, 22 nt, Homo sapiens
ugagaugaagcuagaagaaugg

SEQ ID NO: 65282 - RNA, 22 nt, Homo sapiens
gugauuuaguagaugcuaguua

SEQ ID NO: 65283 - RNA, 22 nt, Homo sapiens
guuauuguccauuuauuuagca

SEQ ID NO: 65284 - RNA, 20 nt, Homo sapiens
cagagcaaagcaguccuggc

SEQ ID NO: 65285 - RNA, 22 nt, Homo sapiens
uggcaaaauauuuugguuucug

SEQ ID NO: 65286 - RNA, 18 nt, Homo sapiens
augugcaauuuuguauuu

SEQ ID NO: 65287 - RNA, 22 nt, Homo sapiens
ucccugaguaucuaauguguuu

SEQ ID NO: 65288 - RNA, 22 nt, Homo sapiens
uucauagaggacauuacuggag

SEQ ID NO: 65289 - RNA, 17 nt, Homo sapiens
gacauaggaaaaggaga

SEQ ID NO: 65290 - RNA, 21 nt, Homo sapiens
aacuggugugagaugguaugu

SEQ ID NO: 65291 - RNA, 22 nt, Homo sapiens
uuccuacuguucaucaggaacc

SEQ ID NO: 65292 - RNA, 22 nt, Homo sapiens
uauaagacgagcaaaaagcuug

SEQ ID NO: 65293 - RNA, 22 nt, Homo sapiens
uuggccccuccaaaucucaugu

SEQ ID NO: 65294 - RNA, 22 nt, Homo sapiens
ugagacaaaguuguuggauguu

SEQ ID NO: 65295 - RNA, 22 nt, Homo sapiens
uuauucauuaacagggaccaaa

SEQ ID NO: 65296 - RNA, 22 nt, Homo sapiens
ucccuuuguccaacggauccac

SEQ ID NO: 65297 - RNA, 22 nt, Homo sapiens
ugcugguggucccauaugauua

SEQ ID NO: 65298 - RNA, 22 nt, Homo sapiens
ugagaugauuuaauggagccca

SEQ ID NO: 65299 - RNA, 22 nt, Homo sapiens
gaaagacuuucugcuguggaua

SEQ ID NO: 65300 - RNA, 22 nt, Homo sapiens
uggcacaaugacccuugugggc

SEQ ID NO: 65301 - RNA, 22 nt, Homo sapiens
gacauguuucucucuguuuacu

SEQ ID NO: 65302 - RNA, 22 nt, Homo sapiens
gacuggcuguuuucuuuauuau

SEQ ID NO: 65303 - RNA, 22 nt, Homo sapiens
uuguguccccacccaaauuuca

SEQ ID NO: 65304 - RNA, 22 nt, Homo sapiens
gugagagaaugacuauguguuu

SEQ ID NO: 65305 - RNA, 17 nt, Homo sapiens
cccuaguagcugggacu

SEQ ID NO: 65306 - RNA, 22 nt, Homo sapiens
ucucagugaauguggaaaaagc

SEQ ID NO: 65307 - RNA, 22 nt, Homo sapiens
ucugacucugugaugggcccaa

SEQ ID NO: 65308 - RNA, 22 nt, Homo sapiens
aaaggcuucggaucagaaggua

SEQ ID NO: 65309 - RNA, 22 nt, Homo sapiens
aaugucacugugguccuccagu

SEQ ID NO: 65310 - RNA, 22 nt, Homo sapiens
cuuuuugcugcagcaauacugg

SEQ ID NO: 65311 - RNA, 22 nt, Homo sapiens
gauggcaucugagaguguuaga

SEQ ID NO: 65312 - RNA, 21 nt, Homo sapiens
aguucacauggcuccuguguu

SEQ ID NO: 65313 - RNA, 17 nt, Homo sapiens
uuacaggugcugagagu

SEQ ID NO: 65314 - RNA, 22 nt, Homo sapiens
uaaugcaucaugguuggcaaac

SEQ ID NO: 65315 - RNA, 22 nt, Homo sapiens
ugagaucaugccacugcacuuc

SEQ ID NO: 65316 - RNA, 22 nt, Homo sapiens
cuucuugagacuuaggcuuugg

SEQ ID NO: 65317 - RNA, 22 nt, Homo sapiens
gucuggagacuugggucaucaa

SEQ ID NO: 65318 - RNA, 22 nt, Homo sapiens
augugcuuuuuaaacagaugcu

SEQ ID NO: 65319 - RNA, 22 nt, Homo sapiens
augaaaucacugugaugcccua

SEQ ID NO: 65320 - RNA, 22 nt, Homo sapiens
cagugaauuucaggucaagagu

SEQ ID NO: 65321 - RNA, 22 nt, Homo sapiens
ucacacuguuuugauuauuaua

SEQ ID NO: 65322 - RNA, 23 nt, Homo sapiens
uagguuauuugguaaauauaugu

SEQ ID NO: 65323 - RNA, 22 nt, Homo sapiens
acuggcuuuugagaaaaacacu

SEQ ID NO: 65324 - RNA, 22 nt, Homo sapiens
ugagacgaagucuugcucuguu

SEQ ID NO: 65325 - RNA, 22 nt, Homo sapiens
ugcaagcacacccagggauugu

SEQ ID NO: 65326 - RNA, 22 nt, Homo sapiens
cuuuuggugugaagaagcucuu

SEQ ID NO: 65327 - RNA, 20 nt, Homo sapiens
cuuggcuuucuugguguuaa

SEQ ID NO: 65328 - RNA, 23 nt, Homo sapiens
uuugcacuugcuccuucuauggc

SEQ ID NO: 65329 - RNA, 22 nt, Homo sapiens
uaucacacuggaagaaguuaag

SEQ ID NO: 65330 - RNA, 22 nt, Homo sapiens
gcauugcacuuggcauagacug

SEQ ID NO: 65331 - RNA, 22 nt, Homo sapiens
uacaguggcaugucaggugcuu

SEQ ID NO: 65332 - RNA, 22 nt, Homo sapiens
uucuuugcaugaucucaaaguc

SEQ ID NO: 65333 - RNA, 21 nt, Homo sapiens
gugcacaguaguguuuaauag

SEQ ID NO: 65334 - RNA, 22 nt, Homo sapiens
aucacagguacuauggcugaca

SEQ ID NO: 65335 - RNA, 18 nt, Homo sapiens
gauaacaguggacuaugc

SEQ ID NO: 65336 - RNA, 22 nt, Homo sapiens
augaaguauuaggacacauuua

SEQ ID NO: 65337 - RNA, 22 nt, Homo sapiens
uuucugaggccucaccagaagc

SEQ ID NO: 65338 - RNA, 22 nt, Homo sapiens
gaugugaaaucauaguuucuag

SEQ ID NO: 65339 - RNA, 22 nt, Homo sapiens
aggcaugaaauacaugcauuga

SEQ ID NO: 65340 - RNA, 22 nt, Homo sapiens
gaaaacugcuucucuggguuuc

SEQ ID NO: 65341 - RNA, 22 nt, Homo sapiens
ggagcugugauuugaguccaga

SEQ ID NO: 65342 - RNA, 22 nt, Homo sapiens
ugcugcacuuauggcucugagg

SEQ ID NO: 65343 - RNA, 22 nt, Homo sapiens
aggacacugauguaugcugugg

SEQ ID NO: 65344 - RNA, 22 nt, Homo sapiens
aggcagcuguuauauacugagu

SEQ ID NO: 65345 - RNA, 22 nt, Homo sapiens
uuuggcuuaagauugacugcaa

SEQ ID NO: 65346 - RNA, 16 nt, Homo sapiens
uuuuugcagaaaugac

SEQ ID NO: 65347 - RNA, 22 nt, Homo sapiens
gaagacauuuacaugggagacc

SEQ ID NO: 65348 - RNA, 19 nt, Homo sapiens
uccccaguuuuccguucag

SEQ ID NO: 65349 - RNA, 22 nt, Homo sapiens
ucccuacuggggcacugccuag

SEQ ID NO: 65350 - RNA, 18 nt, Homo sapiens
aaacugcuuccuuggccu

SEQ ID NO: 65351 - RNA, 22 nt, Homo sapiens
ucccugagguccuggauuauug

SEQ ID NO: 65352 - RNA, 22 nt, Homo sapiens
caugucuuuuauucugugugau

SEQ ID NO: 65353 - RNA, 23 nt, Homo sapiens
ugcugagaccuagauccuaaaga

SEQ ID NO: 65354 - RNA, 23 nt, Homo sapiens
gugccuucugagccuagucucca

SEQ ID NO: 65355 - RNA, 22 nt, Homo sapiens
uuaagcaguggauuagaauuuu

SEQ ID NO: 65356 - RNA, 22 nt, Homo sapiens
uauuauuguccuucuauaccca

SEQ ID NO: 65357 - RNA, 22 nt, Homo sapiens
ggaugcauucaacuuccaguuc

SEQ ID NO: 65358 - RNA, 18 nt, Homo sapiens
uuuguacuuuuucuaaug

SEQ ID NO: 65359 - RNA, 22 nt, Homo sapiens
uugauauucugagaagcugaag

SEQ ID NO: 65360 - RNA, 22 nt, Homo sapiens
ugcauauuuuauaaagauggaa

SEQ ID NO: 65361 - RNA, 22 nt, Homo sapiens
guggucagaaaucucaguggca

SEQ ID NO: 65362 - RNA, 22 nt, Homo sapiens
gugagauccucucuuauauggg

SEQ ID NO: 65363 - RNA, 22 nt, Homo sapiens
uuggucaucucccuccuuuuag

SEQ ID NO: 65364 - RNA, 22 nt, Homo sapiens
uaucacacaucaugguaaaucu

SEQ ID NO: 65365 - RNA, 22 nt, Homo sapiens
gugcacaacguguagguuuguu

SEQ ID NO: 65366 - RNA, 22 nt, Homo sapiens
aagcuggauuuaguguggagca

SEQ ID NO: 65367 - RNA, 22 nt, Homo sapiens
aaucacuaugccaugaaguaca

SEQ ID NO: 65368 - RNA, 21 nt, Homo sapiens
cacauggaggcagagagugua

SEQ ID NO: 65369 - RNA, 22 nt, Homo sapiens
uaugcuuauaaacauuugucag

SEQ ID NO: 65370 - RNA, 22 nt, Homo sapiens
ugacuagacuugcaagguugca

SEQ ID NO: 65371 - RNA, 22 nt, Homo sapiens
ugccuaguggaaggagagcaaa

SEQ ID NO: 65372 - RNA, 22 nt, Homo sapiens
caguaaauaucugagcgagguc

SEQ ID NO: 65373 - RNA, 22 nt, Homo sapiens
uugugauugagugauccuuguu

SEQ ID NO: 65374 - RNA, 22 nt, Homo sapiens
uagacugguuuagcacugaaua

SEQ ID NO: 65375 - RNA, 22 nt, Homo sapiens
ugcagagucuguccugccugcc

SEQ ID NO: 65376 - RNA, 22 nt, Homo sapiens
ggguaggcaagcggaugucaga

SEQ ID NO: 65377 - RNA, 18 nt, Homo sapiens
ucauagaucaugacagug

SEQ ID NO: 65378 - RNA, 22 nt, Homo sapiens
agaaugugaccuuauuuggaga

SEQ ID NO: 65379 - RNA, 22 nt, Homo sapiens
gcaucacagcuccugugcuggc

SEQ ID NO: 65380 - RNA, 19 nt, Homo sapiens
uuugcauagugagaauaua

SEQ ID NO: 65381 - RNA, 22 nt, Homo sapiens
aaaggauucuaauggaaaugcu

SEQ ID NO: 65382 - RNA, 22 nt, Homo sapiens
cccagugguuacauaaggagua

SEQ ID NO: 65383 - RNA, 22 nt, Homo sapiens
cccaguaaucuugccaguuuuc

SEQ ID NO: 65384 - RNA, 22 nt, Homo sapiens
gucccugcgauugugggauccu

SEQ ID NO: 65385 - RNA, 22 nt, Homo sapiens
uugaagacuauaugauucuuca

SEQ ID NO: 65386 - RNA, 19 nt, Homo sapiens
cuugccccauucauccucu

SEQ ID NO: 65387 - RNA, 22 nt, Homo sapiens
augagauuauguaaagagacca

SEQ ID NO: 65388 - RNA, 22 nt, Homo sapiens
ugccagaugcuggugugagggg

SEQ ID NO: 65389 - RNA, 18 nt, Homo sapiens
ugaaacacauuuuuuccu

SEQ ID NO: 65390 - RNA, 22 nt, Homo sapiens
uucagaguggacagaaauuaag

SEQ ID NO: 65391 - RNA, 22 nt, Homo sapiens
acccuggaggucuacagugcag

SEQ ID NO: 65392 - RNA, 16 nt, Homo sapiens
uacaauguagaaaaca

SEQ ID NO: 65393 - RNA, 22 nt, Homo sapiens
ugaucugucacuuaucacauuu

SEQ ID NO: 65394 - RNA, 21 nt, Homo sapiens
cacuggguucaggcuugugga

SEQ ID NO: 65395 - RNA, 19 nt, Homo sapiens
caauacuucuuggcauaca

SEQ ID NO: 65396 - RNA, 22 nt, Homo sapiens
cuucuguuaguucugauaacuu

SEQ ID NO: 65397 - RNA, 22 nt, Homo sapiens
cuggcaaauaguagagccagga

SEQ ID NO: 65398 - RNA, 22 nt, Homo sapiens
uugugaaaaaccucucguggaa

SEQ ID NO: 65399 - RNA, 22 nt, Homo sapiens
gugaccaaagauagcucaaguu

SEQ ID NO: 65400 - RNA, 21 nt, Homo sapiens
uggcaacauggauggauucug

SEQ ID NO: 65401 - RNA, 22 nt, Homo sapiens
ugggaugaugaaaaggcuuucu

SEQ ID NO: 65402 - RNA, 22 nt, Homo sapiens
caguucaugguaggcaccauag

SEQ ID NO: 65403 - RNA, 22 nt, Homo sapiens
ugaagggcauuguuuugccaaa

SEQ ID NO: 65404 - RNA, 22 nt, Homo sapiens
aaaagucuguagugaaagguga

SEQ ID NO: 65405 - RNA, 22 nt, Homo sapiens
ucacuggucuaaguggaggggg

SEQ ID NO: 65406 - RNA, 22 nt, Homo sapiens
acaguguguguguucaccuaga

SEQ ID NO: 65407 - RNA, 22 nt, Homo sapiens
ugugcaccucuucacacaggga

SEQ ID NO: 65408 - RNA, 19 nt, Homo sapiens
uuaagugugauaucucagu

SEQ ID NO: 65409 - RNA, 22 nt, Homo sapiens
cagagcacuaaagguaaaaggc

SEQ ID NO: 65410 - RNA, 22 nt, Homo sapiens
auggcuuugggcugcucugccc

SEQ ID NO: 65411 - RNA, 22 nt, Homo sapiens
uaucccuuagagcggggugguu

SEQ ID NO: 65412 - RNA, 22 nt, Homo sapiens
gagcaucauucaacaaaagucu

SEQ ID NO: 65413 - RNA, 22 nt, Homo sapiens
gugaacagcagaugagugagug

SEQ ID NO: 65414 - RNA, 22 nt, Homo sapiens
aaucauauugucugccaagagg

SEQ ID NO: 65415 - RNA, 22 nt, Homo sapiens
uuaacagugucaaucuguagua

SEQ ID NO: 65416 - RNA, 22 nt, Homo sapiens
ugaagugggaaaugaguauuaa

SEQ ID NO: 65417 - RNA, 22 nt, Homo sapiens
uuggcuauagauacauggauua

SEQ ID NO: 65418 - RNA, 22 nt, Homo sapiens
uugagauggagucucacgcauu

SEQ ID NO: 65419 - RNA, 22 nt, Homo sapiens
ucccaguguguagcuugucucu

SEQ ID NO: 65420 - RNA, 22 nt, Homo sapiens
uuaaugcuuggggaguaguucu

SEQ ID NO: 65421 - RNA, 21 nt, Homo sapiens
uggucccauaagauuacaaug

SEQ ID NO: 65422 - RNA, 20 nt, Homo sapiens
ugacaucagcaauguaauaa

SEQ ID NO: 65423 - RNA, 22 nt, Homo sapiens
uauguuaucaaaaagcuaagga

SEQ ID NO: 65424 - RNA, 22 nt, Homo sapiens
aaacucuguagcagagacagau

SEQ ID NO: 65425 - RNA, 22 nt, Homo sapiens
uugucacauggggcggcugccc

SEQ ID NO: 65426 - RNA, 21 nt, Homo sapiens
uggucccauaagauuauaaug

SEQ ID NO: 65427 - RNA, 21 nt, Homo sapiens
aucagagacccaggcuuccuc

SEQ ID NO: 65428 - RNA, 22 nt, Homo sapiens
cugcagaucuuggggcuugcca

SEQ ID NO: 65429 - RNA, 22 nt, Homo sapiens
ggucacauugcuagcauggguu

SEQ ID NO: 65430 - RNA, 20 nt, Homo sapiens
uaagugcuugaugaaugaac

SEQ ID NO: 65431 - RNA, 22 nt, Homo sapiens
ugcccuguaucccacuguuuca

SEQ ID NO: 65432 - RNA, 22 nt, Homo sapiens
ugcacaguccagugcccacuga

SEQ ID NO: 65433 - RNA, 22 nt, Homo sapiens
uuguggcuuaucucauuuagcg

SEQ ID NO: 65434 - RNA, 22 nt, Homo sapiens
cacauguuugcuacauuuuucu

SEQ ID NO: 65435 - RNA, 22 nt, Homo sapiens
uguauauguuuguacauauguc

SEQ ID NO: 65436 - RNA, 22 nt, Homo sapiens
ucagugaacgaggaggagggug

SEQ ID NO: 65437 - RNA, 22 nt, Homo sapiens
uugagcacaggaguuuugagac

SEQ ID NO: 65438 - RNA, 19 nt, Homo sapiens
aagaugauguuugggcuaa

SEQ ID NO: 65439 - RNA, 22 nt, Homo sapiens
auagugaacuuugugagaacaa

SEQ ID NO: 65440 - RNA, 22 nt, Homo sapiens
gcuggugaaggcugaaaagugg

SEQ ID NO: 65441 - RNA, 19 nt, Homo sapiens
ucugugcuugucccccugu

SEQ ID NO: 65442 - RNA, 22 nt, Homo sapiens
ugccaacaugccuggcuguuuu

SEQ ID NO: 65443 - RNA, 20 nt, Homo sapiens
uaucacaggucagaaacccu

SEQ ID NO: 65444 - RNA, 22 nt, Homo sapiens
gaguucauaucuaugagugugc

SEQ ID NO: 65445 - RNA, 22 nt, Homo sapiens
uucucacaguacagggagcucu

SEQ ID NO: 65446 - RNA, 22 nt, Homo sapiens
aaaguucuguugauagugcuga

SEQ ID NO: 65447 - RNA, 22 nt, Homo sapiens
ugacuacauaaguaaucucaaa

SEQ ID NO: 65448 - RNA, 20 nt, Homo sapiens
agcagccacagauuccucag

SEQ ID NO: 65449 - RNA, 22 nt, Homo sapiens
caaugugcuuggggcacaugag

SEQ ID NO: 65450 - RNA, 22 nt, Homo sapiens
augaggcaggaaaggcguaucu

SEQ ID NO: 65451 - RNA, 22 nt, Homo sapiens
uugaaauguuuagaaguuugga

SEQ ID NO: 65452 - RNA, 22 nt, Homo sapiens
ccucacaaccuuuauugaagag

SEQ ID NO: 65453 - RNA, 22 nt, Homo sapiens
auugagcaaggucuccuaguau

SEQ ID NO: 65454 - RNA, 22 nt, Homo sapiens
guggacagagacuaaauguugu

SEQ ID NO: 65455 - RNA, 19 nt, Homo sapiens
uagaugucuuugcauagau

SEQ ID NO: 65456 - RNA, 22 nt, Homo sapiens
agcugcaaagggagagaugauu

SEQ ID NO: 65457 - RNA, 22 nt, Homo sapiens
uagcauggaggcggccauagug

SEQ ID NO: 65458 - RNA, 22 nt, Homo sapiens
uugaaagucuaggcuuacagua

SEQ ID NO: 65459 - RNA, 22 nt, Homo sapiens
uuaaggaaagcauuuaauucag

SEQ ID NO: 65460 - RNA, 22 nt, Homo sapiens
guucacacuugcaaccccagca

SEQ ID NO: 65461 - RNA, 22 nt, Homo sapiens
ugacaucaccaccuccgucauc

SEQ ID NO: 65462 - RNA, 22 nt, Homo sapiens
uugagauguauguauauaaugu

SEQ ID NO: 65463 - RNA, 22 nt, Homo sapiens
augagggcggacgcccuggaga

SEQ ID NO: 65464 - RNA, 19 nt, Homo sapiens
ccaguguucugauugcacu

SEQ ID NO: 65465 - RNA, 22 nt, Homo sapiens
ugaaauacuuuggcucuuuguu

SEQ ID NO: 65466 - RNA, 22 nt, Homo sapiens
uacuagaaccuuauucagagug

SEQ ID NO: 65467 - RNA, 22 nt, Homo sapiens
agcugcauucguaucauauugu

SEQ ID NO: 65468 - RNA, 22 nt, Homo sapiens
aagagaugaagguccugacugu

SEQ ID NO: 65469 - RNA, 22 nt, Homo sapiens
gaguauguauaugagugugucu

SEQ ID NO: 65470 - RNA, 23 nt, Homo sapiens
uugggcaaaucacuaacgucucc

SEQ ID NO: 65471 - RNA, 22 nt, Homo sapiens
uuuggcaauuugacuguauagg

SEQ ID NO: 65472 - RNA, 22 nt, Homo sapiens
uaacagucaagguuugaccagg

SEQ ID NO: 65473 - RNA, 22 nt, Homo sapiens
caaagucuauucuacccuuacc

SEQ ID NO: 65474 - RNA, 22 nt, Homo sapiens
uucaaguaagaaagacaucagg

SEQ ID NO: 65475 - RNA, 22 nt, Homo sapiens
ugaagaucuuaggagcugaggg

SEQ ID NO: 65476 - RNA, 22 nt, Homo sapiens
uugaacuagaaccugcaaauuu

SEQ ID NO: 65477 - RNA, 22 nt, Homo sapiens
uagugcuagaugacuuugccau

SEQ ID NO: 65478 - RNA, 22 nt, Homo sapiens
aaaugcugcuuuggccucuucu

SEQ ID NO: 65479 - RNA, 18 nt, Homo sapiens
gagcaccuuuuuugcaga

SEQ ID NO: 65480 - RNA, 22 nt, Homo sapiens
ugauaugucacuugaucauggu

SEQ ID NO: 65481 - RNA, 22 nt, Homo sapiens
cacaguagaauagagcacuagg

SEQ ID NO: 65482 - RNA, 22 nt, Homo sapiens
aagagcauuauuuaguaauuuc

SEQ ID NO: 65483 - RNA, 17 nt, Homo sapiens
gcccuuugugccucuuc

SEQ ID NO: 65484 - RNA, 20 nt, Homo sapiens
aucaaagacuuagaggggga

SEQ ID NO: 65485 - RNA, 22 nt, Homo sapiens
uuccaguugugagcuauccggg

SEQ ID NO: 65486 - RNA, 22 nt, Homo sapiens
uugguuaccuucagaaaugagu

SEQ ID NO: 65487 - RNA, 22 nt, Homo sapiens
ugauaguguccugugccacauu

SEQ ID NO: 65488 - RNA, 22 nt, Homo sapiens
ugagagaugaacucugauaugu

SEQ ID NO: 65489 - RNA, 22 nt, Homo sapiens
ugccaagaacauuuucuguuuu

SEQ ID NO: 65490 - RNA, 19 nt, Homo sapiens
ugugacugggccagccuag

SEQ ID NO: 65491 - RNA, 22 nt, Homo sapiens
uucccugaaauauucacuuuca

SEQ ID NO: 65492 - RNA, 22 nt, Homo sapiens
uucuuagucauguaauagucca

SEQ ID NO: 65493 - RNA, 22 nt, Homo sapiens
uggaaaauuaggggagguuaua

SEQ ID NO: 65494 - RNA, 22 nt, Homo sapiens
gcccugagauucuuggauucug

SEQ ID NO: 65495 - RNA, 22 nt, Homo sapiens
aaaugcucuguggguaguaaug

SEQ ID NO: 65496 - RNA, 22 nt, Homo sapiens
uuugugcaaacuaggauugcga

SEQ ID NO: 65497 - RNA, 22 nt, Homo sapiens
ugcaaauguuaguaacaccacu

SEQ ID NO: 65498 - RNA, 22 nt, Homo sapiens
guccugaagaccuuccucugga

SEQ ID NO: 65499 - RNA, 22 nt, Homo sapiens
cuauuagguuggugcaaaagua

SEQ ID NO: 65500 - RNA, 22 nt, Homo sapiens
cugagauggagucucgcauugu

SEQ ID NO: 65501 - RNA, 22 nt, Homo sapiens
uugagcucuucuagcaauucua

SEQ ID NO: 65502 - RNA, 22 nt, Homo sapiens
augaccagagagugcgcagggu

SEQ ID NO: 65503 - RNA, 22 nt, Homo sapiens
ugcaaaugucaaggguuagugu

SEQ ID NO: 65504 - RNA, 22 nt, Homo sapiens
aagucaguuugggagaagcuau

SEQ ID NO: 65505 - RNA, 22 nt, Homo sapiens
gcaagacaugucuaagguuuaa

SEQ ID NO: 65506 - RNA, 22 nt, Homo sapiens
gcagcacauggcagaacauauu

SEQ ID NO: 65507 - RNA, 22 nt, Homo sapiens
uaaaugcuuaauugaaugugga

SEQ ID NO: 65508 - RNA, 19 nt, Homo sapiens
ucacacuguggcuucuuua

SEQ ID NO: 65509 - RNA, 22 nt, Homo sapiens
aucugcaaauaaugaagauugg

SEQ ID NO: 65510 - RNA, 22 nt, Homo sapiens
ucagauguuugagaaguauacu

SEQ ID NO: 65511 - RNA, 22 nt, Homo sapiens
ugcauauguugagaugcauauu

SEQ ID NO: 65512 - RNA, 22 nt, Homo sapiens
ugugacucuggcacauggugag

SEQ ID NO: 65513 - RNA, 22 nt, Homo sapiens
gcucugguuacaaaggcaaauu

SEQ ID NO: 65514 - RNA, 22 nt, Homo sapiens
ugucacugugcagucaugcauu

SEQ ID NO: 65515 - RNA, 18 nt, Homo sapiens
uaauaacugugaccuuga

SEQ ID NO: 65516 - RNA, 22 nt, Homo sapiens
uaaugcauguaaugggcugaua

SEQ ID NO: 65517 - RNA, 22 nt, Homo sapiens
augaaagugauaaaugucucua

SEQ ID NO: 65518 - RNA, 22 nt, Homo sapiens
ucaguggacuuagucuuucccc

SEQ ID NO: 65519 - RNA, 22 nt, Homo sapiens
aggaauggaaacuuuugauggu

SEQ ID NO: 65520 - RNA, 22 nt, Homo sapiens
uaugaaagcuacuucucacaau

SEQ ID NO: 65521 - RNA, 22 nt, Homo sapiens
guguaaaacaauuagaggauuu

SEQ ID NO: 65522 - RNA, 22 nt, Homo sapiens
ggagaugauuaugaaucacuua

SEQ ID NO: 65523 - RNA, 22 nt, Homo sapiens
gugcacaacaugcaguuuuguu

SEQ ID NO: 65524 - RNA, 22 nt, Homo sapiens
uguaaaucuauuuuuaguguuu

SEQ ID NO: 65525 - RNA, 22 nt, Homo sapiens
ggcccugauacaaguaaggucu

SEQ ID NO: 65526 - RNA, 22 nt, Homo sapiens
cccugagcagccugaguuuccc

SEQ ID NO: 65527 - RNA, 22 nt, Homo sapiens
ugauggcauuucauguuuguaa

SEQ ID NO: 65528 - RNA, 22 nt, Homo sapiens
cagguacuucugggcugagcag

SEQ ID NO: 65529 - RNA, 22 nt, Homo sapiens
ggagucugacuuauaggaaccu

SEQ ID NO: 65530 - RNA, 22 nt, Homo sapiens
ucaguggagagcuuccaggauu

SEQ ID NO: 65531 - RNA, 22 nt, Homo sapiens
agcgccacugcacuccagccug

SEQ ID NO: 65532 - RNA, 23 nt, Homo sapiens
ucacacuuaagagaaaugcagcu

SEQ ID NO: 65533 - RNA, 22 nt, Homo sapiens
uugugaaaucuaggcagagguu

SEQ ID NO: 65534 - RNA, 22 nt, Homo sapiens
aagggaauguuguagcugguuu

SEQ ID NO: 65535 - RNA, 22 nt, Homo sapiens
ugaauucuguccaaaauaacug

SEQ ID NO: 65536 - RNA, 22 nt, Homo sapiens
cacauguucaggagcacuuaga

SEQ ID NO: 65537 - RNA, 22 nt, Homo sapiens
uuccuggaggggaaguguccaa

SEQ ID NO: 65538 - RNA, 22 nt, Homo sapiens
gagacagugucagccauugaaa

SEQ ID NO: 65539 - RNA, 22 nt, Homo sapiens
aauggcuucuuauugugguuca

SEQ ID NO: 65540 - RNA, 22 nt, Homo sapiens
ugacaggagauuaugugauguu

SEQ ID NO: 65541 - RNA, 22 nt, Homo sapiens
ucugagaucaugucugugcugu

SEQ ID NO: 65542 - RNA, 22 nt, Homo sapiens
ugucacugugaguuugacugcu

SEQ ID NO: 65543 - RNA, 21 nt, Homo sapiens
cuuugcacugcuccucagcuc

SEQ ID NO: 65544 - RNA, 23 nt, Homo sapiens
ccaguauuuauguaaggaagugu

SEQ ID NO: 65545 - RNA, 22 nt, Homo sapiens
ugcugcacaguucuuaagauua

SEQ ID NO: 65546 - RNA, 22 nt, Homo sapiens
uugauuagauccaguugauuga

SEQ ID NO: 65547 - RNA, 22 nt, Homo sapiens
agcacaguuaaaugaggcuucu

SEQ ID NO: 65548 - RNA, 22 nt, Homo sapiens
cugauuguagagccccagggcu

SEQ ID NO: 65549 - RNA, 21 nt, Homo sapiens
auugcacaauauacccaugua

SEQ ID NO: 65550 - RNA, 22 nt, Homo sapiens
auguagauaucaagaggcauau

SEQ ID NO: 65551 - RNA, 22 nt, Homo sapiens
agggagcaaaguggucuuucuc

SEQ ID NO: 65552 - RNA, 18 nt, Homo sapiens
uuuggcuguucaugacuc

SEQ ID NO: 65553 - RNA, 22 nt, Homo sapiens
gugagguguuaaccaaccugug

SEQ ID NO: 65554 - RNA, 22 nt, Homo sapiens
acgugcaugcacacacaugcgc

SEQ ID NO: 65555 - RNA, 22 nt, Homo sapiens
gugagaugguaucucauugugg

SEQ ID NO: 65556 - RNA, 22 nt, Homo sapiens
uacagaauucugucccuugagu

SEQ ID NO: 65557 - RNA, 22 nt, Homo sapiens
uucuugcuguauccucacaugg

SEQ ID NO: 65558 - RNA, 22 nt, Homo sapiens
ucucugguuuucaaagcaguau

SEQ ID NO: 65559 - RNA, 22 nt, Homo sapiens
ggacaaaguauuuucaaaugua

SEQ ID NO: 65560 - RNA, 22 nt, Homo sapiens
augccagggagaauuguucaag

SEQ ID NO: 65561 - RNA, 21 nt, Homo sapiens
gagaaucaucauggcugcaua

SEQ ID NO: 65562 - RNA, 22 nt, Homo sapiens
ugaaaugauuauaugguguuug

SEQ ID NO: 65563 - RNA, 22 nt, Homo sapiens
aagugcugggauuggccgggca

SEQ ID NO: 65564 - RNA, 22 nt, Homo sapiens
ugaggucacuuguuuuaugcuu

SEQ ID NO: 65565 - RNA, 22 nt, Homo sapiens
uuccagcugggggcaacucugc

SEQ ID NO: 65566 - RNA, 19 nt, Homo sapiens
uugagaugugaacucacac

SEQ ID NO: 65567 - RNA, 22 nt, Homo sapiens
aucugcauuagggugaagaccu

SEQ ID NO: 65568 - RNA, 22 nt, Homo sapiens
aucaccauguguacauuagacc

SEQ ID NO: 65569 - RNA, 18 nt, Homo sapiens
aggaaugguaauacuuca

SEQ ID NO: 65570 - RNA, 21 nt, Homo sapiens
ccagugguuggaaacuauggg

SEQ ID NO: 65571 - RNA, 22 nt, Homo sapiens
ucuuuguucaggagccaacucc

SEQ ID NO: 65572 - RNA, 22 nt, Homo sapiens
uggucccaugaacuuuagguca

SEQ ID NO: 65573 - RNA, 22 nt, Homo sapiens
auugcuauuauuugaccauugu

SEQ ID NO: 65574 - RNA, 22 nt, Homo sapiens
uggaccccuucuccuauuaaaa

SEQ ID NO: 65575 - RNA, 22 nt, Homo sapiens
ucuggccuccuaugagaaucga

SEQ ID NO: 65576 - RNA, 22 nt, Homo sapiens
uucucugggacauaggucgggu

SEQ ID NO: 65577 - RNA, 22 nt, Homo sapiens
cugugauuauauaguuaaggua

SEQ ID NO: 65578 - RNA, 22 nt, Homo sapiens
agcugguauuuugucgaggacu

SEQ ID NO: 65579 - RNA, 22 nt, Homo sapiens
gugggaugcaaguaaaauuguc

SEQ ID NO: 65580 - RNA, 21 nt, Homo sapiens
cucucugcuuaugaauaguga

SEQ ID NO: 65581 - RNA, 22 nt, Homo sapiens
gucuccgagccguguggagccg

SEQ ID NO: 65582 - RNA, 22 nt, Homo sapiens
gagcuggacuucuuaccuuuuc

SEQ ID NO: 65583 - RNA, 22 nt, Homo sapiens
aaagugcaguauuugggcagaa

SEQ ID NO: 65584 - RNA, 17 nt, Homo sapiens
ucccauguuucuucuac

SEQ ID NO: 65585 - RNA, 22 nt, Homo sapiens
ucucugagaccacuccaaacuc

SEQ ID NO: 65586 - RNA, 22 nt, Homo sapiens
aucaaaguaucucaauauggua

SEQ ID NO: 65587 - RNA, 22 nt, Homo sapiens
gcauggagaaggggacugauuc

SEQ ID NO: 65588 - RNA, 22 nt, Homo sapiens
aagggaaugcuuccaguuugug

SEQ ID NO: 65589 - RNA, 22 nt, Homo sapiens
guggaauuauagagacaucuug

SEQ ID NO: 65590 - RNA, 20 nt, Homo sapiens
gccacaguuaagcuucugcc

SEQ ID NO: 65591 - RNA, 21 nt, Homo sapiens
ugcauaucucuaaugaccagu

SEQ ID NO: 65592 - RNA, 22 nt, Homo sapiens
auguugcuugaaggcauuuugu

SEQ ID NO: 65593 - RNA, 22 nt, Homo sapiens
uuuuccagugggacucccauua

SEQ ID NO: 65594 - RNA, 22 nt, Homo sapiens
gucccagagauauugugucuuu

SEQ ID NO: 65595 - RNA, 22 nt, Homo sapiens
ugagaaugacugggcaugcugc

SEQ ID NO: 65596 - RNA, 22 nt, Homo sapiens
ucuuugagugcccugagucccu

SEQ ID NO: 65597 - RNA, 22 nt, Homo sapiens
acccaguguucaacauucacau

SEQ ID NO: 65598 - RNA, 20 nt, Homo sapiens
cucacagacagcuucuuucu

SEQ ID NO: 65599 - RNA, 22 nt, Homo sapiens
uuauaaacaugaagauuugggg

SEQ ID NO: 65600 - RNA, 22 nt, Homo sapiens
agagccacauuaaauaugggaa

SEQ ID NO: 65601 - RNA, 22 nt, Homo sapiens
uaaggcaaguuuuuaguggaca

SEQ ID NO: 65602 - RNA, 22 nt, Homo sapiens
uuaggagacuggauaucucuuu

SEQ ID NO: 65603 - RNA, 22 nt, Homo sapiens
agauauguuauugauguuaaug

SEQ ID NO: 65604 - RNA, 22 nt, Homo sapiens
ugagauaggaucuugcucuguu

SEQ ID NO: 65605 - RNA, 19 nt, Homo sapiens
cccagugucagagaagggu

SEQ ID NO: 65606 - RNA, 22 nt, Homo sapiens
uucccugagcaucuguugagcc

SEQ ID NO: 65607 - RNA, 22 nt, Homo sapiens
uuuacugugggguuucuuagag

SEQ ID NO: 65608 - RNA, 22 nt, Homo sapiens
uuguguccccacucaaauuaca

SEQ ID NO: 65609 - RNA, 22 nt, Homo sapiens
aauacugugauaucgagcgauu

SEQ ID NO: 65610 - RNA, 22 nt, Homo sapiens
acaaaguauggaauguuggugu

SEQ ID NO: 65611 - RNA, 23 nt, Homo sapiens
uaucacacuuucucugugccaca

SEQ ID NO: 65612 - RNA, 20 nt, Homo sapiens
uugcacagagaaggaggcag

SEQ ID NO: 65613 - RNA, 22 nt, Homo sapiens
aagaugcagaagcccagauguu

SEQ ID NO: 65614 - RNA, 22 nt, Homo sapiens
uuugcacauauuugggcaaaag

SEQ ID NO: 65615 - RNA, 22 nt, Homo sapiens
ugcauacacaagcauacaugua

SEQ ID NO: 65616 - RNA, 22 nt, Homo sapiens
aagggagcugcauaaucuugug

SEQ ID NO: 65617 - RNA, 22 nt, Homo sapiens
ugacuuuagaauuuuauccaga

SEQ ID NO: 65618 - RNA, 22 nt, Homo sapiens
uaaugugcuucucuaccauagg

SEQ ID NO: 65619 - RNA, 22 nt, Homo sapiens
aagucacugagacuuguggcug

SEQ ID NO: 65620 - RNA, 20 nt, Homo sapiens
auagcauugauggacucaaa

SEQ ID NO: 65621 - RNA, 22 nt, Homo sapiens
ugagaauauuugaagauguuag

SEQ ID NO: 65622 - RNA, 19 nt, Homo sapiens
ccaguguugccagagcuga

SEQ ID NO: 65623 - RNA, 22 nt, Homo sapiens
aaaugacuuuuuaugcagagua

SEQ ID NO: 65624 - RNA, 22 nt, Homo sapiens
ucuugguugaaaauucauaaua

SEQ ID NO: 65625 - RNA, 22 nt, Homo sapiens
aucccaguaaaaauggcuucua

SEQ ID NO: 65626 - RNA, 19 nt, Homo sapiens
auaaaugccuacaagggug

SEQ ID NO: 65627 - RNA, 20 nt, Homo sapiens
gugggcaaauccuuuccucu

SEQ ID NO: 65628 - RNA, 22 nt, Homo sapiens
augacuggaacagcaauuuaca

SEQ ID NO: 65629 - RNA, 22 nt, Homo sapiens
gggaagugugguuucuuuacag

SEQ ID NO: 65630 - RNA, 22 nt, Homo sapiens
cuggagcauugguggauuuguu

SEQ ID NO: 65631 - RNA, 23 nt, Homo sapiens
cucccugaacaugacacaccaga

SEQ ID NO: 65632 - RNA, 22 nt, Homo sapiens
ugcaaaugcugcuauuucucuu

SEQ ID NO: 65633 - RNA, 22 nt, Homo sapiens
ugacuauaucucuguauaaacu

SEQ ID NO: 65634 - RNA, 19 nt, Homo sapiens
augugguuagcaugacugc

SEQ ID NO: 65635 - RNA, 20 nt, Homo sapiens
agagugcugucuguccugag

SEQ ID NO: 65636 - RNA, 22 nt, Homo sapiens
aaggaagcuagcaggaauuggu

SEQ ID NO: 65637 - RNA, 22 nt, Homo sapiens
gcagugacaugugccaguuuau

SEQ ID NO: 65638 - RNA, 22 nt, Homo sapiens
uagacaacugaaacacugugca

SEQ ID NO: 65639 - RNA, 22 nt, Homo sapiens
aaauccauuuguucagcuaugc

SEQ ID NO: 65640 - RNA, 22 nt, Homo sapiens
uugucuccuagacgaccaggcg

SEQ ID NO: 65641 - RNA, 22 nt, Homo sapiens
gugcacaugguagguauugagu

SEQ ID NO: 65642 - RNA, 22 nt, Homo sapiens
aauagcuguuuuuaauuccugc

SEQ ID NO: 65643 - RNA, 22 nt, Homo sapiens
gaugaggcuagagacaugugua

SEQ ID NO: 65644 - RNA, 22 nt, Homo sapiens
uaucacacgccuugcuucauuu

SEQ ID NO: 65645 - RNA, 22 nt, Homo sapiens
augguacuagaguaagaauugu

SEQ ID NO: 65646 - RNA, 22 nt, Homo sapiens
gucacugagcagaaggaagcga

SEQ ID NO: 65647 - RNA, 22 nt, Homo sapiens
ucacugaaaccuccgccuucug

SEQ ID NO: 65648 - RNA, 23 nt, Homo sapiens
uucuaucaggcccaggagcccug

SEQ ID NO: 65649 - RNA, 22 nt, Homo sapiens
uuuggcuguuucuggacuaaga

SEQ ID NO: 65650 - RNA, 22 nt, Homo sapiens
caaggcacagccccuacuuccu

SEQ ID NO: 65651 - RNA, 22 nt, Homo sapiens
uucaggcaccauggucauugau

SEQ ID NO: 65652 - RNA, 22 nt, Homo sapiens
uguccugaagcuuuguuaugua

SEQ ID NO: 65653 - RNA, 22 nt, Homo sapiens
uccauagacauuuuaagguagu

SEQ ID NO: 65654 - RNA, 18 nt, Homo sapiens
ucuggcuucuuuguucca

SEQ ID NO: 65655 - RNA, 22 nt, Homo sapiens
aguaccauuccguuggagcugg

SEQ ID NO: 65656 - RNA, 22 nt, Homo sapiens
augucuuucauagagacccaga

SEQ ID NO: 65657 - RNA, 22 nt, Homo sapiens
cuuggcauuguguugauagaag

SEQ ID NO: 65658 - RNA, 22 nt, Homo sapiens
uucaccuugcccacagcagucu

SEQ ID NO: 65659 - RNA, 22 nt, Homo sapiens
uggucuuuucaacaaaugguau

SEQ ID NO: 65660 - RNA, 22 nt, Homo sapiens
augugcaaagcacuguucagca

SEQ ID NO: 65661 - RNA, 22 nt, Homo sapiens
uuggagugugagagcagccugg

SEQ ID NO: 65662 - RNA, 22 nt, Homo sapiens
gugcaugcaucuuuauaguagc

SEQ ID NO: 65663 - RNA, 22 nt, Homo sapiens
ugaguucaauuguauuuuauua

SEQ ID NO: 65664 - RNA, 22 nt, Homo sapiens
uggaucuguucuauuuaucuga

SEQ ID NO: 65665 - RNA, 22 nt, Homo sapiens
auugagcaauuccuaugugcuu

SEQ ID NO: 65666 - RNA, 22 nt, Homo sapiens
ugguaaaaugucauuuaccaga

SEQ ID NO: 65667 - RNA, 22 nt, Homo sapiens
guacaguggguguagggaccag

SEQ ID NO: 65668 - RNA, 22 nt, Homo sapiens
gcugcacuuuaaggcauccccu

SEQ ID NO: 65669 - RNA, 18 nt, Homo sapiens
ugacaucauuuagaaagg

SEQ ID NO: 65670 - RNA, 22 nt, Homo sapiens
ucucccauccaugaacuucugu

SEQ ID NO: 65671 - RNA, 19 nt, Homo sapiens
augauugucuauggaggaa

SEQ ID NO: 65672 - RNA, 22 nt, Homo sapiens
ucccugagcaaaguuuucugua

SEQ ID NO: 65673 - RNA, 22 nt, Homo sapiens
ggagucugauguucuaaggcag

SEQ ID NO: 65674 - RNA, 22 nt, Homo sapiens
uggcaacaucuggggacauguu

SEQ ID NO: 65675 - RNA, 22 nt, Homo sapiens
ucacuuugacggccaacuucua

SEQ ID NO: 65676 - RNA, 23 nt, Homo sapiens
uugaggcauguaccaucaauauc

SEQ ID NO: 65677 - RNA, 22 nt, Homo sapiens
caaauugcuuguggaggauaau

SEQ ID NO: 65678 - RNA, 22 nt, Homo sapiens
augagauauuuuauaagaucau

SEQ ID NO: 65679 - RNA, 22 nt, Homo sapiens
uuuuagcuuuucccaggacucc

SEQ ID NO: 65680 - RNA, 22 nt, Homo sapiens
uucccugaguaucuuaccaugg

SEQ ID NO: 65681 - RNA, 22 nt, Homo sapiens
uaucucuuuucauguguaaaug

SEQ ID NO: 65682 - RNA, 22 nt, Homo sapiens
uucacagugugaucuaugggca

SEQ ID NO: 65683 - RNA, 22 nt, Homo sapiens
uuggucaggcuaaucucgaacg

SEQ ID NO: 65684 - RNA, 22 nt, Homo sapiens
uguuauuuuguguuagggcaca

SEQ ID NO: 65685 - RNA, 22 nt, Homo sapiens
uuauugcacuccagccugggua

SEQ ID NO: 65686 - RNA, 22 nt, Homo sapiens
guagcaugcaauauuauagaga

SEQ ID NO: 65687 - RNA, 22 nt, Homo sapiens
gugaggaaggaaaccugcuagc

SEQ ID NO: 65688 - RNA, 22 nt, Homo sapiens
uucccugaaguguuacucuaga

SEQ ID NO: 65689 - RNA, 22 nt, Homo sapiens
ugucaucauuggaaucugccuc

SEQ ID NO: 65690 - RNA, 22 nt, Homo sapiens
uggagagcaaaaucaauccaaa

SEQ ID NO: 65691 - RNA, 19 nt, Homo sapiens
cccuggcacauggaaaaug

SEQ ID NO: 65692 - RNA, 22 nt, Homo sapiens
augaucaucugaaagcuuuuac

SEQ ID NO: 65693 - RNA, 22 nt, Homo sapiens
guugcacagucuuuccuggacu

SEQ ID NO: 65694 - RNA, 22 nt, Homo sapiens
cucccugagccagggcuuugac

SEQ ID NO: 65695 - RNA, 20 nt, Homo sapiens
uaguggaaaucagguccucu

SEQ ID NO: 65696 - RNA, 22 nt, Homo sapiens
caaagucuucaguugauucuga

SEQ ID NO: 65697 - RNA, 22 nt, Homo sapiens
uugugcuugcuguguucuaugc

SEQ ID NO: 65698 - RNA, 22 nt, Homo sapiens
aauggcaguagauggaugggua

SEQ ID NO: 65699 - RNA, 22 nt, Homo sapiens
aacacuguuuccagucaugauc

SEQ ID NO: 65700 - RNA, 20 nt, Homo sapiens
aguauucacuuuuuucaugg

SEQ ID NO: 65701 - RNA, 22 nt, Homo sapiens
uagcagguggugaccacauuuu

SEQ ID NO: 65702 - RNA, 22 nt, Homo sapiens
acaguggaauguaggguuugag

SEQ ID NO: 65703 - RNA, 22 nt, Homo sapiens
aucaucacaguuguguguaaug

SEQ ID NO: 65704 - RNA, 22 nt, Homo sapiens
acucagagugggccccuagaua

SEQ ID NO: 65705 - RNA, 22 nt, Homo sapiens
caacacuguuuauuggauagcc

SEQ ID NO: 65706 - RNA, 22 nt, Homo sapiens
uaugucuucuuuagagaaaugu

SEQ ID NO: 65707 - RNA, 18 nt, Homo sapiens
ucccugacucaaauucuu

SEQ ID NO: 65708 - RNA, 22 nt, Homo sapiens
cucucugagccccagacaccuu

SEQ ID NO: 65709 - RNA, 22 nt, Homo sapiens
gugugauuauuucaauugaugc

SEQ ID NO: 65710 - RNA, 22 nt, Homo sapiens
uugaaaguguucacaaugguau

SEQ ID NO: 65711 - RNA, 22 nt, Homo sapiens
auaucagugucuuacuguuuuu

SEQ ID NO: 65712 - RNA, 22 nt, Homo sapiens
augugcacauucugguaaauau

SEQ ID NO: 65713 - RNA, 22 nt, Homo sapiens
uaacccuuacaacuacacucgu

SEQ ID NO: 65714 - RNA, 22 nt, Homo sapiens
gugggcaaagcuaguguguaga

SEQ ID NO: 65715 - RNA, 22 nt, Homo sapiens
acucagagaacauucccagucu

SEQ ID NO: 65716 - RNA, 22 nt, Homo sapiens
caucacacuuggauguaagaca

SEQ ID NO: 65717 - RNA, 22 nt, Homo sapiens
auauguucucauucauaugugg

SEQ ID NO: 65718 - RNA, 22 nt, Homo sapiens
ugccaguguugccuuucacuag

SEQ ID NO: 65719 - RNA, 22 nt, Homo sapiens
uggaaugugaauaacuuccuuc

SEQ ID NO: 65720 - RNA, 22 nt, Homo sapiens
cuuugauuauaaaaggguguuu

SEQ ID NO: 65721 - RNA, 22 nt, Homo sapiens
uguucaugaguucucauuuuua

SEQ ID NO: 65722 - RNA, 22 nt, Homo sapiens
uuaacacugccauugauacugu

SEQ ID NO: 65723 - RNA, 22 nt, Homo sapiens
uggcucauuucuaaacccagcu

SEQ ID NO: 65724 - RNA, 22 nt, Homo sapiens
uaugugcaaauuaauugcuaga

SEQ ID NO: 65725 - RNA, 20 nt, Homo sapiens
agaugcaugcacauaaacac

SEQ ID NO: 65726 - RNA, 22 nt, Homo sapiens
gauaguugugagaacucuuacu

SEQ ID NO: 65727 - RNA, 22 nt, Homo sapiens
gacuagaaauuauuuagugagc

SEQ ID NO: 65728 - RNA, 22 nt, Homo sapiens
uggcccccucccaaaucucaua

SEQ ID NO: 65729 - RNA, 23 nt, Homo sapiens
aaguucaugcucaucuguuacac

SEQ ID NO: 65730 - RNA, 22 nt, Homo sapiens
ugacuucagacugaaaugauuc

SEQ ID NO: 65731 - RNA, 22 nt, Homo sapiens
auggcaguguaugauuauauua

SEQ ID NO: 65732 - RNA, 22 nt, Homo sapiens
uugcacagugguuuagagccug

SEQ ID NO: 65733 - RNA, 18 nt, Homo sapiens
agguuauuucccaagacu

SEQ ID NO: 65734 - RNA, 22 nt, Homo sapiens
uucaguggagaggcugaguggu

SEQ ID NO: 65735 - RNA, 22 nt, Homo sapiens
agcuucauucugaauagguuga

SEQ ID NO: 65736 - RNA, 22 nt, Homo sapiens
ggcaaggaggggcacuuucacu

SEQ ID NO: 65737 - RNA, 22 nt, Homo sapiens
ucaccuagacucgaucauguag

SEQ ID NO: 65738 - RNA, 22 nt, Homo sapiens
uaucauugccucaaucuguauu

SEQ ID NO: 65739 - RNA, 22 nt, Homo sapiens
gcugugauucuguguagauagu

SEQ ID NO: 65740 - RNA, 21 nt, Homo sapiens
ugaaaugcaugugcacauuaa

SEQ ID NO: 65741 - RNA, 18 nt, Homo sapiens
ugucacuggauaaugguc

SEQ ID NO: 65742 - RNA, 22 nt, Homo sapiens
uguauaggcaaauuuccucaug

SEQ ID NO: 65743 - RNA, 21 nt, Homo sapiens
gaccacagcagggaaugucag

SEQ ID NO: 65744 - RNA, 22 nt, Homo sapiens
cuaaaugcacugucaaaggaag

SEQ ID NO: 65745 - RNA, 22 nt, Homo sapiens
gugacuggacucugaagaaaau

SEQ ID NO: 65746 - RNA, 22 nt, Homo sapiens
gagguaaguaagaauggcaagc

SEQ ID NO: 65747 - RNA, 22 nt, Homo sapiens
ugaugacacugauuucuucaau

SEQ ID NO: 65748 - RNA, 20 nt, Homo sapiens
uuauagcuacaucuugacug

SEQ ID NO: 65749 - RNA, 23 nt, Homo sapiens
cccucagaagugcagggagagaa

SEQ ID NO: 65750 - RNA, 22 nt, Homo sapiens
ugccaguauuuuauugaagauu

SEQ ID NO: 65751 - RNA, 22 nt, Homo sapiens
ugaguagaacuccuggagaugu

SEQ ID NO: 65752 - RNA, 22 nt, Homo sapiens
ucagaucaguuccacaagaacu

SEQ ID NO: 65753 - RNA, 22 nt, Homo sapiens
uucauguaauauauuucaggcc

SEQ ID NO: 65754 - RNA, 22 nt, Homo sapiens
uucaccaguuuugucacgaaug

SEQ ID NO: 65755 - RNA, 22 nt, Homo sapiens
augaaaucuuuccugugaggau

SEQ ID NO: 65756 - RNA, 19 nt, Homo sapiens
uagcacagggucccagacu

SEQ ID NO: 65757 - RNA, 22 nt, Homo sapiens
ugaucuguguaacauaggaguc

SEQ ID NO: 65758 - RNA, 22 nt, Homo sapiens
uacaaagugggaaacgaagguu

SEQ ID NO: 65759 - RNA, 22 nt, Homo sapiens
uccuucacucuacaucuuuguu

SEQ ID NO: 65760 - RNA, 22 nt, Homo sapiens
ggucacauuggacuaucaaguu

SEQ ID NO: 65761 - RNA, 22 nt, Homo sapiens
ugaaacauacacucugaugggg

SEQ ID NO: 65762 - RNA, 22 nt, Homo sapiens
uaugacuguuugcucauucagg

SEQ ID NO: 65763 - RNA, 22 nt, Homo sapiens
guaugugcauuguaaauuuuga

SEQ ID NO: 65764 - RNA, 22 nt, Homo sapiens
gaugacagcugacucccuugcu

SEQ ID NO: 65765 - RNA, 22 nt, Homo sapiens
ugcaaauguuaggugucauuau

SEQ ID NO: 65766 - RNA, 22 nt, Homo sapiens
aagcugcauuuucuagaugcuu

SEQ ID NO: 65767 - RNA, 22 nt, Homo sapiens
uacccaguaacaaguauuuugg

SEQ ID NO: 65768 - RNA, 22 nt, Homo sapiens
ugucaggaguuuuagaaucuua

SEQ ID NO: 65769 - RNA, 22 nt, Homo sapiens
uaugucuuuugcuugcaaauag

SEQ ID NO: 65770 - RNA, 22 nt, Homo sapiens
gugcuuuguuguggcaguggca

SEQ ID NO: 65771 - RNA, 22 nt, Homo sapiens
gaguggugguucugaaacuuuu

SEQ ID NO: 65772 - RNA, 20 nt, Homo sapiens
gacauguugguuugcugcac

SEQ ID NO: 65773 - RNA, 22 nt, Homo sapiens
ugaagacucaguuugagggaca

SEQ ID NO: 65774 - RNA, 22 nt, Homo sapiens
ugcauugcacuugcaugagaua

SEQ ID NO: 65775 - RNA, 22 nt, Homo sapiens
ugagaagacaucuuugcuuugu

SEQ ID NO: 65776 - RNA, 22 nt, Homo sapiens
aaugacacugagcaucuuucau

SEQ ID NO: 65777 - RNA, 21 nt, Homo sapiens
ugcuccauuuucuagccugaa

SEQ ID NO: 65778 - RNA, 19 nt, Homo sapiens
ugcagcaauguaaaagaca

SEQ ID NO: 65779 - RNA, 22 nt, Homo sapiens
aauaucacaggguguacacuca

SEQ ID NO: 65780 - RNA, 22 nt, Homo sapiens
aaagugauuguaguuuuugcca

SEQ ID NO: 65781 - RNA, 22 nt, Homo sapiens
auggaagaauugucggggaugu

SEQ ID NO: 65782 - RNA, 23 nt, Homo sapiens
agagugcaauggugccaucucgg

SEQ ID NO: 65783 - RNA, 22 nt, Homo sapiens
gugccacaguguuaagggauuc

SEQ ID NO: 65784 - RNA, 22 nt, Homo sapiens
aaaugcugucugugagccucau

SEQ ID NO: 65785 - RNA, 22 nt, Homo sapiens
gagagugaaguuugcuaccugu

SEQ ID NO: 65786 - RNA, 22 nt, Homo sapiens
ucaaguaauacucccaucuugg

SEQ ID NO: 65787 - RNA, 22 nt, Homo sapiens
ucaacguauuuauauagcagag

SEQ ID NO: 65788 - RNA, 22 nt, Homo sapiens
aaauugcaaugcgaggcagagg

SEQ ID NO: 65789 - RNA, 22 nt, Homo sapiens
agauguuguucaucugauuguu

SEQ ID NO: 65790 - RNA, 22 nt, Homo sapiens
gaguucauuuugaaaccuugau

SEQ ID NO: 65791 - RNA, 23 nt, Homo sapiens
agcaaaugcucuagcacuccaac

SEQ ID NO: 65792 - RNA, 22 nt, Homo sapiens
gugcacaacgugcaaguuuguu

SEQ ID NO: 65793 - RNA, 22 nt, Homo sapiens
gaaaauccauccccagggagua

SEQ ID NO: 65794 - RNA, 22 nt, Homo sapiens
agcuccaucuucagggguucag

SEQ ID NO: 65795 - RNA, 22 nt, Homo sapiens
ccucauggagaacuucugcuag

SEQ ID NO: 65796 - RNA, 22 nt, Homo sapiens
cugugcuaggcaaugugguaga

SEQ ID NO: 65797 - RNA, 22 nt, Homo sapiens
ugagccauggcaccuugucuaa

SEQ ID NO: 65798 - RNA, 22 nt, Homo sapiens
ugagaagaugaacuccuugguc

SEQ ID NO: 65799 - RNA, 22 nt, Homo sapiens
auguuauguucuucucuguaua

SEQ ID NO: 65800 - RNA, 22 nt, Homo sapiens
uuguacaggaguguaagcuuca

SEQ ID NO: 65801 - RNA, 22 nt, Homo sapiens
cacuggcacuguguuuagaugg

SEQ ID NO: 65802 - RNA, 22 nt, Homo sapiens
agugauuuuaacuuccagcaau

SEQ ID NO: 65803 - RNA, 22 nt, Homo sapiens
agucaagaugagauuugggugg

SEQ ID NO: 65804 - RNA, 22 nt, Homo sapiens
uuuguacugagccaagauggua

SEQ ID NO: 65805 - RNA, 18 nt, Homo sapiens
gaguggugcuucccuugu

SEQ ID NO: 65806 - RNA, 22 nt, Homo sapiens
uugcacuccagccuggaugaca

SEQ ID NO: 65807 - RNA, 23 nt, Homo sapiens
ucagugaaggaacaacuaaauag

SEQ ID NO: 65808 - RNA, 22 nt, Homo sapiens
ugaaauguaaguugucuagucu

SEQ ID NO: 65809 - RNA, 22 nt, Homo sapiens
ggcgguguccuccaagugcuuc

SEQ ID NO: 65810 - RNA, 22 nt, Homo sapiens
uugagauguggcaguuuaugag

SEQ ID NO: 65811 - RNA, 22 nt, Homo sapiens
ucacuguguauguauaugcagg

SEQ ID NO: 65812 - RNA, 22 nt, Homo sapiens
ucaugugagcacagagcaagau

SEQ ID NO: 65813 - RNA, 22 nt, Homo sapiens
cugagguacccacuucaucuca

SEQ ID NO: 65814 - RNA, 22 nt, Homo sapiens
gacauguuuacaguguugagag

SEQ ID NO: 65815 - RNA, 22 nt, Homo sapiens
ugaaaugccuuuaaugaauuua

SEQ ID NO: 65816 - RNA, 22 nt, Homo sapiens
gugugcacaaucuggcaugugc

SEQ ID NO: 65817 - RNA, 22 nt, Homo sapiens
auaaaugcauugagaacugcug

SEQ ID NO: 65818 - RNA, 22 nt, Homo sapiens
gagagugcuuuggguguaggcc

SEQ ID NO: 65819 - RNA, 22 nt, Homo sapiens
uugagcucaucuucagggguga

SEQ ID NO: 65820 - RNA, 22 nt, Homo sapiens
uggcuguguccucucccaaauc

SEQ ID NO: 65821 - RNA, 23 nt, Homo sapiens
agccugguuucccugcuucuccc

SEQ ID NO: 65822 - RNA, 22 nt, Homo sapiens
ugucaacauuuaucaaguuauu

SEQ ID NO: 65823 - RNA, 22 nt, Homo sapiens
cacuggucucauggcaugagag

SEQ ID NO: 65824 - RNA, 22 nt, Homo sapiens
guccaguuguuuucugagguug

SEQ ID NO: 65825 - RNA, 22 nt, Homo sapiens
augaaaacaugauuugccuguu

SEQ ID NO: 65826 - RNA, 22 nt, Homo sapiens
uucaagucuuggcuuugccacc

SEQ ID NO: 65827 - RNA, 22 nt, Homo sapiens
auggcuuuaagagugucugaau

SEQ ID NO: 65828 - RNA, 20 nt, Homo sapiens
aucagagacuaggauugcca

SEQ ID NO: 65829 - RNA, 22 nt, Homo sapiens
aggcaguuucagugagagguga

SEQ ID NO: 65830 - RNA, 22 nt, Homo sapiens
aaugacuaagaugguacauuuu

SEQ ID NO: 65831 - RNA, 22 nt, Homo sapiens
uaacauagucauauacuugcuu

SEQ ID NO: 65832 - RNA, 22 nt, Homo sapiens
ugagaucuuugcuguccucacc

SEQ ID NO: 65833 - RNA, 22 nt, Homo sapiens
ucucauagaggcagagaguaaa

SEQ ID NO: 65834 - RNA, 22 nt, Homo sapiens
uugaaaucuuccacagcccaag

SEQ ID NO: 65835 - RNA, 22 nt, Homo sapiens
aaaugcagcacucaagugggaa

SEQ ID NO: 65836 - RNA, 22 nt, Homo sapiens
auugacuugauauauagcugau

SEQ ID NO: 65837 - RNA, 22 nt, Homo sapiens
uggauugaaagcuuuaauauug

SEQ ID NO: 65838 - RNA, 22 nt, Homo sapiens
cagagaucaugcaacugcucgc

SEQ ID NO: 65839 - RNA, 18 nt, Homo sapiens
ugagaacauguguacaca

SEQ ID NO: 65840 - RNA, 22 nt, Homo sapiens
acuacugucagacugccacuga

SEQ ID NO: 65841 - RNA, 22 nt, Homo sapiens
ccugagaucauacuguuaguaa

SEQ ID NO: 65842 - RNA, 22 nt, Homo sapiens
ucucugagaaaaguuucuccca

SEQ ID NO: 65843 - RNA, 22 nt, Homo sapiens
uucugaguggcuuucaacacug

SEQ ID NO: 65844 - RNA, 22 nt, Homo sapiens
uuaagccacucaagagauagag

SEQ ID NO: 65845 - RNA, 22 nt, Homo sapiens
ucaccuggggcacagcugaaga

SEQ ID NO: 65846 - RNA, 22 nt, Homo sapiens
auugcacacagaaucaggguaa

SEQ ID NO: 65847 - RNA, 22 nt, Homo sapiens
ugagauuaucguaauguaucuc

SEQ ID NO: 65848 - RNA, 22 nt, Homo sapiens
gcaaugcugucugugcacagau

SEQ ID NO: 65849 - RNA, 18 nt, Homo sapiens
aaagugaugucauucuuu

SEQ ID NO: 65850 - RNA, 22 nt, Homo sapiens
aaccugaagaaaauauuugcug

SEQ ID NO: 65851 - RNA, 20 nt, Homo sapiens
cauugcacuccagcuugggc

SEQ ID NO: 65852 - RNA, 18 nt, Homo sapiens
ucccuuuguagaugaccc

SEQ ID NO: 65853 - RNA, 22 nt, Homo sapiens
uuuggcuuuuguaauaacugcc

SEQ ID NO: 65854 - RNA, 22 nt, Homo sapiens
uauggcuacuacgaauaaugcu

SEQ ID NO: 65855 - RNA, 22 nt, Homo sapiens
ugacacagugggggauccuuuu

SEQ ID NO: 65856 - RNA, 22 nt, Homo sapiens
auacauguucaagggcauauau

SEQ ID NO: 65857 - RNA, 22 nt, Homo sapiens
guaagugguagagcugggcuau

SEQ ID NO: 65858 - RNA, 22 nt, Homo sapiens
uaucacaguaucuagcacagug

SEQ ID NO: 65859 - RNA, 22 nt, Homo sapiens
caaaggcuuccacugcauccuu

SEQ ID NO: 65860 - RNA, 22 nt, Homo sapiens
ucuguggugggcuccacccagu

SEQ ID NO: 65861 - RNA, 22 nt, Homo sapiens
ucaagcaauucuccugccucag

SEQ ID NO: 65862 - RNA, 22 nt, Homo sapiens
acagaucagagauauuuagguu

SEQ ID NO: 65863 - RNA, 21 nt, Homo sapiens
uuuggcuucucugcugcagcc

SEQ ID NO: 65864 - RNA, 22 nt, Homo sapiens
aucauccagccccagaagggag

SEQ ID NO: 65865 - RNA, 22 nt, Homo sapiens
ccaaguguucucauuguucaau

SEQ ID NO: 65866 - RNA, 22 nt, Homo sapiens
ugcacacucuguaugagaaucu

SEQ ID NO: 65867 - RNA, 22 nt, Homo sapiens
ugugcacaacgugcagguuugu

SEQ ID NO: 65868 - RNA, 22 nt, Homo sapiens
ugcaaucaucgcuguuggccac

SEQ ID NO: 65869 - RNA, 22 nt, Homo sapiens
acaguguuacuugauaguguau

SEQ ID NO: 65870 - RNA, 22 nt, Homo sapiens
auaucacaaacaagucuguacu

SEQ ID NO: 65871 - RNA, 19 nt, Homo sapiens
ugaaugacaucuaaagucc

SEQ ID NO: 65872 - RNA, 22 nt, Homo sapiens
agcuucauuguuaugaauguca

SEQ ID NO: 65873 - RNA, 22 nt, Homo sapiens
cugggaucaguucuagucagaa

SEQ ID NO: 65874 - RNA, 22 nt, Homo sapiens
cugacauggggauccaccuuag

SEQ ID NO: 65875 - RNA, 22 nt, Homo sapiens
agugucaggagacagguagcug

SEQ ID NO: 65876 - RNA, 22 nt, Homo sapiens
gugagacugguucugaacccag

SEQ ID NO: 65877 - RNA, 22 nt, Homo sapiens
uugucacuauaaauaagcauuu

SEQ ID NO: 65878 - RNA, 22 nt, Homo sapiens
uauuugguuggugcaaaaguaa

SEQ ID NO: 65879 - RNA, 22 nt, Homo sapiens
gggaaauguaaagucauaagau

SEQ ID NO: 65880 - RNA, 19 nt, Homo sapiens
caugugcacuacuggcuuc

SEQ ID NO: 65881 - RNA, 22 nt, Homo sapiens
ucacacugaaacuaggguguga

SEQ ID NO: 65882 - RNA, 22 nt, Homo sapiens
cugugccaagcuugcgaugugc

SEQ ID NO: 65883 - RNA, 22 nt, Homo sapiens
aagcugccaggcaugguggcug

SEQ ID NO: 65884 - RNA, 22 nt, Homo sapiens
aguaccauuagauuaggaugac

SEQ ID NO: 65885 - RNA, 22 nt, Homo sapiens
augagaucugugaacaccuguc

SEQ ID NO: 65886 - RNA, 22 nt, Homo sapiens
ucugugcugagaguugaaaguu

SEQ ID NO: 65887 - RNA, 23 nt, Homo sapiens
gugcaugagucuuuauaguagca

SEQ ID NO: 65888 - RNA, 22 nt, Homo sapiens
ugauuuguuucaggaguuuucu

SEQ ID NO: 65889 - RNA, 21 nt, Homo sapiens
ugcaagaaucaggaagcugcc

SEQ ID NO: 65890 - RNA, 22 nt, Homo sapiens
uuagcacaucuuucuauguaag

SEQ ID NO: 65891 - RNA, 22 nt, Homo sapiens
uuuccuggagaaucuuaacaaa

SEQ ID NO: 65892 - RNA, 22 nt, Homo sapiens
ucaaguaguaacuaacugugac

SEQ ID NO: 65893 - RNA, 22 nt, Homo sapiens
cuugagacauuguuuuccaagu

SEQ ID NO: 65894 - RNA, 22 nt, Homo sapiens
ugagaucuucgcucuucacaga

SEQ ID NO: 65895 - RNA, 22 nt, Homo sapiens
acccugacacgauucuucacuu

SEQ ID NO: 65896 - RNA, 22 nt, Homo sapiens
gagucagugucuugcucuguca

SEQ ID NO: 65897 - RNA, 22 nt, Homo sapiens
uccacuuuugugcugaauugga

SEQ ID NO: 65898 - RNA, 22 nt, Homo sapiens
uuaagugaauuaucuaacaugu

SEQ ID NO: 65899 - RNA, 22 nt, Homo sapiens
ucaugaccaugguauagaccac

SEQ ID NO: 65900 - RNA, 22 nt, Homo sapiens
uagcagugugaaaacagacuaa

SEQ ID NO: 65901 - RNA, 22 nt, Homo sapiens
aucucauuccuucugggcugau

SEQ ID NO: 65902 - RNA, 22 nt, Homo sapiens
ucacugaaaccgccuccaccuc

SEQ ID NO: 65903 - RNA, 22 nt, Homo sapiens
ugaacagucaucucucuuguau

SEQ ID NO: 65904 - RNA, 22 nt, Homo sapiens
ugacucaagagccugacucauc

SEQ ID NO: 65905 - RNA, 22 nt, Homo sapiens
caaaggcuguuauaggccagga

SEQ ID NO: 65906 - RNA, 22 nt, Homo sapiens
ggcaaguucuaaugauuagaau

SEQ ID NO: 65907 - RNA, 22 nt, Homo sapiens
uagcuggaauuacuugcaccug

SEQ ID NO: 65908 - RNA, 22 nt, Homo sapiens
ugagcaucauucacaccuuggu

SEQ ID NO: 65909 - RNA, 22 nt, Homo sapiens
cuugaccuauggaucuguuuuu

SEQ ID NO: 65910 - RNA, 22 nt, Homo sapiens
ucugucuuguccucacccuaga

SEQ ID NO: 65911 - RNA, 22 nt, Homo sapiens
ucuguguuuagacccaggguag

SEQ ID NO: 65912 - RNA, 22 nt, Homo sapiens
uuuagguaauauuaaguagcug

SEQ ID NO: 65913 - RNA, 22 nt, Homo sapiens
acccuggaguaguaggaaucug

SEQ ID NO: 65914 - RNA, 22 nt, Homo sapiens
aaagaguucagguagauuucaa

SEQ ID NO: 65915 - RNA, 20 nt, Homo sapiens
ugaaggaggucauuuauacc

SEQ ID NO: 65916 - RNA, 22 nt, Homo sapiens
ucucugguuaugucauuaagca

SEQ ID NO: 65917 - RNA, 22 nt, Homo sapiens
uauuguacauguuauagauuuu

SEQ ID NO: 65918 - RNA, 22 nt, Homo sapiens
aggaggauugcuuucaucuuuu

SEQ ID NO: 65919 - RNA, 22 nt, Homo sapiens
cauugcacugcauucugggcaa

SEQ ID NO: 65920 - RNA, 22 nt, Homo sapiens
uucagauugcauaccgaaagua

SEQ ID NO: 65921 - RNA, 22 nt, Homo sapiens
uugagcaucauguuagcacuca

SEQ ID NO: 65922 - RNA, 22 nt, Homo sapiens
uugccaacauggugaacuccca

SEQ ID NO: 65923 - RNA, 22 nt, Homo sapiens
gggcaacauugaguacccugaa

SEQ ID NO: 65924 - RNA, 22 nt, Homo sapiens
ccacaguagucuugggaugggc

SEQ ID NO: 65925 - RNA, 22 nt, Homo sapiens
uccugcauucauccugguguug

SEQ ID NO: 65926 - RNA, 22 nt, Homo sapiens
gugagaagaaaaauauggcugu

SEQ ID NO: 65927 - RNA, 22 nt, Homo sapiens
gaggaucucuugagcccagaag

SEQ ID NO: 65928 - RNA, 19 nt, Homo sapiens
gacaugagauuuggugggg

SEQ ID NO: 65929 - RNA, 21 nt, Homo sapiens
uaaaugucauacaaagcaaug

SEQ ID NO: 65930 - RNA, 21 nt, Homo sapiens
uuugaucauuaaaagugaauc

SEQ ID NO: 65931 - RNA, 22 nt, Homo sapiens
ugcugcaaacaggcaucugugg

SEQ ID NO: 65932 - RNA, 18 nt, Homo sapiens
uaucucauuucuuagguc

SEQ ID NO: 65933 - RNA, 22 nt, Homo sapiens
ugaagcuuguuucuguaccuuu

SEQ ID NO: 65934 - RNA, 22 nt, Homo sapiens
aagugguagggucaggauugga

SEQ ID NO: 65935 - RNA, 22 nt, Homo sapiens
uaaauugcauaaguacaaauga

SEQ ID NO: 65936 - RNA, 22 nt, Homo sapiens
aaggcuagagaagaagggcauc

SEQ ID NO: 65937 - RNA, 22 nt, Homo sapiens
uuaauguaauugauugauugac

SEQ ID NO: 65938 - RNA, 22 nt, Homo sapiens
ccuuggcaauggcuggggcuga

SEQ ID NO: 65939 - RNA, 22 nt, Homo sapiens
cugugcauuggaugucucccug

SEQ ID NO: 65940 - RNA, 22 nt, Homo sapiens
ucacugaaaccacugccuccug

SEQ ID NO: 65941 - RNA, 22 nt, Homo sapiens
cugugcauggauuuuaagauug

SEQ ID NO: 65942 - RNA, 22 nt, Homo sapiens
ugaaaugguuaugugaggagau

SEQ ID NO: 65943 - RNA, 22 nt, Homo sapiens
cacaaaguagauuagucuucca

SEQ ID NO: 65944 - RNA, 22 nt, Homo sapiens
uucccagagccugggagugagg

SEQ ID NO: 65945 - RNA, 16 nt, Homo sapiens
aggcaagaauugaggu

SEQ ID NO: 65946 - RNA, 21 nt, Homo sapiens
agccaguguuccuuguggcuc

SEQ ID NO: 65947 - RNA, 22 nt, Homo sapiens
uuggcuguguuuauaugcugga

SEQ ID NO: 65948 - RNA, 22 nt, Homo sapiens
augaugaaguaagugcuuagga

SEQ ID NO: 65949 - RNA, 22 nt, Homo sapiens
uauuacauccauaggcucugcu

SEQ ID NO: 65950 - RNA, 19 nt, Homo sapiens
gcucaccuugcugcuccag

SEQ ID NO: 65951 - RNA, 22 nt, Homo sapiens
uucaacagugauggccuuugua

SEQ ID NO: 65952 - RNA, 22 nt, Homo sapiens
gucucccaaccccugugcccag

SEQ ID NO: 65953 - RNA, 22 nt, Homo sapiens
ugacaguaucuacagcuucuua

SEQ ID NO: 65954 - RNA, 22 nt, Homo sapiens
guacaugcaugcaugggugugc

SEQ ID NO: 65955 - RNA, 18 nt, Homo sapiens
ucccucagaauuauagaa

SEQ ID NO: 65956 - RNA, 22 nt, Homo sapiens
uuaagaagugauuuuccucauu

SEQ ID NO: 65957 - RNA, 23 nt, Homo sapiens
ucaguagucauugggaaagugug

SEQ ID NO: 65958 - RNA, 17 nt, Homo sapiens
gaaguguuucagcagcu

SEQ ID NO: 65959 - RNA, 22 nt, Homo sapiens
guggaaaacauaugcuuguuga

SEQ ID NO: 65960 - RNA, 22 nt, Homo sapiens
uucccugaguaucuuaccaugg

SEQ ID NO: 65961 - RNA, 23 nt, Homo sapiens
uucuaucaggcccaggagcccug

SEQ ID NO: 65962 - RNA, 22 nt, Homo sapiens
uucuagcacuuugggagacuga

SEQ ID NO: 65963 - RNA, 22 nt, Homo sapiens
uucuagcaauggcagagugucu

SEQ ID NO: 65964 - RNA, 22 nt, Homo sapiens
uuauuugguuauuguaauuggg

SEQ ID NO: 65965 - RNA, 17 nt, Homo sapiens
uuacaggugcugagagu

SEQ ID NO: 65966 - RNA, 22 nt, Homo sapiens
uuacagguggagaaguaaggcu

SEQ ID NO: 65967 - RNA, 22 nt, Homo sapiens
uguuauguauggagugauccca

SEQ ID NO: 65968 - RNA, 21 nt, Homo sapiens
uggucccauaagauuauaaug

SEQ ID NO: 65969 - RNA, 22 nt, Homo sapiens
uguguuugauaaguccauaguu

SEQ ID NO: 65970 - RNA, 22 nt, Homo sapiens
uucuucugguuaugaaauuuga

SEQ ID NO: 65971 - RNA, 22 nt, Homo sapiens
uuggccauaugacuugcuuugg

SEQ ID NO: 65972 - RNA, 22 nt, Homo sapiens
uuggcccugcugaccauucccu

SEQ ID NO: 65973 - RNA, 22 nt, Homo sapiens
uuuuacacuguugguuggaaug

SEQ ID NO: 65974 - RNA, 22 nt, Homo sapiens
uuuguacuucauugguucuacu

SEQ ID NO: 65975 - RNA, 22 nt, Homo sapiens
augcauggcagagucaggguac

SEQ ID NO: 65976 - RNA, 22 nt, Homo sapiens
auggcuuuuuucuugggcacuc

SEQ ID NO: 65977 - RNA, 20 nt, Homo sapiens
augucaggaagggagucagg

SEQ ID NO: 65978 - RNA, 22 nt, Homo sapiens
aucacaggucaaaucauuauuu

SEQ ID NO: 65979 - RNA, 22 nt, Homo sapiens
auauugcuccuaauaccacggu

SEQ ID NO: 65980 - RNA, 22 nt, Homo sapiens
auauagcaaugaaagagaugaa

SEQ ID NO: 65981 - RNA, 22 nt, Homo sapiens
auaauacugggaagaugagcau

SEQ ID NO: 65982 - RNA, 22 nt, Homo sapiens
acccugucauccacauggugcu

SEQ ID NO: 65983 - RNA, 22 nt, Homo sapiens
accuuguagcaaaccuaacaua

SEQ ID NO: 65984 - RNA, 22 nt, Homo sapiens
acuaaggcacaauuuucucaua

SEQ ID NO: 65985 - RNA, 22 nt, Homo sapiens
aaucugucuagacaaggagucu

SEQ ID NO: 65986 - RNA, 22 nt, Homo sapiens
aagcugguuuuauaucugugag

SEQ ID NO: 65987 - RNA, 22 nt, Homo sapiens
acugguguaugggaggucccaa

SEQ ID NO: 65988 - RNA, 22 nt, Homo sapiens
acugccuaaugacuuauguuuu

SEQ ID NO: 65989 - RNA, 22 nt, Homo sapiens
aggcauugugcaucgaugauuu

SEQ ID NO: 65990 - RNA, 22 nt, Homo sapiens
gaugcagcuaggauuugugaca

SEQ ID NO: 65991 - RNA, 22 nt, Homo sapiens
gcaaaaaguagugcugguuagg

SEQ ID NO: 65992 - RNA, 17 nt, Homo sapiens
gcauaugucgaaccagc

SEQ ID NO: 65993 - RNA, 21 nt, Homo sapiens
cugguguuagcacuucuuccc

SEQ ID NO: 65994 - RNA, 22 nt, Homo sapiens
cuguguaguacuagauugagca

SEQ ID NO: 65995 - RNA, 22 nt, Homo sapiens
gaauacugacuauuucaucugg

SEQ ID NO: 65996 - RNA, 22 nt, Homo sapiens
gaauacuguccaagagugaugg

SEQ ID NO: 65997 - RNA, 22 nt, Homo sapiens
auugcugagacauugcuaaucu

SEQ ID NO: 65998 - RNA, 23 nt, Homo sapiens
caauacugaccucacguuaauag

SEQ ID NO: 65999 - RNA, 20 nt, Homo sapiens
cagagcaaagcaguccuggc

SEQ ID NO: 66000 - RNA, 22 nt, Homo sapiens
cuauggcucugucuuuuaaguu

SEQ ID NO: 66001 - RNA, 20 nt, Homo sapiens
cucagguauuugaggcugca

SEQ ID NO: 66002 - RNA, 22 nt, Homo sapiens
cucauugcaaucucugccuccc

SEQ ID NO: 66003 - RNA, 23 nt, Homo sapiens
cucccugaacaugacacaccaga

SEQ ID NO: 66004 - RNA, 20 nt, Homo sapiens
cucccugacaaauguggaaa

SEQ ID NO: 66005 - RNA, 22 nt, Homo sapiens
cuagcugcacuuccugcuacug

SEQ ID NO: 66006 - RNA, 22 nt, Homo sapiens
ccugguguuuugauggucgggu

SEQ ID NO: 66007 - RNA, 22 nt, Homo sapiens
ccccaguguguaaaggccuugc

SEQ ID NO: 66008 - RNA, 19 nt, Homo sapiens
cauggcuuauaauuuuaau

SEQ ID NO: 66009 - RNA, 22 nt, Homo sapiens
uauuggcucuguuucucugaag

SEQ ID NO: 66010 - RNA, 22 nt, Homo sapiens
uauugcucaugcauuuaauuuc

SEQ ID NO: 66011 - RNA, 22 nt, Homo sapiens
uauugcuaaauucuuuuccuag

SEQ ID NO: 66012 - RNA, 22 nt, Homo sapiens
uauuacuguuauuccuaucaaa

SEQ ID NO: 66013 - RNA, 22 nt, Homo sapiens
uagugcuguaauucuaaugaaa

SEQ ID NO: 66014 - RNA, 22 nt, Homo sapiens
uauaugcaacauaguguaugug

SEQ ID NO: 66015 - RNA, 22 nt, Homo sapiens
uauagcuuaaaguuuagauccu

SEQ ID NO: 66016 - RNA, 22 nt, Homo sapiens
uaauauguuuugaaaucaggaa

SEQ ID NO: 66017 - RNA, 21 nt, Homo sapiens
uacaagcuguagcacaugcca

SEQ ID NO: 66018 - RNA, 22 nt, Homo sapiens
uacaagcuaaaauggaagauca

SEQ ID NO: 66019 - RNA, 22 nt, Homo sapiens
uacaagcaggaaaugguauaug

SEQ ID NO: 66020 - RNA, 22 nt, Homo sapiens
uacuacuuucucuucugggaaa

SEQ ID NO: 66021 - RNA, 22 nt, Homo sapiens
uacuacuuucugacaucuuuaa

SEQ ID NO: 66022 - RNA, 22 nt, Homo sapiens
gucccugaggaacauccagggc

SEQ ID NO: 66023 - RNA, 22 nt, Homo sapiens
gcccuguguuuggguaugguca

SEQ ID NO: 66024 - RNA, 22 nt, Homo sapiens
guagcagaacauguuccuugua

SEQ ID NO: 66025 - RNA, 22 nt, Homo sapiens
guaucauugccuaaugcucuca

SEQ ID NO: 66026 - RNA, 22 nt, Homo sapiens
ugcagcauugcacuccagccug

SEQ ID NO: 66027 - RNA, 22 nt, Homo sapiens
ugccugcugucuaauauauucu

SEQ ID NO: 66028 - RNA, 22 nt, Homo sapiens
ugccuagucuauugagagucuu

SEQ ID NO: 66029 - RNA, 23 nt, Homo sapiens
uggcauuuuuggcaaugccuucu

SEQ ID NO: 66030 - RNA, 22 nt, Homo sapiens
ugacugguguuuaaugagucaa

SEQ ID NO: 66031 - RNA, 22 nt, Homo sapiens
ugacuuuagaauuuuauccaga

SEQ ID NO: 66032 - RNA, 23 nt, Homo sapiens
ugacuuguccagugauaguucgu

SEQ ID NO: 66033 - RNA, 22 nt, Homo sapiens
ugacauguauuagcucagugcu

SEQ ID NO: 66034 - RNA, 22 nt, Homo sapiens
ugaacagcuaucuugucagugu

SEQ ID NO: 66035 - RNA, 22 nt, Homo sapiens
ucauugguucuggguguuguug

SEQ ID NO: 66036 - RNA, 19 nt, Homo sapiens
ucccuguagaccacagugc

SEQ ID NO: 66037 - RNA, 19 nt, Homo sapiens
uccccaguuuuccguucag

SEQ ID NO: 66038 - RNA, 22 nt, Homo sapiens
uccuggcuccacuguuuauucc

SEQ ID NO: 66039 - RNA, 22 nt, Homo sapiens
aaagcacugaauaaauuugcuu

SEQ ID NO: 66040 - RNA, 22 nt, Homo sapiens
aaagcagcaggugguuuucaau

SEQ ID NO: 66041 - RNA, 22 nt, Homo sapiens
aauauugucaaaauggauucca

SEQ ID NO: 66042 - RNA, 22 nt, Homo sapiens
aaucugucaguuuuguguuaau

SEQ ID NO: 66043 - RNA, 22 nt, Homo sapiens
aauccugucuugccauccaaua

SEQ ID NO: 66044 - RNA, 23 nt, Homo sapiens
aaauuugccuauuauuccuaugg

SEQ ID NO: 66045 - RNA, 22 nt, Homo sapiens
augaagcuagcugauugcugau

SEQ ID NO: 66046 - RNA, 22 nt, Homo sapiens
aucccagaaacucggguuucuc

SEQ ID NO: 66047 - RNA, 22 nt, Homo sapiens
auagcuguugaauggaauauuc

SEQ ID NO: 66048 - RNA, 22 nt, Homo sapiens
auagcugcucaggcuuuccuca

SEQ ID NO: 66049 - RNA, 21 nt, Homo sapiens
auagggcuuguugauaguuaa

SEQ ID NO: 66050 - RNA, 22 nt, Homo sapiens
auaugguguuugcuauucagcu

SEQ ID NO: 66051 - RNA, 22 nt, Homo sapiens
aucacugugauuucuacugugc

SEQ ID NO: 66052 - RNA, 22 nt, Homo sapiens
aucacagcccuccucuuggaug

SEQ ID NO: 66053 - RNA, 22 nt, Homo sapiens
augugguaguuauagugauaag

SEQ ID NO: 66054 - RNA, 22 nt, Homo sapiens
auggcuucuuacucuucugcau

SEQ ID NO: 66055 - RNA, 22 nt, Homo sapiens
agcucauugcaaccuccgccuc

SEQ ID NO: 66056 - RNA, 20 nt, Homo sapiens
agucaguuuauuuucucucu

SEQ ID NO: 66057 - RNA, 22 nt, Homo sapiens
agugauauguuugccuugaggg

SEQ ID NO: 66058 - RNA, 22 nt, Homo sapiens
agugccuacuugaauuguagug

SEQ ID NO: 66059 - RNA, 22 nt, Homo sapiens
aauggcauugguccuuuuggau

SEQ ID NO: 66060 - RNA, 21 nt, Homo sapiens
gugaucaugucacugcacucc

SEQ ID NO: 66061 - RNA, 22 nt, Homo sapiens
gugugguaggauugguuacuca

SEQ ID NO: 66062 - RNA, 21 nt, Homo sapiens
uaacagcuccacuccauucuc

SEQ ID NO: 66063 - RNA, 19 nt, Homo sapiens
uaacacaguuguguuugag

SEQ ID NO: 66064 - RNA, 22 nt, Homo sapiens
guuccuuguagaugcuggauau

SEQ ID NO: 66065 - RNA, 22 nt, Homo sapiens
guaauacuuuugggauauuaga

SEQ ID NO: 66066 - RNA, 23 nt, Homo sapiens
guaauacuagucauaguagcagg

SEQ ID NO: 66067 - RNA, 22 nt, Homo sapiens
ucaccuagacucgaucauguag

SEQ ID NO: 66068 - RNA, 22 nt, Homo sapiens
ucaccuggggcacagcugaaga

SEQ ID NO: 66069 - RNA, 22 nt, Homo sapiens
ucacauuaagcuguuauuucuu

SEQ ID NO: 66070 - RNA, 22 nt, Homo sapiens
uaugucuauuauguagcaggaa

SEQ ID NO: 66071 - RNA, 22 nt, Homo sapiens
uauugcuaaaacucaugguugc

SEQ ID NO: 66072 - RNA, 22 nt, Homo sapiens
uauugcagaaugugaguuggca

SEQ ID NO: 66073 - RNA, 22 nt, Homo sapiens
uauugcuggcucugucuucauu

SEQ ID NO: 66074 - RNA, 22 nt, Homo sapiens
uauugcuacuuugccuuccaaa

SEQ ID NO: 66075 - RNA, 22 nt, Homo sapiens
uagcuucuccauagcuccaugu

SEQ ID NO: 66076 - RNA, 22 nt, Homo sapiens
uagcugcugcuaggcuaaggau

SEQ ID NO: 66077 - RNA, 22 nt, Homo sapiens
uagcaguucauuguugugugaa

SEQ ID NO: 66078 - RNA, 22 nt, Homo sapiens
uagcaugucagucgccacacgu

SEQ ID NO: 66079 - RNA, 22 nt, Homo sapiens
uauaucuguccauggcccugcu

SEQ ID NO: 66080 - RNA, 22 nt, Homo sapiens
uauaugcacucagguguaugug

SEQ ID NO: 66081 - RNA, 22 nt, Homo sapiens
uaguaucauugaaacggcuugu

SEQ ID NO: 66082 - RNA, 22 nt, Homo sapiens
uaagacuguuggcaauuuuugc

SEQ ID NO: 66083 - RNA, 22 nt, Homo sapiens
uaccuguagcucuucuaggcug

SEQ ID NO: 66084 - RNA, 22 nt, Homo sapiens
uaccuguagacuacagcuucag

SEQ ID NO: 66085 - RNA, 21 nt, Homo sapiens
gauaaguuggcagccagcacc

SEQ ID NO: 66086 - RNA, 23 nt, Homo sapiens
gaguggagacucauugauuuccu

SEQ ID NO: 66087 - RNA, 22 nt, Homo sapiens
gcacuacugcacuccagucuag

SEQ ID NO: 66088 - RNA, 22 nt, Homo sapiens
gcugauggugcaguucuagccu

SEQ ID NO: 66089 - RNA, 22 nt, Homo sapiens
gcuccauuuuccauuucucuaa

SEQ ID NO: 66090 - RNA, 22 nt, Homo sapiens
gcuuguguucaagucacccuua

SEQ ID NO: 66091 - RNA, 22 nt, Homo sapiens
cuguaguuagcagaugaugaau

SEQ ID NO: 66092 - RNA, 22 nt, Homo sapiens
cugucucagccucuccaguagc

SEQ ID NO: 66093 - RNA, 22 nt, Homo sapiens
cuuuuggugguucugaugcagg

SEQ ID NO: 66094 - RNA, 22 nt, Homo sapiens
caucccugucgucaagucucug

SEQ ID NO: 66095 - RNA, 19 nt, Homo sapiens
caguaucauugcacauagu

SEQ ID NO: 66096 - RNA, 22 nt, Homo sapiens
cauugcuaaaagucauauauaa

SEQ ID NO: 66097 - RNA, 22 nt, Homo sapiens
caugucuuuuauucugugugau

SEQ ID NO: 66098 - RNA, 22 nt, Homo sapiens
cagagcaaugcuuuugcuuuga

SEQ ID NO: 66099 - RNA, 22 nt, Homo sapiens
cacaggucauccuggaucaagg

SEQ ID NO: 66100 - RNA, 22 nt, Homo sapiens
auugcacucuaaccuaggugac

SEQ ID NO: 66101 - RNA, 22 nt, Homo sapiens
cuccauguggcuaacuuuuaaa

SEQ ID NO: 66102 - RNA, 22 nt, Homo sapiens
cuacuauguagagauauugaau

SEQ ID NO: 66103 - RNA, 22 nt, Homo sapiens
cuaauacguaguauauccauga

SEQ ID NO: 66104 - RNA, 22 nt, Homo sapiens
cuccuguagccccaucaucuuu

SEQ ID NO: 66105 - RNA, 22 nt, Homo sapiens
cuccgggugcgucggcgcccug

SEQ ID NO: 66106 - RNA, 22 nt, Homo sapiens
cucucuguuugucuguuauugg

SEQ ID NO: 66107 - RNA, 22 nt, Homo sapiens
cugagcaagucauuuuguuaaa

SEQ ID NO: 66108 - RNA, 22 nt, Homo sapiens
uuauuugguugcugacuuggaa

SEQ ID NO: 66109 - RNA, 22 nt, Homo sapiens
uucuauggucacagaugcuuga

SEQ ID NO: 66110 - RNA, 20 nt, Homo sapiens
uucuauggugaugaguccug

SEQ ID NO: 66111 - RNA, 22 nt, Homo sapiens
uuccugcacuugcuugccuaug

SEQ ID NO: 66112 - RNA, 22 nt, Homo sapiens
uugaccaaagaagagucauugc

SEQ ID NO: 66113 - RNA, 19 nt, Homo sapiens
uuauacuguauuguuuagg

SEQ ID NO: 66114 - RNA, 22 nt, Homo sapiens
uuaguaucauccuucugcauuc

SEQ ID NO: 66115 - RNA, 22 nt, Homo sapiens
uuauugcuuuugugcaggugag

SEQ ID NO: 66116 - RNA, 21 nt, Homo sapiens
uuagcauccauguucaucaac

SEQ ID NO: 66117 - RNA, 22 nt, Homo sapiens
uuacuguauagaaucaucuuga

SEQ ID NO: 66118 - RNA, 20 nt, Homo sapiens
uuacuauguaguauuggcuc

SEQ ID NO: 66119 - RNA, 22 nt, Homo sapiens
uugauauucugagaagcugaag

SEQ ID NO: 66120 - RNA, 22 nt, Homo sapiens
uugugucccuacccaaaucuca

SEQ ID NO: 66121 - RNA, 21 nt, Homo sapiens
uuguagcagcauaaucccaga

SEQ ID NO: 66122 - RNA, 22 nt, Homo sapiens
uuguccuggagguucuugcaag

SEQ ID NO: 66123 - RNA, 22 nt, Homo sapiens
uuguccuugagauaguuugcag

SEQ ID NO: 66124 - RNA, 22 nt, Homo sapiens
uuguccuugagauaguuugcug

SEQ ID NO: 66125 - RNA, 23 nt, Homo sapiens
uugugucccuacccaaaucucau

SEQ ID NO: 66126 - RNA, 22 nt, Homo sapiens
uuguuauguaucucaagauaaa

SEQ ID NO: 66127 - RNA, 22 nt, Homo sapiens
aagacuguaauccaucuugagu

SEQ ID NO: 66128 - RNA, 19 nt, Homo sapiens
uuucccugcagaccuacua

SEQ ID NO: 66129 - RNA, 22 nt, Homo sapiens
uuucccugaaggcucugaaguc

SEQ ID NO: 66130 - RNA, 22 nt, Homo sapiens
uuucauccggcuguguauuaug

SEQ ID NO: 66131 - RNA, 18 nt, Homo sapiens
uuuguacuuuuucuaaug

SEQ ID NO: 66132 - RNA, 22 nt, Homo sapiens
ugcuaugucuucucucacagag

SEQ ID NO: 66133 - RNA, 22 nt, Homo sapiens
ugcuauguccccacccaaaucu

SEQ ID NO: 66134 - RNA, 22 nt, Homo sapiens
ugcuggcguuacucuccaucag

SEQ ID NO: 66135 - RNA, 22 nt, Homo sapiens
ugcuagaugcuguagggauuua

SEQ ID NO: 66136 - RNA, 22 nt, Homo sapiens
uguccugaagcuuuguuaugua

SEQ ID NO: 66137 - RNA, 22 nt, Homo sapiens
ugucccaguuggguauugaauu

SEQ ID NO: 66138 - RNA, 22 nt, Homo sapiens
uggcaucuguucuacacauaaa

SEQ ID NO: 66139 - RNA, 22 nt, Homo sapiens
ugggaugaaaauagcuucuucc

SEQ ID NO: 66140 - RNA, 22 nt, Homo sapiens
uguagucauuuggaguccagcu

SEQ ID NO: 66141 - RNA, 23 nt, Homo sapiens
ucugcggguguggacccuagugc

SEQ ID NO: 66142 - RNA, 20 nt, Homo sapiens
ucugauugcaacugcaugag

SEQ ID NO: 66143 - RNA, 22 nt, Homo sapiens
ucugaguggcagaaugagcuga

SEQ ID NO: 66144 - RNA, 22 nt, Homo sapiens
ucuguuguuaucauaauauuga

SEQ ID NO: 66145 - RNA, 22 nt, Homo sapiens
uuuugguguacaauucuaugga

SEQ ID NO: 66146 - RNA, 22 nt, Homo sapiens
uuuuggucuccaguuucugcug

SEQ ID NO: 66147 - RNA, 18 nt, Homo sapiens
uuuugcuuaacugcgcca

SEQ ID NO: 66148 - RNA, 22 nt, Homo sapiens
uuugcuauagugaauagugcug

SEQ ID NO: 66149 - RNA, 22 nt, Homo sapiens
uugugcuuuuuaaauagcuucc

SEQ ID NO: 66150 - RNA, 22 nt, Homo sapiens
uuguguaguaccucucacauug

SEQ ID NO: 66151 - RNA, 22 nt, Homo sapiens
uugguucucuuagccaucuuaa

SEQ ID NO: 66152 - RNA, 22 nt, Homo sapiens
uugcuaguguuugguugauggu

SEQ ID NO: 66153 - RNA, 22 nt, Homo sapiens
uugguacuaaaaaguagggugu

SEQ ID NO: 66154 - RNA, 22 nt, Homo sapiens
uugcacuauuaguauagauguc

SEQ ID NO: 66155 - RNA, 19 nt, Homo sapiens
ugugacugggccagccuag

SEQ ID NO: 66156 - RNA, 22 nt, Homo sapiens
ugugacugguugucccacuuuc

SEQ ID NO: 66157 - RNA, 22 nt, Homo sapiens
ugugaucaauuagugaugucug

SEQ ID NO: 66158 - RNA, 22 nt, Homo sapiens
ugugaucaugguauuaaucugc

SEQ ID NO: 66159 - RNA, 22 nt, Homo sapiens
ugucagcacaacucagguuccu

SEQ ID NO: 66160 - RNA, 22 nt, Homo sapiens
uguaugucuucuuuagauaagu

SEQ ID NO: 66161 - RNA, 22 nt, Homo sapiens
ugucaauauguaauaacugaau

SEQ ID NO: 66162 - RNA, 20 nt, Homo sapiens
uguaacaaucuggauguugc

SEQ ID NO: 66163 - RNA, 22 nt, Homo sapiens
uguaagcauugggcaugcaguc

SEQ ID NO: 66164 - RNA, 22 nt, Homo sapiens
uguacaaauuucugugguggug

SEQ ID NO: 66165 - RNA, 22 nt, Homo sapiens
uguacuucaagauuaugguuua

SEQ ID NO: 66166 - RNA, 22 nt, Homo sapiens
uggcuauuucgucaugcucccc

SEQ ID NO: 66167 - RNA, 22 nt, Homo sapiens
uggcuaagaugcacacuucacu

SEQ ID NO: 66168 - RNA, 22 nt, Homo sapiens
uuaugcagcaaagugcuugaaa

SEQ ID NO: 66169 - RNA, 22 nt, Homo sapiens
uuauugcuaaaucaugaccaca

SEQ ID NO: 66170 - RNA, 21 nt, Homo sapiens
uucacuggucuauuucccuuu

SEQ ID NO: 66171 - RNA, 22 nt, Homo sapiens
uuauggcaaugccccacuccua

SEQ ID NO: 66172 - RNA, 22 nt, Homo sapiens
uguguacugcagaguauucugu

SEQ ID NO: 66173 - RNA, 22 nt, Homo sapiens
uuacuacucucuaugaccaguu

SEQ ID NO: 66174 - RNA, 22 nt, Homo sapiens
uuaccucuguggcucucggacu

SEQ ID NO: 66175 - RNA, 22 nt, Homo sapiens
uuacugcucuuuugucaugagu

SEQ ID NO: 66176 - RNA, 22 nt, Homo sapiens
gucauugguucuguuuauguga

SEQ ID NO: 66177 - RNA, 17 nt, Homo sapiens
gcugauguuugcauuuu

SEQ ID NO: 66178 - RNA, 23 nt, Homo sapiens
uaccacauuccuucuuuccuguu

SEQ ID NO: 66179 - RNA, 22 nt, Homo sapiens
uaagucuuuuuggaguuuauaa

SEQ ID NO: 66180 - RNA, 20 nt, Homo sapiens
uaagugcuuuauauugauua

SEQ ID NO: 66181 - RNA, 22 nt, Homo sapiens
uaauacugcugugcuugaguug

SEQ ID NO: 66182 - RNA, 22 nt, Homo sapiens
uaauagagucauuauuauuguu

SEQ ID NO: 66183 - RNA, 22 nt, Homo sapiens
uauggccacugucuuugaguca

SEQ ID NO: 66184 - RNA, 22 nt, Homo sapiens
uauggcuuucuacuugaguucu

SEQ ID NO: 66185 - RNA, 18 nt, Homo sapiens
uaucucauuucuuagguc

SEQ ID NO: 66186 - RNA, 22 nt, Homo sapiens
uaucugguuuuguuacagguuc

SEQ ID NO: 66187 - RNA, 22 nt, Homo sapiens
uagcaguuguuguuacuuguau

SEQ ID NO: 66188 - RNA, 22 nt, Homo sapiens
uaggcacacaucuacuacaaau

SEQ ID NO: 66189 - RNA, 23 nt, Homo sapiens
uagcuucucccagaccugcuccc

SEQ ID NO: 66190 - RNA, 22 nt, Homo sapiens
uagggcuugugaucagguguag

SEQ ID NO: 66191 - RNA, 22 nt, Homo sapiens
ugagaugcauauucuggcuccu

SEQ ID NO: 66192 - RNA, 22 nt, Homo sapiens
ugagagcuuugaugcacuguuu

SEQ ID NO: 66193 - RNA, 17 nt, Homo sapiens
ugauauuuucccagaua

SEQ ID NO: 66194 - RNA, 22 nt, Homo sapiens
ugauaugucccucgacaucagg

SEQ ID NO: 66195 - RNA, 22 nt, Homo sapiens
ugcaauagcuucaggagaaggg

SEQ ID NO: 66196 - RNA, 22 nt, Homo sapiens
ugcugcuguuguuguuacuagc

SEQ ID NO: 66197 - RNA, 22 nt, Homo sapiens
uggaaguaaccaugaauggaau

SEQ ID NO: 66198 - RNA, 22 nt, Homo sapiens
ucacaugugacauauauauuug

SEQ ID NO: 66199 - RNA, 22 nt, Homo sapiens
uccagguacucagggggcugag

SEQ ID NO: 66200 - RNA, 22 nt, Homo sapiens
ucugguguuauucauguaguuu

SEQ ID NO: 66201 - RNA, 22 nt, Homo sapiens
ugaaaguaauugcaguuuuuac

SEQ ID NO: 66202 - RNA, 22 nt, Homo sapiens
cccuguguuguucaaggaucug

SEQ ID NO: 66203 - RNA, 22 nt, Homo sapiens
cacccaguaagcaugaggcccu

SEQ ID NO: 66204 - RNA, 22 nt, Homo sapiens
cagugcauaggaucuaaaauuu

SEQ ID NO: 66205 - RNA, 22 nt, Homo sapiens
caucagauugagaucaucuaag

SEQ ID NO: 66206 - RNA, 21 nt, Homo sapiens
cauccccugccauuguggucu

SEQ ID NO: 66207 - RNA, 22 nt, Homo sapiens
auuguucuuguguccuuuuccu

SEQ ID NO: 66208 - RNA, 22 nt, Homo sapiens
auugcagauucgcuuuguguug

SEQ ID NO: 66209 - RNA, 22 nt, Homo sapiens
auggcuuuaagagugucugaau

SEQ ID NO: 66210 - RNA, 22 nt, Homo sapiens
augugcuaguaucaaacgagac

SEQ ID NO: 66211 - RNA, 18 nt, Homo sapiens
auucuacaggccuuuuga

SEQ ID NO: 66212 - RNA, 22 nt, Homo sapiens
auuccacagccgauaccaugac

SEQ ID NO: 66213 - RNA, 22 nt, Homo sapiens
gauuccacuuacuuagcauucc

SEQ ID NO: 66214 - RNA, 22 nt, Homo sapiens
cugccaguuugauucgggccac

SEQ ID NO: 66215 - RNA, 22 nt, Homo sapiens
cuugugcaugaccccagguggg

SEQ ID NO: 66216 - RNA, 19 nt, Homo sapiens
cuuguacucggcgcaguug

SEQ ID NO: 66217 - RNA, 23 nt, Homo sapiens
aucacuguuaacaauuucuuccu

SEQ ID NO: 66218 - RNA, 22 nt, Homo sapiens
aucugcauucccauguuuauug

SEQ ID NO: 66219 - RNA, 22 nt, Homo sapiens
aucuuguguugaauggugcaga

SEQ ID NO: 66220 - RNA, 22 nt, Homo sapiens
augcuacuggacaauggugacu

SEQ ID NO: 66221 - RNA, 22 nt, Homo sapiens
augcuacuggauuuguauaaau

SEQ ID NO: 66222 - RNA, 22 nt, Homo sapiens
aguaucaucuuguuggccaggc

SEQ ID NO: 66223 - RNA, 22 nt, Homo sapiens
auaacagcugcaaggcaaaagc

SEQ ID NO: 66224 - RNA, 22 nt, Homo sapiens
auacuguuuuacaucauugccu

SEQ ID NO: 66225 - RNA, 22 nt, Homo sapiens
auagcuguccuuacuagcuagg

SEQ ID NO: 66226 - RNA, 22 nt, Homo sapiens
agaucacagucuuugguuuuag

SEQ ID NO: 66227 - RNA, 21 nt, Homo sapiens
agcagcuuugguugaagcaga

SEQ ID NO: 66228 - RNA, 22 nt, Homo sapiens
agcaagauuguucccauuuucu

SEQ ID NO: 66229 - RNA, 22 nt, Homo sapiens
agcagcuuugcauggccuguga

SEQ ID NO: 66230 - RNA, 19 nt, Homo sapiens
accagauugcauucuugga

SEQ ID NO: 66231 - RNA, 22 nt, Homo sapiens
aauagcuguuuuuaauuccugc

SEQ ID NO: 66232 - RNA, 22 nt, Homo sapiens
aaagcuagagaagcugcuguca

SEQ ID NO: 66233 - RNA, 22 nt, Homo sapiens
auggcuuuuuaaaucauguugu

SEQ ID NO: 66234 - RNA, 22 nt, Homo sapiens
augagcucauaaagagugauuu

SEQ ID NO: 66235 - RNA, 22 nt, Homo sapiens
augcagcugaggguaguggagc

SEQ ID NO: 66236 - RNA, 22 nt, Homo sapiens
augcagauauuuuugugguugc

SEQ ID NO: 66237 - RNA, 22 nt, Homo sapiens
augccacuguuuaugucacuua

SEQ ID NO: 66238 - RNA, 22 nt, Homo sapiens
auacugucucuugcuccugccc

SEQ ID NO: 66239 - RNA, 22 nt, Homo sapiens
auacugguuuuugucaugugga

SEQ ID NO: 66240 - RNA, 22 nt, Homo sapiens
auagcagacauuucaaggcagg

SEQ ID NO: 66241 - RNA, 22 nt, Homo sapiens
auagcacugguuuuucuugguu

SEQ ID NO: 66242 - RNA, 22 nt, Homo sapiens
aucccugagaacuuuuaauguu

SEQ ID NO: 66243 - RNA, 22 nt, Homo sapiens
accuuguaucuguuaggauugc

SEQ ID NO: 66244 - RNA, 22 nt, Homo sapiens
acugcaaugucgaauagagaug

SEQ ID NO: 66245 - RNA, 22 nt, Homo sapiens
aauugcucuccuccaaggucuu

SEQ ID NO: 66246 - RNA, 22 nt, Homo sapiens
acacaguguuuauugugguuag

SEQ ID NO: 66247 - RNA, 22 nt, Homo sapiens
agcagcuuugaucugaaugauu

SEQ ID NO: 66248 - RNA, 22 nt, Homo sapiens
acuggcuuauuucacuuagcau

SEQ ID NO: 66249 - RNA, 22 nt, Homo sapiens
uaucagcagagucauacuucaa

SEQ ID NO: 66250 - RNA, 19 nt, Homo sapiens
uacaugcagcaggcacgca

SEQ ID NO: 66251 - RNA, 22 nt, Homo sapiens
uacagaucaguuauuuuguaga

SEQ ID NO: 66252 - RNA, 16 nt, Homo sapiens
uacuacugccuauuau

SEQ ID NO: 66253 - RNA, 22 nt, Homo sapiens
uagagcuugacacuuuccaugg

SEQ ID NO: 66254 - RNA, 22 nt, Homo sapiens
uagagaucuuauauuuuaugac

SEQ ID NO: 66255 - RNA, 22 nt, Homo sapiens
ggugauguuugaguugagacag

SEQ ID NO: 66256 - RNA, 22 nt, Homo sapiens
cugagguaggcccugagaauau

SEQ ID NO: 66257 - RNA, 22 nt, Homo sapiens
gagaugaaaucuugcucuguca

SEQ ID NO: 66258 - RNA, 22 nt, Homo sapiens
gaucugagaaagugucauaaca

SEQ ID NO: 66259 - RNA, 22 nt, Homo sapiens
gcugguguucaggcccucaguc

SEQ ID NO: 66260 - RNA, 22 nt, Homo sapiens
gcugguguugugaaucaggccg

SEQ ID NO: 66261 - RNA, 22 nt, Homo sapiens
gauugcuaaauuguccuucugu

SEQ ID NO: 66262 - RNA, 22 nt, Homo sapiens
gcagaucuucgcgguaaguguu

SEQ ID NO: 66263 - RNA, 22 nt, Homo sapiens
cccuugcacuucagagcugcau

SEQ ID NO: 66264 - RNA, 22 nt, Homo sapiens
cuauguaccuggaacuguauua

SEQ ID NO: 66265 - RNA, 22 nt, Homo sapiens
ccuugguaauguguuuuauucu

SEQ ID NO: 66266 - RNA, 22 nt, Homo sapiens
ccugucuugauuaaauuacuua

SEQ ID NO: 66267 - RNA, 22 nt, Homo sapiens
ccugaugacacgggagauguac

SEQ ID NO: 66268 - RNA, 22 nt, Homo sapiens
cucagguaguuccuuauagcaa

SEQ ID NO: 66269 - RNA, 22 nt, Homo sapiens
cugaaagagcauguaacacagu

SEQ ID NO: 66270 - RNA, 22 nt, Homo sapiens
auuggucuugaaaccagagaga

SEQ ID NO: 66271 - RNA, 22 nt, Homo sapiens
cagcaguuguuucggauuggga

SEQ ID NO: 66272 - RNA, 22 nt, Homo sapiens
cagcugcuuuggaaaauauuuu

SEQ ID NO: 66273 - RNA, 22 nt, Homo sapiens
cagcuggugggagcuggguucc

SEQ ID NO: 66274 - RNA, 22 nt, Homo sapiens
cacccuaucagauguccagaga

SEQ ID NO: 66275 - RNA, 22 nt, Homo sapiens
ugauauguggauucagcucaaa

SEQ ID NO: 66276 - RNA, 19 nt, Homo sapiens
ugccauguagcacaugguc

SEQ ID NO: 66277 - RNA, 22 nt, Homo sapiens
uggcaaaaaaccgcaguugccu

SEQ ID NO: 66278 - RNA, 21 nt, Homo sapiens
uggcuauuucuguggcauaca

SEQ ID NO: 66279 - RNA, 22 nt, Homo sapiens
uggcuagaccugcauaacagcu

SEQ ID NO: 66280 - RNA, 22 nt, Homo sapiens
ucauaguagucacuuaauaaau

SEQ ID NO: 66281 - RNA, 22 nt, Homo sapiens
ucagugcaggaauuuccuuaga

SEQ ID NO: 66282 - RNA, 20 nt, Homo sapiens
ucagugcagauuguccaagu

SEQ ID NO: 66283 - RNA, 22 nt, Homo sapiens
uccugauacgguugcaguucuc

SEQ ID NO: 66284 - RNA, 22 nt, Homo sapiens
ucauuguccaacuucuuucagu

SEQ ID NO: 66285 - RNA, 22 nt, Homo sapiens
ucuuugauuuuguuacuaagac

SEQ ID NO: 66286 - RNA, 22 nt, Homo sapiens
ucugucuuguccucacccuaga

SEQ ID NO: 66287 - RNA, 18 nt, Homo sapiens
ucucacagcaaucuguca

SEQ ID NO: 66288 - RNA, 22 nt, Homo sapiens
ugaacagcacguuuauucagaa

SEQ ID NO: 66289 - RNA, 21 nt, Homo sapiens
ugaaguagcauaggaugucaa

SEQ ID NO: 66290 - RNA, 22 nt, Homo sapiens
uugcacauugcaccuuuuguau

SEQ ID NO: 66291 - RNA, 19 nt, Homo sapiens
uuggcccugguucucuucu

SEQ ID NO: 66292 - RNA, 22 nt, Homo sapiens
uugguauguaauuuauauugua

SEQ ID NO: 66293 - RNA, 22 nt, Homo sapiens
uuguguccccacccaaaucuca

SEQ ID NO: 66294 - RNA, 22 nt, Homo sapiens
uuucuauguugaccagucuaga

SEQ ID NO: 66295 - RNA, 21 nt, Homo sapiens
uuuccuggagcguauggcuuc

SEQ ID NO: 66296 - RNA, 22 nt, Homo sapiens
uugugcuuuugagcugagauga

SEQ ID NO: 66297 - RNA, 22 nt, Homo sapiens
uuugagcaugcagauugccagg

SEQ ID NO: 66298 - RNA, 22 nt, Homo sapiens
uucaaaguuggaggacaaacug

SEQ ID NO: 66299 - RNA, 22 nt, Homo sapiens
uuacagcugcuccccaucacuc

SEQ ID NO: 66300 - RNA, 22 nt, Homo sapiens
uuauagcagugcaggaacagac

SEQ ID NO: 66301 - RNA, 22 nt, Homo sapiens
uucugccaaucaacccacaucc

SEQ ID NO: 66302 - RNA, 22 nt, Homo sapiens
uucucaauggcaacuuguugcu

SEQ ID NO: 66303 - RNA, 22 nt, Homo sapiens
uucauggagccauccuuugauc

SEQ ID NO: 66304 - RNA, 22 nt, Homo sapiens
uucccugagcaucuguugagcc

SEQ ID NO: 66305 - RNA, 22 nt, Homo sapiens
uucccagagaaaaggguuucuu

SEQ ID NO: 66306 - RNA, 22 nt, Homo sapiens
uguagcaaaucgauacuauugg

SEQ ID NO: 66307 - RNA, 22 nt, Homo sapiens
ugugaugugaugagaaguuccu

SEQ ID NO: 66308 - RNA, 22 nt, Homo sapiens
uuaaacugcuugaauuggguuu

SEQ ID NO: 66309 - RNA, 22 nt, Homo sapiens
guuagguagaaguuuacuuuga

SEQ ID NO: 66310 - RNA, 22 nt, Homo sapiens
aucugcaaauaaugaagauugg

SEQ ID NO: 66311 - RNA, 22 nt, Homo sapiens
ugacuauaucucuguauaaacu

SEQ ID NO: 66312 - RNA, 22 nt, Homo sapiens
uugaaagucuaggcuuacagua

SEQ ID NO: 66313 - RNA, 22 nt, Homo sapiens
uaaugcauguaaugggcugaua

SEQ ID NO: 66314 - RNA, 20 nt, Homo sapiens
ucaaggcacgaauaaaaguu

SEQ ID NO: 66315 - RNA, 22 nt, Homo sapiens
uaucccuuagagcggggugguu

SEQ ID NO: 66316 - RNA, 22 nt, Homo sapiens
uucacagugugaucuaugggca

SEQ ID NO: 66317 - RNA, 22 nt, Homo sapiens
acccaguagucauucaggagca

SEQ ID NO: 66318 - RNA, 22 nt, Homo sapiens
acaguggugcgaucucggcuca

SEQ ID NO: 66319 - RNA, 22 nt, Homo sapiens
ccacacugucuuggugggaaac

SEQ ID NO: 66320 - RNA, 22 nt, Homo sapiens
cuggcaaauaguagagccagga

SEQ ID NO: 66321 - RNA, 22 nt, Homo sapiens
ugcauauguugagaugcauauu

SEQ ID NO: 66322 - RNA, 23 nt, Homo sapiens
uuguccccuccaaagcucauguu

SEQ ID NO: 66323 - RNA, 22 nt, Homo sapiens
ucagauguuugagaaguauacu

SEQ ID NO: 66324 - RNA, 22 nt, Homo sapiens
augugcacaugcuuacauguga

SEQ ID NO: 66325 - RNA, 22 nt, Homo sapiens
gaggcagucuguccauucucag

SEQ ID NO: 66326 - RNA, 22 nt, Homo sapiens
uugguuaccuucagaaaugagu

SEQ ID NO: 66327 - RNA, 16 nt, Homo sapiens
uacaauguagaaaaca

SEQ ID NO: 66328 - RNA, 22 nt, Homo sapiens
uucacacugggccuacucugug

SEQ ID NO: 66329 - RNA, 22 nt, Homo sapiens
aaagagaucuaugggcacuaug

SEQ ID NO: 66330 - RNA, 22 nt, Homo sapiens
ugagagaugaacucugauaugu

SEQ ID NO: 66331 - RNA, 22 nt, Homo sapiens
augugcaaagcacuguucagca

SEQ ID NO: 66332 - RNA, 22 nt, Homo sapiens
ugccaguauuuuauugagcauu

SEQ ID NO: 66333 - RNA, 22 nt, Homo sapiens
gcuggcaagaugcugaugcaac

SEQ ID NO: 66334 - RNA, 22 nt, Homo sapiens
uuccaguuuuauggguauagag

SEQ ID NO: 66335 - RNA, 22 nt, Homo sapiens
ugugcaccucuucacacaggga

SEQ ID NO: 66336 - RNA, 22 nt, Homo sapiens
ugaagaucuuaggagcugaggg

SEQ ID NO: 66337 - RNA, 22 nt, Homo sapiens
gcacaguuaaagggucauguga

SEQ ID NO: 66338 - RNA, 22 nt, Homo sapiens
ucaguggacuuagucuuucccc

SEQ ID NO: 66339 - RNA, 22 nt, Homo sapiens
uggcaugauccuagauucaaca

SEQ ID NO: 66340 - RNA, 19 nt, Homo sapiens
cccagugucagagaagggu

SEQ ID NO: 66341 - RNA, 22 nt, Homo sapiens
uucccugagcaucuguugagcc

SEQ ID NO: 66342 - RNA, 22 nt, Homo sapiens
auggcuuuguguucagagcuga

SEQ ID NO: 66343 - RNA, 20 nt, Homo sapiens
ugauauuuucugagcaggaa

SEQ ID NO: 66344 - RNA, 20 nt, Homo sapiens
ugggaacaugugguauaugg

SEQ ID NO: 66345 - RNA, 22 nt, Homo sapiens
uaaguucauucaugaaacuuag

SEQ ID NO: 66346 - RNA, 22 nt, Homo sapiens
uugaggacugcuaagcauuuga

SEQ ID NO: 66347 - RNA, 20 nt, Homo sapiens
uaagccacacagucuaaggu

SEQ ID NO: 66348 - RNA, 22 nt, Homo sapiens
aagggagcugcauaaucuugug

SEQ ID NO: 66349 - RNA, 22 nt, Homo sapiens
uguauauguuuguacauauguc

SEQ ID NO: 66350 - RNA, 22 nt, Homo sapiens
gugcaugcaucuuuauaguagc

SEQ ID NO: 66351 - RNA, 22 nt, Homo sapiens
cuuggcauuguguugauagaag

SEQ ID NO: 66352 - RNA, 22 nt, Homo sapiens
uagacaacugaaacacugugca

SEQ ID NO: 66353 - RNA, 21 nt, Homo sapiens
cuuugcacugcuccucagcuc

SEQ ID NO: 66354 - RNA, 22 nt, Homo sapiens
uagugcuagaugacuuugccau

SEQ ID NO: 66355 - RNA, 22 nt, Homo sapiens
auugagcaauuccuaugugcuu

SEQ ID NO: 66356 - RNA, 22 nt, Homo sapiens
aauacugaaaguauuuucaaau

SEQ ID NO: 66357 - RNA, 20 nt, Homo sapiens
gcaaauggaucccacaagcc

SEQ ID NO: 66358 - RNA, 22 nt, Homo sapiens
uugaacuagaaccugcaaauuu

SEQ ID NO: 66359 - RNA, 22 nt, Homo sapiens
ucuuugauuuuguuacuaagac

SEQ ID NO: 66360 - RNA, 22 nt, Homo sapiens
ugaggucacuuguuuuaugcuu

SEQ ID NO: 66361 - RNA, 22 nt, Homo sapiens
uuaggagacuggauaucucuuu

SEQ ID NO: 66362 - RNA, 22 nt, Homo sapiens
ugucauguuucuacugaccaaa

SEQ ID NO: 66363 - RNA, 22 nt, Homo sapiens
agagccacauuaaauaugggaa

SEQ ID NO: 66364 - RNA, 22 nt, Homo sapiens
uuuguacuaugguuuuucacua

SEQ ID NO: 66365 - RNA, 20 nt, Homo sapiens
uucccucagccuugagggua

SEQ ID NO: 66366 - RNA, 22 nt, Homo sapiens
caaggcacagccccuacuuccu

SEQ ID NO: 66367 - RNA, 22 nt, Homo sapiens
ugggaauaugauacaggucuuu

SEQ ID NO: 66368 - RNA, 22 nt, Homo sapiens
uucucacaguacagggagcucu

SEQ ID NO: 66369 - RNA, 22 nt, Homo sapiens
ucuggccuccuaugagaaucga

SEQ ID NO: 66370 - RNA, 22 nt, Homo sapiens
gaguucauaucuaugagugugc

SEQ ID NO: 66371 - RNA, 22 nt, Homo sapiens
uagcuggaauuacuugcaccug

SEQ ID NO: 66372 - RNA, 22 nt, Homo sapiens
gaucacauggccauuucuagcu

SEQ ID NO: 66373 - RNA, 22 nt, Homo sapiens
ugacagcaucaggauuggagag

SEQ ID NO: 66374 - RNA, 22 nt, Homo sapiens
uuucaucagccagggucagucu

SEQ ID NO: 66375 - RNA, 22 nt, Homo sapiens
ugagaaacuaaguaaugaguaa

SEQ ID NO: 66376 - RNA, 22 nt, Homo sapiens
gcugguguugugaaucaggccg

SEQ ID NO: 66377 - RNA, 22 nt, Homo sapiens
aauaaaguaggaggugaggaaa

SEQ ID NO: 66378 - RNA, 22 nt, Homo sapiens
aaggcuagagaagaagggcauc

SEQ ID NO: 66379 - RNA, 22 nt, Homo sapiens
uuguggcuuaucucauuuagcg

SEQ ID NO: 66380 - RNA, 22 nt, Homo sapiens
ugaggugaaguaauauucuaag

SEQ ID NO: 66381 - RNA, 22 nt, Homo sapiens
aggcuguguggauaauauuggg

SEQ ID NO: 66382 - RNA, 22 nt, Homo sapiens
uuugugcaaacuaggauugcga

SEQ ID NO: 66383 - RNA, 22 nt, Homo sapiens
acugcacuccagccugugagac

SEQ ID NO: 66384 - RNA, 22 nt, Homo sapiens
gugggaugcaaguaaaauuguc

SEQ ID NO: 66385 - RNA, 22 nt, Homo sapiens
caguaaauaucugagcgagguc

SEQ ID NO: 66386 - RNA, 22 nt, Homo sapiens
agguauuuucaacuuagaaugg

SEQ ID NO: 66387 - RNA, 22 nt, Homo sapiens
uaugcuuauaaacauuugucag

SEQ ID NO: 66388 - RNA, 22 nt, Homo sapiens
aaucacaguguucuugugaggg

SEQ ID NO: 66389 - RNA, 20 nt, Homo sapiens
gugagucauuaguaaccaaa

SEQ ID NO: 66390 - RNA, 22 nt, Homo sapiens
aauaucacaggguguacacuca

SEQ ID NO: 66391 - RNA, 20 nt, Homo sapiens
agagugcugucuguccugag

SEQ ID NO: 66392 - RNA, 22 nt, Homo sapiens
augaaagguugucuuaagccau

SEQ ID NO: 66393 - RNA, 22 nt, Homo sapiens
aagaugauguucuuuuucuuag

SEQ ID NO: 66394 - RNA, 22 nt, Homo sapiens
gacuggccauugauacagaggu

SEQ ID NO: 66395 - RNA, 23 nt, Homo sapiens
gugcaugagucuuuauaguagca

SEQ ID NO: 66396 - RNA, 22 nt, Homo sapiens
ucauagaucaaguaauaagaca

SEQ ID NO: 66397 - RNA, 22 nt, Homo sapiens
cacugaaugugagguuggggag

SEQ ID NO: 66398 - RNA, 22 nt, Homo sapiens
uuaauagugacucauuuuccac

SEQ ID NO: 66399 - RNA, 22 nt, Homo sapiens
aaagugccugacucauaguuag

SEQ ID NO: 66400 - RNA, 22 nt, Homo sapiens
ucacacugaaacuaggguguga

SEQ ID NO: 66401 - RNA, 22 nt, Homo sapiens
gcaucacagcuccugugcuggc

SEQ ID NO: 66402 - RNA, 22 nt, Homo sapiens
auaucagugucuuacuguuuuu

SEQ ID NO: 66403 - RNA, 22 nt, Homo sapiens
ugauccuguccuuaugauguua

SEQ ID NO: 66404 - RNA, 22 nt, Homo sapiens
ucacagaggagaagaccuuuaa

SEQ ID NO: 66405 - RNA, 22 nt, Homo sapiens
uaucucuuuucauguguaaaug

SEQ ID NO: 66406 - RNA, 22 nt, Homo sapiens
cucaaaugguccagcuaguggu

SEQ ID NO: 66407 - RNA, 22 nt, Homo sapiens
gagagugcuuuggguguaggcc

SEQ ID NO: 66408 - RNA, 22 nt, Homo sapiens
auagugcugcaaugaacauaca

SEQ ID NO: 66409 - RNA, 22 nt, Homo sapiens
agaauguauauucuguaguugu

SEQ ID NO: 66410 - RNA, 19 nt, Homo sapiens
aaagguaguaaccucugau

SEQ ID NO: 66411 - RNA, 19 nt, Homo sapiens
cccuggcacauggaaaaug

SEQ ID NO: 66412 - RNA, 22 nt, Homo sapiens
aagugguagggucaggauugga

SEQ ID NO: 66413 - RNA, 22 nt, Homo sapiens
ggcuagagaauagugccacuaa

SEQ ID NO: 66414 - RNA, 22 nt, Homo sapiens
cauugcacucuagucuggguga

SEQ ID NO: 66415 - RNA, 22 nt, Homo sapiens
aucuugcauuugcuaaaaugca

SEQ ID NO: 66416 - RNA, 22 nt, Homo sapiens
ugugcacaacaugcagguuugu

SEQ ID NO: 66417 - RNA, 22 nt, Homo sapiens
ucucacagaguugaauguuucu

SEQ ID NO: 66418 - RNA, 22 nt, Homo sapiens
ugucaguguaugagccccggau

SEQ ID NO: 66419 - RNA, 22 nt, Homo sapiens
ucacugaaaccgccuccaccuc

SEQ ID NO: 66420 - RNA, 19 nt, Homo sapiens
aagaugauguuugggcuaa

SEQ ID NO: 66421 - RNA, 22 nt, Homo sapiens
ucuuucacuuagcaugauguuu

SEQ ID NO: 66422 - RNA, 22 nt, Homo sapiens
ucaaguaagaagugggcauaaa

SEQ ID NO: 66423 - RNA, 22 nt, Homo sapiens
ugaagggcauuguuuugccaaa

SEQ ID NO: 66424 - RNA, 22 nt, Homo sapiens
ugccaguauuuuguugaggauu

SEQ ID NO: 66425 - RNA, 22 nt, Homo sapiens
uaugugcacaugcccuggugac

SEQ ID NO: 66426 - RNA, 22 nt, Homo sapiens
aauggcuucuuauugugguuca

SEQ ID NO: 66427 - RNA, 22 nt, Homo sapiens
gaaagacuuucugcuguggaua

SEQ ID NO: 66428 - RNA, 18 nt, Homo sapiens
cccagugacuuauggccu

SEQ ID NO: 66429 - RNA, 23 nt, Homo sapiens
ugauaacagcauaugaagauucu

SEQ ID NO: 66430 - RNA, 22 nt, Homo sapiens
uugugaauggugccacaauaaa

SEQ ID NO: 66431 - RNA, 22 nt, Homo sapiens
uaggcaguggagaaauaaacag

SEQ ID NO: 66432 - RNA, 22 nt, Homo sapiens
ugagaagugacgcagcaggguu

SEQ ID NO: 66433 - RNA, 21 nt, Homo sapiens
cuuuugcacuccagccugggu

SEQ ID NO: 66434 - RNA, 22 nt, Homo sapiens
acgugcaugcacacacaugcgc

SEQ ID NO: 66435 - RNA, 22 nt, Homo sapiens
ucaaaugguccacgugaacauu

SEQ ID NO: 66436 - RNA, 22 nt, Homo sapiens
uugagauggagucuugcacugu

SEQ ID NO: 66437 - RNA, 21 nt, Homo sapiens
uucuuugcucaguguuagagu

SEQ ID NO: 66438 - RNA, 22 nt, Homo sapiens
gccaaaaugcugggauuacagg

SEQ ID NO: 66439 - RNA, 22 nt, Homo sapiens
gagucagugucuugcucuguca

SEQ ID NO: 66440 - RNA, 18 nt, Homo sapiens
aaacugcuuccuuggccu

SEQ ID NO: 66441 - RNA, 22 nt, Homo sapiens
uagaauguaacuuccaugucau

SEQ ID NO: 66442 - RNA, 22 nt, Homo sapiens
ugaaacauacacucugaugggg

SEQ ID NO: 66443 - RNA, 22 nt, Homo sapiens
augcauaugucuuuauaguggc

SEQ ID NO: 66444 - RNA, 22 nt, Homo sapiens
cuugcacauuacagaucugcau

SEQ ID NO: 66445 - RNA, 22 nt, Homo sapiens
gcagugacaugugccaguuuau

SEQ ID NO: 66446 - RNA, 22 nt, Homo sapiens
gugaucuuucaggcuugaccau

SEQ ID NO: 66447 - RNA, 22 nt, Homo sapiens
ccucacaaccuuuauugaagag

SEQ ID NO: 66448 - RNA, 22 nt, Homo sapiens
uaugaaagcuacuucucacaau

SEQ ID NO: 66449 - RNA, 22 nt, Homo sapiens
uggagagcaaaaucaauccaaa

SEQ ID NO: 66450 - RNA, 22 nt, Homo sapiens
uuugcuugaggucuagcuaccc

SEQ ID NO: 66451 - RNA, 22 nt, Homo sapiens
aaaugcacaaagauuuugcacu

SEQ ID NO: 66452 - RNA, 22 nt, Homo sapiens
ugacaugauguuccuacacugu

SEQ ID NO: 66453 - RNA, 22 nt, Homo sapiens
cugaaaguuauucaggggcaag

SEQ ID NO: 66454 - RNA, 22 nt, Homo sapiens
gccaguguuuuauugagaauuu

SEQ ID NO: 66455 - RNA, 22 nt, Homo sapiens
gacuagaaauuauuuagugagc

SEQ ID NO: 66456 - RNA, 22 nt, Homo sapiens
uaacccuuacaacuacacucgu

SEQ ID NO: 66457 - RNA, 22 nt, Homo sapiens
gucagggagggauagaugauua

SEQ ID NO: 66458 - RNA, 22 nt, Homo sapiens
acuagguaguaaucugcagaga

SEQ ID NO: 66459 - RNA, 22 nt, Homo sapiens
uuauaaacaugaagauuugggg

SEQ ID NO: 66460 - RNA, 21 nt, Homo sapiens
augugcacuaugucauuuaau

SEQ ID NO: 66461 - RNA, 22 nt, Homo sapiens
aggcagcuguuauauacugagu

SEQ ID NO: 66462 - RNA, 22 nt, Homo sapiens
cuagcacauaguuauucacuca

SEQ ID NO: 66463 - RNA, 22 nt, Homo sapiens
gugucacagcuuccaucucggu

SEQ ID NO: 66464 - RNA, 22 nt, Homo sapiens
caugugcaugcuuucuuaugug

SEQ ID NO: 66465 - RNA, 22 nt, Homo sapiens
uggcaauguggaaugguccagg

SEQ ID NO: 66466 - RNA, 22 nt, Homo sapiens
aagugguguuuguauuuaugca

SEQ ID NO: 66467 - RNA, 22 nt, Homo sapiens
uugaaagcuaucagagauucca

SEQ ID NO: 66468 - RNA, 22 nt, Homo sapiens
aucccugagccugacucucaga

SEQ ID NO: 66469 - RNA, 22 nt, Homo sapiens
ugaagugaagcaguaguguggg

SEQ ID NO: 66470 - RNA, 18 nt, Homo sapiens
cugagcacugcuuuauga

SEQ ID NO: 66471 - RNA, 22 nt, Homo sapiens
agugcaguggcucaaaaugccu

SEQ ID NO: 66472 - RNA, 21 nt, Homo sapiens
uaaaacuguaacuuuguccug

SEQ ID NO: 66473 - RNA, 22 nt, Homo sapiens
ugagaugaagcuagaagaaugg

SEQ ID NO: 66474 - RNA, 22 nt, Homo sapiens
uauaagacgagcaaaaagcuug

SEQ ID NO: 66475 - RNA, 22 nt, Homo sapiens
ucaccuggagacaugaagacug

SEQ ID NO: 66476 - RNA, 22 nt, Homo sapiens
ucuguggugggcuccacccagu

SEQ ID NO: 66477 - RNA, 22 nt, Homo sapiens
auggaaggagaggaaugaauga

SEQ ID NO: 66478 - RNA, 22 nt, Homo sapiens
augcauauuccugggccucacu

SEQ ID NO: 66479 - RNA, 22 nt, Homo sapiens
auggucuuuucccuggauuaua

SEQ ID NO: 66480 - RNA, 23 nt, Homo sapiens
ucaguagucauugggaaagugug

SEQ ID NO: 66481 - RNA, 22 nt, Homo sapiens
uuaaaugcuagaauuuucuuug

SEQ ID NO: 66482 - RNA, 22 nt, Homo sapiens
ugaggagugagaaauugguuuc

SEQ ID NO: 66483 - RNA, 22 nt, Homo sapiens
aucaaaguaucucaauauggua

SEQ ID NO: 66484 - RNA, 22 nt, Homo sapiens
uaaagccauugucaaguuugua

SEQ ID NO: 66485 - RNA, 22 nt, Homo sapiens
cugggcaaugcggcuggauaga

SEQ ID NO: 66486 - RNA, 22 nt, Homo sapiens
cccuguguuuagcugaagguuu

SEQ ID NO: 66487 - RNA, 22 nt, Homo sapiens
auagaagcuauguauaggggcc

SEQ ID NO: 66488 - RNA, 22 nt, Homo sapiens
agcuuguuuucccauaacuaga

SEQ ID NO: 66489 - RNA, 22 nt, Homo sapiens
ucacuuugacggccaacuucua

SEQ ID NO: 66490 - RNA, 22 nt, Homo sapiens
agugauuuuaacuuccagcaau

SEQ ID NO: 66491 - RNA, 22 nt, Homo sapiens
auagaagcugccaacguuucag

SEQ ID NO: 66492 - RNA, 22 nt, Homo sapiens
ugacaacugauuaacuccuuua

SEQ ID NO: 66493 - RNA, 22 nt, Homo sapiens
uugugcauguauauuaguucac

SEQ ID NO: 66494 - RNA, 22 nt, Homo sapiens
auggaagaauugucggggaugu

SEQ ID NO: 66495 - RNA, 21 nt, Homo sapiens
auccuucuuuuucaaccugug

SEQ ID NO: 66496 - RNA, 21 nt, Homo sapiens
caugucacugcacucuagccu

SEQ ID NO: 66497 - RNA, 22 nt, Homo sapiens
cuuggcuucuuuauguggcuau

SEQ ID NO: 66498 - RNA, 22 nt, Homo sapiens
uggaaaguacugagguccaccu

SEQ ID NO: 66499 - RNA, 18 nt, Homo sapiens
ucccuuuguagaugaccc

SEQ ID NO: 66500 - RNA, 22 nt, Homo sapiens
uccauagacauuuuaagguagu

SEQ ID NO: 66501 - RNA, 22 nt, Homo sapiens
cauuuugcaguuucugucucca

SEQ ID NO: 66502 - RNA, 22 nt, Homo sapiens
cugugcuaggcaaugugguaga

SEQ ID NO: 66503 - RNA, 22 nt, Homo sapiens
cacucaguuugugguacuuugu

SEQ ID NO: 66504 - RNA, 22 nt, Homo sapiens
auagugcugugaugaacauaca

SEQ ID NO: 66505 - RNA, 22 nt, Homo sapiens
cugagaguugaugaaauauggu

SEQ ID NO: 66506 - RNA, 18 nt, Homo sapiens
ucccugacucaaauucuu

SEQ ID NO: 66507 - RNA, 22 nt, Homo sapiens
aaagugcugggauuuuaggcau

SEQ ID NO: 66508 - RNA, 22 nt, Homo sapiens
agcuccauuguaaucaccuggu

SEQ ID NO: 66509 - RNA, 22 nt, Homo sapiens
uuucaucaagcacagaguagau

SEQ ID NO: 66510 - RNA, 22 nt, Homo sapiens
auggcuuuaagagugucugaau

SEQ ID NO: 66511 - RNA, 22 nt, Homo sapiens
gucuggagacuugggucaucaa

SEQ ID NO: 66512 - RNA, 19 nt, Homo sapiens
uacuggcucgggaauuuuc

SEQ ID NO: 66513 - RNA, 22 nt, Homo sapiens
aucagauggcuaaaacagaaga

SEQ ID NO: 66514 - RNA, 22 nt, Homo sapiens
uucaucuggcaauucagagauu

SEQ ID NO: 66515 - RNA, 22 nt, Homo sapiens
aaaugacuuuuuaugcagagua

SEQ ID NO: 66516 - RNA, 22 nt, Homo sapiens
ucacuguguauguauaugcagg

SEQ ID NO: 66517 - RNA, 22 nt, Homo sapiens
ugagcagaaagcugcaaggucg

SEQ ID NO: 66518 - RNA, 22 nt, Homo sapiens
cagagaucaugcaacugcucgc

SEQ ID NO: 66519 - RNA, 22 nt, Homo sapiens
uccucauggagaaccucugcua

SEQ ID NO: 66520 - RNA, 22 nt, Homo sapiens
uugaggugaauuugcaggaugc

SEQ ID NO: 66521 - RNA, 22 nt, Homo sapiens
uauggcuucuauaaggaagcuu

SEQ ID NO: 66522 - RNA, 22 nt, Homo sapiens
ucccagaaacgcauauguucau

SEQ ID NO: 66523 - RNA, 22 nt, Homo sapiens
guccaaauccaugggauguaca

SEQ ID NO: 66524 - RNA, 22 nt, Homo sapiens
uuucauggacgcaaugccuuuu

SEQ ID NO: 66525 - RNA, 22 nt, Homo sapiens
ucucccauccguacacggauug

SEQ ID NO: 66526 - RNA, 22 nt, Homo sapiens
ucagaucauauucuucgcugcu

SEQ ID NO: 66527 - RNA, 22 nt, Homo sapiens
ucccaguauucauuuacagaag

SEQ ID NO: 66528 - RNA, 22 nt, Homo sapiens
ucucugagaaaaguuucuccca

SEQ ID NO: 66529 - RNA, 22 nt, Homo sapiens
uuacauguuguggguuguggcc

SEQ ID NO: 66530 - RNA, 22 nt, Homo sapiens
uucacugugcuuaaauucugcu

SEQ ID NO: 66531 - RNA, 21 nt, Homo sapiens
aucugugagaccuuggggguu

SEQ ID NO: 66532 - RNA, 22 nt, Homo sapiens
cagagugcauguuuagaugagu

SEQ ID NO: 66533 - RNA, 22 nt, Homo sapiens
acagugcuucugauaugaugcc

SEQ ID NO: 66534 - RNA, 22 nt, Homo sapiens
ucucccauccaugaacuucugu

SEQ ID NO: 66535 - RNA, 23 nt, Homo sapiens
cagugguguuagagaaaucuuuu

SEQ ID NO: 66536 - RNA, 22 nt, Homo sapiens
ugaggagugaacuauuucugau

SEQ ID NO: 66537 - RNA, 22 nt, Homo sapiens
ucugcaagucuaaacuagccau

SEQ ID NO: 66538 - RNA, 22 nt, Homo sapiens
augguacuagaguaagaauugu

SEQ ID NO: 66539 - RNA, 22 nt, Homo sapiens
aagaugcagaagcccagauguu

SEQ ID NO: 66540 - RNA, 20 nt, Homo sapiens
cuuggcuuucuugguguuaa

SEQ ID NO: 66541 - RNA, 22 nt, Homo sapiens
gcagcagugcccuggauggaaa

SEQ ID NO: 66542 - RNA, 22 nt, Homo sapiens
uuugacuuuuagaauaugaguu

SEQ ID NO: 66543 - RNA, 22 nt, Homo sapiens
auagcauaucccacaugucaga

SEQ ID NO: 66544 - RNA, 22 nt, Homo sapiens
uaucacacuggaagaaguuaag

SEQ ID NO: 66545 - RNA, 22 nt, Homo sapiens
guaaaguaaagcacaucaaggu

SEQ ID NO: 66546 - RNA, 22 nt, Homo sapiens
uugacauaguuucugaaauaga

SEQ ID NO: 66547 - RNA, 21 nt, Homo sapiens
uguuaacaugcagauuacugg

SEQ ID NO: 66548 - RNA, 21 nt, Homo sapiens
acccucuaguuuucaacaggc

SEQ ID NO: 66549 - RNA, 22 nt, Homo sapiens
agagaugauuaacauuuuggua

SEQ ID NO: 66550 - RNA, 23 nt, Homo sapiens
acagucuaguuugaagucaggua

SEQ ID NO: 66551 - RNA, 22 nt, Homo sapiens
uuuaugcuacauguguuggaaa

SEQ ID NO: 66552 - RNA, 22 nt, Homo sapiens
augugcuuuuggugagagauuu

SEQ ID NO: 66553 - RNA, 22 nt, Homo sapiens
gggguaggcuacacugaguucc

SEQ ID NO: 66554 - RNA, 22 nt, Homo sapiens
gccccaguacaggcuccuuaga

SEQ ID NO: 66555 - RNA, 22 nt, Homo sapiens
gugaaucauaugccagucaugc

SEQ ID NO: 66556 - RNA, 19 nt, Homo sapiens
cucauggagaaggagaaua

SEQ ID NO: 66557 - RNA, 22 nt, Homo sapiens
caucccugucgucaagucucug

SEQ ID NO: 66558 - RNA, 22 nt, Homo sapiens
ucauguaauuuugugucuauga

SEQ ID NO: 66559 - RNA, 23 nt, Homo sapiens
cuuuugcaaugugaucuugccac

SEQ ID NO: 66560 - RNA, 22 nt, Homo sapiens
ugggaucagcugggcucucugu

SEQ ID NO: 66561 - RNA, 22 nt, Homo sapiens
ucagauguuuuguuuaucugcu

SEQ ID NO: 66562 - RNA, 22 nt, Homo sapiens
uuucccauuguucugcucugug

SEQ ID NO: 66563 - RNA, 22 nt, Homo sapiens
ucacacugaauuugaagcaaug

SEQ ID NO: 66564 - RNA, 22 nt, Homo sapiens
guucacaguuucuaaucccagc

SEQ ID NO: 66565 - RNA, 22 nt, Homo sapiens
ucacccacacaggagacaggga

SEQ ID NO: 66566 - RNA, 22 nt, Homo sapiens
gaguggugguucugaaacuuuu

SEQ ID NO: 66567 - RNA, 22 nt, Homo sapiens
ucucaaguggucgcaguuagau

SEQ ID NO: 66568 - RNA, 22 nt, Homo sapiens
uggauugaaagcuuuaauauug

SEQ ID NO: 66569 - RNA, 22 nt, Homo sapiens
augcaaaucuuaaguaugugug

SEQ ID NO: 66570 - RNA, 22 nt, Homo sapiens
aaugacuaagaugguacauuuu

SEQ ID NO: 66571 - RNA, 22 nt, Homo sapiens
ugaguucaauuguauuuuauua

SEQ ID NO: 66572 - RNA, 22 nt, Homo sapiens
aucacagguacuauggcugaca

SEQ ID NO: 66573 - RNA, 22 nt, Homo sapiens
uaucauaguuuggacuuucauu

SEQ ID NO: 66574 - RNA, 22 nt, Homo sapiens
ccugagaucauacuguuaguaa

SEQ ID NO: 66575 - RNA, 22 nt, Homo sapiens
aaagaagucagccuguccuuug

SEQ ID NO: 66576 - RNA, 22 nt, Homo sapiens
auacacauuccugggccucacc

SEQ ID NO: 66577 - RNA, 18 nt, Homo sapiens
acagugcuggcaugagau

SEQ ID NO: 66578 - RNA, 22 nt, Homo sapiens
ugugacuaguggugaaugacgc

SEQ ID NO: 66579 - RNA, 22 nt, Homo sapiens
uauggauuugccuauucuguau

SEQ ID NO: 66580 - RNA, 22 nt, Homo sapiens
guagcagucacauagcagauug

SEQ ID NO: 66581 - RNA, 22 nt, Homo sapiens
augcauggucugaagucaaccu

SEQ ID NO: 66582 - RNA, 22 nt, Homo sapiens
cuaagugaguauaauuuuaaga

SEQ ID NO: 66583 - RNA, 18 nt, Homo sapiens
augaccugcggguuauau

SEQ ID NO: 66584 - RNA, 22 nt, Homo sapiens
ugcaaucauuuggaggagaaga

SEQ ID NO: 66585 - RNA, 22 nt, Homo sapiens
caucacacuuggauguaagaca

SEQ ID NO: 66586 - RNA, 22 nt, Homo sapiens
aaccugaagaaaauauuugcug

SEQ ID NO: 66587 - RNA, 22 nt, Homo sapiens
cccaguaaucuugccaguuuuc

SEQ ID NO: 66588 - RNA, 22 nt, Homo sapiens
cacaguguuccagcuauuugaa

SEQ ID NO: 66589 - RNA, 21 nt, Homo sapiens
cuuuaugcuguguuagaaaag

SEQ ID NO: 66590 - RNA, 22 nt, Homo sapiens
uagcugcccagcacgaaguugg

SEQ ID NO: 66591 - RNA, 20 nt, Homo sapiens
ggagagugacauaauucugg

SEQ ID NO: 66592 - RNA, 22 nt, Homo sapiens
uggcauuuucucuguucuuaga

SEQ ID NO: 66593 - RNA, 22 nt, Homo sapiens
aucccugagaacuuuuaauguu

SEQ ID NO: 66594 - RNA, 22 nt, Homo sapiens
uacaaagugggaaacgaagguu

SEQ ID NO: 66595 - RNA, 22 nt, Homo sapiens
ucacaaguguauagacaugucc

SEQ ID NO: 66596 - RNA, 19 nt, Homo sapiens
caauacuucuuggcauaca

SEQ ID NO: 66597 - RNA, 22 nt, Homo sapiens
ugggaucauuaugcauagugua

SEQ ID NO: 66598 - RNA, 22 nt, Homo sapiens
ggucacauuggacuaucaaguu

SEQ ID NO: 66599 - RNA, 22 nt, Homo sapiens
gagaaguaaauuuauuugcaaa

SEQ ID NO: 66600 - RNA, 22 nt, Homo sapiens
gugggcaagucacuucaguucu

SEQ ID NO: 66601 - RNA, 22 nt, Homo sapiens
uucaguggacuuaguagugcuu

SEQ ID NO: 66602 - RNA, 22 nt, Homo sapiens
ucccugacagggucugagcuuu

SEQ ID NO: 66603 - RNA, 18 nt, Homo sapiens
gaguggugcuucccuugu

SEQ ID NO: 66604 - RNA, 22 nt, Homo sapiens
acugggauauuauugguaauau

SEQ ID NO: 66605 - RNA, 22 nt, Homo sapiens
uccuuuaguuaauaaagacaag

SEQ ID NO: 66606 - RNA, 22 nt, Homo sapiens
aggcaugaaauacaugcauuga

SEQ ID NO: 66607 - RNA, 22 nt, Homo sapiens
ugagggaugccugguuuguuuu

SEQ ID NO: 66608 - RNA, 22 nt, Homo sapiens
ucaagcaauucugcugccucag

SEQ ID NO: 66609 - RNA, 22 nt, Homo sapiens
gauuagcacuucaguuacagua

SEQ ID NO: 66610 - RNA, 22 nt, Homo sapiens
uuuugguauaugcaggggucuu

SEQ ID NO: 66611 - RNA, 22 nt, Homo sapiens
uggucccaugaacuuuagguca

SEQ ID NO: 66612 - RNA, 22 nt, Homo sapiens
uuggccccuccaaaucucaugu

SEQ ID NO: 66613 - RNA, 20 nt, Homo sapiens
auggcccugcugggaguguc

SEQ ID NO: 66614 - RNA, 22 nt, Homo sapiens
uuguuauguaucucaagauaaa

SEQ ID NO: 66615 - RNA, 22 nt, Homo sapiens
agcugccagucuuguaaggccu

SEQ ID NO: 66616 - RNA, 22 nt, Homo sapiens
caaagucuucaguugauucuga

SEQ ID NO: 66617 - RNA, 22 nt, Homo sapiens
uucugaguggcuuucaacacug

SEQ ID NO: 66618 - RNA, 22 nt, Homo sapiens
aggugcugagcagagaauccug

SEQ ID NO: 66619 - RNA, 19 nt, Homo sapiens
augcaaugucacaggcugc

SEQ ID NO: 66620 - RNA, 22 nt, Homo sapiens
augaaaucuuuccugugaggau

SEQ ID NO: 66621 - RNA, 22 nt, Homo sapiens
guggaaaauuauugcuguuuuu

SEQ ID NO: 66622 - RNA, 23 nt, Homo sapiens
aaguucaugcucaucuguuacac

SEQ ID NO: 66623 - RNA, 22 nt, Homo sapiens
augauggaggccgugauggacg

SEQ ID NO: 66624 - RNA, 22 nt, Homo sapiens
uacccaguaacaaguauuuugg

SEQ ID NO: 66625 - RNA, 22 nt, Homo sapiens
guucuggagauaaagccaaggu

SEQ ID NO: 66626 - RNA, 22 nt, Homo sapiens
ugacaucaccaccuccgucauc

SEQ ID NO: 66627 - RNA, 22 nt, Homo sapiens
uagaauguaacaguuaaaagca

SEQ ID NO: 66628 - RNA, 22 nt, Homo sapiens
aaaguucuguugauagugcuga

SEQ ID NO: 66629 - RNA, 22 nt, Homo sapiens
uuugguuauuugaaacuagcau

SEQ ID NO: 66630 - RNA, 19 nt, Homo sapiens
ucuuugcuuuucuaagagg

SEQ ID NO: 66631 - RNA, 22 nt, Homo sapiens
cagcugcuuuggaaaauauuuu

SEQ ID NO: 66632 - RNA, 17 nt, Homo sapiens
gacgaucaucaggaggc

SEQ ID NO: 66633 - RNA, 20 nt, Homo sapiens
acugggcuaccgaaguaagg

SEQ ID NO: 66634 - RNA, 22 nt, Homo sapiens
cugugauuauauaguuaaggua

SEQ ID NO: 66635 - RNA, 22 nt, Homo sapiens
gggagugugcacacaugguaua

SEQ ID NO: 66636 - RNA, 22 nt, Homo sapiens
augagauucuuagagaagucug

SEQ ID NO: 66637 - RNA, 22 nt, Homo sapiens
uugaagacuaaguuaucaggau

SEQ ID NO: 66638 - RNA, 22 nt, Homo sapiens
ucaacauugcugucaggcaucu

SEQ ID NO: 66639 - RNA, 22 nt, Homo sapiens
gcugguguagagugcagaaagg

SEQ ID NO: 66640 - RNA, 22 nt, Homo sapiens
guggcaugaaagcaucugugau

SEQ ID NO: 66641 - RNA, 22 nt, Homo sapiens
ggaguaggcuguccggcaccca

SEQ ID NO: 66642 - RNA, 22 nt, Homo sapiens
uucaagucuuggcuuugccacc

SEQ ID NO: 66643 - RNA, 22 nt, Homo sapiens
uuggucaggcuaaucucgaacg

SEQ ID NO: 66644 - RNA, 22 nt, Homo sapiens
aaugugcuuucuuucacacagu

SEQ ID NO: 66645 - RNA, 22 nt, Homo sapiens
cacuggucucauggcaugagag

SEQ ID NO: 66646 - RNA, 22 nt, Homo sapiens
gugaggaaggaaaccugcuagc

SEQ ID NO: 66647 - RNA, 22 nt, Homo sapiens
caaagucuucucauuaugucuu

SEQ ID NO: 66648 - RNA, 22 nt, Homo sapiens
ucccugaguaucuaauguguuu

SEQ ID NO: 66649 - RNA, 22 nt, Homo sapiens
ucaccaguaauaaagagccugc

SEQ ID NO: 66650 - RNA, 22 nt, Homo sapiens
aaagugauguccaggcuuucag

SEQ ID NO: 66651 - RNA, 22 nt, Homo sapiens
uuuacugugggguuucuuagag

SEQ ID NO: 66652 - RNA, 22 nt, Homo sapiens
gugacagucaaagacaugacuu

SEQ ID NO: 66653 - RNA, 22 nt, Homo sapiens
ucaguggagagcuuccaggauu

SEQ ID NO: 66654 - RNA, 22 nt, Homo sapiens
agugcaguugucacgugccuuc

SEQ ID NO: 66655 - RNA, 22 nt, Homo sapiens
acccuuugucaaucaguacuaa

SEQ ID NO: 66656 - RNA, 22 nt, Homo sapiens
aaaugcugcuuuggccucuucu

SEQ ID NO: 66657 - RNA, 22 nt, Homo sapiens
aggagguagggugugaaacagc

SEQ ID NO: 66658 - RNA, 22 nt, Homo sapiens
ugaaauuauucuuaccaaggug

SEQ ID NO: 66659 - RNA, 22 nt, Homo sapiens
ucacacugcaucuguuggaauu

SEQ ID NO: 66660 - RNA, 22 nt, Homo sapiens
guuauguuaguuacaaggcuag

SEQ ID NO: 66661 - RNA, 22 nt, Homo sapiens
cugagaucguggggcugcuguc

SEQ ID NO: 66662 - RNA, 22 nt, Homo sapiens
uacaguggcaugucaggugcuu

SEQ ID NO: 66663 - RNA, 22 nt, Homo sapiens
gggaugaaguugauguagaaag

SEQ ID NO: 66664 - RNA, 22 nt, Homo sapiens
ggacaaaguauuuucaaaugua

SEQ ID NO: 66665 - RNA, 19 nt, Homo sapiens
uuccugagaacaagggcuu

SEQ ID NO: 66666 - RNA, 22 nt, Homo sapiens
uuaacacugccauugauacugu

SEQ ID NO: 66667 - RNA, 22 nt, Homo sapiens
aucccaguucagccucugacac

SEQ ID NO: 66668 - RNA, 22 nt, Homo sapiens
uugaacugguaguuggaaaucu

SEQ ID NO: 66669 - RNA, 22 nt, Homo sapiens
gguggugguauuucagaaaaug

SEQ ID NO: 66670 - RNA, 22 nt, Homo sapiens
aucccaguaaaaauggcuucua

SEQ ID NO: 66671 - RNA, 22 nt, Homo sapiens
ugguaaaaugucauuuaccaga

SEQ ID NO: 66672 - RNA, 23 nt, Homo sapiens
uaucacacuuucucugugccaca

SEQ ID NO: 66673 - RNA, 22 nt, Homo sapiens
cuguugguuaaauuccaugcag

SEQ ID NO: 66674 - RNA, 22 nt, Homo sapiens
agagccacacucuccuaacuca

SEQ ID NO: 66675 - RNA, 22 nt, Homo sapiens
cuacagcagcccaguccccgaa

SEQ ID NO: 66676 - RNA, 22 nt, Homo sapiens
aagggaauguuguagcugguuu

SEQ ID NO: 66677 - RNA, 23 nt, Homo sapiens
cucccugaacaugacacaccaga

SEQ ID NO: 66678 - RNA, 22 nt, Homo sapiens
cagugcuuuaucaaguccucca

SEQ ID NO: 66679 - RNA, 22 nt, Homo sapiens
augugcuuuuuaaacagaugcu

SEQ ID NO: 66680 - RNA, 22 nt, Homo sapiens
auagugaacuuugugagaacaa

SEQ ID NO: 66681 - RNA, 22 nt, Homo sapiens
ugagacgaagucuugcucuguu

SEQ ID NO: 66682 - RNA, 19 nt, Homo sapiens
auacacguguauacauaca

SEQ ID NO: 66683 - RNA, 22 nt, Homo sapiens
agucacaugcauuuucuucaau

SEQ ID NO: 66684 - RNA, 22 nt, Homo sapiens
augugcaugcuguucugccaga

SEQ ID NO: 66685 - RNA, 22 nt, Homo sapiens
aaggugcucucuuauguagaaa

SEQ ID NO: 66686 - RNA, 22 nt, Homo sapiens
ugacaguaaacagucuugauua

SEQ ID NO: 66687 - RNA, 16 nt, Homo sapiens
uuauugcauucuucuc

SEQ ID NO: 66688 - RNA, 22 nt, Homo sapiens
ucccuugagccuggcuucucac

SEQ ID NO: 66689 - RNA, 22 nt, Homo sapiens
uugauauguguauagcaugugg

SEQ ID NO: 66690 - RNA, 22 nt, Homo sapiens
ugagguuauuuguucaagaagu

SEQ ID NO: 66691 - RNA, 22 nt, Homo sapiens
aaggcagugugcacauaacacu

SEQ ID NO: 66692 - RNA, 20 nt, Homo sapiens
uaguggaaaucagguccucu

SEQ ID NO: 66693 - RNA, 22 nt, Homo sapiens
cucccugagccagggcuuugac

SEQ ID NO: 66694 - RNA, 22 nt, Homo sapiens
auggaaggagaauggucuuuga

SEQ ID NO: 66695 - RNA, 22 nt, Homo sapiens
auggagaugugcgaacugagua

SEQ ID NO: 66696 - RNA, 22 nt, Homo sapiens
uuugagauaucuuccaucagua

SEQ ID NO: 66697 - RNA, 23 nt, Homo sapiens
agagugcaauggugccaucucgg

SEQ ID NO: 66698 - RNA, 18 nt, Homo sapiens
ugaaacacauuuuuuccu

SEQ ID NO: 66699 - RNA, 22 nt, Homo sapiens
auucaucagggauauuggucug

SEQ ID NO: 66700 - RNA, 22 nt, Homo sapiens
uguggcagugcuuuaugaaacc

SEQ ID NO: 66701 - RNA, 22 nt, Homo sapiens
agaucauaugcaguaaugaacu

SEQ ID NO: 66702 - RNA, 23 nt, Homo sapiens
uaugacagaggaagggggagcug

SEQ ID NO: 66703 - RNA, 22 nt, Homo sapiens
uaucccuguggacuucccaaca

SEQ ID NO: 66704 - RNA, 22 nt, Homo sapiens
uugagcacugucugugugcagu

SEQ ID NO: 66705 - RNA, 22 nt, Homo sapiens
uagcacaucuucuuggccugca

SEQ ID NO: 66706 - RNA, 20 nt, Homo sapiens
gcaugagucuuuauaguaga

SEQ ID NO: 66707 - RNA, 22 nt, Homo sapiens
auacaguaucuucuggcaagca

SEQ ID NO: 66708 - RNA, 22 nt, Homo sapiens
auugcacaccagucugggcaaa

SEQ ID NO: 66709 - RNA, 22 nt, Homo sapiens
auaaaugcauugagaacugcug

SEQ ID NO: 66710 - RNA, 22 nt, Homo sapiens
aaucacaggucuuggcugcaug

SEQ ID NO: 66711 - RNA, 22 nt, Homo sapiens
uuuaaagcuaaaauauguuuau

SEQ ID NO: 66712 - RNA, 22 nt, Homo sapiens
cugagcaaaaugaagacacgau

SEQ ID NO: 66713 - RNA, 21 nt, Homo sapiens
aggagcauuguugugguggag

SEQ ID NO: 66714 - RNA, 22 nt, Homo sapiens
cuugaauguaaauaauguacag

SEQ ID NO: 66715 - RNA, 22 nt, Homo sapiens
auaaucaugucugaaaccuuug

SEQ ID NO: 66716 - RNA, 22 nt, Homo sapiens
ggaggcuaguaaaaagguagaa

SEQ ID NO: 66717 - RNA, 20 nt, Homo sapiens
augaagugaaguuagggaac

SEQ ID NO: 66718 - RNA, 22 nt, Homo sapiens
gaagguaguuuauagauguggu

SEQ ID NO: 66719 - RNA, 20 nt, Homo sapiens
aacagcacugucugaagcuu

SEQ ID NO: 66720 - RNA, 22 nt, Homo sapiens
uuaaaugcucacauaaagguag

SEQ ID NO: 66721 - RNA, 21 nt, Homo sapiens
uucucaggguguguccuaccc

SEQ ID NO: 66722 - RNA, 22 nt, Homo sapiens
aagagguuuaacugacucacag

SEQ ID NO: 66723 - RNA, 22 nt, Homo sapiens
ugcuggugauucagauucaaau

SEQ ID NO: 66724 - RNA, 20 nt, Homo sapiens
ugauauuucuggaaguggag

SEQ ID NO: 66725 - RNA, 22 nt, Homo sapiens
auugcacacagaaucaggguaa

SEQ ID NO: 66726 - RNA, 22 nt, Homo sapiens
ugacuugaggcucgcacaaguu

SEQ ID NO: 66727 - RNA, 22 nt, Homo sapiens
uaucacacuguuggauuugauu

SEQ ID NO: 66728 - RNA, 20 nt, Homo sapiens
cucccugacaaauguggaaa

SEQ ID NO: 66729 - RNA, 22 nt, Homo sapiens
ugaucuguguaacauaggaguc

SEQ ID NO: 66730 - RNA, 22 nt, Homo sapiens
gaaaugcucagggguuuuccag

SEQ ID NO: 66731 - RNA, 22 nt, Homo sapiens
ucuccauuuguaaggguuucuc

SEQ ID NO: 66732 - RNA, 22 nt, Homo sapiens
ucugccuacugguuggaggaac

SEQ ID NO: 66733 - RNA, 22 nt, Homo sapiens
uugauauguuguuagauucagu

SEQ ID NO: 66734 - RNA, 19 nt, Homo sapiens
gcagagaugugguagcuug

SEQ ID NO: 66735 - RNA, 22 nt, Homo sapiens
ucuuaggugggccaucacccca

SEQ ID NO: 66736 - RNA, 22 nt, Homo sapiens
uauguuaucaaaaagcuaagga

SEQ ID NO: 66737 - RNA, 22 nt, Homo sapiens
aaacucuguagcagagacagau

SEQ ID NO: 66738 - RNA, 18 nt, Homo sapiens
auugcacaccagccuggg

SEQ ID NO: 66739 - RNA, 22 nt, Homo sapiens
uaacccacgcagaauggacaag

SEQ ID NO: 66740 - RNA, 22 nt, Homo sapiens
auuggccaaugggacgucagca

SEQ ID NO: 66741 - RNA, 19 nt, Homo sapiens
uuguguccccacaaaauuc

SEQ ID NO: 66742 - RNA, 22 nt, Homo sapiens
gaaaugucugagauguggcuca

SEQ ID NO: 66743 - RNA, 21 nt, Homo sapiens
uuuacuguggacccauugcuu

SEQ ID NO: 66744 - RNA, 22 nt, Homo sapiens
uuguacuagaaaauuauucuuu

SEQ ID NO: 66745 - RNA, 22 nt, Homo sapiens
ugagaugaagugauguaaaaca

SEQ ID NO: 66746 - RNA, 22 nt, Homo sapiens
aagaugcagucauacuggagga

SEQ ID NO: 66747 - RNA, 22 nt, Homo sapiens
aggcauugugcaucgaugauuu

SEQ ID NO: 66748 - RNA, 22 nt, Homo sapiens
augucacagguccuagccaagu

SEQ ID NO: 66749 - RNA, 19 nt, Homo sapiens
uugucuuagaguugucauu

SEQ ID NO: 66750 - RNA, 22 nt, Homo sapiens
ugggaucuuuccuauuagcgag

SEQ ID NO: 66751 - RNA, 22 nt, Homo sapiens
gucaaggaauuuauccauuucu

SEQ ID NO: 66752 - RNA, 22 nt, Homo sapiens
augaugcugcaguuguugccaa

SEQ ID NO: 66753 - RNA, 22 nt, Homo sapiens
uggauuuuaauuauucugucau

SEQ ID NO: 66754 - RNA, 22 nt, Homo sapiens
augugcuaguaucaaacgagac

SEQ ID NO: 66755 - RNA, 22 nt, Homo sapiens
auggaauguauagucauguagg

SEQ ID NO: 66756 - RNA, 22 nt, Homo sapiens
uuuguacucccuuuagauaaaa

SEQ ID NO: 66757 - RNA, 22 nt, Homo sapiens
ugagaucuuaccuuccugccuu

SEQ ID NO: 66758 - RNA, 22 nt, Homo sapiens
uggucccucugaaaauugggug

SEQ ID NO: 66759 - RNA, 18 nt, Homo sapiens
ucuggcuucuuuguucca

SEQ ID NO: 66760 - RNA, 22 nt, Homo sapiens
guauggcacuauccucucugau

SEQ ID NO: 66761 - RNA, 22 nt, Homo sapiens
gaaaauccauccccagggagua

SEQ ID NO: 66762 - RNA, 22 nt, Homo sapiens
uuuguacugagccaagauggua

SEQ ID NO: 66763 - RNA, 22 nt, Homo sapiens
ugugcacaugauauaucacaua

SEQ ID NO: 66764 - RNA, 22 nt, Homo sapiens
gucucccagccuacaucuuucu

SEQ ID NO: 66765 - RNA, 22 nt, Homo sapiens
ugugcacaaugugcagguuuga

SEQ ID NO: 66766 - RNA, 18 nt, Homo sapiens
ucugugguguaaauacgu

SEQ ID NO: 66767 - RNA, 22 nt, Homo sapiens
gucacugggugcugcgccuguc

SEQ ID NO: 66768 - RNA, 22 nt, Homo sapiens
augcacaguccagcccaugugg

SEQ ID NO: 66769 - RNA, 22 nt, Homo sapiens
gagguggugguggaggcauagc

SEQ ID NO: 66770 - RNA, 22 nt, Homo sapiens
uggcaacaucuggggacauguu

SEQ ID NO: 66771 - RNA, 22 nt, Homo sapiens
augaaagucaauccccaagugu

SEQ ID NO: 66772 - RNA, 22 nt, Homo sapiens
aauggcaguagauggaugggua

SEQ ID NO: 66773 - RNA, 22 nt, Homo sapiens
cuuugugcccuucugcccauca

SEQ ID NO: 66774 - RNA, 18 nt, Homo sapiens
agguuauuucccaagacu

SEQ ID NO: 66775 - RNA, 22 nt, Homo sapiens
ugaauacuucguucaaagauaa

SEQ ID NO: 66776 - RNA, 22 nt, Homo sapiens
ugacauugggagugaagugaag

SEQ ID NO: 66777 - RNA, 22 nt, Homo sapiens
ucagaugauuccguugacgaga

SEQ ID NO: 66778 - RNA, 22 nt, Homo sapiens
uuuguccccgcccagaucucau

SEQ ID NO: 66779 - RNA, 22 nt, Homo sapiens
uugauauucugagaagcugaag

SEQ ID NO: 66780 - RNA, 20 nt, Homo sapiens
cugcuccccuacaaaucuca

SEQ ID NO: 66781 - RNA, 21 nt, Homo sapiens
uucuaaguaaauguuggacau

SEQ ID NO: 66782 - RNA, 17 nt, Homo sapiens
gacauaggaaaaggaga

SEQ ID NO: 66783 - RNA, 22 nt, Homo sapiens
agagugcaauggcaccaucucg

SEQ ID NO: 66784 - RNA, 22 nt, Homo sapiens
cugagagaugagaccucucacu

SEQ ID NO: 66785 - RNA, 19 nt, Homo sapiens
uagguacauucaagucucc

SEQ ID NO: 66786 - RNA, 22 nt, Homo sapiens
agguauguaugucuguacagcg

SEQ ID NO: 66787 - RNA, 22 nt, Homo sapiens
uugagauggauagacauagcau

SEQ ID NO: 66788 - RNA, 19 nt, Homo sapiens
ucccugagucuuagcuuga

SEQ ID NO: 66789 - RNA, 22 nt, Homo sapiens
ucaguggagccucacucugugg

SEQ ID NO: 66790 - RNA, 18 nt, Homo sapiens
uguaaacuaccucaaccu

SEQ ID NO: 66791 - RNA, 22 nt, Homo sapiens
cacccagucaucuuggguuuuu

SEQ ID NO: 66792 - RNA, 22 nt, Homo sapiens
augaagugcaugauaguugguu

SEQ ID NO: 66793 - RNA, 22 nt, Homo sapiens
ugcuaugucuucucucacagag

SEQ ID NO: 66794 - RNA, 22 nt, Homo sapiens
cugauuguuugccucuaaaauc

SEQ ID NO: 66795 - RNA, 22 nt, Homo sapiens
aggcaugugugcagacugucug

SEQ ID NO: 66796 - RNA, 22 nt, Homo sapiens
uucauagaggacauuacuggag

SEQ ID NO: 66797 - RNA, 18 nt, Homo sapiens
ugagaacauguguacaca

SEQ ID NO: 66798 - RNA, 19 nt, Homo sapiens
ucaccaguacacaauacaa

SEQ ID NO: 66799 - RNA, 22 nt, Homo sapiens
ugacuagacuugcaagguugca

SEQ ID NO: 66800 - RNA, 22 nt, Homo sapiens
agaaacacagguggaauugcuu

SEQ ID NO: 66801 - RNA, 22 nt, Homo sapiens
ucauaguacuuuguuuugaaaa

SEQ ID NO: 66802 - RNA, 22 nt, Homo sapiens
ucaccaccuuccaggaccacug

SEQ ID NO: 66803 - RNA, 22 nt, Homo sapiens
ugagaacagauggcuuuauuau

SEQ ID NO: 66804 - RNA, 22 nt, Homo sapiens
ucagugcuuggcacagagagcu

SEQ ID NO: 66805 - RNA, 22 nt, Homo sapiens
uccuuggucauggaagagacag

SEQ ID NO: 66806 - RNA, 22 nt, Homo sapiens
augagaccagcagaaaaccugu

SEQ ID NO: 66807 - RNA, 22 nt, Homo sapiens
uugguccccuucaaccagcugu

SEQ ID NO: 66808 - RNA, 22 nt, Homo sapiens
uuuauccagccucuagcaaggu

SEQ ID NO: 66809 - RNA, 22 nt, Homo sapiens
guucaucagggauacuggcuua

SEQ ID NO: 66810 - RNA, 22 nt, Homo sapiens
guggaaaaguaguugcgguuuu

SEQ ID NO: 66811 - RNA, 22 nt, Homo sapiens
ugagaucuguaaagucugacau

SEQ ID NO: 66812 - RNA, 20 nt, Homo sapiens
uguacacaguguacccacau

SEQ ID NO: 66813 - RNA, 22 nt, Homo sapiens
gagauggagucuuuuucuguca

SEQ ID NO: 66814 - RNA, 22 nt, Homo sapiens
uaugaugcugagguuuggagug

SEQ ID NO: 66815 - RNA, 22 nt, Homo sapiens
ugagaugaugggauaagagggc

SEQ ID NO: 66816 - RNA, 22 nt, Homo sapiens
uuggcuucuggacuauugugca

SEQ ID NO: 66817 - RNA, 22 nt, Homo sapiens
ugacucaguuucucagguagua

SEQ ID NO: 66818 - RNA, 22 nt, Homo sapiens
ugugcaugacagcauacaaacg

SEQ ID NO: 66819 - RNA, 22 nt, Homo sapiens
auguuagcaucuggcacuaugg

SEQ ID NO: 66820 - RNA, 22 nt, Homo sapiens
uuugcaagaugaaaaaguucua

SEQ ID NO: 66821 - RNA, 22 nt, Homo sapiens
aaaguacugggauuggccgggu

SEQ ID NO: 66822 - RNA, 22 nt, Homo sapiens
cuaaagugcuuaaaaucucauu

SEQ ID NO: 66823 - RNA, 22 nt, Homo sapiens
ugucaacauuuaucaaguuauu

SEQ ID NO: 66824 - RNA, 20 nt, Homo sapiens
ugagccccuggacucaagcg

SEQ ID NO: 66825 - RNA, 22 nt, Homo sapiens
ggcaaaugaagauggagaggcu

SEQ ID NO: 66826 - RNA, 16 nt, Homo sapiens
uuucaucaguuuuaau

SEQ ID NO: 66827 - RNA, 17 nt, Homo sapiens
accagugcaugugcuuu

SEQ ID NO: 66828 - RNA, 22 nt, Homo sapiens
gaaugcaugaggggaucagaug

SEQ ID NO: 66829 - RNA, 22 nt, Homo sapiens
gugcacaacgugcagguuaguu

SEQ ID NO: 66830 - RNA, 22 nt, Homo sapiens
uuugugcaugaagagggggugc

SEQ ID NO: 66831 - RNA, 22 nt, Homo sapiens
cccucauucauucauccuaugu

SEQ ID NO: 66832 - RNA, 22 nt, Homo sapiens
uucagggcauuggaguuucuga

SEQ ID NO: 66833 - RNA, 20 nt, Homo sapiens
augaaggcaggugugaguuu

SEQ ID NO: 66834 - RNA, 22 nt, Homo sapiens
cagagaaugucuuuuuuaacca

SEQ ID NO: 66835 - RNA, 22 nt, Homo sapiens
caguacaauguggaaaaggagu

SEQ ID NO: 66836 - RNA, 22 nt, Homo sapiens
uggcaguuucacauggcucaac

SEQ ID NO: 66837 - RNA, 22 nt, Homo sapiens
uacaguggaaguuaaccccauu

SEQ ID NO: 66838 - RNA, 22 nt, Homo sapiens
uugugcuccuaugagaaucuaa

SEQ ID NO: 66839 - RNA, 22 nt, Homo sapiens
uuugagcauggaaauggcauga

SEQ ID NO: 66840 - RNA, 22 nt, Homo sapiens
ucaagcaauucgccugucucag

SEQ ID NO: 66841 - RNA, 22 nt, Homo sapiens
auccaguuuuaggagauuucua

SEQ ID NO: 66842 - RNA, 21 nt, Homo sapiens
ugacuagauuccagauuggcc

SEQ ID NO: 66843 - RNA, 22 nt, Homo sapiens
uugggcaauaggaagcaggugg

SEQ ID NO: 66844 - RNA, 22 nt, Homo sapiens
ugugacugguugucccgcuuuc

SEQ ID NO: 66845 - RNA, 22 nt, Homo sapiens
uaacucugccuagugacauggu

SEQ ID NO: 66846 - RNA, 22 nt, Homo sapiens
ggaugcauucaacuuccaguuc

SEQ ID NO: 66847 - RNA, 22 nt, Homo sapiens
auggcagugagucucuaguauu

SEQ ID NO: 66848 - RNA, 22 nt, Homo sapiens
uaaguaauugcagcaauuugcc

SEQ ID NO: 66849 - RNA, 22 nt, Homo sapiens
ugagaucuuugcuguccucacc

SEQ ID NO: 66850 - RNA, 22 nt, Homo sapiens
uucaagucaacaagcacuugag

SEQ ID NO: 66851 - RNA, 20 nt, Homo sapiens
cuuuguccuccugcugugcu

SEQ ID NO: 66852 - RNA, 20 nt, Homo sapiens
ugugauuauuuaguugcaug

SEQ ID NO: 66853 - RNA, 22 nt, Homo sapiens
uaacccuuaguaucuguggguu

SEQ ID NO: 66854 - RNA, 22 nt, Homo sapiens
auugcacaaagagggaaacuga

SEQ ID NO: 66855 - RNA, 21 nt, Homo sapiens
uugcaaaugcugcugccugau

SEQ ID NO: 66856 - RNA, 21 nt, Homo sapiens
ugacagaaaauugaguuugcu

SEQ ID NO: 66857 - RNA, 22 nt, Homo sapiens
ucuccaguuuccuucgucuauc

SEQ ID NO: 66858 - RNA, 22 nt, Homo sapiens
accucagcccggggaaguugag

SEQ ID NO: 66859 - RNA, 22 nt, Homo sapiens
augcauagcaucugcaaauguu

SEQ ID NO: 66860 - RNA, 22 nt, Homo sapiens
uucacaaugccuuguugauggu

SEQ ID NO: 66861 - RNA, 22 nt, Homo sapiens
augaaagguauguuuucuguga

SEQ ID NO: 66862 - RNA, 22 nt, Homo sapiens
ucauucuuucuguggaggggcu

SEQ ID NO: 66863 - RNA, 22 nt, Homo sapiens
gugagauggagucuugcuuugu

SEQ ID NO: 66864 - RNA, 22 nt, Homo sapiens
uaguugcauucaggauaugacg

SEQ ID NO: 66865 - RNA, 22 nt, Homo sapiens
augggcaaauguuggaaauucc

SEQ ID NO: 66866 - RNA, 22 nt, Homo sapiens
gugcacauauggugcauaagug

SEQ ID NO: 66867 - RNA, 22 nt, Homo sapiens
guagaagcacagggccuguauu

SEQ ID NO: 66868 - RNA, 22 nt, Homo sapiens
uugcagcaacauggaugaaacu

SEQ ID NO: 66869 - RNA, 22 nt, Homo sapiens
ccagugcugugcaguguaugag

SEQ ID NO: 66870 - RNA, 22 nt, Homo sapiens
gguaucuuggagagagaaguga

SEQ ID NO: 66871 - RNA, 20 nt, Homo sapiens
uucacaggcagcuucuuucu

SEQ ID NO: 66872 - RNA, 22 nt, Homo sapiens
caaaggcuuccacugcauccuu

SEQ ID NO: 66873 - RNA, 22 nt, Homo sapiens
aaguauguaucaagucauacuu

SEQ ID NO: 66874 - RNA, 22 nt, Homo sapiens
ugacaaguaaacagucagcacc

SEQ ID NO: 66875 - RNA, 22 nt, Homo sapiens
aaaagucuguagugaaagguga

SEQ ID NO: 66876 - RNA, 17 nt, Homo sapiens
gcccuuugugccucuuc

SEQ ID NO: 66877 - RNA, 22 nt, Homo sapiens
cugucuggaggccugcaaauaa

SEQ ID NO: 66878 - RNA, 22 nt, Homo sapiens
cuuuuugcugcagcaauacugg

SEQ ID NO: 66879 - RNA, 22 nt, Homo sapiens
uucacugcacuccagccugagc

SEQ ID NO: 66880 - RNA, 22 nt, Homo sapiens
guuugugcuccuaugagaaucu

SEQ ID NO: 66881 - RNA, 22 nt, Homo sapiens
cagguacuucugggcugagcag

SEQ ID NO: 66882 - RNA, 22 nt, Homo sapiens
uuuagguaauauuaaguagcug

SEQ ID NO: 66883 - RNA, 23 nt, Homo sapiens
ugugacacuuccgucaguucauu

SEQ ID NO: 66884 - RNA, 22 nt, Homo sapiens
ugcaguacauucagcauccucu

SEQ ID NO: 66885 - RNA, 22 nt, Homo sapiens
ugacagaggucuuuuaauagcu

SEQ ID NO: 66886 - RNA, 22 nt, Homo sapiens
uuccagcugggggcaacucugc

SEQ ID NO: 66887 - RNA, 22 nt, Homo sapiens
ccaaggaauacccucccuuuuu

SEQ ID NO: 66888 - RNA, 22 nt, Homo sapiens
aggugcugacaggauagguuuc

SEQ ID NO: 66889 - RNA, 22 nt, Homo sapiens
ugaaacacacagagaagggaga

SEQ ID NO: 66890 - RNA, 23 nt, Homo sapiens
uuugcacuugcuccuucuauggc

SEQ ID NO: 66891 - RNA, 22 nt, Homo sapiens
gauggcaucugagaguguuaga

SEQ ID NO: 66892 - RNA, 20 nt, Homo sapiens
uaagugcuugaugaaugaac

SEQ ID NO: 66893 - RNA, 22 nt, Homo sapiens
acauaugaguacaugugccaug

SEQ ID NO: 66894 - RNA, 22 nt, Homo sapiens
auguugcuugaaggcauuuugu

SEQ ID NO: 66895 - RNA, 22 nt, Homo sapiens
gucaguggagaaaaggacaugu

SEQ ID NO: 66896 - RNA, 22 nt, Homo sapiens
ucagugaacgaggaggagggug

SEQ ID NO: 66897 - RNA, 22 nt, Homo sapiens
augaagagaaaguggaucuugg

SEQ ID NO: 66898 - RNA, 22 nt, Homo sapiens
cuucaguucuguaaggacagca

SEQ ID NO: 66899 - RNA, 22 nt, Homo sapiens
caguucaugguaggcaccauag

SEQ ID NO: 66900 - RNA, 22 nt, Homo sapiens
ccuggcacugagcaguguucua

SEQ ID NO: 66901 - RNA, 22 nt, Homo sapiens
uugcuucauucaacauugaggg

SEQ ID NO: 66902 - RNA, 22 nt, Homo sapiens
aagugaccuaacaaugaaggcc

SEQ ID NO: 66903 - RNA, 18 nt, Homo sapiens
cugccagugugcucuccg

SEQ ID NO: 66904 - RNA, 22 nt, Homo sapiens
ggcccugauacaaguaaggucu

SEQ ID NO: 66905 - RNA, 22 nt, Homo sapiens
gacuuagagauguuguauuugg

SEQ ID NO: 66906 - RNA, 22 nt, Homo sapiens
uaaaugcuuaauugaaugugga

SEQ ID NO: 66907 - RNA, 22 nt, Homo sapiens
aaagugcacuuggaagagggcc

SEQ ID NO: 66908 - RNA, 22 nt, Homo sapiens
guggacagagacuaaauguugu

SEQ ID NO: 66909 - RNA, 22 nt, Homo sapiens
ucucugguuuucaaagcaguau

SEQ ID NO: 66910 - RNA, 22 nt, Homo sapiens
cugaggucugaauccagguauc

SEQ ID NO: 66911 - RNA, 22 nt, Homo sapiens
uaaguugcagguugugauucca

SEQ ID NO: 66912 - RNA, 22 nt, Homo sapiens
agggaagugugcuaugcauuua

SEQ ID NO: 66913 - RNA, 22 nt, Homo sapiens
ucucagugaauguggaaaaagc

SEQ ID NO: 66914 - RNA, 22 nt, Homo sapiens
gugagguguuaaccaaccugug

SEQ ID NO: 66915 - RNA, 22 nt, Homo sapiens
ugggaugauguuaaacguacuc

SEQ ID NO: 66916 - RNA, 22 nt, Homo sapiens
uucaaguaagaaagacaucagg

SEQ ID NO: 66917 - RNA, 22 nt, Homo sapiens
cucuuuuguuuagcugagaggg

SEQ ID NO: 66918 - RNA, 17 nt, Homo sapiens
uuacaggugcugagagu

SEQ ID NO: 66919 - RNA, 20 nt, Homo sapiens
agcagccacagauuccucag

SEQ ID NO: 66920 - RNA, 22 nt, Homo sapiens
ugaauagacacuaaagacugua

SEQ ID NO: 66921 - RNA, 22 nt, Homo sapiens
ugcugcaaacaggcaucugugg

SEQ ID NO: 66922 - RNA, 21 nt, Homo sapiens
agccaguguuccuuguggcuc

SEQ ID NO: 66923 - RNA, 20 nt, Homo sapiens
uaucacaguucaggaacucu

SEQ ID NO: 66924 - RNA, 22 nt, Homo sapiens
uuggcccugcugaccauucccu

SEQ ID NO: 66925 - RNA, 22 nt, Homo sapiens
cuuuuggugugaagaagcucuu

SEQ ID NO: 66926 - RNA, 22 nt, Homo sapiens
ugccuaguggaaggagagcaaa

SEQ ID NO: 66927 - RNA, 17 nt, Homo sapiens
ugagaacaugugguauu

SEQ ID NO: 66928 - RNA, 21 nt, Homo sapiens
caauggcacaaucucugcuca

SEQ ID NO: 66929 - RNA, 22 nt, Homo sapiens
aucucauuccuucugggcugau

SEQ ID NO: 66930 - RNA, 22 nt, Homo sapiens
gucagggagucucuaucagugg

SEQ ID NO: 66931 - RNA, 22 nt, Homo sapiens
ucccuacuggggcacugccuag

SEQ ID NO: 66932 - RNA, 22 nt, Homo sapiens
uaggagugugaacccuaugaac

SEQ ID NO: 66933 - RNA, 22 nt, Homo sapiens
auuugucacuuaacagccauua

SEQ ID NO: 66934 - RNA, 22 nt, Homo sapiens
ugucagcacaacucagguuccu

SEQ ID NO: 66935 - RNA, 22 nt, Homo sapiens
ggguucccuucuggcucagggu

SEQ ID NO: 66936 - RNA, 23 nt, Homo sapiens
uugugucccuacccaaaucucau

SEQ ID NO: 66937 - RNA, 22 nt, Homo sapiens
aaagugauugcgguuuuugcca

SEQ ID NO: 66938 - RNA, 22 nt, Homo sapiens
aucaucaugcacuacagccugg

SEQ ID NO: 66939 - RNA, 22 nt, Homo sapiens
uuauucauuaacagggaccaaa

SEQ ID NO: 66940 - RNA, 22 nt, Homo sapiens
gagaugaaaucuugcucuguca

SEQ ID NO: 66941 - RNA, 22 nt, Homo sapiens
cuggcacagugucagaaacaca

SEQ ID NO: 66942 - RNA, 22 nt, Homo sapiens
cugacugugcaugcccagcccc

SEQ ID NO: 66943 - RNA, 22 nt, Homo sapiens
augccagggagaauuguucaag

SEQ ID NO: 66944 - RNA, 22 nt, Homo sapiens
gucuccgagccguguggagccg

SEQ ID NO: 66945 - RNA, 22 nt, Homo sapiens
uuccuacuguucaucaggaacc

SEQ ID NO: 66946 - RNA, 22 nt, Homo sapiens
guccugaagaccuuccucugga

SEQ ID NO: 66947 - RNA, 22 nt, Homo sapiens
agugcaguggugccaucauaac

SEQ ID NO: 66948 - RNA, 17 nt, Homo sapiens
uugggcaagguagguga

SEQ ID NO: 66949 - RNA, 21 nt, Homo sapiens
ugcagccauucagcccuaugc

SEQ ID NO: 66950 - RNA, 22 nt, Homo sapiens
agggagcaaaguggucuuucuc

SEQ ID NO: 66951 - RNA, 22 nt, Homo sapiens
aaugucacugugguccuccagu

SEQ ID NO: 66952 - RNA, 22 nt, Homo sapiens
ucugacucugugaugggcccaa

SEQ ID NO: 66953 - RNA, 20 nt, Homo sapiens
gucuugcuccguugcccagg

SEQ ID NO: 66954 - RNA, 22 nt, Homo sapiens
uuuggucuuuuauuuaaagcag

SEQ ID NO: 66955 - RNA, 22 nt, Homo sapiens
cccagaguucuuaaauacugag

SEQ ID NO: 66956 - RNA, 22 nt, Homo sapiens
ugauaguguccugugccacauu

SEQ ID NO: 66957 - RNA, 22 nt, Homo sapiens
uugagggagcauuuguuuugag

SEQ ID NO: 66958 - RNA, 19 nt, Homo sapiens
caugugcacuacuggcuuc

SEQ ID NO: 66959 - RNA, 23 nt, Homo sapiens
ugugcacauuuacauauauacac

SEQ ID NO: 66960 - RNA, 22 nt, Homo sapiens
cacaaaguagauuagucuucca

SEQ ID NO: 66961 - RNA, 22 nt, Homo sapiens
aaaugcugucaaauuguguucu

SEQ ID NO: 66962 - RNA, 22 nt, Homo sapiens
cagugaauuucaggucaagagu

SEQ ID NO: 66963 - RNA, 22 nt, Homo sapiens
uugagauggagucucacgcauu

SEQ ID NO: 66964 - RNA, 22 nt, Homo sapiens
ucucugagaccacuccaaacuc

SEQ ID NO: 66965 - RNA, 22 nt, Homo sapiens
uugaggcuuuugaccucaugug

SEQ ID NO: 66966 - RNA, 22 nt, Homo sapiens
uuaaugcuuggggaguaguucu

SEQ ID NO: 66967 - RNA, 22 nt, Homo sapiens
agcugcauucguaucauauugu

SEQ ID NO: 66968 - RNA, 22 nt, Homo sapiens
aaggcaagagaaaauuucgagu

SEQ ID NO: 66969 - RNA, 22 nt, Homo sapiens
uugaggugggaggaucacuuga

SEQ ID NO: 66970 - RNA, 22 nt, Homo sapiens
uugcucaggcuggaguacaaug

SEQ ID NO: 66971 - RNA, 22 nt, Homo sapiens
augacaagagccuucuuuccuu

SEQ ID NO: 66972 - RNA, 22 nt, Homo sapiens
ggagaucuuguuaaaguacaga

SEQ ID NO: 66973 - RNA, 22 nt, Homo sapiens
caugaaagugagaaacuccugg

SEQ ID NO: 66974 - RNA, 22 nt, Homo sapiens
aagucacugagacuuguggcug

SEQ ID NO: 66975 - RNA, 22 nt, Homo sapiens
uagcuucuccauagcuccaugu

SEQ ID NO: 66976 - RNA, 22 nt, Homo sapiens
augagcagaagagauacacugu

SEQ ID NO: 66977 - RNA, 20 nt, Homo sapiens
auagcauugauggacucaaa

SEQ ID NO: 66978 - RNA, 22 nt, Homo sapiens
uuuuagcuuuucccaggacucc

SEQ ID NO: 66979 - RNA, 22 nt, Homo sapiens
auugcuaacugaaauaagacca

SEQ ID NO: 66980 - RNA, 22 nt, Homo sapiens
uugagggaagccagaggucugc

SEQ ID NO: 66981 - RNA, 22 nt, Homo sapiens
uggacauguacauauguguaug

SEQ ID NO: 66982 - RNA, 22 nt, Homo sapiens
gagaaccauuuggagaaaaagu

SEQ ID NO: 66983 - RNA, 22 nt, Homo sapiens
cacauguucaggagcacuuaga

SEQ ID NO: 66984 - RNA, 22 nt, Homo sapiens
gaugaggcuagagacaugugua

SEQ ID NO: 66985 - RNA, 20 nt, Homo sapiens
aucaaagacuuagaggggga

SEQ ID NO: 66986 - RNA, 22 nt, Homo sapiens
augggguaggcuugcuguagua

SEQ ID NO: 66987 - RNA, 22 nt, Homo sapiens
uggaaaguacuugaguuuguau

SEQ ID NO: 66988 - RNA, 22 nt, Homo sapiens
uaaagaugcugggaaggcuagg

SEQ ID NO: 66989 - RNA, 22 nt, Homo sapiens
uaaugugcuucucuaccauagg

SEQ ID NO: 66990 - RNA, 23 nt, Homo sapiens
uagguuauuugguaaauauaugu

SEQ ID NO: 66991 - RNA, 18 nt, Homo sapiens
uuuugcuuaacugcgcca

SEQ ID NO: 66992 - RNA, 22 nt, Homo sapiens
ccaaguguuuucauuguuccau

SEQ ID NO: 66993 - RNA, 22 nt, Homo sapiens
gcugcacuuuaaggcauccccu

SEQ ID NO: 66994 - RNA, 22 nt, Homo sapiens
caaaggcuucugaaacugcaga

SEQ ID NO: 66995 - RNA, 22 nt, Homo sapiens
uucuacagugacugcagccaua

SEQ ID NO: 66996 - RNA, 19 nt, Homo sapiens
gugugcauaucacagagca

SEQ ID NO: 66997 - RNA, 22 nt, Homo sapiens
ugaagugcugugggccaggcgu

SEQ ID NO: 66998 - RNA, 22 nt, Homo sapiens
ucaguaaauguuaggacauuuc

SEQ ID NO: 66999 - RNA, 22 nt, Homo sapiens
guaaauaccaguuucuggaaca

SEQ ID NO: 67000 - RNA, 22 nt, Homo sapiens
uuccuacugcccauuaaaaugg

SEQ ID NO: 67001 - RNA, 22 nt, Homo sapiens
uguucuggagaguuuagucugg

SEQ ID NO: 67002 - RNA, 22 nt, Homo sapiens
uugucuccuagacgaccaggcg

SEQ ID NO: 67003 - RNA, 18 nt, Homo sapiens
augugcaauuuuguauuu

SEQ ID NO: 67004 - RNA, 22 nt, Homo sapiens
guuggcuguuucccccaaguga

SEQ ID NO: 67005 - RNA, 22 nt, Homo sapiens
cugggaucaguucuagucagaa

SEQ ID NO: 67006 - RNA, 22 nt, Homo sapiens
ugugcuauguuauucacauggg

SEQ ID NO: 67007 - RNA, 22 nt, Homo sapiens
uaaugcaucaugguuggcaaac

SEQ ID NO: 67008 - RNA, 22 nt, Homo sapiens
uuuggcaauuugacuguauagg

SEQ ID NO: 67009 - RNA, 22 nt, Homo sapiens
caccaaccucaguagcaucugu

SEQ ID NO: 67010 - RNA, 22 nt, Homo sapiens
ucugugaaugaacacuugaaaa

SEQ ID NO: 67011 - RNA, 20 nt, Homo sapiens
uucuugaguuaacaaguuac

SEQ ID NO: 67012 - RNA, 22 nt, Homo sapiens
ugggaugaauacaaugggauca

SEQ ID NO: 67013 - RNA, 17 nt, Homo sapiens
acaaauugccagcuagg

SEQ ID NO: 67014 - RNA, 22 nt, Homo sapiens
aagugcuuuacacaugcaugau

SEQ ID NO: 67015 - RNA, 22 nt, Homo sapiens
gggaaaaugucuauugaaugaa

SEQ ID NO: 67016 - RNA, 22 nt, Homo sapiens
ggucaggagaaugguaacugag

SEQ ID NO: 67017 - RNA, 22 nt, Homo sapiens
aguaccauuccguuggagcugg

SEQ ID NO: 67018 - RNA, 22 nt, Homo sapiens
uaguugcaucuuaggucuguga

SEQ ID NO: 67019 - RNA, 22 nt, Homo sapiens
acaguguguguguucaccuaga

SEQ ID NO: 67020 - RNA, 22 nt, Homo sapiens
gugcacaacaugcaguuuuguu

SEQ ID NO: 67021 - RNA, 22 nt, Homo sapiens
ucugugcauuacacuuuucuca

SEQ ID NO: 67022 - RNA, 22 nt, Homo sapiens
uguuaacauggucucagucugu

SEQ ID NO: 67023 - RNA, 22 nt, Homo sapiens
cuucuugagacuuaggcuuugg

SEQ ID NO: 67024 - RNA, 22 nt, Homo sapiens
ugucuacugaugauguaguuaa

SEQ ID NO: 67025 - RNA, 22 nt, Homo sapiens
ugcacaguccagugcccacuga

SEQ ID NO: 67026 - RNA, 22 nt, Homo sapiens
uaacagucaagguuugaccagg

SEQ ID NO: 67027 - RNA, 22 nt, Homo sapiens
ugcauacacaagcauacaugua

SEQ ID NO: 67028 - RNA, 22 nt, Homo sapiens
cuugguuacauuuuccuagaaa

SEQ ID NO: 67029 - RNA, 22 nt, Homo sapiens
augacccugaccuaagccaauc

SEQ ID NO: 67030 - RNA, 22 nt, Homo sapiens
uuugcacauauuugggcaaaag

SEQ ID NO: 67031 - RNA, 22 nt, Homo sapiens
ugucaguggucuggaugcagcc

SEQ ID NO: 67032 - RNA, 22 nt, Homo sapiens
ugagcugguacuaauauuauca

SEQ ID NO: 67033 - RNA, 22 nt, Homo sapiens
caaaugaucugcuggccucagc

SEQ ID NO: 67034 - RNA, 22 nt, Homo sapiens
ugugcacaauguacagguuagu

SEQ ID NO: 67035 - RNA, 22 nt, Homo sapiens
uuacagguggagaaguaaggcu

SEQ ID NO: 67036 - RNA, 22 nt, Homo sapiens
acccuggaggucuacagugcag

SEQ ID NO: 67037 - RNA, 22 nt, Homo sapiens
guacaguggguguagggaccag

SEQ ID NO: 67038 - RNA, 22 nt, Homo sapiens
uucccugaaguguuacucuaga

SEQ ID NO: 67039 - RNA, 22 nt, Homo sapiens
auauguucucauucauaugugg

SEQ ID NO: 67040 - RNA, 22 nt, Homo sapiens
agcccuuagauggcuccuucca

SEQ ID NO: 67041 - RNA, 22 nt, Homo sapiens
gugaaagacagcauuaauggcu

SEQ ID NO: 67042 - RNA, 22 nt, Homo sapiens
uuucauagaucaugcuuuugga

SEQ ID NO: 67043 - RNA, 22 nt, Homo sapiens
auugugauggucaaaggaaaua

SEQ ID NO: 67044 - RNA, 18 nt, Homo sapiens
aggaaugguaauacuuca

SEQ ID NO: 67045 - RNA, 21 nt, Homo sapiens
ccagugguuggaaacuauggg

SEQ ID NO: 67046 - RNA, 22 nt, Homo sapiens
uuggucaucucccuccuuuuag

SEQ ID NO: 67047 - RNA, 22 nt, Homo sapiens
ucuguggucagcauccgccacu

SEQ ID NO: 67048 - RNA, 22 nt, Homo sapiens
aggaagguaaacuaacuugccu

SEQ ID NO: 67049 - RNA, 22 nt, Homo sapiens
uugugcaugaugcauacauggu

SEQ ID NO: 67050 - RNA, 22 nt, Homo sapiens
gucagguaccugaaagcagcca

SEQ ID NO: 67051 - RNA, 22 nt, Homo sapiens
agcaauaugacauugcuacauc

SEQ ID NO: 67052 - RNA, 22 nt, Homo sapiens
ugagagucacugaccugguaua

SEQ ID NO: 67053 - RNA, 22 nt, Homo sapiens
aucaucacaguuguguguaaug

SEQ ID NO: 67054 - RNA, 22 nt, Homo sapiens
gucacuggcugucuuguaugau

SEQ ID NO: 67055 - RNA, 22 nt, Homo sapiens
auguaaacuacagauuuugggu

SEQ ID NO: 67056 - RNA, 22 nt, Homo sapiens
guagagugcugggcacuggcuc

SEQ ID NO: 67057 - RNA, 22 nt, Homo sapiens
augaccagagagugcgcagggu

SEQ ID NO: 67058 - RNA, 22 nt, Homo sapiens
uuauacacugugggaguguaaa

SEQ ID NO: 67059 - RNA, 22 nt, Homo sapiens
uaaauugcauaaguacaaauga

SEQ ID NO: 67060 - RNA, 22 nt, Homo sapiens
ucugugcugagaguugaaaguu

SEQ ID NO: 67061 - RNA, 22 nt, Homo sapiens
acucagagugggccccuagaua

SEQ ID NO: 67062 - RNA, 22 nt, Homo sapiens
gaggcaaguggccaccgagucu

SEQ ID NO: 67063 - RNA, 22 nt, Homo sapiens
ugaagcuuguuucuguaccuuu

SEQ ID NO: 67064 - RNA, 21 nt, Homo sapiens
uucaucagccagaaaucaagc

SEQ ID NO: 67065 - RNA, 22 nt, Homo sapiens
uggcaguuuacagcuuuaggag

SEQ ID NO: 67066 - RNA, 22 nt, Homo sapiens
ggcaaagaugaccauuacuuuu

SEQ ID NO: 67067 - RNA, 22 nt, Homo sapiens
uugacuguaagauggcuauuac

SEQ ID NO: 67068 - RNA, 22 nt, Homo sapiens
aagugcuuccuuucagaggguu

SEQ ID NO: 67069 - RNA, 22 nt, Homo sapiens
guuaugcagcaauugauaaucu

SEQ ID NO: 67070 - RNA, 22 nt, Homo sapiens
acauaguagacacugaaaauau

SEQ ID NO: 67071 - RNA, 22 nt, Homo sapiens
cauugcacuccagcucugggcg

SEQ ID NO: 67072 - RNA, 22 nt, Homo sapiens
uaaguaaaugaaagguugauuu

SEQ ID NO: 67073 - RNA, 19 nt, Homo sapiens
augugguuagcaugacugc

SEQ ID NO: 67074 - RNA, 18 nt, Homo sapiens
aggagcauagugcuauga

SEQ ID NO: 67075 - RNA, 18 nt, Homo sapiens
augaagucaucacuuuua

SEQ ID NO: 67076 - RNA, 19 nt, Homo sapiens
caucccugagcugaagugg

SEQ ID NO: 67077 - RNA, 22 nt, Homo sapiens
uugggcuugagggugcccaguc

SEQ ID NO: 67078 - RNA, 22 nt, Homo sapiens
uaacauagucauauacuugcuu

SEQ ID NO: 67079 - RNA, 22 nt, Homo sapiens
auuaauguaauuaguaaaguug

SEQ ID NO: 67080 - RNA, 19 nt, Homo sapiens
gcucaccuugcugcuccag

SEQ ID NO: 67081 - RNA, 22 nt, Homo sapiens
acuggcuuuugagaaaaacacu

SEQ ID NO: 67082 - RNA, 23 nt, Homo sapiens
uucuaucaggcccaggagcccug

SEQ ID NO: 67083 - RNA, 22 nt, Homo sapiens
ggauaucauuauuucuagggcu

SEQ ID NO: 67084 - RNA, 22 nt, Homo sapiens
uuaaauacagcaugguguuucu

SEQ ID NO: 67085 - RNA, 22 nt, Homo sapiens
ugugaagauggacuaauauagu

SEQ ID NO: 67086 - RNA, 22 nt, Homo sapiens
uuacuauguuucaaagugucuc

SEQ ID NO: 67087 - RNA, 22 nt, Homo sapiens
uuuguacuugguguucuggaaa

SEQ ID NO: 67088 - RNA, 22 nt, Homo sapiens
uuacguaguuuuggagaucaua

SEQ ID NO: 67089 - RNA, 22 nt, Homo sapiens
auggcauugaagaguugucccu

SEQ ID NO: 67090 - RNA, 22 nt, Homo sapiens
uucccuagaacacauggaggga

SEQ ID NO: 67091 - RNA, 22 nt, Homo sapiens
guacaggugcaggaugggcagg

SEQ ID NO: 67092 - RNA, 22 nt, Homo sapiens
uuuguacacgugggugaauugu

SEQ ID NO: 67093 - RNA, 22 nt, Homo sapiens
agugcauuuguucugugucagg

SEQ ID NO: 67094 - RNA, 22 nt, Homo sapiens
cauuugguggcuacagaguaac

SEQ ID NO: 67095 - RNA, 22 nt, Homo sapiens
aaauccauuuguucagcuaugc

SEQ ID NO: 67096 - RNA, 19 nt, Homo sapiens
auaaaugccuacaagggug

SEQ ID NO: 67097 - RNA, 22 nt, Homo sapiens
gucugucuuuugucuuugaaau

SEQ ID NO: 67098 - RNA, 22 nt, Homo sapiens
aaggaagcuagcaggaauuggu

SEQ ID NO: 67099 - RNA, 22 nt, Homo sapiens
augucuuucauagagacccaga

SEQ ID NO: 67100 - RNA, 20 nt, Homo sapiens
auaugcauguguuuucacuu

SEQ ID NO: 67101 - RNA, 22 nt, Homo sapiens
ucacuuuggguacuauggaaau

SEQ ID NO: 67102 - RNA, 22 nt, Homo sapiens
auugacuugauauauagcugau

SEQ ID NO: 67103 - RNA, 22 nt, Homo sapiens
aaucaacauuguuuuaagucaa

SEQ ID NO: 67104 - RNA, 22 nt, Homo sapiens
gucugguugacagcauguggcc

SEQ ID NO: 67105 - RNA, 17 nt, Homo sapiens
uuagacagacauccugc

SEQ ID NO: 67106 - RNA, 22 nt, Homo sapiens
ugggaacaugaagguuaaagag

SEQ ID NO: 67107 - RNA, 22 nt, Homo sapiens
uuacagauggcacacucaaggg

SEQ ID NO: 67108 - RNA, 23 nt, Homo sapiens
agucuguguuuacaggcucucug

SEQ ID NO: 67109 - RNA, 22 nt, Homo sapiens
gaaggcaugcugcauggccaga

SEQ ID NO: 67110 - RNA, 22 nt, Homo sapiens
acacuggguaacauaucuguua

SEQ ID NO: 67111 - RNA, 22 nt, Homo sapiens
ucaaguaguaacuaacugugac

SEQ ID NO: 67112 - RNA, 22 nt, Homo sapiens
aggagcuuuggggaaaacagau

SEQ ID NO: 67113 - RNA, 22 nt, Homo sapiens
guggaagugucuggggccaggg

SEQ ID NO: 67114 - RNA, 22 nt, Homo sapiens
uugagaaucuuucgaauguucu

SEQ ID NO: 67115 - RNA, 22 nt, Homo sapiens
ugacacagugggggauccuuuu

SEQ ID NO: 67116 - RNA, 22 nt, Homo sapiens
auucacagggggagaaggguau

SEQ ID NO: 67117 - RNA, 22 nt, Homo sapiens
auacauguucaagggcauauau

SEQ ID NO: 67118 - RNA, 22 nt, Homo sapiens
gggaaauguaaagucauaagau

SEQ ID NO: 67119 - RNA, 22 nt, Homo sapiens
aagcugccaggcaugguggcug

SEQ ID NO: 67120 - RNA, 22 nt, Homo sapiens
uucaccaguuuugucacgaaug

SEQ ID NO: 67121 - RNA, 23 nt, Homo sapiens
uuucuugggcaugcuaugucagu

SEQ ID NO: 67122 - RNA, 18 nt, Homo sapiens
auauugcauuggauggau

SEQ ID NO: 67123 - RNA, 22 nt, Homo sapiens
uugaaguagcauuucaugucua

SEQ ID NO: 67124 - RNA, 22 nt, Homo sapiens
uccugagacugaggagcuuugg

SEQ ID NO: 67125 - RNA, 22 nt, Homo sapiens
uucacaauuaaaugugguuauu

SEQ ID NO: 67126 - RNA, 22 nt, Homo sapiens
cucaguggauuagauaaugcac

SEQ ID NO: 67127 - RNA, 22 nt, Homo sapiens
uuagaacaguguuugccucgcu

SEQ ID NO: 67128 - RNA, 22 nt, Homo sapiens
uggacagacaagguuauagauc

SEQ ID NO: 67129 - RNA, 22 nt, Homo sapiens
agucgguguuacugacagaaug

SEQ ID NO: 67130 - RNA, 22 nt, Homo sapiens
guggcaaguguuccaagaggcg

SEQ ID NO: 67131 - RNA, 17 nt, Homo sapiens
ucuaauaauaugcauuu

SEQ ID NO: 67132 - RNA, 22 nt, Homo sapiens
uccaguuuggaggcuugaugug

SEQ ID NO: 67133 - RNA, 22 nt, Homo sapiens
augaucaucugaaagcuuuuac

SEQ ID NO: 67134 - RNA, 22 nt, Homo sapiens
ugcuuaguuguauguuccacau

SEQ ID NO: 67135 - RNA, 22 nt, Homo sapiens
uugugucccugcccaaaucuca

SEQ ID NO: 67136 - RNA, 22 nt, Homo sapiens
ugacuugaguaacuggcucagg

SEQ ID NO: 67137 - RNA, 22 nt, Homo sapiens
ggcgguguccuccaagugcuuc

SEQ ID NO: 67138 - RNA, 22 nt, Homo sapiens
gugaguggacgugaccaauaaa

SEQ ID NO: 67139 - RNA, 22 nt, Homo sapiens
aaccuucauuccuuucccugcc

SEQ ID NO: 67140 - RNA, 23 nt, Homo sapiens
agcaaaugcucuagcacuccaac

SEQ ID NO: 67141 - RNA, 22 nt, Homo sapiens
uuuagguagucaaagguuaguc

SEQ ID NO: 67142 - RNA, 22 nt, Homo sapiens
gcuaugucuguugcucuugggc

SEQ ID NO: 67143 - RNA, 22 nt, Homo sapiens
cagcgaggucugcgucacauug

SEQ ID NO: 67144 - RNA, 23 nt, Homo sapiens
uugggcaaaucacugagggcaga

SEQ ID NO: 67145 - RNA, 22 nt, Homo sapiens
ugccagaugcaguguucaacaa

SEQ ID NO: 67146 - RNA, 19 nt, Homo sapiens
ucugugcuugucccccugu

SEQ ID NO: 67147 - RNA, 22 nt, Homo sapiens
ugacuacauaaguaaucucaaa

SEQ ID NO: 67148 - RNA, 22 nt, Homo sapiens
caugucuuuuaaacauucaacu

SEQ ID NO: 67149 - RNA, 22 nt, Homo sapiens
uuggucucuuaaucacacuuuu

SEQ ID NO: 67150 - RNA, 22 nt, Homo sapiens
agacucauuuuuaucgagcaug

SEQ ID NO: 67151 - RNA, 22 nt, Homo sapiens
agcaacauuguucauaauagcu

SEQ ID NO: 67152 - RNA, 22 nt, Homo sapiens
gcaagacaugucuaagguuuaa

SEQ ID NO: 67153 - RNA, 22 nt, Homo sapiens
ugaauucuguccaaaauaacug

SEQ ID NO: 67154 - RNA, 22 nt, Homo sapiens
uugugaaaucuaggcagagguu

SEQ ID NO: 67155 - RNA, 22 nt, Homo sapiens
uugaauggaauguuggaacuau

SEQ ID NO: 67156 - RNA, 22 nt, Homo sapiens
gugacuggacucugaagaaaau

SEQ ID NO: 67157 - RNA, 22 nt, Homo sapiens
acugggucaaaguagaaaacua

SEQ ID NO: 67158 - RNA, 22 nt, Homo sapiens
uaucacacaucaugguaaaucu

SEQ ID NO: 67159 - RNA, 22 nt, Homo sapiens
uucuuuaguucacuugcuccag

SEQ ID NO: 67160 - RNA, 22 nt, Homo sapiens
ucagugaauguuggccacuacu

SEQ ID NO: 67161 - RNA, 22 nt, Homo sapiens
uucccuugcaggaugaucugga

SEQ ID NO: 67162 - RNA, 22 nt, Homo sapiens
ugagaugauuuaauggagccca

SEQ ID NO: 67163 - RNA, 22 nt, Homo sapiens
ugcaauauccucuacuauaggu

SEQ ID NO: 67164 - RNA, 23 nt, Homo sapiens
ugcugagaccuagauccuaaaga

SEQ ID NO: 67165 - RNA, 22 nt, Homo sapiens
uucugugcuuguggaugaagug

SEQ ID NO: 67166 - RNA, 22 nt, Homo sapiens
uugcaugcuccuuaugagaauc

SEQ ID NO: 67167 - RNA, 22 nt, Homo sapiens
uuaacagucacuuagcucauuu

SEQ ID NO: 67168 - RNA, 22 nt, Homo sapiens
uugagauguggcaguuuaugag

SEQ ID NO: 67169 - RNA, 22 nt, Homo sapiens
ucuugguugaaaauucauaaua

SEQ ID NO: 67170 - RNA, 22 nt, Homo sapiens
aauagcuguuuuuaauuccugc

SEQ ID NO: 67171 - RNA, 22 nt, Homo sapiens
gacauagagccuugacuucauu

SEQ ID NO: 67172 - RNA, 22 nt, Homo sapiens
ugcugguggucccauaugauua

SEQ ID NO: 67173 - RNA, 22 nt, Homo sapiens
cauauucacuuuacagagcugu

SEQ ID NO: 67174 - RNA, 22 nt, Homo sapiens
uaguacccuugaagcagacaua

SEQ ID NO: 67175 - RNA, 19 nt, Homo sapiens
agcagaacaaauguguggg

SEQ ID NO: 67176 - RNA, 22 nt, Homo sapiens
uggcucauuucuaaacccagcu

SEQ ID NO: 67177 - RNA, 18 nt, Homo sapiens
ugucacuggauaaugguc

SEQ ID NO: 67178 - RNA, 22 nt, Homo sapiens
ugaugacacugauuucuucaau

SEQ ID NO: 67179 - RNA, 22 nt, Homo sapiens
uacuuagagacaugcagcacug

SEQ ID NO: 67180 - RNA, 22 nt, Homo sapiens
ugccaguguugccuuucacuag

SEQ ID NO: 67181 - RNA, 19 nt, Homo sapiens
uagcacagggucccagacu

SEQ ID NO: 67182 - RNA, 22 nt, Homo sapiens
auaaaugcuuccagucauuaaa

SEQ ID NO: 67183 - RNA, 22 nt, Homo sapiens
auaaaugcaaugguauuuuuga

SEQ ID NO: 67184 - RNA, 22 nt, Homo sapiens
cugagagaggagcuaaaacugc

SEQ ID NO: 67185 - RNA, 22 nt, Homo sapiens
gugcuuuguuguggcaguggca

SEQ ID NO: 67186 - RNA, 22 nt, Homo sapiens
ugagcaucucuaaaaggagcaa

SEQ ID NO: 67187 - RNA, 22 nt, Homo sapiens
agugcaauggugccaucauagc

SEQ ID NO: 67188 - RNA, 20 nt, Homo sapiens
cagagcaaagcaguccuggc

SEQ ID NO: 67189 - RNA, 22 nt, Homo sapiens
acccaguguucagacuaccugu

SEQ ID NO: 67190 - RNA, 22 nt, Homo sapiens
ucaaggcaguggccuuccuucu

SEQ ID NO: 67191 - RNA, 22 nt, Homo sapiens
gugaccagaugggcaggggugu

SEQ ID NO: 67192 - RNA, 22 nt, Homo sapiens
ugugccacugcacuccugccug

SEQ ID NO: 67193 - RNA, 22 nt, Homo sapiens
aagcuccauuucugccaugaga

SEQ ID NO: 67194 - RNA, 22 nt, Homo sapiens
uugagcaucauguuagcacuca

SEQ ID NO: 67195 - RNA, 22 nt, Homo sapiens
aauugcuucuguauuuuggaca

SEQ ID NO: 67196 - RNA, 19 nt, Homo sapiens
uggucaguucugggagcug

SEQ ID NO: 67197 - RNA, 22 nt, Homo sapiens
uuuggcuguuucuggacuaaga

SEQ ID NO: 67198 - RNA, 22 nt, Homo sapiens
augaaguauuaggacacauuua

SEQ ID NO: 67199 - RNA, 22 nt, Homo sapiens
ugcaagauaggcaguuugcacu

SEQ ID NO: 67200 - RNA, 22 nt, Homo sapiens
uggaugaagagaugguaguugc

SEQ ID NO: 67201 - RNA, 22 nt, Homo sapiens
ugagaagaugaacuccuugguc

SEQ ID NO: 67202 - RNA, 22 nt, Homo sapiens
aaguaauggaguuauuuuauga

SEQ ID NO: 67203 - RNA, 22 nt, Homo sapiens
accccugagaucgaaucaugcu

SEQ ID NO: 67204 - RNA, 22 nt, Homo sapiens
augacugucagggcagucauug

SEQ ID NO: 67205 - RNA, 22 nt, Homo sapiens
ucaccuagacucgaucauguag

SEQ ID NO: 67206 - RNA, 22 nt, Homo sapiens
ugagauuguucuaugucugguu

SEQ ID NO: 67207 - RNA, 19 nt, Homo sapiens
aaaugugcacuguuuucca

SEQ ID NO: 67208 - RNA, 22 nt, Homo sapiens
ucaacguauuuauauagcagag

SEQ ID NO: 67209 - RNA, 22 nt, Homo sapiens
ugugccacugcacucugggcaa

SEQ ID NO: 67210 - RNA, 22 nt, Homo sapiens
ucccauguagcuaggauuacag

SEQ ID NO: 67211 - RNA, 22 nt, Homo sapiens
uuauggcuauugaugacaauug

SEQ ID NO: 67212 - RNA, 22 nt, Homo sapiens
agacaguguguguauauauggu

SEQ ID NO: 67213 - RNA, 22 nt, Homo sapiens
gugugcacaaucuggcaugugc

SEQ ID NO: 67214 - RNA, 21 nt, Homo sapiens
ugcuccauuuucuagccugaa

SEQ ID NO: 67215 - RNA, 22 nt, Homo sapiens
ugagagacaguuucgucggagg

SEQ ID NO: 67216 - RNA, 20 nt, Homo sapiens
gccacaguuaagcuucugcc

SEQ ID NO: 67217 - RNA, 21 nt, Homo sapiens
cuugucuugcuuagaauagac

SEQ ID NO: 67218 - RNA, 22 nt, Homo sapiens
ggagaucuuuaggaguuggacu

SEQ ID NO: 67219 - RNA, 22 nt, Homo sapiens
gucuuugcauguauguucauga

SEQ ID NO: 67220 - RNA, 23 nt, Homo sapiens
cuugagacaaaugcgugugugca

SEQ ID NO: 67221 - RNA, 20 nt, Homo sapiens
uuauagcuacaucuugacug

SEQ ID NO: 67222 - RNA, 22 nt, Homo sapiens
aggacacugauguaugcugugg

SEQ ID NO: 67223 - RNA, 22 nt, Homo sapiens
ugucacugugcagucaugcauu

SEQ ID NO: 67224 - RNA, 22 nt, Homo sapiens
ugacaggagauuaugugauguu

SEQ ID NO: 67225 - RNA, 19 nt, Homo sapiens
uuaagugugauaucucagu

SEQ ID NO: 67226 - RNA, 22 nt, Homo sapiens
uuguguccccacccaaaucuca

SEQ ID NO: 67227 - RNA, 22 nt, Homo sapiens
auuauaugucaucacagacacc

SEQ ID NO: 67228 - RNA, 22 nt, Homo sapiens
ugaagacucaguuugagggaca

SEQ ID NO: 67229 - RNA, 22 nt, Homo sapiens
uccuugaaacaggaagaauuca

SEQ ID NO: 67230 - RNA, 22 nt, Homo sapiens
uccacaauggagaagaguauga

SEQ ID NO: 67231 - RNA, 22 nt, Homo sapiens
augagauuauguaaagagacca

SEQ ID NO: 67232 - RNA, 22 nt, Homo sapiens
uucagaguggacagaaauuaag

SEQ ID NO: 67233 - RNA, 22 nt, Homo sapiens
cugcagucaucugaagauuuug

SEQ ID NO: 67234 - RNA, 22 nt, Homo sapiens
ucugugguucaggcuggagugc

SEQ ID NO: 67235 - RNA, 23 nt, Homo sapiens
ugggucaguuuuucugacaucau

SEQ ID NO: 67236 - RNA, 22 nt, Homo sapiens
ugucacaguuuguacuuuauag

SEQ ID NO: 67237 - RNA, 22 nt, Homo sapiens
gcccaguagcaguacaucccuu

SEQ ID NO: 67238 - RNA, 19 nt, Homo sapiens
uguugcacauaucaauaug

SEQ ID NO: 67239 - RNA, 22 nt, Homo sapiens
ggcccugagacaggaaaaagcu

SEQ ID NO: 67240 - RNA, 22 nt, Homo sapiens
cucucugagccccagacaccuu

SEQ ID NO: 67241 - RNA, 22 nt, Homo sapiens
ugugacucuggcacauggugag

SEQ ID NO: 67242 - RNA, 22 nt, Homo sapiens
auacagguauacaaugcauaau

SEQ ID NO: 67243 - RNA, 22 nt, Homo sapiens
gagaucaguuaaugaagugagc

SEQ ID NO: 67244 - RNA, 22 nt, Homo sapiens
agcuucauuguuaugaauguca

SEQ ID NO: 67245 - RNA, 22 nt, Homo sapiens
augaugaaguaagugcuuagga

SEQ ID NO: 67246 - RNA, 17 nt, Homo sapiens
gaaguguuucagcagcu

SEQ ID NO: 67247 - RNA, 22 nt, Homo sapiens
ccuuggcaauggcuggggcuga

SEQ ID NO: 67248 - RNA, 22 nt, Homo sapiens
augcagagaaaucuaaaauaug

SEQ ID NO: 67249 - RNA, 22 nt, Homo sapiens
uuaagaagugauuuuccucauu

SEQ ID NO: 67250 - RNA, 22 nt, Homo sapiens
gagaugaaguuaaggaucuuua

SEQ ID NO: 67251 - RNA, 22 nt, Homo sapiens
cuguuagguuaaggaauggcaa

SEQ ID NO: 67252 - RNA, 22 nt, Homo sapiens
cugugcacaucuggcggcccga

SEQ ID NO: 67253 - RNA, 22 nt, Homo sapiens
uccauggagacacauuuuauau

SEQ ID NO: 67254 - RNA, 22 nt, Homo sapiens
uucagggacuuuagacaagaga

SEQ ID NO: 67255 - RNA, 22 nt, Homo sapiens
uugaaagucauuucuucuaagu

SEQ ID NO: 67256 - RNA, 17 nt, Homo sapiens
ccccugagcgaugcagu

SEQ ID NO: 67257 - RNA, 22 nt, Homo sapiens
uugaaaguaaacaucacaaaga

SEQ ID NO: 67258 - RNA, 22 nt, Homo sapiens
aagggaaugcuuccaguuugug

SEQ ID NO: 67259 - RNA, 22 nt, Homo sapiens
gucccugaggaacauccagggc

SEQ ID NO: 67260 - RNA, 19 nt, Homo sapiens
cugugcauuucuguggaag

SEQ ID NO: 67261 - RNA, 22 nt, Homo sapiens
aagugguuuuuacaaagacaga

SEQ ID NO: 67262 - RNA, 22 nt, Homo sapiens
aaaugguguuaguagaucuuua

SEQ ID NO: 67263 - RNA, 22 nt, Homo sapiens
aaaugcaguugguggggauaug

SEQ ID NO: 67264 - RNA, 23 nt, Homo sapiens
uugacuguggguacaaugugaua

SEQ ID NO: 67265 - RNA, 22 nt, Homo sapiens
gcucugguuacaaaggcaaauu

SEQ ID NO: 67266 - RNA, 22 nt, Homo sapiens
cacauguuugcuacauuuuucu

SEQ ID NO: 67267 - RNA, 19 nt, Homo sapiens
uuuuggaaaugugaacagc

SEQ ID NO: 67268 - RNA, 22 nt, Homo sapiens
uuugcagugucagcuucugugu

SEQ ID NO: 67269 - RNA, 22 nt, Homo sapiens
acccugugagagaguuaauauu

SEQ ID NO: 67270 - RNA, 22 nt, Homo sapiens
ucagaucaugcuuaugauggga

SEQ ID NO: 67271 - RNA, 22 nt, Homo sapiens
ucucauagaggcagagaguaaa

SEQ ID NO: 67272 - RNA, 20 nt, Homo sapiens
uaucacaggucagaaacccu

SEQ ID NO: 67273 - RNA, 22 nt, Homo sapiens
ugaguucuuccuaucucugccu

SEQ ID NO: 67274 - RNA, 22 nt, Homo sapiens
ucugugcauggcagaggaauga

SEQ ID NO: 67275 - RNA, 22 nt, Homo sapiens
guaaaugcagaugcaugaccuu

SEQ ID NO: 67276 - RNA, 22 nt, Homo sapiens
uggcaugcauuguggguaauua

SEQ ID NO: 67277 - RNA, 22 nt, Homo sapiens
gucucccaaccccugugcccag

SEQ ID NO: 67278 - RNA, 22 nt, Homo sapiens
ggaaagacaccuuacuauguua

SEQ ID NO: 67279 - RNA, 22 nt, Homo sapiens
gggaggucauuguaaggucuua

SEQ ID NO: 67280 - RNA, 22 nt, Homo sapiens
ggagucugacuuauaggaaccu

SEQ ID NO: 67281 - RNA, 22 nt, Homo sapiens
uuaauguaucuaucacaucaca

SEQ ID NO: 67282 - RNA, 22 nt, Homo sapiens
gaucacauuguuucauacauau

SEQ ID NO: 67283 - RNA, 22 nt, Homo sapiens
uugaaaguguucacaaugguau

SEQ ID NO: 67284 - RNA, 22 nt, Homo sapiens
aaaugcugucugugagccucau

SEQ ID NO: 67285 - RNA, 22 nt, Homo sapiens
ugggcaguauggucauuuucgu

SEQ ID NO: 67286 - RNA, 22 nt, Homo sapiens
aucugugaaugaaguuauuuug

SEQ ID NO: 67287 - RNA, 22 nt, Homo sapiens
ugaaaugcugucuaggggaaau

SEQ ID NO: 67288 - RNA, 22 nt, Homo sapiens
aaggcagucacuaaauagugag

SEQ ID NO: 67289 - RNA, 19 nt, Homo sapiens
ugagauuguaugaggagau

SEQ ID NO: 67290 - RNA, 22 nt, Homo sapiens
uuccuggaggggaaguguccaa

SEQ ID NO: 67291 - RNA, 22 nt, Homo sapiens
ugggcaagagagcaugacccug

SEQ ID NO: 67292 - RNA, 21 nt, Homo sapiens
cuuugguuucugacuugcaua

SEQ ID NO: 67293 - RNA, 22 nt, Homo sapiens
ugcauugcacuugcaugagaua

SEQ ID NO: 67294 - RNA, 22 nt, Homo sapiens
ggcaaggaggggcacuuucacu

SEQ ID NO: 67295 - RNA, 22 nt, Homo sapiens
gaugagaucauaaguguggagc

SEQ ID NO: 67296 - RNA, 22 nt, Homo sapiens
aagcuguguguaagcucucaca

SEQ ID NO: 67297 - RNA, 22 nt, Homo sapiens
cugagaucaugggucagguggu

SEQ ID NO: 67298 - RNA, 22 nt, Homo sapiens
aguaucaagccacacaugguca

SEQ ID NO: 67299 - RNA, 22 nt, Homo sapiens
gaggcaagaguaguuaaguuag

SEQ ID NO: 67300 - RNA, 18 nt, Homo sapiens
aaguauagagagcccuua

SEQ ID NO: 67301 - RNA, 22 nt, Homo sapiens
ugaaggcaggagggagaaaagu

SEQ ID NO: 67302 - RNA, 22 nt, Homo sapiens
aagggaaugugguagcugguuu

SEQ ID NO: 67303 - RNA, 22 nt, Homo sapiens
ugagcaucauucacaccuuggu

SEQ ID NO: 67304 - RNA, 22 nt, Homo sapiens
uugaggaggcagucuucccauu

SEQ ID NO: 67305 - RNA, 22 nt, Homo sapiens
cuagaagcauauucagaacaga

SEQ ID NO: 67306 - RNA, 22 nt, Homo sapiens
guucacacuugcaaccccagca

SEQ ID NO: 67307 - RNA, 19 nt, Homo sapiens
augccuggagaugguuaua

SEQ ID NO: 67308 - RNA, 22 nt, Homo sapiens
uauagcauuuugauccuguaga

SEQ ID NO: 67309 - RNA, 22 nt, Homo sapiens
ucauaguagucacuuaauaaau

SEQ ID NO: 67310 - RNA, 18 nt, Homo sapiens
uugcaaauucuucccugu

SEQ ID NO: 67311 - RNA, 22 nt, Homo sapiens
uuaaggaaagcauuuaauucag

SEQ ID NO: 67312 - RNA, 18 nt, Homo sapiens
ugauaucaucacaauuga

SEQ ID NO: 67313 - RNA, 22 nt, Homo sapiens
aacccugagucaugagucuaga

SEQ ID NO: 67314 - RNA, 22 nt, Homo sapiens
ucacacugucuugguuacucuu

SEQ ID NO: 67315 - RNA, 19 nt, Homo sapiens
gacaugagauuuggugggg

SEQ ID NO: 67316 - RNA, 20 nt, Homo sapiens
aaaugcuguaauguuuggga

SEQ ID NO: 67317 - RNA, 20 nt, Homo sapiens
ugaaggaggucauuuauacc

SEQ ID NO: 67318 - RNA, 22 nt, Homo sapiens
cccugagcagccugaguuuccc

SEQ ID NO: 67319 - RNA, 22 nt, Homo sapiens
uugcaugucugcuucuccuccu

SEQ ID NO: 67320 - RNA, 22 nt, Homo sapiens
ggcaaguucuaaugauuagaau

SEQ ID NO: 67321 - RNA, 20 nt, Homo sapiens
ugagauuggugugguauaag

SEQ ID NO: 67322 - RNA, 22 nt, Homo sapiens
uuaauguaauugauugauugac

SEQ ID NO: 67323 - RNA, 22 nt, Homo sapiens
uaagugcaacauaaguguuaaa

SEQ ID NO: 67324 - RNA, 22 nt, Homo sapiens
uuagguaauauauugcugcuuu

SEQ ID NO: 67325 - RNA, 22 nt, Homo sapiens
cugugcauuggaugucucccug

SEQ ID NO: 67326 - RNA, 22 nt, Homo sapiens
ugagaagacaucuuugcuuugu

SEQ ID NO: 67327 - RNA, 22 nt, Homo sapiens
uugugcaaaaguaauugcgguu

SEQ ID NO: 67328 - RNA, 22 nt, Homo sapiens
uaugucuuuugcuugcaaauag

SEQ ID NO: 67329 - RNA, 22 nt, Homo sapiens
uuuccuggagaaucuuaacaaa

SEQ ID NO: 67330 - RNA, 22 nt, Homo sapiens
aaacauugaccucauccuggca

SEQ ID NO: 67331 - RNA, 22 nt, Homo sapiens
acccuugaguguguuucaggca

SEQ ID NO: 67332 - RNA, 23 nt, Homo sapiens
ccaguauuuauguaaggaagugu

SEQ ID NO: 67333 - RNA, 22 nt, Homo sapiens
ggcaagugucagcagcaacacc

SEQ ID NO: 67334 - RNA, 22 nt, Homo sapiens
uggaguguagaagccagccucc

SEQ ID NO: 67335 - RNA, 22 nt, Homo sapiens
aaggcauucucaaacuaguucu

SEQ ID NO: 67336 - RNA, 22 nt, Homo sapiens
uggcaagaaggauuuauuccuu

SEQ ID NO: 67337 - RNA, 22 nt, Homo sapiens
ugcaaauguuaguaacaccacu

SEQ ID NO: 67338 - RNA, 22 nt, Homo sapiens
gagacagugucagccauugaaa

SEQ ID NO: 67339 - RNA, 22 nt, Homo sapiens
caacaguaaagcauuuuuaagu

SEQ ID NO: 67340 - RNA, 22 nt, Homo sapiens
cugagauggagucucgcauugu

SEQ ID NO: 67341 - RNA, 22 nt, Homo sapiens
uugagcucaucaagauagagaa

SEQ ID NO: 67342 - RNA, 22 nt, Homo sapiens
aaagugauuguaguuuuugcca

SEQ ID NO: 67343 - RNA, 22 nt, Homo sapiens
uucucuguggauugggugagag

SEQ ID NO: 67344 - RNA, 22 nt, Homo sapiens
ugaacagucaucucucuuguau

SEQ ID NO: 67345 - RNA, 22 nt, Homo sapiens
agcacagugguuaaguuucuua

SEQ ID NO: 67346 - RNA, 22 nt, Homo sapiens
uccacuuuugugcugaauugga

SEQ ID NO: 67347 - RNA, 22 nt, Homo sapiens
uugcaaagaccucuucacuucc

SEQ ID NO: 67348 - RNA, 19 nt, Homo sapiens
ucccuuuguagguaaccug

SEQ ID NO: 67349 - RNA, 17 nt, Homo sapiens
auaugaauuuuggagau

SEQ ID NO: 67350 - RNA, 20 nt, Homo sapiens
uuggcauuuagacaagaguu

SEQ ID NO: 67351 - RNA, 22 nt, Homo sapiens
ugcaaaguccucauucuuaccc

SEQ ID NO: 67352 - RNA, 22 nt, Homo sapiens
ucuccggguggcggcgaaggga

SEQ ID NO: 67353 - RNA, 22 nt, Homo sapiens
uacaaagcuuucugcaaaucau

SEQ ID NO: 67354 - RNA, 20 nt, Homo sapiens
ugaaacacauggacuggggu

SEQ ID NO: 67355 - RNA, 22 nt, Homo sapiens
auggcuuuggucucccagugau

SEQ ID NO: 67356 - RNA, 22 nt, Homo sapiens
aagucaguuugggagaagcuau

SEQ ID NO: 67357 - RNA, 23 nt, Homo sapiens
uacagcugcagaaucaggcuaag

SEQ ID NO: 67358 - RNA, 22 nt, Homo sapiens
aucugcauuagggugaagaccu

SEQ ID NO: 67359 - RNA, 22 nt, Homo sapiens
ccaguuuucucacuguugcagu

SEQ ID NO: 67360 - RNA, 22 nt, Homo sapiens
cuggaguuugaggcugcaguga

SEQ ID NO: 67361 - RNA, 22 nt, Homo sapiens
uucucugggacauaggucgggu

SEQ ID NO: 67362 - RNA, 20 nt, Homo sapiens
agguaguuauacaaaugugu

SEQ ID NO: 67363 - RNA, 22 nt, Homo sapiens
gugagacugguucugaacccag

SEQ ID NO: 67364 - RNA, 22 nt, Homo sapiens
uucauguaauuccauaagguaa

SEQ ID NO: 67365 - RNA, 22 nt, Homo sapiens
ugagucccuaagacccucaggu

SEQ ID NO: 67366 - RNA, 22 nt, Homo sapiens
uuaagccacucaagagauagag

SEQ ID NO: 67367 - RNA, 22 nt, Homo sapiens
aauggcagaugaaauugucauu

SEQ ID NO: 67368 - RNA, 22 nt, Homo sapiens
ugagaucuucgcucuucacaga

SEQ ID NO: 67369 - RNA, 22 nt, Homo sapiens
auguuauguucuucucuguaua

SEQ ID NO: 67370 - RNA, 22 nt, Homo sapiens
gagacugagucucgcucugccg

SEQ ID NO: 67371 - RNA, 18 nt, Homo sapiens
aauggcucuggguucuaa

SEQ ID NO: 67372 - RNA, 22 nt, Homo sapiens
guagcaugcaauauuauagaga

SEQ ID NO: 67373 - RNA, 22 nt, Homo sapiens
ucugugguucaaaccagcaacu

SEQ ID NO: 67374 - RNA, 22 nt, Homo sapiens
uuauugcacuccagccugggua

SEQ ID NO: 67375 - RNA, 22 nt, Homo sapiens
aggaggauugcuuucaucuuuu

SEQ ID NO: 67376 - RNA, 22 nt, Homo sapiens
aggaauggaaacuuuugauggu

SEQ ID NO: 67377 - RNA, 22 nt, Homo sapiens
ugagcagaaguuuugauuggcg

SEQ ID NO: 67378 - RNA, 22 nt, Homo sapiens
ugaucugucacuuaucacauuu

SEQ ID NO: 67379 - RNA, 22 nt, Homo sapiens
ugccagaugcuggugugagggg

SEQ ID NO: 67380 - RNA, 22 nt, Homo sapiens
uuugauugguguaccugaaagu

SEQ ID NO: 67381 - RNA, 22 nt, Homo sapiens
uuucauggaauauagucauuuu

SEQ ID NO: 67382 - RNA, 22 nt, Homo sapiens
uagcauggaggcggccauagug

SEQ ID NO: 67383 - RNA, 22 nt, Homo sapiens
gugagaagaaaaauauggcugu

SEQ ID NO: 67384 - RNA, 22 nt, Homo sapiens
uugaaagucauggcacaggcaa

SEQ ID NO: 67385 - RNA, 22 nt, Homo sapiens
ucacugaaaccuccgccuucug

SEQ ID NO: 67386 - RNA, 22 nt, Homo sapiens
gugguaggaaagugcaaaugua

SEQ ID NO: 67387 - RNA, 22 nt, Homo sapiens
gugaacagcagaugagugagug

SEQ ID NO: 67388 - RNA, 22 nt, Homo sapiens
ugauaagaaauuguucauguag

SEQ ID NO: 67389 - RNA, 22 nt, Homo sapiens
ugacagugaauaagucucuuaa

SEQ ID NO: 67390 - RNA, 22 nt, Homo sapiens
agauacaucuaugugucugugu

SEQ ID NO: 67391 - RNA, 22 nt, Homo sapiens
cagcaucauucaucugggguaa

SEQ ID NO: 67392 - RNA, 22 nt, Homo sapiens
gagaaugaacagacugccucuu

SEQ ID NO: 67393 - RNA, 22 nt, Homo sapiens
uugugauugagugauccuuguu

SEQ ID NO: 67394 - RNA, 22 nt, Homo sapiens
uuggcuguguuuauaugcugga

SEQ ID NO: 67395 - RNA, 22 nt, Homo sapiens
gugcacaacgugcagguuuguu

SEQ ID NO: 67396 - RNA, 22 nt, Homo sapiens
aagaugcagucauacuggagua

SEQ ID NO: 67397 - RNA, 22 nt, Homo sapiens
ugggaugaugaaaaggcuuucu

SEQ ID NO: 67398 - RNA, 22 nt, Homo sapiens
aagcuggauuuaguguggagca

SEQ ID NO: 67399 - RNA, 22 nt, Homo sapiens
uugauaauguuaacuuugguca

SEQ ID NO: 67400 - RNA, 22 nt, Homo sapiens
ugacuuuagaauuuuauccaga

SEQ ID NO: 67401 - RNA, 22 nt, Homo sapiens
uugaagacuauaugauucuuca

SEQ ID NO: 67402 - RNA, 22 nt, Homo sapiens
uugagauggagucucgcacugu

SEQ ID NO: 67403 - RNA, 22 nt, Homo sapiens
cugagacacucuuaucugcaua

SEQ ID NO: 67404 - RNA, 22 nt, Homo sapiens
uuugucccuuugcaguggcaca

SEQ ID NO: 67405 - RNA, 16 nt, Homo sapiens
uuuuugcagaaaugac

SEQ ID NO: 67406 - RNA, 21 nt, Homo sapiens
cacuggguucaggcuugugga

SEQ ID NO: 67407 - RNA, 22 nt, Homo sapiens
gaggaucucuugagcccagaag

SEQ ID NO: 67408 - RNA, 22 nt, Homo sapiens
uccuuggugacauuucuugucu

SEQ ID NO: 67409 - RNA, 22 nt, Homo sapiens
ucccaguguguagcuugucucu

SEQ ID NO: 67410 - RNA, 22 nt, Homo sapiens
ccuucuuuuguaaggcugaaua

SEQ ID NO: 67411 - RNA, 17 nt, Homo sapiens
ggcaggauccaggaucc

SEQ ID NO: 67412 - RNA, 22 nt, Homo sapiens
ugccaagaacauuuucuguuuu

SEQ ID NO: 67413 - RNA, 22 nt, Homo sapiens
ugcaaaugcugcuauuucucuu

SEQ ID NO: 67414 - RNA, 22 nt, Homo sapiens
guaucauugccuaaugcucuca

SEQ ID NO: 67415 - RNA, 22 nt, Homo sapiens
gucccagagauauugugucuuu

SEQ ID NO: 67416 - RNA, 22 nt, Homo sapiens
ucccugagguccuggauuauug

SEQ ID NO: 67417 - RNA, 18 nt, Homo sapiens
ucaagcaauugucaugcc

SEQ ID NO: 67418 - RNA, 22 nt, Homo sapiens
uggcccccucccaaaucucaua

SEQ ID NO: 67419 - RNA, 22 nt, Homo sapiens
auggcaaaauguuccuaguggu

SEQ ID NO: 67420 - RNA, 22 nt, Homo sapiens
auggcaguguaugauuauauua

SEQ ID NO: 67421 - RNA, 22 nt, Homo sapiens
auagaucauugucauuuuagau

SEQ ID NO: 67422 - RNA, 22 nt, Homo sapiens
aaagugcaguauuugggcagaa

SEQ ID NO: 67423 - RNA, 22 nt, Homo sapiens
auuuugcauugcuguaaaggaa

SEQ ID NO: 67424 - RNA, 22 nt, Homo sapiens
guguaaaacaauuagaggauuu

SEQ ID NO: 67425 - RNA, 22 nt, Homo sapiens
gggaagugugguuucuuuacag

SEQ ID NO: 67426 - RNA, 22 nt, Homo sapiens
uugagaugauggauaugcuaau

SEQ ID NO: 67427 - RNA, 22 nt, Homo sapiens
uaucacacgccuugcuucauuu

SEQ ID NO: 67428 - RNA, 22 nt, Homo sapiens
gucacugagcagaaggaagcga

SEQ ID NO: 67429 - RNA, 17 nt, Homo sapiens
ggaagccuuugguuuaa

SEQ ID NO: 67430 - RNA, 22 nt, Homo sapiens
uaguauguuuauagcauugagu

SEQ ID NO: 67431 - RNA, 22 nt, Homo sapiens
ugagauauugggaguaauguca

SEQ ID NO: 67432 - RNA, 19 nt, Homo sapiens
uagaugucuuugcauagau

SEQ ID NO: 67433 - RNA, 22 nt, Homo sapiens
uuagcaauugauucucauaagc

SEQ ID NO: 67434 - RNA, 22 nt, Homo sapiens
ugccaacaugccuggcuguuuu

SEQ ID NO: 67435 - RNA, 22 nt, Homo sapiens
aagagaugaagguccugacugu

SEQ ID NO: 67436 - RNA, 22 nt, Homo sapiens
uuuguacuugaaacccagggcc

SEQ ID NO: 67437 - RNA, 22 nt, Homo sapiens
augaggaaggagccuuugucug

SEQ ID NO: 67438 - RNA, 23 nt, Homo sapiens
gugccuucugagccuagucucca

SEQ ID NO: 67439 - RNA, 22 nt, Homo sapiens
ugcucaccugcugcucaccucc

SEQ ID NO: 67440 - RNA, 22 nt, Homo sapiens
agaguauagcaacuuaguaaaa

SEQ ID NO: 67441 - RNA, 22 nt, Homo sapiens
acagugcuuggcacacaguaau

SEQ ID NO: 67442 - RNA, 22 nt, Homo sapiens
ugagacaaaguuguuggauguu

SEQ ID NO: 67443 - RNA, 22 nt, Homo sapiens
uucagugguuauuugugagauu

SEQ ID NO: 67444 - RNA, 22 nt, Homo sapiens
ucuauggauaaaaugcccucau

SEQ ID NO: 67445 - RNA, 22 nt, Homo sapiens
aggagcacaauggucaugugga

SEQ ID NO: 67446 - RNA, 18 nt, Homo sapiens
uuuggcuguucaugacuc

SEQ ID NO: 67447 - RNA, 21 nt, Homo sapiens
ugcauaucucuaaugaccagu

SEQ ID NO: 67448 - RNA, 22 nt, Homo sapiens
cuaaaugcacugucaaaggaag

SEQ ID NO: 67449 - RNA, 22 nt, Homo sapiens
gauggaauuaaaaucagaauca

SEQ ID NO: 67450 - RNA, 22 nt, Homo sapiens
gccauggaggauuuauagaggc

SEQ ID NO: 67451 - RNA, 19 nt, Homo sapiens
uuggaauuuuagaguuuga

SEQ ID NO: 67452 - RNA, 22 nt, Homo sapiens
ucaaaugcuguauuguaguaau

SEQ ID NO: 67453 - RNA, 21 nt, Homo sapiens
ucuaccuacugcucacaggcu

SEQ ID NO: 67454 - RNA, 22 nt, Homo sapiens
uucuugcuguauccucacaugg

SEQ ID NO: 67455 - RNA, 22 nt, Homo sapiens
uucauguaauauauuucaggcc

SEQ ID NO: 67456 - RNA, 22 nt, Homo sapiens
gugacugggaguggugaagaua

SEQ ID NO: 67457 - RNA, 22 nt, Homo sapiens
aauacugugauaucgagcgauu

SEQ ID NO: 67458 - RNA, 22 nt, Homo sapiens
aagugcugggauuggccgggca

SEQ ID NO: 67459 - RNA, 22 nt, Homo sapiens
ugagaauauuugaagauguuag

SEQ ID NO: 67460 - RNA, 22 nt, Homo sapiens
caugccacugcacgccauccug

SEQ ID NO: 67461 - RNA, 21 nt, Homo sapiens
gugcacaguaguguuuaauag

SEQ ID NO: 67462 - RNA, 22 nt, Homo sapiens
aucccugaggaauuucugcacu

SEQ ID NO: 67463 - RNA, 22 nt, Homo sapiens
ggucacauugcuagcauggguu

SEQ ID NO: 67464 - RNA, 22 nt, Homo sapiens
augagcacuuguuuugggcaca

SEQ ID NO: 67465 - RNA, 18 nt, Homo sapiens
gagcaccuuuuuugcaga

SEQ ID NO: 67466 - RNA, 22 nt, Homo sapiens
uauuugguuggugcaaaaguaa

SEQ ID NO: 67467 - RNA, 22 nt, Homo sapiens
ucugugaaugugaccuuauuug

SEQ ID NO: 67468 - RNA, 22 nt, Homo sapiens
gagacugagucuugcucuguca

SEQ ID NO: 67469 - RNA, 22 nt, Homo sapiens
ugacuugauccauggggcucca

SEQ ID NO: 67470 - RNA, 22 nt, Homo sapiens
ucacacuguuuugauuauuaua

SEQ ID NO: 67471 - RNA, 22 nt, Homo sapiens
ucccugacagucacagagcuac

SEQ ID NO: 67472 - RNA, 22 nt, Homo sapiens
cacauguuuuagcauggcuguu

SEQ ID NO: 67473 - RNA, 22 nt, Homo sapiens
augucaacauagacaguagagu

SEQ ID NO: 67474 - RNA, 22 nt, Homo sapiens
ugacuucagacugaaaugauuc

SEQ ID NO: 67475 - RNA, 22 nt, Homo sapiens
uuggagugugagagcagccugg

SEQ ID NO: 67476 - RNA, 20 nt, Homo sapiens
gugggcaaauccuuuccucu

SEQ ID NO: 67477 - RNA, 18 nt, Homo sapiens
gauaacaguggacuaugc

SEQ ID NO: 67478 - RNA, 22 nt, Homo sapiens
aauaucacaguuggguguacac

SEQ ID NO: 67479 - RNA, 22 nt, Homo sapiens
cugagguacccacuucaucuca

SEQ ID NO: 67480 - RNA, 22 nt, Homo sapiens
ugacagagcaggacuucaucuc

SEQ ID NO: 67481 - RNA, 22 nt, Homo sapiens
cacaguagaauagagcacuagg

SEQ ID NO: 67482 - RNA, 22 nt, Homo sapiens
uuuagguauuugguauagcagu

SEQ ID NO: 67483 - RNA, 22 nt, Homo sapiens
agucacagccuuuuacuuuaga

SEQ ID NO: 67484 - RNA, 22 nt, Homo sapiens
uggcagcgugaauguggcugaa

SEQ ID NO: 67485 - RNA, 22 nt, Homo sapiens
aaaggcuucggaucagaaggua

SEQ ID NO: 67486 - RNA, 23 nt, Homo sapiens
cuguggugaggcccuagaaucug

SEQ ID NO: 67487 - RNA, 22 nt, Homo sapiens
ugacuagagggcuuuuguguag

SEQ ID NO: 67488 - RNA, 22 nt, Homo sapiens
ugucaggaguuuuagaaucuua

SEQ ID NO: 67489 - RNA, 22 nt, Homo sapiens
agcgccacugcacuccagccug

SEQ ID NO: 67490 - RNA, 22 nt, Homo sapiens
gucccugcgauugugggauccu

SEQ ID NO: 67491 - RNA, 22 nt, Homo sapiens
ggagucugauguucuaaggcag

SEQ ID NO: 67492 - RNA, 22 nt, Homo sapiens
ucaguggagcuacaauucuggg

SEQ ID NO: 67493 - RNA, 22 nt, Homo sapiens
cuuaaugcuacggcucuguguu

SEQ ID NO: 67494 - RNA, 23 nt, Homo sapiens
ucacacuuaagagaaaugcagcu

SEQ ID NO: 67495 - RNA, 22 nt, Homo sapiens
uugagauaggagcuguuguucu

SEQ ID NO: 67496 - RNA, 22 nt, Homo sapiens
ugcaaauguuaggugucauuau

SEQ ID NO: 67497 - RNA, 22 nt, Homo sapiens
uggcaaagugugacgugggggu

SEQ ID NO: 67498 - RNA, 22 nt, Homo sapiens
uuucugaggccucaccagaagc

SEQ ID NO: 67499 - RNA, 22 nt, Homo sapiens
gugggcaaagcuaguguguaga

SEQ ID NO: 67500 - RNA, 22 nt, Homo sapiens
augagauauuuuauaagaucau

SEQ ID NO: 67501 - RNA, 22 nt, Homo sapiens
agugggccccuagaggugaggu

SEQ ID NO: 67502 - RNA, 22 nt, Homo sapiens
ugcaagcacacccagggauugu

SEQ ID NO: 67503 - RNA, 23 nt, Homo sapiens
augaauguaaggaguguaagaaa

SEQ ID NO: 67504 - RNA, 22 nt, Homo sapiens
aaaugcuguuccaggaccuauc

SEQ ID NO: 67505 - RNA, 22 nt, Homo sapiens
uucaccuugcccacagcagucu

SEQ ID NO: 67506 - RNA, 22 nt, Homo sapiens
uuuaguacugcuuuaugugugu

SEQ ID NO: 67507 - RNA, 22 nt, Homo sapiens
ccuugguaauguguuuuauucu

SEQ ID NO: 67508 - RNA, 22 nt, Homo sapiens
ucaugaccaugguauagaccac

SEQ ID NO: 67509 - RNA, 22 nt, Homo sapiens
uggcuguguccucucccaaauc

SEQ ID NO: 67510 - RNA, 23 nt, Homo sapiens
gcuaggagagaugaaacacaggu

SEQ ID NO: 67511 - RNA, 22 nt, Homo sapiens
caagguacuuuuacaauuuccc

SEQ ID NO: 67512 - RNA, 22 nt, Homo sapiens
uccugcauucugacuugcuuuc

SEQ ID NO: 67513 - RNA, 19 nt, Homo sapiens
cuauugcacauagcugaag

SEQ ID NO: 67514 - RNA, 22 nt, Homo sapiens
uuagcacaucuuucuauguaag

SEQ ID NO: 67515 - RNA, 22 nt, Homo sapiens
gugagaugguaucucauugugg

SEQ ID NO: 67516 - RNA, 22 nt, Homo sapiens
ccaaguguucucauuguucaau

SEQ ID NO: 67517 - RNA, 22 nt, Homo sapiens
agagacauugcuccaacucacc

SEQ ID NO: 67518 - RNA, 22 nt, Homo sapiens
ucaagcaauucuccugccucag

SEQ ID NO: 67519 - RNA, 22 nt, Homo sapiens
cuuagguuaugauaaauuuagu

SEQ ID NO: 67520 - RNA, 22 nt, Homo sapiens
uuauagcagugcaggaacagac

SEQ ID NO: 67521 - RNA, 22 nt, Homo sapiens
uaucacagauauuaugggccaa

SEQ ID NO: 67522 - RNA, 22 nt, Homo sapiens
gucuagaacuucugaccuuagg

SEQ ID NO: 67523 - RNA, 22 nt, Homo sapiens
uagcaugacacuuguugaaugc

SEQ ID NO: 67524 - RNA, 22 nt, Homo sapiens
uaugugcaaauuaauugcuaga

SEQ ID NO: 67525 - RNA, 21 nt, Homo sapiens
cacauggaggcagagagugua

SEQ ID NO: 67526 - RNA, 21 nt, Homo sapiens
cucaaaguacugauauuacag

SEQ ID NO: 67527 - RNA, 22 nt, Homo sapiens
gagcuggacuucuuaccuuuuc

SEQ ID NO: 67528 - RNA, 22 nt, Homo sapiens
auccauugcucaagagaaguca

SEQ ID NO: 67529 - RNA, 22 nt, Homo sapiens
ugcaaaugucaaggguuagugu

SEQ ID NO: 67530 - RNA, 22 nt, Homo sapiens
augaucacuguggaaauucagc

SEQ ID NO: 67531 - RNA, 22 nt, Homo sapiens
gugucaugggcauguccuuaac

SEQ ID NO: 67532 - RNA, 22 nt, Homo sapiens
cuugagacauuguuuuccaagu

SEQ ID NO: 67533 - RNA, 22 nt, Homo sapiens
gcaaaugcuaugccauuuuaua

SEQ ID NO: 67534 - RNA, 22 nt, Homo sapiens
ugagaaugacugggcaugcugc

SEQ ID NO: 67535 - RNA, 22 nt, Homo sapiens
gaaucacugugguaucccaugc

SEQ ID NO: 67536 - RNA, 22 nt, Homo sapiens
uucugugguugaaaggagagau

SEQ ID NO: 67537 - RNA, 22 nt, Homo sapiens
agaugcuguuaucaacuguagc

SEQ ID NO: 67538 - RNA, 21 nt, Homo sapiens
ugcaagaaucaggaagcugcc

SEQ ID NO: 67539 - RNA, 22 nt, Homo sapiens
gugcacaacguguagguuuguu

SEQ ID NO: 67540 - RNA, 22 nt, Homo sapiens
auugcuauuauuugaccauugu

SEQ ID NO: 67541 - RNA, 22 nt, Homo sapiens
ugucaucauuggaaucugccuc

SEQ ID NO: 67542 - RNA, 22 nt, Homo sapiens
uucaggcaccauugucauugau

SEQ ID NO: 67543 - RNA, 21 nt, Homo sapiens
cucucugcuuaugaauaguga

SEQ ID NO: 67544 - RNA, 20 nt, Homo sapiens
uugacaguggguuguuaaag

SEQ ID NO: 67545 - RNA, 22 nt, Homo sapiens
ugagaucaugccacugcacuuc

SEQ ID NO: 67546 - RNA, 22 nt, Homo sapiens
ucaccuggggcacagcugaaga

SEQ ID NO: 67547 - RNA, 22 nt, Homo sapiens
aagguggugucagagagcuuau

SEQ ID NO: 67548 - RNA, 22 nt, Homo sapiens
uuuggcuuuuguaauaacugcc

SEQ ID NO: 67549 - RNA, 22 nt, Homo sapiens
uguaaaucuauuuuuaguguuu

SEQ ID NO: 67550 - RNA, 22 nt, Homo sapiens
uaaaugacugucaguagaugaa

SEQ ID NO: 67551 - RNA, 22 nt, Homo sapiens
cuaaugcagucaggagaaggaa

SEQ ID NO: 67552 - RNA, 22 nt, Homo sapiens
auagcaucauuucuugaaaaga

SEQ ID NO: 67553 - RNA, 17 nt, Homo sapiens
cccuaguagcugggacu

SEQ ID NO: 67554 - RNA, 22 nt, Homo sapiens
gcagcacauggcagaacauauu

SEQ ID NO: 67555 - RNA, 22 nt, Homo sapiens
uauuagugucuuuugguuagaa

SEQ ID NO: 67556 - RNA, 22 nt, Homo sapiens
auugcaguuucaacuccagggc

SEQ ID NO: 67557 - RNA, 22 nt, Homo sapiens
ugaaacacaccuccucuccauc

SEQ ID NO: 67558 - RNA, 22 nt, Homo sapiens
cacauagucccugcuaaucuuc

SEQ ID NO: 67559 - RNA, 22 nt, Homo sapiens
uggagcccuaaacuucuaauau

SEQ ID NO: 67560 - RNA, 22 nt, Homo sapiens
uuggccccuuucauccacagcu

SEQ ID NO: 67561 - RNA, 22 nt, Homo sapiens
uugagauacauaauuaugaaug

SEQ ID NO: 67562 - RNA, 22 nt, Homo sapiens
uuguguccccacccaaauuuca

SEQ ID NO: 67563 - RNA, 22 nt, Homo sapiens
ccagccgggugcaguggcucac

SEQ ID NO: 67564 - RNA, 22 nt, Homo sapiens
ugacucaguuguuagucuucau

SEQ ID NO: 67565 - RNA, 22 nt, Homo sapiens
auauagcaaugaaagagaugaa

SEQ ID NO: 67566 - RNA, 22 nt, Homo sapiens
gacuggcuguuuucuuuauuau

SEQ ID NO: 67567 - RNA, 22 nt, Homo sapiens
uagcagugugaaaacagacuaa

SEQ ID NO: 67568 - RNA, 22 nt, Homo sapiens
auauucacagguaucagagauu

SEQ ID NO: 67569 - RNA, 22 nt, Homo sapiens
gugugauuauuucaauugaugc

SEQ ID NO: 67570 - RNA, 22 nt, Homo sapiens
caugugcaugagcacauacgug

SEQ ID NO: 67571 - RNA, 22 nt, Homo sapiens
cucagugguugauuuauuuauc

SEQ ID NO: 67572 - RNA, 22 nt, Homo sapiens
auggcaguuucagcuauaguuu

SEQ ID NO: 67573 - RNA, 22 nt, Homo sapiens
ccaguguucuggaaggcugagu

SEQ ID NO: 67574 - RNA, 22 nt, Homo sapiens
aauggcacuuuauaaauguuaa

SEQ ID NO: 67575 - RNA, 22 nt, Homo sapiens
auggcccccuguuugugaacau

SEQ ID NO: 67576 - RNA, 22 nt, Homo sapiens
augaaaucuuuggcagaucuua

SEQ ID NO: 67577 - RNA, 22 nt, Homo sapiens
ugcaguacugucagacuucuua

SEQ ID NO: 67578 - RNA, 22 nt, Homo sapiens
uaacaacauucuaacugacggc

SEQ ID NO: 67579 - RNA, 22 nt, Homo sapiens
uuugguccaguguucagguccu

SEQ ID NO: 67580 - RNA, 17 nt, Homo sapiens
ugugauugaagucaucc

SEQ ID NO: 67581 - RNA, 22 nt, Homo sapiens
agaacacugaguucagggucag

SEQ ID NO: 67582 - RNA, 22 nt, Homo sapiens
uggcuuuuaucuacucucaacu

SEQ ID NO: 67583 - RNA, 23 nt, Homo sapiens
agauggcauuucaguucuuuagg

SEQ ID NO: 67584 - RNA, 22 nt, Homo sapiens
auggcacuguguauuuuucugu

SEQ ID NO: 67585 - RNA, 22 nt, Homo sapiens
augcuuguguuggggcagugga

SEQ ID NO: 67586 - RNA, 22 nt, Homo sapiens
cugugacugcagggcauauuug

SEQ ID NO: 67587 - RNA, 22 nt, Homo sapiens
ucagugcuguaccaucuaagga

SEQ ID NO: 67588 - RNA, 22 nt, Homo sapiens
auccugaagcuuuacugaauuc

SEQ ID NO: 67589 - RNA, 22 nt, Homo sapiens
ugucucccuucccauuaggaag

SEQ ID NO: 67590 - RNA, 22 nt, Homo sapiens
cugagcacugagauccucuagc

SEQ ID NO: 67591 - RNA, 22 nt, Homo sapiens
aacaguaucuaacgagugauga

SEQ ID NO: 67592 - RNA, 22 nt, Homo sapiens
gacauguuuacaguguugagag

SEQ ID NO: 67593 - RNA, 22 nt, Homo sapiens
ugugacacugaauggcagaacu

SEQ ID NO: 67594 - RNA, 22 nt, Homo sapiens
ggcuguguguuaaaauaggcuu

SEQ ID NO: 67595 - RNA, 22 nt, Homo sapiens
uuggaaaaauccaccuugaucu

SEQ ID NO: 67596 - RNA, 22 nt, Homo sapiens
agcagauguuuagugagcgccu

SEQ ID NO: 67597 - RNA, 22 nt, Homo sapiens
gugagagaaugacuauguguuu

SEQ ID NO: 67598 - RNA, 22 nt, Homo sapiens
aacuggucuuuggaggaggagg

SEQ ID NO: 67599 - RNA, 22 nt, Homo sapiens
uaauaauguuaggcuuacucaa

SEQ ID NO: 67600 - RNA, 22 nt, Homo sapiens
uucauagugaaaaauucaaagu

SEQ ID NO: 67601 - RNA, 22 nt, Homo sapiens
aaaacgcauccucacaggucug

SEQ ID NO: 67602 - RNA, 18 nt, Homo sapiens
uaagaugcagccuauucc

SEQ ID NO: 67603 - RNA, 21 nt, Homo sapiens
uuugcauauguugaaccagcc

SEQ ID NO: 67604 - RNA, 22 nt, Homo sapiens
uaguugcauuggcugcuaugcu

SEQ ID NO: 67605 - RNA, 22 nt, Homo sapiens
caggcagucuggggguguaucc

SEQ ID NO: 67606 - RNA, 22 nt, Homo sapiens
gauggcauuucuggaucugccc

SEQ ID NO: 67607 - RNA, 19 nt, Homo sapiens
ccaguguugccagagcuga

SEQ ID NO: 67608 - RNA, 22 nt, Homo sapiens
uucacugugaacucauauucag

SEQ ID NO: 67609 - RNA, 22 nt, Homo sapiens
ggcagaauugcugaggaugcua

SEQ ID NO: 67610 - RNA, 22 nt, Homo sapiens
guauacaguugacccuugaacc

SEQ ID NO: 67611 - RNA, 22 nt, Homo sapiens
uggaaaguccaagccaaccggg

SEQ ID NO: 67612 - RNA, 22 nt, Homo sapiens
uuuaaggcaugccuguacaugc

SEQ ID NO: 67613 - RNA, 22 nt, Homo sapiens
uugguucucuuagccaucuuaa

SEQ ID NO: 67614 - RNA, 22 nt, Homo sapiens
caggcauuguauuguaaucccc

SEQ ID NO: 67615 - RNA, 22 nt, Homo sapiens
gugucccagugugcauacaggu

SEQ ID NO: 67616 - RNA, 22 nt, Homo sapiens
cucauggagaaccucugcuagg

SEQ ID NO: 67617 - RNA, 22 nt, Homo sapiens
aauagcacuguagauggaggaa

SEQ ID NO: 67618 - RNA, 22 nt, Homo sapiens
aggcaguuucagugagagguga

SEQ ID NO: 67619 - RNA, 22 nt, Homo sapiens
aagcugccuugugaaggcauuc

SEQ ID NO: 67620 - RNA, 22 nt, Homo sapiens
ucuuaggugaugauugauguga

SEQ ID NO: 67621 - RNA, 22 nt, Homo sapiens
acagugcuuucaauguucagua

SEQ ID NO: 67622 - RNA, 22 nt, Homo sapiens
caugaaagacugaggaauugga

SEQ ID NO: 67623 - RNA, 22 nt, Homo sapiens
aguaccauuacucacuuauuuu

SEQ ID NO: 67624 - RNA, 22 nt, Homo sapiens
aaauggauuaaguucacuugcu

SEQ ID NO: 67625 - RNA, 22 nt, Homo sapiens
uccugagacucacaggcucccc

SEQ ID NO: 67626 - RNA, 20 nt, Homo sapiens
guggaagauaaguagccuga

SEQ ID NO: 67627 - RNA, 22 nt, Homo sapiens
ucaugugagcacagagcaagau

SEQ ID NO: 67628 - RNA, 22 nt, Homo sapiens
auggaagaaaguuggguucuug

SEQ ID NO: 67629 - RNA, 23 nt, Homo sapiens
ugucaucaagaugaggucacacu

SEQ ID NO: 67630 - RNA, 22 nt, Homo sapiens
uaacuacuucugcuucagagua

SEQ ID NO: 67631 - RNA, 22 nt, Homo sapiens
uuccaguuauuauaccucuuaa

SEQ ID NO: 67632 - RNA, 22 nt, Homo sapiens
uucaguggagaggcugaguggu

SEQ ID NO: 67633 - RNA, 22 nt, Homo sapiens
agaaugucaguauuggcuaaaa

SEQ ID NO: 67634 - RNA, 22 nt, Homo sapiens
augcauauuuuaccuagaagag

SEQ ID NO: 67635 - RNA, 22 nt, Homo sapiens
ugggaugaaaauagcuucuucc

SEQ ID NO: 67636 - RNA, 22 nt, Homo sapiens
gacuagggaaaauuauuuuguu

SEQ ID NO: 67637 - RNA, 22 nt, Homo sapiens
gugcacaucuguguuccagcua

SEQ ID NO: 67638 - RNA, 22 nt, Homo sapiens
uggaagacaggcuguauuuuaa

SEQ ID NO: 67639 - RNA, 22 nt, Homo sapiens
agagcacuguggguccaaauau

SEQ ID NO: 67640 - RNA, 22 nt, Homo sapiens
uaaggcacccuucugaguagag

SEQ ID NO: 67641 - RNA, 22 nt, Homo sapiens
ugccaguguuuuguugaagauu

SEQ ID NO: 67642 - RNA, 22 nt, Homo sapiens
gggaugaagaagaauaguucgu

SEQ ID NO: 67643 - RNA, 23 nt, Homo sapiens
aagguaagcuagaaagauguaga

SEQ ID NO: 67644 - RNA, 22 nt, Homo sapiens
uuugagcauuagggcaaaggca

SEQ ID NO: 67645 - RNA, 22 nt, Homo sapiens
aaggcaagauacugguugcuga

SEQ ID NO: 67646 - RNA, 22 nt, Homo sapiens
uuguacaggaguguaagcuuca

SEQ ID NO: 67647 - RNA, 22 nt, Homo sapiens
auggucccauucauucacguau

SEQ ID NO: 67648 - RNA, 22 nt, Homo sapiens
caccaguuuuucagugauucaa

SEQ ID NO: 67649 - RNA, 21 nt, Homo sapiens
aguucacauggcuccuguguu

SEQ ID NO: 67650 - RNA, 21 nt, Homo sapiens
cucauauugcuuuuccauggu

SEQ ID NO: 67651 - RNA, 22 nt, Homo sapiens
auggccuuguauaccuggcaaa

SEQ ID NO: 67652 - RNA, 22 nt, Homo sapiens
ugaaagguuuaauucugugaga

SEQ ID NO: 67653 - RNA, 22 nt, Homo sapiens
aagucaaggagagaagcuucag

SEQ ID NO: 67654 - RNA, 22 nt, Homo sapiens
auggcagugucuagggguguuu

SEQ ID NO: 67655 - RNA, 22 nt, Homo sapiens
ucagauguuucuuuaacgcaug

SEQ ID NO: 67656 - RNA, 22 nt, Homo sapiens
ugaggugagggguuaggugcua

SEQ ID NO: 67657 - RNA, 22 nt, Homo sapiens
uuaaaugcauagaauguguagu

SEQ ID NO: 67658 - RNA, 22 nt, Homo sapiens
auucccuuagcugccucagccu

SEQ ID NO: 67659 - RNA, 19 nt, Homo sapiens
ucucugguguuggagggga

SEQ ID NO: 67660 - RNA, 22 nt, Homo sapiens
uugacugggccagacagagauc

SEQ ID NO: 67661 - RNA, 22 nt, Homo sapiens
uugauuagauccaguugauuga

SEQ ID NO: 67662 - RNA, 22 nt, Homo sapiens
uucuuagucauguaauagucca

SEQ ID NO: 67663 - RNA, 22 nt, Homo sapiens
agcacaguuaaaugaggcuucu

SEQ ID NO: 67664 - RNA, 22 nt, Homo sapiens
augugcacauucugguaaauau

SEQ ID NO: 67665 - RNA, 22 nt, Homo sapiens
ugcuacccuucgucucucuggu

SEQ ID NO: 67666 - RNA, 22 nt, Homo sapiens
aagcugcauuuucuagaugcuu

SEQ ID NO: 67667 - RNA, 22 nt, Homo sapiens
agugaaaucugaagaaggucau

SEQ ID NO: 67668 - RNA, 18 nt, Homo sapiens
uggauuggaaaaguuccu

SEQ ID NO: 67669 - RNA, 22 nt, Homo sapiens
ucagugaauacauguacucaug

SEQ ID NO: 67670 - RNA, 22 nt, Homo sapiens
auggacagaaaaaaauagaugu

SEQ ID NO: 67671 - RNA, 22 nt, Homo sapiens
ugcauggauguuugaacacacu

SEQ ID NO: 67672 - RNA, 22 nt, Homo sapiens
uggaaaauuaggggagguuaua

SEQ ID NO: 67673 - RNA, 22 nt, Homo sapiens
uugagcucuucuagcaauucua

SEQ ID NO: 67674 - RNA, 23 nt, Homo sapiens
aggccaguuuuuccugcuugcug

SEQ ID NO: 67675 - RNA, 22 nt, Homo sapiens
uagaauguauaauauuuuacuu

SEQ ID NO: 67676 - RNA, 22 nt, Homo sapiens
ucucaaguaacugggacaauaa

SEQ ID NO: 67677 - RNA, 22 nt, Homo sapiens
auggcuuugggcugcucugccc

SEQ ID NO: 67678 - RNA, 22 nt, Homo sapiens
uuauguccuuuaacuucaucac

SEQ ID NO: 67679 - RNA, 22 nt, Homo sapiens
gugcacaacgugcaaguuuguu

SEQ ID NO: 67680 - RNA, 20 nt, Homo sapiens
gacauguugguuugcugcac

SEQ ID NO: 67681 - RNA, 22 nt, Homo sapiens
ucuguaacauccaccuucuggg

SEQ ID NO: 67682 - RNA, 22 nt, Homo sapiens
ucugugguuguugcauggaaug

SEQ ID NO: 67683 - RNA, 22 nt, Homo sapiens
uaugacuguuugcucauucagg

SEQ ID NO: 67684 - RNA, 22 nt, Homo sapiens
cuucugauugaaaauggaguag

SEQ ID NO: 67685 - RNA, 22 nt, Homo sapiens
ugugcaaggcucucaaccugug

SEQ ID NO: 67686 - RNA, 22 nt, Homo sapiens
uuugacaaugugugcuuguauu

SEQ ID NO: 67687 - RNA, 22 nt, Homo sapiens
uuugaguuugaggugcugauga

SEQ ID NO: 67688 - RNA, 22 nt, Homo sapiens
caugccacuguggacaaagaca

SEQ ID NO: 67689 - RNA, 22 nt, Homo sapiens
ugagaucaaggugggcccuggg

SEQ ID NO: 67690 - RNA, 19 nt, Homo sapiens
caguaucauugcacauagu

SEQ ID NO: 67691 - RNA, 22 nt, Homo sapiens
uacucacauucuguuucuugcu

SEQ ID NO: 67692 - RNA, 22 nt, Homo sapiens
cacccaguaagcaugaggcccu

SEQ ID NO: 67693 - RNA, 22 nt, Homo sapiens
gggaugaagcccuaggguuggu

SEQ ID NO: 67694 - RNA, 22 nt, Homo sapiens
guuauugcucucgaagacucuc

SEQ ID NO: 67695 - RNA, 21 nt, Homo sapiens
ugaaaugcaugugcacauuaa

SEQ ID NO: 67696 - RNA, 22 nt, Homo sapiens
gagagugaaguuugcuaccugu

SEQ ID NO: 67697 - RNA, 22 nt, Homo sapiens
uugaagugaagaacaauaucac

SEQ ID NO: 67698 - RNA, 22 nt, Homo sapiens
ugagccaugguuagcuucucau

SEQ ID NO: 67699 - RNA, 22 nt, Homo sapiens
aaggcaagaaaauggauucucc

SEQ ID NO: 67700 - RNA, 22 nt, Homo sapiens
cuagguucucaaaccagcguca

SEQ ID NO: 67701 - RNA, 22 nt, Homo sapiens
uucaggcaccauggucauugau

SEQ ID NO: 67702 - RNA, 23 nt, Homo sapiens
gcagcaaugucacagggguccgg

SEQ ID NO: 67703 - RNA, 21 nt, Homo sapiens
gugguucuagagaaacagaau

SEQ ID NO: 67704 - RNA, 22 nt, Homo sapiens
aucucaguucaggcuggccaca

SEQ ID NO: 67705 - RNA, 22 nt, Homo sapiens
cugagaucugaaccaggagugu

SEQ ID NO: 67706 - RNA, 22 nt, Homo sapiens
uuggaagacaaugcugauucuc

SEQ ID NO: 67707 - RNA, 22 nt, Homo sapiens
acuacaugugaugucaguauau

SEQ ID NO: 67708 - RNA, 22 nt, Homo sapiens
ggucugguguugaaauucuuca

SEQ ID NO: 67709 - RNA, 22 nt, Homo sapiens
cuuuguccuucaagguguguca

SEQ ID NO: 67710 - RNA, 22 nt, Homo sapiens
aaauugcaaugcgaggcagagg

SEQ ID NO: 67711 - RNA, 22 nt, Homo sapiens
caggcagugggagacaaaacug

SEQ ID NO: 67712 - RNA, 22 nt, Homo sapiens
cugugaucuuuuuucauguggu

SEQ ID NO: 67713 - RNA, 18 nt, Homo sapiens
augcauauuuuaaguugu

SEQ ID NO: 67714 - RNA, 22 nt, Homo sapiens
uugugcuccugugagaaucuag

SEQ ID NO: 67715 - RNA, 22 nt, Homo sapiens
uuaagcaaagguaacaugagaa

SEQ ID NO: 67716 - RNA, 19 nt, Homo sapiens
uccccaguuuuccguucag

SEQ ID NO: 67717 - RNA, 22 nt, Homo sapiens
ugugcacauaacauuuuuuuag

SEQ ID NO: 67718 - RNA, 21 nt, Homo sapiens
aggcaagauuacuuacgagca

SEQ ID NO: 67719 - RNA, 22 nt, Homo sapiens
ucagcagugugaaaacaaacua

SEQ ID NO: 67720 - RNA, 22 nt, Homo sapiens
auagaucuauuuauguaucccu

SEQ ID NO: 67721 - RNA, 22 nt, Homo sapiens
uucaagucaauuuuugaaugac

SEQ ID NO: 67722 - RNA, 22 nt, Homo sapiens
aaguagcagaggcaagacuuga

SEQ ID NO: 67723 - RNA, 20 nt, Homo sapiens
aguauucacuuuuuucaugg

SEQ ID NO: 67724 - RNA, 22 nt, Homo sapiens
uucuccugguggacccuaaacg

SEQ ID NO: 67725 - RNA, 22 nt, Homo sapiens
aucacaauuguacguaggagcc

SEQ ID NO: 67726 - RNA, 22 nt, Homo sapiens
uggaaugugaauaacuuccuuc

SEQ ID NO: 67727 - RNA, 20 nt, Homo sapiens
agcuccauuccugaaggcug

SEQ ID NO: 67728 - RNA, 22 nt, Homo sapiens
uugcacuccagccuggaugaca

SEQ ID NO: 67729 - RNA, 22 nt, Homo sapiens
uaucaccauguccguuuuaaaa

SEQ ID NO: 67730 - RNA, 22 nt, Homo sapiens
agugcaguggcacaaucuuggc

SEQ ID NO: 67731 - RNA, 22 nt, Homo sapiens
ggaugcauuuuugguugucaca

SEQ ID NO: 67732 - RNA, 22 nt, Homo sapiens
ucuaaaguacuacuacuguugg

SEQ ID NO: 67733 - RNA, 23 nt, Homo sapiens
ggugaggaguacagagucuucau

SEQ ID NO: 67734 - RNA, 22 nt, Homo sapiens
gucugugcauuaauacgugcug

SEQ ID NO: 67735 - RNA, 22 nt, Homo sapiens
ucugucaaaucuuauguuguag

SEQ ID NO: 67736 - RNA, 22 nt, Homo sapiens
uauuacugucaauaucacagaa

SEQ ID NO: 67737 - RNA, 22 nt, Homo sapiens
cugaagugugaaagucuuuuuu

SEQ ID NO: 67738 - RNA, 22 nt, Homo sapiens
ugaucacagcuugacuaaagga

SEQ ID NO: 67739 - RNA, 22 nt, Homo sapiens
uuggaccacuugauuucugguc

SEQ ID NO: 67740 - RNA, 22 nt, Homo sapiens
ggagauccucugcgggcaaaga

SEQ ID NO: 67741 - RNA, 22 nt, Homo sapiens
uaacaguauaugugguaucuau

SEQ ID NO: 67742 - RNA, 23 nt, Homo sapiens
agaaaugucuauucagggucccu

SEQ ID NO: 67743 - RNA, 22 nt, Homo sapiens
guaacccuguaggccuaaagua

SEQ ID NO: 67744 - RNA, 23 nt, Homo sapiens
ucagugaaggaacaacuaaauag

SEQ ID NO: 67745 - RNA, 22 nt, Homo sapiens
gaguauguauaugagugugucu

SEQ ID NO: 67746 - RNA, 22 nt, Homo sapiens
agucaagaugagauuugggugg

SEQ ID NO: 67747 - RNA, 22 nt, Homo sapiens
uuccaguugugagcuauccggg

SEQ ID NO: 67748 - RNA, 19 nt, Homo sapiens
ucagaucagcccaagggau

SEQ ID NO: 67749 - RNA, 22 nt, Homo sapiens
uugaaaucuuccacagcccaag

SEQ ID NO: 67750 - RNA, 22 nt, Homo sapiens
uaucauugccucaaucuguauu

SEQ ID NO: 67751 - RNA, 20 nt, Homo sapiens
ugacaucagcaauguaauaa

SEQ ID NO: 67752 - RNA, 22 nt, Homo sapiens
aucacauuuauaguggcacgca

SEQ ID NO: 67753 - RNA, 19 nt, Homo sapiens
uugcaguauccuauauguu

SEQ ID NO: 67754 - RNA, 18 nt, Homo sapiens
ggaaaacuuuucuaagua

SEQ ID NO: 67755 - RNA, 22 nt, Homo sapiens
aaagucuguuuugucagagacu

SEQ ID NO: 67756 - RNA, 22 nt, Homo sapiens
ugugcacaaccugcagguuugu

SEQ ID NO: 67757 - RNA, 19 nt, Homo sapiens
ccaguguucugauugcacu

SEQ ID NO: 67758 - RNA, 22 nt, Homo sapiens
guacauagucacacauauacau

SEQ ID NO: 67759 - RNA, 22 nt, Homo sapiens
gauaguugugagaacucuuacu

SEQ ID NO: 67760 - RNA, 22 nt, Homo sapiens
ggugacugguuuaucuggcagu

SEQ ID NO: 67761 - RNA, 22 nt, Homo sapiens
ugaaaugaucaguuugguuacu

SEQ ID NO: 67762 - RNA, 21 nt, Homo sapiens
uggucccuucagaucggauuu

SEQ ID NO: 67763 - RNA, 22 nt, Homo sapiens
gaauaaacuagagaggacugag

SEQ ID NO: 67764 - RNA, 22 nt, Homo sapiens
ucauugcauuccagcccaagca

SEQ ID NO: 67765 - RNA, 22 nt, Homo sapiens
uugcacaguguguacagcacca

SEQ ID NO: 67766 - RNA, 19 nt, Homo sapiens
cuugccccauucauccucu

SEQ ID NO: 67767 - RNA, 22 nt, Homo sapiens
gagguaaguaagaauggcaagc

SEQ ID NO: 67768 - RNA, 21 nt, Homo sapiens
cugcaaaugcugcugccugau

SEQ ID NO: 67769 - RNA, 22 nt, Homo sapiens
ugaaaugccuuuaaugaauuua

SEQ ID NO: 67770 - RNA, 22 nt, Homo sapiens
gagcucaccuuaccucuggagc

SEQ ID NO: 67771 - RNA, 22 nt, Homo sapiens
gagugcaauggcaagaucuugg

SEQ ID NO: 67772 - RNA, 22 nt, Homo sapiens
ugauaugaaguucaaaccaggu

SEQ ID NO: 67773 - RNA, 22 nt, Homo sapiens
gcacauggccacuaggaauaaa

SEQ ID NO: 67774 - RNA, 22 nt, Homo sapiens
ucauggggugagcuacaggcac

SEQ ID NO: 67775 - RNA, 22 nt, Homo sapiens
ugugauuauuuauagacaguca

SEQ ID NO: 67776 - RNA, 22 nt, Homo sapiens
acacuguuuuaguuauuauagc

SEQ ID NO: 67777 - RNA, 22 nt, Homo sapiens
ugugcaaauguuaaacuaacuu

SEQ ID NO: 67778 - RNA, 22 nt, Homo sapiens
cuggcaaaaagagggcaauaau

SEQ ID NO: 67779 - RNA, 22 nt, Homo sapiens
ugcauggucauacauggcaccc

SEQ ID NO: 67780 - RNA, 22 nt, Homo sapiens
ugauaacauuucuucugguaca

SEQ ID NO: 67781 - RNA, 22 nt, Homo sapiens
ugagagucauacaaauaaaaau

SEQ ID NO: 67782 - RNA, 22 nt, Homo sapiens
cuacugacacuacugcaaucau

SEQ ID NO: 67783 - RNA, 22 nt, Homo sapiens
ugggaugaugcuugagaauauc

SEQ ID NO: 67784 - RNA, 22 nt, Homo sapiens
uggagacugaucccucuuuccu

SEQ ID NO: 67785 - RNA, 22 nt, Homo sapiens
uuauucauuaauugcuaagguu

SEQ ID NO: 67786 - RNA, 23 nt, Homo sapiens
ucacuagaguccuggaguuugag

SEQ ID NO: 67787 - RNA, 22 nt, Homo sapiens
ucaguggauuuaaccugaauca

SEQ ID NO: 67788 - RNA, 22 nt, Homo sapiens
gcaugugaauguguaagaaaau

SEQ ID NO: 67789 - RNA, 22 nt, Homo sapiens
auggucuuuuuguuaugagaga

SEQ ID NO: 67790 - RNA, 22 nt, Homo sapiens
uggcaggugcacuggcuuugaa

SEQ ID NO: 67791 - RNA, 22 nt, Homo sapiens
aauccaugugcuuuaccauuuu

SEQ ID NO: 67792 - RNA, 22 nt, Homo sapiens
aucuccaggugccagcugcgcc

SEQ ID NO: 67793 - RNA, 22 nt, Homo sapiens
augauuuuuguaucgccugaug

SEQ ID NO: 67794 - RNA, 22 nt, Homo sapiens
uacuggccuugaacucuggugu

SEQ ID NO: 67795 - RNA, 22 nt, Homo sapiens
cuauaugucuguuuugguacca

SEQ ID NO: 67796 - RNA, 22 nt, Homo sapiens
ucacaauucucaauuugugaaa

SEQ ID NO: 67797 - RNA, 22 nt, Homo sapiens
guaugugcauuguaaauuuuga

SEQ ID NO: 67798 - RNA, 20 nt, Homo sapiens
aucagagacuaggauugcca

SEQ ID NO: 67799 - RNA, 22 nt, Homo sapiens
augagacuagaagagaauaaua

SEQ ID NO: 67800 - RNA, 22 nt, Homo sapiens
ccucauggagaacaucugcuag

SEQ ID NO: 67801 - RNA, 22 nt, Homo sapiens
ugcaaaucuuguguaguuguga

SEQ ID NO: 67802 - RNA, 22 nt, Homo sapiens
ugucuuuguuaguuguccuagu

SEQ ID NO: 67803 - RNA, 22 nt, Homo sapiens
gugaucuucauggaaggugaaa

SEQ ID NO: 67804 - RNA, 22 nt, Homo sapiens
auuccuuaggcccuuugguuag

SEQ ID NO: 67805 - RNA, 20 nt, Homo sapiens
ucucccaaacagcaggcccu

SEQ ID NO: 67806 - RNA, 22 nt, Homo sapiens
uacaaaguaacaguuccuguau

SEQ ID NO: 67807 - RNA, 21 nt, Homo sapiens
uggucccauaagauuacaaug

SEQ ID NO: 67808 - RNA, 22 nt, Homo sapiens
ccagaguuucugauucagcagg

SEQ ID NO: 67809 - RNA, 22 nt, Homo sapiens
uagacccauuguucagagagug

SEQ ID NO: 67810 - RNA, 22 nt, Homo sapiens
aggcaacaugguaaaacccugu

SEQ ID NO: 67811 - RNA, 22 nt, Homo sapiens
guugaggcaggagaauuacuug

SEQ ID NO: 67812 - RNA, 22 nt, Homo sapiens
aaaugucauggaguguuucccc

SEQ ID NO: 67813 - RNA, 22 nt, Homo sapiens
ugaggaguguauuucauucgcu

SEQ ID NO: 67814 - RNA, 22 nt, Homo sapiens
uugugaaaaaccucucguggaa

SEQ ID NO: 67815 - RNA, 21 nt, Homo sapiens
auggugagaaaguagugucaa

SEQ ID NO: 67816 - RNA, 22 nt, Homo sapiens
aaugcacauauauuuccuuauu

SEQ ID NO: 67817 - RNA, 22 nt, Homo sapiens
auccucugagaucuaggcagag

SEQ ID NO: 67818 - RNA, 22 nt, Homo sapiens
uucaaaguaaaaauguguucac

SEQ ID NO: 67819 - RNA, 22 nt, Homo sapiens
uggaagugaacaaccaaggcag

SEQ ID NO: 67820 - RNA, 22 nt, Homo sapiens
uucaucagggagaaauaauuuc

SEQ ID NO: 67821 - RNA, 22 nt, Homo sapiens
caagaggcuguguauaaagcca

SEQ ID NO: 67822 - RNA, 21 nt, Homo sapiens
uggucccauaagauuauaaug

SEQ ID NO: 67823 - RNA, 22 nt, Homo sapiens
ggagucugaacuggacaaugac

SEQ ID NO: 67824 - RNA, 22 nt, Homo sapiens
cugcagaucuuggggcuugcca

SEQ ID NO: 67825 - RNA, 22 nt, Homo sapiens
uuugacuaccaggaauguucuu

SEQ ID NO: 67826 - RNA, 22 nt, Homo sapiens
auccugaugacacagugcugca

SEQ ID NO: 67827 - RNA, 22 nt, Homo sapiens
ugagaagacaucagcuuucgga

SEQ ID NO: 67828 - RNA, 22 nt, Homo sapiens
aauaauggcaccaaagcacaag

SEQ ID NO: 67829 - RNA, 17 nt, Homo sapiens
acccagucuuuuugcac

SEQ ID NO: 67830 - RNA, 22 nt, Homo sapiens
cugaugguuuuacacaagggca

SEQ ID NO: 67831 - RNA, 22 nt, Homo sapiens
uuugcuauagugaauagugcug

SEQ ID NO: 67832 - RNA, 22 nt, Homo sapiens
uguggccuuuguuucaguuggg

SEQ ID NO: 67833 - RNA, 22 nt, Homo sapiens
cucccauugcaaacaacagaag

SEQ ID NO: 67834 - RNA, 22 nt, Homo sapiens
cucauggagaacaucugcuagg

SEQ ID NO: 67835 - RNA, 22 nt, Homo sapiens
aaaugcacgcuacccagcuaga

SEQ ID NO: 67836 - RNA, 22 nt, Homo sapiens
agugacaugggaucaaaucuga

SEQ ID NO: 67837 - RNA, 22 nt, Homo sapiens
ccagauguuuucauucagcaag

SEQ ID NO: 67838 - RNA, 22 nt, Homo sapiens
uuagguagucucugucagaggg

SEQ ID NO: 67839 - RNA, 23 nt, Homo sapiens
acugagcaauguuuacauacuug

SEQ ID NO: 67840 - RNA, 22 nt, Homo sapiens
ugauuuguuuagugccaaguuu

SEQ ID NO: 67841 - RNA, 22 nt, Homo sapiens
uaccucaguucaauaacagaua

SEQ ID NO: 67842 - RNA, 22 nt, Homo sapiens
auaaaugcuuagaucuguauau

SEQ ID NO: 67843 - RNA, 22 nt, Homo sapiens
uugaaggaggugcucacucucg

SEQ ID NO: 67844 - RNA, 22 nt, Homo sapiens
ucugagguaggugcauggauac

SEQ ID NO: 67845 - RNA, 22 nt, Homo sapiens
uagcacaugucagguaauuugc

SEQ ID NO: 67846 - RNA, 22 nt, Homo sapiens
ggagcugugauuugaguccaga

SEQ ID NO: 67847 - RNA, 22 nt, Homo sapiens
uccaguacaggucucucauuuc

SEQ ID NO: 67848 - RNA, 22 nt, Homo sapiens
uugcacagucuagcuccaccuu

SEQ ID NO: 67849 - RNA, 22 nt, Homo sapiens
auggccuuucuggcacauuucc

SEQ ID NO: 67850 - RNA, 22 nt, Homo sapiens
ucacaucucagguuucuugaca

SEQ ID NO: 67851 - RNA, 22 nt, Homo sapiens
uugcaaaucucuuguguuuggu

SEQ ID NO: 67852 - RNA, 22 nt, Homo sapiens
ucacuggucuaaguggaggggg

SEQ ID NO: 67853 - RNA, 22 nt, Homo sapiens
cugcaagaaucguaguauuuga

SEQ ID NO: 67854 - RNA, 22 nt, Homo sapiens
agcuccaugauaguaugucugu

SEQ ID NO: 67855 - RNA, 21 nt, Homo sapiens
uggcaacauggauggauucug

SEQ ID NO: 67856 - RNA, 22 nt, Homo sapiens
ucacuagggaucacuuuacccg

SEQ ID NO: 67857 - RNA, 22 nt, Homo sapiens
auuacaugucuauccaugaaca

SEQ ID NO: 67858 - RNA, 22 nt, Homo sapiens
ucccuagagaagugauuuuuga

SEQ ID NO: 67859 - RNA, 22 nt, Homo sapiens
ucuguggucagaguccuuggcc

SEQ ID NO: 67860 - RNA, 22 nt, Homo sapiens
uuaagcaguggauuagaauuuu

SEQ ID NO: 67861 - RNA, 22 nt, Homo sapiens
uugucacauggggcggcugccc

SEQ ID NO: 67862 - RNA, 22 nt, Homo sapiens
uuaacagugucaaucuguagua

SEQ ID NO: 67863 - RNA, 22 nt, Homo sapiens
aaucacuaugccaugaaguaca

SEQ ID NO: 67864 - RNA, 22 nt, Homo sapiens
ugaguucaauguuaaugaagca

SEQ ID NO: 67865 - RNA, 22 nt, Homo sapiens
uugugcaaaguugugguuucug

SEQ ID NO: 67866 - RNA, 22 nt, Homo sapiens
uccuuggucaaaaagaaagugu

SEQ ID NO: 67867 - RNA, 22 nt, Homo sapiens
gaggcuagauggggaugugucc

SEQ ID NO: 67868 - RNA, 22 nt, Homo sapiens
ucagagcaaagacacuuuauca

SEQ ID NO: 67869 - RNA, 22 nt, Homo sapiens
gaagacauuuacaugggagacc

SEQ ID NO: 67870 - RNA, 22 nt, Homo sapiens
guggucagaaaucucaguggca

SEQ ID NO: 67871 - RNA, 23 nt, Homo sapiens
ccacacuguuuagaauggcauca

SEQ ID NO: 67872 - RNA, 22 nt, Homo sapiens
uaagugcaugauuacaugcaua

SEQ ID NO: 67873 - RNA, 22 nt, Homo sapiens
ggguaggcaagcggaugucaga

SEQ ID NO: 67874 - RNA, 22 nt, Homo sapiens
aaaggauucuaauggaaaugcu

SEQ ID NO: 67875 - RNA, 22 nt, Homo sapiens
aaucauauugucugccaagagg

SEQ ID NO: 67876 - RNA, 22 nt, Homo sapiens
agaaugugaccuuauuuggaga

SEQ ID NO: 67877 - RNA, 22 nt, Homo sapiens
gugaggcacugcugcuuuccag

SEQ ID NO: 67878 - RNA, 22 nt, Homo sapiens
ugaagugggaaaugaguauuaa

SEQ ID NO: 67879 - RNA, 22 nt, Homo sapiens
ugcauccauucuagacucaucu

SEQ ID NO: 67880 - RNA, 21 nt, Homo sapiens
uuguaugguugaacuugauac

SEQ ID NO: 67881 - RNA, 22 nt, Homo sapiens
uuagauuauugguguuuugcaa

SEQ ID NO: 67882 - RNA, 22 nt, Homo sapiens
uuaugacauugacaguuuuuag

SEQ ID NO: 67883 - RNA, 22 nt, Homo sapiens
ugccuaggcuggaaugcagugg

SEQ ID NO: 67884 - RNA, 22 nt, Homo sapiens
guguaaaucaaucuguugucuu

SEQ ID NO: 67885 - RNA, 22 nt, Homo sapiens
ugacaggauggagaucgguauu

SEQ ID NO: 67886 - RNA, 22 nt, Homo sapiens
auaucaacaugguaggguuggu

SEQ ID NO: 67887 - RNA, 22 nt, Homo sapiens
acuacugucagacugccacuga

SEQ ID NO: 67888 - RNA, 22 nt, Homo sapiens
auaaaugccuguuguuuuaagc

SEQ ID NO: 67889 - RNA, 22 nt, Homo sapiens
gugucacuguugagaaguccac

SEQ ID NO: 67890 - RNA, 22 nt, Homo sapiens
ugucauggggaaaauaacagac

SEQ ID NO: 67891 - RNA, 22 nt, Homo sapiens
ggagugugauuguucucuguua

SEQ ID NO: 67892 - RNA, 22 nt, Homo sapiens
uagaauguaaauuccaagggca

SEQ ID NO: 67893 - RNA, 22 nt, Homo sapiens
cugagagugguauguuuaagug

SEQ ID NO: 67894 - RNA, 22 nt, Homo sapiens
uggcagauaggauacaggacua

SEQ ID NO: 67895 - RNA, 22 nt, Homo sapiens
augaaaacaugauuugccuguu

SEQ ID NO: 67896 - RNA, 22 nt, Homo sapiens
ugaaauguaaguugucuagucu

SEQ ID NO: 67897 - RNA, 17 nt, Homo sapiens
ugaggcacuaguaucac

SEQ ID NO: 67898 - RNA, 22 nt, Homo sapiens
aguacugucugguuaccugaca

SEQ ID NO: 67899 - RNA, 22 nt, Homo sapiens
gcccuuugugucuggcuggggu

SEQ ID NO: 67900 - RNA, 22 nt, Homo sapiens
ugagccauggcaccuugucuaa

SEQ ID NO: 67901 - RNA, 22 nt, Homo sapiens
ucaugaaguaguuaacugguug

SEQ ID NO: 67902 - RNA, 22 nt, Homo sapiens
gugcacaaugugcagguuuguu

SEQ ID NO: 67903 - RNA, 22 nt, Homo sapiens
gugcacaacgugcaggcuuguu

SEQ ID NO: 67904 - RNA, 22 nt, Homo sapiens
augacauugaugcucuggcugg

SEQ ID NO: 67905 - RNA, 22 nt, Homo sapiens
uugagcacaggaguuuugagac

SEQ ID NO: 67906 - RNA, 22 nt, Homo sapiens
augaaauugcuaucgcaguacu

SEQ ID NO: 67907 - RNA, 22 nt, Homo sapiens
ugucuuggagaauccuggguuu

SEQ ID NO: 67908 - RNA, 22 nt, Homo sapiens
agugcacuccagccugggcaac

SEQ ID NO: 67909 - RNA, 18 nt, Homo sapiens
ucauagaucaugacagug

SEQ ID NO: 67910 - RNA, 22 nt, Homo sapiens
cugauuguagagccccagggcu

SEQ ID NO: 67911 - RNA, 22 nt, Homo sapiens
uggcacaaugacccuugugggc

SEQ ID NO: 67912 - RNA, 22 nt, Homo sapiens
gcagugugugaggaauuugggu

SEQ ID NO: 67913 - RNA, 22 nt, Homo sapiens
caaaggugcuuuccagguccaa

SEQ ID NO: 67914 - RNA, 19 nt, Homo sapiens
uuugcauagugagaauaua

SEQ ID NO: 67915 - RNA, 22 nt, Homo sapiens
caacacagugaaacccgucucu

SEQ ID NO: 67916 - RNA, 22 nt, Homo sapiens
auuauauguguaugugcauacc

SEQ ID NO: 67917 - RNA, 22 nt, Homo sapiens
uuggcaacauagugagaccccc

SEQ ID NO: 67918 - RNA, 22 nt, Homo sapiens
uuggcuauagauacauggauua

SEQ ID NO: 67919 - RNA, 23 nt, Homo sapiens
uagaauguuuuuccauguuucuu

SEQ ID NO: 67920 - RNA, 22 nt, Homo sapiens
uaccaguaaugguucuagagga

SEQ ID NO: 67921 - RNA, 22 nt, Homo sapiens
cuggaaaguagacaaucuaaaa

SEQ ID NO: 67922 - RNA, 22 nt, Homo sapiens
ugcccuguaucccacuguuuca

SEQ ID NO: 67923 - RNA, 22 nt, Homo sapiens
cacuggcacuguguuuagaugg

SEQ ID NO: 67924 - RNA, 22 nt, Homo sapiens
uggcaaauagcaauaggagggu

SEQ ID NO: 67925 - RNA, 22 nt, Homo sapiens
ucagugaauauauaacagcgau

SEQ ID NO: 67926 - RNA, 22 nt, Homo sapiens
guuugccuuuuagauaggaaug

SEQ ID NO: 67927 - RNA, 22 nt, Homo sapiens
gauacuguauccuaaaagcuuu

SEQ ID NO: 67928 - RNA, 22 nt, Homo sapiens
uaucaaggccacucauuuuaug

SEQ ID NO: 67929 - RNA, 22 nt, Homo sapiens
aaggagcuuaagugacuuguac

SEQ ID NO: 67930 - RNA, 22 nt, Homo sapiens
uucugugguagaaaucucaaau

SEQ ID NO: 67931 - RNA, 22 nt, Homo sapiens
guacaugcaugcaugggugugc

SEQ ID NO: 67932 - RNA, 22 nt, Homo sapiens
ggcaguuuguucuugcuccuuu

SEQ ID NO: 67933 - RNA, 19 nt, Homo sapiens
ugugacugggccagccuag

SEQ ID NO: 67934 - RNA, 22 nt, Homo sapiens
caaggaauucucaauagaguua

SEQ ID NO: 67935 - RNA, 22 nt, Homo sapiens
caaugugcuuggggcacaugag

SEQ ID NO: 67936 - RNA, 22 nt, Homo sapiens
cuucuguuaguucugauaacuu

SEQ ID NO: 67937 - RNA, 22 nt, Homo sapiens
gagcaucauucaacaaaagucu

SEQ ID NO: 67938 - RNA, 20 nt, Homo sapiens
acaaaugcauucugugacau

SEQ ID NO: 67939 - RNA, 22 nt, Homo sapiens
uucaccuguagcaugcccuugg

SEQ ID NO: 67940 - RNA, 22 nt, Homo sapiens
agcugguaugaaaaucucccca

SEQ ID NO: 67941 - RNA, 22 nt, Homo sapiens
auguagauaucaagaggcauau

SEQ ID NO: 67942 - RNA, 22 nt, Homo sapiens
ucugagaucaugucugugcugu

SEQ ID NO: 67943 - RNA, 23 nt, Homo sapiens
uuauggcuuuuauuauguugagg

SEQ ID NO: 67944 - RNA, 22 nt, Homo sapiens
agcugguauuuugucgaggacu

SEQ ID NO: 67945 - RNA, 22 nt, Homo sapiens
aaugugcacuuggagccuugcu

SEQ ID NO: 67946 - RNA, 22 nt, Homo sapiens
ugccaguauuuuguugaagauu

SEQ ID NO: 67947 - RNA, 22 nt, Homo sapiens
ucacugaaacuguccuggguua

SEQ ID NO: 67948 - RNA, 22 nt, Homo sapiens
gcccugagauucuuggauucug

SEQ ID NO: 67949 - RNA, 22 nt, Homo sapiens
ugugucacugaggguuagugua

SEQ ID NO: 67950 - RNA, 22 nt, Homo sapiens
cagagcacuaaagguaaaaggc

SEQ ID NO: 67951 - RNA, 22 nt, Homo sapiens
gcugguauuacaggcaugagcc

SEQ ID NO: 67952 - RNA, 22 nt, Homo sapiens
uauuguacauguuauagauuuu

SEQ ID NO: 67953 - RNA, 19 nt, Homo sapiens
uggcaugaaugugaacuaa

SEQ ID NO: 67954 - RNA, 22 nt, Homo sapiens
caaagucuauucuacccuuacc

SEQ ID NO: 67955 - RNA, 23 nt, Homo sapiens
uugggcaaaucacuaacgucucc

SEQ ID NO: 67956 - RNA, 22 nt, Homo sapiens
caccagguuggagugcaguggu

SEQ ID NO: 67957 - RNA, 22 nt, Homo sapiens
ugagugaacgcugagaccaaau

SEQ ID NO: 67958 - RNA, 22 nt, Homo sapiens
uggagucuugcucuguugccca

SEQ ID NO: 67959 - RNA, 22 nt, Homo sapiens
uuugacuagaguguuuuacaac

SEQ ID NO: 67960 - RNA, 22 nt, Homo sapiens
cuauuagguuggggcgaaagua

SEQ ID NO: 67961 - RNA, 22 nt, Homo sapiens
cugacauggggauccaccuuag

SEQ ID NO: 67962 - RNA, 22 nt, Homo sapiens
augagauacuacaaaugaguuu

SEQ ID NO: 67963 - RNA, 22 nt, Homo sapiens
augcagaucacauuuuucuguc

SEQ ID NO: 67964 - RNA, 22 nt, Homo sapiens
ugacuauaggauaacaugcauu

SEQ ID NO: 67965 - RNA, 22 nt, Homo sapiens
ucacugaaaccuccaccucucg

SEQ ID NO: 67966 - RNA, 22 nt, Homo sapiens
aaucacacuugauguugagcaa

SEQ ID NO: 67967 - RNA, 22 nt, Homo sapiens
ugcagcauugcacuccagccug

SEQ ID NO: 67968 - RNA, 22 nt, Homo sapiens
ggagaugauuaugaaucacuua

SEQ ID NO: 67969 - RNA, 22 nt, Homo sapiens
ugaaacacacauugcccuuuau

SEQ ID NO: 67970 - RNA, 22 nt, Homo sapiens
uucauggaugcauuugaggggu

SEQ ID NO: 67971 - RNA, 22 nt, Homo sapiens
ugauggcauuucauguuuguaa

SEQ ID NO: 67972 - RNA, 22 nt, Homo sapiens
uaacccagugucugugaugggu

SEQ ID NO: 67973 - RNA, 22 nt, Homo sapiens
gugugauuguuaauuuuaggug

SEQ ID NO: 67974 - RNA, 19 nt, Homo sapiens
ugaaugacaucuaaagucc

SEQ ID NO: 67975 - RNA, 22 nt, Homo sapiens
uaaaugcucuuuaaaagugcuu

SEQ ID NO: 67976 - RNA, 19 nt, Homo sapiens
agacuggcccaggcgggug

SEQ ID NO: 67977 - RNA, 22 nt, Homo sapiens
cuguggauguauugcacagucu

SEQ ID NO: 67978 - RNA, 22 nt, Homo sapiens
ugucuuugguucaggcaaggag

SEQ ID NO: 67979 - RNA, 18 nt, Homo sapiens
uaauaacugugaccuuga

SEQ ID NO: 67980 - RNA, 20 nt, Homo sapiens
ugaguuccuuguucagaagc

SEQ ID NO: 67981 - RNA, 22 nt, Homo sapiens
uacagaauucugucccuugagu

SEQ ID NO: 67982 - RNA, 22 nt, Homo sapiens
ugagggaugcguacccuaugcc

SEQ ID NO: 67983 - RNA, 22 nt, Homo sapiens
ugcauaugcagcauuuaugauu

SEQ ID NO: 67984 - RNA, 22 nt, Homo sapiens
cuauuagguuggugcaaaagua

SEQ ID NO: 67985 - RNA, 22 nt, Homo sapiens
augauuguucucacucaagaga

SEQ ID NO: 67986 - RNA, 22 nt, Homo sapiens
auugagcaaggucuccuaguau

SEQ ID NO: 67987 - RNA, 22 nt, Homo sapiens
ugagaugaguugcuggcucuga

SEQ ID NO: 67988 - RNA, 22 nt, Homo sapiens
ugagaugaucaaaguauaggcu

SEQ ID NO: 67989 - RNA, 22 nt, Homo sapiens
uucaacagugauggccuuugua

SEQ ID NO: 67990 - RNA, 22 nt, Homo sapiens
uacuagaaccuuauucagagug

SEQ ID NO: 67991 - RNA, 22 nt, Homo sapiens
ugauaugucacuugaucauggu

SEQ ID NO: 67992 - RNA, 19 nt, Homo sapiens
ucccaagaugcucauacau

SEQ ID NO: 67993 - RNA, 22 nt, Homo sapiens
gcaaugcugucugugcacagau

SEQ ID NO: 67994 - RNA, 22 nt, Homo sapiens
augugcauaugaagcacagaca

SEQ ID NO: 67995 - RNA, 22 nt, Homo sapiens
augagggcggacgcccuggaga

SEQ ID NO: 67996 - RNA, 22 nt, Homo sapiens
gagaaugcaugaaagacuuaca

SEQ ID NO: 67997 - RNA, 22 nt, Homo sapiens
agcuucauucugaauagguuga

SEQ ID NO: 67998 - RNA, 22 nt, Homo sapiens
auggcagcaccccacucuacug

SEQ ID NO: 67999 - RNA, 22 nt, Homo sapiens
ugugccacugcacucuggccug

SEQ ID NO: 68000 - RNA, 22 nt, Homo sapiens
ugugguccucugaaggcuuuuc

SEQ ID NO: 68001 - RNA, 20 nt, Homo sapiens
uuuuagcacuuguuauggug

SEQ ID NO: 68002 - RNA, 22 nt, Homo sapiens
uugucacuauaaauaagcauuu

SEQ ID NO: 68003 - RNA, 22 nt, Homo sapiens
aguaccauuagauuaggaugac

SEQ ID NO: 68004 - RNA, 22 nt, Homo sapiens
agugucaggagacagguagcug

SEQ ID NO: 68005 - RNA, 22 nt, Homo sapiens
ugaaaugauuauaugguguuug

SEQ ID NO: 68006 - RNA, 22 nt, Homo sapiens
accauugcacuccagcccaggc

SEQ ID NO: 68007 - RNA, 22 nt, Homo sapiens
aucauccugucaggagcuguga

SEQ ID NO: 68008 - RNA, 17 nt, Homo sapiens
ucccauguuucuucuac

SEQ ID NO: 68009 - RNA, 22 nt, Homo sapiens
augaggcaggaaaggcguaucu

SEQ ID NO: 68010 - RNA, 22 nt, Homo sapiens
ucucaguguuaucuaucugccu

SEQ ID NO: 68011 - RNA, 22 nt, Homo sapiens
ccugugguuaaccagcuagaug

SEQ ID NO: 68012 - RNA, 22 nt, Homo sapiens
ccaguucaaugauauggaaacu

SEQ ID NO: 68013 - RNA, 22 nt, Homo sapiens
gcaguguggguagagggcaaga

SEQ ID NO: 68014 - RNA, 22 nt, Homo sapiens
uugagcucaucuucagggguga

SEQ ID NO: 68015 - RNA, 22 nt, Homo sapiens
uggugagaaaugagaugcuuuu

SEQ ID NO: 68016 - RNA, 22 nt, Homo sapiens
auacaguguauguauaguacau

SEQ ID NO: 68017 - RNA, 22 nt, Homo sapiens
cugugccaagcuugcgaugugc

SEQ ID NO: 68018 - RNA, 22 nt, Homo sapiens
uuaucauagugcaguuuucuga

SEQ ID NO: 68019 - RNA, 22 nt, Homo sapiens
ugugagaucucagaauugaacu

SEQ ID NO: 68020 - RNA, 22 nt, Homo sapiens
aaaugcagcacucaagugggaa

SEQ ID NO: 68021 - RNA, 22 nt, Homo sapiens
ugugcacaacgugcagguuugu

SEQ ID NO: 68022 - RNA, 22 nt, Homo sapiens
ugcacacucuguaugagaaucu

SEQ ID NO: 68023 - RNA, 22 nt, Homo sapiens
auauaugcuaagugcuaauaaa

SEQ ID NO: 68024 - RNA, 22 nt, Homo sapiens
uaugauuuuugggagaggucaa

SEQ ID NO: 68025 - RNA, 22 nt, Homo sapiens
ucugugguucuagcuacuuugg

SEQ ID NO: 68026 - RNA, 22 nt, Homo sapiens
aucaaguaaucugaguaagagu

SEQ ID NO: 68027 - RNA, 22 nt, Homo sapiens
uugccauggaguagaauugaag

SEQ ID NO: 68028 - RNA, 22 nt, Homo sapiens
gucaccagcuguguuagccccu

SEQ ID NO: 68029 - RNA, 22 nt, Homo sapiens
gcugugauucuguguagauagu

SEQ ID NO: 68030 - RNA, 22 nt, Homo sapiens
uagacccauuacguaguuucca

SEQ ID NO: 68031 - RNA, 22 nt, Homo sapiens
uauggcuacuacgaauaaugcu

SEQ ID NO: 68032 - RNA, 22 nt, Homo sapiens
aaaugggacugggguccuuuga

SEQ ID NO: 68033 - RNA, 22 nt, Homo sapiens
ucacagaugaggcgagaggcag

SEQ ID NO: 68034 - RNA, 22 nt, Homo sapiens
uucccagagccugggagugagg

SEQ ID NO: 68035 - RNA, 22 nt, Homo sapiens
uucccagagagggacuucuaau

SEQ ID NO: 68036 - RNA, 22 nt, Homo sapiens
uugagcccuggagguggaggcu

SEQ ID NO: 68037 - RNA, 22 nt, Homo sapiens
uaaguauuaugugcugcauuuu

SEQ ID NO: 68038 - RNA, 22 nt, Homo sapiens
cauugcacuccagucugggcaa

SEQ ID NO: 68039 - RNA, 22 nt, Homo sapiens
uggacuguaauagagaacagaa

SEQ ID NO: 68040 - RNA, 22 nt, Homo sapiens
ugaugaaguauaggaagggcuu

SEQ ID NO: 68041 - RNA, 22 nt, Homo sapiens
uauuccuuuugcauuuccacau

SEQ ID NO: 68042 - RNA, 22 nt, Homo sapiens
uugcauauguugaaccaagcgu

SEQ ID NO: 68043 - RNA, 22 nt, Homo sapiens
ugucaaugggaauuuguuuuag

SEQ ID NO: 68044 - RNA, 22 nt, Homo sapiens
uggcaaguuacuggcaaaaucu

SEQ ID NO: 68045 - RNA, 22 nt, Homo sapiens
ucuguguuuagacccaggguag

SEQ ID NO: 68046 - RNA, 22 nt, Homo sapiens
ugaauacuucaaaaaaauagcu

SEQ ID NO: 68047 - RNA, 22 nt, Homo sapiens
gaugacagcugacucccuugcu

SEQ ID NO: 68048 - RNA, 22 nt, Homo sapiens
uccugcauucauccugguguug

SEQ ID NO: 68049 - RNA, 21 nt, Homo sapiens
uuggggaauggagagguuuuc

SEQ ID NO: 68050 - RNA, 22 nt, Homo sapiens
uugccaacauggugaacuccca

SEQ ID NO: 68051 - RNA, 22 nt, Homo sapiens
uugcacauugcaccuuuuguau

SEQ ID NO: 68052 - RNA, 22 nt, Homo sapiens
gugaacagaaccugggaucgaa

SEQ ID NO: 68053 - RNA, 22 nt, Homo sapiens
cauugcacugcauucugggcaa

SEQ ID NO: 68054 - RNA, 22 nt, Homo sapiens
ucaagcaauucuccucucagcc

SEQ ID NO: 68055 - RNA, 22 nt, Homo sapiens
ugauuuguuucaggaguuuucu

SEQ ID NO: 68056 - RNA, 21 nt, Homo sapiens
auugcacaauauacccaugua

SEQ ID NO: 68057 - RNA, 22 nt, Homo sapiens
ugaaagguauagguucuggagg

SEQ ID NO: 68058 - RNA, 22 nt, Homo sapiens
acccuggaguaguaggaaucug

SEQ ID NO: 68059 - RNA, 22 nt, Homo sapiens
uucauggacucaauaguuucgc

SEQ ID NO: 68060 - RNA, 22 nt, Homo sapiens
ucuugcuuuugcagagcuucuc

SEQ ID NO: 68061 - RNA, 22 nt, Homo sapiens
uucugugcugaaucaaagacug

SEQ ID NO: 68062 - RNA, 22 nt, Homo sapiens
ugucaaagagacaucugcacuc

SEQ ID NO: 68063 - RNA, 22 nt, Homo sapiens
acucagagaacauucccagucu

SEQ ID NO: 68064 - RNA, 22 nt, Homo sapiens
ugacucaagagccugacucauc

SEQ ID NO: 68065 - RNA, 22 nt, Homo sapiens
aaagaguucagguagauuucaa

SEQ ID NO: 68066 - RNA, 22 nt, Homo sapiens
ucaacagugggcacuguaaaug

SEQ ID NO: 68067 - RNA, 22 nt, Homo sapiens
uuguccuggagguucuugcaag

SEQ ID NO: 68068 - RNA, 19 nt, Homo sapiens
ucccuuuguauggacauac

SEQ ID NO: 68069 - RNA, 22 nt, Homo sapiens
cuggagcaaaggugacucuugu

SEQ ID NO: 68070 - RNA, 22 nt, Homo sapiens
uucaccuugggucccacuugcu

SEQ ID NO: 68071 - RNA, 22 nt, Homo sapiens
gugauuuaguagaugcuaguua

SEQ ID NO: 68072 - RNA, 22 nt, Homo sapiens
ugagauaguuguagauguacau

SEQ ID NO: 68073 - RNA, 22 nt, Homo sapiens
auuaacaucuagaguuuuggug

SEQ ID NO: 68074 - RNA, 22 nt, Homo sapiens
gcauggagaaggggacugauuc

SEQ ID NO: 68075 - RNA, 22 nt, Homo sapiens
uaaggcuagcaagaugagaaua

SEQ ID NO: 68076 - RNA, 22 nt, Homo sapiens
agauauguuauugauguuaaug

SEQ ID NO: 68077 - RNA, 22 nt, Homo sapiens
ugaaagcuacagucuccuagga

SEQ ID NO: 68078 - RNA, 22 nt, Homo sapiens
guaugacacaggaagcuuaacc

SEQ ID NO: 68079 - RNA, 22 nt, Homo sapiens
aaaugcucuguggguaguaaug

SEQ ID NO: 68080 - RNA, 18 nt, Homo sapiens
guuagguaguaugaugcu

SEQ ID NO: 68081 - RNA, 22 nt, Homo sapiens
ucucagcacaaacaaaauugcu

SEQ ID NO: 68082 - RNA, 22 nt, Homo sapiens
uauacugucuuuguaugccuag

SEQ ID NO: 68083 - RNA, 22 nt, Homo sapiens
ggcaugguggugugugccuaua

SEQ ID NO: 68084 - RNA, 22 nt, Homo sapiens
auggcaauguaagucagaaaaa

SEQ ID NO: 68085 - RNA, 22 nt, Homo sapiens
auaugcauacauguaugcagga

SEQ ID NO: 68086 - RNA, 22 nt, Homo sapiens
ugugcuugaauuuaguagcuua

SEQ ID NO: 68087 - RNA, 22 nt, Homo sapiens
uuaagugaauuaucuaacaugu

SEQ ID NO: 68088 - RNA, 22 nt, Homo sapiens
auuguacucuagccucugggca

SEQ ID NO: 68089 - RNA, 22 nt, Homo sapiens
uaucaacaggguggccagugua

SEQ ID NO: 68090 - RNA, 22 nt, Homo sapiens
ccucauggagaaccucugcuag

SEQ ID NO: 68091 - RNA, 22 nt, Homo sapiens
ugcauagaauguucuguaaaua

SEQ ID NO: 68092 - RNA, 22 nt, Homo sapiens
uauuauuguccuucuauaccca

SEQ ID NO: 68093 - RNA, 19 nt, Homo sapiens
uugagaugugaacucacac

SEQ ID NO: 68094 - RNA, 22 nt, Homo sapiens
agacucauuuccauagucagcu

SEQ ID NO: 68095 - RNA, 20 nt, Homo sapiens
ucacugagugguccacagua

SEQ ID NO: 68096 - RNA, 22 nt, Homo sapiens
uggaccccuucuccuauuaaaa

SEQ ID NO: 68097 - RNA, 22 nt, Homo sapiens
uucccugaaauauucacuuuca

SEQ ID NO: 68098 - RNA, 20 nt, Homo sapiens
cagugcacuuucccacuggu

SEQ ID NO: 68099 - RNA, 20 nt, Homo sapiens
uuaguucauuuagaagguuu

SEQ ID NO: 68100 - RNA, 23 nt, Homo sapiens
gaguggagacucauugauuuccu

SEQ ID NO: 68101 - RNA, 22 nt, Homo sapiens
ugagaugauaucuuauuguaau

SEQ ID NO: 68102 - RNA, 22 nt, Homo sapiens
ggcaaguugcuauucuuuaaug

SEQ ID NO: 68103 - RNA, 22 nt, Homo sapiens
ugagaugauagauauguuaauu

SEQ ID NO: 68104 - RNA, 22 nt, Homo sapiens
gugagauccucucuuauauggg

SEQ ID NO: 68105 - RNA, 22 nt, Homo sapiens
ucuuuguucaggagccaacucc

SEQ ID NO: 68106 - RNA, 22 nt, Homo sapiens
ugagauaggaucuugcucuguu

SEQ ID NO: 68107 - RNA, 22 nt, Homo sapiens
ucuuugagugcccugagucccu

SEQ ID NO: 68108 - RNA, 22 nt, Homo sapiens
ugugauguggagggcagaucca

SEQ ID NO: 68109 - RNA, 22 nt, Homo sapiens
ucugacucuggagucucagguu

SEQ ID NO: 68110 - RNA, 22 nt, Homo sapiens
uagacugguuuagcacugaaua

SEQ ID NO: 68111 - RNA, 22 nt, Homo sapiens
uauacuguuuucuauaguggcu

SEQ ID NO: 68112 - RNA, 22 nt, Homo sapiens
uguggcucuucuguucuccacu

SEQ ID NO: 68113 - RNA, 22 nt, Homo sapiens
ugcugcacuuauggcucugagg

SEQ ID NO: 68114 - RNA, 22 nt, Homo sapiens
auggcccuguguggagcugcug

SEQ ID NO: 68115 - RNA, 22 nt, Homo sapiens
ugcaaagucgaaacugcaguuu

SEQ ID NO: 68116 - RNA, 22 nt, Homo sapiens
aagugguguuugggagcuggac

SEQ ID NO: 68117 - RNA, 22 nt, Homo sapiens
ucuaauguaaccugcaaauauu

SEQ ID NO: 68118 - RNA, 22 nt, Homo sapiens
aaagugcaguauuugggcagga

SEQ ID NO: 68119 - RNA, 22 nt, Homo sapiens
uucccugaguaucuuaccaugg

SEQ ID NO: 68120 - RNA, 22 nt, Homo sapiens
ucccuacugggguacugccuag

SEQ ID NO: 68121 - RNA, 22 nt, Homo sapiens
ggugaucauugucucuaguaug

SEQ ID NO: 68122 - RNA, 22 nt, Homo sapiens
gcuggugaaggcugaaaagugg

SEQ ID NO: 68123 - RNA, 22 nt, Homo sapiens
guaacagucucaacaguggucu

SEQ ID NO: 68124 - RNA, 22 nt, Homo sapiens
ugcugcacaguucuuaagauua

SEQ ID NO: 68125 - RNA, 22 nt, Homo sapiens
gaugugaaaucauaguuucuag

SEQ ID NO: 68126 - RNA, 22 nt, Homo sapiens
gacauguuucucucuguuuacu

SEQ ID NO: 68127 - RNA, 20 nt, Homo sapiens
gugagguagaggguuaccug

SEQ ID NO: 68128 - RNA, 22 nt, Homo sapiens
cauugcaugcauauggcuuggu

SEQ ID NO: 68129 - RNA, 22 nt, Homo sapiens
uuuggcuuaagauugacugcaa

SEQ ID NO: 68130 - RNA, 22 nt, Homo sapiens
uuuguacuccuuggccagcuuc

SEQ ID NO: 68131 - RNA, 22 nt, Homo sapiens
gcugaguaguauuucauuguau

SEQ ID NO: 68132 - RNA, 21 nt, Homo sapiens
aacuggugugagaugguaugu

SEQ ID NO: 68133 - RNA, 22 nt, Homo sapiens
augaaaucacugugaugcccua

SEQ ID NO: 68134 - RNA, 22 nt, Homo sapiens
uuucacuagccagcccuuuauu

SEQ ID NO: 68135 - RNA, 22 nt, Homo sapiens
agcuguaguuugguggauguaa

SEQ ID NO: 68136 - RNA, 22 nt, Homo sapiens
ccauggcuauucuguaaggguu

SEQ ID NO: 68137 - RNA, 22 nt, Homo sapiens
aagagcauuauuuaguaauuuc

SEQ ID NO: 68138 - RNA, 22 nt, Homo sapiens
ucugucacugaaucccugucac

SEQ ID NO: 68139 - RNA, 22 nt, Homo sapiens
cagcaaaucauccuauuugagc

SEQ ID NO: 68140 - RNA, 22 nt, Homo sapiens
gugagacugguccugaacccag

SEQ ID NO: 68141 - RNA, 22 nt, Homo sapiens
acccugacacgauucuucacuu

SEQ ID NO: 68142 - RNA, 22 nt, Homo sapiens
augacuggaacagcaauuuaca

SEQ ID NO: 68143 - RNA, 22 nt, Homo sapiens
guaagugguagagcugggcuau

SEQ ID NO: 68144 - RNA, 22 nt, Homo sapiens
uguacaugggacaggaggagag

SEQ ID NO: 68145 - RNA, 22 nt, Homo sapiens
uaaggcaaguuuuuaguggaca

SEQ ID NO: 68146 - RNA, 22 nt, Homo sapiens
auuuagcaauggagguagugua

SEQ ID NO: 68147 - RNA, 22 nt, Homo sapiens
uucuuugcaugaucucaaaguc

SEQ ID NO: 68148 - RNA, 22 nt, Homo sapiens
uuguguccccacucaaauuaca

SEQ ID NO: 68149 - RNA, 22 nt, Homo sapiens
ugcauauuuuauaaagauggaa

SEQ ID NO: 68150 - RNA, 22 nt, Homo sapiens
aggagaucagccucccugcaac

SEQ ID NO: 68151 - RNA, 22 nt, Homo sapiens
acagaucagagauauuuagguu

SEQ ID NO: 68152 - RNA, 22 nt, Homo sapiens
augugcacaacgugcagguuug

SEQ ID NO: 68153 - RNA, 22 nt, Homo sapiens
caugucuuuuauucugugugau

SEQ ID NO: 68154 - RNA, 18 nt, Homo sapiens
uuuguacuuuuucuaaug

SEQ ID NO: 68155 - RNA, 19 nt, Homo sapiens
ucugucacuggggguauuc

SEQ ID NO: 68156 - RNA, 22 nt, Homo sapiens
ucccuuuguccaacggauccac

SEQ ID NO: 68157 - RNA, 22 nt, Homo sapiens
ugaaaugguuaugugaggagau

SEQ ID NO: 68158 - RNA, 22 nt, Homo sapiens
gcauugcacuuggcauagacug

SEQ ID NO: 68159 - RNA, 22 nt, Homo sapiens
gugcacaaaucuuaaauguaca

SEQ ID NO: 68160 - RNA, 22 nt, Homo sapiens
ucuuaguuuagauuagcaauuc

SEQ ID NO: 68161 - RNA, 22 nt, Homo sapiens
aggcaagagugacuacgugaaa

SEQ ID NO: 68162 - RNA, 22 nt, Homo sapiens
ucaaagacacacaaggagaagg

SEQ ID NO: 68163 - RNA, 22 nt, Homo sapiens
guggaauuauagagacaucuug

SEQ ID NO: 68164 - RNA, 22 nt, Homo sapiens
gugcauacucuggagacauugu

SEQ ID NO: 68165 - RNA, 22 nt, Homo sapiens
acacugcugaguaaauaauuuu

SEQ ID NO: 68166 - RNA, 22 nt, Homo sapiens
gugaccaaagauagcucaaguu

SEQ ID NO: 68167 - RNA, 23 nt, Homo sapiens
aagugagcuccaauugggugaga

SEQ ID NO: 68168 - RNA, 22 nt, Homo sapiens
ugucacugugaguuugacugcu

SEQ ID NO: 68169 - RNA, 22 nt, Homo sapiens
uuaaaugcacauacuugagaaa

SEQ ID NO: 68170 - RNA, 22 nt, Homo sapiens
ucccugagcaaaguuuucugua

SEQ ID NO: 68171 - RNA, 22 nt, Homo sapiens
uaugaauuuuauccaggauaua

SEQ ID NO: 68172 - RNA, 19 nt, Homo sapiens
augauugucuauggaggaa

SEQ ID NO: 68173 - RNA, 23 nt, Homo sapiens
uugaggcauguaccaucaauauc

SEQ ID NO: 68174 - RNA, 22 nt, Homo sapiens
caugaugcuagguauggaugaa

SEQ ID NO: 68175 - RNA, 22 nt, Homo sapiens
uggcaaaauauuuugguuucug

SEQ ID NO: 68176 - RNA, 22 nt, Homo sapiens
uguuauuuuguguuagggcaca

SEQ ID NO: 68177 - RNA, 22 nt, Homo sapiens
cccagugguuacauaaggagua

SEQ ID NO: 68178 - RNA, 22 nt, Homo sapiens
uguccugaagcuuuguuaugua

SEQ ID NO: 68179 - RNA, 19 nt, Homo sapiens
ucaugugcauacauuuggg

SEQ ID NO: 68180 - RNA, 22 nt, Homo sapiens
auguaugagaguuccagcugau

SEQ ID NO: 68181 - RNA, 22 nt, Homo sapiens
cuauuagguuggugcaaaaguc

SEQ ID NO: 68182 - RNA, 22 nt, Homo sapiens
auggcagcccucuuuauccaug

SEQ ID NO: 68183 - RNA, 22 nt, Homo sapiens
agcugcaaagggagagaugauu

SEQ ID NO: 68184 - RNA, 22 nt, Homo sapiens
uucaguggguggaugaauauga

SEQ ID NO: 68185 - RNA, 22 nt, Homo sapiens
ugauauguaacuacuccuuaua

SEQ ID NO: 68186 - RNA, 22 nt, Homo sapiens
guuauuguccauuuauuuagca

SEQ ID NO: 68187 - RNA, 22 nt, Homo sapiens
gugagucagucuguguagggcu

SEQ ID NO: 68188 - RNA, 22 nt, Homo sapiens
cucucuguuugucuguuauugg

SEQ ID NO: 68189 - RNA, 22 nt, Homo sapiens
ucagaugaucugguaagaacuu

SEQ ID NO: 68190 - RNA, 22 nt, Homo sapiens
uugauaguuuuaaaauuaaucu

SEQ ID NO: 68191 - RNA, 22 nt, Homo sapiens
acaguguuacuugauaguguau

SEQ ID NO: 68192 - RNA, 22 nt, Homo sapiens
acauggcacugcgggcuucuug

SEQ ID NO: 68193 - RNA, 22 nt, Homo sapiens
ggaaagacuauuguaaaggaug

SEQ ID NO: 68194 - RNA, 22 nt, Homo sapiens
ugugcacauugugcagguugau

SEQ ID NO: 68195 - RNA, 22 nt, Homo sapiens
uauuccacaauaugauuuuuaa

SEQ ID NO: 68196 - RNA, 22 nt, Homo sapiens
uugugcacauguacccuagaac

SEQ ID NO: 68197 - RNA, 22 nt, Homo sapiens
ugagucagucucacucugcugc

SEQ ID NO: 68198 - RNA, 22 nt, Homo sapiens
uuggccccucccaaauuucaug

SEQ ID NO: 68199 - RNA, 22 nt, Homo sapiens
gagacugagucuugcucugucg

SEQ ID NO: 68200 - RNA, 22 nt, Homo sapiens
ugugcacaaugugcagguuugu

SEQ ID NO: 68201 - RNA, 21 nt, Homo sapiens
ugcucaugaguaaugcaguga

SEQ ID NO: 68202 - RNA, 22 nt, Homo sapiens
uucuugcugaauugugcccuuc

SEQ ID NO: 68203 - RNA, 22 nt, Homo sapiens
uuucauagccuuugucgucuga

SEQ ID NO: 68204 - RNA, 22 nt, Homo sapiens
cuccaguuucagaaucccaugu

SEQ ID NO: 68205 - RNA, 22 nt, Homo sapiens
aaugcuguguuauuucaugacc

SEQ ID NO: 68206 - RNA, 22 nt, Homo sapiens
gugcaaguguaauacagcuagg

SEQ ID NO: 68207 - RNA, 22 nt, Homo sapiens
uuacuggcuuucacugguguua

SEQ ID NO: 68208 - RNA, 22 nt, Homo sapiens
caacacuguuuauuggauagcc

SEQ ID NO: 68209 - RNA, 22 nt, Homo sapiens
gugcacaacaugcagguuuguu

SEQ ID NO: 68210 - RNA, 22 nt, Homo sapiens
ucccugagugauugaaaauaaa

SEQ ID NO: 68211 - RNA, 23 nt, Homo sapiens
uagcuucucccagaccugcuccc

SEQ ID NO: 68212 - RNA, 22 nt, Homo sapiens
gcaaaauugagaagggaauaua

SEQ ID NO: 68213 - RNA, 22 nt, Homo sapiens
gcaaaguguuuuuaggaagucu

SEQ ID NO: 68214 - RNA, 22 nt, Homo sapiens
aggucccauguccucccugacc

SEQ ID NO: 68215 - RNA, 22 nt, Homo sapiens
gugcacaugguagguauugagu

SEQ ID NO: 68216 - RNA, 22 nt, Homo sapiens
uaggcagccagcuguggauuga

SEQ ID NO: 68217 - RNA, 22 nt, Homo sapiens
uauugccugucuccaaaaauca

SEQ ID NO: 68218 - RNA, 22 nt, Homo sapiens
uuugcacucaguaagugggagc

SEQ ID NO: 68219 - RNA, 22 nt, Homo sapiens
uagaaugucagcuucuugaggg

SEQ ID NO: 68220 - RNA, 22 nt, Homo sapiens
uggcaagagcugcauucaucug

SEQ ID NO: 68221 - RNA, 22 nt, Homo sapiens
cuggagcauugguggauuuguu

SEQ ID NO: 68222 - RNA, 22 nt, Homo sapiens
aggcaagugggagacagcauuu

SEQ ID NO: 68223 - RNA, 22 nt, Homo sapiens
uguucaugaguucucauuuuua

SEQ ID NO: 68224 - RNA, 22 nt, Homo sapiens
ugaaaucauguaguuauugcaa

SEQ ID NO: 68225 - RNA, 19 nt, Homo sapiens
uuggucccuuuggguucuu

SEQ ID NO: 68226 - RNA, 22 nt, Homo sapiens
ugcaaauguuauuuugguuucu

SEQ ID NO: 68227 - RNA, 22 nt, Homo sapiens
uguauaggcaaauuuccucaug

SEQ ID NO: 68228 - RNA, 22 nt, Homo sapiens
uuuuccagugggacucccauua

SEQ ID NO: 68229 - RNA, 22 nt, Homo sapiens
uugagauguauguauauaaugu

SEQ ID NO: 68230 - RNA, 22 nt, Homo sapiens
uggucuuuucaacaaaugguau

SEQ ID NO: 68231 - RNA, 22 nt, Homo sapiens
gagggcacugcuuuccuuucaa

SEQ ID NO: 68232 - RNA, 22 nt, Homo sapiens
cugaggacaucagggaagcauc

SEQ ID NO: 68233 - RNA, 22 nt, Homo sapiens
aaggcuguuguguaauaggauu

SEQ ID NO: 68234 - RNA, 22 nt, Homo sapiens
uccagcuuuuucuaauucugug

SEQ ID NO: 68235 - RNA, 22 nt, Homo sapiens
uagcaguagacagacuuuggcu

SEQ ID NO: 68236 - RNA, 20 nt, Homo sapiens
uugcacagagaaggaggcag

SEQ ID NO: 68237 - RNA, 22 nt, Homo sapiens
uucagggagaaggcaaacguug

SEQ ID NO: 68238 - RNA, 22 nt, Homo sapiens
cauggccuuuggaaugugucua

SEQ ID NO: 68239 - RNA, 22 nt, Homo sapiens
cuuugauuauaaaaggguguuu

SEQ ID NO: 68240 - RNA, 22 nt, Homo sapiens
gucaguggauacugucucuguc

SEQ ID NO: 68241 - RNA, 20 nt, Homo sapiens
uaaaugccucaugcuuuauu

SEQ ID NO: 68242 - RNA, 22 nt, Homo sapiens
aggcaaguugcucaaaugcaaa

SEQ ID NO: 68243 - RNA, 20 nt, Homo sapiens
agaugcaugcacauaaacac

SEQ ID NO: 68244 - RNA, 17 nt, Homo sapiens
ucucccaucccuuucuc

SEQ ID NO: 68245 - RNA, 22 nt, Homo sapiens
ugagagcugcauucuugaaagc

SEQ ID NO: 68246 - RNA, 22 nt, Homo sapiens
ugagaagugauauagaaguuaa

SEQ ID NO: 68247 - RNA, 22 nt, Homo sapiens
uaaugguuuugcaccaucccuc

SEQ ID NO: 68248 - RNA, 22 nt, Homo sapiens
aagcagauguguugaaaguacu

SEQ ID NO: 68249 - RNA, 22 nt, Homo sapiens
gagacauugacuuuguuccaga

SEQ ID NO: 68250 - RNA, 22 nt, Homo sapiens
auauaguguuuuuugguacgcu

SEQ ID NO: 68251 - RNA, 22 nt, Homo sapiens
caggcaaggugaaguguacugg

SEQ ID NO: 68252 - RNA, 22 nt, Homo sapiens
uugugucccuacccaaaucuca

SEQ ID NO: 68253 - RNA, 22 nt, Homo sapiens
uugcuuaggcuggagugcagug

SEQ ID NO: 68254 - RNA, 22 nt, Homo sapiens
ugaaauacuuuggcucuuuguu

SEQ ID NO: 68255 - RNA, 22 nt, Homo sapiens
gagguaaguggauuaugagguc

SEQ ID NO: 68256 - RNA, 22 nt, Homo sapiens
ucgcauuucccucuguagcuuc

SEQ ID NO: 68257 - RNA, 21 nt, Homo sapiens
gaccacagcagggaaugucag

SEQ ID NO: 68258 - RNA, 20 nt, Homo sapiens
ugcauguccucacuuacuug

SEQ ID NO: 68259 - RNA, 22 nt, Homo sapiens
acugugcuguuuuaauuauuga

SEQ ID NO: 68260 - RNA, 22 nt, Homo sapiens
acccaguguucaacauucacau

SEQ ID NO: 68261 - RNA, 22 nt, Homo sapiens
uccuucacucuacaucuuuguu

SEQ ID NO: 68262 - RNA, 22 nt, Homo sapiens
cccagugugcugggugacagcu

SEQ ID NO: 68263 - RNA, 22 nt, Homo sapiens
uugaaguauagaguuuaagaac

SEQ ID NO: 68264 - RNA, 20 nt, Homo sapiens
cucacagacagcuucuuucu

SEQ ID NO: 68265 - RNA, 23 nt, Homo sapiens
cccucagaagugcagggagagaa

SEQ ID NO: 68266 - RNA, 22 nt, Homo sapiens
cacagugaacaauauccucugu

SEQ ID NO: 68267 - RNA, 22 nt, Homo sapiens
aaagugcaguacuucguauauu

SEQ ID NO: 68268 - RNA, 22 nt, Homo sapiens
ugaugguuuuaaaaagaggagu

SEQ ID NO: 68269 - RNA, 19 nt, Homo sapiens
ugagauccacugaagauuc

SEQ ID NO: 68270 - RNA, 22 nt, Homo sapiens
uggagucuugaugauuuucaaa

SEQ ID NO: 68271 - RNA, 22 nt, Homo sapiens
ucucuguuuauuuuugguguau

SEQ ID NO: 68272 - RNA, 21 nt, Homo sapiens
ugcaugguagucacaugauuc

SEQ ID NO: 68273 - RNA, 22 nt, Homo sapiens
ugcagagucuguccugccugcc

SEQ ID NO: 68274 - RNA, 22 nt, Homo sapiens
ucagaucaguuccacaagaacu

SEQ ID NO: 68275 - RNA, 22 nt, Homo sapiens
ugaguagaacuccuggagaugu

SEQ ID NO: 68276 - RNA, 22 nt, Homo sapiens
cuacagguaugaaagggaguau

SEQ ID NO: 68277 - RNA, 22 nt, Homo sapiens
guccaguuguuuucugagguug

SEQ ID NO: 68278 - RNA, 22 nt, Homo sapiens
aucaccauguguacauuagacc

SEQ ID NO: 68279 - RNA, 22 nt, Homo sapiens
uugaaauguuuagaaguuugga

SEQ ID NO: 68280 - RNA, 21 nt, Homo sapiens
gagaaucaucauggcugcaua

SEQ ID NO: 68281 - RNA, 22 nt, Homo sapiens
uuagcacaguucauucauguua

SEQ ID NO: 68282 - RNA, 22 nt, Homo sapiens
ugaauauguuaauuagcaucau

SEQ ID NO: 68283 - RNA, 22 nt, Homo sapiens
ugagucuguucucacauugcua

SEQ ID NO: 68284 - RNA, 21 nt, Homo sapiens
aucagagacccaggcuuccuc

SEQ ID NO: 68285 - RNA, 17 nt, Homo sapiens
ucaaaugcucccaguga

SEQ ID NO: 68286 - RNA, 22 nt, Homo sapiens
ccuucauccuccagcaggcuag

SEQ ID NO: 68287 - RNA, 22 nt, Homo sapiens
ugcauuaucagauguuugcuuu

SEQ ID NO: 68288 - RNA, 22 nt, Homo sapiens
uuacaguagaugaggguauaau

SEQ ID NO: 68289 - RNA, 22 nt, Homo sapiens
auugcacaucugcacuacagcc

SEQ ID NO: 68290 - RNA, 22 nt, Homo sapiens
uuuaacauuggaugagaucguc

SEQ ID NO: 68291 - RNA, 22 nt, Homo sapiens
acaguggaauguaggguuugag

SEQ ID NO: 68292 - RNA, 22 nt, Homo sapiens
guugcacagucuuuccuggacu

SEQ ID NO: 68293 - RNA, 22 nt, Homo sapiens
aucgcgccauuguacuccagcc

SEQ ID NO: 68294 - RNA, 21 nt, Homo sapiens
ugagaugauccugcaugcaug

SEQ ID NO: 68295 - RNA, 19 nt, Homo sapiens
cuguggucauuauuuugcu

SEQ ID NO: 68296 - RNA, 22 nt, Homo sapiens
cacagucugggcuuguuuguac

SEQ ID NO: 68297 - RNA, 22 nt, Homo sapiens
agcuaaaucucauguugaauug

SEQ ID NO: 68298 - RNA, 22 nt, Homo sapiens
ucagaucacuggcgcuggcgga

SEQ ID NO: 68299 - RNA, 22 nt, Homo sapiens
uguguuugauaaguccauaguu

SEQ ID NO: 68300 - RNA, 22 nt, Homo sapiens
uuuccaagaugcuuacuuucuc

SEQ ID NO: 68301 - RNA, 22 nt, Homo sapiens
ugccaguauuuuauugaagauu

SEQ ID NO: 68302 - RNA, 22 nt, Homo sapiens
gagacugagucucacucuguca

SEQ ID NO: 68303 - RNA, 22 nt, Homo sapiens
gugagguaauuagcucccuuag

SEQ ID NO: 68304 - RNA, 19 nt, Homo sapiens
ucacacuguggcuucuuua

SEQ ID NO: 68305 - RNA, 22 nt, Homo sapiens
guuaagaaguguaacuuaaguu

SEQ ID NO: 68306 - RNA, 22 nt, Homo sapiens
agcaagacauggcuuccaaaug

SEQ ID NO: 68307 - RNA, 22 nt, Homo sapiens
gaaaacugcuucucuggguuuc

SEQ ID NO: 68308 - RNA, 22 nt, Homo sapiens
augaaagugauaaaugucucua

SEQ ID NO: 68309 - RNA, 22 nt, Homo sapiens
gacuugaagaaucuaagggagg

SEQ ID NO: 68310 - RNA, 21 nt, Homo sapiens
gcaaaggaauugccuaagcuu

SEQ ID NO: 68311 - RNA, 22 nt, Homo sapiens
guggaggacuggauaaagaaaa

SEQ ID NO: 68312 - RNA, 22 nt, Homo sapiens
uagcagguggugaccacauuuu

SEQ ID NO: 68313 - RNA, 22 nt, Homo sapiens
ucaccuggagccuucacauucu

SEQ ID NO: 68314 - RNA, 22 nt, Homo sapiens
aaugacacugagcaucuuucau

SEQ ID NO: 68315 - RNA, 20 nt, Homo sapiens
gucugucuccgaguagaauu

SEQ ID NO: 68316 - RNA, 22 nt, Homo sapiens
uacaaagcuacucgagggcagg

SEQ ID NO: 68317 - RNA, 22 nt, Homo sapiens
uucaaggacuaaggauuuuugg

SEQ ID NO: 68318 - RNA, 22 nt, Homo sapiens
aaagcuagagaagcugcuguca

SEQ ID NO: 68319 - RNA, 22 nt, Homo sapiens
uggaucuguucuauuuaucuga

SEQ ID NO: 68320 - RNA, 18 nt, Homo sapiens
aaagugaugucauucuuu

SEQ ID NO: 68321 - RNA, 22 nt, Homo sapiens
uucucaaggagccuucguaacu

SEQ ID NO: 68322 - RNA, 22 nt, Homo sapiens
uaagguguagacuggucacaag

SEQ ID NO: 68323 - RNA, 22 nt, Homo sapiens
aaagucuagaggaucaugugug

SEQ ID NO: 68324 - RNA, 22 nt, Homo sapiens
ugccaguauuuuauugaggauu

SEQ ID NO: 68325 - RNA, 18 nt, Homo sapiens
ucccucagaauuauagaa

SEQ ID NO: 68326 - RNA, 22 nt, Homo sapiens
uauuacauccauaggcucugcu

SEQ ID NO: 68327 - RNA, 22 nt, Homo sapiens
caaaggcuguuauaggccagga

SEQ ID NO: 68328 - RNA, 22 nt, Homo sapiens
cugagaaugaugauuuccaguu

SEQ ID NO: 68329 - RNA, 22 nt, Homo sapiens
ugauggcaauggcauucauuuu

SEQ ID NO: 68330 - RNA, 21 nt, Homo sapiens
uuugaucauuaaaagugaauc

SEQ ID NO: 68331 - RNA, 22 nt, Homo sapiens
ucucugguuaugucauuaagca

SEQ ID NO: 68332 - RNA, 19 nt, Homo sapiens
ugcagcaauguaaaagaca

SEQ ID NO: 68333 - RNA, 22 nt, Homo sapiens
cacagcuaacaacuguuucuuc

SEQ ID NO: 68334 - RNA, 22 nt, Homo sapiens
ucacaugaagauuuuaguauac

SEQ ID NO: 68335 - RNA, 22 nt, Homo sapiens
gaggugguagguucacagcagc

SEQ ID NO: 68336 - RNA, 22 nt, Homo sapiens
uucaaguaguucucaugccuca

SEQ ID NO: 68337 - RNA, 22 nt, Homo sapiens
agauguuguucaucugauuguu

SEQ ID NO: 68338 - RNA, 18 nt, Homo sapiens
ugaguucauuagacuucc

SEQ ID NO: 68339 - RNA, 22 nt, Homo sapiens
uucccucagaaacacacagccc

SEQ ID NO: 68340 - RNA, 22 nt, Homo sapiens
uugcuauguugcccagucugga

SEQ ID NO: 68341 - RNA, 16 nt, Homo sapiens
aggcaagaauugaggu

SEQ ID NO: 68342 - RNA, 22 nt, Homo sapiens
acaaaguauggaauguuggugu

SEQ ID NO: 68343 - RNA, 22 nt, Homo sapiens
uuucaccguguuggccaggcug

SEQ ID NO: 68344 - RNA, 21 nt, Homo sapiens
uaaaugucauacaaagcaaug

SEQ ID NO: 68345 - RNA, 22 nt, Homo sapiens
augcccauuuguuuucugaaag

SEQ ID NO: 68346 - RNA, 23 nt, Homo sapiens
uuggucucccaaaguguugagau

SEQ ID NO: 68347 - RNA, 22 nt, Homo sapiens
agcuccaucuucagggguucag

SEQ ID NO: 68348 - RNA, 20 nt, Homo sapiens
cauugcacuccagcuugggc

SEQ ID NO: 68349 - RNA, 22 nt, Homo sapiens
cugagaauguaaaugaagcuuu

SEQ ID NO: 68350 - RNA, 22 nt, Homo sapiens
ucagugcuguuugcccucguuu

SEQ ID NO: 68351 - RNA, 22 nt, Homo sapiens
uugcacagugguuuagagccug

SEQ ID NO: 68352 - RNA, 22 nt, Homo sapiens
uaaaugcuugagaugauggaua

SEQ ID NO: 68353 - RNA, 22 nt, Homo sapiens
ugugaacauuuuguauauauua

SEQ ID NO: 68354 - RNA, 22 nt, Homo sapiens
uaaagcacaaguaaagaauacu

SEQ ID NO: 68355 - RNA, 23 nt, Homo sapiens
agccugguuucccugcuucuccc

SEQ ID NO: 68356 - RNA, 22 nt, Homo sapiens
uuaugucuuugagcaaugcugu

SEQ ID NO: 68357 - RNA, 22 nt, Homo sapiens
augagauuguuugugugaaaua

SEQ ID NO: 68358 - RNA, 22 nt, Homo sapiens
gugccacaguguuaagggauuc

SEQ ID NO: 68359 - RNA, 22 nt, Homo sapiens
cucaccuugugauccuccugcc

SEQ ID NO: 68360 - RNA, 22 nt, Homo sapiens
uauagcuaugggauguauuugc

SEQ ID NO: 68361 - RNA, 22 nt, Homo sapiens
cagugcaugacuguauauuauc

SEQ ID NO: 68362 - RNA, 22 nt, Homo sapiens
ugucuagaucugaauguaauug

SEQ ID NO: 68363 - RNA, 22 nt, Homo sapiens
cuugaccuauggaucuguuuuu

SEQ ID NO: 68364 - RNA, 18 nt, Homo sapiens
uaucucauuucuuagguc

SEQ ID NO: 68365 - RNA, 18 nt, Homo sapiens
gucauagaaugaugguuc

SEQ ID NO: 68366 - RNA, 22 nt, Homo sapiens
auuguaauuuuagagaaagugg

SEQ ID NO: 68367 - RNA, 22 nt, Homo sapiens
auggaggaggaagcugaaacaa

SEQ ID NO: 68368 - RNA, 21 nt, Homo sapiens
ugcauggagaacacugagggu

SEQ ID NO: 68369 - RNA, 22 nt, Homo sapiens
uugagauggugccacuguacuc

SEQ ID NO: 68370 - RNA, 22 nt, Homo sapiens
aaguacuguuuaaauugcagaa

SEQ ID NO: 68371 - RNA, 22 nt, Homo sapiens
acccucagaccaguuucccugg

SEQ ID NO: 68372 - RNA, 18 nt, Homo sapiens
ugcaauggagaugcagcc

SEQ ID NO: 68373 - RNA, 22 nt, Homo sapiens
augugugcuugauguaaaaagu

SEQ ID NO: 68374 - RNA, 22 nt, Homo sapiens
gucagcaaagaggaauaguuug

SEQ ID NO: 68375 - RNA, 22 nt, Homo sapiens
uuggacugagaguuccaccauu

SEQ ID NO: 68376 - RNA, 22 nt, Homo sapiens
aaauugcaguuaggaugauggu

SEQ ID NO: 68377 - RNA, 22 nt, Homo sapiens
ugcaaucaucgcuguuggccac

SEQ ID NO: 68378 - RNA, 21 nt, Homo sapiens
augacccuggguguccuuucc

SEQ ID NO: 68379 - RNA, 23 nt, Homo sapiens
uggcauuuuaguuagcuucagug

SEQ ID NO: 68380 - RNA, 22 nt, Homo sapiens
ggcagcacaauuuucugaugga

SEQ ID NO: 68381 - RNA, 22 nt, Homo sapiens
agaaugugaacaucuugaaagu

SEQ ID NO: 68382 - RNA, 22 nt, Homo sapiens
ugagaaccucugugugcccacu

SEQ ID NO: 68383 - RNA, 23 nt, Homo sapiens
gaaaugucuuagugaaauugcuu

SEQ ID NO: 68384 - RNA, 21 nt, Homo sapiens
agcuuguguguaucacagugu

SEQ ID NO: 68385 - RNA, 22 nt, Homo sapiens
guagaagcacaggugaguuggu

SEQ ID NO: 68386 - RNA, 22 nt, Homo sapiens
cugaaauggaaugugugcacag

SEQ ID NO: 68387 - RNA, 22 nt, Homo sapiens
ucagaucauuaagguagguuua

SEQ ID NO: 68388 - RNA, 22 nt, Homo sapiens
cucugguucugcagugcacccu

SEQ ID NO: 68389 - RNA, 22 nt, Homo sapiens
cauugcacuccagccugcugac

SEQ ID NO: 68390 - RNA, 22 nt, Homo sapiens
cuugccuuugucuucaaaggcu

SEQ ID NO: 68391 - RNA, 22 nt, Homo sapiens
gaguucauuuugaaaccuugau

SEQ ID NO: 68392 - RNA, 22 nt, Homo sapiens
auaucacaaacaagucuguacu

SEQ ID NO: 68393 - RNA, 22 nt, Homo sapiens
ugagaucacgccacugcacucc

SEQ ID NO: 68394 - RNA, 22 nt, Homo sapiens
cacagagugagacccugucucu

SEQ ID NO: 68395 - RNA, 22 nt, Homo sapiens
uaugucuucuuuagagaaaugu

SEQ ID NO: 68396 - RNA, 22 nt, Homo sapiens
caaauugcuugucuguagugga

SEQ ID NO: 68397 - RNA, 22 nt, Homo sapiens
agaugauguuuacugagcauca

SEQ ID NO: 68398 - RNA, 19 nt, Homo sapiens
ucacgugcagcagccacac

SEQ ID NO: 68399 - RNA, 22 nt, Homo sapiens
guggaaaacauaugcuuguuga

SEQ ID NO: 68400 - RNA, 22 nt, Homo sapiens
uuguacuagucauauuuugaaa

SEQ ID NO: 68401 - RNA, 22 nt, Homo sapiens
uugggcaaguggcaugaccaug

SEQ ID NO: 68402 - RNA, 22 nt, Homo sapiens
uuguacuauuuuuaucagugau

SEQ ID NO: 68403 - RNA, 22 nt, Homo sapiens
gugcacaaucgugcauuccuug

SEQ ID NO: 68404 - RNA, 22 nt, Homo sapiens
ugacugugcagcuccaucaggg

SEQ ID NO: 68405 - RNA, 18 nt, Homo sapiens
ugacaucauuuagaaagg

SEQ ID NO: 68406 - RNA, 22 nt, Homo sapiens
agaguacugacguuugcaaauu

SEQ ID NO: 68407 - RNA, 22 nt, Homo sapiens
uagcuccacagcuauauauaau

SEQ ID NO: 68408 - RNA, 22 nt, Homo sapiens
ugagauuaucguaauguaucuc

SEQ ID NO: 68409 - RNA, 22 nt, Homo sapiens
cuaggcacugauaguuguauuu

SEQ ID NO: 68410 - RNA, 22 nt, Homo sapiens
ucacaagugagaggaauuagau

SEQ ID NO: 68411 - RNA, 22 nt, Homo sapiens
uucagauugcauaccgaaagua

SEQ ID NO: 68412 - RNA, 22 nt, Homo sapiens
ucucugacacugaccccaaaaa

SEQ ID NO: 68413 - RNA, 22 nt, Homo sapiens
gacuggccuauaauggcgaauu

SEQ ID NO: 68414 - RNA, 22 nt, Homo sapiens
ugacuugaucacccccuaaggg

SEQ ID NO: 68415 - RNA, 20 nt, Homo sapiens
gggaugugagguacacucuu

SEQ ID NO: 68416 - RNA, 23 nt, Homo sapiens
gucuggucccugguuggaaacca

SEQ ID NO: 68417 - RNA, 22 nt, Homo sapiens
uugcacagugcuuucuuugccc

SEQ ID NO: 68418 - RNA, 22 nt, Homo sapiens
agcugcaauguuuaguauaaua

SEQ ID NO: 68419 - RNA, 22 nt, Homo sapiens
uacaaagcuuugaugugucuuu

SEQ ID NO: 68420 - RNA, 22 nt, Homo sapiens
gcugcuuuugaugacaaaaaca

SEQ ID NO: 68421 - RNA, 22 nt, Homo sapiens
caaauugcuuguggaggauaau

SEQ ID NO: 68422 - RNA, 22 nt, Homo sapiens
ucacugaaaccacugccuccug

SEQ ID NO: 68423 - RNA, 22 nt, Homo sapiens
cugugcauggauuuuaagauug

SEQ ID NO: 68424 - RNA, 22 nt, Homo sapiens
augauagucuugagaagcauuu

SEQ ID NO: 68425 - RNA, 22 nt, Homo sapiens
agccuguguugaauuauagaaa

SEQ ID NO: 68426 - RNA, 22 nt, Homo sapiens
guguagagaaauagccugaagg

SEQ ID NO: 68427 - RNA, 22 nt, Homo sapiens
ugagaugaaagcagaaagacuu

SEQ ID NO: 68428 - RNA, 22 nt, Homo sapiens
uugugcuugcuguguucuaugc

SEQ ID NO: 68429 - RNA, 22 nt, Homo sapiens
ucugugguaagaaacgcauguc

SEQ ID NO: 68430 - RNA, 22 nt, Homo sapiens
gucacauugaugcccauggugg

SEQ ID NO: 68431 - RNA, 22 nt, Homo sapiens
auagcacaguguguguacacca

SEQ ID NO: 68432 - RNA, 22 nt, Homo sapiens
ucauggggugcuuugcuagauu

SEQ ID NO: 68433 - RNA, 22 nt, Homo sapiens
aaaugcccuaaaauggagcauc

SEQ ID NO: 68434 - RNA, 22 nt, Homo sapiens
ucugagacuguuucuaacaagc

SEQ ID NO: 68435 - RNA, 22 nt, Homo sapiens
gggcaacauugaguacccugaa

SEQ ID NO: 68436 - RNA, 22 nt, Homo sapiens
ccacaguagucuugggaugggc

SEQ ID NO: 68437 - RNA, 22 nt, Homo sapiens
uaucacaguaucuagcacagug

SEQ ID NO: 68438 - RNA, 22 nt, Homo sapiens
aucauccagccccagaagggag

SEQ ID NO: 68439 - RNA, 22 nt, Homo sapiens
ugacacagcaagauggaaccau

SEQ ID NO: 68440 - RNA, 22 nt, Homo sapiens
gugaaguuuuuugcugagaguc

SEQ ID NO: 68441 - RNA, 22 nt, Homo sapiens
ucuugguaaugucacauuuccu

SEQ ID NO: 68442 - RNA, 22 nt, Homo sapiens
gauggauuuuaagugaaugaaa

SEQ ID NO: 68443 - RNA, 22 nt, Homo sapiens
ugaagacucaauuauuaugaac

SEQ ID NO: 68444 - RNA, 22 nt, Homo sapiens
ucaaguaauacucccaucuugg

SEQ ID NO: 68445 - RNA, 22 nt, Homo sapiens
cauaguacuugcauaguacuau

SEQ ID NO: 68446 - RNA, 22 nt, Homo sapiens
uguuaugaagaugccugguaca

SEQ ID NO: 68447 - RNA, 22 nt, Homo sapiens
augaaaguguguggaaacuuga

SEQ ID NO: 68448 - RNA, 22 nt, Homo sapiens
ugauaacauugggggaagcuga

SEQ ID NO: 68449 - RNA, 22 nt, Homo sapiens
uugucacccuacauaacaggga

SEQ ID NO: 68450 - RNA, 22 nt, Homo sapiens
aagcugugucuugucagcuacc

SEQ ID NO: 68451 - RNA, 22 nt, Homo sapiens
aacacuguuuccagucaugauc

SEQ ID NO: 68452 - RNA, 22 nt, Homo sapiens
ccucauggagaacuucugcuag

SEQ ID NO: 68453 - RNA, 21 nt, Homo sapiens
uuuggcuucucugcugcagcc

SEQ ID NO: 68454 - RNA, 22 nt, Homo sapiens
ugacaguaucuacagcuucuua

SEQ ID NO: 68455 - RNA, 22 nt, Homo sapiens
ucaguggauuauuaaagucacc

SEQ ID NO: 68456 - RNA, 22 nt, Homo sapiens
uggcuuuguaagguuucauuuu

SEQ ID NO: 68457 - RNA, 22 nt, Homo sapiens
ucauacuguugugaaacaaaac

SEQ ID NO: 68458 - RNA, 22 nt, Homo sapiens
uggagcccuaguuccucauaac

SEQ ID NO: 68459 - RNA, 22 nt, Homo sapiens
ugucauagauugcuuggaaaaa

SEQ ID NO: 68460 - RNA, 22 nt, Homo sapiens
ucugucuuguccucacccuaga

SEQ ID NO: 68461 - RNA, 22 nt, Homo sapiens
gagaugugguucaaggguguuu

SEQ ID NO: 68462 - RNA, 22 nt, Homo sapiens
augagaucugugaacaccuguc

SEQ ID NO: 68463 - RNA, 22 nt, Homo sapiens
augacaguguggauuauuguaa

SEQ ID NO: 68464 - RNA, 22 nt, Homo sapiens
uaagugaauuugacagguaaug

SEQ ID NO: 68465 - RNA, 18 nt, Homo sapiens
uuuguacuuuuucuaaug

SEQ ID NO: 68466 - RNA, 22 nt, Homo sapiens
uuucauagccuuugucgucuga

SEQ ID NO: 68467 - RNA, 22 nt, Homo sapiens
uuucauguuuuucugugaggca

SEQ ID NO: 68468 - RNA, 22 nt, Homo sapiens
uuggagagugauauucagaugc

SEQ ID NO: 68469 - RNA, 22 nt, Homo sapiens
uuggcuguguuccucaaggagu

SEQ ID NO: 68470 - RNA, 22 nt, Homo sapiens
uugaguccccacacuggguccc

SEQ ID NO: 68471 - RNA, 22 nt, Homo sapiens
uugcaucagcaggcauaauugg

SEQ ID NO: 68472 - RNA, 22 nt, Homo sapiens
ugguccuuuccauuggagacac

SEQ ID NO: 68473 - RNA, 22 nt, Homo sapiens
ugucauggauucugagucuggg

SEQ ID NO: 68474 - RNA, 18 nt, Homo sapiens
uguugguguucacucacu

SEQ ID NO: 68475 - RNA, 22 nt, Homo sapiens
uguuuaguuaagacauagaauu

SEQ ID NO: 68476 - RNA, 23 nt, Homo sapiens
uuaguaaacucaaugacaccaca

SEQ ID NO: 68477 - RNA, 22 nt, Homo sapiens
uuauuugguuauuguaauuggg

SEQ ID NO: 68478 - RNA, 20 nt, Homo sapiens
uucuauggugaugaguccug

SEQ ID NO: 68479 - RNA, 22 nt, Homo sapiens
uucuggcuaugggauacuaaau

SEQ ID NO: 68480 - RNA, 22 nt, Homo sapiens
uuccuacuguucaucaggaacc

SEQ ID NO: 68481 - RNA, 22 nt, Homo sapiens
uuccugagccuuguaucuagua

SEQ ID NO: 68482 - RNA, 22 nt, Homo sapiens
uucauuggacuuguguucuuga

SEQ ID NO: 68483 - RNA, 16 nt, Homo sapiens
ucccugugacaugugc

SEQ ID NO: 68484 - RNA, 22 nt, Homo sapiens
uccuacaugcaguacauucaaa

SEQ ID NO: 68485 - RNA, 22 nt, Homo sapiens
uccuuggucaaaaagaaagugu

SEQ ID NO: 68486 - RNA, 18 nt, Homo sapiens
ucagucacugccuggcuu

SEQ ID NO: 68487 - RNA, 22 nt, Homo sapiens
ugaacacaucuccugguaccug

SEQ ID NO: 68488 - RNA, 22 nt, Homo sapiens
ucuuugguagaagcuauuuuau

SEQ ID NO: 68489 - RNA, 22 nt, Homo sapiens
ucuuugguuguuuagggugcau

SEQ ID NO: 68490 - RNA, 22 nt, Homo sapiens
uggccaagagcacagauauugg

SEQ ID NO: 68491 - RNA, 20 nt, Homo sapiens
ugggaacaugugguauaugg

SEQ ID NO: 68492 - RNA, 22 nt, Homo sapiens
ugcaguguggcucacgccugua

SEQ ID NO: 68493 - RNA, 21 nt, Homo sapiens
ugcagugugguugcccugcug

SEQ ID NO: 68494 - RNA, 22 nt, Homo sapiens
ugaguucuuuguagauucugug

SEQ ID NO: 68495 - RNA, 22 nt, Homo sapiens
ugagacggagucucgcucuguc

SEQ ID NO: 68496 - RNA, 22 nt, Homo sapiens
guaagucucaugagaucugaug

SEQ ID NO: 68497 - RNA, 22 nt, Homo sapiens
guaaggcuguuaucuucacguc

SEQ ID NO: 68498 - RNA, 22 nt, Homo sapiens
gcccugauacauucuucugccu

SEQ ID NO: 68499 - RNA, 17 nt, Homo sapiens
guggauagaacaaugaa

SEQ ID NO: 68500 - RNA, 22 nt, Homo sapiens
uaaggcaaguuuuuaguggaca

SEQ ID NO: 68501 - RNA, 22 nt, Homo sapiens
uauagcuuaaaguuuagauccu

SEQ ID NO: 68502 - RNA, 22 nt, Homo sapiens
uauagcuuuuuagggaauuugg

SEQ ID NO: 68503 - RNA, 22 nt, Homo sapiens
uaguaaacagcucugccacaau

SEQ ID NO: 68504 - RNA, 18 nt, Homo sapiens
uaguacuguucucaugau

SEQ ID NO: 68505 - RNA, 23 nt, Homo sapiens
uagcacuuuuuacauauggacau

SEQ ID NO: 68506 - RNA, 22 nt, Homo sapiens
uauuagugucuuuugguuagaa

SEQ ID NO: 68507 - RNA, 22 nt, Homo sapiens
uauuacuugucugugucucaau

SEQ ID NO: 68508 - RNA, 22 nt, Homo sapiens
ucaaauguuuguuuaaggcuua

SEQ ID NO: 68509 - RNA, 22 nt, Homo sapiens
caugucuuuuaaacauucaacu

SEQ ID NO: 68510 - RNA, 22 nt, Homo sapiens
ccucccuuuguugcaagggaaa

SEQ ID NO: 68511 - RNA, 22 nt, Homo sapiens
cuccuggugauuggagugugaa

SEQ ID NO: 68512 - RNA, 22 nt, Homo sapiens
cacugcauuggaugguuccucc

SEQ ID NO: 68513 - RNA, 22 nt, Homo sapiens
cacugcauggccacccauguua

SEQ ID NO: 68514 - RNA, 21 nt, Homo sapiens
auuuuugcagagcugguagug

SEQ ID NO: 68515 - RNA, 22 nt, Homo sapiens
cuggcaagagugaaccagcugu

SEQ ID NO: 68516 - RNA, 22 nt, Homo sapiens
cuggcaagaggauaaaguccua

SEQ ID NO: 68517 - RNA, 22 nt, Homo sapiens
gauuuuuggggaagccucuuau

SEQ ID NO: 68518 - RNA, 22 nt, Homo sapiens
agcugguccugugacuugcuuc

SEQ ID NO: 68519 - RNA, 22 nt, Homo sapiens
aggaacuguaacuaugucucug

SEQ ID NO: 68520 - RNA, 22 nt, Homo sapiens
acugccuaaugacuuauguuuu

SEQ ID NO: 68521 - RNA, 22 nt, Homo sapiens
acugcacuccagccugcugaca

SEQ ID NO: 68522 - RNA, 22 nt, Homo sapiens
auaauagcugaucauuuagaag

SEQ ID NO: 68523 - RNA, 22 nt, Homo sapiens
auaugucuauuauuagggcagg

SEQ ID NO: 68524 - RNA, 22 nt, Homo sapiens
augagcucauaaagagugauuu

SEQ ID NO: 68525 - RNA, 22 nt, Homo sapiens
augagcuccucaaggucagaga

SEQ ID NO: 68526 - RNA, 22 nt, Homo sapiens
ucuuuguguaggucaaucuggc

SEQ ID NO: 68527 - RNA, 22 nt, Homo sapiens
ucuuugguuucugucucuguaa

SEQ ID NO: 68528 - RNA, 22 nt, Homo sapiens
ucuuugguaugugcaugugcuu

SEQ ID NO: 68529 - RNA, 22 nt, Homo sapiens
ucugccuacugguuggaggaac

SEQ ID NO: 68530 - RNA, 22 nt, Homo sapiens
uccccuuuguaagauggaaacg

SEQ ID NO: 68531 - RNA, 22 nt, Homo sapiens
ucccugacagucacagagcuac

SEQ ID NO: 68532 - RNA, 22 nt, Homo sapiens
ucccuguguuccuuuugaauug

SEQ ID NO: 68533 - RNA, 22 nt, Homo sapiens
ucucuuggugacuuaaaauguu

SEQ ID NO: 68534 - RNA, 22 nt, Homo sapiens
ucuaaggcaccuagagucauca

SEQ ID NO: 68535 - RNA, 22 nt, Homo sapiens
ugacuauaguuuucuugacaca

SEQ ID NO: 68536 - RNA, 22 nt, Homo sapiens
ugagaucaugccacugcacuuc

SEQ ID NO: 68537 - RNA, 22 nt, Homo sapiens
ugggcaagugacuuggcuucuc

SEQ ID NO: 68538 - RNA, 22 nt, Homo sapiens
ugucuuggacuugaaucucauu

SEQ ID NO: 68539 - RNA, 22 nt, Homo sapiens
uggacaagugcccuccaccuca

SEQ ID NO: 68540 - RNA, 22 nt, Homo sapiens
ugagguaugacuuauuauucuu

SEQ ID NO: 68541 - RNA, 22 nt, Homo sapiens
ugaguucuuuuacauuuugaau

SEQ ID NO: 68542 - RNA, 22 nt, Homo sapiens
ugcaagcacacccagggauugu

SEQ ID NO: 68543 - RNA, 22 nt, Homo sapiens
uuuguacuucauugguucuacu

SEQ ID NO: 68544 - RNA, 22 nt, Homo sapiens
uuuugguguacaauucuaugga

SEQ ID NO: 68545 - RNA, 22 nt, Homo sapiens
uuuuuuaguuagcugggcauga

SEQ ID NO: 68546 - RNA, 19 nt, Homo sapiens
uuguccccucuaaaucuca

SEQ ID NO: 68547 - RNA, 22 nt, Homo sapiens
uuggaauauaaccuguuucuaa

SEQ ID NO: 68548 - RNA, 22 nt, Homo sapiens
uuaccucuguggcucucggacu

SEQ ID NO: 68549 - RNA, 18 nt, Homo sapiens
ugugauggauauguuaau

SEQ ID NO: 68550 - RNA, 22 nt, Homo sapiens
uguucuggagaggcaggccaca

SEQ ID NO: 68551 - RNA, 22 nt, Homo sapiens
ugugacagcacagcaucucuuu

SEQ ID NO: 68552 - RNA, 22 nt, Homo sapiens
uuacugcuuaagugauucaaca

SEQ ID NO: 68553 - RNA, 22 nt, Homo sapiens
uuagcucaguuggugagagcgu

SEQ ID NO: 68554 - RNA, 21 nt, Homo sapiens
uuagugcucaguuugacaaaa

SEQ ID NO: 68555 - RNA, 22 nt, Homo sapiens
uucuaugguuuaauaguuuggg

SEQ ID NO: 68556 - RNA, 22 nt, Homo sapiens
uucacaugguugccuuuugauc

SEQ ID NO: 68557 - RNA, 22 nt, Homo sapiens
uucacugcacuccagccugagc

SEQ ID NO: 68558 - RNA, 18 nt, Homo sapiens
cugccagugugcucuccg

SEQ ID NO: 68559 - RNA, 21 nt, Homo sapiens
cucucugcuuaugaauaguga

SEQ ID NO: 68560 - RNA, 20 nt, Homo sapiens
cucccugacaaauguggaaa

SEQ ID NO: 68561 - RNA, 22 nt, Homo sapiens
cuggcucugagguguuuagggc

SEQ ID NO: 68562 - RNA, 22 nt, Homo sapiens
cuccagugcaaagucaugauca

SEQ ID NO: 68563 - RNA, 22 nt, Homo sapiens
cauggcucuuguuuacucccag

SEQ ID NO: 68564 - RNA, 22 nt, Homo sapiens
cauggcuacugcagauguaggg

SEQ ID NO: 68565 - RNA, 22 nt, Homo sapiens
cagcuguuguuccagucuuuua

SEQ ID NO: 68566 - RNA, 22 nt, Homo sapiens
cagcaaaucauccuauuugagc

SEQ ID NO: 68567 - RNA, 22 nt, Homo sapiens
gaaaugcucauuuuggauccuu

SEQ ID NO: 68568 - RNA, 22 nt, Homo sapiens
gcucuuuugggguaauucugag

SEQ ID NO: 68569 - RNA, 22 nt, Homo sapiens
gcugauggugcaguucuagccu

SEQ ID NO: 68570 - RNA, 22 nt, Homo sapiens
ggcaaauucuuguaugccuacu

SEQ ID NO: 68571 - RNA, 22 nt, Homo sapiens
gagugcauaugggccuguguca

SEQ ID NO: 68572 - RNA, 22 nt, Homo sapiens
gagugcauugguggucaggugu

SEQ ID NO: 68573 - RNA, 22 nt, Homo sapiens
gaguucauaucuaugagugugc

SEQ ID NO: 68574 - RNA, 22 nt, Homo sapiens
uauugcuggcucugucuucauu

SEQ ID NO: 68575 - RNA, 22 nt, Homo sapiens
uauugccucagugacuuugggg

SEQ ID NO: 68576 - RNA, 22 nt, Homo sapiens
uaucccuuagagcggggugguu

SEQ ID NO: 68577 - RNA, 22 nt, Homo sapiens
ucaccuggggcacagcugaaga

SEQ ID NO: 68578 - RNA, 22 nt, Homo sapiens
ucaccuggagacaugaagacug

SEQ ID NO: 68579 - RNA, 22 nt, Homo sapiens
guaacucugucacuuacuaguu

SEQ ID NO: 68580 - RNA, 22 nt, Homo sapiens
guaaggcuucuggucaacagca

SEQ ID NO: 68581 - RNA, 22 nt, Homo sapiens
guaucaugaaguuucuucauuu

SEQ ID NO: 68582 - RNA, 23 nt, Homo sapiens
ggcaagaucucagcucacugcaa

SEQ ID NO: 68583 - RNA, 22 nt, Homo sapiens
ggcaaggaggggcacuuucacu

SEQ ID NO: 68584 - RNA, 22 nt, Homo sapiens
ggcaaggauuagauucuccccu

SEQ ID NO: 68585 - RNA, 22 nt, Homo sapiens
gucuggcacagggaaaguacaa

SEQ ID NO: 68586 - RNA, 22 nt, Homo sapiens
gucuuugcauguauguucauga

SEQ ID NO: 68587 - RNA, 22 nt, Homo sapiens
guucuauguugggaguucacua

SEQ ID NO: 68588 - RNA, 22 nt, Homo sapiens
augguaucauuacuguuuuauu

SEQ ID NO: 68589 - RNA, 22 nt, Homo sapiens
auggcucuguuuuuuaugcucu

SEQ ID NO: 68590 - RNA, 22 nt, Homo sapiens
augguguccuguuuccccagga

SEQ ID NO: 68591 - RNA, 22 nt, Homo sapiens
auggcucaauucuuucccugaa

SEQ ID NO: 68592 - RNA, 22 nt, Homo sapiens
augaucauggaaguuuuccugu

SEQ ID NO: 68593 - RNA, 22 nt, Homo sapiens
auugaguaacaauuuuguucaa

SEQ ID NO: 68594 - RNA, 22 nt, Homo sapiens
aucaccuggaguagcccguccc

SEQ ID NO: 68595 - RNA, 22 nt, Homo sapiens
auaggucaucaugggaguggga

SEQ ID NO: 68596 - RNA, 22 nt, Homo sapiens
aaagcacugaauaaauuugcuu

SEQ ID NO: 68597 - RNA, 22 nt, Homo sapiens
aagugcacuguaagugcaggau

SEQ ID NO: 68598 - RNA, 22 nt, Homo sapiens
uuugccaauauuuuauugagga

SEQ ID NO: 68599 - RNA, 22 nt, Homo sapiens
uuuugcuugugaauagccacau

SEQ ID NO: 68600 - RNA, 22 nt, Homo sapiens
uuucuugguuguauuuagacuu

SEQ ID NO: 68601 - RNA, 22 nt, Homo sapiens
uuacugcucuuuugucaugagu

SEQ ID NO: 68602 - RNA, 22 nt, Homo sapiens
uguguagagaaauauuacuuau

SEQ ID NO: 68603 - RNA, 21 nt, Homo sapiens
uucacuggucuauuucccuuu

SEQ ID NO: 68604 - RNA, 20 nt, Homo sapiens
uucacugggcucucuguugg

SEQ ID NO: 68605 - RNA, 22 nt, Homo sapiens
uucaccuguagcaugcccuugg

SEQ ID NO: 68606 - RNA, 22 nt, Homo sapiens
uggcuacuguacuugagcuauu

SEQ ID NO: 68607 - RNA, 22 nt, Homo sapiens
uggcuacugacugaugauuaua

SEQ ID NO: 68608 - RNA, 22 nt, Homo sapiens
uggcuguuuauuucaccuggau

SEQ ID NO: 68609 - RNA, 22 nt, Homo sapiens
uggcuguuuauuucaccugggc

SEQ ID NO: 68610 - RNA, 22 nt, Homo sapiens
ugugaugguuuggaagcuucuu

SEQ ID NO: 68611 - RNA, 18 nt, Homo sapiens
ugucuuagagcuugaccc

SEQ ID NO: 68612 - RNA, 22 nt, Homo sapiens
uugcaagaaaucagagccuucc

SEQ ID NO: 68613 - RNA, 22 nt, Homo sapiens
uucuuuggaaacaguacuaauu

SEQ ID NO: 68614 - RNA, 22 nt, Homo sapiens
uugaagugaagaacaauaucac

SEQ ID NO: 68615 - RNA, 22 nt, Homo sapiens
uuggaaauguguuugcauucag

SEQ ID NO: 68616 - RNA, 22 nt, Homo sapiens
uuucuacagugaacgauuucua

SEQ ID NO: 68617 - RNA, 21 nt, Homo sapiens
uuucacugugaguuuuucugu

SEQ ID NO: 68618 - RNA, 19 nt, Homo sapiens
uuucaauguaaggauggag

SEQ ID NO: 68619 - RNA, 22 nt, Homo sapiens
aauggcucuuccuggaguugug

SEQ ID NO: 68620 - RNA, 22 nt, Homo sapiens
aagugcccuauuuggcccuuga

SEQ ID NO: 68621 - RNA, 19 nt, Homo sapiens
acugagcuaccugggggca

SEQ ID NO: 68622 - RNA, 22 nt, Homo sapiens
acugcacucuagccuuggcaac

SEQ ID NO: 68623 - RNA, 18 nt, Homo sapiens
agaugcaugcucacuaca

SEQ ID NO: 68624 - RNA, 21 nt, Homo sapiens
agagucaucucuaucuguacc

SEQ ID NO: 68625 - RNA, 22 nt, Homo sapiens
agcuguuuuugugggcauguga

SEQ ID NO: 68626 - RNA, 22 nt, Homo sapiens
agucagucuguccugugcugag

SEQ ID NO: 68627 - RNA, 22 nt, Homo sapiens
agugcacugcccgcuuccuguc

SEQ ID NO: 68628 - RNA, 22 nt, Homo sapiens
augaccaaugggcagagcuaga

SEQ ID NO: 68629 - RNA, 22 nt, Homo sapiens
aucuuuggugcaugauacuuug

SEQ ID NO: 68630 - RNA, 22 nt, Homo sapiens
aucuuggauuaccugggugggu

SEQ ID NO: 68631 - RNA, 22 nt, Homo sapiens
aucucuugccagucagaauggu

SEQ ID NO: 68632 - RNA, 20 nt, Homo sapiens
aucucugggcaaaggaaaau

SEQ ID NO: 68633 - RNA, 22 nt, Homo sapiens
aucacuuucuauuucugugcca

SEQ ID NO: 68634 - RNA, 22 nt, Homo sapiens
aucaccuggaggugaucacuug

SEQ ID NO: 68635 - RNA, 22 nt, Homo sapiens
aucccugugacgagcaucccua

SEQ ID NO: 68636 - RNA, 23 nt, Homo sapiens
auccacauucuaguccuuuaugc

SEQ ID NO: 68637 - RNA, 22 nt, Homo sapiens
cuuccaaguggggcacgugcca

SEQ ID NO: 68638 - RNA, 22 nt, Homo sapiens
cuucacuggagucccuggauuc

SEQ ID NO: 68639 - RNA, 22 nt, Homo sapiens
cuuuaguuaaaauugggguugu

SEQ ID NO: 68640 - RNA, 22 nt, Homo sapiens
cugucaucauuucuaugugcca

SEQ ID NO: 68641 - RNA, 22 nt, Homo sapiens
cugucuggaggccugcaaauaa

SEQ ID NO: 68642 - RNA, 22 nt, Homo sapiens
cugcccuuucuauaugauguaa

SEQ ID NO: 68643 - RNA, 22 nt, Homo sapiens
cugauacugaaagcuguugguu

SEQ ID NO: 68644 - RNA, 22 nt, Homo sapiens
cugauacugagaccuuggguua

SEQ ID NO: 68645 - RNA, 19 nt, Homo sapiens
cuauugcacauagcugaag

SEQ ID NO: 68646 - RNA, 22 nt, Homo sapiens
gauggcucugcaggugagggua

SEQ ID NO: 68647 - RNA, 22 nt, Homo sapiens
gaggucauguggcaggcagcca

SEQ ID NO: 68648 - RNA, 22 nt, Homo sapiens
gacugcauuugccccaucgaau

SEQ ID NO: 68649 - RNA, 22 nt, Homo sapiens
gagaugaaaucuugcucuguca

SEQ ID NO: 68650 - RNA, 21 nt, Homo sapiens
gagaaucaucauggcugcaua

SEQ ID NO: 68651 - RNA, 22 nt, Homo sapiens
auguggcuuuccuagaucuuag

SEQ ID NO: 68652 - RNA, 22 nt, Homo sapiens
auggcuucuuacucuucugcau

SEQ ID NO: 68653 - RNA, 22 nt, Homo sapiens
auggcucuggauagaaugcagg

SEQ ID NO: 68654 - RNA, 22 nt, Homo sapiens
auuguacuagguccuagggcuu

SEQ ID NO: 68655 - RNA, 23 nt, Homo sapiens
auugcagucuugaacuccugggc

SEQ ID NO: 68656 - RNA, 22 nt, Homo sapiens
auuguucuuguguccuuuuccu

SEQ ID NO: 68657 - RNA, 22 nt, Homo sapiens
caaagucuucucauuaugucuu

SEQ ID NO: 68658 - RNA, 23 nt, Homo sapiens
cagcuggugauuuuaaguugaag

SEQ ID NO: 68659 - RNA, 22 nt, Homo sapiens
caggucaucugaguuuaguucu

SEQ ID NO: 68660 - RNA, 19 nt, Homo sapiens
caugauacugcucccucuc

SEQ ID NO: 68661 - RNA, 20 nt, Homo sapiens
ucugauugcaacugcaugag

SEQ ID NO: 68662 - RNA, 22 nt, Homo sapiens
ucauauugguuaaaauaguggg

SEQ ID NO: 68663 - RNA, 22 nt, Homo sapiens
uauuguuuuucccaggagucua

SEQ ID NO: 68664 - RNA, 17 nt, Homo sapiens
ugcuuagagagccucag

SEQ ID NO: 68665 - RNA, 22 nt, Homo sapiens
uggcaauguggaaugguccagg

SEQ ID NO: 68666 - RNA, 22 nt, Homo sapiens
ugauugcacaccugcacucaag

SEQ ID NO: 68667 - RNA, 22 nt, Homo sapiens
ugagaggugaauggcaggcuca

SEQ ID NO: 68668 - RNA, 22 nt, Homo sapiens
ugagaucaugucauuugcacuc

SEQ ID NO: 68669 - RNA, 22 nt, Homo sapiens
uaucucuguggguagugcugaa

SEQ ID NO: 68670 - RNA, 20 nt, Homo sapiens
uaagugcuuuauauugauua

SEQ ID NO: 68671 - RNA, 23 nt, Homo sapiens
uacugcauccuccgccucuaggg

SEQ ID NO: 68672 - RNA, 22 nt, Homo sapiens
gugguucuaaaccuuuuuuggu

SEQ ID NO: 68673 - RNA, 22 nt, Homo sapiens
gcuaggagaucugcugcucucu

SEQ ID NO: 68674 - RNA, 21 nt, Homo sapiens
gcuuuuucggaagucuuuggc

SEQ ID NO: 68675 - RNA, 22 nt, Homo sapiens
ggagucuugcuauguugccaag

SEQ ID NO: 68676 - RNA, 22 nt, Homo sapiens
gucaucaucaguccucugugca

SEQ ID NO: 68677 - RNA, 22 nt, Homo sapiens
gucuuggagacauugccauuga

SEQ ID NO: 68678 - RNA, 23 nt, Homo sapiens
gugccuucugagccuagucucca

SEQ ID NO: 68679 - RNA, 22 nt, Homo sapiens
gugacaguggagacuuacuuca

SEQ ID NO: 68680 - RNA, 22 nt, Homo sapiens
ugugaugguuuagcauuuucuu

SEQ ID NO: 68681 - RNA, 19 nt, Homo sapiens
uucucugguuguacuaccc

SEQ ID NO: 68682 - RNA, 22 nt, Homo sapiens
uucuauugguaauauuuucugu

SEQ ID NO: 68683 - RNA, 22 nt, Homo sapiens
uucagguaucccuugucuauag

SEQ ID NO: 68684 - RNA, 22 nt, Homo sapiens
uuugugcuccuguugagaaucu

SEQ ID NO: 68685 - RNA, 22 nt, Homo sapiens
uuugucuccuaagacucugugg

SEQ ID NO: 68686 - RNA, 22 nt, Homo sapiens
uuugccaaugggaauuuuccua

SEQ ID NO: 68687 - RNA, 22 nt, Homo sapiens
uuucuauguugaccagucuaga

SEQ ID NO: 68688 - RNA, 22 nt, Homo sapiens
uuguguaguaccucucacauug

SEQ ID NO: 68689 - RNA, 22 nt, Homo sapiens
uuuaguacugcuuuaugugugu

SEQ ID NO: 68690 - RNA, 22 nt, Homo sapiens
uugguaguuucugucuuuagau

SEQ ID NO: 68691 - RNA, 22 nt, Homo sapiens
uugguacuacacuucuaaucuu

SEQ ID NO: 68692 - RNA, 22 nt, Homo sapiens
uugcaugucauaacugauggaa

SEQ ID NO: 68693 - RNA, 22 nt, Homo sapiens
uugcauuuucuaggagggcaaa

SEQ ID NO: 68694 - RNA, 22 nt, Homo sapiens
uugauuagugacuggcuacacg

SEQ ID NO: 68695 - RNA, 19 nt, Homo sapiens
ucuuugguacgugcuuuga

SEQ ID NO: 68696 - RNA, 22 nt, Homo sapiens
ucuccaguuuccuucgucuauc

SEQ ID NO: 68697 - RNA, 22 nt, Homo sapiens
ucugugcauggcagaggaauga

SEQ ID NO: 68698 - RNA, 22 nt, Homo sapiens
ucugugcauuguaggauguuua

SEQ ID NO: 68699 - RNA, 22 nt, Homo sapiens
ucuuuaguuaagggacauuuua

SEQ ID NO: 68700 - RNA, 19 nt, Homo sapiens
ucuuuagucacauuuuuau

SEQ ID NO: 68701 - RNA, 23 nt, Homo sapiens
ucaguagucauugggaaagugug

SEQ ID NO: 68702 - RNA, 22 nt, Homo sapiens
uggcauauaauauagaagacua

SEQ ID NO: 68703 - RNA, 22 nt, Homo sapiens
ugggaacaugaagguuaaagag

SEQ ID NO: 68704 - RNA, 22 nt, Homo sapiens
uggaacacauaaauagcauagu

SEQ ID NO: 68705 - RNA, 20 nt, Homo sapiens
uggaaaguaagucaugauau

SEQ ID NO: 68706 - RNA, 22 nt, Homo sapiens
uggaaacuuauguucuucugug

SEQ ID NO: 68707 - RNA, 21 nt, Homo sapiens
uggaaacuucuagcuuacgua

SEQ ID NO: 68708 - RNA, 20 nt, Homo sapiens
cagugcaccuggcguguuga

SEQ ID NO: 68709 - RNA, 22 nt, Homo sapiens
auuguguagucuuacugcuugc

SEQ ID NO: 68710 - RNA, 22 nt, Homo sapiens
cucuuuuguuuagcugagaggg

SEQ ID NO: 68711 - RNA, 22 nt, Homo sapiens
ccuguguuaugguuucuaaugu

SEQ ID NO: 68712 - RNA, 22 nt, Homo sapiens
cuaggcacgccugggucuccag

SEQ ID NO: 68713 - RNA, 19 nt, Homo sapiens
ccuuugguuuccaugacau

SEQ ID NO: 68714 - RNA, 22 nt, Homo sapiens
cuauguaccuggaacuguauua

SEQ ID NO: 68715 - RNA, 22 nt, Homo sapiens
gcuggcaaguggccuacuuugu

SEQ ID NO: 68716 - RNA, 22 nt, Homo sapiens
gcuggcaagaugcugaugcaac

SEQ ID NO: 68717 - RNA, 22 nt, Homo sapiens
gaagugcaguggcacagucaug

SEQ ID NO: 68718 - RNA, 22 nt, Homo sapiens
cuuugaugagaaaauacuuugu

SEQ ID NO: 68719 - RNA, 22 nt, Homo sapiens
gggggagugugguacccagcau

SEQ ID NO: 68720 - RNA, 22 nt, Homo sapiens
gguauuauuugccuuuuacuga

SEQ ID NO: 68721 - RNA, 20 nt, Homo sapiens
gcugugcuuaauacacuuuc

SEQ ID NO: 68722 - RNA, 22 nt, Homo sapiens
gugcacaacgugcagguuaguu

SEQ ID NO: 68723 - RNA, 22 nt, Homo sapiens
guguauauccuauuaguucugu

SEQ ID NO: 68724 - RNA, 22 nt, Homo sapiens
guggcaagaugacuacucacug

SEQ ID NO: 68725 - RNA, 18 nt, Homo sapiens
gugucugguuaugggagu

SEQ ID NO: 68726 - RNA, 22 nt, Homo sapiens
uacucuuuagcuccuuaaggaa

SEQ ID NO: 68727 - RNA, 23 nt, Homo sapiens
uacagcugcagaaucaggcuaag

SEQ ID NO: 68728 - RNA, 22 nt, Homo sapiens
uacaaagcuuugaugugucuuu

SEQ ID NO: 68729 - RNA, 22 nt, Homo sapiens
uauggcuuucuacuugaguucu

SEQ ID NO: 68730 - RNA, 22 nt, Homo sapiens
uauugcuuuacucucuuauccu

SEQ ID NO: 68731 - RNA, 22 nt, Homo sapiens
acuggcaauggcagaaauaguu

SEQ ID NO: 68732 - RNA, 22 nt, Homo sapiens
auauagcaaugaaagagaugaa

SEQ ID NO: 68733 - RNA, 22 nt, Homo sapiens
agucaagugggguuagauaguu

SEQ ID NO: 68734 - RNA, 22 nt, Homo sapiens
aucuuuggauacuugauauagu

SEQ ID NO: 68735 - RNA, 22 nt, Homo sapiens
auguaguaugaagaagaugcuu

SEQ ID NO: 68736 - RNA, 22 nt, Homo sapiens
augguacucucuugucugcaaa

SEQ ID NO: 68737 - RNA, 22 nt, Homo sapiens
auggaacuggagaugguuauau

SEQ ID NO: 68738 - RNA, 22 nt, Homo sapiens
augucugguagccaccuggagg

SEQ ID NO: 68739 - RNA, 22 nt, Homo sapiens
aaagugcacuuggaagagggcc

SEQ ID NO: 68740 - RNA, 22 nt, Homo sapiens
aagcaaacaucagcuugguuaa

SEQ ID NO: 68741 - RNA, 21 nt, Homo sapiens
aagcacauugaguguguguga

SEQ ID NO: 68742 - RNA, 22 nt, Homo sapiens
aagggaauguuguggcugguuu

SEQ ID NO: 68743 - RNA, 22 nt, Homo sapiens
auguaguugcucugccuguuuu

SEQ ID NO: 68744 - RNA, 22 nt, Homo sapiens
auagagugcuucaucaguagua

SEQ ID NO: 68745 - RNA, 22 nt, Homo sapiens
auaucccaguguguaaacacug

SEQ ID NO: 68746 - RNA, 22 nt, Homo sapiens
aucagaguggguuuuaaaagug

SEQ ID NO: 68747 - RNA, 22 nt, Homo sapiens
agaauacugucuauucauggua

SEQ ID NO: 68748 - RNA, 22 nt, Homo sapiens
agguguuguugaggagauuuca

SEQ ID NO: 68749 - RNA, 22 nt, Homo sapiens
agguuuucagccccagccuagg

SEQ ID NO: 68750 - RNA, 22 nt, Homo sapiens
aguacaauguugaguagaagug

SEQ ID NO: 68751 - RNA, 22 nt, Homo sapiens
aaaugcuuucuuggaccauuug

SEQ ID NO: 68752 - RNA, 22 nt, Homo sapiens
acacuguugacauuuuguagug

SEQ ID NO: 68753 - RNA, 22 nt, Homo sapiens
acugaguguugauuuagauuaa

SEQ ID NO: 68754 - RNA, 22 nt, Homo sapiens
uauugauuaauugugauuaggc

SEQ ID NO: 68755 - RNA, 22 nt, Homo sapiens
uauuugauugacuuuagcagga

SEQ ID NO: 68756 - RNA, 22 nt, Homo sapiens
uauuguccacuuugcacugugu

SEQ ID NO: 68757 - RNA, 22 nt, Homo sapiens
uauuguuaaagauguuaaugau

SEQ ID NO: 68758 - RNA, 20 nt, Homo sapiens
uauucacucuccagucuugc

SEQ ID NO: 68759 - RNA, 22 nt, Homo sapiens
uauugaauuugagcugucucuu

SEQ ID NO: 68760 - RNA, 22 nt, Homo sapiens
uaugacuuuugaauacagaugg

SEQ ID NO: 68761 - RNA, 21 nt, Homo sapiens
uauaguaguaugauuuacaau

SEQ ID NO: 68762 - RNA, 22 nt, Homo sapiens
uaauauguuuugaaaucaggaa

SEQ ID NO: 68763 - RNA, 22 nt, Homo sapiens
guuggcuuuuuaaggaaauugc

SEQ ID NO: 68764 - RNA, 22 nt, Homo sapiens
uacaguaguaucuucauuuguu

SEQ ID NO: 68765 - RNA, 22 nt, Homo sapiens
uacugcacuccagccugggaga

SEQ ID NO: 68766 - RNA, 22 nt, Homo sapiens
uagagaucuuauauuuuaugac

SEQ ID NO: 68767 - RNA, 22 nt, Homo sapiens
gugcacaucgugcagguuuguu

SEQ ID NO: 68768 - RNA, 22 nt, Homo sapiens
gugcauauaaguuguuucuagu

SEQ ID NO: 68769 - RNA, 22 nt, Homo sapiens
guccauuuguuuccagagcacu

SEQ ID NO: 68770 - RNA, 22 nt, Homo sapiens
gugagauaucuagacuagggaa

SEQ ID NO: 68771 - RNA, 19 nt, Homo sapiens
ggugcuugaauauuccucc

SEQ ID NO: 68772 - RNA, 18 nt, Homo sapiens
guauuccagccugaguga

SEQ ID NO: 68773 - RNA, 22 nt, Homo sapiens
gucaguuugguuaaucauucca

SEQ ID NO: 68774 - RNA, 22 nt, Homo sapiens
cuuuaugagguuggauggaucu

SEQ ID NO: 68775 - RNA, 22 nt, Homo sapiens
cuuugguggagucuuuagguuc

SEQ ID NO: 68776 - RNA, 22 nt, Homo sapiens
gaauacugacuauuucaucugg

SEQ ID NO: 68777 - RNA, 20 nt, Homo sapiens
gaaugguuucgggguucuug

SEQ ID NO: 68778 - RNA, 22 nt, Homo sapiens
cugaggugggaggauuacuuga

SEQ ID NO: 68779 - RNA, 22 nt, Homo sapiens
cugaggugauauauacauauuu

SEQ ID NO: 68780 - RNA, 22 nt, Homo sapiens
cugauugucuauuuaguucacu

SEQ ID NO: 68781 - RNA, 22 nt, Homo sapiens
cugauugucaucaauauuauua

SEQ ID NO: 68782 - RNA, 22 nt, Homo sapiens
cugauguagguggucugugauc

SEQ ID NO: 68783 - RNA, 22 nt, Homo sapiens
cuguuugaggguuugcuuucag

SEQ ID NO: 68784 - RNA, 22 nt, Homo sapiens
cuucaguucuguaaggacagca

SEQ ID NO: 68785 - RNA, 22 nt, Homo sapiens
cuucacuuuguuaaacuccaau

SEQ ID NO: 68786 - RNA, 22 nt, Homo sapiens
gcuggucugccguaguaggugc

SEQ ID NO: 68787 - RNA, 22 nt, Homo sapiens
gcaguguugugauccaggucuu

SEQ ID NO: 68788 - RNA, 22 nt, Homo sapiens
gauuuuuggggaagccucuuau

SEQ ID NO: 68789 - RNA, 22 nt, Homo sapiens
gauaguugugagaacucuuacu

SEQ ID NO: 68790 - RNA, 22 nt, Homo sapiens
ccuugcacuucccaggugaggc

SEQ ID NO: 68791 - RNA, 21 nt, Homo sapiens
cucugguuugcauuggauuau

SEQ ID NO: 68792 - RNA, 22 nt, Homo sapiens
caucagcaauguaugaggguuc

SEQ ID NO: 68793 - RNA, 22 nt, Homo sapiens
caucacagcaaguagggagugg

SEQ ID NO: 68794 - RNA, 22 nt, Homo sapiens
auuguucuuguguccuuuuccu

SEQ ID NO: 68795 - RNA, 22 nt, Homo sapiens
auuugguuauggucauggacac

SEQ ID NO: 68796 - RNA, 22 nt, Homo sapiens
auuugguuauucaguuguucag

SEQ ID NO: 68797 - RNA, 22 nt, Homo sapiens
auugcagcccacccugggugau

SEQ ID NO: 68798 - RNA, 22 nt, Homo sapiens
cagugguuuucucaguucagca

SEQ ID NO: 68799 - RNA, 22 nt, Homo sapiens
cagcacauuacaaguacuuggu

SEQ ID NO: 68800 - RNA, 22 nt, Homo sapiens
auuuuugguugucagcacuagg

SEQ ID NO: 68801 - RNA, 22 nt, Homo sapiens
auuuuugguugguaggcuauua

SEQ ID NO: 68802 - RNA, 22 nt, Homo sapiens
ugccugcugucuaauauauucu

SEQ ID NO: 68803 - RNA, 21 nt, Homo sapiens
ugccuuuguaguaggugucuu

SEQ ID NO: 68804 - RNA, 22 nt, Homo sapiens
uggagauccuucauuuuggugu

SEQ ID NO: 68805 - RNA, 22 nt, Homo sapiens
uggcuuuuguuauuuggaagcu

SEQ ID NO: 68806 - RNA, 21 nt, Homo sapiens
ugauaugguuuggauaugugu

SEQ ID NO: 68807 - RNA, 22 nt, Homo sapiens
ugaugaugaaugaucuuuuaca

SEQ ID NO: 68808 - RNA, 22 nt, Homo sapiens
ugaugugucaucugagagagug

SEQ ID NO: 68809 - RNA, 22 nt, Homo sapiens
ugcaccaucuugcuucuguggu

SEQ ID NO: 68810 - RNA, 22 nt, Homo sapiens
ugagcugagaucacacuacugu

SEQ ID NO: 68811 - RNA, 22 nt, Homo sapiens
ugagauuaaucuuuaaguaaga

SEQ ID NO: 68812 - RNA, 21 nt, Homo sapiens
ugagauuaaguuguuuagaag

SEQ ID NO: 68813 - RNA, 22 nt, Homo sapiens
ugagaugugugcauucaacuca

SEQ ID NO: 68814 - RNA, 22 nt, Homo sapiens
ugaguauagaucaguucaagug

SEQ ID NO: 68815 - RNA, 18 nt, Homo sapiens
ugauaucaaugauagcca

SEQ ID NO: 68816 - RNA, 22 nt, Homo sapiens
ugagcugagaucuuaccacugc

SEQ ID NO: 68817 - RNA, 22 nt, Homo sapiens
ucaggcuuuucccagagugaug

SEQ ID NO: 68818 - RNA, 22 nt, Homo sapiens
ucauauugcgguucauugacuu

SEQ ID NO: 68819 - RNA, 22 nt, Homo sapiens
uccacuuuugugcugaauugga

SEQ ID NO: 68820 - RNA, 22 nt, Homo sapiens
ucaugggagcccccaucaugag

SEQ ID NO: 68821 - RNA, 22 nt, Homo sapiens
aacacuguuuccagucaugauc

SEQ ID NO: 68822 - RNA, 19 nt, Homo sapiens
ucucaguguuggucaggug

SEQ ID NO: 68823 - RNA, 22 nt, Homo sapiens
ucucagugaaauaaauuauuuu

SEQ ID NO: 68824 - RNA, 19 nt, Homo sapiens
ucuuugguacgugcuuuga

SEQ ID NO: 68825 - RNA, 22 nt, Homo sapiens
ucuuugguagaagcuauuuuau

SEQ ID NO: 68826 - RNA, 22 nt, Homo sapiens
ugacauuacagucacuugcugu

SEQ ID NO: 68827 - RNA, 22 nt, Homo sapiens
ugacauguagagaacuucucau

SEQ ID NO: 68828 - RNA, 22 nt, Homo sapiens
ugacauguauuagcucagugcu

SEQ ID NO: 68829 - RNA, 22 nt, Homo sapiens
uugauuagugacuggcuacacg

SEQ ID NO: 68830 - RNA, 22 nt, Homo sapiens
uugaagguaggaugugcuauca

SEQ ID NO: 68831 - RNA, 22 nt, Homo sapiens
uugcaccccuacuauuugccaa

SEQ ID NO: 68832 - RNA, 22 nt, Homo sapiens
uugcagagucaguuauuuugcc

SEQ ID NO: 68833 - RNA, 22 nt, Homo sapiens
uugcauuuucuaggagggcaaa

SEQ ID NO: 68834 - RNA, 22 nt, Homo sapiens
uugcuucauucaacauugaggg

SEQ ID NO: 68835 - RNA, 22 nt, Homo sapiens
uuggccagugucuuuuuuuccu

SEQ ID NO: 68836 - RNA, 22 nt, Homo sapiens
uuggucaggcuaaucucgaacg

SEQ ID NO: 68837 - RNA, 22 nt, Homo sapiens
uuggucaucucccuccuuuuag

SEQ ID NO: 68838 - RNA, 22 nt, Homo sapiens
uugugguuuucagcuuauauau

SEQ ID NO: 68839 - RNA, 22 nt, Homo sapiens
uuguguccccacccaaaucuca

SEQ ID NO: 68840 - RNA, 22 nt, Homo sapiens
uugguucucuuuauaugcugga

SEQ ID NO: 68841 - RNA, 22 nt, Homo sapiens
uuugugacacaaacacauauau

SEQ ID NO: 68842 - RNA, 22 nt, Homo sapiens
uuugaagcuaaggugcuugguu

SEQ ID NO: 68843 - RNA, 22 nt, Homo sapiens
uuucuugguuguauuuagacuu

SEQ ID NO: 68844 - RNA, 22 nt, Homo sapiens
uuugcagagucuuucgcugggc

SEQ ID NO: 68845 - RNA, 22 nt, Homo sapiens
uuugcagagacuuguuaggaau

SEQ ID NO: 68846 - RNA, 22 nt, Homo sapiens
uuugcacuuuaauauaauguga

SEQ ID NO: 68847 - RNA, 18 nt, Homo sapiens
uucaguuuguaucugggg

SEQ ID NO: 68848 - RNA, 22 nt, Homo sapiens
uuauuugguugcugacuuggaa

SEQ ID NO: 68849 - RNA, 22 nt, Homo sapiens
uuaugcuugugugaauuuuccc

SEQ ID NO: 68850 - RNA, 22 nt, Homo sapiens
uuaucccacuuucuguuccugu

SEQ ID NO: 68851 - RNA, 21 nt, Homo sapiens
uuaucccagugucucugcagg

SEQ ID NO: 68852 - RNA, 20 nt, Homo sapiens
uuauagcuacaucuugacug

SEQ ID NO: 68853 - RNA, 22 nt, Homo sapiens
uucucaauggcaacuuguugcu

SEQ ID NO: 68854 - RNA, 22 nt, Homo sapiens
uucucagugcuaucuuuuaugc

SEQ ID NO: 68855 - RNA, 22 nt, Homo sapiens
uuccauugugucaucuuggugg

SEQ ID NO: 68856 - RNA, 22 nt, Homo sapiens
uuaaagcuggcguuacaguuug

SEQ ID NO: 68857 - RNA, 22 nt, Homo sapiens
uuaaggaaagcauuuaauucag

SEQ ID NO: 68858 - RNA, 22 nt, Homo sapiens
uguuuguuugauaugggauaaa

SEQ ID NO: 68859 - RNA, 22 nt, Homo sapiens
ugugucuugcuggugccugcau

SEQ ID NO: 68860 - RNA, 20 nt, Homo sapiens
gugagaacaugugguauuug

SEQ ID NO: 68861 - RNA, 22 nt, Homo sapiens
gugauuuaguagaugcuaguua

SEQ ID NO: 68862 - RNA, 22 nt, Homo sapiens
gugcacauauggugcauaagug

SEQ ID NO: 68863 - RNA, 18 nt, Homo sapiens
ggcugguguuuuaguaua

SEQ ID NO: 68864 - RNA, 22 nt, Homo sapiens
ggugauguuugaguugagacag

SEQ ID NO: 68865 - RNA, 22 nt, Homo sapiens
gcuuguguuuacuguaguuacu

SEQ ID NO: 68866 - RNA, 17 nt, Homo sapiens
gcugauguuugcauuuu

SEQ ID NO: 68867 - RNA, 22 nt, Homo sapiens
gugguuguuggaguggcaauuu

SEQ ID NO: 68868 - RNA, 19 nt, Homo sapiens
gugguauuaccuuuugauu

SEQ ID NO: 68869 - RNA, 22 nt, Homo sapiens
gugguuuuacaaagagaaagau

SEQ ID NO: 68870 - RNA, 22 nt, Homo sapiens
guuuugguuauauggaucaguu

SEQ ID NO: 68871 - RNA, 22 nt, Homo sapiens
guuugguugcauggaaaauuua

SEQ ID NO: 68872 - RNA, 15 nt, Homo sapiens
guuuuuggauacaau

SEQ ID NO: 68873 - RNA, 16 nt, Homo sapiens
uacauuuguuacaugg

SEQ ID NO: 68874 - RNA, 22 nt, Homo sapiens
uaagucuuuuuggaguuuauaa

SEQ ID NO: 68875 - RNA, 20 nt, Homo sapiens
uaugaccugucuuuucucuc

SEQ ID NO: 68876 - RNA, 22 nt, Homo sapiens
uaggugauccauuuguauuuua

SEQ ID NO: 68877 - RNA, 23 nt, Homo sapiens
uagcuucucccagaccugcuccc

SEQ ID NO: 68878 - RNA, 22 nt, Homo sapiens
ugagauauugggaguaauguca

SEQ ID NO: 68879 - RNA, 22 nt, Homo sapiens
ugagauagaaaacauaggagaa

SEQ ID NO: 68880 - RNA, 22 nt, Homo sapiens
ugagaugaucaaaguauaggcu

SEQ ID NO: 68881 - RNA, 22 nt, Homo sapiens
ugacaggagauuaugugauguu

SEQ ID NO: 68882 - RNA, 22 nt, Homo sapiens
ugagucaugcuggagucauggc

SEQ ID NO: 68883 - RNA, 22 nt, Homo sapiens
ugagucagucucacucugcugc

SEQ ID NO: 68884 - RNA, 22 nt, Homo sapiens
ugagucuguucucacauugcua

SEQ ID NO: 68885 - RNA, 21 nt, Homo sapiens
ugcaugguagucacaugauuc

SEQ ID NO: 68886 - RNA, 22 nt, Homo sapiens
ugccaacugguuucuuuuaguu

SEQ ID NO: 68887 - RNA, 21 nt, Homo sapiens
ugcauugucuugaguuuaaau

SEQ ID NO: 68888 - RNA, 22 nt, Homo sapiens
ugcauuguauuguugacucgcc

SEQ ID NO: 68889 - RNA, 22 nt, Homo sapiens
ugcuuuguugaaaaucauuugg

SEQ ID NO: 68890 - RNA, 22 nt, Homo sapiens
ugcuggugucaucaaggcuuug

SEQ ID NO: 68891 - RNA, 22 nt, Homo sapiens
uauuugauuaacaagagccuaa

SEQ ID NO: 68892 - RNA, 22 nt, Homo sapiens
ucacaugugacauauauauuug

SEQ ID NO: 68893 - RNA, 21 nt, Homo sapiens
ucauauguaucuuugugccuc

SEQ ID NO: 68894 - RNA, 22 nt, Homo sapiens
ucacuuuggguacuauggaaau

SEQ ID NO: 68895 - RNA, 22 nt, Homo sapiens
uccauuugucuauguuucuguu

SEQ ID NO: 68896 - RNA, 22 nt, Homo sapiens
uccauaguugcacucuggagcc

SEQ ID NO: 68897 - RNA, 22 nt, Homo sapiens
ucuggccuagaacaauuaauua

SEQ ID NO: 68898 - RNA, 22 nt, Homo sapiens
ucucuugguugaacaguuugga

SEQ ID NO: 68899 - RNA, 22 nt, Homo sapiens
ucucugauuauugcauuucauu

SEQ ID NO: 68900 - RNA, 22 nt, Homo sapiens
uccauuuguucagcuucaggaa

SEQ ID NO: 68901 - RNA, 21 nt, Homo sapiens
ucucauugugguuuuaauugg

SEQ ID NO: 68902 - RNA, 17 nt, Homo sapiens
ucuugugguucuugaau

SEQ ID NO: 68903 - RNA, 22 nt, Homo sapiens
cagcuguguuauaaacuaccau

SEQ ID NO: 68904 - RNA, 22 nt, Homo sapiens
cagcugaugucgaaugcacucu

SEQ ID NO: 68905 - RNA, 22 nt, Homo sapiens
auugcauaaacacauuucuuau

SEQ ID NO: 68906 - RNA, 22 nt, Homo sapiens
auugcagauucgcuuuguguug

SEQ ID NO: 68907 - RNA, 23 nt, Homo sapiens
auugcagaaucacagagguagug

SEQ ID NO: 68908 - RNA, 22 nt, Homo sapiens
auugcacuccagccuugugaca

SEQ ID NO: 68909 - RNA, 22 nt, Homo sapiens
auuccacuuccacuaguuucuc

SEQ ID NO: 68910 - RNA, 22 nt, Homo sapiens
gagacauugacuuuguuccaga

SEQ ID NO: 68911 - RNA, 22 nt, Homo sapiens
gagauaguguggguacagcuau

SEQ ID NO: 68912 - RNA, 19 nt, Homo sapiens
cuuugguugagcguguugg

SEQ ID NO: 68913 - RNA, 22 nt, Homo sapiens
cuuugguucuguuuauaugcug

SEQ ID NO: 68914 - RNA, 21 nt, Homo sapiens
cuuugguuucugacuugcaua

SEQ ID NO: 68915 - RNA, 22 nt, Homo sapiens
cuuugguugugcucuccacuuu

SEQ ID NO: 68916 - RNA, 18 nt, Homo sapiens
gauguaguauggugugga

SEQ ID NO: 68917 - RNA, 22 nt, Homo sapiens
cuuuaguuaaaauugggguugu

SEQ ID NO: 68918 - RNA, 22 nt, Homo sapiens
cuucaucugguuugugaacuuu

SEQ ID NO: 68919 - RNA, 22 nt, Homo sapiens
auccauugucuaaugcuaagau

SEQ ID NO: 68920 - RNA, 22 nt, Homo sapiens
aucuacuugcugggucucugga

SEQ ID NO: 68921 - RNA, 22 nt, Homo sapiens
auggauugucuccuugugccau

SEQ ID NO: 68922 - RNA, 20 nt, Homo sapiens
auagcauugauggacucaaa

SEQ ID NO: 68923 - RNA, 17 nt, Homo sapiens
acuuuuugaggaggcau

SEQ ID NO: 68924 - RNA, 22 nt, Homo sapiens
agauggguuuucacauguuggc

SEQ ID NO: 68925 - RNA, 22 nt, Homo sapiens
acuccauuucauuuuagcucuu

SEQ ID NO: 68926 - RNA, 22 nt, Homo sapiens
acuaugagacgaaugcaucagu

SEQ ID NO: 68927 - RNA, 20 nt, Homo sapiens
aauaacagccccagggaggu

SEQ ID NO: 68928 - RNA, 22 nt, Homo sapiens
aagggaauguuguggcugguug

SEQ ID NO: 68929 - RNA, 22 nt, Homo sapiens
uuuucaguuuuccagguagccg

SEQ ID NO: 68930 - RNA, 22 nt, Homo sapiens
uuuuaguggacaaagguauuua

SEQ ID NO: 68931 - RNA, 22 nt, Homo sapiens
aauguguuuugaaaucaggaag

SEQ ID NO: 68932 - RNA, 22 nt, Homo sapiens
uuuauagucaggaacuugagga

SEQ ID NO: 68933 - RNA, 22 nt, Homo sapiens
uugugcuuguaacuacauucag

SEQ ID NO: 68934 - RNA, 22 nt, Homo sapiens
uuguccuugagauaguuugcug

SEQ ID NO: 68935 - RNA, 22 nt, Homo sapiens
uugguucucuuagccaucuuaa

SEQ ID NO: 68936 - RNA, 22 nt, Homo sapiens
uuggucugcucugauguuuucu

SEQ ID NO: 68937 - RNA, 22 nt, Homo sapiens
uugucacucuuccuaggguagg

SEQ ID NO: 68938 - RNA, 22 nt, Homo sapiens
uugucacugcacuccagucugg

SEQ ID NO: 68939 - RNA, 22 nt, Homo sapiens
uuguccuugagauaguuugcag

SEQ ID NO: 68940 - RNA, 22 nt, Homo sapiens
uuguccucuccaaaucucaugu

SEQ ID NO: 68941 - RNA, 22 nt, Homo sapiens
uuguccuccacauuugaucagu

SEQ ID NO: 68942 - RNA, 22 nt, Homo sapiens
uugaaguaguacuuuauuauag

SEQ ID NO: 68943 - RNA, 22 nt, Homo sapiens
uugaaguaugaccgcugagaau

SEQ ID NO: 68944 - RNA, 22 nt, Homo sapiens
uugacugggccagacagagauc

SEQ ID NO: 68945 - RNA, 22 nt, Homo sapiens
uugauugacaugucucuguuca

SEQ ID NO: 68946 - RNA, 22 nt, Homo sapiens
uugcacuuccgccugggugaca

SEQ ID NO: 68947 - RNA, 22 nt, Homo sapiens
uugagaugauggauaugcuaau

SEQ ID NO: 68948 - RNA, 22 nt, Homo sapiens
uugagauaucuuggccuuugca

SEQ ID NO: 68949 - RNA, 20 nt, Homo sapiens
uugagaucuguaucugguuu

SEQ ID NO: 68950 - RNA, 22 nt, Homo sapiens
ugucaaguugugguucaauuuu

SEQ ID NO: 68951 - RNA, 22 nt, Homo sapiens
ugguguuugagaagcugauguc

SEQ ID NO: 68952 - RNA, 22 nt, Homo sapiens
uuauugcuaaaucaugaccaca

SEQ ID NO: 68953 - RNA, 22 nt, Homo sapiens
uucacuggagcccaggaguugg

SEQ ID NO: 68954 - RNA, 22 nt, Homo sapiens
uuaugguuuuuagcagaguaau

SEQ ID NO: 68955 - RNA, 22 nt, Homo sapiens
uuaugguuguuaucuugguucg

SEQ ID NO: 68956 - RNA, 22 nt, Homo sapiens
uguguacugcagaguauucugu

SEQ ID NO: 68957 - RNA, 22 nt, Homo sapiens
ugugauugauauauuuacagaa

SEQ ID NO: 68958 - RNA, 20 nt, Homo sapiens
uuagaguaguaugauuuaua

SEQ ID NO: 68959 - RNA, 22 nt, Homo sapiens
uuaagugaauuaucuaacaugu

SEQ ID NO: 68960 - RNA, 22 nt, Homo sapiens
uuuugcaggcauuggaaguuua

SEQ ID NO: 68961 - RNA, 22 nt, Homo sapiens
uuuuugaguaaauauaaauugu

SEQ ID NO: 68962 - RNA, 22 nt, Homo sapiens
uuuuggcuagaaauauaccucc

SEQ ID NO: 68963 - RNA, 22 nt, Homo sapiens
uuuugguguacaauucuaugga

SEQ ID NO: 68964 - RNA, 22 nt, Homo sapiens
uuuuggcuuaaagagaauguau

SEQ ID NO: 68965 - RNA, 19 nt, Homo sapiens
uuuuguacucugugacuug

SEQ ID NO: 68966 - RNA, 22 nt, Homo sapiens
uuuugguuguuggguaagagua

SEQ ID NO: 68967 - RNA, 22 nt, Homo sapiens
uuuugguuaggauggguggcau

SEQ ID NO: 68968 - RNA, 22 nt, Homo sapiens
aaguauuaugaguccuuguuuu

SEQ ID NO: 68969 - RNA, 22 nt, Homo sapiens
aaugacucugccuaaauuucac

SEQ ID NO: 68970 - RNA, 22 nt, Homo sapiens
aacucacauucuuucuugguac

SEQ ID NO: 68971 - RNA, 22 nt, Homo sapiens
aucacugugauuucuacugugc

SEQ ID NO: 68972 - RNA, 22 nt, Homo sapiens
augaaaguguguggaaacuuga

SEQ ID NO: 68973 - RNA, 22 nt, Homo sapiens
aucacuuucuauuucugugcca

SEQ ID NO: 68974 - RNA, 22 nt, Homo sapiens
augacaguguggauuauuguaa

SEQ ID NO: 68975 - RNA, 19 nt, Homo sapiens
augagaacagacuccauuu

SEQ ID NO: 68976 - RNA, 22 nt, Homo sapiens
auugacuugauauauagcugau

SEQ ID NO: 68977 - RNA, 22 nt, Homo sapiens
auugcacuccagccuugggcaa

SEQ ID NO: 68978 - RNA, 22 nt, Homo sapiens
auucaacuaauuauugaagaug

SEQ ID NO: 68979 - RNA, 22 nt, Homo sapiens
augauucugaucuagagcuugg

SEQ ID NO: 68980 - RNA, 21 nt, Homo sapiens
auggugagaaaguagugucaa

SEQ ID NO: 68981 - RNA, 21 nt, Homo sapiens
agagucaucucuaucuguacc

SEQ ID NO: 68982 - RNA, 22 nt, Homo sapiens
acuuugguuuauagaauuuagg

SEQ ID NO: 68983 - RNA, 22 nt, Homo sapiens
acuuuuguuauacagugugaua

SEQ ID NO: 68984 - RNA, 22 nt, Homo sapiens
agugcauuugcaucucaauaua

SEQ ID NO: 68985 - RNA, 22 nt, Homo sapiens
auaaagcuauuccucucuuuuu

SEQ ID NO: 68986 - RNA, 22 nt, Homo sapiens
agcuuguggugaauacugcuag

SEQ ID NO: 68987 - RNA, 22 nt, Homo sapiens
guuuuuggggucacuauuaccg

SEQ ID NO: 68988 - RNA, 22 nt, Homo sapiens
uaacaguguauuccuuuggaca

SEQ ID NO: 68989 - RNA, 22 nt, Homo sapiens
uaaaugacugucaguagaugaa

SEQ ID NO: 68990 - RNA, 22 nt, Homo sapiens
gugugcaugucuuuuuaguagg

SEQ ID NO: 68991 - RNA, 22 nt, Homo sapiens
gugguguuugagcugccaggga

SEQ ID NO: 68992 - RNA, 22 nt, Homo sapiens
gugguuuuaauauucagucuag

SEQ ID NO: 68993 - RNA, 22 nt, Homo sapiens
gugguucuaaaccuuuuuuggu

SEQ ID NO: 68994 - RNA, 22 nt, Homo sapiens
gucuuuggaaaaaaugucuguu

SEQ ID NO: 68995 - RNA, 22 nt, Homo sapiens
gucuuuguuuugauuuaccaga

SEQ ID NO: 68996 - RNA, 17 nt, Homo sapiens
gucuuugguugaguuua

SEQ ID NO: 68997 - RNA, 22 nt, Homo sapiens
gugaaugcauuaagaaggggga

SEQ ID NO: 68998 - RNA, 22 nt, Homo sapiens
gucucuugguuuagagcauuua

SEQ ID NO: 68999 - RNA, 22 nt, Homo sapiens
gucagcaucaccaugucuauga

SEQ ID NO: 69000 - RNA, 18 nt, Homo sapiens
ucaccuugaugcuggguc

SEQ ID NO: 69001 - RNA, 18 nt, Homo sapiens
ucaauguggauguucuuu

SEQ ID NO: 69002 - RNA, 22 nt, Homo sapiens
ucacaauucucaauuugugaaa

SEQ ID NO: 69003 - RNA, 22 nt, Homo sapiens
gaguugagagaguuguuauuuc

SEQ ID NO: 69004 - RNA, 22 nt, Homo sapiens
gcaagugucugagguuuuguau

SEQ ID NO: 69005 - RNA, 22 nt, Homo sapiens
ggagauguuuaaccuuuuaucu

SEQ ID NO: 69006 - RNA, 22 nt, Homo sapiens
gcuccauuuuccauuucucuaa

SEQ ID NO: 69007 - RNA, 22 nt, Homo sapiens
gaaauguugauagugggcauug

SEQ ID NO: 69008 - RNA, 22 nt, Homo sapiens
cuuuuggugugaagaagcucuu

SEQ ID NO: 69009 - RNA, 22 nt, Homo sapiens
cuuuugugauucuucaguuacu

SEQ ID NO: 69010 - RNA, 22 nt, Homo sapiens
cuuuguguaggugccucuggcu

SEQ ID NO: 69011 - RNA, 22 nt, Homo sapiens
gaccaaagaggcaggcauuaga

SEQ ID NO: 69012 - RNA, 22 nt, Homo sapiens
gaggagauauucugcuggaugg

SEQ ID NO: 69013 - RNA, 22 nt, Homo sapiens
caugcagcacacaugucugugc

SEQ ID NO: 69014 - RNA, 22 nt, Homo sapiens
cauugcacuccagcuugggcaa

SEQ ID NO: 69015 - RNA, 22 nt, Homo sapiens
cauugcacuccagucugggcaa

SEQ ID NO: 69016 - RNA, 22 nt, Homo sapiens
cauugcacuccaccuuggguaa

SEQ ID NO: 69017 - RNA, 22 nt, Homo sapiens
auugcacuccagcuugggugac

SEQ ID NO: 69018 - RNA, 22 nt, Homo sapiens
auugcacuggggguuagaauuu

SEQ ID NO: 69019 - RNA, 22 nt, Homo sapiens
auugcagaaaugacagagcgcc

SEQ ID NO: 69020 - RNA, 22 nt, Homo sapiens
cuccauuuggaacagauguccu

SEQ ID NO: 69021 - RNA, 22 nt, Homo sapiens
ccaguuuuucauuuauacuagu

SEQ ID NO: 69022 - RNA, 22 nt, Homo sapiens
ccaguguuuuugaauuccagga

SEQ ID NO: 69023 - RNA, 22 nt, Homo sapiens
cauugguuuuucaggaguauau

SEQ ID NO: 69024 - RNA, 22 nt, Homo sapiens
ccaguguuuggauuagggaugc

SEQ ID NO: 69025 - RNA, 22 nt, Homo sapiens
cugguuguuacaugcuugccag

SEQ ID NO: 69026 - RNA, 22 nt, Homo sapiens
cugagaucaugggucagguggu

SEQ ID NO: 69027 - RNA, 22 nt, Homo sapiens
cugagauaggacucugcuggcu

SEQ ID NO: 69028 - RNA, 22 nt, Homo sapiens
uucuaugguuuaauaguuuggg

SEQ ID NO: 69029 - RNA, 22 nt, Homo sapiens
uuccuguagcgauuuuaguaau

SEQ ID NO: 69030 - RNA, 22 nt, Homo sapiens
uucuauggucacagaugcuuga

SEQ ID NO: 69031 - RNA, 22 nt, Homo sapiens
uugacauugcuguaguguccag

SEQ ID NO: 69032 - RNA, 22 nt, Homo sapiens
uugaccuggagaguacuuugac

SEQ ID NO: 69033 - RNA, 22 nt, Homo sapiens
uugagauaggaacucacuaugc

SEQ ID NO: 69034 - RNA, 17 nt, Homo sapiens
uugagaguauaucuuac

SEQ ID NO: 69035 - RNA, 22 nt, Homo sapiens
uugagauguaagauguuaauau

SEQ ID NO: 69036 - RNA, 22 nt, Homo sapiens
uugagguaguacuuauuauugg

SEQ ID NO: 69037 - RNA, 22 nt, Homo sapiens
uugaggacuggaacacaggucu

SEQ ID NO: 69038 - RNA, 22 nt, Homo sapiens
uuaguucauugugacuggacuc

SEQ ID NO: 69039 - RNA, 22 nt, Homo sapiens
uuaguagcacagaguaucagca

SEQ ID NO: 69040 - RNA, 22 nt, Homo sapiens
uuagcucaguuggugagagcgu

SEQ ID NO: 69041 - RNA, 22 nt, Homo sapiens
uuacugcauaauuccugggaag

SEQ ID NO: 69042 - RNA, 22 nt, Homo sapiens
uuaauguaauugauugauugac

SEQ ID NO: 69043 - RNA, 22 nt, Homo sapiens
uuaaguagcugggcaugguggu

SEQ ID NO: 69044 - RNA, 22 nt, Homo sapiens
uguugguuaaaucagguuuuaa

SEQ ID NO: 69045 - RNA, 22 nt, Homo sapiens
uugauauucugagaagcugaag

SEQ ID NO: 69046 - RNA, 22 nt, Homo sapiens
uugucaugguuaauuuuaugua

SEQ ID NO: 69047 - RNA, 22 nt, Homo sapiens
uugucuugcagcuuaggcauca

SEQ ID NO: 69048 - RNA, 22 nt, Homo sapiens
uugugucccuacccaaaucuca

SEQ ID NO: 69049 - RNA, 22 nt, Homo sapiens
uugugaauggugccucaguaaa

SEQ ID NO: 69050 - RNA, 22 nt, Homo sapiens
uuguuauguaucucaagauaaa

SEQ ID NO: 69051 - RNA, 22 nt, Homo sapiens
uuguuauguuggucaguaaugu

SEQ ID NO: 69052 - RNA, 23 nt, Homo sapiens
uuuuuguguuucauggaaauagg

SEQ ID NO: 69053 - RNA, 22 nt, Homo sapiens
uuuugguuuuauccagggucuc

SEQ ID NO: 69054 - RNA, 22 nt, Homo sapiens
aacauugaacuuggcacaccca

SEQ ID NO: 69055 - RNA, 22 nt, Homo sapiens
uuuuuugguaauugaacaauga

SEQ ID NO: 69056 - RNA, 22 nt, Homo sapiens
uuuugguauacacaaggguccu

SEQ ID NO: 69057 - RNA, 22 nt, Homo sapiens
uuuugcuugugaauagccacau

SEQ ID NO: 69058 - RNA, 23 nt, Homo sapiens
uuuguacuaugucaguuuagaua

SEQ ID NO: 69059 - RNA, 22 nt, Homo sapiens
uuugcugagucugacuucaugg

SEQ ID NO: 69060 - RNA, 22 nt, Homo sapiens
ugcauguucuuacucauacaug

SEQ ID NO: 69061 - RNA, 22 nt, Homo sapiens
ugcauuguuccgaauguguccu

SEQ ID NO: 69062 - RNA, 22 nt, Homo sapiens
ugcuggugauuaaauccugaag

SEQ ID NO: 69063 - RNA, 23 nt, Homo sapiens
ugguuuguaagagauggacugga

SEQ ID NO: 69064 - RNA, 22 nt, Homo sapiens
ugagaucucauuaugguuuuaa

SEQ ID NO: 69065 - RNA, 22 nt, Homo sapiens
ugagaucugucuuuauaguauu

SEQ ID NO: 69066 - RNA, 23 nt, Homo sapiens
ugacugaguauauguuuggugcu

SEQ ID NO: 69067 - RNA, 22 nt, Homo sapiens
ucucuuggcggaaguugcagug

SEQ ID NO: 69068 - RNA, 22 nt, Homo sapiens
ucucuguuuauuuuugguguau

SEQ ID NO: 69069 - RNA, 22 nt, Homo sapiens
ucacuguguauguauaugcagg

SEQ ID NO: 69070 - RNA, 22 nt, Homo sapiens
ucuggccuacaaguaauuuuau

SEQ ID NO: 69071 - RNA, 22 nt, Homo sapiens
ucugagguuaaauuuuauaguu

SEQ ID NO: 69072 - RNA, 22 nt, Homo sapiens
ucuuggguuugccuugcugcug

SEQ ID NO: 69073 - RNA, 22 nt, Homo sapiens
ucuugcaccuacaugcuuuguc

SEQ ID NO: 69074 - RNA, 22 nt, Homo sapiens
ucuuggguggauucauucuuuc

SEQ ID NO: 69075 - RNA, 22 nt, Homo sapiens
augaaagugauaaaugucucua

SEQ ID NO: 69076 - RNA, 22 nt, Homo sapiens
augagauaaaccaucucuuaag

SEQ ID NO: 69077 - RNA, 22 nt, Homo sapiens
auaauagguugauugacauugc

SEQ ID NO: 69078 - RNA, 22 nt, Homo sapiens
aggugcuaucugguuuuauagu

SEQ ID NO: 69079 - RNA, 22 nt, Homo sapiens
aguuuuugcugauagcaugcuu

SEQ ID NO: 69080 - RNA, 22 nt, Homo sapiens
aguguuuuuacaagcacucugg

SEQ ID NO: 69081 - RNA, 22 nt, Homo sapiens
aauuugucaccucucucccuuu

SEQ ID NO: 69082 - RNA, 22 nt, Homo sapiens
acuuugcuuagagggcauuaaa

SEQ ID NO: 69083 - RNA, 22 nt, Homo sapiens
agcucuauuagaagccgugggu

SEQ ID NO: 69084 - RNA, 22 nt, Homo sapiens
agcugcacaaauggaugugagg

SEQ ID NO: 69085 - RNA, 22 nt, Homo sapiens
gauugguugaaaguagaauacu

SEQ ID NO: 69086 - RNA, 20 nt, Homo sapiens
gcaugagucuuuauaguaga

SEQ ID NO: 69087 - RNA, 22 nt, Homo sapiens
gaucuguuuuccuauuguuugu

SEQ ID NO: 69088 - RNA, 22 nt, Homo sapiens
cuucuguuaguucugauaacuu

SEQ ID NO: 69089 - RNA, 22 nt, Homo sapiens
cuuuugcugggucagcgguggu

SEQ ID NO: 69090 - RNA, 22 nt, Homo sapiens
cuuuuggugguucugaugcagg

SEQ ID NO: 69091 - RNA, 22 nt, Homo sapiens
cuugcagagucauucuaauuuc

SEQ ID NO: 69092 - RNA, 22 nt, Homo sapiens
auuuugguuacauaguugagcu

SEQ ID NO: 69093 - RNA, 22 nt, Homo sapiens
auuugucacuauguggcuaaua

SEQ ID NO: 69094 - RNA, 22 nt, Homo sapiens
auuugguugggugcgguggcuu

SEQ ID NO: 69095 - RNA, 22 nt, Homo sapiens
auuuuuggauauagggaaggau

SEQ ID NO: 69096 - RNA, 22 nt, Homo sapiens
cagauaguuguagauaugcagc

SEQ ID NO: 69097 - RNA, 22 nt, Homo sapiens
auugcauuuucagguuggucug

SEQ ID NO: 69098 - RNA, 23 nt, Homo sapiens
auugauagugccuuugugcuaau

SEQ ID NO: 69099 - RNA, 22 nt, Homo sapiens
augucuuucauagagacccaga

SEQ ID NO: 69100 - RNA, 22 nt, Homo sapiens
auuauuagucggccagcuguua

SEQ ID NO: 69101 - RNA, 22 nt, Homo sapiens
cuccaguuucagaaucccaugu

SEQ ID NO: 69102 - RNA, 22 nt, Homo sapiens
cccauuguuaaguugaguaucu

SEQ ID NO: 69103 - RNA, 21 nt, Homo sapiens
ccuugagaacaucaauuugcu

SEQ ID NO: 69104 - RNA, 22 nt, Homo sapiens
ccaguguucuggaaggcugagu

SEQ ID NO: 69105 - RNA, 22 nt, Homo sapiens
ccaguuuucucacuguugcagu

SEQ ID NO: 69106 - RNA, 22 nt, Homo sapiens
ccaguuuucaagauaaugguuu

SEQ ID NO: 69107 - RNA, 22 nt, Homo sapiens
cauugcacuccaucuugggcaa

SEQ ID NO: 69108 - RNA, 22 nt, Homo sapiens
cauugcacugcuucuugggugu

SEQ ID NO: 69109 - RNA, 22 nt, Homo sapiens
uauuauuguccuucuauaccca

SEQ ID NO: 69110 - RNA, 22 nt, Homo sapiens
uauugcagugagauccaucugg

SEQ ID NO: 69111 - RNA, 22 nt, Homo sapiens
uauugcuuuacucucuuauccu

SEQ ID NO: 69112 - RNA, 22 nt, Homo sapiens
uaugguuuuggaauccugcaga

SEQ ID NO: 69113 - RNA, 22 nt, Homo sapiens
uaugaucacuacagcagggaug

SEQ ID NO: 69114 - RNA, 21 nt, Homo sapiens
uaacagcuccacuccauucuc

SEQ ID NO: 69115 - RNA, 22 nt, Homo sapiens
uacuacuuucugacaucuuuaa

SEQ ID NO: 69116 - RNA, 22 nt, Homo sapiens
uagauuguaauaugcagaaugg

SEQ ID NO: 69117 - RNA, 22 nt, Homo sapiens
uagauuauccggcugggacaau

SEQ ID NO: 69118 - RNA, 22 nt, Homo sapiens
gugugauuguuaauuuuaggug

SEQ ID NO: 69119 - RNA, 22 nt, Homo sapiens
gugugacugcucuauuagggcg

SEQ ID NO: 69120 - RNA, 22 nt, Homo sapiens
gugugacuagucaugccugaau

SEQ ID NO: 69121 - RNA, 22 nt, Homo sapiens
guagcaccagugcucuucucaa

SEQ ID NO: 69122 - RNA, 22 nt, Homo sapiens
ugaguucuuuguagauucugug

SEQ ID NO: 69123 - RNA, 22 nt, Homo sapiens
ugaguuguugcauucuuggugu

SEQ ID NO: 69124 - RNA, 20 nt, Homo sapiens
ugauaaguugcacuuuccuu

SEQ ID NO: 69125 - RNA, 22 nt, Homo sapiens
ugagcuauguucuucuuguuuu

SEQ ID NO: 69126 - RNA, 22 nt, Homo sapiens
ugcaggauguucaguaauuucc

SEQ ID NO: 69127 - RNA, 22 nt, Homo sapiens
ugcagcacaguagguuugcaau

SEQ ID NO: 69128 - RNA, 22 nt, Homo sapiens
ugaugguguuaccaucuuuacu

SEQ ID NO: 69129 - RNA, 22 nt, Homo sapiens
uggcauuuuguuuuagaauuag

SEQ ID NO: 69130 - RNA, 22 nt, Homo sapiens
uggauugcaaaaucuuuuugag

SEQ ID NO: 69131 - RNA, 22 nt, Homo sapiens
ucuuuuguucuauucaggccuu

SEQ ID NO: 69132 - RNA, 22 nt, Homo sapiens
ucuuugguaauggaugucugau

SEQ ID NO: 69133 - RNA, 22 nt, Homo sapiens
ucuuugguauugugaauagugu

SEQ ID NO: 69134 - RNA, 22 nt, Homo sapiens
ucuguguuugaucaagauugua

SEQ ID NO: 69135 - RNA, 21 nt, Homo sapiens
ucuguguugaucucacuggga

SEQ ID NO: 69136 - RNA, 22 nt, Homo sapiens
ucuuagguaagaaauuuuaaca

SEQ ID NO: 69137 - RNA, 22 nt, Homo sapiens
ugaagagucuaaaucugucuuc

SEQ ID NO: 69138 - RNA, 22 nt, Homo sapiens
ugacaucguugccauguuaugc

SEQ ID NO: 69139 - RNA, 18 nt, Homo sapiens
ugacaucauuuagaaagg

SEQ ID NO: 69140 - RNA, 18 nt, Homo sapiens
ugacaguuucuuuauauu

SEQ ID NO: 69141 - RNA, 22 nt, Homo sapiens
ugacugguguuuaaugagucaa

SEQ ID NO: 69142 - RNA, 23 nt, Homo sapiens
ucacuagaguccuggaguuugag

SEQ ID NO: 69143 - RNA, 22 nt, Homo sapiens
ucagaguguuuuccaacuuggu

SEQ ID NO: 69144 - RNA, 18 nt, Homo sapiens
ucaccuugcuuuuagaac

SEQ ID NO: 69145 - RNA, 22 nt, Homo sapiens
uccugauacgguugcaguucuc

SEQ ID NO: 69146 - RNA, 17 nt, Homo sapiens
uucucaguucugaucuc

SEQ ID NO: 69147 - RNA, 22 nt, Homo sapiens
uucuagagagaagacuuaagcu

SEQ ID NO: 69148 - RNA, 22 nt, Homo sapiens
uuauuugguuauuguaauuggg

SEQ ID NO: 69149 - RNA, 21 nt, Homo sapiens
uuagugcucaguuugacaaaa

SEQ ID NO: 69150 - RNA, 22 nt, Homo sapiens
uucaggguggagaguaugaggu

SEQ ID NO: 69151 - RNA, 21 nt, Homo sapiens
uucauaaggcuucucuccugu

SEQ ID NO: 69152 - RNA, 22 nt, Homo sapiens
uguucuugagccuuuagaccua

SEQ ID NO: 69153 - RNA, 22 nt, Homo sapiens
uuaagacaccaaucauuggauu

SEQ ID NO: 69154 - RNA, 22 nt, Homo sapiens
uuaauuguaucuauagauguca

SEQ ID NO: 69155 - RNA, 22 nt, Homo sapiens
uuaauucugucugcccucaucc

SEQ ID NO: 69156 - RNA, 21 nt, Homo sapiens
uguuuuugcuguguaucucuc

SEQ ID NO: 69157 - RNA, 22 nt, Homo sapiens
uugauguguuuccaggauuugu

SEQ ID NO: 69158 - RNA, 22 nt, Homo sapiens
uugcauuagugugguacauuug

SEQ ID NO: 69159 - RNA, 22 nt, Homo sapiens
uugauaugacuaucuuuuaugu

SEQ ID NO: 69160 - RNA, 22 nt, Homo sapiens
uuggauugugaaaguauucucu

SEQ ID NO: 69161 - RNA, 22 nt, Homo sapiens
uuggcauuuauucuaaggucaa

SEQ ID NO: 69162 - RNA, 22 nt, Homo sapiens
uuugaauggaaguuuugugaaa

SEQ ID NO: 69163 - RNA, 22 nt, Homo sapiens
uuugaguuugaggugcugauga

SEQ ID NO: 69164 - RNA, 22 nt, Homo sapiens
uuguuugguugaguauggaagu

SEQ ID NO: 69165 - RNA, 23 nt, Homo sapiens
uugugucccuacccaaaucucau

SEQ ID NO: 69166 - RNA, 22 nt, Homo sapiens
uugugcauguauauuaguucac

SEQ ID NO: 69167 - RNA, 22 nt, Homo sapiens
uuugguuauuugaaacuagcau

SEQ ID NO: 69168 - RNA, 22 nt, Homo sapiens
uuuucaguggccauaguggaga

SEQ ID NO: 69169 - RNA, 17 nt, Human metapneumovirus
uuaguuuuaauaccuca

SEQ ID NO: 69170 - RNA, 22 nt, Homo sapiens
cacagcuagucaaugguagaca

SEQ ID NO: 69171 - RNA, 22 nt, Homo sapiens
ucagguugcuaaguauaauauu

SEQ ID NO: 69172 - RNA, 20 nt, Homo sapiens
aagagcucaccagaauaucu

SEQ ID NO: 69173 - RNA, 22 nt, Homo sapiens
uucuggcucaggucaacacuuc

SEQ ID NO: 69174 - RNA, 22 nt, Homo sapiens
uuaaaugcacauacuugagaaa

SEQ ID NO: 69175 - RNA, 22 nt, Homo sapiens
ugagacgucuucucuucuucaa

SEQ ID NO: 69176 - RNA, 22 nt, Homo sapiens
agauacauuggauaaugguggg

SEQ ID NO: 69177 - RNA, 22 nt, Homo sapiens
uuuacaguuuucuaggcuacca

SEQ ID NO: 69178 - RNA, 22 nt, Homo sapiens
agagauaguuuccaacucauac

SEQ ID NO: 69179 - RNA, 22 nt, Homo sapiens
gagaacagagauaauuuuacuu

SEQ ID NO: 69180 - RNA, 18 nt, Homo sapiens
uucaguuuguaucugggg

SEQ ID NO: 69181 - RNA, 20 nt, Homo sapiens
ugcugcacuuaagcaugggc

SEQ ID NO: 69182 - RNA, 22 nt, Homo sapiens
aggaaguaauaaguuugguucu

SEQ ID NO: 69183 - RNA, 22 nt, Homo sapiens
guugcaaaguaauugugguuuu

SEQ ID NO: 69184 - RNA, 22 nt, Homo sapiens
auggcugugaaaugguaggugg

SEQ ID NO: 69185 - RNA, 22 nt, Homo sapiens
auuauaugucaucacagacacc

SEQ ID NO: 69186 - RNA, 22 nt, Homo sapiens
uccacagugguugaacuaguaa

SEQ ID NO: 69187 - RNA, 22 nt, Homo sapiens
uagagguucuaagauucucaga

SEQ ID NO: 69188 - RNA, 22 nt, Homo sapiens
ucaccuuacuugcuucugaacu

SEQ ID NO: 69189 - RNA, 22 nt, Homo sapiens
ugugccacuccaggaggcuguu

SEQ ID NO: 69190 - RNA, 22 nt, Homo sapiens
ugagagcugguuguuuaaagga

SEQ ID NO: 69191 - RNA, 22 nt, Homo sapiens
cugaauguuucacucugaaaug

SEQ ID NO: 69192 - RNA, 22 nt, Homo sapiens
aaggcucuuucaacguaaauua

SEQ ID NO: 69193 - RNA, 22 nt, Homo sapiens
aggagaauugguucuucuugau

SEQ ID NO: 69194 - RNA, 22 nt, Homo sapiens
ugauauguggcuauugagauug

SEQ ID NO: 69195 - RNA, 22 nt, Homo sapiens
auccaagagacugaugacuucc

SEQ ID NO: 69196 - RNA, 22 nt, Homo sapiens
acaaaguauggaauguuggugu

SEQ ID NO: 69197 - RNA, 22 nt, Homo sapiens
uaaaugcuugagaugauggaua

SEQ ID NO: 69198 - RNA, 22 nt, Homo sapiens
ucaguaguuuuuuuacuaggug

SEQ ID NO: 69199 - RNA, 22 nt, Homo sapiens
guaguuuaucagaaagaauagg

SEQ ID NO: 69200 - RNA, 22 nt, Homo sapiens
gcaugaugaauaauaucacaag

SEQ ID NO: 69201 - RNA, 22 nt, Homo sapiens
ugacaugagauuugggaggggc

SEQ ID NO: 69202 - RNA, 22 nt, Homo sapiens
cuauggcagccacggccuggag

SEQ ID NO: 69203 - RNA, 22 nt, Homo sapiens
gagagcauuaagccaucaucau

SEQ ID NO: 69204 - RNA, 22 nt, Homo sapiens
aucaccauguguacauuagacc

SEQ ID NO: 69205 - RNA, 22 nt, Homo sapiens
uggaguguaaauuaguucagcc

SEQ ID NO: 69206 - RNA, 22 nt, Homo sapiens
gaugauauuugagucauuagaa

SEQ ID NO: 69207 - RNA, 22 nt, Homo sapiens
aucugcaaagcugggcugagac

SEQ ID NO: 69208 - RNA, 18 nt, Homo sapiens
cagugcaauacaggagag

SEQ ID NO: 69209 - RNA, 22 nt, Homo sapiens
augagaauguaaguuaaugaaa

SEQ ID NO: 69210 - RNA, 22 nt, Homo sapiens
aucauaucauuggugaacagug

SEQ ID NO: 69211 - RNA, 22 nt, Homo sapiens
acacaaugguaaguguuugugu

SEQ ID NO: 69212 - RNA, 22 nt, Homo sapiens
uugauaugacuaucuuuuaugu

SEQ ID NO: 69213 - RNA, 22 nt, Homo sapiens
agaugauguuucuggcacauga

SEQ ID NO: 69214 - RNA, 22 nt, Homo sapiens
ucaguaaaugcuguucucuuuu

SEQ ID NO: 69215 - RNA, 22 nt, Homo sapiens
aggugguuuuucaacacacacu

SEQ ID NO: 69216 - RNA, 22 nt, Homo sapiens
gauauguguaucuauguacaug

SEQ ID NO: 69217 - RNA, 19 nt, Homo sapiens
uugauaugauuaggagcac

SEQ ID NO: 69218 - RNA, 22 nt, Homo sapiens
ugaagugaagcaguaguguggg

SEQ ID NO: 69219 - RNA, 22 nt, Homo sapiens
uugucccauggggucuuccuuu

SEQ ID NO: 69220 - RNA, 22 nt, Homo sapiens
aguacugucugguuaccugaca

SEQ ID NO: 69221 - RNA, 22 nt, Homo sapiens
gccaguguuuuauugagaauuu

SEQ ID NO: 69222 - RNA, 22 nt, Homo sapiens
auaaauucauuuaagcuccuua

SEQ ID NO: 69223 - RNA, 22 nt, Homo sapiens
ucuuuugggccucuugucagac

SEQ ID NO: 69224 - RNA, 22 nt, Homo sapiens
uuauauguuucuguuuggaggc

SEQ ID NO: 69225 - RNA, 22 nt, Homo sapiens
guacaguacugaaugaauguau

SEQ ID NO: 69226 - RNA, 22 nt, Homo sapiens
acaccuguggucccaguaacuu

SEQ ID NO: 69227 - RNA, 22 nt, Homo sapiens
aagagcucucuguagcauguga

SEQ ID NO: 69228 - RNA, 22 nt, Homo sapiens
aggugguuuuaggcagagacau

SEQ ID NO: 69229 - RNA, 22 nt, Homo sapiens
uugaaugaaaugaugucauuug

SEQ ID NO: 69230 - RNA, 21 nt, Homo sapiens
ccuccauuuguauucuugccc

SEQ ID NO: 69231 - RNA, 22 nt, Homo sapiens
uuuuaguggacaaagguauuua

SEQ ID NO: 69232 - RNA, 22 nt, Homo sapiens
caaggaauucucaauagaguua

SEQ ID NO: 69233 - RNA, 22 nt, Homo sapiens
cagcuaguaauuuauugaagau

SEQ ID NO: 69234 - RNA, 22 nt, Homo sapiens
ugagauaacuaaaaacauuuug

SEQ ID NO: 69235 - RNA, 22 nt, Homo sapiens
augucaaagaggaaaacuggau

SEQ ID NO: 69236 - RNA, 22 nt, Homo sapiens
acacuguauccuucuguccuuu

SEQ ID NO: 69237 - RNA, 22 nt, Homo sapiens
gauguguuuguuucuggaggag

SEQ ID NO: 69238 - RNA, 22 nt, Homo sapiens
cuuugcaaaacauugagaccuc

SEQ ID NO: 69239 - RNA, 22 nt, Homo sapiens
gugcaaacuccaggucucuuca

SEQ ID NO: 69240 - RNA, 22 nt, Homo sapiens
acaaaguaggcagugggcugga

SEQ ID NO: 69241 - RNA, 22 nt, Homo sapiens
ucagguagcuagauuaugugag

SEQ ID NO: 69242 - RNA, 22 nt, Homo sapiens
cugcaguaaccacuguaggugu

SEQ ID NO: 69243 - RNA, 22 nt, Homo sapiens
augcaaacaucauagaguguac

SEQ ID NO: 69244 - RNA, 22 nt, Homo sapiens
augaucauggaaguuuuccugu

SEQ ID NO: 69245 - RNA, 22 nt, Homo sapiens
gaauggaacugacuauagcuga

SEQ ID NO: 69246 - RNA, 21 nt, Homo sapiens
uacaaugcacaggagagccuc

SEQ ID NO: 69247 - RNA, 22 nt, Homo sapiens
uuguguuugaugcugacacgca

SEQ ID NO: 69248 - RNA, 22 nt, Homo sapiens
caaaguaauugcuguuuugcca

SEQ ID NO: 69249 - RNA, 22 nt, Homo sapiens
ugagauagaaaacauaggagaa

SEQ ID NO: 69250 - RNA, 22 nt, Homo sapiens
uaaagauaaggcucgcuuggau

SEQ ID NO: 69251 - RNA, 20 nt, Homo sapiens
augcaaacccugcuuugugg

SEQ ID NO: 69252 - RNA, 22 nt, Homo sapiens
uguuauugagguuacuuauaag

SEQ ID NO: 69253 - RNA, 22 nt, Homo sapiens
uuuugcaauauguuccugaaua

SEQ ID NO: 69254 - RNA, 22 nt, Homo sapiens
uucauaguuuauacugauauuu

SEQ ID NO: 69255 - RNA, 22 nt, Homo sapiens
uaaauggauauugccaucuccu

SEQ ID NO: 69256 - RNA, 22 nt, Homo sapiens
uuuaaaguuagaaggaaagggc

SEQ ID NO: 69257 - RNA, 22 nt, Homo sapiens
cuagaguacuuaccacagcaug

SEQ ID NO: 69258 - RNA, 22 nt, Homo sapiens
uuagaugaaugucucuuaaaca

SEQ ID NO: 69259 - RNA, 22 nt, Homo sapiens
auucaagugaugcagcuguuuu

SEQ ID NO: 69260 - RNA, 22 nt, Homo sapiens
uuacaguagaugaggguauaau

SEQ ID NO: 69261 - RNA, 22 nt, Homo sapiens
uuuuuuaguuagcugggcauga

SEQ ID NO: 69262 - RNA, 22 nt, Homo sapiens
cagguaguauuugguuacauaa

SEQ ID NO: 69263 - RNA, 22 nt, Homo sapiens
uggaguguuggggcaggaucuc

SEQ ID NO: 69264 - RNA, 22 nt, Homo sapiens
augauguguguuuaagaugucu

SEQ ID NO: 69265 - RNA, 22 nt, Homo sapiens
uuuacagucuuuugugugaguc

SEQ ID NO: 69266 - RNA, 20 nt, Homo sapiens
ugucccaaccccauggguuc

SEQ ID NO: 69267 - RNA, 22 nt, Homo sapiens
uuaguagcacagaguaucagca

SEQ ID NO: 69268 - RNA, 18 nt, Homo sapiens
aaacagugucucuuucug

SEQ ID NO: 69269 - RNA, 22 nt, Homo sapiens
uucaagucuuggcuuugccacc

SEQ ID NO: 69270 - RNA, 22 nt, Homo sapiens
uuaaaugcauagaauguguagu

SEQ ID NO: 69271 - RNA, 20 nt, Homo sapiens
agucaguuuauuuucucucu

SEQ ID NO: 69272 - RNA, 22 nt, Homo sapiens
ggcaagaagaacuauaacuuuu

SEQ ID NO: 69273 - RNA, 22 nt, Homo sapiens
ugagagcugcauucuugaaagc

SEQ ID NO: 69274 - RNA, 22 nt, Homo sapiens
uuggcaaauagguuuuauugca

SEQ ID NO: 69275 - RNA, 22 nt, Homo sapiens
uaaacacucacuucauagccau

SEQ ID NO: 69276 - RNA, 22 nt, Homo sapiens
uucauguagucaucauccugcu

SEQ ID NO: 69277 - RNA, 22 nt, Homo sapiens
uggagugucaguuuccagaguu

SEQ ID NO: 69278 - RNA, 22 nt, Homo sapiens
uccagugcauucagacacuugg

SEQ ID NO: 69279 - RNA, 22 nt, Homo sapiens
uacaguauuaugagugauugaa

SEQ ID NO: 69280 - RNA, 21 nt, Homo sapiens
gugcaaacaucauagaaugua

SEQ ID NO: 69281 - RNA, 20 nt, Homo sapiens
ugaaggaggucauuuauacc

SEQ ID NO: 69282 - RNA, 18 nt, Homo sapiens
aagagcucagcacagguu

SEQ ID NO: 69283 - RNA, 22 nt, Homo sapiens
gagaugugugugauuauauaau

SEQ ID NO: 69284 - RNA, 22 nt, Homo sapiens
guaagagaauggguuacuuucc

SEQ ID NO: 69285 - RNA, 22 nt, Homo sapiens
uccagaguggugaugcuggggc

SEQ ID NO: 69286 - RNA, 22 nt, Homo sapiens
aaauucaugucaccucuaggua

SEQ ID NO: 69287 - RNA, 22 nt, Homo sapiens
auucaaagugcauguucccacu

SEQ ID NO: 69288 - RNA, 22 nt, Homo sapiens
gugagcuccucuucugcugcag

SEQ ID NO: 69289 - RNA, 20 nt, Homo sapiens
agguagauagaugauagaua

SEQ ID NO: 69290 - RNA, 22 nt, Homo sapiens
agagagcuugggguguuaaauu

SEQ ID NO: 69291 - RNA, 22 nt, Homo sapiens
auuaagugcuugcagaagucca

SEQ ID NO: 69292 - RNA, 22 nt, Homo sapiens
uauucacuguaucauugauggg

SEQ ID NO: 69293 - RNA, 22 nt, Homo sapiens
ucacagccuaguuuuauacauu

SEQ ID NO: 69294 - RNA, 22 nt, Homo sapiens
uuguauaggcucaguaagaauc

SEQ ID NO: 69295 - RNA, 22 nt, Homo sapiens
ugagugagguucuacucuguga

SEQ ID NO: 69296 - RNA, 22 nt, Homo sapiens
gcagugugugaggaauuugggu

SEQ ID NO: 69297 - RNA, 22 nt, Homo sapiens
gagaaugagaggggaaggccac

SEQ ID NO: 69298 - RNA, 22 nt, Homo sapiens
uccacagugguggaauuguuca

SEQ ID NO: 69299 - RNA, 22 nt, Homo sapiens
gugauguguuucaacagcuccu

SEQ ID NO: 69300 - RNA, 22 nt, Homo sapiens
uguuacaguguaggccuugggu

SEQ ID NO: 69301 - RNA, 22 nt, Homo sapiens
agagagcuuuaacuacccauuu

SEQ ID NO: 69302 - RNA, 22 nt, Homo sapiens
guacaguaguaaaagugaauga

SEQ ID NO: 69303 - RNA, 22 nt, Homo sapiens
acaugagacuggguuuguaggg

SEQ ID NO: 69304 - RNA, 22 nt, Homo sapiens
cuagguuauacucugaaauggu

SEQ ID NO: 69305 - RNA, 19 nt, Homo sapiens
gucaaagucgguauucaaa

SEQ ID NO: 69306 - RNA, 22 nt, Homo sapiens
ugcugcaaacaugagaggaagu

SEQ ID NO: 69307 - RNA, 22 nt, Homo sapiens
ucuuagguaagaaauuuuaaca

SEQ ID NO: 69308 - RNA, 22 nt, Homo sapiens
aggugcacucagaaaacagaua

SEQ ID NO: 69309 - RNA, 20 nt, Homo sapiens
cuaaucaucccagaagaaau

SEQ ID NO: 69310 - RNA, 22 nt, Homo sapiens
aaauggauuaaguucacuugcu

SEQ ID NO: 69311 - RNA, 19 nt, Homo sapiens
ggaaaugucuauuaagauc

SEQ ID NO: 69312 - RNA, 22 nt, Homo sapiens
auaucccaguguguaaacacug

SEQ ID NO: 69313 - RNA, 21 nt, Homo sapiens
uucuauggucagaauucaaua

SEQ ID NO: 69314 - RNA, 22 nt, Homo sapiens
gauaugugauaagaguuaucuu

SEQ ID NO: 69315 - RNA, 22 nt, Homo sapiens
gcaugguaguaaccuacauuug

SEQ ID NO: 69316 - RNA, 22 nt, Homo sapiens
acagguacaagggauuaggaug

SEQ ID NO: 69317 - RNA, 22 nt, Homo sapiens
gcuguuugccgccaucgcagac

SEQ ID NO: 69318 - RNA, 22 nt, Homo sapiens
auacaguaucuucuggcaagca

SEQ ID NO: 69319 - RNA, 22 nt, Homo sapiens
uucauguaauauauuucaggcc

SEQ ID NO: 69320 - RNA, 22 nt, Homo sapiens
uuaugaaguagguuaagagcag

SEQ ID NO: 69321 - RNA, 22 nt, Homo sapiens
auagaaucaucugugcacuagu

SEQ ID NO: 69322 - RNA, 22 nt, Homo sapiens
acacugucugaugaaaguaguu

SEQ ID NO: 69323 - RNA, 22 nt, Homo sapiens
uuguaaaguucucucccgaaaa

SEQ ID NO: 69324 - RNA, 22 nt, Homo sapiens
auuaacaucuagaguuuuggug

SEQ ID NO: 69325 - RNA, 22 nt, Homo sapiens
uggacuuuaauaaaagggaaau

SEQ ID NO: 69326 - RNA, 22 nt, Homo sapiens
guuuaacugguacuucaagucu

SEQ ID NO: 69327 - RNA, 22 nt, Homo sapiens
ucugagguuacugcuuuguaga

SEQ ID NO: 69328 - RNA, 22 nt, Homo sapiens
gaaauguauuaaugaguugaaa

SEQ ID NO: 69329 - RNA, 22 nt, Homo sapiens
uuaagggaggagcuucaagaug

SEQ ID NO: 69330 - RNA, 22 nt, Homo sapiens
gauaaagauagcaauagggaca

SEQ ID NO: 69331 - RNA, 22 nt, Homo sapiens
ugaaauacuuaauuucuccaug

SEQ ID NO: 69332 - RNA, 22 nt, Homo sapiens
auugagucauuucaaauccaag

SEQ ID NO: 69333 - RNA, 22 nt, Homo sapiens
gagaaguaaauuuauuugcaaa

SEQ ID NO: 69334 - RNA, 18 nt, Homo sapiens
ugagaucagcaucaaggg

SEQ ID NO: 69335 - RNA, 22 nt, Homo sapiens
aagguuguauuuaauauacugu

SEQ ID NO: 69336 - RNA, 22 nt, Homo sapiens
augguauuuugugauaccuugu

SEQ ID NO: 69337 - RNA, 22 nt, Homo sapiens
acaagugcuuuuccuggagaca

SEQ ID NO: 69338 - RNA, 22 nt, Homo sapiens
uugcaaacaucuuguuucacau

SEQ ID NO: 69339 - RNA, 19 nt, Homo sapiens
aagugaaugcuuuguucac

SEQ ID NO: 69340 - RNA, 22 nt, Homo sapiens
gagccuguaggaggagaggugg

SEQ ID NO: 69341 - RNA, 22 nt, Homo sapiens
acacuguugacauuuuguagug

SEQ ID NO: 69342 - RNA, 22 nt, Homo sapiens
uuucacagcugucuuccgucuc

SEQ ID NO: 69343 - RNA, 22 nt, Homo sapiens
auaugcaaauccauagagacag

SEQ ID NO: 69344 - RNA, 22 nt, Homo sapiens
auaaaguagaggugaggugcau

SEQ ID NO: 69345 - RNA, 19 nt, Homo sapiens
agaaucuaaauuauuucug

SEQ ID NO: 69346 - RNA, 22 nt, Homo sapiens
gccuagagaguuaucaggcugu

SEQ ID NO: 69347 - RNA, 22 nt, Homo sapiens
ugagaaacuaaguaaugaguaa

SEQ ID NO: 69348 - RNA, 22 nt, Homo sapiens
gagacauugacuuuguuccaga

SEQ ID NO: 69349 - RNA, 22 nt, Homo sapiens
uagagcucaucuucuuuaaacu

SEQ ID NO: 69350 - RNA, 22 nt, Homo sapiens
uucaaggacuaaggauuuuugg

SEQ ID NO: 69351 - RNA, 20 nt, Homo sapiens
aucaaagacuuagaggggga

SEQ ID NO: 69352 - RNA, 21 nt, Homo sapiens
ucaucaagcuguagacaugau

SEQ ID NO: 69353 - RNA, 22 nt, Homo sapiens
auuuggguaaugagugcaaggg

SEQ ID NO: 69354 - RNA, 20 nt, Homo sapiens
uaucacauggggagaaaccu

SEQ ID NO: 69355 - RNA, 22 nt, Homo sapiens
augauaugagaaaggaucaaca

SEQ ID NO: 69356 - RNA, 18 nt, Homo sapiens
uuuacaguagaaggacuu

SEQ ID NO: 69357 - RNA, 22 nt, Homo sapiens
uuuuaugggcuauuugcauuag

SEQ ID NO: 69358 - RNA, 22 nt, Homo sapiens
aguguuuuuaucaugaaagggu

SEQ ID NO: 69359 - RNA, 22 nt, Homo sapiens
uuagugaaugggugugauuugu

SEQ ID NO: 69360 - RNA, 16 nt, Homo sapiens
agcagguguuagguga

SEQ ID NO: 69361 - RNA, 22 nt, Homo sapiens
auacaguauggagggcccagcu

SEQ ID NO: 69362 - RNA, 22 nt, Homo sapiens
aucugugguuguaugcauauua

SEQ ID NO: 69363 - RNA, 22 nt, Homo sapiens
aacagaauccucuuuuccuggg

SEQ ID NO: 69364 - RNA, 22 nt, Homo sapiens
uugauauguuguuggauucacu

SEQ ID NO: 69365 - RNA, 22 nt, Homo sapiens
aacaguaucuaacgagugauga

SEQ ID NO: 69366 - RNA, 22 nt, Homo sapiens
cacacuguuuuccauggggguu

SEQ ID NO: 69367 - RNA, 21 nt, Homo sapiens
gagguagggauuaaagaccuc

SEQ ID NO: 69368 - RNA, 22 nt, Homo sapiens
ggaguguguaggagaaagguaa

SEQ ID NO: 69369 - RNA, 22 nt, Homo sapiens
ucaguuuagguguaacggccac

SEQ ID NO: 69370 - RNA, 22 nt, Homo sapiens
uuuugcaaauuccaguggccau

SEQ ID NO: 69371 - RNA, 23 nt, Homo sapiens
ucagguaggccuagaguauucuu

SEQ ID NO: 69372 - RNA, 22 nt, Homo sapiens
acacugucaugucucacaggca

SEQ ID NO: 69373 - RNA, 21 nt, Homo sapiens
guucaagugauccuccugucu

SEQ ID NO: 69374 - RNA, 22 nt, Homo sapiens
ccaaaguauuuucacugauauc

SEQ ID NO: 69375 - RNA, 22 nt, Homo sapiens
gcaugguacuggaugguaguau

SEQ ID NO: 69376 - RNA, 23 nt, Homo sapiens
ucuugguuauagaaaaauaguug

SEQ ID NO: 69377 - RNA, 22 nt, Homo sapiens
gagaacagaagcauuccuaauu

SEQ ID NO: 69378 - RNA, 22 nt, Homo sapiens
ugaugaugaaugaucuuuuaca

SEQ ID NO: 69379 - RNA, 22 nt, Homo sapiens
aaauugcaguuaggaugauggu

SEQ ID NO: 69380 - RNA, 22 nt, Homo sapiens
gcguugcacuccagccugggua

SEQ ID NO: 69381 - RNA, 22 nt, Homo sapiens
ugagagcuuuuuugccugguga

SEQ ID NO: 69382 - RNA, 22 nt, Homo sapiens
agagagcuuuugguugcccuaa

SEQ ID NO: 69383 - RNA, 22 nt, Homo sapiens
ugugguuuuucacauuuagaga

SEQ ID NO: 69384 - RNA, 22 nt, Homo sapiens
ucagucauucaauuguugaaug

SEQ ID NO: 69385 - RNA, 17 nt, Homo sapiens
accagugcaugugcuuu

SEQ ID NO: 69386 - RNA, 22 nt, Homo sapiens
cacacugucuucaauggguggu

SEQ ID NO: 69387 - RNA, 22 nt, Homo sapiens
cuauucacaauggugaagauau

SEQ ID NO: 69388 - RNA, 22 nt, Homo sapiens
uguuacagcagaauugauugca

SEQ ID NO: 69389 - RNA, 22 nt, Homo sapiens
uagcaguuguuguuacuuguau

SEQ ID NO: 69390 - RNA, 22 nt, Homo sapiens
cugugaagaaagucauugguag

SEQ ID NO: 69391 - RNA, 22 nt, Homo sapiens
gaauaaacuagagaggacugag

SEQ ID NO: 69392 - RNA, 22 nt, Homo sapiens
gaggguguuguguugcuuaaua

SEQ ID NO: 69393 - RNA, 22 nt, Homo sapiens
gggaacaugagaaugugaauga

SEQ ID NO: 69394 - RNA, 22 nt, Homo sapiens
uuuugcaauaguccuggccugu

SEQ ID NO: 69395 - RNA, 22 nt, Homo sapiens
ucuuuguuagaacccucuccuu

SEQ ID NO: 69396 - RNA, 19 nt, Homo sapiens
uggaacauaaaaguugguu

SEQ ID NO: 69397 - RNA, 22 nt, Homo sapiens
ucuuugguucuguuuauguaau

SEQ ID NO: 69398 - RNA, 22 nt, Homo sapiens
ugacacuugcccuuagaaacau

SEQ ID NO: 69399 - RNA, 22 nt, Homo sapiens
ugaguuuaucuaaagaccuggg

SEQ ID NO: 69400 - RNA, 22 nt, Homo sapiens
uucaagucaacaagcacuugag

SEQ ID NO: 69401 - RNA, 22 nt, Homo sapiens
uuuauggagagauauuuauggu

SEQ ID NO: 69402 - RNA, 21 nt, Homo sapiens
uuacaauggcuccuugaaggu

SEQ ID NO: 69403 - RNA, 22 nt, Homo sapiens
uucaaaguaaaaauguguucac

SEQ ID NO: 69404 - RNA, 22 nt, Homo sapiens
auacaguaaugucuuaggcugu

SEQ ID NO: 69405 - RNA, 22 nt, Homo sapiens
ugugguuuuaguaaaacuaugu

SEQ ID NO: 69406 - RNA, 23 nt, Homo sapiens
aggaauggaaaaccaaguaucau

SEQ ID NO: 69407 - RNA, 21 nt, Homo sapiens
agcuaaauuggaaauuucugu

SEQ ID NO: 69408 - RNA, 18 nt, Homo sapiens
agagcacugaguuuuaga

SEQ ID NO: 69409 - RNA, 22 nt, Homo sapiens
guacaguauaguaauaggauuu

SEQ ID NO: 69410 - RNA, 22 nt, Homo sapiens
ugagacugauaggacauuuucu

SEQ ID NO: 69411 - RNA, 22 nt, Homo sapiens
gagcuguuuuucacuagaccaa

SEQ ID NO: 69412 - RNA, 22 nt, Homo sapiens
agacagcuggaguaucauagcu

SEQ ID NO: 69413 - RNA, 20 nt, Homo sapiens
uggaguuguggcaguuugga

SEQ ID NO: 69414 - RNA, 22 nt, Homo sapiens
uaugauuuuugggagaggucaa

SEQ ID NO: 69415 - RNA, 22 nt, Homo sapiens
uacagguaugugucuauauaca

SEQ ID NO: 69416 - RNA, 23 nt, Homo sapiens
gaguggagacucauugauuuccu

SEQ ID NO: 69417 - RNA, 22 nt, Homo sapiens
acacuguuuuaguuauuauagc

SEQ ID NO: 69418 - RNA, 22 nt, Homo sapiens
uucugguuaauacuugcaaaaa

SEQ ID NO: 69419 - RNA, 22 nt, Homo sapiens
ucaaacugucagguugaccaga

SEQ ID NO: 69420 - RNA, 22 nt, Homo sapiens
agugcauugagacuugugaguu

SEQ ID NO: 69421 - RNA, 22 nt, Homo sapiens
uauuugcacucccaucauggug

SEQ ID NO: 69422 - RNA, 22 nt, Homo sapiens
aagugaauucauuguguuauau

SEQ ID NO: 69423 - RNA, 21 nt, Homo sapiens
agccaguguuccuuguggcuc

SEQ ID NO: 69424 - RNA, 22 nt, Homo sapiens
uagagagcuguuugaaagcagg

SEQ ID NO: 69425 - RNA, 22 nt, Homo sapiens
auggagguguggggagugaguu

SEQ ID NO: 69426 - RNA, 22 nt, Homo sapiens
ucaugagacacacuggaaagga

SEQ ID NO: 69427 - RNA, 22 nt, Homo sapiens
aggacacugagcaugggagguu

SEQ ID NO: 69428 - RNA, 22 nt, Homo sapiens
guggacaugaauuuuggaggca

SEQ ID NO: 69429 - RNA, 22 nt, Homo sapiens
augcaaacaucugaagagacau

SEQ ID NO: 69430 - RNA, 22 nt, Homo sapiens
uuuguggaaugcucauguguag

SEQ ID NO: 69431 - RNA, 22 nt, Homo sapiens
uuggagucaucucuguacugua

SEQ ID NO: 69432 - RNA, 22 nt, Homo sapiens
uggaguaggccuaagaaugaca

SEQ ID NO: 69433 - RNA, 20 nt, Homo sapiens
agcugcagauauaaauccgc

SEQ ID NO: 69434 - RNA, 22 nt, Homo sapiens
cucagguaguuccuuauagcaa

SEQ ID NO: 69435 - RNA, 17 nt, Homo sapiens
cucucugguuuaaagca

SEQ ID NO: 69436 - RNA, 22 nt, Homo sapiens
auuagguauuuguccuaaauau

SEQ ID NO: 69437 - RNA, 22 nt, Homo sapiens
uugcuucauucaacauugaggg

SEQ ID NO: 69438 - RNA, 22 nt, Homo sapiens
uagcugcacuuacaagugagaa

SEQ ID NO: 69439 - RNA, 22 nt, Homo sapiens
cuucaaaguuggcuaggagaca

SEQ ID NO: 69440 - RNA, 22 nt, Homo sapiens
uaucaagauggauaaggauaga

SEQ ID NO: 69441 - RNA, 22 nt, Homo sapiens
gucaaagucuauuggcuaauuc

SEQ ID NO: 69442 - RNA, 22 nt, Homo sapiens
ucagguaguuugugggagauga

SEQ ID NO: 69443 - RNA, 22 nt, Homo sapiens
ugagauaauuuacuuguugagg

SEQ ID NO: 69444 - RNA, 22 nt, Homo sapiens
guuacagucuuguguaagguua

SEQ ID NO: 69445 - RNA, 22 nt, Homo sapiens
uuuagguuacauauaauccaaa

SEQ ID NO: 69446 - RNA, 22 nt, Homo sapiens
uagauucauuuuagcaaaaguu

SEQ ID NO: 69447 - RNA, 22 nt, Homo sapiens
guuagugcuuauuaaauaguau

SEQ ID NO: 69448 - RNA, 22 nt, Homo sapiens
augaaaucuuuccugugaggau

SEQ ID NO: 69449 - RNA, 22 nt, Homo sapiens
uucauagaggacauuacuggag

SEQ ID NO: 69450 - RNA, 19 nt, Homo sapiens
uacaggacugagcugaggu

SEQ ID NO: 69451 - RNA, 22 nt, Homo sapiens
uggaggacugcagaacugaggc

SEQ ID NO: 69452 - RNA, 22 nt, Homo sapiens
gagcaucaguggccucaucuca

SEQ ID NO: 69453 - RNA, 22 nt, Homo sapiens
uaaacugucuuuggagcuuugc

SEQ ID NO: 69454 - RNA, 22 nt, Homo sapiens
uacuagaaccuuauucagagug

SEQ ID NO: 69455 - RNA, 22 nt, Homo sapiens
acacuguuggugggaguguaaa

SEQ ID NO: 69456 - RNA, 22 nt, Homo sapiens
gaugauguugaauguucucacc

SEQ ID NO: 69457 - RNA, 22 nt, Homo sapiens
uggacuguaauagagaacagaa

SEQ ID NO: 69458 - RNA, 22 nt, Homo sapiens
ucagguagugccaugauugauu

SEQ ID NO: 69459 - RNA, 22 nt, Homo sapiens
ucagugccucaguuuuuaaaga

SEQ ID NO: 69460 - RNA, 22 nt, Homo sapiens
accauugcacuccagcccaggc

SEQ ID NO: 69461 - RNA, 22 nt, Homo sapiens
cuuugcaaauggccuuuccaag

SEQ ID NO: 69462 - RNA, 22 nt, Homo sapiens
gccaagaagugucuaagcagga

SEQ ID NO: 69463 - RNA, 22 nt, Homo sapiens
uugauauguggaauauuuaucu

SEQ ID NO: 69464 - RNA, 22 nt, Homo sapiens
uaugucacagguuuuggugaaa

SEQ ID NO: 69465 - RNA, 22 nt, Homo sapiens
auccacagugucaauguuguga

SEQ ID NO: 69466 - RNA, 22 nt, Homo sapiens
ggagagcuaggcagagguuugu

SEQ ID NO: 69467 - RNA, 17 nt, Homo sapiens
acaugagacuggauucu

SEQ ID NO: 69468 - RNA, 22 nt, Homo sapiens
ugagcaagaaauagaaacagau

SEQ ID NO: 69469 - RNA, 22 nt, Homo sapiens
gugaaauacauaaucccaagug

SEQ ID NO: 69470 - RNA, 21 nt, Homo sapiens
uaaaugucauacaaagcaaug

SEQ ID NO: 69471 - RNA, 22 nt, Homo sapiens
cuaaaguucuucugagagaaca

SEQ ID NO: 69472 - RNA, 22 nt, Homo sapiens
ucuugguugaaaauucauaaua

SEQ ID NO: 69473 - RNA, 22 nt, Homo sapiens
cacauguuuuagcauggcuguu

SEQ ID NO: 69474 - RNA, 22 nt, Homo sapiens
uaugaugcuguuuagaaucucu

SEQ ID NO: 69475 - RNA, 22 nt, Homo sapiens
aauaaguugagaugaggucaua

SEQ ID NO: 69476 - RNA, 17 nt, Homo sapiens
aguacugucccauccuu

SEQ ID NO: 69477 - RNA, 22 nt, Homo sapiens
cuuacagucuaucagccacaac

SEQ ID NO: 69478 - RNA, 22 nt, Homo sapiens
cuggaguuugaggcugcaguga

SEQ ID NO: 69479 - RNA, 22 nt, Homo sapiens
ugaaguaauguuuuauucuauu

SEQ ID NO: 69480 - RNA, 22 nt, Homo sapiens
ggcuagagagcucagggauaug

SEQ ID NO: 69481 - RNA, 23 nt, Homo sapiens
agcuagagaggcuggggauacag

SEQ ID NO: 69482 - RNA, 22 nt, Homo sapiens
augcaaacagcuaucuggcugg

SEQ ID NO: 69483 - RNA, 22 nt, Homo sapiens
gauguguuuuaggaucucagca

SEQ ID NO: 69484 - RNA, 22 nt, Homo sapiens
acacuguccaguuaggcuacau

SEQ ID NO: 69485 - RNA, 21 nt, Homo sapiens
uuauaguggcaugauuuauaa

SEQ ID NO: 69486 - RNA, 22 nt, Homo sapiens
uauugcacuuuuccauaggagu

SEQ ID NO: 69487 - RNA, 22 nt, Homo sapiens
cuaaaugcacugucaaaggaag

SEQ ID NO: 69488 - RNA, 22 nt, Homo sapiens
gugacauuuuuacugaugagag

SEQ ID NO: 69489 - RNA, 22 nt, Homo sapiens
ggcaagaagagaguuuaaacau

SEQ ID NO: 69490 - RNA, 22 nt, Homo sapiens
agagauaaagauuuuaauuuug

SEQ ID NO: 69491 - RNA, 22 nt, Homo sapiens
auguaaacuacagauuuugggu

SEQ ID NO: 69492 - RNA, 22 nt, Homo sapiens
caccacuacaccccaggcuggg

SEQ ID NO: 69493 - RNA, 22 nt, Homo sapiens
ugaaaucauguaguuauugcaa

SEQ ID NO: 69494 - RNA, 22 nt, Homo sapiens
uaucaucauuggcaggugagaa

SEQ ID NO: 69495 - RNA, 22 nt, Homo sapiens
aguaacauuucuaguagagagu

SEQ ID NO: 69496 - RNA, 22 nt, Homo sapiens
aguaucacaggcaaaacagaau

SEQ ID NO: 69497 - RNA, 22 nt, Homo sapiens
ugagaugaacuugauuguuuua

SEQ ID NO: 69498 - RNA, 22 nt, Homo sapiens
ucaaugaaugaugguugguaug

SEQ ID NO: 69499 - RNA, 22 nt, Homo sapiens
uggacaugaagggcacaggagg

SEQ ID NO: 69500 - RNA, 22 nt, Homo sapiens
uggaugacuguuauaugcauau

SEQ ID NO: 69501 - RNA, 22 nt, Homo sapiens
gagguagguuugguuacaaaag

SEQ ID NO: 69502 - RNA, 22 nt, Homo sapiens
uauuugguuacuugaauagcua

SEQ ID NO: 69503 - RNA, 22 nt, Homo sapiens
uuuacagucucauagguggaag

SEQ ID NO: 69504 - RNA, 22 nt, Homo sapiens
auccugaagcuuuacugaauuc

SEQ ID NO: 69505 - RNA, 22 nt, Homo sapiens
agaaagugcuucccuuugguga

SEQ ID NO: 69506 - RNA, 21 nt, Homo sapiens
cagguagugucugaagccaga

SEQ ID NO: 69507 - RNA, 22 nt, Homo sapiens
uaguaucacauggucuuaauua

SEQ ID NO: 69508 - RNA, 22 nt, Homo sapiens
ucuguguuugaucaagauugua

SEQ ID NO: 69509 - RNA, 22 nt, Homo sapiens
gagaacauacggcauuugguuu

SEQ ID NO: 69510 - RNA, 22 nt, Homo sapiens
uuuggaagaugccacuguauca

SEQ ID NO: 69511 - RNA, 22 nt, Homo sapiens
gugaaauauuuaacguccaggu

SEQ ID NO: 69512 - RNA, 22 nt, Homo sapiens
uuuguggaaugcccuuauuuau

SEQ ID NO: 69513 - RNA, 22 nt, Homo sapiens
uauuuggugaaugaaugcaugu

SEQ ID NO: 69514 - RNA, 22 nt, Homo sapiens
agcuaguguucaccagagguca

SEQ ID NO: 69515 - RNA, 22 nt, Homo sapiens
auugcaaagcguagacucuaaa

SEQ ID NO: 69516 - RNA, 22 nt, Homo sapiens
uugagauguauguauauaaugu

SEQ ID NO: 69517 - RNA, 22 nt, Homo sapiens
ugaugguguuaccaucuuuacu

SEQ ID NO: 69518 - RNA, 22 nt, Homo sapiens
auuuggcauagaguaucauucu

SEQ ID NO: 69519 - RNA, 22 nt, Homo sapiens
uacuuuguagagugugagaauu

SEQ ID NO: 69520 - RNA, 23 nt, Homo sapiens
aguacuguaguaauugaggggaa

SEQ ID NO: 69521 - RNA, 22 nt, Homo sapiens
ucugagguuaaauuuuauaguu

SEQ ID NO: 69522 - RNA, 22 nt, Homo sapiens
auccucaguggcuuaaguauag

SEQ ID NO: 69523 - RNA, 21 nt, Homo sapiens
gagaaucaucauggcugcaua

SEQ ID NO: 69524 - RNA, 22 nt, Homo sapiens
uuuauagucaggaacuugagga

SEQ ID NO: 69525 - RNA, 22 nt, Homo sapiens
cacacugucuucauuacuguag

SEQ ID NO: 69526 - RNA, 22 nt, Homo sapiens
agaugauguuuacugagcauca

SEQ ID NO: 69527 - RNA, 22 nt, Homo sapiens
ugaaacauacacucugaugggg

SEQ ID NO: 69528 - RNA, 22 nt, Homo sapiens
uggaguguguugcagaugaagg

SEQ ID NO: 69529 - RNA, 22 nt, Homo sapiens
ugagaugcucgccggccagcau

SEQ ID NO: 69530 - RNA, 22 nt, Homo sapiens
aguacugucagcaggguguuga

SEQ ID NO: 69531 - RNA, 22 nt, Homo sapiens
guccugaagaccuuccucugga

SEQ ID NO: 69532 - RNA, 22 nt, Homo sapiens
ggaaauguuggugucaugaguu

SEQ ID NO: 69533 - RNA, 22 nt, Homo sapiens
cuacaguagagaggauguagaa

SEQ ID NO: 69534 - RNA, 22 nt, Homo sapiens
uucaagucaauuuuugaaugac

SEQ ID NO: 69535 - RNA, 22 nt, Homo sapiens
ucuugguuaggggaaauaggca

SEQ ID NO: 69536 - RNA, 22 nt, Homo sapiens
aauguguuuugaaaucaggaag

SEQ ID NO: 69537 - RNA, 22 nt, Homo sapiens
acacugucucuugcugaccaug

SEQ ID NO: 69538 - RNA, 22 nt, Homo sapiens
gcaaagaaugcagauuugccuc

SEQ ID NO: 69539 - RNA, 22 nt, Homo sapiens
aacacuguuuccagucaugauc

SEQ ID NO: 69540 - RNA, 22 nt, Homo sapiens
uucaagucaaggaaagaggucu

SEQ ID NO: 69541 - RNA, 22 nt, Homo sapiens
uuagaaaguagaaaagcugguu

SEQ ID NO: 69542 - RNA, 22 nt, Homo sapiens
auguaaacagaugugcagcuug

SEQ ID NO: 69543 - RNA, 22 nt, Homo sapiens
agcccauguggcugaggcuucu

SEQ ID NO: 69544 - RNA, 22 nt, Homo sapiens
uccacagugguugaacuaguuu

SEQ ID NO: 69545 - RNA, 22 nt, Homo sapiens
ucaguuaaugcugccugcugga

SEQ ID NO: 69546 - RNA, 22 nt, Homo sapiens
cuggacguugaggcugcaguga

SEQ ID NO: 69547 - RNA, 22 nt, Homo sapiens
uacaggugcucuacagacagga

SEQ ID NO: 69548 - RNA, 22 nt, Homo sapiens
uuuuuggauaaugguacaugua

SEQ ID NO: 69549 - RNA, 21 nt, Homo sapiens
aucuugguauagucuuauugg

SEQ ID NO: 69550 - RNA, 22 nt, Homo sapiens
uacuacuuucugacaucuuuaa

SEQ ID NO: 69551 - RNA, 22 nt, Homo sapiens
ugagagcuuugaugcacuguuu

SEQ ID NO: 69552 - RNA, 22 nt, Homo sapiens
cccagaguucuuaaauacugag

SEQ ID NO: 69553 - RNA, 22 nt, Homo sapiens
gacacugucuucugcucuuaaa

SEQ ID NO: 69554 - RNA, 22 nt, Homo sapiens
cagcuaaauuguuaaauccaag

SEQ ID NO: 69555 - RNA, 22 nt, Homo sapiens
agguauguaugucuguacagcg

SEQ ID NO: 69556 - RNA, 22 nt, Homo sapiens
ugcaaacuuccuugggcagcau

SEQ ID NO: 69557 - RNA, 22 nt, Homo sapiens
uuaaaguaauugaaauggccuu

SEQ ID NO: 69558 - RNA, 22 nt, Homo sapiens
ugaauagacacuaaagacugua

SEQ ID NO: 69559 - RNA, 22 nt, Homo sapiens
ucagucuuuuaccauuaaguau

SEQ ID NO: 69560 - RNA, 22 nt, Homo sapiens
uuacaguaugaguaagaguucu

SEQ ID NO: 69561 - RNA, 22 nt, Homo sapiens
uugauagaucagggauuugauu

SEQ ID NO: 69562 - RNA, 22 nt, Homo sapiens
uuugagugugauaucgauugga

SEQ ID NO: 69563 - RNA, 22 nt, Homo sapiens
gucaaagugauuguaauuaggu

SEQ ID NO: 69564 - RNA, 22 nt, Homo sapiens
ucuuuggucuacuuucauaugu

SEQ ID NO: 69565 - RNA, 20 nt, Homo sapiens
gagcaucacaggccucugcu

SEQ ID NO: 69566 - RNA, 22 nt, Homo sapiens
gagaacaguguuguauuuuuuc

SEQ ID NO: 69567 - RNA, 22 nt, Homo sapiens
uggagugaaaacacacuaaucu

SEQ ID NO: 69568 - RNA, 22 nt, Homo sapiens
uugagauggaguucauuuuugu

SEQ ID NO: 69569 - RNA, 22 nt, Homo sapiens
agcaacaucagcagcaggaaaa

SEQ ID NO: 69570 - RNA, 22 nt, Homo sapiens
aagaugauguucuuuuucuuag

SEQ ID NO: 69571 - RNA, 22 nt, Homo sapiens
uaacaccuugcucugucaauaa

SEQ ID NO: 69572 - RNA, 22 nt, Homo sapiens
auagguauuuuuaaaugacugu

SEQ ID NO: 69573 - RNA, 22 nt, Homo sapiens
ucucuguuuagagccagcaauu

SEQ ID NO: 69574 - RNA, 22 nt, Homo sapiens
guugccuaggcuggucuugaac

SEQ ID NO: 69575 - RNA, 22 nt, Homo sapiens
guagaaagcauuucagauuugc

SEQ ID NO: 69576 - RNA, 22 nt, Homo sapiens
ugacuucauuugguaauugggu

SEQ ID NO: 69577 - RNA, 22 nt, Homo sapiens
cuaacuaugucucaggaugucc

SEQ ID NO: 69578 - RNA, 22 nt, Homo sapiens
uugagugaaugaaugauuaaau

SEQ ID NO: 69579 - RNA, 23 nt, Homo sapiens
cagcuucauugaacauaacuccu

SEQ ID NO: 69580 - RNA, 22 nt, Homo sapiens
ucagugccauugccauaugagu

SEQ ID NO: 69581 - RNA, 17 nt, Homo sapiens
ucuugugguucuugaau

SEQ ID NO: 69582 - RNA, 22 nt, Homo sapiens
gucagcuuuuccuuacuuuagg

SEQ ID NO: 69583 - RNA, 23 nt, Homo sapiens
ucagguaguuucagaggaccuug

SEQ ID NO: 69584 - RNA, 22 nt, Homo sapiens
agugcauugcaucucugcuuca

SEQ ID NO: 69585 - RNA, 20 nt, Homo sapiens
auagaagacuagugcagcag

SEQ ID NO: 69586 - RNA, 22 nt, Homo sapiens
gauuccacuuucaaauucaaau

SEQ ID NO: 69587 - RNA, 22 nt, Homo sapiens
ggaaauguaaacaauggggcua

SEQ ID NO: 69588 - RNA, 22 nt, Homo sapiens
agaaccauuagagggagauauu

SEQ ID NO: 69589 - RNA, 22 nt, Homo sapiens
aaagugauguccaggcuuucag

SEQ ID NO: 69590 - RNA, 22 nt, Homo sapiens
uauuccauuugugaaaggaagu

SEQ ID NO: 69591 - RNA, 22 nt, Homo sapiens
uugaucaucagcuuugucaucu

SEQ ID NO: 69592 - RNA, 22 nt, Homo sapiens
gugucccagugugcauacaggu

SEQ ID NO: 69593 - RNA, 22 nt, Homo sapiens
augagaaugauucuguuauggu

SEQ ID NO: 69594 - RNA, 21 nt, Homo sapiens
uggagugcaacacuagguaua

SEQ ID NO: 69595 - RNA, 22 nt, Homo sapiens
guugcucaggcugaagugcagu

SEQ ID NO: 69596 - RNA, 22 nt, Homo sapiens
caacacuguuuauuggauagcc

SEQ ID NO: 69597 - RNA, 22 nt, Homo sapiens
caaaguaauuacgguuuuggcc

SEQ ID NO: 69598 - RNA, 22 nt, Homo sapiens
uuauauguuucuuagggacaga

SEQ ID NO: 69599 - RNA, 22 nt, Homo sapiens
ccccauuugaacuccuucaacu

SEQ ID NO: 69600 - RNA, 22 nt, Homo sapiens
cuaagauugucuuaguguguug

SEQ ID NO: 69601 - RNA, 22 nt, Homo sapiens
uguuagguuggugcaaaaguga

SEQ ID NO: 69602 - RNA, 22 nt, Homo sapiens
ucuagaugaaguauaaaguagu

SEQ ID NO: 69603 - RNA, 22 nt, Homo sapiens
gugacaucagcuccagguauaa

SEQ ID NO: 69604 - RNA, 22 nt, Homo sapiens
augaagugcaugauaguugguu

SEQ ID NO: 69605 - RNA, 20 nt, Homo sapiens
uuauaacuuuuguucugggg

SEQ ID NO: 69606 - RNA, 22 nt, Homo sapiens
ugaggugagggguuaggugcua

SEQ ID NO: 69607 - RNA, 22 nt, Homo sapiens
ccacaguugaaauuuugacugu

SEQ ID NO: 69608 - RNA, 22 nt, Homo sapiens
gcaaaauugagaagggaauaua

SEQ ID NO: 69609 - RNA, 22 nt, Homo sapiens
augaaaucuuuggcagaucuua

SEQ ID NO: 69610 - RNA, 22 nt, Homo sapiens
uuccaguguguucauccucaga

SEQ ID NO: 69611 - RNA, 22 nt, Homo sapiens
uauugauuaauugugauuaggc

SEQ ID NO: 69612 - RNA, 23 nt, Homo sapiens
ggaaauguuuaagggguugggag

SEQ ID NO: 69613 - RNA, 17 nt, Homo sapiens
agucaguaguuuguauu

SEQ ID NO: 69614 - RNA, 22 nt, Homo sapiens
cauuugcacugagacucagcuu

SEQ ID NO: 69615 - RNA, 22 nt, Homo sapiens
auauucacagguaucagagauu

SEQ ID NO: 69616 - RNA, 22 nt, Homo sapiens
cagguacauuuuaaagggcuca

SEQ ID NO: 69617 - RNA, 22 nt, Homo sapiens
uucuggcucgauucucugaccg

SEQ ID NO: 69618 - RNA, 22 nt, Homo sapiens
uuguguuuuuaguagggaaggg

SEQ ID NO: 69619 - RNA, 21 nt, Homo sapiens
cucaaaguacugauauuacag

SEQ ID NO: 69620 - RNA, 22 nt, Homo sapiens
augugaugguuaauuuuaugug

SEQ ID NO: 69621 - RNA, 22 nt, Homo sapiens
uugaugauguuucugccuugcc

SEQ ID NO: 69622 - RNA, 22 nt, Homo sapiens
ggagggugagaucaauuuggga

SEQ ID NO: 69623 - RNA, 22 nt, Homo sapiens
uagaacauuccaggugauguug

SEQ ID NO: 69624 - RNA, 22 nt, Homo sapiens
caaauccucaccucaucaugaa

SEQ ID NO: 69625 - RNA, 22 nt, Homo sapiens
uguuuaguuaagacauagaauu

SEQ ID NO: 69626 - RNA, 22 nt, Homo sapiens
agcauggucacuuugggcccca

SEQ ID NO: 69627 - RNA, 23 nt, Homo sapiens
uuuugcaauaagucacuggaaua

SEQ ID NO: 69628 - RNA, 22 nt, Homo sapiens
ucacuguugaugggcaugcagg

SEQ ID NO: 69629 - RNA, 22 nt, Homo sapiens
caaaguaauugugguuuugcca

SEQ ID NO: 69630 - RNA, 22 nt, Homo sapiens
uugauagacaucugaguuguug

SEQ ID NO: 69631 - RNA, 22 nt, Homo sapiens
uauuugguuggugcaaaaguaa

SEQ ID NO: 69632 - RNA, 22 nt, Homo sapiens
gggaacauggaaauucugcucu

SEQ ID NO: 69633 - RNA, 22 nt, Homo sapiens
uuacaguauugcaaggacuagg

SEQ ID NO: 69634 - RNA, 22 nt, Homo sapiens
ugaagugaaugguaaguaugcc

SEQ ID NO: 69635 - RNA, 22 nt, Homo sapiens
gagguaggggccuuaaagaugc

SEQ ID NO: 69636 - RNA, 22 nt, Homo sapiens
ucccagugaaaccccaccuuca

SEQ ID NO: 69637 - RNA, 18 nt, Homo sapiens
cuggaaggcuacuacagu

SEQ ID NO: 69638 - RNA, 22 nt, Homo sapiens
ucugugguucaaaccagcaacu

SEQ ID NO: 69639 - RNA, 22 nt, Homo sapiens
uagcccagugagguugauuugg

SEQ ID NO: 69640 - RNA, 22 nt, Homo sapiens
uacagcuaugugcaugcaugcu

SEQ ID NO: 69641 - RNA, 21 nt, Homo sapiens
uuccagugagccuagaugccu

SEQ ID NO: 69642 - RNA, 22 nt, Homo sapiens
auaacucuguuuuuuucaugca

SEQ ID NO: 69643 - RNA, 22 nt, Homo sapiens
aucuacuugcugggucucugga

SEQ ID NO: 69644 - RNA, 22 nt, Homo sapiens
ccacuguuuaaauggcugagga

SEQ ID NO: 69645 - RNA, 22 nt, Homo sapiens
aagagcucauccauaguuguca

SEQ ID NO: 69646 - RNA, 22 nt, Homo sapiens
cuacaguaugaaaccuuuacuc

SEQ ID NO: 69647 - RNA, 22 nt, Homo sapiens
auugcacaaagagggaaacuga

SEQ ID NO: 69648 - RNA, 22 nt, Homo sapiens
uugauauguuguuagauucagu

SEQ ID NO: 69649 - RNA, 22 nt, Homo sapiens
cacacugucuuucagaaugguu

SEQ ID NO: 69650 - RNA, 22 nt, Homo sapiens
ugugcaguuuugagugaauuuc

SEQ ID NO: 69651 - RNA, 22 nt, Homo sapiens
ugugucuccugaaaauucacau

SEQ ID NO: 69652 - RNA, 22 nt, Homo sapiens
uguguaauaccuuugacuauau

SEQ ID NO: 69653 - RNA, 22 nt, Homo sapiens
uuauuagguugguggaaaagua

SEQ ID NO: 69654 - RNA, 22 nt, Homo sapiens
uuauauguuacucccucuagca

SEQ ID NO: 69655 - RNA, 22 nt, Homo sapiens
uguaauggcagacuccggugga

SEQ ID NO: 69656 - RNA, 22 nt, Homo sapiens
uguaauaguaggcucacauuug

SEQ ID NO: 69657 - RNA, 16 nt, Homo sapiens
uguaaauguuuugcau

SEQ ID NO: 69658 - RNA, 22 nt, Homo sapiens
uguccuagagggaugucacccc

SEQ ID NO: 69659 - RNA, 19 nt, Homo sapiens
ugugacugguugucucgcu

SEQ ID NO: 69660 - RNA, 22 nt, Homo sapiens
uugcaacuuagaaaaaucauuu

SEQ ID NO: 69661 - RNA, 22 nt, Homo sapiens
uucacuguuaagcaguuaaacu

SEQ ID NO: 69662 - RNA, 22 nt, Homo sapiens
uugucaugguuaauuuuaugua

SEQ ID NO: 69663 - RNA, 22 nt, Homo sapiens
uugugguuuucagcuuauauau

SEQ ID NO: 69664 - RNA, 17 nt, Homo sapiens
uuuaaugcuaggacucu

SEQ ID NO: 69665 - RNA, 22 nt, Homo sapiens
uuucuacagggcuugccaggua

SEQ ID NO: 69666 - RNA, 22 nt, Homo sapiens
aauauagcuauguacaugucca

SEQ ID NO: 69667 - RNA, 22 nt, Homo sapiens
aauauguccuugaaauggugcu

SEQ ID NO: 69668 - RNA, 22 nt, Homo sapiens
acacaguauaugacaaugcuuu

SEQ ID NO: 69669 - RNA, 22 nt, Homo sapiens
acacauuagcaagugcuguuau

SEQ ID NO: 69670 - RNA, 20 nt, Homo sapiens
acaguauguuuggaugcaua

SEQ ID NO: 69671 - RNA, 22 nt, Homo sapiens
uuuguguccccacccacaucuc

SEQ ID NO: 69672 - RNA, 23 nt, Homo sapiens
uuugugucccucuagaauucaug

SEQ ID NO: 69673 - RNA, 22 nt, Homo sapiens
acugcacuuauccuccaauguu

SEQ ID NO: 69674 - RNA, 22 nt, Homo sapiens
agcaacauuguucauaauagcu

SEQ ID NO: 69675 - RNA, 22 nt, Homo sapiens
agcaggauuguuacaauaguaa

SEQ ID NO: 69676 - RNA, 22 nt, Homo sapiens
auagcauaucccacaugucaga

SEQ ID NO: 69677 - RNA, 22 nt, Homo sapiens
auacuagucaagaauguaugag

SEQ ID NO: 69678 - RNA, 22 nt, Homo sapiens
aguaucacaguggguguauacc

SEQ ID NO: 69679 - RNA, 22 nt, Homo sapiens
aucacuaugcaggugucucggg

SEQ ID NO: 69680 - RNA, 23 nt, Homo sapiens
aucacuguuaacaauuucuuccu

SEQ ID NO: 69681 - RNA, 22 nt, Homo sapiens
cuguaugugagaaauaauaagu

SEQ ID NO: 69682 - RNA, 22 nt, Homo sapiens
cucacaaccuuaugaagcauga

SEQ ID NO: 69683 - RNA, 22 nt, Homo sapiens
gaucuggagguuuuccucauga

SEQ ID NO: 69684 - RNA, 22 nt, Homo sapiens
cauauaguaguacuguuagguu

SEQ ID NO: 69685 - RNA, 22 nt, Homo sapiens
cauauaguaggugcucuguguu

SEQ ID NO: 69686 - RNA, 22 nt, Homo sapiens
ucucuguuuauuuuugguguau

SEQ ID NO: 69687 - RNA, 22 nt, Homo sapiens
ucugguguuauucauguaguuu

SEQ ID NO: 69688 - RNA, 22 nt, Homo sapiens
uccagguuuggcuuuauaacuu

SEQ ID NO: 69689 - RNA, 23 nt, Homo sapiens
ucaugguagcaccaacaauaacu

SEQ ID NO: 69690 - RNA, 23 nt, Homo sapiens
ucacaguuacuuuugcaucaacc

SEQ ID NO: 69691 - RNA, 22 nt, Homo sapiens
ugcauuguuccgaauguguccu

SEQ ID NO: 69692 - RNA, 22 nt, Homo sapiens
ugcaagauaggcaguuugcacu

SEQ ID NO: 69693 - RNA, 22 nt, Homo sapiens
ugcaaauguuaguaacaccacu

SEQ ID NO: 69694 - RNA, 22 nt, Homo sapiens
ugauauguuagaaucuugcaag

SEQ ID NO: 69695 - RNA, 21 nt, Homo sapiens
ugauguugaccuaaguaguga

SEQ ID NO: 69696 - RNA, 23 nt, Homo sapiens
uauaugugucuaggagcuauggu

SEQ ID NO: 69697 - RNA, 22 nt, Homo sapiens
uauauguuuucauaaggcuaga

SEQ ID NO: 69698 - RNA, 22 nt, Homo sapiens
uacauccauccugcugggcagu

SEQ ID NO: 69699 - RNA, 22 nt, Homo sapiens
uaccuguagacuacagcuucag

SEQ ID NO: 69700 - RNA, 22 nt, Homo sapiens
gugguauaaguaccuccuuuca

SEQ ID NO: 69701 - RNA, 22 nt, Homo sapiens
gcacaguuaaagggucauguga

SEQ ID NO: 69702 - RNA, 22 nt, Homo sapiens
gugcaguuuugagugaguuucu

SEQ ID NO: 69703 - RNA, 22 nt, Homo sapiens
gugcaguuuuaagugaguuucu

SEQ ID NO: 69704 - RNA, 22 nt, Homo sapiens
guacacaacaugcagguuuguu

SEQ ID NO: 69705 - RNA, 22 nt, Homo sapiens
uggucuucuggccuccagaacc

SEQ ID NO: 69706 - RNA, 22 nt, Homo sapiens
uguaagugugcaauucagugau

SEQ ID NO: 69707 - RNA, 21 nt, Homo sapiens
uucaucuggccguauuccagg

SEQ ID NO: 69708 - RNA, 22 nt, Homo sapiens
uuugcauauguugaaccagccu

SEQ ID NO: 69709 - RNA, 21 nt, Homo sapiens
uugguucccucugacaggucu

SEQ ID NO: 69710 - RNA, 22 nt, Homo sapiens
uuguauguuguuugucagagaa

SEQ ID NO: 69711 - RNA, 22 nt, Homo sapiens
uuguauugucuugaugaguuga

SEQ ID NO: 69712 - RNA, 22 nt, Homo sapiens
uugugcuuuugagcugagauga

SEQ ID NO: 69713 - RNA, 22 nt, Homo sapiens
ugacaugauuguauauuuagaa

SEQ ID NO: 69714 - RNA, 22 nt, Homo sapiens
ugaauauguuaauuagcaucau

SEQ ID NO: 69715 - RNA, 22 nt, Homo sapiens
ucauccauacaguuagcaaagg

SEQ ID NO: 69716 - RNA, 22 nt, Homo sapiens
uccacuuuugugcugaauugga

SEQ ID NO: 69717 - RNA, 22 nt, Homo sapiens
uccugcauucugacuugcuuuc

SEQ ID NO: 69718 - RNA, 22 nt, Homo sapiens
uccugcauucauccugguguug

SEQ ID NO: 69719 - RNA, 22 nt, Homo sapiens
uccaguuguuauuuuuauaaag

SEQ ID NO: 69720 - RNA, 22 nt, Homo sapiens
ucauauguaugugcaauuuugu

SEQ ID NO: 69721 - RNA, 22 nt, Homo sapiens
ugauguugacuguaggcagaga

SEQ ID NO: 69722 - RNA, 22 nt, Homo sapiens
ugaugguuuuauuaauaggacc

SEQ ID NO: 69723 - RNA, 22 nt, Homo sapiens
ugauaugucacuugaucauggu

SEQ ID NO: 69724 - RNA, 22 nt, Homo sapiens
ugguauguaugauuaacaugga

SEQ ID NO: 69725 - RNA, 22 nt, Homo sapiens
ugguccacuaacccucaguauc

SEQ ID NO: 69726 - RNA, 22 nt, Homo sapiens
caccaguuuuucagugauucaa

SEQ ID NO: 69727 - RNA, 22 nt, Homo sapiens
auugcuucugauuuuaaaugag

SEQ ID NO: 69728 - RNA, 22 nt, Homo sapiens
cauagcacacguauaccuaugu

SEQ ID NO: 69729 - RNA, 22 nt, Homo sapiens
ccacaaccucaacagcaucuau

SEQ ID NO: 69730 - RNA, 18 nt, Homo sapiens
cucacacccuaaucagga

SEQ ID NO: 69731 - RNA, 22 nt, Homo sapiens
ccugucuugauuaaauuacuua

SEQ ID NO: 69732 - RNA, 22 nt, Homo sapiens
gcccauuguuccuaggcuacaa

SEQ ID NO: 69733 - RNA, 22 nt, Homo sapiens
cuuggcuugguaucaaauaacc

SEQ ID NO: 69734 - RNA, 22 nt, Homo sapiens
cugauacugaaagcuguugguu

SEQ ID NO: 69735 - RNA, 21 nt, Homo sapiens
gagaaucaucauggcugcaua

SEQ ID NO: 69736 - RNA, 22 nt, Homo sapiens
cuuuggugagggauaaauuuca

SEQ ID NO: 69737 - RNA, 22 nt, Homo sapiens
guacccuggaacaacccaauuu

SEQ ID NO: 69738 - RNA, 22 nt, Homo sapiens
gucauggagggacauaacuaac

SEQ ID NO: 69739 - RNA, 22 nt, Homo sapiens
gugucuccuguggagcuaugua

SEQ ID NO: 69740 - RNA, 22 nt, Homo sapiens
guugcugagucccaucaccaga

SEQ ID NO: 69741 - RNA, 22 nt, Homo sapiens
uaccuguagcucuucuaggcug

SEQ ID NO: 69742 - RNA, 21 nt, Homo sapiens
uacaagcuguagcacaugcca

SEQ ID NO: 69743 - RNA, 21 nt, Homo sapiens
uaauaaugucucagacaccua

SEQ ID NO: 69744 - RNA, 22 nt, Homo sapiens
uacaaagcuuugaugugucuuu

SEQ ID NO: 69745 - RNA, 22 nt, Homo sapiens
uacaagcaggaaaugguauaug

SEQ ID NO: 69746 - RNA, 22 nt, Homo sapiens
uacaaagcuuucugcaaaucau

SEQ ID NO: 69747 - RNA, 22 nt, Homo sapiens
uauagcuuaaaguuuagauccu

SEQ ID NO: 69748 - RNA, 22 nt, Homo sapiens
uauugcuuuacucucuuauccu

SEQ ID NO: 69749 - RNA, 22 nt, Homo sapiens
uauugcuuuuaacccaaucucu

SEQ ID NO: 69750 - RNA, 22 nt, Homo sapiens
uauugcuuuugauucaaggcag

SEQ ID NO: 69751 - RNA, 22 nt, Homo sapiens
acgguauagauuguauccuagg

SEQ ID NO: 69752 - RNA, 22 nt, Homo sapiens
acacuguuuuaguuauuauagc

SEQ ID NO: 69753 - RNA, 22 nt, Homo sapiens
acacauacacauaugguguaua

SEQ ID NO: 69754 - RNA, 22 nt, Homo sapiens
acaccaucuccuuauuucucuu

SEQ ID NO: 69755 - RNA, 22 nt, Homo sapiens
aacaccaucccuuugaugcuuu

SEQ ID NO: 69756 - RNA, 22 nt, Homo sapiens
auacuguuuuacaucauugccu

SEQ ID NO: 69757 - RNA, 22 nt, Homo sapiens
auagcagcaccucacucuacug

SEQ ID NO: 69758 - RNA, 22 nt, Homo sapiens
aguaucacaagguguacaccca

SEQ ID NO: 69759 - RNA, 22 nt, Homo sapiens
auguaauguuaaauugcuaauu

SEQ ID NO: 69760 - RNA, 22 nt, Homo sapiens
augauuguucucacucaagaga

SEQ ID NO: 69761 - RNA, 22 nt, Homo sapiens
augcuguuuugaauucucuaga

SEQ ID NO: 69762 - RNA, 21 nt, Homo sapiens
aagcacauugaguguguguga

SEQ ID NO: 69763 - RNA, 15 nt, Homo sapiens
aaauaugucaguucu

SEQ ID NO: 69764 - RNA, 22 nt, Homo sapiens
aaaugcacgcuacccagcuaga

SEQ ID NO: 69765 - RNA, 22 nt, Homo sapiens
aaagucacuggagaaggaauau

SEQ ID NO: 69766 - RNA, 22 nt, Homo sapiens
aaagucuagaggaucaugugug

SEQ ID NO: 69767 - RNA, 20 nt, Homo sapiens
uuuugcacuccuacuaaggu

SEQ ID NO: 69768 - RNA, 22 nt, Homo sapiens
uuuguaauaccugaggcugggu

SEQ ID NO: 69769 - RNA, 22 nt, Homo sapiens
uuuguacacuguuggugguuau

SEQ ID NO: 69770 - RNA, 22 nt, Homo sapiens
uuugugucccucuaaaauuuau

SEQ ID NO: 69771 - RNA, 22 nt, Homo sapiens
uuugauacuggguguggacaaa

SEQ ID NO: 69772 - RNA, 22 nt, Homo sapiens
uuguaguagcauuauuuauaau

SEQ ID NO: 69773 - RNA, 22 nt, Homo sapiens
uuguauguuucugugcacauga

SEQ ID NO: 69774 - RNA, 22 nt, Homo sapiens
uuguauguaaccauuuggcaaa

SEQ ID NO: 69775 - RNA, 22 nt, Homo sapiens
ugucaucuagguuuuaagccuu

SEQ ID NO: 69776 - RNA, 22 nt, Homo sapiens
ugucauauagaauguucuauga

SEQ ID NO: 69777 - RNA, 22 nt, Homo sapiens
uuagugcaaacucuucaaugcu

SEQ ID NO: 69778 - RNA, 18 nt, Homo sapiens
ugacaguuucuuuauauu

SEQ ID NO: 69779 - RNA, 18 nt, Homo sapiens
ugacaucauuuagaaagg

SEQ ID NO: 69780 - RNA, 22 nt, Homo sapiens
ucuuuguuuucugauccugaag

SEQ ID NO: 69781 - RNA, 21 nt, Homo sapiens
uggauuguacacccuaucauu

SEQ ID NO: 69782 - RNA, 18 nt, Homo sapiens
ugaguucauuagacuucc

SEQ ID NO: 69783 - RNA, 22 nt, Homo sapiens
guauaugccucaguuauagcac

SEQ ID NO: 69784 - RNA, 22 nt, Homo sapiens
guauacacccugugauauuauu

SEQ ID NO: 69785 - RNA, 22 nt, Homo sapiens
guagagugcugggcacuggcuc

SEQ ID NO: 69786 - RNA, 22 nt, Homo sapiens
gguauguaggucuacgguacaa

SEQ ID NO: 69787 - RNA, 22 nt, Homo sapiens
guguauauccuauuaguucugu

SEQ ID NO: 69788 - RNA, 22 nt, Homo sapiens
guuauguaucuugauugggugg

SEQ ID NO: 69789 - RNA, 22 nt, Homo sapiens
uagagugcugucaaagacuugu

SEQ ID NO: 69790 - RNA, 22 nt, Homo sapiens
uacacacguguguauauauaca

SEQ ID NO: 69791 - RNA, 22 nt, Homo sapiens
uaaugcaucagugguaguucuu

SEQ ID NO: 69792 - RNA, 22 nt, Homo sapiens
uaguaaacauuuuucuaucauu

SEQ ID NO: 69793 - RNA, 22 nt, Homo sapiens
uauaucacaugcacucauuuuc

SEQ ID NO: 69794 - RNA, 22 nt, Homo sapiens
cauugcuaaaagucauauauaa

SEQ ID NO: 69795 - RNA, 22 nt, Homo sapiens
ccaguuuucaagauaaugguuu

SEQ ID NO: 69796 - RNA, 22 nt, Homo sapiens
ccuguguuaugguuucuaaugu

SEQ ID NO: 69797 - RNA, 22 nt, Homo sapiens
cccaguuuugccacuuacuagc

SEQ ID NO: 69798 - RNA, 22 nt, Homo sapiens
cccaguuuugcuucucaugagg

SEQ ID NO: 69799 - RNA, 22 nt, Homo sapiens
cuaucacuguuuugaugcccgg

SEQ ID NO: 69800 - RNA, 22 nt, Homo sapiens
auuauaguguauacuugaaauu

SEQ ID NO: 69801 - RNA, 22 nt, Homo sapiens
cacugcauuggaugguuccucc

SEQ ID NO: 69802 - RNA, 22 nt, Homo sapiens
caccuguacauggcaguguccu

SEQ ID NO: 69803 - RNA, 22 nt, Homo sapiens
caagugcuugaugaaugaucaa

SEQ ID NO: 69804 - RNA, 22 nt, Homo sapiens
cacaccuaccucauuauggaca

SEQ ID NO: 69805 - RNA, 22 nt, Homo sapiens
cuucuguuaguucugauaacuu

SEQ ID NO: 69806 - RNA, 22 nt, Homo sapiens
gcaaaguaauuguuguuuuugc

SEQ ID NO: 69807 - RNA, 22 nt, Homo sapiens
agagaucauuuuguuucaaauc

SEQ ID NO: 69808 - RNA, 22 nt, Homo sapiens
agccuguagugagcugugauug

SEQ ID NO: 69809 - RNA, 22 nt, Homo sapiens
acuacauaugacaucuucuuua

SEQ ID NO: 69810 - RNA, 22 nt, Homo sapiens
acauacacuagggauguggugu

SEQ ID NO: 69811 - RNA, 22 nt, Homo sapiens
acauaguagacacugaaaauau

SEQ ID NO: 69812 - RNA, 22 nt, Homo sapiens
aguuggcacugagcugugauug

SEQ ID NO: 69813 - RNA, 22 nt, Homo sapiens
auacacauuccugggccucacc

SEQ ID NO: 69814 - RNA, 22 nt, Homo sapiens
auaugucuauuauuagggcagg

SEQ ID NO: 69815 - RNA, 23 nt, Homo sapiens
auauaguagaugugcaguaacau

SEQ ID NO: 69816 - RNA, 22 nt, Homo sapiens
aucauguaguaagacacauuua

SEQ ID NO: 69817 - RNA, 22 nt, Homo sapiens
augaguaugagaauacauuaag

SEQ ID NO: 69818 - RNA, 22 nt, Homo sapiens
augcacuuggcaggaugauucc

SEQ ID NO: 69819 - RNA, 22 nt, Homo sapiens
augcauaugucuuuauaguggc

SEQ ID NO: 69820 - RNA, 22 nt, Homo sapiens
auguaacaguauuuggagaugu

SEQ ID NO: 69821 - RNA, 20 nt, Homo sapiens
auguaauguaugauauguac

SEQ ID NO: 69822 - RNA, 22 nt, Homo sapiens
augguuuauuuguaagcagagu

SEQ ID NO: 69823 - RNA, 22 nt, Homo sapiens
auggauauuuuuugaacauaga

SEQ ID NO: 69824 - RNA, 22 nt, Homo sapiens
aaaccacagugugcugcugggg

SEQ ID NO: 69825 - RNA, 22 nt, Homo sapiens
aaguauagcuaugauaaacauu

SEQ ID NO: 69826 - RNA, 22 nt, Homo sapiens
aaguauuagugaggauauggaa

SEQ ID NO: 69827 - RNA, 22 nt, Homo sapiens
agcacauuaguaucuaagaaca

SEQ ID NO: 69828 - RNA, 22 nt, Homo sapiens
agagaucaauaugaaggaaaug

SEQ ID NO: 69829 - RNA, 19 nt, Homo sapiens
augauugucuauggaggaa

SEQ ID NO: 69830 - RNA, 22 nt, Homo sapiens
augauacuguucuaagauuuuu

SEQ ID NO: 69831 - RNA, 22 nt, Homo sapiens
auguuguaguaugagucaaaau

SEQ ID NO: 69832 - RNA, 22 nt, Homo sapiens
auucauagugcuaagguguauc

SEQ ID NO: 69833 - RNA, 21 nt, Homo sapiens
auguaaugaagaagccacugg

SEQ ID NO: 69834 - RNA, 23 nt, Homo sapiens
augugugcuuggagagcaggaug

SEQ ID NO: 69835 - RNA, 22 nt, Homo sapiens
auguguauuaccucgauuguga

SEQ ID NO: 69836 - RNA, 22 nt, Homo sapiens
auaugucuguuuagucuguaau

SEQ ID NO: 69837 - RNA, 22 nt, Homo sapiens
auauguauuuuaacguguaagg

SEQ ID NO: 69838 - RNA, 22 nt, Homo sapiens
auauucacuauaugcagaacca

SEQ ID NO: 69839 - RNA, 22 nt, Homo sapiens
ucuggccuagaacaauuaauua

SEQ ID NO: 69840 - RNA, 21 nt, Homo sapiens
ucuguguugaucucacuggga

SEQ ID NO: 69841 - RNA, 22 nt, Homo sapiens
ucuguguugaucacacugggag

SEQ ID NO: 69842 - RNA, 19 nt, Homo sapiens
ucccuguagaccacagugc

SEQ ID NO: 69843 - RNA, 22 nt, Homo sapiens
ucucuguuugucuguuacuggu

SEQ ID NO: 69844 - RNA, 22 nt, Homo sapiens
ucucugagaccacuccaaacuc

SEQ ID NO: 69845 - RNA, 22 nt, Homo sapiens
ucgcaguuaauaaugaugugcg

SEQ ID NO: 69846 - RNA, 21 nt, Homo sapiens
uguauauguuuauacacacac

SEQ ID NO: 69847 - RNA, 22 nt, Homo sapiens
uguauauguuuguacauauguc

SEQ ID NO: 69848 - RNA, 22 nt, Homo sapiens
uguauacauauguauguuuugu

SEQ ID NO: 69849 - RNA, 20 nt, Homo sapiens
ugucuauggggguucucugc

SEQ ID NO: 69850 - RNA, 22 nt, Homo sapiens
ugcuaugucuucucucacagag

SEQ ID NO: 69851 - RNA, 21 nt, Homo sapiens
ugcuauguuguccaggcuggc

SEQ ID NO: 69852 - RNA, 22 nt, Homo sapiens
ugcuaugucagccaggcugguc

SEQ ID NO: 69853 - RNA, 22 nt, Homo sapiens
ugcuuuguugaaaaucauuugg

SEQ ID NO: 69854 - RNA, 22 nt, Homo sapiens
ugcauguucuuacucauacaug

SEQ ID NO: 69855 - RNA, 22 nt, Homo sapiens
ugcaaguaauuggcgaggaguu

SEQ ID NO: 69856 - RNA, 22 nt, Homo sapiens
ugcaaguaauuccagcuacuga

SEQ ID NO: 69857 - RNA, 22 nt, Homo sapiens
uuucauccggcuguguauuaug

SEQ ID NO: 69858 - RNA, 22 nt, Homo sapiens
uuugcuauagugaauagugcug

SEQ ID NO: 69859 - RNA, 22 nt, Homo sapiens
aaccuauaguauugaaaucaag

SEQ ID NO: 69860 - RNA, 22 nt, Homo sapiens
uugugcuugauuugccuagcug

SEQ ID NO: 69861 - RNA, 22 nt, Homo sapiens
uuggaauguauggcaucuugcg

SEQ ID NO: 69862 - RNA, 22 nt, Homo sapiens
uuguaaucaacacaucauuggg

SEQ ID NO: 69863 - RNA, 22 nt, Homo sapiens
uuguacuagucauauuuugaaa

SEQ ID NO: 69864 - RNA, 22 nt, Homo sapiens
uuguaauggagcaaacagguug

SEQ ID NO: 69865 - RNA, 22 nt, Homo sapiens
uugaaccauucuuuugauagag

SEQ ID NO: 69866 - RNA, 22 nt, Homo sapiens
uuccacagggauuugcauugau

SEQ ID NO: 69867 - RNA, 22 nt, Homo sapiens
cucucuguuugucuguuauugg

SEQ ID NO: 69868 - RNA, 22 nt, Homo sapiens
ccaguguuuuugaauuccagga

SEQ ID NO: 69869 - RNA, 22 nt, Homo sapiens
ccaguuuuucauuuauacuagu

SEQ ID NO: 69870 - RNA, 22 nt, Homo sapiens
caagugcuacagagaaaucuuu

SEQ ID NO: 69871 - RNA, 22 nt, Homo sapiens
cacauguuuuagcauggcuguu

SEQ ID NO: 69872 - RNA, 22 nt, Homo sapiens
caugacacuggcauguuucuuu

SEQ ID NO: 69873 - RNA, 22 nt, Homo sapiens
caugacacauguuuaccuaugu

SEQ ID NO: 69874 - RNA, 22 nt, Homo sapiens
caguacaauguugauuagaagu

SEQ ID NO: 69875 - RNA, 22 nt, Homo sapiens
cagcuugugguauugcugguug

SEQ ID NO: 69876 - RNA, 21 nt, Homo sapiens
gaccuguaguaagcauucaca

SEQ ID NO: 69877 - RNA, 22 nt, Homo sapiens
cugucaucauuucuaugugcca

SEQ ID NO: 69878 - RNA, 22 nt, Homo sapiens
cuguauguuucuaugaauguga

SEQ ID NO: 69879 - RNA, 22 nt, Homo sapiens
gcauauguuuggguguguauau

SEQ ID NO: 69880 - RNA, 22 nt, Homo sapiens
gcaugaugaauaauaucacaag

SEQ ID NO: 69881 - RNA, 22 nt, Homo sapiens
ucaagugcauugauucaguauu

SEQ ID NO: 69882 - RNA, 21 nt, Homo sapiens
uauccacuugcaacagagaag

SEQ ID NO: 69883 - RNA, 22 nt, Homo sapiens
uaugguuuuggaauccugcaga

SEQ ID NO: 69884 - RNA, 18 nt, Homo sapiens
uaucucauuucuuagguc

SEQ ID NO: 69885 - RNA, 22 nt, Homo sapiens
uauugcagugagauccaucugg

SEQ ID NO: 69886 - RNA, 22 nt, Homo sapiens
uauuacauccauaggcucugcu

SEQ ID NO: 69887 - RNA, 18 nt, Homo sapiens
uauugcuugguuuggaga

SEQ ID NO: 69888 - RNA, 22 nt, Homo sapiens
uacuuuguagagugugagaauu

SEQ ID NO: 69889 - RNA, 23 nt, Homo sapiens
uaccacauuccuucuuuccuguu

SEQ ID NO: 69890 - RNA, 22 nt, Homo sapiens
uagguagaaucuugaagccauu

SEQ ID NO: 69891 - RNA, 22 nt, Homo sapiens
uagugguaguagcaguaauauu

SEQ ID NO: 69892 - RNA, 22 nt, Homo sapiens
uauaugucuucuuguaauuggc

SEQ ID NO: 69893 - RNA, 22 nt, Homo sapiens
uauauguucugugucccuuucg

SEQ ID NO: 69894 - RNA, 22 nt, Homo sapiens
uaggcacacaucuacuacaaau

SEQ ID NO: 69895 - RNA, 22 nt, Homo sapiens
gucuuugcauguauguucauga

SEQ ID NO: 69896 - RNA, 22 nt, Homo sapiens
ggcaaguauguuuuaggaugcu

SEQ ID NO: 69897 - RNA, 22 nt, Homo sapiens
ggcaugcauuguacuaguaugc

SEQ ID NO: 69898 - RNA, 22 nt, Homo sapiens
gugaguuauuauuuauguaaac

SEQ ID NO: 69899 - RNA, 22 nt, Homo sapiens
uaaauggauaaaugaauaccua

SEQ ID NO: 69900 - RNA, 22 nt, Homo sapiens
guugaaaucaucacuuggcaug

SEQ ID NO: 69901 - RNA, 17 nt, Homo sapiens
guugaguuugagucaag

SEQ ID NO: 69902 - RNA, 22 nt, Homo sapiens
guugaucuauguugcuggcagu

SEQ ID NO: 69903 - RNA, 22 nt, Homo sapiens
guuugugguuaaagccuuucau

SEQ ID NO: 69904 - RNA, 22 nt, Homo sapiens
gugauaucacuguaucacucca

SEQ ID NO: 69905 - RNA, 22 nt, Homo sapiens
gucuuugcauguauguucauga

SEQ ID NO: 69906 - RNA, 22 nt, Homo sapiens
gucuggcuccugucuaaucacu

SEQ ID NO: 69907 - RNA, 22 nt, Homo sapiens
gucugucuuuugucuuugaaau

SEQ ID NO: 69908 - RNA, 19 nt, Homo sapiens
uagaugucuuugcauagau

SEQ ID NO: 69909 - RNA, 22 nt, Homo sapiens
uagauuaucccugauuugucca

SEQ ID NO: 69910 - RNA, 18 nt, Homo sapiens
uauugcuugguuuggaga

SEQ ID NO: 69911 - RNA, 22 nt, Homo sapiens
uauugcuggauguauuacaugu

SEQ ID NO: 69912 - RNA, 22 nt, Homo sapiens
gcauauguuuggguguguauau

SEQ ID NO: 69913 - RNA, 22 nt, Homo sapiens
gaugugaaaucauaguuucuag

SEQ ID NO: 69914 - RNA, 22 nt, Homo sapiens
gauggcauuucuggaucugaca

SEQ ID NO: 69915 - RNA, 22 nt, Homo sapiens
gaguugagagaguuguuauuuc

SEQ ID NO: 69916 - RNA, 21 nt, Homo sapiens
gcuuuuucggaagucuuuggc

SEQ ID NO: 69917 - RNA, 22 nt, Homo sapiens
ggaugcauuuuugguugucaca

SEQ ID NO: 69918 - RNA, 19 nt, Homo sapiens
cuuugguugagcguguugg

SEQ ID NO: 69919 - RNA, 22 nt, Homo sapiens
cuguguaguacuagauugagca

SEQ ID NO: 69920 - RNA, 22 nt, Homo sapiens
cuuuuacacugcuggugggaau

SEQ ID NO: 69921 - RNA, 22 nt, Homo sapiens
cuuuuacacuguuggugggaau

SEQ ID NO: 69922 - RNA, 22 nt, Homo sapiens
gacuggcuguuuucuuuauuau

SEQ ID NO: 69923 - RNA, 22 nt, Homo sapiens
gagcugaucuuuauguaaauuc

SEQ ID NO: 69924 - RNA, 21 nt, Homo sapiens
gaggauauuuuuauguuugga

SEQ ID NO: 69925 - RNA, 22 nt, Homo sapiens
caugucuuuuauucugugugau

SEQ ID NO: 69926 - RNA, 22 nt, Homo sapiens
uuccuugagucuuuuuccugag

SEQ ID NO: 69927 - RNA, 22 nt, Homo sapiens
uugagggaggccucaguuuaca

SEQ ID NO: 69928 - RNA, 22 nt, Homo sapiens
uugagauggaguuuugcucuug

SEQ ID NO: 69929 - RNA, 22 nt, Homo sapiens
uugagauggaguuucgcucuug

SEQ ID NO: 69930 - RNA, 22 nt, Homo sapiens
uugagauggaguuucacucuug

SEQ ID NO: 69931 - RNA, 22 nt, Homo sapiens
uugagauggaguuucgcucuuu

SEQ ID NO: 69932 - RNA, 22 nt, Homo sapiens
uugagauggagucucacugugu

SEQ ID NO: 69933 - RNA, 22 nt, Homo sapiens
uugagauggagucucgcucuuu

SEQ ID NO: 69934 - RNA, 22 nt, Homo sapiens
uugagauggagucuugcacugu

SEQ ID NO: 69935 - RNA, 22 nt, Homo sapiens
uugacauaguuucugaaauaga

SEQ ID NO: 69936 - RNA, 22 nt, Homo sapiens
uguugguuaaaucagguuuuaa

SEQ ID NO: 69937 - RNA, 22 nt, Homo sapiens
uguugcauuugucaaggucaag

SEQ ID NO: 69938 - RNA, 22 nt, Homo sapiens
uguucuugagccuuuagaccua

SEQ ID NO: 69939 - RNA, 22 nt, Homo sapiens
uguucuggagaguuuagucugg

SEQ ID NO: 69940 - RNA, 22 nt, Homo sapiens
uugauauucugagaagcugaag

SEQ ID NO: 69941 - RNA, 22 nt, Homo sapiens
uugugcauguauauuaguucac

SEQ ID NO: 69942 - RNA, 19 nt, Homo sapiens
uugucuuagaguugucauu

SEQ ID NO: 69943 - RNA, 22 nt, Homo sapiens
uugucaugguuaauuuuaugua

SEQ ID NO: 69944 - RNA, 22 nt, Homo sapiens
uuguccuugagauaguuugcag

SEQ ID NO: 69945 - RNA, 22 nt, Homo sapiens
uuuuugauuaauggguagacca

SEQ ID NO: 69946 - RNA, 22 nt, Homo sapiens
uuuuuggaggagguuagaucau

SEQ ID NO: 69947 - RNA, 22 nt, Homo sapiens
uuuuugaguaaauauaaauugu

SEQ ID NO: 69948 - RNA, 22 nt, Homo sapiens
uuucauguuuuucugugaggca

SEQ ID NO: 69949 - RNA, 22 nt, Homo sapiens
uuugcuuaaaguccuuguggga

SEQ ID NO: 69950 - RNA, 22 nt, Homo sapiens
uuuguacacuguuggugguuau

SEQ ID NO: 69951 - RNA, 22 nt, Homo sapiens
uuuugcaggcauuggaaguuua

SEQ ID NO: 69952 - RNA, 22 nt, Homo sapiens
uuuuggucuccaguuucugcug

SEQ ID NO: 69953 - RNA, 22 nt, Homo sapiens
uuuugguuaggauggguggcau

SEQ ID NO: 69954 - RNA, 22 nt, Homo sapiens
ugcuugagacacauaugaauuu

SEQ ID NO: 69955 - RNA, 22 nt, Homo sapiens
uggaaguuaaauuaguugauga

SEQ ID NO: 69956 - RNA, 22 nt, Homo sapiens
ugucauauagaauguucuauga

SEQ ID NO: 69957 - RNA, 22 nt, Homo sapiens
uguauguuuaaggccaguggaa

SEQ ID NO: 69958 - RNA, 23 nt, Homo sapiens
ugguuuguaagagauggacugga

SEQ ID NO: 69959 - RNA, 22 nt, Homo sapiens
ugguguccugucucugcgcuug

SEQ ID NO: 69960 - RNA, 18 nt, Homo sapiens
uggauaugaaauucugga

SEQ ID NO: 69961 - RNA, 22 nt, Homo sapiens
ucucuguuuauuuuugguguau

SEQ ID NO: 69962 - RNA, 21 nt, Homo sapiens
ucuguguugaucucacuggga

SEQ ID NO: 69963 - RNA, 22 nt, Homo sapiens
ucugugguucaggcuggagugc

SEQ ID NO: 69964 - RNA, 22 nt, Homo sapiens
ucugagguuaaauuuuauaguu

SEQ ID NO: 69965 - RNA, 20 nt, Homo sapiens
ucugauugcaacugcaugag

SEQ ID NO: 69966 - RNA, 22 nt, Homo sapiens
ucuugcuuuugcagagcuucuc

SEQ ID NO: 69967 - RNA, 22 nt, Homo sapiens
ugagaucuuggaggcuuuguga

SEQ ID NO: 69968 - RNA, 22 nt, Homo sapiens
ugaggcaagauacugauuucau

SEQ ID NO: 69969 - RNA, 22 nt, Homo sapiens
ugagaugaguugcgcucugucg

SEQ ID NO: 69970 - RNA, 22 nt, Homo sapiens
ugagacugaguuuugcucguug

SEQ ID NO: 69971 - RNA, 22 nt, Homo sapiens
ugagacugaguuuugcucuugu

SEQ ID NO: 69972 - RNA, 22 nt, Homo sapiens
ugagaaugcagaaucucgugca

SEQ ID NO: 69973 - RNA, 22 nt, Homo sapiens
auccaagagacugaugacuucc

SEQ ID NO: 69974 - RNA, 22 nt, Homo sapiens
augguuugugcuccuauaagaa

SEQ ID NO: 69975 - RNA, 22 nt, Homo sapiens
auguuguaguaugagucaaaau

SEQ ID NO: 69976 - RNA, 22 nt, Homo sapiens
auggauugucuccuugugccau

SEQ ID NO: 69977 - RNA, 20 nt, Homo sapiens
agaaccuguaguguagaggg

SEQ ID NO: 69978 - RNA, 21 nt, Homo sapiens
agcugguuuccacagugugcu

SEQ ID NO: 69979 - RNA, 22 nt, Homo sapiens
aguuuuugcugauagcaugcuu

SEQ ID NO: 69980 - RNA, 19 nt, Homo sapiens
aguggguguuuucuguuug

SEQ ID NO: 69981 - RNA, 20 nt, Homo sapiens
auguaauguaugauauguac

SEQ ID NO: 69982 - RNA, 22 nt, Homo sapiens
augagggagggcaccugaccuu

SEQ ID NO: 69983 - RNA, 22 nt, Homo sapiens
aucauggaguauuugcaagucu

SEQ ID NO: 69984 - RNA, 22 nt, Homo sapiens
auagaguuagaaagaaauguuu

SEQ ID NO: 69985 - RNA, 22 nt, Homo sapiens
auaauagguugauugacauugc

SEQ ID NO: 69986 - RNA, 22 nt, Homo sapiens
gauuuuuggggaagccucuuau

SEQ ID NO: 69987 - RNA, 22 nt, Homo sapiens
gaugauguuacucuuuuuccuu

SEQ ID NO: 69988 - RNA, 22 nt, Homo sapiens
gaucuguuucaauugucuuagu

SEQ ID NO: 69989 - RNA, 22 nt, Homo sapiens
cugugguuacguucuuugugcu

SEQ ID NO: 69990 - RNA, 21 nt, Homo sapiens
cugguguuagcacuucuuccc

SEQ ID NO: 69991 - RNA, 22 nt, Homo sapiens
cucuuuuguuuagcugagaggg

SEQ ID NO: 69992 - RNA, 22 nt, Homo sapiens
cuugccuaaucugcaugauuuu

SEQ ID NO: 69993 - RNA, 22 nt, Homo sapiens
cuuuuacacugguggugggaau

SEQ ID NO: 69994 - RNA, 22 nt, Homo sapiens
gaauacuguccaagagugaugg

SEQ ID NO: 69995 - RNA, 22 nt, Homo sapiens
auuugguuauucaguuguucag

SEQ ID NO: 69996 - RNA, 22 nt, Homo sapiens
cagauaguuguagauaugcagc

SEQ ID NO: 69997 - RNA, 22 nt, Homo sapiens
auuauguuguauuuccuugcag

SEQ ID NO: 69998 - RNA, 22 nt, Homo sapiens
auugcauuuucagguuggucug

SEQ ID NO: 69999 - RNA, 22 nt, Homo sapiens
auugcugagacauugcuaaucu

SEQ ID NO: 70000 - RNA, 22 nt, Homo sapiens
uaguagcauaccuaaguauacu

SEQ ID NO: 70001 - RNA, 22 nt, Homo sapiens
uaugcacuaggcacuguguuug

SEQ ID NO: 70002 - RNA, 22 nt, Homo sapiens
uauugcuuaugaugcugaauua

SEQ ID NO: 70003 - RNA, 22 nt, Homo sapiens
uaaugcaucagugguaguucuu

SEQ ID NO: 70004 - RNA, 22 nt, Homo sapiens
uaaugcauacagaagguguuuu

SEQ ID NO: 70005 - RNA, 22 nt, Homo sapiens
gugucaugagggggacaggaag

SEQ ID NO: 70006 - RNA, 22 nt, Homo sapiens
guaugucuuuauagcagugugg

SEQ ID NO: 70007 - RNA, 22 nt, Homo sapiens
ggcauugugaacauuucccugc

SEQ ID NO: 70008 - RNA, 22 nt, Homo sapiens
ugauagaucugggcaaaguaaa

SEQ ID NO: 70009 - RNA, 22 nt, Homo sapiens
ugagcauuguguuugacuguga

SEQ ID NO: 70010 - RNA, 22 nt, Homo sapiens
ugaucuguguauauugaaccag

SEQ ID NO: 70011 - RNA, 21 nt, Homo sapiens
uggauuguacacccuaucauu

SEQ ID NO: 70012 - RNA, 18 nt, Homo sapiens
uggauuggaaaaguuccu

SEQ ID NO: 70013 - RNA, 20 nt, Homo sapiens
uggauugugaugggauuugc

SEQ ID NO: 70014 - RNA, 22 nt, Homo sapiens
uggagucuugaugauuuucaaa

SEQ ID NO: 70015 - RNA, 22 nt, Homo sapiens
ucuuuuguucuauucaggccuu

SEQ ID NO: 70016 - RNA, 22 nt, Homo sapiens
ucuuuguucaggagccaacucc

SEQ ID NO: 70017 - RNA, 22 nt, Homo sapiens
ucuuugguaauggaugucugau

SEQ ID NO: 70018 - RNA, 22 nt, Homo sapiens
ucuuugguagaagcuauuuuau

SEQ ID NO: 70019 - RNA, 22 nt, Homo sapiens
ugacugguguuuaaugagucaa

SEQ ID NO: 70020 - RNA, 22 nt, Homo sapiens
uccuucaugcaucaauguaucc

SEQ ID NO: 70021 - RNA, 17 nt, Homo sapiens
ucccauguuucuucuac

SEQ ID NO: 70022 - RNA, 22 nt, Homo sapiens
uucuauugguaauauuuucugu

SEQ ID NO: 70023 - RNA, 22 nt, Homo sapiens
uggucuucuggccuccagaacc

SEQ ID NO: 70024 - RNA, 19 nt, Homo sapiens
ugucaucaucuuuucuugc

SEQ ID NO: 70025 - RNA, 22 nt, Homo sapiens
ugucaugucaacuauggaauuu

SEQ ID NO: 70026 - RNA, 22 nt, Homo sapiens
ugucauguugguguacugcacc

SEQ ID NO: 70027 - RNA, 22 nt, Homo sapiens
ugucauguuucuacugaccaaa

SEQ ID NO: 70028 - RNA, 22 nt, Homo sapiens
ugugucuugcuggugccugcau

SEQ ID NO: 70029 - RNA, 22 nt, Homo sapiens
ugugucuugaauuuuguaugua

SEQ ID NO: 70030 - RNA, 22 nt, Homo sapiens
uguuuuggaggccagaagucca

SEQ ID NO: 70031 - RNA, 22 nt, Homo sapiens
uuaauuguaucuauagauguca

SEQ ID NO: 70032 - RNA, 22 nt, Homo sapiens
uguucaugaguucucauuuuua

SEQ ID NO: 70033 - RNA, 22 nt, Homo sapiens
uguuuguuugugauacgguaca

SEQ ID NO: 70034 - RNA, 18 nt, Homo sapiens
uguugguguucacucacu

SEQ ID NO: 70035 - RNA, 22 nt, Homo sapiens
uuggauugugaaaguauucucu

SEQ ID NO: 70036 - RNA, 22 nt, Homo sapiens
uuggacuucuaacugacaugga

SEQ ID NO: 70037 - RNA, 22 nt, Homo sapiens
uugaguauuugcagucugaaca

SEQ ID NO: 70038 - RNA, 22 nt, Homo sapiens
uucugugguuucauuuaccugu

SEQ ID NO: 70039 - RNA, 23 nt, Homo sapiens
uugcauugcccuccauaguacuc

SEQ ID NO: 70040 - RNA, 22 nt, Homo sapiens
uuugauuguacuaaaauuguac

SEQ ID NO: 70041 - RNA, 22 nt, Homo sapiens
uuugagcauggaaauggcauga

SEQ ID NO: 70042 - RNA, 22 nt, Homo sapiens
uuguuuuggagaugagcuaaaa

SEQ ID NO: 70043 - RNA, 21 nt, Homo sapiens
uuugugguuacugugugagcu

SEQ ID NO: 70044 - RNA, 18 nt, Homo sapiens
uuuguacuuuuucuaaug

SEQ ID NO: 70045 - RNA, 22 nt, Homo sapiens
uuugucauagcagcaggaaugg

SEQ ID NO: 70046 - RNA, 22 nt, Homo sapiens
uuugugagguggauagauugca

SEQ ID NO: 70047 - RNA, 22 nt, Homo sapiens
uuugucuccuaagacucugugg

SEQ ID NO: 70048 - RNA, 23 nt, Homo sapiens
uuuguacuaugucaguuuagaua

SEQ ID NO: 70049 - RNA, 22 nt, Homo sapiens
uuugguguauaaaaaugcuagu

SEQ ID NO: 70050 - RNA, 22 nt, Homo sapiens
augcauggcagagucaggguac

SEQ ID NO: 70051 - RNA, 22 nt, Homo sapiens
augagggagggguggugccgca

SEQ ID NO: 70052 - RNA, 22 nt, Homo sapiens
augagggaagcucacgugucca

SEQ ID NO: 70053 - RNA, 21 nt, Homo sapiens
aucugugagaccuuggggguu

SEQ ID NO: 70054 - RNA, 22 nt, Homo sapiens
auggacuuuuuguucagugucu

SEQ ID NO: 70055 - RNA, 22 nt, Homo sapiens
auggaaggagaggaaugaauga

SEQ ID NO: 70056 - RNA, 22 nt, Homo sapiens
auacaugugucauguugguuug

SEQ ID NO: 70057 - RNA, 22 nt, Homo sapiens
auacaugugccauguugguaug

SEQ ID NO: 70058 - RNA, 22 nt, Homo sapiens
auacaugugccauguugguuug

SEQ ID NO: 70059 - RNA, 22 nt, Homo sapiens
auacuguuuuacaucauugccu

SEQ ID NO: 70060 - RNA, 22 nt, Homo sapiens
auacugguuuuugucaugugga

SEQ ID NO: 70061 - RNA, 21 nt, Homo sapiens
aucagagacccaggcuuccuc

SEQ ID NO: 70062 - RNA, 22 nt, Homo sapiens
auccugagacuuugcugaaguu

SEQ ID NO: 70063 - RNA, 22 nt, Homo sapiens
agaaugucagcuggauucagcu

SEQ ID NO: 70064 - RNA, 22 nt, Homo sapiens
acugguuguuuaacugaauuga

SEQ ID NO: 70065 - RNA, 22 nt, Homo sapiens
acagauagacauauauagcuca

SEQ ID NO: 70066 - RNA, 22 nt, Homo sapiens
aauugcuucuguauuuuggaca

SEQ ID NO: 70067 - RNA, 22 nt, Homo sapiens
uauugauuaauugugauuaggc

SEQ ID NO: 70068 - RNA, 22 nt, Homo sapiens
uaucauagucacuuccaguuug

SEQ ID NO: 70069 - RNA, 22 nt, Homo sapiens
uauggauuugccuauucuguau

SEQ ID NO: 70070 - RNA, 22 nt, Homo sapiens
uaaugcaucaugguuggcaaac

SEQ ID NO: 70071 - RNA, 20 nt, Homo sapiens
uaaguuguauuugucaugaa

SEQ ID NO: 70072 - RNA, 22 nt, Homo sapiens
guuguacuaccucucguauuag

SEQ ID NO: 70073 - RNA, 22 nt, Homo sapiens
guugugcuuaagccuauugauu

SEQ ID NO: 70074 - RNA, 22 nt, Homo sapiens
guuugccuuuuagauaggaaug

SEQ ID NO: 70075 - RNA, 22 nt, Homo sapiens
gugagggagcuggaauauuuau

SEQ ID NO: 70076 - RNA, 22 nt, Homo sapiens
gcugucuggagucuguucaaug

SEQ ID NO: 70077 - RNA, 21 nt, Homo sapiens
ggcucuguggucucagguuuc

SEQ ID NO: 70078 - RNA, 22 nt, Homo sapiens
ggcugguuuucaguuacugagu

SEQ ID NO: 70079 - RNA, 22 nt, Homo sapiens
gggauuguaauacugaguuggu

SEQ ID NO: 70080 - RNA, 22 nt, Homo sapiens
gaauacugacuauuucaucugg

SEQ ID NO: 70081 - RNA, 22 nt, Homo sapiens
gagacugagucucacucuguca

SEQ ID NO: 70082 - RNA, 22 nt, Homo sapiens
cugagguuaggaguuugagacc

SEQ ID NO: 70083 - RNA, 19 nt, Homo sapiens
cuguuguacuccaggcauu

SEQ ID NO: 70084 - RNA, 22 nt, Homo sapiens
cuuguggugcuuuuacgugggc

SEQ ID NO: 70085 - RNA, 22 nt, Homo sapiens
cuucaugucuucaauggggggg

SEQ ID NO: 70086 - RNA, 19 nt, Homo sapiens
gcugguuguccacucucuc

SEQ ID NO: 70087 - RNA, 22 nt, Homo sapiens
gcugcuguaccagaugugguua

SEQ ID NO: 70088 - RNA, 22 nt, Homo sapiens
gauaugaguagucgcauugaug

SEQ ID NO: 70089 - RNA, 22 nt, Homo sapiens
gaucacaugggagaaugagagu

SEQ ID NO: 70090 - RNA, 22 nt, Homo sapiens
gaucuggagguuuuccucauga

SEQ ID NO: 70091 - RNA, 22 nt, Homo sapiens
gaucuguuuuccuauuguuugu

SEQ ID NO: 70092 - RNA, 22 nt, Homo sapiens
ccugucuugauuaaauuacuua

SEQ ID NO: 70093 - RNA, 22 nt, Homo sapiens
cucuuugaguuccuccuggugu

SEQ ID NO: 70094 - RNA, 22 nt, Homo sapiens
auugcuuuuacugggagcuuug

SEQ ID NO: 70095 - RNA, 22 nt, Homo sapiens
auuguucuuguguccuuuuccu

SEQ ID NO: 70096 - RNA, 22 nt, Homo sapiens
cagcacauagcaguugcucagu

SEQ ID NO: 70097 - RNA, 22 nt, Homo sapiens
ugcauaugucuuuauaguagca

SEQ ID NO: 70098 - RNA, 22 nt, Homo sapiens
ugaggaauguguguuaaagaua

SEQ ID NO: 70099 - RNA, 22 nt, Homo sapiens
ugagguuggguaauuuaugaag

SEQ ID NO: 70100 - RNA, 22 nt, Homo sapiens
ugagguugaaggacauuuuuau

SEQ ID NO: 70101 - RNA, 22 nt, Homo sapiens
ucaugaaguaguuaacugguug

SEQ ID NO: 70102 - RNA, 22 nt, Homo sapiens
ucauggcuuuuauuauguugag

SEQ ID NO: 70103 - RNA, 21 nt, Homo sapiens
ugaauauuuggguugugucca

SEQ ID NO: 70104 - RNA, 22 nt, Homo sapiens
ugaauuguuucauucuuuacau

SEQ ID NO: 70105 - RNA, 19 nt, Homo sapiens
ucuuugguacgugcuuuga

SEQ ID NO: 70106 - RNA, 22 nt, Homo sapiens
ugaagagucuaaaucugucuuc

SEQ ID NO: 70107 - RNA, 22 nt, Homo sapiens
uuguauguuucugugcacauga

SEQ ID NO: 70108 - RNA, 22 nt, Homo sapiens
uuguauguuguuugucagagaa

SEQ ID NO: 70109 - RNA, 22 nt, Homo sapiens
uugguucucuuuauaugcugga

SEQ ID NO: 70110 - RNA, 22 nt, Homo sapiens
uugugguuuucagcuuauauau

SEQ ID NO: 70111 - RNA, 22 nt, Homo sapiens
uuucugugguccucuugaaggu

SEQ ID NO: 70112 - RNA, 22 nt, Homo sapiens
uuucugguuaauuucuaagagc

SEQ ID NO: 70113 - RNA, 22 nt, Homo sapiens
uuugagcaugcagauugccagg

SEQ ID NO: 70114 - RNA, 22 nt, Homo sapiens
uuugagcauuagggcaaaggca

SEQ ID NO: 70115 - RNA, 22 nt, Homo sapiens
uuggcauuuuuagucaugggaa

SEQ ID NO: 70116 - RNA, 22 nt, Homo sapiens
uugcauaagugcauucugugau

SEQ ID NO: 70117 - RNA, 22 nt, Homo sapiens
uugcacuuccgccugggugaca

SEQ ID NO: 70118 - RNA, 22 nt, Homo sapiens
uugcacuugcugaggagugauu

SEQ ID NO: 70119 - RNA, 22 nt, Homo sapiens
uugaauagugacuuugauucug

SEQ ID NO: 70120 - RNA, 22 nt, Homo sapiens
uugauuagauccaguugauuga

SEQ ID NO: 70121 - RNA, 22 nt, Homo sapiens
uugaauguacuuguucucacua

SEQ ID NO: 70122 - RNA, 22 nt, Homo sapiens
uugaucugugucccugcccaau

SEQ ID NO: 70123 - RNA, 22 nt, Homo sapiens
uugaugauguuucugccuugcc

SEQ ID NO: 70124 - RNA, 22 nt, Homo sapiens
uucuucugguuaugaaauuuga

SEQ ID NO: 70125 - RNA, 22 nt, Homo sapiens
uuacauguuguggguuguggcc

SEQ ID NO: 70126 - RNA, 22 nt, Homo sapiens
ugugguuuuucacauuuagaga

SEQ ID NO: 70127 - RNA, 21 nt, Homo sapiens
uguuuuugcuguguaucucuc

SEQ ID NO: 70128 - RNA, 22 nt, Homo sapiens
uguuuugguugucccuggccag

SEQ ID NO: 70129 - RNA, 22 nt, Homo sapiens
gucauugucaauugacaauugu

SEQ ID NO: 70130 - RNA, 20 nt, Homo sapiens
gucuuguagcucaaguuauu

SEQ ID NO: 70131 - RNA, 22 nt, Homo sapiens
gucuuuggaaaaaaugucuguu

SEQ ID NO: 70132 - RNA, 20 nt, Homo sapiens
gucugucuccgaguagaauu

SEQ ID NO: 70133 - RNA, 22 nt, Homo sapiens
gugauugugaaaacauuaagaa

SEQ ID NO: 70134 - RNA, 22 nt, Homo sapiens
gugagaggaggcagcuuuuaca

SEQ ID NO: 70135 - RNA, 22 nt, Homo sapiens
gugaauguaaagucaugugacu

SEQ ID NO: 70136 - RNA, 22 nt, Homo sapiens
gcacagaugaggagaggucuca

SEQ ID NO: 70137 - RNA, 22 nt, Homo sapiens
gggaagguaaucauuacuugau

SEQ ID NO: 70138 - RNA, 22 nt, Homo sapiens
gugguucuaaaccuuuuuuggu

SEQ ID NO: 70139 - RNA, 22 nt, Homo sapiens
uacuuuguagauuguuuccuuu

SEQ ID NO: 70140 - RNA, 22 nt, Homo sapiens
uacauguauccauuguuuuugg

SEQ ID NO: 70141 - RNA, 22 nt, Homo sapiens
uauauguucugugucccuuucg

SEQ ID NO: 70142 - RNA, 22 nt, Homo sapiens
uagcuucuccauagcuccaugu

SEQ ID NO: 70143 - RNA, 21 nt, Homo sapiens
ugauguugaccuaaguaguga

SEQ ID NO: 70144 - RNA, 22 nt, Homo sapiens
ugauguugacuguaggcagaga

SEQ ID NO: 70145 - RNA, 22 nt, Homo sapiens
ugauccuguccuuaugauguua

SEQ ID NO: 70146 - RNA, 22 nt, Homo sapiens
ugagucuguucucacauugcua

SEQ ID NO: 70147 - RNA, 22 nt, Homo sapiens
ugagugugaggaagaauuagaa

SEQ ID NO: 70148 - RNA, 22 nt, Homo sapiens
ugaggugaggguaucaaaugcu

SEQ ID NO: 70149 - RNA, 22 nt, Homo sapiens
ugaguaauguugaucuuugaua

SEQ ID NO: 70150 - RNA, 22 nt, Homo sapiens
ugaguaucuugaugaauuugaa

SEQ ID NO: 70151 - RNA, 22 nt, Homo sapiens
ugagacugagucuugcucuugu

SEQ ID NO: 70152 - RNA, 22 nt, Homo sapiens
ugagaugagucucgcucuguca

SEQ ID NO: 70153 - RNA, 22 nt, Homo sapiens
ugagaugaagucuugcucuguu

SEQ ID NO: 70154 - RNA, 22 nt, Homo sapiens
ugagaucucauuaugguuuuaa

SEQ ID NO: 70155 - RNA, 22 nt, Homo sapiens
ugauuuguuuagugccaaguuu

SEQ ID NO: 70156 - RNA, 22 nt, Homo sapiens
ugauugucucuccugccccauc

SEQ ID NO: 70157 - RNA, 22 nt, Homo sapiens
ugcauguucuuacucauacaug

SEQ ID NO: 70158 - RNA, 22 nt, Homo sapiens
ugcauuguuccgaauguguccu

SEQ ID NO: 70159 - RNA, 21 nt, Homo sapiens
ugcauugucuugaguuuaaau

SEQ ID NO: 70160 - RNA, 22 nt, Homo sapiens
ugcuggugucaucaaggcuuug

SEQ ID NO: 70161 - RNA, 22 nt, Homo sapiens
ugcugcuguuguuguuacuagc

SEQ ID NO: 70162 - RNA, 22 nt, Homo sapiens
uggauguaauugauucauguug

SEQ ID NO: 70163 - RNA, 20 nt, Homo sapiens
ucacuggagcucauuugauu

SEQ ID NO: 70164 - RNA, 22 nt, Homo sapiens
uauuugauugacuuuagcagga

SEQ ID NO: 70165 - RNA, 18 nt, Homo sapiens
ucauagaucaugacagug

SEQ ID NO: 70166 - RNA, 22 nt, Homo sapiens
ucugguggugaugagagacagu

SEQ ID NO: 70167 - RNA, 22 nt, Homo sapiens
ucugugaaugugaccuuauuug

SEQ ID NO: 70168 - RNA, 22 nt, Homo sapiens
ucugucuuguccucacccuaga

SEQ ID NO: 70169 - RNA, 22 nt, Homo sapiens
ucuggcuuuuaacaucuauaaa

SEQ ID NO: 70170 - RNA, 22 nt, Homo sapiens
ucuggcuuuagcaugugggaag

SEQ ID NO: 70171 - RNA, 21 nt, Homo sapiens
ucuggcuuucauuccccuucu

SEQ ID NO: 70172 - RNA, 22 nt, Homo sapiens
ucugagaucaugucugugcugu

SEQ ID NO: 70173 - RNA, 17 nt, Homo sapiens
ucuugugguucuugaau

SEQ ID NO: 70174 - RNA, 20 nt, Homo sapiens
ucuugguuggaggucuuuua

SEQ ID NO: 70175 - RNA, 22 nt, Homo sapiens
ucuugcuuguuguucccuucau

SEQ ID NO: 70176 - RNA, 22 nt, Homo sapiens
ucugugaaaucauuuccuguaa

SEQ ID NO: 70177 - RNA, 22 nt, Homo sapiens
ugaauucuguccaaaauaacug

SEQ ID NO: 70178 - RNA, 22 nt, Homo sapiens
auggcuucuuacucuucugcau

SEQ ID NO: 70179 - RNA, 22 nt, Homo sapiens
auggcucuguuuuuuaugcucu

SEQ ID NO: 70180 - RNA, 22 nt, Homo sapiens
gaucugagaaagugucauaaca

SEQ ID NO: 70181 - RNA, 22 nt, Homo sapiens
gaggugauaucucauugugguu

SEQ ID NO: 70182 - RNA, 22 nt, Homo sapiens
cuuuguguaggugccucuggcu

SEQ ID NO: 70183 - RNA, 22 nt, Homo sapiens
gagacugagucuugcucuguca

SEQ ID NO: 70184 - RNA, 22 nt, Homo sapiens
gagacugagucuugcuuuguca

SEQ ID NO: 70185 - RNA, 22 nt, Homo sapiens
cugagagugguauguuuaagug

SEQ ID NO: 70186 - RNA, 22 nt, Homo sapiens
cugagauuuuuagauccuggcg

SEQ ID NO: 70187 - RNA, 20 nt, Homo sapiens
cugaggugggagaaucgcuu

SEQ ID NO: 70188 - RNA, 22 nt, Homo sapiens
cugaggguagaaggaucacuug

SEQ ID NO: 70189 - RNA, 22 nt, Homo sapiens
cuguauguuucuaugaauguga

SEQ ID NO: 70190 - RNA, 22 nt, Homo sapiens
cuguuugauuaagugguggaaa

SEQ ID NO: 70191 - RNA, 22 nt, Homo sapiens
cuuggguugauugauaaugcca

SEQ ID NO: 70192 - RNA, 22 nt, Homo sapiens
cuuguuguggaggggagugcag

SEQ ID NO: 70193 - RNA, 22 nt, Homo sapiens
auauggcuuuuauuauguugag

SEQ ID NO: 70194 - RNA, 22 nt, Homo sapiens
aucugguguggcugugauccuc

SEQ ID NO: 70195 - RNA, 22 nt, Homo sapiens
aucuuugauuagacugauggau

SEQ ID NO: 70196 - RNA, 22 nt, Homo sapiens
augcuguuuugaauucucuaga

SEQ ID NO: 70197 - RNA, 22 nt, Homo sapiens
aguacugucagcaggguguuga

SEQ ID NO: 70198 - RNA, 22 nt, Homo sapiens
agcugguucuuugccuuguaga

SEQ ID NO: 70199 - RNA, 22 nt, Homo sapiens
agcugguuuauuucuauauccu

SEQ ID NO: 70200 - RNA, 20 nt, Homo sapiens
agucaguuuauuuucucucu

SEQ ID NO: 70201 - RNA, 22 nt, Homo sapiens
auacuagucaagaauguaugag

SEQ ID NO: 70202 - RNA, 22 nt, Homo sapiens
auacaugugcaggucagguuac

SEQ ID NO: 70203 - RNA, 22 nt, Homo sapiens
agaauacugucuauucauggua

SEQ ID NO: 70204 - RNA, 22 nt, Homo sapiens
acuuuuguuauacagugugaua

SEQ ID NO: 70205 - RNA, 22 nt, Homo sapiens
uuugugaggugauggauauguc

SEQ ID NO: 70206 - RNA, 22 nt, Homo sapiens
uuguccuugagauaguuugcug

SEQ ID NO: 70207 - RNA, 22 nt, Homo sapiens
uuguccucuccaaaucucaugu

SEQ ID NO: 70208 - RNA, 22 nt, Homo sapiens
uuggcuuguaaaaugaaaagcu

SEQ ID NO: 70209 - RNA, 22 nt, Homo sapiens
uugggagugucucuggacugca

SEQ ID NO: 70210 - RNA, 22 nt, Homo sapiens
uugaccuggagaguacuuugac

SEQ ID NO: 70211 - RNA, 22 nt, Homo sapiens
uugagagaaaaaauuuauuggu

SEQ ID NO: 70212 - RNA, 22 nt, Homo sapiens
uugauuagugacuggcuacacg

SEQ ID NO: 70213 - RNA, 22 nt, Homo sapiens
uugagaugaagucuugcucucu

SEQ ID NO: 70214 - RNA, 17 nt, Homo sapiens
uugagaguauaucuuac

SEQ ID NO: 70215 - RNA, 22 nt, Homo sapiens
uugagauggagucucacucuug

SEQ ID NO: 70216 - RNA, 22 nt, Homo sapiens
uugagauggagucuugcucuug

SEQ ID NO: 70217 - RNA, 22 nt, Homo sapiens
uugagauggagucuugcucugu

SEQ ID NO: 70218 - RNA, 22 nt, Homo sapiens
uugagauggugccacuguacuc

SEQ ID NO: 70219 - RNA, 22 nt, Homo sapiens
uugagcaauccuccugccaugu

SEQ ID NO: 70220 - RNA, 22 nt, Homo sapiens
uugagcaaugucacugaggcuu

SEQ ID NO: 70221 - RNA, 22 nt, Homo sapiens
ugugagacugguucugaaccca

SEQ ID NO: 70222 - RNA, 18 nt, Homo sapiens
ugucccuuugcuguucau

SEQ ID NO: 70223 - RNA, 22 nt, Homo sapiens
uguauacauauguauguuuugu

SEQ ID NO: 70224 - RNA, 22 nt, Homo sapiens
uguaugcuuuugagagauauuu

SEQ ID NO: 70225 - RNA, 22 nt, Homo sapiens
ugguggcuuuucguagguucac

SEQ ID NO: 70226 - RNA, 22 nt, Homo sapiens
ugguuaucauagcuaugcuacu

SEQ ID NO: 70227 - RNA, 22 nt, Homo sapiens
ugugauugauauauuuacagaa

SEQ ID NO: 70228 - RNA, 18 nt, Homo sapiens
uuuuugaggcacagggga

SEQ ID NO: 70229 - RNA, 22 nt, Homo sapiens
uuuuggcucugucuguaucuuu

SEQ ID NO: 70230 - RNA, 22 nt, Homo sapiens
uuuuggcuagaaauauaccucc

SEQ ID NO: 70231 - RNA, 22 nt, Human parainfluenza virus 1 strain Washington/1964
auugauaugaauuauuggucug

SEQ ID NO: 70232 - RNA, 22 nt, Homo sapiens
aacagucaauugcugaugaccu

SEQ ID NO: 70233 - RNA, 22 nt, Homo sapiens
aaggauuguaaaguugacaaau

SEQ ID NO: 70234 - RNA, 22 nt, Homo sapiens
aauugcuucuguauuuuggaca

SEQ ID NO: 70235 - RNA, 22 nt, Homo sapiens
aauuugucaccucucucccuuu

SEQ ID NO: 70236 - RNA, 22 nt, Homo sapiens
acagucauagcagccuuuguua

SEQ ID NO: 70237 - RNA, 22 nt, Homo sapiens
acugguguaugggaggucccaa

SEQ ID NO: 70238 - RNA, 22 nt, Homo sapiens
aaauucaucaaaugguuuguau

SEQ ID NO: 70239 - RNA, 22 nt, Homo sapiens
agguguuguugaggagauuuca

SEQ ID NO: 70240 - RNA, 22 nt, Homo sapiens
aucaaagccaugcucaguuuuc

SEQ ID NO: 70241 - RNA, 22 nt, Homo sapiens
aucaaaguaggcauauguuuuu

SEQ ID NO: 70242 - RNA, 17 nt, Homo sapiens
auaugaauuuuggagau

SEQ ID NO: 70243 - RNA, 22 nt, Homo sapiens
auacugguuuuugucaugugga

SEQ ID NO: 70244 - RNA, 22 nt, Homo sapiens
aucugguguggcugugauccuc

SEQ ID NO: 70245 - RNA, 22 nt, Homo sapiens
aucugguguauuggugcugggu

SEQ ID NO: 70246 - RNA, 22 nt, Homo sapiens
augaguaugagaauacauuaag

SEQ ID NO: 70247 - RNA, 22 nt, Homo sapiens
uguuuguuugauaugggauaaa

SEQ ID NO: 70248 - RNA, 20 nt, Homo sapiens
ugugauuauuuaguugcaug

SEQ ID NO: 70249 - RNA, 22 nt, Homo sapiens
uucaagauggcaccagugagug

SEQ ID NO: 70250 - RNA, 22 nt, Homo sapiens
uucaggcuccugugagaaucua

SEQ ID NO: 70251 - RNA, 22 nt, Homo sapiens
uucaggcuccgugccagcuccg

SEQ ID NO: 70252 - RNA, 22 nt, Homo sapiens
uugauguguuuccaggauuugu

SEQ ID NO: 70253 - RNA, 22 nt, Homo sapiens
uugaauggaauguuggaacuau

SEQ ID NO: 70254 - RNA, 22 nt, Homo sapiens
uugcaagaaaucagagccuucc

SEQ ID NO: 70255 - RNA, 18 nt, Homo sapiens
uugcauaguguauccaaa

SEQ ID NO: 70256 - RNA, 22 nt, Homo sapiens
uugguacuacacuucuaaucuu

SEQ ID NO: 70257 - RNA, 22 nt, Homo sapiens
uugguacuaaaaaguagggugu

SEQ ID NO: 70258 - RNA, 22 nt, Homo sapiens
uugcauuagugugguacauuug

SEQ ID NO: 70259 - RNA, 22 nt, Homo sapiens
uugcaugggagcugggugaggc

SEQ ID NO: 70260 - RNA, 22 nt, Homo sapiens
uugcaucagcuccugauguacu

SEQ ID NO: 70261 - RNA, 16 nt, Homo sapiens
uuugcaagaucagaag

SEQ ID NO: 70262 - RNA, 22 nt, Homo sapiens
uuugucuccuaagacucugugg

SEQ ID NO: 70263 - RNA, 22 nt, Homo sapiens
uuugguugccucuaugagccug

SEQ ID NO: 70264 - RNA, 22 nt, Homo sapiens
uuugguugucacaacuggggga

SEQ ID NO: 70265 - RNA, 22 nt, Homo sapiens
uuuauagucaggaacuugagga

SEQ ID NO: 70266 - RNA, 22 nt, Homo sapiens
uuguauguuguuugucagagaa

SEQ ID NO: 70267 - RNA, 22 nt, Homo sapiens
uuguauguaaccauuuggcaaa

SEQ ID NO: 70268 - RNA, 22 nt, Homo sapiens
uugugggaggugauuagaucau

SEQ ID NO: 70269 - RNA, 20 nt, Homo sapiens
ugaaggaggucauuuauacc

SEQ ID NO: 70270 - RNA, 22 nt, Homo sapiens
ugaauugucucucacuggguuc

SEQ ID NO: 70271 - RNA, 22 nt, Homo sapiens
ucugguggugaugagagacagu

SEQ ID NO: 70272 - RNA, 22 nt, Homo sapiens
ucaucagugcuugcaaauuauu

SEQ ID NO: 70273 - RNA, 23 nt, Homo sapiens
ucaguagucauugggaaagugug

SEQ ID NO: 70274 - RNA, 22 nt, Homo sapiens
ugaguaauguugaucuuugaua

SEQ ID NO: 70275 - RNA, 19 nt, Homo sapiens
ugaguauauuguauucauu

SEQ ID NO: 70276 - RNA, 22 nt, Homo sapiens
ugagaugguaaauuuuuguugu

SEQ ID NO: 70277 - RNA, 20 nt, Homo sapiens
ugagauuggugugguauaag

SEQ ID NO: 70278 - RNA, 21 nt, Homo sapiens
ugauguugaccuaaguaguga

SEQ ID NO: 70279 - RNA, 22 nt, Homo sapiens
auuuaugguuaauauaggaagu

SEQ ID NO: 70280 - RNA, 22 nt, Homo sapiens
auuugguuauggucauggacac

SEQ ID NO: 70281 - RNA, 22 nt, Homo sapiens
auugcaugucauguuuagugua

SEQ ID NO: 70282 - RNA, 22 nt, Homo sapiens
auuagguuagugcaaaaguaau

SEQ ID NO: 70283 - RNA, 22 nt, Homo sapiens
cucuuuuguuuagcugagaggg

SEQ ID NO: 70284 - RNA, 22 nt, Homo sapiens
gaucugugugauuggaugcauu

SEQ ID NO: 70285 - RNA, 22 nt, Homo sapiens
gaugauguugaauguucucacc

SEQ ID NO: 70286 - RNA, 22 nt, Homo sapiens
gaucagagugaaccuuguuaug

SEQ ID NO: 70287 - RNA, 22 nt, Homo sapiens
gagaugaucaugugguuuuguc

SEQ ID NO: 70288 - RNA, 22 nt, Homo sapiens
gcugguguucaggcccucaguc

SEQ ID NO: 70289 - RNA, 22 nt, Homo sapiens
gcuggugaaggcugaaaagugg

SEQ ID NO: 70290 - RNA, 22 nt, Homo sapiens
gcuguaguugaggauuuuaaga

SEQ ID NO: 70291 - RNA, 22 nt, Homo sapiens
gauuguguucauaggcauguua

SEQ ID NO: 70292 - RNA, 22 nt, Homo sapiens
gauuagugacguugagcacugu

SEQ ID NO: 70293 - RNA, 22 nt, Homo sapiens
cuugcagagucauucuaauuuc

SEQ ID NO: 70294 - RNA, 22 nt, Homo sapiens
cuguuugguuaucuuuuccugu

SEQ ID NO: 70295 - RNA, 22 nt, Homo sapiens
cugcagucaucugaagauuuug

SEQ ID NO: 70296 - RNA, 22 nt, Homo sapiens
gaaucaauugaucuaugugucu

SEQ ID NO: 70297 - RNA, 22 nt, Homo sapiens
cuuguuguggaggggagugcag

SEQ ID NO: 70298 - RNA, 21 nt, Homo sapiens
gucauaugucucugauuagug

SEQ ID NO: 70299 - RNA, 22 nt, Homo sapiens
guauuguacuacaagcucuuua

SEQ ID NO: 70300 - RNA, 22 nt, Homo sapiens
guguuugguugauagagccacu

SEQ ID NO: 70301 - RNA, 22 nt, Homo sapiens
guggcaugaaagcaucugugau

SEQ ID NO: 70302 - RNA, 22 nt, Homo sapiens
guguauauccuauuaguucugu

SEQ ID NO: 70303 - RNA, 22 nt, Homo sapiens
guuuggauauuaggcaagagua

SEQ ID NO: 70304 - RNA, 22 nt, Homo sapiens
guuuggauuuucuaauuucugu

SEQ ID NO: 70305 - RNA, 22 nt, Homo sapiens
uaauauguuuugaaaucaggaa

SEQ ID NO: 70306 - RNA, 22 nt, Homo sapiens
uagagauaucaauuucauggug

SEQ ID NO: 70307 - RNA, 22 nt, Homo sapiens
uauggauuugcauuccccaugu

SEQ ID NO: 70308 - RNA, 22 nt, Homo sapiens
uaugauuuuugggagaggucaa

SEQ ID NO: 70309 - RNA, 22 nt, Homo sapiens
uauugcuuuugauucaaggcag

SEQ ID NO: 70310 - RNA, 22 nt, Homo sapiens
uauuaguuuucuguggauuaca

SEQ ID NO: 70311 - RNA, 22 nt, Homo sapiens
uauuagugucuuuugguuagaa

SEQ ID NO: 70312 - RNA, 18 nt, Homo sapiens
uaguacuguucucaugau

SEQ ID NO: 70313 - RNA, 22 nt, Homo sapiens
uaggugauccauuuguauuuua

SEQ ID NO: 70314 - RNA, 22 nt, Homo sapiens
uaggugauugaagguggaaugu

SEQ ID NO: 70315 - RNA, 22 nt, Homo sapiens
uuuugguauacacaaggguccu

SEQ ID NO: 70316 - RNA, 22 nt, Homo sapiens
uuugcuaaucaacacuggccug

SEQ ID NO: 70317 - RNA, 22 nt, Homo sapiens
uguguaaauacaagugcuugaa

SEQ ID NO: 70318 - RNA, 22 nt, Homo sapiens
uuaaguagaugaaugugaaugu

SEQ ID NO: 70319 - RNA, 20 nt, Homo sapiens
uuagaguaguaugauuuaua

SEQ ID NO: 70320 - RNA, 21 nt, Homo sapiens
uuauaguggcaugauuuauaa

SEQ ID NO: 70321 - RNA, 22 nt, Homo sapiens
uuaucucaguguuuguaaacaa

SEQ ID NO: 70322 - RNA, 22 nt, Homo sapiens
ugucaggaggguccagagaaaa

SEQ ID NO: 70323 - RNA, 22 nt, Homo sapiens
ugugaugugaugagaaguuccu

SEQ ID NO: 70324 - RNA, 21 nt, Homo sapiens
ugucugagagaggagaucuac

SEQ ID NO: 70325 - RNA, 22 nt, Homo sapiens
uugagcaaugucacugaggcuu

SEQ ID NO: 70326 - RNA, 22 nt, Homo sapiens
uugagauggaguuucgcucuug

SEQ ID NO: 70327 - RNA, 22 nt, Homo sapiens
uugagauggaguuucgcucuuu

SEQ ID NO: 70328 - RNA, 22 nt, Homo sapiens
uugagauggagucuugcgcugu

SEQ ID NO: 70329 - RNA, 22 nt, Homo sapiens
uugagauggagucucgcucuuu

SEQ ID NO: 70330 - RNA, 22 nt, Homo sapiens
uugagauggagucucgcacugu

SEQ ID NO: 70331 - RNA, 17 nt, Homo sapiens
uugagaguauaucuuac

SEQ ID NO: 70332 - RNA, 22 nt, Homo sapiens
uugauugacaugucucuguuca

SEQ ID NO: 70333 - RNA, 22 nt, Homo sapiens
uugcaagaaaugcagauucuca

SEQ ID NO: 70334 - RNA, 22 nt, Homo sapiens
uugauuagauccaguugauuga

SEQ ID NO: 70335 - RNA, 22 nt, Homo sapiens
uugcacuauuaguauagauguc

SEQ ID NO: 70336 - RNA, 22 nt, Homo sapiens
uugacaaggagccauugcaucu

SEQ ID NO: 70337 - RNA, 22 nt, Homo sapiens
uugggagugucucuggacugca

SEQ ID NO: 70338 - RNA, 19 nt, Homo sapiens
uugcauagguugaaccagc

SEQ ID NO: 70339 - RNA, 22 nt, Homo sapiens
uugcuuaggcuggagugcagug

SEQ ID NO: 70340 - RNA, 22 nt, Homo sapiens
uugucucacuggaguuuaguaa

SEQ ID NO: 70341 - RNA, 22 nt, Homo sapiens
uugugguuuucagcuuauauau

SEQ ID NO: 70342 - RNA, 22 nt, Homo sapiens
uuucuauguugaccagucuaga

SEQ ID NO: 70343 - RNA, 22 nt, Homo sapiens
uuucugguuaauuucuaagagc

SEQ ID NO: 70344 - RNA, 23 nt, Homo sapiens
agaugcauucuuguaggauauau

SEQ ID NO: 70345 - RNA, 22 nt, Homo sapiens
auaagaguaguacauaugagac

SEQ ID NO: 70346 - RNA, 21 nt, Homo sapiens
auacuugcauccuuggagaga

SEQ ID NO: 70347 - RNA, 22 nt, Homo sapiens
agucaugggagagaugugaucg

SEQ ID NO: 70348 - RNA, 22 nt, Homo sapiens
agugauguggaguuuggaugga

SEQ ID NO: 70349 - RNA, 22 nt, Homo sapiens
agcuguaguuugguggauguaa

SEQ ID NO: 70350 - RNA, 22 nt, Homo sapiens
aucuuuggugcaugauacuuug

SEQ ID NO: 70351 - RNA, 22 nt, Homo sapiens
augauguaggccauggguuucu

SEQ ID NO: 70352 - RNA, 22 nt, Homo sapiens
aucuuuggauacuugauauagu

SEQ ID NO: 70353 - RNA, 22 nt, Homo sapiens
aucuacuugcugggucucugga

SEQ ID NO: 70354 - RNA, 22 nt, Homo sapiens
auccuugagaaaauaaaugacc

SEQ ID NO: 70355 - RNA, 22 nt, Homo sapiens
cuguuugguaaggaugccucag

SEQ ID NO: 70356 - RNA, 22 nt, Homo sapiens
cuguauguuucuaugaauguga

SEQ ID NO: 70357 - RNA, 19 nt, Homo sapiens
cuuugguugagcguguugg

SEQ ID NO: 70358 - RNA, 22 nt, Homo sapiens
gagguuuuagugagucccacug

SEQ ID NO: 70359 - RNA, 22 nt, Homo sapiens
gauauguucugagaaaugcauu

SEQ ID NO: 70360 - RNA, 22 nt, Homo sapiens
gauauguugaguagaguuuuug

SEQ ID NO: 70361 - RNA, 19 nt, Homo sapiens
gauauguugagcacccuuu

SEQ ID NO: 70362 - RNA, 23 nt, Homo sapiens
gaguggagacucauugauuuccu

SEQ ID NO: 70363 - RNA, 18 nt, Homo sapiens
gauguaguauggugugga

SEQ ID NO: 70364 - RNA, 22 nt, Homo sapiens
auguggauaucuauaucuggau

SEQ ID NO: 70365 - RNA, 22 nt, Homo sapiens
auuguguagucuuacugcuugc

SEQ ID NO: 70366 - RNA, 22 nt, Homo sapiens
caguugcacuagccccguuuca

SEQ ID NO: 70367 - RNA, 22 nt, Homo sapiens
caguucaugguaggcaccauag

SEQ ID NO: 70368 - RNA, 22 nt, Homo sapiens
cagcuggugggagcuggguucc

SEQ ID NO: 70369 - RNA, 23 nt, Homo sapiens
cagcuggugauuuuaaguugaag

SEQ ID NO: 70370 - RNA, 22 nt, Homo sapiens
caggcauuguccaugcugaagg

SEQ ID NO: 70371 - RNA, 22 nt, Homo sapiens
ugaaugcaucuagaaauuuauu

SEQ ID NO: 70372 - RNA, 22 nt, Homo sapiens
ugaaucauuucuugucuucagu

SEQ ID NO: 70373 - RNA, 21 nt, Homo sapiens
ugaauauuuggguugugucca

SEQ ID NO: 70374 - RNA, 22 nt, Homo sapiens
ucugagaugagacuuugaauuu

SEQ ID NO: 70375 - RNA, 22 nt, Homo sapiens
ucucuuggcggaaguugcagug

SEQ ID NO: 70376 - RNA, 22 nt, Homo sapiens
ucucauugauucuggggugaug

SEQ ID NO: 70377 - RNA, 23 nt, Homo sapiens
ucugcggguguggacccuagugc

SEQ ID NO: 70378 - RNA, 22 nt, Homo sapiens
ucuggagugugaaguggauaug

SEQ ID NO: 70379 - RNA, 22 nt, Homo sapiens
ucaucaguuuuuuauaugugau

SEQ ID NO: 70380 - RNA, 22 nt, Homo sapiens
uauuuguccccuccaaaaguca

SEQ ID NO: 70381 - RNA, 18 nt, Homo sapiens
uggauaguuguuggcaga

SEQ ID NO: 70382 - RNA, 22 nt, Homo sapiens
ugcugcuguuguuguuacuagc

SEQ ID NO: 70383 - RNA, 21 nt, Homo sapiens
ugcugcacuucuuuugcugug

SEQ ID NO: 70384 - RNA, 21 nt, Homo sapiens
ugcaugguagucacaugauuc

SEQ ID NO: 70385 - RNA, 22 nt, Homo sapiens
ugagaucucauuaugguuuuaa

SEQ ID NO: 70386 - RNA, 22 nt, Homo sapiens
ugagaucuuuuguggcugagaa

SEQ ID NO: 70387 - RNA, 22 nt, Homo sapiens
ugagaucuguaaagucugacau

SEQ ID NO: 70388 - RNA, 22 nt, Homo sapiens
ugaguauguuuaaugugacaau

SEQ ID NO: 70389 - RNA, 22 nt, Homo sapiens
ugaguuaggagaguguggcucu

SEQ ID NO: 70390 - RNA, 22 nt, Homo sapiens
ugauaugucacuugaucauggu

SEQ ID NO: 70391 - RNA, 22 nt, Homo sapiens
uagguaguuacacagcaaugua

SEQ ID NO: 70392 - RNA, 22 nt, Homo sapiens
uaguuguugcagguaggaugua

SEQ ID NO: 70393 - RNA, 22 nt, Homo sapiens
uaguucauuuuucuugcuuaga

SEQ ID NO: 70394 - RNA, 22 nt, Homo sapiens
uauauguucugugucccuuucg

SEQ ID NO: 70395 - RNA, 22 nt, Homo sapiens
uauauguucuugcacuggaaag

SEQ ID NO: 70396 - RNA, 22 nt, Homo sapiens
uaucucuguggguagugcugaa

SEQ ID NO: 70397 - RNA, 22 nt, Homo sapiens
uaucucaguguacaggaugaua

SEQ ID NO: 70398 - RNA, 22 nt, Homo sapiens
uaucucagaguguacaagauua

SEQ ID NO: 70399 - RNA, 22 nt, Homo sapiens
uauugaauuugagcugucucuu

SEQ ID NO: 70400 - RNA, 18 nt, Homo sapiens
uaauaacugugaccuuga

SEQ ID NO: 70401 - RNA, 22 nt, Homo sapiens
guugguauuacagaaauuaguu

SEQ ID NO: 70402 - RNA, 22 nt, Homo sapiens
gggauuguaauacugaguuggu

SEQ ID NO: 70403 - RNA, 22 nt, Homo sapiens
ggagucuugcuauguugccaag

SEQ ID NO: 70404 - RNA, 22 nt, Homo sapiens
ggagucugaacuggacaaugac

SEQ ID NO: 70405 - RNA, 22 nt, Homo sapiens
gugacuaagauucuuugauaug

SEQ ID NO: 70406 - RNA, 22 nt, Homo sapiens
gucucuugguuuagagcauuua

SEQ ID NO: 70407 - RNA, 22 nt, Homo sapiens
guacaguaguaaaagugaauga

SEQ ID NO: 70408 - RNA, 22 nt, Homo sapiens
uuugguguauaaaaaugcuagu

SEQ ID NO: 70409 - RNA, 22 nt, Homo sapiens
uuuguacuucauugguucuacu

SEQ ID NO: 70410 - RNA, 19 nt, Homo sapiens
uuuguauguuuccaguaau

SEQ ID NO: 70411 - RNA, 23 nt, Homo sapiens
uuguucccuuccacucagucucc

SEQ ID NO: 70412 - RNA, 22 nt, Homo sapiens
uugugaucuucagaaaguggcu

SEQ ID NO: 70413 - RNA, 22 nt, Homo sapiens
uuugauuguacuaaaauuguac

SEQ ID NO: 70414 - RNA, 22 nt, Homo sapiens
uuugauugguguaccugaaagu

SEQ ID NO: 70415 - RNA, 22 nt, Homo sapiens
uugcauauguugaaccagccuu

SEQ ID NO: 70416 - RNA, 22 nt, Homo sapiens
uugauaugacuaucuuuuaugu

SEQ ID NO: 70417 - RNA, 22 nt, Homo sapiens
uugauauguggaauauuuaucu

SEQ ID NO: 70418 - RNA, 22 nt, Homo sapiens
uugauauucugagaagcugaag

SEQ ID NO: 70419 - RNA, 22 nt, Homo sapiens
uuggauuauaaacugagauuug

SEQ ID NO: 70420 - RNA, 22 nt, Homo sapiens
uuguauugucuugaugaguuga

SEQ ID NO: 70421 - RNA, 22 nt, Homo sapiens
uguugguuaaaucagguuuuaa

SEQ ID NO: 70422 - RNA, 22 nt, Homo sapiens
uguugcauuugucaaggucaag

SEQ ID NO: 70423 - RNA, 22 nt, Homo sapiens
uguucuggagaguuuagucugg

SEQ ID NO: 70424 - RNA, 22 nt, Homo sapiens
uuaagcuaguuuauucaggaaa

SEQ ID NO: 70425 - RNA, 22 nt, Homo sapiens
ugugucuugaauuuuguaugua

SEQ ID NO: 70426 - RNA, 22 nt, Homo sapiens
uucuauugguaauauuuucugu

SEQ ID NO: 70427 - RNA, 22 nt, Homo sapiens
uucuaugguuuaauaguuuggg

SEQ ID NO: 70428 - RNA, 22 nt, Homo sapiens
uuccagugggacgagaugugga

SEQ ID NO: 70429 - RNA, 22 nt, Homo sapiens
uucccauuguuggccagcaugu

SEQ ID NO: 70430 - RNA, 22 nt, Homo sapiens
uuaguugcauucaugugagagu

SEQ ID NO: 70431 - RNA, 19 nt, Homo sapiens
uucauacagugagagcagc

SEQ ID NO: 70432 - RNA, 22 nt, Homo sapiens
uucagguacugggggaguaugg

SEQ ID NO: 70433 - RNA, 22 nt, Homo sapiens
ugacugguguuuaaugagucaa

SEQ ID NO: 70434 - RNA, 22 nt, Homo sapiens
ugacuagagggcuuuuguguag

SEQ ID NO: 70435 - RNA, 22 nt, Homo sapiens
ugacuauugauuuagacgugcu

SEQ ID NO: 70436 - RNA, 22 nt, Homo sapiens
ugacaugauuguauauuuagaa

SEQ ID NO: 70437 - RNA, 22 nt, Homo sapiens
ugaagugaagcaguaguguggg

SEQ ID NO: 70438 - RNA, 22 nt, Homo sapiens
ucuuauuuggggaaaggguccu

SEQ ID NO: 70439 - RNA, 22 nt, Homo sapiens
ucuguguuugaucaagauugua

SEQ ID NO: 70440 - RNA, 22 nt, Homo sapiens
ucuagcacuuacuggcugugug

SEQ ID NO: 70441 - RNA, 22 nt, Homo sapiens
uggaaaauuaggggagguuaua

SEQ ID NO: 70442 - RNA, 22 nt, Homo sapiens
ugaucuguguauauugaaccag

SEQ ID NO: 70443 - RNA, 22 nt, Homo sapiens
ugaugugucaucugagagagug

SEQ ID NO: 70444 - RNA, 22 nt, Homo sapiens
ugcauaugucuuuauaguagca

SEQ ID NO: 70445 - RNA, 18 nt, Homo sapiens
ugaguucauuagacuucc

SEQ ID NO: 70446 - RNA, 22 nt, Homo sapiens
ugaguucuuuuacauuuugaau

SEQ ID NO: 70447 - RNA, 22 nt, Homo sapiens
ugagguaugugaugucuuuuag

SEQ ID NO: 70448 - RNA, 22 nt, Homo sapiens
ugaguuguugcauucuuggugu

SEQ ID NO: 70449 - RNA, 23 nt, Homo sapiens
ggauucaucuguuuguucgcugu

SEQ ID NO: 70450 - RNA, 22 nt, Homo sapiens
guaucaugaaguuucuucauuu

SEQ ID NO: 70451 - RNA, 22 nt, Homo sapiens
guaugaguuuucugaugugugg

SEQ ID NO: 70452 - RNA, 22 nt, Homo sapiens
gugugacuagucaugccugaau

SEQ ID NO: 70453 - RNA, 22 nt, Homo sapiens
gugucaugggcauguccuuaac

SEQ ID NO: 70454 - RNA, 22 nt, Homo sapiens
guggaaggucaugaauguucuu

SEQ ID NO: 70455 - RNA, 22 nt, Homo sapiens
guuaagggaagccuggguaaga

SEQ ID NO: 70456 - RNA, 22 nt, Homo sapiens
gugagauggaguuggugucuuu

SEQ ID NO: 70457 - RNA, 22 nt, Homo sapiens
gugauguguuucaacagcuccu

SEQ ID NO: 70458 - RNA, 17 nt, Homo sapiens
gugagguggguaguauc

SEQ ID NO: 70459 - RNA, 22 nt, Homo sapiens
gugagaugugacuucugccucu

SEQ ID NO: 70460 - RNA, 22 nt, Homo sapiens
uaauaguuucagaaguuguuuu

SEQ ID NO: 70461 - RNA, 22 nt, Homo sapiens
uaaggauuuuggugauuacacu

SEQ ID NO: 70462 - RNA, 22 nt, Homo sapiens
guugauguugcagucuugagga

SEQ ID NO: 70463 - RNA, 22 nt, Homo sapiens
guucccaguugaaaugauuagu

SEQ ID NO: 70464 - RNA, 22 nt, Homo sapiens
guugagcaagcuuuggagccua

SEQ ID NO: 70465 - RNA, 22 nt, Homo sapiens
uacugagagaggaauauugaaa

SEQ ID NO: 70466 - RNA, 22 nt, Homo sapiens
uauugcuggcucugucuucauu

SEQ ID NO: 70467 - RNA, 22 nt, Homo sapiens
uauugcauguugagcaguaccu

SEQ ID NO: 70468 - RNA, 21 nt, Homo sapiens
ucaaauugaaauuaggucauu

SEQ ID NO: 70469 - RNA, 22 nt, Homo sapiens
uaugagguagguaugacuauca

SEQ ID NO: 70470 - RNA, 22 nt, Homo sapiens
uauggauuugccuauucuguau

SEQ ID NO: 70471 - RNA, 22 nt, Homo sapiens
uauggauuuucagauucuuauc

SEQ ID NO: 70472 - RNA, 22 nt, Homo sapiens
uaguaucacauggucuuaauua

SEQ ID NO: 70473 - RNA, 23 nt, Homo sapiens
auugauagugccuuugugcuaau

SEQ ID NO: 70474 - RNA, 22 nt, Homo sapiens
auugcaauuaguccauagaguu

SEQ ID NO: 70475 - RNA, 22 nt, Homo sapiens
auugcaaugggaaacuaugaaa

SEQ ID NO: 70476 - RNA, 22 nt, Homo sapiens
auugcucagucagggagcucgg

SEQ ID NO: 70477 - RNA, 22 nt, Homo sapiens
auuauauguguaugugcauacc

SEQ ID NO: 70478 - RNA, 22 nt, Homo sapiens
auuuugguuacauaguugagcu

SEQ ID NO: 70479 - RNA, 22 nt, Homo sapiens
cuaucucauugguuuuugaaag

SEQ ID NO: 70480 - RNA, 22 nt, Homo sapiens
cucauuggcuacugaggcuugu

SEQ ID NO: 70481 - RNA, 22 nt, Homo sapiens
cuagguagcuuuucugucaugu

SEQ ID NO: 70482 - RNA, 22 nt, Homo sapiens
cauugguuuauagauggggaaa

SEQ ID NO: 70483 - RNA, 22 nt, Homo sapiens
cauugguuuuucaggaguauau

SEQ ID NO: 70484 - RNA, 22 nt, Homo sapiens
cauggcaucuguguggccucca

SEQ ID NO: 70485 - RNA, 22 nt, Homo sapiens
cuuuuggugguucugaugcagg

SEQ ID NO: 70486 - RNA, 22 nt, Homo sapiens
gauauguacagcucucuaggau

SEQ ID NO: 70487 - RNA, 22 nt, Homo sapiens
gauauguaaaaauuauaucuga

SEQ ID NO: 70488 - RNA, 22 nt, Homo sapiens
gauagcauucaauuaucuguug

SEQ ID NO: 70489 - RNA, 22 nt, Homo sapiens
gauaguugugagaacucuuacu

SEQ ID NO: 70490 - RNA, 22 nt, Homo sapiens
gagcuaguguaauauuuugggg

SEQ ID NO: 70491 - RNA, 22 nt, Homo sapiens
auaauaucagguugugaugaug

SEQ ID NO: 70492 - RNA, 22 nt, Homo sapiens
aguuggugauugauugggucug

SEQ ID NO: 70493 - RNA, 22 nt, Homo sapiens
agguauuuucaacuuagaaugg

SEQ ID NO: 70494 - RNA, 22 nt, Homo sapiens
augaaagugauaaaugucucua

SEQ ID NO: 70495 - RNA, 20 nt, Homo sapiens
augaauguccuugauggcau

SEQ ID NO: 70496 - RNA, 22 nt, Homo sapiens
augauauggguugucaguugua

SEQ ID NO: 70497 - RNA, 22 nt, Homo sapiens
augucugguagccaccuggagg

SEQ ID NO: 70498 - RNA, 22 nt, Homo sapiens
augguugguuaaaucuguguau

SEQ ID NO: 70499 - RNA, 22 nt, Homo sapiens
augggaaaaucagaaggccugg

SEQ ID NO: 70500 - RNA, 22 nt, Homo sapiens
augcauggcagagucaggguac

SEQ ID NO: 70501 - RNA, 22 nt, Homo sapiens
augcaugucaaauuuguagguu

SEQ ID NO: 70502 - RNA, 22 nt, Homo sapiens
aauugaaugcagaugccaggga

SEQ ID NO: 70503 - RNA, 22 nt, Homo sapiens
aauugaaugauaugggacauuu

SEQ ID NO: 70504 - RNA, 22 nt, Homo sapiens
aaucuguagaaggugcacauuc

SEQ ID NO: 70505 - RNA, 23 nt, Homo sapiens
agccuguugccuaggcagcucau

SEQ ID NO: 70506 - RNA, 22 nt, Homo sapiens
agcugauggucuuguaugaugu

SEQ ID NO: 70507 - RNA, 22 nt, Homo sapiens
agcuagcauucauaguuugagg

SEQ ID NO: 70508 - RNA, 21 nt, Homo sapiens
aggaagacuaugaucaauugg

SEQ ID NO: 70509 - RNA, 22 nt, Homo sapiens
agugacuagaauaugaauuuua

SEQ ID NO: 70510 - RNA, 22 nt, Homo sapiens
aguccaguguuaugaucaguag

SEQ ID NO: 70511 - RNA, 22 nt, Homo sapiens
aguccauuugaugaugauucca

SEQ ID NO: 70512 - RNA, 22 nt, Homo sapiens
agcugugucuucuuaaagauuu

SEQ ID NO: 70513 - RNA, 22 nt, Homo sapiens
acuuugguuuauagaauuuagg

SEQ ID NO: 70514 - RNA, 18 nt, Homo sapiens
agaugcaugcucacuaca

SEQ ID NO: 70515 - RNA, 22 nt, Homo sapiens
auggauuuuaggauacaguuga

SEQ ID NO: 70516 - RNA, 22 nt, Homo sapiens
auggauuuguaguacaugguug

SEQ ID NO: 70517 - RNA, 22 nt, Homo sapiens
auggauguucuagggaugugau

SEQ ID NO: 70518 - RNA, 22 nt, Homo sapiens
auggaucuuucugcuuuugaau

SEQ ID NO: 70519 - RNA, 22 nt, Homo sapiens
auguuugguaagaauauuguua

SEQ ID NO: 70520 - RNA, 22 nt, Homo sapiens
auguuugguagugaauauggua

SEQ ID NO: 70521 - RNA, 22 nt, Homo sapiens
auguguauuaccucgauuguga

SEQ ID NO: 70522 - RNA, 22 nt, Homo sapiens
auccauugucuaaugcuaagau

SEQ ID NO: 70523 - RNA, 23 nt, Homo sapiens
augaauguaaagaaugugggaag

SEQ ID NO: 70524 - RNA, 19 nt, Homo sapiens
aauauugacaguggugucu

SEQ ID NO: 70525 - RNA, 15 nt, Homo sapiens
aaauaugucaguucu

SEQ ID NO: 70526 - RNA, 22 nt, Homo sapiens
ugagagaugauaaaauguuugu

SEQ ID NO: 70527 - RNA, 22 nt, Homo sapiens
ugagaugaguugcgcucugucg

SEQ ID NO: 70528 - RNA, 22 nt, Homo sapiens
ugagaugagucucgcucuguca

SEQ ID NO: 70529 - RNA, 22 nt, Homo sapiens
ugacucagauagguguguauuc

SEQ ID NO: 70530 - RNA, 22 nt, Homo sapiens
ugacuucauuugguaauugggu

SEQ ID NO: 70531 - RNA, 22 nt, Homo sapiens
ucuuggguuugccuugcugcug

SEQ ID NO: 70532 - RNA, 22 nt, Homo sapiens
ucuuugguauugugaauagugu

SEQ ID NO: 70533 - RNA, 22 nt, Homo sapiens
ucugagaucaugucugugcugu

SEQ ID NO: 70534 - RNA, 22 nt, Homo sapiens
ucuggccuacaaguaauuuuau

SEQ ID NO: 70535 - RNA, 22 nt, Homo sapiens
uccucaguggauuggauggugc

SEQ ID NO: 70536 - RNA, 22 nt, Homo sapiens
ucacugagcuagaucacuugac

SEQ ID NO: 70537 - RNA, 22 nt, Homo sapiens
uggaugacuguuauaugcauau

SEQ ID NO: 70538 - RNA, 22 nt, Homo sapiens
uguaugcuuuugagagauauuu

SEQ ID NO: 70539 - RNA, 22 nt, Homo sapiens
uggaaucuagagaaaugcaaac

SEQ ID NO: 70540 - RNA, 22 nt, Homo sapiens
ugcugcacuuauggcucugagg

SEQ ID NO: 70541 - RNA, 22 nt, Homo sapiens
ugcauuguuccgaauguguccu

SEQ ID NO: 70542 - RNA, 22 nt, Homo sapiens
ugaguucuuuguagauucugug

SEQ ID NO: 70543 - RNA, 22 nt, Homo sapiens
ugaguauuugggggaccagaga

SEQ ID NO: 70544 - RNA, 22 nt, Homo sapiens
ugagucuguucucacauugcua

SEQ ID NO: 70545 - RNA, 22 nt, Homo sapiens
ugagugagguucuacucuguga

SEQ ID NO: 70546 - RNA, 22 nt, Homo sapiens
uuuugguuaggauggguggcau

SEQ ID NO: 70547 - RNA, 20 nt, Homo sapiens
uuuuggcuuaaagcagucug

SEQ ID NO: 70548 - RNA, 22 nt, Homo sapiens
uuucccugaaggcucugaaguc

SEQ ID NO: 70549 - RNA, 22 nt, Homo sapiens
uuuuuugguaauugaacaauga

SEQ ID NO: 70550 - RNA, 22 nt, Homo sapiens
uuguuugguugaguauggaagu

SEQ ID NO: 70551 - RNA, 22 nt, Homo sapiens
uugauaguuuaauuaaugcuag

SEQ ID NO: 70552 - RNA, 22 nt, Homo sapiens
uugauaugaauggcuguuugug

SEQ ID NO: 70553 - RNA, 22 nt, Homo sapiens
uuggauugugaaaguauucucu

SEQ ID NO: 70554 - RNA, 22 nt, Homo sapiens
uuggauuguuucuagauugggg

SEQ ID NO: 70555 - RNA, 22 nt, Homo sapiens
ugugagcuauggaguuguagag

SEQ ID NO: 70556 - RNA, 22 nt, Homo sapiens
ugugaucaauuagugaugucug

SEQ ID NO: 70557 - RNA, 22 nt, Homo sapiens
uguuuaguuaagacauagaauu

SEQ ID NO: 70558 - RNA, 22 nt, Homo sapiens
uuaauuguaucuauagauguca

SEQ ID NO: 70559 - RNA, 22 nt, Homo sapiens
uuacuacucucuaugaccaguu

SEQ ID NO: 70560 - RNA, 22 nt, Homo sapiens
uuagggaggacaguuacaacag

SEQ ID NO: 70561 - RNA, 22 nt, Homo sapiens
uuaguaguuugauaggaauagc

SEQ ID NO: 70562 - RNA, 22 nt, Homo sapiens
uuagugaaugggugugauuugu

SEQ ID NO: 70563 - RNA, 22 nt, Homo sapiens
uugagauggagucucguucugu

SEQ ID NO: 70564 - RNA, 22 nt, Homo sapiens
uugagauggagucucacugugu

SEQ ID NO: 70565 - RNA, 22 nt, Homo sapiens
uugagaucuugauauguuugaa

SEQ ID NO: 70566 - RNA, 22 nt, Homo sapiens
uugagaugauggauaugcuaau

SEQ ID NO: 70567 - RNA, 20 nt, Homo sapiens
uugaggucaggaguuuggga

SEQ ID NO: 70568 - RNA, 22 nt, Homo sapiens
uugaacuagaaccugcaaauuu

SEQ ID NO: 70569 - RNA, 16 nt, Homo sapiens
uuauugcauucuucuc

SEQ ID NO: 70570 - RNA, 19 nt, Homo sapiens
cauggcuuauaauuuuaau

SEQ ID NO: 70571 - RNA, 22 nt, Homo sapiens
cauggcuuguauaagauucuca

SEQ ID NO: 70572 - RNA, 22 nt, Homo sapiens
cagcuugugguauugcugguug

SEQ ID NO: 70573 - RNA, 22 nt, Homo sapiens
caguaguagccccuuagaugga

SEQ ID NO: 70574 - RNA, 22 nt, Homo sapiens
cuaaaacuuucugagugcagca

SEQ ID NO: 70575 - RNA, 20 nt, Homo sapiens
ccagcaucauuagauucugg

SEQ ID NO: 70576 - RNA, 22 nt, Homo sapiens
cuaagauugucuuaguguguug

SEQ ID NO: 70577 - RNA, 22 nt, Homo sapiens
cugggaugauguaaauaggcua

SEQ ID NO: 70578 - RNA, 22 nt, Homo sapiens
cugguaugugugacugcauuga

SEQ ID NO: 70579 - RNA, 20 nt, Homo sapiens
cuggaugucgaggcagaggu

SEQ ID NO: 70580 - RNA, 20 nt, Homo sapiens
cuggaucaucaguaaaguua

SEQ ID NO: 70581 - RNA, 22 nt, Homo sapiens
gacucagucuuggauuuuuaau

SEQ ID NO: 70582 - RNA, 22 nt, Homo sapiens
cuuuugugauucuucaguuacu

SEQ ID NO: 70583 - RNA, 22 nt, Homo sapiens
cugugguuacguucuuugugcu

SEQ ID NO: 70584 - RNA, 22 nt, Homo sapiens
ggaugcauuuuugguugucaca

SEQ ID NO: 70585 - RNA, 22 nt, Homo sapiens
ggauugugauaauuguugcaaa

SEQ ID NO: 70586 - RNA, 22 nt, Homo sapiens
ggagugugauuguucucuguua

SEQ ID NO: 70587 - RNA, 22 nt, Homo sapiens
ggacugagaggacuacagugua

SEQ ID NO: 70588 - RNA, 22 nt, Homo sapiens
gcuuuuggaggaacuuaagauu

SEQ ID NO: 70589 - RNA, 22 nt, Homo sapiens
gcugagaucucuugccugaacu

SEQ ID NO: 70590 - RNA, 22 nt, Homo sapiens
gauggcauuucuggaucugaca

SEQ ID NO: 70591 - RNA, 22 nt, Homo sapiens
gaugugaaaucauaguuucuag

SEQ ID NO: 70592 - RNA, 22 nt, Homo sapiens
gcaauacugacagcauuaguuu

SEQ ID NO: 70593 - RNA, 20 nt, Homo sapiens
gcaugagucuuuauaguaga

SEQ ID NO: 70594 - RNA, 22 nt, Homo sapiens
uauuagugccuaagucuuaggg

SEQ ID NO: 70595 - RNA, 18 nt, Homo sapiens
uaucucauuucuuagguc

SEQ ID NO: 70596 - RNA, 22 nt, Homo sapiens
uaucugguuuuguuacagguuc

SEQ ID NO: 70597 - RNA, 22 nt, Homo sapiens
ucacauuaagcuguuauuucuu

SEQ ID NO: 70598 - RNA, 22 nt, Homo sapiens
uaacuaguggaauuugauuuca

SEQ ID NO: 70599 - RNA, 22 nt, Homo sapiens
uagcugcacuuacaagugagaa

SEQ ID NO: 70600 - RNA, 22 nt, Homo sapiens
uauauguuuucauaaggcuaga

SEQ ID NO: 70601 - RNA, 22 nt, Homo sapiens
uaguugcauucaggauaugacg

SEQ ID NO: 70602 - RNA, 22 nt, Homo sapiens
uagguagaacccagaaaucuga

SEQ ID NO: 70603 - RNA, 22 nt, Homo sapiens
gucuuuggaaaaaaugucuguu

SEQ ID NO: 70604 - RNA, 17 nt, Homo sapiens
gucuuugguugaguuua

SEQ ID NO: 70605 - RNA, 22 nt, Homo sapiens
ggcauguugauagguagaugua

SEQ ID NO: 70606 - RNA, 23 nt, Homo sapiens
gugaucauuguuguggguugaau

SEQ ID NO: 70607 - RNA, 22 nt, Homo sapiens
gugauugugaaaacauuaagaa

SEQ ID NO: 70608 - RNA, 22 nt, Homo sapiens
guugaucuauguugcuggcagu

SEQ ID NO: 70609 - RNA, 22 nt, Homo sapiens
guugaaaucaucacuuggcaug

SEQ ID NO: 70610 - RNA, 23 nt, Homo sapiens
uaacauugcaugauuaccugcau

SEQ ID NO: 70611 - RNA, 17 nt, Homo sapiens
guugaguuugagucaag

SEQ ID NO: 70612 - RNA, 22 nt, Homo sapiens
gugaucaugauccugaagcauu

SEQ ID NO: 70613 - RNA, 22 nt, Homo sapiens
gugguguuugagcugccaggga

SEQ ID NO: 70614 - RNA, 22 nt, Homo sapiens
gugguacuaucuuugguuucag

SEQ ID NO: 70615 - RNA, 22 nt, Homo sapiens
gugugauuguuaauuuuaggug

SEQ ID NO: 70616 - RNA, 22 nt, Homo sapiens
guaaucucagcuccucaugagg

SEQ ID NO: 70617 - RNA, 17 nt, Homo sapiens
gucuuugguugaguuua

SEQ ID NO: 70618 - RNA, 22 nt, Homo sapiens
gucuuuggaaaaaaugucuguu

SEQ ID NO: 70619 - RNA, 22 nt, Homo sapiens
gucuuccagccuccaucuuucu

SEQ ID NO: 70620 - RNA, 22 nt, Homo sapiens
uagguagaacccagaaaucuga

SEQ ID NO: 70621 - RNA, 22 nt, Homo sapiens
uagguagaacuuuagacccugu

SEQ ID NO: 70622 - RNA, 23 nt, Homo sapiens
uauaugugucuaggagcuauggu

SEQ ID NO: 70623 - RNA, 19 nt, Homo sapiens
uaccagcacaguguuugag

SEQ ID NO: 70624 - RNA, 22 nt, Homo sapiens
uauuacauccauaggcucugcu

SEQ ID NO: 70625 - RNA, 22 nt, Homo sapiens
uauuacuugucugugucucaau

SEQ ID NO: 70626 - RNA, 22 nt, Homo sapiens
ggauacauuuuuccuccucuuc

SEQ ID NO: 70627 - RNA, 23 nt, Homo sapiens
ggauucaucuguuuguucgcugu

SEQ ID NO: 70628 - RNA, 22 nt, Homo sapiens
cugugguuacguucuuugugcu

SEQ ID NO: 70629 - RNA, 22 nt, Homo sapiens
cugugguugagcuuugccauga

SEQ ID NO: 70630 - RNA, 22 nt, Homo sapiens
cugugcuaggcaaugugguaga

SEQ ID NO: 70631 - RNA, 22 nt, Homo sapiens
cuuuugugauucuucaguuacu

SEQ ID NO: 70632 - RNA, 22 nt, Homo sapiens
gacugaguaagcagaagcaauu

SEQ ID NO: 70633 - RNA, 22 nt, Homo sapiens
cugguuguucuggaugggcagg

SEQ ID NO: 70634 - RNA, 22 nt, Homo sapiens
cugcccuuucuauaugauguaa

SEQ ID NO: 70635 - RNA, 22 nt, Homo sapiens
uugaguaguaaggauauuaucu

SEQ ID NO: 70636 - RNA, 22 nt, Homo sapiens
uugaggguggcauauauugauu

SEQ ID NO: 70637 - RNA, 20 nt, Homo sapiens
uugagaucuguaucugguuu

SEQ ID NO: 70638 - RNA, 22 nt, Homo sapiens
uuauuugguuauuguaauuggg

SEQ ID NO: 70639 - RNA, 22 nt, Homo sapiens
uuauugaguaaaaagaaugguu

SEQ ID NO: 70640 - RNA, 22 nt, Homo sapiens
uuauuagcacccuaccaugugg

SEQ ID NO: 70641 - RNA, 21 nt, Homo sapiens
uuagcauccauguucaucaac

SEQ ID NO: 70642 - RNA, 23 nt, Homo sapiens
uuagaucuuuaaggaaucuccac

SEQ ID NO: 70643 - RNA, 22 nt, Homo sapiens
ugugaucaauuagugaugucug

SEQ ID NO: 70644 - RNA, 19 nt, Homo sapiens
ugugauaguugaaccugcc

SEQ ID NO: 70645 - RNA, 17 nt, Homo sapiens
ugugaucaucacccuug

SEQ ID NO: 70646 - RNA, 22 nt, Homo sapiens
uuggauuguuucuagauugggg

SEQ ID NO: 70647 - RNA, 22 nt, Homo sapiens
uugauccucugagaaucuaucg

SEQ ID NO: 70648 - RNA, 22 nt, Homo sapiens
uugauaugaauggcuguuugug

SEQ ID NO: 70649 - RNA, 22 nt, Homo sapiens
uugauaucugaugccuauggaa

SEQ ID NO: 70650 - RNA, 22 nt, Homo sapiens
uugauaguuuaauuaaugcuag

SEQ ID NO: 70651 - RNA, 21 nt, Homo sapiens
uugaguugaagcaaggaggga

SEQ ID NO: 70652 - RNA, 22 nt, Homo sapiens
uugauacuagagucuuucugac

SEQ ID NO: 70653 - RNA, 22 nt, Homo sapiens
uuguuauguuggucaguaaugu

SEQ ID NO: 70654 - RNA, 22 nt, Homo sapiens
uuguuauguaucucaagauaaa

SEQ ID NO: 70655 - RNA, 22 nt, Homo sapiens
uuguccauggacagcaccacag

SEQ ID NO: 70656 - RNA, 23 nt, Homo sapiens
uuuuuguguuucauggaaauagg

SEQ ID NO: 70657 - RNA, 22 nt, Homo sapiens
uuuuugauuaauggguagacca

SEQ ID NO: 70658 - RNA, 19 nt, Homo sapiens
uuuuguacucugugacuug

SEQ ID NO: 70659 - RNA, 22 nt, Homo sapiens
uuucauccggcuguguauuaug

SEQ ID NO: 70660 - RNA, 22 nt, Homo sapiens
uuuggcauuuaaauaugcaugg

SEQ ID NO: 70661 - RNA, 22 nt, Homo sapiens
uuuuggucuccaguuucugcug

SEQ ID NO: 70662 - RNA, 22 nt, Homo sapiens
uuuugguuaggauggguggcau

SEQ ID NO: 70663 - RNA, 22 nt, Homo sapiens
uuuugcuugugaauagccacau

SEQ ID NO: 70664 - RNA, 22 nt, Homo sapiens
uuuugcuuuuccucggucccac

SEQ ID NO: 70665 - RNA, 17 nt, Homo sapiens
uuuuggauuagaaaucc

SEQ ID NO: 70666 - RNA, 23 nt, Homo sapiens
uuuguaguagcaugauuuauaau

SEQ ID NO: 70667 - RNA, 22 nt, Homo sapiens
ugcauuguuccgaauguguccu

SEQ ID NO: 70668 - RNA, 20 nt, Homo sapiens
uggaaugcagccuccuucug

SEQ ID NO: 70669 - RNA, 22 nt, Homo sapiens
uguauguugauguuauauucug

SEQ ID NO: 70670 - RNA, 22 nt, Homo sapiens
ugucuaguuuugaaguauagca

SEQ ID NO: 70671 - RNA, 18 nt, Homo sapiens
ugucccuuugcuguucau

SEQ ID NO: 70672 - RNA, 22 nt, Homo sapiens
uguaaacuaugagcugauuauu

SEQ ID NO: 70673 - RNA, 22 nt, Homo sapiens
ucacuuuguuuuuggauaaguu

SEQ ID NO: 70674 - RNA, 22 nt, Homo sapiens
ucucugauuauugcauuucauu

SEQ ID NO: 70675 - RNA, 22 nt, Homo sapiens
ucuuggguuugccuugcugcug

SEQ ID NO: 70676 - RNA, 22 nt, Homo sapiens
ucuuugguuucugucucuguaa

SEQ ID NO: 70677 - RNA, 22 nt, Homo sapiens
ucuguguuugaucaagauugua

SEQ ID NO: 70678 - RNA, 22 nt, Homo sapiens
ugacuauugauuuagacgugcu

SEQ ID NO: 70679 - RNA, 22 nt, Homo sapiens
ucuuuuguucuauucaggccuu

SEQ ID NO: 70680 - RNA, 22 nt, Homo sapiens
aaugacagccagauucuucucu

SEQ ID NO: 70681 - RNA, 22 nt, Homo sapiens
auguguauuaccucgauuguga

SEQ ID NO: 70682 - RNA, 22 nt, Homo sapiens
auucaacuaauuauugaagaug

SEQ ID NO: 70683 - RNA, 22 nt, Homo sapiens
auugaauuugguuugcuaagaa

SEQ ID NO: 70684 - RNA, 22 nt, Homo sapiens
auggaucuuucugcuuuugaau

SEQ ID NO: 70685 - RNA, 22 nt, Homo sapiens
auggauuuuaggauacaguuga

SEQ ID NO: 70686 - RNA, 22 nt, Homo sapiens
augaguugaagcuacaagaggc

SEQ ID NO: 70687 - RNA, 22 nt, Homo sapiens
augagauuguuugugugaaaua

SEQ ID NO: 70688 - RNA, 22 nt, Homo sapiens
agaucacagucuuugguuuuag

SEQ ID NO: 70689 - RNA, 17 nt, Homo sapiens
acuuuuugaggaggcau

SEQ ID NO: 70690 - RNA, 22 nt, Homo sapiens
aguccauuugaugaugauucca

SEQ ID NO: 70691 - RNA, 21 nt, Homo sapiens
agguaguuuuccuuuuggagu

SEQ ID NO: 70692 - RNA, 17 nt, Homo sapiens
auaaacucaucauuuuu

SEQ ID NO: 70693 - RNA, 22 nt, Homo sapiens
auguccauggaaucuguagcaa

SEQ ID NO: 70694 - RNA, 22 nt, Homo sapiens
augaguaguugcuaaauauuga

SEQ ID NO: 70695 - RNA, 22 nt, Homo sapiens
augagauuguuuguacuccaca

SEQ ID NO: 70696 - RNA, 18 nt, Homo sapiens
augaacucaucauuuuua

SEQ ID NO: 70697 - RNA, 22 nt, Homo sapiens
aguuuuugcugauagcaugcuu

SEQ ID NO: 70698 - RNA, 22 nt, Homo sapiens
auaauaucagguugugaugaug

SEQ ID NO: 70699 - RNA, 22 nt, Homo sapiens
gagcuaguguaauauuuugggg

SEQ ID NO: 70700 - RNA, 22 nt, Homo sapiens
gaugagaucauaaguguggagc

SEQ ID NO: 70701 - RNA, 22 nt, Homo sapiens
gauuuuuggggaagccucuuau

SEQ ID NO: 70702 - RNA, 22 nt, Homo sapiens
gauugcuaaauuguccuucugu

SEQ ID NO: 70703 - RNA, 22 nt, Homo sapiens
gcaguguugugauccaggucuu

SEQ ID NO: 70704 - RNA, 22 nt, Homo sapiens
gaccuuguagaaucucaugauu

SEQ ID NO: 70705 - RNA, 22 nt, Homo sapiens
cucuuugaguuccuccuggugu

SEQ ID NO: 70706 - RNA, 21 nt, Homo sapiens
cugguguuagcacuucuuccc

SEQ ID NO: 70707 - RNA, 22 nt, Homo sapiens
cugucuguuucaaaagugguua

SEQ ID NO: 70708 - RNA, 22 nt, Homo sapiens
cugugauagguuagucaugaau

SEQ ID NO: 70709 - RNA, 22 nt, Homo sapiens
ccuucuuuuguaaggcugaaua

SEQ ID NO: 70710 - RNA, 22 nt, Homo sapiens
cccauuguuaaguugaguaucu

SEQ ID NO: 70711 - RNA, 18 nt, Homo sapiens
cuaguguuucuugaauca

SEQ ID NO: 70712 - RNA, 22 nt, Homo sapiens
auuuugguuacauaguugagcu

SEQ ID NO: 70713 - RNA, 22 nt, Homo sapiens
auuuguccugccuuuuccuccu

SEQ ID NO: 70714 - RNA, 22 nt, Homo sapiens
auuauuagucggccagcuguua

SEQ ID NO: 70715 - RNA, 23 nt, Homo sapiens
auugauagugccuuugugcuaau

SEQ ID NO: 70716 - RNA, 22 nt, Homo sapiens
uauggauuuucagauucuuauc

SEQ ID NO: 70717 - RNA, 22 nt, Homo sapiens
uaucccuuagagcggggugguu

SEQ ID NO: 70718 - RNA, 22 nt, Homo sapiens
uauugcagugagauccaucugg

SEQ ID NO: 70719 - RNA, 22 nt, Homo sapiens
uauugguuacuguugaucgcca

SEQ ID NO: 70720 - RNA, 22 nt, Homo sapiens
uacucuuuagcuccuuaaggaa

SEQ ID NO: 70721 - RNA, 21 nt, Homo sapiens
uagauaguugguucugaaucu

SEQ ID NO: 70722 - RNA, 22 nt, Homo sapiens
uagcacuauuuauugaaaagga

SEQ ID NO: 70723 - RNA, 22 nt, Homo sapiens
guugauguugcagucuugagga

SEQ ID NO: 70724 - RNA, 22 nt, Homo sapiens
uaauaguuucagaaguuguuuu

SEQ ID NO: 70725 - RNA, 22 nt, Homo sapiens
gugauuauccacgucuuuguga

SEQ ID NO: 70726 - RNA, 22 nt, Homo sapiens
gugauaucacuguaucacucca

SEQ ID NO: 70727 - RNA, 22 nt, Homo sapiens
gugauaucugagccugccccag

SEQ ID NO: 70728 - RNA, 22 nt, Homo sapiens
guccauuuguuuccagagcacu

SEQ ID NO: 70729 - RNA, 20 nt, Homo sapiens
guccauuugcugccauugcu

SEQ ID NO: 70730 - RNA, 22 nt, Homo sapiens
guauuuuguuagggugugguau

SEQ ID NO: 70731 - RNA, 22 nt, Homo sapiens
guauuuguugcagcagcacuau

SEQ ID NO: 70732 - RNA, 23 nt, Homo sapiens
ggaaugaaaccugguuaugauau

SEQ ID NO: 70733 - RNA, 22 nt, Homo sapiens
ugaguuguugcauucuuggugu

SEQ ID NO: 70734 - RNA, 22 nt, Homo sapiens
ugaucuguguauauugaaccag

SEQ ID NO: 70735 - RNA, 20 nt, Homo sapiens
uggaacuuaauugauggaca

SEQ ID NO: 70736 - RNA, 20 nt, Homo sapiens
uggauugugaugggauuugc

SEQ ID NO: 70737 - RNA, 21 nt, Homo sapiens
ucuguguugaucucacuggga

SEQ ID NO: 70738 - RNA, 22 nt, Homo sapiens
ucucagugaaauaaauuauuuu

SEQ ID NO: 70739 - RNA, 22 nt, Homo sapiens
ucuguuguuaucauaauauuga

SEQ ID NO: 70740 - RNA, 22 nt, Homo sapiens
ucuuugguaauggaugucugau

SEQ ID NO: 70741 - RNA, 22 nt, Homo sapiens
ucuuugauuaugcagauggguu

SEQ ID NO: 70742 - RNA, 22 nt, Homo sapiens
ucuuuguguaggucaaucuggc

SEQ ID NO: 70743 - RNA, 17 nt, Homo sapiens
ucccuguuuuuucaguc

SEQ ID NO: 70744 - RNA, 22 nt, Homo sapiens
ucagugauugguuauuuuaggc

SEQ ID NO: 70745 - RNA, 22 nt, Homo sapiens
uuccauguugauacgugaaguu

SEQ ID NO: 70746 - RNA, 22 nt, Homo sapiens
uucuauugguaauauuuucugu

SEQ ID NO: 70747 - RNA, 22 nt, Homo sapiens
uucugcuugaucuaguguguug

SEQ ID NO: 70748 - RNA, 22 nt, Homo sapiens
ugugucuugaauuuuguaugua

SEQ ID NO: 70749 - RNA, 22 nt, Homo sapiens
ugucauauagaauguucuauga

SEQ ID NO: 70750 - RNA, 22 nt, Homo sapiens
uguuuuggaguggacuuugcau

SEQ ID NO: 70751 - RNA, 21 nt, Homo sapiens
uguuuuugcuguguaucucuc

SEQ ID NO: 70752 - RNA, 22 nt, Homo sapiens
uguugguuaaaucagguuuuaa

SEQ ID NO: 70753 - RNA, 22 nt, Homo sapiens
uuggauugugaaaguauucucu

SEQ ID NO: 70754 - RNA, 22 nt, Homo sapiens
uugauauguguauagcaugugg

SEQ ID NO: 70755 - RNA, 22 nt, Homo sapiens
uugauauguggaauauuuaucu

SEQ ID NO: 70756 - RNA, 22 nt, Homo sapiens
uugauaugacuaucuuuuaugu

SEQ ID NO: 70757 - RNA, 22 nt, Homo sapiens
uugaguagugugaugcaugucu

SEQ ID NO: 70758 - RNA, 22 nt, Homo sapiens
uugaguaguaagugguucaccg

SEQ ID NO: 70759 - RNA, 18 nt, Homo sapiens
uugcaucauuuuguuguu

SEQ ID NO: 70760 - RNA, 22 nt, Homo sapiens
uuugauuguacuaaaauuguac

SEQ ID NO: 70761 - RNA, 22 nt, Homo sapiens
uuugaugcaucucuacuuuguu

SEQ ID NO: 70762 - RNA, 22 nt, Homo sapiens
uugugauugagugauccuuguu

SEQ ID NO: 70763 - RNA, 22 nt, Homo sapiens
uuguuuuggagaugagcuaaaa

SEQ ID NO: 70764 - RNA, 19 nt, Homo sapiens
uuuguauguuuccaguaau

SEQ ID NO: 70765 - RNA, 20 nt, Homo sapiens
uuuguaucucuggguacugg

SEQ ID NO: 70766 - RNA, 22 nt, Homo sapiens
uuugucuccuaagacucugugg

SEQ ID NO: 70767 - RNA, 23 nt, Homo sapiens
uuugugcuaauuuaugggcucuu

SEQ ID NO: 70768 - RNA, 22 nt, Homo sapiens
uuugugcuccuguugagaaucu

SEQ ID NO: 70769 - RNA, 23 nt, Homo sapiens
uuugugucccucuagaauucaug

SEQ ID NO: 70770 - RNA, 22 nt, Homo sapiens
uuuguguccccacccaaaucuc

SEQ ID NO: 70771 - RNA, 19 nt, Homo sapiens
guaaugugcuucaguagca

SEQ ID NO: 70772 - RNA, 22 nt, Homo sapiens
gcucuuuugggguaauucugag

SEQ ID NO: 70773 - RNA, 22 nt, Homo sapiens
guugguauuacagaaauuaguu

SEQ ID NO: 70774 - RNA, 22 nt, Homo sapiens
guuuggauauuaggcaagagua

SEQ ID NO: 70775 - RNA, 22 nt, Homo sapiens
gugguuguuggaguggcaauuu

SEQ ID NO: 70776 - RNA, 19 nt, Homo sapiens
gugguauuaccuuuugauu

SEQ ID NO: 70777 - RNA, 22 nt, Homo sapiens
guuuuuggggucacuauuaccg

SEQ ID NO: 70778 - RNA, 22 nt, Homo sapiens
guuuugguuauauggaucaguu

SEQ ID NO: 70779 - RNA, 22 nt, Homo sapiens
uauugaauuugagcugucucuu

SEQ ID NO: 70780 - RNA, 22 nt, Homo sapiens
uaggauaguccuccugagaccu

SEQ ID NO: 70781 - RNA, 22 nt, Homo sapiens
ugaguauguuuagaaguaaagg

SEQ ID NO: 70782 - RNA, 22 nt, Homo sapiens
ugauuuguuuagugccaaguuu

SEQ ID NO: 70783 - RNA, 22 nt, Homo sapiens
uggaauuaauccuccugguuuc

SEQ ID NO: 70784 - RNA, 22 nt, Homo sapiens
uauuugauugacuuuagcagga

SEQ ID NO: 70785 - RNA, 22 nt, Homo sapiens
ucugguguuauucauguaguuu

SEQ ID NO: 70786 - RNA, 22 nt, Homo sapiens
ucuccaguuuccuucgucuauc

SEQ ID NO: 70787 - RNA, 22 nt, Homo sapiens
ucucuguuuauuuuugguguau

SEQ ID NO: 70788 - RNA, 22 nt, Homo sapiens
ugaauguacuuaacacuggauu

SEQ ID NO: 70789 - RNA, 22 nt, Homo sapiens
ucuugcuuguuguucccuucau

SEQ ID NO: 70790 - RNA, 20 nt, Homo sapiens
ucuugguuggaggucuuuua

SEQ ID NO: 70791 - RNA, 22 nt, Homo sapiens
auuguguagucuuacugcuugc

SEQ ID NO: 70792 - RNA, 22 nt, Homo sapiens
auugugauggucaaaggaaaua

SEQ ID NO: 70793 - RNA, 22 nt, Homo sapiens
auuaaguugugccugaaaacuu

SEQ ID NO: 70794 - RNA, 22 nt, Homo sapiens
cuguuugaggguuugcuuucag

SEQ ID NO: 70795 - RNA, 22 nt, Homo sapiens
cugguuguuacaugcuugccag

SEQ ID NO: 70796 - RNA, 22 nt, Homo sapiens
cugcagucaucugaagauuuug

SEQ ID NO: 70797 - RNA, 22 nt, Homo sapiens
cugagauuuuuagauccuggcg

SEQ ID NO: 70798 - RNA, 22 nt, Homo sapiens
aucuacuugcugggucucugga

SEQ ID NO: 70799 - RNA, 22 nt, Homo sapiens
aucuuugauuagacugauggau

SEQ ID NO: 70800 - RNA, 22 nt, Homo sapiens
aucugguguggcugugauccuc

SEQ ID NO: 70801 - RNA, 23 nt, Homo sapiens
aucacuguuaacaauuucuuccu

SEQ ID NO: 70802 - RNA, 22 nt, Homo sapiens
augauucugaucuagagcuugg

SEQ ID NO: 70803 - RNA, 22 nt, Homo sapiens
augaauuuucugauguugggua

SEQ ID NO: 70804 - RNA, 22 nt, Homo sapiens
agugauauguuugccuugaggg

SEQ ID NO: 70805 - RNA, 22 nt, Homo sapiens
agucagauuggcauuuguuggg

SEQ ID NO: 70806 - RNA, 22 nt, Homo sapiens
auaagaguaguacauaugagac

SEQ ID NO: 70807 - RNA, 22 nt, Homo sapiens
agauucauccaaguuguugcau

SEQ ID NO: 70808 - RNA, 22 nt, Homo sapiens
acuuuuguuauacagugugaua

SEQ ID NO: 70809 - RNA, 22 nt, Homo sapiens
acugcauaaauauguguaauau

SEQ ID NO: 70810 - RNA, 22 nt, Homo sapiens
acuuuuugauggggagaacauu

SEQ ID NO: 70811 - RNA, 22 nt, Homo sapiens
uuuguguccccacccacaucuc

SEQ ID NO: 70812 - RNA, 22 nt, Homo sapiens
uuucuacagugaacgauuucua

SEQ ID NO: 70813 - RNA, 22 nt, Homo sapiens
uuuauggagagauauuuauggu

SEQ ID NO: 70814 - RNA, 22 nt, Homo sapiens
uuguccucuccaaaucucaugu

SEQ ID NO: 70815 - RNA, 22 nt, Homo sapiens
uugguauguaauuuauauugua

SEQ ID NO: 70816 - RNA, 22 nt, Homo sapiens
uucuuuggaaacaguacuaauu

SEQ ID NO: 70817 - RNA, 22 nt, Homo sapiens
uugcacuauuaguauagauguc

SEQ ID NO: 70818 - RNA, 22 nt, Homo sapiens
uugauuagauccaguugauuga

SEQ ID NO: 70819 - RNA, 22 nt, Homo sapiens
uugauguugaggacauaaaccu

SEQ ID NO: 70820 - RNA, 22 nt, Homo sapiens
uugauugacaugucucuguuca

SEQ ID NO: 70821 - RNA, 22 nt, Homo sapiens
uugagauuauuguguuccuuua

SEQ ID NO: 70822 - RNA, 22 nt, Homo sapiens
ugucuagaaaagccugccuucu

SEQ ID NO: 70823 - RNA, 22 nt, Homo sapiens
ugugaucaugguauuaaucugc

SEQ ID NO: 70824 - RNA, 22 nt, Homo sapiens
uuaugcuugugugaauuuuccc

SEQ ID NO: 70825 - RNA, 22 nt, Homo sapiens
uguguagagaaauauuacuuau

SEQ ID NO: 70826 - RNA, 22 nt, Homo sapiens
ugugauugauauauuuacagaa

SEQ ID NO: 70827 - RNA, 18 nt, Homo sapiens
uuuugcuuaacugcgcca

SEQ ID NO: 70828 - RNA, 22 nt, Homo sapiens
uuugcaauguugugauggugaa

SEQ ID NO: 70829 - RNA, 22 nt, Homo sapiens
uuuugguguacaauucuaugga

SEQ ID NO: 70830 - RNA, 22 nt, Homo sapiens
uauuaguuuucuguggauuaca

SEQ ID NO: 70831 - RNA, 17 nt, Homo sapiens
uauugaccuuuguaugu

SEQ ID NO: 70832 - RNA, 22 nt, Homo sapiens
uauugauuaauugugauuaggc

SEQ ID NO: 70833 - RNA, 22 nt, Homo sapiens
uauuguuaaagauguuaaugau

SEQ ID NO: 70834 - RNA, 22 nt, Homo sapiens
uauggauuucauuagacuugag

SEQ ID NO: 70835 - RNA, 22 nt, Homo sapiens
uauggauuugccuauucuguau

SEQ ID NO: 70836 - RNA, 22 nt, Homo sapiens
uaauagcaguguuacuaggacu

SEQ ID NO: 70837 - RNA, 22 nt, Homo sapiens
guuuggauuuucuaauuucugu

SEQ ID NO: 70838 - RNA, 22 nt, Homo sapiens
guguauauccuauuaguucugu

SEQ ID NO: 70839 - RNA, 22 nt, Homo sapiens
gugagauuaguucuggaccugg

SEQ ID NO: 70840 - RNA, 22 nt, Homo sapiens
gugagauuaccauuuaaaucag

SEQ ID NO: 70841 - RNA, 22 nt, Homo sapiens
gucaguuugguuaaucauucca

SEQ ID NO: 70842 - RNA, 22 nt, Homo sapiens
guaugaguuuucugaugugugg

SEQ ID NO: 70843 - RNA, 22 nt, Homo sapiens
guacaguucucuuuguugucag

SEQ ID NO: 70844 - RNA, 22 nt, Homo sapiens
gaaucaauugaucuaugugucu

SEQ ID NO: 70845 - RNA, 22 nt, Homo sapiens
gagaacuaaugguuugauaagg

SEQ ID NO: 70846 - RNA, 22 nt, Homo sapiens
cucuuuuguuuagcugagaggg

SEQ ID NO: 70847 - RNA, 22 nt, Homo sapiens
cucuuugaugugaaccgugguu

SEQ ID NO: 70848 - RNA, 22 nt, Homo sapiens
cucaauuuggaauugucaguaa

SEQ ID NO: 70849 - RNA, 22 nt, Homo sapiens
cuaucucauugguuuuugaaag

SEQ ID NO: 70850 - RNA, 22 nt, Homo sapiens
auuauuaguuguugaaugaagu

SEQ ID NO: 70851 - RNA, 22 nt, Homo sapiens
auuugguuauucaguuguucag

SEQ ID NO: 70852 - RNA, 22 nt, Homo sapiens
auuugucaauacacuucuucca

SEQ ID NO: 70853 - RNA, 22 nt, Homo sapiens
auuugggaaugugcauuauacu

SEQ ID NO: 70854 - RNA, 22 nt, Homo sapiens
auuuuugguugguaggcuauua

SEQ ID NO: 70855 - RNA, 22 nt, Homo sapiens
auuuuugguugucagcacuagg

SEQ ID NO: 70856 - RNA, 21 nt, Homo sapiens
ugauguugaccuaaguaguga

SEQ ID NO: 70857 - RNA, 22 nt, Homo sapiens
ugauguugacuguaggcagaga

SEQ ID NO: 70858 - RNA, 22 nt, Homo sapiens
ugaugaugaaugaucuuuuaca

SEQ ID NO: 70859 - RNA, 22 nt, Homo sapiens
ugauuugucugcaggaauagug

SEQ ID NO: 70860 - RNA, 22 nt, Homo sapiens
ugauaugaaucaaucacucuuc

SEQ ID NO: 70861 - RNA, 22 nt, Homo sapiens
ugagguuggguaauuuaugaag

SEQ ID NO: 70862 - RNA, 22 nt, Homo sapiens
ugguaauguaauuuggagaagg

SEQ ID NO: 70863 - RNA, 22 nt, Homo sapiens
uauuugguuacuugaauagcua

SEQ ID NO: 70864 - RNA, 22 nt, Homo sapiens
ucauuguccaacuucuuucagu

SEQ ID NO: 70865 - RNA, 22 nt, Homo sapiens
uccauuugucuauguuucuguu

SEQ ID NO: 70866 - RNA, 22 nt, Homo sapiens
ucuuuagugacaguugugcaag

SEQ ID NO: 70867 - RNA, 22 nt, Homo sapiens
ucuuugauuuuguuacuaagac

SEQ ID NO: 70868 - RNA, 22 nt, Homo sapiens
ucuuugauaagauccagaagaa

SEQ ID NO: 70869 - RNA, 22 nt, Homo sapiens
ucuuugguagaagcuauuuuau

SEQ ID NO: 70870 - RNA, 22 nt, Homo sapiens
uuguguaguaccucucacauug

SEQ ID NO: 70871 - RNA, 22 nt, Homo sapiens
uuugguguauaaaaaugcuagu

SEQ ID NO: 70872 - RNA, 22 nt, Homo sapiens
uuugggaaaugaaguugguaga

SEQ ID NO: 70873 - RNA, 22 nt, Homo sapiens
uuugauugguguaccugaaagu

SEQ ID NO: 70874 - RNA, 22 nt, Homo sapiens
uuugaguuugaggugcugauga

SEQ ID NO: 70875 - RNA, 22 nt, Homo sapiens
uugcaucagcuccugauguacu

SEQ ID NO: 70876 - RNA, 22 nt, Homo sapiens
uugaugauguuucugccuugcc

SEQ ID NO: 70877 - RNA, 22 nt, Homo sapiens
uucuugguguaguaguugaaaa

SEQ ID NO: 70878 - RNA, 22 nt, Homo sapiens
uucauagaggacauuacuggag

SEQ ID NO: 70879 - RNA, 22 nt, Homo sapiens
uuacauguuguggguuguggcc

SEQ ID NO: 70880 - RNA, 22 nt, Homo sapiens
uuauggauuuauauucuguagu

SEQ ID NO: 70881 - RNA, 17 nt, Homo sapiens
uucucaguucugaucuc

SEQ ID NO: 70882 - RNA, 22 nt, Homo sapiens
uucccuuugugcauaggauuug

SEQ ID NO: 70883 - RNA, 22 nt, Homo sapiens
uguagauauucuuucaguuuuu

SEQ ID NO: 70884 - RNA, 22 nt, Homo sapiens
uguuuguuugauaugggauaaa

SEQ ID NO: 70885 - RNA, 22 nt, Homo sapiens
uguguaauaccuuugacuauau

SEQ ID NO: 70886 - RNA, 22 nt, Homo sapiens
aucucaguuaauuccaucuuuc

SEQ ID NO: 70887 - RNA, 22 nt, Homo sapiens
agguguuguugaggagauuuca

SEQ ID NO: 70888 - RNA, 22 nt, Homo sapiens
agguauauuggacagauguaaa

SEQ ID NO: 70889 - RNA, 22 nt, Homo sapiens
acacuuucuggagcugcacaua

SEQ ID NO: 70890 - RNA, 22 nt, Homo sapiens
aaagucuagaggaucaugugug

SEQ ID NO: 70891 - RNA, 22 nt, Homo sapiens
uguuauguuguuugagaaaguc

SEQ ID NO: 70892 - RNA, 22 nt, Homo sapiens
uguuauguucuacuuuuaggug

SEQ ID NO: 70893 - RNA, 22 nt, Homo sapiens
uguuauguauggagugauccca

SEQ ID NO: 70894 - RNA, 22 nt, Homo sapiens
uugaauagugacuuugauucug

SEQ ID NO: 70895 - RNA, 22 nt, Homo sapiens
uugaauagcauguuuagugcau

SEQ ID NO: 70896 - RNA, 22 nt, Homo sapiens
uugaauagaagguuuuuuguuc

SEQ ID NO: 70897 - RNA, 18 nt, Homo sapiens
uugaauaguguccaaucu

SEQ ID NO: 70898 - RNA, 22 nt, Homo sapiens
ugaauagugucacaauaaacau

SEQ ID NO: 70899 - RNA, 18 nt, Homo sapiens
cuaguguuucuugaauca

SEQ ID NO: 70900 - RNA, 21 nt, Homo sapiens
caucaaauugucauggugggu

SEQ ID NO: 70901 - RNA, 22 nt, Homo sapiens
gaauagugcugcagcaaacaua

SEQ ID NO: 70902 - RNA, 22 nt, Homo sapiens
gauuagugacguugagcacugu

SEQ ID NO: 70903 - RNA, 18 nt, Homo sapiens
guauuccagccugaguga

SEQ ID NO: 70904 - RNA, 22 nt, Homo sapiens
uauagcaaugccccacuccuga

SEQ ID NO: 70905 - RNA, 22 nt, Homo sapiens
uugaauaguggugaaaguuuga

SEQ ID NO: 70906 - RNA, 22 nt, Homo sapiens
uugaauaggcucaugcuuauca

SEQ ID NO: 70907 - RNA, 22 nt, Homo sapiens
aauuaguaaccuaauuccaucu

SEQ ID NO: 70908 - RNA, 22 nt, Homo sapiens
aucuaaucaucgcaaccuucaa

SEQ ID NO: 70909 - RNA, 18 nt, Homo sapiens
ugaauaguguccccauga

SEQ ID NO: 70910 - RNA, 22 nt, Homo sapiens
uauuccauuugugaaaggaagu

SEQ ID NO: 70911 - RNA, 22 nt, Homo sapiens
uauagcaaugugccacucucug

SEQ ID NO: 70912 - RNA, 22 nt, Homo sapiens
uugugucccuacccaaaucuca

SEQ ID NO: 70913 - RNA, 22 nt, Homo sapiens
uuguguccccacccaaaucuca

SEQ ID NO: 70914 - RNA, 22 nt, Homo sapiens
uuguuauguaucucaagauaaa

SEQ ID NO: 70915 - RNA, 22 nt, Homo sapiens
uguuauguuuuagagguuucaa

SEQ ID NO: 70916 - RNA, 22 nt, Homo sapiens
uauuagugucuuuugguuagaa

SEQ ID NO: 70917 - RNA, 22 nt, Homo sapiens
auuagguauuuguccuaaauau

SEQ ID NO: 70918 - RNA, 22 nt, Homo sapiens
cugaauagucaacgauggacug

SEQ ID NO: 70919 - RNA, 22 nt, Homo sapiens
aucaaagugaauuaaugagaau

SEQ ID NO: 70920 - RNA, 22 nt, Homo sapiens
aaguccaugaagucuugugggu

SEQ ID NO: 70921 - RNA, 22 nt, Homo sapiens
uuguuauguuggucaguaaugu

SEQ ID NO: 70922 - RNA, 22 nt, Homo sapiens
uuaaugaacuuuauuuuguaga

SEQ ID NO: 70923 - RNA, 22 nt, Homo sapiens
uuaguaguuugauaggaauagc

SEQ ID NO: 70924 - RNA, 22 nt, Homo sapiens
uuaguaucauccuucugcauuc

SEQ ID NO: 70925 - RNA, 22 nt, Homo sapiens
cuccauagucuucgaagaauga

SEQ ID NO: 70926 - RNA, 22 nt, Homo sapiens
uauuagugccuaagucuuaggg

SEQ ID NO: 70927 - RNA, 22 nt, Homo sapiens
uaguccauuuucaugcugcuau

SEQ ID NO: 70928 - RNA, 22 nt, Homo sapiens
guaaugaacuugaaagccuguu

SEQ ID NO: 70929 - RNA, 22 nt, Homo sapiens
ugugaaugaagaaugcuaaccu

SEQ ID NO: 70930 - RNA, 22 nt, Homo sapiens
uagcacaucccuaaaaugcugu

SEQ ID NO: 70931 - RNA, 22 nt, Homo sapiens
aagcuggauuucgcauccuguu

SEQ ID NO: 70932 - RNA, 22 nt, Homo sapiens
auaugccacugaacuguaccca

SEQ ID NO: 70933 - RNA, 22 nt, Homo sapiens
ucacacucucaccaacauuugg

SEQ ID NO: 70934 - RNA, 22 nt, Homo sapiens
acacugucaugucucacaggca

SEQ ID NO: 70935 - RNA, 22 nt, Homo sapiens
uaagugcuugacuuugauguuu

SEQ ID NO: 70936 - RNA, 22 nt, Homo sapiens
uagugaaugucacuggcuguug

SEQ ID NO: 70937 - RNA, 22 nt, Homo sapiens
gugucaguggggagugaucuuc

SEQ ID NO: 70938 - RNA, 23 nt, Homo sapiens
ucaugaggccauucaaauccauu

SEQ ID NO: 70939 - RNA, 22 nt, Homo sapiens
uaaaccacguuuacauuugaga

SEQ ID NO: 70940 - RNA, 22 nt, Homo sapiens
agucagugucuguaaggagaac

SEQ ID NO: 70941 - RNA, 22 nt, Homo sapiens
guguaauaaucguggacuaugu

SEQ ID NO: 70942 - RNA, 22 nt, Homo sapiens
cauggcacaucuuuucugacua

SEQ ID NO: 70943 - RNA, 22 nt, Homo sapiens
cugggucaguuucugauuauug

SEQ ID NO: 70944 - RNA, 22 nt, Homo sapiens
uaaacugcuugaggguaaguac

SEQ ID NO: 70945 - RNA, 22 nt, Homo sapiens
aucacagaacuuugagcagaga

SEQ ID NO: 70946 - RNA, 21 nt, Homo sapiens
uggucaguuuucucacuagga

SEQ ID NO: 70947 - RNA, 22 nt, Homo sapiens
agcuacaucuugcucugggaug

SEQ ID NO: 70948 - RNA, 22 nt, Homo sapiens
ugccuacuuugcaucugucagg

SEQ ID NO: 70949 - RNA, 22 nt, Homo sapiens
cugacuuuagaacccaaaaagu

SEQ ID NO: 70950 - RNA, 22 nt, Homo sapiens
uuagcagcaugaaaauggacug

SEQ ID NO: 70951 - RNA, 22 nt, Homo sapiens
agagaugauuaacauuuuggua

SEQ ID NO: 70952 - RNA, 22 nt, Homo sapiens
ucacaugaauugucuuguucca

SEQ ID NO: 70953 - RNA, 22 nt, Homo sapiens
cucugagguuauucguaauauu

SEQ ID NO: 70954 - RNA, 22 nt, Homo sapiens
uucuuagguuaaggcugagaga

SEQ ID NO: 70955 - RNA, 22 nt, Homo sapiens
gauuguguucauaggcauguua

SEQ ID NO: 70956 - RNA, 22 nt, Homo sapiens
ucagugucugugauggagaggu

SEQ ID NO: 70957 - RNA, 22 nt, Homo sapiens
aaaguggugggauuccaggcau

SEQ ID NO: 70958 - RNA, 22 nt, Homo sapiens
uggcauggaacuacuuugaaac

SEQ ID NO: 70959 - RNA, 22 nt, Homo sapiens
ucagcagugccccacucuacug

SEQ ID NO: 70960 - RNA, 22 nt, Homo sapiens
cugggauggaggagaauuagag

SEQ ID NO: 70961 - RNA, 22 nt, Homo sapiens
acccaguguucagacuaccugu

SEQ ID NO: 70962 - RNA, 22 nt, Homo sapiens
gucaggugcuuacgcggagauc

SEQ ID NO: 70963 - RNA, 22 nt, Homo sapiens
ugagacugagucuugcucuauu

SEQ ID NO: 70964 - RNA, 22 nt, Homo sapiens
agguccacuuacuacuccuguu

SEQ ID NO: 70965 - RNA, 22 nt, Homo sapiens
cugagguacugggggccaggau

SEQ ID NO: 70966 - RNA, 22 nt, Homo sapiens
cugguaugcuucauaugcaaac

SEQ ID NO: 70967 - RNA, 22 nt, Homo sapiens
uccccaguaggcaauuaacacc

SEQ ID NO: 70968 - RNA, 22 nt, Homo sapiens
gucagggagggauagaugauua

SEQ ID NO: 70969 - RNA, 22 nt, Homo sapiens
auggcacuuuggacugcuagau

SEQ ID NO: 70970 - RNA, 22 nt, Homo sapiens
aaacugccuuccuuguaggugc

SEQ ID NO: 70971 - RNA, 22 nt, Homo sapiens
cugcuaagagaaugagacuuag

SEQ ID NO: 70972 - RNA, 22 nt, Homo sapiens
augugcacaugcuuacauguga

SEQ ID NO: 70973 - RNA, 22 nt, Homo sapiens
gucacaggaaacuaauaugcgc

SEQ ID NO: 70974 - RNA, 22 nt, Homo sapiens
ucacaggguguuauuagaauua

SEQ ID NO: 70975 - RNA, 22 nt, Homo sapiens
ugagaccaacagauuccaguuc

SEQ ID NO: 70976 - RNA, 22 nt, Homo sapiens
gugugcacaaucuggcaugugc

SEQ ID NO: 70977 - RNA, 22 nt, Homo sapiens
uaaaugcucuuuaaaagugcuu

SEQ ID NO: 70978 - RNA, 22 nt, Homo sapiens
uguaaugaucaaaucagaguaa

SEQ ID NO: 70979 - RNA, 19 nt, Homo sapiens
ggcaauacuuucuuguugg

SEQ ID NO: 70980 - RNA, 22 nt, Homo sapiens
ucagugucaucuggguuguuug

SEQ ID NO: 70981 - RNA, 22 nt, Homo sapiens
ucacaguagccccucccaucau

SEQ ID NO: 70982 - RNA, 22 nt, Homo sapiens
auggcacugaagcguauugaca

SEQ ID NO: 70983 - RNA, 22 nt, Homo sapiens
ucagugcuguaccaucuaagga

SEQ ID NO: 70984 - RNA, 22 nt, Homo sapiens
uucccuguaucuucugccaugu

SEQ ID NO: 70985 - RNA, 22 nt, Homo sapiens
aaauugcacaaguggugauuug

SEQ ID NO: 70986 - RNA, 22 nt, Homo sapiens
ucauggggugcuuugcuagauu

SEQ ID NO: 70987 - RNA, 22 nt, Homo sapiens
uucagagagggagggauaccua

SEQ ID NO: 70988 - RNA, 22 nt, Homo sapiens
auugaguaaaaaauagugaugu

SEQ ID NO: 70989 - RNA, 22 nt, Homo sapiens
augggguagguagcucggggaa

SEQ ID NO: 70990 - RNA, 22 nt, Homo sapiens
uggagugcgagggugaaacuuu

SEQ ID NO: 70991 - RNA, 22 nt, Homo sapiens
acccugucauccacauggugcu

SEQ ID NO: 70992 - RNA, 22 nt, Homo sapiens
caugugcaugcuuucuuaugug

SEQ ID NO: 70993 - RNA, 22 nt, Homo sapiens
aagugcuggccuacucaaucga

SEQ ID NO: 70994 - RNA, 22 nt, Homo sapiens
ugaguagugcugcaauaaacau

SEQ ID NO: 70995 - RNA, 22 nt, Homo sapiens
ugacagugugagacuuugucuc

SEQ ID NO: 70996 - RNA, 22 nt, Homo sapiens
acugcacuccagccucgcaaca

SEQ ID NO: 70997 - RNA, 23 nt, Homo sapiens
agaugcaucuggcugcgaggcaa

SEQ ID NO: 70998 - RNA, 22 nt, Homo sapiens
accgggcugagcgcaggccccg

SEQ ID NO: 70999 - RNA, 19 nt, Homo sapiens
aaguaguugugacagaugc

SEQ ID NO: 71000 - RNA, 22 nt, Homo sapiens
uagucacacacucaacuuuuca

SEQ ID NO: 71001 - RNA, 22 nt, Homo sapiens
cugugcauaucuuggacugugu

SEQ ID NO: 71002 - RNA, 21 nt, Homo sapiens
auagugcuagagaguagcagg

SEQ ID NO: 71003 - RNA, 22 nt, Homo sapiens
gucaagauuuguaggacagaga

SEQ ID NO: 71004 - RNA, 22 nt, Homo sapiens
ucaguguuuggaaucucaauuu

SEQ ID NO: 71005 - RNA, 22 nt, Homo sapiens
ugugaaugauggagugucgaau

SEQ ID NO: 71006 - RNA, 22 nt, Homo sapiens
gucacagaaaaagauaugccaa

SEQ ID NO: 71007 - RNA, 22 nt, Homo sapiens
ucucacaggguuauugaggggg

SEQ ID NO: 71008 - RNA, 22 nt, Homo sapiens
ucacagauaaauaaagaugauu

SEQ ID NO: 71009 - RNA, 22 nt, Homo sapiens
gagcucauuguugcuaaagaga

SEQ ID NO: 71010 - RNA, 23 nt, Homo sapiens
ggauggaaaguuuugagggccac

SEQ ID NO: 71011 - RNA, 22 nt, Homo sapiens
gugcaagagugauugcaguuuu

SEQ ID NO: 71012 - RNA, 22 nt, Homo sapiens
ugaguguccaaguaaggugaaa

SEQ ID NO: 71013 - RNA, 22 nt, Homo sapiens
ugguccaguucugugauauugc

SEQ ID NO: 71014 - RNA, 22 nt, Homo sapiens
cacuuugguucaccugaguuuc

SEQ ID NO: 71015 - RNA, 22 nt, Homo sapiens
uaaguauuaugugcugcauuuu

SEQ ID NO: 71016 - RNA, 22 nt, Homo sapiens
gucugagcauggggccggcagg

SEQ ID NO: 71017 - RNA, 22 nt, Homo sapiens
ugugaauggugcugccgugaag

SEQ ID NO: 71018 - RNA, 22 nt, Homo sapiens
acugcacuccagccugcccaac

SEQ ID NO: 71019 - RNA, 22 nt, Homo sapiens
caagugcuuucuuggggauuua

SEQ ID NO: 71020 - RNA, 22 nt, Homo sapiens
uggucauggggcagcugacacu

SEQ ID NO: 71021 - RNA, 22 nt, Homo sapiens
caggcauuguccaugcugaagg

SEQ ID NO: 71022 - RNA, 22 nt, Homo sapiens
cugaagugugaaagucuuuuuu

SEQ ID NO: 71023 - RNA, 17 nt, Homo sapiens
augugaauguucaaaua

SEQ ID NO: 71024 - RNA, 22 nt, Homo sapiens
ugccuaggcuggagugcagugg

SEQ ID NO: 71025 - RNA, 22 nt, Homo sapiens
uuuugcucuucggaagagcuug

SEQ ID NO: 71026 - RNA, 22 nt, Homo sapiens
cagagaacauucagagcuguag

SEQ ID NO: 71027 - RNA, 22 nt, Homo sapiens
agagaacugauuggaguugggc

SEQ ID NO: 71028 - RNA, 22 nt, Homo sapiens
uucuggccuccauuuuucuccu

SEQ ID NO: 71029 - RNA, 23 nt, Homo sapiens
auuccaguggcaauuggagaaac

SEQ ID NO: 71030 - RNA, 22 nt, Homo sapiens
aagggaauguuguggcugguuu

SEQ ID NO: 71031 - RNA, 22 nt, Homo sapiens
augauguaggccauggguuucu

SEQ ID NO: 71032 - RNA, 22 nt, Homo sapiens
uaucacagguggacugcacacc

SEQ ID NO: 71033 - RNA, 22 nt, Homo sapiens
ugucacccuuuauccauuuccu

SEQ ID NO: 71034 - RNA, 22 nt, Homo sapiens
ggcuagagagcucagggauaug

SEQ ID NO: 71035 - RNA, 22 nt, Homo sapiens
aagcuggauuuaguguggagca

SEQ ID NO: 71036 - RNA, 17 nt, Homo sapiens
agcaccacacucucuug

SEQ ID NO: 71037 - RNA, 22 nt, Homo sapiens
gcaguguggguagagggcaaga

SEQ ID NO: 71038 - RNA, 22 nt, Homo sapiens
agcuccaucuucagggguucag

SEQ ID NO: 71039 - RNA, 22 nt, Homo sapiens
cagaugcaugaccugggcuugg

SEQ ID NO: 71040 - RNA, 22 nt, Homo sapiens
cugggguaggacuggcuuuuga

SEQ ID NO: 71041 - RNA, 22 nt, Homo sapiens
uuauuagguugguggaaaagua

SEQ ID NO: 71042 - RNA, 22 nt, Homo sapiens
uuuguucaccucaaggauggga

SEQ ID NO: 71043 - RNA, 20 nt, Homo sapiens
cucagguauuugaggcugca

SEQ ID NO: 71044 - RNA, 22 nt, Homo sapiens
uggucaccugaauuaugcaugu

SEQ ID NO: 71045 - RNA, 22 nt, Homo sapiens
ugacagugaauaagucucuuaa

SEQ ID NO: 71046 - RNA, 22 nt, Homo sapiens
agcaccacaauuuccugccuaa

SEQ ID NO: 71047 - RNA, 22 nt, Homo sapiens
ucccaguggucuugaaacaggg

SEQ ID NO: 71048 - RNA, 22 nt, Homo sapiens
gugauuauuaugcacugcaugc

SEQ ID NO: 71049 - RNA, 22 nt, Homo sapiens
ucugagguuacugcuuuguaga

SEQ ID NO: 71050 - RNA, 22 nt, Homo sapiens
ucugguggugaugagagacagu

SEQ ID NO: 71051 - RNA, 22 nt, Homo sapiens
uuccaguaauagcacagcauug

SEQ ID NO: 71052 - RNA, 22 nt, Homo sapiens
auacuguuuuacaucauugccu

SEQ ID NO: 71053 - RNA, 23 nt, Homo sapiens
ucccaagauggaccagaccaagg

SEQ ID NO: 71054 - RNA, 22 nt, Homo sapiens
augagguccuagccaacuuuuu

SEQ ID NO: 71055 - RNA, 22 nt, Homo sapiens
ggaaagauguaauauuaucuaa

SEQ ID NO: 71056 - RNA, 22 nt, Homo sapiens
uccaguguuucuuccacuauuu

SEQ ID NO: 71057 - RNA, 22 nt, Homo sapiens
ucucacagccauuucucccucu

SEQ ID NO: 71058 - RNA, 22 nt, Homo sapiens
ucacaguaaauccagaagaaau

SEQ ID NO: 71059 - RNA, 22 nt, Homo sapiens
uuagcagcaugagaauggacua

SEQ ID NO: 71060 - RNA, 22 nt, Homo sapiens
guaacucugucacuuacuaguu

SEQ ID NO: 71061 - RNA, 22 nt, Homo sapiens
agacaguauuggcaaagugugu

SEQ ID NO: 71062 - RNA, 22 nt, Homo sapiens
uaacugccuacugugcaaauau

SEQ ID NO: 71063 - RNA, 22 nt, Homo sapiens
augggaaaaucagaaggccugg

SEQ ID NO: 71064 - RNA, 21 nt, Homo sapiens
cacuggguucaggcuugugga

SEQ ID NO: 71065 - RNA, 22 nt, Homo sapiens
acugcacuccagccugcugaca

SEQ ID NO: 71066 - RNA, 18 nt, Homo sapiens
gucucacaugguggaagc

SEQ ID NO: 71067 - RNA, 22 nt, Homo sapiens
uugagcucaucuucagggguga

SEQ ID NO: 71068 - RNA, 20 nt, Homo sapiens
ugaggucugagaaagaauga

SEQ ID NO: 71069 - RNA, 22 nt, Homo sapiens
gugaagugugaccucagcaucu

SEQ ID NO: 71070 - RNA, 22 nt, Homo sapiens
uucacagacaacuggucccuua

SEQ ID NO: 71071 - RNA, 22 nt, Homo sapiens
cugaggucugaauccagguauc

SEQ ID NO: 71072 - RNA, 20 nt, Homo sapiens
acugcacuucagccugcugg

SEQ ID NO: 71073 - RNA, 22 nt, Homo sapiens
guggcaaggaaaugcugcucac

SEQ ID NO: 71074 - RNA, 20 nt, Homo sapiens
uggagugaagguucuggacc

SEQ ID NO: 71075 - RNA, 22 nt, Homo sapiens
gauacuggcuuuauagaaugau

SEQ ID NO: 71076 - RNA, 22 nt, Homo sapiens
ggucuuggagaauuguccuggg

SEQ ID NO: 71077 - RNA, 22 nt, Homo sapiens
uugugguuuuuaaaacuaggug

SEQ ID NO: 71078 - RNA, 22 nt, Homo sapiens
uuucugaggccucaccagaagc

SEQ ID NO: 71079 - RNA, 22 nt, Homo sapiens
gcugcuguuuaguuucuccugg

SEQ ID NO: 71080 - RNA, 22 nt, Homo sapiens
gagaacuggcgugaacugcacg

SEQ ID NO: 71081 - RNA, 21 nt, Homo sapiens
aggcaagguguuauuauugaa

SEQ ID NO: 71082 - RNA, 22 nt, Homo sapiens
aagugcuguaugggagccuagg

SEQ ID NO: 71083 - RNA, 22 nt, Homo sapiens
uggagugauaugguuauauggg

SEQ ID NO: 71084 - RNA, 22 nt, Homo sapiens
ucagugcuguuugcccucguuu

SEQ ID NO: 71085 - RNA, 22 nt, Homo sapiens
augacauugaaaagcaagugga

SEQ ID NO: 71086 - RNA, 22 nt, Homo sapiens
agacagcugguagcacuuccug

SEQ ID NO: 71087 - RNA, 22 nt, Homo sapiens
uaugacuuuggaaaaauuacuu

SEQ ID NO: 71088 - RNA, 22 nt, Homo sapiens
ugugauaguuggcuaaagcagu

SEQ ID NO: 71089 - RNA, 22 nt, Homo sapiens
auagugcuauggcagaccuuga

SEQ ID NO: 71090 - RNA, 22 nt, Homo sapiens
cccagugugcugggugacagcu

SEQ ID NO: 71091 - RNA, 22 nt, Homo sapiens
uaaacugcuugaaaugguguca

SEQ ID NO: 71092 - RNA, 22 nt, Homo sapiens
gagcugaauugcugccauuugc

SEQ ID NO: 71093 - RNA, 22 nt, Homo sapiens
uauuccagcccuggugagccag

SEQ ID NO: 71094 - RNA, 20 nt, Homo sapiens
ugacaucagcaauguaauaa

SEQ ID NO: 71095 - RNA, 22 nt, Homo sapiens
ugccaguauuuuauugaggauu

SEQ ID NO: 71096 - RNA, 22 nt, Homo sapiens
agucagugcauaagaaugaagu

SEQ ID NO: 71097 - RNA, 22 nt, Homo sapiens
agagagcuuuaacuacccauuu

SEQ ID NO: 71098 - RNA, 22 nt, Homo sapiens
cuggauagucaggagauauaua

SEQ ID NO: 71099 - RNA, 22 nt, Homo sapiens
auggcacuaaugggaguuuacu

SEQ ID NO: 71100 - RNA, 22 nt, Homo sapiens
cuagcagacacuuccagagagu

SEQ ID NO: 71101 - RNA, 22 nt, Homo sapiens
uacuagaguagugcagagggga

SEQ ID NO: 71102 - RNA, 22 nt, Homo sapiens
uuggguccucugguccuugguu

SEQ ID NO: 71103 - RNA, 22 nt, Homo sapiens
cagagguaagcaagucagcauu

SEQ ID NO: 71104 - RNA, 22 nt, Homo sapiens
uuaugccagugauuauaagggc

SEQ ID NO: 71105 - RNA, 22 nt, Homo sapiens
ucugucaaaucuuauguuguag

SEQ ID NO: 71106 - RNA, 22 nt, Homo sapiens
guuaagaaguguaacuuaaguu

SEQ ID NO: 71107 - RNA, 22 nt, Homo sapiens
ccaccgggucccagcucugcuc

SEQ ID NO: 71108 - RNA, 22 nt, Homo sapiens
gaaaacugcuucucuggguuuc

SEQ ID NO: 71109 - RNA, 22 nt, Homo sapiens
ugugaauguaagaaaauccaac

SEQ ID NO: 71110 - RNA, 22 nt, Homo sapiens
cucacugugguguccuuaggua

SEQ ID NO: 71111 - RNA, 22 nt, Homo sapiens
gcugguguucaggcccucaguc

SEQ ID NO: 71112 - RNA, 22 nt, Homo sapiens
ugugcaaggcucucaaccugug

SEQ ID NO: 71113 - RNA, 22 nt, Homo sapiens
gugcccacugucuguccuguag

SEQ ID NO: 71114 - RNA, 18 nt, Homo sapiens
acugcacuccauccuagg

SEQ ID NO: 71115 - RNA, 22 nt, Homo sapiens
cucccagugacccaggaacagg

SEQ ID NO: 71116 - RNA, 22 nt, Homo sapiens
cagacaugucuuguggccgugg

SEQ ID NO: 71117 - RNA, 22 nt, Homo sapiens
ggaaagaucagcuaaauguaag

SEQ ID NO: 71118 - RNA, 22 nt, Homo sapiens
ucucacagaguugaacuuucuu

SEQ ID NO: 71119 - RNA, 22 nt, Homo sapiens
uagagccauugcagauguuuga

SEQ ID NO: 71120 - RNA, 22 nt, Homo sapiens
ucauggggugagcuacaggcac

SEQ ID NO: 71121 - RNA, 22 nt, Homo sapiens
uugacuucagagcugauucaag

SEQ ID NO: 71122 - RNA, 22 nt, Homo sapiens
acacuguuuuaguuauuauagc

SEQ ID NO: 71123 - RNA, 23 nt, Homo sapiens
cccucagaagugcagggagagaa

SEQ ID NO: 71124 - RNA, 22 nt, Homo sapiens
cugucuggaguccuucgugugc

SEQ ID NO: 71125 - RNA, 21 nt, Homo sapiens
aucagagacccaggcuuccuc

SEQ ID NO: 71126 - RNA, 19 nt, Homo sapiens
ucucacagcucuacuaugu

SEQ ID NO: 71127 - RNA, 22 nt, Homo sapiens
ugagauaacuaaaaacauuuug

SEQ ID NO: 71128 - RNA, 23 nt, Homo sapiens
ccacacuguuuagaauggcauca

SEQ ID NO: 71129 - RNA, 22 nt, Homo sapiens
ugucaaggaaugucauugguuu

SEQ ID NO: 71130 - RNA, 22 nt, Homo sapiens
augcagaucacauuuuucuguc

SEQ ID NO: 71131 - RNA, 22 nt, Homo sapiens
gugaacagaaccugggaucgaa

SEQ ID NO: 71132 - RNA, 22 nt, Homo sapiens
ugaguucuuccuaucucugccu

SEQ ID NO: 71133 - RNA, 22 nt, Homo sapiens
ucacacgugaacucaucacaga

SEQ ID NO: 71134 - RNA, 22 nt, Homo sapiens
aucagaaucucuagugggacca

SEQ ID NO: 71135 - RNA, 22 nt, Homo sapiens
uagccucacaaagugcuuaaga

SEQ ID NO: 71136 - RNA, 22 nt, Homo sapiens
acugcacuccagccuccugaca

SEQ ID NO: 71137 - RNA, 22 nt, Homo sapiens
acugcacuccagccuccugggu

SEQ ID NO: 71138 - RNA, 22 nt, Homo sapiens
auugcacaucugcacuacagcc

SEQ ID NO: 71139 - RNA, 22 nt, Homo sapiens
acccaguguucaacauucacau

SEQ ID NO: 71140 - RNA, 17 nt, Homo sapiens
guacacuucuucuguga

SEQ ID NO: 71141 - RNA, 22 nt, Homo sapiens
ugaauguacuuaacacuggauu

SEQ ID NO: 71142 - RNA, 22 nt, Homo sapiens
acccugucaaaauggaccaauc

SEQ ID NO: 71143 - RNA, 22 nt, Homo sapiens
uguguaaauagcuacggaucug

SEQ ID NO: 71144 - RNA, 22 nt, Homo sapiens
caaugcauuauucucccacuuc

SEQ ID NO: 71145 - RNA, 22 nt, Homo sapiens
ugagaugcauauucuggcuccu

SEQ ID NO: 71146 - RNA, 22 nt, Homo sapiens
ugcugcuguuaucauuuuacca

SEQ ID NO: 71147 - RNA, 22 nt, Homo sapiens
acugcacuucagccuuggcuac

SEQ ID NO: 71148 - RNA, 22 nt, Homo sapiens
gugggguagcaggcuccuaucu

SEQ ID NO: 71149 - RNA, 20 nt, Homo sapiens
acagcacugguuucaagcaa

SEQ ID NO: 71150 - RNA, 22 nt, Homo sapiens
acugcacuccagccucccgucu

SEQ ID NO: 71151 - RNA, 22 nt, Homo sapiens
ugagacugguaauguguagggc

SEQ ID NO: 71152 - RNA, 22 nt, Homo sapiens
gaaagauuuccugagcuagaaa

SEQ ID NO: 71153 - RNA, 22 nt, Homo sapiens
ggucaaguaauccuggguguca

SEQ ID NO: 71154 - RNA, 18 nt, Homo sapiens
augagagccgauuccugg

SEQ ID NO: 71155 - RNA, 22 nt, Homo sapiens
uaacaguauaugugguaucuau

SEQ ID NO: 71156 - RNA, 22 nt, Homo sapiens
guguucaaagcugauugagauu

SEQ ID NO: 71157 - RNA, 22 nt, Homo sapiens
guagaaagcauuucagauuugc

SEQ ID NO: 71158 - RNA, 22 nt, Homo sapiens
uuggcagcauuccagccaagca

SEQ ID NO: 71159 - RNA, 22 nt, Homo sapiens
auugugcuaaaguaauaaguca

SEQ ID NO: 71160 - RNA, 22 nt, Homo sapiens
aucccuguguccagcaccugug

SEQ ID NO: 71161 - RNA, 22 nt, Homo sapiens
gugaggucagggcuguggacag

SEQ ID NO: 71162 - RNA, 22 nt, Homo sapiens
gggcaugaugucuuaugccuau

SEQ ID NO: 71163 - RNA, 22 nt, Homo sapiens
gugagauacuagagauauagug

SEQ ID NO: 71164 - RNA, 17 nt, Homo sapiens
aaguggcuuguucacca

SEQ ID NO: 71165 - RNA, 22 nt, Homo sapiens
aagcuggagugcaguggugcaa

SEQ ID NO: 71166 - RNA, 22 nt, Homo sapiens
gugcacaaucgugcauuccuug

SEQ ID NO: 71167 - RNA, 22 nt, Homo sapiens
gacugcagugcagcuguuaggc

SEQ ID NO: 71168 - RNA, 22 nt, Homo sapiens
aacuacaucucuuugaggcagg

SEQ ID NO: 71169 - RNA, 22 nt, Homo sapiens
aucugcaaauaaugaagauugg

SEQ ID NO: 71170 - RNA, 22 nt, Homo sapiens
guacagugcucacaaugagagc

SEQ ID NO: 71171 - RNA, 22 nt, Homo sapiens
gagugcuguuagcccuggguuu

SEQ ID NO: 71172 - RNA, 22 nt, Homo sapiens
gucauggguuaaagguggauac

SEQ ID NO: 71173 - RNA, 22 nt, Homo sapiens
uuggagagagaggacucccggc

SEQ ID NO: 71174 - RNA, 22 nt, Homo sapiens
auauuggccuaaaauucucuuu

SEQ ID NO: 71175 - RNA, 22 nt, Homo sapiens
aauacugagaugugagguacua

SEQ ID NO: 71176 - RNA, 22 nt, Homo sapiens
uuagcagcacaaaagcagacua

SEQ ID NO: 71177 - RNA, 22 nt, Homo sapiens
ugucaguggucuggaugcagcc

SEQ ID NO: 71178 - RNA, 22 nt, Homo sapiens
auaugcauacauguaugcagga

SEQ ID NO: 71179 - RNA, 22 nt, Homo sapiens
agugaauuguucaacaggagga

SEQ ID NO: 71180 - RNA, 22 nt, Homo sapiens
aacagaccuagauaguauaguc

SEQ ID NO: 71181 - RNA, 22 nt, Homo sapiens
gugggguaggaggaguacuucc

SEQ ID NO: 71182 - RNA, 22 nt, Homo sapiens
agcggcuguuccccuggucuau

SEQ ID NO: 71183 - RNA, 22 nt, Homo sapiens
aacaggcuccuaggggugcacc

SEQ ID NO: 71184 - RNA, 22 nt, Homo sapiens
ucugugcauuacacuuuucuca

SEQ ID NO: 71185 - RNA, 20 nt, Homo sapiens
ugagcucaauuguugcaagu

SEQ ID NO: 71186 - RNA, 22 nt, Homo sapiens
caccagcuggcauugaauaccu

SEQ ID NO: 71187 - RNA, 22 nt, Homo sapiens
aauacagcacacagaugggucu

SEQ ID NO: 71188 - RNA, 22 nt, Homo sapiens
gcuaggagauccacugcucucu

SEQ ID NO: 71189 - RNA, 22 nt, Homo sapiens
uuuguguggccuuggccuggca

SEQ ID NO: 71190 - RNA, 22 nt, Homo sapiens
acugaucaauguuaaggcuuau

SEQ ID NO: 71191 - RNA, 22 nt, Homo sapiens
augacuauugcacuuuccuggu

SEQ ID NO: 71192 - RNA, 20 nt, Homo sapiens
ugucauuaagcacugugcca

SEQ ID NO: 71193 - RNA, 22 nt, Homo sapiens
uuggcagcacgcaguccagagg

SEQ ID NO: 71194 - RNA, 22 nt, Homo sapiens
agagaacuguuuacacguuaau

SEQ ID NO: 71195 - RNA, 22 nt, Homo sapiens
augggguaggcuugcuguagua

SEQ ID NO: 71196 - RNA, 22 nt, Homo sapiens
uugaggucagagguucgagacc

SEQ ID NO: 71197 - RNA, 22 nt, Homo sapiens
ccaccuguacuuaagucacuuu

SEQ ID NO: 71198 - RNA, 22 nt, Homo sapiens
cuaggcuguagagaaguucagu

SEQ ID NO: 71199 - RNA, 22 nt, Homo sapiens
uuguaaagaucauaugcuguuc

SEQ ID NO: 71200 - RNA, 22 nt, Homo sapiens
uuacugcuagcugugugcucuu

SEQ ID NO: 71201 - RNA, 22 nt, Homo sapiens
ucauguguugcacugaggaccu

SEQ ID NO: 71202 - RNA, 22 nt, Homo sapiens
ugagacugagucuugcucuugu

SEQ ID NO: 71203 - RNA, 23 nt, Homo sapiens
ugugcacauuuacauauauacac

SEQ ID NO: 71204 - RNA, 19 nt, Homo sapiens
ucuguaguuagggcuacag

SEQ ID NO: 71205 - RNA, 22 nt, Homo sapiens
cuuggcacugcucacccuccuu

SEQ ID NO: 71206 - RNA, 22 nt, Homo sapiens
cugugcauggauuuuaagauug

SEQ ID NO: 71207 - RNA, 22 nt, Homo sapiens
uuauuagguuagugcaaaaguu

SEQ ID NO: 71208 - RNA, 22 nt, Homo sapiens
cugucaucauuucuaugugcca

SEQ ID NO: 71209 - RNA, 22 nt, Homo sapiens
gucucacaggcaugaugccagc

SEQ ID NO: 71210 - RNA, 22 nt, Homo sapiens
gucagugugauaucugcagggg

SEQ ID NO: 71211 - RNA, 19 nt, Homo sapiens
ugaccagggacagaaacca

SEQ ID NO: 71212 - RNA, 22 nt, Homo sapiens
gcagugugaucacagcuuacug

SEQ ID NO: 71213 - RNA, 23 nt, Homo sapiens
ugaauguaucgaaugugggaaag

SEQ ID NO: 71214 - RNA, 22 nt, Homo sapiens
uuccacaaugguugaacuaguu

SEQ ID NO: 71215 - RNA, 22 nt, Homo sapiens
uaguaguuuuguguauaauaau

SEQ ID NO: 71216 - RNA, 22 nt, Homo sapiens
aaguaguuaggaacauucucuc

SEQ ID NO: 71217 - RNA, 22 nt, Homo sapiens
aaagggcuugaauacucuuuuu

SEQ ID NO: 71218 - RNA, 22 nt, Homo sapiens
uugauauucugagaagcugaag

SEQ ID NO: 71219 - RNA, 22 nt, Homo sapiens
caagugaauaguugcucucaga

SEQ ID NO: 71220 - RNA, 22 nt, Homo sapiens
ugacuauaggauaacaugcauu

SEQ ID NO: 71221 - RNA, 22 nt, Homo sapiens
gugcaagagugacugcaguuuu

SEQ ID NO: 71222 - RNA, 22 nt, Homo sapiens
uuugugcuccucucaguaugug

SEQ ID NO: 71223 - RNA, 20 nt, Homo sapiens
gaacugguguauguuuaacu

SEQ ID NO: 71224 - RNA, 22 nt, Homo sapiens
cuagcagacaugggcugaacca

SEQ ID NO: 71225 - RNA, 22 nt, Homo sapiens
auggcccugggaaaggaggcau

SEQ ID NO: 71226 - RNA, 22 nt, Homo sapiens
ucugagguaggugcauggauac

SEQ ID NO: 71227 - RNA, 22 nt, Homo sapiens
augguaagcugaaaauaucgaa

SEQ ID NO: 71228 - RNA, 22 nt, Homo sapiens
guauuaguuaucuacugcugug

SEQ ID NO: 71229 - RNA, 21 nt, Homo sapiens
uagagagcaauaccuccagag

SEQ ID NO: 71230 - RNA, 22 nt, Homo sapiens
uguguaauaccuuugacuauau

SEQ ID NO: 71231 - RNA, 20 nt, Homo sapiens
acugcacuccaggcugccca

SEQ ID NO: 71232 - RNA, 19 nt, Homo sapiens
uggcacauguauacauaug

SEQ ID NO: 71233 - RNA, 17 nt, Homo sapiens
guuuggguacuggguaa

SEQ ID NO: 71234 - RNA, 22 nt, Homo sapiens
ggcuagaauagggauagaccuu

SEQ ID NO: 71235 - RNA, 22 nt, Homo sapiens
acccugucacucccaucaauuu

SEQ ID NO: 71236 - RNA, 22 nt, Homo sapiens
gacagugugauacuuagucuca

SEQ ID NO: 71237 - RNA, 22 nt, Homo sapiens
uuuaaugcgucucugaguuuug

SEQ ID NO: 71238 - RNA, 22 nt, Homo sapiens
uggcaccauccaggugucucua

SEQ ID NO: 71239 - RNA, 21 nt, Homo sapiens
uaucagagacauugagaggca

SEQ ID NO: 71240 - RNA, 22 nt, Homo sapiens
uuaauacucuucuaaguagucc

SEQ ID NO: 71241 - RNA, 22 nt, Homo sapiens
gugcacaacaugcaguuuuguu

SEQ ID NO: 71242 - RNA, 22 nt, Homo sapiens
auuauaguguauacuugaaauu

SEQ ID NO: 71243 - RNA, 22 nt, Homo sapiens
ucacugggagcauuugagccuu

SEQ ID NO: 71244 - RNA, 22 nt, Homo sapiens
uugggacuggaaggaguaaggg

SEQ ID NO: 71245 - RNA, 20 nt, Homo sapiens
cagucaugaagaacugugag

SEQ ID NO: 71246 - RNA, 22 nt, Homo sapiens
aaacucuguagcagagacagau

SEQ ID NO: 71247 - RNA, 22 nt, Homo sapiens
ggagugucugugcuggucaaag

SEQ ID NO: 71248 - RNA, 22 nt, Homo sapiens
gugacugcauauaaguguaugu

SEQ ID NO: 71249 - RNA, 22 nt, Homo sapiens
uuccacaggguugaacuaguuu

SEQ ID NO: 71250 - RNA, 19 nt, Homo sapiens
acugcacuccaaccuccug

SEQ ID NO: 71251 - RNA, 22 nt, Homo sapiens
gugcacaugguagguauugagu

SEQ ID NO: 71252 - RNA, 22 nt, Homo sapiens
auuagguauuuguccuaaauau

SEQ ID NO: 71253 - RNA, 22 nt, Homo sapiens
augcccauuuguuuucugaaag

SEQ ID NO: 71254 - RNA, 22 nt, Homo sapiens
cuguccugcagagucagaauga

SEQ ID NO: 71255 - RNA, 22 nt, Homo sapiens
ucuuugauguucugaaagaugg

SEQ ID NO: 71256 - RNA, 22 nt, Homo sapiens
agagaccuguaaaguucaggca

SEQ ID NO: 71257 - RNA, 22 nt, Homo sapiens
uucuagcaauggcagagugucu

SEQ ID NO: 71258 - RNA, 22 nt, Homo sapiens
ugccaguauuuuguugaggauu

SEQ ID NO: 71259 - RNA, 22 nt, Homo sapiens
ugucauguugguguacugcacc

SEQ ID NO: 71260 - RNA, 22 nt, Homo sapiens
aagugguagggucaggauugga

SEQ ID NO: 71261 - RNA, 22 nt, Homo sapiens
aucagaaucucuagaggacugu

SEQ ID NO: 71262 - RNA, 22 nt, Homo sapiens
cauggcccugggcugggcgaac

SEQ ID NO: 71263 - RNA, 22 nt, Homo sapiens
gagauuauuuaaaaggugauuu

SEQ ID NO: 71264 - RNA, 22 nt, Homo sapiens
agcaccacauacuacagagaua

SEQ ID NO: 71265 - RNA, 22 nt, Homo sapiens
uccacagugguggaauuguuca

SEQ ID NO: 71266 - RNA, 22 nt, Homo sapiens
cugugauagguuagucaugaau

SEQ ID NO: 71267 - RNA, 22 nt, Homo sapiens
agcaccaccguugcucuauccc

SEQ ID NO: 71268 - RNA, 22 nt, Homo sapiens
auaaucaugucugaaaccuuug

SEQ ID NO: 71269 - RNA, 22 nt, Homo sapiens
uuccacaaugguugaacuagcu

SEQ ID NO: 71270 - RNA, 21 nt, Homo sapiens
uaaaacuguaacuuuguccug

SEQ ID NO: 71271 - RNA, 22 nt, Homo sapiens
uucugguuaauacuugcaaaaa

SEQ ID NO: 71272 - RNA, 22 nt, Homo sapiens
ucuggcaagagccgagggcagu

SEQ ID NO: 71273 - RNA, 22 nt, Homo sapiens
ugugguuuuuuucuccaauagg

SEQ ID NO: 71274 - RNA, 18 nt, Homo sapiens
uaacuggugugagauggu

SEQ ID NO: 71275 - RNA, 22 nt, Homo sapiens
auguaacuaucugagccauggg

SEQ ID NO: 71276 - RNA, 22 nt, Homo sapiens
ucugccacugucauugugugau

SEQ ID NO: 71277 - RNA, 22 nt, Homo sapiens
cugaggguagaaggaucacuug

SEQ ID NO: 71278 - RNA, 22 nt, Homo sapiens
gaaacugcauuucuaacaagcu

SEQ ID NO: 71279 - RNA, 22 nt, Homo sapiens
aaagaguucagguagauuucaa

SEQ ID NO: 71280 - RNA, 22 nt, Homo sapiens
agacaagauggcuugagguuca

SEQ ID NO: 71281 - RNA, 22 nt, Homo sapiens
uugaaagcuaucagagauucca

SEQ ID NO: 71282 - RNA, 22 nt, Homo sapiens
agugguguugccuguugaccua

SEQ ID NO: 71283 - RNA, 22 nt, Homo sapiens
cugagcccauucuggggagaag

SEQ ID NO: 71284 - RNA, 22 nt, Homo sapiens
gauuuugguuagggaaggauac

SEQ ID NO: 71285 - RNA, 21 nt, Homo sapiens
ucagugcaauucuauggggaa

SEQ ID NO: 71286 - RNA, 22 nt, Homo sapiens
ugauauauugaaugaugaaaca

SEQ ID NO: 71287 - RNA, 22 nt, Homo sapiens
aaaugcacaaagauuuugcacu

SEQ ID NO: 71288 - RNA, 22 nt, Homo sapiens
acuguguguuugucuagcacag

SEQ ID NO: 71289 - RNA, 22 nt, Homo sapiens
cacacugucuucaauggguggu

SEQ ID NO: 71290 - RNA, 22 nt, Homo sapiens
uaccacaggcuggguaaucuau

SEQ ID NO: 71291 - RNA, 22 nt, Homo sapiens
ugagacugagucucgcucuugu

SEQ ID NO: 71292 - RNA, 22 nt, Homo sapiens
gccccaguacaggcuccuuaga

SEQ ID NO: 71293 - RNA, 22 nt, Homo sapiens
ugacuuuagaauuuuauccaga

SEQ ID NO: 71294 - RNA, 22 nt, Homo sapiens
acacuguugacauuuuguagug

SEQ ID NO: 71295 - RNA, 22 nt, Homo sapiens
aguggauuuuauuugacaacua

SEQ ID NO: 71296 - RNA, 22 nt, Homo sapiens
ucaggucauuccaggagggcca

SEQ ID NO: 71297 - RNA, 22 nt, Homo sapiens
uaugacuuguuuucuggucugc

SEQ ID NO: 71298 - RNA, 22 nt, Homo sapiens
uaucucacauauucaguagguu

SEQ ID NO: 71299 - RNA, 22 nt, Homo sapiens
cuguucaaauuguuugugaagu

SEQ ID NO: 71300 - RNA, 22 nt, Homo sapiens
agaugguguuuucucaccagau

SEQ ID NO: 71301 - RNA, 22 nt, Homo sapiens
ucacagacauugaggggaccuu

SEQ ID NO: 71302 - RNA, 18 nt, Homo sapiens
ucucacagcaaucuguca

SEQ ID NO: 71303 - RNA, 22 nt, Homo sapiens
uuuggcuuuuguaauaacugcc

SEQ ID NO: 71304 - RNA, 23 nt, Homo sapiens
uggguucccuaagcgcaugcugc

SEQ ID NO: 71305 - RNA, 22 nt, Homo sapiens
uggcuguuuauuucacaugggu

SEQ ID NO: 71306 - RNA, 22 nt, Homo sapiens
gucagcaucaccaugucuauga

SEQ ID NO: 71307 - RNA, 22 nt, Homo sapiens
guaacugguuuucuucccucuc

SEQ ID NO: 71308 - RNA, 22 nt, Homo sapiens
uuccacaaugguugaacuaauu

SEQ ID NO: 71309 - RNA, 22 nt, Homo sapiens
uuaaaugcuagaauuuucuuug

SEQ ID NO: 71310 - RNA, 20 nt, Homo sapiens
agguagauagaugauagaua

SEQ ID NO: 71311 - RNA, 22 nt, Homo sapiens
cugagagugguauguuuaagug

SEQ ID NO: 71312 - RNA, 22 nt, Homo sapiens
ugagacugagucucgcucuauu

SEQ ID NO: 71313 - RNA, 22 nt, Homo sapiens
ugguauguugucucuuuguucu

SEQ ID NO: 71314 - RNA, 22 nt, Homo sapiens
caaauacuuucauguugucuug

SEQ ID NO: 71315 - RNA, 22 nt, Homo sapiens
cagugcuuuaucaaguccucca

SEQ ID NO: 71316 - RNA, 22 nt, Homo sapiens
gagaacuggcugauucaaggac

SEQ ID NO: 71317 - RNA, 22 nt, Homo sapiens
ggcagcauugccuuugcaguga

SEQ ID NO: 71318 - RNA, 22 nt, Homo sapiens
agcauuaguugugaagccuuua

SEQ ID NO: 71319 - RNA, 22 nt, Homo sapiens
uaugcacacacguguuuaugug

SEQ ID NO: 71320 - RNA, 22 nt, Homo sapiens
ugcaccacacuccauccugggc

SEQ ID NO: 71321 - RNA, 22 nt, Homo sapiens
cugaauguccaggcagagguuu

SEQ ID NO: 71322 - RNA, 22 nt, Homo sapiens
ugaggauaguguugaaggcagg

SEQ ID NO: 71323 - RNA, 22 nt, Homo sapiens
gcagugugauguuuuaaucuau

SEQ ID NO: 71324 - RNA, 22 nt, Homo sapiens
ugaagugggaaaugaguauuaa

SEQ ID NO: 71325 - RNA, 22 nt, Homo sapiens
auaugcacuauacacacguaua

SEQ ID NO: 71326 - RNA, 22 nt, Homo sapiens
cugaaaguuauucaggggcaag

SEQ ID NO: 71327 - RNA, 22 nt, Homo sapiens
cagagagcuugcccuuguauau

SEQ ID NO: 71328 - RNA, 22 nt, Homo sapiens
uugcuagagaugagggaugugu

SEQ ID NO: 71329 - RNA, 19 nt, Homo sapiens
ugcauugucugggaaaugg

SEQ ID NO: 71330 - RNA, 21 nt, Homo sapiens
augugcacuaugucauuuaau

SEQ ID NO: 71331 - RNA, 22 nt, Homo sapiens
gcaugguaguaaccuacauuug

SEQ ID NO: 71332 - RNA, 22 nt, Homo sapiens
cugcaagaugcauaggaauuuu

SEQ ID NO: 71333 - RNA, 22 nt, Homo sapiens
aaggaguguggugaucuugggc

SEQ ID NO: 71334 - RNA, 22 nt, Homo sapiens
ugccaguauuuuauuaagaauu

SEQ ID NO: 71335 - RNA, 22 nt, Homo sapiens
ucacucagaccuggugauaugc

SEQ ID NO: 71336 - RNA, 22 nt, Homo sapiens
caaaggcuguuauaggccagga

SEQ ID NO: 71337 - RNA, 22 nt, Homo sapiens
gucuggcuuaucucacuuacca

SEQ ID NO: 71338 - RNA, 22 nt, Homo sapiens
uguagcagccauaaacacagug

SEQ ID NO: 71339 - RNA, 22 nt, Homo sapiens
ucacagucacugucacguugaa

SEQ ID NO: 71340 - RNA, 22 nt, Homo sapiens
gugggguaggguaggacucaac

SEQ ID NO: 71341 - RNA, 22 nt, Homo sapiens
uuuuagcagccaugacaaagau

SEQ ID NO: 71342 - RNA, 20 nt, Homo sapiens
acugcacuccagccuuccag

SEQ ID NO: 71343 - RNA, 22 nt, Homo sapiens
augagacauuaaaguguguuug

SEQ ID NO: 71344 - RNA, 22 nt, Homo sapiens
uugugguaggaugaagagauga

SEQ ID NO: 71345 - RNA, 22 nt, Homo sapiens
ucccagugaaaccccaccuuca

SEQ ID NO: 71346 - RNA, 22 nt, Homo sapiens
cuggguacccuuuaaacaggaa

SEQ ID NO: 71347 - RNA, 20 nt, Homo sapiens
auuagagcuacauggcuaca

SEQ ID NO: 71348 - RNA, 22 nt, Homo sapiens
cacagucuugcaauauugagau

SEQ ID NO: 71349 - RNA, 22 nt, Homo sapiens
uucuggccccucccaaucucau

SEQ ID NO: 71350 - RNA, 22 nt, Homo sapiens
uguucaauucccaccuaugagu

SEQ ID NO: 71351 - RNA, 22 nt, Homo sapiens
aagugaaugugcuggaauagcu

SEQ ID NO: 71352 - RNA, 22 nt, Homo sapiens
gagaacugacauuaucguguau

SEQ ID NO: 71353 - RNA, 22 nt, Homo sapiens
agugacaugggaucaaaucuga

SEQ ID NO: 71354 - RNA, 22 nt, Homo sapiens
cacugggccaucacuuaauauu

SEQ ID NO: 71355 - RNA, 20 nt, Homo sapiens
gagaacugagaugcguuuga

SEQ ID NO: 71356 - RNA, 22 nt, Homo sapiens
uccugagucagcauccguuugu

SEQ ID NO: 71357 - RNA, 22 nt, Homo sapiens
gagacggagucuugcucuguug

SEQ ID NO: 71358 - RNA, 22 nt, Homo sapiens
gagacggagucucgcucugucg

SEQ ID NO: 71359 - RNA, 22 nt, Homo sapiens
uaacccuuacaacuacacucgu

SEQ ID NO: 71360 - RNA, 22 nt, Homo sapiens
aagggaauguuguggcugguug

SEQ ID NO: 71361 - RNA, 22 nt, Homo sapiens
uuggauccauccugucuucucu

SEQ ID NO: 71362 - RNA, 22 nt, Homo sapiens
uugaggucuucaggaucaggcu

SEQ ID NO: 71363 - RNA, 23 nt, Homo sapiens
caugaacuaguuugcagccauga

SEQ ID NO: 71364 - RNA, 22 nt, Homo sapiens
auacaguguucugggaagaagu

SEQ ID NO: 71365 - RNA, 22 nt, Homo sapiens
uuuccagguggccaacauuuua

SEQ ID NO: 71366 - RNA, 21 nt, Homo sapiens
ggaauuuagggaaugauuuag

SEQ ID NO: 71367 - RNA, 22 nt, Homo sapiens
gugaggucguagucauaggcaa

SEQ ID NO: 71368 - RNA, 22 nt, Homo sapiens
uguuacaguguaggccuugggu

SEQ ID NO: 71369 - RNA, 22 nt, Homo sapiens
uaugcacaugcaugcuugaaua

SEQ ID NO: 71370 - RNA, 22 nt, Homo sapiens
ugagguuauuuguucaagaagu

SEQ ID NO: 71371 - RNA, 22 nt, Homo sapiens
ggcagguaaggagugggagccu

SEQ ID NO: 71372 - RNA, 18 nt, Homo sapiens
acagugucauggcucaau

SEQ ID NO: 71373 - RNA, 22 nt, Homo sapiens
gaagcauugauccacaggcgug

SEQ ID NO: 71374 - RNA, 22 nt, Homo sapiens
agcagugucauuuucuggugag

SEQ ID NO: 71375 - RNA, 22 nt, Homo sapiens
ccccagugguugcaacagcaga

SEQ ID NO: 71376 - RNA, 22 nt, Homo sapiens
agaaccaaucccacauggauac

SEQ ID NO: 71377 - RNA, 22 nt, Homo sapiens
cugagaucguggggcugcuguc

SEQ ID NO: 71378 - RNA, 22 nt, Homo sapiens
uggcuacagaaaguacuaguga

SEQ ID NO: 71379 - RNA, 23 nt, Homo sapiens
uuguaacuggagaguaacauucc

SEQ ID NO: 71380 - RNA, 22 nt, Homo sapiens
ugcaccacugcacugccugggu

SEQ ID NO: 71381 - RNA, 22 nt, Homo sapiens
aucccaguaaaaauggcuucua

SEQ ID NO: 71382 - RNA, 22 nt, Homo sapiens
uggacauguacauauguguaug

SEQ ID NO: 71383 - RNA, 22 nt, Homo sapiens
ugcaccacugcaccccagucug

SEQ ID NO: 71384 - RNA, 22 nt, Homo sapiens
ucaccaccuuccaggaccacug

SEQ ID NO: 71385 - RNA, 22 nt, Homo sapiens
cuuugugugggccaagggcugg

SEQ ID NO: 71386 - RNA, 22 nt, Homo sapiens
gcuacugucuaucugugcuucu

SEQ ID NO: 71387 - RNA, 22 nt, Homo sapiens
aucauuaguuguggaauucuug

SEQ ID NO: 71388 - RNA, 22 nt, Homo sapiens
uuugguguauaaaaaugcuagu

SEQ ID NO: 71389 - RNA, 22 nt, Homo sapiens
cgugaauguuuuggucuuucac

SEQ ID NO: 71390 - RNA, 19 nt, Homo sapiens
ucccaagaugcucauacau

SEQ ID NO: 71391 - RNA, 22 nt, Homo sapiens
gugugguaggauugguuacuca

SEQ ID NO: 71392 - RNA, 22 nt, Homo sapiens
cuggugugugacuuuucauuau

SEQ ID NO: 71393 - RNA, 22 nt, Homo sapiens
cuuuggccauagcuaaaugauu

SEQ ID NO: 71394 - RNA, 22 nt, Homo sapiens
uagcacaugucagguaauuugc

SEQ ID NO: 71395 - RNA, 23 nt, Homo sapiens
auaagccuuuucuuucugcccca

SEQ ID NO: 71396 - RNA, 22 nt, Homo sapiens
uacacagucaaaaauuuccagg

SEQ ID NO: 71397 - RNA, 22 nt, Homo sapiens
aaacugaucugaaggccaggcu

SEQ ID NO: 71398 - RNA, 22 nt, Homo sapiens
acuauacuguaacuguauucag

SEQ ID NO: 71399 - RNA, 22 nt, Homo sapiens
uucaagucaacaagcacuugag

SEQ ID NO: 71400 - RNA, 22 nt, Homo sapiens
aucauacuguuuugauuacugu

SEQ ID NO: 71401 - RNA, 22 nt, Homo sapiens
agaugguuuuguucacagcucu

SEQ ID NO: 71402 - RNA, 22 nt, Homo sapiens
uuauuagguuaaccuauagcua

SEQ ID NO: 71403 - RNA, 22 nt, Homo sapiens
uggucaccuucuugcucugucu

SEQ ID NO: 71404 - RNA, 22 nt, Homo sapiens
uuagcagcucuggugacaaggu

SEQ ID NO: 71405 - RNA, 22 nt, Homo sapiens
ggacugagaggacuacagugua

SEQ ID NO: 71406 - RNA, 20 nt, Homo sapiens
uuagcagcaugauuuauaau

SEQ ID NO: 71407 - RNA, 22 nt, Homo sapiens
uugaaggaggugcucacucucg

SEQ ID NO: 71408 - RNA, 22 nt, Homo sapiens
auacagguauacaaugcauaau

SEQ ID NO: 71409 - RNA, 22 nt, Homo sapiens
uaacucugccuagugacauggu

SEQ ID NO: 71410 - RNA, 22 nt, Homo sapiens
uaccacagucauuacacuugua

SEQ ID NO: 71411 - RNA, 22 nt, Homo sapiens
gagaacugagugugcuggcgga

SEQ ID NO: 71412 - RNA, 22 nt, Homo sapiens
aucacagaguuaaaacuuucuu

SEQ ID NO: 71413 - RNA, 22 nt, Homo sapiens
auaguggcaugaucauagcuca

SEQ ID NO: 71414 - RNA, 20 nt, Homo sapiens
uaagugcuugagacuucuga

SEQ ID NO: 71415 - RNA, 22 nt, Homo sapiens
augcacuuggcaggaugauucc

SEQ ID NO: 71416 - RNA, 22 nt, Homo sapiens
gcacaguaggugguaggacuuu

SEQ ID NO: 71417 - RNA, 22 nt, Homo sapiens
ccauuucacucuuccugaagga

SEQ ID NO: 71418 - RNA, 20 nt, Homo sapiens
acacugugcuaaggauuuuc

SEQ ID NO: 71419 - RNA, 22 nt, Homo sapiens
aacugguauugaauuuaggaag

SEQ ID NO: 71420 - RNA, 22 nt, Homo sapiens
agugagcugcagucuggggucc

SEQ ID NO: 71421 - RNA, 22 nt, Homo sapiens
aagcugugucuugucagcuacc

SEQ ID NO: 71422 - RNA, 18 nt, Homo sapiens
acucuguauguggagugg

SEQ ID NO: 71423 - RNA, 22 nt, Homo sapiens
aauucacuucuuuuaggcaggg

SEQ ID NO: 71424 - RNA, 22 nt, Homo sapiens
auagugcugcaauaaacacacg

SEQ ID NO: 71425 - RNA, 22 nt, Homo sapiens
agguaauagcacaugauaccuu

SEQ ID NO: 71426 - RNA, 19 nt, Homo sapiens
augccacagugaggucaga

SEQ ID NO: 71427 - RNA, 22 nt, Homo sapiens
agugucaggagacagguagcug

SEQ ID NO: 71428 - RNA, 22 nt, Homo sapiens
aagcuggagugcaguggugcga

SEQ ID NO: 71429 - RNA, 22 nt, Homo sapiens
uucacacugggccuacucugug

SEQ ID NO: 71430 - RNA, 22 nt, Homo sapiens
aucugcacaucuguguuuuugu

SEQ ID NO: 71431 - RNA, 22 nt, Homo sapiens
agagaugaagauggggcucccg

SEQ ID NO: 71432 - RNA, 22 nt, Homo sapiens
acugcacugucaaccuccuggg

SEQ ID NO: 71433 - RNA, 22 nt, Homo sapiens
uccuucauuugucaacucuagu

SEQ ID NO: 71434 - RNA, 22 nt, Homo sapiens
ccugagguagaguuuauauuga

SEQ ID NO: 71435 - RNA, 22 nt, Homo sapiens
uugccaucaucucuuacucagu

SEQ ID NO: 71436 - RNA, 22 nt, Homo sapiens
cugaggaaguucuuuaacaguu

SEQ ID NO: 71437 - RNA, 22 nt, Homo sapiens
ucucacagaguugaauguuucu

SEQ ID NO: 71438 - RNA, 22 nt, Homo sapiens
ggcagcaugggugccuuuguga

SEQ ID NO: 71439 - RNA, 18 nt, Homo sapiens
ucauagaucaugacagug

SEQ ID NO: 71440 - RNA, 22 nt, Homo sapiens
acugagaucuuuaaauaaauaa

SEQ ID NO: 71441 - RNA, 22 nt, Homo sapiens
ugugguuuuaguaaaacuaugu

SEQ ID NO: 71442 - RNA, 22 nt, Homo sapiens
ugugacagguagguaauuuuug

SEQ ID NO: 71443 - RNA, 22 nt, Homo sapiens
uugcuagaugaaaaugguaccu

SEQ ID NO: 71444 - RNA, 22 nt, Homo sapiens
augagagcaacaccuucacuug

SEQ ID NO: 71445 - RNA, 22 nt, Homo sapiens
aucugcaaagcugggcugagac

SEQ ID NO: 71446 - RNA, 22 nt, Homo sapiens
aagugaauguuugguagcagug

SEQ ID NO: 71447 - RNA, 22 nt, Homo sapiens
uccaguuuuguuaacauauggu

SEQ ID NO: 71448 - RNA, 22 nt, Homo sapiens
cagugucugcauuuggaacuca

SEQ ID NO: 71449 - RNA, 22 nt, Homo sapiens
acccaguguugggcagaacugu

SEQ ID NO: 71450 - RNA, 22 nt, Homo sapiens
uggacaugaagggcacaggagg

SEQ ID NO: 71451 - RNA, 22 nt, Homo sapiens
ucacagucggugacuucuugcu

SEQ ID NO: 71452 - RNA, 22 nt, Homo sapiens
ucccaguguguagcuugucucu

SEQ ID NO: 71453 - RNA, 22 nt, Homo sapiens
gcuaggagaucugcugcucucu

SEQ ID NO: 71454 - RNA, 22 nt, Homo sapiens
uuggaaaaauccaccuugaucu

SEQ ID NO: 71455 - RNA, 22 nt, Homo sapiens
cuuuggcauuagccuguauaga

SEQ ID NO: 71456 - RNA, 22 nt, Homo sapiens
aagugaaugaugugaaguguaa

SEQ ID NO: 71457 - RNA, 22 nt, Homo sapiens
uaacagcauuugugucuaguag

SEQ ID NO: 71458 - RNA, 21 nt, Homo sapiens
uuagcauccauguucaucaac

SEQ ID NO: 71459 - RNA, 22 nt, Homo sapiens
gucaguggagaaaaggacaugu

SEQ ID NO: 71460 - RNA, 22 nt, Homo sapiens
ggcuagagaauagugccacuaa

SEQ ID NO: 71461 - RNA, 22 nt, Homo sapiens
acugcacuccagccugccgaca

SEQ ID NO: 71462 - RNA, 19 nt, Homo sapiens
ggcacugugugagugagga

SEQ ID NO: 71463 - RNA, 22 nt, Homo sapiens
uuauaaacaugaagauuugggg

SEQ ID NO: 71464 - RNA, 22 nt, Homo sapiens
acacuuucuggagcugcacaua

SEQ ID NO: 71465 - RNA, 22 nt, Homo sapiens
ucacagacugagccaaauagag

SEQ ID NO: 71466 - RNA, 22 nt, Homo sapiens
gaggcacucuguacaaaucugc

SEQ ID NO: 71467 - RNA, 21 nt, Homo sapiens
ugcuuuggucauacuucuucc

SEQ ID NO: 71468 - RNA, 22 nt, Homo sapiens
augucaaggugggugauaguuu

SEQ ID NO: 71469 - RNA, 22 nt, Homo sapiens
cccuguguuuagcugaagguuu

SEQ ID NO: 71470 - RNA, 22 nt, Homo sapiens
auggccgggugcgguggcucac

SEQ ID NO: 71471 - RNA, 22 nt, Homo sapiens
acagucuggagaaugggugcuc

SEQ ID NO: 71472 - RNA, 22 nt, Homo sapiens
aaggagugugauucuucaguuu

SEQ ID NO: 71473 - RNA, 22 nt, Homo sapiens
aauacugaaaguauuuucaaau

SEQ ID NO: 71474 - RNA, 22 nt, Homo sapiens
uggacaagugcccuccaccuca

SEQ ID NO: 71475 - RNA, 22 nt, Homo sapiens
aguggauguuguggccugggag

SEQ ID NO: 71476 - RNA, 22 nt, Homo sapiens
uguuacagcagaauugaaagag

SEQ ID NO: 71477 - RNA, 22 nt, Homo sapiens
agaaagugcuucccuuugguga

SEQ ID NO: 71478 - RNA, 22 nt, Homo sapiens
uucccagucaaacgaaggacuu

SEQ ID NO: 71479 - RNA, 22 nt, Homo sapiens
cuccuggugauuggagugugaa

SEQ ID NO: 71480 - RNA, 22 nt, Homo sapiens
uaagugaauuucacuacugagu

SEQ ID NO: 71481 - RNA, 22 nt, Homo sapiens
uaccaaguauuuucacaugaac

SEQ ID NO: 71482 - RNA, 22 nt, Homo sapiens
uggauaguucuucuacuagagu

SEQ ID NO: 71483 - RNA, 22 nt, Homo sapiens
gugggguaggugacuugaugag

SEQ ID NO: 71484 - RNA, 22 nt, Homo sapiens
gucccugcgauugugggauccu

SEQ ID NO: 71485 - RNA, 22 nt, Homo sapiens
uuggcagcuguggaaucugggc

SEQ ID NO: 71486 - RNA, 22 nt, Homo sapiens
augggguaggcuuugcugcagu

SEQ ID NO: 71487 - RNA, 22 nt, Homo sapiens
uagcaagaugaauuugugcaaa

SEQ ID NO: 71488 - RNA, 22 nt, Homo sapiens
caccacagccauuauugucccc

SEQ ID NO: 71489 - RNA, 22 nt, Homo sapiens
cauggcacagagaauguguucu

SEQ ID NO: 71490 - RNA, 22 nt, Homo sapiens
ugcaccacuguacuccagucug

SEQ ID NO: 71491 - RNA, 19 nt, Homo sapiens
uccccaguuuuccguucag

SEQ ID NO: 71492 - RNA, 22 nt, Homo sapiens
agugaauguuggaaaguuauuu

SEQ ID NO: 71493 - RNA, 22 nt, Homo sapiens
auggaggccuacagaauuuugg

SEQ ID NO: 71494 - RNA, 22 nt, Homo sapiens
uucuagcacuuugggagacuga

SEQ ID NO: 71495 - RNA, 17 nt, Homo sapiens
uggcaugaggguguggg

SEQ ID NO: 71496 - RNA, 22 nt, Homo sapiens
uugaggucuuugagcaaacgca

SEQ ID NO: 71497 - RNA, 22 nt, Homo sapiens
uugggguagaauugcaacauau

SEQ ID NO: 71498 - RNA, 22 nt, Homo sapiens
aaggcagugugcacauaacacu

SEQ ID NO: 71499 - RNA, 22 nt, Homo sapiens
ugugcuugaauuuaguagcuua

SEQ ID NO: 71500 - RNA, 22 nt, Homo sapiens
ugacauagcuauuaagugaugc

SEQ ID NO: 71501 - RNA, 21 nt, Homo sapiens
uggagugaagaguuuauugac

SEQ ID NO: 71502 - RNA, 22 nt, Homo sapiens
gugucaaggaugccugucaggc

SEQ ID NO: 71503 - RNA, 22 nt, Homo sapiens
ugaggucuuuauuuagugcuca

SEQ ID NO: 71504 - RNA, 22 nt, Homo sapiens
ugugaauguaaccuuauuugga

SEQ ID NO: 71505 - RNA, 22 nt, Homo sapiens
gaaagauuuuaacugggagacu

SEQ ID NO: 71506 - RNA, 21 nt, Homo sapiens
aagcacauugaguguguguga

SEQ ID NO: 71507 - RNA, 22 nt, Homo sapiens
ucgcugggaagacugaaguguc

SEQ ID NO: 71508 - RNA, 22 nt, Homo sapiens
ccccaguguguaaaggccuugc

SEQ ID NO: 71509 - RNA, 22 nt, Homo sapiens
gaggaguagggcacaaagccuu

SEQ ID NO: 71510 - RNA, 22 nt, Homo sapiens
ugacaguguccuccuccugaga

SEQ ID NO: 71511 - RNA, 22 nt, Homo sapiens
ugacagguugauaggugcagca

SEQ ID NO: 71512 - RNA, 22 nt, Homo sapiens
uggagugagaacuucaaugaug

SEQ ID NO: 71513 - RNA, 18 nt, Homo sapiens
cuaugccacuuuauauca

SEQ ID NO: 71514 - RNA, 22 nt, Homo sapiens
ugagacugaguuuugcucuugu

SEQ ID NO: 71515 - RNA, 22 nt, Homo sapiens
ucuuaguuuagauuagcaauuc

SEQ ID NO: 71516 - RNA, 22 nt, Homo sapiens
cuagcagacaggcugggagcag

SEQ ID NO: 71517 - RNA, 22 nt, Homo sapiens
uucugagguuauauucucucaa

SEQ ID NO: 71518 - RNA, 22 nt, Homo sapiens
ugagacugaguuuugccuuugu

SEQ ID NO: 71519 - RNA, 22 nt, Homo sapiens
cagugaauuucaggucaagagu

SEQ ID NO: 71520 - RNA, 22 nt, Homo sapiens
ugagacugaguuuugcucguug

SEQ ID NO: 71521 - RNA, 22 nt, Homo sapiens
ugucaguuuuaacuagggaaua

SEQ ID NO: 71522 - RNA, 22 nt, Homo sapiens
uguguaauacucuaaugaugca

SEQ ID NO: 71523 - RNA, 21 nt, Homo sapiens
uuuguccaccuguguucacca

SEQ ID NO: 71524 - RNA, 22 nt, Homo sapiens
ggggaauguuaaagaauuugca

SEQ ID NO: 71525 - RNA, 22 nt, Homo sapiens
uacuacuuucucuucugggaaa

SEQ ID NO: 71526 - RNA, 22 nt, Homo sapiens
uugggguaggaauauggaauga

SEQ ID NO: 71527 - RNA, 22 nt, Homo sapiens
uuggauuuuaacaaacuaggug

SEQ ID NO: 71528 - RNA, 22 nt, Homo sapiens
uauggauuuuuuugacaagagc

SEQ ID NO: 71529 - RNA, 22 nt, Homo sapiens
auuuugguuacauaguugagcu

SEQ ID NO: 71530 - RNA, 22 nt, Homo sapiens
agagcacuguggguccaaauau

SEQ ID NO: 71531 - RNA, 22 nt, Homo sapiens
aaugcacauauauuuccuuauu

SEQ ID NO: 71532 - RNA, 22 nt, Homo sapiens
gagaacugagauaagugauauu

SEQ ID NO: 71533 - RNA, 22 nt, Homo sapiens
gugcacaaaucuuaaauguaca

SEQ ID NO: 71534 - RNA, 21 nt, Homo sapiens
cccugguguuuggaguuugag

SEQ ID NO: 71535 - RNA, 22 nt, Homo sapiens
guggcuagaaugaagguagcug

SEQ ID NO: 71536 - RNA, 22 nt, Homo sapiens
gucaggaugauuuggggaggug

SEQ ID NO: 71537 - RNA, 17 nt, Homo sapiens
ugauaagugugagguga

SEQ ID NO: 71538 - RNA, 20 nt, Homo sapiens
gacuucagaagcuucagagu

SEQ ID NO: 71539 - RNA, 22 nt, Homo sapiens
agugcauuuguucugugucagg

SEQ ID NO: 71540 - RNA, 22 nt, Homo sapiens
cagagugcauguuuagaugagu

SEQ ID NO: 71541 - RNA, 22 nt, Homo sapiens
auggcaauguaagucagaaaaa

SEQ ID NO: 71542 - RNA, 22 nt, Homo sapiens
cuggauagagauugaugaugcu

SEQ ID NO: 71543 - RNA, 22 nt, Homo sapiens
aagcaggugucugugucuguaa

SEQ ID NO: 71544 - RNA, 22 nt, Homo sapiens
accucagcccggggaaguugag

SEQ ID NO: 71545 - RNA, 20 nt, Homo sapiens
uggucaccuucaggagguuc

SEQ ID NO: 71546 - RNA, 22 nt, Homo sapiens
uguagauaucuaucaggucaau

SEQ ID NO: 71547 - RNA, 22 nt, Homo sapiens
augaggcaggaaaggcguaucu

SEQ ID NO: 71548 - RNA, 22 nt, Homo sapiens
cacugugcaaccuccaccuccc

SEQ ID NO: 71549 - RNA, 22 nt, Homo sapiens
uacauacuucacagacuuuaaa

SEQ ID NO: 71550 - RNA, 22 nt, Homo sapiens
gugaagaugugcaucagaucca

SEQ ID NO: 71551 - RNA, 22 nt, Homo sapiens
cagguacuucugggcugagcag

SEQ ID NO: 71552 - RNA, 22 nt, Homo sapiens
cugugaagaaagucauugguag

SEQ ID NO: 71553 - RNA, 22 nt, Homo sapiens
ugcauccauucuagacucaucu

SEQ ID NO: 71554 - RNA, 22 nt, Homo sapiens
gugugguauuauaacuagguau

SEQ ID NO: 71555 - RNA, 20 nt, Homo sapiens
ugaacugguuacuuucuguc

SEQ ID NO: 71556 - RNA, 22 nt, Homo sapiens
uugacaaggagccauugcaucu

SEQ ID NO: 71557 - RNA, 22 nt, Homo sapiens
auaaagccaugagcuugagaug

SEQ ID NO: 71558 - RNA, 16 nt, Homo sapiens
ucccaccauugcuugu

SEQ ID NO: 71559 - RNA, 22 nt, Homo sapiens
ucagugggcuauguaauuaacu

SEQ ID NO: 71560 - RNA, 22 nt, Homo sapiens
gcugagaucucuugccugaacu

SEQ ID NO: 71561 - RNA, 22 nt, Homo sapiens
ugagacugagucucccucuguc

SEQ ID NO: 71562 - RNA, 20 nt, Homo sapiens
cugcacauccacucuacuuc

SEQ ID NO: 71563 - RNA, 22 nt, Homo sapiens
ucccuagacuccugccuuucag

SEQ ID NO: 71564 - RNA, 20 nt, Homo sapiens
cugaaugucaaggcagaggu

SEQ ID NO: 71565 - RNA, 17 nt, Homo sapiens
ucuaauaauaugcauuu

SEQ ID NO: 71566 - RNA, 21 nt, Homo sapiens
agaggacugaccacagcccua

SEQ ID NO: 71567 - RNA, 22 nt, Homo sapiens
auuggcagaaaucuuuauagua

SEQ ID NO: 71568 - RNA, 22 nt, Homo sapiens
uugcagugugacgacuauauuu

SEQ ID NO: 71569 - RNA, 22 nt, Homo sapiens
gagguauagaacaccuuucaag

SEQ ID NO: 71570 - RNA, 22 nt, Homo sapiens
ugcugcuguuguuguuacuagc

SEQ ID NO: 71571 - RNA, 22 nt, Homo sapiens
cucaugcugucuucugggguaa

SEQ ID NO: 71572 - RNA, 22 nt, Homo sapiens
gugaaugcauuaagaaggggga

SEQ ID NO: 71573 - RNA, 20 nt, Homo sapiens
cuaaucaucccagaagaaau

SEQ ID NO: 71574 - RNA, 22 nt, Homo sapiens
ugugaccaaaaucaacauaccu

SEQ ID NO: 71575 - RNA, 18 nt, Homo sapiens
auauugccuucagacuag

SEQ ID NO: 71576 - RNA, 22 nt, Homo sapiens
aucccaguucagccucugacac

SEQ ID NO: 71577 - RNA, 22 nt, Homo sapiens
cugugcauguaugcgugaguuc

SEQ ID NO: 71578 - RNA, 22 nt, Homo sapiens
uuggccuuucucuaaauacuuu

SEQ ID NO: 71579 - RNA, 22 nt, Homo sapiens
uugaggaguacugauuagguau

SEQ ID NO: 71580 - RNA, 21 nt, Homo sapiens
gaaauacugccuuaggagcug

SEQ ID NO: 71581 - RNA, 22 nt, Homo sapiens
augagucacuuauuauuggggu

SEQ ID NO: 71582 - RNA, 19 nt, Homo sapiens
gggucaguuugaaugauua

SEQ ID NO: 71583 - RNA, 22 nt, Homo sapiens
caugacacuggcauguuucuuu

SEQ ID NO: 71584 - RNA, 22 nt, Homo sapiens
gugcagugugauccuuccguau

SEQ ID NO: 71585 - RNA, 20 nt, Homo sapiens
aucccauuccugaagauacu

SEQ ID NO: 71586 - RNA, 22 nt, Homo sapiens
ucaggugcaguggcucugaccu

SEQ ID NO: 71587 - RNA, 22 nt, Homo sapiens
ugguauguaugauuaacaugga

SEQ ID NO: 71588 - RNA, 18 nt, Homo sapiens
ucccucagaauuauagaa

SEQ ID NO: 71589 - RNA, 21 nt, Homo sapiens
uuaucccagugucucugcagg

SEQ ID NO: 71590 - RNA, 22 nt, Homo sapiens
uaagugaaggaaguguguuuac

SEQ ID NO: 71591 - RNA, 22 nt, Homo sapiens
uggagugaaaacacacuaaucu

SEQ ID NO: 71592 - RNA, 22 nt, Homo sapiens
gagacggagucucgcucuguca

SEQ ID NO: 71593 - RNA, 22 nt, Homo sapiens
cugcagaucuuggggcuugcca

SEQ ID NO: 71594 - RNA, 23 nt, Homo sapiens
agacugaaguaucugagacucag

SEQ ID NO: 71595 - RNA, 20 nt, Homo sapiens
uggaccagagagguggggac

SEQ ID NO: 71596 - RNA, 21 nt, Homo sapiens
gugaggucauugggcuuucug

SEQ ID NO: 71597 - RNA, 22 nt, Homo sapiens
auacaguugccauuucuugugc

SEQ ID NO: 71598 - RNA, 22 nt, Homo sapiens
uguuacagugacuaauguuuua

SEQ ID NO: 71599 - RNA, 22 nt, Homo sapiens
ugucagggaggcucggccgcac

SEQ ID NO: 71600 - RNA, 22 nt, Homo sapiens
uguuacagcagcacaaaaugga

SEQ ID NO: 71601 - RNA, 22 nt, Homo sapiens
augcacauggcuaacuuuuuuc

SEQ ID NO: 71602 - RNA, 22 nt, Homo sapiens
uuaauguaucuaucacaucaca

SEQ ID NO: 71603 - RNA, 19 nt, Homo sapiens
ucagugcuauguaauguag

SEQ ID NO: 71604 - RNA, 22 nt, Homo sapiens
auaagugagugauucaguguua

SEQ ID NO: 71605 - RNA, 22 nt, Homo sapiens
gucacaguguuuguucauccca

SEQ ID NO: 71606 - RNA, 22 nt, Homo sapiens
auguaacugggacacaagccuc

SEQ ID NO: 71607 - RNA, 22 nt, Homo sapiens
ugagaucugucuuuauaguauu

SEQ ID NO: 71608 - RNA, 22 nt, Homo sapiens
ugagacugaguuuccaucuugu

SEQ ID NO: 71609 - RNA, 22 nt, Homo sapiens
ucccagugcuaugcaaaagccu

SEQ ID NO: 71610 - RNA, 22 nt, Homo sapiens
uucagggacuuuagacaagaga

SEQ ID NO: 71611 - RNA, 22 nt, Homo sapiens
aaucacuaugccaugaaguaca

SEQ ID NO: 71612 - RNA, 22 nt, Homo sapiens
ugagacugaguuucucucuugu

SEQ ID NO: 71613 - RNA, 21 nt, Homo sapiens
ucagugcugugggcaaggugc

SEQ ID NO: 71614 - RNA, 22 nt, Homo sapiens
ucagugcuuggcacagagagcu

SEQ ID NO: 71615 - RNA, 18 nt, Homo sapiens
gauaacaguggacuaugc

SEQ ID NO: 71616 - RNA, 22 nt, Homo sapiens
agcaguguggccuuagacccgg

SEQ ID NO: 71617 - RNA, 22 nt, Homo sapiens
gcucaugggcagugugauuguu

SEQ ID NO: 71618 - RNA, 22 nt, Homo sapiens
cuuuggugauagauaccccaua

SEQ ID NO: 71619 - RNA, 22 nt, Homo sapiens
ggaagacaguguggugauuccu

SEQ ID NO: 71620 - RNA, 23 nt, Homo sapiens
ucugcggguguggacccuagugc

SEQ ID NO: 71621 - RNA, 22 nt, Homo sapiens
guagguaaguacuucuggugag

SEQ ID NO: 71622 - RNA, 22 nt, Homo sapiens
auuguguagucuuacugcuugc

SEQ ID NO: 71623 - RNA, 21 nt, Homo sapiens
augggguagaagagaaggcuu

SEQ ID NO: 71624 - RNA, 22 nt, Homo sapiens
uggagacaaagauagaaaagca

SEQ ID NO: 71625 - RNA, 22 nt, Homo sapiens
gugcaauguuaauuacuugacu

SEQ ID NO: 71626 - RNA, 22 nt, Homo sapiens
gcugagguucaagaagguuaaa

SEQ ID NO: 71627 - RNA, 22 nt, Homo sapiens
cugaggugauauauacauauuu

SEQ ID NO: 71628 - RNA, 22 nt, Homo sapiens
uggcuagaccugcauaacagcu

SEQ ID NO: 71629 - RNA, 22 nt, Homo sapiens
aagaguuaguaaaauuuccucu

SEQ ID NO: 71630 - RNA, 18 nt, Homo sapiens
ugagauacuagaauaggu

SEQ ID NO: 71631 - RNA, 22 nt, Homo sapiens
ugcaccacugcuagccugggua

SEQ ID NO: 71632 - RNA, 22 nt, Homo sapiens
gugcacaucgugcagguuuguu

SEQ ID NO: 71633 - RNA, 22 nt, Homo sapiens
auagcacugguuuuucuugguu

SEQ ID NO: 71634 - RNA, 19 nt, Homo sapiens
uggcacauguauacuuaug

SEQ ID NO: 71635 - RNA, 20 nt, Homo sapiens
uauucacucuccagucuugc

SEQ ID NO: 71636 - RNA, 19 nt, Homo sapiens
uggugccuuguucuuggau

SEQ ID NO: 71637 - RNA, 22 nt, Homo sapiens
aucccuguaacuagcagccccu

SEQ ID NO: 71638 - RNA, 22 nt, Homo sapiens
guguucaaacccaggucugucu

SEQ ID NO: 71639 - RNA, 20 nt, Homo sapiens
uugaggucaggaguuuggga

SEQ ID NO: 71640 - RNA, 22 nt, Homo sapiens
uuccacaauggcugaacuaguu

SEQ ID NO: 71641 - RNA, 22 nt, Homo sapiens
ugaguucuuccaccgggaccag

SEQ ID NO: 71642 - RNA, 22 nt, Homo sapiens
gugggaugcaaguaaaauuguc

SEQ ID NO: 71643 - RNA, 22 nt, Homo sapiens
ugaauagugucacaauaaacau

SEQ ID NO: 71644 - RNA, 22 nt, Homo sapiens
agagaacugauuggaugugggc

SEQ ID NO: 71645 - RNA, 21 nt, Homo sapiens
uggcuguuuucaugcuagaac

SEQ ID NO: 71646 - RNA, 22 nt, Homo sapiens
uuggucagcucaauggagaggg

SEQ ID NO: 71647 - RNA, 22 nt, Homo sapiens
ucccacugucuucucgugcucg

SEQ ID NO: 71648 - RNA, 22 nt, Homo sapiens
gaauacuguccaagagugaugg

SEQ ID NO: 71649 - RNA, 22 nt, Homo sapiens
agagucacaugaggcccuucau

SEQ ID NO: 71650 - RNA, 22 nt, Homo sapiens
ucugagguuaaauuuuauaguu

SEQ ID NO: 71651 - RNA, 22 nt, Homo sapiens
acagugcuuggcacacaguaau

SEQ ID NO: 71652 - RNA, 21 nt, Homo sapiens
gaguggcuuuuguuucaccag

SEQ ID NO: 71653 - RNA, 22 nt, Homo sapiens
ugagacugaguuucgcucuugu

SEQ ID NO: 71654 - RNA, 22 nt, Homo sapiens
aacacggcccgcagagcaagcu

SEQ ID NO: 71655 - RNA, 22 nt, Homo sapiens
gugaagaucccuguccuguucc

SEQ ID NO: 71656 - RNA, 22 nt, Homo sapiens
cuacagaguaucuaaagaggua

SEQ ID NO: 71657 - RNA, 22 nt, Homo sapiens
uggagugcaauggugagaucuu

SEQ ID NO: 71658 - RNA, 20 nt, Homo sapiens
ucacuggguucuugaagucu

SEQ ID NO: 71659 - RNA, 22 nt, Homo sapiens
ugugaauggugcuuccuagaug

SEQ ID NO: 71660 - RNA, 22 nt, Homo sapiens
gagcacugaauacugugguggu

SEQ ID NO: 71661 - RNA, 22 nt, Homo sapiens
gaggcagucuguccauucucag

SEQ ID NO: 71662 - RNA, 20 nt, Homo sapiens
ugucaaggaauucccaaauc

SEQ ID NO: 71663 - RNA, 22 nt, Homo sapiens
ucaggugcagagaagaaauggg

SEQ ID NO: 71664 - RNA, 22 nt, Homo sapiens
caacugguuuuauacaguuuag

SEQ ID NO: 71665 - RNA, 22 nt, Homo sapiens
caugugcaugagcacauacgug

SEQ ID NO: 71666 - RNA, 22 nt, Homo sapiens
auggcacuguguccugggguca

SEQ ID NO: 71667 - RNA, 20 nt, Homo sapiens
gccacaguuaagcuucugcc

SEQ ID NO: 71668 - RNA, 22 nt, Homo sapiens
ugugaugguuuagcauuuucuu

SEQ ID NO: 71669 - RNA, 22 nt, Homo sapiens
uccagguacucagggggcugag

SEQ ID NO: 71670 - RNA, 22 nt, Homo sapiens
ugcuagaagaucacacacauca

SEQ ID NO: 71671 - RNA, 22 nt, Homo sapiens
gugaauguaaagucaugugacu

SEQ ID NO: 71672 - RNA, 22 nt, Homo sapiens
ucccaagaugagaugggggcug

SEQ ID NO: 71673 - RNA, 22 nt, Homo sapiens
acccugucaaaacggaccaauc

SEQ ID NO: 71674 - RNA, 22 nt, Homo sapiens
gugggguaggcaauuccuagug

SEQ ID NO: 71675 - RNA, 22 nt, Homo sapiens
cugaggugggaggauuacuuga

SEQ ID NO: 71676 - RNA, 23 nt, Homo sapiens
cacugggcagcagguguucccag

SEQ ID NO: 71677 - RNA, 22 nt, Homo sapiens
ccugguguuuugauggucgggu

SEQ ID NO: 71678 - RNA, 22 nt, Homo sapiens
ugugaauggugcugcaaugaac

SEQ ID NO: 71679 - RNA, 22 nt, Homo sapiens
uucucacaguacagggagcucu

SEQ ID NO: 71680 - RNA, 22 nt, Homo sapiens
uaaaugacugucaguagaugaa

SEQ ID NO: 71681 - RNA, 22 nt, Homo sapiens
gucacagaggcuaagaccccac

SEQ ID NO: 71682 - RNA, 22 nt, Homo sapiens
aacugguauuucccaugaauuu

SEQ ID NO: 71683 - RNA, 20 nt, Homo sapiens
cucacagacagcuucuuucu

SEQ ID NO: 71684 - RNA, 22 nt, Homo sapiens
auauggguauuaagaaucaaaa

SEQ ID NO: 71685 - RNA, 22 nt, Homo sapiens
uuuuugaguaaauauaaauugu

SEQ ID NO: 71686 - RNA, 22 nt, Homo sapiens
uuuugguuuuauccagggucuc

SEQ ID NO: 71687 - RNA, 22 nt, Homo sapiens
uuuugguuguuggguaagagua

SEQ ID NO: 71688 - RNA, 19 nt, Homo sapiens
uuuuguacucugugacuug

SEQ ID NO: 71689 - RNA, 22 nt, Homo sapiens
uuucuugguuguauuuagacuu

SEQ ID NO: 71690 - RNA, 22 nt, Homo sapiens
uuugcacuuuaauauaauguga

SEQ ID NO: 71691 - RNA, 22 nt, Homo sapiens
uuuugcuuuuccucggucccac

SEQ ID NO: 71692 - RNA, 23 nt, Homo sapiens
uuugccacuuauuagcugggagg

SEQ ID NO: 71693 - RNA, 22 nt, Homo sapiens
uugaauaggcucaugcuuauca

SEQ ID NO: 71694 - RNA, 22 nt, Homo sapiens
uugaauaguggugaaaguuuga

SEQ ID NO: 71695 - RNA, 22 nt, Homo sapiens
uugaauagcauguuuagugcau

SEQ ID NO: 71696 - RNA, 22 nt, Homo sapiens
uugaauagugacuuugauucug

SEQ ID NO: 71697 - RNA, 21 nt, Homo sapiens
uugagaagaauuagcucuucc

SEQ ID NO: 71698 - RNA, 21 nt, Homo sapiens
uucuuugcucaguguuagagu

SEQ ID NO: 71699 - RNA, 22 nt, Homo sapiens
uucauaguucuuuuagucauua

SEQ ID NO: 71700 - RNA, 22 nt, Homo sapiens
uugagauguaagauguuaauau

SEQ ID NO: 71701 - RNA, 22 nt, Homo sapiens
uugagauguauguauauaaugu

SEQ ID NO: 71702 - RNA, 22 nt, Homo sapiens
uugagauggagucucacuccuu

SEQ ID NO: 71703 - RNA, 22 nt, Homo sapiens
uugagauggagucucgcacugu

SEQ ID NO: 71704 - RNA, 22 nt, Homo sapiens
uugauugacaugucucuguuca

SEQ ID NO: 71705 - RNA, 22 nt, Homo sapiens
uugauuagauccaguugauuga

SEQ ID NO: 71706 - RNA, 22 nt, Homo sapiens
uugcacuauaggaaaauguguc

SEQ ID NO: 71707 - RNA, 22 nt, Homo sapiens
uugcacuccggccuggguaaca

SEQ ID NO: 71708 - RNA, 22 nt, Homo sapiens
uugcacagugguuuagagccug

SEQ ID NO: 71709 - RNA, 22 nt, Homo sapiens
uugcacauugcaccuuuuguau

SEQ ID NO: 71710 - RNA, 22 nt, Homo sapiens
uugguucucuuuauaugcugga

SEQ ID NO: 71711 - RNA, 22 nt, Homo sapiens
uugcuuaggcuggagugcagug

SEQ ID NO: 71712 - RNA, 22 nt, Homo sapiens
uugcuggugguucgagcaacac

SEQ ID NO: 71713 - RNA, 22 nt, Homo sapiens
uugcuaguguuugguugauggu

SEQ ID NO: 71714 - RNA, 22 nt, Homo sapiens
uuuaugguuuucugggagauug

SEQ ID NO: 71715 - RNA, 22 nt, Homo sapiens
uuuaguucauuaaggaaucucc

SEQ ID NO: 71716 - RNA, 22 nt, Homo sapiens
uuuagguauuugguauagcagu

SEQ ID NO: 71717 - RNA, 22 nt, Homo sapiens
uuucuauguugaccagucuaga

SEQ ID NO: 71718 - RNA, 21 nt, Homo sapiens
uuuccuggagcguauggcuuc

SEQ ID NO: 71719 - RNA, 19 nt, Homo sapiens
uugucuuagaguugucauu

SEQ ID NO: 71720 - RNA, 22 nt, Homo sapiens
uugugcuuuugagcugagauga

SEQ ID NO: 71721 - RNA, 22 nt, Homo sapiens
uuuaauguuacaguauugguau

SEQ ID NO: 71722 - RNA, 21 nt, Homo sapiens
uuuacuguggacccauugcuu

SEQ ID NO: 71723 - RNA, 22 nt, Homo sapiens
uuguguaguaccucucacauug

SEQ ID NO: 71724 - RNA, 22 nt, Homo sapiens
uugugguuuuuaaaacuaggug

SEQ ID NO: 71725 - RNA, 22 nt, Homo sapiens
ugugguuuuaguaaaacuaugu

SEQ ID NO: 71726 - RNA, 20 nt, Homo sapiens
uuagaguaguaugauuuaua

SEQ ID NO: 71727 - RNA, 22 nt, Homo sapiens
uuacuugagauggggugucacu

SEQ ID NO: 71728 - RNA, 22 nt, Homo sapiens
uuacuugagaugaguuggacaa

SEQ ID NO: 71729 - RNA, 22 nt, Homo sapiens
uuaaugacaucauaggugaagu

SEQ ID NO: 71730 - RNA, 22 nt, Homo sapiens
uuaaguagcugggcaugguggu

SEQ ID NO: 71731 - RNA, 22 nt, Homo sapiens
uuaauguaauugauugauugac

SEQ ID NO: 71732 - RNA, 22 nt, Homo sapiens
uuaauagugacucauuuuccac

SEQ ID NO: 71733 - RNA, 22 nt, Homo sapiens
uuaugcuugugugaauuuuccc

SEQ ID NO: 71734 - RNA, 23 nt, Homo sapiens
uuauggcuuuuauuauguugagg

SEQ ID NO: 71735 - RNA, 22 nt, Homo sapiens
uuauggauuuauauucuguagu

SEQ ID NO: 71736 - RNA, 21 nt, Homo sapiens
uuauaguggcaugauuuauaa

SEQ ID NO: 71737 - RNA, 22 nt, Homo sapiens
uuauauguuacucccucuagca

SEQ ID NO: 71738 - RNA, 22 nt, Homo sapiens
uuauauguuucuguuuggaggc

SEQ ID NO: 71739 - RNA, 21 nt, Homo sapiens
uuagcauccauguucaucaac

SEQ ID NO: 71740 - RNA, 22 nt, Homo sapiens
ugugaucaauuagugaugucug

SEQ ID NO: 71741 - RNA, 20 nt, Homo sapiens
ugugauuauuuaguugcaug

SEQ ID NO: 71742 - RNA, 18 nt, Homo sapiens
ugugauggauauguuaau

SEQ ID NO: 71743 - RNA, 22 nt, Homo sapiens
ugucacguugcuuuucuguugu

SEQ ID NO: 71744 - RNA, 22 nt, Homo sapiens
uguauguugauguuauauucug

SEQ ID NO: 71745 - RNA, 22 nt, Homo sapiens
uguauuuguuguuaaauggaga

SEQ ID NO: 71746 - RNA, 22 nt, Homo sapiens
uguauguuuaaggccaguggaa

SEQ ID NO: 71747 - RNA, 22 nt, Homo sapiens
ugguuccauauuaauuuuagga

SEQ ID NO: 71748 - RNA, 23 nt, Homo sapiens
ugguuuguaagagauggacugga

SEQ ID NO: 71749 - RNA, 17 nt, Homo sapiens
uggugcuugaaaguugc

SEQ ID NO: 71750 - RNA, 22 nt, Homo sapiens
uguaagugugcaauucagugau

SEQ ID NO: 71751 - RNA, 22 nt, Homo sapiens
uauauguucuugcacuggaaag

SEQ ID NO: 71752 - RNA, 19 nt, Homo sapiens
uaucaaguaugcacuguac

SEQ ID NO: 71753 - RNA, 22 nt, Homo sapiens
uauggguuuuugucuguuuacu

SEQ ID NO: 71754 - RNA, 22 nt, Homo sapiens
uauggguuuauuucuggucuca

SEQ ID NO: 71755 - RNA, 20 nt, Homo sapiens
uaugaccugucuuuucucuc

SEQ ID NO: 71756 - RNA, 22 nt, Homo sapiens
uaugacuuguuuucuggucugc

SEQ ID NO: 71757 - RNA, 22 nt, Homo sapiens
uaugacuuuggaaaaauuacuu

SEQ ID NO: 71758 - RNA, 22 nt, Homo sapiens
uaugacuguuugcucauucagg

SEQ ID NO: 71759 - RNA, 22 nt, Homo sapiens
uauggauuuuggaauauguggg

SEQ ID NO: 71760 - RNA, 22 nt, Homo sapiens
uauggcuuucuacuugaguucu

SEQ ID NO: 71761 - RNA, 20 nt, Homo sapiens
uaguuggugauacagugcau

SEQ ID NO: 71762 - RNA, 22 nt, Homo sapiens
uagugcugugauauuuuuggcc

SEQ ID NO: 71763 - RNA, 22 nt, Homo sapiens
uaggugguuugaaauacucaag

SEQ ID NO: 71764 - RNA, 22 nt, Homo sapiens
guuuggauauuaggcaagagua

SEQ ID NO: 71765 - RNA, 22 nt, Homo sapiens
guuuggauuuucuaauuucugu

SEQ ID NO: 71766 - RNA, 22 nt, Homo sapiens
guuggcuuuuuaaggaaauugc

SEQ ID NO: 71767 - RNA, 22 nt, Homo sapiens
uaauacugcugugcuugaguug

SEQ ID NO: 71768 - RNA, 20 nt, Homo sapiens
uaaguuguauuugucaugaa

SEQ ID NO: 71769 - RNA, 22 nt, Homo sapiens
uacauaguagauauaggguuua

SEQ ID NO: 71770 - RNA, 22 nt, Homo sapiens
uacauugcacuuuauuagauac

SEQ ID NO: 71771 - RNA, 22 nt, Homo sapiens
uaccagcauuucucuuuaagua

SEQ ID NO: 71772 - RNA, 22 nt, Homo sapiens
gcuccuuugaguagcuucugug

SEQ ID NO: 71773 - RNA, 22 nt, Homo sapiens
gcugcuguaccagaugugguua

SEQ ID NO: 71774 - RNA, 22 nt, Homo sapiens
gcuuguguuuacuguaguuacu

SEQ ID NO: 71775 - RNA, 22 nt, Homo sapiens
gucauauaggguuuaccuguau

SEQ ID NO: 71776 - RNA, 22 nt, Homo sapiens
gucuuuggaaaaaaugucuguu

SEQ ID NO: 71777 - RNA, 22 nt, Homo sapiens
gugaagaucccuguccuguucc

SEQ ID NO: 71778 - RNA, 22 nt, Homo sapiens
gugagagaaugacuauguguuu

SEQ ID NO: 71779 - RNA, 22 nt, Homo sapiens
gugaaugaaugggugaauacau

SEQ ID NO: 71780 - RNA, 23 nt, Homo sapiens
gugcaugagucuuuauaguagca

SEQ ID NO: 71781 - RNA, 22 nt, Homo sapiens
ugaaaugauuauaugguguuug

SEQ ID NO: 71782 - RNA, 22 nt, Homo sapiens
ucuuggguuuguccuucuccua

SEQ ID NO: 71783 - RNA, 22 nt, Homo sapiens
ucuuggguggauucauucuuuc

SEQ ID NO: 71784 - RNA, 22 nt, Homo sapiens
ucucuguuuauuuuugguguau

SEQ ID NO: 71785 - RNA, 22 nt, Homo sapiens
ucucuuggcggaaguugcagug

SEQ ID NO: 71786 - RNA, 22 nt, Homo sapiens
ucugacuagacaagcaguguac

SEQ ID NO: 71787 - RNA, 22 nt, Homo sapiens
ucugggguuuccacuuuuacuu

SEQ ID NO: 71788 - RNA, 22 nt, Homo sapiens
uauuugauugacuuuagcagga

SEQ ID NO: 71789 - RNA, 22 nt, Homo sapiens
uauuguuaaagauguuaaugau

SEQ ID NO: 71790 - RNA, 22 nt, Homo sapiens
ucacaguagagcuucuuucaga

SEQ ID NO: 71791 - RNA, 20 nt, Homo sapiens
ucacugugaacuucuugagg

SEQ ID NO: 71792 - RNA, 22 nt, Homo sapiens
ucauucauucuucaguggguac

SEQ ID NO: 71793 - RNA, 22 nt, Homo sapiens
ucauaguagucacuuaauaaau

SEQ ID NO: 71794 - RNA, 22 nt, Homo sapiens
ucacuuuguuuuuggauaaguu

SEQ ID NO: 71795 - RNA, 22 nt, Homo sapiens
ugcuggugauucagauucaaau

SEQ ID NO: 71796 - RNA, 22 nt, Homo sapiens
ugcuugagacacauaugaauuu

SEQ ID NO: 71797 - RNA, 18 nt, Homo sapiens
uggauaguuguuggcaga

SEQ ID NO: 71798 - RNA, 21 nt, Homo sapiens
uggagugaagaguuuauugac

SEQ ID NO: 71799 - RNA, 22 nt, Homo sapiens
ugauuuguuuagugccaaguuu

SEQ ID NO: 71800 - RNA, 22 nt, Homo sapiens
ugauuugucugcaggaauagug

SEQ ID NO: 71801 - RNA, 22 nt, Homo sapiens
ugauugacauucuuuggaguau

SEQ ID NO: 71802 - RNA, 22 nt, Homo sapiens
ugaguuaggagaguguggcucu

SEQ ID NO: 71803 - RNA, 22 nt, Homo sapiens
ugaguguccaccccuuucacag

SEQ ID NO: 71804 - RNA, 22 nt, Homo sapiens
ugauaugucacuugaucauggu

SEQ ID NO: 71805 - RNA, 22 nt, Homo sapiens
ugauccuguccuuaugauguua

SEQ ID NO: 71806 - RNA, 21 nt, Homo sapiens
ugauguugaccuaaguaguga

SEQ ID NO: 71807 - RNA, 22 nt, Homo sapiens
ugaguauguuuaaugugacaau

SEQ ID NO: 71808 - RNA, 22 nt, Homo sapiens
ugaguauagaucaguucaagug

SEQ ID NO: 71809 - RNA, 22 nt, Homo sapiens
ugaguagucuagaguggaaugu

SEQ ID NO: 71810 - RNA, 22 nt, Homo sapiens
ugagguuggguaauuuaugaag

SEQ ID NO: 71811 - RNA, 23 nt, Homo sapiens
ugagauuauaaucuuuuacuucu

SEQ ID NO: 71812 - RNA, 22 nt, Homo sapiens
ugagaugugaucaccugaaggg

SEQ ID NO: 71813 - RNA, 22 nt, Homo sapiens
ugagaugaagcuagaagaaugg

SEQ ID NO: 71814 - RNA, 22 nt, Homo sapiens
ugagaugaagucucacucuguc

SEQ ID NO: 71815 - RNA, 22 nt, Homo sapiens
ugagaugaugggauaagagggc

SEQ ID NO: 71816 - RNA, 22 nt, Homo sapiens
ugagaggugaauggcaggcuca

SEQ ID NO: 71817 - RNA, 22 nt, Homo sapiens
ugagauaacuaaaaacauuuug

SEQ ID NO: 71818 - RNA, 21 nt, Homo sapiens
ugagaguaguguauuauucuc

SEQ ID NO: 71819 - RNA, 22 nt, Homo sapiens
ugacacagugggggauccuuuu

SEQ ID NO: 71820 - RNA, 22 nt, Homo sapiens
auccuuuagacuguccaguuga

SEQ ID NO: 71821 - RNA, 20 nt, Homo sapiens
auaugguugugagugauuuu

SEQ ID NO: 71822 - RNA, 22 nt, Homo sapiens
auaugguuuuuggaagcauauc

SEQ ID NO: 71823 - RNA, 22 nt, Homo sapiens
auaugguguuugcuauucagcu

SEQ ID NO: 71824 - RNA, 22 nt, Homo sapiens
auauguauuuuaacguguaagg

SEQ ID NO: 71825 - RNA, 20 nt, Homo sapiens
augaauguccuugauggcau

SEQ ID NO: 71826 - RNA, 22 nt, Homo sapiens
aucuuuggugcaugauacuuug

SEQ ID NO: 71827 - RNA, 22 nt, Homo sapiens
augaugaaguaagugcuuagga

SEQ ID NO: 71828 - RNA, 22 nt, Homo sapiens
augcuaugugugacuucuuaug

SEQ ID NO: 71829 - RNA, 22 nt, Homo sapiens
auggauuuuaggauacaguuga

SEQ ID NO: 71830 - RNA, 22 nt, Homo sapiens
auggaacauuauagauguaaaa

SEQ ID NO: 71831 - RNA, 22 nt, Homo sapiens
auacccauacauauuggugacu

SEQ ID NO: 71832 - RNA, 22 nt, Homo sapiens
auaugcuaauuuuuagucgagc

SEQ ID NO: 71833 - RNA, 22 nt, Homo sapiens
agugauguggaguuuggaugga

SEQ ID NO: 71834 - RNA, 22 nt, Homo sapiens
aguggauuuuagacugagauuu

SEQ ID NO: 71835 - RNA, 20 nt, Homo sapiens
agcaucguuguguuauagcc

SEQ ID NO: 71836 - RNA, 22 nt, Homo sapiens
aauagcauugaaucuaccaauu

SEQ ID NO: 71837 - RNA, 20 nt, Homo sapiens
acaguauguuuggaugcaua

SEQ ID NO: 71838 - RNA, 22 nt, Homo sapiens
acacucuaguguucuuaaucag

SEQ ID NO: 71839 - RNA, 22 nt, Homo sapiens
acagucuggagaaugggugcuc

SEQ ID NO: 71840 - RNA, 22 nt, Homo sapiens
aagugucagaguugcuaaugac

SEQ ID NO: 71841 - RNA, 22 nt, Homo sapiens
aaguugguguaugagacagaag

SEQ ID NO: 71842 - RNA, 20 nt, Homo sapiens
aagugcuauuucuuuugugg

SEQ ID NO: 71843 - RNA, 22 nt, Homo sapiens
acugcacuucagccuugugaca

SEQ ID NO: 71844 - RNA, 22 nt, Homo sapiens
acuuuuguuauacagugugaua

SEQ ID NO: 71845 - RNA, 22 nt, Homo sapiens
acugcacugucaaccuccuggg

SEQ ID NO: 71846 - RNA, 22 nt, Homo sapiens
acugcacucuagccuuggcaac

SEQ ID NO: 71847 - RNA, 19 nt, Homo sapiens
acugcacuccuccuugggu

SEQ ID NO: 71848 - RNA, 22 nt, Homo sapiens
acugcacuccagcuuuggguga

SEQ ID NO: 71849 - RNA, 22 nt, Homo sapiens
acugcacuccagccucaugaca

SEQ ID NO: 71850 - RNA, 19 nt, Homo sapiens
acugcacuccaaccuccug

SEQ ID NO: 71851 - RNA, 20 nt, Homo sapiens
acugauauguuccuguucuc

SEQ ID NO: 71852 - RNA, 22 nt, Homo sapiens
agcaagacauggcuuccaaaug

SEQ ID NO: 71853 - RNA, 22 nt, Homo sapiens
agaugcuguuaucaacuguagc

SEQ ID NO: 71854 - RNA, 22 nt, Homo sapiens
cugagauaggacucugcuggcu

SEQ ID NO: 71855 - RNA, 22 nt, Homo sapiens
cucaaaguacuuugguuauugu

SEQ ID NO: 71856 - RNA, 22 nt, Homo sapiens
cuaauccugugguagcacucaa

SEQ ID NO: 71857 - RNA, 22 nt, Homo sapiens
cugauugucuauuuaguucacu

SEQ ID NO: 71858 - RNA, 22 nt, Homo sapiens
cugauacugaaagcuguugguu

SEQ ID NO: 71859 - RNA, 22 nt, Homo sapiens
cuguaguuagcagaugaugaau

SEQ ID NO: 71860 - RNA, 22 nt, Homo sapiens
cuuggcuucuuuauguggcuau

SEQ ID NO: 71861 - RNA, 18 nt, Homo sapiens
gauguaguauggugugga

SEQ ID NO: 71862 - RNA, 22 nt, Homo sapiens
gaugugaaaucauaguuucuag

SEQ ID NO: 71863 - RNA, 22 nt, Homo sapiens
gauuagugacguugagcacugu

SEQ ID NO: 71864 - RNA, 22 nt, Homo sapiens
gaucacauggccauuucuagcu

SEQ ID NO: 71865 - RNA, 22 nt, Homo sapiens
gaucuguuguuuggaaguauca

SEQ ID NO: 71866 - RNA, 19 nt, Homo sapiens
cuuugguugagcguguugg

SEQ ID NO: 71867 - RNA, 23 nt, Homo sapiens
cuuuggucucugguugacuucag

SEQ ID NO: 71868 - RNA, 22 nt, Homo sapiens
gagaucaugcugguucucucau

SEQ ID NO: 71869 - RNA, 22 nt, Homo sapiens
auuaauguaauuaguaaaguug

SEQ ID NO: 71870 - RNA, 22 nt, Homo sapiens
auguuugguagugaauauggua

SEQ ID NO: 71871 - RNA, 22 nt, Homo sapiens
auguuugguaagaauauuguua

SEQ ID NO: 71872 - RNA, 22 nt, Homo sapiens
auugcauaaacacauuucuuau

SEQ ID NO: 71873 - RNA, 22 nt, Homo sapiens
auugcacucuaaccuaggugac

SEQ ID NO: 71874 - RNA, 22 nt, Homo sapiens
auugcacuccagccuggugaca

SEQ ID NO: 71875 - RNA, 22 nt, Homo sapiens
auugcacucuagccuuggcgac

SEQ ID NO: 71876 - RNA, 22 nt, Homo sapiens
auugcacuggggguuagaauuu

SEQ ID NO: 71877 - RNA, 22 nt, Homo sapiens
auugcacuccagucucaccagg

SEQ ID NO: 71878 - RNA, 22 nt, Homo sapiens
auugcacuccagccugcggaac

SEQ ID NO: 71879 - RNA, 23 nt, Homo sapiens
cagcuggugauuuuaaguugaag

SEQ ID NO: 71880 - RNA, 22 nt, Homo sapiens
cagcuggugcugcaccaguggg

SEQ ID NO: 71881 - RNA, 22 nt, Homo sapiens
cagcuggugggagcuggguucc

SEQ ID NO: 71882 - RNA, 22 nt, Homo sapiens
cauuugguggcuacagaguaac

SEQ ID NO: 71883 - RNA, 22 nt, Homo sapiens
caugauauugcagaauguuggu

SEQ ID NO: 71884 - RNA, 19 nt, Homo sapiens
ccuuugguuuccaugacau

SEQ ID NO: 71885 - RNA, 22 nt, Homo sapiens
cuaagauugucuuaguguguug

SEQ ID NO: 71886 - RNA, 22 nt, Homo sapiens
uaguuguugcagguaggaugua

SEQ ID NO: 71887 - RNA, 22 nt, Homo sapiens
uauggauuugccuauucuguau

SEQ ID NO: 71888 - RNA, 22 nt, Homo sapiens
uaugaugcuguuuagaaucucu

SEQ ID NO: 71889 - RNA, 22 nt, Homo sapiens
uaugagguagguaugacuauca

SEQ ID NO: 71890 - RNA, 22 nt, Homo sapiens
uaugacuuuugaauacagaugg

SEQ ID NO: 71891 - RNA, 22 nt, Homo sapiens
uauuguuuuucccaggagucua

SEQ ID NO: 71892 - RNA, 22 nt, Homo sapiens
uauugauuaauugugauuaggc

SEQ ID NO: 71893 - RNA, 22 nt, Homo sapiens
uauugguuacuguugaucgcca

SEQ ID NO: 71894 - RNA, 22 nt, Homo sapiens
uauuagugucuuuugguuagaa

SEQ ID NO: 71895 - RNA, 22 nt, Homo sapiens
guuggugaccugaagagaguaa

SEQ ID NO: 71896 - RNA, 22 nt, Homo sapiens
uaauauguuuugaaaucaggaa

SEQ ID NO: 71897 - RNA, 22 nt, Homo sapiens
uaauaguuucagaaguuguuuu

SEQ ID NO: 71898 - RNA, 22 nt, Homo sapiens
uaaguuagugugagaauuuugc

SEQ ID NO: 71899 - RNA, 22 nt, Homo sapiens
uacaaaguaacaguuccuguau

SEQ ID NO: 71900 - RNA, 22 nt, Homo sapiens
uagagauaucaauuucauggug

SEQ ID NO: 71901 - RNA, 22 nt, Homo sapiens
guauuuuguuagggugugguau

SEQ ID NO: 71902 - RNA, 21 nt, Homo sapiens
gucauaugucucugauuagug

SEQ ID NO: 71903 - RNA, 22 nt, Homo sapiens
guaugguuuauagggaaauugu

SEQ ID NO: 71904 - RNA, 22 nt, Homo sapiens
gggaugauuaugguucacuaca

SEQ ID NO: 71905 - RNA, 22 nt, Homo sapiens
gguauguuuagaccauuuacau

SEQ ID NO: 71906 - RNA, 22 nt, Homo sapiens
gugcacaugguagguauugagu

SEQ ID NO: 71907 - RNA, 22 nt, Homo sapiens
guugcugagucccaucaccaga

SEQ ID NO: 71908 - RNA, 22 nt, Homo sapiens
guuggaguuaagcaguaaugaa

SEQ ID NO: 71909 - RNA, 22 nt, Homo sapiens
guuauguuauguuauguuaugu

SEQ ID NO: 71910 - RNA, 22 nt, Homo sapiens
guuauguaucuugauugggugg

SEQ ID NO: 71911 - RNA, 22 nt, Homo sapiens
gauuguguucauaggcauguua

SEQ ID NO: 71912 - RNA, 22 nt, Homo sapiens
gauuugagagaggguguuuaua

SEQ ID NO: 71913 - RNA, 22 nt, Homo sapiens
gcuguaguugaggauuuuaaga

SEQ ID NO: 71914 - RNA, 22 nt, Homo sapiens
gagaugaucaugugguuuuguc

SEQ ID NO: 71915 - RNA, 22 nt, Homo sapiens
gagaugaagugucaauaaggau

SEQ ID NO: 71916 - RNA, 22 nt, Homo sapiens
gagauauucugguuuacuaaau

SEQ ID NO: 71917 - RNA, 22 nt, Homo sapiens
gagguuuuagugagucccacug

SEQ ID NO: 71918 - RNA, 22 nt, Homo sapiens
gagaugguacacauacgauucu

SEQ ID NO: 71919 - RNA, 22 nt, Homo sapiens
gauauguaaaaauuauaucuga

SEQ ID NO: 71920 - RNA, 22 nt, Homo sapiens
gauagcauucaauuaucuguug

SEQ ID NO: 71921 - RNA, 22 nt, Homo sapiens
gaugauguugaauguucucacc

SEQ ID NO: 71922 - RNA, 22 nt, Homo sapiens
gaugauguuacucuuuuuccuu

SEQ ID NO: 71923 - RNA, 22 nt, Homo sapiens
gaugauauuugagucauuagaa

SEQ ID NO: 71924 - RNA, 22 nt, Homo sapiens
gaucuguuuuccuauuguuugu

SEQ ID NO: 71925 - RNA, 22 nt, Homo sapiens
gaaugguuuacaaguguaaucu

SEQ ID NO: 71926 - RNA, 22 nt, Homo sapiens
gacagagcaagacccuauuuaa

SEQ ID NO: 71927 - RNA, 22 nt, Homo sapiens
cuuugguucuguuuauaugcug

SEQ ID NO: 71928 - RNA, 22 nt, Homo sapiens
cugauugucaucaauauuauua

SEQ ID NO: 71929 - RNA, 22 nt, Homo sapiens
cugauacucuccuuuuagagag

SEQ ID NO: 71930 - RNA, 19 nt, Homo sapiens
cuugccccauucauccucu

SEQ ID NO: 71931 - RNA, 22 nt, Homo sapiens
cuugcacucagaagauucaguu

SEQ ID NO: 71932 - RNA, 21 nt, Homo sapiens
caucaaauugucauggugggu

SEQ ID NO: 71933 - RNA, 22 nt, Homo sapiens
cauauaguaguacuguuagguu

SEQ ID NO: 71934 - RNA, 22 nt, Homo sapiens
ccagaguugccucagguuucug

SEQ ID NO: 71935 - RNA, 22 nt, Homo sapiens
cucaaagugcuaagauuaggcu

SEQ ID NO: 71936 - RNA, 21 nt, Homo sapiens
cucaaaguacugauauuacag

SEQ ID NO: 71937 - RNA, 22 nt, Homo sapiens
cagcugaugucgaaugcacucu

SEQ ID NO: 71938 - RNA, 22 nt, Homo sapiens
auuuugguuacauaguugagcu

SEQ ID NO: 71939 - RNA, 22 nt, Homo sapiens
auuguguagucuuacugcuugc

SEQ ID NO: 71940 - RNA, 22 nt, Homo sapiens
auugugauggucaaaggaaaua

SEQ ID NO: 71941 - RNA, 22 nt, Homo sapiens
auuauaguguauacuugaaauu

SEQ ID NO: 71942 - RNA, 22 nt, Homo sapiens
auuggcagaaaucuuuauagua

SEQ ID NO: 71943 - RNA, 22 nt, Homo sapiens
ugaagugaagcaguaguguggg

SEQ ID NO: 71944 - RNA, 22 nt, Homo sapiens
ucuuugguaauggaugucugau

SEQ ID NO: 71945 - RNA, 22 nt, Homo sapiens
ugaauugucucucacuggguuc

SEQ ID NO: 71946 - RNA, 22 nt, Homo sapiens
ugaauuguuucauucuuuacau

SEQ ID NO: 71947 - RNA, 22 nt, Homo sapiens
ugaauucuguccaaaauaacug

SEQ ID NO: 71948 - RNA, 21 nt, Homo sapiens
ugaauauuuggguugugucca

SEQ ID NO: 71949 - RNA, 22 nt, Homo sapiens
ucuuuggaggcgaucuguuuga

SEQ ID NO: 71950 - RNA, 19 nt, Homo sapiens
ucuuuagucacauuuuuau

SEQ ID NO: 71951 - RNA, 22 nt, Homo sapiens
ucugguggugaugagagacagu

SEQ ID NO: 71952 - RNA, 21 nt, Homo sapiens
ucucauugugguuuuaauugg

SEQ ID NO: 71953 - RNA, 21 nt, Homo sapiens
ucucauagaguuucacuuucu

SEQ ID NO: 71954 - RNA, 22 nt, Homo sapiens
uccuucaugcaucaauguaucc

SEQ ID NO: 71955 - RNA, 22 nt, Homo sapiens
uccuucauuugucaacucuagu

SEQ ID NO: 71956 - RNA, 22 nt, Homo sapiens
ucauugguucuggguguuguug

SEQ ID NO: 71957 - RNA, 22 nt, Homo sapiens
ucauugcauguuaauuaaacag

SEQ ID NO: 71958 - RNA, 21 nt, Homo sapiens
ucauauguaucuuugugccuc

SEQ ID NO: 71959 - RNA, 22 nt, Homo sapiens
ucagugauugguuauuuuaggc

SEQ ID NO: 71960 - RNA, 22 nt, Homo sapiens
uggcaguuuacaaaugccauga

SEQ ID NO: 71961 - RNA, 20 nt, Homo sapiens
ugaguagaggaguucuauca

SEQ ID NO: 71962 - RNA, 22 nt, Homo sapiens
ugauaagugaaagugcucuauc

SEQ ID NO: 71963 - RNA, 22 nt, Homo sapiens
ugagcagugaguguggugcagg

SEQ ID NO: 71964 - RNA, 22 nt, Homo sapiens
ugaccuguuugaaauugccaau

SEQ ID NO: 71965 - RNA, 22 nt, Homo sapiens
ugauugcacaccugcacucaag

SEQ ID NO: 71966 - RNA, 22 nt, Homo sapiens
ugaugaugaaugaucuuuuaca

SEQ ID NO: 71967 - RNA, 22 nt, Homo sapiens
ugaucugucacuuaucacauuu

SEQ ID NO: 71968 - RNA, 22 nt, Homo sapiens
ugaucucauuagcaccuuuagc

SEQ ID NO: 71969 - RNA, 22 nt, Homo sapiens
ugaugugucaucugagagagug

SEQ ID NO: 71970 - RNA, 22 nt, Homo sapiens
uugaugauguuucugccuugcc

SEQ ID NO: 71971 - RNA, 22 nt, Homo sapiens
uugauguguuuccaggauuugu

SEQ ID NO: 71972 - RNA, 22 nt, Homo sapiens
uugauuuguagaaugccccaac

SEQ ID NO: 71973 - RNA, 22 nt, Homo sapiens
uugaauagaagguuuuuuguuc

SEQ ID NO: 71974 - RNA, 22 nt, Homo sapiens
uugaaguaguacuuuauuauag

SEQ ID NO: 71975 - RNA, 22 nt, Homo sapiens
uugaaugaaaugaugucauuug

SEQ ID NO: 71976 - RNA, 22 nt, Homo sapiens
uucuugguguaguaguugaaaa

SEQ ID NO: 71977 - RNA, 22 nt, Homo sapiens
uucuugcacuuggcccucauua

SEQ ID NO: 71978 - RNA, 22 nt, Homo sapiens
uugaagguaggaugugcuauca

SEQ ID NO: 71979 - RNA, 22 nt, Homo sapiens
uugcagagucaguuauuuugcc

SEQ ID NO: 71980 - RNA, 22 nt, Homo sapiens
uugcacuugcugaggagugauu

SEQ ID NO: 71981 - RNA, 22 nt, Homo sapiens
uugcacuuccgccugggugaca

SEQ ID NO: 71982 - RNA, 22 nt, Homo sapiens
uugcacucuagccugggugaca

SEQ ID NO: 71983 - RNA, 22 nt, Homo sapiens
uugcacuauuaguauagauguc

SEQ ID NO: 71984 - RNA, 22 nt, Homo sapiens
uugcaucagcaggcauaauugg

SEQ ID NO: 71985 - RNA, 22 nt, Homo sapiens
uugcauuagugugguacauuug

SEQ ID NO: 71986 - RNA, 22 nt, Homo sapiens
uugcuucauucaacauugaggg

SEQ ID NO: 71987 - RNA, 22 nt, Homo sapiens
uugcuuagucaugaaucacuga

SEQ ID NO: 71988 - RNA, 22 nt, Homo sapiens
uugcugguuuucauaugagcag

SEQ ID NO: 71989 - RNA, 22 nt, Homo sapiens
uuugauugguguaccugaaagu

SEQ ID NO: 71990 - RNA, 22 nt, Homo sapiens
uuugauuguacuaaaauuguac

SEQ ID NO: 71991 - RNA, 22 nt, Homo sapiens
uuuggcuuuuguaauaacugcc

SEQ ID NO: 71992 - RNA, 22 nt, Homo sapiens
uuugguugccucuaugagccug

SEQ ID NO: 71993 - RNA, 22 nt, Homo sapiens
uuugugcuccugugagaaucua

SEQ ID NO: 71994 - RNA, 22 nt, Homo sapiens
uuugugcuccuaugagaaucua

SEQ ID NO: 71995 - RNA, 22 nt, Homo sapiens
uuugugagguggauagauugca

SEQ ID NO: 71996 - RNA, 22 nt, Homo sapiens
uuuauagucaggaacuugagga

SEQ ID NO: 71997 - RNA, 22 nt, Homo sapiens
uugugcuuuuuaaauagcuucc

SEQ ID NO: 71998 - RNA, 22 nt, Homo sapiens
uguuauguucuacuuuuaggug

SEQ ID NO: 71999 - RNA, 22 nt, Homo sapiens
uguuauguuuuagagguuucaa

SEQ ID NO: 72000 - RNA, 22 nt, Homo sapiens
uguuuguuugauaugggauaaa

SEQ ID NO: 72001 - RNA, 22 nt, Homo sapiens
uguuaucauuacguucuuaguu

SEQ ID NO: 72002 - RNA, 22 nt, Homo sapiens
uguuacagugacuaauguuuua

SEQ ID NO: 72003 - RNA, 22 nt, Homo sapiens
uguuaagauguguuuuguggcu

SEQ ID NO: 72004 - RNA, 22 nt, Homo sapiens
uguuuguuugugauacgguaca

SEQ ID NO: 72005 - RNA, 22 nt, Homo sapiens
uguuuuggaguggacuuugcau

SEQ ID NO: 72006 - RNA, 22 nt, Homo sapiens
uuaaguaaucagagaagagaac

SEQ ID NO: 72007 - RNA, 22 nt, Homo sapiens
uuaagaugcauuuugaaguuaa

SEQ ID NO: 72008 - RNA, 22 nt, Homo sapiens
uguagauaucauuagugcugug

SEQ ID NO: 72009 - RNA, 22 nt, Homo sapiens
uguaauuuaaaugauccuugga

SEQ ID NO: 72010 - RNA, 22 nt, Homo sapiens
ugugauugauauauuuacagaa

SEQ ID NO: 72011 - RNA, 22 nt, Homo sapiens
uucuauugguaauauuuucugu

SEQ ID NO: 72012 - RNA, 22 nt, Homo sapiens
uucuaugguuuaauaguuuggg

SEQ ID NO: 72013 - RNA, 22 nt, Homo sapiens
uucucugggacauaggucgggu

SEQ ID NO: 72014 - RNA, 22 nt, Homo sapiens
uucauagucacauucgaugucu

SEQ ID NO: 72015 - RNA, 22 nt, Homo sapiens
uuccauugugucaucuuggugg

SEQ ID NO: 72016 - RNA, 22 nt, Homo sapiens
uuauauguuagacauggugggu

SEQ ID NO: 72017 - RNA, 22 nt, Homo sapiens
uuacaguggugaccuuguauug

SEQ ID NO: 72018 - RNA, 22 nt, Homo sapiens
uucaguucugcacugaucuuag

SEQ ID NO: 72019 - RNA, 22 nt, Homo sapiens
uucaguucugcucugaucuuag

SEQ ID NO: 72020 - RNA, 22 nt, Homo sapiens
uuauggcuauugaugacaauug

SEQ ID NO: 72021 - RNA, 22 nt, Homo sapiens
aaauaacugucagguucuggaa

SEQ ID NO: 72022 - RNA, 22 nt, Homo sapiens
aagaugauguucuuuuucuuag

SEQ ID NO: 72023 - RNA, 22 nt, Homo sapiens
acaccuguggucccaguaacuu

SEQ ID NO: 72024 - RNA, 22 nt, Homo sapiens
aauugcacuaagcauaguccag

SEQ ID NO: 72025 - RNA, 22 nt, Homo sapiens
aauuaguaaccuaauuccaucu

SEQ ID NO: 72026 - RNA, 22 nt, Homo sapiens
aauuaguugucgugagaguggu

SEQ ID NO: 72027 - RNA, 18 nt, Homo sapiens
acucuguauguggagugg

SEQ ID NO: 72028 - RNA, 22 nt, Homo sapiens
acugcacuccagcccaggugac

SEQ ID NO: 72029 - RNA, 22 nt, Homo sapiens
acugcacuccagacucugucuc

SEQ ID NO: 72030 - RNA, 20 nt, Homo sapiens
acugcacuccaaccuuugug

SEQ ID NO: 72031 - RNA, 22 nt, Homo sapiens
acugcacuccagccuuugcgau

SEQ ID NO: 72032 - RNA, 22 nt, Homo sapiens
acugcacuccagccuuggagac

SEQ ID NO: 72033 - RNA, 22 nt, Homo sapiens
acugcacuccagccuugcgaca

SEQ ID NO: 72034 - RNA, 23 nt, Homo sapiens
aaauuugccuauuauuccuaugg

SEQ ID NO: 72035 - RNA, 22 nt, Homo sapiens
aaaugucauggaguguuucccc

SEQ ID NO: 72036 - RNA, 22 nt, Homo sapiens
aggaaguaauaaguuugguucu

SEQ ID NO: 72037 - RNA, 19 nt, Homo sapiens
agcuuuggcuaacuuucuc

SEQ ID NO: 72038 - RNA, 22 nt, Homo sapiens
agcuuguuuucccauaacuaga

SEQ ID NO: 72039 - RNA, 22 nt, Homo sapiens
agagauaaagauuuuaauuuug

SEQ ID NO: 72040 - RNA, 22 nt, Homo sapiens
agcugauggucuuguaugaugu

SEQ ID NO: 72041 - RNA, 22 nt, Homo sapiens
agcaugacauauuguagagaaa

SEQ ID NO: 72042 - RNA, 22 nt, Homo sapiens
auccuugagaaaauaaaugacc

SEQ ID NO: 72043 - RNA, 22 nt, Homo sapiens
auccuguaggcuaguagacagu

SEQ ID NO: 72044 - RNA, 22 nt, Homo sapiens
auauuugguuaccugugggucu

SEQ ID NO: 72045 - RNA, 22 nt, Homo sapiens
aucaaagugaauuaaugagaau

SEQ ID NO: 72046 - RNA, 22 nt, Homo sapiens
aucagagugaauaaugacaaaa

SEQ ID NO: 72047 - RNA, 22 nt, Homo sapiens
augaggugcagaggaaaugagu

SEQ ID NO: 72048 - RNA, 22 nt, Homo sapiens
augaggugaggucaguaaggua

SEQ ID NO: 72049 - RNA, 22 nt, Homo sapiens
aucugcauucccauguuuauug

SEQ ID NO: 72050 - RNA, 22 nt, Homo sapiens
aucuuuggauacuugauauagu

SEQ ID NO: 72051 - RNA, 22 nt, Homo sapiens
aucuugggugggaacugagaau

SEQ ID NO: 72052 - RNA, 22 nt, Homo sapiens
augccacugcacuccaaccugg

SEQ ID NO: 72053 - RNA, 22 nt, Homo sapiens
augcauauuuuaccuagaagag

SEQ ID NO: 72054 - RNA, 22 nt, Homo sapiens
auggaaugccauuuauaaugga

SEQ ID NO: 72055 - RNA, 22 nt, Homo sapiens
auggaguuuacuuaguguaaua

SEQ ID NO: 72056 - RNA, 22 nt, Homo sapiens
augucacugcacuccugccugg

SEQ ID NO: 72057 - RNA, 17 nt, Homo sapiens
augugaauguucaaaua

SEQ ID NO: 72058 - RNA, 22 nt, Homo sapiens
auuaagugaaugaaguuguucc

SEQ ID NO: 72059 - RNA, 22 nt, Homo sapiens
uuuucaguggccauaguggaga

SEQ ID NO: 72060 - RNA, 22 nt, Homo sapiens
uuuucaguuuuccagguagccg

SEQ ID NO: 72061 - RNA, 22 nt, Homo sapiens
uguuauguauggagugauccca

SEQ ID NO: 72062 - RNA, 22 nt, Homo sapiens
uguucaugaguucucauuuuua

SEQ ID NO: 72063 - RNA, 21 nt, Homo sapiens
uguuuuugcuguguaucucuc

SEQ ID NO: 72064 - RNA, 22 nt, Homo sapiens
uuaauucugucugcccucaucc

SEQ ID NO: 72065 - RNA, 22 nt, Homo sapiens
uuaaggcagugcaucuggaguu

SEQ ID NO: 72066 - RNA, 22 nt, Homo sapiens
uggugagaaaugagaugcuuuu

SEQ ID NO: 72067 - RNA, 16 nt, Homo sapiens
uguccaaauaaauaca

SEQ ID NO: 72068 - RNA, 22 nt, Homo sapiens
ugugaagaaagucauugguagc

SEQ ID NO: 72069 - RNA, 22 nt, Homo sapiens
uguguuugauaaguccauaguu

SEQ ID NO: 72070 - RNA, 22 nt, Homo sapiens
ugugaauguaaccuuauuugga

SEQ ID NO: 72071 - RNA, 22 nt, Homo sapiens
ugugcugaucgggcacgguguc

SEQ ID NO: 72072 - RNA, 22 nt, Homo sapiens
uucugcuugaucuaguguguug

SEQ ID NO: 72073 - RNA, 22 nt, Homo sapiens
uucugacuggugugagauggua

SEQ ID NO: 72074 - RNA, 22 nt, Homo sapiens
uucuggcuuauaaacgugacuu

SEQ ID NO: 72075 - RNA, 22 nt, Homo sapiens
uucauuggacuuguguucuuga

SEQ ID NO: 72076 - RNA, 21 nt, Homo sapiens
uucauaaggcuucucuccugu

SEQ ID NO: 72077 - RNA, 22 nt, Homo sapiens
uuagugaaugggugugauuugu

SEQ ID NO: 72078 - RNA, 22 nt, Homo sapiens
uuaguaguuugauaggaauagc

SEQ ID NO: 72079 - RNA, 22 nt, Homo sapiens
uuguuaagaugcagauucugga

SEQ ID NO: 72080 - RNA, 22 nt, Homo sapiens
uuguguuuuuaguagggaaggg

SEQ ID NO: 72081 - RNA, 22 nt, Homo sapiens
uuucaguguggcaggcauagcu

SEQ ID NO: 72082 - RNA, 23 nt, Homo sapiens
uuugagugugauaaacacuguca

SEQ ID NO: 72083 - RNA, 22 nt, Homo sapiens
uuugaguuugaggugcugauga

SEQ ID NO: 72084 - RNA, 20 nt, Homo sapiens
uuuggcacugagugguauaa

SEQ ID NO: 72085 - RNA, 22 nt, Homo sapiens
uuugaauggaaguuuugugaaa

SEQ ID NO: 72086 - RNA, 22 nt, Homo sapiens
uuugugcuccuguugagaaucu

SEQ ID NO: 72087 - RNA, 22 nt, Homo sapiens
uuugugaggugauggauauguc

SEQ ID NO: 72088 - RNA, 22 nt, Homo sapiens
uuugucuccuaagacucugugg

SEQ ID NO: 72089 - RNA, 22 nt, Homo sapiens
uuuguacucccuuuagauaaaa

SEQ ID NO: 72090 - RNA, 22 nt, Homo sapiens
uuuguacacuguuggugguuau

SEQ ID NO: 72091 - RNA, 22 nt, Homo sapiens
uuuggcuauguuguaucuuucc

SEQ ID NO: 72092 - RNA, 22 nt, Homo sapiens
uuuggcauuagauaauugugua

SEQ ID NO: 72093 - RNA, 22 nt, Homo sapiens
uugauccucugagaaucuaucg

SEQ ID NO: 72094 - RNA, 22 nt, Homo sapiens
uugauaugacuaucuuuuaugu

SEQ ID NO: 72095 - RNA, 22 nt, Homo sapiens
uugauaguuuuaaaauuaaucu

SEQ ID NO: 72096 - RNA, 22 nt, Homo sapiens
uugagugaaugaaugauuaaau

SEQ ID NO: 72097 - RNA, 22 nt, Homo sapiens
uugaguuuaucuaaagaccugg

SEQ ID NO: 72098 - RNA, 22 nt, Homo sapiens
uuggaugauaaagaagccuaag

SEQ ID NO: 72099 - RNA, 22 nt, Homo sapiens
uuggauuguuucuagauugggg

SEQ ID NO: 72100 - RNA, 22 nt, Homo sapiens
uuggcagugguucugacggacc

SEQ ID NO: 72101 - RNA, 22 nt, Homo sapiens
uuggcagugcccgaugcugggg

SEQ ID NO: 72102 - RNA, 22 nt, Homo sapiens
uuguauugucuugaugaguuga

SEQ ID NO: 72103 - RNA, 22 nt, Homo sapiens
uuguauguuucugugcacauga

SEQ ID NO: 72104 - RNA, 22 nt, Homo sapiens
uuguauguaaccauuuggcaaa

SEQ ID NO: 72105 - RNA, 22 nt, Homo sapiens
uuguauaguucuauguguuuug

SEQ ID NO: 72106 - RNA, 22 nt, Homo sapiens
uuguauguuguuugucagagaa

SEQ ID NO: 72107 - RNA, 22 nt, Homo sapiens
aucaaaguaggcauauguuuuu

SEQ ID NO: 72108 - RNA, 22 nt, Homo sapiens
aucacaggucaaaucauuauuu

SEQ ID NO: 72109 - RNA, 22 nt, Homo sapiens
aucauacuguuuugauuacugu

SEQ ID NO: 72110 - RNA, 22 nt, Homo sapiens
auaugucuguuuagucuguaau

SEQ ID NO: 72111 - RNA, 19 nt, Homo sapiens
auaguguaggaaaacagcu

SEQ ID NO: 72112 - RNA, 22 nt, Homo sapiens
auaauagguugauugacauugc

SEQ ID NO: 72113 - RNA, 20 nt, Homo sapiens
augaagugaaguuagggaac

SEQ ID NO: 72114 - RNA, 22 nt, Homo sapiens
augagauaaaccaucucuuaag

SEQ ID NO: 72115 - RNA, 22 nt, Homo sapiens
augagauuguuugugugaaaua

SEQ ID NO: 72116 - RNA, 22 nt, Homo sapiens
augaguaugagaauacauuaag

SEQ ID NO: 72117 - RNA, 15 nt, Homo sapiens
augaguuuuauggag

SEQ ID NO: 72118 - RNA, 22 nt, Homo sapiens
augcauaugucuuuauaguggc

SEQ ID NO: 72119 - RNA, 22 nt, Homo sapiens
augcacuuggcaggaugauucc

SEQ ID NO: 72120 - RNA, 22 nt, Homo sapiens
auggauguucuagggaugugau

SEQ ID NO: 72121 - RNA, 22 nt, Homo sapiens
agcugcauucguaucauauugu

SEQ ID NO: 72122 - RNA, 22 nt, Homo sapiens
agccuguagugagcugugauug

SEQ ID NO: 72123 - RNA, 22 nt, Homo sapiens
agcauuacaugguacagagaag

SEQ ID NO: 72124 - RNA, 22 nt, Homo sapiens
acuuugguuuauagaauuuagg

SEQ ID NO: 72125 - RNA, 22 nt, Homo sapiens
acugcauuugucccuuuugaac

SEQ ID NO: 72126 - RNA, 22 nt, Homo sapiens
acugcacuccagccuugagagc

SEQ ID NO: 72127 - RNA, 22 nt, Homo sapiens
aauccugucuugccauccaaua

SEQ ID NO: 72128 - RNA, 22 nt, Homo sapiens
aauucuguauuguuuagggacu

SEQ ID NO: 72129 - RNA, 22 nt, Homo sapiens
acugcacuccagccugcuggca

SEQ ID NO: 72130 - RNA, 22 nt, Homo sapiens
acugcacuccagccuggaccac

SEQ ID NO: 72131 - RNA, 22 nt, Homo sapiens
acugcacuccagccugcuggau

SEQ ID NO: 72132 - RNA, 22 nt, Homo sapiens
acugcacuccagccuguugaca

SEQ ID NO: 72133 - RNA, 22 nt, Homo sapiens
acugcacuccagccugugcgua

SEQ ID NO: 72134 - RNA, 22 nt, Homo sapiens
acugcacuccagccugccgaca

SEQ ID NO: 72135 - RNA, 22 nt, Homo sapiens
acugcacuccagccuccugggu

SEQ ID NO: 72136 - RNA, 22 nt, Homo sapiens
acugcacuccagccucgugaca

SEQ ID NO: 72137 - RNA, 22 nt, Homo sapiens
cugugacugcagggcauauuug

SEQ ID NO: 72138 - RNA, 22 nt, Homo sapiens
cugucuguuucaaaagugguua

SEQ ID NO: 72139 - RNA, 22 nt, Homo sapiens
cugguaugugugacugcauuga

SEQ ID NO: 72140 - RNA, 22 nt, Homo sapiens
gaaucauuguuucuaaguuugu

SEQ ID NO: 72141 - RNA, 19 nt, Homo sapiens
gaaguguuguccuccagua

SEQ ID NO: 72142 - RNA, 23 nt, Homo sapiens
gaaguaauaaauggauucuuaac

SEQ ID NO: 72143 - RNA, 22 nt, Homo sapiens
gaaaguguugagauuacaggca

SEQ ID NO: 72144 - RNA, 19 nt, Homo sapiens
gcaucauuaguugcuuuuc

SEQ ID NO: 72145 - RNA, 22 nt, Homo sapiens
gaugcagcuaggauuugugaca

SEQ ID NO: 72146 - RNA, 22 nt, Homo sapiens
gauauguacagcucucuaggau

SEQ ID NO: 72147 - RNA, 22 nt, Homo sapiens
gauaaaguauuggguacuaugc

SEQ ID NO: 72148 - RNA, 21 nt, Homo sapiens
gauaaguuggcagccagcacc

SEQ ID NO: 72149 - RNA, 22 nt, Homo sapiens
gagguaggaauaaacauuugaa

SEQ ID NO: 72150 - RNA, 22 nt, Homo sapiens
gagguaggggccuuaaagaugc

SEQ ID NO: 72151 - RNA, 22 nt, Homo sapiens
gagcuguugguuugaaagaauu

SEQ ID NO: 72152 - RNA, 22 nt, Homo sapiens
gaggagauauucugcuggaugg

SEQ ID NO: 72153 - RNA, 22 nt, Homo sapiens
auuauauguguaugugcauacc

SEQ ID NO: 72154 - RNA, 22 nt, Homo sapiens
auuauguuguauuuccuugcag

SEQ ID NO: 72155 - RNA, 22 nt, Homo sapiens
augugaaugugaucggauaguc

SEQ ID NO: 72156 - RNA, 22 nt, Homo sapiens
augugaacaucauagaaugcac

SEQ ID NO: 72157 - RNA, 22 nt, Homo sapiens
auucaagugaugugauucuucu

SEQ ID NO: 72158 - RNA, 22 nt, Homo sapiens
auugaauuugguuugcuaagaa

SEQ ID NO: 72159 - RNA, 22 nt, Homo sapiens
auugcugagacauugcuaaucu

SEQ ID NO: 72160 - RNA, 22 nt, Homo sapiens
auugcuaauaugcuucaggcaa

SEQ ID NO: 72161 - RNA, 22 nt, Homo sapiens
auugcauuuucagguuggucug

SEQ ID NO: 72162 - RNA, 21 nt, Homo sapiens
auuuuugcagagcugguagug

SEQ ID NO: 72163 - RNA, 22 nt, Homo sapiens
auuugguuauucaguuguucag

SEQ ID NO: 72164 - RNA, 22 nt, Homo sapiens
auuugguugggugcgguggcuu

SEQ ID NO: 72165 - RNA, 22 nt, Homo sapiens
caagugcuugaugaaugaucaa

SEQ ID NO: 72166 - RNA, 22 nt, Homo sapiens
auuugguuauggucauggacac

SEQ ID NO: 72167 - RNA, 21 nt, Homo sapiens
cagagaucaucucuguuuuaa

SEQ ID NO: 72168 - RNA, 22 nt, Homo sapiens
cacugcauuggaugguuccucc

SEQ ID NO: 72169 - RNA, 22 nt, Homo sapiens
cacugcauuacucaugagcaug

SEQ ID NO: 72170 - RNA, 22 nt, Homo sapiens
cuauggcuguaaggauaguaac

SEQ ID NO: 72171 - RNA, 22 nt, Homo sapiens
cccaguguuuauuuugagccaa

SEQ ID NO: 72172 - RNA, 22 nt, Homo sapiens
cauugcacugcuucuugggugu

SEQ ID NO: 72173 - RNA, 22 nt, Homo sapiens
uauuacuugucugugucucaau

SEQ ID NO: 72174 - RNA, 22 nt, Homo sapiens
uauggauuuucagauucuuauc

SEQ ID NO: 72175 - RNA, 22 nt, Homo sapiens
uauugcauguugagcaguaccu

SEQ ID NO: 72176 - RNA, 22 nt, Homo sapiens
uagcaguaagaaacugacauug

SEQ ID NO: 72177 - RNA, 22 nt, Homo sapiens
uauaugcaacauaguguaugug

SEQ ID NO: 72178 - RNA, 22 nt, Homo sapiens
uauaugcacucagguguaugug

SEQ ID NO: 72179 - RNA, 22 nt, Homo sapiens
uauaugucuucuuguaauuggc

SEQ ID NO: 72180 - RNA, 22 nt, Homo sapiens
uaaguaguguugagacaaguuu

SEQ ID NO: 72181 - RNA, 17 nt, Homo sapiens
guugaguuugagucaag

SEQ ID NO: 72182 - RNA, 22 nt, Homo sapiens
uaacagcauuugugucuaguag

SEQ ID NO: 72183 - RNA, 21 nt, Homo sapiens
uagauaguugguucugaaucu

SEQ ID NO: 72184 - RNA, 23 nt, Homo sapiens
uacagcugcagaaucaggcuaag

SEQ ID NO: 72185 - RNA, 22 nt, Homo sapiens
ggauugugauaauuguugcaaa

SEQ ID NO: 72186 - RNA, 22 nt, Homo sapiens
ggauauguagggcauaucuaca

SEQ ID NO: 72187 - RNA, 22 nt, Homo sapiens
guaugucuuuauagcagugugg

SEQ ID NO: 72188 - RNA, 22 nt, Homo sapiens
guaugguuguaugaggacccau

SEQ ID NO: 72189 - RNA, 22 nt, Homo sapiens
guaugguugaagugacaagcca

SEQ ID NO: 72190 - RNA, 21 nt, Homo sapiens
guaugguugaagugacaagcc

SEQ ID NO: 72191 - RNA, 22 nt, Homo sapiens
guauacacccugugauauuauu

SEQ ID NO: 72192 - RNA, 22 nt, Homo sapiens
guagcagaacauguuccuugua

SEQ ID NO: 72193 - RNA, 22 nt, Homo sapiens
gugagauggaguuggugucuuu

SEQ ID NO: 72194 - RNA, 22 nt, Homo sapiens
gugauaguucuuacuccaaagu

SEQ ID NO: 72195 - RNA, 22 nt, Homo sapiens
gugauagaucugggauucagaa

SEQ ID NO: 72196 - RNA, 22 nt, Homo sapiens
gugaucuucauggaaggugaaa

SEQ ID NO: 72197 - RNA, 23 nt, Homo sapiens
gugaucauuguuguggguugaau

SEQ ID NO: 72198 - RNA, 22 nt, Homo sapiens
gugauuauuaugcacugcaugc

SEQ ID NO: 72199 - RNA, 22 nt, Homo sapiens
gugauguguuucaacagcuccu

SEQ ID NO: 72200 - RNA, 20 nt, Homo sapiens
gugauuggucacugguuguu

SEQ ID NO: 72201 - RNA, 22 nt, Homo sapiens
gugagauuaguucuggaccugg

SEQ ID NO: 72202 - RNA, 22 nt, Homo sapiens
guuaagaaguguaacuuaaguu

SEQ ID NO: 72203 - RNA, 22 nt, Homo sapiens
guuagcuaguagacaauuuucc

SEQ ID NO: 72204 - RNA, 22 nt, Homo sapiens
guguuugguugauagagccacu

SEQ ID NO: 72205 - RNA, 22 nt, Homo sapiens
guuaugcagcaauugauaaucu

SEQ ID NO: 72206 - RNA, 22 nt, Homo sapiens
guucagguauucuggaacagag

SEQ ID NO: 72207 - RNA, 22 nt, Homo sapiens
guguaguuugagguaugggggc

SEQ ID NO: 72208 - RNA, 22 nt, Homo sapiens
gugugauuguuaauuuuaggug

SEQ ID NO: 72209 - RNA, 21 nt, Homo sapiens
uccagcuuugagaguuguggu

SEQ ID NO: 72210 - RNA, 22 nt, Homo sapiens
ucuuugguuguuuagggugcau

SEQ ID NO: 72211 - RNA, 22 nt, Homo sapiens
ucuuuggugaauggucauccag

SEQ ID NO: 72212 - RNA, 22 nt, Homo sapiens
ucuuuguuuucugauccugaag

SEQ ID NO: 72213 - RNA, 22 nt, Homo sapiens
ucuuugauuuuguuacuaagac

SEQ ID NO: 72214 - RNA, 18 nt, Homo sapiens
ucuuuggcugaacuguag

SEQ ID NO: 72215 - RNA, 22 nt, Homo sapiens
ucuuugguagaagcuauuuuau

SEQ ID NO: 72216 - RNA, 19 nt, Homo sapiens
ucuuugguacgugcuuuga

SEQ ID NO: 72217 - RNA, 22 nt, Homo sapiens
ucuuugguauugugaauagugu

SEQ ID NO: 72218 - RNA, 22 nt, Homo sapiens
ucuuugguaugugcaugugcuu

SEQ ID NO: 72219 - RNA, 22 nt, Homo sapiens
ucuauggaguuugaaugagaaa

SEQ ID NO: 72220 - RNA, 22 nt, Homo sapiens
ugacaugauuguauauuuagaa

SEQ ID NO: 72221 - RNA, 22 nt, Homo sapiens
ugaaguguuuauuuuggccuuc

SEQ ID NO: 72222 - RNA, 22 nt, Homo sapiens
ugacagugugagacuuugucuc

SEQ ID NO: 72223 - RNA, 22 nt, Homo sapiens
ugacucagauagguguguauuc

SEQ ID NO: 72224 - RNA, 22 nt, Homo sapiens
ugacugguguuuaaugagucaa

SEQ ID NO: 72225 - RNA, 23 nt, Homo sapiens
ugacuggagacuguugauccuuu

SEQ ID NO: 72226 - RNA, 22 nt, Homo sapiens
ugagaacagcagcuugggacac

SEQ ID NO: 72227 - RNA, 22 nt, Homo sapiens
ugcaugaugcugagauuuggga

SEQ ID NO: 72228 - RNA, 22 nt, Homo sapiens
uggcuuuguaagguuucauuuu

SEQ ID NO: 72229 - RNA, 22 nt, Homo sapiens
ugguaagaggcccugaguuugu

SEQ ID NO: 72230 - RNA, 22 nt, Homo sapiens
ugaucuguguaacauaggaguc

SEQ ID NO: 72231 - RNA, 22 nt, Homo sapiens
ugaugguguuaccaucuuuacu

SEQ ID NO: 72232 - RNA, 22 nt, Homo sapiens
ugauggcaauggcauucauuuu

SEQ ID NO: 72233 - RNA, 22 nt, Homo sapiens
ugcauauguucaaaguauucug

SEQ ID NO: 72234 - RNA, 22 nt, Homo sapiens
ugcauacuguaugcgugcauac

SEQ ID NO: 72235 - RNA, 22 nt, Homo sapiens
ugaggucacuuguuuuaugcuu

SEQ ID NO: 72236 - RNA, 20 nt, Homo sapiens
ugaggucaggaguuacagac

SEQ ID NO: 72237 - RNA, 22 nt, Homo sapiens
ugaguucuuuuacauuuugaau

SEQ ID NO: 72238 - RNA, 22 nt, Homo sapiens
ugauagucauucaauuuagcca

SEQ ID NO: 72239 - RNA, 22 nt, Homo sapiens
ugauacguaggaauuaugggag

SEQ ID NO: 72240 - RNA, 20 nt, Homo sapiens
ugagauuggugugguauaag

SEQ ID NO: 72241 - RNA, 22 nt, Homo sapiens
ugagaauauuugaagauguuag

SEQ ID NO: 72242 - RNA, 22 nt, Homo sapiens
ugagaagacaucuuugcuuugu

SEQ ID NO: 72243 - RNA, 22 nt, Homo sapiens
guaacaccaguuauaucaguuc

SEQ ID NO: 72244 - RNA, 22 nt, Homo sapiens
guauaugccucaguuauagcac

SEQ ID NO: 72245 - RNA, 17 nt, Homo sapiens
gucuuugguugaguuua

SEQ ID NO: 72246 - RNA, 22 nt, Homo sapiens
gugaaagacauauaugguuuga

SEQ ID NO: 72247 - RNA, 22 nt, Homo sapiens
gucagcuuuuccuuacuuuagg

SEQ ID NO: 72248 - RNA, 22 nt, Homo sapiens
guaucauugccuaaugcucuca

SEQ ID NO: 72249 - RNA, 22 nt, Homo sapiens
gugaucaugauccugaagcauu

SEQ ID NO: 72250 - RNA, 22 nt, Homo sapiens
gugauuauccacgucuuuguga

SEQ ID NO: 72251 - RNA, 20 nt, Homo sapiens
guugaugcugaaguugcuua

SEQ ID NO: 72252 - RNA, 22 nt, Homo sapiens
guuugguugcauggaaaauuua

SEQ ID NO: 72253 - RNA, 22 nt, Homo sapiens
uauaguguuuucaaaaguaugu

SEQ ID NO: 72254 - RNA, 22 nt, Homo sapiens
uagauuaucccugauuugucca

SEQ ID NO: 72255 - RNA, 22 nt, Homo sapiens
uacuuaguagcuuauccugugg

SEQ ID NO: 72256 - RNA, 22 nt, Homo sapiens
uauuagugccuaagucuuaggg

SEQ ID NO: 72257 - RNA, 22 nt, Homo sapiens
uauugcuaaaacucaugguugc

SEQ ID NO: 72258 - RNA, 22 nt, Homo sapiens
ucaaauguuuguuuaaggcuua

SEQ ID NO: 72259 - RNA, 22 nt, Homo sapiens
uaugucuauuauguagcaggaa

SEQ ID NO: 72260 - RNA, 22 nt, Homo sapiens
uaucuacauguagguauguaug

SEQ ID NO: 72261 - RNA, 22 nt, Homo sapiens
uaucaaguguuagggagaugug

SEQ ID NO: 72262 - RNA, 22 nt, Homo sapiens
ucacaugugacauauauauuug

SEQ ID NO: 72263 - RNA, 22 nt, Homo sapiens
ucacaagugagaggaauuagau

SEQ ID NO: 72264 - RNA, 22 nt, Homo sapiens
ucaaggcacuagcugagcugca

SEQ ID NO: 72265 - RNA, 22 nt, Homo sapiens
cugacagucucauugauuugcu

SEQ ID NO: 72266 - RNA, 22 nt, Homo sapiens
cugggguaggacuggcuuuuga

SEQ ID NO: 72267 - RNA, 22 nt, Homo sapiens
caugcauuggucuauuauguga

SEQ ID NO: 72268 - RNA, 22 nt, Homo sapiens
cauugcacuccaccuuggguaa

SEQ ID NO: 72269 - RNA, 22 nt, Homo sapiens
auugcacuccagcuugggugac

SEQ ID NO: 72270 - RNA, 22 nt, Homo sapiens
auugcacuccagccuugugaca

SEQ ID NO: 72271 - RNA, 22 nt, Homo sapiens
gagauguaagaauuuauuuguu

SEQ ID NO: 72272 - RNA, 22 nt, Homo sapiens
cuuuugugauucuucaguuacu

SEQ ID NO: 72273 - RNA, 16 nt, Homo sapiens
gacaugaucuuguuua

SEQ ID NO: 72274 - RNA, 22 nt, Homo sapiens
cugugcuaggcaaugugguaga

SEQ ID NO: 72275 - RNA, 22 nt, Homo sapiens
cuguauguuucuaugaauguga

SEQ ID NO: 72276 - RNA, 22 nt, Homo sapiens
cugucuggaggccugcaaauaa

SEQ ID NO: 72277 - RNA, 22 nt, Homo sapiens
cuguguaguacuagauugagca

SEQ ID NO: 72278 - RNA, 22 nt, Homo sapiens
cugugcuugagagaugacacag

SEQ ID NO: 72279 - RNA, 22 nt, Homo sapiens
cuuugguugugcucuccacuuu

SEQ ID NO: 72280 - RNA, 21 nt, Homo sapiens
cuuugguuucugacuugcaua

SEQ ID NO: 72281 - RNA, 22 nt, Homo sapiens
cuguucaaauuguuugugaagu

SEQ ID NO: 72282 - RNA, 22 nt, Homo sapiens
ggagauaauccagggagggacu

SEQ ID NO: 72283 - RNA, 22 nt, Homo sapiens
gcugagaucucuugccugaacu

SEQ ID NO: 72284 - RNA, 17 nt, Homo sapiens
gcugauguuugcauuuu

SEQ ID NO: 72285 - RNA, 22 nt, Homo sapiens
gcauauguuuggguguguauau

SEQ ID NO: 72286 - RNA, 20 nt, Homo sapiens
gcauaugucuuuauggcagc

SEQ ID NO: 72287 - RNA, 22 nt, Homo sapiens
gcaugaugaauaauaucacaag

SEQ ID NO: 72288 - RNA, 22 nt, Homo sapiens
gauguguugggaagauuucaag

SEQ ID NO: 72289 - RNA, 22 nt, Homo sapiens
gaguuuguaaacuauucacuaa

SEQ ID NO: 72290 - RNA, 22 nt, Homo sapiens
uuauagcacuaagaagguaaua

SEQ ID NO: 72291 - RNA, 22 nt, Homo sapiens
uuaugguuguuaucuugguucg

SEQ ID NO: 72292 - RNA, 22 nt, Homo sapiens
uuaugguuuuuagcagaguaau

SEQ ID NO: 72293 - RNA, 22 nt, Homo sapiens
uuaugguuuauuagcaggguua

SEQ ID NO: 72294 - RNA, 22 nt, Homo sapiens
uuagauaguacugaaugguucu

SEQ ID NO: 72295 - RNA, 22 nt, Homo sapiens
uuacuguauagaaucaucuuga

SEQ ID NO: 72296 - RNA, 22 nt, Homo sapiens
uuaauuguaucuauagauguca

SEQ ID NO: 72297 - RNA, 22 nt, Homo sapiens
uuaaugcuuuugggauauuucu

SEQ ID NO: 72298 - RNA, 18 nt, Homo sapiens
uguugguguucacucacu

SEQ ID NO: 72299 - RNA, 22 nt, Homo sapiens
uuaaguagaugaaugugaaugu

SEQ ID NO: 72300 - RNA, 22 nt, Homo sapiens
ugugaucaugguauuaaucugc

SEQ ID NO: 72301 - RNA, 19 nt, Homo sapiens
ugugacugguugucucgcu

SEQ ID NO: 72302 - RNA, 22 nt, Homo sapiens
ugugaauguaagaaaauccaac

SEQ ID NO: 72303 - RNA, 22 nt, Homo sapiens
ugugaauggugcugcaaugaac

SEQ ID NO: 72304 - RNA, 22 nt, Homo sapiens
uugagaugauggauaugcuaau

SEQ ID NO: 72305 - RNA, 22 nt, Homo sapiens
uugagauaggaacucacuaugc

SEQ ID NO: 72306 - RNA, 22 nt, Homo sapiens
uugacagaccuuggucauaucc

SEQ ID NO: 72307 - RNA, 22 nt, Homo sapiens
uugacuuagacauucaguugga

SEQ ID NO: 72308 - RNA, 22 nt, Homo sapiens
uugagguaguacuuauuauugg

SEQ ID NO: 72309 - RNA, 22 nt, Homo sapiens
uugagugaaggcuguguucuug

SEQ ID NO: 72310 - RNA, 22 nt, Homo sapiens
uugagauggugccacuguacuc

SEQ ID NO: 72311 - RNA, 22 nt, Homo sapiens
uugagauuauuguguuccuuua

SEQ ID NO: 72312 - RNA, 20 nt, Homo sapiens
uucacugggcucucuguugg

SEQ ID NO: 72313 - RNA, 22 nt, Homo sapiens
uucuuugguacaagggccgacc

SEQ ID NO: 72314 - RNA, 22 nt, Homo sapiens
uucuuuggaaacaguacuaauu

SEQ ID NO: 72315 - RNA, 22 nt, Homo sapiens
uucguuuguaauccuuacagca

SEQ ID NO: 72316 - RNA, 22 nt, Homo sapiens
uuguuauguuggucaguaaugu

SEQ ID NO: 72317 - RNA, 22 nt, Homo sapiens
uuguuauguaucucaagauaaa

SEQ ID NO: 72318 - RNA, 22 nt, Homo sapiens
uuguuugguugaguauggaagu

SEQ ID NO: 72319 - RNA, 22 nt, Homo sapiens
uugugauugagugauccuuguu

SEQ ID NO: 72320 - RNA, 22 nt, Homo sapiens
uugugaauggugccucaguaaa

SEQ ID NO: 72321 - RNA, 22 nt, Homo sapiens
uugugcuuguaacuacauucag

SEQ ID NO: 72322 - RNA, 22 nt, Homo sapiens
uugauacuagagucuuucugac

SEQ ID NO: 72323 - RNA, 22 nt, Homo sapiens
uugaguuugaguauucuaaagc

SEQ ID NO: 72324 - RNA, 22 nt, Homo sapiens
uugauaguuuaauuaaugcuag

SEQ ID NO: 72325 - RNA, 22 nt, Homo sapiens
uugauaugaauggcuguuugug

SEQ ID NO: 72326 - RNA, 22 nt, Homo sapiens
uugaucacuguacuaugacuau

SEQ ID NO: 72327 - RNA, 22 nt, Homo sapiens
uuggauuauaaacugagauuug

SEQ ID NO: 72328 - RNA, 22 nt, Homo sapiens
uuguaaucaacacaucauuggg

SEQ ID NO: 72329 - RNA, 22 nt, Homo sapiens
uuguaacaguuuauugacucga

SEQ ID NO: 72330 - RNA, 23 nt, Homo sapiens
uuuguaguagcaugauuuauaau

SEQ ID NO: 72331 - RNA, 18 nt, Homo sapiens
uuuguacuuuuucuaaug

SEQ ID NO: 72332 - RNA, 23 nt, Homo sapiens
uuuguacuaugucaguuuagaua

SEQ ID NO: 72333 - RNA, 17 nt, Homo sapiens
uuuuggauuagaaaucc

SEQ ID NO: 72334 - RNA, 22 nt, Homo sapiens
uuuuggacuugcuccccugucc

SEQ ID NO: 72335 - RNA, 22 nt, Homo sapiens
uuuugguuaggauggguggcau

SEQ ID NO: 72336 - RNA, 22 nt, Homo sapiens
uuuggcauuagagagacuugca

SEQ ID NO: 72337 - RNA, 22 nt, Homo sapiens
uuugcugagucugacuucaugg

SEQ ID NO: 72338 - RNA, 22 nt, Homo sapiens
uuuuugauuaauggguagacca

SEQ ID NO: 72339 - RNA, 22 nt, Homo sapiens
aacugcauuuucugauugugug

SEQ ID NO: 72340 - RNA, 20 nt, Homo sapiens
aagacacuguccccacugga

SEQ ID NO: 72341 - RNA, 22 nt, Homo sapiens
aagagguuguaccuaaaguguu

SEQ ID NO: 72342 - RNA, 22 nt, Homo sapiens
aagaugauguuguguuuucacu

SEQ ID NO: 72343 - RNA, 22 nt, Homo sapiens
ugaaaugaucaguuugguuacu

SEQ ID NO: 72344 - RNA, 22 nt, Homo sapiens
ugacagcugaagauguugaacc

SEQ ID NO: 72345 - RNA, 22 nt, Homo sapiens
ugacuaguuuugcuguuguuau

SEQ ID NO: 72346 - RNA, 22 nt, Homo sapiens
ugacuugauacauguuuuugaa

SEQ ID NO: 72347 - RNA, 22 nt, Homo sapiens
ugacuggagucuugcucugucg

SEQ ID NO: 72348 - RNA, 23 nt, Homo sapiens
ugacuuguccagugauaguucgu

SEQ ID NO: 72349 - RNA, 22 nt, Homo sapiens
ugagaugagucucgcucuguca

SEQ ID NO: 72350 - RNA, 22 nt, Homo sapiens
ugagaugaguugcuggcucuga

SEQ ID NO: 72351 - RNA, 22 nt, Homo sapiens
ugagaugaguugcgcucugucg

SEQ ID NO: 72352 - RNA, 22 nt, Homo sapiens
ugagaucuguaaagucugacau

SEQ ID NO: 72353 - RNA, 22 nt, Homo sapiens
ugagaugaggucucacucuguu

SEQ ID NO: 72354 - RNA, 22 nt, Homo sapiens
ugagaugaagucuugcucuguu

SEQ ID NO: 72355 - RNA, 22 nt, Homo sapiens
ugagauaaugcaugugaagauc

SEQ ID NO: 72356 - RNA, 22 nt, Homo sapiens
ugagaguagggguugggauugg

SEQ ID NO: 72357 - RNA, 22 nt, Homo sapiens
ucuuaguuuagauuagcaauuc

SEQ ID NO: 72358 - RNA, 22 nt, Homo sapiens
ucuuggguuguuggcuucuccu

SEQ ID NO: 72359 - RNA, 22 nt, Homo sapiens
ucuuugguuucugucucuguaa

SEQ ID NO: 72360 - RNA, 22 nt, Homo sapiens
ucuuuggucaucaugggaagca

SEQ ID NO: 72361 - RNA, 20 nt, Homo sapiens
ucuugguuggaggucuuuua

SEQ ID NO: 72362 - RNA, 22 nt, Homo sapiens
ucugagcaauagauguggauau

SEQ ID NO: 72363 - RNA, 20 nt, Homo sapiens
ucugauugcaacugcaugag

SEQ ID NO: 72364 - RNA, 22 nt, Homo sapiens
ucugugcugagaguugaaaguu

SEQ ID NO: 72365 - RNA, 22 nt, Homo sapiens
ucuggcuuuagcaugugggaag

SEQ ID NO: 72366 - RNA, 22 nt, Homo sapiens
ucucuguuugucuguuacuggu

SEQ ID NO: 72367 - RNA, 22 nt, Homo sapiens
ucacugcacuagguaaugccac

SEQ ID NO: 72368 - RNA, 20 nt, Homo sapiens
ugguguuugaacagugaaug

SEQ ID NO: 72369 - RNA, 22 nt, Homo sapiens
ugguuagucuguguguauauau

SEQ ID NO: 72370 - RNA, 22 nt, Homo sapiens
ugguguuugagaagcugauguc

SEQ ID NO: 72371 - RNA, 21 nt, Homo sapiens
ugguucaguucguuacgugug

SEQ ID NO: 72372 - RNA, 22 nt, Homo sapiens
ugucuaguuuugaaguauagca

SEQ ID NO: 72373 - RNA, 16 nt, Homo sapiens
ugucuguuugggcaca

SEQ ID NO: 72374 - RNA, 22 nt, Homo sapiens
ugucaguguacuguaagaauua

SEQ ID NO: 72375 - RNA, 19 nt, Homo sapiens
ugucaucaucuuuucuugc

SEQ ID NO: 72376 - RNA, 22 nt, Homo sapiens
ugcugaguguuaccggacaccg

SEQ ID NO: 72377 - RNA, 22 nt, Homo sapiens
ugcugcuguuguuguuacuagc

SEQ ID NO: 72378 - RNA, 22 nt, Homo sapiens
ugagugugaggaagaauuagaa

SEQ ID NO: 72379 - RNA, 22 nt, Homo sapiens
ugagguaugugaugucuuuuag

SEQ ID NO: 72380 - RNA, 22 nt, Homo sapiens
aauauugucaaaauggauucca

SEQ ID NO: 72381 - RNA, 22 nt, Homo sapiens
aagacuguaauccaucuugagu

SEQ ID NO: 72382 - RNA, 22 nt, Homo sapiens
aagagguaauaacaaagcuucu

SEQ ID NO: 72383 - RNA, 22 nt, Homo sapiens
aguccauuugaugaugauucca

SEQ ID NO: 72384 - RNA, 22 nt, Homo sapiens
agcugugucuucuuaaagauuu

SEQ ID NO: 72385 - RNA, 22 nt, Homo sapiens
agcuccaucuucagggguucag

SEQ ID NO: 72386 - RNA, 22 nt, Homo sapiens
acugcacuccagccucguggac

SEQ ID NO: 72387 - RNA, 22 nt, Homo sapiens
acugcacuccagccugcugggu

SEQ ID NO: 72388 - RNA, 22 nt, Homo sapiens
acugcacuccagccugcugaca

SEQ ID NO: 72389 - RNA, 22 nt, Homo sapiens
acugcacuccagccuucggaca

SEQ ID NO: 72390 - RNA, 22 nt, Homo sapiens
acuuugcuuagagggcauuaaa

SEQ ID NO: 72391 - RNA, 22 nt, Homo sapiens
acugcacuccagccuuagugac

SEQ ID NO: 72392 - RNA, 22 nt, Homo sapiens
agaucauaugcaguaaugaacu

SEQ ID NO: 72393 - RNA, 23 nt, Homo sapiens
agaugcauucuuguaggauauau

SEQ ID NO: 72394 - RNA, 19 nt, Homo sapiens
acauugcauuuguaggcuu

SEQ ID NO: 72395 - RNA, 22 nt, Homo sapiens
augagaugcaagauuagauggg

SEQ ID NO: 72396 - RNA, 22 nt, Homo sapiens
auggauugucuccuugugccau

SEQ ID NO: 72397 - RNA, 22 nt, Homo sapiens
auggcacuaaguucaacacuua

SEQ ID NO: 72398 - RNA, 22 nt, Homo sapiens
augauucugaucuagagcuugg

SEQ ID NO: 72399 - RNA, 22 nt, Homo sapiens
augguugguuaaaucuguguau

SEQ ID NO: 72400 - RNA, 22 nt, Homo sapiens
auggcuugugggaacuuuuaaa

SEQ ID NO: 72401 - RNA, 22 nt, Homo sapiens
auggcuugugacccaugcuuca

SEQ ID NO: 72402 - RNA, 22 nt, Homo sapiens
auucuauaguccuaggauuggg

SEQ ID NO: 72403 - RNA, 22 nt, Homo sapiens
auuccauuuguuaucacacccg

SEQ ID NO: 72404 - RNA, 22 nt, Homo sapiens
auugcacuccagccuagguaac

SEQ ID NO: 72405 - RNA, 23 nt, Homo sapiens
auugauagugccuuugugcuaau

SEQ ID NO: 72406 - RNA, 22 nt, Homo sapiens
auguuauguuaaugauaaugga

SEQ ID NO: 72407 - RNA, 22 nt, Homo sapiens
augguuugugcuccuauaagaa

SEQ ID NO: 72408 - RNA, 20 nt, Homo sapiens
auguaauguaugauauguac

SEQ ID NO: 72409 - RNA, 22 nt, Homo sapiens
aucuuuggugaguucuuugguc

SEQ ID NO: 72410 - RNA, 22 nt, Homo sapiens
auagcauaucccacaugucaga

SEQ ID NO: 72411 - RNA, 22 nt, Homo sapiens
auaagaguaguacauaugagac

SEQ ID NO: 72412 - RNA, 22 nt, Human respiratory syncytial virus
cucaucuuauagauguuuuugu

SEQ ID NO: 72413 - RNA, 22 nt, Homo sapiens
auaaagcuauuccucucuuuuu

SEQ ID NO: 72414 - RNA, 22 nt, Homo sapiens
cuaaaacuuucugagugcagca

SEQ ID NO: 72415 - RNA, 21 nt, Homo sapiens
uagcuacacugugauucaugg

SEQ ID NO: 72416 - RNA, 17 nt, Homo sapiens
uagcucuauuucuagcc

SEQ ID NO: 72417 - RNA, 22 nt, Homo sapiens
uaaaccuagcauuuugcauaug

SEQ ID NO: 72418 - RNA, 21 nt, Homo sapiens
uaaagcuagaaccuuagcuuu

SEQ ID NO: 72419 - RNA, 19 nt, Homo sapiens
uaugcuauuuauuagaagu

SEQ ID NO: 72420 - RNA, 22 nt, Homo sapiens
cuagcuuuugauguaaagugag

SEQ ID NO: 72421 - RNA, 22 nt, Homo sapiens
gaauaaacuagagaggacugag

SEQ ID NO: 72422 - RNA, 22 nt, Homo sapiens
agcuauauugaggaugccauuc

SEQ ID NO: 72423 - RNA, 22 nt, Homo sapiens
agcuaguauuuuguuaaggauu

SEQ ID NO: 72424 - RNA, 18 nt, Homo sapiens
auaaacucaucauuuuua

SEQ ID NO: 72425 - RNA, 17 nt, Homo sapiens
auaaacucaucauuuuu

SEQ ID NO: 72426 - RNA, 22 nt, Homo sapiens
auaaaagcaggucuaggucagg

SEQ ID NO: 72427 - RNA, 22 nt, Homo sapiens
agguauauuggacagauguaaa

SEQ ID NO: 72428 - RNA, 22 nt, Homo sapiens
aauaaagccugucucuuuagag

SEQ ID NO: 72429 - RNA, 22 nt, Homo sapiens
gcuguauugacuuuguaucaua

SEQ ID NO: 72430 - RNA, 22 nt, Homo sapiens
uaguaaacauuuuucuaucauu

SEQ ID NO: 72431 - RNA, 22 nt, Homo sapiens
cuaauacaguuguccaagcugg

SEQ ID NO: 72432 - RNA, 22 nt, Homo sapiens
auaaagacacuuggcaugauuu

SEQ ID NO: 72433 - RNA, 22 nt, Homo sapiens
augaaacuggcuaauuuuugua

SEQ ID NO: 72434 - RNA, 17 nt, Homo sapiens
aaguggcuuguucacca

SEQ ID NO: 72435 - RNA, 22 nt, Homo sapiens
uaauacucuucucauuuuacag

SEQ ID NO: 72436 - RNA, 22 nt, Homo sapiens
uaagugaugucuuuuugugugc

SEQ ID NO: 72437 - RNA, 18 nt, Homo sapiens
uuagagugcauuacuuug

SEQ ID NO: 72438 - RNA, 22 nt, Homo sapiens
uuaaguagaugaaugugaaugu

SEQ ID NO: 72439 - RNA, 22 nt, Homo sapiens
uuuaaguguuuguuccugaaaa

SEQ ID NO: 72440 - RNA, 15 nt, Homo sapiens
uuucuacugcacuuc

SEQ ID NO: 72441 - RNA, 22 nt, Homo sapiens
uugaagugaagaacaauaucac

SEQ ID NO: 72442 - RNA, 20 nt, Homo sapiens
uaagugcuuuauauugauua

SEQ ID NO: 72443 - RNA, 22 nt, Homo sapiens
uaagucguggaugauucuucgg

SEQ ID NO: 72444 - RNA, 23 nt, Homo sapiens
guuaagugaauguguacucuauu

SEQ ID NO: 72445 - RNA, 22 nt, Homo sapiens
auuaaguugugccugaaaacuu

SEQ ID NO: 72446 - RNA, 21 nt, Homo sapiens
cucaaaguacugauauuacag

SEQ ID NO: 72447 - RNA, 22 nt, Homo sapiens
cucaauuuggaauugucaguaa

SEQ ID NO: 72448 - RNA, 22 nt, Homo sapiens
uuacaguggugaccuuguauug

SEQ ID NO: 72449 - RNA, 22 nt, Homo sapiens
uuacaguguuuguucuguuacu

SEQ ID NO: 72450 - RNA, 22 nt, Homo sapiens
uuccuacuguucaucaggaacc

SEQ ID NO: 72451 - RNA, 22 nt, Homo sapiens
ugccuacuuugcaucugucagg

SEQ ID NO: 72452 - RNA, 19 nt, Homo sapiens
acagugucucuauaaugau

SEQ ID NO: 72453 - RNA, 22 nt, Homo sapiens
auuaagugaaugaaguuguucc

SEQ ID NO: 72454 - RNA, 17 nt, Homo sapiens
aaaguccuuugcuaucu

SEQ ID NO: 72455 - RNA, 17 nt, Homo sapiens
auaaacucaucauuuuu

SEQ ID NO: 72456 - RNA, 17 nt, Homo sapiens
augaacucaucguucuu

SEQ ID NO: 72457 - RNA, 19 nt, Homo sapiens
augaacucaucauuucuca

SEQ ID NO: 72458 - RNA, 22 nt, Homo sapiens
acuacuucuaaguuuuggaaga

SEQ ID NO: 72459 - RNA, 17 nt, Homo sapiens
accccuaccucagaagc

SEQ ID NO: 72460 - RNA, 20 nt, Homo sapiens
uaucuacuugcaaaugccau

SEQ ID NO: 72461 - RNA, 22 nt, Homo sapiens
ucaaauuccaagucuagguagg

SEQ ID NO: 72462 - RNA, 22 nt, Homo sapiens
uccuacaugcaguacauucaaa

SEQ ID NO: 72463 - RNA, 22 nt, Homo sapiens
uuacagugguugcuauugugaa

SEQ ID NO: 72464 - RNA, 22 nt, Homo sapiens
uucuacuccucauggcagguug

SEQ ID NO: 72465 - RNA, 21 nt, Homo sapiens
uucuacuccggcguuguuuuu

SEQ ID NO: 72466 - RNA, 22 nt, Homo sapiens
uuaauuguaucuauagauguca

SEQ ID NO: 72467 - RNA, 22 nt, Homo sapiens
uuaaguguaaguggugugggac

SEQ ID NO: 72468 - RNA, 22 nt, Homo sapiens
uuaagugaauuaucuaacaugu

SEQ ID NO: 72469 - RNA, 19 nt, Homo sapiens
uuaagugugauaucucagu

SEQ ID NO: 72470 - RNA, 18 nt, Homo sapiens
auaaacucaucauuuuua

SEQ ID NO: 72471 - RNA, 22 nt, Homo sapiens
auaaaccuacauuuucacuucu

SEQ ID NO: 72472 - RNA, 18 nt, Homo sapiens
augaacucaucaguucuu

SEQ ID NO: 72473 - RNA, 22 nt, Homo sapiens
auuaaauguuggacguauacau

SEQ ID NO: 72474 - RNA, 22 nt, Homo sapiens
auucaagugaugugauucuucu

SEQ ID NO: 72475 - RNA, 23 nt, Homo sapiens
auucaaguagugagagugguuau

SEQ ID NO: 72476 - RNA, 22 nt, Homo sapiens
aucuuuggugaguucuuugguc

SEQ ID NO: 72477 - RNA, 22 nt, Homo sapiens
auccauugucuaaugcuaagau

SEQ ID NO: 72478 - RNA, 21 nt, Homo sapiens
auagggcuuguugauaguuaa

SEQ ID NO: 72479 - RNA, 22 nt, Homo sapiens
aguuuuugcugauagcaugcuu

SEQ ID NO: 72480 - RNA, 22 nt, Homo sapiens
agugggccccuagaggugaggu

SEQ ID NO: 72481 - RNA, 22 nt, Homo sapiens
agcuguaguuugguggauguaa

SEQ ID NO: 72482 - RNA, 22 nt, Homo sapiens
aggcaguuucagugagagguga

SEQ ID NO: 72483 - RNA, 22 nt, Homo sapiens
aauggcaguagauggaugggua

SEQ ID NO: 72484 - RNA, 22 nt, Homo sapiens
aagaggcuguaggauaaugccu

SEQ ID NO: 72485 - RNA, 22 nt, Homo sapiens
aagcuggagugcaguggugcaa

SEQ ID NO: 72486 - RNA, 19 nt, Homo sapiens
aacuggugugagaugauau

SEQ ID NO: 72487 - RNA, 22 nt, Homo sapiens
aacuggcauaugaacuuguucu

SEQ ID NO: 72488 - RNA, 22 nt, Homo sapiens
aacuaggccuagaaguugagua

SEQ ID NO: 72489 - RNA, 22 nt, Homo sapiens
aagagccgcaagggugaagggu

SEQ ID NO: 72490 - RNA, 22 nt, Homo sapiens
uuuuugaguaaauauaaauugu

SEQ ID NO: 72491 - RNA, 22 nt, Homo sapiens
uuuggcauuagagagacuugca

SEQ ID NO: 72492 - RNA, 22 nt, Homo sapiens
uuuggcauuuaaauaugcaugg

SEQ ID NO: 72493 - RNA, 22 nt, Homo sapiens
uuggauggucuuuauauaguau

SEQ ID NO: 72494 - RNA, 22 nt, Homo sapiens
uuguguuuuuaguagggaaggg

SEQ ID NO: 72495 - RNA, 20 nt, Homo sapiens
uggagugcuguguugagaag

SEQ ID NO: 72496 - RNA, 22 nt, Homo sapiens
ugucuuugguucaggcaaggag

SEQ ID NO: 72497 - RNA, 22 nt, Homo sapiens
ugggguaggccugguuaugugc

SEQ ID NO: 72498 - RNA, 22 nt, Homo sapiens
ucuuggguuugccuugcugcug

SEQ ID NO: 72499 - RNA, 22 nt, Homo sapiens
ucuuggguuguuggcuucuccu

SEQ ID NO: 72500 - RNA, 22 nt, Homo sapiens
ugagaguagggguugggauugg

SEQ ID NO: 72501 - RNA, 22 nt, Homo sapiens
ugagacugaguuuugcucuugu

SEQ ID NO: 72502 - RNA, 22 nt, Homo sapiens
guuuugguuauauggaucaguu

SEQ ID NO: 72503 - RNA, 22 nt, Homo sapiens
gucaggaccucgguggcauucu

SEQ ID NO: 72504 - RNA, 22 nt, Homo sapiens
gucuggcuccugucuaaucacu

SEQ ID NO: 72505 - RNA, 22 nt, Homo sapiens
guaguggcaugaucuuggcuca

SEQ ID NO: 72506 - RNA, 22 nt, Homo sapiens
uagcugcacuuacaagugagaa

SEQ ID NO: 72507 - RNA, 20 nt, Homo sapiens
uaguuggugauacagugcau

SEQ ID NO: 72508 - RNA, 22 nt, Homo sapiens
uauaucuguccauggcccugcu

SEQ ID NO: 72509 - RNA, 22 nt, Homo sapiens
cauugggugagaacaugcuccu

SEQ ID NO: 72510 - RNA, 22 nt, Homo sapiens
cugguaugugugacugcauuga

SEQ ID NO: 72511 - RNA, 22 nt, Homo sapiens
cugagacuggugauuuaugaag

SEQ ID NO: 72512 - RNA, 22 nt, Homo sapiens
cugagagugguauguuuaagug

SEQ ID NO: 72513 - RNA, 21 nt, Homo sapiens
cacugcaucacaggacagcau

SEQ ID NO: 72514 - RNA, 22 nt, Homo sapiens
caggcaaggugaaguguacugg

SEQ ID NO: 72515 - RNA, 22 nt, Homo sapiens
gcugagcuaugccauauaugcc

SEQ ID NO: 72516 - RNA, 22 nt, Homo sapiens
ggaguaggcuguccggcaccca

SEQ ID NO: 72517 - RNA, 22 nt, Homo sapiens
ggagugucccaaucucagcuca

SEQ ID NO: 72518 - RNA, 20 nt, Homo sapiens
gagauguugaucagggcuau

SEQ ID NO: 72519 - RNA, 22 nt, Homo sapiens
gagauguuuuguuaucaaagga

SEQ ID NO: 72520 - RNA, 22 nt, Homo sapiens
gagcuggacuucuuaccuuuuc

SEQ ID NO: 72521 - RNA, 22 nt, Homo sapiens
uuaaggcagugcaucuggaguu

SEQ ID NO: 72522 - RNA, 21 nt, Homo sapiens
uguuuuugcuguguaucucuc

SEQ ID NO: 72523 - RNA, 22 nt, Homo sapiens
uuggcuguguuccucaaggagu

SEQ ID NO: 72524 - RNA, 22 nt, Homo sapiens
uuggcauuuauucuaaggucaa

SEQ ID NO: 72525 - RNA, 20 nt, Homo sapiens
uuggcauuuagacaagaguu

SEQ ID NO: 72526 - RNA, 22 nt, Homo sapiens
uuggcauuuuuagucaugggaa

SEQ ID NO: 72527 - RNA, 22 nt, Homo sapiens
uugauagguuuuauguauaguu

SEQ ID NO: 72528 - RNA, 22 nt, Homo sapiens
uugccgggugcaguggcucaug

SEQ ID NO: 72529 - RNA, 22 nt, Homo sapiens
uuugguuauuugaaacuagcau

SEQ ID NO: 72530 - RNA, 22 nt, Homo sapiens
uccugagagcagacccucuaua

SEQ ID NO: 72531 - RNA, 22 nt, Homo sapiens
ucuuuggucaucaugggaagca

SEQ ID NO: 72532 - RNA, 22 nt, Homo sapiens
ugcaggguccauugucccaagu

SEQ ID NO: 72533 - RNA, 19 nt, Homo sapiens
uggguagugaugagacaua

SEQ ID NO: 72534 - RNA, 22 nt, Homo sapiens
ugggagcauugcauuagaagcc

SEQ ID NO: 72535 - RNA, 22 nt, Homo sapiens
ugggauauaaaaaacgcuauuc

SEQ ID NO: 72536 - RNA, 22 nt, Homo sapiens
ugccaggaugaggucaauguuu

SEQ ID NO: 72537 - RNA, 22 nt, Homo sapiens
uggaagacauugggugaagggu

SEQ ID NO: 72538 - RNA, 22 nt, Homo sapiens
ugccugagcccagcccuguagu

SEQ ID NO: 72539 - RNA, 22 nt, Homo sapiens
uggcaagaacgaaauguagggu

SEQ ID NO: 72540 - RNA, 20 nt, Homo sapiens
uggaaggcaucugcauuauu

SEQ ID NO: 72541 - RNA, 22 nt, Homo sapiens
uagugacauugcugggaaugcu

SEQ ID NO: 72542 - RNA, 22 nt, Homo sapiens
uacgccuguaauaucagcauuu

SEQ ID NO: 72543 - RNA, 22 nt, Homo sapiens
guguaguuugagguaugggggc

SEQ ID NO: 72544 - RNA, 22 nt, Homo sapiens
guggagcuguguggccuugggc

SEQ ID NO: 72545 - RNA, 22 nt, Homo sapiens
gugagaugugacuucugccucu

SEQ ID NO: 72546 - RNA, 22 nt, Homo sapiens
gugagguugaaaauaauggaaa

SEQ ID NO: 72547 - RNA, 22 nt, Homo sapiens
gucaauguaucuagcuguauua

SEQ ID NO: 72548 - RNA, 22 nt, Homo sapiens
guagggcaggcugagaaauaua

SEQ ID NO: 72549 - RNA, 22 nt, Homo sapiens
ggguucccugaugagaguuagu

SEQ ID NO: 72550 - RNA, 23 nt, Homo sapiens
ggcagguuggucuaggucuauuc

SEQ ID NO: 72551 - RNA, 22 nt, Homo sapiens
ggaauggaacaaagucuugaaa

SEQ ID NO: 72552 - RNA, 22 nt, Homo sapiens
aaggaauacuggugguugcuau

SEQ ID NO: 72553 - RNA, 22 nt, Homo sapiens
aggaagugugcaauuaauuucu

SEQ ID NO: 72554 - RNA, 22 nt, Homo sapiens
agaguaguaggaugaauggacu

SEQ ID NO: 72555 - RNA, 22 nt, Homo sapiens
augagggaagcucacgugucca

SEQ ID NO: 72556 - RNA, 22 nt, Homo sapiens
augaggagauauuaaauaccau

SEQ ID NO: 72557 - RNA, 22 nt, Homo sapiens
augaggugcagaggaaaugagu

SEQ ID NO: 72558 - RNA, 21 nt, Homo sapiens
auggugagaaaguagugucaa

SEQ ID NO: 72559 - RNA, 22 nt, Homo sapiens
auaauagguugauugacauugc

SEQ ID NO: 72560 - RNA, 22 nt, Homo sapiens
auagagugcuucaucaguagua

SEQ ID NO: 72561 - RNA, 22 nt, Homo sapiens
agguauauuggacagauguaaa

SEQ ID NO: 72562 - RNA, 22 nt, Homo sapiens
gaagguaguuuauagauguggu

SEQ ID NO: 72563 - RNA, 22 nt, Homo sapiens
gaagacauuuacaugggagacc

SEQ ID NO: 72564 - RNA, 22 nt, Homo sapiens
gaaugcagcagugacagggcug

SEQ ID NO: 72565 - RNA, 22 nt, Homo sapiens
cugaaaugaauuauuuucuuuc

SEQ ID NO: 72566 - RNA, 22 nt, Homo sapiens
cugaaaagcaucugcauagcug

SEQ ID NO: 72567 - RNA, 22 nt, Homo sapiens
cucucuguuugucuguuauugg

SEQ ID NO: 72568 - RNA, 22 nt, Homo sapiens
gaggagauauucugcuggaugg

SEQ ID NO: 72569 - RNA, 22 nt, Homo sapiens
gaugagguaggccugcuuugaa

SEQ ID NO: 72570 - RNA, 22 nt, Homo sapiens
ccugagacuugagggggcuucu

SEQ ID NO: 72571 - RNA, 23 nt, Homo sapiens
cuccaugagccguccagggccug

SEQ ID NO: 72572 - RNA, 22 nt, Homo sapiens
cacugcauggucuagcuggguu

SEQ ID NO: 72573 - RNA, 22 nt, Homo sapiens
aaggcucuuucaacguaaauua

SEQ ID NO: 72574 - RNA, 22 nt, Homo sapiens
aaggagcuuaagugacuuguac

SEQ ID NO: 72575 - RNA, 22 nt, Homo sapiens
augaggagguaugauuuucuga

SEQ ID NO: 72576 - RNA, 22 nt, Homo sapiens
auaguggcaugaucauagcuca

SEQ ID NO: 72577 - RNA, 22 nt, Homo sapiens
aggaaauguuggucccauuucu

SEQ ID NO: 72578 - RNA, 22 nt, Homo sapiens
agcauagugccuugaaaacaau

SEQ ID NO: 72579 - RNA, 19 nt, Homo sapiens
agacuggcccaggcgggug

SEQ ID NO: 72580 - RNA, 22 nt, Homo sapiens
uggaagaugggaccucaguuuu

SEQ ID NO: 72581 - RNA, 22 nt, Homo sapiens
uggaagacucaagguggugaau

SEQ ID NO: 72582 - RNA, 23 nt, Homo sapiens
ugggucaguuuuucugacaucau

SEQ ID NO: 72583 - RNA, 22 nt, Homo sapiens
ugaugguuuuauuaauaggacc

SEQ ID NO: 72584 - RNA, 20 nt, Homo sapiens
ugauauuuucugagcaggaa

SEQ ID NO: 72585 - RNA, 22 nt, Homo sapiens
ugacggaggcauuggaagcuug

SEQ ID NO: 72586 - RNA, 22 nt, Homo sapiens
ugagauggguucugguccccug

SEQ ID NO: 72587 - RNA, 22 nt, Homo sapiens
ugagguuguccacuauaaucca

SEQ ID NO: 72588 - RNA, 22 nt, Homo sapiens
ucaugggagcccccaucaugag

SEQ ID NO: 72589 - RNA, 22 nt, Homo sapiens
uccagguacucagggggcugag

SEQ ID NO: 72590 - RNA, 22 nt, Homo sapiens
uccugagacugaggagcuuugg

SEQ ID NO: 72591 - RNA, 22 nt, Homo sapiens
uccaugagaauaguuaggcucu

SEQ ID NO: 72592 - RNA, 22 nt, Homo sapiens
ugaaugcaucauguagggcuca

SEQ ID NO: 72593 - RNA, 22 nt, Homo sapiens
ugaauagacagucacugccucc

SEQ ID NO: 72594 - RNA, 22 nt, Homo sapiens
ugaaggacauucuaugguagau

SEQ ID NO: 72595 - RNA, 22 nt, Homo sapiens
uucaggguggagaguaugaggu

SEQ ID NO: 72596 - RNA, 22 nt, Homo sapiens
uguacuagaaauuaaggcaggg

SEQ ID NO: 72597 - RNA, 18 nt, Homo sapiens
ugugauggauauguuaau

SEQ ID NO: 72598 - RNA, 22 nt, Homo sapiens
ugguggcuuuucguagguucac

SEQ ID NO: 72599 - RNA, 22 nt, Homo sapiens
uuugggccauggcuuuuccacg

SEQ ID NO: 72600 - RNA, 22 nt, Homo sapiens
uuucagguauuuaagggccguu

SEQ ID NO: 72601 - RNA, 22 nt, Homo sapiens
auuugggaaugugcauuauacu

SEQ ID NO: 72602 - RNA, 22 nt, Homo sapiens
auuuggguaaugagugcaaggg

SEQ ID NO: 72603 - RNA, 22 nt, Homo sapiens
auuuggcaacguagggaggcau

SEQ ID NO: 72604 - RNA, 22 nt, Homo sapiens
cagcuggugcugcaccaguggg

SEQ ID NO: 72605 - RNA, 22 nt, Homo sapiens
gcccgugagacuggaagcaaga

SEQ ID NO: 72606 - RNA, 22 nt, Homo sapiens
cuugagcuugagauccuuucug

SEQ ID NO: 72607 - RNA, 22 nt, Homo sapiens
gacacugucuucugcucuuaaa

SEQ ID NO: 72608 - RNA, 22 nt, Homo sapiens
guggcaugaaagcaucugugau

SEQ ID NO: 72609 - RNA, 22 nt, Homo sapiens
gggagguagguauuagcuuuuc

SEQ ID NO: 72610 - RNA, 22 nt, Homo sapiens
ggaagaauauuaggggauuucg

SEQ ID NO: 72611 - RNA, 23 nt, Homo sapiens
ggaaauguuuaagggguugggag

SEQ ID NO: 72612 - RNA, 22 nt, Homo sapiens
ggaagguaauugucagcucaua

SEQ ID NO: 72613 - RNA, 22 nt, Homo sapiens
guauuugguuauugcagccuga

SEQ ID NO: 72614 - RNA, 21 nt, Homo sapiens
ggugagaaaggagacauagac

SEQ ID NO: 72615 - RNA, 22 nt, Homo sapiens
uagcaggaaaggggucagaucu

SEQ ID NO: 72616 - RNA, 21 nt, Homo sapiens
uugagaagaauuagcucuucc

SEQ ID NO: 72617 - RNA, 22 nt, Homo sapiens
uugagaguggcagagguggaac

SEQ ID NO: 72618 - RNA, 22 nt, Homo sapiens
uuuaagguauguggugaaaauu

SEQ ID NO: 72619 - RNA, 22 nt, Homo sapiens
uuuacagucuuuugugugaguc

SEQ ID NO: 72620 - RNA, 18 nt, Homo sapiens
uuuacaguagaaggacuu

SEQ ID NO: 72621 - RNA, 22 nt, Homo sapiens
uugggcuugagggugcccaguc

SEQ ID NO: 72622 - RNA, 22 nt, Homo sapiens
uuacuagaacauuuagggaacu

SEQ ID NO: 72623 - RNA, 22 nt, Homo sapiens
uuuugguuguuggguaagagua

SEQ ID NO: 72624 - RNA, 22 nt, Homo sapiens
uaccugagcccucugcugaguu

SEQ ID NO: 72625 - RNA, 22 nt, Homo sapiens
guuuuuggggucacuauuaccg

SEQ ID NO: 72626 - RNA, 22 nt, Homo sapiens
uagggcauuuagaggcuauuaa

SEQ ID NO: 72627 - RNA, 22 nt, Homo sapiens
uaguuauggaguaauuuuaagc

SEQ ID NO: 72628 - RNA, 20 nt, Homo sapiens
uaguggcaugcaccuguagc

SEQ ID NO: 72629 - RNA, 22 nt, Homo sapiens
uaguuguugcagguaggaugua

SEQ ID NO: 72630 - RNA, 22 nt, Homo sapiens
gugggguaggaggaguacuucc

SEQ ID NO: 72631 - RNA, 22 nt, Homo sapiens
gucuggguuuguuuguacuugc

SEQ ID NO: 72632 - RNA, 22 nt, Homo sapiens
gucauggguuaaagguggauac

SEQ ID NO: 72633 - RNA, 22 nt, Homo sapiens
ggagucugauuuuuauguugcu

SEQ ID NO: 72634 - RNA, 22 nt, Homo sapiens
ggagauaauccagggagggacu

SEQ ID NO: 72635 - RNA, 18 nt, Homo sapiens
gggcaaguugccuggcuu

SEQ ID NO: 72636 - RNA, 22 nt, Homo sapiens
ggucauggauguuuauaguaca

SEQ ID NO: 72637 - RNA, 22 nt, Homo sapiens
ugacaggagauuaugugauguu

SEQ ID NO: 72638 - RNA, 22 nt, Homo sapiens
ugaauuguuucauucuuuacau

SEQ ID NO: 72639 - RNA, 22 nt, Homo sapiens
ugagacugagucuugcucuugu

SEQ ID NO: 72640 - RNA, 22 nt, Homo sapiens
ugagauuacguucggcccacuu

SEQ ID NO: 72641 - RNA, 22 nt, Homo sapiens
uggagugcgugucugaguuuuu

SEQ ID NO: 72642 - RNA, 22 nt, Homo sapiens
ucacugaaaccgccuccaccuc

SEQ ID NO: 72643 - RNA, 22 nt, Homo sapiens
ucuggguuuuuccauugccggu

SEQ ID NO: 72644 - RNA, 22 nt, Homo sapiens
ucuuggguggauucauucuuuc

SEQ ID NO: 72645 - RNA, 22 nt, Homo sapiens
ugaaaugucuuuaggaggcuuc

SEQ ID NO: 72646 - RNA, 22 nt, Homo sapiens
agaacuguccauucagcaugaa

SEQ ID NO: 72647 - RNA, 19 nt, Homo sapiens
acugagcuaccugggggca

SEQ ID NO: 72648 - RNA, 22 nt, Homo sapiens
agaaaugcagcaugaggcggca

SEQ ID NO: 72649 - RNA, 22 nt, Homo sapiens
aucuggguccguucugcuucuc

SEQ ID NO: 72650 - RNA, 22 nt, Homo sapiens
auagggcacgagaugugagccu

SEQ ID NO: 72651 - RNA, 22 nt, Homo sapiens
agugccuauugauggaaagaua

SEQ ID NO: 72652 - RNA, 22 nt, Homo sapiens
agugaacaaagaagugcagaua

SEQ ID NO: 72653 - RNA, 22 nt, Homo sapiens
agugagcuguuuuuacuuucug

SEQ ID NO: 72654 - RNA, 17 nt, Homo sapiens
cuaaggcaagagucugc

SEQ ID NO: 72655 - RNA, 22 nt, Homo sapiens
cagugcauccauguucagcagu

SEQ ID NO: 72656 - RNA, 18 nt, Homo sapiens
cagugcaauacaggagag

SEQ ID NO: 72657 - RNA, 22 nt, Homo sapiens
augugcuaguaucaaacgagac

SEQ ID NO: 72658 - RNA, 22 nt, Homo sapiens
auggcguguggcuuggaggcug

SEQ ID NO: 72659 - RNA, 21 nt, Homo sapiens
gagauagguaccgaagcuuag

SEQ ID NO: 72660 - RNA, 22 nt, Homo sapiens
gagagcuaggccacuggggcuu

SEQ ID NO: 72661 - RNA, 22 nt, Homo sapiens
gagaacugagauaagugauauu

SEQ ID NO: 72662 - RNA, 22 nt, Homo sapiens
gacuggcuguuuucuuuauuau

SEQ ID NO: 72663 - RNA, 20 nt, Homo sapiens
gauuagagagaggcugugca

SEQ ID NO: 72664 - RNA, 22 nt, Homo sapiens
gaguauuuuacaucguguaauu

SEQ ID NO: 72665 - RNA, 22 nt, Homo sapiens
gagguguaaggacaacagagac

SEQ ID NO: 72666 - RNA, 22 nt, Homo sapiens
gaggucaggacauuuuugcuuu

SEQ ID NO: 72667 - RNA, 22 nt, Homo sapiens
cuuggcuucuuuauguggcuau

SEQ ID NO: 72668 - RNA, 22 nt, Homo sapiens
cuggaguaugaaccauguauca

SEQ ID NO: 72669 - RNA, 22 nt, Homo sapiens
cuggagcauugguggauuuguu

SEQ ID NO: 72670 - RNA, 20 nt, Homo sapiens
cugaggugggagaaucgcuu

SEQ ID NO: 72671 - RNA, 22 nt, Homo sapiens
cugaggugggaggauuggcuug

SEQ ID NO: 72672 - RNA, 22 nt, Homo sapiens
cuuguuguggaggggagugcag

SEQ ID NO: 72673 - RNA, 22 nt, Homo sapiens
gauggcucugcaggugagggua

SEQ ID NO: 72674 - RNA, 22 nt, Homo sapiens
gaucagagugaaccuuguuaug

SEQ ID NO: 72675 - RNA, 22 nt, Homo sapiens
auguggauaucuauaucuggau

SEQ ID NO: 72676 - RNA, 22 nt, Homo sapiens
auggcugugaaaugguaggugg

SEQ ID NO: 72677 - RNA, 22 nt, Homo sapiens
cuaagggaggaagcugugcagg

SEQ ID NO: 72678 - RNA, 22 nt, Homo sapiens
agucauggaucacaguagccuc

SEQ ID NO: 72679 - RNA, 22 nt, Homo sapiens
aguggauuuuagacugagauuu

SEQ ID NO: 72680 - RNA, 20 nt, Homo sapiens
aucagagccggugaaagggc

SEQ ID NO: 72681 - RNA, 22 nt, Homo sapiens
augacuagaggagggauggcca

SEQ ID NO: 72682 - RNA, 22 nt, Homo sapiens
agaacuguccauucagcaugaa

SEQ ID NO: 72683 - RNA, 22 nt, Homo sapiens
agauggguuuucacauguuggc

SEQ ID NO: 72684 - RNA, 20 nt, Homo sapiens
aagugcuuccuuuuagaggg

SEQ ID NO: 72685 - RNA, 22 nt, Homo sapiens
ucugggguuuccacuuuuacuu

SEQ ID NO: 72686 - RNA, 22 nt, Homo sapiens
ucacagccuaguuuuauacauu

SEQ ID NO: 72687 - RNA, 21 nt, Homo sapiens
ucagaagcucccagggaggac

SEQ ID NO: 72688 - RNA, 22 nt, Homo sapiens
uggaauguggacucuuaugggg

SEQ ID NO: 72689 - RNA, 22 nt, Homo sapiens
ugaguggagaucgcaccauugc

SEQ ID NO: 72690 - RNA, 22 nt, Homo sapiens
ugagacugaguuuugcucuugu

SEQ ID NO: 72691 - RNA, 22 nt, Homo sapiens
ugagacggaguuucacucuugu

SEQ ID NO: 72692 - RNA, 22 nt, Homo sapiens
ggugccuacugugugucaggca

SEQ ID NO: 72693 - RNA, 22 nt, Homo sapiens
ggcaaguauguuuuaggaugcu

SEQ ID NO: 72694 - RNA, 22 nt, Homo sapiens
gcuguuugccgccaucgcagac

SEQ ID NO: 72695 - RNA, 22 nt, Homo sapiens
gugggguaggaggaguacuucc

SEQ ID NO: 72696 - RNA, 22 nt, Homo sapiens
gugggguaggguaggacucaac

SEQ ID NO: 72697 - RNA, 18 nt, Homo sapiens
uaggaacauugauuggag

SEQ ID NO: 72698 - RNA, 22 nt, Homo sapiens
gugguauaaguaccuccuuuca

SEQ ID NO: 72699 - RNA, 22 nt, Homo sapiens
uacugcaguugcagcuugagga

SEQ ID NO: 72700 - RNA, 22 nt, Homo sapiens
ugugagacugguucugaaccca

SEQ ID NO: 72701 - RNA, 19 nt, Homo sapiens
ugugauaguugaaccugcc

SEQ ID NO: 72702 - RNA, 22 nt, Homo sapiens
uugguaggcuggccucucucag

SEQ ID NO: 72703 - RNA, 22 nt, Homo sapiens
uucauggaguugagaaggcuaa

SEQ ID NO: 72704 - RNA, 22 nt, Homo sapiens
uauuguuuuucccaggagucua

SEQ ID NO: 72705 - RNA, 22 nt, Homo sapiens
uaugagacugguuaauuuuugu

SEQ ID NO: 72706 - RNA, 22 nt, Homo sapiens
guuggugaccugaagagaguaa

SEQ ID NO: 72707 - RNA, 22 nt, Homo sapiens
gguggugguauuucagaaaaug

SEQ ID NO: 72708 - RNA, 22 nt, Homo sapiens
ggaaagcuagguguggguguac

SEQ ID NO: 72709 - RNA, 22 nt, Homo sapiens
gggaacauggaaauucugcucu

SEQ ID NO: 72710 - RNA, 22 nt, Homo sapiens
gugggguagcaggcuccuaucu

SEQ ID NO: 72711 - RNA, 18 nt, Homo sapiens
gugucugguuaugggagu

SEQ ID NO: 72712 - RNA, 22 nt, Homo sapiens
gugaggaaggaaaccugcuagc

SEQ ID NO: 72713 - RNA, 17 nt, Homo sapiens
gugagguauccucaaaa

SEQ ID NO: 72714 - RNA, 22 nt, Homo sapiens
gugagacugguucugaacccag

SEQ ID NO: 72715 - RNA, 22 nt, Homo sapiens
gaaucauuguuucuaaguuugu

SEQ ID NO: 72716 - RNA, 22 nt, Homo sapiens
gagacagugucagccauugaaa

SEQ ID NO: 72717 - RNA, 22 nt, Homo sapiens
cugaggucugaauccagguauc

SEQ ID NO: 72718 - RNA, 22 nt, Homo sapiens
cugcaguaaccacuguaggugu

SEQ ID NO: 72719 - RNA, 22 nt, Homo sapiens
gcccacuguuaaauuuguuuua

SEQ ID NO: 72720 - RNA, 22 nt, Homo sapiens
gauauguguuuuagucaggguu

SEQ ID NO: 72721 - RNA, 22 nt, Homo sapiens
uuugaauggaaguuuugugaaa

SEQ ID NO: 72722 - RNA, 22 nt, Homo sapiens
uuugugagguggauagauugca

SEQ ID NO: 72723 - RNA, 22 nt, Homo sapiens
uuugugcaugaagagggggugc

SEQ ID NO: 72724 - RNA, 22 nt, Homo sapiens
uugugguaggcauguaagauga

SEQ ID NO: 72725 - RNA, 22 nt, Homo sapiens
uuguguaguaccucucacauug

SEQ ID NO: 72726 - RNA, 22 nt, Homo sapiens
uuggaacacauguuuuucuacc

SEQ ID NO: 72727 - RNA, 22 nt, Homo sapiens
uuggucaggcuaaucucgaacg

SEQ ID NO: 72728 - RNA, 18 nt, Homo sapiens
ugugauggauauguuaau

SEQ ID NO: 72729 - RNA, 22 nt, Homo sapiens
uguuuguuugugauacgguaca

SEQ ID NO: 72730 - RNA, 22 nt, Homo sapiens
uucaagauggcaccagugagug

SEQ ID NO: 72731 - RNA, 22 nt, Homo sapiens
ugacauguauuagcucagugcu

SEQ ID NO: 72732 - RNA, 22 nt, Homo sapiens
ugaccacagaaagugagggagc

SEQ ID NO: 72733 - RNA, 22 nt, Homo sapiens
ucuggguuuuuccauugccggu

SEQ ID NO: 72734 - RNA, 22 nt, Homo sapiens
ucaguagcauugcuuauacagu

SEQ ID NO: 72735 - RNA, 22 nt, Homo sapiens
ugaguaggauugguauuucuuc

SEQ ID NO: 72736 - RNA, 23 nt, Homo sapiens
ugaguagguccacguaugugagu

SEQ ID NO: 72737 - RNA, 22 nt, Homo sapiens
ugaggaguguauuucauucgcu

SEQ ID NO: 72738 - RNA, 21 nt, Homo sapiens
ugauaugguuuggauaugugu

SEQ ID NO: 72739 - RNA, 23 nt, Homo sapiens
ugggucaguuuuucugacaucau

SEQ ID NO: 72740 - RNA, 20 nt, Homo sapiens
ugggaacaugugguauaugg

SEQ ID NO: 72741 - RNA, 22 nt, Homo sapiens
uggacuguaaauuggggacucu

SEQ ID NO: 72742 - RNA, 22 nt, Homo sapiens
uggagagugauaaguaaaugga

SEQ ID NO: 72743 - RNA, 22 nt, Homo sapiens
agacucauuuuuaucgagcaug

SEQ ID NO: 72744 - RNA, 22 nt, Homo sapiens
augaggugcagaggaaaugagu

SEQ ID NO: 72745 - RNA, 22 nt, Homo sapiens
auuugguugggugcgguggcuu

SEQ ID NO: 72746 - RNA, 22 nt, Homo sapiens
auuugguuauucaguuguucag

SEQ ID NO: 72747 - RNA, 22 nt, Homo sapiens
cuauggcuguagucccugugua

SEQ ID NO: 72748 - RNA, 22 nt, Homo sapiens
ccugagacuugagggggcuucu

SEQ ID NO: 72749 - RNA, 22 nt, Homo sapiens
cauugggugagaacaugcuccu

SEQ ID NO: 72750 - RNA, 22 nt, Homo sapiens
gaucuguuucaauugucuuagu

SEQ ID NO: 72751 - RNA, 22 nt, Homo sapiens
gaggcaauaugagggaggcuuc

SEQ ID NO: 72752 - RNA, 20 nt, Homo sapiens
gcauaugucuuuauggcagc

SEQ ID NO: 72753 - RNA, 23 nt, Homo sapiens
cuguggauaugaguuguaaaugg

SEQ ID NO: 72754 - RNA, 22 nt, Homo sapiens
aguuccuacuggcuguaaagaa

SEQ ID NO: 72755 - RNA, 21 nt, Homo sapiens
auggugagaaaguagugucaa

SEQ ID NO: 72756 - RNA, 21 nt, Homo sapiens
augggguagaagagaaggcuu

SEQ ID NO: 72757 - RNA, 17 nt, Homo sapiens
augggguuguagcccca

SEQ ID NO: 72758 - RNA, 22 nt, Homo sapiens
augggguaggcuuugcugcagu

SEQ ID NO: 72759 - RNA, 18 nt, Homo sapiens
auggguguuggaaaauga

SEQ ID NO: 72760 - RNA, 22 nt, Homo sapiens
augucugguagccaccuggagg

SEQ ID NO: 72761 - RNA, 21 nt, Homo sapiens
auggacugugugacccugcac

SEQ ID NO: 72762 - RNA, 22 nt, Homo sapiens
augaggugaggucaguaaggua

SEQ ID NO: 72763 - RNA, 22 nt, Homo sapiens
agagguaagcaguggcaagugc

SEQ ID NO: 72764 - RNA, 22 nt, Homo sapiens
aaucugucaguuuuguguuaau

SEQ ID NO: 72765 - RNA, 22 nt, Homo sapiens
ggaauguaguaauuugguuagu

SEQ ID NO: 72766 - RNA, 22 nt, Homo sapiens
ggagugucagaaacaguguccu

SEQ ID NO: 72767 - RNA, 17 nt, Homo sapiens
gugagguggguaguauc

SEQ ID NO: 72768 - RNA, 22 nt, Homo sapiens
gugaggucguagucauaggcaa

SEQ ID NO: 72769 - RNA, 22 nt, Homo sapiens
gugaggucagggcuguggacag

SEQ ID NO: 72770 - RNA, 22 nt, Homo sapiens
guggaggagaaagaagcauuuc

SEQ ID NO: 72771 - RNA, 22 nt, Homo sapiens
guguaugguuguuguagagaga

SEQ ID NO: 72772 - RNA, 18 nt, Homo sapiens
guguauggauggaggcca

SEQ ID NO: 72773 - RNA, 22 nt, Homo sapiens
uagagguaggucuucgagucuc

SEQ ID NO: 72774 - RNA, 22 nt, Homo sapiens
uagaggaaugaauuuggccaga

SEQ ID NO: 72775 - RNA, 22 nt, Homo sapiens
uaagguccuuaaauguguaacc

SEQ ID NO: 72776 - RNA, 22 nt, Homo sapiens
uagcaggaaaggggucagaucu

SEQ ID NO: 72777 - RNA, 22 nt, Homo sapiens
uauugguuacuguugaucgcca

SEQ ID NO: 72778 - RNA, 22 nt, Homo sapiens
uggacuguaagugccuugagua

SEQ ID NO: 72779 - RNA, 22 nt, Homo sapiens
uggagguagagaugggaucucc

SEQ ID NO: 72780 - RNA, 22 nt, Homo sapiens
uggagguaggacgaagaacucu

SEQ ID NO: 72781 - RNA, 22 nt, Homo sapiens
uggggugugagggagaaagaaa

SEQ ID NO: 72782 - RNA, 22 nt, Homo sapiens
ugggguaggccugguuaugugc

SEQ ID NO: 72783 - RNA, 22 nt, Homo sapiens
ugggcggagacgugcagccgcc

SEQ ID NO: 72784 - RNA, 22 nt, Homo sapiens
ugggaucgucaagugaggcucg

SEQ ID NO: 72785 - RNA, 22 nt, Homo sapiens
ugagacggagucuggcacuguc

SEQ ID NO: 72786 - RNA, 22 nt, Homo sapiens
ugaggaauguguguuaaagaua

SEQ ID NO: 72787 - RNA, 22 nt, Homo sapiens
ugaggaguauguucuguagacc

SEQ ID NO: 72788 - RNA, 22 nt, Homo sapiens
ugagguaagauguucauuuuuc

SEQ ID NO: 72789 - RNA, 22 nt, Homo sapiens
ucuuuggucaucaugggaagca

SEQ ID NO: 72790 - RNA, 19 nt, Homo sapiens
ucuuugguacgugcuuuga

SEQ ID NO: 72791 - RNA, 22 nt, Homo sapiens
ucuuuggugaauggucauccag

SEQ ID NO: 72792 - RNA, 22 nt, Homo sapiens
ugacggaggcauuggaagcuug

SEQ ID NO: 72793 - RNA, 22 nt, Homo sapiens
ugacggaggacaccugcggaau

SEQ ID NO: 72794 - RNA, 22 nt, Homo sapiens
uccugagacugaggagcuuugg

SEQ ID NO: 72795 - RNA, 22 nt, Homo sapiens
uuugucccuuugcaguggcaca

SEQ ID NO: 72796 - RNA, 22 nt, Homo sapiens
uuuggaagaugccacuguauca

SEQ ID NO: 72797 - RNA, 22 nt, Homo sapiens
uugauagguuuuauguauaguu

SEQ ID NO: 72798 - RNA, 22 nt, Homo sapiens
uuguauaguucuauguguuuug

SEQ ID NO: 72799 - RNA, 22 nt, Homo sapiens
uguguuugauaaguccauaguu

SEQ ID NO: 72800 - RNA, 22 nt, Homo sapiens
ugucauggauucugagucuggg

SEQ ID NO: 72801 - RNA, 22 nt, Homo sapiens
uuauuugguugcugacuuggaa

SEQ ID NO: 72802 - RNA, 22 nt, Homo sapiens
uuuucaguggccauaguggaga

SEQ ID NO: 72803 - RNA, 22 nt, Homo sapiens
gaggaguauuuugucgaauguc

SEQ ID NO: 72804 - RNA, 22 nt, Homo sapiens
gaggcaaguggccaccgagucu

SEQ ID NO: 72805 - RNA, 22 nt, Homo sapiens
gagcacugaauacugugguggu

SEQ ID NO: 72806 - RNA, 22 nt, Homo sapiens
gacuuugguaaacucgguggca

SEQ ID NO: 72807 - RNA, 23 nt, Homo sapiens
cuguggugaggcccuagaaucug

SEQ ID NO: 72808 - RNA, 22 nt, Homo sapiens
ggagaucuuuaggaguuggacu

SEQ ID NO: 72809 - RNA, 22 nt, Homo sapiens
gcugagguucaagaagguuaaa

SEQ ID NO: 72810 - RNA, 22 nt, Homo sapiens
gauguguuuguuucuggaggag

SEQ ID NO: 72811 - RNA, 20 nt, Homo sapiens
gcaugagucuuuauaguaga

SEQ ID NO: 72812 - RNA, 22 nt, Homo sapiens
cauggguuuucucaaguaguca

SEQ ID NO: 72813 - RNA, 22 nt, Homo sapiens
cugagguaauuuuccagauaau

SEQ ID NO: 72814 - RNA, 22 nt, Homo sapiens
cucgagagaaaaugcuucacug

SEQ ID NO: 72815 - RNA, 22 nt, Homo sapiens
cugggaucaguucuagucagaa

SEQ ID NO: 72816 - RNA, 22 nt, Homo sapiens
cugggguaggacuggcuuuuga

SEQ ID NO: 72817 - RNA, 22 nt, Homo sapiens
cuggugagaugucuuuccucuu

SEQ ID NO: 72818 - RNA, 22 nt, Homo sapiens
cauugguuuuucaggaguauau

SEQ ID NO: 72819 - RNA, 22 nt, Homo sapiens
cgugaggaaaacagaggguguu

SEQ ID NO: 72820 - RNA, 22 nt, Homo sapiens
uagauuguaauaugcagaaugg

SEQ ID NO: 72821 - RNA, 22 nt, Homo sapiens
ugagacggaguuuugcucuugu

SEQ ID NO: 72822 - RNA, 22 nt, Homo sapiens
ugagacgucuucucuucuucaa

SEQ ID NO: 72823 - RNA, 22 nt, Homo sapiens
ugagacugagucucgcucuugu

SEQ ID NO: 72824 - RNA, 22 nt, Homo sapiens
ugagacugagucuugcucuugu

SEQ ID NO: 72825 - RNA, 22 nt, Homo sapiens
ugagacugaguuucacuuuugu

SEQ ID NO: 72826 - RNA, 22 nt, Homo sapiens
ugagacggagucucgcucuguc

SEQ ID NO: 72827 - RNA, 22 nt, Homo sapiens
ugagacggagucucgcuguguc

SEQ ID NO: 72828 - RNA, 22 nt, Homo sapiens
ugagacggagucuugcuaaguu

SEQ ID NO: 72829 - RNA, 22 nt, Homo sapiens
ucuuugguaugugcaugugcuu

SEQ ID NO: 72830 - RNA, 22 nt, Homo sapiens
ugggguagaauagaauugauau

SEQ ID NO: 72831 - RNA, 22 nt, Homo sapiens
uguauagaucugauucaucucc

SEQ ID NO: 72832 - RNA, 22 nt, Homo sapiens
ugucauggggaaaauaacagac

SEQ ID NO: 72833 - RNA, 18 nt, Homo sapiens
ugucagaguggauuguaa

SEQ ID NO: 72834 - RNA, 18 nt, Homo sapiens
uggaauguuuggguuaau

SEQ ID NO: 72835 - RNA, 22 nt, Homo sapiens
ugaggucauguucugucagguu

SEQ ID NO: 72836 - RNA, 22 nt, Homo sapiens
uuguuuuggagaugagcuaaaa

SEQ ID NO: 72837 - RNA, 21 nt, Homo sapiens
uugucuagagaaauauaucuc

SEQ ID NO: 72838 - RNA, 22 nt, Homo sapiens
uuggagagaaaggcaguuccug

SEQ ID NO: 72839 - RNA, 22 nt, Homo sapiens
uuggagagagaggacucccggc

SEQ ID NO: 72840 - RNA, 22 nt, Homo sapiens
uuggagagugauauucagaugc

SEQ ID NO: 72841 - RNA, 22 nt, Homo sapiens
uugguaagguggaugaugaaua

SEQ ID NO: 72842 - RNA, 22 nt, Homo sapiens
uuuguccccgcccagaucucau

SEQ ID NO: 72843 - RNA, 22 nt, Homo sapiens
ugugauaguugcuguucugggc

SEQ ID NO: 72844 - RNA, 23 nt, Homo sapiens
aagugagcuccaauugggugaga

SEQ ID NO: 72845 - RNA, 22 nt, Homo sapiens
aagcuggcuuucauugagugcu

SEQ ID NO: 72846 - RNA, 22 nt, Homo sapiens
aguggguguuccauuggauaaa

SEQ ID NO: 72847 - RNA, 19 nt, Homo sapiens
aguggguguuuucuguuug

SEQ ID NO: 72848 - RNA, 17 nt, Homo sapiens
auaugucugcuggggga

SEQ ID NO: 72849 - RNA, 22 nt, Homo sapiens
auggcauggugcaggguuuaag

SEQ ID NO: 72850 - RNA, 22 nt, Homo sapiens
auggauuuguaguacaugguug

SEQ ID NO: 72851 - RNA, 22 nt, Homo sapiens
gugacauuuuuacugaugagag

SEQ ID NO: 72852 - RNA, 22 nt, Homo sapiens
ugucacugugcagucaugcauu

SEQ ID NO: 72853 - RNA, 22 nt, Homo sapiens
augacauugaugcucuggcugg

SEQ ID NO: 72854 - RNA, 21 nt, Homo sapiens
ugaaugucuaggcagaaguuu

SEQ ID NO: 72855 - RNA, 22 nt, Homo sapiens
agcacagugguuaaguuucuua

SEQ ID NO: 72856 - RNA, 22 nt, Homo sapiens
uuuaaugcgucucugaguuuug

SEQ ID NO: 72857 - RNA, 22 nt, Homo sapiens
aaugugcacuauuagggugaua

SEQ ID NO: 72858 - RNA, 21 nt, Homo sapiens
aaucacaguuguucugccuuc

SEQ ID NO: 72859 - RNA, 21 nt, Homo sapiens
ugcucaugaguaaugcaguga

SEQ ID NO: 72860 - RNA, 22 nt, Homo sapiens
ugaauagacacuaaagacugua

SEQ ID NO: 72861 - RNA, 22 nt, Homo sapiens
ugugcaaggcucucaaccugug

SEQ ID NO: 72862 - RNA, 22 nt, Homo sapiens
aauacagcacacagaugggucu

SEQ ID NO: 72863 - RNA, 22 nt, Homo sapiens
uuauuagguuagugcaaaaguu

SEQ ID NO: 72864 - RNA, 22 nt, Homo sapiens
augugcagauguuacaaauugu

SEQ ID NO: 72865 - RNA, 22 nt, Homo sapiens
ugaaauacuuuggcucuuuguu

SEQ ID NO: 72866 - RNA, 22 nt, Homo sapiens
cuuugcaaauggccuuuccaag

SEQ ID NO: 72867 - RNA, 22 nt, Homo sapiens
uucaaguagguaggaccacagg

SEQ ID NO: 72868 - RNA, 22 nt, Homo sapiens
gcaagaaugagaaggauuaauu

SEQ ID NO: 72869 - RNA, 22 nt, Homo sapiens
auaaaugcaaugguauuuuuga

SEQ ID NO: 72870 - RNA, 22 nt, Homo sapiens
agugaacaaagaagugcagaua

SEQ ID NO: 72871 - RNA, 22 nt, Homo sapiens
uuaauguaucuaucacaucaca

SEQ ID NO: 72872 - RNA, 22 nt, Homo sapiens
acaguguguguguucaccuaga

SEQ ID NO: 72873 - RNA, 22 nt, Homo sapiens
acugcacuccagccucgcaaca

SEQ ID NO: 72874 - RNA, 22 nt, Homo sapiens
gucagcuuguccagagacucug

SEQ ID NO: 72875 - RNA, 22 nt, Homo sapiens
ugucaaugggaauuuguuuuag

SEQ ID NO: 72876 - RNA, 22 nt, Homo sapiens
agcaccacaauuuccugccuaa

SEQ ID NO: 72877 - RNA, 22 nt, Homo sapiens
agucauggaucacaguagccuc

SEQ ID NO: 72878 - RNA, 22 nt, Homo sapiens
uuaaugaacuuuauuuuguaga

SEQ ID NO: 72879 - RNA, 22 nt, Homo sapiens
uugacauugcuguaguguccag

SEQ ID NO: 72880 - RNA, 22 nt, Homo sapiens
ccauuucacucuuccugaagga

SEQ ID NO: 72881 - RNA, 22 nt, Homo sapiens
gugucaguggggagugaucuuc

SEQ ID NO: 72882 - RNA, 22 nt, Homo sapiens
ugggaagaugcugcuucuuccu

SEQ ID NO: 72883 - RNA, 22 nt, Homo sapiens
uuggcagcuguggaaucugggc

SEQ ID NO: 72884 - RNA, 22 nt, Homo sapiens
cacagucuugcaauauugagau

SEQ ID NO: 72885 - RNA, 20 nt, Homo sapiens
ucacuggagcucauuugauu

SEQ ID NO: 72886 - RNA, 22 nt, Homo sapiens
acagugcuuggcacacaguaau

SEQ ID NO: 72887 - RNA, 22 nt, Homo sapiens
agcauuaguugugaagccuuua

SEQ ID NO: 72888 - RNA, 22 nt, Homo sapiens
gagcugaauugcugccauuugc

SEQ ID NO: 72889 - RNA, 22 nt, Homo sapiens
aagcuggauuuaguguggagca

SEQ ID NO: 72890 - RNA, 22 nt, Homo sapiens
guggaagugucuggggccaggg

SEQ ID NO: 72891 - RNA, 22 nt, Homo sapiens
aacacggcccgcagagcaagcu

SEQ ID NO: 72892 - RNA, 22 nt, Homo sapiens
caggugcauuggcugacaccug

SEQ ID NO: 72893 - RNA, 22 nt, Homo sapiens
ugucaguuuuaacuagggaaua

SEQ ID NO: 72894 - RNA, 22 nt, Homo sapiens
uugacuucagagcugauucaag

SEQ ID NO: 72895 - RNA, 22 nt, Homo sapiens
auuguguagucuuacugcuugc

SEQ ID NO: 72896 - RNA, 22 nt, Homo sapiens
cacagugaaugucaucauugcc

SEQ ID NO: 72897 - RNA, 23 nt, Homo sapiens
ucacaguggcugcuuaauuguga

SEQ ID NO: 72898 - RNA, 22 nt, Homo sapiens
cuuuaguugucuccucaagggu

SEQ ID NO: 72899 - RNA, 22 nt, Homo sapiens
cacacugucuucaauggguggu

SEQ ID NO: 72900 - RNA, 18 nt, Homo sapiens
gauaacaguggacuaugc

SEQ ID NO: 72901 - RNA, 22 nt, Homo sapiens
uaaagcacaaguaaagaauacu

SEQ ID NO: 72902 - RNA, 22 nt, Homo sapiens
cuuuguguaggugccucuggcu

SEQ ID NO: 72903 - RNA, 18 nt, Homo sapiens
accuucauuccuuugccu

SEQ ID NO: 72904 - RNA, 19 nt, Homo sapiens
acugcacuccaaccuccug

SEQ ID NO: 72905 - RNA, 22 nt, Homo sapiens
uaccagugucagcuuccugugu

SEQ ID NO: 72906 - RNA, 22 nt, Homo sapiens
acacuguuuuguggagaaugua

SEQ ID NO: 72907 - RNA, 22 nt, Homo sapiens
aagccagugugacaggaaacuu

SEQ ID NO: 72908 - RNA, 22 nt, Homo sapiens
gucauggaggaugaauggccaa

SEQ ID NO: 72909 - RNA, 20 nt, Homo sapiens
cagucaugaagaacugugag

SEQ ID NO: 72910 - RNA, 22 nt, Homo sapiens
uagcagcaucucuggcuucuac

SEQ ID NO: 72911 - RNA, 22 nt, Homo sapiens
uugagguagugucuuguucugu

SEQ ID NO: 72912 - RNA, 22 nt, Homo sapiens
aagcaucacauaauggaucaug

SEQ ID NO: 72913 - RNA, 22 nt, Homo sapiens
uuaugucacuguucagucuccc

SEQ ID NO: 72914 - RNA, 22 nt, Homo sapiens
cucugacagugguuagcacugu

SEQ ID NO: 72915 - RNA, 22 nt, Homo sapiens
uaaagcacuuuuuucugcaugg

SEQ ID NO: 72916 - RNA, 22 nt, Homo sapiens
cuuuguguggacauuucaggca

SEQ ID NO: 72917 - RNA, 22 nt, Homo sapiens
cuacaguucuuaauuaaguagu

SEQ ID NO: 72918 - RNA, 22 nt, Homo sapiens
aagauauguuaguuauaaacuc

SEQ ID NO: 72919 - RNA, 23 nt, Homo sapiens
ggaaugaaaccugguuaugauau

SEQ ID NO: 72920 - RNA, 22 nt, Homo sapiens
acugcacuccagccuccugaca

SEQ ID NO: 72921 - RNA, 22 nt, Homo sapiens
auguugcaguuuaauuauccua

SEQ ID NO: 72922 - RNA, 22 nt, Homo sapiens
uucagagagggagggauaccua

SEQ ID NO: 72923 - RNA, 22 nt, Homo sapiens
aagugaaugugcuggaauagcu

SEQ ID NO: 72924 - RNA, 17 nt, Homo sapiens
guggauagaacaaugaa

SEQ ID NO: 72925 - RNA, 22 nt, Homo sapiens
ugagaucuuggaggcuuuguga

SEQ ID NO: 72926 - RNA, 22 nt, Homo sapiens
ucucaguguuaucuaucugccu

SEQ ID NO: 72927 - RNA, 22 nt, Homo sapiens
cuuuacaguuggacucacgagg

SEQ ID NO: 72928 - RNA, 17 nt, Homo sapiens
aguacugucccauccuu

SEQ ID NO: 72929 - RNA, 22 nt, Homo sapiens
ucauauguaugugcaauuuugu

SEQ ID NO: 72930 - RNA, 22 nt, Homo sapiens
uggaaugucagcuacaagaggg

SEQ ID NO: 72931 - RNA, 22 nt, Homo sapiens
auugcacuccagccuuggggau

SEQ ID NO: 72932 - RNA, 22 nt, Homo sapiens
auauuggccuaaaauucucuuu

SEQ ID NO: 72933 - RNA, 22 nt, Homo sapiens
ugugaugugaugagaaguuccu

SEQ ID NO: 72934 - RNA, 18 nt, Homo sapiens
uguaaacuaccucaaccu

SEQ ID NO: 72935 - RNA, 22 nt, Homo sapiens
auaguacuauugcaguguuaua

SEQ ID NO: 72936 - RNA, 22 nt, Homo sapiens
auguggcauuucucauucauuu

SEQ ID NO: 72937 - RNA, 22 nt, Homo sapiens
ugucaccauuuguaggugagga

SEQ ID NO: 72938 - RNA, 22 nt, Homo sapiens
agaaugucaguauuggcuaaaa

SEQ ID NO: 72939 - RNA, 22 nt, Homo sapiens
auuagguagugagaugcugcug

SEQ ID NO: 72940 - RNA, 22 nt, Homo sapiens
gucaauguaucuagcuguauua

SEQ ID NO: 72941 - RNA, 22 nt, Homo sapiens
aaugacuaagaugguacauuuu

SEQ ID NO: 72942 - RNA, 22 nt, Homo sapiens
uugaagugaagaacaauaucac

SEQ ID NO: 72943 - RNA, 22 nt, Homo sapiens
uguaguuugaaagcucccucug

SEQ ID NO: 72944 - RNA, 22 nt, Homo sapiens
cugucaucauuucuaugugcca

SEQ ID NO: 72945 - RNA, 22 nt, Homo sapiens
auuacuuugcaccaaccuaaua

SEQ ID NO: 72946 - RNA, 22 nt, Homo sapiens
uuuguacucccuuuagauaaaa

SEQ ID NO: 72947 - RNA, 22 nt, Homo sapiens
ugugcaaucagcuucauuacau

SEQ ID NO: 72948 - RNA, 22 nt, Homo sapiens
cugaauagagcacacugauggg

SEQ ID NO: 72949 - RNA, 21 nt, Homo sapiens
gugguucuagagaaacagaau

SEQ ID NO: 72950 - RNA, 22 nt, Homo sapiens
ugugaugguuuagcauuuucuu

SEQ ID NO: 72951 - RNA, 22 nt, Homo sapiens
gauagugaaccaagggguaauu

SEQ ID NO: 72952 - RNA, 19 nt, Homo sapiens
ugcagcaauguaaaagaca

SEQ ID NO: 72953 - RNA, 22 nt, Homo sapiens
gugacauuauuucagcuacaug

SEQ ID NO: 72954 - RNA, 22 nt, Homo sapiens
acugcacuccagccuccugggu

SEQ ID NO: 72955 - RNA, 22 nt, Homo sapiens
cucaugcugucuucugggguaa

SEQ ID NO: 72956 - RNA, 21 nt, Homo sapiens
caugucacugcacucuagccu

SEQ ID NO: 72957 - RNA, 22 nt, Homo sapiens
uuuugcuugugaauagccacau

SEQ ID NO: 72958 - RNA, 22 nt, Homo sapiens
ggaaugggauuugaagucuggc

SEQ ID NO: 72959 - RNA, 22 nt, Homo sapiens
uuagaacaguguuugccucgcu

SEQ ID NO: 72960 - RNA, 22 nt, Homo sapiens
uagcagcauaaauggacuaaga

SEQ ID NO: 72961 - RNA, 22 nt, Homo sapiens
ggaagacaguguggugauuccu

SEQ ID NO: 72962 - RNA, 22 nt, Homo sapiens
aucacuggucaugagagaagua

SEQ ID NO: 72963 - RNA, 23 nt, Homo sapiens
uggcauuuuaguuagcuucagug

SEQ ID NO: 72964 - RNA, 22 nt, Homo sapiens
aagcuggagugcaguggugcaa

SEQ ID NO: 72965 - RNA, 22 nt, Homo sapiens
agcuauauugaggaugccauuc

SEQ ID NO: 72966 - RNA, 22 nt, Homo sapiens
gcaagaaucugggaguaaaauu

SEQ ID NO: 72967 - RNA, 22 nt, Homo sapiens
aucucaguuaauuccaucuuuc

SEQ ID NO: 72968 - RNA, 22 nt, Homo sapiens
uaacauagucauauacuugcuu

SEQ ID NO: 72969 - RNA, 22 nt, Homo sapiens
ggcuagaauagggauagaccuu

SEQ ID NO: 72970 - RNA, 22 nt, Homo sapiens
cagagaacauucagagcuguag

SEQ ID NO: 72971 - RNA, 22 nt, Homo sapiens
aauguguuuugaaaucaggaag

SEQ ID NO: 72972 - RNA, 22 nt, Homo sapiens
ugauguguuuuguaguucaacu

SEQ ID NO: 72973 - RNA, 22 nt, Homo sapiens
auugcucuuagaaauauuucuu

SEQ ID NO: 72974 - RNA, 22 nt, Homo sapiens
uacucugcagagaugcauaaca

SEQ ID NO: 72975 - RNA, 22 nt, Homo sapiens
gugcuauguuauccagcaagau

SEQ ID NO: 72976 - RNA, 22 nt, Homo sapiens
uauugaacgugggauauugaag

SEQ ID NO: 72977 - RNA, 17 nt, Homo sapiens
guggaaugucaugucaa

SEQ ID NO: 72978 - RNA, 18 nt, Homo sapiens
cccagugacuuauggccu

SEQ ID NO: 72979 - RNA, 22 nt, Homo sapiens
acugcacugucaaccuccuggg

SEQ ID NO: 72980 - RNA, 22 nt, Homo sapiens
acugcacuccagccugcccaac

SEQ ID NO: 72981 - RNA, 22 nt, Homo sapiens
uuaugucauuuuuggauguuaa

SEQ ID NO: 72982 - RNA, 22 nt, Homo sapiens
aagcugugucuugucagcuacc

SEQ ID NO: 72983 - RNA, 22 nt, Homo sapiens
gugaagugugaccucagcaucu

SEQ ID NO: 72984 - RNA, 22 nt, Homo sapiens
ugugaacauuuuguauauauua

SEQ ID NO: 72985 - RNA, 22 nt, Homo sapiens
uuuaucuguuuaaaacuguuca

SEQ ID NO: 72986 - RNA, 23 nt, Homo sapiens
auuccaguggcaauuggagaaac

SEQ ID NO: 72987 - RNA, 22 nt, Homo sapiens
accuucauuguugccaugucca

SEQ ID NO: 72988 - RNA, 22 nt, Homo sapiens
cacacugucuucauuacuguag

SEQ ID NO: 72989 - RNA, 22 nt, Homo sapiens
cuuugugugggccaagggcugg

SEQ ID NO: 72990 - RNA, 22 nt, Homo sapiens
acugcacuccagccugccgaca

SEQ ID NO: 72991 - RNA, 22 nt, Homo sapiens
cuucaucugguuugugaacuuu

SEQ ID NO: 72992 - RNA, 22 nt, Homo sapiens
aauagcacuguagauggaggaa

SEQ ID NO: 72993 - RNA, 22 nt, Homo sapiens
augaaaucuuuggcagaucuua

SEQ ID NO: 72994 - RNA, 22 nt, Homo sapiens
agcagcaauuuuguaugguuua

SEQ ID NO: 72995 - RNA, 22 nt, Homo sapiens
ugcuauguuuucccuccuuauc

SEQ ID NO: 72996 - RNA, 22 nt, Homo sapiens
augacauugaaaagcaagugga

SEQ ID NO: 72997 - RNA, 20 nt, Homo sapiens
augcaaacccugcuuugugg

SEQ ID NO: 72998 - RNA, 22 nt, Homo sapiens
cuagcagcaugagaauggacca

SEQ ID NO: 72999 - RNA, 22 nt, Homo sapiens
uuccaguaauagcacagcauug

SEQ ID NO: 73000 - RNA, 22 nt, Homo sapiens
cucuuugaugugaaccgugguu

SEQ ID NO: 73001 - RNA, 20 nt, Homo sapiens
uucacugggcucucuguugg

SEQ ID NO: 73002 - RNA, 22 nt, Homo sapiens
uacuagaguagugcagagggga

SEQ ID NO: 73003 - RNA, 22 nt, Homo sapiens
agagaugaagauggggcucccg

SEQ ID NO: 73004 - RNA, 22 nt, Homo sapiens
ugucaguggacugugaaaggca

SEQ ID NO: 73005 - RNA, 22 nt, Homo sapiens
ucaaagugacaaaguugcagca

SEQ ID NO: 73006 - RNA, 20 nt, Homo sapiens
ugggaacaugugguauaugg

SEQ ID NO: 73007 - RNA, 22 nt, Homo sapiens
gcaagaauggaacaggagagcc

SEQ ID NO: 73008 - RNA, 22 nt, Homo sapiens
ugggaagaagguuuacuugcca

SEQ ID NO: 73009 - RNA, 22 nt, Homo sapiens
ugaaaugauuauaugguguuug

SEQ ID NO: 73010 - RNA, 17 nt, Homo sapiens
ugaggcacuaguaucac

SEQ ID NO: 73011 - RNA, 22 nt, Homo sapiens
uuauuagguugguggaaaagua

SEQ ID NO: 73012 - RNA, 22 nt, Homo sapiens
acugcacuccagccugcugaca

SEQ ID NO: 73013 - RNA, 22 nt, Homo sapiens
cugugcauguaugcgugaguuc

SEQ ID NO: 73014 - RNA, 22 nt, Homo sapiens
auggagacaaauaaaggagagu

SEQ ID NO: 73015 - RNA, 22 nt, Homo sapiens
augacauuccacagccguagag

SEQ ID NO: 73016 - RNA, 22 nt, Homo sapiens
gaaucauuguuucuaaguuugu

SEQ ID NO: 73017 - RNA, 22 nt, Homo sapiens
auaagaagugaaccagacgucu

SEQ ID NO: 73018 - RNA, 22 nt, Homo sapiens
uuauuagguuaaccuauagcua

SEQ ID NO: 73019 - RNA, 21 nt, Homo sapiens
uuuacuguggacccauugcuu

SEQ ID NO: 73020 - RNA, 22 nt, Homo sapiens
guuaggcagugugguauagcag

SEQ ID NO: 73021 - RNA, 22 nt, Homo sapiens
uguaaugaucaaaucagaguaa

SEQ ID NO: 73022 - RNA, 22 nt, Homo sapiens
guggaaugaaaacucucucaca

SEQ ID NO: 73023 - RNA, 22 nt, Homo sapiens
gucagcaucaccaugucuauga

SEQ ID NO: 73024 - RNA, 22 nt, Homo sapiens
gaagaucacacuguagaucuau

SEQ ID NO: 73025 - RNA, 22 nt, Homo sapiens
ggcagcauugccuuugcaguga

SEQ ID NO: 73026 - RNA, 22 nt, Homo sapiens
auugaacaugccauauguacca

SEQ ID NO: 73027 - RNA, 22 nt, Homo sapiens
uccauaguacuagaaacugacc

SEQ ID NO: 73028 - RNA, 22 nt, Homo sapiens
agugucaggagacagguagcug

SEQ ID NO: 73029 - RNA, 22 nt, Homo sapiens
acacagucaaauccacuuggcu

SEQ ID NO: 73030 - RNA, 22 nt, Homo sapiens
cugacauuguugaucacagcca

SEQ ID NO: 73031 - RNA, 22 nt, Homo sapiens
caacucuguaggauccaggugg

SEQ ID NO: 73032 - RNA, 22 nt, Homo sapiens
gaaugaauguuuauccuuagau

SEQ ID NO: 73033 - RNA, 22 nt, Homo sapiens
cacacuguuuuccauggggguu

SEQ ID NO: 73034 - RNA, 22 nt, Homo sapiens
cacaguguuccagcuauuugaa

SEQ ID NO: 73035 - RNA, 20 nt, Homo sapiens
cuucacagaaguggaaucau

SEQ ID NO: 73036 - RNA, 22 nt, Homo sapiens
cacugggccaucacuuaauauu

SEQ ID NO: 73037 - RNA, 19 nt, Homo sapiens
caccagugcaugcuacuau

SEQ ID NO: 73038 - RNA, 22 nt, Homo sapiens
gagaacauuuaagccacucagg

SEQ ID NO: 73039 - RNA, 22 nt, Homo sapiens
auguggcacuugacuuucucgc

SEQ ID NO: 73040 - RNA, 22 nt, Homo sapiens
cugaggaaguucuuuaacaguu

SEQ ID NO: 73041 - RNA, 22 nt, Homo sapiens
aagcuggagugcaguggugcga

SEQ ID NO: 73042 - RNA, 22 nt, Homo sapiens
gggcaugaugucuuaugccuau

SEQ ID NO: 73043 - RNA, 22 nt, Homo sapiens
uugagggaggccucaguuuaca

SEQ ID NO: 73044 - RNA, 22 nt, Homo sapiens
gcaaaguaauuguuguuuuugc

SEQ ID NO: 73045 - RNA, 22 nt, Homo sapiens
uucaagucaacaagcacuugag

SEQ ID NO: 73046 - RNA, 22 nt, Homo sapiens
ugcaccacugcacugccugggu

SEQ ID NO: 73047 - RNA, 22 nt, Homo sapiens
ugcuggcguuacucuccaucag

SEQ ID NO: 73048 - RNA, 22 nt, Homo sapiens
ccucacaaccuuuauugaagag

SEQ ID NO: 73049 - RNA, 22 nt, Homo sapiens
ucccaguggucuugaaacaggg

SEQ ID NO: 73050 - RNA, 22 nt, Homo sapiens
augugcacaugcuuacauguga

SEQ ID NO: 73051 - RNA, 22 nt, Homo sapiens
cugauaguucucuuuagaguuu

SEQ ID NO: 73052 - RNA, 17 nt, Homo sapiens
auaugaauuuuggagau

SEQ ID NO: 73053 - RNA, 22 nt, Homo sapiens
caaagcacuuggcuuggaagau

SEQ ID NO: 73054 - RNA, 21 nt, Homo sapiens
aagaaagcuggacuugccgcu

SEQ ID NO: 73055 - RNA, 22 nt, Homo sapiens
augagauauuuuauaagaucau

SEQ ID NO: 73056 - RNA, 22 nt, Homo sapiens
aucccaguaaaaauggcuucua

SEQ ID NO: 73057 - RNA, 22 nt, Homo sapiens
aucacagaacuuugagcagaga

SEQ ID NO: 73058 - RNA, 22 nt, Homo sapiens
cuggcaaauguuuucuguaaag

SEQ ID NO: 73059 - RNA, 22 nt, Homo sapiens
cacacugucuuucagaaugguu

SEQ ID NO: 73060 - RNA, 22 nt, Homo sapiens
auuguacuccagccuuggggac

SEQ ID NO: 73061 - RNA, 22 nt, Homo sapiens
auugucauuuucugagaaguaa

SEQ ID NO: 73062 - RNA, 22 nt, Homo sapiens
agaaugucagcuggauucagcu

SEQ ID NO: 73063 - RNA, 22 nt, Homo sapiens
uugaggucuuugagcaaacgca

SEQ ID NO: 73064 - RNA, 22 nt, Homo sapiens
cccaguuuugccacuuacuagc

SEQ ID NO: 73065 - RNA, 19 nt, Homo sapiens
augaguuaggggaaauuuc

SEQ ID NO: 73066 - RNA, 22 nt, Homo sapiens
uugcuagaugaaaaugguaccu

SEQ ID NO: 73067 - RNA, 22 nt, Homo sapiens
auagagcuaccauagaauccag

SEQ ID NO: 73068 - RNA, 22 nt, Homo sapiens
ugucauucaggaaauucuaagu

SEQ ID NO: 73069 - RNA, 22 nt, Homo sapiens
ugucaguguacuguaagaauua

SEQ ID NO: 73070 - RNA, 22 nt, Homo sapiens
uuuaauguuacaguauugguau

SEQ ID NO: 73071 - RNA, 22 nt, Homo sapiens
uucacagugugaucuaugggca

SEQ ID NO: 73072 - RNA, 22 nt, Homo sapiens
uugcuucauucaacauugaggg

SEQ ID NO: 73073 - RNA, 22 nt, Homo sapiens
cagugucugcauuuggaacuca

SEQ ID NO: 73074 - RNA, 22 nt, Homo sapiens
uagacacuagauaugugacuga

SEQ ID NO: 73075 - RNA, 22 nt, Homo sapiens
agcaagauuguucccauuuucu

SEQ ID NO: 73076 - RNA, 22 nt, Homo sapiens
ggcagcaugggugccuuuguga

SEQ ID NO: 73077 - RNA, 22 nt, Homo sapiens
ucagaccauuucauuacagacu

SEQ ID NO: 73078 - RNA, 22 nt, Homo sapiens
cucaaagugcuaagauuaggcu

SEQ ID NO: 73079 - RNA, 22 nt, Homo sapiens
cuacagaguaucuaaagaggua

SEQ ID NO: 73080 - RNA, 22 nt, Homo sapiens
gcuuuguugauggugagucugu

SEQ ID NO: 73081 - RNA, 20 nt, Homo sapiens
uggucaccuucaggagguuc

SEQ ID NO: 73082 - RNA, 22 nt, Homo sapiens
auaaauaguaguugugguggcc

SEQ ID NO: 73083 - RNA, 22 nt, Homo sapiens
aauacuuccaaaucuagucauu

SEQ ID NO: 73084 - RNA, 22 nt, Homo sapiens
agugcaauaaggauguagaacu

SEQ ID NO: 73085 - RNA, 22 nt, Homo sapiens
uuggccauaugacuugcuuugg

SEQ ID NO: 73086 - RNA, 22 nt, Homo sapiens
ugucaggagcaaugauaaauuu

SEQ ID NO: 73087 - RNA, 19 nt, Homo sapiens
uuuuccccuuucuuaagac

SEQ ID NO: 73088 - RNA, 22 nt, Homo sapiens
ggagugucagaaacaguguccu

SEQ ID NO: 73089 - RNA, 22 nt, Homo sapiens
auuaaucaggcaaugcuugcua

SEQ ID NO: 73090 - RNA, 22 nt, Homo sapiens
caucacaguacuaaucgucaua

SEQ ID NO: 73091 - RNA, 22 nt, Homo sapiens
ugaauguccugacgcugcaguu

SEQ ID NO: 73092 - RNA, 22 nt, Homo sapiens
uucacugugaauaaaggcuccc

SEQ ID NO: 73093 - RNA, 22 nt, Homo sapiens
ggcaagaaccagggauuugcgu

SEQ ID NO: 73094 - RNA, 22 nt, Homo sapiens
uccaguuuuguuaacauauggu

SEQ ID NO: 73095 - RNA, 22 nt, Homo sapiens
augugcuugagggaaaucaguu

SEQ ID NO: 73096 - RNA, 22 nt, Homo sapiens
cugugcauggauuuuaagauug

SEQ ID NO: 73097 - RNA, 22 nt, Homo sapiens
uucacuguagccucagccucuu

SEQ ID NO: 73098 - RNA, 22 nt, Homo sapiens
uaugccuuuuggcucaagaaac

SEQ ID NO: 73099 - RNA, 22 nt, Homo sapiens
agucaaaugcuuauguauaaag

SEQ ID NO: 73100 - RNA, 22 nt, Homo sapiens
ucauguguugcacugaggaccu

SEQ ID NO: 73101 - RNA, 21 nt, Homo sapiens
uaucagagacauugagaggca

SEQ ID NO: 73102 - RNA, 22 nt, Homo sapiens
ugaaagacugaagaauaggcau

SEQ ID NO: 73103 - RNA, 22 nt, Homo sapiens
ugcuagaagaucacacacauca

SEQ ID NO: 73104 - RNA, 22 nt, Homo sapiens
uggcuagaccugcauaacagcu

SEQ ID NO: 73105 - RNA, 22 nt, Homo sapiens
ugaaaugaucaguuugguuacu

SEQ ID NO: 73106 - RNA, 22 nt, Homo sapiens
uucagcaaugacagccuauaua

SEQ ID NO: 73107 - RNA, 22 nt, Homo sapiens
uuuaacauuggaugagaucguc

SEQ ID NO: 73108 - RNA, 22 nt, Homo sapiens
aucacuagaucauagguaaaca

SEQ ID NO: 73109 - RNA, 22 nt, Homo sapiens
aaucacaggucuuggcugcaug

SEQ ID NO: 73110 - RNA, 22 nt, Homo sapiens
auagaaucaucugugcacuagu

SEQ ID NO: 73111 - RNA, 22 nt, Homo sapiens
ugagguaugugaugucuuuuag

SEQ ID NO: 73112 - RNA, 22 nt, Homo sapiens
uggccaagagcacagauauugg

SEQ ID NO: 73113 - RNA, 22 nt, Homo sapiens
ugucccaguuggguauugaauu

SEQ ID NO: 73114 - RNA, 22 nt, Homo sapiens
ucugucacugguggacgaucac

SEQ ID NO: 73115 - RNA, 22 nt, Homo sapiens
uuugggaaugaguuuaucauuu

SEQ ID NO: 73116 - RNA, 22 nt, Homo sapiens
ugaaacacaccuccucuccauc

SEQ ID NO: 73117 - RNA, 22 nt, Homo sapiens
agggaagugugcuaugcauuua

SEQ ID NO: 73118 - RNA, 22 nt, Homo sapiens
uuacaucaucacauuaguuugc

SEQ ID NO: 73119 - RNA, 22 nt, Homo sapiens
agcuuuggauaccugcuguucc

SEQ ID NO: 73120 - RNA, 22 nt, Homo sapiens
gagaaugagauuaugguuacau

SEQ ID NO: 73121 - RNA, 18 nt, Homo sapiens
cagugcaauacaggagag

SEQ ID NO: 73122 - RNA, 22 nt, Homo sapiens
gagauuauuuaaaaggugauuu

SEQ ID NO: 73123 - RNA, 20 nt, Homo sapiens
uggaaguaagaauauaggug

SEQ ID NO: 73124 - RNA, 22 nt, Homo sapiens
caugugcaugagcacauacgug

SEQ ID NO: 73125 - RNA, 22 nt, Homo sapiens
uugcuagagaugagggaugugu

SEQ ID NO: 73126 - RNA, 18 nt, Homo sapiens
acaguguguaaggguucu

SEQ ID NO: 73127 - RNA, 22 nt, Homo sapiens
auuaacaucuagaguuuuggug

SEQ ID NO: 73128 - RNA, 22 nt, Homo sapiens
uagcagcauuuuuguagaguau

SEQ ID NO: 73129 - RNA, 22 nt, Homo sapiens
uucacagucacccuucuccaug

SEQ ID NO: 73130 - RNA, 21 nt, Homo sapiens
ucaucaagcuguagacaugau

SEQ ID NO: 73131 - RNA, 22 nt, Homo sapiens
ugcugcuguuaucauuuuacca

SEQ ID NO: 73132 - RNA, 23 nt, Homo sapiens
ugcaccacuacacacucuugggu

SEQ ID NO: 73133 - RNA, 22 nt, Homo sapiens
uguuuaguuaagacauagaauu

SEQ ID NO: 73134 - RNA, 22 nt, Homo sapiens
uaccagugaauuccaggggcua

SEQ ID NO: 73135 - RNA, 22 nt, Homo sapiens
cauuugcacugagacucagcuu

SEQ ID NO: 73136 - RNA, 22 nt, Homo sapiens
uuagguuguuucuggucuuagg

SEQ ID NO: 73137 - RNA, 22 nt, Homo sapiens
cugaggguagaaggaucacuug

SEQ ID NO: 73138 - RNA, 22 nt, Homo sapiens
uugacauaguuucugaaauaga

SEQ ID NO: 73139 - RNA, 22 nt, Homo sapiens
uaaugcuccauggguuauuaaa

SEQ ID NO: 73140 - RNA, 22 nt, Homo sapiens
uaucagcacaguggguucaugg

SEQ ID NO: 73141 - RNA, 22 nt, Homo sapiens
caccagcuggcauugaauaccu

SEQ ID NO: 73142 - RNA, 22 nt, Homo sapiens
gggaagaaggagugguuuacuc

SEQ ID NO: 73143 - RNA, 22 nt, Homo sapiens
gucuugaaggcugaguaccugu

SEQ ID NO: 73144 - RNA, 22 nt, Homo sapiens
uggaaguaaucaugagguagca

SEQ ID NO: 73145 - RNA, 22 nt, Homo sapiens
aucucaguucaggcuggccaca

SEQ ID NO: 73146 - RNA, 22 nt, Homo sapiens
ugggaaugaaauuacauagcuu

SEQ ID NO: 73147 - RNA, 22 nt, Homo sapiens
auuggcagaaaucuuuauagua

SEQ ID NO: 73148 - RNA, 22 nt, Homo sapiens
aucccaguucagccucugacac

SEQ ID NO: 73149 - RNA, 23 nt, Homo sapiens
cagcuucauugaacauaacuccu

SEQ ID NO: 73150 - RNA, 23 nt, Homo sapiens
ugacaagagcgagacuuggucuc

SEQ ID NO: 73151 - RNA, 21 nt, Homo sapiens
gaguggcuuuuguuucaccag

SEQ ID NO: 73152 - RNA, 22 nt, Homo sapiens
ucaucagaaucccuuagggaug

SEQ ID NO: 73153 - RNA, 22 nt, Homo sapiens
uaguagcaccucucaugagcuu

SEQ ID NO: 73154 - RNA, 22 nt, Homo sapiens
augaacagagccuugagaaccu

SEQ ID NO: 73155 - RNA, 19 nt, Homo sapiens
uagcagcaugauuuauaau

SEQ ID NO: 73156 - RNA, 22 nt, Homo sapiens
auugauaguuuaauaggaauug

SEQ ID NO: 73157 - RNA, 22 nt, Homo sapiens
uuggcagcacgcaguccagagg

SEQ ID NO: 73158 - RNA, 22 nt, Homo sapiens
ucugccacugucauugugugau

SEQ ID NO: 73159 - RNA, 22 nt, Homo sapiens
gacaguuucucaggcuuccuua

SEQ ID NO: 73160 - RNA, 22 nt, Homo sapiens
ugucauguugguguacugcacc

SEQ ID NO: 73161 - RNA, 18 nt, Homo sapiens
cuuaacauugggaugaua

SEQ ID NO: 73162 - RNA, 22 nt, Homo sapiens
cugugaagaaagucauugguag

SEQ ID NO: 73163 - RNA, 22 nt, Homo sapiens
ggacagugaaugccacuccucc

SEQ ID NO: 73164 - RNA, 21 nt, Homo sapiens
ucacaaugaacagcagcagaa

SEQ ID NO: 73165 - RNA, 20 nt, Homo sapiens
acccucuaggaugauuucuu

SEQ ID NO: 73166 - RNA, 22 nt, Homo sapiens
uuccuugagucuuuuuccugag

SEQ ID NO: 73167 - RNA, 22 nt, Homo sapiens
gcaaaaaguagugcugguuagg

SEQ ID NO: 73168 - RNA, 20 nt, Homo sapiens
acugcacuccaggcugccca

SEQ ID NO: 73169 - RNA, 22 nt, Homo sapiens
cuguauguuucuaugaauguga

SEQ ID NO: 73170 - RNA, 22 nt, Homo sapiens
agcuaugucugaugccugauua

SEQ ID NO: 73171 - RNA, 22 nt, Homo sapiens
uucugagguuauauucucucaa

SEQ ID NO: 73172 - RNA, 22 nt, Homo sapiens
gggaagauauaggcugggcacc

SEQ ID NO: 73173 - RNA, 22 nt, Homo sapiens
ccacaguugaaauuuugacugu

SEQ ID NO: 73174 - RNA, 23 nt, Homo sapiens
ugucaucaagaugaggucacacu

SEQ ID NO: 73175 - RNA, 22 nt, Homo sapiens
uggagaacauucauuugcaaga

SEQ ID NO: 73176 - RNA, 22 nt, Homo sapiens
augagauacuacaaaugaguuu

SEQ ID NO: 73177 - RNA, 22 nt, Homo sapiens
ugucagcacaacucagguuccu

SEQ ID NO: 73178 - RNA, 22 nt, Homo sapiens
uagcagcagugguguauuuaga

SEQ ID NO: 73179 - RNA, 22 nt, Homo sapiens
aucacugggagcagccauuaau

SEQ ID NO: 73180 - RNA, 22 nt, Homo sapiens
ugagcacauuuacaucaguucc

SEQ ID NO: 73181 - RNA, 22 nt, Homo sapiens
uuugagaaugcuaccagagaag

SEQ ID NO: 73182 - RNA, 22 nt, Homo sapiens
augggcacugauguauucugug

SEQ ID NO: 73183 - RNA, 22 nt, Homo sapiens
uggggcaaugaacauuuuugca

SEQ ID NO: 73184 - RNA, 22 nt, Homo sapiens
uaacugcaaccucugccugcug

SEQ ID NO: 73185 - RNA, 21 nt, Homo sapiens
gucacuggggcuggauaauuc

SEQ ID NO: 73186 - RNA, 19 nt, Homo sapiens
caucacagagucuuccauu

SEQ ID NO: 73187 - RNA, 22 nt, Homo sapiens
acagauugcugggccccagccc

SEQ ID NO: 73188 - RNA, 22 nt, Homo sapiens
augaauacugcugcaaugaaca

SEQ ID NO: 73189 - RNA, 22 nt, Homo sapiens
gucauggacaaggugugagcca

SEQ ID NO: 73190 - RNA, 22 nt, Homo sapiens
uacauccauccugcugggcagu

SEQ ID NO: 73191 - RNA, 22 nt, Homo sapiens
augaaaacaugauuugccuguu

SEQ ID NO: 73192 - RNA, 22 nt, Homo sapiens
acugcacuccagccucccgucu

SEQ ID NO: 73193 - RNA, 22 nt, Homo sapiens
gagacggagucucgcucuguca

SEQ ID NO: 73194 - RNA, 22 nt, Homo sapiens
aguaucacaggcaaaacagaau

SEQ ID NO: 73195 - RNA, 22 nt, Homo sapiens
gugaacaagcaaaggcaggagg

SEQ ID NO: 73196 - RNA, 22 nt, Homo sapiens
cuagcugcacuuccugcuacug

SEQ ID NO: 73197 - RNA, 22 nt, Homo sapiens
gggaagugugguuucuuuacag

SEQ ID NO: 73198 - RNA, 22 nt, Homo sapiens
ucacagugcaggaucaguuaau

SEQ ID NO: 73199 - RNA, 22 nt, Homo sapiens
uuggcagcauuccagccaagca

SEQ ID NO: 73200 - RNA, 22 nt, Homo sapiens
gucagugugauaucugcagggg

SEQ ID NO: 73201 - RNA, 22 nt, Homo sapiens
acagugcuucugauaugaugcc

SEQ ID NO: 73202 - RNA, 22 nt, Homo sapiens
auguaguugcucugccuguuuu

SEQ ID NO: 73203 - RNA, 22 nt, Homo sapiens
augcauaugucuuuauaguggc

SEQ ID NO: 73204 - RNA, 22 nt, Homo sapiens
uuagucaaguguacugugaaug

SEQ ID NO: 73205 - RNA, 22 nt, Homo sapiens
acauaaagaagcaggacauugu

SEQ ID NO: 73206 - RNA, 22 nt, Homo sapiens
cacagcuaacaacuguuucuuc

SEQ ID NO: 73207 - RNA, 22 nt, Homo sapiens
uucuggccuccauuuuucuccu

SEQ ID NO: 73208 - RNA, 22 nt, Homo sapiens
uucccagucaaacgaaggacuu

SEQ ID NO: 73209 - RNA, 22 nt, Homo sapiens
agccaguauuuccacagagugg

SEQ ID NO: 73210 - RNA, 22 nt, Homo sapiens
uuccaguggacuacuucauccu

SEQ ID NO: 73211 - RNA, 23 nt, Homo sapiens
cuuuguccccacccaaaucucau

SEQ ID NO: 73212 - RNA, 22 nt, Homo sapiens
gcagugugauguuuuaaucuau

SEQ ID NO: 73213 - RNA, 22 nt, Homo sapiens
uuucugaggccucaccagaagc

SEQ ID NO: 73214 - RNA, 22 nt, Homo sapiens
cccagugaagagaaccuuacga

SEQ ID NO: 73215 - RNA, 22 nt, Homo sapiens
auguuagcaucaauauucauca

SEQ ID NO: 73216 - RNA, 22 nt, Homo sapiens
cagacaugucuuguggccgugg

SEQ ID NO: 73217 - RNA, 22 nt, Homo sapiens
ugggaagauucuguguuuuucc

SEQ ID NO: 73218 - RNA, 22 nt, Homo sapiens
cucacugggaccacucugaagu

SEQ ID NO: 73219 - RNA, 22 nt, Homo sapiens
uugacaaugcacugugcuaagu

SEQ ID NO: 73220 - RNA, 22 nt, Homo sapiens
uagaaucuaacucgcaugaaaa

SEQ ID NO: 73221 - RNA, 18 nt, Homo sapiens
acugcacuccauccuagg

SEQ ID NO: 73222 - RNA, 22 nt, Homo sapiens
uugagagaaaaaauuuauuggu

SEQ ID NO: 73223 - RNA, 22 nt, Homo sapiens
ucacagucggugacuucuugcu

SEQ ID NO: 73224 - RNA, 21 nt, Homo sapiens
aucagagacccaggcuuccuc

SEQ ID NO: 73225 - RNA, 22 nt, Homo sapiens
gagaacauacggcauuugguuu

SEQ ID NO: 73226 - RNA, 22 nt, Homo sapiens
guucaguuuuaaagggaaauug

SEQ ID NO: 73227 - RNA, 22 nt, Homo sapiens
cucaguggauuagauaaugcac

SEQ ID NO: 73228 - RNA, 22 nt, Homo sapiens
augacugucagggcagucauug

SEQ ID NO: 73229 - RNA, 22 nt, Homo sapiens
ugccaaggagucagucccuaga

SEQ ID NO: 73230 - RNA, 22 nt, Homo sapiens
ucuaauguaaccugcaaauauu

SEQ ID NO: 73231 - RNA, 22 nt, Homo sapiens
aacacuguuuccagucaugauc

SEQ ID NO: 73232 - RNA, 22 nt, Homo sapiens
uacagcuaugugcaugcaugcu

SEQ ID NO: 73233 - RNA, 22 nt, Homo sapiens
ugaaauguugggugauggaauc

SEQ ID NO: 73234 - RNA, 22 nt, Homo sapiens
aauggcacacaccuggucuaac

SEQ ID NO: 73235 - RNA, 22 nt, Homo sapiens
gacacugucuucugcucuuaaa

SEQ ID NO: 73236 - RNA, 22 nt, Homo sapiens
uccuucauuugucaacucuagu

SEQ ID NO: 73237 - RNA, 22 nt, Homo sapiens
ugaaguguuuuuucaggcaugu

SEQ ID NO: 73238 - RNA, 22 nt, Homo sapiens
cugugguuacguucuuugugcu

SEQ ID NO: 73239 - RNA, 22 nt, Homo sapiens
cuacucuggagagugacaauca

SEQ ID NO: 73240 - RNA, 22 nt, Homo sapiens
ugagccaaugauuugaauagag

SEQ ID NO: 73241 - RNA, 20 nt, Homo sapiens
acugcacuccagccuuccag

SEQ ID NO: 73242 - RNA, 22 nt, Homo sapiens
uauuccagcccuggugagccag

SEQ ID NO: 73243 - RNA, 22 nt, Homo sapiens
uacaagcaggaaaugguauaug

SEQ ID NO: 73244 - RNA, 22 nt, Homo sapiens
agacagcugguagcacuuccug

SEQ ID NO: 73245 - RNA, 22 nt, Homo sapiens
uucacugggugugguggcucac

SEQ ID NO: 73246 - RNA, 22 nt, Homo sapiens
ucauccauacaguuagcaaagg

SEQ ID NO: 73247 - RNA, 22 nt, Homo sapiens
agagugaagcuuuuuauauucu

SEQ ID NO: 73248 - RNA, 22 nt, Homo sapiens
uagaauguaaauuccaagggca

SEQ ID NO: 73249 - RNA, 22 nt, Homo sapiens
uacaguacagugacaccauuau

SEQ ID NO: 73250 - RNA, 20 nt, Homo sapiens
ucaaagacauggcugucaga

SEQ ID NO: 73251 - RNA, 22 nt, Homo sapiens
ugucaucauuccaucagggcuu

SEQ ID NO: 73252 - RNA, 23 nt, Homo sapiens
ucugcggguguggacccuagugc

SEQ ID NO: 73253 - RNA, 22 nt, Homo sapiens
aagcuggauuucgcauccuguu

SEQ ID NO: 73254 - RNA, 18 nt, Homo sapiens
uuuguacuuuuucuaaug

SEQ ID NO: 73255 - RNA, 22 nt, Homo sapiens
gucauccaggcuggagugaagc

SEQ ID NO: 73256 - RNA, 22 nt, Homo sapiens
cugaauagucaacgauggacug

SEQ ID NO: 73257 - RNA, 20 nt, Homo sapiens
acacugugcuaaggauuuuc

SEQ ID NO: 73258 - RNA, 22 nt, Homo sapiens
ugaagugaagacucacagaagg

SEQ ID NO: 73259 - RNA, 21 nt, Homo sapiens
uugagaagaauuagcucuucc

SEQ ID NO: 73260 - RNA, 22 nt, Homo sapiens
uacucugcaguaauuccagccc

SEQ ID NO: 73261 - RNA, 22 nt, Homo sapiens
uacucugcagccauaaaacaga

SEQ ID NO: 73262 - RNA, 22 nt, Homo sapiens
ucacuguggaacucaaaaagcu

SEQ ID NO: 73263 - RNA, 22 nt, Homo sapiens
ugaggcacucuagacuuauuca

SEQ ID NO: 73264 - RNA, 20 nt, Homo sapiens
acugcacuucagccugcugg

SEQ ID NO: 73265 - RNA, 22 nt, Homo sapiens
ucacagaugaggcgagaggcag

SEQ ID NO: 73266 - RNA, 22 nt, Homo sapiens
uaacauucacaugcugcaaaaa

SEQ ID NO: 73267 - RNA, 22 nt, Homo sapiens
cugugcauaucuuggacugugu

SEQ ID NO: 73268 - RNA, 22 nt, Homo sapiens
uuacagauggcacacucaaggg

SEQ ID NO: 73269 - RNA, 20 nt, Homo sapiens
uagcagcagacagagggagg

SEQ ID NO: 73270 - RNA, 22 nt, Homo sapiens
gcagugugaucacagcuuacug

SEQ ID NO: 73271 - RNA, 22 nt, Homo sapiens
ugugauaguuggcuaaagcagu

SEQ ID NO: 73272 - RNA, 22 nt, Homo sapiens
uuaaugugaaucaggaugcauu

SEQ ID NO: 73273 - RNA, 22 nt, Homo sapiens
gcaguguggguagagggcaaga

SEQ ID NO: 73274 - RNA, 22 nt, Homo sapiens
agcagcauuaugauauaucuua

SEQ ID NO: 73275 - RNA, 22 nt, Homo sapiens
ugaaauacuuaauuucuccaug

SEQ ID NO: 73276 - RNA, 22 nt, Homo sapiens
gagaaugaacagacugccucuu

SEQ ID NO: 73277 - RNA, 23 nt, Homo sapiens
auaagccuuuucuuucugcccca

SEQ ID NO: 73278 - RNA, 22 nt, Homo sapiens
ucagauugaugcauacuuaaau

SEQ ID NO: 73279 - RNA, 22 nt, Homo sapiens
uucuggccccucccaaucucau

SEQ ID NO: 73280 - RNA, 22 nt, Homo sapiens
uaucacagguggacugcacacc

SEQ ID NO: 73281 - RNA, 22 nt, Homo sapiens
uucuuagguuaaggcugagaga

SEQ ID NO: 73282 - RNA, 20 nt, Homo sapiens
cuugaagacuaugcugcuga

SEQ ID NO: 73283 - RNA, 22 nt, Homo sapiens
agcaugacauauuguagagaaa

SEQ ID NO: 73284 - RNA, 22 nt, Homo sapiens
ucagaguagaaacacuuccaua

SEQ ID NO: 73285 - RNA, 22 nt, Homo sapiens
ucaacacaguuaaauggggaaa

SEQ ID NO: 73286 - RNA, 22 nt, Homo sapiens
aaugucaugaguccaaccagaa

SEQ ID NO: 73287 - RNA, 22 nt, Homo sapiens
uuugggaaaugaaguugguaga

SEQ ID NO: 73288 - RNA, 18 nt, Homo sapiens
aaacagugucucuuucug

SEQ ID NO: 73289 - RNA, 22 nt, Homo sapiens
uagcagcaccccacucuacugg

SEQ ID NO: 73290 - RNA, 22 nt, Homo sapiens
uggucaccuucuugcucugucu

SEQ ID NO: 73291 - RNA, 22 nt, Homo sapiens
aucagaguggguuuuaaaagug

SEQ ID NO: 73292 - RNA, 22 nt, Homo sapiens
aggugaaugcucacauucuaau

SEQ ID NO: 73293 - RNA, 20 nt, Homo sapiens
agcauugguuagaacaguag

SEQ ID NO: 73294 - RNA, 22 nt, Homo sapiens
uggucaccugaauuaugcaugu

SEQ ID NO: 73295 - RNA, 22 nt, Homo sapiens
uagcagcaaagcaggaucugcu

SEQ ID NO: 73296 - RNA, 22 nt, Homo sapiens
aaaugucauggaguguuucccc

SEQ ID NO: 73297 - RNA, 22 nt, Homo sapiens
ucugacaaugaacaaucuauag

SEQ ID NO: 73298 - RNA, 19 nt, Homo sapiens
augacauuuggggguggac

SEQ ID NO: 73299 - RNA, 21 nt, Homo sapiens
uggaauguucugacuucaggg

SEQ ID NO: 73300 - RNA, 22 nt, Homo sapiens
cucugagguuauucguaauauu

SEQ ID NO: 73301 - RNA, 22 nt, Homo sapiens
uaacuccauuuggacucaguau

SEQ ID NO: 73302 - RNA, 22 nt, Homo sapiens
aucacagcccuccucuuggaug

SEQ ID NO: 73303 - RNA, 22 nt, Homo sapiens
gagaacauuaauaguuaauuuu

SEQ ID NO: 73304 - RNA, 17 nt, Homo sapiens
gacauaggaaaaggaga

SEQ ID NO: 73305 - RNA, 22 nt, Homo sapiens
cugcuaagagaaugagacuuag

SEQ ID NO: 73306 - RNA, 22 nt, Homo sapiens
caaugcauuauucucccacuuc

SEQ ID NO: 73307 - RNA, 22 nt, Homo sapiens
gugaaauguguagaggaucugg

SEQ ID NO: 73308 - RNA, 19 nt, Homo sapiens
uuacauccauugcauuuca

SEQ ID NO: 73309 - RNA, 22 nt, Homo sapiens
acugcacuucagccuuggcuac

SEQ ID NO: 73310 - RNA, 22 nt, Homo sapiens
gagacggagucuugcucuguug

SEQ ID NO: 73311 - RNA, 22 nt, Homo sapiens
gagacggagucucgcucugucg

SEQ ID NO: 73312 - RNA, 22 nt, Homo sapiens
ugaaauguuaaacaaguggcuc

SEQ ID NO: 73313 - RNA, 22 nt, Homo sapiens
caugugcaugcuuucuuaugug

SEQ ID NO: 73314 - RNA, 22 nt, Homo sapiens
cugcaagaugcauaggaauuuu

SEQ ID NO: 73315 - RNA, 22 nt, Homo sapiens
uagaacauuccaggugauguug

SEQ ID NO: 73316 - RNA, 23 nt, Homo sapiens
agagugcaauggugccaucucgg

SEQ ID NO: 73317 - RNA, 22 nt, Homo sapiens
cucaguuuugccuuguuuaagg

SEQ ID NO: 73318 - RNA, 22 nt, Homo sapiens
uuuuuggaggagguuagaucau

SEQ ID NO: 73319 - RNA, 22 nt, Homo sapiens
uucauggaguugagaaggcuaa

SEQ ID NO: 73320 - RNA, 22 nt, Homo sapiens
uuguccucuccaaaucucaugu

SEQ ID NO: 73321 - RNA, 22 nt, Homo sapiens
uuucuauguugaccagucuaga

SEQ ID NO: 73322 - RNA, 22 nt, Homo sapiens
uuauccucuagacauagguuua

SEQ ID NO: 73323 - RNA, 22 nt, Homo sapiens
uuauggauuuauauucuguagu

SEQ ID NO: 73324 - RNA, 22 nt, Homo sapiens
uuauucauuaacagggaccaaa

SEQ ID NO: 73325 - RNA, 18 nt, Homo sapiens
uaggaacauugauuggag

SEQ ID NO: 73326 - RNA, 22 nt, Homo sapiens
uagguacuuaagaucucagcua

SEQ ID NO: 73327 - RNA, 22 nt, Homo sapiens
uagguacuuuacauguuaucuc

SEQ ID NO: 73328 - RNA, 22 nt, Homo sapiens
uauagcaaugccccacuccuga

SEQ ID NO: 73329 - RNA, 22 nt, Homo sapiens
ugacaguaaacagucuugauua

SEQ ID NO: 73330 - RNA, 22 nt, Homo sapiens
ugacaguaucuacagcuucuua

SEQ ID NO: 73331 - RNA, 22 nt, Homo sapiens
ugagauagaaaacauaggagaa

SEQ ID NO: 73332 - RNA, 22 nt, Homo sapiens
ugcaagaugauuucaauugaua

SEQ ID NO: 73333 - RNA, 22 nt, Homo sapiens
ucaugagacacacuggaaagga

SEQ ID NO: 73334 - RNA, 23 nt, Homo sapiens
ucacacuuaagagaaaugcagcu

SEQ ID NO: 73335 - RNA, 20 nt, Homo sapiens
aagugaguguuaaacugaac

SEQ ID NO: 73336 - RNA, 22 nt, Homo sapiens
uuuucaguuuuccagguagccg

SEQ ID NO: 73337 - RNA, 22 nt, Homo sapiens
aauggcaucuacguuaaauguc

SEQ ID NO: 73338 - RNA, 22 nt, Homo sapiens
agaaacauucucuugccuccuu

SEQ ID NO: 73339 - RNA, 22 nt, Homo sapiens
augcaaggaugguuagauauau

SEQ ID NO: 73340 - RNA, 16 nt, Homo sapiens
aguaguuuuacagauu

SEQ ID NO: 73341 - RNA, 22 nt, Homo sapiens
cauagcacacguauaccuaugu

SEQ ID NO: 73342 - RNA, 22 nt, Homo sapiens
auggcuagauuguaugguaguu

SEQ ID NO: 73343 - RNA, 22 nt, Homo sapiens
auggaggaggaagcugaaacaa

SEQ ID NO: 73344 - RNA, 22 nt, Homo sapiens
acuaaggcacaauuuucucaua

SEQ ID NO: 73345 - RNA, 20 nt, Homo sapiens
acaguauguuuggaugcaua

SEQ ID NO: 73346 - RNA, 21 nt, Homo sapiens
aaggugguggugauugagaug

SEQ ID NO: 73347 - RNA, 22 nt, Homo sapiens
aaagugcacuuggaagagggcc

SEQ ID NO: 73348 - RNA, 22 nt, Homo sapiens
ugguacuucaugcucacagaua

SEQ ID NO: 73349 - RNA, 22 nt, Homo sapiens
ucauauguaugugcaauuuugu

SEQ ID NO: 73350 - RNA, 22 nt, Homo sapiens
ucaugaaguaguuaacugguug

SEQ ID NO: 73351 - RNA, 22 nt, Homo sapiens
uccuucauuugucaacucuagu

SEQ ID NO: 73352 - RNA, 22 nt, Homo sapiens
uccuucaugcaucaauguaucc

SEQ ID NO: 73353 - RNA, 22 nt, Homo sapiens
uccugauacgguugcaguucuc

SEQ ID NO: 73354 - RNA, 22 nt, Homo sapiens
uucauguaauuccauaagguaa

SEQ ID NO: 73355 - RNA, 21 nt, Homo sapiens
uguuuuugcuguguaucucuc

SEQ ID NO: 73356 - RNA, 22 nt, Homo sapiens
uuggaacacauguuuuucuacc

SEQ ID NO: 73357 - RNA, 22 nt, Homo sapiens
uugaaggaacgcuguucccuug

SEQ ID NO: 73358 - RNA, 22 nt, Homo sapiens
uuugucuccuaagacucugugg

SEQ ID NO: 73359 - RNA, 22 nt, Homo sapiens
gaggcauugaaauauugcuuau

SEQ ID NO: 73360 - RNA, 22 nt, Homo sapiens
cuucaaguaauucugauggcua

SEQ ID NO: 73361 - RNA, 22 nt, Homo sapiens
cuucaugagacuuuuggaaggc

SEQ ID NO: 73362 - RNA, 22 nt, Homo sapiens
auuggacagcauuucuagacuu

SEQ ID NO: 73363 - RNA, 20 nt, Homo sapiens
cucagauuauucugaagcaa

SEQ ID NO: 73364 - RNA, 22 nt, Homo sapiens
gucaugaaguuuugaaugaaau

SEQ ID NO: 73365 - RNA, 22 nt, Homo sapiens
gggguuuuaccuucguauucuu

SEQ ID NO: 73366 - RNA, 22 nt, Homo sapiens
gucaguuugguuaaucauucca

SEQ ID NO: 73367 - RNA, 22 nt, Homo sapiens
uacaagguaucagugaccguaa

SEQ ID NO: 73368 - RNA, 22 nt, Homo sapiens
uacaguauuaugagugauugaa

SEQ ID NO: 73369 - RNA, 22 nt, Homo sapiens
uauggauucuagcucaguaggu

SEQ ID NO: 73370 - RNA, 22 nt, Homo sapiens
uauggauauuacuccacaaaga

SEQ ID NO: 73371 - RNA, 22 nt, Homo sapiens
uauagcaaugugccacucucug

SEQ ID NO: 73372 - RNA, 22 nt, Homo sapiens
uucauguaaucaaggcagcuaa

SEQ ID NO: 73373 - RNA, 22 nt, Homo sapiens
uucauguaauauuucacagcuu

SEQ ID NO: 73374 - RNA, 22 nt, Homo sapiens
uucucauggugauggcaaaauc

SEQ ID NO: 73375 - RNA, 22 nt, Homo sapiens
uuucaguguggcaggcauagcu

SEQ ID NO: 73376 - RNA, 22 nt, Homo sapiens
uuguuugguugaguauggaagu

SEQ ID NO: 73377 - RNA, 22 nt, Homo sapiens
ucaagguacguugccucagauu

SEQ ID NO: 73378 - RNA, 20 nt, Homo sapiens
ucaaggcacgaauaaaaguu

SEQ ID NO: 73379 - RNA, 22 nt, Homo sapiens
ucaaggcacuagcugagcugca

SEQ ID NO: 73380 - RNA, 20 nt, Homo sapiens
ugggaacaugugguauaugg

SEQ ID NO: 73381 - RNA, 22 nt, Homo sapiens
uggcauuuuguuuuagaauuag

SEQ ID NO: 73382 - RNA, 22 nt, Homo sapiens
uagcagaauaacuugccagccu

SEQ ID NO: 73383 - RNA, 21 nt, Homo sapiens
uagcaaauugcuauuaaggca

SEQ ID NO: 73384 - RNA, 17 nt, Homo sapiens
guggauagaacaaugaa

SEQ ID NO: 73385 - RNA, 22 nt, Homo sapiens
ggcaacaauuccuacuucuuuu

SEQ ID NO: 73386 - RNA, 22 nt, Homo sapiens
guaugugacuggaacaguagga

SEQ ID NO: 73387 - RNA, 22 nt, Homo sapiens
aaggcauucucaaacuaguucu

SEQ ID NO: 73388 - RNA, 22 nt, Homo sapiens
aaggcagugugcacauaacacu

SEQ ID NO: 73389 - RNA, 22 nt, Homo sapiens
aggaauuuaauguaugauaaua

SEQ ID NO: 73390 - RNA, 22 nt, Homo sapiens
auggaagcugauuagauaguac

SEQ ID NO: 73391 - RNA, 21 nt, Homo sapiens
agguaguuuuccuuuuggagu

SEQ ID NO: 73392 - RNA, 22 nt, Homo sapiens
gaagguacgcuuaggaaaugau

SEQ ID NO: 73393 - RNA, 22 nt, Homo sapiens
cuauggauuuacuguauagggu

SEQ ID NO: 73394 - RNA, 21 nt, Homo sapiens
cucauauugcuuuuccauggu

SEQ ID NO: 73395 - RNA, 22 nt, Homo sapiens
auuuuuggauauagggaaggau

SEQ ID NO: 73396 - RNA, 22 nt, Homo sapiens
auuuuugguugguaggcuauua

SEQ ID NO: 73397 - RNA, 22 nt, Homo sapiens
caagguacuuuuacaauuuccc

SEQ ID NO: 73398 - RNA, 22 nt, Homo sapiens
auuuuugguugucagcacuagg

SEQ ID NO: 73399 - RNA, 22 nt, Homo sapiens
cagcaaaucauccuauuugagc

SEQ ID NO: 73400 - RNA, 22 nt, Homo sapiens
augaaguauuaggacacauuua

SEQ ID NO: 73401 - RNA, 22 nt, Homo sapiens
aguguuuuuaacaagaaagggu

SEQ ID NO: 73402 - RNA, 22 nt, Homo sapiens
aguguuuuuacaagcacucugg

SEQ ID NO: 73403 - RNA, 22 nt, Homo sapiens
agguacuugagauucugaacug

SEQ ID NO: 73404 - RNA, 22 nt, Homo sapiens
agguacuuucccaaccauacug

SEQ ID NO: 73405 - RNA, 22 nt, Homo sapiens
agucauggaucacaguagccuc

SEQ ID NO: 73406 - RNA, 22 nt, Homo sapiens
aggcauugugcaucgaugauuu

SEQ ID NO: 73407 - RNA, 22 nt, Homo sapiens
aggcaguuucagugagagguga

SEQ ID NO: 73408 - RNA, 22 nt, Homo sapiens
agcaauaugacauugcuacauc

SEQ ID NO: 73409 - RNA, 23 nt, Homo sapiens
agcaaaugcucuagcacuccaac

SEQ ID NO: 73410 - RNA, 22 nt, Homo sapiens
agagguguuaaagucucuuuua

SEQ ID NO: 73411 - RNA, 22 nt, Homo sapiens
aagguuguauuuaauauacugu

SEQ ID NO: 73412 - RNA, 19 nt, Homo sapiens
aaguaguugugacagaugc

SEQ ID NO: 73413 - RNA, 22 nt, Homo sapiens
aagcgguguugaauuuuguuga

SEQ ID NO: 73414 - RNA, 22 nt, Homo sapiens
uuaugucuuugagcaaugcugu

SEQ ID NO: 73415 - RNA, 22 nt, Homo sapiens
uuauucauuaauugcuaagguu

SEQ ID NO: 73416 - RNA, 22 nt, Homo sapiens
uucgucaugagacagaugcuga

SEQ ID NO: 73417 - RNA, 22 nt, Homo sapiens
uucacugagccagacuaagaca

SEQ ID NO: 73418 - RNA, 22 nt, Homo sapiens
uuuuggacuugcuccccugucc

SEQ ID NO: 73419 - RNA, 22 nt, Homo sapiens
uuuugcucuugguaaugaaaga

SEQ ID NO: 73420 - RNA, 22 nt, Homo sapiens
uuuugcuccuggcaaacucaua

SEQ ID NO: 73421 - RNA, 22 nt, Homo sapiens
uuuuuugguaauugaacaauga

SEQ ID NO: 73422 - RNA, 22 nt, Homo sapiens
uuggauaguuuaugaaaaaugg

SEQ ID NO: 73423 - RNA, 22 nt, Homo sapiens
ugguguuugagaagcugauguc

SEQ ID NO: 73424 - RNA, 20 nt, Homo sapiens
ugguguuugaacagugaaug

SEQ ID NO: 73425 - RNA, 23 nt, Homo sapiens
uggcauuuuuggcaaugccuucu

SEQ ID NO: 73426 - RNA, 22 nt, Homo sapiens
ucucuguuuauuuuugguguau

SEQ ID NO: 73427 - RNA, 22 nt, Homo sapiens
uccuacaugcaguacauucaaa

SEQ ID NO: 73428 - RNA, 22 nt, Homo sapiens
uagcaaguguuuaagcacuuuu

SEQ ID NO: 73429 - RNA, 22 nt, Homo sapiens
uaggagcauaggauuguuugag

SEQ ID NO: 73430 - RNA, 22 nt, Homo sapiens
uaggcauuuuucugauaaacua

SEQ ID NO: 73431 - RNA, 21 nt, Homo sapiens
ucaaggaguauacguaugcca

SEQ ID NO: 73432 - RNA, 22 nt, Homo sapiens
guaggcacugaguguuuuacag

SEQ ID NO: 73433 - RNA, 22 nt, Homo sapiens
ggcaguuuggcaguuucauaaa

SEQ ID NO: 73434 - RNA, 22 nt, Homo sapiens
gugaacaauguuuuauccuggg

SEQ ID NO: 73435 - RNA, 15 nt, Homo sapiens
guuuuuggauacaau

SEQ ID NO: 73436 - RNA, 22 nt, Homo sapiens
guuuuuggggucacuauuaccg

SEQ ID NO: 73437 - RNA, 22 nt, Homo sapiens
gugguuuuaauauucagucuag

SEQ ID NO: 73438 - RNA, 22 nt, Homo sapiens
caggcauuguccaugcugaagg

SEQ ID NO: 73439 - RNA, 22 nt, Homo sapiens
cagggcaugugggucuauuggc

SEQ ID NO: 73440 - RNA, 22 nt, Homo sapiens
augacugucagggcagucauug

SEQ ID NO: 73441 - RNA, 22 nt, Homo sapiens
cacaguguuccagcuauuugaa

SEQ ID NO: 73442 - RNA, 22 nt, Homo sapiens
cccaguuuugccacuuacuagc

SEQ ID NO: 73443 - RNA, 22 nt, Homo sapiens
cugaauagagcacacugauggg

SEQ ID NO: 73444 - RNA, 21 nt, Homo sapiens
gucacuggggcuggauaauuc

SEQ ID NO: 73445 - RNA, 22 nt, Homo sapiens
uuuguacucccuuuagauaaaa

SEQ ID NO: 73446 - RNA, 22 nt, Homo sapiens
cucaguuuugccuuguuuaagg

SEQ ID NO: 73447 - RNA, 22 nt, Homo sapiens
cacacugucuuucagaaugguu

SEQ ID NO: 73448 - RNA, 22 nt, Homo sapiens
cucacugggaccacucugaagu

SEQ ID NO: 73449 - RNA, 22 nt, Homo sapiens
ugggaagaugcugcuucuuccu

SEQ ID NO: 73450 - RNA, 22 nt, Homo sapiens
augacauugaaaagcaagugga

SEQ ID NO: 73451 - RNA, 22 nt, Homo sapiens
ucauccauacaguuagcaaagg

SEQ ID NO: 73452 - RNA, 22 nt, Homo sapiens
uaacauucacaugcugcaaaaa

SEQ ID NO: 73453 - RNA, 19 nt, Homo sapiens
augacauuuggggguggac

SEQ ID NO: 73454 - RNA, 22 nt, Homo sapiens
ugauguguuuuguaguucaacu

SEQ ID NO: 73455 - RNA, 22 nt, Homo sapiens
gugcuauguuauccagcaagau

SEQ ID NO: 73456 - RNA, 22 nt, Homo sapiens
auguggcacuugacuuucucgc

SEQ ID NO: 73457 - RNA, 22 nt, Homo sapiens
auaagaagugaaccagacgucu

SEQ ID NO: 73458 - RNA, 22 nt, Homo sapiens
acagugcuucugauaugaugcc

SEQ ID NO: 73459 - RNA, 22 nt, Homo sapiens
aaugacuaagaugguacauuuu

SEQ ID NO: 73460 - RNA, 22 nt, Homo sapiens
acauaaagaagcaggacauugu

SEQ ID NO: 73461 - RNA, 22 nt, Homo sapiens
ugaaacacaccuccucuccauc

SEQ ID NO: 73462 - RNA, 22 nt, Homo sapiens
uggaaguaaucaugagguagca

SEQ ID NO: 73463 - RNA, 18 nt, Homo sapiens
aaacagugucucuuucug

SEQ ID NO: 73464 - RNA, 22 nt, Homo sapiens
aucacagcccuccucuuggaug

SEQ ID NO: 73465 - RNA, 22 nt, Homo sapiens
cugauaguucucuuuagaguuu

SEQ ID NO: 73466 - RNA, 19 nt, Homo sapiens
caccagugcaugcuacuau

SEQ ID NO: 73467 - RNA, 22 nt, Homo sapiens
aucacuggucaugagagaagua

SEQ ID NO: 73468 - RNA, 22 nt, Homo sapiens
aagugaaugugcuggaauagcu

SEQ ID NO: 73469 - RNA, 22 nt, Homo sapiens
aaaugucauggaguguuucccc

SEQ ID NO: 73470 - RNA, 22 nt, Homo sapiens
gagaacauacggcauuugguuu

SEQ ID NO: 73471 - RNA, 23 nt, Homo sapiens
ugcaccacuacacacucuugggu

SEQ ID NO: 73472 - RNA, 18 nt, Homo sapiens
acugcacuccauccuagg

SEQ ID NO: 73473 - RNA, 22 nt, Homo sapiens
agccaguauuuccacagagugg

SEQ ID NO: 73474 - RNA, 22 nt, Homo sapiens
ugcaccacugcacugccugggu

SEQ ID NO: 73475 - RNA, 22 nt, Homo sapiens
aagcuggauuuaguguggagca

SEQ ID NO: 73476 - RNA, 22 nt, Homo sapiens
aagauauguuaguuauaaacuc

SEQ ID NO: 73477 - RNA, 22 nt, Homo sapiens
cucugagguuauucguaauauu

SEQ ID NO: 73478 - RNA, 22 nt, Homo sapiens
uuggcagcuguggaaucugggc

SEQ ID NO: 73479 - RNA, 22 nt, Homo sapiens
aucacagaacuuugagcagaga

SEQ ID NO: 73480 - RNA, 22 nt, Homo sapiens
ucagaguagaaacacuuccaua

SEQ ID NO: 73481 - RNA, 22 nt, Homo sapiens
ucaaagugacaaaguugcagca

SEQ ID NO: 73482 - RNA, 22 nt, Homo sapiens
augcauaugucuuuauaguggc

SEQ ID NO: 73483 - RNA, 22 nt, Homo sapiens
agcaugacauauuguagagaaa

SEQ ID NO: 73484 - RNA, 22 nt, Homo sapiens
gucagcaucaccaugucuauga

SEQ ID NO: 73485 - RNA, 22 nt, Homo sapiens
uucuggccccucccaaucucau

SEQ ID NO: 73486 - RNA, 17 nt, Homo sapiens
ugaggcacuaguaucac

SEQ ID NO: 73487 - RNA, 23 nt, Homo sapiens
auaagccuuuucuuucugcccca

SEQ ID NO: 73488 - RNA, 18 nt, Homo sapiens
cccagugacuuauggccu

SEQ ID NO: 73489 - RNA, 22 nt, Homo sapiens
ugaaaugaucaguuugguuacu

SEQ ID NO: 73490 - RNA, 22 nt, Homo sapiens
uuauuagguugguggaaaagua

SEQ ID NO: 73491 - RNA, 22 nt, Homo sapiens
ugucaguguacuguaagaauua

SEQ ID NO: 73492 - RNA, 22 nt, Homo sapiens
ugcuauguuuucccuccuuauc

SEQ ID NO: 73493 - RNA, 17 nt, Homo sapiens
gacauaggaaaaggaga

SEQ ID NO: 73494 - RNA, 22 nt, Homo sapiens
acugcacuccagccugccgaca

SEQ ID NO: 73495 - RNA, 22 nt, Homo sapiens
ucacagugcaggaucaguuaau

SEQ ID NO: 73496 - RNA, 22 nt, Homo sapiens
cuguauguuucuaugaauguga

SEQ ID NO: 73497 - RNA, 18 nt, Homo sapiens
uguaaacuaccucaaccu

SEQ ID NO: 73498 - RNA, 22 nt, Homo sapiens
cuacaguucuuaauuaaguagu

SEQ ID NO: 73499 - RNA, 22 nt, Homo sapiens
gagacggagucucgcucuguca

SEQ ID NO: 73500 - RNA, 22 nt, Homo sapiens
cauuugcacugagacucagcuu

SEQ ID NO: 73501 - RNA, 22 nt, Homo sapiens
uucacagucacccuucuccaug

SEQ ID NO: 73502 - RNA, 22 nt, Homo sapiens
gaagaucacacuguagaucuau

SEQ ID NO: 73503 - RNA, 22 nt, Homo sapiens
agcuaugucugaugccugauua

SEQ ID NO: 73504 - RNA, 22 nt, Homo sapiens
auguugcaguuuaauuauccua

SEQ ID NO: 73505 - RNA, 22 nt, Homo sapiens
cagagaacauucagagcuguag

SEQ ID NO: 73506 - RNA, 22 nt, Homo sapiens
uuccaguaauagcacagcauug

SEQ ID NO: 73507 - RNA, 22 nt, Homo sapiens
acugcacuccagccucgcaaca

SEQ ID NO: 73508 - RNA, 22 nt, Homo sapiens
augacauuccacagccguagag

SEQ ID NO: 73509 - RNA, 22 nt, Homo sapiens
uaccagugucagcuuccugugu

SEQ ID NO: 73510 - RNA, 22 nt, Homo sapiens
auuguguagucuuacugcuugc

SEQ ID NO: 73511 - RNA, 22 nt, Homo sapiens
cacacuguuuuccauggggguu

SEQ ID NO: 73512 - RNA, 22 nt, Homo sapiens
cuacucuggagagugacaauca

SEQ ID NO: 73513 - RNA, 22 nt, Homo sapiens
gucaauguaucuagcuguauua

SEQ ID NO: 73514 - RNA, 22 nt, Homo sapiens
gggaagauauaggcugggcacc

SEQ ID NO: 73515 - RNA, 19 nt, Homo sapiens
acugcacuccaaccuccug

SEQ ID NO: 73516 - RNA, 22 nt, Homo sapiens
cuggcaaauguuuucuguaaag

SEQ ID NO: 73517 - RNA, 22 nt, Homo sapiens
gggaagaaggagugguuuacuc

SEQ ID NO: 73518 - RNA, 22 nt, Homo sapiens
caugugcaugcuuucuuaugug

SEQ ID NO: 73519 - RNA, 22 nt, Homo sapiens
uaccagugaauuccaggggcua

SEQ ID NO: 73520 - RNA, 22 nt, Homo sapiens
caccagcuggcauugaauaccu

SEQ ID NO: 73521 - RNA, 22 nt, Homo sapiens
ugcugcuguuaucauuuuacca

SEQ ID NO: 73522 - RNA, 19 nt, Homo sapiens
uuacauccauugcauuuca

SEQ ID NO: 73523 - RNA, 22 nt, Homo sapiens
uagaaucuaacucgcaugaaaa

SEQ ID NO: 73524 - RNA, 22 nt, Homo sapiens
acugcacuucagccuuggcuac

SEQ ID NO: 73525 - RNA, 22 nt, Homo sapiens
uagaacauuccaggugauguug

SEQ ID NO: 73526 - RNA, 22 nt, Homo sapiens
uugcuagaugaaaaugguaccu

SEQ ID NO: 73527 - RNA, 22 nt, Homo sapiens
uugagagaaaaaauuuauuggu

SEQ ID NO: 73528 - RNA, 22 nt, Homo sapiens
cugcaagaugcauaggaauuuu

SEQ ID NO: 73529 - RNA, 22 nt, Homo sapiens
agggaagugugcuaugcauuua

SEQ ID NO: 73530 - RNA, 22 nt, Homo sapiens
agcuuuggauaccugcuguucc

SEQ ID NO: 73531 - RNA, 22 nt, Homo sapiens
aaucacaggucuuggcugcaug

SEQ ID NO: 73532 - RNA, 22 nt, Homo sapiens
gugaaauguguagaggaucugg

SEQ ID NO: 73533 - RNA, 22 nt, Homo sapiens
gcaaaaaguagugcugguuagg

SEQ ID NO: 73534 - RNA, 22 nt, Homo sapiens
augacauugaugcucuggcugg

SEQ ID NO: 73535 - RNA, 22 nt, Homo sapiens
acagauugcugggccccagccc

SEQ ID NO: 73536 - RNA, 22 nt, Homo sapiens
acacagucaaauccacuuggcu

SEQ ID NO: 73537 - RNA, 22 nt, Homo sapiens
gaaugaauguuuauccuuagau

SEQ ID NO: 73538 - RNA, 21 nt, Homo sapiens
ucacaaugaacagcagcagaa

SEQ ID NO: 73539 - RNA, 21 nt, Homo sapiens
uuuacuguggacccauugcuu

SEQ ID NO: 73540 - RNA, 22 nt, Homo sapiens
guggaaugaaaacucucucaca

SEQ ID NO: 73541 - RNA, 22 nt, Homo sapiens
auggagacaaauaaaggagagu

SEQ ID NO: 73542 - RNA, 22 nt, Homo sapiens
gugaacaagcaaaggcaggagg

SEQ ID NO: 73543 - RNA, 17 nt, Homo sapiens
guggaaugucaugucaa

SEQ ID NO: 73544 - RNA, 20 nt, Homo sapiens
ugggaacaugugguauaugg

SEQ ID NO: 73545 - RNA, 22 nt, Homo sapiens
agaaugucaguauuggcuaaaa

SEQ ID NO: 73546 - RNA, 22 nt, Homo sapiens
ucugucacugguggacgaucac

SEQ ID NO: 73547 - RNA, 22 nt, Homo sapiens
cugugaagaaagucauugguag

SEQ ID NO: 73548 - RNA, 22 nt, Homo sapiens
gcuuuguugauggugagucugu

SEQ ID NO: 73549 - RNA, 22 nt, Homo sapiens
ugggaagaagguuuacuugcca

SEQ ID NO: 73550 - RNA, 21 nt, Homo sapiens
gugguucuagagaaacagaau

SEQ ID NO: 73551 - RNA, 22 nt, Homo sapiens
gucagugugauaucugcagggg

SEQ ID NO: 73552 - RNA, 22 nt, Homo sapiens
ucauguguugcacugaggaccu

SEQ ID NO: 73553 - RNA, 22 nt, Homo sapiens
uuaugucauuuuuggauguuaa

SEQ ID NO: 73554 - RNA, 22 nt, Homo sapiens
ggagugucagaaacaguguccu

SEQ ID NO: 73555 - RNA, 22 nt, Homo sapiens
uacaagcaggaaaugguauaug

SEQ ID NO: 73556 - RNA, 22 nt, Homo sapiens
auugcucuuagaaauauuucuu

SEQ ID NO: 73557 - RNA, 22 nt, Homo sapiens
aauagcacuguagauggaggaa

SEQ ID NO: 73558 - RNA, 22 nt, Homo sapiens
uguaaugaucaaaucagaguaa

SEQ ID NO: 73559 - RNA, 22 nt, Homo sapiens
uugaagugaagaacaauaucac

SEQ ID NO: 73560 - RNA, 22 nt, Homo sapiens
uccuucauuugucaacucuagu

SEQ ID NO: 73561 - RNA, 22 nt, Homo sapiens
auauuggccuaaaauucucuuu

SEQ ID NO: 73562 - RNA, 22 nt, Homo sapiens
agagaugaagauggggcucccg

SEQ ID NO: 73563 - RNA, 22 nt, Homo sapiens
gaaucauuguuucuaaguuugu

SEQ ID NO: 73564 - RNA, 22 nt, Homo sapiens
ugagcacauuuacaucaguucc

SEQ ID NO: 73565 - RNA, 23 nt, Homo sapiens
ugucaucaagaugaggucacacu

SEQ ID NO: 73566 - RNA, 22 nt, Homo sapiens
gucauccaggcuggagugaagc

SEQ ID NO: 73567 - RNA, 22 nt, Homo sapiens
ucaacacaguuaaauggggaaa

SEQ ID NO: 73568 - RNA, 22 nt, Homo sapiens
uuagucaaguguacugugaaug

SEQ ID NO: 73569 - RNA, 22 nt, Homo sapiens
uuaauguaucuaucacaucaca

SEQ ID NO: 73570 - RNA, 22 nt, Homo sapiens
auuacuuugcaccaaccuaaua

SEQ ID NO: 73571 - RNA, 22 nt, Homo sapiens
cugucaucauuucuaugugcca

SEQ ID NO: 73572 - RNA, 22 nt, Homo sapiens
auuguacuccagccuuggggac

SEQ ID NO: 73573 - RNA, 22 nt, Homo sapiens
aauacagcacacagaugggucu

SEQ ID NO: 73574 - RNA, 22 nt, Homo sapiens
cacagugaaugucaucauugcc

SEQ ID NO: 73575 - RNA, 22 nt, Homo sapiens
aaugugcacuauuagggugaua

SEQ ID NO: 73576 - RNA, 22 nt, Homo sapiens
aucacugggagcagccauuaau

SEQ ID NO: 73577 - RNA, 22 nt, Homo sapiens
ggcaagaaccagggauuugcgu

SEQ ID NO: 73578 - RNA, 22 nt, Homo sapiens
cugugcauggauuuuaagauug

SEQ ID NO: 73579 - RNA, 18 nt, Homo sapiens
accuucauuccuuugccu

SEQ ID NO: 73580 - RNA, 22 nt, Homo sapiens
augugcuugagggaaaucaguu

SEQ ID NO: 73581 - RNA, 22 nt, Homo sapiens
caaagcacuuggcuuggaagau

SEQ ID NO: 73582 - RNA, 22 nt, Homo sapiens
ugucaguggacugugaaaggca

SEQ ID NO: 73583 - RNA, 22 nt, Homo sapiens
aauggcacacaccuggucuaac

SEQ ID NO: 73584 - RNA, 22 nt, Homo sapiens
ugugaugugaugagaaguuccu

SEQ ID NO: 73585 - RNA, 22 nt, Homo sapiens
augggcacugauguauucugug

SEQ ID NO: 73586 - RNA, 22 nt, Homo sapiens
ugaaaugauuauaugguguuug

SEQ ID NO: 73587 - RNA, 22 nt, Homo sapiens
uggucaccuucuugcucugucu

SEQ ID NO: 73588 - RNA, 22 nt, Homo sapiens
aagcuggagugcaguggugcaa

SEQ ID NO: 73589 - RNA, 22 nt, Homo sapiens
uggagaacauucauuugcaaga

SEQ ID NO: 73590 - RNA, 22 nt, Homo sapiens
ucauauguaugugcaauuuugu

SEQ ID NO: 73591 - RNA, 22 nt, Homo sapiens
uuggcagcacgcaguccagagg

SEQ ID NO: 73592 - RNA, 22 nt, Homo sapiens
auugcacuccagccuuggggau

SEQ ID NO: 73593 - RNA, 22 nt, Homo sapiens
ucugccacugucauugugugau

SEQ ID NO: 73594 - RNA, 20 nt, Homo sapiens
ucaaagacauggcugucaga

SEQ ID NO: 73595 - RNA, 22 nt, Homo sapiens
uagcagcagugguguauuuaga

SEQ ID NO: 73596 - RNA, 22 nt, Homo sapiens
gacaguuucucaggcuuccuua

SEQ ID NO: 73597 - RNA, 22 nt, Homo sapiens
auaaauaguaguugugguggcc

SEQ ID NO: 73598 - RNA, 22 nt, Homo sapiens
gugaagugugaccucagcaucu

SEQ ID NO: 73599 - RNA, 22 nt, Homo sapiens
guggaagugucuggggccaggg

SEQ ID NO: 73600 - RNA, 22 nt, Homo sapiens
auuagguagugagaugcugcug

SEQ ID NO: 73601 - RNA, 19 nt, Homo sapiens
ugcagcaauguaaaagaca

SEQ ID NO: 73602 - RNA, 22 nt, Homo sapiens
agcacagugguuaaguuucuua

SEQ ID NO: 73603 - RNA, 22 nt, Homo sapiens
gagaaugaacagacugccucuu

SEQ ID NO: 73604 - RNA, 22 nt, Homo sapiens
cuuugcaaauggccuuuccaag

SEQ ID NO: 73605 - RNA, 22 nt, Homo sapiens
acugcacuccagccuccugaca

SEQ ID NO: 73606 - RNA, 21 nt, Homo sapiens
uaucagagacauugagaggca

SEQ ID NO: 73607 - RNA, 22 nt, Homo sapiens
uucacugugaauaaaggcuccc

SEQ ID NO: 73608 - RNA, 22 nt, Homo sapiens
ugagguaugugaugucuuuuag

SEQ ID NO: 73609 - RNA, 22 nt, Homo sapiens
uucagcaaugacagccuauaua

SEQ ID NO: 73610 - RNA, 22 nt, Homo sapiens
gucauggaggaugaauggccaa

SEQ ID NO: 73611 - RNA, 22 nt, Homo sapiens
ugaggcacucuagacuuauuca

SEQ ID NO: 73612 - RNA, 21 nt, Homo sapiens
gaguggcuuuuguuucaccag

SEQ ID NO: 73613 - RNA, 22 nt, Homo sapiens
cuuuacaguuggacucacgagg

SEQ ID NO: 73614 - RNA, 22 nt, Homo sapiens
agugcaauaaggauguagaacu

SEQ ID NO: 73615 - RNA, 22 nt, Homo sapiens
uucaaguagguaggaccacagg

SEQ ID NO: 73616 - RNA, 22 nt, Homo sapiens
aucacuagaucauagguaaaca

SEQ ID NO: 73617 - RNA, 22 nt, Homo sapiens
aauacuuccaaaucuagucauu

SEQ ID NO: 73618 - RNA, 22 nt, Homo sapiens
agcaagauuguucccauuuucu

SEQ ID NO: 73619 - RNA, 18 nt, Homo sapiens
cagugcaauacaggagag

SEQ ID NO: 73620 - RNA, 22 nt, Homo sapiens
uggccaagagcacagauauugg

SEQ ID NO: 73621 - RNA, 22 nt, Homo sapiens
ggcuagaauagggauagaccuu

SEQ ID NO: 73622 - RNA, 22 nt, Homo sapiens
gauagugaaccaagggguaauu

SEQ ID NO: 73623 - RNA, 22 nt, Homo sapiens
cuacagaguaucuaaagaggua

SEQ ID NO: 73624 - RNA, 22 nt, Homo sapiens
cucugacagugguuagcacugu

SEQ ID NO: 73625 - RNA, 22 nt, Homo sapiens
uaugccuuuuggcucaagaaac

SEQ ID NO: 73626 - RNA, 22 nt, Homo sapiens
uucccagucaaacgaaggacuu

SEQ ID NO: 73627 - RNA, 22 nt, Homo sapiens
ugugaacauuuuguauauauua

SEQ ID NO: 73628 - RNA, 22 nt, Homo sapiens
uugagguagugucuuguucugu

SEQ ID NO: 73629 - RNA, 19 nt, Homo sapiens
uuuuccccuuucuuaagac

SEQ ID NO: 73630 - RNA, 20 nt, Homo sapiens
uggaaguaagaauauaggug

SEQ ID NO: 73631 - RNA, 22 nt, Homo sapiens
ugaaauacuuuggcucuuuguu

SEQ ID NO: 73632 - RNA, 22 nt, Homo sapiens
ugaauagacacuaaagacugua

SEQ ID NO: 73633 - RNA, 22 nt, Homo sapiens
uacucugcagccauaaaacaga

SEQ ID NO: 73634 - RNA, 22 nt, Homo sapiens
acugcacuccagccucccgucu

SEQ ID NO: 73635 - RNA, 20 nt, Homo sapiens
uggucaccuucaggagguuc

SEQ ID NO: 73636 - RNA, 21 nt, Homo sapiens
ugaaugucuaggcagaaguuu

SEQ ID NO: 73637 - RNA, 22 nt, Homo sapiens
ugugcaaggcucucaaccugug

SEQ ID NO: 73638 - RNA, 22 nt, Homo sapiens
agaaugucagcuggauucagcu

SEQ ID NO: 73639 - RNA, 22 nt, Homo sapiens
agcagcaauuuuguaugguuua

SEQ ID NO: 73640 - RNA, 22 nt, Homo sapiens
gucuugaaggcugaguaccugu

SEQ ID NO: 73641 - RNA, 22 nt, Homo sapiens
ucuaauguaaccugcaaauauu

SEQ ID NO: 73642 - RNA, 22 nt, Homo sapiens
cuuuaguugucuccucaagggu

SEQ ID NO: 73643 - RNA, 22 nt, Homo sapiens
auagagcuaccauagaauccag

SEQ ID NO: 73644 - RNA, 23 nt, Homo sapiens
ucacaguggcugcuuaauuguga

SEQ ID NO: 73645 - RNA, 22 nt, Homo sapiens
uucuggccuccauuuuucuccu

SEQ ID NO: 73646 - RNA, 22 nt, Homo sapiens
uuucugaggccucaccagaagc

SEQ ID NO: 73647 - RNA, 18 nt, Homo sapiens
gauaacaguggacuaugc

SEQ ID NO: 73648 - RNA, 22 nt, Homo sapiens
gugacauuuuuacugaugagag

SEQ ID NO: 73649 - RNA, 22 nt, Homo sapiens
ugucaguuuuaacuagggaaua

SEQ ID NO: 73650 - RNA, 22 nt, Homo sapiens
uugacuucagagcugauucaag

SEQ ID NO: 73651 - RNA, 22 nt, Homo sapiens
gagauuauuuaaaaggugauuu

SEQ ID NO: 73652 - RNA, 18 nt, Homo sapiens
acaguguguaaggguucu

SEQ ID NO: 73653 - RNA, 22 nt, Homo sapiens
uauuccagcccuggugagccag

SEQ ID NO: 73654 - RNA, 22 nt, Homo sapiens
uagcagcaucucuggcuucuac

SEQ ID NO: 73655 - RNA, 22 nt, Homo sapiens
uuuugcuugugaauagccacau

SEQ ID NO: 73656 - RNA, 22 nt, Homo sapiens
uuacagauggcacacucaaggg

SEQ ID NO: 73657 - RNA, 22 nt, Homo sapiens
gagaaugagauuaugguuacau

SEQ ID NO: 73658 - RNA, 22 nt, Homo sapiens
aaugucaugaguccaaccagaa

SEQ ID NO: 73659 - RNA, 22 nt, Homo sapiens
agcagcauuaugauauaucuua

SEQ ID NO: 73660 - RNA, 22 nt, Homo sapiens
cuagcagcaugagaauggacca

SEQ ID NO: 73661 - RNA, 22 nt, Homo sapiens
uagcagcaccccacucuacugg

SEQ ID NO: 73662 - RNA, 22 nt, Homo sapiens
gucagcuuguccagagacucug

SEQ ID NO: 73663 - RNA, 22 nt, Homo sapiens
ugaauguccugacgcugcaguu

SEQ ID NO: 73664 - RNA, 22 nt, Homo sapiens
agucauggaucacaguagccuc

SEQ ID NO: 73665 - RNA, 22 nt, Homo sapiens
uccauaguacuagaaacugacc

SEQ ID NO: 73666 - RNA, 22 nt, Homo sapiens
accuucauuguugccaugucca

SEQ ID NO: 73667 - RNA, 23 nt, Homo sapiens
uggcauuuuaguuagcuucagug

SEQ ID NO: 73668 - RNA, 22 nt, Homo sapiens
gagaacauuaauaguuaauuuu

SEQ ID NO: 73669 - RNA, 22 nt, Homo sapiens
uaacauagucauauacuugcuu

SEQ ID NO: 73670 - RNA, 22 nt, Homo sapiens
uuaaugugaaucaggaugcauu

SEQ ID NO: 73671 - RNA, 17 nt, Homo sapiens
auaugaauuuuggagau

SEQ ID NO: 73672 - RNA, 20 nt, Homo sapiens
augcaaacccugcuuugugg

SEQ ID NO: 73673 - RNA, 22 nt, Homo sapiens
uagcagcaaagcaggaucugcu

SEQ ID NO: 73674 - RNA, 22 nt, Homo sapiens
ugucauucaggaaauucuaagu

SEQ ID NO: 73675 - RNA, 22 nt, Homo sapiens
aucagaguggguuuuaaaagug

SEQ ID NO: 73676 - RNA, 22 nt, Homo sapiens
ucucaguguuaucuaucugccu

SEQ ID NO: 73677 - RNA, 22 nt, Homo sapiens
cacacugucuucauuacuguag

SEQ ID NO: 73678 - RNA, 22 nt, Homo sapiens
augaacagagccuugagaaccu

SEQ ID NO: 73679 - RNA, 22 nt, Homo sapiens
ugggaaugaaauuacauagcuu

SEQ ID NO: 73680 - RNA, 22 nt, Homo sapiens
ugucaaugggaauuuguuuuag

SEQ ID NO: 73681 - RNA, 22 nt, Homo sapiens
cucaugcugucuucugggguaa

SEQ ID NO: 73682 - RNA, 22 nt, Homo sapiens
uacucugcaguaauuccagccc

SEQ ID NO: 73683 - RNA, 22 nt, Homo sapiens
ucagauugaugcauacuuaaau

SEQ ID NO: 73684 - RNA, 22 nt, Homo sapiens
aucccaguucagccucugacac

SEQ ID NO: 73685 - RNA, 22 nt, Homo sapiens
agugaacaaagaagugcagaua

SEQ ID NO: 73686 - RNA, 22 nt, Homo sapiens
auaaaugcaaugguauuuuuga

SEQ ID NO: 73687 - RNA, 22 nt, Homo sapiens
uaacuccauuuggacucaguau

SEQ ID NO: 73688 - RNA, 22 nt, Homo sapiens
gcagugugaucacagcuuacug

SEQ ID NO: 73689 - RNA, 21 nt, Homo sapiens
aagaaagcuggacuugccgcu

SEQ ID NO: 73690 - RNA, 23 nt, Homo sapiens
cuuuguccccacccaaaucucau

SEQ ID NO: 73691 - RNA, 22 nt, Homo sapiens
guuaggcagugugguauagcag

SEQ ID NO: 73692 - RNA, 22 nt, Homo sapiens
uaucacagguggacugcacacc

SEQ ID NO: 73693 - RNA, 22 nt, Homo sapiens
augagauauuuuauaagaucau

SEQ ID NO: 73694 - RNA, 23 nt, Homo sapiens
ggaaugaaaccugguuaugauau

SEQ ID NO: 73695 - RNA, 22 nt, Homo sapiens
aggugaaugcucacauucuaau

SEQ ID NO: 73696 - RNA, 19 nt, Homo sapiens
uagcagcaugauuuauaau

SEQ ID NO: 73697 - RNA, 22 nt, Homo sapiens
auugucauuuucugagaaguaa

SEQ ID NO: 73698 - RNA, 22 nt, Homo sapiens
uuugggaaaugaaguugguaga

SEQ ID NO: 73699 - RNA, 22 nt, Homo sapiens
agcauuaguugugaagccuuua

SEQ ID NO: 73700 - RNA, 22 nt, Homo sapiens
uucagagagggagggauaccua

SEQ ID NO: 73701 - RNA, 22 nt, Homo sapiens
uugacauugcuguaguguccag

SEQ ID NO: 73702 - RNA, 22 nt, Homo sapiens
cacugggccaucacuuaauauu

SEQ ID NO: 73703 - RNA, 22 nt, Homo sapiens
aucucaguuaauuccaucuuuc

SEQ ID NO: 73704 - RNA, 22 nt, Homo sapiens
uggucaccugaauuaugcaugu

SEQ ID NO: 73705 - RNA, 22 nt, Homo sapiens
gcagugugauguuuuaaucuau

SEQ ID NO: 73706 - RNA, 22 nt, Homo sapiens
ucacuguggaacucaaaaagcu

SEQ ID NO: 73707 - RNA, 22 nt, Homo sapiens
cccagugaagagaaccuuacga

SEQ ID NO: 73708 - RNA, 20 nt, Homo sapiens
agcauugguuagaacaguag

SEQ ID NO: 73709 - RNA, 22 nt, Homo sapiens
cagugucugcauuuggaacuca

SEQ ID NO: 73710 - RNA, 22 nt, Homo sapiens
acugcacugucaaccuccuggg

SEQ ID NO: 73711 - RNA, 20 nt, Homo sapiens
uucacugggcucucuguugg

SEQ ID NO: 73712 - RNA, 22 nt, Homo sapiens
gagcugaauugcugccauuugc

SEQ ID NO: 73713 - RNA, 22 nt, Homo sapiens
augugcacaugcuuacauguga

SEQ ID NO: 73714 - RNA, 22 nt, Homo sapiens
ugugcaaucagcuucauuacau

SEQ ID NO: 73715 - RNA, 22 nt, Homo sapiens
uguuuaguuaagacauagaauu

SEQ ID NO: 73716 - RNA, 22 nt, Homo sapiens
ucccaguggucuugaaacaggg

SEQ ID NO: 73717 - RNA, 22 nt, Homo sapiens
aagcuggagugcaguggugcga

SEQ ID NO: 73718 - RNA, 21 nt, Homo sapiens
uggaauguucugacuucaggg

SEQ ID NO: 73719 - RNA, 22 nt, Homo sapiens
uaguagcaccucucaugagcuu

SEQ ID NO: 73720 - RNA, 22 nt, Homo sapiens
augaaaacaugauuugccuguu

SEQ ID NO: 73721 - RNA, 22 nt, Homo sapiens
ucugacaaugaacaaucuauag

SEQ ID NO: 73722 - RNA, 22 nt, Homo sapiens
gcaaaguaauuguuguuuuugc

SEQ ID NO: 73723 - RNA, 22 nt, Homo sapiens
guucaguuuuaaagggaaauug

SEQ ID NO: 73724 - RNA, 23 nt, Homo sapiens
cagcuucauugaacauaacuccu

SEQ ID NO: 73725 - RNA, 20 nt, Homo sapiens
acacugugcuaaggauuuuc

SEQ ID NO: 73726 - RNA, 22 nt, Homo sapiens
uucaagucaacaagcacuugag

SEQ ID NO: 73727 - RNA, 22 nt, Homo sapiens
ucacagaugaggcgagaggcag

SEQ ID NO: 73728 - RNA, 22 nt, Homo sapiens
agugucaggagacagguagcug

SEQ ID NO: 73729 - RNA, 22 nt, Homo sapiens
uggggcaaugaacauuuuugca

SEQ ID NO: 73730 - RNA, 22 nt, Homo sapiens
acugcacuccagccuccugggu

SEQ ID NO: 73731 - RNA, 22 nt, Homo sapiens
acagugcuuggcacacaguaau

SEQ ID NO: 73732 - RNA, 22 nt, Homo sapiens
auagaaucaucugugcacuagu

SEQ ID NO: 73733 - RNA, 22 nt, Homo sapiens
uuccaguggacuacuucauccu

SEQ ID NO: 73734 - RNA, 22 nt, Homo sapiens
acaguguguguguucaccuaga

SEQ ID NO: 73735 - RNA, 22 nt, Homo sapiens
aagcaucacauaauggaucaug

SEQ ID NO: 73736 - RNA, 22 nt, Homo sapiens
cuuuguguaggugccucuggcu

SEQ ID NO: 73737 - RNA, 22 nt, Homo sapiens
cacagucuugcaauauugagau

SEQ ID NO: 73738 - RNA, 22 nt, Homo sapiens
ggcagcauugccuuugcaguga

SEQ ID NO: 73739 - RNA, 22 nt, Homo sapiens
ugagccaaugauuugaauagag

SEQ ID NO: 73740 - RNA, 22 nt, Homo sapiens
uuaaugaacuuuauuuuguaga

SEQ ID NO: 73741 - RNA, 22 nt, Homo sapiens
uaaagcacuuuuuucugcaugg

SEQ ID NO: 73742 - RNA, 20 nt, Homo sapiens
acccucuaggaugauuucuu

SEQ ID NO: 73743 - RNA, 22 nt, Homo sapiens
uucugagguuauauucucucaa

SEQ ID NO: 73744 - RNA, 20 nt, Homo sapiens
acugcacuccaggcugccca

SEQ ID NO: 73745 - RNA, 22 nt, Homo sapiens
caacucuguaggauccaggugg

SEQ ID NO: 73746 - RNA, 22 nt, Homo sapiens
augaauacugcugcaaugaaca

SEQ ID NO: 73747 - RNA, 21 nt, Homo sapiens
aucagagacccaggcuuccuc

SEQ ID NO: 73748 - RNA, 22 nt, Homo sapiens
cagacaugucuuguggccgugg

SEQ ID NO: 73749 - RNA, 17 nt, Homo sapiens
guggauagaacaaugaa

SEQ ID NO: 73750 - RNA, 22 nt, Homo sapiens
gucauggacaaggugugagcca

SEQ ID NO: 73751 - RNA, 19 nt, Homo sapiens
augaguuaggggaaauuuc

SEQ ID NO: 73752 - RNA, 22 nt, Homo sapiens
cacacugucuucaauggguggu

SEQ ID NO: 73753 - RNA, 22 nt, Homo sapiens
auguaguugcucugccuguuuu

SEQ ID NO: 73754 - RNA, 22 nt, Homo sapiens
uucacagugugaucuaugggca

SEQ ID NO: 73755 - RNA, 22 nt, Homo sapiens
auguuagcaucaauauucauca

SEQ ID NO: 73756 - RNA, 22 nt, Homo sapiens
cugaggguagaaggaucacuug

SEQ ID NO: 73757 - RNA, 22 nt, Homo sapiens
cugacauuguugaucacagcca

SEQ ID NO: 73758 - RNA, 22 nt, Homo sapiens
gugacauuauuucagcuacaug

SEQ ID NO: 73759 - RNA, 23 nt, Homo sapiens
ugacaagagcgagacuuggucuc

SEQ ID NO: 73760 - RNA, 22 nt, Homo sapiens
caaugcauuauucucccacuuc

SEQ ID NO: 73761 - RNA, 22 nt, Homo sapiens
uacagcuaugugcaugcaugcu

SEQ ID NO: 73762 - RNA, 22 nt, Homo sapiens
aucccaguaaaaauggcuucua

SEQ ID NO: 73763 - RNA, 22 nt, Homo sapiens
uacuagaguagugcagagggga

SEQ ID NO: 73764 - RNA, 22 nt, Homo sapiens
uuacaucaucacauuaguuugc

SEQ ID NO: 73765 - RNA, 23 nt, Homo sapiens
agagugcaauggugccaucucgg

SEQ ID NO: 73766 - RNA, 22 nt, Homo sapiens
gagaacauuuaagccacucagg

SEQ ID NO: 73767 - RNA, 22 nt, Homo sapiens
gugucaguggggagugaucuuc

SEQ ID NO: 73768 - RNA, 22 nt, Homo sapiens
aagcugugucuugucagcuacc

SEQ ID NO: 73769 - RNA, 22 nt, Homo sapiens
acugcacuccagccugcugaca

SEQ ID NO: 73770 - RNA, 22 nt, Homo sapiens
ugugauaguuggcuaaagcagu

SEQ ID NO: 73771 - RNA, 22 nt, Homo sapiens
agcaccacaauuuccugccuaa

SEQ ID NO: 73772 - RNA, 20 nt, Homo sapiens
cuugaagacuaugcugcuga

SEQ ID NO: 73773 - RNA, 22 nt, Homo sapiens
ugaaauguuaaacaaguggcuc

SEQ ID NO: 73774 - RNA, 22 nt, Homo sapiens
cugaauagucaacgauggacug

SEQ ID NO: 73775 - RNA, 20 nt, Homo sapiens
cuucacagaaguggaaucau

SEQ ID NO: 73776 - RNA, 21 nt, Homo sapiens
uugagaagaauuagcucuucc

SEQ ID NO: 73777 - RNA, 22 nt, Homo sapiens
cugugguuacguucuuugugcu

SEQ ID NO: 73778 - RNA, 22 nt, Homo sapiens
ugaaagacugaagaauaggcau

SEQ ID NO: 73779 - RNA, 22 nt, Homo sapiens
ucaucagaaucccuuagggaug

SEQ ID NO: 73780 - RNA, 22 nt, Homo sapiens
uugagggaggccucaguuuaca

SEQ ID NO: 73781 - RNA, 22 nt, Homo sapiens
ugaagugaagacucacagaagg

SEQ ID NO: 73782 - RNA, 22 nt, Homo sapiens
uccaguuuuguuaacauauggu

SEQ ID NO: 73783 - RNA, 22 nt, Homo sapiens
ugcuggcguuacucuccaucag

SEQ ID NO: 73784 - RNA, 22 nt, Homo sapiens
cugaggaaguucuuuaacaguu

SEQ ID NO: 73785 - RNA, 22 nt, Homo sapiens
acugcacuccagccugcccaac

SEQ ID NO: 73786 - RNA, 20 nt, Homo sapiens
cagucaugaagaacugugag

SEQ ID NO: 73787 - RNA, 22 nt, Homo sapiens
uauugaacgugggauauugaag

SEQ ID NO: 73788 - RNA, 22 nt, Homo sapiens
ugagaucuuggaggcuuuguga

SEQ ID NO: 73789 - RNA, 22 nt, Homo sapiens
gacacugucuucugcucuuaaa

SEQ ID NO: 73790 - RNA, 22 nt, Homo sapiens
uuugggaaugaguuuaucauuu

SEQ ID NO: 73791 - RNA, 22 nt, Homo sapiens
ugucaccauuuguaggugagga

SEQ ID NO: 73792 - RNA, 22 nt, Homo sapiens
uuccuugagucuuuuuccugag

SEQ ID NO: 73793 - RNA, 22 nt, Homo sapiens
uggaaugucagcuacaagaggg

SEQ ID NO: 73794 - RNA, 20 nt, Homo sapiens
acugcacuccagccuuccag

SEQ ID NO: 73795 - RNA, 22 nt, Homo sapiens
uagaauguaaauuccaagggca

SEQ ID NO: 73796 - RNA, 22 nt, Homo sapiens
ccacaguugaaauuuugacugu

SEQ ID NO: 73797 - RNA, 22 nt, Homo sapiens
uuauuagguuagugcaaaaguu

SEQ ID NO: 73798 - RNA, 22 nt, Homo sapiens
ugucaggagcaaugauaaauuu

SEQ ID NO: 73799 - RNA, 22 nt, Homo sapiens
ugaaauacuuaauuucuccaug

SEQ ID NO: 73800 - RNA, 18 nt, Homo sapiens
uuuguacuuuuucuaaug

SEQ ID NO: 73801 - RNA, 22 nt, Homo sapiens
gcaagaauggaacaggagagcc

SEQ ID NO: 73802 - RNA, 22 nt, Homo sapiens
ugggaagauucuguguuuuucc

SEQ ID NO: 73803 - RNA, 22 nt, Homo sapiens
uucacugggugugguggcucac

SEQ ID NO: 73804 - RNA, 21 nt, Homo sapiens
ugcucaugaguaaugcaguga

SEQ ID NO: 73805 - RNA, 22 nt, Homo sapiens
augugcagauguuacaaauugu

SEQ ID NO: 73806 - RNA, 22 nt, Homo sapiens
uuuaacauuggaugagaucguc

SEQ ID NO: 73807 - RNA, 22 nt, Homo sapiens
uuagguuguuucuggucuuagg

SEQ ID NO: 73808 - RNA, 17 nt, Homo sapiens
aguacugucccauccuu

SEQ ID NO: 73809 - RNA, 22 nt, Homo sapiens
augagauacuacaaaugaguuu

SEQ ID NO: 73810 - RNA, 22 nt, Homo sapiens
cucaguggauuagauaaugcac

SEQ ID NO: 73811 - RNA, 22 nt, Homo sapiens
auugauaguuuaauaggaauug

SEQ ID NO: 73812 - RNA, 22 nt, Homo sapiens
gcaagaaugagaaggauuaauu

SEQ ID NO: 73813 - RNA, 22 nt, Homo sapiens
ggacagugaaugccacuccucc

SEQ ID NO: 73814 - RNA, 22 nt, Homo sapiens
cuuugugugggccaagggcugg

SEQ ID NO: 73815 - RNA, 22 nt, Homo sapiens
ugcuagaagaucacacacauca

SEQ ID NO: 73816 - RNA, 22 nt, Homo sapiens
augaaaucuuuggcagaucuua

SEQ ID NO: 73817 - RNA, 20 nt, Homo sapiens
acugcacuucagccugcugg

SEQ ID NO: 73818 - RNA, 22 nt, Homo sapiens
uggcuagaccugcauaacagcu

SEQ ID NO: 73819 - RNA, 22 nt, Homo sapiens
gcaagaaucugggaguaaaauu

SEQ ID NO: 73820 - RNA, 21 nt, Homo sapiens
aaucacaguuguucugccuuc

SEQ ID NO: 73821 - RNA, 22 nt, Homo sapiens
ugucccaguuggguauugaauu

SEQ ID NO: 73822 - RNA, 22 nt, Homo sapiens
uuagaacaguguuugccucgcu

SEQ ID NO: 73823 - RNA, 22 nt, Homo sapiens
uugacaaugcacugugcuaagu

SEQ ID NO: 73824 - RNA, 22 nt, Homo sapiens
ucacagucggugacuucuugcu

SEQ ID NO: 73825 - RNA, 22 nt, Homo sapiens
uuggccauaugacuugcuuugg

SEQ ID NO: 73826 - RNA, 22 nt, Homo sapiens
uaucagcacaguggguucaugg

SEQ ID NO: 73827 - RNA, 22 nt, Homo sapiens
ugucacugugcagucaugcauu

SEQ ID NO: 73828 - RNA, 22 nt, Homo sapiens
ugugaugguuuagcauuuucuu

SEQ ID NO: 73829 - RNA, 22 nt, Homo sapiens
cacagcuaacaacuguuucuuc

SEQ ID NO: 73830 - RNA, 22 nt, Homo sapiens
ggcagcaugggugccuuuguga

SEQ ID NO: 73831 - RNA, 22 nt, Homo sapiens
cucuuugaugugaaccgugguu

SEQ ID NO: 73832 - RNA, 22 nt, Homo sapiens
agucaaaugcuuauguauaaag

SEQ ID NO: 73833 - RNA, 22 nt, Homo sapiens
aucucaguucaggcuggccaca

SEQ ID NO: 73834 - RNA, 22 nt, Homo sapiens
auuaaucaggcaaugcuugcua

SEQ ID NO: 73835 - RNA, 22 nt, Homo sapiens
ucagaccauuucauuacagacu

SEQ ID NO: 73836 - RNA, 22 nt, Homo sapiens
uugcuucauucaacauugaggg

SEQ ID NO: 73837 - RNA, 21 nt, Homo sapiens
caugucacugcacucuagccu

SEQ ID NO: 73838 - RNA, 22 nt, Homo sapiens
uucacuguagccucagccucuu

SEQ ID NO: 73839 - RNA, 22 nt, Homo sapiens
aagcuggauuucgcauccuguu

SEQ ID NO: 73840 - RNA, 22 nt, Homo sapiens
uagcagcauaaauggacuaaga

SEQ ID NO: 73841 - RNA, 22 nt, Homo sapiens
aguaucacaggcaaaacagaau

SEQ ID NO: 73842 - RNA, 22 nt, Homo sapiens
uuuaucuguuuaaaacuguuca

SEQ ID NO: 73843 - RNA, 22 nt, Homo sapiens
cugugcauaucuuggacugugu

SEQ ID NO: 73844 - RNA, 22 nt, Homo sapiens
aauguguuuugaaaucaggaag

SEQ ID NO: 73845 - RNA, 22 nt, Homo sapiens
aacacuguuuccagucaugauc

SEQ ID NO: 73846 - RNA, 22 nt, Homo sapiens
uacaguacagugacaccauuau

SEQ ID NO: 73847 - RNA, 22 nt, Homo sapiens
cuuuguguggacauuucaggca

SEQ ID NO: 73848 - RNA, 22 nt, Homo sapiens
ugucauguugguguacugcacc

SEQ ID NO: 73849 - RNA, 22 nt, Homo sapiens
uuuaaugcgucucugaguuuug

SEQ ID NO: 73850 - RNA, 21 nt, Homo sapiens
ucaucaagcuguagacaugau

SEQ ID NO: 73851 - RNA, 22 nt, Homo sapiens
ugaaauguugggugauggaauc

SEQ ID NO: 73852 - RNA, 23 nt, Homo sapiens
auuccaguggcaauuggagaaac

SEQ ID NO: 73853 - RNA, 20 nt, Homo sapiens
uagcagcagacagagggagg

SEQ ID NO: 73854 - RNA, 22 nt, Homo sapiens
auuggcagaaaucuuuauagua

SEQ ID NO: 73855 - RNA, 22 nt, Homo sapiens
cuucaucugguuugugaacuuu

SEQ ID NO: 73856 - RNA, 18 nt, Homo sapiens
cuuaacauugggaugaua

SEQ ID NO: 73857 - RNA, 22 nt, Homo sapiens
auugaacaugccauauguacca

SEQ ID NO: 73858 - RNA, 22 nt, Homo sapiens
uuauuagguuaaccuauagcua

SEQ ID NO: 73859 - RNA, 22 nt, Homo sapiens
uacucugcagagaugcauaaca

SEQ ID NO: 73860 - RNA, 22 nt, Homo sapiens
ccucacaaccuuuauugaagag

SEQ ID NO: 73861 - RNA, 22 nt, Homo sapiens
uaaagcacaaguaaagaauacu

SEQ ID NO: 73862 - RNA, 22 nt, Homo sapiens
caggugcauuggcugacaccug

SEQ ID NO: 73863 - RNA, 22 nt, Homo sapiens
uaaugcuccauggguuauuaaa

SEQ ID NO: 73864 - RNA, 20 nt, Homo sapiens
ucacuggagcucauuugauu

SEQ ID NO: 73865 - RNA, 22 nt, Homo sapiens
agacagcugguagcacuuccug

SEQ ID NO: 73866 - RNA, 22 nt, Homo sapiens
auuaacaucuagaguuuuggug

SEQ ID NO: 73867 - RNA, 22 nt, Homo sapiens
aacacggcccgcagagcaagcu

SEQ ID NO: 73868 - RNA, 22 nt, Homo sapiens
uuaugucacuguucagucuccc

SEQ ID NO: 73869 - RNA, 22 nt, Homo sapiens
uugacauaguuucugaaauaga

SEQ ID NO: 73870 - RNA, 22 nt, Homo sapiens
ugccaaggagucagucccuaga

SEQ ID NO: 73871 - RNA, 22 nt, Homo sapiens
gggaagugugguuucuuuacag

SEQ ID NO: 73872 - RNA, 22 nt, Homo sapiens
acacuguuuuguggagaaugua

SEQ ID NO: 73873 - RNA, 22 nt, Homo sapiens
uugcuagagaugagggaugugu

SEQ ID NO: 73874 - RNA, 22 nt, Homo sapiens
uaacugcaaccucugccugcug

SEQ ID NO: 73875 - RNA, 22 nt, Homo sapiens
uacauccauccugcugggcagu

SEQ ID NO: 73876 - RNA, 22 nt, Homo sapiens
ggaaugggauuugaagucuggc

SEQ ID NO: 73877 - RNA, 22 nt, Homo sapiens
uagcagcauuuuuguagaguau

SEQ ID NO: 73878 - RNA, 22 nt, Homo sapiens
uugaggucuuugagcaaacgca

SEQ ID NO: 73879 - RNA, 22 nt, Homo sapiens
caugugcaugagcacauacgug

SEQ ID NO: 73880 - RNA, 22 nt, Homo sapiens
aagccagugugacaggaaacuu

SEQ ID NO: 73881 - RNA, 22 nt, Homo sapiens
uuuaauguuacaguauugguau

SEQ ID NO: 73882 - RNA, 22 nt, Homo sapiens
caucacaguacuaaucgucaua

SEQ ID NO: 73883 - RNA, 22 nt, Homo sapiens
gcaguguggguagagggcaaga

SEQ ID NO: 73884 - RNA, 22 nt, Homo sapiens
uucuuagguuaaggcugagaga

SEQ ID NO: 73885 - RNA, 22 nt, Homo sapiens
uagacacuagauaugugacuga

SEQ ID NO: 73886 - RNA, 22 nt, Homo sapiens
agcuauauugaggaugccauuc

SEQ ID NO: 73887 - RNA, 19 nt, Homo sapiens
caucacagagucuuccauu

SEQ ID NO: 73888 - RNA, 22 nt, Homo sapiens
ugaaguguuuuuucaggcaugu

SEQ ID NO: 73889 - RNA, 22 nt, Homo sapiens
ggaagacaguguggugauuccu

SEQ ID NO: 73890 - RNA, 22 nt, Homo sapiens
uuggcagcauuccagccaagca

SEQ ID NO: 73891 - RNA, 22 nt, Homo sapiens
ugucagcacaacucagguuccu

SEQ ID NO: 73892 - RNA, 22 nt, Homo sapiens
gggcaugaugucuuaugccuau

SEQ ID NO: 73893 - RNA, 22 nt, Homo sapiens
cugcuaagagaaugagacuuag

SEQ ID NO: 73894 - RNA, 22 nt, Homo sapiens
agagugaagcuuuuuauauucu

SEQ ID NO: 73895 - RNA, 22 nt, Homo sapiens
cuagcugcacuuccugcuacug

SEQ ID NO: 73896 - RNA, 22 nt, Homo sapiens
ccauuucacucuuccugaagga

SEQ ID NO: 73897 - RNA, 22 nt, Homo sapiens
cucaaagugcuaagauuaggcu

SEQ ID NO: 73898 - RNA, 22 nt, Homo sapiens
cugugcauguaugcgugaguuc

SEQ ID NO: 73899 - RNA, 22 nt, Homo sapiens
auguggcauuucucauucauuu

SEQ ID NO: 73900 - RNA, 22 nt, Homo sapiens
uuugagaaugcuaccagagaag

SEQ ID NO: 73901 - RNA, 22 nt, Homo sapiens
ugucaucauuccaucagggcuu

SEQ ID NO: 73902 - RNA, 22 nt, Homo sapiens
auaguacuauugcaguguuaua

SEQ ID NO: 73903 - RNA, 22 nt, Homo sapiens
gagacggagucuugcucuguug

SEQ ID NO: 73904 - RNA, 22 nt, Homo sapiens
gagacggagucucgcucugucg

SEQ ID NO: 73905 - RNA, 23 nt, Homo sapiens
ucugcggguguggacccuagugc

SEQ ID NO: 73906 - RNA, 22 nt, Homo sapiens
uguaguuugaaagcucccucug

SEQ ID NO: 73907 - RNA, 22 nt, Homo sapiens
uuuuuggaggagguuagaucau

SEQ ID NO: 73908 - RNA, 22 nt, Homo sapiens
uuuuuugguaauugaacaauga

SEQ ID NO: 73909 - RNA, 22 nt, Homo sapiens
uuuuuuaguuagcugggcauga

SEQ ID NO: 73910 - RNA, 22 nt, Homo sapiens
uuauucauuaauugcuaagguu

SEQ ID NO: 73911 - RNA, 22 nt, Homo sapiens
uuauggauuuauauucuguagu

SEQ ID NO: 73912 - RNA, 22 nt, Homo sapiens
ugugauaguuggcuaaagcagu

SEQ ID NO: 73913 - RNA, 22 nt, Homo sapiens
uugacaguggcuuaaauugguu

SEQ ID NO: 73914 - RNA, 22 nt, Homo sapiens
auggcuagauuguaugguaguu

SEQ ID NO: 73915 - RNA, 22 nt, Homo sapiens
agucauggaucacaguagccuc

SEQ ID NO: 73916 - RNA, 22 nt, Homo sapiens
auagcauaucccacaugucaga

SEQ ID NO: 73917 - RNA, 22 nt, Homo sapiens
augcaaaucuuaaguaugugug

SEQ ID NO: 73918 - RNA, 22 nt, Homo sapiens
acuuuuugauggggagaacauu

SEQ ID NO: 73919 - RNA, 22 nt, Homo sapiens
acuuuuguuauacagugugaua

SEQ ID NO: 73920 - RNA, 22 nt, Homo sapiens
agcacauauauuucccaaaaca

SEQ ID NO: 73921 - RNA, 22 nt, Homo sapiens
uuuucaguuuuccagguagccg

SEQ ID NO: 73922 - RNA, 21 nt, Homo sapiens
aaggugguggugauugagaug

SEQ ID NO: 73923 - RNA, 19 nt, Homo sapiens
aaguacuugucuuuugaag

SEQ ID NO: 73924 - RNA, 18 nt, Homo sapiens
uggauaguuguuggcaga

SEQ ID NO: 73925 - RNA, 22 nt, Homo sapiens
uggauaguuuacugaagagugg

SEQ ID NO: 73926 - RNA, 22 nt, Homo sapiens
ugagauagaaaacauaggagaa

SEQ ID NO: 73927 - RNA, 22 nt, Homo sapiens
ugacaguaucuacagcuucuua

SEQ ID NO: 73928 - RNA, 22 nt, Homo sapiens
uauagcaaugccccacuccuga

SEQ ID NO: 73929 - RNA, 22 nt, Homo sapiens
uauggauuuuggaauauguggg

SEQ ID NO: 73930 - RNA, 22 nt, Homo sapiens
uauggauuuuuuugacaagagc

SEQ ID NO: 73931 - RNA, 22 nt, Homo sapiens
uacaguauuaugagugauugaa

SEQ ID NO: 73932 - RNA, 22 nt, Homo sapiens
guuuuuggggucacuauuaccg

SEQ ID NO: 73933 - RNA, 15 nt, Homo sapiens
guuuuuggauacaau

SEQ ID NO: 73934 - RNA, 22 nt, Homo sapiens
gucauggacaaggugugagcca

SEQ ID NO: 73935 - RNA, 22 nt, Homo sapiens
gucauggaaaucuacauuguua

SEQ ID NO: 73936 - RNA, 22 nt, Homo sapiens
gucaguuugguuaaucauucca

SEQ ID NO: 73937 - RNA, 22 nt, Homo sapiens
uauagcaaugugccacucucug

SEQ ID NO: 73938 - RNA, 22 nt, Homo sapiens
uagcagaauaacuugccagccu

SEQ ID NO: 73939 - RNA, 22 nt, Homo sapiens
uauggauauuacuccacaaaga

SEQ ID NO: 73940 - RNA, 22 nt, Homo sapiens
uauggauucuagcucaguaggu

SEQ ID NO: 73941 - RNA, 22 nt, Homo sapiens
guuuggauauuaggcaagagua

SEQ ID NO: 73942 - RNA, 22 nt, Homo sapiens
guaugugacuggaacaguagga

SEQ ID NO: 73943 - RNA, 22 nt, Homo sapiens
guaugauacuguaacagugggu

SEQ ID NO: 73944 - RNA, 22 nt, Homo sapiens
guacaguaguaaaagugaauga

SEQ ID NO: 73945 - RNA, 22 nt, Homo sapiens
ggaaguauaaacuuaguggagu

SEQ ID NO: 73946 - RNA, 22 nt, Homo sapiens
gucaugaaguuuugaaugaaau

SEQ ID NO: 73947 - RNA, 22 nt, Homo sapiens
gucauggagggacauaacuaac

SEQ ID NO: 73948 - RNA, 22 nt, Homo sapiens
auuggacagcauuucuagacuu

SEQ ID NO: 73949 - RNA, 22 nt, Homo sapiens
auuuuuggauauagggaaggau

SEQ ID NO: 73950 - RNA, 22 nt, Homo sapiens
auuuuugguugucagcacuagg

SEQ ID NO: 73951 - RNA, 22 nt, Homo sapiens
auuuuugguugguaggcuauua

SEQ ID NO: 73952 - RNA, 22 nt, Homo sapiens
cuucaugagacuuuuggaaggc

SEQ ID NO: 73953 - RNA, 22 nt, Homo sapiens
uuuauggagagauauuuauggu

SEQ ID NO: 73954 - RNA, 22 nt, Homo sapiens
uugcacaguguguacagcacca

SEQ ID NO: 73955 - RNA, 22 nt, Homo sapiens
ucaugagacacacuggaaagga

SEQ ID NO: 73956 - RNA, 22 nt, Homo sapiens
uggagagugauaaguaaaugga

SEQ ID NO: 73957 - RNA, 22 nt, Homo sapiens
uggagagucauuuauaguauuu

SEQ ID NO: 73958 - RNA, 22 nt, Homo sapiens
uggaagcauagcagcgugugug

SEQ ID NO: 73959 - RNA, 22 nt, Homo sapiens
ugcauagcauauauuguagagu

SEQ ID NO: 73960 - RNA, 22 nt, Homo sapiens
aaagugcacuuggaagagggcc

SEQ ID NO: 73961 - RNA, 22 nt, Homo sapiens
aaaugcauugagggaaaaggca

SEQ ID NO: 73962 - RNA, 20 nt, Homo sapiens
acaguauguuuggaugcaua

SEQ ID NO: 73963 - RNA, 22 nt, Homo sapiens
acagguauagaaagcuaaaggg

SEQ ID NO: 73964 - RNA, 22 nt, Homo sapiens
auggauauuuuuugaacauaga

SEQ ID NO: 73965 - RNA, 22 nt, Homo sapiens
augguacuccagagaagcagaa

SEQ ID NO: 73966 - RNA, 22 nt, Homo sapiens
uuguuugguugaguauggaagu

SEQ ID NO: 73967 - RNA, 22 nt, Homo sapiens
uuuggaagaugccacuguauca

SEQ ID NO: 73968 - RNA, 22 nt, Homo sapiens
uuggauaguuuaugaaaaaugg

SEQ ID NO: 73969 - RNA, 18 nt, Homo sapiens
uuggacggagagucaaau

SEQ ID NO: 73970 - RNA, 22 nt, Homo sapiens
uucucauggugauggcaaaauc

SEQ ID NO: 73971 - RNA, 22 nt, Homo sapiens
uucauguaauauuucacagcuu

SEQ ID NO: 73972 - RNA, 22 nt, Homo sapiens
uuauuugguuauuguaauuggg

SEQ ID NO: 73973 - RNA, 22 nt, Homo sapiens
cagauaguuguagauaugcagc

SEQ ID NO: 73974 - RNA, 22 nt, Homo sapiens
cuauggauuuacuguauagggu

SEQ ID NO: 73975 - RNA, 22 nt, Homo sapiens
gaagguacgcuuaggaaaugau

SEQ ID NO: 73976 - RNA, 22 nt, Homo sapiens
agguacuugagauucugaacug

SEQ ID NO: 73977 - RNA, 22 nt, Homo sapiens
auagucaaaucucauuaccccc

SEQ ID NO: 73978 - RNA, 22 nt, Homo sapiens
auggaagcugauuagauaguac

SEQ ID NO: 73979 - RNA, 22 nt, Homo sapiens
auggauauugccuaggguagua

SEQ ID NO: 73980 - RNA, 22 nt, Homo sapiens
guaugguuuauagggaaauugu

SEQ ID NO: 73981 - RNA, 22 nt, Homo sapiens
gguaucuuggagagagaaguga

SEQ ID NO: 73982 - RNA, 21 nt, Homo sapiens
uagcaaauugcuauuaaggca

SEQ ID NO: 73983 - RNA, 22 nt, Homo sapiens
uagcaaguguuuaagcacuuuu

SEQ ID NO: 73984 - RNA, 22 nt, Homo sapiens
uacaagguaucagugaccguaa

SEQ ID NO: 73985 - RNA, 22 nt, Homo sapiens
uauggacuuuaggauagcuuuu

SEQ ID NO: 73986 - RNA, 22 nt, Homo sapiens
ugguacuucaugcucacagaua

SEQ ID NO: 73987 - RNA, 19 nt, Homo sapiens
uggucaguucugggagcug

SEQ ID NO: 73988 - RNA, 22 nt, Homo sapiens
uggacuguaauagagaacagaa

SEQ ID NO: 73989 - RNA, 22 nt, Homo sapiens
uggacacugguggauauggaau

SEQ ID NO: 73990 - RNA, 22 nt, Homo sapiens
cagcaaaucauccuauuugagc

SEQ ID NO: 73991 - RNA, 22 nt, Homo sapiens
caagguacuuuuacaauuuccc

SEQ ID NO: 73992 - RNA, 18 nt, Homo sapiens
gacaguguggcaauuccu

SEQ ID NO: 73993 - RNA, 22 nt, Homo sapiens
cuuuugugauucuucaguuacu

SEQ ID NO: 73994 - RNA, 17 nt, Homo sapiens
guggauagaacaaugaa

SEQ ID NO: 73995 - RNA, 22 nt, Homo sapiens
ucaagguacguugccucagauu

SEQ ID NO: 73996 - RNA, 22 nt, Homo sapiens
uaggcaaaugcaagaguagaac

SEQ ID NO: 73997 - RNA, 22 nt, Homo sapiens
uagguacuuaagaucucagcua

SEQ ID NO: 73998 - RNA, 22 nt, Homo sapiens
uagguacuuuacauguuaucuc

SEQ ID NO: 73999 - RNA, 22 nt, Homo sapiens
ugacaguaaacagucuugauua

SEQ ID NO: 74000 - RNA, 22 nt, Homo sapiens
uggccaguuuuuaauugggucu

SEQ ID NO: 74001 - RNA, 22 nt, Homo sapiens
uggauaguucuucuacuagagu

SEQ ID NO: 74002 - RNA, 22 nt, Homo sapiens
uuuuuggguaaugauuaucaau

SEQ ID NO: 74003 - RNA, 23 nt, Homo sapiens
uuuuuguguuucauggaaauagg

SEQ ID NO: 74004 - RNA, 19 nt, Homo sapiens
uuuuguacucugugacuug

SEQ ID NO: 74005 - RNA, 22 nt, Homo sapiens
uuuugcucuugguaaugaaaga

SEQ ID NO: 74006 - RNA, 22 nt, Homo sapiens
uuuuggacuugcuccccugucc

SEQ ID NO: 74007 - RNA, 17 nt, Homo sapiens
uuuuggauuagaaaucc

SEQ ID NO: 74008 - RNA, 21 nt, Homo sapiens
uuuuggucauucaggaagaaa

SEQ ID NO: 74009 - RNA, 20 nt, Homo sapiens
uuuggcacugagugguauaa

SEQ ID NO: 74010 - RNA, 22 nt, Homo sapiens
uuucaguguggcaggcauagcu

SEQ ID NO: 74011 - RNA, 22 nt, Homo sapiens
uucacugagccagacuaagaca

SEQ ID NO: 74012 - RNA, 22 nt, Homo sapiens
uuauucauuaacagggaccaaa

SEQ ID NO: 74013 - RNA, 23 nt, Homo sapiens
agcaaaugcucuagcacuccaac

SEQ ID NO: 74014 - RNA, 22 nt, Homo sapiens
agcaauaugacauugcuacauc

SEQ ID NO: 74015 - RNA, 22 nt, Homo sapiens
agguacuuucccaaccauacug

SEQ ID NO: 74016 - RNA, 21 nt, Homo sapiens
agguaguuuuccuuuuggagu

SEQ ID NO: 74017 - RNA, 22 nt, Homo sapiens
auaagugcuuguugaauaauag

SEQ ID NO: 74018 - RNA, 22 nt, Influenza A virus (A/Hong Kong/1073/99(H9N2))
caucccagugcggggaaggacc

SEQ ID NO: 74019 - RNA, 22 nt, Homo sapiens
uggaaguaaucaugagguagca

SEQ ID NO: 74020 - RNA, 22 nt, Homo sapiens
augacauugaaaagcaagugga

SEQ ID NO: 74021 - RNA, 22 nt, Homo sapiens
agagugaagcuuuuuauauucu

SEQ ID NO: 74022 - RNA, 22 nt, Homo sapiens
ugcuauguuuucccuccuuauc

SEQ ID NO: 74023 - RNA, 22 nt, Homo sapiens
uacuagaguagugcagagggga

SEQ ID NO: 74024 - RNA, 22 nt, Homo sapiens
ucacuguggaacucaaaaagcu

SEQ ID NO: 74025 - RNA, 18 nt, Homo sapiens
acaguguguaaggguucu

SEQ ID NO: 74026 - RNA, 20 nt, Homo sapiens
ucacuggagcucauuugauu

SEQ ID NO: 74027 - RNA, 22 nt, Homo sapiens
ucugucacugguggacgaucac

SEQ ID NO: 74028 - RNA, 22 nt, Homo sapiens
gugacauuauuucagcuacaug

SEQ ID NO: 74029 - RNA, 22 nt, Homo sapiens
uaugccuuuuggcucaagaaac

SEQ ID NO: 74030 - RNA, 22 nt, Homo sapiens
gugaacaagcaaaggcaggagg

SEQ ID NO: 74031 - RNA, 22 nt, Homo sapiens
uggggcaaugaacauuuuugca

SEQ ID NO: 74032 - RNA, 22 nt, Homo sapiens
ucacagaugaggcgagaggcag

SEQ ID NO: 74033 - RNA, 22 nt, Homo sapiens
ugaaguguuuuuucaggcaugu

SEQ ID NO: 74034 - RNA, 22 nt, Homo sapiens
acagugcuucugauaugaugcc

SEQ ID NO: 74035 - RNA, 22 nt, Homo sapiens
uaguagcaccucucaugagcuu

SEQ ID NO: 74036 - RNA, 22 nt, Homo sapiens
uagacacuagauaugugacuga

SEQ ID NO: 74037 - RNA, 22 nt, Homo sapiens
uggccaagagcacagauauugg

SEQ ID NO: 74038 - RNA, 22 nt, Homo sapiens
uucaaguagguaggaccacagg

SEQ ID NO: 74039 - RNA, 22 nt, Homo sapiens
uacaagcaggaaaugguauaug

SEQ ID NO: 74040 - RNA, 19 nt, Homo sapiens
ugcagcaauguaaaagaca

SEQ ID NO: 74041 - RNA, 22 nt, Homo sapiens
ugggaaugaaauuacauagcuu

SEQ ID NO: 74042 - RNA, 22 nt, Homo sapiens
uaacauagucauauacuugcuu

SEQ ID NO: 74043 - RNA, 22 nt, Homo sapiens
auguggcacuugacuuucucgc

SEQ ID NO: 74044 - RNA, 20 nt, Homo sapiens
uggucaccuucaggagguuc

SEQ ID NO: 74045 - RNA, 22 nt, Homo sapiens
ucauguguugcacugaggaccu

SEQ ID NO: 74046 - RNA, 22 nt, Homo sapiens
uacauccauccugcugggcagu

SEQ ID NO: 74047 - RNA, 22 nt, Homo sapiens
aucacagaacuuugagcagaga

SEQ ID NO: 74048 - RNA, 21 nt, Homo sapiens
aucagagacccaggcuuccuc

SEQ ID NO: 74049 - RNA, 23 nt, Homo sapiens
cagcuucauugaacauaacuccu

SEQ ID NO: 74050 - RNA, 22 nt, Homo sapiens
uauugaacgugggauauugaag

SEQ ID NO: 74051 - RNA, 22 nt, Homo sapiens
gagaacauuuaagccacucagg

SEQ ID NO: 74052 - RNA, 22 nt, Homo sapiens
ugucaccauuuguaggugagga

SEQ ID NO: 74053 - RNA, 18 nt, Homo sapiens
uuuguacuuuuucuaaug

SEQ ID NO: 74054 - RNA, 22 nt, Homo sapiens
uccuucauuugucaacucuagu

SEQ ID NO: 74055 - RNA, 22 nt, Homo sapiens
caacucuguaggauccaggugg

SEQ ID NO: 74056 - RNA, 21 nt, Homo sapiens
ucacaaugaacagcagcagaa

SEQ ID NO: 74057 - RNA, 22 nt, Homo sapiens
ucaaagugacaaaguugcagca

SEQ ID NO: 74058 - RNA, 22 nt, Homo sapiens
gcuuuguugauggugagucugu

SEQ ID NO: 74059 - RNA, 22 nt, Homo sapiens
augacauuccacagccguagag

SEQ ID NO: 74060 - RNA, 22 nt, Homo sapiens
ugggaagaagguuuacuugcca

SEQ ID NO: 74061 - RNA, 23 nt, Homo sapiens
ugucaucaagaugaggucacacu

SEQ ID NO: 74062 - RNA, 22 nt, Homo sapiens
augacauugaugcucuggcugg

SEQ ID NO: 74063 - RNA, 22 nt, Homo sapiens
cucugagguuauucguaauauu

SEQ ID NO: 74064 - RNA, 20 nt, Homo sapiens
cuugaagacuaugcugcuga

SEQ ID NO: 74065 - RNA, 21 nt, Homo sapiens
ugcucaugaguaaugcaguga

SEQ ID NO: 74066 - RNA, 22 nt, Homo sapiens
agugcaauaaggauguagaacu

SEQ ID NO: 74067 - RNA, 22 nt, Homo sapiens
gcaaaaaguagugcugguuagg

SEQ ID NO: 74068 - RNA, 21 nt, Homo sapiens
uugagaagaauuagcucuucc

SEQ ID NO: 74069 - RNA, 22 nt, Homo sapiens
ugagaucuuggaggcuuuguga

SEQ ID NO: 74070 - RNA, 22 nt, Homo sapiens
cacaguguuccagcuauuugaa

SEQ ID NO: 74071 - RNA, 21 nt, Homo sapiens
uaucagagacauugagaggca

SEQ ID NO: 74072 - RNA, 22 nt, Homo sapiens
uuauuagguugguggaaaagua

SEQ ID NO: 74073 - RNA, 17 nt, Homo sapiens
ugaggcacuaguaucac

SEQ ID NO: 74074 - RNA, 20 nt, Homo sapiens
cuucacagaaguggaaucau

SEQ ID NO: 74075 - RNA, 22 nt, Homo sapiens
cuuuacaguuggacucacgagg

SEQ ID NO: 74076 - RNA, 22 nt, Homo sapiens
uucacuguagccucagccucuu

SEQ ID NO: 74077 - RNA, 22 nt, Homo sapiens
ggcagcauugccuuugcaguga

SEQ ID NO: 74078 - RNA, 22 nt, Homo sapiens
aucacuggucaugagagaagua

SEQ ID NO: 74079 - RNA, 22 nt, Homo sapiens
aaaugucauggaguguuucccc

SEQ ID NO: 74080 - RNA, 22 nt, Homo sapiens
agcaccacaauuuccugccuaa

SEQ ID NO: 74081 - RNA, 22 nt, Homo sapiens
gggaagauauaggcugggcacc

SEQ ID NO: 74082 - RNA, 22 nt, Homo sapiens
cuguauguuucuaugaauguga

SEQ ID NO: 74083 - RNA, 22 nt, Homo sapiens
acugcacuccagccugccgaca

SEQ ID NO: 74084 - RNA, 22 nt, Homo sapiens
uucugagguuauauucucucaa

SEQ ID NO: 74085 - RNA, 22 nt, Homo sapiens
uucacugggugugguggcucac

SEQ ID NO: 74086 - RNA, 22 nt, Homo sapiens
ugagccaaugauuugaauagag

SEQ ID NO: 74087 - RNA, 22 nt, Homo sapiens
aaucacaggucuuggcugcaug

SEQ ID NO: 74088 - RNA, 22 nt, Homo sapiens
agcuaugucugaugccugauua

SEQ ID NO: 74089 - RNA, 22 nt, Homo sapiens
acugcacuccagccugcccaac

SEQ ID NO: 74090 - RNA, 22 nt, Homo sapiens
aucacuagaucauagguaaaca

SEQ ID NO: 74091 - RNA, 22 nt, Homo sapiens
gacacugucuucugcucuuaaa

SEQ ID NO: 74092 - RNA, 22 nt, Homo sapiens
cacugggccaucacuuaauauu

SEQ ID NO: 74093 - RNA, 22 nt, Homo sapiens
uugacauugcuguaguguccag

SEQ ID NO: 74094 - RNA, 22 nt, Homo sapiens
ugaagugaagacucacagaagg

SEQ ID NO: 74095 - RNA, 20 nt, Homo sapiens
acccucuaggaugauuucuu

SEQ ID NO: 74096 - RNA, 22 nt, Homo sapiens
cacacugucuucauuacuguag

SEQ ID NO: 74097 - RNA, 22 nt, Homo sapiens
ugaaauguugggugauggaauc

SEQ ID NO: 74098 - RNA, 22 nt, Homo sapiens
uaacauucacaugcugcaaaaa

SEQ ID NO: 74099 - RNA, 22 nt, Homo sapiens
uguuuaguuaagacauagaauu

SEQ ID NO: 74100 - RNA, 22 nt, Homo sapiens
uaaugcuccauggguuauuaaa

SEQ ID NO: 74101 - RNA, 22 nt, Homo sapiens
aagugaaugugcuggaauagcu

SEQ ID NO: 74102 - RNA, 22 nt, Homo sapiens
cuggcaaauguuuucuguaaag

SEQ ID NO: 74103 - RNA, 22 nt, Homo sapiens
cuuugcaaauggccuuuccaag

SEQ ID NO: 74104 - RNA, 22 nt, Homo sapiens
uaccagugucagcuuccugugu

SEQ ID NO: 74105 - RNA, 22 nt, Homo sapiens
cuacucuggagagugacaauca

SEQ ID NO: 74106 - RNA, 22 nt, Homo sapiens
guucaguuuuaaagggaaauug

SEQ ID NO: 74107 - RNA, 19 nt, Homo sapiens
uagcagcaugauuuauaau

SEQ ID NO: 74108 - RNA, 22 nt, Homo sapiens
gcaaaguaauuguuguuuuugc

SEQ ID NO: 74109 - RNA, 22 nt, Homo sapiens
aacacuguuuccagucaugauc

SEQ ID NO: 74110 - RNA, 22 nt, Homo sapiens
auuaaucaggcaaugcuugcua

SEQ ID NO: 74111 - RNA, 22 nt, Homo sapiens
ucuaauguaaccugcaaauauu

SEQ ID NO: 74112 - RNA, 22 nt, Homo sapiens
cauuugcacugagacucagcuu

SEQ ID NO: 74113 - RNA, 22 nt, Homo sapiens
cugaauagagcacacugauggg

SEQ ID NO: 74114 - RNA, 22 nt, Homo sapiens
acauaaagaagcaggacauugu

SEQ ID NO: 74115 - RNA, 22 nt, Homo sapiens
uucacagucacccuucuccaug

SEQ ID NO: 74116 - RNA, 23 nt, Homo sapiens
ggaaugaaaccugguuaugauau

SEQ ID NO: 74117 - RNA, 22 nt, Homo sapiens
cagugucugcauuuggaacuca

SEQ ID NO: 74118 - RNA, 22 nt, Homo sapiens
ugugcaaucagcuucauuacau

SEQ ID NO: 74119 - RNA, 22 nt, Homo sapiens
aaugacuaagaugguacauuuu

SEQ ID NO: 74120 - RNA, 20 nt, Homo sapiens
ugggaacaugugguauaugg

SEQ ID NO: 74121 - RNA, 22 nt, Homo sapiens
gaaugaauguuuauccuuagau

SEQ ID NO: 74122 - RNA, 22 nt, Homo sapiens
uuggcagcuguggaaucugggc

SEQ ID NO: 74123 - RNA, 22 nt, Homo sapiens
gcaagaaucugggaguaaaauu

SEQ ID NO: 74124 - RNA, 22 nt, Homo sapiens
uuugggaaugaguuuaucauuu

SEQ ID NO: 74125 - RNA, 22 nt, Homo sapiens
uccaguuuuguuaacauauggu

SEQ ID NO: 74126 - RNA, 22 nt, Homo sapiens
gugaaauguguagaggaucugg

SEQ ID NO: 74127 - RNA, 20 nt, Homo sapiens
acugcacuucagccugcugg

SEQ ID NO: 74128 - RNA, 23 nt, Homo sapiens
agagugcaauggugccaucucgg

SEQ ID NO: 74129 - RNA, 22 nt, Homo sapiens
uuuaacauuggaugagaucguc

SEQ ID NO: 74130 - RNA, 22 nt, Homo sapiens
guggaaugaaaacucucucaca

SEQ ID NO: 74131 - RNA, 22 nt, Homo sapiens
aggugaaugcucacauucuaau

SEQ ID NO: 74132 - RNA, 22 nt, Homo sapiens
uugacaaugcacugugcuaagu

SEQ ID NO: 74133 - RNA, 20 nt, Homo sapiens
acugcacuccagccuuccag

SEQ ID NO: 74134 - RNA, 22 nt, Homo sapiens
gagcugaauugcugccauuugc

SEQ ID NO: 74135 - RNA, 22 nt, Homo sapiens
aagcuggauuuaguguggagca

SEQ ID NO: 74136 - RNA, 22 nt, Homo sapiens
gugucaguggggagugaucuuc

SEQ ID NO: 74137 - RNA, 22 nt, Homo sapiens
ggagugucagaaacaguguccu

SEQ ID NO: 74138 - RNA, 22 nt, Homo sapiens
uuauuagguuagugcaaaaguu

SEQ ID NO: 74139 - RNA, 19 nt, Homo sapiens
caccagugcaugcuacuau

SEQ ID NO: 74140 - RNA, 22 nt, Homo sapiens
cucaaagugcuaagauuaggcu

SEQ ID NO: 74141 - RNA, 22 nt, Homo sapiens
ucugccacugucauugugugau

SEQ ID NO: 74142 - RNA, 22 nt, Homo sapiens
auugcacuccagccuuggggau

SEQ ID NO: 74143 - RNA, 22 nt, Homo sapiens
ugugaugugaugagaaguuccu

SEQ ID NO: 74144 - RNA, 22 nt, Homo sapiens
ugucaguggacugugaaaggca

SEQ ID NO: 74145 - RNA, 22 nt, Homo sapiens
gucagcuuguccagagacucug

SEQ ID NO: 74146 - RNA, 22 nt, Homo sapiens
ugucaucauuccaucagggcuu

SEQ ID NO: 74147 - RNA, 22 nt, Homo sapiens
cuagcugcacuuccugcuacug

SEQ ID NO: 74148 - RNA, 22 nt, Homo sapiens
uaucacagguggacugcacacc

SEQ ID NO: 74149 - RNA, 22 nt, Homo sapiens
uacaguacagugacaccauuau

SEQ ID NO: 74150 - RNA, 18 nt, Homo sapiens
aaacagugucucuuucug

SEQ ID NO: 74151 - RNA, 23 nt, Homo sapiens
auuccaguggcaauuggagaaac

SEQ ID NO: 74152 - RNA, 22 nt, Homo sapiens
uagcagcaaagcaggaucugcu

SEQ ID NO: 74153 - RNA, 20 nt, Homo sapiens
ucaaagacauggcugucaga

SEQ ID NO: 74154 - RNA, 22 nt, Homo sapiens
gagacggagucuugcucuguug

SEQ ID NO: 74155 - RNA, 22 nt, Homo sapiens
gagacggagucucgcucugucg

SEQ ID NO: 74156 - RNA, 22 nt, Homo sapiens
gacaguuucucaggcuuccuua

SEQ ID NO: 74157 - RNA, 22 nt, Homo sapiens
uuugagaaugcuaccagagaag

SEQ ID NO: 74158 - RNA, 22 nt, Homo sapiens
ucucaguguuaucuaucugccu

SEQ ID NO: 74159 - RNA, 22 nt, Homo sapiens
augagauacuacaaaugaguuu

SEQ ID NO: 74160 - RNA, 17 nt, Homo sapiens
aguacugucccauccuu

SEQ ID NO: 74161 - RNA, 22 nt, Homo sapiens
uuucugaggccucaccagaagc

SEQ ID NO: 74162 - RNA, 22 nt, Homo sapiens
ugccaaggagucagucccuaga

SEQ ID NO: 74163 - RNA, 22 nt, Homo sapiens
caugugcaugagcacauacgug

SEQ ID NO: 74164 - RNA, 22 nt, Homo sapiens
ggcagcaugggugccuuuguga

SEQ ID NO: 74165 - RNA, 22 nt, Homo sapiens
acagugcuuggcacacaguaau

SEQ ID NO: 74166 - RNA, 22 nt, Homo sapiens
cuacagaguaucuaaagaggua

SEQ ID NO: 74167 - RNA, 22 nt, Homo sapiens
gcaguguggguagagggcaaga

SEQ ID NO: 74168 - RNA, 22 nt, Homo sapiens
cacacuguuuuccauggggguu

SEQ ID NO: 74169 - RNA, 22 nt, Homo sapiens
uuagaacaguguuugccucgcu

SEQ ID NO: 74170 - RNA, 22 nt, Homo sapiens
agcuuuggauaccugcuguucc

SEQ ID NO: 74171 - RNA, 22 nt, Homo sapiens
acugcacuucagccuuggcuac

SEQ ID NO: 74172 - RNA, 19 nt, Homo sapiens
uuacauccauugcauuuca

SEQ ID NO: 74173 - RNA, 22 nt, Homo sapiens
uagcagcagugguguauuuaga

SEQ ID NO: 74174 - RNA, 22 nt, Homo sapiens
ucagaccauuucauuacagacu

SEQ ID NO: 74175 - RNA, 22 nt, Homo sapiens
gggaagugugguuucuuuacag

SEQ ID NO: 74176 - RNA, 22 nt, Homo sapiens
cucaguggauuagauaaugcac

SEQ ID NO: 74177 - RNA, 22 nt, Homo sapiens
cucugacagugguuagcacugu

SEQ ID NO: 74178 - RNA, 22 nt, Homo sapiens
uaaagcacuuuuuucugcaugg

SEQ ID NO: 74179 - RNA, 22 nt, Homo sapiens
uaucagcacaguggguucaugg

SEQ ID NO: 74180 - RNA, 22 nt, Homo sapiens
caggugcauuggcugacaccug

SEQ ID NO: 74181 - RNA, 22 nt, Homo sapiens
augugcagauguuacaaauugu

SEQ ID NO: 74182 - RNA, 22 nt, Homo sapiens
gagaaugagauuaugguuacau

SEQ ID NO: 74183 - RNA, 22 nt, Homo sapiens
uuagucaaguguacugugaaug

SEQ ID NO: 74184 - RNA, 22 nt, Homo sapiens
uugcuagagaugagggaugugu

SEQ ID NO: 74185 - RNA, 22 nt, Homo sapiens
gagauuauuuaaaaggugauuu

SEQ ID NO: 74186 - RNA, 22 nt, Homo sapiens
aagccagugugacaggaaacuu

SEQ ID NO: 74187 - RNA, 22 nt, Homo sapiens
uucccagucaaacgaaggacuu

SEQ ID NO: 74188 - RNA, 22 nt, Homo sapiens
augugcacaugcuuacauguga

SEQ ID NO: 74189 - RNA, 22 nt, Homo sapiens
cugugcauaucuuggacugugu

SEQ ID NO: 74190 - RNA, 22 nt, Homo sapiens
cugacauuguugaucacagcca

SEQ ID NO: 74191 - RNA, 17 nt, Homo sapiens
auaugaauuuuggagau

SEQ ID NO: 74192 - RNA, 22 nt, Homo sapiens
accuucauuguugccaugucca

SEQ ID NO: 74193 - RNA, 22 nt, Homo sapiens
ugaauguccugacgcugcaguu

SEQ ID NO: 74194 - RNA, 22 nt, Homo sapiens
acugcacuccagccuccugggu

SEQ ID NO: 74195 - RNA, 22 nt, Homo sapiens
ugagguaugugaugucuuuuag

SEQ ID NO: 74196 - RNA, 22 nt, Homo sapiens
agcacagugguuaaguuucuua

SEQ ID NO: 74197 - RNA, 19 nt, Homo sapiens
augacauuuggggguggac

SEQ ID NO: 74198 - RNA, 22 nt, Homo sapiens
uuuaaugcgucucugaguuuug

SEQ ID NO: 74199 - RNA, 22 nt, Homo sapiens
ugaaauacuuuggcucuuuguu

SEQ ID NO: 74200 - RNA, 22 nt, Homo sapiens
ugaggcacucuagacuuauuca

SEQ ID NO: 74201 - RNA, 22 nt, Homo sapiens
uuaugucacuguucagucuccc

SEQ ID NO: 74202 - RNA, 22 nt, Homo sapiens
auugaacaugccauauguacca

SEQ ID NO: 74203 - RNA, 22 nt, Homo sapiens
caugugcaugcuuucuuaugug

SEQ ID NO: 74204 - RNA, 22 nt, Homo sapiens
acugcacugucaaccuccuggg

SEQ ID NO: 74205 - RNA, 22 nt, Homo sapiens
aguaucacaggcaaaacagaau

SEQ ID NO: 74206 - RNA, 22 nt, Homo sapiens
ugaaaugauuauaugguguuug

SEQ ID NO: 74207 - RNA, 22 nt, Homo sapiens
aacacggcccgcagagcaagcu

SEQ ID NO: 74208 - RNA, 20 nt, Homo sapiens
cagucaugaagaacugugag

SEQ ID NO: 74209 - RNA, 22 nt, Homo sapiens
auugauaguuuaauaggaauug

SEQ ID NO: 74210 - RNA, 22 nt, Homo sapiens
auggagacaaauaaaggagagu

SEQ ID NO: 74211 - RNA, 22 nt, Homo sapiens
uucagagagggagggauaccua

SEQ ID NO: 74212 - RNA, 22 nt, Homo sapiens
augaacagagccuugagaaccu

SEQ ID NO: 74213 - RNA, 22 nt, Homo sapiens
cucaugcugucuucugggguaa

SEQ ID NO: 74214 - RNA, 22 nt, Homo sapiens
augugcuugagggaaaucaguu

SEQ ID NO: 74215 - RNA, 22 nt, Homo sapiens
uuacagauggcacacucaaggg

SEQ ID NO: 74216 - RNA, 22 nt, Homo sapiens
aauacuuccaaaucuagucauu

SEQ ID NO: 74217 - RNA, 22 nt, Homo sapiens
uacagcuaugugcaugcaugcu

SEQ ID NO: 74218 - RNA, 18 nt, Homo sapiens
acugcacuccauccuagg

SEQ ID NO: 74219 - RNA, 22 nt, Homo sapiens
aagcuggagugcaguggugcga

SEQ ID NO: 74220 - RNA, 22 nt, Homo sapiens
cuucaucugguuugugaacuuu

SEQ ID NO: 74221 - RNA, 22 nt, Homo sapiens
ggacagugaaugccacuccucc

SEQ ID NO: 74222 - RNA, 22 nt, Homo sapiens
uugagggaggccucaguuuaca

SEQ ID NO: 74223 - RNA, 17 nt, Homo sapiens
guggaaugucaugucaa

SEQ ID NO: 74224 - RNA, 22 nt, Homo sapiens
cuagcagcaugagaauggacca

SEQ ID NO: 74225 - RNA, 22 nt, Homo sapiens
aucagaguggguuuuaaaagug

SEQ ID NO: 74226 - RNA, 22 nt, Homo sapiens
cacagcuaacaacuguuucuuc

SEQ ID NO: 74227 - RNA, 22 nt, Homo sapiens
ggaaugggauuugaagucuggc

SEQ ID NO: 74228 - RNA, 22 nt, Homo sapiens
augaaaucuuuggcagaucuua

SEQ ID NO: 74229 - RNA, 22 nt, Homo sapiens
uuagguuguuucuggucuuagg

SEQ ID NO: 74230 - RNA, 22 nt, Homo sapiens
uaacuccauuuggacucaguau

SEQ ID NO: 74231 - RNA, 22 nt, Homo sapiens
uuauuagguuaaccuauagcua

SEQ ID NO: 74232 - RNA, 22 nt, Homo sapiens
agcagcaauuuuguaugguuua

SEQ ID NO: 74233 - RNA, 22 nt, Homo sapiens
cucuuugaugugaaccgugguu

SEQ ID NO: 74234 - RNA, 22 nt, Homo sapiens
cugcaagaugcauaggaauuuu

SEQ ID NO: 74235 - RNA, 22 nt, Homo sapiens
ugaaauguuaaacaaguggcuc

SEQ ID NO: 74236 - RNA, 21 nt, Homo sapiens
ucaucaagcuguagacaugau

SEQ ID NO: 74237 - RNA, 22 nt, Homo sapiens
uauuccagcccuggugagccag

SEQ ID NO: 74238 - RNA, 22 nt, Homo sapiens
ccauuucacucuuccugaagga

SEQ ID NO: 74239 - RNA, 22 nt, Homo sapiens
uuccuugagucuuuuuccugag

SEQ ID NO: 74240 - RNA, 21 nt, Homo sapiens
gucacuggggcuggauaauuc

SEQ ID NO: 74241 - RNA, 23 nt, Homo sapiens
ugacaagagcgagacuuggucuc

SEQ ID NO: 74242 - RNA, 22 nt, Homo sapiens
auguuagcaucaauauucauca

SEQ ID NO: 74243 - RNA, 22 nt, Homo sapiens
uuggcagcauuccagccaagca

SEQ ID NO: 74244 - RNA, 22 nt, Homo sapiens
ugcaccacugcacugccugggu

SEQ ID NO: 74245 - RNA, 22 nt, Homo sapiens
augaaaacaugauuugccuguu

SEQ ID NO: 74246 - RNA, 22 nt, Homo sapiens
gugaagugugaccucagcaucu

SEQ ID NO: 74247 - RNA, 22 nt, Homo sapiens
agagaugaagauggggcucccg

SEQ ID NO: 74248 - RNA, 22 nt, Homo sapiens
gagaacauacggcauuugguuu

SEQ ID NO: 74249 - RNA, 22 nt, Homo sapiens
ugaaaugaucaguuugguuacu

SEQ ID NO: 74250 - RNA, 22 nt, Homo sapiens
ugucacugugcagucaugcauu

SEQ ID NO: 74251 - RNA, 22 nt, Homo sapiens
uuaaugugaaucaggaugcauu

SEQ ID NO: 74252 - RNA, 22 nt, Homo sapiens
uacucugcaguaauuccagccc

SEQ ID NO: 74253 - RNA, 22 nt, Homo sapiens
uggucaccugaauuaugcaugu

SEQ ID NO: 74254 - RNA, 22 nt, Homo sapiens
agugaacaaagaagugcagaua

SEQ ID NO: 74255 - RNA, 22 nt, Homo sapiens
agccaguauuuccacagagugg

SEQ ID NO: 74256 - RNA, 22 nt, Homo sapiens
uucagcaaugacagccuauaua

SEQ ID NO: 74257 - RNA, 21 nt, Homo sapiens
aagaaagcuggacuugccgcu

SEQ ID NO: 74258 - RNA, 22 nt, Homo sapiens
aucucaguuaauuccaucuuuc

SEQ ID NO: 74259 - RNA, 22 nt, Homo sapiens
ugaaagacugaagaauaggcau

SEQ ID NO: 74260 - RNA, 22 nt, Homo sapiens
uggcuagaccugcauaacagcu

SEQ ID NO: 74261 - RNA, 22 nt, Homo sapiens
ggcaagaaccagggauuugcgu

SEQ ID NO: 74262 - RNA, 22 nt, Homo sapiens
uaaagcacaaguaaagaauacu

SEQ ID NO: 74263 - RNA, 19 nt, Homo sapiens
acugcacuccaaccuccug

SEQ ID NO: 74264 - RNA, 22 nt, Homo sapiens
ugucaguuuuaacuagggaaua

SEQ ID NO: 74265 - RNA, 22 nt, Homo sapiens
gagacggagucucgcucuguca

SEQ ID NO: 74266 - RNA, 22 nt, Homo sapiens
uagcagcauuuuuguagaguau

SEQ ID NO: 74267 - RNA, 22 nt, Homo sapiens
uuccaguggacuacuucauccu

SEQ ID NO: 74268 - RNA, 22 nt, Homo sapiens
auuguguagucuuacugcuugc

SEQ ID NO: 74269 - RNA, 23 nt, Homo sapiens
ugcaccacuacacacucuugggu

SEQ ID NO: 74270 - RNA, 22 nt, Homo sapiens
acugcacuccagccucccgucu

SEQ ID NO: 74271 - RNA, 21 nt, Homo sapiens
caugucacugcacucuagccu

SEQ ID NO: 74272 - RNA, 22 nt, Homo sapiens
uagaacauuccaggugauguug

SEQ ID NO: 74273 - RNA, 22 nt, Homo sapiens
uugagguagugucuuguucugu

SEQ ID NO: 74274 - RNA, 17 nt, Homo sapiens
gacauaggaaaaggaga

SEQ ID NO: 74275 - RNA, 22 nt, Homo sapiens
ugugaugguuuagcauuuucuu

SEQ ID NO: 74276 - RNA, 22 nt, Homo sapiens
ugcuggcguuacucuccaucag

SEQ ID NO: 74277 - RNA, 22 nt, Homo sapiens
cucaguuuugccuuguuuaagg

SEQ ID NO: 74278 - RNA, 22 nt, Homo sapiens
auauuggccuaaaauucucuuu

SEQ ID NO: 74279 - RNA, 22 nt, Homo sapiens
uugaagugaagaacaauaucac

SEQ ID NO: 74280 - RNA, 22 nt, Homo sapiens
uuccaguaauagcacagcauug

SEQ ID NO: 74281 - RNA, 22 nt, Homo sapiens
cugucaucauuucuaugugcca

SEQ ID NO: 74282 - RNA, 22 nt, Homo sapiens
auuacuuugcaccaaccuaaua

SEQ ID NO: 74283 - RNA, 22 nt, Homo sapiens
ucaacacaguuaaauggggaaa

SEQ ID NO: 74284 - RNA, 22 nt, Homo sapiens
uggaaugucagcuacaagaggg

SEQ ID NO: 74285 - RNA, 22 nt, Homo sapiens
uguaaugaucaaaucagaguaa

SEQ ID NO: 74286 - RNA, 22 nt, Homo sapiens
uucaagucaacaagcacuugag

SEQ ID NO: 74287 - RNA, 22 nt, Homo sapiens
aaugugcacuauuagggugaua

SEQ ID NO: 74288 - RNA, 22 nt, Homo sapiens
cugauaguucucuuuagaguuu

SEQ ID NO: 74289 - RNA, 22 nt, Homo sapiens
cugaauagucaacgauggacug

SEQ ID NO: 74290 - RNA, 22 nt, Homo sapiens
agcaagauuguucccauuuucu

SEQ ID NO: 74291 - RNA, 23 nt, Homo sapiens
auaagccuuuucuuucugcccca

SEQ ID NO: 74292 - RNA, 22 nt, Homo sapiens
acugcacuccagccucgcaaca

SEQ ID NO: 74293 - RNA, 18 nt, Homo sapiens
uguaaacuaccucaaccu

SEQ ID NO: 74294 - RNA, 22 nt, Homo sapiens
gcagugugauguuuuaaucuau

SEQ ID NO: 74295 - RNA, 22 nt, Homo sapiens
uucuggccccucccaaucucau

SEQ ID NO: 74296 - RNA, 18 nt, Homo sapiens
cccagugacuuauggccu

SEQ ID NO: 74297 - RNA, 22 nt, Homo sapiens
gaaucauuguuucuaaguuugu

SEQ ID NO: 74298 - RNA, 22 nt, Homo sapiens
auagaaucaucugugcacuagu

SEQ ID NO: 74299 - RNA, 22 nt, Homo sapiens
gucauccaggcuggagugaagc

SEQ ID NO: 74300 - RNA, 22 nt, Homo sapiens
ccacaguugaaauuuugacugu

SEQ ID NO: 74301 - RNA, 22 nt, Homo sapiens
gcaagaauggaacaggagagcc

SEQ ID NO: 74302 - RNA, 22 nt, Homo sapiens
ugaaauacuuaauuucuccaug

SEQ ID NO: 74303 - RNA, 22 nt, Homo sapiens
uagaauguaaauuccaagggca

SEQ ID NO: 74304 - RNA, 21 nt, Homo sapiens
uuuacuguggacccauugcuu

SEQ ID NO: 74305 - RNA, 22 nt, Homo sapiens
ugucaggagcaaugauaaauuu

SEQ ID NO: 74306 - RNA, 22 nt, Homo sapiens
acaguguguguguucaccuaga

SEQ ID NO: 74307 - RNA, 17 nt, Homo sapiens
guggauagaacaaugaa

SEQ ID NO: 74308 - RNA, 22 nt, Homo sapiens
uuggccauaugacuugcuuugg

SEQ ID NO: 74309 - RNA, 22 nt, Homo sapiens
aagauauguuaguuauaaacuc

SEQ ID NO: 74310 - RNA, 22 nt, Homo sapiens
ugcugcuguuaucauuuuacca

SEQ ID NO: 74311 - RNA, 22 nt, Homo sapiens
caccagcuggcauugaauaccu

SEQ ID NO: 74312 - RNA, 22 nt, Homo sapiens
ugucauucaggaaauucuaagu

SEQ ID NO: 74313 - RNA, 22 nt, Homo sapiens
uuuguacucccuuuagauaaaa

SEQ ID NO: 74314 - RNA, 20 nt, Homo sapiens
uucacugggcucucuguugg

SEQ ID NO: 74315 - RNA, 22 nt, Homo sapiens
cacacugucuucaauggguggu

SEQ ID NO: 74316 - RNA, 22 nt, Homo sapiens
uagaaucuaacucgcaugaaaa

SEQ ID NO: 74317 - RNA, 22 nt, Homo sapiens
augaauacugcugcaaugaaca

SEQ ID NO: 74318 - RNA, 18 nt, Homo sapiens
accuucauuccuuugccu

SEQ ID NO: 74319 - RNA, 22 nt, Homo sapiens
agggaagugugcuaugcauuua

SEQ ID NO: 74320 - RNA, 22 nt, Homo sapiens
uuacaucaucacauuaguuugc

SEQ ID NO: 74321 - RNA, 22 nt, Homo sapiens
cacagugaaugucaucauugcc

SEQ ID NO: 74322 - RNA, 22 nt, Homo sapiens
gucaauguaucuagcuguauua

SEQ ID NO: 74323 - RNA, 22 nt, Homo sapiens
ugugauaguuggcuaaagcagu

SEQ ID NO: 74324 - RNA, 22 nt, Homo sapiens
gucauggacaaggugugagcca

SEQ ID NO: 74325 - RNA, 22 nt, Homo sapiens
cugaggguagaaggaucacuug

SEQ ID NO: 74326 - RNA, 22 nt, Homo sapiens
aagcaucacauaauggaucaug

SEQ ID NO: 74327 - RNA, 22 nt, Homo sapiens
uuuaauguuacaguauugguau

SEQ ID NO: 74328 - RNA, 20 nt, Homo sapiens
uggaaguaagaauauaggug

SEQ ID NO: 74329 - RNA, 22 nt, Homo sapiens
augacugucagggcagucauug

SEQ ID NO: 74330 - RNA, 22 nt, Homo sapiens
cccaguuuugccacuuacuagc

SEQ ID NO: 74331 - RNA, 22 nt, Homo sapiens
uugaggucuuugagcaaacgca

SEQ ID NO: 74332 - RNA, 22 nt, Homo sapiens
ugagcacauuuacaucaguucc

SEQ ID NO: 74333 - RNA, 22 nt, Homo sapiens
gcaagaaugagaaggauuaauu

SEQ ID NO: 74334 - RNA, 22 nt, Homo sapiens
uugagagaaaaaauuuauuggu

SEQ ID NO: 74335 - RNA, 22 nt, Homo sapiens
acugcacuccagccugcugaca

SEQ ID NO: 74336 - RNA, 22 nt, Homo sapiens
cugugaagaaagucauugguag

SEQ ID NO: 74337 - RNA, 22 nt, Homo sapiens
agcauuaguugugaagccuuua

SEQ ID NO: 74338 - RNA, 22 nt, Homo sapiens
acacagucaaauccacuuggcu

SEQ ID NO: 74339 - RNA, 22 nt, Homo sapiens
agaaugucaguauuggcuaaaa

SEQ ID NO: 74340 - RNA, 22 nt, Homo sapiens
uuaugucauuuuuggauguuaa

SEQ ID NO: 74341 - RNA, 21 nt, Homo sapiens
ugaaugucuaggcagaaguuu

SEQ ID NO: 74342 - RNA, 22 nt, Homo sapiens
gucagugugauaucugcagggg

SEQ ID NO: 74343 - RNA, 22 nt, Homo sapiens
uuaaugaacuuuauuuuguaga

SEQ ID NO: 74344 - RNA, 22 nt, Homo sapiens
caaagcacuuggcuuggaagau

SEQ ID NO: 74345 - RNA, 22 nt, Homo sapiens
ugggaagaugcugcuucuuccu

SEQ ID NO: 74346 - RNA, 22 nt, Homo sapiens
ugugaacauuuuguauauauua

SEQ ID NO: 74347 - RNA, 22 nt, Homo sapiens
cagacaugucuuguggccgugg

SEQ ID NO: 74348 - RNA, 19 nt, Homo sapiens
uuuuccccuuucuuaagac

SEQ ID NO: 74349 - RNA, 20 nt, Homo sapiens
acugcacuccaggcugccca

SEQ ID NO: 74350 - RNA, 22 nt, Homo sapiens
ucacagugcaggaucaguuaau

SEQ ID NO: 74351 - RNA, 22 nt, Homo sapiens
cagagaacauucagagcuguag

SEQ ID NO: 74352 - RNA, 22 nt, Homo sapiens
ugugcaaggcucucaaccugug

SEQ ID NO: 74353 - RNA, 22 nt, Homo sapiens
ugaauagacacuaaagacugua

SEQ ID NO: 74354 - RNA, 22 nt, Homo sapiens
cugaggaaguucuuuaacaguu

SEQ ID NO: 74355 - RNA, 22 nt, Homo sapiens
auaagaagugaaccagacgucu

SEQ ID NO: 74356 - RNA, 22 nt, Homo sapiens
cugugguuacguucuuugugcu

SEQ ID NO: 74357 - RNA, 22 nt, Homo sapiens
aucucaguucaggcuggccaca

SEQ ID NO: 74358 - RNA, 22 nt, Homo sapiens
auugucauuuucugagaaguaa

SEQ ID NO: 74359 - RNA, 22 nt, Homo sapiens
uucacugugaauaaaggcuccc

SEQ ID NO: 74360 - RNA, 22 nt, Homo sapiens
gagaaugaacagacugccucuu

SEQ ID NO: 74361 - RNA, 22 nt, Homo sapiens
ugucccaguuggguauugaauu

SEQ ID NO: 74362 - RNA, 22 nt, Homo sapiens
gagaacauuaauaguuaauuuu

SEQ ID NO: 74363 - RNA, 22 nt, Homo sapiens
ugucaaugggaauuuguuuuag

SEQ ID NO: 74364 - RNA, 21 nt, Homo sapiens
uggaauguucugacuucaggg

SEQ ID NO: 74365 - RNA, 22 nt, Homo sapiens
ugcuagaagaucacacacauca

SEQ ID NO: 74366 - RNA, 22 nt, Homo sapiens
ggcuagaauagggauagaccuu

SEQ ID NO: 74367 - RNA, 21 nt, Homo sapiens
gaguggcuuuuguuucaccag

SEQ ID NO: 74368 - RNA, 22 nt, Homo sapiens
agugucaggagacagguagcug

SEQ ID NO: 74369 - RNA, 22 nt, Homo sapiens
ucccaguggucuugaaacaggg

SEQ ID NO: 74370 - RNA, 22 nt, Homo sapiens
ugauguguuuuguaguucaacu

SEQ ID NO: 74371 - RNA, 22 nt, Homo sapiens
ucauccauacaguuagcaaagg

SEQ ID NO: 74372 - RNA, 22 nt, Homo sapiens
gggaagaaggagugguuuacuc

SEQ ID NO: 74373 - RNA, 18 nt, Homo sapiens
cagugcaauacaggagag

SEQ ID NO: 74374 - RNA, 22 nt, Homo sapiens
auaaaugcaaugguauuuuuga

SEQ ID NO: 74375 - RNA, 22 nt, Homo sapiens
aagcuggauuucgcauccuguu

SEQ ID NO: 74376 - RNA, 22 nt, Homo sapiens
uccauaguacuagaaacugacc

SEQ ID NO: 74377 - RNA, 22 nt, Homo sapiens
gucagcaucaccaugucuauga

SEQ ID NO: 74378 - RNA, 22 nt, Homo sapiens
caucacaguacuaaucgucaua

SEQ ID NO: 74379 - RNA, 23 nt, Homo sapiens
cuuuguccccacccaaaucucau

SEQ ID NO: 74380 - RNA, 22 nt, Homo sapiens
caaugcauuauucucccacuuc

SEQ ID NO: 74381 - RNA, 22 nt, Homo sapiens
cugcuaagagaaugagacuuag

SEQ ID NO: 74382 - RNA, 22 nt, Homo sapiens
uguaguuugaaagcucccucug

SEQ ID NO: 74383 - RNA, 22 nt, Homo sapiens
gugacauuuuuacugaugagag

SEQ ID NO: 74384 - RNA, 22 nt, Homo sapiens
cccagugaagagaaccuuacga

SEQ ID NO: 74385 - RNA, 22 nt, Homo sapiens
uacucugcagccauaaaacaga

SEQ ID NO: 74386 - RNA, 22 nt, Homo sapiens
gugcuauguuauccagcaagau

SEQ ID NO: 74387 - RNA, 22 nt, Homo sapiens
gggcaugaugucuuaugccuau

SEQ ID NO: 74388 - RNA, 22 nt, Homo sapiens
aagcugugucuugucagcuacc

SEQ ID NO: 74389 - RNA, 20 nt, Homo sapiens
acacugugcuaaggauuuuc

SEQ ID NO: 74390 - RNA, 22 nt, Homo sapiens
agucaaaugcuuauguauaaag

SEQ ID NO: 74391 - RNA, 22 nt, Homo sapiens
guggaagugucuggggccaggg

SEQ ID NO: 74392 - RNA, 22 nt, Homo sapiens
aucccaguaaaaauggcuucua

SEQ ID NO: 74393 - RNA, 22 nt, Homo sapiens
uaccagugaauuccaggggcua

SEQ ID NO: 74394 - RNA, 22 nt, Homo sapiens
ugaaacacaccuccucuccauc

SEQ ID NO: 74395 - RNA, 22 nt, Homo sapiens
uucacagugugaucuaugggca

SEQ ID NO: 74396 - RNA, 22 nt, Homo sapiens
auguugcaguuuaauuauccua

SEQ ID NO: 74397 - RNA, 22 nt, Homo sapiens
ucacagucggugacuucuugcu

SEQ ID NO: 74398 - RNA, 22 nt, Homo sapiens
cucacugggaccacucugaagu

SEQ ID NO: 74399 - RNA, 22 nt, Homo sapiens
agaaugucagcuggauucagcu

SEQ ID NO: 74400 - RNA, 22 nt, Homo sapiens
uugcuagaugaaaaugguaccu

SEQ ID NO: 74401 - RNA, 22 nt, Homo sapiens
uugcuucauucaacauugaggg

SEQ ID NO: 74402 - RNA, 22 nt, Homo sapiens
auuguacuccagccuuggggac

SEQ ID NO: 74403 - RNA, 22 nt, Homo sapiens
uugacauaguuucugaaauaga

SEQ ID NO: 74404 - RNA, 22 nt, Homo sapiens
auuaacaucuagaguuuuggug

SEQ ID NO: 74405 - RNA, 22 nt, Homo sapiens
auagagcuaccauagaauccag

SEQ ID NO: 74406 - RNA, 22 nt, Homo sapiens
auguaguugcucugccuguuuu

SEQ ID NO: 74407 - RNA, 22 nt, Homo sapiens
uugacuucagagcugauucaag

SEQ ID NO: 74408 - RNA, 22 nt, Homo sapiens
gaagaucacacuguagaucuau

SEQ ID NO: 74409 - RNA, 22 nt, Homo sapiens
augagauauuuuauaagaucau

SEQ ID NO: 74410 - RNA, 22 nt, Homo sapiens
cacacugucuuucagaaugguu

SEQ ID NO: 74411 - RNA, 23 nt, Homo sapiens
ucacaguggcugcuuaauuguga

SEQ ID NO: 74412 - RNA, 22 nt, Homo sapiens
cuuuaguugucuccucaagggu

SEQ ID NO: 74413 - RNA, 18 nt, Homo sapiens
gauaacaguggacuaugc

SEQ ID NO: 74414 - RNA, 22 nt, Homo sapiens
aauguguuuugaaaucaggaag

SEQ ID NO: 74415 - RNA, 22 nt, Homo sapiens
uuuaucuguuuaaaacuguuca

SEQ ID NO: 74416 - RNA, 22 nt, Homo sapiens
uagcagcaucucuggcuucuac

SEQ ID NO: 74417 - RNA, 22 nt, Homo sapiens
uucuggccuccauuuuucuccu

SEQ ID NO: 74418 - RNA, 22 nt, Homo sapiens
ugucaguguacuguaagaauua

SEQ ID NO: 74419 - RNA, 22 nt, Homo sapiens
gucuugaaggcugaguaccugu

SEQ ID NO: 74420 - RNA, 22 nt, Homo sapiens
cuuuguguggacauuucaggca

SEQ ID NO: 74421 - RNA, 20 nt, Homo sapiens
uagcagcagacagagggagg

SEQ ID NO: 74422 - RNA, 21 nt, Homo sapiens
aaucacaguuguucugccuuc

SEQ ID NO: 74423 - RNA, 22 nt, Homo sapiens
cuacaguucuuaauuaaguagu

SEQ ID NO: 74424 - RNA, 19 nt, Homo sapiens
augaguuaggggaaauuuc

SEQ ID NO: 74425 - RNA, 22 nt, Homo sapiens
acacuguuuuguggagaaugua

SEQ ID NO: 74426 - RNA, 22 nt, Homo sapiens
augcauaugucuuuauaguggc

SEQ ID NO: 74427 - RNA, 22 nt, Homo sapiens
ucugacaaugaacaaucuauag

SEQ ID NO: 74428 - RNA, 22 nt, Homo sapiens
ugggaagauucuguguuuuucc

SEQ ID NO: 74429 - RNA, 22 nt, Homo sapiens
gcagugugaucacagcuuacug

SEQ ID NO: 74430 - RNA, 22 nt, Homo sapiens
agcagcauuaugauauaucuua

SEQ ID NO: 74431 - RNA, 22 nt, Homo sapiens
aauagcacuguagauggaggaa

SEQ ID NO: 74432 - RNA, 22 nt, Homo sapiens
cuuugugugggccaagggcugg

SEQ ID NO: 74433 - RNA, 22 nt, Homo sapiens
acagauugcugggccccagccc

SEQ ID NO: 74434 - RNA, 22 nt, Homo sapiens
gauagugaaccaagggguaauu

SEQ ID NO: 74435 - RNA, 22 nt, Homo sapiens
auugcucuuagaaauauuucuu

SEQ ID NO: 74436 - RNA, 22 nt, Homo sapiens
agacagcugguagcacuuccug

SEQ ID NO: 74437 - RNA, 22 nt, Homo sapiens
ucagauugaugcauacuuaaau

SEQ ID NO: 74438 - RNA, 22 nt, Homo sapiens
uuaauguaucuaucacaucaca

SEQ ID NO: 74439 - RNA, 22 nt, Homo sapiens
cacagucuugcaauauugagau

SEQ ID NO: 74440 - RNA, 21 nt, Homo sapiens
gugguucuagagaaacagaau

SEQ ID NO: 74441 - RNA, 22 nt, Homo sapiens
uacucugcagagaugcauaaca

SEQ ID NO: 74442 - RNA, 22 nt, Homo sapiens
acugcacuccagccuccugaca

SEQ ID NO: 74443 - RNA, 22 nt, Homo sapiens
aucacagcccuccucuuggaug

SEQ ID NO: 74444 - RNA, 22 nt, Homo sapiens
aaugucaugaguccaaccagaa

SEQ ID NO: 74445 - RNA, 22 nt, Homo sapiens
gucauggaggaugaauggccaa

SEQ ID NO: 74446 - RNA, 22 nt, Homo sapiens
cuuuguguaggugccucuggcu

SEQ ID NO: 74447 - RNA, 22 nt, Homo sapiens
ucaucagaaucccuuagggaug

SEQ ID NO: 74448 - RNA, 20 nt, Homo sapiens
augcaaacccugcuuugugg

SEQ ID NO: 74449 - RNA, 22 nt, Homo sapiens
auguggcauuucucauucauuu

SEQ ID NO: 74450 - RNA, 22 nt, Homo sapiens
uucuuagguuaaggcugagaga

SEQ ID NO: 74451 - RNA, 22 nt, Homo sapiens
auuggcagaaaucuuuauagua

SEQ ID NO: 74452 - RNA, 22 nt, Homo sapiens
uggagaacauucauuugcaaga

SEQ ID NO: 74453 - RNA, 22 nt, Homo sapiens
ccucacaaccuuuauugaagag

SEQ ID NO: 74454 - RNA, 22 nt, Homo sapiens
ggaagacaguguggugauuccu

SEQ ID NO: 74455 - RNA, 22 nt, Homo sapiens
uuugggaaaugaaguugguaga

SEQ ID NO: 74456 - RNA, 20 nt, Homo sapiens
agcauugguuagaacaguag

SEQ ID NO: 74457 - RNA, 22 nt, Homo sapiens
uaacugcaaccucugccugcug

SEQ ID NO: 74458 - RNA, 22 nt, Homo sapiens
agucauggaucacaguagccuc

SEQ ID NO: 74459 - RNA, 22 nt, Homo sapiens
uggucaccuucuugcucugucu

SEQ ID NO: 74460 - RNA, 18 nt, Homo sapiens
cuuaacauugggaugaua

SEQ ID NO: 74461 - RNA, 23 nt, Homo sapiens
uggcauuuuaguuagcuucagug

SEQ ID NO: 74462 - RNA, 22 nt, Homo sapiens
aucccaguucagccucugacac

SEQ ID NO: 74463 - RNA, 22 nt, Homo sapiens
uuggcagcacgcaguccagagg

SEQ ID NO: 74464 - RNA, 22 nt, Homo sapiens
agcaugacauauuguagagaaa

SEQ ID NO: 74465 - RNA, 22 nt, Homo sapiens
uagcagcauaaauggacuaaga

SEQ ID NO: 74466 - RNA, 22 nt, Homo sapiens
aauacagcacacagaugggucu

SEQ ID NO: 74467 - RNA, 19 nt, Homo sapiens
caucacagagucuuccauu

SEQ ID NO: 74468 - RNA, 22 nt, Homo sapiens
agcuauauugaggaugccauuc

SEQ ID NO: 74469 - RNA, 22 nt, Homo sapiens
ucauauguaugugcaauuuugu

SEQ ID NO: 74470 - RNA, 22 nt, Homo sapiens
uuuugcuugugaauagccacau

SEQ ID NO: 74471 - RNA, 22 nt, Homo sapiens
augggcacugauguauucugug

SEQ ID NO: 74472 - RNA, 22 nt, Homo sapiens
auaguacuauugcaguguuaua

SEQ ID NO: 74473 - RNA, 22 nt, Homo sapiens
aagcuggagugcaguggugcaa

SEQ ID NO: 74474 - RNA, 22 nt, Homo sapiens
aauggcacacaccuggucuaac

SEQ ID NO: 74475 - RNA, 22 nt, Homo sapiens
ugucauguugguguacugcacc

SEQ ID NO: 74476 - RNA, 22 nt, Homo sapiens
uagcagcaccccacucuacugg

SEQ ID NO: 74477 - RNA, 22 nt, Homo sapiens
ucagaguagaaacacuuccaua

SEQ ID NO: 74478 - RNA, 22 nt, Homo sapiens
auuagguagugagaugcugcug

SEQ ID NO: 74479 - RNA, 22 nt, Homo sapiens
guuaggcagugugguauagcag

SEQ ID NO: 74480 - RNA, 23 nt, Homo sapiens
ucugcggguguggacccuagugc

SEQ ID NO: 74481 - RNA, 22 nt, Homo sapiens
cugugcauguaugcgugaguuc

SEQ ID NO: 74482 - RNA, 22 nt, Homo sapiens
cugugcauggauuuuaagauug

SEQ ID NO: 74483 - RNA, 22 nt, Homo sapiens
aucacugggagcagccauuaau

SEQ ID NO: 74484 - RNA, 22 nt, Homo sapiens
ugucagcacaacucagguuccu

SEQ ID NO: 74485 - RNA, 22 nt, Homo sapiens
auaaauaguaguugugguggcc

SEQ ID NO: 74486 - RNA, 22 nt, Homo sapiens
uuuucaguuuuccagguagccg

SEQ ID NO: 74487 - RNA, 22 nt, Homo sapiens
uucauguaaucaaggcagcuaa

SEQ ID NO: 74488 - RNA, 22 nt, Homo sapiens
uucauguaauuccauaagguaa

SEQ ID NO: 74489 - RNA, 22 nt, Homo sapiens
uuugucuccuaagacucugugg

SEQ ID NO: 74490 - RNA, 20 nt, Homo sapiens
ucaaggcacgaauaaaaguu

SEQ ID NO: 74491 - RNA, 22 nt, Homo sapiens
uccuucaugcaucaauguaucc

SEQ ID NO: 74492 - RNA, 22 nt, Homo sapiens
uccuucauuugucaacucuagu

SEQ ID NO: 74493 - RNA, 22 nt, Homo sapiens
uccuacaugcaguacauucaaa

SEQ ID NO: 74494 - RNA, 22 nt, Homo sapiens
uauggauucuagcucaguaggu

SEQ ID NO: 74495 - RNA, 22 nt, Homo sapiens
uaguaaacauuuuucuaucauu

SEQ ID NO: 74496 - RNA, 22 nt, Homo sapiens
uagcaaguguuuaagcacuuuu

SEQ ID NO: 74497 - RNA, 21 nt, Homo sapiens
uagcaaauugcuauuaaggca

SEQ ID NO: 74498 - RNA, 22 nt, Homo sapiens
gggguuuuaccuucguauucuu

SEQ ID NO: 74499 - RNA, 22 nt, Homo sapiens
guaugugacuggaacaguagga

SEQ ID NO: 74500 - RNA, 17 nt, Homo sapiens
guggauagaacaaugaa

SEQ ID NO: 74501 - RNA, 22 nt, Homo sapiens
auggaggaggaagcugaaacaa

SEQ ID NO: 74502 - RNA, 22 nt, Homo sapiens
aguguuuuuaacaagaaagggu

SEQ ID NO: 74503 - RNA, 22 nt, Homo sapiens
aggcauugugcaucgaugauuu

SEQ ID NO: 74504 - RNA, 22 nt, Homo sapiens
agagguguuaaagucucuuuua

SEQ ID NO: 74505 - RNA, 22 nt, Homo sapiens
gaggcauugaaauauugcuuau

SEQ ID NO: 74506 - RNA, 22 nt, Homo sapiens
auuuuugguugucagcacuagg

SEQ ID NO: 74507 - RNA, 22 nt, Homo sapiens
caagguacuuuuacaauuuccc

SEQ ID NO: 74508 - RNA, 22 nt, Homo sapiens
auuuuugguugguaggcuauua

SEQ ID NO: 74509 - RNA, 22 nt, Homo sapiens
auuuuuggauauagggaaggau

SEQ ID NO: 74510 - RNA, 22 nt, Homo sapiens
augaaguauuaggacacauuua

SEQ ID NO: 74511 - RNA, 22 nt, Homo sapiens
agguacuuucccaaccauacug

SEQ ID NO: 74512 - RNA, 22 nt, Homo sapiens
agguacuugagauucugaacug

SEQ ID NO: 74513 - RNA, 22 nt, Homo sapiens
aguguuuuuacaagcacucugg

SEQ ID NO: 74514 - RNA, 22 nt, Homo sapiens
aggcaguuucagugagagguga

SEQ ID NO: 74515 - RNA, 23 nt, Homo sapiens
agcaaaugcucuagcacuccaac

SEQ ID NO: 74516 - RNA, 22 nt, Homo sapiens
aauggcaucuacguuaaauguc

SEQ ID NO: 74517 - RNA, 22 nt, Homo sapiens
aagcgguguugaauuuuguuga

SEQ ID NO: 74518 - RNA, 19 nt, Homo sapiens
aaguaguugugacagaugc

SEQ ID NO: 74519 - RNA, 20 nt, Homo sapiens
aagugaguguuaaacugaac

SEQ ID NO: 74520 - RNA, 22 nt, Homo sapiens
uuauucauuaauugcuaagguu

SEQ ID NO: 74521 - RNA, 22 nt, Homo sapiens
uucgucaugagacagaugcuga

SEQ ID NO: 74522 - RNA, 22 nt, Homo sapiens
uuucaguguggcaggcauagcu

SEQ ID NO: 74523 - RNA, 22 nt, Homo sapiens
uuuugcuccuggcaaacucaua

SEQ ID NO: 74524 - RNA, 22 nt, Homo sapiens
uuuuuugguaauugaacaauga

SEQ ID NO: 74525 - RNA, 22 nt, Homo sapiens
uuggauaguuuaugaaaaaugg

SEQ ID NO: 74526 - RNA, 22 nt, Homo sapiens
uuguuugguugaguauggaagu

SEQ ID NO: 74527 - RNA, 23 nt, Homo sapiens
uggcauuuuuggcaaugccuucu

SEQ ID NO: 74528 - RNA, 22 nt, Homo sapiens
uggcauuuuguuuuagaauuag

SEQ ID NO: 74529 - RNA, 22 nt, Homo sapiens
ugcaagaugauuucaauugaua

SEQ ID NO: 74530 - RNA, 22 nt, Homo sapiens
ugacaguaaacagucuugauua

SEQ ID NO: 74531 - RNA, 22 nt, Homo sapiens
ugagauagaaaacauaggagaa

SEQ ID NO: 74532 - RNA, 22 nt, Homo sapiens
uagguacuuaagaucucagcua

SEQ ID NO: 74533 - RNA, 22 nt, Homo sapiens
ucaagguacguugccucagauu

SEQ ID NO: 74534 - RNA, 22 nt, Homo sapiens
ucaaggcacuagcugagcugca

SEQ ID NO: 74535 - RNA, 21 nt, Homo sapiens
ucaaggaguauacguaugcca

SEQ ID NO: 74536 - RNA, 22 nt, Homo sapiens
gugguuuuaauauucagucuag

SEQ ID NO: 74537 - RNA, 22 nt, Homo sapiens
guuuuuggggucacuauuaccg

SEQ ID NO: 74538 - RNA, 15 nt, Homo sapiens
guuuuuggauacaau

SEQ ID NO: 74539 - RNA, 22 nt, Homo sapiens
ggcaguuuggcaguuucauaaa

SEQ ID NO: 74540 - RNA, 22 nt, Homo sapiens
cagcaaaucauccuauuugagc

SEQ ID NO: 74541 - RNA, 22 nt, Homo sapiens
uuuuuggaggagguuagaucau

SEQ ID NO: 74542 - RNA, 22 nt, Homo sapiens
uuuuggacuugcuccccugucc

SEQ ID NO: 74543 - RNA, 22 nt, Homo sapiens
uuuugcucuugguaaugaaaga

SEQ ID NO: 74544 - RNA, 22 nt, Homo sapiens
uugaaggaacgcuguucccuug

SEQ ID NO: 74545 - RNA, 22 nt, Homo sapiens
uuucuauguugaccagucuaga

SEQ ID NO: 74546 - RNA, 22 nt, Homo sapiens
uuguccucuccaaaucucaugu

SEQ ID NO: 74547 - RNA, 22 nt, Homo sapiens
ugguguuugagaagcugauguc

SEQ ID NO: 74548 - RNA, 20 nt, Homo sapiens
ugguguuugaacagugaaug

SEQ ID NO: 74549 - RNA, 22 nt, Homo sapiens
uuauucauuaacagggaccaaa

SEQ ID NO: 74550 - RNA, 22 nt, Homo sapiens
uuaugucuuugagcaaugcugu

SEQ ID NO: 74551 - RNA, 22 nt, Homo sapiens
uucacugagccagacuaagaca

SEQ ID NO: 74552 - RNA, 22 nt, Homo sapiens
uuauccucuagacauagguuua

SEQ ID NO: 74553 - RNA, 22 nt, Homo sapiens
gucaguuugguuaaucauucca

SEQ ID NO: 74554 - RNA, 22 nt, Homo sapiens
gucaugaaguuuugaaugaaau

SEQ ID NO: 74555 - RNA, 22 nt, Homo sapiens
uacaguauuaugagugauugaa

SEQ ID NO: 74556 - RNA, 22 nt, Homo sapiens
uauagcaaugugccacucucug

SEQ ID NO: 74557 - RNA, 22 nt, Homo sapiens
uagguacuuuacauguuaucuc

SEQ ID NO: 74558 - RNA, 22 nt, Homo sapiens
uaggcauuuuucugauaaacua

SEQ ID NO: 74559 - RNA, 22 nt, Homo sapiens
ugacaguaucuacagcuucuua

SEQ ID NO: 74560 - RNA, 23 nt, Homo sapiens
ucacacuuaagagaaaugcagcu

SEQ ID NO: 74561 - RNA, 22 nt, Homo sapiens
ucucuguuuauuuuugguguau

SEQ ID NO: 74562 - RNA, 22 nt, Homo sapiens
aagguuguauuuaauauacugu

SEQ ID NO: 74563 - RNA, 20 nt, Homo sapiens
acaguauguuuggaugcaua

SEQ ID NO: 74564 - RNA, 22 nt, Homo sapiens
agcaauaugacauugcuacauc

SEQ ID NO: 74565 - RNA, 22 nt, Homo sapiens
agaaacauucucuugccuccuu

SEQ ID NO: 74566 - RNA, 22 nt, Homo sapiens
agucauggaucacaguagccuc

SEQ ID NO: 74567 - RNA, 16 nt, Homo sapiens
aguaguuuuacagauu

SEQ ID NO: 74568 - RNA, 22 nt, Homo sapiens
auggcuagauuguaugguaguu

SEQ ID NO: 74569 - RNA, 22 nt, Homo sapiens
caggcauuguccaugcugaagg

SEQ ID NO: 74570 - RNA, 22 nt, Homo sapiens
cagggcaugugggucuauuggc

SEQ ID NO: 74571 - RNA, 22 nt, Homo sapiens
cuucaaguaauucugauggcua

SEQ ID NO: 74572 - RNA, 20 nt, Homo sapiens
cucagauuauucugaagcaa

SEQ ID NO: 74573 - RNA, 22 nt, Homo sapiens
aaagugcacuuggaagagggcc

SEQ ID NO: 74574 - RNA, 21 nt, Homo sapiens
aaggugguggugauugagaug

SEQ ID NO: 74575 - RNA, 22 nt, Homo sapiens
aaggcauucucaaacuaguucu

SEQ ID NO: 74576 - RNA, 22 nt, Homo sapiens
aaggcagugugcacauaacacu

SEQ ID NO: 74577 - RNA, 22 nt, Homo sapiens
auggaagcugauuagauaguac

SEQ ID NO: 74578 - RNA, 22 nt, Homo sapiens
augcaaggaugguuagauauau

SEQ ID NO: 74579 - RNA, 22 nt, Homo sapiens
acuaaggcacaauuuucucaua

SEQ ID NO: 74580 - RNA, 22 nt, Homo sapiens
aggaauuuaauguaugauaaua

SEQ ID NO: 74581 - RNA, 21 nt, Homo sapiens
agguaguuuuccuuuuggagu

SEQ ID NO: 74582 - RNA, 22 nt, Homo sapiens
ugguacuucaugcucacagaua

SEQ ID NO: 74583 - RNA, 22 nt, Homo sapiens
ucaugagacacacuggaaagga

SEQ ID NO: 74584 - RNA, 22 nt, Homo sapiens
ucaugaaguaguuaacugguug

SEQ ID NO: 74585 - RNA, 22 nt, Homo sapiens
ucauauguaugugcaauuuugu

SEQ ID NO: 74586 - RNA, 22 nt, Homo sapiens
uccugauacgguugcaguucuc

SEQ ID NO: 74587 - RNA, 21 nt, Homo sapiens
uguuuuugcuguguaucucuc

SEQ ID NO: 74588 - RNA, 22 nt, Homo sapiens
uucauggaguugagaaggcuaa

SEQ ID NO: 74589 - RNA, 22 nt, Homo sapiens
uucauguaauauuucacagcuu

SEQ ID NO: 74590 - RNA, 22 nt, Homo sapiens
uucucauggugauggcaaaauc

SEQ ID NO: 74591 - RNA, 22 nt, Homo sapiens
uuauggauuuauauucuguagu

SEQ ID NO: 74592 - RNA, 22 nt, Homo sapiens
cuucaugagacuuuuggaaggc

SEQ ID NO: 74593 - RNA, 22 nt, Homo sapiens
gaagguacgcuuaggaaaugau

SEQ ID NO: 74594 - RNA, 22 nt, Homo sapiens
auuggacagcauuucuagacuu

SEQ ID NO: 74595 - RNA, 21 nt, Homo sapiens
cucauauugcuuuuccauggu

SEQ ID NO: 74596 - RNA, 22 nt, Homo sapiens
cuauggauuuacuguauagggu

SEQ ID NO: 74597 - RNA, 22 nt, Homo sapiens
cauagcacacguauaccuaugu

SEQ ID NO: 74598 - RNA, 22 nt, Homo sapiens
uacaagguaucagugaccguaa

SEQ ID NO: 74599 - RNA, 22 nt, Homo sapiens
uauggauauuacuccacaaaga

SEQ ID NO: 74600 - RNA, 22 nt, Homo sapiens
uagcagaauaacuugccagccu

SEQ ID NO: 74601 - RNA, 22 nt, Homo sapiens
uauagcaaugccccacuccuga

SEQ ID NO: 74602 - RNA, 22 nt, Influenza A virus (A/Puerto Rico/8/34/Mount Sinai(
ccaugcucauacccaagcagaa

SEQ ID NO: 74603 - RNA, 22 nt, Homo sapiens
uagcagcaucucuggcuucuac

SEQ ID NO: 74604 - RNA, 22 nt, Homo sapiens
uuaauguaucuaucacaucaca

SEQ ID NO: 74605 - RNA, 22 nt, Homo sapiens
ugggaagauucuguguuuuucc

SEQ ID NO: 74606 - RNA, 18 nt, Homo sapiens
accuucauuccuuugccu

SEQ ID NO: 74607 - RNA, 22 nt, Homo sapiens
gacaguuucucaggcuuccuua

SEQ ID NO: 74608 - RNA, 22 nt, Homo sapiens
ucugccacugucauugugugau

SEQ ID NO: 74609 - RNA, 22 nt, Homo sapiens
cuuuacaguuggacucacgagg

SEQ ID NO: 74610 - RNA, 22 nt, Homo sapiens
auuguacuccagccuuggggac

SEQ ID NO: 74611 - RNA, 22 nt, Homo sapiens
ggacagugaaugccacuccucc

SEQ ID NO: 74612 - RNA, 22 nt, Homo sapiens
gcaaaaaguagugcugguuagg

SEQ ID NO: 74613 - RNA, 22 nt, Homo sapiens
uuggcagcacgcaguccagagg

SEQ ID NO: 74614 - RNA, 22 nt, Homo sapiens
ugccaaggagucagucccuaga

SEQ ID NO: 74615 - RNA, 22 nt, Homo sapiens
aucacuagaucauagguaaaca

SEQ ID NO: 74616 - RNA, 22 nt, Homo sapiens
caaagcacuuggcuuggaagau

SEQ ID NO: 74617 - RNA, 22 nt, Homo sapiens
gucauggaggaugaauggccaa

SEQ ID NO: 74618 - RNA, 22 nt, Homo sapiens
acugcacuccagccuccugaca

SEQ ID NO: 74619 - RNA, 22 nt, Homo sapiens
augggcacugauguauucugug

SEQ ID NO: 74620 - RNA, 22 nt, Homo sapiens
aauacuuccaaaucuagucauu

SEQ ID NO: 74621 - RNA, 22 nt, Homo sapiens
auuaaucaggcaaugcuugcua

SEQ ID NO: 74622 - RNA, 22 nt, Homo sapiens
gugacauuuuuacugaugagag

SEQ ID NO: 74623 - RNA, 21 nt, Homo sapiens
gugguucuagagaaacagaau

SEQ ID NO: 74624 - RNA, 22 nt, Homo sapiens
augagauacuacaaaugaguuu

SEQ ID NO: 74625 - RNA, 22 nt, Homo sapiens
auuaacaucuagaguuuuggug

SEQ ID NO: 74626 - RNA, 22 nt, Homo sapiens
agcacagugguuaaguuucuua

SEQ ID NO: 74627 - RNA, 22 nt, Homo sapiens
uugcuucauucaacauugaggg

SEQ ID NO: 74628 - RNA, 22 nt, Homo sapiens
cuuugcaaauggccuuuccaag

SEQ ID NO: 74629 - RNA, 22 nt, Homo sapiens
ucacagugcaggaucaguuaau

SEQ ID NO: 74630 - RNA, 22 nt, Homo sapiens
ucauguguugcacugaggaccu

SEQ ID NO: 74631 - RNA, 22 nt, Homo sapiens
cuacagaguaucuaaagaggua

SEQ ID NO: 74632 - RNA, 22 nt, Homo sapiens
ugugaugugaugagaaguuccu

SEQ ID NO: 74633 - RNA, 22 nt, Homo sapiens
uuaugucacuguucagucuccc

SEQ ID NO: 74634 - RNA, 22 nt, Homo sapiens
ugucaguuuuaacuagggaaua

SEQ ID NO: 74635 - RNA, 22 nt, Homo sapiens
cucugacagugguuagcacugu

SEQ ID NO: 74636 - RNA, 22 nt, Homo sapiens
uugacaaugcacugugcuaagu

SEQ ID NO: 74637 - RNA, 22 nt, Homo sapiens
cacagcuaacaacuguuucuuc

SEQ ID NO: 74638 - RNA, 22 nt, Homo sapiens
uucuggccuccauuuuucuccu

SEQ ID NO: 74639 - RNA, 22 nt, Homo sapiens
agacagcugguagcacuuccug

SEQ ID NO: 74640 - RNA, 22 nt, Homo sapiens
aguaucacaggcaaaacagaau

SEQ ID NO: 74641 - RNA, 22 nt, Homo sapiens
uuagguuguuucuggucuuagg

SEQ ID NO: 74642 - RNA, 22 nt, Homo sapiens
auugcacuccagccuuggggau

SEQ ID NO: 74643 - RNA, 19 nt, Homo sapiens
acugcacuccaaccuccug

SEQ ID NO: 74644 - RNA, 22 nt, Homo sapiens
ugucaaugggaauuuguuuuag

SEQ ID NO: 74645 - RNA, 22 nt, Homo sapiens
gucagcuuguccagagacucug

SEQ ID NO: 74646 - RNA, 22 nt, Homo sapiens
aagcaucacauaauggaucaug

SEQ ID NO: 74647 - RNA, 22 nt, Homo sapiens
ccucacaaccuuuauugaagag

SEQ ID NO: 74648 - RNA, 22 nt, Homo sapiens
uaacuccauuuggacucaguau

SEQ ID NO: 74649 - RNA, 22 nt, Homo sapiens
ugaauguccugacgcugcaguu

SEQ ID NO: 74650 - RNA, 22 nt, Homo sapiens
ugcugcuguuaucauuuuacca

SEQ ID NO: 74651 - RNA, 22 nt, Homo sapiens
uucacagucacccuucuccaug

SEQ ID NO: 74652 - RNA, 22 nt, Homo sapiens
cuacaguucuuaauuaaguagu

SEQ ID NO: 74653 - RNA, 22 nt, Homo sapiens
uagcagcaaagcaggaucugcu

SEQ ID NO: 74654 - RNA, 22 nt, Homo sapiens
auguugcaguuuaauuauccua

SEQ ID NO: 74655 - RNA, 21 nt, Homo sapiens
caugucacugcacucuagccu

SEQ ID NO: 74656 - RNA, 22 nt, Homo sapiens
uucacugugaauaaaggcuccc

SEQ ID NO: 74657 - RNA, 22 nt, Homo sapiens
ugaaaugaucaguuugguuacu

SEQ ID NO: 74658 - RNA, 22 nt, Homo sapiens
cuuuguguaggugccucuggcu

SEQ ID NO: 74659 - RNA, 22 nt, Homo sapiens
aauguguuuugaaaucaggaag

SEQ ID NO: 74660 - RNA, 22 nt, Homo sapiens
ggcuagaauagggauagaccuu

SEQ ID NO: 74661 - RNA, 22 nt, Homo sapiens
aaugugcacuauuagggugaua

SEQ ID NO: 74662 - RNA, 21 nt, Homo sapiens
ugaaugucuaggcagaaguuu

SEQ ID NO: 74663 - RNA, 22 nt, Homo sapiens
uuacagauggcacacucaaggg

SEQ ID NO: 74664 - RNA, 23 nt, Homo sapiens
auuccaguggcaauuggagaaac

SEQ ID NO: 74665 - RNA, 22 nt, Homo sapiens
augugcagauguuacaaauugu

SEQ ID NO: 74666 - RNA, 22 nt, Homo sapiens
uaucagcacaguggguucaugg

SEQ ID NO: 74667 - RNA, 21 nt, Homo sapiens
uaucagagacauugagaggca

SEQ ID NO: 74668 - RNA, 22 nt, Homo sapiens
uuggccauaugacuugcuuugg

SEQ ID NO: 74669 - RNA, 22 nt, Homo sapiens
agcagcauuaugauauaucuua

SEQ ID NO: 74670 - RNA, 22 nt, Homo sapiens
cuagcagcaugagaauggacca

SEQ ID NO: 74671 - RNA, 22 nt, Homo sapiens
cucuuugaugugaaccgugguu

SEQ ID NO: 74672 - RNA, 22 nt, Homo sapiens
gggaagugugguuucuuuacag

SEQ ID NO: 74673 - RNA, 22 nt, Homo sapiens
gucagugugauaucugcagggg

SEQ ID NO: 74674 - RNA, 22 nt, Homo sapiens
uaaagcacuuuuuucugcaugg

SEQ ID NO: 74675 - RNA, 22 nt, Homo sapiens
uucagcaaugacagccuauaua

SEQ ID NO: 74676 - RNA, 22 nt, Homo sapiens
uagacacuagauaugugacuga

SEQ ID NO: 74677 - RNA, 22 nt, Homo sapiens
aucacugggagcagccauuaau

SEQ ID NO: 74678 - RNA, 22 nt, Homo sapiens
cuagcugcacuuccugcuacug

SEQ ID NO: 74679 - RNA, 22 nt, Homo sapiens
guggaagugucuggggccaggg

SEQ ID NO: 74680 - RNA, 22 nt, Homo sapiens
auuagguagugagaugcugcug

SEQ ID NO: 74681 - RNA, 19 nt, Homo sapiens
ugcagcaauguaaaagaca

SEQ ID NO: 74682 - RNA, 22 nt, Homo sapiens
acugcacuucagccuuggcuac

SEQ ID NO: 74683 - RNA, 22 nt, Homo sapiens
aucacagcccuccucuuggaug

SEQ ID NO: 74684 - RNA, 22 nt, Homo sapiens
agucaaaugcuuauguauaaag

SEQ ID NO: 74685 - RNA, 22 nt, Homo sapiens
caaugcauuauucucccacuuc

SEQ ID NO: 74686 - RNA, 22 nt, Homo sapiens
ucucaguguuaucuaucugccu

SEQ ID NO: 74687 - RNA, 20 nt, Homo sapiens
ucacuggagcucauuugauu

SEQ ID NO: 74688 - RNA, 22 nt, Homo sapiens
uggagaacauucauuugcaaga

SEQ ID NO: 74689 - RNA, 22 nt, Homo sapiens
cacacugucuucaauggguggu

SEQ ID NO: 74690 - RNA, 18 nt, Homo sapiens
gauaacaguggacuaugc

SEQ ID NO: 74691 - RNA, 22 nt, Homo sapiens
acagugcuuggcacacaguaau

SEQ ID NO: 74692 - RNA, 22 nt, Homo sapiens
uuugagaaugcuaccagagaag

SEQ ID NO: 74693 - RNA, 22 nt, Homo sapiens
ugucaguggacugugaaaggca

SEQ ID NO: 74694 - RNA, 22 nt, Homo sapiens
uaccagugucagcuuccugugu

SEQ ID NO: 74695 - RNA, 22 nt, Homo sapiens
ugggaaugaaauuacauagcuu

SEQ ID NO: 74696 - RNA, 22 nt, Homo sapiens
cucaugcugucuucugggguaa

SEQ ID NO: 74697 - RNA, 22 nt, Homo sapiens
uagcagcauaaauggacuaaga

SEQ ID NO: 74698 - RNA, 23 nt, Homo sapiens
uggcauuuuaguuagcuucagug

SEQ ID NO: 74699 - RNA, 22 nt, Homo sapiens
ggaaugggauuugaagucuggc

SEQ ID NO: 74700 - RNA, 22 nt, Homo sapiens
aagcuggagugcaguggugcaa

SEQ ID NO: 74701 - RNA, 21 nt, Homo sapiens
uggaauguucugacuucaggg

SEQ ID NO: 74702 - RNA, 22 nt, Homo sapiens
auugaacaugccauauguacca

SEQ ID NO: 74703 - RNA, 22 nt, Homo sapiens
gugacauuauuucagcuacaug

SEQ ID NO: 74704 - RNA, 22 nt, Homo sapiens
aauacagcacacagaugggucu

SEQ ID NO: 74705 - RNA, 19 nt, Homo sapiens
caucacagagucuuccauu

SEQ ID NO: 74706 - RNA, 22 nt, Homo sapiens
uaacugcaaccucugccugcug

SEQ ID NO: 74707 - RNA, 22 nt, Homo sapiens
auaaaugcaaugguauuuuuga

SEQ ID NO: 74708 - RNA, 22 nt, Homo sapiens
gagaaugaacagacugccucuu

SEQ ID NO: 74709 - RNA, 20 nt, Homo sapiens
agcauugguuagaacaguag

SEQ ID NO: 74710 - RNA, 21 nt, Homo sapiens
gaguggcuuuuguuucaccag

SEQ ID NO: 74711 - RNA, 22 nt, Homo sapiens
uggggcaaugaacauuuuugca

SEQ ID NO: 74712 - RNA, 22 nt, Homo sapiens
uuuugcuugugaauagccacau

SEQ ID NO: 74713 - RNA, 22 nt, Homo sapiens
ucagaguagaaacacuuccaua

SEQ ID NO: 74714 - RNA, 22 nt, Homo sapiens
ggcaagaaccagggauuugcgu

SEQ ID NO: 74715 - RNA, 22 nt, Homo sapiens
ugaaauacuuuggcucuuuguu

SEQ ID NO: 74716 - RNA, 22 nt, Homo sapiens
aucucaguuaauuccaucuuuc

SEQ ID NO: 74717 - RNA, 22 nt, Homo sapiens
augacugucagggcagucauug

SEQ ID NO: 74718 - RNA, 22 nt, Homo sapiens
ucaacacaguuaaauggggaaa

SEQ ID NO: 74719 - RNA, 23 nt, Homo sapiens
cuuuguccccacccaaaucucau

SEQ ID NO: 74720 - RNA, 21 nt, Homo sapiens
uuuacuguggacccauugcuu

SEQ ID NO: 74721 - RNA, 22 nt, Homo sapiens
uucagagagggagggauaccua

SEQ ID NO: 74722 - RNA, 22 nt, Homo sapiens
aggugaaugcucacauucuaau

SEQ ID NO: 74723 - RNA, 22 nt, Homo sapiens
aaaugucauggaguguuucccc

SEQ ID NO: 74724 - RNA, 19 nt, Homo sapiens
uagcagcaugauuuauaau

SEQ ID NO: 74725 - RNA, 20 nt, Homo sapiens
ucaaagacauggcugucaga

SEQ ID NO: 74726 - RNA, 22 nt, Homo sapiens
cuggcaaauguuuucuguaaag

SEQ ID NO: 74727 - RNA, 22 nt, Homo sapiens
uaccagugaauuccaggggcua

SEQ ID NO: 74728 - RNA, 22 nt, Homo sapiens
ugggaagaagguuuacuugcca

SEQ ID NO: 74729 - RNA, 22 nt, Homo sapiens
gcaguguggguagagggcaaga

SEQ ID NO: 74730 - RNA, 22 nt, Homo sapiens
gagaacauacggcauuugguuu

SEQ ID NO: 74731 - RNA, 23 nt, Homo sapiens
ugcaccacuacacacucuugggu

SEQ ID NO: 74732 - RNA, 22 nt, Homo sapiens
auugucauuuucugagaaguaa

SEQ ID NO: 74733 - RNA, 22 nt, Homo sapiens
gucauggacaaggugugagcca

SEQ ID NO: 74734 - RNA, 22 nt, Homo sapiens
gagaacauuuaagccacucagg

SEQ ID NO: 74735 - RNA, 22 nt, Homo sapiens
cucaguuuugccuuguuuaagg

SEQ ID NO: 74736 - RNA, 22 nt, Homo sapiens
caugugcaugcuuucuuaugug

SEQ ID NO: 74737 - RNA, 22 nt, Homo sapiens
gucaauguaucuagcuguauua

SEQ ID NO: 74738 - RNA, 22 nt, Homo sapiens
ccauuucacucuuccugaagga

SEQ ID NO: 74739 - RNA, 22 nt, Homo sapiens
cuacucuggagagugacaauca

SEQ ID NO: 74740 - RNA, 22 nt, Homo sapiens
agagugaagcuuuuuauauucu

SEQ ID NO: 74741 - RNA, 22 nt, Homo sapiens
ucauccauacaguuagcaaagg

SEQ ID NO: 74742 - RNA, 22 nt, Homo sapiens
cacacuguuuuccauggggguu

SEQ ID NO: 74743 - RNA, 19 nt, Homo sapiens
uuacauccauugcauuuca

SEQ ID NO: 74744 - RNA, 21 nt, Homo sapiens
gucacuggggcuggauaauuc

SEQ ID NO: 74745 - RNA, 22 nt, Homo sapiens
uuuguacucccuuuagauaaaa

SEQ ID NO: 74746 - RNA, 22 nt, Homo sapiens
gugaagugugaccucagcaucu

SEQ ID NO: 74747 - RNA, 22 nt, Homo sapiens
cccaguuuugccacuuacuagc

SEQ ID NO: 74748 - RNA, 22 nt, Homo sapiens
gaaugaauguuuauccuuagau

SEQ ID NO: 74749 - RNA, 20 nt, Homo sapiens
augcaaacccugcuuugugg

SEQ ID NO: 74750 - RNA, 22 nt, Homo sapiens
cacagucuugcaauauugagau

SEQ ID NO: 74751 - RNA, 22 nt, Homo sapiens
cugcuaagagaaugagacuuag

SEQ ID NO: 74752 - RNA, 22 nt, Homo sapiens
ugaaguguuuuuucaggcaugu

SEQ ID NO: 74753 - RNA, 20 nt, Homo sapiens
cuugaagacuaugcugcuga

SEQ ID NO: 74754 - RNA, 22 nt, Homo sapiens
agcauuaguugugaagccuuua

SEQ ID NO: 74755 - RNA, 22 nt, Homo sapiens
cugacauuguugaucacagcca

SEQ ID NO: 74756 - RNA, 22 nt, Homo sapiens
acauaaagaagcaggacauugu

SEQ ID NO: 74757 - RNA, 22 nt, Homo sapiens
augcauaugucuuuauaguggc

SEQ ID NO: 74758 - RNA, 20 nt, Homo sapiens
acccucuaggaugauuucuu

SEQ ID NO: 74759 - RNA, 20 nt, Homo sapiens
acugcacuccaggcugccca

SEQ ID NO: 74760 - RNA, 22 nt, Homo sapiens
uuauuagguugguggaaaagua

SEQ ID NO: 74761 - RNA, 22 nt, Homo sapiens
auggagacaaauaaaggagagu

SEQ ID NO: 74762 - RNA, 17 nt, Homo sapiens
ugaggcacuaguaucac

SEQ ID NO: 74763 - RNA, 22 nt, Homo sapiens
ugucaguguacuguaagaauua

SEQ ID NO: 74764 - RNA, 22 nt, Homo sapiens
ugucauucaggaaauucuaagu

SEQ ID NO: 74765 - RNA, 22 nt, Homo sapiens
uuuaauguuacaguauugguau

SEQ ID NO: 74766 - RNA, 22 nt, Homo sapiens
ucuaauguaaccugcaaauauu

SEQ ID NO: 74767 - RNA, 20 nt, Homo sapiens
ugggaacaugugguauaugg

SEQ ID NO: 74768 - RNA, 22 nt, Homo sapiens
uagaauguaaauuccaagggca

SEQ ID NO: 74769 - RNA, 22 nt, Homo sapiens
agaaugucagcuggauucagcu

SEQ ID NO: 74770 - RNA, 22 nt, Homo sapiens
ugucaccauuuguaggugagga

SEQ ID NO: 74771 - RNA, 22 nt, Homo sapiens
uuauuagguuaaccuauagcua

SEQ ID NO: 74772 - RNA, 22 nt, Homo sapiens
cacacugucuucauuacuguag

SEQ ID NO: 74773 - RNA, 23 nt, Homo sapiens
auaagccuuuucuuucugcccca

SEQ ID NO: 74774 - RNA, 22 nt, Homo sapiens
uacucugcaguaauuccagccc

SEQ ID NO: 74775 - RNA, 22 nt, Homo sapiens
gugucaguggggagugaucuuc

SEQ ID NO: 74776 - RNA, 23 nt, Homo sapiens
cagcuucauugaacauaacuccu

SEQ ID NO: 74777 - RNA, 17 nt, Homo sapiens
gacauaggaaaaggaga

SEQ ID NO: 74778 - RNA, 22 nt, Homo sapiens
ucacagaugaggcgagaggcag

SEQ ID NO: 74779 - RNA, 22 nt, Homo sapiens
agugucaggagacagguagcug

SEQ ID NO: 74780 - RNA, 22 nt, Homo sapiens
gaagaucacacuguagaucuau

SEQ ID NO: 74781 - RNA, 22 nt, Homo sapiens
uucaagucaacaagcacuugag

SEQ ID NO: 74782 - RNA, 22 nt, Homo sapiens
aagugaaugugcuggaauagcu

SEQ ID NO: 74783 - RNA, 22 nt, Homo sapiens
cugcaagaugcauaggaauuuu

SEQ ID NO: 74784 - RNA, 22 nt, Homo sapiens
augugcacaugcuuacauguga

SEQ ID NO: 74785 - RNA, 22 nt, Homo sapiens
ucccaguggucuugaaacaggg

SEQ ID NO: 74786 - RNA, 17 nt, Homo sapiens
auaugaauuuuggagau

SEQ ID NO: 74787 - RNA, 22 nt, Homo sapiens
auguggcacuugacuuucucgc

SEQ ID NO: 74788 - RNA, 22 nt, Homo sapiens
uugagggaggccucaguuuaca

SEQ ID NO: 74789 - RNA, 22 nt, Homo sapiens
aucccaguaaaaauggcuucua

SEQ ID NO: 74790 - RNA, 22 nt, Homo sapiens
aaucacaggucuuggcugcaug

SEQ ID NO: 74791 - RNA, 22 nt, Homo sapiens
cuguauguuucuaugaauguga

SEQ ID NO: 74792 - RNA, 22 nt, Homo sapiens
uuccaguggacuacuucauccu

SEQ ID NO: 74793 - RNA, 22 nt, Homo sapiens
gucagcaucaccaugucuauga

SEQ ID NO: 74794 - RNA, 22 nt, Homo sapiens
gcaaaguaauuguuguuuuugc

SEQ ID NO: 74795 - RNA, 22 nt, Homo sapiens
ggcagcauugccuuugcaguga

SEQ ID NO: 74796 - RNA, 22 nt, Homo sapiens
ugugcaaggcucucaaccugug

SEQ ID NO: 74797 - RNA, 22 nt, Homo sapiens
cacaguguuccagcuauuugaa

SEQ ID NO: 74798 - RNA, 22 nt, Homo sapiens
uuauuagguuagugcaaaaguu

SEQ ID NO: 74799 - RNA, 22 nt, Homo sapiens
uagaacauuccaggugauguug

SEQ ID NO: 74800 - RNA, 22 nt, Homo sapiens
uucugagguuauauucucucaa

SEQ ID NO: 74801 - RNA, 22 nt, Homo sapiens
ugugauaguuggcuaaagcagu

SEQ ID NO: 74802 - RNA, 22 nt, Homo sapiens
cucugagguuauucguaauauu

SEQ ID NO: 74803 - RNA, 22 nt, Homo sapiens
agcagcaauuuuguaugguuua

SEQ ID NO: 74804 - RNA, 22 nt, Homo sapiens
acacagucaaauccacuuggcu

SEQ ID NO: 74805 - RNA, 22 nt, Homo sapiens
augacauugaugcucuggcugg

SEQ ID NO: 74806 - RNA, 22 nt, Homo sapiens
cacugggccaucacuuaauauu

SEQ ID NO: 74807 - RNA, 22 nt, Homo sapiens
gagcugaauugcugccauuugc

SEQ ID NO: 74808 - RNA, 22 nt, Homo sapiens
uacaagcaggaaaugguauaug

SEQ ID NO: 74809 - RNA, 20 nt, Homo sapiens
uucacugggcucucuguugg

SEQ ID NO: 74810 - RNA, 22 nt, Homo sapiens
ggagugucagaaacaguguccu

SEQ ID NO: 74811 - RNA, 22 nt, Homo sapiens
uugacauugcuguaguguccag

SEQ ID NO: 74812 - RNA, 22 nt, Homo sapiens
uuugggaaugaguuuaucauuu

SEQ ID NO: 74813 - RNA, 22 nt, Homo sapiens
uuggcagcuguggaaucugggc

SEQ ID NO: 74814 - RNA, 22 nt, Homo sapiens
ugagccaaugauuugaauagag

SEQ ID NO: 74815 - RNA, 22 nt, Homo sapiens
ugcuauguuuucccuccuuauc

SEQ ID NO: 74816 - RNA, 19 nt, Homo sapiens
caccagugcaugcuacuau

SEQ ID NO: 74817 - RNA, 22 nt, Homo sapiens
ucugucacugguggacgaucac

SEQ ID NO: 74818 - RNA, 22 nt, Homo sapiens
aauagcacuguagauggaggaa

SEQ ID NO: 74819 - RNA, 22 nt, Homo sapiens
ugcuggcguuacucuccaucag

SEQ ID NO: 74820 - RNA, 22 nt, Homo sapiens
auaagaagugaaccagacgucu

SEQ ID NO: 74821 - RNA, 22 nt, Homo sapiens
uccaguuuuguuaacauauggu

SEQ ID NO: 74822 - RNA, 22 nt, Homo sapiens
auugcucuuagaaauauuucuu

SEQ ID NO: 74823 - RNA, 22 nt, Homo sapiens
agcuaugucugaugccugauua

SEQ ID NO: 74824 - RNA, 22 nt, Homo sapiens
cugaggaaguucuuuaacaguu

SEQ ID NO: 74825 - RNA, 22 nt, Homo sapiens
uuccuugagucuuuuuccugag

SEQ ID NO: 74826 - RNA, 22 nt, Homo sapiens
uugagguagugucuuguucugu

SEQ ID NO: 74827 - RNA, 22 nt, Homo sapiens
agcaccacaauuuccugccuaa

SEQ ID NO: 74828 - RNA, 22 nt, Homo sapiens
auugauaguuuaauaggaauug

SEQ ID NO: 74829 - RNA, 17 nt, Homo sapiens
aguacugucccauccuu

SEQ ID NO: 74830 - RNA, 22 nt, Homo sapiens
uuaaugaacuuuauuuuguaga

SEQ ID NO: 74831 - RNA, 22 nt, Homo sapiens
cucaguggauuagauaaugcac

SEQ ID NO: 74832 - RNA, 22 nt, Homo sapiens
acacuguuuuguggagaaugua

SEQ ID NO: 74833 - RNA, 22 nt, Homo sapiens
ccacaguugaaauuuugacugu

SEQ ID NO: 74834 - RNA, 22 nt, Homo sapiens
cugugaagaaagucauugguag

SEQ ID NO: 74835 - RNA, 22 nt, Homo sapiens
aagccagugugacaggaaacuu

SEQ ID NO: 74836 - RNA, 22 nt, Homo sapiens
auauuggccuaaaauucucuuu

SEQ ID NO: 74837 - RNA, 22 nt, Homo sapiens
uggaaugucagcuacaagaggg

SEQ ID NO: 74838 - RNA, 22 nt, Homo sapiens
auaguacuauugcaguguuaua

SEQ ID NO: 74839 - RNA, 22 nt, Homo sapiens
ucacagucggugacuucuugcu

SEQ ID NO: 74840 - RNA, 22 nt, Homo sapiens
auagagcuaccauagaauccag

SEQ ID NO: 74841 - RNA, 22 nt, Homo sapiens
uugacuucagagcugauucaag

SEQ ID NO: 74842 - RNA, 22 nt, Homo sapiens
caugugcaugagcacauacgug

SEQ ID NO: 74843 - RNA, 22 nt, Homo sapiens
gagauuauuuaaaaggugauuu

SEQ ID NO: 74844 - RNA, 22 nt, Homo sapiens
caucacaguacuaaucgucaua

SEQ ID NO: 74845 - RNA, 20 nt, Homo sapiens
uggaaguaagaauauaggug

SEQ ID NO: 74846 - RNA, 22 nt, Homo sapiens
uugaggucuuugagcaaacgca

SEQ ID NO: 74847 - RNA, 22 nt, Homo sapiens
ggcagcaugggugccuuuguga

SEQ ID NO: 74848 - RNA, 20 nt, Homo sapiens
uggucaccuucaggagguuc

SEQ ID NO: 74849 - RNA, 22 nt, Homo sapiens
agcaagauuguucccauuuucu

SEQ ID NO: 74850 - RNA, 22 nt, Homo sapiens
ugagcacauuuacaucaguucc

SEQ ID NO: 74851 - RNA, 22 nt, Homo sapiens
uuagucaaguguacugugaaug

SEQ ID NO: 74852 - RNA, 22 nt, Homo sapiens
uauuccagcccuggugagccag

SEQ ID NO: 74853 - RNA, 22 nt, Homo sapiens
uguaguuugaaagcucccucug

SEQ ID NO: 74854 - RNA, 18 nt, Homo sapiens
cagugcaauacaggagag

SEQ ID NO: 74855 - RNA, 22 nt, Homo sapiens
acugcacuccagccucccgucu

SEQ ID NO: 74856 - RNA, 22 nt, Homo sapiens
cuuuaguugucuccucaagggu

SEQ ID NO: 74857 - RNA, 22 nt, Homo sapiens
auguggcauuucucauucauuu

SEQ ID NO: 74858 - RNA, 22 nt, Homo sapiens
ucagaccauuucauuacagacu

SEQ ID NO: 74859 - RNA, 22 nt, Homo sapiens
gcuuuguugauggugagucugu

SEQ ID NO: 74860 - RNA, 22 nt, Homo sapiens
cugucaucauuucuaugugcca

SEQ ID NO: 74861 - RNA, 22 nt, Homo sapiens
uagcagcauuuuuguagaguau

SEQ ID NO: 74862 - RNA, 22 nt, Homo sapiens
auuacuuugcaccaaccuaaua

SEQ ID NO: 74863 - RNA, 22 nt, Homo sapiens
cacagugaaugucaucauugcc

SEQ ID NO: 74864 - RNA, 23 nt, Homo sapiens
ucacaguggcugcuuaauuguga

SEQ ID NO: 74865 - RNA, 22 nt, Homo sapiens
uucccagucaaacgaaggacuu

SEQ ID NO: 74866 - RNA, 22 nt, Homo sapiens
agaaugucaguauuggcuaaaa

SEQ ID NO: 74867 - RNA, 22 nt, Homo sapiens
aacacggcccgcagagcaagcu

SEQ ID NO: 74868 - RNA, 22 nt, Homo sapiens
uaaugcuccauggguuauuaaa

SEQ ID NO: 74869 - RNA, 22 nt, Homo sapiens
cugugcauguaugcgugaguuc

SEQ ID NO: 74870 - RNA, 22 nt, Homo sapiens
uugacauaguuucugaaauaga

SEQ ID NO: 74871 - RNA, 22 nt, Homo sapiens
ugucagcacaacucagguuccu

SEQ ID NO: 74872 - RNA, 22 nt, Homo sapiens
ugucaucauuccaucagggcuu

SEQ ID NO: 74873 - RNA, 22 nt, Homo sapiens
caggugcauuggcugacaccug

SEQ ID NO: 74874 - RNA, 22 nt, Homo sapiens
cugaggguagaaggaucacuug

SEQ ID NO: 74875 - RNA, 22 nt, Homo sapiens
ugaaaugauuauaugguguuug

SEQ ID NO: 74876 - RNA, 22 nt, Homo sapiens
gucuugaaggcugaguaccugu

SEQ ID NO: 74877 - RNA, 22 nt, Homo sapiens
agggaagugugcuaugcauuua

SEQ ID NO: 74878 - RNA, 22 nt, Homo sapiens
caccagcuggcauugaauaccu

SEQ ID NO: 74879 - RNA, 22 nt, Homo sapiens
agucauggaucacaguagccuc

SEQ ID NO: 74880 - RNA, 22 nt, Homo sapiens
uacaguacagugacaccauuau

SEQ ID NO: 74881 - RNA, 22 nt, Homo sapiens
cauuugcacugagacucagcuu

SEQ ID NO: 74882 - RNA, 22 nt, Homo sapiens
ugucauguugguguacugcacc

SEQ ID NO: 74883 - RNA, 22 nt, Homo sapiens
cuuuguguggacauuucaggca

SEQ ID NO: 74884 - RNA, 21 nt, Homo sapiens
ucaucaagcuguagacaugau

SEQ ID NO: 74885 - RNA, 22 nt, Homo sapiens
augaacagagccuugagaaccu

SEQ ID NO: 74886 - RNA, 22 nt, Homo sapiens
aucagaguggguuuuaaaagug

SEQ ID NO: 74887 - RNA, 22 nt, Homo sapiens
uuuaaugcgucucugaguuuug

SEQ ID NO: 74888 - RNA, 22 nt, Homo sapiens
agugaacaaagaagugcagaua

SEQ ID NO: 74889 - RNA, 22 nt, Homo sapiens
uagcagcaccccacucuacugg

SEQ ID NO: 74890 - RNA, 22 nt, Homo sapiens
aaugucaugaguccaaccagaa

SEQ ID NO: 74891 - RNA, 22 nt, Homo sapiens
ugaauagacacuaaagacugua

SEQ ID NO: 74892 - RNA, 22 nt, Homo sapiens
ugaggcacucuagacuuauuca

SEQ ID NO: 74893 - RNA, 22 nt, Homo sapiens
augugcuugagggaaaucaguu

SEQ ID NO: 74894 - RNA, 22 nt, Homo sapiens
uacucugcagccauaaaacaga

SEQ ID NO: 74895 - RNA, 22 nt, Homo sapiens
uuuaucuguuuaaaacuguuca

SEQ ID NO: 74896 - RNA, 20 nt, Homo sapiens
cagucaugaagaacugugag

SEQ ID NO: 74897 - RNA, 22 nt, Homo sapiens
uucaaguagguaggaccacagg

SEQ ID NO: 74898 - RNA, 22 nt, Homo sapiens
gcaagaaugagaaggauuaauu

SEQ ID NO: 74899 - RNA, 22 nt, Homo sapiens
uggccaagagcacagauauugg

SEQ ID NO: 74900 - RNA, 22 nt, Homo sapiens
aucucaguucaggcuggccaca

SEQ ID NO: 74901 - RNA, 22 nt, Homo sapiens
cuuugugugggccaagggcugg

SEQ ID NO: 74902 - RNA, 22 nt, Homo sapiens
uggcuagaccugcauaacagcu

SEQ ID NO: 74903 - RNA, 22 nt, Homo sapiens
gcagugugaucacagcuuacug

SEQ ID NO: 74904 - RNA, 22 nt, Homo sapiens
gcaagaaucugggaguaaaauu

SEQ ID NO: 74905 - RNA, 20 nt, Homo sapiens
uagcagcagacagagggagg

SEQ ID NO: 74906 - RNA, 22 nt, Homo sapiens
ugucccaguuggguauugaauu

SEQ ID NO: 74907 - RNA, 22 nt, Homo sapiens
ucaucagaaucccuuagggaug

SEQ ID NO: 74908 - RNA, 22 nt, Homo sapiens
cugugcauaucuuggacugugu

SEQ ID NO: 74909 - RNA, 22 nt, Homo sapiens
uucacuguagccucagccucuu

SEQ ID NO: 74910 - RNA, 22 nt, Homo sapiens
acagauugcugggccccagccc

SEQ ID NO: 74911 - RNA, 22 nt, Homo sapiens
cuucaucugguuugugaacuuu

SEQ ID NO: 74912 - RNA, 21 nt, Homo sapiens
aaucacaguuguucugccuuc

SEQ ID NO: 74913 - RNA, 22 nt, Homo sapiens
accuucauuguugccaugucca

SEQ ID NO: 74914 - RNA, 22 nt, Homo sapiens
uacucugcagagaugcauaaca

SEQ ID NO: 74915 - RNA, 22 nt, Homo sapiens
gagacggagucuugcucuguug

SEQ ID NO: 74916 - RNA, 22 nt, Homo sapiens
gagacggagucucgcucugucg

SEQ ID NO: 74917 - RNA, 22 nt, Homo sapiens
ggaagacaguguggugauuccu

SEQ ID NO: 74918 - RNA, 22 nt, Homo sapiens
cucaaagugcuaagauuaggcu

SEQ ID NO: 74919 - RNA, 22 nt, Homo sapiens
ugugaugguuuagcauuuucuu

SEQ ID NO: 74920 - RNA, 22 nt, Homo sapiens
auaaauaguaguugugguggcc

SEQ ID NO: 74921 - RNA, 22 nt, Homo sapiens
ugcuagaagaucacacacauca

SEQ ID NO: 74922 - RNA, 18 nt, Homo sapiens
cuuaacauugggaugaua

SEQ ID NO: 74923 - RNA, 22 nt, Homo sapiens
uuagaacaguguuugccucgcu

SEQ ID NO: 74924 - RNA, 22 nt, Homo sapiens
uacauccauccugcugggcagu

SEQ ID NO: 74925 - RNA, 22 nt, Homo sapiens
ugucacugugcagucaugcauu

SEQ ID NO: 74926 - RNA, 22 nt, Homo sapiens
ucauauguaugugcaauuuugu

SEQ ID NO: 74927 - RNA, 22 nt, Homo sapiens
gauagugaaccaagggguaauu

SEQ ID NO: 74928 - RNA, 22 nt, Homo sapiens
acagugcuucugauaugaugcc

SEQ ID NO: 74929 - RNA, 22 nt, Homo sapiens
uuggcagcauuccagccaagca

SEQ ID NO: 74930 - RNA, 22 nt, Homo sapiens
uagcagcagugguguauuuaga

SEQ ID NO: 74931 - RNA, 22 nt, Homo sapiens
gagaaugagauuaugguuacau

SEQ ID NO: 74932 - RNA, 18 nt, Homo sapiens
acaguguguaaggguucu

SEQ ID NO: 74933 - RNA, 22 nt, Homo sapiens
auuggcagaaaucuuuauagua

SEQ ID NO: 74934 - RNA, 22 nt, Homo sapiens
aucccaguucagccucugacac

SEQ ID NO: 74935 - RNA, 22 nt, Homo sapiens
uccauaguacuagaaacugacc

SEQ ID NO: 74936 - RNA, 22 nt, Homo sapiens
gggcaugaugucuuaugccuau

SEQ ID NO: 74937 - RNA, 22 nt, Homo sapiens
uaaagcacaaguaaagaauacu

SEQ ID NO: 74938 - RNA, 22 nt, Homo sapiens
ugagguaugugaugucuuuuag

SEQ ID NO: 74939 - RNA, 22 nt, Homo sapiens
agcuauauugaggaugccauuc

SEQ ID NO: 74940 - RNA, 22 nt, Homo sapiens
cugugcauggauuuuaagauug

SEQ ID NO: 74941 - RNA, 22 nt, Homo sapiens
guuaggcagugugguauagcag

SEQ ID NO: 74942 - RNA, 22 nt, Homo sapiens
augagauauuuuauaagaucau

SEQ ID NO: 74943 - RNA, 22 nt, Homo sapiens
agcaugacauauuguagagaaa

SEQ ID NO: 74944 - RNA, 22 nt, Homo sapiens
uggucaccuucuugcucugucu

SEQ ID NO: 74945 - RNA, 21 nt, Homo sapiens
aagaaagcuggacuugccgcu

SEQ ID NO: 74946 - RNA, 22 nt, Homo sapiens
auguuagcaucaauauucauca

SEQ ID NO: 74947 - RNA, 22 nt, Homo sapiens
uggucaccugaauuaugcaugu

SEQ ID NO: 74948 - RNA, 22 nt, Homo sapiens
gcagugugauguuuuaaucuau

SEQ ID NO: 74949 - RNA, 21 nt, Homo sapiens
uugagaagaauuagcucuucc

SEQ ID NO: 74950 - RNA, 18 nt, Homo sapiens
cccagugacuuauggccu

SEQ ID NO: 74951 - RNA, 22 nt, Homo sapiens
ugaagugaagacucacagaagg

SEQ ID NO: 74952 - RNA, 22 nt, Homo sapiens
augaaaucuuuggcagaucuua

SEQ ID NO: 74953 - RNA, 22 nt, Homo sapiens
cagagaacauucagagcuguag

SEQ ID NO: 74954 - RNA, 22 nt, Homo sapiens
cugugguuacguucuuugugcu

SEQ ID NO: 74955 - RNA, 22 nt, Homo sapiens
acugcacuccagccugcccaac

SEQ ID NO: 74956 - RNA, 21 nt, Homo sapiens
ucacaaugaacagcagcagaa

SEQ ID NO: 74957 - RNA, 22 nt, Homo sapiens
ucaaagugacaaaguugcagca

SEQ ID NO: 74958 - RNA, 17 nt, Homo sapiens
guggaaugucaugucaa

SEQ ID NO: 74959 - RNA, 22 nt, Homo sapiens
ucugacaaugaacaaucuauag

SEQ ID NO: 74960 - RNA, 22 nt, Homo sapiens
guggaaugaaaacucucucaca

SEQ ID NO: 74961 - RNA, 22 nt, Homo sapiens
cugauaguucucuuuagaguuu

SEQ ID NO: 74962 - RNA, 22 nt, Homo sapiens
acugcacuccagccugccgaca

SEQ ID NO: 74963 - RNA, 20 nt, Homo sapiens
acugcacuucagccugcugg

SEQ ID NO: 74964 - RNA, 21 nt, Homo sapiens
ugcucaugaguaaugcaguga

SEQ ID NO: 74965 - RNA, 22 nt, Homo sapiens
uuaugucauuuuuggauguuaa

SEQ ID NO: 74966 - RNA, 22 nt, Homo sapiens
uauugaacgugggauauugaag

SEQ ID NO: 74967 - RNA, 22 nt, Homo sapiens
uuuaacauuggaugagaucguc

SEQ ID NO: 74968 - RNA, 22 nt, Homo sapiens
ugaaauacuuaauuucuccaug

SEQ ID NO: 74969 - RNA, 22 nt, Homo sapiens
ugucaggagcaaugauaaauuu

SEQ ID NO: 74970 - RNA, 22 nt, Homo sapiens
ugaaagacugaagaauaggcau

SEQ ID NO: 74971 - RNA, 22 nt, Homo sapiens
agugcaauaaggauguagaacu

SEQ ID NO: 74972 - RNA, 19 nt, Homo sapiens
uuuuccccuuucuuaagac

SEQ ID NO: 74973 - RNA, 22 nt, Homo sapiens
uaugccuuuuggcucaagaaac

SEQ ID NO: 74974 - RNA, 22 nt, Homo sapiens
caacucuguaggauccaggugg

SEQ ID NO: 74975 - RNA, 22 nt, Homo sapiens
ugugaacauuuuguauauauua

SEQ ID NO: 74976 - RNA, 22 nt, Homo sapiens
cugaauagucaacgauggacug

SEQ ID NO: 74977 - RNA, 22 nt, Homo sapiens
uucuggccccucccaaucucau

SEQ ID NO: 74978 - RNA, 22 nt, Homo sapiens
uucacugggugugguggcucac

SEQ ID NO: 74979 - RNA, 22 nt, Homo sapiens
uuccaguaauagcacagcauug

SEQ ID NO: 74980 - RNA, 18 nt, Homo sapiens
uuuguacuuuuucuaaug

SEQ ID NO: 74981 - RNA, 22 nt, Homo sapiens
gggaagaaggagugguuuacuc

SEQ ID NO: 74982 - RNA, 22 nt, Homo sapiens
uugcuagagaugagggaugugu

SEQ ID NO: 74983 - RNA, 23 nt, Homo sapiens
ucugcggguguggacccuagugc

SEQ ID NO: 74984 - RNA, 22 nt, Homo sapiens
gacacugucuucugcucuuaaa

SEQ ID NO: 74985 - RNA, 22 nt, Homo sapiens
uguuuaguuaagacauagaauu

SEQ ID NO: 74986 - RNA, 22 nt, Homo sapiens
agagaugaagauggggcucccg

SEQ ID NO: 74987 - RNA, 22 nt, Homo sapiens
augacauugaaaagcaagugga

SEQ ID NO: 74988 - RNA, 22 nt, Homo sapiens
uaguagcaccucucaugagcuu

SEQ ID NO: 74989 - RNA, 22 nt, Homo sapiens
auuguguagucuuacugcuugc

SEQ ID NO: 74990 - RNA, 22 nt, Homo sapiens
aagcuggauuucgcauccuguu

SEQ ID NO: 74991 - RNA, 22 nt, Homo sapiens
aucacagaacuuugagcagaga

SEQ ID NO: 74992 - RNA, 22 nt, Homo sapiens
ucacuguggaacucaaaaagcu

SEQ ID NO: 74993 - RNA, 22 nt, Homo sapiens
uaucacagguggacugcacacc

SEQ ID NO: 74994 - RNA, 22 nt, Homo sapiens
uucuuagguuaaggcugagaga

SEQ ID NO: 74995 - RNA, 18 nt, Homo sapiens
aaacagugucucuuucug

SEQ ID NO: 74996 - RNA, 22 nt, Homo sapiens
uuugggaaaugaaguugguaga

SEQ ID NO: 74997 - RNA, 22 nt, Homo sapiens
acugcacuccagccuccugggu

SEQ ID NO: 74998 - RNA, 18 nt, Homo sapiens
acugcacuccauccuagg

SEQ ID NO: 74999 - RNA, 22 nt, Homo sapiens
agcuuuggauaccugcuguucc

SEQ ID NO: 75000 - RNA, 23 nt, Homo sapiens
ggaaugaaaccugguuaugauau

SEQ ID NO: 75001 - RNA, 22 nt, Homo sapiens
uuacaucaucacauuaguuugc

SEQ ID NO: 75002 - RNA, 20 nt, Homo sapiens
acugcacuccagccuuccag

SEQ ID NO: 75003 - RNA, 22 nt, Homo sapiens
gugaaauguguagaggaucugg

SEQ ID NO: 75004 - RNA, 22 nt, Homo sapiens
uacuagaguagugcagagggga

SEQ ID NO: 75005 - RNA, 22 nt, Homo sapiens
ugggaagaugcugcuucuuccu

SEQ ID NO: 75006 - RNA, 23 nt, Homo sapiens
agagugcaauggugccaucucgg

SEQ ID NO: 75007 - RNA, 22 nt, Homo sapiens
aagcugugucuugucagcuacc

SEQ ID NO: 75008 - RNA, 20 nt, Homo sapiens
cuucacagaaguggaaucau

SEQ ID NO: 75009 - RNA, 22 nt, Homo sapiens
cugaauagagcacacugauggg

SEQ ID NO: 75010 - RNA, 22 nt, Homo sapiens
aagcuggauuuaguguggagca

SEQ ID NO: 75011 - RNA, 22 nt, Homo sapiens
gugaacaagcaaaggcaggagg

SEQ ID NO: 75012 - RNA, 22 nt, Homo sapiens
ugaaauguuaaacaaguggcuc

SEQ ID NO: 75013 - RNA, 22 nt, Homo sapiens
cagugucugcauuuggaacuca

SEQ ID NO: 75014 - RNA, 22 nt, Homo sapiens
uucacagugugaucuaugggca

SEQ ID NO: 75015 - RNA, 22 nt, Homo sapiens
aaugacuaagaugguacauuuu

SEQ ID NO: 75016 - RNA, 22 nt, Homo sapiens
ugugcaaucagcuucauuacau

SEQ ID NO: 75017 - RNA, 22 nt, Homo sapiens
gagacggagucucgcucuguca

SEQ ID NO: 75018 - RNA, 22 nt, Homo sapiens
aauggcacacaccuggucuaac

SEQ ID NO: 75019 - RNA, 19 nt, Homo sapiens
augaguuaggggaaauuuc

SEQ ID NO: 75020 - RNA, 22 nt, Homo sapiens
ugaaacacaccuccucuccauc

SEQ ID NO: 75021 - RNA, 22 nt, Homo sapiens
augaauacugcugcaaugaaca

SEQ ID NO: 75022 - RNA, 22 nt, Homo sapiens
guucaguuuuaaagggaaauug

SEQ ID NO: 75023 - RNA, 22 nt, Homo sapiens
aagauauguuaguuauaaacuc

SEQ ID NO: 75024 - RNA, 22 nt, Homo sapiens
uaacauucacaugcugcaaaaa

SEQ ID NO: 75025 - RNA, 22 nt, Homo sapiens
augaaaacaugauuugccuguu

SEQ ID NO: 75026 - RNA, 22 nt, Homo sapiens
uaacauagucauauacuugcuu

SEQ ID NO: 75027 - RNA, 23 nt, Homo sapiens
ugacaagagcgagacuuggucuc

SEQ ID NO: 75028 - RNA, 20 nt, Homo sapiens
acacugugcuaaggauuuuc

SEQ ID NO: 75029 - RNA, 22 nt, Homo sapiens
ugauguguuuuguaguucaacu

SEQ ID NO: 75030 - RNA, 22 nt, Homo sapiens
aucacuggucaugagagaagua

SEQ ID NO: 75031 - RNA, 22 nt, Homo sapiens
ugcaccacugcacugccugggu

SEQ ID NO: 75032 - RNA, 22 nt, Homo sapiens
ucagauugaugcauacuuaaau

SEQ ID NO: 75033 - RNA, 22 nt, Homo sapiens
aagcuggagugcaguggugcga

SEQ ID NO: 75034 - RNA, 22 nt, Homo sapiens
uuaaugugaaucaggaugcauu

SEQ ID NO: 75035 - RNA, 22 nt, Homo sapiens
gagaacauuaauaguuaauuuu

SEQ ID NO: 75036 - RNA, 22 nt, Homo sapiens
ugaaauguugggugauggaauc

SEQ ID NO: 75037 - RNA, 22 nt, Homo sapiens
acugcacugucaaccuccuggg

SEQ ID NO: 75038 - RNA, 22 nt, Homo sapiens
agccaguauuuccacagagugg

SEQ ID NO: 75039 - RNA, 22 nt, Homo sapiens
uggaaguaaucaugagguagca

SEQ ID NO: 75040 - RNA, 22 nt, Homo sapiens
gugcuauguuauccagcaagau

SEQ ID NO: 75041 - RNA, 19 nt, Homo sapiens
augacauuuggggguggac

SEQ ID NO: 75042 - RNA, 22 nt, Homo sapiens
cccagugaagagaaccuuacga

SEQ ID NO: 75043 - RNA, 22 nt, Homo sapiens
auagaaucaucugugcacuagu

SEQ ID NO: 75044 - RNA, 22 nt, Homo sapiens
gaaucauuguuucuaaguuugu

SEQ ID NO: 75045 - RNA, 22 nt, Homo sapiens
acaguguguguguucaccuaga

SEQ ID NO: 75046 - RNA, 22 nt, Homo sapiens
uuucugaggccucaccagaagc

SEQ ID NO: 75047 - RNA, 22 nt, Homo sapiens
acugcacuccagccucgcaaca

SEQ ID NO: 75048 - RNA, 22 nt, Homo sapiens
uacagcuaugugcaugcaugcu

SEQ ID NO: 75049 - RNA, 22 nt, Homo sapiens
uguaaugaucaaaucagaguaa

SEQ ID NO: 75050 - RNA, 22 nt, Homo sapiens
cacacugucuuucagaaugguu

SEQ ID NO: 75051 - RNA, 22 nt, Homo sapiens
aacacuguuuccagucaugauc

SEQ ID NO: 75052 - RNA, 22 nt, Homo sapiens
ugagaucuuggaggcuuuguga

SEQ ID NO: 75053 - RNA, 22 nt, Homo sapiens
uagaaucuaacucgcaugaaaa

SEQ ID NO: 75054 - RNA, 21 nt, Homo sapiens
aucagagacccaggcuuccuc

SEQ ID NO: 75055 - RNA, 22 nt, Homo sapiens
cucacugggaccacucugaagu

SEQ ID NO: 75056 - RNA, 22 nt, Homo sapiens
uugagagaaaaaauuuauuggu

SEQ ID NO: 75057 - RNA, 17 nt, Homo sapiens
guggauagaacaaugaa

SEQ ID NO: 75058 - RNA, 22 nt, Homo sapiens
gggaagauauaggcugggcacc

SEQ ID NO: 75059 - RNA, 22 nt, Homo sapiens
uccuucauuugucaacucuagu

SEQ ID NO: 75060 - RNA, 22 nt, Homo sapiens
gucauccaggcuggagugaagc

SEQ ID NO: 75061 - RNA, 23 nt, Homo sapiens
ugucaucaagaugaggucacacu

SEQ ID NO: 75062 - RNA, 18 nt, Homo sapiens
uguaaacuaccucaaccu

SEQ ID NO: 75063 - RNA, 22 nt, Homo sapiens
cagacaugucuuguggccgugg

SEQ ID NO: 75064 - RNA, 22 nt, Homo sapiens
augacauuccacagccguagag

SEQ ID NO: 75065 - RNA, 22 nt, Homo sapiens
gcaagaauggaacaggagagcc

SEQ ID NO: 75066 - RNA, 22 nt, Homo sapiens
uugaagugaagaacaauaucac

SEQ ID NO: 75067 - RNA, 22 nt, Homo sapiens
acugcacuccagccugcugaca

SEQ ID NO: 75068 - RNA, 22 nt, Homo sapiens
uugcuagaugaaaaugguaccu

SEQ ID NO: 75069 - RNA, 22 nt, Homo sapiens
auguaguugcucugccuguuuu

SEQ ID NO: 75070 - RNA, 23 nt, Homo sapiens
uuugugucccucuagaauucaug

SEQ ID NO: 75071 - RNA, 22 nt, Homo sapiens
uuuggcuuuuguaauaacugcc

SEQ ID NO: 75072 - RNA, 22 nt, Homo sapiens
uuuggcaugggcuauuugcuuu

SEQ ID NO: 75073 - RNA, 22 nt, Homo sapiens
uuucauguuuuucugugaggca

SEQ ID NO: 75074 - RNA, 22 nt, Homo sapiens
uuggaauuaagagauauuuucu

SEQ ID NO: 75075 - RNA, 22 nt, Homo sapiens
uuggccuccuggucauauccag

SEQ ID NO: 75076 - RNA, 22 nt, Homo sapiens
uuccacaauggcugaacuaguu

SEQ ID NO: 75077 - RNA, 22 nt, Homo sapiens
uuccacaaugguugaacuagcu

SEQ ID NO: 75078 - RNA, 22 nt, Homo sapiens
caagagagcugaugguuuuaaa

SEQ ID NO: 75079 - RNA, 22 nt, Homo sapiens
cagagcaaugcuuuugcuuuga

SEQ ID NO: 75080 - RNA, 22 nt, Homo sapiens
auuggcuuuauacauaagaaua

SEQ ID NO: 75081 - RNA, 21 nt, Homo sapiens
augugcacuaugucauuuaau

SEQ ID NO: 75082 - RNA, 22 nt, Homo sapiens
cccaguuuugcuucucaugagg

SEQ ID NO: 75083 - RNA, 17 nt, Homo sapiens
ccaguuuucccucagug

SEQ ID NO: 75084 - RNA, 22 nt, Homo sapiens
ccaguuuuucauuuauacuagu

SEQ ID NO: 75085 - RNA, 22 nt, Homo sapiens
cauugcaaugaggucuugcagu

SEQ ID NO: 75086 - RNA, 22 nt, Homo sapiens
gagcuguugguuugaaagaauu

SEQ ID NO: 75087 - RNA, 22 nt, Homo sapiens
gaacuguuucuggugaaagagu

SEQ ID NO: 75088 - RNA, 19 nt, Homo sapiens
cugaaacacagagagggcu

SEQ ID NO: 75089 - RNA, 18 nt, Homo sapiens
agagcuaugaacauaugc

SEQ ID NO: 75090 - RNA, 22 nt, Homo sapiens
agcacuacugcacuccagccug

SEQ ID NO: 75091 - RNA, 22 nt, Homo sapiens
agcugccagucuuguaaggccu

SEQ ID NO: 75092 - RNA, 22 nt, Homo sapiens
aauugcaucuguucuuugccag

SEQ ID NO: 75093 - RNA, 22 nt, Homo sapiens
acaaagugccuccuuuuagagu

SEQ ID NO: 75094 - RNA, 20 nt, Homo sapiens
acagcauagccuuuuaaagc

SEQ ID NO: 75095 - RNA, 22 nt, Homo sapiens
acaucccaugccuggguacucc

SEQ ID NO: 75096 - RNA, 22 nt, Homo sapiens
aguaacauuucuaguagagagu

SEQ ID NO: 75097 - RNA, 22 nt, Homo sapiens
auagugaacuuugugagaacaa

SEQ ID NO: 75098 - RNA, 22 nt, Homo sapiens
auguaguaugaagaagaugcuu

SEQ ID NO: 75099 - RNA, 21 nt, Homo sapiens
auguaaugaagaagccacugg

SEQ ID NO: 75100 - RNA, 22 nt, Homo sapiens
augaggauagguuucuauuagg

SEQ ID NO: 75101 - RNA, 22 nt, Homo sapiens
augagcaucaccagaaucaaua

SEQ ID NO: 75102 - RNA, 22 nt, Homo sapiens
augauacuggcuucauagaaug

SEQ ID NO: 75103 - RNA, 19 nt, Homo sapiens
gugugcauaucacagagca

SEQ ID NO: 75104 - RNA, 22 nt, Homo sapiens
guauuuguugcagcagcacuau

SEQ ID NO: 75105 - RNA, 22 nt, Homo sapiens
guaaagacacaugcacacguau

SEQ ID NO: 75106 - RNA, 22 nt, Homo sapiens
ggcauguaauuauucaaagugg

SEQ ID NO: 75107 - RNA, 22 nt, Homo sapiens
uagcacuauuuauugaaaagga

SEQ ID NO: 75108 - RNA, 22 nt, Homo sapiens
uacaaguaauaagggaagaauu

SEQ ID NO: 75109 - RNA, 22 nt, Homo sapiens
uacagccacauaauguaugauu

SEQ ID NO: 75110 - RNA, 22 nt, Homo sapiens
uaacacagagcuccuaaucccu

SEQ ID NO: 75111 - RNA, 22 nt, Homo sapiens
uaguaacacauugaacgaucgc

SEQ ID NO: 75112 - RNA, 22 nt, Homo sapiens
uaguaucauugaaacggcuugu

SEQ ID NO: 75113 - RNA, 22 nt, Homo sapiens
uauugucacuaaaggaagcugg

SEQ ID NO: 75114 - RNA, 18 nt, Homo sapiens
ucaagcaauugucaugcc

SEQ ID NO: 75115 - RNA, 22 nt, Homo sapiens
ucaagcaauucugcugccucag

SEQ ID NO: 75116 - RNA, 22 nt, Homo sapiens
ucaagcaauucgccugucucag

SEQ ID NO: 75117 - RNA, 22 nt, Homo sapiens
ucuuuguuuucugauccugaag

SEQ ID NO: 75118 - RNA, 22 nt, Homo sapiens
ugaaacacacauugcccuuuau

SEQ ID NO: 75119 - RNA, 22 nt, Homo sapiens
ucuuauuuggggaaaggguccu

SEQ ID NO: 75120 - RNA, 22 nt, Homo sapiens
ugagcugagaaaugcagcagcu

SEQ ID NO: 75121 - RNA, 22 nt, Homo sapiens
ugagcugagaucgugccauugu

SEQ ID NO: 75122 - RNA, 22 nt, Homo sapiens
auugcacuccagccuugugaca

SEQ ID NO: 75123 - RNA, 22 nt, Homo sapiens
cacagcacaggcaugaguguca

SEQ ID NO: 75124 - RNA, 22 nt, Homo sapiens
cagagcacugauacuggguucu

SEQ ID NO: 75125 - RNA, 22 nt, Homo sapiens
cuccauagucuucgaagaauga

SEQ ID NO: 75126 - RNA, 22 nt, Homo sapiens
cuccauguggcuaacuuuuaaa

SEQ ID NO: 75127 - RNA, 22 nt, Homo sapiens
cuacaguaugaaaccuuuacuc

SEQ ID NO: 75128 - RNA, 22 nt, Homo sapiens
gacugcauuugccccaucgaau

SEQ ID NO: 75129 - RNA, 22 nt, Homo sapiens
gcugagcuaugccauauaugcc

SEQ ID NO: 75130 - RNA, 21 nt, Homo sapiens
gcuuuuucggaagucuuuggc

SEQ ID NO: 75131 - RNA, 22 nt, Homo sapiens
guaguaccauuaggauauuucu

SEQ ID NO: 75132 - RNA, 22 nt, Homo sapiens
gucacagcacuuuuaguaagug

SEQ ID NO: 75133 - RNA, 22 nt, Homo sapiens
guguucaaagcugauugagauu

SEQ ID NO: 75134 - RNA, 22 nt, Homo sapiens
uaaauggauaaaugaauaccua

SEQ ID NO: 75135 - RNA, 22 nt, Homo sapiens
uaacaagagagucagucagucc

SEQ ID NO: 75136 - RNA, 22 nt, Homo sapiens
uaacacccuucuccagguacau

SEQ ID NO: 75137 - RNA, 22 nt, Homo sapiens
gugugcaugucuuuuuaguagg

SEQ ID NO: 75138 - RNA, 22 nt, Homo sapiens
ucaagcaauucuccucucagcc

SEQ ID NO: 75139 - RNA, 22 nt, Homo sapiens
ucaaaugcucuuugcagagagg

SEQ ID NO: 75140 - RNA, 22 nt, Homo sapiens
ucaaaugcacguagagaaaaua

SEQ ID NO: 75141 - RNA, 22 nt, Homo sapiens
uauugccucagugacuuugggg

SEQ ID NO: 75142 - RNA, 22 nt, Homo sapiens
uaguaucacauggucuuaauua

SEQ ID NO: 75143 - RNA, 22 nt, Homo sapiens
uagucacacacucaacuuuuca

SEQ ID NO: 75144 - RNA, 22 nt, Homo sapiens
uauaugucuucuuguaauuggc

SEQ ID NO: 75145 - RNA, 22 nt, Homo sapiens
uagcuguuggugggaagucaga

SEQ ID NO: 75146 - RNA, 22 nt, Homo sapiens
uacuuuguagagugugagaauu

SEQ ID NO: 75147 - RNA, 22 nt, Homo sapiens
ugacaagcucccucugcaccuu

SEQ ID NO: 75148 - RNA, 18 nt, Homo sapiens
ugaaacacauuuuuuccu

SEQ ID NO: 75149 - RNA, 22 nt, Homo sapiens
ucuaguaaugagaggcaggaga

SEQ ID NO: 75150 - RNA, 22 nt, Homo sapiens
ugcauuguuccgaauguguccu

SEQ ID NO: 75151 - RNA, 22 nt, Homo sapiens
ugaguucuuuguagauucugug

SEQ ID NO: 75152 - RNA, 22 nt, Homo sapiens
ugaguucuuuuacauuuugaau

SEQ ID NO: 75153 - RNA, 22 nt, Homo sapiens
ugcaaauguuaguaacaccacu

SEQ ID NO: 75154 - RNA, 22 nt, Homo sapiens
ugucccaguuggguauugaauu

SEQ ID NO: 75155 - RNA, 22 nt, Homo sapiens
uuuacaguuuucuaggcuacca

SEQ ID NO: 75156 - RNA, 22 nt, Homo sapiens
uuguccauggacagcaccacag

SEQ ID NO: 75157 - RNA, 22 nt, Homo sapiens
uugugauugagugauccuuguu

SEQ ID NO: 75158 - RNA, 22 nt, Homo sapiens
uuggauuauaaacugagauuug

SEQ ID NO: 75159 - RNA, 22 nt, Homo sapiens
uuggauugugaaaguauucucu

SEQ ID NO: 75160 - RNA, 22 nt, Homo sapiens
uugguaaucccuagugucuaga

SEQ ID NO: 75161 - RNA, 22 nt, Homo sapiens
uuguaauggagcaaacagguug

SEQ ID NO: 75162 - RNA, 22 nt, Homo sapiens
aagaugauguucuuuuucuuag

SEQ ID NO: 75163 - RNA, 22 nt, Homo sapiens
uuuuggcucugucuguaucuuu

SEQ ID NO: 75164 - RNA, 22 nt, Homo sapiens
uuuuggcuuuuccucagcaagc

SEQ ID NO: 75165 - RNA, 22 nt, Homo sapiens
uuuguaauaccugaggcugggu

SEQ ID NO: 75166 - RNA, 22 nt, Homo sapiens
uugaaagucuaggcuuacagua

SEQ ID NO: 75167 - RNA, 22 nt, Homo sapiens
uuccacaaugguugaacuaguu

SEQ ID NO: 75168 - RNA, 22 nt, Homo sapiens
uugagcacauguguuaaggggu

SEQ ID NO: 75169 - RNA, 22 nt, Homo sapiens
uugagacggagucuugcucuuu

SEQ ID NO: 75170 - RNA, 22 nt, Homo sapiens
uugaccaaagaagagucauugc

SEQ ID NO: 75171 - RNA, 22 nt, Homo sapiens
uuagcaauugauucucauaagc

SEQ ID NO: 75172 - RNA, 22 nt, Homo sapiens
ugugaauggugcugcaaugaac

SEQ ID NO: 75173 - RNA, 22 nt, Homo sapiens
aaaugcagucuuuguucugggc

SEQ ID NO: 75174 - RNA, 22 nt, Homo sapiens
agauggugugcuaggaaaugua

SEQ ID NO: 75175 - RNA, 22 nt, Homo sapiens
agagcacugcugcaggguucug

SEQ ID NO: 75176 - RNA, 22 nt, Homo sapiens
agaaacacagguggaauugcuu

SEQ ID NO: 75177 - RNA, 22 nt, Homo sapiens
agcuccaucuucagggguucag

SEQ ID NO: 75178 - RNA, 22 nt, Homo sapiens
agugcauuugcaucucaauaua

SEQ ID NO: 75179 - RNA, 22 nt, Homo sapiens
augaccaaugggcagagcuaga

SEQ ID NO: 75180 - RNA, 22 nt, Homo sapiens
augagcacuuguuuugggcaca

SEQ ID NO: 75181 - RNA, 22 nt, Homo sapiens
augguuuauuuguaagcagagu

SEQ ID NO: 75182 - RNA, 22 nt, Homo sapiens
auucaacuaauuauugaagaug

SEQ ID NO: 75183 - RNA, 22 nt, Homo sapiens
auugcaaagcguagacucuaaa

SEQ ID NO: 75184 - RNA, 22 nt, Homo sapiens
auugagcaauuccuaugugcuu

SEQ ID NO: 75185 - RNA, 22 nt, Homo sapiens
auugagcacugacucugugcca

SEQ ID NO: 75186 - RNA, 22 nt, Homo sapiens
uucacaugguugccuuuugauc

SEQ ID NO: 75187 - RNA, 22 nt, Homo sapiens
uuagaacagugcucaccacaaa

SEQ ID NO: 75188 - RNA, 22 nt, Homo sapiens
ugucucagugauuggcuuucug

SEQ ID NO: 75189 - RNA, 22 nt, Homo sapiens
uuggucucuuaaucacacuuuu

SEQ ID NO: 75190 - RNA, 22 nt, Homo sapiens
uugcuucauucaacauugaggg

SEQ ID NO: 75191 - RNA, 22 nt, Homo sapiens
uuucugugguccucuugaaggu

SEQ ID NO: 75192 - RNA, 22 nt, Homo sapiens
uugucuugcagcuuaggcauca

SEQ ID NO: 75193 - RNA, 22 nt, Homo sapiens
uuguggcuuaucucauuuagcg

SEQ ID NO: 75194 - RNA, 22 nt, Homo sapiens
uugaaauguuuagaaguuugga

SEQ ID NO: 75195 - RNA, 22 nt, Homo sapiens
uugaaauguguaagcuccgaaa

SEQ ID NO: 75196 - RNA, 22 nt, Homo sapiens
uugacaaguuguccaguaugag

SEQ ID NO: 75197 - RNA, 22 nt, Homo sapiens
uugaaagacaucaccuacugcu

SEQ ID NO: 75198 - RNA, 22 nt, Homo sapiens
cuucacuggagucccuggauuc

SEQ ID NO: 75199 - RNA, 22 nt, Homo sapiens
cuguucaaauuguuugugaagu

SEQ ID NO: 75200 - RNA, 22 nt, Homo sapiens
gagaacagaagcauuccuaauu

SEQ ID NO: 75201 - RNA, 22 nt, Homo sapiens
caucacuuuuccuuuuacagau

SEQ ID NO: 75202 - RNA, 22 nt, Homo sapiens
auuccauuuguuaucacacccg

SEQ ID NO: 75203 - RNA, 23 nt, Homo sapiens
auugaacacuuucauaugugagg

SEQ ID NO: 75204 - RNA, 22 nt, Homo sapiens
auugcacuggggguuagaauuu

SEQ ID NO: 75205 - RNA, 22 nt, Homo sapiens
auuguuccccggucauuuuugu

SEQ ID NO: 75206 - RNA, 22 nt, Homo sapiens
caaauacuuucauguugucuug

SEQ ID NO: 75207 - RNA, 17 nt, Homo sapiens
agucaguaguuuguauu

SEQ ID NO: 75208 - RNA, 22 nt, Homo sapiens
agugaacaaagaagugcagaua

SEQ ID NO: 75209 - RNA, 22 nt, Homo sapiens
auagcccuuuucuaacuaugug

SEQ ID NO: 75210 - RNA, 22 nt, Homo sapiens
auaagaguaguacauaugagac

SEQ ID NO: 75211 - RNA, 22 nt, Homo sapiens
augcacaucagcuccagggacc

SEQ ID NO: 75212 - RNA, 21 nt, Homo sapiens
aucucacuugaauguaaaagc

SEQ ID NO: 75213 - RNA, 22 nt, Homo sapiens
accaugcaguccaauaugcaca

SEQ ID NO: 75214 - RNA, 23 nt, Homo sapiens
agcaaaugcucuagcacuccaac

SEQ ID NO: 75215 - RNA, 19 nt, Homo sapiens
agaguauuguuacuucucu

SEQ ID NO: 75216 - RNA, 22 nt, Homo sapiens
acagucauagcagccuuuguua

SEQ ID NO: 75217 - RNA, 20 nt, Homo sapiens
aauggcauguuggacaacug

SEQ ID NO: 75218 - RNA, 22 nt, Homo sapiens
ugaaaugccuuuaaugaauuua

SEQ ID NO: 75219 - RNA, 22 nt, Homo sapiens
ucacagccuaguuuuauacauu

SEQ ID NO: 75220 - RNA, 22 nt, Homo sapiens
uauugcacuccucaugcauuug

SEQ ID NO: 75221 - RNA, 22 nt, Homo sapiens
ugagucagucucacucugcugc

SEQ ID NO: 75222 - RNA, 22 nt, Homo sapiens
ugauauguuagaaucuugcaag

SEQ ID NO: 75223 - RNA, 18 nt, Homo sapiens
uaggaacauugauuggag

SEQ ID NO: 75224 - RNA, 22 nt, Homo sapiens
uacagucacauuccugaccaua

SEQ ID NO: 75225 - RNA, 22 nt, Homo sapiens
uaccaucauuauacguagaaau

SEQ ID NO: 75226 - RNA, 22 nt, Homo sapiens
guacacaacaugcagguuuguu

SEQ ID NO: 75227 - RNA, 22 nt, Homo sapiens
aagaugauguuguguuuucacu

SEQ ID NO: 75228 - RNA, 22 nt, Homo sapiens
aacagucaauugcugaugaccu

SEQ ID NO: 75229 - RNA, 22 nt, Homo sapiens
aaauugcaguuaggaugauggu

SEQ ID NO: 75230 - RNA, 22 nt, Homo sapiens
agcugguucuuugccuuguaga

SEQ ID NO: 75231 - RNA, 22 nt, Homo sapiens
agcugguuuauuucuauauccu

SEQ ID NO: 75232 - RNA, 22 nt, Homo sapiens
acaaagcgcuucucuuuagagu

SEQ ID NO: 75233 - RNA, 19 nt, Homo sapiens
augccucaguuuuguacuu

SEQ ID NO: 75234 - RNA, 22 nt, Homo sapiens
augccucugacaauuggauucu

SEQ ID NO: 75235 - RNA, 22 nt, Homo sapiens
augaggaaggagccuuugucug

SEQ ID NO: 75236 - RNA, 22 nt, Homo sapiens
augugcacaugcuuacauguga

SEQ ID NO: 75237 - RNA, 22 nt, Homo sapiens
augugcaugcuguucugccaga

SEQ ID NO: 75238 - RNA, 22 nt, Homo sapiens
agucacagugaccuugucugac

SEQ ID NO: 75239 - RNA, 22 nt, Homo sapiens
aucaaaugcuggcagagugccu

SEQ ID NO: 75240 - RNA, 22 nt, Homo sapiens
uauagcuaugggauguauuugc

SEQ ID NO: 75241 - RNA, 22 nt, Homo sapiens
uaguaaacagcucugccacaau

SEQ ID NO: 75242 - RNA, 22 nt, Homo sapiens
uauggauuuuggaauauguggg

SEQ ID NO: 75243 - RNA, 22 nt, Homo sapiens
uauugauuaauugugauuaggc

SEQ ID NO: 75244 - RNA, 22 nt, Homo sapiens
uauuccacuggcacugcauuug

SEQ ID NO: 75245 - RNA, 22 nt, Homo sapiens
gucauugucaauugacaauugu

SEQ ID NO: 75246 - RNA, 22 nt, Homo sapiens
gugagcacugaaagaaggcaag

SEQ ID NO: 75247 - RNA, 22 nt, Homo sapiens
gugcacaaaucuuaaauguaca

SEQ ID NO: 75248 - RNA, 22 nt, Homo sapiens
guacaguaguaaaagugaauga

SEQ ID NO: 75249 - RNA, 22 nt, Homo sapiens
gucaucaggacgggucaucugc

SEQ ID NO: 75250 - RNA, 22 nt, Homo sapiens
cccauuguuaaguugaguaucu

SEQ ID NO: 75251 - RNA, 22 nt, Homo sapiens
cugacaagauucaucacucagu

SEQ ID NO: 75252 - RNA, 22 nt, Homo sapiens
auuugucaauacacuucuucca

SEQ ID NO: 75253 - RNA, 22 nt, Homo sapiens
caacagucagcccauccacaga

SEQ ID NO: 75254 - RNA, 18 nt, Homo sapiens
cuuugguccccgcacccu

SEQ ID NO: 75255 - RNA, 22 nt, Homo sapiens
cuucaaguaauucugauggcua

SEQ ID NO: 75256 - RNA, 22 nt, Homo sapiens
gaguaacagcauaaauuuguga

SEQ ID NO: 75257 - RNA, 22 nt, Homo sapiens
gccauagucauagauggcaggg

SEQ ID NO: 75258 - RNA, 22 nt, Homo sapiens
gcagucacagggagauggugac

SEQ ID NO: 75259 - RNA, 22 nt, Homo sapiens
uuaucucaguguuuguaaacaa

SEQ ID NO: 75260 - RNA, 22 nt, Homo sapiens
uuacaguauugcaaggacuagg

SEQ ID NO: 75261 - RNA, 22 nt, Homo sapiens
uuauuugguugcugacuuggaa

SEQ ID NO: 75262 - RNA, 20 nt, Homo sapiens
uuaaaucuagugcagacuca

SEQ ID NO: 75263 - RNA, 22 nt, Homo sapiens
uguuaucauuacguucuuaguu

SEQ ID NO: 75264 - RNA, 22 nt, Homo sapiens
ugugucuccugaaaauucacau

SEQ ID NO: 75265 - RNA, 22 nt, Homo sapiens
uguaauggcagacuccggugga

SEQ ID NO: 75266 - RNA, 20 nt, Homo sapiens
uguaacaaucuggauguugc

SEQ ID NO: 75267 - RNA, 22 nt, Homo sapiens
uguggcucuucuguucuccacu

SEQ ID NO: 75268 - RNA, 22 nt, Homo sapiens
uuggucaggcuaaucucgaacg

SEQ ID NO: 75269 - RNA, 22 nt, Homo sapiens
uugguccauuacauugaugaca

SEQ ID NO: 75270 - RNA, 22 nt, Homo sapiens
uuucaguagagacacgguuuug

SEQ ID NO: 75271 - RNA, 22 nt, Homo sapiens
uuugugcaugaagagggggugc

SEQ ID NO: 75272 - RNA, 22 nt, Homo sapiens
uuugugcaaacuaggauugcga

SEQ ID NO: 75273 - RNA, 22 nt, Homo sapiens
uccuucaugcaucaauguaucc

SEQ ID NO: 75274 - RNA, 22 nt, Homo sapiens
ucauuguccaacuucuuucagu

SEQ ID NO: 75275 - RNA, 22 nt, Homo sapiens
ucauucauuugcucacuccaca

SEQ ID NO: 75276 - RNA, 22 nt, Homo sapiens
uauuugguuacuugaauagcua

SEQ ID NO: 75277 - RNA, 21 nt, Homo sapiens
ucucauugugguuuuaauugg

SEQ ID NO: 75278 - RNA, 22 nt, Homo sapiens
ucuuuggaggcgaucuguuuga

SEQ ID NO: 75279 - RNA, 22 nt, Homo sapiens
aacagacugucacauaaaauug

SEQ ID NO: 75280 - RNA, 23 nt, Homo sapiens
ugggucaguuuuucugacaucau

SEQ ID NO: 75281 - RNA, 22 nt, Homo sapiens
uggauugcaaaaucuuuuugag

SEQ ID NO: 75282 - RNA, 22 nt, Homo sapiens
ugccauagagauuuguggaacu

SEQ ID NO: 75283 - RNA, 22 nt, Homo sapiens
ugcauaugucuuuauaguagca

SEQ ID NO: 75284 - RNA, 22 nt, Homo sapiens
ugagcauuguguuugacuguga

SEQ ID NO: 75285 - RNA, 22 nt, Homo sapiens
augaauacugcugcaaugaaca

SEQ ID NO: 75286 - RNA, 22 nt, Homo sapiens
gucauggacaaggugugagcca

SEQ ID NO: 75287 - RNA, 22 nt, Homo sapiens
ggcaagaaccagggauuugcgu

SEQ ID NO: 75288 - RNA, 22 nt, Homo sapiens
uaaagcacaaguaaagaauacu

SEQ ID NO: 75289 - RNA, 22 nt, Homo sapiens
agcuauauugaggaugccauuc

SEQ ID NO: 75290 - RNA, 22 nt, Homo sapiens
uaacauagucauauacuugcuu

SEQ ID NO: 75291 - RNA, 22 nt, Homo sapiens
agugcaauaaggauguagaacu

SEQ ID NO: 75292 - RNA, 22 nt, Homo sapiens
uuuguacucccuuuagauaaaa

SEQ ID NO: 75293 - RNA, 22 nt, Homo sapiens
ugucauguugguguacugcacc

SEQ ID NO: 75294 - RNA, 21 nt, Homo sapiens
ucacaaugaacagcagcagaa

SEQ ID NO: 75295 - RNA, 22 nt, Homo sapiens
auuggcagaaaucuuuauagua

SEQ ID NO: 75296 - RNA, 21 nt, Homo sapiens
aucagagacccaggcuuccuc

SEQ ID NO: 75297 - RNA, 22 nt, Homo sapiens
aucacagaacuuugagcagaga

SEQ ID NO: 75298 - RNA, 22 nt, Homo sapiens
aacacuguuuccagucaugauc

SEQ ID NO: 75299 - RNA, 22 nt, Homo sapiens
uggggcaaugaacauuuuugca

SEQ ID NO: 75300 - RNA, 22 nt, Homo sapiens
ugaaauguugggugauggaauc

SEQ ID NO: 75301 - RNA, 22 nt, Homo sapiens
cauuugcacugagacucagcuu

SEQ ID NO: 75302 - RNA, 21 nt, Homo sapiens
gucacuggggcuggauaauuc

SEQ ID NO: 75303 - RNA, 22 nt, Homo sapiens
cugugguuacguucuuugugcu

SEQ ID NO: 75304 - RNA, 23 nt, Homo sapiens
ugacaagagcgagacuuggucuc

SEQ ID NO: 75305 - RNA, 22 nt, Homo sapiens
gacacugucuucugcucuuaaa

SEQ ID NO: 75306 - RNA, 22 nt, Homo sapiens
ugaagugaagacucacagaagg

SEQ ID NO: 75307 - RNA, 22 nt, Homo sapiens
uuacaucaucacauuaguuugc

SEQ ID NO: 75308 - RNA, 20 nt, Homo sapiens
ucacuggagcucauuugauu

SEQ ID NO: 75309 - RNA, 22 nt, Homo sapiens
uauugaacgugggauauugaag

SEQ ID NO: 75310 - RNA, 22 nt, Homo sapiens
ggaagacaguguggugauuccu

SEQ ID NO: 75311 - RNA, 19 nt, Homo sapiens
acugcacuccaaccuccug

SEQ ID NO: 75312 - RNA, 22 nt, Homo sapiens
agugaacaaagaagugcagaua

SEQ ID NO: 75313 - RNA, 23 nt, Homo sapiens
ugucaucaagaugaggucacacu

SEQ ID NO: 75314 - RNA, 22 nt, Homo sapiens
gucaauguaucuagcuguauua

SEQ ID NO: 75315 - RNA, 22 nt, Homo sapiens
uacuagaguagugcagagggga

SEQ ID NO: 75316 - RNA, 22 nt, Homo sapiens
ugcuauguuuucccuccuuauc

SEQ ID NO: 75317 - RNA, 18 nt, Homo sapiens
cuuaacauugggaugaua

SEQ ID NO: 75318 - RNA, 22 nt, Homo sapiens
agggaagugugcuaugcauuua

SEQ ID NO: 75319 - RNA, 22 nt, Homo sapiens
ucucaguguuaucuaucugccu

SEQ ID NO: 75320 - RNA, 22 nt, Homo sapiens
gugaagugugaccucagcaucu

SEQ ID NO: 75321 - RNA, 22 nt, Homo sapiens
uagcagcaccccacucuacugg

SEQ ID NO: 75322 - RNA, 22 nt, Homo sapiens
acugcacuccagccucccgucu

SEQ ID NO: 75323 - RNA, 22 nt, Homo sapiens
gucuugaaggcugaguaccugu

SEQ ID NO: 75324 - RNA, 22 nt, Homo sapiens
gggaagugugguuucuuuacag

SEQ ID NO: 75325 - RNA, 22 nt, Homo sapiens
ugaaaugauuauaugguguuug

SEQ ID NO: 75326 - RNA, 22 nt, Homo sapiens
ugaauguccugacgcugcaguu

SEQ ID NO: 75327 - RNA, 22 nt, Homo sapiens
aauggcacacaccuggucuaac

SEQ ID NO: 75328 - RNA, 22 nt, Homo sapiens
cugugcauguaugcgugaguuc

SEQ ID NO: 75329 - RNA, 22 nt, Homo sapiens
uguaguuugaaagcucccucug

SEQ ID NO: 75330 - RNA, 22 nt, Homo sapiens
guuaggcagugugguauagcag

SEQ ID NO: 75331 - RNA, 23 nt, Homo sapiens
auuccaguggcaauuggagaaac

SEQ ID NO: 75332 - RNA, 22 nt, Homo sapiens
caucacaguacuaaucgucaua

SEQ ID NO: 75333 - RNA, 22 nt, Homo sapiens
agcagcauuaugauauaucuua

SEQ ID NO: 75334 - RNA, 20 nt, Homo sapiens
augcaaacccugcuuugugg

SEQ ID NO: 75335 - RNA, 22 nt, Homo sapiens
cugcaagaugcauaggaauuuu

SEQ ID NO: 75336 - RNA, 22 nt, Homo sapiens
uuagaacaguguuugccucgcu

SEQ ID NO: 75337 - RNA, 22 nt, Homo sapiens
ugccaaggagucagucccuaga

SEQ ID NO: 75338 - RNA, 22 nt, Homo sapiens
cugugcauggauuuuaagauug

SEQ ID NO: 75339 - RNA, 22 nt, Homo sapiens
auuguacuccagccuuggggac

SEQ ID NO: 75340 - RNA, 22 nt, Homo sapiens
ucugacaaugaacaaucuauag

SEQ ID NO: 75341 - RNA, 22 nt, Homo sapiens
caugugcaugcuuucuuaugug

SEQ ID NO: 75342 - RNA, 22 nt, Homo sapiens
uuggcagcacgcaguccagagg

SEQ ID NO: 75343 - RNA, 22 nt, Homo sapiens
auugcacuccagccuuggggau

SEQ ID NO: 75344 - RNA, 22 nt, Homo sapiens
ucugccacugucauugugugau

SEQ ID NO: 75345 - RNA, 22 nt, Homo sapiens
cucaguggauuagauaaugcac

SEQ ID NO: 75346 - RNA, 21 nt, Homo sapiens
aaucacaguuguucugccuuc

SEQ ID NO: 75347 - RNA, 22 nt, Homo sapiens
gucagcaucaccaugucuauga

SEQ ID NO: 75348 - RNA, 22 nt, Homo sapiens
guucaguuuuaaagggaaauug

SEQ ID NO: 75349 - RNA, 22 nt, Homo sapiens
augacugucagggcagucauug

SEQ ID NO: 75350 - RNA, 22 nt, Homo sapiens
ugucccaguuggguauugaauu

SEQ ID NO: 75351 - RNA, 20 nt, Homo sapiens
acacugugcuaaggauuuuc

SEQ ID NO: 75352 - RNA, 23 nt, Homo sapiens
cuuuguccccacccaaaucucau

SEQ ID NO: 75353 - RNA, 18 nt, Homo sapiens
aaacagugucucuuucug

SEQ ID NO: 75354 - RNA, 22 nt, Homo sapiens
ucacagaugaggcgagaggcag

SEQ ID NO: 75355 - RNA, 22 nt, Homo sapiens
ugucaaugggaauuuguuuuag

SEQ ID NO: 75356 - RNA, 22 nt, Homo sapiens
ucccaguggucuugaaacaggg

SEQ ID NO: 75357 - RNA, 22 nt, Homo sapiens
aauguguuuugaaaucaggaag

SEQ ID NO: 75358 - RNA, 22 nt, Homo sapiens
uggucaccuucuugcucugucu

SEQ ID NO: 75359 - RNA, 22 nt, Homo sapiens
ggacagugaaugccacuccucc

SEQ ID NO: 75360 - RNA, 22 nt, Homo sapiens
uuaauguaucuaucacaucaca

SEQ ID NO: 75361 - RNA, 21 nt, Homo sapiens
uggaauguucugacuucaggg

SEQ ID NO: 75362 - RNA, 22 nt, Homo sapiens
gcagugugauguuuuaaucuau

SEQ ID NO: 75363 - RNA, 22 nt, Homo sapiens
uccaguuuuguuaacauauggu

SEQ ID NO: 75364 - RNA, 22 nt, Homo sapiens
uaccagugucagcuuccugugu

SEQ ID NO: 75365 - RNA, 22 nt, Homo sapiens
uuuaauguuacaguauugguau

SEQ ID NO: 75366 - RNA, 22 nt, Homo sapiens
ugggaaugaaauuacauagcuu

SEQ ID NO: 75367 - RNA, 22 nt, Homo sapiens
ucacuguggaacucaaaaagcu

SEQ ID NO: 75368 - RNA, 22 nt, Homo sapiens
augacauugaaaagcaagugga

SEQ ID NO: 75369 - RNA, 22 nt, Homo sapiens
aucucaguuaauuccaucuuuc

SEQ ID NO: 75370 - RNA, 18 nt, Homo sapiens
acaguguguaaggguucu

SEQ ID NO: 75371 - RNA, 22 nt, Homo sapiens
gagaacauacggcauuugguuu

SEQ ID NO: 75372 - RNA, 22 nt, Homo sapiens
auuguguagucuuacugcuugc

SEQ ID NO: 75373 - RNA, 22 nt, Homo sapiens
uacauccauccugcugggcagu

SEQ ID NO: 75374 - RNA, 19 nt, Homo sapiens
uuuuccccuuucuuaagac

SEQ ID NO: 75375 - RNA, 22 nt, Homo sapiens
agucaaaugcuuauguauaaag

SEQ ID NO: 75376 - RNA, 22 nt, Homo sapiens
uuggcagcuguggaaucugggc

SEQ ID NO: 75377 - RNA, 23 nt, Homo sapiens
ugcaccacuacacacucuugggu

SEQ ID NO: 75378 - RNA, 22 nt, Homo sapiens
gugacauuauuucagcuacaug

SEQ ID NO: 75379 - RNA, 22 nt, Homo sapiens
ugcuagaagaucacacacauca

SEQ ID NO: 75380 - RNA, 22 nt, Homo sapiens
augagauauuuuauaagaucau

SEQ ID NO: 75381 - RNA, 22 nt, Homo sapiens
cccagugaagagaaccuuacga

SEQ ID NO: 75382 - RNA, 22 nt, Homo sapiens
cuuugcaaauggccuuuccaag

SEQ ID NO: 75383 - RNA, 22 nt, Homo sapiens
ugagguaugugaugucuuuuag

SEQ ID NO: 75384 - RNA, 22 nt, Homo sapiens
acugcacugucaaccuccuggg

SEQ ID NO: 75385 - RNA, 22 nt, Homo sapiens
acauaaagaagcaggacauugu

SEQ ID NO: 75386 - RNA, 20 nt, Homo sapiens
agcauugguuagaacaguag

SEQ ID NO: 75387 - RNA, 22 nt, Homo sapiens
ugauguguuuuguaguucaacu

SEQ ID NO: 75388 - RNA, 22 nt, Homo sapiens
aucacugggagcagccauuaau

SEQ ID NO: 75389 - RNA, 22 nt, Homo sapiens
cucaaagugcuaagauuaggcu

SEQ ID NO: 75390 - RNA, 22 nt, Homo sapiens
aauacagcacacagaugggucu

SEQ ID NO: 75391 - RNA, 22 nt, Homo sapiens
ugggaagauucuguguuuuucc

SEQ ID NO: 75392 - RNA, 22 nt, Homo sapiens
auaaaugcaaugguauuuuuga

SEQ ID NO: 75393 - RNA, 22 nt, Homo sapiens
gagacggagucuugcucuguug

SEQ ID NO: 75394 - RNA, 22 nt, Homo sapiens
gagacggagucucgcucugucg

SEQ ID NO: 75395 - RNA, 19 nt, Homo sapiens
uuacauccauugcauuuca

SEQ ID NO: 75396 - RNA, 22 nt, Homo sapiens
gcaaaguaauuguuguuuuugc

SEQ ID NO: 75397 - RNA, 22 nt, Homo sapiens
gugacauuuuuacugaugagag

SEQ ID NO: 75398 - RNA, 22 nt, Homo sapiens
uggccaagagcacagauauugg

SEQ ID NO: 75399 - RNA, 22 nt, Homo sapiens
gugcuauguuauccagcaagau

SEQ ID NO: 75400 - RNA, 22 nt, Homo sapiens
aagcugugucuugucagcuacc

SEQ ID NO: 75401 - RNA, 22 nt, Homo sapiens
uagcagcagugguguauuuaga

SEQ ID NO: 75402 - RNA, 22 nt, Homo sapiens
ugaaauacuuuggcucuuuguu

SEQ ID NO: 75403 - RNA, 22 nt, Homo sapiens
ucagaccauuucauuacagacu

SEQ ID NO: 75404 - RNA, 22 nt, Homo sapiens
auaaauaguaguugugguggcc

SEQ ID NO: 75405 - RNA, 22 nt, Homo sapiens
acugcacuccagccuccugggu

SEQ ID NO: 75406 - RNA, 19 nt, Homo sapiens
caccagugcaugcuacuau

SEQ ID NO: 75407 - RNA, 22 nt, Homo sapiens
uaguagcaccucucaugagcuu

SEQ ID NO: 75408 - RNA, 22 nt, Homo sapiens
auggagacaaauaaaggagagu

SEQ ID NO: 75409 - RNA, 21 nt, Homo sapiens
uaucagagacauugagaggca

SEQ ID NO: 75410 - RNA, 20 nt, Homo sapiens
acugcacuccaggcugccca

SEQ ID NO: 75411 - RNA, 20 nt, Homo sapiens
cuucacagaaguggaaucau

SEQ ID NO: 75412 - RNA, 20 nt, Homo sapiens
acccucuaggaugauuucuu

SEQ ID NO: 75413 - RNA, 17 nt, Homo sapiens
ugaggcacuaguaucac

SEQ ID NO: 75414 - RNA, 22 nt, Homo sapiens
ccacaguugaaauuuugacugu

SEQ ID NO: 75415 - RNA, 22 nt, Homo sapiens
agcaccacaauuuccugccuaa

SEQ ID NO: 75416 - RNA, 22 nt, Homo sapiens
aaucacaggucuuggcugcaug

SEQ ID NO: 75417 - RNA, 22 nt, Homo sapiens
gaaugaauguuuauccuuagau

SEQ ID NO: 75418 - RNA, 22 nt, Homo sapiens
aagcuggauuuaguguggagca

SEQ ID NO: 75419 - RNA, 22 nt, Homo sapiens
agagaugaagauggggcucccg

SEQ ID NO: 75420 - RNA, 22 nt, Homo sapiens
agcuaugucugaugccugauua

SEQ ID NO: 75421 - RNA, 18 nt, Homo sapiens
uguaaacuaccucaaccu

SEQ ID NO: 75422 - RNA, 22 nt, Homo sapiens
gaaucauuguuucuaaguuugu

SEQ ID NO: 75423 - RNA, 22 nt, Homo sapiens
cuuuacaguuggacucacgagg

SEQ ID NO: 75424 - RNA, 22 nt, Homo sapiens
uuccuugagucuuuuuccugag

SEQ ID NO: 75425 - RNA, 22 nt, Homo sapiens
auauuggccuaaaauucucuuu

SEQ ID NO: 75426 - RNA, 22 nt, Homo sapiens
uggucaccugaauuaugcaugu

SEQ ID NO: 75427 - RNA, 22 nt, Homo sapiens
auuacuuugcaccaaccuaaua

SEQ ID NO: 75428 - RNA, 22 nt, Homo sapiens
uucaagucaacaagcacuugag

SEQ ID NO: 75429 - RNA, 22 nt, Homo sapiens
gcaagaauggaacaggagagcc

SEQ ID NO: 75430 - RNA, 22 nt, Homo sapiens
cugugaagaaagucauugguag

SEQ ID NO: 75431 - RNA, 22 nt, Homo sapiens
uggaaguaaucaugagguagca

SEQ ID NO: 75432 - RNA, 22 nt, Homo sapiens
uugagggaggccucaguuuaca

SEQ ID NO: 75433 - RNA, 22 nt, Homo sapiens
gugaacaagcaaaggcaggagg

SEQ ID NO: 75434 - RNA, 22 nt, Homo sapiens
ugagcacauuuacaucaguucc

SEQ ID NO: 75435 - RNA, 22 nt, Homo sapiens
uggaaugucagcuacaagaggg

SEQ ID NO: 75436 - RNA, 22 nt, Homo sapiens
uucagcaaugacagccuauaua

SEQ ID NO: 75437 - RNA, 22 nt, Homo sapiens
acugcacuccagccuccugaca

SEQ ID NO: 75438 - RNA, 22 nt, Homo sapiens
ugugaacauuuuguauauauua

SEQ ID NO: 75439 - RNA, 22 nt, Homo sapiens
ugugaugguuuagcauuuucuu

SEQ ID NO: 75440 - RNA, 22 nt, Homo sapiens
gggaagaaggagugguuuacuc

SEQ ID NO: 75441 - RNA, 22 nt, Homo sapiens
cacaguguuccagcuauuugaa

SEQ ID NO: 75442 - RNA, 22 nt, Homo sapiens
agcuuuggauaccugcuguucc

SEQ ID NO: 75443 - RNA, 22 nt, Homo sapiens
gagcugaauugcugccauuugc

SEQ ID NO: 75444 - RNA, 20 nt, Homo sapiens
acugcacuccagccuuccag

SEQ ID NO: 75445 - RNA, 22 nt, Homo sapiens
ugucaggagcaaugauaaauuu

SEQ ID NO: 75446 - RNA, 22 nt, Homo sapiens
ucauguguugcacugaggaccu

SEQ ID NO: 75447 - RNA, 22 nt, Homo sapiens
ugaaauguuaaacaaguggcuc

SEQ ID NO: 75448 - RNA, 22 nt, Homo sapiens
caggugcauuggcugacaccug

SEQ ID NO: 75449 - RNA, 22 nt, Homo sapiens
agcagcaauuuuguaugguuua

SEQ ID NO: 75450 - RNA, 22 nt, Homo sapiens
cacagugaaugucaucauugcc

SEQ ID NO: 75451 - RNA, 22 nt, Homo sapiens
augaacagagccuugagaaccu

SEQ ID NO: 75452 - RNA, 22 nt, Homo sapiens
uuagguuguuucuggucuuagg

SEQ ID NO: 75453 - RNA, 22 nt, Homo sapiens
uacagcuaugugcaugcaugcu

SEQ ID NO: 75454 - RNA, 18 nt, Homo sapiens
cagugcaauacaggagag

SEQ ID NO: 75455 - RNA, 22 nt, Homo sapiens
uuagucaaguguacugugaaug

SEQ ID NO: 75456 - RNA, 22 nt, Homo sapiens
ggcagcauugccuuugcaguga

SEQ ID NO: 75457 - RNA, 22 nt, Homo sapiens
cuacaguucuuaauuaaguagu

SEQ ID NO: 75458 - RNA, 22 nt, Homo sapiens
aauacuuccaaaucuagucauu

SEQ ID NO: 75459 - RNA, 22 nt, Homo sapiens
aagcaucacauaauggaucaug

SEQ ID NO: 75460 - RNA, 22 nt, Homo sapiens
acacagucaaauccacuuggcu

SEQ ID NO: 75461 - RNA, 21 nt, Homo sapiens
ugcucaugaguaaugcaguga

SEQ ID NO: 75462 - RNA, 23 nt, Homo sapiens
agagugcaauggugccaucucgg

SEQ ID NO: 75463 - RNA, 22 nt, Homo sapiens
cucugagguuauucguaauauu

SEQ ID NO: 75464 - RNA, 22 nt, Homo sapiens
gcaagaaugagaaggauuaauu

SEQ ID NO: 75465 - RNA, 22 nt, Homo sapiens
uucuggccccucccaaucucau

SEQ ID NO: 75466 - RNA, 22 nt, Homo sapiens
agaaugucaguauuggcuaaaa

SEQ ID NO: 75467 - RNA, 22 nt, Homo sapiens
ugucaguuuuaacuagggaaua

SEQ ID NO: 75468 - RNA, 22 nt, Homo sapiens
aagcuggagugcaguggugcga

SEQ ID NO: 75469 - RNA, 22 nt, Homo sapiens
uagcagcauuuuuguagaguau

SEQ ID NO: 75470 - RNA, 22 nt, Homo sapiens
uucacuguagccucagccucuu

SEQ ID NO: 75471 - RNA, 22 nt, Homo sapiens
ugucaccauuuguaggugagga

SEQ ID NO: 75472 - RNA, 22 nt, Homo sapiens
cuacagaguaucuaaagaggua

SEQ ID NO: 75473 - RNA, 22 nt, Homo sapiens
ugggaagaagguuuacuugcca

SEQ ID NO: 75474 - RNA, 22 nt, Homo sapiens
ucacagugcaggaucaguuaau

SEQ ID NO: 75475 - RNA, 23 nt, Homo sapiens
auaagccuuuucuuucugcccca

SEQ ID NO: 75476 - RNA, 20 nt, Homo sapiens
ugggaacaugugguauaugg

SEQ ID NO: 75477 - RNA, 22 nt, Homo sapiens
uaaugcuccauggguuauuaaa

SEQ ID NO: 75478 - RNA, 22 nt, Homo sapiens
ugucaucauuccaucagggcuu

SEQ ID NO: 75479 - RNA, 22 nt, Homo sapiens
aucccaguaaaaauggcuucua

SEQ ID NO: 75480 - RNA, 22 nt, Homo sapiens
auguugcaguuuaauuauccua

SEQ ID NO: 75481 - RNA, 22 nt, Homo sapiens
uucagagagggagggauaccua

SEQ ID NO: 75482 - RNA, 22 nt, Homo sapiens
ugucaguguacuguaagaauua

SEQ ID NO: 75483 - RNA, 22 nt, Homo sapiens
agaaugucagcuggauucagcu

SEQ ID NO: 75484 - RNA, 22 nt, Homo sapiens
uucuggccuccauuuuucuccu

SEQ ID NO: 75485 - RNA, 18 nt, Homo sapiens
cccagugacuuauggccu

SEQ ID NO: 75486 - RNA, 22 nt, Homo sapiens
aagccagugugacaggaaacuu

SEQ ID NO: 75487 - RNA, 22 nt, Homo sapiens
uugacauaguuucugaaauaga

SEQ ID NO: 75488 - RNA, 22 nt, Homo sapiens
acugcacuucagccuuggcuac

SEQ ID NO: 75489 - RNA, 22 nt, Homo sapiens
gagauuauuuaaaaggugauuu

SEQ ID NO: 75490 - RNA, 22 nt, Homo sapiens
cuuuaguugucuccucaagggu

SEQ ID NO: 75491 - RNA, 23 nt, Homo sapiens
ucacaguggcugcuuaauuguga

SEQ ID NO: 75492 - RNA, 22 nt, Homo sapiens
acacuguuuuguggagaaugua

SEQ ID NO: 75493 - RNA, 22 nt, Homo sapiens
augcauaugucuuuauaguggc

SEQ ID NO: 75494 - RNA, 22 nt, Homo sapiens
uugcuagagaugagggaugugu

SEQ ID NO: 75495 - RNA, 22 nt, Homo sapiens
acagugcuuggcacacaguaau

SEQ ID NO: 75496 - RNA, 22 nt, Homo sapiens
uauuccagcccuggugagccag

SEQ ID NO: 75497 - RNA, 22 nt, Homo sapiens
uuucugaggccucaccagaagc

SEQ ID NO: 75498 - RNA, 22 nt, Homo sapiens
ugcuggcguuacucuccaucag

SEQ ID NO: 75499 - RNA, 22 nt, Homo sapiens
ccucacaaccuuuauugaagag

SEQ ID NO: 75500 - RNA, 20 nt, Homo sapiens
cagucaugaagaacugugag

SEQ ID NO: 75501 - RNA, 22 nt, Homo sapiens
aauagcacuguagauggaggaa

SEQ ID NO: 75502 - RNA, 22 nt, Homo sapiens
ggaaugggauuugaagucuggc

SEQ ID NO: 75503 - RNA, 22 nt, Homo sapiens
aagcuggagugcaguggugcaa

SEQ ID NO: 75504 - RNA, 22 nt, Homo sapiens
gacaguuucucaggcuuccuua

SEQ ID NO: 75505 - RNA, 21 nt, Homo sapiens
caugucacugcacucuagccu

SEQ ID NO: 75506 - RNA, 22 nt, Homo sapiens
cugacauuguugaucacagcca

SEQ ID NO: 75507 - RNA, 22 nt, Homo sapiens
ugaaacacaccuccucuccauc

SEQ ID NO: 75508 - RNA, 22 nt, Homo sapiens
cagagaacauucagagcuguag

SEQ ID NO: 75509 - RNA, 18 nt, Homo sapiens
gauaacaguggacuaugc

SEQ ID NO: 75510 - RNA, 22 nt, Homo sapiens
aucagaguggguuuuaaaagug

SEQ ID NO: 75511 - RNA, 22 nt, Homo sapiens
caugugcaugagcacauacgug

SEQ ID NO: 75512 - RNA, 20 nt, Homo sapiens
uagcagcagacagagggagg

SEQ ID NO: 75513 - RNA, 22 nt, Homo sapiens
auugcucuuagaaauauuucuu

SEQ ID NO: 75514 - RNA, 22 nt, Homo sapiens
ucagauugaugcauacuuaaau

SEQ ID NO: 75515 - RNA, 22 nt, Homo sapiens
ugucaguggacugugaaaggca

SEQ ID NO: 75516 - RNA, 22 nt, Homo sapiens
cuagcugcacuuccugcuacug

SEQ ID NO: 75517 - RNA, 22 nt, Homo sapiens
gagaaugagauuaugguuacau

SEQ ID NO: 75518 - RNA, 22 nt, Homo sapiens
cacagucuugcaauauugagau

SEQ ID NO: 75519 - RNA, 22 nt, Homo sapiens
cucuuugaugugaaccgugguu

SEQ ID NO: 75520 - RNA, 22 nt, Homo sapiens
cuucaucugguuugugaacuuu

SEQ ID NO: 75521 - RNA, 22 nt, Homo sapiens
gagaacauuuaagccacucagg

SEQ ID NO: 75522 - RNA, 22 nt, Homo sapiens
aucucaguucaggcuggccaca

SEQ ID NO: 75523 - RNA, 22 nt, Homo sapiens
uaccagugaauuccaggggcua

SEQ ID NO: 75524 - RNA, 22 nt, Homo sapiens
uucccagucaaacgaaggacuu

SEQ ID NO: 75525 - RNA, 22 nt, Homo sapiens
uacucugcagagaugcauaaca

SEQ ID NO: 75526 - RNA, 22 nt, Homo sapiens
gcagugugaucacagcuuacug

SEQ ID NO: 75527 - RNA, 22 nt, Homo sapiens
uucugagguuauauucucucaa

SEQ ID NO: 75528 - RNA, 22 nt, Homo sapiens
cacacugucuucauuacuguag

SEQ ID NO: 75529 - RNA, 22 nt, Homo sapiens
cugaauagagcacacugauggg

SEQ ID NO: 75530 - RNA, 22 nt, Homo sapiens
auguuagcaucaauauucauca

SEQ ID NO: 75531 - RNA, 18 nt, Homo sapiens
accuucauuccuuugccu

SEQ ID NO: 75532 - RNA, 22 nt, Homo sapiens
ugugcaaucagcuucauuacau

SEQ ID NO: 75533 - RNA, 22 nt, Homo sapiens
cugaggguagaaggaucacuug

SEQ ID NO: 75534 - RNA, 22 nt, Homo sapiens
gagacggagucucgcucuguca

SEQ ID NO: 75535 - RNA, 22 nt, Homo sapiens
ucuaauguaaccugcaaauauu

SEQ ID NO: 75536 - RNA, 21 nt, Homo sapiens
uuuacuguggacccauugcuu

SEQ ID NO: 75537 - RNA, 22 nt, Homo sapiens
acugcacuccagccugcccaac

SEQ ID NO: 75538 - RNA, 22 nt, Homo sapiens
uucacagucacccuucuccaug

SEQ ID NO: 75539 - RNA, 21 nt, Homo sapiens
aagaaagcuggacuugccgcu

SEQ ID NO: 75540 - RNA, 22 nt, Homo sapiens
ucagaguagaaacacuuccaua

SEQ ID NO: 75541 - RNA, 22 nt, Homo sapiens
uugaggucuuugagcaaacgca

SEQ ID NO: 75542 - RNA, 22 nt, Homo sapiens
ugaaagacugaagaauaggcau

SEQ ID NO: 75543 - RNA, 22 nt, Homo sapiens
ugugauaguuggcuaaagcagu

SEQ ID NO: 75544 - RNA, 19 nt, Homo sapiens
caucacagagucuuccauu

SEQ ID NO: 75545 - RNA, 22 nt, Homo sapiens
uaacugcaaccucugccugcug

SEQ ID NO: 75546 - RNA, 22 nt, Homo sapiens
ugagaucuuggaggcuuuguga

SEQ ID NO: 75547 - RNA, 22 nt, Homo sapiens
uugaagugaagaacaauaucac

SEQ ID NO: 75548 - RNA, 22 nt, Homo sapiens
augaaaacaugauuugccuguu

SEQ ID NO: 75549 - RNA, 22 nt, Homo sapiens
uuuugcuugugaauagccacau

SEQ ID NO: 75550 - RNA, 22 nt, Homo sapiens
uagaaucuaacucgcaugaaaa

SEQ ID NO: 75551 - RNA, 19 nt, Homo sapiens
ugcagcaauguaaaagaca

SEQ ID NO: 75552 - RNA, 18 nt, Homo sapiens
uuuguacuuuuucuaaug

SEQ ID NO: 75553 - RNA, 22 nt, Homo sapiens
uacaagcaggaaaugguauaug

SEQ ID NO: 75554 - RNA, 23 nt, Homo sapiens
uggcauuuuaguuagcuucagug

SEQ ID NO: 75555 - RNA, 22 nt, Homo sapiens
uaacauucacaugcugcaaaaa

SEQ ID NO: 75556 - RNA, 22 nt, Homo sapiens
uuugagaaugcuaccagagaag

SEQ ID NO: 75557 - RNA, 22 nt, Homo sapiens
acaguguguguguucaccuaga

SEQ ID NO: 75558 - RNA, 22 nt, Homo sapiens
uagcagcauaaauggacuaaga

SEQ ID NO: 75559 - RNA, 22 nt, Homo sapiens
auuagguagugagaugcugcug

SEQ ID NO: 75560 - RNA, 22 nt, Homo sapiens
ugcugcuguuaucauuuuacca

SEQ ID NO: 75561 - RNA, 22 nt, Homo sapiens
uucacugggugugguggcucac

SEQ ID NO: 75562 - RNA, 22 nt, Homo sapiens
cagugucugcauuuggaacuca

SEQ ID NO: 75563 - RNA, 22 nt, Homo sapiens
caccagcuggcauugaauaccu

SEQ ID NO: 75564 - RNA, 22 nt, Homo sapiens
ucugucacugguggacgaucac

SEQ ID NO: 75565 - RNA, 22 nt, Homo sapiens
aaugacuaagaugguacauuuu

SEQ ID NO: 75566 - RNA, 22 nt, Homo sapiens
uuggcagcauuccagccaagca

SEQ ID NO: 75567 - RNA, 20 nt, Homo sapiens
uucacugggcucucuguugg

SEQ ID NO: 75568 - RNA, 22 nt, Homo sapiens
agacagcugguagcacuuccug

SEQ ID NO: 75569 - RNA, 22 nt, Homo sapiens
uacaguacagugacaccauuau

SEQ ID NO: 75570 - RNA, 22 nt, Homo sapiens
uagaauguaaauuccaagggca

SEQ ID NO: 75571 - RNA, 22 nt, Homo sapiens
uagaacauuccaggugauguug

SEQ ID NO: 75572 - RNA, 21 nt, Homo sapiens
uugagaagaauuagcucuucc

SEQ ID NO: 75573 - RNA, 22 nt, Homo sapiens
caacucuguaggauccaggugg

SEQ ID NO: 75574 - RNA, 22 nt, Homo sapiens
cucaguuuugccuuguuuaagg

SEQ ID NO: 75575 - RNA, 22 nt, Homo sapiens
cuuuguguggacauuucaggca

SEQ ID NO: 75576 - RNA, 22 nt, Homo sapiens
aguaucacaggcaaaacagaau

SEQ ID NO: 75577 - RNA, 22 nt, Homo sapiens
cuagcagcaugagaauggacca

SEQ ID NO: 75578 - RNA, 22 nt, Homo sapiens
gcaguguggguagagggcaaga

SEQ ID NO: 75579 - RNA, 22 nt, Homo sapiens
agagugaagcuuuuuauauucu

SEQ ID NO: 75580 - RNA, 22 nt, Homo sapiens
agcaugacauauuguagagaaa

SEQ ID NO: 75581 - RNA, 17 nt, Homo sapiens
aguacugucccauccuu

SEQ ID NO: 75582 - RNA, 22 nt, Homo sapiens
aagcuggauuucgcauccuguu

SEQ ID NO: 75583 - RNA, 22 nt, Homo sapiens
uuuaaugcgucucugaguuuug

SEQ ID NO: 75584 - RNA, 20 nt, Homo sapiens
ucaaagacauggcugucaga

SEQ ID NO: 75585 - RNA, 22 nt, Homo sapiens
cugcuaagagaaugagacuuag

SEQ ID NO: 75586 - RNA, 22 nt, Homo sapiens
augagauacuacaaaugaguuu

SEQ ID NO: 75587 - RNA, 22 nt, Homo sapiens
ccauuucacucuuccugaagga

SEQ ID NO: 75588 - RNA, 22 nt, Homo sapiens
uuugggaaaugaaguugguaga

SEQ ID NO: 75589 - RNA, 17 nt, Homo sapiens
auaugaauuuuggagau

SEQ ID NO: 75590 - RNA, 22 nt, Homo sapiens
uuaaugugaaucaggaugcauu

SEQ ID NO: 75591 - RNA, 22 nt, Homo sapiens
uagacacuagauaugugacuga

SEQ ID NO: 75592 - RNA, 22 nt, Homo sapiens
agucauggaucacaguagccuc

SEQ ID NO: 75593 - RNA, 22 nt, Homo sapiens
uacucugcaguaauuccagccc

SEQ ID NO: 75594 - RNA, 22 nt, Homo sapiens
uagcagcaaagcaggaucugcu

SEQ ID NO: 75595 - RNA, 22 nt, Homo sapiens
guggaagugucuggggccaggg

SEQ ID NO: 75596 - RNA, 22 nt, Homo sapiens
ucauccauacaguuagcaaagg

SEQ ID NO: 75597 - RNA, 22 nt, Homo sapiens
cuuugugugggccaagggcugg

SEQ ID NO: 75598 - RNA, 22 nt, Homo sapiens
uggagaacauucauuugcaaga

SEQ ID NO: 75599 - RNA, 22 nt, Homo sapiens
agccaguauuuccacagagugg

SEQ ID NO: 75600 - RNA, 22 nt, Homo sapiens
accuucauuguugccaugucca

SEQ ID NO: 75601 - RNA, 22 nt, Homo sapiens
ugcaccacugcacugccugggu

SEQ ID NO: 75602 - RNA, 22 nt, Homo sapiens
uucacugugaauaaaggcuccc

SEQ ID NO: 75603 - RNA, 22 nt, Homo sapiens
ugucagcacaacucagguuccu

SEQ ID NO: 75604 - RNA, 22 nt, Homo sapiens
ugaggcacucuagacuuauuca

SEQ ID NO: 75605 - RNA, 22 nt, Homo sapiens
auguggcacuugacuuucucgc

SEQ ID NO: 75606 - RNA, 22 nt, Homo sapiens
aaugucaugaguccaaccagaa

SEQ ID NO: 75607 - RNA, 22 nt, Homo sapiens
ugaaguguuuuuucaggcaugu

SEQ ID NO: 75608 - RNA, 22 nt, Homo sapiens
ugugaugugaugagaaguuccu

SEQ ID NO: 75609 - RNA, 23 nt, Homo sapiens
ucugcggguguggacccuagugc

SEQ ID NO: 75610 - RNA, 22 nt, Homo sapiens
gucagcuuguccagagacucug

SEQ ID NO: 75611 - RNA, 22 nt, Homo sapiens
uucuuagguuaaggcugagaga

SEQ ID NO: 75612 - RNA, 22 nt, Homo sapiens
auguggcauuucucauucauuu

SEQ ID NO: 75613 - RNA, 22 nt, Homo sapiens
uaucacagguggacugcacacc

SEQ ID NO: 75614 - RNA, 22 nt, Homo sapiens
uacucugcagccauaaaacaga

SEQ ID NO: 75615 - RNA, 22 nt, Homo sapiens
auaguacuauugcaguguuaua

SEQ ID NO: 75616 - RNA, 22 nt, Homo sapiens
uaugccuuuuggcucaagaaac

SEQ ID NO: 75617 - RNA, 22 nt, Homo sapiens
caaugcauuauucucccacuuc

SEQ ID NO: 75618 - RNA, 22 nt, Homo sapiens
uguuuaguuaagacauagaauu

SEQ ID NO: 75619 - RNA, 22 nt, Homo sapiens
ugucacugugcagucaugcauu

SEQ ID NO: 75620 - RNA, 22 nt, Homo sapiens
acagugcuucugauaugaugcc

SEQ ID NO: 75621 - RNA, 22 nt, Homo sapiens
ggcuagaauagggauagaccuu

SEQ ID NO: 75622 - RNA, 22 nt, Homo sapiens
cacacuguuuuccauggggguu

SEQ ID NO: 75623 - RNA, 22 nt, Homo sapiens
agugucaggagacagguagcug

SEQ ID NO: 75624 - RNA, 22 nt, Homo sapiens
uuccaguggacuacuucauccu

SEQ ID NO: 75625 - RNA, 22 nt, Homo sapiens
caaagcacuuggcuuggaagau

SEQ ID NO: 75626 - RNA, 18 nt, Homo sapiens
acugcacuccauccuagg

SEQ ID NO: 75627 - RNA, 22 nt, Homo sapiens
auugucauuuucugagaaguaa

SEQ ID NO: 75628 - RNA, 22 nt, Homo sapiens
ugugcaaggcucucaaccugug

SEQ ID NO: 75629 - RNA, 22 nt, Homo sapiens
cuggcaaauguuuucuguaaag

SEQ ID NO: 75630 - RNA, 22 nt, Homo sapiens
augggcacugauguauucugug

SEQ ID NO: 75631 - RNA, 22 nt, Homo sapiens
uuuaucuguuuaaaacuguuca

SEQ ID NO: 75632 - RNA, 22 nt, Homo sapiens
gagaacauuaauaguuaauuuu

SEQ ID NO: 75633 - RNA, 22 nt, Homo sapiens
agcacagugguuaaguuucuua

SEQ ID NO: 75634 - RNA, 22 nt, Homo sapiens
cucacugggaccacucugaagu

SEQ ID NO: 75635 - RNA, 22 nt, Homo sapiens
aucacagcccuccucuuggaug

SEQ ID NO: 75636 - RNA, 22 nt, Homo sapiens
cuacucuggagagugacaauca

SEQ ID NO: 75637 - RNA, 22 nt, Homo sapiens
ggcagcaugggugccuuuguga

SEQ ID NO: 75638 - RNA, 21 nt, Homo sapiens
gaguggcuuuuguuucaccag

SEQ ID NO: 75639 - RNA, 22 nt, Homo sapiens
gggcaugaugucuuaugccuau

SEQ ID NO: 75640 - RNA, 22 nt, Homo sapiens
uuauuagguuaaccuauagcua

SEQ ID NO: 75641 - RNA, 20 nt, Homo sapiens
uggucaccuucaggagguuc

SEQ ID NO: 75642 - RNA, 22 nt, Homo sapiens
ugucauucaggaaauucuaagu

SEQ ID NO: 75643 - RNA, 22 nt, Homo sapiens
uccauaguacuagaaacugacc

SEQ ID NO: 75644 - RNA, 22 nt, Homo sapiens
uuacagauggcacacucaaggg

SEQ ID NO: 75645 - RNA, 22 nt, Homo sapiens
cccaguuuugccacuuacuagc

SEQ ID NO: 75646 - RNA, 19 nt, Homo sapiens
augaguuaggggaaauuuc

SEQ ID NO: 75647 - RNA, 22 nt, Homo sapiens
ucauauguaugugcaauuuugu

SEQ ID NO: 75648 - RNA, 22 nt, Homo sapiens
uugcuucauucaacauugaggg

SEQ ID NO: 75649 - RNA, 19 nt, Homo sapiens
augacauuuggggguggac

SEQ ID NO: 75650 - RNA, 22 nt, Homo sapiens
cuguauguuucuaugaauguga

SEQ ID NO: 75651 - RNA, 20 nt, Homo sapiens
uggaaguaagaauauaggug

SEQ ID NO: 75652 - RNA, 22 nt, Homo sapiens
uugacauugcuguaguguccag

SEQ ID NO: 75653 - RNA, 22 nt, Homo sapiens
aagauauguuaguuauaaacuc

SEQ ID NO: 75654 - RNA, 22 nt, Homo sapiens
auaagaagugaaccagacgucu

SEQ ID NO: 75655 - RNA, 22 nt, Homo sapiens
ucaaagugacaaaguugcagca

SEQ ID NO: 75656 - RNA, 22 nt, Homo sapiens
cugaggaaguucuuuaacaguu

SEQ ID NO: 75657 - RNA, 22 nt, Homo sapiens
uuggccauaugacuugcuuugg

SEQ ID NO: 75658 - RNA, 22 nt, Homo sapiens
ugagccaaugauuugaauagag

SEQ ID NO: 75659 - RNA, 22 nt, Homo sapiens
cacugggccaucacuuaauauu

SEQ ID NO: 75660 - RNA, 22 nt, Homo sapiens
augacauuccacagccguagag

SEQ ID NO: 75661 - RNA, 22 nt, Homo sapiens
uuugggaaugaguuuaucauuu

SEQ ID NO: 75662 - RNA, 22 nt, Homo sapiens
uuccaguaauagcacagcauug

SEQ ID NO: 75663 - RNA, 22 nt, Homo sapiens
uuaaugaacuuuauuuuguaga

SEQ ID NO: 75664 - RNA, 22 nt, Homo sapiens
aagugaaugugcuggaauagcu

SEQ ID NO: 75665 - RNA, 21 nt, Homo sapiens
ugaaugucuaggcagaaguuu

SEQ ID NO: 75666 - RNA, 17 nt, Homo sapiens
gacauaggaaaaggaga

SEQ ID NO: 75667 - RNA, 22 nt, Homo sapiens
cugauaguucucuuuagaguuu

SEQ ID NO: 75668 - RNA, 22 nt, Homo sapiens
augacauugaugcucuggcugg

SEQ ID NO: 75669 - RNA, 22 nt, Homo sapiens
uuaugucauuuuuggauguuaa

SEQ ID NO: 75670 - RNA, 22 nt, Homo sapiens
augugcagauguuacaaauugu

SEQ ID NO: 75671 - RNA, 22 nt, Homo sapiens
uaucagcacaguggguucaugg

SEQ ID NO: 75672 - RNA, 22 nt, Homo sapiens
augugcacaugcuuacauguga

SEQ ID NO: 75673 - RNA, 22 nt, Homo sapiens
augugcuugagggaaaucaguu

SEQ ID NO: 75674 - RNA, 22 nt, Homo sapiens
cugaauagucaacgauggacug

SEQ ID NO: 75675 - RNA, 22 nt, Homo sapiens
aucacuggucaugagagaagua

SEQ ID NO: 75676 - RNA, 20 nt, Homo sapiens
acugcacuucagccugcugg

SEQ ID NO: 75677 - RNA, 22 nt, Homo sapiens
cugucaucauuucuaugugcca

SEQ ID NO: 75678 - RNA, 22 nt, Homo sapiens
guggaaugaaaacucucucaca

SEQ ID NO: 75679 - RNA, 22 nt, Homo sapiens
ggagugucagaaacaguguccu

SEQ ID NO: 75680 - RNA, 22 nt, Homo sapiens
auuaaucaggcaaugcuugcua

SEQ ID NO: 75681 - RNA, 22 nt, Homo sapiens
ugaaauacuuaauuucuccaug

SEQ ID NO: 75682 - RNA, 23 nt, Homo sapiens
ggaaugaaaccugguuaugauau

SEQ ID NO: 75683 - RNA, 22 nt, Homo sapiens
ugggaagaugcugcuucuuccu

SEQ ID NO: 75684 - RNA, 22 nt, Homo sapiens
uccuucauuugucaacucuagu

SEQ ID NO: 75685 - RNA, 19 nt, Homo sapiens
uagcagcaugauuuauaau

SEQ ID NO: 75686 - RNA, 22 nt, Homo sapiens
cacacugucuucaauggguggu

SEQ ID NO: 75687 - RNA, 22 nt, Homo sapiens
agcauuaguugugaagccuuua

SEQ ID NO: 75688 - RNA, 22 nt, Homo sapiens
ugaauagacacuaaagacugua

SEQ ID NO: 75689 - RNA, 22 nt, Homo sapiens
uuauuagguuagugcaaaaguu

SEQ ID NO: 75690 - RNA, 22 nt, Homo sapiens
gugucaguggggagugaucuuc

SEQ ID NO: 75691 - RNA, 22 nt, Homo sapiens
uuaugucacuguucagucuccc

SEQ ID NO: 75692 - RNA, 22 nt, Homo sapiens
gauagugaaccaagggguaauu

SEQ ID NO: 75693 - RNA, 22 nt, Homo sapiens
uugagagaaaaaauuuauuggu

SEQ ID NO: 75694 - RNA, 22 nt, Homo sapiens
cacacugucuuucagaaugguu

SEQ ID NO: 75695 - RNA, 21 nt, Homo sapiens
ucaucaagcuguagacaugau

SEQ ID NO: 75696 - RNA, 22 nt, Homo sapiens
uugcuagaugaaaaugguaccu

SEQ ID NO: 75697 - RNA, 22 nt, Homo sapiens
ucacagucggugacuucuugcu

SEQ ID NO: 75698 - RNA, 22 nt, Homo sapiens
uugagguagugucuuguucugu

SEQ ID NO: 75699 - RNA, 22 nt, Homo sapiens
cucugacagugguuagcacugu

SEQ ID NO: 75700 - RNA, 22 nt, Homo sapiens
uuuaacauuggaugagaucguc

SEQ ID NO: 75701 - RNA, 22 nt, Homo sapiens
cagacaugucuuguggccgugg

SEQ ID NO: 75702 - RNA, 22 nt, Homo sapiens
uugacuucagagcugauucaag

SEQ ID NO: 75703 - RNA, 22 nt, Homo sapiens
cacagcuaacaacuguuucuuc

SEQ ID NO: 75704 - RNA, 22 nt, Homo sapiens
uucacagugugaucuaugggca

SEQ ID NO: 75705 - RNA, 22 nt, Homo sapiens
auguaguugcucugccuguuuu

SEQ ID NO: 75706 - RNA, 22 nt, Homo sapiens
uugacaaugcacugugcuaagu

SEQ ID NO: 75707 - RNA, 22 nt, Homo sapiens
auuaacaucuagaguuuuggug

SEQ ID NO: 75708 - RNA, 22 nt, Homo sapiens
auagagcuaccauagaauccag

SEQ ID NO: 75709 - RNA, 22 nt, Homo sapiens
gagaaugaacagacugccucuu

SEQ ID NO: 75710 - RNA, 22 nt, Homo sapiens
auugauaguuuaauaggaauug

SEQ ID NO: 75711 - RNA, 22 nt, Homo sapiens
aacacggcccgcagagcaagcu

SEQ ID NO: 75712 - RNA, 22 nt, Homo sapiens
acugcacuccagccugccgaca

SEQ ID NO: 75713 - RNA, 22 nt, Homo sapiens
cucaugcugucuucugggguaa

SEQ ID NO: 75714 - RNA, 22 nt, Homo sapiens
uagcagcaucucuggcuucuac

SEQ ID NO: 75715 - RNA, 22 nt, Homo sapiens
gucauggaggaugaauggccaa

SEQ ID NO: 75716 - RNA, 22 nt, Homo sapiens
auugaacaugccauauguacca

SEQ ID NO: 75717 - RNA, 22 nt, Homo sapiens
gcaaaaaguagugcugguuagg

SEQ ID NO: 75718 - RNA, 22 nt, Homo sapiens
cuuuguguaggugccucuggcu

SEQ ID NO: 75719 - RNA, 22 nt, Homo sapiens
aucccaguucagccucugacac

SEQ ID NO: 75720 - RNA, 22 nt, Homo sapiens
uaacuccauuuggacucaguau

SEQ ID NO: 75721 - RNA, 22 nt, Homo sapiens
uaaagcacuuuuuucugcaugg

SEQ ID NO: 75722 - RNA, 22 nt, Homo sapiens
augaaaucuuuggcagaucuua

SEQ ID NO: 75723 - RNA, 22 nt, Homo sapiens
gaagaucacacuguagaucuau

SEQ ID NO: 75724 - RNA, 22 nt, Homo sapiens
cugugcauaucuuggacugugu

SEQ ID NO: 75725 - RNA, 22 nt, Homo sapiens
gcaagaaucugggaguaaaauu

SEQ ID NO: 75726 - RNA, 17 nt, Homo sapiens
guggaaugucaugucaa

SEQ ID NO: 75727 - RNA, 22 nt, Homo sapiens
auagaaucaucugugcacuagu

SEQ ID NO: 75728 - RNA, 22 nt, Homo sapiens
aucacuagaucauagguaaaca

SEQ ID NO: 75729 - RNA, 22 nt, Homo sapiens
acugcacuccagccucgcaaca

SEQ ID NO: 75730 - RNA, 22 nt, Homo sapiens
ugaaaugaucaguuugguuacu

SEQ ID NO: 75731 - RNA, 22 nt, Homo sapiens
ucaucagaaucccuuagggaug

SEQ ID NO: 75732 - RNA, 22 nt, Homo sapiens
uucaaguagguaggaccacagg

SEQ ID NO: 75733 - RNA, 22 nt, Homo sapiens
uguaaugaucaaaucagaguaa

SEQ ID NO: 75734 - RNA, 22 nt, Homo sapiens
ucaacacaguuaaauggggaaa

SEQ ID NO: 75735 - RNA, 22 nt, Homo sapiens
aaugugcacuauuagggugaua

SEQ ID NO: 75736 - RNA, 22 nt, Homo sapiens
gcuuuguugauggugagucugu

SEQ ID NO: 75737 - RNA, 22 nt, Homo sapiens
aaaugucauggaguguuucccc

SEQ ID NO: 75738 - RNA, 22 nt, Homo sapiens
gugaaauguguagaggaucugg

SEQ ID NO: 75739 - RNA, 20 nt, Homo sapiens
cuugaagacuaugcugcuga

SEQ ID NO: 75740 - RNA, 22 nt, Homo sapiens
gucagugugauaucugcagggg

SEQ ID NO: 75741 - RNA, 17 nt, Homo sapiens
guggauagaacaaugaa

SEQ ID NO: 75742 - RNA, 22 nt, Homo sapiens
acugcacuccagccugcugaca

SEQ ID NO: 75743 - RNA, 22 nt, Homo sapiens
aggugaaugcucacauucuaau

SEQ ID NO: 75744 - RNA, 22 nt, Homo sapiens
gucauccaggcuggagugaagc

SEQ ID NO: 75745 - RNA, 22 nt, Homo sapiens
gggaagauauaggcugggcacc

SEQ ID NO: 75746 - RNA, 22 nt, Homo sapiens
acagauugcugggccccagccc

SEQ ID NO: 75747 - RNA, 21 nt, Homo sapiens
gugguucuagagaaacagaau

SEQ ID NO: 75748 - RNA, 22 nt, Homo sapiens
uggcuagaccugcauaacagcu

SEQ ID NO: 75749 - RNA, 22 nt, Homo sapiens
agcaagauuguucccauuuucu

SEQ ID NO: 75750 - RNA, 22 nt, Homo sapiens
uuauuagguugguggaaaagua

SEQ ID NO: 75751 - RNA, 23 nt, Homo sapiens
cagcuucauugaacauaacuccu

SEQ ID NO: 75752 - RNA, 22 nt, Homo sapiens
uucccuuucugccuugaaucuu

SEQ ID NO: 75753 - RNA, 22 nt, Homo sapiens
uuauuugguuauuguaauuggg

SEQ ID NO: 75754 - RNA, 16 nt, Homo sapiens
uguccaaauaaauaca

SEQ ID NO: 75755 - RNA, 22 nt, Homo sapiens
uguccaaaucagagguaccaaa

SEQ ID NO: 75756 - RNA, 22 nt, Homo sapiens
uuaaaugcucacauaaagguag

SEQ ID NO: 75757 - RNA, 22 nt, Homo sapiens
uguuuguuugauaugggauaaa

SEQ ID NO: 75758 - RNA, 22 nt, Homo sapiens
uuguauugucuugaugaguuga

SEQ ID NO: 75759 - RNA, 22 nt, Homo sapiens
uuggaauuaagagauauuuucu

SEQ ID NO: 75760 - RNA, 23 nt, Homo sapiens
uugcauugcccuccauaguacuc

SEQ ID NO: 75761 - RNA, 22 nt, Homo sapiens
uugcauuagugugguacauuug

SEQ ID NO: 75762 - RNA, 22 nt, Homo sapiens
uuuccaguuggaaagccuguuu

SEQ ID NO: 75763 - RNA, 22 nt, Homo sapiens
uuugagcaugcagauugccagg

SEQ ID NO: 75764 - RNA, 20 nt, Homo sapiens
uuuggcacugagugguauaa

SEQ ID NO: 75765 - RNA, 22 nt, Homo sapiens
uuucaguagagacacgguuuug

SEQ ID NO: 75766 - RNA, 22 nt, Homo sapiens
uuguguuuuuaguagggaaggg

SEQ ID NO: 75767 - RNA, 22 nt, Homo sapiens
uugugcuuaauaaaaaguggua

SEQ ID NO: 75768 - RNA, 22 nt, Homo sapiens
uuugucuccuaagacucugugg

SEQ ID NO: 75769 - RNA, 22 nt, Homo sapiens
ugagcugagaucgugccauugu

SEQ ID NO: 75770 - RNA, 22 nt, Homo sapiens
ugagacaaucucaucucaguga

SEQ ID NO: 75771 - RNA, 22 nt, Homo sapiens
ugcauaugucuuuauaguagca

SEQ ID NO: 75772 - RNA, 22 nt, Homo sapiens
ugccauagagacucaacagccu

SEQ ID NO: 75773 - RNA, 22 nt, Homo sapiens
uggcauuguccaauaaaauuuu

SEQ ID NO: 75774 - RNA, 21 nt, Homo sapiens
ucuguguugaucucacuggga

SEQ ID NO: 75775 - RNA, 22 nt, Homo sapiens
ucuaucacagugauguuccaga

SEQ ID NO: 75776 - RNA, 22 nt, Homo sapiens
ucuuuggugaauggucauccag

SEQ ID NO: 75777 - RNA, 19 nt, Homo sapiens
ucuuugguacgugcuuuga

SEQ ID NO: 75778 - RNA, 22 nt, Homo sapiens
ucuuugguaauggaugucugau

SEQ ID NO: 75779 - RNA, 22 nt, Homo sapiens
ugacuugaucauuacacauucu

SEQ ID NO: 75780 - RNA, 22 nt, Homo sapiens
uccuucaugcaucaauguaucc

SEQ ID NO: 75781 - RNA, 22 nt, Homo sapiens
uccuuugguggagucuuuaggg

SEQ ID NO: 75782 - RNA, 22 nt, Homo sapiens
ucauuguccaacuucuuucagu

SEQ ID NO: 75783 - RNA, 21 nt, Homo sapiens
ucaaauugaaauuaggucauu

SEQ ID NO: 75784 - RNA, 22 nt, Homo sapiens
ucaaaugcacguagagaaaaua

SEQ ID NO: 75785 - RNA, 22 nt, Homo sapiens
uauaugucuucuuguaauuggc

SEQ ID NO: 75786 - RNA, 22 nt, Homo sapiens
uauaguguuuucaaaaguaugu

SEQ ID NO: 75787 - RNA, 18 nt, Homo sapiens
uaguacuguucucaugau

SEQ ID NO: 75788 - RNA, 22 nt, Homo sapiens
uaauugaaugcagacaccaggg

SEQ ID NO: 75789 - RNA, 22 nt, Homo sapiens
uacagccacauaauguaugauu

SEQ ID NO: 75790 - RNA, 22 nt, Homo sapiens
ggcaguuuguucuugcuccuuu

SEQ ID NO: 75791 - RNA, 22 nt, Homo sapiens
ggauacauuuuuccuccucuuc

SEQ ID NO: 75792 - RNA, 22 nt, Homo sapiens
gccuuuggugacaggcaugugu

SEQ ID NO: 75793 - RNA, 19 nt, Homo sapiens
gguucaguuuauaaagaug

SEQ ID NO: 75794 - RNA, 22 nt, Homo sapiens
guauuguacuacaagcucuuua

SEQ ID NO: 75795 - RNA, 22 nt, Homo sapiens
gucacagcacuuuuaguaagug

SEQ ID NO: 75796 - RNA, 22 nt, Homo sapiens
auguaauguuaaauugcuaauu

SEQ ID NO: 75797 - RNA, 22 nt, Homo sapiens
augguuuauuuguaagcagagu

SEQ ID NO: 75798 - RNA, 22 nt, Homo sapiens
auggaguuuacuuaguguaaua

SEQ ID NO: 75799 - RNA, 22 nt, Homo sapiens
auagugaacuuugugagaacaa

SEQ ID NO: 75800 - RNA, 23 nt, Homo sapiens
auauaguagaugugcaguaacau

SEQ ID NO: 75801 - RNA, 21 nt, Homo sapiens
auauuacuguuagaggacugc

SEQ ID NO: 75802 - RNA, 22 nt, Homo sapiens
aucacaggucaaaucauuauuu

SEQ ID NO: 75803 - RNA, 22 nt, Homo sapiens
aucacagcccuccucuuggaug

SEQ ID NO: 75804 - RNA, 22 nt, Homo sapiens
aucaaagccaugcucaguuuuc

SEQ ID NO: 75805 - RNA, 22 nt, Homo sapiens
aucaaaugcuggcagagugccu

SEQ ID NO: 75806 - RNA, 22 nt, Homo sapiens
acauccauuugcuuuauuugcu

SEQ ID NO: 75807 - RNA, 22 nt, Homo sapiens
acagaccuauuucaaucauuua

SEQ ID NO: 75808 - RNA, 22 nt, Homo sapiens
acaaagugccuccuuuuagagu

SEQ ID NO: 75809 - RNA, 22 nt, Homo sapiens
aauucuguauuguuuagggacu

SEQ ID NO: 75810 - RNA, 22 nt, Homo sapiens
aaugacagccagauucuucucu

SEQ ID NO: 75811 - RNA, 19 nt, Homo sapiens
cugaaacacagagagggcu

SEQ ID NO: 75812 - RNA, 22 nt, Homo sapiens
cugaaagagcauguaacacagu

SEQ ID NO: 75813 - RNA, 22 nt, Homo sapiens
cucucuguuugucuguuauugg

SEQ ID NO: 75814 - RNA, 22 nt, Homo sapiens
cugguaugugugacugcauuga

SEQ ID NO: 75815 - RNA, 22 nt, Homo sapiens
gaaucacagauuaugaguaucu

SEQ ID NO: 75816 - RNA, 22 nt, Homo sapiens
gccauagucauagauggcaggg

SEQ ID NO: 75817 - RNA, 22 nt, Homo sapiens
cccauuguuaaguugaguaucu

SEQ ID NO: 75818 - RNA, 22 nt, Homo sapiens
cuccauagucuucgaagaauga

SEQ ID NO: 75819 - RNA, 22 nt, Homo sapiens
cuccauguggcuaacuuuuaaa

SEQ ID NO: 75820 - RNA, 22 nt, Homo sapiens
auuauugacucauagaaaggau

SEQ ID NO: 75821 - RNA, 17 nt, Homo sapiens
augugaauguucaaaua

SEQ ID NO: 75822 - RNA, 22 nt, Homo sapiens
auugaguaaaugaaaauugccu

SEQ ID NO: 75823 - RNA, 22 nt, Homo sapiens
auuugucaauacacuucuucca

SEQ ID NO: 75824 - RNA, 22 nt, Homo sapiens
auugcaaagcguagacucuaaa

SEQ ID NO: 75825 - RNA, 22 nt, Homo sapiens
auugaguaacaauuuuguucaa

SEQ ID NO: 75826 - RNA, 22 nt, Homo sapiens
auuccauuuguuaucacacccg

SEQ ID NO: 75827 - RNA, 22 nt, Homo sapiens
auugaacaugccauauguacca

SEQ ID NO: 75828 - RNA, 22 nt, Homo sapiens
auugaauuugguuugcuaagaa

SEQ ID NO: 75829 - RNA, 22 nt, Homo sapiens
auuaaauguuggacguauacau

SEQ ID NO: 75830 - RNA, 20 nt, Homo sapiens
auguaauguaugauauguac

SEQ ID NO: 75831 - RNA, 22 nt, Homo sapiens
augaacagagccuugagaaccu

SEQ ID NO: 75832 - RNA, 22 nt, Homo sapiens
auagugcugcaaugaacauaca

SEQ ID NO: 75833 - RNA, 22 nt, Homo sapiens
aucacagguacuauggcugaca

SEQ ID NO: 75834 - RNA, 22 nt, Homo sapiens
auaaaguucugcuggcauauau

SEQ ID NO: 75835 - RNA, 22 nt, Homo sapiens
acuuugguuuauagaauuuagg

SEQ ID NO: 75836 - RNA, 22 nt, Homo sapiens
acuuugcuuagagggcauuaaa

SEQ ID NO: 75837 - RNA, 22 nt, Homo sapiens
agaucauaugcaguaaugaacu

SEQ ID NO: 75838 - RNA, 22 nt, Homo sapiens
aauggcaucuagaguggugaau

SEQ ID NO: 75839 - RNA, 22 nt, Homo sapiens
acauaguagacacugaaaauau

SEQ ID NO: 75840 - RNA, 22 nt, Homo sapiens
acauugcucuuaccaaguuugu

SEQ ID NO: 75841 - RNA, 22 nt, Homo sapiens
accaguuuuuuauacaucuucu

SEQ ID NO: 75842 - RNA, 22 nt, Homo sapiens
aaaugcauggacagcuggucuu

SEQ ID NO: 75843 - RNA, 22 nt, Homo sapiens
aacuaugucaaauaaaaugagg

SEQ ID NO: 75844 - RNA, 22 nt, Homo sapiens
aaauuguccuauugguuuaagc

SEQ ID NO: 75845 - RNA, 22 nt, Homo sapiens
aauagcacuguagauggaggaa

SEQ ID NO: 75846 - RNA, 21 nt, Homo sapiens
aaucacaguuguucugccuuc

SEQ ID NO: 75847 - RNA, 22 nt, Homo sapiens
aaucucagagauaucugugucc

SEQ ID NO: 75848 - RNA, 22 nt, Homo sapiens
uuaaugaacuuuauuuuguaga

SEQ ID NO: 75849 - RNA, 22 nt, Homo sapiens
uguuuaguuaagacauagaauu

SEQ ID NO: 75850 - RNA, 22 nt, Homo sapiens
uugagcaauccuccugccaugu

SEQ ID NO: 75851 - RNA, 22 nt, Homo sapiens
uuccacuuuuuccuugugcucc

SEQ ID NO: 75852 - RNA, 22 nt, Homo sapiens
uugaaagacaucaccuacugcu

SEQ ID NO: 75853 - RNA, 22 nt, Homo sapiens
uugaacuagaaccugcaaauuu

SEQ ID NO: 75854 - RNA, 22 nt, Homo sapiens
uugaaaucuuccacagcccaag

SEQ ID NO: 75855 - RNA, 22 nt, Homo sapiens
uugaaauguuuagaaguuugga

SEQ ID NO: 75856 - RNA, 22 nt, Homo sapiens
uugaaauguguaagcuccgaaa

SEQ ID NO: 75857 - RNA, 21 nt, Homo sapiens
uucuacuccggcguuguuuuu

SEQ ID NO: 75858 - RNA, 22 nt, Homo sapiens
uuuggcaugggcuauuugcuuu

SEQ ID NO: 75859 - RNA, 22 nt, Homo sapiens
uuugcuuaaaguccuuguggga

SEQ ID NO: 75860 - RNA, 23 nt, Homo sapiens
uuuguacuaugucaguuuagaua

SEQ ID NO: 75861 - RNA, 22 nt, Homo sapiens
uuguacuagucauauuuugaaa

SEQ ID NO: 75862 - RNA, 22 nt, Homo sapiens
uuguaacaugcuuucacuucag

SEQ ID NO: 75863 - RNA, 19 nt, Homo sapiens
uuggcccugguucucuucu

SEQ ID NO: 75864 - RNA, 22 nt, Homo sapiens
uuggauuauaaacugagauuug

SEQ ID NO: 75865 - RNA, 22 nt, Homo sapiens
uugugauugagugauccuuguu

SEQ ID NO: 75866 - RNA, 20 nt, Homo sapiens
ugguguuugaacagugaaug

SEQ ID NO: 75867 - RNA, 22 nt, Homo sapiens
ugggaugugagucuucgcuuuc

SEQ ID NO: 75868 - RNA, 22 nt, Homo sapiens
ugaguucuuuguagauucugug

SEQ ID NO: 75869 - RNA, 22 nt, Homo sapiens
ugcuuugguagaaaucuuuggu

SEQ ID NO: 75870 - RNA, 22 nt, Homo sapiens
ucuuugguaugugcaugugcuu

SEQ ID NO: 75871 - RNA, 22 nt, Homo sapiens
ucuuugguauugugaauagugu

SEQ ID NO: 75872 - RNA, 22 nt, Homo sapiens
ucuuuggucaucaugggaagca

SEQ ID NO: 75873 - RNA, 22 nt, Homo sapiens
ucuuugguuucugucucuguaa

SEQ ID NO: 75874 - RNA, 22 nt, Homo sapiens
ucuuugguuguuuagggugcau

SEQ ID NO: 75875 - RNA, 22 nt, Homo sapiens
ucuuuguucaggagccaacucc

SEQ ID NO: 75876 - RNA, 22 nt, Homo sapiens
ucuuuguuuucugauccugaag

SEQ ID NO: 75877 - RNA, 22 nt, Homo sapiens
ugagaccugaucuugguacugc

SEQ ID NO: 75878 - RNA, 22 nt, Homo sapiens
uauugcuggauguauuacaugu

SEQ ID NO: 75879 - RNA, 22 nt, Homo sapiens
ucacaauggcugaacuaauuua

SEQ ID NO: 75880 - RNA, 22 nt, Homo sapiens
ucacaguucagcauggcugagg

SEQ ID NO: 75881 - RNA, 22 nt, Homo sapiens
gugauuauuaugcacugcaugc

SEQ ID NO: 75882 - RNA, 22 nt, Homo sapiens
uaaauggauaaaugaauaccua

SEQ ID NO: 75883 - RNA, 22 nt, Homo sapiens
uaaauugcauaaguacaaauga

SEQ ID NO: 75884 - RNA, 22 nt, Homo sapiens
gugaacaauguuuuauccuggg

SEQ ID NO: 75885 - RNA, 22 nt, Homo sapiens
gugacuaagauucuuugauaug

SEQ ID NO: 75886 - RNA, 22 nt, Homo sapiens
guaaugaacuugaaagccuguu

SEQ ID NO: 75887 - RNA, 21 nt, Homo sapiens
gcuuuuucggaagucuuuggc

SEQ ID NO: 75888 - RNA, 22 nt, Homo sapiens
gagaacagagauaauuuuacuu

SEQ ID NO: 75889 - RNA, 22 nt, Homo sapiens
gagauuaauacacaucaaaugc

SEQ ID NO: 75890 - RNA, 22 nt, Homo sapiens
cuuuguggggucuuuccucaaa

SEQ ID NO: 75891 - RNA, 21 nt, Homo sapiens
cuuugguuucugacuugcaua

SEQ ID NO: 75892 - RNA, 22 nt, Homo sapiens
cauuguccuccuggggcuauuu

SEQ ID NO: 75893 - RNA, 22 nt, Homo sapiens
cagagcaaugcuuuugcuuuga

SEQ ID NO: 75894 - RNA, 22 nt, Homo sapiens
cacagcacaggcaugaguguca

SEQ ID NO: 75895 - RNA, 21 nt, Homo sapiens
caaugacacuguagcugugcu

SEQ ID NO: 75896 - RNA, 22 nt, Homo sapiens
uuugcugagucugacuucaugg

SEQ ID NO: 75897 - RNA, 22 nt, Homo sapiens
uucuuuggaaacaguacuaauu

SEQ ID NO: 75898 - RNA, 22 nt, Homo sapiens
uugcagagucaguuauuuugcc

SEQ ID NO: 75899 - RNA, 22 nt, Homo sapiens
uugucuugcagcuuaggcauca

SEQ ID NO: 75900 - RNA, 22 nt, Homo sapiens
uugucucacuggaguuuaguaa

SEQ ID NO: 75901 - RNA, 22 nt, Homo sapiens
uugugguuuuuaaaacuaggug

SEQ ID NO: 75902 - RNA, 22 nt, Homo sapiens
uuuauggagagauauuuauggu

SEQ ID NO: 75903 - RNA, 22 nt, Homo sapiens
uugcauaagugcauucugugau

SEQ ID NO: 75904 - RNA, 22 nt, Homo sapiens
ugucucagugauuggcuuucug

SEQ ID NO: 75905 - RNA, 22 nt, Homo sapiens
uguauuuguuguuaaauggaga

SEQ ID NO: 75906 - RNA, 22 nt, Homo sapiens
uuagaacagugcucaccacaaa

SEQ ID NO: 75907 - RNA, 22 nt, Homo sapiens
uuagaguacaggggaaucaagg

SEQ ID NO: 75908 - RNA, 22 nt, Homo sapiens
ugugguuuuucacauuuagaga

SEQ ID NO: 75909 - RNA, 22 nt, Homo sapiens
uuauugaguaaaaagaaugguu

SEQ ID NO: 75910 - RNA, 22 nt, Homo sapiens
gugcuuauccccauucuggagg

SEQ ID NO: 75911 - RNA, 22 nt, Homo sapiens
uaacauugcuggacuaccugcu

SEQ ID NO: 75912 - RNA, 22 nt, Homo sapiens
guugcugagucccaucaccaga

SEQ ID NO: 75913 - RNA, 22 nt, Homo sapiens
guuugcauagugcugggagggg

SEQ ID NO: 75914 - RNA, 18 nt, Homo sapiens
uaggaacauugauuggag

SEQ ID NO: 75915 - RNA, 22 nt, Homo sapiens
uagcuguuggugggaagucaga

SEQ ID NO: 75916 - RNA, 22 nt, Homo sapiens
uagcauaauuuguagaaaauca

SEQ ID NO: 75917 - RNA, 22 nt, Homo sapiens
uagggcaaggaacaguuaaaaa

SEQ ID NO: 75918 - RNA, 22 nt, Homo sapiens
uaucacagcgggguguacaccc

SEQ ID NO: 75919 - RNA, 22 nt, Homo sapiens
uaucacagcaaggacccauuau

SEQ ID NO: 75920 - RNA, 20 nt, Homo sapiens
uaucacaguucaggaacucu

SEQ ID NO: 75921 - RNA, 22 nt, Homo sapiens
uaugaacacuuuugggaggcau

SEQ ID NO: 75922 - RNA, 22 nt, Homo sapiens
uaugaauuuuauccaggauaua

SEQ ID NO: 75923 - RNA, 22 nt, Homo sapiens
uauugaacgugggauauugaag

SEQ ID NO: 75924 - RNA, 22 nt, Homo sapiens
ugagauuaucuugaucuugaaa

SEQ ID NO: 75925 - RNA, 21 nt, Homo sapiens
ugagauuaaguuguuuagaag

SEQ ID NO: 75926 - RNA, 22 nt, Homo sapiens
uggcaauguggaaugguccagg

SEQ ID NO: 75927 - RNA, 22 nt, Homo sapiens
uauugcaaauggugaucccagg

SEQ ID NO: 75928 - RNA, 22 nt, Homo sapiens
ucacagccuaguuuuauacauu

SEQ ID NO: 75929 - RNA, 22 nt, Homo sapiens
ucacagcggucgaacuaauuug

SEQ ID NO: 75930 - RNA, 22 nt, Homo sapiens
uccauaguugcacucuggagcc

SEQ ID NO: 75931 - RNA, 22 nt, Homo sapiens
ugaauguacuuaacacuggauu

SEQ ID NO: 75932 - RNA, 22 nt, Homo sapiens
aauggcaucuacguuaaauguc

SEQ ID NO: 75933 - RNA, 22 nt, Homo sapiens
aauguguuuugaaaucaggaag

SEQ ID NO: 75934 - RNA, 22 nt, Homo sapiens
aaucacagccagcuuccgcuau

SEQ ID NO: 75935 - RNA, 22 nt, Homo sapiens
acagucauagcagccuuuguua

SEQ ID NO: 75936 - RNA, 22 nt, Homo sapiens
uuuuccagugggacucccauua

SEQ ID NO: 75937 - RNA, 22 nt, Homo sapiens
agagagcuuuugguugcccuaa

SEQ ID NO: 75938 - RNA, 23 nt, Homo sapiens
acugcaauuacguuugcaccaac

SEQ ID NO: 75939 - RNA, 22 nt, Homo sapiens
acugcaaugucgaauagagaug

SEQ ID NO: 75940 - RNA, 21 nt, Homo sapiens
acugauguuugaaauucgcug

SEQ ID NO: 75941 - RNA, 22 nt, Homo sapiens
augccucugacaauuggauucu

SEQ ID NO: 75942 - RNA, 22 nt, Homo sapiens
augaccaaugggcagagcuaga

SEQ ID NO: 75943 - RNA, 22 nt, Homo sapiens
auacccucugggugguuaguug

SEQ ID NO: 75944 - RNA, 22 nt, Homo sapiens
auaaaugcauugagaacugcug

SEQ ID NO: 75945 - RNA, 22 nt, Homo sapiens
auacugucucuugcuccugccc

SEQ ID NO: 75946 - RNA, 22 nt, Homo sapiens
agcugguucuuugccuuguaga

SEQ ID NO: 75947 - RNA, 22 nt, Homo sapiens
cacaggccugucucuuucuaac

SEQ ID NO: 75948 - RNA, 22 nt, Homo sapiens
cacauagucccugcuaaucuuc

SEQ ID NO: 75949 - RNA, 23 nt, Homo sapiens
auugaacacuuucauaugugagg

SEQ ID NO: 75950 - RNA, 22 nt, Homo sapiens
auucccuuagcugccucagccu

SEQ ID NO: 75951 - RNA, 22 nt, Homo sapiens
auuaaguugugccugaaaacuu

SEQ ID NO: 75952 - RNA, 22 nt, Homo sapiens
auuaaguuaggauuuugagaua

SEQ ID NO: 75953 - RNA, 22 nt, Homo sapiens
caucacuuuuccuuuuacagau

SEQ ID NO: 75954 - RNA, 22 nt, Homo sapiens
caucacagcaaguagggagugg

SEQ ID NO: 75955 - RNA, 22 nt, Homo sapiens
cauaguacuugcauaguacuau

SEQ ID NO: 75956 - RNA, 20 nt, Homo sapiens
cagggcaaugaggagguaaa

SEQ ID NO: 75957 - RNA, 22 nt, Homo sapiens
cuaagauugucuuaguguguug

SEQ ID NO: 75958 - RNA, 19 nt, Homo sapiens
ccuuugguuuccaugacau

SEQ ID NO: 75959 - RNA, 22 nt, Homo sapiens
cauugucccucaaugucuauga

SEQ ID NO: 75960 - RNA, 22 nt, Homo sapiens
gagaacagaagcauuccuaauu

SEQ ID NO: 75961 - RNA, 18 nt, Homo sapiens
cuuugguccccgcacccu

SEQ ID NO: 75962 - RNA, 22 nt, Homo sapiens
gaucacaugggagaaugagagu

SEQ ID NO: 75963 - RNA, 22 nt, Homo sapiens
cugucuggaggccugcaaauaa

SEQ ID NO: 75964 - RNA, 22 nt, Homo sapiens
cuguuugguaaggaugccucag

SEQ ID NO: 75965 - RNA, 22 nt, Homo sapiens
ugagcugagaaaugcagcagcu

SEQ ID NO: 75966 - RNA, 22 nt, Homo sapiens
ugagcaaaauuuuggacauaga

SEQ ID NO: 75967 - RNA, 23 nt, Homo sapiens
ugagauuauaaucuuuuacuucu

SEQ ID NO: 75968 - RNA, 22 nt, Homo sapiens
ugagauuaucguaauguaucuc

SEQ ID NO: 75969 - RNA, 18 nt, Homo sapiens
ugauaucaucacaauuga

SEQ ID NO: 75970 - RNA, 22 nt, Homo sapiens
ugccauagagauuuguggaacu

SEQ ID NO: 75971 - RNA, 22 nt, Homo sapiens
aacagacugucacauaaaauug

SEQ ID NO: 75972 - RNA, 22 nt, Homo sapiens
ucuuuggaggcgaucuguuuga

SEQ ID NO: 75973 - RNA, 21 nt, Homo sapiens
ucucauugugguuuuaauugg

SEQ ID NO: 75974 - RNA, 18 nt, Homo sapiens
ugacauugagcugagaaa

SEQ ID NO: 75975 - RNA, 22 nt, Homo sapiens
ugacauuacagucacuugcugu

SEQ ID NO: 75976 - RNA, 22 nt, Homo sapiens
ugaaguaauguuuuauucuauu

SEQ ID NO: 75977 - RNA, 22 nt, Homo sapiens
ucuuugguagaagcuauuuuau

SEQ ID NO: 75978 - RNA, 22 nt, Homo sapiens
ugaacacaucuccugguaccug

SEQ ID NO: 75979 - RNA, 22 nt, Homo sapiens
uauuugguuacuugaauagcua

SEQ ID NO: 75980 - RNA, 22 nt, Homo sapiens
ucauauugcgguucauugacuu

SEQ ID NO: 75981 - RNA, 22 nt, Homo sapiens
uccacuuuugugcugaauugga

SEQ ID NO: 75982 - RNA, 22 nt, Homo sapiens
uccauaguacuagaaacugacc

SEQ ID NO: 75983 - RNA, 18 nt, Homo sapiens
uccaguuuucccagcauc

SEQ ID NO: 75984 - RNA, 22 nt, Homo sapiens
uuugagcauggaaauggcauga

SEQ ID NO: 75985 - RNA, 22 nt, Homo sapiens
uuugauacuggguguggacaaa

SEQ ID NO: 75986 - RNA, 22 nt, Homo sapiens
uuugcacuuuaauauaauguga

SEQ ID NO: 75987 - RNA, 20 nt, Homo sapiens
uuucaguacuuucuacuggc

SEQ ID NO: 75988 - RNA, 22 nt, Homo sapiens
uugugguuuucagcuuauauau

SEQ ID NO: 75989 - RNA, 22 nt, Homo sapiens
uugugcuuuugagcugagauga

SEQ ID NO: 75990 - RNA, 22 nt, Homo sapiens
uugguucucuuuauaugcugga

SEQ ID NO: 75991 - RNA, 22 nt, Homo sapiens
uugguccauuacauugaugaca

SEQ ID NO: 75992 - RNA, 19 nt, Homo sapiens
uugcaguauccuauauguu

SEQ ID NO: 75993 - RNA, 22 nt, Homo sapiens
uugcauaauaagagggauacgu

SEQ ID NO: 75994 - RNA, 22 nt, Homo sapiens
uugaaguaguacuuuauuauag

SEQ ID NO: 75995 - RNA, 22 nt, Homo sapiens
ugugucuugcuggugccugcau

SEQ ID NO: 75996 - RNA, 22 nt, Homo sapiens
uguguuugauaaguccauaguu

SEQ ID NO: 75997 - RNA, 22 nt, Homo sapiens
ugugucuugaauuuuguaugua

SEQ ID NO: 75998 - RNA, 22 nt, Homo sapiens
uuaaaugcuagaauuuucuuug

SEQ ID NO: 75999 - RNA, 22 nt, Homo sapiens
uucacagcuuaauaaggcucag

SEQ ID NO: 76000 - RNA, 22 nt, Homo sapiens
uuccauuuguucggugucgcca

SEQ ID NO: 76001 - RNA, 22 nt, Homo sapiens
gauuguguucauaggcauguua

SEQ ID NO: 76002 - RNA, 19 nt, Homo sapiens
gaugcaaugcacugagguc

SEQ ID NO: 76003 - RNA, 22 nt, Homo sapiens
gaaucacaguuauuagagcagc

SEQ ID NO: 76004 - RNA, 22 nt, Homo sapiens
gaaucaauugaucuaugugucu

SEQ ID NO: 76005 - RNA, 22 nt, Homo sapiens
cacucaguuugugguacuuugu

SEQ ID NO: 76006 - RNA, 22 nt, Homo sapiens
auuggcuuuauacauaagaaua

SEQ ID NO: 76007 - RNA, 22 nt, Homo sapiens
auugcugagacauugcuaaucu

SEQ ID NO: 76008 - RNA, 22 nt, Homo sapiens
auuacuuugcaccaaccuaaua

SEQ ID NO: 76009 - RNA, 22 nt, Homo sapiens
cucugguuaaggcugaacuaua

SEQ ID NO: 76010 - RNA, 22 nt, Homo sapiens
cccaguuuugccacuuacuagc

SEQ ID NO: 76011 - RNA, 22 nt, Homo sapiens
guauggaauuugugaccuuaua

SEQ ID NO: 76012 - RNA, 22 nt, Homo sapiens
guccaguuguuuucugagguug

SEQ ID NO: 76013 - RNA, 22 nt, Homo sapiens
uauugaauuugagcugucucuu

SEQ ID NO: 76014 - RNA, 22 nt, Homo sapiens
uauugauuaauugugauuaggc

SEQ ID NO: 76015 - RNA, 22 nt, Homo sapiens
uauuugauugacuuuagcagga

SEQ ID NO: 76016 - RNA, 22 nt, Homo sapiens
uauuguccacuuugcacugugu

SEQ ID NO: 76017 - RNA, 22 nt, Homo sapiens
uauggaaaucuuaccuuauggu

SEQ ID NO: 76018 - RNA, 22 nt, Homo sapiens
uagaucacucaggcaauaaaag

SEQ ID NO: 76019 - RNA, 22 nt, Homo sapiens
uaucacagaggguauccuagag

SEQ ID NO: 76020 - RNA, 22 nt, Homo sapiens
uaucacagguggacugcacacc

SEQ ID NO: 76021 - RNA, 22 nt, Homo sapiens
uaucacaguaucuagcacagug

SEQ ID NO: 76022 - RNA, 22 nt, Homo sapiens
uaucacaguugcauauuuaagg

SEQ ID NO: 76023 - RNA, 22 nt, Homo sapiens
uaagggcacuaaucccauuuau

SEQ ID NO: 76024 - RNA, 22 nt, Homo sapiens
uaagugaauguuggcuacugaa

SEQ ID NO: 76025 - RNA, 22 nt, Homo sapiens
uaagugaauauggacaguuagc

SEQ ID NO: 76026 - RNA, 22 nt, Homo sapiens
agucacagugaccuugucugac

SEQ ID NO: 76027 - RNA, 22 nt, Homo sapiens
auagcaaugccccacuccuugg

SEQ ID NO: 76028 - RNA, 22 nt, Homo sapiens
augugcaugcuguucugccaga

SEQ ID NO: 76029 - RNA, 22 nt, Homo sapiens
augugaaugugaucggauaguc

SEQ ID NO: 76030 - RNA, 22 nt, Homo sapiens
auggaaacauaagaguauagau

SEQ ID NO: 76031 - RNA, 22 nt, Homo sapiens
acaaagcgcuucucuuuagagu

SEQ ID NO: 76032 - RNA, 22 nt, Homo sapiens
aauugaaugcagaugccaggga

SEQ ID NO: 76033 - RNA, 22 nt, Homo sapiens
aauugaaugauaugggacauuu

SEQ ID NO: 76034 - RNA, 19 nt, Homo sapiens
acagugucucuauaaugau

SEQ ID NO: 76035 - RNA, 22 nt, Homo sapiens
acugguuguuuaacugaauuga

SEQ ID NO: 76036 - RNA, 22 nt, Homo sapiens
aaaugcauugagggaaaaggca

SEQ ID NO: 76037 - RNA, 22 nt, Homo sapiens
aaaugcagucuuuguucugggc

SEQ ID NO: 76038 - RNA, 22 nt, Influenza B virus (B/Memphis/12/97)
guauugaagggaggaggagaaa

SEQ ID NO: 76039 - RNA, 22 nt, Influenza B virus (B/Memphis/12/97)
ccauggcucuuuacaauauggc

SEQ ID NO: 76040 - RNA, 22 nt, Homo sapiens
cuacaguucuuaauuaaguagu

SEQ ID NO: 76041 - RNA, 22 nt, Homo sapiens
uuauuagguugguggaaaagua

SEQ ID NO: 76042 - RNA, 22 nt, Homo sapiens
cagacaugucuuguggccgugg

SEQ ID NO: 76043 - RNA, 21 nt, Homo sapiens
ucaucaagcuguagacaugau

SEQ ID NO: 76044 - RNA, 22 nt, Homo sapiens
auguaguugcucugccuguuuu

SEQ ID NO: 76045 - RNA, 22 nt, Homo sapiens
uugagggaggccucaguuuaca

SEQ ID NO: 76046 - RNA, 22 nt, Homo sapiens
uacagcuaugugcaugcaugcu

SEQ ID NO: 76047 - RNA, 23 nt, Homo sapiens
agagugcaauggugccaucucgg

SEQ ID NO: 76048 - RNA, 22 nt, Homo sapiens
guggaaugaaaacucucucaca

SEQ ID NO: 76049 - RNA, 22 nt, Homo sapiens
gaagaucacacuguagaucuau

SEQ ID NO: 76050 - RNA, 22 nt, Homo sapiens
ucccaguggucuugaaacaggg

SEQ ID NO: 76051 - RNA, 20 nt, Homo sapiens
cuugaagacuaugcugcuga

SEQ ID NO: 76052 - RNA, 22 nt, Homo sapiens
caugugcaugcuuucuuaugug

SEQ ID NO: 76053 - RNA, 22 nt, Homo sapiens
cugcaagaugcauaggaauuuu

SEQ ID NO: 76054 - RNA, 22 nt, Homo sapiens
aaugucaugaguccaaccagaa

SEQ ID NO: 76055 - RNA, 22 nt, Homo sapiens
gugucaguggggagugaucuuc

SEQ ID NO: 76056 - RNA, 22 nt, Homo sapiens
cucaguuuugccuuguuuaagg

SEQ ID NO: 76057 - RNA, 22 nt, Homo sapiens
ucagauugaugcauacuuaaau

SEQ ID NO: 76058 - RNA, 19 nt, Homo sapiens
uuacauccauugcauuuca

SEQ ID NO: 76059 - RNA, 23 nt, Homo sapiens
auaagccuuuucuuucugcccca

SEQ ID NO: 76060 - RNA, 22 nt, Homo sapiens
aagcuggagugcaguggugcga

SEQ ID NO: 76061 - RNA, 22 nt, Homo sapiens
uaccagugaauuccaggggcua

SEQ ID NO: 76062 - RNA, 22 nt, Homo sapiens
ucugacaaugaacaaucuauag

SEQ ID NO: 76063 - RNA, 22 nt, Homo sapiens
ggaaugggauuugaagucuggc

SEQ ID NO: 76064 - RNA, 22 nt, Homo sapiens
uucacagugugaucuaugggca

SEQ ID NO: 76065 - RNA, 21 nt, Homo sapiens
uggaauguucugacuucaggg

SEQ ID NO: 76066 - RNA, 22 nt, Homo sapiens
agcagcaauuuuguaugguuua

SEQ ID NO: 76067 - RNA, 22 nt, Homo sapiens
cacacugucuucaauggguggu

SEQ ID NO: 76068 - RNA, 22 nt, Homo sapiens
ugaaacacaccuccucuccauc

SEQ ID NO: 76069 - RNA, 22 nt, Homo sapiens
acugcacuccagccuccugggu

SEQ ID NO: 76070 - RNA, 22 nt, Homo sapiens
gagaaugagauuaugguuacau

SEQ ID NO: 76071 - RNA, 22 nt, Homo sapiens
uucuggccccucccaaucucau

SEQ ID NO: 76072 - RNA, 22 nt, Homo sapiens
ucauccauacaguuagcaaagg

SEQ ID NO: 76073 - RNA, 22 nt, Homo sapiens
gagcugaauugcugccauuugc

SEQ ID NO: 76074 - RNA, 22 nt, Homo sapiens
cagagaacauucagagcuguag

SEQ ID NO: 76075 - RNA, 22 nt, Homo sapiens
augugcacaugcuuacauguga

SEQ ID NO: 76076 - RNA, 22 nt, Homo sapiens
cugacauuguugaucacagcca

SEQ ID NO: 76077 - RNA, 22 nt, Homo sapiens
augacauuccacagccguagag

SEQ ID NO: 76078 - RNA, 20 nt, Homo sapiens
cagucaugaagaacugugag

SEQ ID NO: 76079 - RNA, 22 nt, Homo sapiens
acacagucaaauccacuuggcu

SEQ ID NO: 76080 - RNA, 22 nt, Homo sapiens
cacugggccaucacuuaauauu

SEQ ID NO: 76081 - RNA, 22 nt, Homo sapiens
acugcacuccagccugccgaca

SEQ ID NO: 76082 - RNA, 22 nt, Homo sapiens
ugggaagaugcugcuucuuccu

SEQ ID NO: 76083 - RNA, 21 nt, Homo sapiens
gucacuggggcuggauaauuc

SEQ ID NO: 76084 - RNA, 22 nt, Homo sapiens
cugugguuacguucuuugugcu

SEQ ID NO: 76085 - RNA, 22 nt, Homo sapiens
ucugucacugguggacgaucac

SEQ ID NO: 76086 - RNA, 22 nt, Homo sapiens
uggaaguaaucaugagguagca

SEQ ID NO: 76087 - RNA, 22 nt, Homo sapiens
ugcuggcguuacucuccaucag

SEQ ID NO: 76088 - RNA, 22 nt, Homo sapiens
augaaaucuuuggcagaucuua

SEQ ID NO: 76089 - RNA, 22 nt, Homo sapiens
aauacuuccaaaucuagucauu

SEQ ID NO: 76090 - RNA, 22 nt, Homo sapiens
aacacggcccgcagagcaagcu

SEQ ID NO: 76091 - RNA, 22 nt, Homo sapiens
uauugaacgugggauauugaag

SEQ ID NO: 76092 - RNA, 19 nt, Homo sapiens
uagcagcaugauuuauaau

SEQ ID NO: 76093 - RNA, 22 nt, Homo sapiens
uugacauugcuguaguguccag

SEQ ID NO: 76094 - RNA, 21 nt, Homo sapiens
uugagaagaauuagcucuucc

SEQ ID NO: 76095 - RNA, 22 nt, Homo sapiens
aagauauguuaguuauaaacuc

SEQ ID NO: 76096 - RNA, 22 nt, Homo sapiens
auugcucuuagaaauauuucuu

SEQ ID NO: 76097 - RNA, 22 nt, Homo sapiens
uucagagagggagggauaccua

SEQ ID NO: 76098 - RNA, 22 nt, Homo sapiens
auauuggccuaaaauucucuuu

SEQ ID NO: 76099 - RNA, 22 nt, Homo sapiens
ucacuguggaacucaaaaagcu

SEQ ID NO: 76100 - RNA, 22 nt, Homo sapiens
caugugcaugagcacauacgug

SEQ ID NO: 76101 - RNA, 22 nt, Homo sapiens
gcagugugauguuuuaaucuau

SEQ ID NO: 76102 - RNA, 21 nt, Homo sapiens
ugcucaugaguaaugcaguga

SEQ ID NO: 76103 - RNA, 22 nt, Homo sapiens
ucaacacaguuaaauggggaaa

SEQ ID NO: 76104 - RNA, 22 nt, Homo sapiens
acacuguuuuguggagaaugua

SEQ ID NO: 76105 - RNA, 18 nt, Homo sapiens
accuucauuccuuugccu

SEQ ID NO: 76106 - RNA, 22 nt, Homo sapiens
cucugacagugguuagcacugu

SEQ ID NO: 76107 - RNA, 22 nt, Homo sapiens
uagcagcaucucuggcuucuac

SEQ ID NO: 76108 - RNA, 22 nt, Homo sapiens
gcaaaaaguagugcugguuagg

SEQ ID NO: 76109 - RNA, 22 nt, Homo sapiens
gagaacauacggcauuugguuu

SEQ ID NO: 76110 - RNA, 22 nt, Homo sapiens
cuuuacaguuggacucacgagg

SEQ ID NO: 76111 - RNA, 22 nt, Homo sapiens
caggugcauuggcugacaccug

SEQ ID NO: 76112 - RNA, 22 nt, Homo sapiens
gauagugaaccaagggguaauu

SEQ ID NO: 76113 - RNA, 22 nt, Homo sapiens
augagauauuuuauaagaucau

SEQ ID NO: 76114 - RNA, 22 nt, Homo sapiens
acugcacuccagccucccgucu

SEQ ID NO: 76115 - RNA, 22 nt, Homo sapiens
acagugcuuggcacacaguaau

SEQ ID NO: 76116 - RNA, 22 nt, Homo sapiens
agacagcugguagcacuuccug

SEQ ID NO: 76117 - RNA, 22 nt, Homo sapiens
ugugaacauuuuguauauauua

SEQ ID NO: 76118 - RNA, 18 nt, Homo sapiens
acugcacuccauccuagg

SEQ ID NO: 76119 - RNA, 21 nt, Homo sapiens
aagaaagcuggacuugccgcu

SEQ ID NO: 76120 - RNA, 21 nt, Homo sapiens
uuuacuguggacccauugcuu

SEQ ID NO: 76121 - RNA, 22 nt, Homo sapiens
aggugaaugcucacauucuaau

SEQ ID NO: 76122 - RNA, 22 nt, Homo sapiens
uuaugucacuguucagucuccc

SEQ ID NO: 76123 - RNA, 19 nt, Homo sapiens
caccagugcaugcuacuau

SEQ ID NO: 76124 - RNA, 22 nt, Homo sapiens
aguaucacaggcaaaacagaau

SEQ ID NO: 76125 - RNA, 22 nt, Homo sapiens
cuuuguguggacauuucaggca

SEQ ID NO: 76126 - RNA, 22 nt, Homo sapiens
auugucauuuucugagaaguaa

SEQ ID NO: 76127 - RNA, 22 nt, Homo sapiens
agaaugucagcuggauucagcu

SEQ ID NO: 76128 - RNA, 22 nt, Homo sapiens
uugcuagaugaaaaugguaccu

SEQ ID NO: 76129 - RNA, 18 nt, Homo sapiens
gauaacaguggacuaugc

SEQ ID NO: 76130 - RNA, 22 nt, Homo sapiens
uucccagucaaacgaaggacuu

SEQ ID NO: 76131 - RNA, 22 nt, Homo sapiens
uagaacauuccaggugauguug

SEQ ID NO: 76132 - RNA, 22 nt, Homo sapiens
cuggcaaauguuuucuguaaag

SEQ ID NO: 76133 - RNA, 22 nt, Homo sapiens
augcauaugucuuuauaguggc

SEQ ID NO: 76134 - RNA, 22 nt, Homo sapiens
acugcacuucagccuuggcuac

SEQ ID NO: 76135 - RNA, 22 nt, Homo sapiens
uggaaugucagcuacaagaggg

SEQ ID NO: 76136 - RNA, 22 nt, Homo sapiens
aaugugcacuauuagggugaua

SEQ ID NO: 76137 - RNA, 21 nt, Homo sapiens
gugguucuagagaaacagaau

SEQ ID NO: 76138 - RNA, 22 nt, Homo sapiens
ggagugucagaaacaguguccu

SEQ ID NO: 76139 - RNA, 22 nt, Homo sapiens
ucauguguugcacugaggaccu

SEQ ID NO: 76140 - RNA, 21 nt, Homo sapiens
ucacaaugaacagcagcagaa

SEQ ID NO: 76141 - RNA, 22 nt, Homo sapiens
ucacagugcaggaucaguuaau

SEQ ID NO: 76142 - RNA, 22 nt, Homo sapiens
uggcuagaccugcauaacagcu

SEQ ID NO: 76143 - RNA, 22 nt, Homo sapiens
augacauugaugcucuggcugg

SEQ ID NO: 76144 - RNA, 22 nt, Homo sapiens
cugaauagucaacgauggacug

SEQ ID NO: 76145 - RNA, 22 nt, Homo sapiens
auggagacaaauaaaggagagu

SEQ ID NO: 76146 - RNA, 21 nt, Homo sapiens
uaucagagacauugagaggca

SEQ ID NO: 76147 - RNA, 22 nt, Homo sapiens
uucagcaaugacagccuauaua

SEQ ID NO: 76148 - RNA, 22 nt, Homo sapiens
gugaaauguguagaggaucugg

SEQ ID NO: 76149 - RNA, 22 nt, Homo sapiens
agugcaauaaggauguagaacu

SEQ ID NO: 76150 - RNA, 22 nt, Homo sapiens
cuuuguguaggugccucuggcu

SEQ ID NO: 76151 - RNA, 22 nt, Homo sapiens
aucucaguucaggcuggccaca

SEQ ID NO: 76152 - RNA, 22 nt, Homo sapiens
gcuuuguugauggugagucugu

SEQ ID NO: 76153 - RNA, 22 nt, Homo sapiens
acagauugcugggccccagccc

SEQ ID NO: 76154 - RNA, 22 nt, Homo sapiens
augugcuugagggaaaucaguu

SEQ ID NO: 76155 - RNA, 17 nt, Homo sapiens
guggaaugucaugucaa

SEQ ID NO: 76156 - RNA, 22 nt, Homo sapiens
aaugacuaagaugguacauuuu

SEQ ID NO: 76157 - RNA, 22 nt, Homo sapiens
gcaagaaucugggaguaaaauu

SEQ ID NO: 76158 - RNA, 22 nt, Homo sapiens
gagacggagucucgcucuguca

SEQ ID NO: 76159 - RNA, 22 nt, Homo sapiens
ugagcacauuuacaucaguucc

SEQ ID NO: 76160 - RNA, 22 nt, Homo sapiens
auagaaucaucugugcacuagu

SEQ ID NO: 76161 - RNA, 22 nt, Homo sapiens
gcaagaauggaacaggagagcc

SEQ ID NO: 76162 - RNA, 22 nt, Homo sapiens
ugggaagaagguuuacuugcca

SEQ ID NO: 76163 - RNA, 22 nt, Homo sapiens
gggaagauauaggcugggcacc

SEQ ID NO: 76164 - RNA, 22 nt, Homo sapiens
aucacuagaucauagguaaaca

SEQ ID NO: 76165 - RNA, 22 nt, Homo sapiens
aaucacaggucuuggcugcaug

SEQ ID NO: 76166 - RNA, 22 nt, Homo sapiens
uagaauguaaauuccaagggca

SEQ ID NO: 76167 - RNA, 22 nt, Homo sapiens
gucagugugauaucugcagggg

SEQ ID NO: 76168 - RNA, 22 nt, Homo sapiens
ugaaauguuaaacaaguggcuc

SEQ ID NO: 76169 - RNA, 17 nt, Homo sapiens
guggauagaacaaugaa

SEQ ID NO: 76170 - RNA, 20 nt, Homo sapiens
cuucacagaaguggaaucau

SEQ ID NO: 76171 - RNA, 18 nt, Homo sapiens
uuuguacuuuuucuaaug

SEQ ID NO: 76172 - RNA, 22 nt, Homo sapiens
uccuucauuugucaacucuagu

SEQ ID NO: 76173 - RNA, 22 nt, Homo sapiens
gugaacaagcaaaggcaggagg

SEQ ID NO: 76174 - RNA, 22 nt, Homo sapiens
agcaagauuguucccauuuucu

SEQ ID NO: 76175 - RNA, 22 nt, Homo sapiens
ugaaaugaucaguuugguuacu

SEQ ID NO: 76176 - RNA, 22 nt, Homo sapiens
ugucagcacaacucagguuccu

SEQ ID NO: 76177 - RNA, 22 nt, Homo sapiens
agugaacaaagaagugcagaua

SEQ ID NO: 76178 - RNA, 22 nt, Homo sapiens
uagcagcauaaauggacuaaga

SEQ ID NO: 76179 - RNA, 20 nt, Homo sapiens
acugcacuccaggcugccca

SEQ ID NO: 76180 - RNA, 22 nt, Homo sapiens
cuguauguuucuaugaauguga

SEQ ID NO: 76181 - RNA, 22 nt, Homo sapiens
uuggcagcacgcaguccagagg

SEQ ID NO: 76182 - RNA, 22 nt, Homo sapiens
cccagugaagagaaccuuacga

SEQ ID NO: 76183 - RNA, 20 nt, Homo sapiens
ucaaagacauggcugucaga

SEQ ID NO: 76184 - RNA, 22 nt, Homo sapiens
uagcagcagugguguauuuaga

SEQ ID NO: 76185 - RNA, 22 nt, Homo sapiens
auaaauaguaguugugguggcc

SEQ ID NO: 76186 - RNA, 22 nt, Homo sapiens
agagugaagcuuuuuauauucu

SEQ ID NO: 76187 - RNA, 22 nt, Homo sapiens
uuaaugugaaucaggaugcauu

SEQ ID NO: 76188 - RNA, 22 nt, Homo sapiens
ugucaucauuccaucagggcuu

SEQ ID NO: 76189 - RNA, 22 nt, Homo sapiens
agucauggaucacaguagccuc

SEQ ID NO: 76190 - RNA, 22 nt, Homo sapiens
gcaguguggguagagggcaaga

SEQ ID NO: 76191 - RNA, 22 nt, Homo sapiens
uuugggaaaugaaguugguaga

SEQ ID NO: 76192 - RNA, 22 nt, Homo sapiens
uguaguuugaaagcucccucug

SEQ ID NO: 76193 - RNA, 22 nt, Homo sapiens
uagcagcaaagcaggaucugcu

SEQ ID NO: 76194 - RNA, 22 nt, Homo sapiens
ugugaugugaugagaaguuccu

SEQ ID NO: 76195 - RNA, 22 nt, Homo sapiens
cucaaagugcuaagauuaggcu

SEQ ID NO: 76196 - RNA, 22 nt, Homo sapiens
cugugcauguaugcgugaguuc

SEQ ID NO: 76197 - RNA, 22 nt, Homo sapiens
accuucauuguugccaugucca

SEQ ID NO: 76198 - RNA, 22 nt, Homo sapiens
cuagcagcaugagaauggacca

SEQ ID NO: 76199 - RNA, 22 nt, Homo sapiens
uaacugcaaccucugccugcug

SEQ ID NO: 76200 - RNA, 22 nt, Homo sapiens
augggcacugauguauucugug

SEQ ID NO: 76201 - RNA, 22 nt, Homo sapiens
uagacacuagauaugugacuga

SEQ ID NO: 76202 - RNA, 22 nt, Homo sapiens
gcagugugaucacagcuuacug

SEQ ID NO: 76203 - RNA, 22 nt, Homo sapiens
caucacaguacuaaucgucaua

SEQ ID NO: 76204 - RNA, 22 nt, Homo sapiens
ugggaaugaaauuacauagcuu

SEQ ID NO: 76205 - RNA, 22 nt, Homo sapiens
ugagccaaugauuugaauagag

SEQ ID NO: 76206 - RNA, 22 nt, Homo sapiens
uuaugucauuuuuggauguuaa

SEQ ID NO: 76207 - RNA, 22 nt, Homo sapiens
uuaaugaacuuuauuuuguaga

SEQ ID NO: 76208 - RNA, 22 nt, Homo sapiens
ucagaccauuucauuacagacu

SEQ ID NO: 76209 - RNA, 20 nt, Homo sapiens
acugcacuucagccugcugg

SEQ ID NO: 76210 - RNA, 19 nt, Homo sapiens
acugcacuccaaccuccug

SEQ ID NO: 76211 - RNA, 22 nt, Homo sapiens
ugugauaguuggcuaaagcagu

SEQ ID NO: 76212 - RNA, 22 nt, Homo sapiens
acaguguguguguucaccuaga

SEQ ID NO: 76213 - RNA, 22 nt, Homo sapiens
aagcaucacauaauggaucaug

SEQ ID NO: 76214 - RNA, 22 nt, Homo sapiens
acugcacuccagccucgcaaca

SEQ ID NO: 76215 - RNA, 22 nt, Homo sapiens
uaaugcuccauggguuauuaaa

SEQ ID NO: 76216 - RNA, 22 nt, Homo sapiens
aacacuguuuccagucaugauc

SEQ ID NO: 76217 - RNA, 22 nt, Homo sapiens
uucacagucacccuucuccaug

SEQ ID NO: 76218 - RNA, 22 nt, Homo sapiens
uuauuagguuagugcaaaaguu

SEQ ID NO: 76219 - RNA, 22 nt, Homo sapiens
auuggcagaaaucuuuauagua

SEQ ID NO: 76220 - RNA, 22 nt, Homo sapiens
uacucugcaguaauuccagccc

SEQ ID NO: 76221 - RNA, 22 nt, Homo sapiens
ugaagugaagacucacagaagg

SEQ ID NO: 76222 - RNA, 22 nt, Homo sapiens
uucugagguuauauucucucaa

SEQ ID NO: 76223 - RNA, 22 nt, Homo sapiens
uuuaauguuacaguauugguau

SEQ ID NO: 76224 - RNA, 22 nt, Homo sapiens
gugacauuuuuacugaugagag

SEQ ID NO: 76225 - RNA, 22 nt, Homo sapiens
uugcuucauucaacauugaggg

SEQ ID NO: 76226 - RNA, 19 nt, Homo sapiens
uuuuccccuuucuuaagac

SEQ ID NO: 76227 - RNA, 22 nt, Homo sapiens
cacagugaaugucaucauugcc

SEQ ID NO: 76228 - RNA, 22 nt, Homo sapiens
cagugucugcauuuggaacuca

SEQ ID NO: 76229 - RNA, 22 nt, Homo sapiens
cuacagaguaucuaaagaggua

SEQ ID NO: 76230 - RNA, 22 nt, Homo sapiens
caccagcuggcauugaauaccu

SEQ ID NO: 76231 - RNA, 22 nt, Homo sapiens
uagaaucuaacucgcaugaaaa

SEQ ID NO: 76232 - RNA, 22 nt, Homo sapiens
augugcagauguuacaaauugu

SEQ ID NO: 76233 - RNA, 22 nt, Homo sapiens
uacauccauccugcugggcagu

SEQ ID NO: 76234 - RNA, 22 nt, Homo sapiens
ugucacugugcagucaugcauu

SEQ ID NO: 76235 - RNA, 22 nt, Homo sapiens
ggaagacaguguggugauuccu

SEQ ID NO: 76236 - RNA, 22 nt, Homo sapiens
ugaaauguugggugauggaauc

SEQ ID NO: 76237 - RNA, 20 nt, Homo sapiens
uggucaccuucaggagguuc

SEQ ID NO: 76238 - RNA, 23 nt, Homo sapiens
uggcauuuuaguuagcuucagug

SEQ ID NO: 76239 - RNA, 22 nt, Homo sapiens
ugugcaaggcucucaaccugug

SEQ ID NO: 76240 - RNA, 22 nt, Homo sapiens
uuuaacauuggaugagaucguc

SEQ ID NO: 76241 - RNA, 22 nt, Homo sapiens
ugcuagaagaucacacacauca

SEQ ID NO: 76242 - RNA, 22 nt, Homo sapiens
ugcuauguuuucccuccuuauc

SEQ ID NO: 76243 - RNA, 23 nt, Homo sapiens
ucacaguggcugcuuaauuguga

SEQ ID NO: 76244 - RNA, 22 nt, Homo sapiens
cuuuaguugucuccucaagggu

SEQ ID NO: 76245 - RNA, 18 nt, Homo sapiens
acaguguguaaggguucu

SEQ ID NO: 76246 - RNA, 22 nt, Homo sapiens
ugucaguuuuaacuagggaaua

SEQ ID NO: 76247 - RNA, 21 nt, Homo sapiens
aucagagacccaggcuuccuc

SEQ ID NO: 76248 - RNA, 22 nt, Homo sapiens
uaccagugucagcuuccugugu

SEQ ID NO: 76249 - RNA, 22 nt, Homo sapiens
uuccaguggacuacuucauccu

SEQ ID NO: 76250 - RNA, 22 nt, Homo sapiens
uguuuaguuaagacauagaauu

SEQ ID NO: 76251 - RNA, 22 nt, Homo sapiens
gggaagaaggagugguuuacuc

SEQ ID NO: 76252 - RNA, 22 nt, Homo sapiens
ugcugcuguuaucauuuuacca

SEQ ID NO: 76253 - RNA, 22 nt, Homo sapiens
gucaauguaucuagcuguauua

SEQ ID NO: 76254 - RNA, 20 nt, Homo sapiens
uucacugggcucucuguugg

SEQ ID NO: 76255 - RNA, 22 nt, Homo sapiens
uagcagcauuuuuguagaguau

SEQ ID NO: 76256 - RNA, 22 nt, Homo sapiens
uugagguagugucuuguucugu

SEQ ID NO: 76257 - RNA, 22 nt, Homo sapiens
augacauugaaaagcaagugga

SEQ ID NO: 76258 - RNA, 22 nt, Homo sapiens
ugaggcacucuagacuuauuca

SEQ ID NO: 76259 - RNA, 22 nt, Homo sapiens
uugacuucagagcugauucaag

SEQ ID NO: 76260 - RNA, 17 nt, Homo sapiens
aguacugucccauccuu

SEQ ID NO: 76261 - RNA, 22 nt, Homo sapiens
uuucugaggccucaccagaagc

SEQ ID NO: 76262 - RNA, 22 nt, Homo sapiens
ggacagugaaugccacuccucc

SEQ ID NO: 76263 - RNA, 22 nt, Homo sapiens
cacagcuaacaacuguuucuuc

SEQ ID NO: 76264 - RNA, 23 nt, Homo sapiens
cuuuguccccacccaaaucucau

SEQ ID NO: 76265 - RNA, 22 nt, Homo sapiens
uaacauucacaugcugcaaaaa

SEQ ID NO: 76266 - RNA, 22 nt, Homo sapiens
uaucacagguggacugcacacc

SEQ ID NO: 76267 - RNA, 22 nt, Homo sapiens
ugccaaggagucagucccuaga

SEQ ID NO: 76268 - RNA, 22 nt, Homo sapiens
guuaggcagugugguauagcag

SEQ ID NO: 76269 - RNA, 20 nt, Homo sapiens
acacugugcuaaggauuuuc

SEQ ID NO: 76270 - RNA, 21 nt, Homo sapiens
aaucacaguuguucugccuuc

SEQ ID NO: 76271 - RNA, 22 nt, Homo sapiens
ugucccaguuggguauugaauu

SEQ ID NO: 76272 - RNA, 22 nt, Homo sapiens
uacucugcagagaugcauaaca

SEQ ID NO: 76273 - RNA, 22 nt, Homo sapiens
uucacugugaauaaaggcuccc

SEQ ID NO: 76274 - RNA, 22 nt, Homo sapiens
uucuuagguuaaggcugagaga

SEQ ID NO: 76275 - RNA, 22 nt, Homo sapiens
uuacagauggcacacucaaggg

SEQ ID NO: 76276 - RNA, 20 nt, Homo sapiens
agcauugguuagaacaguag

SEQ ID NO: 76277 - RNA, 22 nt, Homo sapiens
aagcuggagugcaguggugcaa

SEQ ID NO: 76278 - RNA, 22 nt, Homo sapiens
ucacagaugaggcgagaggcag

SEQ ID NO: 76279 - RNA, 22 nt, Homo sapiens
ugcaccacugcacugccugggu

SEQ ID NO: 76280 - RNA, 22 nt, Homo sapiens
aucagaguggguuuuaaaagug

SEQ ID NO: 76281 - RNA, 22 nt, Homo sapiens
ccucacaaccuuuauugaagag

SEQ ID NO: 76282 - RNA, 22 nt, Homo sapiens
cacacugucuuucagaaugguu

SEQ ID NO: 76283 - RNA, 22 nt, Homo sapiens
gagaaugaacagacugccucuu

SEQ ID NO: 76284 - RNA, 17 nt, Homo sapiens
ugaggcacuaguaucac

SEQ ID NO: 76285 - RNA, 22 nt, Homo sapiens
uguaaugaucaaaucagaguaa

SEQ ID NO: 76286 - RNA, 17 nt, Homo sapiens
gacauaggaaaaggaga

SEQ ID NO: 76287 - RNA, 22 nt, Homo sapiens
gagaacauuaauaguuaauuuu

SEQ ID NO: 76288 - RNA, 22 nt, Homo sapiens
cugauaguucucuuuagaguuu

SEQ ID NO: 76289 - RNA, 22 nt, Homo sapiens
augaacagagccuugagaaccu

SEQ ID NO: 76290 - RNA, 22 nt, Homo sapiens
uuccaguaauagcacagcauug

SEQ ID NO: 76291 - RNA, 22 nt, Homo sapiens
aucccaguaaaaauggcuucua

SEQ ID NO: 76292 - RNA, 20 nt, Homo sapiens
ugggaacaugugguauaugg

SEQ ID NO: 76293 - RNA, 22 nt, Homo sapiens
cucacugggaccacucugaagu

SEQ ID NO: 76294 - RNA, 22 nt, Homo sapiens
cugaggaaguucuuuaacaguu

SEQ ID NO: 76295 - RNA, 22 nt, Homo sapiens
gaaucauuguuucuaaguuugu

SEQ ID NO: 76296 - RNA, 22 nt, Homo sapiens
uuauuagguuaaccuauagcua

SEQ ID NO: 76297 - RNA, 22 nt, Homo sapiens
aauggcacacaccuggucuaac

SEQ ID NO: 76298 - RNA, 22 nt, Homo sapiens
auguugcaguuuaauuauccua

SEQ ID NO: 76299 - RNA, 20 nt, Homo sapiens
uagcagcagacagagggagg

SEQ ID NO: 76300 - RNA, 22 nt, Homo sapiens
cucuuugaugugaaccgugguu

SEQ ID NO: 76301 - RNA, 22 nt, Homo sapiens
uaacuccauuuggacucaguau

SEQ ID NO: 76302 - RNA, 22 nt, Homo sapiens
cugugcauaucuuggacugugu

SEQ ID NO: 76303 - RNA, 19 nt, Homo sapiens
augacauuuggggguggac

SEQ ID NO: 76304 - RNA, 22 nt, Homo sapiens
uugacaaugcacugugcuaagu

SEQ ID NO: 76305 - RNA, 22 nt, Homo sapiens
caaugcauuauucucccacuuc

SEQ ID NO: 76306 - RNA, 22 nt, Homo sapiens
augacugucagggcagucauug

SEQ ID NO: 76307 - RNA, 22 nt, Homo sapiens
gcaaaguaauuguuguuuuugc

SEQ ID NO: 76308 - RNA, 22 nt, Homo sapiens
acugcacugucaaccuccuggg

SEQ ID NO: 76309 - RNA, 22 nt, Homo sapiens
uaaagcacuuuuuucugcaugg

SEQ ID NO: 76310 - RNA, 22 nt, Homo sapiens
uacaguacagugacaccauuau

SEQ ID NO: 76311 - RNA, 22 nt, Homo sapiens
gagacggagucucgcucugucg

SEQ ID NO: 76312 - RNA, 22 nt, Homo sapiens
aucccaguucagccucugacac

SEQ ID NO: 76313 - RNA, 22 nt, Homo sapiens
aauguguuuugaaaucaggaag

SEQ ID NO: 76314 - RNA, 22 nt, Homo sapiens
gagaacauuuaagccacucagg

SEQ ID NO: 76315 - RNA, 22 nt, Homo sapiens
gagacggagucuugcucuguug

SEQ ID NO: 76316 - RNA, 22 nt, Homo sapiens
auugaacaugccauauguacca

SEQ ID NO: 76317 - RNA, 22 nt, Homo sapiens
uuugggaaugaguuuaucauuu

SEQ ID NO: 76318 - RNA, 22 nt, Homo sapiens
gggcaugaugucuuaugccuau

SEQ ID NO: 76319 - RNA, 22 nt, Homo sapiens
ggcagcauugccuuugcaguga

SEQ ID NO: 76320 - RNA, 22 nt, Homo sapiens
guggaagugucuggggccaggg

SEQ ID NO: 76321 - RNA, 22 nt, Homo sapiens
uuuaucuguuuaaaacuguuca

SEQ ID NO: 76322 - RNA, 22 nt, Homo sapiens
cuucaucugguuugugaacuuu

SEQ ID NO: 76323 - RNA, 22 nt, Homo sapiens
uccauaguacuagaaacugacc

SEQ ID NO: 76324 - RNA, 18 nt, Homo sapiens
cccagugacuuauggccu

SEQ ID NO: 76325 - RNA, 22 nt, Homo sapiens
caacucuguaggauccaggugg

SEQ ID NO: 76326 - RNA, 22 nt, Homo sapiens
aucacagaacuuugagcagaga

SEQ ID NO: 76327 - RNA, 22 nt, Homo sapiens
uuggcagcuguggaaucugggc

SEQ ID NO: 76328 - RNA, 22 nt, Homo sapiens
auuguguagucuuacugcuugc

SEQ ID NO: 76329 - RNA, 22 nt, Homo sapiens
agcaccacaauuuccugccuaa

SEQ ID NO: 76330 - RNA, 23 nt, Homo sapiens
ggaaugaaaccugguuaugauau

SEQ ID NO: 76331 - RNA, 22 nt, Homo sapiens
auuacuuugcaccaaccuaaua

SEQ ID NO: 76332 - RNA, 22 nt, Homo sapiens
cugugaagaaagucauugguag

SEQ ID NO: 76333 - RNA, 22 nt, Homo sapiens
uucaagucaacaagcacuugag

SEQ ID NO: 76334 - RNA, 22 nt, Homo sapiens
cugaauagagcacacugauggg

SEQ ID NO: 76335 - RNA, 22 nt, Homo sapiens
aagugaaugugcuggaauagcu

SEQ ID NO: 76336 - RNA, 23 nt, Homo sapiens
cagcuucauugaacauaacuccu

SEQ ID NO: 76337 - RNA, 23 nt, Homo sapiens
ugacaagagcgagacuuggucuc

SEQ ID NO: 76338 - RNA, 22 nt, Homo sapiens
uggucaccugaauuaugcaugu

SEQ ID NO: 76339 - RNA, 22 nt, Homo sapiens
augaaaacaugauuugccuguu

SEQ ID NO: 76340 - RNA, 22 nt, Homo sapiens
uuacaucaucacauuaguuugc

SEQ ID NO: 76341 - RNA, 22 nt, Homo sapiens
gggaagugugguuucuuuacag

SEQ ID NO: 76342 - RNA, 22 nt, Homo sapiens
gucuugaaggcugaguaccugu

SEQ ID NO: 76343 - RNA, 22 nt, Homo sapiens
ucacagucggugacuucuugcu

SEQ ID NO: 76344 - RNA, 22 nt, Homo sapiens
cuacucuggagagugacaauca

SEQ ID NO: 76345 - RNA, 22 nt, Homo sapiens
uugagagaaaaaauuuauuggu

SEQ ID NO: 76346 - RNA, 22 nt, Homo sapiens
gagauuauuuaaaaggugauuu

SEQ ID NO: 76347 - RNA, 22 nt, Homo sapiens
uauuccagcccuggugagccag

SEQ ID NO: 76348 - RNA, 22 nt, Homo sapiens
aagccagugugacaggaaacuu

SEQ ID NO: 76349 - RNA, 23 nt, Homo sapiens
ugcaccacuacacacucuugggu

SEQ ID NO: 76350 - RNA, 22 nt, Homo sapiens
ugucaguguacuguaagaauua

SEQ ID NO: 76351 - RNA, 22 nt, Homo sapiens
cucaugcugucuucugggguaa

SEQ ID NO: 76352 - RNA, 22 nt, Homo sapiens
acauaaagaagcaggacauugu

SEQ ID NO: 76353 - RNA, 22 nt, Homo sapiens
ugugaugguuuagcauuuucuu

SEQ ID NO: 76354 - RNA, 22 nt, Homo sapiens
uugacauaguuucugaaauaga

SEQ ID NO: 76355 - RNA, 22 nt, Homo sapiens
aauagcacuguagauggaggaa

SEQ ID NO: 76356 - RNA, 22 nt, Homo sapiens
auaagaagugaaccagacgucu

SEQ ID NO: 76357 - RNA, 22 nt, Homo sapiens
aagcugugucuugucagcuacc

SEQ ID NO: 76358 - RNA, 22 nt, Homo sapiens
cccaguuuugccacuuacuagc

SEQ ID NO: 76359 - RNA, 22 nt, Homo sapiens
cacacuguuuuccauggggguu

SEQ ID NO: 76360 - RNA, 22 nt, Homo sapiens
uugcuagagaugagggaugugu

SEQ ID NO: 76361 - RNA, 22 nt, Homo sapiens
aucacagcccuccucuuggaug

SEQ ID NO: 76362 - RNA, 22 nt, Homo sapiens
acugcacuccagccuccugaca

SEQ ID NO: 76363 - RNA, 22 nt, Homo sapiens
cacaguguuccagcuauuugaa

SEQ ID NO: 76364 - RNA, 22 nt, Homo sapiens
ugaaauacuuaauuucuccaug

SEQ ID NO: 76365 - RNA, 22 nt, Homo sapiens
gaaugaauguuuauccuuagau

SEQ ID NO: 76366 - RNA, 22 nt, Homo sapiens
gcaagaaugagaaggauuaauu

SEQ ID NO: 76367 - RNA, 22 nt, Homo sapiens
acugcacuccagccugcugaca

SEQ ID NO: 76368 - RNA, 22 nt, Homo sapiens
cacagucuugcaauauugagau

SEQ ID NO: 76369 - RNA, 22 nt, Homo sapiens
uucaaguagguaggaccacagg

SEQ ID NO: 76370 - RNA, 22 nt, Homo sapiens
ugaauagacacuaaagacugua

SEQ ID NO: 76371 - RNA, 22 nt, Homo sapiens
uugaagugaagaacaauaucac

SEQ ID NO: 76372 - RNA, 22 nt, Homo sapiens
cugucaucauuucuaugugcca

SEQ ID NO: 76373 - RNA, 22 nt, Homo sapiens
ugagaucuuggaggcuuuguga

SEQ ID NO: 76374 - RNA, 22 nt, Homo sapiens
ucaaagugacaaaguugcagca

SEQ ID NO: 76375 - RNA, 22 nt, Homo sapiens
ugucaggagcaaugauaaauuu

SEQ ID NO: 76376 - RNA, 22 nt, Homo sapiens
cucugagguuauucguaauauu

SEQ ID NO: 76377 - RNA, 22 nt, Homo sapiens
aucacuggucaugagagaagua

SEQ ID NO: 76378 - RNA, 21 nt, Homo sapiens
caugucacugcacucuagccu

SEQ ID NO: 76379 - RNA, 22 nt, Homo sapiens
gacacugucuucugcucuuaaa

SEQ ID NO: 76380 - RNA, 22 nt, Homo sapiens
ucaucagaaucccuuagggaug

SEQ ID NO: 76381 - RNA, 22 nt, Homo sapiens
agagaugaagauggggcucccg

SEQ ID NO: 76382 - RNA, 22 nt, Homo sapiens
uuccuugagucuuuuuccugag

SEQ ID NO: 76383 - RNA, 22 nt, Homo sapiens
aaaugucauggaguguuucccc

SEQ ID NO: 76384 - RNA, 22 nt, Homo sapiens
ugucaccauuuguaggugagga

SEQ ID NO: 76385 - RNA, 22 nt, Homo sapiens
uucacugggugugguggcucac

SEQ ID NO: 76386 - RNA, 18 nt, Homo sapiens
uguaaacuaccucaaccu

SEQ ID NO: 76387 - RNA, 23 nt, Homo sapiens
ugucaucaagaugaggucacacu

SEQ ID NO: 76388 - RNA, 22 nt, Homo sapiens
aagcuggauuuaguguggagca

SEQ ID NO: 76389 - RNA, 20 nt, Homo sapiens
acugcacuccagccuuccag

SEQ ID NO: 76390 - RNA, 22 nt, Homo sapiens
agaaugucaguauuggcuaaaa

SEQ ID NO: 76391 - RNA, 22 nt, Homo sapiens
agcauuaguugugaagccuuua

SEQ ID NO: 76392 - RNA, 20 nt, Homo sapiens
acccucuaggaugauuucuu

SEQ ID NO: 76393 - RNA, 22 nt, Homo sapiens
augaauacugcugcaaugaaca

SEQ ID NO: 76394 - RNA, 22 nt, Homo sapiens
ugucauguugguguacugcacc

SEQ ID NO: 76395 - RNA, 22 nt, Homo sapiens
gucauccaggcuggagugaagc

SEQ ID NO: 76396 - RNA, 22 nt, Homo sapiens
ccacaguugaaauuuugacugu

SEQ ID NO: 76397 - RNA, 22 nt, Homo sapiens
ucuaauguaaccugcaaauauu

SEQ ID NO: 76398 - RNA, 22 nt, Homo sapiens
uuuugcuugugaauagccacau

SEQ ID NO: 76399 - RNA, 22 nt, Homo sapiens
cauuugcacugagacucagcuu

SEQ ID NO: 76400 - RNA, 22 nt, Homo sapiens
uucacuguagccucagccucuu

SEQ ID NO: 76401 - RNA, 22 nt, Homo sapiens
auaaaugcaaugguauuuuuga

SEQ ID NO: 76402 - RNA, 22 nt, Homo sapiens
uuuaaugcgucucugaguuuug

SEQ ID NO: 76403 - RNA, 22 nt, Homo sapiens
acugcacuccagccugcccaac

SEQ ID NO: 76404 - RNA, 22 nt, Homo sapiens
ugucaaugggaauuuguuuuag

SEQ ID NO: 76405 - RNA, 22 nt, Homo sapiens
uggccaagagcacagauauugg

SEQ ID NO: 76406 - RNA, 22 nt, Homo sapiens
agcuaugucugaugccugauua

SEQ ID NO: 76407 - RNA, 22 nt, Homo sapiens
ugagguaugugaugucuuuuag

SEQ ID NO: 76408 - RNA, 22 nt, Homo sapiens
ugucauucaggaaauucuaagu

SEQ ID NO: 76409 - RNA, 21 nt, Homo sapiens
gaguggcuuuuguuucaccag

SEQ ID NO: 76410 - RNA, 22 nt, Homo sapiens
gucagcuuguccagagacucug

SEQ ID NO: 76411 - RNA, 22 nt, Homo sapiens
ugaauguccugacgcugcaguu

SEQ ID NO: 76412 - RNA, 22 nt, Homo sapiens
uccaguuuuguuaacauauggu

SEQ ID NO: 76413 - RNA, 22 nt, Homo sapiens
ugaaagacugaagaauaggcau

SEQ ID NO: 76414 - RNA, 19 nt, Homo sapiens
ugcagcaauguaaaagaca

SEQ ID NO: 76415 - RNA, 22 nt, Homo sapiens
cugaggguagaaggaucacuug

SEQ ID NO: 76416 - RNA, 22 nt, Homo sapiens
uacaagcaggaaaugguauaug

SEQ ID NO: 76417 - RNA, 22 nt, Homo sapiens
gucauggacaaggugugagcca

SEQ ID NO: 76418 - RNA, 20 nt, Homo sapiens
uggaaguaagaauauaggug

SEQ ID NO: 76419 - RNA, 22 nt, Homo sapiens
ggcagcaugggugccuuuguga

SEQ ID NO: 76420 - RNA, 22 nt, Homo sapiens
uaucagcacaguggguucaugg

SEQ ID NO: 76421 - RNA, 22 nt, Homo sapiens
auuaaucaggcaaugcuugcua

SEQ ID NO: 76422 - RNA, 22 nt, Homo sapiens
uaaagcacaaguaaagaauacu

SEQ ID NO: 76423 - RNA, 22 nt, Homo sapiens
auuaacaucuagaguuuuggug

SEQ ID NO: 76424 - RNA, 22 nt, Homo sapiens
auagagcuaccauagaauccag

SEQ ID NO: 76425 - RNA, 22 nt, Homo sapiens
uuagucaaguguacugugaaug

SEQ ID NO: 76426 - RNA, 18 nt, Homo sapiens
cagugcaauacaggagag

SEQ ID NO: 76427 - RNA, 22 nt, Homo sapiens
uuggccauaugacuugcuuugg

SEQ ID NO: 76428 - RNA, 22 nt, Homo sapiens
ugugcaaucagcuucauuacau

SEQ ID NO: 76429 - RNA, 21 nt, Homo sapiens
ugaaugucuaggcagaaguuu

SEQ ID NO: 76430 - RNA, 22 nt, Homo sapiens
uuuguacucccuuuagauaaaa

SEQ ID NO: 76431 - RNA, 18 nt, Homo sapiens
cuuaacauugggaugaua

SEQ ID NO: 76432 - RNA, 22 nt, Homo sapiens
cacacugucuucauuacuguag

SEQ ID NO: 76433 - RNA, 22 nt, Homo sapiens
gugcuauguuauccagcaagau

SEQ ID NO: 76434 - RNA, 22 nt, Homo sapiens
uggggcaaugaacauuuuugca

SEQ ID NO: 76435 - RNA, 22 nt, Homo sapiens
cuuugcaaauggccuuuccaag

SEQ ID NO: 76436 - RNA, 22 nt, Homo sapiens
aucucaguuaauuccaucuuuc

SEQ ID NO: 76437 - RNA, 22 nt, Homo sapiens
cugugcauggauuuuaagauug

SEQ ID NO: 76438 - RNA, 22 nt, Homo sapiens
ucugccacugucauugugugau

SEQ ID NO: 76439 - RNA, 22 nt, Homo sapiens
auugcacuccagccuuggggau

SEQ ID NO: 76440 - RNA, 22 nt, Homo sapiens
auguuagcaucaauauucauca

SEQ ID NO: 76441 - RNA, 22 nt, Homo sapiens
uaguagcaccucucaugagcuu

SEQ ID NO: 76442 - RNA, 22 nt, Homo sapiens
gacaguuucucaggcuuccuua

SEQ ID NO: 76443 - RNA, 22 nt, Homo sapiens
uuaauguaucuaucacaucaca

SEQ ID NO: 76444 - RNA, 18 nt, Homo sapiens
aaacagugucucuuucug

SEQ ID NO: 76445 - RNA, 22 nt, Homo sapiens
auugauaguuuaauaggaauug

SEQ ID NO: 76446 - RNA, 19 nt, Homo sapiens
augaguuaggggaaauuuc

SEQ ID NO: 76447 - RNA, 22 nt, Homo sapiens
guucaguuuuaaagggaaauug

SEQ ID NO: 76448 - RNA, 22 nt, Homo sapiens
uacucugcagccauaaaacaga

SEQ ID NO: 76449 - RNA, 22 nt, Homo sapiens
gucauggaggaugaauggccaa

SEQ ID NO: 76450 - RNA, 19 nt, Homo sapiens
caucacagagucuuccauu

SEQ ID NO: 76451 - RNA, 22 nt, Homo sapiens
uaacauagucauauacuugcuu

SEQ ID NO: 76452 - RNA, 22 nt, Homo sapiens
uacuagaguagugcagagggga

SEQ ID NO: 76453 - RNA, 22 nt, Homo sapiens
uuagaacaguguuugccucgcu

SEQ ID NO: 76454 - RNA, 22 nt, Homo sapiens
cuuugugugggccaagggcugg

SEQ ID NO: 76455 - RNA, 22 nt, Homo sapiens
ucagaguagaaacacuuccaua

SEQ ID NO: 76456 - RNA, 22 nt, Homo sapiens
uuggcagcauuccagccaagca

SEQ ID NO: 76457 - RNA, 22 nt, Homo sapiens
ugaaauacuuuggcucuuuguu

SEQ ID NO: 76458 - RNA, 22 nt, Homo sapiens
uaugccuuuuggcucaagaaac

SEQ ID NO: 76459 - RNA, 22 nt, Homo sapiens
uucuggccuccauuuuucuccu

SEQ ID NO: 76460 - RNA, 22 nt, Homo sapiens
agucaaaugcuuauguauaaag

SEQ ID NO: 76461 - RNA, 22 nt, Homo sapiens
acagugcuucugauaugaugcc

SEQ ID NO: 76462 - RNA, 22 nt, Homo sapiens
caaagcacuuggcuuggaagau

SEQ ID NO: 76463 - RNA, 22 nt, Homo sapiens
gugacauuauuucagcuacaug

SEQ ID NO: 76464 - RNA, 20 nt, Homo sapiens
ucacuggagcucauuugauu

SEQ ID NO: 76465 - RNA, 22 nt, Homo sapiens
agcuuuggauaccugcuguucc

SEQ ID NO: 76466 - RNA, 22 nt, Homo sapiens
agggaagugugcuaugcauuua

SEQ ID NO: 76467 - RNA, 22 nt, Homo sapiens
uugaggucuuugagcaaacgca

SEQ ID NO: 76468 - RNA, 22 nt, Homo sapiens
ugggaagauucuguguuuuucc

SEQ ID NO: 76469 - RNA, 22 nt, Homo sapiens
cucaguggauuagauaaugcac

SEQ ID NO: 76470 - RNA, 23 nt, Homo sapiens
ucugcggguguggacccuagugc

SEQ ID NO: 76471 - RNA, 22 nt, Homo sapiens
auaguacuauugcaguguuaua

SEQ ID NO: 76472 - RNA, 22 nt, Homo sapiens
uuagguuguuucuggucuuagg

SEQ ID NO: 76473 - RNA, 22 nt, Homo sapiens
auuguacuccagccuuggggac

SEQ ID NO: 76474 - RNA, 22 nt, Homo sapiens
ggcaagaaccagggauuugcgu

SEQ ID NO: 76475 - RNA, 22 nt, Homo sapiens
ggcuagaauagggauagaccuu

SEQ ID NO: 76476 - RNA, 22 nt, Homo sapiens
agcacagugguuaaguuucuua

SEQ ID NO: 76477 - RNA, 22 nt, Homo sapiens
ucauauguaugugcaauuuugu

SEQ ID NO: 76478 - RNA, 22 nt, Homo sapiens
agugucaggagacagguagcug

SEQ ID NO: 76479 - RNA, 22 nt, Homo sapiens
gucagcaucaccaugucuauga

SEQ ID NO: 76480 - RNA, 22 nt, Homo sapiens
ugauguguuuuguaguucaacu

SEQ ID NO: 76481 - RNA, 22 nt, Homo sapiens
auuagguagugagaugcugcug

SEQ ID NO: 76482 - RNA, 20 nt, Homo sapiens
augcaaacccugcuuugugg

SEQ ID NO: 76483 - RNA, 22 nt, Homo sapiens
augagauacuacaaaugaguuu

SEQ ID NO: 76484 - RNA, 22 nt, Homo sapiens
uggagaacauucauuugcaaga

SEQ ID NO: 76485 - RNA, 22 nt, Homo sapiens
cuagcugcacuuccugcuacug

SEQ ID NO: 76486 - RNA, 23 nt, Homo sapiens
auuccaguggcaauuggagaaac

SEQ ID NO: 76487 - RNA, 17 nt, Homo sapiens
auaugaauuuuggagau

SEQ ID NO: 76488 - RNA, 22 nt, Homo sapiens
ugucaguggacugugaaaggca

SEQ ID NO: 76489 - RNA, 22 nt, Homo sapiens
agccaguauuuccacagagugg

SEQ ID NO: 76490 - RNA, 22 nt, Homo sapiens
auguggcacuugacuuucucgc

SEQ ID NO: 76491 - RNA, 22 nt, Homo sapiens
agcuauauugaggaugccauuc

SEQ ID NO: 76492 - RNA, 22 nt, Homo sapiens
aauacagcacacagaugggucu

SEQ ID NO: 76493 - RNA, 22 nt, Homo sapiens
cugcuaagagaaugagacuuag

SEQ ID NO: 76494 - RNA, 22 nt, Homo sapiens
aucacugggagcagccauuaau

SEQ ID NO: 76495 - RNA, 22 nt, Homo sapiens
ugaaaugauuauaugguguuug

SEQ ID NO: 76496 - RNA, 22 nt, Homo sapiens
gugaagugugaccucagcaucu

SEQ ID NO: 76497 - RNA, 22 nt, Homo sapiens
ccauuucacucuuccugaagga

SEQ ID NO: 76498 - RNA, 22 nt, Homo sapiens
uagcagcaccccacucuacugg

SEQ ID NO: 76499 - RNA, 22 nt, Homo sapiens
agcaugacauauuguagagaaa

SEQ ID NO: 76500 - RNA, 22 nt, Homo sapiens
aagcuggauuucgcauccuguu

SEQ ID NO: 76501 - RNA, 22 nt, Homo sapiens
uggucaccuucuugcucugucu

SEQ ID NO: 76502 - RNA, 22 nt, Homo sapiens
auguggcauuucucauucauuu

SEQ ID NO: 76503 - RNA, 22 nt, Homo sapiens
agcagcauuaugauauaucuua

SEQ ID NO: 76504 - RNA, 22 nt, Homo sapiens
ugaaguguuuuuucaggcaugu

SEQ ID NO: 76505 - RNA, 22 nt, Homo sapiens
ucucaguguuaucuaucugccu

SEQ ID NO: 76506 - RNA, 22 nt, Homo sapiens
uuugagaaugcuaccagagaag

SEQ ID NO: 76507 - RNA, 22 nt, Homo sapiens
uuugcuuaaaguccuuguggga

SEQ ID NO: 76508 - RNA, 22 nt, Homo sapiens
uuugcacuuuaauauaauguga

SEQ ID NO: 76509 - RNA, 22 nt, Homo sapiens
uucacagcuuaauaaggcucag

SEQ ID NO: 76510 - RNA, 22 nt, Homo sapiens
uuauauguuucuguuuggaggc

SEQ ID NO: 76511 - RNA, 22 nt, Homo sapiens
uuauauguuacucccucuagca

SEQ ID NO: 76512 - RNA, 22 nt, Homo sapiens
uuagaguacaggggaaucaagg

SEQ ID NO: 76513 - RNA, 17 nt, Homo sapiens
uuagacagacauccugc

SEQ ID NO: 76514 - RNA, 22 nt, Homo sapiens
uuaaugaacuuuauuuuguaga

SEQ ID NO: 76515 - RNA, 22 nt, Homo sapiens
uguauuuguuguuaaauggaga

SEQ ID NO: 76516 - RNA, 22 nt, Homo sapiens
ugucucagugauuggcuuucug

SEQ ID NO: 76517 - RNA, 22 nt, Homo sapiens
uugguccauuacauugaugaca

SEQ ID NO: 76518 - RNA, 22 nt, Homo sapiens
uuggucaaaucugaugggagaa

SEQ ID NO: 76519 - RNA, 22 nt, Homo sapiens
uuuauggagagauauuuauggu

SEQ ID NO: 76520 - RNA, 22 nt, Homo sapiens
uugucucacuggaguuuaguaa

SEQ ID NO: 76521 - RNA, 22 nt, Homo sapiens
uugcagagucaguuauuuugcc

SEQ ID NO: 76522 - RNA, 22 nt, Homo sapiens
uugaaaucuuccacagcccaag

SEQ ID NO: 76523 - RNA, 19 nt, Homo sapiens
uucauacagugagagcagc

SEQ ID NO: 76524 - RNA, 22 nt, Homo sapiens
uugaaauguguaagcuccgaaa

SEQ ID NO: 76525 - RNA, 22 nt, Homo sapiens
uugaacuagaaccugcaaauuu

SEQ ID NO: 76526 - RNA, 22 nt, Homo sapiens
uugaaguaguacuuuauuauag

SEQ ID NO: 76527 - RNA, 22 nt, Homo sapiens
cuguuugguaaggaugccucag

SEQ ID NO: 76528 - RNA, 22 nt, Homo sapiens
cugucuggaggccugcaaauaa

SEQ ID NO: 76529 - RNA, 22 nt, Homo sapiens
cuguucaaauuguuugugaagu

SEQ ID NO: 76530 - RNA, 22 nt, Homo sapiens
cuauguaccuggaacuguauua

SEQ ID NO: 76531 - RNA, 22 nt, Homo sapiens
gaucacaugggagaaugagagu

SEQ ID NO: 76532 - RNA, 21 nt, Homo sapiens
cuuugguuucugacuugcaua

SEQ ID NO: 76533 - RNA, 22 nt, Homo sapiens
gagaacagaagcauuccuaauu

SEQ ID NO: 76534 - RNA, 22 nt, Homo sapiens
gagaccauuuacugccuacuua

SEQ ID NO: 76535 - RNA, 19 nt, Homo sapiens
ccuuugguuuccaugacau

SEQ ID NO: 76536 - RNA, 22 nt, Homo sapiens
cauaguacuugcauaguacuau

SEQ ID NO: 76537 - RNA, 22 nt, Homo sapiens
caucacuuuuccuuuuacagau

SEQ ID NO: 76538 - RNA, 22 nt, Homo sapiens
cagugcuuuaucaaguccucca

SEQ ID NO: 76539 - RNA, 22 nt, Homo sapiens
auuaaauguuggacguauacau

SEQ ID NO: 76540 - RNA, 22 nt, Homo sapiens
auucccuuagcugccucagccu

SEQ ID NO: 76541 - RNA, 22 nt, Homo sapiens
auuccauuuguuaucacacccg

SEQ ID NO: 76542 - RNA, 22 nt, Homo sapiens
augugcaugcuguucugccaga

SEQ ID NO: 76543 - RNA, 23 nt, Homo sapiens
auugaacacuuucauaugugagg

SEQ ID NO: 76544 - RNA, 22 nt, Homo sapiens
auugaacaugccauauguacca

SEQ ID NO: 76545 - RNA, 22 nt, Homo sapiens
cacauagucccugcuaaucuuc

SEQ ID NO: 76546 - RNA, 22 nt, Homo sapiens
cacagcacaggcaugaguguca

SEQ ID NO: 76547 - RNA, 22 nt, Homo sapiens
caaaggcuucugaaacugcaga

SEQ ID NO: 76548 - RNA, 22 nt, Homo sapiens
aguccaguguuaugaucaguag

SEQ ID NO: 76549 - RNA, 19 nt, Homo sapiens
agugagccaagauccuacc

SEQ ID NO: 76550 - RNA, 22 nt, Homo sapiens
auacugucucuugcuccugccc

SEQ ID NO: 76551 - RNA, 22 nt, Homo sapiens
auaggcaagaugagguuuuuau

SEQ ID NO: 76552 - RNA, 22 nt, Homo sapiens
augccucugacaauuggauucu

SEQ ID NO: 76553 - RNA, 22 nt, Homo sapiens
auggaaacauaagaguauagau

SEQ ID NO: 76554 - RNA, 21 nt, Homo sapiens
acugauguuugaaauucgcug

SEQ ID NO: 76555 - RNA, 22 nt, Homo sapiens
accauugcacuccaaccugggc

SEQ ID NO: 76556 - RNA, 22 nt, Homo sapiens
accauugcacuccuuucugggc

SEQ ID NO: 76557 - RNA, 22 nt, Homo sapiens
agaucauaugcaguaaugaacu

SEQ ID NO: 76558 - RNA, 22 nt, Homo sapiens
uuuuccagugggacucccauua

SEQ ID NO: 76559 - RNA, 22 nt, Homo sapiens
uuuguucaccucaaggauggga

SEQ ID NO: 76560 - RNA, 22 nt, Homo sapiens
aagugucagaguugcuaaugac

SEQ ID NO: 76561 - RNA, 22 nt, Homo sapiens
aauagcacuguagauggaggaa

SEQ ID NO: 76562 - RNA, 22 nt, Homo sapiens
aaucacagccagcuuccgcuau

SEQ ID NO: 76563 - RNA, 22 nt, Homo sapiens
aaucacacuugauguugagcaa

SEQ ID NO: 76564 - RNA, 22 nt, Homo sapiens
aauaucacaguuggguguacac

SEQ ID NO: 76565 - RNA, 22 nt, Homo sapiens
aauggcaucuacguuaaauguc

SEQ ID NO: 76566 - RNA, 22 nt, Homo sapiens
ugaauguacuuaacacuggauu

SEQ ID NO: 76567 - RNA, 18 nt, Homo sapiens
uccaguuuucccagcauc

SEQ ID NO: 76568 - RNA, 18 nt, Homo sapiens
uccauugcagcauuauuu

SEQ ID NO: 76569 - RNA, 22 nt, Homo sapiens
ucauauguaugugcaauuuugu

SEQ ID NO: 76570 - RNA, 22 nt, Homo sapiens
ucacagccuaguuuuauacauu

SEQ ID NO: 76571 - RNA, 22 nt, Homo sapiens
uauugcaaauggugaucccagg

SEQ ID NO: 76572 - RNA, 22 nt, Homo sapiens
uauuugauugacuuuagcagga

SEQ ID NO: 76573 - RNA, 22 nt, Homo sapiens
uauuugguuacuugaauagcua

SEQ ID NO: 76574 - RNA, 22 nt, Homo sapiens
ucacaguucagcauggcugagg

SEQ ID NO: 76575 - RNA, 22 nt, Homo sapiens
uggcaauguggaaugguccagg

SEQ ID NO: 76576 - RNA, 22 nt, Homo sapiens
ugcuuugguagaaaucuuuggu

SEQ ID NO: 76577 - RNA, 22 nt, Homo sapiens
ugcuuuguugaaaaucauuugg

SEQ ID NO: 76578 - RNA, 22 nt, Homo sapiens
ugagauuaucuugaucuugaaa

SEQ ID NO: 76579 - RNA, 23 nt, Homo sapiens
ugagauuauaaucuuuuacuucu

SEQ ID NO: 76580 - RNA, 22 nt, Homo sapiens
ugauauguuagaaucuugcaag

SEQ ID NO: 76581 - RNA, 22 nt, Homo sapiens
ugauauguggauucagcucaaa

SEQ ID NO: 76582 - RNA, 22 nt, Homo sapiens
uauugaacgugggauauugaag

SEQ ID NO: 76583 - RNA, 22 nt, Homo sapiens
uauugaauuugagcugucucuu

SEQ ID NO: 76584 - RNA, 22 nt, Homo sapiens
uaugaaccuguuaucuagguuu

SEQ ID NO: 76585 - RNA, 22 nt, Homo sapiens
uaugaacacuuuugggaggcau

SEQ ID NO: 76586 - RNA, 20 nt, Homo sapiens
uaucacaguucaggaacucu

SEQ ID NO: 76587 - RNA, 22 nt, Homo sapiens
uaucacaguugcauauuuaagg

SEQ ID NO: 76588 - RNA, 22 nt, Homo sapiens
uaucacaguaucuagcacagug

SEQ ID NO: 76589 - RNA, 22 nt, Homo sapiens
uaucacagguggacugcacacc

SEQ ID NO: 76590 - RNA, 22 nt, Homo sapiens
uaucacagcaaggacccauuau

SEQ ID NO: 76591 - RNA, 22 nt, Homo sapiens
uaucacagaggguauccuagag

SEQ ID NO: 76592 - RNA, 22 nt, Homo sapiens
uagcauaauuuguagaaaauca

SEQ ID NO: 76593 - RNA, 22 nt, Homo sapiens
uagcuguuggugggaagucaga

SEQ ID NO: 76594 - RNA, 22 nt, Homo sapiens
uaggacacagauggagaaaagc

SEQ ID NO: 76595 - RNA, 22 nt, Homo sapiens
uaacauugcuggacuaccugcu

SEQ ID NO: 76596 - RNA, 20 nt, Homo sapiens
uacaggacugagaaucugug

SEQ ID NO: 76597 - RNA, 22 nt, Homo sapiens
guaaugaacuugaaagccuguu

SEQ ID NO: 76598 - RNA, 22 nt, Homo sapiens
gugaacaauguuuuauccuggg

SEQ ID NO: 76599 - RNA, 22 nt, Homo sapiens
aaaugcagucuuuguucugggc

SEQ ID NO: 76600 - RNA, 22 nt, Homo sapiens
aagugguuuuuacaaagacaga

SEQ ID NO: 76601 - RNA, 20 nt, Homo sapiens
aaaguaggcuaauaccaaaa

SEQ ID NO: 76602 - RNA, 22 nt, Homo sapiens
aaagggcuuuguaaacuucaag

SEQ ID NO: 76603 - RNA, 22 nt, Homo sapiens
agagagcuuuugguugcccuaa

SEQ ID NO: 76604 - RNA, 22 nt, Homo sapiens
agcugguucuuugccuuguaga

SEQ ID NO: 76605 - RNA, 19 nt, Homo sapiens
acagugucucuauaaugau

SEQ ID NO: 76606 - RNA, 23 nt, Homo sapiens
acugcaauuacguuugcaccaac

SEQ ID NO: 76607 - RNA, 23 nt, Homo sapiens
aaguucaugcucaucuguuacac

SEQ ID NO: 76608 - RNA, 22 nt, Homo sapiens
acaaagcgcuucucuuuagagu

SEQ ID NO: 76609 - RNA, 22 nt, Homo sapiens
aauugcuucuguauuuuggaca

SEQ ID NO: 76610 - RNA, 22 nt, Homo sapiens
acaaagugccuccuuuuagagu

SEQ ID NO: 76611 - RNA, 22 nt, Homo sapiens
acagucauagcagccuuuguua

SEQ ID NO: 76612 - RNA, 22 nt, Homo sapiens
augaggaaggagccuuugucug

SEQ ID NO: 76613 - RNA, 20 nt, Homo sapiens
auguaauguaugauauguac

SEQ ID NO: 76614 - RNA, 22 nt, Homo sapiens
auacccucugggugguuaguug

SEQ ID NO: 76615 - RNA, 22 nt, Homo sapiens
agucacagugaccuugucugac

SEQ ID NO: 76616 - RNA, 22 nt, Homo sapiens
aucaaaugcuggcagagugccu

SEQ ID NO: 76617 - RNA, 22 nt, Homo sapiens
aucaaagccaugcucaguuuuc

SEQ ID NO: 76618 - RNA, 22 nt, Homo sapiens
uaagugaauauggacaguuagc

SEQ ID NO: 76619 - RNA, 22 nt, Homo sapiens
uaagugaauguuggcuacugaa

SEQ ID NO: 76620 - RNA, 22 nt, Homo sapiens
guuugcauagugcugggagggg

SEQ ID NO: 76621 - RNA, 22 nt, Homo sapiens
uaaucucagcuacucaggaggc

SEQ ID NO: 76622 - RNA, 22 nt, Homo sapiens
uaucacagcgggguguacaccc

SEQ ID NO: 76623 - RNA, 22 nt, Homo sapiens
uagaucacucaggcaauaaaag

SEQ ID NO: 76624 - RNA, 22 nt, Homo sapiens
uaguaacacauugaacgaucgc

SEQ ID NO: 76625 - RNA, 22 nt, Homo sapiens
uauggaaaucuuaccuuauggu

SEQ ID NO: 76626 - RNA, 22 nt, Homo sapiens
uaugaauuuuauccaggauaua

SEQ ID NO: 76627 - RNA, 22 nt, Homo sapiens
uauugauuaauugugauuaggc

SEQ ID NO: 76628 - RNA, 22 nt, Homo sapiens
uauugcuuuacucucuuauccu

SEQ ID NO: 76629 - RNA, 22 nt, Homo sapiens
uauugcuuuugauucaaggcag

SEQ ID NO: 76630 - RNA, 22 nt, Homo sapiens
gucuagaacuucugaccuuagg

SEQ ID NO: 76631 - RNA, 22 nt, Homo sapiens
gugagcauaggaggcuucuguu

SEQ ID NO: 76632 - RNA, 22 nt, Homo sapiens
gugagcuauguccugguuuggg

SEQ ID NO: 76633 - RNA, 22 nt, Homo sapiens
guugcugagucccaucaccaga

SEQ ID NO: 76634 - RNA, 22 nt, Homo sapiens
guucagguauucuggaacagag

SEQ ID NO: 76635 - RNA, 22 nt, Homo sapiens
gugcuuauccccauucuggagg

SEQ ID NO: 76636 - RNA, 22 nt, Homo sapiens
guauggaauuugugaccuuaua

SEQ ID NO: 76637 - RNA, 22 nt, Homo sapiens
guauuguacuacaagcucuuua

SEQ ID NO: 76638 - RNA, 22 nt, Homo sapiens
cccaguuuugccacuuacuagc

SEQ ID NO: 76639 - RNA, 22 nt, Homo sapiens
caucacagcaaguagggagugg

SEQ ID NO: 76640 - RNA, 19 nt, Homo sapiens
cugaaacacagagagggcu

SEQ ID NO: 76641 - RNA, 22 nt, Homo sapiens
cugaaagagcauguaacacagu

SEQ ID NO: 76642 - RNA, 22 nt, Homo sapiens
auuacuuugcaccaaccuaaua

SEQ ID NO: 76643 - RNA, 22 nt, Homo sapiens
auugcugagacauugcuaaucu

SEQ ID NO: 76644 - RNA, 22 nt, Homo sapiens
auuggcuuuauacauaagaaua

SEQ ID NO: 76645 - RNA, 22 nt, Homo sapiens
caccacagccauuauugucccc

SEQ ID NO: 76646 - RNA, 22 nt, Homo sapiens
cacauugcaggaaaguucauua

SEQ ID NO: 76647 - RNA, 22 nt, Homo sapiens
gaaucaauugaucuaugugucu

SEQ ID NO: 76648 - RNA, 22 nt, Homo sapiens
gaaucacaguuauuagagcagc

SEQ ID NO: 76649 - RNA, 22 nt, Homo sapiens
gaaucacagauuaugaguaucu

SEQ ID NO: 76650 - RNA, 22 nt, Homo sapiens
gagacauugacuuuguuccaga

SEQ ID NO: 76651 - RNA, 18 nt, Homo sapiens
cuuugguccccgcacccu

SEQ ID NO: 76652 - RNA, 19 nt, Homo sapiens
gaugcaaugcacugagguc

SEQ ID NO: 76653 - RNA, 22 nt, Homo sapiens
gccauugcacuccagccucggg

SEQ ID NO: 76654 - RNA, 22 nt, Homo sapiens
gccauugcacucuagccugagc

SEQ ID NO: 76655 - RNA, 22 nt, Homo sapiens
uuccauuuguucggugucgcca

SEQ ID NO: 76656 - RNA, 22 nt, Homo sapiens
uucucaauggcaacuuguugcu

SEQ ID NO: 76657 - RNA, 22 nt, Homo sapiens
uucagguacugggggaguaugg

SEQ ID NO: 76658 - RNA, 22 nt, Homo sapiens
uuacaguauugcaaggacuagg

SEQ ID NO: 76659 - RNA, 22 nt, Homo sapiens
uuauauguuagacauggugggu

SEQ ID NO: 76660 - RNA, 22 nt, Homo sapiens
ugugucuugaauuuuguaugua

SEQ ID NO: 76661 - RNA, 22 nt, Homo sapiens
uguguuugauaaguccauaguu

SEQ ID NO: 76662 - RNA, 22 nt, Homo sapiens
ugugucuugcuggugccugcau

SEQ ID NO: 76663 - RNA, 22 nt, Homo sapiens
uguuuguuugauaugggauaaa

SEQ ID NO: 76664 - RNA, 22 nt, Homo sapiens
ugugguuuuucacauuuagaga

SEQ ID NO: 76665 - RNA, 22 nt, Homo sapiens
uugcauaauaagagggauacgu

SEQ ID NO: 76666 - RNA, 22 nt, Homo sapiens
uugcauaagugcauucugugau

SEQ ID NO: 76667 - RNA, 19 nt, Homo sapiens
uugcaguauccuauauguu

SEQ ID NO: 76668 - RNA, 22 nt, Homo sapiens
uugcauuagugugguacauuug

SEQ ID NO: 76669 - RNA, 23 nt, Homo sapiens
uugcauugcccuccauaguacuc

SEQ ID NO: 76670 - RNA, 22 nt, Homo sapiens
uuucaguagagacacgguuuug

SEQ ID NO: 76671 - RNA, 17 nt, Homo sapiens
uuucucagcccucuucu

SEQ ID NO: 76672 - RNA, 22 nt, Homo sapiens
uuugagcauggaaauggcauga

SEQ ID NO: 76673 - RNA, 22 nt, Homo sapiens
uuugagcaugcagauugccagg

SEQ ID NO: 76674 - RNA, 22 nt, Homo sapiens
uuugucuccuaagacucugugg

SEQ ID NO: 76675 - RNA, 22 nt, Homo sapiens
uccauaguacuagaaacugacc

SEQ ID NO: 76676 - RNA, 22 nt, Homo sapiens
uccauaguugcacucuggagcc

SEQ ID NO: 76677 - RNA, 22 nt, Homo sapiens
uccacuuuugugcugaauugga

SEQ ID NO: 76678 - RNA, 22 nt, Homo sapiens
ucauuguccaacuucuuucagu

SEQ ID NO: 76679 - RNA, 22 nt, Homo sapiens
ucauugcuuauuuguuggugga

SEQ ID NO: 76680 - RNA, 22 nt, Homo sapiens
ucagugaauacauguacucaug

SEQ ID NO: 76681 - RNA, 22 nt, Homo sapiens
ucaguagagacaggauuucacc

SEQ ID NO: 76682 - RNA, 22 nt, Homo sapiens
ugaacacaucuccugguaccug

SEQ ID NO: 76683 - RNA, 22 nt, Homo sapiens
ucuuugguagaagcuauuuuau

SEQ ID NO: 76684 - RNA, 22 nt, Homo sapiens
ucuuugguaauggaugucugau

SEQ ID NO: 76685 - RNA, 19 nt, Homo sapiens
ucuuugguacgugcuuuga

SEQ ID NO: 76686 - RNA, 22 nt, Homo sapiens
ugaaguaauguuuuauucuauu

SEQ ID NO: 76687 - RNA, 18 nt, Homo sapiens
ugacauugagcugagaaa

SEQ ID NO: 76688 - RNA, 21 nt, Homo sapiens
ucucauugugguuuuaauugg

SEQ ID NO: 76689 - RNA, 22 nt, Homo sapiens
ucuuuggaggcgaucuguuuga

SEQ ID NO: 76690 - RNA, 22 nt, Homo sapiens
aacagacugucacauaaaauug

SEQ ID NO: 76691 - RNA, 22 nt, Homo sapiens
ugccauagagacucaacagccu

SEQ ID NO: 76692 - RNA, 22 nt, Homo sapiens
uggaaaauuaggggagguuaua

SEQ ID NO: 76693 - RNA, 22 nt, Homo sapiens
uggacuguaauagagaacagaa

SEQ ID NO: 76694 - RNA, 20 nt, Homo sapiens
ugggaacaugugguauaugg

SEQ ID NO: 76695 - RNA, 18 nt, Homo sapiens
ugauaucaucacaauuga

SEQ ID NO: 76696 - RNA, 22 nt, Homo sapiens
ugagauuaucguaauguaucuc

SEQ ID NO: 76697 - RNA, 21 nt, Homo sapiens
ugagauuaaguuguuuagaag

SEQ ID NO: 76698 - RNA, 22 nt, Homo sapiens
ugagcucagcuuucuuuuucac

SEQ ID NO: 76699 - RNA, 22 nt, Homo sapiens
ugagcugagaucgugccauugu

SEQ ID NO: 76700 - RNA, 22 nt, Homo sapiens
ugaucaaagugcuggaauuaca

SEQ ID NO: 76701 - RNA, 22 nt, Homo sapiens
uuuguaauaccugaggcugggu

SEQ ID NO: 76702 - RNA, 22 nt, Homo sapiens
uugugauugagugauccuuguu

SEQ ID NO: 76703 - RNA, 20 nt, Homo sapiens
uuucaguacuuucuacuggc

SEQ ID NO: 76704 - RNA, 22 nt, Homo sapiens
uuugauacuggguguggacaaa

SEQ ID NO: 76705 - RNA, 22 nt, Homo sapiens
uuuccaguuggaaagccuguuu

SEQ ID NO: 76706 - RNA, 22 nt, Homo sapiens
uuggaauuaagagauauuuucu

SEQ ID NO: 76707 - RNA, 22 nt, Homo sapiens
uuguauugucuugaugaguuga

SEQ ID NO: 76708 - RNA, 22 nt, Homo sapiens
uuguacuagucauauuuugaaa

SEQ ID NO: 76709 - RNA, 22 nt, Homo sapiens
uuggauuauaaacugagauuug

SEQ ID NO: 76710 - RNA, 19 nt, Homo sapiens
uuggcccugguucucuucu

SEQ ID NO: 76711 - RNA, 22 nt, Homo sapiens
uguuuaguuaagacauagaauu

SEQ ID NO: 76712 - RNA, 22 nt, Homo sapiens
uuaaaugcucacauaaagguag

SEQ ID NO: 76713 - RNA, 22 nt, Homo sapiens
uuaaaugcuagaauuuucuuug

SEQ ID NO: 76714 - RNA, 22 nt, Homo sapiens
uguccaaaucagagguaccaaa

SEQ ID NO: 76715 - RNA, 16 nt, Homo sapiens
uguccaaauaaauaca

SEQ ID NO: 76716 - RNA, 22 nt, Homo sapiens
uuauuugguuauuguaauuggg

SEQ ID NO: 76717 - RNA, 22 nt, Homo sapiens
uuacaguaugaguaagaguucu

SEQ ID NO: 76718 - RNA, 22 nt, Homo sapiens
uucccuuucugccuugaaucuu

SEQ ID NO: 76719 - RNA, 22 nt, Homo sapiens
uucuauguuugaaaaugccaaa

SEQ ID NO: 76720 - RNA, 22 nt, Homo sapiens
auuugucaauacacuucuucca

SEQ ID NO: 76721 - RNA, 22 nt, Homo sapiens
cagagcaaugcuuuugcuuuga

SEQ ID NO: 76722 - RNA, 22 nt, Homo sapiens
auugaguaaaugaaaauugccu

SEQ ID NO: 76723 - RNA, 22 nt, Homo sapiens
auugcuuuuacugggagcuuug

SEQ ID NO: 76724 - RNA, 17 nt, Homo sapiens
augugaauguucaaaua

SEQ ID NO: 76725 - RNA, 22 nt, Homo sapiens
augugaaugugaucggauaguc

SEQ ID NO: 76726 - RNA, 22 nt, Homo sapiens
auuauugacucauagaaaggau

SEQ ID NO: 76727 - RNA, 22 nt, Homo sapiens
auugaauuugguuugcuaagaa

SEQ ID NO: 76728 - RNA, 22 nt, Homo sapiens
cuaucucaggcccaggcccuug

SEQ ID NO: 76729 - RNA, 22 nt, Homo sapiens
cuaucucauugguuuuugaaag

SEQ ID NO: 76730 - RNA, 22 nt, Homo sapiens
cccauuguuaaguugaguaucu

SEQ ID NO: 76731 - RNA, 22 nt, Homo sapiens
cuaggugauccacugcucucuu

SEQ ID NO: 76732 - RNA, 22 nt, Homo sapiens
gccauagucauagauggcaggg

SEQ ID NO: 76733 - RNA, 22 nt, Homo sapiens
gccauugcacuccagccuagcg

SEQ ID NO: 76734 - RNA, 22 nt, Homo sapiens
gccauugcacuccagccuaggu

SEQ ID NO: 76735 - RNA, 22 nt, Homo sapiens
gccauugcacuccagccucggc

SEQ ID NO: 76736 - RNA, 22 nt, Homo sapiens
gccauugcacucuagccuaggu

SEQ ID NO: 76737 - RNA, 22 nt, Homo sapiens
gccauugcacuccgcccugggc

SEQ ID NO: 76738 - RNA, 22 nt, Homo sapiens
gccauugcacuccagccugagc

SEQ ID NO: 76739 - RNA, 22 nt, Homo sapiens
gccauugcacuccagcuugggc

SEQ ID NO: 76740 - RNA, 21 nt, Homo sapiens
gagcacauuguccucuaacgc

SEQ ID NO: 76741 - RNA, 22 nt, Homo sapiens
gauauguacagcucucuaggau

SEQ ID NO: 76742 - RNA, 22 nt, Homo sapiens
gauauguaaaaauuauaucuga

SEQ ID NO: 76743 - RNA, 22 nt, Homo sapiens
gaaugauacuguuaacgaaaga

SEQ ID NO: 76744 - RNA, 22 nt, Homo sapiens
cucucuguuugucuguuauugg

SEQ ID NO: 76745 - RNA, 22 nt, Homo sapiens
cucugguuaaggcugaacuaua

SEQ ID NO: 76746 - RNA, 22 nt, Homo sapiens
aaucucagagauaucugugucc

SEQ ID NO: 76747 - RNA, 22 nt, Homo sapiens
aauugaaugauaugggacauuu

SEQ ID NO: 76748 - RNA, 22 nt, Homo sapiens
aauugaaugcagaugccaggga

SEQ ID NO: 76749 - RNA, 22 nt, Homo sapiens
aauugcuuuuauuuagggccag

SEQ ID NO: 76750 - RNA, 22 nt, Homo sapiens
acagaccuauuucaaucauuua

SEQ ID NO: 76751 - RNA, 22 nt, Homo sapiens
acauaguagacacugaaaauau

SEQ ID NO: 76752 - RNA, 18 nt, Homo sapiens
agcucaguguuugcuuac

SEQ ID NO: 76753 - RNA, 22 nt, Homo sapiens
agcacuacugcacuccagccug

SEQ ID NO: 76754 - RNA, 22 nt, Homo sapiens
acugguuguuuaacugaauuga

SEQ ID NO: 76755 - RNA, 22 nt, Homo sapiens
aucacagcccuccucuuggaug

SEQ ID NO: 76756 - RNA, 22 nt, Homo sapiens
aucacagguacuauggcugaca

SEQ ID NO: 76757 - RNA, 23 nt, Homo sapiens
auauaguagaugugcaguaacau

SEQ ID NO: 76758 - RNA, 22 nt, Homo sapiens
auagugaacuuugugagaacaa

SEQ ID NO: 76759 - RNA, 22 nt, Homo sapiens
auagugcugcaaugaacauaca

SEQ ID NO: 76760 - RNA, 22 nt, Homo sapiens
agugucaggagacagguagcug

SEQ ID NO: 76761 - RNA, 22 nt, Homo sapiens
auagcaaugccccacuccuugg

SEQ ID NO: 76762 - RNA, 22 nt, Homo sapiens
auggaguuuacuuaguguaaua

SEQ ID NO: 76763 - RNA, 22 nt, Homo sapiens
auggcuuuuuaaaucauguugu

SEQ ID NO: 76764 - RNA, 22 nt, Homo sapiens
auguaauguuaaauugcuaauu

SEQ ID NO: 76765 - RNA, 22 nt, Homo sapiens
guccaguuguuuucugagguug

SEQ ID NO: 76766 - RNA, 22 nt, Homo sapiens
gugagcuaguuucuuugcugug

SEQ ID NO: 76767 - RNA, 22 nt, Homo sapiens
gugauuauuaugcacugcaugc

SEQ ID NO: 76768 - RNA, 22 nt, Homo sapiens
guuaagaaguguaacuuaaguu

SEQ ID NO: 76769 - RNA, 19 nt, Homo sapiens
gguucaguuuauaaagaug

SEQ ID NO: 76770 - RNA, 22 nt, Homo sapiens
gccuuuggugacaggcaugugu

SEQ ID NO: 76771 - RNA, 22 nt, Homo sapiens
uacagccacauaauguaugauu

SEQ ID NO: 76772 - RNA, 22 nt, Homo sapiens
uacaaguaauaagggaagaauu

SEQ ID NO: 76773 - RNA, 22 nt, Homo sapiens
uagcacuauuuauugaaaagga

SEQ ID NO: 76774 - RNA, 22 nt, Homo sapiens
uaauugaaugcagacaccaggg

SEQ ID NO: 76775 - RNA, 18 nt, Homo sapiens
uaguacuguucucaugau

SEQ ID NO: 76776 - RNA, 22 nt, Homo sapiens
uauaucuagagcggaccaggcu

SEQ ID NO: 76777 - RNA, 22 nt, Homo sapiens
ucaaaugcacguagagaaaaua

SEQ ID NO: 76778 - RNA, 21 nt, Homo sapiens
ucaaauugaaauuaggucauu

SEQ ID NO: 76779 - RNA, 22 nt, Homo sapiens
uauugcuuuuaacccaaucucu

SEQ ID NO: 76780 - RNA, 18 nt, Homo sapiens
uauugcuugguuuggaga

SEQ ID NO: 76781 - RNA, 22 nt, Homo sapiens
uauugcuggauguauuacaugu

SEQ ID NO: 76782 - RNA, 22 nt, Homo sapiens
uccuuugguggagucuuuaggg

SEQ ID NO: 76783 - RNA, 22 nt, Homo sapiens
uccuucaugcaucaauguaucc

SEQ ID NO: 76784 - RNA, 22 nt, Homo sapiens
ugacuugaucauuacacauucu

SEQ ID NO: 76785 - RNA, 22 nt, Homo sapiens
ugacauuacagucacuugcugu

SEQ ID NO: 76786 - RNA, 22 nt, Homo sapiens
ucuuuggucaucaugggaagca

SEQ ID NO: 76787 - RNA, 22 nt, Homo sapiens
ucuuugguauugugaauagugu

SEQ ID NO: 76788 - RNA, 22 nt, Homo sapiens
ucuuuggugaauggucauccag

SEQ ID NO: 76789 - RNA, 22 nt, Homo sapiens
ucuuugguuucugucucuguaa

SEQ ID NO: 76790 - RNA, 22 nt, Homo sapiens
ucuuuguuuucugauccugaag

SEQ ID NO: 76791 - RNA, 22 nt, Homo sapiens
ucucagcacagucagggcgccu

SEQ ID NO: 76792 - RNA, 22 nt, Homo sapiens
ucucacacugaauguguguggg

SEQ ID NO: 76793 - RNA, 22 nt, Homo sapiens
uggcauuguccaauaaaauuuu

SEQ ID NO: 76794 - RNA, 22 nt, Homo sapiens
ugggaacaugaagguuaaagag

SEQ ID NO: 76795 - RNA, 22 nt, Homo sapiens
ugccauagagauuuguggaacu

SEQ ID NO: 76796 - RNA, 22 nt, Homo sapiens
ugcauaugucuuuauaguagca

SEQ ID NO: 76797 - RNA, 22 nt, Homo sapiens
ugagaccugaucuugguacugc

SEQ ID NO: 76798 - RNA, 22 nt, Homo sapiens
ugagacauauuauacugcuuuu

SEQ ID NO: 76799 - RNA, 22 nt, Homo sapiens
ugagcaaaauuuuggacauaga

SEQ ID NO: 76800 - RNA, 23 nt, Homo sapiens
ugagccaugggacuccaagggag

SEQ ID NO: 76801 - RNA, 22 nt, Homo sapiens
ugagcugagaaaugcagcagcu

SEQ ID NO: 76802 - RNA, 22 nt, Homo sapiens
ugagcucaguauuucauaaaca

SEQ ID NO: 76803 - RNA, 23 nt, Homo sapiens
ugauaacagcauaugaagauucu

SEQ ID NO: 76804 - RNA, 22 nt, Homo sapiens
ugauaacauugggggaagcuga

SEQ ID NO: 76805 - RNA, 22 nt, Homo sapiens
aaagaguucagguagauuucaa

SEQ ID NO: 76806 - RNA, 21 nt, Homo sapiens
aaucacaguuguucugccuuc

SEQ ID NO: 76807 - RNA, 22 nt, Homo sapiens
aauacucaguccuggugaggcu

SEQ ID NO: 76808 - RNA, 22 nt, Homo sapiens
aaguaaacauuuuguacaauaa

SEQ ID NO: 76809 - RNA, 22 nt, Homo sapiens
aacagaauccucuuuuccuggg

SEQ ID NO: 76810 - RNA, 22 nt, Homo sapiens
aaaugcauggacagcuggucuu

SEQ ID NO: 76811 - RNA, 22 nt, Homo sapiens
aaaugcauugagggaaaaggca

SEQ ID NO: 76812 - RNA, 22 nt, Homo sapiens
accaguuuuuuauacaucuucu

SEQ ID NO: 76813 - RNA, 22 nt, Homo sapiens
acauugcucuuaccaaguuugu

SEQ ID NO: 76814 - RNA, 22 nt, Homo sapiens
accauugcacuccagcccaggc

SEQ ID NO: 76815 - RNA, 22 nt, Homo sapiens
acauccauuugcuuuauuugcu

SEQ ID NO: 76816 - RNA, 22 nt, Homo sapiens
aauggcaucuagaguggugaau

SEQ ID NO: 76817 - RNA, 22 nt, Homo sapiens
aauguguuuugaaaucaggaag

SEQ ID NO: 76818 - RNA, 22 nt, Homo sapiens
acuuugcuuagagggcauuaaa

SEQ ID NO: 76819 - RNA, 22 nt, Homo sapiens
acuuugguuuauagaauuuagg

SEQ ID NO: 76820 - RNA, 22 nt, Homo sapiens
auaaaugcauugagaacugcug

SEQ ID NO: 76821 - RNA, 22 nt, Homo sapiens
agugaacaaagaagugcagaua

SEQ ID NO: 76822 - RNA, 19 nt, Homo sapiens
aggcauugugcucaucugu

SEQ ID NO: 76823 - RNA, 22 nt, Homo sapiens
agcacauuaguaucuaagaaca

SEQ ID NO: 76824 - RNA, 22 nt, Homo sapiens
aucacaggucaaaucauuauuu

SEQ ID NO: 76825 - RNA, 21 nt, Homo sapiens
auauuacuguuagaggacugc

SEQ ID NO: 76826 - RNA, 22 nt, Homo sapiens
augaacagagccuugagaaccu

SEQ ID NO: 76827 - RNA, 22 nt, Homo sapiens
augaccaaugggcagagcuaga

SEQ ID NO: 76828 - RNA, 22 nt, Homo sapiens
auugaguaacaauuuuguucaa

SEQ ID NO: 76829 - RNA, 22 nt, Homo sapiens
auugcaaagcguagacucuaaa

SEQ ID NO: 76830 - RNA, 22 nt, Homo sapiens
augguuuauuuguaagcagagu

SEQ ID NO: 76831 - RNA, 21 nt, Homo sapiens
caaugacacuguagcugugcu

SEQ ID NO: 76832 - RNA, 22 nt, Homo sapiens
cacaggccugucucuuucuaac

SEQ ID NO: 76833 - RNA, 22 nt, Homo sapiens
caauugguguuuauggggaagu

SEQ ID NO: 76834 - RNA, 22 nt, Homo sapiens
cauugcuaaaagucauauauaa

SEQ ID NO: 76835 - RNA, 22 nt, Homo sapiens
cuaagauugucuuaguguguug

SEQ ID NO: 76836 - RNA, 22 nt, Homo sapiens
cuccauguggcuaacuuuuaaa

SEQ ID NO: 76837 - RNA, 22 nt, Homo sapiens
cuccauagucuucgaagaauga

SEQ ID NO: 76838 - RNA, 22 nt, Homo sapiens
cuguaaggcacuaagcauaugu

SEQ ID NO: 76839 - RNA, 22 nt, Homo sapiens
cugguaugugugacugcauuga

SEQ ID NO: 76840 - RNA, 22 nt, Homo sapiens
cuuuguggggucuuuccucaaa

SEQ ID NO: 76841 - RNA, 22 nt, Homo sapiens
gagauuaauacacaucaaaugc

SEQ ID NO: 76842 - RNA, 22 nt, Homo sapiens
gagcucauuguugcuaaagaga

SEQ ID NO: 76843 - RNA, 22 nt, Homo sapiens
gagaacagagauaauuuuacuu

SEQ ID NO: 76844 - RNA, 22 nt, Homo sapiens
gaccaaagaggcaggcauuaga

SEQ ID NO: 76845 - RNA, 21 nt, Homo sapiens
gcuuuuucggaagucuuuggc

SEQ ID NO: 76846 - RNA, 22 nt, Homo sapiens
ggauacauuuuuccuccucuuc

SEQ ID NO: 76847 - RNA, 22 nt, Homo sapiens
ggauaacagccaggucaaacaa

SEQ ID NO: 76848 - RNA, 22 nt, Homo sapiens
guacacaacaugcagguuuguu

SEQ ID NO: 76849 - RNA, 22 nt, Homo sapiens
ggcaguuuguucuugcuccuuu

SEQ ID NO: 76850 - RNA, 22 nt, Homo sapiens
gugacuaagauucuuugauaug

SEQ ID NO: 76851 - RNA, 22 nt, Homo sapiens
gucuuuaguugaaacauguggu

SEQ ID NO: 76852 - RNA, 22 nt, Homo sapiens
gucacagcacuuuuaguaagug

SEQ ID NO: 76853 - RNA, 22 nt, Homo sapiens
uaaauugcauaaguacaaauga

SEQ ID NO: 76854 - RNA, 22 nt, Homo sapiens
uaaauggauaaaugaauaccua

SEQ ID NO: 76855 - RNA, 22 nt, Homo sapiens
guguucaaagcugauugagauu

SEQ ID NO: 76856 - RNA, 20 nt, Homo sapiens
guucauguaauuaguucagg

SEQ ID NO: 76857 - RNA, 22 nt, Homo sapiens
ucacaauggcugaacuaauuua

SEQ ID NO: 76858 - RNA, 22 nt, Homo sapiens
ucacagcggucgaacuaauuug

SEQ ID NO: 76859 - RNA, 22 nt, Homo sapiens
uauugcuuaugaugcugaauua

SEQ ID NO: 76860 - RNA, 22 nt, Homo sapiens
ucaaaucaucuuuuccaaagcu

SEQ ID NO: 76861 - RNA, 18 nt, Homo sapiens
uaggaacauugauuggag

SEQ ID NO: 76862 - RNA, 22 nt, Homo sapiens
uaggacaaugguacagcagaaa

SEQ ID NO: 76863 - RNA, 22 nt, Homo sapiens
uauaugucuucuuguaauuggc

SEQ ID NO: 76864 - RNA, 22 nt, Homo sapiens
uauaguguuuucaaaaguaugu

SEQ ID NO: 76865 - RNA, 22 nt, Homo sapiens
ugagacaaucucaucucaguga

SEQ ID NO: 76866 - RNA, 22 nt, Homo sapiens
ucuuuguucaggagccaacucc

SEQ ID NO: 76867 - RNA, 22 nt, Homo sapiens
ucuuugguuguuuagggugcau

SEQ ID NO: 76868 - RNA, 22 nt, Homo sapiens
ucuuugguaugugcaugugcuu

SEQ ID NO: 76869 - RNA, 22 nt, Homo sapiens
ucuaucacagugauguuccaga

SEQ ID NO: 76870 - RNA, 22 nt, Homo sapiens
ugaguucuuuguagauucugug

SEQ ID NO: 76871 - RNA, 22 nt, Homo sapiens
ugggaugugagucuucgcuuuc

SEQ ID NO: 76872 - RNA, 20 nt, Homo sapiens
ugguguuugaacagugaaug

SEQ ID NO: 76873 - RNA, 21 nt, Homo sapiens
uguauauguuuauacacacac

SEQ ID NO: 76874 - RNA, 20 nt, Homo sapiens
ugucccaaccccauggguuc

SEQ ID NO: 76875 - RNA, 22 nt, Homo sapiens
uugucuugcagcuuaggcauca

SEQ ID NO: 76876 - RNA, 22 nt, Homo sapiens
uuguguuuuuaguagggaaggg

SEQ ID NO: 76877 - RNA, 22 nt, Homo sapiens
uugaucaauagaauacaacaga

SEQ ID NO: 76878 - RNA, 22 nt, Homo sapiens
uugauauguuguuagauucagu

SEQ ID NO: 76879 - RNA, 22 nt, Homo sapiens
uuguaacaugcuuucacuucag

SEQ ID NO: 76880 - RNA, 22 nt, Homo sapiens
uugguucucuuuauaugcugga

SEQ ID NO: 76881 - RNA, 22 nt, Homo sapiens
uuguaauggagcaaacagguug

SEQ ID NO: 76882 - RNA, 23 nt, Homo sapiens
uuuguacuaugucaguuuagaua

SEQ ID NO: 76883 - RNA, 22 nt, Homo sapiens
uuugcugagucugacuucaugg

SEQ ID NO: 76884 - RNA, 20 nt, Homo sapiens
uuuggcacugagugguauaa

SEQ ID NO: 76885 - RNA, 22 nt, Homo sapiens
uuuggcaugggcuauuugcuuu

SEQ ID NO: 76886 - RNA, 22 nt, Homo sapiens
aagcaaacaucagcuugguuaa

SEQ ID NO: 76887 - RNA, 22 nt, Homo sapiens
aacuaugucaaauaaaaugagg

SEQ ID NO: 76888 - RNA, 21 nt, Homo sapiens
uucuacuccggcguuguuuuu

SEQ ID NO: 76889 - RNA, 22 nt, Homo sapiens
uugaaauguuuagaaguuugga

SEQ ID NO: 76890 - RNA, 22 nt, Homo sapiens
uugaaagacaucaccuacugcu

SEQ ID NO: 76891 - RNA, 22 nt, Homo sapiens
uucuuuggaaacaguacuaauu

SEQ ID NO: 76892 - RNA, 22 nt, Homo sapiens
uuccacuuuuuccuugugcucc

SEQ ID NO: 76893 - RNA, 22 nt, Homo sapiens
uugagcaauccuccugccaugu

SEQ ID NO: 76894 - RNA, 22 nt, Homo sapiens
uuagaacagugcucaccacaaa

SEQ ID NO: 76895 - RNA, 22 nt, Homo sapiens
uuauugaguaaaaagaaugguu

SEQ ID NO: 76896 - RNA, 22 nt, Homo sapiens
ugagaacucaugaaucuuucca

SEQ ID NO: 76897 - RNA, 22 nt, Homo sapiens
cauuuugcaguuucugucucca

SEQ ID NO: 76898 - RNA, 19 nt, Homo sapiens
aaaguguuuuaaagaggau

SEQ ID NO: 76899 - RNA, 22 nt, Homo sapiens
ggugaucauugucucuaguaug

SEQ ID NO: 76900 - RNA, 22 nt, Homo sapiens
acagugucaugucguguucccc

SEQ ID NO: 76901 - RNA, 22 nt, Homo sapiens
augggagugugguuagagaccu

SEQ ID NO: 76902 - RNA, 22 nt, Homo sapiens
ucuggccuacaucauuuuuccg

SEQ ID NO: 76903 - RNA, 22 nt, Homo sapiens
acuggaguuuguucaagaaaua

SEQ ID NO: 76904 - RNA, 22 nt, Homo sapiens
ucugugcauuacacuuuucuca

SEQ ID NO: 76905 - RNA, 22 nt, Homo sapiens
agauggugauaaaugugguacc

SEQ ID NO: 76906 - RNA, 22 nt, Homo sapiens
ugagaugauaucuuauuguaau

SEQ ID NO: 76907 - RNA, 22 nt, Homo sapiens
ugucaaggaaugucauugguuu

SEQ ID NO: 76908 - RNA, 22 nt, Homo sapiens
gucacaguguuuguucauccca

SEQ ID NO: 76909 - RNA, 22 nt, Homo sapiens
ggugagguaguaagguacaaua

SEQ ID NO: 76910 - RNA, 22 nt, Homo sapiens
gagauacacccagugcagaggc

SEQ ID NO: 76911 - RNA, 22 nt, Homo sapiens
guagcagccacacuugauaacu

SEQ ID NO: 76912 - RNA, 22 nt, Homo sapiens
uucccugugggcuggugcucca

SEQ ID NO: 76913 - RNA, 22 nt, Homo sapiens
ccucauggagaaccucugcuag

SEQ ID NO: 76914 - RNA, 22 nt, Homo sapiens
auggcacagacucuuggucaag

SEQ ID NO: 76915 - RNA, 22 nt, Homo sapiens
uuggcagcacgcaguccagagg

SEQ ID NO: 76916 - RNA, 22 nt, Homo sapiens
uaguccauuuucaugcugcuau

SEQ ID NO: 76917 - RNA, 22 nt, Homo sapiens
ucugagcaauagauguggauau

SEQ ID NO: 76918 - RNA, 22 nt, Homo sapiens
acaguacuuuuggauuugugaa

SEQ ID NO: 76919 - RNA, 22 nt, Homo sapiens
cugagguuaggaguuugagacc

SEQ ID NO: 76920 - RNA, 21 nt, Homo sapiens
gugaggucauugggcuuucug

SEQ ID NO: 76921 - RNA, 22 nt, Homo sapiens
uugugcacauguacccuagaac

SEQ ID NO: 76922 - RNA, 22 nt, Homo sapiens
gucacauugaugcccauggugg

SEQ ID NO: 76923 - RNA, 22 nt, Homo sapiens
uguauguaaagacaggauaaca

SEQ ID NO: 76924 - RNA, 19 nt, Homo sapiens
ucugucacuggggguauuc

SEQ ID NO: 76925 - RNA, 19 nt, Homo sapiens
agaguauuguuacuucucu

SEQ ID NO: 76926 - RNA, 19 nt, Homo sapiens
aguggguguuuucuguuug

SEQ ID NO: 76927 - RNA, 22 nt, Homo sapiens
aauacuuccaaaucuagucauu

SEQ ID NO: 76928 - RNA, 22 nt, Homo sapiens
cauguaacaucccgcuguagga

SEQ ID NO: 76929 - RNA, 22 nt, Homo sapiens
uucauggacucaauaguuucgc

SEQ ID NO: 76930 - RNA, 22 nt, Homo sapiens
aauaaagucugaagugugcuua

SEQ ID NO: 76931 - RNA, 22 nt, Homo sapiens
gacauagcuagauaaccucaug

SEQ ID NO: 76932 - RNA, 22 nt, Homo sapiens
ucuaagaauucauuuauaagcc

SEQ ID NO: 76933 - RNA, 22 nt, Homo sapiens
auuccuuaggcccuuugguuag

SEQ ID NO: 76934 - RNA, 22 nt, Homo sapiens
agcagugucauuuucuggugag

SEQ ID NO: 76935 - RNA, 22 nt, Homo sapiens
guccaagacuaggaguuggcag

SEQ ID NO: 76936 - RNA, 22 nt, Homo sapiens
ugcauauguauacaugugccau

SEQ ID NO: 76937 - RNA, 22 nt, Homo sapiens
uuugugacuugcuucucagaau

SEQ ID NO: 76938 - RNA, 22 nt, Homo sapiens
ucacacgugaacucaucacaga

SEQ ID NO: 76939 - RNA, 22 nt, Homo sapiens
uucagcaaugacagccuauaua

SEQ ID NO: 76940 - RNA, 20 nt, Homo sapiens
gaaacaucuauccucuccuu

SEQ ID NO: 76941 - RNA, 22 nt, Homo sapiens
auaaaguguuuaguauaggcaa

SEQ ID NO: 76942 - RNA, 22 nt, Homo sapiens
ugaggagugaacuauuucugau

SEQ ID NO: 76943 - RNA, 22 nt, Homo sapiens
uucuagcaauggcagagugucu

SEQ ID NO: 76944 - RNA, 22 nt, Homo sapiens
cccucgagaaaccaucugcuga

SEQ ID NO: 76945 - RNA, 22 nt, Homo sapiens
ucccuguguuccuuuugaauug

SEQ ID NO: 76946 - RNA, 22 nt, Homo sapiens
ugggaagauucuguguuuuucc

SEQ ID NO: 76947 - RNA, 22 nt, Homo sapiens
uacagugggcacuggcgcccug

SEQ ID NO: 76948 - RNA, 22 nt, Homo sapiens
ucuugguuuauugugguaugaa

SEQ ID NO: 76949 - RNA, 22 nt, Homo sapiens
agcuugugauucuccaucaugu

SEQ ID NO: 76950 - RNA, 20 nt, Homo sapiens
aucacuggagaaggaaaccu

SEQ ID NO: 76951 - RNA, 23 nt, Homo sapiens
uuggccuccuugugucuagggcu

SEQ ID NO: 76952 - RNA, 22 nt, Homo sapiens
ugcauuguuccgaauguguccu

SEQ ID NO: 76953 - RNA, 22 nt, Homo sapiens
cucagcuacuugggaagcugag

SEQ ID NO: 76954 - RNA, 20 nt, Homo sapiens
gaucaguuuggaguaagugc

SEQ ID NO: 76955 - RNA, 22 nt, Homo sapiens
ugcaagaaucagccuaucauua

SEQ ID NO: 76956 - RNA, 22 nt, Homo sapiens
auugcuuaagucccuguauuag

SEQ ID NO: 76957 - RNA, 22 nt, Homo sapiens
gcaagaaugagaaggauuaauu

SEQ ID NO: 76958 - RNA, 22 nt, Homo sapiens
uugaggugaauuugcaggaugc

SEQ ID NO: 76959 - RNA, 18 nt, Homo sapiens
acagugcugucacugcuu

SEQ ID NO: 76960 - RNA, 22 nt, Homo sapiens
cuuugggaccgcgguuuauacu

SEQ ID NO: 76961 - RNA, 22 nt, Homo sapiens
uacaaaguaacaguuccuguau

SEQ ID NO: 76962 - RNA, 22 nt, Homo sapiens
uaucaagaugacaaacuuugcu

SEQ ID NO: 76963 - RNA, 22 nt, Homo sapiens
ucacauuguacaaacagguaag

SEQ ID NO: 76964 - RNA, 22 nt, Homo sapiens
ucaaaugcacguagagaaaaua

SEQ ID NO: 76965 - RNA, 22 nt, Homo sapiens
ucugguggugaugagagacagu

SEQ ID NO: 76966 - RNA, 21 nt, Homo sapiens
uagugcagugggguaugacuu

SEQ ID NO: 76967 - RNA, 22 nt, Homo sapiens
ugcuaugucagccaggcugguc

SEQ ID NO: 76968 - RNA, 22 nt, Homo sapiens
ucaaaugcucuuugcagagagg

SEQ ID NO: 76969 - RNA, 22 nt, Homo sapiens
ucauggggugagcuacaggcac

SEQ ID NO: 76970 - RNA, 22 nt, Homo sapiens
agacccuguauguguuuaguuu

SEQ ID NO: 76971 - RNA, 22 nt, Homo sapiens
uugcagugguuucacuggcaaa

SEQ ID NO: 76972 - RNA, 22 nt, Homo sapiens
cacuuugguucaccugaguuuc

SEQ ID NO: 76973 - RNA, 22 nt, Homo sapiens
ugaauguauuuauuaccauuca

SEQ ID NO: 76974 - RNA, 22 nt, Homo sapiens
uuucuacagugaacgauuucua

SEQ ID NO: 76975 - RNA, 22 nt, Homo sapiens
uggacuguaagugccuugagua

SEQ ID NO: 76976 - RNA, 19 nt, Homo sapiens
uuuugcucuuuauaccuau

SEQ ID NO: 76977 - RNA, 21 nt, Homo sapiens
acugagagaucuggggcacau

SEQ ID NO: 76978 - RNA, 22 nt, Homo sapiens
ugauuuccaugagaacaugccu

SEQ ID NO: 76979 - RNA, 22 nt, Homo sapiens
ucagggacgcuugacacaagcc

SEQ ID NO: 76980 - RNA, 22 nt, Homo sapiens
auggucccuguuccaugcuccu

SEQ ID NO: 76981 - RNA, 22 nt, Homo sapiens
uggcagaugagccgcgcuccaa

SEQ ID NO: 76982 - RNA, 22 nt, Homo sapiens
uggucagaugcugaguggaucu

SEQ ID NO: 76983 - RNA, 22 nt, Homo sapiens
ugagguguuauccagaguucuu

SEQ ID NO: 76984 - RNA, 22 nt, Homo sapiens
agcuggcuguggagaaaccccu

SEQ ID NO: 76985 - RNA, 22 nt, Homo sapiens
uauuugauuaacaagagccuaa

SEQ ID NO: 76986 - RNA, 22 nt, Homo sapiens
ucuuuguguaggucaaucuggc

SEQ ID NO: 76987 - RNA, 22 nt, Homo sapiens
ugagaacuuauggugauuuuuu

SEQ ID NO: 76988 - RNA, 22 nt, Homo sapiens
gagguagugagcagcugaacua

SEQ ID NO: 76989 - RNA, 22 nt, Homo sapiens
acauggcacugcgggcuucuug

SEQ ID NO: 76990 - RNA, 22 nt, Homo sapiens
uugugcaugaugcauacauggu

SEQ ID NO: 76991 - RNA, 19 nt, Homo sapiens
aagugguuuaaacuuguau

SEQ ID NO: 76992 - RNA, 22 nt, Homo sapiens
gcuuuggcauguagauguaugg

SEQ ID NO: 76993 - RNA, 22 nt, Homo sapiens
gucucccagccuacaucuuucu

SEQ ID NO: 76994 - RNA, 22 nt, Homo sapiens
aaucacuuuggcaccaaccuaa

SEQ ID NO: 76995 - RNA, 22 nt, Homo sapiens
ugaauucaucucacagaguuaa

SEQ ID NO: 76996 - RNA, 21 nt, Homo sapiens
uuuguccaccuguguucacca

SEQ ID NO: 76997 - RNA, 22 nt, Homo sapiens
uccugagagcagacccucuaua

SEQ ID NO: 76998 - RNA, 22 nt, Homo sapiens
uaaggcuagcaagaugagaaua

SEQ ID NO: 76999 - RNA, 22 nt, Homo sapiens
uaccuguagacuacagcuucag

SEQ ID NO: 77000 - RNA, 18 nt, Homo sapiens
uuagguaggucuuugugu

SEQ ID NO: 77001 - RNA, 22 nt, Homo sapiens
aagugagaugcaguggaguucc

SEQ ID NO: 77002 - RNA, 22 nt, Homo sapiens
agagugcaaagguuggggcugg

SEQ ID NO: 77003 - RNA, 22 nt, Homo sapiens
augguacuccagagaagcagaa

SEQ ID NO: 77004 - RNA, 22 nt, Homo sapiens
agggcuuuugagcugagauggu

SEQ ID NO: 77005 - RNA, 22 nt, Homo sapiens
uucaagcugggcaaauaagggg

SEQ ID NO: 77006 - RNA, 22 nt, Homo sapiens
gagauuaauacacaucaaaugc

SEQ ID NO: 77007 - RNA, 22 nt, Homo sapiens
gcagugugugaggaauuugggu

SEQ ID NO: 77008 - RNA, 22 nt, Homo sapiens
uuggcaacauagugagaccccc

SEQ ID NO: 77009 - RNA, 22 nt, Homo sapiens
ggcaugaaguagcccacaggca

SEQ ID NO: 77010 - RNA, 22 nt, Homo sapiens
cugagguaggcccugagaauau

SEQ ID NO: 77011 - RNA, 22 nt, Homo sapiens
uugcacaauggaauuuaucuuu

SEQ ID NO: 77012 - RNA, 21 nt, Homo sapiens
ugcagccauucagcccuaugc

SEQ ID NO: 77013 - RNA, 22 nt, Homo sapiens
uucuugcugaauugugcccuuc

SEQ ID NO: 77014 - RNA, 22 nt, Homo sapiens
gggaugaauuagguauguuuau

SEQ ID NO: 77015 - RNA, 22 nt, Homo sapiens
ucacauaguuuucgggaccuug

SEQ ID NO: 77016 - RNA, 22 nt, Homo sapiens
ugucagcacaacucagguuccu

SEQ ID NO: 77017 - RNA, 22 nt, Homo sapiens
ucauguguugcacugaggaccu

SEQ ID NO: 77018 - RNA, 22 nt, Homo sapiens
ucuuuguucaggagccaacucc

SEQ ID NO: 77019 - RNA, 22 nt, Homo sapiens
uaaugcacucgaaucauggaau

SEQ ID NO: 77020 - RNA, 22 nt, Homo sapiens
auguggugguagccaggacagg

SEQ ID NO: 77021 - RNA, 22 nt, Homo sapiens
caaagucuauucuacccuuacc

SEQ ID NO: 77022 - RNA, 19 nt, Homo sapiens
uuuuccccuuucuuaagac

SEQ ID NO: 77023 - RNA, 22 nt, Homo sapiens
acuagagaugcauuuguaguuu

SEQ ID NO: 77024 - RNA, 22 nt, Homo sapiens
gcugucaugagcaacacaugaa

SEQ ID NO: 77025 - RNA, 22 nt, Homo sapiens
cagagaacugaguuauuuucuu

SEQ ID NO: 77026 - RNA, 22 nt, Homo sapiens
ugaucucauuagcaccuuuagc

SEQ ID NO: 77027 - RNA, 20 nt, Homo sapiens
uggucaccuucaggagguuc

SEQ ID NO: 77028 - RNA, 19 nt, Homo sapiens
ugugagcauuagcauuuag

SEQ ID NO: 77029 - RNA, 22 nt, Homo sapiens
uggccuguaacgcugucucagc

SEQ ID NO: 77030 - RNA, 22 nt, Homo sapiens
ugagcagagaucuauuacugug

SEQ ID NO: 77031 - RNA, 19 nt, Homo sapiens
agugggcuagaaaucaggg

SEQ ID NO: 77032 - RNA, 22 nt, Homo sapiens
uuggaagauuacuuaguuuucu

SEQ ID NO: 77033 - RNA, 22 nt, Homo sapiens
cugaggugggaguuuuucucau

SEQ ID NO: 77034 - RNA, 22 nt, Homo sapiens
uuuagguuacauauaauccaaa

SEQ ID NO: 77035 - RNA, 22 nt, Homo sapiens
gugcacaaaucuuaaauguaca

SEQ ID NO: 77036 - RNA, 22 nt, Homo sapiens
uuggcuguguuucccuacaaau

SEQ ID NO: 77037 - RNA, 21 nt, Homo sapiens
aggagcauucaugacgagguu

SEQ ID NO: 77038 - RNA, 22 nt, Homo sapiens
uucaaguaagaaagacaucagg

SEQ ID NO: 77039 - RNA, 22 nt, Homo sapiens
agcagcuuugcauggccuguga

SEQ ID NO: 77040 - RNA, 22 nt, Homo sapiens
auauucacuauaugcagaacca

SEQ ID NO: 77041 - RNA, 20 nt, Homo sapiens
gcugugcuuaauacacuuuc

SEQ ID NO: 77042 - RNA, 22 nt, Homo sapiens
ugcugcacaguucuuaagauua

SEQ ID NO: 77043 - RNA, 20 nt, Homo sapiens
agcugcagauauaaauccgc

SEQ ID NO: 77044 - RNA, 22 nt, Homo sapiens
auggcagcccucuuuauccaug

SEQ ID NO: 77045 - RNA, 22 nt, Homo sapiens
agucacaugcauuuucuucaau

SEQ ID NO: 77046 - RNA, 22 nt, Homo sapiens
ugucaaaugcagugauauuuga

SEQ ID NO: 77047 - RNA, 22 nt, Homo sapiens
uacugguuuuauauauuucucc

SEQ ID NO: 77048 - RNA, 22 nt, Homo sapiens
gcccugagauucuuggauucug

SEQ ID NO: 77049 - RNA, 22 nt, Homo sapiens
guacaguuuucaguguucacug

SEQ ID NO: 77050 - RNA, 22 nt, Homo sapiens
ucgcaguuaauaaugaugugcg

SEQ ID NO: 77051 - RNA, 22 nt, Homo sapiens
cucugcuuaaugucccacuuga

SEQ ID NO: 77052 - RNA, 21 nt, Homo sapiens
augguacugucucuggagaua

SEQ ID NO: 77053 - RNA, 21 nt, Homo sapiens
uugaguugaagcaaggaggga

SEQ ID NO: 77054 - RNA, 22 nt, Homo sapiens
guggguaaaucucuguuugagg

SEQ ID NO: 77055 - RNA, 23 nt, Homo sapiens
agagugcaauggugccaucucgg

SEQ ID NO: 77056 - RNA, 22 nt, Homo sapiens
aguguuuuuaucaugaaagggu

SEQ ID NO: 77057 - RNA, 23 nt, Homo sapiens
ucuuuggcucuaauauaccuugu

SEQ ID NO: 77058 - RNA, 23 nt, Homo sapiens
caugaacuaguuugcagccauga

SEQ ID NO: 77059 - RNA, 22 nt, Homo sapiens
uuggaccacuugauuucugguc

SEQ ID NO: 77060 - RNA, 22 nt, Homo sapiens
caccugagcgggaugcucgccu

SEQ ID NO: 77061 - RNA, 22 nt, Homo sapiens
ucauccauacaguuagcaaagg

SEQ ID NO: 77062 - RNA, 22 nt, Homo sapiens
gucuuuguuuggucuguaucag

SEQ ID NO: 77063 - RNA, 23 nt, Homo sapiens
uggguucauucuugaagucagug

SEQ ID NO: 77064 - RNA, 22 nt, Homo sapiens
auuucuacuccuguguccagaa

SEQ ID NO: 77065 - RNA, 22 nt, Homo sapiens
cacugcacuccagucccgucuc

SEQ ID NO: 77066 - RNA, 22 nt, Homo sapiens
auugugcuaaaguaauaaguca

SEQ ID NO: 77067 - RNA, 22 nt, Homo sapiens
uggagagugauaaguaaaugga

SEQ ID NO: 77068 - RNA, 22 nt, Homo sapiens
gugcauguccacuaguccauau

SEQ ID NO: 77069 - RNA, 20 nt, Homo sapiens
cuuuggcaaugagaacaggg

SEQ ID NO: 77070 - RNA, 22 nt, Homo sapiens
ucacugaaaccuccgccuucug

SEQ ID NO: 77071 - RNA, 22 nt, Homo sapiens
uugagcaaugucacugaggcuu

SEQ ID NO: 77072 - RNA, 21 nt, Homo sapiens
uagagcuuggcacagaguaga

SEQ ID NO: 77073 - RNA, 22 nt, Homo sapiens
aagcugugucuugucagcuacc

SEQ ID NO: 77074 - RNA, 22 nt, Homo sapiens
uagucaaaucugaaggaaauuu

SEQ ID NO: 77075 - RNA, 22 nt, Homo sapiens
ugaaaguuauauugugaaauuc

SEQ ID NO: 77076 - RNA, 22 nt, Homo sapiens
gccaagaagugucuaagcagga

SEQ ID NO: 77077 - RNA, 22 nt, Homo sapiens
uugagcaccaugccuggccaug

SEQ ID NO: 77078 - RNA, 22 nt, Homo sapiens
aacugggcaagcauuacauggu

SEQ ID NO: 77079 - RNA, 22 nt, Homo sapiens
ugaagagucuaaaucugucuuc

SEQ ID NO: 77080 - RNA, 22 nt, Homo sapiens
uauuagugucuuuugguuagaa

SEQ ID NO: 77081 - RNA, 22 nt, Homo sapiens
augugcacaugcuuacauguga

SEQ ID NO: 77082 - RNA, 22 nt, Homo sapiens
ugaagugaaugguaaguaugcc

SEQ ID NO: 77083 - RNA, 22 nt, Homo sapiens
agucacagccuuuuacuuuaga

SEQ ID NO: 77084 - RNA, 20 nt, Homo sapiens
gacuugagagugggagagua

SEQ ID NO: 77085 - RNA, 22 nt, Homo sapiens
uaucauaguuuggacuuucauu

SEQ ID NO: 77086 - RNA, 22 nt, Homo sapiens
uuccauuuguucggugucgcca

SEQ ID NO: 77087 - RNA, 22 nt, Homo sapiens
aagcugccuugugaaggcauuc

SEQ ID NO: 77088 - RNA, 22 nt, Homo sapiens
augugcuuauagguguauguuu

SEQ ID NO: 77089 - RNA, 22 nt, Homo sapiens
auagugcugcaauaaccauggg

SEQ ID NO: 77090 - RNA, 22 nt, Homo sapiens
gugaugguaguuuguauuucug

SEQ ID NO: 77091 - RNA, 22 nt, Homo sapiens
auuuuugguugucagcacuagg

SEQ ID NO: 77092 - RNA, 22 nt, Homo sapiens
auugcuauuauuugaccauugu

SEQ ID NO: 77093 - RNA, 22 nt, Homo sapiens
uggagcccuaaacuucuaauau

SEQ ID NO: 77094 - RNA, 22 nt, Homo sapiens
gagcugaauugcugccauuugc

SEQ ID NO: 77095 - RNA, 22 nt, Homo sapiens
gucagauaauuugcauccaucu

SEQ ID NO: 77096 - RNA, 20 nt, Homo sapiens
cucacagacagcuucuuucu

SEQ ID NO: 77097 - RNA, 22 nt, Homo sapiens
uuacaguagaugaggguauaau

SEQ ID NO: 77098 - RNA, 20 nt, Homo sapiens
acaaaugcauucugugacau

SEQ ID NO: 77099 - RNA, 19 nt, Homo sapiens
acugagcuaccugggggca

SEQ ID NO: 77100 - RNA, 22 nt, Homo sapiens
uccaaaucucuggcacugggau

SEQ ID NO: 77101 - RNA, 22 nt, Homo sapiens
cucaaguaauccucccgccuug

SEQ ID NO: 77102 - RNA, 22 nt, Homo sapiens
uugaggugggaggaucacuuga

SEQ ID NO: 77103 - RNA, 22 nt, Homo sapiens
gugcuuguguuaauauguagcu

SEQ ID NO: 77104 - RNA, 22 nt, Homo sapiens
caaaguaauuacgguuuuggcc

SEQ ID NO: 77105 - RNA, 22 nt, Homo sapiens
uuuggaagaugccacuguauca

SEQ ID NO: 77106 - RNA, 22 nt, Homo sapiens
cuuuguguggacauuucaggca

SEQ ID NO: 77107 - RNA, 22 nt, Homo sapiens
auggccugaugcaccuguccca

SEQ ID NO: 77108 - RNA, 22 nt, Homo sapiens
guaagagcauguaguggcucua

SEQ ID NO: 77109 - RNA, 22 nt, Homo sapiens
aaagucuguuuugucagagacu

SEQ ID NO: 77110 - RNA, 22 nt, Homo sapiens
ugagaguagggguugggauugg

SEQ ID NO: 77111 - RNA, 22 nt, Homo sapiens
ggucacccugaugcuggugguc

SEQ ID NO: 77112 - RNA, 22 nt, Homo sapiens
uaacuagaaaggagacaguugc

SEQ ID NO: 77113 - RNA, 22 nt, Homo sapiens
gcucuuuugggguaauucugag

SEQ ID NO: 77114 - RNA, 22 nt, Homo sapiens
uucccuagaacacauggaggga

SEQ ID NO: 77115 - RNA, 22 nt, Homo sapiens
uacaguagaaugucuuucaaaa

SEQ ID NO: 77116 - RNA, 17 nt, Homo sapiens
auaaacucaucauuuuu

SEQ ID NO: 77117 - RNA, 19 nt, Homo sapiens
ugagaucuuuacuggguuu

SEQ ID NO: 77118 - RNA, 22 nt, Homo sapiens
cugugguguaacucuuggggcg

SEQ ID NO: 77119 - RNA, 22 nt, Homo sapiens
cagcaucauucaucugggguaa

SEQ ID NO: 77120 - RNA, 22 nt, Homo sapiens
uucucuggucagaggggagguu

SEQ ID NO: 77121 - RNA, 18 nt, Homo sapiens
gagcaccuuuuuugcaga

SEQ ID NO: 77122 - RNA, 22 nt, Homo sapiens
uacuguguaguuagaccucaga

SEQ ID NO: 77123 - RNA, 22 nt, Homo sapiens
gaaagauuuccugagcuagaaa

SEQ ID NO: 77124 - RNA, 22 nt, Homo sapiens
ugaggucauguucugucagguu

SEQ ID NO: 77125 - RNA, 22 nt, Homo sapiens
aaugcacauaaaauccuccagg

SEQ ID NO: 77126 - RNA, 22 nt, Homo sapiens
ugcuagaagaucacacacauca

SEQ ID NO: 77127 - RNA, 22 nt, Homo sapiens
gugguuuuacaaagagaaagau

SEQ ID NO: 77128 - RNA, 19 nt, Homo sapiens
caccgccugcccccugcug

SEQ ID NO: 77129 - RNA, 22 nt, Homo sapiens
ucaccuggagccuucacauucu

SEQ ID NO: 77130 - RNA, 22 nt, Homo sapiens
ggggucauuaaauuccgcuggu

SEQ ID NO: 77131 - RNA, 22 nt, Homo sapiens
augguuuuacugcaaaauggga

SEQ ID NO: 77132 - RNA, 22 nt, Homo sapiens
aaguauuaugaguccuuguuuu

SEQ ID NO: 77133 - RNA, 22 nt, Homo sapiens
cuccagugcaaagucaugauca

SEQ ID NO: 77134 - RNA, 22 nt, Homo sapiens
auuaaauguuggacguauacau

SEQ ID NO: 77135 - RNA, 19 nt, Homo sapiens
ucucugguguuggagggga

SEQ ID NO: 77136 - RNA, 22 nt, Homo sapiens
cuccauuuggaacagauguccu

SEQ ID NO: 77137 - RNA, 22 nt, Homo sapiens
uucagcacaguguggaucauuc

SEQ ID NO: 77138 - RNA, 22 nt, Homo sapiens
augaggugggagaaucacuuga

SEQ ID NO: 77139 - RNA, 22 nt, Homo sapiens
uaagggacauguguugccuaag

SEQ ID NO: 77140 - RNA, 22 nt, Homo sapiens
uuagaacagugcucaccacaaa

SEQ ID NO: 77141 - RNA, 17 nt, Homo sapiens
gagguaguuuacuuuca

SEQ ID NO: 77142 - RNA, 18 nt, Homo sapiens
uuagaugguuuuaaaacu

SEQ ID NO: 77143 - RNA, 22 nt, Homo sapiens
uccagguuuggcuuuauaacuu

SEQ ID NO: 77144 - RNA, 19 nt, Homo sapiens
ggucacagggguuacaagg

SEQ ID NO: 77145 - RNA, 19 nt, Homo sapiens
caugugcacuacuggcuuc

SEQ ID NO: 77146 - RNA, 22 nt, Homo sapiens
uaucucaguguacaggaugaua

SEQ ID NO: 77147 - RNA, 19 nt, Homo sapiens
caugccacugcacuugagu

SEQ ID NO: 77148 - RNA, 22 nt, Homo sapiens
ccuguguuaugguuucuaaugu

SEQ ID NO: 77149 - RNA, 22 nt, Homo sapiens
auggcaaaaaaugcaauuacuu

SEQ ID NO: 77150 - RNA, 22 nt, Homo sapiens
uuggggcacggccucuguugcc

SEQ ID NO: 77151 - RNA, 22 nt, Homo sapiens
gugaaaagaugagcaccauaca

SEQ ID NO: 77152 - RNA, 21 nt, Homo sapiens
agagucaucucuaucuguacc

SEQ ID NO: 77153 - RNA, 22 nt, Homo sapiens
ggugaguggugcuuaaguucag

SEQ ID NO: 77154 - RNA, 22 nt, Homo sapiens
ugugcacaauguacagguuagu

SEQ ID NO: 77155 - RNA, 20 nt, Homo sapiens
agcuguuguuaaaaaggagg

SEQ ID NO: 77156 - RNA, 22 nt, Homo sapiens
gagaacuaaugguuugauaagg

SEQ ID NO: 77157 - RNA, 22 nt, Homo sapiens
auugcacaucugcacuacagcc

SEQ ID NO: 77158 - RNA, 22 nt, Homo sapiens
ggccggguggccauggcugccc

SEQ ID NO: 77159 - RNA, 22 nt, Homo sapiens
uucuugcacuuaacugacauuc

SEQ ID NO: 77160 - RNA, 23 nt, Homo sapiens
uugcauagacauccucauagauu

SEQ ID NO: 77161 - RNA, 22 nt, Homo sapiens
uaaugcacuuuccuccaaggcu

SEQ ID NO: 77162 - RNA, 22 nt, Homo sapiens
augaauccauuccugccacaga

SEQ ID NO: 77163 - RNA, 22 nt, Homo sapiens
gugaaugcauuaagaaggggga

SEQ ID NO: 77164 - RNA, 22 nt, Homo sapiens
uuuggccauguuggucaggcug

SEQ ID NO: 77165 - RNA, 22 nt, Homo sapiens
gagcucauuaaaaauguagaau

SEQ ID NO: 77166 - RNA, 22 nt, Homo sapiens
cugggcaaugcggcuggauaga

SEQ ID NO: 77167 - RNA, 22 nt, Homo sapiens
acuguguguuugucuagcacag

SEQ ID NO: 77168 - RNA, 22 nt, Homo sapiens
ucacugaaaccgccuccaccuc

SEQ ID NO: 77169 - RNA, 22 nt, Homo sapiens
cugucacugggaggggcagcag

SEQ ID NO: 77170 - RNA, 22 nt, Homo sapiens
cuguccugcagagucagaauga

SEQ ID NO: 77171 - RNA, 21 nt, Homo sapiens
uugugccaaacccuggaggga

SEQ ID NO: 77172 - RNA, 22 nt, Homo sapiens
gucagugucuuaacagagauua

SEQ ID NO: 77173 - RNA, 22 nt, Homo sapiens
uugagauggagucucacugugu

SEQ ID NO: 77174 - RNA, 22 nt, Homo sapiens
ucauucacucccuugaaguuag

SEQ ID NO: 77175 - RNA, 22 nt, Homo sapiens
uuuugcuugugaauagccacau

SEQ ID NO: 77176 - RNA, 22 nt, Homo sapiens
cugaggugggaggauuacuuga

SEQ ID NO: 77177 - RNA, 22 nt, Homo sapiens
cuuuguggggucuuuccucaaa

SEQ ID NO: 77178 - RNA, 22 nt, Homo sapiens
ugucauguggcuaacgauucau

SEQ ID NO: 77179 - RNA, 22 nt, Homo sapiens
uuaaguuguagcuacaaauaca

SEQ ID NO: 77180 - RNA, 22 nt, Homo sapiens
uaugaaucuggcuacuccaggg

SEQ ID NO: 77181 - RNA, 21 nt, Homo sapiens
gugaucaugucacugcacucc

SEQ ID NO: 77182 - RNA, 22 nt, Homo sapiens
cuggcagucugccucuucacug

SEQ ID NO: 77183 - RNA, 22 nt, Homo sapiens
uggcaagaccccaucucuacaa

SEQ ID NO: 77184 - RNA, 22 nt, Homo sapiens
gugaccucuguugcugucacua

SEQ ID NO: 77185 - RNA, 22 nt, Homo sapiens
acaguguuacuugauaguguau

SEQ ID NO: 77186 - RNA, 22 nt, Homo sapiens
aaaugcuuucuuggaccauuug

SEQ ID NO: 77187 - RNA, 18 nt, Homo sapiens
cuucauugcuguuuugcu

SEQ ID NO: 77188 - RNA, 22 nt, Homo sapiens
uugucaguguucacucaaagcu

SEQ ID NO: 77189 - RNA, 22 nt, Homo sapiens
aggcaggugaaagauaguuuua

SEQ ID NO: 77190 - RNA, 22 nt, Homo sapiens
gucaugcaggguucgccagccc

SEQ ID NO: 77191 - RNA, 22 nt, Homo sapiens
gugcacaacaugcaguuuuguu

SEQ ID NO: 77192 - RNA, 23 nt, Homo sapiens
agccugguuucccugcuucuccc

SEQ ID NO: 77193 - RNA, 22 nt, Homo sapiens
uuguagcaaauauauuuuggaa

SEQ ID NO: 77194 - RNA, 22 nt, Homo sapiens
cacugcacucuucuucugggca

SEQ ID NO: 77195 - RNA, 22 nt, Homo sapiens
ugacuaaaacugaguuucauua

SEQ ID NO: 77196 - RNA, 22 nt, Homo sapiens
ucucauggagucaggagcagaa

SEQ ID NO: 77197 - RNA, 22 nt, Homo sapiens
ugugcauauaaguguguauaua

SEQ ID NO: 77198 - RNA, 22 nt, Homo sapiens
uuccauguaguugaacgguuuu

SEQ ID NO: 77199 - RNA, 22 nt, Homo sapiens
gugcacaacaugcagguuuguu

SEQ ID NO: 77200 - RNA, 22 nt, Homo sapiens
aacaguguuuuggguuuucugg

SEQ ID NO: 77201 - RNA, 22 nt, Homo sapiens
uggguagagaaucaggaucuua

SEQ ID NO: 77202 - RNA, 20 nt, Homo sapiens
ugcagcacugggaaugcagu

SEQ ID NO: 77203 - RNA, 22 nt, Homo sapiens
ugagguugaaggacauuuuuau

SEQ ID NO: 77204 - RNA, 22 nt, Homo sapiens
caaagucuucucauuaugucuu

SEQ ID NO: 77205 - RNA, 17 nt, Homo sapiens
uuucucagcccucuucu

SEQ ID NO: 77206 - RNA, 22 nt, Homo sapiens
guggcagagucagagggaaaug

SEQ ID NO: 77207 - RNA, 22 nt, Homo sapiens
uggggugugagggagaaagaaa

SEQ ID NO: 77208 - RNA, 22 nt, Homo sapiens
ugagcuguuugaagaagcauuu

SEQ ID NO: 77209 - RNA, 22 nt, Homo sapiens
cauggcauuugcagaguugaaa

SEQ ID NO: 77210 - RNA, 22 nt, Homo sapiens
cacugcacuccaguuuggauga

SEQ ID NO: 77211 - RNA, 21 nt, Homo sapiens
aguucacauggcuccuguguu

SEQ ID NO: 77212 - RNA, 22 nt, Homo sapiens
gugagaccaauguacuaccuuc

SEQ ID NO: 77213 - RNA, 21 nt, Homo sapiens
cccagguucucugaggguaga

SEQ ID NO: 77214 - RNA, 23 nt, Homo sapiens
cuguggugaggcccuagaaucug

SEQ ID NO: 77215 - RNA, 22 nt, Homo sapiens
cuggaaagcaaagggugcauug

SEQ ID NO: 77216 - RNA, 21 nt, Homo sapiens
gagaggauucgccagccucuu

SEQ ID NO: 77217 - RNA, 22 nt, Homo sapiens
ugucaccuugcucauccucgga

SEQ ID NO: 77218 - RNA, 22 nt, Homo sapiens
ggccuguaaacuagagacccug

SEQ ID NO: 77219 - RNA, 22 nt, Homo sapiens
ucacagaugcuugacccauuuc

SEQ ID NO: 77220 - RNA, 19 nt, Homo sapiens
ucaccaguacacaauacaa

SEQ ID NO: 77221 - RNA, 22 nt, Homo sapiens
gucuuccagccuccaucuuucu

SEQ ID NO: 77222 - RNA, 22 nt, Homo sapiens
ggcuagaauagggauagaccuu

SEQ ID NO: 77223 - RNA, 22 nt, Homo sapiens
uaaugugaauagugcuguaaug

SEQ ID NO: 77224 - RNA, 22 nt, Homo sapiens
cuguaaggcacuaagcauaugu

SEQ ID NO: 77225 - RNA, 22 nt, Homo sapiens
gugagggaugugaaaaagguca

SEQ ID NO: 77226 - RNA, 22 nt, Homo sapiens
cacugcacuccagucuggcgac

SEQ ID NO: 77227 - RNA, 22 nt, Homo sapiens
ggucugguguugaaauucuuca

SEQ ID NO: 77228 - RNA, 22 nt, Homo sapiens
ugcaagacacuguccugggcau

SEQ ID NO: 77229 - RNA, 22 nt, Homo sapiens
uuuuugagaauuggugaaacac

SEQ ID NO: 77230 - RNA, 22 nt, Homo sapiens
cuugucacuguuggcuuuagaa

SEQ ID NO: 77231 - RNA, 22 nt, Homo sapiens
aggguaguaggcuugggauugg

SEQ ID NO: 77232 - RNA, 21 nt, Homo sapiens
uaucauggccauccucuucuc

SEQ ID NO: 77233 - RNA, 22 nt, Homo sapiens
aucauccugucaggagcuguga

SEQ ID NO: 77234 - RNA, 22 nt, Homo sapiens
ugugcaugacagcauacaaacg

SEQ ID NO: 77235 - RNA, 22 nt, Homo sapiens
ggcagcacaauuuucugaugga

SEQ ID NO: 77236 - RNA, 22 nt, Homo sapiens
uguauguugauguuauauucug

SEQ ID NO: 77237 - RNA, 21 nt, Homo sapiens
uagagagcaauaccuccagag

SEQ ID NO: 77238 - RNA, 22 nt, Homo sapiens
ucagauacuggugacaugaaug

SEQ ID NO: 77239 - RNA, 22 nt, Homo sapiens
uuucgugucuggucugugaugg

SEQ ID NO: 77240 - RNA, 17 nt, Homo sapiens
ccccugagcgaugcagu

SEQ ID NO: 77241 - RNA, 22 nt, Homo sapiens
cucauugcaaucuccaccuccc

SEQ ID NO: 77242 - RNA, 22 nt, Homo sapiens
ugucuggaaggguggccuccug

SEQ ID NO: 77243 - RNA, 22 nt, Homo sapiens
ggagugucccaaucucagcuca

SEQ ID NO: 77244 - RNA, 22 nt, Homo sapiens
auaugcacgugcauacacacuu

SEQ ID NO: 77245 - RNA, 22 nt, Homo sapiens
ucuauggaguuugaaugagaaa

SEQ ID NO: 77246 - RNA, 22 nt, Homo sapiens
accauugcacuccagccugggc

SEQ ID NO: 77247 - RNA, 22 nt, Homo sapiens
uuugcugagucauuccaugcug

SEQ ID NO: 77248 - RNA, 22 nt, Homo sapiens
ucccuugguaauucuguuccuu

SEQ ID NO: 77249 - RNA, 22 nt, Homo sapiens
agugguuuuggaauggaauuca

SEQ ID NO: 77250 - RNA, 22 nt, Homo sapiens
uguuauugagguuacuuauaag

SEQ ID NO: 77251 - RNA, 22 nt, Homo sapiens
ggagaugauuaugaaucacuua

SEQ ID NO: 77252 - RNA, 22 nt, Homo sapiens
cuagcagacaugggcugaacca

SEQ ID NO: 77253 - RNA, 22 nt, Homo sapiens
uggacugagauuucagcugcca

SEQ ID NO: 77254 - RNA, 22 nt, Homo sapiens
gagcacauaugacauuuucuuc

SEQ ID NO: 77255 - RNA, 22 nt, Homo sapiens
uuugugcuccucucaguaugug

SEQ ID NO: 77256 - RNA, 22 nt, Homo sapiens
aggugcucuuccuguaggucac

SEQ ID NO: 77257 - RNA, 22 nt, Homo sapiens
ugugccacugcacucuggccug

SEQ ID NO: 77258 - RNA, 22 nt, Homo sapiens
uacuacuuucugacaucuuuaa

SEQ ID NO: 77259 - RNA, 22 nt, Homo sapiens
aaaagucuguagugaaagguga

SEQ ID NO: 77260 - RNA, 22 nt, Homo sapiens
gcagugcaugacgguauauaua

SEQ ID NO: 77261 - RNA, 22 nt, Homo sapiens
agcuucauuguuaugaauguca

SEQ ID NO: 77262 - RNA, 21 nt, Homo sapiens
auagcacuucacuugguuaga

SEQ ID NO: 77263 - RNA, 22 nt, Homo sapiens
ugcauuaguaaguaauuuuaau

SEQ ID NO: 77264 - RNA, 22 nt, Homo sapiens
cuggauagagauugaugaugcu

SEQ ID NO: 77265 - RNA, 22 nt, Homo sapiens
augaagcuagcugauugcugau

SEQ ID NO: 77266 - RNA, 22 nt, Homo sapiens
ucccuuucuggaguuucccaag

SEQ ID NO: 77267 - RNA, 22 nt, Homo sapiens
ggacagugaaugccacuccucc

SEQ ID NO: 77268 - RNA, 22 nt, Homo sapiens
ugcauuguuuagaaacacuggg

SEQ ID NO: 77269 - RNA, 22 nt, Homo sapiens
uuuccuguagggggcaaggccu

SEQ ID NO: 77270 - RNA, 22 nt, Homo sapiens
caccaggugcccagcacggcca

SEQ ID NO: 77271 - RNA, 22 nt, Homo sapiens
aaaugguguuaguagaucuuua

SEQ ID NO: 77272 - RNA, 22 nt, Homo sapiens
ugcagcauguaggcacguuauu

SEQ ID NO: 77273 - RNA, 22 nt, Homo sapiens
cugaggugauauauacauauuu

SEQ ID NO: 77274 - RNA, 22 nt, Homo sapiens
gagaaugcaugaaagacuuaca

SEQ ID NO: 77275 - RNA, 22 nt, Homo sapiens
ucacacugucuugguuacucuu

SEQ ID NO: 77276 - RNA, 22 nt, Homo sapiens
uuggaagguaaucaaaaguucu

SEQ ID NO: 77277 - RNA, 22 nt, Homo sapiens
gcugagguucaagaagguuaaa

SEQ ID NO: 77278 - RNA, 22 nt, Homo sapiens
cugcaagaaucguaguauuuga

SEQ ID NO: 77279 - RNA, 22 nt, Homo sapiens
ucacugaaaccacugccuccug

SEQ ID NO: 77280 - RNA, 22 nt, Homo sapiens
ggagcucaucuagcauagaggu

SEQ ID NO: 77281 - RNA, 22 nt, Homo sapiens
ucaaagucuucucaaguaacau

SEQ ID NO: 77282 - RNA, 22 nt, Homo sapiens
aacucugucuccuucaaguuca

SEQ ID NO: 77283 - RNA, 22 nt, Homo sapiens
auccucugagagaguuucauaa

SEQ ID NO: 77284 - RNA, 22 nt, Homo sapiens
agcugugucuucuuaaagauuu

SEQ ID NO: 77285 - RNA, 22 nt, Homo sapiens
augggaaaaucagaaggccugg

SEQ ID NO: 77286 - RNA, 19 nt, Homo sapiens
agcaucauuauuguuuugg

SEQ ID NO: 77287 - RNA, 22 nt, Homo sapiens
auagcagcaccucacucuacug

SEQ ID NO: 77288 - RNA, 22 nt, Homo sapiens
ggagguagguuugugauuugua

SEQ ID NO: 77289 - RNA, 22 nt, Homo sapiens
agcuggaauuuaagguagauag

SEQ ID NO: 77290 - RNA, 22 nt, Homo sapiens
ucaugggagcccccaucaugag

SEQ ID NO: 77291 - RNA, 22 nt, Homo sapiens
uuuggcccugagggauggcaua

SEQ ID NO: 77292 - RNA, 22 nt, Homo sapiens
ugagaacugccuguauuuaucu

SEQ ID NO: 77293 - RNA, 22 nt, Homo sapiens
uuuggucuuuuguaaguuaucu

SEQ ID NO: 77294 - RNA, 22 nt, Homo sapiens
ggaaaguaacccauucucuuac

SEQ ID NO: 77295 - RNA, 22 nt, Homo sapiens
acccugucacucccaucaauuu

SEQ ID NO: 77296 - RNA, 20 nt, Homo sapiens
cucaccagguguaggcugag

SEQ ID NO: 77297 - RNA, 22 nt, Homo sapiens
uggcagauaggauacaggacua

SEQ ID NO: 77298 - RNA, 22 nt, Homo sapiens
ugauggcaauggcauucauuuu

SEQ ID NO: 77299 - RNA, 22 nt, Homo sapiens
aucucuugccagucagaauggu

SEQ ID NO: 77300 - RNA, 22 nt, Homo sapiens
guccauuuguuuccagagcacu

SEQ ID NO: 77301 - RNA, 19 nt, Homo sapiens
cuugccccauucauccucu

SEQ ID NO: 77302 - RNA, 23 nt, Homo sapiens
ccacacuguuuagaauggcauca

SEQ ID NO: 77303 - RNA, 21 nt, Homo sapiens
uugguccacaugucauaguua

SEQ ID NO: 77304 - RNA, 22 nt, Homo sapiens
aaaugcagcacucaagugggaa

SEQ ID NO: 77305 - RNA, 22 nt, Homo sapiens
auguugcuugaaggcauuuugu

SEQ ID NO: 77306 - RNA, 22 nt, Homo sapiens
augucuguuugcugagcccggc

SEQ ID NO: 77307 - RNA, 22 nt, Homo sapiens
aaacugaucugaaggccaggcu

SEQ ID NO: 77308 - RNA, 22 nt, Homo sapiens
uaacaguguauuccuuuggaca

SEQ ID NO: 77309 - RNA, 22 nt, Homo sapiens
ucuuuguuggaguccaaggaua

SEQ ID NO: 77310 - RNA, 22 nt, Homo sapiens
ucacugaggucugagcuuuaug

SEQ ID NO: 77311 - RNA, 22 nt, Homo sapiens
uugugcuuguaacuacauucag

SEQ ID NO: 77312 - RNA, 22 nt, Homo sapiens
cacugcgaccuccaccucccgg

SEQ ID NO: 77313 - RNA, 22 nt, Homo sapiens
cugagauaauuucuagguguca

SEQ ID NO: 77314 - RNA, 22 nt, Homo sapiens
uauaacaaugcaagaauggccu

SEQ ID NO: 77315 - RNA, 22 nt, Homo sapiens
ucacugggagaccaaagccauc

SEQ ID NO: 77316 - RNA, 22 nt, Homo sapiens
uuacccuuuaacccuuuaaagu

SEQ ID NO: 77317 - RNA, 22 nt, Homo sapiens
aguccauuugaugaugauucca

SEQ ID NO: 77318 - RNA, 22 nt, Homo sapiens
ugaguucaauguuaaugaagca

SEQ ID NO: 77319 - RNA, 22 nt, Homo sapiens
ucacaggguguuauuagaauua

SEQ ID NO: 77320 - RNA, 22 nt, Homo sapiens
uccaugaggcuacaguaaucuc

SEQ ID NO: 77321 - RNA, 22 nt, Homo sapiens
gugugacagcuauagacaugau

SEQ ID NO: 77322 - RNA, 22 nt, Homo sapiens
guucaucagggauauuggcuua

SEQ ID NO: 77323 - RNA, 22 nt, Homo sapiens
uaugaaucugagagaucuggaa

SEQ ID NO: 77324 - RNA, 22 nt, Homo sapiens
auuggcaauggcaaagcagagu

SEQ ID NO: 77325 - RNA, 22 nt, Homo sapiens
uccugagacucacaggcucccc

SEQ ID NO: 77326 - RNA, 22 nt, Homo sapiens
ccauggcaauggucagucuauu

SEQ ID NO: 77327 - RNA, 22 nt, Homo sapiens
cacuaggcuggagugcaguggc

SEQ ID NO: 77328 - RNA, 20 nt, Homo sapiens
aagcaagcauuugcaaucau

SEQ ID NO: 77329 - RNA, 22 nt, Homo sapiens
uugauguguuuccaggauuugu

SEQ ID NO: 77330 - RNA, 22 nt, Homo sapiens
aagcaggugucugugucuguaa

SEQ ID NO: 77331 - RNA, 22 nt, Homo sapiens
auuccacaguuaacacagaccg

SEQ ID NO: 77332 - RNA, 22 nt, Homo sapiens
acaguauaaugcuguagggaga

SEQ ID NO: 77333 - RNA, 21 nt, Homo sapiens
uagauaguugguucugaaucu

SEQ ID NO: 77334 - RNA, 22 nt, Homo sapiens
agugcacucuuuccucucuuac

SEQ ID NO: 77335 - RNA, 22 nt, Homo sapiens
aucagcaugcagaagucggggg

SEQ ID NO: 77336 - RNA, 22 nt, Homo sapiens
uuuuuggguaaugauuaucaau

SEQ ID NO: 77337 - RNA, 22 nt, Homo sapiens
ugcaaucauuuggaggagaaga

SEQ ID NO: 77338 - RNA, 22 nt, Homo sapiens
uaucucagagaaucagauuuac

SEQ ID NO: 77339 - RNA, 22 nt, Homo sapiens
agccauacaacguaugcaugua

SEQ ID NO: 77340 - RNA, 22 nt, Homo sapiens
uugauguugaggacauaaaccu

SEQ ID NO: 77341 - RNA, 22 nt, Homo sapiens
aucugguguauuggugcugggu

SEQ ID NO: 77342 - RNA, 22 nt, Homo sapiens
uccuucacucuacaucuuuguu

SEQ ID NO: 77343 - RNA, 21 nt, Homo sapiens
ccucuuugagggaagaaaggg

SEQ ID NO: 77344 - RNA, 22 nt, Homo sapiens
uuggcagcauuccagccaagca

SEQ ID NO: 77345 - RNA, 17 nt, Homo sapiens
aaggugcuucgaccucc

SEQ ID NO: 77346 - RNA, 22 nt, Homo sapiens
acacugucugaugaaaguaguu

SEQ ID NO: 77347 - RNA, 22 nt, Homo sapiens
uuaaggcagugcaucuggaguu

SEQ ID NO: 77348 - RNA, 22 nt, Homo sapiens
agugcauuuguucugugucagg

SEQ ID NO: 77349 - RNA, 22 nt, Homo sapiens
gccuagagaguuaucaggcugu

SEQ ID NO: 77350 - RNA, 22 nt, Homo sapiens
cacugcacuccagcuugugggc

SEQ ID NO: 77351 - RNA, 22 nt, Homo sapiens
caauggcacuauuggaaaaggu

SEQ ID NO: 77352 - RNA, 22 nt, Homo sapiens
agaguaguuucuauauucuuca

SEQ ID NO: 77353 - RNA, 22 nt, Homo sapiens
acacaugugcguagacucuuua

SEQ ID NO: 77354 - RNA, 22 nt, Homo sapiens
ccagccgggugcaguggcucac

SEQ ID NO: 77355 - RNA, 22 nt, Homo sapiens
guacaguaguaaaagugaauga

SEQ ID NO: 77356 - RNA, 19 nt, Homo sapiens
uuucacacucgccuacuuc

SEQ ID NO: 77357 - RNA, 22 nt, Homo sapiens
cuugacaaugcuucaggcugaa

SEQ ID NO: 77358 - RNA, 22 nt, Homo sapiens
acaguacuguuguuugcugcca

SEQ ID NO: 77359 - RNA, 22 nt, Homo sapiens
aaugacuaagaugguacauuuu

SEQ ID NO: 77360 - RNA, 22 nt, Homo sapiens
ugucagaaucuagaggcugcua

SEQ ID NO: 77361 - RNA, 22 nt, Homo sapiens
ugagaugcaaaaugagaauugu

SEQ ID NO: 77362 - RNA, 22 nt, Homo sapiens
ucacacugaauuugaagcaaug

SEQ ID NO: 77363 - RNA, 22 nt, Homo sapiens
agcuguguugucugaagucaga

SEQ ID NO: 77364 - RNA, 22 nt, Homo sapiens
gagaaugagaggggaaggccac

SEQ ID NO: 77365 - RNA, 22 nt, Homo sapiens
gggcaacauugaguacccugaa

SEQ ID NO: 77366 - RNA, 22 nt, Homo sapiens
uuuguucuucguuccugagcca

SEQ ID NO: 77367 - RNA, 22 nt, Homo sapiens
ucagcacauucaaggccugccu

SEQ ID NO: 77368 - RNA, 22 nt, Homo sapiens
uauagcuaugggauguauuugc

SEQ ID NO: 77369 - RNA, 20 nt, Homo sapiens
aaacucugucuucuuuauca

SEQ ID NO: 77370 - RNA, 22 nt, Homo sapiens
uggcaacaucuggggacauguu

SEQ ID NO: 77371 - RNA, 22 nt, Homo sapiens
aagccagugugacaggaaacuu

SEQ ID NO: 77372 - RNA, 20 nt, Homo sapiens
acacuggaguaucaaggccc

SEQ ID NO: 77373 - RNA, 22 nt, Homo sapiens
auggcagcugguuuuacccuag

SEQ ID NO: 77374 - RNA, 22 nt, Homo sapiens
uugucucacuggaguuuaguaa

SEQ ID NO: 77375 - RNA, 17 nt, Homo sapiens
cuuguugugguaguuug

SEQ ID NO: 77376 - RNA, 22 nt, Homo sapiens
gcaaaguguuuuuaggaagucu

SEQ ID NO: 77377 - RNA, 22 nt, Homo sapiens
acgugcaugcacacacaugcgc

SEQ ID NO: 77378 - RNA, 22 nt, Homo sapiens
agcagcauuaguggaaucuugu

SEQ ID NO: 77379 - RNA, 22 nt, Homo sapiens
uugugguuuuagcacuguggau

SEQ ID NO: 77380 - RNA, 20 nt, Homo sapiens
ugcaguguccucacuuguca

SEQ ID NO: 77381 - RNA, 22 nt, Homo sapiens
gaacuguaaagaaauucuaagg

SEQ ID NO: 77382 - RNA, 22 nt, Homo sapiens
uguucuugagccuuuagaccua

SEQ ID NO: 77383 - RNA, 22 nt, Homo sapiens
cucacuggguguaaaacaugua

SEQ ID NO: 77384 - RNA, 22 nt, Homo sapiens
uuugugcuauguuauauauucu

SEQ ID NO: 77385 - RNA, 22 nt, Homo sapiens
aucauaucauuggugaacagug

SEQ ID NO: 77386 - RNA, 22 nt, Homo sapiens
ugaaaaguuguugaaggcuuca

SEQ ID NO: 77387 - RNA, 22 nt, Homo sapiens
guaaaguaaagcacaucaaggu

SEQ ID NO: 77388 - RNA, 22 nt, Homo sapiens
caugucacuuccucucugaugg

SEQ ID NO: 77389 - RNA, 22 nt, Homo sapiens
uuacaguauugcaaggacuagg

SEQ ID NO: 77390 - RNA, 22 nt, Homo sapiens
cccugagagcagggucuuucuc

SEQ ID NO: 77391 - RNA, 22 nt, Homo sapiens
ugugacacugaauggcagaacu

SEQ ID NO: 77392 - RNA, 22 nt, Homo sapiens
uuccauugugucaucuuggugg

SEQ ID NO: 77393 - RNA, 22 nt, Homo sapiens
ucaaaguagaaaaggggcaauu

SEQ ID NO: 77394 - RNA, 22 nt, Homo sapiens
uguggcuuuguaaccauggguc

SEQ ID NO: 77395 - RNA, 22 nt, Homo sapiens
gagguaagagaauaaacaguuu

SEQ ID NO: 77396 - RNA, 22 nt, Homo sapiens
gugguuuuuuucugccuuauag

SEQ ID NO: 77397 - RNA, 22 nt, Homo sapiens
ugggaucauucaaugacgaaau

SEQ ID NO: 77398 - RNA, 22 nt, Homo sapiens
auagcacaguguguguacacca

SEQ ID NO: 77399 - RNA, 22 nt, Homo sapiens
augucauagaagccugugaacc

SEQ ID NO: 77400 - RNA, 22 nt, Homo sapiens
ucugucuuugucaggaccagag

SEQ ID NO: 77401 - RNA, 22 nt, Homo sapiens
agagguaagcaguggcaagugc

SEQ ID NO: 77402 - RNA, 22 nt, Homo sapiens
gacaguguggcgauuccucaag

SEQ ID NO: 77403 - RNA, 20 nt, Homo sapiens
augagguguaugacacugaa

SEQ ID NO: 77404 - RNA, 22 nt, Homo sapiens
gugagggagcuggaauauuuau

SEQ ID NO: 77405 - RNA, 20 nt, Homo sapiens
augucagaguguggguacgg

SEQ ID NO: 77406 - RNA, 22 nt, Homo sapiens
agcuuaugcuuggaagagauga

SEQ ID NO: 77407 - RNA, 22 nt, Homo sapiens
uacuagaggaaaacuugaagac

SEQ ID NO: 77408 - RNA, 22 nt, Homo sapiens
uaguaaacauaguucuuuugcu

SEQ ID NO: 77409 - RNA, 21 nt, Homo sapiens
agcuuguguguaucacagugu

SEQ ID NO: 77410 - RNA, 22 nt, Homo sapiens
ugugcaguuuuagcguauuuua

SEQ ID NO: 77411 - RNA, 22 nt, Homo sapiens
guagaagcacaggugaguuggu

SEQ ID NO: 77412 - RNA, 22 nt, Homo sapiens
guacaguacugaaugaauguau

SEQ ID NO: 77413 - RNA, 22 nt, Homo sapiens
uaucauggaaagauguugaaau

SEQ ID NO: 77414 - RNA, 22 nt, Homo sapiens
gucacaguggccagugauguuc

SEQ ID NO: 77415 - RNA, 22 nt, Homo sapiens
ucucacauuucacagggauggg

SEQ ID NO: 77416 - RNA, 22 nt, Homo sapiens
gugagcuccucuucugcugcag

SEQ ID NO: 77417 - RNA, 22 nt, Homo sapiens
aucaaauugucauuuuaaggau

SEQ ID NO: 77418 - RNA, 22 nt, Homo sapiens
auguccauggaaucuguagcaa

SEQ ID NO: 77419 - RNA, 22 nt, Homo sapiens
ucaaaugguccacgugaacauu

SEQ ID NO: 77420 - RNA, 22 nt, Homo sapiens
uucccuguaucuucugccaugu

SEQ ID NO: 77421 - RNA, 22 nt, Homo sapiens
gagguugggaugagggauacag

SEQ ID NO: 77422 - RNA, 18 nt, Homo sapiens
acaucccaugcuggggug

SEQ ID NO: 77423 - RNA, 22 nt, Homo sapiens
cauggcacauauauaucuaggu

SEQ ID NO: 77424 - RNA, 22 nt, Homo sapiens
uagaaguaggcuacgugucugg

SEQ ID NO: 77425 - RNA, 22 nt, Homo sapiens
auuuggccuuuguaugcaguau

SEQ ID NO: 77426 - RNA, 19 nt, Homo sapiens
uacuggcucgggaauuuuc

SEQ ID NO: 77427 - RNA, 22 nt, Homo sapiens
cuuuugcugggucagcgguggu

SEQ ID NO: 77428 - RNA, 22 nt, Homo sapiens
aucaaaugcuggcagagugccu

SEQ ID NO: 77429 - RNA, 22 nt, Homo sapiens
ccagugcauggaucccaggggg

SEQ ID NO: 77430 - RNA, 22 nt, Homo sapiens
ccucuuuguugagacuucacca

SEQ ID NO: 77431 - RNA, 22 nt, Homo sapiens
gugacuacaggccacaguuugg

SEQ ID NO: 77432 - RNA, 22 nt, Homo sapiens
cacuguggauggaacuauguga

SEQ ID NO: 77433 - RNA, 22 nt, Homo sapiens
uuguccuggagguucuugcaag

SEQ ID NO: 77434 - RNA, 22 nt, Homo sapiens
guggcagaaaagagaagcaaug

SEQ ID NO: 77435 - RNA, 22 nt, Homo sapiens
ucuggccuagaacaauuaauua

SEQ ID NO: 77436 - RNA, 22 nt, Homo sapiens
uuuuggcuuaaagagaauguau

SEQ ID NO: 77437 - RNA, 22 nt, Homo sapiens
cugucuguuucaaaagugguua

SEQ ID NO: 77438 - RNA, 22 nt, Homo sapiens
acaucauugggggcuacaggug

SEQ ID NO: 77439 - RNA, 22 nt, Homo sapiens
auggagagaauuauucucucag

SEQ ID NO: 77440 - RNA, 20 nt, Homo sapiens
uggcuucuuaauugcaggca

SEQ ID NO: 77441 - RNA, 22 nt, Homo sapiens
ucuuuugugagucagccucucc

SEQ ID NO: 77442 - RNA, 22 nt, Homo sapiens
auugagcaaggucuccuaguau

SEQ ID NO: 77443 - RNA, 16 nt, Homo sapiens
gacugggcugaggaau

SEQ ID NO: 77444 - RNA, 22 nt, Homo sapiens
cacugcauucuccaccucccag

SEQ ID NO: 77445 - RNA, 20 nt, Homo sapiens
ugugagacugguuuugaacu

SEQ ID NO: 77446 - RNA, 22 nt, Homo sapiens
ucauggggugcuuugcuagauu

SEQ ID NO: 77447 - RNA, 22 nt, Homo sapiens
uccccgucacacgcaggcuuac

SEQ ID NO: 77448 - RNA, 22 nt, Homo sapiens
ugagucaugcuggagucauggc

SEQ ID NO: 77449 - RNA, 22 nt, Homo sapiens
guggcagcacauauagguuguu

SEQ ID NO: 77450 - RNA, 22 nt, Homo sapiens
gugaaguuuuuugcugagaguc

SEQ ID NO: 77451 - RNA, 23 nt, Homo sapiens
cccaguuaauccuuaaucuccac

SEQ ID NO: 77452 - RNA, 22 nt, Homo sapiens
uagaccaauuggcauauaguaa

SEQ ID NO: 77453 - RNA, 19 nt, Homo sapiens
acccuguccccaccuuuac

SEQ ID NO: 77454 - RNA, 22 nt, Homo sapiens
uuguguccccacucaaauuaca

SEQ ID NO: 77455 - RNA, 22 nt, Homo sapiens
agcuaguguucaccagagguca

SEQ ID NO: 77456 - RNA, 22 nt, Homo sapiens
uuaagucacacuagacaacuga

SEQ ID NO: 77457 - RNA, 22 nt, Homo sapiens
ucugucacugguggacgaucac

SEQ ID NO: 77458 - RNA, 22 nt, Homo sapiens
gcaagaauggaacaggagagcc

SEQ ID NO: 77459 - RNA, 22 nt, Homo sapiens
uuccauguugauacgugaaguu

SEQ ID NO: 77460 - RNA, 22 nt, Homo sapiens
uacuauugcaucggugauuagg

SEQ ID NO: 77461 - RNA, 22 nt, Homo sapiens
accugagacuaggcauuuuaua

SEQ ID NO: 77462 - RNA, 21 nt, Homo sapiens
uugagaagaauuagcucuucc

SEQ ID NO: 77463 - RNA, 23 nt, Homo sapiens
ggacuguaagggauauaaagguu

SEQ ID NO: 77464 - RNA, 22 nt, Homo sapiens
cugagauaggacucugcuggcu

SEQ ID NO: 77465 - RNA, 22 nt, Homo sapiens
cacugcacuccagcuuugguga

SEQ ID NO: 77466 - RNA, 20 nt, Homo sapiens
cagagcaaagcaguccuggc

SEQ ID NO: 77467 - RNA, 22 nt, Homo sapiens
uucuaaacaucuuacaaugcau

SEQ ID NO: 77468 - RNA, 22 nt, Homo sapiens
cucugagccugagguuccuacu

SEQ ID NO: 77469 - RNA, 19 nt, Homo sapiens
uccuugauugcaccacugc

SEQ ID NO: 77470 - RNA, 22 nt, Homo sapiens
auggcacugccuggcuucaugg

SEQ ID NO: 77471 - RNA, 22 nt, Homo sapiens
auaacauggaguuugucauuua

SEQ ID NO: 77472 - RNA, 23 nt, Homo sapiens
uuggucucccaaaguguugagau

SEQ ID NO: 77473 - RNA, 22 nt, Homo sapiens
gaucacuuugaugccaggaacu

SEQ ID NO: 77474 - RNA, 22 nt, Homo sapiens
uaugcacacucucccaggaggg

SEQ ID NO: 77475 - RNA, 22 nt, Homo sapiens
gagugcaucguggccauuuuaa

SEQ ID NO: 77476 - RNA, 22 nt, Homo sapiens
aagagguaauaacaaagcuucu

SEQ ID NO: 77477 - RNA, 22 nt, Homo sapiens
uaucucauccuccuugauccca

SEQ ID NO: 77478 - RNA, 22 nt, Homo sapiens
ucucccauccguacacggauug

SEQ ID NO: 77479 - RNA, 22 nt, Homo sapiens
uccugagacugaggagcuuugg

SEQ ID NO: 77480 - RNA, 22 nt, Homo sapiens
gggaugaagcccuaggguuggu

SEQ ID NO: 77481 - RNA, 22 nt, Homo sapiens
gugugcacaaucuggcaugugc

SEQ ID NO: 77482 - RNA, 22 nt, Homo sapiens
agaugguguuggcugaguguau

SEQ ID NO: 77483 - RNA, 22 nt, Homo sapiens
caaugugcuuggggcacaugag

SEQ ID NO: 77484 - RNA, 22 nt, Homo sapiens
ugagugaggcugggcagucccu

SEQ ID NO: 77485 - RNA, 22 nt, Homo sapiens
auugcagaaaugacagagcgcc

SEQ ID NO: 77486 - RNA, 22 nt, Homo sapiens
ugaguuguugcauucuuggugu

SEQ ID NO: 77487 - RNA, 22 nt, Homo sapiens
uugugaagaaaccagaaaaguu

SEQ ID NO: 77488 - RNA, 20 nt, Homo sapiens
aacaguguguaaguuuccuu

SEQ ID NO: 77489 - RNA, 22 nt, Homo sapiens
agcuugugauuuagagugagag

SEQ ID NO: 77490 - RNA, 22 nt, Homo sapiens
auuggaguuguacgcacgcuca

SEQ ID NO: 77491 - RNA, 22 nt, Homo sapiens
ugugccacugcacuccugccug

SEQ ID NO: 77492 - RNA, 22 nt, Homo sapiens
ggucagaaagacaggcauucag

SEQ ID NO: 77493 - RNA, 22 nt, Homo sapiens
ugaacacagccugccucugcca

SEQ ID NO: 77494 - RNA, 22 nt, Homo sapiens
uugcaggugguuuaugcaagac

SEQ ID NO: 77495 - RNA, 22 nt, Homo sapiens
ugaagcuaacuugauugugaug

SEQ ID NO: 77496 - RNA, 20 nt, Homo sapiens
gcaaauggaucccacaagcc

SEQ ID NO: 77497 - RNA, 22 nt, Homo sapiens
auucuugcuugaacuuggugca

SEQ ID NO: 77498 - RNA, 22 nt, Homo sapiens
agugcagugguuaggagccagg

SEQ ID NO: 77499 - RNA, 22 nt, Homo sapiens
uacaguagagaucagcaaacua

SEQ ID NO: 77500 - RNA, 22 nt, Homo sapiens
gugagcauauuaguauugcacu

SEQ ID NO: 77501 - RNA, 22 nt, Homo sapiens
uucucugggacauaggucgggu

SEQ ID NO: 77502 - RNA, 22 nt, Homo sapiens
uugcauaagugcauucugugau

SEQ ID NO: 77503 - RNA, 22 nt, Homo sapiens
ugagucccuaagacccucaggu

SEQ ID NO: 77504 - RNA, 22 nt, Homo sapiens
gaugcaguaagaaugcauagcg

SEQ ID NO: 77505 - RNA, 22 nt, Homo sapiens
gugaaagacauauaugguuuga

SEQ ID NO: 77506 - RNA, 22 nt, Homo sapiens
uguggcuuuuucuuggcugagg

SEQ ID NO: 77507 - RNA, 20 nt, Homo sapiens
uuuggcacugagugguauaa

SEQ ID NO: 77508 - RNA, 17 nt, Homo sapiens
cacugggugcaagagga

SEQ ID NO: 77509 - RNA, 21 nt, Homo sapiens
uggcaacauggauggauucug

SEQ ID NO: 77510 - RNA, 22 nt, Homo sapiens
aacaucaaccaugaggguugga

SEQ ID NO: 77511 - RNA, 22 nt, Homo sapiens
cuaacacagggcaagucaggcu

SEQ ID NO: 77512 - RNA, 22 nt, Homo sapiens
uggaugaagagaugguaguugc

SEQ ID NO: 77513 - RNA, 22 nt, Homo sapiens
gugcacaaugugcagguuuguu

SEQ ID NO: 77514 - RNA, 22 nt, Homo sapiens
gugcacaacgugcaggcuuguu

SEQ ID NO: 77515 - RNA, 22 nt, Homo sapiens
ugugagacugguucugaaccca

SEQ ID NO: 77516 - RNA, 22 nt, Homo sapiens
ugcaaauguuaguaacaccacu

SEQ ID NO: 77517 - RNA, 22 nt, Homo sapiens
guguauguuguccauggaugcg

SEQ ID NO: 77518 - RNA, 22 nt, Homo sapiens
uugugcuuaaugaguguaaggu

SEQ ID NO: 77519 - RNA, 22 nt, Homo sapiens
uggcaaaauggaauauguuggg

SEQ ID NO: 77520 - RNA, 22 nt, Homo sapiens
cuuuggccauagcuaaaugauu

SEQ ID NO: 77521 - RNA, 22 nt, Homo sapiens
aguacugucugguuaccugaca

SEQ ID NO: 77522 - RNA, 22 nt, Homo sapiens
gcaacugguuucaguuuuucag

SEQ ID NO: 77523 - RNA, 22 nt, Homo sapiens
gagcugccuugccuaugcaaga

SEQ ID NO: 77524 - RNA, 22 nt, Homo sapiens
auggcagcaccccacucuacug

SEQ ID NO: 77525 - RNA, 22 nt, Homo sapiens
auuccaguuguaagguuuuuca

SEQ ID NO: 77526 - RNA, 22 nt, Homo sapiens
gauguaggugcauuugcacgug

SEQ ID NO: 77527 - RNA, 22 nt, Homo sapiens
ucuuugauuuuguuacuaagac

SEQ ID NO: 77528 - RNA, 21 nt, Homo sapiens
ugagaguaguguauuauucuc

SEQ ID NO: 77529 - RNA, 22 nt, Homo sapiens
gugguuuuuagauuucuacagu

SEQ ID NO: 77530 - RNA, 22 nt, Homo sapiens
uucucauggugauggcaaaauc

SEQ ID NO: 77531 - RNA, 22 nt, Homo sapiens
auuuaugguuaauauaggaagu

SEQ ID NO: 77532 - RNA, 23 nt, Homo sapiens
cagcuucauugaacauaacuccu

SEQ ID NO: 77533 - RNA, 18 nt, Homo sapiens
ucacauggccgagagaga

SEQ ID NO: 77534 - RNA, 22 nt, Homo sapiens
uggucaccugaauuaugcaugu

SEQ ID NO: 77535 - RNA, 22 nt, Homo sapiens
cugagauggagucucgcauugu

SEQ ID NO: 77536 - RNA, 22 nt, Homo sapiens
uugaagacuaccuaccauacuu

SEQ ID NO: 77537 - RNA, 22 nt, Homo sapiens
uccugagaauagaguugcaugu

SEQ ID NO: 77538 - RNA, 22 nt, Homo sapiens
aaacauugaccucauccuggca

SEQ ID NO: 77539 - RNA, 22 nt, Homo sapiens
aaggugcucucuuauguagaaa

SEQ ID NO: 77540 - RNA, 22 nt, Homo sapiens
aaaugcaccacucuggugcagg

SEQ ID NO: 77541 - RNA, 22 nt, Homo sapiens
uucauggaacaaguggguucaa

SEQ ID NO: 77542 - RNA, 21 nt, Homo sapiens
uuaaguaauuacccaacucuc

SEQ ID NO: 77543 - RNA, 22 nt, Homo sapiens
ucgcaccauugcacuccagcca

SEQ ID NO: 77544 - RNA, 22 nt, Homo sapiens
cuacaguaugaaaccuuuacuc

SEQ ID NO: 77545 - RNA, 22 nt, Homo sapiens
gccugagaggauaugauccccu

SEQ ID NO: 77546 - RNA, 22 nt, Homo sapiens
ucaguguugauggcugcugacu

SEQ ID NO: 77547 - RNA, 23 nt, Homo sapiens
ugagguguuaagcagacuugucu

SEQ ID NO: 77548 - RNA, 21 nt, Homo sapiens
aggugucuuggguucccuggc

SEQ ID NO: 77549 - RNA, 22 nt, Homo sapiens
cccugagaugcuguuaaucugu

SEQ ID NO: 77550 - RNA, 22 nt, Homo sapiens
cuggcucugggcuaaagaaaua

SEQ ID NO: 77551 - RNA, 22 nt, Homo sapiens
uugugguugauacacguaggaa

SEQ ID NO: 77552 - RNA, 21 nt, Homo sapiens
acccccacaccuccuuaguuc

SEQ ID NO: 77553 - RNA, 22 nt, Homo sapiens
uggugcccuguccuucuguggc

SEQ ID NO: 77554 - RNA, 22 nt, Homo sapiens
uccccugagaacuugcuagaaa

SEQ ID NO: 77555 - RNA, 22 nt, Homo sapiens
ugcaguaggcccagcgggaggc

SEQ ID NO: 77556 - RNA, 22 nt, Homo sapiens
uaacaccuuugauagcacuuuu

SEQ ID NO: 77557 - RNA, 22 nt, Homo sapiens
aagcuggcauucauucguucuu

SEQ ID NO: 77558 - RNA, 19 nt, Homo sapiens
agcaguguggagauuucuc

SEQ ID NO: 77559 - RNA, 20 nt, Homo sapiens
ugaaggaggucauuuauacc

SEQ ID NO: 77560 - RNA, 22 nt, Homo sapiens
ggcaagaaaaugcaauuacugu

SEQ ID NO: 77561 - RNA, 22 nt, Homo sapiens
ugauaacauuucuucugguaca

SEQ ID NO: 77562 - RNA, 22 nt, Homo sapiens
ugugauggaguuucauggacug

SEQ ID NO: 77563 - RNA, 22 nt, Homo sapiens
gugggauggaaaugggcuucag

SEQ ID NO: 77564 - RNA, 22 nt, Homo sapiens
uguauguagugaccagggccag

SEQ ID NO: 77565 - RNA, 22 nt, Homo sapiens
uucccuuugaauuggaaaggug

SEQ ID NO: 77566 - RNA, 22 nt, Homo sapiens
aaagguaguacuucuagaaggg

SEQ ID NO: 77567 - RNA, 22 nt, Homo sapiens
ucagcaaugcugcacucuacug

SEQ ID NO: 77568 - RNA, 22 nt, Homo sapiens
uugugaucauugucaaauagug

SEQ ID NO: 77569 - RNA, 22 nt, Homo sapiens
uuuuaguggacaaagguauuua

SEQ ID NO: 77570 - RNA, 22 nt, Homo sapiens
uaugcacaugcaugcuugaaua

SEQ ID NO: 77571 - RNA, 22 nt, Homo sapiens
gaguuguuuuaaggcacugacu

SEQ ID NO: 77572 - RNA, 22 nt, Homo sapiens
uggacuguaaauuggggacucu

SEQ ID NO: 77573 - RNA, 22 nt, Homo sapiens
gcaccacugcacucucagcuug

SEQ ID NO: 77574 - RNA, 22 nt, Homo sapiens
uacaguguuuugguauuccaca

SEQ ID NO: 77575 - RNA, 22 nt, Homo sapiens
cagccgggugagguggcuuguu

SEQ ID NO: 77576 - RNA, 23 nt, Homo sapiens
ucacacuuaagagaaaugcagcu

SEQ ID NO: 77577 - RNA, 22 nt, Homo sapiens
agagcuguguuuuaacuuuuua

SEQ ID NO: 77578 - RNA, 22 nt, Homo sapiens
cacugcaguaaauugcgucggu

SEQ ID NO: 77579 - RNA, 22 nt, Homo sapiens
caugugcaugcuuucuuaugug

SEQ ID NO: 77580 - RNA, 22 nt, Homo sapiens
auggaaggagaauggucuuuga

SEQ ID NO: 77581 - RNA, 22 nt, Homo sapiens
augugugcuugugacacagccu

SEQ ID NO: 77582 - RNA, 22 nt, Homo sapiens
gagaacaguguuguauuuuuuc

SEQ ID NO: 77583 - RNA, 22 nt, Homo sapiens
ucaagugauucuugugccuuag

SEQ ID NO: 77584 - RNA, 23 nt, Homo sapiens
uuuugcaauaagucacuggaaua

SEQ ID NO: 77585 - RNA, 22 nt, Homo sapiens
uucaagaauuaaaguggcuuuu

SEQ ID NO: 77586 - RNA, 22 nt, Homo sapiens
aggcaugaguucagaggguaug

SEQ ID NO: 77587 - RNA, 22 nt, Homo sapiens
guguguaaauggcagugagcuc

SEQ ID NO: 77588 - RNA, 22 nt, Homo sapiens
guucacacuugcaaccccagca

SEQ ID NO: 77589 - RNA, 22 nt, Homo sapiens
ccugagacuugagggggcuucu

SEQ ID NO: 77590 - RNA, 22 nt, Homo sapiens
uguauguuguaagacuuagacc

SEQ ID NO: 77591 - RNA, 22 nt, Homo sapiens
uugagacggagucucacucugu

SEQ ID NO: 77592 - RNA, 22 nt, Homo sapiens
ucacugcacuccagccuuuaug

SEQ ID NO: 77593 - RNA, 22 nt, Homo sapiens
ucacugcacucuccgccuugcg

SEQ ID NO: 77594 - RNA, 22 nt, Homo sapiens
auggcuguuucugcaaugucua

SEQ ID NO: 77595 - RNA, 22 nt, Homo sapiens
ucacaugaauugucuuguucca

SEQ ID NO: 77596 - RNA, 22 nt, Homo sapiens
ccuuggcaauggcuggggcuga

SEQ ID NO: 77597 - RNA, 22 nt, Homo sapiens
cuucaaguguggccaccugacc

SEQ ID NO: 77598 - RNA, 22 nt, Homo sapiens
ucaucuggcgaaugugaagagu

SEQ ID NO: 77599 - RNA, 17 nt, Homo sapiens
uuucagaguggaagugu

SEQ ID NO: 77600 - RNA, 21 nt, Homo sapiens
cucucugcuuaugaauaguga

SEQ ID NO: 77601 - RNA, 22 nt, Homo sapiens
uugagauaggaacucacuaugc

SEQ ID NO: 77602 - RNA, 22 nt, Homo sapiens
cccugagaugugaauuucagag

SEQ ID NO: 77603 - RNA, 22 nt, Homo sapiens
aaaagcauucagagugcugggc

SEQ ID NO: 77604 - RNA, 22 nt, Homo sapiens
cugaauagucaacgauggacug

SEQ ID NO: 77605 - RNA, 22 nt, Homo sapiens
uccauugucuagauguaacaca

SEQ ID NO: 77606 - RNA, 22 nt, Homo sapiens
ucaucagaaucccuuagggaug

SEQ ID NO: 77607 - RNA, 22 nt, Homo sapiens
gggguauguaagugagugagug

SEQ ID NO: 77608 - RNA, 22 nt, Homo sapiens
uaauugcaguucuguguuauau

SEQ ID NO: 77609 - RNA, 22 nt, Homo sapiens
augaccaugauccuugccgacc

SEQ ID NO: 77610 - RNA, 22 nt, Homo sapiens
agcuucacaaugcagagggcag

SEQ ID NO: 77611 - RNA, 22 nt, Homo sapiens
augcacuuggcaggaugauucc

SEQ ID NO: 77612 - RNA, 22 nt, Homo sapiens
cuauucacaggcaauauguaca

SEQ ID NO: 77613 - RNA, 22 nt, Homo sapiens
uuggagcccuaacucucaguac

SEQ ID NO: 77614 - RNA, 22 nt, Homo sapiens
aagcuggagugcaguggugcga

SEQ ID NO: 77615 - RNA, 22 nt, Homo sapiens
aaaugcacaaagauuuugcacu

SEQ ID NO: 77616 - RNA, 19 nt, Homo sapiens
uacaggacugagcugaggu

SEQ ID NO: 77617 - RNA, 22 nt, Homo sapiens
gucauucauucagcaagcacug

SEQ ID NO: 77618 - RNA, 18 nt, Homo sapiens
uuugugcuccacaaagga

SEQ ID NO: 77619 - RNA, 22 nt, Homo sapiens
gucaagauuuguaggacagaga

SEQ ID NO: 77620 - RNA, 22 nt, Homo sapiens
uacauugucauauucucucucu

SEQ ID NO: 77621 - RNA, 22 nt, Homo sapiens
cucgagagaaaaugcuucacug

SEQ ID NO: 77622 - RNA, 22 nt, Homo sapiens
aagaugauguuguguuuucacu

SEQ ID NO: 77623 - RNA, 22 nt, Homo sapiens
agagagguggguggagccccca

SEQ ID NO: 77624 - RNA, 22 nt, Homo sapiens
uucuuccagccuugaggggccc

SEQ ID NO: 77625 - RNA, 22 nt, Homo sapiens
acaguggugcgaucucggcuca

SEQ ID NO: 77626 - RNA, 22 nt, Homo sapiens
ucucaguggcuuccucacuuuu

SEQ ID NO: 77627 - RNA, 22 nt, Homo sapiens
ugucauguaaagaguaaauggu

SEQ ID NO: 77628 - RNA, 22 nt, Homo sapiens
uuuugcaguuacagagagugag

SEQ ID NO: 77629 - RNA, 22 nt, Homo sapiens
cugacauuguugaucacagcca

SEQ ID NO: 77630 - RNA, 22 nt, Homo sapiens
uccuacaugcaguacauucaaa

SEQ ID NO: 77631 - RNA, 22 nt, Homo sapiens
uucacacugggccuacucugug

SEQ ID NO: 77632 - RNA, 17 nt, Homo sapiens
ggaaugaauuccagccc

SEQ ID NO: 77633 - RNA, 22 nt, Homo sapiens
gucucacagcuagcugcuuuau

SEQ ID NO: 77634 - RNA, 22 nt, Homo sapiens
ccacacugucuuggugggaaac

SEQ ID NO: 77635 - RNA, 22 nt, Homo sapiens
uuuuacacaucaccgcucgugu

SEQ ID NO: 77636 - RNA, 22 nt, Homo sapiens
uccacugagcuagaccacuugg

SEQ ID NO: 77637 - RNA, 22 nt, Homo sapiens
auccuguacuaagguuuuccca

SEQ ID NO: 77638 - RNA, 22 nt, Homo sapiens
ggguaaaucucuuuucauggcu

SEQ ID NO: 77639 - RNA, 22 nt, Homo sapiens
aacuggcauaugaacuuguucu

SEQ ID NO: 77640 - RNA, 22 nt, Homo sapiens
acugcaaugucgaauagagaug

SEQ ID NO: 77641 - RNA, 22 nt, Homo sapiens
uuacaccuguaauccagcacuu

SEQ ID NO: 77642 - RNA, 20 nt, Homo sapiens
ucucauggagggaaagagca

SEQ ID NO: 77643 - RNA, 22 nt, Homo sapiens
auugcugagacauugcuaaucu

SEQ ID NO: 77644 - RNA, 22 nt, Homo sapiens
uuuaaugcaucccaaaauguag

SEQ ID NO: 77645 - RNA, 22 nt, Homo sapiens
auacccucugggugguuaguug

SEQ ID NO: 77646 - RNA, 22 nt, Homo sapiens
cgcuggugucuaagcgacagcu

SEQ ID NO: 77647 - RNA, 22 nt, Homo sapiens
aaagagaucuaugggcacuaug

SEQ ID NO: 77648 - RNA, 22 nt, Homo sapiens
guugcugagucccaucaccaga

SEQ ID NO: 77649 - RNA, 22 nt, Homo sapiens
gggcaaaacuguacugccaagg

SEQ ID NO: 77650 - RNA, 22 nt, Homo sapiens
cucacugggaccacucugaagu

SEQ ID NO: 77651 - RNA, 22 nt, Homo sapiens
ugccauugcacuccagccuggg

SEQ ID NO: 77652 - RNA, 21 nt, Homo sapiens
ggcaagaaacacaaucaagua

SEQ ID NO: 77653 - RNA, 22 nt, Homo sapiens
augaagucguuacuaccaauug

SEQ ID NO: 77654 - RNA, 22 nt, Homo sapiens
cacugaaugugagguuggggag

SEQ ID NO: 77655 - RNA, 22 nt, Homo sapiens
cugagacacucuuaucugcaua

SEQ ID NO: 77656 - RNA, 22 nt, Homo sapiens
agcucauugcaaccuccgccuc

SEQ ID NO: 77657 - RNA, 22 nt, Homo sapiens
gagugcaauggcaagaucuugg

SEQ ID NO: 77658 - RNA, 17 nt, Homo sapiens
ugagggaugccugguuc

SEQ ID NO: 77659 - RNA, 22 nt, Homo sapiens
ugaguucaugcuuguaguucua

SEQ ID NO: 77660 - RNA, 22 nt, Homo sapiens
guggaagguaaugcagcuuacu

SEQ ID NO: 77661 - RNA, 22 nt, Homo sapiens
ggaucacuugagaccaggaguu

SEQ ID NO: 77662 - RNA, 19 nt, Homo sapiens
ugugaagaaaugcugcaag

SEQ ID NO: 77663 - RNA, 21 nt, Homo sapiens
gucuuacagccagaugccucu

SEQ ID NO: 77664 - RNA, 22 nt, Homo sapiens
uuacaguaugaguaagaguucu

SEQ ID NO: 77665 - RNA, 22 nt, Homo sapiens
gugucacagcuuccaucucggu

SEQ ID NO: 77666 - RNA, 22 nt, Homo sapiens
uauuguccacuuugcacugugu

SEQ ID NO: 77667 - RNA, 22 nt, Homo sapiens
ugugagaaaugcagaaucucag

SEQ ID NO: 77668 - RNA, 22 nt, Homo sapiens
ugcaagaaucuuucaggcuagc

SEQ ID NO: 77669 - RNA, 22 nt, Homo sapiens
ugugagacugacagggcagggu

SEQ ID NO: 77670 - RNA, 22 nt, Homo sapiens
ugaugucuugcaggcacgagau

SEQ ID NO: 77671 - RNA, 22 nt, Homo sapiens
ugugucacugcacuccagcgug

SEQ ID NO: 77672 - RNA, 19 nt, Homo sapiens
ucacaggguugacuugagg

SEQ ID NO: 77673 - RNA, 22 nt, Homo sapiens
auacguacauaugcacauaugg

SEQ ID NO: 77674 - RNA, 22 nt, Homo sapiens
auaaaguucugcuggcauauau

SEQ ID NO: 77675 - RNA, 22 nt, Homo sapiens
gcuguugugaacuauacaucua

SEQ ID NO: 77676 - RNA, 21 nt, Homo sapiens
gagcacauuguccucuaacgc

SEQ ID NO: 77677 - RNA, 22 nt, Homo sapiens
acccugucauccacauggugcu

SEQ ID NO: 77678 - RNA, 22 nt, Homo sapiens
auggcacugaagcguauugaca

SEQ ID NO: 77679 - RNA, 22 nt, Homo sapiens
aggcagcuguuauauacugagu

SEQ ID NO: 77680 - RNA, 22 nt, Homo sapiens
ucucccauccaugaacuucugu

SEQ ID NO: 77681 - RNA, 22 nt, Homo sapiens
gugugcauaugucuuuauagua

SEQ ID NO: 77682 - RNA, 22 nt, Homo sapiens
uagaucauauucagugcuuacu

SEQ ID NO: 77683 - RNA, 22 nt, Homo sapiens
gugggaugaucacaguucacug

SEQ ID NO: 77684 - RNA, 22 nt, Homo sapiens
acccugcuaaacagcccccugc

SEQ ID NO: 77685 - RNA, 22 nt, Homo sapiens
gcaagaguauuucaaggaagau

SEQ ID NO: 77686 - RNA, 22 nt, Homo sapiens
auagcagcagcuaguagugaua

SEQ ID NO: 77687 - RNA, 22 nt, Homo sapiens
uaagcagugcaagaauggaaua

SEQ ID NO: 77688 - RNA, 22 nt, Homo sapiens
uaagcaguaaaugaagucuugc

SEQ ID NO: 77689 - RNA, 22 nt, Homo sapiens
gucucccaaccccugugcccag

SEQ ID NO: 77690 - RNA, 22 nt, Homo sapiens
uggaaauaaaugugccaagauc

SEQ ID NO: 77691 - RNA, 22 nt, Homo sapiens
ucacauguguaugagcuuugau

SEQ ID NO: 77692 - RNA, 22 nt, Homo sapiens
gucucccagccuacauauuucu

SEQ ID NO: 77693 - RNA, 22 nt, Homo sapiens
uuacaugagacugucgcuaguu

SEQ ID NO: 77694 - RNA, 22 nt, Homo sapiens
ugaggaucucuaggaauuuauc

SEQ ID NO: 77695 - RNA, 22 nt, Homo sapiens
ugguccccaauacuucuauaga

SEQ ID NO: 77696 - RNA, 22 nt, Homo sapiens
cugagaucguggggcugcuguc

SEQ ID NO: 77697 - RNA, 22 nt, Homo sapiens
ugucauguauauaccacuucca

SEQ ID NO: 77698 - RNA, 22 nt, Homo sapiens
ugugucuugaauuuuguaugua

SEQ ID NO: 77699 - RNA, 22 nt, Homo sapiens
cacacugucuucaauggguggu

SEQ ID NO: 77700 - RNA, 22 nt, Homo sapiens
cucaaguacaugggauuacagg

SEQ ID NO: 77701 - RNA, 22 nt, Homo sapiens
cuaaaugcacugucaaaggaag

SEQ ID NO: 77702 - RNA, 22 nt, Homo sapiens
ucaguguuuggaaucucaauuu

SEQ ID NO: 77703 - RNA, 22 nt, Homo sapiens
cuggcccaguucugcguuuugc

SEQ ID NO: 77704 - RNA, 23 nt, Homo sapiens
ugacagucucccgauggcuaggc

SEQ ID NO: 77705 - RNA, 22 nt, Homo sapiens
acagugcuguuguguuuucacg

SEQ ID NO: 77706 - RNA, 18 nt, Homo sapiens
ucagucacugccuggcuu

SEQ ID NO: 77707 - RNA, 22 nt, Homo sapiens
cuggaauucaaaaucugaauuu

SEQ ID NO: 77708 - RNA, 19 nt, Homo sapiens
ugcaaagucuuuuccuauu

SEQ ID NO: 77709 - RNA, 22 nt, Homo sapiens
uuccuuguagcaaaugcgauga

SEQ ID NO: 77710 - RNA, 22 nt, Homo sapiens
agcaucaugcaguugcuauuca

SEQ ID NO: 77711 - RNA, 20 nt, Homo sapiens
gaaugguuucgggguucuug

SEQ ID NO: 77712 - RNA, 20 nt, Homo sapiens
gugagucauuaguaaccaaa

SEQ ID NO: 77713 - RNA, 22 nt, Homo sapiens
accagucucagguaugucuuua

SEQ ID NO: 77714 - RNA, 22 nt, Homo sapiens
ugacugucuagauagagcuugg

SEQ ID NO: 77715 - RNA, 22 nt, Homo sapiens
uagagguucuaagauucucaga

SEQ ID NO: 77716 - RNA, 21 nt, Homo sapiens
uaucccagucacaucuaccca

SEQ ID NO: 77717 - RNA, 20 nt, Homo sapiens
gucuuguagcucaaguuauu

SEQ ID NO: 77718 - RNA, 22 nt, Homo sapiens
cucacugugguguccuuaggua

SEQ ID NO: 77719 - RNA, 22 nt, Homo sapiens
gcuggugacuuuaaguugaagc

SEQ ID NO: 77720 - RNA, 22 nt, Homo sapiens
ugggaugaauacaaugggauca

SEQ ID NO: 77721 - RNA, 22 nt, Homo sapiens
gugugacuagucaugccugaau

SEQ ID NO: 77722 - RNA, 22 nt, Homo sapiens
gcugagcuaugccauauaugcc

SEQ ID NO: 77723 - RNA, 22 nt, Homo sapiens
ugagguuggggucagggcuagc

SEQ ID NO: 77724 - RNA, 22 nt, Homo sapiens
auagaggacugaggugaucuuu

SEQ ID NO: 77725 - RNA, 22 nt, Homo sapiens
aacagugccugucauuuaguag

SEQ ID NO: 77726 - RNA, 22 nt, Homo sapiens
agaucacagucuuugguuuuag

SEQ ID NO: 77727 - RNA, 19 nt, Homo sapiens
accuguagaaaguacaaca

SEQ ID NO: 77728 - RNA, 22 nt, Homo sapiens
ucugucuuugccuaaguuuguc

SEQ ID NO: 77729 - RNA, 22 nt, Homo sapiens
aucacagaacuuugagcagaga

SEQ ID NO: 77730 - RNA, 22 nt, Homo sapiens
uggcuuuuauuauguugaggua

SEQ ID NO: 77731 - RNA, 22 nt, Homo sapiens
cagauacuggaguccugaaguu

SEQ ID NO: 77732 - RNA, 22 nt, Homo sapiens
guaugucuugucuauggcugcu

SEQ ID NO: 77733 - RNA, 22 nt, Homo sapiens
gauuccauuuguggcuauuuac

SEQ ID NO: 77734 - RNA, 22 nt, Homo sapiens
ugagauaucauuucacacccag

SEQ ID NO: 77735 - RNA, 22 nt, Homo sapiens
agaugguguuuucucaccagau

SEQ ID NO: 77736 - RNA, 20 nt, Homo sapiens
ucuuuuuguggccccagagu

SEQ ID NO: 77737 - RNA, 22 nt, Homo sapiens
gagagcaugugcuggcaucagu

SEQ ID NO: 77738 - RNA, 22 nt, Homo sapiens
acugcacuccagcccaggugac

SEQ ID NO: 77739 - RNA, 20 nt, Homo sapiens
uucuugaguuaacaaguuac

SEQ ID NO: 77740 - RNA, 22 nt, Homo sapiens
aucauuaguuguggaauucuug

SEQ ID NO: 77741 - RNA, 22 nt, Homo sapiens
cugaggugggagaaucacauaa

SEQ ID NO: 77742 - RNA, 22 nt, Homo sapiens
cuacucuggagagugacaauca

SEQ ID NO: 77743 - RNA, 22 nt, Homo sapiens
ugauggcacagugaguuccagg

SEQ ID NO: 77744 - RNA, 22 nt, Homo sapiens
ugagcacagagccugggguggc

SEQ ID NO: 77745 - RNA, 22 nt, Homo sapiens
ugccugagcccagcccuguagu

SEQ ID NO: 77746 - RNA, 22 nt, Homo sapiens
ccaaguguuuucauuguuccau

SEQ ID NO: 77747 - RNA, 22 nt, Homo sapiens
aguuggccccuacugggaggug

SEQ ID NO: 77748 - RNA, 22 nt, Homo sapiens
gggaugaaguugauguagaaag

SEQ ID NO: 77749 - RNA, 16 nt, Homo sapiens
ugagaacaugcagcau

SEQ ID NO: 77750 - RNA, 22 nt, Homo sapiens
guggaggacuggauaaagaaaa

SEQ ID NO: 77751 - RNA, 22 nt, Homo sapiens
uugcagagccccacacugggcu

SEQ ID NO: 77752 - RNA, 22 nt, Homo sapiens
aggcuagacuuugagaauuuuu

SEQ ID NO: 77753 - RNA, 22 nt, Homo sapiens
aucaccugagcaguauacacug

SEQ ID NO: 77754 - RNA, 22 nt, Homo sapiens
ugcuguuguuugaugaaguaau

SEQ ID NO: 77755 - RNA, 21 nt, Homo sapiens
cuucuuggggcagggcagggu

SEQ ID NO: 77756 - RNA, 22 nt, Homo sapiens
caaagucuucaguugauucuga

SEQ ID NO: 77757 - RNA, 22 nt, Homo sapiens
ugagauagggucucacucuguc

SEQ ID NO: 77758 - RNA, 22 nt, Homo sapiens
agacaucauuugauggugggag

SEQ ID NO: 77759 - RNA, 22 nt, Homo sapiens
cuuccauaguuacacccaggga

SEQ ID NO: 77760 - RNA, 22 nt, Homo sapiens
agcagguguggcuuauccugaa

SEQ ID NO: 77761 - RNA, 22 nt, Homo sapiens
ucacacugcaucuguuggaauu

SEQ ID NO: 77762 - RNA, 22 nt, Homo sapiens
uccaguuguuauuuuuauaaag

SEQ ID NO: 77763 - RNA, 22 nt, Homo sapiens
uugaguauuggacugguaucuu

SEQ ID NO: 77764 - RNA, 22 nt, Homo sapiens
auagaucuauuuauguaucccu

SEQ ID NO: 77765 - RNA, 22 nt, Homo sapiens
gagacugagucucacucuguca

SEQ ID NO: 77766 - RNA, 22 nt, Homo sapiens
ugcagugugauuuucuggcuga

SEQ ID NO: 77767 - RNA, 22 nt, Homo sapiens
uuggcauagaggcucucaagcu

SEQ ID NO: 77768 - RNA, 22 nt, Homo sapiens
uuggcagcuguggaaucugggc

SEQ ID NO: 77769 - RNA, 22 nt, Homo sapiens
aacagagcuggugacuccaggu

SEQ ID NO: 77770 - RNA, 22 nt, Homo sapiens
ugugguuuuaguaaaacuaugu

SEQ ID NO: 77771 - RNA, 22 nt, Homo sapiens
uggaggacugcagaacugaggc

SEQ ID NO: 77772 - RNA, 22 nt, Homo sapiens
gggugguuuuauuaucagugac

SEQ ID NO: 77773 - RNA, 22 nt, Homo sapiens
gaaagguaggaacagggugcag

SEQ ID NO: 77774 - RNA, 22 nt, Homo sapiens
acaccuguggucccaguaacuu

SEQ ID NO: 77775 - RNA, 22 nt, Homo sapiens
uugcaaggugcucgaagggcuc

SEQ ID NO: 77776 - RNA, 22 nt, Homo sapiens
ugagucauuuccuuaugcuacu

SEQ ID NO: 77777 - RNA, 22 nt, Homo sapiens
caaaugcuucuauggacugucu

SEQ ID NO: 77778 - RNA, 21 nt, Homo sapiens
uugagacggagucucacucug

SEQ ID NO: 77779 - RNA, 23 nt, Homo sapiens
ggugaggaguacagagucuucau

SEQ ID NO: 77780 - RNA, 22 nt, Homo sapiens
cauggucaccuuccaaguuauu

SEQ ID NO: 77781 - RNA, 18 nt, Homo sapiens
ugugacauugagcauguc

SEQ ID NO: 77782 - RNA, 22 nt, Homo sapiens
aggcauguggcucuguucugac

SEQ ID NO: 77783 - RNA, 22 nt, Homo sapiens
uaacuguggaaaugacuuuaaa

SEQ ID NO: 77784 - RNA, 22 nt, Homo sapiens
agcagcauauuuuuauaaugua

SEQ ID NO: 77785 - RNA, 22 nt, Homo sapiens
uuaggaucacagaaaauccucu

SEQ ID NO: 77786 - RNA, 22 nt, Homo sapiens
ucacauuguuauguaaauguuu

SEQ ID NO: 77787 - RNA, 22 nt, Homo sapiens
agccccauuuguugaaaagacg

SEQ ID NO: 77788 - RNA, 22 nt, Homo sapiens
cugaauguccaggcagagguuu

SEQ ID NO: 77789 - RNA, 22 nt, Homo sapiens
caugguguuaggcacugggaau

SEQ ID NO: 77790 - RNA, 22 nt, Homo sapiens
gaauagugcugcaagaaacaua

SEQ ID NO: 77791 - RNA, 22 nt, Homo sapiens
ucccuggacagccuugccuggg

SEQ ID NO: 77792 - RNA, 22 nt, Homo sapiens
uguguacaucucuacacacaug

SEQ ID NO: 77793 - RNA, 19 nt, Homo sapiens
agcuguguugccugugaga

SEQ ID NO: 77794 - RNA, 22 nt, Homo sapiens
cacaguguuccagcuauuugaa

SEQ ID NO: 77795 - RNA, 22 nt, Homo sapiens
ucacugaaacuguccuggguua

SEQ ID NO: 77796 - RNA, 22 nt, Homo sapiens
uggaaauaaaauagaguuugcc

SEQ ID NO: 77797 - RNA, 22 nt, Homo sapiens
cuagcccagugcuccuggauca

SEQ ID NO: 77798 - RNA, 22 nt, Homo sapiens
ugagcuauguucuucuuguuuu

SEQ ID NO: 77799 - RNA, 22 nt, Homo sapiens
agcagagcaguggauuuuguga

SEQ ID NO: 77800 - RNA, 22 nt, Homo sapiens
guccaaagugggagaggugggg

SEQ ID NO: 77801 - RNA, 22 nt, Homo sapiens
uuuccuguaggaaggaaauaga

SEQ ID NO: 77802 - RNA, 22 nt, Homo sapiens
uacaguggaaguuaaccccauu

SEQ ID NO: 77803 - RNA, 22 nt, Homo sapiens
aaggugcuguaagcauccaugu

SEQ ID NO: 77804 - RNA, 22 nt, Homo sapiens
cagcucauugcagucucgaccu

SEQ ID NO: 77805 - RNA, 22 nt, Homo sapiens
agcagagcauauucauucgggg

SEQ ID NO: 77806 - RNA, 15 nt, Homo sapiens
aaacccugucucaag

SEQ ID NO: 77807 - RNA, 22 nt, Homo sapiens
uggaagacacauaccugauaac

SEQ ID NO: 77808 - RNA, 22 nt, Homo sapiens
guaguaccauuaggauauuucu

SEQ ID NO: 77809 - RNA, 22 nt, Homo sapiens
uggggcuuuuucuuguauucuc

SEQ ID NO: 77810 - RNA, 22 nt, Homo sapiens
gagagugcuuggcaucugcuga

SEQ ID NO: 77811 - RNA, 22 nt, Homo sapiens
caacagucagcccauccacaga

SEQ ID NO: 77812 - RNA, 22 nt, Homo sapiens
aaugcacauauauuuccuuauu

SEQ ID NO: 77813 - RNA, 21 nt, Homo sapiens
agacacuuggaagguuuuaga

SEQ ID NO: 77814 - RNA, 22 nt, Homo sapiens
accugagauuacaggugcuggc

SEQ ID NO: 77815 - RNA, 21 nt, Homo sapiens
agguaguuuuccuuuuggagu

SEQ ID NO: 77816 - RNA, 22 nt, Homo sapiens
caaaggugcuuuccagguccaa

SEQ ID NO: 77817 - RNA, 22 nt, Homo sapiens
uggagcccuaguuccucauaac

SEQ ID NO: 77818 - RNA, 19 nt, Homo sapiens
ugugacugggccagccuag

SEQ ID NO: 77819 - RNA, 22 nt, Homo sapiens
ccaucacaggccucagugggaa

SEQ ID NO: 77820 - RNA, 22 nt, Homo sapiens
cuucaccaguuuggcagucuca

SEQ ID NO: 77821 - RNA, 22 nt, Homo sapiens
uucaucaggaauauugaccugu

SEQ ID NO: 77822 - RNA, 22 nt, Homo sapiens
cuuuaugagguuggauggaucu

SEQ ID NO: 77823 - RNA, 22 nt, Homo sapiens
caccuguacauggcaguguccu

SEQ ID NO: 77824 - RNA, 22 nt, Homo sapiens
gugacagaguaagacccuguau

SEQ ID NO: 77825 - RNA, 22 nt, Homo sapiens
gugacacagcaagacuccgucu

SEQ ID NO: 77826 - RNA, 22 nt, Homo sapiens
ugucucaguucccuucucugga

SEQ ID NO: 77827 - RNA, 22 nt, Homo sapiens
aagagcauuauuuaguaauuuc

SEQ ID NO: 77828 - RNA, 22 nt, Homo sapiens
ucucugguuuucaaagcaguau

SEQ ID NO: 77829 - RNA, 22 nt, Homo sapiens
uuguaugucuucauuugaaaaa

SEQ ID NO: 77830 - RNA, 22 nt, Homo sapiens
uuuugcuuuuccucggucccac

SEQ ID NO: 77831 - RNA, 22 nt, Homo sapiens
cucauggagauagagaauagaa

SEQ ID NO: 77832 - RNA, 20 nt, Homo sapiens
ugguguuugaacagugaaug

SEQ ID NO: 77833 - RNA, 22 nt, Homo sapiens
ucaggcaccuuccucuuaucug

SEQ ID NO: 77834 - RNA, 22 nt, Homo sapiens
auucaccauggaccaggggccu

SEQ ID NO: 77835 - RNA, 22 nt, Homo sapiens
guucacaguuucuaaucccagc

SEQ ID NO: 77836 - RNA, 22 nt, Homo sapiens
agaaagugcuucccuuugguga

SEQ ID NO: 77837 - RNA, 22 nt, Homo sapiens
ucacuuuguuuuuggauaaguu

SEQ ID NO: 77838 - RNA, 22 nt, Homo sapiens
uguuacacugugcacuaaauuu

SEQ ID NO: 77839 - RNA, 22 nt, Homo sapiens
uccagguuuugugaguuuaaau

SEQ ID NO: 77840 - RNA, 22 nt, Homo sapiens
aucacagguacuauggcugaca

SEQ ID NO: 77841 - RNA, 22 nt, Homo sapiens
auaagucaauggaacagauuaa

SEQ ID NO: 77842 - RNA, 22 nt, Homo sapiens
aucugcaaagcugggcugagac

SEQ ID NO: 77843 - RNA, 22 nt, Homo sapiens
uguuauuuuguguuagggcaca

SEQ ID NO: 77844 - RNA, 22 nt, Homo sapiens
ucugucacugaaucccugucac

SEQ ID NO: 77845 - RNA, 23 nt, Homo sapiens
gcagcaaugucacagggguccgg

SEQ ID NO: 77846 - RNA, 22 nt, Homo sapiens
uaucaucauguuuuugcugugu

SEQ ID NO: 77847 - RNA, 22 nt, Homo sapiens
uuucugugguccucuugaaggu

SEQ ID NO: 77848 - RNA, 22 nt, Homo sapiens
auccccugcacggggugucauu

SEQ ID NO: 77849 - RNA, 22 nt, Homo sapiens
cuguaguuagcagaugaugaau

SEQ ID NO: 77850 - RNA, 22 nt, Homo sapiens
auacaguaaugucuuaggcugu

SEQ ID NO: 77851 - RNA, 20 nt, Homo sapiens
uuuaagacaugcugaauuga

SEQ ID NO: 77852 - RNA, 22 nt, Homo sapiens
caguaguagccccuuagaugga

SEQ ID NO: 77853 - RNA, 22 nt, Homo sapiens
ucaggcacucagcuuagagucu

SEQ ID NO: 77854 - RNA, 22 nt, Homo sapiens
uuagaaaguagaaaagcugguu

SEQ ID NO: 77855 - RNA, 22 nt, Homo sapiens
gucauuguguggacauggagaa

SEQ ID NO: 77856 - RNA, 18 nt, Homo sapiens
ucacaaccacagugcugu

SEQ ID NO: 77857 - RNA, 23 nt, Homo sapiens
cagugguguuagagaaaucuuuu

SEQ ID NO: 77858 - RNA, 22 nt, Homo sapiens
gagcucauuguugcuaaagaga

SEQ ID NO: 77859 - RNA, 22 nt, Homo sapiens
cacaaaguagauuagucuucca

SEQ ID NO: 77860 - RNA, 22 nt, Homo sapiens
aaagugcacuuggaagagggcc

SEQ ID NO: 77861 - RNA, 22 nt, Homo sapiens
gucucuuguuaucauuucugag

SEQ ID NO: 77862 - RNA, 22 nt, Homo sapiens
uuauucagcaccugcuguguuc

SEQ ID NO: 77863 - RNA, 20 nt, Homo sapiens
ugguccccugagucuggcuu

SEQ ID NO: 77864 - RNA, 21 nt, Homo sapiens
auguaacugggaaugugagag

SEQ ID NO: 77865 - RNA, 22 nt, Homo sapiens
ggcaugguggugugugccuaua

SEQ ID NO: 77866 - RNA, 20 nt, Homo sapiens
ucucccaaacagcaggcccu

SEQ ID NO: 77867 - RNA, 22 nt, Homo sapiens
uagccucacaaagugcuuaaga

SEQ ID NO: 77868 - RNA, 22 nt, Homo sapiens
uugaaagacaucaccuacugcu

SEQ ID NO: 77869 - RNA, 22 nt, Homo sapiens
uugagacgaagucucacucuug

SEQ ID NO: 77870 - RNA, 22 nt, Homo sapiens
auaugucuguuuagucuguaau

SEQ ID NO: 77871 - RNA, 22 nt, Homo sapiens
agaguaguuuauuaugcuaagg

SEQ ID NO: 77872 - RNA, 22 nt, Homo sapiens
uucaagauggccccagugagcc

SEQ ID NO: 77873 - RNA, 22 nt, Homo sapiens
uuucacaguguucucccccaga

SEQ ID NO: 77874 - RNA, 17 nt, Homo sapiens
ugagaacaugugguauu

SEQ ID NO: 77875 - RNA, 22 nt, Homo sapiens
gagagcauuaagccaucaucau

SEQ ID NO: 77876 - RNA, 22 nt, Homo sapiens
acauagaguagcuaccuguaga

SEQ ID NO: 77877 - RNA, 22 nt, Homo sapiens
ucuuuguuuucugauccugaag

SEQ ID NO: 77878 - RNA, 22 nt, Homo sapiens
gaaucacagauuaugaguaucu

SEQ ID NO: 77879 - RNA, 21 nt, Homo sapiens
ugcuauguuguccaggcuggc

SEQ ID NO: 77880 - RNA, 22 nt, Homo sapiens
uuguauguuuguucuuucagau

SEQ ID NO: 77881 - RNA, 22 nt, Homo sapiens
uccauguagaugcuauguuguc

SEQ ID NO: 77882 - RNA, 22 nt, Homo sapiens
ucauucauuugcucacuccaca

SEQ ID NO: 77883 - RNA, 22 nt, Homo sapiens
uauaguguuuucaaaaguaugu

SEQ ID NO: 77884 - RNA, 22 nt, Homo sapiens
caugacacuggcauguuucuuu

SEQ ID NO: 77885 - RNA, 22 nt, Homo sapiens
gagcugaaguuuccauuuguac

SEQ ID NO: 77886 - RNA, 22 nt, Homo sapiens
ucagguauuuauagcaaugcaa

SEQ ID NO: 77887 - RNA, 22 nt, Homo sapiens
agauauguuauugauguuaaug

SEQ ID NO: 77888 - RNA, 22 nt, Homo sapiens
uggauuuuaauuauucugucau

SEQ ID NO: 77889 - RNA, 22 nt, Homo sapiens
gcauugcacuuggcauagacug

SEQ ID NO: 77890 - RNA, 22 nt, Homo sapiens
auccucugagaucuaggcagag

SEQ ID NO: 77891 - RNA, 21 nt, Homo sapiens
auggugagaaaguagugucaa

SEQ ID NO: 77892 - RNA, 22 nt, Homo sapiens
uaaaguuauugccccucaguua

SEQ ID NO: 77893 - RNA, 22 nt, Homo sapiens
cugugcauaugacuuuauugga

SEQ ID NO: 77894 - RNA, 22 nt, Homo sapiens
uucaaauguucuuucaccaccc

SEQ ID NO: 77895 - RNA, 22 nt, Homo sapiens
aauccaugugcuuuaccauuuu

SEQ ID NO: 77896 - RNA, 20 nt, Homo sapiens
cuuccaguggccccaucuuu

SEQ ID NO: 77897 - RNA, 22 nt, Homo sapiens
uccuucaguccaguggguuuug

SEQ ID NO: 77898 - RNA, 22 nt, Homo sapiens
auggcagcugacacuuccgucu

SEQ ID NO: 77899 - RNA, 22 nt, Homo sapiens
acaguagcgcaaucucggcuca

SEQ ID NO: 77900 - RNA, 22 nt, Homo sapiens
auaguacuauugcaguguuaua

SEQ ID NO: 77901 - RNA, 22 nt, Homo sapiens
gugaacagaaccugggaucgaa

SEQ ID NO: 77902 - RNA, 22 nt, Homo sapiens
ugugucacugaggguuagugua

SEQ ID NO: 77903 - RNA, 22 nt, Homo sapiens
gacucuguagacaaucacaucu

SEQ ID NO: 77904 - RNA, 22 nt, Homo sapiens
agcucauugcuguccuggagga

SEQ ID NO: 77905 - RNA, 20 nt, Homo sapiens
cugaggugggagaaucgcuu

SEQ ID NO: 77906 - RNA, 22 nt, Homo sapiens
acccuggaguaguaggaaucug

SEQ ID NO: 77907 - RNA, 22 nt, Homo sapiens
uuggaaguguguauguauagcu

SEQ ID NO: 77908 - RNA, 21 nt, Homo sapiens
ugacagaaaauugaguuugcu

SEQ ID NO: 77909 - RNA, 22 nt, Homo sapiens
aauccugucuugccauccaaua

SEQ ID NO: 77910 - RNA, 22 nt, Homo sapiens
agugccacugcacucuagccug

SEQ ID NO: 77911 - RNA, 22 nt, Homo sapiens
gucaccagcuguguuagccccu

SEQ ID NO: 77912 - RNA, 22 nt, Homo sapiens
ucucauggagguagagaguaaa

SEQ ID NO: 77913 - RNA, 22 nt, Homo sapiens
gcacaggguuacauucuaaggu

SEQ ID NO: 77914 - RNA, 22 nt, Homo sapiens
uccccugagucaccugcuucuc

SEQ ID NO: 77915 - RNA, 22 nt, Homo sapiens
agcuugugcuguaugaagggcc

SEQ ID NO: 77916 - RNA, 22 nt, Homo sapiens
uagcugcacuuacaagugagaa

SEQ ID NO: 77917 - RNA, 22 nt, Homo sapiens
uguacuucaagauuaugguuua

SEQ ID NO: 77918 - RNA, 22 nt, Homo sapiens
gugucccagugugcauacaggu

SEQ ID NO: 77919 - RNA, 20 nt, Homo sapiens
gcaguguucacuguauuccu

SEQ ID NO: 77920 - RNA, 22 nt, Homo sapiens
ugauggcauuuggaguugggac

SEQ ID NO: 77921 - RNA, 22 nt, Homo sapiens
aagcucauugcucugguuuuaa

SEQ ID NO: 77922 - RNA, 22 nt, Homo sapiens
cuagguuauacucugaaauggu

SEQ ID NO: 77923 - RNA, 22 nt, Homo sapiens
uaauacuguaauggugguuccg

SEQ ID NO: 77924 - RNA, 20 nt, Homo sapiens
gucuugcuccguugcccagg

SEQ ID NO: 77925 - RNA, 22 nt, Homo sapiens
cccagaguucuuaaauacugag

SEQ ID NO: 77926 - RNA, 22 nt, Homo sapiens
ucagaguaguuccuggcagaaa

SEQ ID NO: 77927 - RNA, 23 nt, Homo sapiens
uaugacagaggaagggggagcug

SEQ ID NO: 77928 - RNA, 22 nt, Homo sapiens
agugaauuguucaacaggagga

SEQ ID NO: 77929 - RNA, 22 nt, Homo sapiens
uaucacaaacuuagcaguuuaa

SEQ ID NO: 77930 - RNA, 22 nt, Homo sapiens
uuugcuucacuguuuggcaaaa

SEQ ID NO: 77931 - RNA, 22 nt, Homo sapiens
gacagugugauacuuagucuca

SEQ ID NO: 77932 - RNA, 22 nt, Homo sapiens
aagagguuauagaguguauacu

SEQ ID NO: 77933 - RNA, 22 nt, Homo sapiens
gaucaguuucuggagauacgua

SEQ ID NO: 77934 - RNA, 22 nt, Homo sapiens
cacaaugucuaagauguuucua

SEQ ID NO: 77935 - RNA, 17 nt, Homo sapiens
ugacagaaacuuguugu

SEQ ID NO: 77936 - RNA, 22 nt, Homo sapiens
guggaaggucaugaauguucuu

SEQ ID NO: 77937 - RNA, 22 nt, Homo sapiens
ucauuguccaacuucuuucagu

SEQ ID NO: 77938 - RNA, 22 nt, Homo sapiens
aaaccaccauuacuuuugcacc

SEQ ID NO: 77939 - RNA, 22 nt, Homo sapiens
uccucaguggauuggauggugc

SEQ ID NO: 77940 - RNA, 22 nt, Homo sapiens
caccgagguuggagugcagugg

SEQ ID NO: 77941 - RNA, 18 nt, Homo sapiens
acuggaauuaaacuuuuu

SEQ ID NO: 77942 - RNA, 20 nt, Homo sapiens
gagcucaucuucuuuaccac

SEQ ID NO: 77943 - RNA, 22 nt, Homo sapiens
auggcacagaguagaugcucaa

SEQ ID NO: 77944 - RNA, 22 nt, Homo sapiens
uccauguagaagacaggggaga

SEQ ID NO: 77945 - RNA, 22 nt, Homo sapiens
ugcauauguugagaugcauauu

SEQ ID NO: 77946 - RNA, 22 nt, Homo sapiens
uuucccuuugcuuugucagcca

SEQ ID NO: 77947 - RNA, 22 nt, Homo sapiens
aucugcaaauaaugaagauugg

SEQ ID NO: 77948 - RNA, 22 nt, Homo sapiens
acaaagcgcuucucuuuagagu

SEQ ID NO: 77949 - RNA, 22 nt, Homo sapiens
gugcacaacgugcagguuuguu

SEQ ID NO: 77950 - RNA, 22 nt, Homo sapiens
aagugguuuuaaucuggugagu

SEQ ID NO: 77951 - RNA, 22 nt, Homo sapiens
uaugcacaugugccugggugug

SEQ ID NO: 77952 - RNA, 22 nt, Homo sapiens
uaagucuuuuuggaguuuauaa

SEQ ID NO: 77953 - RNA, 22 nt, Homo sapiens
uuucaucagccagggucagucu

SEQ ID NO: 77954 - RNA, 22 nt, Homo sapiens
uugaaaucuuccacagcccaag

SEQ ID NO: 77955 - RNA, 22 nt, Homo sapiens
gagguaaguggauuaugagguc

SEQ ID NO: 77956 - RNA, 22 nt, Homo sapiens
ucugagguuaaauuuuauaguu

SEQ ID NO: 77957 - RNA, 22 nt, Homo sapiens
guucaucagggauauuggccug

SEQ ID NO: 77958 - RNA, 22 nt, Homo sapiens
aguaacauuucuaguagagagu

SEQ ID NO: 77959 - RNA, 22 nt, Homo sapiens
uaggggcacacuucgguuagca

SEQ ID NO: 77960 - RNA, 22 nt, Homo sapiens
uaccuuugucaguuacucaccu

SEQ ID NO: 77961 - RNA, 22 nt, Homo sapiens
ugugcuugaaauucaguuuuga

SEQ ID NO: 77962 - RNA, 20 nt, Homo sapiens
uccugagauucccaguucuc

SEQ ID NO: 77963 - RNA, 20 nt, Homo sapiens
acacuggcuuugagauuuag

SEQ ID NO: 77964 - RNA, 22 nt, Homo sapiens
guagcagaauaucagauaauuu

SEQ ID NO: 77965 - RNA, 22 nt, Homo sapiens
ugggcaaaacuaagagcugugg

SEQ ID NO: 77966 - RNA, 22 nt, Homo sapiens
auguaguauuaaugagagauaa

SEQ ID NO: 77967 - RNA, 18 nt, Homo sapiens
cagugcaauacaggagag

SEQ ID NO: 77968 - RNA, 22 nt, Homo sapiens
cugagauuuuuagauccuggcg

SEQ ID NO: 77969 - RNA, 22 nt, Homo sapiens
uaucauagucacuuccaguuug

SEQ ID NO: 77970 - RNA, 19 nt, Homo sapiens
ucacacuguggcuucuuua

SEQ ID NO: 77971 - RNA, 22 nt, Homo sapiens
ccuucauugcaucuuuaagaga

SEQ ID NO: 77972 - RNA, 22 nt, Homo sapiens
ccacugcacuccagcccggcaa

SEQ ID NO: 77973 - RNA, 22 nt, Homo sapiens
uucucacaguacagggagcucu

SEQ ID NO: 77974 - RNA, 22 nt, Homo sapiens
aguaccauuugacaugggaccc

SEQ ID NO: 77975 - RNA, 22 nt, Homo sapiens
ugugcauaugucuuuauaguag

SEQ ID NO: 77976 - RNA, 22 nt, Homo sapiens
uuggaaggcugaauggccucuc

SEQ ID NO: 77977 - RNA, 19 nt, Homo sapiens
cccuggcacauggaaaaug

SEQ ID NO: 77978 - RNA, 22 nt, Homo sapiens
guugcacagucuuuccuggacu

SEQ ID NO: 77979 - RNA, 22 nt, Homo sapiens
uucucauggaacaucuguacug

SEQ ID NO: 77980 - RNA, 22 nt, Homo sapiens
uuggcuguguuccucaaggagu

SEQ ID NO: 77981 - RNA, 23 nt, Homo sapiens
aagagguaugacuaugaagugga

SEQ ID NO: 77982 - RNA, 22 nt, Homo sapiens
auucccuuagcugccucagccu

SEQ ID NO: 77983 - RNA, 22 nt, Homo sapiens
uggcagcugcuucaugggaugc

SEQ ID NO: 77984 - RNA, 22 nt, Homo sapiens
ggucaacaucaucaugguaagu

SEQ ID NO: 77985 - RNA, 20 nt, Homo sapiens
uuuugaacuuggcaaccugu

SEQ ID NO: 77986 - RNA, 22 nt, Homo sapiens
gagcacauguggagagucuggg

SEQ ID NO: 77987 - RNA, 22 nt, Homo sapiens
uacacaugugaguucuuuucua

SEQ ID NO: 77988 - RNA, 22 nt, Homo sapiens
ucuuugauguucugaaagaugg

SEQ ID NO: 77989 - RNA, 17 nt, Homo sapiens
ucucccaucccuuucuc

SEQ ID NO: 77990 - RNA, 21 nt, Homo sapiens
uucuacuccggcguuguuuuu

SEQ ID NO: 77991 - RNA, 22 nt, Homo sapiens
ugcauggauguuugaacacacu

SEQ ID NO: 77992 - RNA, 22 nt, Homo sapiens
ugcauuagucuguucucacacu

SEQ ID NO: 77993 - RNA, 22 nt, Homo sapiens
cacugcacuccagccuaagagg

SEQ ID NO: 77994 - RNA, 22 nt, Homo sapiens
uggguaguguaaagcacuccag

SEQ ID NO: 77995 - RNA, 17 nt, Homo sapiens
ucaaaugcucccaguga

SEQ ID NO: 77996 - RNA, 22 nt, Homo sapiens
guagcagcuacuaaguugcugu

SEQ ID NO: 77997 - RNA, 22 nt, Homo sapiens
ugugccacuguucuguaaagug

SEQ ID NO: 77998 - RNA, 22 nt, Homo sapiens
ggugagauguucagacgaacug

SEQ ID NO: 77999 - RNA, 22 nt, Homo sapiens
ugccaacaugccuggcuguuuu

SEQ ID NO: 78000 - RNA, 22 nt, Homo sapiens
gauuggcauugcugcaccugag

SEQ ID NO: 78001 - RNA, 22 nt, Homo sapiens
cuggaguaugaaccauguauca

SEQ ID NO: 78002 - RNA, 22 nt, Homo sapiens
gugaaguuuuugugaggccuaa

SEQ ID NO: 78003 - RNA, 22 nt, Homo sapiens
gcucaugggcagugugauuguu

SEQ ID NO: 78004 - RNA, 22 nt, Homo sapiens
agcugccagucuuguaaggccu

SEQ ID NO: 78005 - RNA, 20 nt, Homo sapiens
guggaaguagaaacauaugu

SEQ ID NO: 78006 - RNA, 19 nt, Homo sapiens
agcuuuggcuaacuuucuc

SEQ ID NO: 78007 - RNA, 22 nt, Homo sapiens
agucaaaugcuuauguauaaag

SEQ ID NO: 78008 - RNA, 22 nt, Homo sapiens
uugaauggaauguuggaacuau

SEQ ID NO: 78009 - RNA, 22 nt, Homo sapiens
gcaggcaugacauuucacucuu

SEQ ID NO: 78010 - RNA, 22 nt, Homo sapiens
cagugcuuuaucaaguccucca

SEQ ID NO: 78011 - RNA, 22 nt, Homo sapiens
ugacaucugcuugugcccagga

SEQ ID NO: 78012 - RNA, 22 nt, Homo sapiens
uuuuccagugggacucccauua

SEQ ID NO: 78013 - RNA, 22 nt, Homo sapiens
gugggcaaagcuaguguguaga

SEQ ID NO: 78014 - RNA, 22 nt, Homo sapiens
uccuuuggguagcuguucagau

SEQ ID NO: 78015 - RNA, 22 nt, Homo sapiens
uagcugcugcuaggcuaaggau

SEQ ID NO: 78016 - RNA, 21 nt, Homo sapiens
ugggccccuuccuuacaucau

SEQ ID NO: 78017 - RNA, 22 nt, Homo sapiens
cucuuuuguuuagcugagaggg

SEQ ID NO: 78018 - RNA, 22 nt, Homo sapiens
auaggacuauugugaggauuaa

SEQ ID NO: 78019 - RNA, 22 nt, Homo sapiens
gagaucauucugauccagaguc

SEQ ID NO: 78020 - RNA, 17 nt, Homo sapiens
uuuuggauuagaaaucc

SEQ ID NO: 78021 - RNA, 22 nt, Homo sapiens
uuugucuccuaagacucugugg

SEQ ID NO: 78022 - RNA, 22 nt, Homo sapiens
augagagugagagcagccccuu

SEQ ID NO: 78023 - RNA, 22 nt, Homo sapiens
ugagaugaaagcagaaagacuu

SEQ ID NO: 78024 - RNA, 22 nt, Homo sapiens
uccuuuggucaguauucuuuug

SEQ ID NO: 78025 - RNA, 22 nt, Homo sapiens
ucugucuuguccucacccuaga

SEQ ID NO: 78026 - RNA, 22 nt, Homo sapiens
aucgcaccauugcacuccagca

SEQ ID NO: 78027 - RNA, 22 nt, Homo sapiens
auugucacccgggcaguaagca

SEQ ID NO: 78028 - RNA, 22 nt, Homo sapiens
cucccacccucauuuuuaggca

SEQ ID NO: 78029 - RNA, 22 nt, Homo sapiens
uguuuuggagguccucacuaga

SEQ ID NO: 78030 - RNA, 22 nt, Homo sapiens
cugaauagagcacacugauggg

SEQ ID NO: 78031 - RNA, 22 nt, Homo sapiens
uggccaguugaagacaaugcuc

SEQ ID NO: 78032 - RNA, 22 nt, Homo sapiens
auacaguaucuucuggcaagca

SEQ ID NO: 78033 - RNA, 22 nt, Homo sapiens
gcaaaugcuacaccauuuugua

SEQ ID NO: 78034 - RNA, 22 nt, Homo sapiens
cuccauguggcuaacuuuuaaa

SEQ ID NO: 78035 - RNA, 22 nt, Homo sapiens
augugcacaacgugcagguuug

SEQ ID NO: 78036 - RNA, 22 nt, Homo sapiens
auacaguauggagggcccagcu

SEQ ID NO: 78037 - RNA, 20 nt, Homo sapiens
ucucauagagguagagaaua

SEQ ID NO: 78038 - RNA, 22 nt, Homo sapiens
cacugcacuccagucugacgac

SEQ ID NO: 78039 - RNA, 22 nt, Homo sapiens
aguaaacuucagaguucuuccu

SEQ ID NO: 78040 - RNA, 22 nt, Homo sapiens
ucacagccuaguuuuauacauu

SEQ ID NO: 78041 - RNA, 22 nt, Homo sapiens
ugguuguuuuaaaugucgucug

SEQ ID NO: 78042 - RNA, 22 nt, Homo sapiens
uuaaaccugucuucucacuaau

SEQ ID NO: 78043 - RNA, 22 nt, Homo sapiens
cccagcguucggcauggcugag

SEQ ID NO: 78044 - RNA, 22 nt, Homo sapiens
cugaggguagaaggaucacuug

SEQ ID NO: 78045 - RNA, 22 nt, Homo sapiens
aaagaagucagccuguccuuug

SEQ ID NO: 78046 - RNA, 22 nt, Homo sapiens
cagagguauugcaaaagccuag

SEQ ID NO: 78047 - RNA, 18 nt, Homo sapiens
auuguaagauguauggga

SEQ ID NO: 78048 - RNA, 22 nt, Homo sapiens
gugucucagcccagaccuauuu

SEQ ID NO: 78049 - RNA, 22 nt, Homo sapiens
caccagcuggcauugaauaccu

SEQ ID NO: 78050 - RNA, 22 nt, Homo sapiens
cauggguuuucucaaguaguca

SEQ ID NO: 78051 - RNA, 22 nt, Homo sapiens
ccucauggagaacuucugcuag

SEQ ID NO: 78052 - RNA, 18 nt, Homo sapiens
uagcucuuguugguccau

SEQ ID NO: 78053 - RNA, 22 nt, Homo sapiens
gcugguguagagugcagaaagg

SEQ ID NO: 78054 - RNA, 22 nt, Homo sapiens
ucucagugaauugguuuugucu

SEQ ID NO: 78055 - RNA, 22 nt, Homo sapiens
ccaaguguucucauuguucaau

SEQ ID NO: 78056 - RNA, 22 nt, Homo sapiens
cuuguuguggaggggagugcag

SEQ ID NO: 78057 - RNA, 22 nt, Homo sapiens
gggaagaaggagugguuuacuc

SEQ ID NO: 78058 - RNA, 22 nt, Homo sapiens
gugcauaugcaugugcaugcac

SEQ ID NO: 78059 - RNA, 23 nt, Homo sapiens
ugacagaccuucuggaagaaguc

SEQ ID NO: 78060 - RNA, 22 nt, Homo sapiens
gcuguguguuaucagaaauugc

SEQ ID NO: 78061 - RNA, 22 nt, Homo sapiens
uuaaggcagugucuaugccagu

SEQ ID NO: 78062 - RNA, 22 nt, Homo sapiens
uagccgggugugguggaacucc

SEQ ID NO: 78063 - RNA, 22 nt, Homo sapiens
agucugguguucucacacuagu

SEQ ID NO: 78064 - RNA, 22 nt, Homo sapiens
uuugugcuaaugcuagauuacu

SEQ ID NO: 78065 - RNA, 22 nt, Homo sapiens
uagaucauauacuugccaugac

SEQ ID NO: 78066 - RNA, 22 nt, Homo sapiens
ucuuuagugacaguugugcaag

SEQ ID NO: 78067 - RNA, 21 nt, Homo sapiens
ggugagaaaggagacauagac

SEQ ID NO: 78068 - RNA, 21 nt, Homo sapiens
ucaucaagcuguagacaugau

SEQ ID NO: 78069 - RNA, 22 nt, Homo sapiens
acaugacauugggguggggaua

SEQ ID NO: 78070 - RNA, 22 nt, Homo sapiens
acccugucagcuggccugggca

SEQ ID NO: 78071 - RNA, 22 nt, Homo sapiens
uuugcugagucugacuucaugg

SEQ ID NO: 78072 - RNA, 22 nt, Homo sapiens
uuaauccugccuuauuucagua

SEQ ID NO: 78073 - RNA, 21 nt, Homo sapiens
ugcugcacuucuuuugcugug

SEQ ID NO: 78074 - RNA, 22 nt, Homo sapiens
uagucccauaugauuuagugaa

SEQ ID NO: 78075 - RNA, 22 nt, Homo sapiens
cgccugagcugaggaagcugca

SEQ ID NO: 78076 - RNA, 22 nt, Homo sapiens
acugcacuccaccuugggcaac

SEQ ID NO: 78077 - RNA, 20 nt, Homo sapiens
agagugcugucuguccugag

SEQ ID NO: 78078 - RNA, 21 nt, Homo sapiens
acaaagcuggagggagacugc

SEQ ID NO: 78079 - RNA, 22 nt, Homo sapiens
ugauguugacuguaggcagaga

SEQ ID NO: 78080 - RNA, 22 nt, Homo sapiens
auuggcaagauagcauaugagg

SEQ ID NO: 78081 - RNA, 22 nt, Homo sapiens
cugugcauggauuuuaagauug

SEQ ID NO: 78082 - RNA, 22 nt, Homo sapiens
cuuuccauuguuggagcauaaa

SEQ ID NO: 78083 - RNA, 22 nt, Homo sapiens
aagcugcauuuucuagaugcuu

SEQ ID NO: 78084 - RNA, 23 nt, Homo sapiens
uaucacacuuucucugugccaca

SEQ ID NO: 78085 - RNA, 22 nt, Homo sapiens
uggagggcuagucauuucuuuu

SEQ ID NO: 78086 - RNA, 22 nt, Homo sapiens
gaaggugcuuggugaaugcauu

SEQ ID NO: 78087 - RNA, 22 nt, Homo sapiens
ucagcagugugaaaacaaacua

SEQ ID NO: 78088 - RNA, 21 nt, Homo sapiens
gucugguguuuuaaugaggac

SEQ ID NO: 78089 - RNA, 22 nt, Homo sapiens
cucaugcugucuucugggguaa

SEQ ID NO: 78090 - RNA, 22 nt, Homo sapiens
uucagcaguggccaguggaaau

SEQ ID NO: 78091 - RNA, 22 nt, Homo sapiens
guuauguaucuugauugggugg

SEQ ID NO: 78092 - RNA, 22 nt, Homo sapiens
auuaaguuaggauuuugagaua

SEQ ID NO: 78093 - RNA, 21 nt, Homo sapiens
uuggccuggaggccugaaugu

SEQ ID NO: 78094 - RNA, 22 nt, Homo sapiens
cagugcauaggaucuaaaauuu

SEQ ID NO: 78095 - RNA, 22 nt, Homo sapiens
cuacaguguauuuauggagggu

SEQ ID NO: 78096 - RNA, 22 nt, Homo sapiens
cacagcacaggcaugaguguca

SEQ ID NO: 78097 - RNA, 22 nt, Homo sapiens
uuaaguaaucagagaagagaac

SEQ ID NO: 78098 - RNA, 22 nt, Homo sapiens
cucucugagccauggcugcccu

SEQ ID NO: 78099 - RNA, 19 nt, Homo sapiens
cugugcauuucuguggaag

SEQ ID NO: 78100 - RNA, 22 nt, Homo sapiens
cugugcacaucuggcggcccga

SEQ ID NO: 78101 - RNA, 22 nt, Homo sapiens
uggacuguaauagagaacagaa

SEQ ID NO: 78102 - RNA, 22 nt, Homo sapiens
uccuuuguuacaguuggcucug

SEQ ID NO: 78103 - RNA, 22 nt, Homo sapiens
augugacuggaucauggggacg

SEQ ID NO: 78104 - RNA, 22 nt, Homo sapiens
uugcagugugacgacuauauuu

SEQ ID NO: 78105 - RNA, 22 nt, Homo sapiens
uggcaggugcacuggcuuugaa

SEQ ID NO: 78106 - RNA, 22 nt, Homo sapiens
uuugugcaugaagagggggugc

SEQ ID NO: 78107 - RNA, 22 nt, Homo sapiens
uggaaguaaccaugaauggaau

SEQ ID NO: 78108 - RNA, 17 nt, Homo sapiens
uggcaugaggguguggg

SEQ ID NO: 78109 - RNA, 22 nt, Homo sapiens
augaagaucucugccuuguguc

SEQ ID NO: 78110 - RNA, 18 nt, Homo sapiens
aguuguuuuauccugccc

SEQ ID NO: 78111 - RNA, 22 nt, Homo sapiens
ucagugcuuuuuguugucauca

SEQ ID NO: 78112 - RNA, 19 nt, Homo sapiens
ggucauggagguuguguga

SEQ ID NO: 78113 - RNA, 21 nt, Homo sapiens
ggcaagugugagguuuggggu

SEQ ID NO: 78114 - RNA, 22 nt, Homo sapiens
uucuugguguaguaguugaaaa

SEQ ID NO: 78115 - RNA, 22 nt, Homo sapiens
aacaggguguuugcaguuucuu

SEQ ID NO: 78116 - RNA, 22 nt, Homo sapiens
auuuuugguuucaccugcacgc

SEQ ID NO: 78117 - RNA, 18 nt, Homo sapiens
ugcuccccugggugagca

SEQ ID NO: 78118 - RNA, 22 nt, Homo sapiens
guaacacaugcugcucucuggu

SEQ ID NO: 78119 - RNA, 22 nt, Homo sapiens
uaauagagucauuauuauuguu

SEQ ID NO: 78120 - RNA, 22 nt, Homo sapiens
agaauucugucauguuuauauu

SEQ ID NO: 78121 - RNA, 22 nt, Homo sapiens
caugcagcacacaugucugugc

SEQ ID NO: 78122 - RNA, 22 nt, Homo sapiens
uugguucucuuagccaucuuaa

SEQ ID NO: 78123 - RNA, 22 nt, Homo sapiens
ugcuggugucaucaaggcuuug

SEQ ID NO: 78124 - RNA, 21 nt, Homo sapiens
ugcccaguggcuuggggucag

SEQ ID NO: 78125 - RNA, 22 nt, Homo sapiens
cagggcaugugggucuauuggc

SEQ ID NO: 78126 - RNA, 18 nt, Homo sapiens
uaaggcacuauaggcauu

SEQ ID NO: 78127 - RNA, 22 nt, Homo sapiens
gcauggaguggaaauucuuggg

SEQ ID NO: 78128 - RNA, 22 nt, Homo sapiens
uugaggugaagggcagagcagc

SEQ ID NO: 78129 - RNA, 22 nt, Homo sapiens
ccuggaagaaaggugcuaaaua

SEQ ID NO: 78130 - RNA, 22 nt, Homo sapiens
gcacugggccacauuuauuuuc

SEQ ID NO: 78131 - RNA, 22 nt, Homo sapiens
caucaaaguggagggaaggacc

SEQ ID NO: 78132 - RNA, 22 nt, Homo sapiens
cauccccugcaccaaccuuuac

SEQ ID NO: 78133 - RNA, 22 nt, Homo sapiens
aaugccuagugugugacaggug

SEQ ID NO: 78134 - RNA, 22 nt, Homo sapiens
guguccucgaguacacaucagg

SEQ ID NO: 78135 - RNA, 22 nt, Homo sapiens
gcuaaaugcaugaggcgaugug

SEQ ID NO: 78136 - RNA, 21 nt, Homo sapiens
uccagcuuugagaguuguggu

SEQ ID NO: 78137 - RNA, 22 nt, Homo sapiens
ccucauggagaacaucugcuag

SEQ ID NO: 78138 - RNA, 22 nt, Homo sapiens
ugauggcauuucauguuuguaa

SEQ ID NO: 78139 - RNA, 22 nt, Homo sapiens
guagaagcacagggccuguauu

SEQ ID NO: 78140 - RNA, 22 nt, Homo sapiens
augaagugcaugauaguugguu

SEQ ID NO: 78141 - RNA, 21 nt, Homo sapiens
ugagaugcaaucaccagggag

SEQ ID NO: 78142 - RNA, 22 nt, Homo sapiens
uaaggcacuacuuuaggcuuuc

SEQ ID NO: 78143 - RNA, 22 nt, Homo sapiens
uucaauuaauauuauacucuca

SEQ ID NO: 78144 - RNA, 22 nt, Homo sapiens
agagugcaauggcaccaucucg

SEQ ID NO: 78145 - RNA, 22 nt, Homo sapiens
ucacauggauuaacucauuuau

SEQ ID NO: 78146 - RNA, 22 nt, Homo sapiens
aagagcauuggauggggagauu

SEQ ID NO: 78147 - RNA, 22 nt, Homo sapiens
cuggaaggaaaaacaaccacag

SEQ ID NO: 78148 - RNA, 22 nt, Homo sapiens
guaugcacauauguguauguau

SEQ ID NO: 78149 - RNA, 20 nt, Homo sapiens
uagccggguguugugucaug

SEQ ID NO: 78150 - RNA, 22 nt, Homo sapiens
auacaugugugagcgaagaugu

SEQ ID NO: 78151 - RNA, 22 nt, Homo sapiens
uauggcugcuuucacacuacaa

SEQ ID NO: 78152 - RNA, 22 nt, Homo sapiens
gagacugagucucgcucugccg

SEQ ID NO: 78153 - RNA, 22 nt, Homo sapiens
guggaucacuugaggucaagag

SEQ ID NO: 78154 - RNA, 22 nt, Homo sapiens
uggacuguaauuuuauaggcau

SEQ ID NO: 78155 - RNA, 22 nt, Homo sapiens
uccaguacaggucucucauuuc

SEQ ID NO: 78156 - RNA, 22 nt, Homo sapiens
cuauucacaauagccaagauuu

SEQ ID NO: 78157 - RNA, 22 nt, Homo sapiens
uuaacagugucaaucuguagua

SEQ ID NO: 78158 - RNA, 22 nt, Homo sapiens
uggcaguuucacauggcucaac

SEQ ID NO: 78159 - RNA, 22 nt, Homo sapiens
cugugcuuggagucccccuagg

SEQ ID NO: 78160 - RNA, 21 nt, Homo sapiens
uccugagagaggaguaacucu

SEQ ID NO: 78161 - RNA, 22 nt, Homo sapiens
ucagugacuggguauuaaauca

SEQ ID NO: 78162 - RNA, 22 nt, Homo sapiens
guggguaaaucucuggggcucu

SEQ ID NO: 78163 - RNA, 22 nt, Homo sapiens
cauuugguggcuacagaguaac

SEQ ID NO: 78164 - RNA, 22 nt, Homo sapiens
caugucuuuuauucugugugau

SEQ ID NO: 78165 - RNA, 22 nt, Homo sapiens
ucuggccuacaaguaauuuuau

SEQ ID NO: 78166 - RNA, 19 nt, Homo sapiens
agugagccaagauccuacc

SEQ ID NO: 78167 - RNA, 22 nt, Homo sapiens
uggcauauaaagauguguucaa

SEQ ID NO: 78168 - RNA, 22 nt, Homo sapiens
cuuuuggugguucugaugcagg

SEQ ID NO: 78169 - RNA, 22 nt, Homo sapiens
aagcuguguguaagcucucaca

SEQ ID NO: 78170 - RNA, 22 nt, Homo sapiens
ucacaugugcguuuuggcaugu

SEQ ID NO: 78171 - RNA, 22 nt, Homo sapiens
uagagcaugugccauacguaca

SEQ ID NO: 78172 - RNA, 22 nt, Homo sapiens
agucaguguguauugauggcac

SEQ ID NO: 78173 - RNA, 22 nt, Homo sapiens
ucucaaccuccacacuacaaua

SEQ ID NO: 78174 - RNA, 22 nt, Homo sapiens
aucacuuucuauuucugugcca

SEQ ID NO: 78175 - RNA, 22 nt, Homo sapiens
auggaaggagaggaaugaauga

SEQ ID NO: 78176 - RNA, 18 nt, Homo sapiens
ucccucagaauuauagaa

SEQ ID NO: 78177 - RNA, 22 nt, Homo sapiens
auaucaaggccauuuucuaaau

SEQ ID NO: 78178 - RNA, 22 nt, Homo sapiens
cuguagcuuuuauaugcuuagc

SEQ ID NO: 78179 - RNA, 22 nt, Homo sapiens
gucugguugacagcauguggcc

SEQ ID NO: 78180 - RNA, 22 nt, Homo sapiens
caccuguagucccagcugaggc

SEQ ID NO: 78181 - RNA, 22 nt, Homo sapiens
gcuguauugacuuuguaucaua

SEQ ID NO: 78182 - RNA, 22 nt, Homo sapiens
cugagaacaucauucagauauu

SEQ ID NO: 78183 - RNA, 22 nt, Homo sapiens
ucacauguguaaauugguguaa

SEQ ID NO: 78184 - RNA, 22 nt, Homo sapiens
uguaugucugcucuuuggaacu

SEQ ID NO: 78185 - RNA, 22 nt, Homo sapiens
cccugagaaaacuuuguccuua

SEQ ID NO: 78186 - RNA, 22 nt, Homo sapiens
gcaagaaucugggaguaaaauu

SEQ ID NO: 78187 - RNA, 22 nt, Homo sapiens
ugucaguggucuggaugcagcc

SEQ ID NO: 78188 - RNA, 22 nt, Homo sapiens
ugacacauguagacaucuggug

SEQ ID NO: 78189 - RNA, 22 nt, Homo sapiens
cuuugguugugcucuccacuuu

SEQ ID NO: 78190 - RNA, 22 nt, Homo sapiens
uugcagagaaauuucugguuua

SEQ ID NO: 78191 - RNA, 22 nt, Homo sapiens
auacauguucaagggcauauau

SEQ ID NO: 78192 - RNA, 22 nt, Homo sapiens
uucauacaguggcugcacucca

SEQ ID NO: 78193 - RNA, 22 nt, Homo sapiens
aaagcuacaggaccugcucauu

SEQ ID NO: 78194 - RNA, 20 nt, Homo sapiens
agacuagggagcagaaagcc

SEQ ID NO: 78195 - RNA, 22 nt, Homo sapiens
uuugauguugagacuauaaagc

SEQ ID NO: 78196 - RNA, 22 nt, Homo sapiens
uucagcaggccaggcccugacu

SEQ ID NO: 78197 - RNA, 22 nt, Homo sapiens
gagugcuguuagcccuggguuu

SEQ ID NO: 78198 - RNA, 22 nt, Homo sapiens
auggcuucuuacucuucugcau

SEQ ID NO: 78199 - RNA, 22 nt, Homo sapiens
gugcacaaucgugcauuccuug

SEQ ID NO: 78200 - RNA, 22 nt, Homo sapiens
guacaguucucuuuguugucag

SEQ ID NO: 78201 - RNA, 22 nt, Homo sapiens
gcagguguuaugcaaacaacug

SEQ ID NO: 78202 - RNA, 20 nt, Homo sapiens
agcuguuguuaugagguuua

SEQ ID NO: 78203 - RNA, 22 nt, Homo sapiens
uacauacuucacagacuuuaaa

SEQ ID NO: 78204 - RNA, 23 nt, Homo sapiens
acaguggugugaucuuggcucag

SEQ ID NO: 78205 - RNA, 22 nt, Homo sapiens
cugaggacaucagggaagcauc

SEQ ID NO: 78206 - RNA, 22 nt, Homo sapiens
ucacauagcugaguaaaaugga

SEQ ID NO: 78207 - RNA, 22 nt, Homo sapiens
uggagugcaauggcaccaucuu

SEQ ID NO: 78208 - RNA, 22 nt, Homo sapiens
uguaagcagcagagacuauccu

SEQ ID NO: 78209 - RNA, 22 nt, Homo sapiens
caguagcaugccucagaaugag

SEQ ID NO: 78210 - RNA, 22 nt, Homo sapiens
uuuauagucaggaacuugagga

SEQ ID NO: 78211 - RNA, 22 nt, Homo sapiens
ucagcaaugaccuaagcaaaua

SEQ ID NO: 78212 - RNA, 22 nt, Homo sapiens
uaacccagugucugugaugggu

SEQ ID NO: 78213 - RNA, 22 nt, Homo sapiens
ugcuuuguugaaaaucauuugg

SEQ ID NO: 78214 - RNA, 21 nt, Homo sapiens
agcagcuuugguugaagcaga

SEQ ID NO: 78215 - RNA, 22 nt, Homo sapiens
ucuuuguuagaacccucuccuu

SEQ ID NO: 78216 - RNA, 22 nt, Homo sapiens
cauggcacugagcagguaugca

SEQ ID NO: 78217 - RNA, 18 nt, Homo sapiens
ugagaucagcaucaaggg

SEQ ID NO: 78218 - RNA, 22 nt, Homo sapiens
gagauucaucuagguccagaga

SEQ ID NO: 78219 - RNA, 22 nt, Homo sapiens
gucugcaugucauaugauagua

SEQ ID NO: 78220 - RNA, 22 nt, Homo sapiens
uagcaccucuuuggccuuucgu

SEQ ID NO: 78221 - RNA, 22 nt, Homo sapiens
guauuugauuauagcaugcuua

SEQ ID NO: 78222 - RNA, 22 nt, Homo sapiens
gugacaguggagacuuacuuca

SEQ ID NO: 78223 - RNA, 22 nt, Homo sapiens
cugccuagauguuguagggggu

SEQ ID NO: 78224 - RNA, 20 nt, Homo sapiens
uuccuuaggcauuggaagaa

SEQ ID NO: 78225 - RNA, 22 nt, Homo sapiens
aagcuggagugcaguggugcaa

SEQ ID NO: 78226 - RNA, 22 nt, Homo sapiens
ucaaaugauucuccugccucag

SEQ ID NO: 78227 - RNA, 22 nt, Homo sapiens
auugcucagucagggagcucgg

SEQ ID NO: 78228 - RNA, 22 nt, Homo sapiens
gccuguagaagaguagaugacc

SEQ ID NO: 78229 - RNA, 22 nt, Homo sapiens
uuccguguaguugagcaguuuu

SEQ ID NO: 78230 - RNA, 22 nt, Homo sapiens
caucacaucugcaugguaagua

SEQ ID NO: 78231 - RNA, 22 nt, Homo sapiens
gugugacugcucuauuagggcg

SEQ ID NO: 78232 - RNA, 22 nt, Homo sapiens
ggcaagugucagcagcaacacc

SEQ ID NO: 78233 - RNA, 22 nt, Homo sapiens
aauacuggcacugaagaccaug

SEQ ID NO: 78234 - RNA, 21 nt, Homo sapiens
caucaaauugucauggugggu

SEQ ID NO: 78235 - RNA, 22 nt, Homo sapiens
uaagaauucuguccgguauacu

SEQ ID NO: 78236 - RNA, 22 nt, Homo sapiens
aggucaccucaggaaauacuga

SEQ ID NO: 78237 - RNA, 22 nt, Homo sapiens
cucugacagugguuagcacugu

SEQ ID NO: 78238 - RNA, 22 nt, Homo sapiens
gugcacuguagaacccuuuguu

SEQ ID NO: 78239 - RNA, 22 nt, Homo sapiens
uuggaaauguguuugcauucag

SEQ ID NO: 78240 - RNA, 22 nt, Homo sapiens
gugcccacugucuguccuguag

SEQ ID NO: 78241 - RNA, 22 nt, Homo sapiens
gugaauugagagaacuguguua

SEQ ID NO: 78242 - RNA, 19 nt, Homo sapiens
gugagcacagacaauacaa

SEQ ID NO: 78243 - RNA, 22 nt, Homo sapiens
ugcuugagacacauaugaauuu

SEQ ID NO: 78244 - RNA, 22 nt, Homo sapiens
cacacugucuuucagaaugguu

SEQ ID NO: 78245 - RNA, 22 nt, Homo sapiens
ggaaugagaaauauuacacaau

SEQ ID NO: 78246 - RNA, 22 nt, Homo sapiens
uuguauguuguuugucagagaa

SEQ ID NO: 78247 - RNA, 22 nt, Homo sapiens
ggaaagaucagcuaaauguaag

SEQ ID NO: 78248 - RNA, 23 nt, Homo sapiens
ucaguacuccacuuucaauagug

SEQ ID NO: 78249 - RNA, 22 nt, Homo sapiens
caaaguaauugugguuuugcca

SEQ ID NO: 78250 - RNA, 22 nt, Homo sapiens
gugcacaacgugcaaguuuguu

SEQ ID NO: 78251 - RNA, 22 nt, Homo sapiens
gagagugugucagaggcugcga

SEQ ID NO: 78252 - RNA, 19 nt, Homo sapiens
augcugguguugcucaaac

SEQ ID NO: 78253 - RNA, 22 nt, Homo sapiens
uugagauggagucucgcugugu

SEQ ID NO: 78254 - RNA, 22 nt, Homo sapiens
gugggauggagagaagguauga

SEQ ID NO: 78255 - RNA, 22 nt, Homo sapiens
uugaaagacagaggggcaaguu

SEQ ID NO: 78256 - RNA, 22 nt, Homo sapiens
cagugguuuucaacccugguug

SEQ ID NO: 78257 - RNA, 22 nt, Homo sapiens
aucacauuuauaguggcacgca

SEQ ID NO: 78258 - RNA, 22 nt, Homo sapiens
augucaaggugggugauaguuu

SEQ ID NO: 78259 - RNA, 22 nt, Homo sapiens
gcagugugauguuuuaaucuau

SEQ ID NO: 78260 - RNA, 22 nt, Homo sapiens
gggcaugauggugcacacaugu

SEQ ID NO: 78261 - RNA, 22 nt, Homo sapiens
agaauguaaacagaauagagga

SEQ ID NO: 78262 - RNA, 20 nt, Homo sapiens
uaaggcacugugcuuuuagg

SEQ ID NO: 78263 - RNA, 22 nt, Homo sapiens
agugcaguggcacaaucuuggc

SEQ ID NO: 78264 - RNA, 22 nt, Homo sapiens
caccuagacuggagugcagugg

SEQ ID NO: 78265 - RNA, 22 nt, Homo sapiens
ugaucucagcucacugguugaa

SEQ ID NO: 78266 - RNA, 22 nt, Homo sapiens
uuccuugagagcuugauaucac

SEQ ID NO: 78267 - RNA, 22 nt, Homo sapiens
auugcucaaaucaguacuugag

SEQ ID NO: 78268 - RNA, 19 nt, Homo sapiens
caguaucauugcacauagu

SEQ ID NO: 78269 - RNA, 22 nt, Homo sapiens
ccugucuugauuaaauuacuua

SEQ ID NO: 78270 - RNA, 18 nt, Homo sapiens
uuuuugaggcacagggga

SEQ ID NO: 78271 - RNA, 22 nt, Homo sapiens
uuagcaccacacacuuuagagg

SEQ ID NO: 78272 - RNA, 22 nt, Homo sapiens
uuuguuugaagucgagacaacu

SEQ ID NO: 78273 - RNA, 22 nt, Homo sapiens
acccuggagagugcuguaguaa

SEQ ID NO: 78274 - RNA, 22 nt, Homo sapiens
ugugcuauguuauucacauggg

SEQ ID NO: 78275 - RNA, 22 nt, Homo sapiens
uagagaucuuauauuuuaugac

SEQ ID NO: 78276 - RNA, 19 nt, Homo sapiens
aaguacuugucuuuugaag

SEQ ID NO: 78277 - RNA, 22 nt, Homo sapiens
cagaaguauugguaugcucugu

SEQ ID NO: 78278 - RNA, 22 nt, Homo sapiens
ucuguaacauccaccuucuggg

SEQ ID NO: 78279 - RNA, 22 nt, Homo sapiens
aaaguggacuaagugaauauga

SEQ ID NO: 78280 - RNA, 22 nt, Homo sapiens
cucaccuugugauccacccacc

SEQ ID NO: 78281 - RNA, 22 nt, Homo sapiens
ugagcacagcgugugggagagc

SEQ ID NO: 78282 - RNA, 18 nt, Homo sapiens
uguugguguucacucacu

SEQ ID NO: 78283 - RNA, 20 nt, Homo sapiens
uugcugguguuagaggaggc

SEQ ID NO: 78284 - RNA, 20 nt, Homo sapiens
uguaacacauggagaacucu

SEQ ID NO: 78285 - RNA, 22 nt, Homo sapiens
ugaggcuaggauaggcugauuc

SEQ ID NO: 78286 - RNA, 22 nt, Homo sapiens
gugauaucacuguaucacucca

SEQ ID NO: 78287 - RNA, 22 nt, Homo sapiens
uuggaagacaaugcugauucuc

SEQ ID NO: 78288 - RNA, 22 nt, Homo sapiens
uaugugcacaugcccuggugac

SEQ ID NO: 78289 - RNA, 22 nt, Homo sapiens
ugagcagugagugugcugcagg

SEQ ID NO: 78290 - RNA, 22 nt, Homo sapiens
acacuggaggagagcuguugcu

SEQ ID NO: 78291 - RNA, 22 nt, Homo sapiens
caaagugcugggaugggccagg

SEQ ID NO: 78292 - RNA, 22 nt, Homo sapiens
uagcaagaugaauuugugcaaa

SEQ ID NO: 78293 - RNA, 22 nt, Homo sapiens
gugcacaacguguagguuuguu

SEQ ID NO: 78294 - RNA, 18 nt, Homo sapiens
ugacagcacaugugggga

SEQ ID NO: 78295 - RNA, 22 nt, Homo sapiens
augaguaugagaauacauuaag

SEQ ID NO: 78296 - RNA, 22 nt, Homo sapiens
uugugaucuucagaaaguggcu

SEQ ID NO: 78297 - RNA, 22 nt, Homo sapiens
auuaaguugugccugaaaacuu

SEQ ID NO: 78298 - RNA, 22 nt, Homo sapiens
ucacaccauucuucuacuucag

SEQ ID NO: 78299 - RNA, 17 nt, Homo sapiens
augaacucaucauuuuu

SEQ ID NO: 78300 - RNA, 18 nt, Homo sapiens
gagguuagguucugacag

SEQ ID NO: 78301 - RNA, 22 nt, Homo sapiens
gacaccugguguggaacuggag

SEQ ID NO: 78302 - RNA, 22 nt, Homo sapiens
cuagcagaacaauacaauucgg

SEQ ID NO: 78303 - RNA, 22 nt, Homo sapiens
gugguuuuaucccagaaauuaa

SEQ ID NO: 78304 - RNA, 22 nt, Homo sapiens
uguauguaauugaaguuaaguu

SEQ ID NO: 78305 - RNA, 22 nt, Homo sapiens
ucacacuguuuugauuauuaua

SEQ ID NO: 78306 - RNA, 22 nt, Homo sapiens
auuguguuugaaugaggcucca

SEQ ID NO: 78307 - RNA, 22 nt, Homo sapiens
uuaucucaguguuuguaaacaa

SEQ ID NO: 78308 - RNA, 22 nt, Homo sapiens
ccucuguaguccugcaagagga

SEQ ID NO: 78309 - RNA, 22 nt, Homo sapiens
guacaguauaguaauaggauuu

SEQ ID NO: 78310 - RNA, 22 nt, Homo sapiens
augugcacauucugguaaauau

SEQ ID NO: 78311 - RNA, 22 nt, Homo sapiens
aucuacagccagucugguuugu

SEQ ID NO: 78312 - RNA, 22 nt, Homo sapiens
ccuuggcacuacugacauugua

SEQ ID NO: 78313 - RNA, 23 nt, Homo sapiens
acacuugcugaguaaaucaaaua

SEQ ID NO: 78314 - RNA, 17 nt, Homo sapiens
uagcuucacauuaggaa

SEQ ID NO: 78315 - RNA, 22 nt, Homo sapiens
uugucccauggggucuuccuuu

SEQ ID NO: 78316 - RNA, 22 nt, Homo sapiens
gugcaguguuugcauggaauca

SEQ ID NO: 78317 - RNA, 22 nt, Homo sapiens
gugguuuuaauauucagucuag

SEQ ID NO: 78318 - RNA, 22 nt, Homo sapiens
aguaaaucacuaauggcuuccg

SEQ ID NO: 78319 - RNA, 22 nt, Homo sapiens
uuacuguauagaaucaucuuga

SEQ ID NO: 78320 - RNA, 22 nt, Homo sapiens
cugaggugggaggauuggcuug

SEQ ID NO: 78321 - RNA, 22 nt, Homo sapiens
aagcucauugagaucuauggcu

SEQ ID NO: 78322 - RNA, 22 nt, Homo sapiens
gugugaacaucauagaguguau

SEQ ID NO: 78323 - RNA, 22 nt, Homo sapiens
gucuaugguucaggguggagug

SEQ ID NO: 78324 - RNA, 22 nt, Homo sapiens
uagaaucuaacucgcaugaaaa

SEQ ID NO: 78325 - RNA, 22 nt, Homo sapiens
cuguauguuucuaugaauguga

SEQ ID NO: 78326 - RNA, 22 nt, Homo sapiens
uccauguaguugagcggcuuug

SEQ ID NO: 78327 - RNA, 23 nt, Homo sapiens
aaauuugccuauuauuccuaugg

SEQ ID NO: 78328 - RNA, 22 nt, Homo sapiens
gaaucacaguuauuagagcagc

SEQ ID NO: 78329 - RNA, 22 nt, Homo sapiens
cuacaguagagaggauguagaa

SEQ ID NO: 78330 - RNA, 22 nt, Homo sapiens
ucacauagcauaaugucugcaa

SEQ ID NO: 78331 - RNA, 22 nt, Homo sapiens
gugagucaugucccaucugauu

SEQ ID NO: 78332 - RNA, 22 nt, Homo sapiens
ucugcauaucaugcagaacuau

SEQ ID NO: 78333 - RNA, 22 nt, Homo sapiens
aaguugcuuuagguaagucaau

SEQ ID NO: 78334 - RNA, 22 nt, Homo sapiens
cacauguuuuagcauggcuguu

SEQ ID NO: 78335 - RNA, 22 nt, Homo sapiens
aagcucuuguugaaucuuguca

SEQ ID NO: 78336 - RNA, 22 nt, Homo sapiens
ucccugaguaucuaauguguuu

SEQ ID NO: 78337 - RNA, 17 nt, Homo sapiens
agccccauuagcuaguu

SEQ ID NO: 78338 - RNA, 22 nt, Homo sapiens
gagggcacugcuuuccuuucaa

SEQ ID NO: 78339 - RNA, 22 nt, Homo sapiens
ugcauguucuuacucauacaug

SEQ ID NO: 78340 - RNA, 22 nt, Homo sapiens
aaggagugugauucuucaguuu

SEQ ID NO: 78341 - RNA, 20 nt, Homo sapiens
gcauaugucuuuauagcaga

SEQ ID NO: 78342 - RNA, 19 nt, Homo sapiens
agcagaacaaauguguggg

SEQ ID NO: 78343 - RNA, 22 nt, Homo sapiens
cuuuuugcaaauacaacucuga

SEQ ID NO: 78344 - RNA, 22 nt, Homo sapiens
uaucaaguuggaagagaaguaa

SEQ ID NO: 78345 - RNA, 22 nt, Homo sapiens
guauggaagucaguuuguuggc

SEQ ID NO: 78346 - RNA, 22 nt, Homo sapiens
augauagguuuagguuuagaca

SEQ ID NO: 78347 - RNA, 22 nt, Homo sapiens
ucacuaggcuggagugcagugg

SEQ ID NO: 78348 - RNA, 17 nt, Homo sapiens
augugaauguucaaaua

SEQ ID NO: 78349 - RNA, 22 nt, Homo sapiens
ccuuggcacuuugccacagugc

SEQ ID NO: 78350 - RNA, 22 nt, Homo sapiens
uguccuguaggaggcagaacaa

SEQ ID NO: 78351 - RNA, 22 nt, Homo sapiens
guuauuguccauuuauuuagca

SEQ ID NO: 78352 - RNA, 22 nt, Homo sapiens
cagugguuuuuagcuugcuggg

SEQ ID NO: 78353 - RNA, 22 nt, Homo sapiens
ucaccuggggcacagcugaaga

SEQ ID NO: 78354 - RNA, 22 nt, Homo sapiens
uucuggccccucccaaucucau

SEQ ID NO: 78355 - RNA, 22 nt, Homo sapiens
agcagcuuugaucugaaugauu

SEQ ID NO: 78356 - RNA, 22 nt, Homo sapiens
aacagacugucacauaaaauug

SEQ ID NO: 78357 - RNA, 20 nt, Homo sapiens
agagugcuggacugaggagc

SEQ ID NO: 78358 - RNA, 22 nt, Homo sapiens
uggaguaggccuaagaaugaca

SEQ ID NO: 78359 - RNA, 22 nt, Homo sapiens
gggguaguuacuguuguucuuu

SEQ ID NO: 78360 - RNA, 22 nt, Homo sapiens
cucauugcaaucucugccuccc

SEQ ID NO: 78361 - RNA, 22 nt, Homo sapiens
agaauguauauucuguaguugu

SEQ ID NO: 78362 - RNA, 22 nt, Homo sapiens
uagcaaaucaauggaauugaag

SEQ ID NO: 78363 - RNA, 22 nt, Homo sapiens
agagugcuauagauuagauuuc

SEQ ID NO: 78364 - RNA, 18 nt, Homo sapiens
ugcagcuuugugauuggc

SEQ ID NO: 78365 - RNA, 22 nt, Homo sapiens
auuacaugucuauccaugaaca

SEQ ID NO: 78366 - RNA, 22 nt, Homo sapiens
uugcuccccaggaaaggaagca

SEQ ID NO: 78367 - RNA, 22 nt, Homo sapiens
gaaguaguaaaauuuauugcag

SEQ ID NO: 78368 - RNA, 22 nt, Homo sapiens
uagcagcuuuauugagguaaau

SEQ ID NO: 78369 - RNA, 22 nt, Homo sapiens
ccugucuugaagagauccuccu

SEQ ID NO: 78370 - RNA, 22 nt, Homo sapiens
gugguuuuuaaaguaccugugg

SEQ ID NO: 78371 - RNA, 22 nt, Homo sapiens
ucuguggucagaguccuuggcc

SEQ ID NO: 78372 - RNA, 22 nt, Homo sapiens
cuugccuaaucugcaugauuuu

SEQ ID NO: 78373 - RNA, 21 nt, Homo sapiens
uuauaguggcaugauuuauaa

SEQ ID NO: 78374 - RNA, 20 nt, Homo sapiens
uuucuccccuauaaaucuca

SEQ ID NO: 78375 - RNA, 22 nt, Homo sapiens
ugccugagccagguuuuaggag

SEQ ID NO: 78376 - RNA, 22 nt, Homo sapiens
gcaucacagggagacaggccuc

SEQ ID NO: 78377 - RNA, 22 nt, Homo sapiens
augaaaucuuuggcagaucuua

SEQ ID NO: 78378 - RNA, 22 nt, Homo sapiens
cuguaugugagaaauaauaagu

SEQ ID NO: 78379 - RNA, 22 nt, Homo sapiens
guggcagugugaggauccugcu

SEQ ID NO: 78380 - RNA, 19 nt, Homo sapiens
auuugaucaucaggcacag

SEQ ID NO: 78381 - RNA, 22 nt, Homo sapiens
caaguguuggcuuguauacaaa

SEQ ID NO: 78382 - RNA, 22 nt, Homo sapiens
uuuagcaaugcuguggggaagu

SEQ ID NO: 78383 - RNA, 22 nt, Homo sapiens
ucacugaaaccuccaccucucg

SEQ ID NO: 78384 - RNA, 22 nt, Homo sapiens
gugauuauuaugcacugcaugc

SEQ ID NO: 78385 - RNA, 22 nt, Homo sapiens
aauugcauugaauuuguagcuu

SEQ ID NO: 78386 - RNA, 22 nt, Homo sapiens
aaagcacuggagucaucaucua

SEQ ID NO: 78387 - RNA, 22 nt, Homo sapiens
gcaguagugugaucuuggcuca

SEQ ID NO: 78388 - RNA, 22 nt, Homo sapiens
ucagggacuuacaaaccagaag

SEQ ID NO: 78389 - RNA, 22 nt, Homo sapiens
agguagaguguuuuguucuucu

SEQ ID NO: 78390 - RNA, 22 nt, Homo sapiens
uugcuauguugcccagucugga

SEQ ID NO: 78391 - RNA, 22 nt, Homo sapiens
ccuuuuuguaguggaaguagga

SEQ ID NO: 78392 - RNA, 22 nt, Homo sapiens
aguauuuguuggaauaccuguu

SEQ ID NO: 78393 - RNA, 22 nt, Homo sapiens
augaccuuguccucagugucau

SEQ ID NO: 78394 - RNA, 22 nt, Homo sapiens
ugguaucauuuuaucugcucua

SEQ ID NO: 78395 - RNA, 20 nt, Homo sapiens
auucauggaggagcaauugg

SEQ ID NO: 78396 - RNA, 22 nt, Homo sapiens
auuggauagucuuuaucuguug

SEQ ID NO: 78397 - RNA, 22 nt, Homo sapiens
ggagcugugauuugaguccaga

SEQ ID NO: 78398 - RNA, 23 nt, Homo sapiens
uacagcugcagaaucaggcuaag

SEQ ID NO: 78399 - RNA, 22 nt, Homo sapiens
ggaaagauguaauauuaucuaa

SEQ ID NO: 78400 - RNA, 23 nt, Homo sapiens
ucuggcuuugggaugcucaaggg

SEQ ID NO: 78401 - RNA, 22 nt, Homo sapiens
cagccggguggcuccuagggua

SEQ ID NO: 78402 - RNA, 22 nt, Homo sapiens
auuuuuggauauagggaaggau

SEQ ID NO: 78403 - RNA, 19 nt, Homo sapiens
guauuugacuuucuuguuu

SEQ ID NO: 78404 - RNA, 22 nt, Homo sapiens
gugugguauuauaacuagguau

SEQ ID NO: 78405 - RNA, 20 nt, Homo sapiens
uggcaugaaauuuuccaagc

SEQ ID NO: 78406 - RNA, 19 nt, Homo sapiens
gcuucuugaggacgaugac

SEQ ID NO: 78407 - RNA, 22 nt, Homo sapiens
ucacagugcaggaucaguuaau

SEQ ID NO: 78408 - RNA, 22 nt, Homo sapiens
ugagguaucauugcccaggcug

SEQ ID NO: 78409 - RNA, 22 nt, Homo sapiens
gugcacaacgugcagguuaguu

SEQ ID NO: 78410 - RNA, 22 nt, Homo sapiens
aagcuggauuuaguguggagca

SEQ ID NO: 78411 - RNA, 17 nt, Homo sapiens
gggucaccuugcaggua

SEQ ID NO: 78412 - RNA, 22 nt, Homo sapiens
acugcacuccagccuucaggac

SEQ ID NO: 78413 - RNA, 21 nt, Homo sapiens
gugucacagacaugacagaug

SEQ ID NO: 78414 - RNA, 22 nt, Homo sapiens
cauugcauuuucuuuguaccuu

SEQ ID NO: 78415 - RNA, 22 nt, Homo sapiens
cacuggucagugaaacaguauu

SEQ ID NO: 78416 - RNA, 22 nt, Homo sapiens
aaaguggugugaguauguaucu

SEQ ID NO: 78417 - RNA, 18 nt, Homo sapiens
uaauaacugugaccuuga

SEQ ID NO: 78418 - RNA, 22 nt, Homo sapiens
ucaaguacugccuugcucuggc

SEQ ID NO: 78419 - RNA, 22 nt, Homo sapiens
uugcauguacguacagagagag

SEQ ID NO: 78420 - RNA, 22 nt, Homo sapiens
cugcaguaaccacuguaggugu

SEQ ID NO: 78421 - RNA, 22 nt, Homo sapiens
uggucaccuucuugcucugucu

SEQ ID NO: 78422 - RNA, 22 nt, Homo sapiens
aucaaaguaggcauauguuuuu

SEQ ID NO: 78423 - RNA, 22 nt, Homo sapiens
uaaaugcucuuuaaaagugcuu

SEQ ID NO: 78424 - RNA, 22 nt, Homo sapiens
caaagugcuggccgggcgcagu

SEQ ID NO: 78425 - RNA, 22 nt, Homo sapiens
gguggcuuuuugugauggcuga

SEQ ID NO: 78426 - RNA, 22 nt, Homo sapiens
acagugacagaaagcugauuau

SEQ ID NO: 78427 - RNA, 22 nt, Homo sapiens
uuuuugugguauauugcaacaa

SEQ ID NO: 78428 - RNA, 22 nt, Homo sapiens
auggagacaaauaaaggagagu

SEQ ID NO: 78429 - RNA, 22 nt, Homo sapiens
caaaguaauugcuguuuugcca

SEQ ID NO: 78430 - RNA, 20 nt, Homo sapiens
ucucauggagguagagaaua

SEQ ID NO: 78431 - RNA, 22 nt, Homo sapiens
guggguaaaucucuguucgagg

SEQ ID NO: 78432 - RNA, 22 nt, Homo sapiens
caauggcaaugaaauagugaga

SEQ ID NO: 78433 - RNA, 22 nt, Homo sapiens
ugugucacugcacuccagccug

SEQ ID NO: 78434 - RNA, 18 nt, Homo sapiens
ggcugguguuuuaguaua

SEQ ID NO: 78435 - RNA, 22 nt, Homo sapiens
uugauaguuuaauuaaugcuag

SEQ ID NO: 78436 - RNA, 22 nt, Homo sapiens
uuggaaggcuccuaaugaaugg

SEQ ID NO: 78437 - RNA, 18 nt, Homo sapiens
gugucugguuaugggagu

SEQ ID NO: 78438 - RNA, 22 nt, Homo sapiens
augaaaacaugauuugccuguu

SEQ ID NO: 78439 - RNA, 22 nt, Homo sapiens
auauucaagugaggauggcuaa

SEQ ID NO: 78440 - RNA, 17 nt, Homo sapiens
cugugaugaucuugucu

SEQ ID NO: 78441 - RNA, 19 nt, Homo sapiens
uggucccccgcaaucucau

SEQ ID NO: 78442 - RNA, 22 nt, Homo sapiens
uuuggcauuuaaauaugcaugg

SEQ ID NO: 78443 - RNA, 23 nt, Homo sapiens
cagcucauuuggguccccuuguc

SEQ ID NO: 78444 - RNA, 22 nt, Homo sapiens
agaguaguaggaugaauggacu

SEQ ID NO: 78445 - RNA, 22 nt, Homo sapiens
agcagguguccacaauguuugc

SEQ ID NO: 78446 - RNA, 22 nt, Homo sapiens
uguaugaguuguuuauaaauuu

SEQ ID NO: 78447 - RNA, 22 nt, Homo sapiens
aaaugcacgcuacccagcuaga

SEQ ID NO: 78448 - RNA, 22 nt, Homo sapiens
accugcacagccgaacauagac

SEQ ID NO: 78449 - RNA, 22 nt, Homo sapiens
gggaugaagaagaauaguucgu

SEQ ID NO: 78450 - RNA, 22 nt, Homo sapiens
gcagagaaacaggucuaaggag

SEQ ID NO: 78451 - RNA, 21 nt, Homo sapiens
uagcaaauugcuauuaaggca

SEQ ID NO: 78452 - RNA, 22 nt, Homo sapiens
agcagcuuugcauggccugugg

SEQ ID NO: 78453 - RNA, 22 nt, Homo sapiens
cacuggucucauggcaugagag

SEQ ID NO: 78454 - RNA, 22 nt, Homo sapiens
uggaagugaacaaccaaggcag

SEQ ID NO: 78455 - RNA, 22 nt, Homo sapiens
auugcaguuagaacagaagucu

SEQ ID NO: 78456 - RNA, 19 nt, Homo sapiens
gugugcauaucacagagca

SEQ ID NO: 78457 - RNA, 22 nt, Homo sapiens
ggggcauugugucuggguuccu

SEQ ID NO: 78458 - RNA, 22 nt, Homo sapiens
aaagggcacugugcuuuggcaa

SEQ ID NO: 78459 - RNA, 22 nt, Homo sapiens
uguggcagugcuuuaugaaacc

SEQ ID NO: 78460 - RNA, 22 nt, Homo sapiens
acccuggauucguggccuugaa

SEQ ID NO: 78461 - RNA, 22 nt, Homo sapiens
ucucauggcucacccugcauag

SEQ ID NO: 78462 - RNA, 22 nt, Homo sapiens
agacuagacagaugaacagcac

SEQ ID NO: 78463 - RNA, 22 nt, Homo sapiens
aaggaguguggugaucuugggc

SEQ ID NO: 78464 - RNA, 22 nt, Homo sapiens
ugagaacuuugucuuuuacucu

SEQ ID NO: 78465 - RNA, 22 nt, Homo sapiens
ugcaccaucuugcuucuguggu

SEQ ID NO: 78466 - RNA, 23 nt, Homo sapiens
gugcaguggcgagauuucggcuc

SEQ ID NO: 78467 - RNA, 22 nt, Homo sapiens
ugaugcugaugccugccagaag

SEQ ID NO: 78468 - RNA, 22 nt, Homo sapiens
ucaauguaucuccaagaauuga

SEQ ID NO: 78469 - RNA, 22 nt, Homo sapiens
acucugucuaguuguaaaauuu

SEQ ID NO: 78470 - RNA, 22 nt, Homo sapiens
ucaccuggagaagauggaucau

SEQ ID NO: 78471 - RNA, 22 nt, Homo sapiens
caacucuguaggauccaggugg

SEQ ID NO: 78472 - RNA, 18 nt, Homo sapiens
acagugucauggcucaau

SEQ ID NO: 78473 - RNA, 22 nt, Homo sapiens
ugagaggugaauggcaggcuca

SEQ ID NO: 78474 - RNA, 21 nt, Homo sapiens
uguuaacaugcagauuacugg

SEQ ID NO: 78475 - RNA, 22 nt, Homo sapiens
gccaagauuuaauucaucaguu

SEQ ID NO: 78476 - RNA, 21 nt, Homo sapiens
gcuuuuucggaagucuuuggc

SEQ ID NO: 78477 - RNA, 22 nt, Homo sapiens
uaaugcacauuuauuuuaccuu

SEQ ID NO: 78478 - RNA, 22 nt, Homo sapiens
aucaaaguuucccagaaguugu

SEQ ID NO: 78479 - RNA, 22 nt, Homo sapiens
gucagugugauaucugcagggg

SEQ ID NO: 78480 - RNA, 22 nt, Homo sapiens
gcacugagagaagccccaagua

SEQ ID NO: 78481 - RNA, 22 nt, Homo sapiens
aaugguguuuccguuaagcuga

SEQ ID NO: 78482 - RNA, 22 nt, Homo sapiens
gauaaaguauuggguacuaugc

SEQ ID NO: 78483 - RNA, 21 nt, Homo sapiens
ucauugggugcagcccacccu

SEQ ID NO: 78484 - RNA, 22 nt, Homo sapiens
aaucuguagaaggugcacauuc

SEQ ID NO: 78485 - RNA, 22 nt, Homo sapiens
uggugcuuaaauaaggcuuuca

SEQ ID NO: 78486 - RNA, 22 nt, Homo sapiens
cuagccuggagugcaguggugc

SEQ ID NO: 78487 - RNA, 22 nt, Homo sapiens
gucuuuggaaagacaaaguuca

SEQ ID NO: 78488 - RNA, 22 nt, Homo sapiens
uugcacauuuuuucuggcagaa

SEQ ID NO: 78489 - RNA, 20 nt, Homo sapiens
gagauguugaucagggcuau

SEQ ID NO: 78490 - RNA, 22 nt, Homo sapiens
augugugaaucccagaaccugu

SEQ ID NO: 78491 - RNA, 22 nt, Homo sapiens
gaguaacagcauaaauuuguga

SEQ ID NO: 78492 - RNA, 22 nt, Homo sapiens
ccugagaucauacuguuaguaa

SEQ ID NO: 78493 - RNA, 22 nt, Homo sapiens
ucagaguagcugucugaggugc

SEQ ID NO: 78494 - RNA, 22 nt, Homo sapiens
ucagugggcuauguaauuaacu

SEQ ID NO: 78495 - RNA, 22 nt, Homo sapiens
uucauguagucaucauccugcu

SEQ ID NO: 78496 - RNA, 22 nt, Homo sapiens
auaaaugccuguuguuuuaagc

SEQ ID NO: 78497 - RNA, 22 nt, Homo sapiens
aaaugcacagaaaggaugugga

SEQ ID NO: 78498 - RNA, 23 nt, Homo sapiens
cauggcuguuaacacuguuugag

SEQ ID NO: 78499 - RNA, 22 nt, Homo sapiens
uuccuugguucagggaaggucc

SEQ ID NO: 78500 - RNA, 22 nt, Homo sapiens
cacagagugagacccugucucu

SEQ ID NO: 78501 - RNA, 20 nt, Homo sapiens
ggagguuguauaaguacauc

SEQ ID NO: 78502 - RNA, 22 nt, Homo sapiens
uguaagcauugggcaugcaguc

SEQ ID NO: 78503 - RNA, 22 nt, Homo sapiens
uuauggcuauugaugacaauug

SEQ ID NO: 78504 - RNA, 22 nt, Homo sapiens
guauacaugucaaaacucacau

SEQ ID NO: 78505 - RNA, 22 nt, Homo sapiens
uuugguuuuuguuaucacucau

SEQ ID NO: 78506 - RNA, 22 nt, Homo sapiens
ucacauuguauauguaccuauc

SEQ ID NO: 78507 - RNA, 22 nt, Homo sapiens
ugucuuguagacaauguauagu

SEQ ID NO: 78508 - RNA, 22 nt, Homo sapiens
cuucuugcuguguccucacaug

SEQ ID NO: 78509 - RNA, 22 nt, Homo sapiens
uagaagcuacucuucuuguggc

SEQ ID NO: 78510 - RNA, 22 nt, Homo sapiens
augcagugugcaacagauuaag

SEQ ID NO: 78511 - RNA, 22 nt, Homo sapiens
cacugcacuccaguuucgguaa

SEQ ID NO: 78512 - RNA, 22 nt, Homo sapiens
uuauguaaaucaaucuggaauc

SEQ ID NO: 78513 - RNA, 22 nt, Homo sapiens
auggcacuacugggaaugucuu

SEQ ID NO: 78514 - RNA, 20 nt, Homo sapiens
uucagcaaaggaaugggagu

SEQ ID NO: 78515 - RNA, 22 nt, Homo sapiens
aagucaaggagagaagcuucag

SEQ ID NO: 78516 - RNA, 22 nt, Homo sapiens
uuccaugugggcuugucaagua

SEQ ID NO: 78517 - RNA, 23 nt, Homo sapiens
uuacaguggcaugaucucugcuc

SEQ ID NO: 78518 - RNA, 22 nt, Homo sapiens
uuuuaguggaauauuuacaguu

SEQ ID NO: 78519 - RNA, 22 nt, Homo sapiens
gcuguauuguugaaggaaaugu

SEQ ID NO: 78520 - RNA, 22 nt, Homo sapiens
gcuuguguuuacuguaguuacu

SEQ ID NO: 78521 - RNA, 22 nt, Homo sapiens
agcagcauggguauaaaucucc

SEQ ID NO: 78522 - RNA, 21 nt, Homo sapiens
uaucacauuggugauuaaguu

SEQ ID NO: 78523 - RNA, 22 nt, Homo sapiens
caaauugcuuguggaggauaau

SEQ ID NO: 78524 - RNA, 21 nt, Homo sapiens
aaaugcacauuacugcuggug

SEQ ID NO: 78525 - RNA, 22 nt, Homo sapiens
guucacucuggagaauauugac

SEQ ID NO: 78526 - RNA, 22 nt, Homo sapiens
ugcucaguuuaaaacuuuugag

SEQ ID NO: 78527 - RNA, 22 nt, Homo sapiens
ggcaacauggugaaacucuguc

SEQ ID NO: 78528 - RNA, 22 nt, Homo sapiens
augguacuggguaaaagugggg

SEQ ID NO: 78529 - RNA, 22 nt, Homo sapiens
cugagauacacuaauagucucu

SEQ ID NO: 78530 - RNA, 22 nt, Homo sapiens
uucaccuugcccacagcagucu

SEQ ID NO: 78531 - RNA, 22 nt, Homo sapiens
acugcacuccaguuugggcagc

SEQ ID NO: 78532 - RNA, 22 nt, Homo sapiens
uccauuuguucagcuucaggaa

SEQ ID NO: 78533 - RNA, 22 nt, Homo sapiens
auuguucuuacaugcugucauc

SEQ ID NO: 78534 - RNA, 22 nt, Homo sapiens
ugagcugagauuaagcugcugc

SEQ ID NO: 78535 - RNA, 22 nt, Homo sapiens
cauggcacaucuuuucugacua

SEQ ID NO: 78536 - RNA, 22 nt, Homo sapiens
auguccaugagcacauguauca

SEQ ID NO: 78537 - RNA, 22 nt, Homo sapiens
ugcauugcacuugcaugagaua

SEQ ID NO: 78538 - RNA, 21 nt, Homo sapiens
auggaaagacugccucuucaa

SEQ ID NO: 78539 - RNA, 22 nt, Homo sapiens
uuuuugaguaaauauaaauugu

SEQ ID NO: 78540 - RNA, 22 nt, Homo sapiens
ucacacugaaacuaggguguga

SEQ ID NO: 78541 - RNA, 21 nt, Homo sapiens
augugcacuaugucauuuaau

SEQ ID NO: 78542 - RNA, 19 nt, Homo sapiens
uuuguauguuuccaguaau

SEQ ID NO: 78543 - RNA, 22 nt, Homo sapiens
cacugcaauuacuuuugcacca

SEQ ID NO: 78544 - RNA, 22 nt, Homo sapiens
uuccuggaggggaaguguccaa

SEQ ID NO: 78545 - RNA, 22 nt, Homo sapiens
acucauugcucauaccuuaucu

SEQ ID NO: 78546 - RNA, 22 nt, Homo sapiens
auccauguggauaaauguguau

SEQ ID NO: 78547 - RNA, 22 nt, Homo sapiens
uugcacaauccugugagugagu

SEQ ID NO: 78548 - RNA, 22 nt, Homo sapiens
cacugcauggucuagcuggguu

SEQ ID NO: 78549 - RNA, 22 nt, Homo sapiens
ugccugauacccucugucucuc

SEQ ID NO: 78550 - RNA, 22 nt, Homo sapiens
ugugguuuuucacauuuagaga

SEQ ID NO: 78551 - RNA, 22 nt, Homo sapiens
uugugcuugauuugccuagcug

SEQ ID NO: 78552 - RNA, 19 nt, Homo sapiens
cucauggagaaggagaaua

SEQ ID NO: 78553 - RNA, 22 nt, Homo sapiens
uguggcuuuacagcaugguuca

SEQ ID NO: 78554 - RNA, 22 nt, Homo sapiens
ugaaggaguauggauaagucgu

SEQ ID NO: 78555 - RNA, 22 nt, Homo sapiens
ugggaugaugcuugagaauauc

SEQ ID NO: 78556 - RNA, 22 nt, Homo sapiens
agcagcauuaugauauaucuua

SEQ ID NO: 78557 - RNA, 22 nt, Homo sapiens
caaaugacaucauuucauucaa

SEQ ID NO: 78558 - RNA, 22 nt, Homo sapiens
ugugaacagcuccaaaugugga

SEQ ID NO: 78559 - RNA, 22 nt, Homo sapiens
ugaugaaguauaggaagggcuu

SEQ ID NO: 78560 - RNA, 18 nt, Homo sapiens
cucacacccuaaucagga

SEQ ID NO: 78561 - RNA, 22 nt, Homo sapiens
ugaucuguccaccucagcuucc

SEQ ID NO: 78562 - RNA, 22 nt, Homo sapiens
uucaagucaaggaaagaggucu

SEQ ID NO: 78563 - RNA, 18 nt, Homo sapiens
auguuauguuuguagaag

SEQ ID NO: 78564 - RNA, 22 nt, Homo sapiens
uucuugcuguauccucacaugg

SEQ ID NO: 78565 - RNA, 22 nt, Homo sapiens
uaaucacagagguuuggccuca

SEQ ID NO: 78566 - RNA, 22 nt, Homo sapiens
uuccaagugggaaacaaaaaug

SEQ ID NO: 78567 - RNA, 22 nt, Homo sapiens
guucaucaggaauauuggccua

SEQ ID NO: 78568 - RNA, 22 nt, Homo sapiens
cacugcauccuccauauccugg

SEQ ID NO: 78569 - RNA, 22 nt, Homo sapiens
uuguauguaaccauuuggcaaa

SEQ ID NO: 78570 - RNA, 22 nt, Homo sapiens
ugagagucauacaaauaaaaau

SEQ ID NO: 78571 - RNA, 22 nt, Homo sapiens
ccaucacacugugauuauuauc

SEQ ID NO: 78572 - RNA, 22 nt, Homo sapiens
ugugcaguuuugagugaauuuc

SEQ ID NO: 78573 - RNA, 18 nt, Homo sapiens
cuggaaggcuacuacagu

SEQ ID NO: 78574 - RNA, 21 nt, Homo sapiens
ggcaagagaauacaacauaaa

SEQ ID NO: 78575 - RNA, 22 nt, Homo sapiens
cucccuuugcugaauguuuuuc

SEQ ID NO: 78576 - RNA, 22 nt, Homo sapiens
gagaacuggcugauucaaggac

SEQ ID NO: 78577 - RNA, 22 nt, Homo sapiens
ugacuucauuuuuggccaugag

SEQ ID NO: 78578 - RNA, 22 nt, Homo sapiens
aagcuggauuucgcauccuguu

SEQ ID NO: 78579 - RNA, 22 nt, Homo sapiens
gaugauguugaauguucucacc

SEQ ID NO: 78580 - RNA, 22 nt, Homo sapiens
agaaacauucucuugccuccuu

SEQ ID NO: 78581 - RNA, 21 nt, Homo sapiens
cacugcacuugccuucugggu

SEQ ID NO: 78582 - RNA, 22 nt, Homo sapiens
uuauaacagagacuccugugcu

SEQ ID NO: 78583 - RNA, 22 nt, Homo sapiens
ccacccuggagaauuugagguc

SEQ ID NO: 78584 - RNA, 22 nt, Homo sapiens
ugagaugaucaaaguauaggcu

SEQ ID NO: 78585 - RNA, 22 nt, Homo sapiens
ugugguuuuuuucuccaauagg

SEQ ID NO: 78586 - RNA, 22 nt, Homo sapiens
gcacccugucaaaauggaccaa

SEQ ID NO: 78587 - RNA, 19 nt, Homo sapiens
ccugcuguucuuuugcacc

SEQ ID NO: 78588 - RNA, 22 nt, Homo sapiens
uuggccuccuggucauauccag

SEQ ID NO: 78589 - RNA, 22 nt, Homo sapiens
uaucccaguggauguaccccau

SEQ ID NO: 78590 - RNA, 20 nt, Homo sapiens
aagugcaucguugugucugc

SEQ ID NO: 78591 - RNA, 22 nt, Homo sapiens
acacugucaugucucacaggca

SEQ ID NO: 78592 - RNA, 22 nt, Homo sapiens
ucacauuguguagccugcucac

SEQ ID NO: 78593 - RNA, 22 nt, Homo sapiens
ccugugguuaaccagcuagaug

SEQ ID NO: 78594 - RNA, 22 nt, Homo sapiens
augugcauaugaagcacagaca

SEQ ID NO: 78595 - RNA, 18 nt, Homo sapiens
ucaagcaauugucaugcc

SEQ ID NO: 78596 - RNA, 22 nt, Homo sapiens
ucaccuggagacaugaagacug

SEQ ID NO: 78597 - RNA, 22 nt, Homo sapiens
cucauggauggucuggcagcca

SEQ ID NO: 78598 - RNA, 22 nt, Homo sapiens
ggcaacaaagacauuucaacau

SEQ ID NO: 78599 - RNA, 16 nt, Homo sapiens
agcagguguuagguga

SEQ ID NO: 78600 - RNA, 22 nt, Homo sapiens
gagcaucaguggccucaucuca

SEQ ID NO: 78601 - RNA, 22 nt, Homo sapiens
uuauccucuagacauagguuua

SEQ ID NO: 78602 - RNA, 22 nt, Homo sapiens
uucccuuugugcauaggauuug

SEQ ID NO: 78603 - RNA, 21 nt, Homo sapiens
ucaacccuugcgucaccaagc

SEQ ID NO: 78604 - RNA, 22 nt, Homo sapiens
cuaagauugucuuaguguguug

SEQ ID NO: 78605 - RNA, 22 nt, Homo sapiens
uuucauggaauauagucauuuu

SEQ ID NO: 78606 - RNA, 22 nt, Homo sapiens
gugcagugugauccuuccguau

SEQ ID NO: 78607 - RNA, 19 nt, Homo sapiens
uuguguccccacaaaauuc

SEQ ID NO: 78608 - RNA, 19 nt, Homo sapiens
ccauggcaaugaucugaug

SEQ ID NO: 78609 - RNA, 22 nt, Homo sapiens
uggaaaacaugcacauuggauu

SEQ ID NO: 78610 - RNA, 22 nt, Homo sapiens
acagugcuuuuguuccucuccu

SEQ ID NO: 78611 - RNA, 22 nt, Homo sapiens
aaucacaguguucuugugaggg

SEQ ID NO: 78612 - RNA, 22 nt, Homo sapiens
cacauugcaggaaaguucauua

SEQ ID NO: 78613 - RNA, 22 nt, Homo sapiens
uaaugcuaucugggccaggggu

SEQ ID NO: 78614 - RNA, 22 nt, Homo sapiens
acacucuaguguucuuaaucag

SEQ ID NO: 78615 - RNA, 22 nt, Homo sapiens
gucagggagggauagaugauua

SEQ ID NO: 78616 - RNA, 22 nt, Homo sapiens
uaagacuuuuugggaauauaga

SEQ ID NO: 78617 - RNA, 22 nt, Homo sapiens
gugucaguggggagugaucuuc

SEQ ID NO: 78618 - RNA, 22 nt, Homo sapiens
ugagacaucugagauuuuaagc

SEQ ID NO: 78619 - RNA, 22 nt, Homo sapiens
gugcaugucuaugcgagucuaa

SEQ ID NO: 78620 - RNA, 22 nt, Homo sapiens
guauaguaguacaaaaguuuuu

SEQ ID NO: 78621 - RNA, 20 nt, Homo sapiens
ugguccccaccaaaucucau

SEQ ID NO: 78622 - RNA, 22 nt, Homo sapiens
ggcaguggaagugccaguuucu

SEQ ID NO: 78623 - RNA, 22 nt, Homo sapiens
uaugcacacacguguuuaugug

SEQ ID NO: 78624 - RNA, 22 nt, Homo sapiens
ucaaaugcuguauuguaguaau

SEQ ID NO: 78625 - RNA, 22 nt, Homo sapiens
aauacugugauaucgagcgauu

SEQ ID NO: 78626 - RNA, 22 nt, Homo sapiens
uguucuugaguugggaguacaa

SEQ ID NO: 78627 - RNA, 22 nt, Homo sapiens
gcaaaugcuaugccauuuuaua

SEQ ID NO: 78628 - RNA, 22 nt, Homo sapiens
uugcucaccugagaagaauaga

SEQ ID NO: 78629 - RNA, 22 nt, Homo sapiens
uuccauguaguugagcaguuuu

SEQ ID NO: 78630 - RNA, 22 nt, Homo sapiens
cucauuaguuguuuuaagauga

SEQ ID NO: 78631 - RNA, 22 nt, Homo sapiens
gggagcaaaaaugaugcccaag

SEQ ID NO: 78632 - RNA, 22 nt, Homo sapiens
uaagggacgcccccuucucucu

SEQ ID NO: 78633 - RNA, 22 nt, Homo sapiens
gugagguugaaaauaauggaaa

SEQ ID NO: 78634 - RNA, 22 nt, Homo sapiens
uaugcacacguguccaugugca

SEQ ID NO: 78635 - RNA, 22 nt, Homo sapiens
uaucacacgccuugcuucauuu

SEQ ID NO: 78636 - RNA, 22 nt, Homo sapiens
gugagcauaggaggcuucuguu

SEQ ID NO: 78637 - RNA, 22 nt, Homo sapiens
cuuucacacuguuggugggaau

SEQ ID NO: 78638 - RNA, 20 nt, Homo sapiens
agguuauuauaauuagaaga

SEQ ID NO: 78639 - RNA, 20 nt, Homo sapiens
cccuaagccagaugcugggg

SEQ ID NO: 78640 - RNA, 20 nt, Homo sapiens
agcaucauugcaauuuguca

SEQ ID NO: 78641 - RNA, 22 nt, Homo sapiens
cacauagcuagucaguagugaa

SEQ ID NO: 78642 - RNA, 22 nt, Homo sapiens
uuuuggcuuuuccucagcaagc

SEQ ID NO: 78643 - RNA, 22 nt, Homo sapiens
auagugcuuuugaaucuuguug

SEQ ID NO: 78644 - RNA, 22 nt, Homo sapiens
ugccuggagagcuccuacauau

SEQ ID NO: 78645 - RNA, 22 nt, Homo sapiens
gugguuuucaacuccaccugca

SEQ ID NO: 78646 - RNA, 22 nt, Homo sapiens
ugcucaccugcugcucaccucc

SEQ ID NO: 78647 - RNA, 22 nt, Homo sapiens
uucaagauggcaccagugagug

SEQ ID NO: 78648 - RNA, 22 nt, Homo sapiens
agccuucauucugacaguagga

SEQ ID NO: 78649 - RNA, 22 nt, Homo sapiens
uggcaugauccuagauucaaca

SEQ ID NO: 78650 - RNA, 19 nt, Homo sapiens
uuccuagugguugggaagu

SEQ ID NO: 78651 - RNA, 22 nt, Homo sapiens
uugugauugagugauccuuguu

SEQ ID NO: 78652 - RNA, 22 nt, Homo sapiens
ugagugugacuuagcagaagga

SEQ ID NO: 78653 - RNA, 22 nt, Homo sapiens
ccaagccucaguuucccucugu

SEQ ID NO: 78654 - RNA, 22 nt, Homo sapiens
ucuuggccaugaauggcaaggc

SEQ ID NO: 78655 - RNA, 22 nt, Homo sapiens
agucacaugccagcacacccag

SEQ ID NO: 78656 - RNA, 22 nt, Homo sapiens
ucugucuugugguuugagugcc

SEQ ID NO: 78657 - RNA, 22 nt, Homo sapiens
gagcucaccuuaccucuggagc

SEQ ID NO: 78658 - RNA, 21 nt, Homo sapiens
ucacauggccagaguaggaac

SEQ ID NO: 78659 - RNA, 22 nt, Homo sapiens
ucuggccuccuaugagaaucga

SEQ ID NO: 78660 - RNA, 22 nt, Homo sapiens
ucucuagagagccugguguuca

SEQ ID NO: 78661 - RNA, 22 nt, Homo sapiens
agugcauugcaucucugcuuca

SEQ ID NO: 78662 - RNA, 22 nt, Homo sapiens
aucaggaaccuuuuuggugugu

SEQ ID NO: 78663 - RNA, 22 nt, Homo sapiens
uuuugcucuugguaaugaaaga

SEQ ID NO: 78664 - RNA, 22 nt, Homo sapiens
cacagggcuaacauuuuugccc

SEQ ID NO: 78665 - RNA, 22 nt, Homo sapiens
cucaguuuugccuuguuuaagg

SEQ ID NO: 78666 - RNA, 22 nt, Homo sapiens
uugacaguggcuuaaauugguu

SEQ ID NO: 78667 - RNA, 22 nt, Homo sapiens
cagcuguuguuaugucugcagg

SEQ ID NO: 78668 - RNA, 22 nt, Homo sapiens
ugagacggagucucacucuguu

SEQ ID NO: 78669 - RNA, 23 nt, Homo sapiens
aguggucuccugggcccagcugu

SEQ ID NO: 78670 - RNA, 22 nt, Homo sapiens
aacacuggcugcucgaguucuc

SEQ ID NO: 78671 - RNA, 22 nt, Homo sapiens
guacagugcucacaaugagagc

SEQ ID NO: 78672 - RNA, 22 nt, Homo sapiens
ugggaucauuaugcauagugua

SEQ ID NO: 78673 - RNA, 20 nt, Homo sapiens
ucaaggcacgaauaaaaguu

SEQ ID NO: 78674 - RNA, 18 nt, Homo sapiens
uuguggccccuacaaauu

SEQ ID NO: 78675 - RNA, 22 nt, Homo sapiens
uacccaguaacaaguauuuugg

SEQ ID NO: 78676 - RNA, 22 nt, Homo sapiens
uggccuguaacccucucauagg

SEQ ID NO: 78677 - RNA, 22 nt, Homo sapiens
ucuugucacugcauccccagcu

SEQ ID NO: 78678 - RNA, 22 nt, Homo sapiens
aauauugucaaaauggauucca

SEQ ID NO: 78679 - RNA, 22 nt, Homo sapiens
acccaguaacauaugggaggga

SEQ ID NO: 78680 - RNA, 22 nt, Homo sapiens
auccaguguuuucuuuugucac

SEQ ID NO: 78681 - RNA, 22 nt, Homo sapiens
auggccugaugcaccuguccca

SEQ ID NO: 78682 - RNA, 22 nt, Homo sapiens
cacccaguaagcaugaggcccu

SEQ ID NO: 78683 - RNA, 22 nt, Homo sapiens
gauguguuuaucacccaguccu

SEQ ID NO: 78684 - RNA, 22 nt, Homo sapiens
ugauggccuguucuccauaugu

SEQ ID NO: 78685 - RNA, 22 nt, Homo sapiens
uggcacaaugacccuugugggc

SEQ ID NO: 78686 - RNA, 20 nt, Homo sapiens
ugccugacacucuuugcuuc

SEQ ID NO: 78687 - RNA, 22 nt, Homo sapiens
ucauauugcgguucauugacuu

SEQ ID NO: 78688 - RNA, 22 nt, Homo sapiens
uccugagacugaggagcuuugg

SEQ ID NO: 78689 - RNA, 22 nt, Homo sapiens
ucccagucuagagccggauugg

SEQ ID NO: 78690 - RNA, 22 nt, Homo sapiens
uucucagugcuaucuuuuaugc

SEQ ID NO: 78691 - RNA, 22 nt, Homo sapiens
uucuauugguaauauuuucugu

SEQ ID NO: 78692 - RNA, 22 nt, Homo sapiens
gagacggagucuugcucuguug

SEQ ID NO: 78693 - RNA, 22 nt, Homo sapiens
gagacggagucucgcucugucg

SEQ ID NO: 78694 - RNA, 22 nt, Homo sapiens
gagacggagucucgcucuguca

SEQ ID NO: 78695 - RNA, 22 nt, Homo sapiens
cuucaaguuggaagggaccuaa

SEQ ID NO: 78696 - RNA, 22 nt, Homo sapiens
cacccagucaucuuggguuuuu

SEQ ID NO: 78697 - RNA, 22 nt, Homo sapiens
ggugagcacagaaugcccugag

SEQ ID NO: 78698 - RNA, 22 nt, Homo sapiens
aucuacuugcugggucucugga

SEQ ID NO: 78699 - RNA, 22 nt, Homo sapiens
uucugugguuucauuuaccugu

SEQ ID NO: 78700 - RNA, 22 nt, Homo sapiens
ugagacggagucucgcucuguc

SEQ ID NO: 78701 - RNA, 23 nt, Homo sapiens
uggccagaaacuucuuuucaucc

SEQ ID NO: 78702 - RNA, 22 nt, Homo sapiens
uauugcuggcucugucuucauu

SEQ ID NO: 78703 - RNA, 22 nt, Homo sapiens
guggcacgaugaucugggcuca

SEQ ID NO: 78704 - RNA, 22 nt, Homo sapiens
gugagcagagaucgcgugauug

SEQ ID NO: 78705 - RNA, 22 nt, Homo sapiens
gucucauugcaguuagaccugu

SEQ ID NO: 78706 - RNA, 22 nt, Homo sapiens
agcaccguucaaacccagguua

SEQ ID NO: 78707 - RNA, 22 nt, Homo sapiens
acccugucauccacauggugcu

SEQ ID NO: 78708 - RNA, 22 nt, Homo sapiens
ccugagacuugagggggcuucu

SEQ ID NO: 78709 - RNA, 21 nt, Homo sapiens
cucauauugcuuuuccauggu

SEQ ID NO: 78710 - RNA, 21 nt, Homo sapiens
uuggccuggaggccugaaugu

SEQ ID NO: 78711 - RNA, 22 nt, Homo sapiens
ugagacggagucuggcacuguc

SEQ ID NO: 78712 - RNA, 22 nt, Homo sapiens
ugagacggaguuucacucuugu

SEQ ID NO: 78713 - RNA, 22 nt, Homo sapiens
uaacccagugucugugaugggu

SEQ ID NO: 78714 - RNA, 19 nt, Homo sapiens
gcaucauuaguugcuuuuc

SEQ ID NO: 78715 - RNA, 22 nt, Homo sapiens
acccacuagaugccaguggcac

SEQ ID NO: 78716 - RNA, 22 nt, Japanese encephalitis virus
aagcucaugagcaaaccuuggg

SEQ ID NO: 78717 - RNA, 22 nt, Japanese encephalitis virus
acccuuuucagcugggccuucu

SEQ ID NO: 78718 - RNA, 22 nt, Homo sapiens
aaggagcuuaagugacuuguac

SEQ ID NO: 78719 - RNA, 22 nt, Homo sapiens
aaaugcaucauuaggugauuuu

SEQ ID NO: 78720 - RNA, 22 nt, Homo sapiens
aaaugcauaucaagauugcccu

SEQ ID NO: 78721 - RNA, 22 nt, Homo sapiens
aacagagcuggugacuccaggu

SEQ ID NO: 78722 - RNA, 22 nt, Homo sapiens
aacagucuccaguuguauccau

SEQ ID NO: 78723 - RNA, 22 nt, Homo sapiens
aagagugcucgugggacucagc

SEQ ID NO: 78724 - RNA, 20 nt, Homo sapiens
aaccccuauagagaaaccau

SEQ ID NO: 78725 - RNA, 22 nt, Homo sapiens
aguagcauuggggggcauccuc

SEQ ID NO: 78726 - RNA, 22 nt, Homo sapiens
auacaguaaugucuuaggcugu

SEQ ID NO: 78727 - RNA, 22 nt, Homo sapiens
auagaguuagaaagaaauguuu

SEQ ID NO: 78728 - RNA, 22 nt, Homo sapiens
auagcacuuauagauuuggucu

SEQ ID NO: 78729 - RNA, 21 nt, Homo sapiens
auagcacuucacuugguuaga

SEQ ID NO: 78730 - RNA, 20 nt, Homo sapiens
auagcagcaugauuuauaau

SEQ ID NO: 78731 - RNA, 22 nt, Homo sapiens
auagcagcucacuuauuuaugg

SEQ ID NO: 78732 - RNA, 20 nt, Homo sapiens
auagcagcaugauuuauagu

SEQ ID NO: 78733 - RNA, 22 nt, Homo sapiens
auggcuuuuccugucuugcaug

SEQ ID NO: 78734 - RNA, 22 nt, Homo sapiens
augucugguagccaccuggagg

SEQ ID NO: 78735 - RNA, 22 nt, Homo sapiens
augagcaucaccagaaucaaua

SEQ ID NO: 78736 - RNA, 22 nt, Homo sapiens
augcacaugcgaaaacuugugu

SEQ ID NO: 78737 - RNA, 22 nt, Homo sapiens
augcauauuuuaccuagaagag

SEQ ID NO: 78738 - RNA, 22 nt, Homo sapiens
augcagacacaaguuauaguaa

SEQ ID NO: 78739 - RNA, 22 nt, Homo sapiens
acaguagcgcaaucucggcuca

SEQ ID NO: 78740 - RNA, 22 nt, Homo sapiens
aauaaagcauggcuacuccaua

SEQ ID NO: 78741 - RNA, 21 nt, Homo sapiens
aauaaagcaaccuuaugccau

SEQ ID NO: 78742 - RNA, 22 nt, Homo sapiens
aauaaagcugaauccuuccuga

SEQ ID NO: 78743 - RNA, 22 nt, Homo sapiens
acugcacuuauccuccaauguu

SEQ ID NO: 78744 - RNA, 22 nt, Homo sapiens
acugcauaaauauguguaauau

SEQ ID NO: 78745 - RNA, 23 nt, Homo sapiens
acugagcaauguuuacauacuug

SEQ ID NO: 78746 - RNA, 22 nt, Homo sapiens
aaaugcugcuuuggccucuucu

SEQ ID NO: 78747 - RNA, 22 nt, Homo sapiens
aaaugguguuaguagaucuuua

SEQ ID NO: 78748 - RNA, 21 nt, Homo sapiens
agcagcuuugguugaagcaga

SEQ ID NO: 78749 - RNA, 22 nt, Homo sapiens
agcagcaauuuuguaugguuua

SEQ ID NO: 78750 - RNA, 22 nt, Homo sapiens
gucaguuucacucagcuggaac

SEQ ID NO: 78751 - RNA, 22 nt, Homo sapiens
ggcugguuuucaguuacugagu

SEQ ID NO: 78752 - RNA, 22 nt, Homo sapiens
guggcaaagaugccuucuccaa

SEQ ID NO: 78753 - RNA, 21 nt, Homo sapiens
gugcagacacacauauaggcu

SEQ ID NO: 78754 - RNA, 22 nt, Homo sapiens
gugagcaaacuuaccuaagguu

SEQ ID NO: 78755 - RNA, 22 nt, Homo sapiens
gugagcaauugauacuugaagu

SEQ ID NO: 78756 - RNA, 22 nt, Homo sapiens
uauuucaguugcguuucccgag

SEQ ID NO: 78757 - RNA, 22 nt, Homo sapiens
uaucagcagagucauacuucaa

SEQ ID NO: 78758 - RNA, 22 nt, Homo sapiens
uaugacuuuugaauacagaugg

SEQ ID NO: 78759 - RNA, 22 nt, Homo sapiens
uaggucacugcucugugucuaa

SEQ ID NO: 78760 - RNA, 22 nt, Homo sapiens
uagcaguauaugagagcuauug

SEQ ID NO: 78761 - RNA, 22 nt, Homo sapiens
uagcacuauuuauugaaaagga

SEQ ID NO: 78762 - RNA, 22 nt, Homo sapiens
uagcagcagugguguauuuaga

SEQ ID NO: 78763 - RNA, 22 nt, Homo sapiens
uagcagcaccccacucuacugg

SEQ ID NO: 78764 - RNA, 22 nt, Homo sapiens
uagcagcaaagcaggaucugcu

SEQ ID NO: 78765 - RNA, 20 nt, Homo sapiens
uagcagcagacagagggagg

SEQ ID NO: 78766 - RNA, 22 nt, Homo sapiens
uagcagcaucucuggcuucuac

SEQ ID NO: 78767 - RNA, 22 nt, Homo sapiens
uagcagcauuuuuguagaguau

SEQ ID NO: 78768 - RNA, 22 nt, Homo sapiens
uagcagcuuuauugagguaaau

SEQ ID NO: 78769 - RNA, 22 nt, Homo sapiens
uaguagcaccucucaugagcuu

SEQ ID NO: 78770 - RNA, 22 nt, Homo sapiens
uacagccacauaauguaugauu

SEQ ID NO: 78771 - RNA, 22 nt, Homo sapiens
uacagcacaggugcagguguug

SEQ ID NO: 78772 - RNA, 22 nt, Homo sapiens
uacaguaguaucuucauuuguu

SEQ ID NO: 78773 - RNA, 22 nt, Homo sapiens
uacaguaggauuuucagggucu

SEQ ID NO: 78774 - RNA, 22 nt, Homo sapiens
uacaguaauguuaaucuuugug

SEQ ID NO: 78775 - RNA, 22 nt, Homo sapiens
uacaguagagaucagcaaacua

SEQ ID NO: 78776 - RNA, 21 nt, Homo sapiens
uagagcuuggcacagaguaga

SEQ ID NO: 78777 - RNA, 22 nt, Homo sapiens
uacugcacauaugaagguuccc

SEQ ID NO: 78778 - RNA, 23 nt, Homo sapiens
uagaauguuuuuccauguuucuu

SEQ ID NO: 78779 - RNA, 22 nt, Homo sapiens
caccccuaccugagucaggagu

SEQ ID NO: 78780 - RNA, 22 nt, Homo sapiens
cagcuaaauuguuaaauccaag

SEQ ID NO: 78781 - RNA, 22 nt, Homo sapiens
caguggaugaacaagaagugau

SEQ ID NO: 78782 - RNA, 22 nt, Homo sapiens
cagugcaaagccucugcccaga

SEQ ID NO: 78783 - RNA, 22 nt, Homo sapiens
auugucacugugcuccaccagu

SEQ ID NO: 78784 - RNA, 22 nt, Homo sapiens
auugucacuuaaaagugcaugu

SEQ ID NO: 78785 - RNA, 22 nt, Homo sapiens
auuuagcaauggagguagugua

SEQ ID NO: 78786 - RNA, 22 nt, Homo sapiens
auuaaguugugccugaaaacuu

SEQ ID NO: 78787 - RNA, 22 nt, Homo sapiens
auuagguuguugcaaaaguaau

SEQ ID NO: 78788 - RNA, 22 nt, Homo sapiens
auuagguuggugcaaaaguaau

SEQ ID NO: 78789 - RNA, 22 nt, Homo sapiens
cucugguuucgcaggaaauaga

SEQ ID NO: 78790 - RNA, 22 nt, Homo sapiens
cucaguagaaaauacauggacu

SEQ ID NO: 78791 - RNA, 22 nt, Homo sapiens
cucagcuacuugggaagcugag

SEQ ID NO: 78792 - RNA, 22 nt, Homo sapiens
cccauuguuaaguugaguaucu

SEQ ID NO: 78793 - RNA, 23 nt, Homo sapiens
cccucagaagugcagggagagaa

SEQ ID NO: 78794 - RNA, 22 nt, Homo sapiens
ccccauuugaacuccuucaacu

SEQ ID NO: 78795 - RNA, 22 nt, Homo sapiens
cuuacagucuaucagccacaac

SEQ ID NO: 78796 - RNA, 22 nt, Homo sapiens
cuguugcaguuauggcugcagg

SEQ ID NO: 78797 - RNA, 22 nt, Homo sapiens
cuuccauauucuaggacaggcu

SEQ ID NO: 78798 - RNA, 22 nt, Homo sapiens
cuuccauaguauuuuuacaaaa

SEQ ID NO: 78799 - RNA, 22 nt, Homo sapiens
gaaucauuguuucuaaguuugu

SEQ ID NO: 78800 - RNA, 22 nt, Homo sapiens
cuuugcacaucucugcuuuccc

SEQ ID NO: 78801 - RNA, 22 nt, Homo sapiens
cuuugcaaauggccuuuccaag

SEQ ID NO: 78802 - RNA, 22 nt, Homo sapiens
gagauauucugguuuacuaaau

SEQ ID NO: 78803 - RNA, 22 nt, Homo sapiens
gagauauuuagaaauguguucu

SEQ ID NO: 78804 - RNA, 21 nt, Homo sapiens
uuaucccagugucucugcagg

SEQ ID NO: 78805 - RNA, 22 nt, Homo sapiens
uuacaguauugcaaggacuagg

SEQ ID NO: 78806 - RNA, 22 nt, Homo sapiens
uuacaguaugaguaagaguucu

SEQ ID NO: 78807 - RNA, 22 nt, Homo sapiens
uguggcagugcuuuaugaaacc

SEQ ID NO: 78808 - RNA, 22 nt, Homo sapiens
uggucuucuggccuccagaacc

SEQ ID NO: 78809 - RNA, 22 nt, Homo sapiens
uguagcaaauaaaagucuggau

SEQ ID NO: 78810 - RNA, 22 nt, Homo sapiens
uguuacagugacuaauguuuua

SEQ ID NO: 78811 - RNA, 22 nt, Homo sapiens
uuaaaaguauaggccuggcaua

SEQ ID NO: 78812 - RNA, 22 nt, Homo sapiens
uuugacaaugugugcuuguauu

SEQ ID NO: 78813 - RNA, 22 nt, Homo sapiens
uuucacagcaauugccuauugu

SEQ ID NO: 78814 - RNA, 22 nt, Homo sapiens
uugcaacuuagaaaaaucauuu

SEQ ID NO: 78815 - RNA, 22 nt, Homo sapiens
uccaugaguccauuagaaaaaa

SEQ ID NO: 78816 - RNA, 18 nt, Homo sapiens
uccaguuuucccagcauc

SEQ ID NO: 78817 - RNA, 22 nt, Homo sapiens
uccaguuauccuguggggagga

SEQ ID NO: 78818 - RNA, 22 nt, Homo sapiens
uccaguuuuguuaacauauggu

SEQ ID NO: 78819 - RNA, 22 nt, Homo sapiens
uccaguagaauuuuauucaaca

SEQ ID NO: 78820 - RNA, 22 nt, Homo sapiens
ucauucauucauccagcuugag

SEQ ID NO: 78821 - RNA, 22 nt, Homo sapiens
ucauacuguccaauucuagugg

SEQ ID NO: 78822 - RNA, 22 nt, Homo sapiens
ucaguagcauugcuuauacagu

SEQ ID NO: 78823 - RNA, 22 nt, Homo sapiens
ucagcagucacuccuaugacaa

SEQ ID NO: 78824 - RNA, 22 nt, Homo sapiens
aacagugcuucauucacacauu

SEQ ID NO: 78825 - RNA, 22 nt, Homo sapiens
ucuccaguuuccuucgucuauc

SEQ ID NO: 78826 - RNA, 22 nt, Homo sapiens
ucugggguuuccacuuuuacuu

SEQ ID NO: 78827 - RNA, 22 nt, Homo sapiens
uggacaugaagggcacaggagg

SEQ ID NO: 78828 - RNA, 19 nt, Homo sapiens
uggauuguuagagcagugu

SEQ ID NO: 78829 - RNA, 22 nt, Homo sapiens
uggcaagagaacaacaucucuc

SEQ ID NO: 78830 - RNA, 21 nt, Homo sapiens
uggcaaaaugggcaguggguu

SEQ ID NO: 78831 - RNA, 22 nt, Homo sapiens
ugggugaguaucuauuauucag

SEQ ID NO: 78832 - RNA, 22 nt, Homo sapiens
uggucaugaggugaggcuucuc

SEQ ID NO: 78833 - RNA, 22 nt, Homo sapiens
uggucaccuucuugcucugucu

SEQ ID NO: 78834 - RNA, 22 nt, Homo sapiens
ugauggcauuucauguuuguaa

SEQ ID NO: 78835 - RNA, 18 nt, Homo sapiens
ugcaaacauguguguguu

SEQ ID NO: 78836 - RNA, 17 nt, Homo sapiens
ugcaauuuaagcuagau

SEQ ID NO: 78837 - RNA, 22 nt, Homo sapiens
ugcaauuuaaugugucccaauu

SEQ ID NO: 78838 - RNA, 22 nt, Homo sapiens
gagugcaauggcaagaucuugg

SEQ ID NO: 78839 - RNA, 22 nt, Homo sapiens
gauauguucugagaaaugcauu

SEQ ID NO: 78840 - RNA, 19 nt, Homo sapiens
gacaugagauuuggugggg

SEQ ID NO: 78841 - RNA, 22 nt, Homo sapiens
cuacaguaugaaaccuuuacuc

SEQ ID NO: 78842 - RNA, 22 nt, Homo sapiens
cuacaguuauguuuuaaaugug

SEQ ID NO: 78843 - RNA, 22 nt, Homo sapiens
cugaguauaacugaccuuauga

SEQ ID NO: 78844 - RNA, 18 nt, Homo sapiens
cugagucauuccuggguc

SEQ ID NO: 78845 - RNA, 22 nt, Homo sapiens
cuguaauguaaugagacuacau

SEQ ID NO: 78846 - RNA, 22 nt, Homo sapiens
cuggauauguugcaacauuucc

SEQ ID NO: 78847 - RNA, 22 nt, Homo sapiens
cuguaaagaucacagagcuggu

SEQ ID NO: 78848 - RNA, 22 nt, Homo sapiens
cuguaaaguaagagguaaguua

SEQ ID NO: 78849 - RNA, 22 nt, Homo sapiens
cuuuggcauuagccuguauaga

SEQ ID NO: 78850 - RNA, 22 nt, Homo sapiens
cagcuguuguuaugucugcagg

SEQ ID NO: 78851 - RNA, 22 nt, Homo sapiens
cagguacuucugggcugagcag

SEQ ID NO: 78852 - RNA, 22 nt, Homo sapiens
caguagcaugccucagaaugag

SEQ ID NO: 78853 - RNA, 22 nt, Homo sapiens
cagugcaaccuccaucucucgg

SEQ ID NO: 78854 - RNA, 22 nt, Homo sapiens
caugaaagacugaggaauugga

SEQ ID NO: 78855 - RNA, 22 nt, Homo sapiens
ccccuguaaacuggcuucccug

SEQ ID NO: 78856 - RNA, 22 nt, Homo sapiens
ccaccuguacuuaagucacuuu

SEQ ID NO: 78857 - RNA, 23 nt, Homo sapiens
ccacacuguuuagaauggcauca

SEQ ID NO: 78858 - RNA, 22 nt, Homo sapiens
auggcauggugaagucuuugga

SEQ ID NO: 78859 - RNA, 22 nt, Homo sapiens
auggcauggugcaggguuuaag

SEQ ID NO: 78860 - RNA, 22 nt, Homo sapiens
auggcuuuaagagugucugaau

SEQ ID NO: 78861 - RNA, 22 nt, Homo sapiens
auuccauaguacagugaugagu

SEQ ID NO: 78862 - RNA, 22 nt, Homo sapiens
auuccauagugucuguggcaga

SEQ ID NO: 78863 - RNA, 22 nt, Homo sapiens
auucaucagggauauuggucug

SEQ ID NO: 78864 - RNA, 22 nt, Homo sapiens
caaaggcuucugaaacugcaga

SEQ ID NO: 78865 - RNA, 22 nt, Homo sapiens
caaaggcuuccacugcauccuu

SEQ ID NO: 78866 - RNA, 22 nt, Homo sapiens
caaaggcuguuauaggccagga

SEQ ID NO: 78867 - RNA, 22 nt, Homo sapiens
caacacagugaaacccgucucu

SEQ ID NO: 78868 - RNA, 22 nt, Homo sapiens
cacaguagaauagagcacuagg

SEQ ID NO: 78869 - RNA, 22 nt, Homo sapiens
auccaguuuuaggagauuucua

SEQ ID NO: 78870 - RNA, 22 nt, Homo sapiens
aucuacagccagucugguuugu

SEQ ID NO: 78871 - RNA, 22 nt, Homo sapiens
auccucaguggcuuaaguauag

SEQ ID NO: 78872 - RNA, 22 nt, Homo sapiens
aucugguguauuggugcugggu

SEQ ID NO: 78873 - RNA, 22 nt, Homo sapiens
aucuuuaguggcuguuuucaga

SEQ ID NO: 78874 - RNA, 22 nt, Homo sapiens
auggcaguuucagcuauaguuu

SEQ ID NO: 78875 - RNA, 22 nt, Homo sapiens
auaggacuauugugaggauuaa

SEQ ID NO: 78876 - RNA, 22 nt, Homo sapiens
auaggagcacgaacucuagugu

SEQ ID NO: 78877 - RNA, 22 nt, Homo sapiens
auagcagcagcuaguagugaua

SEQ ID NO: 78878 - RNA, 22 nt, Homo sapiens
auagcagcauauguaauguuga

SEQ ID NO: 78879 - RNA, 22 nt, Homo sapiens
auagcagcuugucagggcagac

SEQ ID NO: 78880 - RNA, 22 nt, Homo sapiens
auaaagccaugagcuugagaug

SEQ ID NO: 78881 - RNA, 22 nt, Homo sapiens
agugcaauggugccaucauagc

SEQ ID NO: 78882 - RNA, 22 nt, Homo sapiens
agcugguuuaauaugcugucug

SEQ ID NO: 78883 - RNA, 21 nt, Homo sapiens
agcugguuuccacagugugcu

SEQ ID NO: 78884 - RNA, 21 nt, Homo sapiens
aguagcacugugucuuacaaa

SEQ ID NO: 78885 - RNA, 22 nt, Homo sapiens
aguagcaauggcucugagcuau

SEQ ID NO: 78886 - RNA, 22 nt, Homo sapiens
aguagcacaugccacccugucu

SEQ ID NO: 78887 - RNA, 23 nt, Homo sapiens
acugcaauuacguuugcaccaac

SEQ ID NO: 78888 - RNA, 22 nt, Homo sapiens
acugcacuccaucuuagguggc

SEQ ID NO: 78889 - RNA, 22 nt, Homo sapiens
agaugccucauguucuagguuc

SEQ ID NO: 78890 - RNA, 20 nt, Homo sapiens
acaguauguuuggaugcaua

SEQ ID NO: 78891 - RNA, 22 nt, Homo sapiens
acaguaugcuuuaaacuuuguu

SEQ ID NO: 78892 - RNA, 22 nt, Homo sapiens
aaguugcuuuagguaagucaau

SEQ ID NO: 78893 - RNA, 22 nt, Homo sapiens
aauaaagcaggguccuugcacu

SEQ ID NO: 78894 - RNA, 22 nt, Homo sapiens
uuuguggaaugcucauguguag

SEQ ID NO: 78895 - RNA, 22 nt, Homo sapiens
uuuuaguggacaaagguauuua

SEQ ID NO: 78896 - RNA, 22 nt, Homo sapiens
ucuuuaguuaagggacauuuua

SEQ ID NO: 78897 - RNA, 19 nt, Homo sapiens
ucuuuagucacauuuuuau

SEQ ID NO: 78898 - RNA, 22 nt, Homo sapiens
ucugugcauggcagaggaauga

SEQ ID NO: 78899 - RNA, 23 nt, Homo sapiens
ucacaguuacuuuugcaucaacc

SEQ ID NO: 78900 - RNA, 20 nt, Homo sapiens
ucacugaguaucuacgauua

SEQ ID NO: 78901 - RNA, 22 nt, Homo sapiens
ucacugcacuagguaaugccac

SEQ ID NO: 78902 - RNA, 20 nt, Homo sapiens
ucacugugaacuucuugagg

SEQ ID NO: 78903 - RNA, 22 nt, Homo sapiens
uauuucaguugugcagguaguu

SEQ ID NO: 78904 - RNA, 19 nt, Homo sapiens
ucacacuguggcuucuuua

SEQ ID NO: 78905 - RNA, 22 nt, Homo sapiens
ucaguagcaugaaaacagacua

SEQ ID NO: 78906 - RNA, 22 nt, Homo sapiens
ucauucauuugcucacuccaca

SEQ ID NO: 78907 - RNA, 22 nt, Homo sapiens
ucauuagagacagggugucacu

SEQ ID NO: 78908 - RNA, 19 nt, Homo sapiens
uggcaaugucagcagagau

SEQ ID NO: 78909 - RNA, 22 nt, Homo sapiens
uggcaagagcugcauucaucug

SEQ ID NO: 78910 - RNA, 22 nt, Homo sapiens
ugcaaugugaaauaagcacauc

SEQ ID NO: 78911 - RNA, 22 nt, Homo sapiens
ugcucaccugcugcucaccucc

SEQ ID NO: 78912 - RNA, 23 nt, Homo sapiens
ugagucacuuugcuggggucucu

SEQ ID NO: 78913 - RNA, 19 nt, Homo sapiens
ugaguauauuguauucauu

SEQ ID NO: 78914 - RNA, 22 nt, Homo sapiens
uaccagcauuucucuuuaagua

SEQ ID NO: 78915 - RNA, 19 nt, Homo sapiens
uaccagcacaguguuugag

SEQ ID NO: 78916 - RNA, 22 nt, Homo sapiens
uaccucaguucaauaacagaua

SEQ ID NO: 78917 - RNA, 22 nt, Homo sapiens
uacaguagaaugucuuucaaaa

SEQ ID NO: 78918 - RNA, 21 nt, Homo sapiens
uaagcuaaacauucaguuaac

SEQ ID NO: 78919 - RNA, 22 nt, Homo sapiens
uaaagcuauuauaguuauguuu

SEQ ID NO: 78920 - RNA, 22 nt, Homo sapiens
uaacugcaaccuccgccucccg

SEQ ID NO: 78921 - RNA, 16 nt, Homo sapiens
uaaagcuaaucacuuu

SEQ ID NO: 78922 - RNA, 22 nt, Homo sapiens
uaaagcuacaguauaugguauu

SEQ ID NO: 78923 - RNA, 22 nt, Homo sapiens
uaucacaaacuuagcaguuuaa

SEQ ID NO: 78924 - RNA, 22 nt, Homo sapiens
uaucugcacauacacuuauagc

SEQ ID NO: 78925 - RNA, 20 nt, Homo sapiens
uaugacaaagccuagugagu

SEQ ID NO: 78926 - RNA, 22 nt, Homo sapiens
uauucaucuuaagcuuuggcuu

SEQ ID NO: 78927 - RNA, 22 nt, Homo sapiens
gucugguugacagcauguggcc

SEQ ID NO: 78928 - RNA, 22 nt, Homo sapiens
guggcaugaaagcaucugugau

SEQ ID NO: 78929 - RNA, 22 nt, Homo sapiens
guggcaugaaagcagauaccac

SEQ ID NO: 78930 - RNA, 21 nt, Homo sapiens
gugcaacucccucucccuaca

SEQ ID NO: 78931 - RNA, 19 nt, Homo sapiens
gcuuguccacgugagauaa

SEQ ID NO: 78932 - RNA, 19 nt, Homo sapiens
ggcaauacuuucuuguugg

SEQ ID NO: 78933 - RNA, 21 nt, Homo sapiens
ggaguauaaggcaaaggagug

SEQ ID NO: 78934 - RNA, 22 nt, Homo sapiens
ggugcagcacaccaacauggca

SEQ ID NO: 78935 - RNA, 19 nt, Homo sapiens
ggucagcaaagucuagcug

SEQ ID NO: 78936 - RNA, 19 nt, Homo sapiens
uugugggaggacagagggg

SEQ ID NO: 78937 - RNA, 22 nt, Homo sapiens
uuuaagguauguggugaaaauu

SEQ ID NO: 78938 - RNA, 22 nt, Homo sapiens
uuuagcaauggagggugacuuu

SEQ ID NO: 78939 - RNA, 22 nt, Homo sapiens
uugcaguacuucuggcuuuaca

SEQ ID NO: 78940 - RNA, 22 nt, Homo sapiens
uugcaguagucugaaagcaaua

SEQ ID NO: 78941 - RNA, 20 nt, Homo sapiens
uugacagagggaaaguugcu

SEQ ID NO: 78942 - RNA, 22 nt, Homo sapiens
uugacuuuuauucacucugcua

SEQ ID NO: 78943 - RNA, 20 nt, Homo sapiens
uucaucaggauauuggucua

SEQ ID NO: 78944 - RNA, 22 nt, Homo sapiens
uucaucagggguauuggccaau

SEQ ID NO: 78945 - RNA, 23 nt, Homo sapiens
uugaaaagucaguagccucugau

SEQ ID NO: 78946 - RNA, 22 nt, Homo sapiens
uugcagcaacauggaugaaacu

SEQ ID NO: 78947 - RNA, 22 nt, Homo sapiens
uugcagcauucugguuccuggu

SEQ ID NO: 78948 - RNA, 22 nt, Homo sapiens
uugcacuugcugaggagugauu

SEQ ID NO: 78949 - RNA, 22 nt, Homo sapiens
uugcacuucauguaggccaaag

SEQ ID NO: 78950 - RNA, 22 nt, Homo sapiens
ugucacugugaguuugacugcu

SEQ ID NO: 78951 - RNA, 22 nt, Homo sapiens
ugucacccuuuauccauuuccu

SEQ ID NO: 78952 - RNA, 22 nt, Homo sapiens
uguagcaaaucgauacuauugg

SEQ ID NO: 78953 - RNA, 18 nt, Homo sapiens
uuagagugcauuacuuug

SEQ ID NO: 78954 - RNA, 22 nt, Homo sapiens
uuagaguguagcaggaagaggc

SEQ ID NO: 78955 - RNA, 22 nt, Homo sapiens
uuagcagcacaaaagcagacua

SEQ ID NO: 78956 - RNA, 22 nt, Homo sapiens
uuagcagcaugagaauggacua

SEQ ID NO: 78957 - RNA, 22 nt, Homo sapiens
uuagcagcaugaaaauggacug

SEQ ID NO: 78958 - RNA, 20 nt, Homo sapiens
uuagcagcaugauuuauaau

SEQ ID NO: 78959 - RNA, 22 nt, Homo sapiens
uucacuggagcccaggaguugg

SEQ ID NO: 78960 - RNA, 22 nt, Homo sapiens
uuuuuuaguuagcugggcauga

SEQ ID NO: 78961 - RNA, 22 nt, Homo sapiens
uuuugcaguuacagagagugag

SEQ ID NO: 78962 - RNA, 22 nt, Homo sapiens
aaagcacugaauaaauuugcuu

SEQ ID NO: 78963 - RNA, 22 nt, Homo sapiens
aaacuugucuaauuauaagcau

SEQ ID NO: 78964 - RNA, 22 nt, Homo sapiens
aaaaggcuagcuaguaacagaa

SEQ ID NO: 78965 - RNA, 22 nt, Homo sapiens
aaaugcacaaagauuuugcacu

SEQ ID NO: 78966 - RNA, 19 nt, Homo sapiens
aaagguaguaaccucugau

SEQ ID NO: 78967 - RNA, 22 nt, Homo sapiens
aacuggcauaugaacuuguucu

SEQ ID NO: 78968 - RNA, 22 nt, Homo sapiens
aagcuacauuuuauuuauguca

SEQ ID NO: 78969 - RNA, 22 nt, Homo sapiens
aaguagcagaggcaagacuuga

SEQ ID NO: 78970 - RNA, 22 nt, Homo sapiens
aauaagcauaguaccugauagg

SEQ ID NO: 78971 - RNA, 22 nt, Homo sapiens
aagcugguguguauuauucacu

SEQ ID NO: 78972 - RNA, 22 nt, Homo sapiens
aaucagcacacugugcuuucca

SEQ ID NO: 78973 - RNA, 22 nt, Homo sapiens
acccuguaggacuauucuaauc

SEQ ID NO: 78974 - RNA, 22 nt, Homo sapiens
accccugugacggguauuugag

SEQ ID NO: 78975 - RNA, 22 nt, Homo sapiens
accccguagagucugcagcuac

SEQ ID NO: 78976 - RNA, 22 nt, Homo sapiens
aaugucaugaguccaaccagaa

SEQ ID NO: 78977 - RNA, 19 nt, Homo sapiens
acauggauuuugugcaaac

SEQ ID NO: 78978 - RNA, 22 nt, Homo sapiens
acauguauauaaugcauagcga

SEQ ID NO: 78979 - RNA, 20 nt, Homo sapiens
agaagcauugcucucuucag

SEQ ID NO: 78980 - RNA, 22 nt, Homo sapiens
agauguuguucaucugauuguu

SEQ ID NO: 78981 - RNA, 22 nt, Homo sapiens
agagcaauguuaucagucucug

SEQ ID NO: 78982 - RNA, 22 nt, Homo sapiens
agagucacaugaggcccuucau

SEQ ID NO: 78983 - RNA, 22 nt, Homo sapiens
agcuagcauucauaguuugagg

SEQ ID NO: 78984 - RNA, 22 nt, Homo sapiens
agccuucauucugacaguagga

SEQ ID NO: 78985 - RNA, 22 nt, Homo sapiens
agcuguuuuugugggcauguga

SEQ ID NO: 78986 - RNA, 22 nt, Homo sapiens
aguuagcaaaacucccaaaggu

SEQ ID NO: 78987 - RNA, 22 nt, Homo sapiens
auggcagcugguuuuacccuag

SEQ ID NO: 78988 - RNA, 22 nt, Homo sapiens
auggcagcaccccacucuacug

SEQ ID NO: 78989 - RNA, 22 nt, Homo sapiens
auuccacuuagugacucauuug

SEQ ID NO: 78990 - RNA, 23 nt, Homo sapiens
aucacuguuaacaauuucuuccu

SEQ ID NO: 78991 - RNA, 22 nt, Homo sapiens
auaaguauuuggacuuuacugu

SEQ ID NO: 78992 - RNA, 22 nt, Homo sapiens
auaagguuagcucugagaaagu

SEQ ID NO: 78993 - RNA, 22 nt, Homo sapiens
auaagaagugaaccagacgucu

SEQ ID NO: 78994 - RNA, 22 nt, Homo sapiens
auaguagcaugaaacagccauu

SEQ ID NO: 78995 - RNA, 22 nt, Homo sapiens
auaguagcaugcacuggugcug

SEQ ID NO: 78996 - RNA, 22 nt, Homo sapiens
gcaauguuacugaauguguuuu

SEQ ID NO: 78997 - RNA, 22 nt, Homo sapiens
gagugcaauggugcuaucucgg

SEQ ID NO: 78998 - RNA, 22 nt, Homo sapiens
gagugcaauggcaugaucuugg

SEQ ID NO: 78999 - RNA, 22 nt, Homo sapiens
gauggcaucugagaguguuaga

SEQ ID NO: 79000 - RNA, 22 nt, Homo sapiens
ggagcaaugccucauucucacu

SEQ ID NO: 79001 - RNA, 22 nt, Homo sapiens
gcugcacuuuaaggcauccccu

SEQ ID NO: 79002 - RNA, 22 nt, Homo sapiens
gaccccuagagauaggaggaac

SEQ ID NO: 79003 - RNA, 21 nt, Homo sapiens
gaccccuagaucuuuuuccag

SEQ ID NO: 79004 - RNA, 22 nt, Homo sapiens
gagugcaagguuuuucugagug

SEQ ID NO: 79005 - RNA, 22 nt, Homo sapiens
gaaaguaauuaacgauuguugc

SEQ ID NO: 79006 - RNA, 22 nt, Homo sapiens
gaaagcugguauagauacauua

SEQ ID NO: 79007 - RNA, 22 nt, Homo sapiens
cugcuauauugguucaggcuug

SEQ ID NO: 79008 - RNA, 22 nt, Homo sapiens
cugacuuuagaacccaaaaagu

SEQ ID NO: 79009 - RNA, 22 nt, Homo sapiens
cugcccuuucuauaugauguaa

SEQ ID NO: 79010 - RNA, 22 nt, Homo sapiens
cuacaguucuuaauuaaguagu

SEQ ID NO: 79011 - RNA, 22 nt, Homo sapiens
cuagaagcauauucagaacaga

SEQ ID NO: 79012 - RNA, 22 nt, Homo sapiens
cuaaaguagccaggacugcagg

SEQ ID NO: 79013 - RNA, 22 nt, Homo sapiens
cauugcauuuucuuuguaccuu

SEQ ID NO: 79014 - RNA, 22 nt, Homo sapiens
cagaaguauugguaugcucugu

SEQ ID NO: 79015 - RNA, 21 nt, Homo sapiens
uaaaggcuccaauuauacccc

SEQ ID NO: 79016 - RNA, 22 nt, Homo sapiens
uaaacugcuugaggguaaguac

SEQ ID NO: 79017 - RNA, 22 nt, Homo sapiens
guggacagagacuaaauguugu

SEQ ID NO: 79018 - RNA, 22 nt, Homo sapiens
guguggcaggugggggcucaga

SEQ ID NO: 79019 - RNA, 22 nt, Homo sapiens
gugguagaaauguagaugcuag

SEQ ID NO: 79020 - RNA, 22 nt, Homo sapiens
gucuuuaguugaaacauguggu

SEQ ID NO: 79021 - RNA, 22 nt, Homo sapiens
gucuuccagccuccaucuuucu

SEQ ID NO: 79022 - RNA, 22 nt, Homo sapiens
guagcagcuacuaaguugcugu

SEQ ID NO: 79023 - RNA, 22 nt, Homo sapiens
uagcaccugugcacaccaggca

SEQ ID NO: 79024 - RNA, 19 nt, Homo sapiens
uagcacuacagaguuuagc

SEQ ID NO: 79025 - RNA, 22 nt, Homo sapiens
uaccaccauuguaguuuggaaa

SEQ ID NO: 79026 - RNA, 22 nt, Homo sapiens
uaacugcaaccucugccugcug

SEQ ID NO: 79027 - RNA, 22 nt, Homo sapiens
uauugcagauacccaggaaguu

SEQ ID NO: 79028 - RNA, 19 nt, Homo sapiens
uauguaguuuucucaauau

SEQ ID NO: 79029 - RNA, 22 nt, Homo sapiens
ucacacugaaacuaggguguga

SEQ ID NO: 79030 - RNA, 19 nt, Homo sapiens
ucaccaguacacaauacaa

SEQ ID NO: 79031 - RNA, 21 nt, Homo sapiens
ugacagaaaauugaguuugcu

SEQ ID NO: 79032 - RNA, 22 nt, Homo sapiens
ugacaaguaaacagucagcacc

SEQ ID NO: 79033 - RNA, 22 nt, Homo sapiens
ugacuauaucucuguauaaacu

SEQ ID NO: 79034 - RNA, 22 nt, Homo sapiens
ucuaauguaaccugcaaauauu

SEQ ID NO: 79035 - RNA, 23 nt, Homo sapiens
ucgcagcauucaauaccaggcag

SEQ ID NO: 79036 - RNA, 22 nt, Homo sapiens
ucacugugagaguuuauccugu

SEQ ID NO: 79037 - RNA, 19 nt, Homo sapiens
ucccuguagaccacagugc

SEQ ID NO: 79038 - RNA, 22 nt, Homo sapiens
ucccuguagugccuagaucaga

SEQ ID NO: 79039 - RNA, 22 nt, Homo sapiens
ucuuuagguguuauaguucaag

SEQ ID NO: 79040 - RNA, 22 nt, Homo sapiens
ucuucaugcuugaaauaauagc

SEQ ID NO: 79041 - RNA, 22 nt, Homo sapiens
ugucagcacaacucagguuccu

SEQ ID NO: 79042 - RNA, 22 nt, Homo sapiens
uguaaaaagcccagccgcugag

SEQ ID NO: 79043 - RNA, 20 nt, Homo sapiens
uggcauguugguaugcaccc

SEQ ID NO: 79044 - RNA, 19 nt, Homo sapiens
ugcagcaauguaaaagaca

SEQ ID NO: 79045 - RNA, 22 nt, Homo sapiens
ugcugguuuucaucaucagugg

SEQ ID NO: 79046 - RNA, 22 nt, Homo sapiens
ugcuauagcuauaucaucuccu

SEQ ID NO: 79047 - RNA, 22 nt, Homo sapiens
uugaguuugaguauucuaaagc

SEQ ID NO: 79048 - RNA, 22 nt, Homo sapiens
uugugaagaugugaagcaagca

SEQ ID NO: 79049 - RNA, 22 nt, Homo sapiens
uugugaucauugucaaauagug

SEQ ID NO: 79050 - RNA, 22 nt, Homo sapiens
aagcuaggguuaauuuauuauu

SEQ ID NO: 79051 - RNA, 22 nt, Homo sapiens
uuaugguacaugugcacaaugu

SEQ ID NO: 79052 - RNA, 17 nt, Homo sapiens
uuagagguagacucauu

SEQ ID NO: 79053 - RNA, 22 nt, Homo sapiens
uuagagguaggauuucaccaug

SEQ ID NO: 79054 - RNA, 22 nt, Homo sapiens
uuagcagcucuaauaacugcua

SEQ ID NO: 79055 - RNA, 22 nt, Homo sapiens
uuagcagcucuggugacaaggu

SEQ ID NO: 79056 - RNA, 22 nt, Homo sapiens
uuagcagcaccccacucuacug

SEQ ID NO: 79057 - RNA, 22 nt, Homo sapiens
uuagcagcaucccuggccugua

SEQ ID NO: 79058 - RNA, 22 nt, Homo sapiens
uuagcagccuucaagcuccaag

SEQ ID NO: 79059 - RNA, 22 nt, Homo sapiens
ugugacaaauuuaguggacugu

SEQ ID NO: 79060 - RNA, 22 nt, Homo sapiens
uguucuggagccgguucaaaug

SEQ ID NO: 79061 - RNA, 22 nt, Homo sapiens
uugacuuuuaggaggaaaauga

SEQ ID NO: 79062 - RNA, 22 nt, Homo sapiens
uucagcaaugacagccuauaua

SEQ ID NO: 79063 - RNA, 22 nt, Homo sapiens
uucuacagugacugcagccaua

SEQ ID NO: 79064 - RNA, 22 nt, Homo sapiens
cucagcuacuugagaggcuuag

SEQ ID NO: 79065 - RNA, 22 nt, Homo sapiens
cucccagagccaguuauaggcu

SEQ ID NO: 79066 - RNA, 22 nt, Homo sapiens
cuccaguuucagaaucccaugu

SEQ ID NO: 79067 - RNA, 23 nt, Homo sapiens
cccaguuaauccuuaaucuccac

SEQ ID NO: 79068 - RNA, 22 nt, Homo sapiens
cuagcagcauaagaaucaccaa

SEQ ID NO: 79069 - RNA, 22 nt, Homo sapiens
cuagcagcaugagaauggacca

SEQ ID NO: 79070 - RNA, 22 nt, Homo sapiens
ccuucauucauuaauuuagccc

SEQ ID NO: 79071 - RNA, 22 nt, Homo sapiens
cagcuagcaugcguaacuuucu

SEQ ID NO: 79072 - RNA, 22 nt, Homo sapiens
cauugggugagaacaugcuccu

SEQ ID NO: 79073 - RNA, 22 nt, Homo sapiens
cauuguacauaaguauggagua

SEQ ID NO: 79074 - RNA, 22 nt, Homo sapiens
auuagguuagugcaaaaguaau

SEQ ID NO: 79075 - RNA, 22 nt, Homo sapiens
auugcccaggcuggagugcagu

SEQ ID NO: 79076 - RNA, 22 nt, Homo sapiens
cacugcauccuccauauccugg

SEQ ID NO: 79077 - RNA, 22 nt, Homo sapiens
cacuggguuagaacaugcuccu

SEQ ID NO: 79078 - RNA, 22 nt, Homo sapiens
cacugcauuacucaugagcaug

SEQ ID NO: 79079 - RNA, 22 nt, Homo sapiens
cacacugucuuucagaaugguu

SEQ ID NO: 79080 - RNA, 22 nt, Homo sapiens
caaguguuuccuuaaauacuug

SEQ ID NO: 79081 - RNA, 22 nt, Homo sapiens
cucuuuaguaagcaguugauga

SEQ ID NO: 79082 - RNA, 22 nt, Homo sapiens
cuuccauaguuacacccaggga

SEQ ID NO: 79083 - RNA, 22 nt, Homo sapiens
gacauguuuuuuaagguuuaug

SEQ ID NO: 79084 - RNA, 22 nt, Homo sapiens
gaagauucaaccaaaccagaac

SEQ ID NO: 79085 - RNA, 22 nt, Homo sapiens
gaagaacuaggugagaucuaga

SEQ ID NO: 79086 - RNA, 22 nt, Homo sapiens
cuugcacuugaaauuccaguuu

SEQ ID NO: 79087 - RNA, 22 nt, Homo sapiens
gaggaucucuugagcccagaag

SEQ ID NO: 79088 - RNA, 20 nt, Homo sapiens
gcaugagucuuuauaguaga

SEQ ID NO: 79089 - RNA, 22 nt, Homo sapiens
gcagcagugugggcugaaccua

SEQ ID NO: 79090 - RNA, 23 nt, Homo sapiens
gcagcaaugucacagggguccgg

SEQ ID NO: 79091 - RNA, 22 nt, Homo sapiens
gcagcacaugacuguauguaua

SEQ ID NO: 79092 - RNA, 17 nt, Homo sapiens
acaugagacuggauucu

SEQ ID NO: 79093 - RNA, 22 nt, Homo sapiens
acccuguaacauacaagugguu

SEQ ID NO: 79094 - RNA, 22 nt, Homo sapiens
acugcacuccagccugcuggau

SEQ ID NO: 79095 - RNA, 22 nt, Homo sapiens
acugcacuccagccugcugggu

SEQ ID NO: 79096 - RNA, 22 nt, Homo sapiens
acugcacuccagccugcuggca

SEQ ID NO: 79097 - RNA, 22 nt, Homo sapiens
acgcagcacauucacagcuaug

SEQ ID NO: 79098 - RNA, 22 nt, Homo sapiens
acagauagcacuaagggaucug

SEQ ID NO: 79099 - RNA, 20 nt, Homo sapiens
aaggcuuucgaguuccaggg

SEQ ID NO: 79100 - RNA, 22 nt, Homo sapiens
aagcugguguugcugcucuguu

SEQ ID NO: 79101 - RNA, 22 nt, Homo sapiens
agcagcaccaaacagacuaaga

SEQ ID NO: 79102 - RNA, 22 nt, Homo sapiens
agcccagagacuguguaaauuu

SEQ ID NO: 79103 - RNA, 22 nt, Homo sapiens
agcccauuuugcacugagaugc

SEQ ID NO: 79104 - RNA, 22 nt, Homo sapiens
agccucauucuacauguuaaug

SEQ ID NO: 79105 - RNA, 22 nt, Homo sapiens
agagcaaugacaugcuaugugg

SEQ ID NO: 79106 - RNA, 22 nt, Homo sapiens
agcugauggucuuguaugaugu

SEQ ID NO: 79107 - RNA, 22 nt, Homo sapiens
aggcuuuuguuuuggucucagg

SEQ ID NO: 79108 - RNA, 22 nt, Homo sapiens
auguaauugagguuuuugccau

SEQ ID NO: 79109 - RNA, 22 nt, Homo sapiens
augaguaugagaauacauuaag

SEQ ID NO: 79110 - RNA, 22 nt, Homo sapiens
augcauaugucuuuauaguggc

SEQ ID NO: 79111 - RNA, 22 nt, Homo sapiens
augagagcuaacuguggguaca

SEQ ID NO: 79112 - RNA, 22 nt, Homo sapiens
augacuuuucugaaaaccacca

SEQ ID NO: 79113 - RNA, 22 nt, Homo sapiens
auagcagcaccucacucuacug

SEQ ID NO: 79114 - RNA, 22 nt, Homo sapiens
auagcagcaccccacuaccuca

SEQ ID NO: 79115 - RNA, 22 nt, Homo sapiens
auagcacugguuuuucuugguu

SEQ ID NO: 79116 - RNA, 22 nt, Homo sapiens
aucacaggucaaaucauuauuu

SEQ ID NO: 79117 - RNA, 22 nt, Homo sapiens
aucaccagaugcuucaagcaga

SEQ ID NO: 79118 - RNA, 22 nt, Homo sapiens
aucagcagcaugaaaagcaacu

SEQ ID NO: 79119 - RNA, 22 nt, Homo sapiens
gucagcaaaguucuccugcaga

SEQ ID NO: 79120 - RNA, 22 nt, Homo sapiens
gucagcaaagaggaauaguuug

SEQ ID NO: 79121 - RNA, 22 nt, Homo sapiens
gugugacagcuauagacaugau

SEQ ID NO: 79122 - RNA, 22 nt, Homo sapiens
ggaagacuuagaguagcaucag

SEQ ID NO: 79123 - RNA, 22 nt, Homo sapiens
ggucacccugaugcuggugguc

SEQ ID NO: 79124 - RNA, 22 nt, Homo sapiens
guagaggaauggcuccaccaua

SEQ ID NO: 79125 - RNA, 22 nt, Homo sapiens
guagcagcaauuuacuccauac

SEQ ID NO: 79126 - RNA, 22 nt, Homo sapiens
guagcagccacacuugauaacu

SEQ ID NO: 79127 - RNA, 22 nt, Homo sapiens
uauugucaccaucccuguuuua

SEQ ID NO: 79128 - RNA, 21 nt, Homo sapiens
uaucacauuggugauuaaguu

SEQ ID NO: 79129 - RNA, 22 nt, Homo sapiens
uauagcacugcaauauuucccu

SEQ ID NO: 79130 - RNA, 22 nt, Homo sapiens
uauagcacaucuguguguacau

SEQ ID NO: 79131 - RNA, 22 nt, Homo sapiens
uauagcacugaaagaggugauu

SEQ ID NO: 79132 - RNA, 22 nt, Homo sapiens
uauagcacugagaauguaauuc

SEQ ID NO: 79133 - RNA, 22 nt, Homo sapiens
uaguagcauaccuaaguauacu

SEQ ID NO: 79134 - RNA, 22 nt, Homo sapiens
uagcaguaucccaccaucuggu

SEQ ID NO: 79135 - RNA, 22 nt, Homo sapiens
uagcagcauaaauggacuaaga

SEQ ID NO: 79136 - RNA, 22 nt, Homo sapiens
uagcagccaggaagggcuggcu

SEQ ID NO: 79137 - RNA, 19 nt, Homo sapiens
uagcagcaugauuuauaau

SEQ ID NO: 79138 - RNA, 22 nt, Homo sapiens
uaaugcuguggucugguuuaaa

SEQ ID NO: 79139 - RNA, 22 nt, Homo sapiens
uaaguaaaugaaagguugauuu

SEQ ID NO: 79140 - RNA, 22 nt, Homo sapiens
guugcacagucuuuccuggacu

SEQ ID NO: 79141 - RNA, 22 nt, Homo sapiens
uagagugcugucaaagacuugu

SEQ ID NO: 79142 - RNA, 22 nt, Homo sapiens
uacagcuaugugcaugcaugcu

SEQ ID NO: 79143 - RNA, 22 nt, Homo sapiens
ugggaagagggagcgauuuugg

SEQ ID NO: 79144 - RNA, 22 nt, Homo sapiens
ugggaagauucuguguuuuucc

SEQ ID NO: 79145 - RNA, 22 nt, Homo sapiens
uggcaugugugaagugcccagc

SEQ ID NO: 79146 - RNA, 22 nt, Homo sapiens
uggcaugucguuuuucauagga

SEQ ID NO: 79147 - RNA, 22 nt, Homo sapiens
ugggcaaaugcuuuuuagucaa

SEQ ID NO: 79148 - RNA, 22 nt, Homo sapiens
ugggguagaauagaauugauau

SEQ ID NO: 79149 - RNA, 22 nt, Homo sapiens
uggguaguuuuucagcucuugc

SEQ ID NO: 79150 - RNA, 19 nt, Homo sapiens
uggguaguuuucuggcugg

SEQ ID NO: 79151 - RNA, 19 nt, Homo sapiens
uggagucaucaugcugcua

SEQ ID NO: 79152 - RNA, 22 nt, Homo sapiens
uggauuguaacauagaguaaau

SEQ ID NO: 79153 - RNA, 22 nt, Homo sapiens
uggcaaaauauuuugguuucug

SEQ ID NO: 79154 - RNA, 22 nt, Homo sapiens
uggcaaaauggaauauguuggg

SEQ ID NO: 79155 - RNA, 22 nt, Homo sapiens
ugcauacacaagcauacaugua

SEQ ID NO: 79156 - RNA, 23 nt, Homo sapiens
ugcagcuacauguggccaugugc

SEQ ID NO: 79157 - RNA, 22 nt, Homo sapiens
ugcagcacuguucacaauagcc

SEQ ID NO: 79158 - RNA, 22 nt, Homo sapiens
ugcaguacuuugaaauauacug

SEQ ID NO: 79159 - RNA, 22 nt, Homo sapiens
ugcaccauugcauacuuaauua

SEQ ID NO: 79160 - RNA, 22 nt, Homo sapiens
ucuacagccaguucaggaagaa

SEQ ID NO: 79161 - RNA, 20 nt, Homo sapiens
ucuaccuguagguaauuggu

SEQ ID NO: 79162 - RNA, 21 nt, Homo sapiens
ucuguguugaucucacuggga

SEQ ID NO: 79163 - RNA, 22 nt, Homo sapiens
ugaacagagaaacacuggccau

SEQ ID NO: 79164 - RNA, 22 nt, Homo sapiens
ugacuugaucacccccuaaggg

SEQ ID NO: 79165 - RNA, 22 nt, Homo sapiens
ugacuauugauuuagacgugcu

SEQ ID NO: 79166 - RNA, 22 nt, Homo sapiens
uccucaguggauuggauggugc

SEQ ID NO: 79167 - RNA, 22 nt, Homo sapiens
ucaccaguacuccaaauugagg

SEQ ID NO: 79168 - RNA, 20 nt, Homo sapiens
ucaguauauuguuuccacag

SEQ ID NO: 79169 - RNA, 22 nt, Homo sapiens
ucagcaguggacagaaugguag

SEQ ID NO: 79170 - RNA, 22 nt, Homo sapiens
ucagcaaugcugcacucuacug

SEQ ID NO: 79171 - RNA, 22 nt, Homo sapiens
uugagguguauuguacagcaca

SEQ ID NO: 79172 - RNA, 22 nt, Homo sapiens
uuggcaaauagguuuuauugca

SEQ ID NO: 79173 - RNA, 22 nt, Homo sapiens
uugugaauggugcugcaguaaa

SEQ ID NO: 79174 - RNA, 22 nt, Homo sapiens
uugugaagaaaccagaaaaguu

SEQ ID NO: 79175 - RNA, 22 nt, Homo sapiens
uuuggcauauuuuaagcugguu

SEQ ID NO: 79176 - RNA, 22 nt, Homo sapiens
uuuggcauuuuacuacucaaau

SEQ ID NO: 79177 - RNA, 22 nt, Homo sapiens
uucgucaugagacagaugcuga

SEQ ID NO: 79178 - RNA, 22 nt, Homo sapiens
uucucagcccccugacagucag

SEQ ID NO: 79179 - RNA, 22 nt, Homo sapiens
uuauacuacuauaaagagguag

SEQ ID NO: 79180 - RNA, 22 nt, Homo sapiens
uguuacaguguaggccuugggu

SEQ ID NO: 79181 - RNA, 22 nt, Homo sapiens
uguuacagcagcacaaaaugga

SEQ ID NO: 79182 - RNA, 22 nt, Homo sapiens
uuuguucaccucaaggauggga

SEQ ID NO: 79183 - RNA, 22 nt, Homo sapiens
uugugcaugaugcauacauggu

SEQ ID NO: 79184 - RNA, 19 nt, Homo sapiens
uccccgggucuagugcagc

SEQ ID NO: 79185 - RNA, 22 nt, Homo sapiens
ugacauguagagaacuucucau

SEQ ID NO: 79186 - RNA, 22 nt, Homo sapiens
ugaacagcaccuccuagaguug

SEQ ID NO: 79187 - RNA, 22 nt, Homo sapiens
ugaugugucaucugagagagug

SEQ ID NO: 79188 - RNA, 22 nt, Homo sapiens
agguuguguuugugauuagaua

SEQ ID NO: 79189 - RNA, 22 nt, Homo sapiens
agcugcacgugguaaauguaaa

SEQ ID NO: 79190 - RNA, 20 nt, Homo sapiens
acaaaugcauucugugacau

SEQ ID NO: 79191 - RNA, 22 nt, Homo sapiens
acccugucauccacauggugcu

SEQ ID NO: 79192 - RNA, 22 nt, Homo sapiens
gaagauaucuaguaccauuguc

SEQ ID NO: 79193 - RNA, 17 nt, Homo sapiens
ugcaccauuugauuuuu

SEQ ID NO: 79194 - RNA, 22 nt, Homo sapiens
ugcaaguaauuccagcuacuga

SEQ ID NO: 79195 - RNA, 22 nt, Homo sapiens
ugcaaguaauuggcgaggaguu

SEQ ID NO: 79196 - RNA, 22 nt, Homo sapiens
ugcaaauguuauuuugguuucu

SEQ ID NO: 79197 - RNA, 22 nt, Homo sapiens
ugucaucauuugagagaagaaa

SEQ ID NO: 79198 - RNA, 19 nt, Homo sapiens
ugucaaaugucuccugggg

SEQ ID NO: 79199 - RNA, 22 nt, Homo sapiens
ucaaacauccccaccagggacu

SEQ ID NO: 79200 - RNA, 17 nt, Homo sapiens
gucuuugguugaguuua

SEQ ID NO: 79201 - RNA, 22 nt, Homo sapiens
caagugcuugaugaaugaucaa

SEQ ID NO: 79202 - RNA, 18 nt, Homo sapiens
augaacucaucaguucuu

SEQ ID NO: 79203 - RNA, 17 nt, Homo sapiens
augaacucaucguucuu

SEQ ID NO: 79204 - RNA, 22 nt, Homo sapiens
agugguguugccuguugaccua

SEQ ID NO: 79205 - RNA, 22 nt, Homo sapiens
agugauguggaguuuggaugga

SEQ ID NO: 79206 - RNA, 22 nt, Homo sapiens
agcuugugauuuagagugagag

SEQ ID NO: 79207 - RNA, 22 nt, Homo sapiens
acaucccaugccuggguacucc

SEQ ID NO: 79208 - RNA, 21 nt, Homo sapiens
acccccacaccuccuuaguuc

SEQ ID NO: 79209 - RNA, 19 nt, Homo sapiens
aauaaugccagaugucugu

SEQ ID NO: 79210 - RNA, 22 nt, Homo sapiens
aagcugcauuuucuagaugcuu

SEQ ID NO: 79211 - RNA, 20 nt, Homo sapiens
aagagcucaccagaauaucu

SEQ ID NO: 79212 - RNA, 22 nt, Homo sapiens
uugaaagcuaucucaaaucgcu

SEQ ID NO: 79213 - RNA, 22 nt, Homo sapiens
uuguaaaguucucucccgaaaa

SEQ ID NO: 79214 - RNA, 22 nt, Homo sapiens
gugaaagcaucugacugugcca

SEQ ID NO: 79215 - RNA, 22 nt, Homo sapiens
uaacugcaaccucugccugcug

SEQ ID NO: 79216 - RNA, 22 nt, Homo sapiens
uagaaagcaugaccuucagaua

SEQ ID NO: 79217 - RNA, 22 nt, Homo sapiens
ugauauguagguggcaagcaua

SEQ ID NO: 79218 - RNA, 22 nt, Homo sapiens
ugagacugaguuuugcucguug

SEQ ID NO: 79219 - RNA, 23 nt, Homo sapiens
ugcuccccucauggaugaauaaa

SEQ ID NO: 79220 - RNA, 22 nt, Homo sapiens
ugcaagcacacccagggauugu

SEQ ID NO: 79221 - RNA, 22 nt, Homo sapiens
ugauuugucugcaggaauagug

SEQ ID NO: 79222 - RNA, 22 nt, Homo sapiens
ugauuugucucucagcccuacu

SEQ ID NO: 79223 - RNA, 22 nt, Homo sapiens
ugauuuguccauguggcacgug

SEQ ID NO: 79224 - RNA, 22 nt, Homo sapiens
ugauuuguuuagugccaaguuu

SEQ ID NO: 79225 - RNA, 22 nt, Homo sapiens
ucauccauacaguuagcaaagg

SEQ ID NO: 79226 - RNA, 22 nt, Homo sapiens
ucacacugaaacuaggguguga

SEQ ID NO: 79227 - RNA, 22 nt, Homo sapiens
agcaagauuguucccauuuucu

SEQ ID NO: 79228 - RNA, 22 nt, Homo sapiens
aucagagugaaacaugggagau

SEQ ID NO: 79229 - RNA, 22 nt, Homo sapiens
caccacuacaccccaggcuggg

SEQ ID NO: 79230 - RNA, 22 nt, Homo sapiens
cugucaucauuucuaugugcca

SEQ ID NO: 79231 - RNA, 22 nt, Homo sapiens
cuagaacuagaacugcuggggu

SEQ ID NO: 79232 - RNA, 22 nt, Homo sapiens
ugcaccaucuugcuucuguggu

SEQ ID NO: 79233 - RNA, 22 nt, Homo sapiens
ugauauguggauucagcucaaa

SEQ ID NO: 79234 - RNA, 20 nt, Homo sapiens
ucagcagucuggagcagagg

SEQ ID NO: 79235 - RNA, 22 nt, Homo sapiens
uugguucaguuuaacgaguaau

SEQ ID NO: 79236 - RNA, 22 nt, Homo sapiens
cacugcaauuacuuuugcacca

SEQ ID NO: 79237 - RNA, 22 nt, Homo sapiens
uacauccauccugcugggcagu

SEQ ID NO: 79238 - RNA, 22 nt, Homo sapiens
uaauugaaugcagacaccaggg

SEQ ID NO: 79239 - RNA, 22 nt, Homo sapiens
agcugcacaaauggaugugagg

SEQ ID NO: 79240 - RNA, 23 nt, Homo sapiens
aaaugcucucaggugccaguaga

SEQ ID NO: 79241 - RNA, 22 nt, Homo sapiens
aggaagcuagcauuuguucagu

SEQ ID NO: 79242 - RNA, 22 nt, Homo sapiens
aucagagugaauaaugacaaaa

SEQ ID NO: 79243 - RNA, 22 nt, Homo sapiens
aucagagugaauaaugacaaaa

SEQ ID NO: 79244 - RNA, 22 nt, Homo sapiens
aucagaguggguuuuaaaagug

SEQ ID NO: 79245 - RNA, 22 nt, Homo sapiens
aucaaguaguuauacguaaagg

SEQ ID NO: 79246 - RNA, 22 nt, Homo sapiens
aucaaaguaggcauauguuuuu

SEQ ID NO: 79247 - RNA, 22 nt, Homo sapiens
auauaugcacacgugugcauau

SEQ ID NO: 79248 - RNA, 22 nt, Homo sapiens
aucuaaucaucgcaaccuucaa

SEQ ID NO: 79249 - RNA, 22 nt, Homo sapiens
augcaauggaaaggacaauuac

SEQ ID NO: 79250 - RNA, 22 nt, Homo sapiens
augaguaugagaauacauuaag

SEQ ID NO: 79251 - RNA, 22 nt, Homo sapiens
augugcuuuuggugagagauuu

SEQ ID NO: 79252 - RNA, 22 nt, Homo sapiens
auguaguagauauuuauggaaa

SEQ ID NO: 79253 - RNA, 22 nt, Homo sapiens
auggaaggagaggaaugaauga

SEQ ID NO: 79254 - RNA, 22 nt, Homo sapiens
auggauaugcuuccaacugccu

SEQ ID NO: 79255 - RNA, 22 nt, Homo sapiens
agguauauuggacagauguaaa

SEQ ID NO: 79256 - RNA, 22 nt, Homo sapiens
aaguugcuuuagguaagucaau

SEQ ID NO: 79257 - RNA, 22 nt, Homo sapiens
acaagugaauacaggauucucu

SEQ ID NO: 79258 - RNA, 22 nt, Homo sapiens
acacauuagcaagugcuguuau

SEQ ID NO: 79259 - RNA, 22 nt, Homo sapiens
aaccuauaguauugaaaucaag

SEQ ID NO: 79260 - RNA, 22 nt, Homo sapiens
aaaugcauugagggaaaaggca

SEQ ID NO: 79261 - RNA, 22 nt, Homo sapiens
aaggaguaucuguuuucucacc

SEQ ID NO: 79262 - RNA, 22 nt, Homo sapiens
aaagucacuggagaaggaauau

SEQ ID NO: 79263 - RNA, 20 nt, Homo sapiens
aaaguaggcuaauaccaaaa

SEQ ID NO: 79264 - RNA, 22 nt, Homo sapiens
uaauugaaugcagacaccaggg

SEQ ID NO: 79265 - RNA, 22 nt, Homo sapiens
uaauucacauaaagcacuuaga

SEQ ID NO: 79266 - RNA, 22 nt, Homo sapiens
uacaaaucuagguuuguuacug

SEQ ID NO: 79267 - RNA, 22 nt, Homo sapiens
uaaguuguugacauuaggggaa

SEQ ID NO: 79268 - RNA, 20 nt, Homo sapiens
uaaguuguauuugucaugaa

SEQ ID NO: 79269 - RNA, 22 nt, Homo sapiens
uacaguagagaucagcaaacua

SEQ ID NO: 79270 - RNA, 22 nt, Homo sapiens
uacaaguaauaagggaagaauu

SEQ ID NO: 79271 - RNA, 22 nt, Homo sapiens
uaguagcauaccuaaguauacu

SEQ ID NO: 79272 - RNA, 19 nt, Homo sapiens
uaugcaacuuauagugcug

SEQ ID NO: 79273 - RNA, 22 nt, Homo sapiens
uauugguuacuguugaucgcca

SEQ ID NO: 79274 - RNA, 22 nt, Homo sapiens
uauuaguuguaugauucccaag

SEQ ID NO: 79275 - RNA, 22 nt, Homo sapiens
gugauuuaguagaugcuaguua

SEQ ID NO: 79276 - RNA, 22 nt, Homo sapiens
guguauauccuauuaguucugu

SEQ ID NO: 79277 - RNA, 22 nt, Homo sapiens
guuaugcagcaauugauaaucu

SEQ ID NO: 79278 - RNA, 22 nt, Homo sapiens
gguauuauuugccuuuuacuga

SEQ ID NO: 79279 - RNA, 19 nt, Homo sapiens
ggcucagucaacugacugu

SEQ ID NO: 79280 - RNA, 22 nt, Homo sapiens
guaugugacuggaacaguagga

SEQ ID NO: 79281 - RNA, 21 nt, Homo sapiens
ggugagaaaggagacauagac

SEQ ID NO: 79282 - RNA, 22 nt, Homo sapiens
auuauauguguaugugcauacc

SEQ ID NO: 79283 - RNA, 22 nt, Homo sapiens
auuguguagucuuacugcuugc

SEQ ID NO: 79284 - RNA, 22 nt, Homo sapiens
cucaguagaaaauacauggacu

SEQ ID NO: 79285 - RNA, 22 nt, Homo sapiens
cuaugcuucuuaaauuaguuau

SEQ ID NO: 79286 - RNA, 22 nt, Homo sapiens
gaacuguaaagaaauucuaagg

SEQ ID NO: 79287 - RNA, 22 nt, Homo sapiens
uuugguuauuugaaacuagcau

SEQ ID NO: 79288 - RNA, 22 nt, Homo sapiens
uugauuagauccaguugauuga

SEQ ID NO: 79289 - RNA, 22 nt, Homo sapiens
uugauuagugacuggcuacacg

SEQ ID NO: 79290 - RNA, 22 nt, Homo sapiens
uugaauagugacuuugauucug

SEQ ID NO: 79291 - RNA, 22 nt, Homo sapiens
uugcagcaaauaggaaugagga

SEQ ID NO: 79292 - RNA, 22 nt, Homo sapiens
uugcaucagcaggcauaauugg

SEQ ID NO: 79293 - RNA, 22 nt, Homo sapiens
uugcuuagucaugaaucacuga

SEQ ID NO: 79294 - RNA, 20 nt, Homo sapiens
uuaaaucuagugcagacuca

SEQ ID NO: 79295 - RNA, 22 nt, Homo sapiens
uguuagguuggugcaaaaguga

SEQ ID NO: 79296 - RNA, 22 nt, Homo sapiens
uguuauguauggagugauccca

SEQ ID NO: 79297 - RNA, 22 nt, Homo sapiens
uguagcaaaucgauacuauugg

SEQ ID NO: 79298 - RNA, 22 nt, Homo sapiens
uguggcagugcuuuaugaaacc

SEQ ID NO: 79299 - RNA, 22 nt, Homo sapiens
uucaguagucuccauagaaccg

SEQ ID NO: 79300 - RNA, 22 nt, Homo sapiens
uucaaaggauagauuaagauca

SEQ ID NO: 79301 - RNA, 22 nt, Homo sapiens
uucuauugguaauauuuucugu

SEQ ID NO: 79302 - RNA, 22 nt, Homo sapiens
ucaguagcauugcuuauacagu

SEQ ID NO: 79303 - RNA, 18 nt, Homo sapiens
ugacaucauuuagaaagg

SEQ ID NO: 79304 - RNA, 21 nt, Homo sapiens
ugaauauuuggguugugucca

SEQ ID NO: 79305 - RNA, 22 nt, Homo sapiens
ugaaucauuucuugucuucagu

SEQ ID NO: 79306 - RNA, 22 nt, Homo sapiens
ugaauuguuucauucuuuacau

SEQ ID NO: 79307 - RNA, 22 nt, Homo sapiens
ugcacacucuguaugagaaucu

SEQ ID NO: 79308 - RNA, 22 nt, Homo sapiens
ugagauuaucuugaucuugaaa

SEQ ID NO: 79309 - RNA, 22 nt, Homo sapiens
ugagauuaaucuuuaaguaaga

SEQ ID NO: 79310 - RNA, 23 nt, Homo sapiens
ugagauuauaaucuuuuacuucu

SEQ ID NO: 79311 - RNA, 18 nt, Homo sapiens
ugauaucaucacaauuga

SEQ ID NO: 79312 - RNA, 18 nt, Homo sapiens
ugauaucaaugauagcca

SEQ ID NO: 79313 - RNA, 22 nt, Homo sapiens
ugguauguauacuagcgacacu

SEQ ID NO: 79314 - RNA, 23 nt, Homo sapiens
uggguucauucuugaagucagug

SEQ ID NO: 79315 - RNA, 20 nt, Homo sapiens
cuggaucaucaguaaaguua

SEQ ID NO: 79316 - RNA, 22 nt, Homo sapiens
cuucaaguguggccaccugacc

SEQ ID NO: 79317 - RNA, 22 nt, Homo sapiens
cuucaaguaauucugauggcua

SEQ ID NO: 79318 - RNA, 22 nt, Homo sapiens
cuuagcaaugucguguacucac

SEQ ID NO: 79319 - RNA, 22 nt, Homo sapiens
cuuaaugcuacggcucuguguu

SEQ ID NO: 79320 - RNA, 22 nt, Homo sapiens
gagaugcaccuugucacguuuc

SEQ ID NO: 79321 - RNA, 22 nt, Homo sapiens
gauauguucugagaaaugcauu

SEQ ID NO: 79322 - RNA, 22 nt, Homo sapiens
gauauguugaguagaguuuuug

SEQ ID NO: 79323 - RNA, 22 nt, Homo sapiens
gaguauuuuacaucguguaauu

SEQ ID NO: 79324 - RNA, 22 nt, Homo sapiens
gaguaaaugucaaguacuuagg

SEQ ID NO: 79325 - RNA, 22 nt, Homo sapiens
gaguaaauguccuagcuucuug

SEQ ID NO: 79326 - RNA, 22 nt, Homo sapiens
gagcaaugagcugccugcugag

SEQ ID NO: 79327 - RNA, 22 nt, Homo sapiens
gauuccacuuacuuagcauucc

SEQ ID NO: 79328 - RNA, 22 nt, Homo sapiens
gcaagaaucugggaguaaaauu

SEQ ID NO: 79329 - RNA, 22 nt, Homo sapiens
auugaacuguuggagagguuuu

SEQ ID NO: 79330 - RNA, 22 nt, Homo sapiens
auguuuagagagggugucaaau

SEQ ID NO: 79331 - RNA, 22 nt, Homo sapiens
augcaauucuagauugauagua

SEQ ID NO: 79332 - RNA, 22 nt, Homo sapiens
augauuguucucacucaagaga

SEQ ID NO: 79333 - RNA, 22 nt, Homo sapiens
augaucacugugccuccuguga

SEQ ID NO: 79334 - RNA, 22 nt, Homo sapiens
aguagcauuggggggcauccuc

SEQ ID NO: 79335 - RNA, 22 nt, Homo sapiens
agcaucacaugggcugcuuggg

SEQ ID NO: 79336 - RNA, 22 nt, Homo sapiens
agauggucuucauaaguuuuaa

SEQ ID NO: 79337 - RNA, 22 nt, Homo sapiens
aaguaaacauugagagacaaga

SEQ ID NO: 79338 - RNA, 23 nt, Homo sapiens
aauaucacaguggguguacaccc

SEQ ID NO: 79339 - RNA, 22 nt, Homo sapiens
aauagugcugcaaaaacauacg

SEQ ID NO: 79340 - RNA, 22 nt, Homo sapiens
aaucaccaugcacuacagccuu

SEQ ID NO: 79341 - RNA, 22 nt, Homo sapiens
uauuguuaaagauguuaaugau

SEQ ID NO: 79342 - RNA, 22 nt, Homo sapiens
uauuugauugacuuuagcagga

SEQ ID NO: 79343 - RNA, 22 nt, Homo sapiens
uauuugauuaacaagagccuaa

SEQ ID NO: 79344 - RNA, 22 nt, Homo sapiens
ugaauguuugcuuacuuccaua

SEQ ID NO: 79345 - RNA, 22 nt, Homo sapiens
ugaauauguuaauuagcaucau

SEQ ID NO: 79346 - RNA, 22 nt, Homo sapiens
ugcaaucauuuggaggagaaga

SEQ ID NO: 79347 - RNA, 22 nt, Homo sapiens
ugcuuagucuugcuuuagcuau

SEQ ID NO: 79348 - RNA, 20 nt, Homo sapiens
ugacaagugagaauuauggg

SEQ ID NO: 79349 - RNA, 22 nt, Homo sapiens
ugauuagagcccaagcuuugaa

SEQ ID NO: 79350 - RNA, 22 nt, Homo sapiens
ugaguuaaucucuacgauagaa

SEQ ID NO: 79351 - RNA, 19 nt, Homo sapiens
ugaguauauuguauucauu

SEQ ID NO: 79352 - RNA, 22 nt, Homo sapiens
ugagauuauauuucuuaacaga

SEQ ID NO: 79353 - RNA, 22 nt, Homo sapiens
uaauacucuucucauuuuacag

SEQ ID NO: 79354 - RNA, 22 nt, Homo sapiens
uaaguuagugugagaauuuugc

SEQ ID NO: 79355 - RNA, 22 nt, Homo sapiens
uaacuaguggaauuugauuuca

SEQ ID NO: 79356 - RNA, 22 nt, Homo sapiens
uaaagcuuagauccaugguggc

SEQ ID NO: 79357 - RNA, 21 nt, Homo sapiens
uaaagcuuagcuauaguggcu

SEQ ID NO: 79358 - RNA, 23 nt, Homo sapiens
uaagacacuaacuuuaugcuuug

SEQ ID NO: 79359 - RNA, 22 nt, Homo sapiens
uaagacuuuuugggaauauaga

SEQ ID NO: 79360 - RNA, 22 nt, Homo sapiens
uaagagcuaggauuuuaaauca

SEQ ID NO: 79361 - RNA, 19 nt, Homo sapiens
uaagaugaagcugucuggg

SEQ ID NO: 79362 - RNA, 22 nt, Homo sapiens
uaaagcuaucacauuggugauu

SEQ ID NO: 79363 - RNA, 17 nt, Homo sapiens
uaaagccagucaaguca

SEQ ID NO: 79364 - RNA, 22 nt, Homo sapiens
uaaaccuagcauuuugcauaug

SEQ ID NO: 79365 - RNA, 22 nt, Homo sapiens
uauugauuaauugugauuaggc

SEQ ID NO: 79366 - RNA, 22 nt, Homo sapiens
uaucaaguguuagggagaugug

SEQ ID NO: 79367 - RNA, 22 nt, Homo sapiens
uaucaagaugacaaacuuugcu

SEQ ID NO: 79368 - RNA, 22 nt, Homo sapiens
uaggugaaugcuggaagaaaug

SEQ ID NO: 79369 - RNA, 22 nt, Homo sapiens
gcuuguguucaaggaacaccua

SEQ ID NO: 79370 - RNA, 22 nt, Homo sapiens
gcuuguguuuacuguaguuacu

SEQ ID NO: 79371 - RNA, 22 nt, Homo sapiens
gcaagugucugagguuuuguau

SEQ ID NO: 79372 - RNA, 22 nt, Homo sapiens
uugguaguuucugucuuuagau

SEQ ID NO: 79373 - RNA, 22 nt, Homo sapiens
uugugguaggcauguaagauga

SEQ ID NO: 79374 - RNA, 22 nt, Homo sapiens
uuuauggagagauauuuauggu

SEQ ID NO: 79375 - RNA, 22 nt, Homo sapiens
uugaaagucuaggcuuacagua

SEQ ID NO: 79376 - RNA, 22 nt, Homo sapiens
uucaucaggaauauugaccugu

SEQ ID NO: 79377 - RNA, 22 nt, Homo sapiens
uugaaauguuuagaaguuugga

SEQ ID NO: 79378 - RNA, 22 nt, Homo sapiens
uugaauguacuuguucucacua

SEQ ID NO: 79379 - RNA, 22 nt, Homo sapiens
uugcaagaaaugcagauucuca

SEQ ID NO: 79380 - RNA, 22 nt, Homo sapiens
uugagauggagucucacugugu

SEQ ID NO: 79381 - RNA, 22 nt, Homo sapiens
uugagauggagucucguucugu

SEQ ID NO: 79382 - RNA, 22 nt, Homo sapiens
uuauuagguuaaccuauagcua

SEQ ID NO: 79383 - RNA, 22 nt, Homo sapiens
uuagcccagugggugcuucucu

SEQ ID NO: 79384 - RNA, 22 nt, Homo sapiens
uuauauguuacucccucuagca

SEQ ID NO: 79385 - RNA, 22 nt, Homo sapiens
uuauagcacuaagaagguaaua

SEQ ID NO: 79386 - RNA, 22 nt, Homo sapiens
uuaaugaacuuuauuuuguaga

SEQ ID NO: 79387 - RNA, 22 nt, Homo sapiens
uuaauagugacucauuuuccac

SEQ ID NO: 79388 - RNA, 22 nt, Homo sapiens
uuaaguagaugaaugugaaugu

SEQ ID NO: 79389 - RNA, 22 nt, Homo sapiens
uuacauugcuucaaauucagug

SEQ ID NO: 79390 - RNA, 22 nt, Homo sapiens
ugugguuuuaguaaaacuaugu

SEQ ID NO: 79391 - RNA, 22 nt, Homo sapiens
ugucaauauguaauaacugaau

SEQ ID NO: 79392 - RNA, 22 nt, Homo sapiens
ugucuaguuuugaaguauagca

SEQ ID NO: 79393 - RNA, 22 nt, Homo sapiens
ugucuuggacuugaaucucauu

SEQ ID NO: 79394 - RNA, 22 nt, Homo sapiens
aagagguaauaacaaagcuucu

SEQ ID NO: 79395 - RNA, 22 nt, Homo sapiens
aagagcucucuguagcauguga

SEQ ID NO: 79396 - RNA, 22 nt, Homo sapiens
aaauccauuuguucagcuaugc

SEQ ID NO: 79397 - RNA, 22 nt, Homo sapiens
aaguaaauauccgguaguccca

SEQ ID NO: 79398 - RNA, 22 nt, Homo sapiens
aauaucacaggguguacacuca

SEQ ID NO: 79399 - RNA, 22 nt, Homo sapiens
aaaagcuuagaugggcuuguau

SEQ ID NO: 79400 - RNA, 22 nt, Homo sapiens
accccauuugcacugagcccuu

SEQ ID NO: 79401 - RNA, 22 nt, Homo sapiens
acauaguagacacugaaaauau

SEQ ID NO: 79402 - RNA, 22 nt, Homo sapiens
acuuugguuuauagaauuuagg

SEQ ID NO: 79403 - RNA, 22 nt, Homo sapiens
agcacauuaguaucuaagaaca

SEQ ID NO: 79404 - RNA, 22 nt, Homo sapiens
agcaccaugggcugaguaagug

SEQ ID NO: 79405 - RNA, 18 nt, Homo sapiens
auaaacucaucauuuuua

SEQ ID NO: 79406 - RNA, 22 nt, Homo sapiens
augaaaguguguggaaacuuga

SEQ ID NO: 79407 - RNA, 22 nt, Homo sapiens
augaaacuggcuaauuuuugua

SEQ ID NO: 79408 - RNA, 22 nt, Homo sapiens
auagcuguugaauggaauauuc

SEQ ID NO: 79409 - RNA, 22 nt, Homo sapiens
auaauaucagguugugaugaug

SEQ ID NO: 79410 - RNA, 22 nt, Homo sapiens
auaugguuuuuggaagcauauc

SEQ ID NO: 79411 - RNA, 22 nt, Homo sapiens
auaugucuguuuagucuguaau

SEQ ID NO: 79412 - RNA, 20 nt, Homo sapiens
auaugguugugagugauuuu

SEQ ID NO: 79413 - RNA, 23 nt, Homo sapiens
auucaaguagugagagugguuau

SEQ ID NO: 79414 - RNA, 22 nt, Homo sapiens
auucaaggagucuucgucccaa

SEQ ID NO: 79415 - RNA, 22 nt, Homo sapiens
auguuguaguaugagucaaaau

SEQ ID NO: 79416 - RNA, 19 nt, Homo sapiens
augauugucuauggaggaa

SEQ ID NO: 79417 - RNA, 22 nt, Homo sapiens
augauacuguucuaagauuuuu

SEQ ID NO: 79418 - RNA, 22 nt, Homo sapiens
augaucuagaguaggaaacaga

SEQ ID NO: 79419 - RNA, 22 nt, Homo sapiens
caguaaauaucugagcgagguc

SEQ ID NO: 79420 - RNA, 22 nt, Homo sapiens
gagcaaugauugagccacugua

SEQ ID NO: 79421 - RNA, 22 nt, Homo sapiens
gcuuguguuugcuccccagaau

SEQ ID NO: 79422 - RNA, 22 nt, Homo sapiens
gcuuguguucaagucacccuua

SEQ ID NO: 79423 - RNA, 19 nt, Homo sapiens
gcuuagagacaaaacauug

SEQ ID NO: 79424 - RNA, 22 nt, Homo sapiens
ggaucacugugaaccgugucag

SEQ ID NO: 79425 - RNA, 22 nt, Homo sapiens
gauaaaucuuggcuagucuaag

SEQ ID NO: 79426 - RNA, 22 nt, Homo sapiens
gucuugcacuuaccuaagaacu

SEQ ID NO: 79427 - RNA, 17 nt, Homo sapiens
gugaaaucaucauuuuu

SEQ ID NO: 79428 - RNA, 22 nt, Homo sapiens
ggcacugugaugugagggggua

SEQ ID NO: 79429 - RNA, 18 nt, Homo sapiens
uauugcuugguuuggaga

SEQ ID NO: 79430 - RNA, 22 nt, Homo sapiens
ucaaauguuuguuuaaggcuua

SEQ ID NO: 79431 - RNA, 18 nt, Homo sapiens
uaucucauuucuuagguc

SEQ ID NO: 79432 - RNA, 22 nt, Homo sapiens
uaucacacaucaugguaaaucu

SEQ ID NO: 79433 - RNA, 22 nt, Homo sapiens
ucaacagugauggaaaguuaua

SEQ ID NO: 79434 - RNA, 22 nt, Homo sapiens
ucaauguaucuccaagaauuga

SEQ ID NO: 79435 - RNA, 22 nt, Homo sapiens
uaagacuguuggcaauuuuugc

SEQ ID NO: 79436 - RNA, 22 nt, Homo sapiens
uagauuaucccugauuugucca

SEQ ID NO: 79437 - RNA, 22 nt, Homo sapiens
uagauuaucucaccacucgagu

SEQ ID NO: 79438 - RNA, 22 nt, Homo sapiens
uagauuauccggcugggacaau

SEQ ID NO: 79439 - RNA, 22 nt, Homo sapiens
uaucaagauggauaaggauaga

SEQ ID NO: 79440 - RNA, 21 nt, Homo sapiens
ugucaagugggaaaacaugua

SEQ ID NO: 79441 - RNA, 22 nt, Homo sapiens
ugugaaacauggauagaacugg

SEQ ID NO: 79442 - RNA, 22 nt, Homo sapiens
uguaaacuaugagcugauuauu

SEQ ID NO: 79443 - RNA, 22 nt, Homo sapiens
ugguuagucuguguguauauau

SEQ ID NO: 79444 - RNA, 18 nt, Homo sapiens
ugaguucauuagacuucc

SEQ ID NO: 79445 - RNA, 22 nt, Homo sapiens
ugaguuaauuuuuguaucaugu

SEQ ID NO: 79446 - RNA, 22 nt, Homo sapiens
ugaguguccaccccuuucacag

SEQ ID NO: 79447 - RNA, 22 nt, Homo sapiens
uggaaguuaaauuaguugauga

SEQ ID NO: 79448 - RNA, 22 nt, Homo sapiens
ucagaugaugucccuguucuaa

SEQ ID NO: 79449 - RNA, 22 nt, Homo sapiens
ugaaagguuuaauucugugaga

SEQ ID NO: 79450 - RNA, 22 nt, Homo sapiens
ugagauauugggaguaauguca

SEQ ID NO: 79451 - RNA, 22 nt, Homo sapiens
uugaaagcuaucucaaaucgcu

SEQ ID NO: 79452 - RNA, 22 nt, Homo sapiens
uugagauaggaacucacuaugc

SEQ ID NO: 79453 - RNA, 22 nt, Homo sapiens
uugaguaguaaggauauuaucu

SEQ ID NO: 79454 - RNA, 22 nt, Homo sapiens
ugugaccaaaaucaacauaccu

SEQ ID NO: 79455 - RNA, 22 nt, Homo sapiens
uguuuaguuaagacauagaauu

SEQ ID NO: 79456 - RNA, 22 nt, Homo sapiens
uuagauaguacugaaugguucu

SEQ ID NO: 79457 - RNA, 22 nt, Homo sapiens
uuagauuauugagcauccacug

SEQ ID NO: 79458 - RNA, 22 nt, Homo sapiens
uuacuugagaugaguuggacaa

SEQ ID NO: 79459 - RNA, 22 nt, Homo sapiens
uuaguaucauccuucugcauuc

SEQ ID NO: 79460 - RNA, 23 nt, Homo sapiens
uuaguaaacucaaugacaccaca

SEQ ID NO: 79461 - RNA, 22 nt, Homo sapiens
aagaugauguuguguuuucacu

SEQ ID NO: 79462 - RNA, 22 nt, Homo sapiens
uugugauugagugauccuuguu

SEQ ID NO: 79463 - RNA, 22 nt, Homo sapiens
uuuaaggcacuucaugguuuca

SEQ ID NO: 79464 - RNA, 22 nt, Homo sapiens
uuuaaagcaugacgagaagaag

SEQ ID NO: 79465 - RNA, 22 nt, Homo sapiens
uuuaaagcuccaagcaugucug

SEQ ID NO: 79466 - RNA, 22 nt, Homo sapiens
uugaguuugaguauucuaaagc

SEQ ID NO: 79467 - RNA, 22 nt, Homo sapiens
uugauaguuuuaaaauuaaucu

SEQ ID NO: 79468 - RNA, 22 nt, Homo sapiens
uugauauucugagaagcugaag

SEQ ID NO: 79469 - RNA, 22 nt, Homo sapiens
gaaucaauugaucuaugugucu

SEQ ID NO: 79470 - RNA, 22 nt, Homo sapiens
gaaucacagauuaugaguaucu

SEQ ID NO: 79471 - RNA, 22 nt, Homo sapiens
cugaaucauugcauuaucaagg

SEQ ID NO: 79472 - RNA, 22 nt, Homo sapiens
gacuauguuaccuuacacauca

SEQ ID NO: 79473 - RNA, 22 nt, Homo sapiens
gauauguaaaaauuauaucuga

SEQ ID NO: 79474 - RNA, 22 nt, Homo sapiens
gaugauauuugagucauuagaa

SEQ ID NO: 79475 - RNA, 22 nt, Homo sapiens
gagguacgaaauacacuguacu

SEQ ID NO: 79476 - RNA, 22 nt, Homo sapiens
caauugcacucuuagguguaca

SEQ ID NO: 79477 - RNA, 22 nt, Homo sapiens
auuauuagucggccagcuguua

SEQ ID NO: 79478 - RNA, 22 nt, Homo sapiens
auuauuaguuguugaaugaagu

SEQ ID NO: 79479 - RNA, 22 nt, Homo sapiens
auucaaggacuggauugcggga

SEQ ID NO: 79480 - RNA, 20 nt, Homo sapiens
auucaaguaugccuugagaa

SEQ ID NO: 79481 - RNA, 22 nt, Homo sapiens
auucaagugaugugauucuucu

SEQ ID NO: 79482 - RNA, 22 nt, Homo sapiens
cagcacauuacaaguacuuggu

SEQ ID NO: 79483 - RNA, 22 nt, Homo sapiens
cuagucacauuuucaucaaaua

SEQ ID NO: 79484 - RNA, 22 nt, Homo sapiens
acauaugaguacaugugccaug

SEQ ID NO: 79485 - RNA, 22 nt, Homo sapiens
acauccauuugcuuuauuugcu

SEQ ID NO: 79486 - RNA, 22 nt, Homo sapiens
acgguauagauuguauccuagg

SEQ ID NO: 79487 - RNA, 22 nt, Homo sapiens
aauugcaccaucuagaucaaga

SEQ ID NO: 79488 - RNA, 22 nt, Homo sapiens
agguaauuuucccagagggaaa

SEQ ID NO: 79489 - RNA, 22 nt, Homo sapiens
agaguauagcaacuuaguaaaa

SEQ ID NO: 79490 - RNA, 22 nt, Homo sapiens
aguaaagcaucagcuagaugug

SEQ ID NO: 79491 - RNA, 22 nt, Homo sapiens
aguucaaugcucuuucuacuau

SEQ ID NO: 79492 - RNA, 17 nt, Homo sapiens
auaaacucaucauuuuu

SEQ ID NO: 79493 - RNA, 22 nt, Homo sapiens
aucauacuguuuugauuacugu

SEQ ID NO: 79494 - RNA, 22 nt, Homo sapiens
aucacacucaccuucuguccuu

SEQ ID NO: 79495 - RNA, 22 nt, Homo sapiens
aucaagcuugacuccuuaaagg

SEQ ID NO: 79496 - RNA, 23 nt, Homo sapiens
auauaguagaugugcaguaacau

SEQ ID NO: 79497 - RNA, 22 nt, Homo sapiens
augaaaucacugugaugcccua

SEQ ID NO: 79498 - RNA, 22 nt, Homo sapiens
augaacagagccuugagaaccu

SEQ ID NO: 79499 - RNA, 22 nt, Homo sapiens
augaaagugauaaaugucucua

SEQ ID NO: 79500 - RNA, 22 nt, Homo sapiens
augagauuguuugugugaaaua

SEQ ID NO: 79501 - RNA, 22 nt, Homo sapiens
augguuugugcuccuauaagaa

SEQ ID NO: 79502 - RNA, 22 nt, Homo sapiens
ugauagaucugggcaaaguaaa

SEQ ID NO: 79503 - RNA, 22 nt, Homo sapiens
ugacuaggaaauuagaacuuuu

SEQ ID NO: 79504 - RNA, 22 nt, Homo sapiens
ugacuugaucauuacacauucu

SEQ ID NO: 79505 - RNA, 22 nt, Homo sapiens
ucuaucacagugauguuccaga

SEQ ID NO: 79506 - RNA, 22 nt, Homo sapiens
ucacaagugagaggaauuagau

SEQ ID NO: 79507 - RNA, 22 nt, Homo sapiens
uaaaguuauugccccucaguua

SEQ ID NO: 79508 - RNA, 22 nt, Homo sapiens
uaaauugcauaaguacaaauga

SEQ ID NO: 79509 - RNA, 19 nt, Homo sapiens
uaaguagaugacugaugcu

SEQ ID NO: 79510 - RNA, 22 nt, Homo sapiens
uagucaaaucugaaggaaauuu

SEQ ID NO: 79511 - RNA, 21 nt, Homo sapiens
uauagcagcacgauuuauaau

SEQ ID NO: 79512 - RNA, 22 nt, Homo sapiens
uauagcuuaaaguuuagauccu

SEQ ID NO: 79513 - RNA, 22 nt, Homo sapiens
uaucaucauuggcaggugagaa

SEQ ID NO: 79514 - RNA, 22 nt, Homo sapiens
ucaaagucuucucaaguaacau

SEQ ID NO: 79515 - RNA, 22 nt, Homo sapiens
ucaacagugggcacuguaaaug

SEQ ID NO: 79516 - RNA, 22 nt, Homo sapiens
uauugcagugagauccaucugg

SEQ ID NO: 79517 - RNA, 17 nt, Homo sapiens
uauguaguacuuauaaa

SEQ ID NO: 79518 - RNA, 22 nt, Homo sapiens
guauuuguugcagcagcacuau

SEQ ID NO: 79519 - RNA, 22 nt, Homo sapiens
guaaguagcuuuagauauaaau

SEQ ID NO: 79520 - RNA, 22 nt, Homo sapiens
guaaaguaaagcacaucaaggu

SEQ ID NO: 79521 - RNA, 22 nt, Homo sapiens
guuauguuauguuauguuaugu

SEQ ID NO: 79522 - RNA, 22 nt, Homo sapiens
uuugagguguauggcaaguuga

SEQ ID NO: 79523 - RNA, 22 nt, Homo sapiens
uuugacuaccaggaauguucuu

SEQ ID NO: 79524 - RNA, 22 nt, Homo sapiens
uuacaggacuaagcagcuuugc

SEQ ID NO: 79525 - RNA, 18 nt, Homo sapiens
uuagguaggucuuugugu

SEQ ID NO: 79526 - RNA, 22 nt, Homo sapiens
uucaguaguaaguuggaacucu

SEQ ID NO: 79527 - RNA, 22 nt, Homo sapiens
uucaagucaaggaaagaggucu

SEQ ID NO: 79528 - RNA, 22 nt, Homo sapiens
uucauugaaugauuuuuagaag

SEQ ID NO: 79529 - RNA, 22 nt, Homo sapiens
ugucaucuagguauuaagcccc

SEQ ID NO: 79530 - RNA, 22 nt, Homo sapiens
uuggauugugaaaguauucucu

SEQ ID NO: 79531 - RNA, 22 nt, Homo sapiens
uucuuagguuaaggcugagaga

SEQ ID NO: 79532 - RNA, 22 nt, Homo sapiens
gugucacuguauaauauuuauu

SEQ ID NO: 79533 - RNA, 22 nt, Homo sapiens
gugucacugugaggauauugua

SEQ ID NO: 79534 - RNA, 22 nt, Homo sapiens
gucacugucuacuguaauagcc

SEQ ID NO: 79535 - RNA, 22 nt, Homo sapiens
ggacaagagacugggacacuga

SEQ ID NO: 79536 - RNA, 22 nt, Homo sapiens
ggcaaagagacaugcaucgggg

SEQ ID NO: 79537 - RNA, 21 nt, Homo sapiens
uagagcaacacacgcccucuc

SEQ ID NO: 79538 - RNA, 22 nt, Homo sapiens
uagagcaaugacucuggaaacc

SEQ ID NO: 79539 - RNA, 22 nt, Homo sapiens
ucuuaguuuagauuagcaauuc

SEQ ID NO: 79540 - RNA, 22 nt, Homo sapiens
ucuuugguaggaguaggaggcc

SEQ ID NO: 79541 - RNA, 18 nt, Homo sapiens
ugacaucauuuagaaagg

SEQ ID NO: 79542 - RNA, 22 nt, Homo sapiens
ugagacauauuauacugcuuuu

SEQ ID NO: 79543 - RNA, 22 nt, Homo sapiens
ugagacaaucucaucucaguga

SEQ ID NO: 79544 - RNA, 22 nt, Homo sapiens
ugagcaagaucuuuauaauuag

SEQ ID NO: 79545 - RNA, 22 nt, Homo sapiens
uggcaugucguuuuucauagga

SEQ ID NO: 79546 - RNA, 20 nt, Homo sapiens
uggcauguugguaugcaccc

SEQ ID NO: 79547 - RNA, 22 nt, Homo sapiens
ugggagugugcacaauuucagc

SEQ ID NO: 79548 - RNA, 22 nt, Homo sapiens
uggccaagagcacagauauugg

SEQ ID NO: 79549 - RNA, 23 nt, Homo sapiens
uggccaagauaaucucaguuuuc

SEQ ID NO: 79550 - RNA, 22 nt, Homo sapiens
augucacugcacuccugccugg

SEQ ID NO: 79551 - RNA, 22 nt, Homo sapiens
auggagugagaauggagguucc

SEQ ID NO: 79552 - RNA, 22 nt, Homo sapiens
auggaguguaauauugagagcu

SEQ ID NO: 79553 - RNA, 22 nt, Homo sapiens
auggaguguggaacugggaauc

SEQ ID NO: 79554 - RNA, 22 nt, Homo sapiens
aucaaaguaucucaauauggua

SEQ ID NO: 79555 - RNA, 22 nt, Homo sapiens
aucacaguuaagaggugaugaa

SEQ ID NO: 79556 - RNA, 22 nt, Homo sapiens
agagcuaguauuuacggagcau

SEQ ID NO: 79557 - RNA, 22 nt, Homo sapiens
agguagcauagcgggaauauca

SEQ ID NO: 79558 - RNA, 22 nt, Homo sapiens
aggguaguaggcuugggauugg

SEQ ID NO: 79559 - RNA, 22 nt, Homo sapiens
aaggcaguggcagaagauguca

SEQ ID NO: 79560 - RNA, 22 nt, Homo sapiens
cucauuggucagacgcgucggu

SEQ ID NO: 79561 - RNA, 22 nt, Homo sapiens
cauggucaccuuccaaguuauu

SEQ ID NO: 79562 - RNA, 22 nt, Homo sapiens
auuagguuaggcaaacuucugu

SEQ ID NO: 79563 - RNA, 22 nt, Homo sapiens
caaguguuggcuuguauacaaa

SEQ ID NO: 79564 - RNA, 20 nt, Homo sapiens
cagagcaaagcaguccuggc

SEQ ID NO: 79565 - RNA, 17 nt, Homo sapiens
gacgaucaucaggaggc

SEQ ID NO: 79566 - RNA, 22 nt, Homo sapiens
gauggaguaauguaaucuugag

SEQ ID NO: 79567 - RNA, 22 nt, Homo sapiens
gcauggaguggaaauucuuggg

SEQ ID NO: 79568 - RNA, 22 nt, Homo sapiens
cucucuguuugucuguuauugg

SEQ ID NO: 79569 - RNA, 22 nt, Homo sapiens
gacauguuucucucuguuuacu

SEQ ID NO: 79570 - RNA, 22 nt, Homo sapiens
gaagacauuuacaugggagacc

SEQ ID NO: 79571 - RNA, 22 nt, Homo sapiens
gaagacauuugcugcacguccu

SEQ ID NO: 79572 - RNA, 22 nt, Homo sapiens
gaaagauuuuaacugggagacu

SEQ ID NO: 79573 - RNA, 22 nt, Homo sapiens
aagcaaacaucagcuugguuaa

SEQ ID NO: 79574 - RNA, 22 nt, Homo sapiens
aagaggccuaggaaucuguauu

SEQ ID NO: 79575 - RNA, 22 nt, Homo sapiens
aagagcauuggauggggagauu

SEQ ID NO: 79576 - RNA, 22 nt, Homo sapiens
uuagguuguugccauugaaagu

SEQ ID NO: 79577 - RNA, 22 nt, Homo sapiens
uucauuggauguuacacugugu

SEQ ID NO: 79578 - RNA, 22 nt, Homo sapiens
uucauuggacuuguguucuuga

SEQ ID NO: 79579 - RNA, 21 nt, Homo sapiens
ugagacaauccuggucaauau

SEQ ID NO: 79580 - RNA, 20 nt, Homo sapiens
ugacaucagcaauguaauaa

SEQ ID NO: 79581 - RNA, 22 nt, Homo sapiens
ugacaucaccaccuccgucauc

SEQ ID NO: 79582 - RNA, 22 nt, Homo sapiens
ucagagcaaagacacuuuauca

SEQ ID NO: 79583 - RNA, 22 nt, Homo sapiens
ucuuaguuggaaugggauaagg

SEQ ID NO: 79584 - RNA, 22 nt, Homo sapiens
ucuuaggugaugauugauguga

SEQ ID NO: 79585 - RNA, 22 nt, Homo sapiens
ucuuaggugggccaucacccca

SEQ ID NO: 79586 - RNA, 22 nt, Homo sapiens
ucuuagguaagaaauuuuaaca

SEQ ID NO: 79587 - RNA, 22 nt, Homo sapiens
ucuugggugaguuugugaauaa

SEQ ID NO: 79588 - RNA, 22 nt, Homo sapiens
ucuuuggucaucaugggaagca

SEQ ID NO: 79589 - RNA, 22 nt, Homo sapiens
ugcuuaggcuuccuuacaguau

SEQ ID NO: 79590 - RNA, 21 nt, Homo sapiens
uggagugaagaguuuauugac

SEQ ID NO: 79591 - RNA, 20 nt, Homo sapiens
ugccaagaugacuauagcuc

SEQ ID NO: 79592 - RNA, 22 nt, Homo sapiens
ugggcagugggacagcuuugug

SEQ ID NO: 79593 - RNA, 22 nt, Homo sapiens
ugggaaugaaauuacauagcuu

SEQ ID NO: 79594 - RNA, 22 nt, Homo sapiens
ugucauuggacuucuuucaugg

SEQ ID NO: 79595 - RNA, 22 nt, Homo sapiens
ugucaucuagguuuuaagccuu

SEQ ID NO: 79596 - RNA, 22 nt, Homo sapiens
ugucaccuugcucauccucgga

SEQ ID NO: 79597 - RNA, 22 nt, Homo sapiens
uagcauggaggcggccauagug

SEQ ID NO: 79598 - RNA, 22 nt, Homo sapiens
uagggagugucuucauuuugua

SEQ ID NO: 79599 - RNA, 22 nt, Homo sapiens
ucaccaguaauaaagagccugc

SEQ ID NO: 79600 - RNA, 22 nt, Homo sapiens
gucuuuggaaaaaaugucuguu

SEQ ID NO: 79601 - RNA, 17 nt, Homo sapiens
gucuuugguugaguuua

SEQ ID NO: 79602 - RNA, 22 nt, Homo sapiens
gucuuagguuuaaucacuucua

SEQ ID NO: 79603 - RNA, 22 nt, Homo sapiens
guggaaaucucugugugacuua

SEQ ID NO: 79604 - RNA, 22 nt, Homo sapiens
gccaagauuuaauucaucaguu

SEQ ID NO: 79605 - RNA, 22 nt, Homo sapiens
ggauacaucuggacagccgaau

SEQ ID NO: 79606 - RNA, 22 nt, Homo sapiens
ggacagugaaugccacuccucc

SEQ ID NO: 79607 - RNA, 22 nt, Homo sapiens
ggacaucauuaccauggaccca

SEQ ID NO: 79608 - RNA, 22 nt, Homo sapiens
gagcuagguuuugaauccagac

SEQ ID NO: 79609 - RNA, 22 nt, Homo sapiens
gaggcaaguggccaccgagucu

SEQ ID NO: 79610 - RNA, 22 nt, Homo sapiens
gacaucauuaugagauuuaaac

SEQ ID NO: 79611 - RNA, 22 nt, Homo sapiens
cugugcuugauuauaugagugu

SEQ ID NO: 79612 - RNA, 19 nt, Homo sapiens
cugucacugaggaagacug

SEQ ID NO: 79613 - RNA, 22 nt, Homo sapiens
caaguguuuccuuaaauacuug

SEQ ID NO: 79614 - RNA, 22 nt, Homo sapiens
cacaguagaauagagcacuagg

SEQ ID NO: 79615 - RNA, 22 nt, Homo sapiens
cagagcaaugcuuuugcuuuga

SEQ ID NO: 79616 - RNA, 22 nt, Homo sapiens
ccagugguucccuguggccuga

SEQ ID NO: 79617 - RNA, 22 nt, Homo sapiens
cuagaggcacagccuaggcacu

SEQ ID NO: 79618 - RNA, 22 nt, Homo sapiens
cucauuggcuacugaggcuugu

SEQ ID NO: 79619 - RNA, 22 nt, Homo sapiens
aucacaguuuuaccauuuggua

SEQ ID NO: 79620 - RNA, 22 nt, Homo sapiens
aucauccagccccagaagggag

SEQ ID NO: 79621 - RNA, 22 nt, Homo sapiens
agucauuguugagaugguguca

SEQ ID NO: 79622 - RNA, 22 nt, Homo sapiens
aggcuaagaugacuccaccccc

SEQ ID NO: 79623 - RNA, 22 nt, Homo sapiens
aggauuagagacuucucuaccu

SEQ ID NO: 79624 - RNA, 22 nt, Homo sapiens
acaugcauauguuggaagaaag

SEQ ID NO: 79625 - RNA, 22 nt, Homo sapiens
acccgugcugaauauguaggug

SEQ ID NO: 79626 - RNA, 20 nt, Homo sapiens
aagacacuguccccacugga

SEQ ID NO: 79627 - RNA, 18 nt, Homo sapiens
ugucuuagagcuugaccc

SEQ ID NO: 79628 - RNA, 22 nt, Homo sapiens
ugucuugagagaggacaugacu

SEQ ID NO: 79629 - RNA, 22 nt, Homo sapiens
ugucacuuugccuucuggacuu

SEQ ID NO: 79630 - RNA, 22 nt, Homo sapiens
ugucauagauugcuuggaaaaa

SEQ ID NO: 79631 - RNA, 22 nt, Homo sapiens
uuagagcacugaucugcucuuu

SEQ ID NO: 79632 - RNA, 22 nt, Homo sapiens
uuaugguuuuucugugagaugg

SEQ ID NO: 79633 - RNA, 19 nt, Homo sapiens
uugucuuagaguugucauu

SEQ ID NO: 79634 - RNA, 19 nt, Homo sapiens
uugguugguuauuucuuac

SEQ ID NO: 79635 - RNA, 22 nt, Homo sapiens
uugucacugcacuccagucugg

SEQ ID NO: 79636 - RNA, 22 nt, Homo sapiens
ggacuagaggugaaaagaagac

SEQ ID NO: 79637 - RNA, 22 nt, Homo sapiens
gggaucaacuuauacuaaaauu

SEQ ID NO: 79638 - RNA, 22 nt, Homo sapiens
gucauugguucuguuuauguga

SEQ ID NO: 79639 - RNA, 22 nt, Homo sapiens
uagguaguuacacagcaaugua

SEQ ID NO: 79640 - RNA, 20 nt, Homo sapiens
uaagacaugguccacaugcc

SEQ ID NO: 79641 - RNA, 22 nt, Homo sapiens
uacccgucuacuuugaacaaaa

SEQ ID NO: 79642 - RNA, 22 nt, Homo sapiens
uacccguugaggguuugccagc

SEQ ID NO: 79643 - RNA, 20 nt, Homo sapiens
ugccaagaaaugaggguauu

SEQ ID NO: 79644 - RNA, 19 nt, Homo sapiens
ugccaagaaagucagcuua

SEQ ID NO: 79645 - RNA, 22 nt, Homo sapiens
ugccaagauuucaggaauuaag

SEQ ID NO: 79646 - RNA, 22 nt, Homo sapiens
ucugucuuugucaggaccagag

SEQ ID NO: 79647 - RNA, 22 nt, Homo sapiens
ucaguagcauugcuuauacagu

SEQ ID NO: 79648 - RNA, 22 nt, Homo sapiens
ucagguagcauuuuggaaacag

SEQ ID NO: 79649 - RNA, 22 nt, Homo sapiens
agauacaucuaugugucugugu

SEQ ID NO: 79650 - RNA, 22 nt, Homo sapiens
agacucauuuuuaucgagcaug

SEQ ID NO: 79651 - RNA, 22 nt, Homo sapiens
cagugcuuuaucaaguccucca

SEQ ID NO: 79652 - RNA, 18 nt, Homo sapiens
cuaagacacuuggcagag

SEQ ID NO: 79653 - RNA, 22 nt, Homo sapiens
gcaagacaugucuaagguuuaa

SEQ ID NO: 79654 - RNA, 22 nt, Homo sapiens
gacagugugauacuuagucuca

SEQ ID NO: 79655 - RNA, 22 nt, Homo sapiens
cuuagguuaugauaaauuuagu

SEQ ID NO: 79656 - RNA, 22 nt, Homo sapiens
cugucacuggggcacauguccc

SEQ ID NO: 79657 - RNA, 22 nt, Homo sapiens
cugucacugggaggggcagcag

SEQ ID NO: 79658 - RNA, 22 nt, Homo sapiens
cugucuagagggcacaugaugc

SEQ ID NO: 79659 - RNA, 22 nt, Homo sapiens
cugagcaaaaugaagacacgau

SEQ ID NO: 79660 - RNA, 22 nt, Homo sapiens
uggagcaaaguugaggccaagc

SEQ ID NO: 79661 - RNA, 23 nt, Homo sapiens
uggaggacaagcauggauaguga

SEQ ID NO: 79662 - RNA, 18 nt, Homo sapiens
ugcaaacauguguguguu

SEQ ID NO: 79663 - RNA, 22 nt, Homo sapiens
aacagagcuggugacuccaggu

SEQ ID NO: 79664 - RNA, 22 nt, Homo sapiens
ucugucuuguccucacccuaga

SEQ ID NO: 79665 - RNA, 22 nt, Homo sapiens
ucugucuugugguuugagugcc

SEQ ID NO: 79666 - RNA, 22 nt, Homo sapiens
ucugucuuugccuaaguuuguc

SEQ ID NO: 79667 - RNA, 22 nt, Homo sapiens
ucaguagcaugaaaacagacua

SEQ ID NO: 79668 - RNA, 22 nt, Homo sapiens
uugucacucuuccuaggguagg

SEQ ID NO: 79669 - RNA, 22 nt, Homo sapiens
uugucacuauaaauaagcauuu

SEQ ID NO: 79670 - RNA, 22 nt, Homo sapiens
uuuagguuacauauaauccaaa

SEQ ID NO: 79671 - RNA, 22 nt, Homo sapiens
gagacauguuugcuuaucugag

SEQ ID NO: 79672 - RNA, 22 nt, Homo sapiens
cuuagguuaaucaugaaccuuu

SEQ ID NO: 79673 - RNA, 22 nt, Homo sapiens
gagaucauguacuagaacaccu

SEQ ID NO: 79674 - RNA, 22 nt, Homo sapiens
gagaucauuaugucagggguca

SEQ ID NO: 79675 - RNA, 22 nt, Homo sapiens
cuauauacugccugcugauuag

SEQ ID NO: 79676 - RNA, 22 nt, Homo sapiens
ccugucuugauuaaauuacuua

SEQ ID NO: 79677 - RNA, 22 nt, Homo sapiens
auugucacuuaaaagugcaugu

SEQ ID NO: 79678 - RNA, 22 nt, Homo sapiens
auuggcuuuugaaagucugcga

SEQ ID NO: 79679 - RNA, 22 nt, Homo sapiens
auuagguuggugcaaaaguaau

SEQ ID NO: 79680 - RNA, 22 nt, Homo sapiens
auuagguuguugcaaaaguaau

SEQ ID NO: 79681 - RNA, 22 nt, Homo sapiens
auuagguuagugcaaaaguaau

SEQ ID NO: 79682 - RNA, 22 nt, Homo sapiens
auuagguuggugcaaaacuuuc

SEQ ID NO: 79683 - RNA, 22 nt, Homo sapiens
auuggaguuguacgcacgcuca

SEQ ID NO: 79684 - RNA, 22 nt, Homo sapiens
ggcuagagaauagugccacuaa

SEQ ID NO: 79685 - RNA, 22 nt, Homo sapiens
ggacaagaucuuccaccauuca

SEQ ID NO: 79686 - RNA, 19 nt, Homo sapiens
ggaaaugucuauuaagauc

SEQ ID NO: 79687 - RNA, 22 nt, Homo sapiens
gugucacuguugagaaguccac

SEQ ID NO: 79688 - RNA, 22 nt, Homo sapiens
guccaagacuaggaguuggcag

SEQ ID NO: 79689 - RNA, 22 nt, Homo sapiens
uaguagcaccucucaugagcuu

SEQ ID NO: 79690 - RNA, 20 nt, Homo sapiens
uagcagcagacagagggagg

SEQ ID NO: 79691 - RNA, 22 nt, Homo sapiens
uagcagcauaaauggacuaaga

SEQ ID NO: 79692 - RNA, 22 nt, Homo sapiens
uacaguagagaucagcaaacua

SEQ ID NO: 79693 - RNA, 22 nt, Homo sapiens
aaacagucuucuccugagggac

SEQ ID NO: 79694 - RNA, 22 nt, Homo sapiens
acacagucaaauccacuuggcu

SEQ ID NO: 79695 - RNA, 22 nt, Homo sapiens
acaguagcgcaaucucggcuca

SEQ ID NO: 79696 - RNA, 22 nt, Homo sapiens
aaaugguguuaguagaucuuua

SEQ ID NO: 79697 - RNA, 22 nt, Homo sapiens
agccaagacucuguuccccuug

SEQ ID NO: 79698 - RNA, 22 nt, Homo sapiens
agacaucauuugauggugggag

SEQ ID NO: 79699 - RNA, 22 nt, Homo sapiens
augcaaacaucugaagagacau

SEQ ID NO: 79700 - RNA, 22 nt, Homo sapiens
augcaaacaucauagaguguac

SEQ ID NO: 79701 - RNA, 22 nt, Homo sapiens
agucaagugggguuagauaguu

SEQ ID NO: 79702 - RNA, 21 nt, Homo sapiens
uuaaguaauuacccaacucuc

SEQ ID NO: 79703 - RNA, 22 nt, Homo sapiens
uauuguccacuuugcacugugu

SEQ ID NO: 79704 - RNA, 22 nt, Homo sapiens
aaaugcuuucuuggaccauuug

SEQ ID NO: 79705 - RNA, 22 nt, Homo sapiens
uucaagaauuaaaguggcuuuu

SEQ ID NO: 79706 - RNA, 19 nt, Homo sapiens
uuggucccuuuggguucuu

SEQ ID NO: 79707 - RNA, 22 nt, Homo sapiens
uugagauggagucucgcacugu

SEQ ID NO: 79708 - RNA, 18 nt, Homo sapiens
uugcaaauucuucccugu

SEQ ID NO: 79709 - RNA, 22 nt, Homo sapiens
uugcagagaaauuucugguuua

SEQ ID NO: 79710 - RNA, 22 nt, Homo sapiens
uuauggauuuauauucuguagu

SEQ ID NO: 79711 - RNA, 22 nt, Homo sapiens
ugugguuuuucacauuuagaga

SEQ ID NO: 79712 - RNA, 22 nt, Homo sapiens
ugguggcuuuucguagguucac

SEQ ID NO: 79713 - RNA, 22 nt, Homo sapiens
ugguguccugucucugcgcuug

SEQ ID NO: 79714 - RNA, 22 nt, Homo sapiens
uggugcccuguccuucuguggc

SEQ ID NO: 79715 - RNA, 22 nt, Homo sapiens
uuugcugagucugacuucaugg

SEQ ID NO: 79716 - RNA, 22 nt, Homo sapiens
cugauugucaucaauauuauua

SEQ ID NO: 79717 - RNA, 18 nt, Homo sapiens
cugccagugugcucuccg

SEQ ID NO: 79718 - RNA, 22 nt, Homo sapiens
cugguuguuacaugcuugccag

SEQ ID NO: 79719 - RNA, 22 nt, Homo sapiens
cuuguuguggaggggagugcag

SEQ ID NO: 79720 - RNA, 22 nt, Homo sapiens
gagaugcaccuugucacguuuc

SEQ ID NO: 79721 - RNA, 22 nt, Homo sapiens
gagacauugacuuuguuccaga

SEQ ID NO: 79722 - RNA, 22 nt, Homo sapiens
gaucugugugauuggaugcauu

SEQ ID NO: 79723 - RNA, 22 nt, Homo sapiens
caguggaugaacaagaagugau

SEQ ID NO: 79724 - RNA, 22 nt, Homo sapiens
cacaguguuacugguaugaagu

SEQ ID NO: 79725 - RNA, 22 nt, Homo sapiens
cacauagucccugcuaaucuuc

SEQ ID NO: 79726 - RNA, 21 nt, Homo sapiens
acugauguuugaaauucgcug

SEQ ID NO: 79727 - RNA, 22 nt, Homo sapiens
acucugucuaguuguaaaauuu

SEQ ID NO: 79728 - RNA, 22 nt, Homo sapiens
acaccuguggucccaguaacuu

SEQ ID NO: 79729 - RNA, 22 nt, Homo sapiens
augauguccacagggguguuca

SEQ ID NO: 79730 - RNA, 22 nt, Homo sapiens
augaccaaugggcagagcuaga

SEQ ID NO: 79731 - RNA, 22 nt, Homo sapiens
augccuaagacccuguggggga

SEQ ID NO: 79732 - RNA, 22 nt, Homo sapiens
auggauguucuagggaugugau

SEQ ID NO: 79733 - RNA, 23 nt, Homo sapiens
aucacuguuaacaauuucuuccu

SEQ ID NO: 79734 - RNA, 22 nt, Homo sapiens
aucacugugauuucuacugugc

SEQ ID NO: 79735 - RNA, 22 nt, Homo sapiens
ucaggugcaguggcucugaccu

SEQ ID NO: 79736 - RNA, 22 nt, Homo sapiens
ucaggugccuuggcuaauuguu

SEQ ID NO: 79737 - RNA, 22 nt, Homo sapiens
ucugguguuauucauguaguuu

SEQ ID NO: 79738 - RNA, 21 nt, Homo sapiens
ucuggcccccucaaaucucau

SEQ ID NO: 79739 - RNA, 21 nt, Homo sapiens
ucuggccccuccaaaucucau

SEQ ID NO: 79740 - RNA, 22 nt, Homo sapiens
ucuggccuagaacaauuaauua

SEQ ID NO: 79741 - RNA, 22 nt, Homo sapiens
ucuggccuacaaguaauuuuau

SEQ ID NO: 79742 - RNA, 20 nt, Homo sapiens
ucuggccccucuaaaucuca

SEQ ID NO: 79743 - RNA, 22 nt, Homo sapiens
ucucuguuuauuuuugguguau

SEQ ID NO: 79744 - RNA, 22 nt, Homo sapiens
uggaugacuguuauaugcauau

SEQ ID NO: 79745 - RNA, 18 nt, Homo sapiens
uggauaugaaauucugga

SEQ ID NO: 79746 - RNA, 22 nt, Homo sapiens
guugcugagucccaucaccaga

SEQ ID NO: 79747 - RNA, 22 nt, Homo sapiens
uagguuguucuauuaucuuaca

SEQ ID NO: 79748 - RNA, 22 nt, Homo sapiens
gugggaugaucgcuugagccca

SEQ ID NO: 79749 - RNA, 22 nt, Homo sapiens
gugccuucuagcuaugguuggc

SEQ ID NO: 79750 - RNA, 22 nt, Homo sapiens
ggagaucuuuaggaguuggacu

SEQ ID NO: 79751 - RNA, 22 nt, Homo sapiens
ggagaucuuugaaguguugugc

SEQ ID NO: 79752 - RNA, 20 nt, Homo sapiens
gcugugcuuaauacacuuuc

SEQ ID NO: 79753 - RNA, 17 nt, Homo sapiens
gcugauguuugcauuuu

SEQ ID NO: 79754 - RNA, 22 nt, Homo sapiens
aucuuugauuagacugauggau

SEQ ID NO: 79755 - RNA, 22 nt, Homo sapiens
auggcuuuaagagugucugaau

SEQ ID NO: 79756 - RNA, 22 nt, Homo sapiens
acuggcuguuaggaauuaccuc

SEQ ID NO: 79757 - RNA, 22 nt, Homo sapiens
aggugguauuuaaaauuauuug

SEQ ID NO: 79758 - RNA, 22 nt, Homo sapiens
agguuguguuugugauuagaua

SEQ ID NO: 79759 - RNA, 22 nt, Homo sapiens
accuggguguauguucaguuug

SEQ ID NO: 79760 - RNA, 22 nt, Homo sapiens
aaauaacugucagguucuggaa

SEQ ID NO: 79761 - RNA, 22 nt, Homo sapiens
aaggcucuuucaacguaaauua

SEQ ID NO: 79762 - RNA, 22 nt, Homo sapiens
uagguuaugauccaucuuggcu

SEQ ID NO: 79763 - RNA, 22 nt, Homo sapiens
uagguugucuucccagaguuuu

SEQ ID NO: 79764 - RNA, 22 nt, Homo sapiens
uagguuguccaucucuagaagc

SEQ ID NO: 79765 - RNA, 22 nt, Homo sapiens
uauugcaaauggugaucccagg

SEQ ID NO: 79766 - RNA, 21 nt, Homo sapiens
guggccuuuggagcaugucag

SEQ ID NO: 79767 - RNA, 21 nt, Homo sapiens
ggcauugugcccuugcucuag

SEQ ID NO: 79768 - RNA, 21 nt, Homo sapiens
ggcucuguggucucagguuuc

SEQ ID NO: 79769 - RNA, 22 nt, Homo sapiens
ggugagauaucugcugauguuu

SEQ ID NO: 79770 - RNA, 22 nt, Homo sapiens
guagaucucaacacuggaagua

SEQ ID NO: 79771 - RNA, 22 nt, Homo sapiens
auuugguuauggucauggacac

SEQ ID NO: 79772 - RNA, 22 nt, Homo sapiens
caccuagacuggagugcagugg

SEQ ID NO: 79773 - RNA, 22 nt, Homo sapiens
caguggaugauguuuucugugg

SEQ ID NO: 79774 - RNA, 22 nt, Homo sapiens
ccuguguuaugguuucuaaugu

SEQ ID NO: 79775 - RNA, 22 nt, Homo sapiens
cucugauggagauauacaagga

SEQ ID NO: 79776 - RNA, 22 nt, Homo sapiens
ccacauuggaaaggaucccccc

SEQ ID NO: 79777 - RNA, 19 nt, Homo sapiens
gcugguuguccacucucuc

SEQ ID NO: 79778 - RNA, 22 nt, Homo sapiens
cugauguagguggucugugauc

SEQ ID NO: 79779 - RNA, 22 nt, Homo sapiens
uugugggaggugauuagaucau

SEQ ID NO: 79780 - RNA, 22 nt, Homo sapiens
uuggucugcucugauguuuucu

SEQ ID NO: 79781 - RNA, 22 nt, Homo sapiens
uuugacacugggagugugggug

SEQ ID NO: 79782 - RNA, 22 nt, Homo sapiens
uuggcccugcugaccauucccu

SEQ ID NO: 79783 - RNA, 22 nt, Homo sapiens
uucugugcuuguggaugaagug

SEQ ID NO: 79784 - RNA, 22 nt, Homo sapiens
uucaaaguuggaggacaaacug

SEQ ID NO: 79785 - RNA, 22 nt, Homo sapiens
ugugccacuguucuguaaagug

SEQ ID NO: 79786 - RNA, 18 nt, Homo sapiens
uguuugguucugcgccuc

SEQ ID NO: 79787 - RNA, 22 nt, Homo sapiens
uguguagagaaauauuacuuau

SEQ ID NO: 79788 - RNA, 20 nt, Homo sapiens
ucaucaguuggugcucgcug

SEQ ID NO: 79789 - RNA, 22 nt, Homo sapiens
uccuugagucuuugcucagaug

SEQ ID NO: 79790 - RNA, 22 nt, Homo sapiens
aacagugcuucauucacacauu

SEQ ID NO: 79791 - RNA, 22 nt, Homo sapiens
ucugguuccuuggcuucggguc

SEQ ID NO: 79792 - RNA, 22 nt, Homo sapiens
ucucacacugaauguguguggg

SEQ ID NO: 79793 - RNA, 22 nt, Homo sapiens
ugaugguuuuauaagggagagu

SEQ ID NO: 79794 - RNA, 22 nt, Homo sapiens
ugaugugucaucugagagagug

SEQ ID NO: 79795 - RNA, 22 nt, Homo sapiens
ugauugacauucuuuggaguau

SEQ ID NO: 79796 - RNA, 22 nt, Homo sapiens
ugagaugguaaauuuuuguugu

SEQ ID NO: 79797 - RNA, 22 nt, Homo sapiens
uggagagucauuuauaguauuu

SEQ ID NO: 79798 - RNA, 22 nt, Homo sapiens
aaauggcuuugaggguaggaca

SEQ ID NO: 79799 - RNA, 19 nt, Homo sapiens
aauaaugccagaugucugu

SEQ ID NO: 79800 - RNA, 22 nt, Homo sapiens
aagguuguauuuaauauacugu

SEQ ID NO: 79801 - RNA, 22 nt, Homo sapiens
agcuugugauuuagagugagag

SEQ ID NO: 79802 - RNA, 22 nt, Homo sapiens
auaauaucagguugugaugaug

SEQ ID NO: 79803 - RNA, 22 nt, Homo sapiens
augagauuguuuguacuccaca

SEQ ID NO: 79804 - RNA, 22 nt, Homo sapiens
auggcccugaguucaauauauu

SEQ ID NO: 79805 - RNA, 22 nt, Homo sapiens
auggcuagauuguaugguaguu

SEQ ID NO: 79806 - RNA, 22 nt, Homo sapiens
auggcugugaaaugguaggugg

SEQ ID NO: 79807 - RNA, 22 nt, Homo sapiens
auugcaaagcguagacucuaaa

SEQ ID NO: 79808 - RNA, 22 nt, Homo sapiens
cugacaucuucaagugaggaga

SEQ ID NO: 79809 - RNA, 22 nt, Homo sapiens
cugcuaagagaaugagacuuag

SEQ ID NO: 79810 - RNA, 21 nt, Homo sapiens
cugguguuagcacuucuuccc

SEQ ID NO: 79811 - RNA, 22 nt, Homo sapiens
cacuguggauggaacuauguga

SEQ ID NO: 79812 - RNA, 22 nt, Homo sapiens
cauggcuuguauaagauucuca

SEQ ID NO: 79813 - RNA, 23 nt, Homo sapiens
cuguggugaggcccuagaaucug

SEQ ID NO: 79814 - RNA, 22 nt, Homo sapiens
cugugguuacguucuuugugcu

SEQ ID NO: 79815 - RNA, 22 nt, Homo sapiens
gagcucauuaaaguaggaccua

SEQ ID NO: 79816 - RNA, 22 nt, Homo sapiens
gcugauguuuucagguaauucu

SEQ ID NO: 79817 - RNA, 22 nt, Homo sapiens
ggagugucagaaacaguguccu

SEQ ID NO: 79818 - RNA, 22 nt, Homo sapiens
gcacauggccccaucgugccga

SEQ ID NO: 79819 - RNA, 22 nt, Homo sapiens
gagugcauugguggucaggugu

SEQ ID NO: 79820 - RNA, 22 nt, Homo sapiens
gauguguuuguuucuggaggag

SEQ ID NO: 79821 - RNA, 22 nt, Homo sapiens
gucucuugguuuagagcauuua

SEQ ID NO: 79822 - RNA, 22 nt, Homo sapiens
gucacugugaggaggggccagg

SEQ ID NO: 79823 - RNA, 22 nt, Homo sapiens
uaucugguuuuguuacagguuc

SEQ ID NO: 79824 - RNA, 22 nt, Homo sapiens
uauugcaauuggggaaacuggg

SEQ ID NO: 79825 - RNA, 22 nt, Homo sapiens
uguccugaagcuuuguuaugua

SEQ ID NO: 79826 - RNA, 23 nt, Homo sapiens
ugguuuguaagagauggacugga

SEQ ID NO: 79827 - RNA, 17 nt, Homo sapiens
ucuugugguucuugaau

SEQ ID NO: 79828 - RNA, 22 nt, Homo sapiens
ucuguuguuaucauaauauuga

SEQ ID NO: 79829 - RNA, 22 nt, Homo sapiens
ucuguguuugaucaagauugua

SEQ ID NO: 79830 - RNA, 22 nt, Homo sapiens
ucuggcuuuagcaugugggaag

SEQ ID NO: 79831 - RNA, 22 nt, Homo sapiens
ucugugguucaggcuggagugc

SEQ ID NO: 79832 - RNA, 21 nt, Homo sapiens
ucuguguugaucucacuggga

SEQ ID NO: 79833 - RNA, 22 nt, Homo sapiens
ucuguggucagaguccuuggcc

SEQ ID NO: 79834 - RNA, 22 nt, Homo sapiens
ucugagguaggugcauggauac

SEQ ID NO: 79835 - RNA, 22 nt, Homo sapiens
ucuggccccucccaaaucucau

SEQ ID NO: 79836 - RNA, 22 nt, Homo sapiens
ucacugugguuggaaggcuuaa

SEQ ID NO: 79837 - RNA, 22 nt, Homo sapiens
ugacuugauacauguuuuugaa

SEQ ID NO: 79838 - RNA, 22 nt, Homo sapiens
ugacuugaucauuacacauucu

SEQ ID NO: 79839 - RNA, 22 nt, Homo sapiens
ugacuugaaacgugaacagauc

SEQ ID NO: 79840 - RNA, 22 nt, Homo sapiens
uugagauggagucuugcacugu

SEQ ID NO: 79841 - RNA, 22 nt, Homo sapiens
uuagguuguugccauugaaagu

SEQ ID NO: 79842 - RNA, 22 nt, Homo sapiens
uuagguuguuucuggucuuagg

SEQ ID NO: 79843 - RNA, 22 nt, Homo sapiens
uguugcacuccagccuggguga

SEQ ID NO: 79844 - RNA, 22 nt, Homo sapiens
uguucuggagaguuuagucugg

SEQ ID NO: 79845 - RNA, 22 nt, Homo sapiens
uuuuugauuaauggguagacca

SEQ ID NO: 79846 - RNA, 22 nt, Homo sapiens
aagauagcuaagcuucuucuaa

SEQ ID NO: 79847 - RNA, 22 nt, Homo sapiens
uuguguuuuuaguagggaaggg

SEQ ID NO: 79848 - RNA, 22 nt, Homo sapiens
cucugacagugguuagcacugu

SEQ ID NO: 79849 - RNA, 22 nt, Homo sapiens
cugacaugcagccacugcaccu

SEQ ID NO: 79850 - RNA, 22 nt, Homo sapiens
caagugcuugaugaaugaucaa

SEQ ID NO: 79851 - RNA, 22 nt, Homo sapiens
caagugcuacagagaaaucuuu

SEQ ID NO: 79852 - RNA, 22 nt, Homo sapiens
auugcugagacauugcuaaucu

SEQ ID NO: 79853 - RNA, 22 nt, Homo sapiens
ccugguguuuugauggucgggu

SEQ ID NO: 79854 - RNA, 22 nt, Homo sapiens
ccauuugguuauguaucgaaac

SEQ ID NO: 79855 - RNA, 22 nt, Homo sapiens
aagcuguuguucauccugaauu

SEQ ID NO: 79856 - RNA, 22 nt, Homo sapiens
aaucugucuagacaaggagucu

SEQ ID NO: 79857 - RNA, 22 nt, Homo sapiens
aaugccuagugugugacaggug

SEQ ID NO: 79858 - RNA, 22 nt, Homo sapiens
agggccuuuguagauguacuca

SEQ ID NO: 79859 - RNA, 22 nt, Homo sapiens
aggcuuuauuacagggucucag

SEQ ID NO: 79860 - RNA, 22 nt, Homo sapiens
auggaucuuucugcuuuugaau

SEQ ID NO: 79861 - RNA, 22 nt, Homo sapiens
auguagauaucaagaggcauau

SEQ ID NO: 79862 - RNA, 22 nt, Homo sapiens
uggcauggaaagcuuuucauac

SEQ ID NO: 79863 - RNA, 19 nt, Homo sapiens
uggucaguucugggagcug

SEQ ID NO: 79864 - RNA, 22 nt, Homo sapiens
ugguagguuuauaaagaauuua

SEQ ID NO: 79865 - RNA, 22 nt, Homo sapiens
uggguucccugucuguccuuga

SEQ ID NO: 79866 - RNA, 22 nt, Homo sapiens
ugccuacuuugcaucugucagg

SEQ ID NO: 79867 - RNA, 20 nt, Homo sapiens
ugccugacacucuuugcuuc

SEQ ID NO: 79868 - RNA, 22 nt, Homo sapiens
ugacuugaggcucgcacaaguu

SEQ ID NO: 79869 - RNA, 23 nt, Homo sapiens
ugacuuguccagugauaguucgu

SEQ ID NO: 79870 - RNA, 22 nt, Homo sapiens
ucuguguugaucacacugggag

SEQ ID NO: 79871 - RNA, 21 nt, Homo sapiens
ucuaccuacugcucacaggcu

SEQ ID NO: 79872 - RNA, 22 nt, Homo sapiens
uacugaccugaaggccauggaa

SEQ ID NO: 79873 - RNA, 22 nt, Homo sapiens
uaucaccuugcaggagcuauga

SEQ ID NO: 79874 - RNA, 22 nt, Homo sapiens
gugaggcuuuuccuguuagacu

SEQ ID NO: 79875 - RNA, 22 nt, Homo sapiens
uugaggugaauuugcaggaugc

SEQ ID NO: 79876 - RNA, 22 nt, Homo sapiens
uugaguccccacacuggguccc

SEQ ID NO: 79877 - RNA, 22 nt, Homo sapiens
uugaugauguuucugccuugcc

SEQ ID NO: 79878 - RNA, 22 nt, Homo sapiens
uuggacuucuaacugacaugga

SEQ ID NO: 79879 - RNA, 19 nt, Homo sapiens
uuggcccugguucucuucu

SEQ ID NO: 79880 - RNA, 22 nt, Homo sapiens
uuggcuguguuuauaugcugga

SEQ ID NO: 79881 - RNA, 22 nt, Homo sapiens
uuuggucccaaugugauaaggu

SEQ ID NO: 79882 - RNA, 22 nt, Homo sapiens
uuugguccuccuacagggcagg

SEQ ID NO: 79883 - RNA, 22 nt, Homo sapiens
uuugguugccucuaugagccug

SEQ ID NO: 79884 - RNA, 22 nt, Homo sapiens
ugucauggauucugagucuggg

SEQ ID NO: 79885 - RNA, 22 nt, Homo sapiens
ugugucuugaauuuuguaugua

SEQ ID NO: 79886 - RNA, 22 nt, Homo sapiens
ugugcugaucgggcacgguguc

SEQ ID NO: 79887 - RNA, 22 nt, Homo sapiens
ugugccacugcacuccugggug

SEQ ID NO: 79888 - RNA, 22 nt, Homo sapiens
uguucuugagccuuuagaccua

SEQ ID NO: 79889 - RNA, 22 nt, Homo sapiens
uuaagaugcauuuugaaguuaa

SEQ ID NO: 79890 - RNA, 23 nt, Homo sapiens
uucugccacugaaaaugccucag

SEQ ID NO: 79891 - RNA, 22 nt, Homo sapiens
uucaaaguaaaaauguguucac

SEQ ID NO: 79892 - RNA, 22 nt, Homo sapiens
uuaguagagacgagcguuccac

SEQ ID NO: 79893 - RNA, 22 nt, Homo sapiens
uucacaaugccuuguugauggu

SEQ ID NO: 79894 - RNA, 22 nt, Homo sapiens
uucagugccuggaagucgugcu

SEQ ID NO: 79895 - RNA, 22 nt, Homo sapiens
uucucagcccccugacagucag

SEQ ID NO: 79896 - RNA, 21 nt, Homo sapiens
uucucaggguguguccuaccc

SEQ ID NO: 79897 - RNA, 22 nt, Homo sapiens
uucugagguuauauucucucaa

SEQ ID NO: 79898 - RNA, 22 nt, Homo sapiens
uucugcacaucgaucacaagau

SEQ ID NO: 79899 - RNA, 19 nt, Homo sapiens
uucucugguuguacuaccc

SEQ ID NO: 79900 - RNA, 23 nt, Homo sapiens
uucggcaaaugcccuuuaggcag

SEQ ID NO: 79901 - RNA, 22 nt, Homo sapiens
uuccuugaaacagucaagagaa

SEQ ID NO: 79902 - RNA, 22 nt, Homo sapiens
uuccuuaguuauuugguccccu

SEQ ID NO: 79903 - RNA, 22 nt, Homo sapiens
uucuagcaauggcagagugucu

SEQ ID NO: 79904 - RNA, 22 nt, Homo sapiens
uucuaugguuaccaggcuaguc

SEQ ID NO: 79905 - RNA, 22 nt, Homo sapiens
uuccacaauggcugaacuaguu

SEQ ID NO: 79906 - RNA, 22 nt, Homo sapiens
uuccaagugggaaacaaaaaug

SEQ ID NO: 79907 - RNA, 22 nt, Homo sapiens
uuccacaaugguugaacuagcu

SEQ ID NO: 79908 - RNA, 22 nt, Homo sapiens
uuccacaaugguugaacuaauu

SEQ ID NO: 79909 - RNA, 22 nt, Homo sapiens
uuccacaaugguugaacuaguu

SEQ ID NO: 79910 - RNA, 23 nt, Homo sapiens
uuccaccauugacuaguuacaua

SEQ ID NO: 79911 - RNA, 22 nt, Homo sapiens
uuccagagucaccuuucugucg

SEQ ID NO: 79912 - RNA, 22 nt, Homo sapiens
uuccaggugggcgugggccugg

SEQ ID NO: 79913 - RNA, 22 nt, Homo sapiens
uuccauguaguugagcaguuuu

SEQ ID NO: 79914 - RNA, 22 nt, Homo sapiens
uuccaguggaguaaauggacaa

SEQ ID NO: 79915 - RNA, 22 nt, Homo sapiens
uucccugugggcuggugcucca

SEQ ID NO: 79916 - RNA, 22 nt, Homo sapiens
uucccugugugcagaugggugu

SEQ ID NO: 79917 - RNA, 22 nt, Homo sapiens
uuccguguaguugagcaguuuu

SEQ ID NO: 79918 - RNA, 22 nt, Homo sapiens
uuccugcacuugcuugccuaug

SEQ ID NO: 79919 - RNA, 22 nt, Homo sapiens
uuccugucuuccaagagagauu

SEQ ID NO: 79920 - RNA, 22 nt, Homo sapiens
uuccuggaggggaaguguccaa

SEQ ID NO: 79921 - RNA, 22 nt, Homo sapiens
uucccagugguuagcucugguc

SEQ ID NO: 79922 - RNA, 22 nt, Homo sapiens
uucccuguaucuucugccaugu

SEQ ID NO: 79923 - RNA, 22 nt, Homo sapiens
uuaacagcacaugcugucccuu

SEQ ID NO: 79924 - RNA, 22 nt, Homo sapiens
uguuuuggaguggacuuugcau

SEQ ID NO: 79925 - RNA, 22 nt, Homo sapiens
uguucacaguguuucuuugaga

SEQ ID NO: 79926 - RNA, 22 nt, Homo sapiens
uguucauggauccaguggcuuc

SEQ ID NO: 79927 - RNA, 22 nt, Homo sapiens
uguuacaguguaggccuugggu

SEQ ID NO: 79928 - RNA, 22 nt, Homo sapiens
uguuugcuuaacguggagccag

SEQ ID NO: 79929 - RNA, 22 nt, Homo sapiens
uguugcacugguaauguacuga

SEQ ID NO: 79930 - RNA, 22 nt, Homo sapiens
uguugcauuugucaaggucaag

SEQ ID NO: 79931 - RNA, 22 nt, Homo sapiens
uguugcacuccauccugggcga

SEQ ID NO: 79932 - RNA, 22 nt, Homo sapiens
uguugcacuccagccugggcaa

SEQ ID NO: 79933 - RNA, 22 nt, Homo sapiens
uguugcacuccagccuagguga

SEQ ID NO: 79934 - RNA, 22 nt, Homo sapiens
ugugaagaugagaugacgcccu

SEQ ID NO: 79935 - RNA, 22 nt, Homo sapiens
ugugcuugaaauucaguuuuga

SEQ ID NO: 79936 - RNA, 22 nt, Homo sapiens
ugugcuugaauuuaguagcuua

SEQ ID NO: 79937 - RNA, 22 nt, Homo sapiens
ugugcuugcuucuucuccuagu

SEQ ID NO: 79938 - RNA, 22 nt, Homo sapiens
ugugcguguaagagaucuaggu

SEQ ID NO: 79939 - RNA, 22 nt, Homo sapiens
ugugcgcaucggggccugcuuc

SEQ ID NO: 79940 - RNA, 22 nt, Homo sapiens
ugugccacuguucuguaaagug

SEQ ID NO: 79941 - RNA, 22 nt, Homo sapiens
ugugccacugcacucugggcaa

SEQ ID NO: 79942 - RNA, 22 nt, Homo sapiens
ugugccacugcacucuggccug

SEQ ID NO: 79943 - RNA, 22 nt, Homo sapiens
uguggcuucuuugguucaguau

SEQ ID NO: 79944 - RNA, 22 nt, Homo sapiens
uguggcaaagucuugugaauau

SEQ ID NO: 79945 - RNA, 22 nt, Homo sapiens
uguggcaaauggucaggaagaa

SEQ ID NO: 79946 - RNA, 22 nt, Homo sapiens
ugugcuuguaaaggccagagca

SEQ ID NO: 79947 - RNA, 22 nt, Homo sapiens
ugugucuugcuggugccugcau

SEQ ID NO: 79948 - RNA, 22 nt, Homo sapiens
ugugucuuguuuauagcuuucu

SEQ ID NO: 79949 - RNA, 22 nt, Homo sapiens
ugucaugagucuccuccaucuu

SEQ ID NO: 79950 - RNA, 22 nt, Homo sapiens
ugucauggucacaggcauuuca

SEQ ID NO: 79951 - RNA, 20 nt, Homo sapiens
ugugaacuguagauagucuu

SEQ ID NO: 79952 - RNA, 19 nt, Homo sapiens
ugugaacaucacagagugu

SEQ ID NO: 79953 - RNA, 22 nt, Homo sapiens
ugugaacaugacagugggcuag

SEQ ID NO: 79954 - RNA, 22 nt, Homo sapiens
uuuguacuaugguuuuucacua

SEQ ID NO: 79955 - RNA, 22 nt, Homo sapiens
uuuguacuccuuggccagcuuc

SEQ ID NO: 79956 - RNA, 22 nt, Homo sapiens
uuuggccauaauuuuaauuggc

SEQ ID NO: 79957 - RNA, 22 nt, Homo sapiens
uuuggccauguuggucaggcug

SEQ ID NO: 79958 - RNA, 22 nt, Homo sapiens
uuuggcuuuuguaauaacugcc

SEQ ID NO: 79959 - RNA, 22 nt, Homo sapiens
uuuggcuuuugugauacguaau

SEQ ID NO: 79960 - RNA, 21 nt, Homo sapiens
uuuggcuucucugcugcagcc

SEQ ID NO: 79961 - RNA, 22 nt, Homo sapiens
uuuggcuuugagaagcagugga

SEQ ID NO: 79962 - RNA, 22 nt, Homo sapiens
uuuggcuuaagauugacugcaa

SEQ ID NO: 79963 - RNA, 22 nt, Homo sapiens
uuuggguuaguuuuccaaucuu

SEQ ID NO: 79964 - RNA, 22 nt, Homo sapiens
uuuguuugaagucgagacaacu

SEQ ID NO: 79965 - RNA, 22 nt, Homo sapiens
uuuguguccccacccaaaucuc

SEQ ID NO: 79966 - RNA, 22 nt, Homo sapiens
uuugugucccuacccgaaucuc

SEQ ID NO: 79967 - RNA, 22 nt, Homo sapiens
uuugugcuccuguugagaaucu

SEQ ID NO: 79968 - RNA, 21 nt, Homo sapiens
uuugugguuacugugugagcu

SEQ ID NO: 79969 - RNA, 22 nt, Homo sapiens
uuuguggaaugcucauguguag

SEQ ID NO: 79970 - RNA, 22 nt, Homo sapiens
uuugucuccuaagacucugugg

SEQ ID NO: 79971 - RNA, 22 nt, Homo sapiens
uuugugacacaaacacauauau

SEQ ID NO: 79972 - RNA, 22 nt, Homo sapiens
uuugugacuugcuucucagaau

SEQ ID NO: 79973 - RNA, 18 nt, Homo sapiens
uuugugcuccacaaagga

SEQ ID NO: 79974 - RNA, 22 nt, Homo sapiens
uuugugcuccuaugagaaucua

SEQ ID NO: 79975 - RNA, 22 nt, Homo sapiens
uuugucccuuugcaguggcaca

SEQ ID NO: 79976 - RNA, 21 nt, Homo sapiens
uuuguccaccuguguucacca

SEQ ID NO: 79977 - RNA, 22 nt, Homo sapiens
uuugagcaugcagauugccagg

SEQ ID NO: 79978 - RNA, 22 nt, Homo sapiens
uuugagaaugcuaccagagaag

SEQ ID NO: 79979 - RNA, 22 nt, Homo sapiens
uuugagcauguaguuuaacccu

SEQ ID NO: 79980 - RNA, 22 nt, Homo sapiens
uuugagcauuagggcaaaggca

SEQ ID NO: 79981 - RNA, 22 nt, Homo sapiens
uuugcuugaggucuagcuaccc

SEQ ID NO: 79982 - RNA, 18 nt, Homo sapiens
uugugccugagaaggugg

SEQ ID NO: 79983 - RNA, 22 nt, Homo sapiens
uugugccugguacauggagaaa

SEQ ID NO: 79984 - RNA, 22 nt, Homo sapiens
uugugcuuaauaaaaaguggua

SEQ ID NO: 79985 - RNA, 22 nt, Homo sapiens
uugugcuccagagacgggcucg

SEQ ID NO: 79986 - RNA, 20 nt, Homo sapiens
uugugcauugggccauuggg

SEQ ID NO: 79987 - RNA, 22 nt, Homo sapiens
uuguuugguugaguauggaagu

SEQ ID NO: 79988 - RNA, 22 nt, Homo sapiens
uuguuugguuagaugggcaagu

SEQ ID NO: 79989 - RNA, 22 nt, Homo sapiens
uuggcucugcgucucgcggacg

SEQ ID NO: 79990 - RNA, 22 nt, Homo sapiens
uuggccuccuggucauauccag

SEQ ID NO: 79991 - RNA, 22 nt, Homo sapiens
uuggccuuuucaaugccucuuu

SEQ ID NO: 79992 - RNA, 22 nt, Homo sapiens
uuguagcaaauguguaaacaaa

SEQ ID NO: 79993 - RNA, 22 nt, Homo sapiens
uuguaguguuuauucugucaac

SEQ ID NO: 79994 - RNA, 22 nt, Homo sapiens
uuguauguuuguucuuucagau

SEQ ID NO: 79995 - RNA, 22 nt, Homo sapiens
uuggcagcuguggaaucugggc

SEQ ID NO: 79996 - RNA, 22 nt, Homo sapiens
uuggcagcacgcaguccagagg

SEQ ID NO: 79997 - RNA, 22 nt, Homo sapiens
uuggcagcauuccagccaagca

SEQ ID NO: 79998 - RNA, 22 nt, Homo sapiens
uuggcaaguuucugucagcaaa

SEQ ID NO: 79999 - RNA, 22 nt, Homo sapiens
uuggacugggauggccgaggcu

SEQ ID NO: 80000 - RNA, 22 nt, Homo sapiens
uuggauggugauaugguuugga

SEQ ID NO: 80001 - RNA, 22 nt, Homo sapiens
uugcaugucauaacugauggaa

SEQ ID NO: 80002 - RNA, 22 nt, Homo sapiens
uuggacuggaacuauaccauug

SEQ ID NO: 80003 - RNA, 22 nt, Homo sapiens
uuggacugagaguuccaccauu

SEQ ID NO: 80004 - RNA, 22 nt, Homo sapiens
uugccuaggcuggagugcagua

SEQ ID NO: 80005 - RNA, 20 nt, Homo sapiens
uugccgagagaaagguguua

SEQ ID NO: 80006 - RNA, 22 nt, Homo sapiens
uugccuaggcuggaguguggug

SEQ ID NO: 80007 - RNA, 22 nt, Homo sapiens
uugaggucuuugagcaaacgca

SEQ ID NO: 80008 - RNA, 22 nt, Homo sapiens
uucugugguugaaaggagagau

SEQ ID NO: 80009 - RNA, 22 nt, Homo sapiens
uucuugaggcaugccgcuggga

SEQ ID NO: 80010 - RNA, 22 nt, Homo sapiens
uugauaauguuaacuuugguca

SEQ ID NO: 80011 - RNA, 22 nt, Homo sapiens
uugauauucugagaagcugaag

SEQ ID NO: 80012 - RNA, 22 nt, Homo sapiens
uuuuccagugggacucccauua

SEQ ID NO: 80013 - RNA, 22 nt, Homo sapiens
gugaggucguagucauaggcaa

SEQ ID NO: 80014 - RNA, 22 nt, Homo sapiens
gugagcacugaaagaaggcaag

SEQ ID NO: 80015 - RNA, 19 nt, Homo sapiens
gugagcacagacaauacaa

SEQ ID NO: 80016 - RNA, 22 nt, Homo sapiens
gugagcuccucuucugcugcag

SEQ ID NO: 80017 - RNA, 22 nt, Homo sapiens
guggaagguaaugcagcuuacu

SEQ ID NO: 80018 - RNA, 20 nt, Homo sapiens
guggaagauaaguagccuga

SEQ ID NO: 80019 - RNA, 21 nt, Homo sapiens
gugaucaugucacugcacucc

SEQ ID NO: 80020 - RNA, 22 nt, Homo sapiens
gugauacugcuuauuaauuuaa

SEQ ID NO: 80021 - RNA, 22 nt, Homo sapiens
gugauaucugagccugccccag

SEQ ID NO: 80022 - RNA, 22 nt, Homo sapiens
gucacugucuacuguaauagcc

SEQ ID NO: 80023 - RNA, 22 nt, Homo sapiens
gucacagaaaaagauaugccaa

SEQ ID NO: 80024 - RNA, 22 nt, Homo sapiens
gucacggagauauggauucgga

SEQ ID NO: 80025 - RNA, 22 nt, Homo sapiens
gucaccagcuguguuagccccu

SEQ ID NO: 80026 - RNA, 22 nt, Homo sapiens
gucacugccugaggcugaugca

SEQ ID NO: 80027 - RNA, 22 nt, Homo sapiens
gucguggagcucacagugugcc

SEQ ID NO: 80028 - RNA, 22 nt, Homo sapiens
gucgugcagaccucacagcauu

SEQ ID NO: 80029 - RNA, 18 nt, Homo sapiens
guccauuuguugguacac

SEQ ID NO: 80030 - RNA, 22 nt, Homo sapiens
gucgguguuuccugagaacgaa

SEQ ID NO: 80031 - RNA, 22 nt, Homo sapiens
guccuugaggcuuugacugugg

SEQ ID NO: 80032 - RNA, 22 nt, Homo sapiens
gucccaguggaaccuccaagcu

SEQ ID NO: 80033 - RNA, 22 nt, Homo sapiens
gugucacuguugagaaguccac

SEQ ID NO: 80034 - RNA, 22 nt, Homo sapiens
gugucacagcuuccaucucggu

SEQ ID NO: 80035 - RNA, 22 nt, Homo sapiens
guguaugguuguuguagagaga

SEQ ID NO: 80036 - RNA, 22 nt, Homo sapiens
guguauucaucuggcugaggua

SEQ ID NO: 80037 - RNA, 22 nt, Homo sapiens
gugugacagcuauagacaugau

SEQ ID NO: 80038 - RNA, 19 nt, Homo sapiens
gugugcauaucacagagca

SEQ ID NO: 80039 - RNA, 22 nt, Homo sapiens
gugucuccuguggagcuaugua

SEQ ID NO: 80040 - RNA, 22 nt, Homo sapiens
guggcacaauuaaguagcuauu

SEQ ID NO: 80041 - RNA, 22 nt, Homo sapiens
guggacugggagagauaguucc

SEQ ID NO: 80042 - RNA, 22 nt, Homo sapiens
guggacguguguccccauggcu

SEQ ID NO: 80043 - RNA, 22 nt, Homo sapiens
guggaauauaaagcaucgugua

SEQ ID NO: 80044 - RNA, 22 nt, Homo sapiens
guggacggagguugcagugagc

SEQ ID NO: 80045 - RNA, 22 nt, Homo sapiens
guucagguauucuggaacagag

SEQ ID NO: 80046 - RNA, 22 nt, Homo sapiens
guucaucagggauacuggcuua

SEQ ID NO: 80047 - RNA, 22 nt, Homo sapiens
guucaguuugcugaugcguuga

SEQ ID NO: 80048 - RNA, 22 nt, Homo sapiens
guguucaaauucugacagagag

SEQ ID NO: 80049 - RNA, 22 nt, Homo sapiens
gugugcacaaucuggcaugugc

SEQ ID NO: 80050 - RNA, 22 nt, Homo sapiens
gugugcaugucuuuuuaguagg

SEQ ID NO: 80051 - RNA, 22 nt, Homo sapiens
guguggaacucaauacaacgca

SEQ ID NO: 80052 - RNA, 20 nt, Homo sapiens
gugugcauuucagauuuugg

SEQ ID NO: 80053 - RNA, 22 nt, Homo sapiens
gugugcucaucacaugcaauag

SEQ ID NO: 80054 - RNA, 22 nt, Homo sapiens
ggcaaagagacaugcaucgggg

SEQ ID NO: 80055 - RNA, 22 nt, Homo sapiens
ggaucacugugaaccgugucag

SEQ ID NO: 80056 - RNA, 22 nt, Homo sapiens
ggcaaagaugaccauuacuuuu

SEQ ID NO: 80057 - RNA, 22 nt, Homo sapiens
ggcagguaaggagugggagccu

SEQ ID NO: 80058 - RNA, 22 nt, Homo sapiens
ggcagcgugguggauugaaaau

SEQ ID NO: 80059 - RNA, 22 nt, Homo sapiens
ggcauugugauccaccagccuu

SEQ ID NO: 80060 - RNA, 22 nt, Homo sapiens
ggcauguugauagguagaugua

SEQ ID NO: 80061 - RNA, 21 nt, Homo sapiens
ggcauugugcccuugcucuag

SEQ ID NO: 80062 - RNA, 22 nt, Homo sapiens
ggcccaguugcgggugguaccg

SEQ ID NO: 80063 - RNA, 22 nt, Homo sapiens
gggcgagaaucggcugcucagc

SEQ ID NO: 80064 - RNA, 23 nt, Homo sapiens
gggcuagaugagagcuuccuggg

SEQ ID NO: 80065 - RNA, 22 nt, Homo sapiens
ggcgguguugauggcccccaca

SEQ ID NO: 80066 - RNA, 22 nt, Homo sapiens
ggcccugauacaaguaaggucu

SEQ ID NO: 80067 - RNA, 22 nt, Homo sapiens
ggacacaucaugugaccaaggu

SEQ ID NO: 80068 - RNA, 22 nt, Homo sapiens
ggacagaugggcucccgggucu

SEQ ID NO: 80069 - RNA, 22 nt, Homo sapiens
ggacagugaaugccacuccucc

SEQ ID NO: 80070 - RNA, 22 nt, Homo sapiens
ggacaucauuaccauggaccca

SEQ ID NO: 80071 - RNA, 22 nt, Homo sapiens
ggagugugauucaguauaauau

SEQ ID NO: 80072 - RNA, 22 nt, Homo sapiens
ggaauugcaucaaaugcaggua

SEQ ID NO: 80073 - RNA, 22 nt, Homo sapiens
ggaagccugcacucgggcaggg

SEQ ID NO: 80074 - RNA, 22 nt, Homo sapiens
gcggguguuuuacccuugcaga

SEQ ID NO: 80075 - RNA, 22 nt, Homo sapiens
gccgagagauuuggaaugggga

SEQ ID NO: 80076 - RNA, 22 nt, Homo sapiens
gcccuguguuuggguaugguca

SEQ ID NO: 80077 - RNA, 22 nt, Homo sapiens
gccccgggugaugcagccguca

SEQ ID NO: 80078 - RNA, 22 nt, Homo sapiens
gcccgugagacuggaagcaaga

SEQ ID NO: 80079 - RNA, 22 nt, Homo sapiens
gcccagcguucagggaggggcu

SEQ ID NO: 80080 - RNA, 22 nt, Homo sapiens
gcccaguagcaguacaucccuu

SEQ ID NO: 80081 - RNA, 22 nt, Homo sapiens
guaaagacacaugcacacguau

SEQ ID NO: 80082 - RNA, 22 nt, Homo sapiens
guaaggcuguuaucuucacguc

SEQ ID NO: 80083 - RNA, 22 nt, Homo sapiens
guaagagcauguaguggcucua

SEQ ID NO: 80084 - RNA, 22 nt, Homo sapiens
guagagugcugggcacuggcuc

SEQ ID NO: 80085 - RNA, 22 nt, Homo sapiens
guagagguagacuuccuugucu

SEQ ID NO: 80086 - RNA, 22 nt, Homo sapiens
ggucagaaagacaggcauucag

SEQ ID NO: 80087 - RNA, 22 nt, Homo sapiens
guauuuguugcagcagcacuau

SEQ ID NO: 80088 - RNA, 18 nt, Homo sapiens
guauuccagccugaguga

SEQ ID NO: 80089 - RNA, 22 nt, Homo sapiens
guagcagccacacuugauaacu

SEQ ID NO: 80090 - RNA, 22 nt, Homo sapiens
guagcagucacauagcagauug

SEQ ID NO: 80091 - RNA, 22 nt, Homo sapiens
guaggcacugaguguuuuacag

SEQ ID NO: 80092 - RNA, 22 nt, Homo sapiens
guagugcaguuugagaaucagu

SEQ ID NO: 80093 - RNA, 22 nt, Homo sapiens
uaucaucauuggcaggugagaa

SEQ ID NO: 80094 - RNA, 22 nt, Homo sapiens
uagucagcaauguucauguucu

SEQ ID NO: 80095 - RNA, 22 nt, Homo sapiens
uagugcaguggcuccaucucag

SEQ ID NO: 80096 - RNA, 22 nt, Homo sapiens
uagcaguauggagcgaggccca

SEQ ID NO: 80097 - RNA, 20 nt, Homo sapiens
uagguuuucacagaauugcc

SEQ ID NO: 80098 - RNA, 19 nt, Homo sapiens
uagcagcaugauuuauaau

SEQ ID NO: 80099 - RNA, 22 nt, Homo sapiens
uagcagccaggaagggcuggcu

SEQ ID NO: 80100 - RNA, 20 nt, Homo sapiens
uagcagcagacagagggagg

SEQ ID NO: 80101 - RNA, 22 nt, Homo sapiens
uagcagcaucucuggcuucuac

SEQ ID NO: 80102 - RNA, 22 nt, Homo sapiens
uagcagcaccccacucuacugg

SEQ ID NO: 80103 - RNA, 22 nt, Homo sapiens
uagcagaauaacuugccagccu

SEQ ID NO: 80104 - RNA, 23 nt, Homo sapiens
uagcacuuuuuacauauggacau

SEQ ID NO: 80105 - RNA, 22 nt, Homo sapiens
uagcagaauauaccucuuacuu

SEQ ID NO: 80106 - RNA, 22 nt, Homo sapiens
uauggauuucauuagacuugag

SEQ ID NO: 80107 - RNA, 22 nt, Homo sapiens
uaugagcaaaaugaggguuagu

SEQ ID NO: 80108 - RNA, 19 nt, Homo sapiens
uaugagcuaugacaugcau

SEQ ID NO: 80109 - RNA, 22 nt, Homo sapiens
uaugcacaugugccugggugug

SEQ ID NO: 80110 - RNA, 22 nt, Homo sapiens
uauugcauauuauucuaguggc

SEQ ID NO: 80111 - RNA, 22 nt, Homo sapiens
uauugccuugccuacuuuucca

SEQ ID NO: 80112 - RNA, 22 nt, Homo sapiens
uauugcuuuuaacccaaucucu

SEQ ID NO: 80113 - RNA, 22 nt, Homo sapiens
uauugcuuuacucucuuauccu

SEQ ID NO: 80114 - RNA, 22 nt, Homo sapiens
ucaaagacacacaaggagaagg

SEQ ID NO: 80115 - RNA, 22 nt, Homo sapiens
uacucaguagucuguugcuguc

SEQ ID NO: 80116 - RNA, 22 nt, Homo sapiens
uacuccccuuguucugugagcu

SEQ ID NO: 80117 - RNA, 22 nt, Homo sapiens
uacuacagccugagcgacugag

SEQ ID NO: 80118 - RNA, 22 nt, Homo sapiens
uacugcacuccaggcucaccug

SEQ ID NO: 80119 - RNA, 22 nt, Homo sapiens
uacagcacugugcauagugguu

SEQ ID NO: 80120 - RNA, 20 nt, Homo sapiens
uacacguguagcauucucua

SEQ ID NO: 80121 - RNA, 22 nt, Homo sapiens
uacacacguguguauauauaca

SEQ ID NO: 80122 - RNA, 22 nt, Homo sapiens
uagagcaaugacucuggaaacc

SEQ ID NO: 80123 - RNA, 18 nt, Homo sapiens
uagagcacaagcuuuggc

SEQ ID NO: 80124 - RNA, 21 nt, Homo sapiens
uagagcaacacacgcccucuc

SEQ ID NO: 80125 - RNA, 21 nt, Homo sapiens
uagagagcaauaccuccagag

SEQ ID NO: 80126 - RNA, 22 nt, Homo sapiens
uagagcuacagcccucacuguc

SEQ ID NO: 80127 - RNA, 22 nt, Homo sapiens
uagagcuaguugcucacugcuu

SEQ ID NO: 80128 - RNA, 22 nt, Homo sapiens
uagagcacaagguagauuucua

SEQ ID NO: 80129 - RNA, 22 nt, Homo sapiens
uagacacugcauauuuuuuuaa

SEQ ID NO: 80130 - RNA, 21 nt, Homo sapiens
uagagcuuggcacagaguaga

SEQ ID NO: 80131 - RNA, 22 nt, Homo sapiens
uagcaccacaaucaagauacag

SEQ ID NO: 80132 - RNA, 22 nt, Homo sapiens
uagcaccaggguugacugaccu

SEQ ID NO: 80133 - RNA, 20 nt, Homo sapiens
uagcacaucuggcuguagag

SEQ ID NO: 80134 - RNA, 22 nt, Homo sapiens
uagcacaugucagguaauuugc

SEQ ID NO: 80135 - RNA, 22 nt, Homo sapiens
uagcacagggaauugguucucu

SEQ ID NO: 80136 - RNA, 17 nt, Homo sapiens
uagcacagugccuggua

SEQ ID NO: 80137 - RNA, 22 nt, Homo sapiens
uagcacagugucauucuaggua

SEQ ID NO: 80138 - RNA, 19 nt, Homo sapiens
uagaugucuuugcauagau

SEQ ID NO: 80139 - RNA, 22 nt, Homo sapiens
uaagucacuccagguuaaagug

SEQ ID NO: 80140 - RNA, 22 nt, Homo sapiens
uacaacacugguucgacaugug

SEQ ID NO: 80141 - RNA, 19 nt, Homo sapiens
uaacacaguuguguuugag

SEQ ID NO: 80142 - RNA, 22 nt, Homo sapiens
uaacaacauucuaacugacggc

SEQ ID NO: 80143 - RNA, 22 nt, Homo sapiens
uaacagcucuacagcugcucuu

SEQ ID NO: 80144 - RNA, 22 nt, Homo sapiens
uaacaggcaaggucacaccuug

SEQ ID NO: 80145 - RNA, 22 nt, Homo sapiens
uaaagcuuggauuuaggcuaau

SEQ ID NO: 80146 - RNA, 22 nt, Homo sapiens
guugauguugcagucuugagga

SEQ ID NO: 80147 - RNA, 22 nt, Homo sapiens
guugagcaaacagcuuaacagu

SEQ ID NO: 80148 - RNA, 19 nt, Homo sapiens
guugacacuggcucuucag

SEQ ID NO: 80149 - RNA, 20 nt, Homo sapiens
guucccuguaggugugcgga

SEQ ID NO: 80150 - RNA, 22 nt, Homo sapiens
guuccuuguagaugcuggauau

SEQ ID NO: 80151 - RNA, 22 nt, Homo sapiens
ucucagcacagucagggcgccu

SEQ ID NO: 80152 - RNA, 22 nt, Homo sapiens
ucugugguucaggcuggagugc

SEQ ID NO: 80153 - RNA, 22 nt, Homo sapiens
ucucagugaauguggaaaaagc

SEQ ID NO: 80154 - RNA, 22 nt, Homo sapiens
ucucagcggacaggccggccag

SEQ ID NO: 80155 - RNA, 21 nt, Homo sapiens
ucuguguugaucucacuggga

SEQ ID NO: 80156 - RNA, 22 nt, Homo sapiens
ucuguguugaugcucauuaauu

SEQ ID NO: 80157 - RNA, 20 nt, Homo sapiens
ucuugaacuuagucaacagg

SEQ ID NO: 80158 - RNA, 22 nt, Homo sapiens
ucuuugguagaagcuauuuuau

SEQ ID NO: 80159 - RNA, 22 nt, Homo sapiens
ucuuugccuaacccaaggucau

SEQ ID NO: 80160 - RNA, 22 nt, Homo sapiens
ucuuugauaagauccagaagaa

SEQ ID NO: 80161 - RNA, 22 nt, Homo sapiens
ucuugcaccuacaugcuuuguc

SEQ ID NO: 80162 - RNA, 22 nt, Homo sapiens
ucuuugaguuauugugcagacu

SEQ ID NO: 80163 - RNA, 22 nt, Homo sapiens
ugaaaaguuguugaaggcuuca

SEQ ID NO: 80164 - RNA, 22 nt, Homo sapiens
ugaaacacacauugcccuuuau

SEQ ID NO: 80165 - RNA, 22 nt, Homo sapiens
ucuuuguuuucugauccugaag

SEQ ID NO: 80166 - RNA, 22 nt, Homo sapiens
ucuuuguguaggucaaucuggc

SEQ ID NO: 80167 - RNA, 22 nt, Homo sapiens
ucuuuguguucaggagccacgu

SEQ ID NO: 80168 - RNA, 22 nt, Homo sapiens
ucuuuguuagaacccucuccuu

SEQ ID NO: 80169 - RNA, 22 nt, Homo sapiens
ucuuuguugcauaggcuuguuc

SEQ ID NO: 80170 - RNA, 22 nt, Homo sapiens
ugagaacauggagaacccccca

SEQ ID NO: 80171 - RNA, 16 nt, Homo sapiens
ugagaacaugugauau

SEQ ID NO: 80172 - RNA, 17 nt, Homo sapiens
ugagaacaugugguauu

SEQ ID NO: 80173 - RNA, 18 nt, Homo sapiens
ugagaacauguguacaca

SEQ ID NO: 80174 - RNA, 22 nt, Homo sapiens
ugacuugaguaacuggcucagg

SEQ ID NO: 80175 - RNA, 18 nt, Homo sapiens
ugacuguccagguggacc

SEQ ID NO: 80176 - RNA, 22 nt, Homo sapiens
ugacugugcagcuccaucaggg

SEQ ID NO: 80177 - RNA, 22 nt, Homo sapiens
ugacucgaggcgccuccagucc

SEQ ID NO: 80178 - RNA, 22 nt, Homo sapiens
ugacggaggacaccugcggaau

SEQ ID NO: 80179 - RNA, 19 nt, Homo sapiens
ugaccagggacagaaacca

SEQ ID NO: 80180 - RNA, 22 nt, Homo sapiens
ugacggaggcauuggaagcuug

SEQ ID NO: 80181 - RNA, 22 nt, Homo sapiens
ugacuagcgauccccuuucuag

SEQ ID NO: 80182 - RNA, 22 nt, Homo sapiens
ugacagugugagauccugucuc

SEQ ID NO: 80183 - RNA, 22 nt, Homo sapiens
ugacaugauuguauauuuagaa

SEQ ID NO: 80184 - RNA, 21 nt, Homo sapiens
ugacauguugguguucugcac

SEQ ID NO: 80185 - RNA, 22 nt, Homo sapiens
ugaaggacauaaggcagaguga

SEQ ID NO: 80186 - RNA, 21 nt, Homo sapiens
ugaaguguaaccgugcagggc

SEQ ID NO: 80187 - RNA, 22 nt, Homo sapiens
ugacaguguccuccuccugaga

SEQ ID NO: 80188 - RNA, 22 nt, Homo sapiens
ugacaguguccucauucccaac

SEQ ID NO: 80189 - RNA, 22 nt, Homo sapiens
ugaagggcauuguuuugccaaa

SEQ ID NO: 80190 - RNA, 22 nt, Homo sapiens
ugaaggacauucuaugguagau

SEQ ID NO: 80191 - RNA, 20 nt, Homo sapiens
ucaaggcaggaacuguacau

SEQ ID NO: 80192 - RNA, 22 nt, Homo sapiens
ucaaguaauacucccaucuugg

SEQ ID NO: 80193 - RNA, 22 nt, Homo sapiens
ucaaguaguaacuaacugugac

SEQ ID NO: 80194 - RNA, 22 nt, Homo sapiens
ucaagugcauaugcuaacgguu

SEQ ID NO: 80195 - RNA, 22 nt, Homo sapiens
ucaagcaauucgccugucucag

SEQ ID NO: 80196 - RNA, 21 nt, Homo sapiens
ucaaggaguauacguaugcca

SEQ ID NO: 80197 - RNA, 22 nt, Homo sapiens
ucaaggcacuagcugagcugca

SEQ ID NO: 80198 - RNA, 22 nt, Homo sapiens
ucacaauggcugaacuaauuua

SEQ ID NO: 80199 - RNA, 22 nt, Homo sapiens
ucacgcugcugcaaccagccug

SEQ ID NO: 80200 - RNA, 22 nt, Homo sapiens
ucaccguguaucauuucauccg

SEQ ID NO: 80201 - RNA, 22 nt, Homo sapiens
ucagauguuucuuuaacgcaug

SEQ ID NO: 80202 - RNA, 22 nt, Homo sapiens
ucagcaccauguaacaauugau

SEQ ID NO: 80203 - RNA, 20 nt, Homo sapiens
ucagcagucuggagcagagg

SEQ ID NO: 80204 - RNA, 22 nt, Homo sapiens
ucagcagugccccacucuacug

SEQ ID NO: 80205 - RNA, 22 nt, Homo sapiens
ucagaucauauucuucgcugcu

SEQ ID NO: 80206 - RNA, 18 nt, Homo sapiens
ucaccuugaugcuggguc

SEQ ID NO: 80207 - RNA, 22 nt, Homo sapiens
ucagugaacgaggaggagggug

SEQ ID NO: 80208 - RNA, 22 nt, Homo sapiens
ucagucuuuuaccauuaaguau

SEQ ID NO: 80209 - RNA, 22 nt, Homo sapiens
ucagugccucaguuuuuaaaga

SEQ ID NO: 80210 - RNA, 22 nt, Homo sapiens
ucagugcgugcauagccuggau

SEQ ID NO: 80211 - RNA, 22 nt, Homo sapiens
ucagugccauugccauaugagu

SEQ ID NO: 80212 - RNA, 22 nt, Homo sapiens
ucagugcaggaaucucuagcca

SEQ ID NO: 80213 - RNA, 22 nt, Homo sapiens
uccccgucacacgcaggcuuac

SEQ ID NO: 80214 - RNA, 22 nt, Homo sapiens
ucccgaggacaucugggggcaa

SEQ ID NO: 80215 - RNA, 22 nt, Homo sapiens
ucccugaagcugcagcaacaca

SEQ ID NO: 80216 - RNA, 22 nt, Homo sapiens
uccacugagcuagaccacuugg

SEQ ID NO: 80217 - RNA, 20 nt, Homo sapiens
uccacugagcgucacggcag

SEQ ID NO: 80218 - RNA, 22 nt, Homo sapiens
uccacguggucuaucuguccuu

SEQ ID NO: 80219 - RNA, 22 nt, Homo sapiens
uccccgaggcuggagugcagug

SEQ ID NO: 80220 - RNA, 22 nt, Homo sapiens
uccacaguggugaggugcagca

SEQ ID NO: 80221 - RNA, 22 nt, Homo sapiens
uccaauguaaucaucauugaau

SEQ ID NO: 80222 - RNA, 22 nt, Homo sapiens
uccaccgugggcugcggggcuc

SEQ ID NO: 80223 - RNA, 18 nt, Homo sapiens
uccacgugcuuuccagau

SEQ ID NO: 80224 - RNA, 22 nt, Homo sapiens
ucauuggauggaaugcucugua

SEQ ID NO: 80225 - RNA, 22 nt, Homo sapiens
ucauuggaugucugaaaugauu

SEQ ID NO: 80226 - RNA, 22 nt, Homo sapiens
ucagugucugcauucuuauugu

SEQ ID NO: 80227 - RNA, 22 nt, Homo sapiens
uccugagaauagaguugcaugu

SEQ ID NO: 80228 - RNA, 22 nt, Homo sapiens
ucccuguuaggcacagauuuau

SEQ ID NO: 80229 - RNA, 22 nt, Homo sapiens
uccuggcuccacuguuuauucc

SEQ ID NO: 80230 - RNA, 21 nt, Homo sapiens
uccugagagaggaguaacucu

SEQ ID NO: 80231 - RNA, 22 nt, Homo sapiens
uccugagagcagacccucuaua

SEQ ID NO: 80232 - RNA, 22 nt, Homo sapiens
uccuuuguuacaguuggcucug

SEQ ID NO: 80233 - RNA, 22 nt, Homo sapiens
ucgacacugaccuaguucagca

SEQ ID NO: 80234 - RNA, 22 nt, Homo sapiens
uccuugagucuuugcucagaug

SEQ ID NO: 80235 - RNA, 22 nt, Homo sapiens
uccuugguugauccugugcaga

SEQ ID NO: 80236 - RNA, 22 nt, Homo sapiens
uccuugagccucccagacucag

SEQ ID NO: 80237 - RNA, 22 nt, Homo sapiens
uccuugagccugggaguuauag

SEQ ID NO: 80238 - RNA, 22 nt, Homo sapiens
uccuugagccuuaaauuauaaa

SEQ ID NO: 80239 - RNA, 22 nt, Homo sapiens
uccuugagucugaacuuuggau

SEQ ID NO: 80240 - RNA, 22 nt, Homo sapiens
ucgguauuuuagaauugagacu

SEQ ID NO: 80241 - RNA, 19 nt, Homo sapiens
ucgcgccauucuccugccu

SEQ ID NO: 80242 - RNA, 22 nt, Homo sapiens
ucgcugcgaccuccaccucccg

SEQ ID NO: 80243 - RNA, 22 nt, Homo sapiens
ucgcgccauucuccugccucag

SEQ ID NO: 80244 - RNA, 22 nt, Homo sapiens
ucgcauggucuccaggcagcuc

SEQ ID NO: 80245 - RNA, 23 nt, Homo sapiens
ucgcagcauucaauaccaggcag

SEQ ID NO: 80246 - RNA, 22 nt, Homo sapiens
ucgcagcacgagcaugcaaggu
